(19) United States
(12) Patent Application Publication
(10) Pub. No.: US 2025/0034234 A1
(43) Pub. Date: Jan. 30, 2025

(54) PREDICTING COVID-19 ANTIBODIES AMONG SURVIVORS WITH DEEP RNA SEQUENCING

(71) Applicant: Rhode Island Hospital, Providence, RI (US)

(72) Inventors: Sean F. Monaghan, East Greenwich, RI (US); Alger M. Fredericks, East Providence, RI (US); Gerard J. Nau, Sharon, MA (US)

(21) Appl. No.: 18/708,467

(22) PCT Filed: Nov. 9, 2022
(86) PCT No.: PCT/US2022/079552

§ 371 Date: May 8, 2024

Related U.S. Application Data
(60) Provisional application No. 63/378,366, filed on Oct. 4, 2022.
(60) Provisional application No. 63/378,365, filed on Oct. 4, 2022.
(60) Provisional application No. 63/277,475, filed on Nov. 9, 2021.

(51) Int. Cl. C07K 16/10; C12N 15/10; C12Q 1/689; G01N 33/68

(52) U.S. Cl. CPC C07K 16/1003; C12N 15/1096; C12Q 1/689; G01N 33/6854; C07K 2317/565; G01N 2333/165

(57) ABSTRACT

The invention provides a method for treating COVID-19 patients. Therapeutic antibodies of certain types of antibodies to COVID-19 are identified early by targeted diagnostic testing can be given to other COVID-19 patients to enhance their recovery. This invention also identifies bacterial pathogens, particularly those that are resistant to antibiotics, faster. Data from deep RNA sequencing of human blood is used to create a faster diagnostic test for infections and associated antimicrobial resistance. This invention thus also allows for appropriate antibiotic treatment at an earlier time point. The invention further provides improvements to RNA sequencing that can make RNA sequencing useful for diagnostic and therapeutic methods of treating sepsis. RNA sequencing can identify bacterial pathogens directly from the blood of patients with those infections.

### REFERENCE TO RELATED APPLICATIONS

[0001] This application is a national phase filing under 35 U.S.C. § 371 of International Application No. PCT/US2022/079552 filed Nov. 9, 2022, which claims priority from U.S. Provisional Patent Application No. 63/277,475 filed Nov. 9, 2021, U.S. Provisional Patent Application No. 63/378,365 filed Oct. 4, 2022 and U.S. Provisional Patent Application No. 63/378,366 filed Oct. 4, 2022, the entire contents of which is hereby incorporated by reference herein.

### STATEMENT REGARDING FEDERALLY SPONSORED RESEARCH OR DEVELOPMENT

[0002] This invention was made with government support under T32 HL134625, P20 GM103652, and R35 GM142638 awarded by National Institutes of Health. The government has certain rights in the invention.

### TECHNICAL FIELD OF THE INVENTION

[0003] This invention generally relates to chemical analysis of biological material, using nucleic acid products used in the analysis of nucleic acids, e.g., primers or probes for diseases caused by alterations of genetic material. This invention also relates particularly to COVID-19, to RNA sequencings, to antibody identification, and to antibody function.

### SEQUENCE LISTING

[0004] The instant application contains a Sequence Listing which has been submitted electronically in XML format and is hereby incorporated by reference in its entirety. Said XML copy, created on Feb. 10, 2023, is named 405002-529001WO_SL.xml and is 59,603,000 bytes in size.

### BACKGROUND OF THE INVENTION

[0005] Severe acute respiratory syndrome coronavirus 2 (SARS-CoV-2) causing coronavirus disease 2019 (COVID-19) continues to cause critical illnesses requiring intensive care unit (ICU) admission. These ICU admissions are currently driven by the presence of COVID-19 variants. Krause et al., New England Journal of Medicine, 385, 179-86 (2021). Few direct treatments against COVID-19 are available. Willyard, Nature (2021). With COVID-19 variants comes further potential for escape from current treatments and vaccines. Acevedo et al., medRxiv, 2021.06.28.21259673 (2021); Starr et al., SARS-CoV-2 RBD antibodies that maximize breadth and resistance to escape. Nature (2021).

[0006] Quickly identifying novel antibodies to target the new variants could aid in the care of these patients, reducing viral load, and preventing hypoxemia. This identification is important for two reasons: First, most antibodies currently target the SARS-CoV-2 spike protein receptor-binding domain (RBD) and mutations in this region are present in variants. Starr et al., Science, 371, 850-4 (2021). Second, the de novo discovery and testing of antibodies is a very time-consuming process. Weinreich et al., New England Journal of Medicine, 384, 238-51 (2020).

[0007] The inventors previously proposed using RNA sequencing data from critically ill patients to identify antibodies for other diseases. Typically, only RNA sequencing data that aligns to the organism of interest is analyzed. However, some groups recently began analyzing data that is unmapped to an organism of interest. Mangul et al., Genome Biology, 19, 36 (2018). The inventors previously showed many uses for unmapped data. Monaghan et al., medRxiv (2021).

[0008] Variants of severe acute respiratory syndrome coronavirus 2 (SARS-CoV-2) could be ideal candidates for treatment by novel antibodies. However, development and testing of antibodies depends upon the presence of a COVID-19 variant and knowledge of the genetic sequence. Thus, there is a need in the biomedical art for deep RNA sequencing in patients with COVID-19 to elucidate immune antibodies produced during the course of the disease.

[0009] As a viral infection, COVID-19 can lead to sepsis. People with severe COVID-19 may experience symptoms such as fever and chills, difficulty breathing, pain or discomfort, and confusion. These are also common signs of sepsis, which happens when an infection causes your body's immune system to mount an extreme response. This excessive response can lead to tissue damage, organ failure, and even death if not treated promptly. See Based on Science, What is the connection between COVID-19 and sepsis? National Academies (Feb. 14, 2022). Notably, both COVID-19 patients and sepsis patients experience consumptive thrombocytopenia, haemolytic anaemia, vascular microthrombosis, multi-organ dysfunction syndrome, coagulopathy, septic shock, respiratory failure, fever, leukopenia, hypotension, leukocytosis, high cytokine production and high predisposition to opportunistic infections. Olwal et al., Front. Immunol. (February 2021).

[0010] Infection in any part of the body can cause sepsis. This includes infections of the lung (e.g., pneumonia), genitourinary tract (e.g., UTI), or abdomen (e.g., appendicitis).

[0011] RNA sequencing can be a valuable tool in personalizing the care of sepsis patients. Currently, RNA sequencing is done by first creating a DNA library. This conversion of DNA takes time. Direct RNA sequencing would allow faster processing times. There is a need in the biomedical art for diagnostic tests for diagnosing and treating sepsis.

### SUMMARY OF THE INVENTION

[0012] The invention provides a method and computational tool to identify antibodies produced by COVID-19 patients, such as patients being treated in a hospital intensive care unit. The invention uses the proposed structural classification of COVID-19 antibodies, such as described by Barnes et al., Nature, 588, 682-7 (2020), to categorize potential efficacious antibodies and provide a possible rationale for this effect.

[0013] In a first embodiment, the antibodies are generated by patients that survived severe COVID-19, which can inform future antibody or vaccine development. Patients that survive intensive care unit admission because of COVID-19 have a different antibody response as compared to non-survivors.

[0014] In a second embodiment, patients lacking certain types of antibodies to COVID-19 are identified early by targeted diagnostic testing.

[0015] In a third embodiment, the invention provides a method for treating COVID-19 patients. Therapeutic antibodies of certain types of antibodies to COVID-19 are identified early by targeted diagnostic testing can be given to other COVID-19 patients to enhance their recovery. In fifth embodiment, a cocktail of antibodies from TABLE 6 is used for treating COVID-19 patients, as a treatment in addition to COVID-19 vaccinations. In a sixth embodiment, a cocktail of antibodies from TABLE A4 is used for treating COVID-19 patients.

[0016] In one aspect, when looking at COVID-19 patients across several time points, the inventors identified what was shown to be a critical intervention point in patients with reduced levels of COVID-19 antibodies.

[0017] The invention also provides molecular diagnostic tests to overcome the limitations of conventional microbiological approaches for diagnosing and treating sepsis.

[0018] In a fourth embodiment and as a proof of principle, the inventors develop polymerase chain reaction (PCR) diagnostic tests for four common bacteria: Staphylococcus aureus, extra-intestinal Escherichia coli, Pseudomonas aeruginosa, and Haemophilus influenzae.

[0019] In a fifth embodiment, the inventors create tests of clinically relevant resistance genes associated with these four pathogens. These bacteria are pathogens of interest in the request for applications (RFA-AI-22-010) for bacteremia (S. aureus, E. coli, P. aeruginosa) and pneumonia (S. aureus, P. aeruginosa, H. influenzae). These pathogens are also the most common causes of bacteremia and hospital-acquired pneumonia at Rhode Island Hospital. These four pathogens have antimicrobial resistance attributable to specific genes requiring antibiotic management changes. These four pathogens are the top organisms that cause death due to resistance. Global burden of bacterial antimicrobial resistance in 2019 (2022).

[0020] In a sixth embodiment, the invention provides tests of clinically relevant resistance genes associated with other pathogens that cause sepsis.

[0021] In a seventh embodiment, the invention provides a diagnostic PCR test based on bacterial RNA. PCR tests were previously developed for respiratory pathogens. See Covert, Bashore, Edds, & Lewis (2021). PCR tests were also developed for identifying the DNA of bacteria like Staphylococcus aureus in targeted sites. Palavecino (2020). Pathogen identification was accomplished by sequencing cell-free DNA from blood. Camargo et al. (2019).

[0022] By contrast, in the diagnostic PCR test of the invention, the most abundant RNA targets are selected from the blood of patients with these infections, making the approach more sensitive than single-copy DNA targets. Antibiotic resistance correlates closely with gene expression. The risk of RNA degradation is significantly mitigated by stabilizing RNA. Because the targets are derived from RNA sequencing data, those RNAs are abundant and measurable in patients with infection.

[0023] In another aspect, the unmapped RNA reads from patients with infections that align with pathogens can inform a better diagnostic test. PCR targets for diagnostics come from a data set created from deep sequencing (>100 million reads) of the blood of patients with bacteremia or pneumonia. Pathogen identification is performed with standard culture techniques. The RNA sequences from the pathogens are typically discarded in transcription analysis because they would not align with the human genome. These “unmapped reads” are being identified in the blood of patients and aligned to a custom “genome” derived from them pathogens of interest to identify the causative organism. RNAs that align with resistance genes are also identified.

[0024] In an eighth embodiment (A1a), the invention provides a direct from blood, without the need for culture, reverse transcriptase polymerase chain reaction (RT-qPCR) test for bacteria causing bacteremia, specifically S. aureus, E. coli, P. aeruginosa, based on the RNA identified in patients with bacteremia caused by these organisms.

[0025] In a ninth embodiment (A1b), the invention provides a method to validate these RT-qPCR tests in samples from patients with and without bacteremia.

[0026] In a tenth embodiment (A2a), the invention provides a direct from blood, without the need for culture, reverse transcriptase polymerase chain reaction (RT-qPCR) test for bacteria causing pneumonia, specifically S. aureus, P. aeruginosa, H. influenzae, based on the RNA identified in patients with pneumonia caused by these organisms.

[0027] In an eleventh embodiment (A2b), the invention provides a method to validate these RT-qPCR tests in samples from patients with and without pneumonia.

[0028] In a twelfth embodiment (A3a), using the RNA from patients with infections, the invention provides an RT-PCR for the most common resistance genes expressed that would influence treatment for S. aureus, E. coli, P. aeruginosa, and H. influenzae.

[0029] In a thirteenth embodiment (A3b), the invention provides a method to validate these PCR tests for resistance genes in samples from patients with and without infections.

[0030] In a fourteenth embodiment, the invention provides a direct from blood RT-PCR test for bacteremia caused by S. aureus, E. coli, and P. aeruginosa without the need for culture with phenotypic microbial resistance identification.

[0031] In a fifteenth embodiment, the invention provides a direct from blood RT-PCR test for pneumonia caused by S. aureus, P. aeruginosa, and H. influenzae without the need for culture with phenotypic microbial resistance identification.

[0032] In a sixteenth embodiment, the invention provides that all tests can have a result in fewer than four hours from the time of sample collection.

[0033] In a seventeenth embodiment, the invention provides the ability to standardize and scale these tests for use in a clinical microbiology setting. See TABLE 3 below.

[0034] In another aspect, the discovery of genes, antibodies, and methods of the invention is a hypothesis-free method of investigation. See, Glass & Hall, A brief history of the hypothesis. Cell, Volume 134, Issue 3, pages 378-381 (Aug. 8, 2008); Glass, A critique of the hypothesis, and a defense of the question, as a framework for experimentation. Clinical Chemistry, Volume 56, Issue 7, pages 1080-1085 (Jul. 1, 2010).

[0035] In another aspect, the invention provides a direct form blood PCR panel (e.g., using the top twelve pathogens) that identifies the pathogens and resistance profile faster (fewer than four hours) than current bacteremia and hospital-acquired pneumonia techniques. This invention translates deep RNA sequencing data into a product: a rapid PCR to identify S. aureus, E. coli, P. aeruginosa, and H. influenza and potential resistance genes without the need for culture or specimens other than blood.

[0036] The following factors are improvements to RNA sequencing that can make RNA sequencing useful for diagnostic and therapeutic methods of treating sepsis. Optimizing the factors is being done in collaboration with an industry partner that provides sample and assay technologies for molecular diagnostics. The objective is to establish a standard set of testing conditions to be used on the system of the industry partner. These improvements are supported by the literature and preliminary data indicating that RNA sequencing can identify bacterial pathogens directly from the blood of patients with those infections.

[0037] First factor, decrease the cost of RNA collection tubes. The PAXgene Blood RNA Tubes (QIAGEN, Germantown, MD, USA; Cat. No./ID: 762165) are used for in vitro diagnostic testing (IVD). These tubes currently cost about $10/tube. If they are to be used with all blood cultures (˜30,000 at a single academic medical center), the cost would need to be reduced to $0.10/tube.

[0038] Second factor, increase the speed of RNA sequencing on machines. An Illumina machine takes about eighteen hours to obtain 350 million reads, not including processing time. For RNA sequencing to be impactful with sepsis, the RNA sequencing results are needed in <4 hours so effective antibiotic treatment can begin for the sepsis patients.

[0039] More recently, a new Illumina Machine (NovaSeq X+) was announced. This Illumina machine should be able to take only thirteen hours to obtain 1.6 billion reads, not including processing time. While this is an improvement, the goal is to make sequencing fast enough for sepsis. An ideal machine for me would get 100 million reads in an hour.

[0040] Third factor, increase the processing of RNA data. The inventors are processing 100 million data points. Physicians and medical laboratory personnel need to process these data within the <4-hour time frame for effective sepsis treatment results.

[0041] The commonly identified and organism-specific sequences (for S. aureus, E. coli, P. aeruginosa, and H. influenza) are the template for designing oligonucleotide primers for RT-qPCR tests. Future efforts to expand the diagnostic test to other pathogens may require RNA sequencing from patients with pneumonia due to other pathogens.

[0042] Fourth factor, direct RNA sequencing should be done for these assays. Currently, RNA sequencing is done by first creating a DNA library. This conversion of RNA to DNA takes time. Direct RNA sequencing allows faster processing times, to be completed in the 4-hour time frame. Focusing on RNA rather than DNA improves phenotypic correlation with antimicrobial resistance.

[0043] RNA sequencing can be a valuable tool in personalizing the care of sepsis patients. With these advances, this tool will be used by clinicians in the Intensive Care Unit caring for sepsis patients. The improvements described above should expand the technology from the research laboratory to the clinical microbiology laboratory.

[0044] The improvements listed above enable a direct from blood, without the need for culture, reverse transcriptase polymerase chain reaction (RT-qPCR) test for bacteria and methods to validate these RT-qPCR tests in samples from patients. RT-qPCR tests are useful in the diagnosis and treatment of sepsis. The improvements listed above also enable methods for combatting the scourge of drug-resistant bacteria.

### BRIEF DESCRIPTION OF THE DRAWINGS

[0045] For illustration, some embodiments of the invention are shown in the drawings described below. Like numerals in the drawings indicate like elements throughout. The invention is not limited to the precise arrangements, dimensions, and instruments shown.

[0046] FIG. 1 is a chart showing the total counts for CDR3 regions that aligned to the antibody C135 in survivors vs. non-survivors. Survivors had significantly more than non-survivors (15,059.4 vs. 1,412.7, p=0.016).

[0047] FIG. 2 is a pair of images showing the binding of C135 antibody and ACE2 to the SARS-CoV-2 spike trimer RBD. (A) Structure of Class 3 neutralizing antibody (C135) bound to the RBD of the spike protein (PDB: 7K8Z) with a cutout highlighting the intermolecular interactions (hydrogen bonds) between the light chain CDR3 (light blue) and the Spike RBD (purple). (B) Spike protein trimer with its RBD (purple) bound to the C135 Class 3 antibody (blue) and ACE2 (yellow), highlighting the distinct binding sites on opposite sides of the target RBD.

[0048] FIG. 3 shows the RT-qPCR validation of sequencing results. cDNA from patient RNA was tested for the SARS-CoV-2 N gene using real-time PCR. FIG. 3A is a map of the N gene showing the location of the peak of sequencing reads (red box) and primers directed to the peak or elsewhere in the gene (“off peak). FIG. 3B is a bar graph showing the relative expression level of peak and off-peak sequences in fifteen critically ill COVID-19 patients. The peak sequence is shown in red and off-peak in black.

[0049] TABLE A1 in the Appendix lists patient-derived light chain CDR3 sequences that were aligned to known CDR3 regions of previously identified neutralizing antibodies. CDR3 sequences with similar primary sequences to the CDR3 classifications were placed into categories. Table discloses SEQ ID NOS 54-64, 64-67, 65, 68, 57, and 69-71, respectively, in order of appearance.

[0050] TABLE A2 in the Appendix lists the antibodies Identified on Day 0 in the intensive care unit. Table discloses SEQ ID NOS 72-747, 8, 748-1704, 11, 1705-1714, 24, 1715-2269, 910, 2270-2295, 7, 2296-2330, 2018, 2331-2403, 26, 2404-2435, 2001, 2436-2455, 1511, 2456-2750, 33, 2751-2810, 356, 2811-2955, 527, 2956-3021, 1654, 3022-3137, 866, 3138-3259, 898, 3260-3473, 18, 3474-3523, 2285, 3524-3687, 1447, 3688-3722, 27, 3723-3802, 5, 3803-3875, 2018, 3876-3957, 2280, 3958-4114, 14, 4115-4151, 28, 4152-4170, 1626, 4171-4213, 2092, 4214-4475, 3550, 4476-4678, 6, 4679-4701, 2392, 4702-4738, 2280, 4739-4879, 1882, 4880-4935, 2018, 4936-4987, 20, 4988-5151, 19, 5152-5374, 467, 5375-5440, 2957, 5441-5452, 50, 5453-5502, 2783, 5503-5536, 2280, 5537, 38, 5538-5578, 2485, 5579-5586, 1555, 5587-5753, 4396, 5754-5762, 48, 5763-5778, 3563, 5779-5815, 467, 5816-5827, 235, 5828-5847, 2481, 5848-5962, 46, 2280, 5963-6045, 1263, 6046-6067, 2544, 6068-6109, 49, 6110-6148, 2426, 6149-6198, 898, 6199-6250, 23, 6251-6311, 235, 6312-6316, 898, 6317-6340, 5871, 6341-6355, 4691, 6356-6489, 261, 6490-6509, 6094, 6510-6679, 21, 6680-6789, 2226, 6790-6946, 15, 6947-6958, 9, 6959-6968, 856, 6969-7209, 4, 7210-7226, 6045, 7227-7284, 3867, 7285-7367, 2280, 7368-7518, 5614, 7519-7586, 2, 7587, 6022, 7588-7616, 1626, 7617-7718, 5359, 7719-8007, 1955, 8008-8067, 2426, 8068-8152, 53, 8153-8319, 39, 8320-8447, 45, 8448-8464, 982, 8465-8491, 898, 8492-8660, 4396, 8661-8814, 4826, 8815-9083, 3960, 9084-9141, 7411, 9142-9359, 2481, 9360-9578, 920, 9579-9666, 856, 9667-9681, 5834, 898, 9682-9712, 5903, 9713-9969, 25, 9970-9972, 2947, 9973-10005, 2564, 2426, 10006-10034, 6206, 10035-10083, 632, 10084-10097, 931, 10098-10147, 3, 10148-10153, 6186, 10154-10284, 2402, 10285-10289, 866, 10290-10546, 527, 10547-10823, 5906, 10824-10923, 2018, 10924-10931, 99, 10932-10994, 13, 10995-11007, 6148, 11008-11022, 916, 11023-11052, 3867, 11053-11193, 96, 11194-11493, 2559, 11494-11550, 9419, 11551-11690, 5356, 11691-11701, 9539, 11702-11790, 2356, 11791-11858, 2297, 11859-11941, 467, 11942-12194, 36, 12195-12215, 2437, 12216-12328, 2570, 12329-12333, 2580, 12334-12855, 2366, 12856-12953, 5825, 12954-13019, 5150, 13020-13140, 2419, 13141-13334, 2493, 13335-13391, 2426, 13392-13420, 10039, 13421-13424, 594, 13425-13442, 10075, 13443-13715, 10479, 13716-13765, 6148, 13766-13831, 2498, 13832-13873, 2392, 13874-13905, 1399, 13906-13985, 2018, 13986-14267, 5527, 14268-14305, 2559, 14306-14398, 2423, 14399-14681, 43, 14682-14762, 2564, 14763-14929, 2387, 14930-14946, 2402, 14947-15117, 2464, 15118-15161, 2451, 15162-15355, 13, 5903, 15356-15489, 10589, 15490-15579, 2335, 15580-15855, 23, 15856-15922, 235, 15923-15993, 9802, 15994-16241, 2481, 16242-16624, 4826, 16625-16742, 3867, 16743-16891, 2372, 16892-17025, 898, 17026-17151, 23, 17152-17246, 467, 17247-17250, 34, 17251-17270, 5834, 17271-17305, 6206, 17306-17308, 5903, 17309-17393, 5908, 17394-17448, 9956, 17449-17453, 11893, 17454-17580, 2426, 17581-17612, 2947, 17613-17639, 2559, 17640-17668, 2993, 17669-17769, 3162, 17770-17867, 15845, 17868-18157, 12626, 18158-18410, 6991, 18411-18751, 1447, 18752-18770, 11104, 18771-18887, 11578, 18888-18898, 16690, 18899-19238, 10879, 19239-19271, 15516, 19272-19273, 4016, 19274-19367, 4061, 19368-19411, 3596, 19412-19542, 2018, 19543-19600, 2485, 19601-19665, 3686, 19666-19690, 47, 19691-19716, 5575, 19717-19721, 12985, 19722-19854, 15154, 19855-19976, 14119, 19977-20019, 13191, 20020-20188, 37, 20189-20253, 15845, 20254-20339, 12772, 20340-20357, 23, 20358-20374, 467, 20375-20401, 2426, 20402-20481, 11894, 20482-20490, 12001, 20491-20517, 14041, 20518-20567, 6206, 20568, 10032, 20569-20691, 2559, 20692-20745, 10153, 20746-20844, 14903, 20845-20877, 5060, 20878-20892, 12217, 20893-21016, 17845, 21017-21107, 235, 21108-21143, 5039, 21144-21317, 10545, 21318-21319, 12174, 21320-21338, 6148, 21339-21379, 6991, 21380-21463, 42, 21464-21644, 19802, 21645-21764, 13411, 21765, 4826, 21766-21780, 11104, 21781-21820, 52, 21821-21857, 2018, 21858-21889, 5575, 21890-21910, 18502, 21911-21947, 5903, 21948-22039, 3867, 22040-22052, 51, 22053-22106, 41, 22107-22364, 14192, 22365-22556, 5527, 22557-22768, 5150, 22769-22814, 2481, 22815-23012, 15278, 23013-23026, 6186, 23027, 15845, 23028-23033, 5506, 23034-23066, 21706, 23067-23090, 2481, 23091-23104, 21673, 23105-23135, 17326, 23136-23170, 6148, 23171, 19793, 23172-23173, 4826, 23174-23181, 18763, 23182-23194, 5527, 23195-23196, 6206, 23197-23201, 44, 23202-23214, 5903, 23215-23250, 21871, 23251-23264, 5575, 23265-23278, 16048, 23279-23296, 13, 23297-23323, 15743, 23324-23375, 2426, 23376-23382, 19741, 23383, 35, 23384-23412, 5678, 23413-23512, 16529, 23513-23725, 5834, 23726-23786, 23300, 23787-23789, 23111, 23790-23842, 9750, 23843-23876, 11852, 23877-23924, 356, 23925-24006, 5980, 24007-24207, 2426, 24208-24319, 2559, 24320-24366, 2578, 24367-24405, 6206, 24406-24446, 12039, 24447-24623, 17326, 24624-24712, 5795, 24713-24724, 11912, 24725-24796, 2481, 24797-24853, 14101, 24854-24971, 5929, 24972-25200, 12278, 25201-25383, 5825, 25384-25405, 31, 25406-25409, 6148, 25410-25426, 22291, 25427-25469, 5835, 25470-25653, 23020, 25654-25661, 6198, 25662-25665, 16511, 25666-25756, 5724, 25757-25815, 5854, 25816-25973, 13941, 25974-26077, 30, 26078-26238, 5903, 26239-26504, 15845, 26505-26566, 15548, 26567-26697, 7411, 26698-26750, 29, 26751-26795, 22383, 26796-26967, 16512, 26968-27082, 18265, 27083-27098, 18976, 27099-27240, 11515, 27241-27297, 23312, 27298-27354, 19702, 27355-27409, 6145, 27410-27549, 23163, 23677, 27550-27562, 18448, 27563-27566, 5575, 27567-27582, 22, 27583-27624, 16503, 27625-27630, 11104, 27631, 6186, 27632, 22291, 27633-27672, 10, 27673-27677, 856, 27678-27680, 16844, 2957, 27681-27693, 5834-5835, 27694-27698, 11274, 27699-27702, 2481, 27703-27711, 21673, 27712-27738, 23344, 27739-27745, 12446, 7432, 27746-27762, 14746, 27763-27787, 898, 27788-27818, 6206, 27819-27830, 11449, 27831-27832, 15317, 27833-27855, 2426, 14610, 27856-27872, 16830, 27873-27882, 2559, 27883-27887, 2493, 27888, 20359, 27889-27938, 26311, 27939-27958, 23876, 27959-27960, 3867, 27961-27972, 6145, 27973-27975, 9603, 27976-27981, 26402, 27982-27995, 17134, 27996-28008, 6148, 28009-28020, 26841, and 28021-28042, respectively, in order of appearance.

[0051] TABLE A3 in the Appendix is in the Appendix lists the antibodies Identified on Day 3 in the intensive care unit. Table discloses SEQ ID NOS 28043-28061, 2256, 28062-28078, 92, 28079-28083, 96, 1933, 28084-28096, 2147, 28097-28102, 1163, 28103-28115, 5041, 28116-28118, 469, 28119-28120, 123, 920, 28121-28156, 1025, 28157-28172, 168, 28173-28174, 84, 28175-28181, 434, 28182, 172, 28183-28195, 279, 28196-28214, 203, 28215-28228, 746, 28229-28236, 1271, 28237-28246, 230, 28247-28258, 1672, 28259-28263, 1577, 243, 28264, 246, 28265-28267, 248, 28268-28278, 88, 28279-28281, 2247, 4818, 28282-28297, 261, 28298-28300, 1590, 1568, 28301-28324, 1287, 28325-28334, 290, 28335-28346, 297, 28347-28372, 1420, 28373-28377, 1106, 319, 28378-28389, 1329, 28390-28397, 1107, 28398-28403, 193, 28404, 1556, 28405-28408, 9776, 28409-28422, 2175, 28423-28424, 1995, 28425-28464, 370, 28465-28467, 611, 28468-28472, 741, 28473-28492, 385, 1611, 28493-28503, 22502, 28504-28505, 398, 28506-28517, 751, 28518-28521, 1334, 28522-28544, 422, 28545-28549, 425, 28550-28555, 862, 28556-28562, 138, 1925, 28563-28574, 441, 28575-28583, 226, 28584-28585, 448, 28586-28589, 451, 5033, 539, 28590-28595, 834, 17536, 28596-28608, 1527, 28609-28610, 461, 28611-28623, 467, 28624-28643, 479, 28644-28646, 481, 28647-28648, 1082, 318, 28649-28669, 1944, 28670, 1538, 28671-28681, 1953, 28682-28684, 1144, 28685, 508, 28686-28703, 536, 28704-28707, 527, 28708-28714, 492, 28715-28717, 1863, 28718-28721, 672, 28722, 538, 28723-28732, 167, 28733-28740, 1619, 28741-28742, 549, 28743-28745, 981, 28746-28829, 599, 28830-28833, 605, 28834-28853, 505, 28854-28862, 680, 28863-28874, 1226, 28875-28878, 635, 28879-28890, 643, 28891-28894, 768, 28895-28902, 1298, 28903-28931, 666, 28932-28933, 671, 28934-28946, 867, 28947-28948, 681, 28949-28953, 1985, 28954, 180, 28955-28963, 603, 28964-28969, 359, 28970-28973, 2234, 1883, 28974-28986, 831, 28987-28989, 710, 28990-28991, 1231, 28992-28997, 1179, 28998, 1743, 28999-29005, 1839, 725, 29006-29008, 727, 29009-29052, 3148, 29053-29059, 2032, 29060-29067, 730, 29068-29083, 780, 29084-29095, 430, 29096-29100, 793-794, 29101-29110, 803, 29111-29116, 2094, 29117-29132, 207, 29133-29134, 571, 29135-29138, 1845, 29139-29152, 2157, 29153-29158, 1687, 29159-29160, 827, 29161-29168, 212, 859, 29169-29189, 306, 1528, 29190-29222, 866, 1324, 29223-29226, 870, 29227-29254, 335, 29255, 886-887, 29256-29264, 895, 29265-29266, 898, 29267-29284, 909, 29285-29288, 913, 29289, 692, 29290, 23211, 29291-29314, 1322, 29315-29321, 769, 29322-29328, 940, 29329-29340, 946, 29341-29349, 951, 29350-29355, 313, 29356-29365, 962, 29366-29383, 975, 29384-29385, 2184, 29386-29397, 2036, 29398-29399, 1095, 29400-29402, 992, 29403-29421, 1005, 29422-29426, 1241, 29427-29429, 83, 29430-29435, 1015, 29436-29442, 966, 29443-29465, 1038, 29466-29469, 1440, 29470-29485, 113, 29486-29490, 220, 29491-29496, 1058, 29497, 715, 29498-29501, 234, 29502-29508, 1070, 29509-29510, 1661, 29511-29521, 1087, 29522, 1301, 29523-29524, 1666, 29525-29531, 2230, 29532-29536, 559, 29537, 285, 29538-29567, 2211, 29568-29610, 1151, 29611-29618, 2082, 29619-29630, 1366, 1792, 29631-29648, 99, 29649-29650, 1406, 29651-29662, 1371, 29663-29715, 1392, 1180, 29716-29721, 22767, 29722-29724, 1227, 29725, 273, 29726-29734, 1059, 1232, 29735-29742, 853, 29743-29754, 1242, 29755-29767, 1249, 29768, 1846, 29769-29782, 1832, 29783-29796, 1739, 482, 29797-29799, 1272, 29800-29819, 287, 29820-29846, 20697, 29847-29852, 1777, 29853-29866, 1039, 29867-29870, 1843, 29871, 2090, 29872-29876, 1862, 29877-29882, 1318, 29883-29889, 590, 29890-29920, 1338, 29921-29940, 1507, 29941-29960, 1368, 29961-29982, 304, 29983-29991, 722, 29992-29996, 1497, 29997-30000, 1267, 30001-30002, 1704, 30003-30011, 1399, 30012, 1393, 30013-30026, 1411, 30027-30072, 973, 30073, 1449, 30074-30075, 1638, 1641, 30076-30088, 1063, 30089-30093, 2117, 30094, 1467, 30095-30101, 321, 30102-30107, 1477, 30108-30125, 1045, 30126-30127, 1489, 443, 30128-30130, 2003, 30131-30132, 1494, 30133-30149, 1589, 30150-30157, 1506, 30158-30168, 1511, 30169-30171, 1097, 30172-30177, 1518-1519, 30178-30193, 20359, 30194-30196, 1531, 701, 30197-30224, 1543, 30225-30256, 1555, 30257-30286, 597, 30287-30295, 637, 30296, 1592, 30297-30318, 1608, 30319, 1048, 30320-30330, 1604, 30331-30332, 86, 449, 30333-30338, 1627, 30339-30358, 1295, 30359-30369, 1647, 30370-30396, 1286, 30397-30403, 707, 30404-30407, 1679, 30408-30411, 1684, 30412-30422, 1753, 30423-30426, 1691, 30427-30436, 495, 1778, 30437-30457, 1705, 30458-30470, 5085, 30471-30472, 1697, 30473-30476, 4384, 30477-30483, 1725, 30484-30489, 1730, 30490-30498, 1823, 30499-30507, 731, 30508-30534, 1044, 30535-30545, 1779, 30546, 1478, 1495, 30547, 310, 30548, 1036, 30549-30550, 1784, 30551-30553, 1978, 30554-30561, 1789, 30562-30563, 1790, 30564-30573, 22234, 30574-30581, 1585, 30582-30584, 1793-1794, 30585-30601, 1539, 30602-30613, 1562, 1667, 30614-30616, 1814, 30617, 1815, 30618, 763, 30619-30623, 1821, 30624-30627, 1309, 30628-30636, 1840, 30637-30657, 904, 30658-30694, 630, 30695-30708, 1385, 1866, 30709-30720, 5825, 30721-30728, 2201, 30729-30736, 1882, 30737-30739, 1560, 30740-30741, 1244, 30742-30757, 1853, 30758-30779, 1902, 30780, 1503, 30781-30783, 169, 30784-30794, 144, 30795-30798, 1914, 30799-30819, 1928, 30820-30824, 754, 30825-30831, 1932, 30832-30842, 1938, 30843-30865, 1529, 30866-30879, 1917, 30880-30892, 2030, 30893-30896, 1756, 30897-30903, 541, 30904-30907, 204, 30908-30916, 843, 30917-30928, 1597, 30929-30930, 1032, 30931-30936, 19512, 30937-30944, 1802, 30945, 222, 30946-30969, 2015, 4927, 30970, 371, 30971-30972, 758, 30973-30994, 2028, 30995-31000, 963, 31001, 2113, 31002-31009, 2039, 31010-31028, 2051, 31029-31045, 923, 31046, 694, 31047-31055, 2215, 31056-31064, 236, 31065-31074, 1268, 31075-31081, 146, 31082-31103, 1360, 2093, 31104-31108, 2097, 31109-31115, 2107, 31116-31132, 2016, 31133-31143, 2131, 31144, 2133, 31145-31168, 1171, 31169-31173, 2149, 31174-31188, 2161, 31189, 2162, 31190-31212, 820, 31213-31221, 3596, 31222-31232, 5654, 31233-31238, 1270, 31239-31258, 2207, 424, 31259-31265, 1280, 31266-31267, 873, 31268-31269, 2216, 31270-31280, 1237, 2075, 31281-31285, 2226-2227, 31286-31287, 198, 31288-31305, 2245, 1615, 31306-31322, 2258, 31323, 4239, 31324-31349, 4272, 31350-31354, 3779, 31355-31358, 3617, 31359-31362, 3646, 31363-31370, 3029, 31371, 9508, 31372-31406, 2673, 31407-31425, 2680, 31426-31445, 2700, 31446-31456, 2705, 31457-31458, 6287, 31459-31466, 3322, 31467-31472, 2713, 31473, 4152, 2716, 31474-31481, 3998, 4026, 31482-31486, 2727, 31487-31492, 2731, 31493-31499, 2957, 31500-31529, 2745, 31530, 3685, 31531-31557, 4109, 31558-31570, 15951, 31571-31572, 4135, 31573-31582, 2771, 31583-31589, 3427, 4311, 2779, 31590-31603, 2785, 31604-31605, 4271, 31606-31618, 2872, 31619-31627, 3310, 2800, 31628-31653, 2818, 31654-31675, 3260, 31676-31677, 2685, 31678-31688, 3106, 31689-31700, 2850, 31701-31717, 2974, 31718-31739, 4195, 31740-31761, 3712, 3378, 31762-31784, 467, 31785-31791, 2848, 31792-31807, 3735, 31808-31815, 2920, 31816-31829, 3472, 31830-31835, 3142, 2932, 31836-31840, 2909, 31841-31861, 2980, 31862-31885, 2970, 4255, 31886-31900, 3999, 31901, 2981, 31902-31905, 19099, 31906, 2988, 31907-31916, 2997, 31917-31925, 3874, 31926-31948, 3018, 594, 31949-31951, 3680, 31952, 3210, 31953-31955, 3022, 31956, 3901, 3842, 31957-31969, 3033, 31970-32027, 17782, 32028-32053, 3065, 32054-32058, 2892, 32059-32068, 3509, 32069-32075, 3563, 32076-32080, 3088, 32081-32085, 3093, 32086-32087, 3897, 32088-32157, 4139, 3737, 32158-32162, 3141, 32163-32166, 3143, 32167-32198, 4166, 32199-32219, 3169, 32220-32241, 3476, 32242, 3654, 2625, 32243-32257, 3193, 32258, 3195, 32259-32270, 3204, 32271-32281, 3222, 32282-32293, 3231, 32294-32305, 4191, 32306-32351, 17162, 32352, 898, 32353-32367, 3269, 32368-32381, 3361, 32382-32412, 3297, 32413-32421, 3791, 32422-32429, 3305, 32430-32438, 2765, 32439-32459, 3578, 32460-32463, 3326, 32464-32471, 3332, 32472-32490, 3583, 3453, 32491-32526, 3388, 32527-32537, 3395, 21673, 32538, 3396, 32539-32541, 3808, 32542-32551, 3403, 3320, 32552-32559, 3408, 32560-32564, 3570, 32565-32571, 3418-3419, 32572-32576, 3421, 32577-32583, 3422, 32584-32596, 3436, 32597-32601, 2845, 32602, 2891, 3441, 3443, 4180, 32603-32620, 3644, 32621-32632, 2682, 32633, 3465, 32634-32641, 30815, 32642-32651, 3475, 32652-32654, 3479, 32655-32693, 3471, 32694, 3733, 32695, 2678, 32696, 18448, 3503, 32697, 2939, 32698-32702, 4179, 32703-32717, 9376, 32718, 3758, 32719-32720, 3525, 32721-32722, 3526, 32723-32732, 3538, 32733-32736, 4197, 32737-32760, 2938, 32761-32768, 3555-3556, 4222, 32769-32770, 3558, 32771-32813, 3366, 32814-32846, 3645, 32847-32865, 3804, 32866-32872, 3611, 32873-32894, 3966, 32895-32898, 3113, 32899, 3628, 32900-32901, 4111, 32902-32919, 3652, 32920-32928, 3642, 32929-32939, 3618, 32940-32953, 2803, 32954-32964, 3658, 32965, 3659, 32966-32986, 3676, 32987-32994, 3679, 32995-32999, 3818, 33000-33006, 1447, 33007-33018, 1045, 33019-33038, 16640, 33039-33041, 3051, 33042-33050, 2795, 33051-33057, 2905, 33058-33063, 3718, 33064-33065, 3896, 33066-33093, 8859, 33094-33100, 5998, 33101-33110, 1527, 33111-33128, 3757, 33129-33141, 3490, 33142-33148, 3849, 33149-33155, 3954, 33156-33161, 4029, 33162-33165, 3591, 33166, 3790, 33167-33174, 2820, 3798, 33175-33194, 3812, 33195-33196, 3816, 33197-33198, 30672, 33199-33210, 2906, 33211-33216, 3834, 33217-33222, 3843, 33223-33252, 3860, 33253-33258, 3863, 33259-33264, 3867, 33265-33271, 3872, 33272-33274, 3892, 33275-33285, 8989, 33286-33292, 5455, 33293-33309, 3914, 33310-33347, 3991, 33348-33349, 3922, 33350, 3923, 33351-33358, 3928, 33359-33360, 3931, 33361, 3932, 33362-33370, 3936, 33371-33372, 2998, 33373-33384, 2662, 3682, 33385-33399, 2714, 33400-33407, 2280, 33408-33409, 3958, 33410-33417, 3963, 33418, 3542, 33419-33427, 3655, 33428-33441, 3972, 33442-33510, 4007, 33511-33531, 4024, 33532-33536, 3130, 33537-33539, 3241, 33540-33566, 4037, 33567-33576, 13, 33577-33578, 4232, 33579-33593, 3096, 33594-33619, 3311, 33620-33640, 4081, 33641-33675, 3183, 33676-33677, 4098, 33678-33681, 4103, 33682-33691, 4308, 33692-33713, 3108, 33714-33716, 3977, 33717-33720, 12914, 33721-33726, 4122, 33727-33728, 2709, 33729-33740, 3731, 33741-33772, 3764, 33773-33797, 3272, 33798-33803, 4297, 33804-33807, 3745, 33808-33810, 4333, 33811-33812, 2913, 4171, 33813, 4173, 33814-33819, 4175, 33820-33822, 4178, 33823-33843, 3429, 33844, 4196, 33845, 3456, 33846-33849, 4202, 33850-33851, 4206, 33852-33873, 3638, 33874-33885, 3672, 33886-33894, 4228, 33895-33898, 4230, 33899-33906, 4335, 33907-33925, 3295, 33926-33928, 2899, 33929-33954, 4267, 33955, 4270, 33956, 3551, 33957-33958, 5575, 33959-33963, 2793, 33964-33966, 4276, 33967-33973, 2750, 33974-33977, 3596, 33978-33992, 4293, 33993-34024, 4189, 34025-34033, 4317, 34034-34041, 3773, 34042-34047, 2874, 34048-34051, 4328, 34052-34055, 4334, 34056, 4336, 34057-34062, 30859, 34063-34068, 3713, 34069-34088, 4589, 34089-34131, 123, 34132-34139, 5041, 34140-34183, 29150, 34184-34191, 4482, 34192-34207, 23580, 34208-34257, 4800, 34258-34322, 4817, 34323, 4636, 34324-34332, 5834, 34333-34373, 5033, 34374-34376, 5903, 34377-34411, 4401, 34412-34452, 14598, 34453-34465, 29749, 34466-34489, 28738, 34490-34497, 4818, 34498-34502, 18566, 34503-34625, 25964, 34626-34664, 4576, 34665-34741, 5906, 34742-34743, 6062, 34744-34745, 33171, 34746-34819, 6120, 34820-34840, 26334, 34841-34847, 26077, 34848-34856, 5226, 34857-34868, 26335, 34869-34875, 4809, 34876-34884, 6148, 34885-34894, 4414, 34895-34913, 6206, 34914-34925, 5313, 34926-34937, 5326, 34938-34969, 5360, 34970-34983, 23677, 34984-35006, 5715, 35007-35032, 4905, 35033-35099, 28976, 35100-35116, 5260, 35117, 4526, 35118-35140, 4533, 35141-35142, 4834, 35143-35227, 5085, 35228-35245, 4868, 35246-35273, 23657, 35274-35313, 12039, 35314-35341, 4773, 35342, 5263, 35343-35384, 4940, 35385-35407, 4929, 35408-35411, 898, 35412-35434, 29905, 35435-35440, 29393, 35441-35462, 4674, 35463-35525, 1151, 35526-35653, 5323, 35654-35677, 5311, 35678-35699, 27025, 35700-35706, 5336, 35707-35721, 5186, 35722-35781, 5825, 35782, 29343, 35783-35832, 32138, 35833-35861, 4980, 35862-35868, 29688, 35869-35897, 4469, 35898-35932, 28581, 35933-35934, 25563, 35935-35961, 4442, 35962-35967, 25816, 35968-35985, 7006, 35986-36006, 6141, 36007-36010, 29803, 36011-36069, 4522, 36070-36120, 29904, 36121-36219, 29774, 36220-36225, 28482, 36226-36250, 5231, 36251, 4629, 36252-36336, 4852, 36337-36346, 4865, 36347-36365, 6157, 36366-36379, 31522, 36380-36421, 4937, 36422-36446, 3596, 36447-36477, 24907, 36478-36495, 5014, 36496-36526, 5067, 36527-36602, 5151, 36603-36666, 4479, 36667-36687, 5236, 36688-36739, 5295, 36740-36766, 4384, 36767-36778, 4883, 36779-36811, 26528, 36812-36820, 5198, 36821-36823, 4363, 36824-36866, 4767, 36867-36924, 30596, 36925-36945, 5238, 36946-36991, 4543, 36992-37020, 33529, 37021-37059, 26648, 37060-37116, 5212, 37117-37140, 5256, 37141-37174, 4741, 37175-37185, 17326, 37186-37215, 23462, 37216-37222, 26965, 37223-37237, 4468, 37238-37279, 5285, 37280-37295, 5245, 37296-37324, 4927, 37325-37358, 963, 37359-37367, 25421, 37368-37391, 5308, 37392-37406, 5015, 37407-37409, 5030, 37410-37424, 24716, 37425-37446, 5280, 37447-37491, 5119, 37492-37496, 30957, 37497-37513, 30267, 37514-37522, 4597, 37523-37526, 5135, 37527-37563, 28220, 37564-37582, 4909, 37583-37601, 27369, 37602-37618, 5258, 37619-37720, 5706, 37721-37722, 5707, 37723-37729, 23462, 37730, 5986, 37731-37733, 5732, 37734-37763, 5756, 37764-37776, 34212, 37777-37781, 5933, 37782-37823, 235, 37824-37829, 5834, 37830-37845, 5871, 37846-37850, 28327, 37851-37886, 27069, 37887-37890, 5754, 37891-37893, 5748, 4818, 37894-37926, 5971, 37927-37935, 5982, 37936-37937, 29582, 37938-37950, 27455, 37951-37970, 6018, 37971-37976, 6090, 37977-37988, 17536, 37989-37991, 28599, 37992-38006, 467, 38007-38027, 26983, 38028-38053, 6120, 38054-38065, 6137, 38066, 6139, 38067-38071, 6174, 38072-38078, 2578, 38079, 6148, 38080-38083, 6012, 38084-38105, 36113, 38106-38111, 16511, 38112-38115, 6195, 38116-38141, 3867, 38142-38148, 5825, 38149-38158, 27598, 38159-38196, 15845, 5894, 38197-38217, 24689, 38218-38261, 5857, 38262-38269, 5863, 38270, 5867, 38271-38319, 6046, 38320-38321, 26402, 38322-38327, 5988, 38328-38337, 5965, 38338-38363, 5850, 38364-38417, 6064, 38418-38428, 5726, 38429-38431, 6082, 38432-38454, 6095, 38455-38461, 23779, 49, 38462-38488, 6144, 38489-38519, 6157, 38520-38524, 6208, 38525-38553, 5866, 38554-38561, 18448, 38562-38585, 24728, 38586-38604, 1263, 38605-38635, 23538, 38636-38639, 5861, 38640-38648, 5854, 38649-38672, 23748, 38673-38681, 1077, 15231, 38682-38685, 25816, 38686-38719, 34352, 38720-38722, 5895, 38723-38726, 15291, 38727-38737, 5751, 38738-38741, 5882, 38742-38750, 4826, 6011, 38751-38755, 5940, 38756-38757, 5943, 38758, 25600, 38759-38784, 5749, 38785-38795, 5952, 38796, 5765, 38797-38818, 6023, 38819-38836, 6126, 38837-38851, 18936, 38852-38853, 5903, 38854-38867, 6037, 38868-38882, 11449, 38883-38916, 36456, 6050, 38917-38936, 36747, 38937-38970, 5784, 38971-38976, 37301, 38977-39000, 5753, 39001-39007, 5755, 39008-39033, 5828, 39034, 7411, 39035-39063, 5818, 5820, 39064-39071, 25358, 39072, 6029, 39073-39076, 25563, 39077-39096, 6004, 39097-39117, 25487, 39118-39121, 5901, 39122-39136, 5798, 39137-39155, 5880, 39156-39174, 5975, 39175-39181, 34189, 39182-39188, 5932, 39189-39194, 26334, 39195-39198, 963, 39199-39200, 5729, 39201-39210, 6014, 39211-39241, 6070, 39242-39246, 5891, 39247-39253, 6206, 39254-39266, 33218, 39267, 19698, 39268-39291, 6145, 39292-39354, 5359, 39355-39363, 6215, 39364-39365, 6218, 39366-39421, 6241, 39422-39434, 7064, 39435-39438, 7639, 39439-39452, 6429, 39453-39467, 6771, 39468, 6335, 39469-39490, 6273, 39491-39523, 6287, 39524, 6288, 39525-39528, 6290, 39529-39534, 7709, 39535-39539, 6493, 39540-39553, 6297, 39554-39556, 6300, 39557-39568, 2957, 39569-39579, 5834, 39580-39581, 6529, 39582-39607, 6329, 39608-39610, 6398, 39611-39619, 5903, 39620-39639, 38621, 39640-39641, 6348, 39642-39654, 6353, 39655-39674, 6362, 39675, 25537, 6367, 39676-39681, 6373, 39682-39683, 6375, 39684-39692, 7488, 39693-39698, 6384, 6311, 39699-39700, 7298, 39701-39705, 6388, 39706-39710, 7283, 39711-39731, 6405, 39732-39758, 23985, 39759, 7592, 39760, 6489, 39761-39764, 37809, 39765-39776, 6848, 6437, 39777-39789, 6445, 39790-39818, 7594, 39819-39843, 6677, 39844-39850, 7122, 39851-39855, 6467, 39856-39868, 6472, 6718, 39869-39888, 6061, 39889-39898, 6671, 39899-39915, 6492, 39916-39924, 7043, 39925-39945, 6094, 39946-39957, 7129, 39958-39981, 6626, 39982-39988, 6531, 39989-40000, 7566, 40001-40014, 7176, 40015, 7197, 40016-40021, 6545, 40022-40035, 7273, 40036-40037, 6554, 6206, 40038-40070, 6882, 40071-40073, 24454, 40074-40078, 6587, 6740, 40079-40085, 7243, 6582, 40086-40091, 6240, 40092-40145, 6624, 40146-40149, 6652, 40150-40166, 6634, 40167-40190, 6640, 40191-40212, 15845, 40213-40237, 7547, 40238-40242, 37906, 40243-40257, 7456, 40258-40272, 7305, 40273-40304, 6697, 40305-40313, 6701, 5835, 40314-40315, 7262, 40316-40358, 6723, 40359-40365, 4691, 40366-40374, 6748, 6728, 6022, 40375-40381, 12039, 40382-40387, 6955, 40388-40410, 6745, 40411-40465, 6225, 40466-40474, 7404, 40475-40494, 6778, 40495-40521, 6809, 40522-40527, 7239, 40528-40531, 6713, 40532-40546, 6802, 40547-40568, 7312, 40569-40582, 6330, 40583-40592, 7236, 40593-40632, 7673, 40633-40639, 6488, 40640-40683, 6863, 40684-40693, 6872, 40694, 6922, 40695-40757, 6900, 40758-40764, 6141, 40765-40767, 7149, 40768-40786, 6465, 40787-40806, 6339, 40807-40819, 261, 40820-40840, 6948, 40841-40849, 6578, 40850, 6953, 40851-40861, 9, 40862-40870, 7458, 40871-40891, 38571, 40892-40905, 6250, 7474, 40906, 6352, 40907-40949, 18502, 40950-40982, 7449, 40983-40999, 7019, 41000-41004, 7023-7024, 41005-41008, 6402, 41009-41024, 7032, 41025-41044, 7038, 41045-41061, 6855, 41062-41068, 6513, 41069-41125, 6678, 41126-41132, 7073, 41133-41156, 6525, 41157-41198, 7195, 41199-41208, 7620, 41209-41215, 7118, 41216, 7120, 41217-41222, 7369, 41223-41243, 7134, 41244-41288, 7158, 41289-41294, 4927, 41295-41311, 6790, 7461, 41312-41331, 7524, 41332-41339, 7185, 41340-41350, 7091, 41351-41357, 7199, 41358-41383, 7222, 41384-41387, 7223, 41388-41398, 7052, 41399-41433, 7240, 41434-41448, 26301, 41449-41454, 7250, 7546, 41455-41461, 6827, 41462-41478, 1625, 41479-41489, 4826, 41490-41492, 7230, 41493-41529, 7274, 41530-41532, 6649, 41533-41546, 7303, 41547-41561, 5198, 41562-41591, 26087, 41592-41596, 7633, 7321, 41597-41607, 24, 41608-41612, 6874, 41613-41619, 6980, 41620-41639, 7342, 41640-41644, 26528, 41645-41647, 7491, 41648, 7349, 41649-41652, 6655, 41653-41665, 6896, 41666-41671, 7360, 41672, 7362, 41673-41691, 7154, 41692-41710, 6884, 41711-41712, 7378, 41713-41735, 7391, 41736-41749, 6310, 7395, 41750-41754, 7536, 7400, 41755-41763, 26077, 41764-41797, 7417, 41798-41836, 6233, 41837-41849, 5825, 7446, 41850-41854, 6425, 41855-41860, 6487, 41861-41883, 7436, 7462, 41884-41912, 7478, 5795, 41913-41933, 7490, 6224, 41934-41937, 7686, 41938, 6686, 41939-41957, 7500, 41958-41975, 6228, 7512, 41976-42008, 6985, 42009-42011, 6486, 42012-42046, 6360, 42047-42067, 7562, 42068-42083, 6800, 42084-42087, 6547, 42088-42089, 6841, 42090-42107, 7582, 42108-42151, 7600, 42152-42159, 6892, 42160-42161, 7469, 42162-42163, 6541, 7608, 42164-42168, 6343, 42169-42206, 7632, 42207-42212, 31144, 42213-42244, 7646, 42245-42247, 25964, 42248-42256, 7653, 42257-42289, 7662, 6646, 7056, 42290-42294, 6942, 42295-42301, 7494, 42302-42307, 5654, 42308-42310, 7678, 42311-42336, 6691, 42337-42369, 7079, 42370-42397, 7734, 42398-42449, 7727, 42450-42457, 8938, 42458-42484, 9508, 7758, 42485-42497, 8293, 42498-42560, 7788, 42561-42565, 8631, 42566-42567, 8309, 42568-42574, 8781, 42575-42594, 8789, 42595-42599, 7724, 42600-42622, 7832, 42623-42647, 8081, 42648-42691, 7852, 42692-42694, 8876, 42695-42750, 235, 42751-42753, 9285, 42754-42763, 8029, 7851, 42764-42794, 7884, 42795-42836, 9515, 42837, 7886, 42838-42849, 32272, 42850-42852, 8677, 42853-42859, 7897, 42860-42872, 7755, 42873-42892, 9260, 42893-42905, 7917, 42906-42913, 7920, 42914-42919, 8891, 42920-42935, 9261, 42936-42943, 7925, 42944-42975, 7933, 42976-42994, 7857, 42995-43049, 7943, 43050-43077, 8411, 43078-43079, 7975, 43080-43088, 7980, 43089-43110, 8772, 43111-43140, 8117, 43141-43145, 37956, 43146-43158, 8005, 43159-43203, 8955, 3596, 43204-43252, 8650, 43253-43272, 8766, 43273-43300, 27903, 43301-43310, 8062, 43311-43326, 8071, 43327-43328, 8571, 43329-43349, 7961, 43350, 41118, 43351-43388, 8096, 43389-43407, 9286, 8102, 43408-43473, 30642, 43474-43475, 8100, 43476-43502, 8401, 43503-43515, 8144, 43516-43517, 8129, 43518-43537, 9312, 43538-43548, 9301, 43549-43558, 29819, 43559-43560, 9178, 43561-43565, 8103, 43566-43573, 9249, 43574-43586, 8206, 605, 43587-43627, 7854, 43628-43667, 8189, 43668-43671, 8815, 43672-43678, 9528, 43679-43680, 8197, 43681-43696, 8263, 43697-43699, 8582, 43700-43706, 9300, 43707-43716, 7822, 43717-43727, 8460, 43728-43761, 8235-8236, 43762-43768, 8240, 43769-43771, 9092, 43772-43780, 8909, 43781-43784, 8763, 43785-43787, 8253, 43788-43789, 9453, 43790-43795, 9441, 43796, 9492, 43797-43805, 8119, 43806-43811, 7812, 43812-43823, 7831, 43824-43854, 9220, 43855-43870, 40744, 43871-43873, 7876, 43874, 8623, 8279, 43875-43902, 9283, 43903, 8989, 43904-43956, 9354, 43957-43986, 8454, 43987-44027, 9200, 44028-44042, 8335, 44043-44046, 8338, 44047-44053, 7840, 44054-44055, 8362, 44056-44079, 8351, 44080-44085, 8356, 44086-44101, 8364, 44102-44109, 29195, 44110-44120, 9329, 44121-44132, 8379, 44133-44162, 8073, 44163-44190, 9399, 44191-44195, 8444, 44196-44198, 8315, 44199-44245, 8506, 44246-44275, 8317, 44276-44313, 8450, 44314-44318, 8447, 45, 44319-44329, 8349, 44330-44369, 7990, 44370-44379, 8459, 44380-44386, 8990, 44387-44463, 9486, 44464-44469, 7945, 44470-44513, 8505, 44514-44515, 9355, 44516-44525, 8620, 44526-44540, 8511, 44541-44542, 8566, 44543-44574, 16511, 8527, 44575-44595, 8539, 44596-44639, 9421, 44640-44648, 8500, 44649-44730, 9142, 44731-44741, 8139, 44742-44758, 8593, 44759-44787, 8008, 44788-44807, 7989, 44808-44880, 8648, 44881-44902, 8546, 44903-44917, 9377, 44918-44968, 9511, 44969-44974, 8540, 44975-44982, 35998, 44983-45021, 8682, 45022-45038, 8396, 45039, 8690, 45040-45061, 9448, 8110, 45062-45086, 8708, 45087-45089, 8893, 8710, 45090-45106, 7983, 45107-45110, 8722, 45111-45166, 8748, 45167-45183, 36163, 45184-45190, 8926, 45191-45211, 9417, 45212-45235, 8767, 45236-45254, 8735, 45255-45290, 8787, 8784, 45291-45305, 29461, 45306-45318, 9325, 45319-45359, 8905, 45360-45365, 8808, 45366-45370, 7951, 45371-45372, 8994, 45373-45383, 7994, 45384-45386, 8461, 45387-45405, 8820, 45406-45413, 7775, 45414-45432, 8825, 45433-45458, 8224, 45459-45472, 9158, 45473-45488, 8714, 45489-45507, 8851, 45508-45516, 8853, 45517-45530, 8859, 45531-45537, 8863, 45538-45559, 7888, 45560-45578, 8931, 45579-45594, 8393, 45595-45597, 8887, 45598-45601, 9425, 45602-45611, 8895, 45612-45687, 8980, 45688-45712, 8922, 45713, 8924, 45714, 9474, 45715-45720, 7806, 45721-45722, 8927, 45723-45733, 8683, 45734, 7955, 45735-45737, 9435, 45738-45758, 8942, 45759, 8006, 45760-45774, 9449, 45775-45779, 8812, 45780-45789, 8080, 45790-45791, 9210, 45792-45806, 8965, 45807-45817, 7881, 45818-45820, 8970, 45821-45827, 8916, 45828-45830, 9442, 45831-45841, 9122, 45842-45844, 8978, 45845-45892, 5455, 45893-45938, 8166, 45939-45942, 9013, 45943-45945, 7960, 45946-45969, 8480, 45970-45979, 9023, 45980, 7970, 45981-45992, 9031, 45993-46004, 7872, 46005-46007, 8504, 46008-46098, 8175, 46099-46104, 9073, 46105-46111, 9079, 46112-46135, 9091, 46136-46144, 8850, 46145-46161, 8797, 46162-46165, 8889, 46166-46171, 8383, 46172-46173, 9353, 46174-46194, 9124, 46195-46197, 8414, 46198-46202, 9131, 46203-46206, 9257, 46207-46217, 8159, 46218-46236, 9139, 46237-46248, 9144, 7896, 46249-46256, 9506, 46257-46270, 9149, 46271-46272, 9159, 46273-46283, 8515, 46284-46287, 9150, 46288-46292, 9160, 46293-46308, 9321, 46309-46321, 8274, 7918, 46322-46329, 8964, 46330-46333, 9184, 46334-46351, 9195, 46352-46354, 9168, 46355-46381, 9471, 46382-46385, 8868, 46386-46455, 9229, 46456-46494, 8711, 46495, 9246, 46496, 8136, 46497-46507, 7923, 46508-46509, 8871, 46510-46519, 9255, 46520-46550, 9268, 46551-46568, 9279, 46569-46572, 9282, 46573-46578, 8387, 46579-46597, 9256, 46598-46600, 8680, 46601-46651, 9306, 46652-46655, 9309, 46656-46658, 9310, 46659-46679, 8280, 46680-46759, 9339, 46760-46788, 9185, 46789, 8570, 46790-46836, 8145, 46837-46851, 8458, 9371, 46852-46860, 9376, 46861-46876, 8959, 46877-46916, 9523, 46917, 9405, 46918-46928, 9527, 46929-46938, 9316, 46939-46948, 9419, 46949-46970, 9430, 46971-46982, 8564, 46983-47006, 9444, 47007-47018, 8846, 47019-47041, 8474, 47042-47051, 9464, 47052-47061, 9469, 47062-47103, 9217, 8348, 47104-47117, 9071, 47118-47167, 8756, 47168-47199, 9516, 47200-47214, 9520, 47215-47222, 8665, 47223-47236, 16044, 47237-47243, 11721, 47244-47249, 14799, 47250-47273, 17040, 47274-47276, 13623, 47277-47278, 16378, 14258, 47279-47284, 14778, 47285-47286, 16921, 47287-47289, 16053, 47290-47294, 13122, 47295, 12011, 47296-47306, 39432, 47307, 15854, 47308-47312, 5748, 47313-47317, 14388, 47318, 13181, 47319-47321, 13138, 47322-47325, 14695, 47326-47328, 14475, 47329-47332, 15347, 11731, 47333-47335, 14478, 47336-47348, 14483, 47349-47359, 14487, 47360-47367, 15828, 47368, 11746, 47369-47377, 14841, 47378-47381, 15420, 47382-47395, 16246, 47396-47401, 13165, 47402, 14503, 47403-47419, 11766, 47420-47424, 39541, 47425-47431, 16994, 47432-47437, 14758, 47438-47441, 13345, 47442, 14528, 47443-47444, 16385, 16116, 47445-47458, 11779, 47459-47460, 15348, 47461-47462, 12874, 235, 14541, 47463-47465, 14504, 47466-47469, 13196, 47470, 11788, 47471-47478, 13804, 47479-47503, 16069, 47504-47509, 14537, 47510-47512, 13293, 47513-47526, 14367, 12832, 47527-47529, 16888, 47530-47531, 13180, 47532-47536, 13218, 47537-47538, 13220, 47539-47566, 14440, 47567, 14587, 47568, 11829, 47569-47576, 31593, 47577-47585, 15960, 47586-47588, 14595, 47589-47592, 14598, 16287, 12539, 47593-47599, 11859, 47600-47603, 16082, 47604-47613, 16559, 47614-47620, 16129, 15849, 47621-47623, 14938, 47624-47626, 12639, 11858, 47627-47630, 13267, 47631, 15982, 47632, 14691, 15605, 13749, 47633-47638, 13213, 47639-47640, 12680, 47641-47649, 14540, 47650-47655, 14627, 47656-47660, 15548, 47661-47672, 12756, 47673-47685, 12910, 47686-47687, 11883, 11906, 47688-47691, 15999, 47692-47710, 11890, 47711, 16822, 47712-47718, 11893, 14907, 47719-47727, 15844, 13128, 47728-47729, 14622, 47730-47734, 13335, 47735-47738, 16026, 47739, 12490, 47740-47746, 15622, 47747-47754, 15579, 47755-47756, 14662, 47757-47759, 12130, 47760-47770, 15813, 47771-47779, 15794, 47780-47783, 11914, 47784-47791, 2216, 47792-47799, 11917-11918, 14677, 47800-47818, 14685, 11728, 47819-47832, 16707, 2493, 47833-47836, 14862, 47837-47841, 23, 47842-47856, 15045, 47857-47859, 14701, 47860-47866, 467, 47867-47869, 11943, 47870-47879, 14687, 47880-47895, 13953, 47896-47899, 13357, 47900-47901, 11959, 47902-47908, 11980, 47909-47911, 15936, 47912, 16968, 47913-47914, 15694, 47915-47919, 14944, 47920-47935, 11976, 14739, 47936-47950, 14744, 47951-47961, 11988, 16089, 47962, 13375, 47963-47978, 11989, 47979-47985, 15812, 47986-47988, 11993, 47989-48001, 15515, 48002-48003, 16235, 12000, 48004-48007, 15986, 48008-48011, 16103, 48012-48014, 12005, 13389, 48015, 28987, 48016-48017, 2564, 48018-48046, 16113, 48047-48052, 16117, 48053-48054, 14263, 48055-48065, 11775, 48066-48074, 12643, 13651, 13921, 16532, 48075-48088, 12027, 48089-48091, 16130, 48092-48109, 15674, 48110-48121, 13762, 48122-48131, 14807, 48132-48143, 14424, 48144-48148, 12135, 48149-48156, 13108, 48157, 14129, 48158-48159, 13019, 48160-48189, 15852, 48190, 13871, 48191-48194, 14826, 48195-48196, 16375, 48197-48225, 13466, 48226-48251, 13474, 48252-48264, 12069, 48265, 13477, 48266-48273, 14851, 48274-48279, 16185, 48280-48286, 42102, 48287-48301, 12086, 13491, 48302-48313, 13495, 48314-48330, 14867, 12097, 48331-48346, 16108, 13166, 48347-48354, 14217, 48355-48363, 13520, 48364-48369, 16184, 48370-48373, 12943, 48374-48406, 13531, 48407-48414, 14896, 48415-48419, 16231, 48420-48438, 13543, 48439-48442, 12139, 15906, 48443-48451, 16171, 48452-48460, 14910, 48461-48471, 14416, 48472-48486, 16252, 48487-48499, 13562, 48500, 13563, 48501, 14923, 12159, 48502, 17090, 48503-48509, 11848, 48510-48514, 14927, 48515, 13401, 48516-48517, 13245, 48518-48521, 38776, 48522-48524, 12580, 48525-48527, 13263, 48528-48532, 14930, 12167, 13583, 48533-48534, 15646, 48535-48551, 13858, 30431, 48552-48556, 14406, 48557-48560, 11868, 48561-48568, 2402, 48569-48572, 15873, 48573-48579, 16625, 48580-48587, 16249, 48588-48592, 14873, 48593-48600, 13995, 48601-48610, 14623, 48611-48616, 13346, 48617-48622, 14310, 48623-48631, 16298, 13615, 48632-48650, 13622, 48651-48660, 16896, 12739, 14531, 48661, 12098, 48662, 13083, 48663-48670, 12215, 48671-48672, 2437, 48673-48674, 16637, 48675-48680, 16771, 48681-48684, 12350, 48685-48698, 15006, 13646, 48699-48707, 15012, 48708-48709, 16308, 12227, 14456, 48710-48728, 13828, 48729, 14802, 48730-48738, 13661, 48739-48744, 14705, 48745-48746, 13286, 48747-48749, 16346, 48750-48759, 16580, 48760, 15709, 48761-48766, 14132, 48767-48772, 12339, 48773-48775, 16662, 48776-48795, 15040, 48796, 14544, 48797-48799, 13820, 48800, 15042, 48801-48803, 12262, 48804-48806, 12702, 48807-48824, 11805, 48825-48827, 13695, 48828-48834, 12276, 48835, 13699, 48836-48841, 12741, 48842-48843, 16503, 48844-48852, 13993, 48853-48859, 13709, 48860-48862, 15882, 48863-48878, 10479, 48879-48899, 12640, 48900-48905, 12305, 48906-48909, 14101, 48910-48923, 12311, 48924-48930, 16702, 48931, 11840, 48932, 12315, 48933-48938, 11911, 48939-48942, 15119, 48943, 13735, 48944-48952, 12770, 48953-48965, 13430, 48966-48982, 13746, 48983-48987, 12050, 48988-48998, 12025, 48999-49008, 15431, 49009-49011, 2580, 49012-49016, 12336, 49017-49025, 16435, 15112, 49026-49042, 17034, 49043-49046, 14580, 49047-49057, 15120, 12351, 49058-49059, 14659, 49060-49063, 16866, 49064-49070, 16459, 49071-49082, 15131, 49083-49094, 10589, 49095-49097, 15134, 49098-49110, 15317, 49111-49123, 15459, 49124-49131, 15869, 49132-49161, 12390, 49162-49168, 14218, 49169, 15154, 49170-49172, 2285, 49173-49175, 14746, 49176, 16796, 49177-49184, 13507, 49185-49196, 2451, 49197-49210, 14113, 16884, 49211-49216, 16498, 49217-49219, 16499, 49220-49223, 13691, 49224-49228, 12418, 49229-49251, 11810, 49252-49259, 15183, 49260-49261, 16511, 49262-49263, 16512, 49264-49265, 16607, 49266, 15190, 49267-49269, 16074, 49270-49276, 15494, 49277-49278, 13148, 49279-49281, 15196, 49282-49284, 13846, 49285, 15954, 49286, 3867, 12839, 49287-49292, 12194, 49293-49304, 15176, 16527, 49305-49314, 13855, 49315-49318, 16061, 49319-49325, 15211, 49326-49327, 13857, 16784, 49328-49361, 15153, 49362, 13265, 14208, 49363-49370, 13868, 49371-49373, 15225, 49374, 13276, 49375-49377, 12996, 49378-49387, 13874, 49388-49392, 15231, 49393-49404, 15796, 49405-49413, 13008, 49414-49415, 12485, 49416-49420, 12324, 49421-49434, 16163, 49435-49457, 16583, 49458, 12947, 49459-49463, 16586, 49464-49475, 16310, 49476-49480, 13003, 1399, 49481-49484, 13907, 49485-49489, 16600, 49490-49500, 12509, 49501-49503, 13944, 49504, 15271, 36268, 49505-49509, 15274, 49510-49514, 15541, 49515-49519, 15841, 49520-49531, 15278, 49532-49535, 12508, 49536-49544, 12529, 49545-49547, 16620, 49548-49560, 16626, 49561-49565, 16629, 49566-49574, 15291, 49575-49577, 16635, 49578-49588, 13956, 49589-49597, 16520, 49598-49602, 15301, 49603-49605, 13962, 49606-49616, 13933, 49617-49630, 16216, 49631-49642, 14893, 49643, 16655, 49644-49646, 16079, 49647-49656, 13976, 49657-49679, 15627, 49680-49690, 15259, 49691-49696, 13269, 13986, 49697-49700, 16479, 49701-49703, 15321, 49704-49711, 15010, 17094, 49712-49714, 13809, 49715-49719, 13382, 49720-49731, 12611, 15076, 49732-49733, 12604, 49734-49749, 12803, 49750, 12616, 49751-49754, 12431, 49755-49757, 16690, 49758-49764, 15727, 49765-49770, 14011, 49771-49773, 12790, 49774-49780, 12623, 49781-49786, 16146, 49787, 14018, 49788-49800, 13, 49801-49821, 13062, 49822-49831, 11712, 49832-49836, 16713, 49837-49839, 15365, 49840-49846, 13436, 49847-49848, 12654, 49849-49851, 16439, 15299, 49852-49871, 15671, 49872-49875, 16724, 49876-49880, 12668, 49881, 12823, 49882-49888, 13936, 49889-49895, 12675, 49896-49909, 11862, 49910-49916, 12822, 49917-49918, 13947, 49919-49934, 15404, 14149, 14070, 49935-49938, 12160, 49939-49941, 13222, 49942-49947, 29048, 49948-49951, 12121, 49952-49953, 15929, 49954-49955, 15413, 49956-49957, 16756, 49958-49961, 15417, 49962-49963, 13899, 49964-49973, 15908, 49974, 12178, 49975-49977, 17067, 49978-49979, 17062, 49980, 14963, 49981-49983, 12721, 49984, 12494, 49985-49987, 12767, 49988-49989, 12541, 49990-49992, 12619, 49993-49994, 14865, 49995-49998, 15428, 49999-50006, 16782, 50007-50011, 14087, 50012-50016, 14097, 50017, 6492, 50018-50022, 16941, 12736, 50023-50024, 16091, 12740, 50025-50033, 12582, 50034-50047, 15443, 50048-50057, 14107, 50058-50068, 12092, 50069, 16328, 50070, 14866, 50071-50074, 15179, 15458, 50075-50083, 36845, 50084-50126, 15836, 50127-50141, 14065, 50142-50173, 2297, 50174-50179, 14147, 50180-50190, 14143, 50191-50193, 12799, 50194-50198, 12800, 50199-50209, 14151, 50210-50225, 15516, 13499, 50226-50238, 12811, 12357, 13515, 50239-50265, 15555, 50266-50271, 14872, 50272-50273, 15525, 50274-50275, 15526, 50276-50285, 12827, 50286-50290, 16870, 50291-50292, 12600, 50293-50297, 14192, 50298, 15535, 50299-50306, 12837, 50307-50315, 12841, 50316-50318, 12111, 50319-50349, 15610, 50350-50354, 16011, 50355-50362, 13056, 50363-50364, 2366, 50365-50384, 12860, 50385-50387, 2372, 50388-50393, 12865, 50394-50413, 16473, 50414-50415, 12877, 50416, 4741, 50417-50434, 15583, 50435-50436, 14434, 50437, 14257, 50438, 12290, 50439-50444, 15587, 12889, 12233, 50445-50473, 16915, 50474-50475, 16918, 50476-50482, 14249, 50483-50486, 15862, 12685, 50487-50498, 15608, 50499-50522, 16928, 12914, 50523-50526, 13952, 50527-50553, 12928, 50554-50563, 16947, 50564-50566, 16949, 50567, 13074, 50568-50576, 12127, 50577-50580, 15645, 50581-50594, 16962, 50595, 15649, 50596-50599, 15655, 50600-50606, 16966, 50607, 17072, 50608-50609, 12424, 50610-50616, 13739, 50617-50618, 12132, 50619-50624, 14297, 50625-50627, 12953, 50628-50634, 13141, 50635-50642, 12481, 50643-50648, 13203, 50649-50655, 16981, 50656-50664, 16644, 50665-50668, 14817, 50669-50677, 2559, 50678-50681, 15410, 16643, 50682-50691, 16488, 50692-50694, 12976, 50695-50704, 2498, 50705-50709, 12986, 50710-50732, 15707, 50733-50745, 1406, 50746-50749, 14029, 50750-50755, 15717, 50756-50757, 13761, 50758-50759, 14336, 50760-50779, 16028, 50780-50782, 14903, 50783-50788, 15345, 50789-50810, 13631, 50811-50813, 32687, 50814-50821, 12562, 50822, 15747, 50823-50826, 15549, 50827-50830, 16027, 50831-50835, 13581, 50836-50843, 12205, 50844-50850, 15372, 50851-50865, 14153, 50866, 14955, 50867-50897, 13089, 50898-50904, 14387, 50905-50911, 17064, 50912, 17065, 14394, 50913-50915, 13510, 14934, 50916-50922, 15788, 50923-50924, 15467, 50925-50934, 15682, 50935-50940, 17076, 50941-50967, 12960, 50968, 13092, 50969-50970, 13588, 50971-50982, 15821, 50983-50987, 13737, 50988-50995, 19321, 50996-51003, 18229, 51004-51007, 18288, 51008-51012, 19437, 17110, 17726, 51013-51025, 19704, 51026-51029, 17124, 51030-51041, 17130, 51042-51090, 23, 18783, 19686, 51091-51094, 19363, 51095, 18621, 19318, 51096-51107, 18443, 51108-51109, 17167, 51110-51121, 17173, 51122-51132, 17177, 51133-51148, 17185, 51149-51151, 17143, 51152-51160, 18324, 51161-51163, 18054, 51164-51169, 18936, 51170-51175, 17198, 51176-51189, 18354, 51190, 17775, 51191-51198, 17214, 51199-51213, 17221, 51214-51221, 18923, 51222-51230, 18315, 51231-51237, 17398, 17238, 51238-51241, 17242, 51242-51248, 18059, 51249-51258, 19763, 51259-51266, 17256, 51267-51273, 2737, 51274-51279, 18470, 51280-51325, 18376, 51326-51345, 18449, 51346-51383, 17335, 51384-51408, 18040, 51409-51415, 17858, 51416-51421, 17360, 51422-51449, 17197, 51450-51461, 17447, 51462-51463, 17382, 51464-51465, 17384-17385, 18962, 51466-51470, 19432, 51471-51480, 18566, 51481-51506, 19793, 51507-51524, 17419, 51525-51526, 17422, 51527-51573, 17351, 51574-51581, 19424, 51582-51597, 18047, 51598-51617, 17391, 51618-51652, 17945, 51653-51678, 17594, 51679-51691, 19693, 19405, 51692-51723, 19176, 51724, 17533, 51725-51726, 17535, 51727-51744, 17542, 51745-51746, 17607, 51747-51749, 17502, 51750-51760, 467, 51761-51774, 17564, 51775-51789, 17571, 51790-51792, 17596, 51793-51804, 17583, 51805-51816, 17749, 51817-51851, 17602, 51852-51864, 18159, 51865-51867, 2947, 51868-51889, 18392, 51890-51891, 17628, 51892-51896, 17152, 51897-51921, 18450, 51922, 19794, 51923-51930, 18920, 51931-51935, 17693, 51936-51958, 2993, 51959, 2578, 51960-51963, 18900, 51964-51981, 17682, 51982-51990, 17688, 51991-52007, 18175, 52008-52031, 19527, 52032-52038, 18280, 17724, 52039-52055, 19631, 52056-52069, 17742, 52070-52074, 17329, 52075-52092, 17347, 52093-52100, 3162, 17770, 52101-52113, 17780, 52114-52126, 17786, 52127-52129, 17789, 52130-52168, 28939, 17811, 52169-52173, 17817, 52174-52196, 17782, 52197-52214, 19287, 52215-52237, 17275, 52238, 36671, 52239-52258, 17875, 19148, 52259-52264, 17880, 52265, 17556, 29009, 52266-52288, 6287, 52289-52303, 17898, 52304-52311, 17903, 52312-52314, 17272, 52315-52316, 18902, 52317, 17673, 18564, 52318-52321, 19406, 52322-52324, 17912, 52325, 17913, 52326-52331, 32172, 52332-52335, 17920, 52336-52342, 19120, 52343-52360, 5444, 52361-52379, 17663, 52380-52391, 17795, 52392-52401, 19412, 52402-52404, 19554, 52405-52408, 19804, 52409-52413, 37352, 52414-52421, 19397, 52422-52425, 19098, 52426-52443, 19727, 52444-52450, 18011, 52451-52472, 17867, 52473-52479, 18032, 52480-52492, 18038, 52493-52501, 19754, 52502-52508, 18048-18049, 52509-52514, 19375, 52515-52518, 17731, 52519-52525, 19026, 52526-52551, 18507, 52552-52553, 18075, 52554-52561, 19201, 52562-52563, 18082, 52564-52574, 40486, 52575-52579, 38332, 52580-52591, 18094-18095, 52592-52599, 18099, 52600, 17845, 52601-52628, 18397, 52629-52635, 18859, 52636-52647, 19266, 52648-52651, 18144, 52652-52663, 18722, 52664-52689, 18122, 52690-52701, 18169, 52702-52719, 17407, 52720-52743, 18193, 52744-52746, 18967, 52747-52752, 18858, 52753, 18200, 18269, 52754-52758, 18202, 52759-52763, 18793, 52764-52768, 18664, 52769-52772, 18706, 52773, 19520, 52774-52789, 17135, 52790-52791, 17294, 52792-52796, 17610, 52797-52805, 18642, 52806-52814, 18227, 52815-52825, 18237, 52826-52835, 17171, 52836-52842, 18710, 52843-52870, 19104, 52871-52878, 9956, 52879-52922, 18312, 52923-52940, 18322, 52941-52955, 18500, 52956-52959, 18337, 52960-52971, 18352, 52972-52973, 18355, 52974-52983, 18359, 52984-53001, 18696, 53002-53011, 18258, 53012-53017, 17199, 53018-53020, 18383, 53021-53039, 18463, 53040-53065, 19153, 18799, 53066-53079, 7863, 53080-53084, 17711, 53085-53092, 18442, 53093-53101, 18448, 53102-53125, 18458, 53126-53132, 17291, 53133-53136, 17981, 19440, 53137-53145, 19319, 53146-53155, 19134, 53156-53160, 18489, 53161-53186, 18502, 53187-53194, 18509, 53195-53205, 18518, 53206-53207, 17768, 53208-53240, 17686, 53241-53251, 18796, 53252-53253, 17518, 53254-53282, 18559, 53283-53290, 18966, 53291-53297, 19174, 53298-53316, 18930, 53317-53330, 18063, 53331-53337, 19496, 53338-53340, 18234, 53341, 27629, 18595, 53342-53353, 17551, 53354-53431, 18656, 53432-53436, 17929, 53437-53440, 17464, 53441-53442, 18707, 53443-53451, 17450, 53452-53476, 18908, 53477-53493, 18699, 53494-53511, 18838, 53512-53518, 18713, 53519-53532, 18514, 53533-53540, 18730, 53541, 18731-18732, 53542-53551, 19585, 53552-53562, 16439, 53563-53568, 18754, 4826, 53569-53578, 19377, 53579-53584, 18763, 53585-53612, 16640, 53613-53632, 18794, 19487, 53633-53668, 19506, 53669-53677, 19444, 53678-53691, 18833, 53692-53693, 17754, 53694-53700, 19038, 53701-53713, 19200, 53714-53747, 19339, 53748-53757, 33911, 18877, 53758-53771, 17344, 53772-53789, 17986, 53790-53812, 18527, 17639, 53813-53816, 31144, 18268, 53817-53818, 18922, 53819-53832, 18934, 53833, 18951, 53834-53889, 18423, 53890-53893, 18281, 53894-53904, 19624, 53905-53925, 2300, 53926-53929, 18903, 53930-53935, 17964, 53936, 18995, 53937-53952, 17735, 53953-53979, 19024, 53980-53987, 19030, 53988-54000, 18761, 54001-54024, 19054, 54025-54052, 19070, 54053-54056, 19073, 54057-54074, 19086, 18556, 54075-54104, 19109, 54105, 19110, 54106-54110, 19113, 54111, 19115, 54112-54125, 17872, 18739, 54126-54163, 17290, 54164, 19150, 54165-54167, 19152, 54168-54176, 19156, 54177-54181, 18780, 54182-54198, 19569, 54199-54204, 18561, 54205-54208, 19182, 19184, 54209-54229, 19204, 54230-54235, 19301, 54236-54246, 18918, 54247-54250, 17431, 54251-54253, 17897, 54254-54265, 19618, 54266, 19445, 54267-54269, 17904, 54270-54280, 19237, 54281, 19027, 54282-54288, 19243, 54289-54307, 7411, 54308-54342, 19283, 54343-54355, 17349, 54356-54360, 19428, 54361-54386, 19636, 54387-54392, 19317, 54393-54410, 18909, 54411-54421, 19813, 54422-54431, 18515, 54432-54466, 18476, 54467-54469, 4061, 54470-54473, 19719, 54474-54492, 19381, 54493-54501, 19391, 54502-54508, 19400, 54509-54528, 19755, 54529-54530, 17463, 54531-54548, 19127, 54549-54614, 19460, 54615-54634, 19475, 54635-54640, 19479, 54641-54646, 19484, 54647-54666, 12341, 54667-54675, 19504, 54676-54681, 17662, 54682-54683, 19509, 54684-54685, 19512, 54686-54693, 19492, 54694-54707, 19523, 54708-54710, 19526, 17778, 54711-54717, 18749, 54718-54741, 19335, 18070, 54742-54744, 18079, 54745-54760, 19562, 54761-54806, 19587, 54807-54825, 19760, 19388, 54826-54838, 19610, 54839-54846, 19354, 54847-54871, 12985, 54872-54895, 18715, 54896-54917, 17252, 54918-54931, 19395, 54932-54939, 19571, 54940-54958, 18424, 54959-54973, 19698, 54974-54976, 19700, 54977-54978, 19702, 54979-54996, 19711, 54997-55000, 18205, 55001-55009, 18875, 55010-55018, 17203, 55019-55074, 19756, 55075-55081, 3128, 55082-55085, 19463, 55086-55096, 19773, 55097-55116, 19577, 55117-55124, 19790, 55125-55129, 17750, 55130-55150, 19809, 55151-55183, 17983, 55184-55202, 21608, 55203-55227, 19876, 55228-55267, 20385, 55268-55273, 19998, 55274-55290, 19973, 55291-55306, 20002, 55307-55326, 20032, 20131, 55327, 898, 55328-55329, 21251, 55330-55343, 22844, 55344-55348, 20087, 55349-55362, 21540, 55363-55369, 20130, 55370-55380, 22680, 55381-55382, 22758, 55383-55389, 20171, 55390-55412, 21963, 55413-55414, 21103, 55415-55416, 21752, 55417-55435, 20260, 55436-55438, 20025, 55439-55450, 20280, 55451, 25964, 55452-55466, 20304, 55467-55505, 467, 55506-55526, 22923, 55527-55571, 20500, 55572-55574, 20503, 55575-55579, 20516, 55580-55584, 20521, 55585, 20528, 55586-55589, 20540, 55590-55594, 20558, 55595-55621, 19937, 55622-55629, 21805, 55630-55633, 21355, 55634-55636, 2082, 55637-55654, 20058, 55655-55685, 20695, 55686-55689, 20701, 55690-55715, 19962, 55716-55720, 20765, 55721-55731, 22058, 55732-55745, 22770, 55746-55753, 21179, 55754-55756, 41, 55757-55765, 20823, 55766, 21988, 55767, 20997, 22474, 55768-55779, 20848, 55780-55784, 20697, 55785-55787, 20861, 55788-55789, 20337, 55790-55816, 20918, 55817-55823, 12174, 55824-55825, 20931, 55826-55834, 20310, 55835-55864, 21664, 55865-55882, 22465, 55883-55885, 21033, 55886-55888, 21037, 55889-55890, 19847, 55891-55895, 21053, 55896-55913, 21070, 55914, 21086, 55915-55916, 21093, 55917-55931, 21117, 55932-55942, 22364, 55943-55958, 21765, 55959-55987, 21194, 55988-55996, 20355, 55997-56002, 21220, 56003-56016, 21241, 56017-56034, 22280, 56035, 21284, 56036-56045, 25360, 56046-56057, 20060, 56058-56063, 21671, 56064-56098, 21399, 22888, 56099-56119, 22809, 56120-56146, 21483, 56147-56168, 20096, 56169-56173, 21889, 56174, 21537, 21262, 56175-56196, 21579, 56197-56216, 21063, 21327, 56217-56262, 20499, 56263-56281, 21923, 21459, 56282-56297, 5906, 56298, 19890, 56299-56304, 21754, 56305-56321, 21776, 56322-56331, 20727, 21749, 21790, 56332-56354, 21837, 56355-56361, 21848, 56362-56379, 21871, 56380-56389, 5575, 56390-56406, 21924, 56407-56440, 20350, 56441, 22826, 20386, 56442-56445, 22295, 56446-56449, 21987, 56450, 22137, 56451-56454, 20312, 56455-56462, 22013, 56463, 22018, 56464-56466, 22025, 56467-56468, 22037, 56469, 21681, 56470-56486, 22549, 21730, 56487-56489, 22076, 56490-56500, 21157, 56501-56514, 22121, 56515-56527, 19945, 56528-56533, 19883, 56534-56542, 21193, 56543-56558, 22203, 56559, 20537, 56560-56583, 22235, 56584-56596, 21791, 56597-56600, 22263, 56601-56625, 21083, 56626-56636, 20766, 56637-56638, 22325, 56639-56650, 22345, 56651-56661, 22373, 56662-56665, 25358, 56666-56690, 22412, 56691-56720, 22459, 56721-56728, 21478, 56729-56748, 21242, 56749-56758, 21539, 56759-56765, 22570, 56766-56781, 21391, 56782-56785, 22605, 56786, 22606, 56787-56797, 22623, 56798-56799, 22245, 20670, 56800-56810, 27147, 56811-56814, 21210, 56815, 22657, 56816-56851, 22703, 56852-56870, 22747, 56871-56882, 5150, 56883-56907, 22823, 56908-56911, 19913, 56912-56933, 21801, 56934-56963, 22712, 56964-56966, 21787, 56967-56986, 20031, 56987-56991, 22161, 19868, 56992-56998, 20357, 56999-57016, 20982, 57017-57020, 19920, 57021-57033, 20773, 57034-57041, 19947, 57042-57046, 19952, 57047-57055, 19969, 57056-57057, 22447, 57058-57061, 21853, 57062-57069, 20003, 57070-57078, 20381, 57079-57082, 20036, 57083-57103, 22850, 57104-57111, 5871, 57112-57116, 20527, 57117-57159, 21036, 57160-57172, 20196, 57173-57180, 20919, 57181-57186, 20219, 21576, 57187-57212, 22423, 57213-57240, 20443, 57241-57270, 23, 57271-57274, 24147, 57275-57281, 20013, 57282-57292, 21900, 57293-57319, 20456, 57320-57335, 20479, 57336-57337, 21967, 57338-57342, 20510, 57343-57350, 20368, 57351-57367, 20567, 57368-57428, 20654, 57429-57439, 20671, 57440-57445, 20677, 57446-57470, 20721, 57471-57563, 22270, 57564-57598, 20849, 57599-57627, 20932, 57628-57634, 20941, 57635-57643, 20953, 57644-57704, 20992, 57705, 21068, 57706-57709, 21061, 57710-57716, 21088, 57717-57781, 21196, 57782-57790, 21214, 57791-57793, 21218, 57794-57811, 21255, 57812-57814, 21771, 57815-57839, 20582, 57840-57858, 21331, 57859-57862, 21342, 57863-57890, 21400, 57891-57899, 21441, 57900-57905, 21422, 57906-57913, 19908, 57914-57922, 2285, 57923-57926, 22880, 57927-57929, 21074, 57930-57933, 21974, 57934-57935, 21475, 21479, 57936-57937, 20156, 57938-57944, 21506, 57945-57955, 21691, 57956-57970, 21553, 57971-57974, 21558, 57975-58040, 1371, 58041-58074, 31197, 58075-58103, 20681, 58104-58113, 21655, 58114-58144, 22435, 58145-58151, 21846, 58152, 21850, 58153-58177, 21652, 20630, 58178-58180, 22248, 58181, 21894, 58182-58195, 21911, 58196-58202, 21002, 58203-58225, 22593, 58226-58237, 20429, 58238-58243, 21981, 58244-58254, 22160, 22780, 58255-58259, 20556, 58260-58264, 22036, 58265-58273, 22050, 58274-58313, 21501, 58314-58339, 22159, 58340-58345, 22166, 58346-58357, 20430, 58358, 21480, 58359-58366, 20883, 58367-58373, 22206, 58374-58393, 22222, 22225, 58394-58403, 22249, 20084, 58404-58406, 22256, 58407-58473, 22340, 58474-58489, 22367, 58490-58508, 20378, 58509, 22400, 58510-58544, 21637, 58545-58559, 20807, 58560, 30964, 58561-58574, 30872, 58575-58581, 22598, 58582-58601, 30908, 58602-58611, 21081, 58612, 22561, 58613-58622, 6148, 58623-58637, 20829, 58638-58641, 22595, 58642-58665, 22883, 58666-58679, 2051, 58680-58691, 22679, 58692, 22685, 58693-58695, 22687, 58696, 22907, 58697-58713, 22700, 58714-58754, 22760, 58755-58767, 22771, 58768-58772, 22879, 58773-58786, 20110, 58787-58857, 21426, 58858-58879, 22935, 58880-58888, 22512, 58889-58901, 19864, 58902-58943, 21929, 58944-58969, 19968, 58970-58972, 20822, 58973-58988, 19997, 58989-59003, 22308, 59004-59026, 20080, 59027-59031, 21517, 59032-59051, 20135, 59052-59059, 23214, 59060-59083, 20188, 59084-59101, 31122, 59102-59104, 29741, 59105-59110, 20245, 59111-59140, 20283, 59141-59155, 22719, 59156-59166, 21980, 59167, 28577, 59168-59192, 20360, 59193-59203, 19835, 59204-59219, 27903, 59220-59278, 20485, 59279-59295, 20811, 59296-59299, 20529, 59300-59302, 21899, 59303-59319, 6206, 59320-59332, 605, 22455, 59333-59340, 20607, 59341-59357, 20629, 20632, 59358-59359, 21592, 59360-59386, 20665, 59387-59445, 21432, 59446-59451, 22209, 59452-59470, 21376, 59471-59472, 22060, 59473-59480, 20307, 59481-59520, 22898, 59521-59525, 20875-20876, 59526-59537, 21435, 20897, 59538-59550, 19984, 59551-59556, 20473, 59557-59564, 20926, 59565-59571, 20579, 59572, 20270, 59573-59587, 20961, 59588-59606, 20593, 59607-59629, 21077, 59630-59666, 235, 59667-59668, 19974, 59669-59673, 21121, 59674-59715, 21184, 59716-59732, 20064, 59733-59734, 22546, 21212, 59735-59745, 21237, 59746-59763, 22197, 59764-59783, 22839, 59784-59791, 21311, 59792-59794, 5825, 59795, 20584, 59796-59811, 22288, 59812-59818, 21363, 59819-59821, 21370, 59822-59868, 21430, 59869-59906, 21487, 59907-59950, 25693, 59951-59952, 22344, 59953-59956, 21569, 59957-59967, 20129, 59968-59987, 21624, 59988, 21626, 59989-59991, 19860, 59992-59993, 21743, 20779, 59994-60024, 21703, 60025-60037, 21724, 60038-60049, 20137, 60050-60081, 11104, 60082-60088, 21510, 60089-60093, 22566, 60094-60107, 22237, 60108-60125, 30187, 60126-60147, 22875, 60148-60155, 22908, 60156, 21914, 60157-60172, 19993, 60173-60174, 19885, 60175-60180, 5903, 60181-60187, 21956, 60188-60209, 21975, 60210-60262, 20890, 60263-60315, 22192, 60316-60332, 30530, 60333-60359, 21643, 60360-60386, 22189, 60387-60389, 22306, 60390-60395, 22317, 22571, 60396-60442, 22015, 60443-60446, 21147, 60447-60450, 39081, 60451-60467, 22153, 60468-60510, 22472, 60511-60521, 20268, 60522-60558, 20736, 60559-60573, 21590, 60574-60583, 22085, 60584-60598, 22626, 60599-60629, 27191, 60630-60654, 22764, 60655-60676, 21429, 60677-60703, 21127, 60704, 20476, 60705-60712, 20894, 60713-60729, 22833, 60730-60765, 22741, 60766-60783, 20628, 60784-60830, 19897, 60831, 22236, 60832-60852, 19930, 60853-60854, 19942, 60855-60859, 19950, 60860-60863, 22502, 60864-60870, 6287, 60871-60872, 19976, 60873-60923, 20062, 60924, 21278, 60925-60931, 21414, 60932-60950, 20119, 60951-60969, 20324, 60970-60971, 19848, 60972-60993, 20625, 21838, 60994-61001, 22568, 61002-61018, 20232, 61019-61023, 20943, 61024-61025, 22199, 61026-61049, 21458, 61050-61058, 20289, 61059-61064, 20617, 61065, 20301, 61066-61072, 20322, 61073-61085, 20338, 61086-61092, 20348, 61093-61109, 21488, 61110-61115, 21072, 61116-61126, 21146, 61127-61128, 21286, 61129-61149, 20457, 61150, 20488, 61151-61187, 21983, 61188-61196, 20539, 20542, 61197-61200, 20216, 61201-61205, 20565, 61206-61244, 20624, 61245-61252, 21418, 61253-61260, 20199, 61261-61292, 20679, 61293-61306, 21433, 61307-61318, 20732, 61319-61342, 20769, 61343-61363, 22310, 61364-61368, 20815, 61369-61375, 21710, 61376-61386, 21951, 61387-61393, 21378, 20850, 61394-61397, 22335, 61398-61402, 19834, 61403-61411, 21584, 61412-61418, 12217, 61419-61428, 20908, 61429-61486, 21812, 61487-61491, 21040, 61492-61495, 21044, 61496-61502, 21055, 61503-61535, 21104, 61536-61552, 19850, 61553-61566, 24913, 61567-61581, 20590, 61582-61586, 22939, 61587-61590, 21188, 61591-61642, 21256, 61643-61644, 21260, 61645-61646, 21263, 61647-61651, 21940, 61652-61658, 22331, 61659-61666, 21312, 61667-61673, 21323, 21326, 22723, 61674-61675, 21030, 61676-61678, 21354, 61679-61685, 21719, 61686-61690, 25453, 61691-61704, 21407, 61705-61714, 21582, 61715-61726, 28581, 61727, 20792, 61728-61756, 21493, 61757-61764, 20704, 61765-61775, 21543, 61776-61778, 21300, 61779-61794, 21198, 61795-61799, 21598, 61800-61806, 21609, 61807-61815, 21708, 61816-61850, 20011, 61851-61880, 22731, 61881-61899, 31269, 61900-61906, 22139, 61907-61915, 4826, 61916-61934, 20070, 61935-61936, 21802, 61937-61947, 22362, 61948-61990, 22729, 22736, 61991-62002, 22202, 62003-62008, 20206, 62009-62016, 21925, 62017-62022, 22077, 62023-62045, 21046, 62046-62069, 22016, 62070-62083, 3867, 62084-62091, 22059, 62092-62104, 22091, 62105-62114, 21949, 62115-62127, 22629, 22131, 62128, 22135, 62129-62145, 22165, 62146-62199, 22234, 62200-62201, 22240, 62202-62206, 21920, 62207-62210, 21470, 62211-62237, 30630, 62238-62250, 7411, 62251-62264, 22332, 62265-62266, 22333, 62267-62270, 19852, 62271-62320, 22940, 62321, 22755, 62322-62361, 21810, 62362-62366, 22514, 62367-62380, 22864, 62381-62398, 22558, 62399-62404, 20789, 62405-62418, 22283, 62419-62430, 22600, 62431-62435, 21078, 62436-62449, 22634, 62450-62461, 22132, 22652, 62462-62464, 20937, 62465-62472, 22675, 62473-62540, 22767, 62541-62554, 31178, 62555-62583, 20201, 62584-62598, 22861, 62599-62615, 20042, 62616-62642, 21685, 62643-62645, 26528, 62646-62653, 22948, 62654-62664, 22956, 5903, 62665-62669, 23243, 62670-62698, 21086, 62699, 23657, 62700, 2280, 62701-62703, 60815, 62704, 21802, 62705-62708, 24955, 62709-62712, 22989, 62713-62726, 23410, 62727-62757, 23394, 62758-62760, 23173, 23230, 62761-62803, 21540, 62804-62805, 5506, 21159, 7411, 62806, 23384, 62807, 22997, 62808-62814, 56211, 62815-62820, 24689, 62821-62829, 58973, 62830-62853, 58987, 62854-62863, 23058, 62864, 23060, 62865-62866, 23282, 62867, 23062, 62868, 5825, 62869-62891, 24196, 20350, 62892, 20359, 62893-62898, 5834, 23200, 62899-62900, 23201, 62901, 23405, 23393, 62902-62906, 23202, 62907-62910, 23248, 62911-62915, 23090, 62916-62924, 23095, 62925-62935, 21673, 62936-62946, 23215, 62947-62957, 23316, 62958-62960, 23292, 62961-62971, 23074, 62972-62978, 23129, 62979-62991, 59559, 62992-62994, 23002, 62995-62996, 23144, 62997-63000, 60968, 63001, 24913, 63002-63003, 23371, 63004-63012, 25581, 63013-63021, 23266, 23163, 63022-63024, 26140, 63025-63026, 62366, 63027-63030, 23169, 20961, 63031-63034, 23937, 63035-63041, 4826, 63042-63043, 37, 63044-63050, 23180, 63051-63052, 23378, 63053-63056, 23184, 38513, 58113, 63057-63060, 22502, 63061, 23191, 63062-63064, 5527, 63065-63071, 25004, 63072-63079, 20232, 23207, 23407, 63080-63085, 23211, 63086-63107, 23007, 63108-63111, 22634, 63112-63124, 57619, 63125, 23895, 63126, 58350, 23232, 63127-63128, 26939, 63129, 23322, 23052, 63130-63139, 23098, 63140-63142, 23245, 63143-63155, 23190, 63156-63157, 59157, 63158-63171, 21884, 63172-63173, 22977, 63174-63178, 5575, 63179-63190, 27191, 63191-63192, 23148, 63193-63194, 23154, 63195-63198, 23164, 20346, 63199, 23283, 23324, 63200-63202, 23175, 63203-63210, 23310, 63211-63224, 22962, 63225-63230, 23225, 63231-63240, 13, 63241-63242, 60195, 63243-63253, 24774, 63254-63262, 23307, 63263-63272, 23314, 63273-63276, 23252, 63277-63285, 23132, 63286-63287, 23325, 63288-63289, 23359, 59242, 63290-63301, 23331, 63302-63307, 23369, 63308-63314, 62307, 63315-63319, 31178, 23351, 61330, 25964, 63320-63330, 23357, 63331-63342, 22973, 63343-63344, 23362, 63345, 23363, 23174, 63346-63350, 23372, 63351, 23373, 23271, 63352, 23374, 63353-63354, 23317, 63355, 34329, 6145, 63356-63367, 27369, 63368-63373, 23383, 23188, 63374-63378, 23249, 63379-63381, 3983, 63382-63385, 23273, 63386-63408, 6206, 63409-63413, 23023, 63414-63429, 23401, 63430, 23402, 23404, 63431-63433, 23152, 63434-63435, 12039, 63436-63438, 23048, 63439-63441, 61632, 23416, 63442-63444, 15845, 63445-63446, 23171, 63447-63448, 3305, 63449-63476, 23450-23451, 63477-63485, 23491, 63486-63490, 23506, 27145, 63491-63494, 23519, 36872, 63495-63515, 26011, 63516-63528, 23456, 63529-63541, 23665, 63542-63543, 23675, 63544-63555, 23133, 63556-63565, 17281, 63566-63586, 27088, 24996, 63587-63598, 23854, 63599-63602, 23876, 11852, 63603-63611, 23895, 63612-63614, 23903, 63615-63619, 23923, 63620-63631, 23985, 63632-63650, 24034, 27126, 63651-63658, 24079, 63659-63660, 26070, 23781, 63661-63662, 34564, 63663-63668, 24118, 63669-63675, 24142, 63676-63698, 23555, 63699-63700, 63133, 24068, 63701-63702, 24238, 63703-63713, 24270, 24556, 63714-63716, 23564, 63717-63731, 25075, 63732-63737, 24043, 63738-63745, 24907, 24373, 63746, 24381, 63747-63754, 26404, 63755-63764, 26158, 63765-63776, 24465, 63777-63789, 23539, 63790-63791, 25337, 63792-63794, 27135, 63795-63800, 24524, 63801-63809, 24570, 63810-63831, 27383, 24635, 63832-63833, 25117, 63834-63836, 26551, 63837-63850, 26603, 24691, 63851-63857, 26855, 63858-63863, 24967, 63864, 35186, 63865, 25040, 63866-63869, 24774, 63870-63874, 24773, 63875, 23477, 63876-63879, 35257, 63880-63881, 25522, 63882, 24814, 63883-63886, 24734, 63887-63903, 25058, 63904-63908, 26426, 63909-63917, 23496, 63918-63925, 26390, 25216, 63926-63935, 24979, 25606, 23977, 63936, 26096, 63937-63943, 25003, 63944-63963, 25212, 63964-63970, 24304, 63971-63975, 25103, 63976-63997, 25542, 63998-64008, 12278, 64009-64019, 26482, 25221, 64020-64038, 27113, 24847, 64039, 23779, 64040-64054, 24661, 64055-64059, 25350, 64060, 61741, 64061-64073, 23605, 64074-64079, 25421, 64080, 25425, 64081-64090, 23993, 64091-64097, 26198, 25490, 64098-64099, 25500, 64100-64103, 25262, 64104-64107, 27220, 64108-64109, 25544, 64110-64113, 27095, 64114, 25246, 64115-64119, 25079, 64120-64127, 63161, 64128-64132, 25770, 25634, 64133-64136, 27072, 64137-64147, 25668, 64148-64156, 24622, 64157-64167, 25335, 64168-64174, 27101, 64175-64181, 23573, 64182-64189, 25768, 64190-64193, 25790, 64194-64203, 23857, 64204-64210, 23833, 64211-64239, 26107, 25122, 64240-64244, 63007, 64245-64250, 38833, 64251-64255, 6148, 64256-64260, 25974, 64261-64262, 24334, 64263, 25979, 64264-64265, 36336, 64266-64273, 25511, 24921, 64274-64284, 26106, 64285-64286, 26063, 26910, 64287, 26073, 64288-64297, 26111, 64298-64300, 26127, 64301-64302, 23552, 26424, 64303-64312, 23978, 64313-64330, 6062, 64331-64342, 26037, 27479, 64343-64348, 26284, 64349-64359, 24196, 64360-64374, 34329, 64375, 24586, 64376-64378, 26402, 64379-64382, 26417, 64383-64385, 25504, 64386-64387, 24955, 64388-64389, 27187, 26442, 64390-64396, 26465, 64397-64403, 26484, 64404-64418, 26540, 24463, 64419, 27332, 64420-64425, 24882, 26768, 24510, 64426-64442, 26420, 64443-64456, 24864, 64457, 26481, 64458-64469, 21871, 64470-64472, 24028, 64473-64476, 26696, 64477-64480, 24376, 64481-64484, 26548, 64485-64491, 26727, 64492-64498, 25063, 64499, 26742, 64500-64501, 25866, 64502-64509, 26767, 6034, 64510-64514, 26780, 64515-64518, 23717, 64519-64528, 24737, 61458, 64529-64542, 26262, 26857, 64543, 26992, 64544, 25373, 64545-64550, 26881, 64551-64556, 26436, 64557-64562, 26917, 64563-64564, 25417, 64565-64580, 25581, 26956, 64581-64588, 27418, 64589-64590, 26985, 64591-64601, 25748, 24541, 64602-64607, 26866, 64608-64629, 24053, 39071, 64630-64637, 27147, 64638-64645, 27183, 64646-64659, 25725, 64660-64662, 27255, 64663-64673, 27085, 27281, 64674-64686, 26134, 64687, 25453, 64688, 26139, 64689, 24981, 64690-64692, 25121, 64693, 26251, 64694-64696, 26018, 64697, 26706, 64698, 24208, 64699-64706, 25538, 64707-64712, 27432, 64713-64731, 27474, 64732-64739, 24913, 27364, 64740-64746, 27528, 64747-64759, 23463, 64760-64768, 23475, 64769-64777, 23493, 64778-64779, 23502, 25512, 64780-64782, 26701, 64783-64787, 23538, 64788-64795, 25392, 26844, 64796, 23586, 64797-64807, 23620, 64808-64811, 24777, 64812, 24554, 64813-64818, 23683, 64819, 39561, 64820, 57076, 64821-64828, 5834, 64829-64830, 26202, 23749, 64831-64863, 26989, 64864-64874, 24197, 64875-64888, 26870, 26940, 23866, 64889, 26816, 64890-64903, 57199, 64904-64914, 38596, 64915-64916, 24935, 64917-64918, 25095, 64919-64920, 26125, 25601, 64921-64934, 25758, 64935-64940, 25857, 64941, 24112, 64942-64946, 24879, 64947-64952, 26971, 64953-64956, 24147, 64957-64958, 25328, 64959-64963, 25939, 64964-64966, 25113, 64967, 25277, 24185, 64968-64973, 23704, 64974-64977, 24256, 24324, 64978-64987, 24249, 64988-64992, 24263, 64993-64995, 24277, 64996-64999, 25994, 65000-65010, 26334, 65011, 26501, 65012-65018, 24104, 65019, 24346, 65020, 24783, 65021-65028, 24075, 65029-65035, 24404, 65036-65047, 24435, 65048-65086, 24606, 65087-65093, 24538, 65094-65098, 24318, 65099-65103, 24589, 24596, 65104-65105, 24612, 65106-65133, 24682, 65134-65135, 24684, 65136-65145, 24987, 65146-65157, 27099, 65158-65165, 5835, 65166-65168, 27352, 65169-65172, 26086, 65173-65176, 24808, 65177-65203, 25729, 57617, 65204-65218, 24951, 24954, 65219-65222, 26012, 65223-65225, 37629, 65226-65230, 24687, 65231-65255, 26712, 65256-65266, 25087, 65267-65272, 26851, 65273-65275, 25432, 65276-65279, 25363, 65280-65284, 25142, 65285-65290, 25598, 65291-65292, 27074, 65293-65296, 25184, 65297-65304, 25203, 65305-65310, 25975, 65311-65317, 27526, 65318-65321, 26664, 65322-65323, 18265, 65324-65325, 25259, 65326-65329, 25891, 65330-65334, 25306, 25577, 65335-65369, 38513, 65370-65381, 25433, 65382-65392, 25483, 65393-65395, 25496, 65396-65401, 26889, 65402, 25161, 65403-65407, 25527, 65408-65411, 25537, 65412, 25165, 65413-65416, 25559, 65417-65431, 23727, 65432-65434, 25615, 65435, 26957, 25618, 65436-65481, 23973, 65482-65483, 25742, 65484-65493, 26987, 65494-65504, 24271, 65505-65506, 24551, 65507, 5854, 25622, 65508, 36186, 65509-65515, 25836, 25841, 65516-65522, 25856, 65523, 25860, 65524-65526, 25872, 65527-65530, 26679, 65531-65542, 36273, 65543-65548, 25199, 65549-65566, 25600, 26784, 65567-65570, 36360, 65571-65593, 26075, 65594-65595, 58604, 65596-65610, 27162, 65611-65613, 27274, 26124, 65614-65616, 25460, 26137, 65617-65628, 26324, 65629-65636, 23829, 26216, 65637-65647, 23998, 65648-65660, 23575, 65661-65681, 26351, 65682-65693, 26213, 26210, 65694-65697, 26392, 65698, 23956, 25482, 65699-65702, 26413, 26030, 65703-65711, 27116, 65712-65716, 36335, 65717-65718, 27120, 25701, 65719-65724, 26478, 65725-65741, 26528, 26530, 65742, 24248, 65743-65748, 26559, 65749-65787, 24390, 65788-65800, 26691, 65801-65810, 23824, 65811-65823, 27013, 65824-65834, 26793, 65835-65838, 27227, 65839-65848, 26835, 65849-65854, 23482, 65855-65857, 24845, 65858-65860, 24316, 65861-65863, 25984, 65864-65870, 17326, 65871-65886, 26955, 65887-65899, 26990, 65900-65904, 27000, 65905-65921, 24214, 27044, 27046, 65922-65926, 27063, 27065-27066, 65927-65950, 27122, 65951-65956, 27412, 25061, 65957-65964, 25208, 65965-65966, 27181, 65967-65970, 27201, 65971-65974, 24716, 65975, 26192, 65976-65978, 27248, 65979-65992, 27286, 65993-66004, 27322, 66005-66009, 27334, 27341, 26279, 66010-66019, 26320, 66020-66027, 27394, 66028-66034, 27421, 66035-66036, 41078, 66037-66039, 27435, 62979, 66040-66052, 26972, 66053, 27468, 66054-66066, 27511, 66067-66077, 24650, 66078-66085, 47269, 23662, 66086-66097, 23505, 26853, 66098-66099, 26690, 66100-66115, 25140, 66116-66125, 23617, 66126-66138, 26594, 66139-66141, 23657, 66142-66143, 24947, 23687, 66144-66146, 26222, 66147-66152, 23715, 66153, 23721, 25171, 66154-66155, 27373, 66156-66166, 23969, 25530, 26287, 66167, 6206, 66168, 25531, 66169, 24849, 66170-66175, 23809, 66176-66180, 26899, 66181-66203, 27069, 66204-66205, 26140, 66206-66207, 23890, 66208-66212, 26330, 66213-66215, 35365, 66216-66219, 23931, 66220-66242, 26278, 66243-66245, 24074, 66246, 24026, 66247-66249, 27455, 66250-66253, 24049, 66254-66257, 24056, 26939, 66258-66259, 59157, 66260-66261, 26290, 66262-66265, 24113, 66266-66275, 23870, 66276-66283, 26062, 39891, 66284-66292, 24276, 66293, 24194, 66294-66300, 24212, 26873, 66301, 25046, 66302-66310, 23579, 66311-66315, 24267, 66316-66335, 26586, 66336-66337, 25802, 66338-66341, 24128, 66342-66344, 60491, 66345-66346, 41005, 66347-66349, 26524, 66350-66356, 24858, 24370, 66357-66360, 24378, 66361-66362, 23757, 66363-66386, 24454, 66387, 24460, 66388-66401, 24502, 66402-66442, 15845, 66443-66448, 24670, 66449-66469, 24742, 66470-66482, 24723, 66483-66485, 35240, 66486-66488, 24799, 66489-66520, 24886, 66521-66535, 26147, 66536-66538, 24751, 66539-66540, 25106, 66541-66551, 24964, 66552-66553, 25440, 66554-66557, 26342, 66558-66562, 26511, 66563-66577, 25051, 66578-66579, 26026, 66580-66606, 25498, 66607-66608, 25148, 66609-66611, 27298, 66612-66613, 25648, 66614-66623, 25204, 66624-66625, 27447, 66626-66628, 26041, 66629-66632, 24539, 66633-66635, 25241, 66636-66637, 26188, 26490, 66638-66641, 25267, 66642-66648, 25028, 66649, 27025, 66650-66653, 24044, 66654-66669, 25410, 25464, 66670-66674, 24284, 66675-66678, 5825, 66679-66684, 26922, 66685-66690, 25406, 23523, 66691-66692, 25420, 66693-66707, 25847, 25477, 66708-66709, 25487, 66710-66712, 25501, 66713-66724, 26653, 66725-66734, 62684, 66735-66737, 25563, 66738-66755, 24574, 25200, 66756-66759, 27265, 66760-66770, 26758, 66771-66774, 25677, 66775-66778, 24655, 66779, 25660, 66780-66782, 25702, 66783-66784, 25715-25716, 66785-66799, 25753, 5724, 26670, 66800-66809, 23808, 66810-66829, 27319, 66830-66839, 26108, 25791, 66840-66845, 27327, 66846-66848, 23806, 66849-66854, 26406, 66855-66859, 25941, 25767, 24744, 66860-66863, 25949, 66864-66872, 37570, 66873-66880, 25985, 66881-66885, 26001, 66886-66893, 24944, 66894-66897, 26052, 66898-66899, 53657, 66900-66905, 26868, 26076, 30, 66906-66907, 26081, 66908-66918, 26116, 66919-66920, 26945, 66921-66922, 26543, 66923-66933, 27467, 66934-66940, 24685, 26625, 66941-66957, 26220, 66958, 26228, 26230, 66959, 5903, 66960-66967, 23901, 66968, 27390, 66969, 26270, 66970-66971, 26272, 66972-66973, 24014, 66974, 26281, 66975-66989, 27197, 66990-67003, 22973, 62679, 26369, 67004-67006, 26385, 67007-67018, 26769, 67019-67023, 26432, 67024-67029, 26087, 67030-67033, 25130, 67034-67038, 26483, 67039-67045, 26507, 67046-67051, 26519, 67052-67055, 23716, 67056-67058, 27475, 67059-67094, 39009, 67095, 25638, 67096-67105, 24936, 67106-67107, 26666, 24919, 67108-67110, 26050, 67111-67129, 26723, 67130-67136, 27209, 67137-67146, 27124, 67147-67148, 25360, 67149-67157, 23989, 67158-67163, 23515, 67164-67171, 26874, 67172-67198, 27518, 67199-67203, 24141, 67204-67208, 27043, 25497, 67209-67213, 25969, 67214, 24422, 67215-67219, 26765, 67220-67227, 27071, 67228, 34690, 67229, 27082, 37145, 67230-67232, 27091, 67233-67237, 62571, 67238-67249, 26838, 67250-67262, 25795, 67263-67268, 23891, 67269-67272, 26148, 67273-67279, 27245, 67280-67281, 26459, 67282-67291, 26180, 67292-67293, 27279, 67294-67306, 27309, 67307-67314, 27342, 67315-67320, 20894, 67321, 25805, 67322, 24587, 24121, 67323-67324, 24099, 67325-67330, 25656, 26925, 67331-67338, 6145, 27410, 67339-67342, 27429, 27433-27434, 67343-67349, 24943, 67350, 27454, 67351-67356, 27211, 67357-67381, 24451, 24714, 67382-67390, 26513, 67391-67399, 23462, 35893, 67400-67409, 23535, 67410, 25334, 67411-67430, 25150, 67431-67436, 23590, 67437-67444, 23619, 67445, 34247, 67446-67453, 25983, 67454-67463, 23677, 67464, 24780, 67465-67480, 24865, 67481-67491, 24200, 67492-67497, 25957, 67498-67500, 63413, 67501-67520, 25750, 67521-67529, 23612, 67530-67541, 24461, 67542, 24683, 67543-67546, 23881, 67547-67548, 24171, 23892, 67549-67552, 25535, 67553-67569, 23958, 67570, 23961, 23963, 67571-67576, 23643, 67577-67592, 27503, 67593, 24070, 67594-67603, 24109, 26604, 67604, 24689, 67605-67623, 24160, 67624-67632, 23574, 67633-67642, 23966, 67643-67662, 24246, 67663-67665, 24254, 24759, 67666-67675, 24302, 67676-67678, 23520, 23490, 67679-67688, 24374, 37370, 67689-67694, 23837, 67695-67700, 24411, 67701-67726, 23667, 67727-67728, 24507, 67729-67744, 26880, 67745-67759, 24008, 67760, 23514, 67761-67772, 24639, 67773-67774, 26468, 67775-67777, 27001, 67778-67785, 24468, 67786-67790, 24698, 67791-67802, 24466, 67803-67821, 24787, 67822-67829, 27133, 67830-67844, 23668, 67845-67846, 23439, 67847-67848, 24881, 67849-67856, 24902, 67857-67861, 24700, 67862-67866, 24949, 67867-67877, 24969-24970, 67878-67911, 25070, 67912-67914, 26112, 67915-67917, 25893, 26077, 67918-67920, 25094, 67921, 25097, 67922-67932, 25139, 67933-67942, 25175, 67943-67946, 24756, 25187, 67947, 25195, 67948-67949, 25914, 24709, 67950, 23646, 67951-67956, 25244, 67957-67961, 26682, 67962-67987, 25115, 24937, 67988-67993, 25358, 67994-68004, 27414, 68005-68009, 26261, 68010-68035, 26440, 27510, 68036-68057, 26257, 68058-68060, 24728, 68061-68067, 25597, 68068-68071, 24036, 68072-68075, 25637, 68076-68082, 62781, 68083-68089, 25275, 68090-68094, 25704, 68095-68097, 24813, 68098-68115, 25766, 68116-68117, 24528, 25902, 68118-68132, 25422, 68133-68135, 25828, 68136, 25833, 68137-68138, 25844, 25886, 68139, 24089, 27436, 68140, 25854, 68141-68142, 25865, 68143-68152, 6198, 68153-68156, 25906, 68157-68170, 25950, 68171-68173, 23971, 4826, 25964, 68174-68178, 23609, 68179, 23936, 68180-68182, 25989, 68183-68191, 26023, 68192-68196, 23867, 68197-68201, 37138, 68202-68208, 26067, 68209-68235, 26163, 68236-68237, 25614, 68238-68243, 26187, 68244-68247, 26196, 68248-68252, 62905, 68253-68259, 34355, 68260-68270, 26965, 68271-68278, 24402, 68279, 63301, 68280-68281, 26756, 68282, 25673, 68283-68289, 26345, 68290-68302, 24557, 68303, 25305, 68304-68315, 26591, 12039, 68316-68317, 38923, 68318-68328, 26452, 68329-68335, 26480, 68336-68356, 23828, 68357, 26533, 24747, 68358-68360, 26186, 68361-68370, 26574, 68371-68377, 25665, 25992, 68378-68381, 5795, 41724, 68382, 26630, 68383-68390, 26654, 68391-68396, 26675, 68397-68401, 7411, 68402-68409, 25261, 68410-68417, 26600, 68418-68421, 26755, 68422-68434, 26813, 68435-68438, 26821, 68439-68442, 25379, 68443-68462, 23786, 68463, 27496, 68464-68468, 23841, 68469-68491, 26983, 26581, 68492-68499, 27004-27005, 68500-68505, 24948, 27042, 68506-68508, 27462, 68509-68539, 26779, 27143, 68540, 26093, 68541-68543, 24762, 27165, 68544-68553, 27196, 68554-68565, 27235, 68566, 40189, 68567-68574, 27262, 68575-68578, 27272, 68579-68586, 26933, 68587-68599, 27317, 68600, 26456, 68601-68618, 26808, 68619-68626, 27125, 27369, 68627-68632, 27450, 68633-68639, 24279, 68640-68642, 25248, 68643-68645, 27480, 68646-68671, 27553, 68672-68687, 27211, 68688-68690, 57495, 68691-68698, 27977, 68699-68732, 675, 68733-68736, 15845, 68737-68771, 6061, 2300, 68772-68774, 67112, 68775-68800, 27637, 68801-68806, 7411, 68807-68821, 27650, 68822-68828, 27698, 68829-68860, 10, 68861-68874, 27736, 68875-68881, 27814, 68882-68895, 20359, 28036, 68896, 5834, 68897-68911, 15231, 68912-68918, 5356, 68919-68941, 37317, 68942-68948, 27574, 68949-68958, 5871, 68959, 27923, 68960-68967, 6348, 68968-68982, 23779, 68983-68990, 6360, 68991-69017, 27751, 69018-69029, 65992, 69030-69032, 62366, 69033-69035, 9776, 69036-69038, 38743, 69039-69042, 59082, 69043-69044, 4826, 69045-69049, 24970, 69050-69061, 27858, 69062-69076, 22561, 69077, 27547, 69078-69104, 27810, 69105-69134, 27588, 69135-69175, 27847, 69176-69187, 25334, 69188-69205, 27871, 69206-69230, 27572, 69231-69233, 38535, 69234-69246, 7052, 27953, 69247-69261, 28015, 69262-69269, 5903, 69270-69296, 38865, 69297-69320, 64526, 69321-69322, 27927, 69323-69342, 12039, 69343-69352, 58774, 69353-69355, 27984, 69356-69371, 5198, 69372-69381, 27965, 6206, 69382-69391, 27980, 69392-69397, 6154, 27598, 5455, 69398-69405, 5825, 69406-69422, 28000, 69423-69434, 34329, 69435-69440, 56935, 69441-69445, 57865, 69446-69462, 26077, 69463-69473, 27548, 26402, 69474-69483, 23344, 69484-69490, 60306, and 69491-69506, respectively, in order of appearance.

[0052] TABLE A4 in the Appendix is a full list of antibodies identified as unique to COVID-19 survivors. Among survivors the most antibodies categorize as Class 3 with other classes of antibodies having fewer reads. Table discloses SEQ ID NOS 2-19, 32-33, 20-21, 24238, 69507, 4864, 1241, 2568, 10139, 2855, 2300, 6244, 4772, 2745, 5347, 69508-69509, 2970, 4186, 2518, 18448, 9961, 26483, 69510, 965, 27034, 4828, 11277, 27802, 4932, 69511-69516, 24550, 69517, 26309, 843, 69518, 26995, 25469, 69519-69522, 3556, 9712, 4138, 69523-69525, 27703, 69526-69528, 2294, 69529-69530, 2368, 3503, 5240, 69531, 24443, 69532, 26941, 7368, 2635, 11177, 69533-69534, 1316, 720, 369, 394, 11105, 25518, 24107, 69535-69536, 25397, 1648, 9602, 69537-69539, 2975, 5100, 27148, 69540, 11683, 11324, 23601, 69541, 27391, 25178, 4610, 23901, 7252, 761, 5980, 69542, 2509, 24435, 2769, 69543, 5193, 9799, 69544-69546, 26686, 27954, 23537, 27736, 2429, 2494, 6711, 27728, 244, 3081, 31, 1878, 2410, 7328, 28032, 5290, 69547, 27158, 3784, 69548, 27586, 69549, 2589, 2304, 25184, 69550, 24700, 3364, 6606, 1429, 940, 4010, 5353, 10426, 4314, 69551, 24627, 69552, 1824, 4790, 4818, 69553, 27039, 69554, 2620, 24985, 1060, 7037, 186, 4695, 69555-69556, 6377, 2951, 3098, 6601, 3974, 5189, 5228, 11210, 10548, 326, 1354, 69557, 9752, 5106, 10038, 6993, 69558, 1143, 3897, 6977, 69559-69562, 412, 69563-69564, 2898, 27890, 2856, 4404, 9745, 24265, 1445, 2682, 6456, 69565, 3888, 69566-69567, 4082, 25974, 1921, 6654, 69568-69569, 225, 1526, 69570-69571, 1257, 11478, 24921, 27426, 5033, 27113, 3882, 3402, 26790, 7685, 459, 69572, 3625, 11554, 69573-69575, 1081, 3872, 69576-69577, 2164, 1399, 23569, 3569, 957, 27874, 25634, 69578, 10706, 69579, 23595, 69580, 27323, 26388, 69581, 2533, 24803, 69582, 2237, 69583, 6876, 69584, 1266, 25502, 242, 9727, 1541, 4897, 5095, 69585-69586, 3165, 27361, 4387, 26433, 27049, 526, 24524, 69587, 1831, 25852, 27491, 69588, 10607, 3847, 294, 26893, 69589, 24365, 25526, 9599, 69590, 78, 7387, 10397, 3382, 4755, 1837, 3929, 2097, 5118, 24840, 26629, 3990, 28008, 69591, 10113, 69592, 5218, 26710, 1228, 7035, 2272, 10948, 24908, 69593-69594, 2090, 119, 69595, 6467, 6706, 25690, 6782, 1466, 24789, 69596-69597, 24873, 6875, 69598, 7374, 69599, 2835, 4274, 11446, 27517, 69600, 10137, 69601, 25205, 27645, 69602-69603, 5069, 69604-69605, 26367, 69606-69607, 1025, 69608, 11244, 1514, 26459, 9768, 69609, 2967, 11117, 69610, 10813, 69611, 3545, 265, 69612-69614, 25454, 26919, 69615-69620, 24345, 69621-69624, 5017, 69625-69626, 10936, 69627, 2086, 10099, 69628-69631, 25970, 2457, 4470, 69632, 1865, 69633, 3541, 2748, 69634, 11273, 69635, 11279, 27619, 4516, 6483, 6754, 2345, 69636-69637, 11403, 4947, 69638, 10755, 16529, 1652, 24178, 25750, 24787, 5256, 69639, 4630, 69640-69641, 4359, 1150, 5340, 27268, 28014, 69642, 6507, 27717, 69643, 11026, 69644, 27914, 3885, 26162, 11459, 24408, 4027, 69645, 2423, 69646, 27394, 6557, 3340, 69647, 25406, 2585, 69648, 1888, 69649-69650, 26270, 10694, 69651, 27951, 24991, 69652, 26434, 69653, 3173, 414, 7151, 4995, 3582, 2579, 25562, 10004, 69654-69655, 1995, 6976, 26095, 4505, 6426, 3670, 7682, 7099, 11062, 69656, 6418, 261, 7157, 25405, 7090, 2728, 1248, 69657, 4188, 5322, 27597, 2018, 69658-69659, 23443, 26522, 1554, 26663, 27145, 69660, 27668, 24641, 389, 69661, 26207, 23784, 2965, 2866, 69662, 685, 69663, 7104, 10966, 7644, 3979, 69664, 6558, 26841, 69665, 2870, 69666, 6395, 27730, 69667, 24660, 69668-69669, 6237, 27832, 4005, 718, 69670, 4375, 69671, 24436, 69672, 1178, 23692, 69673-69674, 27075, 27719, 4385, 7396, 25101, 6622, 2476, 7548, 10447, 25841, 2167, 24782, 69675, 6920, 1188, 7501, 11095, 23563, 1403, 1312, 69676, 7546, 2452, 3629, 25933, 69677-69678, 24990, 25372, 69679, 2534, 27172, 2896, 2679, 9793, 5145, 6357, 4444, 69680, 24, 69681, 26740, 2339, 6449, 2279, 69682, 2353, 23, 5010, 69683-69684, 2054, 7047, 475, 69685, 22, 6457, 2674, 5164, 25, 24069, 24877, 69686, 7558, 69687, 27033, 6540, 2183, 2586, 856, 69688, 938, 9751, 3942, 6695, 2477, 2371, 3774, 1465, 23915, 1600, 69689-69690, 27, 3761, 26, 27884, 1810, 69691, 6279, 713, 9840, 28, 69692, 3350, 69693, 3886, 5364, 25787, 69694, 29, 762, 69695, 6462, 6803, 10551, 69696, 30, 1565, 69697-69704, 26012, 9776, 593, 69705-69707, 10643, 69708-69710, 7697, 4200, 27735, 69711-69712, 4688, 27711, 69713-69714, 24146, 69715-69719, 27623, 69720-69724, 1598, 69725-69728, 5359, 69729, and 69726, respectively, in order of appearance.

[0053] TABLE A5 in the Appendix is a full list antibodies identified as unique to COVID-19 non-survivors. Among non-survivors many of the top antibodies were categorized as Class 4 with other classes of antibodies having fewer reads. Table discloses SEQ ID NOS 34-53, 594, 69730, 23352, 3867, 13855, 69731-69732, 23203, 69733, 9074, 5470, 5417, 18923, 23163, 5654, 7863, 22947, 23401, 22000, 5640, 21229, 5899, 16588, 5562, 21706, 19542, 5466, 16865, 6155, 14171, 18735, 8511, 18817, 19448, 69734, 13565, 19582, 9351, 9187, 18984, 69735, 14468, 69736-69737, 17363, 69738, 6196, 69739-69740, 8595, 13140, 69741, 5691, 21352, 16875, 5444, 23041, 69742, 6106, 16640, 20246, 69743-69745, 20035, 14151, 69746-69748, 22262, 13804, 19352, 19509, 11931, 69749, 11951, 69750, 21859, 8344, 17495, 5767, 22200, 8867, 21535, 20016, 69751, 22341, 12798, 69752, 15407, 14223, 12114, 22031, 20914, 17311, 20654, 17493, 15574, 19077, 69753, 15451, 69754, 22030, 23268, 16846, 17069, 14959, 69755, 23298, 69756, 15358, 69757, 12562, 7811, 69758, 16936, 18937, 22319, 16085, 18361, 17857, 14523, 69759-69761, 14777, 69762-69763, 14389, 69764, 5400, 69765, 21736, 17355, 5882, 69766, 20870, 19317, 69767, 18914, 15369, 14855, 12058, 14016, 69768, 13287, 15763, 21753, 21824, 14407, 8932, 20535, 15595, 69769, 8446, 69770, 15178, 69771-69772, 15176, 22183, 69773, 21649, 16432, 5465, 22226, 8288, 12462, 20338, 20046, 23343, 69774, 5953, 16187, 14287, 8097, 69775, 20287, 23141, 69776, 11892, 69777-69778, 17317, 8050, 12282, 23131, 22785, 8465, 12518, 21217, 16102, 15919, 19730, 14452, 20116, 69779, 21534, 5376, 69780, 8200, 69781, 21092, 69782-69783, 16702, 16452, 20117, 14018, 21929, 19879, 69784-69785, 5411, 6049, 69786, 21115, 16655, 18697, 20778, 69787, 14845, 8708, 17679, 9433, 16206, 69788-69789, 20325, 14012, 17671, 11858, 8418, 6014, 8491, 69790-69791, 15599, 7816, 13466, 19182, 69792, 17861, 12333, 8063, 19964, 69793, 17022, 12636, 18438, 5762, 69794-69795, 20769, 69796, 14390, 69797, 9483, 21122, 18147, 13295, 12499, 18870, 69798-69799, 14550, 20566, 69800, 12864, 69801-69806, 18062, 69624, 18579, 69807-69810, 13181, 14233, 18363, 69811-69816, 16943, 8567, 69817, 23204, 9147, 69818-69819, 9242, 14008, 6057, 69820, 16126, 6046, 69821, 22769, 22167, 15499, 69822, 16162, 69823, 5661, 69824, 19175, 19513, 13920, 69825, 9371, 12880, 12719, 22432, 69826, 21159, 69827, 21212, 9132, 18462, 69828, 12723, 69829, 22970, 20314, 8659, 19050, 8456, 12629, 14812, 16275, 69830-69833, 20061, 69834-69835, 16003, 19745, 15528, 69836, 23265, 13972, 19842, 69837-69838, 15755, 69839, 16243, 5675, 5484, 69840, 15692, 5605, 17213, 13434, 13886, 69841-69843, 21794, 69844, 23418, 11814, 23281, 69845, 23139, 9501, 20776, 12557, 69846, 20013, 23144, 5685, 6068, 22562, 23060, 18442, 22773, 69847, 21356, 69848, 23055, 13257, 17482, 69849, 17271, 19150, 23171, 5750, 3960, 14467, 13435, 69850, 23383, 13601, 22566, 23121, 5436, 12686, 69851-69853, 22452, 69854, 18286, 5586, 69855, 19781, 69856-69857, 19086, 69858-69861, 23179, 69862, 8579, 69863-69865, 23167, 69866-69870, 18523, 69871, 17640, 69872, 8459, 69873-69874, 23422, 69875, 22976, 69876-69881, 5595, 69882-69899, and 69766, respectively, in order of appearance.

### DETAILED DESCRIPTION OF THE INVENTION

### Industrial Applicability

[0054] COVID-19. When looking at COVID-19 patients across several time points, the inventors identified what was shown to be a critical intervention point in patients with reduced levels of COVID-19 antibodies. A cocktail of antibodies from TABLE 6 may be beneficial in treating COVID-19 patients, as a treatment in addition to COVID-19 vaccinations.

[0055] Antimicrobial-resistant bacteria cause almost five million deaths each year. Global burden of bacterial antimicrobial resistance in 2019: A systematic analysis (2022). Early identification of the causative pathogen and its antibiotic resistance pattern is central to infection management by focusing on antimicrobial administration. Typical clinical practice in patients with infections would benefit by starting treatment with broad-spectrum antibiotics as early as possible.

[0056] Despite the benefit of broad-spectrum antibiotics in reducing infection mortality, there are also negative consequences. Broad-spectrum antibiotics are costly and labor-intensive. They increase the risk of Clostridioides difficile colitis and select new, antibiotic-resistant pathogens.

[0057] Culturing the site of infection identifies the pathogen and its associated antibiotic resistance but can take days to generate actionable information. Antibiotics administered before sample acquisition can reduce culture yields.

[0058] Faster pathogen identification for severe infections. Sepsis causes one out of five deaths in the world. Rudd et al. (2020). The diagnosis of septic infection is a significant challenge for sepsis care. Duncan, Youngstein, Kirrane, & Lonsdale (2021). This invention provides better diagnoses of bacterial infections and associated antimicrobial resistance to improve outcomes.

[0059] The Surviving Sepsis Campaign standardized treatment for sepsis that includes blood cultures before broad-spectrum antibiotics and initiation of antibiotics within one hour. See Evans et al. (2021). In a multivariate analysis of factors impacting mortality in patients with septic shock, the time to begin antibiotic treatment was the most impactful variable. Kumar et al. showed this impact, reporting a 79.9% survival in septic shock patients with antibiotics in the first hour and a reduction of 7.6% for every hour delay. Kumar et al. (2006). Vazquez-Guillamet et al. determined that the number needed to treat with antibiotics to save one life was five. Vazquez-Guillamet et al., (2014). Faster pathogen identification improves sepsis outcomes by guiding antibiotic selection. Current methods take too much time, such as days. Sepsis kills in hours.

[0060] This invention provides diagnostic tests for three pathogens that cause bacteremia and three pathogens that cause pneumonia to shorten the time to pathogen-specific treatment for diseases such as sepsis.

[0061] Antimicrobial resistance is a significant health problem. Across the world, antimicrobial-resistant bacteria cause almost five million deaths each year. Global burden of bacterial antimicrobial resistance in 2019: A systematic analysis (2022 Antimicrobial-resistant bacteria cause more than 100,000 deaths in the United States with costs of over $21 billion. With each antibiotic, resistance follows shortly after that. See Clatworthy, Pierson, & Hung (2007). The United Nations convened a high-level meeting on Antimicrobial Resistance on Sep. 21, 2016, that included statements by global leaders such as Secretary-General Ban Ki-moon: “Drug resistance imposes huge costs on health systems and is taking a growing—and unnecessary—toll in lives and threatening to roll back much of the progress we have made.” Locally the trend is increased in resistance also increasing among many pathogens. Kassakian & Mermel (2014).

[0062] Importance of phenotypic antibacterial susceptibility. Bacteria have multiple antimicrobial resistance mechanisms and are easily transferred, resulting in pathogens with extensive resistance profiles. Harbottle, Thakur, Zhao, & White (2006). Despite advances in genomic testing, resistance genes found in DNA do not always correlate with phenotypic resistance. Bortolaia et al. (2020). Some computational approaches were suggested to handle this data. Bortolaia et al. (2020). Reasons for the lack of correlation between genomic data and resistance phenotypes include lack of transcription and DNA not associated with a living cell. Using RNA sequencing data allows for a better correlation between the genomic data and the expression of resistance. Using RNA data identifies only genes actively being transcribed, thereby measuring gene expression levels.

[0063] Facilitate antimicrobial stewardship. Antibiotic stewardship was suggested as a method to combat resistance. Broad-spectrum antibiotics, although appropriate initially, have an adjusted increased mortality risk. Webb et al. (2019). Other studies specifically state that unnecessary broad-spectrum antibiotics increase the risk of in-hospital death when no resistance is identified. Rhee et al. (2020). Unnecessary broad-spectrum coverage is used in 67.8% of patients. Rhee et al. (2020). De-escalation is important because new resistance emerges each day of inappropriate antibiotic exposure. Teshome et al. (2019). In the hospital setting, empiric therapy is only de-escalated 16% of the time. De Bus et al. (2020). Costs are reduced when de-escalation is used. Seok, Jeon, & Park (2020). Narrowing antibiotics reduces labor in the intensive care unit. Mei-Sheng, Riley & Olans (2021). A diagnostic test that rapidly identifies a pathogen and its antimicrobial resistance should assist in antimicrobial stewardship.

[0064] In the twelfth embodiment above, PCRs informed by a large dataset are performed in four hours, yielding direct from blood results independent of culture. Al-Hasan, Winders, Bookstaver, & Justo recommend directly assessing stewardship programs rather than looking for adverse events. Al-Hasan, Winders, Bookstaver, & Justo (2019). With faster bacteria identification, serial testing could assess treatment efficacy. Serial testing could be an additional metric in stewardship programs as antibiotics could be stopped sooner.

[0065] Similarities between COVID-19 and sepsis immunopathogenesis and pathophysiology. Similarities between COVID-19 and sepsis conditions include multiple organ dysfunction, immunosuppression, disseminated intravascular coagulation (DIC) and abnormal coagulation, elevated bilirubin, hypoxia, reduced glomerular filtration rate, and hypoalbuminemia, and acute respiratory failure and cytokine storm. Olwal et al., Front. Immunol. (February 2021); Lu et al., Front. Immunol. (August 2022). Recommendations for management of severe inflammatory response syndrome (SIRS) in sepsis may benefit severe COVID-19 patients. Olwal et al., Front. Immunol. (February 2021); Lu et al., Front. Immunol. (Aug. 31, 2022). In a preliminary set of assays, gene expression profiles of COVID-19 and sepsis patients were obtained from the Gene Expression Omnibus (GEO) database and compared to extract common differentially expressed genes (DEGs). Based on enrichment analysis of common DEGs, many pathways closely related to inflammatory response were observed, such as Cytokine-cytokine receptor interaction pathway and NFκB signaling pathway. Protein-protein interaction networks and gene regulatory networks of common DEGs were constructed, and the analysis results showed that ITGAM may be a potential key biomarker base on regulatory analysis. Potential therapeutic agents, including progesterone and emetine, were screened through drug-protein interaction networks and molecular docking simulations.

[0066] Unmapped reads identify bacterial RNA with deep RNA sequencing. In the initial assessment of RNA sequencing data, the reads are aligned to the genome of the species the sample came from, commonly the human genome. Unmapped reads can account for up to 20% of the data. These data are typically discarded. In the samples of humans with critical illness, there are more unmapped reads (˜35%). Monaghan et al. (2021). The Read Origin Protocol (ROP) (Mangul et al. (2018)) and Kraken (Wood, Lu, & Langmead (2018)) have been developed to determine the origin of unmapped reads. The Read Origin Protocol analysis of multiple data sets mapped 99.9% of all reads. The data that were typically discarded were analyzed in a seven-step process. One step is of particular interest because of the relevance to the patient population in this work: bacterial reads. Using ROP, or more recently Kraken2, bacterial RNA was identified in the blood samples of patients with sepsis, which mapped to the bacteria found in blood culture. RNA sequencing data can inform primer design to produce better diagnostic tests.

[0067] Diagnostic solution. This invention leverages a large data set of unmapped reads from patients diagnosed with infections by the gold standard of bacterial culture. This deep RNA sequencing data suggest PCR primers to identify pathogens, such as S. aureus, E. coli, P. aeruginosa, and H. influenza, and clinically relevant resistance genes. These tests are culture-independent and allow for direct from blood testing where PAXgene tubes stabilize the RNA. The PAXgene Blood RNA Tubes (QIAGEN, MD, USA; Cat. No./ID: 762165) are used for in vitro diagnostic testing (IVD). Sensitivity and specificity align with the requirements of the FDA as it relates to molecular diagnostic tests. Because RNA is used, phenotypic identification is done better than past attempts at DNA sequencing. See BMJ Global Health, 5(11) (2020).

[0068] Conceptual innovation. Reads that do not align to the genome of interest (human in these assays) are typically discarded. In this invention, the unmapped reads are the focus of the investigation to identify novel PCR targets in patients with bacterial infections.

[0069] Deep RNA sequencing, greater than 100 million reads, allows for identifying bacterial RNA in the blood of patients with infections.

[0070] Focusing on RNA rather than DNA improves phenotypic correlation with antimicrobial resistance.

[0071] Globin and ribosomal RNA are reduced to enhance the identification of the bacterial genes expressed.

[0072] Clinical management is guided by these RNA-based PCR tests designed to identify target genes directly affecting treatment decisions.

[0073] The RNA-based PCR tests are developed with the specific objective of rapid dissemination to clinical microbiology laboratories.

[0074] Technical innovation. Unmapped reads from deep RNA sequencing are an untapped resource of new information. Typically, 30% of reads are unmapped, so deep RNA sequencing of 100 million reads contains 30 million reads for further analysis.

[0075] The invention uses analytical algorithms that include mapping reads to genomes created for each pathogen based upon standard features across large numbers of strains.

[0076] The computational analysis is enhanced with customized algorithms and improved computing power, shortening the time to primer identification.

[0077] Workflow is optimized and automated to protect RNA, including PAXgene tubes for phlebotomy.

[0078] Deep RNA sequencing identifies pathogen RNA and informs PCR primer. Preliminary data was created using RNA sequencing from COVID-19 patients in the intensive care unit. Data from the deep RNA-sequencing study indicated limited regions of the viral genome were detected in the bloodstream of critically ill COVID-19 patients. This information was used to design primers to validate the sequencing results with a different methodology. cDNA generated from patients' RNA was subjected to quantitative, real-time, reverse transcriptase PCR using two sets of primers for the N gene. One primer pair corresponded to the peak of sequencing reads. Another primer pair was selected at a different site of the gene. See FIG. 1A. Using standard SYBR green methodology, amplicons for the peak N sequence were identified in all tested samples. By contrast, a template corresponding to the off-peak sequence was detected in only nine of the fifteen patients. When present, the abundance of the off-peak sequence was 4 to 16-fold lower than the peak sequence. See FIG. 1A.

[0079] This work is important because detecting SARS-CoV-2 in the blood was difficult. Yan, Chang, & Wang (2020).

[0080] In one aspect, unmapped RNA reads from patients with infections that align with pathogens can inform a better diagnostic test. The invention uses deep sequencing (>100 million reads) to identify the most highly expressed RNAs in the blood of patients with bacteremia or pneumonia. Cultures and antibiotic susceptibility testing are performed as the gold standard. RNA sequences from pathogens in transcription analysis are typically discarded because they would not align with the human genome. The inventors identify these “unmapped reads” in patients' blood and align them to a custom “genome” derived from the pathogens of interest to identify the causative organism. RNA that aligns with resistance genes is also specified. The commonly identified and organism-specific sequences are the template for designing oligonucleotide primers for use in RT-qPCR tests.

TABLE 3

| | Method | Result | Impact |
|---|---|---|---|
| A1a and A1b | Deep RNA sequencing | PCR is validated to | Common bacteria |
| | identifies RNA to | test for bacteremia | causing bacteremia |
| | target pathogens in | caused by S. | and pneumonia are |
| | infected patients | aureus, E. coli, P. | identified more |
| | with bacteremia due | aeruginosa in | quickly, allowing |
| | to S. aureus, E. coli, | samples from | faster administration |
| | P. aeruginosa to | patients with and | of tailored antibiotics, |
| | create PCR | without blood | improving survival, and |
| | | infections | enhancing antimicrobial |
| | | | stewardship. |
| A2a and A2b | Deep RNA sequencing | PCR is validated to | |
| | identifies RNA to | test for pneumonia | |
| | target pathogens in | caused by S. aureus, | |
| | infected patients | P. aeruginosa, or | |
| | with pneumonia due | H. influenzae in | |
| | to S. aureus, P. | samples from patients | |
| | aeruginosa, or H. | with and without lung | |
| | influenzae to create | infections | |
| | PCR | | |
| A3a and A3b | Deep RNA sequencing | PCR is validated to | Infections due to |
| | identifies RNA to | test for clinically | resistant organisms |
| | target related to | relevant resistance | are identified quickly. |
| | clinically relevant | genes to S. aureus, | Antibiotics are used |
| | resistance genes to | E. coli, P. aeruginosa, | immediately, reducing |
| | create PCR | or H. influenzae in | the unnecessary use |
| | | samples from patients | of broad-spectrum |
| | | with and without | antibiotics. |
| | | resistant infections | |

[0081] RNA sequencing can be a medically useful tool for personalizing the care of sepsis patients. With these advances, this tool will be used by clinicians in the Intensive Care Unit caring for sepsis patients.

[0082] The improvements listed above are also useful for designing better platforms and reagents for direct from blood, without the need for culture, reverse transcriptase polymerase chain reaction (RT-qPCR) tests for bacteria. QIAGEN (Germantown, MD, USA) is a manufacturer of platforms and reagents for RNA isolation and sequencing. Abbott (Abbott Park, IL, USA), Cepheid (Sunnyvale, CA, USA), Thermo Fisher Scientific (Waltham, MA, USA), and ELITech Group (Puteaux, FR) are also manufacturer of platforms and reagents for RNA isolation and sequencing.

### Definitions

[0083] For convenience, the meaning of some terms and phrases used in the specification, examples, and appended claims, are listed below. Unless stated otherwise or implicit from context, these terms and phrases shall have the meanings below. These definitions aid in describing particular embodiments but are not intended to limit the claimed invention. Unless otherwise defined, all technical and scientific terms have the same meaning as commonly understood by a person having ordinary skill in the biomedical art. A term's meaning provided in this specification shall prevail if any apparent discrepancy arises between the meaning of a definition provided in this specification and the term's use in the biomedical art.

[0084] Acute respiratory distress syndrome (ARDS) has the medical art-recognized meaning. ARDS is a type of respiratory failure characterized by rapid onset of widespread inflammation in the lungs. Symptoms include shortness of breath, rapid breathing, and bluish skin coloration. Causes may include sepsis, pancreatitis, trauma, pneumonia, and aspiration.

[0085] Aldo/keto reductase gene has the biomedical art-recognized meaning.

[0086] Alternative splicing (AS) has the biomedical art-recognized meaning. RNA splicing is a fundamental molecular function that occurs in all cells directly after RNA transcription but before protein translation, in which introns are removed and exons are joined. Alternative splicing or alternative RNA splicing, or differential splicing, is a regulated process during gene expression that results in a single gene coding for multiple proteins. Exons of a gene can be included within or excluded from the final, processed messenger RNA (mRNA) produced from that gene. The proteins translated from alternatively spliced mRNAs can contain differences in their amino acid sequence and, often, in their biological functions.

[0087] Base R is an R-based computer program.

[0088] Mann Whitney U tests have the statistical art-recognized meaning. The Mann-Whitney U test (also called the Mann-Whitney-Wilcoxon (MWW), Wilcoxon rank-sum test, or Wilcoxon-Mann-Whitney test) is a nonparametric test of the null hypothesis that it is equally likely that a randomly selected value from one population is less than or greater than a randomly selected value from a second population. This test can investigate whether two independent samples were selected from populations having the same distribution.

[0089] mountainClimber is a cumulative-sum-based approach to identifying alternative transcription start (ATS) and alternative polyadenylation (APA) as change points. Unlike many existing methods, mountainClimber runs on a single sample and identifies multiple ATS or APA sites anywhere in the transcript. Cass & Xiao, Cell Systems, 9(4), 23, 393-400.e6 (October 2019).

[0090] Next Generation Sequencing (NGS) has the biomedical art-recognized meaning. NGS technology is typically highly scalable, allowing the entire genome to be sequenced at once. Usually, this is accomplished by fragmenting the genome into small pieces, randomly sampling for a fragment, and sequencing it using various technologies.

[0091] Principal Component Analysis (PCA) has the biomedical art-recognized meaning. The principal component analysis is a statistical procedure that uses an orthogonal transformation to convert a set of observations of possibly correlated variables (entities, each of which takes on various numerical values) into a set of values of linearly uncorrelated variables called principal components.

[0092] Read has the biomedical art-recognized meaning of reading sequencing results to determine nucleotide base structure.

[0093] Read origin protocol (ROP) has the biomedical art-recognized meaning of a computational protocol that aims to discover the source of all reads, including those originating from repeat sequences, recombinant B and T cell receptors, and microbial communities. The Read Origin Protocol was developed to determine what the unmapped reads represented. Mangul al., Genome Biology 19, 36 (2018). Recent development of Read Origin Protocol (ROP) has demonstrated that unmapped reads align to bacterial, viral, fungal, and B/T rearrangement genomes.

[0094] Sepsis has the medical art-recognized meaning of a life-threatening condition that arises when the body's response to infection injures its tissues and organs. See Bone et al., Chest, 101, 1644-1655 (1992); Singer et al., JAMA, 315, 801-810 (February 2016).

[0095] STAR aligner is the Spliced Transcripts Alignment to a Reference (STAR), a fast RNA-seq read mapper, with support for splice-junction and fusion read detection. STAR aligns reads by finding the Maximal Mappable Prefix (MMP) hits between reads (or read pairs) and the genome, using a Suffix Array index. Different parts of a read can be mapped to different genomic positions, corresponding to splicing or RNA-fusions. The genome index includes known splice-junctions from annotated gene models, allowing for sensitive detection of spliced reads. STAR performs local alignment, automatically soft clipping ends of reads with high mismatches. Dobin et al., STAR: Ultrafast universal RNA-seq aligner. Bioinformatics, 29(1), 15-21 (January 2013).

[0096] Therapy that is efficacious for treating COVID-19 patients has the biomedical art-recognized meaning. In addition to the therapies disclosed in this specification, therapies efficacious for treating COVID-19 patients are disclosed from the United States Center for Disease Control. Among the therapies efficacious for treating COVID-19 patients are nirmatrelvir with ritonavi (Paxlovid®), remdesivir (Veklury®), bebtelovimab, and molnupiravir (Lagevrio®). New therapies are in the process of being discovered and recommended. Also, therapies efficacious for treating COVID-19 patients include treatments for sepsis, such as corticosteroids, insulin, drugs that modify the immune system responses, and painkillers or sedatives.

[0097] Treatment for sepsis has the medical art-recognized meaning. Sepsis is treatable, and timely implementation of targeted interventions improves outcomes. The Mayo Clinic informs the public that several medications are used in treating sepsis and septic shock. They include antibiotics. Broad-spectrum antibiotics, which are effective against various bacteria, are usually used first. After learning the results of blood tests, a doctor may switch to a different antibiotic targeted to fight the specific bacteria causing the infection. Other medications include low doses of corticosteroids, insulin to help maintain stable blood sugar levels, drugs that modify the immune system responses, and painkillers or sedatives.

[0098] V(D)J recombination has the biomedical art-recognized meaning. V(D)J recombination occurs in developing lymphocytes during the early stages of T and B cell maturation, involves somatic recombination, and results in the highly diverse repertoire of antibodies/immunoglobulins and T cell receptors (TCRs) found in B cells and T cells, respectively.

[0099] Whippet (OMICS_29617) is a program that enables the detection and quantification of alternative RNA splicing events of any complexity with computational requirements compatible with a laptop computer. Whippet applies the concept of lightweight algorithms to event-level splicing quantification by RNAseq. The software can facilitate the analysis of simple to complex alternative splicing events that function in normal and disease physiology. Alternative splicing events with high entropy are identified using Whippet. Sterne-Weiler et al., Molecular Cell, 72, 187-200.e186 (2018).

[0100] Unless otherwise defined herein, scientific, and technical terms used with this application shall have the meanings commonly understood by persons having ordinary skill in the biomedical art. This invention is not limited to the particular methodology, protocols, and reagents, etc., described herein and as such can vary.

[0101] The disclosure described herein does not concern a process for cloning humans, processes for modifying the germ line genetic identity of humans, uses of human embryos for industrial or commercial purposes or processes for modifying the genetic identity of animals which are likely to cause them suffering with no substantial medical benefit to man or animal, and also animals resulting from such processes.

Guidance from Materials and Methods

[0102] A person having ordinary skill in the biomedical art can use these materials and methods as guidance to predictable results when making and using the invention:

[0103] Deep sequencing methods. The concept of diagnostics is analogous to using a fishing lure to find a single protein, gene, or RNA sequence. The invention provides a specific concept, using a fishing net to obtain all the RNA data in a sample, and use computational biology to better sort through all the data (fish) to identify patients with sepsis and the bacteria causing the immune response. The invention provides an initial diagnostic for sepsis that can also monitor the indicia of treatment and recovery (bacterial counts reduce, physiology returns to steady state). The invention can be used for many other hospital conditions, particularly those needing an intensive care unit stay with the attendant risk of bacterial infection, such as trauma, stroke, myocardial infarction, or major surgery.

[0104] In producing the listed embodiments, one of ordinary skill in the biomedical art uses the following steps: The first step is for one of ordinary skill in the biomedical art to obtain RNA sequencing from a body sample, such as a bodily fluid sample, for example, blood. The target is 100,000,000 reads/sample. The second step is for one of ordinary skill in the biomedical art to align the RNA sequencing data (reads) to a genome of interest, such as a human genome. The third step is to select the un-mapped reads and analyze the reads using a Read Origin Protocol (ROP). From the ROP, one of ordinary skill in the biomedical art identifies COVID-19 variants that are present in the sample. The fourth step is to identify the T/B cell epitopes present in the samples.

[0105] Study design, population, and setting. Intensive care unit patient-participants at a single tertiary care hospital were enrolled after they or their surrogates provided informed consent (Institutional Review Board Approval #411616). SARS-CoV-2 infection was based on positive PCR from the nasopharynx. Patients were followed until discharge or death and clinical information was collected prospectively. Blood samples were collected on day 0 of intensive care unit admission. Some patients also had samples collected on day 3 of intensive care unit admission.

[0106] RNA extraction, sequencing, data protection and quality assurance. Blood was collected directly from the patient into PAXgene tubes (Qiagen, Germantown, MD, USA) to stabilize the RNA. The tubes were then stored as described by the manufacturer. Cohorts of samples (all from day 0 and all from day 3) were sent to Genewiz (South Plainfield, NJ, USA) for RNA extraction, ribosomal RNA depletion, and sequencing on Illumina HiSeq machines with greater than 100 million reads per sample.

[0107] To ensure security of the genomic data to the United States Health Insurance Portability and Accountability Act (HIPAA) standards, the raw files were returned on password-protected external hard drives. All analysis was done on servers within the hospital firewalls. As previously described, the inventors assessed data quality using FastQC. See Monaghan et al., medRxiv (2021). Sequencing data was aligned using STAR aligner with standard parameters. Unmapped reads were included in the output.

[0108] Identification of antibodies. Alignment files were then parsed for reads mapping to the V(D)J locus using ImReP9 to identify novel antibodies produced by the patients with active COVID-19 disease requiring intensive care unit admission. The resulting CDR3 sequences were then compared across survivors and non-survivors. Only sequences that appeared in every patient in each group were considered distinct to that group. Comparison was done using a NCBI Blast program, with a threshold of 66% length match and 70% sequence match. Querying sequences by time point, across time points, further filtered blast output and survivors vs. non-survivors by time point and across time points.

[0109] Classification of CDR3 regions and model of neutralizing Fab. The patient-derived light chain CDR3 sequences were aligned to known CDR3 regions of previously identified neutralizing antibodies. See TABLE A1. CDR3 sequences with similar primary sequences to the CDR3 classifications were placed into categories. When the primary sequence did not align to any of those sequences, the CDR3 was left unclassified.

[0110] The model of the Fab binding to the spike protein described in FIG. 2 was created from the Cryo-EM structure of C110 NAb binding to the spike Protein (7K8V). The C110 NAb CDR3 sequence was mutated to CQQYNNYWAF (SEQ ID NO: 1) in Pymol (Schrodinger, Inc.) and the rotamers were optimized. The mutated light chain and RBD were isolated. The binding interface was optimized using the GalaxyRefineComplex Server. The lowest energy model was then selected for further analysis. The optimized light chain and RBD were then inserted back into the 7K8V structure and analyzed in Pymol for hydrogen bonding networks.

[0111] Statistical analysis. SigmaPlot 14.5 (Sysstat Software) was used for analysis. T-tests were used to compare survivors and non-survivors, but paired t-tests were used to compare across time points. Alpha was set at 0.05.

[0112] Human subjects. The inventors are enrolling patients in the Intensive care units with sepsis and sending their blood for deep RNA sequencing. After Institutional Review Board approval, patients are recruited for this research program from the emergency department and hospital patients when blood cultures are ordered. Through alerts from the electronic health record (EPIC), research assistants are notified of when blood cultures are ordered. Patients have consented before the collection of the blood culture. Samples are drawn in collaboration with the phlebotomy service and the bedside nurse. Blood is collected in two PAXgene tubes, 5 mL of blood, and stored in an −80° C. freezer until RNA is isolated for sequencing. As a test of feasibility, the last six months of data in the hospital were reviewed, and many samples were available. Over the six-month time course, 2,453 patients had blood cultures drawn in the emergency department, and 602 patients had blood cultures drawn in the Intensive Care Units. Blood is also collected from patients who undergo bronchial alveolar lavage (BAL) in the Intensive Care Unit to diagnose pneumonia. Samples are collected before the bronchial alveolar lavage and stored as described. Over the six-month time course, 46 patients had BAL samples obtained in the emergency department and 51 patients had bronchial alveolar lavage samples obtained in the Intensive Care Units.

[0113] RNA isolation and sequencing. Blood from patients are collected using the PAXgene tubes (PreAnalytix, Switzerland). All samples require at least 1400 nanograms of RNA for deep sequencing. With the PAXgene system, one routinely obtains >3000 nanograms. After RNA samples are processed, they are sent out for RNA sequencing. Because of the high concentration of globin and ribosomal RNA in blood samples, these samples are then further processed at the sequencing company to reduce globin RNA and human ribosomal RNA. This optimizes the yield of clinically relevant reads. Each sample are sent out for deep RNA sequencing with a goal of 100 million reads per sample.

[0114] RNA sequencing are done on non-CLIA machines because this data is not used in clinical practice. The vendor has Clinical Laboratory Improvement Amendment (CLIA) certified machines to allow for ease of translation in future studies. Not all the blood samples collected are sent for deep RNA sequencing. One of the two PAXgene tubes are kept for the PCR tests.

[0115] Sample size calculation. Patients with bacteremia are compared to patients without bacteremia to identify targets for the creation of the PCR. Based upon the positive culture rate (TABLE 4), the inventors would need to collect 2200 blood cultures to obtain fifty that are positive for Staphylococcus aureus. These rates are for all samples. The inventors are targeting the collection for the Emergency Department and the Intensive Care Units, so the positive rate are higher. A total of 3500 samples are obtained to get a representation of each type of organism. The institution averages 3000 blood cultures in the Emergency Department and the Intensive Care Units every six months. This testing results in at least sixty patients with S. aureus, thirty with E. coli, and ten with P. aeruginosa. All samples with a corresponding positive blood cultures for these three pathogens are sent for deep RNA sequencing. The inventors also send samples for RNA sequencing with a corresponding positive blood culture, including those judged to be contaminants, for a total of approximately 135, with an additional 115 of samples from patients with negative blood cultures. This process would result in 350 samples sent for RNA sequencing for EXAMPLE 2. The second PAXgene tube drawn on these patients is used to verify the PCR tests. Patients with pneumonia are compared to patients without pneumonia to identify targets for the creation of the PCR. Based upon the positive culture rate (see TABLE 4), the inventors would ideally collect all patients with a BAL from the Emergency Department or Intensive Care Unit. Over six months, this process would include about 100 patients and would result in eleven with S. aureus, ten with P. aeruginosa, and four with H. influenza. The inventors collect eighteen months of samples to obtain about 300 blood tubes to sequence for the pneumonia section of the invention. Because two pathogens are being studied, these patients have complementary BAL and blood cultures sent simultaneously. Resistance genes are identified using the same samples collected.

TABLE 4
Microbiological Culture Positivity Rates

| Bacteria | Blood Culture | BAL |
|---|---|---|
| Staphylococcus aureus | 2.2% | 11% |
| Escherichia coli | 1% | N/A |
| Pseudomonas aeruginosa | 0.3% | 9.5% |
| H. influenza | N/A | 3.7% |

[0116] Assessment of clinical information. RNA sequencing data are interpreted with clinical data collected from the electronic medical record including endpoints such as mortality, Intensive Care Unit length of stay, hospital length of stay, SOFA score (Shankar-Hari et al. (2016)), ventilator days, renal failure, ARDS (Ferguson et al. (2012)). Culture data are based upon the test results in the microbiology lab and are the gold standard. Clinical response to antibiotics are also be tracked to see if the treatment based upon microbiology data is correct. Changes in treatment are assessed to ensure culture data is utilized in treatment and antimicrobial stewardship practices are being followed.

[0117] Computing resources. Computational biology work is performed on servers on premise. These servers are secured because they contain clinical data. All HIPAA standards are applied. The server operates on 6× VxRail E560F nodes (PowerEdge R640 1 U rack mount servers) and has dual Intel Xeon Platinum 8260 (24c) 2.4 Ghz with 1,152 GB RAM, 2×1.6 TB SAS SSD cache, 8×7.68 TB SAS SSD capacity, 4×10 Gb data ports, and 1×1 Gb iDRAC management port. This server includes vSphere Enterprise Plus with 3 Years 24×7 Mission Critical Support per node configured to provide the computational infrastructure. The server consists of 288c (691.2 GHz) CPU, and 6.75 TB RAM. Storage estimates reflect 368.64 TB RAW/222 TB usable memory on a RAID6 configuration with 20% vSAN overhead. This server manages all large data sets from RNA sequencing. Because of the depth of sequencing that is needed for RNA splicing analysis (100 million reads vs. 40 million), more data is generated from both sequencing and analysis.

[0118] In a preliminary project, the inventors generated one terabyte of sequencing data and another terabyte from the alignment to the genome. Because RNA sequencing data is always identifiable, the data from humans are treated as though it is protected health information (PHI), even though none of the typical identifiers (such as name, date of birth, etc.) are associated with the data.

[0119] The following pipeline encompasses the typical analysis: differential expression, RNA analysis is done with Whippet (Sterne-Weiler et al. (2018)). After this, the unmapped reads are analyzed for microbial RNA. The inventors curate a reference genome of all identified species of S. aureus, E. coli, P. aeruginosa, and H. influenza.

[0120] Bacterial rearrangements are common across strains. This tool adjusts for rearrangement with a consensus genome to align the un-mapped reads to them. Noureen, Tada, Kawashima, & Arita (2019). This tool allows for visualization and construction of a consensus genome. The conserved and strain specific sequences are kept. Tada, Tanizawa, & Arita (2017). Targets are preferentially chosen from conserved regions. Strain specific targets are used if clinically relevant. Specific resistance genes are also be searched for in the unmapped reads using the STAR aligner.

[0121] Polymerase chain reaction (PCR) design. Optimized PCR parameters are essential to ensuring accuracy and reproducibility in qPCR reactions. See Bustin & Huggett (2017); Bustin, Mueller, & Nolan (2020)). Target selection is critical. The preliminary data demonstrate that bacterial reads are measurable from patient with bacteremia and pneumonia and that the reads can be aligned to the organism's genome. RNA sequencing data accumulated from patients with bacteremia or pneumonia due to the specified pathogens are used to identify sequences of interest. These sequences are compared to a pan genome of the same organism to confirm the target is generalizable to the pathogen. Wang et al. (2022). The inventors use Beacon Designer (Premier Biosoft) to design several primer/probe combinations for the sequences, the specificity of which are confirmed by BLAST searches. Primers with low specificity, dimer formation, or that create amplicons with complex secondary structures are excluded. Bustin & Huggett (2017). Primer-BLAST (NCBI) are used as an independent, complementary design strategy; primers identified by both approaches are prioritized. PCR reactions are optimized in the laboratory for temperature and primer concentration for the mastermix. The objective is to establish a standard set of testing conditions.

[0122] Testing the PCR. The PCR tests are validated in two ways. First, cDNA libraries used for RNA sequencing are tested. Next, RNA from the blood of patients, both with and without the infection, are used as templates for cDNA synthesis and then PCR. PCRs are applied to the samples from RNA sequencing and an independent cohort of patients to validate the assays. Several primer combinations are evaluated for each target sequence. Bustin & Huggett (2017). SYBR green methodology are used initially to prioritize different primer combinations. Hydrolysis (“Taqman”) probes for qPCR, which were already designed with the primers, is then synthesized for the prioritized primer combinations.

[0123] Rigor and reproducibility. RNA is less stable than DNA because of its vulnerability to hydrolysis. This invention uses RNA sequencing and uses methodology to ensure stability. The preliminary data show isolated RNA from critically ill patients and high quality RNA sequencing results. The inventors also focus on isolation methods that are standard and can easily be applied followed so the results can be translated to clinical practice. To enhance robustness during development, it is standard practice for each step of the PCRs (setup, cycling, analysis) to be performed in separate rooms, reducing reactions being contaminated with amplicons from prior runs.

[0124] Biological variables. Variables such as age (patients are included across the lifespan, weight, and medical co-morbidities are collected and compared across groups. If these variables, or sex, are significantly different (t test or rank sum), these factors are adjusted for in the analysis via regression.

[0125] Cloud based computing. Because of the depth of sequencing that is needed for RNA splicing analysis (100 million reads vs. forty million), more data is generated from both sequencing and analysis (a small study generated one terabyte of sequencing data and another terabyte from the alignment to the genome). With such a large amount of data predicted, the ability to expand and contract the storage space and computing power in the cloud is the ideal choice. This server stores and analyzes data from both mouse and human samples. Because RNA sequencing data is always identifiable, the data from humans are treated as though it is protected health information (PHI), even though none of the typical identifiers (such as name, date of birth, etc.) are associated with the data. The cloud server is only accessible through a hospital virtual desktop and data are saved only to the Azure server or a hospital computer. Data are encrypted while stored, and when in transit to or from the hospital. Any link to typical identifiers (name, date of birth, etc.) are kept separate from the sequencing data. The cloud-based server allows for large data analysis with computing and storage needs changing on a per-use basis. The Azure server is Linux based and uses programming in R and Python. The following pipeline encompasses the typical analysis: differential expression, RNA analysis is done with Whippet. This also includes an entropy measure, and genes of interest undergo gene ontology term analysis. Genes with alternative transcription start and end sites identified through Whippet are correlated with findings from the mountainClimber analysis.

[0126] Computational analysis and statistics. RNA sequencing data from the mouse was first checked for quality using FASTQC. RNA-sequencing data collected from the GTEx consortium, and the mouse ARDS model was analyzed with the Whippet software for differential gene processing. Alternative transcription events are those events identified by Whippet as ‘tandem transcription start site,’ ‘tandem alternative polyadenylation site,’ ‘alternative first exon,’ and ‘alternative last exon.’ Alternative RNA splicing events are those events labeled ‘core exon,’ ‘alternative acceptor splice site,’ ‘alternative donor splice site,’ and ‘retained intron.’ Alternative mRNA processing events were determined by a log 2 fold change of greater than 1.5+/−0.2. Statistical significance was calculated by the chi-square p-value of a contingency table based on 1000 simulations of the probability of each result.

[0127] Gene ontology (GO) was assessed using The Gene Ontology Resource Knowledgebase. Ashburner et al., Nature Genetics, 25, 25-29 (2000); The Gene Ontology Resource. Nucleic Acids Research, 47, D330-d338 (2019). Genes from the analyses were entered, and outputs were displayed. Outputs from gene ontology do not correlate with actual increase or decrease in a gene's expression but are related to expected based upon the set of genes entered.

[0128] Blood sample collection. Blood samples are collected on day 0 of Intensive Care Unit admission. Clinical data including COVID specific therapies was collected prospectively from the electronic medical record and participants were followed until hospital discharge or death. Ordinal scale can be collected as described by Beigel et al., New England Journal of Medicine (2020); along with sepsis and associated sequential organ failure assessment (SOFA) score, and the diagnosis of ARDS. See Singer et al., The Third International Consensus Definitions for Sepsis and Septic Shock (Sepsis-3). JAMA, 315:801-810 (2016); Ferguson et al. The Berlin definition of ARDS. Intensive Care Medicine, 38:1573-1582 (2012).

[0129] RNA extraction and sequencing. Whole blood can be collected in PAXgene tubes (QIAGEN, Germantown, MD, USA) and sent to Genewiz (South Plainfield, NJ, USA) for RNA extraction, ribosomal RNA depletion and sequencing. Sequencing can be done on Illumina HiSeq machines to provide 150 base pair, paired end reads. Libraries were prepared to have three samples per lane. Each lane provided 350 million reads ensuring each sample had >100 million reads.

[0130] Computational biology and statistical analysis. All computational analysis can be done blinded to the clinical data. The data can be assessed for quality control using FastQC. See Andrews, A quality control tool for high throughput sequence data. FastQC (2014). RNA sequencing data can be aligned to the human genome utilizing the STAR aligner. Dobin et al., Bioinformatics (Oxford, England), 29, 15-21 (2013). Reads that aligned to the human genome can be separated and called ‘mapped’ reads. Reads that do not align to the human genome, which are typically discarded during standard RNA sequencing analysis, were identified as ‘unmapped’ reads. The unmapped reads then align to the relevant comparator and counted per sample using Magic-BLAST. See Boratyn et al., BMC Bioinformatics, 20, 405 (2019). The unmapped reads were further analyzed with Kraken2. See Wood, Lu, & Langmead, Genome Biology, 20, 257 (2019). The analysis used the PlusPFP index to identify other bacterial, fungal, archaeal, and viral pathogens. See Kraken2/Bracken Refseq indexes maintained by BenLangmead, which uses Kutay B. Sezginel's modified version of the minimal GitHub pages theme.

[0131] Reads that align to the human genome, the mapped reads, also can undergo analysis for gene expression, alternative RNA splicing, and alternative transcription start/end by Whippet. See Sterne-Weiler et al., Molecular Cell, 72, 187-200.e186 (2018). When comparisons are made between groups (died vs. survived) differential gene expression can be set with thresholds of both p<0.05 and +/−1.5 log 2 fold change. Alternative splicing was defined as core exon, alternative acceptor splice site, alternative donor splice site, retained intron, alternative first exon and alternative last exon. Alternative transcription start/end events can be defined as tandem transcription start site and tandem alternative polyadenylation site. Alternative RNA splicing and alternative transcription start/end events can be compared between groups. See Sterne-Weiler et al., Molecular Cell, 72, 187-200.e186 (2018). Significance was set at great than 2 log 2 fold change as described by Fredericks et al., Intensive Care Medicine (2020). Genes identified from the analysis of mapped reads can be evaluated by GO enrichment analysis (PANTHER Overrepresentation released 20200728). See Mi et al. Nature Protocols, 8, 1551-1566 (2013).

[0132] Whippet can generate an entropy value for each gene's identified alternative splicing and transcription event. These entropy values are created with no groups used in the gene expression analysis. To visualize this data, a principal component analysis (PCA) can be conducted to reduce the dataset's dimensionality and obtain an unsupervised overview of trends in entropy values among the samples. Raw entropy values from all samples can be concatenated into one matrix, and missing values were replaced with column means. Mortality can be overlaid onto the PCA plot to assess the ability of these raw entropy values to predict this outcome in this sample set. This analysis was done in R (version 3.6.3).

[0133] Kraken2. The following tools are compatible with both Kraken1 and Kraken2. Both tools assist users in analyzing and visualizing Kraken results. Bracken allows users to estimate relative abundances within a specific sample from Kraken2 classification results. Bracken uses a Bayesian model to estimate abundance at any standard taxonomy level, including species/genus-level abundance. Pavian has also been developed as a comprehensive visualization program that can compare Kraken2 classifications across multiple samples. KrakenTools is a suite of scripts to help analyze Kraken results. For more information, persons having ordinary skill in the biomedical art can refer to Wood, Lu, & Langmead, Improved metagenomic analysis with Kraken2, Genome Biology (Nov. 28, 2019).

[0134] Assessment of clinical information. RNA sequencing data are interpreted with clinical data collected from the electronic medical record, including endpoints such as mortality, Intensive Care Unit length of stay, hospital length of stay, SOFA score (Shankar-Hari et al. (2016)), ventilator days, renal failure, ARDS (Ferguson et al. (2012)). Culture data are based upon the test results in the microbiology lab and are the gold standard. Clinical responses to antibiotics are also tracked to see if the treatment based upon microbiology data is correct. Changes in treatment are assessed to ensure culture data is utilized in treatment. Antimicrobial stewardship practices are being followed.

[0135] Computing resources. All computational biology work is performed on servers on-premises. These servers are secured because they contain clinical data. All HIPAA standards are applied. The server operates on 6× VxRail E560F nodes (PowerEdge R640 1 U rack mount servers) and has dual Intel Xeon Platinum 8260 (24c) 2.4 Ghz with 1,152 GB RAM, 2×1.6 TB SAS SSD cache, 8×7.68 TB SAS SSD capacity, 4×10 Gb data ports, and 1×1 Gb iDRAC management port. This server includes vSphere Enterprise Plus with 3 years of 24×7 mission critical support per node configured to provide the computational infrastructure. The server consists of a 288c (691.2 GHz) CPU and 6.75 TB RAM. Storage estimates reflect 368.64 TB RAW/222 TB usable memory on a RAID6 configuration with 20% vSAN overhead. This server manages all large data sets from RNA sequencing. Because of the depth of sequencing that is needed for RNA splicing analysis (100 million reads vs. 40 million), more data is generated from both sequencing and analysis. In a preliminary project, the inventors generated one terabyte of sequencing data and another terabyte from the alignment to the genome. Because RNA sequencing data is always identifiable, the data from humans are treated as protected health information (PHI), even though none of the standard identifiers (such as name, date of birth, etc.) are associated with the data.

SEQUENCE LISTING

Mutated C110 NAb CDR3 sequence CQQYNNYWAF (SEQ
ID NO: 1).
CDR3 region CQQYNNYWAF (SEQ ID NO: 2).
CDR3 region CQQYNNWPPLTF (SEQ ID NO: 3).
CDR3 region CQQYDNHF (SEQ ID NO: 4).
CDR3 region CQQYNRYWTF (SEQ ID NO: 5).
CDR3 region CQQYNNWPPLFTF (SEQ ID NO: 6).
CDR3 region CQQYNNWPPGFTF (SEQ ID NO: 7).
CDR3 region CQQLNSYPGGTF (SEQ ID NO: 8).
CDR3 region CQQYDSYPWTF (SEQ ID NO: 9).
CDR3 region CQQYNSYSRTF (SEQ ID NO: 10).
CDR3 region CQQYGSFF (SEQ ID NO: 11).
CDR3 region CQQYDKWPFF (SEQ ID NO: 12).
CDR3 region CMQALQTPLTF (SEQ ID NO: 13).
CDR3 region CMQALQTPRTF (SEQ ID NO: 14).
CDR3 region CQQRSNWPPLTF (SEQ ID NO: 15).
CDR3 region CHQYNNW (SEQ ID NO: 16).
CDR3 region CQQFNTWPPE (SEQ ID NO: 17).
CDR3 region CQQYQTWPPLF (SEQ ID NO: 18).
CDR3 region CQQFNNWPPGFSF (SEQ ID NO: 19).
CDR3 region CQQYNTYSQHTF (SEQ ID NO: 20).
CDR3 region CQSYDSSPLF (SEQ ID NO: 21).
CDR3 region CAVWDDSLSGRVF (SEQ ID NO: 22).
CDR3 region CAAWDDSLSGWVF (SEQ ID NO: 23).
CDR3 region CAAWDDSLNGPVF (SEQ ID NO: 24).
CDR3 region CAAWDDSLSGPVF (SEQ ID NO: 25).
CDR3 region CAAWDDNLSGPVF (SEQ ID NO: 26).
CDR3 region CAAWNDSLSGPNWVF (SEQ ID NO: 27).
CDR3 region CATWDDSLNGYAVF (SEQ ID NO: 28).
CDR3 region CAAWDDSLNGHVVF (SEQ ID NO: 29).
CDR3 region CATWDDTLSGLNWVF (SEQ ID NO: 30).
CDR3 region CAGYGDYSDYW (SEQ ID NO: 31).

[0136] The following EXAMPLES are provided to illustrate the invention and shall not limit the scope of the invention.

### Example 1

Analysis of Patients with COVID-19

[0137] The inventors conducted a prospective analysis of patients with COVID-19 who were admitted to the intensive care unit at a single center. The patients' peripheral blood underwent deep RNA sequencing (>100 million reads) to identify antibodies (Ig heavy, Ig lambda, Ig kappa) created in response to infection. The amino acid sequence for the CDR3 segments of the antibodies were identified.

[0138] Samples were collected on day 0 and day 3 of intensive care unit admission. Clinical data were prospectively collected.

[0139] The antibodies were characterized and compared to known COVID-19 antibodies using structural methods. Fifteen patients were enrolled with samples from intensive care unit day 0. Twelve patients had samples from intensive care unit day 3. Antibody type and unique CDR3 segment were identified. Patients who survived had significantly more of a type 3 antibody (C135) to SARS-CoV-2 compared to non-survivors (16,315 reads vs. 1,412 reads, p=0.02).

[0140] When looking at patients across time points, there appears to be a critical intervention point in patients with reduced levels of this antibody.

[0141] Results. Study population, participant characteristics, and RNA sequencing. A total of fifteen patients had samples collected on day 0 and of those fifteen, twelve had samples collected on day 3. Two patients who did not provide a second time point were discharged from the intensive care unit and one died prior to the second time point.

[0142] TABLE 5 shows demographic data and antibody types per group (survivor vs. non-survivor) at ICU day 0 and ICU day 3.

TABLE 5
Clinical and demographic data

| | Day 0 | |
|---|---|---|
| Demographics and Antibody Types | Survivor (8) | Non-Survivor (7) |
| Median age (SD) | 53.9 (22.7) | 64.1(13.8) |
| Female - no. (%) | 2 (25) | 2 (29) |
| Race | | |
| White - no. (%) | 2 (25) | 4 (57) |
| Black or African American - no. (%) | 1 (13) | 1 (14) |
| Other Race - no. (%) | 5 (62) | 2 (29) |
| Ethnicity | | |
| Hispanic - no. (%) | 4 (50) | 5 (71) |
| Median BMI (SD) | 28.1 (4.1) | 31.5 (4.9) |
| Ig Heavy (SD) | 18,77.6 (31,136.3) | 17,247 (17,780) |
| Ig Kappa (SD) | 70,548.6 (136,600.2) | 43,630.7 (44,591.6) |
| Ig Lambda (SD) | 9,289.9 (11,302.4) | 19,000.9 (24,621.1) |
| Total Reads (SD) | 99,478.5 (178,615) | 80,942.6 (86,484.6) |
| | Day 3 | |
| Demographics and Antibody Types | Survivor (6) | Non-Survivor (6) |
| Median age (SD) | 53.5 (18.5) | 60.9 (11.8) |
| Female - no. (%) | 2 (33) | 2 (33) |
| Race | | |
| White - no. (%) | 1 (17) | 3 (50) |
| Black or African American - no. (%) | 1 (17) | 1 (17) |
| Other Race - no. (%) | 4 (66) | 2 (33) |
| Ethnicity | | |
| Hispanic - no. (%) | 3 (50) | 4 (66) |
| Median BMI (SD) | 26.6 (3.6) | 31.7 (5.4) |
| Ig Heavy (SD) | 45,029.8 (48,919.6) | 39,982.1 (33,397.3) |
| Ig Kappa (SD) | 65,278.3 (83,406) | 34,784.3 (22,616.4) |
| Ig Lambda (SD) | 31,087.3 (29,572.1) | 36,133 (30,801) |
| Total Reads (SD) | 142,306.8 (141,072.9) | 111,939.2 (84,022.7) |

[0143] The results showed no differences between the numbers of counts for Ig Heavy, Ig kappa, and Ig lambda between survivors and non-survivors on days 0, 3, or in aggregate (TABLE 5). When comparing across time points, there was a significant increase Ig lamda across all patients (16,590 vs 33,610, p=0.009). When looking at survivors alone, this difference was present (11,313 vs 31,087, p=0.0426) but not in those who died (21,868 vs 36,133, p=0.1504).

[0144] All CDR3 sequences identified in each patient with associated counts and categorization for antibody type, COVID-19 antibody class, and structure of COVID-19 antibody are present for day 0 (see TABLE A2) and day 3 (see TABLE A3).

[0145] When comparing classes of COVID-19 antibodies (Class 1, 2, 3, 4) there is no difference between survivors and non-survivors or across time points. However, when assessing the number of counts that align to the C135 antibody, survivors had significantly more (15,059.4) than non-survivors (1,412.7, p=0.016; FIG. 1) on day 0 but not on day 3. All other distinct COVID-19 antibodies described in TABLE A1 had no difference across survivors vs. non-survivors or across time points.

[0146] Antibodies identified as unique to survivors and non-survivors on day 0 are presented in TABLE 6. See the full list TABLE A4 for survivors and TABLE A5 for non-survivors. Among survivors the most antibodies categorize as Class 3. Among non-survivors many of the top antibodies were categorized as Class 4 with other classes of antibodies having fewer reads.

[0147] The Class 3 sequence of light chain CDR3 from the most frequent RNAseq reads exclusive to surviving patients was modeled into a Cryo-EM structure of the C135 antibody bound to the SARS-CoV-2 spike protein (FIG. 2A, PDB: 7K8Z). This model shows the strong intermolecular forces between the light chain CDR3 and the RBD epitope. The antibody bound structure was then aligned to a structure of the SARS-CoV-2 spike protein bound to the extracellular domain of ACE2 (FIG. 2B, PDB: 6M0J). The latter model highlights Class 3 CDR3 binding at a location distinct from ACE2. This contrasts Class 2 antibodies commonly detected in non-survivors, which share a binding site with the ACE2 receptor on the SARS-CoV-2 spike RBD.

[0148] Conclusions. Deep RNA sequencing is a tool to identify antibodies produced in response to COVID-19 infections. Typical identification of antibodies is time consuming. Shrestha, Tedla, & Bull, Frontiers in Immunology, 12, 752003 (2021). Antibodies identified from plasma do not provide as much detail as is gleaned from the RNA sequencing data, such as Ig classes and the actual amino acid sequence of the antibody. By identifying antibodies that are unique to survivors, persons having ordinary skill in the biomedical art can identify the CDR3 sequences most likely to positively impact infection. Combining the amino acid sequence and structural biology techniques, persons having ordinary skill in the biomedical art can identify the binding locations for these antibodies created in vivo in a critically ill patient.

[0149] Most previous works assessing immunoglobulin light chain types of lambda and kappa were limited to hematologic malignancies and HIV infection. Andrei & Wang, Hematology/Oncology and Stem Cell Therapy 12, 71-81 (2019); Müller & Köhler, International Reviews of Immunology, 14, 339-49 (1997); & Terrier et al., Autoimmunity Reviews, 13, 319-26 (2014). The impact of an increase of Ig lambda at ICU day 3 in survivors is unknown. This increase can be used as a marker of potential recovery. The use of this technology could enhance the study of class types in antibodies not only during infectious disease but also enhancing the previous work in hematologic malignancies and possible transplant medicine.

[0150] All four classes of antibodies (TABLE A1) bind to the SARS-CoV-2 spike RBD with strong interactions between the light chain CDR3 and the respective epitopes. Barnes et al., Nature, 588, 682-7 (2020). Class 1 and 2 antibodies bind to an epitope that causes steric clash with the ACE2 binding site. Antibodies that bind to the ACE2 motif on the RBD are known to be influenced by mutations in the virus. Starr et al., Nature (2021). The proliferation of variants continues as the pandemic continues. Drews et al., Transfusion (2021). It is important to ensure that antibodies exist that are not prone to mutations at the ACE2 motif. Class 3 and 4 antibodies bind to an epitope orthogonal to the ACE2 binding site. Non-ACE2 competitive antibodies (such as class 3 and 4) increase attenuation of the virus in cells that overexpress ACE2.4 ACE inhibitors are known to increase ACE2 expression. Vaduganathan et al., The New England Journal of Medicine, 382, 1653-9 (2020). There was no definitive correlation with outcome. Reynolds et al., The New England Journal of Medicine, 382, 2441-8 (2020). This lack of impact of ACE inhibitors on outcome may be due to the class of antibodies that a patient creates in response to infection. This sample size is not sufficient to assess the impact of pre-infection ACE inhibitor use but binding to the spike protein away from ACE2 binding site (FIG. 2) appears to be beneficial and supports why having more C135 (Class 3) antibodies occurs in survivors (FIG. 1).

[0151] The spike protein forms a trimmer where all must be in the “up” position for RBD binding to ACE2. Lobo & Warwicker, Computational and Structural Biotechnology Journal, 19, 5140-8 (2021). Simulations of spike trimers showed its transition between up, down, and locked (stabilized down) acidic pH confers stability to the locked structure. Lobo & Warwicker, Computational and Structural Biotechnology Journal, 19, 5140-8 (2021). Class 2 and 3 antibodies can bind the spike protein in both the up and down confirmations. Class 1 and 4 can only bind in the up confirmation. Binding spike in both the up and down position can prevent cell fusion. Starr et al., Nature (2021). Among antibodies exclusive to survivors, on ICU day 0, they had many more class 3 antibodies while antibodies exclusive to non-survivors on day 0 aligned more frequently to class 4. See TABLE 6, TABLE A4, and TABLE A5. Class 3 antibodies can bind separate from the ACE2 epitope and are able to bind in both up and down orientation. pH influences the up/down confirmation. Patients who are critically ill are typically acidotic. Hence, an antibody that binds in both confirmations is useful for the ICU patient.

[0152] Some engineered antibodies appear to use sites that cross class 1 and class 4 antibodies. Rappazzo et al., Science, 371, 823-9 (2021). The widely reported Regeneron Antibody is of class 3, but distinct from C135. Barnes et al., Nature, 588, 682-7 (2020). C135 increased in survivors compared to non-survivors on ICU day 0. In one patient with a low level of C135 compared to other survivors, an increase in another class 3 antibody was like REGN10987 (TABLE A2 and TABLE A3). If patients with low levels of class 3 antibodies, specifically C135, are identified by deep RNA sequencing on ICU day 0, the patients could be treated with commercially available antibodies.

[0153] The immune system unleashes a volley of antibodies when confronted with a pathogen such as COVID-19. Mutant spike protein from SARS-CoV-2 is resistant to sera from convalescent or mRNA vaccine recipients but not to patients infected and then vaccinated. Schmidt et al., Nature (2021). This response shows the importance of both antibody development and vaccination to care for COVID-19. Deep RNA sequencing with analysis for CDR3 sequences could find novel antibodies in patients who are hospitalized with future variants. Deep RNA sequencing could also assess response to vaccines, especially in patients with immune suppression. Yahav et al., BMJ Open, 11, e055611 (2021). A cocktail of antibodies from TABLE 6 may be beneficial in treating COVID-19 in addition to ubiquitous vaccination.

[0154] TABLE 6 shows the top twenty CDR3 Alignments that were exclusive to survivors and non-survivors on ICU day 0. The alignment is the common sequence to which several CDR3 from each patient aligned (Cluster Counts). The CDR3 counts represent the number of times a CDR3 mapped from the survivors or non-survivors. The class and ID are defined. See Barnes et al., Nature, 588, 682-7 (2020) and references in TABLE A1.

TABLE 6A
CDR3 Alignments Exclusive to Survivors Day 0

| Alignment | Cluster Counts | CDR3 Counts | Class | ID |
|---|---|---|---|---|
| CQQYNNYWAF (SEQ ID | 43 | 75616 | C3 | C135 |
| NO: 2) | | | | |
| CQQYNNWPPLTF (SEQ | 52 | 60021 | C3 | REGN10987 |
| ID NO: 3) | | | | |
| CQQYDNHF (SEQ ID | 42 | 48510 | C3 | REGN10987 |
| NO: 4) | | | | |
| CQQYNRYWTF (SEQ ID | 26 | 44085 | C3 | C135 |
| NO: 5) | | | | |
| CQQYNNWPPLFTF | 31 | 36103 | C3 | REGN10987 |
| (SEQ ID NO: 6) | | | | |
| CQQYNNWPPGFTF | 35 | 35532 | C3 | REGN10987 |
| (SEQ ID NO: 7) | | | | |
| CQQLNSYPGGTF (SEQ | 26 | 35395 | C1 | B38 |
| ID NO: 8) | | | | |
| CQQYDSYPWTF (SEQ | 26 | 34909 | C3 | C135 |
| ID NO: 9) | | | | |
| CQQYNSYSRTF (SEQ | 32 | 34521 | C3 | C135 |
| ID NO: 10) | | | | |
| CQQYGSFF (SEQ ID | 25 | 33616 | C1 | C102 |
| NO: 11) | | | | |
| CQQYDKWPFF (SEQ ID | 25 | 30823 | C4 | S2A4 |
| NO: 12) | | | | |
| CMQALQTPLTF (SEQ ID | 18 | 26607 | C2 | C002 |
| NO: 13) | | | | |
| CMQALQTPRTF (SEQ | 17 | 26599 | C2 | C104 |
| ID NO: 14) | | | | |
| CQQRSNWPPLTF (SEQ | 39 | 20622 | C3 | REGN10987 |
| ID NO: 15) | | | | |
| CHQYNNW (SEQ ID NO: | 30 | 19583 | C3 | REGN10987 |
| 16) | | | | |
| CQQFNTWPPE (SEQ ID | 17 | 19345 | C1 | B38 |
| NO: 17) | | | | |
| CQQYQTWPPLF (SEQ | 28 | 17810 | C1 | B38 |
| ID NO: 18) | | | | |
| CQQFNNWPPGFSF | 17 | 16145 | C1 | B38 |
| (SEQ ID NO: 19) | | | | |
| CQSVDSSGIYI (SEQ ID | 27 | 15458 | C4 | S2A4 |
| NO: 32) | | | | |
| CQSADSSGTYPDVVF | 33 | 15132 | C4 | S2A4 |
| (SEQ ID NO: 33) | | | | |

TABLE 6b
CDR3 Alignments Exclusive to Non-Survivors Day 0

| Alignment | Cluster Counts | CDR3 Counts | Class | ID |
|---|---|---|---|---|
| CQQSYSTPLFAF (SEQ | 28 | 140569 | C4 | EY6A |
| ID NO: 34) | | | | |
| CQQYYTTPMYAF (SEQ | 23 | 125715 | C4 | CR3022 |
| ID NO: 35) | | | | |
| CQQYYSTPPSF (SEQ ID | 34 | 110321 | C4 | CR3022 |
| NO: 36) | | | | |
| CQSADSSGTWVF (SEQ | 37 | 62077 | C4 | S2A4 |
| ID NO:37) | | | | |
| CQSADTSGTYGNWVF | 22 | 61809 | C3 | S309 |
| (SEQ ID NO: 38) | | | | |
| CQSADTSGPYRDVVF | 17 | 61626 | C3 | S309 |
| (SEQ ID NO: 39) | | | | |
| CQSPDSSATYQV (SEQ | 11 | 61577 | C4 | S2A4 |
| ID NO: 40) | | | | |
| CQSADNSGSYGIF (SEQ | 22 | 51193 | C4 | S2A4 |
| ID NO:41) | | | | |
| CQQYGSSVTF (SEQ ID | 27 | 48316 | C1 | C102 |
| NO: 42) | | | | |
| CQSADSSGTYKMLF | 16 | 30329 | C4 | S2A4 |
| (SEQ ID NO: 43) | | | | |
| CQRYNNYPYIF (SEQ ID | 15 | 25022 | C3 | C110 |
| NO: 44) | | | | |
| CQRYNTAPYTF (SEQ ID | 12 | 22628 | C3 | C110 |
| NO: 45) | | | | |
| CQQVYDTPRTF (SEQ ID | 12 | 19935 | C2 | C002 |
| NO: 46) | | | | |
| CMQGTHWPPIIF (SEQ ID | 19 | 14254 | C1 | B38 |
| NO: 47) | | | | |
| CIQGTHWPPSAF (SEQ | 14 | 14235 | C1 | B38 |
| ID NO: 48) | | | | |
| CMQGTHWPPSTF (SEQ | 16 | 14233 | C1 | B38 |
| ID NO: 49) | | | | |
| CMQGTHWPPAF (SEQ | 20 | 14141 | C1 | B38 |
| ID NO: 50) | | | | |
| CMQGTLWPPSF (SEQ ID | 13 | 14091 | C1 | B38 |
| NO: 51) | | | | |
| CMQGTHWPPGLTF | 13 | 14077 | C1 | B38 |
| (SEQ ID NO: 52) | | | | |
| CMQGTHWPPSFTF (SEQ | 14 | 14076 | C1 | B38 |
| ID NO: 53) | | | | |

### Example 2

Design a Direct from Blood, without the Need for Culture, Reverse Transcriptase Polymerase Chain Reaction (RT-qPCR) Test for Bacteria Causing Bacteremia, Specifically S. aureus, E. coli, P. aeruginosa, Based on the RNA Identified in Patients with Bacteremia Caused by these Organisms (A1a)

[0155] Rationale. Blood cultures are the current gold standard for pathogen diagnostics but take days. Blood cultures have a known contaminant rate, which can adversely affect treatment and disease progression, as shown in the COVID pandemic. Yu et al. (2020). RNA sequencing is an emerging technology that can enhance the diagnostic capabilities. Unmapped reads, i.e., reads that do not align to the human genome, are typically discarded in RNA sequencing data from humans. When the depth of the RNA sequencing is sufficient, these unmapped reads can provide useful clinical information. The unmapped reads found in the blood of patients with bacteremia are used to inform the development of a diagnostic PCR.

[0156] The gene expression of the bacteria discriminates between infection and simply colonization. D'Mello et al. (2020). Targeting RNA is more specific than DNA by eliminating the signals of free DNA from dead bacteria or pathogen DNA released from immune cells combating the infection. Opota, Jaton, & Greub (2015).

TABLE 7
Creation of Bacterial Genomes

| Bacteria | Genomes | Plasmids |
|---|---|---|
| S. aureus | https://www.ncbi.nlm.nih.gov/genome/154 | 958 |
| E. coli | https://www.ncbi.nlm.nih.gov/genome/167 | 5895 |
| P. aeruginosa | https://www.ncbi.nlm.nih.gov/genome/187 | 155 |
| H. influenza | https://www.ncbi.nlm.nih.gov/genome/165 | 1 |

[0157] Assay 1. Assess the RNA sequencing data from patients with blood infections due to S. aureus, E. coli, and P. aeruginosa. Unmapped reads or reads that do not align to the organism of interest, are typically discarded. These reads are used to identify bacterial RNA in the blood. This was initially done using Kraken2. Wood, Lu, & Langmead (2019). For more granularity, the inventors assembled custom genomes to which the unmapped reads are aligned using STAR RNA-sequencing aligner. Dobin et al. (2013). These genomes are based upon the common genome in TABLE 7 but also include sequences from other chromosomes and the plasmids attributed to those bacteria, creating a pan-genome. Eizenga et al. (2020). Samples from patients with S. aureus are used to identify the significant reads that align to this bacterium and repeated for other pathogens of interest. This gives a total read count for each bacterium and the portions of the genome with the most abundant reads. From these abundant reads, PCR primers are designed to test for the pathogens based upon large reads of common areas across many patients.

[0158] Assay 2. Create RT-qPCR primers to identify S. aureus, E. coli, and P. aeruginosa causing bacteremia. Using the targets of interest from the deep RNA sequencing data, PCR primers are designed to cover these parts of the bacterial genome identified. It may be necessary to have multiple primers for multiple targets to identify one pathogen, however this are accomplished through multiplexing that is possible with the NeuMoDx instrument from the industry partner. The target of these primers are the RNA in the blood, a reverse transcriptase reaction are used to create the cDNA for the PCR.

[0159] Expected results. The preliminary data show that patients with bacteremia have bacterial RNA in their blood that correlates with the causative organism. The inventors anticipate there are a set of highly expressed genes from each of the bacteria during infection that can be the basis for identification. The inventors expect genes like the coagulase gene to be detected in patients with Staphylococcus aureus bacteremia. Cheng et al. (2010). The inventors prioritize PCR targets unique to the bacteria being tested and distinct from other bacteria. Additional findings include observations that gene expression of the bacteria can also determine colonization versus infection based on expression pattern and abundance. D'Mello et al. (2020). The number of reads (i.e., transcript abundance) may correlate with patient condition or patient outcomes. Abundant clinical data is associated with patients from with the samples are derived. Read frequency or abundance on RT-qPCR are evaluated for these correlations.

[0160] Potential pitfalls and alternatives. Maybe the bacteria that are identified in the sequencing cannot be correlated to microbiology culture. This could be due to blood cultures being negative in 50% of blood stream infections, likely due to low numbers of bacteria in the blood or the impact of antibiotics before the sample is obtained. Opota, Jaton, & Greub (2015). Blood culture could identify the wrong pathogen while another pathogen could cause infection, i.e., a contaminant. the approach includes aligning unmapped reads using Kraken2 to identify background levels of sequences from unrelated bacteria that could be commensals or contaminants. A single gene may not uniquely identify an organism, reducing specificity of the test. In that situation, the inventors test gene combinations as described above. Alternatively, unique alleles/SNPs are used to define a specific pathogen. Established techniques are used to measure SNPs in the RT-qPCR format.

### Example 3

Validate RT-PCR Tests in Samples from Patients with and without Bacteremia (A1b)

[0161] Rationale. After targets for identification of the pathogens are determined, it is imperative to ensure that these targets can be used clinically. RT-qPCR allow for the identification of pathogens, directly from blood, without culture, in less than four hours. RT-qPCR also allow for faster, pathogen-directed antibiotic selection. Blood culture collection is recommended before antibiotic administration to enhance the diagnostic sensitivity of the blood culture. See Evans et al. (2021). With this diagnostic test proposed here, antibiotics are not expected to influence the RNA present at the blood draw.

[0162] Assay 1. Test PCR primers on samples used for RNA sequencing. The cDNA libraries created for RNA sequencing are accessed as the initial test of the PCR primers. Because the RNA sequencing data determined these RNA segments were present, this are the first step in assessment of the utility of these novel PCR tests for the bacteria. The cDNA from all samples with positive cultures for each of the bacteria are used for this assay. Each cDNA sample are tested using the PCR primers for all pathogens. As a negative control for specificity, the inventors also cDNA from the blood of patients and normal controls that have no infections.

[0163] Assay 2. Validate PCR primers on samples that mimic collection for clinical use. To obtain sensitivity and specificity in line with FDA requirements, samples from patients with and without confirmed blood infections due to the pathogens of interest are identified from banked clinical specimens, including PAXgene tubes. The PAXgene tubes are being collected at the time of blood culture collection and stored. In the experience, PAXgene tubes completely stabilize high quality RNA. To enhance robustness of the testing, these tubes are blinded to the team performing the PCR assays. The RNA are extracted and globin and rRNA are reduced using commercially available kits. cDNA libraries are made with reverse transcriptase and then PCR are done with the primers. PAXgene tubes are used but the RT-qPCR are done immediately to ensure the result returns in less than four hours.

[0164] Expected results. A panel of PCR primers are developed and optimized on a machine that can be easily translated to a clinical microbiology laboratory. The tests identify S. aureus, E. coli, and P. aeruginosa directly from the blood through extraction of RNA, reduction of globin and rRNA, and creation of cDNA for the PCR. These tests have sensitivity and specificity in line with requirements of the FDA. These direct from blood PCR are initially done for S. aureus, E. coli, and P. aeruginosa. Through collecting samples from patients in PAXgene tubes with other infections, the PCR panel can be expanded as new targets from additional pathogens are identified. Because this PCR is rapid, it could be used to monitor treatment impact, a practice not currently done as culture takes days to return. If successful treatment is detected, antibiotic course could be shortened and therefore enhance antimicrobial stewardship.

[0165] Potential pitfalls and alternatives. Blood is known to interfere with PCR when identifying DNA, but not RNA. Sidstedt et al. (2018). The number of reads may need to be a minimal amount to be translatable to detection by PCR. Deep RNA sequencing may find a gene that identifies infection, but PCR conditions cannot be optimized to replicate the finding. This problem can be solved when RNA sequencing costs and time are reduced. RNA sequencing should take less than four hours at a depth of 100 million reads or more.

### Example 4

Design a Direct from Blood, without the Need for Culture, Reverse Transcriptase Polymerase Chain Reaction (RT-PCR) Test for Bacteria Causing Pneumonia, Specifically S. aureus, P. aeruginosa, H. influenzae, Based on the RNA Identified in Patients with Pneumonia Caused by these Organisms (A2a).

[0166] Rationale. The diagnosis of hospital-acquired pneumonia is complex. Modi & Kovacs (2020). Bronchial alveolar lavage (BAL) is the gold standard, similar to blood culture for bacteremia. Because BAL requires an invasive intervention (bronchoscopy) that can worsen the clinical picture, screening tools are used to decide when to perform them, hence the yield is higher than blood culture. A direct from blood test that provides the same diagnosis obviates the need for the invasive bronchoscopy intervention. The assays described below parallel those in EXAMPLE 2 with an independent cohort of patients diagnosed with pneumonia and who undergo BAL.

[0167] Assay 1. Assess the RNA sequencing data from patients with pneumonia due to S. aureus, P. aeruginosa, and H. influenzae. As described in the EXAMPLE above for the blood infections, unmapped reads are aligned to genomes of interest to identify genes with increased expression in patients with infection diagnosed by BAL. The blood are collected in PAXgene tubes at the time of BAL. S. aureus and P. aeruginosa genes that are identified are compared to the genes identified for bacteremia. From these reads, PCR primers are developed.

[0168] Assay 2. Create RT-PCR primers to identify S. aureus, P. aeruginosa, and H. influenzae causing pneumonia. Using the reads generated from Assay 1, PCR primers are developed to identify pathogens causing hospital acquired pneumonia and applied to the sequenced samples and an independent cohort.

[0169] Expected results. The preliminary data show that patients in the ICU have bacterial RNA in the blood. There are a set of highly expressed genes from the bacteria during infection that can be used as the basis for identification. One outcome is that these genes differ from the genes expressed during bacteremia because some suggested that gene expression changes from the bacteria based on site of infection/colonization. The inventors have RNA sequencing data from patients with bacteremia and pneumonia due to similar pathogens and can see if different genes are expressed at higher rates. Primers can be developed for each pathogen based upon site of infection to guide diagnosis. An alternative outcome is that the same target sequences are found in bacteremia and pneumonia. This would simplify product development on the NeuMoDx and require the test be integrated into other clinical diagnostics such as X-rays.

[0170] Potential pitfalls and alternatives. The technical approach is similar to EXAMPLE 2, which the inventors have shown is feasible. Because the infection is in the lung, there may be no bacterial RNA identified in the blood of these patients, but other studies dispute this possibility. D'Mello et al. (2020). Bacterial DNA was detected in the blood of pneumonia patients. Langelier et al. (2020). The lung has a large surface area for gas exchange that would facilitate transfer of stable RNA or RNA in micro vesicles from the infection into the bloodstream. Blenkiron et al. (2016). Bacteremia complicates pneumonia in 6-17% of cases, depending on severity. Zhang, Yang, & Makam (2019). A subset of the pneumonia patients are expected to have target sequences shared with the patients studied in EXAMPLE 1. If the sequencing analysis cannot distinguish between the subgroups of pneumonia patients with and without bacteremia, clinical data are used to guide management.

### Example 5

Validate RT-qPCR Tests in Samples from Patients with and without Pneumonia (A2b).

[0171] Rationale. The PCR targets identified by sequencing can be used clinically. Hospital acquired pneumonia typically rapidly deteriorates a patient, so faster diagnosis is essential. RT-qPCR allows for the identification of pathogens, directly from blood, without culture, in less than four hours, and faster selection of pathogen-directed antibiotics. The goal is to eliminate invasive bronchoscopies, which can delay antibiotic administration and increase risks to the patient.

[0172] Assay 1. Test PCR primers on samples used for RNA sequencing. RNA sequencing cDNA libraries again are the initial test of the PCR primers. The cDNA from all samples with positive BAL cultures for each of the bacteria are used for this assay. Each cDNA sample are tested using the PCR primers for all pathogens. The inventors also use cDNA from patients that had no hospital-acquired pneumonia.

[0173] Assay 2. Test PCR primers on samples that mimic collection for clinical use. This test is done obtain sensitivity and specificity in line with FDA requirements. PAXgene tubes from patients with and without confirmed hospital acquired pneumonia due to the pathogens of interest are identified. The PAXgene tubes are collected at the time BAL collection. The patients' infection status are blinded to the researchers performing the PCRs. The stabilized RNA are extracted from the PAXgene tubes and globin and human rRNA are depleted using a commercial kit from New England Biolabs. cDNA are made with reverse transcriptase and then PCR are done with the primers. PAXgene tubes are used. RT-PCR are done immediately to ensure result in less than four hours.

[0174] Expected results. Specific RT-qPCR assays validate the sequencing and diagnose hospital-acquired pneumonia due to S. aureus, P. aeruginosa, and H. influenzae from a direct from blood sample in fewer than four hours. Target abundance vary among patients (see, e.g., TABLE 1), which are correlated with severity of the pneumonia. Efforts are directed to finding primers that diagnose pneumonia and that are distinct from those for bacteremia despite being due to the same pathogen.

### Example 6

Using the RNA from Patients with Infections, Design an RT-qPCR for the Most Common Resistance Genes Expressed that would Influence Treatment for S. aureus, E. coli, P. aeruginosa, and H. influenzae (A3a).

[0175] Rationale. While identifying the causative pathogen faster aids antibiotic selection, knowledge of antimicrobial resistance is critical to managing patients with serious infections. Delays in antibiotics worsen outcomes for all patients, including those with resistant organisms. Bonine et al. (2019). Overtreatment of organisms that do not carry resistance determinants also worsens outcomes. Rhee et al. (2020). The objective of this EXAMPLE is to harness data from RNA sequencing to inform PCR-based diagnostics of antimicrobial resistance that are clinically relevant. Reads from the sequencing studies described above are aligned to a “genome” of resistance genes of interest, then novel PCR primers are created to test against clinical specimens. These are “phenotypic” measurements of antibiotic resistance because gene expression and resistance phenotypes are closely linked. Suzuki, Horinouchi, & Furusawa (2014).

[0176] Assay 1. Assess the RNA sequencing data from patients with infections due to S. aureus, E. coli, and P. aeruginosa, and H. influenza for resistance genes. A “genome” are made using clinically relevant resistance genes. For Staphylococcus aureus, the inventors include mecA (methicillin resistance) (Chambers & Deleo (2009); Guo et al. (2020)), qacA, norA, smr (efflux transporters of quinolones and tetracyclines) Guo et al. (2020), beta-lactamase (hydrolyses cefazolin) (Guo et al. (2020)), and VRSA (vanA, vanB, vanC, vanX, vanY, vanA). Escherichia coli targets include multiple beta-lactamases: basic beta-lactamases cleaving ampicillin, ESBL genes (TEM-1, TEM-2, and SHV-1) CTX-M (see TABLE 1), ampC, carbapenemases: KPC (class A), metallo (class B: IMP, VIM, NDM-1), OXA (class D) (Bajaj, Singh, & Virdi (2016), GyrA and ParC (fluoroquinolone resistance) (Tchesnokova et al. (2019)), acrB (Karczmarczyk et al., 2011), ompF, Efflux pumps PabetaN, and qnr (Salah et al. (2019)). For Pseudomonas aeruginosa ampC, oprM, mexY (efflux transporters for quinolones and aminoglycosides) (Islam et al. (2009)), bla, gyrA, gyrB, parC (for quinolones) (Yang et al. (2015)), and aac(6′)-lb,aphA1, and aadB (aminoglycosides) (Teixeira et al. (2016)). For Haemophilus influenzae TEM-1 and ROB-1 (Gutmann, Williamson, Collatz, & Acar (1988); Tristram, Jacobs, & Appelbaum (2007)). (52, 53) Using these genes, PCR primers are identified based upon RNA data from patients with these infections. This again are a primer for RT-PCR as the target are RNA. Using RNA as the target yields better results rather than DNA. This tool adapted for use with RNA data could enhance the phenotypic correlation using this data set. Bortolaia et al. (2020).

[0177] Assay 2. Create RT-PCR primers to identify resistance genes. Using the targets of interest from the deep RNA sequencing data, PCR primers are designed to cover resistance genes. Multiple primers may be needed to identify resistance genes for one pathogen. This are accomplished through multiplexing that is possible with the machine from the industry partner. The target of these primers are the RNA in the blood, a reverse transcriptase are used to create the cDNA for which the primers interact. Targeting RNA has a better phenotypic correlation than targeting DNA from the pathogen because RNA signifies that the gene is being actively expressed.

TABLE 8
Antibiotic resistance markers and therapeutic considerations.

| | Resistance | Antibiotic if | Antibiotic if | |
|---|---|---|---|---|
| Bacteria | Gene | present | absent | Ref. |
| S. aureus | mecA | vancomycin | nafcillin | Chambers (1997) |
| | blaZ | nafcillin | cefazolin | Dingle et al. (2022) |
| | VRSA (vanA) | daptomycin | vancomycin | |
| E. coli | ESBL | carbapenem or | ampicillin or | Paterson et al. (2001); |
| | | ceftolozane-tazo | 3GenCeph | Rupp & Fey (2003) |
| | Class A | ceftazidime-avi | ampicillin or | Rivera-Izquierdo et al. |
| | carbapenemase; | or aztreonam or | 3GenCeph | (2021) |
| | Class B | tigecycline | | |
| | carbapenemase; | | | |
| | Class D | | | |
| | carbapenemase | | | |
| | gyrA, parC | ampicillin or | fluoroquinolone | Tchesnokova et al. |
| | | cephalosporin | | (2019) |
| P. | ampC | carbapenem | cefepime/ | Jacoby (2009) |
| aeruginosa | | | ceftazidime | |
| | oprM, mexY | non- | fluoroquinolone | Yang et al. (2015) |
| | | fluoroquinolone | | |
| | gyrA/parC point | non- | fluoroquinolone | Yang et al. (2015) |
| | mutation | fluoroquinolone | | |
| H. | tem-1, rob-1 | amoxicillin-clav | amoxicillin | Gutmann, Williamson, |
| influenza | | | | Collatz, & Acar (1988); |
| | | | | Tristram, Jacobs, & |
| | | | | Appelbaum (2007) |

(tazo, tazobactam; avi, avibactam; 3GenCeph, 3^{rd} generation cephalosporin; clav, clavulanic acid.)

[0178] Potential pitfalls and alternatives. In one detailed study of transcription and protein abundance in Escherichia coli, there was a lack of correlation between RNA and protein levels. Taniguchi et al. (2010). Though the overall abundances were not correlated, enzyme transcription and translation were closely correlated. Taniguchi et al. (2010). Some resistance phenotypes, such as fluoroquinolone resistance due to gyrA, gyrB, and parC, are mediated by SNPs. The PCR primers are adapted for SNP detection such as the TaqMan assay. Easterday, Van Ert, Zanecki, & Keim (2005). For some resistance mechanisms, such as beta-lactamases, there are too many individual genes to test. In this situation, the inventors use k-mer analysis to identify primers capable of detecting entire classes of beta-lactamases. Marini et al. (2022). Ultimately, there are concerns for whether RNA-based detection of resistance is sufficiently comprehensive to be used in clinical practice. Regulatory RNA may play a role in resistance but not be detected by the sequencing approach. Dersch, Khan, Mühlen, & Görke (2017). In this situation, the inventors evaluate more patient specimens and alter sequencing protocols to detect unconventional RNAs.

### Example 7

Validate PCR Tests for Resistance Genes in Samples from Patients with and without Infections (A3b).

[0179] Rationale. Although the resistance genes can be identified with deep RNA sequencing, fast identification with PCR is necessary to be clinically relevant. If the genes are identified, treatment can be changed (TABLE 8).

[0180] Assay 1. Test PCR primers on samples used for RNA sequencing. cDNA libraries used for RNA sequencing are the initial test of the PCR primers. See FIG. 3. The cDNA from all samples with positive cultures with resistance are used as the positives. Each cDNA sample are tested using the PCR primers for all resistance genes to assess primer specificity.

[0181] Assay 2. Test PCR primers on samples that mimic collection for clinical use. These tests are done obtain sensitivity and specificity in line with FDA requirements. PAXgene tubes from patients with and without confirmed infections with resistance are used as essential negative controls. The assays include a positive control gene like actin to confirm PCR reaction in each specimen.

[0182] Expected results. Sets of PCR primers identified in this EXAMPLE detect resistance in these validation studies. The most straightforward tests are for the presence or absence of RNA encoding a resistance mechanism, such as mecA in MRSA. Although a molecular test is used in the clinical microbiology lab to diagnose MRSA, this test requires a positive blood culture bottle. The objective is to validate an RNA-based blood test that alters treatment described in TABLE 8. That returns results in less than four hours without having to culture the patient's blood.

[0183] Potential pitfalls and alternatives. The principal concerns are for the level of target sequence found in blood, i.e., sensitivity, and the ability to identify primers that amplify the expected sequence, i.e., specificity. Strategies for improving sensitivity include using more cDNA in the PCR reaction and conducting a nested PCR. The inventors have not encountered evidence for inhibition of PCR reactions, which is due to the additional processing involved with using RNA as a PCR template. The inventors also continue to use a positive reference gene, such as actin, to test for PCR inhibitors. There may be a large number of potential sequences that could convey a phenotype, such as the large family of beta-lactamases. k-mer analysis are used to identify sequences that represent the family, and primers are designed against that analysis. Modified PCR reactions, such as TaqMAMA, are used when mutations of pre-existing genes convey a resistant phenotype, as SNPs in gyrA and parC that are responsible for fluoroquinolone resistance. Another possibility is that important resistance mechanisms are infrequently encountered in the patient population, such as carbapenemase production. To create a more comprehensive test under those circumstances, the inventors can evaluate appropriate resistant strains in vitro, such as from the CDC & FDA Antibiotic Resistance Isolate Bank that is available to researchers. It may also be necessary to expand sample collection through collaborations with researchers at outside institutions. Another theoretical concern is that the test finds target sequences in patients without infections or normal controls. RT-qPCR holds a distinct advantage over endpoint PCR, so the inventors can establish a threshold cutoff for test positivity using relative abundance measurements of targets by the ΔCt calculation: Ct of assay−Ct of actin gene.

### Example 8

Deep RNA Sequencing can Identify RNA from Pathogens of Interest

[0184] Deep RNA sequencing data was taken from two patients with bacteremia due to Escherichia coli infection. The unmapped reads were aligned to the Escherichia coli genome. Each patient had reads that aligned to fourteen genes in TABLE 9. Bacterial ribosomal RNA was identified because the depletion kits are designed for human ribosomal RNA. Although previous work has looked at ribosomal RNA for pathogen identification, this method is different because the inventors are looking at RNA and not DNA so that the inventors can look for actively expressed genes. Like the probe design for SARS-CoV-2 above, the inventors identify an exact region of the gene of interest covered by the RNA reads identified by the sequencing data. They can also target multiple genes with PCR based on those with the most reads in sick patients. Interestingly, the patient with more reads died, while the other patient survived. This increase in read counts based on the clinical deterioration could be akin to a molecular equivalent of time to a positive culture, which is sometimes used clinically. Bläckberg et al. (2022).

[0185] Patient 2 died of an ESBL Escherichia coli bacteremia. In this patient, genes CTX-M (twelve counts) and blaCTX-M (twelve counts) were identified. These genes result in an ESBL pathogen, confirming the culture diagnosis.

[0186] These data demonstrate the ability to isolate RNA from the blood, sequence the RNA, and use computational approaches to identify bacterial sequences and create PCR primers to identify infection and resistance.

TABLE 9
Reads of E coli genes per patient with E coli bacteremia

| Gene | Patient 1 | Patient 2 |
|---|---|---|
| rrlA 23S | 244 | 12645 |
| rrsB 16S | 385 | 12274 |
| rrlC 23S | 232 | 12205 |
| rrsE 16S | 384 | 12179 |
| rrsA 16S | 369 | 12036 |
| rrsC 16S | 446 | 11447 |
| rrlE 23S | 282 | 11044 |
| rrlB 23S | 294 | 10629 |
| rrlD 23S | 248 | 10462 |
| rrlH 23S | 208 | 10335 |
| rrsG 16S | 314 | 9875 |
| rrsD 16S | 308 | 9717 |
| rrlG 23S | 285 | 9340 |
| rrsH 16S | 444 | 7912 |
| (bla)CTX-M | Negative | Positive |

### Example 9

### Test Characteristics

TABLE 10
Test Characteristics of Greatest Importance

| Description | Application in this Invention |
|---|---|
| Rapid: proposed ID test time of <4 | A PCR-based test to return a result in less than |
| hours for clinical diagnostics that | four hours. This test is done on a sample |
| differentially detect and identify | directly from blood by looking at the RNA |
| species and concurrently or | present from the bacteria to detect and identify |
| sequentially provide phenotypic | the species. Because it is looking at RNA, not |
| resistance profile information. | DNA, a phenotypic resistance profile is achieved. |
| Culture-independent: the diagnostic | The pathogen identification results from |
| should focus on direct detection of | information obtained directly from the blood. |
| the target pathogens from primary | The PCR targets pathogen RNA, more |
| samples | abundant than single copies of DNA per |
| | organism. Culture is not needed. |
| Technologies capable of detecting | From samples from patients with infections due |
| drug resistance/drug-susceptibility, | to resistant organisms, RNAs corresponding to |
| relevant to clinical decision making | the resistance gene are measured in the PCR. |
| | Resistant genes are selected that alter |
| | antimicrobial therapy for that pathogen if they |
| | are detected. |
| Sensitive and specificity should | Sensitivity and specificity are studied and |
| equal or exceed the sensitivity and | reported according to the Statistical Guidance |
| specificity of FDA-cleared tests for | on Reporting Results from Studies Evaluating |
| proposed agents from the same | Diagnostic Tests - Guidance for Industry and |
| sample type. | FDA Staff. Culture-based tests are performed in |
| | parallel with the molecular tests being developed. |

### Other Embodiments

[0187] Specific compositions and methods are disclosed. The scope of the invention should be defined solely by the claims. Persons having ordinary skill in the biomedical art will interpret all claim terms in the broadest possible manner consistent with the context and the spirit of the disclosure. The detailed description in this specification is illustrative and not restrictive or exhaustive. This invention is not limited to the particular methodology, protocols, and reagents described in this specification and can vary in practice. When the specification or claims recite ordered steps or functions, alternative embodiments might perform their functions in a different order or substantially concurrently. Other equivalents and modifications besides those already described are possible without departing from the inventive concepts described in this specification, as persons having ordinary skill in the biomedical art recognize.

[0188] When the specification provides a range of values, each intervening value between the upper and lower limit of that range is within the range of values unless the context dictates otherwise.

### CITATION LIST

[0189] Persons having ordinary skill in the biomedical art can use these patents, patent applications, and scientific references as guidance to predictable results when making and using the invention.

### Patent Literature

[0190] International Pat. Publ. WO 2021/163692 A1 (Rhode Island Hospital), RNA sequencing to diagnose sepsis, published Aug. 19, 2021. Deep RNA sequencing is a technology that provides an initial diagnostic for sepsis that can also monitor the indicia of treatment and recovery (bacterial counts reduce, physiology returns to steady-state).
[0191] U.S. Pat. Publ. US 2013/0316331 A1 (Isakof et al.), Detection of infection by a microorganism using small RNA sequencing subtraction and assembly, published Nov. 11, 2013. A method for the detection and identification of infection of a subject by a microorganism, wherein the method is based on the use of small RNA derived sequences and subtraction and assembly thereof.
[0192] U.S. Pat. Publ. US 2016/0292356 A1 (Kim et al.), Methods and processes for non-invasive assessment of chromosome alterations, published Oct. 6, 2016. Methods, processes, systems, machines, and apparatuses for non-invasive assessment of chromosome alterations.

### Non-Patent Literature

[0193] Acevedo et al., Infectivity and immune escape of the new SARS-CoV-2 variant of interest Lambda. medRxiv, 2021.06.28.21259673 (2021).
[0194] Al-Hasan, Winders, Bookstaver, & Justo, Direct measurement of performance: A new era in antimicrobial stewardship. Antibiotics (Basel, Switzerland). 8(3) (2019).
[0195] Andrei & Wang, Cutaneous light chain amyloidosis with multiple myeloma: A concise review. Hematology/Oncology and Stem Cell Therapy 12, 71-81 (2019).
[0196] Bajaj, Singh, & Virdi, Escherichia coli β-lactamases: What really matters. Frontiers in Microbiology, 7, 417 (2016).
[0197] Barnes et al., SARS-CoV-2 neutralizing antibody structures inform therapeutic strategies. Nature, 588, 682-7 (2020).
[0198] Based on Science, What is the connection between COVID-19 and sepsis? National Academies (Feb. 14, 2022).
[0199] Bläckberg et al., Time to blood culture positivity: An independent predictor of mortality in Streptococcus pyogenes bacteremia. Open Forum Infectious Diseases, 9(6), ofac163 (2022).
[0200] Blenkiron et al., Uropathogenic Escherichia coli releases extracellular vesicles that are associated with RNA. PLOS One, 11(8), e0160440 (2016).
[0201] Bone et al., Definitions for sepsis and organ failure and guidelines for the use of innovative therapies in sepsis. Chest, 101, 1644-1655 (1992).
[0202] Bonine et al., Impact of delayed appropriate antibiotic therapy on patient outcomes by antibiotic resistance status from serious gram-negative bacterial infections. The American Journal of the Medical Sciences, 357(2), 103-10 (2019).
[0203] Bortolaia et al., ResFinder 4.0 for predictions of phenotypes from genotypes. The Journal of Antimicrobial Chemotherapy, 75(12), 3491-500 (2020).
[0204] Bustin & Huggett, qPCR primer design revisited. Biomolecular detection and quantification, 14, 19-28 (2017).
[0205] Bustin, Mueller, & Nolan, Parameters for successful PCR primer design. Methods in Molecular Biology (Clifton, NJ), 2065, 5-22 (2020).
[0206] Camargo et al., Next-generation sequencing of microbial cell-free DNA for rapid noninvasive diagnosis of infectious diseases in immunocompromised hosts. F1000Research, 8, 1194 (2019).
[0207] Cass & Xiao X, mountainClimber identifies alternative transcription start and polyadenylation sites in RNA-Seq. Cell Systems, 9(4), 23, 393-400.e6 (October 2019).
[0208] Chambers & Deleo, Waves of resistance: Staphylococcus aureus in the antibiotic era. Nature Reviews Microbiology, (9), 629-41 (2009).
[0209] Chambers, Methicillin resistance in staphylococci: molecular and biochemical basis and clinical implications. Clinical Microbiology Reviews, 10(4), 781-91 (1997).
[0210] Cheng et al., Contribution of coagulases towards Staphylococcus aureus disease and protective immunity. PLOS Pathogens, 6(8), e1001036 (2010).
[0211] Clatworthy, Pierson, & Hung, Targeting virulence: A new paradigm for antimicrobial therapy. Nature Chemical Biology; 3(9), 541-8 (2007).
[0212] Covert, Bashore, Edds, & Lewis, Utility of the respiratory viral panel as an antimicrobial stewardship tool. Journal of Clinical Pharmacy and Therapeutics, 46(2), 277-85 (2021).
[0213] D'Mello et al., An in vivo atlas of host-pathogen transcriptomes during Streptococcus pneumoniae colonization and disease. Proceedings of the National Academy of Sciences, 117:33507-18 (2020).
[0214] De Bus et al., Antimicrobial de-escalation in the critically ill patient and assessment of clinical cure: the DIANA study. Intensive Care Medicine, 46(7), 1404-17 (2020).
[0215] Dersch, Khan, Mühlen, & Görke, Roles of regulatory RNAs for antibiotic resistance in bacteria and their potential value as novel drug targets. Frontiers in Microbiology, 8, 803 (2017).
[0216] Dingle et al., Prevalence and characterization of the cefazolin inoculum effect in North American methicillin-susceptible Staphylococcus aureus isolates. Journal of Clinical Microbiology, e0249521 (2022).
[0217] Dobin et al., STAR: Ultrafast universal RNA-seq aligner. Bioinformatics (Oxford, England), 29(1), 15-21 (2013).
[0218] Dong & Gardner, An interactive web-based dashboard to track COVID-19 in real time. The Lancet, Infectious Diseases (2020).
[0219] Drews et al., Resistance of SARS-CoV-2 beta and gamma variants to plasma collected from Canadian blood donors during the Spring of 2020. Transfusion (2021).
[0220] Duncan, Youngstein, Kirrane, & Lonsdale, Diagnostic challenges in sepsis. Current Infectious Disease Reports, 23(12), 22 (2021).
[0221] Easterday, Van Ert, Zanecki, & Keim, Specific detection of Bacillus anthracis using a TaqMan mismatch amplification mutation assay. BioTechniques, 38(5), 731-5 (2005).
[0222] Eizenga et al., Pangenome graphs. Annual Review of Genomics and Human Genetics, 21, 139-62 (2020).
[0223] Evans et al., Surviving Sepsis Campaign: International guidelines for management of sepsis and septic shock 2021. Critical Care Medicine, 49(11), e1063-e143 (2021).
[0224] FastQC. A quality control tool for high throughput sequence data. (2014).
[0225] Ferguson et al., The Berlin definition of ARDS: An expanded rationale, justification, and supplementary material. Intensive Care Medicine, 8(10), 1573-82 (2012).
[0226] Fredericks et al., Deep RNA sequencing of intensive care unit patients with COVID-19, Scientific Reports, 12(1) (January 2022).
[0227] Glaab & Skopek, A novel assay for allelic discrimination that combines the fluorogenic 5′ nuclease polymerase chain reaction (TaqMan) and mismatch amplification mutation assay. Mutation Research, 430(1), 1-12 (1999).
[0228] Global burden of bacterial antimicrobial resistance in 2019: A systematic analysis. Lancet (London, England), 399(10325), 629-55 (2022).
[0229] Guo et al., Prevalence and therapies of antibiotic-resistance in Staphylococcus aureus. Frontiers in Cellular and Infection Microbiology, 10, 107 (2020).
[0230] Gutmann, Williamson, Collatz, & Acar, Mechanisms of beta-lactam resistance in Haemophilus influenzae. European Journal of Clinical Microbiology & Infectious Diseases: Official publication of the European Society of Clinical Microbiology, 7(5), 610-5 (1988).
[0231] Harbottle, Thakur, Zhao, & White, Genetics of antimicrobial resistance. Animal Biotechnology, 17(2), 111-24 (2006).
[0232] Hardwick et al., “Getting the entire message: Progress in isoform sequencing.” Frontiers in Genetics, 10, 709 (2019).
[0233] Hui, DelMonte, & Ranade, Genotyping using the TaqMan assay. Current Protocols in Human Genetics, Chapter 2: Unit 2.10 (2008).
[0234] Islam et al., Chromosomal mechanisms of aminoglycoside resistance in Pseudomonas aeruginosa isolates from cystic fibrosis patients. Clinical Microbiology and Infection: Official publication of the European Society of Clinical Microbiology and Infectious Diseases, 15(1), 60-6 (2009).
[0235] Jacoby, AmpC beta-lactamases. Clinical Microbiology Reviews. 22(1), 161-82 (2009).
[0236] Karczmarczyk et al., Mechanisms of fluoroquinolone resistance in Escherichia coli isolates from food-producing animals. Applied and Environmental Microbiology, 77(20), 7113-20 (2011).
[0237] Kassakian & Mermel, Changing epidemiology of infections due to extended spectrum beta-lactamase producing bacteria. Antimicrobial Resistance and Infection Control, 3(1), 9 (2014).
[0238] Krause et al., SARS-CoV-2 variants and vaccines. New England Journal of Medicine, 385, 179-86 (2021).
[0239] Kukurba & Montgomery, “RNA sequencing and analysis.” Cold Spring Harbor Protocols, 2015(11), 951-69 (Apr. 13, 2015).
[0240] Kumar et al., Duration of hypotension before initiation of effective antimicrobial therapy is the critical determinant of survival in human septic shock. Critical Care Medicine, 34(6), 1589-96 (2006).
[0241] Langelier et al., Detection of pneumonia pathogens from plasma cell-free DNA. American Journal Of Respiratory and Critical Care Medicine, 201(4), 491-5 (2020).
[0242] Livak, Allelic discrimination using fluorogenic probes and the 5′ nuclease assay. Genetic Analysis: Biomolecular Engineering, 14(5-6), 143-9 (1999).
[0243] Lobo & Warwicker, Predicted pH-dependent stability of SARS-CoV-2 spike protein trimer from interfacial acidic groups. Computational and Structural Biotechnology Journal, 19, 5140-8 (2021).
[0244] Lu et al., Discovering common pathogenetic processes between COVID-19 and sepsis by bioinformatics and system biology approach. Frontiers in Immunology, Volume 13, Article 975848. (Aug. 31, 2022).
[0245] Mandric et al. Profiling immunoglobulin repertoires across multiple human tissues using RNA sequencing. Nature Commun., 11, 3126 (2020).
[0246] Mangul et al., ROP: Dumpster diving in RNA-sequencing to find the source of 1 trillion reads across diverse adult human tissues. Genome Biology, 19, 36 (2018).
[0247] Marini et al., AMR-meta: A k-mer and metafeature approach to classify antimicrobial resistance from high-throughput short-read metagenomics data. GigaScience, 11 (2022).
[0248] Mei-Sheng, Riley & Olans, Implementing an antimicrobial stewardship program in the intensive care unit by engaging critical care nurses. Critical Care Nursing Clinics of North America, 33(4), 369-80 (2021).
[0249] Modi & Kovacs, Hospital-acquired and ventilator-associated pneumonia: Diagnosis, management, and prevention. Cleveland Clinic Journal of Medicine, 87(10), 633-9 (2020).
[0250] Monaghan et al., Deep RNA sequencing of intensive care unit patients with COVID-19. medRxiv (2021).
[0251] Monaghan et al., Deep RNA sequencing of intensive care unit patients with COVID-19. medRxiv (2021).
[0252] Müller & Köhler, B cell superantigens in HIV-1 infection. International Reviews of Immunology, 14, 339-49 (1997).
[0253] Noureen, Tada, Kawashima, & Arita, Rearrangement analysis of multiple bacterial genomes. BMC Bioinformatics, 20(Suppl 23), 631 (2019).
[0254] Olwal et al., Parallels in sepsis and COVID-19 conditions: Implications for managing severe COVID-19. Frontiers in Immunology, Volume 12, Article 602848 (February 2021).
[0255] Opota, Jaton, & Greub, Microbial diagnosis of bloodstream infection: towards molecular diagnosis directly from blood. Clinical Microbiology and Infection: the official publication of the European Society of Clinical Microbiology and Infectious Diseases, 21(4), 323-31 (2015).
[0256] Palavecino, Rapid methods for detection of MRSA in clinical specimens. Methods in Molecular Biology (Clifton, NJ), 2069, 29-45 (2020).
[0257] Paterson et al., Outcome of cephalosporin treatment for serious infections due to apparently susceptible organisms producing extended-spectrum beta-lactamases: implications for the clinical microbiology laboratory. Journal of Clinical Microbiology, 39(6), 2206-12 (2001).
[0258] Rappazzo et al., Broad and potent activity against SARS-like viruses by an engineered human monoclonal antibody. Science, 371, 823-9 (2021).
[0259] Reynolds et al., Renin-angiotensin-aldosterone system inhibitors and risk of Covid-19. The New England Journal of Medicine, 382, 2441-8 (2020).
[0260] Rhee et al., Prevalence of antibiotic-resistant pathogens in culture-proven sepsis and outcomes associated with inadequate and broad-spectrum empiric antibiotic use. JAMA Network Open., 3(4), e202899 (2020).
[0261] Rivera-Izquierdo et al., OXA-48 carbapenemase-producing enterobacterales in Spanish hospitals: An updated comprehensive review on a rising antimicrobial resistance. Antibiotics (Basel, Switzerland), 10(1) (2021)
[0262] Rudd et al., Global, regional, and national sepsis incidence and mortality, 1990-2017: Analysis for the Global Burden of Disease Study. Lancet (London, England), 395(10219), 200-11 (2020).
[0263] Rupp & Fey, Extended spectrum beta-lactamase (ESBL)-producing Enterobacteriaceae: Considerations for diagnosis, prevention and drug treatment. Drugs, 63(4), 353-65 (2003).
[0264] Salah et al., Distribution of quinolone resistance gene (qnr) in ESBL-producing Escherichia coli and Klebsiella spp. in Lomé, Togo. Antimicrobial Resistance and Infection Control, 8, 104 (2019).
[0265] Schmidt et al., High genetic barrier to SARS-CoV-2 polyclonal neutralizing antibody escape. Nature (2021).
[0266] Seok, Jeon, & Park, Antimicrobial therapy and antimicrobial stewardship in sepsis. Infection & Chemotherapy, 52(1), 19-30 (2020).
[0267] Sethuraman & Ryo, Interpreting Diagnostic Tests for SARS-CoV-2. JAMA (2020).
[0268] Shankar-Hari et al., Developing a new definition and assessing new clinical criteria for septic shock: For the Third International Consensus Definitions for Sepsis and Septic Shock (Sepsis-3). JAMA, 315(8), 775-87 (2016).
[0269] Shrestha, Tedla, & Bull, Broadly neutralizing antibodies against emerging SARS-CoV-2 variants. Frontiers in Immunology, 12, 752003 (2021).
[0270] Sidstedt et al., Inhibition mechanisms of hemoglobin, immunoglobulin G, and whole blood in digital and real-time PCR. Analytical and Bioanalytical Chemistry, 410(10), 2569-83 (2018).
[0271] Singer et al., The third international consensus definitions for sepsis and septic shock (Sepsis-3). JAMA, 315, 801-810 (February 2016).
[0272] Stark et al., “RNA sequencing: the teenage years.” Nature Reviews Genetics (2019).
[0273] Starr et al., Prospective mapping of viral mutations that escape antibodies used to treat COVID-19. Science, 371, 850-4 (2021).
[0274] Starr et al., SARS-CoV-2 RBD antibodies that maximize breadth and resistance to escape. Nature (2021).
[0275] Sterne-Weiler et al., Efficient and accurate quantitative profiling of alternative splicing patterns of any complexity on a laptop. Molecular Cell, 72(1), 187-200.e6 (2018).
[0276] Strich, Heil, & Masur, Considerations for empiric antimicrobial therapy in sepsis and septic shock in an era of antimicrobial resistance. The Journal of Infectious Diseases, 222(Suppl 2), S119-s31 (2020).
[0277] Suzuki, Horinouchi, & Furusawa, Prediction of antibiotic resistance by gene expression profiles. Nature Communications, 5, 5792 (2014).
[0278] Tada, Tanizawa, & Arita, Visualization of consensus genome structure without using a reference genome. BMC genomics, 18(Suppl 2), 208 (2017).
[0279] Taniguchi et al., Quantifying E. coli proteome and transcriptome with single-molecule sensitivity in single cells. Science (New York, NY), 329(5991), 533-8 (2010).
[0280] Tchesnokova et al., Pandemic fluoroquinolone resistant Escherichia coli clone ST1193 emerged via simultaneous homologous recombinations in 11 gene loci. Proceedings of the National Academy of Sciences of the United States of America, 116(29), 14740-8 (2019).
[0281] Teixeira et al., Aminoglycoside resistance genes in Pseudomonas aeruginosa Isolates from Cumana, Venezuela. Revista do Instituto de Medicina Tropical de Sao Paulo, 58, 13 (2016).
[0282] Terrier et al., Serum biomarker signature identifies patients with B-cell non-Hodgkin lymphoma associated with cryoglobulinemia vasculitis in chronic HCV infection. Autoimmunity Reviews, 13, 319-26 (2014).
[0283] Teshome et al., Duration of exposure to antipseudomonal β-lactam antibiotics in the critically ill and development of new resistance. Pharmacotherapy, 39(3), 261-70 (2019).
[0284] Tindal et al., Emerging therapeutic targets for sepsis, Expert Opinion on Therapeutic Targets, 25(3), 175-189 (Mar. 4, 2021.)
[0285] Tristram, Jacobs, & Appelbaum, Antimicrobial resistance in Haemophilus influenzae. Clinical Microbiology Reviews, 20(2), 368-89 (2007).
[0286] Vaduganathan et al., Renin-angiotensin-aldosterone system inhibitors in patients with Covid-19. The New England Journal of Medicine, 382, 1653-9 (2020).
[0287] Vazquez-Guillamet et al., Using the number needed to treat to assess appropriate antimicrobial therapy as a determinant of outcome in severe sepsis and septic shock. Critical Care Medicine, 42(11), 2342-9 (2014).
[0288] Wang et al., Pseudomonas aeruginosa detection using conventional PCR and quantitative real-time PCR Based on species-specific novel gene targets identified by pangenome analysis. Frontiers in Microbiology, 13, 820431 (2022).
[0289] Webb et al., Broad-spectrum antibiotic use and poor outcomes in community-onset pneumonia: a cohort study. The European Respiratory Journal, 54(1) (2019).
[0290] Weinreich et al., REGN-COV2, a neutralizing antibody cocktail, in outpatients with Covid-19. New England Journal of Medicine, 384, 238-51 (2020).
[0291] Whole-genome sequencing as part of national and international surveillance programmes for antimicrobial resistance: A roadmap. BMJ Global Health, 5(11) (2020).
[0292] Willyard, How antiviral pill molnupiravir shot ahead in the COVID drug hunt. Nature (2021).
[0293] Wood, Lu, & Langmead, Improved metagenomic analysis with Kraken2. Genome Biology, 20(1), 257 (2019).
[0294] Yahav et al., Immunosuppression reduction when administering a booster dose of the BNT162b2 mRNA SARS-CoV-2 vaccine in kidney transplant recipients without adequate humoral response following two vaccine doses: Protocol for a randomised controlled trial (BECAME study). BMJ Open, 11, e055611 (2021).
[0295] Yan, Chang, & Wang, Laboratory testing of SARS-CoV, MERS-CoV, and SARS-CoV-2 (2019-nCOV): Current status, challenges, and countermeasures. Reviews in Medical Virology, 30(3), e2106 (2020).
[0296] Yang et al., Prevalence and fluoroquinolone resistance of Pseudomonas aeruginosa in a hospital of South China. International Journal of Clinical and Experimental Medicine, 8(1), 1386-90 (2015).
[0297] Yu et al., Low prevalence of bloodstream infection and high blood culture contamination rates in patients with COVID-19. PLOS One, 15(11), e0242533 (2020).
[0298] Zhang, Yang, & Makam, Utility of blood cultures in pneumonia. The American Journal of Medicine, 132(10), 1233-8 (2019).

### Textbooks and Technical References

[0299] Current Protocols in Immunology (CPI) (2003). John E. Coligan, ADA M Kruisbeek, David H Margulies, Ethan M Shevach, Warren Strobe, (eds.) John Wiley and Sons, Inc. (ISBN 0471142735, 9780471142737).
[0300] Current Protocols in Molecular Biology (CPMB), (2014). Frederick M. Ausubel (ed.), John Wiley and Sons (ISBN 047150338X, 9780471503385).
[0301] Current Protocols in Protein Science (CPPS), (2005). John E. Coligan (ed.), John Wiley and Sons, Inc.
[0302] Immunology (2006). Werner Luttmann, published by Elsevier.
[0303] Janeway's Immunobiology, (2014). Kenneth Murphy, Allan Mowat, Casey Weaver (eds.), Taylor & Francis Limited, (ISBN 0815345305, 9780815345305).
[0304] Laboratory Methods in Enzymology: DNA, (2013). Jon Lorsch (ed.) Elsevier (ISBN 0124199542).
[0305] Lewin's Genes XI, (2014). published by Jones & Bartlett Publishers (ISBN-1449659055).
[0306] Molecular Biology and Biotechnology: a Comprehensive Desk Reference, (1995). Robert A. Meyers (ed.), published by VCH Publishers, Inc. (ISBN 1-56081-569-8).
[0307] Molecular Cloning: A Laboratory Manual, 4th ed., Michael Richard Green and Joseph Sambrook, (2012). Cold Spring Harbor Laboratory Press, Cold Spring Harbor, N.Y., USA (ISBN 1936113414).
[0308] Pharmaceutical Sciences 23^{rd} edition (Elsevier, 2020).
[0309] The Encyclopedia of Molecular Cell Biology and Molecular Medicine, Robert S. Porter et al., (eds.), published by Blackwell Science Ltd., 1999-2012 (ISBN 9783527600908).
[0310] The Merck Manual of Diagnosis and Therapy, 19^{th} edition (Merck Sharp & Dohme Corp., 2018).

[0311] All patents and publications cited throughout this specification are expressly incorporated by reference to disclose and describe the materials and methods that might be used with the technologies described in this specification. The publications discussed are provided solely for their disclosure before the filing date. They should not be construed as an admission that the inventors may not antedate such disclosure under prior invention or for any other reason. If there is an apparent discrepancy between a previous patent or publication and the description provided in this specification, the present specification (including any definitions) and claims shall control. All statements as to the date or representation as to the contents of these documents are based on the information available to the applicants and constitute no admission as to the correctness of the dates or contents of these documents. The dates of publication provided in this specification may differ from the actual publication dates. If there is an apparent discrepancy between a publication date provided in this specification and the actual publication date supplied by the publisher, the actual publication date shall control.

TABLE A1
Antibodies to COVID-19

| Antibody | PDB | CDRL3 | SEQ ID NO |
|---|---|---|---|
| Class 1 | | | |
| C102 | 7K8N | CQQYGSSPR | 54 |
| C105 | 6XCM | CSSYEGSNNFV | 55 |
| B38 | 7BZ5 | CQQLNSYPPY | 56 |
| CC12.3 | 6XC7 | CQQYYSTPY | 57 |

Class 2

| | | | |
|---|---|---|---|
| C002 | 7K8O | CQQSYSTPR | 58 |
| C104 | 7K8U | CQQYGTTPR | 59 |
| C119 | 7K8W | CSSYTSSSTSV | 60 |
| C121 | 7K8X | CCSYAGSSTL | 61 |
| C144 | 7K90 | CSSYTSSSTR | 62 |
| COVA2-39 | 7JMP | CCSYAGSSTW | 63 |
| P2B-2F6 | 7BWJ | CSSYAGSNNL | 64 |
| Ab2-4 | 6XEY | CSSYAGSNNL | 65 |

Class 3

| | | | |
|---|---|---|---|
| BD23 | 7BYR | CQQYNSYPY | 66 |
| C135 | 7K8R | CQQYNSYPW | 67 |
| S309 | 6WPS | CQQHDTSL | 68 |
| C110 | 7K8P | CQQYNSYPY | 69 |
| REGN10987 | 6XDG | CQQYDNLPL | 70 |

Class 4

| | | | |
|---|---|---|---|
| CR3022 | 6W41 | CQQYYSTPY | 71 |
| EY6A | 6ZDH | CQQSYSTLAL | 72 |
| S304 | 7JW0 | CQQSYVSPTY | 73 |
| S2A4 | 7JVC | CQSYDSSNHVV | 74 |

Lengthy table referenced here
US20250034234A1-20250130-T00001
Please refer to the end of the specification for access instructions.

Lengthy table referenced here
US20250034234A1-20250130-T00002
Please refer to the end of the specification for access instructions.

TABLE A4
CDR3 Alignements Exclusive to Survivors Day 0

| | Cluster | CDR3 | | | |
|---|---|---|---|---|---|
| Alignment | Counts | Counts | Class | ID | SEQ ID NO |
| CQQYNNYWAF | 43 | 75616 | C3 | C135 | 2 |
| CQQYNNWPPLTF | 52 | 60021 | C3 | REGN10987 | 3 |
| CQQYDNHF | 42 | 48510 | C3 | REGN10987 | 4 |
| CQQYNRYWTF | 26 | 44085 | C3 | C135 | 5 |
| CQQYNNWPPLFTF | 31 | 36103 | C3 | REGN10987 | 6 |
| CQQYNNWPPGFTF | 35 | 35532 | C3 | REGN10987 | 7 |
| CQQLNSYPGGTF | 26 | 35395 | C1 | B38 | 8 |
| CQQYDSYPWTF | 26 | 34909 | C3 | C135 | 9 |
| CQQYNSYSRTF | 32 | 34521 | C3 | C135 | 10 |
| CQQYGSFF | 25 | 33616 | C1 | C102 | 11 |
| CQQYDKWPFF | 25 | 30823 | C4 | S2A4 | 12 |
| CMQALQTPLTF | 18 | 26607 | C2 | C002 | 13 |
| CMQALQTPRTF | 17 | 26599 | C2 | C104 | 14 |
| CQQRSNWPPLTF | 39 | 20622 | C3 | REGN10987 | 15 |
| CHQYNNW | 30 | 19583 | C3 | REGN10987 | 16 |
| CQQFNTWPPE | 17 | 19345 | C1 | B38 | 17 |
| CQQYQTWPPLF | 28 | 17810 | C1 | B38 | 18 |
| CQQFNNWPPGFSF | 17 | 16145 | C1 | B38 | 19 |
| CQSVDSSGIYI | 27 | 15458 | C4 | S2A4 | 32 |
| CQSADSSGTYPDVVF | 33 | 15132 | C4 | S2A4 | 33 |
| CQQYNTYSQHTF | 31 | 13179 | C2 | C104 | 20 |
| CQSYDSSPLF | 49 | 12495 | C4 | S2A4 | 21 |
| CQAWDSST--HVVF | 20 | 10805 | C4 | S2A4 | 24238 |
| CQSTDSSGTFW | 36 | 9902 | C4 | S2A4 | 69507 |
| CQQYNTNSPYNF | 15 | 9606 | C3 | C135 | 4864 |
| CQSYDSSLSGVVF | 31 | 7143 | C4 | S2A4 | 1241 |
| CNSRDSSGNLPF | 27 | 6435 | C4 | S2A4 | 2568 |
| CNSRDSSGNHLVF | 18 | 6320 | C4 | S2A4 | 10139 |
| CQSTDSSGSWLF | 20 | 5327 | C4 | S2A4 | 2855 |
| CQVWDSSSDHVVF | 23 | 4745 | C4 | S2A4 | 2300 |
| CCSYAGSYTF | 16 | 4197 | C2 | COVA2-39 | 6244 |
| CMQGTHWPPYTF | 15 | 4104 | C1 | B38 | 4772 |
| CRQYNNWPRGAF | 21 | 3674 | C3 | REGN10987 | 2745 |
| CQTSDSSGFYPELF | 17 | 3514 | C4 | S2A4 | 5347 |
| IAYYDSSGHYRDYW | 113 | 2298 | C4 | S2A4 | 69508 |
| CQYYDNVP | 14 | 2108 | C3 | REGN10987 | 69509 |
| CHQRGNWPF | 20 | 1839 | C3 | REGN10987 | 2970 |
| CQQRGHWPPNSF | 20 | 1619 | C1 | B38 | 4186 |
| CQQRTTWPPNPF | 20 | 1506 | C1 | B38 | 2518 |
| CQQRSKWPPECSF | 14 | 1368 | C1 | B38 | 18448 |
| CQQRSPWPPMCRF | 10 | 1311 | C1 | B38 | 9961 |
| CQTWGTGIHVVF | 9 | 878 | C2 | C104 | 26483 |
| CQQRANWP | 18 | 861 | C3 | REGN10987 | 69510 |
| CSSYAGSYNVAF | 14 | 785 | C2 | COVA2-39 | 965 |
| CQVWDSSSDHPYYVF | 16 | 636 | C4 | S2A4 | 27034 |
| CQVWDSDSDHAIF | 17 | 629 | C4 | S2A4 | 4828 |
| CQVWDSKSAHGGVF | 13 | 620 | C4 | S2A4 | 11277 |
| CQVWDSRSDHSAWVF | 12 | 597 | C4 | S2A4 | 27802 |
| CQQANSFPRITF | 17 | 536 | C3 | C135 | 4932 |
| ITEWFDPW | 1549 | 336 | None | | 69511 |
| AREYYYYYMDVW | 7648 | 240 | None | | 69512 |
| ARGSYYFDYW | 2343 | 223 | None | | 69513 |
| FGGNPDAFDIW | 1396 | 215 | None | | 69514 |
| ATPYYFDYW | 1296 | 195 | None | | 69515 |
| TINDALDIW | 1138 | 178 | None | | 69516 |
| CTNFDYYYYMDVW | 1575 | 176 | None | | 24550 |
| YGSGSPDAFDIW | 885 | 170 | None | | 69517 |
| CATLGAYYYYYMDVW | 855 | 169 | None | | 26309 |
| CYSSGYYYYYYMDVW | 1611 | 168 | None | | 843 |
| TYYYDSSGYYRGGFDYW | 6743 | 163 | None | | 69518 |
| CAAYHYYPYGMDVW | 724 | 159 | None | | 26995 |
| CAVFTYYYDSSGYYFDYW | 3414 | 153 | None | | 25469 |
| SYDSSGYYLDFDYW | 2389 | 152 | None | | 69519 |
| ASLNDDAFDIW | 620 | 147 | None | | 69520 |
| VPKDSSGYFLFDYW | 2413 | 142 | None | | 69521 |
| SNNYYYYMDVW | 1405 | 141 | None | | 69522 |
| CAS-GYYYDSSGYGIFDYW | 2273 | 135 | None | | 3556 |
| CVKDGGYYYYYMDVW | 7125 | 134 | None | | 9712 |
| CARDS--YYYDSSGYFDYW | 3028 | 132 | None | | 4138 |
| ARKPYYYYYMDVW | 878 | 122 | None | | 69523 |
| ESHKSDAFDIW | 634 | 121 | None | | 69524 |
| YDSSGYHDYW | 2094 | 117 | None | | 69525 |
| CAHIDSSGYYEFDYW | 750 | 116 | None | | 27703 |
| CGRDYYDSSGYYTQY | 2313 | 114 | None | | 69526 |
| GILTGYYTYFDYW | 833 | 112 | None | | 69527 |
| CARENYYDSSGYFRS | 988 | 112 | None | | 69528 |
| CARGPSYYDSSGYPADYW | 2025 | 110 | None | | 2294 |
| SSGYYYGDYW | 696 | 107 | None | | 69529 |
| APYDYDSSGYIPDYW | 2100 | 104 | None | | 69530 |
| CTRDYYDSSGYYYGFDYW | 2443 | 102 | None | | 2368 |
| CASSYYYDSSGQPDYW | 511 | 101 | None | | 3503 |
| CARDDHYYDSSGYDYW | 2191 | 101 | None | | 5240 |
| IYYYDSSGYYWNYW | 2378 | 99 | None | | 69531 |
| CASSYYDSSGYLPVDYW | 2091 | 98 | None | | 24443 |
| TSGLPDPFDIW | 607 | 98 | None | | 69532 |
| CAT-INYYDSSGYYFPFDYW | 2170 | 96 | None | | 26941 |
| CAKIGDFYYYYMDVW | 352 | 96 | None | | 7368 |
| CARDMDYYDSSGYYQDYW | 667 | 96 | None | | 2635 |
| CARDYYDSSGYSRPFDYW | 624 | 96 | None | | 11177 |
| SSSWYGYYFDYW | 1239 | 96 | None | | 69533 |
| AKATPRYYYYGMDVW | 463 | 96 | None | | 69534 |
| CATFP-HYYDSSGYYPFDYW | 2167 | 96 | None | | 1316 |
| CTTRLDYYDSSGYYKPFDYW | 2062 | 95 | None | | 720 |
| CASSGLYYYDSSGYSDYW | 651 | 94 | None | | 369 |
| CARMRAYYYDSSGYNDYW | 2072 | 94 | None | | 394 |
| CASLGYYYDSSGYNQFDYW | 2243 | 94 | None | | 11105 |
| CATIPL-YYYDSSGYSRRFDYW | 583 | 93 | None | | 25518 |
| CARDYYYDSSGLLDYW | 699 | 93 | None | | 24107 |
| ASTTGAYYYYGMDVW | 508 | 93 | None | | 69535 |
| CARGKDYDFWSGYYPIY | 542 | 93 | None | | 69536 |
| CATFPVHYYDSSGYYPFDYW | 559 | 93 | None | | 25397 |
| CARGYYDFWSGLDYW | 394 | 92 | None | | 1648 |
| CAMGDLWFDPW | 366 | 92 | None | | 9602 |
| ARLYDSSGYLDYW | 536 | 90 | None | | 69537 |
| YDSSGYYYLDYW | 3133 | 90 | None | | 69538 |
| GPYYYDSSGYFDYW | 454 | 89 | None | | 69539 |
| CASGSSDNWFDPW | 521 | 89 | None | | 2975 |
| CAHSYYDFWSGYYDYW | 785 | 89 | None | | 5100 |
| CARLIGYYDSSGYYWFDYW | 2139 | 88 | None | | 27148 |
| IAARPYYFDYW | 1212 | 88 | None | | 69540 |
| CANGDYYDSSGAPDYW | 538 | 88 | None | | 11683 |
| CARRGYDSSGY--DAFDIW | 381 | 87 | None | | 11324 |
| CAR---VYSSGWYDDYW | 703 | 87 | None | | 23601 |
| ACYYESSGYRLDYW | 2126 | 86 | None | | 69541 |
| CARDYYDSSGYYNWFDPW | 557 | 85 | None | | 27391 |
| CAR--VGDSDAFDIW | 676 | 85 | None | | 25178 |
| CAGSYSYYDSSGYELPFDYW | 2002 | 85 | None | | 4610 |
| CARQRNYYYDSSGYYLDYW | 675 | 84 | None | | 23901 |
| CSRA--GYYRFDYW | 652 | 84 | None | | 7252 |
| CASSYSYDSSGYY---DYFDYW | 680 | 83 | None | | 761 |
| CAR--GDDFWSGYYDYW | 465 | 83 | None | | 5980 |
| AGPYYYFDIW | 494 | 83 | None | | 69542 |
| CASGFYDSSGYYYGYW | 883 | 82 | None | | 2509 |
| CARGYSIDYW | 2618 | 82 | None | | 24435 |
| CASHIADYYYYGMDVW | 288 | 81 | None | | 2769 |
| ATYYNYDAFDIW | 512 | 81 | None | | 69543 |
| CARVVQDYYDSSGYEDYW | 2089 | 81 | None | | 5193 |
| CARI---VAGYYFDYW | 525 | 81 | None | | 9799 |
| GYSSSSSYFDYW | 2740 | 81 | None | | 69544 |
| ASLSGWYVDYW | 921 | 80 | None | | 69545 |
| YGDYDDAFDIW | 399 | 80 | None | | 69546 |
| CARQAPGYYDSSGYYYVYW | 355 | 80 | None | | 26686 |
| CAHTLTYYYDSSGYYSFDYW | 512 | 80 | None | | 27954 |
| CARDATYYDSSGYYDAFDIW | 2266 | 80 | None | | 23537 |
| CARGS--GNYYFDYW | 1552 | 78 | None | | 27736 |
| CARDDTYYYDSSGYFFDYW | 2040 | 78 | None | | 2429 |
| CARGEFDPW | 1354 | 78 | None | | 2494 |
| CAREGYYYDSSGYSNAFDIW | 519 | 78 | None | | 6711 |
| CAR---FGYYYYYYGMDVW | 537 | 77 | None | | 27728 |
| CARDPGWYYYDSSGLDYW | 1397 | 77 | None | | 244 |
| CAKMGEYYYDSSGYSDYW | 610 | 76 | None | | 3081 |
| CAGYGDYSDYW | 10028 | 76 | None | | 31 |
| CASLTYYYDSSGYSVDYFDYW | 2117 | 76 | None | | 1878 |
| CARDRGTYYYDSSGLDYW | 1395 | 76 | None | | 2410 |
| CAHLVSSGWYGDAFDIW | 372 | 76 | None | | 7328 |
| CAKDGYDFWSGYYNYW | 719 | 75 | None | | 28032 |
| CARDPPYYYDSSGYYGWFDPW | 469 | 74 | None | | 5290 |
| GPNDYW | 514 | 74 | None | | 69547 |
| CARDPYYSSYW | 461 | 74 | None | | 27158 |
| CAGVRGSNNDAFDIW | 383 | 73 | None | | 3784 |
| ASGDSSGSFDYW | 661 | 73 | None | | 69548 |
| CARDSEPYYYDSSGYHDYW | 2069 | 72 | None | | 27586 |
| VVPAAPFYYYYGMDVW | 373 | 72 | None | | 69549 |
| CAREYYYDSSGTFDYW | 1985 | 72 | None | | 2589 |
| CATVYSGSYLDAFDIW | 414 | 72 | None | | 2304 |
| CATGYSSSWYFYW | 1164 | 71 | None | | 25184 |
| WVTTDAFDIW | 412 | 71 | None | | 69550 |
| CAHSSPTYYYAMDVW | 354 | 71 | None | | 24700 |
| CARVNAEYYYDSSGYLDYW | 1967 | 71 | None | | 3364 |
| CAK-RYSSGWYGVDYW | 1253 | 71 | None | | 6606 |
| CAKDRYYYDSSGYTYYFDYW | 571 | 71 | None | | 1429 |
| CATH---DFWSGYTFDYW | 825 | 70 | None | | 940 |
| CAADLRNYYDSSGYADYW | 525 | 70 | None | | 4010 |
| CARDFPYYYDSSGYYFDAFDIW | 488 | 70 | None | | 5353 |
| CARDRDSSGYYLDAFDIW | 351 | 70 | None | | 10426 |
| CARDPYYYDSRGYSGDYW | 592 | 70 | None | | 4314 |
| SGSYLSAFDIW | 401 | 70 | None | | 69551 |
| CTSSSWARFDYW | 1239 | 69 | None | | 24627 |
| ATDIPQDYYYGMDVW | 259 | 69 | None | | 69552 |
| CAKRGGGYYYDSSGYLDYW | 2857 | 69 | None | | 1824 |
| CARDGYDSSGYYNWFDPW | 463 | 69 | None | | 4790 |
| CARDNRYYDSSGYSDAFDIW | 490 | 69 | None | | 4818 |
| NYYGSGSYNDYW | 308 | 69 | None | | 69553 |
| CAKDYYDSSGYSDYAFDIW | 395 | 69 | None | | 27039 |
| AFCSGGSCYNWFDPW | 312 | 69 | None | | 69554 |
| CASGYCSGGSCYPPIDYW | 325 | 68 | None | | 2620 |
| CARD-----NSSPYYYYGMDVW | 365 | 68 | None | | 24985 |
| CAKDLGGYYYYW | 571 | 68 | None | | 1060 |
| CARDLGGYFDYW | 560 | 68 | None | | 7037 |
| CAREYYYDSSGYYDSLFDYW | 456 | 67 | None | | 186 |
| CAKSPG---AYYFDYW | 335 | 67 | None | | 4695 |
| CARLSYYDFWSGTGD | 246 | 67 | None | | 69555 |
| GRCSGGSCYSVDYW | 298 | 67 | None | | 69556 |
| CAKTDSSGYYLLDYW | 337 | 66 | None | | 6377 |
| CAKDSQYYYDSSGYYGADYW | 597 | 66 | None | | 2951 |
| CAR-ESGYYYDSSGYQYYFDYW | 2119 | 66 | None | | 3098 |
| CAHRHGYYDAFDIW | 625 | 66 | None | | 6601 |
| CARD----DSSGYLDAFDIW | 314 | 65 | None | | 3974 |
| CARGFSSSWYWAYW | 581 | 65 | None | | 5189 |
| CARDFCSGGSCYPDYW | 284 | 65 | None | | 5228 |
| CSSTSCQGAFDIW | 255 | 65 | None | | 11210 |
| CARTPGYCSSTSCYTYFDYW | 294 | 65 | None | | 10548 |
| CAHRP--SGWIDAFDIW | 401 | 65 | None | | 326 |
| CAHRGYDSSG--VFDYW | 1952 | 65 | None | | 1354 |
| SSRGYYYGMDVW | 291 | 64 | None | | 69557 |
| CARGVYCSGGSCYSVVDYW | 282 | 64 | None | | 9752 |
| CARVDDSSGYYLDAFDIW | 305 | 64 | None | | 5106 |
| CARVLSYYYDSSGYDHFDYW | 1937 | 64 | None | | 10038 |
| CAKGTYCSGGSCY-IFDYW | 347 | 64 | None | | 6993 |
| IQNFDYW | 527 | 64 | None | | 69558 |
| CARSPYSYDSSGYYFDYW | 1999 | 64 | None | | 1143 |
| CARAKQYYYDSSGYYFGYW | 465 | 64 | None | | 3897 |
| CARRALGYCSGGSCYSA-FDYW | 298 | 63 | None | | 6977 |
| DSVLYYFDYW | 441 | 63 | None | | 69559 |
| SYYDSSGYYLFDYW | 344 | 63 | None | | 69560 |
| QGGYSNAFDIW | 328 | 63 | None | | 69561 |
| CARVNNYDFWSGYYTY | 626 | 63 | None | | 69562 |
| CARDPATYYYDSSGTYFDYW | 1976 | 63 | None | | 412 |
| TALWSYYYYYMDVW | 323 | 63 | None | | 69563 |
| TSRSDSSGPFFDYW | 371 | 63 | None | | 69564 |
| CARVHYYDSSGYPRIDYW | 262 | 62 | None | | 2898 |
| CARGEVDYYDSSGYPHFDYW | 1904 | 62 | None | | 27890 |
| CAKDTYYDSSGVDYW | 394 | 62 | None | | 2856 |
| CAKDSLLYYDSSGYFDYW | 1941 | 62 | None | | 4404 |
| CARYPFLYYDSSGYFDYW | 1814 | 61 | None | | 9745 |
| CARSRTSYYDSSGYFLHW | 611 | 61 | None | | 24265 |
| CARQRLNYYDSSGYYYFDYW | 1989 | 61 | None | | 1445 |
| CARDTPPTYYYDSSGYPDYW | 1341 | 61 | None | | 2682 |
| CARDQRGYYDSSGYFDYW | 1842 | 61 | None | | 6456 |
| AGYYARFDYW | 415 | 61 | None | | 69565 |
| CATLGDYGDYYFDYW | 640 | 61 | None | | 3888 |
| SSYFYYAVDVW | 424 | 60 | None | | 69566 |
| HSSGWNWYFDYW | 379 | 60 | None | | 69567 |
| CARDLRYCSGGSCYSAYFDYW | 295 | 60 | None | | 4082 |
| CARGSAIYYDSSGYFDYW | 1869 | 60 | None | | 25974 |
| CAH-YYDILTGYPLFDYW | 939 | 60 | None | | 1921 |
| CAKDRYSSGWYYFDYW | 1209 | 60 | None | | 6654 |
| GGSSHFDYW | 941 | 59 | None | | 69568 |
| AGIFGRWFDPW | 264 | 59 | None | | 69569 |
| CAR---VYSSGWSDAFDIW | 522 | 59 | None | | 225 |
| CAKE-TYYYDSSGYRLLDYW | 1152 | 59 | None | | 1526 |
| ATYYYDSSGTYWYFDLW | 330 | 59 | None | | 69570 |
| HDSSGYSDYW | 1869 | 58 | None | | 69571 |
| CAKVLYYYDSSGSLDYW | 399 | 58 | None | | 1257 |
| CARFYCSSTSCHFDYW | 332 | 58 | None | | 11478 |
| CATRVTGGVDAFDIW | 305 | 58 | None | | 24921 |
| CATVPRYCSSTSCYSGAFDIW | 301 | 57 | None | | 27426 |
| CARVSQGYYDSSGYHYFDYW | 1899 | 57 | None | | 5033 |
| CARPSRYCSGGSCYPAFDYW | 262 | 57 | None | | 27113 |
| CAKVDFWSGYSPDYW | 305 | 57 | None | | 3882 |
| CAREHPDYYDSSGCNDYW | 266 | 57 | None | | 3402 |
| CARAGGYCSSTSC---FDYW | 282 | 57 | None | | 26790 |
| CARGDPYDFWSGPPDYW | 295 | 57 | None | | 7685 |
| CAR-EYYDSSGYPTIDYW | 264 | 57 | None | | 459 |
| GTFDPW | 1231 | 57 | None | | 69572 |
| CARGLSSSWYDYW | 606 | 57 | None | | 3625 |
| CTRDS--GYNAFDIW | 252 | 57 | None | | 11554 |
| AYDSSGYYGLSDAFDIW | 243 | 56 | None | | 69573 |
| SSGWYPRLDYW | 905 | 56 | None | | 69574 |
| GVYYDSDGYYHAFDIW | 423 | 56 | None | | 69575 |
| CASFVRYCSSTSCYHFDYW | 270 | 56 | None | | 1081 |
| CARDDDYYDSSGYILPFDYW | 385 | 56 | None | | 3872 |
| RLDGDNWFDPW | 229 | 56 | None | | 69576 |
| ATDCSGGSCYSNYW | 249 | 55 | None | | 69577 |
| CASDRSVYYYDSSGYDYW | 351 | 55 | None | | 2164 |
| CAKDPFYDFWSGYYFDYW | 607 | 55 | None | | 1399 |
| CARVDT---YYMDVW | 6598 | 55 | None | | 23569 |
| CAKGLYDFWSGIDYW | 266 | 55 | None | | 3569 |
| CAREGDYYDSSGYYYTGFDYW | 593 | 55 | None | | 957 |
| CARDGIYYYDSSGYYSDAFDIW | 664 | 55 | None | | 27874 |
| CATSP---SSGWLPFDYW | 754 | 55 | None | | 25634 |
| YYYDSSGYQDAFHIW | 325 | 55 | None | | 69578 |
| CAHSGSSGRYFDYW | 798 | 55 | None | | 10706 |
| AREYDFWSGYYTGMDYW | 309 | 54 | None | | 69579 |
| CARQSLGYYDSSGYPPFDYW | 1799 | 54 | None | | 23595 |
| VRQTRSWFDPW | 454 | 54 | None | | 69580 |
| CAKGLYYDSSGYPTFFDYW | 267 | 54 | None | | 27323 |
| CARAS-SKYYDSSGYHPDYW | 1984 | 54 | None | | 26388 |
| ETDYYDSSGYPGFDYW | 307 | 54 | None | | 69581 |
| CARDV-YCSGGSCYSVPFDYW | 249 | 54 | None | | 2533 |
| CARVPLSYYYYHMDVW | 530 | 54 | None | | 24803 |
| ATASAYWYFDLW | 421 | 54 | None | | 69582 |
| CASNYYDSSGLYWGYW | 1973 | 54 | None | | 2237 |
| REQGNYFDYW | 311 | 53 | None | | 69583 |
| CASWSDGEDAFDIW | 215 | 53 | None | | 6876 |
| YDSSGYWGDAFDIW | 190 | 53 | None | | 69584 |
| CAVCYSNSHY-FDYW | 915 | 53 | None | | 1266 |
| CARHV--WEYYYDSSGYYDAFDIW | 308 | 53 | None | | 25502 |
| CARAPNYYDSSGYPLDAFDIW | 237 | 53 | None | | 242 |
| CAGGNGSPNWFDPW | 512 | 53 | None | | 9727 |
| CARH-YYYDSSGYSGAVDYW | 378 | 53 | None | | 1541 |
| CARTFAVYYYDSSGIDYW | 301 | 52 | None | | 4897 |
| CVRETYYYDSSGY--YIDPW | 423 | 52 | None | | 5095 |
| CSGGSCPLFDYW | 277 | 52 | None | | 69585 |
| TRQYYGSFDYW | 293 | 51 | None | | 69586 |
| CARLPRYYDSSGWYFDYW | 1872 | 51 | None | | 3165 |
| CARDLGYCSGGNCYSPDYW | 248 | 51 | None | | 27361 |
| CAKYYDFWSGYP-WFDPW | 264 | 51 | None | | 4387 |
| CARVHILYYDSSGYFAYW | 1876 | 51 | None | | 26433 |
| CARRRNYYDSSGYPLDAFDIW | 219 | 51 | None | | 27049 |
| CATWGYSSGWYNNWFDPW | 477 | 51 | None | | 526 |
| CARDSGSSWYFDLW | 252 | 50 | None | | 24524 |
| TTVRAWYYFDYW | 828 | 50 | None | | 69587 |
| CAVIIAVAGTD-FDYW | 289 | 50 | None | | 1831 |
| CASGANYYDSSGYYRLLDYW | 259 | 50 | None | | 25852 |
| CARDPLSGVYYYYYGMDVW | 485 | 50 | None | | 27491 |
| MVITPYYFDYW | 374 | 50 | None | | 69588 |
| CARHQYYYDRSGYYPDYW | 516 | 50 | None | | 10607 |
| CAKLS-GSYHNFDYW | 347 | 50 | None | | 3847 |
| CATSPGGYSSGWYYFDYW | 319 | 49 | None | | 294 |
| CAKDSAYCSGGSCY-GFDYW | 219 | 49 | None | | 26893 |
| CARGLPRYYDFWSGYSA | 242 | 49 | None | | 69589 |
| CAREDCSGGSCYFDYW | 656 | 49 | None | | 24365 |
| CAKFSDCSGGSCYSRL-DYW | 226 | 49 | None | | 25526 |
| CARAGYCSGGSCNYYFDYW | 794 | 49 | None | | 9599 |
| ARLPSGRYNWFDPW | 200 | 49 | None | | 69590 |
| CASAGSGSYQ-DYW | 524 | 49 | None | | 78 |
| CAHQASSGWYGYYFDYW | 566 | 48 | None | | 7387 |
| CARRYCSGGSCSLDYW | 196 | 48 | None | | 10397 |
| CARGDILTGYYPFDYW | 972 | 48 | None | | 3382 |
| CARGYTSGWYDFDYW | 415 | 48 | None | | 4755 |
| CAKLSSWYTPFDYW | 201 | 48 | None | | 1837 |
| CATGPNYYDSSGYPNWFDPW | 224 | 47 | None | | 3929 |
| CATIAAAGPDYYYYYGMDVW | 267 | 47 | None | | 2097 |
| CARFSWQMDAFDIW | 203 | 47 | None | | 5118 |
| CARDRGTYDSSGYYY-LDYW | 297 | 47 | None | | 24840 |
| CARDYSSGWYLAFDIW | 319 | 47 | None | | 26629 |
| CAKDPTGYYYDSSGYYYDYW | 460 | 47 | None | | 3990 |
| CARLGSGFQDAFDIW | 270 | 46 | None | | 28008 |
| AGSSDYW | 341 | 46 | None | | 69591 |
| CARDPVTGY-YYYYMDVW | 359 | 46 | None | | 10113 |
| KAAGPYNWFDPW | 187 | 46 | None | | 69592 |
| CARRAPYYYDSSGPYAFDIW | 241 | 46 | None | | 5218 |
| CARDYHDFWSGYHT---DYW | 356 | 46 | None | | 26710 |
| CARDPPYDSSGYYGYYFDYW | 417 | 46 | None | | 1228 |
| CARDEWDYYYYYGMDVW | 208 | 46 | None | | 7035 |
| CAKAGYRCSGGSCYSYYFDYW | 211 | 46 | None | | 2272 |
| CVKVSPGYYDSSGY-YYDYW | 372 | 46 | None | | 10948 |
| CARDDYG--GNYYYYGMDVW | 389 | 46 | None | | 24908 |
| ANSGNHFDYW | 327 | 46 | None | | 69593 |
| TTGYYLGAFDIW | 192 | 45 | None | | 69594 |
| CARDFDDYDSSGYYGAFDIW | 279 | 45 | None | | 2090 |
| CARHSYYDSSGYPLFYFDYW | 287 | 45 | None | | 119 |
| AKGQEPYYYYTMDVW | 197 | 45 | None | | 69595 |
| CAATYYDILTGYL---DYW | 711 | 45 | None | | 6467 |
| CAKDKLYYYYDSSGYYDYW | 355 | 45 | None | | 6706 |
| CAHGGSYSNYYFDYW | 199 | 45 | None | | 25690 |
| CAAYGDEGGYFDYW | 394 | 45 | None | | 6782 |
| CARDPAYYYDSSG---SDAFDIW | 254 | 45 | None | | 1466 |
| CARNSEGNWFDPW | 367 | 45 | None | | 24789 |
| GITLHYFDYW | 184 | 44 | None | | 69596 |
| TTDVGYGWFDPW | 175 | 44 | None | | 69597 |
| CARDLGYSSGWPFDYW | 414 | 44 | None | | 24873 |
| CAMSTGYYWTFDYW | 357 | 44 | None | | 6875 |
| TTVYSSSWYWYFDLW | 338 | 44 | None | | 69598 |
| CARDYYDSSGYSDGMDVW | 344 | 44 | None | | 7374 |
| SIGGNPPYYYYYMDVW | 281 | 44 | None | | 69599 |
| CARRSYGQYYFDYW | 1564 | 44 | None | | 2835 |
| CAKDIYGSGSYPDVW | 468 | 44 | None | | 4274 |
| CARVVDYDFWSGYAYYFDYW | 565 | 43 | None | | 11446 |
| CARHE-VYDSSGYYFLDYW | 225 | 43 | None | | 27517 |
| CALPIWISFLMCCWIQFASILLRIFALMFIKDIGLKFS | 106 | 43 | None | | 69600 |
| FCVVSLPGF | | | | | |
| CAKGTGYSSGWFDYW | 384 | 43 | None | | 10137 |
| CSSDLFLMCCWICFASILLRILASMFIKDIGLKFSFLV | 106 | 43 | None | | 69601 |
| VSLPGF | | | | | |
| CAGYGDYIEYYFDYW | 570 | 43 | None | | 25205 |
| CAHSDSSGYSYYYYYGMDVW | 218 | 43 | None | | 27645 |
| CARGPDTSGYYY | 501 | 43 | None | | 69602 |
| SWGPRDAFDVW | 151 | 43 | None | | 69603 |
| CARSYSSGWYVGYYFDYW | 246 | 43 | None | | 5069 |
| AGFRDYYDSSGDAFDIW | 175 | 43 | None | | 69604 |
| ISFLKCCWIRFASILLRIFTSMFIRDIGLKFSFFVVSL | 106 | 43 | None | | 69605 |
| PGF | | | | | |
| CATVPREYYYDSSGYYKPFDYW | 283 | 43 | None | | 26367 |
| SGSYSPLDYW | 182 | 43 | None | | 69606 |
| CALPIWISFLICCWIWFASILVRIFASMFIKDIGLKFS | 106 | 43 | None | | 69607 |
| FFVLCLPGF | | | | | |
| CAKDEDCSGGSCYSGAFDIW | 227 | 43 | None | | 1025 |
| CALPIWWISFLMCCWIQFASILLRIFASMFIKDIGLKF | 106 | 43 | None | | 69608 |
| SFFVVSLPGF | | | | | |
| CARGAYCSGGTCYRPFDYW | 189 | 43 | None | | 11244 |
| CAKLGSYYDFWSGYYSQFDYW | 636 | 42 | None | | 1514 |
| CATGWTYYYDSSGYFQHW | 1353 | 42 | None | | 26459 |
| CAR--IPYYGSGSYEDYW | 293 | 42 | None | | 9768 |
| CALPICFLMCCWIQLASILLRIFTSMFIRDIGLKFSFF | 103 | 42 | None | | 69609 |
| VVSLPGF | | | | | |
| CARVRFEDYYYYGMDVW | 236 | 42 | None | | 2967 |
| CARGGDYDFWSGSFDYW | 309 | 42 | None | | 11117 |
| CSSDLLLTCCWIWFASILLRIFASMFIRDIGLKFSFSV | 104 | 42 | None | | 69610 |
| VFLAGF | | | | | |
| CARDSTYYDSSGYIKAFDIW | 319 | 42 | None | | 10813 |
| CALPIWISFLMCCWIWFASILWRIFASMFITDVGLKFS | 102 | 41 | None | | 69611 |
| FFVVSLPGF | | | | | |
| CAHRIY-DSGGYYDYYFDYW | 411 | 41 | None | | 3545 |
| CARIGD-DFWSGYPYYFDYW | 640 | 41 | None | | 265 |
| FLMCCWIQFASILLMIFTSMFIRDIGLKFSFFVVSLSG | 102 | 41 | None | | 69612 |
| F | | | | | |
| CALPILDKLLTCCWIWFASILLRIFASMFIRDIGLKFS | 102 | 41 | None | | 69613 |
| FSVVFLAGF | | | | | |
| CALPIFLMCCWIQFASILLRIFASMFIRDIRLKFSFF | 101 | 41 | None | | 69614 |
| VVSLPGF | | | | | |
| CAR-VVPYYDFWSGSPFDYW | 256 | 41 | None | | 25454 |
| CASLYSSGGRLDYW | 4350 | 41 | None | | 26919 |
| CSSDLLLTCCWIWFASILLRIFASMFIGDIGLKFSFSV | 102 | 41 | None | | 69615 |
| VFLAGF | | | | | |
| CALPIWISFLMCCWIWFASVLLKIFASMFIRDIGLKFSF | 102 | 41 | None | | 69616 |
| FVVSLPGF | | | | | |
| CALPI-LSFLMCCWIWFASISFRIFALMFIRDIGLKFS | 99 | 40 | None | | 69617 |
| FFILSLPGF | | | | | |
| CALPICFLMCCWIWFASILWKIFASMFITDVGLKFSF | 100 | 40 | None | | 69618 |
| FVVSLPGF | | | | | |
| NPPGDYW | 338 | 40 | None | | 69619 |
| HCSSTSCYDAFDIW | 191 | 40 | None | | 69620 |
| CASEIPGEYYFDYW | 754 | 40 | None | | 24345 |
| CALPIWISFLMCCWIWFASISFRIFALMFIRDIGLKFS | 99 | 40 | None | | 69621 |
| FFILSLPGF | | | | | |
| CALPIWISFLMYCWICFASILLRIFALMFIRDIGLKFS | 99 | 40 | None | | 69622 |
| FFVVSLPGF | | | | | |
| CALPIWISFLMCCWTQFASILLRIFASMFIRDIGLKFS | 99 | 40 | None | | 69623 |
| VFVVSLPGF | | | | | |
| CALPI--CFLMYCWICFASILLRIFALMFIRDIGLKFS | 99 | 40 | None | | 69624 |
| FFVVSLPGF | | | | | |
| CAR--YYYDILTGYLHFDYW | 337 | 40 | None | | 5017 |
| CALPIFLMCLSIQFASILLRIFTSMFIRDIGLKFSFFV | 99 | 40 | None | | 69625 |
| VSLPGF | | | | | |
| TVGAGYNAFDIW | 122 | 40 | None | | 69626 |
| CARGTSSGWYFGYW | 420 | 40 | None | | 10936 |
| CALPIWISFSMCYWIRFASILLRIFASMFFRDIGLKFS | 99 | 40 | None | | 69627 |
| FFVVSLPGF | | | | | |
| CARD--YDSSGYYRFFAFDIW | 254 | 39 | None | | 2086 |
| CAKGRCSGGSCYWIDSW | 141 | 39 | None | | 10099 |
| ASRGLYYYDSSGYYFDYW | 306 | 39 | None | | 69628 |
| CALPI-FLMCCWIWFASILWKIFASMFITDVGLKFSF | 97 | 39 | None | | 69629 |
| FVVSLPGF | | | | | |
| AAQLLFYFDYW | 239 | 39 | None | | 69630 |
| CALPI--CFLTCCWIWFASILLRIFASMFIRDIRLKLS | 98 | 39 | None | | 69631 |
| FFVVTLPGF | | | | | |
| CARLDDYDSSGYFVDYW | 241 | 39 | None | | 25970 |
| CARDNRYDSSGLDYW | 549 | 39 | None | | 2457 |
| CAKLPDYYDSSGYPGDGFDIW | 267 | 39 | None | | 4470 |
| REYYWNYW | 233 | 39 | None | | 69632 |
| CARGDYAGYYYYMDVW | 268 | 39 | None | | 1865 |
| ARSYYYDSSGPFDYW | 210 | 39 | None | | 69633 |
| CAKDGELYYDSSGYFNFDPW | 365 | 39 | None | | 3541 |
| CAKDIIAVAGPFDYW | 222 | 39 | None | | 2748 |
| CALPICFLMCCWIQSASILLRIFTLMFIRGIGLTFSF | 97 | 39 | None | | 69634 |
| FVVSLPGF | | | | | |
| CAKDGRSSGWPYYFDYW | 749 | 39 | None | | 11273 |
| CSGGSCYGRPFDYW | 170 | 39 | None | | 69635 |
| CAKAYGG----YHFDYW | 646 | 39 | None | | 11279 |
| CARGGHSSGYYFDYW | 872 | 39 | None | | 27619 |
| CASLYYYDSSRLPFDYW | 179 | 38 | None | | 4516 |
| CARDLPIYCSGGSCY--VDYW | 122 | 38 | None | | 6483 |
| CAHRSGYSSGWYNWFDPW | 191 | 38 | None | | 6754 |
| CARG---YQGFDAFDIW | 326 | 38 | None | | 2345 |
| SPGGYYYDSSGYPIDYFDYW | 406 | 38 | None | | 69636 |
| CSSDLSFLMCCWIRFASIL-RIFASMFSKDIGLKFSFL | 93 | 38 | None | | 69637 |
| VVSLPGF | | | | | |
| CARGHSSGRYNWFDPW | 240 | 38 | None | | 11403 |
| CAKGIAVAGTCDYW | 243 | 38 | None | | 4947 |
| RYCSGGSCYRPW-AFDIW | 156 | 38 | None | | 69638 |
| CARDGGTYDSSGYYYGLDYW | 507 | 38 | None | | 10755 |
| CARDAALYYYDSSGYH-WFDPW | 264 | 37 | None | | 16529 |
| CARQGSDYYDSSG--DYW | 244 | 37 | None | | 1652 |
| CAKEGGYQDAFDIW | 197 | 37 | None | | 24178 |
| CATPMGPYYYDSSGYGADAFDIW | 273 | 37 | None | | 25750 |
| CARIYYGTNAFDIW | 216 | 37 | None | | 24787 |
| CARDTHYYDNSGYYYPRFGYW | 497 | 37 | None | | 5256 |
| GASTNNWFDPW | 269 | 37 | None | | 69639 |
| CAAWWELQDAFDIW | 135 | 37 | None | | 4630 |
| CAKAARGYCSGGSCYFGY | 147 | 37 | None | | 69640 |
| PSSGWTLYYFDYW | 155 | 37 | None | | 69641 |
| CARRGYCSGGSCYVPFEYW | 128 | 37 | None | | 4359 |
| CAKDHYYDSSGYPSPFDPW | 227 | 37 | None | | 1150 |
| CVKDRGSYHYYYYMDVW | 166 | 37 | None | | 5340 |
| CARGR-QYCSGGSCYDAFDIW | 129 | 36 | None | | 27268 |
| CARSSSSWSGYYYYGMDVW | 138 | 36 | None | | 28014 |
| CARDESSGY | 168 | 36 | None | | 69642 |
| CAYDYGGNLFDYW | 183 | 36 | None | | 6507 |
| CARDIERITIFGV--VDYW | 235 | 36 | None | | 27717 |
| ASYWNYNFDYW | 240 | 36 | None | | 69643 |
| CARRGAHFYDSSGYYPFDYW | 1715 | 36 | None | | 11026 |
| CARDAAFYYFD | 294 | 36 | None | | 69644 |
| CARVLASGYFDYW | 315 | 35 | None | | 27914 |
| CAKDISSGWYVHYFDYW | 185 | 35 | None | | 3885 |
| CARDSIAVAGTNYYYGMDVW | 145 | 35 | None | | 26162 |
| CARDRGSSSGYYYYMDVW | 189 | 35 | None | | 11459 |
| CAKDR---YDSSGYILLDAFDIW | 175 | 35 | None | | 24408 |
| CATDRG-SSGWPFDYW | 290 | 35 | None | | 4027 |
| AQTNYYYYYYMDVW | 395 | 35 | None | | 69645 |
| CAVSTIFGVVTWFDPW | 282 | 35 | None | | 2423 |
| CAKVDSYYDFWSGPD | 204 | 35 | None | | 69646 |
| CASERGYDFWSG--SPFDYW | 241 | 35 | None | | 27394 |
| CARVRDQYYYDSSG-PFDIW | 206 | 35 | None | | 6557 |
| CAREVYLYYDSSGPIDYW | 177 | 35 | None | | 3340 |
| SSTSCYVGWFDPW | 133 | 34 | None | | 69647 |
| CASIAAAGAPTYYYYGMDVW | 267 | 34 | None | | 25406 |
| CAKVFIAVAGYFDYW | 168 | 34 | None | | 2585 |
| IAAAGTTP-FDYW | 187 | 34 | None | | 69648 |
| CARDTYSSGWYFGWFDPW | 257 | 34 | None | | 1888 |
| SSSWSDYW | 259 | 34 | None | | 69649 |
| SSGWYRPPYYFDYW | 203 | 34 | None | | 69650 |
| CARSYYDILTGYYSSFDYW | 315 | 34 | None | | 26270 |
| CARD-SAYYEFWSGYYYFDYW | 595 | 34 | None | | 10694 |
| GLTSGWLDYW | 270 | 34 | None | | 69651 |
| CAKGDGYLSYYFDYW | 255 | 34 | None | | 27951 |
| CARVYDSSGYYSGEGDYW | 172 | 33 | None | | 24991 |
| NGYSYGSHDAFDIW | 141 | 33 | None | | 69652 |
| CARVTGYYYDSSAYLDYW | 285 | 33 | None | | 26434 |
| ASLYSTSSPYFDYW | 1078 | 33 | None | | 69653 |
| CARASYYSSGWYAFDYW | 988 | 33 | None | | 3173 |
| CARVSHPSYYYDSSGYAIDYW | 263 | 33 | None | | 414 |
| CAKVDSSSWHFDYW | 224 | 33 | None | | 7151 |
| CARDESGYYDSSGYYYSAFDIW | 548 | 33 | None | | 4995 |
| CARPSSGYYLGYFDYW | 219 | 33 | None | | 3582 |
| CARDISSSWYPNWFDPW | 326 | 33 | None | | 2579 |
| CAHRRSGWLGGYFDYW | 164 | 33 | None | | 25562 |
| CAKDLGAVAGYFDYW | 293 | 32 | None | | 10004 |
| CQQRSGWPV | 2859 | 32 | None | | 69654 |
| ATTSPGSTDAFDIW | 143 | 32 | None | | 69655 |
| CATGANTIFGVVIIDAFDIW | 231 | 32 | None | | 1995 |
| CAR-GWASGWSYYFDYW | 724 | 32 | None | | 6976 |
| CAKDRSYYYYDSSGYYHFFDYW | 283 | 32 | None | | 26095 |
| CARVTGYYDSRADYW | 160 | 32 | None | | 4505 |
| CAKDRYSSSWNDAFDIW | 197 | 32 | None | | 6426 |
| CAS----YDILTGSLDYW | 150 | 32 | None | | 3670 |
| CAKSGKYYYDSSGYYLFDLW | 202 | 32 | None | | 7682 |
| CAKQADYYDSSGYSWSQDYW | 205 | 32 | None | | 7099 |
| CARALYDSSGF--GYW | 224 | 32 | None | | 11062 |
| CALPILSFLMCCCIRFASISLRIFALMFIGHIGLKFS | 72 | 32 | None | | 69656 |
| FFVLFMPGF | | | | | |
| CARHSGSTYYDSSGYHIDYW | 1698 | 31 | None | | 6418 |
| CAKGGYCSGGSCDNWFDPW | 241 | 31 | None | | 261 |
| CARGEETYYDFWSGYLIDYW | 166 | 31 | None | | 7157 |
| CANLPDSSGYRDNW | 156 | 31 | None | | 25405 |
| CARDP-TNCSGGSCYPGDYW | 99 | 31 | None | | 7090 |
| CARDPDTYYYDSSGYYYENYFDYW | 161 | 31 | None | | 2728 |
| CATTAPHCSSTSCYSNWFDPW | 108 | 31 | None | | 1248 |
| RGSGDYDYW | 729 | 31 | None | | 69657 |
| CATLNLDSSG-YYFDYW | 200 | 31 | None | | 4188 |
| CAREGSGWYRYYFDYW | 223 | 31 | None | | 5322 |
| CARD-TGIAAAGTFDYW | 357 | 30 | None | | 27597 |
| CARGYDVLTGYPDYW | 648 | 30 | None | | 2018 |
| DFWSGYQTVDYW | 617 | 30 | None | | 69658 |
| SKYGSYYDYW | 201 | 30 | None | | 69659 |
| CARDTSYYYDSSVGYFDYW | 1697 | 30 | None | | 23443 |
| CARGTYYYDSSAL-AFDIW | 115 | 30 | None | | 26522 |
| CARDNPYYDSSGYDVGPFDIW | 277 | 30 | None | | 1554 |
| CAR--STIFGVVYFDYW | 143 | 30 | None | | 26663 |
| CARPIGSGNYDAFDIW | 153 | 29 | None | | 27145 |
| ARLRRGNDAFDIW | 180 | 29 | None | | 69660 |
| CARDPDDYDSSGYYGSLDYW | 211 | 29 | None | | 27668 |
| CARASWYYDSSGYRDYYYYGMDVW | 1733 | 29 | None | | 24641 |
| CAKDKGLDDAFDIW | 197 | 29 | None | | 389 |
| ARLNLYFDLW | 217 | 29 | None | | 69661 |
| CARGGSYDILTGPFDYW | 650 | 29 | None | | 26207 |
| CAKVPGGGSYFDYW | 194 | 29 | None | | 23784 |
| CAREYDSSGPWFDYW | 195 | 29 | None | | 2965 |
| CAKDLYGSGSYYPSDYW | 180 | 29 | None | | 2866 |
| CASQGYSSFWY | 132 | 29 | None | | 69662 |
| CARTDYYDSSGFGTLDYW | 206 | 29 | None | | 685 |
| LLYDPFDYW | 146 | 29 | None | | 69663 |
| CAREYSSSWPNDYW | 258 | 28 | None | | 7104 |
| CARMRGSGSYDDAFDIW | 160 | 28 | None | | 10966 |
| CARRGDYGWYFDYW | 279 | 28 | None | | 7644 |
| CAHRPDISLYYFDYW | 222 | 28 | None | | 3979 |
| VVVPAACDYW | 159 | 28 | None | | 69664 |
| CARDPWHYYDSSGYYPDARFDYW | 177 | 28 | None | | 6558 |
| CAGSGNPGDYW | 175 | 28 | None | | 26841 |
| ARRYCPGGSCYDAFDIW | 122 | 28 | None | | 69665 |
| CAKAPLEYCSGGTCYPFDYW | 150 | 28 | None | | 2870 |
| ASRGYNYFDYW | 662 | 28 | None | | 69666 |
| CASLPDYGDYPFDYW | 289 | 28 | None | | 6395 |
| CATGPFRES-YYFDYW | 96 | 28 | None | | 27730 |
| SYGAISFDYW | 134 | 27 | None | | 69667 |
| CARDGGSRHYYDSSGLFDYW | 1741 | 27 | None | | 24660 |
| GRTPDYYYDSSGIFDYW | 173 | 27 | None | | 69668 |
| LRAEDTAVYYCARGYSIDYW | 130 | 27 | None | | 69669 |
| CARRGSGYRQYYFDYW | 705 | 27 | None | | 6237 |
| CARSPYYDILTGYYY-IDYW | 273 | 27 | None | | 27832 |
| CATLAAAGGDYW | 208 | 27 | None | | 4005 |
| CAKGNPYSSGWYAFDYW | 225 | 27 | None | | 718 |
| VKQSHGLDYFDYW | 181 | 27 | None | | 69670 |
| CQQRSIWPLAF | 2735 | 27 | None | | 4375 |
| RETYYYDSSGYFRVGAFDIW | 206 | 27 | None | | 69671 |
| CARDHCSGGFCYIDSW | 106 | 27 | None | | 24436 |
| MTPRDAFDIW | 115 | 27 | None | | 69672 |
| CAKVL-PYYDFWSGY--WDYYYYGMDVW | 107 | 26 | None | | 1178 |
| CARDGVCSSTSCYLYYYYGMDVW | 79 | 26 | None | | 23692 |
| RVLLWFGDAFDIW | 154 | 26 | None | | 69673 |
| CHVWDSST | 11503 | 26 | None | | 69674 |
| CARDYFDSSGNYYVDYW | 245 | 26 | None | | 27075 |
| CARDSSGGRADYYDSSGYFDYW | 1681 | 26 | None | | 27719 |
| CAKDRRIAVAGPFDYW | 207 | 26 | None | | 4385 |
| CAKVLAVAGTGDYW | 166 | 26 | None | | 7396 |
| CARGAYYYDSSVPGDYW | 1657 | 26 | None | | 25101 |
| CARDRQLWDYYYGMDVW | 168 | 26 | None | | 6622 |
| CARYSSGYYSTSFDYW | 116 | 25 | None | | 2476 |
| CARGYSSGWYTIHFDYW | 147 | 25 | None | | 7548 |
| CAK-ADWGGLYYFDYW | 146 | 25 | None | | 10447 |
| CASDYGGHSFDYW | 130 | 25 | None | | 25841 |
| CARTYSNYVYYFDYW | 200 | 25 | None | | 2167 |
| CAGQGTYYDFWSGYYTGINYFDYW | 91 | 25 | None | | 24782 |
| NILTGYYNFFDYW | 293 | 25 | None | | 69675 |
| CARGG--DSSGYYSWYFDLW | 120 | 25 | None | | 6920 |
| CARTGYMGSGWYYFDYW | 762 | 24 | None | | 1188 |
| CARGD-SSGWYGNPYYFDYW | 272 | 24 | None | | 7501 |
| CAHRLYYDFWSGYYNGGVFDYW | 124 | 24 | None | | 11095 |
| CAKLRSGSYLSYFDYW | 140 | 24 | None | | 23563 |
| CAHRSSGWTPGWFDPW | 98 | 24 | None | | 1403 |
| CAKDITDGYCSGGSCSPGFDYW | 153 | 24 | None | | 1312 |
| YCSGGSCFPRLFDYW | 111 | 24 | None | | 69676 |
| CAR----GGTASGFDYW | 123 | 24 | None | | 7546 |
| CASFPRYDFWSGSSSDYW | 178 | 24 | None | | 2452 |
| CAKLPLRN--YYDSSGSEFDYW | 125 | 24 | None | | 3629 |
| CARLGGSSGYYQYYFDYW | 121 | 24 | None | | 25933 |
| RPTLGYCSGGSCY-RLAWFDPW | 121 | 24 | None | | 69677 |
| LYSSSWYQFDYW | 110 | 24 | None | | 69678 |
| CAAGG-DFWSGLDYW | 166 | 23 | None | | 24990 |
| CARDHPCSGGSCYSVRRFDPW | 120 | 23 | None | | 25372 |
| TYGSSSGWYSSFDYW | 87 | 23 | None | | 69679 |
| CARELVRGKYYYYYGMDVW | 544 | 23 | None | | 2534 |
| CAKDIGAVAAYFDYW | 141 | 23 | None | | 27172 |
| CARTHGYSYGTPYFDYW | 182 | 23 | None | | 2896 |
| CAKTIAVAGTNYFDYW | 123 | 23 | None | | 2679 |
| CAKDTGYSYGNDAFDIW | 141 | 23 | None | | 9793 |
| CARGLLGYCSGGSCYPAVFDYW | 127 | 23 | None | | 5145 |
| CARDGIAVAGFSFDYW | 215 | 23 | None | | 6357 |
| CARDPYYDFWSGL---YYYYYYMDVW | 68 | 22 | None | | 4444 |
| YGSGSYSSYYFDYW | 82 | 22 | None | | 69680 |
| CAAWDDSLNGPVF | 11218 | 22 | None | | 24 |
| ARMNCSGPSCYPWFDYW | 111 | 22 | None | | 69681 |
| CARIRGTIFGVVLDYW | 153 | 22 | None | | 26740 |
| CAKDARIYSSGWSPYYFDYW | 534 | 22 | | | 2339 |
| CAHRLSVAGPYFDYW | 130 | 22 | None | | 6449 |
| CARGSYGGMVFDYW | 595 | 22 | None | | 2279 |
| CAY--GGSNYKLTF | 73 | 21 | None | | 69682 |
| CARDPPYGSGSYYNPFDYW | 112 | 21 | None | | 2353 |
| CAAWDDSLSGWVF | 11220 | 21 | None | | 23 |
| CARDLGMGSYFDYW | 299 | 21 | None | | 5010 |
| RDLDFWSGYALWDYW | 100 | 21 | None | | 69683 |
| AEDYYDSSADYW | 114 | 21 | None | | 69684 |
| CARASYSSRDYYYYMDVW | 107 | 21 | None | | 2054 |
| CARNTGYSSSW-CDAFDIW | 113 | 21 | None | | 7047 |
| CSKDGGTYESPFDYW | 85 | 21 | None | | 475 |
| ARDGGFRPWFDPW | 109 | 21 | None | | 69685 |
| CAVWDDSLSGRVF | 11225 | 21 | None | | 22 |
| CAMTMNYDSSGYGFVYW | 84 | 21 | None | | 6457 |
| CAKAEGYTSGWY-FDYW | 298 | 20 | None | | 2674 |
| CARVVIR-VGFDYW | 214 | 20 | None | | 5164 |
| CAAWDDSLSGPVF | 11212 | 20 | None | | 25 |
| CATKGYYSSSTDYW | 92 | 20 | None | | 24069 |
| CARGGIVDWYFDLW | 76 | 20 | None | | 24877 |
| GYSYGTALFDYW | 98 | 20 | None | | 69686 |
| CARGGGIGWGGYYFDYW | 226 | 20 | None | | 7558 |
| SGSFYSGDYW | 114 | 20 | None | | 69687 |
| CARERRSIAAAGYFDYW | 260 | 20 | None | | 27033 |
| CARTHYDILTGYLTIFDYW | 218 | 20 | None | | 6540 |
| CARDPGPKGA-FDIW | 549 | 19 | None | | 2183 |
| CARAAYCGGDCYSGHDYW | 111 | 19 | None | | 2586 |
| CAREVRSGSYYYYYSMDVW | 372 | 19 | None | | 856 |
| GGNEWGPFDYW | 164 | 19 | None | | 69688 |
| CARDIAVAGQYYFDYW | 431 | 19 | None | | 938 |
| CARNFNYDSSGLDYW | 80 | 19 | None | | 9751 |
| CARDRYGYYYDSSSNYFDYW | 152 | 18 | None | | 3942 |
| CAR--LGYYGSGTPGDYW | 77 | 18 | None | | 6695 |
| CARGLGGDRWFDPW | 146 | 18 | None | | 2477 |
| CARYGSGSYWSWYFDLW | 144 | 18 | None | | 2371 |
| CARAPGGYCSSTSCYGSYYYYGMDVW | 43 | 18 | None | | 3774 |
| CTTTVDPYDFWSGWAYFDYW | 444 | 18 | None | | 1465 |
| CTRDPAGYCSGGSCHYLHFDYW | 63 | 18 | None | | 23915 |
| CAKLTYGDYSGPDYW | 128 | 18 | None | | 1600 |
| YYDSESGDYW | 135 | 18 | None | | 69689 |
| SGGSYIPTF | 61 | 18 | None | | 69690 |
| CAAWNDSLSGPNWVF | 11199 | 17 | None | | 27 |
| CAAWDESLNGFCLF | 9466 | 17 | None | | 3761 |
| CAAWDDNLSGPVF | 11204 | 17 | None | | 26 |
| CAKVGSGSGWYADYW | 97 | 17 | None | | 27884 |
| CASDR-NYYDILTGSLDYW | 91 | 17 | None | | 1810 |
| CSSDLFLICCWIRLASILLRILVSMFIKDIGLQFSFL | 39 | 17 | None | | 69691 |
| VMSFSGF | | | | | |
| CARGGLGYSYGGWYFDYW | 121 | 17 | None | | 6279 |
| CASL---DSSWLPFDYW | 90 | 17 | None | | 713 |
| CAR--GLYSSSWRGFDIW | 57 | 17 | None | | 9840 |
| CATWDDSLNGYAVF | 11197 | 16 | None | | 28 |
| RQVPHGFDIW | 281 | 16 | None | | 69692 |
| CAAWDDSRNGPHVVF | 9463 | 16 | None | | 3350 |
| LAYCSTTSCSGTDYW | 73 | 16 | None | | 69693 |
| CQVWESSSDHRWVF | 659 | 16 | None | | 3886 |
| CARR--AAGRHYYYYYYMDVW | 112 | 16 | None | | 5364 |
| CATGYCSGGSCYHAKTPDYW | 93 | 16 | None | | 25787 |
| CALRSGGYQKVTF | 59 | 16 | None | | 69694 |
| CAAWDDSLNGHVVF | 11197 | 16 | None | | 29 |
| CATAPGIAVAGTRWFDPW | 73 | 16 | None | | 762 |
| GGSYERGNWFDPW | 264 | 16 | None | | 69695 |
| CARGGDSSSWHNNWFDPW | 75 | 15 | None | | 6462 |
| CARHQSGYSYGRFDYW | 91 | 15 | None | | 6803 |
| CAVWDDSLPGRWLF | 3174 | 15 | None | | 10551 |
| CAAPSGGYQKVTF | 58 | 15 | None | | 69696 |
| CATWDDTLSGLNWVF | 11194 | 15 | None | | 30 |
| CARDLRRGYSYGAIDYW | 91 | 15 | None | | 1565 |
| CATHSGGYQKVTF | 57 | 15 | None | | 69697 |
| CIVRSGGYQKVTF | 57 | 15 | None | | 69698 |
| HGSGSYYNPVDYW | 80 | 14 | None | | 69699 |
| CAFLSGGSNYKLTF | 57 | 14 | None | | 69700 |
| TIFGVVIVVGWFDPW | 64 | 14 | None | | 69701 |
| AGGLVRASSFDYW | 126 | 14 | None | | 69702 |
| VYGDDGDYW | 54 | 14 | None | | 69703 |
| RCSGGSCLYYDSW | 56 | 14 | None | | 69704 |
| CARLTG-GRPSDAFDIW | 86 | 14 | None | | 26012 |
| CGTWDSSLSAVVF | 5058 | 14 | None | | 9776 |
| CARAREDIVVVPAATHYYYYGMDVW | 79 | 14 | None | | 593 |
| CARDHWGSFEY | 47 | 13 | None | | 69705 |
| CVHPSGTYKYIF | 71 | 13 | None | | 69706 |
| CQQYMHWP | 857 | 13 | None | | 69707 |
| CAKDEKIAAAGTGSFDYW | 65 | 13 | None | | 10643 |
| AAAGTIDWFDPW | 83 | 13 | None | | 69708 |
| VASSANAFDIW | 49 | 13 | None | | 69709 |
| CGTLSGGYQKVTF | 53 | 13 | None | | 69710 |
| CARDLGGGTLGDYW | 178 | 13 | None | | 7697 |
| CAKGYSGSYYGAVDYW | 27 | 12 | None | | 4200 |
| CMQGIHWPPTF | 4058 | 12 | None | | 27735 |
| CSSDLSQLQLTTGNGLFLSEGLKLVDKFLEDVKKLYHS | 74 | 12 | None | | 69711 |
| EAFTVNF | | | | | |
| RDSPGAHFDYW | 59 | 12 | None | | 69712 |
| CGTWDSSLSVYVF | 5023 | 12 | None | | 4688 |
| CARDGSAYYAPNWFDPW | 63 | 12 | None | | 27711 |
| CALPI-SFEKKAVIKDLEFPVAFEPPLKGIMAAASRLS | 47 | 11 | None | | 69713 |
| CGSKRKSF | | | | | |
| CALPISGCWAFLFIQTVLPSLQGPLTPDGHRVPPADH | 288 | 11 | None | | 69714 |
| RAWLSPEGGF | | | | | |
| CARYGYGERGFDSW | 43 | 11 | None | | 24146 |
| CSSDLFEKKAVIKDLEFPVAFEPPLKGIMAAASRLSC | 47 | 11 | None | | 69715 |
| GSKRKSF | | | | | |
| CALPIFWASLFNQTVFLGLQGPLTPDGHRVPPADHRA | 288 | 11 | None | | 69716 |
| WLSPEGGF | | | | | |
| CALPI-WASLFNQTVFLGLQGPLTPDGHRVPPADHRAWL | 288 | 11 | None | | 69717 |
| SPEGGF | | | | | |
| CALPICAFEKKAVIKDLEFPVAFEPPLKGIMAAASRLS | 47 | 11 | None | | 69718 |
| CGSKRKSF | | | | | |
| CALPIFQIQTSSLESCIYMWLDKYLEEKNTKRDSPHS | 72 | 9 | None | | 69719 |
| LPPPTIFFNF | | | | | |
| CQVWDIISDHQGVF | 594 | 9 | None | | 27623 |
| DLQTSSLESCIYMWLDKYLKEKNTKRDSPHSLPPPTI | 72 | 9 | None | | 69720 |
| FFNF | | | | | |
| SKLCDVTEHIESVVIVVLLSSLSPVSCYTYSVPNCKLNF | 60 | 9 | None | | 69721 |
| CALPI--CKARLCKVSPLQTEWFKTARMHSSIYNSKAP | 42 | 9 | None | | 69722 |
| CTELGF | | | | | |
| CALPIW-PCKARLCKVSPLQTEWFKTARMHSSIYNSKA | 42 | 9 | None | | 69723 |
| PCTELGF | | | | | |
| CASSTGQGYEQYF | 48 | 9 | None | | 69724 |
| CYSAADNNRVF | 774 | 9 | None | | 1598 |
| CALPISRVVWRPCKARLCKVSPLQTEWFKTARMHSSI | 42 | 9 | None | | 69725 |
| YNSKAPCTELGF | | | | | |
| CATWDG-YYKKLF | 394 | 9 | None | | 69726 |
| CLLTVSFNLSFGNMEGKRINVSKMKLRLKSSLPRKLD | 51 | 8 | None | | 69727 |
| KSNFKAMVSTF | | | | | |
| CALPIWKHEERQLGDCQRQVSIRIWPGPVLHLGKRIF | 32 | 8 | None | | 69728 |
| SSCFYYFTF | | | | | |
| CYSAADNNLRVF | 771 | 8 | None | | 5359 |
| CALPIY--EERQLGDCQRQVSIRIWPGPVLHLGKRIF | 32 | 8 | None | | 69729 |
| SSCFYYFTF | | | | | |
| CATWDG-YYKKLF 394 9 None None None | | | | | 69726 |

TABLE A5
CDR3 Alignements Exclusive to Non-Survivors Day 0

| | Cluster | CDR3 | | | |
|---|---|---|---|---|---|
| Alignment | Counts | Counts | Class | ID | SEQ ID NO |
| CQQSYSTPLFAF | 28 | 140569 | C4 | EY6A | 34 |
| CQQYYTTPMYAF | 23 | 125715 | C4 | CR3022 | 35 |
| CQQYYSTPPSF | 34 | 110321 | C4 | CR3022 | 36 |
| CQSADSSGTWVF | 37 | 62077 | C4 | SZA4 | 37 |
| CQSADTSGTYGNWVF | 22 | 61809 | C3 | S309 | 38 |
| CQSADTSGPYRDVVF | 17 | 61626 | C3 | S309 | 39 |
| CQSPDSSATYQV | 11 | 61577 | C4 | SZA4 | 40 |
| CQSADNSGSYGIF | 22 | 51193 | C4 | SZA4 | 41 |
| CQQYGSSVTF | 27 | 48316 | C1 | C102 | 42 |
| CQSADSSGTYKMLF | 16 | 30329 | C4 | SZA4 | 43 |
| CQRYNNYPYIF | 15 | 25022 | C3 | C110 | 44 |
| CQRYNTAPYTF | 12 | 22628 | C3 | C110 | 45 |
| CQQVYDTPRTF | 12 | 19935 | C2 | C002 | 46 |
| CMQGTHWPPIIF | 19 | 14254 | C1 | B38 | 47 |
| CIQGTHWPPSAF | 14 | 14235 | C1 | B38 | 48 |
| CMQGTHWPPSTF | 16 | 14233 | C1 | B38 | 49 |
| CMQGTHWPPAF | 20 | 14141 | C1 | B38 | 50 |
| CMQGTLWPPSF | 13 | 14091 | C1 | B38 | 51 |
| CMQGTHWPPGLTF | 13 | 14077 | C1 | B38 | 52 |
| CMQGTHWPPSFTF | 14 | 14076 | C1 | B38 | 53 |
| CMQGTHWPPTWTF | 13 | 14073 | C1 | B38 | 594 |
| CQAYDSSLV | 23 | 12282 | C4 | S2A4 | 69730 |
| CQAWDSSTAVF | 19 | 12245 | C4 | SZA4 | 23352 |
| CQAWDSSTVVF | 18 | 12215 | C4 | SZA4 | 3867 |
| CHSRDSSNNHH-FLF | 14 | 9606 | C4 | SZA4 | 13855 |
| CSSRDSSGDHR | 12 | 8852 | C4 | SZA4 | 69731 |
| CQQRSNWPPFT | 22 | 7867 | C3 | REGN10987 | 69732 |
| CSSRDSSGNHRLF | 18 | 7447 | C4 | SZA4 | 23203 |
| CYSTDGSGN | 12 | 7445 | C1 | C105 | 69733 |
| CHSRDSSANHLGYVF | 15 | 7433 | C4 | SZA4 | 9074 |
| CHSRDSSGNHRGFVF | 14 | 7432 | C4 | SZA4 | 5470 |
| CQQFNSYLF | 34 | 5415 | C1 | B38 | 5417 |
| CSSYAGSNNWVF | 11 | 5256 | C2 | P2B-2F6 | 18923 |
| CSSHAGSNNLLF | 10 | 5068 | C2 | P2B-2F6 | 23163 |
| CQTWGTGIQVF | 7 | 4772 | C2 | C104 | 5654 |
| CQTWGTGIWVF | 7 | 4772 | C2 | C104 | 7863 |
| CQQYGSSSIIF | 10 | 3662 | C1 | C102 | 22947 |
| CCSYAGSYPFNWVF | 10 | 3473 | C2 | COVA2-39 | 23401 |
| CQHYNNWPSYTF | 21 | 3437 | C3 | REGN10987 | 22000 |
| CQPYNNWPQYTF | 14 | 2979 | C3 | REGN10987 | 5640 |
| CQSYDASLGGSGLF | 16 | 2646 | C4 | SZA4 | 21229 |
| CQQYDNLLLLTF | 14 | 2454 | C3 | REGN10987 | 5899 |
| CQQYDNLLALTF | 9 | 2417 | C3 | REGN10987 | 16588 |
| CQSYDNSLGGWKLF | 16 | 2206 | C4 | SZA4 | 5562 |
| CQQYDNLLLFTF | 14 | 2198 | C3 | REGN10987 | 21706 |
| CQQYDNLLSITF | 10 | 2142 | C3 | REGN10987 | 19542 |
| CQSYDRSLNIWVF | 11 | 1853 | C3 | REGN10987 | 5466 |
| CCSYAGSYSF | 11 | 1694 | C2 | COVA2-39 | 16865 |
| CCSYAGSYTFDWVF | 10 | 1692 | C2 | COVA2-39 | 6155 |
| CCSYAGSYTFLNWVF | 9 | 1688 | C2 | P2B-2F6 | 14171 |
| CSYAGSYTFVWVF | 9 | 1688 | C2 | COVA2-39 | 18735 |
| CQYYNNYSTF | 15 | 1164 | C3 | C135 | 8511 |
| CASLYGGNSYYFDYW | 91 | 895 | C1 | C105 | 18817 |
| CATAPRYYYDSSGYWGPNDYW | 83 | 864 | C1 | C105 | 19448 |
| CYQYGNSPP | 11 | 853 | C1 | C102 | 69734 |
| CQVWHSTSDHSVVF | 8 | 744 | C4 | CR3022 | 13565 |
| CYHFDYW | 3630 | 500 | None | | 19582 |
| CARYHYDSSGHFDYW | 61 | 412 | C4 | S2A4 | 9351 |
| CATNDAFDIW | 3003 | 393 | None | | 9187 |
| CAYQNSSGWFGYYFDYW | 35 | 349 | C2 | COVA2-39 | 18984 |
| GLGSYYFDYW | 4054 | 310 | None | | 69735 |
| CAKDLGDYYDSSGHNWFDPW | 33 | 287 | C4 | SZA4 | 14468 |
| TGSSGWYYFDYW | 2900 | 252 | None | | 69736 |
| GRFYYYYYMEVW | 1334 | 233 | None | | 69737 |
| CATYYYDSSGYYLDFDYW | 2313 | 214 | None | | 17363 |
| CSSTSCSDNWFDPW | 29 | 211 | C1 | C105 | 69738 |
| CQVWDSSNDHPVF | 15 | 202 | C4 | SZA4 | 6196 |
| CAHSKSSAWYQIDY | 27 | 194 | C2 | COVA2-39 | 69739 |
| GGNPNYYYYGMDVW | 1239 | 185 | None | | 69740 |
| CQVVDSSSDLF | 9 | 184 | C4 | SZA4 | 8595 |
| CTRYSVSYYYYGMDVW | 1425 | 183 | None | | 13140 |
| AQIDYYYYMDVW | 1430 | 181 | None | | 69741 |
| CTIGTNWFDPW | 1580 | 177 | None | | 5691 |
| CAYNSGGNYYYYGMDVW | 1298 | 175 | None | | 21352 |
| CKTDYYDSSGYPGYFDYW | 1656 | 167 | None | | 16875 |
| CASGSYPYYFDYW | 1369 | 167 | None | | 5444 |
| CARYYSPYYYYAMDVW | 1300 | 164 | None | | 23041 |
| ATYDNSGYFDYW | 1756 | 161 | None | | 69742 |
| CATSYYYDSSGYLDYW | 1439 | 161 | None | | 6106 |
| CARGFDYW | 2571 | 161 | None | | 16640 |
| CQQYENFPVAF | 13 | 160 | C3 | REGN10987 | 20246 |
| GTSAYYYYYMDVW | 1109 | 153 | None | | 69743 |
| AKGTDWYYYYGMDVW | 964 | 151 | None | | 69744 |
| GVDYYYMDVW | 1222 | 145 | None | | 69745 |
| CARDGYYDSSGYFDYW | 2310 | 143 | None | | 20035 |
| CVRGN--YNFDYW | 1724 | 140 | None | | 14151 |
| TTQYYYDSSGYYYGDYW | 1263 | 140 | None | | 69746 |
| VSYDSSGYHRRFDYW | 1360 | 139 | None | | 69747 |
| GSGSYYTPFDYW | 1043 | 137 | None | | 69748 |
| CARSGYYYDSSGYPFDYW | 1349 | 136 | None | | 22262 |
| CTTDLGYYDSSGYRFDYW | 1938 | 132 | None | | 13804 |
| CARDGYDFWSGYQDYW | 1299 | 131 | None | | 19352 |
| CSGGSCHSFDYW | 1478 | 130 | None | | 19509 |
| CAKDLYPYYYGMDVW | 986 | 126 | None | | 11931 |
| TTDSSGYFAFDIW | 1093 | 123 | None | | 69749 |
| CAIWEYYYDSSGYTDYW | 1010 | 123 | None | | 11951 |
| TGDGNWFDPW | 813 | 120 | None | | 69750 |
| CSGGSCYRDDYW | 1279 | 120 | None | | 21859 |
| CASGSGYASDAFDIW | 1094 | 120 | None | | 8344 |
| CAKGGSGWFDPW | 873 | 119 | None | | 17495 |
| CASYS-SGWYSPFDYW | 1516 | 119 | None | | 5767 |
| CARDRYYYDSSGYYYGFDYW | 1626 | 118 | None | | 22200 |
| CTSFIYYYDSSGYYSDAFDIW | 1248 | 115 | None | | 8867 |
| CARGYCSGGSCYPHFDYW | 1130 | 112 | None | | 21535 |
| CSGGSCYGDYYYYGMDVW | 627 | 112 | None | | 20016 |
| AEDYYYYFMDVW | 656 | 112 | None | | 69751 |
| CAMYDTSGSFDYW | 1119 | 111 | None | | 22341 |
| CARD---YYDSSGYNDAFDIW | 1954 | 110 | None | | 12798 |
| TLGGYYYDSSGYYVYW | 881 | 110 | None | | 69752 |
| CSGGSCYSIYYFDYW | 1219 | 110 | None | | 15407 |
| CFSTGYLDYW | 995 | 106 | None | | 14223 |
| CATYVAYYYDSSGYRAFDYW | 901 | 106 | None | | 12114 |
| CAAAAAGTSYYYGMDVW | 1189 | 106 | None | | 22031 |
| CAAGRGSENYYYGMDVW | 890 | 104 | None | | 20914 |
| CAAPRGYDSSGY-DAFDIW | 1447 | 104 | None | | 17311 |
| CARGLDAFDVW | 892 | 103 | None | | 20654 |
| CVSSSGYSGWFDPW | 1105 | 103 | None | | 17493 |
| CATTYYYDSSGVLDYW | 785 | 101 | None | | 15574 |
| CATGRDYYDSSGYRIFDYW | 1221 | 100 | None | | 19077 |
| SSGWYNYYYYGMDVW | 613 | 100 | None | | 69753 |
| CARKYCSGGSCYFDYW | 1024 | 100 | None | | 15451 |
| CAKDTYDSSGY | 1293 | 100 | None | | 69754 |
| CARDLQDYYDSSGYYDYW | 1613 | 99 | None | | 22030 |
| CAKADYYDSSG--DYW | 1482 | 98 | None | | 23268 |
| CAHR-GDFWSGYFDYW | 1105 | 97 | None | | 16846 |
| CATVSFPNYYDSSGYY-YFDYW | 1071 | 97 | None | | 17069 |
| CATLHYYDSSGYYRPDAFDIW | 969 | 97 | None | | 14959 |
| ATISGYPVDYW | 1001 | 96 | None | | 69755 |
| CATRYCSGGSCYGYYFDYW | 1087 | 96 | None | | 23298 |
| SSGWYLGWFDPW | 1051 | 95 | None | | 69756 |
| CQICDFWSGYYSDYW | 938 | 93 | None | | 15358 |
| YYDSSGYHPLPFDYW | 806 | 93 | None | | 69757 |
| CAKALGYYYDSSGYSPFDYW | 1059 | 93 | None | | 12562 |
| CARGGYCSGGSCSPDDYW | 836 | 92 | None | | 7811 |
| AKAGTRYYFDYW | 691 | 92 | None | | 69758 |
| CARDLYYDSSGFDYW | 1264 | 92 | None | | 16936 |
| CSSASCYYYFDYW | 654 | 92 | None | | 18937 |
| CARGYSSSWYVYYW | 853 | 90 | None | | 22319 |
| CARAI--DYYDSSGYYPDAFDIW | 1094 | 87 | None | | 16085 |
| CTTGGTHDYYYYYMDVW | 691 | 86 | None | | 18361 |
| CARGYCSGGSCYSGGSDYW | 808 | 86 | None | | 17857 |
| CAGFEYSSSP-GYYYYGMDVW | 595 | 85 | None | | 14523 |
| IAGDYYYMDVW | 1050 | 84 | None | | 69759 |
| DCSGGSCYPDYW | 558 | 84 | None | | 69760 |
| RHNAFEIW | 718 | 84 | None | | 69761 |
| CAKVSGYHEDAFDIW | 935 | 84 | None | | 14777 |
| VTGPKYYFDSW | 486 | 84 | None | | 69762 |
| LSRYSSSWYYFDYW | 1350 | 84 | None | | 69763 |
| CASLAYYYDSSGYYSSAFDIW | 1077 | 83 | None | | 14389 |
| VGYCSGGSCYSGAFDIW | 822 | 83 | None | | 69764 |
| CAR---SGYSLFDYW | 1032 | 82 | None | | 5400 |
| RGYNDFDYW | 620 | 82 | None | | 69765 |
| CAR--GPYYDILTGYYPNDYW | 999 | 81 | None | | 21736 |
| CTRGTYYYDSSGYPNDAFDIW | 916 | 81 | None | | 17355 |
| CVRDLYYDSSGYFLSW | 1647 | 81 | None | | 5882 |
| CAKGDCSGGSCYDY | 915 | 81 | None | | 69766 |
| CARDLYCSGGSCYSSGFDYW | 1027 | 80 | None | | 20870 |
| CAKDSGYYDFWSGYSYFDYW | 791 | 80 | None | | 19317 |
| TTLYEAYYFDYW | 672 | 80 | None | | 69767 |
| CASIRYCSSTSCYPFDYW | 524 | 80 | None | | 18914 |
| CARDGSGYYDSSGYLDYW | 1629 | 79 | None | | 15369 |
| CTTTTYYYDSSGYSNDAFDIW | 1336 | 79 | None | | 14855 |
| CARGGYCSGGSCYSIYYFDYW | 781 | 78 | None | | 12058 |
| CARED---GSQYYYYGMDVW | 586 | 78 | None | | 14016 |
| APAATEGWFDPW | 576 | 78 | None | | 69768 |
| CARDRARYYYDSSGYPLPDYW | 830 | 78 | None | | 13287 |
| CAKD---TGYCSGGSCYGTFDYW | 602 | 78 | None | | 15763 |
| CARDPGYCSSTSCYEPFDYW | 525 | 78 | None | | 21753 |
| CARHGDPYYYDSSGYFDYW | 909 | 78 | None | | 21824 |
| CARDGDGYCSGGSCYK--FDYW | 951 | 77 | None | | 14407 |
| CTTDDSGYDSPFDYW | 961 | 76 | None | | 8932 |
| CARDGQGVSSYYYYYGMDVW | 659 | 76 | None | | 20535 |
| CAR-YSSGWFDAFDIW | 1171 | 75 | None | | 15595 |
| HLYYDSFGGFDYW | 1555 | 73 | None | | 69769 |
| CASDRSTYYYDSSGYDYW | 1002 | 73 | None | | 8446 |
| GHFHYYSAMDVW | 486 | 72 | None | | 69770 |
| CARGVPYDSSGYSLDAFDIW | 520 | 72 | None | | 15178 |
| GSGTHDYW | 1073 | 72 | None | | 69771 |
| GTYGDWAFDIW | 916 | 72 | None | | 69772 |
| CATRGYSDAYFDYW | 650 | 72 | None | | 15176 |
| CATPRGYSSGPFDYW | 957 | 71 | None | | 22183 |
| CAKDLTYYYDSSGQN | 1264 | 71 | None | | 69773 |
| CARVGKYCSGGSCYRTFDYW | 850 | 69 | None | | 21649 |
| CARDQDPYYYDSSGYYDAFDIW | 1477 | 69 | None | | 16432 |
| CAKD---FQGDYYYYGMDVW | 496 | 69 | None | | 5465 |
| CARLGGTYPDAFDIW | 686 | 68 | None | | 22226 |
| CAKD--SSGYSVRFDYW | 572 | 68 | None | | 8288 |
| CSSTSCSPNWFDPW | 480 | 68 | None | | 12462 |
| CASL--EGGYCSGGSCY--FDYW | 892 | 68 | None | | 20338 |
| CAKGLGYCSGGSCYSDEFDYW | 532 | 68 | None | | 20046 |
| CAKDRCSSTSCYYYYGMDVW | 374 | 68 | None | | 23343 |
| SSGYYPASDYW | 458 | 67 | None | | 69774 |
| CARDSDYYDSSGYLAPGDYW | 921 | 67 | None | | 5953 |
| CALGDCSGGSCYSDAFDIW | 857 | 67 | None | | 16187 |
| CARLNSGFDYYYGMDVW | 486 | 67 | None | | 14287 |
| CARDGDYYDSSGSPYYFDYW | 861 | 67 | None | | 8097 |
| YCSGGRCYAFDYW | 640 | 66 | None | | 69775 |
| CVPNYCSSTSCYDYW | 442 | 65 | None | | 20287 |
| CARHGCSGGSCYSFDSW | 738 | 65 | None | | 23141 |
| CARAGNYYYS | 758 | 64 | None | | 69776 |
| CANLAVAGDYYYHGMDVW | 796 | 64 | None | | 11892 |
| GSCSGGSCYSFDYW | 622 | 64 | None | | 69777 |
| TEYSSSSPYFDYW | 531 | 63 | None | | 69778 |
| CARAPVYYYDSSGYYSHFDYW | 719 | 63 | None | | 17317 |
| CASEDKYCSSTSCYGFDYW | 470 | 62 | None | | 8050 |
| CARDLTGTGEDYYYYGMDVW | 435 | 62 | None | | 12282 |
| CAR--VECSGGSCYSIHFDYW | 823 | 62 | None | | 23131 |
| CARQPLLYYYDSSGYYPFDYW | 627 | 62 | None | | 22785 |
| CAKEPSGY-YYYHMDVW | 388 | 61 | None | | 8465 |
| CARDLSGWYGHYYYYGMDVW | 457 | 61 | None | | 12518 |
| CARDTQRSSGSYYYYGMDVW | 543 | 61 | None | | 21217 |
| CARDSWYYDFWSGYHDAFDIW | 482 | 61 | None | | 16102 |
| CARDSRYCSGGSCY--SIWFDPW | 611 | 61 | None | | 15919 |
| CAK-TSSGWYADAFDIW | 777 | 61 | None | | 19730 |
| CAKLPGDYYDSSGY-YMVDYW | 501 | 61 | None | | 14452 |
| CAKD--VCSGGSCYEGAFDYW | 792 | 61 | None | | 20116 |
| SFGSGSYYYYALDVW | 475 | 59 | None | | 69779 |
| CASLKGYSSGWYSYYYGMDVW | 396 | 58 | None | | 21534 |
| CATGPDYYDSSG-FYYW | 440 | 58 | None | | 5376 |
| VVVVPATPGYYYYGMDVW | 411 | 58 | None | | 69780 |
| CARGRDCSGGSCYSPWFDPW | 785 | 58 | None | | 8200 |
| VMTTGRYNWFDPW | 270 | 57 | None | | 69781 |
| CARGSRS-GQGYYYYGMDVW | 518 | 57 | None | | 21092 |
| TTESGWYGVYFDYW | 615 | 57 | None | | 69782 |
| AGKSCSSTSCYSDFDYW | 570 | 57 | None | | 69783 |
| CARDLDYYDSSGYYYEGFDYW | 1480 | 57 | None | | 16702 |
| CARDRPSYDSSGYYLDYW | 334 | 57 | None | | 16452 |
| CARVFPTY-YDILTGYSTDYW | 463 | 56 | None | | 20117 |
| CARDGHYYYDSSGYRNDAFDIW | 1276 | 56 | None | | 14018 |
| CARAGYCSSTSCYSMDYW | 377 | 56 | None | | 21929 |
| CARQVGYCSGGSCSYDFDYW | 679 | 56 | None | | 19879 |
| GPDYYDSSGPFDYW | 882 | 56 | None | | 69784 |
| DSSGYPVGDYW | 683 | 56 | None | | 69785 |
| CARDDSGWFDPW | 467 | 55 | None | | 5411 |
| CARHGLYCSGGSCY --- NWFDPW | 647 | 55 | None | | 6049 |
| DYGDNQFDYW | 864 | 55 | None | | 69786 |
| CARLRPCSGGSCYSSPPDYW | 555 | 55 | None | | 21115 |
| CASPHSSGWHLFDYW | 601 | 53 | None | | 16655 |
| CARYGSGYYYDDAFDIW | 314 | 53 | None | | 18697 |
| CARTHLYCSGGSCYLPPFDYW | 527 | 53 | None | | 20778 |
| CAKDLGGY | 394 | 53 | None | | 69787 |
| CARAYCSSTSCYKYFDYW | 397 | 51 | None | | 14845 |
| CATVPGAPYYFDYW | 555 | 51 | None | | 8708 |
| CASKGGHCSSTSCYAFDYW | 293 | 51 | None | | 17679 |
| CARDL--CSGGSCYNIDYW | 487 | 51 | None | | 9433 |
| CANFGDYYDSSGTDDYW | 396 | 50 | None | | 16206 |
| DSSGLCDYW | 498 | 50 | None | | 69788 |
| GSGSYNRPFDYW | 497 | 50 | None | | 69789 |
| CATESGATNAFDIW | 910 | 49 | None | | 20325 |
| CAKGPGEYYDSSGYQYYFDYW | 393 | 49 | None | | 14012 |
| CARVVTPVYFDYW | 329 | 49 | None | | 17671 |
| CARSPLDCSGGSCYSRRFDYW | 538 | 49 | None | | 11858 |
| CARLGDSSGYVFDYW | 592 | 49 | None | | 8418 |
| CARHEGSYYDILTGYYPGDYW | 627 | 49 | None | | 6014 |
| CARVLANHYYYYYYMDVW | 227 | 49 | None | | 8491 |
| YDILTGYVYYYSMDVW | 330 | 49 | None | | 69790 |
| ARRGYYEYYFDSW | 268 | 49 | None | | 69791 |
| CARAVTYYYDSSG--NDAFDIW | 1139 | 48 | None | | 15599 |
| CARDGSGYSFHYW | 362 | 47 | None | | 7816 |
| CATPRSPYYYDSSGPLDYW | 446 | 47 | None | | 13466 |
| CARRGGRTSLYYYYYGMDVW | 483 | 47 | None | | 19182 |
| TGRDGYNYAFDYW | 305 | 47 | None | | 69792 |
| CARAGYCSGGSCSSVYYYYGMDVW | 273 | 47 | None | | 17861 |
| CASGYCSGGSCYYHYYYYMDVW | 310 | 47 | None | | 12333 |
| CARAYCGGDCYS---GAFDIW | 409 | 47 | None | | 8063 |
| CARHG-YYFDSSGYYEDAFDIW | 771 | 46 | None | | 19964 |
| ASWGGNSFDYW | 367 | 45 | None | | 69793 |
| CARIPEAYYYDSSGYWFDYW | 596 | 45 | None | | 17022 |
| CAKDRSHYYYDSSGFDYW | 833 | 45 | None | | 12636 |
| CAREDCSGGSCYSVGWFDPW | 329 | 45 | None | | 18438 |
| CATVLPPSYYDSSGYYYWFDYW | 574 | 45 | None | | 5762 |
| TGLRGWFDPW | 319 | 44 | None | | 69794 |
| CANDGPGYYD | 699 | 44 | None | | 69795 |
| CARTRYSSSYYFDYW | 779 | 44 | None | | 20769 |
| CARDRLYFDT | 914 | 44 | None | | 69796 |
| CARRGSAYYDILTGYYPYYFDYW | 241 | 44 | None | | 14390 |
| ARLDYYDSTGKFDYW | 797 | 44 | None | | 69797 |
| CARESSGWSNFDYW | 659 | 43 | None | | 9483 |
| CARDTPAYCSSTSCYYYYYGMDVW | 247 | 43 | None | | 21122 |
| CAREWHCSGGSCYS--FGYW | 597 | 43 | None | | 18147 |
| CATGGYCSSTSCPSDYYYGMDVW | 243 | 43 | None | | 13295 |
| CARDLSYSSSWYRYFDYW | 567 | 43 | None | | 12499 |
| CARDLGYCTSTSCY-SFDYW | 421 | 43 | None | | 18870 |
| AFDILTGYYGVYYFDYW | 456 | 42 | None | | 69798 |
| YCSGGSCYSPAFDIW | 399 | 42 | None | | 69799 |
| CASGSGSYYNENWFDPW | 268 | 42 | None | | 14550 |
| CARRRSSGYSPFDYW | 499 | 41 | None | | 20566 |
| CALPICFLMCCWIWFASILLRVFALMFIKDIGLKFSL | 107 | 41 | None | | 69800 |
| FVVSLPGF | | | | | |
| CATTDYGDYEDAFDIW | 213 | 41 | None | | 12864 |
| CALPIWISFLMCCWIQFASILLRIFILMFIRDIGLKF | 107 | 41 | None | | 69801 |
| SFFVVSLSGF | | | | | |
| CALPICFLMYCWIRFASILLRIFALMFIRDIGLKFSL | 107 | 41 | None | | 69802 |
| FVVCLPGF | | | | | |
| CALPIWISFLICCWIRFASILLRIFASMFIKDIGLKFS | 107 | 41 | None | | 69803 |
| FLVVSLPGF | | | | | |
| CALPIFLMCCWIRFASILLRIFTSMFIRDIGLKFSFFV | 107 | 41 | None | | 69804 |
| VSLPGF | | | | | |
| CALPIYFLMCCWIRFASILLRIFASMFIRDIGLEFSFF | 107 | 41 | None | | 69805 |
| VVSLPGF | | | | | |
| CALPIWISFLMCCWIWFASILLRIFALMFIRYTGLKFS | 107 | 41 | None | | 69806 |
| FIVLSLPGF | | | | | |
| CARDTRTYYDILTGYYPSGYFDYW | 265 | 41 | None | | 18062 |
| CALPICFLMYCWICFASILLRIFALMFIRDIGLKFSFF | 107 | 41 | None | | 69624 |
| VVSLPGF | | | | | |
| CVAGGNRFFDYW | 203 | 41 | None | | 18579 |
| CSSDLFLMCCWIRFASILLRIFASMFIKDIGLKFSFFV | 107 | 41 | None | | 69807 |
| VSLPGF | | | | | |
| CALPIWISFLMCWWIQFASILLKIFASIFIRDIGLKF | 104 | 40 | None | | 69808 |
| SFFVVSLPGF | | | | | |
| CALPIFLMCCWIQFASILLRIFASMFIRDIGLKFSFFV | 105 | 40 | None | | 69809 |
| LSLSGF | | | | | |
| CALPIWISFLTCCWIRFASILLRIFASMFIREIGLKF- | 105 | 40 | None | | 69810 |
| FFCLSLPGF | | | | | |
| CSSTSCYWGYMDVW | 256 | 40 | None | | 13181 |
| CALDSGYSSSWYGVFDYW | 287 | 40 | None | | 14233 |
| CARDLGSSGHYYYYMDVW | 213 | 40 | None | | 18363 |
| CSSDLFLMCCWIWFASILLRIFASMFIKDIGLKCSFFV | 104 | 40 | None | | 69811 |
| VSLPGF | | | | | |
| CALPI-LSFLMCCWIQFASILLRIFALMFMKDTGLKFSF | 104 | 40 | None | | 69812 |
| VVVSLPGF | | | | | |
| CALPIWISFFMCCCIQFASILLRIFALMFIRDIGLKLS | 105 | 40 | None | | 69813 |
| FFVVSLPGF | | | | | |
| CALPIWISFLICCWIQFPSILLRIFASMFIRDIGLKFS | 104 | 40 | None | | 69814 |
| SFVVSLPGF | | | | | |
| CAKDRRGYVD | 320 | 39 | None | | 69815 |
| CALPI--CFLMCCWIQFASILLMIFTSMFIRDIGLKFS | 102 | 39 | None | | 69816 |
| FFVVSLSGF | | | | | |
| CARSNYDILTGYYTPWDYW | 680 | 39 | None | | 16943 |
| CARDRGYMDVW | 317 | 38 | None | | 8567 |
| CSSDL--LLTFCWIWFASILLRIFASMFIRDIGLKFSF | 98 | 38 | None | | 69817 |
| SVVFLAGF | | | | | |
| CARGNCSGGSCYSSPFDIW | 558 | 38 | None | | 23204 |
| CARDRPH-YYDSSGPTPFDYW | 923 | 38 | None | | 9147 |
| TMTNDAFDIW | 633 | 38 | None | | 69818 |
| GSSSSSSGWFDPW | 280 | 38 | None | | 69819 |
| CARATRYCGGDCYP-DYW | 217 | 37 | None | | 9242 |
| CARGVSSGWTEFDYW | 583 | 37 | None | | 14008 |
| CARDQSSGWYSNWFDPW | 389 | 37 | None | | 6057 |
| AVLYCSSTSCYATNYYYYGMDVW | 218 | 37 | None | | 69820 |
| CAREFGYSSGWYAYFDYW | 325 | 37 | None | | 16126 |
| CARLHDSSGYYFGFDYW | 525 | 37 | None | | 6046 |
| CALPIFLMCCWIQSASILLRIFTLMFIRGIGLTFSFF | 97 | 37 | None | | 69821 |
| VVSLPGF | | | | | |
| CARDTPFHHYYDSSGYFDYW | 1023 | 37 | None | | 22769 |
| CARGLSGY--DDAFDLW | 694 | 36 | None | | 22167 |
| CARDTAYCSGGSCYSGDYYYGMDVW | 264 | 36 | None | | 15499 |
| LDKLLTCCWIWFASILLRIFASMFIRDIGLKFSFSVV | 93 | 36 | None | | 69822 |
| FLAGF | | | | | |
| CARDPETSYYDSSGPIDYW | 200 | 36 | None | | 16162 |
| VRGYSSPDYW | 482 | 36 | None | | 69823 |
| CARVNNPFYYYYAMDVW | 282 | 36 | None | | 5661 |
| CALPIWISFLMRCWNWFASILLRIFTSILFRDIGLK | 92 | 35 | None | | 69824 |
| FSFSVVSLPGF | | | | | |
| CARGYCSGGSCYGIYYYYYYMDVW | 218 | 35 | None | | 19175 |
| CARDLYSSGWYGQPDYW | 239 | 35 | None | | 19513 |
| CARALEGYSSSWYVDYW | 2588 | 35 | None | | 13920 |
| CALPIWMDKLLTCCWIWFASILLRIFASMFIRDIGLK | 91 | 35 | None | | 69825 |
| FSFSVVFLAGF | | | | | |
| CVRVDWPYYYYYYMDVW | 191 | 35 | None | | 9371 |
| CARAPYDILTGYVEYYFDYW | 390 | 35 | None | | 12880 |
| CARDTMVTFL-YYYYYGMDVW | 384 | 34 | None | | 12719 |
| CARDQ-IAVAGTSDYW | 1074 | 34 | None | | 22432 |
| RPGPCSGGSCYYDFDYW | 206 | 34 | None | | 69826 |
| CAR-HLDILTGYYNYYFDYW | 237 | 34 | None | | 21159 |
| CAREVCGGDCYP | 237 | 34 | None | | 69827 |
| CARTLSGYDSDDAFDIW | 185 | 34 | None | | 21212 |
| CARVQLVGYYYYMDVW | 170 | 34 | None | | 9132 |
| CTTVDDYGDYYY-MDVW | 189 | 33 | None | | 18462 |
| LSLLGGWFDPW | 194 | 32 | None | | 69828 |
| CASAGYSS-SRWFDPW | 284 | 32 | None | | 12723 |
| FLMRCWNWFASILLRIFTSILFRDIGLKFSFSVVSLPGF | 84 | 32 | None | | 69829 |
| CARGDGYFEYW | 304 | 32 | None | | 22970 |
| CAKDSVRGVGWFDPW | 1274 | 32 | None | | 20314 |
| CARGGYSYGYLLDYW | 195 | 31 | None | | 8659 |
| CARDKTYCSSGSCYSYDYYYGMDVW | 221 | 31 | None | | 19050 |
| CARGLEGYSSSWYIDYW | 621 | 31 | None | | 8456 |
| CARVNNGGYYFDYW | 1083 | 31 | None | | 12629 |
| CARDNSGSFDIW | 184 | 31 | None | | 14812 |
| CARADYDSSG -- RQTFDYW | 395 | 30 | None | | 16275 |
| SGSQSRFNYW | 103 | 30 | None | | 69830 |
| CAK -- DPQRRYYYDSSGY | 179 | 30 | None | | 69831 |
| YDYVGVFDYW | 234 | 30 | None | | 69832 |
| CALPIWISFLMCCCIRFASISLRIFALMFIGHIGLKF | 78 | 30 | None | | 69833 |
| SFFVLFMPGF | | | | | |
| CARTPRYCGGDCLDYW | 116 | 30 | None | | 20061 |
| CSSDLFLMCCGIQFASILLRIFTLKFIRDTGLMFSFF | 71 | 29 | None | | 69834 |
| VLSLPGF | | | | | |
| SGYSLNNWFDPW | 432 | 29 | None | | 69835 |
| CARGY--SYGPYWYFDLW | 163 | 29 | None | | 16003 |
| CARGGYGGGLFDYW | 442 | 28 | None | | 19745 |
| CASWNYD-LTGDYYYYMDVW | 287 | 28 | None | | 15528 |
| CALPILNFLMCCQIQFAGILLRTFASMFIRGIDLKFS | 71 | 28 | None | | 69836 |
| FFVMSLPGF | | | | | |
| CARHRYSSSSYYFDYW | 426 | 28 | None | | 23265 |
| CAKADCSSTSCRNWFDPW | 251 | 28 | None | | 13972 |
| CARSTTSYCSSTSC--YFDYW | 183 | 27 | None | | 19842 |
| LSTGWYTTFDYW | 233 | 27 | None | | 69837 |
| ARGDGYYSPFDYW | 265 | 27 | None | | 69838 |
| CAKD--GSSWFGWFDPW | 154 | 27 | None | | 15755 |
| RSLGYCSSTSCFNFDYW | 234 | 26 | None | | 69839 |
| CAHRRSGWT--SGWFDPW | 229 | 26 | None | | 16243 |
| CARMVGQYCSSTSCYNYFDYW | 154 | 26 | None | | 5675 |
| CART--YCTGGSCYFRAFDYW | 318 | 26 | None | | 5484 |
| WIQLWSSYFDYW | 146 | 26 | None | | 69840 |
| CAYAGGPHYYMDVW | 131 | 26 | None | | 15692 |
| CARHSGSGWYSPFDYW | 274 | 25 | None | | 5605 |
| CARMGSCGGGSCYSGYFDPW | 95 | 25 | None | | 17213 |
| CATIGGYSYGHDAFDIW | 134 | 24 | None | | 13434 |
| CAREPLSGWYVYYW | 292 | 24 | None | | 13886 |
| GQNGAFDIW | 661 | 24 | None | | 69841 |
| CARGYCAAGSCYSV | 213 | 24 | None | | 69842 |
| RAVAGHIDYW | 886 | 24 | None | | 69843 |
| CASLTGYSSSWYVGDYW | 224 | 24 | None | | 21794 |
| AASYCGGDCYSDAFDIW | 140 | 23 | None | | 69844 |
| CAAL-SSSWLLDYW | 316 | 23 | None | | 23418 |
| CARGTAAIVNWFDPW | 96 | 23 | None | | 11814 |
| CAR-HFGSGNYCFDYW | 783 | 23 | None | | 23281 |
| CALPI---FLMCCCIRFASISLRIFALMFIGHIGLKFS | 57 | 23 | None | | 69845 |
| FFVLFMPGF | | | | | |
| CQQFNNF | 1573 | 23 | None | | 23139 |
| CARAGYCTGSSCYD-AFDIW | 149 | 23 | None | | 9501 |
| CARGNFGYSSSWYMLDYW | 196 | 22 | None | | 20776 |
| CAKDPGYSYGYGGFDYW | 125 | 22 | None | | 12557 |
| RSARGYCSSTSCY-AFDIW | 178 | 22 | None | | 69846 |
| CAKADCSSTSCHNQFDPW | 166 | 21 | None | | 20013 |
| CARSYSGSYRDFFDYW | 285 | 21 | None | | 23144 |
| CAR-RLSRGWYDWFDPW | 183 | 21 | None | | 5685 |
| CATVVGATGAFDIW | 115 | 21 | None | | 6068 |
| CARELRFCSGGSCY-PDDWFDPW | 73 | 20 | None | | 22562 |
| CQQRTHWPGPF | 9115 | 20 | None | | 23060 |
| CARDRATSGSYSYYFDYW | 129 | 20 | None | | 18442 |
| CARDKGGSKWYFDLW | 79 | 19 | None | | 22773 |
| SASSNGFDPW | 266 | 19 | None | | 69847 |
| CARAGHCSGGSCFPVPDYW | 123 | 19 | None | | 21356 |
| CYSTDSSGNH | 7487 | 18 | None | | 69848 |
| CARDKNYYGSGSRDAFDIW | 110 | 18 | None | | 23055 |
| CQSADISGTYPPVLF | 61523 | 18 | None | | 13257 |
| CARGGYSSSSGWFDPW | 79 | 18 | None | | 17482 |
| ARGYYDLSAGFDYW | 171 | 18 | None | | 69849 |
| CARGVIGWYYFDFW | 194 | 18 | None | | 17271 |
| CMQGTHWPLTF | 14260 | 18 | None | | 19150 |
| CARRGSG-YRDFFDSW | 139 | 17 | None | | 23171 |
| CMQGTHFYSF | 7558 | 17 | None | | 5750 |
| CARDGGYTYGSARFDYW | 112 | 17 | None | | 3960 |
| CAR-GSGSYYYDSSFDYW | 121 | 17 | None | | 14467 |
| CARMWVDCSGGSCFYWFDPW | 50 | 16 | None | | 13435 |
| CAAAGDSGGYQKVTF | 70 | 16 | None | | 69850 |
| CGTWDNSLSGGVF | 3002 | 16 | None | | 23383 |
| CATGGGSYFGHNWFDPW | 100 | 15 | None | | 13601 |
| CARVQSVDTAMDYYYGMDVW | 85 | 14 | None | | 22566 |
| CARDNVYRDYMDVW | 84 | 14 | None | | 23121 |
| CARGPGLVT-SNWFDPW | 173 | 14 | None | | 5436 |
| CATWDDSLTGCWLF | 10637 | 14 | None | | 12686 |
| GTSNTGKLIF | 50 | 14 | None | | 69851 |
| CAANSGYSTLTF | 92 | 14 | None | | 69852 |
| AARSGNTGKLIF | 47 | 14 | None | | 69853 |
| CAKFDRRDDYGDHFDYW | 193 | 13 | None | | 22452 |
| CQSADSDATY | 11465 | 13 | None | | 69854 |
| CARLGYCSGALCYRADYYYGMDVW | 155 | 13 | None | | 18286 |
| CARDRGIDYGDQFDYW | 176 | 13 | None | | 5586 |
| CAGDGYSSASKIIF | 68 | 13 | None | | 69855 |
| CAVWDDSLSGRNVVF | 10728 | 13 | None | | 19781 |
| CMQATHWPALS | 12318 | 13 | None | | 69856 |
| CAAWDNSLSGR | 10739 | 13 | None | | 69857 |
| CQSADITGTYVLF | 625 | 12 | None | | 19086 |
| CSSDLYQHRTMQAHELFRYFRMPELVDFRQYVRTLPT | 62 | 12 | None | | 69858 |
| NTLMGF | | | | | |
| CALPILENYQHRTMQAHELFRYFRMPELVDFRQYVRTL | 62 | 12 | None | | 69859 |
| PTNTLMGF | | | | | |
| CALPGYSSASKIIF | 64 | 12 | None | | 69860 |
| CAVGGSSASKIIF | 40 | 12 | None | | 69861 |
| CAKELHTSGWYFDYW | 257 | 12 | None | | 23179 |
| CALPIYQHRTMQAHELFRYFRMPELVDFRQYVRTLPT | 62 | 12 | None | | 69862 |
| NTLMGF | | | | | |
| CGTWDTSLSVGVF | 2988 | 12 | None | | 8579 |
| CAVAYSSASKIIF | 40 | 12 | None | | 69863 |
| CAASSGSGNTGKLIF | 42 | 11 | None | | 69864 |
| CGTWDSSLTPG | 2959 | 11 | None | | 69865 |
| COSADITGTYVIF | 620 | 11 | None | | 23167 |
| CDSSVTERNPSWHSAPALRAFVSRLCMRVTRARAPSF | 41 | 11 | None | | 69866 |
| PRAKEDGF | | | | | |
| CALPICKLCNVTEHIESVVIVVLLSSLSPVSCYTYSV | 50 | 11 | None | | 69867 |
| PNCKLNF | | | | | |
| CALPIWNPSWHSAPALRAFVSRLCMRVTRARAPSFPR | 41 | 11 | None | | 69868 |
| AKEDGF | | | | | |
| CALPISERNPSWHSAPALRAFVSRLCMRVTRARAPSF | 41 | 11 | None | | 69869 |
| PRAKEDGF | | | | | |
| CAATYSSASKIIF | 38 | 11 | None | | 69870 |
| CARDMSGDWNWYFDLW | 42 | 10 | None | | 18523 |
| CSSDLQTSSLESCIYMWLDKYLKEKNTKRDSPHSLPP | 94 | 10 | None | | 69871 |
| PTIFFNF | | | | | |
| CGTWDTSLNANWVF | 2956 | 10 | None | | 17640 |
| CSSDLLEGASLPHPEGGPAHHPLLPGVSQPPSPRGEK | 31 | 9 | None | | 69872 |
| LVGEGWLGF | | | | | |
| CQVWHSSGDHPQLVF | 300 | 9 | None | | 8459 |
| CSSDL--GASLPHPEGGPAHHPLLPGVSQPPSPRGEKL | 31 | 9 | None | | 69873 |
| VGEGWLGF | | | | | |
| CALPIWSLEGASLPHPEGGPAHHPLLPGVSQPPSPRG | 31 | 9 | None | | 69874 |
| EKLVGEGWLGF | | | | | |
| CMHGTHWPPRYTF | 3465 | 9 | None | | 23422 |
| CVVRDTGNQFYF | 30 | 9 | None | | 69875 |
| CVRDQRRGYSGYDLDYW | 52 | 9 | None | | 22976 |
| CAVSDLYSSASKIIF | 33 | 9 | None | | 69876 |
| CAVSFYSSASKIIF | 34 | 9 | None | | 69877 |
| CAVRGDSSASKIIF | 32 | 9 | None | | 69878 |
| CSSDLWASLFNQTVFLGLQGPLTPDGHRVPPADHRAW | 162 | 8 | None | | 69879 |
| LSPEGGF | | | | | |
| PCKARLCKVSPLQTEWFKTARMHSSIYNSKAPCTELGF | 61 | 8 | None | | 69880 |
| CALPISRIPTSARGPWWFCGVSGSVLRVGRATKLVLP | 112 | 8 | None | | 69881 |
| SSFQFVF | | | | | |
| CARGYCGGDCYWGS--DAFDWW | 21 | 8 | None | | 5595 |
| CALPISGMEQNRKDPPGPATTSLAPVRGGTLCIGPGS | 32 | 8 | None | | 69882 |
| SSCRQRPRGF | | | | | |
| CSSDLQNRKDPPGPATTSLAPVRGGTLCIGPGSSSCR | 32 | 8 | None | | 69883 |
| QRPRGF | | | | | |
| CSSDLSRIPTSARGPWWFCGVSGSVLRVGRATKLVL | 112 | 8 | None | | 69884 |
| PSSFQFVF | | | | | |
| CALPI-WMEQNRKDPPGPETTSLAPVRGGTLCIGPGSSS | 32 | 8 | None | | 69885 |
| CRQRPRGF | | | | | |
| CALPISGMEQNRKDPPGPETTSLAPVRGGTLCIGPGS | 32 | 8 | None | | 69886 |
| SSCRQRPRGF | | | | | |
| MEQNRKDPPGPATTSLAPVRGGTLCIGPGSSSCRQRPR | 32 | 8 | None | | 69887 |
| GF | | | | | |
| CYLTDSSINHRV | 7359 | 7 | None | | 69888 |
| CALPIC--VGLSLLPVPSHLVHEPRSWSLVLEAAVMS | 36 | 7 | None | | 69889 |
| GTGICLAF | | | | | |
| CALPISPAYIIMSFSLITHFTANETQARRTERWPSSH | 21 | 7 | None | | 69890 |
| RNRTSWDSCF | | | | | |
| CLLKTTVLSFMQCFCTETAVSCQCTVNGRKTNKMSFQV | 75 | 7 | None | | 69891 |
| FLRDGF | | | | | |
| CALPISGFYYTGLYSEIFFIILLTIDRYLAIVHAVFAL | 34 | 7 | None | | 69892 |
| RARTVTF | | | | | |
| CAASYSSNTGKLIF | 32 | 7 | None | | 69893 |
| CALPIWGLGVGLSLLPVPSHLVHEPRSWSIVLEAAVM | 36 | 7 | None | | 69894 |
| SGTGICLAF | | | | | |
| CALPILGVGLSLLPVPSHLVHEPRSWSLVLEAAVMSG | 36 | 7 | None | | 69895 |
| TGICLAF | | | | | |
| CALPICLGVGLSLLPVPSHLVHEPRSWSLVLEAAVMS | 36 | 7 | None | | 69896 |
| GTGICLAF | | | | | |
| CALPIYIIMSFSLITHFTANETQARRTERWPSSHRN | 21 | 7 | None | | 69897 |
| RTSWDSCF | | | | | |
| CALPISYIIMSFSLITHFTANETQARRTERWPSSHR | 21 | 7 | None | | 69898 |
| NRTSWDSCF | | | | | |
| CALPIAYIIMSFSLITHFTANETQARRTERWPSSHR | 21 | 7 | None | | 69899 |
| NRTSWDSCF | | | | | |
| CAKGDCSGGSCYDY 915 81 | None | None | None | | 69766 |

LENGTHY TABLES
The patent application contains a lengthy table section. A copy of the table is available in electronic form from the USPTO web site (https://seqdata.uspto.gov/?pageRequest=docDetail&DocID=US20250034234A1). An electronic copy of the table will also be available from the USPTO upon request and payment of the fee set forth in 37 CFR 1.19(b)(3).

1. A method for treating COVID-19 in patients, comprising the steps of:
(a) identifying antibodies produced by COVID-19 patients, using a structural classification of COVID-19 antibodies to categorize potential efficacious antibodies;
(b) identifying patients who lack certain types of antibodies to COVID-19;
(c) identifying critical intervention time in the patients who lack the certain types of antibodies to COVID-19 patients when the patients have reduced levels of COVID-19 antibodies; and
(d) administering to the patients a therapy that is efficacious for treating COVID-19 patients.

2. The method of claim 1, wherein the antibodies are generated by patients that survived severe COVID-19.

3. A method for treating COVID-19 patients, comprising the step of administering to the COVID-19 patient a therapeutic antibody comprising one or more antibodies from TABLE 6.

4. A method for treating COVID-19 patients, comprising the step of administering to the COVID-19 patient a therapeutic antibody comprising one or more antibodies from TABLE A4.

5. A method of testing for the presence in a patient of bacteria that can cause bacteremia using a direct from blood, without the need for culture, reverse transcriptase polymerase chain reaction (RT-qPCR) assay, comprising the steps of:
(a) obtaining RNA identified from patients with bacteremia;
(b) identifying the bacteria correlating with the obtained RNA; and
(c) identifying the presence of bacteria in bacteremia patients using the RT-qPCR) assay.

6. The method of claim 5, wherein the bacteria are selected from the group consisting of Staphylococcus aureus, Escherichia coli, and Pseudomonas aeruginosa.

7. The method of claim 5, further comprising the step of validating the RT-qPCR assays in samples from patients with and without bacteremia.

8. A method of testing for the presence in a patient of bacteria that can cause pneumonia using a direct from blood, without the need for culture, reverse transcriptase polymerase chain reaction (RT-qPCR) assay, comprising the steps of:
(a) obtaining RNA identified from patients with pneumonia;
(b) identifying the bacteria correlating with the obtained RNA; and
(c) identifying the presence of bacteria in pneumonia patients using the RT-qPCR) assay.

9. The method of claim 8, wherein the bacteria are selected from the group consisting of Staphylococcus aureus, Pseudomonas aeruginosa, and Haemophilus influenzae.

10. The method of claim 8, further comprising the step of validating the RT-qPCR assays in samples from patients with and without pneumonia.

11. A method of testing for the presence in a patient of bacteria that contain expressed resistance genes that would influence antibacterial treatment using a direct from blood, without the need for culture, reverse transcriptase polymerase chain reaction (RT-qPCR) assay, comprising the steps of:
(a) obtaining RNA identified from patients with a bacterial infection;
(b) identifying the expressed resistance genes correlating with the obtained RNA; and
(c) identifying the presence of bacteria that contain expressed resistance genes in patients using the RT-qPCR) assay.

12. The method of claim 11, wherein the bacteria are selected from the group consisting of Staphylococcus aureus, Escherichia coli, Pseudomonas aeruginosa, and Haemophilus influenzae.

13. The method of claim 11, further comprising the step of validating the RT-qPCR assays for resistance genes in samples from patients with and without infections.

The application's sequence listing, which the Patent Office published only in electronic form, follows.

SEQUENCE LISTING (69899 sequences)

SEQ ID NO: 1 - protein, 10 aa, synthetic construct
CQQYNNYWAF

SEQ ID NO: 2 - protein, 10 aa, Homo sapiens
CQQYNNYWAF

SEQ ID NO: 3 - protein, 12 aa, Homo sapiens [sequence omitted]

SEQ ID NO: 4 - protein, 8 aa, Homo sapiens [sequence omitted]

SEQ ID NO: 5 - protein, 10 aa, Homo sapiens [sequence omitted]

SEQ ID NO: 6 - protein, 13 aa, Homo sapiens [sequence omitted]

SEQ ID NO: 7 - protein, 13 aa, Homo sapiens [sequence omitted]

SEQ ID NO: 8 - protein, 12 aa, Homo sapiens
CQQLNSYPGGTF

SEQ ID NO: 9 - protein, 11 aa, Homo sapiens [sequence omitted]

SEQ ID NO: 10 - protein, 11 aa, Homo sapiens [sequence omitted]

SEQ ID NO: 11 - protein, 8 aa, Homo sapiens [sequence omitted]

SEQ ID NO: 12 - protein, 10 aa, Homo sapiens [sequence omitted]

SEQ ID NO: 13 - protein, 11 aa, Homo sapiens [sequence omitted]

SEQ ID NO: 14 - protein, 11 aa, Homo sapiens [sequence omitted]

SEQ ID NO: 15 - protein, 12 aa, Homo sapiens [sequence omitted]

SEQ ID NO: 16 - protein, 7 aa, Homo sapiens
CHQYNNW

SEQ ID NO: 17 - protein, 10 aa, Homo sapiens
CQQFNTWPPE

SEQ ID NO: 18 - protein, 11 aa, Homo sapiens
CQQYQTWPPLF

SEQ ID NO: 19 - protein, 13 aa, Homo sapiens
CQQFNNWPPGFSF

SEQ ID NO: 20 - protein, 12 aa, Homo sapiens
CQQYNTYSQHTF

SEQ ID NO: 21 - protein, 10 aa, Homo sapiens [sequence omitted]

SEQ ID NO: 22 - protein, 13 aa, Homo sapiens [sequence omitted]

SEQ ID NO: 23 - protein, 13 aa, Homo sapiens [sequence omitted]

SEQ ID NO: 24 - protein, 13 aa, Homo sapiens [sequence omitted]

SEQ ID NO: 25 - protein, 13 aa, Homo sapiens [sequence omitted]

SEQ ID NO: 26 - protein, 13 aa, Homo sapiens [sequence omitted]

SEQ ID NO: 27 - protein, 15 aa, Homo sapiens
CAAWNDSLSGPNWVF

SEQ ID NO: 28 - protein, 14 aa, Homo sapiens
CATWDDSLNGYAVF

SEQ ID NO: 29 - protein, 14 aa, Homo sapiens [sequence omitted]

SEQ ID NO: 30 - protein, 15 aa, Homo sapiens
CATWDDTLSGLNWVF

SEQ ID NO: 31 - protein, 11 aa, Homo sapiens
CAGYGDYSDYW

SEQ ID NO: 32 - protein, 11 aa, Homo sapiens
CQSVDSSGIYI

SEQ ID NO: 33 - protein, 15 aa, Homo sapiens [sequence omitted]

SEQ ID NO: 34 - protein, 12 aa, Homo sapiens [sequence omitted]

SEQ ID NO: 35 - protein, 12 aa, Homo sapiens
CQQYYTTPMYAF

SEQ ID NO: 36 - protein, 11 aa, Homo sapiens [sequence omitted]

SEQ ID NO: 37 - protein, 12 aa, Homo sapiens [sequence omitted]

SEQ ID NO: 38 - protein, 15 aa, Homo sapiens
CQSADTSGTYGNWVF

SEQ ID NO: 39 - protein, 15 aa, Homo sapiens
CQSADTSGPYRDVVF

SEQ ID NO: 40 - protein, 12 aa, Homo sapiens
CQSPDSSATYQV

SEQ ID NO: 41 - protein, 13 aa, Homo sapiens
CQSADNSGSYGIF

SEQ ID NO: 42 - protein, 10 aa, Homo sapiens [sequence omitted]

SEQ ID NO: 43 - protein, 14 aa, Homo sapiens
CQSADSSGTYKMLF

SEQ ID NO: 44 - protein, 11 aa, Homo sapiens
CQRYNNYPYIF

SEQ ID NO: 45 - protein, 11 aa, Homo sapiens
CQRYNTAPYTF

SEQ ID NO: 46 - protein, 11 aa, Homo sapiens
CQQVYDTPRTF

SEQ ID NO: 47 - protein, 12 aa, Homo sapiens
CMQGTHWPPIIF

SEQ ID NO: 48 - protein, 12 aa, Homo sapiens
CIQGTHWPPSAF

SEQ ID NO: 49 - protein, 12 aa, Homo sapiens [sequence omitted]

SEQ ID NO: 50 - protein, 11 aa, Homo sapiens [sequence omitted]

SEQ ID NO: 51 - protein, 11 aa, Homo sapiens [sequence omitted]

SEQ ID NO: 52 - protein, 13 aa, Homo sapiens [sequence omitted]

SEQ ID NO: 53 - protein, 13 aa, Homo sapiens [sequence omitted]

SEQ ID NO: 54 - protein, 9 aa, Homo sapiens [sequence omitted]

SEQ ID NO: 55 - protein, 11 aa, Homo sapiens
CSSYEGSNNFV

SEQ ID NO: 56 - protein, 10 aa, Homo sapiens
CQQLNSYPPY

SEQ ID NO: 57 - protein, 9 aa, Homo sapiens
CQQYYSTPY

SEQ ID NO: 58 - protein, 9 aa, Homo sapiens [sequence omitted]

SEQ ID NO: 59 - protein, 9 aa, Homo sapiens
CQQYGTTPR

SEQ ID NO: 60 - protein, 11 aa, Homo sapiens
CSSYTSSSTSV

SEQ ID NO: 61 - protein, 10 aa, Homo sapiens
CCSYAGSSTL

SEQ ID NO: 62 - protein, 10 aa, Homo sapiens
CSSYTSSSTR

SEQ ID NO: 63 - protein, 10 aa, Homo sapiens
CCSYAGSSTW

SEQ ID NO: 64 - protein, 10 aa, Homo sapiens
CSSYAGSNNL

SEQ ID NO: 65 - protein, 9 aa, Homo sapiens
CQQYNSYPY

SEQ ID NO: 66 - protein, 9 aa, Homo sapiens
CQQYNSYPW

SEQ ID NO: 67 - protein, 8 aa, Homo sapiens
CQQHDTSL

SEQ ID NO: 68 - protein, 9 aa, Homo sapiens [sequence omitted]

SEQ ID NO: 69 - protein, 10 aa, Homo sapiens
CQQSYSTLAL

SEQ ID NO: 70 - protein, 10 aa, Homo sapiens
CQQSYVSPTY

SEQ ID NO: 71 - protein, 11 aa, Homo sapiens
CQSYDSSNHVV

SEQ ID NO: 72 - protein, 18 aa, Homo sapiens
CARDRDSGSSVSVYFDLW

SEQ ID NO: 73 - protein, 20 aa, Homo sapiens
CARGWKVATIFNYYYGMDVW

SEQ ID NO: 74 - protein, 13 aa, Homo sapiens
CSVSYWNDVFDYW

SEQ ID NO: 75 - protein, 18 aa, Homo sapiens
CTTSLQYRYSGSYPLDYW

SEQ ID NO: 76 - protein, 22 aa, Homo sapiens
CARDHSMVRGVRYYYYYGMDVW

SEQ ID NO: 77 - protein, 22 aa, Homo sapiens
CARLPPFLDQPYYYDSMFFDYW

SEQ ID NO: 78 - protein, 13 aa, Homo sapiens
CASAGSGSYQDYW

SEQ ID NO: 79 - protein, 20 aa, Homo sapiens
CARSRDGYIASWEAYYFDYW

SEQ ID NO: 80 - protein, 11 aa, Homo sapiens
CMHGTHWSYRF

SEQ ID NO: 81 - protein, 15 aa, Homo sapiens
CASYHGGNSGDFDYW

SEQ ID NO: 82 - protein, 21 aa, Homo sapiens
CARHSGLTMIVVVGPFWFDPW

SEQ ID NO: 83 - protein, 15 aa, Homo sapiens
CARPRWDRFDPFDIW

SEQ ID NO: 84 - protein, 20 aa, Homo sapiens
CAKDLEPHDYHGSGSYLDHW

SEQ ID NO: 85 - protein, 17 aa, Homo sapiens
CVRLGDYGAYLNFFDHW

SEQ ID NO: 86 - protein, 16 aa, Homo sapiens
CARSRDGYNRREFDPW

SEQ ID NO: 87 - protein, 13 aa, Homo sapiens
CAHRRPFVDFDYW

SEQ ID NO: 88 - protein, 17 aa, Homo sapiens
CAREVSYSNSYDVFDTW

SEQ ID NO: 89 - protein, 18 aa, Homo sapiens
CARLPDYRNYQGDWFDPW

SEQ ID NO: 90 - protein, 18 aa, Homo sapiens
CASTRAYIGDDDQSLDYW

SEQ ID NO: 91 - protein, 19 aa, Homo sapiens
CARVRPGHSYGPLHNFDSW

SEQ ID NO: 92 - protein, 18 aa, Homo sapiens
CARASSQWLVKYVWFDPW

SEQ ID NO: 93 - protein, 15 aa, Homo sapiens
CARAKGGYPGWIDPW

SEQ ID NO: 94 - protein, 20 aa, Homo sapiens
CARAAHCSGGNCYAFRFDPW

SEQ ID NO: 95 - protein, 21 aa, Homo sapiens
CARHVLPDYYDNSGYYYFHYW

SEQ ID NO: 96 - protein, 22 aa, Homo sapiens
CARAPWGGYSGNVPRVRSFDDW

SEQ ID NO: 97 - protein, 17 aa, Homo sapiens
CARGQGGYSSGWTFDYW

SEQ ID NO: 98 - protein, 20 aa, Homo sapiens
CARDEYNHPQNYYYYGMDVW

SEQ ID NO: 99 - protein, 19 aa, Homo sapiens
CARDTGDPDRRDGYIPDYW

SEQ ID NO: 100 - protein, 13 aa, Homo sapiens
CVTRRSASYSDYW

SEQ ID NO: 101 - protein, 21 aa, Homo sapiens
CARDPLLRDFDWSYFYYMDVW

SEQ ID NO: 102 - protein, 22 aa, Homo sapiens
CATEAVRFLEWSAYYYYGMDVW

SEQ ID NO: 103 - protein, 24 aa, Homo sapiens
CARGGYHSSGYYYVGVPQEAFDIW

SEQ ID NO: 104 - protein, 17 aa, Homo sapiens
CVKERGSSGWLPAPDYW

SEQ ID NO: 105 - protein, 14 aa, Homo sapiens
CARHEQQGGAFDYW

SEQ ID NO: 106 - protein, 19 aa, Homo sapiens
CARHRGPIHGGKSMPPDYW

SEQ ID NO: 107 - protein, 15 aa, Homo sapiens
CAKDWNYEEYYFDYW

SEQ ID NO: 108 - protein, 15 aa, Homo sapiens
CARELAAAGPPVDYW

SEQ ID NO: 109 - protein, 17 aa, Homo sapiens
CAHRPFWSGYLAWFDPW

SEQ ID NO: 110 - protein, 14 aa, Homo sapiens
CARTLYPGTDFDYW

SEQ ID NO: 111 - protein, 21 aa, Homo sapiens
CARLRARKVFGVVIAGAFDIW

SEQ ID NO: 112 - protein, 33 aa, Homo sapiens
CSLRSEDTAAYYCARLLGYYDRSDYYSNYFDYW

SEQ ID NO: 113 - protein, 21 aa, Homo sapiens
CARGDILTGYYKGYYYGMDVW

SEQ ID NO: 114 - protein, 18 aa, Homo sapiens
CARARRAMTTWAWWFDPW

SEQ ID NO: 115 - protein, 30 aa, Homo sapiens
CALPILRAEDTAVYYCARLYSGSSAWFDPW

SEQ ID NO: 116 - protein, 26 aa, Homo sapiens
CARDAVDFYDFWSGYYTRGKNWFDPW

SEQ ID NO: 117 - protein, 19 aa, Homo sapiens
CARTTVDIVVVTAIIPDYW

SEQ ID NO: 118 - protein, 18 aa, Homo sapiens
CARDPGLVRVADYYFDYW

SEQ ID NO: 119 - protein, 20 aa, Homo sapiens
CARHSYYDSSGYPLFYFDYW

SEQ ID NO: 120 - protein, 18 aa, Homo sapiens
CARDSYSYGSGSYRFDYW

SEQ ID NO: 121 - protein, 9 aa, Homo sapiens
CTTYSADYW

SEQ ID NO: 122 - protein, 18 aa, Homo sapiens
CASEREHIVVVTAILDYW

SEQ ID NO: 123 - protein, 18 aa, Homo sapiens
CAREAGYSSTWYEYLDYW

SEQ ID NO: 124 - protein, 19 aa, Homo sapiens
CAMDTYYYDSRYFGYFDLW

SEQ ID NO: 125 - protein, 23 aa, Homo sapiens
CARVYGSEYSSGWYYYYYYMDVW

SEQ ID NO: 126 - protein, 21 aa, Homo sapiens
CANLGYGDYPEFRYYYYMDVW

SEQ ID NO: 127 - protein, 25 aa, Homo sapiens
CAREGGIEYTTSSGWDYYYYYMEVW

SEQ ID NO: 128 - protein, 20 aa, Homo sapiens
CARLTYYDFWSGYLGYFDYW

SEQ ID NO: 129 - protein, 17 aa, Homo sapiens
CARETEIRGRPNAFDIW

SEQ ID NO: 130 - protein, 19 aa, Homo sapiens
CARDSRYNWNDEAWYFDLW

SEQ ID NO: 131 - protein, 27 aa, Homo sapiens
CARVRHNYIPTIFGVVTDYYYYGMDVW

SEQ ID NO: 132 - protein, 19 aa, Homo sapiens
CARDDADSSADYYYGMDVW

SEQ ID NO: 133 - protein, 19 aa, Homo sapiens
CAKDGAVAGSSHEMGFDYW

SEQ ID NO: 134 - protein, 19 aa, Homo sapiens
CVRRGYSVYDPSKGYMDVW

SEQ ID NO: 135 - protein, 18 aa, Homo sapiens
CAKDPSGLYGDYVGFDYW

SEQ ID NO: 136 - protein, 22 aa, Homo sapiens
CTTGAVAGPGRRFVHYYYMDVW

SEQ ID NO: 137 - protein, 15 aa, Homo sapiens
CAHRSVVPAGWFDPW

SEQ ID NO: 138 - protein, 22 aa, Homo sapiens
CARGGRKVRGVNMLNQYAMDVW

SEQ ID NO: 139 - protein, 18 aa, Homo sapiens
CAKDRLEYSGGYYDFHYW

SEQ ID NO: 140 - protein, 23 aa, Homo sapiens
CAKEPQAIAARLHRYYYYYMDVW

SEQ ID NO: 141 - protein, 26 aa, Homo sapiens
CARANWTKEEMATKQYYYYYYGMDVW

SEQ ID NO: 142 - protein, 23 aa, Homo sapiens
CATDLAGAKRKVGPYYYYYMDVW

SEQ ID NO: 143 - protein, 24 aa, Homo sapiens
CARALLNPGLWFHPTSSAGQFDYW

SEQ ID NO: 144 - protein, 11 aa, Homo sapiens
CQQTYSTLFSF

SEQ ID NO: 145 - protein, 18 aa, Homo sapiens
CAREYYGSGSYDGYFDYW

SEQ ID NO: 146 - protein, 17 aa, Homo sapiens
CAREFAFTLTTTYFDSW

SEQ ID NO: 147 - protein, 21 aa, Homo sapiens
CARGSQFVDFWSGYYTGTDYW

SEQ ID NO: 148 - protein, 12 aa, Homo sapiens
CARDCVAGFDPW

SEQ ID NO: 149 - protein, 14 aa, Homo sapiens
CARSGWYHDDFDIW

SEQ ID NO: 150 - protein, 17 aa, Homo sapiens
CAKDFYGSASPNAFAIW

SEQ ID NO: 151 - protein, 15 aa, Homo sapiens
CARHEGVVPNYFDFW

SEQ ID NO: 152 - protein, 17 aa, Homo sapiens
CAREQDYGSTSGYFQHW

SEQ ID NO: 153 - protein, 16 aa, Homo sapiens
CARDLSSTWPHTFDYW

SEQ ID NO: 154 - protein, 17 aa, Homo sapiens
CAKDMGIPIPKYSFDYW

SEQ ID NO: 155 - protein, 15 aa, Homo sapiens
CARESLAVADAFDIW

SEQ ID NO: 156 - protein, 11 aa, Homo sapiens
CARGLWFFDNW

SEQ ID NO: 157 - protein, 13 aa, Homo sapiens
CARDDPATGNDYW

SEQ ID NO: 158 - protein, 17 aa, Homo sapiens
CARPYLMTTVTTNFDYW

SEQ ID NO: 159 - protein, 25 aa, Homo sapiens
CTTGTDIVLMVYAIGPAHVHAFDIW

SEQ ID NO: 160 - protein, 15 aa, Homo sapiens
CAKDIAYSSGQFDYW

SEQ ID NO: 161 - protein, 19 aa, Homo sapiens
CALPILQLWPRHYWYFDLW

SEQ ID NO: 162 - protein, 14 aa, Homo sapiens
CVTSGWYPTDFKYW

SEQ ID NO: 163 - protein, 28 aa, Homo sapiens
CTLFPYTTLFRSFTYYYDSAGFRYLDYW

SEQ ID NO: 164 - protein, 14 aa, Homo sapiens
CARHVDDDRWFDPW

SEQ ID NO: 165 - protein, 11 aa, Homo sapiens
CMIWPSSAVVF

SEQ ID NO: 166 - protein, 18 aa, Homo sapiens
CARDFGVFDYAWSYFDFW

SEQ ID NO: 167 - protein, 17 aa, Homo sapiens
CARDALYDILTGYYTYW

SEQ ID NO: 168 - protein, 16 aa, Homo sapiens
CAKDREPDGRWDIDYW

SEQ ID NO: 169 - protein, 20 aa, Homo sapiens
CAKPPSSYDSSGYDNYFDYW

SEQ ID NO: 170 - protein, 19 aa, Homo sapiens
CARQVTTVGKPGAVAFDIW

SEQ ID NO: 171 - protein, 20 aa, Homo sapiens
CATSPYSSGWYRPPYYFDYW

SEQ ID NO: 172 - protein, 16 aa, Homo sapiens
CVVNGEADGYRRFDYW

SEQ ID NO: 173 - protein, 15 aa, Homo sapiens
CVTGGGTSSRGFDYW

SEQ ID NO: 174 - protein, 20 aa, Homo sapiens
CARVLDYYDSSGYNWYFDLW

SEQ ID NO: 175 - protein, 21 aa, Homo sapiens
CSRGRMYYDFWSGYNNWFDPW

SEQ ID NO: 176 - protein, 16 aa, Homo sapiens
CARHPFDYDTPNFDYW

SEQ ID NO: 177 - protein, 23 aa, Homo sapiens
CARAGYYDFWSGYPNPDRFFDYW

SEQ ID NO: 178 - protein, 15 aa, Homo sapiens
CNSRDSNGNHPSYVF

SEQ ID NO: 179 - protein, 13 aa, Homo sapiens
CARGPRWLLYFYW

SEQ ID NO: 180 - protein, 14 aa, Homo sapiens
CQSADISGTYRYVF

SEQ ID NO: 181 - protein, 13 aa, Homo sapiens
CARDYSDWYLDYW

SEQ ID NO: 182 - protein, 16 aa, Homo sapiens
CARGRAVGASEYFQHW

SEQ ID NO: 183 - protein, 13 aa, Homo sapiens
CNSRDPSYNHILF

SEQ ID NO: 184 - protein, 14 aa, Homo sapiens
CAKIAARLEAFDVW

SEQ ID NO: 185 - protein, 13 aa, Homo sapiens
CLSADSSGIPVVF

SEQ ID NO: 186 - protein, 20 aa, Homo sapiens
CAREYYYDSSGYYDSLFDYW

SEQ ID NO: 187 - protein, 21 aa, Homo sapiens
CAKDKIPGVLVNHYYYGMDVW

SEQ ID NO: 188 - protein, 17 aa, Homo sapiens
CATGTPHYYYYYGMDVW

SEQ ID NO: 189 - protein, 21 aa, Homo sapiens
CATPLQITAAGIRGLDAFGIW

SEQ ID NO: 190 - protein, 17 aa, Homo sapiens
CVREGYSSGRAPAFDLW

SEQ ID NO: 191 - protein, 16 aa, Homo sapiens
CARVGSGWWQWYFDYW

SEQ ID NO: 192 - protein, 17 aa, Homo sapiens
CARRRWTPYYYYGMDVW

SEQ ID NO: 193 - protein, 20 aa, Homo sapiens
CVRDRIVLVPAAIRFYFDYW

SEQ ID NO: 194 - protein, 16 aa, Homo sapiens
CAIGLDDNRGYFYDYW

SEQ ID NO: 195 - protein, 16 aa, Homo sapiens
CATSSVLRFSNWFDPW

SEQ ID NO: 196 - protein, 22 aa, Homo sapiens
CARLRSITIFGVVTQGTYMDVW

SEQ ID NO: 197 - protein, 18 aa, Homo sapiens
CARVGQLRHFDWPYFDYW

SEQ ID NO: 198 - protein, 20 aa, Homo sapiens
CTRGHSYYDSGGYHSYFDYW

SEQ ID NO: 199 - protein, 12 aa, Homo sapiens [sequence omitted]

SEQ ID NO: 200 - protein, 19 aa, Homo sapiens
CAKGDIVLMVYDPHAFDIW

SEQ ID NO: 201 - protein, 17 aa, Homo sapiens
CATTSVIVGPRGWFDPW

SEQ ID NO: 202 - protein, 19 aa, Homo sapiens
CAREVRGVIIKGFNWFDPW

SEQ ID NO: 203 - protein, 16 aa, Homo sapiens
CAGSEDSSAYSEFDSW

SEQ ID NO: 204 - protein, 27 aa, Homo sapiens
CARGGATLDTIFGVVIIDEKSIVFDYW

SEQ ID NO: 205 - protein, 24 aa, Homo sapiens
CATAPPIDSSGSNPIYYYYGMDVW

SEQ ID NO: 206 - protein, 29 aa, Homo sapiens
CTLFPYTTLFRSYDFWSGYSLAANWFDPW

SEQ ID NO: 207 - protein, 14 aa, Homo sapiens
CAKGNVFIRLTDYW

SEQ ID NO: 208 - protein, 20 aa, Homo sapiens
CARDGNDFWNDRYYYYMDVW

SEQ ID NO: 209 - protein, 24 aa, Homo sapiens
CTRAAVAGTWFYSKNYYYYYMDVW

SEQ ID NO: 210 - protein, 14 aa, Homo sapiens
CSSYTTSNTLNVLF

SEQ ID NO: 211 - protein, 20 aa, Homo sapiens
CARLMVYAMGYYYYYGMDVW

SEQ ID NO: 212 - protein, 20 aa, Homo sapiens
CARNRPGEMEFYYYHGMDVW

SEQ ID NO: 213 - protein, 23 aa, Homo sapiens
CAKDGDYDILTGFPGEAYYFDYW

SEQ ID NO: 214 - protein, 14 aa, Homo sapiens
CAILPDYGDLLDYW

SEQ ID NO: 215 - protein, 18 aa, Homo sapiens
CATPDGYNSDYYYYMDVW

SEQ ID NO: 216 - protein, 20 aa, Homo sapiens
CARGIPQWLASNYYYYMDVW

SEQ ID NO: 217 - protein, 19 aa, Homo sapiens
CARGGDSRYSYGIYYFDYW

SEQ ID NO: 218 - protein, 13 aa, Homo sapiens
CATASAYWYFDLW

SEQ ID NO: 219 - protein, 23 aa, Homo sapiens
CARRYYDSSGYYYSYYYYYMDVW

SEQ ID NO: 220 - protein, 17 aa, Homo sapiens
CTTYGSSSGWYSSFDYW

SEQ ID NO: 221 - protein, 26 aa, Homo sapiens
CARDTFRDPTPEYSGSYQGLGAFDIW

SEQ ID NO: 222 - protein, 12 aa, Homo sapiens
CQVWASSGACVF

SEQ ID NO: 223 - protein, 12 aa, Homo sapiens
CASIAEDYFDYW

SEQ ID NO: 224 - protein, 15 aa, Homo sapiens
CARVFAVADSCFDYW

SEQ ID NO: 225 - protein, 16 aa, Homo sapiens
CARVYSSGWSDAFDIW

SEQ ID NO: 226 - protein, 22 aa, Homo sapiens
CARGEYFYDGSGYYSYWYFDLW

SEQ ID NO: 227 - protein, 17 aa, Homo sapiens
CATTTPLIYGSSSFDHW

SEQ ID NO: 228 - protein, 19 aa, Homo sapiens
CARPSLSDSYGPVDAFNVW

SEQ ID NO: 229 - protein, 14 aa, Homo sapiens
CAKSPGGDNWFDPW

SEQ ID NO: 230 - protein, 17 aa, Homo sapiens
CARHSLLSEYYYAMDVW

SEQ ID NO: 231 - protein, 13 aa, Homo sapiens
CQVWDSSSLQELF

SEQ ID NO: 232 - protein, 19 aa, Homo sapiens
CARSLSGVTMIVTNWFDPW

SEQ ID NO: 233 - protein, 13 aa, Homo sapiens
CAKLVDKHIFDFW

SEQ ID NO: 234 - protein, 16 aa, Homo sapiens
CARGLIDSSGYYPDYW

SEQ ID NO: 235 - protein, 13 aa, Homo sapiens [sequence omitted]

SEQ ID NO: 236 - protein, 18 aa, Homo sapiens
CARFNFFDSGGNNWFDSW

SEQ ID NO: 237 - protein, 19 aa, Homo sapiens
CARTSITIFGATYWYFDLW

SEQ ID NO: 238 - protein, 23 aa, Homo sapiens
CARMVRFFEWPPSPRDNYYMDVW

SEQ ID NO: 239 - protein, 20 aa, Homo sapiens
CAKDSPYYDFWSGSQYFQHW

SEQ ID NO: 240 - protein, 18 aa, Homo sapiens
CAKTRSGDFWIIGDFDYW

SEQ ID NO: 241 - protein, 13 aa, Homo sapiens
CANLAAAGRTDYW

SEQ ID NO: 242 - protein, 21 aa, Homo sapiens
CARAPNYYDSSGYPLDAFDIW

SEQ ID NO: 243 - protein, 21 aa, Homo sapiens
CASSKRITMIVVVKSDAFDIW

SEQ ID NO: 244 - protein, 18 aa, Homo sapiens
CARDPGWYYYDSSGLDYW

SEQ ID NO: 245 - protein, 16 aa, Homo sapiens
CAKDFQTTVTTWFDYW

SEQ ID NO: 246 - protein, 15 aa, Homo sapiens
CARTEMATIWGFDFW

SEQ ID NO: 247 - protein, 18 aa, Homo sapiens
CARHKTGFLEWDNWFDPW

SEQ ID NO: 248 - protein, 16 aa, Homo sapiens
CARGYLNWFGHWFDPW

SEQ ID NO: 249 - protein, 22 aa, Homo sapiens
CARASGRITIFGVVIMGAFDIW

SEQ ID NO: 250 - protein, 15 aa, Homo sapiens
CARPLRDGYYPFDCW

SEQ ID NO: 251 - protein, 15 aa, Homo sapiens
CASPRGYSYGPLDYW

SEQ ID NO: 252 - protein, 19 aa, Homo sapiens
CARDGINSHFHGYYYMDVW

SEQ ID NO: 253 - protein, 16 aa, Homo sapiens
CARDDGLGDLEWFDPW

SEQ ID NO: 254 - protein, 20 aa, Homo sapiens
CARGGGHYDSGAYYHFFDYW

SEQ ID NO: 255 - protein, 22 aa, Homo sapiens
CAREDCSGGSCYSNYYYGMDVW

SEQ ID NO: 256 - protein, 18 aa, Homo sapiens
CASQVAQYLDLLLPFDHW

SEQ ID NO: 257 - protein, 17 aa, Homo sapiens
CARGGFTGYTRSRFDYW

SEQ ID NO: 258 - protein, 17 aa, Homo sapiens
CAHRQHGFWSGYWFDPW

SEQ ID NO: 259 - protein, 15 aa, Homo sapiens
CARAALGMWSYFDYW

SEQ ID NO: 260 - protein, 18 aa, Homo sapiens
CATNELRYFDWFSPFDHW

SEQ ID NO: 261 - protein, 19 aa, Homo sapiens
CAKGGYCSGGSCDNWFDPW

SEQ ID NO: 262 - protein, 17 aa, Homo sapiens
CARHGPLWEPIFYFDYW

SEQ ID NO: 263 - protein, 17 aa, Homo sapiens
CARLLGVSSSPDQPDYW

SEQ ID NO: 264 - protein, 19 aa, Homo sapiens
CARDWGLVRAVPDDAFDYW

SEQ ID NO: 265 - protein, 19 aa, Homo sapiens
CARIGDDFWSGYPYYFDYW

SEQ ID NO: 266 - protein, 14 aa, Homo sapiens
CAKLGELAGPFDYW

SEQ ID NO: 267 - protein, 23 aa, Homo sapiens
CAKGARITMIVVVITTFGYFDYW

SEQ ID NO: 268 - protein, 15 aa, Homo sapiens
CAKKGTDFWSGFDYW

SEQ ID NO: 269 - protein, 22 aa, Homo sapiens
CTTDYDSSGYYYLYYYYGMDVW

SEQ ID NO: 270 - protein, 19 aa, Homo sapiens
CARRGYCGTTNCYAWFDPW

SEQ ID NO: 271 - protein, 23 aa, Homo sapiens
CAGKDLGVITYHSYYYTYGLDVW

SEQ ID NO: 272 - protein, 20 aa, Homo sapiens
CARGLDIVVVTATLGWFDPW

SEQ ID NO: 273 - protein, 15 aa, Homo sapiens
CARLKDYRNYYFDYW

SEQ ID NO: 274 - protein, 21 aa, Homo sapiens
CARDRIATGDRGLGGDYFDSW

SEQ ID NO: 275 - protein, 21 aa, Homo sapiens
CARVLRGYSGYDLYYYYMDVW

SEQ ID NO: 276 - protein, 20 aa, Homo sapiens
CAKADGVWMRSGRSCLPDYW

SEQ ID NO: 277 - protein, 15 aa, Homo sapiens
CARDSYPNPNPFDYW

SEQ ID NO: 278 - protein, 21 aa, Homo sapiens
CARDIFNYVAPLYYYYGMDVW

SEQ ID NO: 279 - protein, 19 aa, Homo sapiens
CARVYRYSPRPYQYYLDYW

SEQ ID NO: 280 - protein, 25 aa, Homo sapiens
CARHHGGVVPAAMGRVYYYYGMDVW

SEQ ID NO: 281 - protein, 18 aa, Homo sapiens
CARGIPRVRGVLNWFDPW

SEQ ID NO: 282 - protein, 19 aa, Homo sapiens
CAKSATLLTTVQGWYFDYW

SEQ ID NO: 283 - protein, 19 aa, Homo sapiens
CAKDMNSGYDPGPNWFDPW

SEQ ID NO: 284 - protein, 12 aa, Homo sapiens
CAKDGRGGTDYW

SEQ ID NO: 285 - protein, 14 aa, Homo sapiens
CARDTHSPMRADYW

SEQ ID NO: 286 - protein, 16 aa, Homo sapiens
CARDSGPGYSYALDYW

SEQ ID NO: 287 - protein, 16 aa, Homo sapiens
CARPRVSTRGAIYDYW

SEQ ID NO: 288 - protein, 20 aa, Homo sapiens
CAKDLYCSSTSCYSDGMDVW

SEQ ID NO: 289 - protein, 12 aa, Homo sapiens
CQQCDSVSTWTF

SEQ ID NO: 290 - protein, 22 aa, Homo sapiens
CAKDKVGYSYGWVYYYYGMDVW

SEQ ID NO: 291 - protein, 26 aa, Homo sapiens
CTTTVPLEWYYDFWSGYYIVGYFDYW

SEQ ID NO: 292 - protein, 21 aa, Homo sapiens
CARQFAYVWGSSMYYYGMDVW

SEQ ID NO: 293 - protein, 22 aa, Homo sapiens
CARLGKVTIFGVATGGFWFDPW

SEQ ID NO: 294 - protein, 18 aa, Homo sapiens
CATSPGGYSSGWYYFDYW

SEQ ID NO: 295 - protein, 16 aa, Homo sapiens
CAKSRSFDTRGWFDPW

SEQ ID NO: 296 - protein, 17 aa, Homo sapiens
CAKDRGSSGWFFAFDVW

SEQ ID NO: 297 - protein, 14 aa, Homo sapiens
CQQYTFSPPGEFTF

SEQ ID NO: 298 - protein, 13 aa, Homo sapiens
CAKLWAVARVDYW

SEQ ID NO: 299 - protein, 21 aa, Homo sapiens
CARLLVVVVAAALAPDTFDIW

SEQ ID NO: 300 - protein, 22 aa, Homo sapiens
CAKTEITIFGVAMRGYWYFDLW

SEQ ID NO: 301 - protein, 19 aa, Homo sapiens
CAEDPSTYHYDSSGFHDYW

SEQ ID NO: 302 - protein, 17 aa, Homo sapiens
CARGRRDGYRLHYFDSW

SEQ ID NO: 303 - protein, 18 aa, Homo sapiens
CARGSGALWSGYGWFDPW

SEQ ID NO: 304 - protein, 22 aa, Homo sapiens
CVKDRGYCSGASCLLTYALDVW

SEQ ID NO: 305 - protein, 14 aa, Homo sapiens
CAKVGDGYNYGDYW

SEQ ID NO: 306 - protein, 20 aa, Homo sapiens
CAKVVSRSRSSYSFNYTDVW

SEQ ID NO: 307 - protein, 17 aa, Homo sapiens
CAKDPIAGSSGYYYNYW

SEQ ID NO: 308 - protein, 19 aa, Homo sapiens
CTKDMERWLQLARGLFDLW

SEQ ID NO: 309 - protein, 19 aa, Homo sapiens
CARDVPDDYGETLVDGDYW

SEQ ID NO: 310 - protein, 21 aa, Homo sapiens
CASAGRQPLGIHLWDDAFDIW

SEQ ID NO: 311 - protein, 18 aa, Homo sapiens
CARYSLENVAGTPYFDYW

SEQ ID NO: 312 - protein, 19 aa, Homo sapiens
CARHVRRWLQLIPYWFDPW

SEQ ID NO: 313 - protein, 17 aa, Homo sapiens
CTRAPSSTWPRDWFDPW

SEQ ID NO: 314 - protein, 16 aa, Homo sapiens
CAKDILRFSWDGMDVW

SEQ ID NO: 315 - protein, 24 aa, Homo sapiens
CARDGWNYYDSSGYSTRLTGFDYW

SEQ ID NO: 316 - protein, 25 aa, Homo sapiens
CARGSTFCPGGVCSWGLREHWFDPW

SEQ ID NO: 317 - protein, 17 aa, Homo sapiens
CARSAHDFWSGLAFEIW

SEQ ID NO: 318 - protein, 20 aa, Homo sapiens
CARYGTYYYESIGYYYFDYW

SEQ ID NO: 319 - protein, 25 aa, Homo sapiens
CARDSPAGNNQQWLVPTPEYYFDYW

SEQ ID NO: 320 - protein, 13 aa, Homo sapiens
CAHRNWGYAFDIW

SEQ ID NO: 321 - protein, 20 aa, Homo sapiens
CAKPAGGGSGSFGYYYFDLW

SEQ ID NO: 322 - protein, 21 aa, Homo sapiens
CARDGLGLLWFGETVDAFDIW

SEQ ID NO: 323 - protein, 20 aa, Homo sapiens
CARTAGKYNYGPSGRYFDLW

SEQ ID NO: 324 - protein, 14 aa, Homo sapiens
CARAWDWGSLIDYW

SEQ ID NO: 325 - protein, 19 aa, Homo sapiens
CARANLVPRDGYNSPFDYW

SEQ ID NO: 326 - protein, 15 aa, Homo sapiens
CAHRPSGWIDAFDIW

SEQ ID NO: 327 - protein, 12 aa, Homo sapiens
CARVEARNFDYW

SEQ ID NO: 328 - protein, 22 aa, Homo sapiens
CAKANFQLERLGYYYYYYMDVW

SEQ ID NO: 329 - protein, 30 aa, Homo sapiens
CARVVEDIVVLPAAMAHGEDYSYYYAMDVW

SEQ ID NO: 330 - protein, 24 aa, Homo sapiens
CAKAPTEYSGYDSSTYSYYGMDVW

SEQ ID NO: 331 - protein, 14 aa, Homo sapiens
CARERVWRDGFDIW

SEQ ID NO: 332 - protein, 16 aa, Homo sapiens
CAKSVTWMLYNWFDPW

SEQ ID NO: 333 - protein, 19 aa, Homo sapiens
CARGVCVIATTCEGHFDYW

SEQ ID NO: 334 - protein, 13 aa, Homo sapiens
CSRTNCPVNFDYW

SEQ ID NO: 335 - protein, 15 aa, Homo sapiens
CVRDPDTGSFYADYW

SEQ ID NO: 336 - protein, 15 aa, Homo sapiens
CTTYYYHSDGFSDYW

SEQ ID NO: 337 - protein, 16 aa, Homo sapiens
CARDRLQLLSSAFDYW

SEQ ID NO: 338 - protein, 14 aa, Homo sapiens
CQSYDTSLNGDGVF

SEQ ID NO: 339 - protein, 24 aa, Homo sapiens
CARDVDDILTGYSRPYYYYYMDVW

SEQ ID NO: 340 - protein, 18 aa, Homo sapiens
CARGAPGQQLWLVYFDYW

SEQ ID NO: 341 - protein, 17 aa, Homo sapiens
CVKHLNYGVRTSNFDYW

SEQ ID NO: 342 - protein, 16 aa, Homo sapiens
CAKGEVGARADAFDIW

SEQ ID NO: 343 - protein, 17 aa, Homo sapiens
CARLYDSSGYYGRDDYW

SEQ ID NO: 344 - protein, 14 aa, Homo sapiens
CARRGDNYGEFDYW

SEQ ID NO: 345 - protein, 15 aa, Homo sapiens
CARPTHYDFSSFDIW

SEQ ID NO: 346 - protein, 24 aa, Homo sapiens
CARGMGIAVAGTLIFYYYYYMDVW

SEQ ID NO: 347 - protein, 16 aa, Homo sapiens
CARDSIAARQWVFVYW

SEQ ID NO: 348 - protein, 16 aa, Homo sapiens
CARELAKTGYTGFDYW

SEQ ID NO: 349 - protein, 17 aa, Homo sapiens
CATLGGDYVWGSYPGYW

SEQ ID NO: 350 - protein, 16 aa, Homo sapiens
CAKGLNWNDANHFDYW

SEQ ID NO: 351 - protein, 18 aa, Homo sapiens
CAKDAGDYYDSSASFDYW

SEQ ID NO: 352 - protein, 14 aa, Homo sapiens
CARLPLMVYALDYW

SEQ ID NO: 353 - protein, 23 aa, Homo sapiens
CTLFPYTTLFRSSDSYFVWFDPW

SEQ ID NO: 354 - protein, 18 aa, Homo sapiens
CARGPRIAAAGFNWFDPW

SEQ ID NO: 355 - protein, 18 aa, Homo sapiens
CAKESGVATITDDAFDIW

SEQ ID NO: 356 - protein, 14 aa, Homo sapiens
CARRDTWPHYFDYW

SEQ ID NO: 357 - protein, 18 aa, Homo sapiens
CAKGVVLDYHYYYTMDVW

SEQ ID NO: 358 - protein, 19 aa, Homo sapiens
CARGSLVRLRGAPNFFDPW

SEQ ID NO: 359 - protein, 31 aa, Homo sapiens
CANHKAALGGYYDFWSGYTVPNYYYYYMDVW

SEQ ID NO: 360 - protein, 24 aa, Homo sapiens
CARGRRTITIFGVVIPWPTWFDPW

SEQ ID NO: 361 - protein, 13 aa, Homo sapiens
CANHLRSSFFDYW

SEQ ID NO: 362 - protein, 19 aa, Homo sapiens
CARSPIFVGWSGNYFIDYW

SEQ ID NO: 363 - protein, 19 aa, Homo sapiens
CAKDYLRFLEIYYWYFDLW

SEQ ID NO: 364 - protein, 22 aa, Homo sapiens
CATVFLESPYVGAIYRAYFDYW

SEQ ID NO: 365 - protein, 21 aa, Homo sapiens
CARARPQYCSGGSCYSGFDYW

SEQ ID NO: 366 - protein, 21 aa, Homo sapiens
CARDTFAVTTGFYYYYGMDVW

SEQ ID NO: 367 - protein, 18 aa, Homo sapiens
CAGPYITSILYYFYMDIW

SEQ ID NO: 368 - protein, 21 aa, Homo sapiens
CARHSWTYSSGWYPSLGFDYW

SEQ ID NO: 369 - protein, 18 aa, Homo sapiens
CASSGLYYYDSSGYSDYW

SEQ ID NO: 370 - protein, 12 aa, Homo sapiens
CVRGPTWIYDYW

SEQ ID NO: 371 - protein, 15 aa, Homo sapiens
CARVWSNTWEGYDYW

SEQ ID NO: 372 - protein, 28 aa, Homo sapiens
CARHVSPRGSRGYPVPLGIAAAGTVDYW

SEQ ID NO: 373 - protein, 15 aa, Homo sapiens
CTTVPYYYYYGMDVW

SEQ ID NO: 374 - protein, 22 aa, Homo sapiens
CARETLGSSWKSGYSSGWYDYW

SEQ ID NO: 375 - protein, 21 aa, Homo sapiens
CARDPIIGVGNTYYYYGMDVW

SEQ ID NO: 376 - protein, 19 aa, Homo sapiens
CARGGGSYFLYLGDYFDYW

SEQ ID NO: 377 - protein, 16 aa, Homo sapiens
CQQSYTTPTYISPWTF

SEQ ID NO: 378 - protein, 24 aa, Homo sapiens
CAKDKPKRFLPLTTFGGHYGFDPW

SEQ ID NO: 379 - protein, 15 aa, Homo sapiens
CARSMYSSGYQYDYW

SEQ ID NO: 380 - protein, 14 aa, Homo sapiens
CAREAMNPWRFDYW

SEQ ID NO: 381 - protein, 12 aa, Homo sapiens
CAGLTSGWLDYW

SEQ ID NO: 382 - protein, 20 aa, Homo sapiens
CARHSNMITFGGVIVLFDYW

SEQ ID NO: 383 - protein, 17 aa, Homo sapiens
CARVVRELELPEGFDYW

SEQ ID NO: 384 - protein, 17 aa, Homo sapiens
CARLGRDGYNRSAFDIW

SEQ ID NO: 385 - protein, 23 aa, Homo sapiens
CARGSEVWEEQDSVLVWRGFDIW

SEQ ID NO: 386 - protein, 15 aa, Homo sapiens
CSRLDDQYLVPGDYW

SEQ ID NO: 387 - protein, 25 aa, Homo sapiens
CARVVGALFTIFGVVIIEDGYFDYW

SEQ ID NO: 388 - protein, 15 aa, Homo sapiens
CVKDYGDHYNWFDSW

SEQ ID NO: 389 - protein, 14 aa, Homo sapiens
CAKDKGLDDAFDIW

SEQ ID NO: 390 - protein, 17 aa, Homo sapiens
CAQGGHLAGRISWFDPW

SEQ ID NO: 391 - protein, 22 aa, Homo sapiens
CARDPRTTVTTYYYYYYGMDVW

SEQ ID NO: 392 - protein, 16 aa, Homo sapiens
CARENYYDSSGYFRSW

SEQ ID NO: 393 - protein, 14 aa, Homo sapiens
CATKSTSYWHFDIW

SEQ ID NO: 394 - protein, 18 aa, Homo sapiens
CARMRAYYYDSSGYNDYW

SEQ ID NO: 395 - protein, 31 aa, Homo sapiens
CARVGNGERGYSYGFSAKKYTYYYYYYMDVW

SEQ ID NO: 396 - protein, 18 aa, Homo sapiens
CARGGYMHGYEVWYFDLW

SEQ ID NO: 397 - protein, 21 aa, Homo sapiens
CAREGGHNLASGAYSTSFDYW

SEQ ID NO: 398 - protein, 16 aa, Homo sapiens
CATDVKYYGDSHFDYW

SEQ ID NO: 399 - protein, 32 aa, Homo sapiens
CARHVYEAAPRDPIIGLIIGSDSGDGGWFDPW

SEQ ID NO: 400 - protein, 25 aa, Homo sapiens
CARNGSPDYYDSSGYYPATLYFDLW

SEQ ID NO: 401 - protein, 13 aa, Homo sapiens
CASSRGSRAFDIW

SEQ ID NO: 402 - protein, 15 aa, Homo sapiens
CARSFRPLVDGMDVW

SEQ ID NO: 403 - protein, 14 aa, Homo sapiens
CVKDRTGTFSFDFW

SEQ ID NO: 404 - protein, 17 aa, Homo sapiens
CAKGPIAVAGIFWGDYW

SEQ ID NO: 405 - protein, 18 aa, Homo sapiens
CARGSAYDVLTHGGFDPW

SEQ ID NO: 406 - protein, 19 aa, Homo sapiens
CARHPRDDSSEGLWLFDLW

SEQ ID NO: 407 - protein, 14 aa, Homo sapiens
CAKEGSLAGYMDVW

SEQ ID NO: 408 - protein, 19 aa, Homo sapiens
CAKDIALPRHDASGYLDSW

SEQ ID NO: 409 - protein, 22 aa, Homo sapiens
CARDGRYRYYDSSGYSAYFDYW

SEQ ID NO: 410 - protein, 24 aa, Homo sapiens
CAKDSETLRFLDGRYYYYYYMDVW

SEQ ID NO: 411 - protein, 14 aa, Homo sapiens
CARAQLRGTEFDSW

SEQ ID NO: 412 - protein, 20 aa, Homo sapiens
CARDPATYYYDSSGTYFDYW

SEQ ID NO: 413 - protein, 15 aa, Homo sapiens
CARDTRRRVDAFDIW

SEQ ID NO: 414 - protein, 21 aa, Homo sapiens
CARVSHPSYYYDSSGYAIDYW

SEQ ID NO: 415 - protein, 23 aa, Homo sapiens
CARGGGDSGSFSADRSSFAFDIW

SEQ ID NO: 416 - protein, 19 aa, Homo sapiens
CARGAVVVSTIGPDHFDYW

SEQ ID NO: 417 - protein, 17 aa, Homo sapiens
CAQSVEGNDWGDAFDMW

SEQ ID NO: 418 - protein, 16 aa, Homo sapiens
CARDLGDGYNGEIDYW

SEQ ID NO: 419 - protein, 15 aa, Homo sapiens
CAISDSTISPHPDYW

SEQ ID NO: 420 - protein, 18 aa, Homo sapiens
CAKDQYVSGNALESWDYW

SEQ ID NO: 421 - protein, 18 aa, Homo sapiens
CARELSLYNSRIYSLDYW

SEQ ID NO: 422 - protein, 18 aa, Homo sapiens
CARDRWDSYGLPNYFDYW

SEQ ID NO: 423 - protein, 34 aa, Homo sapiens
CTLFPYTTLFRSAVYYCARDDCSSTSCPAAFGYW

SEQ ID NO: 424 - protein, 19 aa, Homo sapiens
CARSYFSDDSSAFRAFDIW

SEQ ID NO: 425 - protein, 16 aa, Homo sapiens
CARDHQNDGYWYFDLW

SEQ ID NO: 426 - protein, 17 aa, Homo sapiens
CARNTLYGTYEGAFDIW

SEQ ID NO: 427 - protein, 18 aa, Homo sapiens
CAKAPGSGWYAENAFDIW

SEQ ID NO: 428 - protein, 14 aa, Homo sapiens
CQERSNWPPVSITF

SEQ ID NO: 429 - protein, 15 aa, Homo sapiens
CARAVSWFSPGFDFW

SEQ ID NO: 430 - protein, 22 aa, Homo sapiens
CARLPYVGYYYSGGFLTGIDYW

SEQ ID NO: 431 - protein, 18 aa, Homo sapiens
CAKAGGSYAFVFSWFDPW

SEQ ID NO: 432 - protein, 13 aa, Homo sapiens
CAREIRRGWLDPW

SEQ ID NO: 433 - protein, 17 aa, Homo sapiens
CARHSYSGELSLYPDYW

SEQ ID NO: 434 - protein, 19 aa, Homo sapiens
CARSRHDSSSWYGYYFDYW

SEQ ID NO: 435 - protein, 24 aa, Homo sapiens
CARQGATGDYDSSGYYPDRSFDYW

SEQ ID NO: 436 - protein, 12 aa, Homo sapiens
CAKDSSYGADYW

SEQ ID NO: 437 - protein, 15 aa, Homo sapiens
CARHPGSSLYLIDYW

SEQ ID NO: 438 - protein, 19 aa, Homo sapiens
CAHSLLDIVAAITEWFDPW

SEQ ID NO: 439 - protein, 14 aa, Homo sapiens
CARDHGLQLVFDYW

SEQ ID NO: 440 - protein, 22 aa, Homo sapiens
CAREVGGLATKKLYYYYYMDVW

SEQ ID NO: 441 - protein, 21 aa, Homo sapiens
CARHPSRSGYYYVGDYYFDYW

SEQ ID NO: 442 - protein, 12 aa, Homo sapiens
CQQYHDWPLLTF

SEQ ID NO: 443 - protein, 19 aa, Homo sapiens
CAKAWDTMVRGVITLFDSW

SEQ ID NO: 444 - protein, 18 aa, Homo sapiens
CVRDTSIAARHYYYMDVW

SEQ ID NO: 445 - protein, 14 aa, Homo sapiens [sequence omitted]

SEQ ID NO: 446 - protein, 13 aa, Homo sapiens
CVRNSEHNWFDPW

SEQ ID NO: 447 - protein, 15 aa, Homo sapiens
CARNMEMNLGWFDPW

SEQ ID NO: 448 - protein, 8 aa, Homo sapiens
CMRIFGYW

SEQ ID NO: 449 - protein, 20 aa, Homo sapiens
CARDPSSRWLLGNSHLFDYW

SEQ ID NO: 450 - protein, 16 aa, Homo sapiens
CARLAGVAPAGPLDYW

SEQ ID NO: 451 - protein, 16 aa, Homo sapiens
CARVVEEAGTPSFDYW

SEQ ID NO: 452 - protein, 17 aa, Homo sapiens
CASYPGSSGPSGGFDYW

SEQ ID NO: 453 - protein, 25 aa, Homo sapiens
CTRGGGGYYDSSGYYFRFDNWFDPW

SEQ ID NO: 454 - protein, 23 aa, Homo sapiens
CARALGYYDSSGYYLSENWFDPW

SEQ ID NO: 455 - protein, 17 aa, Homo sapiens
CARDLRSYSRSSSVDYW

SEQ ID NO: 456 - protein, 19 aa, Homo sapiens
CARISFYSSGYYDWYFDLW

SEQ ID NO: 457 - protein, 20 aa, Homo sapiens
CTLFPYTTLFRSAAANFDYW

SEQ ID NO: 458 - protein, 20 aa, Homo sapiens
CAHGKKDRSGRSGAYYFDYW

SEQ ID NO: 459 - protein, 17 aa, Homo sapiens
CAREYYDSSGYPTIDYW

SEQ ID NO: 460 - protein, 18 aa, Homo sapiens
CARLGSGWYREEYYFDYW

SEQ ID NO: 461 - protein, 21 aa, Homo sapiens
CARDYDYWSGFDYYYYGMDVW

SEQ ID NO: 462 - protein, 23 aa, Homo sapiens
CASMPPGSGSHYSFYYYYYMDVW

SEQ ID NO: 463 - protein, 19 aa, Homo sapiens
CARHWDVVVPAAQYWFDPW

SEQ ID NO: 464 - protein, 25 aa, Homo sapiens
CARGGVVRRLTQRWRVDRAEYFQHW

SEQ ID NO: 465 - protein, 24 aa, Homo sapiens
CARGPITIFGVVIELNYYYGMDVW

SEQ ID NO: 466 - protein, 15 aa, Homo sapiens
CAKGYGAGIMYFDHW

SEQ ID NO: 467 - protein, 13 aa, Homo sapiens [sequence omitted]

SEQ ID NO: 468 - protein, 15 aa, Homo sapiens
CARLETAPYYYMDVW

SEQ ID NO: 469 - protein, 13 aa, Homo sapiens
CARRKLPLPFDYW

SEQ ID NO: 470 - protein, 22 aa, Homo sapiens
CARVNYYMWGSYRHPHSAFVIW

SEQ ID NO: 471 - protein, 19 aa, Homo sapiens
CARGNGPTWQWRYSYFDYW

SEQ ID NO: 472 - protein, 18 aa, Homo sapiens
CAKASGDYYDSSGPHDYW

SEQ ID NO: 473 - protein, 21 aa, Homo sapiens
CARQQTHITMIVVVQIHFDYW

SEQ ID NO: 474 - protein, 12 aa, Homo sapiens
CAHNTIFGFDYW

SEQ ID NO: 475 - protein, 15 aa, Homo sapiens
CSKDGGTYESPFDYW

SEQ ID NO: 476 - protein, 22 aa, Homo sapiens
CVKGPDSNYDYVWGTYRYFDYW

SEQ ID NO: 477 - protein, 22 aa, Homo sapiens
CAKDDYYGPVSSYYYYYGMAVW

SEQ ID NO: 478 - protein, 16 aa, Homo sapiens
CARVTFSGSYLYMDVW

SEQ ID NO: 479 - protein, 14 aa, Homo sapiens
CQSTDFSGPYHVVF

SEQ ID NO: 480 - protein, 15 aa, Homo sapiens
CARETAMATNWFDPW

SEQ ID NO: 481 - protein, 18 aa, Homo sapiens
CARSYYHGSETYYLLDYW

SEQ ID NO: 482 - protein, 16 aa, Homo sapiens
CARPSVLGTPVRFDYW

SEQ ID NO: 483 - protein, 16 aa, Homo sapiens
CAKASLGGYDRGFDYW

SEQ ID NO: 484 - protein, 21 aa, Homo sapiens
CARGQNYDLLTGELNNWFDPW

SEQ ID NO: 485 - protein, 14 aa, Homo sapiens
CATTPVAEGWFDPW

SEQ ID NO: 486 - protein, 20 aa, Homo sapiens
CAKDSDPHFWMMATIYFDYW

SEQ ID NO: 487 - protein, 16 aa, Homo sapiens
CANGYSYGSHDAFDIW

SEQ ID NO: 488 - protein, 20 aa, Homo sapiens
CTTGDYSNLGGWVPDAFDIW

SEQ ID NO: 489 - protein, 17 aa, Homo sapiens
CARLVDTFYYYYGMDVW

SEQ ID NO: 490 - protein, 20 aa, Homo sapiens
CARLSSGWYGTYYYYYMDVW

SEQ ID NO: 491 - protein, 20 aa, Homo sapiens
CARLYKEVAILYYYYYIDVW

SEQ ID NO: 492 - protein, 16 aa, Homo sapiens
CARKMDTSMVKGFDYW

SEQ ID NO: 493 - protein, 13 aa, Homo sapiens
CTKPSTYDAFHTW

SEQ ID NO: 494 - protein, 18 aa, Homo sapiens
CARDQGEGLQFMGAFDLW

SEQ ID NO: 495 - protein, 17 aa, Homo sapiens
CARVMYNYVSGYYFDLW

SEQ ID NO: 496 - protein, 22 aa, Homo sapiens
CARRGGYRTAATTLALNWFDPW

SEQ ID NO: 497 - protein, 17 aa, Homo sapiens
CARAVPAAIGVNWFDPW

SEQ ID NO: 498 - protein, 19 aa, Homo sapiens
CARDRGVAVAGTLYYFDYW

SEQ ID NO: 499 - protein, 19 aa, Homo sapiens
CAINQRDWNYKWGPYFDYW

SEQ ID NO: 500 - protein, 20 aa, Homo sapiens
CARHWQAGSLAWVGYYMDVW

SEQ ID NO: 501 - protein, 24 aa, Homo sapiens
CAKALRGRTTGTRGVYYYYYMDVW

SEQ ID NO: 502 - protein, 20 aa, Homo sapiens
CARHEIGYSYGRLVYYFDYW

SEQ ID NO: 503 - protein, 14 aa, Homo sapiens
CAKDQGWLRPFDYW

SEQ ID NO: 504 - protein, 15 aa, Homo sapiens
CAKDLSPVLGEFDYW

SEQ ID NO: 505 - protein, 19 aa, Homo sapiens
CARGNHNFVEAAGPSFDHW

SEQ ID NO: 506 - protein, 14 aa, Homo sapiens
CARDPRDYVSFDYW

SEQ ID NO: 507 - protein, 16 aa, Homo sapiens
CASLIGDWNPYYFDYW

SEQ ID NO: 508 - protein, 14 aa, Homo sapiens
CARDGPFSAAGDYW

SEQ ID NO: 509 - protein, 22 aa, Homo sapiens
CARGLAITIFGVVTMEGWFDPW

SEQ ID NO: 510 - protein, 17 aa, Homo sapiens
CARVDGASSGYYLADYW

SEQ ID NO: 511 - protein, 12 aa, Homo sapiens
CATENWYHFDNW

SEQ ID NO: 512 - protein, 27 aa, Homo sapiens
CARFPRSCSSTSCYRPGLPAAGRIDYW

SEQ ID NO: 513 - protein, 13 aa, Homo sapiens
CARHNWNSEFDYW

SEQ ID NO: 514 - protein, 24 aa, Homo sapiens
CARDRRVRIQTVTRDYYYYYMDVW

SEQ ID NO: 515 - protein, 21 aa, Homo sapiens
CARGHMITFGGVIVINGLDYW

SEQ ID NO: 516 - protein, 16 aa, Homo sapiens
CQQANSFPGGPLRFTF

SEQ ID NO: 517 - protein, 10 aa, Homo sapiens
CSSNGIRDYW

SEQ ID NO: 518 - protein, 19 aa, Homo sapiens
CARDGYSYAPDYYYGMDVW

SEQ ID NO: 519 - protein, 20 aa, Homo sapiens
CARINYDFWSGYYMRAFDIW

SEQ ID NO: 520 - protein, 18 aa, Homo sapiens
CARHYETQPDYYYGMDVW

SEQ ID NO: 521 - protein, 19 aa, Homo sapiens
CAAGGGSPIYYYYYYMDVW

SEQ ID NO: 522 - protein, 23 aa, Homo sapiens
CARDGVFGVPPFYYYYYYYMDVW

SEQ ID NO: 523 - protein, 11 aa, Homo sapiens
CHQYYSTPQIF

SEQ ID NO: 524 - protein, 19 aa, Homo sapiens
CARDKDYYDTIGQQGFDYW

SEQ ID NO: 525 - protein, 19 aa, Homo sapiens
CARDIGPLYYYDSSVFDYW

SEQ ID NO: 526 - protein, 18 aa, Homo sapiens
CATWGYSSGWYNNWFDPW

SEQ ID NO: 527 - protein, 21 aa, Homo sapiens
CTTDKIRGGGILLPYYYFDYW

SEQ ID NO: 528 - protein, 16 aa, Homo sapiens
CARDSYGDHANTADYW

SEQ ID NO: 529 - protein, 16 aa, Homo sapiens
CAKGGWGSVAAYFDYW

SEQ ID NO: 530 - protein, 18 aa, Homo sapiens
CAKDIRSYDFWSGYLDYW

SEQ ID NO: 531 - protein, 14 aa, Homo sapiens
CARFTMIVGAFDHW

SEQ ID NO: 532 - protein, 17 aa, Homo sapiens
CARVDYESSGGVWLDPW

SEQ ID NO: 533 - protein, 24 aa, Homo sapiens
CARDRWEWDDILTGYTAPGWFDPW

SEQ ID NO: 534 - protein, 21 aa, Homo sapiens
CAKEGWELLTGLYYKYYLDVW

SEQ ID NO: 535 - protein, 15 aa, Homo sapiens
CARQEVQLGIPADYW

SEQ ID NO: 536 - protein, 21 aa, Homo sapiens
CAGELTYCGGDCNSRDAFDIW

SEQ ID NO: 537 - protein, 17 aa, Homo sapiens
CARGGYSGKWAYYIDYW

SEQ ID NO: 538 - protein, 17 aa, Homo sapiens
CARAPVDTTMFSAFDIW

SEQ ID NO: 539 - protein, 17 aa, Homo sapiens
CAKDFGPGYTYGLFDYW

SEQ ID NO: 540 - protein, 19 aa, Homo sapiens
CAKDRLYGIAVAYLHLDYW

SEQ ID NO: 541 - protein, 22 aa, Homo sapiens
CARDQWPITVVTSLGYYYMDVW

SEQ ID NO: 542 - protein, 18 aa, Homo sapiens
CARASVTMIVVDANFDYW

SEQ ID NO: 543 - protein, 21 aa, Homo sapiens
CAKPQGFLVVVAATLGGFDYW

SEQ ID NO: 544 - protein, 17 aa, Homo sapiens
CASPLNSGRIYKDLDYW

SEQ ID NO: 545 - protein, 17 aa, Homo sapiens
CARQGRDQLLANWFDPW

SEQ ID NO: 546 - protein, 15 aa, Homo sapiens
CARIAVGPLPRFDYW

SEQ ID NO: 547 - protein, 15 aa, Homo sapiens
CAKIDGPTGTCFDYW

SEQ ID NO: 548 - protein, 17 aa, Homo sapiens
CASFYYRAAAAGPFDSW

SEQ ID NO: 549 - protein, 20 aa, Homo sapiens
CASPPEYCSSTRCTSAFDIW

SEQ ID NO: 550 - protein, 16 aa, Homo sapiens
CATGSPVGATSWFDPW

SEQ ID NO: 551 - protein, 18 aa, Homo sapiens
CARSRRTQQQLPMGFDIW

SEQ ID NO: 552 - protein, 19 aa, Homo sapiens
CARDSEIFGVVINPFYDYW

SEQ ID NO: 553 - protein, 12 aa, Homo sapiens
CVREQGNYFDYW

SEQ ID NO: 554 - protein, 16 aa, Homo sapiens
CASLSWDGNYYYMDVW

SEQ ID NO: 555 - protein, 17 aa, Homo sapiens
CATGFPPWTSKSPFDYW

SEQ ID NO: 556 - protein, 15 aa, Homo sapiens
CARGSWTLTGPFDFW

SEQ ID NO: 557 - protein, 18 aa, Homo sapiens
CARELLSAAGMTTNFDYW

SEQ ID NO: 558 - protein, 19 aa, Homo sapiens
CAKEYDYIWGSYRRYFDYW

SEQ ID NO: 559 - protein, 15 aa, Homo sapiens
CARQSAVGSTNFDYW

SEQ ID NO: 560 - protein, 23 aa, Homo sapiens
CARLPSPDIVLMVYAIRWYFDYW

SEQ ID NO: 561 - protein, 16 aa, Homo sapiens
CAHQEFGYYEYYFDYW

SEQ ID NO: 562 - protein, 21 aa, Homo sapiens
CTLFPYTTLFRSNYYGAFDSW

SEQ ID NO: 563 - protein, 23 aa, Homo sapiens
CARDQRVSIAAAGTVYYYGMDVW

SEQ ID NO: 564 - protein, 15 aa, Homo sapiens
CARQETGTNWYFDLW

SEQ ID NO: 565 - protein, 21 aa, Homo sapiens
CARAGRSITIFGVVRDAFDIW

SEQ ID NO: 566 - protein, 18 aa, Homo sapiens
CARDPSVPAANHDAFDIW

SEQ ID NO: 567 - protein, 15 aa, Homo sapiens
CARRHRDSWGWFDPW

SEQ ID NO: 568 - protein, 22 aa, Homo sapiens
CARRASITIFGVVITGTYFDLW

SEQ ID NO: 569 - protein, 20 aa, Homo sapiens
CARVSTTLEHNWNYGWFDPW

SEQ ID NO: 570 - protein, 16 aa, Homo sapiens
CARDNKRLRGWPLDYW

SEQ ID NO: 571 - protein, 22 aa, Homo sapiens
CARAGVVPAPILSEEIPDFDYW

SEQ ID NO: 572 - protein, 19 aa, Homo sapiens
CARGVVGYSYGYDNWFDPW

SEQ ID NO: 573 - protein, 16 aa, Homo sapiens
CARLKMTAIPGSFDYW

SEQ ID NO: 574 - protein, 25 aa, Homo sapiens
CAKDWVPPLYDYAWGNYQSSAFDIW

SEQ ID NO: 575 - protein, 21 aa, Homo sapiens
CARAVRLRITFGGVIGESDYW

SEQ ID NO: 576 - protein, 24 aa, Homo sapiens
CARGCSIAVAGIFLPDYYYYMDVW

SEQ ID NO: 577 - protein, 20 aa, Homo sapiens
CARVNNLNDPEYYYYYMDVW

SEQ ID NO: 578 - protein, 18 aa, Homo sapiens
CARDDCSSTSCPAAFGYW

SEQ ID NO: 579 - protein, 19 aa, Homo sapiens
CARDITGTTSYYYYGMDVW

SEQ ID NO: 580 - protein, 23 aa, Homo sapiens
CARHLEYLGHEGSGYHYWYFDLW

SEQ ID NO: 581 - protein, 17 aa, Homo sapiens
CARSGFLACLECLIDYW

SEQ ID NO: 582 - protein, 18 aa, Homo sapiens
CTREASYASSWPEYFDYW

SEQ ID NO: 583 - protein, 20 aa, Homo sapiens
CARGSSAAWGSRRTNYFDYW

SEQ ID NO: 584 - protein, 22 aa, Homo sapiens
CARLKRRTEQWLVLSYYYMDVW

SEQ ID NO: 585 - protein, 16 aa, Homo sapiens
CATVGVWGSYRVFDYW

SEQ ID NO: 586 - protein, 23 aa, Homo sapiens
CARYHEAPIAAAASYYYYGMDVW

SEQ ID NO: 587 - protein, 17 aa, Homo sapiens
CARHRQTGTTHHWFDPW

SEQ ID NO: 588 - protein, 17 aa, Homo sapiens
CTRVSITGGRSLPFDIW

SEQ ID NO: 589 - protein, 12 aa, Homo sapiens
CSSYRSSNIWVF

SEQ ID NO: 590 - protein, 23 aa, Homo sapiens
CARDVSNWNIEVDYYYYYGMDVW

SEQ ID NO: 591 - protein, 14 aa, Homo sapiens
CHSRDTSGNHIYVF

SEQ ID NO: 592 - protein, 18 aa, Homo sapiens
CARDVGKGITATGTFDYW

SEQ ID NO: 593 - protein, 25 aa, Homo sapiens
CARAREDIVVVPAATHYYYYGMDVW

SEQ ID NO: 594 - protein, 13 aa, Homo sapiens [sequence omitted]

SEQ ID NO: 595 - protein, 16 aa, Homo sapiens
CARNPMVRGEAKFDFW

SEQ ID NO: 596 - protein, 11 aa, Homo sapiens
CQEYGSSSYTF

SEQ ID NO: 597 - protein, 15 aa, Homo sapiens
CVKGGGSVRLYFDLW

SEQ ID NO: 598 - protein, 16 aa, Homo sapiens
CARHPITMIEYYFDYW

SEQ ID NO: 599 - protein, 17 aa, Homo sapiens
CAREAGTSYSAGYFDPW

SEQ ID NO: 600 - protein, 21 aa, Homo sapiens
CARLMHDFWSGSLVPPHFDYW

SEQ ID NO: 601 - protein, 19 aa, Homo sapiens
CVRPLSRYLEWLSSAFDLW

SEQ ID NO: 602 - protein, 16 aa, Homo sapiens
CAHRGSGWLIGYFDYW

SEQ ID NO: 603 - protein, 22 aa, Homo sapiens
CARGLRANVLRFLEWLFWFDPW

SEQ ID NO: 604 - protein, 20 aa, Homo sapiens
CARTVLRYFDWLPRDYFDYW

SEQ ID NO: 605 - protein, 18 aa, Homo sapiens
CARVALRLGEYPDAFDIW

SEQ ID NO: 606 - protein, 24 aa, Homo sapiens
CARDVPPRYGYVSASPAPELFDYW

SEQ ID NO: 607 - protein, 24 aa, Homo sapiens
CARSVVVPAAIWSLRYYYYGMDVW

SEQ ID NO: 608 - protein, 17 aa, Homo sapiens
CAKWNGIAAADNWFDPW

SEQ ID NO: 609 - protein, 15 aa, Homo sapiens
CARLQGGYSFHYDYW

SEQ ID NO: 610 - protein, 32 aa, Homo sapiens
CARHFGWPIQDAYYDFWSGSLTRGYYYGMDVW

SEQ ID NO: 611 - protein, 19 aa, Homo sapiens
CARGGHYSYDNSGYWPDYW

SEQ ID NO: 612 - protein, 16 aa, Homo sapiens
CVKASGSTYYSAFDHW

SEQ ID NO: 613 - protein, 21 aa, Homo sapiens
CARDYRGSSDYYYYYYGMDVW

SEQ ID NO: 614 - protein, 13 aa, Homo sapiens
CAKDLLLDYFDYW

SEQ ID NO: 615 - protein, 14 aa, Homo sapiens
CARDRDNMLTLDYW

SEQ ID NO: 616 - protein, 16 aa, Homo sapiens
CARSRVTVTTYFSDYW

SEQ ID NO: 617 - protein, 22 aa, Homo sapiens
CASLGKYGDYVSSSHEYYFDYW

SEQ ID NO: 618 - protein, 24 aa, Homo sapiens
CARDLHRSRYSSGWYNYYYYMDVW

SEQ ID NO: 619 - protein, 17 aa, Homo sapiens
CHSEETEGAVADIFDYW

SEQ ID NO: 620 - protein, 18 aa, Homo sapiens
CARLGPGIAVAGPDLDYW

SEQ ID NO: 621 - protein, 14 aa, Homo sapiens
CTTVTGPTGYLDYW

SEQ ID NO: 622 - protein, 19 aa, Homo sapiens
CSRHAGPDYSDSTDLNDYW

SEQ ID NO: 623 - protein, 17 aa, Homo sapiens
CAREGEYDILPLGFDYW

SEQ ID NO: 624 - protein, 21 aa, Homo sapiens
CARGSRESSGWLVKWRWFDPW

SEQ ID NO: 625 - protein, 25 aa, Homo sapiens
CAKFGGLGSGWYEREEWYYYGMDVW

SEQ ID NO: 626 - protein, 15 aa, Homo sapiens
CARDPPTVLEWFDSW

SEQ ID NO: 627 - protein, 21 aa, Homo sapiens
CAKDSANYYDSSGHLGWFDPW

SEQ ID NO: 628 - protein, 29 aa, Homo sapiens
CAKDPLYYDFWSGYLSEQAPYYYYGMDVW

SEQ ID NO: 629 - protein, 14 aa, Homo sapiens
CASGKRGEPLGDYW

SEQ ID NO: 630 - protein, 21 aa, Homo sapiens
CARVSHPTFGDVIDYDAFDIW

SEQ ID NO: 631 - protein, 14 aa, Homo sapiens [sequence omitted]

SEQ ID NO: 632 - protein, 11 aa, Homo sapiens [sequence omitted]

SEQ ID NO: 633 - protein, 13 aa, Homo sapiens
CVSTGLRNAFNIW

SEQ ID NO: 634 - protein, 19 aa, Homo sapiens
CARSYDFWSGYYIGWFDPW

SEQ ID NO: 635 - protein, 20 aa, Homo sapiens
CAKVFSWGVGRDGYNSFDFW

SEQ ID NO: 636 - protein, 19 aa, Homo sapiens
CARGGRAIFGVVITHFDYW

SEQ ID NO: 637 - protein, 19 aa, Homo sapiens
CARGLMEFFAVVSYWFDPW

SEQ ID NO: 638 - protein, 15 aa, Homo sapiens
CATTVSPKRGRLDYW

SEQ ID NO: 639 - protein, 17 aa, Homo sapiens
CARTLVEMATVYYFDYW

SEQ ID NO: 640 - protein, 22 aa, Homo sapiens
CARDGPSGGGMYSSGWYSFDYW

SEQ ID NO: 641 - protein, 13 aa, Homo sapiens
CARDSPGHWFDPW

SEQ ID NO: 642 - protein, 18 aa, Homo sapiens
CAKDMTDYGDYDDAFDIW

SEQ ID NO: 643 - protein, 15 aa, Homo sapiens
CAKTTILPLAYFDLW

SEQ ID NO: 644 - protein, 14 aa, Homo sapiens
CARGVVIPYLFDYW

SEQ ID NO: 645 - protein, 25 aa, Homo sapiens
CAHRQADRVDYYDSSGYYYRSFDYW

SEQ ID NO: 646 - protein, 16 aa, Homo sapiens
CASLCSGGSCPLFDYW

SEQ ID NO: 647 - protein, 20 aa, Homo sapiens
CAADPIAAAGVYYYYGMDVW

SEQ ID NO: 648 - protein, 13 aa, Homo sapiens
CARDWGTMIGDYW

SEQ ID NO: 649 - protein, 17 aa, Homo sapiens
CAKSSEVSSGWTGPDYW

SEQ ID NO: 650 - protein, 19 aa, Homo sapiens
CATIGGAGYDQRTYYFESW

SEQ ID NO: 651 - protein, 22 aa, Homo sapiens
CVRGAPYFDWLYDFYYYGMDVW

SEQ ID NO: 652 - protein, 17 aa, Homo sapiens
CARAPTTIFGVQWFDPW

SEQ ID NO: 653 - protein, 15 aa, Homo sapiens
CARDAWIQLWFPDYW

SEQ ID NO: 654 - protein, 20 aa, Homo sapiens
CTSVQTSTIFGVVIIGGDYW

SEQ ID NO: 655 - protein, 22 aa, Homo sapiens
CARSPGITIFGVVIIPSWFDPW

SEQ ID NO: 656 - protein, 19 aa, Homo sapiens
CARDFLRSDMSPVTTIDYW

SEQ ID NO: 657 - protein, 14 aa, Homo sapiens
CARDLSGWWSFDYW

SEQ ID NO: 658 - protein, 20 aa, Homo sapiens
CAREGLRDQLLKYYYGMDVW

SEQ ID NO: 659 - protein, 19 aa, Homo sapiens
CTKGPSGLVIMGHYYFDLW

SEQ ID NO: 660 - protein, 24 aa, Homo sapiens
CARDRPIRFLEWLSSEPEYYFDYW

SEQ ID NO: 661 - protein, 13 aa, Homo sapiens
CQQYHSYSPADPF

SEQ ID NO: 662 - protein, 22 aa, Homo sapiens
CARGGVTMTTYLTYYYYYMDVW

SEQ ID NO: 663 - protein, 12 aa, Homo sapiens
CMQRIEFPPCTF

SEQ ID NO: 664 - protein, 14 aa, Homo sapiens
CAQQLVLYGWFDPW

SEQ ID NO: 665 - protein, 15 aa, Homo sapiens
CAHLLIAAGGTLDYW

SEQ ID NO: 666 - protein, 13 aa, Homo sapiens
CSSYTSSRTLDVF

SEQ ID NO: 667 - protein, 22 aa, Homo sapiens
CANYLQIYSDNSAYYPEYFQHW

SEQ ID NO: 668 - protein, 19 aa, Homo sapiens
CARIQLWLSYYYYYGMDVW

SEQ ID NO: 669 - protein, 15 aa, Homo sapiens
CAKDPDYGEPLFDYW

SEQ ID NO: 670 - protein, 16 aa, Homo sapiens
CARAHYYHTNDAFDFW

SEQ ID NO: 671 - protein, 12 aa, Homo sapiens
CVRADSQDFDLW

SEQ ID NO: 672 - protein, 19 aa, Homo sapiens
CAKPSRPYYYHNSGHFDYW

SEQ ID NO: 673 - protein, 17 aa, Homo sapiens
CARQVEIVVVSDAFDIW

SEQ ID NO: 674 - protein, 24 aa, Homo sapiens
CARHDMVLMDYDSSGYYYYWFDPW

SEQ ID NO: 675 - protein, 12 aa, Homo sapiens [sequence omitted]

SEQ ID NO: 676 - protein, 19 aa, Homo sapiens
CATTPAWWGITGTTSFDYW

SEQ ID NO: 677 - protein, 25 aa, Homo sapiens
CAREGSRLAMIVVVRSYYYYYMDVW

SEQ ID NO: 678 - protein, 17 aa, Homo sapiens
CARDGEMATIFGAFEIW

SEQ ID NO: 679 - protein, 16 aa, Homo sapiens
CARDRENGGYDAFDIW

SEQ ID NO: 680 - protein, 19 aa, Homo sapiens
CARDLVGPVLPTVELSDYW

SEQ ID NO: 681 - protein, 20 aa, Homo sapiens
CATPGGGHSYHWENWYFDLW

SEQ ID NO: 682 - protein, 20 aa, Homo sapiens
CARAHNDYYDTSGFYYLDQW

SEQ ID NO: 683 - protein, 21 aa, Homo sapiens
CARDKAGISVLAPAATLFDFW

SEQ ID NO: 684 - protein, 18 aa, Homo sapiens
CAKRSAIVGALYWYFDLW

SEQ ID NO: 685 - protein, 18 aa, Homo sapiens
CARTDYYDSSGFGTLDYW

SEQ ID NO: 686 - protein, 30 aa, Homo sapiens
CALPICLRAEDTAVYYCARVDYGDFYFDYW

SEQ ID NO: 687 - protein, 21 aa, Homo sapiens
CARSSGSLTMIVVVLDAFDIW

SEQ ID NO: 688 - protein, 15 aa, Homo sapiens
CTRPAPWTLSWFDPW

SEQ ID NO: 689 - protein, 23 aa, Homo sapiens
CARPLGQYYYDSSGYGGDAFDIW

SEQ ID NO: 690 - protein, 21 aa, Homo sapiens
CARDPRSITIFGVDPGYFDYW

SEQ ID NO: 691 - protein, 17 aa, Homo sapiens
CAKGDGYSDFDWYFSLW

SEQ ID NO: 692 - protein, 17 aa, Homo sapiens
CARQGDPGYAGSYHDSW

SEQ ID NO: 693 - protein, 14 aa, Homo sapiens
CAKVYGGGYDSDYW

SEQ ID NO: 694 - protein, 21 aa, Homo sapiens
CARASGLGTMIVVVITHFDYW

SEQ ID NO: 695 - protein, 25 aa, Homo sapiens
CARDALVNYDILTGTRGYYYGMDVW

SEQ ID NO: 696 - protein, 17 aa, Homo sapiens
CAKAPSPSDSESYFDYW

SEQ ID NO: 697 - protein, 22 aa, Homo sapiens
CAREVYALYYDILTGQYYFDYW

SEQ ID NO: 698 - protein, 18 aa, Homo sapiens
CAKDGGDYDSSGYAFDYW

SEQ ID NO: 699 - protein, 25 aa, Homo sapiens
CARVPREIGSGYYLRYNYYYGLDVW

SEQ ID NO: 700 - protein, 16 aa, Homo sapiens
CARVAEWQWLSHFDYW

SEQ ID NO: 701 - protein, 18 aa, Homo sapiens
CARDRHYTGIYGFSFDFW

SEQ ID NO: 702 - protein, 20 aa, Homo sapiens
CARERTTSYGDYEIPLFDYW

SEQ ID NO: 703 - protein, 18 aa, Homo sapiens
CARNSRGTNWDYDAFDIW

SEQ ID NO: 704 - protein, 23 aa, Homo sapiens
CARHGFSWELLVVGVGQYYFDYW

SEQ ID NO: 705 - protein, 19 aa, Homo sapiens
CARDSDGIAAAGTGYFDYW

SEQ ID NO: 706 - protein, 22 aa, Homo sapiens
CARHTANAPLGKQLEVLWFDPW

SEQ ID NO: 707 - protein, 21 aa, Homo sapiens
CARAVGITMIVVVTVGWFDPW

SEQ ID NO: 708 - protein, 15 aa, Homo sapiens
CARHPYSSPDLFDVW

SEQ ID NO: 709 - protein, 19 aa, Homo sapiens
CVKGAKYSSGWYGLLVDYW

SEQ ID NO: 710 - protein, 16 aa, Homo sapiens
CATSPAVAGFFPPDYW

SEQ ID NO: 711 - protein, 16 aa, Homo sapiens
CARDLKGVAATDHDYW

SEQ ID NO: 712 - protein, 25 aa, Homo sapiens
CARLGMQPDGRFDPTITTLYYFDYW

SEQ ID NO: 713 - protein, 14 aa, Homo sapiens
CASLDSSWLPFDYW

SEQ ID NO: 714 - protein, 18 aa, Homo sapiens
CAKGRRLGDTFYSAFNYW

SEQ ID NO: 715 - protein, 19 aa, Homo sapiens
CAQVEPDYYDSSGYYSVYW

SEQ ID NO: 716 - protein, 18 aa, Homo sapiens
CATAGPILGSKLNWFDPW

SEQ ID NO: 717 - protein, 18 aa, Homo sapiens
CARDATWGSYYYSYMDVW

SEQ ID NO: 718 - protein, 17 aa, Homo sapiens
CAKGNPYSSGWYAFDYW

SEQ ID NO: 719 - protein, 18 aa, Homo sapiens
CAKLPYGSGSYVEATDYW

SEQ ID NO: 720 - protein, 20 aa, Homo sapiens
CTTRLDYYDSSGYYKPFDYW

SEQ ID NO: 721 - protein, 20 aa, Homo sapiens
CARTPRFITIFGVVPGQDYW

SEQ ID NO: 722 - protein, 25 aa, Homo sapiens
CARQRREYDTSSSWGFKYYYYMDVW

SEQ ID NO: 723 - protein, 18 aa, Homo sapiens
CAKRGPGTPMVPGYFDYW

SEQ ID NO: 724 - protein, 22 aa, Homo sapiens
CAKDNDFWRSSGPYYYYGMDVW

SEQ ID NO: 725 - protein, 20 aa, Homo sapiens
CARDTTYHYDSSGYYGLDYW

SEQ ID NO: 726 - protein, 21 aa, Homo sapiens
CARTQTGSNPFYNYYYYMDVW

SEQ ID NO: 727 - protein, 19 aa, Homo sapiens
CASLSHFITTIIYWYFDLW

SEQ ID NO: 728 - protein, 14 aa, Homo sapiens
CARLLYYYGFFDYW

SEQ ID NO: 729 - protein, 18 aa, Homo sapiens
CTRSGLFQAAVTTGFDLW

SEQ ID NO: 730 - protein, 21 aa, Homo sapiens
CARVRFTAITMIVVVDAFDIW

SEQ ID NO: 731 - protein, 18 aa, Homo sapiens
CARDSILGVTSTLTFDYW

SEQ ID NO: 732 - protein, 20 aa, Homo sapiens
CARDRPSYDFWSGSGAFDIW

SEQ ID NO: 733 - protein, 16 aa, Homo sapiens
CAKGLTLIVVDAIDYW

SEQ ID NO: 734 - protein, 15 aa, Homo sapiens
CVTLYYSGTYFFDNW

SEQ ID NO: 735 - protein, 18 aa, Homo sapiens
CAKCFGYSYGYEDLFDYW

SEQ ID NO: 736 - protein, 13 aa, Homo sapiens
CARGEWGDYADYW

SEQ ID NO: 737 - protein, 17 aa, Homo sapiens
CARDEGAVAGWGDFDYW

SEQ ID NO: 738 - protein, 15 aa, Homo sapiens
CTTDGYSYQKGRDYW

SEQ ID NO: 739 - protein, 17 aa, Homo sapiens
CARYYDFRTGYYYMDVW

SEQ ID NO: 740 - protein, 15 aa, Homo sapiens
CAAEIEVVEARFDPW

SEQ ID NO: 741 - protein, 20 aa, Homo sapiens
CARGGGVLRFLEWPSPLDYW

SEQ ID NO: 742 - protein, 18 aa, Homo sapiens
CADHYGRRSYGLAYFDYW

SEQ ID NO: 743 - protein, 23 aa, Homo sapiens
CARSSRYYEIVTAYTAGNGFDIW

SEQ ID NO: 744 - protein, 20 aa, Homo sapiens
CARAPKPTPSEGKFSLIDYW

SEQ ID NO: 745 - protein, 21 aa, Homo sapiens
CARDQAYCSSTSCYTRLHDYW

SEQ ID NO: 746 - protein, 19 aa, Homo sapiens
CARGVCGSSSCYEDAFDIW

SEQ ID NO: 747 - protein, 18 aa, Homo sapiens
CARLGPRNTYGRDWFDPW

SEQ ID NO: 748 - protein, 12 aa, Homo sapiens
CARALIKRFDPW

SEQ ID NO: 749 - protein, 18 aa, Homo sapiens
CARDSSGWYGEKNWFDPW

SEQ ID NO: 750 - protein, 15 aa, Homo sapiens
CAREGDHEDPNFDYW

SEQ ID NO: 751 - protein, 20 aa, Homo sapiens
CARDFPYYFDTSGYYYMDVW

SEQ ID NO: 752 - protein, 18 aa, Homo sapiens
CARHGRVRDGNNRGYDYW

SEQ ID NO: 753 - protein, 15 aa, Homo sapiens
CTTDRDNWNPYFDYW

SEQ ID NO: 754 - protein, 20 aa, Homo sapiens
CARRGPYYYDSSAHWYFDLW

SEQ ID NO: 755 - protein, 14 aa, Homo sapiens
CATSSISGSNFDYW

SEQ ID NO: 756 - protein, 20 aa, Homo sapiens
CARHTPLWADSSSSEDFDYW

SEQ ID NO: 757 - protein, 16 aa, Homo sapiens
CVKDLHSYDTYYLDYW

SEQ ID NO: 758 - protein, 16 aa, Homo sapiens
CARGDWWEPTWYFDLW

SEQ ID NO: 759 - protein, 22 aa, Homo sapiens
CARGADHYDFWSGYYRGWFDPW

SEQ ID NO: 760 - protein, 22 aa, Homo sapiens
CARGNYGDYVPRSYHYYGMDVW

SEQ ID NO: 761 - protein, 19 aa, Homo sapiens
CASSYSYDSSGYYDYFDYW

SEQ ID NO: 762 - protein, 18 aa, Homo sapiens
CATAPGIAVAGTRWFDPW

SEQ ID NO: 763 - protein, 19 aa, Homo sapiens
CVKDALLSGKYYGNYFDYW

SEQ ID NO: 764 - protein, 16 aa, Homo sapiens
CARDHAEYDNYWFDPW

SEQ ID NO: 765 - protein, 28 aa, Homo sapiens
CAGEPLVVPAAPAYGSSFIYYYYYMDVW

SEQ ID NO: 766 - protein, 15 aa, Homo sapiens
CAKAPVAGNPWFDYW

SEQ ID NO: 767 - protein, 20 aa, Homo sapiens
CARAGYSGYDPAVTGLIDYW

SEQ ID NO: 768 - protein, 18 aa, Homo sapiens
CTTDLLWQWLVKNYFDYW

SEQ ID NO: 769 - protein, 24 aa, Homo sapiens
CTTHLYRSTWDRSIYSYYYYMDVW

SEQ ID NO: 770 - protein, 13 aa, Homo sapiens
CAQRFGEEGFDYW

SEQ ID NO: 771 - protein, 16 aa, Homo sapiens
CATTHNTGPHYYFDYW

SEQ ID NO: 772 - protein, 16 aa, Homo sapiens
CARVDLGSPDYYFDYW

SEQ ID NO: 773 - protein, 20 aa, Homo sapiens
CARDSFYGGNTRVDNPFDYW

SEQ ID NO: 774 - protein, 27 aa, Homo sapiens
CARAIAAAQHIAAVQHNYHYYYYMDVW

SEQ ID NO: 775 - protein, 16 aa, Homo sapiens
CAKDPGPTTEMTFDYW

SEQ ID NO: 776 - protein, 17 aa, Homo sapiens
CAKDHPYDYVWGSLDYW

SEQ ID NO: 777 - protein, 15 aa, Homo sapiens
CAKLGGSEMGATDYW

SEQ ID NO: 778 - protein, 15 aa, Homo sapiens
CARDSSGYYYHFDNW

SEQ ID NO: 779 - protein, 23 aa, Homo sapiens
CARNYGQTTIFGVVISSYYFDYW

SEQ ID NO: 780 - protein, 16 aa, Homo sapiens
CAKGKQWLVLPPIDYW

SEQ ID NO: 781 - protein, 11 aa, Homo sapiens
CTTDSDKFDYW

SEQ ID NO: 782 - protein, 17 aa, Homo sapiens
CNTEVDDGSGYYLVDYW

SEQ ID NO: 783 - protein, 19 aa, Homo sapiens
CARLAKNGDFWGGPIFDHW

SEQ ID NO: 784 - protein, 17 aa, Homo sapiens
CAHLVSSSWYEDFLDYW

SEQ ID NO: 785 - protein, 21 aa, Homo sapiens
CASSLRREYDFWSGYLLFDYW

SEQ ID NO: 786 - protein, 20 aa, Homo sapiens
CARRGLGYCTNGVCSHFDYW

SEQ ID NO: 787 - protein, 15 aa, Homo sapiens
CARGRSSGWFEGDYW

SEQ ID NO: 788 - protein, 20 aa, Homo sapiens
CATGTVGNTNHYTNYAMDVW

SEQ ID NO: 789 - protein, 18 aa, Homo sapiens
CARGRYYFGSETHLFYYW

SEQ ID NO: 790 - protein, 17 aa, Homo sapiens
CARRHTLMFGRKSFDPW

SEQ ID NO: 791 - protein, 17 aa, Homo sapiens
CARASRGYWGPDAFDFW

SEQ ID NO: 792 - protein, 22 aa, Homo sapiens
CARAPGDVLLWFGAPGGWFDPW

SEQ ID NO: 793 - protein, 18 aa, Homo sapiens
CARAPRGIFGVVTHFDYW

SEQ ID NO: 794 - protein, 22 aa, Homo sapiens
CARLRRESHYPGIAVVNYFDYW

SEQ ID NO: 795 - protein, 22 aa, Homo sapiens
CARGSLLPLEWLFKPTNYFDYW

SEQ ID NO: 796 - protein, 13 aa, Homo sapiens
CAKAPDGDYDGYW

SEQ ID NO: 797 - protein, 20 aa, Homo sapiens
CARICTVPIPSGYYFAMDVW

SEQ ID NO: 798 - protein, 22 aa, Homo sapiens
CARQQQAHHWVSNAYYYYTDVW

SEQ ID NO: 799 - protein, 17 aa, Homo sapiens
CTTAPSGSSTPPYFDYW

SEQ ID NO: 800 - protein, 18 aa, Homo sapiens
CAKIMRDYFYNLYYFDYW

SEQ ID NO: 801 - protein, 22 aa, Homo sapiens
CARLGGDFWSGYYLGGNWFDPW

SEQ ID NO: 802 - protein, 14 aa, Homo sapiens
CTVRLVPVGQFDYW

SEQ ID NO: 803 - protein, 19 aa, Homo sapiens
CASPSSSYVDYSINGFDVW

SEQ ID NO: 804 - protein, 17 aa, Homo sapiens
CAKDSSGSYSDNWFDPW

SEQ ID NO: 805 - protein, 12 aa, Homo sapiens
CQQYKSYSSTSF

SEQ ID NO: 806 - protein, 18 aa, Homo sapiens
CASLRITRYNWNDVMDYW

SEQ ID NO: 807 - protein, 23 aa, Homo sapiens
CAVRLYDFWNGNYRTYYYGMDVW

SEQ ID NO: 808 - protein, 13 aa, Homo sapiens
CQQYNNRPLMFNF

SEQ ID NO: 809 - protein, 13 aa, Homo sapiens
CATSPWNMVADYW

SEQ ID NO: 810 - protein, 16 aa, Homo sapiens
CARTPVVPGAIIFDYW

SEQ ID NO: 811 - protein, 22 aa, Homo sapiens
CARGSVPYYDFWSGSSYYFDYW

SEQ ID NO: 812 - protein, 22 aa, Homo sapiens
CARGNKQWLVLPRNYYYYMDVW

SEQ ID NO: 813 - protein, 17 aa, Homo sapiens
CARDARRTTVTASFDCW

SEQ ID NO: 814 - protein, 19 aa, Homo sapiens
CAREGAQTMIVVVVFFDYW

SEQ ID NO: 815 - protein, 17 aa, Homo sapiens
CTRGYCTRNNCYRDDYW

SEQ ID NO: 816 - protein, 17 aa, Homo sapiens
CASSRAYSSSWSPFDYW

SEQ ID NO: 817 - protein, 16 aa, Homo sapiens
CAKDRDWGGAAYFDYW

SEQ ID NO: 818 - protein, 18 aa, Homo sapiens
CARDADIVVVPARAFDYW

SEQ ID NO: 819 - protein, 24 aa, Homo sapiens
CARGKRLVAPAAINPNYYYGMDVW

SEQ ID NO: 820 - protein, 21 aa, Homo sapiens
CARDRYYYDSSGYLINWFDPW

SEQ ID NO: 821 - protein, 17 aa, Homo sapiens
CARRGIAESGAAHFDYW

SEQ ID NO: 822 - protein, 14 aa, Homo sapiens
CAKLPSGWDGFDYW

SEQ ID NO: 823 - protein, 11 aa, Homo sapiens [sequence omitted]

SEQ ID NO: 824 - protein, 16 aa, Homo sapiens
CAKMGVPDYGDYFDYW

SEQ ID NO: 825 - protein, 18 aa, Homo sapiens
CARSLAMIVVGGYAFDIW

SEQ ID NO: 826 - protein, 23 aa, Homo sapiens
CARGPLYYYRTSGYYGVHYFDYW

SEQ ID NO: 827 - protein, 20 aa, Homo sapiens
CARTGLRYFDWLTHNWFDPW

SEQ ID NO: 828 - protein, 18 aa, Homo sapiens
CRVVPAAPFYYYYGMDVW

SEQ ID NO: 829 - protein, 17 aa, Homo sapiens
CARVTTGTTFFGWFDPW

SEQ ID NO: 830 - protein, 18 aa, Homo sapiens
CARDQDTALGKVYYFDYW

SEQ ID NO: 831 - protein, 19 aa, Homo sapiens
CAKDIERITIFGVGPFDYW

SEQ ID NO: 832 - protein, 20 aa, Homo sapiens
CAREFVLSGEWGHPGGNDYW

SEQ ID NO: 833 - protein, 14 aa, Homo sapiens
CARGFRDYGDFDYW

SEQ ID NO: 834 - protein, 15 aa, Homo sapiens
CFARVRFLEWLIDYW

SEQ ID NO: 835 - protein, 16 aa, Homo sapiens
CAHRPDFSSSMIFDYW

SEQ ID NO: 836 - protein, 18 aa, Homo sapiens
CATYYYDSSGTYWYFDLW

SEQ ID NO: 837 - protein, 14 aa, Homo sapiens
CARLYTSGNPFDAW

SEQ ID NO: 838 - protein, 15 aa, Homo sapiens
CARDGIQLWTTIDYW

SEQ ID NO: 839 - protein, 19 aa, Homo sapiens
CATEYAYCGGDCPRSFDYW

SEQ ID NO: 840 - protein, 16 aa, Homo sapiens
CANGPRAGTTLYFDLW

SEQ ID NO: 841 - protein, 18 aa, Homo sapiens
CATAGAYGSGNYYNSDYW

SEQ ID NO: 842 - protein, 13 aa, Homo sapiens
CARQEVGSYFDLW

SEQ ID NO: 843 - protein, 15 aa, Homo sapiens
CYSSGYYYYYYMDVW

SEQ ID NO: 844 - protein, 23 aa, Homo sapiens
CAKQTGYYDSGGYWGSVEYFQDW

SEQ ID NO: 845 - protein, 18 aa, Homo sapiens
CARVRLWFGEFFSDSDYW

SEQ ID NO: 846 - protein, 18 aa, Homo sapiens
CARSGFLEWLLHVHLDYW

SEQ ID NO: 847 - protein, 13 aa, Homo sapiens
CAKFTGTGEGDYW

SEQ ID NO: 848 - protein, 16 aa, Homo sapiens
CARGDSYGSVAYFDYW

SEQ ID NO: 849 - protein, 21 aa, Homo sapiens
CAREIWDTGMTRFYYYGMDVW

SEQ ID NO: 850 - protein, 13 aa, Homo sapiens
CQVWDSTYDHTIF

SEQ ID NO: 851 - protein, 19 aa, Homo sapiens
CKNGVCYPESYYHYGMDVW

SEQ ID NO: 852 - protein, 16 aa, Homo sapiens
CARAYSSGWTSGFDYW

SEQ ID NO: 853 - protein, 12 aa, Homo sapiens
CATGAAAYFDFW

SEQ ID NO: 854 - protein, 15 aa, Homo sapiens
CAKAAKWETTVVDYW

SEQ ID NO: 855 - protein, 15 aa, Homo sapiens
CARQPSLAVPYFDYW

SEQ ID NO: 856 - protein, 19 aa, Homo sapiens
CAREVRSGSYYYYYSMDVW

SEQ ID NO: 857 - protein, 20 aa, Homo sapiens
CARLRAQQLAYGPMYYFDYW

SEQ ID NO: 858 - protein, 16 aa, Homo sapiens
CARVGDSSSSWGFDPW

SEQ ID NO: 859 - protein, 26 aa, Homo sapiens
CARGRPHNYYDSGSYYNRRMNWFDPW

SEQ ID NO: 860 - protein, 13 aa, Homo sapiens
CARGYLENSFDLW

SEQ ID NO: 861 - protein, 19 aa, Homo sapiens
CATLLSGLWFGENDAFDIW

SEQ ID NO: 862 - protein, 22 aa, Homo sapiens
CTTDRVRVGQWLVVDYYYMDVW

SEQ ID NO: 863 - protein, 21 aa, Homo sapiens
CATGYYDSSGYYYLTRPFDYW

SEQ ID NO: 864 - protein, 22 aa, Homo sapiens
CAREAEYYDILTGYYKYAFDMW

SEQ ID NO: 865 - protein, 21 aa, Homo sapiens
CARHRLSFSFGVVIIDAFDIW

SEQ ID NO: 866 - protein, 20 aa, Homo sapiens
CAKGFTYYYDSAGFRYLDYW

SEQ ID NO: 867 - protein, 15 aa, Homo sapiens
CQSSDSSLSAPHVVF

SEQ ID NO: 868 - protein, 15 aa, Homo sapiens
CATGWLQLREGFQHW

SEQ ID NO: 869 - protein, 22 aa, Homo sapiens
CARAGKARFLEWLLRPDAFDIW

SEQ ID NO: 870 - protein, 15 aa, Homo sapiens
CVKEIGAWMGAFDVW

SEQ ID NO: 871 - protein, 17 aa, Homo sapiens
CAMGGSGYDIILLIDYW

SEQ ID NO: 872 - protein, 20 aa, Homo sapiens
CAKGEWYYDFWSGYFPFDYW

SEQ ID NO: 873 - protein, 19 aa, Homo sapiens
CTTWEPDVGVVVTATLDYW

SEQ ID NO: 874 - protein, 24 aa, Homo sapiens
CARDAGVSVMGWYEVVPAASGDYW

SEQ ID NO: 875 - protein, 22 aa, Homo sapiens
CARHKSRLQQWLVLDSLYFDYW

SEQ ID NO: 876 - protein, 21 aa, Homo sapiens
CARAPRQHGAPMVRELEFDYW

SEQ ID NO: 877 - protein, 16 aa, Homo sapiens
CAHRTLAVAGFLLDYW

SEQ ID NO: 878 - protein, 19 aa, Homo sapiens
CASDGATAGRSGEYYFDYW

SEQ ID NO: 879 - protein, 17 aa, Homo sapiens
CARHRGGWEQLPYFDYW

SEQ ID NO: 880 - protein, 14 aa, Homo sapiens
CTRWATAVDYFDHW

SEQ ID NO: 881 - protein, 16 aa, Homo sapiens
CARQVDIPMVATFDYW

SEQ ID NO: 882 - protein, 21 aa, Homo sapiens
CAITYALTTVVSPEKPFFLYW

SEQ ID NO: 883 - protein, 15 aa, Homo sapiens
CAKDYGTTMEGFDCW

SEQ ID NO: 884 - protein, 20 aa, Homo sapiens
CARESAYDFWSGYTDGFDPW

SEQ ID NO: 885 - protein, 18 aa, Homo sapiens
CARRGFLDIYYYYGMDVW

SEQ ID NO: 886 - protein, 18 aa, Homo sapiens
CARNVDLGLVPALGFDYW

SEQ ID NO: 887 - protein, 15 aa, Homo sapiens
CARLSRYEPRDFDYW

SEQ ID NO: 888 - protein, 18 aa, Homo sapiens
CAREVAGGYDRQYYFDYW

SEQ ID NO: 889 - protein, 21 aa, Homo sapiens
CARVAVAASPQSYYSYGMDVW

SEQ ID NO: 890 - protein, 13 aa, Homo sapiens
CARVRIEGRYDYW

SEQ ID NO: 891 - protein, 14 aa, Homo sapiens
CARLLNPYSYIDYW

SEQ ID NO: 892 - protein, 20 aa, Homo sapiens
CARDTYSSSWYGTKYYFDYW

SEQ ID NO: 893 - protein, 19 aa, Homo sapiens
CARHHRRWLQLRPDAFDIW

SEQ ID NO: 894 - protein, 15 aa, Homo sapiens
CTTHTGYSYGYYDPW

SEQ ID NO: 895 - protein, 21 aa, Homo sapiens
CARLDGNSYVPNYSYYYMDVW

SEQ ID NO: 896 - protein, 24 aa, Homo sapiens
CARAHSFYNIRSERLENTPYFDYW

SEQ ID NO: 897 - protein, 17 aa, Homo sapiens
CARDTSGERPLPHFEYW

SEQ ID NO: 898 - protein, 12 aa, Homo sapiens [sequence omitted]

SEQ ID NO: 899 - protein, 12 aa, Homo sapiens
CQSEDGSGLIFF

SEQ ID NO: 900 - protein, 22 aa, Homo sapiens
CARAYYDFWSGYSLAANWFDPW

SEQ ID NO: 901 - protein, 16 aa, Homo sapiens
CARGTVGPTYNYFDNW

SEQ ID NO: 902 - protein, 16 aa, Homo sapiens
CATAAPVGPVHWFDPW

SEQ ID NO: 903 - protein, 23 aa, Homo sapiens
CARDHNMSYDFWSGYYPSFCDYW

SEQ ID NO: 904 - protein, 14 aa, Homo sapiens
CNSRDNGGNHPVIF

SEQ ID NO: 905 - protein, 17 aa, Homo sapiens
CARLFHFDWLVRHFDYW

SEQ ID NO: 906 - protein, 18 aa, Homo sapiens
CATSPAMVTISSHWFDPW

SEQ ID NO: 907 - protein, 12 aa, Homo sapiens
CAHIGTASEDYW

SEQ ID NO: 908 - protein, 17 aa, Homo sapiens
CAASQPDFSGISGLDYW

SEQ ID NO: 909 - protein, 22 aa, Homo sapiens
CARRCCAITMISPTNYYYMDVW

SEQ ID NO: 910 - protein, 18 aa, Homo sapiens
CARLPDTNMVIPYYSDHW

SEQ ID NO: 911 - protein, 20 aa, Homo sapiens
CARGSVYSRGGDYYYGMDVW

SEQ ID NO: 912 - protein, 17 aa, Homo sapiens
CAKDSSMIKTKYYFDYW

SEQ ID NO: 913 - protein, 18 aa, Homo sapiens
CVRDSSGRGGFGDWFDPW

SEQ ID NO: 914 - protein, 19 aa, Homo sapiens
CARAAYPLYSSSSDWFDPW

SEQ ID NO: 915 - protein, 19 aa, Homo sapiens
CARDNDNSGSYYSYAMDVW

SEQ ID NO: 916 - protein, 18 aa, Homo sapiens
CTKIATPGVGTTGTFDDW

SEQ ID NO: 917 - protein, 22 aa, Homo sapiens
CARAVDYDFLTGNSYYYGMDVW

SEQ ID NO: 918 - protein, 17 aa, Homo sapiens
CARDRLGSSWQEGFDYW

SEQ ID NO: 919 - protein, 14 aa, Homo sapiens
CARAPYPYGDYDYW

SEQ ID NO: 920 - protein, 18 aa, Homo sapiens
CARIGRIHLWSPGHFDSW

SEQ ID NO: 921 - protein, 18 aa, Homo sapiens
CARLFSTGMAGRGWIDSW

SEQ ID NO: 922 - protein, 22 aa, Homo sapiens
CARVAEWQQLPTHYSYYGMDVW

SEQ ID NO: 923 - protein, 21 aa, Homo sapiens
CATRHISITIFGVVTDYFDYW

SEQ ID NO: 924 - protein, 17 aa, Homo sapiens
CARDDGDYRAGDAFDIW

SEQ ID NO: 925 - protein, 24 aa, Homo sapiens
CAKAFSADYKMGGQWLVNKAFDYW

SEQ ID NO: 926 - protein, 25 aa, Homo sapiens
CARDGRYSYGYGRLDNYYYYGMDVW

SEQ ID NO: 927 - protein, 14 aa, Homo sapiens
CTRGGTSVKRFDLW

SEQ ID NO: 928 - protein, 17 aa, Homo sapiens
CARSLPIGHFYYYMDVW

SEQ ID NO: 929 - protein, 16 aa, Homo sapiens
CASPNYYGLRTGFDYW

SEQ ID NO: 930 - protein, 16 aa, Homo sapiens
CAKGAGFVVAAGIDYW

SEQ ID NO: 931 - protein, 17 aa, Homo sapiens
CARDLVAITGDNFLDSW

SEQ ID NO: 932 - protein, 24 aa, Homo sapiens
CANPGYCSSTSCYVFMYYYGMDVW

SEQ ID NO: 933 - protein, 17 aa, Homo sapiens
CAKDYRSGWSWYYFDYW

SEQ ID NO: 934 - protein, 24 aa, Homo sapiens
CATALPIYSGYDSNFYYYYGMDVW

SEQ ID NO: 935 - protein, 25 aa, Homo sapiens
CARDRSMGELWSRRLFLPSYYFDYW

SEQ ID NO: 936 - protein, 19 aa, Homo sapiens
CARDFGYSSGWYNGYFDYW

SEQ ID NO: 937 - protein, 18 aa, Homo sapiens
CATWAYCGRSSCYSLDYW

SEQ ID NO: 938 - protein, 16 aa, Homo sapiens
CARDIAVAGQYYFDYW

SEQ ID NO: 939 - protein, 17 aa, Homo sapiens
CARDPLSSGWYSAFDIW

SEQ ID NO: 940 - protein, 15 aa, Homo sapiens
CATHDFWSGYTFDYW

SEQ ID NO: 941 - protein, 18 aa, Homo sapiens
CASSGMAAADTDTDFDYW

SEQ ID NO: 942 - protein, 15 aa, Homo sapiens
CARGGISGTTHFNYW

SEQ ID NO: 943 - protein, 21 aa, Homo sapiens
CARLLGYYDRSDYYSNYFDYW

SEQ ID NO: 944 - protein, 16 aa, Homo sapiens
CARVSPSGNSWLLDYW

SEQ ID NO: 945 - protein, 27 aa, Homo sapiens
CASLSAKVVPAAIFAVDSSYYYYMDDW

SEQ ID NO: 946 - protein, 18 aa, Homo sapiens
CAGDDSSGYYYYNWFDPW

SEQ ID NO: 947 - protein, 21 aa, Homo sapiens
CAHSQEFDFAWGTYRFHFDYW

SEQ ID NO: 948 - protein, 25 aa, Homo sapiens
CARVRIRSSYISGWYEWKTDYFDYW

SEQ ID NO: 949 - protein, 18 aa, Homo sapiens
CAKGPPYSSSWYHPGDYW

SEQ ID NO: 950 - protein, 18 aa, Homo sapiens
CAKSPFTGTVGPGTFDYW

SEQ ID NO: 951 - protein, 14 aa, Homo sapiens
CARGTGEWLPLDYW

SEQ ID NO: 952 - protein, 19 aa, Homo sapiens
CARTRSRTIFGVVSWFDPW

SEQ ID NO: 953 - protein, 16 aa, Homo sapiens
CAKFPLYYDSSRVDYW

SEQ ID NO: 954 - protein, 14 aa, Homo sapiens
CAREKGGTWNFDYW

SEQ ID NO: 955 - protein, 22 aa, Homo sapiens
CARDRTCGGDCQEYYYYGMDVW

SEQ ID NO: 956 - protein, 18 aa, Homo sapiens
CAMTPHSSGYYGDAFDIW

SEQ ID NO: 957 - protein, 21 aa, Homo sapiens
CAREGDYYDSSGYYYTGFDYW

SEQ ID NO: 958 - protein, 20 aa, Homo sapiens
CARSEDYGDYLNPNGAFDIW

SEQ ID NO: 959 - protein, 29 aa, Homo sapiens
CAREGIASAYDFWSGYQTHYYYYYYMDVW

SEQ ID NO: 960 - protein, 22 aa, Homo sapiens
CARHATLRMIVVVIPWGPIDYW

SEQ ID NO: 961 - protein, 22 aa, Homo sapiens
CARKPDYDFWSGYYIANAFDIW

SEQ ID NO: 962 - protein, 17 aa, Homo sapiens
CARATSVAATDWFFDLW

SEQ ID NO: 963 - protein, 14 aa, Homo sapiens
CARDGGLGASFDLW

SEQ ID NO: 964 - protein, 23 aa, Homo sapiens
CAKGQDRSKMATTVQREYYFDYW

SEQ ID NO: 965 - protein, 12 aa, Homo sapiens
CSSYAGSYNVAF

SEQ ID NO: 966 - protein, 14 aa, Homo sapiens
CTTEWSFSSGWDYW

SEQ ID NO: 967 - protein, 19 aa, Homo sapiens
CARGDLRTIFGVVNELDYW

SEQ ID NO: 968 - protein, 16 aa, Homo sapiens
CAKGYSSGWWWFSDSW

SEQ ID NO: 969 - protein, 14 aa, Homo sapiens
CQSYDSTLRGLWVF

SEQ ID NO: 970 - protein, 20 aa, Homo sapiens
CTLFPYTTLFRSRRIAFDIW

SEQ ID NO: 971 - protein, 22 aa, Homo sapiens
CARGVENYDFWSGYPGYGFDPW

SEQ ID NO: 972 - protein, 16 aa, Homo sapiens
CARTVYSSSPGEFDYW

SEQ ID NO: 973 - protein, 16 aa, Homo sapiens
CAHSRIGETSDAFNIW

SEQ ID NO: 974 - protein, 17 aa, Homo sapiens
CVKDSLPNVYYYYMDVW

SEQ ID NO: 975 - protein, 17 aa, Homo sapiens
CARRAVAYDILWYFDFW

SEQ ID NO: 976 - protein, 14 aa, Homo sapiens
CVKGLVGAIHFDYW

SEQ ID NO: 977 - protein, 15 aa, Homo sapiens
CARIIWWGNYYFDYW

SEQ ID NO: 978 - protein, 20 aa, Homo sapiens
CARILYGEYSSSSEINFDYW

SEQ ID NO: 979 - protein, 13 aa, Homo sapiens
CQSAHNSGDYKVF

SEQ ID NO: 980 - protein, 17 aa, Homo sapiens
CATFFAVAGTRTQFDYW

SEQ ID NO: 981 - protein, 12 aa, Homo sapiens
CQQYDRSPRYNF

SEQ ID NO: 982 - protein, 16 aa, Homo sapiens
CARLDYGDYWGYFDYW

SEQ ID NO: 983 - protein, 16 aa, Homo sapiens
CARDRSGSYTLLFDYW

SEQ ID NO: 984 - protein, 18 aa, Homo sapiens
CTTVLYCSGGSCRNIDYW

SEQ ID NO: 985 - protein, 25 aa, Homo sapiens
CARAYYYDSSGYYYPNYYYYGMDVW

SEQ ID NO: 986 - protein, 14 aa, Homo sapiens
CAKGKYEPGYQDYW

SEQ ID NO: 987 - protein, 24 aa, Homo sapiens
CARGPDSGGFFVGLMDSDNWFDSW

SEQ ID NO: 988 - protein, 22 aa, Homo sapiens
CARHRTVYDYGGNAIDYYFDYW

SEQ ID NO: 989 - protein, 17 aa, Homo sapiens
CVKGGIAARPPRLFDYW

SEQ ID NO: 990 - protein, 15 aa, Homo sapiens
CASGIAARRGSFDYW

SEQ ID NO: 991 - protein, 17 aa, Homo sapiens
CARDSRAMLGYWYFDLW

SEQ ID NO: 992 - protein, 22 aa, Homo sapiens
CARDSHEYYDLLGRALYYFDYW

SEQ ID NO: 993 - protein, 14 aa, Homo sapiens
CQSYDSPLSGSAIF

SEQ ID NO: 994 - protein, 22 aa, Homo sapiens
CATLYCSGGSCYTGSSYFFDQW

SEQ ID NO: 995 - protein, 16 aa, Homo sapiens
CAREGHSGGWYGFDYW

SEQ ID NO: 996 - protein, 17 aa, Homo sapiens
CAKDIGFGANAPAFDYW

SEQ ID NO: 997 - protein, 17 aa, Homo sapiens
CAKDLGLAVGTSPWDYW

SEQ ID NO: 998 - protein, 15 aa, Homo sapiens
CARDGISEGDGFDYW

SEQ ID NO: 999 - protein, 16 aa, Homo sapiens
CANSRVAHILGVFDYW

SEQ ID NO: 1000 - protein, 18 aa, Homo sapiens
CARRVSWEYYYYYYMDVW

SEQ ID NO: 1001 - protein, 16 aa, Homo sapiens
CAAVGVDGDYVRSDYW

SEQ ID NO: 1002 - protein, 16 aa, Homo sapiens
CARETTYLPTRLFDYW

SEQ ID NO: 1003 - protein, 24 aa, Homo sapiens
CARLQYSITRFGALMNSYYYMDVW

SEQ ID NO: 1004 - protein, 25 aa, Homo sapiens
CARVRTIFGVVTAPHHYYYYYMDVW

SEQ ID NO: 1005 - protein, 18 aa, Homo sapiens
CARDGAFVAARLNYFDPW

SEQ ID NO: 1006 - protein, 11 aa, Homo sapiens
CANSGNHFDYW

SEQ ID NO: 1007 - protein, 16 aa, Homo sapiens
CATDPVDTAMVGGDYW

SEQ ID NO: 1008 - protein, 22 aa, Homo sapiens
CARRIPTNWLRIAVAGTWFDPW

SEQ ID NO: 1009 - protein, 18 aa, Homo sapiens
CAKRALYYYDSNSAFDIW

SEQ ID NO: 1010 - protein, 26 aa, Homo sapiens
CARSRTVGDFWSGYYTENYYYGMDVW

SEQ ID NO: 1011 - protein, 12 aa, Homo sapiens
CETWDSKAFYVF

SEQ ID NO: 1012 - protein, 22 aa, Homo sapiens
CARGLILTGPLDYYYYYGMDVW

SEQ ID NO: 1013 - protein, 24 aa, Homo sapiens
CARFSQSRYYYDSSGQLLGYFDYW

SEQ ID NO: 1014 - protein, 15 aa, Homo sapiens
CASIDYDSSGYHDYW

SEQ ID NO: 1015 - protein, 20 aa, Homo sapiens
CARDLTYDFWSGYYKGFDYW

SEQ ID NO: 1016 - protein, 13 aa, Homo sapiens
CARDSSILAFDIW

SEQ ID NO: 1017 - protein, 19 aa, Homo sapiens
CARLDNNWNNGWGSYFDNW

SEQ ID NO: 1018 - protein, 17 aa, Homo sapiens
CARDLDTSDWYSWFDPW

SEQ ID NO: 1019 - protein, 20 aa, Homo sapiens
CAKGTIRFVEWSASGGWDYW

SEQ ID NO: 1020 - protein, 16 aa, Homo sapiens
CARELQGPREYYFDYW

SEQ ID NO: 1021 - protein, 17 aa, Homo sapiens
CARDLVVVPATDAFDIW

SEQ ID NO: 1022 - protein, 22 aa, Homo sapiens
CARLSDIVVVPAAMVSGWYDYW

SEQ ID NO: 1023 - protein, 21 aa, Homo sapiens
CASRTTGLLHTFTNYHYMDVW

SEQ ID NO: 1024 - protein, 15 aa, Homo sapiens
CARLQDDGGYQLDYW

SEQ ID NO: 1025 - protein, 20 aa, Homo sapiens
CAKDEDCSGGSCYSGAFDIW

SEQ ID NO: 1026 - protein, 17 aa, Homo sapiens
CARANGPWFGESNFDYW

SEQ ID NO: 1027 - protein, 16 aa, Homo sapiens
CVRDSFDEELVRFDFW

SEQ ID NO: 1028 - protein, 18 aa, Homo sapiens
CARHPPYGGRWPYYFDFW

SEQ ID NO: 1029 - protein, 23 aa, Homo sapiens
CAKDTAPCYVPQCYYDSSGFDYW

SEQ ID NO: 1030 - protein, 16 aa, Homo sapiens
CARAGDYGSGIDFDYW

SEQ ID NO: 1031 - protein, 24 aa, Homo sapiens
CARGPLRFLEWLFTADYYYGMDVW

SEQ ID NO: 1032 - protein, 23 aa, Homo sapiens
CAKDSMSSGNCSGGSCYGDFDYW

SEQ ID NO: 1033 - protein, 17 aa, Homo sapiens
CAKNRGATTTKYYFDYW

SEQ ID NO: 1034 - protein, 13 aa, Homo sapiens
CQQYHNWPPGHPF

SEQ ID NO: 1035 - protein, 19 aa, Homo sapiens
CAKDLHFSYGDLYNWFDPW

SEQ ID NO: 1036 - protein, 16 aa, Homo sapiens
CASVSARVGGFYFDHW

SEQ ID NO: 1037 - protein, 17 aa, Homo sapiens
CAREGRYFDWLLAFDIW

SEQ ID NO: 1038 - protein, 13 aa, Homo sapiens
CQQYSTYSRSITF

SEQ ID NO: 1039 - protein, 24 aa, Homo sapiens
CARRRTWIQLWLGGYYYYYGMDVW

SEQ ID NO: 1040 - protein, 19 aa, Homo sapiens
CARELTYYYGSGSCAFDIW

SEQ ID NO: 1041 - protein, 13 aa, Homo sapiens
CARGTPDLSFDSW

SEQ ID NO: 1042 - protein, 17 aa, Homo sapiens
CARQIYDSNGIPHFDYW

SEQ ID NO: 1043 - protein, 25 aa, Homo sapiens
CARGLSPKGQTIVATIRQHNWFDPW

SEQ ID NO: 1044 - protein, 24 aa, Homo sapiens
CARISGGYMYGSKKPNYYYGMDVW

SEQ ID NO: 1045 - protein, 21 aa, Homo sapiens
CARGRYCSSPSCYKANWFDPW

SEQ ID NO: 1046 - protein, 17 aa, Homo sapiens
CARKGGSSGYYYQFDPW

SEQ ID NO: 1047 - protein, 15 aa, Homo sapiens
CTTDAVSSRRGVDYW

SEQ ID NO: 1048 - protein, 19 aa, Homo sapiens
CARHRGGEGSSRYDTFEIW

SEQ ID NO: 1049 - protein, 15 aa, Homo sapiens
CARVVAATRGWFDPW

SEQ ID NO: 1050 - protein, 16 aa, Homo sapiens
CATSAAAGTIDWFDPW

SEQ ID NO: 1051 - protein, 17 aa, Homo sapiens
CARVSADDYTAYFFDYW

SEQ ID NO: 1052 - protein, 11 aa, Homo sapiens
CSSYTTTSTFF

SEQ ID NO: 1053 - protein, 19 aa, Homo sapiens
CAPSLRAFVYSSSWYFDYW

SEQ ID NO: 1054 - protein, 18 aa, Homo sapiens
CVKYGGKYYPGESRFDAW

SEQ ID NO: 1055 - protein, 22 aa, Homo sapiens
CAKRGYYDSSGYYYEGEYFQHW

SEQ ID NO: 1056 - protein, 18 aa, Homo sapiens
CAKDLNLVDGSSGWNDYW

SEQ ID NO: 1057 - protein, 21 aa, Homo sapiens
CARDPGALYSSSSGYYYFDYW

SEQ ID NO: 1058 - protein, 13 aa, Homo sapiens
CQSYDAYNHRAVF

SEQ ID NO: 1059 - protein, 11 aa, Homo sapiens
CLNGDLQFDYW

SEQ ID NO: 1060 - protein, 12 aa, Homo sapiens
CAKDLGGYYYYW

SEQ ID NO: 1061 - protein, 20 aa, Homo sapiens
CARDKRLYGTSWDPTWLDPW

SEQ ID NO: 1062 - protein, 18 aa, Homo sapiens
CARPHPNSSGYSGAFDIW

SEQ ID NO: 1063 - protein, 24 aa, Homo sapiens
CARLQYSTTIFGARWNSYYYVDFW

SEQ ID NO: 1064 - protein, 16 aa, Homo sapiens
CAKDIYYDSSGYPNYW

SEQ ID NO: 1065 - protein, 25 aa, Homo sapiens
CARVKKTTYYDILTGYLKQYYFDYW

SEQ ID NO: 1066 - protein, 12 aa, Homo sapiens
CMQDAQDPWITF

SEQ ID NO: 1067 - protein, 16 aa, Homo sapiens
CAHRRGSSYPNCFDYW

SEQ ID NO: 1068 - protein, 24 aa, Homo sapiens
CARDHYVAVAGFPVWPPSDYMDVW

SEQ ID NO: 1069 - protein, 16 aa, Homo sapiens
CARDFQMTDNGYFDYW

SEQ ID NO: 1070 - protein, 23 aa, Homo sapiens
CAKDQCFRCSSGWYYYYYGMDVW

SEQ ID NO: 1071 - protein, 20 aa, Homo sapiens
CAADYGDYVRGSYYYGMDVW

SEQ ID NO: 1072 - protein, 17 aa, Homo sapiens
CARPLTTKDYYYGMDVW

SEQ ID NO: 1073 - protein, 14 aa, Homo sapiens
CARDRIPYGEIDYW

SEQ ID NO: 1074 - protein, 17 aa, Homo sapiens
CVRDLSTSWYWGRFDCW

SEQ ID NO: 1075 - protein, 22 aa, Homo sapiens
CASLRWDYYDSSGFSYYYMDVW

SEQ ID NO: 1076 - protein, 23 aa, Homo sapiens
CARDLVGYCSSTSCYAGWYFDLW

SEQ ID NO: 1077 - protein, 19 aa, Homo sapiens
CARGYCTNGVCYLDAFDIW

SEQ ID NO: 1078 - protein, 16 aa, Homo sapiens
CAGLSGDFYPGSFDVW

SEQ ID NO: 1079 - protein, 15 aa, Homo sapiens
CASRKMDAAMVADYW

SEQ ID NO: 1080 - protein, 21 aa, Homo sapiens
CAREFRDITIFGVVIHTFDYW

SEQ ID NO: 1081 - protein, 19 aa, Homo sapiens
CASFVRYCSSTSCYHFDYW

SEQ ID NO: 1082 - protein, 15 aa, Homo sapiens
CARSDSYLVQGFDFW

SEQ ID NO: 1083 - protein, 16 aa, Homo sapiens
CAKGGPLGEQWLIDYW

SEQ ID NO: 1084 - protein, 15 aa, Homo sapiens
CTTEMWDYGDYFHYW

SEQ ID NO: 1085 - protein, 15 aa, Homo sapiens
CARDRWSSSGWFDSW

SEQ ID NO: 1086 - protein, 17 aa, Homo sapiens
CAREARRYNWNLLFDYW

SEQ ID NO: 1087 - protein, 19 aa, Homo sapiens
CARDLYDSLTGPNNWFDPW

SEQ ID NO: 1088 - protein, 16 aa, Homo sapiens
CATQPTVTRGGWFDPW

SEQ ID NO: 1089 - protein, 14 aa, Homo sapiens
CARGYGDNWLADYW

SEQ ID NO: 1090 - protein, 16 aa, Homo sapiens
CARGGASSHYEYFDYW

SEQ ID NO: 1091 - protein, 15 aa, Homo sapiens
CAKVGGYAPGGFDYW

SEQ ID NO: 1092 - protein, 15 aa, Homo sapiens
CSSPSCYKANWFDPW

SEQ ID NO: 1093 - protein, 24 aa, Homo sapiens
CARDAAQGIAGSLLWYYYYGMDVW

SEQ ID NO: 1094 - protein, 11 aa, Homo sapiens
CATLRDYGDYW

SEQ ID NO: 1095 - protein, 21 aa, Homo sapiens
CAREVSVNTAVGSIPYAMDVW

SEQ ID NO: 1096 - protein, 17 aa, Homo sapiens
CARATRGLIAVQNFDYW

SEQ ID NO: 1097 - protein, 16 aa, Homo sapiens
CAKDLRTTWLYYFDYW

SEQ ID NO: 1098 - protein, 19 aa, Homo sapiens
CARFFGQPQWVGRYYFDYW

SEQ ID NO: 1099 - protein, 13 aa, Homo sapiens
CAHRLTLKAFDYW

SEQ ID NO: 1100 - protein, 19 aa, Homo sapiens
CARRNYDSSGYYPNAFDIW

SEQ ID NO: 1101 - protein, 21 aa, Homo sapiens
CARVAPSALRWLLFQGSFDYW

SEQ ID NO: 1102 - protein, 18 aa, Homo sapiens
CARAPSVGQLWLRWFDPW

SEQ ID NO: 1103 - protein, 25 aa, Homo sapiens
CAKDQADDGIQLWPYVYYYYGMDVW

SEQ ID NO: 1104 - protein, 24 aa, Homo sapiens
CARDPYQYSWSYKGLDSKEGFDYW

SEQ ID NO: 1105 - protein, 24 aa, Homo sapiens
CAREYCGGDCYPGPRPYYYGMDVW

SEQ ID NO: 1106 - protein, 17 aa, Homo sapiens
CAKDHSSSSYYYYMDVW

SEQ ID NO: 1107 - protein, 13 aa, Homo sapiens
CQQYVGSPQTWTF

SEQ ID NO: 1108 - protein, 24 aa, Homo sapiens
CARTKLGYCSGGSCYISIVWFDPW

SEQ ID NO: 1109 - protein, 21 aa, Homo sapiens
CARVLYYYDSSGYQHRGFDYW

SEQ ID NO: 1110 - protein, 16 aa, Homo sapiens
CARQTAVFGGIADDYW

SEQ ID NO: 1111 - protein, 17 aa, Homo sapiens
CARLSGTSWGENWFDPW

SEQ ID NO: 1112 - protein, 24 aa, Homo sapiens
CAGSPGPIRQWLVGPYYYYGMDVW

SEQ ID NO: 1113 - protein, 45 aa, Homo sapiens
CTLFPYTTLFRSARCSLWRRLEAQVGMATRDTLCGDCWPGWFGPW

SEQ ID NO: 1114 - protein, 13 aa, Homo sapiens
CVIAARPYYFDYW

SEQ ID NO: 1115 - protein, 15 aa, Homo sapiens
CAKVYGVQHGFFDYW

SEQ ID NO: 1116 - protein, 20 aa, Homo sapiens
CARGPLKITVLSGSSWFDPW

SEQ ID NO: 1117 - protein, 13 aa, Homo sapiens
CARDSSRAVADYW

SEQ ID NO: 1118 - protein, 20 aa, Homo sapiens
CARQDDFWRDYYAGYFFDYW

SEQ ID NO: 1119 - protein, 12 aa, Homo sapiens
CAPTDIAALDYW

SEQ ID NO: 1120 - protein, 24 aa, Homo sapiens
CARGRTGLERLLGFMSSLFYFDYW

SEQ ID NO: 1121 - protein, 15 aa, Homo sapiens
CARDPYSGSYHFDYW

SEQ ID NO: 1122 - protein, 18 aa, Homo sapiens
CARDLVDSSGWEYYFDYW

SEQ ID NO: 1123 - protein, 13 aa, Homo sapiens
CMQATQFPPSLTF

SEQ ID NO: 1124 - protein, 20 aa, Homo sapiens
CARGHPRFPALVGATDFDYW

SEQ ID NO: 1125 - protein, 20 aa, Homo sapiens
CARERHCSNGLCHDWHFDLW

SEQ ID NO: 1126 - protein, 24 aa, Homo sapiens
CARAVMITFGGVIAQAYYYYMDVW

SEQ ID NO: 1127 - protein, 18 aa, Homo sapiens
CTTSDVVPADPNLDTDYW

SEQ ID NO: 1128 - protein, 24 aa, Homo sapiens
CARDVRNAVAGTLLFYYYYYMDVW

SEQ ID NO: 1129 - protein, 14 aa, Homo sapiens
CASPGYSSSLADYW

SEQ ID NO: 1130 - protein, 23 aa, Homo sapiens
CARVLLEWLLRPQYLYHYYMDVW

SEQ ID NO: 1131 - protein, 13 aa, Homo sapiens
CARERLSSTVDYW

SEQ ID NO: 1132 - protein, 17 aa, Homo sapiens
CVTGLPSSNWDDAFGFW

SEQ ID NO: 1133 - protein, 18 aa, Homo sapiens
CARDPTTVTTIDYYFDYW

SEQ ID NO: 1134 - protein, 21 aa, Homo sapiens
CAKNLHHFYESSSFDNRFDPW

SEQ ID NO: 1135 - protein, 17 aa, Homo sapiens
CARGYCSGGSCHEIDYW

SEQ ID NO: 1136 - protein, 15 aa, Homo sapiens
CARHQSLPNGAFDIW

SEQ ID NO: 1137 - protein, 24 aa, Homo sapiens
CARSHLTEIQLWTKGYYYYYMDVW

SEQ ID NO: 1138 - protein, 19 aa, Homo sapiens
CARHPDDSSGYGKFYFDYW

SEQ ID NO: 1139 - protein, 29 aa, Homo sapiens
CAKDYKYYDFWSGYTRTRSYYYYYDMDVW

SEQ ID NO: 1140 - protein, 20 aa, Homo sapiens
CARDTTYSSGWYVNTPFDYW

SEQ ID NO: 1141 - protein, 19 aa, Homo sapiens
CARVDLTTRRNWNYLFDYW

SEQ ID NO: 1142 - protein, 21 aa, Homo sapiens
CAKGERFLEWLLYGGDYFDYW

SEQ ID NO: 1143 - protein, 18 aa, Homo sapiens
CARSPYSYDSSGYYFDYW

SEQ ID NO: 1144 - protein, 24 aa, Homo sapiens
CARDKLAVYDFWSAYHGTDAFDIW

SEQ ID NO: 1145 - protein, 23 aa, Homo sapiens
CAKEHSYYDFWSGYYGAGWFDPW

SEQ ID NO: 1146 - protein, 16 aa, Homo sapiens
CARVLSSGWLLWFDPW

SEQ ID NO: 1147 - protein, 15 aa, Homo sapiens
CAKGMATITLNFDYW

SEQ ID NO: 1148 - protein, 22 aa, Homo sapiens
CAREAGLAVAGNLFRASIFDYW

SEQ ID NO: 1149 - protein, 17 aa, Homo sapiens
CAREMIQGFYYFYMDVW

SEQ ID NO: 1150 - protein, 19 aa, Homo sapiens
CAKDHYYDSSGYPSPFDPW

SEQ ID NO: 1151 - protein, 16 aa, Homo sapiens
CARRGGSPKYDAFDIW

SEQ ID NO: 1152 - protein, 21 aa, Homo sapiens
CASPMETDYYDSSGYPGFDYW

SEQ ID NO: 1153 - protein, 16 aa, Homo sapiens
CARESNSGFTTYFDSW

SEQ ID NO: 1154 - protein, 20 aa, Homo sapiens
CATLHHPTYYYDSSGSHDYW

SEQ ID NO: 1155 - protein, 18 aa, Homo sapiens
CVRDLRCSGGSCLYYDSW

SEQ ID NO: 1156 - protein, 28 aa, Homo sapiens
CAKDGSVGYYDSSGYYYWFDYYYGMDVW

SEQ ID NO: 1157 - protein, 21 aa, Homo sapiens
CARDLVTVTTHPYYYYGMDVW

SEQ ID NO: 1158 - protein, 23 aa, Homo sapiens
CTRMFVDIEVSLFINYYYYMDVW

SEQ ID NO: 1159 - protein, 19 aa, Homo sapiens
CARASSIAARPIGDYFDYW

SEQ ID NO: 1160 - protein, 23 aa, Homo sapiens
CARSRLAAFRHSSSWYSCNFDYW

SEQ ID NO: 1161 - protein, 26 aa, Homo sapiens
CAKDSPGGSFLEWLQPEYYYYGMDVW

SEQ ID NO: 1162 - protein, 22 aa, Homo sapiens
CARAPPIQVLVVVTAIDAFDIW

SEQ ID NO: 1163 - protein, 19 aa, Homo sapiens
CARDERHCRGGSCMGFDYW

SEQ ID NO: 1164 - protein, 19 aa, Homo sapiens
CARENLAIRDGYNWPLDYW

SEQ ID NO: 1165 - protein, 20 aa, Homo sapiens
CAKREKVSGWAPRDYYFDHW

SEQ ID NO: 1166 - protein, 22 aa, Homo sapiens
CARQYPTRITMIVVAPGAFDIW

SEQ ID NO: 1167 - protein, 17 aa, Homo sapiens
CVRVRGAYLNYYYMDVW

SEQ ID NO: 1168 - protein, 13 aa, Homo sapiens
CANPPRGGYDYTW

SEQ ID NO: 1169 - protein, 17 aa, Homo sapiens
CAKPPDGLRWLPGSDYW

SEQ ID NO: 1170 - protein, 20 aa, Homo sapiens
CASAYDSSGYYGLSDAFDIW

SEQ ID NO: 1171 - protein, 18 aa, Homo sapiens
CARLSYSRSSGEWYFDLW

SEQ ID NO: 1172 - protein, 14 aa, Homo sapiens
CGKDKSDWGSVDYW

SEQ ID NO: 1173 - protein, 19 aa, Homo sapiens
CAKGGYFCTNGVCLISDYW

SEQ ID NO: 1174 - protein, 15 aa, Homo sapiens
CARHPQYYSDAFDIW

SEQ ID NO: 1175 - protein, 23 aa, Homo sapiens
CTRDQFRRSYYDNNGVTYYMDVW

SEQ ID NO: 1176 - protein, 22 aa, Homo sapiens
CAKGSITIFGVVIGPSDAFDIW

SEQ ID NO: 1177 - protein, 16 aa, Homo sapiens
CARGIQLWSSLNFDYW

SEQ ID NO: 1178 - protein, 25 aa, Homo sapiens
CAKVLPYYDFWSGYWDYYYYGMDVW

SEQ ID NO: 1179 - protein, 19 aa, Homo sapiens
CARHIGGQYSYGGNWLDPW

SEQ ID NO: 1180 - protein, 22 aa, Homo sapiens
CARLGLRKSIAARRLSNWFDPW

SEQ ID NO: 1181 - protein, 23 aa, Homo sapiens
CARDLRGHCINGVCYRGLDFDYW

SEQ ID NO: 1182 - protein, 16 aa, Homo sapiens
CANDQGTYGGFYFDFW

SEQ ID NO: 1183 - protein, 20 aa, Homo sapiens
CESLRFLEWLPYLIGAFDIW

SEQ ID NO: 1184 - protein, 13 aa, Homo sapiens
CQQYNPYSPPLTF

SEQ ID NO: 1185 - protein, 16 aa, Homo sapiens
CARDIVGATTGYFDYW

SEQ ID NO: 1186 - protein, 14 aa, Homo sapiens
CARGPNLWNWFDPW

SEQ ID NO: 1187 - protein, 21 aa, Homo sapiens
CAKDDPWYSSPFGVGGAFDIW

SEQ ID NO: 1188 - protein, 17 aa, Homo sapiens
CARTGYMGSGWYYFDYW

SEQ ID NO: 1189 - protein, 20 aa, Homo sapiens
CTLFPYTTLFRSWYEYLDYW

SEQ ID NO: 1190 - protein, 17 aa, Homo sapiens
CARGRSSAWFEDAFDVW

SEQ ID NO: 1191 - protein, 24 aa, Homo sapiens
CARLGYCSGRTCHDYFYHYALDVW

SEQ ID NO: 1192 - protein, 19 aa, Homo sapiens
CAREQITSSSLLPNWFDPW

SEQ ID NO: 1193 - protein, 17 aa, Homo sapiens
CARRDGGNYYYYHMDVW

SEQ ID NO: 1194 - protein, 21 aa, Homo sapiens
CAKDGNVYGSGSYWDNWFDPW

SEQ ID NO: 1195 - protein, 18 aa, Homo sapiens
CARSLMVLGHYSYAMDVW

SEQ ID NO: 1196 - protein, 24 aa, Homo sapiens
CAKDNFFWYSSSSKPIDKNWFDPW

SEQ ID NO: 1197 - protein, 16 aa, Homo sapiens
CASNRYFDWLSSLDYW

SEQ ID NO: 1198 - protein, 24 aa, Homo sapiens
CARHGGHSITMIVVVIHPYYFDYW

SEQ ID NO: 1199 - protein, 13 aa, Homo sapiens
CQQYNSISSGYTF

SEQ ID NO: 1200 - protein, 14 aa, Homo sapiens
CAREGYSSAWLDYW

SEQ ID NO: 1201 - protein, 13 aa, Homo sapiens
CQMWESSSDHILF

SEQ ID NO: 1202 - protein, 14 aa, Homo sapiens
CARDEGISWPLDYW

SEQ ID NO: 1203 - protein, 20 aa, Homo sapiens
CARTGYCVNGVCPIGAFDPW

SEQ ID NO: 1204 - protein, 18 aa, Homo sapiens
CARDSLDYTDSSWYFDTW

SEQ ID NO: 1205 - protein, 19 aa, Homo sapiens
CVRHAVVAARPRGGYFDSW

SEQ ID NO: 1206 - protein, 18 aa, Homo sapiens
CARAVIVVDLPAPYFDYW

SEQ ID NO: 1207 - protein, 19 aa, Homo sapiens
CARERVDDSSGYYRLFDYW

SEQ ID NO: 1208 - protein, 19 aa, Homo sapiens
CARDPDRYSSGWPNWFDPW

SEQ ID NO: 1209 - protein, 15 aa, Homo sapiens
CAKGECSSSWCFDHW

SEQ ID NO: 1210 - protein, 16 aa, Homo sapiens
CAKLPSKGDYPAFDIW

SEQ ID NO: 1211 - protein, 22 aa, Homo sapiens
CATAPHYYDSSGYYYDWYFDLW

SEQ ID NO: 1212 - protein, 21 aa, Homo sapiens
CTTAPYYYDSSAYPQTYFDYW

SEQ ID NO: 1213 - protein, 21 aa, Homo sapiens
CARSYGGDNWNLVRKNWFDPW

SEQ ID NO: 1214 - protein, 18 aa, Homo sapiens
CARAIMITFGGVPGFDYW

SEQ ID NO: 1215 - protein, 19 aa, Homo sapiens
CAKGGWYSSGWYGSHFDYW

SEQ ID NO: 1216 - protein, 26 aa, Homo sapiens
CARDWQGTYYDILTGRYYYYYYMDVW

SEQ ID NO: 1217 - protein, 18 aa, Homo sapiens
CARVAPDYGDYGNWIDPW

SEQ ID NO: 1218 - protein, 18 aa, Homo sapiens
CARDLKDILTGERYFDYW

SEQ ID NO: 1219 - protein, 28 aa, Homo sapiens
CARRVEKLMLSYARLYRTEKYYYYMDVW

SEQ ID NO: 1220 - protein, 21 aa, Homo sapiens
CVKDARPQGKHYYYFYGMDVW

SEQ ID NO: 1221 - protein, 22 aa, Homo sapiens
CAKEPRAYCSSTSCYNNWFDPW

SEQ ID NO: 1222 - protein, 15 aa, Homo sapiens
CAKALFDYYDSSDYW

SEQ ID NO: 1223 - protein, 25 aa, Homo sapiens
CAQMASSPYYCSGGSCYSEAYFDYW

SEQ ID NO: 1224 - protein, 17 aa, Homo sapiens
CVRDLTTVTAWMYFDWW

SEQ ID NO: 1225 - protein, 20 aa, Homo sapiens
CAKELLWFGQLFSYYAMDVW

SEQ ID NO: 1226 - protein, 21 aa, Homo sapiens
CAKDSRLYASPYYYYYGMDVW

SEQ ID NO: 1227 - protein, 12 aa, Homo sapiens
CQQKGGSPPYSF

SEQ ID NO: 1228 - protein, 20 aa, Homo sapiens
CARDPPYDSSGYYGYYFDYW

SEQ ID NO: 1229 - protein, 20 aa, Homo sapiens
CARGPQFNWVRYYYYYMDVW

SEQ ID NO: 1230 - protein, 17 aa, Homo sapiens
CATDLPPWELPRYFDYW

SEQ ID NO: 1231 - protein, 17 aa, Homo sapiens
CAKDPSYYIPPNWFDPW

SEQ ID NO: 1232 - protein, 14 aa, Homo sapiens
CQVWDTSSGHRVIF

SEQ ID NO: 1233 - protein, 20 aa, Homo sapiens
CAKDRAYDNWALASYYFDYW

SEQ ID NO: 1234 - protein, 23 aa, Homo sapiens
CARGKPIGGFTMVRGVIGWFDPW

SEQ ID NO: 1235 - protein, 20 aa, Homo sapiens
CARHRRQWLARRGLTYFDYW

SEQ ID NO: 1236 - protein, 15 aa, Homo sapiens
CAREGNIVNYWFDPW

SEQ ID NO: 1237 - protein, 13 aa, Homo sapiens
CARFHSSGWLDYW

SEQ ID NO: 1238 - protein, 18 aa, Homo sapiens
CARTGGLQGIGTRGFDFW

SEQ ID NO: 1239 - protein, 22 aa, Homo sapiens
CAHSPVLRYFDWLYSTGWFDPW

SEQ ID NO: 1240 - protein, 21 aa, Homo sapiens
CAKFYYYDSSGYYHDDAFDIW

SEQ ID NO: 1241 - protein, 13 aa, Homo sapiens [sequence omitted]

SEQ ID NO: 1242 - protein, 17 aa, Homo sapiens
CAREASSSWVDGYFDLW

SEQ ID NO: 1243 - protein, 18 aa, Homo sapiens
CARESDADVDMIYYFDYW

SEQ ID NO: 1244 - protein, 16 aa, Homo sapiens
CASSADYDTTGYFDFW

SEQ ID NO: 1245 - protein, 17 aa, Homo sapiens
CARGLGRIGWGYYFDYW

SEQ ID NO: 1246 - protein, 13 aa, Homo sapiens [sequence omitted]

SEQ ID NO: 1247 - protein, 17 aa, Homo sapiens
CARAERKWELLRYFDYW

SEQ ID NO: 1248 - protein, 21 aa, Homo sapiens
CATTAPHCSSTSCYSNWFDPW

SEQ ID NO: 1249 - protein, 21 aa, Homo sapiens
CARAPGYSSGYEHYFYYMDVW

SEQ ID NO: 1250 - protein, 13 aa, Homo sapiens
CTTTGDGSYSDFW

SEQ ID NO: 1251 - protein, 24 aa, Homo sapiens
CARDRAPHYYDTSDMDENDAFDIW

SEQ ID NO: 1252 - protein, 20 aa, Homo sapiens
CARYSSGWYDLASRYYFDYW

SEQ ID NO: 1253 - protein, 14 aa, Homo sapiens
CAKVSSVSSSSDYW

SEQ ID NO: 1254 - protein, 19 aa, Homo sapiens
CARQVYYTVGSLRGWFDPW

SEQ ID NO: 1255 - protein, 14 aa, Homo sapiens
CVRGDTGQVPFDSW

SEQ ID NO: 1256 - protein, 23 aa, Homo sapiens
CARFLRIAAAGTREERYNWFDPW

SEQ ID NO: 1257 - protein, 17 aa, Homo sapiens
CAKVLYYYDSSGSLDYW

SEQ ID NO: 1258 - protein, 23 aa, Homo sapiens
CAREGRGNYDFWSGHFEAAFDIW

SEQ ID NO: 1259 - protein, 23 aa, Homo sapiens
CARRIQAGYSSGWYYYYYGMDVW

SEQ ID NO: 1260 - protein, 21 aa, Homo sapiens
CARARGFASVYASSYDAFDFW

SEQ ID NO: 1261 - protein, 22 aa, Homo sapiens
CAKDLARKSISWYLLGGAFDIW

SEQ ID NO: 1262 - protein, 17 aa, Homo sapiens
CARHGRAFHSKGWFDPW

SEQ ID NO: 1263 - protein, 15 aa, Homo sapiens
CQSADDSETYPGWVF

SEQ ID NO: 1264 - protein, 18 aa, Homo sapiens
CAKSVIVVPTYYYGMDVW

SEQ ID NO: 1265 - protein, 23 aa, Homo sapiens
CATFSTYYYDSSGYYYPFYFDYW

SEQ ID NO: 1266 - protein, 14 aa, Homo sapiens
CAVCYSNSHYFDYW

SEQ ID NO: 1267 - protein, 20 aa, Homo sapiens
CARAWWQQLVFNYYYYMDVW

SEQ ID NO: 1268 - protein, 13 aa, Homo sapiens
CQQFGTSPPMFTF

SEQ ID NO: 1269 - protein, 14 aa, Homo sapiens
CARFDYVGVWFDPW

SEQ ID NO: 1270 - protein, 23 aa, Homo sapiens
CAREIHGYRFGYSGRDPYYFDYW

SEQ ID NO: 1271 - protein, 17 aa, Homo sapiens
CQQSYSNPGPWTPGVTF

SEQ ID NO: 1272 - protein, 23 aa, Homo sapiens
CARDLHNYDSRGYYYDFSGFDYW

SEQ ID NO: 1273 - protein, 17 aa, Homo sapiens
CAKERGSGWSPLPFDYW

SEQ ID NO: 1274 - protein, 16 aa, Homo sapiens
CATAQIFGVVTWFDPW

SEQ ID NO: 1275 - protein, 13 aa, Homo sapiens
CQLANSFPPHSTF

SEQ ID NO: 1276 - protein, 19 aa, Homo sapiens
CATQYSTASDYLYYYLDVW

SEQ ID NO: 1277 - protein, 19 aa, Homo sapiens
CAAGTNKGRWLQFDAFDIW

SEQ ID NO: 1278 - protein, 19 aa, Homo sapiens
CAKAWVDFWSGYSPLEDYW

SEQ ID NO: 1279 - protein, 18 aa, Homo sapiens
CARALLSRSSSLGYFDYW

SEQ ID NO: 1280 - protein, 27 aa, Homo sapiens
CARDDLLQTGGYIWGSYRFRSSFFDYW

SEQ ID NO: 1281 - protein, 26 aa, Homo sapiens
CARDRITMVRGVTLTGSYYYYGMDVW

SEQ ID NO: 1282 - protein, 22 aa, Homo sapiens
CTTRETDCASSTCSMYTAFAYW

SEQ ID NO: 1283 - protein, 25 aa, Homo sapiens
CARHRVPIWYYYDSSGPLIRGFDPW

SEQ ID NO: 1284 - protein, 18 aa, Homo sapiens
CAKDLLSGIVGATTSDYW

SEQ ID NO: 1285 - protein, 19 aa, Homo sapiens
CARHILANDDYVWGSFDYW

SEQ ID NO: 1286 - protein, 14 aa, Homo sapiens
CATVALTDQSFDHW

SEQ ID NO: 1287 - protein, 18 aa, Homo sapiens
CAHSLLPRYYYDMCFDYW

SEQ ID NO: 1288 - protein, 22 aa, Homo sapiens
CARYAVEGWQIHDSNLDAFDMW

SEQ ID NO: 1289 - protein, 21 aa, Homo sapiens
CTRGHPYDFWSGYPPPYFDYW

SEQ ID NO: 1290 - protein, 23 aa, Homo sapiens
CATGPTMVRGVIEGTYYYYMDVW

SEQ ID NO: 1291 - protein, 16 aa, Homo sapiens
CARSRGGPWEYYFDHW

SEQ ID NO: 1292 - protein, 19 aa, Homo sapiens
CARDSTYRYDTNGYHSDYW

SEQ ID NO: 1293 - protein, 18 aa, Homo sapiens
CAKQDVFISAFSSYFDYW

SEQ ID NO: 1294 - protein, 18 aa, Homo sapiens
CARAPLPLRGAGRYFDYW

SEQ ID NO: 1295 - protein, 15 aa, Homo sapiens
CARRMYSGTNWFVPW

SEQ ID NO: 1296 - protein, 23 aa, Homo sapiens
CARDPLTYYYDSSGPPYWYFDLW

SEQ ID NO: 1297 - protein, 24 aa, Homo sapiens
CASSPPNYYDSNNYYYGGIPFDFW

SEQ ID NO: 1298 - protein, 18 aa, Homo sapiens
CARGPYSGYDDVSWFDPW

SEQ ID NO: 1299 - protein, 19 aa, Homo sapiens
CARAMLLWFGDLSTPFDYW

SEQ ID NO: 1300 - protein, 21 aa, Homo sapiens
CASDPFYYNDASGWAYHFDHW

SEQ ID NO: 1301 - protein, 20 aa, Homo sapiens
CARDRLDQQVATGLDAFDIW

SEQ ID NO: 1302 - protein, 12 aa, Homo sapiens
CQEYNKWPPWTF

SEQ ID NO: 1303 - protein, 26 aa, Homo sapiens
CARDLYYYDSSGYYYFVRIYYYMDVW

SEQ ID NO: 1304 - protein, 19 aa, Homo sapiens
CARDYPDGIGVAARLFDYW

SEQ ID NO: 1305 - protein, 15 aa, Homo sapiens
CARDELQHGWYFDYW

SEQ ID NO: 1306 - protein, 18 aa, Homo sapiens
CAKGGDWDSYYYYGMDVW

SEQ ID NO: 1307 - protein, 21 aa, Homo sapiens
CARDLTVTTGTENYYYGMDVW

SEQ ID NO: 1308 - protein, 17 aa, Homo sapiens
CARHPWVAATPGYFDYW

SEQ ID NO: 1309 - protein, 15 aa, Homo sapiens
CATAPYGDYFHFDYW

SEQ ID NO: 1310 - protein, 19 aa, Homo sapiens
CARTVVTLYYYYYYYMDVW

SEQ ID NO: 1311 - protein, 17 aa, Homo sapiens
CAGHGDTYDSSGYDDYW

SEQ ID NO: 1312 - protein, 22 aa, Homo sapiens
CAKDITDGYCSGGSCSPGFDYW

SEQ ID NO: 1313 - protein, 17 aa, Homo sapiens
CVRIFAVAGSRGWFDPW

SEQ ID NO: 1314 - protein, 23 aa, Homo sapiens
CARGDEVILGSTIFGRGWYLDLW

SEQ ID NO: 1315 - protein, 25 aa, Homo sapiens
CTLFPYTTLFRSGGYSSSSSYFDYW

SEQ ID NO: 1316 - protein, 19 aa, Homo sapiens
CATFPHYYDSSGYYPFDYW

SEQ ID NO: 1317 - protein, 12 aa, Homo sapiens
CQSYDSTTPAVF

SEQ ID NO: 1318 - protein, 15 aa, Homo sapiens
CAVLPKGGSYLIDYW

SEQ ID NO: 1319 - protein, 16 aa, Homo sapiens
CATEVAIFGVVIYDYW

SEQ ID NO: 1320 - protein, 23 aa, Homo sapiens
CTTDEAYYDSSGYYYYYYGMDVW

SEQ ID NO: 1321 - protein, 12 aa, Homo sapiens
CVIVVVTAIDYW

SEQ ID NO: 1322 - protein, 22 aa, Homo sapiens
CAKQGGVYCSGGSCYSGYFDYW

SEQ ID NO: 1323 - protein, 17 aa, Homo sapiens
CARILPSPQGLDSFDYW

SEQ ID NO: 1324 - protein, 18 aa, Homo sapiens
CARDASSNWGTTYYFDYW

SEQ ID NO: 1325 - protein, 14 aa, Homo sapiens
CAKDIQWELFFDIW

SEQ ID NO: 1326 - protein, 13 aa, Homo sapiens
CAKTAATGYFDYW

SEQ ID NO: 1327 - protein, 24 aa, Homo sapiens
CTRDLLIAAAGFLNYYYYYYMDVW

SEQ ID NO: 1328 - protein, 21 aa, Homo sapiens
CARHPGELLSLDYYYYYIDVW

SEQ ID NO: 1329 - protein, 17 aa, Homo sapiens
CVRIQDGPGWLQFYDYW

SEQ ID NO: 1330 - protein, 17 aa, Homo sapiens
CVKSRSSSAYYSSFDYW

SEQ ID NO: 1331 - protein, 15 aa, Homo sapiens
CARSYSSGWADLDYW

SEQ ID NO: 1332 - protein, 21 aa, Homo sapiens
CATSKTVAARPSYYYYGMDVW

SEQ ID NO: 1333 - protein, 19 aa, Homo sapiens
CAKGRYYYDSSGKNWFDPW

SEQ ID NO: 1334 - protein, 20 aa, Homo sapiens
CAGGGRTLGSIDYPDWFDPW

SEQ ID NO: 1335 - protein, 16 aa, Homo sapiens
CTRDSSQWLVAYFDYW

SEQ ID NO: 1336 - protein, 16 aa, Homo sapiens
CARRVSDSSGSSFDYW

SEQ ID NO: 1337 - protein, 18 aa, Homo sapiens
CTKDKYGSGWYSGWFDPW

SEQ ID NO: 1338 - protein, 8 aa, Homo sapiens
CVGTFDPW

SEQ ID NO: 1339 - protein, 18 aa, Homo sapiens
CASEGIYSSSSLNYFDYW

SEQ ID NO: 1340 - protein, 29 aa, Homo sapiens
CARTPFEGTTKYYDFWSGLNWMAYYFDYW

SEQ ID NO: 1341 - protein, 19 aa, Homo sapiens
CAAFYYDSSGSYYGDVDYW

SEQ ID NO: 1342 - protein, 24 aa, Homo sapiens
CARVRLKYFDWTPSSPLIYYFDYW

SEQ ID NO: 1343 - protein, 22 aa, Homo sapiens
CARGSSRRAQWLVLSYYYMDVW

SEQ ID NO: 1344 - protein, 20 aa, Homo sapiens
CAKGPFFGVVISSLNWFDPW

SEQ ID NO: 1345 - protein, 15 aa, Homo sapiens
CARVSLGAMANFDYW

SEQ ID NO: 1346 - protein, 14 aa, Homo sapiens
CAHSSGYYHTPDYW

SEQ ID NO: 1347 - protein, 28 aa, Homo sapiens
CTLFPYTTLFRSGVLALLSQCDNWFDPW

SEQ ID NO: 1348 - protein, 27 aa, Homo sapiens
CARGGAPHYYDSSGYMSYWSSDWFDPW

SEQ ID NO: 1349 - protein, 17 aa, Homo sapiens
CARRLFGYSSNWYPDYW

SEQ ID NO: 1350 - protein, 15 aa, Homo sapiens
CARLPDRGGMLFDYW

SEQ ID NO: 1351 - protein, 16 aa, Homo sapiens
CAKDISRGELYYFDYW

SEQ ID NO: 1352 - protein, 17 aa, Homo sapiens
CASPLYIVGGTDGMDVW

SEQ ID NO: 1353 - protein, 22 aa, Homo sapiens
CARGIIDSYVWGPKVEYYFDYW

SEQ ID NO: 1354 - protein, 15 aa, Homo sapiens
CAHRGYDSSGVFDYW

SEQ ID NO: 1355 - protein, 16 aa, Homo sapiens
CARGVTAANSWWFDPW

SEQ ID NO: 1356 - protein, 12 aa, Homo sapiens
CQQDYNLPKLTF

SEQ ID NO: 1357 - protein, 18 aa, Homo sapiens
CARSPLSYGVVITHIDYW

SEQ ID NO: 1358 - protein, 17 aa, Homo sapiens
CVRDTQSSSYGGAFDIW

SEQ ID NO: 1359 - protein, 16 aa, Homo sapiens
CARSGYSSSPTPFDYW

SEQ ID NO: 1360 - protein, 17 aa, Homo sapiens
CARLEEMSTIWAYFDYW

SEQ ID NO: 1361 - protein, 19 aa, Homo sapiens
CARGPVWELPYYYYYMDVW

SEQ ID NO: 1362 - protein, 16 aa, Homo sapiens
CAKKGACGGDCWFDYW

SEQ ID NO: 1363 - protein, 17 aa, Homo sapiens
CARDREQLVTSYYFDSW

SEQ ID NO: 1364 - protein, 19 aa, Homo sapiens
CARIFPITMVGKVVWFDPW

SEQ ID NO: 1365 - protein, 18 aa, Homo sapiens
CAKDRYTGVEVVTYFDYW

SEQ ID NO: 1366 - protein, 14 aa, Homo sapiens
CTAGNCYPGHFDYW

SEQ ID NO: 1367 - protein, 13 aa, Homo sapiens
CARHDGSPVFDYW

SEQ ID NO: 1368 - protein, 16 aa, Homo sapiens
CAGDDYGDSDYWFDPW

SEQ ID NO: 1369 - protein, 22 aa, Homo sapiens
CARGEEHCSGGRCYYYYGMDVW

SEQ ID NO: 1370 - protein, 13 aa, Homo sapiens
CQHRSSWPLRITF

SEQ ID NO: 1371 - protein, 19 aa, Homo sapiens
CAWQECRTTTCHEDVFDYW

SEQ ID NO: 1372 - protein, 14 aa, Homo sapiens
CASLITMIAYFDYW

SEQ ID NO: 1373 - protein, 17 aa, Homo sapiens
CVKDAYVLVGGTALDYW

SEQ ID NO: 1374 - protein, 22 aa, Homo sapiens
CARLYTRPRTMIVVGLYYFDYW

SEQ ID NO: 1375 - protein, 21 aa, Homo sapiens
CAREPRYRYDASGYQPEDDYW

SEQ ID NO: 1376 - protein, 23 aa, Homo sapiens
CATSIAVAGTIAYYYYYYGMDVW

SEQ ID NO: 1377 - protein, 23 aa, Homo sapiens
CARVGDYGSGSYYIFYYYGMDVW

SEQ ID NO: 1378 - protein, 20 aa, Homo sapiens
CARGGYSSSWYGIKGWFDPW

SEQ ID NO: 1379 - protein, 19 aa, Homo sapiens
CARLEVAVAGTVLWWFDPW

SEQ ID NO: 1380 - protein, 18 aa, Homo sapiens
CARDSTYGDYEVGWFDPW

SEQ ID NO: 1381 - protein, 18 aa, Homo sapiens
CAKDVTMIVVVITCLDYW

SEQ ID NO: 1382 - protein, 13 aa, Homo sapiens
CARDQGLDGMDVW

SEQ ID NO: 1383 - protein, 17 aa, Homo sapiens
CARGNSITIIKGAFDVW

SEQ ID NO: 1384 - protein, 21 aa, Homo sapiens
CVKASRRELLVFLNYYYMDVW

SEQ ID NO: 1385 - protein, 14 aa, Homo sapiens
CARLDVANWNLDYW

SEQ ID NO: 1386 - protein, 17 aa, Homo sapiens
CAKDDTPNLTWDPFDSW

SEQ ID NO: 1387 - protein, 15 aa, Homo sapiens
CAHRQDAAWDYFDPW

SEQ ID NO: 1388 - protein, 21 aa, Homo sapiens
CARLRGGYSYGPKPQYYFDYW

SEQ ID NO: 1389 - protein, 17 aa, Homo sapiens
CARTIQYYDYPDAYDIW

SEQ ID NO: 1390 - protein, 24 aa, Homo sapiens
CASTGGYDPVTGRRHYFYYYMDVW

SEQ ID NO: 1391 - protein, 26 aa, Homo sapiens
CARDLLYYDFWSGYYPPYYYYGMDVW

SEQ ID NO: 1392 - protein, 17 aa, Homo sapiens
CARGHYIAARQYYFDYW

SEQ ID NO: 1393 - protein, 17 aa, Homo sapiens
CASHHGDYPTSGWFDSW

SEQ ID NO: 1394 - protein, 17 aa, Homo sapiens
CASLNDYGPEQGWFDPW

SEQ ID NO: 1395 - protein, 19 aa, Homo sapiens
CAKISGGGYYEEGDAFDIW

SEQ ID NO: 1396 - protein, 14 aa, Homo sapiens
CWSYGDYDDAFDIW

SEQ ID NO: 1397 - protein, 16 aa, Homo sapiens
CARQGAKNWDRWFDPW

SEQ ID NO: 1398 - protein, 15 aa, Homo sapiens
CAKETEAAVFDFDYW

SEQ ID NO: 1399 - protein, 18 aa, Homo sapiens
CAKDPFYDFWSGYYFDYW

SEQ ID NO: 1400 - protein, 18 aa, Homo sapiens
CARGVLTEKYEINWFGPW

SEQ ID NO: 1401 - protein, 21 aa, Homo sapiens
CAKSDSNPMYYYDSSGYYDYW

SEQ ID NO: 1402 - protein, 20 aa, Homo sapiens
CAKVNYYDIYTGTPDAFDIW

SEQ ID NO: 1403 - protein, 16 aa, Homo sapiens
CAHRSSGWTPGWFDPW

SEQ ID NO: 1404 - protein, 17 aa, Homo sapiens
CARDHSSSWVENWFDPW

SEQ ID NO: 1405 - protein, 17 aa, Homo sapiens
CIAVAGTFLGVGGFDYW

SEQ ID NO: 1406 - protein, 16 aa, Homo sapiens
CVKDRVAVSLYYFHYW

SEQ ID NO: 1407 - protein, 19 aa, Homo sapiens
CARRHFSSSWYSGDDFDLW

SEQ ID NO: 1408 - protein, 20 aa, Homo sapiens
CARGGITIFSPYYYYGMDVW

SEQ ID NO: 1409 - protein, 13 aa, Homo sapiens
CTLEAAVDAFDIW

SEQ ID NO: 1410 - protein, 13 aa, Homo sapiens
CLQDYTCPSVYTF

SEQ ID NO: 1411 - protein, 12 aa, Homo sapiens
CARHLTGDDDYW

SEQ ID NO: 1412 - protein, 18 aa, Homo sapiens
CARALPVYYVKYNWFDPW

SEQ ID NO: 1413 - protein, 23 aa, Homo sapiens
CTLFPYTTLFRSYYVPPSWFDPW

SEQ ID NO: 1414 - protein, 14 aa, Homo sapiens
CVHTLYSVSALDYW

SEQ ID NO: 1415 - protein, 21 aa, Homo sapiens
CARGLVGATTGYYYYYYMDVW

SEQ ID NO: 1416 - protein, 14 aa, Homo sapiens
CAKSDLSGWYIDYW

SEQ ID NO: 1417 - protein, 19 aa, Homo sapiens
CARDGWSSGWFAGDAFDIW

SEQ ID NO: 1418 - protein, 27 aa, Homo sapiens
CAKDGYDSSGYYLSLINVAHAEYFQHW

SEQ ID NO: 1419 - protein, 20 aa, Homo sapiens
CAREYYYGSGSYYNYYMDVW

SEQ ID NO: 1420 - protein, 16 aa, Homo sapiens
CAKRGDGMSMRTLDYW

SEQ ID NO: 1421 - protein, 13 aa, Homo sapiens
CVHRGRWQDFDFW

SEQ ID NO: 1422 - protein, 19 aa, Homo sapiens
CAKTPQPSKYSYGYVFDYW

SEQ ID NO: 1423 - protein, 17 aa, Homo sapiens
CAKDENPYSSTGYFDYW

SEQ ID NO: 1424 - protein, 20 aa, Homo sapiens
CAKAASRCSSNRCSLPPDYW

SEQ ID NO: 1425 - protein, 22 aa, Homo sapiens
CARHHRGVYYYDSSPSPLFDYW

SEQ ID NO: 1426 - protein, 14 aa, Homo sapiens
CARDDSAVIPFDYW

SEQ ID NO: 1427 - protein, 18 aa, Homo sapiens
CAKAGGSRLGYYYGMDVW

SEQ ID NO: 1428 - protein, 16 aa, Homo sapiens
CAKDQGDRYYYGMDVW

SEQ ID NO: 1429 - protein, 20 aa, Homo sapiens
CAKDRYYYDSSGYTYYFDYW

SEQ ID NO: 1430 - protein, 22 aa, Homo sapiens
CARDRGLFTIFGVVINDAFDIW

SEQ ID NO: 1431 - protein, 18 aa, Homo sapiens
CARGVSVTTGTLGSFDYW

SEQ ID NO: 1432 - protein, 21 aa, Homo sapiens
CARSKGITMIVVVIPSAFDIW

SEQ ID NO: 1433 - protein, 18 aa, Homo sapiens
CTRPRPEAADDYSEYDYW

SEQ ID NO: 1434 - protein, 22 aa, Homo sapiens
CTRGIYCSRATCHRTGKLFDYW

SEQ ID NO: 1435 - protein, 11 aa, Homo sapiens
CLANNHYFDFW

SEQ ID NO: 1436 - protein, 19 aa, Homo sapiens
CAKDDRVFGLVPPYYFDYW

SEQ ID NO: 1437 - protein, 20 aa, Homo sapiens
CARYSPRLHCSGGSCYSGYW

SEQ ID NO: 1438 - protein, 18 aa, Homo sapiens
CARDFLNWNDVFGAFDIW

SEQ ID NO: 1439 - protein, 29 aa, Homo sapiens
CAKDVKYYDFWSGYLTHSNYYYYYGMDVW

SEQ ID NO: 1440 - protein, 20 aa, Homo sapiens
CARETIVVVGGYGLRYFDYW

SEQ ID NO: 1441 - protein, 24 aa, Homo sapiens
CAKEEYDSSGYYPPSYYYYGMDVW

SEQ ID NO: 1442 - protein, 19 aa, Homo sapiens
CAKGGTAWNDLDRNWFDPW

SEQ ID NO: 1443 - protein, 20 aa, Homo sapiens
CARQQLEYSSSSQHYYMDVW

SEQ ID NO: 1444 - protein, 15 aa, Homo sapiens
CAIYGGGSSWTLDYW

SEQ ID NO: 1445 - protein, 20 aa, Homo sapiens
CARQRLNYYDSSGYYYFDYW

SEQ ID NO: 1446 - protein, 24 aa, Homo sapiens
CARVRPCGGSCYRYYFYYYGMDVW

SEQ ID NO: 1447 - protein, 11 aa, Homo sapiens [sequence omitted]

SEQ ID NO: 1448 - protein, 19 aa, Homo sapiens
CAKPYDGITMIVVVPFDYW

SEQ ID NO: 1449 - protein, 17 aa, Homo sapiens
CARYNLLHYGDYVVDYW

SEQ ID NO: 1450 - protein, 11 aa, Homo sapiens
CAKDGHCFDVW

SEQ ID NO: 1451 - protein, 26 aa, Homo sapiens
CAKPIGPKGLDITIFGVVIIAPFGYW

SEQ ID NO: 1452 - protein, 13 aa, Homo sapiens
CARIRRVQEFDYW

SEQ ID NO: 1453 - protein, 13 aa, Homo sapiens
CVRDSSSLGNDYW

SEQ ID NO: 1454 - protein, 17 aa, Homo sapiens
CAKGHGPSSSYHYMDVW

SEQ ID NO: 1455 - protein, 23 aa, Homo sapiens
CAKDPGRITMIVVVPTGWYFDLW

SEQ ID NO: 1456 - protein, 22 aa, Homo sapiens
CAKTLSLGIDPLVYYYYYMDVW

SEQ ID NO: 1457 - protein, 20 aa, Homo sapiens
CARGGDLQYFDWLVTGFDYW

SEQ ID NO: 1458 - protein, 20 aa, Homo sapiens
CARDLWDRSIAVGRYYFDYW

SEQ ID NO: 1459 - protein, 15 aa, Homo sapiens
CARDQSSVTTMLDYW

SEQ ID NO: 1460 - protein, 17 aa, Homo sapiens
CARETIEEGNGWYFDVW

SEQ ID NO: 1461 - protein, 18 aa, Homo sapiens
CARSDLWFGERTMSHDYW

SEQ ID NO: 1462 - protein, 17 aa, Homo sapiens
CTTYQLILWAVASIDYW

SEQ ID NO: 1463 - protein, 22 aa, Homo sapiens
CARDRLGSHVPSVYYFYYMDVW

SEQ ID NO: 1464 - protein, 17 aa, Homo sapiens
CAKDGSLMKSAPHFDYW

SEQ ID NO: 1465 - protein, 20 aa, Homo sapiens
CTTTVDPYDFWSGWAYFDYW

SEQ ID NO: 1466 - protein, 20 aa, Homo sapiens
CARDPAYYYDSSGSDAFDIW

SEQ ID NO: 1467 - protein, 12 aa, Homo sapiens
CQSVDHSGTFMF

SEQ ID NO: 1468 - protein, 12 aa, Homo sapiens
CVTWIVHHFDYW

SEQ ID NO: 1469 - protein, 17 aa, Homo sapiens
CASQDGYSSNWGHIDYW

SEQ ID NO: 1470 - protein, 26 aa, Homo sapiens
CARDYSRQWLKKNSKNYYYYYGMDVW

SEQ ID NO: 1471 - protein, 22 aa, Homo sapiens
CAKNIYCSGGSCYEGIRWFDPW

SEQ ID NO: 1472 - protein, 17 aa, Homo sapiens
CAREGGITGRGDAFDIW

SEQ ID NO: 1473 - protein, 23 aa, Homo sapiens
CARGQAEGYYFTRVKENHWFDPW

SEQ ID NO: 1474 - protein, 18 aa, Homo sapiens
CAKDAVAGNSLFDWFDSW

SEQ ID NO: 1475 - protein, 21 aa, Homo sapiens
CATGHHYYYDSSGYYYEFDYW

SEQ ID NO: 1476 - protein, 23 aa, Homo sapiens
CARDSRTYYYDSSGYRHWYFDLW

SEQ ID NO: 1477 - protein, 25 aa, Homo sapiens
CARAPSESLRFLEWLPYLIGAFDIW

SEQ ID NO: 1478 - protein, 25 aa, Homo sapiens
CARQRDVYFYDSSGSQRYNNWFDPW

SEQ ID NO: 1479 - protein, 16 aa, Homo sapiens
CAKDWQWGVRGIFDYW

SEQ ID NO: 1480 - protein, 18 aa, Homo sapiens
CAKDPSSGYPPSEYFDYW

SEQ ID NO: 1481 - protein, 22 aa, Homo sapiens
CARQIQRSPTMIVVGYYYMDVW

SEQ ID NO: 1482 - protein, 15 aa, Homo sapiens
CANLREGGMGYFDYW

SEQ ID NO: 1483 - protein, 13 aa, Homo sapiens
CARDGYNHVIDYW

SEQ ID NO: 1484 - protein, 28 aa, Homo sapiens
CARGPVAEDYYDSSGYFHYYYYYGMDVW

SEQ ID NO: 1485 - protein, 15 aa, Homo sapiens
CAKGFINQYLYFDHW

SEQ ID NO: 1486 - protein, 13 aa, Homo sapiens
CAKDIHNWSHDYW

SEQ ID NO: 1487 - protein, 20 aa, Homo sapiens
CAHYEYFSMSGYPVAAFDIW

SEQ ID NO: 1488 - protein, 18 aa, Homo sapiens
CAKEGLDRWLVPGIFDLW

SEQ ID NO: 1489 - protein, 16 aa, Homo sapiens
CAKDLGWSSGFLFDYW

SEQ ID NO: 1490 - protein, 21 aa, Homo sapiens
CARDWGYSSSSNYYYYYMDVW

SEQ ID NO: 1491 - protein, 13 aa, Homo sapiens
CTTGELLHAFDIW

SEQ ID NO: 1492 - protein, 18 aa, Homo sapiens
CAKDPHDYGDYVGWVDPW

SEQ ID NO: 1493 - protein, 13 aa, Homo sapiens
CATYSNSFHFDFW

SEQ ID NO: 1494 - protein, 18 aa, Homo sapiens
CAKDYEYCSGGRCYIDYW

SEQ ID NO: 1495 - protein, 17 aa, Homo sapiens
CARGRYFDFEGYYFDLW

SEQ ID NO: 1496 - protein, 11 aa, Homo sapiens
CARVTPAFDYW

SEQ ID NO: 1497 - protein, 16 aa, Homo sapiens
CARVRGDTPMALGDYW

SEQ ID NO: 1498 - protein, 21 aa, Homo sapiens
CAGDRHYYDSSGYYRNAFDIW

SEQ ID NO: 1499 - protein, 15 aa, Homo sapiens
CAREDWKASGYFDHW

SEQ ID NO: 1500 - protein, 15 aa, Homo sapiens
CTTAVATSRYYFDFW

SEQ ID NO: 1501 - protein, 11 aa, Homo sapiens
CARRSYYFDNW

SEQ ID NO: 1502 - protein, 21 aa, Homo sapiens
CARLRRITIFGVGIRDWFDPW

SEQ ID NO: 1503 - protein, 23 aa, Homo sapiens
CAKDLPRPDLFYDDTSGYYFDCW

SEQ ID NO: 1504 - protein, 20 aa, Homo sapiens
CARDPPRSDSSGYDWYFDLW

SEQ ID NO: 1505 - protein, 19 aa, Homo sapiens
CALPIFSLLDSDLYYFDYW

SEQ ID NO: 1506 - protein, 24 aa, Homo sapiens
CARRANSSGWYDRYYYYYYYMDVW

SEQ ID NO: 1507 - protein, 18 aa, Homo sapiens
CAREPLAAQTNNWGFDYW

SEQ ID NO: 1508 - protein, 22 aa, Homo sapiens
CARDKPSVELSSSWGEYYFDYW

SEQ ID NO: 1509 - protein, 23 aa, Homo sapiens
CARDLAFSYQFESLWYHYGFDVW

SEQ ID NO: 1510 - protein, 17 aa, Homo sapiens
CALPIFTMIVVEAFDIW

SEQ ID NO: 1511 - protein, 22 aa, Homo sapiens
CARQNGLTIFGVVTYGTLFDPW

SEQ ID NO: 1512 - protein, 26 aa, Homo sapiens
CARDIKASDSGSGSYVDYYYYGMDVW

SEQ ID NO: 1513 - protein, 23 aa, Homo sapiens
CARSLRDQYCSGGSCSLDAFDIW

SEQ ID NO: 1514 - protein, 21 aa, Homo sapiens
CAKLGSYYDFWSGYYSQFDYW

SEQ ID NO: 1515 - protein, 17 aa, Homo sapiens
CARESNRAPAGNDFDSW

SEQ ID NO: 1516 - protein, 20 aa, Homo sapiens
CASDYYDSSGYFENDAFDIW

SEQ ID NO: 1517 - protein, 13 aa, Homo sapiens
CARQGFRKPIDYW

SEQ ID NO: 1518 - protein, 13 aa, Homo sapiens
CARRTVNGPFDFW

SEQ ID NO: 1519 - protein, 22 aa, Homo sapiens
CVRDRHFEDTTVTTLEFWFDPW

SEQ ID NO: 1520 - protein, 19 aa, Homo sapiens
CANLPVYYDSSGSHAFDIW

SEQ ID NO: 1521 - protein, 21 aa, Homo sapiens
CARNSYDFWSGHRRNWYFDLW

SEQ ID NO: 1522 - protein, 24 aa, Homo sapiens
CARWVAAAVPSKWAEYYYYGMDVW

SEQ ID NO: 1523 - protein, 15 aa, Homo sapiens
CAKAPYSSSWYLDYW

SEQ ID NO: 1524 - protein, 15 aa, Homo sapiens
CVRDHGGVGYYFDYW

SEQ ID NO: 1525 - protein, 17 aa, Homo sapiens
CAKDPGYSYGQYYFDYW

SEQ ID NO: 1526 - protein, 19 aa, Homo sapiens
CAKETYYYDSSGYRLLDYW

SEQ ID NO: 1527 - protein, 17 aa, Homo sapiens
CASARASRLSRSPFDYW

SEQ ID NO: 1528 - protein, 18 aa, Homo sapiens
CARGGDVLLWFGEPIDYW

SEQ ID NO: 1529 - protein, 20 aa, Homo sapiens
CARRQPIVGGATEGGWFDPW

SEQ ID NO: 1530 - protein, 16 aa, Homo sapiens
CARTSYYDRSGAFDCW

SEQ ID NO: 1531 - protein, 13 aa, Homo sapiens
CQQLDSYPESPTF

SEQ ID NO: 1532 - protein, 19 aa, Homo sapiens
CARPTSSSWYLLGVDFDYW

SEQ ID NO: 1533 - protein, 20 aa, Homo sapiens
CARVISSPQISYYYYGMDVW

SEQ ID NO: 1534 - protein, 20 aa, Homo sapiens
CARVEWDLQVPSFHYYMDVW

SEQ ID NO: 1535 - protein, 18 aa, Homo sapiens
CAPDRGMGGYSYGTFDYW

SEQ ID NO: 1536 - protein, 23 aa, Homo sapiens
CARHPYYYDSSGYPVGDYYFDYW

SEQ ID NO: 1537 - protein, 17 aa, Homo sapiens
CARAGGYEHGYVLFDYW

SEQ ID NO: 1538 - protein, 18 aa, Homo sapiens
CARDAIESSGWLHAFDYW

SEQ ID NO: 1539 - protein, 22 aa, Homo sapiens
CARVSAVPQVLGFVVAGQFDYW

SEQ ID NO: 1540 - protein, 13 aa, Homo sapiens
CARRGIADDLDYW

SEQ ID NO: 1541 - protein, 19 aa, Homo sapiens
CARHYYYDSSGYSGAVDYW

SEQ ID NO: 1542 - protein, 22 aa, Homo sapiens
CAKDYDILTGYYDHYYYYMDVW

SEQ ID NO: 1543 - protein, 18 aa, Homo sapiens
CARAGLIFGVVINAFDIW

SEQ ID NO: 1544 - protein, 16 aa, Homo sapiens
CASLAGSYSSSWLDYW

SEQ ID NO: 1545 - protein, 15 aa, Homo sapiens
CAKGMYTAMMQNDYW

SEQ ID NO: 1546 - protein, 18 aa, Homo sapiens
CARLYHTNSYNGAWFDPW

SEQ ID NO: 1547 - protein, 20 aa, Homo sapiens
CARDRGYVAGLQISDYFDYW

SEQ ID NO: 1548 - protein, 18 aa, Homo sapiens
CARIELGQWLVPYYFDYW

SEQ ID NO: 1549 - protein, 18 aa, Homo sapiens
CARDIGYYDSNYNWFDPW

SEQ ID NO: 1550 - protein, 26 aa, Homo sapiens
CARGRVTMVRGVIIRLHYYYYGMDVW

SEQ ID NO: 1551 - protein, 28 aa, Homo sapiens
CARATDSNYCKNGVCYPESYYHYGMDVW

SEQ ID NO: 1552 - protein, 16 aa, Homo sapiens
CAREGPAVTTASFDYW

SEQ ID NO: 1553 - protein, 29 aa, Homo sapiens
CAREGRRDSALVTFWDEHRNYYYYYMEVW

SEQ ID NO: 1554 - protein, 21 aa, Homo sapiens
CARDNPYYDSSGYDVGPFDIW

SEQ ID NO: 1555 - protein, 20 aa, Homo sapiens
CAKETLFKIVVVITREFDYW

SEQ ID NO: 1556 - protein, 15 aa, Homo sapiens
CARWSLEQQLAFDYW

SEQ ID NO: 1557 - protein, 15 aa, Homo sapiens
CASYYYDRVDWFDPW

SEQ ID NO: 1558 - protein, 16 aa, Homo sapiens
CARDLDTHGPDCSDYW

SEQ ID NO: 1559 - protein, 17 aa, Homo sapiens
CARPLDYGGWSYYFDYW

SEQ ID NO: 1560 - protein, 20 aa, Homo sapiens
CARLWTFPLFDSDQYYFDSW

SEQ ID NO: 1561 - protein, 12 aa, Homo sapiens
CYSADISGTGVF

SEQ ID NO: 1562 - protein, 19 aa, Homo sapiens
CASIKGDYGDYDYYGMDVW

SEQ ID NO: 1563 - protein, 27 aa, Homo sapiens
CARVLAPTDRAYYNFWSGYYGYYFDRW

SEQ ID NO: 1564 - protein, 16 aa, Homo sapiens
CARDISSGWDWYFDLW

SEQ ID NO: 1565 - protein, 17 aa, Homo sapiens
CARDLRRGYSYGAIDYW

SEQ ID NO: 1566 - protein, 16 aa, Homo sapiens
CTTDPGGTYYGTFDFW

SEQ ID NO: 1567 - protein, 15 aa, Homo sapiens
CASLWDTAMVNADYW

SEQ ID NO: 1568 - protein, 23 aa, Homo sapiens
CAKDLLLPDRSMVKYYYNGMDVW

SEQ ID NO: 1569 - protein, 20 aa, Homo sapiens
CARGPYCSDGRCYYGPFDSW

SEQ ID NO: 1570 - protein, 20 aa, Homo sapiens
CAKDSHTVEYSSSSSWFDPW

SEQ ID NO: 1571 - protein, 20 aa, Homo sapiens
CARLWVEYCSSTSGGCFDYW

SEQ ID NO: 1572 - protein, 19 aa, Homo sapiens
CTRDTYNYLLDYYYGMDVW

SEQ ID NO: 1573 - protein, 19 aa, Homo sapiens
CAKDSSADYGDYGSSPDYW

SEQ ID NO: 1574 - protein, 21 aa, Homo sapiens
CARDVAEAGPFIVPTRYFDYW

SEQ ID NO: 1575 - protein, 17 aa, Homo sapiens
CAKDNDRSGWRKYFQHW

SEQ ID NO: 1576 - protein, 16 aa, Homo sapiens
CAHRLLVVTGPYFDYW

SEQ ID NO: 1577 - protein, 27 aa, Homo sapiens
CAKHEYRRRGLLRGPKYTSSSGSPDYW

SEQ ID NO: 1578 - protein, 23 aa, Homo sapiens
CARDLGRTDYYDSSGYYYDFDYW

SEQ ID NO: 1579 - protein, 23 aa, Homo sapiens
CARHTPRRMIVVVITLLSAFDIW

SEQ ID NO: 1580 - protein, 20 aa, Homo sapiens
CARSGRPWLIGSMGVYFDNW

SEQ ID NO: 1581 - protein, 13 aa, Homo sapiens
CARDETLMDFDYW

SEQ ID NO: 1582 - protein, 20 aa, Homo sapiens
CARRTVVMSGGLWDYYMDVW

SEQ ID NO: 1583 - protein, 12 aa, Homo sapiens
CARDREYSLDYW

SEQ ID NO: 1584 - protein, 16 aa, Homo sapiens
CAKLEYTVTTALPDYW

SEQ ID NO: 1585 - protein, 19 aa, Homo sapiens
CARVGQTGLGDSLVYFAYW

SEQ ID NO: 1586 - protein, 18 aa, Homo sapiens
CTQGLHYDFWSGYYFEYW

SEQ ID NO: 1587 - protein, 24 aa, Homo sapiens
CARPTLPSYFYDSSGYTKGGFDYW

SEQ ID NO: 1588 - protein, 18 aa, Homo sapiens
CAKDGEAVISRPYYFQYW

SEQ ID NO: 1589 - protein, 17 aa, Homo sapiens
CARHSFQYSSSWGFDPW

SEQ ID NO: 1590 - protein, 15 aa, Homo sapiens
CALRTGYDFHWFDPW

SEQ ID NO: 1591 - protein, 12 aa, Homo sapiens
CVKNADTAMDYW

SEQ ID NO: 1592 - protein, 13 aa, Homo sapiens
CQVWDSSTVGVLF

SEQ ID NO: 1593 - protein, 19 aa, Homo sapiens
CARHRGLLEDGYHGAADYW

SEQ ID NO: 1594 - protein, 15 aa, Homo sapiens
CAHRGPWFGPYFDYW

SEQ ID NO: 1595 - protein, 21 aa, Homo sapiens
CVPETGSSYYDSSGYYLFDYW

SEQ ID NO: 1596 - protein, 18 aa, Homo sapiens
CARQEDDNNYSVYWFDPW

SEQ ID NO: 1597 - protein, 17 aa, Homo sapiens
CARHVAAAGPPDYFDYW

SEQ ID NO: 1598 - protein, 11 aa, Homo sapiens [sequence omitted]

SEQ ID NO: 1599 - protein, 15 aa, Homo sapiens
CAKTGSIAVAGFDYW

SEQ ID NO: 1600 - protein, 15 aa, Homo sapiens
CAKLTYGDYSGPDYW

SEQ ID NO: 1601 - protein, 25 aa, Homo sapiens
CARFSSMRTCRGGSCYTSDWYFDLW

SEQ ID NO: 1602 - protein, 23 aa, Homo sapiens
CARDRLYYGSGNYVYYHYGMDVW

SEQ ID NO: 1603 - protein, 14 aa, Homo sapiens
CAGWGLATAGTDYW

SEQ ID NO: 1604 - protein, 16 aa, Homo sapiens
CARDARGLLRSESDYW

SEQ ID NO: 1605 - protein, 22 aa, Homo sapiens
CARVVVVAATPGVYYYYGMDVW

SEQ ID NO: 1606 - protein, 18 aa, Homo sapiens
CASGITMIVVVGPPYDYW

SEQ ID NO: 1607 - protein, 24 aa, Homo sapiens
CARAHPGAKYSSGWYYYYYYMDVW

SEQ ID NO: 1608 - protein, 14 aa, Homo sapiens
CARRTTSSFAFDIW

SEQ ID NO: 1609 - protein, 16 aa, Homo sapiens
CVKGTHWAGHSHFDYW

SEQ ID NO: 1610 - protein, 20 aa, Homo sapiens
CARGSATYYDFWRGYFFDCW

SEQ ID NO: 1611 - protein, 25 aa, Homo sapiens
CARSTKLVTRITMIVVAQLGYFDLW

SEQ ID NO: 1612 - protein, 14 aa, Homo sapiens
CAKDMGDWRNFDSW

SEQ ID NO: 1613 - protein, 15 aa, Homo sapiens
CATTSPGSTDAFDIW

SEQ ID NO: 1614 - protein, 16 aa, Homo sapiens
CTGRCSGGSCYSVDYW

SEQ ID NO: 1615 - protein, 17 aa, Homo sapiens
CAKNRWIQLWLALLDYW

SEQ ID NO: 1616 - protein, 18 aa, Homo sapiens
CTRGKEGYYYGSGAFDHW

SEQ ID NO: 1617 - protein, 12 aa, Homo sapiens
CTRQYYGSFDYW

SEQ ID NO: 1618 - protein, 19 aa, Homo sapiens
CARASPRGVTNGGRWFDPW

SEQ ID NO: 1619 - protein, 19 aa, Homo sapiens
CARSRSSRGLLKQYYFDYW

SEQ ID NO: 1620 - protein, 33 aa, Homo sapiens
CLRAEDTAVYYCARDQGLITIFGVVIKGEMDYW

SEQ ID NO: 1621 - protein, 19 aa, Homo sapiens
CARLRNGYHNYFYYGMDVW

SEQ ID NO: 1622 - protein, 23 aa, Homo sapiens
CTRDQKERWLHLPGFLRNWFDPW

SEQ ID NO: 1623 - protein, 17 aa, Homo sapiens
CARLSYLTDSWDVFDYW

SEQ ID NO: 1624 - protein, 14 aa, Homo sapiens
CARAQFNWGNFDSW

SEQ ID NO: 1625 - protein, 16 aa, Homo sapiens
CAHNSGFIYGDYFDYW

SEQ ID NO: 1626 - protein, 26 aa, Homo sapiens
CAGPQDLQALLMHRGVGIYYYGMDVW

SEQ ID NO: 1627 - protein, 14 aa, Homo sapiens
CAREVAARSDFEYW

SEQ ID NO: 1628 - protein, 16 aa, Homo sapiens
CAHMSIGIAAAGSDYW

SEQ ID NO: 1629 - protein, 20 aa, Homo sapiens
CAKDVESYGDYHYYYGMDVW

SEQ ID NO: 1630 - protein, 19 aa, Homo sapiens
CARVTVDSTAHDENWFDPW

SEQ ID NO: 1631 - protein, 17 aa, Homo sapiens
CARSPKTDFWSGLFDHW

SEQ ID NO: 1632 - protein, 18 aa, Homo sapiens
CARDLEASSGWFNWFDPW

SEQ ID NO: 1633 - protein, 14 aa, Homo sapiens
CAKNPRGPFYFDYW

SEQ ID NO: 1634 - protein, 17 aa, Homo sapiens
CARHLSSSWFVDAFDIW

SEQ ID NO: 1635 - protein, 16 aa, Homo sapiens
CAREKNDILTGYFDYW

SEQ ID NO: 1636 - protein, 19 aa, Homo sapiens
CARISLWFGELFSLGFDPW

SEQ ID NO: 1637 - protein, 18 aa, Homo sapiens
CARDISSSWYDYYGMDVW

SEQ ID NO: 1638 - protein, 17 aa, Homo sapiens
CARHVYSSPGTDAFDIW

SEQ ID NO: 1639 - protein, 17 aa, Homo sapiens
CAHRKQWLARYDTFDMW

SEQ ID NO: 1640 - protein, 20 aa, Homo sapiens
CAREEVEMATKDYYYGMDVW

SEQ ID NO: 1641 - protein, 25 aa, Homo sapiens
CAHSRPDWNTIFGVVIIGGDYFDYW

SEQ ID NO: 1642 - protein, 25 aa, Homo sapiens
CASLPITMVRGVTYPFQVVLGFDPW

SEQ ID NO: 1643 - protein, 12 aa, Homo sapiens
CQQYNTYIQYTF

SEQ ID NO: 1644 - protein, 19 aa, Homo sapiens
CTKTGPRMASVLIDAFDIW

SEQ ID NO: 1645 - protein, 17 aa, Homo sapiens
CARRIGSSSKTVWFDSW

SEQ ID NO: 1646 - protein, 20 aa, Homo sapiens
CTTDRIYDYVWGSYRYEGYW

SEQ ID NO: 1647 - protein, 19 aa, Homo sapiens
CARIDFKEGSGWYLVFDYW

SEQ ID NO: 1648 - protein, 15 aa, Homo sapiens
CARGYYDFWSGLDYW

SEQ ID NO: 1649 - protein, 19 aa, Homo sapiens
CARHTFRDYVGYYYGMDVW

SEQ ID NO: 1650 - protein, 20 aa, Homo sapiens
CAKSTPPEWLLLTPMGFDPW

SEQ ID NO: 1651 - protein, 21 aa, Homo sapiens
CARNDYRYSSGWYYYYGMDVW

SEQ ID NO: 1652 - protein, 16 aa, Homo sapiens
CARQGSDYYDSSGDYW

SEQ ID NO: 1653 - protein, 22 aa, Homo sapiens
CARQGHQRGLIAVAAAEGFDYW

SEQ ID NO: 1654 - protein, 15 aa, Homo sapiens
CAKDIVPAITYFDYW

SEQ ID NO: 1655 - protein, 16 aa, Homo sapiens
CARDYGDHGEGLHDYW

SEQ ID NO: 1656 - protein, 15 aa, Homo sapiens
CGGGYSSSSSYFDYW

SEQ ID NO: 1657 - protein, 23 aa, Homo sapiens
CAREPSRIAAPTHHYYYYGMDVW

SEQ ID NO: 1658 - protein, 16 aa, Homo sapiens
CAREDLTTATEAFDIW

SEQ ID NO: 1659 - protein, 29 aa, Homo sapiens
CARDHFYYDILTGYFGAARYYYYYYMDVW

SEQ ID NO: 1660 - protein, 15 aa, Homo sapiens
CARVYTGYSAWFDPW

SEQ ID NO: 1661 - protein, 19 aa, Homo sapiens
CARDPSIAAPSFTNWFDPW

SEQ ID NO: 1662 - protein, 21 aa, Homo sapiens
CARAKSITMIVVVTLDAFDIW

SEQ ID NO: 1663 - protein, 15 aa, Homo sapiens
CARALKRGRDYFDYW

SEQ ID NO: 1664 - protein, 16 aa, Homo sapiens
CAKLPDAFGVVSSDYW

SEQ ID NO: 1665 - protein, 18 aa, Homo sapiens
CARVARRRYFDWFDFDYW

SEQ ID NO: 1666 - protein, 17 aa, Homo sapiens
CVRPYFGSGHYWHFDLW

SEQ ID NO: 1667 - protein, 17 aa, Homo sapiens
CVKDMAIAAATFTFDFW

SEQ ID NO: 1668 - protein, 17 aa, Homo sapiens
CTRDRIVVVRWDAFDIW

SEQ ID NO: 1669 - protein, 16 aa, Homo sapiens
CAREYSSSWYIWFDPW

SEQ ID NO: 1670 - protein, 17 aa, Homo sapiens
CARYHSGYDSDNSFDYW

SEQ ID NO: 1671 - protein, 14 aa, Homo sapiens
CARGEQWLVNFGYW

SEQ ID NO: 1672 - protein, 17 aa, Homo sapiens
CARDGRYSYGYPYLDYW

SEQ ID NO: 1673 - protein, 15 aa, Homo sapiens
CAIAARYNWNDFDYW

SEQ ID NO: 1674 - protein, 12 aa, Homo sapiens
CARAPGAFMDVW

SEQ ID NO: 1675 - protein, 16 aa, Homo sapiens
CARGDYGDWDWYFDLW

SEQ ID NO: 1676 - protein, 16 aa, Homo sapiens
CARGAGEQKEDWFDPW

SEQ ID NO: 1677 - protein, 15 aa, Homo sapiens
CASELHQGYSPFDYW

SEQ ID NO: 1678 - protein, 24 aa, Homo sapiens
CARCLDGDYGILIGDSPDDAFDIW

SEQ ID NO: 1679 - skipped

SEQ ID NO: 1680 - protein, 17 aa, Homo sapiens
CARAGAVVRGHYSFDFW

SEQ ID NO: 1681 - protein, 18 aa, Homo sapiens
CARHRSPVPLVYTWFDPW

SEQ ID NO: 1682 - protein, 22 aa, Homo sapiens
CARISRGVSWPYYYYYYGMDVW

SEQ ID NO: 1683 - protein, 14 aa, Homo sapiens
CARLATAMVVFDYW

SEQ ID NO: 1684 - protein, 19 aa, Homo sapiens
CARADDPYNWNYDGRIDYW

SEQ ID NO: 1685 - protein, 22 aa, Homo sapiens
CATGVPIAYCSSTSCYVYFDYW

SEQ ID NO: 1686 - protein, 18 aa, Homo sapiens
CARAGMRLFGAIGEFDYW

SEQ ID NO: 1687 - protein, 22 aa, Homo sapiens
CAKTLNVLRYFDWLLPRWFDPW

SEQ ID NO: 1688 - protein, 14 aa, Homo sapiens
CQQFNIWPPEGITF

SEQ ID NO: 1689 - protein, 17 aa, Homo sapiens
CANTLSMYSSSPGFDFW

SEQ ID NO: 1690 - protein, 13 aa, Homo sapiens
CAKIYGDSSFDYW

SEQ ID NO: 1691 - protein, 25 aa, Homo sapiens
CAKDVLKVADLMYYYDSSGPGGDYW

SEQ ID NO: 1692 - protein, 25 aa, Homo sapiens
CANYLRETYYYDSSGYFRVGAFDIW

SEQ ID NO: 1693 - protein, 11 aa, Homo sapiens
CLQSKNSLDTF

SEQ ID NO: 1694 - protein, 18 aa, Homo sapiens
CARRAYYDTLTGYYIDYW

SEQ ID NO: 1695 - protein, 23 aa, Homo sapiens
CARAPLITGTTGLLGRDDAFDIW

SEQ ID NO: 1696 - protein, 16 aa, Homo sapiens
CTRDAGAQHLGNFDYW

SEQ ID NO: 1697 - protein, 20 aa, Homo sapiens
CAKDMGKAEHPYYYYYMDVW

SEQ ID NO: 1698 - protein, 17 aa, Homo sapiens
CARQPGIAVTPTRFDYW

SEQ ID NO: 1699 - protein, 18 aa, Homo sapiens
CAKDVPTDYTSGWTLDYW

SEQ ID NO: 1700 - protein, 22 aa, Homo sapiens
CARVGMGVAVAGNPPPHACDIW

SEQ ID NO: 1701 - protein, 15 aa, Homo sapiens
CAKDPGYYDISFDYW

SEQ ID NO: 1702 - protein, 18 aa, Homo sapiens
CARVRRDAYRWGYYFDYW

SEQ ID NO: 1703 - protein, 11 aa, Homo sapiens
CQQCFSTPPDF

SEQ ID NO: 1704 - protein, 15 aa, Homo sapiens
CASGSYSSNSDFDYW

SEQ ID NO: 1705 - protein, 18 aa, Homo sapiens
CARGYCSNGECYGAPDYW

SEQ ID NO: 1706 - protein, 12 aa, Homo sapiens
CASVGSIPTDYW

SEQ ID NO: 1707 - protein, 16 aa, Homo sapiens
CARYITMVRGVWFDPW

SEQ ID NO: 1708 - protein, 18 aa, Homo sapiens
CATSPHRGYSSGWTDDYW

SEQ ID NO: 1709 - protein, 21 aa, Homo sapiens
CTDVVVDSSGYYDDENWFDPW

SEQ ID NO: 1710 - protein, 15 aa, Homo sapiens
CATLGGDSSGYVGYW

SEQ ID NO: 1711 - protein, 22 aa, Homo sapiens
CARDELYDFWSGYYPTYGMDVW

SEQ ID NO: 1712 - protein, 14 aa, Homo sapiens
CARESRYGGIDDYW

SEQ ID NO: 1713 - protein, 19 aa, Homo sapiens
CARLRWLRLGEIVRAFDIW

SEQ ID NO: 1714 - protein, 17 aa, Homo sapiens
CARGAYGDSQVGLFDPW

SEQ ID NO: 1715 - protein, 18 aa, Homo sapiens
CVKDVTELLKAGYYFDSW

SEQ ID NO: 1716 - protein, 15 aa, Homo sapiens
CVAMLGPELDAFDMW

SEQ ID NO: 1717 - protein, 16 aa, Homo sapiens
CAKDIGVAGIGYFDLW

SEQ ID NO: 1718 - protein, 25 aa, Homo sapiens
CARASRGITMIVVVTPYYYYYMDVW

SEQ ID NO: 1719 - protein, 24 aa, Homo sapiens
CARDRGILDCSGDRCYPANWFDAW

SEQ ID NO: 1720 - protein, 19 aa, Homo sapiens
CAKDIGGSIAVAGPYFDYW

SEQ ID NO: 1721 - protein, 24 aa, Homo sapiens
CTLFPYTTLFRSARFHSSGWLDSW

SEQ ID NO: 1722 - protein, 16 aa, Homo sapiens
CARSFGSSWYSHFDYW

SEQ ID NO: 1723 - protein, 15 aa, Homo sapiens
CAKGVVGATSYFDYW

SEQ ID NO: 1724 - protein, 18 aa, Homo sapiens
CATAPIAAAATGGWFDPW

SEQ ID NO: 1725 - protein, 17 aa, Homo sapiens
CAREPRELIRGYYFDYW

SEQ ID NO: 1726 - protein, 19 aa, Homo sapiens
CARHLYSGYDYSYYYMDVW

SEQ ID NO: 1727 - protein, 16 aa, Homo sapiens
CASPPSFEYDEYFHHW

SEQ ID NO: 1728 - protein, 18 aa, Homo sapiens
CARVDSSGYYPQDAFDIW

SEQ ID NO: 1729 - protein, 17 aa, Homo sapiens
CASRGELLPFSYYFDYW

SEQ ID NO: 1730 - protein, 15 aa, Homo sapiens
CARGTWELPDYFDNW

SEQ ID NO: 1731 - protein, 17 aa, Homo sapiens
CARGLPPYGANSRFDFW

SEQ ID NO: 1732 - protein, 18 aa, Homo sapiens
CAKVESDSSGWYGEIDYW

SEQ ID NO: 1733 - protein, 11 aa, Homo sapiens
CLQAFSFPYSF

SEQ ID NO: 1734 - protein, 18 aa, Homo sapiens
CAKDDWLVQAGMTHFEYW

SEQ ID NO: 1735 - protein, 12 aa, Homo sapiens
CQQYYNTLSVAF

SEQ ID NO: 1736 - protein, 15 aa, Homo sapiens
CARAPAASGSYSDYW

SEQ ID NO: 1737 - protein, 25 aa, Homo sapiens
CASRTSSVVVVPATRPAAAGPFEYW

SEQ ID NO: 1738 - protein, 15 aa, Homo sapiens
CAKGLWNGNSPEDYW

SEQ ID NO: 1739 - protein, 18 aa, Homo sapiens
CAKDIQGGEYSSGGTDYW

SEQ ID NO: 1740 - protein, 29 aa, Homo sapiens
CAKDRAYYDILTGYFPTNYYYYYYGMDVW

SEQ ID NO: 1741 - protein, 16 aa, Homo sapiens
CAKRGVSGSWFYFDYW

SEQ ID NO: 1742 - protein, 16 aa, Homo sapiens
CAKAYAENSWYYFDLW

SEQ ID NO: 1743 - protein, 16 aa, Homo sapiens
CAASHSSDRFTYFDYW

SEQ ID NO: 1744 - protein, 17 aa, Homo sapiens
CARAPTWRGDYVHFDYW

SEQ ID NO: 1745 - protein, 40 aa, Homo sapiens
CTLFPYTTLFRSQMNSLRAEDTAVYYCAKDDGWLRPFHYW

SEQ ID NO: 1746 - protein, 15 aa, Homo sapiens
CAKDRGQLWSNFDYW

SEQ ID NO: 1747 - protein, 23 aa, Homo sapiens
CARRILNRITIFGVVIPNWFDPW

SEQ ID NO: 1748 - protein, 16 aa, Homo sapiens
CARDSHHSSSSLLDYW

SEQ ID NO: 1749 - protein, 16 aa, Homo sapiens
CAREVGNYGGTLFDYW

SEQ ID NO: 1750 - protein, 17 aa, Homo sapiens
CAKETFPKYSAYLFDSW

SEQ ID NO: 1751 - protein, 15 aa, Homo sapiens
CARSHIVTMNWFDPW

SEQ ID NO: 1752 - protein, 20 aa, Homo sapiens
CARLYCSGGLCYRGYLFDPW

SEQ ID NO: 1753 - protein, 19 aa, Homo sapiens
CARAPRTTIFGVVLWFDPW

SEQ ID NO: 1754 - protein, 11 aa, Homo sapiens
CLQDYNYSWVF

SEQ ID NO: 1755 - protein, 20 aa, Homo sapiens
CARETGYYDSSGYSNWFDPW

SEQ ID NO: 1756 - protein, 14 aa, Homo sapiens
CASGPRDSNHFDLW

SEQ ID NO: 1757 - protein, 16 aa, Homo sapiens
CTIYYYDSSGYYWNYW

SEQ ID NO: 1758 - protein, 19 aa, Homo sapiens
CARVGGVMTSEIHWYFDLW

SEQ ID NO: 1759 - protein, 26 aa, Homo sapiens
CASADCSSLSCKAGLTPTLEYYLDYW

SEQ ID NO: 1760 - protein, 17 aa, Homo sapiens
CAKDIGSSSWDVLVDYW

SEQ ID NO: 1761 - protein, 16 aa, Homo sapiens
CATATGYSSVHWFDPW

SEQ ID NO: 1762 - protein, 15 aa, Homo sapiens
CARHGDASGSYYGYW

SEQ ID NO: 1763 - protein, 18 aa, Homo sapiens
CAREDVLRFLLNGAFDIW

SEQ ID NO: 1764 - protein, 16 aa, Homo sapiens
CAKGPLREDNFYMDVW

SEQ ID NO: 1765 - protein, 18 aa, Homo sapiens
CARDLPTKRWLQFHFDYW

SEQ ID NO: 1766 - protein, 24 aa, Homo sapiens
CARGYYDSSGYSSRIRTKNWFDPW

SEQ ID NO: 1767 - protein, 22 aa, Homo sapiens
CARIQGRKGLASKITTYYFDYW

SEQ ID NO: 1768 - protein, 18 aa, Homo sapiens
CARDGCSSTSCTDWFDPW

SEQ ID NO: 1769 - protein, 16 aa, Homo sapiens
CATQHLDFWSGYYNYW

SEQ ID NO: 1770 - protein, 16 aa, Homo sapiens
CARTHSSSSLHYFDYW

SEQ ID NO: 1771 - protein, 16 aa, Homo sapiens
CARESSSGVADGMDVW

SEQ ID NO: 1772 - protein, 19 aa, Homo sapiens
CARDRLDSSSWTMGYFDYW

SEQ ID NO: 1773 - protein, 16 aa, Homo sapiens
CTTVGIQLWHTFFDYW

SEQ ID NO: 1774 - protein, 25 aa, Homo sapiens
CAKDRGGAPYCSSTSCYWVDAFDIW

SEQ ID NO: 1775 - protein, 18 aa, Homo sapiens
CASEGIAVAGTYPAFDYW

SEQ ID NO: 1776 - protein, 22 aa, Homo sapiens
CARDAFAITMIVGLTDSCFDCW

SEQ ID NO: 1777 - protein, 24 aa, Homo sapiens
CITDRVIVVPVAMLIFLGAYSDYW

SEQ ID NO: 1778 - protein, 25 aa, Homo sapiens
CARQGMETDGRFDPTVTTLYYFDFW

SEQ ID NO: 1779 - protein, 23 aa, Homo sapiens
CARDLVLGPWGSYDRSGYRLDYW

SEQ ID NO: 1780 - protein, 18 aa, Homo sapiens
CARMCIAALTPLRYFDYW

SEQ ID NO: 1781 - protein, 24 aa, Homo sapiens
CARHPPASLVWTYEVFHNWYFDLW

SEQ ID NO: 1782 - protein, 17 aa, Homo sapiens
CATNLRIAGRRDGFDIW

SEQ ID NO: 1783 - protein, 19 aa, Homo sapiens
CARQMEVEMATIPAEVDYW

SEQ ID NO: 1784 - protein, 18 aa, Homo sapiens
CARASYSSGWYEEGPDYW

SEQ ID NO: 1785 - protein, 19 aa, Homo sapiens
CARGRKERALVILYYFDYW

SEQ ID NO: 1786 - protein, 19 aa, Homo sapiens
CARAGVLRAGGTYNWFDPW

SEQ ID NO: 1787 - protein, 17 aa, Homo sapiens
CARHGEVGATDYYMDVW

SEQ ID NO: 1788 - protein, 18 aa, Homo sapiens
CARRVDGSSSWSYYFDYW

SEQ ID NO: 1789 - protein, 20 aa, Homo sapiens
CARDFKYYDYVWGSYRDDYW

SEQ ID NO: 1790 - protein, 14 aa, Homo sapiens
CARASGPPPFVDYW

SEQ ID NO: 1791 - protein, 21 aa, Homo sapiens
CAKDHPSIVLMVYAIGTPDYW

SEQ ID NO: 1792 - protein, 20 aa, Homo sapiens
CARRYSQYSSGWYYPGVDYW

SEQ ID NO: 1793 - protein, 19 aa, Homo sapiens
CARQYTIWTGYPYNWFDPW

SEQ ID NO: 1794 - protein, 17 aa, Homo sapiens
CARDRVGADGSYYFDYW

SEQ ID NO: 1795 - protein, 15 aa, Homo sapiens
CARVDTTIFYYMDVW

SEQ ID NO: 1796 - protein, 18 aa, Homo sapiens
CARLPAPQHDYGDYVDYW

SEQ ID NO: 1797 - protein, 16 aa, Homo sapiens
CARELYNNDCYWFDPW

SEQ ID NO: 1798 - protein, 15 aa, Homo sapiens
CAKVVGQWRFYFDYW

SEQ ID NO: 1799 - protein, 19 aa, Homo sapiens
CAKARIQEQLVTNYYFDYW

SEQ ID NO: 1800 - protein, 22 aa, Homo sapiens
CARGSVTTGADDYYYYYGMDVW

SEQ ID NO: 1801 - protein, 15 aa, Homo sapiens
CVSWGRTNWYYFDYW

SEQ ID NO: 1802 - protein, 14 aa, Homo sapiens
CVRDNDGGGYLEYW

SEQ ID NO: 1803 - protein, 13 aa, Homo sapiens
CAKDSVATSFDYW

SEQ ID NO: 1804 - protein, 20 aa, Homo sapiens
CARDRVLDIVAHRGHWFDPW

SEQ ID NO: 1805 - protein, 17 aa, Homo sapiens
CAREKGDGYNSHAFDIW

SEQ ID NO: 1806 - protein, 18 aa, Homo sapiens
CASLTMVRGTTPYYFDYW

SEQ ID NO: 1807 - protein, 13 aa, Homo sapiens
CMEALQTPPMFTF

SEQ ID NO: 1808 - protein, 14 aa, Homo sapiens
CARDYRKGGPFDVW

SEQ ID NO: 1809 - protein, 13 aa, Homo sapiens
CARDTQWQLTDYW

SEQ ID NO: 1810 - protein, 18 aa, Homo sapiens
CASDRNYYDILTGSLDYW

SEQ ID NO: 1811 - protein, 15 aa, Homo sapiens
CQSYDSSLNDIRVVF

SEQ ID NO: 1812 - protein, 14 aa, Homo sapiens
CARDGGFRPWFDPW

SEQ ID NO: 1813 - protein, 16 aa, Homo sapiens
CATAPAVVAANWFDPW

SEQ ID NO: 1814 - protein, 12 aa, Homo sapiens [sequence omitted]

SEQ ID NO: 1815 - protein, 13 aa, Homo sapiens
CARVTMVTGFDNW

SEQ ID NO: 1816 - protein, 14 aa, Homo sapiens
CAKVRYYYGHFDYW

SEQ ID NO: 1817 - protein, 11 aa, Homo sapiens [sequence omitted]

SEQ ID NO: 1818 - protein, 17 aa, Homo sapiens
CATLSVGSSGWYTPDYW

SEQ ID NO: 1819 - protein, 18 aa, Homo sapiens
CASYTYYYGSGSYYFDYW

SEQ ID NO: 1820 - protein, 20 aa, Homo sapiens
CVRVRTYDILTGDYSTADYW

SEQ ID NO: 1821 - protein, 19 aa, Homo sapiens
CARHYDTSGYYPKGYFQHW

SEQ ID NO: 1822 - protein, 14 aa, Homo sapiens
CAKLPDSDGLADYW

SEQ ID NO: 1823 - protein, 17 aa, Homo sapiens
CARVGSDDILTGYSTYW

SEQ ID NO: 1824 - protein, 19 aa, Homo sapiens
CAKRGGGYYYDSSGYLDYW

SEQ ID NO: 1825 - protein, 21 aa, Homo sapiens
CARGYYMATMTYYYYYGMDVW

SEQ ID NO: 1826 - protein, 22 aa, Homo sapiens
CAREGRYFYDSRGYPISLFDYW

SEQ ID NO: 1827 - protein, 18 aa, Homo sapiens
CAKDIGWSGYYKFTFDYW

SEQ ID NO: 1828 - protein, 18 aa, Homo sapiens
CARGTLRLPAHPGYFDFW

SEQ ID NO: 1829 - protein, 21 aa, Homo sapiens
CARDFPVCTGGLCYPNGFDYW

SEQ ID NO: 1830 - protein, 22 aa, Homo sapiens
CASYDVWSGSHLTGGENWFDPW

SEQ ID NO: 1831 - protein, 15 aa, Homo sapiens
CAVIIAVAGTDFDYW

SEQ ID NO: 1832 - protein, 15 aa, Homo sapiens
CARLTYGSGSYIDVW

SEQ ID NO: 1833 - protein, 12 aa, Homo sapiens
CQQSYLAPRLSF

SEQ ID NO: 1834 - protein, 16 aa, Homo sapiens
CAKVNIGSGSYNGDYW

SEQ ID NO: 1835 - protein, 20 aa, Homo sapiens
CATMTTVTTYLQYYYYMDVW

SEQ ID NO: 1836 - protein, 19 aa, Homo sapiens
CARDPTSIAVAEEYYFDYW

SEQ ID NO: 1837 - protein, 14 aa, Homo sapiens
CAKLSSWYTPFDYW

SEQ ID NO: 1838 - protein, 18 aa, Homo sapiens
CAKAVMLSYYYYYGLDVW

SEQ ID NO: 1839 - protein, 25 aa, Homo sapiens
CTRASHYYDMSGYYQPVVTDDSDIW

SEQ ID NO: 1840 - protein, 19 aa, Homo sapiens
CARARDDFWSGYHNWFAPW

SEQ ID NO: 1841 - protein, 13 aa, Homo sapiens
CVRGPQFDGVDYW

SEQ ID NO: 1842 - protein, 34 aa, Homo sapiens
CTLFPYTTLFRSAIYYCAREAGYSSTWYEYLDYW

SEQ ID NO: 1843 - protein, 22 aa, Homo sapiens
CARQERRITIFGVVISLYMDVW

SEQ ID NO: 1844 - protein, 19 aa, Homo sapiens
CARTFGLRINSFGYDFDYW

SEQ ID NO: 1845 - protein, 16 aa, Homo sapiens
CARVGDYVWGSFRDYW

SEQ ID NO: 1846 - protein, 17 aa, Homo sapiens
CASTTAAWYRYDAFDIW

SEQ ID NO: 1847 - protein, 17 aa, Homo sapiens
CARENLGDWGNYYFDYW

SEQ ID NO: 1848 - protein, 18 aa, Homo sapiens
CARVGPRTRVGARFFDSW

SEQ ID NO: 1849 - protein, 15 aa, Homo sapiens
CAKFQVYDLYYFDYW

SEQ ID NO: 1850 - protein, 21 aa, Homo sapiens
CARLSRITIFGVAISDLMDVW

SEQ ID NO: 1851 - protein, 20 aa, Homo sapiens
CAKEAWWGNSVEIDNWFDPW

SEQ ID NO: 1852 - protein, 23 aa, Homo sapiens
CARGSDCTNGVCYTHYYYYMDVW

SEQ ID NO: 1853 - protein, 11 aa, Homo sapiens [sequence omitted]

SEQ ID NO: 1854 - protein, 22 aa, Homo sapiens
CVRQPGPHMVRGVMWNNWFDPW

SEQ ID NO: 1855 - protein, 15 aa, Homo sapiens
CATFIVATIWYFDYW

SEQ ID NO: 1856 - protein, 17 aa, Homo sapiens
CAKADVVVTPRGGFDYW

SEQ ID NO: 1857 - protein, 15 aa, Homo sapiens
CARHISGWQNPFDSW

SEQ ID NO: 1858 - protein, 17 aa, Homo sapiens
CASHSSSWWGLYYFDYW

SEQ ID NO: 1859 - protein, 18 aa, Homo sapiens
CASDYSRSSEGLGYFGFW

SEQ ID NO: 1860 - protein, 23 aa, Homo sapiens
CAIKMTDFWSGYYNSYYYGMDVW

SEQ ID NO: 1861 - protein, 21 aa, Homo sapiens
CARDEVEDAMVPELIIPIDYW

SEQ ID NO: 1862 - protein, 16 aa, Homo sapiens
CARESNCGGDCYFDYW

SEQ ID NO: 1863 - protein, 17 aa, Homo sapiens
CAKDRGAAAVSDSFDVW

SEQ ID NO: 1864 - protein, 18 aa, Homo sapiens
CTRPLLQAMAAVGYFDYW

SEQ ID NO: 1865 - protein, 16 aa, Homo sapiens
CARGDYAGYYYYMDVW

SEQ ID NO: 1866 - protein, 16 aa, Homo sapiens
CAREEGNLSRRVFDYW

SEQ ID NO: 1867 - protein, 25 aa, Homo sapiens
CARELRYFDWLLHSDYYYYYGMDVW

SEQ ID NO: 1868 - protein, 23 aa, Homo sapiens
CARDRRYCGGDCYWAYYYGMDVW

SEQ ID NO: 1869 - protein, 20 aa, Homo sapiens
CAKAELNYYDSSGYYHFGYW

SEQ ID NO: 1870 - protein, 19 aa, Homo sapiens
CARGPTIYYDSSGSSFDHW

SEQ ID NO: 1871 - protein, 18 aa, Homo sapiens
CVHKILRPARLPVSFDSW

SEQ ID NO: 1872 - protein, 24 aa, Homo sapiens
CARSILESRYSSGWFYYYYYMDVW

SEQ ID NO: 1873 - protein, 17 aa, Homo sapiens
CARDNRYSGSNEPFDYW

SEQ ID NO: 1874 - protein, 20 aa, Homo sapiens
CARGGPITIFGVSWYYFDYW

SEQ ID NO: 1875 - protein, 26 aa, Homo sapiens
CAREAGFSSVYFPGLVVVMTSSFDYW

SEQ ID NO: 1876 - protein, 20 aa, Homo sapiens
CARFFGIVVVPAARWGFDYW

SEQ ID NO: 1877 - protein, 23 aa, Homo sapiens
CAHRHQDYDILTGYYSLNWFDPW

SEQ ID NO: 1878 - protein, 21 aa, Homo sapiens
CASLTYYYDSSGYSVDYFDYW

SEQ ID NO: 1879 - protein, 22 aa, Homo sapiens
CARIYTRIYNYGDVRDYFFDFW

SEQ ID NO: 1880 - protein, 20 aa, Homo sapiens
CARFVVVPAAMHYYYGMDVW

SEQ ID NO: 1881 - protein, 21 aa, Homo sapiens
CARDTIRLGELSLWEDYFDYW

SEQ ID NO: 1882 - protein, 17 aa, Homo sapiens
CARHFGTYTEENWFDSW

SEQ ID NO: 1883 - protein, 14 aa, Homo sapiens
CAGQLPGSSWFDPW

SEQ ID NO: 1884 - protein, 17 aa, Homo sapiens
CARGGLLGIGMYYFDYW

SEQ ID NO: 1885 - protein, 17 aa, Homo sapiens
CASGPGAISAAVYFDYW

SEQ ID NO: 1886 - protein, 16 aa, Homo sapiens
CAMVYAILGEYYFDYW

SEQ ID NO: 1887 - protein, 27 aa, Homo sapiens
CTTVHRDPLDRIMITFGGVIAVYFDYW

SEQ ID NO: 1888 - protein, 18 aa, Homo sapiens
CARDTYSSGWYFGWFDPW

SEQ ID NO: 1889 - protein, 21 aa, Homo sapiens
CARARGDIVLMVYAIAYFDYW

SEQ ID NO: 1890 - protein, 12 aa, Homo sapiens
CQQNYDTPQSTF

SEQ ID NO: 1891 - protein, 14 aa, Homo sapiens
CARVYLSGFGTDYW

SEQ ID NO: 1892 - protein, 15 aa, Homo sapiens
CARLLLNSIRGFDYW

SEQ ID NO: 1893 - protein, 19 aa, Homo sapiens
CARGYDSFRITVTTPFDPW

SEQ ID NO: 1894 - protein, 17 aa, Homo sapiens
CAKASGFGMATIGFDYW

SEQ ID NO: 1895 - protein, 15 aa, Homo sapiens
CARSRREITRIFDFW

SEQ ID NO: 1896 - protein, 25 aa, Homo sapiens
CAREGLLYYDSSGYYEVQEGIFDYW

SEQ ID NO: 1897 - protein, 17 aa, Homo sapiens
CARRDHDADGYGWFDPW

SEQ ID NO: 1898 - protein, 15 aa, Homo sapiens
CAKDKNPIGYVFDYW

SEQ ID NO: 1899 - protein, 20 aa, Homo sapiens
CARGIYGDYGALDGDWFDPW

SEQ ID NO: 1900 - protein, 15 aa, Homo sapiens
CARVSRGASYLFDFW

SEQ ID NO: 1901 - protein, 17 aa, Homo sapiens
CARQGRMIVVLNWFDPW

SEQ ID NO: 1902 - protein, 20 aa, Homo sapiens
CATSPFSSGWNNYYYYMDVW

SEQ ID NO: 1903 - protein, 20 aa, Homo sapiens
CAKNLRYYYDTTAWDAFDLW

SEQ ID NO: 1904 - protein, 17 aa, Homo sapiens
CARDQIRAGGYDTFDYW

SEQ ID NO: 1905 - protein, 21 aa, Homo sapiens
CSSSYYDSWSPYPSDWYFDLW

SEQ ID NO: 1906 - protein, 24 aa, Homo sapiens
CARHLSHYDFWSGSGYYYYGMDVW

SEQ ID NO: 1907 - protein, 17 aa, Homo sapiens
CARGHYDSIGGYFFDYW

SEQ ID NO: 1908 - protein, 19 aa, Homo sapiens
CARGRAGVFGVVIKAFDIW

SEQ ID NO: 1909 - protein, 15 aa, Homo sapiens
CARVSSSHYDYFDYW

SEQ ID NO: 1910 - protein, 20 aa, Homo sapiens
CTTEGSGSLYGVWYSYMDVW

SEQ ID NO: 1911 - protein, 24 aa, Homo sapiens
CARVLPWDYYDSGTFSSGYYFDYW

SEQ ID NO: 1912 - protein, 21 aa, Homo sapiens
CAKDISSGIAAAGPLGYFDLW

SEQ ID NO: 1913 - protein, 23 aa, Homo sapiens
CARERITTLTPSIFYYYYGMDVW

SEQ ID NO: 1914 - protein, 15 aa, Homo sapiens
CARETTVGYNHFDYW

SEQ ID NO: 1915 - protein, 18 aa, Homo sapiens
CAHRGPPIAAAAHGFQHW

SEQ ID NO: 1916 - protein, 16 aa, Homo sapiens
CSLGGLYSYGRQFDYW

SEQ ID NO: 1917 - protein, 21 aa, Homo sapiens
CARHRGRGSGLGDYYYYMDVW

SEQ ID NO: 1918 - protein, 18 aa, Homo sapiens
CAREERVYNWNSGAFDIW

SEQ ID NO: 1919 - protein, 12 aa, Homo sapiens
CQRSNSNPPYTF

SEQ ID NO: 1920 - protein, 19 aa, Homo sapiens
CVIPSVATFTTTRNMLDYW

SEQ ID NO: 1921 - protein, 17 aa, Homo sapiens
CAHYYDILTGYPLFDYW

SEQ ID NO: 1922 - protein, 18 aa, Homo sapiens
CAKKVGPYGDYLYYFDYW

SEQ ID NO: 1923 - protein, 19 aa, Homo sapiens
CARGRVAAAGTGEDWFDPW

SEQ ID NO: 1924 - protein, 13 aa, Homo sapiens
CARSSTSDYFDYW

SEQ ID NO: 1925 - protein, 22 aa, Homo sapiens
CAREFDPWSGYYPDDPFFFDYW

SEQ ID NO: 1926 - protein, 21 aa, Homo sapiens
CARAPMTAYSGSYSVGALDIW

SEQ ID NO: 1927 - protein, 21 aa, Homo sapiens
CARLPNYYVGSGYAFGAFDIW

SEQ ID NO: 1928 - protein, 19 aa, Homo sapiens
CATQSILNVNTPMIYRDYW

SEQ ID NO: 1929 - protein, 16 aa, Homo sapiens
CAKVPSCCSDDAFDIW

SEQ ID NO: 1930 - protein, 15 aa, Homo sapiens
CAKVGATTLSPFDYW

SEQ ID NO: 1931 - protein, 18 aa, Homo sapiens
CARVRLAAAEPGYAFDIW

SEQ ID NO: 1932 - protein, 17 aa, Homo sapiens
CARVDMGRKPYWYFDLW

SEQ ID NO: 1933 - protein, 12 aa, Homo sapiens
CAGAFDQFFDSW

SEQ ID NO: 1934 - protein, 21 aa, Homo sapiens
CARVGTDITMIVVVITAFDIW

SEQ ID NO: 1935 - protein, 24 aa, Homo sapiens
CAKMITVPVNVGPEKESHWYFDFW

SEQ ID NO: 1936 - protein, 23 aa, Homo sapiens
CARIPFYDYIWGSFSEAYYFDYW

SEQ ID NO: 1937 - protein, 13 aa, Homo sapiens
CTRDPFPLTNDYW

SEQ ID NO: 1938 - protein, 29 aa, Homo sapiens
CARGSTMVRGVIIPPPKIYYYYYYGMDVW

SEQ ID NO: 1939 - protein, 17 aa, Homo sapiens
CARPGYYDSSAEAFDIW

SEQ ID NO: 1940 - protein, 27 aa, Homo sapiens
CARDLRIELELTAVGGSISYYYGMDVW

SEQ ID NO: 1941 - protein, 15 aa, Homo sapiens
CARDRNWNYGWFDPW

SEQ ID NO: 1942 - protein, 15 aa, Homo sapiens
CACTEWELNSWFDPW

SEQ ID NO: 1943 - protein, 15 aa, Homo sapiens
CARAREGYGLGFDYW

SEQ ID NO: 1944 - protein, 23 aa, Homo sapiens
CAGLPAPFITTAGNNYYYAMDVW

SEQ ID NO: 1945 - protein, 13 aa, Homo sapiens
CSSPHDTDAFDIW

SEQ ID NO: 1946 - protein, 14 aa, Homo sapiens
CTTDRGYMNWLDPW

SEQ ID NO: 1947 - protein, 16 aa, Homo sapiens
CARGPLELLEKYFDHW

SEQ ID NO: 1948 - protein, 23 aa, Homo sapiens
CARDRIEARPGSWDYYYYGMDVW

SEQ ID NO: 1949 - protein, 15 aa, Homo sapiens
CASGYCAGDCYFDYW

SEQ ID NO: 1950 - protein, 21 aa, Homo sapiens
CARSVGYCSGTTCYMNWYDAW

SEQ ID NO: 1951 - protein, 24 aa, Homo sapiens
CARTPIYDHVWGNYRQPNFHFDYW

SEQ ID NO: 1952 - protein, 21 aa, Homo sapiens
CARLVGDYVWGTYVVGAFDIW

SEQ ID NO: 1953 - protein, 19 aa, Homo sapiens
CTSPFAPYCSGGSCSLDYW

SEQ ID NO: 1954 - protein, 19 aa, Homo sapiens
CAKDVHGDYVSDYNWFDPW

SEQ ID NO: 1955 - protein, 18 aa, Homo sapiens
CARDSGPCSGGTCLFDSW

SEQ ID NO: 1956 - protein, 18 aa, Homo sapiens
CARQTSWWLTHSNWFDPW

SEQ ID NO: 1957 - protein, 19 aa, Homo sapiens
CAKNGITMIVVVISRFDYW

SEQ ID NO: 1958 - protein, 19 aa, Homo sapiens
CAKAARGYCSGGSCYFGYW

SEQ ID NO: 1959 - protein, 15 aa, Homo sapiens
CAHSPRAAISPFDYW

SEQ ID NO: 1960 - protein, 17 aa, Homo sapiens
CAKGSRIAVAETSFDYW

SEQ ID NO: 1961 - protein, 14 aa, Homo sapiens
CARDVGFLEYFEPW

SEQ ID NO: 1962 - protein, 17 aa, Homo sapiens
CAKDGWDGYNPYYFDYW

SEQ ID NO: 1963 - protein, 19 aa, Homo sapiens
CARDSYGDLYYYYYGMDVW

SEQ ID NO: 1964 - protein, 16 aa, Homo sapiens
CARGRAAAGTWDFDYW

SEQ ID NO: 1965 - protein, 22 aa, Homo sapiens
CAKDQDPNHFDWLLGRSSFDYW

SEQ ID NO: 1966 - protein, 10 aa, Homo sapiens
CQQDYTTFAF

SEQ ID NO: 1967 - protein, 14 aa, Homo sapiens
CARDGTVTRSFDYW

SEQ ID NO: 1968 - protein, 24 aa, Homo sapiens
CAKPHCSSTSCYPNYYYYYGMDVW

SEQ ID NO: 1969 - protein, 15 aa, Homo sapiens
CARGFSITDSAFDIW

SEQ ID NO: 1970 - protein, 15 aa, Homo sapiens
CQSADSTATDPLVVF

SEQ ID NO: 1971 - protein, 20 aa, Homo sapiens
CAKDISGWSVGEVPSGFDVW

SEQ ID NO: 1972 - protein, 21 aa, Homo sapiens
CARDNLRYNWNYGGNDAFDIW

SEQ ID NO: 1973 - protein, 20 aa, Homo sapiens
CARVVTVWGSYRPKYWFDPW

SEQ ID NO: 1974 - protein, 20 aa, Homo sapiens
CTRQQELSIYTGGQYFFDYW

SEQ ID NO: 1975 - protein, 17 aa, Homo sapiens
CARDPWLIGYNYGFDHW

SEQ ID NO: 1976 - protein, 20 aa, Homo sapiens
CAKDSQYSSSWNPYWYFDLW

SEQ ID NO: 1977 - protein, 15 aa, Homo sapiens
CAKTYSGYDDYGDYW

SEQ ID NO: 1978 - protein, 13 aa, Homo sapiens
CTTGLTFSPFDYW

SEQ ID NO: 1979 - protein, 19 aa, Homo sapiens
CATAFGYCSSTSCPYPYYW

SEQ ID NO: 1980 - protein, 23 aa, Homo sapiens
CARESRVVDTAMVVTYYYGMDVW

SEQ ID NO: 1981 - protein, 16 aa, Homo sapiens
CVKDRNWNDIPSVDYW

SEQ ID NO: 1982 - protein, 12 aa, Homo sapiens
CQSYDSTYQVLF

SEQ ID NO: 1983 - protein, 27 aa, Homo sapiens
CARSTYDRSDWGGLELKRYRYYYMDVW

SEQ ID NO: 1984 - protein, 16 aa, Homo sapiens
CARDEYSGYDDHFDYW

SEQ ID NO: 1985 - protein, 20 aa, Homo sapiens
CARVDGHYDSSGFYQYLDNW

SEQ ID NO: 1986 - protein, 16 aa, Homo sapiens
CARERGTMIGLVFDYW

SEQ ID NO: 1987 - protein, 18 aa, Homo sapiens
CATGDRWELTYDIAFDIW

SEQ ID NO: 1988 - protein, 15 aa, Homo sapiens
CQVWDRSSDHPEVVF

SEQ ID NO: 1989 - protein, 17 aa, Homo sapiens
CARVDEGITGTTCPDYW

SEQ ID NO: 1990 - protein, 18 aa, Homo sapiens
CAREAGGSGNAADWFDPW

SEQ ID NO: 1991 - protein, 21 aa, Homo sapiens
CAKKMAPYCGGDCYTPPFDYW

SEQ ID NO: 1992 - protein, 21 aa, Homo sapiens
CARYYWAITIFGVVTQAFDYW

SEQ ID NO: 1993 - protein, 18 aa, Homo sapiens
CARDDRIAVAPLGAFDIW

SEQ ID NO: 1994 - protein, 18 aa, Homo sapiens
CARELVMGRSQTDAFDLW

SEQ ID NO: 1995 - protein, 20 aa, Homo sapiens
CATGANTIFGVVIIDAFDIW

SEQ ID NO: 1996 - protein, 20 aa, Homo sapiens
CARDRVIPAPIDYYYYMDVW

SEQ ID NO: 1997 - protein, 17 aa, Homo sapiens
CARPRYSGNYGDAFDIW

SEQ ID NO: 1998 - protein, 11 aa, Homo sapiens [sequence omitted]

SEQ ID NO: 1999 - protein, 16 aa, Homo sapiens
CAHSSNHYYYYGMDVW

SEQ ID NO: 2000 - protein, 19 aa, Homo sapiens
CARDPLHIYDSSGYYYDYW

SEQ ID NO: 2001 - protein, 11 aa, Homo sapiens
CHQSSRLPFTF

SEQ ID NO: 2002 - protein, 17 aa, Homo sapiens
CANFRLAEQWLRAFDIW

SEQ ID NO: 2003 - protein, 21 aa, Homo sapiens
CARDHSYCTNGVCYTEHFDYW

SEQ ID NO: 2004 - protein, 17 aa, Homo sapiens
CAHTEYNLNYLDLLDYW

SEQ ID NO: 2005 - protein, 17 aa, Homo sapiens
CASGGSVVVPAAHFDYW

SEQ ID NO: 2006 - protein, 19 aa, Homo sapiens
CARVPGGLRYYHFFYMDFW

SEQ ID NO: 2007 - protein, 17 aa, Homo sapiens
CARHNFIAVAGTGFDYW

SEQ ID NO: 2008 - protein, 19 aa, Homo sapiens
CARDRGYSYGYRRNWFDPW

SEQ ID NO: 2009 - protein, 23 aa, Homo sapiens
CARHDKKWLARGPPNYYYYMDVW

SEQ ID NO: 2010 - protein, 20 aa, Homo sapiens
CARSRTPGTIFFYYYGMDVW

SEQ ID NO: 2011 - protein, 22 aa, Homo sapiens
CARVKGTKITIFGVAVSFFDYW

SEQ ID NO: 2012 - protein, 14 aa, Homo sapiens
CQSADNSAPNSWVF

SEQ ID NO: 2013 - protein, 18 aa, Homo sapiens
CAKDIHNYGSGTGPLDYW

SEQ ID NO: 2014 - protein, 15 aa, Homo sapiens
CARDSGSPIGHFDSW

SEQ ID NO: 2015 - protein, 16 aa, Homo sapiens
CAHSDWNYVFHAFHVW

SEQ ID NO: 2016 - protein, 17 aa, Homo sapiens
CARLLEYSSSPRWFDPW

SEQ ID NO: 2017 - protein, 18 aa, Homo sapiens
CAHLGVHPPIYPRPFDCW

SEQ ID NO: 2018 - protein, 15 aa, Homo sapiens
CARGYDVLTGYPDYW

SEQ ID NO: 2019 - protein, 17 aa, Homo sapiens
CTKVSRSWYDEDAFDIW

SEQ ID NO: 2020 - protein, 18 aa, Homo sapiens
CARAASVTTYYYYGMDVW

SEQ ID NO: 2021 - protein, 28 aa, Homo sapiens
CAKELEPYYDFWSGYSTLKYFYYGMDVW

SEQ ID NO: 2022 - protein, 17 aa, Homo sapiens
CAKAISSEQWLVQSDYW

SEQ ID NO: 2023 - protein, 15 aa, Homo sapiens
CARGSGAAAGDFDYW

SEQ ID NO: 2024 - protein, 22 aa, Homo sapiens
CARCLPPDFYCSGGSCAPFDYW

SEQ ID NO: 2025 - protein, 21 aa, Homo sapiens
CAKVAPEGSITTRPEEYFQHW

SEQ ID NO: 2026 - protein, 12 aa, Homo sapiens
CQQSFTTPPLTF

SEQ ID NO: 2027 - protein, 21 aa, Homo sapiens
CAHRHPYYYPSGYNYGYFDFW

SEQ ID NO: 2028 - protein, 18 aa, Homo sapiens
CARHRSRILYFAPEFDPW

SEQ ID NO: 2029 - protein, 20 aa, Homo sapiens
CARGTNCSGGYCSPIAFDMW

SEQ ID NO: 2030 - protein, 26 aa, Homo sapiens
CARHGVVVVPAPLGIQLWSSDWFDPW

SEQ ID NO: 2031 - protein, 16 aa, Homo sapiens
CARSHTSGWAGYFQHW

SEQ ID NO: 2032 - protein, 16 aa, Homo sapiens
CARATFVTTVTNFDYW

SEQ ID NO: 2033 - protein, 16 aa, Homo sapiens
CAKDGVGELVAAIDYW

SEQ ID NO: 2034 - protein, 15 aa, Homo sapiens
CARALGGTTIDFDSW

SEQ ID NO: 2035 - protein, 14 aa, Homo sapiens
CARPPGGSSSSDYW

SEQ ID NO: 2036 - protein, 22 aa, Homo sapiens
CTKDRDRWTPHIAVAGTAGDYW

SEQ ID NO: 2037 - protein, 19 aa, Homo sapiens
CARGLRPTTMVRVYYFDYW

SEQ ID NO: 2038 - protein, 17 aa, Homo sapiens
CARATFNDFWSATLDYW

SEQ ID NO: 2039 - protein, 21 aa, Homo sapiens
CAAHVNTDFWSGQSGGWFDPW

SEQ ID NO: 2040 - protein, 23 aa, Homo sapiens
CARDPRYILTVKPGGGGNWFDPW

SEQ ID NO: 2041 - protein, 12 aa, Homo sapiens
CANEKGGSRDYW

SEQ ID NO: 2042 - protein, 16 aa, Homo sapiens
CATRWAVAGRGPFDYW

SEQ ID NO: 2043 - protein, 19 aa, Homo sapiens
CAREHLWIGEVLAPAIDYW

SEQ ID NO: 2044 - protein, 15 aa, Homo sapiens
CAKEAVAGTNWFDAW

SEQ ID NO: 2045 - protein, 14 aa, Homo sapiens
CAKHSGTYGVSDYW

SEQ ID NO: 2046 - protein, 20 aa, Homo sapiens
CAKDSSDYGDYALKGGFDPW

SEQ ID NO: 2047 - protein, 17 aa, Homo sapiens
CARLVHLSLHYWYFDLW

SEQ ID NO: 2048 - protein, 14 aa, Homo sapiens
CQQYNNWPRKKLTF

SEQ ID NO: 2049 - protein, 17 aa, Homo sapiens
CARDPRGSNGYHYFDYW

SEQ ID NO: 2050 - protein, 26 aa, Homo sapiens
CARRRITYITIFGVVDPNRGNWFDPW

SEQ ID NO: 2051 - protein, 22 aa, Homo sapiens
CARLTEPSITPLTYYYFYMDVW

SEQ ID NO: 2052 - protein, 18 aa, Homo sapiens
CARHHEVPAAITNWFDPW

SEQ ID NO: 2053 - protein, 22 aa, Homo sapiens
CAHTQGDIVVVIAATPAFFDYW

SEQ ID NO: 2054 - protein, 18 aa, Homo sapiens
CARASYSSRDYYYYMDVW

SEQ ID NO: 2055 - protein, 14 aa, Homo sapiens
CARRLWLRGYFDYW

SEQ ID NO: 2056 - protein, 23 aa, Homo sapiens
CARVVPNDFWSGYPPHQGHFDYW

SEQ ID NO: 2057 - protein, 14 aa, Homo sapiens
CARTTWIRGRFDPW

SEQ ID NO: 2058 - protein, 18 aa, Homo sapiens
CARQVGDSYGFIYYFDYW

SEQ ID NO: 2059 - protein, 18 aa, Homo sapiens
CVREDSGGYAPIAKFDSW

SEQ ID NO: 2060 - protein, 15 aa, Homo sapiens
CARLPSGRYNWFDPW

SEQ ID NO: 2061 - protein, 14 aa, Homo sapiens
CAKLPEWELPHDYW

SEQ ID NO: 2062 - protein, 19 aa, Homo sapiens
CANLMGYSGYDQHLWFDPW

SEQ ID NO: 2063 - protein, 19 aa, Homo sapiens
CAKSSEGDVIVVEYAFDIW

SEQ ID NO: 2064 - protein, 17 aa, Homo sapiens
CARDHVSLMTGSYAGYW

SEQ ID NO: 2065 - protein, 14 aa, Homo sapiens
CTSSLAAADPPDYW

SEQ ID NO: 2066 - protein, 25 aa, Homo sapiens
CARDLGYSGYDYRDDYYYYYGMDVW

SEQ ID NO: 2067 - protein, 11 aa, Homo sapiens
CQHYYNLPPVF

SEQ ID NO: 2068 - protein, 23 aa, Homo sapiens
CAREWIVVVPAAMRFYYYGMDVW

SEQ ID NO: 2069 - protein, 13 aa, Homo sapiens
CASMSRYGPLDYW

SEQ ID NO: 2070 - protein, 19 aa, Homo sapiens
CARSVFGDIPTGYCTFDYW

SEQ ID NO: 2071 - protein, 16 aa, Homo sapiens
CARGPPPGIFFPFDIW

SEQ ID NO: 2072 - protein, 21 aa, Homo sapiens
CTRSMGTVVTPGYYYYYMDVW

SEQ ID NO: 2073 - protein, 12 aa, Homo sapiens
CVKDWSPHFDYW

SEQ ID NO: 2074 - protein, 22 aa, Homo sapiens
CAKEGDSSGYRLPPNDYYMDVW

SEQ ID NO: 2075 - protein, 16 aa, Homo sapiens
CARHAFLDGIMGSDYW

SEQ ID NO: 2076 - protein, 19 aa, Homo sapiens
CAKDLLRYNWNLEHYFDFW

SEQ ID NO: 2077 - protein, 25 aa, Homo sapiens
CARDSLGYCSGGFCPPEINAFFDYW

SEQ ID NO: 2078 - protein, 23 aa, Homo sapiens
CAKVGRGVLIFVAAGEPYYFDYW

SEQ ID NO: 2079 - protein, 25 aa, Homo sapiens
CAREGSQDYDILTGTYYYYYYMDVW

SEQ ID NO: 2080 - protein, 12 aa, Homo sapiens
CLQTYNTPRISF

SEQ ID NO: 2081 - protein, 23 aa, Homo sapiens
CAKSGGAARPEEYYYYYYYMDVW

SEQ ID NO: 2082 - protein, 21 aa, Homo sapiens
CAKDRDELITIFGGVNWFDPW

SEQ ID NO: 2083 - protein, 22 aa, Homo sapiens
CARVRNRGITMIVVAYIFYDYW

SEQ ID NO: 2084 - protein, 18 aa, Homo sapiens
CASGLYDSGGYYYYLAYW

SEQ ID NO: 2085 - protein, 17 aa, Homo sapiens
CARDNDVTSHYSVFDYW

SEQ ID NO: 2086 - protein, 19 aa, Homo sapiens
CARDYDSSGYYRFFAFDIW

SEQ ID NO: 2087 - protein, 15 aa, Homo sapiens
CARVNYGEAPYFDYW

SEQ ID NO: 2088 - protein, 15 aa, Homo sapiens
CVKVMEWPDDAFDIW

SEQ ID NO: 2089 - protein, 12 aa, Homo sapiens
CQQRSIEPIFTF

SEQ ID NO: 2090 - protein, 20 aa, Homo sapiens
CARDFDDYDSSGYYGAFDIW

SEQ ID NO: 2091 - protein, 17 aa, Homo sapiens
CAKPPGDSEDFDAFDIW

SEQ ID NO: 2092 - protein, 21 aa, Homo sapiens
CARESSPGATVIPGYDALPIW

SEQ ID NO: 2093 - protein, 21 aa, Homo sapiens
CARVSRITIFGVVIIGPLDYW

SEQ ID NO: 2094 - protein, 17 aa, Homo sapiens
CAGSVAIFDGEDAFDIW

SEQ ID NO: 2095 - protein, 20 aa, Homo sapiens
CARGFRLRAYSLGTYYLDYW

SEQ ID NO: 2096 - protein, 19 aa, Homo sapiens
CARDLSCGGDCYPWGFDYW

SEQ ID NO: 2097 - protein, 20 aa, Homo sapiens
CATIAAAGPDYYYYYGMDVW

SEQ ID NO: 2098 - protein, 22 aa, Homo sapiens
CARGVAFPYYYDSSGYLYADYW

SEQ ID NO: 2099 - protein, 16 aa, Homo sapiens
CATGPIFGVSNWFDPW

SEQ ID NO: 2100 - protein, 19 aa, Homo sapiens
CARDHYDSSGYMAGWFDPW

SEQ ID NO: 2101 - protein, 15 aa, Homo sapiens
CAKQRGLGNSWFDPW

SEQ ID NO: 2102 - protein, 14 aa, Homo sapiens
CQSADSSRSYHVIF

SEQ ID NO: 2103 - protein, 22 aa, Homo sapiens
CARDQGLITIFGVVIKGEMDYW

SEQ ID NO: 2104 - protein, 24 aa, Homo sapiens
CARLFFRRLTSSIAARLEWYFDLW

SEQ ID NO: 2105 - protein, 12 aa, Homo sapiens
CAHRGSGDYDYW

SEQ ID NO: 2106 - protein, 16 aa, Homo sapiens
CARGQIAAAVYHFDYW

SEQ ID NO: 2107 - protein, 16 aa, Homo sapiens
CARHSSGYPSSEFDYW

SEQ ID NO: 2108 - protein, 19 aa, Homo sapiens
CARDLGVMIVVAKYYFDYW

SEQ ID NO: 2109 - protein, 21 aa, Homo sapiens
CASGLIYCTTADCYVLNFDSW

SEQ ID NO: 2110 - protein, 19 aa, Homo sapiens
CVTWFYDESSDDSDVFDVW

SEQ ID NO: 2111 - protein, 17 aa, Homo sapiens
CATSREGGSYVAVFDYW

SEQ ID NO: 2112 - protein, 12 aa, Homo sapiens
CQQYVSSTGLTF

SEQ ID NO: 2113 - protein, 19 aa, Homo sapiens
CARHEGRVVTAIPWGFDPW

SEQ ID NO: 2114 - protein, 14 aa, Homo sapiens
CASRVATAGMEDYW

SEQ ID NO: 2115 - protein, 16 aa, Homo sapiens
CARESPFGGVIVPDYW

SEQ ID NO: 2116 - protein, 21 aa, Homo sapiens
CARAPQYCSSTSCQSGAFDIW

SEQ ID NO: 2117 - protein, 16 aa, Homo sapiens
CVKDRSSGWHRYFDRW

SEQ ID NO: 2118 - protein, 19 aa, Homo sapiens
CAKIGRGYSYGLVSVIDYW

SEQ ID NO: 2119 - protein, 16 aa, Homo sapiens
CARVSGSGWPSDLDYW

SEQ ID NO: 2120 - protein, 16 aa, Homo sapiens
CAKGLTPTVTTEFDYW

SEQ ID NO: 2121 - protein, 20 aa, Homo sapiens
CAREKTHNVDSYYYYYMDVW

SEQ ID NO: 2122 - protein, 17 aa, Homo sapiens
CVKDRAYYDFWSPFDYW

SEQ ID NO: 2123 - protein, 21 aa, Homo sapiens
CARDWLIAVAGYYYYYGMDVW

SEQ ID NO: 2124 - protein, 31 aa, Homo sapiens
CAEDTAVYSCVKDRGYCSGASCLLTYALDVW

SEQ ID NO: 2125 - protein, 12 aa, Homo sapiens
CLSYTSGSTLLF

SEQ ID NO: 2126 - protein, 21 aa, Homo sapiens
CARDRSYCSSTSCYTEYFDYW

SEQ ID NO: 2127 - protein, 19 aa, Homo sapiens
CAKGSLSLSGSKGNWFDPW

SEQ ID NO: 2128 - protein, 19 aa, Homo sapiens
CAKEAPIGEFQGGNYFDSW

SEQ ID NO: 2129 - protein, 22 aa, Homo sapiens
CARDGLYYYDSSAYFNDAFDIW

SEQ ID NO: 2130 - protein, 18 aa, Homo sapiens
CAREGGSITGTTSWFDPW

SEQ ID NO: 2131 - protein, 12 aa, Homo sapiens
CQQLSTFPPHTF

SEQ ID NO: 2132 - protein, 20 aa, Homo sapiens
CARGHYDFWKSYYDHYMDVW

SEQ ID NO: 2133 - protein, 19 aa, Homo sapiens
CAKDSYPQLWSEVPGFDLW

SEQ ID NO: 2134 - protein, 19 aa, Homo sapiens
CARDRDSSSWFYNYYMDVW

SEQ ID NO: 2135 - protein, 16 aa, Homo sapiens
CARVDTAMVRNWFDPW

SEQ ID NO: 2136 - protein, 20 aa, Homo sapiens
CARAPWGTWSLLSPGWFDLW

SEQ ID NO: 2137 - protein, 24 aa, Homo sapiens
CARATPHDGPITIFGVVIPYFDYW

SEQ ID NO: 2138 - protein, 23 aa, Homo sapiens
CATIEMYSGPDFTSYYFYGMDVW

SEQ ID NO: 2139 - protein, 19 aa, Homo sapiens
CARGLPRYYDFWSGYSAYW

SEQ ID NO: 2140 - protein, 20 aa, Homo sapiens
CARGAADSAYDFVNWWFDFW

SEQ ID NO: 2141 - protein, 20 aa, Homo sapiens
CARLVRHIVVVTAIPVIDYW

SEQ ID NO: 2142 - protein, 24 aa, Homo sapiens
CARILRSFDWVSSISLGYYAMDVW

SEQ ID NO: 2143 - protein, 29 aa, Homo sapiens
CARGKRIRGLDPLLYYYDSSDPKREFDYW

SEQ ID NO: 2144 - protein, 17 aa, Homo sapiens
CARLRRDFWSGPHFDYW

SEQ ID NO: 2145 - protein, 19 aa, Homo sapiens
CVRELYWQGIGTTPYFDSW

SEQ ID NO: 2146 - protein, 17 aa, Homo sapiens
CAKDGASGGWDDAFDIW

SEQ ID NO: 2147 - protein, 21 aa, Homo sapiens
CAKDTYSWIAARPVGPDFDYW

SEQ ID NO: 2148 - protein, 20 aa, Homo sapiens
CARDSRPRIFSSSWYWFDPW

SEQ ID NO: 2149 - protein, 21 aa, Homo sapiens
CARDSLFTIFGVVIEYYFDYW

SEQ ID NO: 2150 - protein, 21 aa, Homo sapiens
CAHRQRYYDETSGLENAFHVW

SEQ ID NO: 2151 - protein, 23 aa, Homo sapiens
CAKAGLGYDILTGYYSSWYFDLW

SEQ ID NO: 2152 - protein, 20 aa, Homo sapiens
CAKTSYYDFWSGYLNWFDPW

SEQ ID NO: 2153 - protein, 13 aa, Homo sapiens
CARGGVGYPDDYW

SEQ ID NO: 2154 - protein, 20 aa, Homo sapiens
CTTDPTGPKPMVRGVIFDYW

SEQ ID NO: 2155 - protein, 14 aa, Homo sapiens
CYSTDSTGDHSGVF

SEQ ID NO: 2156 - protein, 22 aa, Homo sapiens
CAKNDHSITMIVVVTPYYFDYW

SEQ ID NO: 2157 - protein, 26 aa, Homo sapiens
CVRDDVLRDLEWPNEPLNYYYGMDVW

SEQ ID NO: 2158 - protein, 17 aa, Homo sapiens
CARHENGWYSLYYFDYW

SEQ ID NO: 2159 - protein, 17 aa, Homo sapiens
CTADLGDGYSDDAFDIW

SEQ ID NO: 2160 - protein, 13 aa, Homo sapiens [sequence omitted]

SEQ ID NO: 2161 - protein, 17 aa, Homo sapiens
CAREQGYGHDRGWFDPW

SEQ ID NO: 2162 - protein, 12 aa, Homo sapiens
CARIEWRPTDYW

SEQ ID NO: 2163 - protein, 17 aa, Homo sapiens
CARAGFSYGYDEPSDYW

SEQ ID NO: 2164 - protein, 18 aa, Homo sapiens
CASDRSVYYYDSSGYDYW

SEQ ID NO: 2165 - protein, 14 aa, Homo sapiens
CARWLQNTHAFDYW

SEQ ID NO: 2166 - protein, 15 aa, Homo sapiens
CAKDLGDFEFYFDYW

SEQ ID NO: 2167 - protein, 15 aa, Homo sapiens
CARTYSNYVYYFDYW

SEQ ID NO: 2168 - protein, 16 aa, Homo sapiens
CGLFGSYNYPPEIDYW

SEQ ID NO: 2169 - protein, 21 aa, Homo sapiens
CARDGGQDYDFWSGSNWFDPW

SEQ ID NO: 2170 - protein, 17 aa, Homo sapiens
CAKDRGMVYAIRLFDYW

SEQ ID NO: 2171 - protein, 12 aa, Homo sapiens
CASLYSNYGGYW

SEQ ID NO: 2172 - protein, 18 aa, Homo sapiens
CARDGGVVTPSDWYFDLW

SEQ ID NO: 2173 - protein, 23 aa, Homo sapiens
CARQEFGYCSGNSCYGDWYFDLW

SEQ ID NO: 2174 - protein, 19 aa, Homo sapiens
CASSVGYSSSIVRFAFDIW

SEQ ID NO: 2175 - protein, 15 aa, Homo sapiens
CARRIALPTQAFDYW

SEQ ID NO: 2176 - protein, 16 aa, Homo sapiens
CARGDNWNVRHYFDYW

SEQ ID NO: 2177 - protein, 17 aa, Homo sapiens
CANGGMEWELTGAFDIW

SEQ ID NO: 2178 - protein, 22 aa, Homo sapiens
CTRGPSSVSPANYYYYYYMDVW

SEQ ID NO: 2179 - protein, 17 aa, Homo sapiens
CARESFWSGYYAVLDYW

SEQ ID NO: 2180 - protein, 17 aa, Homo sapiens
CARRRLAAADKYYFDYW

SEQ ID NO: 2181 - protein, 14 aa, Homo sapiens
CASYPAAAGYFDYW

SEQ ID NO: 2182 - protein, 16 aa, Homo sapiens
CTTSITMIVVAKGDYW

SEQ ID NO: 2183 - protein, 14 aa, Homo sapiens
CARDPGPKGAFDIW

SEQ ID NO: 2184 - protein, 20 aa, Homo sapiens
CARGSVVLMVYAIGGWFDPW

SEQ ID NO: 2185 - protein, 23 aa, Homo sapiens
CAKDPIFRDSTMIVVANYYFDYW

SEQ ID NO: 2186 - protein, 22 aa, Homo sapiens
CARSDPTSGSYWMPPPNWFDPW

SEQ ID NO: 2187 - protein, 22 aa, Homo sapiens
CARHQWGYSSSWHETVYYFDYW

SEQ ID NO: 2188 - protein, 25 aa, Homo sapiens
CARGQVTWSITMIVVVRQNDAFDIW

SEQ ID NO: 2189 - protein, 20 aa, Homo sapiens
CVREGRRYYDTSGWDYLDSW

SEQ ID NO: 2190 - protein, 20 aa, Homo sapiens
CARGHNIPTRPQYYNAVDVW

SEQ ID NO: 2191 - protein, 16 aa, Homo sapiens
CARQEYSSSALLFDFW

SEQ ID NO: 2192 - protein, 15 aa, Homo sapiens
CARSFNGPSGTNDYW

SEQ ID NO: 2193 - protein, 21 aa, Homo sapiens
CARDESQSYVVVTATDAFDIW

SEQ ID NO: 2194 - protein, 19 aa, Homo sapiens
CARDPFYGDNELYYYMDVW

SEQ ID NO: 2195 - protein, 16 aa, Homo sapiens
CARLTAVAGARWFDPW

SEQ ID NO: 2196 - protein, 16 aa, Homo sapiens
CATTSSSWPQDYFDYW

SEQ ID NO: 2197 - protein, 18 aa, Homo sapiens
CAREYDFWSGYYTGMDYW

SEQ ID NO: 2198 - protein, 17 aa, Homo sapiens
CAKDYRDGYNFGYFDLW

SEQ ID NO: 2199 - protein, 17 aa, Homo sapiens
CARQIYSSGPGNAFDIW

SEQ ID NO: 2200 - protein, 24 aa, Homo sapiens
CVKDGLFTIFGVGPPGGHRRIDYW

SEQ ID NO: 2201 - protein, 14 aa, Homo sapiens
CSGGFGYNTATDYW

SEQ ID NO: 2202 - protein, 18 aa, Homo sapiens
CARRHYQWLTPHAAFDIW

SEQ ID NO: 2203 - protein, 22 aa, Homo sapiens
CARSITMVRGYIYLARNYFDYW

SEQ ID NO: 2204 - protein, 24 aa, Homo sapiens
CARFRYGSSSGLRRGYYYYGMDVW

SEQ ID NO: 2205 - protein, 18 aa, Homo sapiens
CARALGGAARLLYYFDYW

SEQ ID NO: 2206 - protein, 23 aa, Homo sapiens
CARDDGYYDQTSGYYYYYGMDVW

SEQ ID NO: 2207 - protein, 15 aa, Homo sapiens
CARALWFRSYYFDYW

SEQ ID NO: 2208 - protein, 22 aa, Homo sapiens
CARITFYYYGSGSYNYYGMDVW

SEQ ID NO: 2209 - protein, 13 aa, Homo sapiens
CASSTIMLPFDYW

SEQ ID NO: 2210 - protein, 18 aa, Homo sapiens
CARVGQRWYRGLYYFDYW

SEQ ID NO: 2211 - protein, 20 aa, Homo sapiens
CARGFAGWRGQNYYYYMDVW

SEQ ID NO: 2212 - protein, 19 aa, Homo sapiens
CAKDPSGSLRYYYYYMDVW

SEQ ID NO: 2213 - protein, 14 aa, Homo sapiens
CARDDTSLVRFDHW

SEQ ID NO: 2214 - protein, 18 aa, Homo sapiens
CARHGAYSSSSEVQFDYW

SEQ ID NO: 2215 - protein, 14 aa, Homo sapiens
CTRGGAVADYSDYW

SEQ ID NO: 2216 - protein, 22 aa, Homo sapiens
CAREAYYYETSGYYGSRYFDYW

SEQ ID NO: 2217 - protein, 22 aa, Homo sapiens
CARDHSPVAGLGEDGENWFDPW

SEQ ID NO: 2218 - protein, 22 aa, Homo sapiens
CASLSYDSSGYGFYYYYGMDVW

SEQ ID NO: 2219 - protein, 17 aa, Homo sapiens
CATDSLGGSYFPYFDYW

SEQ ID NO: 2220 - protein, 18 aa, Homo sapiens
CARDEGYSSSSWFWFDPW

SEQ ID NO: 2221 - protein, 21 aa, Homo sapiens
CARATSITMIVVVITGGFDYW

SEQ ID NO: 2222 - protein, 14 aa, Homo sapiens
CARENLYTARFDYW

SEQ ID NO: 2223 - protein, 15 aa, Homo sapiens
CARVAPSYSSRYDYW

SEQ ID NO: 2224 - protein, 19 aa, Homo sapiens
CARIIAVAGTYRYYGMDVW

SEQ ID NO: 2225 - protein, 15 aa, Homo sapiens
CARQGSGYLLSFDNW

SEQ ID NO: 2226 - protein, 18 aa, Homo sapiens
CARSCSRTSCYLQRFDPW

SEQ ID NO: 2227 - protein, 19 aa, Homo sapiens
CARHQTSYSGYDLYYFDYW

SEQ ID NO: 2228 - protein, 21 aa, Homo sapiens
CARDRNDCTNGVCYTRLFDYW

SEQ ID NO: 2229 - protein, 19 aa, Homo sapiens
CARDHYDILTGPTESFDYW

SEQ ID NO: 2230 - protein, 17 aa, Homo sapiens
CAKYSASWGVLGWLDPW

SEQ ID NO: 2231 - protein, 22 aa, Homo sapiens
CARDPRVSRVGYYYYYYGMDVW

SEQ ID NO: 2232 - protein, 17 aa, Homo sapiens
CAREGTGIAVAGSFDYW

SEQ ID NO: 2233 - protein, 19 aa, Homo sapiens
CAKDRTLGSSRGTYYFDYW

SEQ ID NO: 2234 - protein, 21 aa, Homo sapiens
CAREGWGHWYAGGYHYYMDVW

SEQ ID NO: 2235 - protein, 24 aa, Homo sapiens
CAKDRANTYDFWSGYLPRPPEDYW

SEQ ID NO: 2236 - protein, 21 aa, Homo sapiens
CARDSGIGYYDSSGQDNIDYW

SEQ ID NO: 2237 - protein, 16 aa, Homo sapiens
CASNYYDSSGLYWGYW

SEQ ID NO: 2238 - protein, 15 aa, Homo sapiens
CARDVIYKSAGPDYW

SEQ ID NO: 2239 - protein, 21 aa, Homo sapiens
CEKGWNFWSSYYNDRDWFDPW

SEQ ID NO: 2240 - protein, 19 aa, Homo sapiens
CAKDKLARYSSSWGYCDYW

SEQ ID NO: 2241 - protein, 20 aa, Homo sapiens
CARLDRRIAVAGTTRAFDIW

SEQ ID NO: 2242 - protein, 15 aa, Homo sapiens
CARIVWYNWNVLDYW

SEQ ID NO: 2243 - protein, 16 aa, Homo sapiens
CARRETYSSGWYFDFW

SEQ ID NO: 2244 - protein, 16 aa, Homo sapiens
CARRKWERTPGTSDYW

SEQ ID NO: 2245 - protein, 15 aa, Homo sapiens
CARDPRPVSGYADYW

SEQ ID NO: 2246 - protein, 19 aa, Homo sapiens
CARDPPHYGDYGVWYFDLW

SEQ ID NO: 2247 - protein, 20 aa, Homo sapiens
CARKQGDGRGWWTPYYFDYW

SEQ ID NO: 2248 - protein, 23 aa, Homo sapiens
CTRDPPRTIFGVVIAYYYGMDVW

SEQ ID NO: 2249 - protein, 19 aa, Homo sapiens
CARDGRLYCTNGVCYIDYW

SEQ ID NO: 2250 - protein, 14 aa, Homo sapiens
CACGSSWYRESDYW

SEQ ID NO: 2251 - protein, 16 aa, Homo sapiens
CTWPSGTYTDPAFDIW

SEQ ID NO: 2252 - protein, 22 aa, Homo sapiens
CARSLTITIFGVVIMGYTFDIW

SEQ ID NO: 2253 - protein, 11 aa, Homo sapiens
CARGERDFDLW

SEQ ID NO: 2254 - protein, 17 aa, Homo sapiens
CARVARYSYDSYYFDYW

SEQ ID NO: 2255 - protein, 18 aa, Homo sapiens
CARDADTGMLTDYYMDVW

SEQ ID NO: 2256 - protein, 18 aa, Homo sapiens
CARGRRQQLVRLSWFDPW

SEQ ID NO: 2257 - protein, 18 aa, Homo sapiens
CAREGGHLVAVYDAFDTW

SEQ ID NO: 2258 - protein, 16 aa, Homo sapiens
CASPHTGSNPYYFDYW

SEQ ID NO: 2259 - protein, 21 aa, Homo sapiens
CARHGILYWWPSDYYYGMDVW

SEQ ID NO: 2260 - protein, 18 aa, Homo sapiens
CARENSSSSDYYYGMDVW

SEQ ID NO: 2261 - protein, 13 aa, Homo sapiens
CTKWGPRDQFEYW

SEQ ID NO: 2262 - protein, 17 aa, Homo sapiens [sequence omitted]

SEQ ID NO: 2263 - protein, 10 aa, Homo sapiens
CTGSRSSDYW

SEQ ID NO: 2264 - protein, 16 aa, Homo sapiens
CARVMAGGLTGYGLYW

SEQ ID NO: 2265 - protein, 14 aa, Homo sapiens
CQQRTNWPRLAWTF

SEQ ID NO: 2266 - protein, 19 aa, Homo sapiens
CARRRGPRVVVPAAPLDYW

SEQ ID NO: 2267 - protein, 21 aa, Homo sapiens
CTRDFFEGITMVQGVIIEDYW

SEQ ID NO: 2268 - protein, 19 aa, Homo sapiens
CARGGYYYGSRGLSNFDSW

SEQ ID NO: 2269 - protein, 17 aa, Homo sapiens
CARLLNLTGYYSWFDPW

SEQ ID NO: 2270 - protein, 19 aa, Homo sapiens
CATVGFDYGVNLGYYFDNW

SEQ ID NO: 2271 - protein, 26 aa, Homo sapiens
CARVFRSRVTIPYCSGGSCRYYFDYW

SEQ ID NO: 2272 - protein, 21 aa, Homo sapiens
CAKAGYRCSGGSCYSYYFDYW

SEQ ID NO: 2273 - protein, 15 aa, Homo sapiens
CARSLNWNYDSFDYW

SEQ ID NO: 2274 - protein, 13 aa, Homo sapiens
CARDPCHGALDYW

SEQ ID NO: 2275 - protein, 19 aa, Homo sapiens
CARKKYYYDTSSAGWFDLW

SEQ ID NO: 2276 - protein, 21 aa, Homo sapiens
CARDFLSAHAAAAAKEWFDSW

SEQ ID NO: 2277 - protein, 15 aa, Homo sapiens
CAKSQWLALDIFDIW

SEQ ID NO: 2278 - protein, 22 aa, Homo sapiens
CARVTAARLKSHYYYYYGMDVW

SEQ ID NO: 2279 - protein, 14 aa, Homo sapiens
CARGSYGGMVFDYW

SEQ ID NO: 2280 - protein, 22 aa, Homo sapiens
CARSFLHYSGSSGYYSGSFDYW

SEQ ID NO: 2281 - protein, 13 aa, Homo sapiens
CARLRDAVMFDYW

SEQ ID NO: 2282 - protein, 12 aa, Homo sapiens
CASVYGDDGDYW

SEQ ID NO: 2283 - protein, 12 aa, Homo sapiens
CQQLNRYPPWTF

SEQ ID NO: 2284 - protein, 26 aa, Homo sapiens
CAKTLRWLHRVVPKNPSGYYYGMDVW

SEQ ID NO: 2285 - protein, 15 aa, Homo sapiens [sequence omitted]

SEQ ID NO: 2286 - protein, 18 aa, Homo sapiens
CATLQDDFWSGYQTVDYW

SEQ ID NO: 2287 - protein, 12 aa, Homo sapiens
CTVYNRGYFKYW

SEQ ID NO: 2288 - protein, 15 aa, Homo sapiens
CTRDPAEWELPNDYW

SEQ ID NO: 2289 - protein, 25 aa, Homo sapiens
CARGRANYPHYGSGSFYYYYGMDVW

SEQ ID NO: 2290 - protein, 16 aa, Homo sapiens
CARHGTTVTNPQFDYW

SEQ ID NO: 2291 - protein, 14 aa, Homo sapiens
CATEVTSPYAMDVW

SEQ ID NO: 2292 - protein, 27 aa, Homo sapiens
CARRPPIYYDYIWGSYRPKTSGAFDIW

SEQ ID NO: 2293 - protein, 15 aa, Homo sapiens
CARDEGWYSSSCDYW

SEQ ID NO: 2294 - protein, 18 aa, Homo sapiens
CARGPSYYDSSGYPADYW

SEQ ID NO: 2295 - protein, 12 aa, Homo sapiens
CQVYNTYSAYFF

SEQ ID NO: 2296 - protein, 15 aa, Homo sapiens
CARDPGPPGAYFDYW

SEQ ID NO: 2297 - protein, 23 aa, Homo sapiens
CAKHPTYYDILTGYISTYYFDYW

SEQ ID NO: 2298 - protein, 22 aa, Homo sapiens
CARGKFHDSGHYQYPIDGFDVW

SEQ ID NO: 2299 - protein, 17 aa, Homo sapiens
CASRPQYSVYFGVFDYW

SEQ ID NO: 2300 - protein, 13 aa, Homo sapiens [sequence omitted]

SEQ ID NO: 2301 - protein, 13 aa, Homo sapiens
CARANWIQLADYW

SEQ ID NO: 2302 - protein, 20 aa, Homo sapiens
CAKLRECTNGVCDANWFDAW

SEQ ID NO: 2303 - protein, 17 aa, Homo sapiens
CARYMAVRGVTGYFDYW

SEQ ID NO: 2304 - protein, 16 aa, Homo sapiens
CATVYSGSYLDAFDIW

SEQ ID NO: 2305 - protein, 11 aa, Homo sapiens [sequence omitted]

SEQ ID NO: 2306 - protein, 15 aa, Homo sapiens
CASLTLTKTLYTDFW

SEQ ID NO: 2307 - protein, 12 aa, Homo sapiens
CQQFYGTPTWTF

SEQ ID NO: 2308 - protein, 20 aa, Homo sapiens
CARTRPPGIPTGGRHWFDSW

SEQ ID NO: 2309 - protein, 19 aa, Homo sapiens
CARHGYYLDSSGPDLFDSW

SEQ ID NO: 2310 - protein, 16 aa, Homo sapiens
CARLLPIYRGGSFDPW

SEQ ID NO: 2311 - protein, 12 aa, Homo sapiens [sequence omitted]

SEQ ID NO: 2312 - protein, 17 aa, Homo sapiens
CAHSGITGTRIEFFDYW

SEQ ID NO: 2313 - protein, 11 aa, Homo sapiens
CQHYYSTPTSF

SEQ ID NO: 2314 - protein, 15 aa, Homo sapiens
CSMESDYYDNNNDYW

SEQ ID NO: 2315 - protein, 13 aa, Homo sapiens
CARDAAFYYFDYW

SEQ ID NO: 2316 - protein, 19 aa, Homo sapiens
CARGYSDFWSDYPHYLDYW

SEQ ID NO: 2317 - protein, 12 aa, Homo sapiens
CQQYDKWPFFTF

SEQ ID NO: 2318 - protein, 18 aa, Homo sapiens
CARHFDLLSRQLPHFDYW

SEQ ID NO: 2319 - protein, 17 aa, Homo sapiens
CARDGGGGNYRWYFDYW

SEQ ID NO: 2320 - protein, 14 aa, Homo sapiens
CAKGIRDGYNFDYW

SEQ ID NO: 2321 - protein, 16 aa, Homo sapiens
CARDFGFGSGSYWVYW

SEQ ID NO: 2322 - protein, 16 aa, Homo sapiens
CAKDWGASNGEIFDYW

SEQ ID NO: 2323 - protein, 14 aa, Homo sapiens
CARRIKKGDYFDSW

SEQ ID NO: 2324 - protein, 18 aa, Homo sapiens
CARKHGSNYVWYNWFDPW

SEQ ID NO: 2325 - protein, 14 aa, Homo sapiens
CARGGRVSSGIDYW

SEQ ID NO: 2326 - protein, 16 aa, Homo sapiens
CTRDRIDGFTAQFDYW

SEQ ID NO: 2327 - protein, 18 aa, Homo sapiens
CARGGEWELLIGRYFDLW

SEQ ID NO: 2328 - protein, 14 aa, Homo sapiens
CARFRPVLQLFDYW

SEQ ID NO: 2329 - protein, 17 aa, Homo sapiens
CARAFGSSPLEGYFNYW

SEQ ID NO: 2330 - protein, 12 aa, Homo sapiens [sequence omitted]

SEQ ID NO: 2331 - protein, 24 aa, Homo sapiens
CARHEGYYDSSGYLALGMSGFDMW

SEQ ID NO: 2332 - protein, 30 aa, Homo sapiens
CLRAEDTAVYYCAKDALIWSAISQDAFDIW

SEQ ID NO: 2333 - protein, 16 aa, Homo sapiens
CVRATGTAAGTVTDYW

SEQ ID NO: 2334 - protein, 17 aa, Homo sapiens
CARDRGRLRSRWWFDPW

SEQ ID NO: 2335 - protein, 14 aa, Homo sapiens
CARIPSSSWEFDYW

SEQ ID NO: 2336 - protein, 20 aa, Homo sapiens
CARRLGYCGGNKCYIWFDPW

SEQ ID NO: 2337 - protein, 13 aa, Homo sapiens
CQQYDNLPPDITF

SEQ ID NO: 2338 - protein, 24 aa, Homo sapiens
CARGSSGYDLWGSLLGYNDAFDIW

SEQ ID NO: 2339 - protein, 20 aa, Homo sapiens
CAKDARIYSSGWSPYYFDYW

SEQ ID NO: 2340 - protein, 16 aa, Homo sapiens
CARHRFGIAVAGFDYW

SEQ ID NO: 2341 - protein, 20 aa, Homo sapiens
CAKDLISSVGATPHDAFDIW

SEQ ID NO: 2342 - protein, 18 aa, Homo sapiens
CAKGFRGPMAGTDYFDYW

SEQ ID NO: 2343 - protein, 15 aa, Homo sapiens
CARGPDTSGYYYFYW

SEQ ID NO: 2344 - protein, 27 aa, Homo sapiens
CAIAGIVVVPGAVEHARRQVQYYFDSW

SEQ ID NO: 2345 - protein, 14 aa, Homo sapiens
CARGYQGFDAFDIW

SEQ ID NO: 2346 - protein, 18 aa, Homo sapiens
CAREGGDIVLMVYAPDYW

SEQ ID NO: 2347 - protein, 17 aa, Homo sapiens
CARTTNYYYDSRGFDYW

SEQ ID NO: 2348 - protein, 18 aa, Homo sapiens
CARGARVGDAGVEYLQHW

SEQ ID NO: 2349 - protein, 13 aa, Homo sapiens
CSARDRSGSFSYW

SEQ ID NO: 2350 - protein, 11 aa, Homo sapiens
CQQAKFFPFTF

SEQ ID NO: 2351 - protein, 14 aa, Homo sapiens
CVREDRKGGAGDYW

SEQ ID NO: 2352 - protein, 16 aa, Homo sapiens
CAREIDTMSYRAFDYW

SEQ ID NO: 2353 - protein, 19 aa, Homo sapiens
CARDPPYGSGSYYNPFDYW

SEQ ID NO: 2354 - protein, 27 aa, Homo sapiens
CARPKRYCSSGSGRCQTYQYYYGMDVW

SEQ ID NO: 2355 - protein, 15 aa, Homo sapiens
CARDDNTHLNLFDLW

SEQ ID NO: 2356 - protein, 16 aa, Homo sapiens
CAKGFHPSLGTSFDYW

SEQ ID NO: 2357 - protein, 9 aa, Homo sapiens
CTIQNFDYW

SEQ ID NO: 2358 - protein, 15 aa, Homo sapiens
CARSDSSWPHYFDFW

SEQ ID NO: 2359 - protein, 19 aa, Homo sapiens
CARGEWLVLWEQENAFDIW

SEQ ID NO: 2360 - protein, 17 aa, Homo sapiens
CTRVMPGSSRPWYFNYW

SEQ ID NO: 2361 - protein, 13 aa, Homo sapiens
CAAWDNILSGAIF

SEQ ID NO: 2362 - protein, 13 aa, Homo sapiens
CQHFDNYPREFTF

SEQ ID NO: 2363 - protein, 28 aa, Homo sapiens
CARSPYYDFWSGYYPLQYYYYYYGMDVW

SEQ ID NO: 2364 - protein, 17 aa, Homo sapiens
CAKDISKVRGVYYFDYW

SEQ ID NO: 2365 - protein, 24 aa, Homo sapiens
CARDYDYVWGSYRYGSYYYGMDVW

SEQ ID NO: 2366 - protein, 16 aa, Homo sapiens
CARGKYSGNFYSFDPW

SEQ ID NO: 2367 - protein, 12 aa, Homo sapiens
CQQSYSFRMYTF

SEQ ID NO: 2368 - protein, 18 aa, Homo sapiens
CTRDYYDSSGYYYGFDYW

SEQ ID NO: 2369 - protein, 21 aa, Homo sapiens
CARNFLSAHAAASSKEWFDPW

SEQ ID NO: 2370 - protein, 23 aa, Homo sapiens
CARRDYYYDSSGYYYGLGAFDIW

SEQ ID NO: 2371 - protein, 17 aa, Homo sapiens
CARYGSGSYWSWYFDLW

SEQ ID NO: 2372 - protein, 24 aa, Homo sapiens
CARGSITIYGVLILLPARGWFDRW

SEQ ID NO: 2373 - protein, 12 aa, Homo sapiens
CQEYNDWPPRTF

SEQ ID NO: 2374 - protein, 16 aa, Homo sapiens
CTTDLWFTIYGYFQHW

SEQ ID NO: 2375 - protein, 18 aa, Homo sapiens
CARDGGLGWTPLYYFDYW

SEQ ID NO: 2376 - protein, 18 aa, Homo sapiens
CASRDSDEHAIWGNFDFW

SEQ ID NO: 2377 - protein, 16 aa, Homo sapiens
CAKGRKVSSTWFSDYW

SEQ ID NO: 2378 - protein, 23 aa, Homo sapiens
CAQDGAGLPEAVVAAPYNWFDPW

SEQ ID NO: 2379 - protein, 14 aa, Homo sapiens
CAKSYSGYDGNDYW

SEQ ID NO: 2380 - protein, 15 aa, Homo sapiens
CARIDRTRFDPFDIW

SEQ ID NO: 2381 - protein, 18 aa, Homo sapiens
CARVPPGYDSAGYYSLYW

SEQ ID NO: 2382 - protein, 21 aa, Homo sapiens
CAKPLKGGAHYSNYGSPFDYW

SEQ ID NO: 2383 - protein, 17 aa, Homo sapiens
CARGRSIGRGGYDFDYW

SEQ ID NO: 2384 - protein, 17 aa, Homo sapiens
CARLREIGSSSDWFDPW

SEQ ID NO: 2385 - protein, 19 aa, Homo sapiens
CARYCSGGSCYRPWAFDIW

SEQ ID NO: 2386 - protein, 11 aa, Homo sapiens [sequence omitted]

SEQ ID NO: 2387 - protein, 20 aa, Homo sapiens
CAKIGGTNDYGDYVSFFDYW

SEQ ID NO: 2388 - protein, 21 aa, Homo sapiens
CARNLLSAQAAATTKDWFDPW

SEQ ID NO: 2389 - protein, 21 aa, Homo sapiens
CARDKTFAYYDFWSGSYFDYW

SEQ ID NO: 2390 - protein, 20 aa, Homo sapiens
CARCRSPAYGYFSPNWFDPW

SEQ ID NO: 2391 - protein, 14 aa, Homo sapiens
CARDRGSDDPIDYW

SEQ ID NO: 2392 - protein, 21 aa, Homo sapiens
CARAGGIAAAGLYYYYGMDVW

SEQ ID NO: 2393 - protein, 19 aa, Homo sapiens
CARDWSVAGTSGKNCFDPW

SEQ ID NO: 2394 - protein, 21 aa, Homo sapiens
CAKEYYDYIWGSYRSDAFDIW

SEQ ID NO: 2395 - protein, 20 aa, Homo sapiens
CASGFGLTYGYGHTTHFDSW

SEQ ID NO: 2396 - protein, 16 aa, Homo sapiens
CARTSGSYYSDYIDYW

SEQ ID NO: 2397 - protein, 19 aa, Homo sapiens
CARDPQSPGYSSGWYHDYW

SEQ ID NO: 2398 - protein, 11 aa, Homo sapiens
CAKEENPNDYW

SEQ ID NO: 2399 - protein, 11 aa, Homo sapiens
CARSMKWLDSW

SEQ ID NO: 2400 - protein, 17 aa, Homo sapiens
CARGKGIAAAATPIDYW

SEQ ID NO: 2401 - protein, 16 aa, Homo sapiens
CARPLERDENDAFDIW

SEQ ID NO: 2402 - protein, 17 aa, Homo sapiens
CARATYYTSGWYIFDYW

SEQ ID NO: 2403 - protein, 15 aa, Homo sapiens
CARDLGTVTTGFDYW

SEQ ID NO: 2404 - protein, 13 aa, Homo sapiens
CARLGQWLEADYW

SEQ ID NO: 2405 - protein, 14 aa, Homo sapiens
CATSKGLLQPFDYW

SEQ ID NO: 2406 - protein, 17 aa, Homo sapiens
CAKVLPEQWLVNYFDYW

SEQ ID NO: 2407 - protein, 14 aa, Homo sapiens
CTRDYSSSSAEDYW

SEQ ID NO: 2408 - protein, 21 aa, Homo sapiens
CVRWGRVSCSVKRCFLDFDLW

SEQ ID NO: 2409 - protein, 18 aa, Homo sapiens
CARDRDYYGSGSSEFDYW

SEQ ID NO: 2410 - protein, 18 aa, Homo sapiens
CARDRGTYYYDSSGLDYW

SEQ ID NO: 2411 - protein, 22 aa, Homo sapiens
CARDNLRQQLEEYYYYYGMDVW

SEQ ID NO: 2412 - protein, 19 aa, Homo sapiens
CARPGCGSPSCYNSWFDPW

SEQ ID NO: 2413 - protein, 22 aa, Homo sapiens
CARDEKSYDSRGYRDNYYFDYW

SEQ ID NO: 2414 - protein, 19 aa, Homo sapiens
CARRFLSSLAVYYYGMDVW

SEQ ID NO: 2415 - protein, 17 aa, Homo sapiens
CARVVEMATTLYYFDYW

SEQ ID NO: 2416 - protein, 16 aa, Homo sapiens
CARGDNMYSSSWYFYW

SEQ ID NO: 2417 - protein, 11 aa, Homo sapiens
CHQYNNWLLTF

SEQ ID NO: 2418 - protein, 18 aa, Homo sapiens
CARDYGDCRVQPPCFDYW

SEQ ID NO: 2419 - protein, 21 aa, Homo sapiens
CARDAPNCGGDCYTESFFDYW

SEQ ID NO: 2420 - protein, 18 aa, Homo sapiens
CAKDQTAFNRVYDSFDMW

SEQ ID NO: 2421 - protein, 20 aa, Homo sapiens
CARGPRVVPGVVIKFYFDYW

SEQ ID NO: 2422 - protein, 16 aa, Homo sapiens
CARGHGGNSGNAFDIW

SEQ ID NO: 2423 - protein, 16 aa, Homo sapiens
CAVSTIFGVVTWFDPW

SEQ ID NO: 2424 - protein, 11 aa, Homo sapiens
CMEGAHWPYTF

SEQ ID NO: 2425 - protein, 17 aa, Homo sapiens
CAKAINLAVPGSSFDQW

SEQ ID NO: 2426 - protein, 16 aa, Homo sapiens
CAKVSYLSTASSLDYW

SEQ ID NO: 2427 - protein, 16 aa, Homo sapiens
CAPAEDYGDHLGFDYW

SEQ ID NO: 2428 - protein, 24 aa, Homo sapiens
CARDSKFLTWSPQTGRYYYGMDVW

SEQ ID NO: 2429 - protein, 19 aa, Homo sapiens
CARDDTYYYDSSGYFFDYW

SEQ ID NO: 2430 - protein, 14 aa, Homo sapiens
CARHSSASVVFDLW

SEQ ID NO: 2431 - protein, 17 aa, Homo sapiens
CARAIERYSSSSGFDYW

SEQ ID NO: 2432 - protein, 21 aa, Homo sapiens
CAHTHSEFSSSSGRGYFFDSW

SEQ ID NO: 2433 - protein, 14 aa, Homo sapiens
CATDRKDYGVFDYW

SEQ ID NO: 2434 - protein, 21 aa, Homo sapiens
CCAHSTGYCSGGICYRLFDHW

SEQ ID NO: 2435 - protein, 15 aa, Homo sapiens
CARKLNVVGTPLDYW

SEQ ID NO: 2436 - protein, 20 aa, Homo sapiens
CAKGTIGHCTGARCYPFDVW

SEQ ID NO: 2437 - protein, 24 aa, Homo sapiens
CAREREDDFWSGSYSPGSEGFDPW

SEQ ID NO: 2438 - protein, 15 aa, Homo sapiens
CARWKQYGDYYFDYW

SEQ ID NO: 2439 - protein, 17 aa, Homo sapiens
CARGRQCVVDTCYFETW

SEQ ID NO: 2440 - protein, 26 aa, Homo sapiens
CARDISMVQVVIRLLYQYYYYGVDVW

SEQ ID NO: 2441 - protein, 17 aa, Homo sapiens
CAKDIIAAAGKGGFDYW

SEQ ID NO: 2442 - protein, 16 aa, Homo sapiens
CSRANTVTMPPSIDYW

SEQ ID NO: 2443 - protein, 15 aa, Homo sapiens
CANLCMTTVTCLDYW

SEQ ID NO: 2444 - protein, 19 aa, Homo sapiens
CARDRSVIAIPVGLYFDYW

SEQ ID NO: 2445 - protein, 18 aa, Homo sapiens
CARVLRVAYATHDAFDIW

SEQ ID NO: 2446 - protein, 19 aa, Homo sapiens
CAAGYSSSWSYYYYGMDVW

SEQ ID NO: 2447 - protein, 16 aa, Homo sapiens
CARTLGSGFLYSFDSW

SEQ ID NO: 2448 - protein, 16 aa, Homo sapiens
CAKDDPSNGWNNFDYW

SEQ ID NO: 2449 - protein, 15 aa, Homo sapiens
CARASGSNHAHFAYW

SEQ ID NO: 2450 - protein, 26 aa, Homo sapiens
CIKDSQDTGGYCRGATCYGTGPFDHW

SEQ ID NO: 2451 - protein, 13 aa, Homo sapiens [sequence omitted]

SEQ ID NO: 2452 - protein, 18 aa, Homo sapiens
CASFPRYDFWSGSSSDYW

SEQ ID NO: 2453 - protein, 21 aa, Homo sapiens
CARGTAGSGRDTSGYYSLDYW

SEQ ID NO: 2454 - protein, 18 aa, Homo sapiens
CARAGRGSHSWEYYFDYW

SEQ ID NO: 2455 - protein, 15 aa, Homo sapiens
CAVTPHDSSGYSDYW

SEQ ID NO: 2456 - protein, 13 aa, Homo sapiens
CVRDSPGAHFDYW

SEQ ID NO: 2457 - protein, 15 aa, Homo sapiens
CARDNRYDSSGLDYW

SEQ ID NO: 2458 - protein, 22 aa, Homo sapiens
CAKDSERRITIFGVVNDAFDIW

SEQ ID NO: 2459 - protein, 17 aa, Homo sapiens
CARVVCRSSCYDAFDIW

SEQ ID NO: 2460 - protein, 21 aa, Homo sapiens
CAKSIIWGGDYGDYEWYFDLW

SEQ ID NO: 2461 - protein, 23 aa, Homo sapiens
CATYLGYCSCTSCLGTDNWFDPW

SEQ ID NO: 2462 - protein, 15 aa, Homo sapiens
CKVPFRRYDYIRDYW

SEQ ID NO: 2463 - protein, 23 aa, Homo sapiens
CARGSRSGPDDFMITFGGVPDYW

SEQ ID NO: 2464 - protein, 16 aa, Homo sapiens
CARGHHSLSLWYFDLW

SEQ ID NO: 2465 - protein, 13 aa, Homo sapiens
CARDRMPPWFDPW

SEQ ID NO: 2466 - protein, 19 aa, Homo sapiens
CARLKMEGVYGSGTYTHYW

SEQ ID NO: 2467 - protein, 20 aa, Homo sapiens
CARGGKGAAYSSGWYYFDYW

SEQ ID NO: 2468 - protein, 14 aa, Homo sapiens
CARHGTKSNGFDYW

SEQ ID NO: 2469 - protein, 23 aa, Homo sapiens
CARSTEMITPLGGSTALPYFDYW

SEQ ID NO: 2470 - protein, 18 aa, Homo sapiens
CASTSHLYSYGTYYFDYW

SEQ ID NO: 2471 - protein, 16 aa, Homo sapiens
CAKGGTYGDSWWFDPW

SEQ ID NO: 2472 - protein, 25 aa, Homo sapiens
CAKDRTVVVPAAIRAHYYYYGMDVW

SEQ ID NO: 2473 - protein, 15 aa, Homo sapiens
CARDESSPFDAFDVW

SEQ ID NO: 2474 - protein, 16 aa, Homo sapiens
CANGRFGRLFTGFDSW

SEQ ID NO: 2475 - protein, 15 aa, Homo sapiens
CARYSGYDGYWFDPW

SEQ ID NO: 2476 - protein, 16 aa, Homo sapiens
CARYSSGYYSTSFDYW

SEQ ID NO: 2477 - protein, 14 aa, Homo sapiens
CARGLGGDRWFDPW

SEQ ID NO: 2478 - protein, 17 aa, Homo sapiens
CTRDWGEMGSTNAFDIW

SEQ ID NO: 2479 - protein, 18 aa, Homo sapiens
CAKQSIPVSGDWVHFDNW

SEQ ID NO: 2480 - protein, 17 aa, Homo sapiens
CARGNYVWDYYYGMDVW

SEQ ID NO: 2481 - protein, 16 aa, Homo sapiens
CARGYCRSTTCYFDYW

SEQ ID NO: 2482 - protein, 19 aa, Homo sapiens
CVRDRGVERWLHYSSLDYW

SEQ ID NO: 2483 - protein, 19 aa, Homo sapiens
CARGLRSFTIFREYAFDIW

SEQ ID NO: 2484 - protein, 17 aa, Homo sapiens
CAPLPLYYDFPNWFDPW

SEQ ID NO: 2485 - protein, 11 aa, Homo sapiens [sequence omitted]

SEQ ID NO: 2486 - protein, 21 aa, Homo sapiens
CARVHSYGSGSYFSYYGMDVW

SEQ ID NO: 2487 - protein, 11 aa, Homo sapiens
CQKYDSAHRTF

SEQ ID NO: 2488 - protein, 18 aa, Homo sapiens
CARDRYDSSGDYLAYDIW

SEQ ID NO: 2489 - protein, 19 aa, Homo sapiens
CARGCCSSPRLSSNWFDPW

SEQ ID NO: 2490 - protein, 11 aa, Homo sapiens [sequence omitted]

SEQ ID NO: 2491 - protein, 14 aa, Homo sapiens
CQKYGGSPPPSITF

SEQ ID NO: 2492 - protein, 15 aa, Homo sapiens
CTRFSATNGWLFDYW

SEQ ID NO: 2493 - protein, 12 aa, Homo sapiens
CYSARDNDLRVF

SEQ ID NO: 2494 - protein, 9 aa, Homo sapiens
CARGEFDPW

SEQ ID NO: 2495 - protein, 17 aa, Homo sapiens
CARTGVSGYDLDYFDYW

SEQ ID NO: 2496 - protein, 28 aa, Homo sapiens
CATTGFQGSYRDNDCGGDCYVRRGFDCW

SEQ ID NO: 2497 - protein, 16 aa, Homo sapiens
CARPIASRRIDAFDIW

SEQ ID NO: 2498 - protein, 11 aa, Homo sapiens [sequence omitted]

SEQ ID NO: 2499 - protein, 18 aa, Homo sapiens
CARAHGIAVAAQEAFDIW

SEQ ID NO: 2500 - protein, 18 aa, Homo sapiens
CARDSGKSVWPTNHLDYW

SEQ ID NO: 2501 - protein, 16 aa, Homo sapiens
CVKGLLGGVLFAMDVW

SEQ ID NO: 2502 - protein, 19 aa, Homo sapiens
CARVVHDYGIGLGGAYDVW

SEQ ID NO: 2503 - protein, 16 aa, Homo sapiens
CARQVATTVVSNFDYW

SEQ ID NO: 2504 - protein, 15 aa, Homo sapiens
CARQVRFLEWPFDYW

SEQ ID NO: 2505 - protein, 16 aa, Homo sapiens
CARPITATPNSPVDYW

SEQ ID NO: 2506 - protein, 25 aa, Homo sapiens
CAKDIGYISPLSTLKNGRGDAFDIW

SEQ ID NO: 2507 - protein, 20 aa, Homo sapiens
CARRGQSDPVITPENWFDPW

SEQ ID NO: 2508 - protein, 13 aa, Homo sapiens
CQQYHSNPPALTF

SEQ ID NO: 2509 - protein, 16 aa, Homo sapiens
CASGFYDSSGYYYGYW

SEQ ID NO: 2510 - protein, 13 aa, Homo sapiens
CARGEYPYWFSYW

SEQ ID NO: 2511 - protein, 12 aa, Homo sapiens
CQQSFSTLGITF

SEQ ID NO: 2512 - protein, 22 aa, Homo sapiens
CARDRQRERRSPRYYYYGMDVW

SEQ ID NO: 2513 - protein, 13 aa, Homo sapiens
CGTWDSSLLVVMF

SEQ ID NO: 2514 - protein, 13 aa, Homo sapiens
CASEGTGRVFDYW

SEQ ID NO: 2515 - protein, 24 aa, Homo sapiens
CARCLGDRYYTGGGYYCRGRFDYW

SEQ ID NO: 2516 - protein, 18 aa, Homo sapiens
CVRDGSYYDTSGYYYLYW

SEQ ID NO: 2517 - protein, 24 aa, Homo sapiens
CARTPKIAVAGTKPPYYYYGMDVW

SEQ ID NO: 2518 - protein, 12 aa, Homo sapiens
CQQRTTWPPNPF

SEQ ID NO: 2519 - protein, 17 aa, Homo sapiens
CAKKGAMAPAPKHFDYW

SEQ ID NO: 2520 - protein, 31 aa, Homo sapiens
CAHRRVSPWSISGPARNSGSGRKRAYYFDYW

SEQ ID NO: 2521 - protein, 14 aa, Homo sapiens
CARHEKIAAPFDYW

SEQ ID NO: 2522 - protein, 13 aa, Homo sapiens
CARKTGKYPFDYW

SEQ ID NO: 2523 - protein, 18 aa, Homo sapiens
CARGHLGLGIAAAGNDYW

SEQ ID NO: 2524 - protein, 11 aa, Homo sapiens [sequence omitted]

SEQ ID NO: 2525 - protein, 18 aa, Homo sapiens
CAKGLYGSYYESDAFDIW

SEQ ID NO: 2526 - protein, 13 aa, Homo sapiens
CAKDPTEGVRDYW

SEQ ID NO: 2527 - protein, 20 aa, Homo sapiens
CARGKAYYDFWSAQTGFDPW

SEQ ID NO: 2528 - protein, 16 aa, Homo sapiens
CAKCMTTVPVIAFDIW

SEQ ID NO: 2529 - protein, 14 aa, Homo sapiens
CCSYAGSYTRNWVF

SEQ ID NO: 2530 - protein, 13 aa, Homo sapiens
CQQYDASPPMYTF

SEQ ID NO: 2531 - protein, 18 aa, Homo sapiens
CARRVIVVVITGDYFDYW

SEQ ID NO: 2532 - protein, 11 aa, Homo sapiens
CQQYDTLHISF

SEQ ID NO: 2533 - protein, 20 aa, Homo sapiens
CARDVYCSGGSCYSVPFDYW

SEQ ID NO: 2534 - protein, 19 aa, Homo sapiens
CARELVRGKYYYYYGMDVW

SEQ ID NO: 2535 - protein, 19 aa, Homo sapiens
CARDLLIEDPSGGSCFDYW

SEQ ID NO: 2536 - protein, 18 aa, Homo sapiens
CARFSRDDYINYWYLGLW

SEQ ID NO: 2537 - protein, 18 aa, Homo sapiens
CARLLGYRYDYVDYFDYW

SEQ ID NO: 2538 - protein, 21 aa, Homo sapiens
CAKDFQGHYFGIGSHRAFDYW

SEQ ID NO: 2539 - protein, 24 aa, Homo sapiens
CAKAVYYYDRSGYPLYYYHGMDVW

SEQ ID NO: 2540 - protein, 21 aa, Homo sapiens
CARDDYEYWSGVYASGHFDYW

SEQ ID NO: 2541 - protein, 17 aa, Homo sapiens
CAKDIFVYSSGWYFDYW

SEQ ID NO: 2542 - protein, 21 aa, Homo sapiens
CARMGTYYYDSGGYSEAFDIW

SEQ ID NO: 2543 - protein, 14 aa, Homo sapiens
CARLGIYGDYPDYW

SEQ ID NO: 2544 - protein, 22 aa, Homo sapiens
CVKNKVPFSLMVFAAADAFDIW

SEQ ID NO: 2545 - protein, 19 aa, Homo sapiens
CARRTRFIAARPQWYFDLW

SEQ ID NO: 2546 - protein, 21 aa, Homo sapiens
CARDSGASTDDSSLGYYFDYW

SEQ ID NO: 2547 - protein, 16 aa, Homo sapiens
CVRYFQSKWPYYFDYW

SEQ ID NO: 2548 - protein, 18 aa, Homo sapiens
CARGESRDYGGPRGFDYW

SEQ ID NO: 2549 - protein, 26 aa, Homo sapiens
CARGPYYDFWSDLGTRYYYYYGMDVW

SEQ ID NO: 2550 - protein, 17 aa, Homo sapiens
CAKGPSSGYGFDYFDSW

SEQ ID NO: 2551 - protein, 15 aa, Homo sapiens
CAGPAVAGTKRIDYW

SEQ ID NO: 2552 - protein, 18 aa, Homo sapiens
CARHYIWGSYEEAWFDPW

SEQ ID NO: 2553 - protein, 16 aa, Homo sapiens
CAKANCGGDCRVLDYW

SEQ ID NO: 2554 - protein, 19 aa, Homo sapiens
CAKDALIWSAISQDAFDIW

SEQ ID NO: 2555 - protein, 18 aa, Homo sapiens
CAKDQFAGNGLYDAFDIW

SEQ ID NO: 2556 - protein, 20 aa, Homo sapiens
CARGYYDSYGDYVVFDFDYW

SEQ ID NO: 2557 - protein, 15 aa, Homo sapiens
CGSYDILTGTDFDYW

SEQ ID NO: 2558 - protein, 16 aa, Homo sapiens
CARDVLTMVQGALDYW

SEQ ID NO: 2559 - protein, 16 aa, Homo sapiens
CARPEGGYSTSWVDYW

SEQ ID NO: 2560 - protein, 13 aa, Homo sapiens
CARHYGSGSSDYW

SEQ ID NO: 2561 - protein, 16 aa, Homo sapiens
CARVHTVTSHDAFDIW

SEQ ID NO: 2562 - protein, 12 aa, Homo sapiens [sequence omitted]

SEQ ID NO: 2563 - protein, 10 aa, Homo sapiens [sequence omitted]

SEQ ID NO: 2564 - protein, 15 aa, Homo sapiens
CAREAKTSPPNFDYW

SEQ ID NO: 2565 - protein, 19 aa, Homo sapiens
CASMEHPEGILGELSEDYW

SEQ ID NO: 2566 - protein, 17 aa, Homo sapiens
CAMSTARWGRYNWFDPW

SEQ ID NO: 2567 - protein, 21 aa, Homo sapiens
CAKCFDLWSGYPVGCKWFDPW

SEQ ID NO: 2568 - protein, 12 aa, Homo sapiens [sequence omitted]

SEQ ID NO: 2569 - protein, 24 aa, Homo sapiens
CARDSPDGYYDFWSGYYSHYFDYW

SEQ ID NO: 2570 - protein, 14 aa, Homo sapiens
CARTKLSVIAEDYW

SEQ ID NO: 2571 - protein, 20 aa, Homo sapiens
CARHVSEYSGYDPYYYFDYW

SEQ ID NO: 2572 - protein, 17 aa, Homo sapiens
CAKGSPCGVDCVSFDQW

SEQ ID NO: 2573 - protein, 20 aa, Homo sapiens
CARDDNSGRGGSEITPFDYW

SEQ ID NO: 2574 - protein, 28 aa, Homo sapiens
CSLRSEDTAVYYCAPAEDYGDHLGFDYW

SEQ ID NO: 2575 - protein, 17 aa, Homo sapiens
CAKWNGPHYNNWHVDYW

SEQ ID NO: 2576 - protein, 15 aa, Homo sapiens
CARGTNSSPNWFDPW

SEQ ID NO: 2577 - protein, 13 aa, Homo sapiens
CQQYKSYSRGFTF

SEQ ID NO: 2578 - protein, 11 aa, Homo sapiens [sequence omitted]

SEQ ID NO: 2579 - protein, 17 aa, Homo sapiens
CARDISSSWYPNWFDPW

SEQ ID NO: 2580 - protein, 21 aa, Homo sapiens
CAAERLGYCSGDSCRNWLDPW

SEQ ID NO: 2581 - protein, 16 aa, Homo sapiens
CAKAGGGVPQNYFHSW

SEQ ID NO: 2582 - protein, 17 aa, Homo sapiens
CVRGCSGTRCYKNFDYW

SEQ ID NO: 2583 - protein, 19 aa, Homo sapiens
CAKDLAYYGDYASDAFDIW

SEQ ID NO: 2584 - protein, 22 aa, Homo sapiens
CAKDPLEIPAATGGRYNWFDPW

SEQ ID NO: 2585 - protein, 15 aa, Homo sapiens
CAKVFIAVAGYFDYW

SEQ ID NO: 2586 - protein, 18 aa, Homo sapiens
CARAAYCGGDCYSGHDYW

SEQ ID NO: 2587 - protein, 13 aa, Homo sapiens
CTRQAVAVPIDYW

SEQ ID NO: 2588 - protein, 18 aa, Homo sapiens
CAKFQLWPHTKNNWFDRW

SEQ ID NO: 2589 - protein, 16 aa, Homo sapiens
CAREYYYDSSGTFDYW

SEQ ID NO: 2590 - protein, 19 aa, Homo sapiens
CARAESSGPYETYNWFDPW

SEQ ID NO: 2591 - protein, 20 aa, Homo sapiens
CVKGVLPYCTGALCYEFDSW

SEQ ID NO: 2592 - protein, 23 aa, Homo sapiens
CARLDGELEQWSGSYYYYGMDVW

SEQ ID NO: 2593 - protein, 17 aa, Homo sapiens
CARVKDDYSNYVPFDYW

SEQ ID NO: 2594 - protein, 16 aa, Homo sapiens
CASPHYGDYRSPFDYW

SEQ ID NO: 2595 - protein, 15 aa, Homo sapiens
CTRHPHNSGDTFDVW

SEQ ID NO: 2596 - protein, 16 aa, Homo sapiens
CANSRGYSYGLRFDYW

SEQ ID NO: 2597 - protein, 19 aa, Homo sapiens
CARVIIAGQFLEWTHFDYW

SEQ ID NO: 2598 - protein, 21 aa, Homo sapiens
CVKNVPNRHISSSAKDYFDNW

SEQ ID NO: 2599 - protein, 20 aa, Homo sapiens
CAREGRPGKSYDDYVGLDYW

SEQ ID NO: 2600 - protein, 18 aa, Homo sapiens
CARVPLFSDRTTVLFDYW

SEQ ID NO: 2601 - protein, 13 aa, Homo sapiens [sequence omitted]

SEQ ID NO: 2602 - protein, 17 aa, Homo sapiens
CTRLNLQDYGDYAFDYW

SEQ ID NO: 2603 - protein, 16 aa, Homo sapiens
CANARGSSAITKIDYW

SEQ ID NO: 2604 - protein, 24 aa, Homo sapiens
CARGQYYDILTGYYHNKNNWFDPW

SEQ ID NO: 2605 - protein, 17 aa, Homo sapiens
CARLSYYDFWSGTGDYW

SEQ ID NO: 2606 - protein, 15 aa, Homo sapiens
CARDYDRSGYYPDFW

SEQ ID NO: 2607 - protein, 12 aa, Homo sapiens
CARVWRWYIDYW

SEQ ID NO: 2608 - protein, 17 aa, Homo sapiens
CARGPHYGDRSDYFDYW

SEQ ID NO: 2609 - protein, 18 aa, Homo sapiens
CAKNQGNGGPFYYAMDVW

SEQ ID NO: 2610 - protein, 11 aa, Homo sapiens
CQQYNHWPIIF

SEQ ID NO: 2611 - protein, 17 aa, Homo sapiens
CAKDCGYGSGVRAFDIW

SEQ ID NO: 2612 - protein, 16 aa, Homo sapiens
CARVPRGFYYYGMDVW

SEQ ID NO: 2613 - protein, 18 aa, Homo sapiens
CAKCTGRSGGSCSPFDPW

SEQ ID NO: 2614 - protein, 17 aa, Homo sapiens
CARLTMAASPGFRFDSW

SEQ ID NO: 2615 - protein, 15 aa, Homo sapiens
CAHKMDYVRRAFDIW

SEQ ID NO: 2616 - protein, 12 aa, Homo sapiens
CMQRVEFPSITF

SEQ ID NO: 2617 - protein, 19 aa, Homo sapiens
CAKDGDGSGRYTHNWFDSW

SEQ ID NO: 2618 - protein, 20 aa, Homo sapiens
CASRRTPYDSAFSGVVFDIW

SEQ ID NO: 2619 - protein, 24 aa, Homo sapiens
CASQYCSGGSCYLSQYYYYGMDVW

SEQ ID NO: 2620 - protein, 18 aa, Homo sapiens
CASGYCSGGSCYPPIDYW

SEQ ID NO: 2621 - protein, 22 aa, Homo sapiens
CARGFQMGISDTYQYYYGLDVW

SEQ ID NO: 2622 - protein, 15 aa, Homo sapiens
CAKEDQWERRAFDIW

SEQ ID NO: 2623 - protein, 25 aa, Homo sapiens
CARGGDYYDSSGYYYPHYYYGMDVW

SEQ ID NO: 2624 - protein, 16 aa, Homo sapiens
CARDSWPTIGRYFDLW

SEQ ID NO: 2625 - protein, 20 aa, Homo sapiens
CATAPVDYYGSGSYWYFDLW

SEQ ID NO: 2626 - protein, 15 aa, Homo sapiens
CAKITQPVEPPFDIW

SEQ ID NO: 2627 - protein, 18 aa, Homo sapiens
CAKDHNWGSSGWSTFDYW

SEQ ID NO: 2628 - protein, 17 aa, Homo sapiens
CARVYGDYRDWYGFDVW

SEQ ID NO: 2629 - protein, 14 aa, Homo sapiens
CAKIFSSSWYTDYW

SEQ ID NO: 2630 - protein, 12 aa, Homo sapiens
CTPYNSDGFHIW

SEQ ID NO: 2631 - protein, 17 aa, Homo sapiens
CARRAYTYGFNYAMDVW

SEQ ID NO: 2632 - protein, 16 aa, Homo sapiens
CARLFHDGTYSWLDPW

SEQ ID NO: 2633 - protein, 17 aa, Homo sapiens
CARSLALGYIYGYLNYW

SEQ ID NO: 2634 - protein, 16 aa, Homo sapiens
CARDYHYDTRGYVGYW

SEQ ID NO: 2635 - protein, 18 aa, Homo sapiens
CARDMDYYDSSGYYQDYW

SEQ ID NO: 2636 - protein, 17 aa, Homo sapiens
CARDRTDSGWPYYFDYW

SEQ ID NO: 2637 - protein, 19 aa, Homo sapiens
CARDGGYYDSSGHEWFDPW

SEQ ID NO: 2638 - protein, 13 aa, Homo sapiens [sequence omitted]

SEQ ID NO: 2639 - protein, 19 aa, Homo sapiens
CAKDIYPIAAAGTSYFDYW

SEQ ID NO: 2640 - protein, 16 aa, Homo sapiens
CAFCSGGSCYNWFDPW

SEQ ID NO: 2641 - protein, 17 aa, Homo sapiens
CASVRRGGGTSYYFDYW

SEQ ID NO: 2642 - protein, 15 aa, Homo sapiens
CARSIAVSGYYFDYW

SEQ ID NO: 2643 - protein, 15 aa, Homo sapiens
CAAKAAGPYNWFDPW

SEQ ID NO: 2644 - protein, 17 aa, Homo sapiens
CARDYSSGWLGEHFDYW

SEQ ID NO: 2645 - protein, 11 aa, Homo sapiens
CLQGTDWPLSF

SEQ ID NO: 2646 - protein, 20 aa, Homo sapiens
CARGPREVRGVIVGYYFDYW

SEQ ID NO: 2647 - protein, 16 aa, Homo sapiens
CARDAGSDRWTNFDHW

SEQ ID NO: 2648 - protein, 25 aa, Homo sapiens
CARLGTPVLRYFDWLTTYYYGMDVW

SEQ ID NO: 2649 - protein, 13 aa, Homo sapiens
CARLPRLHSFDIW

SEQ ID NO: 2650 - protein, 17 aa, Homo sapiens
CAKSVDYYGSGSYYWYW

SEQ ID NO: 2651 - protein, 22 aa, Homo sapiens
CAKDMPYDILTGYYYYYGMDVW

SEQ ID NO: 2652 - protein, 23 aa, Homo sapiens
CARVLPQIGNFFEGRESTWFDPW

SEQ ID NO: 2653 - protein, 29 aa, Homo sapiens
CLRASDSALYYCAKYARESYYYYYAMDVW

SEQ ID NO: 2654 - protein, 16 aa, Homo sapiens
CARESWDRGYEAFDIW

SEQ ID NO: 2655 - protein, 17 aa, Homo sapiens
CARHRNSGWFFPAFDFW

SEQ ID NO: 2656 - protein, 15 aa, Homo sapiens
CAKLAVTPRDAFDIW

SEQ ID NO: 2657 - protein, 15 aa, Homo sapiens
CARSPESPDGYFDYW

SEQ ID NO: 2658 - protein, 16 aa, Homo sapiens
CARWSSTSRYGHFDYW

SEQ ID NO: 2659 - protein, 19 aa, Homo sapiens
CAHRGPNSIGWYTFYFDYW

SEQ ID NO: 2660 - protein, 22 aa, Homo sapiens
CARELVTQAKAGVYYYSGMDVW

SEQ ID NO: 2661 - protein, 16 aa, Homo sapiens
CAKDKGLVAVVTFDYW

SEQ ID NO: 2662 - protein, 16 aa, Homo sapiens
CALMALSPTDTYFPSW

SEQ ID NO: 2663 - protein, 16 aa, Homo sapiens
CARSPTVTVNSLFDNW

SEQ ID NO: 2664 - protein, 16 aa, Homo sapiens
CARETEDYTSSYFDYW

SEQ ID NO: 2665 - protein, 16 aa, Homo sapiens
CAKLGVGATHPEVDYW

SEQ ID NO: 2666 - protein, 13 aa, Homo sapiens
CAKEPAADQRDYW

SEQ ID NO: 2667 - protein, 20 aa, Homo sapiens
CAKVGGYLWFGEFNDAFDIW

SEQ ID NO: 2668 - protein, 14 aa, Homo sapiens
CAKEAGWSEYFDYW

SEQ ID NO: 2669 - protein, 15 aa, Homo sapiens
CARAYGDYRGGFDYW

SEQ ID NO: 2670 - protein, 14 aa, Homo sapiens
CAREVDYGSPFDPW

SEQ ID NO: 2671 - protein, 20 aa, Homo sapiens
CVRSTSLWIELYATGHFDFW

SEQ ID NO: 2672 - protein, 17 aa, Homo sapiens
CARGSNSSAWVNWFDPW

SEQ ID NO: 2673 - protein, 20 aa, Homo sapiens
CAKEMYIGFGEFPPNYFDYW

SEQ ID NO: 2674 - protein, 16 aa, Homo sapiens
CAKAEGYTSGWYFDYW

SEQ ID NO: 2675 - protein, 20 aa, Homo sapiens
CAKAYSTVTTDYYYYGMDVW

SEQ ID NO: 2676 - protein, 12 aa, Homo sapiens
CQQYVNLPPGSF

SEQ ID NO: 2677 - protein, 14 aa, Homo sapiens
CTTDEVVVGLFDYW

SEQ ID NO: 2678 - protein, 17 aa, Homo sapiens
CARRLSTSYYFYGMDVW

SEQ ID NO: 2679 - protein, 16 aa, Homo sapiens
CAKTIAVAGTNYFDYW

SEQ ID NO: 2680 - protein, 18 aa, Homo sapiens
CARGGIMRWLEGDGMDVW

SEQ ID NO: 2681 - protein, 14 aa, Homo sapiens
CAKEAPPWGLFDYW

SEQ ID NO: 2682 - protein, 20 aa, Homo sapiens
CARDTPPTYYYDSSGYPDYW

SEQ ID NO: 2683 - protein, 26 aa, Homo sapiens
CARSLYDYVWGSYRRALYYYYGMDVW

SEQ ID NO: 2684 - protein, 11 aa, Homo sapiens
CARWFHTFDIW

SEQ ID NO: 2685 - protein, 14 aa, Homo sapiens
CASQPTDSSGNDYW

SEQ ID NO: 2686 - protein, 20 aa, Homo sapiens
CARGPIKYSGYDYANYFDYW

SEQ ID NO: 2687 - protein, 20 aa, Homo sapiens
CARVRGFLDGIFTGDWLDPW

SEQ ID NO: 2688 - protein, 17 aa, Homo sapiens
CARALLLDGGRLKFDSW

SEQ ID NO: 2689 - protein, 11 aa, Homo sapiens
CQQSDTAPSVF

SEQ ID NO: 2690 - protein, 14 aa, Homo sapiens
CQSYDGSLSAFMIF

SEQ ID NO: 2691 - protein, 17 aa, Homo sapiens
CAKDKLGGTTRGWFDPW

SEQ ID NO: 2692 - protein, 17 aa, Homo sapiens
CTRDPYGYTPNDSFDIW

SEQ ID NO: 2693 - protein, 14 aa, Homo sapiens
CQQANSFPLDLFTF

SEQ ID NO: 2694 - protein, 14 aa, Homo sapiens
CASFMLKFPGDDYW

SEQ ID NO: 2695 - protein, 20 aa, Homo sapiens
CARLKSDSSSSGRRGYFDSW

SEQ ID NO: 2696 - protein, 17 aa, Homo sapiens
CARALLWFGEPPWFDPW

SEQ ID NO: 2697 - protein, 17 aa, Homo sapiens
CAKLRGYSGYDYPGDYW

SEQ ID NO: 2698 - protein, 21 aa, Homo sapiens
CVRRTSTDNLSFGGPEGFDHW

SEQ ID NO: 2699 - protein, 17 aa, Homo sapiens
CARALLPLYSSSWLDYW

SEQ ID NO: 2700 - protein, 14 aa, Homo sapiens
CARLVVSHWPPDYW

SEQ ID NO: 2701 - protein, 13 aa, Homo sapiens
CASWVNSHWFDYW

SEQ ID NO: 2702 - protein, 18 aa, Homo sapiens
CATEDDSENHNLSIFDYW

SEQ ID NO: 2703 - protein, 14 aa, Homo sapiens
CARGDPTALVFDYW

SEQ ID NO: 2704 - protein, 24 aa, Homo sapiens
CAKEAIGYSSGWYPPFEFVWFDPW

SEQ ID NO: 2705 - protein, 16 aa, Homo sapiens
CARRGANWSHARFDLW

SEQ ID NO: 2706 - protein, 18 aa, Homo sapiens
CARAYCGGECYNGIFDSW

SEQ ID NO: 2707 - protein, 15 aa, Homo sapiens
CASSLLMVYASFDYW

SEQ ID NO: 2708 - protein, 15 aa, Homo sapiens
CTKGRIDQWLAPDYW

SEQ ID NO: 2709 - protein, 15 aa, Homo sapiens
CARGGAGPAAIYDYW

SEQ ID NO: 2710 - protein, 18 aa, Homo sapiens
CSRHILNHRSIEDYFDSW

SEQ ID NO: 2711 - protein, 21 aa, Homo sapiens
CAKDSSDGYGYVPYYYGMDVW

SEQ ID NO: 2712 - protein, 15 aa, Homo sapiens
CAREEQPLIMRFDPW

SEQ ID NO: 2713 - protein, 18 aa, Homo sapiens
CAKTKWVQGLTFNWFDPW

SEQ ID NO: 2714 - protein, 19 aa, Homo sapiens
CATLYDSSGYPHSSTVDYW

SEQ ID NO: 2715 - protein, 13 aa, Homo sapiens
CMQVVQFPPSFIF

SEQ ID NO: 2716 - protein, 17 aa, Homo sapiens
CAREHGDGKQFGYFDYW

SEQ ID NO: 2717 - protein, 17 aa, Homo sapiens
CVREPFRGIIGWYFDLW

SEQ ID NO: 2718 - protein, 23 aa, Homo sapiens
CARDRYYDILTGYQAPYNWFDPW

SEQ ID NO: 2719 - protein, 22 aa, Homo sapiens
CAKLPGGNTYYYDSSGYSFDYW

SEQ ID NO: 2720 - protein, 20 aa, Homo sapiens
CAKDVPYYDSSGPTGYFDYW

SEQ ID NO: 2721 - protein, 15 aa, Homo sapiens
CARTYYVSGYYFDNW

SEQ ID NO: 2722 - protein, 11 aa, Homo sapiens
CQQANSFVFTF

SEQ ID NO: 2723 - protein, 13 aa, Homo sapiens
CARQWQWLGIDYW

SEQ ID NO: 2724 - protein, 14 aa, Homo sapiens
CAKGSEYGGIFDYW

SEQ ID NO: 2725 - protein, 14 aa, Homo sapiens
CASESRPDHRFDYW

SEQ ID NO: 2726 - protein, 23 aa, Homo sapiens
CARVHNYYDSSGLLYYYYGMDVW

SEQ ID NO: 2727 - protein, 20 aa, Homo sapiens
CAKDPLIGYDILTGGTFDYW

SEQ ID NO: 2728 - protein, 24 aa, Homo sapiens
CARDPDTYYYDSSGYYYENYFDYW

SEQ ID NO: 2729 - protein, 16 aa, Homo sapiens
CATPRRSGYDEGFDNW

SEQ ID NO: 2730 - protein, 15 aa, Homo sapiens
CAKDTLVGEGRFDYW

SEQ ID NO: 2731 - protein, 14 aa, Homo sapiens
CAREDMNLPHFDYW

SEQ ID NO: 2732 - protein, 20 aa, Homo sapiens
CARGGTYYYNNDGPHYFDYW

SEQ ID NO: 2733 - protein, 20 aa, Homo sapiens
CATERAGCPGGSCYHYFDYW

SEQ ID NO: 2734 - protein, 14 aa, Homo sapiens
CQQYDNLPPGKLTF

SEQ ID NO: 2735 - protein, 17 aa, Homo sapiens
CARSEFITGSNRELDYW

SEQ ID NO: 2736 - protein, 21 aa, Homo sapiens
CATDREYCSGGAKCYSAFDYW

SEQ ID NO: 2737 - protein, 16 aa, Homo sapiens
CARTPDYTNYGWFDPW

SEQ ID NO: 2738 - protein, 14 aa, Homo sapiens
CATSLFWGQPFDYW

SEQ ID NO: 2739 - protein, 20 aa, Homo sapiens
CARVGVPVTGSLFRAWLDPW

SEQ ID NO: 2740 - protein, 19 aa, Homo sapiens
CARQARGPDIVGASYFDYW

SEQ ID NO: 2741 - protein, 30 aa, Homo sapiens
CARGTVGASGVARDPAGRAIQGFLYYFDYW

SEQ ID NO: 2742 - protein, 20 aa, Homo sapiens
CARHSLVVPAAVRYNWFDPW

SEQ ID NO: 2743 - protein, 15 aa, Homo sapiens
CQKYNSALRAPALTF

SEQ ID NO: 2744 - protein, 12 aa, Homo sapiens
CHQYNSYRTWTF

SEQ ID NO: 2745 - protein, 12 aa, Homo sapiens
CRQYNNWPRGAF

SEQ ID NO: 2746 - protein, 18 aa, Homo sapiens
CARDRQVPAENYYAMDVW

SEQ ID NO: 2747 - protein, 18 aa, Homo sapiens
CATSYFGLGNYYYGMDVW

SEQ ID NO: 2748 - protein, 15 aa, Homo sapiens
CAKDIIAVAGPFDYW

SEQ ID NO: 2749 - protein, 16 aa, Homo sapiens
CAKHTSGYDLDGMDVW

SEQ ID NO: 2750 - protein, 18 aa, Homo sapiens
CARDQYYDGNPYSHFDYW

SEQ ID NO: 2751 - protein, 18 aa, Homo sapiens
CARDLRSSFYDETAFNVW

SEQ ID NO: 2752 - protein, 20 aa, Homo sapiens
CAKFPGGEGSSWTVHPFDYW

SEQ ID NO: 2753 - protein, 24 aa, Homo sapiens
CAHRPTLGYCSGGSCYRLAWFDPW

SEQ ID NO: 2754 - protein, 23 aa, Homo sapiens
CATFHFYDYVWGSYRPTYAFDVW

SEQ ID NO: 2755 - protein, 17 aa, Homo sapiens
CAKVDSSGYYQGLADYW

SEQ ID NO: 2756 - protein, 16 aa, Homo sapiens
CAKDSYYDSWDWFDPW

SEQ ID NO: 2757 - protein, 17 aa, Homo sapiens
CATQGGVTDYYYGMDVW

SEQ ID NO: 2758 - protein, 18 aa, Homo sapiens
CAKSRQVGRTAAGNFDYW

SEQ ID NO: 2759 - protein, 19 aa, Homo sapiens
CANSNCSSTSCYAGEFDYW

SEQ ID NO: 2760 - protein, 19 aa, Homo sapiens
CARMNPYYEDSSGFYYDHW

SEQ ID NO: 2761 - protein, 18 aa, Homo sapiens
CARDPDYYDSSGWAFDIW

SEQ ID NO: 2762 - protein, 17 aa, Homo sapiens
CARVAFYGSGSYAMDVW

SEQ ID NO: 2763 - protein, 19 aa, Homo sapiens
CAKVAPIDYDTYKNGFDFW

SEQ ID NO: 2764 - protein, 17 aa, Homo sapiens
CAKVGVYYDSSGLVDYW

SEQ ID NO: 2765 - protein, 20 aa, Homo sapiens
CATGTLYEVTTDYYYGMDVW

SEQ ID NO: 2766 - protein, 18 aa, Homo sapiens
CARDAGAGYYPYYGMDVW

SEQ ID NO: 2767 - protein, 18 aa, Homo sapiens
CARDSYQLPRRGNWFDPW

SEQ ID NO: 2768 - protein, 14 aa, Homo sapiens
CAKLLWFGELNDYW

SEQ ID NO: 2769 - protein, 16 aa, Homo sapiens
CASHIADYYYYGMDVW

SEQ ID NO: 2770 - protein, 15 aa, Homo sapiens
CARGHSTSGPWFDPW

SEQ ID NO: 2771 - protein, 14 aa, Homo sapiens
CAAIAAFSQTVDYW

SEQ ID NO: 2772 - protein, 17 aa, Homo sapiens
CVKASHDSSPYYYFDSW

SEQ ID NO: 2773 - protein, 16 aa, Homo sapiens
CARLLDANNAVPFDNW

SEQ ID NO: 2774 - protein, 21 aa, Homo sapiens
CARAHSTVYYYGSATGWFDPW

SEQ ID NO: 2775 - protein, 14 aa, Homo sapiens
CASEAPLLGAFDIW

SEQ ID NO: 2776 - protein, 17 aa, Homo sapiens
CAHKVYVWGRERYFDYW

SEQ ID NO: 2777 - protein, 15 aa, Homo sapiens
CAKDLLPTGASFDYW

SEQ ID NO: 2778 - protein, 16 aa, Homo sapiens
CARTPTGPGETYFDYW

SEQ ID NO: 2779 - protein, 19 aa, Homo sapiens
CARHDRDTAMVPLVTFDYW

SEQ ID NO: 2780 - protein, 13 aa, Homo sapiens
CAKLDTAMGYDYW

SEQ ID NO: 2781 - protein, 16 aa, Homo sapiens
CAKGEMATIWAYFDYW

SEQ ID NO: 2782 - protein, 13 aa, Homo sapiens
CTRMYGLGWPDYW

SEQ ID NO: 2783 - protein, 15 aa, Homo sapiens
CARHKSGGTYPLDYW

SEQ ID NO: 2784 - protein, 16 aa, Homo sapiens
CARPLWRGYFFPFDIW

SEQ ID NO: 2785 - protein, 12 aa, Homo sapiens
CQQFNGWPPYSF

SEQ ID NO: 2786 - protein, 18 aa, Homo sapiens
CAKDLFSGSYSKPLFDYW

SEQ ID NO: 2787 - protein, 16 aa, Homo sapiens
CARDKTMFGGTDFDYW

SEQ ID NO: 2788 - protein, 14 aa, Homo sapiens
CARTYAWNSLIDYW

SEQ ID NO: 2789 - protein, 32 aa, Homo sapiens
CTRDRPPGIAAAGPGIAAAGPDYYYYYGMDVW

SEQ ID NO: 2790 - protein, 18 aa, Homo sapiens
CAKLDPWFGGPHDAFDIW

SEQ ID NO: 2791 - protein, 15 aa, Homo sapiens
CARRRTPIVGATDYW

SEQ ID NO: 2792 - protein, 19 aa, Homo sapiens
CALPISGNSGYYSGSFDSW

SEQ ID NO: 2793 - protein, 19 aa, Homo sapiens
CAKDLGPSIEAHGSWFDPW

SEQ ID NO: 2794 - protein, 14 aa, Homo sapiens
CAHSSYYDSSSDYW

SEQ ID NO: 2795 - protein, 21 aa, Homo sapiens
CARDFWPPYYGSGSYLPLDYW

SEQ ID NO: 2796 - protein, 15 aa, Homo sapiens
CARGPNNGYKVIDYW

SEQ ID NO: 2797 - protein, 15 aa, Homo sapiens
CARPLITLTGAFEIW

SEQ ID NO: 2798 - protein, 14 aa, Homo sapiens
CARDVSSTSCYDYW

SEQ ID NO: 2799 - protein, 16 aa, Homo sapiens
CARDWTTVTTDWFDPW

SEQ ID NO: 2800 - protein, 11 aa, Homo sapiens
CQRYNSNSYAF

SEQ ID NO: 2801 - protein, 13 aa, Homo sapiens
CAKPSLYGAPDYW

SEQ ID NO: 2802 - protein, 16 aa, Homo sapiens
CAKDPNPMVWGYFDYW

SEQ ID NO: 2803 - protein, 12 aa, Homo sapiens
CASPMSGHSDYW

SEQ ID NO: 2804 - protein, 13 aa, Homo sapiens
CASPGRAASFDYW

SEQ ID NO: 2805 - protein, 13 aa, Homo sapiens
CASNRITKSFDMW

SEQ ID NO: 2806 - protein, 19 aa, Homo sapiens
CVKDGFGGVIVPGGWFDPW

SEQ ID NO: 2807 - protein, 14 aa, Homo sapiens
CLLYYDGGQPHWVF

SEQ ID NO: 2808 - protein, 15 aa, Homo sapiens
CARDPPTVTTYFDYW

SEQ ID NO: 2809 - protein, 22 aa, Homo sapiens
CARVEDFTIFGVVIEEVWFDPW

SEQ ID NO: 2810 - protein, 18 aa, Homo sapiens
CAKGELGSSGWEGAFDIW

SEQ ID NO: 2811 - protein, 20 aa, Homo sapiens
CARGGYVVHSGSYPTPVDYW

SEQ ID NO: 2812 - protein, 19 aa, Homo sapiens
CARHGRDTMVRGPQGFDPW

SEQ ID NO: 2813 - protein, 18 aa, Homo sapiens
CAKLIDILTGEPDAFDIW

SEQ ID NO: 2814 - protein, 16 aa, Homo sapiens
CAKDIGTSLLGWFDPW

SEQ ID NO: 2815 - protein, 17 aa, Homo sapiens
CAHRHRTITVATYFDYW

SEQ ID NO: 2816 - protein, 15 aa, Homo sapiens
CHKGILAGYDAFDIW

SEQ ID NO: 2817 - protein, 21 aa, Homo sapiens
CATISTTGRRGYYYYYGMDVW

SEQ ID NO: 2818 - protein, 18 aa, Homo sapiens
CARGGEDDILTGYYFGYW

SEQ ID NO: 2819 - protein, 16 aa, Homo sapiens
CAISDDDSGYYYPKYW

SEQ ID NO: 2820 - protein, 23 aa, Homo sapiens
CVREQYYHRSGNTYNEENWFDPW

SEQ ID NO: 2821 - protein, 22 aa, Homo sapiens
CAKDISPNYGVLTGPGGWLDSW

SEQ ID NO: 2822 - protein, 16 aa, Homo sapiens
CARANHELELPWFDPW

SEQ ID NO: 2823 - protein, 23 aa, Homo sapiens
CARVRGAGAMGWQLYFYYGMDVW

SEQ ID NO: 2824 - protein, 12 aa, Homo sapiens
CMQSVQLLLFGF

SEQ ID NO: 2825 - protein, 17 aa, Homo sapiens
CAKAQYFDWLDTAFDYW

SEQ ID NO: 2826 - protein, 16 aa, Homo sapiens
CARDTFDSHTGWFDPW

SEQ ID NO: 2827 - protein, 17 aa, Homo sapiens
CARSYYGGTFYWYFDLW

SEQ ID NO: 2828 - protein, 16 aa, Homo sapiens
CASSEQQLAYWYFDLW

SEQ ID NO: 2829 - protein, 19 aa, Homo sapiens
CAKDYFAGSGTYSYWFDPW

SEQ ID NO: 2830 - protein, 17 aa, Homo sapiens
CARVPHYGDHLGYFDYW

SEQ ID NO: 2831 - protein, 18 aa, Homo sapiens
CAARYCSGHNCHFFFDYW

SEQ ID NO: 2832 - protein, 22 aa, Homo sapiens
CARDETYCSSASCYYYYGMDVW

SEQ ID NO: 2833 - protein, 13 aa, Homo sapiens
CSGVPHYNLVDYW

SEQ ID NO: 2834 - protein, 20 aa, Homo sapiens
CARHPPGSSAPTGSYFFDYW

SEQ ID NO: 2835 - protein, 14 aa, Homo sapiens
CARRSYGQYYFDYW

SEQ ID NO: 2836 - protein, 19 aa, Homo sapiens
CANSARSYYYDSSGPFDYW

SEQ ID NO: 2837 - protein, 19 aa, Homo sapiens
CAHSVDNWNFYYYYGIDVW

SEQ ID NO: 2838 - protein, 16 aa, Homo sapiens
CAKVWGTSGGDYNDYW

SEQ ID NO: 2839 - protein, 19 aa, Homo sapiens
CSRESHCSRGRCSPPTDYW

SEQ ID NO: 2840 - protein, 14 aa, Homo sapiens
CACLIRGSFSIDYW

SEQ ID NO: 2841 - protein, 14 aa, Homo sapiens
CARPGHGYNDFYYW

SEQ ID NO: 2842 - protein, 17 aa, Homo sapiens
CVTYYYDSSGNLGKDYW

SEQ ID NO: 2843 - protein, 17 aa, Homo sapiens
CARDRYYGVNPGELDYW

SEQ ID NO: 2844 - protein, 20 aa, Homo sapiens
CARLHCGDDSCPDSSFFDLW

SEQ ID NO: 2845 - protein, 24 aa, Homo sapiens
CASLTHYDILTGYPYYYYYGMDVW

SEQ ID NO: 2846 - protein, 16 aa, Homo sapiens
CAKVVSTPGHWYFDIW

SEQ ID NO: 2847 - protein, 16 aa, Homo sapiens
CGKDILSTDMVTIDYW

SEQ ID NO: 2848 - protein, 18 aa, Homo sapiens
CARLKKADTGNFFTFDPW

SEQ ID NO: 2849 - protein, 20 aa, Homo sapiens
CARSVDDSDGYWNRYYFDYW

SEQ ID NO: 2850 - protein, 32 aa, Homo sapiens
CALPISAVYYCARSFLHYSGSSGYYSGSFDYW

SEQ ID NO: 2851 - protein, 20 aa, Homo sapiens
CARSGYSSSWYDFVSWFDPW

SEQ ID NO: 2852 - protein, 21 aa, Homo sapiens
CATLGATLGLHYYYYYGMDVW

SEQ ID NO: 2853 - protein, 16 aa, Homo sapiens
CAREEYDYSLGALDIW

SEQ ID NO: 2854 - protein, 16 aa, Homo sapiens
CAKESGITTPEGFDYW

SEQ ID NO: 2855 - protein, 12 aa, Homo sapiens
CQSTDSSGSWLF

SEQ ID NO: 2856 - protein, 15 aa, Homo sapiens
CAKDTYYDSSGVDYW

SEQ ID NO: 2857 - protein, 17 aa, Homo sapiens
CVREGLSSKWNGYFHHW

SEQ ID NO: 2858 - protein, 18 aa, Homo sapiens
CVREGSGSSASGTGFDYW

SEQ ID NO: 2859 - protein, 13 aa, Homo sapiens
CQSYDWGLSGWAF

SEQ ID NO: 2860 - protein, 18 aa, Homo sapiens
CARDVLSPSSWQYYFDYW

SEQ ID NO: 2861 - protein, 22 aa, Homo sapiens
CARAFPRRLEREAWRGGWFDPW

SEQ ID NO: 2862 - protein, 13 aa, Homo sapiens
CQSADTIGAEMFF

SEQ ID NO: 2863 - protein, 16 aa, Homo sapiens
CARDGYSYGSDGMDVW

SEQ ID NO: 2864 - protein, 25 aa, Homo sapiens
CAKCQVPAAMSNLDDFYYYHGMDVW

SEQ ID NO: 2865 - protein, 19 aa, Homo sapiens
CAKDSYGSGSYYRASLDYW

SEQ ID NO: 2866 - protein, 17 aa, Homo sapiens
CAKDLYGSGSYYPSDYW

SEQ ID NO: 2867 - protein, 24 aa, Homo sapiens
CAKMPGDPYSSGWPALYYYGMDVW

SEQ ID NO: 2868 - protein, 18 aa, Homo sapiens
CASRFRSSGTTGNYFGPW

SEQ ID NO: 2869 - protein, 21 aa, Homo sapiens
CARDQANYYDSSGYLNWFDPW

SEQ ID NO: 2870 - protein, 20 aa, Homo sapiens
CAKAPLEYCSGGTCYPFDYW

SEQ ID NO: 2871 - protein, 14 aa, Homo sapiens
CARHPNWALDLDYW

SEQ ID NO: 2872 - protein, 26 aa, Homo sapiens
CAKDREVLMVYAEAFGIYYYYGMDVW

SEQ ID NO: 2873 - protein, 19 aa, Homo sapiens
CTTLMWCSGDCYRSYFDYW

SEQ ID NO: 2874 - protein, 15 aa, Homo sapiens
CARAPLDNPGGNDYW

SEQ ID NO: 2875 - protein, 16 aa, Homo sapiens
CARLYFHETSGYVDYW

SEQ ID NO: 2876 - protein, 19 aa, Homo sapiens
CATEKFCPEEESCYSFDPW

SEQ ID NO: 2877 - protein, 15 aa, Homo sapiens
CAKDLSPSYGPLDYW

SEQ ID NO: 2878 - protein, 15 aa, Homo sapiens
CAKLVSSYSGANDYW

SEQ ID NO: 2879 - protein, 23 aa, Homo sapiens
CAREIRSSGWAGSPNSDNWFDPW

SEQ ID NO: 2880 - protein, 22 aa, Homo sapiens
CARILTFYGPGSEYYSGTIDYW

SEQ ID NO: 2881 - protein, 19 aa, Homo sapiens
CAKPNRITMIVSPDAFDIW

SEQ ID NO: 2882 - protein, 17 aa, Homo sapiens
CARARFCGGVTCYSDFW

SEQ ID NO: 2883 - protein, 20 aa, Homo sapiens
CAKDPFRYCSGGSCSYFDYW

SEQ ID NO: 2884 - protein, 22 aa, Homo sapiens
CARHAAPYYYDSSGYRSWFDPW

SEQ ID NO: 2885 - protein, 17 aa, Homo sapiens
CVKRLFIAGASHGFDIW

SEQ ID NO: 2886 - protein, 18 aa, Homo sapiens
CARGRLGRDNWNYVFDYW

SEQ ID NO: 2887 - protein, 16 aa, Homo sapiens
CAKDALPYGSGLYDYW

SEQ ID NO: 2888 - protein, 20 aa, Homo sapiens
CARIRLSDSSGYYVVDFDYW

SEQ ID NO: 2889 - protein, 14 aa, Homo sapiens
CAVWDDSLSVDWLF

SEQ ID NO: 2890 - protein, 14 aa, Homo sapiens
CARLYSGYDLGDYW

SEQ ID NO: 2891 - protein, 24 aa, Homo sapiens
CARDSDYGDYGGTDYYYYYGMDVW

SEQ ID NO: 2892 - protein, 15 aa, Homo sapiens
CARQKPNSYWAFDYW

SEQ ID NO: 2893 - protein, 16 aa, Homo sapiens
CAKDILPGIAVAGDYW

SEQ ID NO: 2894 - protein, 17 aa, Homo sapiens
CAKERWDTRTSYYLDSW

SEQ ID NO: 2895 - protein, 18 aa, Homo sapiens
CVHSDILGGYSISLFDYW

SEQ ID NO: 2896 - protein, 17 aa, Homo sapiens
CARTHGYSYGTPYFDYW

SEQ ID NO: 2897 - protein, 16 aa, Homo sapiens
CAKLPVWDSSGYNDYW

SEQ ID NO: 2898 - protein, 18 aa, Homo sapiens
CARVHYYDSSGYPRIDYW

SEQ ID NO: 2899 - protein, 17 aa, Homo sapiens
CAKVGGSGYYAYYVDSW

SEQ ID NO: 2900 - protein, 16 aa, Homo sapiens
CARSDVLTGKDAFDIW

SEQ ID NO: 2901 - protein, 22 aa, Homo sapiens
CAKETPSYYYDSSGYHGAFDYW

SEQ ID NO: 2902 - protein, 16 aa, Homo sapiens
CAKDIDVEMATILDYW

SEQ ID NO: 2903 - protein, 24 aa, Homo sapiens
CAKDFFLRDYVWGSQGSLDAFDIW

SEQ ID NO: 2904 - protein, 21 aa, Homo sapiens
CARGYYDSSGYIYYYYGMDVW

SEQ ID NO: 2905 - protein, 14 aa, Homo sapiens
CARRGLITSAFHVW

SEQ ID NO: 2906 - protein, 17 aa, Homo sapiens
CVKDKPDASAFDAFDFW

SEQ ID NO: 2907 - protein, 18 aa, Homo sapiens
CAKDVEEDYGDSQRFEYW

SEQ ID NO: 2908 - protein, 26 aa, Homo sapiens
CARDVRSCSGSICYSRTYYYYGVDVW

SEQ ID NO: 2909 - protein, 21 aa, Homo sapiens
CARDERGQTRITGTTTYFDYW

SEQ ID NO: 2910 - protein, 13 aa, Homo sapiens [sequence omitted]

SEQ ID NO: 2911 - protein, 18 aa, Homo sapiens
CARDLLRYFEWLGAFDIW

SEQ ID NO: 2912 - protein, 11 aa, Homo sapiens
CVRDRLRFDSW

SEQ ID NO: 2913 - protein, 19 aa, Homo sapiens
CTTDRRPYHYDTSGYFSAW

SEQ ID NO: 2914 - protein, 20 aa, Homo sapiens
CAKADRPSITMIVVVTSDYW

SEQ ID NO: 2915 - protein, 16 aa, Homo sapiens
CAKEVITMVRGGPDYW

SEQ ID NO: 2916 - protein, 17 aa, Homo sapiens
CAGDILTGYYSYGMDVW

SEQ ID NO: 2917 - protein, 19 aa, Homo sapiens
CAVFDFEIEAGGRKWFDPW

SEQ ID NO: 2918 - protein, 17 aa, Homo sapiens
CAKMSRQAASTYYFDSW

SEQ ID NO: 2919 - protein, 14 aa, Homo sapiens
CAKVDIVATITDYW

SEQ ID NO: 2920 - protein, 16 aa, Homo sapiens
CARERRELLRSGFDIW

SEQ ID NO: 2921 - protein, 18 aa, Homo sapiens
CAKDILGIVGATTLFDYW

SEQ ID NO: 2922 - protein, 14 aa, Homo sapiens
CAKDITIWDGMDVW

SEQ ID NO: 2923 - protein, 16 aa, Homo sapiens
CAKDGSGWYSGAFDIW

SEQ ID NO: 2924 - protein, 19 aa, Homo sapiens
CARHEASARLFNPFYFDSW

SEQ ID NO: 2925 - protein, 15 aa, Homo sapiens
CARGSVGASGRIDYW

SEQ ID NO: 2926 - protein, 20 aa, Homo sapiens
CAKDSSNYDILTGYSSFDYW

SEQ ID NO: 2927 - protein, 17 aa, Homo sapiens
CARERVTVTTLGWFDIW

SEQ ID NO: 2928 - protein, 24 aa, Homo sapiens
CATLGYCSGGSCPGSDGAHNFDYW

SEQ ID NO: 2929 - protein, 18 aa, Homo sapiens
CAGYCTGGVCPGGSFDFW

SEQ ID NO: 2930 - protein, 19 aa, Homo sapiens
CARDRRIQLWLGPGWFDPW

SEQ ID NO: 2931 - protein, 20 aa, Homo sapiens
CARYSSDDARGYSYGYESYW

SEQ ID NO: 2932 - protein, 13 aa, Homo sapiens
CQSADIDGTRYIF

SEQ ID NO: 2933 - protein, 19 aa, Homo sapiens
CARGGTESFYGDLGFFDYW

SEQ ID NO: 2934 - protein, 15 aa, Homo sapiens
CASTFSYYYYGVDVW

SEQ ID NO: 2935 - protein, 26 aa, Homo sapiens
CAKDTRYYDILTGYYNWDYYYGMDVW

SEQ ID NO: 2936 - protein, 19 aa, Homo sapiens
CAKSFDYGSESNYVTFDQW

SEQ ID NO: 2937 - protein, 15 aa, Homo sapiens
CAKNLRNQMPYYEYW

SEQ ID NO: 2938 - protein, 18 aa, Homo sapiens
CARVGSYGYPYYYGLDVW

SEQ ID NO: 2939 - protein, 22 aa, Homo sapiens
CARDDGSFYDTFNGPFQWLDPW

SEQ ID NO: 2940 - protein, 16 aa, Homo sapiens
CTRDCLTHSCARFDYW

SEQ ID NO: 2941 - protein, 13 aa, Homo sapiens
CMQGTHWPPLLAF

SEQ ID NO: 2942 - protein, 20 aa, Homo sapiens
CALRRVPVGGTGAFPEFDPW

SEQ ID NO: 2943 - protein, 18 aa, Homo sapiens
CVADMITFGAGGYYFDYW

SEQ ID NO: 2944 - protein, 19 aa, Homo sapiens
CAKGLYDSSGYSLEAFDIW

SEQ ID NO: 2945 - protein, 16 aa, Homo sapiens
CATYARPGGSNWFDSW

SEQ ID NO: 2946 - protein, 17 aa, Homo sapiens
CAKGAGPVGAMDGIDYW

SEQ ID NO: 2947 - protein, 13 aa, Homo sapiens
CARSYYSNYFHYW

SEQ ID NO: 2948 - protein, 15 aa, Homo sapiens
CKIGAFENGAHSDYW

SEQ ID NO: 2949 - protein, 20 aa, Homo sapiens
CARDPSGHVTGWSPTYFDYW

SEQ ID NO: 2950 - protein, 22 aa, Homo sapiens
CARDRRGYCSGGSCYSGFIDYW

SEQ ID NO: 2951 - protein, 20 aa, Homo sapiens
CAKDSQYYYDSSGYYGADYW

SEQ ID NO: 2952 - protein, 15 aa, Homo sapiens
CARGSRNYRDSLDIW

SEQ ID NO: 2953 - protein, 15 aa, Homo sapiens
CARDDFGVHDSFDIW

SEQ ID NO: 2954 - protein, 34 aa, Homo sapiens
CALPILNSLRVEDTGLYFCVKDFRPLMSPTFDHW

SEQ ID NO: 2955 - protein, 16 aa, Homo sapiens
CSGGSCHSYYYGMDVW

SEQ ID NO: 2956 - protein, 15 aa, Homo sapiens
CARQWWLHMYYFDYW

SEQ ID NO: 2957 - protein, 13 aa, Homo sapiens [sequence omitted]

SEQ ID NO: 2958 - protein, 12 aa, Homo sapiens
CARDSYNGFDVW

SEQ ID NO: 2959 - protein, 18 aa, Homo sapiens
CARLGYSAGWYTPIGDYW

SEQ ID NO: 2960 - protein, 17 aa, Homo sapiens
CAKLPVASGWNDAFDIW

SEQ ID NO: 2961 - protein, 16 aa, Homo sapiens
CARDDSARGYWFFDFW

SEQ ID NO: 2962 - protein, 17 aa, Homo sapiens
CAKTQQEAVAGPPFDYW

SEQ ID NO: 2963 - protein, 15 aa, Homo sapiens
CAKDRVPAAGPLDYW

SEQ ID NO: 2964 - protein, 21 aa, Homo sapiens
CARDGAYYLGSSGFYYYFDYW

SEQ ID NO: 2965 - protein, 15 aa, Homo sapiens
CAREYDSSGPWFDYW

SEQ ID NO: 2966 - protein, 14 aa, Homo sapiens
CGRRLSRPASFDYW

SEQ ID NO: 2967 - protein, 17 aa, Homo sapiens
CARVRFEDYYYYGMDVW

SEQ ID NO: 2968 - protein, 20 aa, Homo sapiens
CAKDSQHLYYDSSAGWFDPW

SEQ ID NO: 2969 - protein, 20 aa, Homo sapiens
CARQKYSSSWNLGEDWFDPW

SEQ ID NO: 2970 - protein, 9 aa, Homo sapiens
CHQRGNWPF

SEQ ID NO: 2971 - protein, 27 aa, Homo sapiens
CLRAEDTALYYCAKDSYYDSWDWFDPW

SEQ ID NO: 2972 - protein, 17 aa, Homo sapiens
CARGYYPGDGYNLFDYW

SEQ ID NO: 2973 - protein, 20 aa, Homo sapiens
CAKDSGDYYGSGHHGPLDYW

SEQ ID NO: 2974 - protein, 18 aa, Homo sapiens
CTTGNSFSDYGSSYYDFW

SEQ ID NO: 2975 - protein, 13 aa, Homo sapiens
CASGSSDNWFDPW

SEQ ID NO: 2976 - protein, 17 aa, Homo sapiens
CAKFGSSYYDSSGPDYW

SEQ ID NO: 2977 - protein, 15 aa, Homo sapiens
CARRLVGANHAFDLW

SEQ ID NO: 2978 - protein, 18 aa, Homo sapiens
CARDDLDNRGYPNWFDPW

SEQ ID NO: 2979 - protein, 15 aa, Homo sapiens
CATDFYDGTDYADYW

SEQ ID NO: 2980 - protein, 17 aa, Homo sapiens
CAHLPFHLGNLSPFDYW

SEQ ID NO: 2981 - protein, 14 aa, Homo sapiens
CAKVAYYDSNFDYW

SEQ ID NO: 2982 - protein, 18 aa, Homo sapiens
CVKDMGAPGDYSGYFDYW

SEQ ID NO: 2983 - protein, 18 aa, Homo sapiens
CAREFMTLVGATPEFDYW

SEQ ID NO: 2984 - protein, 14 aa, Homo sapiens
CAKVDGGYGGFDYW

SEQ ID NO: 2985 - protein, 21 aa, Homo sapiens
CAKVDSYCSGGSCYSEGFDYW

SEQ ID NO: 2986 - protein, 26 aa, Homo sapiens
CARDNGGVFLTGYSPTYYYYYGMDVW

SEQ ID NO: 2987 - protein, 19 aa, Homo sapiens
CARDGIVYGDYQDSFFDLW

SEQ ID NO: 2988 - protein, 22 aa, Homo sapiens
CARDGDSYHRYTWNYVDYFAYW

SEQ ID NO: 2989 - protein, 22 aa, Homo sapiens
CASCRICSSTSCYGLDNWFDPW

SEQ ID NO: 2990 - protein, 20 aa, Homo sapiens
CAKGYGSGSYAIYYYGMDVW

SEQ ID NO: 2991 - protein, 17 aa, Homo sapiens
CARDGEVRGIISSFDYW

SEQ ID NO: 2992 - protein, 17 aa, Homo sapiens
CAKVGGILTGSDAFDIW

SEQ ID NO: 2993 - protein, 11 aa, Homo sapiens
CQEYGSSSFVF

SEQ ID NO: 2994 - protein, 20 aa, Homo sapiens
CARHGSGILWFGELPFCDYW

SEQ ID NO: 2995 - protein, 18 aa, Homo sapiens
CARLQDETRSRIMEGDYW

SEQ ID NO: 2996 - protein, 18 aa, Homo sapiens
CARDRHGSAYSNNWFDPW

SEQ ID NO: 2997 - protein, 13 aa, Homo sapiens
CHVWVSSTAWGVF

SEQ ID NO: 2998 - protein, 17 aa, Homo sapiens
CAKADDYAQQRGAFDIW

SEQ ID NO: 2999 - protein, 18 aa, Homo sapiens
CARRSYDVLSGSYYFDYW

SEQ ID NO: 3000 - protein, 17 aa, Homo sapiens
CARPDYYGSGRRTFDIW

SEQ ID NO: 3001 - protein, 16 aa, Homo sapiens
CAKDRKVVIQLELDYW

SEQ ID NO: 3002 - protein, 14 aa, Homo sapiens
CGRGQSGYTYIDHW

SEQ ID NO: 3003 - protein, 19 aa, Homo sapiens
CARLGRGTTHYYYYGMDVW

SEQ ID NO: 3004 - protein, 17 aa, Homo sapiens
CAREFYSEKTGWYFDLW

SEQ ID NO: 3005 - protein, 17 aa, Homo sapiens
CAKEEGPPAVAGGFDYW

SEQ ID NO: 3006 - protein, 19 aa, Homo sapiens
CARRPPHNGDYRRGAFDIW

SEQ ID NO: 3007 - protein, 18 aa, Homo sapiens
CTTSRGQWFGESWIFDYW

SEQ ID NO: 3008 - protein, 14 aa, Homo sapiens
CARVEGGDYHFDYW

SEQ ID NO: 3009 - protein, 21 aa, Homo sapiens
CATLTGYSSSWYYYYYGMDVW

SEQ ID NO: 3010 - protein, 16 aa, Homo sapiens
CTTDPVWYNWNDDDYW

SEQ ID NO: 3011 - protein, 17 aa, Homo sapiens
CASGCTMTSCHTYFDPW

SEQ ID NO: 3012 - protein, 19 aa, Homo sapiens
CARLTAEGSSPSWGWFDPW

SEQ ID NO: 3013 - protein, 18 aa, Homo sapiens
CTRSRQYTGGWYNYLDYW

SEQ ID NO: 3014 - protein, 19 aa, Homo sapiens
CARQRGFITMVRGNYFDYW

SEQ ID NO: 3015 - protein, 19 aa, Homo sapiens
CAHSPGPESSSWKRAFDIW

SEQ ID NO: 3016 - protein, 17 aa, Homo sapiens
CAKDHDSNGYYCYFDYW

SEQ ID NO: 3017 - protein, 15 aa, Homo sapiens
CAKEMFPSLSGVDYW

SEQ ID NO: 3018 - protein, 17 aa, Homo sapiens
CAFVHNSTTWYGGFDSW

SEQ ID NO: 3019 - protein, 15 aa, Homo sapiens
CAKGSSVVTAITDYW

SEQ ID NO: 3020 - protein, 14 aa, Homo sapiens
CNSRDSGGHHLVIF

SEQ ID NO: 3021 - protein, 20 aa, Homo sapiens
CARHDYGSVRGVIISWFDPW

SEQ ID NO: 3022 - protein, 11 aa, Homo sapiens
CQHYSSYPLSF

SEQ ID NO: 3023 - protein, 18 aa, Homo sapiens
CARSPGIAARGTNYFDYW

SEQ ID NO: 3024 - protein, 16 aa, Homo sapiens
CARALYDSSGYYWGYW

SEQ ID NO: 3025 - protein, 21 aa, Homo sapiens
CAKDIGIAVAGDYYYYGMDVW

SEQ ID NO: 3026 - protein, 21 aa, Homo sapiens
CAKDQIAAAGTPPYYYGMDVW

SEQ ID NO: 3027 - protein, 16 aa, Homo sapiens
CAKDLPVVPAAPFDYW

SEQ ID NO: 3028 - protein, 15 aa, Homo sapiens
CARSRSGSGTHFDFW

SEQ ID NO: 3029 - protein, 21 aa, Homo sapiens
CAGGRPSYYDMLTGHNWFDPW

SEQ ID NO: 3030 - protein, 11 aa, Homo sapiens
CLQYYFTPQSF

SEQ ID NO: 3031 - protein, 22 aa, Homo sapiens
CARDFGDNDSSGYYFPHWFDPW

SEQ ID NO: 3032 - protein, 15 aa, Homo sapiens
CATYSSTYYYAFDVW

SEQ ID NO: 3033 - protein, 18 aa, Homo sapiens
CAKYARESYYYYYAMDVW

SEQ ID NO: 3034 - protein, 23 aa, Homo sapiens
CARVEDIYCSGGTCYPYNWFDPW

SEQ ID NO: 3035 - protein, 15 aa, Homo sapiens
CAKEMDGAGTVFDYW

SEQ ID NO: 3036 - protein, 17 aa, Homo sapiens
CARYSSPGRYYYGMDVW

SEQ ID NO: 3037 - protein, 17 aa, Homo sapiens
CAKDAFGSGSPSWFDPW

SEQ ID NO: 3038 - protein, 13 aa, Homo sapiens
CSSRDSSGDLVLF

SEQ ID NO: 3039 - protein, 26 aa, Homo sapiens
CAGPHDIHALLMHWGVGIYYYGMDVW

SEQ ID NO: 3040 - protein, 21 aa, Homo sapiens
CARSVPYYYDSSPHDWYFDLW

SEQ ID NO: 3041 - protein, 15 aa, Homo sapiens
CARDAGLIAAALDYW

SEQ ID NO: 3042 - protein, 18 aa, Homo sapiens
CARGGDSSGYLYNWFDPW

SEQ ID NO: 3043 - protein, 22 aa, Homo sapiens
CARASPGTYCRSSNCRNWFDSW

SEQ ID NO: 3044 - protein, 20 aa, Homo sapiens
CARVTSGYSSGLSYNWFDPW

SEQ ID NO: 3045 - protein, 14 aa, Homo sapiens
CAKAGILPGRFDYW

SEQ ID NO: 3046 - protein, 15 aa, Homo sapiens
CARVGNSFYYYFDEW

SEQ ID NO: 3047 - protein, 19 aa, Homo sapiens
CAKGILGIAAAGTGFFDYW

SEQ ID NO: 3048 - protein, 17 aa, Homo sapiens
CARYSYDSRGYYFFDSW

SEQ ID NO: 3049 - protein, 15 aa, Homo sapiens
CTREPSATDYYFDYW

SEQ ID NO: 3050 - protein, 19 aa, Homo sapiens
CATVDTAMDTYYYYGMDVW

SEQ ID NO: 3051 - protein, 17 aa, Homo sapiens
CASHRILYYDSSVFDYW

SEQ ID NO: 3052 - protein, 19 aa, Homo sapiens
CAKGVYDSSGYYSSAFGYW

SEQ ID NO: 3053 - protein, 21 aa, Homo sapiens
CARGGCSGGSCYWGGTWLDPW

SEQ ID NO: 3054 - protein, 19 aa, Homo sapiens
CTTAPRDYVWGSYRQWDYW

SEQ ID NO: 3055 - protein, 16 aa, Homo sapiens
CAREPGQWRGGWFDPW

SEQ ID NO: 3056 - protein, 16 aa, Homo sapiens
CAKLPFGELLNWFDPW

SEQ ID NO: 3057 - protein, 23 aa, Homo sapiens
CTRGTPRLNFYDTSGENDAFDIW

SEQ ID NO: 3058 - protein, 23 aa, Homo sapiens
CARDIVHYDSSGYYNYYYGMDVW

SEQ ID NO: 3059 - protein, 24 aa, Homo sapiens
CAKGKFESEGYCSSSSCSFFFDYW

SEQ ID NO: 3060 - protein, 21 aa, Homo sapiens
CARLYYYDSSGYSPPSAFDIW

SEQ ID NO: 3061 - protein, 19 aa, Homo sapiens
CVKGSSRLYDSSGYYFENW

SEQ ID NO: 3062 - protein, 15 aa, Homo sapiens
CARDPLLVPGAFDIW

SEQ ID NO: 3063 - protein, 18 aa, Homo sapiens
CAKDIWPLMGIAAAFDYW

SEQ ID NO: 3064 - protein, 28 aa, Homo sapiens
CARDPNCSSARCYGPKSRIYYYYGFDVW

SEQ ID NO: 3065 - protein, 13 aa, Homo sapiens
CARSSGGASFHYW

SEQ ID NO: 3066 - protein, 18 aa, Homo sapiens
CAKASYPILNWGGAFDIW

SEQ ID NO: 3067 - protein, 20 aa, Homo sapiens
CARDASRGSYYDSTGYSDYW

SEQ ID NO: 3068 - protein, 11 aa, Homo sapiens
CQAWDNSFAFF

SEQ ID NO: 3069 - protein, 12 aa, Homo sapiens
CQQHDNEPRNSF

SEQ ID NO: 3070 - protein, 25 aa, Homo sapiens
CARQNEDGSVSYYNDYYYYYGMDVW

SEQ ID NO: 3071 - protein, 17 aa, Homo sapiens
CAKLTSIAASDDSSDYW

SEQ ID NO: 3072 - protein, 16 aa, Homo sapiens
CAKSPHSYGSSLYDYW

SEQ ID NO: 3073 - protein, 16 aa, Homo sapiens
CAKGRDPSTTSLFDYW

SEQ ID NO: 3074 - protein, 17 aa, Homo sapiens
CARDRGGRGTTDGMDVW

SEQ ID NO: 3075 - protein, 18 aa, Homo sapiens
CATASLFYDRSDYYFDYW

SEQ ID NO: 3076 - protein, 21 aa, Homo sapiens
CAKDSLQRWLQFENPNWFDPW

SEQ ID NO: 3077 - protein, 17 aa, Homo sapiens
CARDAGIVGAHNWFDPW

SEQ ID NO: 3078 - protein, 16 aa, Homo sapiens
CAREVSTTAQSGFDIW

SEQ ID NO: 3079 - protein, 17 aa, Homo sapiens
CAKDLGYSSSRGPFDYW

SEQ ID NO: 3080 - protein, 16 aa, Homo sapiens
CAKGQTGSTGSASDYW

SEQ ID NO: 3081 - protein, 18 aa, Homo sapiens
CAKMGEYYYDSSGYSDYW

SEQ ID NO: 3082 - protein, 21 aa, Homo sapiens
CATDRDSCNGGRNCYSAFEYW

SEQ ID NO: 3083 - protein, 12 aa, Homo sapiens
CFGGNPDAFDIW

SEQ ID NO: 3084 - protein, 17 aa, Homo sapiens
CARAQYGSGFLGWVDPW

SEQ ID NO: 3085 - protein, 19 aa, Homo sapiens
CAREWCSSSSCDSNWFDPW

SEQ ID NO: 3086 - protein, 13 aa, Homo sapiens
CVRHELTGDFDFW

SEQ ID NO: 3087 - protein, 14 aa, Homo sapiens
CAKASPADPYFDYW

SEQ ID NO: 3088 - protein, 19 aa, Homo sapiens
CAKSTHTYYDILTGGFDYW

SEQ ID NO: 3089 - protein, 22 aa, Homo sapiens
CAKGSYYDYVWGSYRQNWFDPW

SEQ ID NO: 3090 - protein, 15 aa, Homo sapiens
CGRVDDSRAYRIDYW

SEQ ID NO: 3091 - protein, 18 aa, Homo sapiens
CAKDTESDSTPLGAFNIW

SEQ ID NO: 3092 - protein, 21 aa, Homo sapiens
CARNLLRYFDWLFRGNWFDPW

SEQ ID NO: 3093 - protein, 20 aa, Homo sapiens
CAREGYRGWSTRSNGAFDMW

SEQ ID NO: 3094 - protein, 17 aa, Homo sapiens
CAKVLRYFDWPYAFDIW

SEQ ID NO: 3095 - protein, 18 aa, Homo sapiens
CAKDDFAFGEPAGYFVDW

SEQ ID NO: 3096 - protein, 19 aa, Homo sapiens
CARRSSSWYGTPGDWFDPW

SEQ ID NO: 3097 - protein, 16 aa, Homo sapiens
CARASRYFDWWAFDYW

SEQ ID NO: 3098 - protein, 21 aa, Homo sapiens
CARESGYYYDSSGYQYYFDYW

SEQ ID NO: 3099 - protein, 19 aa, Homo sapiens
CAKDAGYCRNSRCEGIDYW

SEQ ID NO: 3100 - protein, 19 aa, Homo sapiens
CVKDVVLRYYDKLTYFGSW

SEQ ID NO: 3101 - protein, 19 aa, Homo sapiens
CAKLLRASSGWHGDYFDYW

SEQ ID NO: 3102 - protein, 19 aa, Homo sapiens
CAKDSPSYSSSWYAWFDPW

SEQ ID NO: 3103 - protein, 24 aa, Homo sapiens
CARTTMSPTSYDFWSGYPNWFDPW

SEQ ID NO: 3104 - protein, 18 aa, Homo sapiens
CTKGRHKYDYLTRYYEYW

SEQ ID NO: 3105 - protein, 16 aa, Homo sapiens
CANMYMIRGVSPFDYW

SEQ ID NO: 3106 - protein, 24 aa, Homo sapiens
CAKDLDIVVVVAATRYYYYGMDVW

SEQ ID NO: 3107 - protein, 10 aa, Homo sapiens
CQQVNNNPVF

SEQ ID NO: 3108 - protein, 24 aa, Homo sapiens
CARTDHPEENYYESSGYYYYFDYW

SEQ ID NO: 3109 - protein, 20 aa, Homo sapiens
CARDGESSGQQLAYLKFDYW

SEQ ID NO: 3110 - protein, 21 aa, Homo sapiens
CARGGSSSWYDPYYYYGMDVW

SEQ ID NO: 3111 - protein, 19 aa, Homo sapiens
CARLWSGYSYGSYDAFDIW

SEQ ID NO: 3112 - protein, 15 aa, Homo sapiens
CARSSTDSPGAFDVW

SEQ ID NO: 3113 - protein, 16 aa, Homo sapiens
CAKVGYSYGDDFYDYW

SEQ ID NO: 3114 - protein, 18 aa, Homo sapiens
CVKDMAPMHIAGKGFDIW

SEQ ID NO: 3115 - protein, 15 aa, Homo sapiens
CAREPYIGGPYFDYW

SEQ ID NO: 3116 - protein, 20 aa, Homo sapiens
CARGWTTLLTDRRFDAFDIW

SEQ ID NO: 3117 - protein, 23 aa, Homo sapiens
CARDTTDKNYYDSSGEDEGFDPW

SEQ ID NO: 3118 - protein, 16 aa, Homo sapiens
CARDGDSYGYLPLDYW

SEQ ID NO: 3119 - protein, 17 aa, Homo sapiens
CARGHTPYRGVTLFDSW

SEQ ID NO: 3120 - protein, 20 aa, Homo sapiens
CAKEIDYYDSSGYRNWFDPW

SEQ ID NO: 3121 - protein, 14 aa, Homo sapiens
CAKATAVTTLFDCW

SEQ ID NO: 3122 - protein, 23 aa, Homo sapiens
CARDLLLGYCSSTSCSRGWFDPW

SEQ ID NO: 3123 - protein, 17 aa, Homo sapiens
CARDVHDYGSWDAFDIW

SEQ ID NO: 3124 - protein, 18 aa, Homo sapiens
CVKDLDDDDSSEGGFDHW

SEQ ID NO: 3125 - protein, 14 aa, Homo sapiens
CARGDSRGFYFESW

SEQ ID NO: 3126 - protein, 14 aa, Homo sapiens
CARRSYGDSNLDYW

SEQ ID NO: 3127 - protein, 16 aa, Homo sapiens
CARPVTTVTYWYFDLW

SEQ ID NO: 3128 - protein, 29 aa, Homo sapiens
CARDNYTNDHSSGWFGLFAVQPISAIDYW

SEQ ID NO: 3129 - protein, 20 aa, Homo sapiens
CATLESDYYDSSGPNWFDPW

SEQ ID NO: 3130 - protein, 16 aa, Homo sapiens
CARTINYYGSGSPDYW

SEQ ID NO: 3131 - protein, 13 aa, Homo sapiens
CQQFGTSPPMYSF

SEQ ID NO: 3132 - protein, 13 aa, Homo sapiens
CAKDQTLDAFDIW

SEQ ID NO: 3133 - protein, 15 aa, Homo sapiens
CAKATGDYNTEFDYW

SEQ ID NO: 3134 - protein, 19 aa, Homo sapiens
CARSAHQWLIQRGGYFDLW

SEQ ID NO: 3135 - protein, 18 aa, Homo sapiens
CARFYFVVVSREYYFDYW

SEQ ID NO: 3136 - protein, 17 aa, Homo sapiens
CAREWKNSYGVTFFDYW

SEQ ID NO: 3137 - protein, 13 aa, Homo sapiens
CARDESSGYGYYW

SEQ ID NO: 3138 - protein, 18 aa, Homo sapiens
CARGPDFDRSGYYYVGYW

SEQ ID NO: 3139 - protein, 12 aa, Homo sapiens
CQQYDPLFPFNF

SEQ ID NO: 3140 - protein, 17 aa, Homo sapiens
CAKDISRSGSFNWFDPW

SEQ ID NO: 3141 - protein, 18 aa, Homo sapiens
CVVSGGAIWYWYYGMDVW

SEQ ID NO: 3142 - protein, 18 aa, Homo sapiens
CARGGTHIVGAIPSFDYW

SEQ ID NO: 3143 - protein, 21 aa, Homo sapiens
CARGLGHCSGGTCYVHPFDIW

SEQ ID NO: 3144 - protein, 16 aa, Homo sapiens
CARSWNDYGGNGLDYW

SEQ ID NO: 3145 - protein, 15 aa, Homo sapiens
CAKDASPVATGPDYW

SEQ ID NO: 3146 - protein, 15 aa, Homo sapiens
CAKVPYGSGVAGDYW

SEQ ID NO: 3147 - protein, 16 aa, Homo sapiens
CTTVYSSSWYWYFDLW

SEQ ID NO: 3148 - protein, 12 aa, Homo sapiens
CANLGSGPGDYW

SEQ ID NO: 3149 - protein, 24 aa, Homo sapiens
CARLRTQLDTAMKPYYYYYGMDVW

SEQ ID NO: 3150 - protein, 22 aa, Homo sapiens
CARVPPQNPWGHLYYYYGLDVW

SEQ ID NO: 3151 - protein, 15 aa, Homo sapiens
CAKASFDYGDLGDYW

SEQ ID NO: 3152 - protein, 19 aa, Homo sapiens
CARTFSQNYYGSGSYLDFW

SEQ ID NO: 3153 - protein, 12 aa, Homo sapiens
CARDAQASADYW

SEQ ID NO: 3154 - protein, 15 aa, Homo sapiens
CQSYDSSLGGLHVIF

SEQ ID NO: 3155 - protein, 17 aa, Homo sapiens
CARMICDDYRCPPFDSW

SEQ ID NO: 3156 - protein, 30 aa, Homo sapiens
CALPICLRAEDTALYYCANLVMATRGGDYW

SEQ ID NO: 3157 - protein, 21 aa, Homo sapiens
CARNKGSTGIRDPMNRWFDPW

SEQ ID NO: 3158 - protein, 17 aa, Homo sapiens
CAKDLSSWEPHSLFDYW

SEQ ID NO: 3159 - protein, 19 aa, Homo sapiens
CAHIDLLRGVLKGFYFDYW

SEQ ID NO: 3160 - protein, 16 aa, Homo sapiens
CAAWASGSYSPWFDPW

SEQ ID NO: 3161 - protein, 17 aa, Homo sapiens
CARYNWNDVSSPRFDYW

SEQ ID NO: 3162 - protein, 20 aa, Homo sapiens
CVRVDHCDRGICYYYGMDVW

SEQ ID NO: 3163 - protein, 19 aa, Homo sapiens
CAKDLVATGYSYGYLFDYW

SEQ ID NO: 3164 - protein, 20 aa, Homo sapiens
CARGTYYDFWSGFPYYFDYW

SEQ ID NO: 3165 - protein, 18 aa, Homo sapiens
CARLPRYYDSSGWYFDYW

SEQ ID NO: 3166 - protein, 15 aa, Homo sapiens
CQQYNDFSGGYSGAF

SEQ ID NO: 3167 - protein, 16 aa, Homo sapiens
CATDIPQDYYYGMDVW

SEQ ID NO: 3168 - protein, 25 aa, Homo sapiens
CARASYPSPGLWCSSTSCPHWFDPW

SEQ ID NO: 3169 - protein, 13 aa, Homo sapiens [sequence omitted]

SEQ ID NO: 3170 - protein, 17 aa, Homo sapiens
CARQYSSSQGYYYLDVW

SEQ ID NO: 3171 - protein, 15 aa, Homo sapiens
CQTYDRSLSGGSWVF

SEQ ID NO: 3172 - protein, 13 aa, Homo sapiens
CQQSYSIGQLSTF

SEQ ID NO: 3173 - protein, 17 aa, Homo sapiens
CARASYYSSGWYAFDYW

SEQ ID NO: 3174 - protein, 19 aa, Homo sapiens
CARDVLPGTAARGDAFDLW

SEQ ID NO: 3175 - protein, 17 aa, Homo sapiens
CAKDSKYSNSFGWFDPW

SEQ ID NO: 3176 - protein, 15 aa, Homo sapiens
CARDKVGGWLGLDYW

SEQ ID NO: 3177 - protein, 19 aa, Homo sapiens
CARGSRLLTGYLGTYFDYW

SEQ ID NO: 3178 - protein, 17 aa, Homo sapiens
CVSTFTIIVVDEAFDIW

SEQ ID NO: 3179 - protein, 16 aa, Homo sapiens
CAKDTDYDMLYWFDPW

SEQ ID NO: 3180 - protein, 14 aa, Homo sapiens
CAKIGYNGWEFDFW

SEQ ID NO: 3181 - protein, 17 aa, Homo sapiens
CAKLGYDSSGYYSRDYW

SEQ ID NO: 3182 - protein, 20 aa, Homo sapiens
CARMRIRGSGVYRDDAFDFW

SEQ ID NO: 3183 - protein, 17 aa, Homo sapiens
CARNKNYYHTSGYFDSW

SEQ ID NO: 3184 - protein, 14 aa, Homo sapiens
CAALSYGDSAPDYW

SEQ ID NO: 3185 - protein, 14 aa, Homo sapiens
CAKFSSWYSTGDYW

SEQ ID NO: 3186 - protein, 12 aa, Homo sapiens
CAKLAQLAVDYW

SEQ ID NO: 3187 - protein, 19 aa, Homo sapiens
CARAFGDTYYYYYYGMDVW

SEQ ID NO: 3188 - protein, 15 aa, Homo sapiens
CAKEQWLVPNWFDPW

SEQ ID NO: 3189 - protein, 20 aa, Homo sapiens
CARDLAVHKQQLGGYWFDPW

SEQ ID NO: 3190 - protein, 17 aa, Homo sapiens
CAKDDAAGSYGGWIDSW

SEQ ID NO: 3191 - protein, 17 aa, Homo sapiens
CAKDMAPVAGTIAFDYW

SEQ ID NO: 3192 - protein, 25 aa, Homo sapiens
CAKDLKTEMKIFGMLISNHNAFDVW

SEQ ID NO: 3193 - protein, 18 aa, Homo sapiens
CVKSRPQYNWKTAAFDIW

SEQ ID NO: 3194 - protein, 18 aa, Homo sapiens
CAKGSSDYGGNSGAFDVW

SEQ ID NO: 3195 - protein, 20 aa, Homo sapiens
CASSVAPDSSGYYYYLFDYW

SEQ ID NO: 3196 - protein, 19 aa, Homo sapiens
CAKAAGYCSSTSCYSWDYW

SEQ ID NO: 3197 - protein, 14 aa, Homo sapiens
CARGTLITMIADYW

SEQ ID NO: 3198 - protein, 21 aa, Homo sapiens
CARVERDRSRPIYYYYGMDVW

SEQ ID NO: 3199 - protein, 13 aa, Homo sapiens
CMLALETPPLYTF

SEQ ID NO: 3200 - protein, 11 aa, Homo sapiens
CATHRDGMDVW

SEQ ID NO: 3201 - protein, 17 aa, Homo sapiens
CATAPGIAVTGGWFDPW

SEQ ID NO: 3202 - protein, 11 aa, Homo sapiens
CARGGTYNRYW

SEQ ID NO: 3203 - protein, 15 aa, Homo sapiens
CAKGGAVAGTWFDPW

SEQ ID NO: 3204 - protein, 22 aa, Homo sapiens
CARSYDFWSGFYQNYYYGMDVW

SEQ ID NO: 3205 - protein, 13 aa, Homo sapiens
CNSRDRSGNSYVF

SEQ ID NO: 3206 - protein, 15 aa, Homo sapiens
CARERSWGSFSADYW

SEQ ID NO: 3207 - protein, 14 aa, Homo sapiens
CARVDLRCRGFDYW

SEQ ID NO: 3208 - protein, 14 aa, Homo sapiens
CARQGYGDLTFDHW

SEQ ID NO: 3209 - protein, 17 aa, Homo sapiens
CATFEEDGGRWYAFDYW

SEQ ID NO: 3210 - protein, 17 aa, Homo sapiens
CAKDRVWFSYYDAFDIW

SEQ ID NO: 3211 - protein, 13 aa, Homo sapiens
CAGGILWFDIDYW

SEQ ID NO: 3212 - protein, 15 aa, Homo sapiens
CATEFTVTASPFDYW

SEQ ID NO: 3213 - protein, 17 aa, Homo sapiens
CARVEKYYYGSGSYDYW

SEQ ID NO: 3214 - protein, 16 aa, Homo sapiens
CAKDLVGGLMIAFDSW

SEQ ID NO: 3215 - protein, 31 aa, Homo sapiens
CALPICLRSEDTAIYYCAREIRAPRGSFDPW

SEQ ID NO: 3216 - protein, 19 aa, Homo sapiens
CAKSASVGLRLGEYPFDYW

SEQ ID NO: 3217 - protein, 13 aa, Homo sapiens
CSSVATIGVEDYW

SEQ ID NO: 3218 - protein, 22 aa, Homo sapiens
CARPAATWGLGNQYSYYGMDVW

SEQ ID NO: 3219 - protein, 11 aa, Homo sapiens
CASVESAGDYW

SEQ ID NO: 3220 - protein, 18 aa, Homo sapiens
CARDAPLYGDCRDYFEYW

SEQ ID NO: 3221 - protein, 19 aa, Homo sapiens
CAKSPYLDVLTGTTFFDYW

SEQ ID NO: 3222 - protein, 14 aa, Homo sapiens
CVKKSFSDWYFDLW

SEQ ID NO: 3223 - protein, 20 aa, Homo sapiens
CAREPAGSDFDYYFYGMDVW

SEQ ID NO: 3224 - protein, 19 aa, Homo sapiens
CARGLTGRGHYYYYGLDVW

SEQ ID NO: 3225 - protein, 20 aa, Homo sapiens
CARRQRFCSGGSRTCWFDPW

SEQ ID NO: 3226 - protein, 23 aa, Homo sapiens
CAKAGTDGYDSSGYYYRTYFDYW

SEQ ID NO: 3227 - protein, 20 aa, Homo sapiens
CARVSRYGGYGALLSWLDYW

SEQ ID NO: 3228 - protein, 22 aa, Homo sapiens
CARDRAPYCSNGVCYVDAMDVW

SEQ ID NO: 3229 - protein, 25 aa, Homo sapiens
CARERDDYDSSGYYSLTSASWFDPW

SEQ ID NO: 3230 - protein, 24 aa, Homo sapiens
CAKDQLGYCSSTSCYASYNWFDPW

SEQ ID NO: 3231 - protein, 14 aa, Homo sapiens
CASGFGVVTPFDYW

SEQ ID NO: 3232 - protein, 22 aa, Homo sapiens
CARDPLRFLEWLPKLQNWFDPW

SEQ ID NO: 3233 - protein, 15 aa, Homo sapiens
CALGKGYSNMDFDYW

SEQ ID NO: 3234 - protein, 20 aa, Homo sapiens
CARGPNDILTGYLEYYFDSW

SEQ ID NO: 3235 - protein, 17 aa, Homo sapiens
CTKEAQDISMSGLFDNW

SEQ ID NO: 3236 - protein, 14 aa, Homo sapiens
CQSADNSGVPNWFF

SEQ ID NO: 3237 - protein, 13 aa, Homo sapiens
CQYYHNWPPSITF

SEQ ID NO: 3238 - protein, 20 aa, Homo sapiens
CAKVMAEVTTVTTTWYFDLW

SEQ ID NO: 3239 - protein, 18 aa, Homo sapiens
CARPISITLQYYFYFDYW

SEQ ID NO: 3240 - protein, 13 aa, Homo sapiens
CARGFYGDYYDDW

SEQ ID NO: 3241 - protein, 18 aa, Homo sapiens
CTKIRRARNYYDYAMDVW

SEQ ID NO: 3242 - protein, 19 aa, Homo sapiens
CARDGGRKTYYYGSGIDYW

SEQ ID NO: 3243 - protein, 12 aa, Homo sapiens
CARVFGWRGDYW

SEQ ID NO: 3244 - protein, 17 aa, Homo sapiens
CAKDMTLPSSSWYFDYW

SEQ ID NO: 3245 - protein, 30 aa, Homo sapiens
CLRAEDTAVYFCVRDGYGVVAAARSGFDVW

SEQ ID NO: 3246 - protein, 16 aa, Homo sapiens
CARDLETMVRGYMDVW

SEQ ID NO: 3247 - protein, 21 aa, Homo sapiens
CTRDPADFVPRHYYYYGMDVW

SEQ ID NO: 3248 - protein, 12 aa, Homo sapiens
CASYWNYNFDYW

SEQ ID NO: 3249 - protein, 16 aa, Homo sapiens
CARSRQSDEYPDFDYW

SEQ ID NO: 3250 - protein, 19 aa, Homo sapiens
CARLVPYGSSGYFNWFDPW

SEQ ID NO: 3251 - protein, 14 aa, Homo sapiens
CAKLVDSYGPSDYW

SEQ ID NO: 3252 - protein, 17 aa, Homo sapiens
CAKDSILGDSSGYLLYW

SEQ ID NO: 3253 - protein, 12 aa, Homo sapiens
CASPLDGDFLYW

SEQ ID NO: 3254 - protein, 20 aa, Homo sapiens
CARGGVNYYDPGRNGAFDIW

SEQ ID NO: 3255 - protein, 26 aa, Homo sapiens
CVKDAWRYYDILTGYNRDYYYGMDVW

SEQ ID NO: 3256 - protein, 14 aa, Homo sapiens
CAKLGDGYNYFDYW

SEQ ID NO: 3257 - protein, 24 aa, Homo sapiens
CAKDPTYYDILTGYSQTPDAFDIW

SEQ ID NO: 3258 - protein, 23 aa, Homo sapiens
CAKDHPYYDSSGYYLRGNAFDIW

SEQ ID NO: 3259 - protein, 11 aa, Homo sapiens
CMKGTHGPFSF

SEQ ID NO: 3260 - protein, 18 aa, Homo sapiens
CARGDYQARAVDNWFDPW

SEQ ID NO: 3261 - protein, 21 aa, Homo sapiens
CARDLRDLLYSSGWEYYFDYW

SEQ ID NO: 3262 - protein, 12 aa, Homo sapiens
CQQGNTFPAFTF

SEQ ID NO: 3263 - protein, 16 aa, Homo sapiens
CARVFVSVRVRHLDYW

SEQ ID NO: 3264 - protein, 17 aa, Homo sapiens
CAKDPSSGMGYVGSDYW

SEQ ID NO: 3265 - protein, 14 aa, Homo sapiens
CARRDVVVDAMDVW

SEQ ID NO: 3266 - protein, 11 aa, Homo sapiens
CQQTYGLPRSF

SEQ ID NO: 3267 - protein, 18 aa, Homo sapiens
CAKESYSSSGYYYGMDVW

SEQ ID NO: 3268 - protein, 25 aa, Homo sapiens
CAKGAYYDYVWGSYRARYPDYFDYW

SEQ ID NO: 3269 - protein, 15 aa, Homo sapiens
CGADHGSGSDFVRVF

SEQ ID NO: 3270 - protein, 23 aa, Homo sapiens
CARGSRERRHFDRGGYRDAFDIW

SEQ ID NO: 3271 - protein, 21 aa, Homo sapiens
CARARSITMIVVGDSGGFDPW

SEQ ID NO: 3272 - protein, 18 aa, Homo sapiens
CVKETFSMVRQGGSFDKW

SEQ ID NO: 3273 - protein, 20 aa, Homo sapiens
CARRPYYDSSGYYPYYFDYW

SEQ ID NO: 3274 - protein, 13 aa, Homo sapiens
CASMVGEGEDDYW

SEQ ID NO: 3275 - protein, 14 aa, Homo sapiens
CVKDRWEVLSLDYW

SEQ ID NO: 3276 - protein, 22 aa, Homo sapiens
CARSLKNYGGNPYFYFYGMDVW

SEQ ID NO: 3277 - protein, 11 aa, Homo sapiens [sequence omitted]

SEQ ID NO: 3278 - protein, 19 aa, Homo sapiens
CAKILGYCSGGSCYSGDYW

SEQ ID NO: 3279 - protein, 10 aa, Homo sapiens
CMQALQRWAF

SEQ ID NO: 3280 - protein, 20 aa, Homo sapiens
CARDRTPYRNTAAPDYFDYW

SEQ ID NO: 3281 - protein, 34 aa, Homo sapiens
CALPILRVEDTAVYYCARGSRLLTGYLGTYFDYW

SEQ ID NO: 3282 - protein, 16 aa, Homo sapiens
CAKSIVVVIPYYFDYW

SEQ ID NO: 3283 - protein, 15 aa, Homo sapiens
CAKDSGTYGSSFDYW

SEQ ID NO: 3284 - protein, 16 aa, Homo sapiens
CARAGYGIGGDPFDYW

SEQ ID NO: 3285 - protein, 19 aa, Homo sapiens
CAHSITYNWNDLAYSFDPW

SEQ ID NO: 3286 - protein, 15 aa, Homo sapiens
CARQFSAGRHWFDPW

SEQ ID NO: 3287 - protein, 20 aa, Homo sapiens
CAKLGSSGWYYYGSGSTDYW

SEQ ID NO: 3288 - protein, 17 aa, Homo sapiens
CVRDQGTGWPFNWFGPW

SEQ ID NO: 3289 - protein, 14 aa, Homo sapiens
CARELTSKFELDYW

SEQ ID NO: 3290 - protein, 18 aa, Homo sapiens
CAAMDYYDWLPDDAFDIW

SEQ ID NO: 3291 - protein, 23 aa, Homo sapiens
CAKVQNDILTGYYSYYYYAMDVW

SEQ ID NO: 3292 - protein, 19 aa, Homo sapiens
CATGRPVDMATISFGFDYW

SEQ ID NO: 3293 - protein, 16 aa, Homo sapiens
CARLPSRDGYNPSDYW

SEQ ID NO: 3294 - protein, 22 aa, Homo sapiens
CARHGCRGNVCDTDDYYAMDVW

SEQ ID NO: 3295 - protein, 19 aa, Homo sapiens
CAKDQSPVYYGSGSYFKQW

SEQ ID NO: 3296 - protein, 21 aa, Homo sapiens
CAKDAKFYSDSRGYWGLFDYW

SEQ ID NO: 3297 - protein, 14 aa, Homo sapiens [sequence omitted]

SEQ ID NO: 3298 - protein, 13 aa, Homo sapiens
CQTWGSGVVDVVF

SEQ ID NO: 3299 - protein, 21 aa, Homo sapiens
CTTVDGGTELRLDYYYGMDVW

SEQ ID NO: 3300 - protein, 14 aa, Homo sapiens
CARDSGGGTTFDIW

SEQ ID NO: 3301 - protein, 14 aa, Homo sapiens
CVRTGRDGYKYDYW

SEQ ID NO: 3302 - protein, 22 aa, Homo sapiens
CARHASRGLYYYDSSGYYFDYW

SEQ ID NO: 3303 - protein, 21 aa, Homo sapiens
CAREAGYCSSTSCSRRGFDYW

SEQ ID NO: 3304 - protein, 21 aa, Homo sapiens
CATALPGNYYDSSGYSEFDYW

SEQ ID NO: 3305 - protein, 16 aa, Homo sapiens
CARDKYDNSGSPLDYW

SEQ ID NO: 3306 - protein, 16 aa, Homo sapiens
CAKGVKNFDWYYFDYW

SEQ ID NO: 3307 - protein, 16 aa, Homo sapiens
CAKFGDHSSSIVPDYW

SEQ ID NO: 3308 - protein, 23 aa, Homo sapiens
CAREVYGSARNPGYSYARYFDLW

SEQ ID NO: 3309 - protein, 16 aa, Homo sapiens
CAWGRNAVFYNWFDPW

SEQ ID NO: 3310 - protein, 26 aa, Homo sapiens
CAKTDGTQLWLQGRHVLYNYYAMDVW

SEQ ID NO: 3311 - protein, 15 aa, Homo sapiens
CARDTPGFYYYFDNW

SEQ ID NO: 3312 - protein, 16 aa, Homo sapiens
CAKSPGRQKPYYFDYW

SEQ ID NO: 3313 - protein, 23 aa, Homo sapiens
CANGIPVGPPTHYYYYFYGMDVW

SEQ ID NO: 3314 - protein, 14 aa, Homo sapiens
CAKPRGAVAGGDYW

SEQ ID NO: 3315 - protein, 20 aa, Homo sapiens
CAARSPPAVVVITGWYFDLW

SEQ ID NO: 3316 - protein, 12 aa, Homo sapiens
CMQDAQDPPITF

SEQ ID NO: 3317 - protein, 23 aa, Homo sapiens
CARGYCSSTSCRPWYYYYGMDVW

SEQ ID NO: 3318 - protein, 13 aa, Homo sapiens
CTTGRVGGYFDTW

SEQ ID NO: 3319 - protein, 15 aa, Homo sapiens
CARGDWLLRDQFDYW

SEQ ID NO: 3320 - protein, 15 aa, Homo sapiens
CAGQLSPYYYGMDVW

SEQ ID NO: 3321 - protein, 20 aa, Homo sapiens
CAKIWGYDYGDHEVDAFDIW

SEQ ID NO: 3322 - protein, 18 aa, Homo sapiens
CAYIGGTAGTTNNYFDYW

SEQ ID NO: 3323 - protein, 17 aa, Homo sapiens
CAREYSGTYSQVYFDSW

SEQ ID NO: 3324 - protein, 19 aa, Homo sapiens
CAKLPSSHNIEGGDAFDIW

SEQ ID NO: 3325 - protein, 18 aa, Homo sapiens
CAKDSFIAAAANGGFDYW

SEQ ID NO: 3326 - protein, 20 aa, Homo sapiens
CAKEHHSSGWSYYYYGMDVW

SEQ ID NO: 3327 - protein, 21 aa, Homo sapiens
CAHSEYYGSGSYDGGFWFDPW

SEQ ID NO: 3328 - protein, 16 aa, Homo sapiens
CARQVSNWNSRRFDYW

SEQ ID NO: 3329 - protein, 14 aa, Homo sapiens
CAKDISSYGLFDYW

SEQ ID NO: 3330 - protein, 15 aa, Homo sapiens
CGTWDSSVSSAHLIF

SEQ ID NO: 3331 - protein, 11 aa, Homo sapiens
CYCAADSNRVF

SEQ ID NO: 3332 - protein, 17 aa, Homo sapiens
CVRDRGVTRSMDWFDPW

SEQ ID NO: 3333 - protein, 19 aa, Homo sapiens
CAKLVASEYYYDSSGRDYW

SEQ ID NO: 3334 - protein, 19 aa, Homo sapiens
CARGIKYDSRGRNYYFDYW

SEQ ID NO: 3335 - protein, 16 aa, Homo sapiens
CMQALQTPQTPPMYTF

SEQ ID NO: 3336 - protein, 18 aa, Homo sapiens
CAKDLVSLTTVTGYFQHW

SEQ ID NO: 3337 - protein, 13 aa, Homo sapiens
CQQSAYSPVSHTF

SEQ ID NO: 3338 - protein, 18 aa, Homo sapiens
CTSRARIVGGRISDFDTW

SEQ ID NO: 3339 - protein, 17 aa, Homo sapiens
CARDRCSSTSCSGGDYW

SEQ ID NO: 3340 - protein, 18 aa, Homo sapiens
CAREVYLYYDSSGPIDYW

SEQ ID NO: 3341 - protein, 13 aa, Homo sapiens
CTTEPSGWYDDYW

SEQ ID NO: 3342 - protein, 22 aa, Homo sapiens
CARVFGHRIIFRSTPHNWFDPW

SEQ ID NO: 3343 - protein, 15 aa, Homo sapiens
CAKLADYESEYFQHW

SEQ ID NO: 3344 - protein, 16 aa, Homo sapiens
CVKLIHLWTQDYFDYW

SEQ ID NO: 3345 - protein, 22 aa, Homo sapiens
CARADSYCDSKSCNYFGPFDSW

SEQ ID NO: 3346 - protein, 15 aa, Homo sapiens
CAKVSIAAAGPLDYW

SEQ ID NO: 3347 - protein, 17 aa, Homo sapiens
CAKFSYGSGSGTSIDYW

SEQ ID NO: 3348 - protein, 17 aa, Homo sapiens
CAKDLYHDSGGAYFDYW

SEQ ID NO: 3349 - protein, 22 aa, Homo sapiens
CARSLLYYSSSSGYYTGSFDYW

SEQ ID NO: 3350 - protein, 15 aa, Homo sapiens
CAAWDDSRNGPHVVF

SEQ ID NO: 3351 - protein, 18 aa, Homo sapiens
CATNYGLWSASSYFFDVW

SEQ ID NO: 3352 - protein, 13 aa, Homo sapiens
CASDLGDRPFDYW

SEQ ID NO: 3353 - protein, 19 aa, Homo sapiens
CARDRPDASLAEQPMFDYW

SEQ ID NO: 3354 - protein, 21 aa, Homo sapiens
CAKLEDIVVVPAVSDYYFDYW

SEQ ID NO: 3355 - protein, 28 aa, Homo sapiens
CARGHPGAENYGSGTYTYYYYYYGFDVW

SEQ ID NO: 3356 - protein, 15 aa, Homo sapiens
CATIRTDYYESEDYW

SEQ ID NO: 3357 - protein, 13 aa, Homo sapiens
CATTDYGDYASYW

SEQ ID NO: 3358 - protein, 13 aa, Homo sapiens [sequence omitted]

SEQ ID NO: 3359 - protein, 19 aa, Homo sapiens
CAAVPGPGVYYYYYGMDVW

SEQ ID NO: 3360 - protein, 22 aa, Homo sapiens
CAKDRGAYCGGDCYSWWYFDYW

SEQ ID NO: 3361 - protein, 23 aa, Homo sapiens
CARQRLSDITIFGVVIHNWFDPW

SEQ ID NO: 3362 - protein, 21 aa, Homo sapiens
CARDEVEMATPSGYYYGMDVW

SEQ ID NO: 3363 - protein, 16 aa, Homo sapiens
CQSYDSSLSASGSRVF

SEQ ID NO: 3364 - protein, 19 aa, Homo sapiens
CARVNAEYYYDSSGYLDYW

SEQ ID NO: 3365 - protein, 11 aa, Homo sapiens
CQQSSIVPRIF

SEQ ID NO: 3366 - protein, 15 aa, Homo sapiens
CARSLSGYGYAFDLW

SEQ ID NO: 3367 - protein, 19 aa, Homo sapiens
CARVSDDYADYRQRPFDYW

SEQ ID NO: 3368 - protein, 18 aa, Homo sapiens
CASAPLVWFGVPINFDYW

SEQ ID NO: 3369 - protein, 17 aa, Homo sapiens
CAKHRLRLVVVVPFDYW

SEQ ID NO: 3370 - protein, 16 aa, Homo sapiens
CARHLRGTFLYYFDSW

SEQ ID NO: 3371 - protein, 13 aa, Homo sapiens
CAHRRSDHYFDYW

SEQ ID NO: 3372 - protein, 22 aa, Homo sapiens
CAREGIPYCSGDNCHSSHFDYW

SEQ ID NO: 3373 - protein, 17 aa, Homo sapiens
CTTELLWFGDPLGFDYW

SEQ ID NO: 3374 - protein, 19 aa, Homo sapiens
CAHDDDGRHYYYVSWFDHW

SEQ ID NO: 3375 - protein, 20 aa, Homo sapiens
CSRTLSMTRGYGVFNAFDVW

SEQ ID NO: 3376 - protein, 20 aa, Homo sapiens
CARQTQRRGIAVARDVFDLW

SEQ ID NO: 3377 - protein, 14 aa, Homo sapiens
CTTGLFYDWAFDIW

SEQ ID NO: 3378 - protein, 15 aa, Homo sapiens
CAREGWELLAYFDYW

SEQ ID NO: 3379 - protein, 19 aa, Homo sapiens
CAKLRYFDWFTDGAAFDIW

SEQ ID NO: 3380 - protein, 16 aa, Homo sapiens
CAKEINRGWPDAFDIW

SEQ ID NO: 3381 - protein, 22 aa, Homo sapiens
CARSPGYCVGGICTYYYGMDVW

SEQ ID NO: 3382 - protein, 16 aa, Homo sapiens
CARGDILTGYYPFDYW

SEQ ID NO: 3383 - protein, 15 aa, Homo sapiens
CARENGDPSSWFDPW

SEQ ID NO: 3384 - protein, 16 aa, Homo sapiens
CAKGHILTTPDWFDPW

SEQ ID NO: 3385 - protein, 18 aa, Homo sapiens
CAKDAAAGNYGDYVWDYW

SEQ ID NO: 3386 - protein, 16 aa, Homo sapiens
CAKEARWFGGYYFDSW

SEQ ID NO: 3387 - protein, 15 aa, Homo sapiens
CVGDPPQSGYAFDCW

SEQ ID NO: 3388 - protein, 19 aa, Homo sapiens
CAKEKGYNYGYYYYGMDVW

SEQ ID NO: 3389 - protein, 16 aa, Homo sapiens
CARMMYDYDLSGLDYW

SEQ ID NO: 3390 - protein, 17 aa, Homo sapiens
CALPISKPVGATDFDYW

SEQ ID NO: 3391 - protein, 13 aa, Homo sapiens
CIGYGSGSYRDYW

SEQ ID NO: 3392 - protein, 17 aa, Homo sapiens
CAGSPRYGDHFESFDYW

SEQ ID NO: 3393 - protein, 12 aa, Homo sapiens
CARSVKWYFDVW

SEQ ID NO: 3394 - protein, 15 aa, Homo sapiens
CARSRRTDGYNFAYW

SEQ ID NO: 3395 - protein, 22 aa, Homo sapiens
CAKDIPYYDSSGYPFAGAFDIW

SEQ ID NO: 3396 - protein, 14 aa, Homo sapiens
CARGSTSYGDFKYW

SEQ ID NO: 3397 - protein, 17 aa, Homo sapiens
CAKDSGDGYNFYYFDYW

SEQ ID NO: 3398 - protein, 18 aa, Homo sapiens
CTSPRNPDAYYYYGMDVW

SEQ ID NO: 3399 - protein, 22 aa, Homo sapiens
CARHPKDYDFWSGYSYNWFDPW

SEQ ID NO: 3400 - protein, 21 aa, Homo sapiens
CARDPSSKWPYSYYYYGMDVW

SEQ ID NO: 3401 - protein, 19 aa, Homo sapiens
CARDRWERIARGDGWFDPW

SEQ ID NO: 3402 - protein, 18 aa, Homo sapiens
CAREHPDYYDSSGCNDYW

SEQ ID NO: 3403 - protein, 21 aa, Homo sapiens
CAKLSSYDSSGYYYRGWFDPW

SEQ ID NO: 3404 - protein, 15 aa, Homo sapiens
CQSYDFSVSGPSYVF

SEQ ID NO: 3405 - protein, 20 aa, Homo sapiens
CTTDRLYDYVWGSYRYPDYW

SEQ ID NO: 3406 - protein, 15 aa, Homo sapiens
CARDQLLLEGGFDYW

SEQ ID NO: 3407 - protein, 20 aa, Homo sapiens
CAKDGFYGSGTYYNVYYDYW

SEQ ID NO: 3408 - protein, 16 aa, Homo sapiens
CAATSSSWYNWYFDLW

SEQ ID NO: 3409 - protein, 15 aa, Homo sapiens
CARRSSSSWSYFDFW

SEQ ID NO: 3410 - protein, 15 aa, Homo sapiens
CARQQRYYFDAFNMW

SEQ ID NO: 3411 - protein, 19 aa, Homo sapiens
CARDSKMVVDKYYYGMDVW

SEQ ID NO: 3412 - protein, 22 aa, Homo sapiens
CAKGTSDISTGYYHFYYGMDVW

SEQ ID NO: 3413 - protein, 18 aa, Homo sapiens
CARSWYSSGWYLRKFDFW

SEQ ID NO: 3414 - protein, 16 aa, Homo sapiens
CARIRVDTPSDYLDYW

SEQ ID NO: 3415 - protein, 16 aa, Homo sapiens
CARYRYGDYKSNFDYW

SEQ ID NO: 3416 - protein, 16 aa, Homo sapiens
CAKGGVLLWFEHFDYW

SEQ ID NO: 3417 - protein, 16 aa, Homo sapiens
CAQLPGGIVGATRDYW

SEQ ID NO: 3418 - protein, 14 aa, Homo sapiens
CARGGGYRGPFDLW

SEQ ID NO: 3419 - protein, 16 aa, Homo sapiens
CARSKYDSSTSAGDYW

SEQ ID NO: 3420 - protein, 17 aa, Homo sapiens
CVHSTYYYESPWAIDIW

SEQ ID NO: 3421 - protein, 16 aa, Homo sapiens
CATDIVGDHSYGFDYW

SEQ ID NO: 3422 - protein, 18 aa, Homo sapiens
CARDGGWYLQHDNEFDYW

SEQ ID NO: 3423 - protein, 16 aa, Homo sapiens
CARDAASTTDWYFDLW

SEQ ID NO: 3424 - protein, 14 aa, Homo sapiens
CAKVWHSGWHFDYW

SEQ ID NO: 3425 - protein, 15 aa, Homo sapiens
CQQYNSCSPRGMYTF

SEQ ID NO: 3426 - protein, 21 aa, Homo sapiens
CARGGLIDYFPNNWRDPFDVW

SEQ ID NO: 3427 - protein, 14 aa, Homo sapiens
CAREDPLLDGMDVW

SEQ ID NO: 3428 - protein, 20 aa, Homo sapiens
CAKDRYMRGGSYGHDAFDIW

SEQ ID NO: 3429 - protein, 17 aa, Homo sapiens
CAKESAKYSGYHWSDYW

SEQ ID NO: 3430 - protein, 17 aa, Homo sapiens
CARTRGVASLFWYFDLW

SEQ ID NO: 3431 - protein, 13 aa, Homo sapiens
CAKASEEGQTDYW

SEQ ID NO: 3432 - protein, 16 aa, Homo sapiens
CARRSAGNMGRFFDPW

SEQ ID NO: 3433 - protein, 13 aa, Homo sapiens
CARDLVDTGFDYW

SEQ ID NO: 3434 - protein, 16 aa, Homo sapiens
CARGDSRYPRSNFDIW

SEQ ID NO: 3435 - protein, 11 aa, Homo sapiens
CASPGIGFDIW

SEQ ID NO: 3436 - protein, 15 aa, Homo sapiens
CARDSSIWHWYFDLW

SEQ ID NO: 3437 - protein, 13 aa, Homo sapiens
CQSADNGGGFWVF

SEQ ID NO: 3438 - protein, 14 aa, Homo sapiens
CAKWEAGKGVFDMW

SEQ ID NO: 3439 - protein, 16 aa, Homo sapiens
CARSIGISGWSPFDSW

SEQ ID NO: 3440 - protein, 24 aa, Homo sapiens
CAKGRVPVADLVPIYYYYYGLDVW

SEQ ID NO: 3441 - protein, 16 aa, Homo sapiens
CARTHDLSGNTWFDPW

SEQ ID NO: 3442 - protein, 14 aa, Homo sapiens
CTRSGKFFDYFDPW

SEQ ID NO: 3443 - protein, 22 aa, Homo sapiens
CAKDPSEFRWLRRDYYYGMDVW

SEQ ID NO: 3444 - protein, 16 aa, Homo sapiens
CARVAAVAGNGAFDIW

SEQ ID NO: 3445 - protein, 23 aa, Homo sapiens
CTRVVHYGSGSYQILGELYFDYW

SEQ ID NO: 3446 - protein, 17 aa, Homo sapiens
CAKDISSYGYSMTNDYW

SEQ ID NO: 3447 - protein, 25 aa, Homo sapiens
CAKDGGLRFLEWSVGPYYYYGMDVW

SEQ ID NO: 3448 - protein, 18 aa, Homo sapiens
CVKDRSATYDERYYFDYW

SEQ ID NO: 3449 - protein, 15 aa, Homo sapiens
CAKIGAGYQPLFDYW

SEQ ID NO: 3450 - protein, 18 aa, Homo sapiens
CARQSQVGAEASDYFDYW

SEQ ID NO: 3451 - protein, 12 aa, Homo sapiens
CQQYYSIQGYTF

SEQ ID NO: 3452 - protein, 18 aa, Homo sapiens
CARALYYFETSGVMFDFW

SEQ ID NO: 3453 - protein, 19 aa, Homo sapiens
CARSPGYSTNWYLPNFDSW

SEQ ID NO: 3454 - protein, 17 aa, Homo sapiens
CATSPYFNRPEGAFDPW

SEQ ID NO: 3455 - protein, 15 aa, Homo sapiens
CASHRYSYWGLFDYW

SEQ ID NO: 3456 - protein, 19 aa, Homo sapiens
CARLDGDVVAARRGWFDPW

SEQ ID NO: 3457 - protein, 13 aa, Homo sapiens
CYSAESSGNYWVF

SEQ ID NO: 3458 - protein, 25 aa, Homo sapiens
CAHSHVLRYFDWLLHTDQHSFFDYW

SEQ ID NO: 3459 - protein, 15 aa, Homo sapiens
CARDCGGNCYSFQYW

SEQ ID NO: 3460 - protein, 22 aa, Homo sapiens
CTSTNGGYYDFWSGPQRNFDYW

SEQ ID NO: 3461 - protein, 19 aa, Homo sapiens
CVRQDADTAFVPLVTFDSW

SEQ ID NO: 3462 - protein, 16 aa, Homo sapiens
CARGQIKWLQYYSDTW

SEQ ID NO: 3463 - protein, 18 aa, Homo sapiens
CYSYTSSSTPYVFGPYVF

SEQ ID NO: 3464 - protein, 19 aa, Homo sapiens
CARGRTVTTFYYYYGMDVW

SEQ ID NO: 3465 - protein, 15 aa, Homo sapiens
CARLGGTGTTLFDYW

SEQ ID NO: 3466 - protein, 17 aa, Homo sapiens
CARFLYSGFHKYYFDYW

SEQ ID NO: 3467 - protein, 14 aa, Homo sapiens
CLQHNSYPALTWTF

SEQ ID NO: 3468 - protein, 23 aa, Homo sapiens
CARAVWGSGSYYKDYYYYGMDVW

SEQ ID NO: 3469 - protein, 14 aa, Homo sapiens
CAKLGAEAAWSDYW

SEQ ID NO: 3470 - protein, 19 aa, Homo sapiens
CAKLGTVTTSHGLYYFDYW

SEQ ID NO: 3471 - protein, 18 aa, Homo sapiens
CAREVSPTDFDIGYFDYW

SEQ ID NO: 3472 - protein, 23 aa, Homo sapiens
CARLAPPMVRGVIASPIYYFDYW

SEQ ID NO: 3473 - protein, 20 aa, Homo sapiens
CAKASSTDTSYFYYYDMDVW

SEQ ID NO: 3474 - protein, 16 aa, Homo sapiens
CARDSGEHDFWTFDSW

SEQ ID NO: 3475 - protein, 14 aa, Homo sapiens
CQVWDTSSDPPVIF

SEQ ID NO: 3476 - protein, 20 aa, Homo sapiens
CARDPYSTNDFLTGYFPDYW

SEQ ID NO: 3477 - protein, 17 aa, Homo sapiens
CARVVVVPAEAGSFDYW

SEQ ID NO: 3478 - protein, 18 aa, Homo sapiens
CARGYSSSPYRTDFFDYW

SEQ ID NO: 3479 - protein, 17 aa, Homo sapiens
CAKDRATIFGVVNPDYW

SEQ ID NO: 3480 - protein, 13 aa, Homo sapiens
CAKGANWNRCDYW

SEQ ID NO: 3481 - protein, 18 aa, Homo sapiens
CTRPVHYYYDSSNSPDYW

SEQ ID NO: 3482 - protein, 17 aa, Homo sapiens
CAKLGGYSYGSGPFDYW

SEQ ID NO: 3483 - protein, 14 aa, Homo sapiens
CVRPVGKTDFLDYW

SEQ ID NO: 3484 - protein, 12 aa, Homo sapiens
CAKGAVDLFDYW

SEQ ID NO: 3485 - protein, 20 aa, Homo sapiens
CARPAGFCSTTSCLDWFDPW

SEQ ID NO: 3486 - protein, 19 aa, Homo sapiens
CARDKEEEGFGSGNYFEFW

SEQ ID NO: 3487 - protein, 20 aa, Homo sapiens
CARGTVYNSLTCPAGWFDPW

SEQ ID NO: 3488 - protein, 13 aa, Homo sapiens
CQAWDTTTASGVF

SEQ ID NO: 3489 - protein, 18 aa, Homo sapiens
CAKQAAAGTYYYYGMDVW

SEQ ID NO: 3490 - protein, 14 aa, Homo sapiens
CAHKLDYRHYFDYW

SEQ ID NO: 3491 - protein, 21 aa, Homo sapiens
CARRTRADDADYMAKRYFDWW

SEQ ID NO: 3492 - protein, 21 aa, Homo sapiens
CARINGFCTGGRCYALWFDTW

SEQ ID NO: 3493 - protein, 19 aa, Homo sapiens
CAKVILRAYSYDHRGFDYW

SEQ ID NO: 3494 - protein, 13 aa, Homo sapiens
CHHRSNWPPRGTF

SEQ ID NO: 3495 - protein, 19 aa, Homo sapiens
CARDTYSSGWLGGNWFDPW

SEQ ID NO: 3496 - protein, 21 aa, Homo sapiens
CTKDRTTGTPADYFHYAMDVW

SEQ ID NO: 3497 - protein, 21 aa, Homo sapiens
CARDFATHYYESSGYSNFDYW

SEQ ID NO: 3498 - protein, 11 aa, Homo sapiens
CAHIKRVFDYW

SEQ ID NO: 3499 - protein, 17 aa, Homo sapiens
CARYGDAKSGWRSFDFW

SEQ ID NO: 3500 - protein, 17 aa, Homo sapiens
CARLSHFGYDKGRIDYW

SEQ ID NO: 3501 - protein, 20 aa, Homo sapiens
CTTEAVYCSGSRCPGYFDFW

SEQ ID NO: 3502 - protein, 17 aa, Homo sapiens
CARERDYGDYEGWFDPW

SEQ ID NO: 3503 - protein, 16 aa, Homo sapiens
CASSYYYDSSGQPDYW

SEQ ID NO: 3504 - protein, 16 aa, Homo sapiens
CAKLLDSRWGDAFDIW

SEQ ID NO: 3505 - protein, 15 aa, Homo sapiens
CARNLYSNWIYFDYW

SEQ ID NO: 3506 - protein, 17 aa, Homo sapiens
CARDQRSERWLQPFDYW

SEQ ID NO: 3507 - protein, 14 aa, Homo sapiens
CASKTAMAYYFDYW

SEQ ID NO: 3508 - protein, 17 aa, Homo sapiens
CAKDTIPVAAAGYLDYW

SEQ ID NO: 3509 - protein, 26 aa, Homo sapiens
CAKDLYFDWLSRWGPGANYQYAVDVW

SEQ ID NO: 3510 - protein, 18 aa, Homo sapiens
CAKDLRDSGGHWGYIDSW

SEQ ID NO: 3511 - protein, 17 aa, Homo sapiens
CAKETPRYDILTGLDYW

SEQ ID NO: 3512 - protein, 17 aa, Homo sapiens
CAREEVGAGPNNDFDVW

SEQ ID NO: 3513 - protein, 11 aa, Homo sapiens
CQQGHRLPVTF

SEQ ID NO: 3514 - protein, 21 aa, Homo sapiens
CAKSNEFFWFGKFKRDAFDLW

SEQ ID NO: 3515 - protein, 18 aa, Homo sapiens
CGKDEGYLRWQTVAMDVW

SEQ ID NO: 3516 - protein, 11 aa, Homo sapiens
CHQSDNLPWTF

SEQ ID NO: 3517 - protein, 21 aa, Homo sapiens
CARDRPGIAADDYYYYGMDVW

SEQ ID NO: 3518 - protein, 19 aa, Homo sapiens
CATLSSAATYYYYYGMDVW

SEQ ID NO: 3519 - protein, 13 aa, Homo sapiens
CQSSESSGAYGVF

SEQ ID NO: 3520 - protein, 20 aa, Homo sapiens
CARDFSPDGSDIYYDALDIW

SEQ ID NO: 3521 - protein, 15 aa, Homo sapiens
CAKDHGVDENWFDPW

SEQ ID NO: 3522 - protein, 16 aa, Homo sapiens
CTHRRGYGSTARFDYW

SEQ ID NO: 3523 - protein, 16 aa, Homo sapiens
CAKDLLSDDSSNFDIW

SEQ ID NO: 3524 - protein, 19 aa, Homo sapiens
CARWGSYVPTSYEMSIDYW

SEQ ID NO: 3525 - protein, 19 aa, Homo sapiens
CAAFFGGARSSEADAFDIW

SEQ ID NO: 3526 - protein, 17 aa, Homo sapiens
CAKVFDSGYVLYYFDYW

SEQ ID NO: 3527 - protein, 24 aa, Homo sapiens
CARDDNVGGGSGYLTYYYYGMDVW

SEQ ID NO: 3528 - protein, 22 aa, Homo sapiens
CATLYSVTARQYYYYYYGMDVW

SEQ ID NO: 3529 - protein, 18 aa, Homo sapiens
CAKDLRQWLDPYGEFDLW

SEQ ID NO: 3530 - protein, 19 aa, Homo sapiens
CARVPYYILTGSHNYFEHW

SEQ ID NO: 3531 - protein, 14 aa, Homo sapiens
CARELGGSYIFDYW

SEQ ID NO: 3532 - protein, 13 aa, Homo sapiens
CARQPVGSPFDCW

SEQ ID NO: 3533 - protein, 11 aa, Homo sapiens
CQQFYSYQWAF

SEQ ID NO: 3534 - protein, 16 aa, Homo sapiens
CAREGGDGYNFFFDYW

SEQ ID NO: 3535 - protein, 17 aa, Homo sapiens
CARNPLTVGAPYRFDLW

SEQ ID NO: 3536 - protein, 25 aa, Homo sapiens
CAKDSPIVVVPAAIWGEVDDAFDIW

SEQ ID NO: 3537 - protein, 13 aa, Homo sapiens
CQHFENYPHSFPF

SEQ ID NO: 3538 - protein, 13 aa, Homo sapiens
CQRYGSSAYMYTF

SEQ ID NO: 3539 - protein, 12 aa, Homo sapiens
CAAELAGEIDYW

SEQ ID NO: 3540 - protein, 23 aa, Homo sapiens
CARADCRSMSCYDFYYYYGMDVW

SEQ ID NO: 3541 - protein, 20 aa, Homo sapiens
CAKDGELYYDSSGYFNFDPW

SEQ ID NO: 3542 - protein, 20 aa, Homo sapiens
CARDMVGTTVRTVHNWFDPW

SEQ ID NO: 3543 - protein, 24 aa, Homo sapiens
CARDPGSPNCSGGSCYSGWYFDLW

SEQ ID NO: 3544 - protein, 16 aa, Homo sapiens
CARVVYDYYGVNFDYW

SEQ ID NO: 3545 - protein, 19 aa, Homo sapiens
CAHRIYDSGGYYDYYFDYW

SEQ ID NO: 3546 - protein, 13 aa, Homo sapiens
CARRDTRVKFDPW

SEQ ID NO: 3547 - protein, 17 aa, Homo sapiens
CARDDPYGGNSRWFDPW

SEQ ID NO: 3548 - protein, 17 aa, Homo sapiens
CARDPFTLTVLRGFDYW

SEQ ID NO: 3549 - protein, 16 aa, Homo sapiens
CAKGLFYYDAQAFDIW

SEQ ID NO: 3550 - protein, 17 aa, Homo sapiens
CAKDPYASYGGNSIDYW

SEQ ID NO: 3551 - protein, 27 aa, Homo sapiens
CARDLEPGPSLRLGELSSYYYYGMDVW

SEQ ID NO: 3552 - protein, 18 aa, Homo sapiens
CARQAFGSTWHLNWFDPW

SEQ ID NO: 3553 - protein, 16 aa, Homo sapiens
CARVAVAGIPHWFDPW

SEQ ID NO: 3554 - protein, 15 aa, Homo sapiens
CAKDLGPVAGLFDYW

SEQ ID NO: 3555 - protein, 16 aa, Homo sapiens
CARAVVVTALGYFDPW

SEQ ID NO: 3556 - protein, 18 aa, Homo sapiens
CASGYYYDSSGYGIFDYW

SEQ ID NO: 3557 - protein, 16 aa, Homo sapiens
CAKGKTGTRMAPFDYW

SEQ ID NO: 3558 - protein, 12 aa, Homo sapiens
CASQGYSSFWYW

SEQ ID NO: 3559 - protein, 18 aa, Homo sapiens
CAKVLFRFGDYYYGMDVW

SEQ ID NO: 3560 - protein, 19 aa, Homo sapiens
CAKASDFNGYSYGPDFDYW

SEQ ID NO: 3561 - protein, 14 aa, Homo sapiens
CAHCAYGSGSFNYW

SEQ ID NO: 3562 - protein, 19 aa, Homo sapiens
CARGWMHDFWSGYLWFDPW

SEQ ID NO: 3563 - protein, 16 aa, Homo sapiens
CVRERQDYTDYYLDYW

SEQ ID NO: 3564 - protein, 18 aa, Homo sapiens
CGKDLEDGYTNWGWFDPW

SEQ ID NO: 3565 - protein, 21 aa, Homo sapiens
CAKDDVEYSSGWQREDAFDFW

SEQ ID NO: 3566 - protein, 19 aa, Homo sapiens
CARGLLMYSSGWDDAFDIW

SEQ ID NO: 3567 - protein, 13 aa, Homo sapiens
CARALAGASFDSW

SEQ ID NO: 3568 - protein, 21 aa, Homo sapiens
CTKMDLHLPVYSSGRYWPDYW

SEQ ID NO: 3569 - protein, 15 aa, Homo sapiens
CAKGLYDFWSGIDYW

SEQ ID NO: 3570 - protein, 17 aa, Homo sapiens
CVRGKYQVLGNDVFEIW

SEQ ID NO: 3571 - protein, 18 aa, Homo sapiens
CVTAGDSSGSSPYYFDNW

SEQ ID NO: 3572 - protein, 22 aa, Homo sapiens
CGKDGQPMVRGHYFYYFAMDVW

SEQ ID NO: 3573 - protein, 20 aa, Homo sapiens
CARLDFDWSSYLGYNRLDPW

SEQ ID NO: 3574 - protein, 22 aa, Homo sapiens
CARDRRYSYGHDQYYYYGMDVW

SEQ ID NO: 3575 - protein, 22 aa, Homo sapiens
CARKYDYVWGSYRLVGGSFDYW

SEQ ID NO: 3576 - protein, 17 aa, Homo sapiens
CARDLAVAESSSELDYW

SEQ ID NO: 3577 - protein, 19 aa, Homo sapiens
CAHSLGCGPTNCYWTFDYW

SEQ ID NO: 3578 - protein, 16 aa, Homo sapiens
CARERGSGLGDHFDYW

SEQ ID NO: 3579 - protein, 20 aa, Homo sapiens
CARYYYGPGSYDNGPIFDSW

SEQ ID NO: 3580 - protein, 15 aa, Homo sapiens
CAKESGPVPTYVDHW

SEQ ID NO: 3581 - protein, 21 aa, Homo sapiens
CARGDKVLAAPPDYYYGMDVW

SEQ ID NO: 3582 - protein, 16 aa, Homo sapiens
CARPSSGYYLGYFDYW

SEQ ID NO: 3583 - protein, 19 aa, Homo sapiens
CANQEGTTLFYYYYGMDVW

SEQ ID NO: 3584 - protein, 21 aa, Homo sapiens
CARAPYYDILTGNTPNWFDPW

SEQ ID NO: 3585 - protein, 14 aa, Homo sapiens
CAKAGQYLSWFDPW

SEQ ID NO: 3586 - protein, 15 aa, Homo sapiens
CARLVAAASGWFDPW

SEQ ID NO: 3587 - protein, 18 aa, Homo sapiens
CAVRLHVNKQRPNWFDSW

SEQ ID NO: 3588 - protein, 21 aa, Homo sapiens
CARVTYYYASGTYYFNWFDPW

SEQ ID NO: 3589 - protein, 12 aa, Homo sapiens
CASLSGWYVDYW

SEQ ID NO: 3590 - protein, 16 aa, Homo sapiens
CAKVHSSGWSNWFDPW

SEQ ID NO: 3591 - protein, 15 aa, Homo sapiens
CASSVLLWFGDFDYW

SEQ ID NO: 3592 - protein, 21 aa, Homo sapiens
CAKARDVAGTYYFYYYDMDVW

SEQ ID NO: 3593 - protein, 17 aa, Homo sapiens
CAKDGGDTTGTALFDYW

SEQ ID NO: 3594 - protein, 18 aa, Homo sapiens
CAPFMASDGMLQGYFHHW

SEQ ID NO: 3595 - protein, 17 aa, Homo sapiens
CARDLYGSGSYQQFDYW

SEQ ID NO: 3596 - protein, 15 aa, Homo sapiens
CAREIRAPRGSFDPW

SEQ ID NO: 3597 - protein, 21 aa, Homo sapiens
CSRDAAGFSTGLFRDDAFDVW

SEQ ID NO: 3598 - protein, 19 aa, Homo sapiens
CAKDLGGNRLTHYYALDVW

SEQ ID NO: 3599 - protein, 22 aa, Homo sapiens
CARSVLSFSGKSGYYSGSFDSW

SEQ ID NO: 3600 - protein, 20 aa, Homo sapiens
CAKDNEYCGGDCYSTWFDPW

SEQ ID NO: 3601 - protein, 19 aa, Homo sapiens
CARLVGYYDGRSGYIFDYW

SEQ ID NO: 3602 - protein, 15 aa, Homo sapiens
CAKLAVAGTSRVDYW

SEQ ID NO: 3603 - protein, 15 aa, Homo sapiens
CAKPLVLHSGCFDYW

SEQ ID NO: 3604 - protein, 17 aa, Homo sapiens
CARDPETWLQLHYFDYW

SEQ ID NO: 3605 - protein, 14 aa, Homo sapiens
CAKFGDDYTPLDYW

SEQ ID NO: 3606 - protein, 21 aa, Homo sapiens
CARDFIVCSTSCYGIGWFDPW

SEQ ID NO: 3607 - protein, 14 aa, Homo sapiens
CARVWWVHREFDYW

SEQ ID NO: 3608 - protein, 15 aa, Homo sapiens
CARMGRDHYKEFDYW

SEQ ID NO: 3609 - protein, 21 aa, Homo sapiens
CARHVSYQDSTGFYKYYFDSW

SEQ ID NO: 3610 - protein, 16 aa, Homo sapiens
CAKEHYYGSGSYFEYW

SEQ ID NO: 3611 - protein, 17 aa, Homo sapiens
CAKEVLVAGTLPWFDPW

SEQ ID NO: 3612 - protein, 25 aa, Homo sapiens
CARVNNFHVWSGYYSAMDPSFFDYW

SEQ ID NO: 3613 - protein, 18 aa, Homo sapiens
CAKDQSPGVATMDAFDYW

SEQ ID NO: 3614 - protein, 11 aa, Homo sapiens
CQQYNDHSCIF

SEQ ID NO: 3615 - protein, 19 aa, Homo sapiens
CVKPVGATKPVGATDFDYW

SEQ ID NO: 3616 - protein, 16 aa, Homo sapiens
CVRENVLRFSEWLDYW

SEQ ID NO: 3617 - protein, 19 aa, Homo sapiens
CARDRSAGNGDYVDYFDSW

SEQ ID NO: 3618 - protein, 22 aa, Homo sapiens
CVRGPSYYILTGYLNSDAFDIW

SEQ ID NO: 3619 - protein, 12 aa, Homo sapiens
CMQRVEFPPYTF

SEQ ID NO: 3620 - protein, 21 aa, Homo sapiens
CARDIVVVPAAMGHSTGFDYW

SEQ ID NO: 3621 - protein, 23 aa, Homo sapiens
CARGTYYYGSGIYYTGVPWFDPW

SEQ ID NO: 3622 - protein, 20 aa, Homo sapiens
CARDSCSSTSCYGYWYFDLW

SEQ ID NO: 3623 - protein, 18 aa, Homo sapiens
CAKDSVTDYGDYSWFDPW

SEQ ID NO: 3624 - protein, 18 aa, Homo sapiens
CVRGYYGDLGLPYYLDSW

SEQ ID NO: 3625 - protein, 13 aa, Homo sapiens
CARGLSSSWYDYW

SEQ ID NO: 3626 - protein, 23 aa, Homo sapiens
CTTPILYYGSGSYYNAWRPLDYW

SEQ ID NO: 3627 - protein, 17 aa, Homo sapiens
CRKAGGMVRGVDAFDIW

SEQ ID NO: 3628 - protein, 16 aa, Homo sapiens
CAKRGPYYDFWTLDYW

SEQ ID NO: 3629 - protein, 20 aa, Homo sapiens
CAKLPLRNYYDSSGSEFDYW

SEQ ID NO: 3630 - protein, 14 aa, Homo sapiens
CAHSELVRGNFDYW

SEQ ID NO: 3631 - protein, 18 aa, Homo sapiens
CARDSSNGGTRNWYFDLW

SEQ ID NO: 3632 - protein, 20 aa, Homo sapiens
CARDPTLGRIESYYYALDVW

SEQ ID NO: 3633 - protein, 14 aa, Homo sapiens
CARQARYNWNLDYW

SEQ ID NO: 3634 - protein, 15 aa, Homo sapiens
CASLSTLTAAGTDYW

SEQ ID NO: 3635 - protein, 17 aa, Homo sapiens
CVGGGPYQYYYYGMDVW

SEQ ID NO: 3636 - protein, 20 aa, Homo sapiens
CARGGYKWKDRLLRYYFDLW

SEQ ID NO: 3637 - protein, 17 aa, Homo sapiens
CARLVDDYAEEYYFDYW

SEQ ID NO: 3638 - protein, 16 aa, Homo sapiens
CAKEKSGNNYGDFQYW

SEQ ID NO: 3639 - protein, 18 aa, Homo sapiens
CAKDSYGITMVRGPFDYW

SEQ ID NO: 3640 - protein, 12 aa, Homo sapiens
CQHLTSYPQVAF

SEQ ID NO: 3641 - protein, 15 aa, Homo sapiens
CTTGYDSTATAFDYW

SEQ ID NO: 3642 - protein, 22 aa, Homo sapiens
CARSQNIAAAPIYYYYYGMDVW

SEQ ID NO: 3643 - protein, 15 aa, Homo sapiens
CTTDGLVVYAAFDFW

SEQ ID NO: 3644 - protein, 24 aa, Homo sapiens
CARERTSGSYYNSDHFYYYGMDVW

SEQ ID NO: 3645 - protein, 13 aa, Homo sapiens
CVRLIKGGAFDFW

SEQ ID NO: 3646 - protein, 16 aa, Homo sapiens
CAKGNGYHSNDAFDIW

SEQ ID NO: 3647 - protein, 20 aa, Homo sapiens
CTTDLYCDTTPCPSRWFDPW

SEQ ID NO: 3648 - protein, 14 aa, Homo sapiens
CQSYDNSLGDNYVF

SEQ ID NO: 3649 - protein, 17 aa, Homo sapiens
CVKHLTGPTRWSSYDYW

SEQ ID NO: 3650 - protein, 14 aa, Homo sapiens
CAAWDDGLSVSYVF

SEQ ID NO: 3651 - protein, 24 aa, Homo sapiens
CAHRLRSTMFTGNWFDPGNWFDPW

SEQ ID NO: 3652 - protein, 15 aa, Homo sapiens
CARILYSSGLGFDPW

SEQ ID NO: 3653 - protein, 11 aa, Homo sapiens
CMQSIQLPLSF

SEQ ID NO: 3654 - protein, 20 aa, Homo sapiens
CARIPLPYCTSTTCYWFDTW

SEQ ID NO: 3655 - protein, 19 aa, Homo sapiens
CARQRDTMIVVVEYYFDYW

SEQ ID NO: 3656 - protein, 14 aa, Homo sapiens
CARVSWPMEAFDYW

SEQ ID NO: 3657 - protein, 16 aa, Homo sapiens
CAKDPGDHDQGWFDPW

SEQ ID NO: 3658 - protein, 18 aa, Homo sapiens
CARMIGPQYTTSWWFDPW

SEQ ID NO: 3659 - protein, 18 aa, Homo sapiens
CAKDMLPIAAAGHGLDYW

SEQ ID NO: 3660 - protein, 17 aa, Homo sapiens
CAKEAYYDILTGPFDYW

SEQ ID NO: 3661 - protein, 11 aa, Homo sapiens
CLQGIALPYAF

SEQ ID NO: 3662 - protein, 19 aa, Homo sapiens
CARDKMVRTIIITGPLDYW

SEQ ID NO: 3663 - protein, 15 aa, Homo sapiens
CTTEGYDYGSAIDYW

SEQ ID NO: 3664 - protein, 18 aa, Homo sapiens
CATVTDFRWDGERYFDNW

SEQ ID NO: 3665 - protein, 12 aa, Homo sapiens
CSKDRDGYREYW

SEQ ID NO: 3666 - protein, 17 aa, Homo sapiens
CASAKGDSTMITYFDYW

SEQ ID NO: 3667 - protein, 19 aa, Homo sapiens
CAKEPWPQLVHWTYYFDYW

SEQ ID NO: 3668 - protein, 16 aa, Homo sapiens
CARVERFGELRWFDPW

SEQ ID NO: 3669 - protein, 15 aa, Homo sapiens
CAKFDDYDDRGVDYW

SEQ ID NO: 3670 - protein, 14 aa, Homo sapiens
CASYDILTGSLDYW

SEQ ID NO: 3671 - protein, 16 aa, Homo sapiens
CARHGRITGSSWFDPW

SEQ ID NO: 3672 - protein, 17 aa, Homo sapiens
CAKGIFGVVTIDGMDVW

SEQ ID NO: 3673 - protein, 14 aa, Homo sapiens
CARVEQWPVGFDYW

SEQ ID NO: 3674 - protein, 11 aa, Homo sapiens
CATALGGFDPW

SEQ ID NO: 3675 - protein, 18 aa, Homo sapiens
CARLGDYGTSSYNWYDPW

SEQ ID NO: 3676 - protein, 16 aa, Homo sapiens
CAKDIYGDYDGHVDYW

SEQ ID NO: 3677 - protein, 16 aa, Homo sapiens
CARRPSYSGGGGLDYW

SEQ ID NO: 3678 - protein, 15 aa, Homo sapiens
CARRPNTSSGKFDQW

SEQ ID NO: 3679 - protein, 18 aa, Homo sapiens
CAKADSDSYFPPSYFDSW

SEQ ID NO: 3680 - protein, 28 aa, Homo sapiens
CAKDFTIFGVVIPLGLERRYYYYGMDVW

SEQ ID NO: 3681 - protein, 17 aa, Homo sapiens
CARHLRENFEGYYFDYW

SEQ ID NO: 3682 - protein, 15 aa, Homo sapiens
CARVGAGVETTIDYW

SEQ ID NO: 3683 - protein, 16 aa, Homo sapiens
CAKDIQPYSGYDFDYW

SEQ ID NO: 3684 - protein, 17 aa, Homo sapiens
CARDRYSGYEYRDFDQW

SEQ ID NO: 3685 - protein, 15 aa, Homo sapiens
CTRYYDYVWGTFGYW

SEQ ID NO: 3686 - protein, 17 aa, Homo sapiens
CARDREAYSNHGGFDQW

SEQ ID NO: 3687 - protein, 27 aa, Homo sapiens
CAKAVNDYGDYLPLLRPDNYYYAMDVW

SEQ ID NO: 3688 - protein, 16 aa, Homo sapiens
CARFHRDGYNLFSDYW

SEQ ID NO: 3689 - protein, 12 aa, Homo sapiens
CQHYDNLRMSSF

SEQ ID NO: 3690 - protein, 17 aa, Homo sapiens
CAKGRGYSGYGDAFDIW

SEQ ID NO: 3691 - protein, 12 aa, Homo sapiens
CARDLNNVFQYW

SEQ ID NO: 3692 - protein, 21 aa, Homo sapiens
CAKNFNNCGGDCWYYYGMDVW

SEQ ID NO: 3693 - protein, 16 aa, Homo sapiens
CAKDNGGNSGWYFDVW

SEQ ID NO: 3694 - protein, 19 aa, Homo sapiens
CAKGPIRWLQLVNYYFDYW

SEQ ID NO: 3695 - protein, 23 aa, Homo sapiens
CARGRSVFEPSYRLLLLGYFDYW

SEQ ID NO: 3696 - protein, 18 aa, Homo sapiens
CARRYCPGGSCYDAFDIW

SEQ ID NO: 3697 - protein, 18 aa, Homo sapiens
CARESRAAAGPPDAFDIW

SEQ ID NO: 3698 - protein, 13 aa, Homo sapiens
CAKWVTGDSGDYW

SEQ ID NO: 3699 - protein, 17 aa, Homo sapiens
CARELRYKAYYYGMDVW

SEQ ID NO: 3700 - protein, 18 aa, Homo sapiens
CVRGKTPQWATAGVFEYW

SEQ ID NO: 3701 - protein, 18 aa, Homo sapiens
CARHPRPELYSSYHFDYW

SEQ ID NO: 3702 - protein, 19 aa, Homo sapiens
CAREGSGTTFRPYNWFDPW

SEQ ID NO: 3703 - protein, 19 aa, Homo sapiens
CAKDGGPVAGTHGGAFDYW

SEQ ID NO: 3704 - protein, 22 aa, Homo sapiens
CTRHSTTTFGGQIVEPGGFDFW

SEQ ID NO: 3705 - protein, 18 aa, Homo sapiens
CARGKTIGAAGLYYFDYW

SEQ ID NO: 3706 - protein, 13 aa, Homo sapiens
CARVSQFRFLDYW

SEQ ID NO: 3707 - protein, 16 aa, Homo sapiens
CANMGVTIWGRYFDYW

SEQ ID NO: 3708 - protein, 21 aa, Homo sapiens
CATGPQVVAATYYYYYGMDVW

SEQ ID NO: 3709 - protein, 14 aa, Homo sapiens
CTSQFNTWYVFDYW

SEQ ID NO: 3710 - protein, 19 aa, Homo sapiens
CARDPYNWRAPGDWYFDLW

SEQ ID NO: 3711 - protein, 20 aa, Homo sapiens
CARGATYYHDNDGPHFFDPW

SEQ ID NO: 3712 - protein, 14 aa, Homo sapiens
CVRGVGATGYFANW

SEQ ID NO: 3713 - protein, 18 aa, Homo sapiens
CAKDPDDGYSSSWSFDYW

SEQ ID NO: 3714 - protein, 12 aa, Homo sapiens
CQQGSNWLRFTF

SEQ ID NO: 3715 - protein, 21 aa, Homo sapiens
CAKVGPCTTCYYYFYYPMDVW

SEQ ID NO: 3716 - protein, 23 aa, Homo sapiens
CARVSFAYYYDSSGYYKGYFDYW

SEQ ID NO: 3717 - protein, 16 aa, Homo sapiens
CARGSGATANDAFDIW

SEQ ID NO: 3718 - protein, 18 aa, Homo sapiens
CVRSVVCYVTSYCYFDYW

SEQ ID NO: 3719 - protein, 14 aa, Homo sapiens
CARQRGALGWFDPW

SEQ ID NO: 3720 - protein, 18 aa, Homo sapiens
CAKEHYGDYYYYYGMDVW

SEQ ID NO: 3721 - protein, 16 aa, Homo sapiens
CARAGDITLSGGFDYW

SEQ ID NO: 3722 - protein, 17 aa, Homo sapiens
CARGPTWDGGGYYFDYW

SEQ ID NO: 3723 - protein, 16 aa, Homo sapiens
CARSGTYSGYDDFDPW

SEQ ID NO: 3724 - protein, 18 aa, Homo sapiens
CTRHPGYSGPYYYGMDVW

SEQ ID NO: 3725 - protein, 15 aa, Homo sapiens
CARDMGSGGTCSDYW

SEQ ID NO: 3726 - protein, 20 aa, Homo sapiens
CAHSPKLLWFGEKRGWFDPW

SEQ ID NO: 3727 - protein, 15 aa, Homo sapiens
CARVLNYVPNWFDPW

SEQ ID NO: 3728 - protein, 11 aa, Homo sapiens
CAGHSSFKDYW

SEQ ID NO: 3729 - protein, 23 aa, Homo sapiens
CARFTRGYSAAPGGWVRYYFDNW

SEQ ID NO: 3730 - protein, 20 aa, Homo sapiens
CARTTARPQWLYYYYGMDVW

SEQ ID NO: 3731 - protein, 19 aa, Homo sapiens
CAKVSRYEPSEFSFYFDDW

SEQ ID NO: 3732 - protein, 15 aa, Homo sapiens
CARGGVDATTSFDMW

SEQ ID NO: 3733 - protein, 18 aa, Homo sapiens
CARSVISERVRGVAFDFW

SEQ ID NO: 3734 - protein, 16 aa, Homo sapiens
CARGDIVVVPAALDYW

SEQ ID NO: 3735 - protein, 22 aa, Homo sapiens
CARLSIVSESVAVWYYYGMDVW

SEQ ID NO: 3736 - protein, 18 aa, Homo sapiens
CARSPDEQWVAAYYFDYW

SEQ ID NO: 3737 - protein, 17 aa, Homo sapiens
CARGYSGSHWYNYFDYW

SEQ ID NO: 3738 - protein, 14 aa, Homo sapiens
CQQHDNLPQKGITF

SEQ ID NO: 3739 - protein, 18 aa, Homo sapiens
CARHRENSGWYTTPFDYW

SEQ ID NO: 3740 - protein, 17 aa, Homo sapiens
CARASFQYGPGSYLDHW

SEQ ID NO: 3741 - protein, 22 aa, Homo sapiens
CARSISDCPISLCLAKGYFDRW

SEQ ID NO: 3742 - protein, 23 aa, Homo sapiens
CARDASYYDILTGYYNSGLFDYW

SEQ ID NO: 3743 - protein, 20 aa, Homo sapiens
CARDRDHIYSDAHYDAYDIW

SEQ ID NO: 3744 - protein, 23 aa, Homo sapiens
CARDPGYCSGGSCYTPLYYFDYW

SEQ ID NO: 3745 - protein, 13 aa, Homo sapiens
CTTVRAWYYFDYW

SEQ ID NO: 3746 - protein, 11 aa, Homo sapiens
CQSDDGSNWVF

SEQ ID NO: 3747 - protein, 17 aa, Homo sapiens
CAKARLGGYEPNWFDPW

SEQ ID NO: 3748 - protein, 17 aa, Homo sapiens
CARDRGVLRPPVAFDIW

SEQ ID NO: 3749 - protein, 16 aa, Homo sapiens
CAKGSWPALVGYFDYW

SEQ ID NO: 3750 - protein, 17 aa, Homo sapiens
CTTDRDPYSSSSGGDYW

SEQ ID NO: 3751 - protein, 18 aa, Homo sapiens
CARSPPGGNAVLYYFDAW

SEQ ID NO: 3752 - protein, 14 aa, Homo sapiens
CQQSYSTEIPAFTF

SEQ ID NO: 3753 - protein, 15 aa, Homo sapiens
CARVRYTYYYAMDVW

SEQ ID NO: 3754 - protein, 22 aa, Homo sapiens
CARVMRYFDWLLEYYYYGMDVW

SEQ ID NO: 3755 - protein, 14 aa, Homo sapiens
CAKTDSVDLTFDYW

SEQ ID NO: 3756 - protein, 21 aa, Homo sapiens
CAKDRQGYDYSDYVEYFFDSW

SEQ ID NO: 3757 - protein, 13 aa, Homo sapiens
CTSYTSSSTFVVF

SEQ ID NO: 3758 - protein, 22 aa, Homo sapiens
CATLFGASGSLLPYYYYGMDVW

SEQ ID NO: 3759 - protein, 14 aa, Homo sapiens
CSSMVRGVDAFDIW

SEQ ID NO: 3760 - protein, 11 aa, Homo sapiens
CLQHNSPHWAF

SEQ ID NO: 3761 - protein, 14 aa, Homo sapiens
CAAWDESLNGFCLF

SEQ ID NO: 3762 - protein, 13 aa, Homo sapiens
CQQRTSWPRRLTF

SEQ ID NO: 3763 - protein, 15 aa, Homo sapiens
CATLRDGYNPDLDYW

SEQ ID NO: 3764 - protein, 14 aa, Homo sapiens
CARAMAGKNFFDYW

SEQ ID NO: 3765 - protein, 20 aa, Homo sapiens
CAKDSPEEYSSGWYWGFDYW

SEQ ID NO: 3766 - protein, 17 aa, Homo sapiens
CARISRDGFNLYYFDYW

SEQ ID NO: 3767 - protein, 17 aa, Homo sapiens
CAKIPSTAMVYDAFDIW

SEQ ID NO: 3768 - protein, 19 aa, Homo sapiens
CATTRIYLMEPVIYYFDSW

SEQ ID NO: 3769 - protein, 12 aa, Homo sapiens
CSSADSSRNRLF

SEQ ID NO: 3770 - protein, 15 aa, Homo sapiens
CAKLGTTGSPTGDYW

SEQ ID NO: 3771 - protein, 20 aa, Homo sapiens
CATLGRLGELSLPTPPEDYW

SEQ ID NO: 3772 - protein, 25 aa, Homo sapiens
CARDAPLQPLPAARYYYYYYGMDVW

SEQ ID NO: 3773 - protein, 13 aa, Homo sapiens
CTAAPNYYYFNYW

SEQ ID NO: 3774 - protein, 26 aa, Homo sapiens
CARAPGGYCSSTSCYGSYYYYGMDVW

SEQ ID NO: 3775 - protein, 15 aa, Homo sapiens
CAKEKGTNWYYFDSW

SEQ ID NO: 3776 - protein, 20 aa, Homo sapiens
CAKAPTLLWFGDLLSFFDSW

SEQ ID NO: 3777 - protein, 17 aa, Homo sapiens
CARLRFVGGTAFGFDYW

SEQ ID NO: 3778 - protein, 23 aa, Homo sapiens
CARGQYCSGGKCNLPPLNWFDPW

SEQ ID NO: 3779 - protein, 26 aa, Homo sapiens
CTRLPHNYCSRGTCGPDYYYYGMDVW

SEQ ID NO: 3780 - protein, 17 aa, Homo sapiens
CAKVQVEYTGGFYLDYW

SEQ ID NO: 3781 - protein, 26 aa, Homo sapiens
CTTTVRGDFWSGYYSTTYYYYGIDVW

SEQ ID NO: 3782 - protein, 16 aa, Homo sapiens
CARVDILMAYNWLDPW

SEQ ID NO: 3783 - protein, 23 aa, Homo sapiens
CALYYCAKYARESYYYYYAMDVW

SEQ ID NO: 3784 - protein, 15 aa, Homo sapiens
CAGVRGSNNDAFDIW

SEQ ID NO: 3785 - protein, 14 aa, Homo sapiens
CARGGYSYGCPDYW

SEQ ID NO: 3786 - protein, 19 aa, Homo sapiens
CSKEIYPLKAIGPGWFDPW

SEQ ID NO: 3787 - protein, 18 aa, Homo sapiens
CAKDLMVRGYGYGCFDYW

SEQ ID NO: 3788 - protein, 16 aa, Homo sapiens
CASVVQHLEGHYFDYW

SEQ ID NO: 3789 - protein, 15 aa, Homo sapiens
CATLSSAVAPYFDYW

SEQ ID NO: 3790 - protein, 22 aa, Homo sapiens
CAKGDQSTPYSSSWYQNWFDPW

SEQ ID NO: 3791 - protein, 20 aa, Homo sapiens
CLRGMYQYESAGYRGWLDPW

SEQ ID NO: 3792 - protein, 16 aa, Homo sapiens
CARCPRGTQYNIFDVW

SEQ ID NO: 3793 - protein, 16 aa, Homo sapiens
CATPSSGSPHFAMDVW

SEQ ID NO: 3794 - protein, 19 aa, Homo sapiens
CARLHYDFWSGEDSQLDYW

SEQ ID NO: 3795 - protein, 26 aa, Homo sapiens
CLRAEDTAVYFCARSLSGYGYAFDLW

SEQ ID NO: 3796 - protein, 22 aa, Homo sapiens
CAKDSGTSCLEGPCYYYGMDVW

SEQ ID NO: 3797 - protein, 23 aa, Homo sapiens
CAKELYSDGSGDYYVPYAAFDSW

SEQ ID NO: 3798 - protein, 19 aa, Homo sapiens
CAHSYYDILTGIAIYFDYW

SEQ ID NO: 3799 - protein, 15 aa, Homo sapiens
CASFRYNWNDGIDYW

SEQ ID NO: 3800 - protein, 22 aa, Homo sapiens
CARHYQGSSTGWYYYYYGMDVW

SEQ ID NO: 3801 - protein, 17 aa, Homo sapiens
CAKVAGYLKSPYYFDYW

SEQ ID NO: 3802 - protein, 17 aa, Homo sapiens
CARDILTGYYYNWFDPW

SEQ ID NO: 3803 - protein, 22 aa, Homo sapiens
CARQADYNLLTGYSSGHYLDFW

SEQ ID NO: 3804 - protein, 17 aa, Homo sapiens
CVKDLSPAAIRPLFDDW

SEQ ID NO: 3805 - protein, 18 aa, Homo sapiens
CAKDQSSDWSLNWYLDVW

SEQ ID NO: 3806 - protein, 19 aa, Homo sapiens
CARHVRAVEMAERSYFQHW

SEQ ID NO: 3807 - protein, 15 aa, Homo sapiens
CARDRGWELPGFDYW

SEQ ID NO: 3808 - protein, 12 aa, Homo sapiens
CQQTNNFPPYIF

SEQ ID NO: 3809 - protein, 19 aa, Homo sapiens
CAKLASGDGYTRGDAFDIW

SEQ ID NO: 3810 - protein, 12 aa, Homo sapiens
CQDYANWPLHTF

SEQ ID NO: 3811 - protein, 11 aa, Homo sapiens
CARLNLYFDLW

SEQ ID NO: 3812 - protein, 21 aa, Homo sapiens
CARVPTYPFCSSVSCYGFDPW

SEQ ID NO: 3813 - protein, 17 aa, Homo sapiens
CARGRHHYDRSGYSDYW

SEQ ID NO: 3814 - protein, 17 aa, Homo sapiens
CAKDIWPTSSGGYPDYW

SEQ ID NO: 3815 - protein, 17 aa, Homo sapiens
CARDRYYYDTIGYLAYW

SEQ ID NO: 3816 - protein, 20 aa, Homo sapiens
CATVRDMFHLGESSPKFDSW

SEQ ID NO: 3817 - protein, 14 aa, Homo sapiens
CANRGDSSTAFDIW

SEQ ID NO: 3818 - protein, 13 aa, Homo sapiens
CQQYITYSTMLTF

SEQ ID NO: 3819 - protein, 23 aa, Homo sapiens
CARGKGSIDWDPRIPPTFYFDYW

SEQ ID NO: 3820 - protein, 19 aa, Homo sapiens
CATIKGPNYYDSSGHVDYW

SEQ ID NO: 3821 - protein, 19 aa, Homo sapiens
CARDREYYGSGSSDGMDVW

SEQ ID NO: 3822 - protein, 23 aa, Homo sapiens
CARLEYDYVWGSYRRTTNYFDYW

SEQ ID NO: 3823 - protein, 16 aa, Homo sapiens
CWSTSCYGMEACFDYW

SEQ ID NO: 3824 - protein, 27 aa, Homo sapiens
CAIRGNSRTTCRSGRCTYDFKNWFDPW

SEQ ID NO: 3825 - protein, 26 aa, Homo sapiens
CARISNFGYFDWLLRTDYYYYGMDVW

SEQ ID NO: 3826 - protein, 17 aa, Homo sapiens
CAKLAGFSYYDSSEDYW

SEQ ID NO: 3827 - protein, 16 aa, Homo sapiens
CARAPSGSGSYYFYYW

SEQ ID NO: 3828 - protein, 17 aa, Homo sapiens
CANLPAVAGTPSAFDIW

SEQ ID NO: 3829 - protein, 12 aa, Homo sapiens
CAAQLIASLDYW

SEQ ID NO: 3830 - protein, 17 aa, Homo sapiens
CARSLHVVRYFDAFDVW

SEQ ID NO: 3831 - protein, 21 aa, Homo sapiens
CARVDWFGDILNPFFWYFDPW

SEQ ID NO: 3832 - protein, 19 aa, Homo sapiens
CAKGFGGFSDILTGYYDYW

SEQ ID NO: 3833 - protein, 12 aa, Homo sapiens
CAGALELFFDFW

SEQ ID NO: 3834 - protein, 20 aa, Homo sapiens
CAKASNYYDSSGYYWYFDLW

SEQ ID NO: 3835 - protein, 16 aa, Homo sapiens
CAKGQIAAAGTTFDYW

SEQ ID NO: 3836 - protein, 22 aa, Homo sapiens
CAKDLRPADFSGYQLEYYFDTW

SEQ ID NO: 3837 - protein, 12 aa, Homo sapiens
CARGGAWIFDFW

SEQ ID NO: 3838 - protein, 29 aa, Homo sapiens
CALPISAVYYCARAKQYYYDSSGYYFGYW

SEQ ID NO: 3839 - protein, 18 aa, Homo sapiens
CASPGFIAAAGTFAFDIW

SEQ ID NO: 3840 - protein, 15 aa, Homo sapiens
CAKDGYPGLEYFQHW

SEQ ID NO: 3841 - protein, 20 aa, Homo sapiens
CASEKMDYDSSGYYSPFVYW

SEQ ID NO: 3842 - protein, 16 aa, Homo sapiens
CARVVGSTNDPNFDHW

SEQ ID NO: 3843 - protein, 21 aa, Homo sapiens
CARAKYDILTGYSLGYFFDYW

SEQ ID NO: 3844 - protein, 17 aa, Homo sapiens
CAKELGDGYNWGPFDYW

SEQ ID NO: 3845 - protein, 20 aa, Homo sapiens
CAKYIGSCNGLGCSRYFDPW

SEQ ID NO: 3846 - protein, 21 aa, Homo sapiens
CAKDILRSEVWRSSSSGSDYW

SEQ ID NO: 3847 - protein, 14 aa, Homo sapiens
CAKLSGSYHNFDYW

SEQ ID NO: 3848 - protein, 17 aa, Homo sapiens
CAKGGYGDGYHKGFDYW

SEQ ID NO: 3849 - protein, 18 aa, Homo sapiens
CAKDRDDIFWSGYAMDVW

SEQ ID NO: 3850 - protein, 13 aa, Homo sapiens
CQSADYIGSYRVF

SEQ ID NO: 3851 - protein, 17 aa, Homo sapiens
CARFTKFSLVRAGFDPW

SEQ ID NO: 3852 - protein, 15 aa, Homo sapiens
CARSVIQRYYYFQYW

SEQ ID NO: 3853 - protein, 23 aa, Homo sapiens
CAKGHVLLWFGELSARENWFDPW

SEQ ID NO: 3854 - protein, 19 aa, Homo sapiens
CARDSYFDHIWGPYRFDFW

SEQ ID NO: 3855 - protein, 24 aa, Homo sapiens
CAREKGGHFDSTGNYFQSRGFDLW

SEQ ID NO: 3856 - protein, 17 aa, Homo sapiens
CSVDFHALTGYYSLDYW

SEQ ID NO: 3857 - protein, 17 aa, Homo sapiens
CARLGASGDNYYAMDVW

SEQ ID NO: 3858 - protein, 17 aa, Homo sapiens
CARDITMIVVVPYFDYW

SEQ ID NO: 3859 - protein, 25 aa, Homo sapiens
CASPNYDILTGYPINVGYYYGMDVW

SEQ ID NO: 3860 - protein, 16 aa, Homo sapiens
CTKAYIIGTPSGFDYW

SEQ ID NO: 3861 - protein, 18 aa, Homo sapiens
CAKDLPGSYYLAYYFDYW

SEQ ID NO: 3862 - protein, 19 aa, Homo sapiens
CARSGPRGYNYGYRAFDLW

SEQ ID NO: 3863 - protein, 18 aa, Homo sapiens
CARMGEYCSRSSCYFDFW

SEQ ID NO: 3864 - protein, 17 aa, Homo sapiens
CAKDMQFGELRDWFDPW

SEQ ID NO: 3865 - protein, 15 aa, Homo sapiens
CARVRGGIPAAIDYW

SEQ ID NO: 3866 - protein, 20 aa, Homo sapiens
CAKGNDPLLVGATPYYFDYW

SEQ ID NO: 3867 - protein, 11 aa, Homo sapiens [sequence omitted]

SEQ ID NO: 3868 - protein, 10 aa, Homo sapiens
CQEYGDSPAF

SEQ ID NO: 3869 - protein, 24 aa, Homo sapiens
CARGSIVVVPAAKPVRYYYGMDVW

SEQ ID NO: 3870 - protein, 19 aa, Homo sapiens
CARQISQRGYPIGDYFDYW

SEQ ID NO: 3871 - protein, 17 aa, Homo sapiens
CTKVARNSGWYSFFDYW

SEQ ID NO: 3872 - protein, 20 aa, Homo sapiens
CARDDDYYDSSGYILPFDYW

SEQ ID NO: 3873 - protein, 22 aa, Homo sapiens
CAHSRVLRYFDWLFGDNWFDPW

SEQ ID NO: 3874 - protein, 21 aa, Homo sapiens
CARQEGNCIGVRCYAIWFDPW

SEQ ID NO: 3875 - protein, 18 aa, Homo sapiens
CAIYDSSGYYLIEPFDYW

SEQ ID NO: 3876 - protein, 23 aa, Homo sapiens
CANLYYDSSGYSPGYYYYGMDVW

SEQ ID NO: 3877 - protein, 20 aa, Homo sapiens
CARARFLSRGRETVTAFDHW

SEQ ID NO: 3878 - protein, 18 aa, Homo sapiens
CARVDYGDYIWLTPGDYW

SEQ ID NO: 3879 - protein, 16 aa, Homo sapiens
CAKERGRSSGWDFDYW

SEQ ID NO: 3880 - protein, 15 aa, Homo sapiens
CARNSRSDTPWCDSW

SEQ ID NO: 3881 - protein, 17 aa, Homo sapiens
CTRFTWSSSGHTDFDFW

SEQ ID NO: 3882 - protein, 15 aa, Homo sapiens
CAKVDFWSGYSPDYW

SEQ ID NO: 3883 - protein, 19 aa, Homo sapiens
CARGRDLLAAAGNDAFDIW

SEQ ID NO: 3884 - protein, 17 aa, Homo sapiens
CAKDFVFNWNQFKFDKW

SEQ ID NO: 3885 - protein, 17 aa, Homo sapiens
CAKDISSGWYVHYFDYW

SEQ ID NO: 3886 - protein, 14 aa, Homo sapiens
CQVWESSSDHRWVF

SEQ ID NO: 3887 - protein, 21 aa, Homo sapiens
CAKVSSGGAYDKHQKNWFDPW

SEQ ID NO: 3888 - protein, 15 aa, Homo sapiens
CATLGDYGDYYFDYW

SEQ ID NO: 3889 - protein, 19 aa, Homo sapiens
CAKESTVTHSYYYYGLDVW

SEQ ID NO: 3890 - protein, 17 aa, Homo sapiens
CAKEPYYDNREGCFDAW

SEQ ID NO: 3891 - protein, 15 aa, Homo sapiens
CGIMPGWTAYAFDIW

SEQ ID NO: 3892 - protein, 28 aa, Homo sapiens
CARIPPPYYFNNSDYYSRRSGPAAFDIW

SEQ ID NO: 3893 - protein, 13 aa, Homo sapiens
CANVGGGWAPDYW

SEQ ID NO: 3894 - protein, 16 aa, Homo sapiens
CAKGFDGYGVPSLDYW

SEQ ID NO: 3895 - protein, 17 aa, Homo sapiens
CARRPGRTSGYSAADYW

SEQ ID NO: 3896 - protein, 19 aa, Homo sapiens
CARDSPYYDFFTGSIFDLW

SEQ ID NO: 3897 - protein, 19 aa, Homo sapiens
CARAKQYYYDSSGYYFGYW

SEQ ID NO: 3898 - protein, 21 aa, Homo sapiens
CAKVEPTGLTTVTTHGAFDIW

SEQ ID NO: 3899 - protein, 22 aa, Homo sapiens
CATSIAVAGTLGSYYYYGMDVW

SEQ ID NO: 3900 - protein, 24 aa, Homo sapiens
CAKSSDYESLFLGVYQYQFYFAYW

SEQ ID NO: 3901 - protein, 15 aa, Homo sapiens
CAIERERGSFWFDPW

SEQ ID NO: 3902 - protein, 9 aa, Homo sapiens
CANPPGDYW

SEQ ID NO: 3903 - protein, 19 aa, Homo sapiens
CAHESGYDFWSGYYGFDYW

SEQ ID NO: 3904 - protein, 19 aa, Homo sapiens
CARLYDNSGYSPQYYFDYW

SEQ ID NO: 3905 - protein, 18 aa, Homo sapiens
CARDPQEVVAALSYFDYW

SEQ ID NO: 3906 - protein, 19 aa, Homo sapiens
CAKDPTRFDFAREGWFDPW

SEQ ID NO: 3907 - protein, 14 aa, Homo sapiens
CCSYAGSYTFRVVF

SEQ ID NO: 3908 - protein, 18 aa, Homo sapiens
CSSTSCRPWYYYYGMDVW

SEQ ID NO: 3909 - protein, 20 aa, Homo sapiens
CTRDPPGYCSGGSCSLFDLW

SEQ ID NO: 3910 - protein, 16 aa, Homo sapiens
CAREDSSTSRLALDYW

SEQ ID NO: 3911 - protein, 19 aa, Homo sapiens
CASLGTTVVTSYYYGMDVW

SEQ ID NO: 3912 - protein, 20 aa, Homo sapiens
CARVNTMVRGVIIDNWFDPW

SEQ ID NO: 3913 - protein, 10 aa, Homo sapiens
CMESIQLPAF

SEQ ID NO: 3914 - protein, 24 aa, Homo sapiens
CARRVWRVAASRDRKSGPNYFDLW

SEQ ID NO: 3915 - protein, 26 aa, Homo sapiens
CARFLDYHFSESGGQYFYYHYGMDVW

SEQ ID NO: 3916 - protein, 17 aa, Homo sapiens
CAKDRVGVVTASYVDYW

SEQ ID NO: 3917 - protein, 15 aa, Homo sapiens
CAATTGYYLGAFDIW

SEQ ID NO: 3918 - protein, 17 aa, Homo sapiens
CAKVPGKYYDGGPFDYW

SEQ ID NO: 3919 - protein, 13 aa, Homo sapiens
CLLYYGDAQFWVF

SEQ ID NO: 3920 - protein, 24 aa, Homo sapiens
CARTNQRGVGVAGKSYYFYGMDVW

SEQ ID NO: 3921 - protein, 14 aa, Homo sapiens
CARCGSNWQPFDLW

SEQ ID NO: 3922 - protein, 12 aa, Homo sapiens
CARVPDTWYDYW

SEQ ID NO: 3923 - protein, 21 aa, Homo sapiens
CARDRGKVVPLGAATDAFDLW

SEQ ID NO: 3924 - protein, 18 aa, Homo sapiens
CARIKGGVYDVPGSFDFW

SEQ ID NO: 3925 - protein, 19 aa, Homo sapiens
CARDDRSRTRCCGWWPDPW

SEQ ID NO: 3926 - protein, 13 aa, Homo sapiens
CMQITHWSPAFTF

SEQ ID NO: 3927 - protein, 20 aa, Homo sapiens
CARPQDYGEYISYYYGMDVW

SEQ ID NO: 3928 - protein, 11 aa, Homo sapiens
CAIWYSNTYVF

SEQ ID NO: 3929 - protein, 20 aa, Homo sapiens
CATGPNYYDSSGYPNWFDPW

SEQ ID NO: 3930 - protein, 14 aa, Homo sapiens
CTTDPAPDGFFDYW

SEQ ID NO: 3931 - protein, 21 aa, Homo sapiens
CASSSYIYGTFGTRYYAIDVW

SEQ ID NO: 3932 - protein, 13 aa, Homo sapiens
CQSVDTSGTSLVF

SEQ ID NO: 3933 - protein, 14 aa, Homo sapiens
CARFYRRDGFFDYW

SEQ ID NO: 3934 - protein, 17 aa, Homo sapiens
CTRASFYNYGYWWFDPW

SEQ ID NO: 3935 - protein, 18 aa, Homo sapiens
CAKARSEFGSMRSSFDIW

SEQ ID NO: 3936 - protein, 17 aa, Homo sapiens
CTKGPVSSDRGWYFDLW

SEQ ID NO: 3937 - protein, 12 aa, Homo sapiens
CQQYNNLREFTF

SEQ ID NO: 3938 - protein, 11 aa, Homo sapiens
CMDALNTPSIF

SEQ ID NO: 3939 - protein, 18 aa, Homo sapiens
CARRGGFTIFDPIYFDYW

SEQ ID NO: 3940 - protein, 17 aa, Homo sapiens
CAKIQVLRYFEAYFDLW

SEQ ID NO: 3941 - protein, 24 aa, Homo sapiens
CAKDTRPWGYYYDSSGYLDAFDIW

SEQ ID NO: 3942 - protein, 20 aa, Homo sapiens
CARDRYGYYYDSSSNYFDYW

SEQ ID NO: 3943 - protein, 22 aa, Homo sapiens
CAREDYWIGETSGSYLGALDIW

SEQ ID NO: 3944 - protein, 20 aa, Homo sapiens
CAKESQLCSTTSCYFPFDSW

SEQ ID NO: 3945 - protein, 16 aa, Homo sapiens
CAKVATNWPGPSFDYW

SEQ ID NO: 3946 - protein, 15 aa, Homo sapiens
CAKDISPYNSLFDYW

SEQ ID NO: 3947 - protein, 17 aa, Homo sapiens
CARTNSGFWSGYYEDYW

SEQ ID NO: 3948 - protein, 13 aa, Homo sapiens
CMQVLQTPVMYTF

SEQ ID NO: 3949 - protein, 17 aa, Homo sapiens
CVKERDASGTWSGLDYW

SEQ ID NO: 3950 - protein, 13 aa, Homo sapiens
CGPRNYYYGMDVW

SEQ ID NO: 3951 - protein, 18 aa, Homo sapiens
CAKDQMTGNRGLGVFDVW

SEQ ID NO: 3952 - protein, 15 aa, Homo sapiens
CAKGHSSSWFYLDSW

SEQ ID NO: 3953 - protein, 14 aa, Homo sapiens
CASSLYPGAPFDYW

SEQ ID NO: 3954 - protein, 20 aa, Homo sapiens
CARDLNSIWVAAIESYFDYW

SEQ ID NO: 3955 - protein, 24 aa, Homo sapiens
CAKDMRLEGRYFDLSQYYYAMDVW

SEQ ID NO: 3956 - protein, 16 aa, Homo sapiens
CGRDHRYDSRAFVDYW

SEQ ID NO: 3957 - protein, 18 aa, Homo sapiens
CARTAYSSSKRGGWFDPW

SEQ ID NO: 3958 - protein, 11 aa, Homo sapiens
CQSRSDWPVAF

SEQ ID NO: 3959 - protein, 19 aa, Homo sapiens
CGRVTSHYGVGVLGTFDYW

SEQ ID NO: 3960 - protein, 17 aa, Homo sapiens
CARDGGYTYGSARFDYW

SEQ ID NO: 3961 - protein, 14 aa, Homo sapiens
CARGRKLGGNFDYW

SEQ ID NO: 3962 - protein, 17 aa, Homo sapiens
CARENRITMVRGVIDYW

SEQ ID NO: 3963 - protein, 14 aa, Homo sapiens
CQHYNNGPPVMYTF

SEQ ID NO: 3964 - protein, 16 aa, Homo sapiens
CARDGRFGEYWLIDYW

SEQ ID NO: 3965 - protein, 17 aa, Homo sapiens
CAKDRRGSSGWWYFDVW

SEQ ID NO: 3966 - protein, 14 aa, Homo sapiens
CARDLLGITGPDYW

SEQ ID NO: 3967 - protein, 15 aa, Homo sapiens
CGRPLYSPNEDGDYW

SEQ ID NO: 3968 - protein, 23 aa, Homo sapiens
CVKKAQYYDYVRKHYRYTAFDQW

SEQ ID NO: 3969 - protein, 19 aa, Homo sapiens
CAKAAWIQLWLRSNYFDYW

SEQ ID NO: 3970 - protein, 12 aa, Homo sapiens
CAKSGNSVFDQW

SEQ ID NO: 3971 - protein, 16 aa, Homo sapiens
CAKDMWAAPAYYFDSW

SEQ ID NO: 3972 - protein, 18 aa, Homo sapiens
CAKDGIPANGRWDSFDLW

SEQ ID NO: 3973 - protein, 15 aa, Homo sapiens
CARHPRAAAGRLDYW

SEQ ID NO: 3974 - protein, 16 aa, Homo sapiens
CARDDSSGYLDAFDIW

SEQ ID NO: 3975 - protein, 22 aa, Homo sapiens
CAHSIVGPVRATDSAAGTFDYW

SEQ ID NO: 3976 - protein, 22 aa, Homo sapiens
CAKDLGPLWFGNGYYYYGMDVW

SEQ ID NO: 3977 - protein, 16 aa, Homo sapiens
CVRDFGNGTPYYFDFW

SEQ ID NO: 3978 - protein, 17 aa, Homo sapiens
CAKPSLDGYTPGYFDYW

SEQ ID NO: 3979 - protein, 15 aa, Homo sapiens
CAHRPDISLYYFDYW

SEQ ID NO: 3980 - protein, 17 aa, Homo sapiens
CARGGINLWDTHPFDHW

SEQ ID NO: 3981 - protein, 13 aa, Homo sapiens
CQVWDSATEHVLF

SEQ ID NO: 3982 - protein, 13 aa, Homo sapiens
CATLQRQQPYDYW

SEQ ID NO: 3983 - protein, 12 aa, Homo sapiens
CTRDSSRAFGYW

SEQ ID NO: 3984 - protein, 18 aa, Homo sapiens
CATARFHTSGTYQIGDYW

SEQ ID NO: 3985 - protein, 16 aa, Homo sapiens
CATPRASGWVYYFAYW

SEQ ID NO: 3986 - protein, 17 aa, Homo sapiens
CAKQDSGPVHDNWFDPW

SEQ ID NO: 3987 - protein, 15 aa, Homo sapiens
CQQYKNWPTNSWPTF

SEQ ID NO: 3988 - protein, 16 aa, Homo sapiens
CATMTTPSYYYALDVW

SEQ ID NO: 3989 - protein, 20 aa, Homo sapiens
CAKLGAEGLPGDYYYGMDVW

SEQ ID NO: 3990 - protein, 20 aa, Homo sapiens
CAKDPTGYYYDSSGYYYDYW

SEQ ID NO: 3991 - protein, 21 aa, Homo sapiens
CAKDLDSGYNLGETHDSFDMW

SEQ ID NO: 3992 - protein, 20 aa, Homo sapiens
CARDIRESSSWYYYYGMDVW

SEQ ID NO: 3993 - protein, 18 aa, Homo sapiens
CARVHDSSGPVHDTFDFW

SEQ ID NO: 3994 - protein, 21 aa, Homo sapiens
CAKDQSWFGEYRYKMDAFDMW

SEQ ID NO: 3995 - protein, 14 aa, Homo sapiens
CAKQARTTDEFDYW

SEQ ID NO: 3996 - protein, 22 aa, Homo sapiens
CAHRGLVRVGHLTGETNSFDAW

SEQ ID NO: 3997 - protein, 18 aa, Homo sapiens
CAKDLTSNTWPSLYFDSW

SEQ ID NO: 3998 - protein, 17 aa, Homo sapiens
CSKDQNVNYPYNWFDPW

SEQ ID NO: 3999 - protein, 16 aa, Homo sapiens
CARGIGDWYDYYFDSW

SEQ ID NO: 4000 - protein, 18 aa, Homo sapiens
CARDQGLVLNYYYGMDVW

SEQ ID NO: 4001 - protein, 11 aa, Homo sapiens
CETWDSDSRVF

SEQ ID NO: 4002 - protein, 16 aa, Homo sapiens
CATVDRRTDPNSFDYW

SEQ ID NO: 4003 - protein, 15 aa, Homo sapiens
CAKDIYPVQGSADYW

SEQ ID NO: 4004 - protein, 17 aa, Homo sapiens
CAHRGSSSSWYTEFDYW

SEQ ID NO: 4005 - protein, 12 aa, Homo sapiens
CATLAAAGGDYW

SEQ ID NO: 4006 - protein, 17 aa, Homo sapiens
CARDYLWGTYPYFFDSW

SEQ ID NO: 4007 - protein, 23 aa, Homo sapiens
CARLTTLHDYVWGSYRFNWFDPW

SEQ ID NO: 4008 - protein, 18 aa, Homo sapiens
CAKVRYTFGGVIANFDYW

SEQ ID NO: 4009 - protein, 22 aa, Homo sapiens
CAKDLGDGYCSSTSCYGGLDYW

SEQ ID NO: 4010 - protein, 18 aa, Homo sapiens
CAADLRNYYDSSGYADYW

SEQ ID NO: 4011 - protein, 14 aa, Homo sapiens
CVSSSWYGYYFDYW

SEQ ID NO: 4012 - protein, 13 aa, Homo sapiens
CGAWGSSLSAMIF

SEQ ID NO: 4013 - protein, 18 aa, Homo sapiens
CAKGYSYGDETAYYFDYW

SEQ ID NO: 4014 - protein, 12 aa, Homo sapiens
CQQFASSPRLIF

SEQ ID NO: 4015 - protein, 10 aa, Homo sapiens
CQQADSHSTF

SEQ ID NO: 4016 - protein, 17 aa, Homo sapiens
CASGFAIPRFGYSIDYW

SEQ ID NO: 4017 - protein, 20 aa, Homo sapiens
CARDRKTVGFSYYYYGMDVW

SEQ ID NO: 4018 - protein, 12 aa, Homo sapiens
CQLRSKWPTLTF

SEQ ID NO: 4019 - protein, 15 aa, Homo sapiens
CARDLAMAPRYFDYW

SEQ ID NO: 4020 - protein, 14 aa, Homo sapiens
CQSYDITLSGGEVF

SEQ ID NO: 4021 - protein, 18 aa, Homo sapiens
CARHSPYCGGGSCPFDLW

SEQ ID NO: 4022 - protein, 18 aa, Homo sapiens
CAILGHDYGDYYYGMDVW

SEQ ID NO: 4023 - protein, 14 aa, Homo sapiens
CALAQHRTYTFDYW

SEQ ID NO: 4024 - protein, 18 aa, Homo sapiens
CAKATLLLTGYLYYFDYW

SEQ ID NO: 4025 - protein, 19 aa, Homo sapiens
CAKDIGSDSGSYSGETDYW

SEQ ID NO: 4026 - protein, 4 aa, Homo sapiens
CSSF

SEQ ID NO: 4027 - protein, 15 aa, Homo sapiens
CATDRGSSGWPFDYW

SEQ ID NO: 4028 - protein, 17 aa, Homo sapiens
CARAPITMIVMYYFDYW

SEQ ID NO: 4029 - protein, 11 aa, Homo sapiens
CTTTPFYYDYW

SEQ ID NO: 4030 - protein, 15 aa, Homo sapiens
CAKEGMIIANSYDPW

SEQ ID NO: 4031 - protein, 16 aa, Homo sapiens
CARPAVAGTNDAFDVW

SEQ ID NO: 4032 - protein, 17 aa, Homo sapiens
CAHRRVGATRGDYFDYW

SEQ ID NO: 4033 - protein, 24 aa, Homo sapiens
CARDRLNYDILTGPQYYYYGMDVW

SEQ ID NO: 4034 - protein, 15 aa, Homo sapiens
CARVRSESGYSLDYW

SEQ ID NO: 4035 - protein, 15 aa, Homo sapiens
CATGGGNSDVIWDYW

SEQ ID NO: 4036 - protein, 13 aa, Homo sapiens
CATSLLLTTFDYW

SEQ ID NO: 4037 - protein, 16 aa, Homo sapiens
CVKDHEQWLLEYFHRW

SEQ ID NO: 4038 - protein, 22 aa, Homo sapiens
CASTHVEVTTIFAYYYYGLDVW

SEQ ID NO: 4039 - protein, 25 aa, Homo sapiens
CTTDGGTLRYSDIDGYYRSGGFDIW

SEQ ID NO: 4040 - protein, 19 aa, Homo sapiens
CAKGGDIVLMVYAYYFDYW

SEQ ID NO: 4041 - protein, 19 aa, Homo sapiens
CARENSWNSAMVAYYFDYW

SEQ ID NO: 4042 - protein, 14 aa, Homo sapiens
CYSTDRSQNHTGVF

SEQ ID NO: 4043 - protein, 18 aa, Homo sapiens
CARTFDSGTFYMDFFDFW

SEQ ID NO: 4044 - protein, 17 aa, Homo sapiens
CAKTLPWVTGNNWFDPW

SEQ ID NO: 4045 - protein, 13 aa, Homo sapiens
CSRSTTSADFDFW

SEQ ID NO: 4046 - protein, 17 aa, Homo sapiens
CARDFDNGEWLTLWDYW

SEQ ID NO: 4047 - protein, 14 aa, Homo sapiens
CARAPGAGSYYDYW

SEQ ID NO: 4048 - protein, 23 aa, Homo sapiens
CATTYYDFWSGYPYYYYYGMDVW

SEQ ID NO: 4049 - protein, 19 aa, Homo sapiens
CARDYGESWGYYYYGMDVW

SEQ ID NO: 4050 - protein, 17 aa, Homo sapiens
CASSPPGGSYVNAFDIW

SEQ ID NO: 4051 - protein, 15 aa, Homo sapiens
CARDESNVWRWFDPW

SEQ ID NO: 4052 - protein, 16 aa, Homo sapiens
CARDLEGATTTFFDYW

SEQ ID NO: 4053 - protein, 19 aa, Homo sapiens
CARLSYRYNLPRAYFFDHW

SEQ ID NO: 4054 - protein, 20 aa, Homo sapiens
CARDRDCSSTSCYRGWFDPW

SEQ ID NO: 4055 - protein, 16 aa, Homo sapiens
CAKIAGSYYLHDFDYW

SEQ ID NO: 4056 - protein, 12 aa, Homo sapiens
CAKRQRWSFDYW

SEQ ID NO: 4057 - protein, 16 aa, Homo sapiens
CALLVGATRDPGIDYW

SEQ ID NO: 4058 - protein, 19 aa, Homo sapiens
CTRDVYSKIRGDDDWLDPW

SEQ ID NO: 4059 - protein, 13 aa, Homo sapiens
CQQYDSLPPGSAF

SEQ ID NO: 4060 - protein, 14 aa, Homo sapiens
CAKDDPPDRAFDYW

SEQ ID NO: 4061 - protein, 15 aa, Homo sapiens
CARDVLGNGNAFDIW

SEQ ID NO: 4062 - protein, 16 aa, Homo sapiens
CAKTANYGDYVYFDYW

SEQ ID NO: 4063 - protein, 26 aa, Homo sapiens
CARVRYVSPWLVPLCRGGCSNWFDPW

SEQ ID NO: 4064 - protein, 13 aa, Homo sapiens
CAHTHHEYYFDYW

SEQ ID NO: 4065 - protein, 15 aa, Homo sapiens
CAKRRGSSVSTIDYW

SEQ ID NO: 4066 - protein, 18 aa, Homo sapiens
CAKDATPLMVRGVTLDYW

SEQ ID NO: 4067 - protein, 14 aa, Homo sapiens
CARDRSGYVRFDNW

SEQ ID NO: 4068 - protein, 16 aa, Homo sapiens
CATQQVLLEWSSFDYW

SEQ ID NO: 4069 - protein, 14 aa, Homo sapiens
CARHSRSFDTFDIW

SEQ ID NO: 4070 - protein, 15 aa, Homo sapiens
CAKDRFYDSSVQDYW

SEQ ID NO: 4071 - protein, 22 aa, Homo sapiens
CAKSAGLAATKGVYYYYGMDVW

SEQ ID NO: 4072 - protein, 19 aa, Homo sapiens
CARQVREGSGYDYDYFDYW

SEQ ID NO: 4073 - protein, 14 aa, Homo sapiens
CARDDKETISFDFW

SEQ ID NO: 4074 - protein, 19 aa, Homo sapiens
CTAMAPSPGRRGWTDFDYW

SEQ ID NO: 4075 - protein, 12 aa, Homo sapiens
CQQYYSIRSVAF

SEQ ID NO: 4076 - protein, 18 aa, Homo sapiens
CARDSRITMSRGDGLDVW

SEQ ID NO: 4077 - protein, 20 aa, Homo sapiens
CARDPYYYDGDAYTGTLDYW

SEQ ID NO: 4078 - protein, 17 aa, Homo sapiens
CARVAWAVAAPGWFDPW

SEQ ID NO: 4079 - protein, 19 aa, Homo sapiens
CARHVHSAIDLGIGYFKHW

SEQ ID NO: 4080 - protein, 20 aa, Homo sapiens
CAREYLAGLEAAAGFWFDPW

SEQ ID NO: 4081 - protein, 15 aa, Homo sapiens
CAKVTSEGDFDFDYW

SEQ ID NO: 4082 - protein, 21 aa, Homo sapiens
CARDLRYCSGGSCYSAYFDYW

SEQ ID NO: 4083 - protein, 21 aa, Homo sapiens
CAKDGDPVIIASQNIPYLDYW

SEQ ID NO: 4084 - protein, 19 aa, Homo sapiens
CTTGMRYFDSTGYTRIDYW

SEQ ID NO: 4085 - protein, 16 aa, Homo sapiens
CARSILPAAKDAFDIW

SEQ ID NO: 4086 - protein, 18 aa, Homo sapiens
CARRHFYDSNGYYFFDFW

SEQ ID NO: 4087 - protein, 15 aa, Homo sapiens
CQQYGSSQPPTLVTF

SEQ ID NO: 4088 - protein, 16 aa, Homo sapiens
CAKAMTAAGTDAFDIW

SEQ ID NO: 4089 - protein, 18 aa, Homo sapiens
CARERWFGDLEGGATDIW

SEQ ID NO: 4090 - protein, 16 aa, Homo sapiens
CLRAEYGYTLGRFDPW

SEQ ID NO: 4091 - protein, 14 aa, Homo sapiens
CAKESPEYWAFDIW

SEQ ID NO: 4092 - protein, 10 aa, Homo sapiens
CQQSYTVPSF

SEQ ID NO: 4093 - protein, 20 aa, Homo sapiens
CAKGVGYYDSSGYFQYFDYW

SEQ ID NO: 4094 - protein, 22 aa, Homo sapiens
CARGLPDSSGYWVPYYYGMDVW

SEQ ID NO: 4095 - protein, 20 aa, Homo sapiens
CARVDRRYYDSSGPGAFDIW

SEQ ID NO: 4096 - protein, 13 aa, Homo sapiens
CGAPYIFGYFDAW

SEQ ID NO: 4097 - protein, 20 aa, Homo sapiens
CARGVTVTSDYYEYYGMDVW

SEQ ID NO: 4098 - protein, 17 aa, Homo sapiens
CASGLPGYTSRPHFDYW

SEQ ID NO: 4099 - protein, 14 aa, Homo sapiens
CARHRFLADPFDYW

SEQ ID NO: 4100 - protein, 9 aa, Homo sapiens
CITEWFDPW

SEQ ID NO: 4101 - protein, 14 aa, Homo sapiens
CARVSFGRNWFDSW

SEQ ID NO: 4102 - protein, 12 aa, Homo sapiens
CQQYDSFSRWTF

SEQ ID NO: 4103 - protein, 15 aa, Homo sapiens
CAKMGNEYGDYDDYW

SEQ ID NO: 4104 - protein, 16 aa, Homo sapiens
CAKEGTWEYSYGFDYW

SEQ ID NO: 4105 - protein, 18 aa, Homo sapiens
CARDKSQRSGYTYWFDPW

SEQ ID NO: 4106 - protein, 17 aa, Homo sapiens
CARPPDSGSYYGGFHYW

SEQ ID NO: 4107 - protein, 16 aa, Homo sapiens
CARDRDYGDLDALDIW

SEQ ID NO: 4108 - protein, 18 aa, Homo sapiens
CARYNGGGYSSDSRFDYW

SEQ ID NO: 4109 - protein, 21 aa, Homo sapiens
CATAGIAVAGTSSYYYGMDVW

SEQ ID NO: 4110 - protein, 16 aa, Homo sapiens
CAKGPIQWFGELSDYW

SEQ ID NO: 4111 - protein, 16 aa, Homo sapiens
CARGYSSSWEDGMDVW

SEQ ID NO: 4112 - protein, 15 aa, Homo sapiens
CAIALLWFGNPFDYW

SEQ ID NO: 4113 - protein, 20 aa, Homo sapiens
CAKDGLEFDGSGWQTGVDYW

SEQ ID NO: 4114 - protein, 21 aa, Homo sapiens
CARNSQIYDTSGYYYSHLDYW

SEQ ID NO: 4115 - protein, 16 aa, Homo sapiens
CASLYSSNWYSWFDPW

SEQ ID NO: 4116 - protein, 17 aa, Homo sapiens
CARDYRGGGYYVGDDYW

SEQ ID NO: 4117 - protein, 18 aa, Homo sapiens
CAKLTGDPLDYYYGMDVW

SEQ ID NO: 4118 - protein, 18 aa, Homo sapiens
CAMIAVAGTIHASRNDYW

SEQ ID NO: 4119 - protein, 21 aa, Homo sapiens
CAKASWDGTYYDSSGYGLDYW

SEQ ID NO: 4120 - protein, 19 aa, Homo sapiens
CAKSALHVPLGPGNWFDPW

SEQ ID NO: 4121 - protein, 15 aa, Homo sapiens
CARGAMLGGDLFDFW

SEQ ID NO: 4122 - protein, 17 aa, Homo sapiens
CAHNYILTDYWDAFDLW

SEQ ID NO: 4123 - protein, 20 aa, Homo sapiens
CARDREDYCSSTSCFHFDYW

SEQ ID NO: 4124 - protein, 18 aa, Homo sapiens
CASLYSDIVATGLLFDYW

SEQ ID NO: 4125 - protein, 16 aa, Homo sapiens
CARIRYTVTGYYFDYW

SEQ ID NO: 4126 - protein, 12 aa, Homo sapiens
CVTQRNDYIDYW

SEQ ID NO: 4127 - protein, 18 aa, Homo sapiens
CTTDPLYYYDSRTFFDYW

SEQ ID NO: 4128 - protein, 16 aa, Homo sapiens
CVTTVETLMVTRFDYW

SEQ ID NO: 4129 - protein, 15 aa, Homo sapiens
CAKGPWDLRRAPDYW

SEQ ID NO: 4130 - protein, 20 aa, Homo sapiens
CVRVGGVLWFAEFVDGMDVW

SEQ ID NO: 4131 - protein, 15 aa, Homo sapiens
CAKDPSPITTLIDYW

SEQ ID NO: 4132 - protein, 23 aa, Homo sapiens
CAKDSHYYGSGSYVTYYYGMDVW

SEQ ID NO: 4133 - protein, 14 aa, Homo sapiens
CARQKSTSRSFDYW

SEQ ID NO: 4134 - protein, 16 aa, Homo sapiens
CARPYGSGSTNWFDPW

SEQ ID NO: 4135 - protein, 15 aa, Homo sapiens
CASNKYDILTEFDYW

SEQ ID NO: 4136 - protein, 16 aa, Homo sapiens
CAKDDYPYSSGYHDYW

SEQ ID NO: 4137 - protein, 14 aa, Homo sapiens
CAKLSDRGVYVDSW

SEQ ID NO: 4138 - protein, 17 aa, Homo sapiens [sequence omitted]

SEQ ID NO: 4139 - protein, 26 aa, Homo sapiens
CLRSEDTAIYYCAREIRAPRGSFDPW

SEQ ID NO: 4140 - protein, 21 aa, Homo sapiens
CARSQRVRYYYDSSGYYADVW

SEQ ID NO: 4141 - protein, 16 aa, Homo sapiens
CAKDNLGDGYNEMDYW

SEQ ID NO: 4142 - protein, 20 aa, Homo sapiens
CTRDEYAVRGVIITEPFDYW

SEQ ID NO: 4143 - protein, 15 aa, Homo sapiens
CARDRLGDYDWFDPW

SEQ ID NO: 4144 - protein, 11 aa, Homo sapiens
CAKGHRVIDYW

SEQ ID NO: 4145 - protein, 20 aa, Homo sapiens
CARTQRSTMIVVAGDAFDIW

SEQ ID NO: 4146 - protein, 18 aa, Homo sapiens
CAKSYSSGGALLRYFDSW

SEQ ID NO: 4147 - protein, 14 aa, Homo sapiens
CTRLISGYGWFDPW

SEQ ID NO: 4148 - protein, 16 aa, Homo sapiens
CAKGYWAVAGSFIDYW

SEQ ID NO: 4149 - protein, 17 aa, Homo sapiens
CAKDIGCSSTSCYPDYW

SEQ ID NO: 4150 - protein, 18 aa, Homo sapiens
CARTRDSSNYYYNPFDNW

SEQ ID NO: 4151 - protein, 21 aa, Homo sapiens
CARRHYYDSSGYSWDPNFDYW

SEQ ID NO: 4152 - protein, 13 aa, Homo sapiens [sequence omitted]

SEQ ID NO: 4153 - protein, 27 aa, Homo sapiens
CAKDIFVSHFSDSSGDYESAGDVFDFW

SEQ ID NO: 4154 - protein, 20 aa, Homo sapiens
CAHTGPRRTWYRGAYYFDSW

SEQ ID NO: 4155 - protein, 22 aa, Homo sapiens
CASSSRKRYCSSTSCPGYFDYW

SEQ ID NO: 4156 - protein, 23 aa, Homo sapiens
CARDRDVRSDIIVEIAARAFDYW

SEQ ID NO: 4157 - protein, 21 aa, Homo sapiens
CAISWRGVLVTDLPYWFFDFW

SEQ ID NO: 4158 - protein, 19 aa, Homo sapiens
CAKDMRNWKWEPFSAFDIW

SEQ ID NO: 4159 - protein, 18 aa, Homo sapiens
CAKVGIAAGDFSLLFDYW

SEQ ID NO: 4160 - protein, 22 aa, Homo sapiens
CAHRHGYYGSGSYYNGDYFDYW

SEQ ID NO: 4161 - protein, 16 aa, Homo sapiens
CARVHSGSYTGPFDYW

SEQ ID NO: 4162 - protein, 16 aa, Homo sapiens
CAKDKRVYSSSCVDYW

SEQ ID NO: 4163 - protein, 17 aa, Homo sapiens
CARDKIFGDGYWVFDYW

SEQ ID NO: 4164 - protein, 14 aa, Homo sapiens
CVKEISSHGYGDYW

SEQ ID NO: 4165 - protein, 17 aa, Homo sapiens
CARDVVRFGHRTQFDYW

SEQ ID NO: 4166 - protein, 15 aa, Homo sapiens
CVREGSAAVPEFDPW

SEQ ID NO: 4167 - protein, 23 aa, Homo sapiens
CARTPPATNNGRQYFYAYGMDVW

SEQ ID NO: 4168 - protein, 20 aa, Homo sapiens
CARDDPSDLSSSWPYYFDYW

SEQ ID NO: 4169 - protein, 15 aa, Homo sapiens
CAKLKVYGDSVFDYW

SEQ ID NO: 4170 - protein, 20 aa, Homo sapiens
CARDIGNSGYHYYYYGLDVW

SEQ ID NO: 4171 - protein, 18 aa, Homo sapiens
CAKDFNGDGYPLRAFDIW

SEQ ID NO: 4172 - protein, 13 aa, Homo sapiens
CQQYGGSPPTFTF

SEQ ID NO: 4173 - protein, 14 aa, Homo sapiens
CFSTDSNGNHRGFF

SEQ ID NO: 4174 - protein, 14 aa, Homo sapiens
CAKVAGYSYEGDYW

SEQ ID NO: 4175 - protein, 14 aa, Homo sapiens
CANFGDEWSPRDYW

SEQ ID NO: 4176 - protein, 23 aa, Homo sapiens
CARDAFYYSSGTYSGAPNWFDPW

SEQ ID NO: 4177 - protein, 20 aa, Homo sapiens
CAKTSSLSRSWNDYWYFDLW

SEQ ID NO: 4178 - protein, 17 aa, Homo sapiens
CARGLARDGSFPWFDPW

SEQ ID NO: 4179 - protein, 12 aa, Homo sapiens
CTSQSMSFFDYW

SEQ ID NO: 4180 - protein, 22 aa, Homo sapiens
CAKAASITFVRGVILSDAFDIW

SEQ ID NO: 4181 - protein, 18 aa, Homo sapiens
CALPICLVSSYYYGMDVW

SEQ ID NO: 4182 - protein, 13 aa, Homo sapiens
CTTTYSADTFDLW

SEQ ID NO: 4183 - protein, 22 aa, Homo sapiens
CTTDGEIRPKNRYFYHYGMDVW

SEQ ID NO: 4184 - protein, 17 aa, Homo sapiens
CARETNTYSFWDAFDIW

SEQ ID NO: 4185 - protein, 12 aa, Homo sapiens
CQQYSSTSSCTF

SEQ ID NO: 4186 - protein, 12 aa, Homo sapiens
CQQRGHWPPNSF

SEQ ID NO: 4187 - protein, 18 aa, Homo sapiens
CARIPDWFHVYYYGMDVW

SEQ ID NO: 4188 - protein, 16 aa, Homo sapiens
CATLNLDSSGYYFDYW

SEQ ID NO: 4189 - protein, 14 aa, Homo sapiens
CARDTHDSGWFGYW

SEQ ID NO: 4190 - protein, 12 aa, Homo sapiens
CNSRDASGKHPF

SEQ ID NO: 4191 - protein, 23 aa, Homo sapiens
CARDQHTGYSSGWTYYYYGMDVW

SEQ ID NO: 4192 - protein, 22 aa, Homo sapiens
CARKRAQGHDGSGSTLGPFDYW

SEQ ID NO: 4193 - protein, 15 aa, Homo sapiens
CASPGPDSSGYYTYW

SEQ ID NO: 4194 - protein, 16 aa, Homo sapiens
CAKRPAAYPWYYFDYW

SEQ ID NO: 4195 - protein, 20 aa, Homo sapiens
CARDWKKGPYSGSYYHADYW

SEQ ID NO: 4196 - protein, 18 aa, Homo sapiens
CSVDLYCIVGRCEFFDHW

SEQ ID NO: 4197 - protein, 21 aa, Homo sapiens
CAHRRFGLYDTSDFFGFFDSW

SEQ ID NO: 4198 - protein, 17 aa, Homo sapiens
CAKGWHSSGGGFYFDYW

SEQ ID NO: 4199 - protein, 23 aa, Homo sapiens
CATHPKDCSGGSCYYYYYGMDVW

SEQ ID NO: 4200 - protein, 16 aa, Homo sapiens
CAKGYSGSYYGAVDYW

SEQ ID NO: 4201 - protein, 18 aa, Homo sapiens
CANCLYSSAWYPTPFDYW

SEQ ID NO: 4202 - protein, 17 aa, Homo sapiens
CAREGLVGGADDAADIW

SEQ ID NO: 4203 - protein, 23 aa, Homo sapiens
CARHSSTYYDILTGSPPSRFDYW

SEQ ID NO: 4204 - protein, 25 aa, Homo sapiens
CARRQYQTYYYDSSGYYYVPNFDYW

SEQ ID NO: 4205 - protein, 22 aa, Homo sapiens
CARVPDTNGHYDAYYYFGMDVW

SEQ ID NO: 4206 - protein, 15 aa, Homo sapiens
CAKSSAAWLRHFDNW

SEQ ID NO: 4207 - protein, 17 aa, Homo sapiens
CANSIGDYYGSGSSDYW

SEQ ID NO: 4208 - protein, 13 aa, Homo sapiens
CQVFDTSSDHLVF

SEQ ID NO: 4209 - protein, 17 aa, Homo sapiens
CAKDNRGPVGWWYLDPW

SEQ ID NO: 4210 - protein, 17 aa, Homo sapiens
CAKDSYDSSGYYWFDPW

SEQ ID NO: 4211 - protein, 16 aa, Homo sapiens
CARDRGAAGSWYFDLW

SEQ ID NO: 4212 - protein, 17 aa, Homo sapiens
CARDPNWNYEGTWFDPW

SEQ ID NO: 4213 - protein, 11 aa, Homo sapiens
CAHNLAYYDFW

SEQ ID NO: 4214 - protein, 14 aa, Homo sapiens
CVKQSHGLDYFDYW

SEQ ID NO: 4215 - protein, 15 aa, Homo sapiens
CARGIAAAATYFDYW

SEQ ID NO: 4216 - protein, 16 aa, Homo sapiens
CARALTFGELFAFDYW

SEQ ID NO: 4217 - protein, 19 aa, Homo sapiens
CAKLVVSSLTYYYYGMDVW

SEQ ID NO: 4218 - protein, 19 aa, Homo sapiens
CARDIDGSGSYYNEYFGWW

SEQ ID NO: 4219 - protein, 17 aa, Homo sapiens
CARALVVVVVEDYFDYW

SEQ ID NO: 4220 - protein, 19 aa, Homo sapiens
CVHRQGVQLERRAPRFDFW

SEQ ID NO: 4221 - protein, 24 aa, Homo sapiens
CAKDWGPETGLSIFGVVTPDFDHW

SEQ ID NO: 4222 - protein, 18 aa, Homo sapiens
CAKAEEDSSGYYWYFDYW

SEQ ID NO: 4223 - protein, 19 aa, Homo sapiens
CARDRDDYVWGSYRIFDYW

SEQ ID NO: 4224 - protein, 17 aa, Homo sapiens
CAKDTGLAVPRGYFDLW

SEQ ID NO: 4225 - protein, 23 aa, Homo sapiens
CVRPPPRFDYDISGFFLYYFDSW

SEQ ID NO: 4226 - protein, 22 aa, Homo sapiens
CAKATEEDSSGWYYYYYGMDVW

SEQ ID NO: 4227 - protein, 14 aa, Homo sapiens
CGRVASTGDIFDYW

SEQ ID NO: 4228 - protein, 17 aa, Homo sapiens
CARDATDPTSPGYYDYW

SEQ ID NO: 4229 - protein, 19 aa, Homo sapiens
CAKGRYDRSGYSVGGFDYW

SEQ ID NO: 4230 - protein, 13 aa, Homo sapiens
CATWVTTDAFDIW

SEQ ID NO: 4231 - protein, 17 aa, Homo sapiens
CAKDSDAYSSSYKFDPW

SEQ ID NO: 4232 - protein, 17 aa, Homo sapiens
CARQSRLGDTRNAFDIW

SEQ ID NO: 4233 - protein, 17 aa, Homo sapiens
CARRKFRVAVGGWFDPW

SEQ ID NO: 4234 - protein, 18 aa, Homo sapiens
CARDGGETMKDGEAPDIW

SEQ ID NO: 4235 - protein, 15 aa, Homo sapiens
CATLFPGGSGYYHYW

SEQ ID NO: 4236 - protein, 17 aa, Homo sapiens
CAKSPSILWPSDWFDPW

SEQ ID NO: 4237 - protein, 16 aa, Homo sapiens
CTILSEHVGTTGFDYW

SEQ ID NO: 4238 - protein, 17 aa, Homo sapiens
CAKDLWNYYVLDAFDIW

SEQ ID NO: 4239 - protein, 18 aa, Homo sapiens
CARTGISEYFYSWQFDPW

SEQ ID NO: 4240 - protein, 14 aa, Homo sapiens
CQSYDFRLSGFVIF

SEQ ID NO: 4241 - protein, 17 aa, Homo sapiens
CARRYISPGGGDWFDPW

SEQ ID NO: 4242 - protein, 18 aa, Homo sapiens
CAKAKFGSSLAQDWFDSW

SEQ ID NO: 4243 - protein, 15 aa, Homo sapiens
CTTYKRRDGYNWDYW

SEQ ID NO: 4244 - protein, 13 aa, Homo sapiens
CQQYDTVPRSITF

SEQ ID NO: 4245 - protein, 20 aa, Homo sapiens
CATLYHYYDSSGYYSPLDYW

SEQ ID NO: 4246 - protein, 12 aa, Homo sapiens
CAGGMATISDYW

SEQ ID NO: 4247 - protein, 16 aa, Homo sapiens
CATNILTGYYNFFDYW

SEQ ID NO: 4248 - protein, 18 aa, Homo sapiens
CARDLQGWGPGAGWFDPW

SEQ ID NO: 4249 - protein, 16 aa, Homo sapiens
CAKGQTSTSSFYFGDW

SEQ ID NO: 4250 - protein, 12 aa, Homo sapiens
CSRGGSSHFDYW

SEQ ID NO: 4251 - protein, 10 aa, Homo sapiens
CVSSSWSDYW

SEQ ID NO: 4252 - protein, 19 aa, Homo sapiens
CAKADRIAVAIAAGGVDYW

SEQ ID NO: 4253 - protein, 19 aa, Homo sapiens
CAKEDSSGFGTSFPLVDYW

SEQ ID NO: 4254 - protein, 11 aa, Homo sapiens [sequence omitted]

SEQ ID NO: 4255 - protein, 11 aa, Homo sapiens
CATNFRYFDRW

SEQ ID NO: 4256 - protein, 20 aa, Homo sapiens
CTAYYDILTGQGDTYYFDYW

SEQ ID NO: 4257 - protein, 18 aa, Homo sapiens
CARDRGDGSGRLTWFDPW

SEQ ID NO: 4258 - protein, 16 aa, Homo sapiens
CAKDTYPIISAPFDYW

SEQ ID NO: 4259 - protein, 18 aa, Homo sapiens
CAKERQTDYYDSSGFDYW

SEQ ID NO: 4260 - protein, 17 aa, Homo sapiens
CARHGPTAAYYYAMDVW

SEQ ID NO: 4261 - protein, 14 aa, Homo sapiens
CAREAPGTYYFDFW

SEQ ID NO: 4262 - protein, 17 aa, Homo sapiens
CARASRDGYINAAFDYW

SEQ ID NO: 4263 - protein, 20 aa, Homo sapiens
CARDFQYYDSTQLPWYFDLW

SEQ ID NO: 4264 - protein, 21 aa, Homo sapiens
CAREVRGNYMASVPGDWFDPW

SEQ ID NO: 4265 - protein, 21 aa, Homo sapiens
CARSRGYSGYDSSPNYYFDYW

SEQ ID NO: 4266 - protein, 16 aa, Homo sapiens
CAKGHGDFEDNYFDYW

SEQ ID NO: 4267 - protein, 22 aa, Homo sapiens
CARGDCGGDCYYHYYYYGMDVW

SEQ ID NO: 4268 - protein, 21 aa, Homo sapiens
CAKDTRVVPAAMGYYYGMDVW

SEQ ID NO: 4269 - protein, 19 aa, Homo sapiens
CTKSVYPYSNYAGGTVDYW

SEQ ID NO: 4270 - protein, 15 aa, Homo sapiens
CAKIEDDYGDSTDYW

SEQ ID NO: 4271 - protein, 17 aa, Homo sapiens
CVRGGIPVAGLDGFDIW

SEQ ID NO: 4272 - protein, 21 aa, Homo sapiens
CAKPHPYYYDSSGSGGYFDYW

SEQ ID NO: 4273 - protein, 23 aa, Homo sapiens
CARCDAGGDPRNDYGDYINLDYW

SEQ ID NO: 4274 - protein, 15 aa, Homo sapiens
CAKDIYGSGSYPDVW

SEQ ID NO: 4275 - protein, 22 aa, Homo sapiens
CAKEGGDWNDLWYYYYYGMDVW

SEQ ID NO: 4276 - protein, 20 aa, Homo sapiens
CARVSGDYVWGSYRPYFDYW

SEQ ID NO: 4277 - protein, 12 aa, Homo sapiens
CATNRIGPFDCW

SEQ ID NO: 4278 - protein, 15 aa, Homo sapiens
CAHAATRPDSVFDFW

SEQ ID NO: 4279 - protein, 18 aa, Homo sapiens
CARDRAHTAMVMNYFDYW

SEQ ID NO: 4280 - protein, 16 aa, Homo sapiens
CSRTQWLSTYWYFDFW

SEQ ID NO: 4281 - protein, 22 aa, Homo sapiens
CAKDRRDGYNSGDYYYYGMDVW

SEQ ID NO: 4282 - protein, 14 aa, Homo sapiens
CAHTVYHDPKFDPW

SEQ ID NO: 4283 - protein, 18 aa, Homo sapiens
CAKYGDYAQGNTNYFDYW

SEQ ID NO: 4284 - protein, 14 aa, Homo sapiens
CARHDYGSEVFDYW

SEQ ID NO: 4285 - protein, 12 aa, Homo sapiens
CQQLANYPPTTF

SEQ ID NO: 4286 - protein, 15 aa, Homo sapiens
CAKDNTGYSGPFDYW

SEQ ID NO: 4287 - protein, 15 aa, Homo sapiens
CAKVSSGRGGMADYW

SEQ ID NO: 4288 - protein, 18 aa, Homo sapiens
CAKLACSGGSCYDPFDYW

SEQ ID NO: 4289 - protein, 13 aa, Homo sapiens
CAKARIYYHFDCW

SEQ ID NO: 4290 - protein, 25 aa, Homo sapiens
CALPISAVYFCARSLSGYGYAFDLW

SEQ ID NO: 4291 - protein, 17 aa, Homo sapiens
CAKDTTVTFRGLFFDYW

SEQ ID NO: 4292 - protein, 27 aa, Homo sapiens
CARDARAAAGYSGYDSPRGYYYGMDVW

SEQ ID NO: 4293 - protein, 14 aa, Homo sapiens
CVSYSDDYGDADYW

SEQ ID NO: 4294 - protein, 16 aa, Homo sapiens
CAKGMVPTAMDSFDYW

SEQ ID NO: 4295 - protein, 18 aa, Homo sapiens
CAKAHWDSVGATNAFDIW

SEQ ID NO: 4296 - protein, 15 aa, Homo sapiens
CARDASYGDFSFDYW

SEQ ID NO: 4297 - protein, 22 aa, Homo sapiens
CAKEKITMVRGVILYYYGMDVW

SEQ ID NO: 4298 - protein, 17 aa, Homo sapiens
CAKDRTRGWERLTVDYW

SEQ ID NO: 4299 - protein, 12 aa, Homo sapiens
CAKDPSSPGDYW

SEQ ID NO: 4300 - protein, 18 aa, Homo sapiens
CAHRLASSSWYEDYFDYW

SEQ ID NO: 4301 - protein, 22 aa, Homo sapiens
CARSSPLYCIGRECTYWNFDLW

SEQ ID NO: 4302 - protein, 19 aa, Homo sapiens
CARDAWVQSAAAGYHFDYW

SEQ ID NO: 4303 - protein, 16 aa, Homo sapiens
CTKPRSTVFGDGLDVW

SEQ ID NO: 4304 - protein, 15 aa, Homo sapiens
CWGILTGYYTYFDYW

SEQ ID NO: 4305 - protein, 18 aa, Homo sapiens
CAKLSGGSSYHPSTHDYW

SEQ ID NO: 4306 - protein, 19 aa, Homo sapiens
CAKLAGYSSGWAYSYMDVW

SEQ ID NO: 4307 - protein, 21 aa, Homo sapiens
CARHSLFVVAAAAQPGDFDYW

SEQ ID NO: 4308 - protein, 20 aa, Homo sapiens
CARSHLTLGPSSQLDGMDVW

SEQ ID NO: 4309 - protein, 13 aa, Homo sapiens
CARAHVLRFFSYW

SEQ ID NO: 4310 - protein, 21 aa, Homo sapiens
CALPISKISYLTGSTDLPDYW

SEQ ID NO: 4311 - protein, 15 aa, Homo sapiens
CATTRSGNERDFDYW

SEQ ID NO: 4312 - protein, 15 aa, Homo sapiens
CARDSYYDEDYFDYW

SEQ ID NO: 4313 - protein, 17 aa, Homo sapiens
CAKDMGSYSGSNGLDYW

SEQ ID NO: 4314 - protein, 18 aa, Homo sapiens
CARDPYYYDSRGYSGDYW

SEQ ID NO: 4315 - protein, 11 aa, Homo sapiens [sequence omitted]

SEQ ID NO: 4316 - protein, 16 aa, Homo sapiens
CAKVEGSGYYYDFDYW

SEQ ID NO: 4317 - protein, 16 aa, Homo sapiens
CARISVGGYDWAFDYW

SEQ ID NO: 4318 - protein, 14 aa, Homo sapiens
CARELTISDPFDYW

SEQ ID NO: 4319 - protein, 19 aa, Homo sapiens
CAPSPGVYGSGSYSPIDYW

SEQ ID NO: 4320 - protein, 17 aa, Homo sapiens
CARAPTGTSNPYNFDYW

SEQ ID NO: 4321 - protein, 18 aa, Homo sapiens
CAKGYGTYRYNYYAMDVW

SEQ ID NO: 4322 - protein, 14 aa, Homo sapiens
CAKVIDPYSSSDYW

SEQ ID NO: 4323 - protein, 21 aa, Homo sapiens
CAKDGSTSYDILTGYYFFDYW

SEQ ID NO: 4324 - protein, 13 aa, Homo sapiens
CHQYFNWPPLFPF

SEQ ID NO: 4325 - protein, 16 aa, Homo sapiens
CTKGYCSSISCGGDYW

SEQ ID NO: 4326 - protein, 17 aa, Homo sapiens
CAKDNHATADYYWFDPW

SEQ ID NO: 4327 - protein, 15 aa, Homo sapiens
CARDYFGSAHAFDPW

SEQ ID NO: 4328 - protein, 18 aa, Homo sapiens
CANGNYYLSGYYYGMDVW

SEQ ID NO: 4329 - protein, 18 aa, Homo sapiens
CAHSPMVRGVIRGWFDPW

SEQ ID NO: 4330 - protein, 16 aa, Homo sapiens
CQTWGTGGTGIPLFVF

SEQ ID NO: 4331 - protein, 15 aa, Homo sapiens
CARFAAPGFRYFDYW

SEQ ID NO: 4332 - protein, 18 aa, Homo sapiens
CAKDIQAITIHEGWFDPW

SEQ ID NO: 4333 - protein, 18 aa, Homo sapiens
CARDSTGYYGSGSPLDYW

SEQ ID NO: 4334 - protein, 16 aa, Homo sapiens
CAKGVYGYSTSDFDYW

SEQ ID NO: 4335 - protein, 19 aa, Homo sapiens
CVRDGYGVVAAARSGFDVW

SEQ ID NO: 4336 - protein, 15 aa, Homo sapiens
CARQFHESVAGNDYW

SEQ ID NO: 4337 - protein, 14 aa, Homo sapiens
CAREQPNTCYYDNW

SEQ ID NO: 4338 - protein, 26 aa, Homo sapiens
CARTLGYCSSTSCPTPLYYYYGKDVW

SEQ ID NO: 4339 - protein, 16 aa, Homo sapiens
CATAPAAIWVWWFDPW

SEQ ID NO: 4340 - protein, 17 aa, Homo sapiens
CAKGVATGYYIIPFDYW

SEQ ID NO: 4341 - protein, 18 aa, Homo sapiens
CARGFAAAGTPPNYFDYW

SEQ ID NO: 4342 - protein, 14 aa, Homo sapiens
CARNLRGSDVFDIW

SEQ ID NO: 4343 - protein, 17 aa, Homo sapiens
CARHPGIGAAAGPFDPW

SEQ ID NO: 4344 - protein, 20 aa, Homo sapiens
CARDLGRITMVRGGYYFDYW

SEQ ID NO: 4345 - protein, 16 aa, Homo sapiens
CAKGVGAPPLNWFDPW

SEQ ID NO: 4346 - protein, 22 aa, Homo sapiens
CARLVRSGWYLGAKSYYYMDVW

SEQ ID NO: 4347 - protein, 17 aa, Homo sapiens
CARGPPYCTNGVCYDYW

SEQ ID NO: 4348 - protein, 19 aa, Homo sapiens
CAKDITPNVYGGNSVFDYW

SEQ ID NO: 4349 - protein, 24 aa, Homo sapiens
CARANSVAGYYDSSGSYGYFFDFW

SEQ ID NO: 4350 - protein, 18 aa, Homo sapiens
CARAHVDYVSNPHYFDYW

SEQ ID NO: 4351 - protein, 16 aa, Homo sapiens
CARLRSGYFYPDLDYW

SEQ ID NO: 4352 - protein, 20 aa, Homo sapiens
CASYSSSWYDWYYYYYMDVW

SEQ ID NO: 4353 - protein, 16 aa, Homo sapiens
CARDFEGRWESTFDNW

SEQ ID NO: 4354 - protein, 14 aa, Homo sapiens
CARRSKLELTFPYW

SEQ ID NO: 4355 - protein, 17 aa, Homo sapiens
CARHRPEYSSSSDFDYW

SEQ ID NO: 4356 - protein, 12 aa, Homo sapiens
CAVLPPSHQDYW

SEQ ID NO: 4357 - protein, 17 aa, Homo sapiens
CAKYCTTKSCYRGFDYW

SEQ ID NO: 4358 - protein, 16 aa, Homo sapiens
CAHRQGSVGDMSFDYW

SEQ ID NO: 4359 - protein, 19 aa, Homo sapiens
CARRGYCSGGSCYVPFEYW

SEQ ID NO: 4360 - protein, 11 aa, Homo sapiens
CQHLNRYPFTF

SEQ ID NO: 4361 - protein, 16 aa, Homo sapiens
CARPMAQYKYDAYDIW

SEQ ID NO: 4362 - protein, 22 aa, Homo sapiens
CARGAALYGDYPTRDFYYMDVW

SEQ ID NO: 4363 - protein, 15 aa, Homo sapiens
CQSADSGGAYRNVVF

SEQ ID NO: 4364 - protein, 15 aa, Homo sapiens
CAKVCSSSTGDFDYW

SEQ ID NO: 4365 - protein, 18 aa, Homo sapiens
CARGVPSTHWYGSPFDYW

SEQ ID NO: 4366 - protein, 18 aa, Homo sapiens
CARDRTIFGVVRSSLDYW

SEQ ID NO: 4367 - protein, 21 aa, Homo sapiens
CAREFFDYYGSGSPLYYFDYW

SEQ ID NO: 4368 - protein, 19 aa, Homo sapiens
CARDGSSWYGDHYNYLDVW

SEQ ID NO: 4369 - protein, 12 aa, Homo sapiens [sequence omitted]

SEQ ID NO: 4370 - protein, 18 aa, Homo sapiens
CARGGSSGYYLYWYFDLW

SEQ ID NO: 4371 - protein, 16 aa, Homo sapiens
CAKAVGSGSGWNFDLW

SEQ ID NO: 4372 - protein, 19 aa, Homo sapiens
CTDYDFWSGYSHDDAFDIW

SEQ ID NO: 4373 - protein, 17 aa, Homo sapiens
CARRGGTTAPFEHFDYW

SEQ ID NO: 4374 - protein, 15 aa, Homo sapiens
CATSPWNLGVFFVYW

SEQ ID NO: 4375 - protein, 11 aa, Homo sapiens [sequence omitted]

SEQ ID NO: 4376 - protein, 14 aa, Homo sapiens
CASTWKRTPSFDIW

SEQ ID NO: 4377 - protein, 12 aa, Homo sapiens
CAKDGTMLGDYW

SEQ ID NO: 4378 - protein, 16 aa, Homo sapiens
CARDLQGDEIGDIDYW

SEQ ID NO: 4379 - protein, 18 aa, Homo sapiens
CAKVAGRVAARHWYFDLW

SEQ ID NO: 4380 - protein, 19 aa, Homo sapiens
CARHSRRWLQSSNDVFDIW

SEQ ID NO: 4381 - protein, 19 aa, Homo sapiens
CARFGPYCSGGGCYYFDYW

SEQ ID NO: 4382 - protein, 26 aa, Homo sapiens
CARDQYLKKDIVVVLAARPAGRVDYW

SEQ ID NO: 4383 - protein, 16 aa, Homo sapiens
CARGTYGSGSYYVVYW

SEQ ID NO: 4384 - protein, 13 aa, Homo sapiens
CVRRLENYVFDIW

SEQ ID NO: 4385 - protein, 16 aa, Homo sapiens
CAKDRRIAVAGPFDYW

SEQ ID NO: 4386 - protein, 17 aa, Homo sapiens
CVPLPVWFGHLLSFDSW

SEQ ID NO: 4387 - protein, 17 aa, Homo sapiens
CAKYYDFWSGYPWFDPW

SEQ ID NO: 4388 - protein, 13 aa, Homo sapiens
CQSTDSTGTIRVF

SEQ ID NO: 4389 - protein, 26 aa, Homo sapiens
CARDVPEGYCSGDSCLDYHQYYMDVW

SEQ ID NO: 4390 - protein, 11 aa, Homo sapiens
CQRSYSVPFTF

SEQ ID NO: 4391 - protein, 23 aa, Homo sapiens
CSRLSTGVTGVLGMLSPWYFDLW

SEQ ID NO: 4392 - protein, 12 aa, Homo sapiens
CASDSSGYFQHW

SEQ ID NO: 4393 - protein, 13 aa, Homo sapiens
CARDVSFGQSDYW

SEQ ID NO: 4394 - protein, 16 aa, Homo sapiens
CARAVRGSSSPPFDYW

SEQ ID NO: 4395 - protein, 21 aa, Homo sapiens
CAKLGGIVDPDIVTPYYFDHW

SEQ ID NO: 4396 - protein, 13 aa, Homo sapiens [sequence omitted]

SEQ ID NO: 4397 - protein, 11 aa, Homo sapiens
CQQYYSIFVSF

SEQ ID NO: 4398 - protein, 20 aa, Homo sapiens
CITSGLYDTSDYFYVGLDYW

SEQ ID NO: 4399 - protein, 13 aa, Homo sapiens
CATSVRGVIPDYW

SEQ ID NO: 4400 - protein, 15 aa, Homo sapiens
CARGREYSGHLPDYW

SEQ ID NO: 4401 - protein, 18 aa, Homo sapiens
CAHRPLSYRGSSHYFDFW

SEQ ID NO: 4402 - protein, 17 aa, Homo sapiens
CARHGIAVALPDWFDPW

SEQ ID NO: 4403 - protein, 18 aa, Homo sapiens
CATVGTRYNWVPGYMDVW

SEQ ID NO: 4404 - protein, 18 aa, Homo sapiens
CAKDSLLYYDSSGYFDYW

SEQ ID NO: 4405 - protein, 14 aa, Homo sapiens
CATFVKGNWYFDIW

SEQ ID NO: 4406 - protein, 20 aa, Homo sapiens
CVRDLYYSDSSGYSYYLDYW

SEQ ID NO: 4407 - protein, 20 aa, Homo sapiens
CARRPLGYCDGGTCYHFDYW

SEQ ID NO: 4408 - protein, 12 aa, Homo sapiens
CQQHSSYSAHTF

SEQ ID NO: 4409 - protein, 16 aa, Homo sapiens
CARKSTDPYYYYMDVW

SEQ ID NO: 4410 - protein, 14 aa, Homo sapiens
CARDSEGNNWFDPW

SEQ ID NO: 4411 - protein, 19 aa, Homo sapiens
CARHWWYLVPGSSDFFDSW

SEQ ID NO: 4412 - protein, 21 aa, Homo sapiens
CARAQKLPDYSSSSRSAFDIW

SEQ ID NO: 4413 - protein, 11 aa, Homo sapiens
CQQFGSSRITF

SEQ ID NO: 4414 - protein, 14 aa, Homo sapiens
CARDSSHLWFFDYW

SEQ ID NO: 4415 - protein, 13 aa, Homo sapiens
CTSYTSSSLLWLF

SEQ ID NO: 4416 - protein, 16 aa, Homo sapiens
CARGLRFGVDDAFDVW

SEQ ID NO: 4417 - protein, 19 aa, Homo sapiens
CAKGLSVGGSWSLDAFHIW

SEQ ID NO: 4418 - protein, 12 aa, Homo sapiens
CETWDSSGAKVF

SEQ ID NO: 4419 - protein, 15 aa, Homo sapiens
CVKAGGPGPYYFEYW

SEQ ID NO: 4420 - protein, 17 aa, Homo sapiens
CARLTLLYNSWYYFDHW

SEQ ID NO: 4421 - protein, 13 aa, Homo sapiens
CATFDRGSAFDYW

SEQ ID NO: 4422 - protein, 12 aa, Homo sapiens
CQSASSSGIVTF

SEQ ID NO: 4423 - protein, 16 aa, Homo sapiens
CARHTSATVVTPFDYW

SEQ ID NO: 4424 - protein, 17 aa, Homo sapiens
CARRWYDGSAYYAFDIW

SEQ ID NO: 4425 - protein, 12 aa, Homo sapiens
CATSRDGPFDYW

SEQ ID NO: 4426 - protein, 11 aa, Homo sapiens
CAIHIVDLDYW

SEQ ID NO: 4427 - protein, 23 aa, Homo sapiens
CARDITSYYYAKSDYFEDAFDIW

SEQ ID NO: 4428 - protein, 14 aa, Homo sapiens
CAHYGITLHYFDYW

SEQ ID NO: 4429 - protein, 15 aa, Homo sapiens
CARHTQMVFSGFDVW

SEQ ID NO: 4430 - protein, 11 aa, Homo sapiens
CQKYSSGPQPF

SEQ ID NO: 4431 - protein, 21 aa, Homo sapiens
CAKVSADNGKYSYYYYYMDVW

SEQ ID NO: 4432 - protein, 20 aa, Homo sapiens
CANSGDPVTSVYYYYYMDVW

SEQ ID NO: 4433 - protein, 15 aa, Homo sapiens
CARLYVDTAPDFDYW

SEQ ID NO: 4434 - protein, 13 aa, Homo sapiens
CQAWDSSGEHMLF

SEQ ID NO: 4435 - protein, 15 aa, Homo sapiens [sequence omitted]

SEQ ID NO: 4436 - protein, 21 aa, Homo sapiens
CAKGHRYYYDSSGYYGYFDYW

SEQ ID NO: 4437 - protein, 22 aa, Homo sapiens
CARPGGSCSGRGCYMGGWFDHW

SEQ ID NO: 4438 - protein, 12 aa, Homo sapiens
CLQYNVWPRYTF

SEQ ID NO: 4439 - protein, 15 aa, Homo sapiens
CTTPLVLWFGERDYW

SEQ ID NO: 4440 - protein, 14 aa, Homo sapiens
CASSDWNDGWFDPW

SEQ ID NO: 4441 - protein, 15 aa, Homo sapiens
CARERGAPRYAFDIW

SEQ ID NO: 4442 - protein, 20 aa, Homo sapiens
CAKRRAVFMLYSGNEAFDIW

SEQ ID NO: 4443 - protein, 18 aa, Homo sapiens
CVKDLLFETQEDYAFDVW

SEQ ID NO: 4444 - protein, 23 aa, Homo sapiens
CARDPYYDFWSGLYYYYYYMDVW

SEQ ID NO: 4445 - protein, 13 aa, Homo sapiens [sequence omitted]

SEQ ID NO: 4446 - protein, 21 aa, Homo sapiens
CARLPYSGIPIPYYYYYMDVW

SEQ ID NO: 4447 - protein, 15 aa, Homo sapiens
CQRYGSSPLSPRFTF

SEQ ID NO: 4448 - protein, 20 aa, Homo sapiens
CARGDCRYCSRYLFYYMDVW

SEQ ID NO: 4449 - protein, 21 aa, Homo sapiens
CARARRGVGFGAPYSYYLDVW

SEQ ID NO: 4450 - protein, 17 aa, Homo sapiens
CAREVWSGGYPWYFDLW

SEQ ID NO: 4451 - protein, 19 aa, Homo sapiens
CAREVGNGDYPHNHYFDPW

SEQ ID NO: 4452 - protein, 17 aa, Homo sapiens
CTRGGNWNSLVDSFDIW

SEQ ID NO: 4453 - protein, 16 aa, Homo sapiens
CASHGSGSYYNPVDYW

SEQ ID NO: 4454 - protein, 13 aa, Homo sapiens
CQQYNSDSSEYSF

SEQ ID NO: 4455 - protein, 18 aa, Homo sapiens
CTRPSYYYDSSGYQPDYW

SEQ ID NO: 4456 - protein, 13 aa, Homo sapiens
CQSAESGGPYQVF

SEQ ID NO: 4457 - protein, 25 aa, Homo sapiens
CARLWPSYDFWSGFGPLANDPLDIW

SEQ ID NO: 4458 - protein, 12 aa, Homo sapiens
CGRDEDYAADYW

SEQ ID NO: 4459 - protein, 19 aa, Homo sapiens
CAKDIECGGDCSDWYFDLW

SEQ ID NO: 4460 - protein, 32 aa, Homo sapiens
CTAYMELSSLRSEDTAVYYCARTSSSWYIDYW

SEQ ID NO: 4461 - protein, 17 aa, Homo sapiens
CATLTLNRILFNAFDIW

SEQ ID NO: 4462 - protein, 17 aa, Homo sapiens
CARVNPFFYERGGFDYW

SEQ ID NO: 4463 - protein, 17 aa, Homo sapiens
CVKDLYSEVEMATFDYW

SEQ ID NO: 4464 - protein, 18 aa, Homo sapiens
CARPGLDSSDLYDPFDIW

SEQ ID NO: 4465 - protein, 19 aa, Homo sapiens
CARRSSSSYGHDYVPFDSW

SEQ ID NO: 4466 - protein, 20 aa, Homo sapiens
CAKDLCGSYFRALLCYFDYW

SEQ ID NO: 4467 - protein, 14 aa, Homo sapiens
CAASSREQPDFDYW

SEQ ID NO: 4468 - protein, 16 aa, Homo sapiens
CTRGSSGWSSAAFDYW

SEQ ID NO: 4469 - protein, 21 aa, Homo sapiens
CARLPFLRLSTYSYYQYMDVW

SEQ ID NO: 4470 - protein, 21 aa, Homo sapiens
CAKLPDYYDSSGYPGDGFDIW

SEQ ID NO: 4471 - protein, 12 aa, Homo sapiens [sequence omitted]

SEQ ID NO: 4472 - protein, 22 aa, Homo sapiens
CARHHTITMVRGVIIRGYYDYW

SEQ ID NO: 4473 - protein, 18 aa, Homo sapiens
CARSLVRRWLQFGAFDIW

SEQ ID NO: 4474 - protein, 17 aa, Homo sapiens
CAHRHRSSNGWYSLDYW

SEQ ID NO: 4475 - protein, 18 aa, Homo sapiens
CARGQRYGSGSSDRFDYW

SEQ ID NO: 4476 - protein, 15 aa, Homo sapiens
CAKGLGGNSGSLDYW

SEQ ID NO: 4477 - protein, 20 aa, Homo sapiens
CASLATYHDASGFHDAFDVW

SEQ ID NO: 4478 - protein, 10 aa, Homo sapiens
CAKRKAADIW

SEQ ID NO: 4479 - protein, 15 aa, Homo sapiens
CVRRGVGASTRFDYW

SEQ ID NO: 4480 - protein, 19 aa, Homo sapiens
CARDAAVSGSYSTDWFDPW

SEQ ID NO: 4481 - protein, 15 aa, Homo sapiens
CAKDLIRGWSNFDYW

SEQ ID NO: 4482 - protein, 20 aa, Homo sapiens
CAKRGRVFMLYENSHYMDVW

SEQ ID NO: 4483 - protein, 17 aa, Homo sapiens
CAKDKRRLFGVVIWDYW

SEQ ID NO: 4484 - protein, 20 aa, Homo sapiens
CARVNTVSLAATDTWWFDPW

SEQ ID NO: 4485 - protein, 13 aa, Homo sapiens
CARVRKESYNDYW

SEQ ID NO: 4486 - protein, 18 aa, Homo sapiens
CARGADSSGWSRGYMDVW

SEQ ID NO: 4487 - protein, 16 aa, Homo sapiens
CARTSKGYSYGRIDYW

SEQ ID NO: 4488 - protein, 12 aa, Homo sapiens
CAVGASVDFDYW

SEQ ID NO: 4489 - protein, 20 aa, Homo sapiens
CAKDVGPKRSGWYPVVFDYW

SEQ ID NO: 4490 - protein, 18 aa, Homo sapiens
CARDSNMLVYSDEYFQHW

SEQ ID NO: 4491 - protein, 17 aa, Homo sapiens
CAKAQGYSYGRDAFDIW

SEQ ID NO: 4492 - protein, 16 aa, Homo sapiens
CARFTIAAASNAFDYW

SEQ ID NO: 4493 - protein, 19 aa, Homo sapiens
CARTQWLELWLSGWYFDLW

SEQ ID NO: 4494 - protein, 17 aa, Homo sapiens
CARDLRQYSSSYYFDYW

SEQ ID NO: 4495 - protein, 20 aa, Homo sapiens
CATERILAAAGYYYYYMDVW

SEQ ID NO: 4496 - protein, 13 aa, Homo sapiens
CVRTPYHNAFDYW

SEQ ID NO: 4497 - protein, 14 aa, Homo sapiens
CARIIAAAGTSDYW

SEQ ID NO: 4498 - protein, 19 aa, Homo sapiens
CASDGIAAAVRPLDWFDPW

SEQ ID NO: 4499 - protein, 12 aa, Homo sapiens
CHSFDSSNQVVF

SEQ ID NO: 4500 - protein, 16 aa, Homo sapiens
CTTDPRRDGYSDFDYW

SEQ ID NO: 4501 - protein, 13 aa, Homo sapiens
CQVRGNWPRIFTF

SEQ ID NO: 4502 - protein, 18 aa, Homo sapiens
CQVWDRSSDQRSSVHWVF

SEQ ID NO: 4503 - protein, 16 aa, Homo sapiens
CARDLVGAKATWFDPW

SEQ ID NO: 4504 - protein, 13 aa, Homo sapiens
CARIAAAGLFDYW

SEQ ID NO: 4505 - protein, 15 aa, Homo sapiens
CARVTGYYDSRADYW

SEQ ID NO: 4506 - protein, 18 aa, Homo sapiens
CTTALREYGDYRAPFDYW

SEQ ID NO: 4507 - protein, 13 aa, Homo sapiens
CARDLDWHNFDLW

SEQ ID NO: 4508 - protein, 21 aa, Homo sapiens
CAKDGGYSSSWSPAEYYFDYW

SEQ ID NO: 4509 - protein, 16 aa, Homo sapiens
CARATIVGATDYFDYW

SEQ ID NO: 4510 - protein, 20 aa, Homo sapiens
CVRVSPEYCIVTSCSAPDYW

SEQ ID NO: 4511 - protein, 12 aa, Homo sapiens [sequence omitted]

SEQ ID NO: 4512 - protein, 13 aa, Homo sapiens
CARHFLTDYIDFW

SEQ ID NO: 4513 - protein, 12 aa, Homo sapiens
CASLNDDAFDIW

SEQ ID NO: 4514 - protein, 21 aa, Homo sapiens
CAKDLSTDFWSPSTPSTFDYW

SEQ ID NO: 4515 - protein, 19 aa, Homo sapiens
CTRESLYNWDDRYYYMDVW

SEQ ID NO: 4516 - protein, 17 aa, Homo sapiens
CASLYYYDSSRLPFDYW

SEQ ID NO: 4517 - protein, 22 aa, Homo sapiens
CTTAPQIVLIPAGNSYDSTDVW

SEQ ID NO: 4518 - protein, 21 aa, Homo sapiens
CARGAVRLELRLYYYYYMDVW

SEQ ID NO: 4519 - protein, 21 aa, Homo sapiens
CARDGGAQNDYGIDVDAFDIW

SEQ ID NO: 4520 - protein, 14 aa, Homo sapiens
CARSLAYCGTFDYW

SEQ ID NO: 4521 - protein, 11 aa, Homo sapiens
CLQDHNYVLSF

SEQ ID NO: 4522 - protein, 20 aa, Homo sapiens
CAKDRAVAGTPLYYNWFDSW

SEQ ID NO: 4523 - protein, 15 aa, Homo sapiens
CARQKTGTPTGSDYW

SEQ ID NO: 4524 - protein, 16 aa, Homo sapiens
CARWDGKDGWSNFDYW

SEQ ID NO: 4525 - protein, 24 aa, Homo sapiens
CASVGEGYHDILTGYQGSYYFDYW

SEQ ID NO: 4526 - protein, 14 aa, Homo sapiens
CTTYSSGYYYGDYW

SEQ ID NO: 4527 - protein, 19 aa, Homo sapiens
CARDPTSLLWSGYSPPDYW

SEQ ID NO: 4528 - protein, 14 aa, Homo sapiens
CASGRDSSSWYDYW

SEQ ID NO: 4529 - protein, 24 aa, Homo sapiens
CASPISGSSYSDTSNYYPRAFDIW

SEQ ID NO: 4530 - protein, 21 aa, Homo sapiens
CATYPHPSPPVEPWLAPFDFW

SEQ ID NO: 4531 - protein, 13 aa, Homo sapiens
CARANGGGYYVYW

SEQ ID NO: 4532 - protein, 12 aa, Homo sapiens
CQQAKNFPTYTF

SEQ ID NO: 4533 - protein, 17 aa, Homo sapiens
CAADLWRDGIWHVFDIW

SEQ ID NO: 4534 - protein, 18 aa, Homo sapiens
CARGGTWIQLWSNYFDYW

SEQ ID NO: 4535 - protein, 8 aa, Homo sapiens
CILSFDYW

SEQ ID NO: 4536 - protein, 12 aa, Homo sapiens
CARQHGDYGDYW

SEQ ID NO: 4537 - protein, 16 aa, Homo sapiens
CARRYCSTTSCLIDYW

SEQ ID NO: 4538 - protein, 19 aa, Homo sapiens
CARVFMRAPGTPENWFDPW

SEQ ID NO: 4539 - protein, 28 aa, Homo sapiens
CAHRHELYDYVWGSYRYEAYVGYYFDYW

SEQ ID NO: 4540 - protein, 19 aa, Homo sapiens
CAIRLSTASWYGMFAFDLW

SEQ ID NO: 4541 - protein, 15 aa, Homo sapiens
CAKDIRLGIGVSDYW

SEQ ID NO: 4542 - protein, 19 aa, Homo sapiens
CVKDTRSGSSWSSIIFDYW

SEQ ID NO: 4543 - protein, 16 aa, Homo sapiens
CARENNSDYSFNFDNW

SEQ ID NO: 4544 - protein, 18 aa, Homo sapiens
CARMAYDSSGNISPFDYW

SEQ ID NO: 4545 - protein, 26 aa, Homo sapiens
CARILDQKYYDYDWGRYRYTGLFDYW

SEQ ID NO: 4546 - protein, 18 aa, Homo sapiens
CARDQRRGYYGSGSLDYW

SEQ ID NO: 4547 - protein, 22 aa, Homo sapiens
CARDCLMVYAEDHYYYYYMDVW

SEQ ID NO: 4548 - protein, 16 aa, Homo sapiens
CARDLGSTGPQLCDYW

SEQ ID NO: 4549 - protein, 19 aa, Homo sapiens
CVRNYNTYSAYYYYYMDVW

SEQ ID NO: 4550 - protein, 19 aa, Homo sapiens
CAGGVVVAATPSMGWFDPW

SEQ ID NO: 4551 - protein, 16 aa, Homo sapiens
CAREGYSSSSPFFDYW

SEQ ID NO: 4552 - protein, 20 aa, Homo sapiens
CARHAVVRGVGYYFYYMDVW

SEQ ID NO: 4553 - protein, 15 aa, Homo sapiens
CARGVPTGVDYFDYW

SEQ ID NO: 4554 - protein, 21 aa, Homo sapiens
CAVMNHYDSSAYHSAKAFDFW

SEQ ID NO: 4555 - protein, 30 aa, Homo sapiens
CARGEEIVVAPDTIPVEMLTGATHHWFDLW

SEQ ID NO: 4556 - protein, 18 aa, Homo sapiens
CATNFPIVYASGASGDYW

SEQ ID NO: 4557 - protein, 21 aa, Homo sapiens
CAKARTTNWGSARPYWYFDLW

SEQ ID NO: 4558 - protein, 20 aa, Homo sapiens
CAREFRYSSGWYGGDAFDIW

SEQ ID NO: 4559 - protein, 12 aa, Homo sapiens
CATDHNRYFEYW

SEQ ID NO: 4560 - protein, 22 aa, Homo sapiens
CARMVYYDYVWGSYPLYYFDYW

SEQ ID NO: 4561 - protein, 17 aa, Homo sapiens
CVRGEYDLWRDYYNDYW

SEQ ID NO: 4562 - protein, 14 aa, Homo sapiens
CATSRDDSNSFDSW

SEQ ID NO: 4563 - protein, 13 aa, Homo sapiens
CSSYSSGSTLILF

SEQ ID NO: 4564 - protein, 19 aa, Homo sapiens
CAKDRYSSSWYDNYYFDYW

SEQ ID NO: 4565 - protein, 15 aa, Homo sapiens
CVKIAVSGLWYFDYW

SEQ ID NO: 4566 - protein, 20 aa, Homo sapiens
CARAESHMVRGVITYYFDYW

SEQ ID NO: 4567 - protein, 19 aa, Homo sapiens
CARLSREMATGSDWFFDLW

SEQ ID NO: 4568 - protein, 11 aa, Homo sapiens
CARATPYMDVW

SEQ ID NO: 4569 - protein, 18 aa, Homo sapiens
CTRDRVALGRHLVEFDYW

SEQ ID NO: 4570 - protein, 24 aa, Homo sapiens
CARASFSHYYYSGNYYPHYYFDYW

SEQ ID NO: 4571 - protein, 15 aa, Homo sapiens
CQSAGTSGGHVYLVF

SEQ ID NO: 4572 - protein, 13 aa, Homo sapiens
CARNHTSSIFDSW

SEQ ID NO: 4573 - protein, 13 aa, Homo sapiens
CVRLDGDNWFDPW

SEQ ID NO: 4574 - protein, 15 aa, Homo sapiens
CARDAYRSSYYFESW

SEQ ID NO: 4575 - protein, 13 aa, Homo sapiens
CQQFNTYPQGGTF

SEQ ID NO: 4576 - protein, 17 aa, Homo sapiens
CARPLGVVTAYDAFDIW

SEQ ID NO: 4577 - protein, 19 aa, Homo sapiens
CARGLLLWTGEPPYYIDIW

SEQ ID NO: 4578 - protein, 17 aa, Homo sapiens
CAREMSTVPTRRGIDYW

SEQ ID NO: 4579 - protein, 16 aa, Homo sapiens
CATVRWFVDEMILDYW

SEQ ID NO: 4580 - protein, 15 aa, Homo sapiens
CVQASIAAAGIFDYW

SEQ ID NO: 4581 - protein, 15 aa, Homo sapiens
CARSIVVFSDAFDIW

SEQ ID NO: 4582 - protein, 19 aa, Homo sapiens
CAKSPGRTVTTYRYYFEYW

SEQ ID NO: 4583 - protein, 18 aa, Homo sapiens
CARERRLVTTTKYYFDYW

SEQ ID NO: 4584 - protein, 23 aa, Homo sapiens
CARGGLSHLGENPDYYYYYMDVW

SEQ ID NO: 4585 - protein, 14 aa, Homo sapiens
CARSYSGSDRGDYW

SEQ ID NO: 4586 - protein, 15 aa, Homo sapiens
CQQRANWPPSTPITF

SEQ ID NO: 4587 - protein, 12 aa, Homo sapiens
CMQALHTPLFSF

SEQ ID NO: 4588 - protein, 18 aa, Homo sapiens
CASGYCSDGVCYSALDYW

SEQ ID NO: 4589 - protein, 15 aa, Homo sapiens
CAREELLGRYYFDSW

SEQ ID NO: 4590 - protein, 16 aa, Homo sapiens
CARSFSGSYSYYFDYW

SEQ ID NO: 4591 - protein, 19 aa, Homo sapiens
CAKDPRRYGDYVGFPFDYW

SEQ ID NO: 4592 - protein, 17 aa, Homo sapiens
CARQQRLGASHSPFDYW

SEQ ID NO: 4593 - protein, 12 aa, Homo sapiens
CARFAAKWFDSW

SEQ ID NO: 4594 - protein, 17 aa, Homo sapiens
CARDLGYTYGSNFFDPW

SEQ ID NO: 4595 - protein, 18 aa, Homo sapiens
CARESYCGGDCSYYFDYW

SEQ ID NO: 4596 - protein, 20 aa, Homo sapiens
CTRDEDCSGDGCSQYHFDYW

SEQ ID NO: 4597 - protein, 20 aa, Homo sapiens
CAKAYYYDSSYYYYYAFDIW

SEQ ID NO: 4598 - protein, 15 aa, Homo sapiens
CARGGSGVWQSFDSW

SEQ ID NO: 4599 - protein, 12 aa, Homo sapiens
CQQLNNYLAPTF

SEQ ID NO: 4600 - protein, 19 aa, Homo sapiens
CARDADVSGFLRSSHFDYW

SEQ ID NO: 4601 - protein, 12 aa, Homo sapiens
CLQINGYPALSF

SEQ ID NO: 4602 - protein, 21 aa, Homo sapiens
CAKATYYYDSGKLKRNWFDPW

SEQ ID NO: 4603 - protein, 13 aa, Homo sapiens
CTRLLLPRTFDYW

SEQ ID NO: 4604 - protein, 19 aa, Homo sapiens
CAKNGNTYGWEYYYYMDVW

SEQ ID NO: 4605 - protein, 14 aa, Homo sapiens
CAKGAGQQWLIDYW

SEQ ID NO: 4606 - protein, 15 aa, Homo sapiens
CAHRRGGIFYDFDYW

SEQ ID NO: 4607 - protein, 12 aa, Homo sapiens
CARRRRRLFDYW

SEQ ID NO: 4608 - protein, 12 aa, Homo sapiens
CQQYGTPPPYIF

SEQ ID NO: 4609 - protein, 17 aa, Homo sapiens
CAKDTSSGWLSGDFDYW

SEQ ID NO: 4610 - protein, 20 aa, Homo sapiens
CAGSYSYYDSSGYELPFDYW

SEQ ID NO: 4611 - protein, 17 aa, Homo sapiens
CARGYFGKLLSDAFEMW

SEQ ID NO: 4612 - protein, 10 aa, Homo sapiens
CLQHDNGGTF

SEQ ID NO: 4613 - protein, 16 aa, Homo sapiens
CARESLSGSPPYMDVW

SEQ ID NO: 4614 - protein, 15 aa, Homo sapiens
CAKDPSIAAPSGDYW

SEQ ID NO: 4615 - protein, 14 aa, Homo sapiens
CAKDGGDLYAFDIW

SEQ ID NO: 4616 - protein, 11 aa, Homo sapiens
CLTHNIYPYSF

SEQ ID NO: 4617 - protein, 18 aa, Homo sapiens
CARVYYGGNPYADAFDIW

SEQ ID NO: 4618 - protein, 15 aa, Homo sapiens
CAKGPLLGHYYFDYW

SEQ ID NO: 4619 - protein, 22 aa, Homo sapiens
CARSPAPSGSYFKRGDNWFDPW

SEQ ID NO: 4620 - protein, 16 aa, Homo sapiens
CAKSSGQWLANWFDPW

SEQ ID NO: 4621 - protein, 19 aa, Homo sapiens
CARAYSGGRHHYYYYLDVW

SEQ ID NO: 4622 - protein, 15 aa, Homo sapiens
CAKGQGSSSLNFDYW

SEQ ID NO: 4623 - protein, 14 aa, Homo sapiens
CARETPYETGFDPW

SEQ ID NO: 4624 - protein, 16 aa, Homo sapiens
CASPGYSYGTALFDYW

SEQ ID NO: 4625 - protein, 22 aa, Homo sapiens
CARSPMTTVVTPGDYYYYFDVW

SEQ ID NO: 4626 - protein, 20 aa, Homo sapiens
CARDYVQWAVAGTRYYMDVW

SEQ ID NO: 4627 - protein, 23 aa, Homo sapiens
CTTAPGIVVVPVAPGAFHYMDAW

SEQ ID NO: 4628 - protein, 18 aa, Homo sapiens
CTRRYYHDSSGNFQNDYW

SEQ ID NO: 4629 - protein, 18 aa, Homo sapiens
CARDDRYSGSYSRNFDYW

SEQ ID NO: 4630 - protein, 14 aa, Homo sapiens
CAAWWELQDAFDIW

SEQ ID NO: 4631 - protein, 20 aa, Homo sapiens
CAKSESQLWFPLVVGAFDIW

SEQ ID NO: 4632 - protein, 25 aa, Homo sapiens
CARDGSAIDDFWSRTRSFAWMPDYW

SEQ ID NO: 4633 - protein, 15 aa, Homo sapiens
CARDQMVRGGAFDYW

SEQ ID NO: 4634 - protein, 15 aa, Homo sapiens
CARNIGGYSFWFDPW

SEQ ID NO: 4635 - protein, 13 aa, Homo sapiens
CASGLQLVRLDYW

SEQ ID NO: 4636 - protein, 23 aa, Homo sapiens
CARVVLGVGATPAVRTYWYFDLW

SEQ ID NO: 4637 - protein, 12 aa, Homo sapiens
CQHYDDLPRFTF

SEQ ID NO: 4638 - protein, 18 aa, Homo sapiens
CASLPHIVVVPDDAFDIW

SEQ ID NO: 4639 - protein, 21 aa, Homo sapiens
CAGEPLVVELSATGEGAFDIW

SEQ ID NO: 4640 - protein, 16 aa, Homo sapiens
CARARNGHPPDAFDIW

SEQ ID NO: 4641 - protein, 15 aa, Homo sapiens
CQAWDSSSDHRYVLF

SEQ ID NO: 4642 - protein, 13 aa, Homo sapiens
CCQQYNNWPQDAF

SEQ ID NO: 4643 - protein, 24 aa, Homo sapiens
CARTPKLGKCFVGDCFAGGWFDPW

SEQ ID NO: 4644 - protein, 10 aa, Homo sapiens
CQQCGSPPKF

SEQ ID NO: 4645 - protein, 24 aa, Homo sapiens
CARDAYCSSTSCDRSWRHGWFDPW

SEQ ID NO: 4646 - protein, 15 aa, Homo sapiens
CGADHGSGSNFDWVF

SEQ ID NO: 4647 - protein, 14 aa, Homo sapiens
CQSYGSSLNGLVLF

SEQ ID NO: 4648 - protein, 19 aa, Homo sapiens
CVRDPDFGSGTYLGYSDYW

SEQ ID NO: 4649 - protein, 18 aa, Homo sapiens
CARDEPFISGSHYYFHYW

SEQ ID NO: 4650 - protein, 24 aa, Homo sapiens
CARHEIVVVPAAIPSSRYDWFDPW

SEQ ID NO: 4651 - protein, 14 aa, Homo sapiens
CTRVDVSNYWFDSW

SEQ ID NO: 4652 - protein, 18 aa, Homo sapiens
CARDAGDTGWSRDCFDHW

SEQ ID NO: 4653 - protein, 25 aa, Homo sapiens
CARVVVVVPEQPAAIVSYYYYMDVW

SEQ ID NO: 4654 - protein, 16 aa, Homo sapiens
CARVHGNDPKTLFDYW

SEQ ID NO: 4655 - protein, 15 aa, Homo sapiens
CARENFRPTHWFDPW

SEQ ID NO: 4656 - protein, 10 aa, Homo sapiens
CTQVGASDYW

SEQ ID NO: 4657 - protein, 13 aa, Homo sapiens
CQSYHSTNPLWVF

SEQ ID NO: 4658 - protein, 15 aa, Homo sapiens
CGTWHSNSKTQVWVF

SEQ ID NO: 4659 - protein, 21 aa, Homo sapiens
CARGYSPWSKYSSSSGPFDYW

SEQ ID NO: 4660 - protein, 16 aa, Homo sapiens
CAKDTTTVASDAFDIW

SEQ ID NO: 4661 - protein, 20 aa, Homo sapiens
CATSLYCSGGSCYSEYFQHW

SEQ ID NO: 4662 - protein, 23 aa, Homo sapiens
CTTISGPDYGGNQQTEDRDFDYW

SEQ ID NO: 4663 - protein, 12 aa, Homo sapiens
CGAGYYARFDYW

SEQ ID NO: 4664 - protein, 14 aa, Homo sapiens
CARDRGRPDSFDLW

SEQ ID NO: 4665 - protein, 17 aa, Homo sapiens
CTTDRILTGYVRYFDYW

SEQ ID NO: 4666 - protein, 12 aa, Homo sapiens
CARGQGNHLDYW

SEQ ID NO: 4667 - protein, 17 aa, Homo sapiens
CAKDIGYSYARYYFDYW

SEQ ID NO: 4668 - protein, 14 aa, Homo sapiens
CAAYYYHTSGYDYW

SEQ ID NO: 4669 - protein, 16 aa, Homo sapiens
CARDIGWELLRESDYW

SEQ ID NO: 4670 - protein, 16 aa, Homo sapiens
CARSPGNFWTANYDYW

SEQ ID NO: 4671 - protein, 18 aa, Homo sapiens
CAREPRWCVSGRCYVEYW

SEQ ID NO: 4672 - protein, 14 aa, Homo sapiens
CQSADSSGSFPWMF

SEQ ID NO: 4673 - protein, 13 aa, Homo sapiens
CARWLQFTSIDYW

SEQ ID NO: 4674 - protein, 17 aa, Homo sapiens
CARETGYTYGHPYFDFW

SEQ ID NO: 4675 - protein, 16 aa, Homo sapiens
CARMGSYGSGSYFDYW

SEQ ID NO: 4676 - protein, 14 aa, Homo sapiens
CARASLYGDFFDSW

SEQ ID NO: 4677 - protein, 17 aa, Homo sapiens
CASSPGYRSGTTSFDYW

SEQ ID NO: 4678 - protein, 13 aa, Homo sapiens
CARESGTGTHDYW

SEQ ID NO: 4679 - protein, 20 aa, Homo sapiens
CARLPTLYYYDSSYWYFDLW

SEQ ID NO: 4680 - protein, 19 aa, Homo sapiens
CTTRTLNRIMITFGPFDYW

SEQ ID NO: 4681 - protein, 20 aa, Homo sapiens
CARSRIAAVDIVATYYFDYW

SEQ ID NO: 4682 - protein, 11 aa, Homo sapiens [sequence omitted]

SEQ ID NO: 4683 - protein, 16 aa, Homo sapiens
CARRLHRDDGDTFDIW

SEQ ID NO: 4684 - protein, 13 aa, Homo sapiens [sequence omitted]

SEQ ID NO: 4685 - protein, 15 aa, Homo sapiens
CAKSGILTGYRFDPW

SEQ ID NO: 4686 - protein, 19 aa, Homo sapiens
CAKDASRGSGHYVYAFDIW

SEQ ID NO: 4687 - protein, 17 aa, Homo sapiens
CAKETPNWNYVLGFDPW

SEQ ID NO: 4688 - protein, 13 aa, Homo sapiens [sequence omitted]

SEQ ID NO: 4689 - protein, 18 aa, Homo sapiens
CARQKVYYDGSGFFFDPW

SEQ ID NO: 4690 - protein, 18 aa, Homo sapiens
CARPRPDSSGYDPPFDYW

SEQ ID NO: 4691 - protein, 21 aa, Homo sapiens
CARHSYITMIVVVIPHAFDIW

SEQ ID NO: 4692 - protein, 16 aa, Homo sapiens
CARHSAQQLTQPFDIW

SEQ ID NO: 4693 - protein, 15 aa, Homo sapiens
CARSPDYSDYYFDYW

SEQ ID NO: 4694 - protein, 18 aa, Homo sapiens
CARDVIHSSSWTYYFDYW

SEQ ID NO: 4695 - protein, 13 aa, Homo sapiens
CAKSPGAYYFDYW

SEQ ID NO: 4696 - protein, 23 aa, Homo sapiens
CARDQSITMIVVVPIGFDAFDIW

SEQ ID NO: 4697 - protein, 12 aa, Homo sapiens [sequence omitted]

SEQ ID NO: 4698 - protein, 17 aa, Homo sapiens
CARDQSSLYGSAPLDYW

SEQ ID NO: 4699 - protein, 19 aa, Homo sapiens
CVRDQSSFCGSDCYHFDFW

SEQ ID NO: 4700 - protein, 17 aa, Homo sapiens
CARRVVPAAIGYYFDYW

SEQ ID NO: 4701 - protein, 16 aa, Homo sapiens
CARDRAARLLFGLDYW

SEQ ID NO: 4702 - protein, 16 aa, Homo sapiens
CASLNYYGSGEYFLHW

SEQ ID NO: 4703 - protein, 13 aa, Homo sapiens
CSSYVGSNNHYVF

SEQ ID NO: 4704 - protein, 21 aa, Homo sapiens
CARGPYCGGDCYSRLGTFDIW

SEQ ID NO: 4705 - protein, 21 aa, Homo sapiens
CARSPRYYYSSAYYPLAFDIW

SEQ ID NO: 4706 - protein, 20 aa, Homo sapiens
CARVVTMVRGVIITGYFDYW

SEQ ID NO: 4707 - protein, 17 aa, Homo sapiens
CARFYYGSGSYPSDDYW

SEQ ID NO: 4708 - protein, 22 aa, Homo sapiens
CARAPRGYCSSTSCARNAFDIW

SEQ ID NO: 4709 - protein, 18 aa, Homo sapiens
CARGDDYMTGFSYYMDVW

SEQ ID NO: 4710 - protein, 12 aa, Homo sapiens
CASLATIEEDYW

SEQ ID NO: 4711 - protein, 19 aa, Homo sapiens
CAKAYYGSGSYYKEFFDNW

SEQ ID NO: 4712 - protein, 25 aa, Homo sapiens
CVRDSLSYHESSGYYGSDPFAYDIW

SEQ ID NO: 4713 - protein, 17 aa, Homo sapiens
CARHSVAAAGANWFDPW

SEQ ID NO: 4714 - protein, 15 aa, Homo sapiens
CARDGDETYDVFDIW

SEQ ID NO: 4715 - protein, 20 aa, Homo sapiens
CARDPDYGGNSPPPSDFDYW

SEQ ID NO: 4716 - protein, 14 aa, Homo sapiens
CAREMDPHYNFDYW

SEQ ID NO: 4717 - protein, 14 aa, Homo sapiens
CARLLRSSGCYDYW

SEQ ID NO: 4718 - protein, 14 aa, Homo sapiens
CVKDRPAPSISDYW

SEQ ID NO: 4719 - protein, 19 aa, Homo sapiens
CARNYCSGGSCYTHAFDLW

SEQ ID NO: 4720 - protein, 14 aa, Homo sapiens
CQQLNNYPSGGFTF

SEQ ID NO: 4721 - protein, 15 aa, Homo sapiens
CARDNGGPGDAFDVW

SEQ ID NO: 4722 - protein, 18 aa, Homo sapiens
CARDRRDGWVPKAGFDPW

SEQ ID NO: 4723 - protein, 18 aa, Homo sapiens
CEKQNPPVLAAAGYFDYW

SEQ ID NO: 4724 - protein, 25 aa, Homo sapiens
CARGGDCSSTSCYPTIYYYYYMDVW

SEQ ID NO: 4725 - protein, 18 aa, Homo sapiens
CARTGLFWSGYYRWFDPW

SEQ ID NO: 4726 - protein, 17 aa, Homo sapiens
CARQRGGAIPYWYFDLW

SEQ ID NO: 4727 - protein, 14 aa, Homo sapiens
CTRERAGTSWFDPW

SEQ ID NO: 4728 - protein, 16 aa, Homo sapiens
CATCPGYYDGCPFDYW

SEQ ID NO: 4729 - protein, 18 aa, Homo sapiens
CARHYFDFWSGHFYFDNW

SEQ ID NO: 4730 - protein, 20 aa, Homo sapiens
CARAREQLRGPFRGYPLDYW

SEQ ID NO: 4731 - protein, 18 aa, Homo sapiens
CARFPDRQKPDYYYMDVW

SEQ ID NO: 4732 - protein, 16 aa, Homo sapiens
CTTVITIFGLYYFDYW

SEQ ID NO: 4733 - protein, 14 aa, Homo sapiens
CAAWDDSVNAFWVF

SEQ ID NO: 4734 - protein, 17 aa, Homo sapiens
CAKGRDFGVIIVDLDYW

SEQ ID NO: 4735 - protein, 15 aa, Homo sapiens
CARPVSRGPAYFDYW

SEQ ID NO: 4736 - protein, 24 aa, Homo sapiens
CVRDPSATCTTTHCYGPHHAFDVW

SEQ ID NO: 4737 - protein, 16 aa, Homo sapiens
CARGAPNWGSNYFDYW

SEQ ID NO: 4738 - protein, 22 aa, Homo sapiens
CARAATRNYYDSRGYFYYFDYW

SEQ ID NO: 4739 - protein, 15 aa, Homo sapiens
CQSYDTSLSGPKYVF

SEQ ID NO: 4740 - protein, 16 aa, Homo sapiens
CGRSSGWFTWYYFDYW

SEQ ID NO: 4741 - protein, 12 aa, Homo sapiens
CASKYGSYYDYW

SEQ ID NO: 4742 - protein, 19 aa, Homo sapiens
CAKEGLRFLEWLPHYMDVW

SEQ ID NO: 4743 - protein, 21 aa, Homo sapiens
CARGSRYSSSWYVGAYWFDPW

SEQ ID NO: 4744 - protein, 18 aa, Homo sapiens
CARHTSIAVAYYYYMDVW

SEQ ID NO: 4745 - protein, 16 aa, Homo sapiens
CTTPPGYYGTSPFDFW

SEQ ID NO: 4746 - protein, 22 aa, Homo sapiens
CAREVPGRYCNGGSCYGSVDYW

SEQ ID NO: 4747 - protein, 19 aa, Homo sapiens
CARQLLGGDSSGSGCFDYW

SEQ ID NO: 4748 - protein, 16 aa, Homo sapiens
CVKDDTYGSSSPFDYW

SEQ ID NO: 4749 - protein, 20 aa, Homo sapiens
CARGLYYYDTTGHSPNFDHW

SEQ ID NO: 4750 - protein, 16 aa, Homo sapiens
CARRVAAGPTRYFDHW

SEQ ID NO: 4751 - protein, 18 aa, Homo sapiens
CARDRGITGAEPYYFDYW

SEQ ID NO: 4752 - protein, 13 aa, Homo sapiens
CARESRAHWVDPW

SEQ ID NO: 4753 - protein, 21 aa, Homo sapiens
CARGRQGGYYRNYYYYYMDVW

SEQ ID NO: 4754 - protein, 15 aa, Homo sapiens
CQSADASGPDIHWVF

SEQ ID NO: 4755 - protein, 15 aa, Homo sapiens
CARGYTSGWYDFDYW

SEQ ID NO: 4756 - protein, 19 aa, Homo sapiens
CARDKADTAMVSYNSFDSW

SEQ ID NO: 4757 - protein, 23 aa, Homo sapiens
CTRDSGSSPFDFWSGYFVPFDPW

SEQ ID NO: 4758 - protein, 20 aa, Homo sapiens
CARAAGYGSNWAPPDTFDYW

SEQ ID NO: 4759 - protein, 15 aa, Homo sapiens
CAKTATGRHGYFDLW

SEQ ID NO: 4760 - protein, 25 aa, Homo sapiens
CAKVGSGYYYGSRELLPPYYYMDVW

SEQ ID NO: 4761 - protein, 14 aa, Homo sapiens
CGRHLDRYNAFDLW

SEQ ID NO: 4762 - protein, 16 aa, Homo sapiens
CAKMVPARFWGYFDYW

SEQ ID NO: 4763 - protein, 22 aa, Homo sapiens
CASFPDDFWSGYYEPGDWFESW

SEQ ID NO: 4764 - protein, 19 aa, Homo sapiens
CARGGGGSYSTLRDAFDIW

SEQ ID NO: 4765 - protein, 17 aa, Homo sapiens
CARGGYSSSSGNWFDPW

SEQ ID NO: 4766 - protein, 20 aa, Homo sapiens
CARDGRCSGGNCYSGLLDYW

SEQ ID NO: 4767 - protein, 23 aa, Homo sapiens
CAKALGHCTNGVCYWDRYHFDYW

SEQ ID NO: 4768 - protein, 16 aa, Homo sapiens
CAREYCTSTTCVVDYW

SEQ ID NO: 4769 - protein, 12 aa, Homo sapiens
CASQTSYSFDIW

SEQ ID NO: 4770 - protein, 13 aa, Homo sapiens
CVQGLQLPLALSF

SEQ ID NO: 4771 - protein, 18 aa, Homo sapiens
CASLSSKCWYLCGGVDYW

SEQ ID NO: 4772 - protein, 12 aa, Homo sapiens [sequence omitted]

SEQ ID NO: 4773 - protein, 17 aa, Homo sapiens
CARDRGTGTSSSWLDPW

SEQ ID NO: 4774 - protein, 17 aa, Homo sapiens
CARVESNGWSDYYFDYW

SEQ ID NO: 4775 - protein, 19 aa, Homo sapiens
CARPFTDSRHYYYYYLDVW

SEQ ID NO: 4776 - protein, 16 aa, Homo sapiens
CANENYYGSGSYIDHW

SEQ ID NO: 4777 - protein, 20 aa, Homo sapiens
CARSRCSGGSCYPTGSFDYW

SEQ ID NO: 4778 - protein, 17 aa, Homo sapiens
CAREWAEAVPWDTFDMW

SEQ ID NO: 4779 - protein, 20 aa, Homo sapiens
CTTDGVTIFGVVIIQNFDYW

SEQ ID NO: 4780 - protein, 22 aa, Homo sapiens
CSRDRIDLAYCSNPRCSNFHYW

SEQ ID NO: 4781 - protein, 16 aa, Homo sapiens
CARIPAVGPSYAVDIW

SEQ ID NO: 4782 - protein, 11 aa, Homo sapiens
CSQTLPRFDLW

SEQ ID NO: 4783 - protein, 19 aa, Homo sapiens
CARVGAARGPLYYYYMDVW

SEQ ID NO: 4784 - protein, 20 aa, Homo sapiens
CARHESSNIAAAAPDAFDIW

SEQ ID NO: 4785 - protein, 17 aa, Homo sapiens
CAKVVMVRGLSHYFDKW

SEQ ID NO: 4786 - protein, 29 aa, Homo sapiens
CATASPNRSLEFSYEHSGYMNFYYYMDVW

SEQ ID NO: 4787 - protein, 16 aa, Homo sapiens
CARSIAVAAKGYFQHW

SEQ ID NO: 4788 - protein, 13 aa, Homo sapiens
CASWDDSRNGVLF

SEQ ID NO: 4789 - protein, 17 aa, Homo sapiens
CASTDYYGSGTPYMDDW

SEQ ID NO: 4790 - protein, 18 aa, Homo sapiens
CARDGYDSSGYYNWFDPW

SEQ ID NO: 4791 - protein, 14 aa, Homo sapiens
CYSTDISDNHTGVF

SEQ ID NO: 4792 - protein, 17 aa, Homo sapiens
CAKNKDADKYSSPFDYW

SEQ ID NO: 4793 - protein, 20 aa, Homo sapiens
CARMVPHSEVILKDDAFDIW

SEQ ID NO: 4794 - protein, 21 aa, Homo sapiens
CARGPSNGDLWFGEAHAFDIW

SEQ ID NO: 4795 - protein, 16 aa, Homo sapiens
CVNDRATSGWSYFGSW

SEQ ID NO: 4796 - protein, 14 aa, Homo sapiens
CARETFFGSPFDFW

SEQ ID NO: 4797 - protein, 15 aa, Homo sapiens
CARHGIAEEYYFDYW

SEQ ID NO: 4798 - protein, 19 aa, Homo sapiens
CARVINYDILTGNRPFDYW

SEQ ID NO: 4799 - protein, 17 aa, Homo sapiens
CARLPPSWAVAGTLDYW

SEQ ID NO: 4800 - protein, 17 aa, Homo sapiens
CVRLDTSGWYRPYYDHW

SEQ ID NO: 4801 - protein, 15 aa, Homo sapiens
CARQLREPHDAFDIW

SEQ ID NO: 4802 - protein, 14 aa, Homo sapiens
CARLIAARPAFDIW

SEQ ID NO: 4803 - protein, 15 aa, Homo sapiens
CARGEFDEQFAFDPW

SEQ ID NO: 4804 - protein, 16 aa, Homo sapiens
CLLRGWSPSYYYMDVW

SEQ ID NO: 4805 - protein, 13 aa, Homo sapiens
CQQYDTIPPRITF

SEQ ID NO: 4806 - protein, 13 aa, Homo sapiens
CARDGANRDFDYW

SEQ ID NO: 4807 - protein, 21 aa, Homo sapiens
CARSPTYSTSWSDYYYYMDVW

SEQ ID NO: 4808 - protein, 16 aa, Homo sapiens
CARERGHRPSSYADSW

SEQ ID NO: 4809 - protein, 15 aa, Homo sapiens
CARGSSASGDYGDNW

SEQ ID NO: 4810 - protein, 16 aa, Homo sapiens
CARDTPPGGEFYLDHW

SEQ ID NO: 4811 - protein, 19 aa, Homo sapiens
CTKDIPLYSSSSHPPVDYW

SEQ ID NO: 4812 - protein, 22 aa, Homo sapiens
CARERYCSSTSCFRTISYFDYW

SEQ ID NO: 4813 - protein, 21 aa, Homo sapiens
CAKVSGDTSDWYGSPDVFDIW

SEQ ID NO: 4814 - protein, 14 aa, Homo sapiens
CARDSGDTSPFDPW

SEQ ID NO: 4815 - protein, 17 aa, Homo sapiens
CAREWYSSGWYGPFDIW

SEQ ID NO: 4816 - protein, 14 aa, Homo sapiens
CVKDRGNTWFFDSW

SEQ ID NO: 4817 - protein, 16 aa, Homo sapiens
CARRLNWSYEQYFDTW

SEQ ID NO: 4818 - protein, 20 aa, Homo sapiens
CARDNRYYDSSGYSDAFDIW

SEQ ID NO: 4819 - protein, 16 aa, Homo sapiens
CARHFFRGARDWFDPW

SEQ ID NO: 4820 - protein, 15 aa, Homo sapiens
CARSARHNSAHFDYW

SEQ ID NO: 4821 - protein, 11 aa, Homo sapiens
CAARWYFFEYW

SEQ ID NO: 4822 - protein, 24 aa, Homo sapiens
CARNYCDGGSCYRKYYHNYYMDVW

SEQ ID NO: 4823 - protein, 22 aa, Homo sapiens
CAKGLIGHYDSSAYYLELFDYW

SEQ ID NO: 4824 - protein, 26 aa, Homo sapiens
CARPPRLPSSRHGSGHHYAALYFDLW

SEQ ID NO: 4825 - protein, 19 aa, Homo sapiens
CARDPYDNSGYGVRNFDYW

SEQ ID NO: 4826 - protein, 11 aa, Homo sapiens [sequence omitted]

SEQ ID NO: 4827 - protein, 16 aa, Homo sapiens
CARDILSSWYDHFDYW

SEQ ID NO: 4828 - protein, 13 aa, Homo sapiens [sequence omitted]

SEQ ID NO: 4829 - protein, 14 aa, Homo sapiens
CARGSDVGNGFDYW

SEQ ID NO: 4830 - protein, 14 aa, Homo sapiens
CARAGVTGLKFDPW

SEQ ID NO: 4831 - protein, 12 aa, Homo sapiens
CQVSDSSSDVVF

SEQ ID NO: 4832 - protein, 14 aa, Homo sapiens
CTGELADSYYFDNW

SEQ ID NO: 4833 - protein, 15 aa, Homo sapiens
CARDSLGTYFYMDVW

SEQ ID NO: 4834 - protein, 20 aa, Homo sapiens
CARDYCGTMACDIEGAFDVW

SEQ ID NO: 4835 - protein, 17 aa, Homo sapiens
CARIRRAIEVPYYFDHW

SEQ ID NO: 4836 - protein, 23 aa, Homo sapiens
CARGRPGRQYYYDSSGWYYFDYW

SEQ ID NO: 4837 - protein, 14 aa, Homo sapiens
CARVAVAGKKIDYW

SEQ ID NO: 4838 - protein, 16 aa, Homo sapiens
CARHIADSSSSKFDFW

SEQ ID NO: 4839 - protein, 12 aa, Homo sapiens
CARHWGGGVDYW

SEQ ID NO: 4840 - protein, 13 aa, Homo sapiens
CTSSPLIYQFDYW

SEQ ID NO: 4841 - protein, 18 aa, Homo sapiens
CASRYSSSWYRGSYFDYW

SEQ ID NO: 4842 - protein, 14 aa, Homo sapiens
CATLSRYSVYFDYW

SEQ ID NO: 4843 - protein, 20 aa, Homo sapiens
CARQPRSSSGWWPHDAFDIW

SEQ ID NO: 4844 - protein, 16 aa, Homo sapiens
CAREPIPILGINFDYW

SEQ ID NO: 4845 - protein, 16 aa, Homo sapiens
CARVWDYYYDFAVDVW

SEQ ID NO: 4846 - protein, 15 aa, Homo sapiens
CARTYYGSGKWFDPW

SEQ ID NO: 4847 - protein, 17 aa, Homo sapiens
CAKDKFSGRSWFPFDHW

SEQ ID NO: 4848 - protein, 19 aa, Homo sapiens
CVKDPDYGSGAYLGYFDSW

SEQ ID NO: 4849 - protein, 23 aa, Homo sapiens
CARVGDYGGKTPSDWFYWYFDLW

SEQ ID NO: 4850 - protein, 15 aa, Homo sapiens
CAKDLDWNAGGFDYW

SEQ ID NO: 4851 - protein, 12 aa, Homo sapiens
CYSRDYSDNRIF

SEQ ID NO: 4852 - protein, 12 aa, Homo sapiens
CEQLSSYPMYTF

SEQ ID NO: 4853 - protein, 13 aa, Homo sapiens
CIRVRDGGAFDLW

SEQ ID NO: 4854 - protein, 20 aa, Homo sapiens
CARAGRTNYYDTSGSDFDFW

SEQ ID NO: 4855 - protein, 17 aa, Homo sapiens
CARDQGWFGQLGALDYW

SEQ ID NO: 4856 - protein, 15 aa, Homo sapiens
CARDSYSSGPTFDYW

SEQ ID NO: 4857 - protein, 21 aa, Homo sapiens
CARDGGIAAIDQSEGDYFDYW

SEQ ID NO: 4858 - protein, 22 aa, Homo sapiens
CARSGVITGPARGGYYYYMDVW

SEQ ID NO: 4859 - protein, 16 aa, Homo sapiens
CARDPGNWSPWYFDLW

SEQ ID NO: 4860 - protein, 19 aa, Homo sapiens
CAKLHGSGSYSSDDYFDPW

SEQ ID NO: 4861 - protein, 14 aa, Homo sapiens
CAALYSSSSRVDYW

SEQ ID NO: 4862 - protein, 11 aa, Homo sapiens
CQQLNAHPTTF

SEQ ID NO: 4863 - protein, 15 aa, Homo sapiens
CAKELGSATWIFDYW

SEQ ID NO: 4864 - protein, 12 aa, Homo sapiens
CQQYNTNSPYNF

SEQ ID NO: 4865 - protein, 15 aa, Homo sapiens
CARDFWGTFRYNDHW

SEQ ID NO: 4866 - protein, 20 aa, Homo sapiens
CARHDARPPDYGSGGWFDPW

SEQ ID NO: 4867 - protein, 18 aa, Homo sapiens
CAREKGIYGYNLHAFDIW

SEQ ID NO: 4868 - protein, 17 aa, Homo sapiens
CARVRRDSSSGRYMDVW

SEQ ID NO: 4869 - protein, 10 aa, Homo sapiens
CHHSSSLPAF

SEQ ID NO: 4870 - protein, 19 aa, Homo sapiens
CARVWAWRYYDSSGYYDYW

SEQ ID NO: 4871 - protein, 16 aa, Homo sapiens
CARDPPGTTSRWFDPW

SEQ ID NO: 4872 - protein, 15 aa, Homo sapiens
CARFLGVVFNWFDPW

SEQ ID NO: 4873 - protein, 17 aa, Homo sapiens
CAREGIKVRGRPIYDYW

SEQ ID NO: 4874 - protein, 13 aa, Homo sapiens
CAKHGGTYAIDYW

SEQ ID NO: 4875 - protein, 20 aa, Homo sapiens
CAKDFQAYSSHLHETYYDYW

SEQ ID NO: 4876 - protein, 14 aa, Homo sapiens
CARLHTMAIYLDYW

SEQ ID NO: 4877 - protein, 14 aa, Homo sapiens
CTGDREGTYYFEHW

SEQ ID NO: 4878 - protein, 12 aa, Homo sapiens
CQQTVSFPPWTF

SEQ ID NO: 4879 - protein, 13 aa, Homo sapiens
CAKIMVRGPSDYW

SEQ ID NO: 4880 - protein, 12 aa, Homo sapiens
CARENWASFDFW

SEQ ID NO: 4881 - protein, 18 aa, Homo sapiens
CARPYNSGWYTHYYFDLW

SEQ ID NO: 4882 - protein, 19 aa, Homo sapiens
CASYLTRPGYPTTNFFDYW

SEQ ID NO: 4883 - protein, 16 aa, Homo sapiens
CAREDWDNEGYYFDWW

SEQ ID NO: 4884 - protein, 12 aa, Homo sapiens
CGRVNIVFPDYW

SEQ ID NO: 4885 - protein, 18 aa, Homo sapiens
CSKEPSSWARGDEATDVW

SEQ ID NO: 4886 - protein, 15 aa, Homo sapiens
CARVPTMREVYVDYW

SEQ ID NO: 4887 - protein, 13 aa, Homo sapiens
CASDLSLTYPDIW

SEQ ID NO: 4888 - protein, 20 aa, Homo sapiens
CARPRSAARHPGLYDAFDIW

SEQ ID NO: 4889 - protein, 14 aa, Homo sapiens
CARHRIGIQDFDYW

SEQ ID NO: 4890 - protein, 21 aa, Homo sapiens
CARDSGYCSIGVCLSNWFDPW

SEQ ID NO: 4891 - protein, 19 aa, Homo sapiens
CARLIVVVTAAYSDAFDIW

SEQ ID NO: 4892 - protein, 19 aa, Homo sapiens
CVKDFRFLEWARTGYFDYW

SEQ ID NO: 4893 - protein, 15 aa, Homo sapiens
CARGIRTGVTAFDSW

SEQ ID NO: 4894 - protein, 15 aa, Homo sapiens
CARLRSTNSKWFDPW

SEQ ID NO: 4895 - protein, 17 aa, Homo sapiens
CARQAVGRDDWPPFDYW

SEQ ID NO: 4896 - protein, 14 aa, Homo sapiens
CARQGYADPRIDYW

SEQ ID NO: 4897 - protein, 18 aa, Homo sapiens
CARTFAVYYYDSSGIDYW

SEQ ID NO: 4898 - protein, 17 aa, Homo sapiens
CARDLMSIAVAVTPDYW

SEQ ID NO: 4899 - protein, 13 aa, Homo sapiens [sequence omitted]

SEQ ID NO: 4900 - protein, 16 aa, Homo sapiens
CARQGTTVASIFFDYW

SEQ ID NO: 4901 - protein, 16 aa, Homo sapiens
CARPHRGGPLSAFDPW

SEQ ID NO: 4902 - protein, 22 aa, Homo sapiens
CARGRLITYSSSWYYRPRFDPW

SEQ ID NO: 4903 - protein, 15 aa, Homo sapiens
CARQVVVLGRWFDPW

SEQ ID NO: 4904 - protein, 19 aa, Homo sapiens
CATQRYTGSYYEVWYFDLW

SEQ ID NO: 4905 - protein, 15 aa, Homo sapiens
CARRHGLWKHPFDSW

SEQ ID NO: 4906 - protein, 19 aa, Homo sapiens
CARSPPLSAVTTPHYFDYW

SEQ ID NO: 4907 - protein, 17 aa, Homo sapiens
CAKDKIVHSYGNAFDMW

SEQ ID NO: 4908 - protein, 26 aa, Homo sapiens
CAKDRWSGYCSSTSCQDPIDNWFDPW

SEQ ID NO: 4909 - protein, 17 aa, Homo sapiens
CTREEVEGGYAEYFQHW

SEQ ID NO: 4910 - protein, 17 aa, Homo sapiens
CARVTALDYVWGTHDYW

SEQ ID NO: 4911 - protein, 13 aa, Homo sapiens
CQSANSSDSYWVF

SEQ ID NO: 4912 - protein, 15 aa, Homo sapiens
CAKLIAAAFRWFDPW

SEQ ID NO: 4913 - protein, 19 aa, Homo sapiens
CARDRSGTALTSHWYFDLW

SEQ ID NO: 4914 - protein, 14 aa, Homo sapiens
CNSRDSSGNHSPVF

SEQ ID NO: 4915 - protein, 21 aa, Homo sapiens
CARILHYYDSSGYYYWGFDYW

SEQ ID NO: 4916 - protein, 14 aa, Homo sapiens
CARGPTKGNAFDVW

SEQ ID NO: 4917 - protein, 13 aa, Homo sapiens
CARYSIANYFDYW

SEQ ID NO: 4918 - protein, 25 aa, Homo sapiens
CARDKKRITIFGVVTTGFYYYMDVW

SEQ ID NO: 4919 - protein, 22 aa, Homo sapiens
CARRFNDLLTGSLGRYFYMDVW

SEQ ID NO: 4920 - protein, 11 aa, Homo sapiens
CAGEQKAFDLW

SEQ ID NO: 4921 - protein, 19 aa, Homo sapiens
CARVGCTSPSCYDGWFDPW

SEQ ID NO: 4922 - protein, 21 aa, Homo sapiens
CAKDFWVSGLVVTEDGYFDYW

SEQ ID NO: 4923 - protein, 15 aa, Homo sapiens
CARQVSPPGYHFDYW

SEQ ID NO: 4924 - protein, 11 aa, Homo sapiens
CAGGRSRVDYW

SEQ ID NO: 4925 - protein, 17 aa, Homo sapiens
CARTGSSSGWGFWFDPW

SEQ ID NO: 4926 - protein, 16 aa, Homo sapiens
CARRTLYNTGPYFDYW

SEQ ID NO: 4927 - protein, 19 aa, Homo sapiens
CAREAYDSTGYRLGYFEKW

SEQ ID NO: 4928 - protein, 19 aa, Homo sapiens
CARAPLQGWRHTLNWFDPW

SEQ ID NO: 4929 - protein, 20 aa, Homo sapiens
CARHRYCSSTSCRRLAFDYW

SEQ ID NO: 4930 - protein, 23 aa, Homo sapiens
CARDPILRPMIVVANPADYFDYW

SEQ ID NO: 4931 - protein, 20 aa, Homo sapiens
CARHVYYDFWSGPINWFDPW

SEQ ID NO: 4932 - protein, 12 aa, Homo sapiens [sequence omitted]

SEQ ID NO: 4933 - protein, 19 aa, Homo sapiens
CAKMARSATCNPCRWFGPW

SEQ ID NO: 4934 - protein, 19 aa, Homo sapiens
CVRHTAFWYSSSYGWFDPW

SEQ ID NO: 4935 - protein, 14 aa, Homo sapiens
CQSTDSSATRDWVF

SEQ ID NO: 4936 - protein, 16 aa, Homo sapiens
CAKDINWSYVRYFDLW

SEQ ID NO: 4937 - protein, 22 aa, Homo sapiens
CARGYTYYYDSSGSYPWYFDYW

SEQ ID NO: 4938 - protein, 15 aa, Homo sapiens
CAKDRVAVAYFIDYW

SEQ ID NO: 4939 - protein, 19 aa, Homo sapiens
CARAGVSWLLRALNYFDYW

SEQ ID NO: 4940 - protein, 12 aa, Homo sapiens
CFCAADNNQGGF

SEQ ID NO: 4941 - protein, 17 aa, Homo sapiens
CARTLSEHQPLYYFDYW

SEQ ID NO: 4942 - protein, 15 aa, Homo sapiens
CAREIWYARSLFDIW

SEQ ID NO: 4943 - protein, 16 aa, Homo sapiens
CARDGVRATPSYFDYW

SEQ ID NO: 4944 - protein, 12 aa, Homo sapiens
CMEALQTRQWTF

SEQ ID NO: 4945 - protein, 17 aa, Homo sapiens
CAKGDYGSVLMVPFDYW

SEQ ID NO: 4946 - protein, 16 aa, Homo sapiens
CAKDVSWELPYYFDYW

SEQ ID NO: 4947 - protein, 14 aa, Homo sapiens
CAKGIAVAGTCDYW

SEQ ID NO: 4948 - protein, 14 aa, Homo sapiens
CGSYTSTSTLGLIF

SEQ ID NO: 4949 - protein, 14 aa, Homo sapiens
CQVWDSSSDQVGLF

SEQ ID NO: 4950 - protein, 20 aa, Homo sapiens
CARDSGDDCSGGSCYSGDYW

SEQ ID NO: 4951 - protein, 7 aa, Homo sapiens
CQQANTF

SEQ ID NO: 4952 - protein, 17 aa, Homo sapiens
CAKETSSGWQGDAFDIW

SEQ ID NO: 4953 - protein, 21 aa, Homo sapiens
CARFNRGVKAAGLFANWFDPW

SEQ ID NO: 4954 - protein, 10 aa, Homo sapiens
CTRDWEHDYW

SEQ ID NO: 4955 - protein, 16 aa, Homo sapiens
CAREIDRGAPKYFDPW

SEQ ID NO: 4956 - protein, 14 aa, Homo sapiens
CAKALREQKPLDYW

SEQ ID NO: 4957 - protein, 16 aa, Homo sapiens
CARGKYQEPPGWLDSW

SEQ ID NO: 4958 - protein, 15 aa, Homo sapiens
CARAGIPYHGAFDIW

SEQ ID NO: 4959 - protein, 19 aa, Homo sapiens
CAKEYCSSADCYADHFDFW

SEQ ID NO: 4960 - protein, 17 aa, Homo sapiens
CARLLDDYGDYRYFDYW

SEQ ID NO: 4961 - protein, 17 aa, Homo sapiens
CARKSGYFSGQYYLDVW

SEQ ID NO: 4962 - protein, 16 aa, Homo sapiens
CARMTITGTTDWFDPW

SEQ ID NO: 4963 - protein, 16 aa, Homo sapiens
CVKEALEYSSSYDDYW

SEQ ID NO: 4964 - protein, 14 aa, Homo sapiens
CARRDRNTNYFDYW

SEQ ID NO: 4965 - protein, 21 aa, Homo sapiens
CARDQIPVLRYFDWLLPFDYW

SEQ ID NO: 4966 - protein, 25 aa, Homo sapiens
CALPISAVYYCAKDLDGGESAFDIW

SEQ ID NO: 4967 - protein, 14 aa, Homo sapiens
CARHPDLAKPFDVW

SEQ ID NO: 4968 - protein, 17 aa, Homo sapiens
CARDRQAAAGRGGLDYW

SEQ ID NO: 4969 - protein, 22 aa, Homo sapiens
CARGVRAGFGVVLPRSNWFDPW

SEQ ID NO: 4970 - protein, 16 aa, Homo sapiens
CARQSFLVAPGAFDIW

SEQ ID NO: 4971 - protein, 18 aa, Homo sapiens
CARHRRRSGYYFDAFDMW

SEQ ID NO: 4972 - protein, 21 aa, Homo sapiens
CARDPGIAIYGVVYYNYLDVW

SEQ ID NO: 4973 - protein, 17 aa, Homo sapiens
CARWRRDGYNLDAFDIW

SEQ ID NO: 4974 - protein, 19 aa, Homo sapiens
CARDQIGRDWGSSTAFDVW

SEQ ID NO: 4975 - protein, 19 aa, Homo sapiens
CAREIIVVVPAARNWFDPW

SEQ ID NO: 4976 - protein, 10 aa, Homo sapiens
CGTWHSNSMF

SEQ ID NO: 4977 - protein, 18 aa, Homo sapiens
CASRDFWSGNAYSYMDVW

SEQ ID NO: 4978 - protein, 20 aa, Homo sapiens
CAKDQGYDFWSGYYSEFDYW

SEQ ID NO: 4979 - protein, 17 aa, Homo sapiens
CARLPGIAAPVGWFDPW

SEQ ID NO: 4980 - protein, 19 aa, Homo sapiens
CARDTYDNTGYYYKDFDYW

SEQ ID NO: 4981 - protein, 16 aa, Homo sapiens
CARQRTAAVGTDFDFW

SEQ ID NO: 4982 - protein, 14 aa, Homo sapiens
CARVFVTTDGYDYW

SEQ ID NO: 4983 - protein, 16 aa, Homo sapiens
CARVIAAAASGWFDPW

SEQ ID NO: 4984 - protein, 13 aa, Homo sapiens
CAHRRLELLFDPW

SEQ ID NO: 4985 - protein, 18 aa, Homo sapiens
CAKVGLWFGWYYYYMDVW

SEQ ID NO: 4986 - protein, 18 aa, Homo sapiens
CARAVPTLTTPLDAFDIW

SEQ ID NO: 4987 - protein, 16 aa, Homo sapiens
CARGIVAASGALFEYW

SEQ ID NO: 4988 - protein, 22 aa, Homo sapiens
CAKVYDFWSGYYTGYYYYMDVW

SEQ ID NO: 4989 - protein, 19 aa, Homo sapiens
CATSAGTYYYGSALPFDIW

SEQ ID NO: 4990 - protein, 18 aa, Homo sapiens
CARPDGRSSTGYDPFDVW

SEQ ID NO: 4991 - protein, 23 aa, Homo sapiens
CAGSKKYTDGGGFGYYYYSMDVW

SEQ ID NO: 4992 - protein, 16 aa, Homo sapiens
CAREPPAVVHDAFDIW

SEQ ID NO: 4993 - protein, 21 aa, Homo sapiens
CAKDRRRSSSWSMPHDAFDIW

SEQ ID NO: 4994 - protein, 16 aa, Homo sapiens
CARQIWSGYSAKFDYW

SEQ ID NO: 4995 - protein, 22 aa, Homo sapiens
CARDESGYYDSSGYYYSAFDIW

SEQ ID NO: 4996 - protein, 16 aa, Homo sapiens
CVRDTEVIPTYYFDYW

SEQ ID NO: 4997 - protein, 14 aa, Homo sapiens
CTTLDPVNQDFDVW

SEQ ID NO: 4998 - protein, 16 aa, Homo sapiens
CARVFIGGSYGPFDYW

SEQ ID NO: 4999 - protein, 19 aa, Homo sapiens
CAKDRVGIDSYGLRYFDYW

SEQ ID NO: 5000 - protein, 14 aa, Homo sapiens
CARGSSTVTHFDYW

SEQ ID NO: 5001 - protein, 17 aa, Homo sapiens
CAKGGDYGGPRGPFDHW

SEQ ID NO: 5002 - protein, 16 aa, Homo sapiens
CTRLDHVGATRAFDVW

SEQ ID NO: 5003 - protein, 17 aa, Homo sapiens
CVKEAGSSSWRNYFDYW

SEQ ID NO: 5004 - protein, 20 aa, Homo sapiens
CAKVGEGWPPSYYKYYMDVW

SEQ ID NO: 5005 - protein, 11 aa, Homo sapiens
CQPYNSLPIIF

SEQ ID NO: 5006 - protein, 15 aa, Homo sapiens
CARLSGTYEWYFDFW

SEQ ID NO: 5007 - protein, 23 aa, Homo sapiens
CVKSNGPMETFGGSNPNTHFDSW

SEQ ID NO: 5008 - protein, 22 aa, Homo sapiens
CARLARPYYYDSSGYRNWFDPW

SEQ ID NO: 5009 - protein, 19 aa, Homo sapiens
CARDPRIELWKRGYYMDVW

SEQ ID NO: 5010 - protein, 14 aa, Homo sapiens
CARDLGMGSYFDYW

SEQ ID NO: 5011 - protein, 20 aa, Homo sapiens
CARDRFLGRGWLQFNAFDIW

SEQ ID NO: 5012 - protein, 12 aa, Homo sapiens
CGTGGAEGLDYW

SEQ ID NO: 5013 - protein, 16 aa, Homo sapiens
CARSSLGSYGDYVGYW

SEQ ID NO: 5014 - protein, 18 aa, Homo sapiens
CARDRRGSDYYYYYMDVW

SEQ ID NO: 5015 - protein, 12 aa, Homo sapiens
CQRYNSDPPFSF

SEQ ID NO: 5016 - protein, 22 aa, Homo sapiens
CARQDYESSGPSPYFYYYMDVW

SEQ ID NO: 5017 - protein, 18 aa, Homo sapiens
CARYYYDILTGYLHFDYW

SEQ ID NO: 5018 - protein, 22 aa, Homo sapiens
CARLASRITIFGVASRGWFDPW

SEQ ID NO: 5019 - protein, 16 aa, Homo sapiens
CARDLSGSYYPSFDYW

SEQ ID NO: 5020 - protein, 14 aa, Homo sapiens
CARDAAPLAGPDYW

SEQ ID NO: 5021 - protein, 22 aa, Homo sapiens
CARGRLGYCNDGSCHGHAFDIW

SEQ ID NO: 5022 - protein, 18 aa, Homo sapiens
CARKVRGVIIPNDAFDIW

SEQ ID NO: 5023 - protein, 14 aa, Homo sapiens
CASGPRITRTNDYW

SEQ ID NO: 5024 - protein, 17 aa, Homo sapiens
CAKDLTGRSLIDAFDIW

SEQ ID NO: 5025 - protein, 15 aa, Homo sapiens
CATYGGNEWGPFDYW

SEQ ID NO: 5026 - protein, 19 aa, Homo sapiens
CAKGPMEWKTRQLAPLDYW

SEQ ID NO: 5027 - protein, 13 aa, Homo sapiens
CTTSLGWWAFNYW

SEQ ID NO: 5028 - protein, 17 aa, Homo sapiens
CARDRKSIAARRGADYW

SEQ ID NO: 5029 - protein, 13 aa, Homo sapiens
CGTRLSGKTIDYW

SEQ ID NO: 5030 - protein, 14 aa, Homo sapiens
CARDRGPPAANDYW

SEQ ID NO: 5031 - protein, 25 aa, Homo sapiens
CATTSADFYQTSGYEAGPLDPFDLW

SEQ ID NO: 5032 - protein, 11 aa, Homo sapiens
CQHFDSYPLAF

SEQ ID NO: 5033 - protein, 20 aa, Homo sapiens
CARVSQGYYDSSGYHYFDYW

SEQ ID NO: 5034 - protein, 16 aa, Homo sapiens
CARLPHNTAMVPFDYW

SEQ ID NO: 5035 - protein, 19 aa, Homo sapiens
CARSSDPTYGAKRGAFDLW

SEQ ID NO: 5036 - protein, 19 aa, Homo sapiens
CATYGYGSGSYSSYYFDYW

SEQ ID NO: 5037 - protein, 15 aa, Homo sapiens
CARVPTPRDVYFEFW

SEQ ID NO: 5038 - protein, 14 aa, Homo sapiens
CAREDRILTRFDPW

SEQ ID NO: 5039 - protein, 22 aa, Homo sapiens
CAAIPLNYYGSSGSWSYYFDYW

SEQ ID NO: 5040 - protein, 18 aa, Homo sapiens
CARDVGWEWLGLDYMDVW

SEQ ID NO: 5041 - protein, 18 aa, Homo sapiens
CAKGSTHGFPPNWYFDLW

SEQ ID NO: 5042 - protein, 16 aa, Homo sapiens
CAKDWSSSWYTPTDYW

SEQ ID NO: 5043 - protein, 13 aa, Homo sapiens
CGTWDSILNAGVF

SEQ ID NO: 5044 - protein, 13 aa, Homo sapiens
CARLSGSWYLDFW

SEQ ID NO: 5045 - protein, 21 aa, Homo sapiens
CARESYYDSSGHYSLGALDIW

SEQ ID NO: 5046 - protein, 12 aa, Homo sapiens
CHQYYSTPLVTF

SEQ ID NO: 5047 - protein, 19 aa, Homo sapiens
CASWRSSSWSKGIYAFDIW

SEQ ID NO: 5048 - protein, 15 aa, Homo sapiens
CARVTSGSDYSFEYW

SEQ ID NO: 5049 - protein, 22 aa, Homo sapiens
CARRLSRRSSGWYRSVDAFDIW

SEQ ID NO: 5050 - protein, 18 aa, Homo sapiens
CARQGGLDMKVVGAFDIW

SEQ ID NO: 5051 - protein, 19 aa, Homo sapiens
CAKGFSPTYMTVNTGPDYW

SEQ ID NO: 5052 - protein, 15 aa, Homo sapiens
CARDVQYTTSYGDYW

SEQ ID NO: 5053 - protein, 18 aa, Homo sapiens
CVRGYFLTPYRRPYFDHW

SEQ ID NO: 5054 - protein, 14 aa, Homo sapiens
CARTPLQWLVFDYW

SEQ ID NO: 5055 - protein, 18 aa, Homo sapiens
CASENFGESYYYYYMDVW

SEQ ID NO: 5056 - protein, 16 aa, Homo sapiens
CARSRYDWNDRYFDAW

SEQ ID NO: 5057 - protein, 17 aa, Homo sapiens
CARRAGWDIVATTFDYW

SEQ ID NO: 5058 - protein, 13 aa, Homo sapiens
CQERSDWPRMYAF

SEQ ID NO: 5059 - protein, 17 aa, Homo sapiens
CARERSRGAEDDAFDIW

SEQ ID NO: 5060 - protein, 18 aa, Homo sapiens
CAKDRLVYGSGDGLFDHW

SEQ ID NO: 5061 - protein, 16 aa, Homo sapiens
CAKPLTGSSSNYLDYW

SEQ ID NO: 5062 - protein, 15 aa, Homo sapiens
CANGDSIEGILFDYW

SEQ ID NO: 5063 - protein, 15 aa, Homo sapiens
CQHYNDWPPGHLRTF

SEQ ID NO: 5064 - protein, 15 aa, Homo sapiens
CAKGLEGGSWTFDIW

SEQ ID NO: 5065 - protein, 13 aa, Homo sapiens
CQRFKSYPLSYTF

SEQ ID NO: 5066 - protein, 18 aa, Homo sapiens
CAKETAARGWGYDAFDIW

SEQ ID NO: 5067 - protein, 16 aa, Homo sapiens
CARQANCGGNCPFDYW

SEQ ID NO: 5068 - protein, 14 aa, Homo sapiens
CANYYGDYAIFDYW

SEQ ID NO: 5069 - protein, 18 aa, Homo sapiens
CARSYSSGWYVGYYFDYW

SEQ ID NO: 5070 - protein, 14 aa, Homo sapiens
CASTRWPKYYFDYW

SEQ ID NO: 5071 - protein, 19 aa, Homo sapiens
CARTLYSYGLHYYYYMDVW

SEQ ID NO: 5072 - protein, 14 aa, Homo sapiens
CARLGGRQQWFDYW

SEQ ID NO: 5073 - protein, 12 aa, Homo sapiens
CQQSSDTPPLTF

SEQ ID NO: 5074 - protein, 18 aa, Homo sapiens
CAKDQTPGLGDLYFFDFW

SEQ ID NO: 5075 - protein, 17 aa, Homo sapiens
CARDRKWELLSNWFDPW

SEQ ID NO: 5076 - protein, 11 aa, Homo sapiens
CTQKIHLPLTF

SEQ ID NO: 5077 - protein, 17 aa, Homo sapiens
CAKATTPGSVWNFFDSW

SEQ ID NO: 5078 - protein, 19 aa, Homo sapiens
CARGSGGSALVGNNWFDPW

SEQ ID NO: 5079 - protein, 22 aa, Homo sapiens
CARVVFGIAAAPPYYYYYMDVW

SEQ ID NO: 5080 - protein, 14 aa, Homo sapiens
CARGVTGGWLIDYW

SEQ ID NO: 5081 - protein, 15 aa, Homo sapiens
CASWDDSPNGRNWVF

SEQ ID NO: 5082 - protein, 17 aa, Homo sapiens
CATDKDSAYVREAFDIW

SEQ ID NO: 5083 - protein, 13 aa, Homo sapiens
CQSVDSTGAHVIF

SEQ ID NO: 5084 - protein, 16 aa, Homo sapiens
CARHMVNYTPAYFLDW

SEQ ID NO: 5085 - protein, 23 aa, Homo sapiens
CARLSTPAAGVLEMLSPWYFDLW

SEQ ID NO: 5086 - protein, 17 aa, Homo sapiens
CARDRVVVTAHYYMDVW

SEQ ID NO: 5087 - protein, 17 aa, Homo sapiens
CSQGYCTRDSCYDSDYW

SEQ ID NO: 5088 - protein, 17 aa, Homo sapiens
CAKATADGPGSYIVDYW

SEQ ID NO: 5089 - protein, 15 aa, Homo sapiens
CSTWDYSLSAPNWVF

SEQ ID NO: 5090 - protein, 24 aa, Homo sapiens
CARAQGNTIVVTLGTYYYYYMDVW

SEQ ID NO: 5091 - protein, 16 aa, Homo sapiens
CARDRAGDGSGYYDCW

SEQ ID NO: 5092 - protein, 14 aa, Homo sapiens
CAGQEWTPGEFDSW

SEQ ID NO: 5093 - protein, 15 aa, Homo sapiens
CARDQNGAVAGIDYW

SEQ ID NO: 5094 - protein, 15 aa, Homo sapiens
CARPVVAGTHGFDYW

SEQ ID NO: 5095 - protein, 18 aa, Homo sapiens
CVRETYYYDSSGYYIDPW

SEQ ID NO: 5096 - protein, 16 aa, Homo sapiens
CARFYLGTTTPNLDYW

SEQ ID NO: 5097 - protein, 15 aa, Homo sapiens
CASLPRDGDPYFDSW

SEQ ID NO: 5098 - protein, 14 aa, Homo sapiens
CARAGGYGPAFDYW

SEQ ID NO: 5099 - protein, 20 aa, Homo sapiens
CAISGGSSSENYYYYYMDVW

SEQ ID NO: 5100 - protein, 16 aa, Homo sapiens
CAHSYYDFWSGYYDYW

SEQ ID NO: 5101 - protein, 15 aa, Homo sapiens
CAKDLDGGESAFDIW

SEQ ID NO: 5102 - protein, 17 aa, Homo sapiens
CARGSEMSTLTNWFDPW

SEQ ID NO: 5103 - protein, 23 aa, Homo sapiens
CARVRLAVDYCPNAVCLGGFDIW

SEQ ID NO: 5104 - protein, 14 aa, Homo sapiens
CCSYAGSYTFPWVF

SEQ ID NO: 5105 - protein, 13 aa, Homo sapiens
CQTADTSGDDWVF

SEQ ID NO: 5106 - protein, 18 aa, Homo sapiens
CARVDDSSGYYLDAFDIW

SEQ ID NO: 5107 - protein, 16 aa, Homo sapiens
CARDLWQQLAQGFDYW

SEQ ID NO: 5108 - protein, 20 aa, Homo sapiens
CARDWGRDSVVTSYNWFDPW

SEQ ID NO: 5109 - protein, 16 aa, Homo sapiens
CAKAANSWYLYYFDYW

SEQ ID NO: 5110 - protein, 18 aa, Homo sapiens
CANLGYCLNTTCQGEDYW

SEQ ID NO: 5111 - protein, 18 aa, Homo sapiens
CAKGYSGPNVGLDWFDPW

SEQ ID NO: 5112 - protein, 19 aa, Homo sapiens
CARDGDDFWSGYYPPFDYW

SEQ ID NO: 5113 - protein, 13 aa, Homo sapiens
CMQATHFPHPVTF

SEQ ID NO: 5114 - protein, 17 aa, Homo sapiens
CARDSDGWYLNDAFDIW

SEQ ID NO: 5115 - protein, 14 aa, Homo sapiens
CARESIAARPIDYW

SEQ ID NO: 5116 - protein, 19 aa, Homo sapiens
CARKVGYRSSNGYYYMDVW

SEQ ID NO: 5117 - protein, 17 aa, Homo sapiens
CARAAEQLGTPSGHDYW

SEQ ID NO: 5118 - protein, 14 aa, Homo sapiens
CARFSWQMDAFDIW

SEQ ID NO: 5119 - protein, 13 aa, Homo sapiens
CQPYNSFSFSYTF

SEQ ID NO: 5120 - protein, 15 aa, Homo sapiens
CATSSGWSYYYMDVW

SEQ ID NO: 5121 - protein, 24 aa, Homo sapiens
CARLGCTNGVCYRDDLYTYYMDVW

SEQ ID NO: 5122 - protein, 12 aa, Homo sapiens
CVRDDSFAFDYW

SEQ ID NO: 5123 - protein, 19 aa, Homo sapiens
CAKDWEFSINWFQGGFDHW

SEQ ID NO: 5124 - protein, 15 aa, Homo sapiens
CASLYSTSSPYFDYW

SEQ ID NO: 5125 - protein, 23 aa, Homo sapiens
CVKLGLDCSDGDCRDYGDDVDYW

SEQ ID NO: 5126 - protein, 17 aa, Homo sapiens
CARLDDSSGYYSYFDYW

SEQ ID NO: 5127 - protein, 17 aa, Homo sapiens
CARGRPAAGGPYYMDVW

SEQ ID NO: 5128 - protein, 17 aa, Homo sapiens
CAKDRLKHSYGSDFDYW

SEQ ID NO: 5129 - protein, 21 aa, Homo sapiens
CTTDLLMVVPAAMMLNYFDYW

SEQ ID NO: 5130 - protein, 17 aa, Homo sapiens
CAKSEDYDSSGYYGGYW

SEQ ID NO: 5131 - protein, 16 aa, Homo sapiens
CARVAAGELYYAFDIW

SEQ ID NO: 5132 - protein, 12 aa, Homo sapiens
CLQGSHWPPFTF

SEQ ID NO: 5133 - protein, 17 aa, Homo sapiens
CARKPRYSSGWGWFDPW

SEQ ID NO: 5134 - protein, 18 aa, Homo sapiens
CARDRNWYGSGSLYFDHW

SEQ ID NO: 5135 - protein, 12 aa, Homo sapiens
CMQGIDGPPYLF

SEQ ID NO: 5136 - protein, 12 aa, Homo sapiens
CARLSMVAFDPW

SEQ ID NO: 5137 - protein, 17 aa, Homo sapiens
CARARIYAWSGSDYDYW

SEQ ID NO: 5138 - protein, 17 aa, Homo sapiens
CARLVVVVVADGWFDPW

SEQ ID NO: 5139 - protein, 19 aa, Homo sapiens
CARMMTFGGVIVSDAFDIW

SEQ ID NO: 5140 - protein, 17 aa, Homo sapiens
CARVSMDIVATKTFDYW

SEQ ID NO: 5141 - protein, 11 aa, Homo sapiens
CLQDYNHLGTF

SEQ ID NO: 5142 - protein, 19 aa, Homo sapiens
CAKDIGGGRDSHFYYMDVW

SEQ ID NO: 5143 - protein, 19 aa, Homo sapiens
CARVGRFGELRGQYYFDYW

SEQ ID NO: 5144 - protein, 19 aa, Homo sapiens
CARHVMFFGVVIINYFDYW

SEQ ID NO: 5145 - protein, 22 aa, Homo sapiens
CARGLLGYCSGGSCYPAVFDYW

SEQ ID NO: 5146 - protein, 16 aa, Homo sapiens
CARDAGGGDWHYFDYW

SEQ ID NO: 5147 - protein, 11 aa, Homo sapiens
CQSYDYNNWVF

SEQ ID NO: 5148 - protein, 13 aa, Homo sapiens
CARGRQQPRFDPW

SEQ ID NO: 5149 - protein, 18 aa, Homo sapiens
CAKVSFPEAKTRYGLDYW

SEQ ID NO: 5150 - protein, 11 aa, Homo sapiens [sequence omitted]

SEQ ID NO: 5151 - protein, 14 aa, Homo sapiens
CARGGDWNRYFDCW

SEQ ID NO: 5152 - protein, 19 aa, Homo sapiens
CARDAKGESSGYNYFFDHW

SEQ ID NO: 5153 - protein, 15 aa, Homo sapiens
CARDHRGDENAFDIW

SEQ ID NO: 5154 - protein, 19 aa, Homo sapiens
CARHVKSTAVSSLDVFDIW

SEQ ID NO: 5155 - protein, 15 aa, Homo sapiens
CAGRNWNVKNWFDPW

SEQ ID NO: 5156 - protein, 31 aa, Homo sapiens
CALPIWDLAGRQFLPGVLALLSQCDNWFDPW

SEQ ID NO: 5157 - protein, 23 aa, Homo sapiens
CARGRGSSWYMVGATGGVYFDYW

SEQ ID NO: 5158 - protein, 20 aa, Homo sapiens
CARAYGVTMVRGYYNWFDPW

SEQ ID NO: 5159 - protein, 16 aa, Homo sapiens
CARAAHSGTYRIFDYW

SEQ ID NO: 5160 - protein, 22 aa, Homo sapiens
CARGSAGSLGYDDILTGYFPRW

SEQ ID NO: 5161 - protein, 17 aa, Homo sapiens
CARGRAYGDRRMGFDPW

SEQ ID NO: 5162 - protein, 11 aa, Homo sapiens
CQQYYSTLIIF

SEQ ID NO: 5163 - protein, 22 aa, Homo sapiens
CATVAYFYDSSAYVHPGAFDFW

SEQ ID NO: 5164 - protein, 13 aa, Homo sapiens
CARVVIRVGFDYW

SEQ ID NO: 5165 - protein, 16 aa, Homo sapiens
CARIIAVAGAWAFDIW

SEQ ID NO: 5166 - protein, 19 aa, Homo sapiens
CARIGYCSSTSCFRGNDYW

SEQ ID NO: 5167 - protein, 17 aa, Homo sapiens
CARVTVKTASISQFDHW

SEQ ID NO: 5168 - protein, 13 aa, Homo sapiens
CYTAADNHPYVVF

SEQ ID NO: 5169 - protein, 18 aa, Homo sapiens
CARGRGYSPYEGYYSDYW

SEQ ID NO: 5170 - protein, 14 aa, Homo sapiens
CNSRDSSTGNLWMF

SEQ ID NO: 5171 - protein, 17 aa, Homo sapiens
CAVGQVAGSPNLRFAYW

SEQ ID NO: 5172 - protein, 15 aa, Homo sapiens
CAAWDDSRTGPCVTF

SEQ ID NO: 5173 - protein, 20 aa, Homo sapiens
CARDVRFGGPDYVANWFDPW

SEQ ID NO: 5174 - protein, 17 aa, Homo sapiens
CAMPLLWFGEWAPFNYW

SEQ ID NO: 5175 - protein, 20 aa, Homo sapiens
CAKVPGVWIQPYTRTFFDYW

SEQ ID NO: 5176 - protein, 17 aa, Homo sapiens
CAISVWTYRKADDPDYW

SEQ ID NO: 5177 - protein, 19 aa, Homo sapiens
CARDGGALGEIYPGYYDYW

SEQ ID NO: 5178 - protein, 20 aa, Homo sapiens
CAKVPPLSRSWYWEGAFDIW

SEQ ID NO: 5179 - protein, 16 aa, Homo sapiens
CARTRAYYDFFYFDYW

SEQ ID NO: 5180 - protein, 16 aa, Homo sapiens
CALGGRWSDHDAFDIW

SEQ ID NO: 5181 - protein, 16 aa, Homo sapiens
CASNYGYTLTNPFDIW

SEQ ID NO: 5182 - protein, 14 aa, Homo sapiens
CARPSVGARAFDVW

SEQ ID NO: 5183 - protein, 14 aa, Homo sapiens
CARVPPTEYYFDYW

SEQ ID NO: 5184 - protein, 17 aa, Homo sapiens
CARRSVPVATSYSFDYW

SEQ ID NO: 5185 - protein, 17 aa, Homo sapiens
CARFFPGGNLDHYFDYW

SEQ ID NO: 5186 - protein, 15 aa, Homo sapiens
CARGYAYYFLYMDVW

SEQ ID NO: 5187 - protein, 22 aa, Homo sapiens
CVASDKYYDFWSGYPSDAFDIW

SEQ ID NO: 5188 - protein, 13 aa, Homo sapiens
CASWDDSVSGAIF

SEQ ID NO: 5189 - protein, 14 aa, Homo sapiens
CARGFSSSWYWAYW

SEQ ID NO: 5190 - protein, 16 aa, Homo sapiens
CARCNWNWGDNWFDPW

SEQ ID NO: 5191 - protein, 21 aa, Homo sapiens
CARDRAYLDRELHNYYYMDVW

SEQ ID NO: 5192 - protein, 19 aa, Homo sapiens
CTTVGYDFWSNYYNYFDHW

SEQ ID NO: 5193 - protein, 18 aa, Homo sapiens
CARVVQDYYDSSGYEDYW

SEQ ID NO: 5194 - protein, 12 aa, Homo sapiens
CVRQSSSGYDYW

SEQ ID NO: 5195 - protein, 20 aa, Homo sapiens
CARGLDYYDSSGLGQIFDYW

SEQ ID NO: 5196 - protein, 11 aa, Homo sapiens
CATEGRGFAYW

SEQ ID NO: 5197 - protein, 15 aa, Homo sapiens
CARTPSESNWGFDYW

SEQ ID NO: 5198 - protein, 17 aa, Homo sapiens
CARGSSASVWGNGFDMW

SEQ ID NO: 5199 - protein, 17 aa, Homo sapiens
CAKDGHETQWSYYMDVW

SEQ ID NO: 5200 - protein, 15 aa, Homo sapiens
CARDGVEWLVSFDYW

SEQ ID NO: 5201 - protein, 17 aa, Homo sapiens
CARAKPRSPPEKFFDYW

SEQ ID NO: 5202 - protein, 14 aa, Homo sapiens
CARGFNLGSSFDYW

SEQ ID NO: 5203 - protein, 20 aa, Homo sapiens
CVRSCYGSGNFYKICDFDYW

SEQ ID NO: 5204 - protein, 27 aa, Homo sapiens
CARDLLVCSSTSCYRGDSSSSYYFDYW

SEQ ID NO: 5205 - protein, 17 aa, Homo sapiens
CAREPVGDGVCCSFDYW

SEQ ID NO: 5206 - protein, 13 aa, Homo sapiens
CARGRLVTFFDYW

SEQ ID NO: 5207 - protein, 8 aa, Homo sapiens
CAGSSDYW

SEQ ID NO: 5208 - protein, 18 aa, Homo sapiens
CAKDLAADNAYRYYMDVW

SEQ ID NO: 5209 - protein, 12 aa, Homo sapiens
CYSLDSSGQPIF

SEQ ID NO: 5210 - protein, 21 aa, Homo sapiens
CAKAIGDYQKNLWFNYYMDVW

SEQ ID NO: 5211 - protein, 20 aa, Homo sapiens
CARGRLKGWLAGPKSKFDYW

SEQ ID NO: 5212 - protein, 15 aa, Homo sapiens
CAGSKMIFPMVLDYW

SEQ ID NO: 5213 - protein, 22 aa, Homo sapiens
CARGYSPLFYDDTGYYSYFDNW

SEQ ID NO: 5214 - protein, 17 aa, Homo sapiens
CARYYFVPGNAPYMDVW

SEQ ID NO: 5215 - protein, 16 aa, Homo sapiens
CAKDREWELLGLLDYW

SEQ ID NO: 5216 - protein, 21 aa, Homo sapiens
CARDYACISTSCSTDTKFDYW

SEQ ID NO: 5217 - protein, 13 aa, Homo sapiens
CARGRRPGYFQHW

SEQ ID NO: 5218 - protein, 20 aa, Homo sapiens
CARRAPYYYDSSGPYAFDIW

SEQ ID NO: 5219 - protein, 14 aa, Homo sapiens
CATERWELLWFDFW

SEQ ID NO: 5220 - protein, 21 aa, Homo sapiens
CARFKESATSEGYYFDYFDYW

SEQ ID NO: 5221 - protein, 19 aa, Homo sapiens
CAHVSTPLPDSSKYYFDYW

SEQ ID NO: 5222 - protein, 23 aa, Homo sapiens
CAREWRSSYCSGGSCFNNWFDPW

SEQ ID NO: 5223 - protein, 21 aa, Homo sapiens
CARVRSFNILTGYYFDAFDIW

SEQ ID NO: 5224 - protein, 14 aa, Homo sapiens
CARHFGSSSEFAYW

SEQ ID NO: 5225 - protein, 15 aa, Homo sapiens
CARGKTHPLGCFDYW

SEQ ID NO: 5226 - protein, 15 aa, Homo sapiens
CAREGPVTGDFVDYW

SEQ ID NO: 5227 - protein, 17 aa, Homo sapiens
CAREQLGVLSAAGTDYW

SEQ ID NO: 5228 - protein, 16 aa, Homo sapiens
CARDFCSGGSCYPDYW

SEQ ID NO: 5229 - protein, 15 aa, Homo sapiens
CARQDTYGLFYFDYW

SEQ ID NO: 5230 - protein, 17 aa, Homo sapiens
CARVVAARGTFGAFDIW

SEQ ID NO: 5231 - protein, 16 aa, Homo sapiens
CARLTAGVVVAAIDYW

SEQ ID NO: 5232 - protein, 17 aa, Homo sapiens
CATSQHREWLLDAFDIW

SEQ ID NO: 5233 - protein, 17 aa, Homo sapiens
CARGLAAAGTLNWFDPW

SEQ ID NO: 5234 - protein, 21 aa, Homo sapiens
CAVRGDRNTIFGVVPDVFDIW

SEQ ID NO: 5235 - protein, 14 aa, Homo sapiens
CGRYDTIRHASDYW

SEQ ID NO: 5236 - protein, 16 aa, Homo sapiens
CLLSYSGPNGIPRVVF

SEQ ID NO: 5237 - protein, 17 aa, Homo sapiens
CARHDSTGYFLGHLDYW

SEQ ID NO: 5238 - protein, 10 aa, Homo sapiens [sequence omitted]

SEQ ID NO: 5239 - protein, 18 aa, Homo sapiens [sequence omitted]

SEQ ID NO: 5240 - protein, 16 aa, Homo sapiens
CARDDHYYDSSGYDYW

SEQ ID NO: 5241 - protein, 20 aa, Homo sapiens
CASVAAAGPLHYYYFYMDVW

SEQ ID NO: 5242 - protein, 18 aa, Homo sapiens
CARAGRVRGVMKNAFDIW

SEQ ID NO: 5243 - protein, 23 aa, Homo sapiens
CARGYHYDSSGYYLYYYYYMDVW

SEQ ID NO: 5244 - protein, 16 aa, Homo sapiens
CAKDDRPDGRFEIDYW

SEQ ID NO: 5245 - protein, 22 aa, Homo sapiens
CARLNDYDFWSASLDGPDFDYW

SEQ ID NO: 5246 - protein, 18 aa, Homo sapiens
CARNCNGGSCYPAGLDYW

SEQ ID NO: 5247 - protein, 20 aa, Homo sapiens
CARVAITMIVVVKGDAFDIW

SEQ ID NO: 5248 - protein, 16 aa, Homo sapiens
CARHGVAVAGTLVDYW

SEQ ID NO: 5249 - protein, 12 aa, Homo sapiens
CASLEKGRGDYW

SEQ ID NO: 5250 - protein, 15 aa, Homo sapiens
CARTPRGYGFYFRHW

SEQ ID NO: 5251 - protein, 15 aa, Homo sapiens
CATAHHPYPCPFDPW

SEQ ID NO: 5252 - protein, 22 aa, Homo sapiens
CSRRSPRNCSGGTCYPRTFDKW

SEQ ID NO: 5253 - protein, 18 aa, Homo sapiens
CARDSHDSAASGWYFDLW

SEQ ID NO: 5254 - protein, 14 aa, Homo sapiens
CANEKAVTGRFDNW

SEQ ID NO: 5255 - protein, 16 aa, Homo sapiens
CARDGAAAAKGSCDYW

SEQ ID NO: 5256 - protein, 21 aa, Homo sapiens
CARDTHYYDNSGYYYPRFGYW

SEQ ID NO: 5257 - protein, 12 aa, Homo sapiens
CTSEWFDVFAIW

SEQ ID NO: 5258 - protein, 23 aa, Homo sapiens
CARDLRTRPVTWGQSANDAFDLW

SEQ ID NO: 5259 - protein, 17 aa, Homo sapiens
CARPAMYGGDSNGFDPW

SEQ ID NO: 5260 - protein, 18 aa, Homo sapiens
CARGRDDSGTYSTPFDFW

SEQ ID NO: 5261 - protein, 22 aa, Homo sapiens
CVKDRMIRSFTIALRPWYFEDW

SEQ ID NO: 5262 - protein, 12 aa, Homo sapiens [sequence omitted]

SEQ ID NO: 5263 - protein, 19 aa, Homo sapiens
CARRLRVALDYRNYYFDYW

SEQ ID NO: 5264 - protein, 17 aa, Homo sapiens
CAREAVGIQLWSPLDYW

SEQ ID NO: 5265 - protein, 19 aa, Homo sapiens
CARASYSVFGVAQANFDYW

SEQ ID NO: 5266 - protein, 12 aa, Homo sapiens [sequence omitted]

SEQ ID NO: 5267 - protein, 18 aa, Homo sapiens
CARQAGAALSRTYYFDYW

SEQ ID NO: 5268 - protein, 12 aa, Homo sapiens
CQEYHNWPFWTF

SEQ ID NO: 5269 - protein, 18 aa, Homo sapiens
CVRAQLMRHAWERLFDYW

SEQ ID NO: 5270 - protein, 21 aa, Homo sapiens
CARDGGCSGGSCYPFFWFDPW

SEQ ID NO: 5271 - protein, 15 aa, Homo sapiens
CARQINVPNDALDIW

SEQ ID NO: 5272 - protein, 20 aa, Homo sapiens
CARDAINSDIVVVPNWFDPW

SEQ ID NO: 5273 - protein, 19 aa, Homo sapiens
CARDARAVAGPSYWYFDLW

SEQ ID NO: 5274 - protein, 11 aa, Homo sapiens
CQRYNSVPFTF

SEQ ID NO: 5275 - protein, 23 aa, Homo sapiens
CARVYCSSDCSRPSHFHYYMDVW

SEQ ID NO: 5276 - protein, 12 aa, Homo sapiens
CVRDAYSILDYW

SEQ ID NO: 5277 - protein, 11 aa, Homo sapiens
CQQYHNWPGDF

SEQ ID NO: 5278 - protein, 16 aa, Homo sapiens
CARAITGSSGWYPDYW

SEQ ID NO: 5279 - protein, 12 aa, Homo sapiens
CQAYDSSLSAAF

SEQ ID NO: 5280 - protein, 18 aa, Homo sapiens
CAKDSRGDFWSDDYFDYW

SEQ ID NO: 5281 - protein, 15 aa, Homo sapiens
CVSDDYITLSHFNYW

SEQ ID NO: 5282 - protein, 22 aa, Homo sapiens
CASSSNYDFWSGYYSRNAFDIW

SEQ ID NO: 5283 - protein, 14 aa, Homo sapiens
CTRGPQLPQYFQHW

SEQ ID NO: 5284 - protein, 19 aa, Homo sapiens
CVKGGRILDFDWLITFDYW

SEQ ID NO: 5285 - protein, 12 aa, Homo sapiens
CQELNSFPRYTF

SEQ ID NO: 5286 - protein, 18 aa, Homo sapiens
CARQLELRPRAPYYFDYW

SEQ ID NO: 5287 - protein, 24 aa, Homo sapiens
CARVGGTYGGTYLSLVYYYYMDVW

SEQ ID NO: 5288 - protein, 16 aa, Homo sapiens
CARGQSISWPDAFDIW

SEQ ID NO: 5289 - protein, 15 aa, Homo sapiens
CARENPAAINWFDPW

SEQ ID NO: 5290 - protein, 21 aa, Homo sapiens
CARDPPYYYDSSGYYGWFDPW

SEQ ID NO: 5291 - protein, 20 aa, Homo sapiens
CAKSVLFVRYNYDVNWFDPW

SEQ ID NO: 5292 - protein, 21 aa, Homo sapiens
CARVGEEDDSSGYYSPQFDYW

SEQ ID NO: 5293 - protein, 21 aa, Homo sapiens
CARGERHYEFSTGYYDTLDYW

SEQ ID NO: 5294 - protein, 15 aa, Homo sapiens
CVQQMATIGEYIDYW

SEQ ID NO: 5295 - protein, 14 aa, Homo sapiens
CATSEYSTPLFDFW

SEQ ID NO: 5296 - protein, 17 aa, Homo sapiens
CAKGQLAVLGRLGFDSW

SEQ ID NO: 5297 - protein, 11 aa, Homo sapiens
CAREYWAPDYW

SEQ ID NO: 5298 - protein, 22 aa, Homo sapiens
CAHRETYGVLRYFRNSYYFDYW

SEQ ID NO: 5299 - protein, 16 aa, Homo sapiens
CARVLELGATPIFGYW

SEQ ID NO: 5300 - protein, 14 aa, Homo sapiens
CARFLVELREFDPW

SEQ ID NO: 5301 - protein, 15 aa, Homo sapiens
CARSQPWYSSNCDYW

SEQ ID NO: 5302 - protein, 12 aa, Homo sapiens
CVNFIAAAADYW

SEQ ID NO: 5303 - protein, 16 aa, Homo sapiens
CARVSMVRGIILFDYW

SEQ ID NO: 5304 - protein, 19 aa, Homo sapiens
CARDRRYFGSGRPDAFDIW

SEQ ID NO: 5305 - protein, 16 aa, Homo sapiens
CARGTYSSSDDAFDIW

SEQ ID NO: 5306 - protein, 15 aa, Homo sapiens
CAKLYNNSPYYFDSW

SEQ ID NO: 5307 - protein, 17 aa, Homo sapiens
CARHTSNLVRPYYFDYW

SEQ ID NO: 5308 - protein, 18 aa, Homo sapiens
CARVTPYNWNRGWYFDLW

SEQ ID NO: 5309 - protein, 21 aa, Homo sapiens
CARFAPPSSSWYAQRGAFDIW

SEQ ID NO: 5310 - protein, 16 aa, Homo sapiens
CAYRKIAGGSEGFDYW

SEQ ID NO: 5311 - protein, 12 aa, Homo sapiens
CVMDTSMYFDHW

SEQ ID NO: 5312 - protein, 24 aa, Homo sapiens
CARIQEDIVVVPAAPDYYYYMDVW

SEQ ID NO: 5313 - protein, 15 aa, Homo sapiens
CGAWDSSLSGGHYVF

SEQ ID NO: 5314 - protein, 16 aa, Homo sapiens
CARDRGAARIYYFDYW

SEQ ID NO: 5315 - protein, 18 aa, Homo sapiens
CAKEGRVGSSWYSLGDYW

SEQ ID NO: 5316 - protein, 20 aa, Homo sapiens
CAKDHFGSVTYFSLDAYDMW

SEQ ID NO: 5317 - protein, 18 aa, Homo sapiens
CAKKLAMGTFDYWYFDLW

SEQ ID NO: 5318 - protein, 11 aa, Homo sapiens
CQHLHSYPRSF

SEQ ID NO: 5319 - protein, 12 aa, Homo sapiens
CVRDNMGSFDHW

SEQ ID NO: 5320 - protein, 19 aa, Homo sapiens
CARAPYEVVVAATGYFDYW

SEQ ID NO: 5321 - protein, 14 aa, Homo sapiens
CARSTGGGGAFDIW

SEQ ID NO: 5322 - protein, 16 aa, Homo sapiens
CAREGSGWYRYYFDYW

SEQ ID NO: 5323 - protein, 15 aa, Homo sapiens
CARDSGSGRGWFDPW

SEQ ID NO: 5324 - protein, 12 aa, Homo sapiens
CQQRSSWRSISF

SEQ ID NO: 5325 - protein, 23 aa, Homo sapiens
CARAPYYYDSSGYYPSSWYFDLW

SEQ ID NO: 5326 - protein, 16 aa, Homo sapiens
CARPRRVNSWSDFDYW

SEQ ID NO: 5327 - protein, 16 aa, Homo sapiens
CARAPWNSKTDAFDIW

SEQ ID NO: 5328 - protein, 25 aa, Homo sapiens
CAKDDYLPAWGCSGGNCLSDFFDYW

SEQ ID NO: 5329 - protein, 22 aa, Homo sapiens
CAKNSSPYYYGSGSYYHYFDYW

SEQ ID NO: 5330 - protein, 15 aa, Homo sapiens
CTTKGMSVDHAFDFW

SEQ ID NO: 5331 - protein, 17 aa, Homo sapiens
CARDFAWLLAADWFDPW

SEQ ID NO: 5332 - protein, 21 aa, Homo sapiens
CAAESSIFGVVTPRRYAFDVW

SEQ ID NO: 5333 - protein, 17 aa, Homo sapiens
CARSSIKLELPIAGDYW

SEQ ID NO: 5334 - protein, 19 aa, Homo sapiens
CAIPNGGDSSSWSDAFDIW

SEQ ID NO: 5335 - protein, 20 aa, Homo sapiens
CARFRLHSSSSPSDWYFDLW

SEQ ID NO: 5336 - protein, 14 aa, Homo sapiens
CERDPRGTPPTDYW

SEQ ID NO: 5337 - protein, 14 aa, Homo sapiens
CQSYDSVQSASVVF

SEQ ID NO: 5338 - protein, 16 aa, Homo sapiens
CTKSRALAGNEGFDHW

SEQ ID NO: 5339 - protein, 20 aa, Homo sapiens
CAGQVYYDFWSGRHYYMDVW

SEQ ID NO: 5340 - protein, 17 aa, Homo sapiens
CVKDRGSYHYYYYMDVW

SEQ ID NO: 5341 - protein, 11 aa, Homo sapiens
CQRANTFPLTF

SEQ ID NO: 5342 - protein, 13 aa, Homo sapiens
CVRGRPRYYMDVW

SEQ ID NO: 5343 - protein, 12 aa, Homo sapiens
CQLYGNSPMTTF

SEQ ID NO: 5344 - protein, 13 aa, Homo sapiens
CARDPELGTYDYW

SEQ ID NO: 5345 - protein, 15 aa, Homo sapiens
CARDGDTGVRRMDYW

SEQ ID NO: 5346 - protein, 14 aa, Homo sapiens
CARQYQLLLPLDYW

SEQ ID NO: 5347 - protein, 14 aa, Homo sapiens
CQTSDSSGFYPELF

SEQ ID NO: 5348 - protein, 19 aa, Homo sapiens
CARVHDILTGYPIFGFDYW

SEQ ID NO: 5349 - protein, 18 aa, Homo sapiens
CARCDEYSRGLATGFDPW

SEQ ID NO: 5350 - protein, 18 aa, Homo sapiens
CARGYISASYIITYHDYW

SEQ ID NO: 5351 - protein, 14 aa, Homo sapiens
CARLGRNLSYFDLW

SEQ ID NO: 5352 - protein, 14 aa, Homo sapiens
CSSYTSTNTLAVVF

SEQ ID NO: 5353 - protein, 22 aa, Homo sapiens
CARDFPYYYDSSGYYFDAFDIW

SEQ ID NO: 5354 - protein, 14 aa, Homo sapiens
CAREVPLDDAFDIW

SEQ ID NO: 5355 - protein, 16 aa, Homo sapiens
CARTGDSPGYYAFDIW

SEQ ID NO: 5356 - protein, 13 aa, Homo sapiens [sequence omitted]

SEQ ID NO: 5357 - protein, 17 aa, Homo sapiens
CASIVTAMVRGRNFDYW

SEQ ID NO: 5358 - protein, 20 aa, Homo sapiens
CAKSYHGEQHLVWGNWFDPW

SEQ ID NO: 5359 - protein, 12 aa, Homo sapiens [sequence omitted]

SEQ ID NO: 5360 - protein, 20 aa, Homo sapiens
CAKAFYFDFWSGYYGPSDYW

SEQ ID NO: 5361 - protein, 20 aa, Homo sapiens
CARAPYYTFGPYYYYYMDVW

SEQ ID NO: 5362 - protein, 15 aa, Homo sapiens
CTTIAAAGTTPFDYW

SEQ ID NO: 5363 - protein, 13 aa, Homo sapiens
CAKAGSGWFTDYW

SEQ ID NO: 5364 - protein, 19 aa, Homo sapiens
CARRAAGRHYYYYYYMDVW

SEQ ID NO: 5365 - protein, 13 aa, Homo sapiens
CARDSSSRRGDYW

SEQ ID NO: 5366 - protein, 14 aa, Homo sapiens
CAREIGGGYGFDYW

SEQ ID NO: 5367 - protein, 13 aa, Homo sapiens
CQQYYSTPEALTF

SEQ ID NO: 5368 - protein, 19 aa, Homo sapiens
CARSHYDILTHKGDAFDIW

SEQ ID NO: 5369 - protein, 16 aa, Homo sapiens
CARRFDYDSNDYWGYW

SEQ ID NO: 5370 - protein, 19 aa, Homo sapiens
CARGPVFALVRQMTMFDFW

SEQ ID NO: 5371 - protein, 21 aa, Homo sapiens
CAKGAWSDYNLARSGTPFDYW

SEQ ID NO: 5372 - protein, 10 aa, Homo sapiens [sequence omitted]

SEQ ID NO: 5373 - protein, 16 aa, Homo sapiens
CAKGYSHGHKDGMDVW

SEQ ID NO: 5374 - protein, 21 aa, Homo sapiens
CAREGRRTSSGWVYYYGMDVW

SEQ ID NO: 5375 - protein, 19 aa, Homo sapiens
CARPTYDYDTRGYFPFDLW

SEQ ID NO: 5376 - protein, 16 aa, Homo sapiens
CATGPDYYDSSGFYYW

SEQ ID NO: 5377 - protein, 18 aa, Homo sapiens
CARGLGSSSWFRGWFDPW

SEQ ID NO: 5378 - protein, 13 aa, Homo sapiens
CQSADTSVSYWMF

SEQ ID NO: 5379 - protein, 16 aa, Homo sapiens
CARVQQWLDFGAFDIW

SEQ ID NO: 5380 - protein, 19 aa, Homo sapiens
CARVIAQWPGRDYWYFDLW

SEQ ID NO: 5381 - protein, 16 aa, Homo sapiens
CARWVVITATGAFDIW

SEQ ID NO: 5382 - protein, 19 aa, Homo sapiens
CAKYSRIFGVVNNYALDVW

SEQ ID NO: 5383 - protein, 17 aa, Homo sapiens
CARHRISYSSQSDFDYW

SEQ ID NO: 5384 - protein, 16 aa, Homo sapiens
CARKISVIGRSGFDHW

SEQ ID NO: 5385 - protein, 23 aa, Homo sapiens
CTKGPYCRSASCYAYYHYGMDVW

SEQ ID NO: 5386 - protein, 16 aa, Homo sapiens
CARDLAVAASDAFDIW

SEQ ID NO: 5387 - protein, 19 aa, Homo sapiens
CARERWYYGSGNYHPADYW

SEQ ID NO: 5388 - protein, 19 aa, Homo sapiens
CARGHISFFGVVTGAFDLW

SEQ ID NO: 5389 - protein, 20 aa, Homo sapiens
CARVGSIAAAGPYYYGMDVW

SEQ ID NO: 5390 - protein, 14 aa, Homo sapiens
CARPYVGGKAFDMW

SEQ ID NO: 5391 - protein, 18 aa, Homo sapiens
CARTNFFGSGSYGQLDYW

SEQ ID NO: 5392 - protein, 14 aa, Homo sapiens
CARQPSDWAAFDVW

SEQ ID NO: 5393 - protein, 19 aa, Homo sapiens
CAHRQARYGDSRINLFDPW

SEQ ID NO: 5394 - protein, 18 aa, Homo sapiens
CARTPDSSGYYDHQIDYW

SEQ ID NO: 5395 - protein, 18 aa, Homo sapiens
CARDWGYGDYGLHYFDYW

SEQ ID NO: 5396 - protein, 13 aa, Homo sapiens
CARHVGTAMLDYW

SEQ ID NO: 5397 - protein, 15 aa, Homo sapiens
CAKVPSPYTWYFDYW

SEQ ID NO: 5398 - protein, 19 aa, Homo sapiens
CARDRYYYDRSGSTAGDYW

SEQ ID NO: 5399 - protein, 21 aa, Homo sapiens
CAKDAPPGTGYNNDAWYFDLW

SEQ ID NO: 5400 - protein, 12 aa, Homo sapiens
CARSGYSLFDYW

SEQ ID NO: 5401 - protein, 16 aa, Homo sapiens
CASAIFGVVDDAFDVW

SEQ ID NO: 5402 - protein, 15 aa, Homo sapiens
CAREKTLDISAFDLW

SEQ ID NO: 5403 - protein, 16 aa, Homo sapiens
CARDRRTTGTYIDDYW

SEQ ID NO: 5404 - protein, 17 aa, Homo sapiens
CARLGGTTAGYNWFDPW

SEQ ID NO: 5405 - protein, 11 aa, Homo sapiens
CHQYNNWLRAF

SEQ ID NO: 5406 - protein, 23 aa, Homo sapiens
CARRDGYSMSSEGYSYYYPMDVW

SEQ ID NO: 5407 - protein, 11 aa, Homo sapiens
CQQTNSPPYSF

SEQ ID NO: 5408 - protein, 14 aa, Homo sapiens
CVRDDSSLPGFIYW

SEQ ID NO: 5409 - protein, 21 aa, Homo sapiens
CAKANMFFWFGQFKKDAFDLW

SEQ ID NO: 5410 - protein, 16 aa, Homo sapiens
CAKETEDYTSSYFDYW

SEQ ID NO: 5411 - protein, 12 aa, Homo sapiens
CARDDSGWFDPW

SEQ ID NO: 5412 - protein, 15 aa, Homo sapiens
CATYFRGAWYGHDYW

SEQ ID NO: 5413 - protein, 13 aa, Homo sapiens
CQQYDNWLRGLTF

SEQ ID NO: 5414 - protein, 16 aa, Homo sapiens
CARGLNRFGGNPFGYW

SEQ ID NO: 5415 - protein, 22 aa, Homo sapiens
CARSSSRGGASCYAACNWFDPW

SEQ ID NO: 5416 - protein, 12 aa, Homo sapiens
CLQTYSTPHCTF

SEQ ID NO: 5417 - protein, 9 aa, Homo sapiens
CQQFNSYLF

SEQ ID NO: 5418 - protein, 12 aa, Homo sapiens [sequence omitted]

SEQ ID NO: 5419 - protein, 13 aa, Homo sapiens
CQSGDSRGPSVVF

SEQ ID NO: 5420 - protein, 12 aa, Homo sapiens
CARASDWGYDYW

SEQ ID NO: 5421 - protein, 13 aa, Homo sapiens
CNSRDSRSNHQVF

SEQ ID NO: 5422 - protein, 19 aa, Homo sapiens
CARCAIAAAATTGGCFDPW

SEQ ID NO: 5423 - protein, 13 aa, Homo sapiens
CQSATTSGPYRIF

SEQ ID NO: 5424 - protein, 19 aa, Homo sapiens
CATLIDSSVVVFPTYFDYW

SEQ ID NO: 5425 - protein, 18 aa, Homo sapiens
CAKDAIAANSVFDWFDSW

SEQ ID NO: 5426 - protein, 17 aa, Homo sapiens
CARDRRCGSCGDYEGYW

SEQ ID NO: 5427 - protein, 12 aa, Homo sapiens
CASWGGNSFDYW

SEQ ID NO: 5428 - protein, 16 aa, Homo sapiens
CAAQDDGYTGYDLDYW

SEQ ID NO: 5429 - protein, 20 aa, Homo sapiens
CARPADGGTGIYYYYGMDVW

SEQ ID NO: 5430 - protein, 19 aa, Homo sapiens
CAKFRGVFDFWSSRAMDVW

SEQ ID NO: 5431 - protein, 11 aa, Homo sapiens [sequence omitted]

SEQ ID NO: 5432 - protein, 13 aa, Homo sapiens
CAKDINNWNFDNW

SEQ ID NO: 5433 - protein, 21 aa, Homo sapiens
CARDLLGEYTGYDLQGGFDYW

SEQ ID NO: 5434 - protein, 21 aa, Homo sapiens
CARSIAVAGITPKKSGWFDPW

SEQ ID NO: 5435 - protein, 14 aa, Homo sapiens
CARDVSSPDYVAYW

SEQ ID NO: 5436 - protein, 16 aa, Homo sapiens
CARGPGLVTSNWFDPW

SEQ ID NO: 5437 - protein, 14 aa, Homo sapiens
CAREIIFYYAMDVW

SEQ ID NO: 5438 - protein, 20 aa, Homo sapiens
CVRHFSSIWTLSGYYYLDYW

SEQ ID NO: 5439 - protein, 11 aa, Homo sapiens
CQPYNVYSGTF

SEQ ID NO: 5440 - protein, 12 aa, Homo sapiens
CAKDTAMVPDYW

SEQ ID NO: 5441 - protein, 14 aa, Homo sapiens
CARSRDGYNYGDYW

SEQ ID NO: 5442 - protein, 14 aa, Homo sapiens
CARDLHSADYFYYW

SEQ ID NO: 5443 - protein, 22 aa, Homo sapiens
CSRGLIPETDLASRLFRYFDSW

SEQ ID NO: 5444 - protein, 13 aa, Homo sapiens
CASGSYPYYFDYW

SEQ ID NO: 5445 - protein, 16 aa, Homo sapiens
CARIIAAAGPHNLDYW

SEQ ID NO: 5446 - protein, 12 aa, Homo sapiens
CQQYSSSAAFTF

SEQ ID NO: 5447 - protein, 15 aa, Homo sapiens
CGTSVHGSGYAFDHW

SEQ ID NO: 5448 - protein, 11 aa, Homo sapiens
CMQGTRWPNSF

SEQ ID NO: 5449 - protein, 19 aa, Homo sapiens
CARGRPVTTFYYYYGMDVW

SEQ ID NO: 5450 - protein, 17 aa, Homo sapiens
CARLDTDSNKWFWFDPW

SEQ ID NO: 5451 - protein, 15 aa, Homo sapiens
CARGLVLTGHYFDNW

SEQ ID NO: 5452 - protein, 12 aa, Homo sapiens
CQQYGSLFSITF

SEQ ID NO: 5453 - protein, 19 aa, Homo sapiens
CAKDLHTSGWFPSASFDFW

SEQ ID NO: 5454 - protein, 15 aa, Homo sapiens
CARDMIRGDGEFDYW

SEQ ID NO: 5455 - protein, 13 aa, Homo sapiens [sequence omitted]

SEQ ID NO: 5456 - protein, 19 aa, Homo sapiens
CARAAHSRPDYYYYDMDVW

SEQ ID NO: 5457 - protein, 21 aa, Homo sapiens
CARQRLLRFLGGMTNDAFDVW

SEQ ID NO: 5458 - protein, 14 aa, Homo sapiens
CARDTSVAGRFHYW

SEQ ID NO: 5459 - protein, 18 aa, Homo sapiens
CTSASSTLHYGGNSGDYW

SEQ ID NO: 5460 - protein, 17 aa, Homo sapiens
CAKDKISGDGYWVFDSW

SEQ ID NO: 5461 - protein, 12 aa, Homo sapiens
CARRRGAVFDPW

SEQ ID NO: 5462 - protein, 20 aa, Homo sapiens
CARYTSHCTPTTCWMWFDPW

SEQ ID NO: 5463 - protein, 16 aa, Homo sapiens
CARELPYGGHYGSDYW

SEQ ID NO: 5464 - protein, 17 aa, Homo sapiens
CARLRYYDGTTYFPDYW

SEQ ID NO: 5465 - protein, 17 aa, Homo sapiens
CAKDFQGDYYYYGMDVW

SEQ ID NO: 5466 - protein, 13 aa, Homo sapiens
CQSYDRSLNIWVF

SEQ ID NO: 5467 - protein, 13 aa, Homo sapiens
CASNRPGTTQDYW

SEQ ID NO: 5468 - protein, 20 aa, Homo sapiens
CARDKVYDDFTGYSYYFDHW

SEQ ID NO: 5469 - protein, 18 aa, Homo sapiens
CARRPPWSTVYQSGFDPW

SEQ ID NO: 5470 - protein, 15 aa, Homo sapiens
CHSRDSSGNHRGFVF

SEQ ID NO: 5471 - protein, 19 aa, Homo sapiens
CARDSSYYDILTGSYPSYW

SEQ ID NO: 5472 - protein, 18 aa, Homo sapiens
CAKEVRGYSYGLGLFDYW

SEQ ID NO: 5473 - protein, 12 aa, Homo sapiens
CARMGFRSFSYW

SEQ ID NO: 5474 - protein, 12 aa, Homo sapiens
CAIEGFVVADYW

SEQ ID NO: 5475 - protein, 13 aa, Homo sapiens [sequence omitted]

SEQ ID NO: 5476 - protein, 15 aa, Homo sapiens
CARSLSLGLRPGDYW

SEQ ID NO: 5477 - protein, 12 aa, Homo sapiens
CQLYGGSPLWTF

SEQ ID NO: 5478 - protein, 19 aa, Homo sapiens
CASSYYYDSSGYFAPFDYW

SEQ ID NO: 5479 - protein, 16 aa, Homo sapiens
CARDGDYTGNSDFDYW

SEQ ID NO: 5480 - protein, 14 aa, Homo sapiens
CSSSASSSTLDVVF

SEQ ID NO: 5481 - protein, 16 aa, Homo sapiens
CAREGPHQYSSEFDYW

SEQ ID NO: 5482 - protein, 19 aa, Homo sapiens
CAKDQSFFALSGKRSLDYW

SEQ ID NO: 5483 - protein, 15 aa, Homo sapiens
CARRTIGSSNKFDPW

SEQ ID NO: 5484 - protein, 19 aa, Homo sapiens
CARTYCTGGSCYFRAFDYW

SEQ ID NO: 5485 - protein, 15 aa, Homo sapiens
CARENPLNKNAFDFW

SEQ ID NO: 5486 - protein, 30 aa, Homo sapiens
CAKGRPETYYDILTGYQLTSNFLGSPGDYW

SEQ ID NO: 5487 - protein, 19 aa, Homo sapiens
CARVFYDSNGVDYNFFDNW

SEQ ID NO: 5488 - protein, 16 aa, Homo sapiens
CARSIGSSTSCVFDYW

SEQ ID NO: 5489 - protein, 22 aa, Homo sapiens
CATTTGEYYDFWSGYAYYFDYW

SEQ ID NO: 5490 - protein, 14 aa, Homo sapiens
CARDHDFWSALDYW

SEQ ID NO: 5491 - protein, 22 aa, Homo sapiens
CTTGGYMTTVTTAYYYYGMDVW

SEQ ID NO: 5492 - protein, 18 aa, Homo sapiens
CARDPGDTGNEGDGMDVW

SEQ ID NO: 5493 - protein, 15 aa, Homo sapiens
CATDAGEYGDYLRYW

SEQ ID NO: 5494 - protein, 18 aa, Homo sapiens
CARGNPKQWLVTSAFDIW

SEQ ID NO: 5495 - protein, 20 aa, Homo sapiens
CARRGNYEFWSGYVAGDDYW

SEQ ID NO: 5496 - protein, 21 aa, Homo sapiens
CTSRCSGGNCYSDTYFPFDYW

SEQ ID NO: 5497 - protein, 17 aa, Homo sapiens
CAKFGLPGFGFPWFDPW

SEQ ID NO: 5498 - protein, 15 aa, Homo sapiens
CARELAVSATVGDYW

SEQ ID NO: 5499 - protein, 21 aa, Homo sapiens
CARKAPYYYGSGGHSNYCDYW

SEQ ID NO: 5500 - protein, 12 aa, Homo sapiens
CSSYADNNNVVF

SEQ ID NO: 5501 - protein, 20 aa, Homo sapiens
CARDVFYYDGGNWNWDFDLW

SEQ ID NO: 5502 - protein, 19 aa, Homo sapiens
CAKDTYDSSGYDWDVFDIW

SEQ ID NO: 5503 - protein, 18 aa, Homo sapiens
CARDVGSTTSESGYFDYW

SEQ ID NO: 5504 - protein, 10 aa, Homo sapiens
CGSQRYFALW

SEQ ID NO: 5505 - protein, 22 aa, Homo sapiens
CARNDILTGYYTGLRDNWFDPW

SEQ ID NO: 5506 - protein, 14 aa, Homo sapiens
CARIMAVAGTIDYW

SEQ ID NO: 5507 - protein, 13 aa, Homo sapiens
CWPTAPNDAFDMW

SEQ ID NO: 5508 - protein, 18 aa, Homo sapiens
CQVWDRSSDHSDSDHPVF

SEQ ID NO: 5509 - protein, 19 aa, Homo sapiens
CARINTDRGGFSRRPIDYW

SEQ ID NO: 5510 - protein, 23 aa, Homo sapiens
CARGYYYDILSGSKYYHYAMDVW

SEQ ID NO: 5511 - protein, 20 aa, Homo sapiens
CAGFEYSSSSGAFSYYFDYW

SEQ ID NO: 5512 - protein, 12 aa, Homo sapiens
CQQSRSFPPITF

SEQ ID NO: 5513 - protein, 16 aa, Homo sapiens
CAREVWSGYYAVFDYW

SEQ ID NO: 5514 - protein, 22 aa, Homo sapiens
CARFVGSGTYDSTGSDWYFDLW

SEQ ID NO: 5515 - protein, 17 aa, Homo sapiens
CARIVSSPGGYFRFDQW

SEQ ID NO: 5516 - protein, 24 aa, Homo sapiens
CSRDLNWGSRGASHEFQYYAMDVW

SEQ ID NO: 5517 - protein, 19 aa, Homo sapiens
CARHYGTGNYHYYYGLDVW

SEQ ID NO: 5518 - protein, 26 aa, Homo sapiens
CARDNYYYDSSGYYYGYYYYYGMDVW

SEQ ID NO: 5519 - protein, 11 aa, Homo sapiens [sequence omitted]

SEQ ID NO: 5520 - protein, 16 aa, Homo sapiens
CAKEGVGPTGKIFDYW

SEQ ID NO: 5521 - protein, 23 aa, Homo sapiens
CAKDLRQAEIVVVPAASYRFDPW

SEQ ID NO: 5522 - protein, 15 aa, Homo sapiens
CARENTLSSTGFDIW

SEQ ID NO: 5523 - protein, 20 aa, Homo sapiens
CARDPNEPHYYGSENWFDPW

SEQ ID NO: 5524 - protein, 20 aa, Homo sapiens
CVRWPYCSTGTCYSAMLDYW

SEQ ID NO: 5525 - protein, 15 aa, Homo sapiens
CAKDSSRRPIGFDLW

SEQ ID NO: 5526 - protein, 14 aa, Homo sapiens
CTHDSSGFYSFHYW

SEQ ID NO: 5527 - protein, 19 aa, Homo sapiens
CARVTKLTSVEGVDWFDTW

SEQ ID NO: 5528 - protein, 25 aa, Homo sapiens
CANSVTNDDFWGGYYRYFYYGMDVW

SEQ ID NO: 5529 - protein, 11 aa, Homo sapiens
CHQSDALPYTF

SEQ ID NO: 5530 - protein, 19 aa, Homo sapiens
CAKLPWELLRGLGGYFDYW

SEQ ID NO: 5531 - protein, 16 aa, Homo sapiens
CAKESYWKPTDYFDSW

SEQ ID NO: 5532 - protein, 11 aa, Homo sapiens
CHVWDSRTAVF

SEQ ID NO: 5533 - protein, 14 aa, Homo sapiens
CAKDHLPGTFFDFW

SEQ ID NO: 5534 - protein, 18 aa, Homo sapiens
CVREGIDCSDGMCPFDYW

SEQ ID NO: 5535 - protein, 15 aa, Homo sapiens
CAARPGDHYGPLDYW

SEQ ID NO: 5536 - protein, 18 aa, Homo sapiens
CAKEATDSKTRIDWFDPW

SEQ ID NO: 5537 - protein, 22 aa, Homo sapiens
CASNFRKYCSGGSCYSPAFDIW

SEQ ID NO: 5538 - protein, 15 aa, Homo sapiens
CARGRVFSGHFFDPW

SEQ ID NO: 5539 - protein, 14 aa, Homo sapiens
CARDKLLYHAMDVW

SEQ ID NO: 5540 - protein, 18 aa, Homo sapiens
CARQNLVSSTTEDWFDPW

SEQ ID NO: 5541 - protein, 24 aa, Homo sapiens
CTTDRSHYYYDSSGYYPRDAFDIW

SEQ ID NO: 5542 - protein, 10 aa, Homo sapiens
CQQYGSTRNF

SEQ ID NO: 5543 - protein, 20 aa, Homo sapiens
CARVHSYDRVWGNYRHFDYW

SEQ ID NO: 5544 - protein, 22 aa, Homo sapiens
CAREWVRVAVPGAISNNWFDPW

SEQ ID NO: 5545 - protein, 17 aa, Homo sapiens
CARDRNYYGSGERFDPW

SEQ ID NO: 5546 - protein, 17 aa, Homo sapiens
CAKDWLSMTTVTYFDNW

SEQ ID NO: 5547 - protein, 16 aa, Homo sapiens
CARQGIAARRWWFDPW

SEQ ID NO: 5548 - protein, 14 aa, Homo sapiens
CARDISRGDAFDIW

SEQ ID NO: 5549 - protein, 16 aa, Homo sapiens
CAHSHRSGWIGHFDYW

SEQ ID NO: 5550 - protein, 14 aa, Homo sapiens
CARESGNSGTLDYW

SEQ ID NO: 5551 - protein, 22 aa, Homo sapiens
CVRGPRKSCMTPNCYPWAFDVW

SEQ ID NO: 5552 - protein, 16 aa, Homo sapiens
CARGHVTMIPSLFDYW

SEQ ID NO: 5553 - protein, 11 aa, Homo sapiens
CQKYDSALVTF

SEQ ID NO: 5554 - protein, 11 aa, Homo sapiens
CARLFGVDDYW

SEQ ID NO: 5555 - protein, 17 aa, Homo sapiens
CARDFSSRWYWGYSDYW

SEQ ID NO: 5556 - protein, 21 aa, Homo sapiens
CAKVSGCSGRNCFFRWWFDPW

SEQ ID NO: 5557 - protein, 14 aa, Homo sapiens
CAKIKTGGASFDYW

SEQ ID NO: 5558 - protein, 17 aa, Homo sapiens
CARSLEWLYPYYGMDVW

SEQ ID NO: 5559 - protein, 16 aa, Homo sapiens
CARDRRPIRGGIIDYW

SEQ ID NO: 5560 - protein, 19 aa, Homo sapiens
CARISYDYVRGSFRYFDYW

SEQ ID NO: 5561 - protein, 14 aa, Homo sapiens
CCSYAGSSTRPWVF

SEQ ID NO: 5562 - protein, 14 aa, Homo sapiens
CQSYDNSLGGWKLF

SEQ ID NO: 5563 - protein, 15 aa, Homo sapiens
CARGPPSGARGGDYW

SEQ ID NO: 5564 - protein, 12 aa, Homo sapiens
CQQSYNTRRYTF

SEQ ID NO: 5565 - protein, 17 aa, Homo sapiens
CAKVRREDYNYDYFDYW

SEQ ID NO: 5566 - protein, 20 aa, Homo sapiens
CVRDLGHCPGGNCYPYFGYW

SEQ ID NO: 5567 - protein, 17 aa, Homo sapiens
CAREDSGNIDKHGIDYW

SEQ ID NO: 5568 - protein, 13 aa, Homo sapiens
CARFFNGGGCDYW

SEQ ID NO: 5569 - protein, 16 aa, Homo sapiens
CAKVRFSSGWPDIDYW

SEQ ID NO: 5570 - protein, 13 aa, Homo sapiens
CARLGWELPFDYW

SEQ ID NO: 5571 - protein, 12 aa, Homo sapiens
CFTDDSGLPDYW

SEQ ID NO: 5572 - protein, 20 aa, Homo sapiens
CARDSFRVAVAGTTGWFDSW

SEQ ID NO: 5573 - protein, 15 aa, Homo sapiens
CARDQHQQIEYFQHW

SEQ ID NO: 5574 - protein, 12 aa, Homo sapiens
CGLYMGSGIYVF

SEQ ID NO: 5575 - protein, 16 aa, Homo sapiens
CALVSTVTTTFYFASW

SEQ ID NO: 5576 - protein, 18 aa, Homo sapiens
CARASNSLLAKDDWFDPW

SEQ ID NO: 5577 - protein, 17 aa, Homo sapiens
CARGYDCSGGSCYPDYW

SEQ ID NO: 5578 - protein, 15 aa, Homo sapiens
CARGGDSGVLWGDYW

SEQ ID NO: 5579 - protein, 17 aa, Homo sapiens
CARVARSSLELLRFDPW

SEQ ID NO: 5580 - protein, 11 aa, Homo sapiens [sequence omitted]

SEQ ID NO: 5581 - protein, 12 aa, Homo sapiens
CQQYDDVPQYVF

SEQ ID NO: 5582 - protein, 20 aa, Homo sapiens
CARGRDIVVEPSDRDAFDIW

SEQ ID NO: 5583 - protein, 16 aa, Homo sapiens
CAREEYDSSGSSFDYW

SEQ ID NO: 5584 - protein, 13 aa, Homo sapiens
CARGKAPDGMDVW

SEQ ID NO: 5585 - protein, 24 aa, Homo sapiens
CAKDRPDYYDSSGHYSPADSFDIW

SEQ ID NO: 5586 - protein, 16 aa, Homo sapiens
CARDRGIDYGDQFDYW

SEQ ID NO: 5587 - protein, 15 aa, Homo sapiens
CAKEGPFAVTTLDYW

SEQ ID NO: 5588 - protein, 24 aa, Homo sapiens
CARGYCSGGRCPVSIDYYYGMDVW

SEQ ID NO: 5589 - protein, 13 aa, Homo sapiens
CARVNAATDLDYW

SEQ ID NO: 5590 - protein, 15 aa, Homo sapiens
CAKKFSGWSKEFDYW

SEQ ID NO: 5591 - protein, 12 aa, Homo sapiens
CVRDGGLTGDYW

SEQ ID NO: 5592 - protein, 11 aa, Homo sapiens
CQQYRSAPDRF

SEQ ID NO: 5593 - protein, 22 aa, Homo sapiens
CAKGAQLNIETGDYYYYGMDVW

SEQ ID NO: 5594 - protein, 16 aa, Homo sapiens
CAHRLPVAGSYYFDYW

SEQ ID NO: 5595 - protein, 20 aa, Homo sapiens
CARGYCGGDCYWGSDAFDWW

SEQ ID NO: 5596 - protein, 15 aa, Homo sapiens
CARHNMAYRLGNDYW

SEQ ID NO: 5597 - protein, 25 aa, Homo sapiens
CARVNPTMVMMSPTDFKRSNYFDSW

SEQ ID NO: 5598 - protein, 23 aa, Homo sapiens
CARMMIPPIAMAGTPATMWLDPW

SEQ ID NO: 5599 - protein, 13 aa, Homo sapiens
CAKLSRMTTVDYW

SEQ ID NO: 5600 - protein, 20 aa, Homo sapiens
CVRGNSRYYDSTGYFPFDYW

SEQ ID NO: 5601 - protein, 14 aa, Homo sapiens
CNSRDSSDDHLEVF

SEQ ID NO: 5602 - protein, 26 aa, Homo sapiens
CARDRVEYDLWSGPWRNYYYHGMDVW

SEQ ID NO: 5603 - protein, 16 aa, Homo sapiens
CQQYNNYSPVYSPGTF

SEQ ID NO: 5604 - protein, 19 aa, Homo sapiens
CARHAVLRRPYYYFAMDVW

SEQ ID NO: 5605 - protein, 16 aa, Homo sapiens
CARHSGSGWYSPFDYW

SEQ ID NO: 5606 - protein, 12 aa, Homo sapiens
CETWDNNIQVVF

SEQ ID NO: 5607 - protein, 16 aa, Homo sapiens
CARGGYVWGSYRFDDW

SEQ ID NO: 5608 - protein, 23 aa, Homo sapiens
CAKDLRYSSRWTGARYYYGMDVW

SEQ ID NO: 5609 - protein, 16 aa, Homo sapiens
CARLRRVVINNWFDLW

SEQ ID NO: 5610 - protein, 17 aa, Homo sapiens
CARASSSGGYYYAMDVW

SEQ ID NO: 5611 - protein, 15 aa, Homo sapiens
CARRVVVRPYYFDYW

SEQ ID NO: 5612 - protein, 24 aa, Homo sapiens
CARGRRPLWDHSSSWYRYNYLDSW

SEQ ID NO: 5613 - protein, 27 aa, Homo sapiens
CARAVLAKYYDYVWGSYRHSERDFDYW

SEQ ID NO: 5614 - protein, 13 aa, Homo sapiens [sequence omitted]

SEQ ID NO: 5615 - protein, 19 aa, Homo sapiens
CAKDRGPYSSGYPDAFDIW

SEQ ID NO: 5616 - protein, 15 aa, Homo sapiens
CARDRWSTSCLFDYW

SEQ ID NO: 5617 - protein, 17 aa, Homo sapiens
CARRRLVYFGEAGPDYW

SEQ ID NO: 5618 - protein, 13 aa, Homo sapiens
CHSRDSSGHHLLF

SEQ ID NO: 5619 - protein, 24 aa, Homo sapiens
CAKDIIPSKPQRGIQLWFNNFDYW

SEQ ID NO: 5620 - protein, 17 aa, Homo sapiens
CAKSPPQTALRAAFDIW

SEQ ID NO: 5621 - protein, 13 aa, Homo sapiens
CARDAVALALDYW

SEQ ID NO: 5622 - protein, 21 aa, Homo sapiens
CATAPIAGYYGSGSYSGFDNW

SEQ ID NO: 5623 - protein, 24 aa, Homo sapiens
CARDKPDSITIFGVVTSHYALDVW

SEQ ID NO: 5624 - protein, 24 aa, Homo sapiens
CARMPATTIFGVIIPGKRNWFDSW

SEQ ID NO: 5625 - protein, 18 aa, Homo sapiens
CARYCSGANCYGTLFGYW

SEQ ID NO: 5626 - protein, 18 aa, Homo sapiens
CAKGRRGIPNGGNGIDSW

SEQ ID NO: 5627 - protein, 13 aa, Homo sapiens
CVGQDTYGTFDYW

SEQ ID NO: 5628 - protein, 20 aa, Homo sapiens
CAKDVCSGGGCYYQYGMDVW

SEQ ID NO: 5629 - protein, 11 aa, Homo sapiens
CQHFNTYPFNF

SEQ ID NO: 5630 - protein, 23 aa, Homo sapiens
CARGKSIMITFGGVMETYYFDYW

SEQ ID NO: 5631 - protein, 15 aa, Homo sapiens
CAKDYRQWPGSFDYW

SEQ ID NO: 5632 - protein, 21 aa, Homo sapiens
CARDLSMIRGIFPYYYGMDVW

SEQ ID NO: 5633 - protein, 25 aa, Homo sapiens
CSKLEGGHNYGDRGSYWGDNWFDPW

SEQ ID NO: 5634 - protein, 20 aa, Homo sapiens
CARVHHIVVLTAILGWLDPW

SEQ ID NO: 5635 - protein, 23 aa, Homo sapiens
CARSRRSKRRITTMATSDWFDPW

SEQ ID NO: 5636 - protein, 16 aa, Homo sapiens
CAREAYSTGYNWFDPW

SEQ ID NO: 5637 - protein, 17 aa, Homo sapiens
CARDPMPGSSWPRFDPW

SEQ ID NO: 5638 - protein, 15 aa, Homo sapiens
CATSGYSPDGYFDPW

SEQ ID NO: 5639 - protein, 15 aa, Homo sapiens
CAKDHFSGNWYFDLW

SEQ ID NO: 5640 - protein, 12 aa, Homo sapiens
CQPYNNWPQYTF

SEQ ID NO: 5641 - protein, 18 aa, Homo sapiens
CARDAGYSSSWYGGFDPW

SEQ ID NO: 5642 - protein, 13 aa, Homo sapiens
CAHVIAERAFEYW

SEQ ID NO: 5643 - protein, 16 aa, Homo sapiens
CAREIYGGNSRPFDYW

SEQ ID NO: 5644 - protein, 19 aa, Homo sapiens
CARDPFRYYDSSGYQFDYW

SEQ ID NO: 5645 - protein, 16 aa, Homo sapiens
CAKGRFPAAAIWIDSW

SEQ ID NO: 5646 - protein, 21 aa, Homo sapiens
CARQRVDTTLAPYYFYAMDVW

SEQ ID NO: 5647 - protein, 17 aa, Homo sapiens
CARDTSRRDGYNFFDYW

SEQ ID NO: 5648 - protein, 22 aa, Homo sapiens
CARGAKLDHGSGDYYYYGMDVW

SEQ ID NO: 5649 - protein, 11 aa, Homo sapiens
CYSAIDNSQVF

SEQ ID NO: 5650 - protein, 16 aa, Homo sapiens
CARSDFESLTGTLDYW

SEQ ID NO: 5651 - protein, 12 aa, Homo sapiens
CQQYYNAPQLSF

SEQ ID NO: 5652 - protein, 19 aa, Homo sapiens
CARAPIGHCDGGSCYFSYW

SEQ ID NO: 5653 - protein, 19 aa, Homo sapiens
CARRCMGRDGYNSEDFDYW

SEQ ID NO: 5654 - protein, 11 aa, Homo sapiens [sequence omitted]

SEQ ID NO: 5655 - protein, 15 aa, Homo sapiens
CAKTVGGASDAFDVW

SEQ ID NO: 5656 - protein, 19 aa, Homo sapiens
CARSPRPLARVPSWYFDYW

SEQ ID NO: 5657 - protein, 13 aa, Homo sapiens
CTTDSTLRYFDAW

SEQ ID NO: 5658 - protein, 21 aa, Homo sapiens
CAREGLQIRGIVTHYYALDVW

SEQ ID NO: 5659 - protein, 17 aa, Homo sapiens
CARRLTTLDRAKQFDYW

SEQ ID NO: 5660 - protein, 16 aa, Homo sapiens
CARTYGSNPYFAMDVW

SEQ ID NO: 5661 - protein, 17 aa, Homo sapiens
CARVNNPFYYYYAMDVW

SEQ ID NO: 5662 - protein, 19 aa, Homo sapiens
CARGTGDGLTGYLYYFDYW

SEQ ID NO: 5663 - protein, 16 aa, Homo sapiens
CARYVPNSDDYGFDYW

SEQ ID NO: 5664 - protein, 17 aa, Homo sapiens
CAHRKVTVTVGTYFDNW

SEQ ID NO: 5665 - protein, 17 aa, Homo sapiens
CARVGSYDSAGYYFTHW

SEQ ID NO: 5666 - protein, 18 aa, Homo sapiens
CARVNYDFWSGYDGMDVW

SEQ ID NO: 5667 - protein, 15 aa, Homo sapiens
CTTDGGESRPEFDHW

SEQ ID NO: 5668 - protein, 18 aa, Homo sapiens
CAKGTIWSGLLRGSFDSW

SEQ ID NO: 5669 - protein, 15 aa, Homo sapiens
CARGLGYDDDGFDFW

SEQ ID NO: 5670 - protein, 15 aa, Homo sapiens
CARYKTPDINSFDIW

SEQ ID NO: 5671 - protein, 16 aa, Homo sapiens
CARQKDSSGYYRFDPW

SEQ ID NO: 5672 - protein, 22 aa, Homo sapiens
CARDRSDYDNIWGTYRHTPDYW

SEQ ID NO: 5673 - protein, 17 aa, Homo sapiens
CARRQTSTIRSDAFEAW

SEQ ID NO: 5674 - protein, 16 aa, Homo sapiens
CAREREFGINYHFDFW

SEQ ID NO: 5675 - protein, 21 aa, Homo sapiens
CARMVGQYCSSTSCYNYFDYW

SEQ ID NO: 5676 - protein, 13 aa, Homo sapiens
CLQHSCFPPMYTF

SEQ ID NO: 5677 - protein, 16 aa, Homo sapiens
CARGLGYYSKWGPDYW

SEQ ID NO: 5678 - protein, 15 aa, Homo sapiens
CAREVYSSHCYFDYW

SEQ ID NO: 5679 - protein, 16 aa, Homo sapiens
CAREGYSSDWYGPDYW

SEQ ID NO: 5680 - protein, 17 aa, Homo sapiens
CAKKKQRFSSSWTFDYW

SEQ ID NO: 5681 - protein, 16 aa, Homo sapiens
CARIPSLTTDLYIDYW

SEQ ID NO: 5682 - protein, 20 aa, Homo sapiens
CARDPAQYGDYGYNNAFDIW

SEQ ID NO: 5683 - protein, 17 aa, Homo sapiens
CATELDASGWYDLFDYW

SEQ ID NO: 5684 - protein, 15 aa, Homo sapiens
CARLSGYYDAELDYW

SEQ ID NO: 5685 - protein, 16 aa, Homo sapiens
CARRLSRGWYDWFDPW

SEQ ID NO: 5686 - protein, 24 aa, Homo sapiens
CAKGVWVTFGGVIPRPYYYGMDVW

SEQ ID NO: 5687 - protein, 19 aa, Homo sapiens
CARGIQWSYDHGDYYLDYW

SEQ ID NO: 5688 - protein, 16 aa, Homo sapiens
CAKVHGSYWGGAFDIW

SEQ ID NO: 5689 - protein, 24 aa, Homo sapiens
CARHGPRYCSSTSCYGWGRYFDLW

SEQ ID NO: 5690 - protein, 14 aa, Homo sapiens
CAREEGAPRHFDTW

SEQ ID NO: 5691 - protein, 11 aa, Homo sapiens
CTIGTNWFDPW

SEQ ID NO: 5692 - protein, 24 aa, Homo sapiens
CASHGPRYYDILTGLYYYYGMDVW

SEQ ID NO: 5693 - protein, 16 aa, Homo sapiens
CARDVDYYGSGGIDYW

SEQ ID NO: 5694 - protein, 11 aa, Homo sapiens
CQQTDINPGTF

SEQ ID NO: 5695 - protein, 26 aa, Homo sapiens
CAKNAAIEEFPITIFGVVTLNYFDYW

SEQ ID NO: 5696 - protein, 22 aa, Homo sapiens
CTTDTLPTYYYDSSGYRPFDYW

SEQ ID NO: 5697 - protein, 19 aa, Homo sapiens
CATAPPIAVAGTGNWFDPW

SEQ ID NO: 5698 - protein, 17 aa, Homo sapiens
CARLRADSSGPTALDYW

SEQ ID NO: 5699 - protein, 19 aa, Homo sapiens
CARDQDTAMEPYYYGMDVW

SEQ ID NO: 5700 - protein, 21 aa, Homo sapiens
CARGREIVVVVAATPAGFDYW

SEQ ID NO: 5701 - protein, 18 aa, Homo sapiens
CARDRIQLWSKPYYFDYW

SEQ ID NO: 5702 - protein, 26 aa, Homo sapiens
CARDTTSGSSSWYSLTGYYYYGMDVW

SEQ ID NO: 5703 - protein, 16 aa, Homo sapiens
CARLRYYDSTGYLDSW

SEQ ID NO: 5704 - protein, 17 aa, Homo sapiens
CATGGYGSGSQSRFNYW

SEQ ID NO: 5705 - protein, 20 aa, Homo sapiens
CARQFLSCSGGSCYSGFDYW

SEQ ID NO: 5706 - protein, 20 aa, Homo sapiens
CARDSGQLVRGVGGWYFDFW

SEQ ID NO: 5707 - protein, 17 aa, Homo sapiens
CARTRQYSGSSLAFDLW

SEQ ID NO: 5708 - protein, 14 aa, Homo sapiens
CARRERGSYYFDYW

SEQ ID NO: 5709 - protein, 21 aa, Homo sapiens
CTTLDLILVIEANLGGWFCPW

SEQ ID NO: 5710 - protein, 20 aa, Homo sapiens
CARHFSARASSLAADWFDPW

SEQ ID NO: 5711 - protein, 23 aa, Homo sapiens
CAREQVPIRDPTPPYYYYGLDVW

SEQ ID NO: 5712 - protein, 21 aa, Homo sapiens
CARHSAWRWLPQPNEYYFDYW

SEQ ID NO: 5713 - protein, 28 aa, Homo sapiens
CARDSSLDGGNYDYVWGSYRYFDWFDPW

SEQ ID NO: 5714 - protein, 32 aa, Homo sapiens
CATSVLRAGTTGGGWFDLLRTRPTGGGWFDPW

SEQ ID NO: 5715 - protein, 15 aa, Homo sapiens
CARHAWHGGNHLDYW

SEQ ID NO: 5716 - protein, 11 aa, Homo sapiens
CYSAADNNLLF

SEQ ID NO: 5717 - protein, 21 aa, Homo sapiens
CTGKNEGFWSGFLGDNWFDPW

SEQ ID NO: 5718 - protein, 19 aa, Homo sapiens
CARHERPYYYDSSGYYNYW

SEQ ID NO: 5719 - protein, 18 aa, Homo sapiens
CASNSGYSYGHYYGMDVW

SEQ ID NO: 5720 - protein, 18 aa, Homo sapiens
CTTPVEGSGSYYNPFDYW

SEQ ID NO: 5721 - protein, 16 aa, Homo sapiens
CARHHIDGYNFGFGYW

SEQ ID NO: 5722 - protein, 19 aa, Homo sapiens
CVRQWLDLRGYYYYGMDVW

SEQ ID NO: 5723 - protein, 17 aa, Homo sapiens
CASPKGHYYDSGDFDYW

SEQ ID NO: 5724 - protein, 18 aa, Homo sapiens
CQVWDSSGDSSSDHLWVF

SEQ ID NO: 5725 - protein, 27 aa, Homo sapiens
CARGSPLYDFWSGYWPSVDYYYGMDVW

SEQ ID NO: 5726 - protein, 14 aa, Homo sapiens
CARDRLYFDSVDYW

SEQ ID NO: 5727 - protein, 19 aa, Homo sapiens
CATAPPYCGGDCYSWFDPW

SEQ ID NO: 5728 - protein, 25 aa, Homo sapiens
CTTDSPFAGFDWLFGSDYYYGMDVW

SEQ ID NO: 5729 - protein, 22 aa, Homo sapiens
CARSYDFWSGFYANYYYGMDVW

SEQ ID NO: 5730 - protein, 28 aa, Homo sapiens
CARDYDPLEDLITTLVVVVSTRSASDIW

SEQ ID NO: 5731 - protein, 16 aa, Homo sapiens
CARHGRSYYHPYVDFW

SEQ ID NO: 5732 - protein, 13 aa, Homo sapiens
CAKFTQALDFDYW

SEQ ID NO: 5733 - protein, 17 aa, Homo sapiens
CARDRSYNWIEYYFDYW

SEQ ID NO: 5734 - protein, 16 aa, Homo sapiens
CATLHSWQQVVGGDYW

SEQ ID NO: 5735 - protein, 14 aa, Homo sapiens
CASQLRPTGWFDPW

SEQ ID NO: 5736 - protein, 21 aa, Homo sapiens
CARGFWSGSKINYYYYGMDVW

SEQ ID NO: 5737 - protein, 17 aa, Homo sapiens
CASLLWFGEENDALDVW

SEQ ID NO: 5738 - protein, 25 aa, Homo sapiens
CAKGPLMSYDILTGYYYYYYGMDVW

SEQ ID NO: 5739 - protein, 27 aa, Homo sapiens
CARIPRDKVVNGPLAYNYYYYYGMDVW

SEQ ID NO: 5740 - protein, 15 aa, Homo sapiens
CALPISGSQSRFNYW

SEQ ID NO: 5741 - protein, 12 aa, Homo sapiens
CQQFGTSPRFTF

SEQ ID NO: 5742 - protein, 13 aa, Homo sapiens [sequence omitted]

SEQ ID NO: 5743 - protein, 17 aa, Homo sapiens
CARDVRPSSSWQLFDYW

SEQ ID NO: 5744 - protein, 17 aa, Homo sapiens
CAKDEDSSGYFTPFDYW

SEQ ID NO: 5745 - protein, 25 aa, Homo sapiens
CAIIGYCSGGSCYSLPYYYYGMNVW

SEQ ID NO: 5746 - protein, 14 aa, Homo sapiens
CQQYNSYSPGMSTF

SEQ ID NO: 5747 - protein, 18 aa, Homo sapiens
CARLKYYDILTRYYFDYW

SEQ ID NO: 5748 - protein, 19 aa, Homo sapiens
CARDTLESRAYDTHYFELW

SEQ ID NO: 5749 - protein, 25 aa, Homo sapiens
CTTGPYSSSWEPRFLGFGLRILDYW

SEQ ID NO: 5750 - protein, 10 aa, Homo sapiens
CMQGTHFYSF

SEQ ID NO: 5751 - protein, 13 aa, Homo sapiens
CVNPSPKGLFDYW

SEQ ID NO: 5752 - protein, 21 aa, Homo sapiens
CARGPRITMIVVNPFRAFDIW

SEQ ID NO: 5753 - protein, 15 aa, Homo sapiens
CVRDSEAPESDIDYW

SEQ ID NO: 5754 - protein, 29 aa, Homo sapiens
CAKDLTYYDFWSGYLTTEIYYYYYGMDVW

SEQ ID NO: 5755 - protein, 28 aa, Homo sapiens
CARDPPRIAAAGTEQWLVPAPSYYFDYW

SEQ ID NO: 5756 - protein, 21 aa, Homo sapiens
CAKESSEITGYYVFGDPYDIW

SEQ ID NO: 5757 - protein, 22 aa, Homo sapiens
CARVSSYCDDGKCYSSNWFDPW

SEQ ID NO: 5758 - protein, 16 aa, Homo sapiens
CARLGIAAAALDFDYW

SEQ ID NO: 5759 - protein, 23 aa, Homo sapiens
CARGGSPELLWFGELFLDAFDIW

SEQ ID NO: 5760 - protein, 16 aa, Homo sapiens
CARDLRFLEWLSFDYW

SEQ ID NO: 5761 - protein, 17 aa, Homo sapiens
CARGHSSFNFEHHLDYW

SEQ ID NO: 5762 - protein, 22 aa, Homo sapiens
CATVLPPSYYDSSGYYYWFDYW

SEQ ID NO: 5763 - protein, 23 aa, Homo sapiens
CVRVGRMGYCSSASCSKNWFDPW

SEQ ID NO: 5764 - protein, 20 aa, Homo sapiens
CARQGPAFKEGATQFPFDYW

SEQ ID NO: 5765 - protein, 16 aa, Homo sapiens
CARENYYDSGGYMDVW

SEQ ID NO: 5766 - protein, 12 aa, Homo sapiens
CQQYSTSPPWRF

SEQ ID NO: 5767 - protein, 15 aa, Homo sapiens
CASYSSGWYSPFDYW

SEQ ID NO: 5768 - protein, 20 aa, Homo sapiens
CARGDPQSLTLAPRTFFDYW

SEQ ID NO: 5769 - protein, 13 aa, Homo sapiens
CAKDGDDSGFDYW

SEQ ID NO: 5770 - protein, 13 aa, Homo sapiens
CQQSYGTPRKIAF

SEQ ID NO: 5771 - protein, 16 aa, Homo sapiens
CARDGGDRDWTLFDHW

SEQ ID NO: 5772 - protein, 17 aa, Homo sapiens
CARVPRSANRSRTLDYW

SEQ ID NO: 5773 - protein, 15 aa, Homo sapiens
CVRDNQRRQGRFDSW

SEQ ID NO: 5774 - protein, 16 aa, Homo sapiens
CARFLVVVITTPPDYW

SEQ ID NO: 5775 - protein, 16 aa, Homo sapiens
CVSQDNWKISYYFDSW

SEQ ID NO: 5776 - protein, 20 aa, Homo sapiens
CTTQNRITMIVVVITEPDYW

SEQ ID NO: 5777 - protein, 14 aa, Homo sapiens
CARSIEYAYLFDAW

SEQ ID NO: 5778 - protein, 23 aa, Homo sapiens
CAGLVRYFDWLTATYYYYGMDVW

SEQ ID NO: 5779 - protein, 18 aa, Homo sapiens
CARLAITFGESDNWFDPW

SEQ ID NO: 5780 - protein, 13 aa, Homo sapiens
CQQSSNWPPKVTF

SEQ ID NO: 5781 - protein, 20 aa, Homo sapiens
CATSSLYSSSADPYWYFDLW

SEQ ID NO: 5782 - protein, 13 aa, Homo sapiens
CATITGLTYFDHW

SEQ ID NO: 5783 - protein, 20 aa, Homo sapiens
CATNSAMVRGVTPPGWFDPW

SEQ ID NO: 5784 - protein, 11 aa, Homo sapiens
CQHYDNWPLAF

SEQ ID NO: 5785 - protein, 21 aa, Homo sapiens
CARDPMTTVISDYYYYGMDVW

SEQ ID NO: 5786 - protein, 13 aa, Homo sapiens [sequence omitted]

SEQ ID NO: 5787 - protein, 30 aa, Homo sapiens
CARDLDHLYYDFWSGYYLPGVYYYYGMDVW

SEQ ID NO: 5788 - protein, 20 aa, Homo sapiens
CARDPESGVLGPDYWYFDLW

SEQ ID NO: 5789 - protein, 13 aa, Homo sapiens
CTRRGQNGAFDIW

SEQ ID NO: 5790 - protein, 16 aa, Homo sapiens
CAKARDEAARRSVDYW

SEQ ID NO: 5791 - protein, 16 aa, Homo sapiens
CARTRGYTYGNGFDFW

SEQ ID NO: 5792 - protein, 17 aa, Homo sapiens
CARHRSSWSALSPFDDW

SEQ ID NO: 5793 - protein, 17 aa, Homo sapiens
CVRVRLGPPSLKYFDHW

SEQ ID NO: 5794 - protein, 22 aa, Homo sapiens
CARDLTVVTAILYDYYYGMDVW

SEQ ID NO: 5795 - protein, 14 aa, Homo sapiens
CATTVTTHSYFDPW

SEQ ID NO: 5796 - protein, 16 aa, Homo sapiens
CAKARVMGTLDAFDIW

SEQ ID NO: 5797 - protein, 22 aa, Homo sapiens
CARLLLRYFDWLLTSDDAFDIW

SEQ ID NO: 5798 - protein, 22 aa, Homo sapiens
CAALPPYYDFWSGFPDDAFDIW

SEQ ID NO: 5799 - protein, 18 aa, Homo sapiens
CAKYITKWMVTAPGFDYW

SEQ ID NO: 5800 - protein, 16 aa, Homo sapiens
CVKGVAAMVTYYFDYW

SEQ ID NO: 5801 - protein, 12 aa, Homo sapiens
CQQFNNYLGFTF

SEQ ID NO: 5802 - protein, 15 aa, Homo sapiens
CQQYNSYNSYSLFTF

SEQ ID NO: 5803 - protein, 15 aa, Homo sapiens
CQSADSFDTYRNVLF

SEQ ID NO: 5804 - protein, 16 aa, Homo sapiens
CATSSAMVRLGWFDPW

SEQ ID NO: 5805 - protein, 17 aa, Homo sapiens
CVKDNSRGLGGMDFQYW

SEQ ID NO: 5806 - protein, 16 aa, Homo sapiens
CASQMATITEPGSDYW

SEQ ID NO: 5807 - protein, 14 aa, Homo sapiens [sequence omitted]

SEQ ID NO: 5808 - protein, 16 aa, Homo sapiens
CTRRRAAAGKYHFDFW

SEQ ID NO: 5809 - protein, 14 aa, Homo sapiens
CASPYSSSWYLVYW

SEQ ID NO: 5810 - protein, 16 aa, Homo sapiens
CARGFCDGGTCYLEYW

SEQ ID NO: 5811 - protein, 27 aa, Homo sapiens
CTTDRWTIDYGDYEDQDSYSYYGMDVW

SEQ ID NO: 5812 - protein, 11 aa, Homo sapiens
CQQVYDTPRAF

SEQ ID NO: 5813 - protein, 20 aa, Homo sapiens
CARFDYFDSSGFWIDAFDIW

SEQ ID NO: 5814 - protein, 19 aa, Homo sapiens
CATPRSFGYYDSSGAFDYW

SEQ ID NO: 5815 - protein, 13 aa, Homo sapiens
CQVWDSISDRLFF

SEQ ID NO: 5816 - protein, 18 aa, Homo sapiens
CARLQLFDYYYYYGMDVW

SEQ ID NO: 5817 - protein, 28 aa, Homo sapiens
CAKDIGYYDSSGYYYVEASYYYYGMDVW

SEQ ID NO: 5818 - protein, 32 aa, Homo sapiens
CARLGRGYSGYDRIAAALGSPYYYYYYGMDVW

SEQ ID NO: 5819 - protein, 14 aa, Homo sapiens
CARVRRSSSWYDYW

SEQ ID NO: 5820 - protein, 18 aa, Homo sapiens
CARDRDGSSWNKYYFDYW

SEQ ID NO: 5821 - protein, 15 aa, Homo sapiens
CARHRTYGTYAMDVW

SEQ ID NO: 5822 - protein, 23 aa, Homo sapiens
CARENGGSDGDYHYYYYYGMDVW

SEQ ID NO: 5823 - protein, 17 aa, Homo sapiens
CARVIPGNDYGDYPDYW

SEQ ID NO: 5824 - protein, 19 aa, Homo sapiens
CARTPGYSSSLLSSYIDYW

SEQ ID NO: 5825 - protein, 25 aa, Homo sapiens
CARDLSRVDYGVLSGYYQGGILDYW

SEQ ID NO: 5826 - protein, 17 aa, Homo sapiens
CVKHGKELELRSYFDLW

SEQ ID NO: 5827 - protein, 17 aa, Homo sapiens
CARVLDTAIVKYYFDYW

SEQ ID NO: 5828 - protein, 11 aa, Homo sapiens
CQHFHSYPYTF

SEQ ID NO: 5829 - protein, 15 aa, Homo sapiens
CATYAASVALYFDYW

SEQ ID NO: 5830 - protein, 16 aa, Homo sapiens
CATAPSYGGTGWFDPW

SEQ ID NO: 5831 - protein, 17 aa, Homo sapiens
CARSPGIAARLYYFDYW

SEQ ID NO: 5832 - protein, 14 aa, Homo sapiens
CAKSYSGYDSVDIW

SEQ ID NO: 5833 - protein, 16 aa, Homo sapiens
CAREGLGPMGYYFDYW

SEQ ID NO: 5834 - protein, 14 aa, Homo sapiens
CQSADNSGVYGVLF

SEQ ID NO: 5835 - protein, 19 aa, Homo sapiens
CATVPYYYASSAQGGFDSW

SEQ ID NO: 5836 - protein, 12 aa, Homo sapiens
CARDVENYFDPW

SEQ ID NO: 5837 - protein, 18 aa, Homo sapiens
CAKDPEPSGSYSDYFDYW

SEQ ID NO: 5838 - protein, 20 aa, Homo sapiens
CARGRPTEYYYDSTPLFDYW

SEQ ID NO: 5839 - protein, 17 aa, Homo sapiens
CARPPYDSSSDGAFDIW

SEQ ID NO: 5840 - protein, 26 aa, Homo sapiens
CAKETYYDIWSGYYRDYYYYYGMDVW

SEQ ID NO: 5841 - protein, 16 aa, Homo sapiens
CARTHGGSYSSPLDYW

SEQ ID NO: 5842 - protein, 15 aa, Homo sapiens
CATAVAYYYYGMDVW

SEQ ID NO: 5843 - protein, 21 aa, Homo sapiens
CARNPTVEWSPYYYYYGMDVW

SEQ ID NO: 5844 - protein, 12 aa, Homo sapiens
CARVGVTIFDQW

SEQ ID NO: 5845 - protein, 21 aa, Homo sapiens
CARQSRGDIVLMVYENWFDPW

SEQ ID NO: 5846 - protein, 17 aa, Homo sapiens
CAKIKNSGWPHDGLDVW

SEQ ID NO: 5847 - protein, 15 aa, Homo sapiens
CARCGSPTGRKTDYW

SEQ ID NO: 5848 - protein, 19 aa, Homo sapiens
CARGPYDSSGYYHYGMDVW

SEQ ID NO: 5849 - protein, 12 aa, Homo sapiens
CQQSHSTVMWTF

SEQ ID NO: 5850 - protein, 16 aa, Homo sapiens
CASAHEFSPYNWFDPW

SEQ ID NO: 5851 - protein, 22 aa, Homo sapiens
CARHESYCGGDCYSRMFWFDPW

SEQ ID NO: 5852 - protein, 17 aa, Homo sapiens
CARHRAFQAFSDPLDVW

SEQ ID NO: 5853 - protein, 21 aa, Homo sapiens
CTHSSQNYSSGLTDSRPFDIW

SEQ ID NO: 5854 - protein, 18 aa, Homo sapiens
CVRTLRTHTVTTTGVDYW

SEQ ID NO: 5855 - protein, 27 aa, Homo sapiens
CARALWSGDQQLRARKQAYYYYGMDVW

SEQ ID NO: 5856 - protein, 17 aa, Homo sapiens
CVRNRPSIMDLIMFDYW

SEQ ID NO: 5857 - protein, 14 aa, Homo sapiens
CYSTDSSDDHYRVF

SEQ ID NO: 5858 - protein, 20 aa, Homo sapiens
CHGDYVLSSHTEYYYGMDVW

SEQ ID NO: 5859 - protein, 19 aa, Homo sapiens
CARMPRDTEVRIAVAVDIW

SEQ ID NO: 5860 - protein, 20 aa, Homo sapiens
CATGVYADGRGYYYGRIDYW

SEQ ID NO: 5861 - protein, 21 aa, Homo sapiens
CARLGYSSPQLYYYYYGMDVW

SEQ ID NO: 5862 - protein, 22 aa, Homo sapiens
CAKAIMITFGGVIAPLYYFDYW

SEQ ID NO: 5863 - protein, 20 aa, Homo sapiens
CARVGKQPTLYYFYYAMDVW

SEQ ID NO: 5864 - protein, 17 aa, Homo sapiens
CARDYYGSGSYEGFDYW

SEQ ID NO: 5865 - protein, 15 aa, Homo sapiens
CQQYGSSPMGGMYTF

SEQ ID NO: 5866 - protein, 12 aa, Homo sapiens
CMHGTQFPSLTF

SEQ ID NO: 5867 - protein, 12 aa, Homo sapiens
CSSYTSSRTIVF

SEQ ID NO: 5868 - protein, 15 aa, Homo sapiens
CTGGSSHWAYRFDYW

SEQ ID NO: 5869 - protein, 13 aa, Homo sapiens
CARGRTYWGSDYW

SEQ ID NO: 5870 - protein, 23 aa, Homo sapiens
CARSPFSTVILVVHLEAYYFDYW

SEQ ID NO: 5871 - protein, 16 aa, Homo sapiens
CAKDRGNDYGDQLDYW

SEQ ID NO: 5872 - protein, 22 aa, Homo sapiens
CAKGEGMTYDFWNGHYTGFDDW

SEQ ID NO: 5873 - protein, 19 aa, Homo sapiens
CARDSTIAIDQGDNDFDYW

SEQ ID NO: 5874 - protein, 16 aa, Homo sapiens
CATGSPSKVTGWFDPW

SEQ ID NO: 5875 - protein, 30 aa, Homo sapiens
CARNAANYYDSSGYYYPPVDYYYYYGMDVW

SEQ ID NO: 5876 - protein, 16 aa, Homo sapiens
CARLEYSSSWYGLDYW

SEQ ID NO: 5877 - protein, 12 aa, Homo sapiens
CMEAAQFPRLSF

SEQ ID NO: 5878 - protein, 24 aa, Homo sapiens
CAHRPRYFDWLFESDLGHGWFDPW

SEQ ID NO: 5879 - protein, 13 aa, Homo sapiens
CARVTVTTGGDYW

SEQ ID NO: 5880 - protein, 21 aa, Homo sapiens
CATSPAYCSSTSCYRGWFDPW

SEQ ID NO: 5881 - protein, 17 aa, Homo sapiens
CARDGGNWGNYWYFDLW

SEQ ID NO: 5882 - protein, 16 aa, Homo sapiens
CVRDLYYDSSGYFLSW

SEQ ID NO: 5883 - protein, 15 aa, Homo sapiens
CAREKYSYGFALDYW

SEQ ID NO: 5884 - protein, 16 aa, Homo sapiens
CARHDYGDYFGAFDIW

SEQ ID NO: 5885 - protein, 17 aa, Homo sapiens
CAKDLFFHPNQYYFDYW

SEQ ID NO: 5886 - protein, 19 aa, Homo sapiens
CGREARRISTYDPPFFDSW

SEQ ID NO: 5887 - protein, 23 aa, Homo sapiens
CARDFGAKVASRGRYSYYGMDVW

SEQ ID NO: 5888 - protein, 18 aa, Homo sapiens
CASVGRDGGSWGYWLDPW

SEQ ID NO: 5889 - protein, 24 aa, Homo sapiens
CARGYSGYDDLLRSYYYYYGMDVW

SEQ ID NO: 5890 - protein, 20 aa, Homo sapiens
CAREAHCSGGSCYSGWFDPW

SEQ ID NO: 5891 - protein, 18 aa, Homo sapiens
CTTDSGRNCGGDCSDDYW

SEQ ID NO: 5892 - protein, 23 aa, Homo sapiens
CARDRHGFDFDMSLEYNDAFDLW

SEQ ID NO: 5893 - protein, 30 aa, Homo sapiens
CAKDPSYYDFWSGYLPRVGPYYYYYGMDVW

SEQ ID NO: 5894 - protein, 20 aa, Homo sapiens
CARMGGYFEILTGLKGLDYW

SEQ ID NO: 5895 - protein, 21 aa, Homo sapiens
CARERAIFCEGDCYEEDFDIW

SEQ ID NO: 5896 - protein, 19 aa, Homo sapiens
CAKVLFDKSNFDPWYFDVW

SEQ ID NO: 5897 - protein, 13 aa, Homo sapiens
CARHWSYYSFDYW

SEQ ID NO: 5898 - protein, 13 aa, Homo sapiens
CMQGLQTPSMYAF

SEQ ID NO: 5899 - protein, 12 aa, Homo sapiens [sequence omitted]

SEQ ID NO: 5900 - protein, 16 aa, Homo sapiens
CARPSTGSSTSEFDYW

SEQ ID NO: 5901 - protein, 18 aa, Homo sapiens
CARKEGILHLVPYHIDYW

SEQ ID NO: 5902 - protein, 17 aa, Homo sapiens
CVKETACSGTHCYPDFW

SEQ ID NO: 5903 - protein, 19 aa, Homo sapiens
CVKDDYYASGNFASNFDCW

SEQ ID NO: 5904 - protein, 18 aa, Homo sapiens
CANQANRGPTFYWYFVLW

SEQ ID NO: 5905 - protein, 12 aa, Homo sapiens
CMEGAHWPAITF

SEQ ID NO: 5906 - protein, 17 aa, Homo sapiens
CARPQAEWDLLLPFDMW

SEQ ID NO: 5907 - protein, 17 aa, Homo sapiens
CARERTIFGVVIHFDYW

SEQ ID NO: 5908 - protein, 21 aa, Homo sapiens
CARGYYYDSSGYYRNWYFDLW

SEQ ID NO: 5909 - protein, 24 aa, Homo sapiens
CARHEVDPFMITFGGVIPRGFDPW

SEQ ID NO: 5910 - protein, 21 aa, Homo sapiens
CARDPRPLYDILTGYHPPDYW

SEQ ID NO: 5911 - protein, 23 aa, Homo sapiens
CARSLDFWTANYGRAPGDYFDSW

SEQ ID NO: 5912 - protein, 22 aa, Homo sapiens
CARLPGFYSYGPYYYYSGMDVW

SEQ ID NO: 5913 - protein, 16 aa, Homo sapiens
CARAHGDYVINWFDPW

SEQ ID NO: 5914 - protein, 17 aa, Homo sapiens
CARHRPYGGRSYYFDVW

SEQ ID NO: 5915 - protein, 19 aa, Homo sapiens
CARAPYYYDMLGKQPFDYW

SEQ ID NO: 5916 - protein, 16 aa, Homo sapiens
CMQGTHWGARSNFITF

SEQ ID NO: 5917 - protein, 20 aa, Homo sapiens
CAREGGAYCGGDCLSAFDIW

SEQ ID NO: 5918 - protein, 21 aa, Homo sapiens
CAKRAGVSPLSSGWYHPIDYW

SEQ ID NO: 5919 - protein, 17 aa, Homo sapiens
CATVFAIFGVVTRFDYW

SEQ ID NO: 5920 - protein, 22 aa, Homo sapiens
CARGDGSGNYFLDYNYYAMDVW

SEQ ID NO: 5921 - protein, 16 aa, Homo sapiens
CAREGIAARRPWFDPW

SEQ ID NO: 5922 - protein, 24 aa, Homo sapiens
CAHRPYRGDYYDSSGYPGGDFDYW

SEQ ID NO: 5923 - protein, 21 aa, Homo sapiens
CATDLRYRISRLGYNSYIDYW

SEQ ID NO: 5924 - protein, 17 aa, Homo sapiens
CAKSMATYSSGWYEEYW

SEQ ID NO: 5925 - protein, 17 aa, Homo sapiens
CARHELYSSGSILFDYW

SEQ ID NO: 5926 - protein, 14 aa, Homo sapiens
CARHRLGGDPFDFW

SEQ ID NO: 5927 - protein, 12 aa, Homo sapiens
CARDNHWSIDYW

SEQ ID NO: 5928 - protein, 16 aa, Homo sapiens
CARATYDRSADPFDFW

SEQ ID NO: 5929 - protein, 22 aa, Homo sapiens
CARDSQSFFYGTVTYYGTMDYW

SEQ ID NO: 5930 - protein, 25 aa, Homo sapiens
CARDPPEPPFQYSSGFYYYYGMDVW

SEQ ID NO: 5931 - protein, 22 aa, Homo sapiens
CAHRVGYCTTSSCLWGVGFDYW

SEQ ID NO: 5932 - protein, 26 aa, Homo sapiens
CARDYSQLGYDFWSGYSSYYYGMDVW

SEQ ID NO: 5933 - protein, 18 aa, Homo sapiens
CARAGWASSSDDDVFDIW

SEQ ID NO: 5934 - protein, 19 aa, Homo sapiens
CATGPGYSSSWYPNWFDPW

SEQ ID NO: 5935 - protein, 17 aa, Homo sapiens
CARSFNYGTYYNAFDSW

SEQ ID NO: 5936 - protein, 16 aa, Homo sapiens
CARDSTVHYYYGMDVW

SEQ ID NO: 5937 - protein, 18 aa, Homo sapiens
CAREDRYCSGGNCYYDYW

SEQ ID NO: 5938 - protein, 16 aa, Homo sapiens
CAHPLTTRLHDAFDIW

SEQ ID NO: 5939 - protein, 21 aa, Homo sapiens
CARLYCSGGSCYTTDNWFDPW

SEQ ID NO: 5940 - protein, 13 aa, Homo sapiens
CQQYYTAPHMYTF

SEQ ID NO: 5941 - protein, 16 aa, Homo sapiens
CARDSSDTAMVSFDYW

SEQ ID NO: 5942 - protein, 18 aa, Homo sapiens
CARAGYCSTSSCYYLVYW

SEQ ID NO: 5943 - protein, 13 aa, Homo sapiens
CQSHDRSNHDWVF

SEQ ID NO: 5944 - protein, 15 aa, Homo sapiens
CASAPAAIRTINDYW

SEQ ID NO: 5945 - protein, 18 aa, Homo sapiens
CAIQLETLMAPTDGMDVW

SEQ ID NO: 5946 - protein, 16 aa, Homo sapiens
CAKLVVNSGNSGADYW

SEQ ID NO: 5947 - protein, 20 aa, Homo sapiens
CAKARGLMVYARKDYYFDYW

SEQ ID NO: 5948 - protein, 13 aa, Homo sapiens
CQQSYSTHREYTF

SEQ ID NO: 5949 - protein, 24 aa, Homo sapiens
CASRREDYDSSGYFSLPALYFDYW

SEQ ID NO: 5950 - protein, 12 aa, Homo sapiens
CQQSYSFDHGTF

SEQ ID NO: 5951 - protein, 19 aa, Homo sapiens
CAKEPHVLRYFDWYEKDYW

SEQ ID NO: 5952 - protein, 21 aa, Homo sapiens
CASLPLRMVGMLDYYYGMDVW

SEQ ID NO: 5953 - protein, 20 aa, Homo sapiens
CARDSDYYDSSGYLAPGDYW

SEQ ID NO: 5954 - protein, 19 aa, Homo sapiens
CARDLLGVLEPHRGYFDYW

SEQ ID NO: 5955 - protein, 20 aa, Homo sapiens
CARDRVVGAPPNYYYGMDVW

SEQ ID NO: 5956 - protein, 17 aa, Homo sapiens
CARGSLIALAGTGFDYW

SEQ ID NO: 5957 - protein, 18 aa, Homo sapiens
CASSRLPYGDSRGVFDYW

SEQ ID NO: 5958 - protein, 12 aa, Homo sapiens
CATTGPGPFDIW

SEQ ID NO: 5959 - protein, 16 aa, Homo sapiens
CARDGSGSSDDAFDIW

SEQ ID NO: 5960 - protein, 20 aa, Homo sapiens
CASIAAAGSSSYYYYGMDVW

SEQ ID NO: 5961 - protein, 11 aa, Homo sapiens
CQQAHALPFTF

SEQ ID NO: 5962 - protein, 18 aa, Homo sapiens
CASSYDSSGYYWYYFDYW

SEQ ID NO: 5963 - protein, 25 aa, Homo sapiens
CARGTGIRYYDSSGYHLGEYYFDYW

SEQ ID NO: 5964 - protein, 15 aa, Homo sapiens
CAAWDDTLSGLLYVF

SEQ ID NO: 5965 - protein, 20 aa, Homo sapiens
CTTDRYYDYVWGSYRLVDYW

SEQ ID NO: 5966 - protein, 16 aa, Homo sapiens
CAKGDQLLFPCWFDPW

SEQ ID NO: 5967 - protein, 19 aa, Homo sapiens
CAVLWRVEMATIYGEVDYW

SEQ ID NO: 5968 - protein, 13 aa, Homo sapiens
CLQHDNFPLLYTF

SEQ ID NO: 5969 - protein, 11 aa, Homo sapiens
CQQYHDYPRSF

SEQ ID NO: 5970 - protein, 17 aa, Homo sapiens
CASNRGVATIHSPIDYW

SEQ ID NO: 5971 - protein, 18 aa, Homo sapiens
CAKMAGDGYTLNYYFDLW

SEQ ID NO: 5972 - protein, 21 aa, Homo sapiens
CARDQIVAGEFEDYYYGMDVW

SEQ ID NO: 5973 - protein, 15 aa, Homo sapiens
CTTEYSSSSPYFDYW

SEQ ID NO: 5974 - protein, 11 aa, Homo sapiens [sequence omitted]

SEQ ID NO: 5975 - protein, 22 aa, Homo sapiens
CARHPGLLSGGWYNGSPGSDYW

SEQ ID NO: 5976 - protein, 16 aa, Homo sapiens
CAIQRSSSWYSGFDYW

SEQ ID NO: 5977 - protein, 15 aa, Homo sapiens
CAREVCGGDCYPDSW

SEQ ID NO: 5978 - protein, 16 aa, Homo sapiens
CASRLENLSLSAFDFW

SEQ ID NO: 5979 - protein, 17 aa, Homo sapiens
CARQIRVAGLLYYFDYW

SEQ ID NO: 5980 - protein, 15 aa, Homo sapiens [sequence omitted]

SEQ ID NO: 5981 - protein, 19 aa, Homo sapiens
CAKVSPRVVTILMYYFDYW

SEQ ID NO: 5982 - protein, 15 aa, Homo sapiens
CARRSYDSSYYFDYW

SEQ ID NO: 5983 - protein, 16 aa, Homo sapiens
CATPRGYSGYGLFDYW

SEQ ID NO: 5984 - protein, 29 aa, Homo sapiens
CARSAAVRGHCTNGVCPDYYGSGNWFDPW

SEQ ID NO: 5985 - protein, 23 aa, Homo sapiens
CATGSAVAGTSLYYYYYYGMDVW

SEQ ID NO: 5986 - protein, 20 aa, Homo sapiens
CAIPRHSSGWYGIWYYFDYW

SEQ ID NO: 5987 - protein, 15 aa, Homo sapiens
CARLPYDFWSPSDYW

SEQ ID NO: 5988 - protein, 28 aa, Homo sapiens
CARDYDPIDDLITVLAVVVNTRSAIDIW

SEQ ID NO: 5989 - protein, 24 aa, Homo sapiens
CARIRALYYSDTSGYPMSSWFDPW

SEQ ID NO: 5990 - protein, 21 aa, Homo sapiens
CATEKMVYAGIAAAGTIFDYW

SEQ ID NO: 5991 - protein, 22 aa, Homo sapiens
CATTAAYSSGSSILRTLDFDYW

SEQ ID NO: 5992 - protein, 11 aa, Homo sapiens
CASSGWYVVYW

SEQ ID NO: 5993 - protein, 11 aa, Homo sapiens
CAKILGGFDYW

SEQ ID NO: 5994 - protein, 15 aa, Homo sapiens
CARDSNSWYAPFDYW

SEQ ID NO: 5995 - protein, 21 aa, Homo sapiens
CARLLPPYSSGWYYYYGMDVW

SEQ ID NO: 5996 - protein, 16 aa, Homo sapiens
CARGKAYGGYDSFDYW

SEQ ID NO: 5997 - protein, 14 aa, Homo sapiens
CVRDHFSEDAFDIW

SEQ ID NO: 5998 - protein, 16 aa, Homo sapiens
CARGLYSGYEYYFDYW

SEQ ID NO: 5999 - protein, 20 aa, Homo sapiens
CARDGHANYDILTGYPFDPW

SEQ ID NO: 6000 - protein, 20 aa, Homo sapiens
CARHTMEAVAGTMTFLFDYW

SEQ ID NO: 6001 - protein, 17 aa, Homo sapiens
CARDGFPYTSSAPFDHW

SEQ ID NO: 6002 - protein, 20 aa, Homo sapiens
CARARRPLWEQQLDFAFDIW

SEQ ID NO: 6003 - protein, 27 aa, Homo sapiens
CARHAYYDFWSGYYFSGKQYYYGMDVW

SEQ ID NO: 6004 - protein, 22 aa, Homo sapiens
CARGIIEYDYVWGSYVDAFDIW

SEQ ID NO: 6005 - protein, 22 aa, Homo sapiens
CAQDRWNVDTPGYSYYYGMDVW

SEQ ID NO: 6006 - protein, 19 aa, Homo sapiens
CAKDVSWFGELLSPLFDYW

SEQ ID NO: 6007 - protein, 21 aa, Homo sapiens
CARSHIVVVVAASYYYGMDVW

SEQ ID NO: 6008 - protein, 18 aa, Homo sapiens
CARQYGYYYDSSGYPDYW

SEQ ID NO: 6009 - protein, 16 aa, Homo sapiens
CARHHSYSGYRFFDYW

SEQ ID NO: 6010 - protein, 20 aa, Homo sapiens
CARHASHWIGAAALNWFDPW

SEQ ID NO: 6011 - protein, 16 aa, Homo sapiens
CARRGFNSADHWFDPW

SEQ ID NO: 6012 - protein, 15 aa, Homo sapiens
CARDVYSYGPPHDYW

SEQ ID NO: 6013 - protein, 19 aa, Homo sapiens
CARDLRRTTGTTLNWFDPW

SEQ ID NO: 6014 - protein, 21 aa, Homo sapiens
CARHEGSYYDILTGYYPGDYW

SEQ ID NO: 6015 - protein, 21 aa, Homo sapiens
CARHAPLAVAKTWYNPHFDYW

SEQ ID NO: 6016 - protein, 12 aa, Homo sapiens
CQHRANWPKITF

SEQ ID NO: 6017 - protein, 19 aa, Homo sapiens
CTTDSGIDYGDYLNYFDYW

SEQ ID NO: 6018 - protein, 27 aa, Homo sapiens
CAASAVLYCSSTSCYATNYYYYGMDVW

SEQ ID NO: 6019 - protein, 20 aa, Homo sapiens
CAKDWGQGRWLQLEDYFDYW

SEQ ID NO: 6020 - protein, 11 aa, Homo sapiens [sequence omitted]

SEQ ID NO: 6021 - protein, 19 aa, Homo sapiens
CARLLKPQYQRPLYYFDYW

SEQ ID NO: 6022 - protein, 16 aa, Homo sapiens
CVREGELDGDYGADYW

SEQ ID NO: 6023 - protein, 22 aa, Homo sapiens
CARCSPDYYDTSGYPRRPFDYW

SEQ ID NO: 6024 - protein, 18 aa, Homo sapiens
CARDYPDTAMVTLPIDYW

SEQ ID NO: 6025 - protein, 18 aa, Homo sapiens
CARVYYYDSSGLDYFDYW

SEQ ID NO: 6026 - protein, 17 aa, Homo sapiens
CARVPRLITISNWFDPW

SEQ ID NO: 6027 - protein, 17 aa, Homo sapiens
CARYRGGNNYDKYLDFW

SEQ ID NO: 6028 - protein, 28 aa, Homo sapiens
CARVPYYYDSSGYYYPPNYYYYYGMDVW

SEQ ID NO: 6029 - protein, 12 aa, Homo sapiens
CQEYGSSTQVTF

SEQ ID NO: 6030 - protein, 23 aa, Homo sapiens
CARVLGRCSNGVCYWDYNRFDPW

SEQ ID NO: 6031 - protein, 20 aa, Homo sapiens
CARSLGFVASNSVGDFFDFW

SEQ ID NO: 6032 - protein, 21 aa, Homo sapiens
CARHPIVVVPAAVGSYAFDIW

SEQ ID NO: 6033 - protein, 21 aa, Homo sapiens
CARGQFYYSGVYSDREYYQHW

SEQ ID NO: 6034 - protein, 19 aa, Homo sapiens
CVKDSQVYDYLGGSAFDVW

SEQ ID NO: 6035 - protein, 12 aa, Homo sapiens
CQQYGPSVIYTF

SEQ ID NO: 6036 - protein, 19 aa, Homo sapiens
CARDRYSSSSYYYYGMDVW

SEQ ID NO: 6037 - protein, 16 aa, Homo sapiens
CATQFVVTAKKPVDYW

SEQ ID NO: 6038 - protein, 13 aa, Homo sapiens
CAKGGRVAGMDYW

SEQ ID NO: 6039 - protein, 17 aa, Homo sapiens
CAKETEWEPLTRWFDSW

SEQ ID NO: 6040 - protein, 16 aa, Homo sapiens
CARSSGYDPEYYLDYW

SEQ ID NO: 6041 - protein, 21 aa, Homo sapiens
CARAVQDIVLMVYVYDWFDPW

SEQ ID NO: 6042 - protein, 20 aa, Homo sapiens
CAKIGDDYGDYGDSYYFDYW

SEQ ID NO: 6043 - protein, 26 aa, Homo sapiens
CARAGLSGCNHVGCFTSFYYYGMDVW

SEQ ID NO: 6044 - protein, 12 aa, Homo sapiens
CQQSYIAPDFPF

SEQ ID NO: 6045 - protein, 14 aa, Homo sapiens
CAVLETRSYSFRYW

SEQ ID NO: 6046 - protein, 17 aa, Homo sapiens
CARLHDSSGYYFGFDYW

SEQ ID NO: 6047 - protein, 21 aa, Homo sapiens
CVRRLNDVFTGYYSPGWFDPW

SEQ ID NO: 6048 - protein, 13 aa, Homo sapiens
CARFYGLDGFDIW

SEQ ID NO: 6049 - protein, 20 aa, Homo sapiens
CARHGLYCSGGSCYNWFDPW

SEQ ID NO: 6050 - protein, 13 aa, Homo sapiens [sequence omitted]

SEQ ID NO: 6051 - protein, 19 aa, Homo sapiens
CARLKREYSSGWSYYFDYW

SEQ ID NO: 6052 - protein, 23 aa, Homo sapiens
CARGDSLRYDYSNGYYYYAMDVW

SEQ ID NO: 6053 - protein, 33 aa, Homo sapiens
CTAYLQWSSLKASDTAMYYCARLSVAVAGSDYW

SEQ ID NO: 6054 - protein, 19 aa, Homo sapiens
CVRTSHYYDSSGNPPFDFW

SEQ ID NO: 6055 - protein, 24 aa, Homo sapiens
CAREYTSISQWFGELTRGRYFDYW

SEQ ID NO: 6056 - protein, 11 aa, Homo sapiens
CYSYAGSYTPF

SEQ ID NO: 6057 - protein, 17 aa, Homo sapiens
CARDQSSGWYSNWFDPW

SEQ ID NO: 6058 - protein, 12 aa, Homo sapiens
CASSRYGDFDSW

SEQ ID NO: 6059 - protein, 27 aa, Homo sapiens
CARHRFSFPSITGTTGSPYYYYGMDVW

SEQ ID NO: 6060 - protein, 14 aa, Homo sapiens
CARRTDEVAGFDYW

SEQ ID NO: 6061 - protein, 19 aa, Homo sapiens
CAKDSRVFLLGTDYYFDSW

SEQ ID NO: 6062 - protein, 18 aa, Homo sapiens
CARGPLYLGYSDDAFDIW

SEQ ID NO: 6063 - protein, 17 aa, Homo sapiens
CVKVGIQLWLMYYFDYW

SEQ ID NO: 6064 - protein, 17 aa, Homo sapiens
CATVFCIAAAGCNFDYW

SEQ ID NO: 6065 - protein, 19 aa, Homo sapiens
CAKMRWELLRVGHNWFDPW

SEQ ID NO: 6066 - protein, 20 aa, Homo sapiens
CARGGQSGSYYTYYYGMDVW

SEQ ID NO: 6067 - protein, 16 aa, Homo sapiens
CARSPGYYGGWSFDYW

SEQ ID NO: 6068 - protein, 14 aa, Homo sapiens
CATVVGATGAFDIW

SEQ ID NO: 6069 - protein, 20 aa, Homo sapiens
CAHRRGHDILTGYFNAFDIW

SEQ ID NO: 6070 - protein, 17 aa, Homo sapiens
CARDVVGQDYGDYVDYW

SEQ ID NO: 6071 - protein, 18 aa, Homo sapiens
CARLRRSITMVRGVPDYW

SEQ ID NO: 6072 - protein, 21 aa, Homo sapiens
CARIYKQQLVYFDYYYGMDVW

SEQ ID NO: 6073 - protein, 16 aa, Homo sapiens
CAKDGHYYGSYYFDYW

SEQ ID NO: 6074 - protein, 33 aa, Homo sapiens
CSLRSEDTAMYYCARERAIFCEGDCYEEDFDIW

SEQ ID NO: 6075 - protein, 19 aa, Homo sapiens
CARDPIAAIHYYYYGMDVW

SEQ ID NO: 6076 - protein, 22 aa, Homo sapiens
CARHASPAWYCSGGSCRGFDYW

SEQ ID NO: 6077 - protein, 14 aa, Homo sapiens
CASRREYNYDFDHW

SEQ ID NO: 6078 - protein, 24 aa, Homo sapiens
CARGSFMITFGGVIVSPTGAFDIW

SEQ ID NO: 6079 - protein, 15 aa, Homo sapiens
CANFNPMTMGASDIW

SEQ ID NO: 6080 - protein, 19 aa, Homo sapiens
CARRNFDFWRQYSNYLDPW

SEQ ID NO: 6081 - protein, 22 aa, Homo sapiens
CARDRDSNWNDPRSYYYGMDVW

SEQ ID NO: 6082 - protein, 22 aa, Homo sapiens
CARSPPNTIFGVVIFPSAFDIW

SEQ ID NO: 6083 - protein, 19 aa, Homo sapiens
CARDQLDSSGWQEYYFDYW

SEQ ID NO: 6084 - protein, 15 aa, Homo sapiens
CAKFCSSSNCYADSW

SEQ ID NO: 6085 - protein, 25 aa, Homo sapiens
CARGSLSISMMVVVFIGGSFYLDSW

SEQ ID NO: 6086 - protein, 23 aa, Homo sapiens
CARRYSSSWGRYRPKHRYYFDYW

SEQ ID NO: 6087 - protein, 19 aa, Homo sapiens
CTTEGYSSGWNHGSKFDPW

SEQ ID NO: 6088 - protein, 13 aa, Homo sapiens
CQQYGNSPPKSSF

SEQ ID NO: 6089 - protein, 27 aa, Homo sapiens
CARDAAYCGGDCWDALNYYYYYGMDVW

SEQ ID NO: 6090 - protein, 13 aa, Homo sapiens
CVKVSLLGADDYW

SEQ ID NO: 6091 - protein, 21 aa, Homo sapiens
CARIRSDYTILTGFQYYFDYW

SEQ ID NO: 6092 - protein, 18 aa, Homo sapiens
CTTVAHYYDSSGYYLDYW

SEQ ID NO: 6093 - protein, 11 aa, Homo sapiens
CMLSYNGARVF

SEQ ID NO: 6094 - protein, 13 aa, Homo sapiens
CLQYNSWPPQCSF

SEQ ID NO: 6095 - protein, 24 aa, Homo sapiens
CVKENRMGVAASGTFLQYDIFDIW

SEQ ID NO: 6096 - protein, 16 aa, Homo sapiens
CARTDYGGKLNAFDIW

SEQ ID NO: 6097 - protein, 18 aa, Homo sapiens
CARASITIFGVGERVDYW

SEQ ID NO: 6098 - protein, 18 aa, Homo sapiens
CARVGTIFGVAHNWFDPW

SEQ ID NO: 6099 - protein, 20 aa, Homo sapiens
CTPQRVYDYVWGSYRYLDYW

SEQ ID NO: 6100 - protein, 28 aa, Homo sapiens
CARQRIVPAKTYYYGSGSYYTLDYFDYW

SEQ ID NO: 6101 - protein, 21 aa, Homo sapiens
CARPKLPYYGSGRGAEWFDPW

SEQ ID NO: 6102 - protein, 15 aa, Homo sapiens
CARMRGGYGFYFDYW

SEQ ID NO: 6103 - protein, 16 aa, Homo sapiens
CARPGYSYYYFGMDVW

SEQ ID NO: 6104 - protein, 13 aa, Homo sapiens
CARASYSTAYDYW

SEQ ID NO: 6105 - protein, 13 aa, Homo sapiens
CARDSVVGAFDIW

SEQ ID NO: 6106 - protein, 16 aa, Homo sapiens
CATSYYYDSSGYLDYW

SEQ ID NO: 6107 - protein, 16 aa, Homo sapiens
CATSTAAGTVSWFDPW

SEQ ID NO: 6108 - protein, 20 aa, Homo sapiens
CAKHEGELLYYYYYYGMDVW

SEQ ID NO: 6109 - protein, 11 aa, Homo sapiens
CQHYNEYSSPF

SEQ ID NO: 6110 - protein, 17 aa, Homo sapiens
CAADTYGDYKSPLFDYW

SEQ ID NO: 6111 - protein, 20 aa, Homo sapiens
CARDEDYGDYGLRLYYFDYW

SEQ ID NO: 6112 - protein, 11 aa, Homo sapiens
CVRGYSSPDYW

SEQ ID NO: 6113 - protein, 18 aa, Homo sapiens
CARDTEQPMLRGFSFDSW

SEQ ID NO: 6114 - protein, 12 aa, Homo sapiens
CQTWGIDILAVF

SEQ ID NO: 6115 - protein, 20 aa, Homo sapiens
CARERVNDYYDSSGYHIDYW

SEQ ID NO: 6116 - protein, 16 aa, Homo sapiens
CATPRGYYFHDAFDIW

SEQ ID NO: 6117 - protein, 26 aa, Homo sapiens
CARDPDRGYCSNPNCPGSYYYGMDVW

SEQ ID NO: 6118 - protein, 22 aa, Homo sapiens
CARDSVRVSEHNYYYYYGMDVW

SEQ ID NO: 6119 - protein, 24 aa, Homo sapiens
CARESGVVATIIVLADYYYGMDVW

SEQ ID NO: 6120 - protein, 11 aa, Homo sapiens
CMQSIQLPIAF

SEQ ID NO: 6121 - protein, 26 aa, Homo sapiens
CAREVPTPWYDILTGYSVPTNAFDIW

SEQ ID NO: 6122 - protein, 21 aa, Homo sapiens
CAHYTSSYYYDSSGYPFFDYW

SEQ ID NO: 6123 - protein, 17 aa, Homo sapiens
CAKVPPHWSYHWYFDHW

SEQ ID NO: 6124 - protein, 18 aa, Homo sapiens
CARIDDGSSWTGDAFDIW

SEQ ID NO: 6125 - protein, 20 aa, Homo sapiens
CSRAGSVFHFRSAYSHSDYW

SEQ ID NO: 6126 - protein, 18 aa, Homo sapiens
CATAPGYSSGWSGWFDPW

SEQ ID NO: 6127 - protein, 15 aa, Homo sapiens
CARVRFLDFYAFDFW

SEQ ID NO: 6128 - protein, 17 aa, Homo sapiens
CVRSPPNLSGQSWFDPW

SEQ ID NO: 6129 - protein, 16 aa, Homo sapiens
CASSGDQYDSSASDYW

SEQ ID NO: 6130 - protein, 18 aa, Homo sapiens
CARTGSGSYYGPPPFDYW

SEQ ID NO: 6131 - protein, 16 aa, Homo sapiens
CARAAGGSYLANFDYW

SEQ ID NO: 6132 - protein, 23 aa, Homo sapiens
CARVIVVSSGWRPVYYYYGMDVW

SEQ ID NO: 6133 - protein, 18 aa, Homo sapiens
CARDDVSTLAFGSVFDYW

SEQ ID NO: 6134 - protein, 23 aa, Homo sapiens
CARDTMTGYSSSWPRDYNWFDPW

SEQ ID NO: 6135 - protein, 13 aa, Homo sapiens
CQEYNNWPPMYIF

SEQ ID NO: 6136 - protein, 13 aa, Homo sapiens
CARDSPNNWFDPW

SEQ ID NO: 6137 - protein, 21 aa, Homo sapiens
CARVLWFGYLLEPWLGYFDYW

SEQ ID NO: 6138 - protein, 17 aa, Homo sapiens
CARVWFGEFNPNPLDYW

SEQ ID NO: 6139 - protein, 28 aa, Homo sapiens
CARQPPLFCSSTSCLGQYYYYYYGMDVW

SEQ ID NO: 6140 - protein, 13 aa, Homo sapiens
CQQYDDFPPSPTF

SEQ ID NO: 6141 - protein, 12 aa, Homo sapiens [sequence omitted]

SEQ ID NO: 6142 - protein, 15 aa, Homo sapiens
CAWEGPLGTHYFDYW

SEQ ID NO: 6143 - protein, 14 aa, Homo sapiens
CARLSVAVAGSDYW

SEQ ID NO: 6144 - protein, 13 aa, Homo sapiens
CQYRTNWPQAWTF

SEQ ID NO: 6145 - protein, 12 aa, Homo sapiens
CQYFGSSPPTTF

SEQ ID NO: 6146 - protein, 16 aa, Homo sapiens
CATAPPVAGFFWFDPW

SEQ ID NO: 6147 - protein, 17 aa, Homo sapiens
CARRLDILTGFDGMDVW

SEQ ID NO: 6148 - protein, 15 aa, Homo sapiens
CARGDQKPAFSLDYW

SEQ ID NO: 6149 - protein, 20 aa, Homo sapiens
CARDPYYDFWSGYYHSFDYW

SEQ ID NO: 6150 - protein, 16 aa, Homo sapiens
CARVAGIVATNYFDYW

SEQ ID NO: 6151 - protein, 19 aa, Homo sapiens
CARDWGLVRTVPDDALDYW

SEQ ID NO: 6152 - protein, 14 aa, Homo sapiens
CAREDGTYLHFDYW

SEQ ID NO: 6153 - protein, 18 aa, Homo sapiens
CARDVPEDNWNDSHFDYW

SEQ ID NO: 6154 - protein, 11 aa, Homo sapiens [sequence omitted]

SEQ ID NO: 6155 - protein, 14 aa, Homo sapiens [sequence omitted]

SEQ ID NO: 6156 - protein, 18 aa, Homo sapiens
CARDPSVPGGATIAFDFW

SEQ ID NO: 6157 - protein, 23 aa, Homo sapiens
CAKESTNYYDSSAYNYGHYFDHW

SEQ ID NO: 6158 - protein, 26 aa, Homo sapiens
CARDTPSLSRNFDWLAPELFDYFDFW

SEQ ID NO: 6159 - protein, 22 aa, Homo sapiens
CARALPYYDILTGYHPYYFDYW

SEQ ID NO: 6160 - protein, 14 aa, Homo sapiens
CARSEMATISFDYW

SEQ ID NO: 6161 - protein, 12 aa, Homo sapiens
CARVQSTSSDYW

SEQ ID NO: 6162 - protein, 21 aa, Homo sapiens
CARARASYDSSGYWPYYFDYW

SEQ ID NO: 6163 - protein, 21 aa, Homo sapiens
CARGPDVLRYFDWLFNPFDYW

SEQ ID NO: 6164 - protein, 11 aa, Homo sapiens
CQHYGASPYPF

SEQ ID NO: 6165 - protein, 15 aa, Homo sapiens
CARDLNRGPDVFDVW

SEQ ID NO: 6166 - protein, 20 aa, Homo sapiens
CARASSMVRGVIPFRWFDPW

SEQ ID NO: 6167 - protein, 33 aa, Homo sapiens
CSLRSEDTAVYYCARGPRITMIVVNPFRAFDIW

SEQ ID NO: 6168 - protein, 20 aa, Homo sapiens
CATGLAVAEPAYYYYGMDVW

SEQ ID NO: 6169 - protein, 25 aa, Homo sapiens
CAREGKGYYDSSGYYRVVDYYFDYW

SEQ ID NO: 6170 - protein, 18 aa, Homo sapiens
CATSGTVEHGTREWLDPW

SEQ ID NO: 6171 - protein, 16 aa, Homo sapiens
CAKHSKYYLGSGLDYW

SEQ ID NO: 6172 - protein, 24 aa, Homo sapiens
CARLVDYYDSSGYRDLGWPAPDYW

SEQ ID NO: 6173 - protein, 13 aa, Homo sapiens
CAKIVVGGALDIW

SEQ ID NO: 6174 - protein, 19 aa, Homo sapiens
CAHSLLWFGELLPYYFDYW

SEQ ID NO: 6175 - protein, 22 aa, Homo sapiens
CARGVAKESSNSWNAYYYADYW

SEQ ID NO: 6176 - protein, 18 aa, Homo sapiens
CTRGSGTSYGDYGLFPYW

SEQ ID NO: 6177 - protein, 21 aa, Homo sapiens
CARDPSGYDHLEKDPDWFDPW

SEQ ID NO: 6178 - protein, 23 aa, Homo sapiens
CARGISGANVAAAGSLEYYFDYW

SEQ ID NO: 6179 - protein, 14 aa, Homo sapiens
CARTTVTPDTFDYW

SEQ ID NO: 6180 - protein, 18 aa, Homo sapiens
CTTRTYYYGTNGYSADYW

SEQ ID NO: 6181 - protein, 15 aa, Homo sapiens
CAKDISGYYRPFDCW

SEQ ID NO: 6182 - protein, 11 aa, Homo sapiens
CHQSSLLPYTF

SEQ ID NO: 6183 - protein, 16 aa, Homo sapiens
CARPHFAMGTNWFDPW

SEQ ID NO: 6184 - protein, 25 aa, Homo sapiens
CARIDYYESGGRYPTAPKRYFFDYW

SEQ ID NO: 6185 - protein, 17 aa, Homo sapiens
CAKIGGGESMGWYFDYW

SEQ ID NO: 6186 - protein, 11 aa, Homo sapiens
CQRYNRAPYTF

SEQ ID NO: 6187 - protein, 20 aa, Homo sapiens
CASINTAMVTGVGYNWFDPW

SEQ ID NO: 6188 - protein, 13 aa, Homo sapiens [sequence omitted]

SEQ ID NO: 6189 - protein, 22 aa, Homo sapiens
CAKDSPFYGDYEYYYYYGMDVW

SEQ ID NO: 6190 - protein, 17 aa, Homo sapiens
CARAPQYYASGIGFDYW

SEQ ID NO: 6191 - protein, 19 aa, Homo sapiens
CARDYYDSSGYYNNWFDPW

SEQ ID NO: 6192 - protein, 10 aa, Homo sapiens
CQTWGTVCVF

SEQ ID NO: 6193 - protein, 13 aa, Homo sapiens
CARGGDYGQFEYW

SEQ ID NO: 6194 - protein, 28 aa, Homo sapiens
CAKHYDPIDDLITMMAVVISSRSAFDIW

SEQ ID NO: 6195 - protein, 18 aa, Homo sapiens
CARGDMYYYDTNGYPDYW

SEQ ID NO: 6196 - protein, 13 aa, Homo sapiens [sequence omitted]

SEQ ID NO: 6197 - protein, 19 aa, Homo sapiens
CARATWPRTVYYYYGMDVW

SEQ ID NO: 6198 - protein, 18 aa, Homo sapiens
CAKDIAPFGAVAGHFDHW

SEQ ID NO: 6199 - protein, 16 aa, Homo sapiens
CARRGSGNSWSLFDYW

SEQ ID NO: 6200 - protein, 26 aa, Homo sapiens
CARDRYYYDSSGYYFPTYYYYGMDVW

SEQ ID NO: 6201 - protein, 23 aa, Homo sapiens
CAKEELPMFLHIASSGWSGFDQW

SEQ ID NO: 6202 - protein, 17 aa, Homo sapiens
CATGARRGYYLYYMDVW

SEQ ID NO: 6203 - protein, 28 aa, Homo sapiens
CAKDYDPIEDLISMMVVVASSRSAFDVW

SEQ ID NO: 6204 - protein, 12 aa, Homo sapiens
CAAMGATELDYW

SEQ ID NO: 6205 - protein, 12 aa, Homo sapiens
CQKYNDYSTWTF

SEQ ID NO: 6206 - protein, 17 aa, Homo sapiens
CARDHPDNDYGDYAGYW

SEQ ID NO: 6207 - protein, 21 aa, Homo sapiens
CTRGNFRQMLLEYHYYGMDVW

SEQ ID NO: 6208 - protein, 16 aa, Homo sapiens
CASDMGATDPDAFDIW

SEQ ID NO: 6209 - protein, 27 aa, Homo sapiens
CASGIVVLPAANSEMGTGYYYYGMDVW

SEQ ID NO: 6210 - protein, 29 aa, Homo sapiens
CARVVRELRTCSGESCQYRRSEEYYFDYW

SEQ ID NO: 6211 - protein, 18 aa, Homo sapiens
CAKFSYDYESGTYVFDSW

SEQ ID NO: 6212 - protein, 17 aa, Homo sapiens
CARWENYYDSSGYTDYW

SEQ ID NO: 6213 - protein, 19 aa, Homo sapiens
CAKDFLAVAGRTSLYFDYW

SEQ ID NO: 6214 - protein, 21 aa, Homo sapiens
CASHKGGSKYYYGSGNWFDPW

SEQ ID NO: 6215 - protein, 26 aa, Homo sapiens
CARDLGTADSSGWYDDYYYYYGMDVW

SEQ ID NO: 6216 - protein, 12 aa, Homo sapiens
CHQRTNWPMGSF

SEQ ID NO: 6217 - protein, 20 aa, Homo sapiens
CATSLTLVRGVIRNDAFDIW

SEQ ID NO: 6218 - protein, 22 aa, Homo sapiens
CARDSTFRLHLFRVCCGYFDYW

SEQ ID NO: 6219 - protein, 24 aa, Homo sapiens
CAKDPKKIMITFGGVIVIPAFDYW

SEQ ID NO: 6220 - protein, 16 aa, Homo sapiens
CARGRGTWFGELLDYW

SEQ ID NO: 6221 - protein, 22 aa, Homo sapiens
CAKLAGYCSGGNCYTRGYFDYW

SEQ ID NO: 6222 - protein, 15 aa, Homo sapiens
CAKAGRSAMVTLDYW

SEQ ID NO: 6223 - protein, 19 aa, Homo sapiens
CARDRFCSGGSCPHYFDYW

SEQ ID NO: 6224 - protein, 24 aa, Homo sapiens
CARSFGTYFDFWSGFYYYYAMDVW

SEQ ID NO: 6225 - protein, 14 aa, Homo sapiens
CARDGSGTWHLDYW

SEQ ID NO: 6226 - protein, 18 aa, Homo sapiens
CAKDAISVIVVVTTFDYW

SEQ ID NO: 6227 - protein, 16 aa, Homo sapiens
CARSTFTVAANPFDYW

SEQ ID NO: 6228 - protein, 17 aa, Homo sapiens
CATSRATRLQRHPFDYW

SEQ ID NO: 6229 - protein, 16 aa, Homo sapiens
CARRVGALPVDAFDIW

SEQ ID NO: 6230 - protein, 26 aa, Homo sapiens
CARVWPQGYCSGGSCYSYYYYGMDVW

SEQ ID NO: 6231 - protein, 17 aa, Homo sapiens
CARDPGGYSYGPHFDYW

SEQ ID NO: 6232 - protein, 22 aa, Homo sapiens
CARDRPWFLYSYVTDSGAFDIW

SEQ ID NO: 6233 - protein, 14 aa, Homo sapiens
CAKLITMIGGDDYW

SEQ ID NO: 6234 - protein, 23 aa, Homo sapiens
CARDKSGYSSGWSLFGSYYFDYW

SEQ ID NO: 6235 - protein, 18 aa, Homo sapiens
CARFRLVDIVATPAFDIW

SEQ ID NO: 6236 - protein, 17 aa, Homo sapiens
CARGGWYIIQKSAFDIW

SEQ ID NO: 6237 - protein, 16 aa, Homo sapiens
CARRGSGYRQYYFDYW

SEQ ID NO: 6238 - protein, 22 aa, Homo sapiens
CAREGVGQIAVAVYYYYGMDVW

SEQ ID NO: 6239 - protein, 21 aa, Homo sapiens
CAKGLGSGIDLLTGDEAFDIW

SEQ ID NO: 6240 - protein, 16 aa, Homo sapiens
CARHPLAVAGGSFDYW

SEQ ID NO: 6241 - protein, 15 aa, Homo sapiens
CAKGDQWLTPSIDYW

SEQ ID NO: 6242 - protein, 16 aa, Homo sapiens
CARYGSGTYHEPFDYW

SEQ ID NO: 6243 - protein, 16 aa, Homo sapiens
CVRAEWDLTFDAFDIW

SEQ ID NO: 6244 - protein, 10 aa, Homo sapiens
CCSYAGSYTF

SEQ ID NO: 6245 - protein, 25 aa, Homo sapiens
CARDSQVVPAAGGADYYYYYGIDVW

SEQ ID NO: 6246 - protein, 19 aa, Homo sapiens
CAHSPLVWFGELFAAFDIW

SEQ ID NO: 6247 - protein, 14 aa, Homo sapiens
CAKSGSGNVGIDYW

SEQ ID NO: 6248 - protein, 17 aa, Homo sapiens
CAHTPITNYGDYSFDYW

SEQ ID NO: 6249 - protein, 25 aa, Homo sapiens
CARSRKLRLGELSRIVDHNYYFDFW

SEQ ID NO: 6250 - protein, 24 aa, Homo sapiens
CARDLDGSGSYWGWTYYYYGMDVW

SEQ ID NO: 6251 - protein, 20 aa, Homo sapiens
CVGMVRGVTRPPELNWFDPW

SEQ ID NO: 6252 - protein, 14 aa, Homo sapiens
CARSLAGERFFDYW

SEQ ID NO: 6253 - protein, 13 aa, Homo sapiens
CARGMTTTVFDYW

SEQ ID NO: 6254 - protein, 18 aa, Homo sapiens
CARDSEWFGKLKSHFDYW

SEQ ID NO: 6255 - protein, 17 aa, Homo sapiens
CARDWDDSSGIDAFDIW

SEQ ID NO: 6256 - protein, 16 aa, Homo sapiens
CAKDMWYSSSWPLDYW

SEQ ID NO: 6257 - protein, 22 aa, Homo sapiens
CARDTYYDILTGYYEPLMEDYW

SEQ ID NO: 6258 - protein, 22 aa, Homo sapiens
CARDLDYYGSGTQYDRGYFDYW

SEQ ID NO: 6259 - protein, 18 aa, Homo sapiens
CAAPHCSSTSCYDAFDIW

SEQ ID NO: 6260 - protein, 16 aa, Homo sapiens
CASGLSAVRGIMRDYW

SEQ ID NO: 6261 - protein, 20 aa, Homo sapiens
CARGPRVITFGGVISNFDYW

SEQ ID NO: 6262 - protein, 18 aa, Homo sapiens
CARDRKGGSTYGSALDYW

SEQ ID NO: 6263 - protein, 21 aa, Homo sapiens
CAREPTWRAVGSGWLDYFDYW

SEQ ID NO: 6264 - protein, 11 aa, Homo sapiens
CQQFNNFLGTF

SEQ ID NO: 6265 - protein, 17 aa, Homo sapiens
CACNNHGSGIYGWFDPW

SEQ ID NO: 6266 - protein, 13 aa, Homo sapiens
CARGYGDLHWDYW

SEQ ID NO: 6267 - protein, 16 aa, Homo sapiens
CARALTATGNGDFDFW

SEQ ID NO: 6268 - protein, 23 aa, Homo sapiens
CARTRRGYRHGFDGDRTGPFDSW

SEQ ID NO: 6269 - protein, 15 aa, Homo sapiens
CARDGGDNSGWFRYW

SEQ ID NO: 6270 - protein, 13 aa, Homo sapiens
CASTASMAGLDYW

SEQ ID NO: 6271 - protein, 23 aa, Homo sapiens
CAKDKLSLRYCSGGSCWGVFDYW

SEQ ID NO: 6272 - protein, 21 aa, Homo sapiens
CARGLALLYDILTGYWWFDPW

SEQ ID NO: 6273 - protein, 22 aa, Homo sapiens
CARIRSSSWYRWAEGNWYFDLW

SEQ ID NO: 6274 - protein, 20 aa, Homo sapiens
CASEHHSSGWYLFPPSFDYW

SEQ ID NO: 6275 - protein, 21 aa, Homo sapiens
CARRNPAYSSSWSGPDAFDIW

SEQ ID NO: 6276 - protein, 15 aa, Homo sapiens
CARVFRGGFDPFDIW

SEQ ID NO: 6277 - protein, 18 aa, Homo sapiens
CARDNGYYGSGTYAVDYW

SEQ ID NO: 6278 - protein, 9 aa, Homo sapiens [sequence omitted]

SEQ ID NO: 6279 - protein, 18 aa, Homo sapiens
CARGGLGYSYGGWYFDYW

SEQ ID NO: 6280 - protein, 25 aa, Homo sapiens
CAKDYSRRILGFIAVAGTPAHFDYW

SEQ ID NO: 6281 - protein, 22 aa, Homo sapiens
CATTNRIRYFDWLLGDDAFDIW

SEQ ID NO: 6282 - protein, 13 aa, Homo sapiens
CAREDYGDYVNYW

SEQ ID NO: 6283 - protein, 13 aa, Homo sapiens
CQQYDDWPLMCTF

SEQ ID NO: 6284 - protein, 22 aa, Homo sapiens
CAKSFSLAVAGMRAMEDWFDPW

SEQ ID NO: 6285 - protein, 18 aa, Homo sapiens
CARLLLSTVTTNWYFDLW

SEQ ID NO: 6286 - protein, 11 aa, Homo sapiens
CLHDYNYPLAF

SEQ ID NO: 6287 - protein, 13 aa, Homo sapiens [sequence omitted]

SEQ ID NO: 6288 - protein, 20 aa, Homo sapiens
CASRYDYVWGSYRHRQFDYW

SEQ ID NO: 6289 - protein, 20 aa, Homo sapiens
CARGVIVVVTATPFVYFDYW

SEQ ID NO: 6290 - protein, 16 aa, Homo sapiens
CARLPLYNYGPNFDYW

SEQ ID NO: 6291 - protein, 12 aa, Homo sapiens
CARVPVGPIDYW

SEQ ID NO: 6292 - protein, 19 aa, Homo sapiens
CAHASLYSGYDLTNWFDPW

SEQ ID NO: 6293 - protein, 17 aa, Homo sapiens
CAKDVWPHVDRPPFDYW

SEQ ID NO: 6294 - protein, 16 aa, Homo sapiens
CAKVKYSYGYGLFDYW

SEQ ID NO: 6295 - protein, 16 aa, Homo sapiens
CARAGPTYVSAYFDAW

SEQ ID NO: 6296 - protein, 14 aa, Homo sapiens
CRLVYGSGSTYDYW

SEQ ID NO: 6297 - protein, 19 aa, Homo sapiens
CARDWGSDSSGYPQPFDYW

SEQ ID NO: 6298 - protein, 23 aa, Homo sapiens
CARDNGRVDITMIVVVIGAFDIW

SEQ ID NO: 6299 - protein, 19 aa, Homo sapiens
CARDGRGGYSYGENYFDYW

SEQ ID NO: 6300 - protein, 18 aa, Homo sapiens
CARDYYDSSGYLGTFDSW

SEQ ID NO: 6301 - protein, 23 aa, Homo sapiens
CAREKFCNNGSCSWGYYYGMDVW

SEQ ID NO: 6302 - protein, 20 aa, Homo sapiens
CTKDVVDRIEVAGLEGFDVW

SEQ ID NO: 6303 - protein, 19 aa, Homo sapiens
CAKVEGPEYSYGNYYFDYW

SEQ ID NO: 6304 - protein, 21 aa, Homo sapiens
CARYYYDSSGYYYPSYGMDVW

SEQ ID NO: 6305 - protein, 13 aa, Homo sapiens
CQQYNSLLTFLTF

SEQ ID NO: 6306 - protein, 17 aa, Homo sapiens
CAKDRVIIRGRHYMDVW

SEQ ID NO: 6307 - protein, 21 aa, Homo sapiens
CARDWSRTRLTIFGVAGRDYW

SEQ ID NO: 6308 - protein, 21 aa, Homo sapiens
CARDGVVVVAAPNYYYYMDVW

SEQ ID NO: 6309 - protein, 16 aa, Homo sapiens
CAKDLYTVTPEYFQHW

SEQ ID NO: 6310 - protein, 20 aa, Homo sapiens
CARGQRVLRYFDWLLFFDYW

SEQ ID NO: 6311 - protein, 22 aa, Homo sapiens
CARTLIGITFGGVIVKTPFDYW

SEQ ID NO: 6312 - protein, 24 aa, Homo sapiens
CAGLRSFEILTGYYSRLDDAFEIW

SEQ ID NO: 6313 - protein, 22 aa, Homo sapiens
CARESRYYNTNWKFFHDAFDLW

SEQ ID NO: 6314 - protein, 15 aa, Homo sapiens
CFHSRVRGADVFDIW

SEQ ID NO: 6315 - protein, 23 aa, Homo sapiens
CAKRSRYYDVLTGYYLEGGFDYW

SEQ ID NO: 6316 - protein, 19 aa, Homo sapiens
CARGYYYDISGNGGGFDIW

SEQ ID NO: 6317 - protein, 11 aa, Homo sapiens
CARGSLSFDPW

SEQ ID NO: 6318 - protein, 16 aa, Homo sapiens
CARAVRLDGQYYFDYW

SEQ ID NO: 6319 - protein, 15 aa, Homo sapiens
CARVRIAAIDYFEYW

SEQ ID NO: 6320 - protein, 21 aa, Homo sapiens
CARDLDDILTGYLSPHAFDIW

SEQ ID NO: 6321 - protein, 25 aa, Homo sapiens
CARDGLLRYFDWSPRGRYYYYMDVW

SEQ ID NO: 6322 - protein, 16 aa, Homo sapiens
CAKGQFVYTVTTLDYW

SEQ ID NO: 6323 - protein, 23 aa, Homo sapiens
CARDPLNYDILTGYYSYYYMDVW

SEQ ID NO: 6324 - protein, 22 aa, Homo sapiens
CARDPKPSYSSGLLGETYFDYW

SEQ ID NO: 6325 - protein, 25 aa, Homo sapiens
CAKDAQTYYYDSSGYYYGSDYFDYW

SEQ ID NO: 6326 - protein, 27 aa, Homo sapiens
CASGRKYYDSSGIAKPNPESTAPFDYW

SEQ ID NO: 6327 - protein, 13 aa, Homo sapiens
CARGYLKTGFDIW

SEQ ID NO: 6328 - protein, 21 aa, Homo sapiens
CAKFSSGSEVGLPRGLHFDFW

SEQ ID NO: 6329 - protein, 22 aa, Homo sapiens
CARADGSITIFGVVIRNPSDYW

SEQ ID NO: 6330 - protein, 21 aa, Homo sapiens
CARHPPGYCTGGTCYWYFDVW

SEQ ID NO: 6331 - protein, 20 aa, Homo sapiens
CARDGEALKWFGDYHPPDYW

SEQ ID NO: 6332 - protein, 13 aa, Homo sapiens
CMSAHSSGSFWVF

SEQ ID NO: 6333 - protein, 25 aa, Homo sapiens
CARVFTPSGVRYFDWLFQPYYFDYW

SEQ ID NO: 6334 - protein, 16 aa, Homo sapiens
CARERRVGYNGPFDYW

SEQ ID NO: 6335 - protein, 22 aa, Homo sapiens
CARDRDPVRFLYMAARVGFDYW

SEQ ID NO: 6336 - protein, 20 aa, Homo sapiens
CARIPKQWLVLHREYYFDYW

SEQ ID NO: 6337 - protein, 16 aa, Homo sapiens
CAKLPPGSSGWYFDLW

SEQ ID NO: 6338 - protein, 11 aa, Homo sapiens
CLQHDNFLGRF

SEQ ID NO: 6339 - protein, 20 aa, Homo sapiens
CARDNRGGSSWSHRNWFDPW

SEQ ID NO: 6340 - protein, 13 aa, Homo sapiens
CARNGETNAFDIW

SEQ ID NO: 6341 - protein, 21 aa, Homo sapiens
CARAPSSRPRSIAVAGLFDYW

SEQ ID NO: 6342 - protein, 17 aa, Homo sapiens
CAKDIGIVVGQAEFDYW

SEQ ID NO: 6343 - protein, 17 aa, Homo sapiens
CAKDIIEGYSRFGFDYW

SEQ ID NO: 6344 - protein, 22 aa, Homo sapiens
CARDRSLRYFDWLSQIDAFDIW

SEQ ID NO: 6345 - protein, 21 aa, Homo sapiens
CASHTLLRYFDWLSPDAFDIW

SEQ ID NO: 6346 - protein, 23 aa, Homo sapiens
CAHRQFRGWNYYPADRNNWFDPW

SEQ ID NO: 6347 - protein, 10 aa, Homo sapiens
CTTFSRPDYW

SEQ ID NO: 6348 - protein, 18 aa, Homo sapiens
CARDSRPRFGDFLPFDLW

SEQ ID NO: 6349 - protein, 19 aa, Homo sapiens
CARDDIVVVPANPNNFDYW

SEQ ID NO: 6350 - protein, 14 aa, Homo sapiens
CAKLGGTRPRFDYW

SEQ ID NO: 6351 - protein, 15 aa, Homo sapiens
CARDPRVVPDAFDIW

SEQ ID NO: 6352 - protein, 14 aa, Homo sapiens
CTTLLGSWQPLDYW

SEQ ID NO: 6353 - protein, 13 aa, Homo sapiens
CQQYNNWFRGGTF

SEQ ID NO: 6354 - protein, 15 aa, Homo sapiens
CAKGDESSGYYADFW

SEQ ID NO: 6355 - protein, 15 aa, Homo sapiens
CARAGGQWLPYFDYW

SEQ ID NO: 6356 - protein, 19 aa, Homo sapiens
CAKDRSVIQLWSEVDFDYW

SEQ ID NO: 6357 - protein, 16 aa, Homo sapiens
CARDGIAVAGFSFDYW

SEQ ID NO: 6358 - protein, 14 aa, Homo sapiens
CARLNWNYESFDYW

SEQ ID NO: 6359 - protein, 15 aa, Homo sapiens
CAKTGTYGDGAFDIW

SEQ ID NO: 6360 - protein, 27 aa, Homo sapiens
CARDREDCSSTSCRWGWYYYYYGMDVW

SEQ ID NO: 6361 - protein, 20 aa, Homo sapiens
CARQFPLFMIVVVPTYFDYW

SEQ ID NO: 6362 - protein, 25 aa, Homo sapiens
CARDAHSRKYYYDSSGYYGDAFDIW

SEQ ID NO: 6363 - protein, 17 aa, Homo sapiens
CARSYYYGSGNIVFDYW

SEQ ID NO: 6364 - protein, 15 aa, Homo sapiens
CASVGVWFGEFLDYW

SEQ ID NO: 6365 - protein, 13 aa, Homo sapiens
CAGHKRMAIFDIW

SEQ ID NO: 6366 - protein, 21 aa, Homo sapiens
CARHKIYCSGGSCYSFYFDYW

SEQ ID NO: 6367 - protein, 20 aa, Homo sapiens
CAKIPRWGITMESIHYFDYW

SEQ ID NO: 6368 - protein, 22 aa, Homo sapiens
CARVKSSYCSRGKCNRYAFDIW

SEQ ID NO: 6369 - protein, 17 aa, Homo sapiens
CTRPSGYNYGLGGFDLW

SEQ ID NO: 6370 - protein, 27 aa, Homo sapiens
CARVAPVLRYFDWLVTTTGVVPVFDYW

SEQ ID NO: 6371 - protein, 26 aa, Homo sapiens
CARKCLGYSSGWYGVSDYYQNWFDPW

SEQ ID NO: 6372 - protein, 14 aa, Homo sapiens
CARDFGSGRIFDYW

SEQ ID NO: 6373 - protein, 20 aa, Homo sapiens
CARTRLIVVAGNDAVHFDYW

SEQ ID NO: 6374 - protein, 22 aa, Homo sapiens
CARDNRPYSGYDYYYYYYMDVW

SEQ ID NO: 6375 - protein, 18 aa, Homo sapiens
CARLGYGDYFLKNAFDIW

SEQ ID NO: 6376 - protein, 17 aa, Homo sapiens
CARDEDDYGDYRSFDYW

SEQ ID NO: 6377 - protein, 15 aa, Homo sapiens
CAKTDSSGYYLLDYW

SEQ ID NO: 6378 - protein, 24 aa, Homo sapiens
CARDQPSPQSLYQPLLYAQPFDYW

SEQ ID NO: 6379 - protein, 25 aa, Homo sapiens
CAHSKTILVRGVIIVYQGVVTFDIW

SEQ ID NO: 6380 - protein, 16 aa, Homo sapiens
CARTLAVTRGLPYDYW

SEQ ID NO: 6381 - protein, 16 aa, Homo sapiens
CAKGPFTISLYYFDYW

SEQ ID NO: 6382 - protein, 18 aa, Homo sapiens
CARGVGAVTTIKYYFDYW

SEQ ID NO: 6383 - protein, 17 aa, Homo sapiens
CARLVPGAMGRNWFDPW

SEQ ID NO: 6384 - protein, 18 aa, Homo sapiens
CARDPDDYFTVGDAFDIW

SEQ ID NO: 6385 - protein, 14 aa, Homo sapiens
CAKALIGTYYFDYW

SEQ ID NO: 6386 - protein, 16 aa, Homo sapiens
CARLMGHDYGYYFDHW

SEQ ID NO: 6387 - protein, 17 aa, Homo sapiens
CARDYSSSWYVEGIDYW

SEQ ID NO: 6388 - protein, 22 aa, Homo sapiens
CAKRRNYDFWSDPYYYYGMDVW

SEQ ID NO: 6389 - protein, 20 aa, Homo sapiens
CARHKAGRWLRSRGDWFDPW

SEQ ID NO: 6390 - protein, 15 aa, Homo sapiens
CARGYKRTFWFFDLW

SEQ ID NO: 6391 - protein, 17 aa, Homo sapiens
CARWADSGSYYDGFDIW

SEQ ID NO: 6392 - protein, 15 aa, Homo sapiens
CARSNETFEWYYDTW

SEQ ID NO: 6393 - protein, 17 aa, Homo sapiens
CARVDPTIVADRGFDIW

SEQ ID NO: 6394 - protein, 25 aa, Homo sapiens
CARDRGEELRYFDWLSPVHNWFDPW

SEQ ID NO: 6395 - protein, 15 aa, Homo sapiens
CASLPDYGDYPFDYW

SEQ ID NO: 6396 - protein, 18 aa, Homo sapiens
CGRDRPGGTSGNSWFDPW

SEQ ID NO: 6397 - protein, 21 aa, Homo sapiens
CAIGWRRWYVARDNHDAFDIW

SEQ ID NO: 6398 - protein, 18 aa, Homo sapiens
CARAGITIFGVVRQFDYW

SEQ ID NO: 6399 - protein, 13 aa, Homo sapiens
CARNYGGSTFDYW

SEQ ID NO: 6400 - protein, 16 aa, Homo sapiens
CARLWFGELLDAFDIW

SEQ ID NO: 6401 - protein, 20 aa, Homo sapiens
CARDSTTTVPYYYYYYMDVW

SEQ ID NO: 6402 - protein, 15 aa, Homo sapiens
CARSSDGWYVWFDSW

SEQ ID NO: 6403 - protein, 16 aa, Homo sapiens
CARSRVVPAADYMDVW

SEQ ID NO: 6404 - protein, 20 aa, Homo sapiens
CARARSGWWLTTPDYYFDYW

SEQ ID NO: 6405 - protein, 17 aa, Homo sapiens
CARMIAVGGLAYYFDFW

SEQ ID NO: 6406 - protein, 19 aa, Homo sapiens
CARTVMDAFGGVILPFDYW

SEQ ID NO: 6407 - protein, 22 aa, Homo sapiens
CAKDIGRYCNSVSCYPYYFDFW

SEQ ID NO: 6408 - protein, 16 aa, Homo sapiens
CVKVGFGDYGGGFDDW

SEQ ID NO: 6409 - protein, 16 aa, Homo sapiens
CARRNWNYVLYYFDYW

SEQ ID NO: 6410 - protein, 21 aa, Homo sapiens
CARGGDFWSGYYVISGGNDYW

SEQ ID NO: 6411 - protein, 19 aa, Homo sapiens
CARKADSSGWQPANYFDYW

SEQ ID NO: 6412 - protein, 14 aa, Homo sapiens
CTKSEQMAGEFDSW

SEQ ID NO: 6413 - protein, 13 aa, Homo sapiens
CARFWVLEGFDYW

SEQ ID NO: 6414 - protein, 18 aa, Homo sapiens
CSRGSFDTSPEYNWFDPW

SEQ ID NO: 6415 - protein, 19 aa, Homo sapiens
CARGDGVLLWFGEVWFDPW

SEQ ID NO: 6416 - protein, 26 aa, Homo sapiens
CARGAPVGFWSGSPINYYYYYGMDVW

SEQ ID NO: 6417 - protein, 19 aa, Homo sapiens
CARFRAVSSWPHSAAFDYW

SEQ ID NO: 6418 - protein, 20 aa, Homo sapiens
CARHSGSTYYDSSGYHIDYW

SEQ ID NO: 6419 - protein, 19 aa, Homo sapiens
CARHSGYSYGPPWSAFDIW

SEQ ID NO: 6420 - protein, 18 aa, Homo sapiens
CARAPRITMGGLNWFDPW

SEQ ID NO: 6421 - protein, 15 aa, Homo sapiens
CARVAPHYYGAFDLW

SEQ ID NO: 6422 - protein, 22 aa, Homo sapiens
CARGPRIVVVPAAMPDDAFDIW

SEQ ID NO: 6423 - protein, 16 aa, Homo sapiens
CARDLIAVAGTTPDYW

SEQ ID NO: 6424 - protein, 15 aa, Homo sapiens
CARDSVGESDLFDIW

SEQ ID NO: 6425 - protein, 22 aa, Homo sapiens
CARASGERITIFGVVIQSFDYW

SEQ ID NO: 6426 - protein, 17 aa, Homo sapiens
CAKDRYSSSWNDAFDIW

SEQ ID NO: 6427 - protein, 17 aa, Homo sapiens
CARVPQGIAAEGSFDYW

SEQ ID NO: 6428 - protein, 16 aa, Homo sapiens
CVRNGDIAAAGTADYW

SEQ ID NO: 6429 - protein, 13 aa, Homo sapiens
CAREPEEDYFDYW

SEQ ID NO: 6430 - protein, 18 aa, Homo sapiens
CAKDVRGVIINPGAFDIW

SEQ ID NO: 6431 - protein, 17 aa, Homo sapiens
CARGSMVRGRSPSLDYW

SEQ ID NO: 6432 - protein, 18 aa, Homo sapiens
CARGLYYYGSGQRGFDPW

SEQ ID NO: 6433 - protein, 19 aa, Homo sapiens
CARDFFGVSQQLGGYFDLW

SEQ ID NO: 6434 - protein, 11 aa, Homo sapiens
CQVYGSSLLAF

SEQ ID NO: 6435 - protein, 18 aa, Homo sapiens
CARMATNPHGYYWYFDLW

SEQ ID NO: 6436 - protein, 20 aa, Homo sapiens
CARGGNIVVVTAIPSDFDYW

SEQ ID NO: 6437 - protein, 22 aa, Homo sapiens
CARDDYVWGSYRYGFFNWFDPW

SEQ ID NO: 6438 - protein, 16 aa, Homo sapiens
CAKGRWMYSSSWYDYW

SEQ ID NO: 6439 - protein, 18 aa, Homo sapiens
CAREGSGGTELPYYFDYW

SEQ ID NO: 6440 - protein, 16 aa, Homo sapiens
CARGSSILWWWPPDYW

SEQ ID NO: 6441 - protein, 20 aa, Homo sapiens
CAKDIISSSWNKGSGVFDYW

SEQ ID NO: 6442 - protein, 11 aa, Homo sapiens
CAGLHDYADYW

SEQ ID NO: 6443 - protein, 19 aa, Homo sapiens
CARANRDYYDSSVYYFDYW

SEQ ID NO: 6444 - protein, 20 aa, Homo sapiens
CARHRIPSYDFWSGSGFDSW

SEQ ID NO: 6445 - protein, 17 aa, Homo sapiens
CQTMYSTSQWKDAFDIW

SEQ ID NO: 6446 - protein, 19 aa, Homo sapiens
CARYIRIFGVVSGRSFDYW

SEQ ID NO: 6447 - protein, 15 aa, Homo sapiens
CATIRLERRAYFEYW

SEQ ID NO: 6448 - protein, 16 aa, Homo sapiens
CAKDRNTVTIYYFDYW

SEQ ID NO: 6449 - protein, 15 aa, Homo sapiens
CAHRLSVAGPYFDYW

SEQ ID NO: 6450 - protein, 18 aa, Homo sapiens
CARPLGGDPRLRYAFDIW

SEQ ID NO: 6451 - protein, 22 aa, Homo sapiens
CARMRRDFALFYTSSWHYLDYW

SEQ ID NO: 6452 - protein, 15 aa, Homo sapiens
CVRDLGQWLVQADYW

SEQ ID NO: 6453 - protein, 11 aa, Homo sapiens
CATWDSRTWVF

SEQ ID NO: 6454 - protein, 12 aa, Homo sapiens
CQQYTSSSGHSF

SEQ ID NO: 6455 - protein, 19 aa, Homo sapiens
CAGDHRGLVWFGTDGFDIW

SEQ ID NO: 6456 - protein, 18 aa, Homo sapiens
CARDQRGYYDSSGYFDYW

SEQ ID NO: 6457 - protein, 17 aa, Homo sapiens
CAMTMNYDSSGYGFVYW

SEQ ID NO: 6458 - protein, 19 aa, Homo sapiens
CAHRRRRQWFGESPAFDIW

SEQ ID NO: 6459 - protein, 19 aa, Homo sapiens
CARDRIDSSWWGMDAFDIW

SEQ ID NO: 6460 - protein, 14 aa, Homo sapiens
CARSEGMLRSVDYW

SEQ ID NO: 6461 - protein, 15 aa, Homo sapiens
CTIWYGDYFYYFHSW

SEQ ID NO: 6462 - protein, 18 aa, Homo sapiens
CARGGDSSSWHNNWFDPW

SEQ ID NO: 6463 - protein, 20 aa, Homo sapiens
CVKEIGQQVGGLWASAFDVW

SEQ ID NO: 6464 - protein, 16 aa, Homo sapiens
CARPLTRWLRHAFDVW

SEQ ID NO: 6465 - protein, 25 aa, Homo sapiens
CARGRSRLEDIVVVVAALSYYFDYW

SEQ ID NO: 6466 - protein, 19 aa, Homo sapiens
CAAARRITIFGVVGEFDYW

SEQ ID NO: 6467 - protein, 16 aa, Homo sapiens
CAATYYDILTGYLDYW

SEQ ID NO: 6468 - protein, 15 aa, Homo sapiens
CAKDIGYSSGFPDYW

SEQ ID NO: 6469 - protein, 20 aa, Homo sapiens
CARWGDYYDSSGQHTGFDYW

SEQ ID NO: 6470 - protein, 18 aa, Homo sapiens
CARASVGAWLVIEHFDLW

SEQ ID NO: 6471 - protein, 20 aa, Homo sapiens
CARGIKVRGVIIRGGWFDPW

SEQ ID NO: 6472 - protein, 15 aa, Homo sapiens
CAKLSWDYVDGMDVW

SEQ ID NO: 6473 - protein, 19 aa, Homo sapiens
CARSSGYSYGSYRDHFDYW

SEQ ID NO: 6474 - protein, 15 aa, Homo sapiens
CAKDWDYSFDAFDIW

SEQ ID NO: 6475 - protein, 21 aa, Homo sapiens
CASSLYYDSSGPEDTGPFDYW

SEQ ID NO: 6476 - protein, 17 aa, Homo sapiens
CAKAGAVANPFEAVDVW

SEQ ID NO: 6477 - protein, 17 aa, Homo sapiens
CARGPVISSSWYGLDYW

SEQ ID NO: 6478 - protein, 15 aa, Homo sapiens
CAKAPPEVLGYFDSW

SEQ ID NO: 6479 - protein, 21 aa, Homo sapiens
CARDIIYQGVAPFGPDAFDIW

SEQ ID NO: 6480 - protein, 22 aa, Homo sapiens
CARHVLGSGSYRLDYYYGMDVW

SEQ ID NO: 6481 - protein, 16 aa, Homo sapiens
CARDRSGYDFRNGDYW

SEQ ID NO: 6482 - protein, 15 aa, Homo sapiens
CARDGNRYSYAFDYW

SEQ ID NO: 6483 - protein, 19 aa, Homo sapiens
CARDLPIYCSGGSCYVDYW

SEQ ID NO: 6484 - protein, 15 aa, Homo sapiens
CAKARVIISPHFDYW

SEQ ID NO: 6485 - protein, 18 aa, Homo sapiens
CAKDYNSYGYWTGFWDYW

SEQ ID NO: 6486 - protein, 15 aa, Homo sapiens
CARDAASLTGSLDYW

SEQ ID NO: 6487 - protein, 17 aa, Homo sapiens
CARNYGSGNFYYAFDIW

SEQ ID NO: 6488 - protein, 20 aa, Homo sapiens
CARDRTGSYYDYYYYYMDVW

SEQ ID NO: 6489 - protein, 22 aa, Homo sapiens
CVRGSVHRPLTDSHLNWYFDLW

SEQ ID NO: 6490 - protein, 15 aa, Homo sapiens
CARAGYGPAEYFQHW

SEQ ID NO: 6491 - protein, 22 aa, Homo sapiens
CARDRLSTFDWLLSTPDAFDIW

SEQ ID NO: 6492 - protein, 12 aa, Homo sapiens [sequence omitted]

SEQ ID NO: 6493 - protein, 16 aa, Homo sapiens
CARLSGALGTMIYDYW

SEQ ID NO: 6494 - protein, 18 aa, Homo sapiens
CARNRFTSGWYPDYFDYW

SEQ ID NO: 6495 - protein, 20 aa, Homo sapiens
CARVSFGSGSYPYYYGMDVW

SEQ ID NO: 6496 - protein, 25 aa, Homo sapiens
CARDATSCSGGGCYTRSRAEYFQHW

SEQ ID NO: 6497 - protein, 16 aa, Homo sapiens
CARDSRGVFSGSRDYW

SEQ ID NO: 6498 - protein, 17 aa, Homo sapiens
CATGITILRGTPYFDYW

SEQ ID NO: 6499 - protein, 20 aa, Homo sapiens
CAREINVHVLRSDIGNFDYW

SEQ ID NO: 6500 - protein, 16 aa, Homo sapiens
CAKMRATTVTTRDDYW

SEQ ID NO: 6501 - protein, 17 aa, Homo sapiens
CASLWFGELWDNWFDPW

SEQ ID NO: 6502 - protein, 22 aa, Homo sapiens
CTRDRFGAYDSSGFDLYYFDYW

SEQ ID NO: 6503 - protein, 19 aa, Homo sapiens
CARADLVCSGGSCDWFDPW

SEQ ID NO: 6504 - protein, 18 aa, Homo sapiens
CARDEGLYSSSQRAFDIW

SEQ ID NO: 6505 - protein, 20 aa, Homo sapiens
CARVRSQFRSSGWDYYFDYW

SEQ ID NO: 6506 - protein, 18 aa, Homo sapiens
CARGTSIQQWLVRHFDYW

SEQ ID NO: 6507 - protein, 13 aa, Homo sapiens
CAYDYGGNLFDYW

SEQ ID NO: 6508 - protein, 13 aa, Homo sapiens
CASIQLSPYVDYW

SEQ ID NO: 6509 - protein, 17 aa, Homo sapiens
CARILTPQSGSWWFDPW

SEQ ID NO: 6510 - protein, 23 aa, Homo sapiens
CAREGYSSSWYSKLELNDAFDIW

SEQ ID NO: 6511 - protein, 17 aa, Homo sapiens
CAKGAYSYGEHRSVDYW

SEQ ID NO: 6512 - protein, 13 aa, Homo sapiens
CARESQLLFLDYW

SEQ ID NO: 6513 - protein, 18 aa, Homo sapiens
CAKHARLYTSSWPYFDYW

SEQ ID NO: 6514 - protein, 18 aa, Homo sapiens
CARLGYIVATIPSGFDYW

SEQ ID NO: 6515 - protein, 15 aa, Homo sapiens
CARATTRSWSNFDYW

SEQ ID NO: 6516 - protein, 16 aa, Homo sapiens
CAKTPESALSWYFDYW

SEQ ID NO: 6517 - protein, 17 aa, Homo sapiens
CTREQQLLPNSIGFDPW

SEQ ID NO: 6518 - protein, 18 aa, Homo sapiens
CARDPDEVGWELSPFDYW

SEQ ID NO: 6519 - protein, 29 aa, Homo sapiens
CARDGDGSTPNGYCSGGSCWKPADAFDIW

SEQ ID NO: 6520 - protein, 19 aa, Homo sapiens
CARIFSSWTPYYYYYMDVW

SEQ ID NO: 6521 - protein, 14 aa, Homo sapiens
CARHPRRLDPFDYW

SEQ ID NO: 6522 - protein, 22 aa, Homo sapiens
CAKVENYYDSSGYYSNDAYDMW

SEQ ID NO: 6523 - protein, 21 aa, Homo sapiens
CQQYESYSPTFGQGTNLEPTF

SEQ ID NO: 6524 - protein, 15 aa, Homo sapiens
CAHSNIVATVNFDYW

SEQ ID NO: 6525 - protein, 21 aa, Homo sapiens
CARPQRVIIISGTERDAFDMW

SEQ ID NO: 6526 - protein, 15 aa, Homo sapiens
CAVWDDSLNDLNWLF

SEQ ID NO: 6527 - protein, 16 aa, Homo sapiens
CARDSGSSSSFAFDIW

SEQ ID NO: 6528 - protein, 23 aa, Homo sapiens
CARHSIRLFYGSGSYPTRGIDYW

SEQ ID NO: 6529 - protein, 12 aa, Homo sapiens
CQVFDSSPAMIF

SEQ ID NO: 6530 - protein, 13 aa, Homo sapiens
CQQDYNLPPEFTF

SEQ ID NO: 6531 - protein, 15 aa, Homo sapiens
CARSEIDIVPILDYW

SEQ ID NO: 6532 - protein, 15 aa, Homo sapiens
CARGHKYSSWYISYW

SEQ ID NO: 6533 - protein, 15 aa, Homo sapiens
CARLPYILTGRFDYW

SEQ ID NO: 6534 - protein, 17 aa, Homo sapiens
CATSTSYNTGHYYFDYW

SEQ ID NO: 6535 - protein, 13 aa, Homo sapiens
CQKYTTAPRGITF

SEQ ID NO: 6536 - protein, 16 aa, Homo sapiens
CARDGRTPAGVRFDYW

SEQ ID NO: 6537 - protein, 19 aa, Homo sapiens
CARVPYYSGSGSPYYFDYW

SEQ ID NO: 6538 - protein, 25 aa, Homo sapiens
CAKDPPEADYDYVWGSYRSYYFDYW

SEQ ID NO: 6539 - protein, 16 aa, Homo sapiens
CANVWIVEDHDAFDIW

SEQ ID NO: 6540 - protein, 19 aa, Homo sapiens
CARTHYDILTGYLTIFDYW

SEQ ID NO: 6541 - protein, 16 aa, Homo sapiens
CAKWFMYSSGSYVDNW

SEQ ID NO: 6542 - protein, 26 aa, Homo sapiens
CARDVDPRAGIAQWLVPIVNYWFDPW

SEQ ID NO: 6543 - protein, 20 aa, Homo sapiens
CAKAAQFSMIVVVITYFDYW

SEQ ID NO: 6544 - protein, 16 aa, Homo sapiens
CARPMSLNWDDAFDIW

SEQ ID NO: 6545 - protein, 13 aa, Homo sapiens
CLQHNSYPPADTF

SEQ ID NO: 6546 - protein, 14 aa, Homo sapiens
CAGDIAAAGFFDHW

SEQ ID NO: 6547 - protein, 14 aa, Homo sapiens
CARDVRWLQMADYW

SEQ ID NO: 6548 - protein, 20 aa, Homo sapiens
CARGMMGSPANYYYSYMDVW

SEQ ID NO: 6549 - protein, 23 aa, Homo sapiens
CARGHAFNFWRSPDLKNYALDVW

SEQ ID NO: 6550 - protein, 18 aa, Homo sapiens
CARGHRGSNYYYYYMDVW

SEQ ID NO: 6551 - protein, 23 aa, Homo sapiens
CARSDVRGYSYGRDYYYYYMDVW

SEQ ID NO: 6552 - protein, 14 aa, Homo sapiens
CASDSVATKEFDYW

SEQ ID NO: 6553 - protein, 15 aa, Homo sapiens [sequence omitted]

SEQ ID NO: 6554 - protein, 17 aa, Homo sapiens
CARFGLDFTSPRAFDYW

SEQ ID NO: 6555 - protein, 21 aa, Homo sapiens
CARVAVYCSSTSCYGWWFDPW

SEQ ID NO: 6556 - protein, 17 aa, Homo sapiens
CTKALYYDILTAYLDSW

SEQ ID NO: 6557 - protein, 19 aa, Homo sapiens
CARVRDQYYYDSSGPFDIW

SEQ ID NO: 6558 - protein, 23 aa, Homo sapiens
CARDPWHYYDSSGYYPDARFDYW

SEQ ID NO: 6559 - protein, 18 aa, Homo sapiens
CARVLSLYSSTWDAFDIW

SEQ ID NO: 6560 - protein, 23 aa, Homo sapiens
CARHVAHCSSTSCSYYYYYMDVW

SEQ ID NO: 6561 - protein, 21 aa, Homo sapiens
CANFRAPSSWYVYYYYGMDVW

SEQ ID NO: 6562 - protein, 13 aa, Homo sapiens
CASSVAGITADYW

SEQ ID NO: 6563 - protein, 17 aa, Homo sapiens
CARVPRQSYYNYGMDVW

SEQ ID NO: 6564 - protein, 19 aa, Homo sapiens
CARHHPATVAGKKYYFDQW

SEQ ID NO: 6565 - protein, 14 aa, Homo sapiens
CASQVDTAMVFDYW

SEQ ID NO: 6566 - protein, 21 aa, Homo sapiens
CARDREHSSGWYYERYGMDVW

SEQ ID NO: 6567 - protein, 20 aa, Homo sapiens
CASRRGEVLLLRVLQYFDYW

SEQ ID NO: 6568 - protein, 11 aa, Homo sapiens
CIQGTQWPLIF

SEQ ID NO: 6569 - protein, 19 aa, Homo sapiens
CARFGRYSSGWYLDPTDYW

SEQ ID NO: 6570 - protein, 16 aa, Homo sapiens
CARHLNDYGDFRDDYW

SEQ ID NO: 6571 - protein, 17 aa, Homo sapiens
CATYYYGSGRNDYFDYW

SEQ ID NO: 6572 - protein, 13 aa, Homo sapiens
CTRLVPSSGCDYW

SEQ ID NO: 6573 - protein, 23 aa, Homo sapiens
CARILMGYCSGGSCYGIDAFDIW

SEQ ID NO: 6574 - protein, 29 aa, Homo sapiens
CAGQARYDYVWGSYGPAQKRVVSNWFDPW

SEQ ID NO: 6575 - protein, 17 aa, Homo sapiens
CFVLPSEGDVGDAFDIW

SEQ ID NO: 6576 - protein, 17 aa, Homo sapiens
CARDISSWYSHWYFDLW

SEQ ID NO: 6577 - protein, 18 aa, Homo sapiens
CARHLTDTAMVNNWFDPW

SEQ ID NO: 6578 - protein, 17 aa, Homo sapiens
CTIITMVRGAAWETDYW

SEQ ID NO: 6579 - protein, 21 aa, Homo sapiens
CARHAVGTIFGVVIIQAFDIW

SEQ ID NO: 6580 - protein, 12 aa, Homo sapiens
CANFPAAGFDYW

SEQ ID NO: 6581 - protein, 17 aa, Homo sapiens
CARDPTYYYGSGSNDYW

SEQ ID NO: 6582 - protein, 18 aa, Homo sapiens
CARVRTVVAAVDDAFDIW

SEQ ID NO: 6583 - protein, 21 aa, Homo sapiens
CARDRGYSGYDWLRAYYMDVW

SEQ ID NO: 6584 - protein, 16 aa, Homo sapiens
CAVLIWFGDLCYFDYW

SEQ ID NO: 6585 - protein, 14 aa, Homo sapiens
CARHSEGDTGCDYW

SEQ ID NO: 6586 - protein, 19 aa, Homo sapiens
CAKGLSGWYDYYYYGMDVW

SEQ ID NO: 6587 - protein, 27 aa, Homo sapiens
CARGRRGAISLDMARELKRGPKIFDYW

SEQ ID NO: 6588 - protein, 19 aa, Homo sapiens
CAKGRPYSGSYSGDAFDIW

SEQ ID NO: 6589 - protein, 17 aa, Homo sapiens
CATAIYESDVWYWFDHW

SEQ ID NO: 6590 - protein, 20 aa, Homo sapiens
CAKEATDTMVRGVLDAFDIW

SEQ ID NO: 6591 - protein, 17 aa, Homo sapiens
CAAVPLGSFRPNYMDVW

SEQ ID NO: 6592 - protein, 16 aa, Homo sapiens
CATPVFVAGSYYFDHW

SEQ ID NO: 6593 - protein, 20 aa, Homo sapiens
CARESESGSSYGYTAVFEYW

SEQ ID NO: 6594 - protein, 17 aa, Homo sapiens
CASFGFVDSSGALFDYW

SEQ ID NO: 6595 - protein, 17 aa, Homo sapiens
CTRDFNSFGSRWGFDYW

SEQ ID NO: 6596 - protein, 12 aa, Homo sapiens [sequence omitted]

SEQ ID NO: 6597 - protein, 18 aa, Homo sapiens
CAREYYDILTGLTPYDYW

SEQ ID NO: 6598 - protein, 25 aa, Homo sapiens
CARHPRIPYLPYGDYRWAGFYMDVW

SEQ ID NO: 6599 - protein, 18 aa, Homo sapiens
CAKSPAGQWLVPRSFDYW

SEQ ID NO: 6600 - protein, 12 aa, Homo sapiens
CAHHNSGVFDVW

SEQ ID NO: 6601 - protein, 14 aa, Homo sapiens
CAHRHGYYDAFDIW

SEQ ID NO: 6602 - protein, 21 aa, Homo sapiens
CARQETVSLGGRKRTTWFDPW

SEQ ID NO: 6603 - protein, 14 aa, Homo sapiens
CLAWDTSPRAFWVF

SEQ ID NO: 6604 - protein, 18 aa, Homo sapiens
CAKDVTMIVVVITAFDYW

SEQ ID NO: 6605 - protein, 21 aa, Homo sapiens
CARGPITFGGVRVFAGLKDYW

SEQ ID NO: 6606 - protein, 15 aa, Homo sapiens
CAKRYSSGWYGVDYW

SEQ ID NO: 6607 - protein, 25 aa, Homo sapiens
CARDGSLGLRYFDWRAPGPNWFDPW

SEQ ID NO: 6608 - protein, 23 aa, Homo sapiens
CARHLHMGYDDSSGYHISLFDYW

SEQ ID NO: 6609 - protein, 18 aa, Homo sapiens
CAKAVLRAYDWEDAFDFW

SEQ ID NO: 6610 - protein, 16 aa, Homo sapiens
CAKLNYQFSSGWSDYW

SEQ ID NO: 6611 - protein, 16 aa, Homo sapiens
CARSHVVVTAIPFDYW

SEQ ID NO: 6612 - protein, 17 aa, Homo sapiens
CATVAAYYGSGRLPDYW

SEQ ID NO: 6613 - protein, 20 aa, Homo sapiens
CARQRGYCSSTSCYDAFDIW

SEQ ID NO: 6614 - protein, 19 aa, Homo sapiens
CARKVPVTGPLVVSTFDIW

SEQ ID NO: 6615 - protein, 15 aa, Homo sapiens
CARSRFYGPGSFDSW

SEQ ID NO: 6616 - protein, 18 aa, Homo sapiens
CARDGGEQWLVLSYFDYW

SEQ ID NO: 6617 - protein, 13 aa, Homo sapiens
CARPDFDGSGDYW

SEQ ID NO: 6618 - protein, 16 aa, Homo sapiens
CAIDLDGYGKEGFDIW

SEQ ID NO: 6619 - protein, 18 aa, Homo sapiens
CATTQTPVTASPGGGDYW

SEQ ID NO: 6620 - protein, 15 aa, Homo sapiens
CARTSDSANTNFDYW

SEQ ID NO: 6621 - protein, 20 aa, Homo sapiens
CARVYCGGDCYSGGNWFDPW

SEQ ID NO: 6622 - protein, 17 aa, Homo sapiens
CARDRQLWDYYYGMDVW

SEQ ID NO: 6623 - protein, 23 aa, Homo sapiens
CARVSSPANYVWGSYRFGYFDYW

SEQ ID NO: 6624 - protein, 12 aa, Homo sapiens
CQQSYSALKITF

SEQ ID NO: 6625 - protein, 17 aa, Homo sapiens
CARAQTNYYYYYYMDVW

SEQ ID NO: 6626 - protein, 14 aa, Homo sapiens
CARKVRGDFYMDVW

SEQ ID NO: 6627 - protein, 14 aa, Homo sapiens
CAKDPPADYGGDYW

SEQ ID NO: 6628 - protein, 27 aa, Homo sapiens
CARASQFLPRERKYYYDSSGYQAFDYW

SEQ ID NO: 6629 - protein, 15 aa, Homo sapiens
CTRRVWFGELARDYW

SEQ ID NO: 6630 - protein, 18 aa, Homo sapiens
CVRSRRYFDWTLPPSDYW

SEQ ID NO: 6631 - protein, 14 aa, Homo sapiens
CAREDTVRGKFDYW

SEQ ID NO: 6632 - protein, 9 aa, Homo sapiens
CGYSPPYTF

SEQ ID NO: 6633 - protein, 20 aa, Homo sapiens
CALGGFGTAMIKGGRWFDPW

SEQ ID NO: 6634 - protein, 19 aa, Homo sapiens
CAKDPVLRYFDWFRDFDYW

SEQ ID NO: 6635 - protein, 23 aa, Homo sapiens
CARASTLGYYSDSGTHFDTFDLW

SEQ ID NO: 6636 - protein, 18 aa, Homo sapiens
CARDLWGHGDPKVGSDYW

SEQ ID NO: 6637 - protein, 21 aa, Homo sapiens
CATSSPHCSSTSCFTNWFDPW

SEQ ID NO: 6638 - protein, 27 aa, Homo sapiens
CAKAPAPNIAAAGIPFRYAKIYYFDYW

SEQ ID NO: 6639 - protein, 20 aa, Homo sapiens
CAKAWDYYGSGSYYNPFDPW

SEQ ID NO: 6640 - protein, 13 aa, Homo sapiens [sequence omitted]

SEQ ID NO: 6641 - protein, 24 aa, Homo sapiens
CARIWIYDSSGYFFYATPYYFDYW

SEQ ID NO: 6642 - protein, 24 aa, Homo sapiens
CARGYKITMIVVVIPITTHWFDPW

SEQ ID NO: 6643 - protein, 15 aa, Homo sapiens
CVSTTPSGSNWFDPW

SEQ ID NO: 6644 - protein, 17 aa, Homo sapiens
CATVWYTAMVGYYFDLW

SEQ ID NO: 6645 - protein, 20 aa, Homo sapiens
CARGPPSQLWFGELLPFDYW

SEQ ID NO: 6646 - protein, 22 aa, Homo sapiens
CARDIESGSSGWYYYYYGMDVW

SEQ ID NO: 6647 - protein, 24 aa, Homo sapiens
CARGQRKELIVVVISYYYYGMDVW

SEQ ID NO: 6648 - protein, 19 aa, Homo sapiens
CARGLQSVAMVKTYYFDYW

SEQ ID NO: 6649 - protein, 16 aa, Homo sapiens
CARDGRSDSYNWIDPW

SEQ ID NO: 6650 - protein, 20 aa, Homo sapiens
CATGRPPVLLWFGDDWFDPW

SEQ ID NO: 6651 - protein, 14 aa, Homo sapiens
CASNNNWIYAFDIW

SEQ ID NO: 6652 - protein, 20 aa, Homo sapiens
CARHKRPTYSLQSYYYMDVW

SEQ ID NO: 6653 - protein, 13 aa, Homo sapiens
CARDPRGVAADYW

SEQ ID NO: 6654 - protein, 16 aa, Homo sapiens [sequence omitted]

SEQ ID NO: 6655 - protein, 23 aa, Homo sapiens
CARVTRQLWSLVGLPRYYYMDVW

SEQ ID NO: 6656 - protein, 15 aa, Homo sapiens
CAKVLTPVYYENDYW

SEQ ID NO: 6657 - protein, 17 aa, Homo sapiens
CARALVMVAATGFFDYW

SEQ ID NO: 6658 - protein, 20 aa, Homo sapiens
CARINQKITMIVYNNWFDPW

SEQ ID NO: 6659 - protein, 21 aa, Homo sapiens
CAKDRRTSSLRIAVAGDFDYW

SEQ ID NO: 6660 - protein, 16 aa, Homo sapiens
CAKGKQWLSEDAFDIW

SEQ ID NO: 6661 - protein, 14 aa, Homo sapiens
CAKVDRNSSGWDYW

SEQ ID NO: 6662 - protein, 13 aa, Homo sapiens
CARDPAGYGFGYW

SEQ ID NO: 6663 - protein, 16 aa, Homo sapiens
CARLNGFGEFWYFDLW

SEQ ID NO: 6664 - protein, 14 aa, Homo sapiens
CARAGWGLVPFDNW

SEQ ID NO: 6665 - protein, 15 aa, Homo sapiens
CAHRRTAMVTVYDYW

SEQ ID NO: 6666 - protein, 19 aa, Homo sapiens
CARLHLDWDTVTTPYFDLW

SEQ ID NO: 6667 - protein, 16 aa, Homo sapiens
CAPAPYDILTGRDDYW

SEQ ID NO: 6668 - protein, 17 aa, Homo sapiens
CARYHDDYGDNDWFDPW

SEQ ID NO: 6669 - protein, 21 aa, Homo sapiens
CAKDLGVLRYFDWLSSAFDIW

SEQ ID NO: 6670 - protein, 19 aa, Homo sapiens
CARRRRLTVATKDYAFDYW

SEQ ID NO: 6671 - protein, 17 aa, Homo sapiens
CARTYPYNSSPGCFDHW

SEQ ID NO: 6672 - protein, 18 aa, Homo sapiens
CAKPELGQWLVHYYFDYW

SEQ ID NO: 6673 - protein, 14 aa, Homo sapiens
CAKMIVVADTFDIW

SEQ ID NO: 6674 - protein, 14 aa, Homo sapiens
CAKEGYSGYYFDYW

SEQ ID NO: 6675 - protein, 15 aa, Homo sapiens
CAILDPQGLVAFDIW

SEQ ID NO: 6676 - protein, 17 aa, Homo sapiens
CARASFVYSSGWYNDYW

SEQ ID NO: 6677 - protein, 14 aa, Homo sapiens
CARVWDYADYFDSW

SEQ ID NO: 6678 - protein, 19 aa, Homo sapiens
CARGRLRQWLVRQYYFDYW

SEQ ID NO: 6679 - protein, 15 aa, Homo sapiens
CVRDLPGLSSGGDYW

SEQ ID NO: 6680 - protein, 23 aa, Homo sapiens
CARLLTAKYSGSYYVTLYYFDYW

SEQ ID NO: 6681 - protein, 23 aa, Homo sapiens
CARPYSSGWYRRGLFPAEYFDYW

SEQ ID NO: 6682 - protein, 15 aa, Homo sapiens
CSALDSSLSAPHVVF

SEQ ID NO: 6683 - protein, 21 aa, Homo sapiens
CTREGSFYDERGYYRDAFDIW

SEQ ID NO: 6684 - protein, 16 aa, Homo sapiens
CARMGDGAYDSYFDSW

SEQ ID NO: 6685 - protein, 23 aa, Homo sapiens
CARAAVTMVRGVAWRYYYYMDVW

SEQ ID NO: 6686 - protein, 15 aa, Homo sapiens
CARVTAGHDATLDYW

SEQ ID NO: 6687 - protein, 21 aa, Homo sapiens
CARDRQEELSSSWPVYWFDPW

SEQ ID NO: 6688 - protein, 20 aa, Homo sapiens
CVRAQINYFGSGSYSLLDYW

SEQ ID NO: 6689 - protein, 13 aa, Homo sapiens
CAHVPIRTAFDIW

SEQ ID NO: 6690 - protein, 15 aa, Homo sapiens
CARAGGVTTLAFDIW

SEQ ID NO: 6691 - protein, 19 aa, Homo sapiens
CARGSFIFRLVIQYYFDYW

SEQ ID NO: 6692 - protein, 14 aa, Homo sapiens
CARFTPGLLRFDYW

SEQ ID NO: 6693 - protein, 17 aa, Homo sapiens
CARPNYYGSGSYGFDPW

SEQ ID NO: 6694 - protein, 19 aa, Homo sapiens
CARALLVTMIVEAHWFDPW

SEQ ID NO: 6695 - protein, 16 aa, Homo sapiens
CARLGYYGSGTPGDYW

SEQ ID NO: 6696 - protein, 15 aa, Homo sapiens
CAKDRYRTPKTFDYW

SEQ ID NO: 6697 - protein, 23 aa, Homo sapiens
CARARGLTFVLMVYAMEYYFDYW

SEQ ID NO: 6698 - protein, 17 aa, Homo sapiens
CARIVRDSSSWYRDDYW

SEQ ID NO: 6699 - protein, 16 aa, Homo sapiens
CARDVEMATKHAFDIW

SEQ ID NO: 6700 - protein, 22 aa, Homo sapiens
CARHGGELLWFGEPSTIYFDYW

SEQ ID NO: 6701 - protein, 17 aa, Homo sapiens
CARHEGSSWEPIRFDPW

SEQ ID NO: 6702 - protein, 23 aa, Homo sapiens
CARDAPSYCSGGSCYLPGYFDYW

SEQ ID NO: 6703 - protein, 15 aa, Homo sapiens
CAREKRGGNWYFDLW

SEQ ID NO: 6704 - protein, 14 aa, Homo sapiens
CARTRLAQWAFDPW

SEQ ID NO: 6705 - protein, 19 aa, Homo sapiens
CARDPSTYRFGELLSFDYW

SEQ ID NO: 6706 - protein, 19 aa, Homo sapiens
CAKDKLYYYYDSSGYYDYW

SEQ ID NO: 6707 - protein, 21 aa, Homo sapiens
CARDRLVVVPAAMSIAHFDYW

SEQ ID NO: 6708 - protein, 18 aa, Homo sapiens
CAKTTQYNWNYGSPFDYW

SEQ ID NO: 6709 - protein, 16 aa, Homo sapiens
CARHVSGVTYSPFDPW

SEQ ID NO: 6710 - protein, 16 aa, Homo sapiens
CAREIYIAVAGSFDYW

SEQ ID NO: 6711 - protein, 20 aa, Homo sapiens
CAREGYYYDSSGYSNAFDIW

SEQ ID NO: 6712 - protein, 18 aa, Homo sapiens
CARDGSFRFLEWLPLDYW

SEQ ID NO: 6713 - protein, 15 aa, Homo sapiens
CARGAGIGNLPFDYW

SEQ ID NO: 6714 - protein, 23 aa, Homo sapiens
CARNMPGYYASGRHILMDAFDIW

SEQ ID NO: 6715 - protein, 23 aa, Homo sapiens
CARVDKYYDILTGYYALGHFDYW

SEQ ID NO: 6716 - protein, 20 aa, Homo sapiens
CARGRDTMVRARGGGMFDLW

SEQ ID NO: 6717 - protein, 24 aa, Homo sapiens
CARGYCSGGSCYLGYYYYYYMDVW

SEQ ID NO: 6718 - protein, 17 aa, Homo sapiens
CARAGIVPAARSEYDYW

SEQ ID NO: 6719 - protein, 20 aa, Homo sapiens
CARGSVAGTSPYYYYYMDVW

SEQ ID NO: 6720 - protein, 17 aa, Homo sapiens
CAHKAKVQPTIGAFDIW

SEQ ID NO: 6721 - protein, 14 aa, Homo sapiens
CARSNLFELLIDYW

SEQ ID NO: 6722 - protein, 16 aa, Homo sapiens
CATDLTLFGVVRFDYW

SEQ ID NO: 6723 - protein, 17 aa, Homo sapiens
CARHNTKLRPWPNFDYW

SEQ ID NO: 6724 - protein, 12 aa, Homo sapiens
CQQSDNVPPITF

SEQ ID NO: 6725 - protein, 16 aa, Homo sapiens
CARAGEMTTVKRFDYW

SEQ ID NO: 6726 - protein, 16 aa, Homo sapiens
CATDVYSGLGSYFFYW

SEQ ID NO: 6727 - protein, 21 aa, Homo sapiens
CAKALWYCSSTSCQDDAFDIW

SEQ ID NO: 6728 - protein, 18 aa, Homo sapiens
CAHSVRGYSGYDSSFDYW

SEQ ID NO: 6729 - protein, 17 aa, Homo sapiens
CAKDMLHQMAGANFDYW

SEQ ID NO: 6730 - protein, 22 aa, Homo sapiens
CAGGEATFGSDGYLTKGAFDRW

SEQ ID NO: 6731 - protein, 27 aa, Homo sapiens
CARDPSYYYGSGSYLLRFGPKDWFDPW

SEQ ID NO: 6732 - protein, 22 aa, Homo sapiens
CARESIMITFGGVIVANWFDPW

SEQ ID NO: 6733 - protein, 14 aa, Homo sapiens
CARFSTAVGGFDFW

SEQ ID NO: 6734 - protein, 14 aa, Homo sapiens
CARRRGYKYGFDFW

SEQ ID NO: 6735 - protein, 22 aa, Homo sapiens
CARDYYDSSGKNYYYYYGMDVW

SEQ ID NO: 6736 - protein, 22 aa, Homo sapiens
CTTGYYYDSSGYYYADGAFDIW

SEQ ID NO: 6737 - protein, 19 aa, Homo sapiens
CARDFDDYGDYGLERFDYW

SEQ ID NO: 6738 - protein, 12 aa, Homo sapiens
CQQFGDSPMYSF

SEQ ID NO: 6739 - protein, 17 aa, Homo sapiens
CAAWDDSLNGNGRGVVF

SEQ ID NO: 6740 - protein, 18 aa, Homo sapiens
CARDLPSAMVTGVAFDIW

SEQ ID NO: 6741 - protein, 22 aa, Homo sapiens
CARDSNVLRYFDWSTDDAFDIW

SEQ ID NO: 6742 - protein, 17 aa, Homo sapiens
CARGSRYGTGWYYYDYW

SEQ ID NO: 6743 - protein, 17 aa, Homo sapiens
CAKDMLGVVAATPLDYW

SEQ ID NO: 6744 - protein, 13 aa, Homo sapiens
CMQALQTPRRCSF

SEQ ID NO: 6745 - protein, 18 aa, Homo sapiens
CARAPAKWQWLVQWFDPW

SEQ ID NO: 6746 - protein, 21 aa, Homo sapiens
CATYPDTGYESDFYYYYLDVW

SEQ ID NO: 6747 - protein, 16 aa, Homo sapiens
CVKAYSSSWSGFFDYW

SEQ ID NO: 6748 - protein, 21 aa, Homo sapiens
CARGSSPPLFITMVRGVFDYW

SEQ ID NO: 6749 - protein, 21 aa, Homo sapiens
CARQISFTMIVVVIPNYFDYW

SEQ ID NO: 6750 - protein, 17 aa, Homo sapiens
CAREKYYDSRRYYFDYW

SEQ ID NO: 6751 - protein, 17 aa, Homo sapiens
CARLSGIVATIEHFDYW

SEQ ID NO: 6752 - protein, 18 aa, Homo sapiens
CARSYCSGGNCVLSEDYW

SEQ ID NO: 6753 - protein, 15 aa, Homo sapiens
CAREREWEPVKFDSW

SEQ ID NO: 6754 - protein, 18 aa, Homo sapiens
CAHRSGYSSGWYNWFDPW

SEQ ID NO: 6755 - protein, 24 aa, Homo sapiens
CARDPTWYSSSWYSGPSGGPLDYW

SEQ ID NO: 6756 - protein, 15 aa, Homo sapiens
CQQSYSTPRVGTGTF

SEQ ID NO: 6757 - protein, 13 aa, Homo sapiens
CAHRGRIAHFDYW

SEQ ID NO: 6758 - protein, 12 aa, Homo sapiens
CARHARFGLDYW

SEQ ID NO: 6759 - protein, 24 aa, Homo sapiens
CARGGGDIIITVVTKAPQSSFDYW

SEQ ID NO: 6760 - protein, 16 aa, Homo sapiens
CARGDVGPDNWYFDLW

SEQ ID NO: 6761 - protein, 24 aa, Homo sapiens
CARISPTMVRGVRFHYYYYYMDVW

SEQ ID NO: 6762 - protein, 17 aa, Homo sapiens
CARDRGLLRTNYYFDYW

SEQ ID NO: 6763 - protein, 17 aa, Homo sapiens
CARHPYDFWSDDAFDIW

SEQ ID NO: 6764 - protein, 21 aa, Homo sapiens
CARGNVGAAAWCLYYYGMDVW

SEQ ID NO: 6765 - protein, 15 aa, Homo sapiens
CARARGSNYGFFDSW

SEQ ID NO: 6766 - protein, 16 aa, Homo sapiens
CVKDVHADWFQYFDRW

SEQ ID NO: 6767 - protein, 16 aa, Homo sapiens
CSREGNYDTLNDFDYW

SEQ ID NO: 6768 - protein, 26 aa, Homo sapiens
CTTAKGHSPYYDILTGYSREDAFDIW

SEQ ID NO: 6769 - protein, 20 aa, Homo sapiens
CARDPVKIFGVVIFYYFDYW

SEQ ID NO: 6770 - protein, 14 aa, Homo sapiens
CARGTLRGIYFDSW

SEQ ID NO: 6771 - protein, 15 aa, Homo sapiens
CARDVTVLDWSFKYW

SEQ ID NO: 6772 - protein, 17 aa, Homo sapiens
CARLPYSSNWYGAFDIW

SEQ ID NO: 6773 - protein, 15 aa, Homo sapiens
CAKESLTAAGGFDYW

SEQ ID NO: 6774 - protein, 21 aa, Homo sapiens
CATDYTESGTFYNPWNFFDNW

SEQ ID NO: 6775 - protein, 15 aa, Homo sapiens
CARAFAYQVLPFDSW

SEQ ID NO: 6776 - protein, 18 aa, Homo sapiens
CAKEQYSYGYIKYYFDYW

SEQ ID NO: 6777 - protein, 20 aa, Homo sapiens
CARDYLNSGWYEVGYYFDYW

SEQ ID NO: 6778 - protein, 17 aa, Homo sapiens
CATRGIREDFRYAFDIW

SEQ ID NO: 6779 - protein, 23 aa, Homo sapiens
CARDFDDYVWGSYRYGEHYFDYW

SEQ ID NO: 6780 - protein, 18 aa, Homo sapiens
CATGAATSYRGLDTFDFW

SEQ ID NO: 6781 - protein, 24 aa, Homo sapiens
CARHHRTVYTGYSSGWYGPPFDYW

SEQ ID NO: 6782 - protein, 14 aa, Homo sapiens
CAAYGDEGGYFDYW

SEQ ID NO: 6783 - protein, 18 aa, Homo sapiens
CAKDRNFGIVGATALDYW

SEQ ID NO: 6784 - protein, 21 aa, Homo sapiens
CARDGQISIGYYRPSDSFDIW

SEQ ID NO: 6785 - protein, 20 aa, Homo sapiens
CVRDGYYDTSGYINGIFHYW

SEQ ID NO: 6786 - protein, 22 aa, Homo sapiens
CARQVKRHGYFDWLEIPYFDYW

SEQ ID NO: 6787 - protein, 16 aa, Homo sapiens
CARGDKGSGSYFVDYW

SEQ ID NO: 6788 - protein, 17 aa, Homo sapiens
CAKDYGWGSSWHYFDYW

SEQ ID NO: 6789 - protein, 14 aa, Homo sapiens
CASTSQLPDYFDYW

SEQ ID NO: 6790 - protein, 24 aa, Homo sapiens
CARARELYDSSGYYYSRPSYFDYW

SEQ ID NO: 6791 - protein, 14 aa, Homo sapiens
CAHRPWFNDAFDIW

SEQ ID NO: 6792 - protein, 15 aa, Homo sapiens
CARGTDRWTYYFDYW

SEQ ID NO: 6793 - protein, 17 aa, Homo sapiens
CATLLLTLKLGDAFDVW

SEQ ID NO: 6794 - protein, 19 aa, Homo sapiens
CARLAGGREYGDTPRFDPW

SEQ ID NO: 6795 - protein, 18 aa, Homo sapiens
CARDEFLGSGTGGWFDPW

SEQ ID NO: 6796 - protein, 16 aa, Homo sapiens
CARGSGYSSSGWFDPW

SEQ ID NO: 6797 - protein, 22 aa, Homo sapiens
CAAGIAVAGRDDYYYYYGMDVW

SEQ ID NO: 6798 - protein, 19 aa, Homo sapiens
CARDRDPTSGWFEAPCDYW

SEQ ID NO: 6799 - protein, 18 aa, Homo sapiens
CAKDVNYDSSGYFNLDYW

SEQ ID NO: 6800 - protein, 20 aa, Homo sapiens
CARFRLVLLWFGESLGFDYW

SEQ ID NO: 6801 - protein, 20 aa, Homo sapiens
CARDTYCTNGVCYTTWFDPW

SEQ ID NO: 6802 - protein, 15 aa, Homo sapiens
CAHSQHTGWYNFDYW

SEQ ID NO: 6803 - protein, 16 aa, Homo sapiens
CARHQSGYSYGRFDYW

SEQ ID NO: 6804 - protein, 39 aa, Homo sapiens
CALPIYSKNTLYLQMNSLRAEDTAVYYCARDTGSGCDYW

SEQ ID NO: 6805 - protein, 38 aa, Homo sapiens
CKNSLYLQMNSLRTEDTALYYCAKGAYSYGEHRSVDYW

SEQ ID NO: 6806 - protein, 22 aa, Homo sapiens
CARAEYYYDSSGYPLYWYFDLW

SEQ ID NO: 6807 - protein, 17 aa, Homo sapiens
CARDLSGPIGTGWFDSW

SEQ ID NO: 6808 - protein, 15 aa, Homo sapiens
CARQRIAAAGGFDCW

SEQ ID NO: 6809 - protein, 19 aa, Homo sapiens
CAKQPLLGVGGSGLAPDYW

SEQ ID NO: 6810 - protein, 27 aa, Homo sapiens
CARAPQRHVIVVVVAATLKYYYGMDVW

SEQ ID NO: 6811 - protein, 17 aa, Homo sapiens
CAKDIFYGSGIDAFDIW

SEQ ID NO: 6812 - protein, 19 aa, Homo sapiens
CATFRGQEWLQTLRAFDVW

SEQ ID NO: 6813 - protein, 17 aa, Homo sapiens
CAKSSSTSCYVGWFDPW

SEQ ID NO: 6814 - protein, 11 aa, Homo sapiens
CVREEIDFDTW

SEQ ID NO: 6815 - protein, 16 aa, Homo sapiens
CARTRVEVEKTSLDYW

SEQ ID NO: 6816 - protein, 17 aa, Homo sapiens
CARGRFLEWLSPEDDYW

SEQ ID NO: 6817 - protein, 15 aa, Homo sapiens
CARVRFGDRKTFDSW

SEQ ID NO: 6818 - protein, 18 aa, Homo sapiens
CARISLYYGSGSHQFDYW

SEQ ID NO: 6819 - protein, 14 aa, Homo sapiens
CARSLAAAGRGDYW

SEQ ID NO: 6820 - protein, 14 aa, Homo sapiens
CACLIVAVGDFDSW

SEQ ID NO: 6821 - protein, 13 aa, Homo sapiens [sequence omitted]

SEQ ID NO: 6822 - protein, 16 aa, Homo sapiens
CAKLSWGYSSGYYDYW

SEQ ID NO: 6823 - protein, 16 aa, Homo sapiens
CARETAAADANWFDPW

SEQ ID NO: 6824 - protein, 23 aa, Homo sapiens
CARDPRGGAQLWLFAENVYFDYW

SEQ ID NO: 6825 - protein, 14 aa, Homo sapiens
CARDRTGTTFHDYW

SEQ ID NO: 6826 - protein, 16 aa, Homo sapiens
CAKDGSGWYHDAFDIW

SEQ ID NO: 6827 - protein, 20 aa, Homo sapiens
CARRGYYDSSGYPQYYFDYW

SEQ ID NO: 6828 - protein, 23 aa, Homo sapiens
CARLRIVVVPAAMLDAGDGIDYW

SEQ ID NO: 6829 - protein, 17 aa, Homo sapiens
CAGSGESAGWYVFFDQW

SEQ ID NO: 6830 - protein, 15 aa, Homo sapiens
CAKQMIAAASALDYW

SEQ ID NO: 6831 - protein, 16 aa, Homo sapiens
CARGEPGGDCCSFDYW

SEQ ID NO: 6832 - protein, 17 aa, Homo sapiens
CARSSEGSYYNVPFDSW

SEQ ID NO: 6833 - protein, 11 aa, Homo sapiens
CQHYYDYPRTF

SEQ ID NO: 6834 - protein, 18 aa, Homo sapiens
CARDLSAVAVAGLGIDYW

SEQ ID NO: 6835 - protein, 14 aa, Homo sapiens
CAKRGQTVGTGDYW

SEQ ID NO: 6836 - protein, 17 aa, Homo sapiens
CARDMRQWLPEDAFDIW

SEQ ID NO: 6837 - protein, 21 aa, Homo sapiens
CARDELVLRYFDWYPMGHDYW

SEQ ID NO: 6838 - protein, 21 aa, Homo sapiens
CARGVRYFTIFGVRQYYFDYW

SEQ ID NO: 6839 - protein, 25 aa, Homo sapiens
CAKVRPLYYDFWSGYSQRPYYFDYW

SEQ ID NO: 6840 - protein, 21 aa, Homo sapiens
CARMSLYYYDSSGQKGAFDIW

SEQ ID NO: 6841 - protein, 19 aa, Homo sapiens
CARALRQQWLVFKYYFDYW

SEQ ID NO: 6842 - protein, 19 aa, Homo sapiens
CAKDLDPSYYGSGSPFDYW

SEQ ID NO: 6843 - protein, 17 aa, Homo sapiens
CAKDQYPLYYDPCFDIW

SEQ ID NO: 6844 - protein, 18 aa, Homo sapiens
CARELLWFGESIPPFDYW

SEQ ID NO: 6845 - protein, 16 aa, Homo sapiens
CARPRELAGWGVFDIW

SEQ ID NO: 6846 - protein, 19 aa, Homo sapiens
CARDSAPYYYDTSGYLDYW

SEQ ID NO: 6847 - protein, 18 aa, Homo sapiens
CARASIQLWLRGRFFDYW

SEQ ID NO: 6848 - protein, 21 aa, Homo sapiens
CARDSITYGSGSYLQDAFDIW

SEQ ID NO: 6849 - protein, 16 aa, Homo sapiens
CASPRGYSYASPWDYW

SEQ ID NO: 6850 - protein, 16 aa, Homo sapiens
CARAISPDGQYAFDVW

SEQ ID NO: 6851 - protein, 21 aa, Homo sapiens
CARPSWGYSYGGPILEPPDYW

SEQ ID NO: 6852 - protein, 20 aa, Homo sapiens
CARAGERSGSYYDDYYFDYW

SEQ ID NO: 6853 - protein, 15 aa, Homo sapiens
CARTNSDYSLVFDYW

SEQ ID NO: 6854 - protein, 16 aa, Homo sapiens
CTSLYYDSRGYGFDPW

SEQ ID NO: 6855 - protein, 17 aa, Homo sapiens
CARVYWSGNGRGFPDYW

SEQ ID NO: 6856 - protein, 16 aa, Homo sapiens
CARSYGDYGVGWFDPW

SEQ ID NO: 6857 - protein, 13 aa, Homo sapiens
CARLMTHSTSDYW

SEQ ID NO: 6858 - protein, 17 aa, Homo sapiens
CARYGVVRGVINAFDIW

SEQ ID NO: 6859 - protein, 23 aa, Homo sapiens
CARDSPFSRGPLGELSFGAFDIW

SEQ ID NO: 6860 - protein, 20 aa, Homo sapiens
CARVQFDWLLQYSPGYFDYW

SEQ ID NO: 6861 - protein, 15 aa, Homo sapiens
CARSLRAFSGYFDYW

SEQ ID NO: 6862 - protein, 14 aa, Homo sapiens
CAAQRITMIVRDYW

SEQ ID NO: 6863 - protein, 19 aa, Homo sapiens
CARATRGWLQLFFGAFDIW

SEQ ID NO: 6864 - protein, 14 aa, Homo sapiens
CQQANSFPPETWTF

SEQ ID NO: 6865 - protein, 19 aa, Homo sapiens
CARRRYDFWSGNPGAFDIW

SEQ ID NO: 6866 - protein, 17 aa, Homo sapiens
CARDSWFGELFGRFDPW

SEQ ID NO: 6867 - protein, 12 aa, Homo sapiens
CLQYFSTPSFTF

SEQ ID NO: 6868 - protein, 13 aa, Homo sapiens
CAKAGPGWYFDSW

SEQ ID NO: 6869 - protein, 31 aa, Homo sapiens
CARDPGLADPYYDFWSLGKRPGRSDAAFDIW

SEQ ID NO: 6870 - protein, 21 aa, Homo sapiens
CARIIASGGVTVDRQYYFDSW

SEQ ID NO: 6871 - protein, 19 aa, Homo sapiens
CARDHAGESSSWSDLFDYW

SEQ ID NO: 6872 - protein, 22 aa, Homo sapiens
CARGGRITMIVVVIKGAYFDYW

SEQ ID NO: 6873 - protein, 14 aa, Homo sapiens
CAKLRIAVAVVDYW

SEQ ID NO: 6874 - protein, 18 aa, Homo sapiens
CVKDMISRDYYPSLFDLW

SEQ ID NO: 6875 - protein, 14 aa, Homo sapiens
CAMSTGYYWTFDYW

SEQ ID NO: 6876 - protein, 14 aa, Homo sapiens
CASWSDGEDAFDIW

SEQ ID NO: 6877 - protein, 16 aa, Homo sapiens
CAKDQDYGSGSPNDYW

SEQ ID NO: 6878 - protein, 19 aa, Homo sapiens
CTTAASGSWPRAWGYFDYW

SEQ ID NO: 6879 - protein, 16 aa, Homo sapiens
CVRDRAAAGGDWFDPW

SEQ ID NO: 6880 - protein, 21 aa, Homo sapiens
CAKDLWPRDIVVVPAASFDYW

SEQ ID NO: 6881 - protein, 14 aa, Homo sapiens
CARGRYDMYAFDIW

SEQ ID NO: 6882 - protein, 18 aa, Homo sapiens
CARPLYTSGRYGGAFDIW

SEQ ID NO: 6883 - protein, 21 aa, Homo sapiens
CARDTNDYDDQTYYYFGMDVW

SEQ ID NO: 6884 - protein, 18 aa, Homo sapiens
CAKDSHVGLWELNRFDYW

SEQ ID NO: 6885 - protein, 17 aa, Homo sapiens
CARHLRGYSYDDAFDIW

SEQ ID NO: 6886 - protein, 14 aa, Homo sapiens
CVKYSSGLRTFDYW

SEQ ID NO: 6887 - protein, 20 aa, Homo sapiens
CAREMGYEHDYGDFNWFDPW

SEQ ID NO: 6888 - protein, 16 aa, Homo sapiens
CAKSGSGWTQNQFDYW

SEQ ID NO: 6889 - protein, 13 aa, Homo sapiens
CQHYNTYSPMYTF

SEQ ID NO: 6890 - protein, 15 aa, Homo sapiens
CQQHSNWPPITFITF

SEQ ID NO: 6891 - protein, 14 aa, Homo sapiens
CVKGTGWYPDFDYW

SEQ ID NO: 6892 - protein, 19 aa, Homo sapiens
CAKKRLRYFDWSPLPFDYW

SEQ ID NO: 6893 - protein, 16 aa, Homo sapiens
CAMRLATLIDGPVDYW

SEQ ID NO: 6894 - protein, 13 aa, Homo sapiens
CQQRSSWPPESSF

SEQ ID NO: 6895 - protein, 20 aa, Homo sapiens
CVRAKTTFGGIIVQYYFDYW

SEQ ID NO: 6896 - protein, 22 aa, Homo sapiens
CAHSVHYDILTGYYNPAYFDYW

SEQ ID NO: 6897 - protein, 17 aa, Homo sapiens
CAKDSSGSYGESWFDPW

SEQ ID NO: 6898 - protein, 18 aa, Homo sapiens
CTRDLPVGYSNGWFSDSW

SEQ ID NO: 6899 - protein, 17 aa, Homo sapiens
CARDPANEWLLSWFDPW

SEQ ID NO: 6900 - protein, 17 aa, Homo sapiens
CARMPIYGSGEEYFQHW

SEQ ID NO: 6901 - protein, 18 aa, Homo sapiens
CARLNYQWLIRVDYFDYW

SEQ ID NO: 6902 - protein, 21 aa, Homo sapiens
CARGVSTTQSYYYYYYYMDVW

SEQ ID NO: 6903 - protein, 24 aa, Homo sapiens
CARGWKYDFWSGVRQVPEYYFDYW

SEQ ID NO: 6904 - protein, 18 aa, Homo sapiens
CARARLQDYYYFYGMDVW

SEQ ID NO: 6905 - protein, 16 aa, Homo sapiens
CAKDRLVLSSSQIDYW

SEQ ID NO: 6906 - protein, 22 aa, Homo sapiens
CARERLSRYCSGGSCYWGFDVW

SEQ ID NO: 6907 - protein, 15 aa, Homo sapiens
CARAVDTGNDAFDIW

SEQ ID NO: 6908 - protein, 21 aa, Homo sapiens
CARHITMVRGAIRPLYYMDVW

SEQ ID NO: 6909 - protein, 16 aa, Homo sapiens
CARDPLDIWFDDFDYW

SEQ ID NO: 6910 - protein, 18 aa, Homo sapiens
CARETGTTATLLDALDIW

SEQ ID NO: 6911 - protein, 18 aa, Homo sapiens
CARFIVAPGGGSGFPDYW

SEQ ID NO: 6912 - protein, 14 aa, Homo sapiens
CAHMTTVTTSFDYW

SEQ ID NO: 6913 - protein, 19 aa, Homo sapiens
CATRAGSSTVTDYWYFDLW

SEQ ID NO: 6914 - protein, 16 aa, Homo sapiens
CAKVKSRDTAMADDYW

SEQ ID NO: 6915 - protein, 18 aa, Homo sapiens
CTTAAELWFGRYDAFNIW

SEQ ID NO: 6916 - protein, 18 aa, Homo sapiens
CVRDLGRGYTSARTFDIW

SEQ ID NO: 6917 - protein, 16 aa, Homo sapiens
CAIYPGYSSSWPIDYW

SEQ ID NO: 6918 - protein, 18 aa, Homo sapiens
CATVYAYNWNTRGWFDPW

SEQ ID NO: 6919 - protein, 16 aa, Homo sapiens
CATHPGYSSSWYLSYW

SEQ ID NO: 6920 - protein, 18 aa, Homo sapiens
CARGGDSSGYYSWYFDLW

SEQ ID NO: 6921 - protein, 15 aa, Homo sapiens
CAKDSYGLYWYFDLW

SEQ ID NO: 6922 - protein, 16 aa, Homo sapiens
CAAGYDSNWLQYFDYW

SEQ ID NO: 6923 - protein, 17 aa, Homo sapiens
CAREFRGASEGNYLDPW

SEQ ID NO: 6924 - protein, 21 aa, Homo sapiens
CAREPDYYGSGSYPNDAFDIW

SEQ ID NO: 6925 - protein, 17 aa, Homo sapiens
CARDGSAAGYWYAFDYW

SEQ ID NO: 6926 - protein, 13 aa, Homo sapiens
CARSRPRYYMDVW

SEQ ID NO: 6927 - protein, 26 aa, Homo sapiens
CARDQSTTYYDVLTGYYIPEDAFDIW

SEQ ID NO: 6928 - protein, 15 aa, Homo sapiens
CAKGGADDWAYFDYW

SEQ ID NO: 6929 - protein, 18 aa, Homo sapiens
CAHRQIIGYSGFMSFDYW

SEQ ID NO: 6930 - protein, 16 aa, Homo sapiens
CARVGRSVRGDPFDYW

SEQ ID NO: 6931 - protein, 23 aa, Homo sapiens
CARGFGDYVWGSYRALAEYFQHW

SEQ ID NO: 6932 - protein, 23 aa, Homo sapiens
CARAVGFGVSSGSARVDYYFDYW

SEQ ID NO: 6933 - protein, 14 aa, Homo sapiens
CARRYYDVGPFDNW

SEQ ID NO: 6934 - protein, 12 aa, Homo sapiens
CQHCNSYSMCSF

SEQ ID NO: 6935 - protein, 16 aa, Homo sapiens
CATDIRGSSYDMFDIW

SEQ ID NO: 6936 - protein, 24 aa, Homo sapiens
CARVKSSSPKYTPPPYYYYGMDVW

SEQ ID NO: 6937 - protein, 19 aa, Homo sapiens
CAKDPSSATYYYYYYMDVW

SEQ ID NO: 6938 - protein, 23 aa, Homo sapiens
CARVGLTYYYGSGSYYSDYFDYW

SEQ ID NO: 6939 - protein, 24 aa, Homo sapiens
CARDGYCSSTSCSGAYYYYYMDVW

SEQ ID NO: 6940 - protein, 15 aa, Homo sapiens
CAGSYGSSIEYFQHW

SEQ ID NO: 6941 - protein, 15 aa, Homo sapiens
CARGDLGFDWLFHYW

SEQ ID NO: 6942 - protein, 19 aa, Homo sapiens
CAGGSRSHYNSGIGAFDIW

SEQ ID NO: 6943 - protein, 14 aa, Homo sapiens
CARDESATKSFGYW

SEQ ID NO: 6944 - protein, 20 aa, Homo sapiens
CASVAAIFGEFGASEWFQHW

SEQ ID NO: 6945 - protein, 21 aa, Homo sapiens
CAKDLRVRGGYSYGHDAFDIW

SEQ ID NO: 6946 - protein, 15 aa, Homo sapiens
CARDAGKFLTFIDYW

SEQ ID NO: 6947 - protein, 17 aa, Homo sapiens
CAKIVSVIVDVDAFDIW

SEQ ID NO: 6948 - protein, 17 aa, Homo sapiens
CARIARSGWRGDWFDPW

SEQ ID NO: 6949 - protein, 18 aa, Homo sapiens
CASSASGGVIGYDAFDIW

SEQ ID NO: 6950 - protein, 20 aa, Homo sapiens
CARPRAFPSTGAIYWYFDLW

SEQ ID NO: 6951 - protein, 18 aa, Homo sapiens
CAKDFGSGSLGYNWLDPW

SEQ ID NO: 6952 - protein, 18 aa, Homo sapiens
CAREVSSGWYDGDGFDYW

SEQ ID NO: 6953 - protein, 21 aa, Homo sapiens
CARQTLRITIFGVVTTVFDYW

SEQ ID NO: 6954 - protein, 20 aa, Homo sapiens
CARRLLTLRFLEWLRAFDIW

SEQ ID NO: 6955 - protein, 16 aa, Homo sapiens
CARRSAGYKRYYMDVW

SEQ ID NO: 6956 - protein, 19 aa, Homo sapiens
CAKSRLDHLAMGYNWFDPW

SEQ ID NO: 6957 - protein, 17 aa, Homo sapiens
CAKASIAAAGPDAFDIW

SEQ ID NO: 6958 - protein, 14 aa, Homo sapiens
CAHRNYIAAAFDIW

SEQ ID NO: 6959 - protein, 13 aa, Homo sapiens
CARMNTAMGLDYW

SEQ ID NO: 6960 - protein, 18 aa, Homo sapiens
CAKDLRTGYYRGDAFDIW

SEQ ID NO: 6961 - protein, 16 aa, Homo sapiens
CAHRMTTVRDYYMDVW

SEQ ID NO: 6962 - protein, 22 aa, Homo sapiens
CARVNYYDYVWGSYRYTNFDYW

SEQ ID NO: 6963 - protein, 21 aa, Homo sapiens
CAHTPGDCTNTSCYLSYFDKW

SEQ ID NO: 6964 - protein, 19 aa, Homo sapiens
CARDRTPATDTSWWYFDLW

SEQ ID NO: 6965 - protein, 17 aa, Homo sapiens
CASPIIAWFGEFGDDYW

SEQ ID NO: 6966 - protein, 19 aa, Homo sapiens
CARDRGSGWDGEVDAFDIW

SEQ ID NO: 6967 - protein, 17 aa, Homo sapiens
CAKDASLLRYFVHFDYW

SEQ ID NO: 6968 - protein, 22 aa, Homo sapiens
CAGEPTTKCTSCYPFNDAFDIW

SEQ ID NO: 6969 - protein, 21 aa, Homo sapiens
CTCRPSSFWSHYPAMSFFDYW

SEQ ID NO: 6970 - protein, 13 aa, Homo sapiens
CYSTDSNENHEVF

SEQ ID NO: 6971 - protein, 21 aa, Homo sapiens
CARGRLRYFDWFASRDAFDIW

SEQ ID NO: 6972 - protein, 18 aa, Homo sapiens
CAKDPHYDFWSDYFFDYW

SEQ ID NO: 6973 - protein, 19 aa, Homo sapiens
CAKVYHGPGNYYKGYFDYW

SEQ ID NO: 6974 - protein, 14 aa, Homo sapiens
CTRGGGRGWYGLYW

SEQ ID NO: 6975 - protein, 15 aa, Homo sapiens
CARRKLPGFGAFDIW

SEQ ID NO: 6976 - protein, 16 aa, Homo sapiens
CARGWASGWSYYFDYW

SEQ ID NO: 6977 - protein, 21 aa, Homo sapiens
CARRALGYCSGGSCYSAFDYW

SEQ ID NO: 6978 - protein, 17 aa, Homo sapiens
CAHQDRAPSKAVAFDYW

SEQ ID NO: 6979 - protein, 25 aa, Homo sapiens
CARGRVPWQYYDFWSGYHNVPFDYW

SEQ ID NO: 6980 - protein, 23 aa, Homo sapiens
CTTDRVRAVATIFFLATYYFDYW

SEQ ID NO: 6981 - protein, 16 aa, Homo sapiens
CVRDGSGGFSYYFDNW

SEQ ID NO: 6982 - protein, 17 aa, Homo sapiens
CARGSWGVLVRSAFDVW

SEQ ID NO: 6983 - protein, 18 aa, Homo sapiens
CARLSPGGYVPPNGFDVW

SEQ ID NO: 6984 - protein, 18 aa, Homo sapiens
CARDPLWFGERYDAFDIW

SEQ ID NO: 6985 - protein, 20 aa, Homo sapiens
CATVEATDFGDYEDGYFDSW

SEQ ID NO: 6986 - protein, 20 aa, Homo sapiens
CARGGIAAAGIPYYYGMDVW

SEQ ID NO: 6987 - protein, 12 aa, Homo sapiens
CQQYNDYRALTF

SEQ ID NO: 6988 - protein, 16 aa, Homo sapiens
CVKDMKSWISYYFNYW

SEQ ID NO: 6989 - protein, 13 aa, Homo sapiens
CARELYTFGPDYW

SEQ ID NO: 6990 - protein, 17 aa, Homo sapiens
CASQGVDSSGYSEFDYW

SEQ ID NO: 6991 - protein, 11 aa, Homo sapiens [sequence omitted]

SEQ ID NO: 6992 - protein, 16 aa, Homo sapiens
CAHSPVASAVTWFDPW

SEQ ID NO: 6993 - protein, 18 aa, Homo sapiens
CAKGTYCSGGSCYIFDYW

SEQ ID NO: 6994 - protein, 19 aa, Homo sapiens
CAKHKGDFGPTEGYYSDYW

SEQ ID NO: 6995 - protein, 20 aa, Homo sapiens
CARGIRDHCSSISCYTWDYW

SEQ ID NO: 6996 - protein, 15 aa, Homo sapiens
CASDYGDYARYIDYW

SEQ ID NO: 6997 - protein, 14 aa, Homo sapiens
CARGVYGVLAFDYW

SEQ ID NO: 6998 - protein, 22 aa, Homo sapiens
CARWAHTAMDSSVYYYYGMDVW

SEQ ID NO: 6999 - protein, 15 aa, Homo sapiens
CAKTGTIAVAGFDYW

SEQ ID NO: 7000 - protein, 25 aa, Homo sapiens
CARDSRWVNGWFGELRVLGYYFDYW

SEQ ID NO: 7001 - protein, 20 aa, Homo sapiens
CAKAMYSSGWYLRNNAFDIW

SEQ ID NO: 7002 - protein, 14 aa, Homo sapiens
CARHRIAVAGIDYW

SEQ ID NO: 7003 - protein, 20 aa, Homo sapiens
CARVSRRYFDWFGPGAFDIW

SEQ ID NO: 7004 - protein, 16 aa, Homo sapiens
CARGGIQLWLWYFDYW

SEQ ID NO: 7005 - protein, 25 aa, Homo sapiens
CASRSESVTLRFFEWLSIYWYFDLW

SEQ ID NO: 7006 - protein, 13 aa, Homo sapiens [sequence omitted]

SEQ ID NO: 7007 - protein, 16 aa, Homo sapiens
CARHRWLRMIDAFDIW

SEQ ID NO: 7008 - protein, 22 aa, Homo sapiens
CARESVTYGDFWSGYYTPFDYW

SEQ ID NO: 7009 - protein, 15 aa, Homo sapiens
CASGGQYYYEGFDIW

SEQ ID NO: 7010 - protein, 19 aa, Homo sapiens
CAKDILGSGSLAPDAFDIW

SEQ ID NO: 7011 - protein, 17 aa, Homo sapiens
CARVGGRGYYYGSEDYW

SEQ ID NO: 7012 - protein, 12 aa, Homo sapiens
CESHKSDAFDIW

SEQ ID NO: 7013 - protein, 13 aa, Homo sapiens
CQSYDESLKTVLF

SEQ ID NO: 7014 - protein, 19 aa, Homo sapiens
CARVFSFWWLVRSGYFDYW

SEQ ID NO: 7015 - protein, 21 aa, Homo sapiens
CARDPTIGYYYGSGSYYFDYW

SEQ ID NO: 7016 - protein, 21 aa, Homo sapiens
CARDRDLTDTAMDTGWYFDLW

SEQ ID NO: 7017 - protein, 17 aa, Homo sapiens
CARGRRRKEGAADFDYW

SEQ ID NO: 7018 - protein, 10 aa, Homo sapiens
CASETGVDYW

SEQ ID NO: 7019 - protein, 17 aa, Homo sapiens
CAKFIGSGYFFYYMDVW

SEQ ID NO: 7020 - protein, 16 aa, Homo sapiens
CAKDVNTMTLRYFDLW

SEQ ID NO: 7021 - protein, 18 aa, Homo sapiens
CARVAYGWGSFPYFFDFW

SEQ ID NO: 7022 - protein, 20 aa, Homo sapiens
CARVRVFTTLRGVSYGFDPW

SEQ ID NO: 7023 - protein, 18 aa, Homo sapiens
CARDVHDSSGWPNGFDYW

SEQ ID NO: 7024 - protein, 23 aa, Homo sapiens
CARHPSEYYYGSGSYYNVMFDYW

SEQ ID NO: 7025 - protein, 17 aa, Homo sapiens
CARDQDTMIVYDAFDIW

SEQ ID NO: 7026 - protein, 11 aa, Homo sapiens [sequence omitted]

SEQ ID NO: 7027 - protein, 21 aa, Homo sapiens
CARFRIQLWLLVYYYYNMDVW

SEQ ID NO: 7028 - protein, 16 aa, Homo sapiens
CARDFNDFWSGYYDYW

SEQ ID NO: 7029 - protein, 13 aa, Homo sapiens
CANLWFGELFDYW

SEQ ID NO: 7030 - protein, 18 aa, Homo sapiens
CARGPSSSWYGDNWFDPW

SEQ ID NO: 7031 - protein, 17 aa, Homo sapiens
CAREVAAAGSRLHFDYW

SEQ ID NO: 7032 - protein, 17 aa, Homo sapiens
CAKYELIAAAGPNFDYW

SEQ ID NO: 7033 - protein, 15 aa, Homo sapiens
CARELAAAGMVNDYW

SEQ ID NO: 7034 - protein, 14 aa, Homo sapiens
CQAWDSSTAFRVVF

SEQ ID NO: 7035 - protein, 17 aa, Homo sapiens
CARDEWDYYYYYGMDVW

SEQ ID NO: 7036 - protein, 14 aa, Homo sapiens
CAKLIRWDSDFDYW

SEQ ID NO: 7037 - protein, 12 aa, Homo sapiens [sequence omitted]

SEQ ID NO: 7038 - protein, 19 aa, Homo sapiens
CARALVSFAELTDSAFDYW

SEQ ID NO: 7039 - protein, 16 aa, Homo sapiens
CAKGTWVTTISWFDPW

SEQ ID NO: 7040 - protein, 23 aa, Homo sapiens
CAVVPAYCSGGSCLDTSDAFGMW

SEQ ID NO: 7041 - protein, 16 aa, Homo sapiens
CAHRPKGWNDIWFDPW

SEQ ID NO: 7042 - protein, 20 aa, Homo sapiens
CVKDVAPLYSGSQTWYFDLW

SEQ ID NO: 7043 - protein, 21 aa, Homo sapiens
CARHRKEQWLVRTGGEYFQHW

SEQ ID NO: 7044 - protein, 11 aa, Homo sapiens
CMQDAHWPPAF

SEQ ID NO: 7045 - protein, 11 aa, Homo sapiens
CHQYNTWPVTF

SEQ ID NO: 7046 - protein, 16 aa, Homo sapiens
CVRGDGFHSTYYFDYW

SEQ ID NO: 7047 - protein, 18 aa, Homo sapiens
CARNTGYSSSWCDAFDIW

SEQ ID NO: 7048 - protein, 15 aa, Homo sapiens
CARLEYPDTSGFYYW

SEQ ID NO: 7049 - protein, 11 aa, Homo sapiens
CQQFSNYLFTF

SEQ ID NO: 7050 - protein, 12 aa, Homo sapiens
CAKDGFGGLDYW

SEQ ID NO: 7051 - protein, 16 aa, Homo sapiens
CAKDSSSWPPWYFQHW

SEQ ID NO: 7052 - protein, 15 aa, Homo sapiens
CARAGTAAVDAFDIW

SEQ ID NO: 7053 - protein, 13 aa, Homo sapiens
CLSADSTGSYPVF

SEQ ID NO: 7054 - protein, 13 aa, Homo sapiens
CQHFDSYPRVFTF

SEQ ID NO: 7055 - protein, 22 aa, Homo sapiens
CARHGMKTLGGVNFPHYAFDIW

SEQ ID NO: 7056 - protein, 19 aa, Homo sapiens
CARVRRQWLENGPSFFDYW

SEQ ID NO: 7057 - protein, 15 aa, Homo sapiens
CAKASVVVITCLDYW

SEQ ID NO: 7058 - protein, 21 aa, Homo sapiens
CARVGLGSPLFGLVYDAFDIW

SEQ ID NO: 7059 - protein, 18 aa, Homo sapiens
CAKDGVYGDSHFYYFDYW

SEQ ID NO: 7060 - protein, 15 aa, Homo sapiens
CVKLKGSPASAFDIW

SEQ ID NO: 7061 - protein, 15 aa, Homo sapiens
CASLNFIRTWMFDYW

SEQ ID NO: 7062 - protein, 13 aa, Homo sapiens
CQQYHEWPPRNTF

SEQ ID NO: 7063 - protein, 22 aa, Homo sapiens
CARHLYDYVWGSYRYTDAFDIW

SEQ ID NO: 7064 - protein, 13 aa, Homo sapiens
CAHAVIAALFDYW

SEQ ID NO: 7065 - protein, 15 aa, Homo sapiens
CATILTSGMGYFDYW

SEQ ID NO: 7066 - protein, 10 aa, Homo sapiens
CMQGIEFQTF

SEQ ID NO: 7067 - protein, 17 aa, Homo sapiens
CAKDARKFGHFKFFDYW

SEQ ID NO: 7068 - protein, 23 aa, Homo sapiens
CARRVQSGRYNSDNSVYSRFDFW

SEQ ID NO: 7069 - protein, 19 aa, Homo sapiens
CARIQAFSWIQLPDAFDIW

SEQ ID NO: 7070 - protein, 18 aa, Homo sapiens
CARGSTIFGVVIKHIDYW

SEQ ID NO: 7071 - protein, 18 aa, Homo sapiens
CAREAGYTAYDSAALDYW

SEQ ID NO: 7072 - protein, 17 aa, Homo sapiens
CAKDLRAVLDPNYFDYW

SEQ ID NO: 7073 - protein, 12 aa, Homo sapiens
CLLSYSDTRPLF

SEQ ID NO: 7074 - protein, 14 aa, Homo sapiens
CARVQGDPNWFDPW

SEQ ID NO: 7075 - protein, 15 aa, Homo sapiens
CARTMVRGVPRLDYW

SEQ ID NO: 7076 - protein, 15 aa, Homo sapiens
CARGRQWEPLAFDIW

SEQ ID NO: 7077 - protein, 20 aa, Homo sapiens
CARPGHVGKYCGGDCNFDYW

SEQ ID NO: 7078 - protein, 16 aa, Homo sapiens
CAKDMGSGWLIHFDYW

SEQ ID NO: 7079 - protein, 26 aa, Homo sapiens
CARAEASLLRYFDWLQKGVWNYFDYW

SEQ ID NO: 7080 - protein, 12 aa, Homo sapiens
CARHAGASFDTW

SEQ ID NO: 7081 - protein, 15 aa, Homo sapiens
CARGGGGNYLFLDYW

SEQ ID NO: 7082 - protein, 16 aa, Homo sapiens
CTRHVEYFDWFYFDYW

SEQ ID NO: 7083 - protein, 23 aa, Homo sapiens
CARDEPPHGSSWYYVQSRGFDYW

SEQ ID NO: 7084 - protein, 17 aa, Homo sapiens
CARDGDMGGGTYYFDYW

SEQ ID NO: 7085 - protein, 23 aa, Homo sapiens
CARDRKYYYDSSGYQLIDAFDIW

SEQ ID NO: 7086 - protein, 15 aa, Homo sapiens
CAKRSWGYSVAFDIW

SEQ ID NO: 7087 - protein, 17 aa, Homo sapiens
CARGEVTAMVTDAFDIW

SEQ ID NO: 7088 - protein, 16 aa, Homo sapiens
CTRDGNFDWLLYLDYW

SEQ ID NO: 7089 - protein, 20 aa, Homo sapiens
CAREGDAQDYGDYLSYFDYW

SEQ ID NO: 7090 - protein, 19 aa, Homo sapiens
CARDPTNCSGGSCYPGDYW

SEQ ID NO: 7091 - protein, 17 aa, Homo sapiens
CARRYYGSGLGGWFDPW

SEQ ID NO: 7092 - protein, 18 aa, Homo sapiens
CARELYIVVVVAAYFDYW

SEQ ID NO: 7093 - protein, 18 aa, Homo sapiens
CARHRRDYQRDSYYSDYW

SEQ ID NO: 7094 - protein, 22 aa, Homo sapiens
CARDHRVAGNQSPYYYYGMDVW

SEQ ID NO: 7095 - protein, 18 aa, Homo sapiens
CVRGPGSLGAAGPPYDYW

SEQ ID NO: 7096 - protein, 18 aa, Homo sapiens
CARDLARYNWNDVPFDYW

SEQ ID NO: 7097 - protein, 24 aa, Homo sapiens
CARDLEISGGSSGSYYRSGFLDYW

SEQ ID NO: 7098 - protein, 18 aa, Homo sapiens
CAKDHKGYYGSGNYFDSW

SEQ ID NO: 7099 - protein, 20 aa, Homo sapiens
CAKQADYYDSSGYSWSQDYW

SEQ ID NO: 7100 - protein, 17 aa, Homo sapiens
CASSIAVAPTRDAFDIW

SEQ ID NO: 7101 - protein, 18 aa, Homo sapiens
CAREGCSSTSCYQTPDYW

SEQ ID NO: 7102 - protein, 17 aa, Homo sapiens
CASFAGAAATLYYFDYW

SEQ ID NO: 7103 - protein, 18 aa, Homo sapiens
CARDPDGYNWMNDAFDIW

SEQ ID NO: 7104 - protein, 14 aa, Homo sapiens
CAREYSSSWPNDYW

SEQ ID NO: 7105 - protein, 18 aa, Homo sapiens
CAKADYDSSGYYYYFDYW

SEQ ID NO: 7106 - protein, 20 aa, Homo sapiens
CARLSFSGWSPYYYYGMDVW

SEQ ID NO: 7107 - protein, 17 aa, Homo sapiens
CARLQACSGYDCPIDYW

SEQ ID NO: 7108 - protein, 20 aa, Homo sapiens
CARGGKRIVVVTAIRAFDIW

SEQ ID NO: 7109 - protein, 16 aa, Homo sapiens
CARYNIEMTSNLFDYW

SEQ ID NO: 7110 - protein, 22 aa, Homo sapiens
CARNLYFDSGSYYNSRVWFDPW

SEQ ID NO: 7111 - protein, 23 aa, Homo sapiens
CARTGVTYYYGSGSYFPDAFDIW

SEQ ID NO: 7112 - protein, 16 aa, Homo sapiens
CTTDLGLLPGTYFDYW

SEQ ID NO: 7113 - protein, 19 aa, Homo sapiens
CARAGWVDGDTRSWFFDYW

SEQ ID NO: 7114 - protein, 19 aa, Homo sapiens
CARPGAAGTGYYYYYMDVW

SEQ ID NO: 7115 - protein, 19 aa, Homo sapiens
CARVKGIGYSGYEWELDYW

SEQ ID NO: 7116 - protein, 20 aa, Homo sapiens
CARANVGGWLRGLGWYFDLW

SEQ ID NO: 7117 - protein, 18 aa, Homo sapiens
CARHLQYYYVSELAFDIW

SEQ ID NO: 7118 - protein, 16 aa, Homo sapiens
CATDGYSITWPYFDFW

SEQ ID NO: 7119 - protein, 16 aa, Homo sapiens
CARDFDVLSGDYNAYW

SEQ ID NO: 7120 - protein, 19 aa, Homo sapiens
CARNRLERLALGYNFFDPW

SEQ ID NO: 7121 - protein, 18 aa, Homo sapiens
CAKDRGGQGLVLSYFDNW

SEQ ID NO: 7122 - protein, 20 aa, Homo sapiens
CAKDEGPNALSSGWTYFDYW

SEQ ID NO: 7123 - protein, 22 aa, Homo sapiens
CARSVDTAMVFRPRLFYYMDVW

SEQ ID NO: 7124 - protein, 16 aa, Homo sapiens
CARGGLRLRVWYFDLW

SEQ ID NO: 7125 - protein, 20 aa, Homo sapiens
CARHRYDYVWGIHEGEIDYW

SEQ ID NO: 7126 - protein, 20 aa, Homo sapiens
CAKDMITFGGVGQSFAFDIW

SEQ ID NO: 7127 - protein, 25 aa, Homo sapiens
CARDPVYGSGSYLGPPQPLYAIDIW

SEQ ID NO: 7128 - protein, 14 aa, Homo sapiens
CASLGSGSYHLDYW

SEQ ID NO: 7129 - protein, 19 aa, Homo sapiens
CAKVPPPDSGSYVSYFDYW

SEQ ID NO: 7130 - protein, 19 aa, Homo sapiens
CAKDIGAAAGKGDDAFDIW

SEQ ID NO: 7131 - protein, 27 aa, Homo sapiens
CARVGDYGPGNYFSDRISLLADASDIW

SEQ ID NO: 7132 - protein, 18 aa, Homo sapiens
CTRGGGGRITYFSRFDSW

SEQ ID NO: 7133 - protein, 19 aa, Homo sapiens
CARTLIRGDPYYYYGMDVW

SEQ ID NO: 7134 - protein, 24 aa, Homo sapiens
CARVLGSRGTIFGVAIGSDYFDYW

SEQ ID NO: 7135 - protein, 17 aa, Homo sapiens
CATAPPIAAAGNWFDPW

SEQ ID NO: 7136 - protein, 13 aa, Homo sapiens
CQRYNKWPLLFTF

SEQ ID NO: 7137 - protein, 16 aa, Homo sapiens
CAISNNYYRFNWFDPW

SEQ ID NO: 7138 - protein, 17 aa, Homo sapiens
CARIAAAGTGVPFFDYW

SEQ ID NO: 7139 - protein, 15 aa, Homo sapiens
CARDLTMTTGWFDPW

SEQ ID NO: 7140 - protein, 15 aa, Homo sapiens
CARGTATKLGPFDYW

SEQ ID NO: 7141 - protein, 13 aa, Homo sapiens
CAHTVWGAYVDYW

SEQ ID NO: 7142 - protein, 12 aa, Homo sapiens
CARDWQLGNDYW

SEQ ID NO: 7143 - protein, 22 aa, Homo sapiens
CARVLPSYDILTGYYMAYFDYW

SEQ ID NO: 7144 - protein, 20 aa, Homo sapiens
CAKDHTWLNSRTYGVFFDHW

SEQ ID NO: 7145 - protein, 16 aa, Homo sapiens
CARDDPRIEAAGCDYW

SEQ ID NO: 7146 - protein, 17 aa, Homo sapiens
CARDVHYDILTGYYNYW

SEQ ID NO: 7147 - protein, 22 aa, Homo sapiens
CVKDLRIGHGSGNFILHPFDSW

SEQ ID NO: 7148 - protein, 18 aa, Homo sapiens
CARPTSGQMATISPFDYW

SEQ ID NO: 7149 - protein, 21 aa, Homo sapiens
CAREVGVAGPWNYYYYYMDVW

SEQ ID NO: 7150 - protein, 24 aa, Homo sapiens
CARGVTIAAAGILLPYYYYYMDVW

SEQ ID NO: 7151 - protein, 14 aa, Homo sapiens
CAKVDSSSWHFDYW

SEQ ID NO: 7152 - protein, 21 aa, Homo sapiens
CARGYDYVWGSYRYTDYFDYW

SEQ ID NO: 7153 - protein, 22 aa, Homo sapiens
CARDRWERYTTVTQIINAFDIW

SEQ ID NO: 7154 - protein, 25 aa, Homo sapiens
CARGWRYCSGGSCFVGQYYYYMDVW

SEQ ID NO: 7155 - protein, 17 aa, Homo sapiens
CASFYYGSGSYAAFDIW

SEQ ID NO: 7156 - protein, 15 aa, Homo sapiens
CAKDDFGTTASFDYW

SEQ ID NO: 7157 - protein, 20 aa, Homo sapiens
CARGEETYYDFWSGYLIDYW

SEQ ID NO: 7158 - protein, 12 aa, Homo sapiens
CQQYNTESTWTF

SEQ ID NO: 7159 - protein, 12 aa, Homo sapiens
CASFGSWYTNYW

SEQ ID NO: 7160 - protein, 23 aa, Homo sapiens
CAKDIDGSGSYSNEFWYDAFDIW

SEQ ID NO: 7161 - protein, 12 aa, Homo sapiens
CARAGTTFPDYW

SEQ ID NO: 7162 - protein, 16 aa, Homo sapiens
CAKVGGDYGHLIYDYW

SEQ ID NO: 7163 - protein, 19 aa, Homo sapiens
CAGVYDSSGYYLAEYFQHW

SEQ ID NO: 7164 - protein, 15 aa, Homo sapiens
CARVVRSSWREIDYW

SEQ ID NO: 7165 - protein, 23 aa, Homo sapiens
CARLSPRLLWFGELHLSGGFDPW

SEQ ID NO: 7166 - protein, 12 aa, Homo sapiens
CQETSIFPPGTF

SEQ ID NO: 7167 - protein, 20 aa, Homo sapiens
CARQIRYFDRVQYNYYMDVW

SEQ ID NO: 7168 - protein, 16 aa, Homo sapiens
CARERRDSREFVPDYW

SEQ ID NO: 7169 - protein, 22 aa, Homo sapiens
CARTLYYYDSGGYFYPNYFDYW

SEQ ID NO: 7170 - protein, 16 aa, Homo sapiens
CARLRGSSWMYYFDSW

SEQ ID NO: 7171 - protein, 19 aa, Homo sapiens
CARGRGAVLRFLEWSGDYW

SEQ ID NO: 7172 - protein, 26 aa, Homo sapiens
CARGISNVLLWFGELLGHYYYYMDVW

SEQ ID NO: 7173 - protein, 17 aa, Homo sapiens
CAHRRDTSVWYTVFDPW

SEQ ID NO: 7174 - protein, 19 aa, Homo sapiens
CARVNFPGYDSSGYGFDYW

SEQ ID NO: 7175 - protein, 18 aa, Homo sapiens
CAKDRYLGVATTYYFDYW

SEQ ID NO: 7176 - protein, 25 aa, Homo sapiens
CARGRHKRVIVVVVAANIGHHFDYW

SEQ ID NO: 7177 - protein, 15 aa, Homo sapiens
CARTADDSSGFFDYW

SEQ ID NO: 7178 - protein, 13 aa, Homo sapiens
CARDDVQETLDYW

SEQ ID NO: 7179 - protein, 26 aa, Homo sapiens
CARDLGVQVVTPQTDDYYYYYGMDVW

SEQ ID NO: 7180 - protein, 14 aa, Homo sapiens
CARIRYSSNALDYW

SEQ ID NO: 7181 - protein, 21 aa, Homo sapiens
CAHIFIRLEDYGPQTYYFDYW

SEQ ID NO: 7182 - protein, 15 aa, Homo sapiens
CAKDLGSWSPNGDYW

SEQ ID NO: 7183 - protein, 19 aa, Homo sapiens
CARQGGGYGSGHKDWFDPW

SEQ ID NO: 7184 - protein, 12 aa, Homo sapiens
CMEGTHWPFFAF

SEQ ID NO: 7185 - protein, 18 aa, Homo sapiens
CARDTFGWLQNRGAFDIW

SEQ ID NO: 7186 - protein, 17 aa, Homo sapiens
CARVDTAMASAPSFDYW

SEQ ID NO: 7187 - protein, 16 aa, Homo sapiens
CARHAYGSDRGDFDYW

SEQ ID NO: 7188 - protein, 16 aa, Homo sapiens
CARTRGYSGYDYFDYW

SEQ ID NO: 7189 - protein, 21 aa, Homo sapiens
CARDSDGSGSYLETEDAFDIW

SEQ ID NO: 7190 - protein, 23 aa, Homo sapiens
CAREGNYYGSGSSILKVDAFDIW

SEQ ID NO: 7191 - protein, 17 aa, Homo sapiens
CYCYGSDYGDYGGVDYW

SEQ ID NO: 7192 - protein, 23 aa, Homo sapiens
CAKHFVVVTATGTYSGSPDFDLW

SEQ ID NO: 7193 - protein, 23 aa, Homo sapiens
CARAPRGYDYVWGSYRSWFFDYW

SEQ ID NO: 7194 - protein, 12 aa, Homo sapiens [sequence omitted]

SEQ ID NO: 7195 - protein, 21 aa, Homo sapiens
CARAQSITMIVVVIITAFDIW

SEQ ID NO: 7196 - protein, 25 aa, Homo sapiens
CARGDYDILTDSVPRYYSFYYMDFW

SEQ ID NO: 7197 - protein, 17 aa, Homo sapiens
CVRESLAPDSNSWPDYW

SEQ ID NO: 7198 - protein, 17 aa, Homo sapiens
CAKVPEYSSSWYYFDYW

SEQ ID NO: 7199 - protein, 24 aa, Homo sapiens
CARVYRGYKFGFPDSYYYYYMDVW

SEQ ID NO: 7200 - protein, 17 aa, Homo sapiens
CARERDSSSLLGAFDIW

SEQ ID NO: 7201 - protein, 20 aa, Homo sapiens
CAKDSVAGHKNYYYYGMDVW

SEQ ID NO: 7202 - protein, 21 aa, Homo sapiens
CAREPQGGYFDWLLWAYFDYW

SEQ ID NO: 7203 - protein, 18 aa, Homo sapiens
CACGVGYGGNFVWYFQHW

SEQ ID NO: 7204 - protein, 15 aa, Homo sapiens
CASTWYTSDHAFDFW

SEQ ID NO: 7205 - protein, 27 aa, Homo sapiens
CARDFSSLNLRVLAYSGYDYWDYFDYW

SEQ ID NO: 7206 - protein, 21 aa, Homo sapiens
CARDPCKIQLWLQCYSYFDYW

SEQ ID NO: 7207 - protein, 23 aa, Homo sapiens
CARDRGIAVAGTLLLRNWYFDLW

SEQ ID NO: 7208 - protein, 19 aa, Homo sapiens
CARLPWGVGAASNYYFDYW

SEQ ID NO: 7209 - protein, 18 aa, Homo sapiens
CAKVPGGPRGVGHSFDPW

SEQ ID NO: 7210 - protein, 15 aa, Homo sapiens
CATTQVATPGAFDIW

SEQ ID NO: 7211 - protein, 14 aa, Homo sapiens
CAREILNTDGMDVW

SEQ ID NO: 7212 - protein, 20 aa, Homo sapiens
CARAHCSSSSCYEIDSFDIW

SEQ ID NO: 7213 - protein, 16 aa, Homo sapiens
CAKANYYDSSGYIDYW

SEQ ID NO: 7214 - protein, 18 aa, Homo sapiens
CAKDVSWGIAVAGTQDYW

SEQ ID NO: 7215 - protein, 16 aa, Homo sapiens
CVRQLYSSSWYQFDYW

SEQ ID NO: 7216 - protein, 17 aa, Homo sapiens
CGGSPLYNGDWYYFDHW

SEQ ID NO: 7217 - protein, 25 aa, Homo sapiens
CTRDSRGYYDILTGYYVLPAPFDYW

SEQ ID NO: 7218 - protein, 16 aa, Homo sapiens
CARHGGFGEFDAFDIW

SEQ ID NO: 7219 - protein, 20 aa, Homo sapiens
CARHNGRGGIAVANDAFDIW

SEQ ID NO: 7220 - protein, 13 aa, Homo sapiens
CARIYLRGYSDYW

SEQ ID NO: 7221 - protein, 18 aa, Homo sapiens
CAKVRSIATATPFFFDSW

SEQ ID NO: 7222 - protein, 17 aa, Homo sapiens
CARVQVLGISPYYFDFW

SEQ ID NO: 7223 - protein, 26 aa, Homo sapiens
CARGFSGVVVAALGLDYYYYYGMDVW

SEQ ID NO: 7224 - protein, 23 aa, Homo sapiens
CARVYSAYYYGSGSYYDDAFDIW

SEQ ID NO: 7225 - protein, 11 aa, Homo sapiens
CLQSDSTPLAF

SEQ ID NO: 7226 - protein, 21 aa, Homo sapiens
CATAGPEYSSSRPMYNWFDPW

SEQ ID NO: 7227 - protein, 13 aa, Homo sapiens
CQKCDNLPPSCSF

SEQ ID NO: 7228 - protein, 16 aa, Homo sapiens
CASPTYCSGGYCFDYW

SEQ ID NO: 7229 - protein, 15 aa, Homo sapiens
CAILHPDGYKLFDYW

SEQ ID NO: 7230 - protein, 20 aa, Homo sapiens
CARVPNLLWFGESNYAFDIW

SEQ ID NO: 7231 - protein, 14 aa, Homo sapiens
CAKIMTTVTTKDYW

SEQ ID NO: 7232 - protein, 22 aa, Homo sapiens
CARSVLVGSGYSSHSGSGFDYW

SEQ ID NO: 7233 - protein, 21 aa, Homo sapiens
CAKGGVWFGELRSGKYYFDYW

SEQ ID NO: 7234 - protein, 13 aa, Homo sapiens
CQRYNDWPPTWTF

SEQ ID NO: 7235 - protein, 15 aa, Homo sapiens
CARVLGDRGGLFDYW

SEQ ID NO: 7236 - protein, 21 aa, Homo sapiens
CAKDQAGYSSGWYDGYYFDYW

SEQ ID NO: 7237 - protein, 21 aa, Homo sapiens
CARDQHQSISGKLKYNYFDCW

SEQ ID NO: 7238 - protein, 22 aa, Homo sapiens
CARALISYSILTGYYPQSFDIW

SEQ ID NO: 7239 - protein, 24 aa, Homo sapiens
CARSPLVAAADAGYYYYYYYMDVW

SEQ ID NO: 7240 - protein, 20 aa, Homo sapiens
CASHRRIGMIVPVDSYFDYW

SEQ ID NO: 7241 - protein, 19 aa, Homo sapiens
CASPTPWYSSTWHDAFHIW

SEQ ID NO: 7242 - protein, 21 aa, Homo sapiens
CARGLTQIREQPNRSDAFDIW

SEQ ID NO: 7243 - protein, 20 aa, Homo sapiens
CARVRSTIIMILRSDAFDVW

SEQ ID NO: 7244 - protein, 16 aa, Homo sapiens
CAKETRITAADSFDHW

SEQ ID NO: 7245 - protein, 21 aa, Homo sapiens
CAAYYDILTGYRPPNQRFDYW

SEQ ID NO: 7246 - protein, 19 aa, Homo sapiens
CARGEEGPRWFGESSFDYW

SEQ ID NO: 7247 - protein, 23 aa, Homo sapiens
CARLGRGYSSSWYSLRFSAFDIW

SEQ ID NO: 7248 - protein, 13 aa, Homo sapiens
CQQYYNAPPALSF

SEQ ID NO: 7249 - protein, 16 aa, Homo sapiens
CVREVFRVVTTYFDYW

SEQ ID NO: 7250 - protein, 20 aa, Homo sapiens
CAREDYVWGILISRGAFDIW

SEQ ID NO: 7251 - protein, 18 aa, Homo sapiens
CARGGGSGLIYYYYMDVW

SEQ ID NO: 7252 - protein, 12 aa, Homo sapiens
CSRAGYYRFDYW

SEQ ID NO: 7253 - protein, 16 aa, Homo sapiens
CATGGGISYYFYMDVW

SEQ ID NO: 7254 - protein, 31 aa, Homo sapiens
CARAILIGSPPQVWSWGPKQKVRRNCYFDFW

SEQ ID NO: 7255 - protein, 15 aa, Homo sapiens
CARILGYSNYHVDYW

SEQ ID NO: 7256 - protein, 19 aa, Homo sapiens
CARLLKANWGLHYMAFDIW

SEQ ID NO: 7257 - protein, 18 aa, Homo sapiens
CAKDISLGYGSGTHFDSW

SEQ ID NO: 7258 - protein, 19 aa, Homo sapiens
CGRADKGYCAGGSCYFEYW

SEQ ID NO: 7259 - protein, 12 aa, Homo sapiens
CQQYMHWPSYTF

SEQ ID NO: 7260 - protein, 16 aa, Homo sapiens
CARWLRGDTNYYMDVW

SEQ ID NO: 7261 - protein, 18 aa, Homo sapiens
CARDRIDRIAAAGTNDYW

SEQ ID NO: 7262 - protein, 24 aa, Homo sapiens
CARNEARRITIFGVVILPDAFDIW

SEQ ID NO: 7263 - protein, 19 aa, Homo sapiens
CAKVQHGFVWFGDSYFDYW

SEQ ID NO: 7264 - protein, 16 aa, Homo sapiens
CARMPTRLWFGNFDYW

SEQ ID NO: 7265 - protein, 17 aa, Homo sapiens
CAREPDSSGWYKYFQHW

SEQ ID NO: 7266 - protein, 18 aa, Homo sapiens
CARGDISTTAGFWYFALW

SEQ ID NO: 7267 - protein, 21 aa, Homo sapiens
CARSYCSGGSCYNDPRDFDYW

SEQ ID NO: 7268 - protein, 26 aa, Homo sapiens
CAKDLHPSQGAEYYYGSGSYCQADYW

SEQ ID NO: 7269 - protein, 20 aa, Homo sapiens
CARAGSSSMWLAATDYFDYW

SEQ ID NO: 7270 - protein, 30 aa, Homo sapiens
CLKASDTAMYYCARHDRIGLPAAHNWFDPW

SEQ ID NO: 7271 - protein, 15 aa, Homo sapiens
CAKAAMEVITTFDYW

SEQ ID NO: 7272 - protein, 14 aa, Homo sapiens
CARDRYGDYGVDYW

SEQ ID NO: 7273 - protein, 22 aa, Homo sapiens
CARHKLSFYDISTGYSDGFDIW

SEQ ID NO: 7274 - protein, 23 aa, Homo sapiens
CATGGAKADFWSGYYYLQAFDYW

SEQ ID NO: 7275 - protein, 16 aa, Homo sapiens
CAHRSSGFYAAYFDYW

SEQ ID NO: 7276 - protein, 14 aa, Homo sapiens
CTTVGAGYNAFDIW

SEQ ID NO: 7277 - protein, 20 aa, Homo sapiens
CAREVHYDILTGYYYSFDYW

SEQ ID NO: 7278 - protein, 21 aa, Homo sapiens
CARLLPSWSDFRNSRNWFDPW

SEQ ID NO: 7279 - protein, 19 aa, Homo sapiens
CASLSRDYDILTGYYFDYW

SEQ ID NO: 7280 - protein, 25 aa, Homo sapiens
CARVPSDIVATFPGFIYYYYYMDVW

SEQ ID NO: 7281 - protein, 18 aa, Homo sapiens
CAKVTVHTAMVLGAFDIW

SEQ ID NO: 7282 - protein, 20 aa, Homo sapiens
CARDPVVPAARTRQGHFDYW

SEQ ID NO: 7283 - protein, 12 aa, Homo sapiens
CARQPGYTFDIW

SEQ ID NO: 7284 - protein, 23 aa, Homo sapiens
CAKDPVEGYSSGWYYYYYGMDVW

SEQ ID NO: 7285 - protein, 19 aa, Homo sapiens
CARGNRQWLARSYWYFDLW

SEQ ID NO: 7286 - protein, 17 aa, Homo sapiens
CARHIRYFDFKRAFDIW

SEQ ID NO: 7287 - protein, 17 aa, Homo sapiens
CARDVKDTTMSWYFDLW

SEQ ID NO: 7288 - protein, 19 aa, Homo sapiens
CAKALSGYEGYAPGPFDIW

SEQ ID NO: 7289 - protein, 19 aa, Homo sapiens
CARVMGWFGKNYYYYMDVW

SEQ ID NO: 7290 - protein, 26 aa, Homo sapiens
CARIHAEPYGRGWFIEYYHYLYMDVW

SEQ ID NO: 7291 - protein, 20 aa, Homo sapiens
CARHPGYSSGWYFSNWFDPW

SEQ ID NO: 7292 - protein, 19 aa, Homo sapiens
CARAIVPFMITFGGGFDYW

SEQ ID NO: 7293 - protein, 14 aa, Homo sapiens
CARANWMYWYFDLW

SEQ ID NO: 7294 - protein, 15 aa, Homo sapiens
CAKVATYSSSYFDYW

SEQ ID NO: 7295 - protein, 12 aa, Homo sapiens
CVKDNDGDFDYW

SEQ ID NO: 7296 - protein, 19 aa, Homo sapiens
CVKDKGSGWPQPHWNFDLW

SEQ ID NO: 7297 - protein, 16 aa, Homo sapiens
CSRGAWVQLTSYFDLW

SEQ ID NO: 7298 - protein, 19 aa, Homo sapiens
CAHIDLLWFGEFLVAFDIW

SEQ ID NO: 7299 - protein, 21 aa, Homo sapiens
CAKRRSFCSGENCYETSFDQW

SEQ ID NO: 7300 - protein, 20 aa, Homo sapiens
CAKGSIFGVVIIGGGWFDPW

SEQ ID NO: 7301 - protein, 20 aa, Homo sapiens
CARAPLWFGELLPDNWFDPW

SEQ ID NO: 7302 - protein, 14 aa, Homo sapiens
CANAGFAEDAFDIW

SEQ ID NO: 7303 - protein, 17 aa, Homo sapiens
CARHLSEGGVPFFFDYW

SEQ ID NO: 7304 - protein, 17 aa, Homo sapiens
CARGHDILTGYNWFDPW

SEQ ID NO: 7305 - protein, 15 aa, Homo sapiens
CARFYGVARDAFDLW

SEQ ID NO: 7306 - protein, 17 aa, Homo sapiens
CVTEVSYFLTTYYYVYW

SEQ ID NO: 7307 - protein, 15 aa, Homo sapiens
CARQSNSGWYYFDHW

SEQ ID NO: 7308 - protein, 19 aa, Homo sapiens
CARARCSGGSCYPNYFDSW

SEQ ID NO: 7309 - protein, 17 aa, Homo sapiens
CAKNMGGSGSYYNLDYW

SEQ ID NO: 7310 - protein, 15 aa, Homo sapiens
CARRGSYPIGGFDHW

SEQ ID NO: 7311 - protein, 16 aa, Homo sapiens
CARASYGDYIRPYDYW

SEQ ID NO: 7312 - protein, 22 aa, Homo sapiens
CARHEDFVEYLWTNSYYYMDVW

SEQ ID NO: 7313 - protein, 17 aa, Homo sapiens
CAHRRDWGWFGDAFDIW

SEQ ID NO: 7314 - protein, 14 aa, Homo sapiens
CATVGATGTDFDYW

SEQ ID NO: 7315 - protein, 20 aa, Homo sapiens
CARDQYGPATLYYYYYMDVW

SEQ ID NO: 7316 - protein, 18 aa, Homo sapiens
CARTTMIRGVPGYYFDYW

SEQ ID NO: 7317 - protein, 15 aa, Homo sapiens
CAKGGEWLRYGIDYW

SEQ ID NO: 7318 - protein, 16 aa, Homo sapiens
CARFSSWPYTYYFDYW

SEQ ID NO: 7319 - protein, 17 aa, Homo sapiens
CARDPPRHPGNDAFDIW

SEQ ID NO: 7320 - protein, 19 aa, Homo sapiens
CARHDRIGLPAAHNWFDPW

SEQ ID NO: 7321 - protein, 18 aa, Homo sapiens
CARGGDGYNLGSWYFDLW

SEQ ID NO: 7322 - protein, 14 aa, Homo sapiens
CAKENGDYVSFDYW

SEQ ID NO: 7323 - protein, 19 aa, Homo sapiens
CASERSGYSYGYKGTFDYW

SEQ ID NO: 7324 - protein, 16 aa, Homo sapiens
CVKDQNSVWYWYFDLW

SEQ ID NO: 7325 - protein, 10 aa, Homo sapiens
CSSYAGSNNF

SEQ ID NO: 7326 - protein, 27 aa, Homo sapiens
CARHGNEYCSGGSCYPNYYYYYGMDVW

SEQ ID NO: 7327 - protein, 22 aa, Homo sapiens
CARTPARFYFDSSGPYWYFDVW

SEQ ID NO: 7328 - protein, 17 aa, Homo sapiens
CAHLVSSGWYGDAFDIW

SEQ ID NO: 7329 - protein, 18 aa, Homo sapiens
CAKDDARLTGYYQAFDYW

SEQ ID NO: 7330 - protein, 13 aa, Homo sapiens
CATYYNYDAFDIW

SEQ ID NO: 7331 - protein, 21 aa, Homo sapiens
CARHVGYVLRYFDWLDAFDIW

SEQ ID NO: 7332 - protein, 15 aa, Homo sapiens
CAKSPPRVVAIFDYW

SEQ ID NO: 7333 - protein, 16 aa, Homo sapiens
CARMFYGSGTPKADYW

SEQ ID NO: 7334 - protein, 13 aa, Homo sapiens
CARQLQLYYFDFW

SEQ ID NO: 7335 - protein, 18 aa, Homo sapiens
CTTLAGRYFDWLLYPGYW

SEQ ID NO: 7336 - protein, 22 aa, Homo sapiens
CAKVRYDFWSGYYPPSNWFDPW

SEQ ID NO: 7337 - protein, 24 aa, Homo sapiens
CARDNQYYYGSGSYYRSYWYFDLW

SEQ ID NO: 7338 - protein, 16 aa, Homo sapiens
CAKDIGVTTVITSDYW

SEQ ID NO: 7339 - protein, 21 aa, Homo sapiens
CARHWVKVQIPFYYYYGMDVW

SEQ ID NO: 7340 - protein, 21 aa, Homo sapiens
CTRADFGSGSFSNEPYYFRYW

SEQ ID NO: 7341 - protein, 12 aa, Homo sapiens
CRAANEGGLDYW

SEQ ID NO: 7342 - protein, 17 aa, Homo sapiens
CAKQFRGVITFDAFDIW

SEQ ID NO: 7343 - protein, 17 aa, Homo sapiens
CAHTGPQDWAGYYFDYW

SEQ ID NO: 7344 - protein, 15 aa, Homo sapiens
CARKGGDYVSAFDLW

SEQ ID NO: 7345 - protein, 22 aa, Homo sapiens
CARGQRVYQPKAGGNSPPGDYW

SEQ ID NO: 7346 - protein, 19 aa, Homo sapiens
CTTHSWGYGSGSSSSFDYW

SEQ ID NO: 7347 - protein, 17 aa, Homo sapiens
CAKVPPTVTSVGALDYW

SEQ ID NO: 7348 - protein, 22 aa, Homo sapiens
CTTDLGIYSSSWYYYYYGMDVW

SEQ ID NO: 7349 - protein, 12 aa, Homo sapiens
CATAGRFRFDIW

SEQ ID NO: 7350 - protein, 20 aa, Homo sapiens
CARSPFSSAYEIPSGAFDLW

SEQ ID NO: 7351 - protein, 28 aa, Homo sapiens
CARDSSNTYYYDSSGYYYVWPTNAFDIW

SEQ ID NO: 7352 - protein, 19 aa, Homo sapiens
CARDLSYYTSGWNWYFDLW

SEQ ID NO: 7353 - protein, 17 aa, Homo sapiens
CARPATQWLALHPFDYW

SEQ ID NO: 7354 - protein, 18 aa, Homo sapiens
CARHSSSDSYTGGLLDYW

SEQ ID NO: 7355 - protein, 19 aa, Homo sapiens
CAKDTYSSGWYKFYAFDIW

SEQ ID NO: 7356 - protein, 19 aa, Homo sapiens
CARVPGAVRGVRTNAFDIW

SEQ ID NO: 7357 - protein, 15 aa, Homo sapiens
CVRYDQEVADGFDVW

SEQ ID NO: 7358 - protein, 17 aa, Homo sapiens
CARPLGPSTAMGIFDYW

SEQ ID NO: 7359 - protein, 16 aa, Homo sapiens
CARSRRVVDLRAFDIW

SEQ ID NO: 7360 - protein, 17 aa, Homo sapiens
CAKDVSPYDYVSYMDVW

SEQ ID NO: 7361 - protein, 24 aa, Homo sapiens
CARGASYEITFGGVIVIRQGVDYW

SEQ ID NO: 7362 - protein, 26 aa, Homo sapiens
CARDNAAGHLQYFDWLSRSDYYMDVW

SEQ ID NO: 7363 - protein, 11 aa, Homo sapiens
CQQYYFPPFNF

SEQ ID NO: 7364 - protein, 22 aa, Homo sapiens
CARVRDSSGWSYYYYYYYMDVW

SEQ ID NO: 7365 - protein, 19 aa, Homo sapiens
CAREGEAAAGTRRYYFDYW

SEQ ID NO: 7366 - protein, 18 aa, Homo sapiens
CARRGFGELLMVSAFDIW

SEQ ID NO: 7367 - protein, 18 aa, Homo sapiens
CARDREAYGDYPDAFDIW

SEQ ID NO: 7368 - protein, 15 aa, Homo sapiens
CAKIGDFYYYYMDVW

SEQ ID NO: 7369 - protein, 24 aa, Homo sapiens
CARELRFLEWLLALQPYYYGMDVW

SEQ ID NO: 7370 - protein, 23 aa, Homo sapiens
CARTTTYYDILTGYSAEEPSDYW

SEQ ID NO: 7371 - protein, 20 aa, Homo sapiens
CAKDSNSISIAAAGTWFDPW

SEQ ID NO: 7372 - protein, 12 aa, Homo sapiens
CRSADSGGIWVF

SEQ ID NO: 7373 - protein, 17 aa, Homo sapiens
CATSIAAAGVLGYFQHW

SEQ ID NO: 7374 - protein, 18 aa, Homo sapiens
CARDYYDSSGYSDGMDVW

SEQ ID NO: 7375 - protein, 18 aa, Homo sapiens
CLRYCSNPSCSETAFDPW

SEQ ID NO: 7376 - protein, 16 aa, Homo sapiens
CARDVIVASLTVFDYW

SEQ ID NO: 7377 - protein, 15 aa, Homo sapiens
CARIHTVVAGHLDYW

SEQ ID NO: 7378 - protein, 20 aa, Homo sapiens
CARHDFEGEAVAGANAFDIW

SEQ ID NO: 7379 - protein, 14 aa, Homo sapiens
CARVGYCGWCFDYW

SEQ ID NO: 7380 - protein, 16 aa, Homo sapiens
CVRDLFRQYSAYSDSW

SEQ ID NO: 7381 - protein, 19 aa, Homo sapiens
CATGFSWHVAATWGGFDYW

SEQ ID NO: 7382 - protein, 16 aa, Homo sapiens
CAKVPFTITMDYMDVW

SEQ ID NO: 7383 - protein, 17 aa, Homo sapiens
CAKISGYGSWSYYNYYW

SEQ ID NO: 7384 - protein, 16 aa, Homo sapiens
CARDYGGGSVRGFDYW

SEQ ID NO: 7385 - protein, 22 aa, Homo sapiens
CARLLGTGYRGYDFGDWYFDLW

SEQ ID NO: 7386 - protein, 27 aa, Homo sapiens
CARDQSVDYYGSGSYYKVLILGAFDIW

SEQ ID NO: 7387 - protein, 17 aa, Homo sapiens
CAHQASSGWYGYYFDYW

SEQ ID NO: 7388 - protein, 19 aa, Homo sapiens
CARILFQPGLRVDWYVDLW

SEQ ID NO: 7389 - protein, 14 aa, Homo sapiens
CARMYGARNQFDYW

SEQ ID NO: 7390 - protein, 25 aa, Homo sapiens
CARSASGSYAKGHALYYYYYFMDFW

SEQ ID NO: 7391 - protein, 15 aa, Homo sapiens
CVRGGPTTTDPLDIW

SEQ ID NO: 7392 - protein, 20 aa, Homo sapiens
CARQSSLGAVITWDDAFDTW

SEQ ID NO: 7393 - protein, 19 aa, Homo sapiens
CAKDPRAGQLWLGYYFDYW

SEQ ID NO: 7394 - protein, 19 aa, Homo sapiens
CAITSAAAAGKRWDYFDYW

SEQ ID NO: 7395 - protein, 23 aa, Homo sapiens
CARGGYCGGRSCYSGISYYFDFW

SEQ ID NO: 7396 - protein, 14 aa, Homo sapiens
CAKVLAVAGTGDYW

SEQ ID NO: 7397 - protein, 19 aa, Homo sapiens
CAKDGGYSYGFGKEYFQHW

SEQ ID NO: 7398 - protein, 13 aa, Homo sapiens
CARDPMEGGADYW

SEQ ID NO: 7399 - protein, 16 aa, Homo sapiens
CARPNSGSYFGAFDIW

SEQ ID NO: 7400 - protein, 10 aa, Homo sapiens
CQESYITPIF

SEQ ID NO: 7401 - protein, 18 aa, Homo sapiens
CARDRRLAVAGYDAFDIW

SEQ ID NO: 7402 - protein, 16 aa, Homo sapiens
CARTSRPYYPYYVDYW

SEQ ID NO: 7403 - protein, 20 aa, Homo sapiens
CAGRYCTNGVCYNPYYFDYW

SEQ ID NO: 7404 - protein, 14 aa, Homo sapiens
CAIQTTADGYFDYW

SEQ ID NO: 7405 - protein, 13 aa, Homo sapiens
CARGIGTARGDYW

SEQ ID NO: 7406 - protein, 23 aa, Homo sapiens
CARGPEYDYVWGTLGGVYAFDIW

SEQ ID NO: 7407 - protein, 14 aa, Homo sapiens
CARMRAVLNAFDIW

SEQ ID NO: 7408 - protein, 17 aa, Homo sapiens
CARARMTAMVPTPCDYW

SEQ ID NO: 7409 - protein, 16 aa, Homo sapiens
CARGVLMVYNDAFDIW

SEQ ID NO: 7410 - protein, 20 aa, Homo sapiens
CARDREYDYVWGSSVAFDIW

SEQ ID NO: 7411 - protein, 15 aa, Homo sapiens [sequence omitted]

SEQ ID NO: 7412 - protein, 15 aa, Homo sapiens
CAKDARVGAQVFDYW

SEQ ID NO: 7413 - protein, 16 aa, Homo sapiens
CARDLSTVVTSHFDYW

SEQ ID NO: 7414 - protein, 20 aa, Homo sapiens
CARDLPTTDYYGSGSYVDYW

SEQ ID NO: 7415 - protein, 14 aa, Homo sapiens
CAKMLSSSTDFDYW

SEQ ID NO: 7416 - protein, 22 aa, Homo sapiens
CARHNPYYDILTGYYYDAFDIW

SEQ ID NO: 7417 - protein, 13 aa, Homo sapiens
CQQFGSSPVMYTF

SEQ ID NO: 7418 - protein, 18 aa, Homo sapiens
CAKDTSSSLYIAALFDYW

SEQ ID NO: 7419 - protein, 19 aa, Homo sapiens
CARPGYSSSWYGGNAFDIW

SEQ ID NO: 7420 - protein, 18 aa, Homo sapiens
CTRDLDSSGWYKDAFDIW

SEQ ID NO: 7421 - protein, 18 aa, Homo sapiens
CARCNEITMIVGNWFDPW

SEQ ID NO: 7422 - protein, 15 aa, Homo sapiens
CARAQWLPQSHFDYW

SEQ ID NO: 7423 - protein, 14 aa, Homo sapiens
CQQLNSYPRYANDF

SEQ ID NO: 7424 - protein, 18 aa, Homo sapiens
CAREVPGYFDWLLYLDYW

SEQ ID NO: 7425 - protein, 20 aa, Homo sapiens
CASSILGYCSGGTCYSFGYW

SEQ ID NO: 7426 - protein, 20 aa, Homo sapiens
CARQDCRSARCYFNNAFDIW

SEQ ID NO: 7427 - protein, 18 aa, Homo sapiens
CTRVYETTVTTAGWFDPW

SEQ ID NO: 7428 - protein, 20 aa, Homo sapiens
CARALSRSKQLVTKYYFDYW

SEQ ID NO: 7429 - protein, 22 aa, Homo sapiens
CARDNVVVAATQSHYYYGMDVW

SEQ ID NO: 7430 - protein, 16 aa, Homo sapiens
CAKDRWVMTPGYFQHW

SEQ ID NO: 7431 - protein, 19 aa, Homo sapiens
CVTWGSGSYYNPQDYFDYW

SEQ ID NO: 7432 - protein, 20 aa, Homo sapiens
CARDGRYCSSTSCSNHFDYW

SEQ ID NO: 7433 - protein, 15 aa, Homo sapiens
CATTVYSRGWYSEYW

SEQ ID NO: 7434 - protein, 15 aa, Homo sapiens
CATMGAYGDYVVDYW

SEQ ID NO: 7435 - protein, 17 aa, Homo sapiens
CARDGSIDAIDRAFDVW

SEQ ID NO: 7436 - protein, 14 aa, Homo sapiens
CVRDKGSSGLFDLW

SEQ ID NO: 7437 - protein, 35 aa, Homo sapiens
CTTVYSYYYDSSGYYYAILSLGAFKDYYYYGMDVW

SEQ ID NO: 7438 - protein, 17 aa, Homo sapiens
CAKGRGPWYSGDWFDPW

SEQ ID NO: 7439 - protein, 13 aa, Homo sapiens
CQQSYSTLFGYTF

SEQ ID NO: 7440 - protein, 15 aa, Homo sapiens
CAHQSIAAAVNFDYW

SEQ ID NO: 7441 - protein, 13 aa, Homo sapiens
CVHRHGYTYDFYW

SEQ ID NO: 7442 - protein, 20 aa, Homo sapiens
CARTKDGYNPSSGSWHFDLW

SEQ ID NO: 7443 - protein, 17 aa, Homo sapiens
CARVRLSGWDPRRFDYW

SEQ ID NO: 7444 - protein, 18 aa, Homo sapiens
CARQSCTGGSCYWSFDYW

SEQ ID NO: 7445 - protein, 17 aa, Homo sapiens
CAKPLVGAVTGEYFQHW

SEQ ID NO: 7446 - protein, 18 aa, Homo sapiens
CARALWFGIKNEYYFDYW

SEQ ID NO: 7447 - protein, 21 aa, Homo sapiens
CAKEGFGQRHLYYYYYYMDVW

SEQ ID NO: 7448 - protein, 11 aa, Homo sapiens [sequence omitted]

SEQ ID NO: 7449 - protein, 17 aa, Homo sapiens
CTRDHGDPEAYWYFDLW

SEQ ID NO: 7450 - protein, 21 aa, Homo sapiens
CAKDYGDSGALAFPTEYFHPW

SEQ ID NO: 7451 - protein, 22 aa, Homo sapiens
CARGRWLQLPNYYYYYYGMDVW

SEQ ID NO: 7452 - protein, 17 aa, Homo sapiens
CARGGGNYYDGRDFDCW

SEQ ID NO: 7453 - protein, 27 aa, Homo sapiens
CARDAPLSFSTGSDPLPIALLDAFDIW

SEQ ID NO: 7454 - protein, 14 aa, Homo sapiens
CARDGAGSRNFDLW

SEQ ID NO: 7455 - protein, 19 aa, Homo sapiens
CARESYDILTGYLYAFDIW

SEQ ID NO: 7456 - protein, 14 aa, Homo sapiens
CVVWFGELLSFDYW

SEQ ID NO: 7457 - protein, 19 aa, Homo sapiens
CAHVDYYGAGSYPDLFDYW

SEQ ID NO: 7458 - protein, 19 aa, Homo sapiens
CARHSPVFIWFGPGGFDYW

SEQ ID NO: 7459 - protein, 16 aa, Homo sapiens
CARNSRGIGWQYFDYW

SEQ ID NO: 7460 - protein, 18 aa, Homo sapiens
CAKRRAVSSWYKTAFDTW

SEQ ID NO: 7461 - protein, 18 aa, Homo sapiens
CAKNIIGQWLVPTSVDYW

SEQ ID NO: 7462 - protein, 19 aa, Homo sapiens
CARQETSRSGWDLFYFDYW

SEQ ID NO: 7463 - protein, 21 aa, Homo sapiens
CARESRITIFGVVIYEYFQHW

SEQ ID NO: 7464 - protein, 16 aa, Homo sapiens
CAREGREQWLVQFDYW

SEQ ID NO: 7465 - protein, 16 aa, Homo sapiens
CAKDMKWLGRGEVDYW

SEQ ID NO: 7466 - protein, 19 aa, Homo sapiens
CARVRHSILWWAHWYFDLW

SEQ ID NO: 7467 - protein, 22 aa, Homo sapiens
CARESGWFGELFDYYYYYMDVW

SEQ ID NO: 7468 - protein, 13 aa, Homo sapiens
CARARYPELHDYW

SEQ ID NO: 7469 - protein, 13 aa, Homo sapiens
CARAGAPGIYDYW

SEQ ID NO: 7470 - protein, 18 aa, Homo sapiens
CSRVRSDMITFGGPSDYW

SEQ ID NO: 7471 - protein, 18 aa, Homo sapiens
CARGTGFGELSVRWFDPW

SEQ ID NO: 7472 - protein, 16 aa, Homo sapiens
CARGGGIAAAGSGDYW

SEQ ID NO: 7473 - protein, 19 aa, Homo sapiens
CASDSGRYDYGDFYYFDYW

SEQ ID NO: 7474 - protein, 22 aa, Homo sapiens
CASHVPFTIFGVVIVVGWFDPW

SEQ ID NO: 7475 - protein, 21 aa, Homo sapiens
CARHVYCSSPTCYSPPYFDYW

SEQ ID NO: 7476 - protein, 17 aa, Homo sapiens
CARGRRGYETYNWFDPW

SEQ ID NO: 7477 - protein, 18 aa, Homo sapiens
CANQGWVYGDYDGYFDYW

SEQ ID NO: 7478 - protein, 17 aa, Homo sapiens
CAKEPTLYTSRWYFDYW

SEQ ID NO: 7479 - protein, 18 aa, Homo sapiens
CAKTGYSYGYPIPYFDYW

SEQ ID NO: 7480 - protein, 16 aa, Homo sapiens
CAKQSFTLSSSWYDYW

SEQ ID NO: 7481 - protein, 12 aa, Homo sapiens
CAREVGTSVDYW

SEQ ID NO: 7482 - protein, 16 aa, Homo sapiens
CARDLGATAQEPFDYW

SEQ ID NO: 7483 - protein, 18 aa, Homo sapiens
CVRAVGTATPSSDAFDIW

SEQ ID NO: 7484 - protein, 23 aa, Homo sapiens
CARGSPRSGGSCRRSWCRYFDLW

SEQ ID NO: 7485 - protein, 13 aa, Homo sapiens
CARHRYSYGHDYW

SEQ ID NO: 7486 - protein, 18 aa, Homo sapiens
CAKGPPGQQLDAEYFQHW

SEQ ID NO: 7487 - protein, 15 aa, Homo sapiens
CARALKTSAWLFEYW

SEQ ID NO: 7488 - protein, 24 aa, Homo sapiens
CARTATRAVAGILRPLYYYYMDVW

SEQ ID NO: 7489 - protein, 14 aa, Homo sapiens
CARSRYSSGWFVYW

SEQ ID NO: 7490 - protein, 17 aa, Homo sapiens
CAATGYSSGWYNAFDIW

SEQ ID NO: 7491 - protein, 16 aa, Homo sapiens
CARLNCGGDCYGFDIW

SEQ ID NO: 7492 - protein, 18 aa, Homo sapiens
CARTLSSGWYYKNAFDIW

SEQ ID NO: 7493 - protein, 16 aa, Homo sapiens
CAKSLSYSSSWYSDYW

SEQ ID NO: 7494 - protein, 20 aa, Homo sapiens
CARQRIPGLVVIKLLPFDYW

SEQ ID NO: 7495 - protein, 14 aa, Homo sapiens
CARLRGVTGDFDIW

SEQ ID NO: 7496 - protein, 18 aa, Homo sapiens
CARIVRQWLENSYYFDYW

SEQ ID NO: 7497 - protein, 22 aa, Homo sapiens
CARAGGRITIFGVVIIHAFDIW

SEQ ID NO: 7498 - protein, 23 aa, Homo sapiens
CARGRVGLGWQLGSYYYYGMDVW

SEQ ID NO: 7499 - protein, 10 aa, Homo sapiens
CQQRSNLISF

SEQ ID NO: 7500 - protein, 19 aa, Homo sapiens
CARRSGYYESSGYYLFGYW

SEQ ID NO: 7501 - protein, 19 aa, Homo sapiens
CARGDSSGWYGNPYYFDYW

SEQ ID NO: 7502 - protein, 22 aa, Homo sapiens
CARGRGITIFGVLLAPYYFEYW

SEQ ID NO: 7503 - protein, 19 aa, Homo sapiens
CARDPPYSGSAPRDAFDIW

SEQ ID NO: 7504 - protein, 14 aa, Homo sapiens
CAHRGGVGGSIDYW

SEQ ID NO: 7505 - protein, 21 aa, Homo sapiens
CARDMRLDRYKFDTTAYLDNW

SEQ ID NO: 7506 - protein, 17 aa, Homo sapiens
CARDFDDSSGYYYFDYW

SEQ ID NO: 7507 - protein, 17 aa, Homo sapiens
CARIRLDSSSADAFDIW

SEQ ID NO: 7508 - protein, 15 aa, Homo sapiens
CAKVGTAMGGTIDYW

SEQ ID NO: 7509 - protein, 16 aa, Homo sapiens
CLRLFEYNGSFFFDYW

SEQ ID NO: 7510 - protein, 14 aa, Homo sapiens
CAKVASSANAFDIW

SEQ ID NO: 7511 - protein, 17 aa, Homo sapiens
CAKELSDQWLNDAFDIW

SEQ ID NO: 7512 - protein, 24 aa, Homo sapiens
CARHGLSSITIFGVVTQNKYFDYW

SEQ ID NO: 7513 - protein, 7 aa, Homo sapiens [sequence omitted]

SEQ ID NO: 7514 - protein, 19 aa, Homo sapiens
CARVYYDILTGYYIFFDYW

SEQ ID NO: 7515 - protein, 21 aa, Homo sapiens
CARMLQVWFGRSPAGWFFDLW

SEQ ID NO: 7516 - protein, 14 aa, Homo sapiens
CAHKIPGWYSFDYW

SEQ ID NO: 7517 - protein, 22 aa, Homo sapiens
CAREVDDFVWGNARQAYYFDFW

SEQ ID NO: 7518 - protein, 19 aa, Homo sapiens
CARRIAAAGPQKYDAFDIW

SEQ ID NO: 7519 - protein, 15 aa, Homo sapiens
CARVRPFHPYYFDFW

SEQ ID NO: 7520 - protein, 20 aa, Homo sapiens
CARRHYGSGSYWYEDYFDYW

SEQ ID NO: 7521 - protein, 13 aa, Homo sapiens
CASHLPEDGFDIW

SEQ ID NO: 7522 - protein, 18 aa, Homo sapiens
CTKVLFGSGLGSGYYDSW

SEQ ID NO: 7523 - protein, 19 aa, Homo sapiens
CAREEGILTGYYNGPFDYW

SEQ ID NO: 7524 - protein, 20 aa, Homo sapiens
CARHLRMGVVVAAPYYFDYW

SEQ ID NO: 7525 - protein, 18 aa, Homo sapiens
CAAFVDTAVNPRGAFDVW

SEQ ID NO: 7526 - protein, 24 aa, Homo sapiens
CAKVGRFFAIYTFVTGVAEYLDHW

SEQ ID NO: 7527 - protein, 17 aa, Homo sapiens
CAKDSGFGIVVVTVDYW

SEQ ID NO: 7528 - protein, 15 aa, Homo sapiens
CAHSGGDWYRDFEYW

SEQ ID NO: 7529 - protein, 21 aa, Homo sapiens
CARARIMITFGGVYPNWFDPW

SEQ ID NO: 7530 - protein, 21 aa, Homo sapiens
CARSGEAHSSAGLQTNAFDIW

SEQ ID NO: 7531 - protein, 23 aa, Homo sapiens
CARHIPPTIHIVVVTRQGWFDPW

SEQ ID NO: 7532 - protein, 18 aa, Homo sapiens
CAHRHSHLFAWVVGFDYW

SEQ ID NO: 7533 - protein, 21 aa, Homo sapiens
CARGLTTVTIFDQLKNWFDPW

SEQ ID NO: 7534 - protein, 18 aa, Homo sapiens
CAKVPRWSGWFFNAFDIW

SEQ ID NO: 7535 - protein, 24 aa, Homo sapiens
CARGNIAAAEAGNDYYYYYGMDVW

SEQ ID NO: 7536 - protein, 19 aa, Homo sapiens
CARDGGNVATTDDWYFDLW

SEQ ID NO: 7537 - protein, 17 aa, Homo sapiens
CAKANFITIFVMLHDYW

SEQ ID NO: 7538 - protein, 16 aa, Homo sapiens
CAKDLGGYDLDWFDPW

SEQ ID NO: 7539 - protein, 21 aa, Homo sapiens
CARRSVRYSSGWYESYYFDYW

SEQ ID NO: 7540 - protein, 19 aa, Homo sapiens
CARQPLYGSGSHYNWFDPW

SEQ ID NO: 7541 - protein, 18 aa, Homo sapiens
CAKDIRWRSQAAAGIDYW

SEQ ID NO: 7542 - protein, 24 aa, Homo sapiens
CARGRNDYYDDSGYWEESYDFDIW

SEQ ID NO: 7543 - protein, 13 aa, Homo sapiens
CARDSSGWKIDYW

SEQ ID NO: 7544 - protein, 15 aa, Homo sapiens
CARERAPYDYAFDIW

SEQ ID NO: 7545 - protein, 14 aa, Homo sapiens
CARHMPVYGGFEYW

SEQ ID NO: 7546 - protein, 13 aa, Homo sapiens
CARGGTASGFDYW

SEQ ID NO: 7547 - protein, 15 aa, Homo sapiens
CAKTSGWSAPYFDYW

SEQ ID NO: 7548 - protein, 17 aa, Homo sapiens
CARGYSSGWYTIHFDYW

SEQ ID NO: 7549 - protein, 15 aa, Homo sapiens
CAKVNSWYGSYFDYW

SEQ ID NO: 7550 - protein, 24 aa, Homo sapiens
CTRDGPGYCTNGVCYTADEPSDYW

SEQ ID NO: 7551 - protein, 21 aa, Homo sapiens
CARDVGFSWYYYDSSGYYQYW

SEQ ID NO: 7552 - protein, 21 aa, Homo sapiens
CARDRVLLWFGELSRFRIDYW

SEQ ID NO: 7553 - protein, 21 aa, Homo sapiens
CARSVPEWTRHCGGDCYSDYW

SEQ ID NO: 7554 - protein, 26 aa, Homo sapiens
CATRSVEGDLWFGEILYPLTNWFDPW

SEQ ID NO: 7555 - protein, 19 aa, Homo sapiens
CARPRGYDLLTGQPIDDYW

SEQ ID NO: 7556 - protein, 19 aa, Homo sapiens
CTRLPWGVGATSKYYLDNW

SEQ ID NO: 7557 - protein, 20 aa, Homo sapiens
CARHSEAYSGSYSTAYFDYW

SEQ ID NO: 7558 - protein, 17 aa, Homo sapiens
CARGGGIGWGGYYFDYW

SEQ ID NO: 7559 - protein, 22 aa, Homo sapiens
CAHGTGTWYFWSGESTYYFDYW

SEQ ID NO: 7560 - protein, 18 aa, Homo sapiens
CAKVSSSGWYRVSAFDIW

SEQ ID NO: 7561 - protein, 27 aa, Homo sapiens
CARDRVTMVRGVEWGSYYYYYYGMDVW

SEQ ID NO: 7562 - protein, 24 aa, Homo sapiens
CARASLRRSGWPTFGYYYYGMDVW

SEQ ID NO: 7563 - protein, 18 aa, Homo sapiens
CARHAKLLWFGEGYFDYW

SEQ ID NO: 7564 - protein, 25 aa, Homo sapiens
CATSPEHHDNSGSYYRYYYYYMDVW

SEQ ID NO: 7565 - protein, 16 aa, Homo sapiens
CVSGSGNYRRSTFDFW

SEQ ID NO: 7566 - protein, 18 aa, Homo sapiens
CARGSDSPEELSYYFDSW

SEQ ID NO: 7567 - protein, 23 aa, Homo sapiens
CARFLSITAAENHYYYYYSLDVW

SEQ ID NO: 7568 - protein, 19 aa, Homo sapiens
CARRPNNFDWLFPDAIDIW

SEQ ID NO: 7569 - protein, 17 aa, Homo sapiens
CAKVTFIAVANDAFDIW

SEQ ID NO: 7570 - protein, 15 aa, Homo sapiens
CATGRLRYFDWFGYW

SEQ ID NO: 7571 - protein, 14 aa, Homo sapiens
CAKGSSWYWEFDTW

SEQ ID NO: 7572 - protein, 20 aa, Homo sapiens
CARAWFGEQNYYYYYYMDVW

SEQ ID NO: 7573 - protein, 20 aa, Homo sapiens
CARDNVDIVATTMGDAFDIW

SEQ ID NO: 7574 - protein, 16 aa, Homo sapiens
CAKDQPRGVAGSFDYW

SEQ ID NO: 7575 - protein, 12 aa, Homo sapiens
CTRRNWDVFDYW

SEQ ID NO: 7576 - protein, 15 aa, Homo sapiens
CAKAGNYGSFYFDYW

SEQ ID NO: 7577 - protein, 18 aa, Homo sapiens
CARVDYPGIAVAGSLDYW

SEQ ID NO: 7578 - protein, 19 aa, Homo sapiens
CARHPLAKNYYYYYYMDVW

SEQ ID NO: 7579 - protein, 19 aa, Homo sapiens
CATSDSSGWYGLIGAFDIW

SEQ ID NO: 7580 - protein, 19 aa, Homo sapiens
CAKDRYGDYFFADPYFDYW

SEQ ID NO: 7581 - protein, 17 aa, Homo sapiens
CARGGWIPPTTTKFDYW

SEQ ID NO: 7582 - protein, 22 aa, Homo sapiens
CARHSGWVPSGWYQPDWYFDLW

SEQ ID NO: 7583 - protein, 20 aa, Homo sapiens
CARVISDYTSGPFIYYFDYW

SEQ ID NO: 7584 - protein, 14 aa, Homo sapiens
CAREGPAMVGFDPW

SEQ ID NO: 7585 - protein, 21 aa, Homo sapiens
CARDRHYGSGSYALIDAFDIW

SEQ ID NO: 7586 - protein, 19 aa, Homo sapiens
CARETSRPNTMVRGFWDYW

SEQ ID NO: 7587 - protein, 16 aa, Homo sapiens
CARDVAAAGPWAFDIW

SEQ ID NO: 7588 - protein, 20 aa, Homo sapiens
CARDTSGWYLFYYYYYMDVW

SEQ ID NO: 7589 - protein, 25 aa, Homo sapiens
CARDLFSGIVVVVAATPINGAFDIW

SEQ ID NO: 7590 - protein, 17 aa, Homo sapiens
CARGPDRRFLTGYYDYW

SEQ ID NO: 7591 - protein, 21 aa, Homo sapiens
CARHPPVDYYGSGRRYYFDYW

SEQ ID NO: 7592 - protein, 16 aa, Homo sapiens
CAKDTEGVLKLAFDIW

SEQ ID NO: 7593 - protein, 20 aa, Homo sapiens
CAKAEAAYSSSWFVWYFDLW

SEQ ID NO: 7594 - protein, 17 aa, Homo sapiens
CVKDRGSSRVRGSFDIW

SEQ ID NO: 7595 - protein, 17 aa, Homo sapiens
CARAPWDPVRLDYFDYW

SEQ ID NO: 7596 - protein, 28 aa, Homo sapiens
CARVPIVVVPAALGMGIYYYYYYYMDVW

SEQ ID NO: 7597 - protein, 23 aa, Homo sapiens
CARVYETYYDILTGYYSGYFDYW

SEQ ID NO: 7598 - protein, 16 aa, Homo sapiens
CAKDVYSNTRDAFNIW

SEQ ID NO: 7599 - protein, 27 aa, Homo sapiens
CASLTTYYYGSGSYFSRHQTADWFDPW

SEQ ID NO: 7600 - protein, 19 aa, Homo sapiens
CARESHDYGDFLAEYFQDW

SEQ ID NO: 7601 - protein, 23 aa, Homo sapiens
CARDGGDDYGDYGWEVEYYFDYW

SEQ ID NO: 7602 - protein, 18 aa, Homo sapiens
CASLAQHIAAAGPPSDYW

SEQ ID NO: 7603 - protein, 26 aa, Homo sapiens
CARLVATTVTSRPGQGLAYYYYMDVW

SEQ ID NO: 7604 - protein, 20 aa, Homo sapiens
CARHEQYYYGSGSYGAFDIW

SEQ ID NO: 7605 - protein, 13 aa, Homo sapiens
CQQSYSLSGQWTF

SEQ ID NO: 7606 - protein, 14 aa, Homo sapiens
CARQLPMGDYFDYW

SEQ ID NO: 7607 - protein, 15 aa, Homo sapiens
CVRDLQLTVEYFDSW

SEQ ID NO: 7608 - protein, 13 aa, Homo sapiens
CAQGPLYGPFDYW

SEQ ID NO: 7609 - protein, 13 aa, Homo sapiens
CQQTYSSPRLCTF

SEQ ID NO: 7610 - protein, 17 aa, Homo sapiens
CARPDANDYGDYTADYW

SEQ ID NO: 7611 - protein, 18 aa, Homo sapiens
CAKDRIYFVDTAMVGDYW

SEQ ID NO: 7612 - protein, 13 aa, Homo sapiens
CVRTELRGSFDFW

SEQ ID NO: 7613 - protein, 15 aa, Homo sapiens
CARGGFDSRSPFDLW

SEQ ID NO: 7614 - protein, 20 aa, Homo sapiens
CARGRRQWLTRDYYYYMDVW

SEQ ID NO: 7615 - protein, 22 aa, Homo sapiens
CARHSAVHSSSHYYYYYGLDVW

SEQ ID NO: 7616 - protein, 21 aa, Homo sapiens
CARDVITFGGVIVIPGAFDIW

SEQ ID NO: 7617 - protein, 20 aa, Homo sapiens
CARGMTTLTTQDFNYYMDVW

SEQ ID NO: 7618 - protein, 18 aa, Homo sapiens
CARVEYSSGLRYWYFDLW

SEQ ID NO: 7619 - protein, 17 aa, Homo sapiens
CAKASGIAAAGQNWDYW

SEQ ID NO: 7620 - protein, 19 aa, Homo sapiens
CATGPPDYGDYVGYWFDPW

SEQ ID NO: 7621 - protein, 16 aa, Homo sapiens
CATYRGDYLGDVFDIW

SEQ ID NO: 7622 - protein, 20 aa, Homo sapiens
CARGWAYSSSWYAYTYFDYW

SEQ ID NO: 7623 - protein, 17 aa, Homo sapiens
CARDPLTTVTPVLFDYW

SEQ ID NO: 7624 - protein, 20 aa, Homo sapiens
CARGGGYSYCLGALDAFDIW

SEQ ID NO: 7625 - protein, 20 aa, Homo sapiens
CAKDRRGFVAVAGNNWFDPW

SEQ ID NO: 7626 - protein, 16 aa, Homo sapiens
CARLPPIGVAGGFDFW

SEQ ID NO: 7627 - protein, 18 aa, Homo sapiens
CARGGGSSWYAAYAFDIW

SEQ ID NO: 7628 - protein, 15 aa, Homo sapiens
CVHEGSAHRDALDVW

SEQ ID NO: 7629 - protein, 22 aa, Homo sapiens
CAKDGRHLADPLLYYYSAMDVW

SEQ ID NO: 7630 - protein, 16 aa, Homo sapiens
CVREGGSGFEGGFDIW

SEQ ID NO: 7631 - protein, 12 aa, Homo sapiens
CAKVGSWYPDYW

SEQ ID NO: 7632 - protein, 13 aa, Homo sapiens
CAQHTVAGIFDYW

SEQ ID NO: 7633 - protein, 19 aa, Homo sapiens
CARDRRERTYDSQRYFEGW

SEQ ID NO: 7634 - protein, 21 aa, Homo sapiens
CAREGAHILTGYYKTWYFDLW

SEQ ID NO: 7635 - protein, 17 aa, Homo sapiens
CAKESGDRDMTKGFDYW

SEQ ID NO: 7636 - protein, 21 aa, Homo sapiens
CARDIRDLMEAYPATGYFDLW

SEQ ID NO: 7637 - protein, 18 aa, Homo sapiens
CARAPGCSSTSCYHYDYW

SEQ ID NO: 7638 - protein, 19 aa, Homo sapiens
CAKDTGGYSSGWYARFDYW

SEQ ID NO: 7639 - protein, 22 aa, Homo sapiens
CAKATNDFWSGYYTPTYYFDYW

SEQ ID NO: 7640 - protein, 18 aa, Homo sapiens
CAKGSGSGIRHLYYFDYW

SEQ ID NO: 7641 - protein, 22 aa, Homo sapiens
CAREKWGYSGYDLGTMDAFDIW

SEQ ID NO: 7642 - protein, 11 aa, Homo sapiens [sequence omitted]

SEQ ID NO: 7643 - protein, 16 aa, Homo sapiens
CAKDPYASGPNWFDPW

SEQ ID NO: 7644 - protein, 14 aa, Homo sapiens
CARRGDYGWYFDYW

SEQ ID NO: 7645 - protein, 19 aa, Homo sapiens
CARDQDDYVWGSSYYFDYW

SEQ ID NO: 7646 - protein, 15 aa, Homo sapiens
CARHDSWGYNWLDYW

SEQ ID NO: 7647 - protein, 11 aa, Homo sapiens
CQQLKSHPLSF

SEQ ID NO: 7648 - protein, 14 aa, Homo sapiens
CAKQRIQKQYFDYW

SEQ ID NO: 7649 - protein, 23 aa, Homo sapiens
CARRGIRYYGSGSYYQVGAFDIW

SEQ ID NO: 7650 - protein, 20 aa, Homo sapiens
CASSFVGIYCSSTSCPYDYW

SEQ ID NO: 7651 - protein, 15 aa, Homo sapiens
CARDSTAMAYSFDYW

SEQ ID NO: 7652 - protein, 18 aa, Homo sapiens
CARLLTTVTTGGLYFDYW

SEQ ID NO: 7653 - protein, 23 aa, Homo sapiens
CARQPTPDIVLLVYAIRYYFDYW

SEQ ID NO: 7654 - protein, 24 aa, Homo sapiens
CTTAGHVVRGVIITFDNPYYFDYW

SEQ ID NO: 7655 - protein, 18 aa, Homo sapiens
CARVTGHTNGLRGFFDFW

SEQ ID NO: 7656 - protein, 21 aa, Homo sapiens
CARHHYSYGLRGKKNWYFDLW

SEQ ID NO: 7657 - protein, 17 aa, Homo sapiens
CARDDYGGIRESGFDLW

SEQ ID NO: 7658 - protein, 16 aa, Homo sapiens
CARDPLAYGDRHFDYW

SEQ ID NO: 7659 - protein, 16 aa, Homo sapiens
CAKGGGAYSGSYVDYW

SEQ ID NO: 7660 - protein, 21 aa, Homo sapiens
CATNKEFCSGGSCSPYYFDTW

SEQ ID NO: 7661 - protein, 24 aa, Homo sapiens
CARVGDRSGWSPEGRNLLNWFDPW

SEQ ID NO: 7662 - protein, 21 aa, Homo sapiens
CARDPATYSSSWYLSYYFDYW

SEQ ID NO: 7663 - protein, 18 aa, Homo sapiens
CARVRRGPGNVFEGFDSW

SEQ ID NO: 7664 - protein, 13 aa, Homo sapiens
CQAFDNSTALYVF

SEQ ID NO: 7665 - protein, 20 aa, Homo sapiens
CARAVLWFGDPTPPYYFDYW

SEQ ID NO: 7666 - protein, 23 aa, Homo sapiens
CARDSGVLDYYGSGSYYRLFDYW

SEQ ID NO: 7667 - protein, 16 aa, Homo sapiens
CAKGPSTFSLEGIDYW

SEQ ID NO: 7668 - protein, 25 aa, Homo sapiens
CARGLPHDTYYYNSKTYSNTLLDYW

SEQ ID NO: 7669 - protein, 18 aa, Homo sapiens
CARVTIHSSWYSGSLDYW

SEQ ID NO: 7670 - protein, 15 aa, Homo sapiens
CAHQMAGNPFLFDYW

SEQ ID NO: 7671 - protein, 16 aa, Homo sapiens
CAREPGYSSGWSFGYW

SEQ ID NO: 7672 - protein, 21 aa, Homo sapiens
CTTDSSDFDFLTGYYYYFDYW

SEQ ID NO: 7673 - protein, 24 aa, Homo sapiens
CARGAPQIVVVVAVLYYYYYMDVW

SEQ ID NO: 7674 - protein, 21 aa, Homo sapiens
CARPLYITSSGNSVWDAFDIW

SEQ ID NO: 7675 - protein, 14 aa, Homo sapiens
CASGYSYGYTIDYW

SEQ ID NO: 7676 - protein, 21 aa, Homo sapiens
CARDSIRYYYGSGSYQPFDYW

SEQ ID NO: 7677 - protein, 12 aa, Homo sapiens
CQQTNSLPPITF

SEQ ID NO: 7678 - protein, 14 aa, Homo sapiens
CARHLRFLIWFDPW

SEQ ID NO: 7679 - protein, 13 aa, Homo sapiens
CAHSRRYGDYDYW

SEQ ID NO: 7680 - protein, 21 aa, Homo sapiens
CTGRVWFGESSGPYYYGMDVW

SEQ ID NO: 7681 - protein, 15 aa, Homo sapiens
CARGVLRSVNWFDTW

SEQ ID NO: 7682 - protein, 20 aa, Homo sapiens
CAKSGKYYYDSSGYYLFDLW

SEQ ID NO: 7683 - protein, 19 aa, Homo sapiens
CVHRVSYELRGNYYYMDVW

SEQ ID NO: 7684 - protein, 21 aa, Homo sapiens
CARGTRQWLVLYRLRHYFDYW

SEQ ID NO: 7685 - protein, 17 aa, Homo sapiens
CARGDPYDFWSGPPDYW

SEQ ID NO: 7686 - protein, 15 aa, Homo sapiens
CVRVNPDLNSHFDYW

SEQ ID NO: 7687 - protein, 21 aa, Homo sapiens
CARARRITMIVVVTNYYFDYW

SEQ ID NO: 7688 - protein, 21 aa, Homo sapiens
CARVEGVAAAAPPAWYYFDYW

SEQ ID NO: 7689 - protein, 16 aa, Homo sapiens
CAHRQGSWTKSGFDYW

SEQ ID NO: 7690 - protein, 17 aa, Homo sapiens
CAKTIKGDYARDAFDIW

SEQ ID NO: 7691 - protein, 22 aa, Homo sapiens
CARDHSPNDHGPTYYYYGMDVW

SEQ ID NO: 7692 - protein, 16 aa, Homo sapiens
CARQLYSYGQDAFDIW

SEQ ID NO: 7693 - protein, 19 aa, Homo sapiens
CAKDGNSSSWYVVRWFDPW

SEQ ID NO: 7694 - protein, 19 aa, Homo sapiens
CAKDMDGSGSYYLSPFDYW

SEQ ID NO: 7695 - protein, 26 aa, Homo sapiens
CARGRGYCSGGSCYSSSYYYYYMDVW

SEQ ID NO: 7696 - protein, 25 aa, Homo sapiens
CARGHARPTLITMFRGVIINPLDYW

SEQ ID NO: 7697 - protein, 14 aa, Homo sapiens
CARDLGGGTLGDYW

SEQ ID NO: 7698 - protein, 17 aa, Homo sapiens
CARRVDSSWYGDWFDPW

SEQ ID NO: 7699 - protein, 20 aa, Homo sapiens
CVRQAFPGYTSFWLPGFDVW

SEQ ID NO: 7700 - protein, 14 aa, Homo sapiens
CARMWGVTTAIDYW

SEQ ID NO: 7701 - protein, 18 aa, Homo sapiens
CARQRGRSIAARPGFDYW

SEQ ID NO: 7702 - protein, 13 aa, Homo sapiens
CVHRQDWNYFSFW

SEQ ID NO: 7703 - protein, 22 aa, Homo sapiens
CVKDILGYYDSRYISVGYFQHW

SEQ ID NO: 7704 - protein, 16 aa, Homo sapiens
CAKAPFRATNWYFDLW

SEQ ID NO: 7705 - protein, 13 aa, Homo sapiens [sequence omitted]

SEQ ID NO: 7706 - protein, 21 aa, Homo sapiens
CARVKVDLVTGFWTQDAFDIW

SEQ ID NO: 7707 - protein, 14 aa, Homo sapiens
CARHVREDWYFDLW

SEQ ID NO: 7708 - protein, 20 aa, Homo sapiens
CAKDIVYGSGSYFPYYFDYW

SEQ ID NO: 7709 - protein, 23 aa, Homo sapiens
CARSGRRITMIVVVTDDNWFDPW

SEQ ID NO: 7710 - protein, 17 aa, Homo sapiens
CARLARRLTIFGPNDYW

SEQ ID NO: 7711 - protein, 19 aa, Homo sapiens
CAKDIGFDTAMVTGAFDIW

SEQ ID NO: 7712 - protein, 16 aa, Homo sapiens
CARDGLRWYQGYFDLW

SEQ ID NO: 7713 - protein, 19 aa, Homo sapiens
CAKESTPAIFIRPDFFDMW

SEQ ID NO: 7714 - protein, 16 aa, Homo sapiens
CAKEIGLLYGDYPGYW

SEQ ID NO: 7715 - protein, 18 aa, Homo sapiens
CARDRAGYYGSGTAFDIW

SEQ ID NO: 7716 - protein, 24 aa, Homo sapiens
CAREEGGGDCSGAACSVVWYFDLW

SEQ ID NO: 7717 - protein, 22 aa, Homo sapiens
CARGRTLWFGELLSAFGAFDIW

SEQ ID NO: 7718 - protein, 22 aa, Homo sapiens
CARVKARETCSGGSCYPFFDFW

SEQ ID NO: 7719 - protein, 15 aa, Homo sapiens
CAKWQGLVVALIDYW

SEQ ID NO: 7720 - protein, 19 aa, Homo sapiens
CAHMDLLWFGELLCGFDYW

SEQ ID NO: 7721 - protein, 12 aa, Homo sapiens
CAHRRRDYANYW

SEQ ID NO: 7722 - protein, 14 aa, Homo sapiens
CARDPSYSNYGDYW

SEQ ID NO: 7723 - protein, 20 aa, Homo sapiens
CAKSGVYYDILTGYYFFDYW

SEQ ID NO: 7724 - protein, 22 aa, Homo sapiens
CARGGDGTSSSGWEYYYYLDVW

SEQ ID NO: 7725 - protein, 17 aa, Homo sapiens
CATMSRYDRSGYKSDYW

SEQ ID NO: 7726 - protein, 21 aa, Homo sapiens
CAKDPHPRPKTSVQGFWFAPW

SEQ ID NO: 7727 - protein, 17 aa, Homo sapiens
CASDAYERLSDDAFDIW

SEQ ID NO: 7728 - protein, 18 aa, Homo sapiens
CARFVALSNSGSYHFDYW

SEQ ID NO: 7729 - protein, 18 aa, Homo sapiens
CARAGDIFSGYYPPFDKW

SEQ ID NO: 7730 - protein, 15 aa, Homo sapiens
CAKGAQTMWDALDIW

SEQ ID NO: 7731 - protein, 18 aa, Homo sapiens
CAKYTIETVTIWGTFDSW

SEQ ID NO: 7732 - protein, 18 aa, Homo sapiens
CARPRWDSGGFYSAFDVW

SEQ ID NO: 7733 - protein, 19 aa, Homo sapiens
CAKVYCSGGSCHYHAFDVW

SEQ ID NO: 7734 - protein, 16 aa, Homo sapiens
CARGRIGGWYLHFDYW

SEQ ID NO: 7735 - protein, 17 aa, Homo sapiens
CVSSYGSRRRYYYMDVW

SEQ ID NO: 7736 - protein, 18 aa, Homo sapiens
CARVLSPPVTTSSYFDSW

SEQ ID NO: 7737 - protein, 23 aa, Homo sapiens
CARDQLRYCSSGSCLTLNYFDYW

SEQ ID NO: 7738 - protein, 25 aa, Homo sapiens
CARERGHSAYDFNGHCGADCYLDSW

SEQ ID NO: 7739 - protein, 17 aa, Homo sapiens
CAKDEGEDVSQGHFDFW

SEQ ID NO: 7740 - protein, 21 aa, Homo sapiens
CVRVGPAGATPGYYYYYMDVW

SEQ ID NO: 7741 - protein, 17 aa, Homo sapiens
CARDIDTSSHYGWFDPW

SEQ ID NO: 7742 - protein, 16 aa, Homo sapiens
CAKDISAYFREAFDIW

SEQ ID NO: 7743 - protein, 19 aa, Homo sapiens
CARASRKGSSSGRLEFDYW

SEQ ID NO: 7744 - protein, 18 aa, Homo sapiens
CVYDILTGYVYYYSMDVW

SEQ ID NO: 7745 - protein, 24 aa, Homo sapiens
CARDSRLTPNEYSSGWTYDALDIW

SEQ ID NO: 7746 - protein, 21 aa, Homo sapiens
CAKDELGYCSAGSCYRGVDYW

SEQ ID NO: 7747 - protein, 15 aa, Homo sapiens
CNSRDDSGFHLNVIF

SEQ ID NO: 7748 - protein, 24 aa, Homo sapiens
CAREGGTGNYYDSSGYFLDYFDFW

SEQ ID NO: 7749 - protein, 21 aa, Homo sapiens
CARGPLWVVMPVARMYSFDIW

SEQ ID NO: 7750 - protein, 23 aa, Homo sapiens
CATRLRLYYDSSGYGGLDAFDIW

SEQ ID NO: 7751 - protein, 15 aa, Homo sapiens
CVLVVTASPDAFDIW

SEQ ID NO: 7752 - protein, 17 aa, Homo sapiens
CARAYATDWYVWYFDLW

SEQ ID NO: 7753 - protein, 18 aa, Homo sapiens
CAVEGGIAAAATGWFDPW

SEQ ID NO: 7754 - protein, 20 aa, Homo sapiens
CARLYWTTGWYGAFDAFDIW

SEQ ID NO: 7755 - protein, 11 aa, Homo sapiens
CQQLGSSHWVF

SEQ ID NO: 7756 - protein, 12 aa, Homo sapiens
CARQTYNKIDYW

SEQ ID NO: 7757 - protein, 20 aa, Homo sapiens
CARGSLWSKYGPASYYYDHW

SEQ ID NO: 7758 - protein, 11 aa, Homo sapiens
CLQATEFPWSF

SEQ ID NO: 7759 - protein, 16 aa, Homo sapiens
CARPDSIHTAYAFDVW

SEQ ID NO: 7760 - protein, 14 aa, Homo sapiens
CARGGGDTAHFDHW

SEQ ID NO: 7761 - protein, 21 aa, Homo sapiens
CAHRPRHFDSGGYYHYYFDLW

SEQ ID NO: 7762 - protein, 16 aa, Homo sapiens
CAKDTSLGIEGYFDSW

SEQ ID NO: 7763 - protein, 22 aa, Homo sapiens
CARDRRPTVTTYRSYGLAFDIW

SEQ ID NO: 7764 - protein, 18 aa, Homo sapiens
CARDITLIRGALWWFDPW

SEQ ID NO: 7765 - protein, 14 aa, Homo sapiens
CQSIDSDGSFLVLF

SEQ ID NO: 7766 - protein, 21 aa, Homo sapiens
CVRECPVYDLFTDSRLCFDSW

SEQ ID NO: 7767 - protein, 12 aa, Homo sapiens
CQQTDTLPSVIF

SEQ ID NO: 7768 - protein, 18 aa, Homo sapiens
CARQKAVASYKEYYMDVW

SEQ ID NO: 7769 - protein, 16 aa, Homo sapiens
CARLGDDGDYGTLDYW

SEQ ID NO: 7770 - protein, 20 aa, Homo sapiens
CAITRLGKVFGEFTGYFDNW

SEQ ID NO: 7771 - protein, 20 aa, Homo sapiens
CQQYGSSPGTFGQGTKLGTF

SEQ ID NO: 7772 - protein, 17 aa, Homo sapiens
CATVPRGGTYQEAFNIW

SEQ ID NO: 7773 - protein, 15 aa, Homo sapiens
CARGYSAYDYAFDYW

SEQ ID NO: 7774 - protein, 22 aa, Homo sapiens
CARRGYYGSGSYYNVFDAFDIW

SEQ ID NO: 7775 - protein, 14 aa, Homo sapiens
CARQPGELEPFDFW

SEQ ID NO: 7776 - protein, 23 aa, Homo sapiens
CARHPASYFDDRNGYRGENFDYW

SEQ ID NO: 7777 - protein, 23 aa, Homo sapiens
CSREWGYFYQSTTYYRSDSFDSW

SEQ ID NO: 7778 - protein, 17 aa, Homo sapiens
CAKGLTVTTSLDAFDIW

SEQ ID NO: 7779 - protein, 17 aa, Homo sapiens
CVKGGEGAAAGDPFDYW

SEQ ID NO: 7780 - protein, 14 aa, Homo sapiens
CARMYNNKWYLDSW

SEQ ID NO: 7781 - protein, 20 aa, Homo sapiens
CAREPPDSSGYFTEHYFDYW

SEQ ID NO: 7782 - protein, 15 aa, Homo sapiens
CVRRGVGYSSAFDIW

SEQ ID NO: 7783 - protein, 18 aa, Homo sapiens
CARVAHVYDSGGFHFDSW

SEQ ID NO: 7784 - protein, 20 aa, Homo sapiens
CATGMNGRTGGLTKFYIDVW

SEQ ID NO: 7785 - protein, 17 aa, Homo sapiens
CATSTNYADKDWYFDLW

SEQ ID NO: 7786 - protein, 16 aa, Homo sapiens
CARVGSAWGAFCFDPW

SEQ ID NO: 7787 - protein, 24 aa, Homo sapiens
CTSSRPMTFIAVATTYYYSYMDVW

SEQ ID NO: 7788 - protein, 16 aa, Homo sapiens
CARDTIIAAGTTFDYW

SEQ ID NO: 7789 - protein, 17 aa, Homo sapiens
CATSSSSTYYLRTFDIW

SEQ ID NO: 7790 - protein, 16 aa, Homo sapiens
CARGYSYYYFYYLDLW

SEQ ID NO: 7791 - protein, 22 aa, Homo sapiens
CARDYFDSSVYWVPQRPYFDYW

SEQ ID NO: 7792 - protein, 15 aa, Homo sapiens
CAKDIGDWGYYFHSW

SEQ ID NO: 7793 - protein, 14 aa, Homo sapiens
CAATYDISGYREYW

SEQ ID NO: 7794 - protein, 17 aa, Homo sapiens
CARDREGLWPFDAFHIW

SEQ ID NO: 7795 - protein, 16 aa, Homo sapiens
CARSVSEQWLGPFDIW

SEQ ID NO: 7796 - protein, 23 aa, Homo sapiens
CATPPRLDYYDSSDGYHAPFHYW

SEQ ID NO: 7797 - protein, 21 aa, Homo sapiens
CARVISAFRELLASGYWFDPW

SEQ ID NO: 7798 - protein, 18 aa, Homo sapiens
CARLNFYDSSPGEAFDIW

SEQ ID NO: 7799 - protein, 16 aa, Homo sapiens
CAILSRPGWNARFDLW

SEQ ID NO: 7800 - protein, 17 aa, Homo sapiens
CTRYSVEMGTIHAFDIW

SEQ ID NO: 7801 - protein, 19 aa, Homo sapiens
CAKDHNTNFGVAGHGFDYW

SEQ ID NO: 7802 - protein, 21 aa, Homo sapiens
CARGRSFCTSNTCYPHPFDYW

SEQ ID NO: 7803 - protein, 22 aa, Homo sapiens
CARHVEMATINSYYYYYYMDVW

SEQ ID NO: 7804 - protein, 15 aa, Homo sapiens
CAKGLGMNYYYMDVW

SEQ ID NO: 7805 - protein, 18 aa, Homo sapiens
CQQYGSSPPTLGGGTTTF

SEQ ID NO: 7806 - protein, 16 aa, Homo sapiens
CAKVRTTLTTGWFDPW

SEQ ID NO: 7807 - protein, 20 aa, Homo sapiens
CARGQIGYCSRTTCYAFDDW

SEQ ID NO: 7808 - protein, 17 aa, Homo sapiens
CARGNLRNYQLYYMDVW

SEQ ID NO: 7809 - protein, 20 aa, Homo sapiens
CARLGEIAVVPTGWGYMDVW

SEQ ID NO: 7810 - protein, 17 aa, Homo sapiens
CARGPSNKIVAPGFDSW

SEQ ID NO: 7811 - protein, 18 aa, Homo sapiens
CARGGYCSGGSCSPDDYW

SEQ ID NO: 7812 - protein, 19 aa, Homo sapiens
CAREAEGVGVGHFYYMDVW

SEQ ID NO: 7813 - protein, 20 aa, Homo sapiens
CARDLFYYGSGTYIYYFDHW

SEQ ID NO: 7814 - protein, 14 aa, Homo sapiens
CARDGIVNGAFDIW

SEQ ID NO: 7815 - protein, 19 aa, Homo sapiens
CARDVDTAMVMAFRAFDIW

SEQ ID NO: 7816 - protein, 13 aa, Homo sapiens
CARDGSGYSFHYW

SEQ ID NO: 7817 - protein, 28 aa, Homo sapiens
CTRVGRESESSGITIFGVVTKSHYFDYW

SEQ ID NO: 7818 - protein, 17 aa, Homo sapiens
CARLCTIAVAGLAFDYW

SEQ ID NO: 7819 - protein, 16 aa, Homo sapiens
CTRDLPGVMEHYFDSW

SEQ ID NO: 7820 - protein, 16 aa, Homo sapiens
CATDIPGFSSETFDIW

SEQ ID NO: 7821 - protein, 19 aa, Homo sapiens
CARGLVDTALDYWYYMDVW

SEQ ID NO: 7822 - protein, 17 aa, Homo sapiens
CARPIDMSTITEGFDIW

SEQ ID NO: 7823 - protein, 16 aa, Homo sapiens
CAHRPGGFWSGYYGYW

SEQ ID NO: 7824 - protein, 14 aa, Homo sapiens
CSSAGTVFHYFDYW

SEQ ID NO: 7825 - protein, 18 aa, Homo sapiens
CARDPMHDTSGRDYFDYW

SEQ ID NO: 7826 - protein, 17 aa, Homo sapiens
CARDLDTNSRYSWLDPW

SEQ ID NO: 7827 - protein, 17 aa, Homo sapiens
CARERNDGISWYYFAFW

SEQ ID NO: 7828 - protein, 14 aa, Homo sapiens
CGRDYGVSLGVDYW

SEQ ID NO: 7829 - protein, 13 aa, Homo sapiens
CQQYNNWREGLAF

SEQ ID NO: 7830 - protein, 19 aa, Homo sapiens
CARHPLAWFGEFPHYFDYW

SEQ ID NO: 7831 - protein, 15 aa, Homo sapiens
CARENLDTSRPFEYW

SEQ ID NO: 7832 - protein, 26 aa, Homo sapiens
CAKVSYNVLTGYFLPQYYYYYSMDVW

SEQ ID NO: 7833 - protein, 11 aa, Homo sapiens
CLQRTHWPWTF

SEQ ID NO: 7834 - protein, 21 aa, Homo sapiens
CVRHGPREYCSGGCLEYFDIW

SEQ ID NO: 7835 - protein, 17 aa, Homo sapiens
CATDSATVTTWDAFDIW

SEQ ID NO: 7836 - protein, 15 aa, Homo sapiens
CAKDLLIQLWLWDYW

SEQ ID NO: 7837 - protein, 17 aa, Homo sapiens
CTRRLPGNNSGWTFDFW

SEQ ID NO: 7838 - protein, 16 aa, Homo sapiens
CASPNFYDSSGYPGYW

SEQ ID NO: 7839 - protein, 20 aa, Homo sapiens
CARDRFPAPGSWYEKVFDNW

SEQ ID NO: 7840 - protein, 18 aa, Homo sapiens
CARDRNYFDNSASYPHYW

SEQ ID NO: 7841 - protein, 24 aa, Homo sapiens
CARDGDRSARGYCSSTSCYAFDIW

SEQ ID NO: 7842 - protein, 16 aa, Homo sapiens
CAHRIANFWSGYFDYW

SEQ ID NO: 7843 - protein, 15 aa, Homo sapiens
CAKEWKTGEKAFDIW

SEQ ID NO: 7844 - protein, 17 aa, Homo sapiens
CATYCGGDCFNDGFDLW

SEQ ID NO: 7845 - protein, 18 aa, Homo sapiens
CATTLRVYSTNWYSFDYW

SEQ ID NO: 7846 - protein, 11 aa, Homo sapiens
CRQSYSPPYNF

SEQ ID NO: 7847 - protein, 12 aa, Homo sapiens
CQQLYTYPPLHF

SEQ ID NO: 7848 - protein, 15 aa, Homo sapiens
CARHAGATLVGLDYW

SEQ ID NO: 7849 - protein, 14 aa, Homo sapiens
CARINAEVTQFDPW

SEQ ID NO: 7850 - protein, 16 aa, Homo sapiens
CAHRRNYDMAFPFDPW

SEQ ID NO: 7851 - protein, 17 aa, Homo sapiens
CVREDTELVFGYYLDLW

SEQ ID NO: 7852 - protein, 20 aa, Homo sapiens
CARYHFYDSSGYWIDAFDIW

SEQ ID NO: 7853 - protein, 17 aa, Homo sapiens
CISILPHTSSHNYMDVW

SEQ ID NO: 7854 - protein, 23 aa, Homo sapiens
CTTDPGGNFYYYNNSGSYYFDYW

SEQ ID NO: 7855 - protein, 18 aa, Homo sapiens
CASGPIKYSSGLTYFDSW

SEQ ID NO: 7856 - protein, 18 aa, Homo sapiens
CARAGLAAVAGTASFDFW

SEQ ID NO: 7857 - protein, 15 aa, Homo sapiens
CARYSSASLISFDYW

SEQ ID NO: 7858 - protein, 20 aa, Homo sapiens
CARFLYSGSGNYYPYYFDYW

SEQ ID NO: 7859 - protein, 19 aa, Homo sapiens
CARVDSSGYSLMDDAFDIW

SEQ ID NO: 7860 - protein, 14 aa, Homo sapiens
CVKDMHEGDGFDIW

SEQ ID NO: 7861 - protein, 17 aa, Homo sapiens
CARGLLLVEPTQAFDYW

SEQ ID NO: 7862 - protein, 16 aa, Homo sapiens
CARTVDYGSWNQFDYW

SEQ ID NO: 7863 - protein, 11 aa, Homo sapiens [sequence omitted]

SEQ ID NO: 7864 - protein, 17 aa, Homo sapiens
CARTPWNQIDPSYFDYW

SEQ ID NO: 7865 - protein, 19 aa, Homo sapiens
CAKDMRDGYNDDFFAFHIW

SEQ ID NO: 7866 - protein, 21 aa, Homo sapiens
CARALLEWLFSAPVINWFDPW

SEQ ID NO: 7867 - protein, 18 aa, Homo sapiens
CASGLERDFIQPEAFDIW

SEQ ID NO: 7868 - protein, 25 aa, Homo sapiens
CVREAYYTLWTGYRRTGLNNWFDPW

SEQ ID NO: 7869 - protein, 22 aa, Homo sapiens
CAHKAYYGVLTGYSKYNWFAPW

SEQ ID NO: 7870 - protein, 16 aa, Homo sapiens
CVRDDRGSSGWHFDNW

SEQ ID NO: 7871 - protein, 20 aa, Homo sapiens
CARTPSLWFGESLLYYFDYW

SEQ ID NO: 7872 - protein, 17 aa, Homo sapiens
CARGPYYYKRAMPFDSW

SEQ ID NO: 7873 - protein, 26 aa, Homo sapiens
CARESSRDYYYDSSGYYSNPYYFDYW

SEQ ID NO: 7874 - protein, 18 aa, Homo sapiens
CARDFLYCATISCHHDYW

SEQ ID NO: 7875 - protein, 14 aa, Homo sapiens
CQVWNSSIDHSYLF

SEQ ID NO: 7876 - protein, 16 aa, Homo sapiens
CAKHGGLDPRSYMDVW

SEQ ID NO: 7877 - protein, 19 aa, Homo sapiens
CAKERPEYNGFDSHFFDYW

SEQ ID NO: 7878 - protein, 14 aa, Homo sapiens
CARAWFGYARFDYW

SEQ ID NO: 7879 - protein, 18 aa, Homo sapiens
CAKYGAVIRYSYGHFDYW

SEQ ID NO: 7880 - protein, 20 aa, Homo sapiens
CARATSYDYSGSPHDAFDIW

SEQ ID NO: 7881 - protein, 15 aa, Homo sapiens
CARGVIRGVTEIDYW

SEQ ID NO: 7882 - protein, 16 aa, Homo sapiens
CAKIGSYYSGRIPDYW

SEQ ID NO: 7883 - protein, 19 aa, Homo sapiens
CAATIRGKDYGDYRDFDYW

SEQ ID NO: 7884 - protein, 17 aa, Homo sapiens
CARQLKLLDEDYYMDVW

SEQ ID NO: 7885 - protein, 18 aa, Homo sapiens
CARVSVGKHYSGYDLDYW

SEQ ID NO: 7886 - protein, 14 aa, Homo sapiens
CARDENNNYYFDYW

SEQ ID NO: 7887 - protein, 15 aa, Homo sapiens
CVASLSIDWTRYDYW

SEQ ID NO: 7888 - protein, 18 aa, Homo sapiens
CARGPRSYYGGIYYFDYW

SEQ ID NO: 7889 - protein, 17 aa, Homo sapiens
CARGDSIFGVIRRFDPW

SEQ ID NO: 7890 - protein, 20 aa, Homo sapiens
CARGPGRPDVYDSSGYQHYW

SEQ ID NO: 7891 - protein, 22 aa, Homo sapiens
CAAFSEVWEQCEETPSDNFGYW

SEQ ID NO: 7892 - protein, 14 aa, Homo sapiens
CAKLSDFLSDFDFW

SEQ ID NO: 7893 - protein, 19 aa, Homo sapiens
CAKKSTGGLDNGDDAFDIW

SEQ ID NO: 7894 - protein, 19 aa, Homo sapiens
CAAATDYFDSSIHNYFAPW

SEQ ID NO: 7895 - protein, 14 aa, Homo sapiens
CSSFTSSSTRDVVF

SEQ ID NO: 7896 - protein, 13 aa, Homo sapiens
CVKDLLHWGPDYW

SEQ ID NO: 7897 - protein, 22 aa, Homo sapiens
CARVPVLRRQWLDYFHHYMDVW

SEQ ID NO: 7898 - protein, 24 aa, Homo sapiens
CAKDNEYLVEMPSVSYYYYYMDVW

SEQ ID NO: 7899 - protein, 16 aa, Homo sapiens
CAREAYTYGYVWFDPW

SEQ ID NO: 7900 - protein, 16 aa, Homo sapiens
CARIRPVTGMHYFDYW

SEQ ID NO: 7901 - protein, 15 aa, Homo sapiens
CARLGWYESWYFDLW

SEQ ID NO: 7902 - protein, 16 aa, Homo sapiens
CSRDWLHIGTWQFDFW

SEQ ID NO: 7903 - protein, 18 aa, Homo sapiens
CARQEWELPTTEYYFDYW

SEQ ID NO: 7904 - protein, 23 aa, Homo sapiens
CARDQGGYYPDSSGYYSHTFDYW

SEQ ID NO: 7905 - protein, 18 aa, Homo sapiens
CTTFRVTMVRGVIRGDYW

SEQ ID NO: 7906 - protein, 12 aa, Homo sapiens
CAVVPAAMSDYW

SEQ ID NO: 7907 - protein, 15 aa, Homo sapiens
CARISRYDTRTFDYW

SEQ ID NO: 7908 - protein, 15 aa, Homo sapiens
CARTKGAGYKGFDSW

SEQ ID NO: 7909 - protein, 13 aa, Homo sapiens
CVHYPGSGRFDPW

SEQ ID NO: 7910 - protein, 12 aa, Homo sapiens
CQHYGTSPRSSF

SEQ ID NO: 7911 - protein, 15 aa, Homo sapiens
CATGAGYTSSRFDYW

SEQ ID NO: 7912 - protein, 16 aa, Homo sapiens
CARASIQSRYWFFDLW

SEQ ID NO: 7913 - protein, 18 aa, Homo sapiens
CAKDAFTTFGEQGYFDPW

SEQ ID NO: 7914 - protein, 21 aa, Homo sapiens
CARVKYSYDSSGPSNYAFDIW

SEQ ID NO: 7915 - protein, 14 aa, Homo sapiens
CQSYDGRLSGPYFF

SEQ ID NO: 7916 - protein, 16 aa, Homo sapiens
CARYPSMIVMAGLDYW

SEQ ID NO: 7917 - protein, 17 aa, Homo sapiens
CAHSSGYSGYDKKFDYW

SEQ ID NO: 7918 - protein, 22 aa, Homo sapiens
CARDGGPTYYYGTGSYYPFDHW

SEQ ID NO: 7919 - protein, 17 aa, Homo sapiens
CATDAPGFADYASFAYW

SEQ ID NO: 7920 - protein, 15 aa, Homo sapiens
CARTHSSGWYYFDYW

SEQ ID NO: 7921 - protein, 15 aa, Homo sapiens
CARGRASGEQFFDQW

SEQ ID NO: 7922 - protein, 17 aa, Homo sapiens
CAKGGYGSGSYFLTDYW

SEQ ID NO: 7923 - protein, 16 aa, Homo sapiens
CAGWGYSGYDKYFQHW

SEQ ID NO: 7924 - protein, 23 aa, Homo sapiens
CARDVAYLNYYGFTDHYSGCDYW

SEQ ID NO: 7925 - protein, 21 aa, Homo sapiens
CARVNKGHYYDTSAYDYIDYW

SEQ ID NO: 7926 - protein, 18 aa, Homo sapiens
CTSRGSTYSAYDPSFDFW

SEQ ID NO: 7927 - protein, 15 aa, Homo sapiens
CAGSVAAAGRYFEHW

SEQ ID NO: 7928 - protein, 18 aa, Homo sapiens
CAKEAMIVVAYREYFDYW

SEQ ID NO: 7929 - protein, 20 aa, Homo sapiens
CARDGDSFAANYYYYYLDVW

SEQ ID NO: 7930 - protein, 19 aa, Homo sapiens
CARGWSETPDSSSSYMDVW

SEQ ID NO: 7931 - protein, 15 aa, Homo sapiens
CARGDWNDRDAFDIW

SEQ ID NO: 7932 - protein, 19 aa, Homo sapiens
CVKDSANYYDSSRFLFDYW

SEQ ID NO: 7933 - protein, 13 aa, Homo sapiens
CANLGAYYISDYW

SEQ ID NO: 7934 - protein, 12 aa, Homo sapiens
CQQGYNTPPWMF

SEQ ID NO: 7935 - protein, 12 aa, Homo sapiens [sequence omitted]

SEQ ID NO: 7936 - protein, 15 aa, Homo sapiens
CIIYNYESSDVFDIW

SEQ ID NO: 7937 - protein, 16 aa, Homo sapiens
CARWGTLAGNLDFDYW

SEQ ID NO: 7938 - protein, 17 aa, Homo sapiens
CVKDSSGGGLKWFFDLW

SEQ ID NO: 7939 - protein, 12 aa, Homo sapiens
CQQSNSVPSLAF

SEQ ID NO: 7940 - protein, 22 aa, Homo sapiens
CATHGVLRYFDWLLHSGYFDYW

SEQ ID NO: 7941 - protein, 19 aa, Homo sapiens
CAKEHPPFGELFEYYFDYW

SEQ ID NO: 7942 - protein, 26 aa, Homo sapiens
CAREGALNKYYYDSSGYSISYYFDYW

SEQ ID NO: 7943 - protein, 13 aa, Homo sapiens
CQQLDSYLHPLTF

SEQ ID NO: 7944 - protein, 16 aa, Homo sapiens
CARAMVRGVNGWFDPW

SEQ ID NO: 7945 - protein, 16 aa, Homo sapiens
CARQDDGSSWYIFDYW

SEQ ID NO: 7946 - protein, 18 aa, Homo sapiens
CARVGSGKRGYDFYMDVW

SEQ ID NO: 7947 - protein, 19 aa, Homo sapiens
CARDPADSSDYYYYYMDVW

SEQ ID NO: 7948 - protein, 23 aa, Homo sapiens
CARLTKDILTGYYSQYYYYMDVW

SEQ ID NO: 7949 - protein, 22 aa, Homo sapiens
CARELSYYYDTGGYYYGYFQHW

SEQ ID NO: 7950 - protein, 11 aa, Homo sapiens
CVREVWYFGLW

SEQ ID NO: 7951 - protein, 21 aa, Homo sapiens
CARLPLNYFGSGSYNYYFDYW

SEQ ID NO: 7952 - protein, 15 aa, Homo sapiens
CAAPGSGQLLCFGYW

SEQ ID NO: 7953 - protein, 11 aa, Homo sapiens
CQQHDSFPPRF

SEQ ID NO: 7954 - protein, 21 aa, Homo sapiens
CARRGGYYYDSGRPAGWFDPW

SEQ ID NO: 7955 - protein, 16 aa, Homo sapiens
CAKGQVEMTTMTFDDW

SEQ ID NO: 7956 - protein, 19 aa, Homo sapiens
CAKNTMILGSKRWLIFDYW

SEQ ID NO: 7957 - protein, 27 aa, Homo sapiens
CARENNFWSVPTSGPSGLSYYYYIDVW

SEQ ID NO: 7958 - protein, 15 aa, Homo sapiens
CARDDAPGGNVFDFW

SEQ ID NO: 7959 - protein, 22 aa, Homo sapiens
CASHQMLATEGIFYYFYYMDVW

SEQ ID NO: 7960 - protein, 23 aa, Homo sapiens
CARSFYSDSETFRKITSNWFDSW

SEQ ID NO: 7961 - protein, 15 aa, Homo sapiens
CAGTTVTTYWYFDLW

SEQ ID NO: 7962 - protein, 18 aa, Homo sapiens
CAKPGWGIAAAGGAFDFW

SEQ ID NO: 7963 - protein, 17 aa, Homo sapiens
CARDSSRSPGSYVFDYW

SEQ ID NO: 7964 - protein, 14 aa, Homo sapiens
CASPDQWGVFIDYW

SEQ ID NO: 7965 - protein, 18 aa, Homo sapiens
CARHLIPGSSFSDIFDFW

SEQ ID NO: 7966 - protein, 22 aa, Homo sapiens
CARNAGPQSWGSYRRYYYMDVW

SEQ ID NO: 7967 - protein, 13 aa, Homo sapiens
CAHRSALYGLDYW

SEQ ID NO: 7968 - protein, 19 aa, Homo sapiens
CARESDLHSGYDSYYIDYW

SEQ ID NO: 7969 - protein, 12 aa, Homo sapiens
CMQHTDWPRTTF

SEQ ID NO: 7970 - protein, 20 aa, Homo sapiens
CAKAHETTSLMLRGAHFDYW

SEQ ID NO: 7971 - protein, 20 aa, Homo sapiens
CARGPEYTGELRDIWTLDYW

SEQ ID NO: 7972 - protein, 18 aa, Homo sapiens
CARHGGATWLSEYYFDYW

SEQ ID NO: 7973 - protein, 18 aa, Homo sapiens
CARDSSSSGWSGGAYDIW

SEQ ID NO: 7974 - protein, 16 aa, Homo sapiens
CARDPSIGLNGAFDIW

SEQ ID NO: 7975 - protein, 20 aa, Homo sapiens
CARGQWGQWLHDGEYYFDYW

SEQ ID NO: 7976 - protein, 19 aa, Homo sapiens
CARDRFTSTWTTVTRFDYW

SEQ ID NO: 7977 - protein, 19 aa, Homo sapiens
CARDSVYESSVCHYYFDYW

SEQ ID NO: 7978 - protein, 18 aa, Homo sapiens
CARAYDTNGFITEYFQYW

SEQ ID NO: 7979 - protein, 18 aa, Homo sapiens
CVRDSETSGSQGDAFDIW

SEQ ID NO: 7980 - protein, 15 aa, Homo sapiens
CAKEKTVYDSPFDYW

SEQ ID NO: 7981 - protein, 18 aa, Homo sapiens
CAKDRSTYKSGWFAFDNW

SEQ ID NO: 7982 - protein, 20 aa, Homo sapiens
CARDRDYESSDYYPRYLDLW

SEQ ID NO: 7983 - protein, 17 aa, Homo sapiens
CARDGHSSGWSPVFDSW

SEQ ID NO: 7984 - protein, 18 aa, Homo sapiens
CAKDINRYSDFDYYFDSW

SEQ ID NO: 7985 - protein, 24 aa, Homo sapiens
CAKDAGYHYDTNRRSQPAHYFDHW

SEQ ID NO: 7986 - protein, 18 aa, Homo sapiens
CARHPNYLWFGESKFDYW

SEQ ID NO: 7987 - protein, 22 aa, Homo sapiens
CARSPSRVTVIVRSSRYYFDYW

SEQ ID NO: 7988 - protein, 19 aa, Homo sapiens
CARISSRITGTASDAFDIW

SEQ ID NO: 7989 - protein, 17 aa, Homo sapiens
CASPWGSSGYYRYFQHW

SEQ ID NO: 7990 - protein, 17 aa, Homo sapiens
CAKETMVAATYDAFDIW

SEQ ID NO: 7991 - protein, 19 aa, Homo sapiens
CARLPHYYGAGSYYPVDYW

SEQ ID NO: 7992 - protein, 14 aa, Homo sapiens
CAICFGGHYYFDYW

SEQ ID NO: 7993 - protein, 22 aa, Homo sapiens
CARTQSHHLIAAAGMLNTFDTW

SEQ ID NO: 7994 - protein, 16 aa, Homo sapiens
CARVQSVYDYDAFDVW

SEQ ID NO: 7995 - protein, 19 aa, Homo sapiens
CARDATGLVYHYYYYMDVW

SEQ ID NO: 7996 - protein, 15 aa, Homo sapiens
CARVNYLDSTGSDYW

SEQ ID NO: 7997 - protein, 18 aa, Homo sapiens
CAREGGIAVAGTDYLDYW

SEQ ID NO: 7998 - protein, 19 aa, Homo sapiens
CATFREYQLLARYWYFDLW

SEQ ID NO: 7999 - protein, 15 aa, Homo sapiens
CVRGREYGDFRGDYW

SEQ ID NO: 8000 - protein, 25 aa, Homo sapiens
CAKDSSRSFGFCSTPDCYLNAFDFW

SEQ ID NO: 8001 - protein, 22 aa, Homo sapiens
CATTLGYRVVDDLLTGYYFDNW

SEQ ID NO: 8002 - protein, 19 aa, Homo sapiens
CAKSVPGTIWYYYYYMDVW

SEQ ID NO: 8003 - protein, 13 aa, Homo sapiens
CTTDGGSSTNDYW

SEQ ID NO: 8004 - protein, 20 aa, Homo sapiens
CAKASWAGYDSSGYQYFEYW

SEQ ID NO: 8005 - protein, 16 aa, Homo sapiens
CARLRYSYADDAFDIW

SEQ ID NO: 8006 - protein, 17 aa, Homo sapiens
CARRFLVGALGYYFDYW

SEQ ID NO: 8007 - protein, 23 aa, Homo sapiens
CSRHEHTDSTGYYILPNWYFDLW

SEQ ID NO: 8008 - protein, 20 aa, Homo sapiens
CAKAAEATTNMVRGAHFDYW

SEQ ID NO: 8009 - protein, 21 aa, Homo sapiens
CARSKQGKWLQSHWGNWFDPW

SEQ ID NO: 8010 - protein, 31 aa, Homo sapiens
CALPISAVYYCARDRGFCTGGECYSSYMDVW

SEQ ID NO: 8011 - protein, 19 aa, Homo sapiens
CARDGPPSAYDYPRLFDYW

SEQ ID NO: 8012 - protein, 15 aa, Homo sapiens
CAARRFTAMAFFDYW

SEQ ID NO: 8013 - protein, 17 aa, Homo sapiens
CAKGSYGSRRKYYFDYW

SEQ ID NO: 8014 - protein, 14 aa, Homo sapiens
CANRHQQLAMFDYW

SEQ ID NO: 8015 - protein, 20 aa, Homo sapiens
CVKDVYVIRGNDYSPHDDYW

SEQ ID NO: 8016 - protein, 19 aa, Homo sapiens
CARTTVTTFREYYNWFDPW

SEQ ID NO: 8017 - protein, 20 aa, Homo sapiens
CARHAFYCSDGSCLHYLDYW

SEQ ID NO: 8018 - protein, 15 aa, Homo sapiens
CQSYDNGLSGSGSVF

SEQ ID NO: 8019 - protein, 14 aa, Homo sapiens
CQSYDTSLSASGIF

SEQ ID NO: 8020 - protein, 19 aa, Homo sapiens
CVRQPREGGSYYFRVSDYW

SEQ ID NO: 8021 - protein, 15 aa, Homo sapiens
CARQETRSPQQFDYW

SEQ ID NO: 8022 - protein, 20 aa, Homo sapiens
CVKGALRDIVATIGPQMDYW

SEQ ID NO: 8023 - protein, 15 aa, Homo sapiens
CAKVQQWPRRHFDYW

SEQ ID NO: 8024 - protein, 18 aa, Homo sapiens
CVRDGEGLLSSSNAFDLW

SEQ ID NO: 8025 - protein, 13 aa, Homo sapiens
CVRDDFIGWFDPW

SEQ ID NO: 8026 - protein, 18 aa, Homo sapiens
CARDGVGYVDSIDALDMW

SEQ ID NO: 8027 - protein, 16 aa, Homo sapiens
CASALTTITFESFDYW

SEQ ID NO: 8028 - protein, 14 aa, Homo sapiens
CAKKIRITSYLDNW

SEQ ID NO: 8029 - protein, 20 aa, Homo sapiens
CASDRWYKSDRSGYYYEDYW

SEQ ID NO: 8030 - protein, 13 aa, Homo sapiens
CARDLGDDGLDIW

SEQ ID NO: 8031 - protein, 19 aa, Homo sapiens
CARHRGIGATVTEWYFDLW

SEQ ID NO: 8032 - protein, 25 aa, Homo sapiens
CARHLPSYPHYDESSRSIGSYFDFW

SEQ ID NO: 8033 - protein, 13 aa, Homo sapiens
CQKYGFSPPTYSF

SEQ ID NO: 8034 - protein, 20 aa, Homo sapiens
CARDRDNRLFYDSSGGFDYW

SEQ ID NO: 8035 - protein, 14 aa, Homo sapiens
CQTYDSNLSGFWVF

SEQ ID NO: 8036 - protein, 22 aa, Homo sapiens
CVRDHWDQYAGGGQNYWYFDLW

SEQ ID NO: 8037 - protein, 15 aa, Homo sapiens
CAREEVDSGYDFDPW

SEQ ID NO: 8038 - protein, 23 aa, Homo sapiens
CARERRYYDSSGYYYVSYYFDYW

SEQ ID NO: 8039 - protein, 15 aa, Homo sapiens
CVCYYESSGYYLDNW

SEQ ID NO: 8040 - protein, 15 aa, Homo sapiens
CVGSSSSSSGWFDPW

SEQ ID NO: 8041 - protein, 15 aa, Homo sapiens
CARSSGWSSGSFDIW

SEQ ID NO: 8042 - protein, 19 aa, Homo sapiens
CARLDERNDLSFYYYMDVW

SEQ ID NO: 8043 - protein, 18 aa, Homo sapiens
CARRLYSGSWYDWYFDLW

SEQ ID NO: 8044 - protein, 21 aa, Homo sapiens
CARRAYVREVPYYYYYYMDVW

SEQ ID NO: 8045 - protein, 15 aa, Homo sapiens
CAKGSDAIFNWFDPW

SEQ ID NO: 8046 - protein, 13 aa, Homo sapiens
CARGSRWESFDYW

SEQ ID NO: 8047 - protein, 23 aa, Homo sapiens
CATHDQSYDMLTGFDPHYYFDYW

SEQ ID NO: 8048 - protein, 20 aa, Homo sapiens
CARDGLRYFDWSPRDAFDLW

SEQ ID NO: 8049 - protein, 22 aa, Homo sapiens
CARAGWSYDILTGYYKEPFDYW

SEQ ID NO: 8050 - protein, 19 aa, Homo sapiens
CASEDKYCSSTSCYGFDYW

SEQ ID NO: 8051 - protein, 16 aa, Homo sapiens
CVRGFYYDTSGYYEYW

SEQ ID NO: 8052 - protein, 17 aa, Homo sapiens
CARGVQSSSWPPASDYW

SEQ ID NO: 8053 - protein, 16 aa, Homo sapiens
CARLTTVTTSSAFDIW

SEQ ID NO: 8054 - protein, 16 aa, Homo sapiens
CAKDLWWELLLNFDYW

SEQ ID NO: 8055 - protein, 17 aa, Homo sapiens
CVKDQEWRRLFEAFDVW

SEQ ID NO: 8056 - protein, 16 aa, Homo sapiens
CARAVFNWNYWYMDVW

SEQ ID NO: 8057 - protein, 15 aa, Homo sapiens
CGRRPSSGTWYFDYW

SEQ ID NO: 8058 - protein, 24 aa, Homo sapiens
CARERMKNYDPLTGYFLPNWFDPW

SEQ ID NO: 8059 - protein, 14 aa, Homo sapiens
CARAGNSGYPIDYW

SEQ ID NO: 8060 - protein, 23 aa, Homo sapiens
CARTYNIYSAYCGGDCYSGFDYW

SEQ ID NO: 8061 - protein, 18 aa, Homo sapiens
CARLGCSAGSCWEGLDYW

SEQ ID NO: 8062 - protein, 13 aa, Homo sapiens
CVNDRGWLTFDSW

SEQ ID NO: 8063 - protein, 18 aa, Homo sapiens
CARAYCGGDCYSGAFDIW

SEQ ID NO: 8064 - protein, 25 aa, Homo sapiens
CARHSTAMVVGFLLPQYSYYYMDVW

SEQ ID NO: 8065 - protein, 16 aa, Homo sapiens
CARMTGIVVARAFDYW

SEQ ID NO: 8066 - protein, 19 aa, Homo sapiens
CARYGEEVFNPSFWHFDLW

SEQ ID NO: 8067 - protein, 17 aa, Homo sapiens
CAKDFGLDYSGNFFDYW

SEQ ID NO: 8068 - protein, 21 aa, Homo sapiens
CATLTSGAGEYYNFWNGKDYW

SEQ ID NO: 8069 - protein, 12 aa, Homo sapiens
CQQRAYWPQVTF

SEQ ID NO: 8070 - protein, 17 aa, Homo sapiens
CARGENFWSGYRPFDYW

SEQ ID NO: 8071 - protein, 19 aa, Homo sapiens
CAKDGSGSDYNVPADFDYW

SEQ ID NO: 8072 - protein, 15 aa, Homo sapiens
CSSRDSSGDHRHVLF

SEQ ID NO: 8073 - protein, 19 aa, Homo sapiens
CARRLRSSALGARDSFDIW

SEQ ID NO: 8074 - protein, 15 aa, Homo sapiens
CARLGYGGPASRDYW

SEQ ID NO: 8075 - protein, 13 aa, Homo sapiens
CARDGSSDYFQIW

SEQ ID NO: 8076 - protein, 19 aa, Homo sapiens
CARSCDTIFGVVISCFDYW

SEQ ID NO: 8077 - protein, 20 aa, Homo sapiens
CAKTDALYQWLNKDYYFDYW

SEQ ID NO: 8078 - protein, 14 aa, Homo sapiens
CAGDTLMLNAFDIW

SEQ ID NO: 8079 - protein, 19 aa, Homo sapiens
CAKGAAAGTRGNADWFDPW

SEQ ID NO: 8080 - protein, 16 aa, Homo sapiens
CARERDTSGYYFFDTW

SEQ ID NO: 8081 - protein, 23 aa, Homo sapiens
CARGGDSTDNDRFYYYYYYMDVW

SEQ ID NO: 8082 - protein, 13 aa, Homo sapiens
CATDLRGGYYDYW

SEQ ID NO: 8083 - protein, 20 aa, Homo sapiens
CASPNPTNYYDSSGYYMDYW

SEQ ID NO: 8084 - protein, 21 aa, Homo sapiens
CARHNFCSGGTCNGLRAFDIW

SEQ ID NO: 8085 - protein, 19 aa, Homo sapiens
CATTNRVTSCGGDCPPDYW

SEQ ID NO: 8086 - protein, 21 aa, Homo sapiens
CASRSPPSEQWLVLEGAFDIW

SEQ ID NO: 8087 - protein, 15 aa, Homo sapiens
CVRGSPLHGDYVGYW

SEQ ID NO: 8088 - protein, 22 aa, Homo sapiens
CARDLLSVFANNDIMTGPLDYW

SEQ ID NO: 8089 - protein, 17 aa, Homo sapiens
CARVIEGGSHFEAFDIW

SEQ ID NO: 8090 - protein, 19 aa, Homo sapiens
CAKMIAGAVAGTQSAFDIW

SEQ ID NO: 8091 - protein, 14 aa, Homo sapiens
CARAGTTFWNFDYW

SEQ ID NO: 8092 - protein, 23 aa, Homo sapiens
CAKVARITMIVVVIREYNAFDYW

SEQ ID NO: 8093 - protein, 17 aa, Homo sapiens
CSTDPSIFYYYYYMDVW

SEQ ID NO: 8094 - protein, 22 aa, Homo sapiens
CARGKDIWAIDSSASGQYFQHW

SEQ ID NO: 8095 - protein, 19 aa, Homo sapiens
CAKLRGYCSSSTCLNFDYW

SEQ ID NO: 8096 - protein, 19 aa, Homo sapiens
CVSTLNSESSGYYSSFDFW

SEQ ID NO: 8097 - protein, 20 aa, Homo sapiens
CARDGDYYDSSGSPYYFDYW

SEQ ID NO: 8098 - protein, 16 aa, Homo sapiens
CARDGYFHSSGYPGYW

SEQ ID NO: 8099 - protein, 19 aa, Homo sapiens
CARLRHRYSITSYRSFDIW

SEQ ID NO: 8100 - protein, 17 aa, Homo sapiens
CARHPRLQFLEWEFDYW

SEQ ID NO: 8101 - protein, 16 aa, Homo sapiens
CATRGAGIVPYCSDYW

SEQ ID NO: 8102 - protein, 19 aa, Homo sapiens
CASYYSDRSGHYYGYFGYW

SEQ ID NO: 8103 - protein, 17 aa, Homo sapiens
CVRAPVRGLIINAFDIW

SEQ ID NO: 8104 - protein, 23 aa, Homo sapiens
CARRSGIYYYDSSGYYTYYFDYW

SEQ ID NO: 8105 - protein, 15 aa, Homo sapiens
CARGPYSRGSWFDSW

SEQ ID NO: 8106 - protein, 19 aa, Homo sapiens
CARIIPTRGSNSWYYFDYW

SEQ ID NO: 8107 - protein, 15 aa, Homo sapiens
CARDYFSSWNLYDYW

SEQ ID NO: 8108 - protein, 19 aa, Homo sapiens
CGRTSPPGVQLWKAFIDYW

SEQ ID NO: 8109 - protein, 16 aa, Homo sapiens
CARDFLMGASDNFDYW

SEQ ID NO: 8110 - protein, 18 aa, Homo sapiens
CVKDRELIFWSGFAFDIW

SEQ ID NO: 8111 - protein, 22 aa, Homo sapiens
CAREGDYYGSGTYYRPYYFDYW

SEQ ID NO: 8112 - protein, 14 aa, Homo sapiens
CARLMGRVDAFDIW

SEQ ID NO: 8113 - protein, 19 aa, Homo sapiens
CVKDRQCVSMACHGGFEYW

SEQ ID NO: 8114 - protein, 19 aa, Homo sapiens
CVRRSERYFDGTTYYFDSW

SEQ ID NO: 8115 - protein, 18 aa, Homo sapiens
CAKPDRMIRGVADAFDIW

SEQ ID NO: 8116 - protein, 21 aa, Homo sapiens
CAREVRTGTPGGDFYFYMDVW

SEQ ID NO: 8117 - protein, 23 aa, Homo sapiens
CVKGPDNYYHDDSGYRDDAFDIW

SEQ ID NO: 8118 - protein, 26 aa, Homo sapiens
CARDLSYYDILTGYTGPETTNWFDLW

SEQ ID NO: 8119 - protein, 12 aa, Homo sapiens
CQQLNSYREFTF

SEQ ID NO: 8120 - protein, 16 aa, Homo sapiens
CARDMNSACHNPGDYW

SEQ ID NO: 8121 - protein, 15 aa, Homo sapiens
CARGYLELRDAFDVW

SEQ ID NO: 8122 - protein, 19 aa, Homo sapiens
CARWIRPVDTQLLDAFDLW

SEQ ID NO: 8123 - protein, 19 aa, Homo sapiens
CAREYYDSSGYSYDAFAIW

SEQ ID NO: 8124 - protein, 22 aa, Homo sapiens
CARHHRISTMIGVATGGWFDPW

SEQ ID NO: 8125 - protein, 16 aa, Homo sapiens
CAKLRRIGYHYYIDVW

SEQ ID NO: 8126 - protein, 17 aa, Homo sapiens
CARTSRDDYNYDAFDIW

SEQ ID NO: 8127 - protein, 13 aa, Homo sapiens
CHKYGSSPPSLTF

SEQ ID NO: 8128 - protein, 18 aa, Homo sapiens
CARHGRFGDLLYYFFDYW

SEQ ID NO: 8129 - protein, 18 aa, Homo sapiens
CASLTYYYDITGSIADYW

SEQ ID NO: 8130 - protein, 13 aa, Homo sapiens
CARDWGTEMGDYW

SEQ ID NO: 8131 - protein, 26 aa, Homo sapiens
CARGNSVVVPAALGFGFYYYYYMDVW

SEQ ID NO: 8132 - protein, 17 aa, Homo sapiens
CARDPYSSSGSYWFDPW

SEQ ID NO: 8133 - protein, 23 aa, Homo sapiens
CARDPEHYNFWSGWFGRQAFDIW

SEQ ID NO: 8134 - protein, 17 aa, Homo sapiens
CARADSHFDWLLSFDSW

SEQ ID NO: 8135 - protein, 14 aa, Homo sapiens
CARVELQSWYFDYW

SEQ ID NO: 8136 - protein, 17 aa, Homo sapiens
CARTGDYGGNSGIVDYW

SEQ ID NO: 8137 - protein, 13 aa, Homo sapiens
CQRYDNIPPEFTF

SEQ ID NO: 8138 - protein, 19 aa, Homo sapiens
CARVPRQCGGGPCYYFDDW

SEQ ID NO: 8139 - protein, 22 aa, Homo sapiens
CARLYYFDTTGLYYPPGYFDNW

SEQ ID NO: 8140 - protein, 13 aa, Homo sapiens
CARDGTGAAMDVW

SEQ ID NO: 8141 - protein, 14 aa, Homo sapiens
CQSIDSSFTHHVIF

SEQ ID NO: 8142 - protein, 21 aa, Homo sapiens
CARNYAGPYYDILTGYYLDFW

SEQ ID NO: 8143 - protein, 18 aa, Homo sapiens
CARHSGYFGSGHNWFDPW

SEQ ID NO: 8144 - protein, 10 aa, Homo sapiens
CQHANAFPVF

SEQ ID NO: 8145 - protein, 19 aa, Homo sapiens
CATGYHYNGPKHPSYMDVW

SEQ ID NO: 8146 - protein, 18 aa, Homo sapiens
CARHHPGHTSGPRYFDYW

SEQ ID NO: 8147 - protein, 23 aa, Homo sapiens
CALPISAVYYCARHGNGRPFDYW

SEQ ID NO: 8148 - protein, 19 aa, Homo sapiens
CAKDMSVDGTLEAGAFDMW

SEQ ID NO: 8149 - protein, 16 aa, Homo sapiens
CARASGSYYDVHFDSW

SEQ ID NO: 8150 - protein, 18 aa, Homo sapiens
CARALPDILTGGVIFDYW

SEQ ID NO: 8151 - protein, 18 aa, Homo sapiens
CARELDTANIYYYYMDVW

SEQ ID NO: 8152 - protein, 12 aa, Homo sapiens
CVKGENRVFDIW

SEQ ID NO: 8153 - protein, 16 aa, Homo sapiens
CARLKVYTGYDFDDYW

SEQ ID NO: 8154 - protein, 20 aa, Homo sapiens
CARGGPPLYSSGPSDWFDPW

SEQ ID NO: 8155 - protein, 14 aa, Homo sapiens
CARHRARGSLVDYW

SEQ ID NO: 8156 - protein, 21 aa, Homo sapiens
CAHMDYYDSSGYVRLDAFDIW

SEQ ID NO: 8157 - protein, 20 aa, Homo sapiens
CAKGAVLPFLEWLAEYFNHW

SEQ ID NO: 8158 - protein, 22 aa, Homo sapiens
CAKVSQEDIVLVRVAQYYFDYW

SEQ ID NO: 8159 - protein, 22 aa, Homo sapiens
CARYQVLTIFGVVQTPGYFDYW

SEQ ID NO: 8160 - protein, 17 aa, Homo sapiens
CATFYSGRGVDDAFDIW

SEQ ID NO: 8161 - protein, 21 aa, Homo sapiens
CARGPQYNDRSGYYHPYFDYW

SEQ ID NO: 8162 - protein, 15 aa, Homo sapiens
CAKDSSEYYYYMDVW

SEQ ID NO: 8163 - protein, 18 aa, Homo sapiens
CARHPLRDYTSPYYFDFW

SEQ ID NO: 8164 - protein, 15 aa, Homo sapiens
CARPLDESGNYFGYW

SEQ ID NO: 8165 - protein, 16 aa, Homo sapiens
CCSYAGSSTSTSDWVF

SEQ ID NO: 8166 - protein, 18 aa, Homo sapiens
CARVFIMDGGVIRGFDPW

SEQ ID NO: 8167 - protein, 19 aa, Homo sapiens
CARDPGIAATGTRQWFDPW

SEQ ID NO: 8168 - protein, 10 aa, Homo sapiens
CARDLAFDIW

SEQ ID NO: 8169 - protein, 13 aa, Homo sapiens
CQQYISYPLAITF

SEQ ID NO: 8170 - protein, 20 aa, Homo sapiens
CLKDFGPYYNRWSGHYFDSW

SEQ ID NO: 8171 - protein, 19 aa, Homo sapiens
CARDEDFVVIPATIGFDHW

SEQ ID NO: 8172 - protein, 17 aa, Homo sapiens
CARSQWFGDYHNWFDPW

SEQ ID NO: 8173 - protein, 15 aa, Homo sapiens
CARGSGWYGGVVDYW

SEQ ID NO: 8174 - protein, 22 aa, Homo sapiens
CARAESYYYDSSGYYYTENDYW

SEQ ID NO: 8175 - protein, 19 aa, Homo sapiens
CARRWGSWYRETGYYFDYW

SEQ ID NO: 8176 - protein, 16 aa, Homo sapiens
CAKDRATYISSCFDYW

SEQ ID NO: 8177 - protein, 17 aa, Homo sapiens
CASQSVDHYFGSGFDYW

SEQ ID NO: 8178 - protein, 14 aa, Homo sapiens
CTTSSAWHGRLDYW

SEQ ID NO: 8179 - protein, 17 aa, Homo sapiens
CARHGRDYSNWDYFDYW

SEQ ID NO: 8180 - protein, 15 aa, Homo sapiens
CAAGRVGTTTAFDYW

SEQ ID NO: 8181 - protein, 17 aa, Homo sapiens
CARESSGWELLRYFDNW

SEQ ID NO: 8182 - protein, 20 aa, Homo sapiens
CATMMGAEYSSGPGNWFDFW

SEQ ID NO: 8183 - protein, 20 aa, Homo sapiens
CAKGGGPQILTGYLRPFDFW

SEQ ID NO: 8184 - protein, 16 aa, Homo sapiens
CTSSHDYSNHDVFDIW

SEQ ID NO: 8185 - protein, 16 aa, Homo sapiens
CARHHSINYADYFHHW

SEQ ID NO: 8186 - protein, 19 aa, Homo sapiens
CARHSYYDFLTGYSPFDPW

SEQ ID NO: 8187 - protein, 13 aa, Homo sapiens
CHQDNNWPPEFTF

SEQ ID NO: 8188 - protein, 21 aa, Homo sapiens
CATTFFDLLTGVSHNYYMDVW

SEQ ID NO: 8189 - protein, 21 aa, Homo sapiens
CSTGPDLDVSGYRESFLFDYW

SEQ ID NO: 8190 - protein, 17 aa, Homo sapiens
CAKGLREMATIPFFDYW

SEQ ID NO: 8191 - protein, 20 aa, Homo sapiens
CARELRDYNFWSGQGPMDYW

SEQ ID NO: 8192 - protein, 14 aa, Homo sapiens
CARGKDFIYYMDVW

SEQ ID NO: 8193 - protein, 15 aa, Homo sapiens
CARTHSTSWPFFAYW

SEQ ID NO: 8194 - protein, 21 aa, Homo sapiens
CAKDHGSGDFQIKDFWYFDLW

SEQ ID NO: 8195 - protein, 21 aa, Homo sapiens
CARDLRSGYSPFYSYYYMDVW

SEQ ID NO: 8196 - protein, 17 aa, Homo sapiens
CARVSVAAAGTSWFDPW

SEQ ID NO: 8197 - protein, 15 aa, Homo sapiens
CAHWGGDRTYYLGYW

SEQ ID NO: 8198 - protein, 14 aa, Homo sapiens
CARGTTVIMGFDFW

SEQ ID NO: 8199 - protein, 13 aa, Homo sapiens
CLQHDNFPPLHTF

SEQ ID NO: 8200 - protein, 20 aa, Homo sapiens
CARGRDCSGGSCYSPWFDPW

SEQ ID NO: 8201 - protein, 14 aa, Homo sapiens
CATARATYDNFDYW

SEQ ID NO: 8202 - protein, 18 aa, Homo sapiens
CARVSGFCYSTSCYVDYW

SEQ ID NO: 8203 - protein, 21 aa, Homo sapiens
CARQDYNTLTTGFSPTVFDYW

SEQ ID NO: 8204 - protein, 16 aa, Homo sapiens
CKTEVFEFLEWLEDYW

SEQ ID NO: 8205 - protein, 11 aa, Homo sapiens
CQQDYNYHRTF

SEQ ID NO: 8206 - protein, 24 aa, Homo sapiens
CARGGLFGGHSDSDDFYHYYMDVW

SEQ ID NO: 8207 - protein, 13 aa, Homo sapiens
CQVWDNTSDHYVF

SEQ ID NO: 8208 - protein, 19 aa, Homo sapiens
CAKVPGYDSNGYLYYFDSW

SEQ ID NO: 8209 - protein, 21 aa, Homo sapiens
CARQGDQSLFRRGWLYCFDYW

SEQ ID NO: 8210 - protein, 14 aa, Homo sapiens
CARWAGVVPNFDSW

SEQ ID NO: 8211 - protein, 17 aa, Homo sapiens
CARRPIVLMVYAHFDYW

SEQ ID NO: 8212 - protein, 25 aa, Homo sapiens
CAKDPFPHNILTGFSAHGDNYFDYW

SEQ ID NO: 8213 - protein, 21 aa, Homo sapiens
CAKGGGLRYFDWLQNNWFDPW

SEQ ID NO: 8214 - protein, 17 aa, Homo sapiens
CAKDISDSSGFYSFDSW

SEQ ID NO: 8215 - protein, 23 aa, Homo sapiens
CAREGGYYHDSNTYYYPVFFDYW

SEQ ID NO: 8216 - protein, 21 aa, Homo sapiens
CARDYDTLTGYWFDSRAFNIW

SEQ ID NO: 8217 - protein, 19 aa, Homo sapiens
CARIPTRYNNRWYWYFDSW

SEQ ID NO: 8218 - protein, 16 aa, Homo sapiens
CARARRYFGEYAFDYW

SEQ ID NO: 8219 - protein, 14 aa, Homo sapiens
CARGISAWSYFDYW

SEQ ID NO: 8220 - protein, 18 aa, Homo sapiens
CARGDSSGWYGPDAFDIW

SEQ ID NO: 8221 - protein, 12 aa, Homo sapiens
CAKNLGRTFDIW

SEQ ID NO: 8222 - protein, 12 aa, Homo sapiens
CYSTDGSGNPVF

SEQ ID NO: 8223 - protein, 16 aa, Homo sapiens
CARQQQLVYQGAFDIW

SEQ ID NO: 8224 - protein, 21 aa, Homo sapiens
CARGVYYYDRSGSYYGEFDHW

SEQ ID NO: 8225 - protein, 16 aa, Homo sapiens
CAREGNSGNWYYFDFW

SEQ ID NO: 8226 - protein, 25 aa, Homo sapiens
CAKGACRGGTCYDRTYHYDYYMDVW

SEQ ID NO: 8227 - protein, 18 aa, Homo sapiens
CATHYYDSSGGAYFFDFW

SEQ ID NO: 8228 - protein, 17 aa, Homo sapiens
CQHYNPYSPNSSSANTF

SEQ ID NO: 8229 - protein, 16 aa, Homo sapiens
CAKGRGSMTEGYFDYW

SEQ ID NO: 8230 - protein, 24 aa, Homo sapiens
CARSPSLYYDILTGSIIGGFFDYW

SEQ ID NO: 8231 - protein, 20 aa, Homo sapiens
CARDLYDFSTGWEQDAFDIW

SEQ ID NO: 8232 - protein, 22 aa, Homo sapiens
CAKARGDPDKLISFGDLIFDWW

SEQ ID NO: 8233 - protein, 19 aa, Homo sapiens
CARVPSWLRASKNYYMDVW

SEQ ID NO: 8234 - protein, 19 aa, Homo sapiens
CVRGSLGTLLSYSDSFDIW

SEQ ID NO: 8235 - protein, 22 aa, Homo sapiens
CARHRSAIPGTRSDYYYYIDLW

SEQ ID NO: 8236 - protein, 23 aa, Homo sapiens
CARNMLTYYNFDGSYYYYSMDVW

SEQ ID NO: 8237 - protein, 20 aa, Homo sapiens
CAKRNTMILGYREYNWFDPW

SEQ ID NO: 8238 - protein, 24 aa, Homo sapiens
CARQDFSGITIFGVVTPRGWFDPW

SEQ ID NO: 8239 - protein, 20 aa, Homo sapiens
CAKASTSVVTLDYYYYMDVW

SEQ ID NO: 8240 - protein, 20 aa, Homo sapiens
CATDIQKYYNNSNGYYYNYW

SEQ ID NO: 8241 - protein, 17 aa, Homo sapiens
CVKGSGRYLLGYSFDYW

SEQ ID NO: 8242 - protein, 19 aa, Homo sapiens
CASGRHYYYDSSEPDFDLW

SEQ ID NO: 8243 - protein, 18 aa, Homo sapiens
CARWDYGLGPNRNRFDPW

SEQ ID NO: 8244 - protein, 20 aa, Homo sapiens
CVNGRQRYFDWLLTDDFDIW

SEQ ID NO: 8245 - protein, 20 aa, Homo sapiens
CAREYTYIHNSVGYAIFDEW

SEQ ID NO: 8246 - protein, 16 aa, Homo sapiens
CVRGMGAAVPGLFDFW

SEQ ID NO: 8247 - protein, 20 aa, Homo sapiens
CARRVYCGGDCTRLNWFDPW

SEQ ID NO: 8248 - protein, 14 aa, Homo sapiens
CARRPRGSPGLDYW

SEQ ID NO: 8249 - protein, 15 aa, Homo sapiens
CQSYDSSLVNSPVVF

SEQ ID NO: 8250 - protein, 19 aa, Homo sapiens
CAGWSVYFKWSSNYWFDPW

SEQ ID NO: 8251 - protein, 21 aa, Homo sapiens
CARGTWVVAGTPIYYYYMDVW

SEQ ID NO: 8252 - protein, 23 aa, Homo sapiens
CARDGTPRYYDSSGYYYGVLDYW

SEQ ID NO: 8253 - protein, 19 aa, Homo sapiens
CASSAVDMTSIREYYLDYW

SEQ ID NO: 8254 - protein, 16 aa, Homo sapiens
CARVDLYTRVGAFDIW

SEQ ID NO: 8255 - protein, 15 aa, Homo sapiens
CVRRWQVQPRLFDYW

SEQ ID NO: 8256 - protein, 16 aa, Homo sapiens
CARLYCGSDCKYFDLW

SEQ ID NO: 8257 - protein, 18 aa, Homo sapiens
CGSDHYYGSGVTEDFDIW

SEQ ID NO: 8258 - protein, 11 aa, Homo sapiens [sequence omitted]

SEQ ID NO: 8259 - protein, 22 aa, Homo sapiens
CAKVPYGGNTGGLFFYSYMDVW

SEQ ID NO: 8260 - protein, 23 aa, Homo sapiens
CATLRQSYDILTGYSPRYYFDNW

SEQ ID NO: 8261 - protein, 16 aa, Homo sapiens
CARRKLVATAPHFDSW

SEQ ID NO: 8262 - protein, 13 aa, Homo sapiens
CARDVDAYGRDYW

SEQ ID NO: 8263 - protein, 25 aa, Homo sapiens
CARHVRTYYYDSGTYKPYCYYMDVW

SEQ ID NO: 8264 - protein, 18 aa, Homo sapiens
CAREGGYYDSSGYELDYW

SEQ ID NO: 8265 - protein, 17 aa, Homo sapiens
CARGHNYDISGFVFDYW

SEQ ID NO: 8266 - protein, 17 aa, Homo sapiens
CARSWGTTGSRNYFDTW

SEQ ID NO: 8267 - protein, 16 aa, Homo sapiens
CARTNGDYLRHGFDIW

SEQ ID NO: 8268 - protein, 20 aa, Homo sapiens
CARDGVLRHFDDYYYYIDVW

SEQ ID NO: 8269 - protein, 24 aa, Homo sapiens
CGRAAFFYDYSGPNPPYYYYMDVW

SEQ ID NO: 8270 - protein, 23 aa, Homo sapiens
CSLKPEDTAVYYCATEENLLDYW

SEQ ID NO: 8271 - protein, 17 aa, Homo sapiens
CARRLDAPELNSAFDVW

SEQ ID NO: 8272 - protein, 17 aa, Homo sapiens
CARNRRQWLVNDAFDIW

SEQ ID NO: 8273 - protein, 15 aa, Homo sapiens
CARLFRENSRYFDYW

SEQ ID NO: 8274 - protein, 16 aa, Homo sapiens
CARHYYDSSGDAFDIW

SEQ ID NO: 8275 - protein, 11 aa, Homo sapiens
CVRDNWGIDYW

SEQ ID NO: 8276 - protein, 21 aa, Homo sapiens
CARLRFLLLWFGESRYYFDYW

SEQ ID NO: 8277 - protein, 16 aa, Homo sapiens
CARAAWGMATYYFDYW

SEQ ID NO: 8278 - protein, 17 aa, Homo sapiens
CARQHGDVTEFNWLGPW

SEQ ID NO: 8279 - protein, 11 aa, Homo sapiens [sequence omitted]

SEQ ID NO: 8280 - protein, 24 aa, Homo sapiens
CARLPRASCGGDCYSELGDAFDLW

SEQ ID NO: 8281 - protein, 28 aa, Homo sapiens
CARGQVERRVSLETGHSYPSTRGWFDPW

SEQ ID NO: 8282 - protein, 11 aa, Homo sapiens
CQQYNSYFISF

SEQ ID NO: 8283 - protein, 14 aa, Homo sapiens
CAKADSMEDAFDIW

SEQ ID NO: 8284 - protein, 21 aa, Homo sapiens
CARGLLSWREYQLLSDWFDPW

SEQ ID NO: 8285 - protein, 18 aa, Homo sapiens
CARMRSEITFGGAVLDYW

SEQ ID NO: 8286 - protein, 20 aa, Homo sapiens
CARIGVPAGSYYQYYHMDVW

SEQ ID NO: 8287 - protein, 19 aa, Homo sapiens
CARTYDSSGYYLSYYFDYW

SEQ ID NO: 8288 - protein, 15 aa, Homo sapiens
CAKDSSGYSVRFDYW

SEQ ID NO: 8289 - protein, 18 aa, Homo sapiens
CAHRADYSSAWYKTFDSW

SEQ ID NO: 8290 - protein, 13 aa, Homo sapiens
CARERDNKGLDYW

SEQ ID NO: 8291 - protein, 11 aa, Homo sapiens
CAKQFDGLDYW

SEQ ID NO: 8292 - protein, 17 aa, Homo sapiens
CARGGYGNWYPYFFDYW

SEQ ID NO: 8293 - protein, 15 aa, Homo sapiens
CARREVASAEYFHHW

SEQ ID NO: 8294 - protein, 16 aa, Homo sapiens
CARDYDPTEHYLFDYW

SEQ ID NO: 8295 - protein, 20 aa, Homo sapiens
CATDGSVTTMGHKYNWFDPW

SEQ ID NO: 8296 - protein, 21 aa, Homo sapiens
CVKDGGLLWFGDPKADAFDIW

SEQ ID NO: 8297 - protein, 21 aa, Homo sapiens
CARSGLGLCLGVTCPDAFDIW

SEQ ID NO: 8298 - protein, 20 aa, Homo sapiens
CARHDYDILTAYVFNWFDPW

SEQ ID NO: 8299 - protein, 17 aa, Homo sapiens
CAKGSARITGTFLFDYW

SEQ ID NO: 8300 - protein, 17 aa, Homo sapiens
CARLNNYDSIGYYCDYW

SEQ ID NO: 8301 - protein, 16 aa, Homo sapiens
CAKDKGDSRGYAFDFW

SEQ ID NO: 8302 - protein, 17 aa, Homo sapiens
CARGYYISGDTEAFDLW

SEQ ID NO: 8303 - protein, 22 aa, Homo sapiens
CARGKYSSGWYSADYYYYMDVW

SEQ ID NO: 8304 - protein, 16 aa, Homo sapiens
CARGGSGGYSYGFDHW

SEQ ID NO: 8305 - protein, 17 aa, Homo sapiens
CARGGYVWGSYRALDYW

SEQ ID NO: 8306 - protein, 11 aa, Homo sapiens [sequence omitted]

SEQ ID NO: 8307 - protein, 17 aa, Homo sapiens
CARRQSGASSPRPFDIW

SEQ ID NO: 8308 - protein, 20 aa, Homo sapiens
CARDRRMVRGITKTFYFDYW

SEQ ID NO: 8309 - protein, 23 aa, Homo sapiens
CARAHDYDMSGYFEGRMYYFDHW

SEQ ID NO: 8310 - protein, 18 aa, Homo sapiens
CARQAPGYSDSWYGFDPW

SEQ ID NO: 8311 - protein, 21 aa, Homo sapiens
CARDSVIVRGLMESPNWFDPW

SEQ ID NO: 8312 - protein, 15 aa, Homo sapiens
CAKSACGYDCYPDYW

SEQ ID NO: 8313 - protein, 17 aa, Homo sapiens
CVSLYGWDYFFYYMDVW

SEQ ID NO: 8314 - protein, 17 aa, Homo sapiens
CAKEGYSHGRTPNFDFW

SEQ ID NO: 8315 - protein, 17 aa, Homo sapiens
CARSSGEWLSLLPPDYW

SEQ ID NO: 8316 - protein, 20 aa, Homo sapiens
CAREGQEWLETYYYYYMDVW

SEQ ID NO: 8317 - protein, 17 aa, Homo sapiens
CAHSRGARGVSYYFDYW

SEQ ID NO: 8318 - protein, 17 aa, Homo sapiens
CARGWVVVVPAAPFDYW

SEQ ID NO: 8319 - protein, 15 aa, Homo sapiens
CARVLTGIPPFWDYW

SEQ ID NO: 8320 - protein, 13 aa, Homo sapiens
CHSADSSGSSELF

SEQ ID NO: 8321 - protein, 16 aa, Homo sapiens
CARVMTSVTNGWFDPW

SEQ ID NO: 8322 - protein, 17 aa, Homo sapiens
CAREFTVRGVRIGFDYW

SEQ ID NO: 8323 - protein, 19 aa, Homo sapiens
CAKDRPTVVMFREYAFDIW

SEQ ID NO: 8324 - protein, 22 aa, Homo sapiens
CARGAPHCNGGTCYPHNWFDSW

SEQ ID NO: 8325 - protein, 19 aa, Homo sapiens
CARDGSVGYSIDYYYMDVW

SEQ ID NO: 8326 - protein, 19 aa, Homo sapiens
CAGGISYNIDGTRGGFDIW

SEQ ID NO: 8327 - protein, 14 aa, Homo sapiens
CARGSGRQYYFESW

SEQ ID NO: 8328 - protein, 17 aa, Homo sapiens
CVSSRNPTVINGVFDYW

SEQ ID NO: 8329 - protein, 18 aa, Homo sapiens
CARVRRGNSGWYCWFDLW

SEQ ID NO: 8330 - protein, 15 aa, Homo sapiens
CAKGGHLSFYYFDYW

SEQ ID NO: 8331 - protein, 17 aa, Homo sapiens
CARDQIAVGPGKAFDIW

SEQ ID NO: 8332 - protein, 18 aa, Homo sapiens
CVKGSGGLKLLFYYFESW

SEQ ID NO: 8333 - protein, 17 aa, Homo sapiens
CAKVSRYGDQKWYFDLW

SEQ ID NO: 8334 - protein, 13 aa, Homo sapiens
CQSTDSSSAMGVF

SEQ ID NO: 8335 - protein, 14 aa, Homo sapiens
CTNTPTYSKEFDHW

SEQ ID NO: 8336 - protein, 14 aa, Homo sapiens
CIHKPRGGTDFDQW

SEQ ID NO: 8337 - protein, 19 aa, Homo sapiens
CARSHAHVNDGSTYYLDHW

SEQ ID NO: 8338 - protein, 13 aa, Homo sapiens
CNSRDSSENRWVF

SEQ ID NO: 8339 - protein, 18 aa, Homo sapiens
CARDNPSSGYGDDAFDIW

SEQ ID NO: 8340 - protein, 14 aa, Homo sapiens
CASLFPTENYFDFW

SEQ ID NO: 8341 - protein, 18 aa, Homo sapiens
CARHRIHLWFLMNWFDPW

SEQ ID NO: 8342 - protein, 18 aa, Homo sapiens
CARSMTTVDWDGVYFDYW

SEQ ID NO: 8343 - protein, 16 aa, Homo sapiens
CVTPSLYHSETRQDYW

SEQ ID NO: 8344 - protein, 15 aa, Homo sapiens
CASGSGYASDAFDIW

SEQ ID NO: 8345 - protein, 16 aa, Homo sapiens
CARDDDDGDEAPFDYW

SEQ ID NO: 8346 - protein, 17 aa, Homo sapiens
CARCDRVRRGPDAFDMW

SEQ ID NO: 8347 - protein, 18 aa, Homo sapiens
CARGRRITGRTRNYFEYW

SEQ ID NO: 8348 - protein, 18 aa, Homo sapiens
CAKDRQPHTGWPYYFVNW

SEQ ID NO: 8349 - protein, 11 aa, Homo sapiens
CATEENLLDYW

SEQ ID NO: 8350 - protein, 13 aa, Homo sapiens
CQHFHSYPQEYTF

SEQ ID NO: 8351 - protein, 16 aa, Homo sapiens
CARYDILNGAYPFEYW

SEQ ID NO: 8352 - protein, 16 aa, Homo sapiens
CARDEGLHGDSYFDSW

SEQ ID NO: 8353 - protein, 14 aa, Homo sapiens
CQSYDNSLGGHFLF

SEQ ID NO: 8354 - protein, 17 aa, Homo sapiens
CARALEVAAAGDYFDYW

SEQ ID NO: 8355 - protein, 14 aa, Homo sapiens
CVREDLSNTYYDYW

SEQ ID NO: 8356 - protein, 19 aa, Homo sapiens
CARGRMSAFYSYYYYMDVW

SEQ ID NO: 8357 - protein, 17 aa, Homo sapiens
CAVTFSHYGSGSHFDYW

SEQ ID NO: 8358 - protein, 19 aa, Homo sapiens
CARHFYGDYVLQGHWFAPW

SEQ ID NO: 8359 - protein, 22 aa, Homo sapiens
CAREALYFSDRGPYYHDAFDMW

SEQ ID NO: 8360 - protein, 16 aa, Homo sapiens
CAHRPPFFSGPYFDSW

SEQ ID NO: 8361 - protein, 19 aa, Homo sapiens
CARGSQDGRRSSGWYLDSW

SEQ ID NO: 8362 - protein, 16 aa, Homo sapiens
CAREWGSSGYYYDDYW

SEQ ID NO: 8363 - protein, 21 aa, Homo sapiens
CARERGRAYNDPDVPDSYDIW

SEQ ID NO: 8364 - protein, 20 aa, Homo sapiens
CAKDWEVYCGRDCYNAFDIW

SEQ ID NO: 8365 - protein, 19 aa, Homo sapiens
CARNARIGFSGTDFWFDPW

SEQ ID NO: 8366 - protein, 14 aa, Homo sapiens
CARSASYGFDFDYW

SEQ ID NO: 8367 - protein, 19 aa, Homo sapiens
CAKGPYITSHYYYYYMDVW

SEQ ID NO: 8368 - protein, 17 aa, Homo sapiens
CARGLHGDYEPYYFDFW

SEQ ID NO: 8369 - protein, 26 aa, Homo sapiens
CARSVAPVLRYFDWLSPNYYYYMDVW

SEQ ID NO: 8370 - protein, 13 aa, Homo sapiens
CQVWDSGTQCYVF

SEQ ID NO: 8371 - protein, 18 aa, Homo sapiens
CAHSRSSGWYSIYYFDVW

SEQ ID NO: 8372 - protein, 16 aa, Homo sapiens
CARETMVAAGRGFDYW

SEQ ID NO: 8373 - protein, 15 aa, Homo sapiens
CTRDGHLGSATFDYW

SEQ ID NO: 8374 - protein, 15 aa, Homo sapiens
CAKSGVQLWSFFDYW

SEQ ID NO: 8375 - protein, 18 aa, Homo sapiens
CTTVGSFYNFWSGYFDHW

SEQ ID NO: 8376 - protein, 18 aa, Homo sapiens
CAYSATGNNHRASWYDPW

SEQ ID NO: 8377 - protein, 13 aa, Homo sapiens
CASWDDSLKGYVF

SEQ ID NO: 8378 - protein, 15 aa, Homo sapiens
CAASWGAFKSVFGYW

SEQ ID NO: 8379 - protein, 17 aa, Homo sapiens
CARHQSSRGWIDVLDIW

SEQ ID NO: 8380 - protein, 20 aa, Homo sapiens
CARISGQFYFDSSGSYFDYW

SEQ ID NO: 8381 - protein, 17 aa, Homo sapiens
CAFLANSIGWYHYFDYW

SEQ ID NO: 8382 - protein, 11 aa, Homo sapiens
CLQYGNSPYAF

SEQ ID NO: 8383 - protein, 13 aa, Homo sapiens
CQSTDSSVNYVLF

SEQ ID NO: 8384 - protein, 19 aa, Homo sapiens
CARVHGSGSYYGLDYFDYW

SEQ ID NO: 8385 - protein, 18 aa, Homo sapiens
CARSTRRSHFYYYYMDVW

SEQ ID NO: 8386 - protein, 19 aa, Homo sapiens
CAKDWSGSGSYYQNAFDIW

SEQ ID NO: 8387 - protein, 15 aa, Homo sapiens
CARGHSGWFLDFEYW

SEQ ID NO: 8388 - protein, 16 aa, Homo sapiens
CARQPMPQTYYYMDVW

SEQ ID NO: 8389 - protein, 21 aa, Homo sapiens
CARSLNYAILTGYGTRGFDYW

SEQ ID NO: 8390 - protein, 19 aa, Homo sapiens
CAKSRSAWSIKRYWYFDLW

SEQ ID NO: 8391 - protein, 15 aa, Homo sapiens
CARDNDVSAYSFDYW

SEQ ID NO: 8392 - protein, 15 aa, Homo sapiens
CVRDYWSGYDISDYW

SEQ ID NO: 8393 - protein, 18 aa, Homo sapiens
CARAPLSVVAAAAPFDNW

SEQ ID NO: 8394 - protein, 20 aa, Homo sapiens
CARGAVTAMVYYYYYYMDVW

SEQ ID NO: 8395 - protein, 14 aa, Homo sapiens
CYLTDSSINHRVVF

SEQ ID NO: 8396 - protein, 23 aa, Homo sapiens
CARHVSDSGGRHTDYYHHYLDVW

SEQ ID NO: 8397 - protein, 22 aa, Homo sapiens
CTRGGRTYNFDITKSRTWFVPW

SEQ ID NO: 8398 - protein, 19 aa, Homo sapiens
CASLGSTARHSFYYYIDVW

SEQ ID NO: 8399 - protein, 17 aa, Homo sapiens
CARRGVAPTKDDAFDIW

SEQ ID NO: 8400 - protein, 18 aa, Homo sapiens
CVRDNGDIAVVPTAFEYW

SEQ ID NO: 8401 - protein, 16 aa, Homo sapiens
CARDWNGRVRGAMDYW

SEQ ID NO: 8402 - protein, 18 aa, Homo sapiens
CAKDAFAVDMEATYFDSW

SEQ ID NO: 8403 - protein, 16 aa, Homo sapiens
CTNCRKTYGECAFDVW

SEQ ID NO: 8404 - protein, 19 aa, Homo sapiens
CARQSSNFWSGYLNWFDPW

SEQ ID NO: 8405 - protein, 16 aa, Homo sapiens
CARPALYDSSGYYYYW

SEQ ID NO: 8406 - protein, 19 aa, Homo sapiens
CAIDTGYSSGWPKYYFDHW

SEQ ID NO: 8407 - protein, 26 aa, Homo sapiens
CASLPMVSFRYSDYRNYYHYYYMDVW

SEQ ID NO: 8408 - protein, 17 aa, Homo sapiens
CTSLFKTYSSLTVADYW

SEQ ID NO: 8409 - protein, 21 aa, Homo sapiens
CCARCVDLAKFFDYYSYMDVW

SEQ ID NO: 8410 - protein, 15 aa, Homo sapiens
CAVDASGTATGFHYW

SEQ ID NO: 8411 - protein, 17 aa, Homo sapiens
CARVGRNDYGDDHFDYW

SEQ ID NO: 8412 - protein, 17 aa, Homo sapiens
CAKDTDSSGYYPYFDYW

SEQ ID NO: 8413 - protein, 20 aa, Homo sapiens
CVRGAQRGYSVGWFNWFDSW

SEQ ID NO: 8414 - protein, 23 aa, Homo sapiens
CARTLQTNYYDSSGYYPDAFDIW

SEQ ID NO: 8415 - protein, 17 aa, Homo sapiens
CATTEWDQLPRDTFDIW

SEQ ID NO: 8416 - protein, 23 aa, Homo sapiens
CARRVQDQWLARMGTFYFYMDVW

SEQ ID NO: 8417 - protein, 17 aa, Homo sapiens
CAKDLSSFREFDAFDIW

SEQ ID NO: 8418 - protein, 15 aa, Homo sapiens
CARLGDSSGYVFDYW

SEQ ID NO: 8419 - protein, 21 aa, Homo sapiens
CARRGDYEGSGSYYQDAFGLW

SEQ ID NO: 8420 - protein, 20 aa, Homo sapiens
CARASMVRAPGHYYYYLDVW

SEQ ID NO: 8421 - protein, 24 aa, Homo sapiens
CARSGYYASGSYYNADYYYYMDVW

SEQ ID NO: 8422 - protein, 22 aa, Homo sapiens
CARHIIRYCTSAECYLDGFDIW

SEQ ID NO: 8423 - protein, 19 aa, Homo sapiens
CATSPDDSSGYIPSYFDHW

SEQ ID NO: 8424 - protein, 18 aa, Homo sapiens
CAKSGSNYDYYYYYLDVW

SEQ ID NO: 8425 - protein, 19 aa, Homo sapiens
CYTALNYFDGPDLKQIDYW

SEQ ID NO: 8426 - protein, 17 aa, Homo sapiens
CAKVPPYSTLKRHFDSW

SEQ ID NO: 8427 - protein, 16 aa, Homo sapiens
CARPTGYYSAFYMDVW

SEQ ID NO: 8428 - protein, 15 aa, Homo sapiens
CAKDRGASGSCLDYW

SEQ ID NO: 8429 - protein, 17 aa, Homo sapiens
CASGPFSSGYSHNFDYW

SEQ ID NO: 8430 - protein, 17 aa, Homo sapiens
CAKIGGYDILTGFVDYW

SEQ ID NO: 8431 - protein, 16 aa, Homo sapiens
CAKDLMRAGGNSLDYW

SEQ ID NO: 8432 - protein, 13 aa, Homo sapiens
CQQFNSYPHQLSF

SEQ ID NO: 8433 - protein, 11 aa, Homo sapiens
CQQYDNFRLAF

SEQ ID NO: 8434 - protein, 14 aa, Homo sapiens
CQSADSIDAPSWVF

SEQ ID NO: 8435 - protein, 14 aa, Homo sapiens
CARDQGFDNWLDPW

SEQ ID NO: 8436 - protein, 17 aa, Homo sapiens
CAKGLNILAINDAFDLW

SEQ ID NO: 8437 - protein, 13 aa, Homo sapiens
CARQWLEDGFDIW

SEQ ID NO: 8438 - protein, 14 aa, Homo sapiens
CAHFLPIYDAFDIW

SEQ ID NO: 8439 - protein, 22 aa, Homo sapiens
CARATRITIFGVVTGGGNFDYW

SEQ ID NO: 8440 - protein, 20 aa, Homo sapiens
CAHRQYYYNSGISSGDFQYW

SEQ ID NO: 8441 - protein, 20 aa, Homo sapiens
CARIRDYLNSGNYWNWFGPW

SEQ ID NO: 8442 - protein, 33 aa, Homo sapiens
CALPICLRADDTALYYCATMSRYDRSGYKSDYW

SEQ ID NO: 8443 - protein, 17 aa, Homo sapiens
CARDLCDSSCPDAFDLW

SEQ ID NO: 8444 - protein, 16 aa, Homo sapiens
CARHIRLVVIPDFDYW

SEQ ID NO: 8445 - protein, 15 aa, Homo sapiens
CAREGLGKAPYFEDW

SEQ ID NO: 8446 - protein, 18 aa, Homo sapiens
CASDRSTYYYDSSGYDYW

SEQ ID NO: 8447 - protein, 16 aa, Homo sapiens
CASQGLFDTLTGVDYW

SEQ ID NO: 8448 - protein, 18 aa, Homo sapiens
CARSPGGMVFPHYTFDSW

SEQ ID NO: 8449 - protein, 20 aa, Homo sapiens
CAKKGGWRCITGTCFSFDNW

SEQ ID NO: 8450 - protein, 19 aa, Homo sapiens
CARDSLQIWVTSSRTLDYW

SEQ ID NO: 8451 - protein, 22 aa, Homo sapiens
CARVPNAYCTGITCYYFYFDLW

SEQ ID NO: 8452 - protein, 15 aa, Homo sapiens
CARAYCYGDCNFDYW

SEQ ID NO: 8453 - protein, 17 aa, Homo sapiens
CARDLPPGTVGPSKDYW

SEQ ID NO: 8454 - protein, 16 aa, Homo sapiens
CARTPFWDSTGHYDYW

SEQ ID NO: 8455 - protein, 18 aa, Homo sapiens
CAKGTISGYRKYYYFDYW

SEQ ID NO: 8456 - protein, 17 aa, Homo sapiens
CARGLEGYSSSWYIDYW

SEQ ID NO: 8457 - protein, 16 aa, Homo sapiens
CARGDSASGYNWLDPW

SEQ ID NO: 8458 - protein, 22 aa, Homo sapiens
CVKNIGSGWAQDNYYYYYMDVW

SEQ ID NO: 8459 - protein, 15 aa, Homo sapiens
CQVWHSSGDHPQLVF

SEQ ID NO: 8460 - protein, 19 aa, Homo sapiens
CARVKRYYYDSRPDCFDLW

SEQ ID NO: 8461 - protein, 29 aa, Homo sapiens
CARGSAKDSTSTIFGVVIIGRPTVPFDYW

SEQ ID NO: 8462 - protein, 21 aa, Homo sapiens
CARDSSEIAVVAELENWFDPW

SEQ ID NO: 8463 - protein, 13 aa, Homo sapiens
CCSYAGTYNFWVF

SEQ ID NO: 8464 - protein, 15 aa, Homo sapiens
CAKYDALTTSPFDHW

SEQ ID NO: 8465 - protein, 16 aa, Homo sapiens
CAKEPSGYYYYHMDVW

SEQ ID NO: 8466 - protein, 23 aa, Homo sapiens
CARDRQYQLLSLSLNYYYYMDVW

SEQ ID NO: 8467 - protein, 18 aa, Homo sapiens
CAKYRPLTGGRTSGFDFW

SEQ ID NO: 8468 - protein, 21 aa, Homo sapiens
CVKDLETYYYETSGYYAFDIW

SEQ ID NO: 8469 - protein, 18 aa, Homo sapiens
CAKVSVSAWYLEGAFDIW

SEQ ID NO: 8470 - protein, 16 aa, Homo sapiens
CARGGVNIVTTIYDYW

SEQ ID NO: 8471 - protein, 18 aa, Homo sapiens
CVKSTYGDGYGRPYFDYW

SEQ ID NO: 8472 - protein, 15 aa, Homo sapiens
CIRGEPNGYPRFDDW

SEQ ID NO: 8473 - protein, 13 aa, Homo sapiens
CSSSLGWWAFHYW

SEQ ID NO: 8474 - protein, 15 aa, Homo sapiens
CATGEASGYWYFDYW

SEQ ID NO: 8475 - protein, 20 aa, Homo sapiens
CAKDSESRVEQWLVTPGDYW

SEQ ID NO: 8476 - protein, 11 aa, Homo sapiens
CAKGDSSVDYW

SEQ ID NO: 8477 - protein, 25 aa, Homo sapiens
CARLKTGFAYSSHGSGYFPNWFETW

SEQ ID NO: 8478 - protein, 15 aa, Homo sapiens
CATSDPGIGEFFGYW

SEQ ID NO: 8479 - protein, 15 aa, Homo sapiens
CARDHGDGNWYFDLW

SEQ ID NO: 8480 - protein, 18 aa, Homo sapiens
CVRIAFSYSYGLFYFDHW

SEQ ID NO: 8481 - protein, 17 aa, Homo sapiens
CVGDRRHSYGYSWFDPW

SEQ ID NO: 8482 - protein, 21 aa, Homo sapiens
CVKDLNYDSSGDYFSYGFDIW

SEQ ID NO: 8483 - protein, 12 aa, Homo sapiens
CVRDYAWAFDYW

SEQ ID NO: 8484 - protein, 18 aa, Homo sapiens
CARDGAKSRDDRGLLDYW

SEQ ID NO: 8485 - protein, 16 aa, Homo sapiens
CARGHNYFDSRDTDYW

SEQ ID NO: 8486 - protein, 16 aa, Homo sapiens
CARVDMRIWGDYFDHW

SEQ ID NO: 8487 - protein, 16 aa, Homo sapiens
CAKEGMYGDYGHWDYW

SEQ ID NO: 8488 - protein, 19 aa, Homo sapiens
CARGIVPAGKSGYNWFDPW

SEQ ID NO: 8489 - protein, 17 aa, Homo sapiens
CARHLSATGVLSHPDYW

SEQ ID NO: 8490 - protein, 18 aa, Homo sapiens
CATRPPLVGVAPHYMDVW

SEQ ID NO: 8491 - protein, 18 aa, Homo sapiens
CARVLANHYYYYYYMDVW

SEQ ID NO: 8492 - protein, 14 aa, Homo sapiens
CAGRRSGRGASDIW

SEQ ID NO: 8493 - protein, 21 aa, Homo sapiens
CARQAAENLAVMTYYYYMDVW

SEQ ID NO: 8494 - protein, 14 aa, Homo sapiens
CARENIASGDYDYW

SEQ ID NO: 8495 - protein, 26 aa, Homo sapiens
CATDGHCDNTTCYTENGYFYYYMDVW

SEQ ID NO: 8496 - protein, 15 aa, Homo sapiens
CARDFRLGIRHFDYW

SEQ ID NO: 8497 - protein, 17 aa, Homo sapiens
CQHYGSSHGSSRPPITF

SEQ ID NO: 8498 - protein, 14 aa, Homo sapiens
CAHRLVSAWHFDSW

SEQ ID NO: 8499 - protein, 17 aa, Homo sapiens
CARGYSGGIKNNWFDPW

SEQ ID NO: 8500 - protein, 15 aa, Homo sapiens
CARVDWGPTTAFDYW

SEQ ID NO: 8501 - protein, 17 aa, Homo sapiens
CATGGYDTSGYYANDYW

SEQ ID NO: 8502 - protein, 19 aa, Homo sapiens
CARQWFTRSSNGNGWFDPW

SEQ ID NO: 8503 - protein, 20 aa, Homo sapiens
CAREGEDVNSDDLVYPFDYW

SEQ ID NO: 8504 - protein, 20 aa, Homo sapiens
CVRHDRADRGWGTQYPGDYW

SEQ ID NO: 8505 - protein, 15 aa, Homo sapiens
CARDWANHGYLMDYW

SEQ ID NO: 8506 - protein, 23 aa, Homo sapiens
CAKDHRDYYDNNFSYGHSYYDYW

SEQ ID NO: 8507 - protein, 24 aa, Homo sapiens
CARETYDYSNYRPGYNYYYYMDVW

SEQ ID NO: 8508 - protein, 13 aa, Homo sapiens
CQQRNSWPVVYSF

SEQ ID NO: 8509 - protein, 16 aa, Homo sapiens
CAQEGDSAYSTVFDIW

SEQ ID NO: 8510 - protein, 16 aa, Homo sapiens
CAYGSGYADLNWLDPW

SEQ ID NO: 8511 - protein, 10 aa, Homo sapiens
CQYYNNYSTF

SEQ ID NO: 8512 - protein, 21 aa, Homo sapiens
CARGHIKTYYFDSGTYPFDYW

SEQ ID NO: 8513 - protein, 15 aa, Homo sapiens
CARPPDHYLDGFDIW

SEQ ID NO: 8514 - protein, 13 aa, Homo sapiens
CSAWDSITAHVVF

SEQ ID NO: 8515 - protein, 15 aa, Homo sapiens
CAKCTSTTGTPLDYW

SEQ ID NO: 8516 - protein, 16 aa, Homo sapiens
CARAKYYDITNWFDPW

SEQ ID NO: 8517 - protein, 16 aa, Homo sapiens
CAKDVRSLAVAGSDYW

SEQ ID NO: 8518 - protein, 15 aa, Homo sapiens
CQVWDTSSGHPRVLF

SEQ ID NO: 8519 - protein, 22 aa, Homo sapiens
CARERDGYYYDRSASENWFDPW

SEQ ID NO: 8520 - protein, 23 aa, Homo sapiens
CARDRYFDSSGYYEPYYYYMDVW

SEQ ID NO: 8521 - protein, 17 aa, Homo sapiens
CARSRVYDSSGSAFDYW

SEQ ID NO: 8522 - protein, 16 aa, Homo sapiens
CARQGRDDYGPPFDYW

SEQ ID NO: 8523 - protein, 24 aa, Homo sapiens
CASGKAWCTNGVCYTYHYYYMDVW

SEQ ID NO: 8524 - protein, 20 aa, Homo sapiens
CARDNYCSSHGCYLAAPDYW

SEQ ID NO: 8525 - protein, 22 aa, Homo sapiens
CASTSTTYYYDSRGYYSALDIW

SEQ ID NO: 8526 - protein, 14 aa, Homo sapiens
CMQALQTPRGVFTF

SEQ ID NO: 8527 - protein, 10 aa, Homo sapiens [sequence omitted]

SEQ ID NO: 8528 - protein, 17 aa, Homo sapiens
CTTDPTYDSSGYYIGYW

SEQ ID NO: 8529 - protein, 13 aa, Homo sapiens
CASQNSGNAFDLW

SEQ ID NO: 8530 - protein, 19 aa, Homo sapiens
CATLEESTTEITNEAFDIW

SEQ ID NO: 8531 - protein, 14 aa, Homo sapiens
CARAFSGWYGIDYW

SEQ ID NO: 8532 - protein, 27 aa, Homo sapiens
CAKDSVFAGSGWYPAITPYYYNYMDVW

SEQ ID NO: 8533 - protein, 16 aa, Homo sapiens
CARTEVAGTVDAFDIW

SEQ ID NO: 8534 - protein, 24 aa, Homo sapiens
CARVSSRFSEESRIYYYYYHMDVW

SEQ ID NO: 8535 - protein, 18 aa, Homo sapiens
CARGWEQWLVGPGPTDYW

SEQ ID NO: 8536 - protein, 16 aa, Homo sapiens
CARVLSGYTRAYFDFW

SEQ ID NO: 8537 - protein, 14 aa, Homo sapiens
CARNEELLYYFDYW

SEQ ID NO: 8538 - protein, 15 aa, Homo sapiens
CARSLSRADWYFDLW

SEQ ID NO: 8539 - protein, 18 aa, Homo sapiens
CAREAKTGPENHDAFDIW

SEQ ID NO: 8540 - protein, 16 aa, Homo sapiens
CASESGYTGYDPFDYW

SEQ ID NO: 8541 - protein, 18 aa, Homo sapiens
CAREAYDGSGSAPFFDYW

SEQ ID NO: 8542 - protein, 20 aa, Homo sapiens
CVKDLFEGYSFGYVPHFDYW

SEQ ID NO: 8543 - protein, 20 aa, Homo sapiens
CAHRLYYNFWSGYYDAFDIW

SEQ ID NO: 8544 - protein, 19 aa, Homo sapiens
CANSEIGANIAAAAEFNYW

SEQ ID NO: 8545 - protein, 21 aa, Homo sapiens
CARAAVWYDSSGTEPDAFDIW

SEQ ID NO: 8546 - protein, 22 aa, Homo sapiens
CARDPQYYDILAGFDVLAFDSW

SEQ ID NO: 8547 - protein, 17 aa, Homo sapiens
CARDRGYKWNDNVFDIW

SEQ ID NO: 8548 - protein, 14 aa, Homo sapiens
CQSYDTSNTTPWVF

SEQ ID NO: 8549 - protein, 23 aa, Homo sapiens
CARGRVPSIAARRHYYYYYMDVW

SEQ ID NO: 8550 - protein, 20 aa, Homo sapiens
CAKDASMLRGVLAVTYFDYW

SEQ ID NO: 8551 - protein, 23 aa, Homo sapiens
CARLDCSSTSCYYDYYYYYMDVW

SEQ ID NO: 8552 - protein, 20 aa, Homo sapiens
CAKDRVPYESSGYNNLLDSW

SEQ ID NO: 8553 - protein, 24 aa, Homo sapiens
CARDRPRSDFWSGREIDNDAFDLW

SEQ ID NO: 8554 - protein, 11 aa, Homo sapiens
CLHHNGYPPAF

SEQ ID NO: 8555 - protein, 14 aa, Homo sapiens
CAKVLAGAGSFDVW

SEQ ID NO: 8556 - protein, 14 aa, Homo sapiens
CGNWASGFEKIDYW

SEQ ID NO: 8557 - protein, 16 aa, Homo sapiens
CARQYSSGWYHALDIW

SEQ ID NO: 8558 - protein, 11 aa, Homo sapiens
CQSYDNGNWVF

SEQ ID NO: 8559 - protein, 18 aa, Homo sapiens
CVKEIGDIMVVPIAFDSW

SEQ ID NO: 8560 - protein, 12 aa, Homo sapiens
CMQATHWPALSF

SEQ ID NO: 8561 - protein, 23 aa, Homo sapiens
CAKPPRQKFFDTFGLPADGFEIW

SEQ ID NO: 8562 - protein, 13 aa, Homo sapiens
CARHGNGRPFDYW

SEQ ID NO: 8563 - protein, 17 aa, Homo sapiens
CAKERNNFESSSYLDHW

SEQ ID NO: 8564 - protein, 15 aa, Homo sapiens
CARHKAYDFDAFNIW

SEQ ID NO: 8565 - protein, 14 aa, Homo sapiens
CARQWLVPGLFGYW

SEQ ID NO: 8566 - protein, 17 aa, Homo sapiens
CARLLDYGGNPYAFDFW

SEQ ID NO: 8567 - protein, 11 aa, Homo sapiens [sequence omitted]

SEQ ID NO: 8568 - protein, 21 aa, Homo sapiens
CATKKPITFYSDTSGFEFDYW

SEQ ID NO: 8569 - protein, 17 aa, Homo sapiens
CVRGRDYNDYRFYFDFW

SEQ ID NO: 8570 - protein, 15 aa, Homo sapiens
CASQMATIDSPFDFW

SEQ ID NO: 8571 - protein, 21 aa, Homo sapiens
CASPSRADYYGSGSYSAFDYW

SEQ ID NO: 8572 - protein, 24 aa, Homo sapiens
CARVRLGRYYSDSGSLPYWYFDLW

SEQ ID NO: 8573 - protein, 15 aa, Homo sapiens
CARAVDYFDSRIDYW

SEQ ID NO: 8574 - protein, 16 aa, Homo sapiens
CAKYVNSGWYSNFDHW

SEQ ID NO: 8575 - protein, 19 aa, Homo sapiens
CTTRPSYHDVLTGYYPDYW

SEQ ID NO: 8576 - protein, 17 aa, Homo sapiens
CAKGKSLVYDSTVFDYW

SEQ ID NO: 8577 - protein, 13 aa, Homo sapiens
CQHYNSWPPGLTF

SEQ ID NO: 8578 - protein, 12 aa, Homo sapiens
CMARGYNDFDYW

SEQ ID NO: 8579 - protein, 13 aa, Homo sapiens [sequence omitted]

SEQ ID NO: 8580 - protein, 13 aa, Homo sapiens
CARLYHAYYMDVW

SEQ ID NO: 8581 - protein, 18 aa, Homo sapiens
CASSPDRYDNSGTYVDCW

SEQ ID NO: 8582 - protein, 13 aa, Homo sapiens
CQLFNSFPHEVTF

SEQ ID NO: 8583 - protein, 14 aa, Homo sapiens
CAKYIAVAGAFDYW

SEQ ID NO: 8584 - protein, 25 aa, Homo sapiens
CARGNRYYYDSSGYSKYYYFYMDVW

SEQ ID NO: 8585 - protein, 17 aa, Homo sapiens
CAGDTITHGDYTTFDYW

SEQ ID NO: 8586 - protein, 13 aa, Homo sapiens
CAKVQDYSEIDYW

SEQ ID NO: 8587 - protein, 18 aa, Homo sapiens
CARDSVGYYDSSVYNDHW

SEQ ID NO: 8588 - protein, 25 aa, Homo sapiens
CTRDNRKSDDSIFGSYRYGDALDLW

SEQ ID NO: 8589 - protein, 17 aa, Homo sapiens
CASSSGRMSIEGPFDIW

SEQ ID NO: 8590 - protein, 18 aa, Homo sapiens
CAKDIRGSSGQTNWVDPW

SEQ ID NO: 8591 - protein, 24 aa, Homo sapiens
CARNPHEIKYSYGSRRRYYYMDVW

SEQ ID NO: 8592 - protein, 19 aa, Homo sapiens
CATSRYYYDSSGTGPLDYW

SEQ ID NO: 8593 - protein, 18 aa, Homo sapiens
CARSRDAYNLAVWFFDYW

SEQ ID NO: 8594 - protein, 17 aa, Homo sapiens
CARDAIVVAGIDGFDIW

SEQ ID NO: 8595 - protein, 11 aa, Homo sapiens
CQVVDSSSDLF

SEQ ID NO: 8596 - protein, 17 aa, Homo sapiens
CAKESVSMIEGNPFDIW

SEQ ID NO: 8597 - protein, 16 aa, Homo sapiens
CARQSPDTTMVLFDYW

SEQ ID NO: 8598 - protein, 17 aa, Homo sapiens
CAKDQGALHGDYYFENW

SEQ ID NO: 8599 - protein, 16 aa, Homo sapiens
CARASAGIYGHWFDPW

SEQ ID NO: 8600 - protein, 19 aa, Homo sapiens
CARVVPFDKNDYSDAFDIW

SEQ ID NO: 8601 - protein, 16 aa, Homo sapiens
CVRDWNTQMDSGGDYW

SEQ ID NO: 8602 - protein, 18 aa, Homo sapiens
CARGSHRGSGRDNWFDPW

SEQ ID NO: 8603 - protein, 17 aa, Homo sapiens
CARKMRSTWVPDAFDIW

SEQ ID NO: 8604 - protein, 21 aa, Homo sapiens
CSRVYYDIVTGHWGPDVFDVW

SEQ ID NO: 8605 - protein, 14 aa, Homo sapiens
CARHHRLWYAPDVW

SEQ ID NO: 8606 - protein, 17 aa, Homo sapiens
CAKDRLRYDGTYTADYW

SEQ ID NO: 8607 - protein, 15 aa, Homo sapiens
CVKDRASMVGAFDFW

SEQ ID NO: 8608 - protein, 16 aa, Homo sapiens
CARAPPTTVTSDFDSW

SEQ ID NO: 8609 - protein, 18 aa, Homo sapiens
CARQRPAVMIGSDAFDFW

SEQ ID NO: 8610 - protein, 13 aa, Homo sapiens
CARATFPFSFDPW

SEQ ID NO: 8611 - protein, 19 aa, Homo sapiens
CARMNYDILTAYYDAFDIW

SEQ ID NO: 8612 - protein, 19 aa, Homo sapiens
CARDPSIAAAGMGWYFDLW

SEQ ID NO: 8613 - protein, 11 aa, Homo sapiens
CYSATDNSWVF

SEQ ID NO: 8614 - protein, 13 aa, Homo sapiens
CARGGYNYASDYW

SEQ ID NO: 8615 - protein, 19 aa, Homo sapiens
CARRLGSYYDSRGYCFDHW

SEQ ID NO: 8616 - protein, 21 aa, Homo sapiens
CAKSPHSPAYCGGGDCYTDYW

SEQ ID NO: 8617 - protein, 24 aa, Homo sapiens
CVRGRIAAANGSSEVPSVYYFDFW

SEQ ID NO: 8618 - protein, 20 aa, Homo sapiens
CAKDSTRYCSGFRCYDFDYW

SEQ ID NO: 8619 - protein, 15 aa, Homo sapiens
CARDRDGRSPSFDFW

SEQ ID NO: 8620 - protein, 18 aa, Homo sapiens
CARDLSYGYYPDDAFDIW

SEQ ID NO: 8621 - protein, 18 aa, Homo sapiens
CATELLYCSTRYCPFEYW

SEQ ID NO: 8622 - protein, 18 aa, Homo sapiens
CARDYRPRYSSSWYPDYW

SEQ ID NO: 8623 - protein, 23 aa, Homo sapiens
CARDKGGRDMDIVATVGDALDIW

SEQ ID NO: 8624 - protein, 16 aa, Homo sapiens
CATYRSGWYTGPPDYW

SEQ ID NO: 8625 - protein, 17 aa, Homo sapiens
CAKGEYTYGYSEGFDVW

SEQ ID NO: 8626 - protein, 25 aa, Homo sapiens
CVRDETVDYNLWNGYYWGNDWFDPW

SEQ ID NO: 8627 - protein, 17 aa, Homo sapiens
CAKRVVDPLVGPYFDYW

SEQ ID NO: 8628 - protein, 20 aa, Homo sapiens
CAKDPSYYYDSSGSPQIDYW

SEQ ID NO: 8629 - protein, 19 aa, Homo sapiens
CARDCSSTSCIPSGAFDIW

SEQ ID NO: 8630 - protein, 19 aa, Homo sapiens
CARGHGFGKLLYDDAFDVW

SEQ ID NO: 8631 - protein, 18 aa, Homo sapiens
CAKGHDDAWRAAWYFDSW

SEQ ID NO: 8632 - protein, 22 aa, Homo sapiens
CARDRAAYCSSTSCYRNWFDPW

SEQ ID NO: 8633 - protein, 23 aa, Homo sapiens
CVRPTGYFDSSNYLEALNWFDLW

SEQ ID NO: 8634 - protein, 20 aa, Homo sapiens
CAGLSRATRAYSDYDEIDYW

SEQ ID NO: 8635 - protein, 19 aa, Homo sapiens
CARRVSGSWYASSFHFDYW

SEQ ID NO: 8636 - protein, 19 aa, Homo sapiens
CVKGFYGSPTTSLYYFDSW

SEQ ID NO: 8637 - protein, 10 aa, Homo sapiens
CQHYYSDPGF

SEQ ID NO: 8638 - protein, 19 aa, Homo sapiens
CARALAVRPSRGTLYMDVW

SEQ ID NO: 8639 - protein, 21 aa, Homo sapiens
CARAGSYYDSSAYLDDAFDIW

SEQ ID NO: 8640 - protein, 27 aa, Homo sapiens
CVRFSGDLDCSTTSCYRWDYYYYMDVW

SEQ ID NO: 8641 - protein, 16 aa, Homo sapiens
CVRQSERGEYLDLDYW

SEQ ID NO: 8642 - protein, 31 aa, Homo sapiens
CALPILQMNSLRADDTAVYYCAKEIRPNDYW

SEQ ID NO: 8643 - protein, 17 aa, Homo sapiens
CARAGRRGYTYGGFDFW

SEQ ID NO: 8644 - protein, 18 aa, Homo sapiens
CATKGPCGGDCFYYFDFW

SEQ ID NO: 8645 - protein, 20 aa, Homo sapiens
CATHPETWIAYSSSPGGDYW

SEQ ID NO: 8646 - protein, 16 aa, Homo sapiens
CARIRKFQLLYYFDSW

SEQ ID NO: 8647 - protein, 30 aa, Homo sapiens
CSLRSDDTAVYYCARAYDTNGFITEYFQYW

SEQ ID NO: 8648 - protein, 24 aa, Homo sapiens
CARDSVDRAGPSPVDIVAPDFDYW

SEQ ID NO: 8649 - protein, 21 aa, Homo sapiens
CAGPGRLYGSQTYYRGYFDYW

SEQ ID NO: 8650 - protein, 17 aa, Homo sapiens
CAKPNYDISTHYHFDYW

SEQ ID NO: 8651 - protein, 13 aa, Homo sapiens
CQSADSTGTHWVF

SEQ ID NO: 8652 - protein, 16 aa, Homo sapiens
CGTWENSLSAGRSHVF

SEQ ID NO: 8653 - protein, 16 aa, Homo sapiens
CARMMATYRDNAFDIW

SEQ ID NO: 8654 - protein, 14 aa, Homo sapiens
CARVQRGGSCLDYW

SEQ ID NO: 8655 - protein, 16 aa, Homo sapiens
CARPANRGWYDAYDIW

SEQ ID NO: 8656 - protein, 17 aa, Homo sapiens
CAKAPRKWELREVFDYW

SEQ ID NO: 8657 - protein, 24 aa, Homo sapiens
CATLITYYFDSGTYYNPEDALDVW

SEQ ID NO: 8658 - protein, 19 aa, Homo sapiens
CARAQSLFSDSSFDAFDIW

SEQ ID NO: 8659 - protein, 15 aa, Homo sapiens
CARGGYSYGYLLDYW

SEQ ID NO: 8660 - protein, 18 aa, Homo sapiens
CAVTVIRGVIEPYYFHYW

SEQ ID NO: 8661 - protein, 17 aa, Homo sapiens
CANVVSPQKRWELLDYW

SEQ ID NO: 8662 - protein, 15 aa, Homo sapiens
CARDSFILTGYSDYW

SEQ ID NO: 8663 - protein, 19 aa, Homo sapiens
CARRGRRGYDTSSTSFDYW

SEQ ID NO: 8664 - protein, 14 aa, Homo sapiens
CARSGTYPYYFEFW

SEQ ID NO: 8665 - protein, 21 aa, Homo sapiens
CATSWFGKAAGITTNDGFDIW

SEQ ID NO: 8666 - protein, 14 aa, Homo sapiens
CTRRRQYSSWPDYW

SEQ ID NO: 8667 - protein, 16 aa, Homo sapiens
CARHGEAGVQKNFDRW

SEQ ID NO: 8668 - protein, 16 aa, Homo sapiens
CARGAGTLAAGWFDPW

SEQ ID NO: 8669 - protein, 15 aa, Homo sapiens
CTTDPIAVVRPFDPW

SEQ ID NO: 8670 - protein, 14 aa, Homo sapiens
CARQYSSSSWFDPW

SEQ ID NO: 8671 - protein, 17 aa, Homo sapiens
CARNGGSDWYEGWFDPW

SEQ ID NO: 8672 - protein, 18 aa, Homo sapiens
CARVWILGSSPSYYFDSW

SEQ ID NO: 8673 - protein, 11 aa, Homo sapiens
CQHFNNYFFTF

SEQ ID NO: 8674 - protein, 17 aa, Homo sapiens
CSIVHDTSYHNDDFDIW

SEQ ID NO: 8675 - protein, 19 aa, Homo sapiens
CARDRAITFGGVIVIGDYW

SEQ ID NO: 8676 - protein, 19 aa, Homo sapiens
CARDPVPGNHRVLYYFKDW

SEQ ID NO: 8677 - protein, 14 aa, Homo sapiens
CAREDSTSLGLDYW

SEQ ID NO: 8678 - protein, 19 aa, Homo sapiens
CMQRLQTPPQRLQTPPYTF

SEQ ID NO: 8679 - protein, 18 aa, Homo sapiens
CVRTGLKQWLVRHYFDYW

SEQ ID NO: 8680 - protein, 13 aa, Homo sapiens
CVHSLLLRPFDYW

SEQ ID NO: 8681 - protein, 13 aa, Homo sapiens
CATARLSTTLDYW

SEQ ID NO: 8682 - protein, 18 aa, Homo sapiens
CARHRFSWAAALNWFDPW

SEQ ID NO: 8683 - protein, 16 aa, Homo sapiens
CARDTDSYETSGYDYW

SEQ ID NO: 8684 - protein, 20 aa, Homo sapiens
CAKDSPYYYDSSGFRIFDYW

SEQ ID NO: 8685 - protein, 13 aa, Homo sapiens
CVRGRLGWYFNLW

SEQ ID NO: 8686 - protein, 29 aa, Homo sapiens
CALPIWDILLVPIDVPRGGDTYSYYLDVW

SEQ ID NO: 8687 - protein, 11 aa, Homo sapiens
CQQYHNLPGSF

SEQ ID NO: 8688 - protein, 16 aa, Homo sapiens
CARLDFGDHGGWFDPW

SEQ ID NO: 8689 - protein, 14 aa, Homo sapiens
CARLYGSATFFDYW

SEQ ID NO: 8690 - protein, 19 aa, Homo sapiens
CARASVSYYDSSGYYLDYW

SEQ ID NO: 8691 - protein, 17 aa, Homo sapiens
CAKEGHGSGHCGSFDPW

SEQ ID NO: 8692 - protein, 17 aa, Homo sapiens
CTRRLVSARPYWYFDLW

SEQ ID NO: 8693 - protein, 19 aa, Homo sapiens
CARGFCSGNSCFSGPWDYW

SEQ ID NO: 8694 - protein, 14 aa, Homo sapiens
CAKQVYGDYYFDYW

SEQ ID NO: 8695 - protein, 19 aa, Homo sapiens
CAKDRPPSSYPGSGPFDYW

SEQ ID NO: 8696 - protein, 16 aa, Homo sapiens
CARDYGTSRMRYFDFW

SEQ ID NO: 8697 - protein, 20 aa, Homo sapiens
CARDKVFYYDRSGYYPIDYW

SEQ ID NO: 8698 - protein, 18 aa, Homo sapiens
CVHGDVLSGYKNDAFDIW

SEQ ID NO: 8699 - protein, 14 aa, Homo sapiens
CVMTTGRYNWFDPW

SEQ ID NO: 8700 - protein, 22 aa, Homo sapiens
CAKTLFPGPLASGSYGVVFDIW

SEQ ID NO: 8701 - protein, 15 aa, Homo sapiens
CARGMRFSEGTFDIW

SEQ ID NO: 8702 - protein, 18 aa, Homo sapiens
CARDYGSSGDYTPPFDYW

SEQ ID NO: 8703 - protein, 20 aa, Homo sapiens
CARLGYDYSSGWTPPKIDYW

SEQ ID NO: 8704 - protein, 17 aa, Homo sapiens
CATGIGRYSGPDAFDIW

SEQ ID NO: 8705 - protein, 22 aa, Homo sapiens
CAGDRVIIFGGVIINDDGFDIW

SEQ ID NO: 8706 - protein, 19 aa, Homo sapiens
CTRWGISGCGGDCSTFDSW

SEQ ID NO: 8707 - protein, 14 aa, Homo sapiens
CARQFNYFHYMDVW

SEQ ID NO: 8708 - protein, 14 aa, Homo sapiens
CATVPGAPYYFDYW

SEQ ID NO: 8709 - protein, 18 aa, Homo sapiens
CAALQTYWYDTSAYCDYW

SEQ ID NO: 8710 - protein, 14 aa, Homo sapiens
CSSYRSSSTPPIVF

SEQ ID NO: 8711 - protein, 18 aa, Homo sapiens
CARLTYCGGDCYPYIDSW

SEQ ID NO: 8712 - protein, 20 aa, Homo sapiens
CTRDALSSSWYELHDAFDIW

SEQ ID NO: 8713 - protein, 22 aa, Homo sapiens
CARHSFDSSGYTFYYYYHMDVW

SEQ ID NO: 8714 - protein, 17 aa, Homo sapiens
CAKDQTTGTRGDAFDVW

SEQ ID NO: 8715 - protein, 13 aa, Homo sapiens
CAKQSDPYYFDYW

SEQ ID NO: 8716 - protein, 19 aa, Homo sapiens
CAKDIDGGHNYYALGFDHW

SEQ ID NO: 8717 - protein, 15 aa, Homo sapiens
CAREEDYSNHFFDFW

SEQ ID NO: 8718 - protein, 12 aa, Homo sapiens
CARRVDATFDDW

SEQ ID NO: 8719 - protein, 17 aa, Homo sapiens
CARSQSTGTYSGAFDYW

SEQ ID NO: 8720 - protein, 15 aa, Homo sapiens
CARVGFRVSDAFDVW

SEQ ID NO: 8721 - protein, 19 aa, Homo sapiens
CATERGFYFDSGRRAFEIW

SEQ ID NO: 8722 - protein, 15 aa, Homo sapiens
CARRNHYIAAAIDYW

SEQ ID NO: 8723 - protein, 22 aa, Homo sapiens
CAKDGETLRDIVVVVAVFFDNW

SEQ ID NO: 8724 - protein, 16 aa, Homo sapiens
CARSCGGDCYDHFDYW

SEQ ID NO: 8725 - protein, 16 aa, Homo sapiens
CATVAVAEPVHWFDPW

SEQ ID NO: 8726 - protein, 18 aa, Homo sapiens
CAREEGGGTYEDNWLDPW

SEQ ID NO: 8727 - protein, 23 aa, Homo sapiens
CSRDARTWRLVVDSEFLFWFEYW

SEQ ID NO: 8728 - protein, 17 aa, Homo sapiens
CASQRAPYFDWTHFDYW

SEQ ID NO: 8729 - protein, 23 aa, Homo sapiens
CARALRSTQYYYENSAPFYFDDW

SEQ ID NO: 8730 - protein, 27 aa, Homo sapiens
CAKVGDYDILTGSYYSSYYHYYYMDVW

SEQ ID NO: 8731 - protein, 18 aa, Homo sapiens
CARDKYRSYGSGTHFDYW

SEQ ID NO: 8732 - protein, 15 aa, Homo sapiens
CARGFGRFGEVGDYW

SEQ ID NO: 8733 - protein, 17 aa, Homo sapiens
CARQGGNSVQDYWFDPW

SEQ ID NO: 8734 - protein, 24 aa, Homo sapiens
CATDPYYKFWTDSYVRLGSYMDVW

SEQ ID NO: 8735 - protein, 16 aa, Homo sapiens
CARPGPEPQLLSLDYW

SEQ ID NO: 8736 - protein, 14 aa, Homo sapiens
CASHTYGFRYFDYW

SEQ ID NO: 8737 - protein, 23 aa, Homo sapiens
CVKGSHYESGFATVNYYPLFDYW

SEQ ID NO: 8738 - protein, 15 aa, Homo sapiens
CARERGRWLHLFDYW

SEQ ID NO: 8739 - protein, 23 aa, Homo sapiens
CARDAYYSDGGSSHYYYYYMDVW

SEQ ID NO: 8740 - protein, 22 aa, Homo sapiens
CARDRAPYFDASGYYSEAFNIW

SEQ ID NO: 8741 - protein, 21 aa, Homo sapiens
CSKGSALGHCTGTDCYHFDSW

SEQ ID NO: 8742 - protein, 17 aa, Homo sapiens
CAKDLMVRGDLYYLDQW

SEQ ID NO: 8743 - protein, 18 aa, Homo sapiens
CARRFYSGSHYPSFFDSW

SEQ ID NO: 8744 - protein, 19 aa, Homo sapiens
CARDTTVLYTSGWDSLDYW

SEQ ID NO: 8745 - protein, 23 aa, Homo sapiens
CAKDASRPYDYDDSGYHDAFDVW

SEQ ID NO: 8746 - protein, 16 aa, Homo sapiens
CAMRNFPATTKAFDIW

SEQ ID NO: 8747 - protein, 17 aa, Homo sapiens
CARHGWNGSYLDWFDPW

SEQ ID NO: 8748 - protein, 19 aa, Homo sapiens
CAKDIIPSDGYNWGGFDHW

SEQ ID NO: 8749 - protein, 12 aa, Homo sapiens
CQEANSLPAITF

SEQ ID NO: 8750 - protein, 22 aa, Homo sapiens
CARDIAWDCNGGRCHSSAFDIW

SEQ ID NO: 8751 - protein, 21 aa, Homo sapiens
CATFWYYDVFLTGYRRDFDYW

SEQ ID NO: 8752 - protein, 18 aa, Homo sapiens
CARSNLRGYSYGVDFDYW

SEQ ID NO: 8753 - protein, 17 aa, Homo sapiens
CAREMRVGAVRYYFDYW

SEQ ID NO: 8754 - protein, 16 aa, Homo sapiens
CAKDGPQYSYGCFDYW

SEQ ID NO: 8755 - protein, 17 aa, Homo sapiens
CARVGQYSGSYNVGDYW

SEQ ID NO: 8756 - protein, 18 aa, Homo sapiens
CARVWSTATGTRNWFDPW

SEQ ID NO: 8757 - protein, 22 aa, Homo sapiens
CARHVSLYYDILTGYYNPFDSW

SEQ ID NO: 8758 - protein, 20 aa, Homo sapiens
CARVGPYNSGDRYYYYMDVW

SEQ ID NO: 8759 - protein, 17 aa, Homo sapiens
CAHRIEMVREYNWFDPW

SEQ ID NO: 8760 - protein, 16 aa, Homo sapiens
CTRSYGSGTYTGFDVW

SEQ ID NO: 8761 - protein, 18 aa, Homo sapiens
CTRGKSYCSGNSCYIDLW

SEQ ID NO: 8762 - protein, 15 aa, Homo sapiens
CARNSPRGERAFDIW

SEQ ID NO: 8763 - protein, 13 aa, Homo sapiens
CARYGLENYSDYW

SEQ ID NO: 8764 - protein, 15 aa, Homo sapiens
CARVPQRFYYPFDYW

SEQ ID NO: 8765 - protein, 18 aa, Homo sapiens
CAKFFQRYDILTGYYDYW

SEQ ID NO: 8766 - protein, 16 aa, Homo sapiens
CARDSDHYDSIGFDYW

SEQ ID NO: 8767 - protein, 11 aa, Homo sapiens
CMQVSHWPIAF

SEQ ID NO: 8768 - protein, 19 aa, Homo sapiens
CAKDSRGLPRGVLGRFDFW

SEQ ID NO: 8769 - protein, 23 aa, Homo sapiens
CATLILGKTYCGSTSCYAPFDYW

SEQ ID NO: 8770 - protein, 21 aa, Homo sapiens
CARVLSASDRHAYYYQYMDVW

SEQ ID NO: 8771 - protein, 15 aa, Homo sapiens
CASVFYDSGIARDYW

SEQ ID NO: 8772 - protein, 16 aa, Homo sapiens
CARANGESWYDTFDYW

SEQ ID NO: 8773 - protein, 18 aa, Homo sapiens
CAKDLYYYDSSGYGVDYW

SEQ ID NO: 8774 - protein, 14 aa, Homo sapiens
CAKIWGSGSYLDSW

SEQ ID NO: 8775 - protein, 19 aa, Homo sapiens
CARQYLRHYYDSSGYLDYW

SEQ ID NO: 8776 - protein, 19 aa, Homo sapiens
CASLSATFYYDSGGYFDYW

SEQ ID NO: 8777 - protein, 18 aa, Homo sapiens
CARHGSIRGVPRIGFGYW

SEQ ID NO: 8778 - protein, 19 aa, Homo sapiens
CAKGTNYDLFADSYFFDSW

SEQ ID NO: 8779 - protein, 20 aa, Homo sapiens
CATWGYSYDRSGARAIFDYW

SEQ ID NO: 8780 - protein, 19 aa, Homo sapiens
CAHGAYCGGDCYPLLFDYW

SEQ ID NO: 8781 - protein, 21 aa, Homo sapiens
CARGEAVAGMRDYYYYYMDVW

SEQ ID NO: 8782 - protein, 24 aa, Homo sapiens
CATEMVRSDAYFYDAGTSAQFDYW

SEQ ID NO: 8783 - protein, 18 aa, Homo sapiens
CARDRGYLILLTNSFDIW

SEQ ID NO: 8784 - protein, 18 aa, Homo sapiens
CAKDFGYYGSGSYCLDYW

SEQ ID NO: 8785 - protein, 16 aa, Homo sapiens
CARSDYGASSGSFDYW

SEQ ID NO: 8786 - protein, 19 aa, Homo sapiens
CASDRCSYGTCYGRHFVYW

SEQ ID NO: 8787 - protein, 13 aa, Homo sapiens
CQQRTNRPLSLTF

SEQ ID NO: 8788 - protein, 25 aa, Homo sapiens
CASPKVLRYFDWLKGENPDDAFDIW

SEQ ID NO: 8789 - protein, 20 aa, Homo sapiens
CARASTHYFLSGTYSPCDYW

SEQ ID NO: 8790 - protein, 17 aa, Homo sapiens
CAREGVSLDRGTPFDYW

SEQ ID NO: 8791 - protein, 12 aa, Homo sapiens
CQSPDSDGTWAF

SEQ ID NO: 8792 - protein, 23 aa, Homo sapiens
CAKGPLTPVDVVSTLKGRYFDSW

SEQ ID NO: 8793 - protein, 21 aa, Homo sapiens
CARFNRGVTAAGLFANWFDPW

SEQ ID NO: 8794 - protein, 19 aa, Homo sapiens
CTRERAIAVPGTVWYFDLW

SEQ ID NO: 8795 - protein, 16 aa, Homo sapiens
CARVANGYNSYYLDYW

SEQ ID NO: 8796 - protein, 16 aa, Homo sapiens
CARLSVVAANMWFDSW

SEQ ID NO: 8797 - protein, 16 aa, Homo sapiens
CATLSRDDYNSPFDYW

SEQ ID NO: 8798 - protein, 14 aa, Homo sapiens
CQLWDSSSDFNYVF

SEQ ID NO: 8799 - protein, 18 aa, Homo sapiens
CGRDPLFSSYYYDYMDVW

SEQ ID NO: 8800 - protein, 18 aa, Homo sapiens
CARDLLGYFDWLYAFDIW

SEQ ID NO: 8801 - protein, 18 aa, Homo sapiens
CARVFPGQLLLHDAFDIW

SEQ ID NO: 8802 - protein, 16 aa, Homo sapiens
CARAENHYDSSVADYW

SEQ ID NO: 8803 - protein, 16 aa, Homo sapiens
CASGGEMLTIFSDDYW

SEQ ID NO: 8804 - protein, 20 aa, Homo sapiens
CARDTALHVFPFYYYYMDVW

SEQ ID NO: 8805 - protein, 21 aa, Homo sapiens
CARGAFCRAALCFAGWVFDPW

SEQ ID NO: 8806 - protein, 16 aa, Homo sapiens
CARYSGYRGNAQFDFW

SEQ ID NO: 8807 - protein, 21 aa, Homo sapiens
CARASYYDSGGSYSKFYFEYW

SEQ ID NO: 8808 - protein, 16 aa, Homo sapiens
CTKDISGSYSRALDYW

SEQ ID NO: 8809 - protein, 20 aa, Homo sapiens
CATFREFAVTPSEGLNFDYW

SEQ ID NO: 8810 - protein, 23 aa, Homo sapiens
CARDRARFDYDGSGYYLGNLDYW

SEQ ID NO: 8811 - protein, 21 aa, Homo sapiens
CARHPTSTFRRAAAGNWFDPW

SEQ ID NO: 8812 - protein, 16 aa, Homo sapiens
CARGPYPAPGLYFKHW

SEQ ID NO: 8813 - protein, 23 aa, Homo sapiens
CARYGDYDIWTQTNANKRHFDYW

SEQ ID NO: 8814 - protein, 17 aa, Homo sapiens
CAKDISKIGWFEGLDYW

SEQ ID NO: 8815 - protein, 16 aa, Homo sapiens
CTRGTQRYGSWSFDPW

SEQ ID NO: 8816 - protein, 18 aa, Homo sapiens
CARMYDSGGYYSYYLDSW

SEQ ID NO: 8817 - protein, 16 aa, Homo sapiens
CVKDRTIEGYEAFEVW

SEQ ID NO: 8818 - protein, 16 aa, Homo sapiens
CTRKNGISGYDPFDVW

SEQ ID NO: 8819 - protein, 15 aa, Homo sapiens
CARGLLRSSFDFDYW

SEQ ID NO: 8820 - protein, 17 aa, Homo sapiens
CARWLTSGSYWHYFDSW

SEQ ID NO: 8821 - protein, 24 aa, Homo sapiens
CASPPLTRIEITAARGWGAPFDYW

SEQ ID NO: 8822 - protein, 19 aa, Homo sapiens
CAREGYFCGGDCLDAFDIW

SEQ ID NO: 8823 - protein, 18 aa, Homo sapiens
CARVSFGYYDSSGYLTYW

SEQ ID NO: 8824 - protein, 20 aa, Homo sapiens
CARDRRLWRASGTYHYMDVW

SEQ ID NO: 8825 - protein, 22 aa, Homo sapiens
CAKDMTSITMIVVVITVAFDIW

SEQ ID NO: 8826 - protein, 12 aa, Homo sapiens
CMSPLQTPPNTF

SEQ ID NO: 8827 - protein, 20 aa, Homo sapiens
CVRGHYGSGSFQGETAFDIW

SEQ ID NO: 8828 - protein, 12 aa, Homo sapiens
CAGTQWLLFDSW

SEQ ID NO: 8829 - protein, 23 aa, Homo sapiens
CASWYYYDSSGYPLRTHDAFDIW

SEQ ID NO: 8830 - protein, 14 aa, Homo sapiens
CARKLQLVRPFDYW

SEQ ID NO: 8831 - protein, 20 aa, Homo sapiens
CARELLGEAVFEKVDPPDYW

SEQ ID NO: 8832 - protein, 18 aa, Homo sapiens
CARELDGRGYHYQAFDIW

SEQ ID NO: 8833 - protein, 21 aa, Homo sapiens
CARARPPRVSSLRELALFDPW

SEQ ID NO: 8834 - protein, 14 aa, Homo sapiens
CGNWGPGTYSIDYW

SEQ ID NO: 8835 - protein, 20 aa, Homo sapiens
CARDSGRGSRDFWSSYFTLW

SEQ ID NO: 8836 - protein, 12 aa, Homo sapiens
CAHHTSSLLDYW

SEQ ID NO: 8837 - protein, 17 aa, Homo sapiens
CARHYYGSGSYSGIDYW

SEQ ID NO: 8838 - protein, 14 aa, Homo sapiens
CARGMYGNFLFDFW

SEQ ID NO: 8839 - protein, 27 aa, Homo sapiens
CAGGHFGVVPAVPGDPGNYYYSYMDVW

SEQ ID NO: 8840 - protein, 34 aa, Homo sapiens
CSVTAADTAVYYCARHRRSITMVREYRLYYFDYW

SEQ ID NO: 8841 - protein, 17 aa, Homo sapiens
CANAYGGHDILTAFDYW

SEQ ID NO: 8842 - protein, 19 aa, Homo sapiens
CVTDYYNSRGRFSDFFQYW

SEQ ID NO: 8843 - protein, 12 aa, Homo sapiens
CLQYNTWPLYTF

SEQ ID NO: 8844 - protein, 17 aa, Homo sapiens
CATRNDQLHGDAGLDYW

SEQ ID NO: 8845 - protein, 18 aa, Homo sapiens
CARHGLRFSSGYLWFDPW

SEQ ID NO: 8846 - protein, 23 aa, Homo sapiens
CAKKLQRGIVVVVVGAHDAFDIW

SEQ ID NO: 8847 - protein, 19 aa, Homo sapiens
CARLWPLGSYLLEYYFDYW

SEQ ID NO: 8848 - protein, 21 aa, Homo sapiens
CAKGSSAYYFNHFYYYYMDVW

SEQ ID NO: 8849 - protein, 18 aa, Homo sapiens
CGSSRGGSNYFYYYIDVW

SEQ ID NO: 8850 - protein, 25 aa, Homo sapiens
CARTHYGGNVFPADPIPHYYYMDVW

SEQ ID NO: 8851 - protein, 18 aa, Homo sapiens
CARLARYSGSALRPFDYW

SEQ ID NO: 8852 - protein, 15 aa, Homo sapiens
CARDKTASLDAFDIW

SEQ ID NO: 8853 - protein, 11 aa, Homo sapiens
CLQFNNYLFAF

SEQ ID NO: 8854 - protein, 20 aa, Homo sapiens
CQYYSSSPRINYATSPRITF

SEQ ID NO: 8855 - protein, 13 aa, Homo sapiens
CARGGTHHGFDIW

SEQ ID NO: 8856 - protein, 16 aa, Homo sapiens
CARHAYGRWASEFDYW

SEQ ID NO: 8857 - protein, 18 aa, Homo sapiens
CAKNFAGSGWYKSWFDPW

SEQ ID NO: 8858 - protein, 13 aa, Homo sapiens
CSAWDDSLIAPTF

SEQ ID NO: 8859 - protein, 15 aa, Homo sapiens
CARSAYSSSNRIDYW

SEQ ID NO: 8860 - protein, 15 aa, Homo sapiens
CAKDRYSSAYYFDYW

SEQ ID NO: 8861 - protein, 20 aa, Homo sapiens
CARGDITMEMGARSDAFDLW

SEQ ID NO: 8862 - protein, 17 aa, Homo sapiens
CARNTISGYREYYMDVW

SEQ ID NO: 8863 - protein, 17 aa, Homo sapiens
CARQEELWFGAWYFALW

SEQ ID NO: 8864 - protein, 22 aa, Homo sapiens
CAKTGFDDNSPFFHSYYYMDVW

SEQ ID NO: 8865 - protein, 16 aa, Homo sapiens
CAHRRAAVAGPYFDYW

SEQ ID NO: 8866 - protein, 19 aa, Homo sapiens
CAKERNIVVVTAIDPFNYW

SEQ ID NO: 8867 - protein, 21 aa, Homo sapiens
CTSFIYYYDSSGYYSDAFDIW

SEQ ID NO: 8868 - protein, 19 aa, Homo sapiens
CGRHHYYDIFGGYTWFDFW

SEQ ID NO: 8869 - protein, 17 aa, Homo sapiens
CVRDGASNWYEGYFDPW

SEQ ID NO: 8870 - protein, 21 aa, Homo sapiens
CARSCVGYCSGGSRASLFDYW

SEQ ID NO: 8871 - protein, 16 aa, Homo sapiens
CARTPFFSSCDYFDSW

SEQ ID NO: 8872 - protein, 19 aa, Homo sapiens
CARLEGAYYESSGYYCDYW

SEQ ID NO: 8873 - protein, 23 aa, Homo sapiens
CARLRAPHTYVYYENSAYHFDYW

SEQ ID NO: 8874 - protein, 18 aa, Homo sapiens
CARDFKLMVRGFLPFDPW

SEQ ID NO: 8875 - protein, 17 aa, Homo sapiens
CAIYNSGWYSAAYFDYW

SEQ ID NO: 8876 - protein, 22 aa, Homo sapiens
CARDVAGPGSIYNAPVGASDIW

SEQ ID NO: 8877 - protein, 20 aa, Homo sapiens
CAKDMGFMIFGVVVDTFDRW

SEQ ID NO: 8878 - protein, 17 aa, Homo sapiens
CAREIRGYDHGDYFDYW

SEQ ID NO: 8879 - protein, 23 aa, Homo sapiens
CARVSHFGSGPDHIRQRYYFDYW

SEQ ID NO: 8880 - protein, 19 aa, Homo sapiens
CVRQHCSGWYCRGNWFDPW

SEQ ID NO: 8881 - protein, 16 aa, Homo sapiens
CARGGGLGGHDHFDNW

SEQ ID NO: 8882 - protein, 20 aa, Homo sapiens
CARDHLAPYSSSWYRWFDPW

SEQ ID NO: 8883 - protein, 13 aa, Homo sapiens
CQSYDPTNQGEVF

SEQ ID NO: 8884 - protein, 19 aa, Homo sapiens
CARSREGGPTGPTGPLDYW

SEQ ID NO: 8885 - protein, 12 aa, Homo sapiens
CQHYYPTPPITF

SEQ ID NO: 8886 - protein, 19 aa, Homo sapiens
CARAHGSGNYYGLHYFDDW

SEQ ID NO: 8887 - protein, 12 aa, Homo sapiens
CQQYDDLFTLTF

SEQ ID NO: 8888 - protein, 17 aa, Homo sapiens
CAKSYQLLPYREYFDYW

SEQ ID NO: 8889 - protein, 18 aa, Homo sapiens
CARDRVNYYDGSTPFDSW

SEQ ID NO: 8890 - protein, 20 aa, Homo sapiens
CARQPIVVVEPDTPGWFDPW

SEQ ID NO: 8891 - protein, 18 aa, Homo sapiens
CARINRGYSSGWSHFDYW

SEQ ID NO: 8892 - protein, 18 aa, Homo sapiens
CARLELTTVTSAATFDVW

SEQ ID NO: 8893 - protein, 21 aa, Homo sapiens
CARVGSGRSGDYYKSFAFDIW

SEQ ID NO: 8894 - protein, 18 aa, Homo sapiens
CVRVPLCGGDCPHAFDMW

SEQ ID NO: 8895 - protein, 21 aa, Homo sapiens
CAKDPELLWFGELSKGGLDYW

SEQ ID NO: 8896 - protein, 17 aa, Homo sapiens
CARIYQTYSGSYYFDYW

SEQ ID NO: 8897 - protein, 14 aa, Homo sapiens
CARADYLKGVIDYW

SEQ ID NO: 8898 - protein, 17 aa, Homo sapiens
CARHKGDRGGGNAFDIW

SEQ ID NO: 8899 - protein, 22 aa, Homo sapiens
CARHLEEKSYYYESIGYYFDYW

SEQ ID NO: 8900 - protein, 18 aa, Homo sapiens
CARLSPDSNGIYNGLDYW

SEQ ID NO: 8901 - protein, 15 aa, Homo sapiens
CVRDRVGVNGAVDYW

SEQ ID NO: 8902 - protein, 16 aa, Homo sapiens
CARKVQYSGYVYFDYW

SEQ ID NO: 8903 - protein, 19 aa, Homo sapiens
CARDPASTGTTSGDYFDHW

SEQ ID NO: 8904 - protein, 21 aa, Homo sapiens
CAKDRGDNYNYVWGTYHFDYW

SEQ ID NO: 8905 - protein, 20 aa, Homo sapiens
CASAKFGYYMGFRYSYMDVW

SEQ ID NO: 8906 - protein, 25 aa, Homo sapiens
CARSVAYYSDGSSQYTGGYYYMDVW

SEQ ID NO: 8907 - protein, 21 aa, Homo sapiens
CARARDDYVWGSYPQQYFESW

SEQ ID NO: 8908 - protein, 17 aa, Homo sapiens
CAKGESEYTGYGYFDQW

SEQ ID NO: 8909 - protein, 18 aa, Homo sapiens
CARDGGTGPPWYNWFDPW

SEQ ID NO: 8910 - protein, 12 aa, Homo sapiens
CQYYSGYPEIVF

SEQ ID NO: 8911 - protein, 15 aa, Homo sapiens
CAKGRSSVLYYFDSW

SEQ ID NO: 8912 - protein, 14 aa, Homo sapiens
CAKDKPYYNYMDVW

SEQ ID NO: 8913 - protein, 16 aa, Homo sapiens
CARHGQSAYYTGFDYW

SEQ ID NO: 8914 - protein, 13 aa, Homo sapiens
CQQYDSFSPTFTF

SEQ ID NO: 8915 - protein, 17 aa, Homo sapiens
CARDLPMIVAWRAFDIW

SEQ ID NO: 8916 - protein, 13 aa, Homo sapiens
CATGRPGWYSDLW

SEQ ID NO: 8917 - protein, 22 aa, Homo sapiens
CARVYGAYDFDALTFYYYMDVW

SEQ ID NO: 8918 - protein, 16 aa, Homo sapiens
CATSRDYADWGTFDYW

SEQ ID NO: 8919 - protein, 17 aa, Homo sapiens
CAKDGKGASAPYFFDYW

SEQ ID NO: 8920 - protein, 19 aa, Homo sapiens
CGRDSPYSAYDYVPRFDPW

SEQ ID NO: 8921 - protein, 21 aa, Homo sapiens
CARARGLAAIFGVVIRDFDYW

SEQ ID NO: 8922 - protein, 23 aa, Homo sapiens
CARDPVHHYGSGSYLSINWFDPW

SEQ ID NO: 8923 - protein, 10 aa, Homo sapiens
CMQGIHMGTF

SEQ ID NO: 8924 - protein, 13 aa, Homo sapiens [sequence omitted]

SEQ ID NO: 8925 - protein, 21 aa, Homo sapiens
CTTVVYYDYVWGSYRSSFDYW

SEQ ID NO: 8926 - protein, 19 aa, Homo sapiens
CAREKAPPTIVATREFDLW

SEQ ID NO: 8927 - protein, 15 aa, Homo sapiens
CTHNLRITNDAFDVW

SEQ ID NO: 8928 - protein, 14 aa, Homo sapiens
CVRDLSTGYCFDQW

SEQ ID NO: 8929 - protein, 22 aa, Homo sapiens
CARVGYYGSGSFLNGNGYLDYW

SEQ ID NO: 8930 - protein, 16 aa, Homo sapiens
CAKDFGILPGPNFDSW

SEQ ID NO: 8931 - protein, 17 aa, Homo sapiens
CARPKVAVMNLDAFDMW

SEQ ID NO: 8932 - protein, 15 aa, Homo sapiens
CTTDDSGYDSPFDYW

SEQ ID NO: 8933 - protein, 14 aa, Homo sapiens
CAKDIGDDGTFDYW

SEQ ID NO: 8934 - protein, 16 aa, Homo sapiens
CARQKSVAMNDAFDIW

SEQ ID NO: 8935 - protein, 18 aa, Homo sapiens
CARGRARYSTNWYVLDYW

SEQ ID NO: 8936 - protein, 16 aa, Homo sapiens
CTKERQRDGYIPGDYW

SEQ ID NO: 8937 - protein, 18 aa, Homo sapiens
CATTYCARGTCYKSFDPW

SEQ ID NO: 8938 - protein, 20 aa, Homo sapiens
CATDPSTYRYYYDTFGTDYW

SEQ ID NO: 8939 - protein, 18 aa, Homo sapiens
CASDYYGSGSYYHAFDIW

SEQ ID NO: 8940 - protein, 13 aa, Homo sapiens [sequence omitted]

SEQ ID NO: 8941 - protein, 25 aa, Homo sapiens
CARLASGSHYFRYPQPYYFYYMDVW

SEQ ID NO: 8942 - protein, 14 aa, Homo sapiens
CAKDGNRGYDIDYW

SEQ ID NO: 8943 - protein, 21 aa, Homo sapiens
CASPYYNFLNGYYKGGWFDPW

SEQ ID NO: 8944 - protein, 15 aa, Homo sapiens
CAIASIAAAAPFDYW

SEQ ID NO: 8945 - protein, 16 aa, Homo sapiens
CAREGMTLSYYYMDVW

SEQ ID NO: 8946 - protein, 21 aa, Homo sapiens
CARASHGQLAKKHYSSYLDVW

SEQ ID NO: 8947 - protein, 21 aa, Homo sapiens
CARLHSGSVLGNYFYLYMDVW

SEQ ID NO: 8948 - protein, 17 aa, Homo sapiens
CAKGTAYGDFVNDFDPW

SEQ ID NO: 8949 - protein, 16 aa, Homo sapiens
CAKDSAVATWYFFDFW

SEQ ID NO: 8950 - protein, 13 aa, Homo sapiens
CARQKWGWYFDLW

SEQ ID NO: 8951 - protein, 18 aa, Homo sapiens
CARTPAAYDSSGYGFDYW

SEQ ID NO: 8952 - protein, 18 aa, Homo sapiens
CARTTKVGPGGRYYFDFW

SEQ ID NO: 8953 - protein, 16 aa, Homo sapiens
CAKGVYGSGSYGFDHW

SEQ ID NO: 8954 - protein, 13 aa, Homo sapiens
CATRRPPYYVDYW

SEQ ID NO: 8955 - protein, 22 aa, Homo sapiens
CARDTYTYYSDSSGFEHWFDPW

SEQ ID NO: 8956 - protein, 17 aa, Homo sapiens
CAKDRGGVGATENFDYW

SEQ ID NO: 8957 - protein, 15 aa, Homo sapiens
CARDTLGSPPDFDYW

SEQ ID NO: 8958 - protein, 18 aa, Homo sapiens
CARDGASGITVAGHYDYW

SEQ ID NO: 8959 - protein, 16 aa, Homo sapiens
CAKDLRPDLTSVFEYW

SEQ ID NO: 8960 - protein, 12 aa, Homo sapiens
CQQANSFRSITF

SEQ ID NO: 8961 - protein, 20 aa, Homo sapiens
CARVRSLYYDSPGERAFEIW

SEQ ID NO: 8962 - protein, 19 aa, Homo sapiens
CARDPPYYESNGSSYFDYW

SEQ ID NO: 8963 - protein, 17 aa, Homo sapiens
CTTDLLFGEATPAFDNW

SEQ ID NO: 8964 - protein, 19 aa, Homo sapiens
CARLASYREVVVITHFDYW

SEQ ID NO: 8965 - protein, 15 aa, Homo sapiens
CVRGTNLVEMIVDYW

SEQ ID NO: 8966 - protein, 22 aa, Homo sapiens
CARHELSRITLIVVAPSYFDYW

SEQ ID NO: 8967 - protein, 25 aa, Homo sapiens
CARDIQPAQARPGDSITRYNWFDPW

SEQ ID NO: 8968 - protein, 18 aa, Homo sapiens
CARDYCAGACNSYYFDYW

SEQ ID NO: 8969 - protein, 14 aa, Homo sapiens
CARAAVGSGYPDYW

SEQ ID NO: 8970 - protein, 13 aa, Homo sapiens
CARDNLAVAFDYW

SEQ ID NO: 8971 - protein, 20 aa, Homo sapiens
CAKCAQLFWLGEGKFSFDHW

SEQ ID NO: 8972 - protein, 14 aa, Homo sapiens
CVRSWNYAGGFDYW

SEQ ID NO: 8973 - protein, 20 aa, Homo sapiens
CVRGQWELLLGYYYYYLDVW

SEQ ID NO: 8974 - protein, 18 aa, Homo sapiens
CAHSRMSGFYAYYYVDVW

SEQ ID NO: 8975 - protein, 15 aa, Homo sapiens
CATSGWYRGSQFDHW

SEQ ID NO: 8976 - protein, 18 aa, Homo sapiens
CARTVPLRLGEFSYLDSW

SEQ ID NO: 8977 - protein, 18 aa, Homo sapiens
CARIWFGVAEARDYFDYW

SEQ ID NO: 8978 - protein, 19 aa, Homo sapiens
CAKDLCYTSDCSDAHFDSW

SEQ ID NO: 8979 - protein, 15 aa, Homo sapiens
CARLGSNEYYYMDVW

SEQ ID NO: 8980 - protein, 17 aa, Homo sapiens
CAKRLYSSGWGDVFDSW

SEQ ID NO: 8981 - protein, 20 aa, Homo sapiens
CARQGPLDRGVVITNPFDSW

SEQ ID NO: 8982 - protein, 17 aa, Homo sapiens
CAKDSTAAAGIGAFDYW

SEQ ID NO: 8983 - protein, 21 aa, Homo sapiens
CARIPRDPSSYYYPHDAFDIW

SEQ ID NO: 8984 - protein, 21 aa, Homo sapiens
CAKGSAIGSCSGSNCFHFDSW

SEQ ID NO: 8985 - protein, 15 aa, Homo sapiens
CARYDSGPYGAFDFW

SEQ ID NO: 8986 - protein, 15 aa, Homo sapiens
CARAQYQVLNPFDYW

SEQ ID NO: 8987 - protein, 14 aa, Homo sapiens
CARDRRDGFNPDYW

SEQ ID NO: 8988 - protein, 20 aa, Homo sapiens
CAKNRPGSSGWARNDAFDVW

SEQ ID NO: 8989 - protein, 21 aa, Homo sapiens
CVKAPDYYDILTGYPYYFDAW

SEQ ID NO: 8990 - protein, 21 aa, Homo sapiens
CARDRAPQVQFIRKHWYFDLW

SEQ ID NO: 8991 - protein, 23 aa, Homo sapiens
CASAGYSYGSKRKYYYYYYMDVW

SEQ ID NO: 8992 - protein, 22 aa, Homo sapiens
CAKVGFAFCGGDCYSPYLDDYW

SEQ ID NO: 8993 - protein, 19 aa, Homo sapiens
CARLFHGGNAYHYYYMDVW

SEQ ID NO: 8994 - protein, 21 aa, Homo sapiens
CAREGVRITMIVVVRDAFDIW

SEQ ID NO: 8995 - protein, 23 aa, Homo sapiens
CARTFHPPRYYETRGYNKWFDPW

SEQ ID NO: 8996 - protein, 16 aa, Homo sapiens
CAHRSIIGMTASFDYW

SEQ ID NO: 8997 - protein, 15 aa, Homo sapiens
CATSQYQMGLVFDSW

SEQ ID NO: 8998 - protein, 18 aa, Homo sapiens
CARRLKYYDSLTGHFDHW

SEQ ID NO: 8999 - protein, 17 aa, Homo sapiens
CARSGAPTATDWHFDVW

SEQ ID NO: 9000 - protein, 17 aa, Homo sapiens
CAKDCHYYDSSGAFDYW

SEQ ID NO: 9001 - protein, 22 aa, Homo sapiens
CAKEDSPHCTTSSCYTGAFDNW

SEQ ID NO: 9002 - protein, 19 aa, Homo sapiens
CARGPSCTSISCPYAFDIW

SEQ ID NO: 9003 - protein, 18 aa, Homo sapiens
CACSVAGTWSGSDTFDIW

SEQ ID NO: 9004 - protein, 21 aa, Homo sapiens
CTTGPSYYYDTSGLRGGFDYW

SEQ ID NO: 9005 - protein, 19 aa, Homo sapiens
CARAVEYCRGAKCADFDFW

SEQ ID NO: 9006 - protein, 17 aa, Homo sapiens
CAREFIASSTSGYLLYW

SEQ ID NO: 9007 - protein, 16 aa, Homo sapiens
CARSTEYGGSWYFDVW

SEQ ID NO: 9008 - protein, 15 aa, Homo sapiens
CARRLAPAGHFFDYW

SEQ ID NO: 9009 - protein, 13 aa, Homo sapiens
CQHYGISPLEYIF

SEQ ID NO: 9010 - protein, 16 aa, Homo sapiens
CGREGSGNYWGFFDYW

SEQ ID NO: 9011 - protein, 19 aa, Homo sapiens
CARDYYDSSGYRMNYFDYW

SEQ ID NO: 9012 - protein, 13 aa, Homo sapiens
CAAVGGSYYFKFW

SEQ ID NO: 9013 - protein, 14 aa, Homo sapiens
CSSYTIRSTLFYVF

SEQ ID NO: 9014 - protein, 12 aa, Homo sapiens
CARDFFTAIDYW

SEQ ID NO: 9015 - protein, 20 aa, Homo sapiens
CAKKGEQWGGYDSSGYSDYW

SEQ ID NO: 9016 - protein, 19 aa, Homo sapiens
CTSPIVVVPAATLDGLDYW

SEQ ID NO: 9017 - protein, 17 aa, Homo sapiens
CARGTLSGYQGVNFDSW

SEQ ID NO: 9018 - protein, 11 aa, Homo sapiens
CQRYNSAPWAF

SEQ ID NO: 9019 - protein, 17 aa, Homo sapiens
CLRSGSSYTGLYFFDYW

SEQ ID NO: 9020 - protein, 23 aa, Homo sapiens
CAREAFSVIRGVPDYYHYYMDVW

SEQ ID NO: 9021 - protein, 10 aa, Homo sapiens
CARGDSFGVW

SEQ ID NO: 9022 - protein, 13 aa, Homo sapiens
CQQYDYSPLGGTF

SEQ ID NO: 9023 - protein, 16 aa, Homo sapiens
CAITHGSGTQEWFDPW

SEQ ID NO: 9024 - protein, 17 aa, Homo sapiens
CATYTYTYASASGLDYW

SEQ ID NO: 9025 - protein, 13 aa, Homo sapiens
CQTYDRSLSGLAF

SEQ ID NO: 9026 - protein, 21 aa, Homo sapiens
CASPLLLYVSGTHYNDAFDSW

SEQ ID NO: 9027 - protein, 19 aa, Homo sapiens
CARALTKFWSGSSVWFDPW

SEQ ID NO: 9028 - protein, 12 aa, Homo sapiens
CVRRDDLAFDYW

SEQ ID NO: 9029 - protein, 14 aa, Homo sapiens
CARDTYGGHYFDYW

SEQ ID NO: 9030 - protein, 17 aa, Homo sapiens
CARDFSPLSTVTGFDSW

SEQ ID NO: 9031 - protein, 17 aa, Homo sapiens
CARRRGPEWDLHEFDNW

SEQ ID NO: 9032 - protein, 19 aa, Homo sapiens
CARHVVTTVVTPRAPFDYW

SEQ ID NO: 9033 - protein, 19 aa, Homo sapiens
CARPRGYYASGGLWGFDYW

SEQ ID NO: 9034 - protein, 14 aa, Homo sapiens
CARDPGSLMVFDYW

SEQ ID NO: 9035 - protein, 16 aa, Homo sapiens
CARGVEPDGDYYMDVW

SEQ ID NO: 9036 - protein, 13 aa, Homo sapiens [sequence omitted]

SEQ ID NO: 9037 - protein, 13 aa, Homo sapiens
CARQLGMSAIDIW

SEQ ID NO: 9038 - protein, 24 aa, Homo sapiens
CAREMREYDIVTGSFRNSELIDYW

SEQ ID NO: 9039 - protein, 14 aa, Homo sapiens
CARAPAFAGYLAYW

SEQ ID NO: 9040 - protein, 17 aa, Homo sapiens
CARDTAAVGSNWYFDLW

SEQ ID NO: 9041 - protein, 16 aa, Homo sapiens
CAKGNYNFWSGYLDYW

SEQ ID NO: 9042 - protein, 15 aa, Homo sapiens
CVRLPTGFPNWFGPW

SEQ ID NO: 9043 - protein, 15 aa, Homo sapiens
CAREVRGVHTFFDFW

SEQ ID NO: 9044 - protein, 19 aa, Homo sapiens
CAKDRCVYSSTSCYVGDYW

SEQ ID NO: 9045 - protein, 19 aa, Homo sapiens
CARVCRGGGCPELPFFDYW

SEQ ID NO: 9046 - protein, 12 aa, Homo sapiens
CLLYYGGAHPVF

SEQ ID NO: 9047 - protein, 19 aa, Homo sapiens
CAKEKTFPWIAPGPYFDYW

SEQ ID NO: 9048 - protein, 20 aa, Homo sapiens
CAKISGQFYYESRGAYFDYW

SEQ ID NO: 9049 - protein, 16 aa, Homo sapiens
CARDGKYSSSSVFDFW

SEQ ID NO: 9050 - protein, 17 aa, Homo sapiens
CALPISRAAGAEAFDIW

SEQ ID NO: 9051 - protein, 20 aa, Homo sapiens
CARGAGYFDWSLVPQYFQQW

SEQ ID NO: 9052 - protein, 21 aa, Homo sapiens
CARIRGSPWGQEYYFYYMDVW

SEQ ID NO: 9053 - protein, 20 aa, Homo sapiens
CARARHSSGYYDIAYAFDIW

SEQ ID NO: 9054 - protein, 18 aa, Homo sapiens
CARAQQQWLVLDWYFDLW

SEQ ID NO: 9055 - protein, 19 aa, Homo sapiens
CAKDKRRGSGSWFYYIDVW

SEQ ID NO: 9056 - protein, 19 aa, Homo sapiens
CAKDRSGGSGSYWGGFDYW

SEQ ID NO: 9057 - protein, 16 aa, Homo sapiens
CARGGWLKASNAFDIW

SEQ ID NO: 9058 - protein, 19 aa, Homo sapiens
CAKDNDSGGFPLTDAFDIW

SEQ ID NO: 9059 - protein, 12 aa, Homo sapiens
CVRSVTNWLDPW

SEQ ID NO: 9060 - protein, 24 aa, Homo sapiens
CARHLPSRITIFGVVTPNNWFDPW

SEQ ID NO: 9061 - protein, 14 aa, Homo sapiens
CARVVIAANWFDPW

SEQ ID NO: 9062 - protein, 18 aa, Homo sapiens
CASPRYFGESDGDAFDIW

SEQ ID NO: 9063 - protein, 13 aa, Homo sapiens
CARSGDQGPFDIW

SEQ ID NO: 9064 - protein, 17 aa, Homo sapiens
CVKDDGEDVSSGYFDYW

SEQ ID NO: 9065 - protein, 22 aa, Homo sapiens
CARALGDYGRGNYFYYYYMDVW

SEQ ID NO: 9066 - protein, 22 aa, Homo sapiens
CARLSSQHYISSAHYYGWFDPW

SEQ ID NO: 9067 - protein, 17 aa, Homo sapiens
CARDRNWNYGAPYFDYW

SEQ ID NO: 9068 - protein, 12 aa, Homo sapiens
CMQVLQPPMYSF

SEQ ID NO: 9069 - protein, 18 aa, Homo sapiens
CAKDQGIIDFLEHYMDVW

SEQ ID NO: 9070 - protein, 17 aa, Homo sapiens
CASCFVGTTGGGYFDSW

SEQ ID NO: 9071 - protein, 18 aa, Homo sapiens
CAKYSTLRGYTYDPFDYW

SEQ ID NO: 9072 - protein, 22 aa, Homo sapiens
CATRPGSGKYYPGGSYYPFDPW

SEQ ID NO: 9073 - protein, 16 aa, Homo sapiens
CAKGSYSGYVTLVDYW

SEQ ID NO: 9074 - protein, 15 aa, Homo sapiens
CHSRDSSANHLGYVF

SEQ ID NO: 9075 - protein, 16 aa, Homo sapiens
CARPGISSWRHTFDSW

SEQ ID NO: 9076 - protein, 20 aa, Homo sapiens
CAKLGAGSAYCGGDCFFDYW

SEQ ID NO: 9077 - protein, 18 aa, Homo sapiens
CASQPLFYFDNSGYYGYW

SEQ ID NO: 9078 - protein, 25 aa, Homo sapiens
CARDGYCHDSSGDLCGKINDAFDIW

SEQ ID NO: 9079 - protein, 13 aa, Homo sapiens
CTSGSGDDTIDYW

SEQ ID NO: 9080 - protein, 12 aa, Homo sapiens
CQHFNHYPPIIF

SEQ ID NO: 9081 - protein, 19 aa, Homo sapiens
CARDYSGSRSYGSAYFDNW

SEQ ID NO: 9082 - protein, 17 aa, Homo sapiens
CARNSGWNYFFYYMDVW

SEQ ID NO: 9083 - protein, 18 aa, Homo sapiens
CARRGLETYLDFHYMDVW

SEQ ID NO: 9084 - protein, 16 aa, Homo sapiens
CARQGRLGELSSFDFW

SEQ ID NO: 9085 - protein, 17 aa, Homo sapiens
CATSTVPVSRGDAFDIW

SEQ ID NO: 9086 - protein, 21 aa, Homo sapiens
CARLSTYTSGPARKNNWIDPW

SEQ ID NO: 9087 - protein, 21 aa, Homo sapiens
CARASHFYDSGGSRPNWVDPW

SEQ ID NO: 9088 - protein, 20 aa, Homo sapiens
CAKDALLNYYDSSSYGFDRW

SEQ ID NO: 9089 - protein, 21 aa, Homo sapiens
CARLVAAPGNPYYYYYYMDVW

SEQ ID NO: 9090 - protein, 13 aa, Homo sapiens
CQQYFTTPPSFTF

SEQ ID NO: 9091 - protein, 16 aa, Homo sapiens
CVARRDGYPPAAFDIW

SEQ ID NO: 9092 - protein, 14 aa, Homo sapiens
CARVAGPDGLADYW

SEQ ID NO: 9093 - protein, 19 aa, Homo sapiens
CARRRCSSIGCYDAPFDYW

SEQ ID NO: 9094 - protein, 15 aa, Homo sapiens
CARVMGMRELLVDYW

SEQ ID NO: 9095 - protein, 24 aa, Homo sapiens
CARDPWNYDVFSGSLEGNFYFDSW

SEQ ID NO: 9096 - protein, 22 aa, Homo sapiens
CVRDFHDSLWDNYPLGDYFDYW

SEQ ID NO: 9097 - protein, 19 aa, Homo sapiens
CARVFSYHNFWSGSNFDYW

SEQ ID NO: 9098 - protein, 18 aa, Homo sapiens
CARDGEIERTVLDAFDLW

SEQ ID NO: 9099 - protein, 18 aa, Homo sapiens
CARSAKLGTDGRSPFDIW

SEQ ID NO: 9100 - protein, 16 aa, Homo sapiens
CVREKRERGSDAFAIW

SEQ ID NO: 9101 - protein, 19 aa, Homo sapiens
CARAGGSRNYDGHDYFDYW

SEQ ID NO: 9102 - protein, 15 aa, Homo sapiens
CARGGAYPDNWFDSW

SEQ ID NO: 9103 - protein, 16 aa, Homo sapiens
CARAPEGIAVAGHDYW

SEQ ID NO: 9104 - protein, 16 aa, Homo sapiens
CARIDDIGGFVHFDYW

SEQ ID NO: 9105 - protein, 15 aa, Homo sapiens
CASRAQGPYNWFDPW

SEQ ID NO: 9106 - protein, 12 aa, Homo sapiens
CQQYFSTPLYSF

SEQ ID NO: 9107 - protein, 19 aa, Homo sapiens
CVRPYGDNEGYYYYHMDVW

SEQ ID NO: 9108 - protein, 18 aa, Homo sapiens
CAKDSSDLLLWGGYFDSW

SEQ ID NO: 9109 - protein, 21 aa, Homo sapiens
CARERTATIFGIVYSYYMDVW

SEQ ID NO: 9110 - protein, 17 aa, Homo sapiens
CVKDIGLALQHQTYDYW

SEQ ID NO: 9111 - protein, 17 aa, Homo sapiens
CASPPSPSRGDPWFDPW

SEQ ID NO: 9112 - protein, 17 aa, Homo sapiens
CASWTFGSGKTDASDIW

SEQ ID NO: 9113 - protein, 16 aa, Homo sapiens
CAKGTTVTYYNYMDVW

SEQ ID NO: 9114 - protein, 19 aa, Homo sapiens
CAHSGYGSGTYYTNWFGPW

SEQ ID NO: 9115 - protein, 16 aa, Homo sapiens
CARDTYNWNPGYFDYW

SEQ ID NO: 9116 - protein, 21 aa, Homo sapiens
CARDRAYCTNGVCYPDWFDPW

SEQ ID NO: 9117 - protein, 15 aa, Homo sapiens
CARLGAYSSSPFDYW

SEQ ID NO: 9118 - protein, 20 aa, Homo sapiens
CVRHSRGLYRSSWGAYFQYW

SEQ ID NO: 9119 - protein, 16 aa, Homo sapiens
CARVGFMREYWVFDYW

SEQ ID NO: 9120 - protein, 19 aa, Homo sapiens
CAKDQELLWFGELFSFDYW

SEQ ID NO: 9121 - protein, 16 aa, Homo sapiens
CATLAVAATDHYFDYW

SEQ ID NO: 9122 - protein, 17 aa, Homo sapiens
CARGPAPLTMVRQFDYW

SEQ ID NO: 9123 - protein, 23 aa, Homo sapiens
CAKSPGEGYGSGSYYGTHYFDNW

SEQ ID NO: 9124 - protein, 22 aa, Homo sapiens
CARDSRNRFFDGDHEHILLDYW

SEQ ID NO: 9125 - protein, 16 aa, Homo sapiens
CAKGLSIASADNIDYW

SEQ ID NO: 9126 - protein, 14 aa, Homo sapiens
CGRMLKPYNWFDPW

SEQ ID NO: 9127 - protein, 17 aa, Homo sapiens
CAKDVLPGPVRGPFDPW

SEQ ID NO: 9128 - protein, 17 aa, Homo sapiens
CAHSSYDNSGFYYFDYW

SEQ ID NO: 9129 - protein, 25 aa, Homo sapiens
CARHKFIATRGAWLVGTGGDAFDIW

SEQ ID NO: 9130 - protein, 14 aa, Homo sapiens
CARIPGYSSAQDYW

SEQ ID NO: 9131 - protein, 11 aa, Homo sapiens
CLQHQSYPYTF

SEQ ID NO: 9132 - protein, 16 aa, Homo sapiens
CARVQLVGYYYYMDVW

SEQ ID NO: 9133 - protein, 11 aa, Homo sapiens
CAGYTVHFDYW

SEQ ID NO: 9134 - protein, 21 aa, Homo sapiens
CTRDSGYFASGDFVVRPLDYW

SEQ ID NO: 9135 - protein, 19 aa, Homo sapiens
CTKKDLDYGDHGSGAFDIW

SEQ ID NO: 9136 - protein, 11 aa, Homo sapiens
CQSLGSSGSVF

SEQ ID NO: 9137 - protein, 16 aa, Homo sapiens
CVKEAHRSGYYPLDYW

SEQ ID NO: 9138 - protein, 15 aa, Homo sapiens
CARSTGGNGGPLDYW

SEQ ID NO: 9139 - protein, 16 aa, Homo sapiens
CARDLTSSPTRGFDPW

SEQ ID NO: 9140 - protein, 20 aa, Homo sapiens
CARDGRFCHSPTCTEGFDFW

SEQ ID NO: 9141 - protein, 21 aa, Homo sapiens
CARLEYSSSWPNIYYYYMDVW

SEQ ID NO: 9142 - protein, 19 aa, Homo sapiens
CARAYFDFNGEYPNLFDYW

SEQ ID NO: 9143 - protein, 24 aa, Homo sapiens
CTREAYVDQRGSKKVLITSAFDYW

SEQ ID NO: 9144 - protein, 16 aa, Homo sapiens
CTRDPDITGSDGFDMW

SEQ ID NO: 9145 - protein, 14 aa, Homo sapiens
CARLFYGSGELDYW

SEQ ID NO: 9146 - protein, 15 aa, Homo sapiens
CARRDGTGWFSFDYW

SEQ ID NO: 9147 - protein, 20 aa, Homo sapiens
CARDRPHYYDSSGPTPFDYW

SEQ ID NO: 9148 - protein, 19 aa, Homo sapiens
CASDRGDCSTDGCYALDYW

SEQ ID NO: 9149 - protein, 18 aa, Homo sapiens
CARDWFGHLDPSNYFDYW

SEQ ID NO: 9150 - protein, 21 aa, Homo sapiens
CARPRAYYYYDSSRPFYNDYW

SEQ ID NO: 9151 - protein, 17 aa, Homo sapiens
CAIVEDDYADYRTFDYW

SEQ ID NO: 9152 - protein, 13 aa, Homo sapiens [sequence omitted]

SEQ ID NO: 9153 - protein, 25 aa, Homo sapiens
CARDLPPELDTAMVVFGVDANNDYW

SEQ ID NO: 9154 - protein, 20 aa, Homo sapiens
CANPSLSYCSGNSCYHDDYW

SEQ ID NO: 9155 - protein, 19 aa, Homo sapiens
CAKVSRGYGYGYLGPFDIW

SEQ ID NO: 9156 - protein, 27 aa, Homo sapiens
CARAAYFTDYRETSVSGPDKGYGFDIW

SEQ ID NO: 9157 - protein, 22 aa, Homo sapiens
CVHRPSWYYYDSSGFYPVFAYW

SEQ ID NO: 9158 - protein, 26 aa, Homo sapiens
CARSATPGWFGQLSDIAKYYYYMDVW

SEQ ID NO: 9159 - protein, 14 aa, Homo sapiens
CARVGRGALNFDYW

SEQ ID NO: 9160 - protein, 17 aa, Homo sapiens
CARDWTGVAVVGSFDYW

SEQ ID NO: 9161 - protein, 22 aa, Homo sapiens
CTRGSERFGCSSPSCYAPFDYW

SEQ ID NO: 9162 - protein, 18 aa, Homo sapiens
CASSPASSSWYLSWFDPW

SEQ ID NO: 9163 - protein, 20 aa, Homo sapiens
CARDVVRGITTTTGYYMDVW

SEQ ID NO: 9164 - protein, 14 aa, Homo sapiens
CTRYCGPDCYFDYW

SEQ ID NO: 9165 - protein, 13 aa, Homo sapiens
CTTRSSGWVGDYW

SEQ ID NO: 9166 - protein, 15 aa, Homo sapiens
CGTWDSGLSESYWVF

SEQ ID NO: 9167 - protein, 21 aa, Homo sapiens
CVRAPDYYDSNGDYQYYLDYW

SEQ ID NO: 9168 - protein, 23 aa, Homo sapiens
CARDTCTGGTCYSSLDSIDFDYW

SEQ ID NO: 9169 - protein, 15 aa, Homo sapiens
CARINGELSEAFDVW

SEQ ID NO: 9170 - protein, 17 aa, Homo sapiens
CAKATVAVAGPDSFDFW

SEQ ID NO: 9171 - protein, 23 aa, Homo sapiens
CARDTDKSYYGSGSPDQDAFDFW

SEQ ID NO: 9172 - protein, 23 aa, Homo sapiens
CARVGLDYYQSSGYYYNDVFDFW

SEQ ID NO: 9173 - protein, 17 aa, Homo sapiens
CARGGKTVAHAYYFHSW

SEQ ID NO: 9174 - protein, 17 aa, Homo sapiens
CARDDGGYTYTTGFDYW

SEQ ID NO: 9175 - protein, 13 aa, Homo sapiens
CARHNHELNYDYW

SEQ ID NO: 9176 - protein, 12 aa, Homo sapiens
CTGTNCYHFDSW

SEQ ID NO: 9177 - protein, 16 aa, Homo sapiens
CARDSRWLQSRAFDIW

SEQ ID NO: 9178 - protein, 16 aa, Homo sapiens
CARRMFGSSSRWLDPW

SEQ ID NO: 9179 - protein, 21 aa, Homo sapiens
CARVGREPPSIDSFYFYMDVW

SEQ ID NO: 9180 - protein, 25 aa, Homo sapiens
CAKVPGFFVVVVADGRPPSNWFDPW

SEQ ID NO: 9181 - protein, 22 aa, Homo sapiens
CVTATEGRDYGGNYYDYYFDNW

SEQ ID NO: 9182 - protein, 22 aa, Homo sapiens
CATPGALGFRDGIGAQDAFDIW

SEQ ID NO: 9183 - protein, 16 aa, Homo sapiens
CVRDATLRYFDFFDNW

SEQ ID NO: 9184 - protein, 16 aa, Homo sapiens
CARDTVTRREDWFDPW

SEQ ID NO: 9185 - protein, 24 aa, Homo sapiens
CAKDKNHYDIMTGFYNHFYYMDVW

SEQ ID NO: 9186 - protein, 17 aa, Homo sapiens
CARDSDTSSHLSQYDYW

SEQ ID NO: 9187 - protein, 10 aa, Homo sapiens [sequence omitted]

SEQ ID NO: 9188 - protein, 23 aa, Homo sapiens
CARDARSWRVVVATEFLFWFEYW

SEQ ID NO: 9189 - protein, 25 aa, Homo sapiens
CARDLHSLSNILIRGGVVFDAFDLW

SEQ ID NO: 9190 - protein, 21 aa, Homo sapiens
CAKGGDVTWDYNILTAKFDLW

SEQ ID NO: 9191 - protein, 17 aa, Homo sapiens
CARIRYTYGYLYYFDYW

SEQ ID NO: 9192 - protein, 23 aa, Homo sapiens
CARAQTSSSWAPYYYYYYYMDVW

SEQ ID NO: 9193 - protein, 17 aa, Homo sapiens
CARDCTYCNDEGGFDYW

SEQ ID NO: 9194 - protein, 23 aa, Homo sapiens
CARGPHSLHYYDSSGYQILFDYW

SEQ ID NO: 9195 - protein, 17 aa, Homo sapiens
CARLVLDDSSPYSLDYW

SEQ ID NO: 9196 - protein, 24 aa, Homo sapiens
CARLPPECSSTSCYPWYYYYMDVW

SEQ ID NO: 9197 - protein, 15 aa, Homo sapiens
CARGGTTPTSSFDSW

SEQ ID NO: 9198 - protein, 19 aa, Homo sapiens
CATDYCSDGCLFAEYFQHW

SEQ ID NO: 9199 - protein, 21 aa, Homo sapiens
CVKDKGYYYDSIGSWDYFDYW

SEQ ID NO: 9200 - protein, 13 aa, Homo sapiens
CLRQSYSSGEDYW

SEQ ID NO: 9201 - protein, 16 aa, Homo sapiens
CARMPSSGYESPVDYW

SEQ ID NO: 9202 - protein, 12 aa, Homo sapiens
CAIIPLGYFDHW

SEQ ID NO: 9203 - protein, 10 aa, Homo sapiens
CRGSGTHDYW

SEQ ID NO: 9204 - protein, 13 aa, Homo sapiens
CAGGGGEGYFDYW

SEQ ID NO: 9205 - protein, 21 aa, Homo sapiens
CARVMSFYYDSSGFQRWFDPW

SEQ ID NO: 9206 - protein, 18 aa, Homo sapiens
CARWDYCYTSSCYSFDYW

SEQ ID NO: 9207 - protein, 17 aa, Homo sapiens
CARLCLHSSGWFPDDYW

SEQ ID NO: 9208 - protein, 24 aa, Homo sapiens
CAKHSSDYYFGSVTFGGYNFFDPW

SEQ ID NO: 9209 - protein, 19 aa, Homo sapiens
CAKDQCSTADCSDARFDYW

SEQ ID NO: 9210 - protein, 22 aa, Homo sapiens
CARSLRDTVVVEDASAFYFDYW

SEQ ID NO: 9211 - protein, 21 aa, Homo sapiens
CTTVLSLYGELYYYYYYMDVW

SEQ ID NO: 9212 - protein, 19 aa, Homo sapiens
CARVSIGSAYFYYYYMDVW

SEQ ID NO: 9213 - protein, 15 aa, Homo sapiens
CARPAGGDCCNFDYW

SEQ ID NO: 9214 - protein, 13 aa, Homo sapiens
CARVSEHAAFDIW

SEQ ID NO: 9215 - protein, 18 aa, Homo sapiens
CAKKYYHSPGYPYYFDYW

SEQ ID NO: 9216 - protein, 19 aa, Homo sapiens
CATLGDMTTVTTVFGFDHW

SEQ ID NO: 9217 - protein, 24 aa, Homo sapiens
CATQLQTRITIFGVVILHNWFDPW

SEQ ID NO: 9218 - protein, 18 aa, Homo sapiens
CAAGGPGSGSRTFGFDPW

SEQ ID NO: 9219 - protein, 18 aa, Homo sapiens
CARPILYYDSTGYFVDYW

SEQ ID NO: 9220 - protein, 22 aa, Homo sapiens
CAKDHHPDSRTTYYSYYYMDVW

SEQ ID NO: 9221 - protein, 18 aa, Homo sapiens
CAKVSLKTNSGYYFFDSW

SEQ ID NO: 9222 - protein, 19 aa, Homo sapiens
CARDPLSSRDDFQPYFDYW

SEQ ID NO: 9223 - protein, 15 aa, Homo sapiens
CAHLGGSPGSFFDYW

SEQ ID NO: 9224 - protein, 14 aa, Homo sapiens
CARDTADSVRLDYW

SEQ ID NO: 9225 - protein, 13 aa, Homo sapiens
CARVRQVNWFDLW

SEQ ID NO: 9226 - protein, 22 aa, Homo sapiens
CARARFEGYDSSGYTHWYFDLW

SEQ ID NO: 9227 - protein, 13 aa, Homo sapiens
CQYLNSYPLMYTF

SEQ ID NO: 9228 - protein, 17 aa, Homo sapiens
CARPIVGAITDDAFDFW

SEQ ID NO: 9229 - protein, 14 aa, Homo sapiens
CMRDRGGRSGCDYW

SEQ ID NO: 9230 - protein, 18 aa, Homo sapiens
CARLHDYVWGSYRSHDYW

SEQ ID NO: 9231 - protein, 20 aa, Homo sapiens
CASLYKKNDLLFQDDSFDVW

SEQ ID NO: 9232 - protein, 19 aa, Homo sapiens
CARERGGGILTGYRWFDPW

SEQ ID NO: 9233 - protein, 16 aa, Homo sapiens
CVRPRRPKIIYHFDLW

SEQ ID NO: 9234 - protein, 19 aa, Homo sapiens
CARDIGSGPYTPQYYFDYW

SEQ ID NO: 9235 - protein, 23 aa, Homo sapiens
CARDKLLSRVVVIVADKNWFDPW

SEQ ID NO: 9236 - protein, 18 aa, Homo sapiens
CAKEGPPIFGTTPAFDYW

SEQ ID NO: 9237 - protein, 26 aa, Homo sapiens
CAKYPRSYWYDSSGSSFFYYYYMDVW

SEQ ID NO: 9238 - protein, 21 aa, Homo sapiens
CARDGRRNSGWFDYYYYMDVW

SEQ ID NO: 9239 - protein, 16 aa, Homo sapiens
CQQYNNWPPRKNKCQF

SEQ ID NO: 9240 - protein, 22 aa, Homo sapiens
CAKDIKVGPYNSPGGGDAFDIW

SEQ ID NO: 9241 - protein, 17 aa, Homo sapiens
CATVLFEVGAMPAFDYW

SEQ ID NO: 9242 - protein, 17 aa, Homo sapiens
CARATRYCGGDCYPDYW

SEQ ID NO: 9243 - protein, 12 aa, Homo sapiens
CLRDETANLDYW

SEQ ID NO: 9244 - protein, 15 aa, Homo sapiens
CATYSADEGLSFDPW

SEQ ID NO: 9245 - protein, 21 aa, Homo sapiens
CAKGAALGSCTGSNCYHFDCW

SEQ ID NO: 9246 - protein, 16 aa, Homo sapiens
CARDGHLSSYFYFDLW

SEQ ID NO: 9247 - protein, 16 aa, Homo sapiens
CARHGGWFLGYEFDNW

SEQ ID NO: 9248 - protein, 15 aa, Homo sapiens
CARGRWQWISPFDYW

SEQ ID NO: 9249 - protein, 16 aa, Homo sapiens
CAKGKGPGTVDWFDPW

SEQ ID NO: 9250 - protein, 21 aa, Homo sapiens
CARDIYLEYSNSRYFYYLDVW

SEQ ID NO: 9251 - protein, 21 aa, Homo sapiens
CARDEGWGSSTGWYSWYFDLW

SEQ ID NO: 9252 - protein, 26 aa, Homo sapiens
CARDPTRPYYDILTGYYRDSDAFDIW

SEQ ID NO: 9253 - protein, 19 aa, Homo sapiens
CARIKILAYYDSADAFDIW

SEQ ID NO: 9254 - protein, 26 aa, Homo sapiens
CAHRKDLDQQFYIQSGYYYNNFFDFW

SEQ ID NO: 9255 - protein, 22 aa, Homo sapiens
CARDRAEYCSGADCYSDAFDIW

SEQ ID NO: 9256 - protein, 18 aa, Homo sapiens
CARKKHRDQTGGDAFDIW

SEQ ID NO: 9257 - protein, 21 aa, Homo sapiens
CARGTTYCTGGWCSRGYFDSW

SEQ ID NO: 9258 - protein, 13 aa, Homo sapiens
CARLDGYNLGDYW

SEQ ID NO: 9259 - protein, 19 aa, Homo sapiens
CAKDYGPSAAADPYYFDYW

SEQ ID NO: 9260 - protein, 17 aa, Homo sapiens
CARGDAGSTWYTAIDYW

SEQ ID NO: 9261 - protein, 24 aa, Homo sapiens
CARGGVATTIFGVVIIDPDAFDIW

SEQ ID NO: 9262 - protein, 15 aa, Homo sapiens
CTRILYGTGPPGDYW

SEQ ID NO: 9263 - protein, 14 aa, Homo sapiens
CQSADISGSFPVIF

SEQ ID NO: 9264 - protein, 21 aa, Homo sapiens
CAKDFVYYYDSSKDNHAFDIW

SEQ ID NO: 9265 - protein, 23 aa, Homo sapiens
CARDLYYYDSRGYPHSLDAFNMW

SEQ ID NO: 9266 - protein, 23 aa, Homo sapiens
CATVYCSGGSCYSARVQYYFDHW

SEQ ID NO: 9267 - protein, 19 aa, Homo sapiens
CARTLYYHLDSSGYPFDLW

SEQ ID NO: 9268 - protein, 15 aa, Homo sapiens
CARHWYGSSSPPDYW

SEQ ID NO: 9269 - protein, 22 aa, Homo sapiens
CARDLDFYYDSSGYYPYYFDYW

SEQ ID NO: 9270 - protein, 20 aa, Homo sapiens
CAKATFYYGSGTWGDTFDAW

SEQ ID NO: 9271 - protein, 18 aa, Homo sapiens
CGRDKFGRGSGYYFFDYW

SEQ ID NO: 9272 - protein, 13 aa, Homo sapiens [sequence omitted]

SEQ ID NO: 9273 - protein, 18 aa, Homo sapiens
CARASYNSGWFYWYFDLW

SEQ ID NO: 9274 - protein, 20 aa, Homo sapiens
CARDIGPYSNYAHRGTFDYW

SEQ ID NO: 9275 - protein, 17 aa, Homo sapiens
CARGPSSIAAFRAFDIW

SEQ ID NO: 9276 - protein, 12 aa, Homo sapiens
CQQTNNFPSISF

SEQ ID NO: 9277 - protein, 25 aa, Homo sapiens
CARDPRPPWDSSGYETTYYYYMDVW

SEQ ID NO: 9278 - protein, 17 aa, Homo sapiens
CARINDIVIGYENFDPW

SEQ ID NO: 9279 - protein, 21 aa, Homo sapiens
CTREAYVGQRERVITSAFDYW

SEQ ID NO: 9280 - protein, 22 aa, Homo sapiens
CARGGREGYNFWVGTHSYFDYW

SEQ ID NO: 9281 - protein, 18 aa, Homo sapiens
CARHEKWEQLKGNWFAPW

SEQ ID NO: 9282 - protein, 14 aa, Homo sapiens
CAKDQAYQSAFDFW

SEQ ID NO: 9283 - protein, 17 aa, Homo sapiens
CTRDQAYYDSSGYLDYW

SEQ ID NO: 9284 - protein, 13 aa, Homo sapiens
CAHMFSLDYFDSW

SEQ ID NO: 9285 - protein, 17 aa, Homo sapiens
CAKDRDGTGWFEGIDYW

SEQ ID NO: 9286 - protein, 18 aa, Homo sapiens
CARDYYDSGGNYYPFDFW

SEQ ID NO: 9287 - protein, 15 aa, Homo sapiens
CVKDWNSSGSYFQHW

SEQ ID NO: 9288 - protein, 16 aa, Homo sapiens
CARLSYYGSGRYFDYW

SEQ ID NO: 9289 - protein, 26 aa, Homo sapiens
CARDGHRSPDIVVVPAGYIAGYFDYW

SEQ ID NO: 9290 - protein, 13 aa, Homo sapiens
CARRLIPGPFDIW

SEQ ID NO: 9291 - protein, 18 aa, Homo sapiens
CARDRAYQLLPGGWFDPW

SEQ ID NO: 9292 - protein, 14 aa, Homo sapiens
CAKDRLSASWFDHW

SEQ ID NO: 9293 - protein, 17 aa, Homo sapiens
CATEEGSIWYKFYFNYW

SEQ ID NO: 9294 - protein, 17 aa, Homo sapiens
CARVKFNWNDASAFDIW

SEQ ID NO: 9295 - protein, 11 aa, Homo sapiens
CMQTMQLPWGF

SEQ ID NO: 9296 - protein, 17 aa, Homo sapiens
CARELGREGNAGYFDLW

SEQ ID NO: 9297 - protein, 18 aa, Homo sapiens
CVRDAGADSGYDPPLDYW

SEQ ID NO: 9298 - protein, 18 aa, Homo sapiens
CARHGGTYGAGLFYFDYW

SEQ ID NO: 9299 - protein, 19 aa, Homo sapiens
CQSYDSSLSDSTVSGPGVF

SEQ ID NO: 9300 - protein, 19 aa, Homo sapiens
CARESGLKQWVQRLYFDYW

SEQ ID NO: 9301 - protein, 19 aa, Homo sapiens
CARDRYSSGWSSGWYFDLW

SEQ ID NO: 9302 - protein, 18 aa, Homo sapiens
CARTNWNYVDYYYYMDVW

SEQ ID NO: 9303 - protein, 15 aa, Homo sapiens
CAKDLYTNLHYMDVW

SEQ ID NO: 9304 - protein, 16 aa, Homo sapiens
CARHGPVTSYWYFDLW

SEQ ID NO: 9305 - protein, 18 aa, Homo sapiens
CTRDFPPRAYMVYYMDVW

SEQ ID NO: 9306 - protein, 21 aa, Homo sapiens
CAKGLFAHFGSGYYRDFFDYW

SEQ ID NO: 9307 - protein, 19 aa, Homo sapiens
CASGPAAAHYSYYYYMDVW

SEQ ID NO: 9308 - protein, 17 aa, Homo sapiens
CAITMVRGVLLYYFDYW

SEQ ID NO: 9309 - protein, 23 aa, Homo sapiens
CATSTKKGDYNFWSGYQSHLDYW

SEQ ID NO: 9310 - protein, 15 aa, Homo sapiens
CVREEYSGNDGPDYW

SEQ ID NO: 9311 - protein, 17 aa, Homo sapiens
CTKASYSITWYVWFDPW

SEQ ID NO: 9312 - protein, 22 aa, Homo sapiens
CARESVLTGKHSYFYYYYIDVW

SEQ ID NO: 9313 - protein, 11 aa, Homo sapiens
CASYGDYPDFW

SEQ ID NO: 9314 - protein, 16 aa, Homo sapiens
CVKEQVRGSYLAFDIW

SEQ ID NO: 9315 - protein, 16 aa, Homo sapiens
CARGREGTRVTTIDYW

SEQ ID NO: 9316 - protein, 22 aa, Homo sapiens
CARDRLYDLLTGYPRGDASDIW

SEQ ID NO: 9317 - protein, 15 aa, Homo sapiens
CARGYYDLSAGFDYW

SEQ ID NO: 9318 - protein, 17 aa, Homo sapiens
CARDNRVYTHGSDFDYW

SEQ ID NO: 9319 - protein, 19 aa, Homo sapiens
CAKDGQWELNYYYYYMDVW

SEQ ID NO: 9320 - protein, 13 aa, Homo sapiens
CARPDFFDGVDIW

SEQ ID NO: 9321 - protein, 13 aa, Homo sapiens
CTRDWWRFFFDFW

SEQ ID NO: 9322 - protein, 17 aa, Homo sapiens
CAKDTTVAGAKGSFDGW

SEQ ID NO: 9323 - protein, 20 aa, Homo sapiens
CASPDCRWTLCYGDVGPDYW

SEQ ID NO: 9324 - protein, 11 aa, Homo sapiens
CARKRMEFDYW

SEQ ID NO: 9325 - protein, 20 aa, Homo sapiens
CARSVGYCADGSCQPTFDYW

SEQ ID NO: 9326 - protein, 13 aa, Homo sapiens
CATSRPDYPFDNW

SEQ ID NO: 9327 - protein, 18 aa, Homo sapiens
CARDYYDSSGPYWYFDLW

SEQ ID NO: 9328 - protein, 20 aa, Homo sapiens
CARQGLVVVAPGDHRWFDPW

SEQ ID NO: 9329 - protein, 18 aa, Homo sapiens
CAIGNIHSSHYYGWLDPW

SEQ ID NO: 9330 - protein, 14 aa, Homo sapiens
CARKYYSEGPFDLW

SEQ ID NO: 9331 - protein, 17 aa, Homo sapiens
CARDWAGPEGRGWFDPW

SEQ ID NO: 9332 - protein, 20 aa, Homo sapiens
CASGHENCSAGSCYCSFDDW

SEQ ID NO: 9333 - protein, 14 aa, Homo sapiens
CVRGSSDWAGTDYW

SEQ ID NO: 9334 - protein, 22 aa, Homo sapiens
CAKRRLWFGELVPISKGGFDYW

SEQ ID NO: 9335 - protein, 23 aa, Homo sapiens
CARLGYSSSWHPSSYYYYYMDVW

SEQ ID NO: 9336 - protein, 18 aa, Homo sapiens
CARTTPSEFGNWPLFDYW

SEQ ID NO: 9337 - protein, 22 aa, Homo sapiens
CTTDRGYYDSSGYYYTYYFDYW

SEQ ID NO: 9338 - protein, 11 aa, Homo sapiens
CRQLNHYPHTF

SEQ ID NO: 9339 - protein, 18 aa, Homo sapiens
CARGTYGSANFYAGFDYW

SEQ ID NO: 9340 - protein, 14 aa, Homo sapiens
CAAWDNSLSGRGLF

SEQ ID NO: 9341 - protein, 22 aa, Homo sapiens
CARDRGYFDSSGYTQGYYFDYW

SEQ ID NO: 9342 - protein, 23 aa, Homo sapiens
CARHPDYDSSGPITGYYYYIDVW

SEQ ID NO: 9343 - protein, 18 aa, Homo sapiens
CARTNGYTSSWNDAFDIW

SEQ ID NO: 9344 - protein, 13 aa, Homo sapiens
CQQLDGYPPMLIF

SEQ ID NO: 9345 - protein, 13 aa, Homo sapiens
CVTLAAAGTSDYW

SEQ ID NO: 9346 - protein, 20 aa, Homo sapiens
CAHRRHYYDSSGRYYYFDYW

SEQ ID NO: 9347 - protein, 18 aa, Homo sapiens
CAKDMGTQPFNSGRFDSW

SEQ ID NO: 9348 - protein, 16 aa, Homo sapiens
CARGDYGSGTYPFKYW

SEQ ID NO: 9349 - protein, 19 aa, Homo sapiens
CVREGGVYSSDSSGRFDYW

SEQ ID NO: 9350 - protein, 16 aa, Homo sapiens
CVKEHTGTYNGAFDIW

SEQ ID NO: 9351 - protein, 15 aa, Homo sapiens
CARYHYDSSGHFDYW

SEQ ID NO: 9352 - protein, 16 aa, Homo sapiens
CARGGYKYGTGWFDPW

SEQ ID NO: 9353 - protein, 13 aa, Homo sapiens
CGRSNWDYDFDPW

SEQ ID NO: 9354 - protein, 18 aa, Homo sapiens
CARDSASSLYRDNYIDYW

SEQ ID NO: 9355 - protein, 21 aa, Homo sapiens
CARSPPTGWVVTAIPYYFDYW

SEQ ID NO: 9356 - protein, 23 aa, Homo sapiens
CARDPPYYDILTGYSTTYYFDYW

SEQ ID NO: 9357 - protein, 16 aa, Homo sapiens
CARTPNSFGSVNFDYW

SEQ ID NO: 9358 - protein, 23 aa, Homo sapiens
CAATKASLYDLLTGYYSGYFDSW

SEQ ID NO: 9359 - protein, 18 aa, Homo sapiens
CAKDLRSGTYQMYYFDYW

SEQ ID NO: 9360 - protein, 15 aa, Homo sapiens
CAKGVDIVVATLDYW

SEQ ID NO: 9361 - protein, 23 aa, Homo sapiens
CARDSEPPAAAGIYADFNWFDPW

SEQ ID NO: 9362 - protein, 19 aa, Homo sapiens
CAKDSHSGYDVYFYYMDVW

SEQ ID NO: 9363 - protein, 17 aa, Homo sapiens
CARGDGDYVYPGVFDIW

SEQ ID NO: 9364 - protein, 21 aa, Homo sapiens
CARDSARFLEWSRPYYYMDVW

SEQ ID NO: 9365 - protein, 25 aa, Homo sapiens
CARERGTAVSGTDAITLPLYAFDMW

SEQ ID NO: 9366 - protein, 14 aa, Homo sapiens
CARQKGALWYFDLW

SEQ ID NO: 9367 - protein, 13 aa, Homo sapiens
CSSSSCYAPFDFW

SEQ ID NO: 9368 - protein, 22 aa, Homo sapiens
CVKNVGTGWARDNYYYYYLDLW

SEQ ID NO: 9369 - protein, 21 aa, Homo sapiens
CARGPHYYYYGGYYHPNFDYW

SEQ ID NO: 9370 - protein, 17 aa, Homo sapiens
CAKGRAAMVIDDAFDIW

SEQ ID NO: 9371 - protein, 17 aa, Homo sapiens
CVRVDWPYYYYYYMDVW

SEQ ID NO: 9372 - protein, 17 aa, Homo sapiens
CVRGSDLFSTDWYFDLW

SEQ ID NO: 9373 - protein, 21 aa, Homo sapiens
CTTNRYSSAMDHSYYYYMDIW

SEQ ID NO: 9374 - protein, 14 aa, Homo sapiens
CASDGGSGWDFDYW

SEQ ID NO: 9375 - protein, 13 aa, Homo sapiens
CAKRDGHGDFDYW

SEQ ID NO: 9376 - protein, 15 aa, Homo sapiens
CARAGRYGGYYMDVW

SEQ ID NO: 9377 - protein, 18 aa, Homo sapiens
CARVGKLMIYTTDAFDVW

SEQ ID NO: 9378 - protein, 20 aa, Homo sapiens
CARRPHYYDTSGTAWYFDFW

SEQ ID NO: 9379 - protein, 18 aa, Homo sapiens
CARDCDSCYGDSDAFDIW

SEQ ID NO: 9380 - protein, 13 aa, Homo sapiens
CAKDGKGFLSDYW

SEQ ID NO: 9381 - protein, 14 aa, Homo sapiens
CARQRLRVSKPDYW

SEQ ID NO: 9382 - protein, 16 aa, Homo sapiens
CTTVDNFDWLFRVDYW

SEQ ID NO: 9383 - protein, 15 aa, Homo sapiens
CARGPYNYGTYFDNW

SEQ ID NO: 9384 - protein, 15 aa, Homo sapiens
CARHQVIYYYYMDVW

SEQ ID NO: 9385 - protein, 14 aa, Homo sapiens
CARSYYYGSETDYW

SEQ ID NO: 9386 - protein, 20 aa, Homo sapiens
CARDHRENMVRGLMRWFDPW

SEQ ID NO: 9387 - protein, 21 aa, Homo sapiens
CAKDIEGGDGYNYYPDAFDIW

SEQ ID NO: 9388 - protein, 16 aa, Homo sapiens
CARTISSYREHYFDYW

SEQ ID NO: 9389 - protein, 21 aa, Homo sapiens
CARHYGRRYCGGGRCPNFDYW

SEQ ID NO: 9390 - protein, 23 aa, Homo sapiens
CARDKFFDGSGYRYNGFDAFDVW

SEQ ID NO: 9391 - protein, 14 aa, Homo sapiens
CLSADSSGSYPFVF

SEQ ID NO: 9392 - protein, 20 aa, Homo sapiens
CARGGGIVRYYYDSNGFDYW

SEQ ID NO: 9393 - protein, 16 aa, Homo sapiens
CTTDGLITGTTAHDYW

SEQ ID NO: 9394 - protein, 13 aa, Homo sapiens
CVRDQWLAPFDYW

SEQ ID NO: 9395 - protein, 18 aa, Homo sapiens
CAKSLYFDWAQGGTFDYW

SEQ ID NO: 9396 - protein, 13 aa, Homo sapiens
CARAGGAEAFNIW

SEQ ID NO: 9397 - protein, 16 aa, Homo sapiens
CIKDVQGITFDAFEVW

SEQ ID NO: 9398 - protein, 22 aa, Homo sapiens
CARGGITVVREMNLRYYYLDVW

SEQ ID NO: 9399 - protein, 21 aa, Homo sapiens
CARDLDGITGTTSGDWYFDLW

SEQ ID NO: 9400 - protein, 19 aa, Homo sapiens
CARDTGRDPLYYYYYMDVW

SEQ ID NO: 9401 - protein, 13 aa, Homo sapiens
CQEYGYSPHSVTF

SEQ ID NO: 9402 - protein, 24 aa, Homo sapiens
CAKDNFDILTNIYPTQYYYYMDVW

SEQ ID NO: 9403 - protein, 22 aa, Homo sapiens
CATEGEDRCSGSSCYSGWLDSW

SEQ ID NO: 9404 - protein, 11 aa, Homo sapiens
CQQNANLPPAF

SEQ ID NO: 9405 - protein, 20 aa, Homo sapiens
CARHGTYASSGYYFGYFDYW

SEQ ID NO: 9406 - protein, 18 aa, Homo sapiens
CARSFGSSGSFYYYMDVW

SEQ ID NO: 9407 - protein, 14 aa, Homo sapiens
CQSYDSSLNVYMIF

SEQ ID NO: 9408 - protein, 21 aa, Homo sapiens
CAREGRITIFGVVTTYYFDYW

SEQ ID NO: 9409 - protein, 21 aa, Homo sapiens
CANSIRGKDNGDNEYRDFDYW

SEQ ID NO: 9410 - protein, 23 aa, Homo sapiens
CARVGHEYESGGSRFSTFYFDSW

SEQ ID NO: 9411 - protein, 19 aa, Homo sapiens
CSRQECTSTSCAAFNFDYW

SEQ ID NO: 9412 - protein, 13 aa, Homo sapiens
CARVEMAPIKDYW

SEQ ID NO: 9413 - protein, 15 aa, Homo sapiens
CARGNLGVADLGDYW

SEQ ID NO: 9414 - protein, 14 aa, Homo sapiens
CLQYNNWPPSLSTF

SEQ ID NO: 9415 - protein, 17 aa, Homo sapiens
CARLAPQFLGGYYFDYW

SEQ ID NO: 9416 - protein, 21 aa, Homo sapiens
CASLDYYDSSHHFDGRWFDPW

SEQ ID NO: 9417 - protein, 17 aa, Homo sapiens
CARITWYGSGERAFDIW

SEQ ID NO: 9418 - protein, 18 aa, Homo sapiens
CAKTPRENANPYWYFDLW

SEQ ID NO: 9419 - protein, 14 aa, Homo sapiens [sequence omitted]

SEQ ID NO: 9420 - protein, 16 aa, Homo sapiens
CARSGGHLPPTEFDPW

SEQ ID NO: 9421 - protein, 18 aa, Homo sapiens
CARTAAWGGDSPWYFDFW

SEQ ID NO: 9422 - protein, 20 aa, Homo sapiens
CAKGNHDTSGYYHWLYFDYW

SEQ ID NO: 9423 - protein, 20 aa, Homo sapiens
CVRDSLPAVSVSGTYYFDYW

SEQ ID NO: 9424 - protein, 17 aa, Homo sapiens
CARDRSGYSYGYRFDYW

SEQ ID NO: 9425 - protein, 16 aa, Homo sapiens
CARIRTTDYSDCFDFW

SEQ ID NO: 9426 - protein, 20 aa, Homo sapiens
CANSIRGKEDSGDYADFDYW

SEQ ID NO: 9427 - protein, 21 aa, Homo sapiens
CATDRYYFDILTGYENWFDPW

SEQ ID NO: 9428 - protein, 22 aa, Homo sapiens
CARLGIITVFGVLTVPNWFDPW

SEQ ID NO: 9429 - protein, 21 aa, Homo sapiens
CARDSSYYDILGPQSYYFDYW

SEQ ID NO: 9430 - protein, 12 aa, Homo sapiens
CQQRTTWPRLAF

SEQ ID NO: 9431 - protein, 27 aa, Homo sapiens
CARGTGDVAVEMSVERFVTIRNWFDPW

SEQ ID NO: 9432 - protein, 20 aa, Homo sapiens
CARGEYTNTMSQRVNWFDPW

SEQ ID NO: 9433 - protein, 17 aa, Homo sapiens
CARDLCSGGSCYNIDYW

SEQ ID NO: 9434 - protein, 19 aa, Homo sapiens
CARALLWDRITAASYLDYW

SEQ ID NO: 9435 - protein, 26 aa, Homo sapiens
CARLPSDYDILGGYSSFRYGFYFDSW

SEQ ID NO: 9436 - protein, 14 aa, Homo sapiens
CARYPGTSGIMDYW

SEQ ID NO: 9437 - protein, 19 aa, Homo sapiens
CARCGDVVVSAIDQPFDFW

SEQ ID NO: 9438 - protein, 20 aa, Homo sapiens
CARVPACSGPGCYIWYFGLW

SEQ ID NO: 9439 - protein, 16 aa, Homo sapiens
CAKDRAAYSSREVDYW

SEQ ID NO: 9440 - protein, 16 aa, Homo sapiens
CATSRAHYYLDSFDVW

SEQ ID NO: 9441 - protein, 15 aa, Homo sapiens
CAKGVIQGVTGFDIW

SEQ ID NO: 9442 - protein, 11 aa, Homo sapiens
CHQFKSYPHSF

SEQ ID NO: 9443 - protein, 14 aa, Homo sapiens
CARGTSSSAFYDYW

SEQ ID NO: 9444 - protein, 15 aa, Homo sapiens
CATDTSGYSEYFLHW

SEQ ID NO: 9445 - protein, 20 aa, Homo sapiens
CARAGITVAGASVGFIFDYW

SEQ ID NO: 9446 - protein, 18 aa, Homo sapiens
CARDFPLGAARPGYMDVW

SEQ ID NO: 9447 - protein, 16 aa, Homo sapiens
CAKSGGGGYFYYFDSW

SEQ ID NO: 9448 - protein, 17 aa, Homo sapiens
CARGVSRGGVGATTDYW

SEQ ID NO: 9449 - protein, 17 aa, Homo sapiens
CTTYKYGDIFHDYFDYW

SEQ ID NO: 9450 - protein, 14 aa, Homo sapiens
CARDGYQVRGLDYW

SEQ ID NO: 9451 - protein, 19 aa, Homo sapiens
CARPGRAPSRPHYYYMDVW

SEQ ID NO: 9452 - protein, 22 aa, Homo sapiens
CAREGEQHLVVSDASAYFFDYW

SEQ ID NO: 9453 - protein, 13 aa, Homo sapiens
CQQYNRDSHSITF

SEQ ID NO: 9454 - protein, 16 aa, Homo sapiens
CARADNHGYFDAFDIW

SEQ ID NO: 9455 - protein, 17 aa, Homo sapiens
CAIPPPGGYDFDAFNIW

SEQ ID NO: 9456 - protein, 11 aa, Homo sapiens
CATLGYYYAYW

SEQ ID NO: 9457 - protein, 15 aa, Homo sapiens
CARHYGDSVNWFDPW

SEQ ID NO: 9458 - protein, 18 aa, Homo sapiens
CARDLGRDGYNSGSFDYW

SEQ ID NO: 9459 - protein, 14 aa, Homo sapiens
CAKDLPYSSGADYW

SEQ ID NO: 9460 - protein, 11 aa, Homo sapiens
CHQYNSHSYTF

SEQ ID NO: 9461 - protein, 20 aa, Homo sapiens
CAKEGIPYTIATKRGYMDVW

SEQ ID NO: 9462 - protein, 23 aa, Homo sapiens
CARLAGRRMIVVVITGSYYFDYW

SEQ ID NO: 9463 - protein, 19 aa, Homo sapiens
CARDHSNSDFKRSWGFDYW

SEQ ID NO: 9464 - protein, 18 aa, Homo sapiens
CAKDESTYLTGYSYFDYW

SEQ ID NO: 9465 - protein, 15 aa, Homo sapiens
CAKDQGLSWYFFDFW

SEQ ID NO: 9466 - protein, 15 aa, Homo sapiens
CTTSYVVGADYFDYW

SEQ ID NO: 9467 - protein, 20 aa, Homo sapiens
CARDRVPFRDHYESSDIDYW

SEQ ID NO: 9468 - protein, 19 aa, Homo sapiens
CAKFGTTMTVQHYNSFDPW

SEQ ID NO: 9469 - protein, 15 aa, Homo sapiens
CARDRSSSWSTFHYW

SEQ ID NO: 9470 - protein, 18 aa, Homo sapiens
CAREVPHGVGSYEVFDMW

SEQ ID NO: 9471 - protein, 17 aa, Homo sapiens
CAKAAEVAVDLNWFDRW

SEQ ID NO: 9472 - protein, 16 aa, Homo sapiens
CARQKNAVVRGLLDYW

SEQ ID NO: 9473 - protein, 23 aa, Homo sapiens
CARLSGTPFFGVNAVRYWFFDLW

SEQ ID NO: 9474 - protein, 21 aa, Homo sapiens
CARDLKSYNNGWYTADYMDVW

SEQ ID NO: 9475 - protein, 18 aa, Homo sapiens
CATGRLGELSYGIYFASW

SEQ ID NO: 9476 - protein, 19 aa, Homo sapiens
CARHYCSSSACRGNWFDPW

SEQ ID NO: 9477 - protein, 18 aa, Homo sapiens
CARVQRYKSEEYNWFDPW

SEQ ID NO: 9478 - protein, 20 aa, Homo sapiens
CARRLEFRSDSSGPYFFDLW

SEQ ID NO: 9479 - protein, 13 aa, Homo sapiens
CQQFNSYREVVLF

SEQ ID NO: 9480 - protein, 16 aa, Homo sapiens
CVRGGFQYGANSFDLW

SEQ ID NO: 9481 - protein, 16 aa, Homo sapiens
CASDNSFMAEYYFDYW

SEQ ID NO: 9482 - protein, 19 aa, Homo sapiens
CARVSAQRSSWYIGSLDYW

SEQ ID NO: 9483 - protein, 14 aa, Homo sapiens
CARESSGWSNFDYW

SEQ ID NO: 9484 - protein, 19 aa, Homo sapiens
CVRHRYSATTTYSDPFDSW

SEQ ID NO: 9485 - protein, 14 aa, Homo sapiens
CARIDSRGEAFDVW

SEQ ID NO: 9486 - protein, 22 aa, Homo sapiens
CARHRRSITMVREYRLYYFDYW

SEQ ID NO: 9487 - protein, 19 aa, Homo sapiens
CATDRILLVPVAYDAFDVW

SEQ ID NO: 9488 - protein, 19 aa, Homo sapiens
CARYKKETRDGSGRTFDYW

SEQ ID NO: 9489 - protein, 16 aa, Homo sapiens
CARGQDGTILTGPDYW

SEQ ID NO: 9490 - protein, 14 aa, Homo sapiens
CARESGYNRYFENW

SEQ ID NO: 9491 - protein, 13 aa, Homo sapiens
CARRRWDLLFDYW

SEQ ID NO: 9492 - protein, 25 aa, Homo sapiens
CARGVEGLGELSPSYREYYYYMDVW

SEQ ID NO: 9493 - protein, 14 aa, Homo sapiens
CATLWFGEFPFDFW

SEQ ID NO: 9494 - protein, 16 aa, Homo sapiens
CVRGTSAYYYYYMDVW

SEQ ID NO: 9495 - protein, 17 aa, Homo sapiens
CAKATRTTWYGDVFDLW

SEQ ID NO: 9496 - protein, 18 aa, Homo sapiens
CAKRDTSILGVARGFDPW

SEQ ID NO: 9497 - protein, 16 aa, Homo sapiens
CARPYAPYSYGYFDSW

SEQ ID NO: 9498 - protein, 20 aa, Homo sapiens
CARLFPAVIRRGLIVGDDYW

SEQ ID NO: 9499 - protein, 16 aa, Homo sapiens
CASWSRTPGEYYFDYW

SEQ ID NO: 9500 - protein, 16 aa, Homo sapiens
CAREPGSYGDHYFDKW

SEQ ID NO: 9501 - protein, 19 aa, Homo sapiens
CARAGYCTGSSCYDAFDIW

SEQ ID NO: 9502 - protein, 20 aa, Homo sapiens
CATLGPYFFDGSGINPPDYW

SEQ ID NO: 9503 - protein, 20 aa, Homo sapiens
CAKDEGYCSSVSCYPLFDYW

SEQ ID NO: 9504 - protein, 18 aa, Homo sapiens
CAISRYSPPSYHYYMDVW

SEQ ID NO: 9505 - protein, 15 aa, Homo sapiens
CTRDSSLGVGATDYW

SEQ ID NO: 9506 - protein, 19 aa, Homo sapiens
CAHTIQWFGEFTYYFFDSW

SEQ ID NO: 9507 - protein, 18 aa, Homo sapiens
CARAGYTYGYFPDAFHIW

SEQ ID NO: 9508 - protein, 17 aa, Homo sapiens
CAKDYRIVVTGNYFDYW

SEQ ID NO: 9509 - protein, 21 aa, Homo sapiens
CARRSLGTQYFDSGAEYFHHW

SEQ ID NO: 9510 - protein, 17 aa, Homo sapiens
CATGIGVAGGGFYFDYW

SEQ ID NO: 9511 - protein, 17 aa, Homo sapiens
CARQAGFGELLPYFDFW

SEQ ID NO: 9512 - protein, 17 aa, Homo sapiens
CAKGMGHWKLLSAFHVW

SEQ ID NO: 9513 - protein, 15 aa, Homo sapiens
CARDRTDGFSHFDYW

SEQ ID NO: 9514 - protein, 18 aa, Homo sapiens
CARTEYYDSSVPGGFDPW

SEQ ID NO: 9515 - protein, 15 aa, Homo sapiens
CARGGVGARRRFDHW

SEQ ID NO: 9516 - protein, 14 aa, Homo sapiens
CARHTYGFDAFDIW

SEQ ID NO: 9517 - protein, 19 aa, Homo sapiens
CASWAGRTNNWLWGPLDYW

SEQ ID NO: 9518 - protein, 19 aa, Homo sapiens
CARHKRLGRVGATGVPDYW

SEQ ID NO: 9519 - protein, 17 aa, Homo sapiens
CAKDITRYLHFRYFDLW

SEQ ID NO: 9520 - protein, 12 aa, Homo sapiens
CLQYGSSQGITF

SEQ ID NO: 9521 - protein, 13 aa, Homo sapiens
CAIAGDYYYMDVW

SEQ ID NO: 9522 - protein, 17 aa, Homo sapiens
CALPILWFGEFWYFDLW

SEQ ID NO: 9523 - protein, 18 aa, Homo sapiens
CAKDRVVILATTRGFDFW

SEQ ID NO: 9524 - protein, 20 aa, Homo sapiens
CAKSLDYDILAGYAHYFDYW

SEQ ID NO: 9525 - protein, 15 aa, Homo sapiens
CATDLKQQVVQFDFW

SEQ ID NO: 9526 - protein, 14 aa, Homo sapiens
CTRDHVTTDEFDYW

SEQ ID NO: 9527 - protein, 25 aa, Homo sapiens
CARHPGPNPTRTAAATNYYYYMDVW

SEQ ID NO: 9528 - protein, 21 aa, Homo sapiens
CAKGSRPTDTWPRGASHFDYW

SEQ ID NO: 9529 - protein, 16 aa, Homo sapiens
CANEDYGATPRAFDIW

SEQ ID NO: 9530 - protein, 20 aa, Homo sapiens
CARLGYCDSSCPRGGGFAYW

SEQ ID NO: 9531 - protein, 13 aa, Homo sapiens
CARSDSADDFDIW

SEQ ID NO: 9532 - protein, 16 aa, Homo sapiens
CVREQTPSNHNWFDLW

SEQ ID NO: 9533 - protein, 16 aa, Homo sapiens
CARDGQQGGPWAFDYW

SEQ ID NO: 9534 - protein, 16 aa, Homo sapiens
CARVGVATQTSPFDYW

SEQ ID NO: 9535 - protein, 16 aa, Homo sapiens
CATAYNYVGSWYFDYW

SEQ ID NO: 9536 - protein, 17 aa, Homo sapiens
CAHSRVWSGYSMLFDPW

SEQ ID NO: 9537 - protein, 28 aa, Homo sapiens
CTTGLDDIVVVPAASRDTHYYYYYMDVW

SEQ ID NO: 9538 - protein, 15 aa, Homo sapiens
CQSYDGSLTEPDVIF

SEQ ID NO: 9539 - protein, 26 aa, Homo sapiens
CARDSASASYSSSRFSGVYYYGMDVW

SEQ ID NO: 9540 - protein, 13 aa, Homo sapiens
CSAWDKSLQASVF

SEQ ID NO: 9541 - protein, 15 aa, Homo sapiens
CQQSDRSPHAEGYTF

SEQ ID NO: 9542 - protein, 20 aa, Homo sapiens
CARPLRGYSGYELYWYFDLW

SEQ ID NO: 9543 - protein, 13 aa, Homo sapiens
CARRKGSDTFDFW

SEQ ID NO: 9544 - protein, 18 aa, Homo sapiens
CARIQGEYEGSGSSLDYW

SEQ ID NO: 9545 - protein, 16 aa, Homo sapiens
CARATVPGRLDGFDIW

SEQ ID NO: 9546 - protein, 12 aa, Homo sapiens
CQSYDHTNYGVF

SEQ ID NO: 9547 - protein, 12 aa, Homo sapiens
CQQYNTYTHITF

SEQ ID NO: 9548 - protein, 19 aa, Homo sapiens
CARDGLLMVYSAGNDFDVW

SEQ ID NO: 9549 - protein, 21 aa, Homo sapiens
CARLVGYCSSTSCYTGAFDIW

SEQ ID NO: 9550 - protein, 15 aa, Homo sapiens
CAREGSYEPLEFDPW

SEQ ID NO: 9551 - protein, 15 aa, Homo sapiens
CARGIESYGDPMDVW

SEQ ID NO: 9552 - protein, 20 aa, Homo sapiens
CVRDRSYLDCSIISCPFDYW

SEQ ID NO: 9553 - protein, 19 aa, Homo sapiens
CVKDPRPGSGWLMNYFDYW

SEQ ID NO: 9554 - protein, 24 aa, Homo sapiens
CAKDGFDCSSTSCYYYYYYYMDVW

SEQ ID NO: 9555 - protein, 19 aa, Homo sapiens
CTTSSGSYFWFPTPEFDHW

SEQ ID NO: 9556 - protein, 18 aa, Homo sapiens
CARKSYDSSGYYTGFDYW

SEQ ID NO: 9557 - protein, 12 aa, Homo sapiens
CQHYGSSVQGSF

SEQ ID NO: 9558 - protein, 16 aa, Homo sapiens
CARDPYSNSSGGRDYW

SEQ ID NO: 9559 - protein, 15 aa, Homo sapiens
CGKVVVLPSASPDYW

SEQ ID NO: 9560 - protein, 15 aa, Homo sapiens
CARTPPTTNNHLDYW

SEQ ID NO: 9561 - protein, 15 aa, Homo sapiens
CARDFSYGGNYFDYW

SEQ ID NO: 9562 - protein, 17 aa, Homo sapiens
CARRNYDTRGYSSFDYW

SEQ ID NO: 9563 - protein, 22 aa, Homo sapiens
CARDGGGYSGYDTYYYYYMDVW

SEQ ID NO: 9564 - protein, 19 aa, Homo sapiens
CARAGEDYFGSGNYYPDIW

SEQ ID NO: 9565 - protein, 16 aa, Homo sapiens
CARSSGIAEVPQFDYW

SEQ ID NO: 9566 - protein, 18 aa, Homo sapiens
CARNQMTSGDYVDYFDFW

SEQ ID NO: 9567 - protein, 17 aa, Homo sapiens
CVRHHYGWYSMRAFDIW

SEQ ID NO: 9568 - protein, 17 aa, Homo sapiens
CARVVDTAMVYDAFDIW

SEQ ID NO: 9569 - protein, 15 aa, Homo sapiens
CAKFGGLADRQNDYW

SEQ ID NO: 9570 - protein, 14 aa, Homo sapiens
CQQRANWLLSRYTF

SEQ ID NO: 9571 - protein, 20 aa, Homo sapiens
CARVPAMPYGADVPWYFDYW

SEQ ID NO: 9572 - protein, 17 aa, Homo sapiens
CLKESIQVGGPNYFDLW

SEQ ID NO: 9573 - protein, 15 aa, Homo sapiens
CATHPRFGVDAFDIW

SEQ ID NO: 9574 - protein, 18 aa, Homo sapiens
CARLIAAGGGYQSSFDYW

SEQ ID NO: 9575 - protein, 18 aa, Homo sapiens
CARGSITGTLGEDALDIW

SEQ ID NO: 9576 - protein, 15 aa, Homo sapiens
CARARGSGTNSFDYW

SEQ ID NO: 9577 - protein, 16 aa, Homo sapiens
CVKDKGAWESDYFDYW

SEQ ID NO: 9578 - protein, 16 aa, Homo sapiens
CAGGRFITTPLYFDYW

SEQ ID NO: 9579 - protein, 18 aa, Homo sapiens
CARSSGYDLIAVTHFDYW

SEQ ID NO: 9580 - protein, 18 aa, Homo sapiens
CARDSSAYSSGWYYFDYW

SEQ ID NO: 9581 - protein, 11 aa, Homo sapiens
CNQGTHRPFTF

SEQ ID NO: 9582 - protein, 15 aa, Homo sapiens
CASSIAAAGLPLDYW

SEQ ID NO: 9583 - protein, 21 aa, Homo sapiens
CARTLAYYYASGSYPYYFDYW

SEQ ID NO: 9584 - protein, 11 aa, Homo sapiens
CSTCGSYCDYW

SEQ ID NO: 9585 - protein, 16 aa, Homo sapiens
CARALNDILTGYYNYW

SEQ ID NO: 9586 - protein, 13 aa, Homo sapiens
CASNSGYDSFDNW

SEQ ID NO: 9587 - protein, 17 aa, Homo sapiens
CVKVTPYCSGGSCSDYW

SEQ ID NO: 9588 - protein, 12 aa, Homo sapiens [sequence omitted]

SEQ ID NO: 9589 - protein, 16 aa, Homo sapiens
CAKDRTGGGPYHFDYW

SEQ ID NO: 9590 - protein, 17 aa, Homo sapiens
CAHAKDIVVVTGYFDYW

SEQ ID NO: 9591 - protein, 16 aa, Homo sapiens
CAKDRVAVAATYFDYW

SEQ ID NO: 9592 - protein, 17 aa, Homo sapiens
CARGRLRFSGWSYFDHW

SEQ ID NO: 9593 - protein, 13 aa, Homo sapiens
CATEDAWGAFDNW

SEQ ID NO: 9594 - protein, 19 aa, Homo sapiens
CGRDDAEMAAVQNDAIDIW

SEQ ID NO: 9595 - protein, 21 aa, Homo sapiens
CTRETYDCSGSSCYTMPLDYW

SEQ ID NO: 9596 - protein, 12 aa, Homo sapiens
CARGIRGVVDYW

SEQ ID NO: 9597 - protein, 18 aa, Homo sapiens
CARSNLGQWLASNAFDVW

SEQ ID NO: 9598 - protein, 14 aa, Homo sapiens
CATTYSGFDVFDLW

SEQ ID NO: 9599 - protein, 19 aa, Homo sapiens
CARAGYCSGGSCNYYFDYW

SEQ ID NO: 9600 - protein, 16 aa, Homo sapiens
CARLAAYDNSGYIYYW

SEQ ID NO: 9601 - protein, 17 aa, Homo sapiens
CAKKTRSGPAAAGLDYW

SEQ ID NO: 9602 - protein, 11 aa, Homo sapiens
CAMGDLWFDPW

SEQ ID NO: 9603 - protein, 12 aa, Homo sapiens
CTTDKQMSPDYW

SEQ ID NO: 9604 - protein, 16 aa, Homo sapiens
CAKRDGYDWGSAFDIW

SEQ ID NO: 9605 - protein, 23 aa, Homo sapiens
CAKQIAAAGTKAGISTEYYFDYW

SEQ ID NO: 9606 - protein, 17 aa, Homo sapiens
CAKDRDFWSGYHPFDYW

SEQ ID NO: 9607 - protein, 11 aa, Homo sapiens [sequence omitted]

SEQ ID NO: 9608 - protein, 15 aa, Homo sapiens
CAKESGPVPPYFDCW

SEQ ID NO: 9609 - protein, 17 aa, Homo sapiens
CARRNIAAADHWYFDLW

SEQ ID NO: 9610 - protein, 12 aa, Homo sapiens
CQHSYGTPLFTF

SEQ ID NO: 9611 - protein, 22 aa, Homo sapiens
CAKADRGGYCSGAGCYQYIDYW

SEQ ID NO: 9612 - protein, 19 aa, Homo sapiens
CVRIHGTNRNYVFNWFDTW

SEQ ID NO: 9613 - protein, 17 aa, Homo sapiens
CAKDIGRQSVEGSFDYW

SEQ ID NO: 9614 - protein, 17 aa, Homo sapiens
CARDIPYAGSFLYFDFW

SEQ ID NO: 9615 - protein, 16 aa, Homo sapiens
CARRKAYNYEDAIDSW

SEQ ID NO: 9616 - protein, 21 aa, Homo sapiens
CARLHRGGSSTSVGGNWFDPW

SEQ ID NO: 9617 - protein, 11 aa, Homo sapiens
CQQANSFPLFF

SEQ ID NO: 9618 - protein, 16 aa, Homo sapiens
CATRTRWYPAYYFDYW

SEQ ID NO: 9619 - protein, 17 aa, Homo sapiens
CAHRAIFGVVSYYFDYW

SEQ ID NO: 9620 - protein, 20 aa, Homo sapiens
CAKLASHYGSGNYYDTFDIW

SEQ ID NO: 9621 - protein, 13 aa, Homo sapiens
CARRVANTIIDYW

SEQ ID NO: 9622 - protein, 17 aa, Homo sapiens
CANIPMTTVTVVAFDIW

SEQ ID NO: 9623 - protein, 13 aa, Homo sapiens
CARVRYHDAFDYW

SEQ ID NO: 9624 - protein, 18 aa, Homo sapiens
CAKDRVAVAGPYWYFDLW

SEQ ID NO: 9625 - protein, 20 aa, Homo sapiens
CARGDCSGGSCSSRLAFDIW

SEQ ID NO: 9626 - protein, 20 aa, Homo sapiens
CARGPHRGYCTNGVCYLGYW

SEQ ID NO: 9627 - protein, 17 aa, Homo sapiens
CAREVGSVTALNAFDIW

SEQ ID NO: 9628 - protein, 14 aa, Homo sapiens
CATLKPSDGAFEVW

SEQ ID NO: 9629 - protein, 23 aa, Homo sapiens
CARHRCSSPSCYGSSWQNWFDPW

SEQ ID NO: 9630 - protein, 12 aa, Homo sapiens
CAKLAPNGFDLW

SEQ ID NO: 9631 - protein, 19 aa, Homo sapiens
CAKDRAIAVAGTSNYFDYW

SEQ ID NO: 9632 - protein, 19 aa, Homo sapiens
CAKAYYDFWSGYSDHFDYW

SEQ ID NO: 9633 - protein, 18 aa, Homo sapiens
CARDPCSGGGCYSALDYW

SEQ ID NO: 9634 - protein, 18 aa, Homo sapiens
CARFQNYYDSSLVAFDIW

SEQ ID NO: 9635 - protein, 13 aa, Homo sapiens
CQQYYTTPQAYTF

SEQ ID NO: 9636 - protein, 20 aa, Homo sapiens
CAREVVSDYDDFWSGYFDYW

SEQ ID NO: 9637 - protein, 17 aa, Homo sapiens
CAKGRETVATIDAFDFW

SEQ ID NO: 9638 - protein, 17 aa, Homo sapiens
CARHWLVRGRYDAFDIW

SEQ ID NO: 9639 - protein, 14 aa, Homo sapiens
CAKVSFWGWYFDLW

SEQ ID NO: 9640 - protein, 16 aa, Homo sapiens
CSRVRQLGPIYYFDFW

SEQ ID NO: 9641 - protein, 14 aa, Homo sapiens
CARRPYAGGWFDPW

SEQ ID NO: 9642 - protein, 13 aa, Homo sapiens
CQQRTDWPPLSSF

SEQ ID NO: 9643 - protein, 18 aa, Homo sapiens
CAGSKLRFLESYHYMDVW

SEQ ID NO: 9644 - protein, 19 aa, Homo sapiens
CARSKINSLSPSIYYFDYW

SEQ ID NO: 9645 - protein, 15 aa, Homo sapiens
CASSKFGGSTPFDHW

SEQ ID NO: 9646 - protein, 22 aa, Homo sapiens
CARVRRNFSRVIVVASNWFDPW

SEQ ID NO: 9647 - protein, 21 aa, Homo sapiens
CARRVYSYGYGVNSHYYMDVW

SEQ ID NO: 9648 - protein, 19 aa, Homo sapiens
CAKESVVVVPDSSYYFDYW

SEQ ID NO: 9649 - protein, 20 aa, Homo sapiens
CARDPQLPKDTAPGYYFDYW

SEQ ID NO: 9650 - protein, 19 aa, Homo sapiens
CTRGFPIWWAAPFYHFDFW

SEQ ID NO: 9651 - protein, 16 aa, Homo sapiens
CAKDKYGYSGSALDYW

SEQ ID NO: 9652 - protein, 20 aa, Homo sapiens
CARLSCTTASCSMWDSFDLW

SEQ ID NO: 9653 - protein, 16 aa, Homo sapiens
CARRNGRLVLGGFDYW

SEQ ID NO: 9654 - protein, 16 aa, Homo sapiens
CARTGTTAEGHAFDIW

SEQ ID NO: 9655 - protein, 21 aa, Homo sapiens
CARGMYNYGVGSPYQNWFDPW

SEQ ID NO: 9656 - protein, 24 aa, Homo sapiens
CAKGLKGYDSGSYGTYYYYYMDVW

SEQ ID NO: 9657 - protein, 13 aa, Homo sapiens
CQKYSGAPQPLTF

SEQ ID NO: 9658 - protein, 20 aa, Homo sapiens
CDWSSDVCSSDLYNDYFDQW

SEQ ID NO: 9659 - protein, 15 aa, Homo sapiens
CARATITTFNWLDPW

SEQ ID NO: 9660 - protein, 21 aa, Homo sapiens
CARHVHADYFDSESYSDFDYW

SEQ ID NO: 9661 - protein, 19 aa, Homo sapiens
CASGLPSGVIININAFDIW

SEQ ID NO: 9662 - protein, 16 aa, Homo sapiens
CARRGDQWPHWHFDHW

SEQ ID NO: 9663 - protein, 15 aa, Homo sapiens
CATGRPGAGRYFDLW

SEQ ID NO: 9664 - protein, 20 aa, Homo sapiens
CASTEGAYYYDSSGYYFDYW

SEQ ID NO: 9665 - protein, 17 aa, Homo sapiens
CSSSKLSHPQEDGFDVW

SEQ ID NO: 9666 - protein, 19 aa, Homo sapiens
CARGFSPLWAAPFYYFDYW

SEQ ID NO: 9667 - protein, 15 aa, Homo sapiens
CARVGTYSSPPADYW

SEQ ID NO: 9668 - protein, 22 aa, Homo sapiens
CAREIVVVPAAIRELLWEDDYW

SEQ ID NO: 9669 - protein, 14 aa, Homo sapiens
CAKLAYNDYAFDIW

SEQ ID NO: 9670 - protein, 14 aa, Homo sapiens
CVRDGDGHYPIDYW

SEQ ID NO: 9671 - protein, 14 aa, Homo sapiens
CAASNRFRDAFEIW

SEQ ID NO: 9672 - protein, 16 aa, Homo sapiens
CARVKTTWPRGWFDPW

SEQ ID NO: 9673 - protein, 18 aa, Homo sapiens
CAKEVFSNYDILTGYDYW

SEQ ID NO: 9674 - protein, 18 aa, Homo sapiens
CARAGSFPMVRGVIFFYW

SEQ ID NO: 9675 - protein, 11 aa, Homo sapiens
CQQYKFYPIAF

SEQ ID NO: 9676 - protein, 17 aa, Homo sapiens
CARSAKELVLLNWFDPW

SEQ ID NO: 9677 - protein, 17 aa, Homo sapiens
CAKDLDTYRYGSAFDHW

SEQ ID NO: 9678 - protein, 15 aa, Homo sapiens
CARANGGPYYYMDVW

SEQ ID NO: 9679 - protein, 19 aa, Homo sapiens
CARVTFSHYYHSRNGPDYW

SEQ ID NO: 9680 - protein, 15 aa, Homo sapiens
CAKVRWNDGRIFDYW

SEQ ID NO: 9681 - protein, 16 aa, Homo sapiens
CAKSCYSSSWCNFDYW

SEQ ID NO: 9682 - protein, 15 aa, Homo sapiens
CATDHVVVPSALDYW

SEQ ID NO: 9683 - protein, 16 aa, Homo sapiens
CAKDIRFPGTDYMDVW

SEQ ID NO: 9684 - protein, 16 aa, Homo sapiens
CAGCEVCSSVTYSDYW

SEQ ID NO: 9685 - protein, 17 aa, Homo sapiens
CAKSSRSYLGLLYFDYW

SEQ ID NO: 9686 - protein, 22 aa, Homo sapiens
CAKGGLSGIAARLKVLTYFDYW

SEQ ID NO: 9687 - protein, 19 aa, Homo sapiens
CARHARDHFGVGIKDFDPW

SEQ ID NO: 9688 - protein, 13 aa, Homo sapiens
CATFRSGYFFRYW

SEQ ID NO: 9689 - protein, 21 aa, Homo sapiens
CARHPKDIMKLLKGVNAFDIW

SEQ ID NO: 9690 - protein, 17 aa, Homo sapiens
CARVHYYGSGSHPFDYW

SEQ ID NO: 9691 - protein, 15 aa, Homo sapiens
CARWGPANNPGFDYW

SEQ ID NO: 9692 - protein, 20 aa, Homo sapiens
CAREDFYDVADSYSWYFDLW

SEQ ID NO: 9693 - protein, 18 aa, Homo sapiens
CARLAGSSWLRNWYFDLW

SEQ ID NO: 9694 - protein, 15 aa, Homo sapiens
CARHEDTSSRFFDYW

SEQ ID NO: 9695 - protein, 16 aa, Homo sapiens
CARMAATNTFHSFDTW

SEQ ID NO: 9696 - protein, 20 aa, Homo sapiens
CARHWQIRGHSGQDYVFDIW

SEQ ID NO: 9697 - protein, 16 aa, Homo sapiens
CAREPEDGYNFGLDYW

SEQ ID NO: 9698 - protein, 22 aa, Homo sapiens
CARHPVTIFGVDPSYYYYMDVW

SEQ ID NO: 9699 - protein, 17 aa, Homo sapiens
CARGHSSGWNDDAFEIW

SEQ ID NO: 9700 - protein, 16 aa, Homo sapiens
CAKVPVLSWAALVDYW

SEQ ID NO: 9701 - protein, 11 aa, Homo sapiens
CQQFSSYLFTF

SEQ ID NO: 9702 - protein, 18 aa, Homo sapiens
CGILAYCSTTSCSGTDYW

SEQ ID NO: 9703 - protein, 17 aa, Homo sapiens
CARHSSRRTEADWIDPW

SEQ ID NO: 9704 - protein, 19 aa, Homo sapiens
CAKCQQAWELRAYDGFGIW

SEQ ID NO: 9705 - protein, 19 aa, Homo sapiens
CARVARGSPSGDLPAFDSW

SEQ ID NO: 9706 - protein, 17 aa, Homo sapiens
CARHLWRGSDNWYLDLW

SEQ ID NO: 9707 - protein, 13 aa, Homo sapiens
CARENAAYYIDYW

SEQ ID NO: 9708 - protein, 11 aa, Homo sapiens
CQKYRSARSAF

SEQ ID NO: 9709 - protein, 14 aa, Homo sapiens
CARLPYSLFYFDFW

SEQ ID NO: 9710 - protein, 15 aa, Homo sapiens
CVRHTSSQEGYFDPW

SEQ ID NO: 9711 - protein, 19 aa, Homo sapiens
CARIRTLVVIASYDAFTIW

SEQ ID NO: 9712 - protein, 15 aa, Homo sapiens
CVKDGGYYYYYMDVW

SEQ ID NO: 9713 - protein, 18 aa, Homo sapiens
CARTRKHYYDNSAYHDYW

SEQ ID NO: 9714 - protein, 19 aa, Homo sapiens
CARFRFDHGGDSIGGFDYW

SEQ ID NO: 9715 - protein, 20 aa, Homo sapiens
CAKGSHYCSSTSCHRAVDYW

SEQ ID NO: 9716 - protein, 18 aa, Homo sapiens
CTIVDAVGATVLSEFDFW

SEQ ID NO: 9717 - protein, 19 aa, Homo sapiens
CAKVVVAAKATRNYYFDYW

SEQ ID NO: 9718 - protein, 11 aa, Homo sapiens
CTQATLVPWTF

SEQ ID NO: 9719 - protein, 16 aa, Homo sapiens
CARHDCNSVTCYIDYW

SEQ ID NO: 9720 - protein, 21 aa, Homo sapiens
CAKVGPEYSDFWSGYYDFDYW

SEQ ID NO: 9721 - protein, 14 aa, Homo sapiens
CAREIDWNYYFDYW

SEQ ID NO: 9722 - protein, 17 aa, Homo sapiens
CTRDVVYSRGWYYFDSW

SEQ ID NO: 9723 - protein, 20 aa, Homo sapiens
CARVDRFGESLELVYYIDVW

SEQ ID NO: 9724 - protein, 22 aa, Homo sapiens
CARGDRYCSSTSCYLTDAFDIW

SEQ ID NO: 9725 - protein, 13 aa, Homo sapiens
CQQRRSWPPGLAF

SEQ ID NO: 9726 - protein, 21 aa, Homo sapiens
CARHQGFHYSDSSAYDTFNIW

SEQ ID NO: 9727 - protein, 14 aa, Homo sapiens
CAGGNGSPNWFDPW

SEQ ID NO: 9728 - protein, 13 aa, Homo sapiens
CQHFNNWPPRITF

SEQ ID NO: 9729 - protein, 24 aa, Homo sapiens
CARDKVIVVVPAAISYYYYYMDVW

SEQ ID NO: 9730 - protein, 16 aa, Homo sapiens
CARGRAYSSGWSFDDW

SEQ ID NO: 9731 - protein, 18 aa, Homo sapiens
CAKLRPELGANPHYFDSW

SEQ ID NO: 9732 - protein, 18 aa, Homo sapiens
CARLDYDPWSDNNWFDPW

SEQ ID NO: 9733 - protein, 17 aa, Homo sapiens
CVRDRENFKYYFYMDVW

SEQ ID NO: 9734 - protein, 19 aa, Homo sapiens
CARHRHYYDSRGYNAFDIW

SEQ ID NO: 9735 - protein, 17 aa, Homo sapiens
CARLHFVVLVTHRFDSW

SEQ ID NO: 9736 - protein, 14 aa, Homo sapiens
CASAVTTKKIFDYW

SEQ ID NO: 9737 - protein, 17 aa, Homo sapiens
CARNNYGDFSGGNFDYW

SEQ ID NO: 9738 - protein, 13 aa, Homo sapiens
CARYGGYISIDYW

SEQ ID NO: 9739 - protein, 16 aa, Homo sapiens
CAKTESISSVDPFDIW

SEQ ID NO: 9740 - protein, 20 aa, Homo sapiens
CARGTGYCSSTSCYTALDYW

SEQ ID NO: 9741 - protein, 13 aa, Homo sapiens
CQVWDGSGAQYVF

SEQ ID NO: 9742 - protein, 20 aa, Homo sapiens
CARHYYDTTGFYAGDPMDYW

SEQ ID NO: 9743 - protein, 16 aa, Homo sapiens
CARVYSSGWLEYFQHW

SEQ ID NO: 9744 - protein, 13 aa, Homo sapiens
CANVEYSSSWDYW

SEQ ID NO: 9745 - protein, 18 aa, Homo sapiens
CARYPFLYYDSSGYFDYW

SEQ ID NO: 9746 - protein, 18 aa, Homo sapiens
CARARGYDSSRWYYFDSW

SEQ ID NO: 9747 - protein, 15 aa, Homo sapiens
CARPEYSSGWFLDYW

SEQ ID NO: 9748 - protein, 16 aa, Homo sapiens
CAKDNSGYPSPSFDYW

SEQ ID NO: 9749 - protein, 17 aa, Homo sapiens
CAKDLQIAVAYDAFDIW

SEQ ID NO: 9750 - protein, 14 aa, Homo sapiens
CQVWHSSSDLDVVF

SEQ ID NO: 9751 - protein, 15 aa, Homo sapiens
CARNFNYDSSGLDYW

SEQ ID NO: 9752 - protein, 19 aa, Homo sapiens
CARGVYCSGGSCYSVVDYW

SEQ ID NO: 9753 - protein, 12 aa, Homo sapiens
CARVDFNSFDPW

SEQ ID NO: 9754 - protein, 20 aa, Homo sapiens
CARDASYSGSYGTLDAFDLW

SEQ ID NO: 9755 - protein, 12 aa, Homo sapiens
CMQTIELPLCSF

SEQ ID NO: 9756 - protein, 18 aa, Homo sapiens
CVYCGGDCYSSVDAVDIW

SEQ ID NO: 9757 - protein, 19 aa, Homo sapiens
CARTSYSDISGYHYYFDYW

SEQ ID NO: 9758 - protein, 14 aa, Homo sapiens
CQVWDTNTAHPVVF

SEQ ID NO: 9759 - protein, 14 aa, Homo sapiens
CAHISGTTSSFDYW

SEQ ID NO: 9760 - protein, 16 aa, Homo sapiens
CAKDGSHGHLDYFDYW

SEQ ID NO: 9761 - protein, 14 aa, Homo sapiens
CARSRGDWRGFDYW

SEQ ID NO: 9762 - protein, 15 aa, Homo sapiens
CASLTSSDTSSFDYW

SEQ ID NO: 9763 - protein, 22 aa, Homo sapiens
CARGQETAIVRGDYYYFYMDVW

SEQ ID NO: 9764 - protein, 13 aa, Homo sapiens
CARGTTNPGVDYW

SEQ ID NO: 9765 - protein, 18 aa, Homo sapiens
CAKDVRYGDYRPYYFDYW

SEQ ID NO: 9766 - protein, 16 aa, Homo sapiens
CARHSWRGPDYFFDYW

SEQ ID NO: 9767 - protein, 25 aa, Homo sapiens
CARDSSREEWLLYGSSYFYYYMDVW

SEQ ID NO: 9768 - protein, 16 aa, Homo sapiens
CARIPYYGSGSYEDYW

SEQ ID NO: 9769 - protein, 21 aa, Homo sapiens
CAREELLTGVLGIQFKVFDIW

SEQ ID NO: 9770 - protein, 19 aa, Homo sapiens
CARGGDFWSGYPSDYFDYW

SEQ ID NO: 9771 - protein, 18 aa, Homo sapiens
CAKAEDIVVVPTLEIDYW

SEQ ID NO: 9772 - protein, 20 aa, Homo sapiens
CAREGGAEDGRDYYYYMDVW

SEQ ID NO: 9773 - protein, 21 aa, Homo sapiens
CAKGAGDFWTNYNWGTWFDPW

SEQ ID NO: 9774 - protein, 16 aa, Homo sapiens
CARPYSISQIARFDYW

SEQ ID NO: 9775 - protein, 23 aa, Homo sapiens
CAKSGVVCSGSSCYSYYYYIDVW

SEQ ID NO: 9776 - protein, 13 aa, Homo sapiens [sequence omitted]

SEQ ID NO: 9777 - protein, 17 aa, Homo sapiens
CARDLLPGKRVNWFDPW

SEQ ID NO: 9778 - protein, 16 aa, Homo sapiens
CATDLPRSDRQALDYW

SEQ ID NO: 9779 - protein, 17 aa, Homo sapiens
CARGRLSGTIIDAFDIW

SEQ ID NO: 9780 - protein, 16 aa, Homo sapiens
CARPATWGADWYLDLW

SEQ ID NO: 9781 - protein, 20 aa, Homo sapiens
CARASSQYQLFPGNDAFDIW

SEQ ID NO: 9782 - protein, 17 aa, Homo sapiens
CARDRGAPYGDYAFDLW

SEQ ID NO: 9783 - protein, 22 aa, Homo sapiens
CTLFPYTTLFRSVSYYYYIDVW

SEQ ID NO: 9784 - protein, 20 aa, Homo sapiens
CARIRRGPSYGSLPEAFDSW

SEQ ID NO: 9785 - protein, 20 aa, Homo sapiens
CARIHYYDSRSLIAYYFDNW

SEQ ID NO: 9786 - protein, 25 aa, Homo sapiens
CARDVSRVDYGVLSGYYQGGILDYW

SEQ ID NO: 9787 - protein, 13 aa, Homo sapiens
CAIGYQPLHFDYW

SEQ ID NO: 9788 - protein, 18 aa, Homo sapiens
CAKLMIAYGTSSTAIDYW

SEQ ID NO: 9789 - protein, 18 aa, Homo sapiens
CAHRPLSGSGATSAFDIW

SEQ ID NO: 9790 - protein, 17 aa, Homo sapiens
CARGGGSGIPSDAFDIW

SEQ ID NO: 9791 - protein, 16 aa, Homo sapiens
CARAGGYSGSYHADYW

SEQ ID NO: 9792 - protein, 15 aa, Homo sapiens
CAKEVGPTGSRADYW

SEQ ID NO: 9793 - protein, 17 aa, Homo sapiens
CAKDTGYSYGNDAFDIW

SEQ ID NO: 9794 - protein, 18 aa, Homo sapiens
CATITGSSSSWSIPFDPW

SEQ ID NO: 9795 - protein, 18 aa, Homo sapiens
CTPQMPSSGWTLYYFDYW

SEQ ID NO: 9796 - protein, 16 aa, Homo sapiens
CARQLTGDTLAHFDYW

SEQ ID NO: 9797 - protein, 15 aa, Homo sapiens
CAALRQLERLGNDYW

SEQ ID NO: 9798 - protein, 20 aa, Homo sapiens
CARDGSGPSTIGATMWFDYW

SEQ ID NO: 9799 - protein, 13 aa, Homo sapiens [sequence omitted]

SEQ ID NO: 9800 - protein, 19 aa, Homo sapiens
CQVEKGRDGYNLHDAFDIW

SEQ ID NO: 9801 - protein, 18 aa, Homo sapiens
CARIAGCGSGSFNWFDTW

SEQ ID NO: 9802 - protein, 16 aa, Homo sapiens
CARRLYEIWLTYFDNW

SEQ ID NO: 9803 - protein, 21 aa, Homo sapiens
CARAYCSDVSCYRRAYYFDYW

SEQ ID NO: 9804 - protein, 17 aa, Homo sapiens
CARSSSLASYDCWEDSW

SEQ ID NO: 9805 - protein, 16 aa, Homo sapiens
CARGPLDYALRFFDYW

SEQ ID NO: 9806 - protein, 19 aa, Homo sapiens
CARQLRFLEWSRADALNIW

SEQ ID NO: 9807 - protein, 18 aa, Homo sapiens
CARHTHGDPLRAYYFDYW

SEQ ID NO: 9808 - protein, 19 aa, Homo sapiens
CARVSGGATRKGEYYFDYW

SEQ ID NO: 9809 - protein, 14 aa, Homo sapiens
CASPTRWDGSFDYW

SEQ ID NO: 9810 - protein, 18 aa, Homo sapiens
CVRTRDSSENYYGAFDIW

SEQ ID NO: 9811 - protein, 14 aa, Homo sapiens
CQTWGTAIEPHVVF

SEQ ID NO: 9812 - protein, 14 aa, Homo sapiens
CATVSSGPNEFHYW

SEQ ID NO: 9813 - protein, 17 aa, Homo sapiens
CARVIFGVVTPYYFDYW

SEQ ID NO: 9814 - protein, 22 aa, Homo sapiens
CARHPGYCTTTTCYGQVYFDYW

SEQ ID NO: 9815 - protein, 17 aa, Homo sapiens
CAKDTGDYNLWSGLDYW

SEQ ID NO: 9816 - protein, 25 aa, Homo sapiens
CVRVAQYFDSDGYYDGDSYWYFDVW

SEQ ID NO: 9817 - protein, 13 aa, Homo sapiens
CAREVIGSYLDYW

SEQ ID NO: 9818 - protein, 16 aa, Homo sapiens
CAKTGGHDYYHYIDVW

SEQ ID NO: 9819 - protein, 17 aa, Homo sapiens
CAKELDQYSSGWFFDYW

SEQ ID NO: 9820 - protein, 16 aa, Homo sapiens
CASSVPSQLGSWFDPW

SEQ ID NO: 9821 - protein, 19 aa, Homo sapiens
CARDVALRYFDWYKGFDPW

SEQ ID NO: 9822 - protein, 20 aa, Homo sapiens
CARVHQDSSGYHGVNWFDPW

SEQ ID NO: 9823 - protein, 19 aa, Homo sapiens
CAKDKVRGGIVVPYYFDDW

SEQ ID NO: 9824 - protein, 15 aa, Homo sapiens
CYIPGVEHLEAFDLW

SEQ ID NO: 9825 - protein, 22 aa, Homo sapiens
CARGQDVASSLADLGEYYMDVW

SEQ ID NO: 9826 - protein, 20 aa, Homo sapiens
CARGGGAYCGADCKRTFDIW

SEQ ID NO: 9827 - protein, 18 aa, Homo sapiens
CARHCILSTCSFRYFDNW

SEQ ID NO: 9828 - protein, 17 aa, Homo sapiens
CAKDLTTAADTGFLDYW

SEQ ID NO: 9829 - protein, 18 aa, Homo sapiens
CARATGYDSSVPNWFDPW

SEQ ID NO: 9830 - protein, 21 aa, Homo sapiens
CARLDCSGTSCFSRSDAFDIW

SEQ ID NO: 9831 - protein, 20 aa, Homo sapiens
CARGPGIAAAGPRYNWFDPW

SEQ ID NO: 9832 - protein, 20 aa, Homo sapiens
CAKEVYLNSRRGIANAFDVW

SEQ ID NO: 9833 - protein, 19 aa, Homo sapiens
CAHSSYSEFWSGFGAFDIW

SEQ ID NO: 9834 - protein, 16 aa, Homo sapiens
CARDQTVQTYVLYDYW

SEQ ID NO: 9835 - protein, 13 aa, Homo sapiens
CQTPDSSGTRWLF

SEQ ID NO: 9836 - protein, 21 aa, Homo sapiens
CARDLPTHCSSTTCSRWFDPW

SEQ ID NO: 9837 - protein, 15 aa, Homo sapiens
CARREYYYGSGMDVW

SEQ ID NO: 9838 - protein, 14 aa, Homo sapiens
CATDLRFGEFWDYW

SEQ ID NO: 9839 - protein, 25 aa, Homo sapiens
CGRLVTSGSHGSFYAPYSSYYMDVW

SEQ ID NO: 9840 - protein, 16 aa, Homo sapiens
CARGLYSSSWRGFDIW

SEQ ID NO: 9841 - protein, 20 aa, Homo sapiens
CARDHFYYGSETYGGGFDPW

SEQ ID NO: 9842 - protein, 16 aa, Homo sapiens
CASHTFGDYPNWFDPW

SEQ ID NO: 9843 - protein, 19 aa, Homo sapiens
CARDSELLRFGTVSFFDYW

SEQ ID NO: 9844 - protein, 16 aa, Homo sapiens
CARDMAAVGSLWLDYW

SEQ ID NO: 9845 - protein, 17 aa, Homo sapiens
CANDRPEYSGYANFDYW

SEQ ID NO: 9846 - protein, 17 aa, Homo sapiens
CVKSYQMLGEHDAFDIW

SEQ ID NO: 9847 - protein, 22 aa, Homo sapiens
CTRVSKFTTIRGVPVDDAFDVW

SEQ ID NO: 9848 - protein, 15 aa, Homo sapiens
CARDSYYFASGFDLW

SEQ ID NO: 9849 - protein, 15 aa, Homo sapiens
CTKEAVDGTPYFDNW

SEQ ID NO: 9850 - protein, 15 aa, Homo sapiens
CARTLRYFDWLLDYW

SEQ ID NO: 9851 - protein, 16 aa, Homo sapiens
CARRLRGYSYGYLDYW

SEQ ID NO: 9852 - protein, 14 aa, Homo sapiens
CSSFTISSTLNWVF

SEQ ID NO: 9853 - protein, 18 aa, Homo sapiens
CAKDASPGSAVAVYFDYW

SEQ ID NO: 9854 - protein, 19 aa, Homo sapiens
CARDGMGGGSYLKYYFDYW

SEQ ID NO: 9855 - protein, 14 aa, Homo sapiens
CQSSDTSLSGSYFF

SEQ ID NO: 9856 - protein, 18 aa, Homo sapiens
CARGAYYHDITYKSPDYW

SEQ ID NO: 9857 - protein, 19 aa, Homo sapiens
CARDVPVLPASNQVAVDIW

SEQ ID NO: 9858 - protein, 18 aa, Homo sapiens
CARDSTYSGSSYWYFDLW

SEQ ID NO: 9859 - protein, 23 aa, Homo sapiens
CARIGFCGLSSGGSCYNDAFDIW

SEQ ID NO: 9860 - protein, 23 aa, Homo sapiens
CAKDWSYKSLSSSWNAADAFDIW

SEQ ID NO: 9861 - protein, 23 aa, Homo sapiens
CARFLEGEGECTRISCQGSFDLW

SEQ ID NO: 9862 - protein, 18 aa, Homo sapiens
CASLGGGSYERGNWFDPW

SEQ ID NO: 9863 - protein, 19 aa, Homo sapiens
CARHYCTDDCFYEDWFDAW

SEQ ID NO: 9864 - protein, 13 aa, Homo sapiens
CAHRKQQFLFDYW

SEQ ID NO: 9865 - protein, 14 aa, Homo sapiens
CTRGQWLAPDFDYW

SEQ ID NO: 9866 - protein, 16 aa, Homo sapiens
CARYIVTRTGIWFDPW

SEQ ID NO: 9867 - protein, 17 aa, Homo sapiens
CARPRVETTRIDAFDIW

SEQ ID NO: 9868 - protein, 23 aa, Homo sapiens
CARHKFPTRITIFGVVNPGFDYW

SEQ ID NO: 9869 - protein, 36 aa, Homo sapiens
CARVNVATAGTLPPFCSGDTCHTSRYSYYWYYMDVW

SEQ ID NO: 9870 - protein, 13 aa, Homo sapiens
CATEHGERGNDYW

SEQ ID NO: 9871 - protein, 17 aa, Homo sapiens
CAKDSHVGHWANYFDYW

SEQ ID NO: 9872 - protein, 24 aa, Homo sapiens
CARDKGEFDFWINFYRGRNAFDLW

SEQ ID NO: 9873 - protein, 12 aa, Homo sapiens
CARGQVATTDYW

SEQ ID NO: 9874 - protein, 16 aa, Homo sapiens
CVKDPYSSSSRYFDYW

SEQ ID NO: 9875 - protein, 21 aa, Homo sapiens
CAKDSLQYCSSTNCYGGFDYW

SEQ ID NO: 9876 - protein, 22 aa, Homo sapiens
CAKVLYPQDNSGFYPRDPFDSW

SEQ ID NO: 9877 - protein, 19 aa, Homo sapiens
CAKGRHYYDSSAYRHFDYW

SEQ ID NO: 9878 - protein, 20 aa, Homo sapiens
CARSPLDRNYQFLPVWFDPW

SEQ ID NO: 9879 - protein, 22 aa, Homo sapiens
CARDAAAGNGFALYYYYYMDVW

SEQ ID NO: 9880 - protein, 19 aa, Homo sapiens
CAKRETDDYSNYDSPPDYW

SEQ ID NO: 9881 - protein, 14 aa, Homo sapiens
CVRGFSKTYYFDNW

SEQ ID NO: 9882 - protein, 16 aa, Homo sapiens
CARYCSRSSCNALDYW

SEQ ID NO: 9883 - protein, 19 aa, Homo sapiens
CAKGGSGSFYKVPWYFDYW

SEQ ID NO: 9884 - protein, 15 aa, Homo sapiens
CAVFLVPQIPGLDYW

SEQ ID NO: 9885 - protein, 17 aa, Homo sapiens
CAKAPSEVGVIYYFDSW

SEQ ID NO: 9886 - protein, 21 aa, Homo sapiens
CARHNTQATESVTRANWFDPW

SEQ ID NO: 9887 - protein, 16 aa, Homo sapiens
CTRDASAAAYNWFDPW

SEQ ID NO: 9888 - protein, 16 aa, Homo sapiens
CARDRLQGYYSGPDYW

SEQ ID NO: 9889 - protein, 18 aa, Homo sapiens
CAYRGTTTLGLAGAFDPW

SEQ ID NO: 9890 - protein, 18 aa, Homo sapiens
CAKDICSGGSCYGFFDYW

SEQ ID NO: 9891 - protein, 19 aa, Homo sapiens
CTRPVVPTAPSKHDAFDIW

SEQ ID NO: 9892 - protein, 19 aa, Homo sapiens
CARDLETASGTMGRWFDPW

SEQ ID NO: 9893 - protein, 16 aa, Homo sapiens
CQQYYSNTMYNTMYTF

SEQ ID NO: 9894 - protein, 18 aa, Homo sapiens
CARGQYSSSFGFDWFDLW

SEQ ID NO: 9895 - protein, 23 aa, Homo sapiens
CARPGDYDFWSGYYTGSNWFDPW

SEQ ID NO: 9896 - protein, 15 aa, Homo sapiens
CWGTTVVTSGSEDYW

SEQ ID NO: 9897 - protein, 18 aa, Homo sapiens
CAKEVHVVNSGSDGFDIW

SEQ ID NO: 9898 - protein, 16 aa, Homo sapiens
CARQGFRDAWYWFDPW

SEQ ID NO: 9899 - protein, 19 aa, Homo sapiens
CAKDRAPYSSSSGQTFDYW

SEQ ID NO: 9900 - protein, 18 aa, Homo sapiens
CARAGAAYGDLNDAFDIW

SEQ ID NO: 9901 - protein, 20 aa, Homo sapiens
CASPPPGYCSSISCFSFDYW

SEQ ID NO: 9902 - protein, 12 aa, Homo sapiens
CVRDSAYVFDIW

SEQ ID NO: 9903 - protein, 18 aa, Homo sapiens
CARDKSRDWNDVGSFDYW

SEQ ID NO: 9904 - protein, 15 aa, Homo sapiens
CARVDISAHVVFDFW

SEQ ID NO: 9905 - protein, 37 aa, Homo sapiens
CTLFPYTTLFRSEDTAVYYCAKIGEGGSYYGYYFDYW

SEQ ID NO: 9906 - protein, 17 aa, Homo sapiens
CARCPSSSWVLDYMDVW

SEQ ID NO: 9907 - protein, 16 aa, Homo sapiens
CARGTQPVASSHFDYW

SEQ ID NO: 9908 - protein, 18 aa, Homo sapiens
CARTRLGNRSSRADFDDW

SEQ ID NO: 9909 - protein, 13 aa, Homo sapiens
CGKDMSPGGLDYW

SEQ ID NO: 9910 - protein, 14 aa, Homo sapiens
CARDPANQDALDIW

SEQ ID NO: 9911 - protein, 14 aa, Homo sapiens
CARGMELLESLDYW

SEQ ID NO: 9912 - protein, 16 aa, Homo sapiens
CAKFPRAATTAEFDYW

SEQ ID NO: 9913 - protein, 17 aa, Homo sapiens
CARGLLEVITGDAFDIW

SEQ ID NO: 9914 - protein, 21 aa, Homo sapiens
CARDSQMCNITSCPPNWFDPW

SEQ ID NO: 9915 - protein, 22 aa, Homo sapiens
CARGGYYHDSSGSSVITYFDIW

SEQ ID NO: 9916 - protein, 21 aa, Homo sapiens
CARHGDSDIVVVPADNYFDYW

SEQ ID NO: 9917 - protein, 22 aa, Homo sapiens
CAKTSGYCSSTSCYTADAFDIW

SEQ ID NO: 9918 - protein, 19 aa, Homo sapiens
CARDPRQTGYSYGLYFDYW

SEQ ID NO: 9919 - protein, 21 aa, Homo sapiens
CAHSGAYCSRDSKCYDHFDSW

SEQ ID NO: 9920 - protein, 16 aa, Homo sapiens
CGGLDSVRGGYDFDYW

SEQ ID NO: 9921 - protein, 20 aa, Homo sapiens
CARDNVAVAGTGYRDAFDIW

SEQ ID NO: 9922 - protein, 18 aa, Homo sapiens
CARGSSRQITRWAAFDIW

SEQ ID NO: 9923 - protein, 22 aa, Homo sapiens
CVHSLTTFSGAILRIHETFDMW

SEQ ID NO: 9924 - protein, 12 aa, Homo sapiens
CQSVDSSGIYIF

SEQ ID NO: 9925 - protein, 19 aa, Homo sapiens
CVSRYYYGVGSYLSHFDSW

SEQ ID NO: 9926 - protein, 23 aa, Homo sapiens
CVKPPGHGSGNYYSSGAGAFDIW

SEQ ID NO: 9927 - protein, 18 aa, Homo sapiens
CARDCPTSRGYMTCFDYW

SEQ ID NO: 9928 - protein, 13 aa, Homo sapiens
CQHLNSIPPRGTF

SEQ ID NO: 9929 - protein, 20 aa, Homo sapiens
CAKPRYGGNSYYYYYYMDVW

SEQ ID NO: 9930 - protein, 14 aa, Homo sapiens
CARRKMTTEEYDYW

SEQ ID NO: 9931 - protein, 24 aa, Homo sapiens
CARDRSGDSDFWSGYYGDDAFDIW

SEQ ID NO: 9932 - protein, 14 aa, Homo sapiens
CAILSSWYDPIDYW

SEQ ID NO: 9933 - protein, 16 aa, Homo sapiens
CARAWGYYRPEYFQHW

SEQ ID NO: 9934 - protein, 15 aa, Homo sapiens
CARGYSNSRYAFDYW

SEQ ID NO: 9935 - protein, 21 aa, Homo sapiens
CARDIDRYCSGESCTWVFDYW

SEQ ID NO: 9936 - protein, 18 aa, Homo sapiens
CAKDSFLRQYTVKMIDYW

SEQ ID NO: 9937 - protein, 17 aa, Homo sapiens
CAIHTNGYSYVEPFDYW

SEQ ID NO: 9938 - protein, 18 aa, Homo sapiens
CAKDRFGGDDYLEYFDYW

SEQ ID NO: 9939 - protein, 15 aa, Homo sapiens
CARPPGVNLDAFDTW

SEQ ID NO: 9940 - protein, 17 aa, Homo sapiens
CARELKGGITTSWFDSW

SEQ ID NO: 9941 - protein, 16 aa, Homo sapiens
CVRDSPAVAGTPFDYW

SEQ ID NO: 9942 - protein, 16 aa, Homo sapiens
CAKDLSSSGWYALDYW

SEQ ID NO: 9943 - protein, 15 aa, Homo sapiens
CAREVVVVSYYFDYW

SEQ ID NO: 9944 - protein, 21 aa, Homo sapiens
CARDRLQGPYCGGDCGYFDSW

SEQ ID NO: 9945 - protein, 17 aa, Homo sapiens
CAREGKYSGSDSGFDYW

SEQ ID NO: 9946 - protein, 20 aa, Homo sapiens
CARDTASSPRRDPYDAFDIW

SEQ ID NO: 9947 - protein, 18 aa, Homo sapiens
CARGRITIFGVVNYFDYW

SEQ ID NO: 9948 - protein, 16 aa, Homo sapiens
CARARIQHYPKPFDYW

SEQ ID NO: 9949 - protein, 16 aa, Homo sapiens
CARDYTSVSGRGGDYW

SEQ ID NO: 9950 - protein, 19 aa, Homo sapiens
CARVNSVTESYSGDAFDIW

SEQ ID NO: 9951 - protein, 10 aa, Homo sapiens
CTRDFSSDYW

SEQ ID NO: 9952 - protein, 14 aa, Homo sapiens
CARSGSDFGSLDYW

SEQ ID NO: 9953 - protein, 19 aa, Homo sapiens
CARDNSATSLYMFWWFDPW

SEQ ID NO: 9954 - protein, 13 aa, Homo sapiens
CAHRLNYIAFDIW

SEQ ID NO: 9955 - protein, 12 aa, Homo sapiens
CARGHTVDFDFW

SEQ ID NO: 9956 - protein, 16 aa, Homo sapiens
CARTKGGGYDSDFDYW

SEQ ID NO: 9957 - protein, 21 aa, Homo sapiens
CARGTDDFWTGYLRGFYFDSW

SEQ ID NO: 9958 - protein, 22 aa, Homo sapiens
CAHKHLPGYYPVSQINFAFDSW

SEQ ID NO: 9959 - protein, 18 aa, Homo sapiens
CARWVDTTMVISHYFDSW

SEQ ID NO: 9960 - protein, 17 aa, Homo sapiens
CATSRVRVGHLGNFDDW

SEQ ID NO: 9961 - protein, 13 aa, Homo sapiens
CQQRSPWPPMCRF

SEQ ID NO: 9962 - protein, 19 aa, Homo sapiens
CARHREVPGYSSGWTFDYW

SEQ ID NO: 9963 - protein, 22 aa, Homo sapiens
CARAAYDFWSGYYPYRNAFDIW

SEQ ID NO: 9964 - protein, 14 aa, Homo sapiens
CQVWGSSTDHYWVF

SEQ ID NO: 9965 - protein, 18 aa, Homo sapiens
CARTMPSGYYPFGYFDYW

SEQ ID NO: 9966 - protein, 22 aa, Homo sapiens
CARGRWITIFGVAITYNWFDPW

SEQ ID NO: 9967 - protein, 23 aa, Homo sapiens
CARHLSYDILTGYVDENNWFDPW

SEQ ID NO: 9968 - protein, 16 aa, Homo sapiens
CARVTGITGTTFFDYW

SEQ ID NO: 9969 - protein, 14 aa, Homo sapiens
CVRASRTSDAFDVW

SEQ ID NO: 9970 - protein, 19 aa, Homo sapiens
CARATFYDSSGYWYYFDYW

SEQ ID NO: 9971 - protein, 13 aa, Homo sapiens
CTTDFVVGYSAYW

SEQ ID NO: 9972 - protein, 12 aa, Homo sapiens
CHLRSNWPQIAF

SEQ ID NO: 9973 - protein, 13 aa, Homo sapiens
CQQSYSSPHSCSF

SEQ ID NO: 9974 - protein, 17 aa, Homo sapiens
CARDRGSWPDNDAFAFW

SEQ ID NO: 9975 - protein, 12 aa, Homo sapiens
CQQTYNTPMSSF

SEQ ID NO: 9976 - protein, 14 aa, Homo sapiens
CARVHSGWYSNDYW

SEQ ID NO: 9977 - protein, 23 aa, Homo sapiens
CARERYGSGGHQLLYRPYYFDYW

SEQ ID NO: 9978 - protein, 14 aa, Homo sapiens
CTTDPAYVSFIDYW

SEQ ID NO: 9979 - protein, 13 aa, Homo sapiens
CARLGVLEYLQHW

SEQ ID NO: 9980 - protein, 18 aa, Homo sapiens
CARHKGAVTGRRGWFDPW

SEQ ID NO: 9981 - protein, 18 aa, Homo sapiens
CAKVPFKNHGYDIYFDYW

SEQ ID NO: 9982 - protein, 16 aa, Homo sapiens
CARGGHSSSYNYMDVW

SEQ ID NO: 9983 - protein, 16 aa, Homo sapiens
CARDSTRIAAAGTDYW

SEQ ID NO: 9984 - protein, 13 aa, Homo sapiens
CSSYAGSHNQVIF

SEQ ID NO: 9985 - protein, 17 aa, Homo sapiens
CAKEGGSYSSSWYIDYW

SEQ ID NO: 9986 - protein, 21 aa, Homo sapiens
CVRSLYYYDTDNNGHDISDIW

SEQ ID NO: 9987 - protein, 16 aa, Homo sapiens
CARTIFGVVIDIFDYW

SEQ ID NO: 9988 - protein, 13 aa, Homo sapiens
CSRGIAARQFDYW

SEQ ID NO: 9989 - protein, 17 aa, Homo sapiens
CARDRYYGDSLQGFDYW

SEQ ID NO: 9990 - protein, 15 aa, Homo sapiens
CARDDGSGYDRLDYW

SEQ ID NO: 9991 - protein, 14 aa, Homo sapiens
CARHVSPDYLSDYW

SEQ ID NO: 9992 - protein, 18 aa, Homo sapiens
CARVPGILTTDTTTFDIW

SEQ ID NO: 9993 - protein, 10 aa, Homo sapiens
CARDFSADYW

SEQ ID NO: 9994 - protein, 13 aa, Homo sapiens
CTTDVGYGWFDPW

SEQ ID NO: 9995 - protein, 16 aa, Homo sapiens
CAKGPSGYSPYYFDYW

SEQ ID NO: 9996 - protein, 19 aa, Homo sapiens
CARMRRPGPLGYYSNVDYW

SEQ ID NO: 9997 - protein, 21 aa, Homo sapiens
CARDYYGSQSYYPDDTRFDSW

SEQ ID NO: 9998 - protein, 19 aa, Homo sapiens
CARLCSGDCYINRGSYDYW

SEQ ID NO: 9999 - protein, 15 aa, Homo sapiens
CARLGIGNSGHRDYW

SEQ ID NO: 10000 - protein, 17 aa, Homo sapiens
CAKDGIAVRHYYYMDVW

SEQ ID NO: 10001 - protein, 20 aa, Homo sapiens
CQSYHSDNGVFGGGTNHGVF

SEQ ID NO: 10002 - protein, 18 aa, Homo sapiens
CTRTCSDNCYISQPFDYW

SEQ ID NO: 10003 - protein, 16 aa, Homo sapiens
CARRSITARPGWFDPW

SEQ ID NO: 10004 - protein, 15 aa, Homo sapiens
CAKDLGAVAGYFDYW

SEQ ID NO: 10005 - protein, 21 aa, Homo sapiens
CTRQIDPFWSAFQPDYYFDYW

SEQ ID NO: 10006 - protein, 18 aa, Homo sapiens
CVKDLSEIVLMFYAFDYW

SEQ ID NO: 10007 - protein, 14 aa, Homo sapiens
CTRGDSDYVPLDYW

SEQ ID NO: 10008 - protein, 14 aa, Homo sapiens
CARDPAVAGDLDYW

SEQ ID NO: 10009 - protein, 16 aa, Homo sapiens
CAHLLSSDGLNWFDPW

SEQ ID NO: 10010 - protein, 16 aa, Homo sapiens
CVKGPIAVTAQYFDYW

SEQ ID NO: 10011 - protein, 21 aa, Homo sapiens
CARGAGDCSTGICYRQHFDYW

SEQ ID NO: 10012 - protein, 14 aa, Homo sapiens
CARRDSGYDPFDYW

SEQ ID NO: 10013 - protein, 16 aa, Homo sapiens
CARDRLVGAQAYLDHW

SEQ ID NO: 10014 - protein, 18 aa, Homo sapiens
CARMVQLERRGGPAFDIW

SEQ ID NO: 10015 - protein, 11 aa, Homo sapiens
CQKANNFPLTF

SEQ ID NO: 10016 - protein, 18 aa, Homo sapiens
CASLRFLEWLSSDAFDIW

SEQ ID NO: 10017 - protein, 18 aa, Homo sapiens
CATVEGTTLGERHYFDSW

SEQ ID NO: 10018 - protein, 19 aa, Homo sapiens
CARDMAEYSSSSTGVVDYW

SEQ ID NO: 10019 - protein, 20 aa, Homo sapiens
CAAGRSEEYCTGASCFDEYW

SEQ ID NO: 10020 - protein, 12 aa, Homo sapiens
CLLSYGGSRVIF

SEQ ID NO: 10021 - protein, 14 aa, Homo sapiens
CARHYSRNHAFDVW

SEQ ID NO: 10022 - protein, 14 aa, Homo sapiens
CATHMTPRDAFDIW

SEQ ID NO: 10023 - protein, 22 aa, Homo sapiens
CARSPLPYCSSTSCYGVDFDYW

SEQ ID NO: 10024 - protein, 16 aa, Homo sapiens
CAKICNYQLLNWFDPW

SEQ ID NO: 10025 - protein, 15 aa, Homo sapiens
CAKGKYTSGPTADYW

SEQ ID NO: 10026 - protein, 19 aa, Homo sapiens
CAKGHCGGTGCYLWIFDYW

SEQ ID NO: 10027 - protein, 12 aa, Homo sapiens
CARQDWGSFDSW

SEQ ID NO: 10028 - protein, 17 aa, Homo sapiens
CAKVASITMVRGVIDYW

SEQ ID NO: 10029 - protein, 14 aa, Homo sapiens
CVSGPGPTNWFDPW

SEQ ID NO: 10030 - protein, 21 aa, Homo sapiens
CARIRNYYDSGTYMQGPFDYW

SEQ ID NO: 10031 - protein, 22 aa, Homo sapiens
CARALDYSDGRGYYNQDYFECW

SEQ ID NO: 10032 - protein, 17 aa, Homo sapiens
CARSPQGRGVIEAFDIW

SEQ ID NO: 10033 - protein, 18 aa, Homo sapiens
CAKQFSGGSYWEYYLDYW

SEQ ID NO: 10034 - protein, 16 aa, Homo sapiens
CASRSCTSGVCPFDYW

SEQ ID NO: 10035 - protein, 18 aa, Homo sapiens
CAKDQGVSREVPRHFEYW

SEQ ID NO: 10036 - protein, 14 aa, Homo sapiens
CASEKWGSGYIDFW

SEQ ID NO: 10037 - protein, 18 aa, Homo sapiens
CAKDVGIAVAGSGGFDYW

SEQ ID NO: 10038 - protein, 20 aa, Homo sapiens
CARVLSYYYDSSGYDHFDYW

SEQ ID NO: 10039 - protein, 22 aa, Homo sapiens
CVKDECSTTDCHFGFYTYMDVW

SEQ ID NO: 10040 - protein, 20 aa, Homo sapiens
CAKDIYSSSFAHYYYYMDVW

SEQ ID NO: 10041 - protein, 18 aa, Homo sapiens
CAREGGSGREGANAFNIW

SEQ ID NO: 10042 - protein, 20 aa, Homo sapiens
CAKVRCSSTSCYHHDAFDIW

SEQ ID NO: 10043 - protein, 19 aa, Homo sapiens
CAKDQSSVVVVPDDAFDIW

SEQ ID NO: 10044 - protein, 15 aa, Homo sapiens
CAKDPLHDYSGYDYW

SEQ ID NO: 10045 - protein, 25 aa, Homo sapiens
CARDLTPRLRYCTNGVCYSNWFDPW

SEQ ID NO: 10046 - protein, 15 aa, Homo sapiens
CARVGYHNEVECDYW

SEQ ID NO: 10047 - protein, 18 aa, Homo sapiens
CATRSGIEAPGIRWFDPW

SEQ ID NO: 10048 - protein, 15 aa, Homo sapiens
CANLFWSGYYKEDYW

SEQ ID NO: 10049 - protein, 18 aa, Homo sapiens
CAKDFWYSSPPSDAFDVW

SEQ ID NO: 10050 - protein, 18 aa, Homo sapiens
CAKGVVVRGIISRYFDYW

SEQ ID NO: 10051 - protein, 16 aa, Homo sapiens
CARAGTGVPSHWFDPW

SEQ ID NO: 10052 - protein, 24 aa, Homo sapiens
CARGKRIAARLLNKGTTVYYFDYW

SEQ ID NO: 10053 - protein, 16 aa, Homo sapiens
CATQYRSVYSSPFDFW

SEQ ID NO: 10054 - protein, 18 aa, Homo sapiens
CAKDPSYDFWSGHHFDYW

SEQ ID NO: 10055 - protein, 20 aa, Homo sapiens
CAKVPSSSWYGYYYYYMDVW

SEQ ID NO: 10056 - protein, 18 aa, Homo sapiens
CARLDDDDNNYENWFDPW

SEQ ID NO: 10057 - protein, 17 aa, Homo sapiens
CARGHFNNYVLNWFDFW

SEQ ID NO: 10058 - protein, 23 aa, Homo sapiens
CARHSGYCSSTSCYMVDDAFDIW

SEQ ID NO: 10059 - protein, 23 aa, Homo sapiens
CAKDLLVPPTPPQYYYYYYMDVW

SEQ ID NO: 10060 - protein, 21 aa, Homo sapiens
CARSTSLDFWSSPPPYYFDYW

SEQ ID NO: 10061 - protein, 16 aa, Homo sapiens
CAKGSTTFGSYYFDYW

SEQ ID NO: 10062 - protein, 12 aa, Homo sapiens
CLQHASYPMCSF

SEQ ID NO: 10063 - protein, 16 aa, Homo sapiens
CARVHSSTFLNWLDPW

SEQ ID NO: 10064 - protein, 20 aa, Homo sapiens
CARTVDCSGGSCYGALVDYW

SEQ ID NO: 10065 - protein, 17 aa, Homo sapiens
CASDPSYYSGSGGFDYW

SEQ ID NO: 10066 - protein, 19 aa, Homo sapiens
CARDWGGSSIMGTGIFDYW

SEQ ID NO: 10067 - protein, 25 aa, Homo sapiens
CARQQCTSVSCRQGNYFYYYYMDVW

SEQ ID NO: 10068 - protein, 20 aa, Homo sapiens
CARRRWSGYDLPEDDGFDIW

SEQ ID NO: 10069 - protein, 17 aa, Homo sapiens
CTTQYCSGTSCTSFDNW

SEQ ID NO: 10070 - protein, 14 aa, Homo sapiens
CARMYHYEGWFDPW

SEQ ID NO: 10071 - protein, 11 aa, Homo sapiens
CKQYNSYPLIF

SEQ ID NO: 10072 - protein, 23 aa, Homo sapiens
CARVGRTAYCSSTSCYGLPFDYW

SEQ ID NO: 10073 - protein, 12 aa, Homo sapiens
CVWSATNWFGPW

SEQ ID NO: 10074 - protein, 20 aa, Homo sapiens
CAKSEPQWLVSLGRSHFDYW

SEQ ID NO: 10075 - protein, 15 aa, Homo sapiens
CARDNHHAANSFDYW

SEQ ID NO: 10076 - protein, 18 aa, Homo sapiens
CARDIGQLVGIVNWFDPW

SEQ ID NO: 10077 - protein, 16 aa, Homo sapiens
CVRDSRPYSYSWFDVW

SEQ ID NO: 10078 - protein, 22 aa, Homo sapiens
CAGLGRVVYPKFRDYNYYMDVW

SEQ ID NO: 10079 - protein, 14 aa, Homo sapiens
CARVWSVGWYFDLW

SEQ ID NO: 10080 - protein, 13 aa, Homo sapiens
CNARDSSGHHVIF

SEQ ID NO: 10081 - protein, 24 aa, Homo sapiens
CARTPYDFWSGYSHYYYYYYMDVW

SEQ ID NO: 10082 - protein, 18 aa, Homo sapiens
CAHRRSGYSYGYHAFDIW

SEQ ID NO: 10083 - protein, 20 aa, Homo sapiens
CARDSNRWSYGLPHDAFDIW

SEQ ID NO: 10084 - protein, 14 aa, Homo sapiens
CLKDSRDKDYFDYW

SEQ ID NO: 10085 - protein, 22 aa, Homo sapiens
CARLFPDTAMVWDYYYYYMDVW

SEQ ID NO: 10086 - protein, 17 aa, Homo sapiens
CAREDIVDRRGDAFDFW

SEQ ID NO: 10087 - protein, 13 aa, Homo sapiens
CARNQGRFLADYW

SEQ ID NO: 10088 - protein, 17 aa, Homo sapiens
CVKDMSPWDTSAPPDYW

SEQ ID NO: 10089 - protein, 18 aa, Homo sapiens
CARHESELAVANAWFDAW

SEQ ID NO: 10090 - protein, 16 aa, Homo sapiens
CAAGPVVGEIIGLDYW

SEQ ID NO: 10091 - protein, 16 aa, Homo sapiens
CANRYSGYDHYPFEYW

SEQ ID NO: 10092 - protein, 19 aa, Homo sapiens
CARVYFGSIGVADGWIDPW

SEQ ID NO: 10093 - protein, 19 aa, Homo sapiens
CARLDSSSSSATVHAFDIW

SEQ ID NO: 10094 - protein, 20 aa, Homo sapiens
CARLTTRWEVSRAYNAIDVW

SEQ ID NO: 10095 - protein, 18 aa, Homo sapiens
CARVPGVQFSHRNWFDPW

SEQ ID NO: 10096 - protein, 12 aa, Homo sapiens
CALSSGTYYPYW

SEQ ID NO: 10097 - protein, 17 aa, Homo sapiens
CARMVDSTSWYNWFHPW

SEQ ID NO: 10098 - protein, 20 aa, Homo sapiens
CARDSDYAFWSGYYGWFDPW

SEQ ID NO: 10099 - protein, 17 aa, Homo sapiens
CAKGRCSGGSCYWIDSW

SEQ ID NO: 10100 - protein, 15 aa, Homo sapiens
CAKADTAMVGAFDIW

SEQ ID NO: 10101 - protein, 18 aa, Homo sapiens
CARGGWQWRYYYYYMDVW

SEQ ID NO: 10102 - protein, 13 aa, Homo sapiens
CARGYGSTGFDLW

SEQ ID NO: 10103 - protein, 18 aa, Homo sapiens
CATYNGDYIYDYYYMDVW

SEQ ID NO: 10104 - protein, 17 aa, Homo sapiens
CAKHHRTYSSSSSLDYW

SEQ ID NO: 10105 - protein, 19 aa, Homo sapiens
CAKETCEWLVPGLCYFDYW

SEQ ID NO: 10106 - protein, 16 aa, Homo sapiens
CAKDMQYQLLYYFDYW

SEQ ID NO: 10107 - protein, 21 aa, Homo sapiens
CARDIRPGSSWYMGRDAFDIW

SEQ ID NO: 10108 - protein, 23 aa, Homo sapiens
CARARSRYDFWSGYDASDAFDIW

SEQ ID NO: 10109 - protein, 15 aa, Homo sapiens
CARDTGVKGGAFEIW

SEQ ID NO: 10110 - protein, 14 aa, Homo sapiens
CGRSGYSGYEFDFW

SEQ ID NO: 10111 - protein, 18 aa, Homo sapiens
CARETSTGGLRFIPFGYW

SEQ ID NO: 10112 - protein, 11 aa, Homo sapiens
CSGDSGAFDYW

SEQ ID NO: 10113 - protein, 17 aa, Homo sapiens
CARDPVTGYYYYYMDVW

SEQ ID NO: 10114 - protein, 22 aa, Homo sapiens
CVRGHPYCTNSNCFTAHAFDIW

SEQ ID NO: 10115 - protein, 15 aa, Homo sapiens
CARVGADFSVPFDYW

SEQ ID NO: 10116 - protein, 20 aa, Homo sapiens
CAKEQIPPRYSSITTPFDIW

SEQ ID NO: 10117 - protein, 20 aa, Homo sapiens
CAKDYFYDTSGYFYANFDYW

SEQ ID NO: 10118 - protein, 25 aa, Homo sapiens
CARERPDLAYCRDERCYYEGYLDPW

SEQ ID NO: 10119 - protein, 17 aa, Homo sapiens
CAHRTTLFGVIQHFDSW

SEQ ID NO: 10120 - protein, 17 aa, Homo sapiens
CAREENTAMVSGVFDYW

SEQ ID NO: 10121 - protein, 14 aa, Homo sapiens
CAAGSSRLGGSDYW

SEQ ID NO: 10122 - protein, 20 aa, Homo sapiens
CAKGGYCSSTSCYYLPFDYW

SEQ ID NO: 10123 - protein, 23 aa, Homo sapiens
CARGSADCGYSSNVYSGCAFDLW

SEQ ID NO: 10124 - protein, 27 aa, Homo sapiens
CAKDEMDCSSTSCYWGWTYYYYYMDVW

SEQ ID NO: 10125 - protein, 15 aa, Homo sapiens
CAKDIVATISYPDYW

SEQ ID NO: 10126 - protein, 19 aa, Homo sapiens
CARDCRASGGSCYSGIDYW

SEQ ID NO: 10127 - protein, 17 aa, Homo sapiens
CAREADTSGYYYSFDFW

SEQ ID NO: 10128 - protein, 14 aa, Homo sapiens
CARSPRGYSYFDCW

SEQ ID NO: 10129 - protein, 19 aa, Homo sapiens
CARAPGYCSGGSCSWFDPW

SEQ ID NO: 10130 - protein, 17 aa, Homo sapiens
CAKARGGKLGTYHFDYW

SEQ ID NO: 10131 - protein, 15 aa, Homo sapiens
CAKAYSYGYSGFDYW

SEQ ID NO: 10132 - protein, 14 aa, Homo sapiens
CASHRESYGSFDVW

SEQ ID NO: 10133 - protein, 20 aa, Homo sapiens
CARAGKRGYSYGSGDYFDYW

SEQ ID NO: 10134 - protein, 16 aa, Homo sapiens
CAKERSDQVLSSFDYW

SEQ ID NO: 10135 - protein, 19 aa, Homo sapiens
CARHGDEGRIAARGYFDHW

SEQ ID NO: 10136 - protein, 12 aa, Homo sapiens
CQQANSVLGITF

SEQ ID NO: 10137 - protein, 15 aa, Homo sapiens
CAKGTGYSSGWFDYW

SEQ ID NO: 10138 - protein, 13 aa, Homo sapiens
CQQYASSPGRVTF

SEQ ID NO: 10139 - protein, 13 aa, Homo sapiens [sequence omitted]

SEQ ID NO: 10140 - protein, 11 aa, Homo sapiens
CQQRASWPVPF

SEQ ID NO: 10141 - protein, 12 aa, Homo sapiens
CATSSYYAFDNW

SEQ ID NO: 10142 - protein, 20 aa, Homo sapiens
CARDSNVIGPGVAHDVFDVW

SEQ ID NO: 10143 - protein, 16 aa, Homo sapiens
CITLYEPYYYYYIDVW

SEQ ID NO: 10144 - protein, 16 aa, Homo sapiens
CARGSSGPAESFFDSW

SEQ ID NO: 10145 - protein, 13 aa, Homo sapiens
CQQYFTTPPGCSF

SEQ ID NO: 10146 - protein, 20 aa, Homo sapiens
CARDQGEGGSYGFSDAFDIW

SEQ ID NO: 10147 - protein, 20 aa, Homo sapiens
CARGVRFFQIASYYHYMDVW

SEQ ID NO: 10148 - protein, 17 aa, Homo sapiens
CARDYMTTVTKNYFDYW

SEQ ID NO: 10149 - protein, 19 aa, Homo sapiens
CVKDIWPTVITRNYYFDYW

SEQ ID NO: 10150 - protein, 16 aa, Homo sapiens
CANQRSSGWQWWFDPW

SEQ ID NO: 10151 - protein, 12 aa, Homo sapiens
CQQSSNMPQWTF

SEQ ID NO: 10152 - protein, 14 aa, Homo sapiens
CARSTWLRGNFDYW

SEQ ID NO: 10153 - protein, 16 aa, Homo sapiens
CAAADVLLWFGEFDYW

SEQ ID NO: 10154 - protein, 12 aa, Homo sapiens [sequence omitted]

SEQ ID NO: 10155 - protein, 21 aa, Homo sapiens
CARDFRGTMIQGRVTWYFDLW

SEQ ID NO: 10156 - protein, 21 aa, Homo sapiens
CVKEGCSSSSCQRSDNWFDPW

SEQ ID NO: 10157 - protein, 17 aa, Homo sapiens
CVRNYVALPEDNWFDPW

SEQ ID NO: 10158 - protein, 25 aa, Homo sapiens
CTTVSYAFWSAYYTGEEDYYYMDVW

SEQ ID NO: 10159 - protein, 13 aa, Homo sapiens
CARAFYRGYFDPW

SEQ ID NO: 10160 - protein, 15 aa, Homo sapiens
CAKVPLYSSGGRDYW

SEQ ID NO: 10161 - protein, 14 aa, Homo sapiens
CARAKYPLDAFDIW

SEQ ID NO: 10162 - protein, 12 aa, Homo sapiens
CTRGINFLFDYW

SEQ ID NO: 10163 - protein, 30 aa, Homo sapiens
CARGHGRQDIVVVPAAKGDGFFIQSAFDIW

SEQ ID NO: 10164 - protein, 18 aa, Homo sapiens
CARHALGVPAANCWFDPW

SEQ ID NO: 10165 - protein, 13 aa, Homo sapiens
CARHGIGTNFDYW

SEQ ID NO: 10166 - protein, 18 aa, Homo sapiens
CARGGLSSDWVPHAFDIW

SEQ ID NO: 10167 - protein, 17 aa, Homo sapiens
CARPSLHGSGRDVFDIW

SEQ ID NO: 10168 - protein, 18 aa, Homo sapiens
CARIPQYSGSWSYYFDYW

SEQ ID NO: 10169 - protein, 17 aa, Homo sapiens
CARGMRCSSATCYKDYW

SEQ ID NO: 10170 - protein, 17 aa, Homo sapiens
CAKRVEYRSSSAYFDYW

SEQ ID NO: 10171 - protein, 18 aa, Homo sapiens
CAKSLKVGGATLTYFDSW

SEQ ID NO: 10172 - protein, 19 aa, Homo sapiens
CARPRLAGGYSYVDAFDMW

SEQ ID NO: 10173 - protein, 19 aa, Homo sapiens
CASTMLTMIVVVIRGFDYW

SEQ ID NO: 10174 - protein, 24 aa, Homo sapiens
CARDEGYSGSGSSYNDPNPRFDYW

SEQ ID NO: 10175 - protein, 20 aa, Homo sapiens
CASTSLNFISASDQYYFDYW

SEQ ID NO: 10176 - protein, 16 aa, Homo sapiens
CARGPLGIQLWSIDYW

SEQ ID NO: 10177 - protein, 16 aa, Homo sapiens
CARDSHERGTGWFDPW

SEQ ID NO: 10178 - protein, 18 aa, Homo sapiens
CARDGLPVGSPLNYFDYW

SEQ ID NO: 10179 - protein, 20 aa, Homo sapiens
CARTIEYCGSDSCYPRFDYW

SEQ ID NO: 10180 - protein, 19 aa, Homo sapiens
CARTTYYDILTGSRVFDYW

SEQ ID NO: 10181 - protein, 17 aa, Homo sapiens
CARDYFDASGYFYFDSW

SEQ ID NO: 10182 - protein, 19 aa, Homo sapiens
CARDPRITFNSGWYYFDKW

SEQ ID NO: 10183 - protein, 15 aa, Homo sapiens
CTSLGFTEPHNFDYW

SEQ ID NO: 10184 - protein, 16 aa, Homo sapiens
CARASIPSASGTFDIW

SEQ ID NO: 10185 - protein, 14 aa, Homo sapiens
CARRSDPLGAFDIW

SEQ ID NO: 10186 - protein, 16 aa, Homo sapiens
CARNIYGSENYYIDYW

SEQ ID NO: 10187 - protein, 19 aa, Homo sapiens
CARGQEQIGSGLVDTFDIW

SEQ ID NO: 10188 - protein, 17 aa, Homo sapiens
CARDNEFGGELVFFDYW

SEQ ID NO: 10189 - protein, 13 aa, Homo sapiens
CARDGPFDSLDYW

SEQ ID NO: 10190 - protein, 13 aa, Homo sapiens
CSREYISSWFDYW

SEQ ID NO: 10191 - protein, 18 aa, Homo sapiens
CARCYDFWSGFPNWFDPW

SEQ ID NO: 10192 - protein, 16 aa, Homo sapiens
CVKTIVETSVVFFDSW

SEQ ID NO: 10193 - protein, 18 aa, Homo sapiens
CARGDSSCASTSCPPDYW

SEQ ID NO: 10194 - protein, 14 aa, Homo sapiens
CARDSGHDWRIDYW

SEQ ID NO: 10195 - protein, 20 aa, Homo sapiens
CVKNYRGYCAIGICYTLDYW

SEQ ID NO: 10196 - protein, 18 aa, Homo sapiens
CARTSYDFFRGYSNFDYW

SEQ ID NO: 10197 - protein, 13 aa, Homo sapiens
CASSTLTDAFDLW

SEQ ID NO: 10198 - protein, 18 aa, Homo sapiens
CAKVTYYSDSNSYLFDYW

SEQ ID NO: 10199 - protein, 19 aa, Homo sapiens
CARGYWSGTSWYRFTFDSW

SEQ ID NO: 10200 - protein, 13 aa, Homo sapiens
CARELVPRNFDYW

SEQ ID NO: 10201 - protein, 18 aa, Homo sapiens
CAIQVAADYFNPVVFDYW

SEQ ID NO: 10202 - protein, 23 aa, Homo sapiens
CAKDVRRPFKGTTGTTSVTFDYW

SEQ ID NO: 10203 - protein, 26 aa, Homo sapiens
CARHYCNSTSCYRGGPEGYYYYMDVW

SEQ ID NO: 10204 - protein, 16 aa, Homo sapiens
CAKDSVEHIPDAFDIW

SEQ ID NO: 10205 - protein, 15 aa, Homo sapiens
CTRGDAGDYNFFDYW

SEQ ID NO: 10206 - protein, 21 aa, Homo sapiens
CARDLVVQGSLFGVVSFFDYW

SEQ ID NO: 10207 - protein, 21 aa, Homo sapiens
CVKDSGLGYCTNGVCTAFDHW

SEQ ID NO: 10208 - protein, 18 aa, Homo sapiens
CARHLHGSSWYRVWFDPW

SEQ ID NO: 10209 - protein, 18 aa, Homo sapiens
CAKVLGQLRITGDWFDPW

SEQ ID NO: 10210 - protein, 16 aa, Homo sapiens
CARTSNDFWTGPPDYW

SEQ ID NO: 10211 - protein, 14 aa, Homo sapiens
CARYIRQGDYFDFW

SEQ ID NO: 10212 - protein, 19 aa, Homo sapiens
CARGHNSPFPYSGSYYDYW

SEQ ID NO: 10213 - protein, 16 aa, Homo sapiens
CARMVGELYLAYFDHW

SEQ ID NO: 10214 - protein, 17 aa, Homo sapiens
CARDEGSTYPHPYFDYW

SEQ ID NO: 10215 - protein, 11 aa, Homo sapiens
CALETSFFDYW

SEQ ID NO: 10216 - protein, 20 aa, Homo sapiens
CARDIGVVPAAFLGYYMDVW

SEQ ID NO: 10217 - protein, 15 aa, Homo sapiens
CARHESGRPSYFDHW

SEQ ID NO: 10218 - protein, 16 aa, Homo sapiens
CSRDDSGWHNDAFDMW

SEQ ID NO: 10219 - protein, 17 aa, Homo sapiens
CARDRLDTPKYDVFDVW

SEQ ID NO: 10220 - protein, 21 aa, Homo sapiens
CARDREQYCSGGSCYDALDIW

SEQ ID NO: 10221 - protein, 14 aa, Homo sapiens
CARVGKNRGSFDIW

SEQ ID NO: 10222 - protein, 11 aa, Homo sapiens
CTSPGDNSDYW

SEQ ID NO: 10223 - protein, 17 aa, Homo sapiens
CAAVHDYGDYGPFFDYW

SEQ ID NO: 10224 - protein, 13 aa, Homo sapiens
CAKETPVTVFDYW

SEQ ID NO: 10225 - protein, 19 aa, Homo sapiens
CAKGGVRSNSGINYYFDYW

SEQ ID NO: 10226 - protein, 16 aa, Homo sapiens
CARPLQFFDYYYMDVW

SEQ ID NO: 10227 - protein, 21 aa, Homo sapiens
CATFYDATAYFLQGYDAFDIW

SEQ ID NO: 10228 - protein, 20 aa, Homo sapiens
CARDRLVYCSTTSCAGFDYW

SEQ ID NO: 10229 - protein, 20 aa, Homo sapiens
CAKDGQVPHDRYYNYYMDVW

SEQ ID NO: 10230 - protein, 14 aa, Homo sapiens
CSSYTTTSTLGVEF

SEQ ID NO: 10231 - protein, 20 aa, Homo sapiens
CARGSPTPDSSGSRRGFDHW

SEQ ID NO: 10232 - protein, 18 aa, Homo sapiens
CAVWIVVVPSAIEYFQPW

SEQ ID NO: 10233 - protein, 20 aa, Homo sapiens
CATISAFGILSKTRFFFDIW

SEQ ID NO: 10234 - protein, 16 aa, Homo sapiens
CAHFCSSNNCYNFDYW

SEQ ID NO: 10235 - protein, 12 aa, Homo sapiens
CQPYGTSPRWAF

SEQ ID NO: 10236 - protein, 24 aa, Homo sapiens
CAREGGVPYCSSTSCLTPYYFDYW

SEQ ID NO: 10237 - protein, 16 aa, Homo sapiens
CSKDGQGNYIRYFDYW

SEQ ID NO: 10238 - protein, 15 aa, Homo sapiens
CAQRETGGDWAFDYW

SEQ ID NO: 10239 - protein, 17 aa, Homo sapiens
CAKGSGVVTTVGYNDYW

SEQ ID NO: 10240 - protein, 15 aa, Homo sapiens
CARLGGFNSNYPDVW

SEQ ID NO: 10241 - protein, 16 aa, Homo sapiens
CARAHDRNGGLDFDYW

SEQ ID NO: 10242 - protein, 13 aa, Homo sapiens
CQQYKRWPLLVTF

SEQ ID NO: 10243 - protein, 14 aa, Homo sapiens
CARGPTSTSWFDPW

SEQ ID NO: 10244 - protein, 16 aa, Homo sapiens
CARRRGGTARPEFDYW

SEQ ID NO: 10245 - protein, 16 aa, Homo sapiens
CAKNHLPGWFNVFDIW

SEQ ID NO: 10246 - protein, 20 aa, Homo sapiens
CARDVTLSYCGGDCYLFDYW

SEQ ID NO: 10247 - protein, 18 aa, Homo sapiens
CAKVPIDYGGSRDAFDIW

SEQ ID NO: 10248 - protein, 19 aa, Homo sapiens
CAILSPSLYCAGDCDVDYW

SEQ ID NO: 10249 - protein, 20 aa, Homo sapiens
CARLGRFNILGLIITPFDYW

SEQ ID NO: 10250 - protein, 15 aa, Homo sapiens
CARHEFRDWDAFDIW

SEQ ID NO: 10251 - protein, 17 aa, Homo sapiens
CARDLGLTGTTGDFDYW

SEQ ID NO: 10252 - protein, 15 aa, Homo sapiens
CIKDLRPVSVAPDVW

SEQ ID NO: 10253 - protein, 14 aa, Homo sapiens
CAKFEYSSSSVDYW

SEQ ID NO: 10254 - protein, 17 aa, Homo sapiens
CARGRKGNDGYNWFDSW

SEQ ID NO: 10255 - protein, 18 aa, Homo sapiens
CASEIWDQGGYRNAFDIW

SEQ ID NO: 10256 - protein, 18 aa, Homo sapiens
CAHRLGGYNWNDGYCDYW

SEQ ID NO: 10257 - protein, 12 aa, Homo sapiens
CAHTVRGYFQFW

SEQ ID NO: 10258 - protein, 18 aa, Homo sapiens
CARGPHCSAGNCFSFDSW

SEQ ID NO: 10259 - protein, 12 aa, Homo sapiens [sequence omitted]

SEQ ID NO: 10260 - protein, 26 aa, Homo sapiens
CARGQVVMLPAATGGLLGVRDAFDMW

SEQ ID NO: 10261 - protein, 15 aa, Homo sapiens
CARGKEGYGGNLDYW

SEQ ID NO: 10262 - protein, 20 aa, Homo sapiens
CARRDYDILTGDYYDALDIW

SEQ ID NO: 10263 - protein, 17 aa, Homo sapiens
CARSGVLWLETNWFDPW

SEQ ID NO: 10264 - protein, 19 aa, Homo sapiens
CAKGHSFNNWNDVSALDIW

SEQ ID NO: 10265 - protein, 18 aa, Homo sapiens
CARGEVRIIDKGPLFDNW

SEQ ID NO: 10266 - protein, 17 aa, Homo sapiens
CARGAVSFVEKTAFDVW

SEQ ID NO: 10267 - protein, 17 aa, Homo sapiens
CARGCRYCSGAQHGDYW

SEQ ID NO: 10268 - protein, 19 aa, Homo sapiens
CAKMGWDIVMEDYYYMDVW

SEQ ID NO: 10269 - protein, 12 aa, Homo sapiens
CARTIWNVFDVW

SEQ ID NO: 10270 - protein, 21 aa, Homo sapiens
CALKRIKLIRGLITGNYFDYW

SEQ ID NO: 10271 - protein, 22 aa, Homo sapiens
CARTPQGDIVVVPAAIGWFDPW

SEQ ID NO: 10272 - protein, 13 aa, Homo sapiens
CATHYDFWSVDYW

SEQ ID NO: 10273 - protein, 15 aa, Homo sapiens
CARLIDGPATSFDHW

SEQ ID NO: 10274 - protein, 19 aa, Homo sapiens
CVRDHPNSRFLVDHAFDIW

SEQ ID NO: 10275 - protein, 16 aa, Homo sapiens
CAHSPAVALGYYFDFW

SEQ ID NO: 10276 - protein, 14 aa, Homo sapiens
CATVGPPAPLFDPW

SEQ ID NO: 10277 - protein, 18 aa, Homo sapiens
CARDRLRFLNRGYYMDVW

SEQ ID NO: 10278 - protein, 19 aa, Homo sapiens
CARVVEQQWLAQGGWFDPW

SEQ ID NO: 10279 - protein, 19 aa, Homo sapiens
CASGYCSSTSCYLNTFDIW

SEQ ID NO: 10280 - protein, 37 aa, Homo sapiens
CTAYLQISSLKAEDTAVYYCARGREDYGFWGDHMDVW

SEQ ID NO: 10281 - protein, 18 aa, Homo sapiens
CARGRRQLSRRGYYFDYW

SEQ ID NO: 10282 - protein, 14 aa, Homo sapiens
CAKDSRPNWGLDYW

SEQ ID NO: 10283 - protein, 19 aa, Homo sapiens
CAKDYCSSTSCYTGYFDYW

SEQ ID NO: 10284 - protein, 20 aa, Homo sapiens
CARRIDVTGTIPNDNWFDLW

SEQ ID NO: 10285 - protein, 15 aa, Homo sapiens
CARGGLWLVRGFDYW

SEQ ID NO: 10286 - protein, 15 aa, Homo sapiens
CGKSRLLLHDAFDIW

SEQ ID NO: 10287 - protein, 16 aa, Homo sapiens
CAKDLSSLSPYYMDVW

SEQ ID NO: 10288 - protein, 15 aa, Homo sapiens
CAKGGGTLDYYVDVW

SEQ ID NO: 10289 - protein, 20 aa, Homo sapiens
CASDGESEGVAGQVYYFDYW

SEQ ID NO: 10290 - protein, 17 aa, Homo sapiens
CAKDRVRWNDEGAFDIW

SEQ ID NO: 10291 - protein, 14 aa, Homo sapiens
CQSADSSGINPWVF

SEQ ID NO: 10292 - protein, 14 aa, Homo sapiens
CALNSGYYLYFDYW

SEQ ID NO: 10293 - protein, 16 aa, Homo sapiens
CARSEGKTGNWYFDLW

SEQ ID NO: 10294 - protein, 18 aa, Homo sapiens
CARCIYDFWSGCHALDVW

SEQ ID NO: 10295 - protein, 16 aa, Homo sapiens
CARSSSSSRPDPFDYW

SEQ ID NO: 10296 - protein, 27 aa, Homo sapiens
CARGDYSQLFHPNDSLSGFYVRAFEIW

SEQ ID NO: 10297 - protein, 22 aa, Homo sapiens
CARGTYDCGSTSCHTGDAFDIW

SEQ ID NO: 10298 - protein, 18 aa, Homo sapiens
CVRGDFWSGYAHDAFDVW

SEQ ID NO: 10299 - protein, 18 aa, Homo sapiens
CARSGVTYDTSGYTFDYW

SEQ ID NO: 10300 - protein, 13 aa, Homo sapiens
CGYSYGAGAFDIW

SEQ ID NO: 10301 - protein, 21 aa, Homo sapiens
CARHMATIYCSSTSCYAFDIW

SEQ ID NO: 10302 - protein, 15 aa, Homo sapiens
CAKSRTSTWSYFDDW

SEQ ID NO: 10303 - protein, 15 aa, Homo sapiens
CASSGYSLVGAFDIW

SEQ ID NO: 10304 - protein, 18 aa, Homo sapiens
CAKGKITTGTTRSEFDYW

SEQ ID NO: 10305 - protein, 25 aa, Homo sapiens
CAKDRGAQNYYDRSGHYFPDVFDMW

SEQ ID NO: 10306 - protein, 22 aa, Homo sapiens
CARRSLLGLAQSNYRTTAFDIW

SEQ ID NO: 10307 - protein, 20 aa, Homo sapiens
CAKDFHVTMIVVVITTLDYW

SEQ ID NO: 10308 - protein, 21 aa, Homo sapiens
CARHRRYCGSTSCYADDFDYW

SEQ ID NO: 10309 - protein, 14 aa, Homo sapiens
CASSSGWYPRLDYW

SEQ ID NO: 10310 - protein, 15 aa, Homo sapiens
CAKLGGYSSGYSDYW

SEQ ID NO: 10311 - protein, 20 aa, Homo sapiens
CAHRPMGYISGWSNCYFDYW

SEQ ID NO: 10312 - protein, 25 aa, Homo sapiens
CAKAQGLYCSSTSCYVPAEYYFDYW

SEQ ID NO: 10313 - protein, 18 aa, Homo sapiens
CARALLRTWSGGSYYDFW

SEQ ID NO: 10314 - protein, 15 aa, Homo sapiens
CVKGSSWSHWDFDYW

SEQ ID NO: 10315 - protein, 24 aa, Homo sapiens
CARGSCPSSNTRCYNLGSWYFDLW

SEQ ID NO: 10316 - protein, 14 aa, Homo sapiens
CVGEPPSTGKFDYW

SEQ ID NO: 10317 - protein, 18 aa, Homo sapiens
CAKGFNSGWTYASYFHHW

SEQ ID NO: 10318 - protein, 17 aa, Homo sapiens
CAKELGYGDYVVDFDYW

SEQ ID NO: 10319 - protein, 13 aa, Homo sapiens
CARGGFGKPFDYW

SEQ ID NO: 10320 - protein, 21 aa, Homo sapiens
CARDSIFWSDYANEDDAFDLW

SEQ ID NO: 10321 - protein, 20 aa, Homo sapiens
CATAFVLAMTHGTYDPFDIW

SEQ ID NO: 10322 - protein, 18 aa, Homo sapiens
CAKSSRGVVVAATRFDYW

SEQ ID NO: 10323 - protein, 16 aa, Homo sapiens
CAKVAGRLISDYIDYW

SEQ ID NO: 10324 - protein, 17 aa, Homo sapiens
CTRHFSLSGDYLGFDYW

SEQ ID NO: 10325 - protein, 19 aa, Homo sapiens
CAKDTEQWLVHPMASFDYW

SEQ ID NO: 10326 - protein, 17 aa, Homo sapiens
CARANRDDGGTYYFDYW

SEQ ID NO: 10327 - protein, 11 aa, Homo sapiens
CQQYNAWPNSF

SEQ ID NO: 10328 - protein, 17 aa, Homo sapiens
CARCRNEQWLEAPSDYW

SEQ ID NO: 10329 - protein, 14 aa, Homo sapiens
CARIGWVQQVVDYW

SEQ ID NO: 10330 - protein, 14 aa, Homo sapiens
CARIRNGDYGFDSW

SEQ ID NO: 10331 - protein, 22 aa, Homo sapiens
CARDVPGNDFWSGSYYYYMDVW

SEQ ID NO: 10332 - protein, 12 aa, Homo sapiens [sequence omitted]

SEQ ID NO: 10333 - protein, 22 aa, Homo sapiens
CARAARGGYFPHYHYYHYMDVW

SEQ ID NO: 10334 - protein, 16 aa, Homo sapiens
CARGPTGYSYGLTDYW

SEQ ID NO: 10335 - protein, 19 aa, Homo sapiens
CARTGYCTTATCFRWFDPW

SEQ ID NO: 10336 - protein, 17 aa, Homo sapiens
CAKRMYSGSYFAAFDIW

SEQ ID NO: 10337 - protein, 17 aa, Homo sapiens
CARDNSIEDINWWFDPW

SEQ ID NO: 10338 - protein, 19 aa, Homo sapiens
CARRAMNVVAPFDGHFEYW

SEQ ID NO: 10339 - protein, 18 aa, Homo sapiens
CARQGRGSDPTAPQFDPW

SEQ ID NO: 10340 - protein, 17 aa, Homo sapiens
CARRVGIAVGVNWFDPW

SEQ ID NO: 10341 - protein, 11 aa, Homo sapiens
CMHSLQTPFAF

SEQ ID NO: 10342 - protein, 12 aa, Homo sapiens
CQNYNRAPGCSF

SEQ ID NO: 10343 - protein, 21 aa, Homo sapiens
CARDFAQQLVPGESGYYFDYW

SEQ ID NO: 10344 - protein, 18 aa, Homo sapiens
CARMNCSGPSCYPWFDYW

SEQ ID NO: 10345 - protein, 12 aa, Homo sapiens
CQQYDNYFMYNF

SEQ ID NO: 10346 - protein, 21 aa, Homo sapiens
CGREPTIFGASGSFFNWLDPW

SEQ ID NO: 10347 - protein, 23 aa, Homo sapiens
CARDGDCNRSNCYRYYSYYLDVW

SEQ ID NO: 10348 - protein, 18 aa, Homo sapiens
CARDRAPISSSPYYFDYW

SEQ ID NO: 10349 - protein, 20 aa, Homo sapiens
CAKGRDYDILTGYLDGFDIW

SEQ ID NO: 10350 - protein, 16 aa, Homo sapiens
CARSPSSWYPLRFDYW

SEQ ID NO: 10351 - protein, 16 aa, Homo sapiens
CARVRHYGDYVWFDPW

SEQ ID NO: 10352 - protein, 16 aa, Homo sapiens
CTTDVSGYSYVNFDYW

SEQ ID NO: 10353 - protein, 14 aa, Homo sapiens
CARDNRVLRSFDPW

SEQ ID NO: 10354 - protein, 18 aa, Homo sapiens
CARDPTKFSSGWYYFDHW

SEQ ID NO: 10355 - protein, 19 aa, Homo sapiens
CAHRPSDDILTGYSWFDPW

SEQ ID NO: 10356 - protein, 17 aa, Homo sapiens
CARDRIGYMTTVTTDYW

SEQ ID NO: 10357 - protein, 16 aa, Homo sapiens
CAKGRSGYYAGASDYW

SEQ ID NO: 10358 - protein, 18 aa, Homo sapiens
CGKDFGRFSGSLFYLDSW

SEQ ID NO: 10359 - protein, 22 aa, Homo sapiens
CARHLPTDCSILNCRHNWFDPW

SEQ ID NO: 10360 - protein, 14 aa, Homo sapiens
CARLNGGSSAFDPW

SEQ ID NO: 10361 - protein, 15 aa, Homo sapiens
CTITIISGWPNFDFW

SEQ ID NO: 10362 - protein, 22 aa, Homo sapiens
CAKNVPRSIFGVVLLEGYFDYW

SEQ ID NO: 10363 - protein, 19 aa, Homo sapiens
CARRFSYDSSTYYYYFDYW

SEQ ID NO: 10364 - protein, 17 aa, Homo sapiens
CARVRVIDSTEGAFDLW

SEQ ID NO: 10365 - protein, 10 aa, Homo sapiens
CQQHHNLPFF

SEQ ID NO: 10366 - protein, 15 aa, Homo sapiens
CQVWDSTSDHPFFAF

SEQ ID NO: 10367 - protein, 20 aa, Homo sapiens
CARQGRDPAIYGVVTTFDYW

SEQ ID NO: 10368 - protein, 15 aa, Homo sapiens
CARMRGVYNKVFDSW

SEQ ID NO: 10369 - protein, 16 aa, Homo sapiens
CAHRRLHIAAAGFDYW

SEQ ID NO: 10370 - protein, 22 aa, Homo sapiens
CTLFPYTTLFRSLLSTRDFDSW

SEQ ID NO: 10371 - protein, 16 aa, Homo sapiens
CARSIAVAVPYYFDYW

SEQ ID NO: 10372 - protein, 20 aa, Homo sapiens
CARDTYYESSGHYEDWFDSW

SEQ ID NO: 10373 - protein, 15 aa, Homo sapiens
CARVDAVAGSYFDYW

SEQ ID NO: 10374 - protein, 17 aa, Homo sapiens
CARGPHIYSDYWSFDFW

SEQ ID NO: 10375 - protein, 18 aa, Homo sapiens
CARLGYNYDFDHDAFDLW

SEQ ID NO: 10376 - protein, 18 aa, Homo sapiens
CARGTGFGFSAADYFNSW

SEQ ID NO: 10377 - protein, 17 aa, Homo sapiens
CAHRRGYSYGLNWFDPW

SEQ ID NO: 10378 - protein, 17 aa, Homo sapiens
CARAGDYSNYQWHVDYW

SEQ ID NO: 10379 - protein, 15 aa, Homo sapiens
CQSADTSGSYLNWKF

SEQ ID NO: 10380 - protein, 17 aa, Homo sapiens
CAGGGGYSYGHIWFDPW

SEQ ID NO: 10381 - protein, 22 aa, Homo sapiens
CARPVVPAAISAGDRGNWFDPW

SEQ ID NO: 10382 - protein, 17 aa, Homo sapiens
CQVWDSSTDSRSDQVVF

SEQ ID NO: 10383 - protein, 24 aa, Homo sapiens
CAKIQLENVDTAMAPGYYYYMDVW

SEQ ID NO: 10384 - protein, 19 aa, Homo sapiens
CAKDRTQAKYNFGYYFDYW

SEQ ID NO: 10385 - protein, 13 aa, Homo sapiens
CQSYDHTNKNWLF

SEQ ID NO: 10386 - protein, 14 aa, Homo sapiens
CARGSSNYYSIDYW

SEQ ID NO: 10387 - protein, 17 aa, Homo sapiens
CARVEVYDSGYRAFDIW

SEQ ID NO: 10388 - protein, 20 aa, Homo sapiens
CARAFWYDSSGFPWVFFDSW

SEQ ID NO: 10389 - protein, 19 aa, Homo sapiens
CARSPSRVDTAYNWYFDLW

SEQ ID NO: 10390 - protein, 16 aa, Homo sapiens
CAKDYSSGWEHCFDIW

SEQ ID NO: 10391 - protein, 17 aa, Homo sapiens
CATVEWLASYFYYTDVW

SEQ ID NO: 10392 - protein, 15 aa, Homo sapiens
CAKVLAGLTYYFDYW

SEQ ID NO: 10393 - protein, 18 aa, Homo sapiens
CASSPGSSSWYRHAFDIW

SEQ ID NO: 10394 - protein, 23 aa, Homo sapiens
CARDHKPADSSAWPPSHWYFDLW

SEQ ID NO: 10395 - protein, 17 aa, Homo sapiens
CARDLRIVGATADFDLW

SEQ ID NO: 10396 - protein, 19 aa, Homo sapiens
CARDLGDIVATTHSRGDYW

SEQ ID NO: 10397 - protein, 16 aa, Homo sapiens
CARRYCSGGSCSLDYW

SEQ ID NO: 10398 - protein, 15 aa, Homo sapiens
CAKDTHYDSSGGDYW

SEQ ID NO: 10399 - protein, 21 aa, Homo sapiens
CARGVLQAAGQSGGWYGFDVW

SEQ ID NO: 10400 - protein, 17 aa, Homo sapiens
CAKDKGYSYGHYYMDVW

SEQ ID NO: 10401 - protein, 21 aa, Homo sapiens
CARVYNYCSSTSCYRGFFDYW

SEQ ID NO: 10402 - protein, 22 aa, Homo sapiens
CARGRYYYGSGSYYAPRYFDYW

SEQ ID NO: 10403 - protein, 19 aa, Homo sapiens
CARVQYGDSVLILNWFDPW

SEQ ID NO: 10404 - protein, 20 aa, Homo sapiens
CARDADTLVVVPAATLFDYW

SEQ ID NO: 10405 - protein, 12 aa, Homo sapiens
CQQSYDAPRIVF

SEQ ID NO: 10406 - protein, 14 aa, Homo sapiens
CAKDHGLLTYFDLW

SEQ ID NO: 10407 - protein, 13 aa, Homo sapiens
CNSRDSSDNPSLF

SEQ ID NO: 10408 - protein, 16 aa, Homo sapiens
CARVPVATPGMGIDYW

SEQ ID NO: 10409 - protein, 16 aa, Homo sapiens
CARGVSSSYYHYLDYW

SEQ ID NO: 10410 - protein, 13 aa, Homo sapiens
CGGVAGIEIFDYW

SEQ ID NO: 10411 - protein, 14 aa, Homo sapiens
CANYNWNYAYSDYW

SEQ ID NO: 10412 - protein, 21 aa, Homo sapiens
CAKAQGYSYGSYGDYYYMDVW

SEQ ID NO: 10413 - protein, 26 aa, Homo sapiens
CTTLATGDFWGGSWTIHDYYYYMDVW

SEQ ID NO: 10414 - protein, 11 aa, Homo sapiens
CQSYDSSMMMF

SEQ ID NO: 10415 - protein, 13 aa, Homo sapiens
CARVLLSGRLDYW

SEQ ID NO: 10416 - protein, 16 aa, Homo sapiens
CAKGSRSSRPYYFDFW

SEQ ID NO: 10417 - protein, 17 aa, Homo sapiens
CAKDYMVDFWSGYLGYW

SEQ ID NO: 10418 - protein, 17 aa, Homo sapiens
CAKDRGKNWDYNWLDPW

SEQ ID NO: 10419 - protein, 14 aa, Homo sapiens
CVESSGSYFYFDYW

SEQ ID NO: 10420 - protein, 25 aa, Homo sapiens
CAKISSPGYYDFRSAFPSGWYFDLW

SEQ ID NO: 10421 - protein, 21 aa, Homo sapiens
CAKDYLYCSGDSCHNKAVDVW

SEQ ID NO: 10422 - protein, 12 aa, Homo sapiens
CAHSLNGAADYW

SEQ ID NO: 10423 - protein, 18 aa, Homo sapiens
CARLRYNWTDVENAFDIW

SEQ ID NO: 10424 - protein, 18 aa, Homo sapiens
CARDRHYTGIYGSSFDYW

SEQ ID NO: 10425 - protein, 20 aa, Homo sapiens
CARQSFKVGPTKGDDAFDIW

SEQ ID NO: 10426 - protein, 18 aa, Homo sapiens
CARDRDSSGYYLDAFDIW

SEQ ID NO: 10427 - protein, 16 aa, Homo sapiens
CASGGQVAGTDAFDIW

SEQ ID NO: 10428 - protein, 18 aa, Homo sapiens
CAREHLGCTTGTTCVDYW

SEQ ID NO: 10429 - protein, 14 aa, Homo sapiens
CAKHPNSIAEFDHW

SEQ ID NO: 10430 - protein, 19 aa, Homo sapiens
CARDGWYSSSSVGFSLDYW

SEQ ID NO: 10431 - protein, 19 aa, Homo sapiens
CARGCSSANCPIEDAFDIW

SEQ ID NO: 10432 - protein, 22 aa, Homo sapiens
CARGKGPTSIVDLVFEYFFDSW

SEQ ID NO: 10433 - protein, 15 aa, Homo sapiens
CAAAKVGATIYWDYW

SEQ ID NO: 10434 - protein, 17 aa, Homo sapiens
CTRPVVPDEKNDAFDIW

SEQ ID NO: 10435 - protein, 12 aa, Homo sapiens
CNSYGGSNNFLF

SEQ ID NO: 10436 - protein, 18 aa, Homo sapiens
CSEGTPSGYINYDPFDIW

SEQ ID NO: 10437 - protein, 19 aa, Homo sapiens
CVRGGSVVEIDGVAWFDPW

SEQ ID NO: 10438 - protein, 20 aa, Homo sapiens
CARYDYSDRSGDPPGAFDIW

SEQ ID NO: 10439 - protein, 20 aa, Homo sapiens
CAKDTSYVWGSYRLNYFDYW

SEQ ID NO: 10440 - protein, 17 aa, Homo sapiens
CARVSIPRSGYDYFDFW

SEQ ID NO: 10441 - protein, 18 aa, Homo sapiens
CAIPITMVPGAANWFDPW

SEQ ID NO: 10442 - protein, 18 aa, Homo sapiens
CAKLVTSDREPLYYFDFW

SEQ ID NO: 10443 - protein, 19 aa, Homo sapiens
CARDHHCSGTSCTQRTDYW

SEQ ID NO: 10444 - protein, 20 aa, Homo sapiens
CAKERGSSWYLFLLFHFDYW

SEQ ID NO: 10445 - protein, 14 aa, Homo sapiens
CQSADNDGFYHWVF

SEQ ID NO: 10446 - protein, 21 aa, Homo sapiens
CANLLYFYNMAGPPDEDFQHW

SEQ ID NO: 10447 - protein, 15 aa, Homo sapiens
CAKADWGGLYYFDYW

SEQ ID NO: 10448 - protein, 17 aa, Homo sapiens
CAKSTYSGYDWAEFDSW

SEQ ID NO: 10449 - protein, 13 aa, Homo sapiens
CTREGRGGNFDNW

SEQ ID NO: 10450 - protein, 23 aa, Homo sapiens
CVKDFTGVPAAETSYHTYYMDVW

SEQ ID NO: 10451 - protein, 13 aa, Homo sapiens
CARGDYGRVLDYW

SEQ ID NO: 10452 - protein, 16 aa, Homo sapiens
CARAAGTALDNAFNIW

SEQ ID NO: 10453 - protein, 14 aa, Homo sapiens
CAKLSPVKKFFDYW

SEQ ID NO: 10454 - protein, 16 aa, Homo sapiens
CARLDRLLYRDAFDIW

SEQ ID NO: 10455 - protein, 18 aa, Homo sapiens
CARHPRSVIIFGYYFDYW

SEQ ID NO: 10456 - protein, 19 aa, Homo sapiens
CTKDRHHRGIASATTFQYW

SEQ ID NO: 10457 - protein, 20 aa, Homo sapiens
CARSHCSSTSCYYGGWFDPW

SEQ ID NO: 10458 - protein, 18 aa, Homo sapiens
CARENGYSTSHDDYFDFW

SEQ ID NO: 10459 - protein, 14 aa, Homo sapiens
CARITVDTAAFDIW

SEQ ID NO: 10460 - protein, 21 aa, Homo sapiens
CAKGQSRGYSNTWYQEYFQHW

SEQ ID NO: 10461 - protein, 20 aa, Homo sapiens
CAKTGSWHIVVTHKGGFDPW

SEQ ID NO: 10462 - protein, 16 aa, Homo sapiens
CARQGVIRGVDTFDIW

SEQ ID NO: 10463 - protein, 19 aa, Homo sapiens
CVNIGCTSINCYFGAKDVW

SEQ ID NO: 10464 - protein, 17 aa, Homo sapiens
CGRLAIVPGATKWFDSW

SEQ ID NO: 10465 - protein, 21 aa, Homo sapiens
CARHRGFCSSTSCFEWYFDYW

SEQ ID NO: 10466 - protein, 15 aa, Homo sapiens
CAKDLSSVPGYFDLW

SEQ ID NO: 10467 - protein, 19 aa, Homo sapiens
CAKDHYFGVVISDSYWDYW

SEQ ID NO: 10468 - protein, 13 aa, Homo sapiens
CARDSSMGWLDPW

SEQ ID NO: 10469 - protein, 23 aa, Homo sapiens
CARAYHQDYYDSSGYYLHYFDYW

SEQ ID NO: 10470 - protein, 24 aa, Homo sapiens
CARDGFCNTVACYGVDYYHYMDVW

SEQ ID NO: 10471 - protein, 16 aa, Homo sapiens
CARLRGLTAMVPADYW

SEQ ID NO: 10472 - protein, 23 aa, Homo sapiens
CARIRFRDYDVLTGFVLGGFDTW

SEQ ID NO: 10473 - protein, 17 aa, Homo sapiens
CARHSGYYTEKYYFDYW

SEQ ID NO: 10474 - protein, 12 aa, Homo sapiens
CSSYADNNSLLF

SEQ ID NO: 10475 - protein, 14 aa, Homo sapiens
CARHGSSNWPIDYW

SEQ ID NO: 10476 - protein, 18 aa, Homo sapiens
CARERGIVWSGRGGIDYW

SEQ ID NO: 10477 - protein, 18 aa, Homo sapiens
CARVHCSTTTCWVYFDYW

SEQ ID NO: 10478 - protein, 15 aa, Homo sapiens
CTTDLIAVAGDFDYW

SEQ ID NO: 10479 - protein, 16 aa, Homo sapiens
CAKGDGDNIPWYFDLW

SEQ ID NO: 10480 - protein, 14 aa, Homo sapiens
CVLYMGTAISAYVF

SEQ ID NO: 10481 - protein, 15 aa, Homo sapiens
CAKDIGSGSPLFDHW

SEQ ID NO: 10482 - protein, 14 aa, Homo sapiens
CARDMAHINIIDYW

SEQ ID NO: 10483 - protein, 14 aa, Homo sapiens
CAKEIRRHFDFDYW

SEQ ID NO: 10484 - protein, 14 aa, Homo sapiens
CARVFGGDCQIDYW

SEQ ID NO: 10485 - protein, 19 aa, Homo sapiens
CAHGLYCSGATCSDYFDYW

SEQ ID NO: 10486 - protein, 23 aa, Homo sapiens
CARVRSSTSCYTSCVDYYYMDVW

SEQ ID NO: 10487 - protein, 22 aa, Homo sapiens
CARQRYCSGGSCYSSHWYFDLW

SEQ ID NO: 10488 - protein, 22 aa, Homo sapiens
CTREFLEWLPTSLYNFYYMDVW

SEQ ID NO: 10489 - protein, 15 aa, Homo sapiens
CAKEGSITLSPIDYW

SEQ ID NO: 10490 - protein, 14 aa, Homo sapiens
CARKLDSSSSFDPW

SEQ ID NO: 10491 - protein, 16 aa, Homo sapiens
CARDITAVAGQTFDYW

SEQ ID NO: 10492 - protein, 22 aa, Homo sapiens
CVRDAEYCSGGSCFSYWYFDLW

SEQ ID NO: 10493 - protein, 18 aa, Homo sapiens
CARPQAEYSSGWSGIDYW

SEQ ID NO: 10494 - protein, 19 aa, Homo sapiens
CARLTGFCAGSGCYSFDFW

SEQ ID NO: 10495 - protein, 16 aa, Homo sapiens
CARMPLWFGELFPDYW

SEQ ID NO: 10496 - protein, 22 aa, Homo sapiens
CASEITYYYDSSGSPRRAFDIW

SEQ ID NO: 10497 - protein, 27 aa, Homo sapiens
CARGSSSTSVAAVGPLAVYDYYYMDVW

SEQ ID NO: 10498 - protein, 13 aa, Homo sapiens
CSSYADSHNFGVF

SEQ ID NO: 10499 - protein, 17 aa, Homo sapiens
CARRPYNWNDPYYFDYW

SEQ ID NO: 10500 - protein, 19 aa, Homo sapiens
CARVVPTCGHSSCPENDYW

SEQ ID NO: 10501 - protein, 16 aa, Homo sapiens
CARGKCGSTSCYFEYW

SEQ ID NO: 10502 - protein, 17 aa, Homo sapiens
CARMLYGDYSGNMIDYW

SEQ ID NO: 10503 - protein, 22 aa, Homo sapiens
CARDRKYYDFWSGYQDNWFDPW

SEQ ID NO: 10504 - protein, 19 aa, Homo sapiens
CARVSYGSYWDYYYYMDVW

SEQ ID NO: 10505 - protein, 19 aa, Homo sapiens
CARAIYDFWSGYTDAFDIW

SEQ ID NO: 10506 - protein, 16 aa, Homo sapiens
CVKGRLASSPEAFDIW

SEQ ID NO: 10507 - protein, 13 aa, Homo sapiens
CARGDLMGFFDIW

SEQ ID NO: 10508 - protein, 23 aa, Homo sapiens
CARRSRCDSATCYSGDTTWFDPW

SEQ ID NO: 10509 - protein, 20 aa, Homo sapiens
CARHYSGYSYGYEMNWFDPW

SEQ ID NO: 10510 - protein, 18 aa, Homo sapiens
CARIPNDYTNYHYYFDYW

SEQ ID NO: 10511 - protein, 18 aa, Homo sapiens
CARGDSYDSSGWDAFDIW

SEQ ID NO: 10512 - protein, 17 aa, Homo sapiens
CAKDTQYSSSWDYFDYW

SEQ ID NO: 10513 - protein, 18 aa, Homo sapiens
CVKEIGYGSGTYDYFDYW

SEQ ID NO: 10514 - protein, 17 aa, Homo sapiens
CARGSRTSSWSPSFDYW

SEQ ID NO: 10515 - protein, 20 aa, Homo sapiens
CARSPIAAAPSLLGNWFDPW

SEQ ID NO: 10516 - protein, 14 aa, Homo sapiens
CAKVQSREEAFDYW

SEQ ID NO: 10517 - protein, 19 aa, Homo sapiens
CARDSSSRWYDPDNWFDPW

SEQ ID NO: 10518 - protein, 16 aa, Homo sapiens
CARENIVIVPGAPDYW

SEQ ID NO: 10519 - protein, 16 aa, Homo sapiens
CAKDSRGYSYGPNDYW

SEQ ID NO: 10520 - protein, 16 aa, Homo sapiens
CARDYTTVASMAFDIW

SEQ ID NO: 10521 - protein, 10 aa, Homo sapiens
CARDTTFDIW

SEQ ID NO: 10522 - protein, 20 aa, Homo sapiens
CARDFGSIISRVTTGAFHIW

SEQ ID NO: 10523 - protein, 21 aa, Homo sapiens
CAKDTGGNYYDSSGSSHFDYW

SEQ ID NO: 10524 - protein, 15 aa, Homo sapiens
CAGGWKPGRGAFDIW

SEQ ID NO: 10525 - protein, 19 aa, Homo sapiens
CAKAIGYNSIAAAGPFDYW

SEQ ID NO: 10526 - protein, 25 aa, Homo sapiens
CARHSPRYCSDNGWNFGAAEYFHNW

SEQ ID NO: 10527 - protein, 18 aa, Homo sapiens
CARVYAENGIVVSWFHPW

SEQ ID NO: 10528 - protein, 15 aa, Homo sapiens
CAKGGMAVADYFDYW

SEQ ID NO: 10529 - protein, 13 aa, Homo sapiens
CGKLRTYYYVDVW

SEQ ID NO: 10530 - protein, 23 aa, Homo sapiens
CARGVVPDYDFWSAYEGNWFEPW

SEQ ID NO: 10531 - protein, 23 aa, Homo sapiens
CARDRLRGLELTNPSDGYYFDYW

SEQ ID NO: 10532 - protein, 18 aa, Homo sapiens
CARTLWDYYDLNIYHDYW

SEQ ID NO: 10533 - protein, 21 aa, Homo sapiens
CVKHTNDGQDYDGYSDYFDYW

SEQ ID NO: 10534 - protein, 16 aa, Homo sapiens
CARGGQQARGNWFDPW

SEQ ID NO: 10535 - protein, 17 aa, Homo sapiens
CARRYRRHSTDWYFDLW

SEQ ID NO: 10536 - protein, 16 aa, Homo sapiens
CARDRQDISYYYMDVW

SEQ ID NO: 10537 - protein, 12 aa, Homo sapiens
CVRGYDYSADYW

SEQ ID NO: 10538 - protein, 17 aa, Homo sapiens
CTKDRYCSSTSCPLDYW

SEQ ID NO: 10539 - protein, 19 aa, Homo sapiens
CARDFGYCSRTTCSYFDYW

SEQ ID NO: 10540 - protein, 13 aa, Homo sapiens
CASRYSNDPFDYW

SEQ ID NO: 10541 - protein, 18 aa, Homo sapiens
CAREGVVLPDAIAHFDYW

SEQ ID NO: 10542 - protein, 15 aa, Homo sapiens
CASASSYGRRYFDLW

SEQ ID NO: 10543 - protein, 14 aa, Homo sapiens
CARFKQQLGYFDLW

SEQ ID NO: 10544 - protein, 16 aa, Homo sapiens
CAKDLHGGYVKYFDDW

SEQ ID NO: 10545 - protein, 11 aa, Homo sapiens [sequence omitted]

SEQ ID NO: 10546 - protein, 16 aa, Homo sapiens
CAKEFDNWNDGAFDIW

SEQ ID NO: 10547 - protein, 16 aa, Homo sapiens
CARNTVAGTHWYFDLW

SEQ ID NO: 10548 - protein, 20 aa, Homo sapiens
CARTPGYCSSTSCYTYFDYW

SEQ ID NO: 10549 - protein, 17 aa, Homo sapiens
CAKGSAPYSVSNWFDPW

SEQ ID NO: 10550 - protein, 23 aa, Homo sapiens
CAKPVGYCSGGSCAAFDWYFDLW

SEQ ID NO: 10551 - protein, 14 aa, Homo sapiens
CAVWDDSLPGRWLF

SEQ ID NO: 10552 - protein, 18 aa, Homo sapiens
CAKDLSVGLRILDAFDIW

SEQ ID NO: 10553 - protein, 23 aa, Homo sapiens
CARHVSANYCSSTSCNYWYFDLW

SEQ ID NO: 10554 - protein, 13 aa, Homo sapiens
CATIGSLDSFDIW

SEQ ID NO: 10555 - protein, 25 aa, Homo sapiens
CARHRTTGSYGGTYGVLPPTNYDYW

SEQ ID NO: 10556 - protein, 16 aa, Homo sapiens
CARVDQWLEAYHFEYW

SEQ ID NO: 10557 - protein, 18 aa, Homo sapiens
CAHRHSFYYDSLGAFDMW

SEQ ID NO: 10558 - protein, 15 aa, Homo sapiens
CATHGSLNRDYFDYW

SEQ ID NO: 10559 - protein, 15 aa, Homo sapiens
CVISIPSVSWGEDYW

SEQ ID NO: 10560 - protein, 22 aa, Homo sapiens
CARVDCSSTSCYSPARVYFDYW

SEQ ID NO: 10561 - protein, 14 aa, Homo sapiens
CNSRDRSGNHYWLF

SEQ ID NO: 10562 - protein, 16 aa, Homo sapiens
CAKADDVAVSDNFEYW

SEQ ID NO: 10563 - protein, 13 aa, Homo sapiens
CARHDQYSNVDYW

SEQ ID NO: 10564 - protein, 20 aa, Homo sapiens
CVKEHCGFTDCYYSEYFKHW

SEQ ID NO: 10565 - protein, 16 aa, Homo sapiens
CAKGAGVLMVYAVDYW

SEQ ID NO: 10566 - protein, 16 aa, Homo sapiens
CARDWGGSSSSIYDYW

SEQ ID NO: 10567 - protein, 14 aa, Homo sapiens
CLSYAGSSNFFVVF

SEQ ID NO: 10568 - protein, 20 aa, Homo sapiens
CARDPSNFQTGTTNHYFDYW

SEQ ID NO: 10569 - protein, 13 aa, Homo sapiens
CAQGGYSNAFDIW

SEQ ID NO: 10570 - protein, 19 aa, Homo sapiens
CARGKIGAQSVWRYYFDQW

SEQ ID NO: 10571 - protein, 19 aa, Homo sapiens
CAREFRYNRNYPGFFFDFW

SEQ ID NO: 10572 - protein, 23 aa, Homo sapiens
CARLVSESSGWYTQGSSFWFDPW

SEQ ID NO: 10573 - protein, 17 aa, Homo sapiens
CGRDAVTREGPEDFDYW

SEQ ID NO: 10574 - protein, 15 aa, Homo sapiens
CAKEPAAGSWGFDYW

SEQ ID NO: 10575 - protein, 20 aa, Homo sapiens
CARIKYCSFPSCYSGLFDIW

SEQ ID NO: 10576 - protein, 19 aa, Homo sapiens
CAREGGYSYGSPLYYFDYW

SEQ ID NO: 10577 - protein, 15 aa, Homo sapiens
CTQCDRYLESPPDYW

SEQ ID NO: 10578 - protein, 18 aa, Homo sapiens
CVREGDCNGPNCYAFDIW

SEQ ID NO: 10579 - protein, 14 aa, Homo sapiens
CARQKIFGLVFDFW

SEQ ID NO: 10580 - protein, 16 aa, Homo sapiens
CAKDGELERQYYFDYW

SEQ ID NO: 10581 - protein, 24 aa, Homo sapiens
CAKSPSPYCSSPRCRRGYYYMDVW

SEQ ID NO: 10582 - protein, 16 aa, Homo sapiens
CARVLRYASGRTFGYW

SEQ ID NO: 10583 - protein, 21 aa, Homo sapiens
CAKDRSDGFWSGSSSVHFDYW

SEQ ID NO: 10584 - protein, 16 aa, Homo sapiens
CAQYDYSNSPLYFDFW

SEQ ID NO: 10585 - protein, 20 aa, Homo sapiens
CARQNWEGQLALPYDAFDIW

SEQ ID NO: 10586 - protein, 20 aa, Homo sapiens
CARAEQFCSGATCYLNFDYW

SEQ ID NO: 10587 - protein, 19 aa, Homo sapiens
CAKNRGFSTTMLHDAFDVW

SEQ ID NO: 10588 - protein, 20 aa, Homo sapiens
CARAEQSCTSDTCYQNFDYW

SEQ ID NO: 10589 - protein, 21 aa, Homo sapiens
CARRRGGLAAAGTGTDYFDYW

SEQ ID NO: 10590 - protein, 16 aa, Homo sapiens
CARERPMFSYDVFDIW

SEQ ID NO: 10591 - protein, 23 aa, Homo sapiens
CAKGLPYCSSSSCPMPVYYFDLW

SEQ ID NO: 10592 - protein, 18 aa, Homo sapiens
CAKDLHSARQGVDAFDFW

SEQ ID NO: 10593 - protein, 18 aa, Homo sapiens
CARDYSYHNLPSGYKDFW

SEQ ID NO: 10594 - protein, 17 aa, Homo sapiens
CAHKLVVTGTDIPFDSW

SEQ ID NO: 10595 - protein, 17 aa, Homo sapiens
CARDGGTTGTWDAFDIW

SEQ ID NO: 10596 - protein, 16 aa, Homo sapiens
CARLEAAAGTYESDYW

SEQ ID NO: 10597 - protein, 21 aa, Homo sapiens
CARHVGCTNGVCQMLNAFDIW

SEQ ID NO: 10598 - protein, 20 aa, Homo sapiens
CAKKRNIYTHGWLQDVFHIW

SEQ ID NO: 10599 - protein, 16 aa, Homo sapiens
CARFGLERRWYYFDYW

SEQ ID NO: 10600 - protein, 16 aa, Homo sapiens
CTRELDIWSGYSNDYW

SEQ ID NO: 10601 - protein, 22 aa, Homo sapiens
CARLYSYCITPDCYRFGYFDYW

SEQ ID NO: 10602 - protein, 12 aa, Homo sapiens
CAQFPGDSFEIW

SEQ ID NO: 10603 - protein, 17 aa, Homo sapiens
CARRGPGFGELYYFDYW

SEQ ID NO: 10604 - protein, 14 aa, Homo sapiens
CVRGFKTENAFEIW

SEQ ID NO: 10605 - protein, 15 aa, Homo sapiens
CARDRSSSAGFFDYW

SEQ ID NO: 10606 - protein, 24 aa, Homo sapiens
CARDQVYYDSSGSQGYYYYYMDVW

SEQ ID NO: 10607 - protein, 18 aa, Homo sapiens
CARHQYYYDRSGYYPDYW

SEQ ID NO: 10608 - protein, 24 aa, Homo sapiens
CARCPYCKDSSCYNPYYYYYMDVW

SEQ ID NO: 10609 - protein, 21 aa, Homo sapiens
CARDRGPWFGELSTANYFDYW

SEQ ID NO: 10610 - protein, 15 aa, Homo sapiens
CARTTVTAPPLFDYW

SEQ ID NO: 10611 - protein, 14 aa, Homo sapiens
CASPITMVRGYDYW

SEQ ID NO: 10612 - protein, 18 aa, Homo sapiens
CARGAMIANYGDYGPDYW

SEQ ID NO: 10613 - protein, 13 aa, Homo sapiens [sequence omitted]

SEQ ID NO: 10614 - protein, 19 aa, Homo sapiens
CVKSNGDWLYYYYYYMDVW

SEQ ID NO: 10615 - protein, 16 aa, Homo sapiens
CARANGQQPLNWFDPW

SEQ ID NO: 10616 - protein, 17 aa, Homo sapiens
CVHAGSGTYYNDWFHPW

SEQ ID NO: 10617 - protein, 18 aa, Homo sapiens
CAKVGLMYSSSSYYFDYW

SEQ ID NO: 10618 - protein, 14 aa, Homo sapiens
CATDYLSPDAFDLW

SEQ ID NO: 10619 - protein, 21 aa, Homo sapiens
CARGTYDFWSGYYIGHAFDIW

SEQ ID NO: 10620 - protein, 18 aa, Homo sapiens
CAKDHYYGSGSYYSPDYW

SEQ ID NO: 10621 - protein, 15 aa, Homo sapiens
CARHYNSGTYPLDYW

SEQ ID NO: 10622 - protein, 27 aa, Homo sapiens
CARGSPGDCSSTSCPYGPYYYYYMDVW

SEQ ID NO: 10623 - protein, 17 aa, Homo sapiens
CAKDRAYYESSGCFGYW

SEQ ID NO: 10624 - protein, 21 aa, Homo sapiens
CAKDLGYCSSTSCGHDAFDIW

SEQ ID NO: 10625 - protein, 19 aa, Homo sapiens
CAREMWDYYENSGAPIDYW

SEQ ID NO: 10626 - protein, 15 aa, Homo sapiens
CVRNRGYDLDYFDYW

SEQ ID NO: 10627 - protein, 12 aa, Homo sapiens
CHQYYSSPPYSF

SEQ ID NO: 10628 - protein, 26 aa, Homo sapiens
CARHEVDGYLPFCSSNSCSFNWFDPW

SEQ ID NO: 10629 - protein, 16 aa, Homo sapiens
CARSGLSSGYYGFDIW

SEQ ID NO: 10630 - protein, 19 aa, Homo sapiens
CARVVIETRNYYYYYMDVW

SEQ ID NO: 10631 - protein, 20 aa, Homo sapiens
CVRGNSGWYHPHYYYYLDVW

SEQ ID NO: 10632 - protein, 22 aa, Homo sapiens
CARGRRLLDSSGYTVFAGFDYW

SEQ ID NO: 10633 - protein, 22 aa, Homo sapiens
CARHVSDYDILTLNYYYYMDVW

SEQ ID NO: 10634 - protein, 15 aa, Homo sapiens
CASSWFGELETFDPW

SEQ ID NO: 10635 - protein, 19 aa, Homo sapiens
CAKDVLRYFDWLNDAFDIW

SEQ ID NO: 10636 - protein, 11 aa, Homo sapiens
CLGSTYAFDMW

SEQ ID NO: 10637 - protein, 19 aa, Homo sapiens
CAKDIDPVLVPPSMGIDYW

SEQ ID NO: 10638 - protein, 18 aa, Homo sapiens
CARHGYYYESRANWFDPW

SEQ ID NO: 10639 - protein, 16 aa, Homo sapiens
CTTIRSPSSTDYFDYW

SEQ ID NO: 10640 - protein, 18 aa, Homo sapiens
CVKGGGRYFDLHPAFDIW

SEQ ID NO: 10641 - protein, 14 aa, Homo sapiens
CARGGTQLVHFDLW

SEQ ID NO: 10642 - protein, 18 aa, Homo sapiens
CVKEGRHSSGWSYYFDSW

SEQ ID NO: 10643 - protein, 18 aa, Homo sapiens
CAKDEKIAAAGTGSFDYW

SEQ ID NO: 10644 - protein, 19 aa, Homo sapiens
CARDSFRIQSYGTSGTDYW

SEQ ID NO: 10645 - protein, 18 aa, Homo sapiens
CAKDQGSGFGELDAFDIW

SEQ ID NO: 10646 - protein, 15 aa, Homo sapiens
CAKDNLRPYGDYDYW

SEQ ID NO: 10647 - protein, 15 aa, Homo sapiens
CAKDYVGYPRGFDYW

SEQ ID NO: 10648 - protein, 21 aa, Homo sapiens
CARGPICGSGGSCQRTDLDYW

SEQ ID NO: 10649 - protein, 19 aa, Homo sapiens
CVKDYYYDSSGYYPYFDYW

SEQ ID NO: 10650 - protein, 18 aa, Homo sapiens
CARSTGLPNFQKYYLDVW

SEQ ID NO: 10651 - protein, 15 aa, Homo sapiens
CARQGQLWLYHFDYW

SEQ ID NO: 10652 - protein, 16 aa, Homo sapiens
CARDGERGYTYGFDYW

SEQ ID NO: 10653 - protein, 16 aa, Homo sapiens
CASEYSSSWYRQIDYW

SEQ ID NO: 10654 - protein, 17 aa, Homo sapiens
CAKDQSSSSVHNSFDSW

SEQ ID NO: 10655 - protein, 16 aa, Homo sapiens
CVKDVDTAMVTIFDYW

SEQ ID NO: 10656 - protein, 16 aa, Homo sapiens
CARGLYGETYNWFDPW

SEQ ID NO: 10657 - protein, 23 aa, Homo sapiens
CARQHVRYCISISCPSDDAFDIW

SEQ ID NO: 10658 - protein, 14 aa, Homo sapiens
CVRDVNIGRRFDFW

SEQ ID NO: 10659 - protein, 29 aa, Homo sapiens
CARDSPSRQTRIPVAGTFRYYYDYHMDVW

SEQ ID NO: 10660 - protein, 19 aa, Homo sapiens
CVRELRRDQGGNSDSFDIW

SEQ ID NO: 10661 - protein, 20 aa, Homo sapiens
CTLFPYTTLFRSEYSYFDYW

SEQ ID NO: 10662 - protein, 22 aa, Homo sapiens
CAREYDFWSGNYKEGNDAFDVW

SEQ ID NO: 10663 - protein, 16 aa, Homo sapiens
CARSLGIGSASAFDVW

SEQ ID NO: 10664 - protein, 20 aa, Homo sapiens
CARASSYCINGVCSPEFDYW

SEQ ID NO: 10665 - protein, 21 aa, Homo sapiens
CARVEQGHVRNDQNYDAFDVW

SEQ ID NO: 10666 - protein, 21 aa, Homo sapiens
CARDRVSGERNSDWYPRFDPW

SEQ ID NO: 10667 - protein, 25 aa, Homo sapiens
CARDLHGGEMEYDFWSRYYPIFDYW

SEQ ID NO: 10668 - protein, 22 aa, Homo sapiens
CAREYYYDSSGYPNPPSAFDIW

SEQ ID NO: 10669 - protein, 19 aa, Homo sapiens
CARERVVVMSAAIRYFDLW

SEQ ID NO: 10670 - protein, 20 aa, Homo sapiens
CARDQYQLPTQKGYHWFDPW

SEQ ID NO: 10671 - protein, 19 aa, Homo sapiens
CARHKTNLLDDDKYYFDSW

SEQ ID NO: 10672 - protein, 16 aa, Homo sapiens
CAKDTSGYRLGYFDYW

SEQ ID NO: 10673 - protein, 21 aa, Homo sapiens
CARQGGYDFWSGYYSFAFDIW

SEQ ID NO: 10674 - protein, 19 aa, Homo sapiens
CARLSVAVAGKYYYYMDVW

SEQ ID NO: 10675 - protein, 18 aa, Homo sapiens
CARDDDRSGYTSLAFDLW

SEQ ID NO: 10676 - protein, 22 aa, Homo sapiens
CARDGRGRSGWDPSGNKYFDPW

SEQ ID NO: 10677 - protein, 20 aa, Homo sapiens
CRLCCSTSWSLTLFNYMDVW

SEQ ID NO: 10678 - protein, 21 aa, Homo sapiens
CARGDIVVVPAAIPFGAFDIW

SEQ ID NO: 10679 - protein, 22 aa, Homo sapiens
CAKDSSYYYDSSGYSTDAFDIW

SEQ ID NO: 10680 - protein, 18 aa, Homo sapiens
CARGGNYYASGNYYPDYW

SEQ ID NO: 10681 - protein, 15 aa, Homo sapiens
CVRDSIARTATFDYW

SEQ ID NO: 10682 - protein, 18 aa, Homo sapiens
CARVPPITVAQIYYMDVW

SEQ ID NO: 10683 - protein, 18 aa, Homo sapiens
CAKERSITGTFGDAFDIW

SEQ ID NO: 10684 - protein, 25 aa, Homo sapiens
CARGKYNWDDEYARKIYYYYYMDVW

SEQ ID NO: 10685 - protein, 15 aa, Homo sapiens
CARSSGYYVPLFDHW

SEQ ID NO: 10686 - protein, 16 aa, Homo sapiens
CARHLLWGSPDAFDIW

SEQ ID NO: 10687 - protein, 19 aa, Homo sapiens
CARDPVTVSGLITHAMDVW

SEQ ID NO: 10688 - protein, 15 aa, Homo sapiens
CASGAATYFYYMDVW

SEQ ID NO: 10689 - protein, 15 aa, Homo sapiens
CATWPRPKITSFDYW

SEQ ID NO: 10690 - protein, 16 aa, Homo sapiens
CAKALPPHFLFPFDHW

SEQ ID NO: 10691 - protein, 18 aa, Homo sapiens
CARASGAIGASTIIFDSW

SEQ ID NO: 10692 - protein, 19 aa, Homo sapiens
CARDGIEGDYGENNWFDPW

SEQ ID NO: 10693 - protein, 18 aa, Homo sapiens
CARDDPGIAAAGPFFDYW

SEQ ID NO: 10694 - protein, 20 aa, Homo sapiens
CARDSAYYEFWSGYYYFDYW

SEQ ID NO: 10695 - protein, 18 aa, Homo sapiens
CTTTTCRPREYYYYMDVW

SEQ ID NO: 10696 - protein, 13 aa, Homo sapiens
CARDAGLPNFDFW

SEQ ID NO: 10697 - protein, 14 aa, Homo sapiens
CARVVSGEVAFDIW

SEQ ID NO: 10698 - protein, 15 aa, Homo sapiens
CAKIIQWLVPSLDYW

SEQ ID NO: 10699 - protein, 14 aa, Homo sapiens
CARDPLNRGWFDPW

SEQ ID NO: 10700 - protein, 20 aa, Homo sapiens
CARSSSTYYYNRTPLTTDYW

SEQ ID NO: 10701 - protein, 20 aa, Homo sapiens
CVHRVHRTLKEDFWSGLDYW

SEQ ID NO: 10702 - protein, 19 aa, Homo sapiens
CARQSIVEAGWGLFGFDSW

SEQ ID NO: 10703 - protein, 13 aa, Homo sapiens
CAHRPPDGGPDYW

SEQ ID NO: 10704 - protein, 20 aa, Homo sapiens
CCATIYYHESSGLPLFFDSW

SEQ ID NO: 10705 - protein, 18 aa, Homo sapiens
CAKDSIWLGELAFYMDVW

SEQ ID NO: 10706 - protein, 14 aa, Homo sapiens
CAHSGSSGRYFDYW

SEQ ID NO: 10707 - protein, 18 aa, Homo sapiens
CAREHCTNGVCYRYFDYW

SEQ ID NO: 10708 - protein, 21 aa, Homo sapiens
CARGRAVRPTGAGWPGNFDYW

SEQ ID NO: 10709 - protein, 20 aa, Homo sapiens
CTTLGTSIIVTGRPVPFNYW

SEQ ID NO: 10710 - protein, 17 aa, Homo sapiens
CARDRGEYSSSLPFGYW

SEQ ID NO: 10711 - protein, 20 aa, Homo sapiens
CARRAGEGATIYYYNYMDVW

SEQ ID NO: 10712 - protein, 18 aa, Homo sapiens
CAKATVYCSSTSCPIDYW

SEQ ID NO: 10713 - protein, 19 aa, Homo sapiens
CARDIVVVPAAAHDAFDIW

SEQ ID NO: 10714 - protein, 21 aa, Homo sapiens
CARDPGYCSGPSCYYSHFDYW

SEQ ID NO: 10715 - protein, 22 aa, Homo sapiens
CARREYYDTLTGHYEHWYFDLW

SEQ ID NO: 10716 - protein, 15 aa, Homo sapiens
CAHKKGSSTSCYDYW

SEQ ID NO: 10717 - protein, 16 aa, Homo sapiens
CARERSGYYYNYMDVW

SEQ ID NO: 10718 - protein, 16 aa, Homo sapiens
CARDPHPGWGDYFDYW

SEQ ID NO: 10719 - protein, 14 aa, Homo sapiens
CARHSNSINWLNPW

SEQ ID NO: 10720 - protein, 20 aa, Homo sapiens
CARGPGQTILGVIMPRFDNW

SEQ ID NO: 10721 - protein, 22 aa, Homo sapiens
CAKQPPSPVYSNIRNPYYCDYW

SEQ ID NO: 10722 - protein, 16 aa, Homo sapiens
CARTVGYSGYNYFDYW

SEQ ID NO: 10723 - protein, 19 aa, Homo sapiens
CVTGFTYYYGSQNYSLDYW

SEQ ID NO: 10724 - protein, 18 aa, Homo sapiens
CAKDAKIAPVSGGLFDYW

SEQ ID NO: 10725 - protein, 16 aa, Homo sapiens
CARGPESSGYTWFDPW

SEQ ID NO: 10726 - protein, 17 aa, Homo sapiens
CAKGAVSSGWSQCFDYW

SEQ ID NO: 10727 - protein, 20 aa, Homo sapiens
CARHRYYYDTSGYVGWFAPW

SEQ ID NO: 10728 - protein, 17 aa, Homo sapiens
CARQPPSTVASLGFDYW

SEQ ID NO: 10729 - protein, 15 aa, Homo sapiens
CARGGGLRGYYFDYW

SEQ ID NO: 10730 - protein, 18 aa, Homo sapiens
CARDGSGSHTTSFYFDYW

SEQ ID NO: 10731 - protein, 16 aa, Homo sapiens
CTQGADFGVGVAFDIW

SEQ ID NO: 10732 - protein, 31 aa, Homo sapiens
CALPISALYYCARDLVRANRYSGSWIPFDSW

SEQ ID NO: 10733 - protein, 15 aa, Homo sapiens
CARAHVSDSYGLDYW

SEQ ID NO: 10734 - protein, 14 aa, Homo sapiens
CAKDQGGGSCVDYW

SEQ ID NO: 10735 - protein, 18 aa, Homo sapiens
CARDGIWGYDSDYSFDFW

SEQ ID NO: 10736 - protein, 15 aa, Homo sapiens
CARTQWLQFDVFNIW

SEQ ID NO: 10737 - protein, 21 aa, Homo sapiens
CVRESYCRTTACHSSGAFDIW

SEQ ID NO: 10738 - protein, 15 aa, Homo sapiens
CAKMGTTGTTEFDYW

SEQ ID NO: 10739 - protein, 18 aa, Homo sapiens
CARDIGDYEVEPAAVDYW

SEQ ID NO: 10740 - protein, 13 aa, Homo sapiens
CARVHHLSSFDIW

SEQ ID NO: 10741 - protein, 13 aa, Homo sapiens
CARAWLWQSFDYW

SEQ ID NO: 10742 - protein, 16 aa, Homo sapiens
CARSRVSGGDCYLDYW

SEQ ID NO: 10743 - protein, 16 aa, Homo sapiens
CAKDARYFDWDYFDYW

SEQ ID NO: 10744 - protein, 21 aa, Homo sapiens
CAKDRSVYSSGLETWGYFDYW

SEQ ID NO: 10745 - protein, 18 aa, Homo sapiens
CASGFSSPYYVNWYFDTW

SEQ ID NO: 10746 - protein, 24 aa, Homo sapiens
CARVGHRPGYCNSISCYLFWFDSW

SEQ ID NO: 10747 - protein, 26 aa, Homo sapiens
CARHDFDSLIRPTKPELLLPYYFDFW

SEQ ID NO: 10748 - protein, 19 aa, Homo sapiens
CCVRGTDYDSSGYDAFDDW

SEQ ID NO: 10749 - protein, 17 aa, Homo sapiens
CVRDVRQSTPNWYFDLW

SEQ ID NO: 10750 - protein, 15 aa, Homo sapiens
CRATATTHSDTFDIW

SEQ ID NO: 10751 - protein, 17 aa, Homo sapiens
CAHMRYSGYQRYFFDYW

SEQ ID NO: 10752 - protein, 21 aa, Homo sapiens
CSRARIVVLPGSIKANYFDYW

SEQ ID NO: 10753 - protein, 15 aa, Homo sapiens
CARAWSVNTPSFDNW

SEQ ID NO: 10754 - protein, 19 aa, Homo sapiens
CAKARYCSYTSCYKGFDSW

SEQ ID NO: 10755 - protein, 20 aa, Homo sapiens
CARDGGTYDSSGYYYGLDYW

SEQ ID NO: 10756 - protein, 27 aa, Homo sapiens
CARDDAYCSGASCYDYAAIAAATFDYW

SEQ ID NO: 10757 - protein, 17 aa, Homo sapiens
CARDLYGGSSLGAFDIW

SEQ ID NO: 10758 - protein, 18 aa, Homo sapiens
CARDGGEYYGSGSLYDYW

SEQ ID NO: 10759 - protein, 16 aa, Homo sapiens
CASAHILTGYYIYDYW

SEQ ID NO: 10760 - protein, 18 aa, Homo sapiens
CARDHGDSTRSGDALDIW

SEQ ID NO: 10761 - protein, 16 aa, Homo sapiens
CSKGVGSWQVYYFDYW

SEQ ID NO: 10762 - protein, 18 aa, Homo sapiens
CAKVHRTASCCSDYFDDW

SEQ ID NO: 10763 - protein, 21 aa, Homo sapiens
CTTVSNAFWNGLYYYFYMDVW

SEQ ID NO: 10764 - protein, 16 aa, Homo sapiens
CAKAMAAVGLNAFDIW

SEQ ID NO: 10765 - protein, 18 aa, Homo sapiens
CAKDMVVVPAGDGAFDFW

SEQ ID NO: 10766 - protein, 23 aa, Homo sapiens
CARPSLLGYCSSTSCYWAAFDIW

SEQ ID NO: 10767 - protein, 16 aa, Homo sapiens
CARSFDHGGGSYFEHW

SEQ ID NO: 10768 - protein, 17 aa, Homo sapiens
CARQNDFWSGSYYMDVW

SEQ ID NO: 10769 - protein, 17 aa, Homo sapiens
CARGRHQLIRNAYFQYW

SEQ ID NO: 10770 - protein, 11 aa, Homo sapiens
CASLEEWFLPW

SEQ ID NO: 10771 - protein, 20 aa, Homo sapiens
CAKGGPYGSGSYLEDAFDIW

SEQ ID NO: 10772 - protein, 18 aa, Homo sapiens
CASRHCTSSSCYEYFHHW

SEQ ID NO: 10773 - protein, 12 aa, Homo sapiens
CQYYGYSPLVIF

SEQ ID NO: 10774 - protein, 13 aa, Homo sapiens
CQSADQSGTFLVF

SEQ ID NO: 10775 - protein, 18 aa, Homo sapiens
CARLVDYGSGSSGWFDPW

SEQ ID NO: 10776 - protein, 16 aa, Homo sapiens
CATIISMAGTFYFDYW

SEQ ID NO: 10777 - protein, 16 aa, Homo sapiens
CARRIAAAGPDWFDPW

SEQ ID NO: 10778 - protein, 23 aa, Homo sapiens
CATGPIIIGPDTIGHRYWYFDLW

SEQ ID NO: 10779 - protein, 17 aa, Homo sapiens
CAKDVSYDFWGGYFISW

SEQ ID NO: 10780 - protein, 24 aa, Homo sapiens
CARIQAHDFWSGYYRSPNFYFDYW

SEQ ID NO: 10781 - protein, 14 aa, Homo sapiens
CATPRGFPYYFDYW

SEQ ID NO: 10782 - protein, 17 aa, Homo sapiens
CARGGSYGSGSGRFDYW

SEQ ID NO: 10783 - protein, 19 aa, Homo sapiens
CAKNMGGSGWYRGGGFDIW

SEQ ID NO: 10784 - protein, 15 aa, Homo sapiens
CTTGLVRGAIRPDYW

SEQ ID NO: 10785 - protein, 12 aa, Homo sapiens
CAKGSSWKVDYW

SEQ ID NO: 10786 - protein, 16 aa, Homo sapiens
CARGGSRHGYPPPDYW

SEQ ID NO: 10787 - protein, 16 aa, Homo sapiens
CARPYSSTYYSYFDYW

SEQ ID NO: 10788 - protein, 22 aa, Homo sapiens
CAKTTSPGYCSSTSCYGAFDIW

SEQ ID NO: 10789 - protein, 16 aa, Homo sapiens
CAREARSGWTIYFDNW

SEQ ID NO: 10790 - protein, 18 aa, Homo sapiens
CARSWDGDYVVTNYFDYW

SEQ ID NO: 10791 - protein, 16 aa, Homo sapiens
CATCSSWYTTEYFQHW

SEQ ID NO: 10792 - protein, 16 aa, Homo sapiens
CARQDAVAGTFELDYW

SEQ ID NO: 10793 - protein, 15 aa, Homo sapiens
CVRDRSMWYGDFDYW

SEQ ID NO: 10794 - protein, 17 aa, Homo sapiens
CARDLCAPSACYLLDYW

SEQ ID NO: 10795 - protein, 19 aa, Homo sapiens
CARQRNSSHDKWVKDVDYW

SEQ ID NO: 10796 - protein, 21 aa, Homo sapiens
CARETEYCSGEDCSPFYFDYW

SEQ ID NO: 10797 - protein, 14 aa, Homo sapiens
CVRAGGRSSPFGYW

SEQ ID NO: 10798 - protein, 18 aa, Homo sapiens
CAKDLSTYYYDTHANDYW

SEQ ID NO: 10799 - protein, 13 aa, Homo sapiens
CARVQNIGWFDPW

SEQ ID NO: 10800 - protein, 17 aa, Homo sapiens
CARDRIADSTSSGLDYW

SEQ ID NO: 10801 - protein, 19 aa, Homo sapiens
CARHNYASGSPLPYWFDPW

SEQ ID NO: 10802 - protein, 14 aa, Homo sapiens
CARAVIRGKAFDYW

SEQ ID NO: 10803 - protein, 16 aa, Homo sapiens
CARHGKKQPANWFDPW

SEQ ID NO: 10804 - protein, 12 aa, Homo sapiens [sequence omitted]

SEQ ID NO: 10805 - protein, 15 aa, Homo sapiens
CAKVPYGGGSPFDPW

SEQ ID NO: 10806 - protein, 20 aa, Homo sapiens
CARELRIAARLLSLYYMDVW

SEQ ID NO: 10807 - protein, 21 aa, Homo sapiens
CARDHCSSISCYPRVGAFDIW

SEQ ID NO: 10808 - protein, 15 aa, Homo sapiens
CARSRLRYFTRFDPW

SEQ ID NO: 10809 - protein, 15 aa, Homo sapiens
CARALWQQLVPLDYW

SEQ ID NO: 10810 - protein, 20 aa, Homo sapiens
CAKDGIAAAAILAGEWFDPW

SEQ ID NO: 10811 - protein, 20 aa, Homo sapiens
CARDRTPGIAAAGFDAFDIW

SEQ ID NO: 10812 - protein, 22 aa, Homo sapiens
CARDFYDSSGYYYGDLDAFDIW

SEQ ID NO: 10813 - protein, 20 aa, Homo sapiens
CARDSTYYDSSGYIKAFDIW

SEQ ID NO: 10814 - protein, 20 aa, Homo sapiens
CTMSLGYCTNGVCPDGFAIW

SEQ ID NO: 10815 - protein, 16 aa, Homo sapiens
CARGTTSFSPVPFDYW

SEQ ID NO: 10816 - protein, 19 aa, Homo sapiens
CARGMGPDPIFGVAALDYW

SEQ ID NO: 10817 - protein, 15 aa, Homo sapiens
CARETRYSYGLFDYW

SEQ ID NO: 10818 - protein, 16 aa, Homo sapiens
CARPIVRGIQADFVYW

SEQ ID NO: 10819 - protein, 17 aa, Homo sapiens
CTTDPSEIAAAEAIDYW

SEQ ID NO: 10820 - protein, 11 aa, Homo sapiens
CQQNYSPPFIF

SEQ ID NO: 10821 - protein, 27 aa, Homo sapiens
CARDSGGYCSSTSCLTKKYMVNWFDPW

SEQ ID NO: 10822 - protein, 21 aa, Homo sapiens
CARGEYCSSTSCYAFEWFDPW

SEQ ID NO: 10823 - protein, 19 aa, Homo sapiens
CAKSNPSMITVTPSLFDYW

SEQ ID NO: 10824 - protein, 16 aa, Homo sapiens
CVKDQSIAAAGAFDIW

SEQ ID NO: 10825 - protein, 18 aa, Homo sapiens
CARDGARDLLLFDAFDIW

SEQ ID NO: 10826 - protein, 16 aa, Homo sapiens
CARDPELVGRLGFDYW

SEQ ID NO: 10827 - protein, 17 aa, Homo sapiens
CARAPGIAGGDWYFDLW

SEQ ID NO: 10828 - protein, 16 aa, Homo sapiens
CARDPGPTRYYYFDYW

SEQ ID NO: 10829 - protein, 14 aa, Homo sapiens
CARVRTAKPGGDYW

SEQ ID NO: 10830 - protein, 25 aa, Homo sapiens
CARNGSPWTSHCSSTSCPHNWFDPW

SEQ ID NO: 10831 - protein, 18 aa, Homo sapiens
CARGYGGKSYYYYYMDVW

SEQ ID NO: 10832 - protein, 21 aa, Homo sapiens
CARGSSRTSWKIFGTDCFDYW

SEQ ID NO: 10833 - protein, 21 aa, Homo sapiens
CARALYDFWSGNTTEYAFDIW

SEQ ID NO: 10834 - protein, 16 aa, Homo sapiens
CTRGPTGSGTSYFDHW

SEQ ID NO: 10835 - protein, 17 aa, Homo sapiens
CARYFAGTTFNDAFDIW

SEQ ID NO: 10836 - protein, 15 aa, Homo sapiens
CARESGTYDNYFDYW

SEQ ID NO: 10837 - protein, 17 aa, Homo sapiens
CARHESDSSGSYYFDYW

SEQ ID NO: 10838 - protein, 14 aa, Homo sapiens
CAQRGSRDRTLDYW

SEQ ID NO: 10839 - protein, 19 aa, Homo sapiens
CAKDPRVYSSSWSWYFDLW

SEQ ID NO: 10840 - protein, 18 aa, Homo sapiens
CAKDQRHTGSNPGGFDYW

SEQ ID NO: 10841 - protein, 21 aa, Homo sapiens
CARQRECSSSRCSTSNWFDPW

SEQ ID NO: 10842 - protein, 19 aa, Homo sapiens
CVRDKGSAAGTWGYNFDYW

SEQ ID NO: 10843 - protein, 16 aa, Homo sapiens
CARSSSWYLDDYFDYW

SEQ ID NO: 10844 - protein, 23 aa, Homo sapiens
CARHLASIVVVPAAISRYYFDYW

SEQ ID NO: 10845 - protein, 12 aa, Homo sapiens
CAGIFGRWFDPW

SEQ ID NO: 10846 - protein, 16 aa, Homo sapiens
CARLWDTNSWQHFDYW

SEQ ID NO: 10847 - protein, 20 aa, Homo sapiens
CARLPARAQVWTPKHAFDIW

SEQ ID NO: 10848 - protein, 16 aa, Homo sapiens
CARPWGRSHQFVFDYW

SEQ ID NO: 10849 - protein, 16 aa, Homo sapiens
CAKDHGSAGSFDFDYW

SEQ ID NO: 10850 - protein, 17 aa, Homo sapiens
CVKDRGQWELLYYFDYW

SEQ ID NO: 10851 - protein, 16 aa, Homo sapiens
CAKDFGVVPRQPHDYW

SEQ ID NO: 10852 - protein, 15 aa, Homo sapiens
CAKEALNFYYYMDVW

SEQ ID NO: 10853 - protein, 14 aa, Homo sapiens
CAHRLVYHYYFDYW

SEQ ID NO: 10854 - protein, 15 aa, Homo sapiens
CARERSGWSLGPDYW

SEQ ID NO: 10855 - protein, 16 aa, Homo sapiens
CAKTRYSTAYDAFDMW

SEQ ID NO: 10856 - protein, 16 aa, Homo sapiens
CARAPEFRVFYYLDVW

SEQ ID NO: 10857 - protein, 11 aa, Homo sapiens
CSIWPSNAWVF

SEQ ID NO: 10858 - protein, 13 aa, Homo sapiens
CAKLARLSTSDYW

SEQ ID NO: 10859 - protein, 15 aa, Homo sapiens
CARSIYLTQDAFDIW

SEQ ID NO: 10860 - protein, 18 aa, Homo sapiens
CAREDLAVVPPAIWFDPW

SEQ ID NO: 10861 - protein, 18 aa, Homo sapiens
CARVLGNNWNFGPPFDSW

SEQ ID NO: 10862 - protein, 13 aa, Homo sapiens
CARDRGGTRFDDW

SEQ ID NO: 10863 - protein, 21 aa, Homo sapiens
CARGGTPYNYDTGDNPYFDSW

SEQ ID NO: 10864 - protein, 14 aa, Homo sapiens
CQSYDRSNHLHVVF

SEQ ID NO: 10865 - protein, 23 aa, Homo sapiens
CAKGKDSPLYYGAGNYQSFFDSW

SEQ ID NO: 10866 - protein, 22 aa, Homo sapiens
CVHSLHYCSSTSCFSPLYFDFW

SEQ ID NO: 10867 - protein, 17 aa, Homo sapiens
CARGWSRFLEWDYFDYW

SEQ ID NO: 10868 - protein, 18 aa, Homo sapiens
CARGREDYGFWGDHMDVW

SEQ ID NO: 10869 - protein, 15 aa, Homo sapiens
CARIIVGATGYFDYW

SEQ ID NO: 10870 - protein, 15 aa, Homo sapiens
CARTPYATSYYFDDW

SEQ ID NO: 10871 - protein, 20 aa, Homo sapiens
CARGVDFWSGPPPSNWFDPW

SEQ ID NO: 10872 - protein, 16 aa, Homo sapiens
CARPDVLTGYRDFDYW

SEQ ID NO: 10873 - protein, 13 aa, Homo sapiens
CAKASRYYYFDYW

SEQ ID NO: 10874 - protein, 20 aa, Homo sapiens
CVKYHYDGTSYYWDDYFDYW

SEQ ID NO: 10875 - protein, 16 aa, Homo sapiens
CARDLDSRAGRYFDYW

SEQ ID NO: 10876 - protein, 17 aa, Homo sapiens
CATNGATDTPLYYFDYW

SEQ ID NO: 10877 - protein, 21 aa, Homo sapiens
CARQKVEYCDRSSCYGAIDYW

SEQ ID NO: 10878 - protein, 18 aa, Homo sapiens
CALPISRGAGRGRGQDYW

SEQ ID NO: 10879 - protein, 23 aa, Homo sapiens
CARVSLDCSSTSCYIQLYYFDYW

SEQ ID NO: 10880 - protein, 18 aa, Homo sapiens
CAKEDYGGNGWRGVFDYW

SEQ ID NO: 10881 - protein, 21 aa, Homo sapiens
CTKDTRVVTSVVVVEGWFDSW

SEQ ID NO: 10882 - protein, 25 aa, Homo sapiens
CTLFPYTTLFRSAKVRTRWLRLDYW

SEQ ID NO: 10883 - protein, 16 aa, Homo sapiens
CARETNFYGGSYFDYW

SEQ ID NO: 10884 - protein, 12 aa, Homo sapiens
CAIGICYTLDYW

SEQ ID NO: 10885 - protein, 17 aa, Homo sapiens
CTRVGHGWSFGSGFDYW

SEQ ID NO: 10886 - protein, 18 aa, Homo sapiens
CARKQRGQGPTTDFFDFW

SEQ ID NO: 10887 - protein, 21 aa, Homo sapiens
CARGGCSGGSCYHHNYYFDYW

SEQ ID NO: 10888 - protein, 19 aa, Homo sapiens
CARQLPIGSSSVTLGFDYW

SEQ ID NO: 10889 - protein, 14 aa, Homo sapiens
CAGNDYGDLKFEYW

SEQ ID NO: 10890 - protein, 22 aa, Homo sapiens
CAISDIVLRTASILKSGYFHQW

SEQ ID NO: 10891 - protein, 18 aa, Homo sapiens
CARARQGSRYTGYYFDYW

SEQ ID NO: 10892 - protein, 12 aa, Homo sapiens
CQHFGSSPMFAF

SEQ ID NO: 10893 - protein, 24 aa, Homo sapiens
CARVPLKHINMIEVVNEEGWFDPW

SEQ ID NO: 10894 - protein, 17 aa, Homo sapiens
CAKTISGSGWHDAFDIW

SEQ ID NO: 10895 - protein, 19 aa, Homo sapiens
CARDSGPTGTGHSYYFDYW

SEQ ID NO: 10896 - protein, 32 aa, Homo sapiens
CALPICLTAEDTAVYYCARDPHPGWGDYFDYW

SEQ ID NO: 10897 - protein, 16 aa, Homo sapiens
CVRYYCNSALCYFDYW

SEQ ID NO: 10898 - protein, 17 aa, Homo sapiens
CAGELSFTSSSRWFDPW

SEQ ID NO: 10899 - protein, 13 aa, Homo sapiens
CSRIVVPAGIDYW

SEQ ID NO: 10900 - protein, 16 aa, Homo sapiens
CARVRGPPAGSWLDPW

SEQ ID NO: 10901 - protein, 14 aa, Homo sapiens
CARTGLDGNRFDPW

SEQ ID NO: 10902 - protein, 17 aa, Homo sapiens
CAKVADSSGWYWGVDYW

SEQ ID NO: 10903 - protein, 17 aa, Homo sapiens
CVRDQNPQRVDWYFDLW

SEQ ID NO: 10904 - protein, 16 aa, Homo sapiens
CAREIWNDRSFYFDHW

SEQ ID NO: 10905 - protein, 16 aa, Homo sapiens
CAYSMVTGRFGYFDYW

SEQ ID NO: 10906 - protein, 19 aa, Homo sapiens
CAKDIIRGSSWYDGWFDPW

SEQ ID NO: 10907 - protein, 17 aa, Homo sapiens
CAKEQGYTLGDEYFDNW

SEQ ID NO: 10908 - protein, 18 aa, Homo sapiens
CVRGYRGYDYERVLFDLW

SEQ ID NO: 10909 - protein, 17 aa, Homo sapiens
CAKGLMVRGLNQKDDYW

SEQ ID NO: 10910 - protein, 24 aa, Homo sapiens
CAREHTFDRYGLSEDFYYYYIDLW

SEQ ID NO: 10911 - protein, 18 aa, Homo sapiens
CARRWGYSYAQGDWFDPW

SEQ ID NO: 10912 - protein, 12 aa, Homo sapiens
CQQFYDTPFPTF

SEQ ID NO: 10913 - protein, 18 aa, Homo sapiens
CANAKAPAAIVFYYFDYW

SEQ ID NO: 10914 - protein, 21 aa, Homo sapiens
CANSAGAGYGLFPTTYSTDYW

SEQ ID NO: 10915 - protein, 20 aa, Homo sapiens
CASVVVITPTGQSVYYMDIW

SEQ ID NO: 10916 - protein, 19 aa, Homo sapiens
CARVSYSYGYSGEHWFDPW

SEQ ID NO: 10917 - protein, 18 aa, Homo sapiens
CARDPATRSGWYAGLDYW

SEQ ID NO: 10918 - protein, 14 aa, Homo sapiens
CARGAYSLDPFDIW

SEQ ID NO: 10919 - protein, 19 aa, Homo sapiens
CARAPPYNWNYRYYYMDVW

SEQ ID NO: 10920 - protein, 12 aa, Homo sapiens
CAGDPGLPTDYW

SEQ ID NO: 10921 - protein, 16 aa, Homo sapiens
CVRQSSAVGTTLFDNW

SEQ ID NO: 10922 - protein, 22 aa, Homo sapiens
CARHEPSGYSSSWYMFGYFDYW

SEQ ID NO: 10923 - protein, 18 aa, Homo sapiens
CARLPVATGYGDFPFDYW

SEQ ID NO: 10924 - protein, 14 aa, Homo sapiens
CTRPSGSYSPLDYW

SEQ ID NO: 10925 - protein, 15 aa, Homo sapiens
CARDSLELFRALDYW

SEQ ID NO: 10926 - protein, 13 aa, Homo sapiens
CFSVDSSGHQRVF

SEQ ID NO: 10927 - protein, 16 aa, Homo sapiens
CAKSSRQFGMVEFDYW

SEQ ID NO: 10928 - protein, 19 aa, Homo sapiens
CARDSTITTFAVAANFDYW

SEQ ID NO: 10929 - protein, 17 aa, Homo sapiens
CQVWDSSSHASADQVIF

SEQ ID NO: 10930 - protein, 16 aa, Homo sapiens
CAHYTEKVPRVPFDYW

SEQ ID NO: 10931 - protein, 22 aa, Homo sapiens
CARLTRDCDRRNCPPYYYFDSW

SEQ ID NO: 10932 - protein, 21 aa, Homo sapiens
CARDYYDSSGYYPILRYFDYW

SEQ ID NO: 10933 - protein, 14 aa, Homo sapiens
CQQYNKRPPASCSF

SEQ ID NO: 10934 - protein, 23 aa, Homo sapiens
CARDARASLYCSSINCYRAFDIW

SEQ ID NO: 10935 - protein, 17 aa, Homo sapiens
CAKEKLEVRPGYYMDVW

SEQ ID NO: 10936 - protein, 14 aa, Homo sapiens
CARGTSSGWYFGYW

SEQ ID NO: 10937 - protein, 20 aa, Homo sapiens
CARDGLLGSAWHGSDWFDMW

SEQ ID NO: 10938 - protein, 11 aa, Homo sapiens
CQYFGSYPYTF

SEQ ID NO: 10939 - protein, 14 aa, Homo sapiens
CASQRGPTARLDYW

SEQ ID NO: 10940 - protein, 13 aa, Homo sapiens
CAREPHGYFFDTW

SEQ ID NO: 10941 - protein, 19 aa, Homo sapiens
CAHRLYSRDFWGGHPFDYW

SEQ ID NO: 10942 - protein, 15 aa, Homo sapiens
CAKDLRPIQQAPDYW

SEQ ID NO: 10943 - protein, 17 aa, Homo sapiens
CQQYNVYPYTFGQGTNF

SEQ ID NO: 10944 - protein, 15 aa, Homo sapiens
CVTDDSRGWHSFDNW

SEQ ID NO: 10945 - protein, 16 aa, Homo sapiens
CAKDKRIAPAGYFDYW

SEQ ID NO: 10946 - protein, 13 aa, Homo sapiens
CARVVPAAMFDPW

SEQ ID NO: 10947 - protein, 14 aa, Homo sapiens
CARFWSGHGEFDPW

SEQ ID NO: 10948 - protein, 19 aa, Homo sapiens
CVKVSPGYYDSSGYYYDYW

SEQ ID NO: 10949 - protein, 16 aa, Homo sapiens
CASMDSSSWFMSDDYW

SEQ ID NO: 10950 - protein, 17 aa, Homo sapiens
CASAYGGLEFRNAFDIW

SEQ ID NO: 10951 - protein, 20 aa, Homo sapiens
CAKQTYYDSWSGPLYYFAYW

SEQ ID NO: 10952 - protein, 15 aa, Homo sapiens
CARDSGVYSLRFGYW

SEQ ID NO: 10953 - protein, 18 aa, Homo sapiens
CARDRVVGAARESYPDYW

SEQ ID NO: 10954 - protein, 13 aa, Homo sapiens
CVREELMDWFDPW

SEQ ID NO: 10955 - protein, 18 aa, Homo sapiens
CATDREVAYPLGWYFDLW

SEQ ID NO: 10956 - protein, 18 aa, Homo sapiens
CVREQFCTHTTCYYFDYW

SEQ ID NO: 10957 - protein, 23 aa, Homo sapiens
CARLRGIVVVPATIQEENYFDYW

SEQ ID NO: 10958 - protein, 19 aa, Homo sapiens
CARDSCGGDCHSPDAFDIW

SEQ ID NO: 10959 - protein, 16 aa, Homo sapiens
CARTFYGDFGNYIDVW

SEQ ID NO: 10960 - protein, 17 aa, Homo sapiens
CARHDLEYSSPNWFDPW

SEQ ID NO: 10961 - protein, 15 aa, Homo sapiens
CARMAWRIHFSFDYW

SEQ ID NO: 10962 - protein, 15 aa, Homo sapiens
CVATKDYYPKYFDYW

SEQ ID NO: 10963 - protein, 16 aa, Homo sapiens
CAASDPRFRWYQIDYW

SEQ ID NO: 10964 - protein, 15 aa, Homo sapiens
CARVRWTRPTSIDYW

SEQ ID NO: 10965 - protein, 16 aa, Homo sapiens
CARDFGQLGNHYMDLW

SEQ ID NO: 10966 - protein, 17 aa, Homo sapiens
CARMRGSGSYDDAFDIW

SEQ ID NO: 10967 - protein, 21 aa, Homo sapiens
CAKDHTPYCNGGNCFSGFDSW

SEQ ID NO: 10968 - protein, 18 aa, Homo sapiens
CARDLDTVMDLLGTFDIW

SEQ ID NO: 10969 - protein, 17 aa, Homo sapiens
CVKTITVFGVVTHFDSW

SEQ ID NO: 10970 - protein, 17 aa, Homo sapiens
CARAHSGYDWGSFFDYW

SEQ ID NO: 10971 - protein, 13 aa, Homo sapiens
CQHRSLWPPVYTF

SEQ ID NO: 10972 - protein, 17 aa, Homo sapiens
CARDAYCTSTSCYPDCW

SEQ ID NO: 10973 - protein, 18 aa, Homo sapiens
CAKAAGYSGYGTYYFDYW

SEQ ID NO: 10974 - protein, 18 aa, Homo sapiens
CARDMNPVRGYPHAFDIW

SEQ ID NO: 10975 - protein, 18 aa, Homo sapiens
CVKDIWPYGDYEDAFDSW

SEQ ID NO: 10976 - protein, 27 aa, Homo sapiens
CARDSPENSPYYYDSSGSYPPGDFDYW

SEQ ID NO: 10977 - protein, 15 aa, Homo sapiens
CAKIRRLLFDSFHIW

SEQ ID NO: 10978 - protein, 16 aa, Homo sapiens
CARVRGYSYNYYMDVW

SEQ ID NO: 10979 - protein, 18 aa, Homo sapiens
CTRDPSFKSDWGVYADSW

SEQ ID NO: 10980 - protein, 21 aa, Homo sapiens
CAKAGDSYGYNLSIFYYMDAW

SEQ ID NO: 10981 - protein, 14 aa, Homo sapiens
CAREPGGTGGYDYW

SEQ ID NO: 10982 - protein, 19 aa, Homo sapiens
CASRKITFGGVIVYYFHDW

SEQ ID NO: 10983 - protein, 13 aa, Homo sapiens
CQQYNNLPVMCSF

SEQ ID NO: 10984 - protein, 18 aa, Homo sapiens
CARDWEDEGGTFYPLDYW

SEQ ID NO: 10985 - protein, 24 aa, Homo sapiens
CVKDILPGYCDNTNCHPGPRFDYW

SEQ ID NO: 10986 - protein, 16 aa, Homo sapiens
CAKVVDIVPTDALDFW

SEQ ID NO: 10987 - protein, 13 aa, Homo sapiens
CARHAIDTIYDYW

SEQ ID NO: 10988 - protein, 21 aa, Homo sapiens
CVLVFRNGVRFLEWLTQFDYW

SEQ ID NO: 10989 - protein, 20 aa, Homo sapiens
CARARIRLLSVYPNNWFDPW

SEQ ID NO: 10990 - protein, 19 aa, Homo sapiens
CAKGKEAYCGGDCYLFDSW

SEQ ID NO: 10991 - protein, 20 aa, Homo sapiens
CARSVVVVATSDLHNWADPW

SEQ ID NO: 10992 - protein, 28 aa, Homo sapiens
CTLFPYTTLFRSYYCARQKIFGLVFDFW

SEQ ID NO: 10993 - protein, 13 aa, Homo sapiens
CARINLVPWFDPW

SEQ ID NO: 10994 - protein, 16 aa, Homo sapiens
CARDYSGSYFGWFDPW

SEQ ID NO: 10995 - protein, 16 aa, Homo sapiens
CARETTGSGSQLFDPW

SEQ ID NO: 10996 - protein, 17 aa, Homo sapiens
CAKDRGYNWNYVAFDIW

SEQ ID NO: 10997 - protein, 16 aa, Homo sapiens
CARDPADDPSVSLDYW

SEQ ID NO: 10998 - protein, 26 aa, Homo sapiens
CARDRFSDIVVLPAALPIRNNWFDPW

SEQ ID NO: 10999 - protein, 22 aa, Homo sapiens
CAREGKEFCTSISCRTYHFDHW

SEQ ID NO: 11000 - protein, 18 aa, Homo sapiens
CVKDGEEWEVGEKYFDYW

SEQ ID NO: 11001 - protein, 20 aa, Homo sapiens
CATDGRFGYCSSTSCSFDYW

SEQ ID NO: 11002 - protein, 19 aa, Homo sapiens
CTKSRYCSSTSCYIDFDPW

SEQ ID NO: 11003 - protein, 23 aa, Homo sapiens
CARGGYNGYDYDNYFYYYYMDVW

SEQ ID NO: 11004 - protein, 15 aa, Homo sapiens
CASAEVGTWGYFDYW

SEQ ID NO: 11005 - protein, 25 aa, Homo sapiens
CARISYYDFWSGYGDWDLISYFDYW

SEQ ID NO: 11006 - protein, 17 aa, Homo sapiens
CARVGRDDSGFSWFDPW

SEQ ID NO: 11007 - protein, 18 aa, Homo sapiens
CAKDGRAWMRINWLFDPW

SEQ ID NO: 11008 - protein, 13 aa, Homo sapiens
CTKLLRRDAFDIW

SEQ ID NO: 11009 - protein, 24 aa, Homo sapiens
CVRDGRCSTGTCYSPYPYYYMDVW

SEQ ID NO: 11010 - protein, 18 aa, Homo sapiens
CARNLAGVQEWLRGFDFW

SEQ ID NO: 11011 - protein, 17 aa, Homo sapiens
CARHLADFRRTDYKDYW

SEQ ID NO: 11012 - protein, 13 aa, Homo sapiens
CTRVVPVAKVDYW

SEQ ID NO: 11013 - protein, 20 aa, Homo sapiens
CARSGYYENNGYSRNWFDPW

SEQ ID NO: 11014 - protein, 20 aa, Homo sapiens
CARLLPRYSSSLPPLYFDYW

SEQ ID NO: 11015 - protein, 16 aa, Homo sapiens
CARPVEMATISAFDIW

SEQ ID NO: 11016 - protein, 19 aa, Homo sapiens
CARQVVRGAARRIDAFDIW

SEQ ID NO: 11017 - protein, 17 aa, Homo sapiens
CAKADTPAALSDWFDPW

SEQ ID NO: 11018 - protein, 13 aa, Homo sapiens
CAKAPIFYYFDFW

SEQ ID NO: 11019 - protein, 11 aa, Homo sapiens
CVRGPGPPDYW

SEQ ID NO: 11020 - protein, 18 aa, Homo sapiens
CARVPGFGVVQNYYFDYW

SEQ ID NO: 11021 - protein, 19 aa, Homo sapiens
CAKDRTMIVVVITSHFDYW

SEQ ID NO: 11022 - protein, 21 aa, Homo sapiens
CAKDKGDGYTYDSGFDAFDIW

SEQ ID NO: 11023 - protein, 15 aa, Homo sapiens
CAKNIVVVLGAIDYW

SEQ ID NO: 11024 - protein, 20 aa, Homo sapiens
CAREVFWSTPGKADWYFDLW

SEQ ID NO: 11025 - protein, 13 aa, Homo sapiens
CARESKVYCSDYW

SEQ ID NO: 11026 - protein, 20 aa, Homo sapiens
CARRGAHFYDSSGYYPFDYW

SEQ ID NO: 11027 - protein, 17 aa, Homo sapiens
CARLADSGGYFDAFDTW

SEQ ID NO: 11028 - protein, 18 aa, Homo sapiens
CARVPQEYAYGYWYFDLW

SEQ ID NO: 11029 - protein, 18 aa, Homo sapiens
CARDGSGRYYRADYFDYW

SEQ ID NO: 11030 - protein, 15 aa, Homo sapiens
CARVLSSSTNCPDYW

SEQ ID NO: 11031 - protein, 16 aa, Homo sapiens
CARAHYQLQRALFDYW

SEQ ID NO: 11032 - protein, 22 aa, Homo sapiens
CARHGATGYSITIFGGNWFDPW

SEQ ID NO: 11033 - protein, 20 aa, Homo sapiens
CARARIYNDILTGQYYFDYW

SEQ ID NO: 11034 - protein, 17 aa, Homo sapiens
CARETYGSGSEDSFDFW

SEQ ID NO: 11035 - protein, 13 aa, Homo sapiens
CAREDRYQHLDYW

SEQ ID NO: 11036 - protein, 18 aa, Homo sapiens
CARILSIVGATTGAFDLW

SEQ ID NO: 11037 - protein, 13 aa, Homo sapiens
CQSGESSGPSWVF

SEQ ID NO: 11038 - protein, 22 aa, Homo sapiens
CTRGLHYSYDIRSYYSHYFDSW

SEQ ID NO: 11039 - protein, 18 aa, Homo sapiens
CATVGYCSSTTCYAIDYW

SEQ ID NO: 11040 - protein, 24 aa, Homo sapiens
CAKDKIGYYYDSSGYYPDHYFDYW

SEQ ID NO: 11041 - protein, 15 aa, Homo sapiens
CARAAFDWGSYFDYW

SEQ ID NO: 11042 - protein, 21 aa, Homo sapiens
CARGPHGYDFWSGYSVLIDYW

SEQ ID NO: 11043 - protein, 18 aa, Homo sapiens
CARAVYSTSSTRDWLDPW

SEQ ID NO: 11044 - protein, 15 aa, Homo sapiens
CVKGQQLWRRWFDSW

SEQ ID NO: 11045 - protein, 17 aa, Homo sapiens
CARERYSRSSWDGIDIW

SEQ ID NO: 11046 - protein, 21 aa, Homo sapiens
CARLSPGVIPAVTPFNWFDPW

SEQ ID NO: 11047 - protein, 24 aa, Homo sapiens
CARDPQLTNYRGSGTYYFSWFDPW

SEQ ID NO: 11048 - protein, 16 aa, Homo sapiens
CVKGSKKSGVYFFDYW

SEQ ID NO: 11049 - protein, 22 aa, Homo sapiens
CAKSRSYCSSTSCYGLYYFDYW

SEQ ID NO: 11050 - protein, 17 aa, Homo sapiens
CARHSATGGLYDAFDIW

SEQ ID NO: 11051 - protein, 26 aa, Homo sapiens
CARGSRRPGIALAYASRGYYYYMDVW

SEQ ID NO: 11052 - protein, 21 aa, Homo sapiens
CARDAIVVVPAAPRNWYFDLW

SEQ ID NO: 11053 - protein, 16 aa, Homo sapiens
CARDRTSGYPDSFDLW

SEQ ID NO: 11054 - protein, 12 aa, Homo sapiens [sequence omitted]

SEQ ID NO: 11055 - protein, 17 aa, Homo sapiens
CAKVPSSIIVVVYFDYW

SEQ ID NO: 11056 - protein, 17 aa, Homo sapiens
CAKHLVPAAIQGGFDYW

SEQ ID NO: 11057 - protein, 24 aa, Homo sapiens
CAKTAEDCSGGICYSGYYYYMDVW

SEQ ID NO: 11058 - protein, 16 aa, Homo sapiens
CAKDLSLDMGGSFDYW

SEQ ID NO: 11059 - protein, 18 aa, Homo sapiens
CAKDVTDYGDYEGPFDYW

SEQ ID NO: 11060 - protein, 21 aa, Homo sapiens
CARDHLYRYSSGWYEDWFDPW

SEQ ID NO: 11061 - protein, 20 aa, Homo sapiens
CARDREDSNYAYYYYYMDVW

SEQ ID NO: 11062 - protein, 14 aa, Homo sapiens
CARALYDSSGFGYW

SEQ ID NO: 11063 - protein, 21 aa, Homo sapiens
CARTPLIAVAGRGVYYYMDVW

SEQ ID NO: 11064 - protein, 22 aa, Homo sapiens
CVRDSFDGTDYHLRENYYFDYW

SEQ ID NO: 11065 - protein, 13 aa, Homo sapiens
CARIVSDIGPDYW

SEQ ID NO: 11066 - protein, 13 aa, Homo sapiens
CAKDHTGQYFDNW

SEQ ID NO: 11067 - protein, 19 aa, Homo sapiens
CAKMSTTTTTTEDDAFEIW

SEQ ID NO: 11068 - protein, 15 aa, Homo sapiens
CARLYPNLAVAADYW

SEQ ID NO: 11069 - protein, 18 aa, Homo sapiens
CAKDVTIFGVDPIAFDVW

SEQ ID NO: 11070 - protein, 17 aa, Homo sapiens
CARDPCASGVCYKLDYW

SEQ ID NO: 11071 - protein, 17 aa, Homo sapiens
CAKDDDDWGLKGYFDFW

SEQ ID NO: 11072 - protein, 16 aa, Homo sapiens
CARGTRDIVATTIDYW

SEQ ID NO: 11073 - protein, 12 aa, Homo sapiens
CTSGLPDPFDIW

SEQ ID NO: 11074 - protein, 21 aa, Homo sapiens
CVKDIGGLTYSSASSNHFDYW

SEQ ID NO: 11075 - protein, 19 aa, Homo sapiens
CARQGANTIFGVVIRFDPW

SEQ ID NO: 11076 - protein, 16 aa, Homo sapiens
CARATTFSYGTLFDYW

SEQ ID NO: 11077 - protein, 20 aa, Homo sapiens
CARHLPSYSSSSGFNWFDPW

SEQ ID NO: 11078 - protein, 23 aa, Homo sapiens
CAKDGYWHSLFRAVEHYYYMDVW

SEQ ID NO: 11079 - protein, 21 aa, Homo sapiens
CAKDDGITIFGVVYPEAIDYW

SEQ ID NO: 11080 - protein, 21 aa, Homo sapiens
CARGPGYCSSTSCHRGWFDPW

SEQ ID NO: 11081 - protein, 16 aa, Homo sapiens
CARGGPITGTSGMDYW

SEQ ID NO: 11082 - protein, 24 aa, Homo sapiens
CARVEGDHYDTTGRYSRRDIFDIW

SEQ ID NO: 11083 - protein, 16 aa, Homo sapiens
CAKGGARIVLTTVDYW

SEQ ID NO: 11084 - protein, 20 aa, Homo sapiens
CAKVHFGADFWSGRGGFDSW

SEQ ID NO: 11085 - protein, 17 aa, Homo sapiens
CARGLYWGFLEWYDDYW

SEQ ID NO: 11086 - protein, 17 aa, Homo sapiens
CARDQGDFWSGEERDYW

SEQ ID NO: 11087 - protein, 19 aa, Homo sapiens
CAHRLPFSVDWNVGWFDPW

SEQ ID NO: 11088 - protein, 19 aa, Homo sapiens
CAREWGQSYDFWSGYSDYW

SEQ ID NO: 11089 - protein, 17 aa, Homo sapiens
CAKGTGTDYDSGWFDSW

SEQ ID NO: 11090 - protein, 25 aa, Homo sapiens
CARVGNYYDSSGYYSGLTLYYFDYW

SEQ ID NO: 11091 - protein, 19 aa, Homo sapiens
CTTDVESRNRGSGNYFDYW

SEQ ID NO: 11092 - protein, 19 aa, Homo sapiens
CASSSPYNSSALGRAFDIW

SEQ ID NO: 11093 - protein, 19 aa, Homo sapiens
CAKERGGLSQYDSSGPDYW

SEQ ID NO: 11094 - protein, 11 aa, Homo sapiens
CLQSYTPPCSF

SEQ ID NO: 11095 - protein, 22 aa, Homo sapiens
CAHRLYYDFWSGYYNGGVFDYW

SEQ ID NO: 11096 - protein, 14 aa, Homo sapiens
CARRRGPGDGFDIW

SEQ ID NO: 11097 - protein, 15 aa, Homo sapiens
CATGDVDTAMAFDYW

SEQ ID NO: 11098 - protein, 17 aa, Homo sapiens
CARESIITRGSDAFDIW

SEQ ID NO: 11099 - protein, 15 aa, Homo sapiens
CARAVRMGDDYFDHW

SEQ ID NO: 11100 - protein, 16 aa, Homo sapiens
CATEINNHANSWFDPW

SEQ ID NO: 11101 - protein, 22 aa, Homo sapiens
CAKVSDYDFWSGYSYYYYMDVW

SEQ ID NO: 11102 - protein, 16 aa, Homo sapiens
CAKSTCGGDCGAFDIW

SEQ ID NO: 11103 - protein, 13 aa, Homo sapiens
CQQLYSEPPVCSF

SEQ ID NO: 11104 - protein, 19 aa, Homo sapiens
CAKDSRLFLLGADYYFDYW

SEQ ID NO: 11105 - protein, 19 aa, Homo sapiens
CASLGYYYDSSGYNQFDYW

SEQ ID NO: 11106 - protein, 23 aa, Homo sapiens
CAKGYSGYDFSRVLVPNDAFDIW

SEQ ID NO: 11107 - protein, 19 aa, Homo sapiens
CARGRGGQQLVHPYYFDYW

SEQ ID NO: 11108 - protein, 18 aa, Homo sapiens
CARGKDYDFWSGYYPIYW

SEQ ID NO: 11109 - protein, 16 aa, Homo sapiens
CSRGISLSQYGLFDYW

SEQ ID NO: 11110 - protein, 20 aa, Homo sapiens
CGKDYSDGYSSYLTYYFDYW

SEQ ID NO: 11111 - protein, 19 aa, Homo sapiens
CARVTHKLWFGENWYFDLW

SEQ ID NO: 11112 - protein, 15 aa, Homo sapiens
CAREGWVGPTFFDYW

SEQ ID NO: 11113 - protein, 22 aa, Homo sapiens
CARGERRITIFGVVIKGWFDPW

SEQ ID NO: 11114 - protein, 14 aa, Homo sapiens
CAHTSGQLYAIDYW

SEQ ID NO: 11115 - protein, 15 aa, Homo sapiens
CVREAYGSGSGLDYW

SEQ ID NO: 11116 - protein, 18 aa, Homo sapiens
CARGAVLRFLEWLPADYW

SEQ ID NO: 11117 - protein, 17 aa, Homo sapiens
CARGGDYDFWSGSFDYW

SEQ ID NO: 11118 - protein, 15 aa, Homo sapiens
CARQIGLYTAYFDPW

SEQ ID NO: 11119 - protein, 19 aa, Homo sapiens
CARPYRDPARDGPDAFDIW

SEQ ID NO: 11120 - protein, 17 aa, Homo sapiens
CANLDTSMTYSYYMDVW

SEQ ID NO: 11121 - protein, 15 aa, Homo sapiens
CVADVPDFEPQADYW

SEQ ID NO: 11122 - protein, 19 aa, Homo sapiens
CAKEEGYCNGGSCTGIDYW

SEQ ID NO: 11123 - protein, 21 aa, Homo sapiens
CAREQHHYDSSGFPVDYFDYW

SEQ ID NO: 11124 - protein, 20 aa, Homo sapiens
CAKDGYCVTHNCPSPGFDSW

SEQ ID NO: 11125 - protein, 20 aa, Homo sapiens
CAKDLYPTIFGVVHASFHYW

SEQ ID NO: 11126 - protein, 20 aa, Homo sapiens
CARGKGYCSGGSCLNWIDPW

SEQ ID NO: 11127 - protein, 16 aa, Homo sapiens
CARGYHSSSWYGVDYW

SEQ ID NO: 11128 - protein, 17 aa, Homo sapiens
CAKDPGFSGAVAYFEYW

SEQ ID NO: 11129 - protein, 16 aa, Homo sapiens
CARGSDTAMAAVADYW

SEQ ID NO: 11130 - protein, 16 aa, Homo sapiens
CAKDILEWLQGYMDVW

SEQ ID NO: 11131 - protein, 16 aa, Homo sapiens
CAKGYGYYEHDAFDMW

SEQ ID NO: 11132 - protein, 22 aa, Homo sapiens
CAKRSPTIFGVVPPPGDSFDIW

SEQ ID NO: 11133 - protein, 15 aa, Homo sapiens
CARHSSYDFWTFDYW

SEQ ID NO: 11134 - protein, 18 aa, Homo sapiens
CARVGMVRGVISYYFDYW

SEQ ID NO: 11135 - protein, 22 aa, Homo sapiens
CATEPYCNNTSCSAAKHLIDYW

SEQ ID NO: 11136 - protein, 19 aa, Homo sapiens
CARDPIHCSSTSCFLFDYW

SEQ ID NO: 11137 - protein, 19 aa, Homo sapiens
CARHFGPSDSSGWYYYSYW

SEQ ID NO: 11138 - protein, 19 aa, Homo sapiens
CVKHRGFSTTMLDDSFDLW

SEQ ID NO: 11139 - protein, 16 aa, Homo sapiens
CTAELGPDNYNNVDYW

SEQ ID NO: 11140 - protein, 22 aa, Homo sapiens
CARDRLTLRHFDQLPDEPFDLW

SEQ ID NO: 11141 - protein, 16 aa, Homo sapiens
CARVEEYGDPEYLQHW

SEQ ID NO: 11142 - protein, 17 aa, Homo sapiens
CARDGRVLVWFGELDYW

SEQ ID NO: 11143 - protein, 21 aa, Homo sapiens
CATKPITIFGVVIRARWFDYW

SEQ ID NO: 11144 - protein, 18 aa, Homo sapiens
CAKCYEQYSYGYLGVDYW

SEQ ID NO: 11145 - protein, 18 aa, Homo sapiens
CVRDQTLVPWGFDAFDVW

SEQ ID NO: 11146 - protein, 13 aa, Homo sapiens
CASSKWQYQLDYW

SEQ ID NO: 11147 - protein, 18 aa, Homo sapiens
CARDRDLGIDYYYYMDVW

SEQ ID NO: 11148 - protein, 22 aa, Homo sapiens
CARDRCSSTSCYNGPRGWFDPW

SEQ ID NO: 11149 - protein, 20 aa, Homo sapiens
CARLSPSGWYDGGLGYFDYW

SEQ ID NO: 11150 - protein, 16 aa, Homo sapiens
CARSSDILYYYYMDVW

SEQ ID NO: 11151 - protein, 21 aa, Homo sapiens
CARDYPGDCSSTNCPGTFDIW

SEQ ID NO: 11152 - protein, 17 aa, Homo sapiens
CAKGNMVYATPWYFDLW

SEQ ID NO: 11153 - protein, 20 aa, Homo sapiens
CARLWDVVLTFRDPGWFDPW

SEQ ID NO: 11154 - protein, 17 aa, Homo sapiens
CARSIAARPNGDIFNIW

SEQ ID NO: 11155 - protein, 17 aa, Homo sapiens
CAREDVLRYFVYAFDIW

SEQ ID NO: 11156 - protein, 14 aa, Homo sapiens
CARHSRSARALDIW

SEQ ID NO: 11157 - protein, 19 aa, Homo sapiens
CARIGVWGSYRYNDWFDPW

SEQ ID NO: 11158 - protein, 22 aa, Homo sapiens
CAKDLRYCSSPDCYTEDGFDIW

SEQ ID NO: 11159 - protein, 12 aa, Homo sapiens
CQQYDNALSLSF

SEQ ID NO: 11160 - protein, 13 aa, Homo sapiens
CQQSYSTLPMYTF

SEQ ID NO: 11161 - protein, 17 aa, Homo sapiens
CSKTYMIGSTYNYFDPW

SEQ ID NO: 11162 - protein, 18 aa, Homo sapiens
CARRTLLYSSGWYYFDHW

SEQ ID NO: 11163 - protein, 16 aa, Homo sapiens
CAKVLPGSSGWIFDYW

SEQ ID NO: 11164 - protein, 14 aa, Homo sapiens
CVKEGDSFGYADNW

SEQ ID NO: 11165 - protein, 12 aa, Homo sapiens
CQSADSGGSWMF

SEQ ID NO: 11166 - protein, 24 aa, Homo sapiens
CAKDPHSSGYYYDQRKSRDAFDIW

SEQ ID NO: 11167 - protein, 15 aa, Homo sapiens
CARRLSPHHDTFDIW

SEQ ID NO: 11168 - protein, 19 aa, Homo sapiens
CAKNIAGSGWYYGVCFDIW

SEQ ID NO: 11169 - protein, 14 aa, Homo sapiens
CANAVMGAYLFDNW

SEQ ID NO: 11170 - protein, 17 aa, Homo sapiens
CTRGGFTIFEENWFDPW

SEQ ID NO: 11171 - protein, 17 aa, Homo sapiens
CARDRSPYDYPSWFDLW

SEQ ID NO: 11172 - protein, 19 aa, Homo sapiens
CARRKVVPAAPFSTGFDPW

SEQ ID NO: 11173 - protein, 15 aa, Homo sapiens
CARDFQGIDDAFDVW

SEQ ID NO: 11174 - protein, 14 aa, Homo sapiens
CAKKPRLSGAFDIW

SEQ ID NO: 11175 - protein, 15 aa, Homo sapiens
CAYTPGNGYTHFSYW

SEQ ID NO: 11176 - protein, 22 aa, Homo sapiens
CVRDPEEYCSSTSYRKYYFDYW

SEQ ID NO: 11177 - protein, 18 aa, Homo sapiens
CARDYYDSSGYSRPFDYW

SEQ ID NO: 11178 - protein, 15 aa, Homo sapiens
CARLLGPGGDPIDYW

SEQ ID NO: 11179 - protein, 16 aa, Homo sapiens
CARSHSASGNLEFDYW

SEQ ID NO: 11180 - protein, 17 aa, Homo sapiens
CARDGGTSGHDWYFDLW

SEQ ID NO: 11181 - protein, 21 aa, Homo sapiens
CARGGSCSVTTCYPRSTFDIW

SEQ ID NO: 11182 - protein, 13 aa, Homo sapiens
CARERTGYYAEYW

SEQ ID NO: 11183 - protein, 17 aa, Homo sapiens
CARIGNSGGGYYDLDYW

SEQ ID NO: 11184 - protein, 21 aa, Homo sapiens
CARPIFGADYCGRSCHIFDSW

SEQ ID NO: 11185 - protein, 16 aa, Homo sapiens
CARVGGSSEWYNFDYW

SEQ ID NO: 11186 - protein, 17 aa, Homo sapiens
CARTIIVVEVLDAFDIW

SEQ ID NO: 11187 - protein, 20 aa, Homo sapiens
CARQRRIAQEGSPKYYFDYW

SEQ ID NO: 11188 - protein, 14 aa, Homo sapiens
CAGERPHSLYFQLW

SEQ ID NO: 11189 - protein, 17 aa, Homo sapiens
CTTATGSGSRRWYFDLW

SEQ ID NO: 11190 - protein, 15 aa, Homo sapiens
CARDLMTTVTTGDYW

SEQ ID NO: 11191 - protein, 22 aa, Homo sapiens
CARCPADCSGGTCYFFYYFDYW

SEQ ID NO: 11192 - protein, 14 aa, Homo sapiens
CAKRWGDADYSDYW

SEQ ID NO: 11193 - protein, 24 aa, Homo sapiens
CARDCPIPGFWSGYSMYYQYMDVW

SEQ ID NO: 11194 - protein, 13 aa, Homo sapiens
CARVDNWNYVDYW

SEQ ID NO: 11195 - protein, 21 aa, Homo sapiens
CARDRGGYSGYDHVAPLIDYW

SEQ ID NO: 11196 - protein, 14 aa, Homo sapiens
CCSYAGSSTVRWVF

SEQ ID NO: 11197 - protein, 15 aa, Homo sapiens
CAREPDYSAGGFDSW

SEQ ID NO: 11198 - protein, 19 aa, Homo sapiens
CAKDVDIAMVRLWGALDYW

SEQ ID NO: 11199 - protein, 18 aa, Homo sapiens
CARTNVDTSMTTRWFDPW

SEQ ID NO: 11200 - protein, 14 aa, Homo sapiens
CARTHVTGTGLDYW

SEQ ID NO: 11201 - protein, 22 aa, Homo sapiens
CARVPRKRYCTNGVCPWYFDLW

SEQ ID NO: 11202 - protein, 19 aa, Homo sapiens
CARPVRGVEVKSDWYFDLW

SEQ ID NO: 11203 - protein, 14 aa, Homo sapiens
CQSYDSGLTVSWVF

SEQ ID NO: 11204 - protein, 21 aa, Homo sapiens
CARPVYGSGSYPLDLGAFDIW

SEQ ID NO: 11205 - protein, 21 aa, Homo sapiens
CARDEAGKYQLLWAWVGIDYW

SEQ ID NO: 11206 - protein, 17 aa, Homo sapiens
CASIYYDSSDYSGFDYW

SEQ ID NO: 11207 - protein, 16 aa, Homo sapiens
CAKGGCSSTSCSFDYW

SEQ ID NO: 11208 - protein, 20 aa, Homo sapiens
CASRVSSIYGVLINDVFDLW

SEQ ID NO: 11209 - protein, 20 aa, Homo sapiens
CARIVRYCTNGVCYHYFDYW

SEQ ID NO: 11210 - protein, 13 aa, Homo sapiens
CSSTSCQGAFDIW

SEQ ID NO: 11211 - protein, 15 aa, Homo sapiens
CATQHVGRPFYFDYW

SEQ ID NO: 11212 - protein, 17 aa, Homo sapiens
CAKLLKLEWLSTPFDYW

SEQ ID NO: 11213 - protein, 14 aa, Homo sapiens
CARSYGFYYAFDIW

SEQ ID NO: 11214 - protein, 17 aa, Homo sapiens
CARDIVVVAAARGFEYW

SEQ ID NO: 11215 - protein, 13 aa, Homo sapiens
CVRDSFMADLDYW

SEQ ID NO: 11216 - protein, 28 aa, Homo sapiens
CARSHCSTTSCYIGSIAARLRYHYMDVW

SEQ ID NO: 11217 - protein, 15 aa, Homo sapiens
CARFAVVPSPYFDFW

SEQ ID NO: 11218 - protein, 21 aa, Homo sapiens
CARIPLYNYDSSGHYGAFDIW

SEQ ID NO: 11219 - protein, 16 aa, Homo sapiens
CARDIGLSNTRRFDPW

SEQ ID NO: 11220 - protein, 22 aa, Homo sapiens
CARGGRCSSTSCYFPNDWFDPW

SEQ ID NO: 11221 - protein, 20 aa, Homo sapiens
CARHGRYYGSSRLYYYMDVW

SEQ ID NO: 11222 - protein, 17 aa, Homo sapiens
CARHMQMGTIHDAFDIW

SEQ ID NO: 11223 - protein, 24 aa, Homo sapiens
CARHRTGGAVYYDFWSGPYYFDYW

SEQ ID NO: 11224 - protein, 16 aa, Homo sapiens
CARHRDYGDPGSFDYW

SEQ ID NO: 11225 - protein, 22 aa, Homo sapiens
CAHRRPTRITKIGLHGDYFEYW

SEQ ID NO: 11226 - protein, 21 aa, Homo sapiens
CARLGYCSSTSCQIASDLDYW

SEQ ID NO: 11227 - protein, 18 aa, Homo sapiens
CARAYRDSSSWYLYFQHW

SEQ ID NO: 11228 - protein, 17 aa, Homo sapiens
CTRDPGYDRHDWYFDLW

SEQ ID NO: 11229 - protein, 18 aa, Homo sapiens
CAREVDYDDYVDDAFDIW

SEQ ID NO: 11230 - protein, 17 aa, Homo sapiens
CARHPGGGRGKYAFDIW

SEQ ID NO: 11231 - protein, 18 aa, Homo sapiens
CARDSRYDVYYSYYMDVW

SEQ ID NO: 11232 - protein, 21 aa, Homo sapiens
CARTRASLSGISGNRDAFDIW

SEQ ID NO: 11233 - protein, 16 aa, Homo sapiens
CTRDPSDYGDYGFDYW

SEQ ID NO: 11234 - protein, 15 aa, Homo sapiens
CACYYESSGYRLDYW

SEQ ID NO: 11235 - protein, 18 aa, Homo sapiens
CAREGYHASGSSGSFDYW

SEQ ID NO: 11236 - protein, 13 aa, Homo sapiens
CARMKSDFAFDYW

SEQ ID NO: 11237 - protein, 17 aa, Homo sapiens
CARSAAAGKLSTWFDPW

SEQ ID NO: 11238 - protein, 15 aa, Homo sapiens
CARRDWYGDYEVDYW

SEQ ID NO: 11239 - protein, 21 aa, Homo sapiens
CARSNPVYSFDPSSYLGFDYW

SEQ ID NO: 11240 - protein, 18 aa, Homo sapiens
CAKHRVIYDSGPGPLDYW

SEQ ID NO: 11241 - protein, 15 aa, Homo sapiens
CASGRRGNPYSFDYW

SEQ ID NO: 11242 - protein, 17 aa, Homo sapiens
CARPLTTARGWYYFDYW

SEQ ID NO: 11243 - protein, 24 aa, Homo sapiens
CARNKGYDFWSGGIYYYYYYMDVW

SEQ ID NO: 11244 - protein, 19 aa, Homo sapiens
CARGAYCSGGTCYRPFDYW

SEQ ID NO: 11245 - protein, 15 aa, Homo sapiens
CAKDRGPTWYFFDSW

SEQ ID NO: 11246 - protein, 11 aa, Homo sapiens
CQHYYTTPIAF

SEQ ID NO: 11247 - protein, 22 aa, Homo sapiens
CARHQYLGMAPVGSGGEYFQHW

SEQ ID NO: 11248 - protein, 21 aa, Homo sapiens
CAREFPRRSSSWYSPDAFDIW

SEQ ID NO: 11249 - protein, 18 aa, Homo sapiens
CARGPDYCDSNGYLFDYW

SEQ ID NO: 11250 - protein, 18 aa, Homo sapiens
CAKILRLGEVWFTYFDYW

SEQ ID NO: 11251 - protein, 13 aa, Homo sapiens
CSTSFRSGTFDNW

SEQ ID NO: 11252 - protein, 16 aa, Homo sapiens
CARSAYSSSSAPFDYW

SEQ ID NO: 11253 - protein, 13 aa, Homo sapiens
CLSADNSGTYLMF

SEQ ID NO: 11254 - protein, 18 aa, Homo sapiens
CARDEVIAAAAPSLVDYW

SEQ ID NO: 11255 - protein, 20 aa, Homo sapiens
CAKSITFGGVIVPTDGFDVW

SEQ ID NO: 11256 - protein, 22 aa, Homo sapiens
CARDLGDYDFWSGYSDDAFDIW

SEQ ID NO: 11257 - protein, 20 aa, Homo sapiens
CVRDLELLKEWLANDGFDIW

SEQ ID NO: 11258 - protein, 16 aa, Homo sapiens
CARHQRGYSSRPFDFW

SEQ ID NO: 11259 - protein, 17 aa, Homo sapiens
CAREPEVRGDEGHFDYW

SEQ ID NO: 11260 - protein, 20 aa, Homo sapiens
CASAYFDSNFYYYNWYFDLW

SEQ ID NO: 11261 - protein, 20 aa, Homo sapiens
CATEGDIVVVPAVTYYMDVW

SEQ ID NO: 11262 - protein, 18 aa, Homo sapiens
CARVAYCSGGSCWNFDSW

SEQ ID NO: 11263 - protein, 20 aa, Homo sapiens
CVRDKWLLGDAVTDDAFDIW

SEQ ID NO: 11264 - protein, 16 aa, Homo sapiens
CVKKDSTVIKGGFDHW

SEQ ID NO: 11265 - protein, 14 aa, Homo sapiens
CYSTDTSGRHRGVF

SEQ ID NO: 11266 - protein, 18 aa, Homo sapiens
CAKALRQDYTYDDYMDVW

SEQ ID NO: 11267 - protein, 14 aa, Homo sapiens [sequence omitted]

SEQ ID NO: 11268 - protein, 19 aa, Homo sapiens
CARSPNFGGWQVSLYFDYW

SEQ ID NO: 11269 - protein, 18 aa, Homo sapiens
CAKEITRRSSNGWPLDYW

SEQ ID NO: 11270 - protein, 13 aa, Homo sapiens
CARDPKWLRLDYW

SEQ ID NO: 11271 - protein, 18 aa, Homo sapiens
CARDIDYYGSGRSRFDPW

SEQ ID NO: 11272 - protein, 19 aa, Homo sapiens
CARPNNPTVIIGEYYFNYW

SEQ ID NO: 11273 - protein, 17 aa, Homo sapiens
CAKDGRSSGWPYYFDYW

SEQ ID NO: 11274 - protein, 17 aa, Homo sapiens
CARRPDSSGYQNAFDIW

SEQ ID NO: 11275 - protein, 17 aa, Homo sapiens
CARGMAGIPHDYYIDVW

SEQ ID NO: 11276 - protein, 18 aa, Homo sapiens
CARVRGWQTYRYAYFDSW

SEQ ID NO: 11277 - protein, 14 aa, Homo sapiens
CQVWDSKSAHGGVF

SEQ ID NO: 11278 - protein, 14 aa, Homo sapiens
CARDTASRERSDYW

SEQ ID NO: 11279 - protein, 13 aa, Homo sapiens
CAKAYGGYHFDYW

SEQ ID NO: 11280 - protein, 13 aa, Homo sapiens
CASLLRSRYVDYW

SEQ ID NO: 11281 - protein, 21 aa, Homo sapiens
CARVRVYCSSTSCEGSEFDPW

SEQ ID NO: 11282 - protein, 19 aa, Homo sapiens
CAKDISPIAAAGNNRFDPW

SEQ ID NO: 11283 - protein, 14 aa, Homo sapiens
CATAGYYDSSFDDW

SEQ ID NO: 11284 - protein, 12 aa, Homo sapiens
CMQTTQFPHITF

SEQ ID NO: 11285 - protein, 15 aa, Homo sapiens
CATETSAWYEIFDHW

SEQ ID NO: 11286 - protein, 13 aa, Homo sapiens
CQQYNSWPLGFTF

SEQ ID NO: 11287 - protein, 19 aa, Homo sapiens
CARVVGAVAGTLVEAFDIW

SEQ ID NO: 11288 - protein, 11 aa, Homo sapiens
CASVLPTIDYW

SEQ ID NO: 11289 - protein, 20 aa, Homo sapiens
CAKGAGPYCDSATCYTFDYW

SEQ ID NO: 11290 - protein, 16 aa, Homo sapiens
CARGEYSSSMAAFDVW

SEQ ID NO: 11291 - protein, 18 aa, Homo sapiens
CEIDCYDNRGPQDAFDVW

SEQ ID NO: 11292 - protein, 20 aa, Homo sapiens
CARDKAYFDSSGYYDAFDIW

SEQ ID NO: 11293 - protein, 15 aa, Homo sapiens
CQSYDTSLSASHVVF

SEQ ID NO: 11294 - protein, 17 aa, Homo sapiens
CARDCSSTSCPWTFDYW

SEQ ID NO: 11295 - protein, 17 aa, Homo sapiens
CAKDRTRAQTTRTLDYW

SEQ ID NO: 11296 - protein, 12 aa, Homo sapiens
CMQSQKLPLYTF

SEQ ID NO: 11297 - protein, 13 aa, Homo sapiens
CQVWDGSSGHRLF

SEQ ID NO: 11298 - protein, 20 aa, Homo sapiens
CARGSGLCYGATCYQYFDHW

SEQ ID NO: 11299 - protein, 12 aa, Homo sapiens
CAKDNWGAADIW

SEQ ID NO: 11300 - protein, 18 aa, Homo sapiens
CATSPPPTVTWSRYFDSW

SEQ ID NO: 11301 - protein, 17 aa, Homo sapiens
CAKDKGTPFFGVAIDYW

SEQ ID NO: 11302 - protein, 18 aa, Homo sapiens
CTTHSVLYSNYPTPFDYW

SEQ ID NO: 11303 - protein, 15 aa, Homo sapiens
CASLVVVFRTDVDYW

SEQ ID NO: 11304 - protein, 14 aa, Homo sapiens
CARLVTNGWYFDYW

SEQ ID NO: 11305 - protein, 15 aa, Homo sapiens
CISSTERYRTNFDIW

SEQ ID NO: 11306 - protein, 15 aa, Homo sapiens
CASSIFDVEAAFDFW

SEQ ID NO: 11307 - protein, 19 aa, Homo sapiens
CARPRGVERTVTPDAFNIW

SEQ ID NO: 11308 - protein, 18 aa, Homo sapiens
CARDFSGTVTRPGYCDYW

SEQ ID NO: 11309 - protein, 21 aa, Homo sapiens
CVKGGGSIDGRTPYIWFFDFW

SEQ ID NO: 11310 - protein, 23 aa, Homo sapiens
CARHHGGYDYVWGSYRPYYFDYW

SEQ ID NO: 11311 - protein, 18 aa, Homo sapiens
CAIVVVPATTGHDAFDIW

SEQ ID NO: 11312 - protein, 18 aa, Homo sapiens
CVRVSRDFQTNNNWFDLW

SEQ ID NO: 11313 - protein, 17 aa, Homo sapiens
CVKFRSGSRWFDYLDYW

SEQ ID NO: 11314 - protein, 15 aa, Homo sapiens
CQSHDSSPGAYNYVF

SEQ ID NO: 11315 - protein, 15 aa, Homo sapiens
CARLYNNSWYYFDYW

SEQ ID NO: 11316 - protein, 18 aa, Homo sapiens
CARDEGGISGTTGGIDYW

SEQ ID NO: 11317 - protein, 16 aa, Homo sapiens
CVRDYHFGPTWAFDMW

SEQ ID NO: 11318 - protein, 16 aa, Homo sapiens
CARVYYYESHGRIDYW

SEQ ID NO: 11319 - protein, 17 aa, Homo sapiens
CARAGQFGDFQSYIDSW

SEQ ID NO: 11320 - protein, 17 aa, Homo sapiens
CAKIQRLSDFWSGIDYW

SEQ ID NO: 11321 - protein, 19 aa, Homo sapiens
CARDDSRGVVVPAAIIDYW

SEQ ID NO: 11322 - protein, 18 aa, Homo sapiens
CAKDGSEWELVTEPFDYW

SEQ ID NO: 11323 - protein, 24 aa, Homo sapiens
CARLTPYYYDSSGYYYAGNYFDYW

SEQ ID NO: 11324 - protein, 17 aa, Homo sapiens
CARRGYDSSGYDAFDIW

SEQ ID NO: 11325 - protein, 14 aa, Homo sapiens
CAREAVTTVSLDYW

SEQ ID NO: 11326 - protein, 19 aa, Homo sapiens
CAKGGAGSSSWYPYYFDYW

SEQ ID NO: 11327 - protein, 16 aa, Homo sapiens
CVRDEGRQSQNNFDIW

SEQ ID NO: 11328 - protein, 19 aa, Homo sapiens
CARRSTSSMTPQDNWFDPW

SEQ ID NO: 11329 - protein, 18 aa, Homo sapiens
CARDSSIDELVFRTGDYW

SEQ ID NO: 11330 - protein, 16 aa, Homo sapiens
CTREVAIGGSYFSDYW

SEQ ID NO: 11331 - protein, 15 aa, Homo sapiens
CAKDQYDTSGSFDYW

SEQ ID NO: 11332 - protein, 16 aa, Homo sapiens
CTREYFGTVDGAFDVW

SEQ ID NO: 11333 - protein, 19 aa, Homo sapiens
CAQDATRPYSSSWYYFDYW

SEQ ID NO: 11334 - protein, 19 aa, Homo sapiens
CAKDYDYVWGSYSVAFDIW

SEQ ID NO: 11335 - protein, 14 aa, Homo sapiens
CARRQYQLQPDDYW

SEQ ID NO: 11336 - protein, 17 aa, Homo sapiens
CAKPYYGGNSYDAFDIW

SEQ ID NO: 11337 - protein, 15 aa, Homo sapiens
CARSRPAARGAFDIW

SEQ ID NO: 11338 - protein, 17 aa, Homo sapiens
CAREGHDSFGYFRFDYW

SEQ ID NO: 11339 - protein, 14 aa, Homo sapiens
CAKEPSELAIADYW

SEQ ID NO: 11340 - protein, 23 aa, Homo sapiens
CARDQATADCSGLSCQYNWFVPW

SEQ ID NO: 11341 - protein, 40 aa, Homo sapiens
CDWSSDVCSSDLADTAVYYCALKRIKLIRGLITGNYFDYW

SEQ ID NO: 11342 - protein, 18 aa, Homo sapiens
CAREGCGADCFHDAFEVW

SEQ ID NO: 11343 - protein, 19 aa, Homo sapiens
CARLIKETLTWSGLYFDYW

SEQ ID NO: 11344 - protein, 19 aa, Homo sapiens
CTKVASRLNMVRGAPFDYW

SEQ ID NO: 11345 - protein, 17 aa, Homo sapiens
CAKDNGIVVLPAGFDNW

SEQ ID NO: 11346 - protein, 23 aa, Homo sapiens
CARVPVPAAKPTTLVGYYYLDVW

SEQ ID NO: 11347 - protein, 16 aa, Homo sapiens
CARDGILVVPAAIDYW

SEQ ID NO: 11348 - protein, 19 aa, Homo sapiens
CARHVNRLPVATNNWFDPW

SEQ ID NO: 11349 - protein, 17 aa, Homo sapiens
CAREHLPYYYFYAMDVW

SEQ ID NO: 11350 - protein, 19 aa, Homo sapiens
CARKFGSGTYDNGAWIDPW

SEQ ID NO: 11351 - protein, 16 aa, Homo sapiens
CARLAIAVAGETDDYW

SEQ ID NO: 11352 - protein, 23 aa, Homo sapiens
CARDVIDCSSMSCLSYNYYMDVW

SEQ ID NO: 11353 - protein, 21 aa, Homo sapiens
CARSPNYDFWSGYSTYNFDHW

SEQ ID NO: 11354 - protein, 22 aa, Homo sapiens
CARDRFLQTGQGMKVAAWFDPW

SEQ ID NO: 11355 - protein, 22 aa, Homo sapiens
CARHVPFGSGRRGDYYYYMDVW

SEQ ID NO: 11356 - protein, 13 aa, Homo sapiens
CARSPNDWALDYW

SEQ ID NO: 11357 - protein, 20 aa, Homo sapiens
CAKGSLDFWSGYRNHYFDHW

SEQ ID NO: 11358 - protein, 22 aa, Homo sapiens
CARYAYCSGTGCPMRQLGFDPW

SEQ ID NO: 11359 - protein, 15 aa, Homo sapiens
CARLRVTTTRDFDYW

SEQ ID NO: 11360 - protein, 15 aa, Homo sapiens
CQEYNTYSLEVLLTF

SEQ ID NO: 11361 - protein, 14 aa, Homo sapiens
CAKGEKISGDFDYW

SEQ ID NO: 11362 - protein, 11 aa, Homo sapiens
CAGPYYYFDIW

SEQ ID NO: 11363 - protein, 19 aa, Homo sapiens
CARGVPLGYDGTSYYFFSW

SEQ ID NO: 11364 - protein, 16 aa, Homo sapiens
CASLGIAASGEQTDYW

SEQ ID NO: 11365 - protein, 19 aa, Homo sapiens
CAKDYHLPVDGKSGYFDNW

SEQ ID NO: 11366 - protein, 15 aa, Homo sapiens
CARGGSSSSPFYDYW

SEQ ID NO: 11367 - protein, 18 aa, Homo sapiens
CAKDLSGLTIYGGYFDYW

SEQ ID NO: 11368 - protein, 15 aa, Homo sapiens
CAGERAWSASPIDYW

SEQ ID NO: 11369 - protein, 18 aa, Homo sapiens
CARHSLVGLIWNSYFDPW

SEQ ID NO: 11370 - protein, 17 aa, Homo sapiens
CARFLAVSTSWPPFDHW

SEQ ID NO: 11371 - protein, 17 aa, Homo sapiens
CARHGGSGWYDDTFHIW

SEQ ID NO: 11372 - protein, 21 aa, Homo sapiens
CARGTWDSSGYYGEEPAFDSW

SEQ ID NO: 11373 - protein, 18 aa, Homo sapiens
CARVGNWNPGGIYYFDYW

SEQ ID NO: 11374 - protein, 18 aa, Homo sapiens
CARSDPGYSYGYGAFDIW

SEQ ID NO: 11375 - protein, 16 aa, Homo sapiens
CASGVVPAAKHWFDPW

SEQ ID NO: 11376 - protein, 17 aa, Homo sapiens
CARPGRDSHYYYYMDVW

SEQ ID NO: 11377 - protein, 19 aa, Homo sapiens
CAREFRSSGDKIYGAFDIW

SEQ ID NO: 11378 - protein, 15 aa, Homo sapiens
CARDHEDSTEDFDYW

SEQ ID NO: 11379 - protein, 20 aa, Homo sapiens
CAREECDIAVAPAACFNDYW

SEQ ID NO: 11380 - protein, 18 aa, Homo sapiens
CTKGHSYKRDDVSAFDIW

SEQ ID NO: 11381 - protein, 12 aa, Homo sapiens
CQSYDSVHHWLF

SEQ ID NO: 11382 - protein, 19 aa, Homo sapiens
CARDLEGFSYDYYHPFDVW

SEQ ID NO: 11383 - protein, 18 aa, Homo sapiens
CARVPAVAGSHLSFFDSW

SEQ ID NO: 11384 - protein, 16 aa, Homo sapiens
CTRSWIREYYYYMDVW

SEQ ID NO: 11385 - protein, 24 aa, Homo sapiens
CARDSSCSNIECYGVDYYHYMDVW

SEQ ID NO: 11386 - protein, 16 aa, Homo sapiens
CAKGSRQWLVQTFDYW

SEQ ID NO: 11387 - protein, 16 aa, Homo sapiens
CARGEIFEVIISLDYW

SEQ ID NO: 11388 - protein, 17 aa, Homo sapiens
CARGRGTEWATNTFASW

SEQ ID NO: 11389 - protein, 17 aa, Homo sapiens
CVRDQGIELWLYVFDVW

SEQ ID NO: 11390 - protein, 20 aa, Homo sapiens
CANPVYDILTGSDRYAFDIW

SEQ ID NO: 11391 - protein, 20 aa, Homo sapiens
CARDEHLAAAVPNRNAFDIW

SEQ ID NO: 11392 - protein, 16 aa, Homo sapiens
CAHKRGDNNYEWFDPW

SEQ ID NO: 11393 - protein, 15 aa, Homo sapiens
CAGGIYSNLNWFDPW

SEQ ID NO: 11394 - protein, 16 aa, Homo sapiens
CARSRVPASTYYFDYW

SEQ ID NO: 11395 - protein, 19 aa, Homo sapiens
CATLPRANFGAPGGYFDNW

SEQ ID NO: 11396 - protein, 19 aa, Homo sapiens
CAKDIRIAVAGTGGAFDIW

SEQ ID NO: 11397 - protein, 20 aa, Homo sapiens
CAKDAYNKPYYRYYYYMDVW

SEQ ID NO: 11398 - protein, 15 aa, Homo sapiens
CAKGGWRMRDKFDPW

SEQ ID NO: 11399 - protein, 23 aa, Homo sapiens
CARGEMANDAQEKYTSYYYMDIW

SEQ ID NO: 11400 - protein, 12 aa, Homo sapiens
CQQSFTTPLTSF

SEQ ID NO: 11401 - protein, 15 aa, Homo sapiens
CAKEAEQWLAPKDYW

SEQ ID NO: 11402 - protein, 17 aa, Homo sapiens
CAREIPHDYYPYYFDLW

SEQ ID NO: 11403 - protein, 16 aa, Homo sapiens
CARGHSSGRYNWFDPW

SEQ ID NO: 11404 - protein, 20 aa, Homo sapiens
CARVGICSGGDCYYGAFDIW

SEQ ID NO: 11405 - protein, 17 aa, Homo sapiens
CAKEGAGQLYLYYFDYW

SEQ ID NO: 11406 - protein, 12 aa, Homo sapiens
CQTWSTGPDWVF

SEQ ID NO: 11407 - protein, 19 aa, Homo sapiens
CAKEFILTSRYREEPFDYW

SEQ ID NO: 11408 - protein, 17 aa, Homo sapiens
CARDWGGDVQSDAFDIW

SEQ ID NO: 11409 - protein, 16 aa, Homo sapiens
CARWGISAAHDALDVW

SEQ ID NO: 11410 - protein, 12 aa, Homo sapiens
CVLASLVTFDYW

SEQ ID NO: 11411 - protein, 15 aa, Homo sapiens
CARANSSSADAFDIW

SEQ ID NO: 11412 - protein, 15 aa, Homo sapiens
CARDPDYHDNRFDPW

SEQ ID NO: 11413 - protein, 10 aa, Homo sapiens
CQQYGSLWPF

SEQ ID NO: 11414 - protein, 18 aa, Homo sapiens
CARGKINDGPSPDIFDIW

SEQ ID NO: 11415 - protein, 8 aa, Homo sapiens
CGVFPDYW

SEQ ID NO: 11416 - protein, 12 aa, Homo sapiens
CQSADTRGNVIF

SEQ ID NO: 11417 - protein, 15 aa, Homo sapiens
CAAWDNSLSSPNWEF

SEQ ID NO: 11418 - protein, 14 aa, Homo sapiens
CARDYSSTNGLDYW

SEQ ID NO: 11419 - protein, 23 aa, Homo sapiens
CAKDNGKRAPYQEQMVYAPPDYW

SEQ ID NO: 11420 - protein, 17 aa, Homo sapiens
CARDVCTRSSCYSFDYW

SEQ ID NO: 11421 - protein, 13 aa, Homo sapiens
CMHGIHWPPKRTF

SEQ ID NO: 11422 - protein, 17 aa, Homo sapiens
CTAEVSTMVRDNWFDPW

SEQ ID NO: 11423 - protein, 12 aa, Homo sapiens
CQQFNSFPALGF

SEQ ID NO: 11424 - protein, 17 aa, Homo sapiens
CAKPYRMEVLNYYFDFW

SEQ ID NO: 11425 - protein, 17 aa, Homo sapiens
CARDSFGYNILTGPDYW

SEQ ID NO: 11426 - protein, 18 aa, Homo sapiens
CSRQETYDVLPDGAFDIW

SEQ ID NO: 11427 - protein, 17 aa, Homo sapiens
CARELGILVGTATLDYW

SEQ ID NO: 11428 - protein, 23 aa, Homo sapiens
CARGRVSYYYDSSGYYWGGFDIW

SEQ ID NO: 11429 - protein, 13 aa, Homo sapiens
CAHRRGAAVIDYW

SEQ ID NO: 11430 - protein, 25 aa, Homo sapiens
CARAAKLCADGVCSNYYFHYYMDVW

SEQ ID NO: 11431 - protein, 16 aa, Homo sapiens
CAKSGPYGLSDAFDIW

SEQ ID NO: 11432 - protein, 23 aa, Homo sapiens
CARGGYCSTIDCHPGTRDAFNVW

SEQ ID NO: 11433 - protein, 15 aa, Homo sapiens
CARDLVPAAIHFDYW

SEQ ID NO: 11434 - protein, 20 aa, Homo sapiens
CARHYYDSSSYLIGYACDVW

SEQ ID NO: 11435 - protein, 18 aa, Homo sapiens
CARGMYSSGWYPDYFDYW

SEQ ID NO: 11436 - protein, 13 aa, Homo sapiens
CARDWPIGLFDHW

SEQ ID NO: 11437 - protein, 16 aa, Homo sapiens
CAKDDDYDPSEAFDIW

SEQ ID NO: 11438 - protein, 14 aa, Homo sapiens
CARGFQTISAFDLW

SEQ ID NO: 11439 - protein, 17 aa, Homo sapiens
CAKDSADMNTAIDLDYW

SEQ ID NO: 11440 - protein, 15 aa, Homo sapiens
CARDEPRSHGALDVW

SEQ ID NO: 11441 - protein, 20 aa, Homo sapiens
CVKLPHLDFWSGYYAYFDCW

SEQ ID NO: 11442 - protein, 16 aa, Homo sapiens
CAREARQSGLGAFDIW

SEQ ID NO: 11443 - protein, 17 aa, Homo sapiens
CARRRAVAERLYYFDYW

SEQ ID NO: 11444 - protein, 20 aa, Homo sapiens
CATTYCSSTSCYKPNAFDIW

SEQ ID NO: 11445 - protein, 15 aa, Homo sapiens
CARRSSYGHTVFDYW

SEQ ID NO: 11446 - protein, 20 aa, Homo sapiens
CARVVDYDFWSGYAYYFDYW

SEQ ID NO: 11447 - protein, 20 aa, Homo sapiens
CVKDPSCSSTSCYSRAFDIW

SEQ ID NO: 11448 - protein, 13 aa, Homo sapiens
CAKGLGMGCFDYW

SEQ ID NO: 11449 - protein, 17 aa, Homo sapiens
CATGARRGYDFYYLDVW

SEQ ID NO: 11450 - protein, 16 aa, Homo sapiens
CAKEPYRSSWYYFDYW

SEQ ID NO: 11451 - protein, 14 aa, Homo sapiens
CARDPWAYWYFDLW

SEQ ID NO: 11452 - protein, 16 aa, Homo sapiens
CARDGDLVQLWALDYW

SEQ ID NO: 11453 - protein, 16 aa, Homo sapiens
CAKGRDLVVPTANDYW

SEQ ID NO: 11454 - protein, 14 aa, Homo sapiens
CARRRDNWDYFDYW

SEQ ID NO: 11455 - protein, 18 aa, Homo sapiens
CARESQLNIAEAGQLDYW

SEQ ID NO: 11456 - protein, 17 aa, Homo sapiens
CARGGVVPAAIWAFDYW

SEQ ID NO: 11457 - protein, 13 aa, Homo sapiens
CAHLRFLEYFDYW

SEQ ID NO: 11458 - protein, 16 aa, Homo sapiens
CARGHSSSWRTWFDPW

SEQ ID NO: 11459 - protein, 18 aa, Homo sapiens
CARDRGSSSGYYYYMDVW

SEQ ID NO: 11460 - protein, 19 aa, Homo sapiens
CAHAVGRYSSGWYYAFDIW

SEQ ID NO: 11461 - protein, 19 aa, Homo sapiens
CARDIGDCNTNHCPHFDFW

SEQ ID NO: 11462 - protein, 21 aa, Homo sapiens
CARDRLEGPYCEGNCGDFDYW

SEQ ID NO: 11463 - protein, 18 aa, Homo sapiens
CAKDPNSGWYGGYYFDYW

SEQ ID NO: 11464 - protein, 15 aa, Homo sapiens
CARDRAFPDDVLDIW

SEQ ID NO: 11465 - protein, 12 aa, Homo sapiens
CQETYSTPRCGF

SEQ ID NO: 11466 - protein, 16 aa, Homo sapiens
CARRIVTAGIWCFDLW

SEQ ID NO: 11467 - protein, 19 aa, Homo sapiens
CARVEVCRSTSCTKVFDYW

SEQ ID NO: 11468 - protein, 20 aa, Homo sapiens
CARHVDSSGWRRPGWYFDLW

SEQ ID NO: 11469 - protein, 16 aa, Homo sapiens
CARGRTPGVFDAFDFW

SEQ ID NO: 11470 - protein, 17 aa, Homo sapiens
CARGGLELQVLSAFDIW

SEQ ID NO: 11471 - protein, 13 aa, Homo sapiens
CQAWDISTASLIF

SEQ ID NO: 11472 - protein, 16 aa, Homo sapiens
CAGDRGDYPTRAFDVW

SEQ ID NO: 11473 - protein, 17 aa, Homo sapiens
CAKGSDFWSGYYLFEYW

SEQ ID NO: 11474 - protein, 20 aa, Homo sapiens
CARGADYGDYEVEWWYFQHW

SEQ ID NO: 11475 - protein, 18 aa, Homo sapiens
CARAYYVSGGYYLYFEYW

SEQ ID NO: 11476 - protein, 17 aa, Homo sapiens
CARDVAGGSYYPPFDYW

SEQ ID NO: 11477 - protein, 15 aa, Homo sapiens
CARGVIPAAFYFDSW

SEQ ID NO: 11478 - protein, 16 aa, Homo sapiens
CARFYCSSTSCHFDYW

SEQ ID NO: 11479 - protein, 15 aa, Homo sapiens
CARVIRPSGSGIDYW

SEQ ID NO: 11480 - protein, 18 aa, Homo sapiens
CARDSCSSSSCSPCFDYW

SEQ ID NO: 11481 - protein, 21 aa, Homo sapiens
CARAHSLGTFYNPLLYFFDYW

SEQ ID NO: 11482 - protein, 15 aa, Homo sapiens
CARRVSRGSSWFDPW

SEQ ID NO: 11483 - protein, 12 aa, Homo sapiens
CLQHDDFPQYTF

SEQ ID NO: 11484 - protein, 15 aa, Homo sapiens
CARVAATRVWYFDLW

SEQ ID NO: 11485 - protein, 21 aa, Homo sapiens
CARGVALMVHGRVDYFYMDVW

SEQ ID NO: 11486 - protein, 14 aa, Homo sapiens
CARSVPLASLFDSW

SEQ ID NO: 11487 - protein, 20 aa, Homo sapiens
CAKDSSNLRYYDTPGSDDYW

SEQ ID NO: 11488 - protein, 15 aa, Homo sapiens
CVKDYCINTCYMDYW

SEQ ID NO: 11489 - protein, 18 aa, Homo sapiens
CVRDEWGRDFSHYCFDYW

SEQ ID NO: 11490 - protein, 21 aa, Homo sapiens
CTTDRGYDFWSGHELGYFDYW

SEQ ID NO: 11491 - protein, 20 aa, Homo sapiens
CVGLGRGLCNGECYDSFDPW

SEQ ID NO: 11492 - protein, 19 aa, Homo sapiens
CARDSARFGDSPVNYFDPW

SEQ ID NO: 11493 - protein, 21 aa, Homo sapiens
CARYCSSTSCYLVPSDAFDIW

SEQ ID NO: 11494 - protein, 11 aa, Homo sapiens
CARYTDYVDSW

SEQ ID NO: 11495 - protein, 16 aa, Homo sapiens
CAKDISNSGWSGVDYW

SEQ ID NO: 11496 - protein, 18 aa, Homo sapiens
CAKVQDSTTYYYSHFDYW

SEQ ID NO: 11497 - protein, 16 aa, Homo sapiens
CARDSGTTSLGAFDIW

SEQ ID NO: 11498 - protein, 17 aa, Homo sapiens
CARHLLFGSLPDWFDPW

SEQ ID NO: 11499 - protein, 17 aa, Homo sapiens
CARGHDIVVVYHYMDVW

SEQ ID NO: 11500 - protein, 19 aa, Homo sapiens
CAKSPFYGDYVADYYFDYW

SEQ ID NO: 11501 - protein, 13 aa, Homo sapiens
CARTDYPKGFDIW

SEQ ID NO: 11502 - protein, 19 aa, Homo sapiens
CARRPYCNSISCYMDFDYW

SEQ ID NO: 11503 - protein, 18 aa, Homo sapiens
CARISFGSGYHYDAFDIW

SEQ ID NO: 11504 - protein, 16 aa, Homo sapiens
CTRGGGNLYHFWFDPW

SEQ ID NO: 11505 - protein, 17 aa, Homo sapiens
CVKDSSGWQTDGYFDYW

SEQ ID NO: 11506 - protein, 16 aa, Homo sapiens
CAKEGGRTLLDAFDLW

SEQ ID NO: 11507 - protein, 17 aa, Homo sapiens
CAKGSGIAAAGNTFGYW

SEQ ID NO: 11508 - protein, 21 aa, Homo sapiens
CTTGLHYYDSSAYTNDAFDIW

SEQ ID NO: 11509 - protein, 32 aa, Homo sapiens
CMELKSLTSEDSAVYYYIVLNYGSSYTYFDVW

SEQ ID NO: 11510 - protein, 16 aa, Homo sapiens
CARVDYSNLRDAFDIW

SEQ ID NO: 11511 - protein, 17 aa, Homo sapiens
CAKEGGGHSGYDVFDYW

SEQ ID NO: 11512 - protein, 17 aa, Homo sapiens
CAKDRNTAAAVYYFDYW

SEQ ID NO: 11513 - protein, 21 aa, Homo sapiens
CAKDIKSGDYYDTYYYGMDVW

SEQ ID NO: 11514 - protein, 14 aa, Homo sapiens
CARHVAASGQIDYW

SEQ ID NO: 11515 - protein, 16 aa, Homo sapiens
CARPKRRDVRDAFDIW

SEQ ID NO: 11516 - protein, 18 aa, Homo sapiens
CAKAAIYLTDSYLYMDVW

SEQ ID NO: 11517 - protein, 14 aa, Homo sapiens
CAKDWDSGSYYNYW

SEQ ID NO: 11518 - protein, 21 aa, Homo sapiens
CARLPMKYSSSSRIRNWFDPW

SEQ ID NO: 11519 - protein, 22 aa, Homo sapiens
CATECNTGTRDCFPTTDGFDMW

SEQ ID NO: 11520 - protein, 19 aa, Homo sapiens
CAHRLLSVQLERGGWFDPW

SEQ ID NO: 11521 - protein, 15 aa, Homo sapiens
CTREGDYDLRRFDYW

SEQ ID NO: 11522 - protein, 19 aa, Homo sapiens
CVTQGKYCSAGSCNSLDYW

SEQ ID NO: 11523 - protein, 18 aa, Homo sapiens
CAKDTHHGTGTTEPFDFW

SEQ ID NO: 11524 - protein, 16 aa, Homo sapiens
CARRHIEIVGGGLDYW

SEQ ID NO: 11525 - protein, 16 aa, Homo sapiens
CARGRMALAGDAFDIW

SEQ ID NO: 11526 - protein, 16 aa, Homo sapiens
CAALRDFWSGKRFDPW

SEQ ID NO: 11527 - protein, 19 aa, Homo sapiens
CAKDYCSSTSCYRDAFDIW

SEQ ID NO: 11528 - protein, 15 aa, Homo sapiens
CAREAYGDYVRFDSW

SEQ ID NO: 11529 - protein, 17 aa, Homo sapiens
CASSGSRERVVDYFDYW

SEQ ID NO: 11530 - protein, 13 aa, Homo sapiens
CAKGGLALSFDYW

SEQ ID NO: 11531 - protein, 14 aa, Homo sapiens
CTTEGAAAGWFDPW

SEQ ID NO: 11532 - protein, 17 aa, Homo sapiens
CARETVEMATTGYFDYW

SEQ ID NO: 11533 - protein, 15 aa, Homo sapiens
CAKPYSGYDEYFDYW

SEQ ID NO: 11534 - protein, 15 aa, Homo sapiens
CTTLTQVTADPFDIW

SEQ ID NO: 11535 - protein, 15 aa, Homo sapiens
CATFSPTQGDAFDVW

SEQ ID NO: 11536 - protein, 19 aa, Homo sapiens
CGRNPNDYRVYHYYYMDVW

SEQ ID NO: 11537 - protein, 17 aa, Homo sapiens
CARDISLKAAAGTFDYW

SEQ ID NO: 11538 - protein, 20 aa, Homo sapiens
CAKSVTLKSDFSTLGYFDYW

SEQ ID NO: 11539 - protein, 13 aa, Homo sapiens
CQQYLSWPPPLTF

SEQ ID NO: 11540 - protein, 20 aa, Homo sapiens
CARNPACSSTTNCYVFADYW

SEQ ID NO: 11541 - protein, 14 aa, Homo sapiens
CARGRWNDDGLDYW

SEQ ID NO: 11542 - protein, 14 aa, Homo sapiens
CARHYGDSSPFDYW

SEQ ID NO: 11543 - protein, 16 aa, Homo sapiens
CAHNALGELYSLLDYW

SEQ ID NO: 11544 - protein, 30 aa, Homo sapiens
CARHYVIVLEEDYYDSSGYYFYVANWFDPW

SEQ ID NO: 11545 - protein, 15 aa, Homo sapiens
CARRVIQSGSFFDPW

SEQ ID NO: 11546 - protein, 20 aa, Homo sapiens
CARNGFDQLLSSSVGALDIW

SEQ ID NO: 11547 - protein, 22 aa, Homo sapiens
CAKAPVSDGGYFDRPYYYMDVW

SEQ ID NO: 11548 - protein, 19 aa, Homo sapiens
CAREDTLFGVITLDAFDIW

SEQ ID NO: 11549 - protein, 16 aa, Homo sapiens
CARDTWAAANKVLDYW

SEQ ID NO: 11550 - protein, 16 aa, Homo sapiens
CARIGATEDYYYMDVW

SEQ ID NO: 11551 - protein, 19 aa, Homo sapiens
CARATRGYSYGYNPSFDYW

SEQ ID NO: 11552 - protein, 24 aa, Homo sapiens
CAKDRPAYNVVVVAVTVLGYFDYW

SEQ ID NO: 11553 - protein, 15 aa, Homo sapiens
CAKEGGDGQRPFDYW

SEQ ID NO: 11554 - protein, 13 aa, Homo sapiens
CTRDSGYNAFDIW

SEQ ID NO: 11555 - protein, 16 aa, Homo sapiens
CARDNPEIAVAAFDYW

SEQ ID NO: 11556 - protein, 18 aa, Homo sapiens
CTRNEHYTDSSGYLFDIW

SEQ ID NO: 11557 - protein, 18 aa, Homo sapiens
CARSDSSAWYSPDAFDMW

SEQ ID NO: 11558 - protein, 13 aa, Homo sapiens
CARDPEWGAVDYW

SEQ ID NO: 11559 - protein, 17 aa, Homo sapiens
CTTASPNYSVMFELDYW

SEQ ID NO: 11560 - protein, 14 aa, Homo sapiens
CASQLDVYRAFDFW

SEQ ID NO: 11561 - protein, 11 aa, Homo sapiens
CHQYSNWPFSF

SEQ ID NO: 11562 - protein, 14 aa, Homo sapiens
CARLLGYSNRFDYW

SEQ ID NO: 11563 - protein, 21 aa, Homo sapiens
CARDLSVGLPFCGGHCVLDYW

SEQ ID NO: 11564 - protein, 23 aa, Homo sapiens
CERRHIIVVSSETVIIEGGFDHW

SEQ ID NO: 11565 - protein, 25 aa, Homo sapiens
CARDSADLVAVPDVLVGEDDAYDIW

SEQ ID NO: 11566 - protein, 14 aa, Homo sapiens
CARDQDSSWYLDYW

SEQ ID NO: 11567 - protein, 11 aa, Homo sapiens
CVGATTPVDYW

SEQ ID NO: 11568 - protein, 16 aa, Homo sapiens
CAKGTMPVALGGFDIW

SEQ ID NO: 11569 - protein, 18 aa, Homo sapiens
CARVGPSGNYYYYYMDVW

SEQ ID NO: 11570 - protein, 15 aa, Homo sapiens
CAKTRSGDCYAFDYW

SEQ ID NO: 11571 - protein, 25 aa, Homo sapiens
CARGTPGFSYRSPGPDYYYYYMDVW

SEQ ID NO: 11572 - protein, 19 aa, Homo sapiens
CARLNYYETSGYYGYFDYW

SEQ ID NO: 11573 - protein, 18 aa, Homo sapiens
CAKQDFTRGSHYGDYDYW

SEQ ID NO: 11574 - protein, 22 aa, Homo sapiens
CARVDNTLWYGHYKGLDAFDVW

SEQ ID NO: 11575 - protein, 15 aa, Homo sapiens
CARQEPNYRAPFDYW

SEQ ID NO: 11576 - protein, 15 aa, Homo sapiens
CARPIGIRLQAFDYW

SEQ ID NO: 11577 - protein, 15 aa, Homo sapiens
CARETITIFMYFDHW

SEQ ID NO: 11578 - protein, 17 aa, Homo sapiens
CARSRLAARRFWWFDPW

SEQ ID NO: 11579 - protein, 17 aa, Homo sapiens
CARASARSGWYGGIDYW

SEQ ID NO: 11580 - protein, 17 aa, Homo sapiens
CARATAARPGFEDFDYW

SEQ ID NO: 11581 - protein, 13 aa, Homo sapiens
CARSVSAREFDYW

SEQ ID NO: 11582 - protein, 17 aa, Homo sapiens
CSRGPYSSGWYGASDIW

SEQ ID NO: 11583 - protein, 14 aa, Homo sapiens
CAHQYSAYEQYDYW

SEQ ID NO: 11584 - protein, 17 aa, Homo sapiens
CTRDSYGRQPPDTFDIW

SEQ ID NO: 11585 - protein, 13 aa, Homo sapiens
CATAGEVYYMDVW

SEQ ID NO: 11586 - protein, 18 aa, Homo sapiens
CASRFLTAALNHDAFDIW

SEQ ID NO: 11587 - protein, 19 aa, Homo sapiens
CARECTSTSCPGVRAFDLW

SEQ ID NO: 11588 - protein, 16 aa, Homo sapiens
CAKEINTYVPYYFDYW

SEQ ID NO: 11589 - protein, 16 aa, Homo sapiens
CARTLYGDFGDWIDPW

SEQ ID NO: 11590 - protein, 14 aa, Homo sapiens
CVNSNTGFEGFDVW

SEQ ID NO: 11591 - protein, 21 aa, Homo sapiens
CAREGDGYSSGWYRFNAFDIW

SEQ ID NO: 11592 - protein, 14 aa, Homo sapiens
CAIGLSYGLGGDYW

SEQ ID NO: 11593 - protein, 20 aa, Homo sapiens
CARPRCPSTSPHLYCYMDVW

SEQ ID NO: 11594 - protein, 15 aa, Homo sapiens
CARSRGKIDGYFDYW

SEQ ID NO: 11595 - protein, 15 aa, Homo sapiens
CARVDWNDIYAFDIW

SEQ ID NO: 11596 - protein, 19 aa, Homo sapiens
CARARTRSQLLSHWYFDLW

SEQ ID NO: 11597 - protein, 21 aa, Homo sapiens
CARKNKAAASTVYYYYYMDVW

SEQ ID NO: 11598 - protein, 18 aa, Homo sapiens
CVREANHYGSGVTSFDIW

SEQ ID NO: 11599 - protein, 15 aa, Homo sapiens
CARVPVYQFKYFDYW

SEQ ID NO: 11600 - protein, 16 aa, Homo sapiens
CARDSEDIWSAYYDYW

SEQ ID NO: 11601 - protein, 17 aa, Homo sapiens
CATIFCSSTSCYPFDYW

SEQ ID NO: 11602 - protein, 21 aa, Homo sapiens
CAMARNDFWSGSNWARWFDPW

SEQ ID NO: 11603 - protein, 18 aa, Homo sapiens
CARAYCSVTDCYYAFDSW

SEQ ID NO: 11604 - protein, 14 aa, Homo sapiens
CAMGEDYPGRFDYW

SEQ ID NO: 11605 - protein, 14 aa, Homo sapiens
CQSYASGLSGPYVF

SEQ ID NO: 11606 - protein, 18 aa, Homo sapiens
CARAYDSSGYYPANFDYW

SEQ ID NO: 11607 - protein, 17 aa, Homo sapiens
CAHTVWIWNGYSAFDYW

SEQ ID NO: 11608 - protein, 24 aa, Homo sapiens
CARDLGRTYSYGYRPRDRNWFDPW

SEQ ID NO: 11609 - protein, 16 aa, Homo sapiens
CARRFGSSWYPAFDYW

SEQ ID NO: 11610 - protein, 16 aa, Homo sapiens
CARDPYHFWSGYSDSW

SEQ ID NO: 11611 - protein, 16 aa, Homo sapiens
CARDLTVAGIGAFDIW

SEQ ID NO: 11612 - protein, 19 aa, Homo sapiens
CAREYCNSRRCSKTAFDLW

SEQ ID NO: 11613 - protein, 16 aa, Homo sapiens
CQQSHITSLGSPEWTF

SEQ ID NO: 11614 - protein, 15 aa, Homo sapiens
CARVGNWGTKCFDCW

SEQ ID NO: 11615 - protein, 16 aa, Homo sapiens
CSSISCPNGYNWFDSW

SEQ ID NO: 11616 - protein, 14 aa, Homo sapiens
CARYRDSSHTFDIW

SEQ ID NO: 11617 - protein, 26 aa, Homo sapiens
CARNCLPRDEVVPAAIDEGDNWFDPW

SEQ ID NO: 11618 - protein, 21 aa, Homo sapiens
CAHSSRLDDCSGATCYYFDFW

SEQ ID NO: 11619 - protein, 15 aa, Homo sapiens
CATHSSGWNWYFDYW

SEQ ID NO: 11620 - protein, 18 aa, Homo sapiens
CARGSHYDFWSLQYFHYW

SEQ ID NO: 11621 - protein, 12 aa, Homo sapiens
CARGIGDAVDMW

SEQ ID NO: 11622 - protein, 17 aa, Homo sapiens
CASRHYGDYDVHAFDMW

SEQ ID NO: 11623 - protein, 10 aa, Homo sapiens
CQYYDNVPHF

SEQ ID NO: 11624 - protein, 17 aa, Homo sapiens
CARQPKYSSGSNWFDPW

SEQ ID NO: 11625 - protein, 22 aa, Homo sapiens
CARTLPLVYCSSTSCYTAFDIW

SEQ ID NO: 11626 - protein, 13 aa, Homo sapiens
CTRRGKTGTVDYW

SEQ ID NO: 11627 - protein, 22 aa, Homo sapiens
CARVQTGYSSGWYSSDDTFDMW

SEQ ID NO: 11628 - protein, 16 aa, Homo sapiens
CARGWGYTRSYYMDVW

SEQ ID NO: 11629 - protein, 15 aa, Homo sapiens
CVRRSSLGRYYFDFW

SEQ ID NO: 11630 - protein, 16 aa, Homo sapiens
CARSYSRSVRSPFDIW

SEQ ID NO: 11631 - protein, 21 aa, Homo sapiens
CAKEVTTFGVLTFNYNYMDVW

SEQ ID NO: 11632 - protein, 20 aa, Homo sapiens
CARDSGICDTLNCLSAPDYW

SEQ ID NO: 11633 - protein, 13 aa, Homo sapiens
CTNGVCPDGFAIW

SEQ ID NO: 11634 - protein, 17 aa, Homo sapiens
CAKDGSSWYNEGYFDYW

SEQ ID NO: 11635 - protein, 16 aa, Homo sapiens
CAREGDFWSGYQYDYW

SEQ ID NO: 11636 - protein, 15 aa, Homo sapiens
CAREPYDYLSYLEYW

SEQ ID NO: 11637 - protein, 14 aa, Homo sapiens
CTRDPPGVVTNDYW

SEQ ID NO: 11638 - protein, 19 aa, Homo sapiens
CAADGKNYSYFYYYYMAVW

SEQ ID NO: 11639 - protein, 21 aa, Homo sapiens
CAREVPPYSSGYYVYQRFDFW

SEQ ID NO: 11640 - protein, 21 aa, Homo sapiens
CARIYCSSTSCYGFYYYMDVW

SEQ ID NO: 11641 - protein, 16 aa, Homo sapiens
CARGGTWNDVDAFDVW

SEQ ID NO: 11642 - protein, 13 aa, Homo sapiens
CQSADDTGRFIIF

SEQ ID NO: 11643 - protein, 17 aa, Homo sapiens
CAKVLVRGVIITAFDYW

SEQ ID NO: 11644 - protein, 22 aa, Homo sapiens
CARAPGKYSSGWYNLPDAFDIW

SEQ ID NO: 11645 - protein, 17 aa, Homo sapiens
CAGVVVVPYRGFLFDYW

SEQ ID NO: 11646 - protein, 18 aa, Homo sapiens
CARDDYSNYGLGGQGDYW

SEQ ID NO: 11647 - protein, 15 aa, Homo sapiens
CASGLLFGSGSYDYW

SEQ ID NO: 11648 - protein, 16 aa, Homo sapiens
CALISVGSYSGYFDNW

SEQ ID NO: 11649 - protein, 17 aa, Homo sapiens
CARRGTAEGFQHRFDPW

SEQ ID NO: 11650 - protein, 21 aa, Homo sapiens
CASQSSSITIFGVVTRYFDYW

SEQ ID NO: 11651 - protein, 17 aa, Homo sapiens
CVKDSRLQFVGYPFDHW

SEQ ID NO: 11652 - protein, 10 aa, Homo sapiens
CAKLVWSDYW

SEQ ID NO: 11653 - protein, 17 aa, Homo sapiens
CAKDADELELTGPIDYW

SEQ ID NO: 11654 - protein, 18 aa, Homo sapiens
CARDASIYYNSGSYFDLW

SEQ ID NO: 11655 - protein, 21 aa, Homo sapiens
CVKDFILPTPVGGSHSWFDPW

SEQ ID NO: 11656 - protein, 17 aa, Homo sapiens
CARVWLQPSHPDAFDVW

SEQ ID NO: 11657 - protein, 22 aa, Homo sapiens
CVHSVGHCSTTSCYNMGWFDPW

SEQ ID NO: 11658 - protein, 11 aa, Homo sapiens
CQQSYNAPRIF

SEQ ID NO: 11659 - protein, 21 aa, Homo sapiens
CVRDRFCSSTSCYSGSPFDYW

SEQ ID NO: 11660 - protein, 16 aa, Homo sapiens
CARWRRSRSLRFFDYW

SEQ ID NO: 11661 - protein, 22 aa, Homo sapiens
CARDSRADTVVVPAATGWFDPW

SEQ ID NO: 11662 - protein, 16 aa, Homo sapiens
CARVHDFWSTYPRDYW

SEQ ID NO: 11663 - protein, 19 aa, Homo sapiens
CARVVRGRLPDQSWLFDYW

SEQ ID NO: 11664 - protein, 24 aa, Homo sapiens
CAKVKIFGVYCSSTSCSEYYFDYW

SEQ ID NO: 11665 - protein, 16 aa, Homo sapiens
CAKAGGSTVTRIFDYW

SEQ ID NO: 11666 - protein, 19 aa, Homo sapiens
CARQGSSGYYPLQYYFDYW

SEQ ID NO: 11667 - protein, 18 aa, Homo sapiens
CARDQPLGGWGTDAFDIW

SEQ ID NO: 11668 - protein, 21 aa, Homo sapiens
CARDNGAEILVIPADYFFPYW

SEQ ID NO: 11669 - protein, 15 aa, Homo sapiens
CAREVLARNVYFDYW

SEQ ID NO: 11670 - protein, 19 aa, Homo sapiens
CAKDRADGYSSSRDAFDIW

SEQ ID NO: 11671 - protein, 19 aa, Homo sapiens
CASGGLGCSSTSCYGLDYW

SEQ ID NO: 11672 - protein, 21 aa, Homo sapiens
CARGLTRIVVVPAALGWFDPW

SEQ ID NO: 11673 - protein, 21 aa, Homo sapiens
CARGSGITMIVAVADDAFDIW

SEQ ID NO: 11674 - protein, 10 aa, Homo sapiens
CARHSLFDSW

SEQ ID NO: 11675 - protein, 16 aa, Homo sapiens
CARVKDFWPSYASDIW

SEQ ID NO: 11676 - protein, 19 aa, Homo sapiens
CARLPRIAVAGKTNYFDYW

SEQ ID NO: 11677 - protein, 19 aa, Homo sapiens
CAGRYYYDSSGYQDAFHIW

SEQ ID NO: 11678 - protein, 20 aa, Homo sapiens
CARDNSRQVDSQLFWWFDPW

SEQ ID NO: 11679 - protein, 20 aa, Homo sapiens
CARLGVVVPSDITNWYFDLW

SEQ ID NO: 11680 - protein, 22 aa, Homo sapiens
CAREYDLWSGYSGLSYFYMDVW

SEQ ID NO: 11681 - protein, 24 aa, Homo sapiens
CVKDRRYCSSTSCHYYYYYNMDVW

SEQ ID NO: 11682 - protein, 21 aa, Homo sapiens
CAKDGDIVVVPAAMVYYFDYW

SEQ ID NO: 11683 - protein, 16 aa, Homo sapiens
CANGDYYDSSGAPDYW

SEQ ID NO: 11684 - protein, 23 aa, Homo sapiens
CAKLRSPMVRGVVGIWRDGLDIW

SEQ ID NO: 11685 - protein, 19 aa, Homo sapiens
CARVPAAIFFEGNNWFDPW

SEQ ID NO: 11686 - protein, 11 aa, Homo sapiens
CHQYNTYSGMF

SEQ ID NO: 11687 - protein, 18 aa, Homo sapiens
CAREIAVTGVGPEYFDYW

SEQ ID NO: 11688 - protein, 20 aa, Homo sapiens
CARSPSLPASSYFYYYMDVW

SEQ ID NO: 11689 - protein, 17 aa, Homo sapiens
CAKVPSGGFYYGWFDPW

SEQ ID NO: 11690 - protein, 19 aa, Homo sapiens
CVKDLLLPVEGTTGYLDVW

SEQ ID NO: 11691 - protein, 21 aa, Homo sapiens
CAHSRRRISCSGGNCYHFDYW

SEQ ID NO: 11692 - protein, 20 aa, Homo sapiens
CVRGYCTDRSCRYTYYFDLW

SEQ ID NO: 11693 - protein, 18 aa, Homo sapiens
CAKDGVTGGWFPRWFDTW

SEQ ID NO: 11694 - protein, 21 aa, Homo sapiens
CAGVRDYYDSSGYTNDGFDPW

SEQ ID NO: 11695 - protein, 11 aa, Homo sapiens [sequence omitted]

SEQ ID NO: 11696 - protein, 16 aa, Homo sapiens
CASTRHGSGDNWFDPW

SEQ ID NO: 11697 - protein, 15 aa, Homo sapiens
CQVWDTSNDHVRVVF

SEQ ID NO: 11698 - protein, 16 aa, Homo sapiens
CAKGAGSSWYNWFDPW

SEQ ID NO: 11699 - protein, 20 aa, Homo sapiens
CARQGALWSVPRGDDPFDTW

SEQ ID NO: 11700 - protein, 19 aa, Homo sapiens
CAKDLYSSGWYTLGAFDIW

SEQ ID NO: 11701 - protein, 19 aa, Homo sapiens
CAREKNWNVDGTDDAFDVW

SEQ ID NO: 11702 - protein, 15 aa, Homo sapiens
CARRGYGGARHYDYW

SEQ ID NO: 11703 - protein, 17 aa, Homo sapiens
CAKAVEWELLPGAFDIW

SEQ ID NO: 11704 - protein, 12 aa, Homo sapiens
CQQYFDTPMYTF

SEQ ID NO: 11705 - protein, 17 aa, Homo sapiens
CARGSPYQLLTFAFDIW

SEQ ID NO: 11706 - protein, 21 aa, Homo sapiens
CARHESVLVWSGYYLDAFDIW

SEQ ID NO: 11707 - protein, 14 aa, Homo sapiens
CAPLGYALRQFDYW

SEQ ID NO: 11708 - protein, 19 aa, Homo sapiens
CARSFGPFSMITSFMFDPW

SEQ ID NO: 11709 - protein, 17 aa, Homo sapiens
CARGMARWYYYYYMDVW

SEQ ID NO: 11710 - protein, 18 aa, Homo sapiens
CAKDPGTGGGMDDAFDIW

SEQ ID NO: 11711 - protein, 22 aa, Homo sapiens
CAKPPLSITMIVVVNEYYFDYW

SEQ ID NO: 11712 - protein, 18 aa, Homo sapiens
CARELDTSGSYPDAFLLW

SEQ ID NO: 11713 - protein, 23 aa, Homo sapiens
CAKPYYYDSSGYYGVPNYYFDYW

SEQ ID NO: 11714 - protein, 21 aa, Homo sapiens
CAKGRDIDSSGYYPYWYFDLW

SEQ ID NO: 11715 - protein, 20 aa, Homo sapiens
CARGLGYCSGGSCKRGLDYW

SEQ ID NO: 11716 - protein, 18 aa, Homo sapiens
CARRARHKYTNSAGFDYW

SEQ ID NO: 11717 - protein, 27 aa, Homo sapiens
CLRPEDTAVYYCARETIVVDDSRFDYW

SEQ ID NO: 11718 - protein, 17 aa, Homo sapiens
CAKDGIFWAADRYFDYW

SEQ ID NO: 11719 - protein, 18 aa, Homo sapiens
CASPHSTVVTAEYYFDYW

SEQ ID NO: 11720 - protein, 24 aa, Homo sapiens
CARGSAGRYDFWSGYSGVDWFDSW

SEQ ID NO: 11721 - protein, 16 aa, Homo sapiens
CAKCAHSSPICYNDYW

SEQ ID NO: 11722 - protein, 26 aa, Homo sapiens
CARDIPPGDSIVLVVYAIGGPWFDPW

SEQ ID NO: 11723 - protein, 12 aa, Homo sapiens
CARGHSHGLDYW

SEQ ID NO: 11724 - protein, 18 aa, Homo sapiens
CAREMYYYGSGSTTFDSW

SEQ ID NO: 11725 - protein, 19 aa, Homo sapiens
CARGGARGGARRPYRLDYW

SEQ ID NO: 11726 - protein, 25 aa, Homo sapiens
CARSGNVRSTIFGVVIKAPSGFDYW

SEQ ID NO: 11727 - protein, 19 aa, Homo sapiens
CARGHLRFLEWLPHFFDFW

SEQ ID NO: 11728 - protein, 20 aa, Homo sapiens
CAKDIGAAALWSGYYAFDYW

SEQ ID NO: 11729 - protein, 23 aa, Homo sapiens
CATGYRYGDYWAPDYYYYYMDVW

SEQ ID NO: 11730 - protein, 16 aa, Homo sapiens
CARRVRDNSGYCFDYW

SEQ ID NO: 11731 - protein, 26 aa, Homo sapiens
CARDNAVAPDFWSGYYSGRDDAFDIW

SEQ ID NO: 11732 - protein, 20 aa, Homo sapiens
CARPPATMIDYYYYYYMDVW

SEQ ID NO: 11733 - protein, 19 aa, Homo sapiens
CATEGFYDNTIPDYAFDIW

SEQ ID NO: 11734 - protein, 23 aa, Homo sapiens
CARPSGGYSYGFGPLLGFSLDYW

SEQ ID NO: 11735 - protein, 15 aa, Homo sapiens
CARPAWNQQSPFEYW

SEQ ID NO: 11736 - protein, 14 aa, Homo sapiens
CARVVHKRSDFDYW

SEQ ID NO: 11737 - protein, 10 aa, Homo sapiens
CATNWNYDYW

SEQ ID NO: 11738 - protein, 15 aa, Homo sapiens
CAKVGAATDRGTDYW

SEQ ID NO: 11739 - protein, 19 aa, Homo sapiens
CHTDLGSCSGGSCYSFDYW

SEQ ID NO: 11740 - protein, 20 aa, Homo sapiens
CARGFSYDYYDSSGYYYHYW

SEQ ID NO: 11741 - protein, 18 aa, Homo sapiens
CARDRTDSSSWIDAFDIW

SEQ ID NO: 11742 - protein, 16 aa, Homo sapiens
CAKDIGCGGDCYSNYW

SEQ ID NO: 11743 - protein, 15 aa, Homo sapiens
CAKGLHAYSALIDYW

SEQ ID NO: 11744 - protein, 15 aa, Homo sapiens
CAHGHTVRGNAFDIW

SEQ ID NO: 11745 - protein, 13 aa, Homo sapiens
CALWFGESPFDYW

SEQ ID NO: 11746 - protein, 11 aa, Homo sapiens [sequence omitted]

SEQ ID NO: 11747 - protein, 21 aa, Homo sapiens
CAQARDIVVVVAPNRDAFDIW

SEQ ID NO: 11748 - protein, 20 aa, Homo sapiens
CAKDRHLNYDILTGPRFDYW

SEQ ID NO: 11749 - protein, 14 aa, Homo sapiens
CARGGDIMTATDYW

SEQ ID NO: 11750 - protein, 30 aa, Homo sapiens
CASPSAHLTGYPFFLRPSENYYYYYGMDVW

SEQ ID NO: 11751 - protein, 15 aa, Homo sapiens
CARDNSRGLEFCDYW

SEQ ID NO: 11752 - protein, 18 aa, Homo sapiens
CANLGTIAVADVGSSDYW

SEQ ID NO: 11753 - protein, 19 aa, Homo sapiens
CAKVDSSSVGVVDALGDYW

SEQ ID NO: 11754 - protein, 23 aa, Homo sapiens
CARGSLLVHIVVVTANPSPFDYW

SEQ ID NO: 11755 - protein, 16 aa, Homo sapiens
CVSYDSSGYHRRFDYW

SEQ ID NO: 11756 - protein, 18 aa, Homo sapiens
CARLHGDYSMQSAPPDYW

SEQ ID NO: 11757 - protein, 17 aa, Homo sapiens
CARSPGDHIGPNWFDPW

SEQ ID NO: 11758 - protein, 19 aa, Homo sapiens
CAKDIGGLYDFGALWFDPW

SEQ ID NO: 11759 - protein, 18 aa, Homo sapiens
CAKLTDSSGYYGDAFDIW

SEQ ID NO: 11760 - protein, 16 aa, Homo sapiens
CARDSGSGWFYYFDYW

SEQ ID NO: 11761 - protein, 23 aa, Homo sapiens
CASNFGYCSSTSCYGLSYYFDYW

SEQ ID NO: 11762 - protein, 14 aa, Homo sapiens
CANLGYVDWYFDLW

SEQ ID NO: 11763 - protein, 20 aa, Homo sapiens
CARAADIVATYHYYYYMDVW

SEQ ID NO: 11764 - protein, 17 aa, Homo sapiens
CAHRVVGATPCDAFDIW

SEQ ID NO: 11765 - protein, 16 aa, Homo sapiens
CARRAMVRGGSWFDPW

SEQ ID NO: 11766 - protein, 20 aa, Homo sapiens
CARGGGDMGWHYYYYYMDVW

SEQ ID NO: 11767 - protein, 15 aa, Homo sapiens
CAKGGDLGRIAMDYW

SEQ ID NO: 11768 - protein, 21 aa, Homo sapiens
CARDHTPIVVVPAANDAFDIW

SEQ ID NO: 11769 - protein, 19 aa, Homo sapiens
CARDWPRNDYGDSYYFDYW

SEQ ID NO: 11770 - protein, 16 aa, Homo sapiens
CAKDLTGTDTNWFDPW

SEQ ID NO: 11771 - protein, 21 aa, Homo sapiens
CARQGETIFGVVIIPGRSDYW

SEQ ID NO: 11772 - protein, 19 aa, Homo sapiens
CARDTASTVDLWPDAFDIW

SEQ ID NO: 11773 - protein, 20 aa, Homo sapiens
CAALIPGIAAAGPNNWFDPW

SEQ ID NO: 11774 - protein, 19 aa, Homo sapiens
CARPGVMVRGVTVGYMDVW

SEQ ID NO: 11775 - protein, 19 aa, Homo sapiens
CAKDIYLGQWLAQWAADIW

SEQ ID NO: 11776 - protein, 20 aa, Homo sapiens
CARADYDILTGYEAHAFDIW

SEQ ID NO: 11777 - protein, 17 aa, Homo sapiens
CARVGFRVSGVAEADYW

SEQ ID NO: 11778 - protein, 18 aa, Homo sapiens
CARVGGSGTYEGDWFDPW

SEQ ID NO: 11779 - protein, 16 aa, Homo sapiens
CAARTWGWELTNFDYW

SEQ ID NO: 11780 - protein, 18 aa, Homo sapiens
CAKDKQWRGTREYYFDYW

SEQ ID NO: 11781 - protein, 17 aa, Homo sapiens
CASSKGYSYGHYYMDVW

SEQ ID NO: 11782 - protein, 24 aa, Homo sapiens
CARGPFSDSSRAVYYYYNRAMDVW

SEQ ID NO: 11783 - protein, 17 aa, Homo sapiens
CASSRGDGYNTLCFDYW

SEQ ID NO: 11784 - protein, 14 aa, Homo sapiens
CARTDGGKAAFDYW

SEQ ID NO: 11785 - protein, 13 aa, Homo sapiens
CQQANSFLGLFTF

SEQ ID NO: 11786 - protein, 20 aa, Homo sapiens
CARYSMSTISAASRYYFDYW

SEQ ID NO: 11787 - protein, 14 aa, Homo sapiens
CAHAYDAVNWFDPW

SEQ ID NO: 11788 - protein, 24 aa, Homo sapiens
CARATSIAAAGTLMWYYYYYMDVW

SEQ ID NO: 11789 - protein, 15 aa, Homo sapiens [sequence omitted]

SEQ ID NO: 11790 - protein, 14 aa, Homo sapiens
CAKISTARLSVDYW

SEQ ID NO: 11791 - protein, 16 aa, Homo sapiens
CATSFSIAARPRIDYW

SEQ ID NO: 11792 - protein, 18 aa, Homo sapiens
CAREGWGDGYNMYYFDYW

SEQ ID NO: 11793 - protein, 15 aa, Homo sapiens
CAKDIQPTASMFDYW

SEQ ID NO: 11794 - protein, 18 aa, Homo sapiens
CAKLPGDYDSSGDAFDIW

SEQ ID NO: 11795 - protein, 16 aa, Homo sapiens
CATAGSPYGDYVFDYW

SEQ ID NO: 11796 - protein, 13 aa, Homo sapiens
CQQYKDWPLLFTF

SEQ ID NO: 11797 - protein, 20 aa, Homo sapiens
CATRSTYAEDYYHYYYMDVW

SEQ ID NO: 11798 - protein, 20 aa, Homo sapiens
CARYLRNTARFARYNWFDPW

SEQ ID NO: 11799 - protein, 22 aa, Homo sapiens
CAKDSQTYYDFWSGYYDYFDYW

SEQ ID NO: 11800 - protein, 11 aa, Homo sapiens
CLQYLTTPGAF

SEQ ID NO: 11801 - protein, 19 aa, Homo sapiens
CARNHAARYSSAYYLSDYW

SEQ ID NO: 11802 - protein, 22 aa, Homo sapiens
CARGHRITIFGVVIIPVWLDPW

SEQ ID NO: 11803 - protein, 18 aa, Homo sapiens
CARDDTVTSTYGDYFDYW

SEQ ID NO: 11804 - protein, 18 aa, Homo sapiens
CAKDNGRQWLAGNWFDPW

SEQ ID NO: 11805 - protein, 20 aa, Homo sapiens
CARASPYYDFWSGYSHFDYW

SEQ ID NO: 11806 - protein, 16 aa, Homo sapiens
CATDNRMRAVDHFDHW

SEQ ID NO: 11807 - protein, 24 aa, Homo sapiens
CASGYCSSTSCYPYYYYYYGMDVW

SEQ ID NO: 11808 - protein, 25 aa, Homo sapiens
CATHPSAGYSGYGSPRFVYYYMDVW

SEQ ID NO: 11809 - protein, 17 aa, Homo sapiens
CARFSSDPSGARRFDYW

SEQ ID NO: 11810 - protein, 20 aa, Homo sapiens
CARDSVPFYSGTYYDAFDIW

SEQ ID NO: 11811 - protein, 17 aa, Homo sapiens
CAKAAEEWDLPLYFNYW

SEQ ID NO: 11812 - protein, 22 aa, Homo sapiens
CARDRSRIQLWLPERDNWFDPW

SEQ ID NO: 11813 - protein, 20 aa, Homo sapiens
CARASPLLWFGELSNAFDIW

SEQ ID NO: 11814 - protein, 15 aa, Homo sapiens
CARGTAAIVNWFDPW

SEQ ID NO: 11815 - protein, 14 aa, Homo sapiens
CARHPRGTNYLDYW

SEQ ID NO: 11816 - protein, 19 aa, Homo sapiens
CSSTSCYPYYYYYYGMDVW

SEQ ID NO: 11817 - protein, 21 aa, Homo sapiens
CARDLGSITMIVVAANWFDPW

SEQ ID NO: 11818 - protein, 18 aa, Homo sapiens
CARGPLPGDYSNYGIDYW

SEQ ID NO: 11819 - protein, 21 aa, Homo sapiens
CARDNRAMVRGVINPWYFDYW

SEQ ID NO: 11820 - protein, 14 aa, Homo sapiens
CAKDRITLSAFDTW

SEQ ID NO: 11821 - protein, 33 aa, Homo sapiens
CDWSSDVCSSDLDTAVYYCATAGSAYYAPFDDW

SEQ ID NO: 11822 - protein, 17 aa, Homo sapiens
CTRDRDGSYPGPTFDYW

SEQ ID NO: 11823 - protein, 25 aa, Homo sapiens
CARAAYYYDSSGYYQHLSNDAFDIW

SEQ ID NO: 11824 - protein, 21 aa, Homo sapiens
CAKDISPLGLRLGELYWFDPW

SEQ ID NO: 11825 - protein, 16 aa, Homo sapiens
CARDYGDYARWFFDVW

SEQ ID NO: 11826 - protein, 23 aa, Homo sapiens
CARDLTPTRVVIIPNYYYGMDVW

SEQ ID NO: 11827 - protein, 20 aa, Homo sapiens
CAREVGITIFGVVADPFDYW

SEQ ID NO: 11828 - protein, 16 aa, Homo sapiens
CARETNCGGDCSVDYW

SEQ ID NO: 11829 - protein, 24 aa, Homo sapiens
CAKVPPGGYDILTGYYLVYYFDYW

SEQ ID NO: 11830 - protein, 23 aa, Homo sapiens
CGSVSIAGEMAAIFDFFYYMDVW

SEQ ID NO: 11831 - protein, 16 aa, Homo sapiens
CARVRCLYYYYGMDVW

SEQ ID NO: 11832 - protein, 21 aa, Homo sapiens
CATAKAYCSSTSCSPNWFDPW

SEQ ID NO: 11833 - protein, 18 aa, Homo sapiens
CARGDYDFGDYSYYLEYW

SEQ ID NO: 11834 - protein, 21 aa, Homo sapiens
CARPPGGLWLHQSSFWYFDLW

SEQ ID NO: 11835 - protein, 22 aa, Homo sapiens
CAKDDLPGDGMGYYYYYGMDVW

SEQ ID NO: 11836 - protein, 20 aa, Homo sapiens
CARDPSSSWLILSDDAFDIW

SEQ ID NO: 11837 - protein, 21 aa, Homo sapiens
CARQASYYDSSGYYHHYLDYW

SEQ ID NO: 11838 - protein, 23 aa, Homo sapiens
CATAYAYYYDSSGNYRRPPFDYW

SEQ ID NO: 11839 - protein, 20 aa, Homo sapiens
CARLLGSGWSTYYDYYMDVW

SEQ ID NO: 11840 - protein, 11 aa, Homo sapiens
CLQDHNYSRAF

SEQ ID NO: 11841 - protein, 15 aa, Homo sapiens
CATAPSPPDWYFDLW

SEQ ID NO: 11842 - protein, 14 aa, Homo sapiens
CVTLYNSGWAFDHW

SEQ ID NO: 11843 - protein, 15 aa, Homo sapiens
CAKVGGSYGGETDYW

SEQ ID NO: 11844 - protein, 20 aa, Homo sapiens
CAKNRGLRFLEWLPDAFDIW

SEQ ID NO: 11845 - protein, 21 aa, Homo sapiens
CARDSLRGYSYLPQYWYFDLW

SEQ ID NO: 11846 - protein, 16 aa, Homo sapiens
CARAAVAAPKSWFDPW

SEQ ID NO: 11847 - protein, 18 aa, Homo sapiens
CAKDSASGYYDLDAFDIW

SEQ ID NO: 11848 - protein, 23 aa, Homo sapiens
CARVQFAFVTIFGVVTRYYMDVW

SEQ ID NO: 11849 - protein, 21 aa, Homo sapiens
CARDAYYYASSGYRNYYFDLW

SEQ ID NO: 11850 - protein, 21 aa, Homo sapiens
CARSPSITMIIAFITTYFDSW

SEQ ID NO: 11851 - protein, 18 aa, Homo sapiens
CARESNIGPVEAHWFDPW

SEQ ID NO: 11852 - protein, 18 aa, Homo sapiens
CSSYTYSNTLGRGTLDVF

SEQ ID NO: 11853 - protein, 21 aa, Homo sapiens
CARSGYSSSWRKYYYYYMDVW

SEQ ID NO: 11854 - protein, 16 aa, Homo sapiens
CALTNLNGDYEWFDPW

SEQ ID NO: 11855 - protein, 16 aa, Homo sapiens
CAKGGGHDSSGYLDYW

SEQ ID NO: 11856 - protein, 17 aa, Homo sapiens
CAKLPDYGGNDGYFDYW

SEQ ID NO: 11857 - protein, 21 aa, Homo sapiens
CARDGLGYCTGGVCFRAFDIW

SEQ ID NO: 11858 - protein, 21 aa, Homo sapiens
CARSPLDCSGGSCYSRRFDYW

SEQ ID NO: 11859 - protein, 17 aa, Homo sapiens
CAREGWRYDTNQGTDYW

SEQ ID NO: 11860 - protein, 19 aa, Homo sapiens
CAKGTPPYSSSWYGGFDPW

SEQ ID NO: 11861 - protein, 15 aa, Homo sapiens
CARAQQWLVGWFDPW

SEQ ID NO: 11862 - protein, 22 aa, Homo sapiens
CARGTYLHGSGNWLRIYYLDSW

SEQ ID NO: 11863 - protein, 21 aa, Homo sapiens
CASHPLEWLLLGGGYYYMDVW

SEQ ID NO: 11864 - protein, 23 aa, Homo sapiens
CARVGKYYDSSGYWGRNDAFDIW

SEQ ID NO: 11865 - protein, 16 aa, Homo sapiens
CVKVRWGVGTTRFDYW

SEQ ID NO: 11866 - protein, 24 aa, Homo sapiens
CARGAPTDDILTLYTVEEDWFDPW

SEQ ID NO: 11867 - protein, 13 aa, Homo sapiens
CTTTPGRPLVDYW

SEQ ID NO: 11868 - protein, 24 aa, Homo sapiens
CARSLENHITIFGVVTRYNWFDPW

SEQ ID NO: 11869 - protein, 15 aa, Homo sapiens
CAKIGWLAHDAFDIW

SEQ ID NO: 11870 - protein, 26 aa, Homo sapiens
CARHGADCSGGSCYPFVYYYYGMDVW

SEQ ID NO: 11871 - protein, 20 aa, Homo sapiens
CAKLPDGSGSYYNLDAFDIW

SEQ ID NO: 11872 - protein, 26 aa, Homo sapiens
CASSPLPNDFWSGYYTLYYYYYMDVW

SEQ ID NO: 11873 - protein, 29 aa, Homo sapiens
CARLGHYYDSSGYYYPPRTHYYYYGMDVW

SEQ ID NO: 11874 - protein, 17 aa, Homo sapiens
CAKLPLWFGDSAAFDIW

SEQ ID NO: 11875 - protein, 16 aa, Homo sapiens
CARGEWELPHNWFHPW

SEQ ID NO: 11876 - protein, 19 aa, Homo sapiens
CATVSSWIAAAGYNWFDPW

SEQ ID NO: 11877 - protein, 25 aa, Homo sapiens
CARGGWFTLSAAAGPLRNYNWFDPW

SEQ ID NO: 11878 - protein, 22 aa, Homo sapiens
CARASAAGISPLLYYYYYMDVW

SEQ ID NO: 11879 - protein, 18 aa, Homo sapiens
CAREHVERRDGYNYFDYW

SEQ ID NO: 11880 - protein, 19 aa, Homo sapiens
CAKDNSGYSGYDLGWFDPW

SEQ ID NO: 11881 - protein, 24 aa, Homo sapiens
CAKCGPGGITIFGVVIIQGDFDYW

SEQ ID NO: 11882 - protein, 25 aa, Homo sapiens
CTRGGARHVYCSSPTCQIGRAFNIW

SEQ ID NO: 11883 - protein, 16 aa, Homo sapiens
CARGGARWEVSYFDYW

SEQ ID NO: 11884 - protein, 21 aa, Homo sapiens
CARDQGIQLWLDYYYYGMDVW

SEQ ID NO: 11885 - protein, 17 aa, Homo sapiens
CARASGYSYEFDAFDIW

SEQ ID NO: 11886 - protein, 18 aa, Homo sapiens
CARRSDYYDTDGDRFDYW

SEQ ID NO: 11887 - protein, 15 aa, Homo sapiens
CARDRSGGYYWFDPW

SEQ ID NO: 11888 - protein, 21 aa, Homo sapiens
CARDSGYSYGLPSYYYYMDVW

SEQ ID NO: 11889 - protein, 29 aa, Homo sapiens
CARLPETTVTTWVGIGPQYDYYYYYMDVW

SEQ ID NO: 11890 - protein, 16 aa, Homo sapiens
CARDLSTVAGNYFDSW

SEQ ID NO: 11891 - protein, 19 aa, Homo sapiens
CARVNILTGYGSIPPFDYW

SEQ ID NO: 11892 - protein, 18 aa, Homo sapiens
CANLAVAGDYYYHGMDVW

SEQ ID NO: 11893 - protein, 11 aa, Homo sapiens
CHQYYTTPQSF

SEQ ID NO: 11894 - protein, 12 aa, Homo sapiens
CLQRNTYPRYSF

SEQ ID NO: 11895 - protein, 14 aa, Homo sapiens
CARSVDFGDVFDYW

SEQ ID NO: 11896 - protein, 20 aa, Homo sapiens
CARTANQLLLGYYYYGMDVW

SEQ ID NO: 11897 - protein, 18 aa, Homo sapiens
CAKERIDYGSGSYPFDSW

SEQ ID NO: 11898 - protein, 14 aa, Homo sapiens
CAKDSDGTILLDYW

SEQ ID NO: 11899 - protein, 17 aa, Homo sapiens
CARDIEQQLVGTDFDYW

SEQ ID NO: 11900 - protein, 20 aa, Homo sapiens
CAKANDDYGDYYYYYGMDVW

SEQ ID NO: 11901 - protein, 20 aa, Homo sapiens
CARDRYDFWSGYYTRAMDVW

SEQ ID NO: 11902 - protein, 13 aa, Homo sapiens
CANGGGSWAFDIW

SEQ ID NO: 11903 - protein, 19 aa, Homo sapiens
CVQNFCPGGACRRQFFDYW

SEQ ID NO: 11904 - protein, 23 aa, Homo sapiens
CAKDPPNYDYVWGSYREYYFDYW

SEQ ID NO: 11905 - protein, 28 aa, Homo sapiens
CAKDRTYYDFWSGYLQTPSYYYYGMDVW

SEQ ID NO: 11906 - protein, 17 aa, Homo sapiens
CARRLYYYDINGGFDYW

SEQ ID NO: 11907 - protein, 20 aa, Homo sapiens
CARGSQLWFRGYYYYYMDVW

SEQ ID NO: 11908 - protein, 11 aa, Homo sapiens
CVKGGRRFDPW

SEQ ID NO: 11909 - protein, 24 aa, Homo sapiens
CARDLVEPLLWFGELSPVGAFDIW

SEQ ID NO: 11910 - protein, 15 aa, Homo sapiens
CAKVKFELGGYFDFW

SEQ ID NO: 11911 - protein, 18 aa, Homo sapiens
CARVGLDSNTSLYAMDVW

SEQ ID NO: 11912 - protein, 13 aa, Homo sapiens
CATVRDHDALEVW

SEQ ID NO: 11913 - protein, 23 aa, Homo sapiens
CARGPGGLLWFGELPISSLFDYW

SEQ ID NO: 11914 - protein, 16 aa, Homo sapiens
CAKGTTRYPENYCDYW

SEQ ID NO: 11915 - protein, 19 aa, Homo sapiens
CAKWEFGVVFRPAYYFDYW

SEQ ID NO: 11916 - protein, 18 aa, Homo sapiens
CAGKSCSSTSCYSDFDYW

SEQ ID NO: 11917 - protein, 20 aa, Homo sapiens
CARENYCSSTSCYWGYMDVW

SEQ ID NO: 11918 - protein, 13 aa, Homo sapiens [sequence omitted]

SEQ ID NO: 11919 - protein, 17 aa, Homo sapiens
CARDPQVNWNFWVADYW

SEQ ID NO: 11920 - protein, 20 aa, Homo sapiens
CARSITMIVVVTWADAFDIW

SEQ ID NO: 11921 - protein, 19 aa, Homo sapiens
CAKAEYCSGGSCYSGGDYW

SEQ ID NO: 11922 - protein, 22 aa, Homo sapiens
CTTDRIHLRYFDWLLYSGHDYW

SEQ ID NO: 11923 - protein, 18 aa, Homo sapiens
CARPFVPVGATIDYFDYW

SEQ ID NO: 11924 - protein, 23 aa, Homo sapiens
CARDRWFGELSPGDYYYYGMDVW

SEQ ID NO: 11925 - protein, 16 aa, Homo sapiens
CHSSWYASGQDAFDIW

SEQ ID NO: 11926 - protein, 17 aa, Homo sapiens
CTTDTGFCSSVNCFYYW

SEQ ID NO: 11927 - protein, 16 aa, Homo sapiens
CARLGARTSGHVFDIW

SEQ ID NO: 11928 - protein, 20 aa, Homo sapiens
CASNYDILTGYYLGGGIDYW

SEQ ID NO: 11929 - protein, 19 aa, Homo sapiens
CARGSREQWLVIDRTFDYW

SEQ ID NO: 11930 - protein, 15 aa, Homo sapiens
CASFSSGLNHYFDYW

SEQ ID NO: 11931 - protein, 15 aa, Homo sapiens
CAKDLYPYYYGMDVW

SEQ ID NO: 11932 - protein, 16 aa, Homo sapiens
CARDFGYSSGWYLDLW

SEQ ID NO: 11933 - protein, 22 aa, Homo sapiens
CARNGVLLDATGATVYYYFNVW

SEQ ID NO: 11934 - protein, 20 aa, Homo sapiens
CAREVPYDSSGYETKTFDYW

SEQ ID NO: 11935 - protein, 16 aa, Homo sapiens
CARDSQSSNWYLQDYW

SEQ ID NO: 11936 - protein, 15 aa, Homo sapiens
CALVVVISGDAFDIW

SEQ ID NO: 11937 - protein, 15 aa, Homo sapiens
CARMYYYKPTHFDYW

SEQ ID NO: 11938 - protein, 23 aa, Homo sapiens
CAKDLTRPTYYYGSGSPDAFDIW

SEQ ID NO: 11939 - protein, 17 aa, Homo sapiens
CAKLEPSIAVAGTRDYW

SEQ ID NO: 11940 - protein, 20 aa, Homo sapiens
CARARIVLMLYAQPFGFDPW

SEQ ID NO: 11941 - protein, 16 aa, Homo sapiens
CARDRGYTYGYIIDYW

SEQ ID NO: 11942 - protein, 29 aa, Homo sapiens
CAKDSQYYDFWSGYSGATRYYYYYYMDVW

SEQ ID NO: 11943 - protein, 20 aa, Homo sapiens
CARDSAPDFGVVIMAYFDYW

SEQ ID NO: 11944 - protein, 23 aa, Homo sapiens
CARGPYYYDSSGSKKGGGAFDIW

SEQ ID NO: 11945 - protein, 18 aa, Homo sapiens
CATSRDGYNFNWGILDYW

SEQ ID NO: 11946 - protein, 17 aa, Homo sapiens
CARMSSPHILTGPFDYW

SEQ ID NO: 11947 - protein, 24 aa, Homo sapiens
CTRGGQTYYYDSSGYYRDEPFDYW

SEQ ID NO: 11948 - protein, 12 aa, Homo sapiens
CANLNTESFDYW

SEQ ID NO: 11949 - protein, 21 aa, Homo sapiens
CATLSVRFLEWLLGSDAFDIW

SEQ ID NO: 11950 - protein, 17 aa, Homo sapiens
CARFYYYSDSSGTYDYW

SEQ ID NO: 11951 - protein, 17 aa, Homo sapiens
CAIWEYYYDSSGYTDYW

SEQ ID NO: 11952 - protein, 17 aa, Homo sapiens
CARWPSVAATPDGMDVW

SEQ ID NO: 11953 - protein, 27 aa, Homo sapiens
CARGNRAHYDSSTYDRSSFQSGAFDIW

SEQ ID NO: 11954 - protein, 17 aa, Homo sapiens
CVQTCGDCYLVDAFDIW

SEQ ID NO: 11955 - protein, 18 aa, Homo sapiens
CASYRGGHTVRYKWFDPW

SEQ ID NO: 11956 - protein, 20 aa, Homo sapiens
CAYSSGWEIGFPWDYYFDYW

SEQ ID NO: 11957 - protein, 15 aa, Homo sapiens
CHSSGWYGQQSFDDW

SEQ ID NO: 11958 - protein, 18 aa, Homo sapiens
CARGGAIGLRDLSTFDDW

SEQ ID NO: 11959 - protein, 20 aa, Homo sapiens
CASRAWECSGRNCYHWFDPW

SEQ ID NO: 11960 - protein, 25 aa, Homo sapiens
CARGRTLVGITFFGVVTKYNWFDPW

SEQ ID NO: 11961 - protein, 23 aa, Homo sapiens
CARAVTFSYDRSTYLIPGLFDHW

SEQ ID NO: 11962 - protein, 18 aa, Homo sapiens
CARIHYDILTGLPVFDYW

SEQ ID NO: 11963 - protein, 15 aa, Homo sapiens
CTTEDPFPYSADDYW

SEQ ID NO: 11964 - protein, 16 aa, Homo sapiens
CARIYSSTVNNWFDPW

SEQ ID NO: 11965 - protein, 22 aa, Homo sapiens
CAKEGIMVGTTWGTSLYHFDYW

SEQ ID NO: 11966 - protein, 17 aa, Homo sapiens
CAKAPFYSSGWYGVDYW

SEQ ID NO: 11967 - protein, 19 aa, Homo sapiens
CAKTLTYYYDSKGPVFDYW

SEQ ID NO: 11968 - protein, 21 aa, Homo sapiens
CDWSSDVCSSDLYDSSGFGYW

SEQ ID NO: 11969 - protein, 19 aa, Homo sapiens
CATGPVVPAATGTDWFDPW

SEQ ID NO: 11970 - protein, 17 aa, Homo sapiens
CAKALGFYGLPLSFDYW

SEQ ID NO: 11971 - protein, 22 aa, Homo sapiens
CARNKLGYCTGGVCHDFPFDPW

SEQ ID NO: 11972 - protein, 21 aa, Homo sapiens
CAKDGYCGGDCFSPYWYFDLW

SEQ ID NO: 11973 - protein, 17 aa, Homo sapiens
CAKLVLAVTTSDAFDIW

SEQ ID NO: 11974 - protein, 19 aa, Homo sapiens
CARVRGYSYGLGGYYFDYW

SEQ ID NO: 11975 - protein, 11 aa, Homo sapiens
CAVVVPAPDYW

SEQ ID NO: 11976 - protein, 21 aa, Homo sapiens
CARSGDEYYYDSSGYRPFDYW

SEQ ID NO: 11977 - protein, 21 aa, Homo sapiens
CATDPIYDYVWGSYRYNFDYW

SEQ ID NO: 11978 - protein, 17 aa, Homo sapiens
CASSILEYSSSSVVDYW

SEQ ID NO: 11979 - protein, 20 aa, Homo sapiens
CATSRGHIPGNLGLWAFDYW

SEQ ID NO: 11980 - protein, 24 aa, Homo sapiens
CARRLAVVVPAAPLGSYYYYMDVW

SEQ ID NO: 11981 - protein, 19 aa, Homo sapiens
CSCGLSSGSDYYYYGMDVW

SEQ ID NO: 11982 - protein, 16 aa, Homo sapiens
CARGTYGDYKFFFDYW

SEQ ID NO: 11983 - protein, 18 aa, Homo sapiens
CAKGYYDSSGPPPAFDPW

SEQ ID NO: 11984 - protein, 18 aa, Homo sapiens
CATAPPIVGANLWWFDPW

SEQ ID NO: 11985 - protein, 19 aa, Homo sapiens
CAREAGTYGGNSGTTFDIW

SEQ ID NO: 11986 - protein, 17 aa, Homo sapiens
CARTRPWYNWNGGIDYW

SEQ ID NO: 11987 - protein, 20 aa, Homo sapiens
CARDIRGGYSYGYAPWFDPW

SEQ ID NO: 11988 - protein, 16 aa, Homo sapiens
CARSDSYGHPYYFDYW

SEQ ID NO: 11989 - protein, 21 aa, Homo sapiens
CARQPTITMIVVVIPSSFDYW

SEQ ID NO: 11990 - protein, 21 aa, Homo sapiens
CARSPAVTMIIELSTEYFDYW

SEQ ID NO: 11991 - protein, 20 aa, Homo sapiens
CATGAPITIFGVVSRWFDPW

SEQ ID NO: 11992 - protein, 19 aa, Homo sapiens
CAKLPENPAAYSSSNFDYW

SEQ ID NO: 11993 - protein, 23 aa, Homo sapiens
CARHGKGITMIVVVIGPYYFDYW

SEQ ID NO: 11994 - protein, 25 aa, Homo sapiens
CAREGIGITMVRGVITDYYYGMDVW

SEQ ID NO: 11995 - protein, 19 aa, Homo sapiens
CARDLGHSYGHGRGWFDPW

SEQ ID NO: 11996 - protein, 14 aa, Homo sapiens
CARHDPSGWIFDYW

SEQ ID NO: 11997 - protein, 14 aa, Homo sapiens
CARDSVTAPRFDYW

SEQ ID NO: 11998 - protein, 25 aa, Homo sapiens
CTTDFLSTYYDVLTGSYTYDYFDYW

SEQ ID NO: 11999 - protein, 15 aa, Homo sapiens
CVGQGLLVMNAFDIW

SEQ ID NO: 12000 - protein, 18 aa, Homo sapiens
CARENDPSSWATYYFDYW

SEQ ID NO: 12001 - protein, 20 aa, Homo sapiens
CDWSSDVCSSDLYYYGMDVW

SEQ ID NO: 12002 - protein, 14 aa, Homo sapiens
CQSGHSSGSYPGVF

SEQ ID NO: 12003 - protein, 17 aa, Homo sapiens
CAHSTVVRFPPGYFQHW

SEQ ID NO: 12004 - protein, 16 aa, Homo sapiens
CARPAWPLYYYGMDVW

SEQ ID NO: 12005 - protein, 15 aa, Homo sapiens
CARDFSDPIAALDYW

SEQ ID NO: 12006 - protein, 18 aa, Homo sapiens
CAREESIQLYYYYGLDVW

SEQ ID NO: 12007 - protein, 13 aa, Homo sapiens
CARLSTSWPMDYW

SEQ ID NO: 12008 - protein, 28 aa, Homo sapiens
CARTTLRYFDWSDIFADKAGDYDAFDIW

SEQ ID NO: 12009 - protein, 17 aa, Homo sapiens
CARSALSGLVVSWFDPW

SEQ ID NO: 12010 - protein, 16 aa, Homo sapiens
CAPDRVTMIVGTFDYW

SEQ ID NO: 12011 - protein, 19 aa, Homo sapiens
CARGRQSGSYLPDDAFDIW

SEQ ID NO: 12012 - protein, 16 aa, Homo sapiens
CAKGHIGAPGNYFDYW

SEQ ID NO: 12013 - protein, 14 aa, Homo sapiens
CAGFGTTVTYSDYW

SEQ ID NO: 12014 - protein, 22 aa, Homo sapiens
CARHAPYSSSWYEAYYYGMDVW

SEQ ID NO: 12015 - protein, 15 aa, Homo sapiens
CAKGVDSRSYYFDYW

SEQ ID NO: 12016 - protein, 20 aa, Homo sapiens
CTRLVGYCGGDCYSGWFDPW

SEQ ID NO: 12017 - protein, 20 aa, Homo sapiens
CARRPVRPWLQGSSDAFDIW

SEQ ID NO: 12018 - protein, 18 aa, Homo sapiens
CVRLGRDGYSGPPYFDYW

SEQ ID NO: 12019 - protein, 22 aa, Homo sapiens
CARALPTGTYYYDSGYSAFDIW

SEQ ID NO: 12020 - protein, 20 aa, Homo sapiens
CAKDNRRFLEWLLWGAFDIW

SEQ ID NO: 12021 - protein, 16 aa, Homo sapiens
CARHREEGDQNWLDPW

SEQ ID NO: 12022 - protein, 19 aa, Homo sapiens
CARDTYDILTGYLLAFDIW

SEQ ID NO: 12023 - protein, 17 aa, Homo sapiens
CARDEAVPNTKDGFDIW

SEQ ID NO: 12024 - protein, 18 aa, Homo sapiens
CASPTSSGWEGNGAFDIW

SEQ ID NO: 12025 - protein, 22 aa, Homo sapiens
CARGVAYSGWTGFIYYYYMDVW

SEQ ID NO: 12026 - protein, 15 aa, Homo sapiens
CAKDHSPVWGEFDYW

SEQ ID NO: 12027 - protein, 14 aa, Homo sapiens
CAKTPVAGNGVDYW

SEQ ID NO: 12028 - protein, 16 aa, Homo sapiens
CARDAVVTTRGYFDYW

SEQ ID NO: 12029 - protein, 17 aa, Homo sapiens
CSRDATGFSGLDWFDPW

SEQ ID NO: 12030 - protein, 25 aa, Homo sapiens
CARVPVGPDDFWTPVLPYYYGMDVW

SEQ ID NO: 12031 - protein, 18 aa, Homo sapiens
CARPKPNDFWSGYSIDYW

SEQ ID NO: 12032 - protein, 22 aa, Homo sapiens
CATYDVGYCSGGSCRQDAFDIW

SEQ ID NO: 12033 - protein, 22 aa, Homo sapiens
CARVAPNYYDSSGYYSRQLDYW

SEQ ID NO: 12034 - protein, 18 aa, Homo sapiens
CATFFVYSHLDSNYFDYW

SEQ ID NO: 12035 - protein, 14 aa, Homo sapiens
CAFLSSSSAGLDYW

SEQ ID NO: 12036 - protein, 34 aa, Homo sapiens
CTAYMELSRLRSDDTAVYYCAREYYYASYGMDVW

SEQ ID NO: 12037 - protein, 21 aa, Homo sapiens
CARAPVLRFLEWLSHDAFDIW

SEQ ID NO: 12038 - protein, 21 aa, Homo sapiens
CAKDRPEGYYDSSGYLPFDYW

SEQ ID NO: 12039 - protein, 16 aa, Homo sapiens
CARLGAARGHEAFDYW

SEQ ID NO: 12040 - protein, 18 aa, Homo sapiens
CAKDMEIVATIGGYFDYW

SEQ ID NO: 12041 - protein, 25 aa, Homo sapiens
CVKDISEGRSFAWLLTHSQGYFDYW

SEQ ID NO: 12042 - protein, 21 aa, Homo sapiens
CARTTYYDILTGYYWGGFDPW

SEQ ID NO: 12043 - protein, 20 aa, Homo sapiens
CAKVAWGGPVNSWTPLFDSW

SEQ ID NO: 12044 - protein, 24 aa, Homo sapiens
CAREPFYCTNGVCYDYYYYGMDVW

SEQ ID NO: 12045 - protein, 11 aa, Homo sapiens
CQSADTSALVF

SEQ ID NO: 12046 - protein, 19 aa, Homo sapiens
CATTSPLWFGELLSWFDPW

SEQ ID NO: 12047 - protein, 16 aa, Homo sapiens
CAREGIAAAGAHFDYW

SEQ ID NO: 12048 - protein, 14 aa, Homo sapiens
CARHVLAGNTFDYW

SEQ ID NO: 12049 - protein, 19 aa, Homo sapiens
CARDHYGDDTWLLGYFDLW

SEQ ID NO: 12050 - protein, 20 aa, Homo sapiens
CARDDDSSSYFDLYWFFDLW

SEQ ID NO: 12051 - protein, 16 aa, Homo sapiens
CARHKFEIRTNAFDIW

SEQ ID NO: 12052 - protein, 17 aa, Homo sapiens
CARDRHREVVAATGDYW

SEQ ID NO: 12053 - protein, 17 aa, Homo sapiens
CARDRYFDWLYNWFDPW

SEQ ID NO: 12054 - protein, 22 aa, Homo sapiens
CAREAPVVVTATYYYYYGMDVW

SEQ ID NO: 12055 - protein, 23 aa, Homo sapiens
CAREISWSYDSSGSRTIYYFDYW

SEQ ID NO: 12056 - protein, 20 aa, Homo sapiens
CTRRSLGYCSSTSCFNFDYW

SEQ ID NO: 12057 - protein, 20 aa, Homo sapiens
CARQYYYDSRDYLHDAFDIW

SEQ ID NO: 12058 - protein, 21 aa, Homo sapiens
CARGGYCSGGSCYSIYYFDYW

SEQ ID NO: 12059 - protein, 16 aa, Homo sapiens
CASTSETLLDWYFDLW

SEQ ID NO: 12060 - protein, 18 aa, Homo sapiens
CASPRGAFGGGITALDYW

SEQ ID NO: 12061 - protein, 18 aa, Homo sapiens
CARVGGYNYDGYFYFDLW

SEQ ID NO: 12062 - protein, 14 aa, Homo sapiens
CQSADNSGSLNWVF

SEQ ID NO: 12063 - protein, 20 aa, Homo sapiens
CAHAPVDSSGWYLSWYFDLW

SEQ ID NO: 12064 - protein, 20 aa, Homo sapiens
CARYGSGTYSYRNLYYFDYW

SEQ ID NO: 12065 - protein, 20 aa, Homo sapiens
CAKDLESSYDILTGYGRDYW

SEQ ID NO: 12066 - protein, 16 aa, Homo sapiens
CATNYAYPTEGSFDFW

SEQ ID NO: 12067 - protein, 22 aa, Homo sapiens
CARALVYAYDGFGELFDAFDIW

SEQ ID NO: 12068 - protein, 21 aa, Homo sapiens
CTTDVYYDFWSGYYSPPWDYW

SEQ ID NO: 12069 - protein, 13 aa, Homo sapiens
CARTPRVAGFDYW

SEQ ID NO: 12070 - protein, 17 aa, Homo sapiens
CARRGYSGNWYYTFDIW

SEQ ID NO: 12071 - protein, 17 aa, Homo sapiens
CAREPTVWNYVWWFDPW

SEQ ID NO: 12072 - protein, 11 aa, Homo sapiens
CAEANSKVDYW

SEQ ID NO: 12073 - protein, 15 aa, Homo sapiens
CARAAGHDYGRPDYW

SEQ ID NO: 12074 - protein, 16 aa, Homo sapiens
CAKDKRSDIWQTLDYW

SEQ ID NO: 12075 - protein, 13 aa, Homo sapiens
CQSYDFSSHSVVF

SEQ ID NO: 12076 - protein, 21 aa, Homo sapiens
CARDFMAIANDDGTTLDFDYW

SEQ ID NO: 12077 - protein, 21 aa, Homo sapiens
CTRDPFHDILTGAPGDAFDIW

SEQ ID NO: 12078 - protein, 17 aa, Homo sapiens
CAKDLLPSDYGGSIDYW

SEQ ID NO: 12079 - protein, 12 aa, Homo sapiens
CTTNKVRGVDYW

SEQ ID NO: 12080 - protein, 21 aa, Homo sapiens
CAKDMITFGGVIVNSFFFDYW

SEQ ID NO: 12081 - protein, 31 aa, Homo sapiens
CARAQPLGYCSGGSCREVPYRYYYYYYMDVW

SEQ ID NO: 12082 - protein, 17 aa, Homo sapiens
CAKQVAESSPYWYLDLW

SEQ ID NO: 12083 - protein, 21 aa, Homo sapiens
CARDLTGTTVTTNYYYGMDVW

SEQ ID NO: 12084 - protein, 19 aa, Homo sapiens
CAKDGTLSEQWLARWFDPW

SEQ ID NO: 12085 - protein, 15 aa, Homo sapiens
CGVVVTSRDNAFDFW

SEQ ID NO: 12086 - protein, 14 aa, Homo sapiens
CNSRDSSGIPSVIF

SEQ ID NO: 12087 - protein, 19 aa, Homo sapiens
CARRGDYDFLSGYPGFDSW

SEQ ID NO: 12088 - protein, 16 aa, Homo sapiens
CANVAVAPPEGNVDYW

SEQ ID NO: 12089 - protein, 17 aa, Homo sapiens
CAREEGILAVGNWFDPW

SEQ ID NO: 12090 - protein, 16 aa, Homo sapiens
CAKDLQVVVILSLDYW

SEQ ID NO: 12091 - protein, 22 aa, Homo sapiens
CAKDRVRCSGGSCYSRPPFDYW

SEQ ID NO: 12092 - protein, 17 aa, Homo sapiens
CAHNKRDLLTYYYMDVW

SEQ ID NO: 12093 - protein, 16 aa, Homo sapiens
CAKELVVVPAAMTDYW

SEQ ID NO: 12094 - protein, 17 aa, Homo sapiens
CARGPTPGIAAYFTDYW

SEQ ID NO: 12095 - protein, 22 aa, Homo sapiens
CARDPYYYGSGSYNSQPAFDYW

SEQ ID NO: 12096 - protein, 14 aa, Homo sapiens
CARMWWLGPPADYW

SEQ ID NO: 12097 - protein, 19 aa, Homo sapiens
CATDQYDFWSGYRIPFDPW

SEQ ID NO: 12098 - protein, 23 aa, Homo sapiens
CAKHPALKLLWFGELSGYYFDYW

SEQ ID NO: 12099 - protein, 24 aa, Homo sapiens
CARDWYDISGYYRKYYNYYGMDVW

SEQ ID NO: 12100 - protein, 21 aa, Homo sapiens
CAKAGYFDWLLLPLGNWFDPW

SEQ ID NO: 12101 - protein, 16 aa, Homo sapiens
CATPRERWLQSGFDYW

SEQ ID NO: 12102 - protein, 18 aa, Homo sapiens
CAKDMAHYYDSQEWFDPW

SEQ ID NO: 12103 - protein, 17 aa, Homo sapiens
CARDLSFSTVRGWFDPW

SEQ ID NO: 12104 - protein, 17 aa, Homo sapiens
CARHHKWFGEFHYFDYW

SEQ ID NO: 12105 - protein, 21 aa, Homo sapiens
CAKGVSLDSYGHYYYYYMDVW

SEQ ID NO: 12106 - protein, 22 aa, Homo sapiens
CARGPYCTGSKCQRYYHALDVW

SEQ ID NO: 12107 - protein, 14 aa, Homo sapiens
CARLPMADWYFDLW

SEQ ID NO: 12108 - protein, 21 aa, Homo sapiens
CAREMSGSVGYTSGLRRLDYW

SEQ ID NO: 12109 - protein, 16 aa, Homo sapiens
CARDSRGDYRDWMDVW

SEQ ID NO: 12110 - protein, 25 aa, Homo sapiens
CARDGGVFVQMVYAASHFNHAMDVW

SEQ ID NO: 12111 - protein, 19 aa, Homo sapiens
CAKCPEGIVLMAPDWFDPW

SEQ ID NO: 12112 - protein, 20 aa, Homo sapiens
CVRLRLYSSGWYLTGDFDYW

SEQ ID NO: 12113 - protein, 25 aa, Homo sapiens
CARDGVVVAATLWSRPDITGNFDYW

SEQ ID NO: 12114 - protein, 20 aa, Homo sapiens
CATYVAYYYDSSGYRAFDYW

SEQ ID NO: 12115 - protein, 25 aa, Homo sapiens
CARNIAGYSSGWYHTLIYYYYMDVW

SEQ ID NO: 12116 - protein, 22 aa, Homo sapiens
CVRMGTVFGVVNGYFYYAMDVW

SEQ ID NO: 12117 - protein, 17 aa, Homo sapiens
CAKLPETSSGWYQADYW

SEQ ID NO: 12118 - protein, 16 aa, Homo sapiens
CTTETTVTAAWSFDYW

SEQ ID NO: 12119 - protein, 19 aa, Homo sapiens
CAKDTRRFGELLYGAHDYW

SEQ ID NO: 12120 - protein, 29 aa, Homo sapiens
CARGSPEETEHDFWAVLGALYYYYGMDVW

SEQ ID NO: 12121 - protein, 16 aa, Homo sapiens
CAASGSSWYDIWFDPW

SEQ ID NO: 12122 - protein, 17 aa, Homo sapiens
CARSTALGDYMRVFDYW

SEQ ID NO: 12123 - protein, 18 aa, Homo sapiens
CAKHQYSYGYWVGGFDYW

SEQ ID NO: 12124 - protein, 26 aa, Homo sapiens
CARDERYYDFWSGYEVPPWSNWFDPW

SEQ ID NO: 12125 - protein, 16 aa, Homo sapiens
CAREKSSISYRAFDIW

SEQ ID NO: 12126 - protein, 17 aa, Homo sapiens
CAKRRSAIDFWSAFDSW

SEQ ID NO: 12127 - protein, 25 aa, Homo sapiens
CARDSIYDYVWGSYRPRPSSAFDIW

SEQ ID NO: 12128 - protein, 20 aa, Homo sapiens
CAIQPPQITIFGFGGTIDYW

SEQ ID NO: 12129 - protein, 12 aa, Homo sapiens
CQQYNTYSGFSF

SEQ ID NO: 12130 - protein, 25 aa, Homo sapiens
CATRTQSSSSWYLRVAYYYYGMDVW

SEQ ID NO: 12131 - protein, 16 aa, Homo sapiens
CASSHYDFWSGYLDYW

SEQ ID NO: 12132 - protein, 19 aa, Homo sapiens
CARTYYDILTGYQIAHDYW

SEQ ID NO: 12133 - protein, 16 aa, Homo sapiens
CARLYSSSPHDLLDIW

SEQ ID NO: 12134 - protein, 20 aa, Homo sapiens
CATGSPVWLGYSSGKEFDYW

SEQ ID NO: 12135 - protein, 19 aa, Homo sapiens
CARDLADGYKNYYYYMDVW

SEQ ID NO: 12136 - protein, 25 aa, Homo sapiens
CAKDIGAGCNDASCPIVYYYYMDVW

SEQ ID NO: 12137 - protein, 14 aa, Homo sapiens
CARDAFHYSGLDYW

SEQ ID NO: 12138 - protein, 20 aa, Homo sapiens
CAKDHLSTSSGFYPDAFDFW

SEQ ID NO: 12139 - protein, 17 aa, Homo sapiens
CARGGAYYESSGYCDFW

SEQ ID NO: 12140 - protein, 21 aa, Homo sapiens
CARTPVELEPRDYYYYYMDVW

SEQ ID NO: 12141 - protein, 20 aa, Homo sapiens
CAKDQWELQLGYYHYYMDVW

SEQ ID NO: 12142 - protein, 21 aa, Homo sapiens
CTRGRRYNNGWDKTDNWFDPW

SEQ ID NO: 12143 - protein, 14 aa, Homo sapiens
CAAWDGRLNGFYVF

SEQ ID NO: 12144 - protein, 13 aa, Homo sapiens
CAKLLVGATRDYW

SEQ ID NO: 12145 - protein, 25 aa, Homo sapiens
CARGAKLRFLEWSRELYYYYYMDVW

SEQ ID NO: 12146 - protein, 18 aa, Homo sapiens
CVPTPYDTSGYYSLFDYW

SEQ ID NO: 12147 - protein, 16 aa, Homo sapiens
CASMVRGLGMYYFDYW

SEQ ID NO: 12148 - protein, 22 aa, Homo sapiens
CAREPFPTEIGGVIVYDAFDIW

SEQ ID NO: 12149 - protein, 21 aa, Homo sapiens
CARDPGHDFWSGYRRVYFDYW

SEQ ID NO: 12150 - protein, 18 aa, Homo sapiens
CARDFRRLVGLNPAFDIW

SEQ ID NO: 12151 - protein, 27 aa, Homo sapiens
CAKDLVGLAEDYDILTGYYTGDAFDIW

SEQ ID NO: 12152 - protein, 13 aa, Homo sapiens
CVKELDWGAFHVW

SEQ ID NO: 12153 - protein, 21 aa, Homo sapiens
CARIASSAYMHGLDAGFFDIW

SEQ ID NO: 12154 - protein, 13 aa, Homo sapiens
CAKADAGYYFNYW

SEQ ID NO: 12155 - protein, 20 aa, Homo sapiens
CARTAAHTWGDYGVDYFDYW

SEQ ID NO: 12156 - protein, 21 aa, Homo sapiens
CARGHVYYDFWSGYGYISDYW

SEQ ID NO: 12157 - protein, 21 aa, Homo sapiens
CARKGGSSSTFYYYYYGMDVW

SEQ ID NO: 12158 - protein, 16 aa, Homo sapiens
CASSSETNYYYYMDVW

SEQ ID NO: 12159 - protein, 15 aa, Homo sapiens
CARDSGRPQSDFEYW

SEQ ID NO: 12160 - protein, 13 aa, Homo sapiens
CATYDNSGYFDYW

SEQ ID NO: 12161 - protein, 16 aa, Homo sapiens
CATEPAIRGLYYFDYW

SEQ ID NO: 12162 - protein, 15 aa, Homo sapiens
CAKLPDYGDYGVDYW

SEQ ID NO: 12163 - protein, 25 aa, Homo sapiens
CATAPSITGTTPWDHYYYYYGMDVW

SEQ ID NO: 12164 - protein, 20 aa, Homo sapiens
CARLMFPREYSDYDWGRDYW

SEQ ID NO: 12165 - protein, 12 aa, Homo sapiens
CHQYYSTLGWTF

SEQ ID NO: 12166 - protein, 15 aa, Homo sapiens
CARDSAAAVGGFDYW

SEQ ID NO: 12167 - protein, 18 aa, Homo sapiens
CARDEAWSGYPSYYFDYW

SEQ ID NO: 12168 - protein, 24 aa, Homo sapiens
CARDRGVIELLGWELFGGSYFASW

SEQ ID NO: 12169 - protein, 24 aa, Homo sapiens
CAREDYYDSSGYYLDYYYYGMDVW

SEQ ID NO: 12170 - protein, 16 aa, Homo sapiens
CARPAGSGYYSSFDYW

SEQ ID NO: 12171 - protein, 19 aa, Homo sapiens
CARGPPHYGDYPLYYFDYW

SEQ ID NO: 12172 - protein, 14 aa, Homo sapiens
CQRYHLLLSAFEIW

SEQ ID NO: 12173 - protein, 16 aa, Homo sapiens
CATVVSSWYYYYMDVW

SEQ ID NO: 12174 - protein, 23 aa, Homo sapiens
CAKDALRGFSGNDYYYFFGMDVW

SEQ ID NO: 12175 - protein, 15 aa, Homo sapiens
CAARFGANPFCFDYW

SEQ ID NO: 12176 - protein, 16 aa, Homo sapiens
CAHRLAAPTSPYFDYW

SEQ ID NO: 12177 - protein, 20 aa, Homo sapiens
CARTNYDSAGYYYYNYMDVW

SEQ ID NO: 12178 - protein, 14 aa, Homo sapiens
CAKDYSGWFRFDSW

SEQ ID NO: 12179 - protein, 21 aa, Homo sapiens
CTTDPFLTYYYDSSGYYFDYW

SEQ ID NO: 12180 - protein, 15 aa, Homo sapiens
CAREIYGDYEEFGYW

SEQ ID NO: 12181 - protein, 15 aa, Homo sapiens
CARGSSGSSSAFDVW

SEQ ID NO: 12182 - protein, 16 aa, Homo sapiens
CAKEGRDFSSSFFDYW

SEQ ID NO: 12183 - protein, 18 aa, Homo sapiens
CARGRPLRRVVEQWFDSW

SEQ ID NO: 12184 - protein, 21 aa, Homo sapiens
CARESAMSAYVWGSYRCFDYW

SEQ ID NO: 12185 - protein, 24 aa, Homo sapiens
CTRSKPGYSSSWHGSYYYYGMDVW

SEQ ID NO: 12186 - protein, 25 aa, Homo sapiens
CARLLRRDEYYYDSSGYYFGYFDLW

SEQ ID NO: 12187 - protein, 24 aa, Homo sapiens
CAKDPAPGHYDSGGTGWGYYFEYW

SEQ ID NO: 12188 - protein, 22 aa, Homo sapiens
CARESRYSSSRQWLGQYYFDYW

SEQ ID NO: 12189 - protein, 19 aa, Homo sapiens
CAKDPRITMIVKDWYFDLW

SEQ ID NO: 12190 - protein, 23 aa, Homo sapiens
CARAAPESSTWLELRVIPWFDPW

SEQ ID NO: 12191 - protein, 18 aa, Homo sapiens
CTTESGGLEMATTPFDYW

SEQ ID NO: 12192 - protein, 16 aa, Homo sapiens
CARGGQWLVQDAFDIW

SEQ ID NO: 12193 - protein, 25 aa, Homo sapiens
CARPLYYYDSSGTATKNKYWNFDLW

SEQ ID NO: 12194 - protein, 16 aa, Homo sapiens
CARLLSSWDEYYFDYW

SEQ ID NO: 12195 - protein, 19 aa, Homo sapiens
CARWLGKRGDCYYCAFDIW

SEQ ID NO: 12196 - protein, 17 aa, Homo sapiens
CARDGGSWLQFRGVDYW

SEQ ID NO: 12197 - protein, 18 aa, Homo sapiens
CAKDADIVVVTARYFQHW

SEQ ID NO: 12198 - protein, 19 aa, Homo sapiens
CARDFQDPSRCNGDCLDYW

SEQ ID NO: 12199 - protein, 15 aa, Homo sapiens
CARDLDGDYFAFYYW

SEQ ID NO: 12200 - protein, 17 aa, Homo sapiens
CASPNRGIPGSTSGDYW

SEQ ID NO: 12201 - protein, 21 aa, Homo sapiens
CARRPVAGYWGRPGINYFDYW

SEQ ID NO: 12202 - protein, 15 aa, Homo sapiens
CATHFAVLRSGYDYW

SEQ ID NO: 12203 - protein, 20 aa, Homo sapiens
CARDPSLSWLVGVSWYFDLW

SEQ ID NO: 12204 - protein, 13 aa, Homo sapiens
CQQTYSAPREITF

SEQ ID NO: 12205 - protein, 19 aa, Homo sapiens
CAKERGSGSQGTIDAFDIW

SEQ ID NO: 12206 - protein, 20 aa, Homo sapiens
CASIWNDILTGYSHVPFDPW

SEQ ID NO: 12207 - protein, 19 aa, Homo sapiens
CTRSLCPFGSCSYSAMDVW

SEQ ID NO: 12208 - protein, 20 aa, Homo sapiens
CARVIEKGDSSGYYNSFDYW

SEQ ID NO: 12209 - protein, 25 aa, Homo sapiens
CARVINFKYYDSSGYPKEGYYFDYW

SEQ ID NO: 12210 - protein, 25 aa, Homo sapiens
CARGPTDTYDYDSSGYPKMFYLDSW

SEQ ID NO: 12211 - protein, 28 aa, Homo sapiens
CARESVPSIYMGLYCTGGVCPGGYFDYW

SEQ ID NO: 12212 - protein, 17 aa, Homo sapiens
CARPRNDGGLRGYMDVW

SEQ ID NO: 12213 - protein, 12 aa, Homo sapiens
CTRERRNCFDYW

SEQ ID NO: 12214 - protein, 18 aa, Homo sapiens
CASNPYCGGDCLGAFDIW

SEQ ID NO: 12215 - protein, 18 aa, Homo sapiens
CARQPETPTIDEKGFDLW

SEQ ID NO: 12216 - protein, 19 aa, Homo sapiens
CAKDIPHDYGGNWDAFDIW

SEQ ID NO: 12217 - protein, 17 aa, Homo sapiens
CARVKLPWYGGGQFDYW

SEQ ID NO: 12218 - protein, 28 aa, Homo sapiens
CAKDHGMLMVPPSSGPYCGSDCNAFDIW

SEQ ID NO: 12219 - protein, 18 aa, Homo sapiens
CARGPHFDWLLLTWFDPW

SEQ ID NO: 12220 - protein, 20 aa, Homo sapiens
CARDFPGLGYSNYGDYFDYW

SEQ ID NO: 12221 - protein, 16 aa, Homo sapiens
CARTFVGLGDFAPDYW

SEQ ID NO: 12222 - protein, 13 aa, Homo sapiens
CQQYDSSLRGLTF

SEQ ID NO: 12223 - protein, 23 aa, Homo sapiens
CATSFSIVGAHPYYYYYYGMDVW

SEQ ID NO: 12224 - protein, 13 aa, Homo sapiens
CQQYNSLSARWTF

SEQ ID NO: 12225 - protein, 20 aa, Homo sapiens
CARDTVSHDYGGNSYAFDIW

SEQ ID NO: 12226 - protein, 19 aa, Homo sapiens
CASFPKGGYYTGEAYFDYW

SEQ ID NO: 12227 - protein, 19 aa, Homo sapiens
CAGGKGGIAAGGRGAFDIW

SEQ ID NO: 12228 - protein, 21 aa, Homo sapiens
CATVYVDTAMVGGGLQGFDPW

SEQ ID NO: 12229 - protein, 21 aa, Homo sapiens
CATKHQGSCRGDGCYSPFDYW

SEQ ID NO: 12230 - protein, 21 aa, Homo sapiens
CARSAPDDDSWYGYRLYFDLW

SEQ ID NO: 12231 - protein, 13 aa, Homo sapiens
CQHRSSWPRMFTF

SEQ ID NO: 12232 - protein, 16 aa, Homo sapiens
CAKSASGSYHSPPDYW

SEQ ID NO: 12233 - protein, 28 aa, Homo sapiens
CARFTGFVEWELFIGGPRFIEHDAFDIW

SEQ ID NO: 12234 - protein, 14 aa, Homo sapiens
CATGGWELLSLDYW

SEQ ID NO: 12235 - protein, 21 aa, Homo sapiens
CTRDVGVSIGYSYGPNWFDPW

SEQ ID NO: 12236 - protein, 18 aa, Homo sapiens
CAHRGSSVWHNDDAFDIW

SEQ ID NO: 12237 - protein, 20 aa, Homo sapiens
CARCGYSYGYFHYYYYMDVW

SEQ ID NO: 12238 - protein, 21 aa, Homo sapiens
CAKEKEDGDYGNYYYYGMDVW

SEQ ID NO: 12239 - protein, 16 aa, Homo sapiens
CAKLPNSGSYPGSDYW

SEQ ID NO: 12240 - protein, 22 aa, Homo sapiens
CARGTSIAARKGWYYYYYMDVW

SEQ ID NO: 12241 - protein, 14 aa, Homo sapiens
CANWNPRLDAFDIW

SEQ ID NO: 12242 - protein, 18 aa, Homo sapiens
CARDEGAYLSGYSWFDPW

SEQ ID NO: 12243 - protein, 20 aa, Homo sapiens
CARAIAARQNYYYYYYMDVW

SEQ ID NO: 12244 - protein, 20 aa, Homo sapiens
CATGGMMQHNRLEINSFDYW

SEQ ID NO: 12245 - protein, 23 aa, Homo sapiens
CAKTNPSITIFGVVTRHYYMDVW

SEQ ID NO: 12246 - protein, 21 aa, Homo sapiens
CAKVSQYTVVVVAADHVFDIW

SEQ ID NO: 12247 - protein, 19 aa, Homo sapiens
CATAGITIWETRNNWFDPW

SEQ ID NO: 12248 - protein, 28 aa, Homo sapiens
CARDRAQYYDFWSGPPVWAVQDEPFDYW

SEQ ID NO: 12249 - protein, 20 aa, Homo sapiens
CARGGSESALLVITDGFDFW

SEQ ID NO: 12250 - protein, 26 aa, Homo sapiens
CALPICAIYYCARPEGGYSTSWVDYW

SEQ ID NO: 12251 - protein, 20 aa, Homo sapiens
CAKSPTIAAAGLSWGVFDYW

SEQ ID NO: 12252 - protein, 18 aa, Homo sapiens
CARDGIAEAGTPFHFDYW

SEQ ID NO: 12253 - protein, 14 aa, Homo sapiens
CARVVPQSQDFDTW

SEQ ID NO: 12254 - protein, 13 aa, Homo sapiens
CQQAYSFPGALSF

SEQ ID NO: 12255 - protein, 16 aa, Homo sapiens
CTRAHVFELLDAFDIW

SEQ ID NO: 12256 - protein, 15 aa, Homo sapiens
CARGSGYNEANFDYW

SEQ ID NO: 12257 - protein, 18 aa, Homo sapiens
CARLPGGVAAINSWFDPW

SEQ ID NO: 12258 - protein, 25 aa, Homo sapiens
CAKDMHCTNGVCYDVDYYYYGMDVW

SEQ ID NO: 12259 - protein, 21 aa, Homo sapiens
CAKESVVRYFDWLLSQYFDYW

SEQ ID NO: 12260 - protein, 14 aa, Homo sapiens
CAKDVNSLNSFDYW

SEQ ID NO: 12261 - protein, 21 aa, Homo sapiens
CARVGLGGSYLEYYYYGMDVW

SEQ ID NO: 12262 - protein, 21 aa, Homo sapiens
CARGVSPSLYYYGNADAFDIW

SEQ ID NO: 12263 - protein, 14 aa, Homo sapiens
CAREDRAAVFFDSW

SEQ ID NO: 12264 - protein, 21 aa, Homo sapiens
CAREEAECSSTSCYYYGMDVW

SEQ ID NO: 12265 - protein, 18 aa, Homo sapiens
CAKDQSGDGYNEGYFDYW

SEQ ID NO: 12266 - protein, 20 aa, Homo sapiens
CVREMMVSVPNDYYYYMDVW

SEQ ID NO: 12267 - protein, 17 aa, Homo sapiens
CAKGGFADSVGWYFDLW

SEQ ID NO: 12268 - protein, 15 aa, Homo sapiens
CARSSRVGLSYSDFW

SEQ ID NO: 12269 - protein, 27 aa, Homo sapiens
CARDRTPSASMIVVVMGGAAHDAFDIW

SEQ ID NO: 12270 - protein, 19 aa, Homo sapiens
CAKDIEPELYGSGSYSSYW

SEQ ID NO: 12271 - protein, 21 aa, Homo sapiens
CARGTLYCSSTSCYFDYMDVW

SEQ ID NO: 12272 - protein, 20 aa, Homo sapiens
CAKDYSWELPYYYYYGMDVW

SEQ ID NO: 12273 - protein, 22 aa, Homo sapiens
CARDGSPLYYDILTGYPPLDYW

SEQ ID NO: 12274 - protein, 22 aa, Homo sapiens
CTTVTRAYYDFWSGYHNYFDYW

SEQ ID NO: 12275 - protein, 23 aa, Homo sapiens
CARDLKLAYDFWSGLLPNWFDPW

SEQ ID NO: 12276 - protein, 18 aa, Homo sapiens
CSIEPPYYDFWVGYLDYW

SEQ ID NO: 12277 - protein, 21 aa, Homo sapiens
CARQGGVTMIVVVIPGYFDYW

SEQ ID NO: 12278 - protein, 16 aa, Homo sapiens
CARDKAMAVGYALDIW

SEQ ID NO: 12279 - protein, 28 aa, Homo sapiens
CAKDGANGYSGYDSQWLVPVTDYYFDYW

SEQ ID NO: 12280 - protein, 16 aa, Homo sapiens
CTTHGATGLDSEFDYW

SEQ ID NO: 12281 - protein, 20 aa, Homo sapiens
CARGTQTVQLWSSSYEFDYW

SEQ ID NO: 12282 - protein, 20 aa, Homo sapiens
CARDLTGTGEDYYYYGMDVW

SEQ ID NO: 12283 - protein, 18 aa, Homo sapiens
CARAGCSGGVCYSHFDYW

SEQ ID NO: 12284 - protein, 16 aa, Homo sapiens
CATLAPTVVTTPIDYW

SEQ ID NO: 12285 - protein, 19 aa, Homo sapiens
CAKIGTPGWMTTVTTTDYW

SEQ ID NO: 12286 - protein, 18 aa, Homo sapiens
CARGDSSMWYGGDAFDIW

SEQ ID NO: 12287 - protein, 21 aa, Homo sapiens
CARDPTYDYVWGSYVGWFDPW

SEQ ID NO: 12288 - protein, 22 aa, Homo sapiens
CARVRSSSWYGPYYYYYGMDVW

SEQ ID NO: 12289 - protein, 17 aa, Homo sapiens
CARQRGGWELPFYFDYW

SEQ ID NO: 12290 - protein, 18 aa, Homo sapiens
CASWRGTWLFGQGGFDYW

SEQ ID NO: 12291 - protein, 15 aa, Homo sapiens
CATYYDYSNRPFDYW

SEQ ID NO: 12292 - protein, 17 aa, Homo sapiens
CAQRQGTEEYIDWFDPW

SEQ ID NO: 12293 - protein, 19 aa, Homo sapiens
CGKGYSSFANAGLNWFDPW

SEQ ID NO: 12294 - protein, 19 aa, Homo sapiens
CARNNYDISGYYWDHFDVW

SEQ ID NO: 12295 - protein, 16 aa, Homo sapiens
CATGNVIGPVTWFDPW

SEQ ID NO: 12296 - protein, 18 aa, Homo sapiens
CARQHIVVVTASRWFDPW

SEQ ID NO: 12297 - protein, 23 aa, Homo sapiens
CAGFEYSSPLVGPLGYYYGMDVW

SEQ ID NO: 12298 - protein, 21 aa, Homo sapiens
CATAPAIAVAGKARVWWFDPW

SEQ ID NO: 12299 - protein, 31 aa, Homo sapiens
CAKDLHEFRHGLLTISLGAPDYYYYYGMDVW

SEQ ID NO: 12300 - protein, 19 aa, Homo sapiens
CAKMGHHYDFWEPGAFDIW

SEQ ID NO: 12301 - protein, 17 aa, Homo sapiens
CARLSGSSTSWDWFDPW

SEQ ID NO: 12302 - protein, 14 aa, Homo sapiens
CARGLFRWSPFDIW

SEQ ID NO: 12303 - protein, 22 aa, Homo sapiens
CATATAVRGALYYYYYYGMDVW

SEQ ID NO: 12304 - protein, 27 aa, Homo sapiens
CARAETGERITIFGVVNPYYYYGMDVW

SEQ ID NO: 12305 - protein, 16 aa, Homo sapiens
CARRTGSLSSRWFDPW

SEQ ID NO: 12306 - protein, 23 aa, Homo sapiens
CARDSAPPFWSGYLYYYYGMDVW

SEQ ID NO: 12307 - protein, 18 aa, Homo sapiens
CAGSSWYASASYYYMDVW

SEQ ID NO: 12308 - protein, 18 aa, Homo sapiens
CASNYGGYNWKDNRFFYW

SEQ ID NO: 12309 - protein, 14 aa, Homo sapiens
CASTAPGLRAFDIW

SEQ ID NO: 12310 - protein, 16 aa, Homo sapiens
CAKDMLPAAAAPFDYW

SEQ ID NO: 12311 - protein, 23 aa, Homo sapiens
CAGDGDMAVYDDSGYFFSYFVTW

SEQ ID NO: 12312 - protein, 18 aa, Homo sapiens
CAKESHDLWSGQNYFDYW

SEQ ID NO: 12313 - protein, 20 aa, Homo sapiens
CARALSGYDYIYYYYYMDVW

SEQ ID NO: 12314 - protein, 19 aa, Homo sapiens
CASNSDFWSGYYTYYFDYW

SEQ ID NO: 12315 - protein, 18 aa, Homo sapiens
CASGGRGLVEANDAFDMW

SEQ ID NO: 12316 - protein, 21 aa, Homo sapiens
CAKVLYYDILTGYSTDAFDIW

SEQ ID NO: 12317 - protein, 18 aa, Homo sapiens
CAKASGRTSPDSRYLDSW

SEQ ID NO: 12318 - protein, 17 aa, Homo sapiens
CARDRVEDYDLLGIDYW

SEQ ID NO: 12319 - protein, 18 aa, Homo sapiens
CARLGGYYYEAPYLPDYW

SEQ ID NO: 12320 - protein, 21 aa, Homo sapiens
CAKVSYSGSYVGPQAYYFDYW

SEQ ID NO: 12321 - protein, 22 aa, Homo sapiens
CAKGAALGITIFGVVTPWADYW

SEQ ID NO: 12322 - protein, 14 aa, Homo sapiens
CYSTDTTGNHRGMF

SEQ ID NO: 12323 - protein, 19 aa, Homo sapiens
CAKGRDIVLMVYATHFDYW

SEQ ID NO: 12324 - protein, 27 aa, Homo sapiens
CAREGVGDYDILTGFARHYYYYGMDVW

SEQ ID NO: 12325 - protein, 23 aa, Homo sapiens
CAHRLAHYDILTGYYNTQYFDYW

SEQ ID NO: 12326 - protein, 14 aa, Homo sapiens
CAKGYSSGYWGDYW

SEQ ID NO: 12327 - protein, 17 aa, Homo sapiens
CAKVPDSSGYYTSFDHW

SEQ ID NO: 12328 - protein, 17 aa, Homo sapiens
CAKDYGVGPDRDYFDYW

SEQ ID NO: 12329 - protein, 15 aa, Homo sapiens
CAKDIRPILGAIDYW

SEQ ID NO: 12330 - protein, 18 aa, Homo sapiens
CARDWNTAMEFQYYMDVW

SEQ ID NO: 12331 - protein, 13 aa, Homo sapiens
CAKEVGRGYANYW

SEQ ID NO: 12332 - protein, 18 aa, Homo sapiens
CARVAPANWGFQYYFDYW

SEQ ID NO: 12333 - protein, 22 aa, Homo sapiens
CASGYCSGGSCYYHYYYYMDVW

SEQ ID NO: 12334 - protein, 15 aa, Homo sapiens
CAKDTSPGIYYFDYW

SEQ ID NO: 12335 - protein, 20 aa, Homo sapiens
CADRLKGIGYDWNTGTFDIW

SEQ ID NO: 12336 - protein, 18 aa, Homo sapiens
CARDPNDYDSSGYYWNYW

SEQ ID NO: 12337 - protein, 19 aa, Homo sapiens
CAREPRIGGQWLEDYFDYW

SEQ ID NO: 12338 - protein, 18 aa, Homo sapiens
CAKDIGVAGTGYNWFDPW

SEQ ID NO: 12339 - protein, 20 aa, Homo sapiens
CAREDCTITSCYGTPTFDSW

SEQ ID NO: 12340 - protein, 18 aa, Homo sapiens
CARDTYDSSGLPSAEDYW

SEQ ID NO: 12341 - protein, 17 aa, Homo sapiens
CARDRLVYGGNSYFDYW

SEQ ID NO: 12342 - protein, 23 aa, Homo sapiens
CARHGGSQTWIQLWLLPSVFDYW

SEQ ID NO: 12343 - protein, 21 aa, Homo sapiens
CTTDWNSYYDILTGYYFLDYW

SEQ ID NO: 12344 - protein, 16 aa, Homo sapiens
CARSRATHYGSNFDLW

SEQ ID NO: 12345 - protein, 17 aa, Homo sapiens
CARGRRGGYSYGLFDYW

SEQ ID NO: 12346 - protein, 19 aa, Homo sapiens
CAKAAPPYDFDSSGYCDDW

SEQ ID NO: 12347 - protein, 30 aa, Homo sapiens
CARDSQYYDILTGYLPHPRRYYYYYYMDVW

SEQ ID NO: 12348 - protein, 23 aa, Homo sapiens
CATVNFQGLLWFGELQVNWFDPW

SEQ ID NO: 12349 - protein, 22 aa, Homo sapiens
CARIPVYYDRRGYYRLDAFDIW

SEQ ID NO: 12350 - protein, 21 aa, Homo sapiens
CARGIREPTIFGVVITPPDYW

SEQ ID NO: 12351 - protein, 15 aa, Homo sapiens
CARDLELTGDRYDYW

SEQ ID NO: 12352 - protein, 20 aa, Homo sapiens
CAKDIASVYSSSWYYALDIW

SEQ ID NO: 12353 - protein, 25 aa, Homo sapiens
CAKGHFGETPSIPNPDYYYYGMDVW

SEQ ID NO: 12354 - protein, 18 aa, Homo sapiens
CAKVRDDSDRFMRYFDYW

SEQ ID NO: 12355 - protein, 16 aa, Homo sapiens
CARDRGSGWPYYFEDW

SEQ ID NO: 12356 - protein, 20 aa, Homo sapiens
CATDLLHVLSGYSHYAFDIW

SEQ ID NO: 12357 - protein, 17 aa, Homo sapiens
CARATGRWLQFLGFDYW

SEQ ID NO: 12358 - protein, 20 aa, Homo sapiens
CARVGALHFLEWLSPAFDIW

SEQ ID NO: 12359 - protein, 15 aa, Homo sapiens
CVRAPRHGPLFFDYW

SEQ ID NO: 12360 - protein, 26 aa, Homo sapiens
CARDGPIVTIFGVVRRPSYYYGMDVW

SEQ ID NO: 12361 - protein, 18 aa, Homo sapiens
CAKDMTTVVIPVSSFDYW

SEQ ID NO: 12362 - protein, 19 aa, Homo sapiens
CAKVVSVSGYYIWDAFDIW

SEQ ID NO: 12363 - protein, 17 aa, Homo sapiens
CARGGRVEWDSTTYDYW

SEQ ID NO: 12364 - protein, 24 aa, Homo sapiens
CARDLEYCSGGSCYPRVTGDFDYW

SEQ ID NO: 12365 - protein, 19 aa, Homo sapiens
CARRYCSSTGCSSYYMDVW

SEQ ID NO: 12366 - protein, 18 aa, Homo sapiens
CASSLTLIAVAGPSLDYW

SEQ ID NO: 12367 - protein, 24 aa, Homo sapiens
CAREPRGYYDSSGYYKRAGYFDYW

SEQ ID NO: 12368 - protein, 18 aa, Homo sapiens
CARLFRITMVRGGAFDYW

SEQ ID NO: 12369 - protein, 25 aa, Homo sapiens
CARSLPPPYDYVWGSYLVGPWFDPW

SEQ ID NO: 12370 - protein, 22 aa, Homo sapiens
CARHPISYHLLRGYVENYFDYW

SEQ ID NO: 12371 - protein, 21 aa, Homo sapiens
CATGRGGTAARLYYFYYMDVW

SEQ ID NO: 12372 - protein, 20 aa, Homo sapiens
CARGRLDILTGYSSYYFDYW

SEQ ID NO: 12373 - protein, 22 aa, Homo sapiens
CAREVDIVLMVYGVGYNWFDPW

SEQ ID NO: 12374 - protein, 18 aa, Homo sapiens
CARLQSGGLSYGGYFDYW

SEQ ID NO: 12375 - protein, 22 aa, Homo sapiens
CARGGCSSTSCYDNYYYYMDVW

SEQ ID NO: 12376 - protein, 18 aa, Homo sapiens
CAKLSGYGDYDREFTDYW

SEQ ID NO: 12377 - protein, 12 aa, Homo sapiens
CQHYNSYSEYAF

SEQ ID NO: 12378 - protein, 27 aa, Homo sapiens
CARGAPEYYDFWSGYRYYYYYYGMDVW

SEQ ID NO: 12379 - protein, 25 aa, Homo sapiens
CASSYIVVVPAAIIDHYYYYGMDVW

SEQ ID NO: 12380 - protein, 25 aa, Homo sapiens
CVRDTLARVSVFGVVPQARNYFDAW

SEQ ID NO: 12381 - protein, 28 aa, Homo sapiens
CATGIPTIVVVPAANSVPRVYYYGMDVW

SEQ ID NO: 12382 - protein, 23 aa, Homo sapiens
CARDPRIMITFGGVIVSDYFDYW

SEQ ID NO: 12383 - protein, 27 aa, Homo sapiens
CARDRVLGTDYDFWSGYYDYYYGMDVW

SEQ ID NO: 12384 - protein, 22 aa, Homo sapiens
CATDRIPVWITAAGTGGWFDPW

SEQ ID NO: 12385 - protein, 22 aa, Homo sapiens
CARSKPDFDFWSGSYIDAFDIW

SEQ ID NO: 12386 - protein, 22 aa, Homo sapiens
CAREGWFYYDSSGYYRDAFDIW

SEQ ID NO: 12387 - protein, 25 aa, Homo sapiens
CARGVPAAILYDFWSGYYPPHFDYW

SEQ ID NO: 12388 - protein, 19 aa, Homo sapiens
CARVVTSRDFWSGYYFDYW

SEQ ID NO: 12389 - protein, 26 aa, Homo sapiens
CARDREYYDFWSGRRTPSYYYGMDVW

SEQ ID NO: 12390 - protein, 18 aa, Homo sapiens
CATLLFYDSSGYYIFDYW

SEQ ID NO: 12391 - protein, 16 aa, Homo sapiens
CARLVSGYYGDYFDHW

SEQ ID NO: 12392 - protein, 24 aa, Homo sapiens
CAKDPYHYDSSGYSGLGPPYFQHW

SEQ ID NO: 12393 - protein, 17 aa, Homo sapiens
CAREGDGYDKSFSFDYW

SEQ ID NO: 12394 - protein, 24 aa, Homo sapiens
CAAALASDLMITFGGVIVHYFDYW

SEQ ID NO: 12395 - protein, 13 aa, Homo sapiens
CQKYDSSPPSIAF

SEQ ID NO: 12396 - protein, 15 aa, Homo sapiens
CTTVSPYSSGPFDYW

SEQ ID NO: 12397 - protein, 23 aa, Homo sapiens
CARGAPLLRLRLWGSYRNPLDYW

SEQ ID NO: 12398 - protein, 20 aa, Homo sapiens
CARDLVYSYGQRLHDAFDIW

SEQ ID NO: 12399 - protein, 18 aa, Homo sapiens
CAKGTSPLHYGDSNFDYW

SEQ ID NO: 12400 - protein, 19 aa, Homo sapiens
CVHLAWYDGVGYYLHFDYW

SEQ ID NO: 12401 - protein, 25 aa, Homo sapiens
CARAPYLYYYDSSGYYDTSGYFQHW

SEQ ID NO: 12402 - protein, 15 aa, Homo sapiens
CAKDSGPYQLLCDYW

SEQ ID NO: 12403 - protein, 17 aa, Homo sapiens
CARGAYSNSALVWFDPW

SEQ ID NO: 12404 - protein, 15 aa, Homo sapiens
CAHSSLGLPWYFDYW

SEQ ID NO: 12405 - protein, 19 aa, Homo sapiens
CAHRRSGYYDSSGYYLDYW

SEQ ID NO: 12406 - protein, 16 aa, Homo sapiens
CSTMAVAVFSETFDIW

SEQ ID NO: 12407 - protein, 16 aa, Homo sapiens
CAKAFGYSYGYGSDYW

SEQ ID NO: 12408 - protein, 24 aa, Homo sapiens
CARGIEGVTMMVAVVPGNDAFDIW

SEQ ID NO: 12409 - protein, 20 aa, Homo sapiens
CATGPTVLRYFEGYNWFDPW

SEQ ID NO: 12410 - protein, 26 aa, Homo sapiens
CARDRPLIGDFWSGYPPLNPNWFDPW

SEQ ID NO: 12411 - protein, 23 aa, Homo sapiens
CARSPNYDILTGYSVSTILFDYW

SEQ ID NO: 12412 - protein, 21 aa, Homo sapiens
CAKDPGIGDSSGWYDRVFDYW

SEQ ID NO: 12413 - protein, 19 aa, Homo sapiens
CATRSWRRYYDSSGYLDYW

SEQ ID NO: 12414 - protein, 15 aa, Homo sapiens
CARELFFGMAIGDYW

SEQ ID NO: 12415 - protein, 21 aa, Homo sapiens
CARGRVDSSGWYDLPWYFDLW

SEQ ID NO: 12416 - protein, 19 aa, Homo sapiens
CARVPVPHYSSAWYYLDYW

SEQ ID NO: 12417 - protein, 15 aa, Homo sapiens
CARMDYYSYHGMDVW

SEQ ID NO: 12418 - protein, 22 aa, Homo sapiens
CARDPLPLVWFGDSEGPYFDYW

SEQ ID NO: 12419 - protein, 24 aa, Homo sapiens
CTTVATRIAVAVAATLQHLPFDYW

SEQ ID NO: 12420 - protein, 26 aa, Homo sapiens
CARDQGCSGGRCFWRETDYYYGMDVW

SEQ ID NO: 12421 - protein, 16 aa, Homo sapiens
CAHDYGDYRAPAFDIW

SEQ ID NO: 12422 - protein, 20 aa, Homo sapiens
CARGSHSSSWYGQKKYFDYW

SEQ ID NO: 12423 - protein, 17 aa, Homo sapiens
CAKERGSSRTINWFDPW

SEQ ID NO: 12424 - protein, 19 aa, Homo sapiens
CARASFYHSSIGLGFTDYW

SEQ ID NO: 12425 - protein, 14 aa, Homo sapiens
CARAAQVWLPLDYW

SEQ ID NO: 12426 - protein, 16 aa, Homo sapiens
CARVDTAMVLNYFDYW

SEQ ID NO: 12427 - protein, 19 aa, Homo sapiens
CAHRELQYSYGPWYYFDYW

SEQ ID NO: 12428 - protein, 21 aa, Homo sapiens
CSRGGSDFWSGYYRPNWLDPW

SEQ ID NO: 12429 - protein, 30 aa, Homo sapiens
CALPISAVYYCASPRTHYYDSSGYSGFDYW

SEQ ID NO: 12430 - protein, 20 aa, Homo sapiens
CARVRVSEVRFHYYYGMDVW

SEQ ID NO: 12431 - protein, 21 aa, Homo sapiens
CAKDLDYGDYEGDYYYGMDVW

SEQ ID NO: 12432 - protein, 18 aa, Homo sapiens
CARVILWWLYPPNAFDIW

SEQ ID NO: 12433 - protein, 18 aa, Homo sapiens
CANTVVAAQGGSRAFDIW

SEQ ID NO: 12434 - protein, 21 aa, Homo sapiens
CARFAVVLRFLAYYYYGMDVW

SEQ ID NO: 12435 - protein, 16 aa, Homo sapiens
CASSTNQWEPWWFDPW

SEQ ID NO: 12436 - protein, 22 aa, Homo sapiens
CARALILPDDSNDNYYYGMDVW

SEQ ID NO: 12437 - protein, 22 aa, Homo sapiens
CARGVRMTVVMTLSRHEAFDSW

SEQ ID NO: 12438 - protein, 18 aa, Homo sapiens
CAKNAVAAGTVGWYVDVW

SEQ ID NO: 12439 - protein, 20 aa, Homo sapiens
CARGIYGRQYSSARNWFDPW

SEQ ID NO: 12440 - protein, 18 aa, Homo sapiens
CARGPQPYDFWSGYPDYW

SEQ ID NO: 12441 - protein, 18 aa, Homo sapiens
CARDLRVTEASSGAFDIW

SEQ ID NO: 12442 - protein, 24 aa, Homo sapiens
CARDRGYCTNGVCYTTPAYAFDIW

SEQ ID NO: 12443 - protein, 21 aa, Homo sapiens
CARVVPFYDFWSGTKPWFDPW

SEQ ID NO: 12444 - protein, 18 aa, Homo sapiens
CDSTTCREVYFYYYMDVW

SEQ ID NO: 12445 - protein, 17 aa, Homo sapiens
CATDLWPPRELGGNDYW

SEQ ID NO: 12446 - protein, 21 aa, Homo sapiens
CARERGTLWFGELFTNWFDPW

SEQ ID NO: 12447 - protein, 24 aa, Homo sapiens
CTRNREYTFWSGYTKDYYYAMDVW

SEQ ID NO: 12448 - protein, 20 aa, Homo sapiens
CVKGTGTIIGYGDYSAFDIW

SEQ ID NO: 12449 - protein, 18 aa, Homo sapiens
CAKSGLRWFSDRREIDYW

SEQ ID NO: 12450 - protein, 19 aa, Homo sapiens
CTREAQSSSTYYYYYMDVW

SEQ ID NO: 12451 - protein, 17 aa, Homo sapiens
CVRDRQPDYHYSYMDVW

SEQ ID NO: 12452 - protein, 16 aa, Homo sapiens
CAKDHRAVAGTGFDYW

SEQ ID NO: 12453 - protein, 16 aa, Homo sapiens
CAKGSIAVADDAFDIW

SEQ ID NO: 12454 - protein, 15 aa, Homo sapiens
CVREAYSFPYYMDVW

SEQ ID NO: 12455 - protein, 22 aa, Homo sapiens
CARDLSYDSWSGYGNKNWFDPW

SEQ ID NO: 12456 - protein, 16 aa, Homo sapiens
CAKDYYDSLLHAFDIW

SEQ ID NO: 12457 - protein, 15 aa, Homo sapiens
CAKVSLRAEDGMDVW

SEQ ID NO: 12458 - protein, 17 aa, Homo sapiens
CANLGSGSSSWYYFDYW

SEQ ID NO: 12459 - protein, 16 aa, Homo sapiens
CARAMVSYGLAAFDIW

SEQ ID NO: 12460 - protein, 20 aa, Homo sapiens
CARHPPEDFWSGYYHWFDPW

SEQ ID NO: 12461 - protein, 9 aa, Homo sapiens
CLAGDSDYW

SEQ ID NO: 12462 - protein, 14 aa, Homo sapiens
CSSTSCSPNWFDPW

SEQ ID NO: 12463 - protein, 15 aa, Homo sapiens
CAPRWGTEDDAFDIW

SEQ ID NO: 12464 - protein, 17 aa, Homo sapiens
CAREVRDNWNDGGVDYW

SEQ ID NO: 12465 - protein, 19 aa, Homo sapiens
CARAGYHWSPGAAGLFDFW

SEQ ID NO: 12466 - protein, 24 aa, Homo sapiens
CASEEYCSSTSCYQGDYYYGMDVW

SEQ ID NO: 12467 - protein, 17 aa, Homo sapiens
CARPSHTADPAYAFDIW

SEQ ID NO: 12468 - protein, 17 aa, Homo sapiens
CAKGVNSEAPYRAFEIW

SEQ ID NO: 12469 - protein, 18 aa, Homo sapiens
CATGPLLWRQASNWFDPW

SEQ ID NO: 12470 - protein, 23 aa, Homo sapiens
CARLRLVGYCSSTSCYMYYFDYW

SEQ ID NO: 12471 - protein, 26 aa, Homo sapiens
CARTYYYDSSGYFRGGDYYYYGMDVW

SEQ ID NO: 12472 - protein, 17 aa, Homo sapiens
CSRGRGDGYNYGAVDYW

SEQ ID NO: 12473 - protein, 26 aa, Homo sapiens
CARDRYCSSTSCYMGFLYYYYGMDVW

SEQ ID NO: 12474 - protein, 18 aa, Homo sapiens
CAKRGGEDAYNYGAFDYW

SEQ ID NO: 12475 - protein, 16 aa, Homo sapiens
CAREGTRAAGTPFDAW

SEQ ID NO: 12476 - protein, 22 aa, Homo sapiens
CAKDQTAYDYVWGSYRSPGDYW

SEQ ID NO: 12477 - protein, 14 aa, Homo sapiens
CARVGHMIFVHDYW

SEQ ID NO: 12478 - protein, 12 aa, Homo sapiens
CQQSFSDPLLAF

SEQ ID NO: 12479 - protein, 13 aa, Homo sapiens
CQSADSTIAPMLF

SEQ ID NO: 12480 - protein, 18 aa, Homo sapiens
CARHPDSSGYFRPVVDYW

SEQ ID NO: 12481 - protein, 11 aa, Homo sapiens
CQSADDNGWFF

SEQ ID NO: 12482 - protein, 17 aa, Homo sapiens
CAKAWYQVLTVDAFDIW

SEQ ID NO: 12483 - protein, 19 aa, Homo sapiens
CARLVAEWELPPMGWFDPW

SEQ ID NO: 12484 - protein, 26 aa, Homo sapiens
CALPISAVYYCARPRSGSYFSYFDYW

SEQ ID NO: 12485 - protein, 16 aa, Homo sapiens
CARGFRSSSGYLFDYW

SEQ ID NO: 12486 - protein, 24 aa, Homo sapiens
CAKLSASKGPVDVVSVVWDAFDMW

SEQ ID NO: 12487 - protein, 19 aa, Homo sapiens
CARTSASYYYDTADLFDYW

SEQ ID NO: 12488 - protein, 27 aa, Homo sapiens
CAREPPLIHHYVDYRTTPNYYYYMDVW

SEQ ID NO: 12489 - protein, 11 aa, Homo sapiens
CQHNHNLPPTF

SEQ ID NO: 12490 - protein, 20 aa, Homo sapiens
CARPPPYYYDSSTYAWFDPW

SEQ ID NO: 12491 - protein, 13 aa, Homo sapiens
CALNSYGSFFDYW

SEQ ID NO: 12492 - protein, 17 aa, Homo sapiens
CARGAYGSGNWGYFDYW

SEQ ID NO: 12493 - protein, 17 aa, Homo sapiens
CVRHSYGFDGYYYMDVW

SEQ ID NO: 12494 - protein, 24 aa, Homo sapiens
CTRPPRNYYDSSGYYYEAEYFQHW

SEQ ID NO: 12495 - protein, 22 aa, Homo sapiens
CARDFTVTTSSDGYYYYGMDVW

SEQ ID NO: 12496 - protein, 19 aa, Homo sapiens
CARDRHREQLWLHDAFDIW

SEQ ID NO: 12497 - protein, 20 aa, Homo sapiens
CARRLNTGMINPLFYGFDLW

SEQ ID NO: 12498 - protein, 24 aa, Homo sapiens
CAKNALPDCSSGNCYSRKSGFDSW

SEQ ID NO: 12499 - protein, 18 aa, Homo sapiens
CARDLSYSSSWYRYFDYW

SEQ ID NO: 12500 - protein, 18 aa, Homo sapiens
CAKGSGDGYPISNWFDPW

SEQ ID NO: 12501 - protein, 16 aa, Homo sapiens
CARTRYNWNDGVFDYW

SEQ ID NO: 12502 - protein, 16 aa, Homo sapiens
CARNQWGGKYKPADYW

SEQ ID NO: 12503 - protein, 16 aa, Homo sapiens
CVKDMKWDLLGAFDVW

SEQ ID NO: 12504 - protein, 24 aa, Homo sapiens
CAKAPKGWDDYDFWSGYSYPNDYW

SEQ ID NO: 12505 - protein, 13 aa, Homo sapiens
CGRFYYYYYMEVW

SEQ ID NO: 12506 - protein, 19 aa, Homo sapiens
CAKDHYYYDSSPPIAFDIW

SEQ ID NO: 12507 - protein, 14 aa, Homo sapiens
CARDPVGEQYFDIW

SEQ ID NO: 12508 - protein, 15 aa, Homo sapiens
CARDRLRPGGLFDLW

SEQ ID NO: 12509 - protein, 16 aa, Homo sapiens
CAREGAVGATTGPDYW

SEQ ID NO: 12510 - protein, 22 aa, Homo sapiens
CAREAPTVTTEDDYYYYGMDVW

SEQ ID NO: 12511 - protein, 21 aa, Homo sapiens
CARDLGIVVGATTIPYVFHYW

SEQ ID NO: 12512 - protein, 20 aa, Homo sapiens
CARLNSSSQYYYYYYGMDVW

SEQ ID NO: 12513 - protein, 18 aa, Homo sapiens
CATTTILGVVRVSWFDPW

SEQ ID NO: 12514 - protein, 15 aa, Homo sapiens
CAKEYFDRVTGFDPW

SEQ ID NO: 12515 - protein, 19 aa, Homo sapiens
CARIATFLGSGSYGWFDPW

SEQ ID NO: 12516 - protein, 22 aa, Homo sapiens
CARDRDVLRYFDWLFQGWFDPW

SEQ ID NO: 12517 - protein, 17 aa, Homo sapiens
CARDLYSSGWEYYMDVW

SEQ ID NO: 12518 - protein, 20 aa, Homo sapiens
CARDLSGWYGHYYYYGMDVW

SEQ ID NO: 12519 - protein, 16 aa, Homo sapiens
CAKDRILLWFGAFDYW

SEQ ID NO: 12520 - protein, 17 aa, Homo sapiens
CATEYVLRYFDWLLDYW

SEQ ID NO: 12521 - protein, 18 aa, Homo sapiens
CAKVGSRDYSGRDYFDYW

SEQ ID NO: 12522 - protein, 18 aa, Homo sapiens
CAKEKYGDYALGVSFDIW

SEQ ID NO: 12523 - protein, 19 aa, Homo sapiens
CATAPARIAAAPINWFDPW

SEQ ID NO: 12524 - protein, 15 aa, Homo sapiens
CARMAVGATNHFDYW

SEQ ID NO: 12525 - protein, 16 aa, Homo sapiens
CARVPLGELLYGPDYW

SEQ ID NO: 12526 - protein, 17 aa, Homo sapiens
CANGSPGYGSGTYFDSW

SEQ ID NO: 12527 - protein, 17 aa, Homo sapiens
CAREAGSSWHNNWFDPW

SEQ ID NO: 12528 - protein, 16 aa, Homo sapiens
CANGAYSYGGKAFDMW

SEQ ID NO: 12529 - protein, 21 aa, Homo sapiens
CARHSFRYSSGWYYYYGMDVW

SEQ ID NO: 12530 - protein, 15 aa, Homo sapiens
CTKGSRGDFALFDYW

SEQ ID NO: 12531 - protein, 33 aa, Homo sapiens
CDWSSDVCSSDLDTAVYYCARDSGRPQSDFDYW

SEQ ID NO: 12532 - protein, 15 aa, Homo sapiens
CAKFGVEQQPMGDYW

SEQ ID NO: 12533 - protein, 19 aa, Homo sapiens
CARESHIVVVTAINAFDIW

SEQ ID NO: 12534 - protein, 18 aa, Homo sapiens
CVRVALGGFLEWVPFDYW

SEQ ID NO: 12535 - protein, 14 aa, Homo sapiens
CATAPGSSGWPDYW

SEQ ID NO: 12536 - protein, 21 aa, Homo sapiens
CARDFFYGSGSYYKNDAFDIW

SEQ ID NO: 12537 - protein, 27 aa, Homo sapiens
CAKDGAFYDILTGYLSHYYYYYGMDVW

SEQ ID NO: 12538 - protein, 16 aa, Homo sapiens
CAKYNYDFWSATFDPW

SEQ ID NO: 12539 - protein, 23 aa, Homo sapiens
CARDGGLHYDILTGYYPYYMDVW

SEQ ID NO: 12540 - protein, 15 aa, Homo sapiens
CARDSGIGGYDIDYW

SEQ ID NO: 12541 - protein, 19 aa, Homo sapiens
CARDRRGRVGWYGPHFDYW

SEQ ID NO: 12542 - protein, 19 aa, Homo sapiens
CASCPHPLYGSPDWYFDLW

SEQ ID NO: 12543 - protein, 18 aa, Homo sapiens
CTKASHYDFWGGSAMDVW

SEQ ID NO: 12544 - protein, 16 aa, Homo sapiens
CTTSREYTVRSPFDYW

SEQ ID NO: 12545 - protein, 23 aa, Homo sapiens
CARESAAPLSYDSSGYYHYFDYW

SEQ ID NO: 12546 - protein, 15 aa, Homo sapiens
CAKMLDGLTGTEDYW

SEQ ID NO: 12547 - protein, 16 aa, Homo sapiens
CARPSSGSYKGVVDYW

SEQ ID NO: 12548 - protein, 19 aa, Homo sapiens
CARVYCSSTSCYKKPIDYW

SEQ ID NO: 12549 - protein, 21 aa, Homo sapiens
CATRRYGDYEVLDYYYYMDVW

SEQ ID NO: 12550 - protein, 17 aa, Homo sapiens
CAHRPMPYGDYNWFDPW

SEQ ID NO: 12551 - protein, 12 aa, Homo sapiens
CAKIAAAGTDYW

SEQ ID NO: 12552 - protein, 14 aa, Homo sapiens
CARDPLGGWFGDYW

SEQ ID NO: 12553 - protein, 29 aa, Homo sapiens
CARVRVPDSNDGFWSGYYKYYYYYYMDVW

SEQ ID NO: 12554 - protein, 26 aa, Homo sapiens
CARVPRDYYDSSGYYFFGGLAGLDYW

SEQ ID NO: 12555 - protein, 21 aa, Homo sapiens
CARVPKDGSYDYVWGSYLDYW

SEQ ID NO: 12556 - protein, 28 aa, Homo sapiens
CAKDARYYDFWSGYFEPHYYYYYGMDVW

SEQ ID NO: 12557 - protein, 17 aa, Homo sapiens
CAKDPGYSYGYGGFDYW

SEQ ID NO: 12558 - protein, 18 aa, Homo sapiens
CAINTKRGYSGYDLGDYW

SEQ ID NO: 12559 - protein, 22 aa, Homo sapiens
CARDWRVMPHMTSVTTEAFDIW

SEQ ID NO: 12560 - protein, 26 aa, Homo sapiens
CARANTKDYDILTGYNIGRDDAFDIW

SEQ ID NO: 12561 - protein, 19 aa, Homo sapiens
CATKPPEYDGTGYYYVSYW

SEQ ID NO: 12562 - protein, 20 aa, Homo sapiens
CAKALGYYYDSSGYSPFDYW

SEQ ID NO: 12563 - protein, 22 aa, Homo sapiens
CATLPIAAAGNGFYYYYYMDVW

SEQ ID NO: 12564 - protein, 16 aa, Homo sapiens
CARGMFVDMTSVFDYW

SEQ ID NO: 12565 - protein, 17 aa, Homo sapiens
CARYYGENAGTGWFDPW

SEQ ID NO: 12566 - protein, 14 aa, Homo sapiens
CARGDAQQVANDYW

SEQ ID NO: 12567 - protein, 19 aa, Homo sapiens
CARGRYSSSWPQEWYFDLW

SEQ ID NO: 12568 - protein, 14 aa, Homo sapiens
CQQYNSYSPVPYTF

SEQ ID NO: 12569 - protein, 14 aa, Homo sapiens
CQVWESSTDRNVVF

SEQ ID NO: 12570 - protein, 14 aa, Homo sapiens
CAREMFRRSAFDYW

SEQ ID NO: 12571 - protein, 29 aa, Homo sapiens
CARGINTFDDYVWGSYRYTLTERYTYDYW

SEQ ID NO: 12572 - protein, 21 aa, Homo sapiens
CASSPPRCTGGVCYFGGFDYW

SEQ ID NO: 12573 - protein, 16 aa, Homo sapiens
CATAWENGYNPASDYW

SEQ ID NO: 12574 - protein, 17 aa, Homo sapiens
CAKGAQGYFWSGYWDVW

SEQ ID NO: 12575 - protein, 21 aa, Homo sapiens
CARLPSHTLNYDSSGLGFDYW

SEQ ID NO: 12576 - protein, 24 aa, Homo sapiens
CTTVATRIGVVEVATFQRLPFDYW

SEQ ID NO: 12577 - protein, 17 aa, Homo sapiens
CARLALCGGDCHYFDYW

SEQ ID NO: 12578 - protein, 20 aa, Homo sapiens
CARSDDSSEPFYYYYYMDVW

SEQ ID NO: 12579 - protein, 18 aa, Homo sapiens
CAKVDISRTGGSGSSDYW

SEQ ID NO: 12580 - protein, 23 aa, Homo sapiens
CTRRSYYYDSSGYYVYGHTFDYW

SEQ ID NO: 12581 - protein, 20 aa, Homo sapiens
CARGENDYHTSSFLQYFDYW

SEQ ID NO: 12582 - protein, 21 aa, Homo sapiens
CVRDMFYYDYTGSLSHAFDIW

SEQ ID NO: 12583 - protein, 23 aa, Homo sapiens
CASNRSPYYYDSSGYYFSTFDYW

SEQ ID NO: 12584 - protein, 15 aa, Homo sapiens
CAREGNGGSYSIDYW

SEQ ID NO: 12585 - protein, 18 aa, Homo sapiens
CASNWGGGSYPVEAFDIW

SEQ ID NO: 12586 - protein, 13 aa, Homo sapiens
CAHTLQWLGFDIW

SEQ ID NO: 12587 - protein, 27 aa, Homo sapiens
CARIRLRGYDYVWGSYLSDSFDAFDIW

SEQ ID NO: 12588 - protein, 18 aa, Homo sapiens
CAHRRHLYYYDSSPFDYW

SEQ ID NO: 12589 - protein, 19 aa, Homo sapiens
CARVPVSGGWSPFYHFDYW

SEQ ID NO: 12590 - protein, 12 aa, Homo sapiens
CARHSGYSYFYW

SEQ ID NO: 12591 - protein, 19 aa, Homo sapiens
CARVISGSYYAPDDAFDIW

SEQ ID NO: 12592 - protein, 13 aa, Homo sapiens
CAREVVNEGNDYW

SEQ ID NO: 12593 - protein, 22 aa, Homo sapiens
CASQPVLRYFDWLASHQGFDYW

SEQ ID NO: 12594 - protein, 30 aa, Homo sapiens
CARDGVYYDILTGYYPTGRQYYYYYYMDVW

SEQ ID NO: 12595 - protein, 15 aa, Homo sapiens
CANVPPLTTYYFDYW

SEQ ID NO: 12596 - protein, 16 aa, Homo sapiens
CAYCDGLYGSGSVDYW

SEQ ID NO: 12597 - protein, 21 aa, Homo sapiens
CTTVGEYDSSGYYVLEAFDIW

SEQ ID NO: 12598 - protein, 17 aa, Homo sapiens
CAKDFRNSGYDPRFDYW

SEQ ID NO: 12599 - protein, 23 aa, Homo sapiens
CATLYSDSGSYDSYYYYYGMDVW

SEQ ID NO: 12600 - protein, 18 aa, Homo sapiens
CAKDTRGDGDYESAFDIW

SEQ ID NO: 12601 - protein, 30 aa, Homo sapiens
CARSALYYGDYLLGGYYDSSGSFADAFDIW

SEQ ID NO: 12602 - protein, 13 aa, Homo sapiens
CANMMDGGNNDYW

SEQ ID NO: 12603 - protein, 16 aa, Homo sapiens
CARDTMSESLDALDIW

SEQ ID NO: 12604 - protein, 20 aa, Homo sapiens
CAHRLASGFFGVVEYYFDYW

SEQ ID NO: 12605 - protein, 25 aa, Homo sapiens
CARGGWEMATISRSPEPKGYYFDYW

SEQ ID NO: 12606 - protein, 14 aa, Homo sapiens
CAIYGDYDDAFDIW

SEQ ID NO: 12607 - protein, 18 aa, Homo sapiens
CVKDTQYSYGFGTAFDNW

SEQ ID NO: 12608 - protein, 14 aa, Homo sapiens
CARSPLWDYYFDYW

SEQ ID NO: 12609 - protein, 19 aa, Homo sapiens
CATGPALGSGYLYNWFDPW

SEQ ID NO: 12610 - protein, 12 aa, Homo sapiens
CQSPESSGIWVF

SEQ ID NO: 12611 - protein, 17 aa, Homo sapiens
CAKGPNIVVVPTAFDYW

SEQ ID NO: 12612 - protein, 22 aa, Homo sapiens
CARIGFDFSSGYSDHYYYMDVW

SEQ ID NO: 12613 - protein, 19 aa, Homo sapiens
CAKHPGGYGDYLAYYFDYW

SEQ ID NO: 12614 - protein, 19 aa, Homo sapiens
CAKVPDQNDYGDQNAFDIW

SEQ ID NO: 12615 - protein, 18 aa, Homo sapiens
CAREWDSSGWGSSYFDYW

SEQ ID NO: 12616 - protein, 15 aa, Homo sapiens
CAKHGIWESYRFDFW

SEQ ID NO: 12617 - protein, 17 aa, Homo sapiens
CASGPDYYDSSGPFDYW

SEQ ID NO: 12618 - protein, 17 aa, Homo sapiens
CAKDSSGLHKSYYFDYW

SEQ ID NO: 12619 - protein, 20 aa, Homo sapiens
CARDIPVVVITTEDDAFDIW

SEQ ID NO: 12620 - protein, 23 aa, Homo sapiens
CAHSQTLLWFGELPLVEDYFDYW

SEQ ID NO: 12621 - protein, 17 aa, Homo sapiens
CARHGDFWSGMNWFDPW

SEQ ID NO: 12622 - protein, 19 aa, Homo sapiens
CARCATNYDFLTGGPFDHW

SEQ ID NO: 12623 - protein, 13 aa, Homo sapiens
CAHRHRIGCLDYW

SEQ ID NO: 12624 - protein, 14 aa, Homo sapiens
CARGDGYYSPFDYW

SEQ ID NO: 12625 - protein, 11 aa, Homo sapiens
CAMIDGPFDPW

SEQ ID NO: 12626 - protein, 20 aa, Homo sapiens
CVREPEYNYDDSAIAGFDPW

SEQ ID NO: 12627 - protein, 21 aa, Homo sapiens
CATGASLRYFDWLLPYYFDYW

SEQ ID NO: 12628 - protein, 18 aa, Homo sapiens
CARDQGGYSYGYVPSDYW

SEQ ID NO: 12629 - protein, 14 aa, Homo sapiens
CARVNNGGYYFDYW

SEQ ID NO: 12630 - protein, 25 aa, Homo sapiens
CARDKPKDPLAVALGGYYYYGMDVW

SEQ ID NO: 12631 - protein, 11 aa, Homo sapiens
CQQYHNWVFTF

SEQ ID NO: 12632 - protein, 13 aa, Homo sapiens
CAKIQAGTKGDYW

SEQ ID NO: 12633 - protein, 23 aa, Homo sapiens
CASLGSSGDYYDSSGYGLSFDYW

SEQ ID NO: 12634 - protein, 18 aa, Homo sapiens
CAKDPLNDYGDYGAFDIW

SEQ ID NO: 12635 - protein, 24 aa, Homo sapiens
CARGRYSSSWYYLGELEGSDCDYW

SEQ ID NO: 12636 - protein, 18 aa, Homo sapiens
CAKDRSHYYYDSSGFDYW

SEQ ID NO: 12637 - protein, 15 aa, Homo sapiens
CQSCDGSLSGSHVIF

SEQ ID NO: 12638 - protein, 19 aa, Homo sapiens
CARGHPQIADRSNDAFDIW

SEQ ID NO: 12639 - protein, 24 aa, Homo sapiens
CARSPEYYDFWNGYYKGNDAFDIW

SEQ ID NO: 12640 - protein, 13 aa, Homo sapiens
CARDTARGDFDHW

SEQ ID NO: 12641 - protein, 14 aa, Homo sapiens
CATWDSSLSVGHSF

SEQ ID NO: 12642 - protein, 15 aa, Homo sapiens
CAHLEMTTPNYFDFW

SEQ ID NO: 12643 - protein, 19 aa, Homo sapiens
CAKSTSRSGYYKIAAFDYW

SEQ ID NO: 12644 - protein, 16 aa, Homo sapiens
CVTSPEWLRLRYFDYW

SEQ ID NO: 12645 - protein, 18 aa, Homo sapiens
CARDYDTSRSPECDLDYW

SEQ ID NO: 12646 - protein, 17 aa, Homo sapiens
CARDAYSSSSGAGFDPW

SEQ ID NO: 12647 - protein, 21 aa, Homo sapiens
CATDIIMYYDSSGYYLPFRYW

SEQ ID NO: 12648 - protein, 16 aa, Homo sapiens
CARDGSIAVRKTFDYW

SEQ ID NO: 12649 - protein, 18 aa, Homo sapiens
CARFPMQWELIAWYFDLW

SEQ ID NO: 12650 - protein, 20 aa, Homo sapiens
CATTTPHDYGDYGAGWFDPW

SEQ ID NO: 12651 - protein, 17 aa, Homo sapiens
CARAFWSGYQYTQFDPW

SEQ ID NO: 12652 - protein, 16 aa, Homo sapiens
CARVLSKVVGPAFDIW

SEQ ID NO: 12653 - protein, 18 aa, Homo sapiens
CARQIFGVVTPVYYFDYW

SEQ ID NO: 12654 - protein, 23 aa, Homo sapiens
CATSLTIFGVVKDYYYYYGMDVW

SEQ ID NO: 12655 - protein, 25 aa, Homo sapiens
CARGPSGSGYSGYDIDYYYYGMDVW

SEQ ID NO: 12656 - protein, 15 aa, Homo sapiens
CQSYDTSSLGASRVF

SEQ ID NO: 12657 - protein, 19 aa, Homo sapiens
CARHGFWSGLTSLDAFDIW

SEQ ID NO: 12658 - protein, 18 aa, Homo sapiens
CARDNVRGQWLFLPGDYW

SEQ ID NO: 12659 - protein, 20 aa, Homo sapiens
CAREYPYDSSGYPVVWFDPW

SEQ ID NO: 12660 - protein, 16 aa, Homo sapiens
CARISGDYGDYVFDYW

SEQ ID NO: 12661 - protein, 22 aa, Homo sapiens
CARHDLYYYDDNGYYSGAFDIW

SEQ ID NO: 12662 - protein, 18 aa, Homo sapiens
CATYYDFWSGGGHAFDIW

SEQ ID NO: 12663 - protein, 15 aa, Homo sapiens
CARHPFAPANWFDPW

SEQ ID NO: 12664 - protein, 18 aa, Homo sapiens
CARERAPDSSGYYAFDIW

SEQ ID NO: 12665 - protein, 21 aa, Homo sapiens
CARGGWSAAAGTYQLGWFDPW

SEQ ID NO: 12666 - protein, 21 aa, Homo sapiens
CASAGRGIAMVPAAIGAFDIW

SEQ ID NO: 12667 - protein, 18 aa, Homo sapiens
CARGIAYCGGDCYSIDYW

SEQ ID NO: 12668 - protein, 19 aa, Homo sapiens
CSSRRHLDERWLQTAFDFW

SEQ ID NO: 12669 - protein, 23 aa, Homo sapiens
CAREPHLGYSTPVYYYYYGMDVW

SEQ ID NO: 12670 - protein, 16 aa, Homo sapiens
CGRHTVGFERDAIDLW

SEQ ID NO: 12671 - protein, 17 aa, Homo sapiens
CAKDMGPAGYRNPFDYW

SEQ ID NO: 12672 - protein, 29 aa, Homo sapiens
CALPISAVYYCAKQGGYFALERYSYMDVW

SEQ ID NO: 12673 - protein, 20 aa, Homo sapiens
CARESPTWGDSTGYSHFDYW

SEQ ID NO: 12674 - protein, 26 aa, Homo sapiens
CAREARYFDWLFGDLGPSSGAHIDYW

SEQ ID NO: 12675 - protein, 19 aa, Homo sapiens
CARVARLNSGWSIGAFDIW

SEQ ID NO: 12676 - protein, 27 aa, Homo sapiens
CARDMSNPVVRYCSGGSCPYYYGMDVW

SEQ ID NO: 12677 - protein, 27 aa, Homo sapiens
CAKFPGTYYDFWSGSQPVPTLYYMDVW

SEQ ID NO: 12678 - protein, 25 aa, Homo sapiens
CANGGLEYYDFWSASSAGSPFFDYW

SEQ ID NO: 12679 - protein, 21 aa, Homo sapiens
CARPGTKDYCGGDCSDYFDYW

SEQ ID NO: 12680 - protein, 17 aa, Homo sapiens
CAKEGDYNYGYLAFEIW

SEQ ID NO: 12681 - protein, 19 aa, Homo sapiens
CAREPLGYENSGYPYFDLW

SEQ ID NO: 12682 - protein, 17 aa, Homo sapiens
CAKGDIAVAGGSFSDYW

SEQ ID NO: 12683 - protein, 16 aa, Homo sapiens
CAHRRSGWSAEYFQHW

SEQ ID NO: 12684 - protein, 18 aa, Homo sapiens
CAYGGNVWVAEKGPVDYW

SEQ ID NO: 12685 - protein, 26 aa, Homo sapiens
CARQRRAGWNPVHIVVVTAITHFDYW

SEQ ID NO: 12686 - protein, 14 aa, Homo sapiens
CATWDDSLTGCWLF

SEQ ID NO: 12687 - protein, 15 aa, Homo sapiens
CAKARWYVYYYMDVW

SEQ ID NO: 12688 - protein, 15 aa, Homo sapiens
CAKLLEREHSSFDYW

SEQ ID NO: 12689 - protein, 15 aa, Homo sapiens
CAKLDSGYDSPLDYW

SEQ ID NO: 12690 - protein, 22 aa, Homo sapiens
CARDFVLSRGWYEEAEGYFDYW

SEQ ID NO: 12691 - protein, 14 aa, Homo sapiens
CQSYDNSFGGHFVF

SEQ ID NO: 12692 - protein, 19 aa, Homo sapiens
CARDLPPGSSWYRDWFDPW

SEQ ID NO: 12693 - protein, 17 aa, Homo sapiens
CAYDSSGLLLGYAFDIW

SEQ ID NO: 12694 - protein, 16 aa, Homo sapiens
CAHRLRYDYGSYFDYW

SEQ ID NO: 12695 - protein, 16 aa, Homo sapiens
CAKDRDAYGLLGFDYW

SEQ ID NO: 12696 - protein, 15 aa, Homo sapiens
CTIGLLDTSSKVDYW

SEQ ID NO: 12697 - protein, 19 aa, Homo sapiens
CAVLGEGGYDWIPGYFDYW

SEQ ID NO: 12698 - protein, 18 aa, Homo sapiens
CAKGSFVTMIVVGDFDYW

SEQ ID NO: 12699 - protein, 18 aa, Homo sapiens
CAKDMASSWYGGVNLDYW

SEQ ID NO: 12700 - protein, 20 aa, Homo sapiens
CARGPYSSSWYGVRLHFDYW

SEQ ID NO: 12701 - protein, 14 aa, Homo sapiens
CAKAPVAGSPADYW

SEQ ID NO: 12702 - protein, 17 aa, Homo sapiens
CARSSYFDWLSNPFDYW

SEQ ID NO: 12703 - protein, 18 aa, Homo sapiens
CARHRDSSSLIRGAHDYW

SEQ ID NO: 12704 - protein, 18 aa, Homo sapiens
CARVGFEQYQLLWDFDYW

SEQ ID NO: 12705 - protein, 18 aa, Homo sapiens
CAKDTNRGLSTTNSFDYW

SEQ ID NO: 12706 - protein, 22 aa, Homo sapiens
CARVSLLRYFDWPLRYYYMDVW

SEQ ID NO: 12707 - protein, 17 aa, Homo sapiens
CARAPGGNYGDDAFDIW

SEQ ID NO: 12708 - protein, 20 aa, Homo sapiens
CANHYYDNSDYYFHDAFDIW

SEQ ID NO: 12709 - protein, 11 aa, Homo sapiens
CAAQAILGDYW

SEQ ID NO: 12710 - protein, 21 aa, Homo sapiens
CVTLGGWMATSHYYYYGMDVW

SEQ ID NO: 12711 - protein, 19 aa, Homo sapiens
CARGHGDPVLKALDYCDYW

SEQ ID NO: 12712 - protein, 20 aa, Homo sapiens
CARESVVDTAMVLTHAFDIW

SEQ ID NO: 12713 - protein, 19 aa, Homo sapiens
CVREADCTRTSCPKHFDKW

SEQ ID NO: 12714 - protein, 23 aa, Homo sapiens
CARDWGPYDSSGYFWASGAFDIW

SEQ ID NO: 12715 - protein, 15 aa, Homo sapiens
CARSVVGSSLLVDYW

SEQ ID NO: 12716 - protein, 13 aa, Homo sapiens
CARLTIFGVPDYW

SEQ ID NO: 12717 - protein, 15 aa, Homo sapiens
CATLGGYEGVGVDYW

SEQ ID NO: 12718 - protein, 17 aa, Homo sapiens
CARYEGGYSYDNAFDIW

SEQ ID NO: 12719 - protein, 20 aa, Homo sapiens
CARDTMVTFLYYYYYGMDVW

SEQ ID NO: 12720 - protein, 22 aa, Homo sapiens
CARDGKYYYDSSGYYQSVPDYW

SEQ ID NO: 12721 - protein, 15 aa, Homo sapiens
CARLYDSSGYLADYW

SEQ ID NO: 12722 - protein, 14 aa, Homo sapiens
CASYGDYEAYFDYW

SEQ ID NO: 12723 - protein, 15 aa, Homo sapiens
CASAGYSSSRWFDPW

SEQ ID NO: 12724 - protein, 19 aa, Homo sapiens
CARDWPHDFDWFYDAFDIW

SEQ ID NO: 12725 - protein, 24 aa, Homo sapiens
CARLPTLRITIFGVVGNEYYFDYW

SEQ ID NO: 12726 - protein, 22 aa, Homo sapiens
CARDQWPARRTSYYYYYYMDVW

SEQ ID NO: 12727 - protein, 19 aa, Homo sapiens
CTTKAPHYDISGLDAFDIW

SEQ ID NO: 12728 - protein, 16 aa, Homo sapiens
CASEVIAVAAPSVDYW

SEQ ID NO: 12729 - protein, 17 aa, Homo sapiens
CARPRGYYYYSDAFDIW

SEQ ID NO: 12730 - protein, 16 aa, Homo sapiens
CANSWGVTTASYFQHW

SEQ ID NO: 12731 - protein, 23 aa, Homo sapiens
CARDTLGTAMVTTQGSYNWFDPW

SEQ ID NO: 12732 - protein, 17 aa, Homo sapiens
CARESSSWLAENWFDPW

SEQ ID NO: 12733 - protein, 22 aa, Homo sapiens
CAKDLTLGYCSGGSCPGAFDIW

SEQ ID NO: 12734 - protein, 15 aa, Homo sapiens
CTRAGQQQLVLTDYW

SEQ ID NO: 12735 - protein, 12 aa, Homo sapiens
CTTITIFGFDYW

SEQ ID NO: 12736 - protein, 17 aa, Homo sapiens
CARHRVSVWNDRWFDPW

SEQ ID NO: 12737 - protein, 16 aa, Homo sapiens
CAKHSTTEVYDVFDIW

SEQ ID NO: 12738 - protein, 19 aa, Homo sapiens
CARGLGYSSSWLHPQVDYW

SEQ ID NO: 12739 - protein, 20 aa, Homo sapiens
CARALLVATIEDYYYYTDVW

SEQ ID NO: 12740 - protein, 18 aa, Homo sapiens
CAKDIGTGYSRYYGMDVW

SEQ ID NO: 12741 - protein, 19 aa, Homo sapiens
CAKDTDFWSGYYPSWFDPW

SEQ ID NO: 12742 - protein, 20 aa, Homo sapiens
CVRENEDYYKKGAGNWFDPW

SEQ ID NO: 12743 - protein, 12 aa, Homo sapiens [sequence omitted]

SEQ ID NO: 12744 - protein, 17 aa, Homo sapiens
CARDNPGAMALDAFDIW

SEQ ID NO: 12745 - protein, 18 aa, Homo sapiens
CAKDPPIWCSGGSCVDYW

SEQ ID NO: 12746 - protein, 22 aa, Homo sapiens
CARDGEHIVVVTALHDDAFDIW

SEQ ID NO: 12747 - protein, 21 aa, Homo sapiens
CARGSSMIVVVTKIRDAFDIW

SEQ ID NO: 12748 - protein, 23 aa, Homo sapiens
CAKVVGVMITFGGVIVPLHFDYW

SEQ ID NO: 12749 - protein, 16 aa, Homo sapiens
CARYVNYGDFNWFDPW

SEQ ID NO: 12750 - protein, 21 aa, Homo sapiens
CATDTYCSSTSSYTSHYFDYW

SEQ ID NO: 12751 - protein, 24 aa, Homo sapiens
CARDSPARYCSSTSCYTNNWFDPW

SEQ ID NO: 12752 - protein, 18 aa, Homo sapiens
CARGDSSSWYVLGAFDYW

SEQ ID NO: 12753 - protein, 15 aa, Homo sapiens
CARTRLGGSYYFDSW

SEQ ID NO: 12754 - protein, 20 aa, Homo sapiens
CATSYYYDSSGYRTGIFDYW

SEQ ID NO: 12755 - protein, 16 aa, Homo sapiens
CAKDMSPATHGHCDYW

SEQ ID NO: 12756 - protein, 25 aa, Homo sapiens
CARDRYYDFWSAFGDLYYYYGMDVW

SEQ ID NO: 12757 - protein, 20 aa, Homo sapiens
CARGPPFARSLFYYYYLDVW

SEQ ID NO: 12758 - protein, 22 aa, Homo sapiens
CARANVLRYFDWLLEPGSFDPW

SEQ ID NO: 12759 - protein, 20 aa, Homo sapiens
CARFTKEDYYNPRGYYYDYW

SEQ ID NO: 12760 - protein, 36 aa, Homo sapiens
CALPILHMDSLRPEDTAMYYCARETIVVDDSRFDYW

SEQ ID NO: 12761 - protein, 23 aa, Homo sapiens
CARHPYCVSSFCPAVPNNWFDPW

SEQ ID NO: 12762 - protein, 15 aa, Homo sapiens
CAKDINPASGYADYW

SEQ ID NO: 12763 - protein, 21 aa, Homo sapiens
CARHVVEVVVVVITKIWFDPW

SEQ ID NO: 12764 - protein, 16 aa, Homo sapiens
CAREQLWETGGGFDYW

SEQ ID NO: 12765 - protein, 20 aa, Homo sapiens
CAADWGYSYGRDYYYYMDVW

SEQ ID NO: 12766 - protein, 24 aa, Homo sapiens
CARTSRDGYNWVKKSLFGHAFDIW

SEQ ID NO: 12767 - protein, 16 aa, Homo sapiens
CARIVIAVAGSPFDYW

SEQ ID NO: 12768 - protein, 14 aa, Homo sapiens
CARVVGFSGGWDYW

SEQ ID NO: 12769 - protein, 19 aa, Homo sapiens
CATLFGRSGWELLGVLDYW

SEQ ID NO: 12770 - protein, 17 aa, Homo sapiens
CATDSYYLISRGRVDYW

SEQ ID NO: 12771 - protein, 16 aa, Homo sapiens
CAKAQEGSSWSEIDYW

SEQ ID NO: 12772 - protein, 20 aa, Homo sapiens
CAKDNGNYYGSGNLHAFDIW

SEQ ID NO: 12773 - protein, 17 aa, Homo sapiens
CAQGQGDGDYYYGMDVW

SEQ ID NO: 12774 - protein, 23 aa, Homo sapiens
CATGGEYSSSWYVGYYYYYMDVW

SEQ ID NO: 12775 - protein, 18 aa, Homo sapiens
CARAMGDDSSYGNWLDPW

SEQ ID NO: 12776 - protein, 17 aa, Homo sapiens
CASSPPSYGDYVSFDYW

SEQ ID NO: 12777 - protein, 18 aa, Homo sapiens
CAKALDVVGGKTTGFDYW

SEQ ID NO: 12778 - protein, 22 aa, Homo sapiens
CARGKGVAAAGTGVYYYGMDVW

SEQ ID NO: 12779 - protein, 23 aa, Homo sapiens
CAKGLVVVRAKSFLGGNDAFDIW

SEQ ID NO: 12780 - protein, 22 aa, Homo sapiens
CATEGIAAPGGQLVDKYAFDMW

SEQ ID NO: 12781 - protein, 12 aa, Homo sapiens
CQQSYTTFGGSF

SEQ ID NO: 12782 - protein, 20 aa, Homo sapiens
CARVPGSPHSGYDSSPFDYW

SEQ ID NO: 12783 - protein, 23 aa, Homo sapiens
CAVSGSFHTGLFPTEYYYAMDVW

SEQ ID NO: 12784 - protein, 16 aa, Homo sapiens
CAKLAGAAAEEGSDYW

SEQ ID NO: 12785 - protein, 15 aa, Homo sapiens
CARRGLHNWNDFDYW

SEQ ID NO: 12786 - protein, 17 aa, Homo sapiens
CTSSSCRRAPRTPFDSW

SEQ ID NO: 12787 - protein, 18 aa, Homo sapiens
CARIGHNSGWDTEYFQHW

SEQ ID NO: 12788 - protein, 19 aa, Homo sapiens
CARAPDSPHNNFWFYFDFW

SEQ ID NO: 12789 - protein, 18 aa, Homo sapiens
CARTYAAAGPVAVGFDPW

SEQ ID NO: 12790 - protein, 21 aa, Homo sapiens
CAKVVTPIVLVVYAIPHFDYW

SEQ ID NO: 12791 - protein, 14 aa, Homo sapiens
CQSADSSGGYHYIF

SEQ ID NO: 12792 - protein, 16 aa, Homo sapiens
CTRDYYDNSGYYIGYW

SEQ ID NO: 12793 - protein, 20 aa, Homo sapiens
CARDKVYHNYDLYYYGMDVW

SEQ ID NO: 12794 - protein, 19 aa, Homo sapiens
CARFWWERSTWRNWYFDLW

SEQ ID NO: 12795 - protein, 14 aa, Homo sapiens
CARPFDNFGSNDYW

SEQ ID NO: 12796 - protein, 19 aa, Homo sapiens
CARALYYHSTGYHDAFDVW

SEQ ID NO: 12797 - protein, 21 aa, Homo sapiens
CAKLSEDHYYDSSGYYARDYW

SEQ ID NO: 12798 - protein, 18 aa, Homo sapiens
CARDYYDSSGYNDAFDIW

SEQ ID NO: 12799 - protein, 17 aa, Homo sapiens
CTKGSNSYYDISGPDYW

SEQ ID NO: 12800 - protein, 19 aa, Homo sapiens
CARHLRYYDNIRYNYIDFW

SEQ ID NO: 12801 - protein, 20 aa, Homo sapiens
CARAEGRPRYSYGYGYIDYW

SEQ ID NO: 12802 - protein, 18 aa, Homo sapiens
CAKAPPHYDLPHDAFDIW

SEQ ID NO: 12803 - protein, 26 aa, Homo sapiens
CARARPPATFYSSGHYYYYYYGMDVW

SEQ ID NO: 12804 - protein, 15 aa, Homo sapiens
CAHRRGWLTPLFDPW

SEQ ID NO: 12805 - protein, 22 aa, Homo sapiens
CATDRRHRKYNWNVAVFWFDPW

SEQ ID NO: 12806 - protein, 22 aa, Homo sapiens
CARAIPPFMIVVVITHPDFDYW

SEQ ID NO: 12807 - protein, 14 aa, Homo sapiens
CTTDPYSGQDFDYW

SEQ ID NO: 12808 - protein, 20 aa, Homo sapiens
CARDPTSADSSGWSGYFDYW

SEQ ID NO: 12809 - protein, 23 aa, Homo sapiens
CASSLGAYGSGSYDWGLDAFDIW

SEQ ID NO: 12810 - protein, 19 aa, Homo sapiens
CTARLIDHGGNNLRTLDYW

SEQ ID NO: 12811 - protein, 21 aa, Homo sapiens
CARDGEDSSSWPTYYYYMDVW

SEQ ID NO: 12812 - protein, 26 aa, Homo sapiens
CARGGDGSGSYYSDYGIITEHYFDYW

SEQ ID NO: 12813 - protein, 17 aa, Homo sapiens
CAKSTRELDYGDSFDYW

SEQ ID NO: 12814 - protein, 25 aa, Homo sapiens
CAKTLLLRYFDWLFEAGRSYYFDYW

SEQ ID NO: 12815 - protein, 23 aa, Homo sapiens
CARDLDTYYSDASVYYPDSFHIW

SEQ ID NO: 12816 - protein, 17 aa, Homo sapiens
CAHRTLIVGATSGFDYW

SEQ ID NO: 12817 - protein, 19 aa, Homo sapiens
CARDPTKRRYGGNGYFDYW

SEQ ID NO: 12818 - protein, 20 aa, Homo sapiens
CARSTRDYYDSSGYYYIDYW

SEQ ID NO: 12819 - protein, 16 aa, Homo sapiens
CARAGGVIVADAFDIW

SEQ ID NO: 12820 - protein, 20 aa, Homo sapiens
CAREFMTVVVDMPYYYMDVW

SEQ ID NO: 12821 - protein, 23 aa, Homo sapiens
CARDSRHIPLFGPADTAMPRDYW

SEQ ID NO: 12822 - protein, 22 aa, Homo sapiens
CARSPCYYDSRGYKRLDAFDLW

SEQ ID NO: 12823 - protein, 17 aa, Homo sapiens
CTKGPFDYGDPYYFDFW

SEQ ID NO: 12824 - protein, 16 aa, Homo sapiens
CATSQLWFRLNWFDPW

SEQ ID NO: 12825 - protein, 18 aa, Homo sapiens
CALARSDYYDSSGAFDYW

SEQ ID NO: 12826 - protein, 15 aa, Homo sapiens
CAKGIGYDPWGIDYW

SEQ ID NO: 12827 - protein, 19 aa, Homo sapiens
CAKSADHIVVVPAATLDYW

SEQ ID NO: 12828 - protein, 18 aa, Homo sapiens
CARADMAALVPYYYMDVW

SEQ ID NO: 12829 - protein, 20 aa, Homo sapiens
CAREYVRGYSYGILRYFDYW

SEQ ID NO: 12830 - protein, 19 aa, Homo sapiens
CARADDYGDYVLPGYFDYW

SEQ ID NO: 12831 - protein, 17 aa, Homo sapiens
CARQNDYDDYDGAFDIW

SEQ ID NO: 12832 - protein, 24 aa, Homo sapiens
CARQRTSGVSIFGVVTLEGWFDPW

SEQ ID NO: 12833 - protein, 17 aa, Homo sapiens
CAKPDLGGWHGDAFDIW

SEQ ID NO: 12834 - protein, 17 aa, Homo sapiens
CAKDISDDFWSGSFDYW

SEQ ID NO: 12835 - protein, 14 aa, Homo sapiens
CARGAVARQPFDYW

SEQ ID NO: 12836 - protein, 21 aa, Homo sapiens
CATGSPIQLWEYYYYYYMDVW

SEQ ID NO: 12837 - protein, 13 aa, Homo sapiens
CARESWGRDFDPW

SEQ ID NO: 12838 - protein, 27 aa, Homo sapiens
CAKEAAALYYYDSSGYYGTDYNWFDPW

SEQ ID NO: 12839 - protein, 23 aa, Homo sapiens
CARGPPWYTTDRGGELRGYFVFW

SEQ ID NO: 12840 - protein, 18 aa, Homo sapiens
CAKDTEAVAGSDDAFDIW

SEQ ID NO: 12841 - protein, 22 aa, Homo sapiens
CTRDGRQYSDSSGYLNYAFDIW

SEQ ID NO: 12842 - protein, 24 aa, Homo sapiens
CTTDQSPYDYVWGSYRPLDAFDIW

SEQ ID NO: 12843 - protein, 16 aa, Homo sapiens
CARDSHYGSGRYFDSW

SEQ ID NO: 12844 - protein, 21 aa, Homo sapiens
CATKMGTYYYDSSGYYSLDYW

SEQ ID NO: 12845 - protein, 21 aa, Homo sapiens
CARGRYSSSWYSPAVNWFDPW

SEQ ID NO: 12846 - protein, 22 aa, Homo sapiens
CAHITIGYITMVRGGAPTFDYW

SEQ ID NO: 12847 - protein, 23 aa, Homo sapiens
CARVMYYDFWSGYYSSEDGMDVW

SEQ ID NO: 12848 - protein, 20 aa, Homo sapiens
CARSPPTALYSSSWFHFDYW

SEQ ID NO: 12849 - protein, 18 aa, Homo sapiens
CARLPSTISPTDNWFDPW

SEQ ID NO: 12850 - protein, 13 aa, Homo sapiens
CAREKLTMIFDYW

SEQ ID NO: 12851 - protein, 22 aa, Homo sapiens
CARAPSPTYFFGNSGYHQFDSW

SEQ ID NO: 12852 - protein, 25 aa, Homo sapiens
CAKGWTDYGTIFGVVIIGPNYFDYW

SEQ ID NO: 12853 - protein, 20 aa, Homo sapiens
CARAPIIHDVNSYYSYFDSW

SEQ ID NO: 12854 - protein, 17 aa, Homo sapiens
CARLTSDNRKYFWFDPW

SEQ ID NO: 12855 - protein, 16 aa, Homo sapiens
CARLNSSSFLSPNDYW

SEQ ID NO: 12856 - protein, 20 aa, Homo sapiens
CARDPSYTSGWSPHWYFDLW

SEQ ID NO: 12857 - protein, 24 aa, Homo sapiens
CTRRGMAYYYDSSGYYGGYYFDYW

SEQ ID NO: 12858 - protein, 16 aa, Homo sapiens
CAHRRGTVTTPFFDYW

SEQ ID NO: 12859 - protein, 19 aa, Homo sapiens
CAKDKMEGIAAAWYYFDYW

SEQ ID NO: 12860 - protein, 22 aa, Homo sapiens
CAKEIESGYDLVPYYYYGMDVW

SEQ ID NO: 12861 - protein, 18 aa, Homo sapiens
CATEPRGTQLWNKDFNYW

SEQ ID NO: 12862 - protein, 23 aa, Homo sapiens
CARSRYYDFWSGYPADGYYMDVW

SEQ ID NO: 12863 - protein, 23 aa, Homo sapiens
CARDPVSRCSDGSCSSTYYFDYW

SEQ ID NO: 12864 - protein, 16 aa, Homo sapiens
CATTDYGDYEDAFDIW

SEQ ID NO: 12865 - protein, 17 aa, Homo sapiens
CSRPKAATQVLNAFEIW

SEQ ID NO: 12866 - protein, 19 aa, Homo sapiens
CARGVLLWFGEEYNWFDPW

SEQ ID NO: 12867 - protein, 19 aa, Homo sapiens
CARLFGLADYFYFDAFDIW

SEQ ID NO: 12868 - protein, 16 aa, Homo sapiens
CATTYAVWGSYNFDYW

SEQ ID NO: 12869 - protein, 24 aa, Homo sapiens
CARGSGTYYDILTGYSYGYYFDYW

SEQ ID NO: 12870 - protein, 23 aa, Homo sapiens
CARVTWPRIPVFGVARGHFFDYW

SEQ ID NO: 12871 - protein, 17 aa, Homo sapiens
CARHVTSVSNPLQSDYW

SEQ ID NO: 12872 - protein, 15 aa, Homo sapiens
CTKDVIRFLRGVDYW

SEQ ID NO: 12873 - protein, 19 aa, Homo sapiens
CARQRGIAVAGTEDWFDPW

SEQ ID NO: 12874 - protein, 14 aa, Homo sapiens
CVRHMYGYIAFDYW

SEQ ID NO: 12875 - protein, 18 aa, Homo sapiens
CTTDEMSDFWSGYPHDYW

SEQ ID NO: 12876 - protein, 17 aa, Homo sapiens
CAKIRSSSWLLHAFDIW

SEQ ID NO: 12877 - protein, 13 aa, Homo sapiens
CQAAGSSGSYYVF

SEQ ID NO: 12878 - protein, 16 aa, Homo sapiens
CARDPWGTYRPPFDLW

SEQ ID NO: 12879 - protein, 17 aa, Homo sapiens
CASNSHYDSSGKYIDYW

SEQ ID NO: 12880 - protein, 20 aa, Homo sapiens
CARAPYDILTGYVEYYFDYW

SEQ ID NO: 12881 - protein, 22 aa, Homo sapiens
CATESPRGGGDRYSYGYRTDYW

SEQ ID NO: 12882 - protein, 19 aa, Homo sapiens
CARVNPPYDFWSGYLFDYW

SEQ ID NO: 12883 - protein, 33 aa, Homo sapiens
CSLYLQINTLRADDTAVYYCATRGYSDAYFDYW

SEQ ID NO: 12884 - protein, 17 aa, Homo sapiens
CAKDGIAAVTDYYFDAW

SEQ ID NO: 12885 - protein, 29 aa, Homo sapiens
CARDHHDTYYDILTGYYPYPYYYYYMDVW

SEQ ID NO: 12886 - protein, 22 aa, Homo sapiens
CARDASEYSSSSGDYYYYMDVW

SEQ ID NO: 12887 - protein, 24 aa, Homo sapiens
CARHERGEMTFIAAAGTVNWFDPW

SEQ ID NO: 12888 - protein, 20 aa, Homo sapiens
CVHEIDYGDYWTGGWYFDYW

SEQ ID NO: 12889 - protein, 21 aa, Homo sapiens
CARDSVTDDSSGYYYSWFDPW

SEQ ID NO: 12890 - protein, 20 aa, Homo sapiens
CAREFLMAGHRTYYYYMDVW

SEQ ID NO: 12891 - protein, 17 aa, Homo sapiens
CARSYSGSNTRRWFDPW

SEQ ID NO: 12892 - protein, 24 aa, Homo sapiens
CDWSSDVCSSDLDGTGYYLHFDYW

SEQ ID NO: 12893 - protein, 18 aa, Homo sapiens
CAKVLVGWLLPNDAFDIW

SEQ ID NO: 12894 - protein, 17 aa, Homo sapiens
CARYRPISGVVYAMDVW

SEQ ID NO: 12895 - protein, 21 aa, Homo sapiens
CAKPPGFYGDYATRPWYFDLW

SEQ ID NO: 12896 - protein, 20 aa, Homo sapiens
CARESGLGGWPYPISAFDLW

SEQ ID NO: 12897 - protein, 15 aa, Homo sapiens
CANLPAAASGYMDVW

SEQ ID NO: 12898 - protein, 22 aa, Homo sapiens
CAREGIWYYSSSGNYHNVPDSW

SEQ ID NO: 12899 - protein, 15 aa, Homo sapiens
CAREGTVTTYPLDYW

SEQ ID NO: 12900 - protein, 22 aa, Homo sapiens
CARRASPLTYYDFWVANWFDPW

SEQ ID NO: 12901 - protein, 19 aa, Homo sapiens
CVKDRLAGYSNSLVKFDSW

SEQ ID NO: 12902 - protein, 15 aa, Homo sapiens
CAKLISRFHDAFDIW

SEQ ID NO: 12903 - protein, 13 aa, Homo sapiens
CAFEWSADGFDIW

SEQ ID NO: 12904 - protein, 16 aa, Homo sapiens
CARGGGIAVADYFDYW

SEQ ID NO: 12905 - protein, 19 aa, Homo sapiens
CARNREPGYNYAHYYFDFW

SEQ ID NO: 12906 - protein, 11 aa, Homo sapiens
CACSGSYYGYW

SEQ ID NO: 12907 - protein, 18 aa, Homo sapiens
CARDLSIAAADSEYFQHW

SEQ ID NO: 12908 - protein, 22 aa, Homo sapiens
CARDFLNTAMAINYYYYGMDVW

SEQ ID NO: 12909 - protein, 18 aa, Homo sapiens
CASGVGYSYAYSLDFAYW

SEQ ID NO: 12910 - protein, 20 aa, Homo sapiens
CAKADNKGTLIAPSYYFDFW

SEQ ID NO: 12911 - protein, 26 aa, Homo sapiens
CARDYESVELLWFGELTKSPPHFDPW

SEQ ID NO: 12912 - protein, 14 aa, Homo sapiens
CARRMGGSSHFDYW

SEQ ID NO: 12913 - protein, 14 aa, Homo sapiens
CMQGLQTPPRIYTF

SEQ ID NO: 12914 - protein, 13 aa, Homo sapiens
CARDSQWELLDYW

SEQ ID NO: 12915 - protein, 20 aa, Homo sapiens
CARYMTTVSRGSSGYAFDIW

SEQ ID NO: 12916 - protein, 16 aa, Homo sapiens
CAKGADGSGWSSFDYW

SEQ ID NO: 12917 - protein, 16 aa, Homo sapiens
CARVHYGSGSYYMYYW

SEQ ID NO: 12918 - protein, 27 aa, Homo sapiens
CARDAQDIVLVPAALRGNYYYYAMDVW

SEQ ID NO: 12919 - protein, 21 aa, Homo sapiens
CARGLKGRITMVRGVSAIDYW

SEQ ID NO: 12920 - protein, 14 aa, Homo sapiens
CAKDYSTGHYFDYW

SEQ ID NO: 12921 - protein, 23 aa, Homo sapiens
CAKLSGYSGYDFRAGAVAEFDYW

SEQ ID NO: 12922 - protein, 17 aa, Homo sapiens
CAKTGQQLVRGYAVDYW

SEQ ID NO: 12923 - protein, 17 aa, Homo sapiens
CAKDYDSSGYELYFDYW

SEQ ID NO: 12924 - protein, 22 aa, Homo sapiens
CARDSSPEDSPSGPYYDAYDLW

SEQ ID NO: 12925 - protein, 35 aa, Homo sapiens
CTLYLQMNSLRAEDTAVYYCAKGDGDNIPWYFDLW

SEQ ID NO: 12926 - protein, 11 aa, Homo sapiens
CEQYGDSPPTF

SEQ ID NO: 12927 - protein, 18 aa, Homo sapiens
CARIILEKYDSSGYFDNW

SEQ ID NO: 12928 - protein, 22 aa, Homo sapiens
CARAYYDTSAYSTLKDWYFDLW

SEQ ID NO: 12929 - protein, 13 aa, Homo sapiens
CAKVGISWLGDYW

SEQ ID NO: 12930 - protein, 20 aa, Homo sapiens
CAKDRLRAAMMGANNHFDYW

SEQ ID NO: 12931 - protein, 16 aa, Homo sapiens
CAREVDGADDAWFDPW

SEQ ID NO: 12932 - protein, 20 aa, Homo sapiens
CAKDTTFGGSVYSSNPFDSW

SEQ ID NO: 12933 - protein, 15 aa, Homo sapiens
CATTRDPPAEYFQHW

SEQ ID NO: 12934 - protein, 15 aa, Homo sapiens
CTTDLPVAGHYFDYW

SEQ ID NO: 12935 - protein, 15 aa, Homo sapiens
CARETDRWGKWFDPW

SEQ ID NO: 12936 - protein, 16 aa, Homo sapiens
CARAMGAAGFGNFDYW

SEQ ID NO: 12937 - protein, 17 aa, Homo sapiens
CARRVVGASRWGGFDIW

SEQ ID NO: 12938 - protein, 24 aa, Homo sapiens
CARGSNYDSSGPRPPYYYYYMDVW

SEQ ID NO: 12939 - protein, 13 aa, Homo sapiens
CQSADRIGTYVEF

SEQ ID NO: 12940 - protein, 16 aa, Homo sapiens
CARDWDASGWLTFGYW

SEQ ID NO: 12941 - protein, 20 aa, Homo sapiens
CTRGGFLEWLFYYYYGMDVW

SEQ ID NO: 12942 - protein, 24 aa, Homo sapiens
CARNGGERYFDWLSPPYYYGMDVW

SEQ ID NO: 12943 - protein, 19 aa, Homo sapiens
CAKDLVPGVIGYYYGMDVW

SEQ ID NO: 12944 - protein, 16 aa, Homo sapiens
CAIGYSSAWAEFFQYW

SEQ ID NO: 12945 - protein, 15 aa, Homo sapiens
CAREKRGIAVYIDYW

SEQ ID NO: 12946 - protein, 18 aa, Homo sapiens
CARPQRPWFGGTDAFDIW

SEQ ID NO: 12947 - protein, 25 aa, Homo sapiens
CARGVSKTSMIVVVITAAMYYFDSW

SEQ ID NO: 12948 - protein, 15 aa, Homo sapiens
CQSYDSSLRSYNYVF

SEQ ID NO: 12949 - protein, 21 aa, Homo sapiens
CARALNDFWSGYLGYYYMDVW

SEQ ID NO: 12950 - protein, 24 aa, Homo sapiens
CARDPPLPYDYVWGSYRYTGFDYW

SEQ ID NO: 12951 - protein, 19 aa, Homo sapiens
CARVYSGSDIEAHDAFDIW

SEQ ID NO: 12952 - protein, 24 aa, Homo sapiens
CARDSYSHYYYDSSGPPESWVDYW

SEQ ID NO: 12953 - protein, 21 aa, Homo sapiens
CAGDEGIFGVVDHYYYGMDVW

SEQ ID NO: 12954 - protein, 17 aa, Homo sapiens
CATWGGSRNPPYYFVYW

SEQ ID NO: 12955 - protein, 18 aa, Homo sapiens
CATPMYTSGWYYYGMDVW

SEQ ID NO: 12956 - protein, 21 aa, Homo sapiens
CARGPGIVGAPDYYYYYMDVW

SEQ ID NO: 12957 - protein, 14 aa, Homo sapiens
CAKMSKGSGYSDYW

SEQ ID NO: 12958 - protein, 21 aa, Homo sapiens
CARSRLWFGEMILRRFYMDVW

SEQ ID NO: 12959 - protein, 22 aa, Homo sapiens
CARGYYYYDSSGYGISDAFDIW

SEQ ID NO: 12960 - protein, 12 aa, Homo sapiens
CTTDKQLSPDYW

SEQ ID NO: 12961 - protein, 23 aa, Homo sapiens
CAHRPTLPYYYDSSGYGNWFDPW

SEQ ID NO: 12962 - protein, 21 aa, Homo sapiens
CATDIVVPAVSRYYYYGLDVW

SEQ ID NO: 12963 - protein, 24 aa, Homo sapiens
CARAERYHMITFGGVIVTDAFDIW

SEQ ID NO: 12964 - protein, 19 aa, Homo sapiens
CAHRGLFDGSEYSFYFNYW

SEQ ID NO: 12965 - protein, 14 aa, Homo sapiens
CVKDYGDYPNFDYW

SEQ ID NO: 12966 - protein, 14 aa, Homo sapiens
CARRRIGARGFDYW

SEQ ID NO: 12967 - protein, 17 aa, Homo sapiens
CAREYNWNYVTVYFDYW

SEQ ID NO: 12968 - protein, 11 aa, Homo sapiens
CARAGDYGDFW

SEQ ID NO: 12969 - protein, 23 aa, Homo sapiens
CARDPTVTTFPPHNYYYYGMDVW

SEQ ID NO: 12970 - protein, 14 aa, Homo sapiens
CAPEVTTVTNFDYW

SEQ ID NO: 12971 - protein, 12 aa, Homo sapiens
CARHLNSRFDPW

SEQ ID NO: 12972 - protein, 23 aa, Homo sapiens
CARDLTRNDSSGYYKPADAFDIW

SEQ ID NO: 12973 - protein, 16 aa, Homo sapiens
CARGLVEQLVPWFDPW

SEQ ID NO: 12974 - protein, 15 aa, Homo sapiens
CTREERRSIRPFDYW

SEQ ID NO: 12975 - protein, 21 aa, Homo sapiens
CASTTEKVWFGELFLQGFDPW

SEQ ID NO: 12976 - protein, 20 aa, Homo sapiens
CASLGSSTVTTYYYYGMDVW

SEQ ID NO: 12977 - protein, 21 aa, Homo sapiens
CAKDDRPTTLGGYYYYGMDVW

SEQ ID NO: 12978 - protein, 28 aa, Homo sapiens
CARETIVPVPASIWNMEDYFYYYGMDVW

SEQ ID NO: 12979 - protein, 18 aa, Homo sapiens
CARGKILTGRPIDAFDIW

SEQ ID NO: 12980 - protein, 14 aa, Homo sapiens
CARALTRSFSVDYW

SEQ ID NO: 12981 - protein, 20 aa, Homo sapiens
CARHGTTIFGVVIPNWFDPW

SEQ ID NO: 12982 - protein, 20 aa, Homo sapiens
CARAPYYYDSSGYRGGSDYW

SEQ ID NO: 12983 - protein, 21 aa, Homo sapiens
CARDGVLLWFGESGRGAFDIW

SEQ ID NO: 12984 - protein, 18 aa, Homo sapiens
CAKDYYRWWFGDHTFDYW

SEQ ID NO: 12985 - protein, 18 aa, Homo sapiens
CATERRMSIAVAGTADYW

SEQ ID NO: 12986 - protein, 16 aa, Homo sapiens
CARRDGYNVMYYFDYW

SEQ ID NO: 12987 - protein, 14 aa, Homo sapiens
CAHAIDGNNNFDYW

SEQ ID NO: 12988 - protein, 24 aa, Homo sapiens
CARGGQQLVLPPYYDYYYYGMDVW

SEQ ID NO: 12989 - protein, 16 aa, Homo sapiens
CATPRGLYGDYIFDYW

SEQ ID NO: 12990 - protein, 16 aa, Homo sapiens
CARAPARYSYGGIDYW

SEQ ID NO: 12991 - protein, 19 aa, Homo sapiens
CARDRHDFWSGSVGWFDPW

SEQ ID NO: 12992 - protein, 19 aa, Homo sapiens
CAKIGYYDSSGYPGGVDYW

SEQ ID NO: 12993 - protein, 12 aa, Homo sapiens
CQPYNTYPRFTF

SEQ ID NO: 12994 - protein, 22 aa, Homo sapiens
CARLYLLLGPSTRVVASWFDPW

SEQ ID NO: 12995 - protein, 16 aa, Homo sapiens
CARGMVMTNMRTFDFW

SEQ ID NO: 12996 - protein, 19 aa, Homo sapiens
CASTRSEWELQGHDAFDIW

SEQ ID NO: 12997 - protein, 15 aa, Homo sapiens
CARSSSLFSSFFDSW

SEQ ID NO: 12998 - protein, 27 aa, Homo sapiens
CATVAQAGAYYYDSSGYYPKDNWFDPW

SEQ ID NO: 12999 - protein, 19 aa, Homo sapiens
CAKLASWFGELSGMSGDYW

SEQ ID NO: 13000 - protein, 18 aa, Homo sapiens
CAKDIDWGSEGFGPFDYW

SEQ ID NO: 13001 - protein, 17 aa, Homo sapiens
CARLQLELLRDGAFDIW

SEQ ID NO: 13002 - protein, 21 aa, Homo sapiens
CAKDQAIDCSSTSCYLGFDYW

SEQ ID NO: 13003 - protein, 15 aa, Homo sapiens
CARHAGHLWKHFDYW

SEQ ID NO: 13004 - protein, 16 aa, Homo sapiens
CARVFAARPDYYLDYW

SEQ ID NO: 13005 - protein, 15 aa, Homo sapiens
CAGGQLWFDDAFDIW

SEQ ID NO: 13006 - protein, 26 aa, Homo sapiens
CAKVKPVGDQWELLGGAAYYYYMDVW

SEQ ID NO: 13007 - protein, 16 aa, Homo sapiens
CAHHSSGWYGDHFDYW

SEQ ID NO: 13008 - protein, 19 aa, Homo sapiens
CARGQLWLGLMVSDAFDIW

SEQ ID NO: 13009 - protein, 17 aa, Homo sapiens
CAAVDNGDSSGYQFDYW

SEQ ID NO: 13010 - protein, 22 aa, Homo sapiens
CAREAEITIFGVVIMGTLPDYW

SEQ ID NO: 13011 - protein, 15 aa, Homo sapiens
CAHRRGYDYAIFGYW

SEQ ID NO: 13012 - protein, 28 aa, Homo sapiens
CARDLQYPSGYDYVWGSYRYIFAAFDIW

SEQ ID NO: 13013 - protein, 12 aa, Homo sapiens
CARTPDYHFDYW

SEQ ID NO: 13014 - protein, 23 aa, Homo sapiens
CAREYGVGSGWRFDYYYYGMDVW

SEQ ID NO: 13015 - protein, 20 aa, Homo sapiens
CAKSGTTMIVVVIDDAFDIW

SEQ ID NO: 13016 - protein, 27 aa, Homo sapiens
CARDRALESPDIVVVPAAILSCWFDPW

SEQ ID NO: 13017 - protein, 22 aa, Homo sapiens
CARGLIYSYGLGVYYYYGMDVW

SEQ ID NO: 13018 - protein, 24 aa, Homo sapiens
CARVSVTMIVVVITPYYYYYMDVW

SEQ ID NO: 13019 - protein, 21 aa, Homo sapiens
CARDFQAVLRFLEWNDAFDIW

SEQ ID NO: 13020 - protein, 14 aa, Homo sapiens
CARERLPHQHFDYW

SEQ ID NO: 13021 - protein, 22 aa, Homo sapiens
CAKAWGGDYDQDPYYYYGMDVW

SEQ ID NO: 13022 - protein, 16 aa, Homo sapiens
CAGSEGSGYQGYFDPW

SEQ ID NO: 13023 - protein, 22 aa, Homo sapiens
CTTDPGCSSTSCYYYYYYMDVW

SEQ ID NO: 13024 - protein, 20 aa, Homo sapiens
CAKGTAIAMVRGVLQPFDPW

SEQ ID NO: 13025 - protein, 29 aa, Homo sapiens
CARFRIGTQESDQYYYDSSGYYYYGMDVW

SEQ ID NO: 13026 - protein, 13 aa, Homo sapiens
CQQYNSYYGTWAF

SEQ ID NO: 13027 - protein, 17 aa, Homo sapiens
CARAHKQQLVFFHFDYW

SEQ ID NO: 13028 - protein, 16 aa, Homo sapiens
CAKSIRPIIGDAFDIW

SEQ ID NO: 13029 - protein, 15 aa, Homo sapiens
CAKLCSSTSCFIDYW

SEQ ID NO: 13030 - protein, 14 aa, Homo sapiens
CARLRRLYRAFDIW

SEQ ID NO: 13031 - protein, 12 aa, Homo sapiens
CVPRTVYAFNIW

SEQ ID NO: 13032 - protein, 21 aa, Homo sapiens
CAKDSGGGDFWSGYSYYFDYW

SEQ ID NO: 13033 - protein, 17 aa, Homo sapiens
CARLTDDSSSSEELDYW

SEQ ID NO: 13034 - protein, 31 aa, Homo sapiens
CLRAEDTAVYYCASIAAAGREYYYYYGMDVW

SEQ ID NO: 13035 - protein, 17 aa, Homo sapiens
CARDAGSSSWDYYFDYW

SEQ ID NO: 13036 - protein, 41 aa, Homo sapiens
CDWSSDVCSSDLMDSLRPEDTAMYYCARETIVVDDSRFDYW

SEQ ID NO: 13037 - protein, 16 aa, Homo sapiens
CARLPQTKRGNWFDPW

SEQ ID NO: 13038 - protein, 19 aa, Homo sapiens
CASPLLPYYYDSSHAFDIW

SEQ ID NO: 13039 - protein, 14 aa, Homo sapiens
CARAPVSNLAFDIW

SEQ ID NO: 13040 - protein, 17 aa, Homo sapiens
CATRFAYGDYRGPIDYW

SEQ ID NO: 13041 - protein, 18 aa, Homo sapiens
CANGPNWNDPGLDAFDIW

SEQ ID NO: 13042 - protein, 13 aa, Homo sapiens
CAKLMDIVATDYW

SEQ ID NO: 13043 - protein, 19 aa, Homo sapiens
CALMNGVDTAMDDYYFDYW

SEQ ID NO: 13044 - protein, 19 aa, Homo sapiens
CARAVEDSRGFFSYYFDSW

SEQ ID NO: 13045 - protein, 18 aa, Homo sapiens
CAREYIWGSYGREAFDMW

SEQ ID NO: 13046 - protein, 17 aa, Homo sapiens
CASSRIQLWLGGVFDYW

SEQ ID NO: 13047 - protein, 19 aa, Homo sapiens
CAKGPGGGYSSSWYWFDPW

SEQ ID NO: 13048 - protein, 15 aa, Homo sapiens
CAHRHSWTLSYFDYW

SEQ ID NO: 13049 - protein, 24 aa, Homo sapiens
CARSSPSYYDFWSGTLFIPAFDIW

SEQ ID NO: 13050 - protein, 24 aa, Homo sapiens
CATTFPLSSIGGGWELLKGVPDYW

SEQ ID NO: 13051 - protein, 19 aa, Homo sapiens
CARDYSSKEYYYYYGMDVW

SEQ ID NO: 13052 - protein, 19 aa, Homo sapiens
CARASRIAVPRGMCAFDIW

SEQ ID NO: 13053 - protein, 23 aa, Homo sapiens
CARYQEGVVVVPTPDHSGGFDCW

SEQ ID NO: 13054 - protein, 12 aa, Homo sapiens
CANDGPGYYDYW

SEQ ID NO: 13055 - protein, 27 aa, Homo sapiens
CARVCMVRGVIITNEICDYYYYGMDVW

SEQ ID NO: 13056 - protein, 17 aa, Homo sapiens
CAGKEGKTSGYYYFDYW

SEQ ID NO: 13057 - protein, 15 aa, Homo sapiens
CAREGMPTIYYFDYW

SEQ ID NO: 13058 - protein, 19 aa, Homo sapiens
CARLVLVVYDKETNWFDPW

SEQ ID NO: 13059 - protein, 17 aa, Homo sapiens
CATLPYSTSSSPYFDYW

SEQ ID NO: 13060 - protein, 16 aa, Homo sapiens
CASERSSSSGWTFDYW

SEQ ID NO: 13061 - protein, 22 aa, Homo sapiens
CAKMGGYLGYCSGGSCYGPDYW

SEQ ID NO: 13062 - protein, 17 aa, Homo sapiens
CATSRVVPPYSNWFDPW

SEQ ID NO: 13063 - protein, 21 aa, Homo sapiens
CARSLGGTGEVPGGGDWFDPW

SEQ ID NO: 13064 - protein, 16 aa, Homo sapiens
CARASTGSYASAFDIW

SEQ ID NO: 13065 - protein, 23 aa, Homo sapiens
CAKERVSRFPLSGVGPQGENDYW

SEQ ID NO: 13066 - protein, 16 aa, Homo sapiens
CANLGIAVAGAAFDIW

SEQ ID NO: 13067 - protein, 26 aa, Homo sapiens
CARDLGEVYDFWSGYETLGVFSLDYW

SEQ ID NO: 13068 - protein, 22 aa, Homo sapiens
CARHSYYGSGSYYNVDWYFDLW

SEQ ID NO: 13069 - protein, 18 aa, Homo sapiens
CATLTYSSSWFHYYFDYW

SEQ ID NO: 13070 - protein, 14 aa, Homo sapiens
CARQGFGSGAHDYW

SEQ ID NO: 13071 - protein, 24 aa, Homo sapiens
CARETRSEYDFWSGYYTGGYFDYW

SEQ ID NO: 13072 - protein, 13 aa, Homo sapiens
CQLRDNWPRVYTF

SEQ ID NO: 13073 - protein, 16 aa, Homo sapiens
CARTKSGAYSSSLDYW

SEQ ID NO: 13074 - protein, 15 aa, Homo sapiens
CAGGSPIDGHQSDYW

SEQ ID NO: 13075 - protein, 17 aa, Homo sapiens
CAKEYHYDSSGYFFDYW

SEQ ID NO: 13076 - protein, 16 aa, Homo sapiens
CATQSLGIAAAGVDYW

SEQ ID NO: 13077 - protein, 21 aa, Homo sapiens
CARVSGGYYYDSSGADAFDIW

SEQ ID NO: 13078 - protein, 15 aa, Homo sapiens
CANTGYISGWYIDYW

SEQ ID NO: 13079 - protein, 17 aa, Homo sapiens
CAKVGDYDSFQGHFDSW

SEQ ID NO: 13080 - protein, 22 aa, Homo sapiens
CARVDSGLTMVRGVIRKTFDYW

SEQ ID NO: 13081 - protein, 17 aa, Homo sapiens
CARDVRYYYGSGLFDYW

SEQ ID NO: 13082 - protein, 16 aa, Homo sapiens
CARQYDSSGYYTDDYW

SEQ ID NO: 13083 - protein, 25 aa, Homo sapiens
CAREWFSVTVVRGLPDFYQYYLDVW

SEQ ID NO: 13084 - protein, 17 aa, Homo sapiens
CATFRYSVTTWSWFDPW

SEQ ID NO: 13085 - protein, 24 aa, Homo sapiens
CARSYSSGWYVGFGLDYYYYMDVW

SEQ ID NO: 13086 - protein, 15 aa, Homo sapiens
CARAYGDYLYNFDYW

SEQ ID NO: 13087 - protein, 17 aa, Homo sapiens
CAKDVSIAAASQTDDYW

SEQ ID NO: 13088 - protein, 16 aa, Homo sapiens
CATGLSDFWSGYYNYW

SEQ ID NO: 13089 - protein, 20 aa, Homo sapiens
CATYPAYYDILTGPSPLDYW

SEQ ID NO: 13090 - protein, 17 aa, Homo sapiens
CATSFAIVGANPYFDYW

SEQ ID NO: 13091 - protein, 18 aa, Homo sapiens
CAKSQKVGATLGRAFDIW

SEQ ID NO: 13092 - protein, 23 aa, Homo sapiens
CARERITIFGVVTSGTYNWFDPW

SEQ ID NO: 13093 - protein, 17 aa, Homo sapiens
CAREVSEWFGELLPDYW

SEQ ID NO: 13094 - protein, 21 aa, Homo sapiens
CAREVRRQWLMIIQADGFDVW

SEQ ID NO: 13095 - protein, 21 aa, Homo sapiens
CAAESSGSYYKSYYYYGMDVW

SEQ ID NO: 13096 - protein, 21 aa, Homo sapiens
CARGGLLRYFDWLLHHYFDYW

SEQ ID NO: 13097 - protein, 20 aa, Homo sapiens
CARDRAGYSSGWYSFDFDYW

SEQ ID NO: 13098 - protein, 19 aa, Homo sapiens
CARESTPSAVAGTSGFDPW

SEQ ID NO: 13099 - protein, 30 aa, Homo sapiens
CALPISDTAMYYCARPPHGYSSGWYVRDYW

SEQ ID NO: 13100 - protein, 19 aa, Homo sapiens
CAKDGMRYNYNDGPYFDYW

SEQ ID NO: 13101 - protein, 27 aa, Homo sapiens
CARDPQPTDIVVVVAATPLYYYYMDVW

SEQ ID NO: 13102 - protein, 17 aa, Homo sapiens
CAREGDTFDYGSGNDYW

SEQ ID NO: 13103 - protein, 20 aa, Homo sapiens
CAKARYCTNGVCFARPFDYW

SEQ ID NO: 13104 - protein, 22 aa, Homo sapiens
CARPKYCSGGSCYFPSDAFDIW

SEQ ID NO: 13105 - protein, 16 aa, Homo sapiens
CAREGIAAAGICLDYW

SEQ ID NO: 13106 - protein, 16 aa, Homo sapiens
CAKDKRPDGIWSFDNW

SEQ ID NO: 13107 - protein, 16 aa, Homo sapiens
CARNYGTGIYNWFDPW

SEQ ID NO: 13108 - protein, 16 aa, Homo sapiens
CARDRDSNYIWWFDPW

SEQ ID NO: 13109 - protein, 17 aa, Homo sapiens
CARDTQQWLVIPAFDIW

SEQ ID NO: 13110 - protein, 17 aa, Homo sapiens
CATVYAIFLASRPFDYW

SEQ ID NO: 13111 - protein, 15 aa, Homo sapiens
CAKEKELLYGGYDYW

SEQ ID NO: 13112 - protein, 15 aa, Homo sapiens
CQQRSNWPPGTSPTF

SEQ ID NO: 13113 - protein, 18 aa, Homo sapiens
CARSGDSSSWSRQYFQHW

SEQ ID NO: 13114 - protein, 18 aa, Homo sapiens
CASFVDTGTYYEIYFDYW

SEQ ID NO: 13115 - protein, 19 aa, Homo sapiens
CARDPPRTVTTFWWYFDLW

SEQ ID NO: 13116 - protein, 20 aa, Homo sapiens
CARGEYDYVWGSYLTTVDYW

SEQ ID NO: 13117 - protein, 12 aa, Homo sapiens
CQLYRSSPTWTF

SEQ ID NO: 13118 - protein, 25 aa, Homo sapiens
CARDSSAGYSSSWSSYYYYYYMDVW

SEQ ID NO: 13119 - protein, 22 aa, Homo sapiens
CARVGLGYYDFWSGQQAWFDPW

SEQ ID NO: 13120 - protein, 22 aa, Homo sapiens
CARDGGGYSSSWNPLFNWFDPW

SEQ ID NO: 13121 - protein, 16 aa, Homo sapiens
CATASGEGSPNWFDPW

SEQ ID NO: 13122 - protein, 17 aa, Homo sapiens
CARDPGDGYNSANFDYW

SEQ ID NO: 13123 - protein, 19 aa, Homo sapiens
CARGTPTDMSSYYYYMDVW

SEQ ID NO: 13124 - protein, 15 aa, Homo sapiens
CARQSPDYDRHFDYW

SEQ ID NO: 13125 - protein, 26 aa, Homo sapiens
CTSPPTNDYGDYVVWDYYYYYGMDVW

SEQ ID NO: 13126 - protein, 15 aa, Homo sapiens
CATETSTMTPWFDHW

SEQ ID NO: 13127 - protein, 13 aa, Homo sapiens
CAKDTTVSPFDIW

SEQ ID NO: 13128 - protein, 22 aa, Homo sapiens
CARESPTSRHSSSLPQDWFDPW

SEQ ID NO: 13129 - protein, 15 aa, Homo sapiens
CARHFEDLLSGFDYW

SEQ ID NO: 13130 - protein, 12 aa, Homo sapiens
CAHRVMMAFDYW

SEQ ID NO: 13131 - protein, 25 aa, Homo sapiens
CARLEFGEAKYQLLLLTVTGAFDIW

SEQ ID NO: 13132 - protein, 20 aa, Homo sapiens
CARHYYGSGSYYNLGWFDPW

SEQ ID NO: 13133 - protein, 19 aa, Homo sapiens
CAKAGRIVVVITGDYFDYW

SEQ ID NO: 13134 - protein, 22 aa, Homo sapiens
CATDTALPGYYTGTVYNWFDPW

SEQ ID NO: 13135 - protein, 18 aa, Homo sapiens
CARSRITMIVVVEAFDYW

SEQ ID NO: 13136 - protein, 20 aa, Homo sapiens
CAKLQGPKWSPLFPDAFDIW

SEQ ID NO: 13137 - protein, 24 aa, Homo sapiens
CARDPFYDSSIRYYYYYYYGMDVW

SEQ ID NO: 13138 - protein, 19 aa, Homo sapiens
CAKDIQPLTTMTTYGFDFW

SEQ ID NO: 13139 - protein, 20 aa, Homo sapiens
CAHRLYFSDGSAQWGYYDYW

SEQ ID NO: 13140 - protein, 16 aa, Homo sapiens
CTRYSVSYYYYGMDVW

SEQ ID NO: 13141 - protein, 19 aa, Homo sapiens
CASEEVYCSGGSCHWFDPW

SEQ ID NO: 13142 - protein, 18 aa, Homo sapiens
CARWINPQQLLYNWFDPW

SEQ ID NO: 13143 - protein, 21 aa, Homo sapiens
CARGRPDHPLSMYRGSYLDYW

SEQ ID NO: 13144 - protein, 17 aa, Homo sapiens
CATSPALIVGAISLDYW

SEQ ID NO: 13145 - protein, 16 aa, Homo sapiens
CARGAHDYSYGPADYW

SEQ ID NO: 13146 - protein, 18 aa, Homo sapiens
CAKDLLGEWELRNWFDPW

SEQ ID NO: 13147 - protein, 17 aa, Homo sapiens
CARHELWFGELSHIDYW

SEQ ID NO: 13148 - protein, 17 aa, Homo sapiens
CARGAPTWGRGKSFGYW

SEQ ID NO: 13149 - protein, 25 aa, Homo sapiens
CARDAPELIYDFWSGYYIPYYMDVW

SEQ ID NO: 13150 - protein, 21 aa, Homo sapiens
CARGSGYCSGGSCWGGWFDSW

SEQ ID NO: 13151 - protein, 14 aa, Homo sapiens
CAKVPPDWDYFDDW

SEQ ID NO: 13152 - protein, 17 aa, Homo sapiens
CATVYAVRGVYPHGDYW

SEQ ID NO: 13153 - protein, 16 aa, Homo sapiens
CARYSRVYYYYGMDVW

SEQ ID NO: 13154 - protein, 17 aa, Homo sapiens
CAKGGYSDWVPYYFDYW

SEQ ID NO: 13155 - protein, 21 aa, Homo sapiens
CARGYYDSSGYYYEGWSFDYW

SEQ ID NO: 13156 - protein, 19 aa, Homo sapiens
CAKGSYDSSGYYSPQVDYW

SEQ ID NO: 13157 - protein, 16 aa, Homo sapiens
CARPHSGSYYSWFDPW

SEQ ID NO: 13158 - protein, 20 aa, Homo sapiens
CTTDPSVVVVAASYYYMDVW

SEQ ID NO: 13159 - protein, 19 aa, Homo sapiens
CAKSGYSGYDPYLYYFDYW

SEQ ID NO: 13160 - protein, 21 aa, Homo sapiens
CARQENYYDSSGYYYSWFDPW

SEQ ID NO: 13161 - protein, 20 aa, Homo sapiens
CAREANYGNIGGNNGAFDIW

SEQ ID NO: 13162 - protein, 21 aa, Homo sapiens
CARDSTSSWLGIPDGGYFDYW

SEQ ID NO: 13163 - protein, 21 aa, Homo sapiens
CAHRPTYYDFWSGDTNWFDPW

SEQ ID NO: 13164 - protein, 11 aa, Homo sapiens
CQVWDSYTEIF

SEQ ID NO: 13165 - protein, 16 aa, Homo sapiens
CAKNAENIVGEVLDYW

SEQ ID NO: 13166 - protein, 18 aa, Homo sapiens
CARNYVHLWGQFNRFDPW

SEQ ID NO: 13167 - protein, 25 aa, Homo sapiens
CARPQGTTYYDFWSGIYYYYGMDVW

SEQ ID NO: 13168 - protein, 20 aa, Homo sapiens
CARDRGTVISPNYYYYMDVW

SEQ ID NO: 13169 - protein, 18 aa, Homo sapiens
CAHRPGIAAAGTGVFDYW

SEQ ID NO: 13170 - protein, 21 aa, Homo sapiens
CASMPYSSSFGGYYYYGMDVW

SEQ ID NO: 13171 - protein, 23 aa, Homo sapiens
CARDFPPLNYYDSSGYDGRTDYW

SEQ ID NO: 13172 - protein, 15 aa, Homo sapiens
CAHRRRDGFNSFDYW

SEQ ID NO: 13173 - protein, 17 aa, Homo sapiens
CAKSPGRGSYSPGGDYW

SEQ ID NO: 13174 - protein, 23 aa, Homo sapiens
CARDGAYSNQITGGYYYYYMDVW

SEQ ID NO: 13175 - protein, 18 aa, Homo sapiens
CAKERYSVQLWSEPFDYW

SEQ ID NO: 13176 - protein, 18 aa, Homo sapiens
CARARSKYYDFSNWFDPW

SEQ ID NO: 13177 - protein, 23 aa, Homo sapiens
CARDPHPDYDFWSGLYYYYMDVW

SEQ ID NO: 13178 - protein, 21 aa, Homo sapiens
CARDGHYVWGSYRPKWDLDYW

SEQ ID NO: 13179 - protein, 17 aa, Homo sapiens
CAKAGYSSGWEYSFDMW

SEQ ID NO: 13180 - protein, 17 aa, Homo sapiens
CATTRSMIVVVGLFDYW

SEQ ID NO: 13181 - protein, 14 aa, Homo sapiens
CSSTSCYWGYMDVW

SEQ ID NO: 13182 - protein, 17 aa, Homo sapiens
CARPVNVAVADFDFDYW

SEQ ID NO: 13183 - protein, 21 aa, Homo sapiens
CARGDEFCHDSGCYERWFDPW

SEQ ID NO: 13184 - protein, 18 aa, Homo sapiens
CAGATVTDNGEYNWFDPW

SEQ ID NO: 13185 - protein, 18 aa, Homo sapiens
CATLGGYYYDSSGYYVYW

SEQ ID NO: 13186 - protein, 16 aa, Homo sapiens
CARIGGDGGTYQFAYW

SEQ ID NO: 13187 - protein, 18 aa, Homo sapiens
CARDRVSSGYSTYYMDVW

SEQ ID NO: 13188 - protein, 23 aa, Homo sapiens
CARNVLRFLELNIPHLEDAFDIW

SEQ ID NO: 13189 - protein, 15 aa, Homo sapiens
CATWTYGDSYYFDYW

SEQ ID NO: 13190 - protein, 16 aa, Homo sapiens
CARDDVIAAAGPNDYW

SEQ ID NO: 13191 - protein, 15 aa, Homo sapiens
CTTDAYSHAEVFDIW

SEQ ID NO: 13192 - protein, 16 aa, Homo sapiens
CARYGWNAADDAFDIW

SEQ ID NO: 13193 - protein, 18 aa, Homo sapiens
CAMPRMKPHTKNDAFDVW

SEQ ID NO: 13194 - protein, 15 aa, Homo sapiens
CAKHFWSGYSSQDYW

SEQ ID NO: 13195 - protein, 13 aa, Homo sapiens
CARPSHWPYFDRW

SEQ ID NO: 13196 - protein, 19 aa, Homo sapiens
CARERGYSSSWSSYYFDYW

SEQ ID NO: 13197 - protein, 28 aa, Homo sapiens
CAKDSWYYDFWSGYIAPKVYYYYYMDVW

SEQ ID NO: 13198 - protein, 22 aa, Homo sapiens
CTTDTVAAILFWRSYAEYFQHW

SEQ ID NO: 13199 - protein, 21 aa, Homo sapiens
CAREGPPYYYDSSGYPGLDYW

SEQ ID NO: 13200 - protein, 16 aa, Homo sapiens
CATGPPYDSSGWFDPW

SEQ ID NO: 13201 - protein, 15 aa, Homo sapiens
CAKEKILTGGSFDYW

SEQ ID NO: 13202 - protein, 20 aa, Homo sapiens
CASIGRDSSGYYGVSAFDIW

SEQ ID NO: 13203 - protein, 17 aa, Homo sapiens
CARHEIWFGDLLYFDYW

SEQ ID NO: 13204 - protein, 11 aa, Homo sapiens
CQEAKSFPPLF

SEQ ID NO: 13205 - protein, 13 aa, Homo sapiens
CAKADEWGRSDYW

SEQ ID NO: 13206 - protein, 24 aa, Homo sapiens
CARDLYYYDSSGSYYQHSHSIDYW

SEQ ID NO: 13207 - protein, 23 aa, Homo sapiens
CASLTLSDYDFWSGYPNYYFDYW

SEQ ID NO: 13208 - protein, 23 aa, Homo sapiens
CAHKSSKSCTTYSCYVANWFDPW

SEQ ID NO: 13209 - protein, 17 aa, Homo sapiens
CVKDLIFYHDDTAFDSW

SEQ ID NO: 13210 - protein, 18 aa, Homo sapiens
CARENYYGSGYHDAFDIW

SEQ ID NO: 13211 - protein, 17 aa, Homo sapiens
CAREVATIEEAYFFDYW

SEQ ID NO: 13212 - protein, 17 aa, Homo sapiens
CARDCTSPTCNDAFDIW

SEQ ID NO: 13213 - protein, 23 aa, Homo sapiens
CARDLGSSDFWSGSSLRRGFDPW

SEQ ID NO: 13214 - protein, 21 aa, Homo sapiens
CAKDLSLRFLEWLPPNYFDYW

SEQ ID NO: 13215 - protein, 15 aa, Homo sapiens
CAKLPDSSGYFFDYW

SEQ ID NO: 13216 - protein, 16 aa, Homo sapiens
CARENGRYSYGAADYW

SEQ ID NO: 13217 - protein, 22 aa, Homo sapiens
CARGMLKYYDFWIPVGSWFDPW

SEQ ID NO: 13218 - protein, 22 aa, Homo sapiens
CARDNCSSASCYKFYYYYMDVW

SEQ ID NO: 13219 - protein, 25 aa, Homo sapiens
CARCIAVAGTWSFSLRYDYYGMDVW

SEQ ID NO: 13220 - protein, 16 aa, Homo sapiens
CATGPVLEWPHWFDPW

SEQ ID NO: 13221 - protein, 28 aa, Homo sapiens
CARDGQYYDFWSGYSPQYYYYYYYMDVW

SEQ ID NO: 13222 - protein, 19 aa, Homo sapiens
CAKDIVGVGRDGYNALDYW

SEQ ID NO: 13223 - protein, 19 aa, Homo sapiens
CAKDLGSGYYFSPLPYDYW

SEQ ID NO: 13224 - protein, 21 aa, Homo sapiens
CAKAHYYDSSGYYSIVAFDIW

SEQ ID NO: 13225 - protein, 22 aa, Homo sapiens
CARGGDSLDIVVVVAATPFDYW

SEQ ID NO: 13226 - protein, 14 aa, Homo sapiens
CAVHLTSSYGVDYW

SEQ ID NO: 13227 - protein, 21 aa, Homo sapiens
CAKPKDIVLVVYAANWYFDLW

SEQ ID NO: 13228 - protein, 20 aa, Homo sapiens
CARPYYYDSSGNPQYYFDYW

SEQ ID NO: 13229 - protein, 18 aa, Homo sapiens
CAGDVTLAMINRKGFDYW

SEQ ID NO: 13230 - protein, 23 aa, Homo sapiens
CAVFPFGDYYDSSGYYLHSPDYW

SEQ ID NO: 13231 - protein, 20 aa, Homo sapiens
CARERAYDSSGYYGYYFDYW

SEQ ID NO: 13232 - protein, 17 aa, Homo sapiens
CARQGDYVWGSYRFDYW

SEQ ID NO: 13233 - protein, 14 aa, Homo sapiens
CAKLVVVAPGSDYW

SEQ ID NO: 13234 - protein, 22 aa, Homo sapiens
CARAPDYYDSSAHGYEYAFDIW

SEQ ID NO: 13235 - protein, 27 aa, Homo sapiens
CARGSYDGGTQWGLLILGVPTGYFDYW

SEQ ID NO: 13236 - protein, 23 aa, Homo sapiens
CARGPRGYCSSTSCYRGHYFDYW

SEQ ID NO: 13237 - protein, 18 aa, Homo sapiens
CAKDTGFPYGDYGGVDYW

SEQ ID NO: 13238 - protein, 19 aa, Homo sapiens
CARATYSYDSNFYPTFDYW

SEQ ID NO: 13239 - protein, 29 aa, Homo sapiens
CALPISAVYYCARSVRGDSSGLGDSFDVW

SEQ ID NO: 13240 - protein, 22 aa, Homo sapiens
CARGLREAILGVVTYPSTFDYW

SEQ ID NO: 13241 - protein, 16 aa, Homo sapiens
CARVSPLADGYNLDYW

SEQ ID NO: 13242 - protein, 21 aa, Homo sapiens
CAKEYRSSSTHYYYYYNMDVW

SEQ ID NO: 13243 - protein, 24 aa, Homo sapiens
CARLVVGVDFWSGFKNPPFAMDVW

SEQ ID NO: 13244 - protein, 15 aa, Homo sapiens
CAKLGLEQGDAFDIW

SEQ ID NO: 13245 - protein, 29 aa, Homo sapiens
CAKDPKYYDILTGYYIAPSYYYYYYMDVW

SEQ ID NO: 13246 - protein, 23 aa, Homo sapiens
CASGSLVTVTTLRPYYYYYMDVW

SEQ ID NO: 13247 - protein, 16 aa, Homo sapiens
CATGIHSSINLFFNYW

SEQ ID NO: 13248 - protein, 19 aa, Homo sapiens
CARSPGSPYYYYYYGMDVW

SEQ ID NO: 13249 - protein, 17 aa, Homo sapiens
CATESGNYSFDNAFDIW

SEQ ID NO: 13250 - protein, 21 aa, Homo sapiens
CAREVSRYSSSWQNLGGYDYW

SEQ ID NO: 13251 - protein, 16 aa, Homo sapiens
CTTWHNWNYEGAFDIW

SEQ ID NO: 13252 - protein, 24 aa, Homo sapiens
CTTDQTLRGGVITTDYYYYGMDVW

SEQ ID NO: 13253 - protein, 19 aa, Homo sapiens
CARNYDSGRYWPIGAFDIW

SEQ ID NO: 13254 - protein, 18 aa, Homo sapiens
CAKDKSPQLLRWGWFDPW

SEQ ID NO: 13255 - protein, 15 aa, Homo sapiens
CAKGRGGYYSYFDYW

SEQ ID NO: 13256 - protein, 13 aa, Homo sapiens
CAKDSHGGTYDYW

SEQ ID NO: 13257 - protein, 15 aa, Homo sapiens
CQSADISGTYPPVLF

SEQ ID NO: 13258 - protein, 18 aa, Homo sapiens
CATALGHYGDYLDAFDIW

SEQ ID NO: 13259 - protein, 25 aa, Homo sapiens
CARDLSTIFGVVREAHTPSDAFDIW

SEQ ID NO: 13260 - protein, 18 aa, Homo sapiens
CARDKVSIVAAIGPFDCW

SEQ ID NO: 13261 - protein, 19 aa, Homo sapiens
CAKAPWIQLGDEDGYFDYW

SEQ ID NO: 13262 - protein, 17 aa, Homo sapiens
CATLPTTVTTDDAFDIW

SEQ ID NO: 13263 - protein, 21 aa, Homo sapiens
CARHGMYDILTGSSTRYFDYW

SEQ ID NO: 13264 - protein, 16 aa, Homo sapiens
CARLNALEEEYYFDYW

SEQ ID NO: 13265 - protein, 26 aa, Homo sapiens
CARDWGTDYDFWSGYSRYYYYYMDVW

SEQ ID NO: 13266 - protein, 20 aa, Homo sapiens
CDWSSDVCSSDLHYSWFDTW

SEQ ID NO: 13267 - protein, 11 aa, Homo sapiens
CLQHYSYHWTF

SEQ ID NO: 13268 - protein, 19 aa, Homo sapiens
CAKVGRLAVAGTGTETDYW

SEQ ID NO: 13269 - protein, 17 aa, Homo sapiens
CARPTMVLTGDDAFDIW

SEQ ID NO: 13270 - protein, 15 aa, Homo sapiens
CVRDQWWGGALFDPW

SEQ ID NO: 13271 - protein, 19 aa, Homo sapiens
CAREGELASTAMVTGFDYW

SEQ ID NO: 13272 - protein, 20 aa, Homo sapiens
CARVSSGWQTDYYYYYMDVW

SEQ ID NO: 13273 - protein, 21 aa, Homo sapiens
CARDRFVAIPGSPVLAWFDPW

SEQ ID NO: 13274 - protein, 19 aa, Homo sapiens
CAKDRGSTYSSSWYYFDYW

SEQ ID NO: 13275 - protein, 15 aa, Homo sapiens
CASLRSPYGGNSDYW

SEQ ID NO: 13276 - protein, 14 aa, Homo sapiens
CQQRSIWPPYMYSF

SEQ ID NO: 13277 - protein, 19 aa, Homo sapiens
CAKTGGDSSSIEEDPFDYW

SEQ ID NO: 13278 - protein, 18 aa, Homo sapiens
CARAQRGSTMIVVGYDYW

SEQ ID NO: 13279 - protein, 17 aa, Homo sapiens
CARDLLYSSGWYKIDYW

SEQ ID NO: 13280 - protein, 14 aa, Homo sapiens
CARDLYYDSLLDYW

SEQ ID NO: 13281 - protein, 16 aa, Homo sapiens
CARERGGGWTAAFDYW

SEQ ID NO: 13282 - protein, 33 aa, Homo sapiens
CAKDLRYYDFWSGYIGGSEARPYYYYYYGMDVW

SEQ ID NO: 13283 - protein, 16 aa, Homo sapiens
CAKDISSYDSSGSDYW

SEQ ID NO: 13284 - protein, 21 aa, Homo sapiens
CASGPPYYDFWSGYYPPIDYW

SEQ ID NO: 13285 - protein, 23 aa, Homo sapiens
CARRVVSYDYVWGSYRWGWFDPW

SEQ ID NO: 13286 - protein, 20 aa, Homo sapiens
CARYPYYYDSSGQKGAFDYW

SEQ ID NO: 13287 - protein, 21 aa, Homo sapiens
CARDRARYYYDSSGYPLPDYW

SEQ ID NO: 13288 - protein, 19 aa, Homo sapiens
CARALRRTRFFYYYYMDVW

SEQ ID NO: 13289 - protein, 13 aa, Homo sapiens
CQLYGGSPPTFTF

SEQ ID NO: 13290 - protein, 25 aa, Homo sapiens
CASSELGYSSSSLGSPYYYYVMDVW

SEQ ID NO: 13291 - protein, 17 aa, Homo sapiens
CARLYDSRVYYYGMDVW

SEQ ID NO: 13292 - protein, 17 aa, Homo sapiens
CTRTPSSSHGGYYFDYW

SEQ ID NO: 13293 - protein, 20 aa, Homo sapiens
CAKDQRGYSYGWSYYYFDYW

SEQ ID NO: 13294 - protein, 18 aa, Homo sapiens
CAGFGYSGYDFLYYMDVW

SEQ ID NO: 13295 - protein, 23 aa, Homo sapiens
CATGGYCSSTSCPSDYYYGMDVW

SEQ ID NO: 13296 - protein, 15 aa, Homo sapiens
CVHLYYDSFGGFDYW

SEQ ID NO: 13297 - protein, 19 aa, Homo sapiens
CAKTPENGYDSSGYYFDYW

SEQ ID NO: 13298 - protein, 20 aa, Homo sapiens
CARETFVADIVVVRDAADYW

SEQ ID NO: 13299 - protein, 26 aa, Homo sapiens
CARDGRANLNYDFWSGYPNGGWFDPW

SEQ ID NO: 13300 - protein, 15 aa, Homo sapiens
CASPPVYSEYYFDYW

SEQ ID NO: 13301 - protein, 16 aa, Homo sapiens
CARNRALITIPNFDYW

SEQ ID NO: 13302 - protein, 21 aa, Homo sapiens
CARRVGLRYFDWFKNNWFDPW

SEQ ID NO: 13303 - protein, 24 aa, Homo sapiens
CARGTVGATTLGFLVYYYYGMDVW

SEQ ID NO: 13304 - protein, 17 aa, Homo sapiens
CATIPDIAAADWYFDLW

SEQ ID NO: 13305 - protein, 21 aa, Homo sapiens
CARNLLWFGELLFPDNAFDIW

SEQ ID NO: 13306 - protein, 13 aa, Homo sapiens
CARVYDSTAFDVW

SEQ ID NO: 13307 - protein, 24 aa, Homo sapiens
CAKDLMYAVPILGGIAAAGLFDYW

SEQ ID NO: 13308 - protein, 19 aa, Homo sapiens
CARLSVPFTVTTLSAFDIW

SEQ ID NO: 13309 - protein, 15 aa, Homo sapiens
CATNLISSGWYHYYW

SEQ ID NO: 13310 - protein, 22 aa, Homo sapiens
CEKGREYWSDTCFPNDRDVDYW

SEQ ID NO: 13311 - protein, 21 aa, Homo sapiens
CAIALPEDITMVRGVAPFDYW

SEQ ID NO: 13312 - protein, 15 aa, Homo sapiens
CTRVSFSGDTYFQHW

SEQ ID NO: 13313 - protein, 21 aa, Homo sapiens
CARHNAAVSGTVYYYYYMDVW

SEQ ID NO: 13314 - protein, 31 aa, Homo sapiens
CARDGTYYDFWSGYLAPSIPHYYYYYGMDVW

SEQ ID NO: 13315 - protein, 15 aa, Homo sapiens
CARRNFDEINYFDPW

SEQ ID NO: 13316 - protein, 16 aa, Homo sapiens
CARLDDVDTAMVMDYW

SEQ ID NO: 13317 - protein, 16 aa, Homo sapiens
CAHRPPGWLRPYFDYW

SEQ ID NO: 13318 - protein, 18 aa, Homo sapiens
CAKDIRPIAVAGYYFDYW

SEQ ID NO: 13319 - protein, 16 aa, Homo sapiens
CAKDISGYSYGCLDYW

SEQ ID NO: 13320 - protein, 23 aa, Homo sapiens
CVRDGGYYDGSGFYSDHGAFDIW

SEQ ID NO: 13321 - protein, 19 aa, Homo sapiens
CVCGYSYGYDPPSNQNDYW

SEQ ID NO: 13322 - protein, 24 aa, Homo sapiens
CARVPWYYYDSSGYWPGGYYFDYW

SEQ ID NO: 13323 - protein, 16 aa, Homo sapiens
CAKGSIAVAGTFSDYW

SEQ ID NO: 13324 - protein, 20 aa, Homo sapiens
CARGPERELFRYYYYYMDVW

SEQ ID NO: 13325 - protein, 17 aa, Homo sapiens
CAHRHETWSMDDAFDIW

SEQ ID NO: 13326 - protein, 11 aa, Homo sapiens
CFQATHWPRAF

SEQ ID NO: 13327 - protein, 14 aa, Homo sapiens
CARGAGDIYYFDYW

SEQ ID NO: 13328 - protein, 22 aa, Homo sapiens
CAKESKAVYTNSWSHYDAFDVW

SEQ ID NO: 13329 - protein, 21 aa, Homo sapiens
CARDRGYYYDSFARIGAFDIW

SEQ ID NO: 13330 - protein, 19 aa, Homo sapiens
CASTRGYTGYILQSYFDNW

SEQ ID NO: 13331 - protein, 13 aa, Homo sapiens
CQQGSSYPPVFTF

SEQ ID NO: 13332 - protein, 18 aa, Homo sapiens
CARDPWPIAARPYYFDYW

SEQ ID NO: 13333 - protein, 19 aa, Homo sapiens
CARGHSSGAVYYYYYMDVW

SEQ ID NO: 13334 - protein, 15 aa, Homo sapiens
CATDGLFLRWYFDYW

SEQ ID NO: 13335 - protein, 19 aa, Homo sapiens
CARESFSPYSSSSGTFDNW

SEQ ID NO: 13336 - protein, 16 aa, Homo sapiens
CAREDLYNISPYVDAW

SEQ ID NO: 13337 - protein, 16 aa, Homo sapiens
CAKDLRDDYGGWFDPW

SEQ ID NO: 13338 - protein, 18 aa, Homo sapiens
CARLSNWNYEGSGIFDYW

SEQ ID NO: 13339 - protein, 17 aa, Homo sapiens
CARLFRYYYDSSGPDYW

SEQ ID NO: 13340 - protein, 20 aa, Homo sapiens
CARVELPTHNYYYYYGMDVW

SEQ ID NO: 13341 - protein, 15 aa, Homo sapiens
CTYTSYGPWRAADYW

SEQ ID NO: 13342 - protein, 16 aa, Homo sapiens
CAKRGNPTTITVFDSW

SEQ ID NO: 13343 - protein, 14 aa, Homo sapiens
CAKEGTGSHAIDYW

SEQ ID NO: 13344 - protein, 15 aa, Homo sapiens
CARVTARPVDYFDYW

SEQ ID NO: 13345 - protein, 17 aa, Homo sapiens
CASGDTFGGLFSGFTYW

SEQ ID NO: 13346 - protein, 14 aa, Homo sapiens
CAGYYTIGYYFDYW

SEQ ID NO: 13347 - protein, 24 aa, Homo sapiens
CDWSSDVCSSDLYDSGRNPQIDYW

SEQ ID NO: 13348 - protein, 21 aa, Homo sapiens
CARALTYYYDSSGYATGVDYW

SEQ ID NO: 13349 - protein, 17 aa, Homo sapiens
CARDRRDGYQAYYFDSW

SEQ ID NO: 13350 - protein, 15 aa, Homo sapiens
CAKAPMGLTVYFDYW

SEQ ID NO: 13351 - protein, 17 aa, Homo sapiens
CAREVPPLFGTHWFDPW

SEQ ID NO: 13352 - protein, 14 aa, Homo sapiens
CAKFPVAGNAFDIW

SEQ ID NO: 13353 - protein, 18 aa, Homo sapiens
CARDLEGSTPNPDDMDVW

SEQ ID NO: 13354 - protein, 24 aa, Homo sapiens
CAREHQLYYDILTGYYYYYYMDVW

SEQ ID NO: 13355 - protein, 13 aa, Homo sapiens
CHVWDSSSDRWLF

SEQ ID NO: 13356 - protein, 23 aa, Homo sapiens
CARHLRHSTFIGSYYMSYYMDVW

SEQ ID NO: 13357 - protein, 22 aa, Homo sapiens
CARHPPDYVWGSYRYQSWFDPW

SEQ ID NO: 13358 - protein, 13 aa, Homo sapiens
CQQYKKSPPGAAF

SEQ ID NO: 13359 - protein, 21 aa, Homo sapiens
CARVGRRDNSSSDWNYYFDYW

SEQ ID NO: 13360 - protein, 16 aa, Homo sapiens
CATGPPLRFWDWFDPW

SEQ ID NO: 13361 - protein, 25 aa, Homo sapiens
CAKGTNYYDSSGYKDDYYYYGMDVW

SEQ ID NO: 13362 - protein, 20 aa, Homo sapiens
CARGGFEMITFGGDPYFDYW

SEQ ID NO: 13363 - protein, 15 aa, Homo sapiens
CAKQGRNSGSYFDYW

SEQ ID NO: 13364 - protein, 18 aa, Homo sapiens
CTTDSRYDFWSGRVFDYW

SEQ ID NO: 13365 - protein, 14 aa, Homo sapiens
CTSSGWYLGWFDPW

SEQ ID NO: 13366 - protein, 18 aa, Homo sapiens
CAKLLSGIAVAGTVFDYW

SEQ ID NO: 13367 - protein, 22 aa, Homo sapiens
CTTDQVGLYYDILTGNPGFDPW

SEQ ID NO: 13368 - protein, 15 aa, Homo sapiens
CAHKVLVGATAFDIW

SEQ ID NO: 13369 - protein, 22 aa, Homo sapiens
CAKFQDPQARYYYDSSGYNDYW

SEQ ID NO: 13370 - protein, 17 aa, Homo sapiens
CARDHGFDSSGFYADYW

SEQ ID NO: 13371 - protein, 27 aa, Homo sapiens
CARHAGGGYDFTQSTPPTFNYYYMDVW

SEQ ID NO: 13372 - protein, 18 aa, Homo sapiens
CARDWTWSGYYLEYFQHW

SEQ ID NO: 13373 - protein, 21 aa, Homo sapiens
CARDALNYGDFGGIDWYFDLW

SEQ ID NO: 13374 - protein, 22 aa, Homo sapiens
CARVPGDYVWGSYLVPNYFDYW

SEQ ID NO: 13375 - protein, 19 aa, Homo sapiens
CARHERRWLQLSVSWFDPW

SEQ ID NO: 13376 - protein, 25 aa, Homo sapiens
CAKDLKQSWHDYVWGIINLDAFDIW

SEQ ID NO: 13377 - protein, 19 aa, Homo sapiens
CARDGVSYSSGRSVGFDYW

SEQ ID NO: 13378 - protein, 19 aa, Homo sapiens
CAKDVRCSDISCYYGFDYW

SEQ ID NO: 13379 - protein, 26 aa, Homo sapiens
CARVSRYSSGWYDMAVIAPYSYMDVW

SEQ ID NO: 13380 - protein, 18 aa, Homo sapiens
CAKSRGWELPQLPYFDYW

SEQ ID NO: 13381 - protein, 15 aa, Homo sapiens
CAKVRGSGYSLVDYW

SEQ ID NO: 13382 - protein, 22 aa, Homo sapiens
CARDYASSGYYAPDVYWYFDLW

SEQ ID NO: 13383 - protein, 24 aa, Homo sapiens
CARGTKGNFDWLFKTDYYYYMDVW

SEQ ID NO: 13384 - protein, 15 aa, Homo sapiens
CARGPRTPMVEIDYW

SEQ ID NO: 13385 - protein, 19 aa, Homo sapiens
CVKDKACRGGSCGTPFDYW

SEQ ID NO: 13386 - protein, 18 aa, Homo sapiens
CAKGYRQDVPNTRCFDFW

SEQ ID NO: 13387 - protein, 21 aa, Homo sapiens
CAKDNIVVVTAILTYNWFDPW

SEQ ID NO: 13388 - protein, 18 aa, Homo sapiens
CARAGVGATLDINAFDIW

SEQ ID NO: 13389 - protein, 23 aa, Homo sapiens
CASNDIVATMTQNYYYYYGMDVW

SEQ ID NO: 13390 - protein, 17 aa, Homo sapiens
CARVPIWSIWSGYLDYW

SEQ ID NO: 13391 - protein, 19 aa, Homo sapiens
CAKEYYDSSRSFVHVFDIW

SEQ ID NO: 13392 - protein, 20 aa, Homo sapiens
CAHRLKGVGASWNWGDFDYW

SEQ ID NO: 13393 - protein, 24 aa, Homo sapiens
CAREPQHYDFWSAHTNRLHAMDVW

SEQ ID NO: 13394 - protein, 21 aa, Homo sapiens
CATGPPYSSGWPEFSNWFDPW

SEQ ID NO: 13395 - protein, 17 aa, Homo sapiens
CARGQNYNWNYVGFDYW

SEQ ID NO: 13396 - protein, 18 aa, Homo sapiens
CARHNTPWLVRTYYFDYW

SEQ ID NO: 13397 - protein, 21 aa, Homo sapiens
CASPGGFLEWLLGPTDAFDIW

SEQ ID NO: 13398 - protein, 17 aa, Homo sapiens
CARRKQGDSYPPYFDYW

SEQ ID NO: 13399 - protein, 17 aa, Homo sapiens
CARDQRATVIYDAFDIW

SEQ ID NO: 13400 - protein, 19 aa, Homo sapiens
CARGPLADCGVDCHVYDYW

SEQ ID NO: 13401 - protein, 20 aa, Homo sapiens
CTTDRVWMYSSGWYVYWDYW

SEQ ID NO: 13402 - protein, 16 aa, Homo sapiens
CAKGDTAMVTTMFDYW

SEQ ID NO: 13403 - protein, 16 aa, Homo sapiens
CARGQIPIVFHWFDPW

SEQ ID NO: 13404 - protein, 29 aa, Homo sapiens
CARDRSLKRYCSGGSCLMGYYYYYYMDVW

SEQ ID NO: 13405 - protein, 21 aa, Homo sapiens
CARVEVIAVAGYYYYYGMDVW

SEQ ID NO: 13406 - protein, 11 aa, Homo sapiens
CQQSDIMPITF

SEQ ID NO: 13407 - protein, 16 aa, Homo sapiens
CATTTVITLGGWFDPW

SEQ ID NO: 13408 - protein, 15 aa, Homo sapiens
CARLFNAHAGYFDYW

SEQ ID NO: 13409 - protein, 25 aa, Homo sapiens
CAKDIRRFGELLKPPYYYYYYMDVW

SEQ ID NO: 13410 - protein, 19 aa, Homo sapiens
CAKGEFGSSSWQDWYFDLW

SEQ ID NO: 13411 - protein, 24 aa, Homo sapiens
CARVPFPYSSSWTRPYYYYGMDVW

SEQ ID NO: 13412 - protein, 14 aa, Homo sapiens
CARLLVVTRDFDYW

SEQ ID NO: 13413 - protein, 16 aa, Homo sapiens
CARWGGTYSHWYFDLW

SEQ ID NO: 13414 - protein, 14 aa, Homo sapiens
CAKSDGTAADFDYW

SEQ ID NO: 13415 - protein, 14 aa, Homo sapiens
CARKKWLAYAFDIW

SEQ ID NO: 13416 - protein, 19 aa, Homo sapiens
CALPICPFALERYSYMDVW

SEQ ID NO: 13417 - protein, 17 aa, Homo sapiens
CAKDQSYSYGETYFDYW

SEQ ID NO: 13418 - protein, 13 aa, Homo sapiens
CQHYGNLPLRVTF

SEQ ID NO: 13419 - protein, 18 aa, Homo sapiens
CARVEMDFWSDGEAFDIW

SEQ ID NO: 13420 - protein, 18 aa, Homo sapiens
CARDPPPYSSSWSHFDYW

SEQ ID NO: 13421 - protein, 15 aa, Homo sapiens
CAKDTYDSSGYVTYW

SEQ ID NO: 13422 - protein, 19 aa, Homo sapiens
CAKEGGVDVTQGRLNFEYW

SEQ ID NO: 13423 - protein, 14 aa, Homo sapiens
CAKGPSTGGYADYW

SEQ ID NO: 13424 - protein, 19 aa, Homo sapiens
CARGLLGYCSSTSCDLDYW

SEQ ID NO: 13425 - protein, 16 aa, Homo sapiens
CATSRDYGDHGPFDYW

SEQ ID NO: 13426 - protein, 18 aa, Homo sapiens
CARENYYDSSVGPYFDYW

SEQ ID NO: 13427 - protein, 23 aa, Homo sapiens
CARDFRKYAYDLWWYPDYYFDYW

SEQ ID NO: 13428 - protein, 19 aa, Homo sapiens
CAGNIVVVVAAMSAAFDIW

SEQ ID NO: 13429 - protein, 21 aa, Homo sapiens
CARTAMDFSEPYYYYYYMDVW

SEQ ID NO: 13430 - protein, 16 aa, Homo sapiens
CARGVSGTEYWFFDLW

SEQ ID NO: 13431 - protein, 25 aa, Homo sapiens
CAKDIRSCSGGRCYFLGGEHAFDSW

SEQ ID NO: 13432 - protein, 20 aa, Homo sapiens
CASTLGEYQLLFYYYGMDVW

SEQ ID NO: 13433 - protein, 15 aa, Homo sapiens
CAKFGDYDFSPADYW

SEQ ID NO: 13434 - protein, 17 aa, Homo sapiens
CATIGGYSYGHDAFDIW

SEQ ID NO: 13435 - protein, 20 aa, Homo sapiens
CARMWVDCSGGSCFYWFDPW

SEQ ID NO: 13436 - protein, 13 aa, Homo sapiens
CARDNTHWSVDYW

SEQ ID NO: 13437 - protein, 16 aa, Homo sapiens
CAKINWNDEGSLGDYW

SEQ ID NO: 13438 - protein, 16 aa, Homo sapiens
CQQYDNLPPTGNLITF

SEQ ID NO: 13439 - protein, 17 aa, Homo sapiens
CARTAIPARPGFAMDVW

SEQ ID NO: 13440 - protein, 20 aa, Homo sapiens
CTTDGAKLRFLEWLLDFDYW

SEQ ID NO: 13441 - protein, 13 aa, Homo sapiens
CLSADSRGTHPVF

SEQ ID NO: 13442 - protein, 17 aa, Homo sapiens
CAKTLTVGSLTGPFDYW

SEQ ID NO: 13443 - protein, 17 aa, Homo sapiens
CAKEGYIAARHIVLDYW

SEQ ID NO: 13444 - protein, 17 aa, Homo sapiens
CAKDLGDDYGDYGPDYW

SEQ ID NO: 13445 - protein, 21 aa, Homo sapiens
CASLLSYSGSYYGYYYGMDVW

SEQ ID NO: 13446 - protein, 17 aa, Homo sapiens
CARGQPQQQLGYYFDFW

SEQ ID NO: 13447 - protein, 25 aa, Homo sapiens
CASPGGHYDILTGYYVGTDNYFDYW

SEQ ID NO: 13448 - protein, 14 aa, Homo sapiens
CAREGDGYNGIDYW

SEQ ID NO: 13449 - protein, 20 aa, Homo sapiens
CASTLFGVADYYYYYYMDVW

SEQ ID NO: 13450 - protein, 19 aa, Homo sapiens
CARELNSSDQKWRDYFDYW

SEQ ID NO: 13451 - protein, 20 aa, Homo sapiens
CAMYGGGVWSDYYYYYMDVW

SEQ ID NO: 13452 - protein, 15 aa, Homo sapiens
CVKDTAMVHDGMDIW

SEQ ID NO: 13453 - protein, 18 aa, Homo sapiens
CARINSGWTEVLDGMDVW

SEQ ID NO: 13454 - protein, 20 aa, Homo sapiens
CAKLPTKSGYSYGSDAFDIW

SEQ ID NO: 13455 - protein, 16 aa, Homo sapiens
CARDAANSSGWYLNYW

SEQ ID NO: 13456 - protein, 12 aa, Homo sapiens
CAKGGNYFFDYW

SEQ ID NO: 13457 - protein, 15 aa, Homo sapiens
CARGVYYQYYYLDVW

SEQ ID NO: 13458 - protein, 26 aa, Homo sapiens
CARESGEVYSSRGWGFYYYYYYMDVW

SEQ ID NO: 13459 - protein, 17 aa, Homo sapiens
CARVHGYISTWYDFDYW

SEQ ID NO: 13460 - protein, 16 aa, Homo sapiens
CATGRQLWVVGWFDPW

SEQ ID NO: 13461 - protein, 22 aa, Homo sapiens
CARGLPSRTPYSSAYRGAYDIW

SEQ ID NO: 13462 - protein, 19 aa, Homo sapiens
CAKDTNYYDTSGTDAFDIW

SEQ ID NO: 13463 - protein, 13 aa, Homo sapiens
CAAFSHGDYVDYW

SEQ ID NO: 13464 - protein, 23 aa, Homo sapiens
CATDFGGPKDCSSTSCYSPFGYW

SEQ ID NO: 13465 - protein, 14 aa, Homo sapiens
CGRLNKDWNYFDFW

SEQ ID NO: 13466 - protein, 19 aa, Homo sapiens
CATPRSPYYYDSSGPLDYW

SEQ ID NO: 13467 - protein, 24 aa, Homo sapiens
CTTDTGIGSPYSGSQEGSIAFHVW

SEQ ID NO: 13468 - protein, 15 aa, Homo sapiens
CARDHDDVDDVFDVW

SEQ ID NO: 13469 - protein, 23 aa, Homo sapiens
CARDGYCSSTTCYNFYYDGLDVW

SEQ ID NO: 13470 - protein, 15 aa, Homo sapiens
CATRPLHSSSPFDYW

SEQ ID NO: 13471 - protein, 17 aa, Homo sapiens
CARDYEDGYGTPFFDHW

SEQ ID NO: 13472 - protein, 17 aa, Homo sapiens
CARAFTTGMTGVWFDPW

SEQ ID NO: 13473 - protein, 16 aa, Homo sapiens
CAKSLSGSYTPYFDYW

SEQ ID NO: 13474 - protein, 24 aa, Homo sapiens
CAKDPQRRYYYDSSGYYYGYFQHW

SEQ ID NO: 13475 - protein, 14 aa, Homo sapiens
CAKLPTIEGLFDYW

SEQ ID NO: 13476 - protein, 18 aa, Homo sapiens
CARGVVPPVRGKNWFDPW

SEQ ID NO: 13477 - protein, 18 aa, Homo sapiens
CARDPKALGPSSDGMDVW

SEQ ID NO: 13478 - protein, 20 aa, Homo sapiens
CANLGQAGTEYYYYYGMDVW

SEQ ID NO: 13479 - protein, 15 aa, Homo sapiens
CANSLSSSPPGFDYW

SEQ ID NO: 13480 - protein, 20 aa, Homo sapiens
CARRGTTVTTYDYYYYMDVW

SEQ ID NO: 13481 - protein, 19 aa, Homo sapiens
CARDPTDDYGDYVGYFDYW

SEQ ID NO: 13482 - protein, 28 aa, Homo sapiens
CARDLDEDYDFWSGPFGVRSIRYYFDYW

SEQ ID NO: 13483 - protein, 24 aa, Homo sapiens
CARHAEDIVLVVYAPASYYYMDVW

SEQ ID NO: 13484 - protein, 26 aa, Homo sapiens
CARQKDIVVVPATRPDYYYYYGMDVW

SEQ ID NO: 13485 - protein, 21 aa, Homo sapiens
CARHNGYELWNGYAPYYFDYW

SEQ ID NO: 13486 - protein, 19 aa, Homo sapiens
CAHDDISSGGYDSDAFDIW

SEQ ID NO: 13487 - protein, 42 aa, Homo sapiens
CDWSSDVCSSDLDTAVYYCTRGNLGDFWTPYYSGRNNWFDPW

SEQ ID NO: 13488 - protein, 15 aa, Homo sapiens
CARDWGSSTWIFDYW

SEQ ID NO: 13489 - protein, 23 aa, Homo sapiens
CAKDSIPFYYDSSGYGTNWFDPW

SEQ ID NO: 13490 - protein, 19 aa, Homo sapiens
CAHRGYYYDSSLLGYFDYW

SEQ ID NO: 13491 - protein, 22 aa, Homo sapiens
CARHVGVVVVVVITGPYYFDYW

SEQ ID NO: 13492 - protein, 17 aa, Homo sapiens
CANGATYDSSDYYTGYW

SEQ ID NO: 13493 - protein, 25 aa, Homo sapiens
CARGGGYYDSSGYHVGFANLAFDYW

SEQ ID NO: 13494 - protein, 18 aa, Homo sapiens
CARTSSGWRNYYYYMDVW

SEQ ID NO: 13495 - protein, 18 aa, Homo sapiens
CAKVLYSYGYSTGCFDYW

SEQ ID NO: 13496 - protein, 15 aa, Homo sapiens
CAKAPWMLEGVFDYW

SEQ ID NO: 13497 - protein, 18 aa, Homo sapiens
CTRADYGDPPRGEYFDYW

SEQ ID NO: 13498 - protein, 22 aa, Homo sapiens
CAHRPTYYYDSSGYRRDAFDIW

SEQ ID NO: 13499 - protein, 21 aa, Homo sapiens
CAKGSITIFGVVISTDAFDIW

SEQ ID NO: 13500 - protein, 16 aa, Homo sapiens
CARESGDFWSGGFDYW

SEQ ID NO: 13501 - protein, 22 aa, Homo sapiens
CARHGPHRLTIPTGPAFAMDVW

SEQ ID NO: 13502 - protein, 19 aa, Homo sapiens
CARDCSSTSCYAEGAFDIW

SEQ ID NO: 13503 - protein, 16 aa, Homo sapiens
CATSYSVVVPAAIDYW

SEQ ID NO: 13504 - protein, 21 aa, Homo sapiens
CARGVEMTTNPPDYYYYMDVW

SEQ ID NO: 13505 - protein, 21 aa, Homo sapiens
CARGTKTYYDILTGYYPFDYW

SEQ ID NO: 13506 - protein, 16 aa, Homo sapiens
CAKDQYGGNPWYFDYW

SEQ ID NO: 13507 - protein, 24 aa, Homo sapiens
CAREAPGYCSGGSCYSVGLTFDYW

SEQ ID NO: 13508 - protein, 18 aa, Homo sapiens
CARYCVDLVATSNWFDPW

SEQ ID NO: 13509 - protein, 15 aa, Homo sapiens
CASISGTVEVTFDYW

SEQ ID NO: 13510 - protein, 20 aa, Homo sapiens
CARDRGRGYTGGYISFFDLW

SEQ ID NO: 13511 - protein, 16 aa, Homo sapiens
CARILSIREGYYMDVW

SEQ ID NO: 13512 - protein, 20 aa, Homo sapiens
CATVPPPIPAAIGAYYFDYW

SEQ ID NO: 13513 - protein, 19 aa, Homo sapiens
CATVLHYYGDPVEHWFDPW

SEQ ID NO: 13514 - protein, 24 aa, Homo sapiens
CARDRRVRVYCSSTSCPTAAFDIW

SEQ ID NO: 13515 - protein, 19 aa, Homo sapiens
CARGSDMITFGGSNFFDPW

SEQ ID NO: 13516 - protein, 19 aa, Homo sapiens
CARGPDYYDRSSLGYFDYW

SEQ ID NO: 13517 - protein, 22 aa, Homo sapiens
CARDDDYYDSSGPYYYRGMDVW

SEQ ID NO: 13518 - protein, 24 aa, Homo sapiens
CARDAQANYDFWSGDYYYYGMDVW

SEQ ID NO: 13519 - protein, 22 aa, Homo sapiens
CAREVENDFWSGYRSVNWFDPW

SEQ ID NO: 13520 - protein, 30 aa, Homo sapiens
CARDSKYYDFWSGYYIEGLSFPDYYYMDVW

SEQ ID NO: 13521 - protein, 21 aa, Homo sapiens
CAKCQYYDFWSGYQDWYFDLW

SEQ ID NO: 13522 - protein, 14 aa, Homo sapiens
CQAWDSGTAWGVVF

SEQ ID NO: 13523 - protein, 14 aa, Homo sapiens
CTTPWEYTSDFDHW

SEQ ID NO: 13524 - protein, 26 aa, Homo sapiens
CARGLRYFDWSFLSPEYYYYYYMDVW

SEQ ID NO: 13525 - protein, 14 aa, Homo sapiens
CARLSGVLPFFEYW

SEQ ID NO: 13526 - protein, 14 aa, Homo sapiens
CARTAMASKFFDYW

SEQ ID NO: 13527 - protein, 23 aa, Homo sapiens
CATLVGSYFDSRGHYYVAIFDIW

SEQ ID NO: 13528 - protein, 17 aa, Homo sapiens
CARDPVVGATRGWFDPW

SEQ ID NO: 13529 - protein, 22 aa, Homo sapiens
CASSSYYYDSSGYLPDGVGDYW

SEQ ID NO: 13530 - protein, 23 aa, Homo sapiens
CARGRGVFCSSTSCYNSGWFDPW

SEQ ID NO: 13531 - protein, 14 aa, Homo sapiens
CARCLGYSQWFDLW

SEQ ID NO: 13532 - protein, 16 aa, Homo sapiens
CLRLGGDSTGDAFDIW

SEQ ID NO: 13533 - protein, 15 aa, Homo sapiens
CARQHGTWRRDFDYW

SEQ ID NO: 13534 - protein, 17 aa, Homo sapiens
CARETGTTSYYYYMDVW

SEQ ID NO: 13535 - protein, 17 aa, Homo sapiens
CARGQTAGWELLRFDYW

SEQ ID NO: 13536 - protein, 16 aa, Homo sapiens
CARHRFRSGNHYFDNW

SEQ ID NO: 13537 - protein, 21 aa, Homo sapiens
CTRAVYYYGSGSYYNHPIDYW

SEQ ID NO: 13538 - protein, 24 aa, Homo sapiens
CARDYDILTGYYTNYYYYYYMDVW

SEQ ID NO: 13539 - protein, 17 aa, Homo sapiens
CVRAYYDASGLQYLDFW

SEQ ID NO: 13540 - protein, 19 aa, Homo sapiens
CAIPLYDYVWGSYPTFDYW

SEQ ID NO: 13541 - protein, 21 aa, Homo sapiens
CARDFGFVGGTMGRGETIDYW

SEQ ID NO: 13542 - protein, 12 aa, Homo sapiens
CCSSSVEDFQHW

SEQ ID NO: 13543 - protein, 17 aa, Homo sapiens
CAKTPFFSGSYFRFHYW

SEQ ID NO: 13544 - protein, 19 aa, Homo sapiens
CTRDRGGDYGYYYYGMDVW

SEQ ID NO: 13545 - protein, 20 aa, Homo sapiens
CAREDRLLWFGESNYYFDYW

SEQ ID NO: 13546 - protein, 17 aa, Homo sapiens
CARERIAVAGTEYFQHW

SEQ ID NO: 13547 - protein, 17 aa, Homo sapiens
CARVSAPWFGVDWFDPW

SEQ ID NO: 13548 - protein, 30 aa, Homo sapiens
CARGVSDYSGYDFWSGYYTGIYYYYYMDVW

SEQ ID NO: 13549 - protein, 18 aa, Homo sapiens
CAKEVSDSSGYRDALDIW

SEQ ID NO: 13550 - protein, 12 aa, Homo sapiens
CVQRSKWPSLTF

SEQ ID NO: 13551 - protein, 23 aa, Homo sapiens
CAKSTLRSKRIFGVVKDDFFDVW

SEQ ID NO: 13552 - protein, 23 aa, Homo sapiens
CERDRLDEVTAIPGPINWYFDLW

SEQ ID NO: 13553 - protein, 28 aa, Homo sapiens
CAKDGLHPSFIVRGILSYYYDSSGYDYW

SEQ ID NO: 13554 - protein, 25 aa, Homo sapiens
CARARHLRFLEWSIPLYYYYYMDVW

SEQ ID NO: 13555 - protein, 17 aa, Homo sapiens
CATSFAVYSGWSHTDYW

SEQ ID NO: 13556 - protein, 14 aa, Homo sapiens
CAHISITGGTVDYW

SEQ ID NO: 13557 - protein, 18 aa, Homo sapiens
CARPLFPLAARRPISDYW

SEQ ID NO: 13558 - protein, 17 aa, Homo sapiens
CTRVAKRGYTFASFDYW

SEQ ID NO: 13559 - protein, 15 aa, Homo sapiens
CAHRQGVFWLPIDYW

SEQ ID NO: 13560 - protein, 20 aa, Homo sapiens
CAKESSPLHCGGDCYLGDYW

SEQ ID NO: 13561 - protein, 29 aa, Homo sapiens
CARDGQYYDILTGYFGPRDYYYYYYMDVW

SEQ ID NO: 13562 - protein, 17 aa, Homo sapiens
CAHRRPTVTVYDAFEIW

SEQ ID NO: 13563 - protein, 20 aa, Homo sapiens
CARHSRRGVVVPAATWFDPW

SEQ ID NO: 13564 - protein, 18 aa, Homo sapiens
CAKESHGGVLAGGSFDHW

SEQ ID NO: 13565 - protein, 14 aa, Homo sapiens
CQVWHSTSDHSVVF

SEQ ID NO: 13566 - protein, 25 aa, Homo sapiens
CATTDPGALMVYAISGLFLYAFDIW

SEQ ID NO: 13567 - protein, 25 aa, Homo sapiens
CARGVPRRDSSGWPPPSPYWYFDLW

SEQ ID NO: 13568 - protein, 19 aa, Homo sapiens
CARVVMPPDFWSGYYMDVW

SEQ ID NO: 13569 - protein, 16 aa, Homo sapiens
CAALTVTTFNDAFDIW

SEQ ID NO: 13570 - protein, 15 aa, Homo sapiens
CARVYSNAWRNFDYW

SEQ ID NO: 13571 - protein, 16 aa, Homo sapiens
CAKGFDFWSGSQNDYW

SEQ ID NO: 13572 - protein, 21 aa, Homo sapiens
CAKDNYYYDSSGYSNWYSDLW

SEQ ID NO: 13573 - protein, 24 aa, Homo sapiens
CATAPVIAARNPGGYYYYYGMDVW

SEQ ID NO: 13574 - protein, 24 aa, Homo sapiens
CARALTYYYCSGGSCYSAEYFQHW

SEQ ID NO: 13575 - protein, 22 aa, Homo sapiens
CATAWPSRYYYDSSGREMVDYW

SEQ ID NO: 13576 - protein, 16 aa, Homo sapiens
CATSVETSVITLADYW

SEQ ID NO: 13577 - protein, 19 aa, Homo sapiens
CAKDYMPFAVVTTHWFDPW

SEQ ID NO: 13578 - protein, 21 aa, Homo sapiens
CARIRGYSDFWSGYLGFFDYW

SEQ ID NO: 13579 - protein, 13 aa, Homo sapiens
CAPGGGVGARDYW

SEQ ID NO: 13580 - protein, 14 aa, Homo sapiens
CARHPRIAADYDYW

SEQ ID NO: 13581 - protein, 22 aa, Homo sapiens
CARHFVFTIFGVVITPGWFDPW

SEQ ID NO: 13582 - protein, 18 aa, Homo sapiens
CATDRDIVVVVAATFDYW

SEQ ID NO: 13583 - protein, 25 aa, Homo sapiens
CARGRIGVTMIVVVFTGAEYYFDYW

SEQ ID NO: 13584 - protein, 20 aa, Homo sapiens
CARDYPHAHDYGGSDAFDIW

SEQ ID NO: 13585 - protein, 19 aa, Homo sapiens
CARDASGGSGWYSDWFDPW

SEQ ID NO: 13586 - protein, 14 aa, Homo sapiens
CARCFGSAWYPDYW

SEQ ID NO: 13587 - protein, 11 aa, Homo sapiens
CVAVAGFVDYW

SEQ ID NO: 13588 - protein, 17 aa, Homo sapiens
CARDLGNNWEIYYFDYW

SEQ ID NO: 13589 - protein, 14 aa, Homo sapiens
CAKLTSSWNYPDYW

SEQ ID NO: 13590 - protein, 16 aa, Homo sapiens
CAKTNTPMVPGGLDYW

SEQ ID NO: 13591 - protein, 21 aa, Homo sapiens
CARDLGYSNIRYFYYYGMDVW

SEQ ID NO: 13592 - protein, 16 aa, Homo sapiens
CARPIALPGTDAFDVW

SEQ ID NO: 13593 - protein, 27 aa, Homo sapiens
CAKAPRSMVRGVTLTGTAYYYYGMDVW

SEQ ID NO: 13594 - protein, 30 aa, Homo sapiens
CLRAEDTAVYYCASNPEDSYDLPDSAFDIW

SEQ ID NO: 13595 - protein, 21 aa, Homo sapiens
CARDAFTLRYSSGWYIPFDYW

SEQ ID NO: 13596 - protein, 22 aa, Homo sapiens
CAKDNPINYYGSGSYYNWFDPW

SEQ ID NO: 13597 - protein, 16 aa, Homo sapiens
CAKDPYPSETMAFDYW

SEQ ID NO: 13598 - protein, 18 aa, Homo sapiens
CAKQTAEVVPINCYFDLW

SEQ ID NO: 13599 - protein, 19 aa, Homo sapiens
CAGGCSSTGCYGPNWFDPW

SEQ ID NO: 13600 - protein, 19 aa, Homo sapiens
CAREGGPHYYDSSGYYGYW

SEQ ID NO: 13601 - protein, 17 aa, Homo sapiens
CATGGGSYFGHNWFDPW

SEQ ID NO: 13602 - protein, 18 aa, Homo sapiens
CARDLGEYSYGFYYFDYW

SEQ ID NO: 13603 - protein, 16 aa, Homo sapiens
CARAHWGDYFGAFDIW

SEQ ID NO: 13604 - protein, 27 aa, Homo sapiens
CARALSSSWYSPQLGDVTSEPSGLDYW

SEQ ID NO: 13605 - protein, 13 aa, Homo sapiens
CQQSYTSPPAYSF

SEQ ID NO: 13606 - protein, 24 aa, Homo sapiens
CAADPYYYDSSGSPRAYYYYMDVW

SEQ ID NO: 13607 - protein, 19 aa, Homo sapiens
CARRSALGFGELLGGFDYW

SEQ ID NO: 13608 - protein, 16 aa, Homo sapiens
CATLERSSGYQLFDYW

SEQ ID NO: 13609 - protein, 22 aa, Homo sapiens
CARASRLRFYSPVVTEYYFDYW

SEQ ID NO: 13610 - protein, 15 aa, Homo sapiens
CTCGPPQESGRFDYW

SEQ ID NO: 13611 - protein, 24 aa, Homo sapiens
CARARVEAGITMIVVVITTYFDYW

SEQ ID NO: 13612 - protein, 23 aa, Homo sapiens
CAKVPQSPDVVVPPAIRGWFDPW

SEQ ID NO: 13613 - protein, 17 aa, Homo sapiens
CARGDPPNARNDAFDIW

SEQ ID NO: 13614 - protein, 17 aa, Homo sapiens
CVRAPYNITIKDSVDYW

SEQ ID NO: 13615 - protein, 16 aa, Homo sapiens
CATGAQLWTNNWFDPW

SEQ ID NO: 13616 - protein, 13 aa, Homo sapiens
CAKESIYGATDYW

SEQ ID NO: 13617 - protein, 27 aa, Homo sapiens
CAKLSGYAESIKSIAVAGTAGGALDYW

SEQ ID NO: 13618 - protein, 21 aa, Homo sapiens
CARQPIMITFGGVIVRRFDYW

SEQ ID NO: 13619 - protein, 20 aa, Homo sapiens
CAKLSTITMIVVVIGGVDYW

SEQ ID NO: 13620 - protein, 18 aa, Homo sapiens
CARQSSRKWELPLHFDSW

SEQ ID NO: 13621 - protein, 19 aa, Homo sapiens
CASGGITMVRVRNNWFDPW

SEQ ID NO: 13622 - protein, 22 aa, Homo sapiens
CARGSGHGALYYYNSPTRFDHW

SEQ ID NO: 13623 - protein, 21 aa, Homo sapiens
CARSAMDYGDYVLRYNWFDPW

SEQ ID NO: 13624 - protein, 18 aa, Homo sapiens
CARAAGRFGELWIRFDPW

SEQ ID NO: 13625 - protein, 20 aa, Homo sapiens
CASIGSAAISTGYYYGMDVW

SEQ ID NO: 13626 - protein, 17 aa, Homo sapiens
CAKDNSDGYDFVGFDYW

SEQ ID NO: 13627 - protein, 17 aa, Homo sapiens
CAEEQEDGDRSYYFDYW

SEQ ID NO: 13628 - protein, 17 aa, Homo sapiens
CAKDPGDDSSGYYYDYW

SEQ ID NO: 13629 - protein, 16 aa, Homo sapiens
CAKSGNPHYYYYMDVW

SEQ ID NO: 13630 - protein, 18 aa, Homo sapiens
CAKDSTIVVVPSARLDYW

SEQ ID NO: 13631 - protein, 29 aa, Homo sapiens
CARDIRENYYDSSGYYGAVTTLENWFDPW

SEQ ID NO: 13632 - protein, 15 aa, Homo sapiens
CTRPFTTVVTPGDYW

SEQ ID NO: 13633 - protein, 14 aa, Homo sapiens
CAKLDSERTPKDYW

SEQ ID NO: 13634 - protein, 21 aa, Homo sapiens
CARTEKRFLEWLLYDDAFDIW

SEQ ID NO: 13635 - protein, 17 aa, Homo sapiens
CATVTAYYAQGRQVDYW

SEQ ID NO: 13636 - protein, 16 aa, Homo sapiens
CATVFAYNWNPASDYW

SEQ ID NO: 13637 - protein, 17 aa, Homo sapiens
CARGLIGPASTYYFDYW

SEQ ID NO: 13638 - protein, 18 aa, Homo sapiens
CAREEYSSGWNEDWFDPW

SEQ ID NO: 13639 - protein, 16 aa, Homo sapiens
CARSPYYGDRGKFDYW

SEQ ID NO: 13640 - protein, 22 aa, Homo sapiens
CARDYYDSSGYYYVYAALGDYW

SEQ ID NO: 13641 - protein, 12 aa, Homo sapiens
CAREVYRGSDYW

SEQ ID NO: 13642 - protein, 12 aa, Homo sapiens
CANGILDGMDVW

SEQ ID NO: 13643 - protein, 16 aa, Homo sapiens
CAKDQFPTVTTPFDYW

SEQ ID NO: 13644 - protein, 19 aa, Homo sapiens
CAKLGSIGSYSSSWYFDYW

SEQ ID NO: 13645 - protein, 16 aa, Homo sapiens
CARDVGDLRGDAFDIW

SEQ ID NO: 13646 - protein, 18 aa, Homo sapiens
CASNYYDSSGYYGIFDYW

SEQ ID NO: 13647 - protein, 20 aa, Homo sapiens
CARSFSYDSSIFYYWSFDSW

SEQ ID NO: 13648 - protein, 21 aa, Homo sapiens
CARNLKDGYNYGLYYYYMDVW

SEQ ID NO: 13649 - protein, 18 aa, Homo sapiens
CARGFTIFGVEPNYFDYW

SEQ ID NO: 13650 - protein, 18 aa, Homo sapiens
CARANRITMIVVTPFDPW

SEQ ID NO: 13651 - protein, 16 aa, Homo sapiens
CATSPPYSTVTWFDPW

SEQ ID NO: 13652 - protein, 18 aa, Homo sapiens
CAKDNWGIAVAGIAFDYW

SEQ ID NO: 13653 - protein, 17 aa, Homo sapiens
CATVAIPVAAPGDFDYW

SEQ ID NO: 13654 - protein, 22 aa, Homo sapiens
CARGSPTYYYDSSGYYQMGDYW

SEQ ID NO: 13655 - protein, 29 aa, Homo sapiens
CARGPLPTYCTGGVCYLEYYYYYYYMDVW

SEQ ID NO: 13656 - protein, 14 aa, Homo sapiens
CARDEEGGWYENYW

SEQ ID NO: 13657 - protein, 28 aa, Homo sapiens
CARAPYYYDASGYFFGSSQLRHNWFDSW

SEQ ID NO: 13658 - protein, 33 aa, Homo sapiens
CTAYMELSSLRSEDTAVYYCARTIFGVVNFDYW

SEQ ID NO: 13659 - protein, 24 aa, Homo sapiens
CARMDYCDSTTCREVYFYYYMDVW

SEQ ID NO: 13660 - protein, 13 aa, Homo sapiens
CASYSVAGTFDYW

SEQ ID NO: 13661 - protein, 25 aa, Homo sapiens
CARMDGITIFGVVISATGYYYMDVW

SEQ ID NO: 13662 - protein, 20 aa, Homo sapiens
CARGSSGYDSSGYYLGFDPW

SEQ ID NO: 13663 - protein, 18 aa, Homo sapiens
CARGFYYYDTSAYYYDYW

SEQ ID NO: 13664 - protein, 16 aa, Homo sapiens
CTTELDYGEYDAFDIW

SEQ ID NO: 13665 - protein, 29 aa, Homo sapiens
CARDEVYYDFWSGYSGAQRIYYYYYMDVW

SEQ ID NO: 13666 - protein, 15 aa, Homo sapiens
CAKEGDGYNRDFDYW

SEQ ID NO: 13667 - protein, 17 aa, Homo sapiens
CARGVGTRVGVNWFDPW

SEQ ID NO: 13668 - protein, 16 aa, Homo sapiens
CAKGLGYSSSFGLDYW

SEQ ID NO: 13669 - protein, 18 aa, Homo sapiens
CARDQYHSSGFYSHFDYW

SEQ ID NO: 13670 - protein, 23 aa, Homo sapiens
CANLRHYYDSSGYSEKNNAFDIW

SEQ ID NO: 13671 - protein, 21 aa, Homo sapiens
CATKTTMYYYDSSGPSPFDYW

SEQ ID NO: 13672 - protein, 22 aa, Homo sapiens
CARGTYPWGITMIAPSTDFDYW

SEQ ID NO: 13673 - protein, 20 aa, Homo sapiens
CARSPTTVTSPVGIWYFDYW

SEQ ID NO: 13674 - protein, 21 aa, Homo sapiens
CARGQWGSYHDHSGQKAFDFW

SEQ ID NO: 13675 - protein, 31 aa, Homo sapiens
CVNDEVYDDFWSGYYFGSQDRPKKYYYMDVW

SEQ ID NO: 13676 - protein, 20 aa, Homo sapiens
CTRWLFPGGSGYDHHGFDSW

SEQ ID NO: 13677 - protein, 16 aa, Homo sapiens
CAREGVVTAMSGLDYW

SEQ ID NO: 13678 - protein, 17 aa, Homo sapiens
CAKGSLTVVVVDLFDYW

SEQ ID NO: 13679 - protein, 18 aa, Homo sapiens
CARAVYDSSGYYYYFDFW

SEQ ID NO: 13680 - protein, 24 aa, Homo sapiens
CARVAYSGYDSLKFTWKDDWFDPW

SEQ ID NO: 13681 - protein, 29 aa, Homo sapiens
CAREILGYCSSTSCYTWENYYYYYGMDVW

SEQ ID NO: 13682 - protein, 17 aa, Homo sapiens
CVRECKSGYGCDAFDFW

SEQ ID NO: 13683 - protein, 20 aa, Homo sapiens
CAKAPPEGSVLYGDCYFDYW

SEQ ID NO: 13684 - protein, 19 aa, Homo sapiens
CATSRIGDYYDSSGYSDYW

SEQ ID NO: 13685 - protein, 22 aa, Homo sapiens
CAKGLRYFDWLLYGPPDAFDIW

SEQ ID NO: 13686 - protein, 18 aa, Homo sapiens
CAKRHRAGDVGYNAFDIW

SEQ ID NO: 13687 - protein, 32 aa, Homo sapiens
CDWSSDVCSSDLYYCARDTYYDFWSGYYFDYW

SEQ ID NO: 13688 - protein, 15 aa, Homo sapiens
CATGEYSSSGAFDIW

SEQ ID NO: 13689 - protein, 27 aa, Homo sapiens
CARLFSQKNTIFGVVTHTPLGGYFDYW

SEQ ID NO: 13690 - protein, 13 aa, Homo sapiens
CARDRRYDAFDIW

SEQ ID NO: 13691 - protein, 23 aa, Homo sapiens
CARERLYCGSDSCFWRNWYFDLW

SEQ ID NO: 13692 - protein, 15 aa, Homo sapiens
CAKTASGSYSDFDFW

SEQ ID NO: 13693 - protein, 22 aa, Homo sapiens
CARAQYCSGGSCYSYYYYMDVW

SEQ ID NO: 13694 - protein, 17 aa, Homo sapiens
CARGYYDFWTWGPFDLW

SEQ ID NO: 13695 - protein, 17 aa, Homo sapiens
CARTNWGIVGAAWFDPW

SEQ ID NO: 13696 - protein, 18 aa, Homo sapiens
CARRGSGSYFIYNWFDPW

SEQ ID NO: 13697 - protein, 21 aa, Homo sapiens
CARAPKADFWSGYPYYYMDVW

SEQ ID NO: 13698 - protein, 17 aa, Homo sapiens
CARDYYGSGSYTHYDYW

SEQ ID NO: 13699 - protein, 19 aa, Homo sapiens
CARSYVLRFLEWLNWFDPW

SEQ ID NO: 13700 - protein, 21 aa, Homo sapiens
CARKADYVWGRYRYLSAFDYW

SEQ ID NO: 13701 - protein, 16 aa, Homo sapiens
CARAAANTRYWFFDLW

SEQ ID NO: 13702 - protein, 19 aa, Homo sapiens
CARGRAGTPTQLRADFDYW

SEQ ID NO: 13703 - protein, 19 aa, Homo sapiens
CARDPERYDFWSDLHFDPW

SEQ ID NO: 13704 - protein, 19 aa, Homo sapiens
CATSRYSSSQSYYYYMDVW

SEQ ID NO: 13705 - protein, 15 aa, Homo sapiens
CARQGDFWSAYFAPW

SEQ ID NO: 13706 - protein, 12 aa, Homo sapiens
CASGYDWYPDYW

SEQ ID NO: 13707 - protein, 21 aa, Homo sapiens
CARATGDRGLLTSLEYHFDHW

SEQ ID NO: 13708 - protein, 33 aa, Homo sapiens
CDWSSDVCSSDLYCATDLTYYYDSSGQNWFDPW

SEQ ID NO: 13709 - protein, 25 aa, Homo sapiens
CAREELHLPESYSSSWYGSDAFDIW

SEQ ID NO: 13710 - protein, 22 aa, Homo sapiens
CARDPSVLRFLEWYGIEAFDIW

SEQ ID NO: 13711 - protein, 21 aa, Homo sapiens
CARDPRSYCGGDCRWGWFDPW

SEQ ID NO: 13712 - protein, 18 aa, Homo sapiens
CARGKYDGSGYYFYFDSW

SEQ ID NO: 13713 - protein, 17 aa, Homo sapiens
CTRGYCTNGVCYDFDYW

SEQ ID NO: 13714 - protein, 19 aa, Homo sapiens
CARGTYYYDSSGYLVPDYW

SEQ ID NO: 13715 - protein, 16 aa, Homo sapiens
CARFIAGNRWYYFDYW

SEQ ID NO: 13716 - protein, 31 aa, Homo sapiens
CARDNSQYYDILTGYYNFGSPYYYYYYMDVW

SEQ ID NO: 13717 - protein, 24 aa, Homo sapiens
CAKVSYYYDSSGYYPTLYWYFDLW

SEQ ID NO: 13718 - protein, 16 aa, Homo sapiens
CARENYDILTGSFDPW

SEQ ID NO: 13719 - protein, 35 aa, Homo sapiens
CDWSSDVCSSDLADTAVYYCARNRALITIPNFDYW

SEQ ID NO: 13720 - protein, 16 aa, Homo sapiens
CARANNGGYSYGYDYW

SEQ ID NO: 13721 - protein, 21 aa, Homo sapiens
CARRLRTYYYGSGSYGWFDPW

SEQ ID NO: 13722 - protein, 18 aa, Homo sapiens
CARDPGPSSWSDYSFDYW

SEQ ID NO: 13723 - protein, 12 aa, Homo sapiens
CQQYYSILTWTF

SEQ ID NO: 13724 - protein, 18 aa, Homo sapiens
CAKVQKAREMATMSPDYW

SEQ ID NO: 13725 - protein, 16 aa, Homo sapiens
CARDENYGGTHAFDIW

SEQ ID NO: 13726 - protein, 22 aa, Homo sapiens
CARYGLQARDGDYALRGAFDIW

SEQ ID NO: 13727 - protein, 22 aa, Homo sapiens
CARHFRGDRYCSSISCSPFDPW

SEQ ID NO: 13728 - protein, 15 aa, Homo sapiens
CAREAGDPPEWFDPW

SEQ ID NO: 13729 - protein, 21 aa, Homo sapiens
CARERSRMFRGVINPDAIDIW

SEQ ID NO: 13730 - protein, 18 aa, Homo sapiens
CARAWGVVMTAVSGFDPW

SEQ ID NO: 13731 - protein, 18 aa, Homo sapiens
CARDNTPLWDGVSPLDYW

SEQ ID NO: 13732 - protein, 19 aa, Homo sapiens
CARDAHDSSGYYGGKIDYW

SEQ ID NO: 13733 - protein, 18 aa, Homo sapiens
CAKESRYNWNDAAGIDYW

SEQ ID NO: 13734 - protein, 21 aa, Homo sapiens
CARVYYGSGNFGYYYYYMDVW

SEQ ID NO: 13735 - protein, 27 aa, Homo sapiens
CARDVGFGGGTGWYQGVFYYYYGMDVW

SEQ ID NO: 13736 - protein, 33 aa, Homo sapiens
CTTVSTPPERTYMSMVRGILTERRIPRDDFDIW

SEQ ID NO: 13737 - protein, 18 aa, Homo sapiens
CARDESPVQAAGDAFDIW

SEQ ID NO: 13738 - protein, 26 aa, Homo sapiens
CARALTLDPQWIQLWPYYYYYGMDVW

SEQ ID NO: 13739 - protein, 19 aa, Homo sapiens
CARTIAVARWPPSHHFDYW

SEQ ID NO: 13740 - protein, 18 aa, Homo sapiens
CAIITPIGEGYSYYMDVW

SEQ ID NO: 13741 - protein, 19 aa, Homo sapiens
CAHSRYDILTGYSIYFDYW

SEQ ID NO: 13742 - protein, 20 aa, Homo sapiens
CAKEYRGVDTAMVIMPPDYW

SEQ ID NO: 13743 - protein, 15 aa, Homo sapiens
CAREFSSGWRPYDYW

SEQ ID NO: 13744 - protein, 21 aa, Homo sapiens
CATIVPNSGDFYSYNYGMDVW

SEQ ID NO: 13745 - protein, 16 aa, Homo sapiens
CARRGCSTDVCYLDYW

SEQ ID NO: 13746 - protein, 17 aa, Homo sapiens
CARDKDPRLATARFDYW

SEQ ID NO: 13747 - protein, 14 aa, Homo sapiens
CAKVSAGPPSIDYW

SEQ ID NO: 13748 - protein, 25 aa, Homo sapiens
CARDYLGYCSSTSCLPYYYYYMDVW

SEQ ID NO: 13749 - protein, 16 aa, Homo sapiens
CARVFIFWGEDVFDIW

SEQ ID NO: 13750 - protein, 30 aa, Homo sapiens
CARGRSDTTDEYNDFWSGYSPLGNNWFDPW

SEQ ID NO: 13751 - protein, 18 aa, Homo sapiens
CARAGWTTVTYYYYMDVW

SEQ ID NO: 13752 - protein, 16 aa, Homo sapiens
CARDPRGYGPIWFDPW

SEQ ID NO: 13753 - protein, 21 aa, Homo sapiens
CARDLIDILTGYSVHDAFDIW

SEQ ID NO: 13754 - protein, 19 aa, Homo sapiens
CTRPLYDIMTGYPEPFDYW

SEQ ID NO: 13755 - protein, 18 aa, Homo sapiens
CARDIAIEALDAARFEYW

SEQ ID NO: 13756 - protein, 15 aa, Homo sapiens
CTIRDFPGYDAFDMW

SEQ ID NO: 13757 - protein, 18 aa, Homo sapiens
CARSLRQWLSSYNWFDPW

SEQ ID NO: 13758 - protein, 25 aa, Homo sapiens
CARGGWSRNLVPAALDYYYYYMDVW

SEQ ID NO: 13759 - protein, 21 aa, Homo sapiens
CATDLKAAAGTYYYYYGMDVW

SEQ ID NO: 13760 - protein, 25 aa, Homo sapiens
CATSDIVVVPAAIRVGYYYYGMDVW

SEQ ID NO: 13761 - protein, 17 aa, Homo sapiens
CVRDESISCYRGWFDPW

SEQ ID NO: 13762 - protein, 15 aa, Homo sapiens
CARTNGWYRGSFDYW

SEQ ID NO: 13763 - protein, 20 aa, Homo sapiens
CATDLVPPRDRNYYYYMDVW

SEQ ID NO: 13764 - protein, 15 aa, Homo sapiens
CARGVTGRNGYFDLW

SEQ ID NO: 13765 - protein, 17 aa, Homo sapiens
CANLVTNYGGNWYFDLW

SEQ ID NO: 13766 - protein, 21 aa, Homo sapiens
CAKGKSSNYPVNYYYHYMDVW

SEQ ID NO: 13767 - protein, 25 aa, Homo sapiens
CAKDNPRGGYDSSGYYYPQEGFDYW

SEQ ID NO: 13768 - protein, 21 aa, Homo sapiens
CTTDSLVITMIVVVEYYFDYW

SEQ ID NO: 13769 - protein, 19 aa, Homo sapiens
CARDSDDSSGYWEWYFDLW

SEQ ID NO: 13770 - protein, 13 aa, Homo sapiens
CANFPTTEAFDIW

SEQ ID NO: 13771 - protein, 16 aa, Homo sapiens
CARATGWELPDAFDIW

SEQ ID NO: 13772 - protein, 25 aa, Homo sapiens
CARVPLPYCGGDCYPYYYYYGMDVW

SEQ ID NO: 13773 - protein, 19 aa, Homo sapiens
CARGQAASSGWYGYYFDYW

SEQ ID NO: 13774 - protein, 20 aa, Homo sapiens
CARGNFGSDSSRASDAFDIW

SEQ ID NO: 13775 - protein, 23 aa, Homo sapiens
CAKGAYWGRITMIVVVISAFDYW

SEQ ID NO: 13776 - protein, 23 aa, Homo sapiens
CARDGRDYDYVWGSYRPKGFDPW

SEQ ID NO: 13777 - protein, 19 aa, Homo sapiens
CARGLGYYSSTSYYPPDYW

SEQ ID NO: 13778 - protein, 28 aa, Homo sapiens
CAREHKEYYDFWSGMKDGALGDYYMDVW

SEQ ID NO: 13779 - protein, 18 aa, Homo sapiens
CAHRQIGYYDSSGYFRGW

SEQ ID NO: 13780 - protein, 18 aa, Homo sapiens
CATVGQTYCGGDCSFDYW

SEQ ID NO: 13781 - protein, 26 aa, Homo sapiens
CARDKMYYDILTGYYPHYYYYGMDVW

SEQ ID NO: 13782 - protein, 17 aa, Homo sapiens
CAHRSIITGTGTSLDYW

SEQ ID NO: 13783 - protein, 22 aa, Homo sapiens
CAKAPTLRGFGGVIVNGPLDYW

SEQ ID NO: 13784 - protein, 29 aa, Homo sapiens
CARDLEYYDILTGYFGGTNYYYYYGMDVW

SEQ ID NO: 13785 - protein, 17 aa, Homo sapiens
CTRAQDKSWTLYYFDYW

SEQ ID NO: 13786 - protein, 17 aa, Homo sapiens
CAKVAAGTYYYDSSDYW

SEQ ID NO: 13787 - protein, 14 aa, Homo sapiens
CTRGPFSITITDYW

SEQ ID NO: 13788 - protein, 21 aa, Homo sapiens
CAKDLGITMIVVVIIPSFDYW

SEQ ID NO: 13789 - protein, 22 aa, Homo sapiens
CARSPPPYFYDSSGFYDAFDIW

SEQ ID NO: 13790 - protein, 16 aa, Homo sapiens
CVHSGPLYGDYYFDYW

SEQ ID NO: 13791 - protein, 16 aa, Homo sapiens
CAKAFPRDGNYVRDYW

SEQ ID NO: 13792 - protein, 14 aa, Homo sapiens
CAKLYYYDIAFDIW

SEQ ID NO: 13793 - protein, 18 aa, Homo sapiens
CAKDQALVVYALVYFQHW

SEQ ID NO: 13794 - protein, 17 aa, Homo sapiens
CARVRGSGSSDDAFDIW

SEQ ID NO: 13795 - protein, 17 aa, Homo sapiens
CAHIPDYNLHRYYFDYW

SEQ ID NO: 13796 - protein, 20 aa, Homo sapiens
CARARIVYDTSGYFSYFDNW

SEQ ID NO: 13797 - protein, 17 aa, Homo sapiens
CATEAVAGTGSPAFDIW

SEQ ID NO: 13798 - protein, 15 aa, Homo sapiens
CATGTAVAWYYFDYW

SEQ ID NO: 13799 - protein, 16 aa, Homo sapiens
CTRDRPTSGSPYFGSW

SEQ ID NO: 13800 - protein, 16 aa, Homo sapiens
CAREHSAWWYVELDYW

SEQ ID NO: 13801 - protein, 21 aa, Homo sapiens
CAKSPYFHCGSGDCYSLFDPW

SEQ ID NO: 13802 - protein, 14 aa, Homo sapiens
CATGAIVATFVDYW

SEQ ID NO: 13803 - protein, 16 aa, Homo sapiens
CASIGRYAGPHAFDAW

SEQ ID NO: 13804 - protein, 18 aa, Homo sapiens
CTTDLGYYDSSGYRFDYW

SEQ ID NO: 13805 - protein, 26 aa, Homo sapiens
CARETREPIAAAWWEVNYYYYYMDVW

SEQ ID NO: 13806 - protein, 20 aa, Homo sapiens
CSKDPGRGNYVWGSPYFHYW

SEQ ID NO: 13807 - protein, 27 aa, Homo sapiens
CVKDGAHDVLRFLERPPNYYYSGMDVW

SEQ ID NO: 13808 - protein, 25 aa, Homo sapiens
CARGRSSFTMIVLVFTGASYYFDSW

SEQ ID NO: 13809 - protein, 12 aa, Homo sapiens
CQQYNSNLMYTF

SEQ ID NO: 13810 - protein, 22 aa, Homo sapiens
CAGFSGSSGYYYPYYYYGMDVW

SEQ ID NO: 13811 - protein, 17 aa, Homo sapiens
CTTELLWFGELLALDYW

SEQ ID NO: 13812 - protein, 18 aa, Homo sapiens
CAKDTTTGYGNNWFFDYW

SEQ ID NO: 13813 - protein, 30 aa, Homo sapiens
CARDSHQYYDFWSGYYTGRDAARMNWFDPW

SEQ ID NO: 13814 - protein, 24 aa, Homo sapiens
CASVTGYSYDRSGYYYVGDWFDPW

SEQ ID NO: 13815 - protein, 13 aa, Homo sapiens
CAKGQLWLPEDYW

SEQ ID NO: 13816 - protein, 20 aa, Homo sapiens
CALPISDTAVYYCARGFDYW

SEQ ID NO: 13817 - protein, 11 aa, Homo sapiens
CQQSYGTLWPF

SEQ ID NO: 13818 - protein, 28 aa, Homo sapiens
CAKDMSPGYCSSTSCYVGYYYYYGMDVW

SEQ ID NO: 13819 - protein, 16 aa, Homo sapiens
CAKLPHPGYSSSADYW

SEQ ID NO: 13820 - protein, 18 aa, Homo sapiens
CARASYCSRTTCYGLDYW

SEQ ID NO: 13821 - protein, 27 aa, Homo sapiens
CARDGAIRWARPVAEFLPLGDTCFDYW

SEQ ID NO: 13822 - protein, 15 aa, Homo sapiens
CARKIRWPKYYFDYW

SEQ ID NO: 13823 - protein, 20 aa, Homo sapiens
CAKAPLASCSSTVCYTFDSW

SEQ ID NO: 13824 - protein, 17 aa, Homo sapiens
CARPRILGGTRTAFDIW

SEQ ID NO: 13825 - protein, 19 aa, Homo sapiens
CATGFAYYGSGSYYPFDYW

SEQ ID NO: 13826 - protein, 27 aa, Homo sapiens
CAKDRGTEGSGSYSRDDYYYYYGMDVW

SEQ ID NO: 13827 - protein, 19 aa, Homo sapiens
CAREGPSSSSWGGGWFDPW

SEQ ID NO: 13828 - protein, 20 aa, Homo sapiens
CAKHSKGGYSGYGPAYIDYW

SEQ ID NO: 13829 - protein, 19 aa, Homo sapiens
CAKDKAPDFWSADWYFDLW

SEQ ID NO: 13830 - protein, 17 aa, Homo sapiens
CARTATAARLYWYFDLW

SEQ ID NO: 13831 - protein, 14 aa, Homo sapiens
CAGGNLESWAFDYW

SEQ ID NO: 13832 - protein, 22 aa, Homo sapiens
CARSEDRRWLSLESRHYYFDYW

SEQ ID NO: 13833 - protein, 22 aa, Homo sapiens
CARFRYYYDSSGYYYVGLFDYW

SEQ ID NO: 13834 - protein, 20 aa, Homo sapiens
CTRNPYYYDSSGYYVFFDYW

SEQ ID NO: 13835 - protein, 18 aa, Homo sapiens
CAKGGYIAVAGTPPPDYW

SEQ ID NO: 13836 - protein, 36 aa, Homo sapiens
CARDPARPNYDFWSGYGPALDILTGYSSSSIAFDIW

SEQ ID NO: 13837 - protein, 14 aa, Homo sapiens
CARNSATAMVFAYW

SEQ ID NO: 13838 - protein, 18 aa, Homo sapiens
CAKDAADYYDSSGYFGYW

SEQ ID NO: 13839 - protein, 18 aa, Homo sapiens
CAKDPLDYGDYRGGFDPW

SEQ ID NO: 13840 - protein, 17 aa, Homo sapiens
CGRDYRGYSYGTEVDYW

SEQ ID NO: 13841 - protein, 18 aa, Homo sapiens
CARDHRWPSHGYNYRDYW

SEQ ID NO: 13842 - protein, 22 aa, Homo sapiens
CARDFGDYVWGSLVSFGWFDPW

SEQ ID NO: 13843 - protein, 15 aa, Homo sapiens
CATDTLPYDHGYDYW

SEQ ID NO: 13844 - protein, 14 aa, Homo sapiens
CARESSSGAFVDYW

SEQ ID NO: 13845 - protein, 14 aa, Homo sapiens
CASTAESSWYTDYW

SEQ ID NO: 13846 - protein, 24 aa, Homo sapiens
CATEGRYFDWFHLGRYYYYGMDVW

SEQ ID NO: 13847 - protein, 14 aa, Homo sapiens
CAIVVGGGRHFDYW

SEQ ID NO: 13848 - protein, 24 aa, Homo sapiens
CAHATGLYYYDSSGYSVEYYFDYW

SEQ ID NO: 13849 - protein, 17 aa, Homo sapiens
CARAAGSSWYGDAFDIW

SEQ ID NO: 13850 - protein, 20 aa, Homo sapiens
CARDLPIGVCSSTSCYYDYW

SEQ ID NO: 13851 - protein, 14 aa, Homo sapiens
CAKVSGWSPNIDYW

SEQ ID NO: 13852 - protein, 28 aa, Homo sapiens
CSLRSEDTAVYYCATDFAIAVAGTLDYW

SEQ ID NO: 13853 - protein, 19 aa, Homo sapiens
CATIITIFKGNVVYYFDSW

SEQ ID NO: 13854 - protein, 11 aa, Homo sapiens [sequence omitted]

SEQ ID NO: 13855 - protein, 14 aa, Homo sapiens
CHSRDSSNNHHFLF

SEQ ID NO: 13856 - protein, 15 aa, Homo sapiens
CASGWLLPEYYFDYW

SEQ ID NO: 13857 - protein, 15 aa, Homo sapiens
CARGGDFEGDAFDLW

SEQ ID NO: 13858 - protein, 23 aa, Homo sapiens
CARGTPLTFGGVIVSGFDAFDIW

SEQ ID NO: 13859 - protein, 16 aa, Homo sapiens
CAKLRHSSSSSYFDYW

SEQ ID NO: 13860 - protein, 19 aa, Homo sapiens
CAHEDYDILTGYTSFFDYW

SEQ ID NO: 13861 - protein, 14 aa, Homo sapiens
CARVEYYDILTDYW

SEQ ID NO: 13862 - protein, 22 aa, Homo sapiens
CAKDLFDYFDSSGSPHDAFDIW

SEQ ID NO: 13863 - protein, 15 aa, Homo sapiens
CARAYNGYALHFDYW

SEQ ID NO: 13864 - protein, 17 aa, Homo sapiens
CARHMSDYGDFNPFDFW

SEQ ID NO: 13865 - protein, 16 aa, Homo sapiens
CARQGGSGTWYYVDYW

SEQ ID NO: 13866 - protein, 18 aa, Homo sapiens
CATSTPFWSARRNWFDPW

SEQ ID NO: 13867 - protein, 19 aa, Homo sapiens
CARRYYDYVWGSYFYFDYW

SEQ ID NO: 13868 - protein, 21 aa, Homo sapiens
CARQGVRRGNRVFGAGGFDSW

SEQ ID NO: 13869 - protein, 14 aa, Homo sapiens
CARDSSSWHNIDYW

SEQ ID NO: 13870 - protein, 21 aa, Homo sapiens
CARELIGVDDPPGAPGWFDPW

SEQ ID NO: 13871 - protein, 19 aa, Homo sapiens
CAGGFCSGGSCYYLLLDYW

SEQ ID NO: 13872 - protein, 19 aa, Homo sapiens
CARDRATWQWLTPNWFDPW

SEQ ID NO: 13873 - protein, 13 aa, Homo sapiens
CAREGPNGRSDYW

SEQ ID NO: 13874 - protein, 17 aa, Homo sapiens
CARRVSPVTTQPYFDYW

SEQ ID NO: 13875 - protein, 17 aa, Homo sapiens
CARLRWGTNARGYMDVW

SEQ ID NO: 13876 - protein, 18 aa, Homo sapiens
CARDGWSSSWDLDAFDIW

SEQ ID NO: 13877 - protein, 17 aa, Homo sapiens
CARDHPADDYGDYPDYW

SEQ ID NO: 13878 - protein, 22 aa, Homo sapiens
CARDRDYYDSSGYYYGGAFDIW

SEQ ID NO: 13879 - protein, 18 aa, Homo sapiens
CATAGGYSYATGYYFDYW

SEQ ID NO: 13880 - protein, 17 aa, Homo sapiens
CAKLGIYSGYDSSTDYW

SEQ ID NO: 13881 - protein, 19 aa, Homo sapiens
CARNNLLGIQYYYYYMDVW

SEQ ID NO: 13882 - protein, 16 aa, Homo sapiens
CAKMLTGDLMQAFDYW

SEQ ID NO: 13883 - protein, 17 aa, Homo sapiens
CATGGGWIGYLDWFDPW

SEQ ID NO: 13884 - protein, 21 aa, Homo sapiens
CARGRGAYSVEVRGHTWFDPW

SEQ ID NO: 13885 - protein, 33 aa, Homo sapiens
CDWSSDVCSSDLDTAVYYCAREYYYDSSGLDYW

SEQ ID NO: 13886 - protein, 14 aa, Homo sapiens
CAREPLSGWYVYYW

SEQ ID NO: 13887 - protein, 16 aa, Homo sapiens
CARGNYKWNSYYFDYW

SEQ ID NO: 13888 - protein, 36 aa, Homo sapiens
CSLKLASVTAADTSVYYCATVPSSRSWSAFYHFDNW

SEQ ID NO: 13889 - protein, 16 aa, Homo sapiens
CARQRGSAPLYYMDVW

SEQ ID NO: 13890 - protein, 16 aa, Homo sapiens
CAKLGNTYDFGLEDYW

SEQ ID NO: 13891 - protein, 23 aa, Homo sapiens
CAREGPDFWGGYYSGRFRWFDPW

SEQ ID NO: 13892 - protein, 22 aa, Homo sapiens
CANLWFGELLFNRRGYYYMDVW

SEQ ID NO: 13893 - protein, 19 aa, Homo sapiens
CARVFYGSGSYTTYLFDYW

SEQ ID NO: 13894 - protein, 15 aa, Homo sapiens
CARSPAGTTHYFDYW

SEQ ID NO: 13895 - protein, 18 aa, Homo sapiens
CARAAPLDDITDDAFDIW

SEQ ID NO: 13896 - protein, 13 aa, Homo sapiens
CVRDKTVGALDYW

SEQ ID NO: 13897 - protein, 20 aa, Homo sapiens
CARQDPYDSSGYYFLLADYW

SEQ ID NO: 13898 - protein, 18 aa, Homo sapiens
CAKLTASTYDYGDYVDYW

SEQ ID NO: 13899 - protein, 20 aa, Homo sapiens
CARGLGVSAIFHYYYYMDVW

SEQ ID NO: 13900 - protein, 18 aa, Homo sapiens
CARSGRSCSGGTCYSSYW

SEQ ID NO: 13901 - protein, 18 aa, Homo sapiens
CAKDMGPGEVMVDHFDYW

SEQ ID NO: 13902 - protein, 33 aa, Homo sapiens
CSLRSEDTAVYYCATDPIYDYVWGSYRYNFDYW

SEQ ID NO: 13903 - protein, 17 aa, Homo sapiens
CVRPYCIGDVCYAHDIW

SEQ ID NO: 13904 - protein, 26 aa, Homo sapiens
CARHVRYFDWLLAYHEKVTSYYFDYW

SEQ ID NO: 13905 - protein, 20 aa, Homo sapiens
CARTLQYYYDSSGYYELDYW

SEQ ID NO: 13906 - protein, 21 aa, Homo sapiens
CARDQTGDSPTVHYYYYMDVW

SEQ ID NO: 13907 - protein, 28 aa, Homo sapiens
CAKDTTYYDILTGYLPSAHYYYYGMDVW

SEQ ID NO: 13908 - protein, 16 aa, Homo sapiens
CAKGSIAARPGYFDYW

SEQ ID NO: 13909 - protein, 19 aa, Homo sapiens
CTTDGVGATSYYYYGMDVW

SEQ ID NO: 13910 - protein, 19 aa, Homo sapiens
CATELRRYFDWLLIPFDPW

SEQ ID NO: 13911 - protein, 18 aa, Homo sapiens
CARLVGATPHTNWYFDLW

SEQ ID NO: 13912 - protein, 19 aa, Homo sapiens
CARHPANDYGDYVVYFDLW

SEQ ID NO: 13913 - protein, 17 aa, Homo sapiens
CARAGYFGDYIRPFEYW

SEQ ID NO: 13914 - protein, 15 aa, Homo sapiens
CAKGVGTMVRGVDYW

SEQ ID NO: 13915 - protein, 31 aa, Homo sapiens
CARTIRGVYHYDSSGYYYGSENPRRDYFDYW

SEQ ID NO: 13916 - protein, 16 aa, Homo sapiens
CAKLTVAATYDAFDIW

SEQ ID NO: 13917 - protein, 21 aa, Homo sapiens
CARDPLYSSSFPYYYYGMDVW

SEQ ID NO: 13918 - protein, 17 aa, Homo sapiens
CARAADTSGYFQNFDHW

SEQ ID NO: 13919 - protein, 24 aa, Homo sapiens
CVRAGDATGYYPPYDDSFQYMDVW

SEQ ID NO: 13920 - protein, 17 aa, Homo sapiens
CARALEGYSSSWYVDYW

SEQ ID NO: 13921 - protein, 19 aa, Homo sapiens
CARDGVLRFLEWLGYFDYW

SEQ ID NO: 13922 - protein, 18 aa, Homo sapiens
CARDSDLRLGELSFLDYW

SEQ ID NO: 13923 - protein, 21 aa, Homo sapiens
CAKITEPGIAAAGTFPPVDYW

SEQ ID NO: 13924 - protein, 14 aa, Homo sapiens
CAREGVVSLGFDYW

SEQ ID NO: 13925 - protein, 16 aa, Homo sapiens
CAKAPGVVIIYYFDYW

SEQ ID NO: 13926 - protein, 24 aa, Homo sapiens
CAKDLYDSTGYYSDDYFYYGMDVW

SEQ ID NO: 13927 - protein, 16 aa, Homo sapiens
CAKEISGISRGAFDIW

SEQ ID NO: 13928 - protein, 18 aa, Homo sapiens
CATFFYGDYFGRFAFDIW

SEQ ID NO: 13929 - protein, 19 aa, Homo sapiens
CAHSLPLGDRRGGHVFDIW

SEQ ID NO: 13930 - protein, 19 aa, Homo sapiens
CARDSSWNDVGALKGLDYW

SEQ ID NO: 13931 - protein, 18 aa, Homo sapiens
CARVRDSYGIYYYGMDVW

SEQ ID NO: 13932 - protein, 27 aa, Homo sapiens
CALENYSSNPTGYDFWSGYYSFGFDYW

SEQ ID NO: 13933 - protein, 14 aa, Homo sapiens
CVRLDSGPYSFDYW

SEQ ID NO: 13934 - protein, 15 aa, Homo sapiens
CAKVDDSGYDGFDYW

SEQ ID NO: 13935 - protein, 17 aa, Homo sapiens
CAKIVDPNERDWPIDYW

SEQ ID NO: 13936 - protein, 17 aa, Homo sapiens
CTTDFWSYGYLAFKDYW

SEQ ID NO: 13937 - protein, 19 aa, Homo sapiens
CARVAPLGGISTGYYFDHW

SEQ ID NO: 13938 - protein, 17 aa, Homo sapiens
CARDRALYGDENYFDYW

SEQ ID NO: 13939 - protein, 15 aa, Homo sapiens
CTKGRDSTGWQYDYW

SEQ ID NO: 13940 - protein, 27 aa, Homo sapiens
CARDGEGNSSSWYRIPATILLGQFDYW

SEQ ID NO: 13941 - protein, 17 aa, Homo sapiens
CAKRAYSHYDRGPLDYW

SEQ ID NO: 13942 - protein, 16 aa, Homo sapiens
CAITQRWLQSSPFDYW

SEQ ID NO: 13943 - protein, 19 aa, Homo sapiens
CARDLSGSYYRRVYYFDYW

SEQ ID NO: 13944 - protein, 20 aa, Homo sapiens
CARDWGTHDSSGYYNWFDPW

SEQ ID NO: 13945 - protein, 17 aa, Homo sapiens
CASPRNYIVVVSPFDYW

SEQ ID NO: 13946 - protein, 27 aa, Homo sapiens
CARDLNPHLGIMITFGGVIVTSGLDYW

SEQ ID NO: 13947 - protein, 15 aa, Homo sapiens
CARDELTVGWTFDYW

SEQ ID NO: 13948 - protein, 17 aa, Homo sapiens
CATVGGPFGVVMQWDYW

SEQ ID NO: 13949 - protein, 23 aa, Homo sapiens
CAKDGRDCSGGSCYAWDDWFDPW

SEQ ID NO: 13950 - protein, 19 aa, Homo sapiens
CARGPRGQYSSSSYYFDYW

SEQ ID NO: 13951 - protein, 13 aa, Homo sapiens
CQHYNAWPEIYTF

SEQ ID NO: 13952 - protein, 23 aa, Homo sapiens
CARDPASDYDFWSGYYILEWDYW

SEQ ID NO: 13953 - protein, 18 aa, Homo sapiens
CARDFDDFWSGYGGFDYW

SEQ ID NO: 13954 - protein, 12 aa, Homo sapiens
CAGSLLFSFDYW

SEQ ID NO: 13955 - protein, 16 aa, Homo sapiens
CARDRGMTTVTTGDYW

SEQ ID NO: 13956 - protein, 21 aa, Homo sapiens
CARTIWSGYYTVGYYYGMDVW

SEQ ID NO: 13957 - protein, 21 aa, Homo sapiens
CAHLPYYDTFTGYYLDYFDPW

SEQ ID NO: 13958 - protein, 20 aa, Homo sapiens
CARGNQWPQRGGYYYGMDVW

SEQ ID NO: 13959 - protein, 22 aa, Homo sapiens
CAKQTNVTIVVVVAAVYYFDSW

SEQ ID NO: 13960 - protein, 20 aa, Homo sapiens
CAKLAASSGLLNDMDRFDYW

SEQ ID NO: 13961 - protein, 17 aa, Homo sapiens
CAVDTVTTGVGGAFDVW

SEQ ID NO: 13962 - protein, 27 aa, Homo sapiens
CARRPNRVLRFLEWPFDDYYYYGMDVW

SEQ ID NO: 13963 - protein, 19 aa, Homo sapiens
CARARGIFGVVRSYAFDLW

SEQ ID NO: 13964 - protein, 19 aa, Homo sapiens
CASNSAAGPRYYYYGMDVW

SEQ ID NO: 13965 - protein, 15 aa, Homo sapiens
CARTGIAARPDFDYW

SEQ ID NO: 13966 - protein, 16 aa, Homo sapiens
CAREGEGGSSRQDDYW

SEQ ID NO: 13967 - protein, 17 aa, Homo sapiens
CAGASGGDYFWDAFDIW

SEQ ID NO: 13968 - protein, 29 aa, Homo sapiens
CATGVPHSATGVDYDYVWGSYRYSTLDYW

SEQ ID NO: 13969 - protein, 18 aa, Homo sapiens
CASFYDSSGYSMMSFDIW

SEQ ID NO: 13970 - protein, 17 aa, Homo sapiens
CAKDERPVPTGVLVDYW

SEQ ID NO: 13971 - protein, 15 aa, Homo sapiens
CAKIALVRGYAFDIW

SEQ ID NO: 13972 - protein, 18 aa, Homo sapiens
CAKADCSSTSCRNWFDPW

SEQ ID NO: 13973 - protein, 16 aa, Homo sapiens
CARDFTFGGDDYFDHW

SEQ ID NO: 13974 - protein, 13 aa, Homo sapiens
CAKTGDHTGADYW

SEQ ID NO: 13975 - protein, 20 aa, Homo sapiens
CARDVCSGGSCYLVGWFDPW

SEQ ID NO: 13976 - protein, 15 aa, Homo sapiens
CARVVEVHWRLFDYW

SEQ ID NO: 13977 - protein, 21 aa, Homo sapiens
CTRTKNYYDSSGYYHKGIDYW

SEQ ID NO: 13978 - protein, 19 aa, Homo sapiens
CAKYSIAVAGNIWGAFDYW

SEQ ID NO: 13979 - protein, 14 aa, Homo sapiens
CAAWVHSLSGQWVF

SEQ ID NO: 13980 - protein, 24 aa, Homo sapiens
CARGVRYFDWFIERDQDANILDYW

SEQ ID NO: 13981 - protein, 17 aa, Homo sapiens
CAKDISSGYFKDAFDIW

SEQ ID NO: 13982 - protein, 12 aa, Homo sapiens
CSITMIESFDYW

SEQ ID NO: 13983 - protein, 19 aa, Homo sapiens
CARDWGVWGITPNYYMDVW

SEQ ID NO: 13984 - protein, 20 aa, Homo sapiens
CARGAYYYDSSGYSYYFDYW

SEQ ID NO: 13985 - protein, 17 aa, Homo sapiens
CARVIAVAGTQYYFDYW

SEQ ID NO: 13986 - protein, 20 aa, Homo sapiens
CARHVIGRVGVDYHDAFDIW

SEQ ID NO: 13987 - protein, 15 aa, Homo sapiens
CANLATAMEYAFDIW

SEQ ID NO: 13988 - protein, 17 aa, Homo sapiens
CAKDQGLFYRTQPFDYW

SEQ ID NO: 13989 - protein, 29 aa, Homo sapiens
CAKDPTYYDFWSGYLGGTLDYYYYGMDVW

SEQ ID NO: 13990 - protein, 19 aa, Homo sapiens
CARQSMIVVVITTPWFDPW

SEQ ID NO: 13991 - protein, 21 aa, Homo sapiens
CARGLHTEMSTIPSNQVFDTW

SEQ ID NO: 13992 - protein, 25 aa, Homo sapiens
CARDRGAYGDFWSGYSLYYYYMDVW

SEQ ID NO: 13993 - protein, 29 aa, Homo sapiens
CARTTPLEGDDWQGITIFGVVTINPFDYW

SEQ ID NO: 13994 - protein, 16 aa, Homo sapiens
CAKDGGWELTYYFDYW

SEQ ID NO: 13995 - protein, 19 aa, Homo sapiens
CAKQGGYFALERYSYMDVW

SEQ ID NO: 13996 - protein, 20 aa, Homo sapiens
CATSSGYCSSTSCKTWFDPW

SEQ ID NO: 13997 - protein, 18 aa, Homo sapiens
CARVADDSTGHYPYFDFW

SEQ ID NO: 13998 - protein, 17 aa, Homo sapiens
CAKVDSGYDSRGHVDYW

SEQ ID NO: 13999 - protein, 15 aa, Homo sapiens
CAHSRQWPPNYFDYW

SEQ ID NO: 14000 - protein, 12 aa, Homo sapiens
CQQYEGSPPYAF

SEQ ID NO: 14001 - protein, 22 aa, Homo sapiens
CVRDPRDNIVTGHSSHYYLDVW

SEQ ID NO: 14002 - protein, 16 aa, Homo sapiens
CARDHCSGASCYFDFW

SEQ ID NO: 14003 - protein, 18 aa, Homo sapiens
CARGEPYDFWSGYSFDPW

SEQ ID NO: 14004 - protein, 18 aa, Homo sapiens
CARGQEYDYVWGSYADYW

SEQ ID NO: 14005 - protein, 20 aa, Homo sapiens
CARDPTKQWLVDYYYGMDVW

SEQ ID NO: 14006 - protein, 14 aa, Homo sapiens
CAKDTEHPSCGDYW

SEQ ID NO: 14007 - protein, 20 aa, Homo sapiens
CARAGAAAGPLWVHGFFDYW

SEQ ID NO: 14008 - protein, 15 aa, Homo sapiens
CARGVSSGWTEFDYW

SEQ ID NO: 14009 - protein, 16 aa, Homo sapiens
CARRPGDTGRGEGDYW

SEQ ID NO: 14010 - protein, 22 aa, Homo sapiens
CAREPHLSMIVVVTPFGAFDIW

SEQ ID NO: 14011 - protein, 18 aa, Homo sapiens
CAREYRYYELSEGWFDPW

SEQ ID NO: 14012 - protein, 21 aa, Homo sapiens
CAKGPGEYYDSSGYQYYFDYW

SEQ ID NO: 14013 - protein, 19 aa, Homo sapiens
CAKDLVTVTTMGDDAFDIW

SEQ ID NO: 14014 - protein, 16 aa, Homo sapiens
CATARFLEWLFNFDYW

SEQ ID NO: 14015 - protein, 18 aa, Homo sapiens
CAKVPDSSGWLQDAFDIW

SEQ ID NO: 14016 - protein, 17 aa, Homo sapiens
CAREDGSQYYYYGMDVW

SEQ ID NO: 14017 - protein, 22 aa, Homo sapiens
CARTGWSRGDSSGYYYQVFDYW

SEQ ID NO: 14018 - protein, 22 aa, Homo sapiens
CARDGHYYYDSSGYRNDAFDIW

SEQ ID NO: 14019 - protein, 18 aa, Homo sapiens
CASILGYCSSTSCYPDYW

SEQ ID NO: 14020 - protein, 17 aa, Homo sapiens
CARKYFNSWYDDAFNIW

SEQ ID NO: 14021 - protein, 18 aa, Homo sapiens
CASPRNSYNSGWYHFDYW

SEQ ID NO: 14022 - protein, 19 aa, Homo sapiens
CAKVTTVTTEQLTDAFDIW

SEQ ID NO: 14023 - protein, 13 aa, Homo sapiens
CAKVAAADHSDYW

SEQ ID NO: 14024 - protein, 19 aa, Homo sapiens
CAKARIVVVTATPDAFDIW

SEQ ID NO: 14025 - protein, 22 aa, Homo sapiens
CASGYYDSSGYSFYYYYGMDVW

SEQ ID NO: 14026 - protein, 16 aa, Homo sapiens
CARGHVDTAMVPFDYW

SEQ ID NO: 14027 - protein, 14 aa, Homo sapiens
CTIRPRRQRQFDFW

SEQ ID NO: 14028 - protein, 17 aa, Homo sapiens
CAKDIRNIGYPVNIDYW

SEQ ID NO: 14029 - protein, 15 aa, Homo sapiens
CARRLVGGPLDLDYW

SEQ ID NO: 14030 - protein, 18 aa, Homo sapiens
CAKGDSSIVVYYYGMDVW

SEQ ID NO: 14031 - protein, 19 aa, Homo sapiens
CARSMGDSSGYLSYYFDYW

SEQ ID NO: 14032 - protein, 19 aa, Homo sapiens
CARGAFGYNSYGGNWFDPW

SEQ ID NO: 14033 - protein, 16 aa, Homo sapiens
CARSRSGSYQSPFDPW

SEQ ID NO: 14034 - protein, 23 aa, Homo sapiens
CAREPDYYSNPFGYYFYYYMDVW

SEQ ID NO: 14035 - protein, 20 aa, Homo sapiens
CARDTVLLWFGESPYYMDVW

SEQ ID NO: 14036 - protein, 21 aa, Homo sapiens
CARVEGITFGGVIASYYFDYW

SEQ ID NO: 14037 - protein, 20 aa, Homo sapiens
CATLPATIFGVPIWNYMDVW

SEQ ID NO: 14038 - protein, 17 aa, Homo sapiens
CARAPYSMNSWFRFDPW

SEQ ID NO: 14039 - protein, 15 aa, Homo sapiens
CTRDTVFGVAPFDYW

SEQ ID NO: 14040 - protein, 20 aa, Homo sapiens
CARSRWDSSGWFGGYYFDYW

SEQ ID NO: 14041 - protein, 28 aa, Homo sapiens
CARGQYYFDSTGFPQQYHRPDLPQFQYW

SEQ ID NO: 14042 - protein, 18 aa, Homo sapiens
CAREGVAARRSPPFFDYW

SEQ ID NO: 14043 - protein, 22 aa, Homo sapiens
CVHTRQDYHFLTGYLNKWFDSW

SEQ ID NO: 14044 - protein, 15 aa, Homo sapiens
CARFSSTRLDAFDIW

SEQ ID NO: 14045 - protein, 22 aa, Homo sapiens
CAHRPHDITMIVVGPYNWFDPW

SEQ ID NO: 14046 - protein, 11 aa, Homo sapiens
CANFRDHFDYW

SEQ ID NO: 14047 - protein, 20 aa, Homo sapiens
CARDGRPYSSSPTEEDFDYW

SEQ ID NO: 14048 - protein, 15 aa, Homo sapiens
CAKIAAESIVSGDYW

SEQ ID NO: 14049 - protein, 21 aa, Homo sapiens
CARGVGGYSGYDLRFFCFDYW

SEQ ID NO: 14050 - protein, 24 aa, Homo sapiens
CARDFAPVDRITMIVVVVNAFDIW

SEQ ID NO: 14051 - protein, 27 aa, Homo sapiens
CARIPTLVLRYFDWLPHHTYYYGMDVW

SEQ ID NO: 14052 - protein, 16 aa, Homo sapiens
CARETMAAAGRDFDYW

SEQ ID NO: 14053 - protein, 21 aa, Homo sapiens
CARDSESTNDYGDTENWFDPW

SEQ ID NO: 14054 - protein, 20 aa, Homo sapiens
CARRRSVRNHYDSSGLYDYW

SEQ ID NO: 14055 - protein, 15 aa, Homo sapiens
CAKRPEFIGEYFDSW

SEQ ID NO: 14056 - protein, 16 aa, Homo sapiens
CAHRPGSSWYYAFDIW

SEQ ID NO: 14057 - protein, 17 aa, Homo sapiens
CAREYGDYVFGNWFDPW

SEQ ID NO: 14058 - protein, 16 aa, Homo sapiens
CAKDDSSSSSPGGDYW

SEQ ID NO: 14059 - protein, 18 aa, Homo sapiens
CARGIPSKSGPTNWFDPW

SEQ ID NO: 14060 - protein, 22 aa, Homo sapiens
CATNSVLRYFDWLLTPYAFDLW

SEQ ID NO: 14061 - protein, 16 aa, Homo sapiens
CARDPIEYSSSTFDVW

SEQ ID NO: 14062 - protein, 18 aa, Homo sapiens
CANLAGDILTGPNAFDIW

SEQ ID NO: 14063 - protein, 15 aa, Homo sapiens
CARSDGELPSWFDPW

SEQ ID NO: 14064 - protein, 21 aa, Homo sapiens
CARDTAGYYGSGKESVWFDPW

SEQ ID NO: 14065 - protein, 23 aa, Homo sapiens
CTKSSLRLQRIFGLIRGNYFEDW

SEQ ID NO: 14066 - protein, 15 aa, Homo sapiens
CAKLPGLRAPNFDYW

SEQ ID NO: 14067 - protein, 16 aa, Homo sapiens
CAKSYYYGSGSYPDYW

SEQ ID NO: 14068 - protein, 19 aa, Homo sapiens
CARARGGAKNYGSYYFDYW

SEQ ID NO: 14069 - protein, 18 aa, Homo sapiens
CARHYDSTSYYNYYFDQW

SEQ ID NO: 14070 - protein, 16 aa, Homo sapiens
CATDFAIAVAGTLDYW

SEQ ID NO: 14071 - protein, 19 aa, Homo sapiens
CARVASQWSSYYTAFFDFW

SEQ ID NO: 14072 - protein, 15 aa, Homo sapiens
CTETHDYYYYGMDVW

SEQ ID NO: 14073 - protein, 18 aa, Homo sapiens
CAAPHCSGGSCHDAFDIW

SEQ ID NO: 14074 - protein, 18 aa, Homo sapiens
CARGGYYYDSSGPHIDYW

SEQ ID NO: 14075 - protein, 20 aa, Homo sapiens
CARTPSYYYDSSGYFSFDYW

SEQ ID NO: 14076 - protein, 19 aa, Homo sapiens
CARQLYNIDSYESRWFDIW

SEQ ID NO: 14077 - protein, 16 aa, Homo sapiens
CATDLMVVGATVYDYW

SEQ ID NO: 14078 - protein, 22 aa, Homo sapiens
CARSPPGEGTMIVVAEYYFDYW

SEQ ID NO: 14079 - protein, 20 aa, Homo sapiens
CARELYYDFWSGYSVAPDYW

SEQ ID NO: 14080 - protein, 15 aa, Homo sapiens
CARDHASGRSSVDYW

SEQ ID NO: 14081 - protein, 17 aa, Homo sapiens
CAKTRGPYDSSGLVDYW

SEQ ID NO: 14082 - protein, 16 aa, Homo sapiens
CTREAESGLRFYMDVW

SEQ ID NO: 14083 - protein, 25 aa, Homo sapiens
CARNFPGGTIFGVLSYEPSGWFDPW

SEQ ID NO: 14084 - protein, 14 aa, Homo sapiens
CATSNSYGLTGDYW

SEQ ID NO: 14085 - protein, 23 aa, Homo sapiens
CARHERNYDYVWGSYRYEYFDYW

SEQ ID NO: 14086 - protein, 21 aa, Homo sapiens
CADYSNYVGGDEGYYYYMDVW

SEQ ID NO: 14087 - protein, 18 aa, Homo sapiens
CARGEWLTDYTLKSFTYW

SEQ ID NO: 14088 - protein, 16 aa, Homo sapiens
CARPRGGSYAGEFDYW

SEQ ID NO: 14089 - protein, 24 aa, Homo sapiens
CARDAIALYYYDSSGSVDWYFDLW

SEQ ID NO: 14090 - protein, 22 aa, Homo sapiens
CTYYCVRRGGDLVLGRGYFDLW

SEQ ID NO: 14091 - protein, 22 aa, Homo sapiens
CAGSYYDFWSGYYTRSNYFDYW

SEQ ID NO: 14092 - protein, 24 aa, Homo sapiens
CARPTYYYDSSGYYYVGPSTFDHW

SEQ ID NO: 14093 - protein, 16 aa, Homo sapiens
CARWKSGYSSGWNDYW

SEQ ID NO: 14094 - protein, 22 aa, Homo sapiens
CANAPDDSSGYYYVLGGAFDIW

SEQ ID NO: 14095 - protein, 22 aa, Homo sapiens
CARLRGSITMIVVAMGPWFDPW

SEQ ID NO: 14096 - protein, 14 aa, Homo sapiens
CAKLAPSSSHCDYW

SEQ ID NO: 14097 - protein, 17 aa, Homo sapiens
CASDPIAVAGLDAFDIW

SEQ ID NO: 14098 - protein, 20 aa, Homo sapiens
CARFPSHYYYESSGFSADYW

SEQ ID NO: 14099 - protein, 26 aa, Homo sapiens
CAREVACLGGSGRPRGDCYPNWFDPW

SEQ ID NO: 14100 - protein, 16 aa, Homo sapiens
CAKDKYQLLSAGFDYW

SEQ ID NO: 14101 - protein, 22 aa, Homo sapiens
CARDLGFLEWLFRDYYYYMDVW

SEQ ID NO: 14102 - protein, 18 aa, Homo sapiens
CAKDISGSSGYQYYFDYW

SEQ ID NO: 14103 - protein, 33 aa, Homo sapiens
CDWSSDVCSSDLDGQRWLQSTDTYYYYYGMDVW

SEQ ID NO: 14104 - protein, 14 aa, Homo sapiens
CATVPLWFGVFDPW

SEQ ID NO: 14105 - protein, 17 aa, Homo sapiens
CSKARIYYHDRSGPDYW

SEQ ID NO: 14106 - protein, 23 aa, Homo sapiens
CARQIPRDNDFWSGYHTGYFDYW

SEQ ID NO: 14107 - protein, 15 aa, Homo sapiens
CARTAYIFGSSFDYW

SEQ ID NO: 14108 - protein, 18 aa, Homo sapiens
CAKDPESEYQLPHWFDPW

SEQ ID NO: 14109 - protein, 16 aa, Homo sapiens
CASPNDSGDYARFDYW

SEQ ID NO: 14110 - protein, 18 aa, Homo sapiens
CTTQYSSSSNARGNFDYW

SEQ ID NO: 14111 - protein, 23 aa, Homo sapiens
CAKDRSPYYYDSSGWGDWTLDYW

SEQ ID NO: 14112 - protein, 22 aa, Homo sapiens
CAIRSGDLLRFLEWVDDAFDIW

SEQ ID NO: 14113 - protein, 16 aa, Homo sapiens
CATDFAWFGELFFGYW

SEQ ID NO: 14114 - protein, 21 aa, Homo sapiens
CARSQTGWPHNYYYYYYMDVW

SEQ ID NO: 14115 - protein, 16 aa, Homo sapiens
CTSMVPMVYAYYFDYW

SEQ ID NO: 14116 - protein, 25 aa, Homo sapiens
CARDGFWLYYDILTGYLPPYYFDYW

SEQ ID NO: 14117 - protein, 21 aa, Homo sapiens
CARQSTNYDRNGYFYDWFDPW

SEQ ID NO: 14118 - protein, 22 aa, Homo sapiens
CARGPNYYDFWSGYYRNWFDPW

SEQ ID NO: 14119 - protein, 25 aa, Homo sapiens
CATAPVLRSSNTWGHYYYYYGMDVW

SEQ ID NO: 14120 - protein, 20 aa, Homo sapiens
CAKDLSLATVPYYYYGMDVW

SEQ ID NO: 14121 - protein, 17 aa, Homo sapiens
CAREVPLNWASYYFDYW

SEQ ID NO: 14122 - protein, 18 aa, Homo sapiens
CATGPIFGSGWTNWFDPW

SEQ ID NO: 14123 - protein, 23 aa, Homo sapiens
CAKVSYYYDSSGYPRNHDAFDIW

SEQ ID NO: 14124 - protein, 16 aa, Homo sapiens
CAKAQSDSSGYSPDYW

SEQ ID NO: 14125 - protein, 18 aa, Homo sapiens
CTHPTTGFDTAWIPFDYW

SEQ ID NO: 14126 - protein, 25 aa, Homo sapiens
CARATSTYYDFWSGTERDAGIFDYW

SEQ ID NO: 14127 - protein, 19 aa, Homo sapiens
CASSPTDPREYYYYYMDVW

SEQ ID NO: 14128 - protein, 15 aa, Homo sapiens
CTREAATVTIALDYW

SEQ ID NO: 14129 - protein, 19 aa, Homo sapiens
CARDLWSGYLAYYYGMDVW

SEQ ID NO: 14130 - protein, 22 aa, Homo sapiens
CARDTVPYYDFWSGYYFSFDPW

SEQ ID NO: 14131 - protein, 14 aa, Homo sapiens
CAKDFEYSGSVDYW

SEQ ID NO: 14132 - protein, 17 aa, Homo sapiens
CARHEIVGAGPDWFDPW

SEQ ID NO: 14133 - protein, 18 aa, Homo sapiens
CARHRLYGGNSNDAFDIW

SEQ ID NO: 14134 - protein, 18 aa, Homo sapiens
CASQPINEYSSSYWFDPW

SEQ ID NO: 14135 - protein, 16 aa, Homo sapiens
CAKHGSGRSNWYFDLW

SEQ ID NO: 14136 - protein, 21 aa, Homo sapiens
CAKAMGEYCGSGCYSRIIDYW

SEQ ID NO: 14137 - protein, 18 aa, Homo sapiens
CAHINTLITDWYAPFDYW

SEQ ID NO: 14138 - protein, 20 aa, Homo sapiens
CTGGVCYLEYYYYYYYMDVW

SEQ ID NO: 14139 - protein, 14 aa, Homo sapiens
CARDRPQVGATDYW

SEQ ID NO: 14140 - protein, 23 aa, Homo sapiens
CAKGPWFGEPGLTNYYYYGMDVW

SEQ ID NO: 14141 - protein, 18 aa, Homo sapiens
CNSVSSSIFGVVTGEDYW

SEQ ID NO: 14142 - protein, 13 aa, Homo sapiens
CAIYVDIVAFFYW

SEQ ID NO: 14143 - protein, 17 aa, Homo sapiens
CTTEFYDFWSGDAFDIW

SEQ ID NO: 14144 - protein, 16 aa, Homo sapiens
CATFKTIYSYGTFDYW

SEQ ID NO: 14145 - protein, 24 aa, Homo sapiens
CARDLEGRANDYDSSNYGRWFDPW

SEQ ID NO: 14146 - protein, 17 aa, Homo sapiens
CARETEDDVYKNYFDLW

SEQ ID NO: 14147 - protein, 18 aa, Homo sapiens
CARDSLFRDFWSGSFDYW

SEQ ID NO: 14148 - protein, 17 aa, Homo sapiens
CTRDAYSRGSYFFFDYW

SEQ ID NO: 14149 - protein, 19 aa, Homo sapiens
CARWGVLVGSTWRDAFDIW

SEQ ID NO: 14150 - protein, 24 aa, Homo sapiens
CARGPPTYDFWSGYSPSHWYFDLW

SEQ ID NO: 14151 - protein, 11 aa, Homo sapiens [sequence omitted]

SEQ ID NO: 14152 - protein, 17 aa, Homo sapiens
CARGQGKAVAGLYFDYW

SEQ ID NO: 14153 - protein, 20 aa, Homo sapiens
CAKGPPASYGSFYFNYMDVW

SEQ ID NO: 14154 - protein, 22 aa, Homo sapiens
CATGGETIFGVVTSAYYYMDVW

SEQ ID NO: 14155 - protein, 23 aa, Homo sapiens
CARGMGGDPLTGYSYGLYYFDYW

SEQ ID NO: 14156 - protein, 20 aa, Homo sapiens
CAKSFDDDFWSGYYYGMDVW

SEQ ID NO: 14157 - protein, 24 aa, Homo sapiens
CARDDLGTFTAARLGYYYYGMDVW

SEQ ID NO: 14158 - protein, 14 aa, Homo sapiens
CARRGGAPTYFDYW

SEQ ID NO: 14159 - protein, 21 aa, Homo sapiens
CARHPEDIYSNYYYYYYMDVW

SEQ ID NO: 14160 - protein, 22 aa, Homo sapiens
CAKERVLRYFDWTGPPDAFDIW

SEQ ID NO: 14161 - protein, 21 aa, Homo sapiens
CARVPQYYDIFSPARGSLDYW

SEQ ID NO: 14162 - protein, 13 aa, Homo sapiens
CQSTDYSGTSRVF

SEQ ID NO: 14163 - protein, 15 aa, Homo sapiens
CAKDGDGYNESGDYW

SEQ ID NO: 14164 - protein, 17 aa, Homo sapiens
CARVPEFTVGEYYFDYW

SEQ ID NO: 14165 - protein, 15 aa, Homo sapiens
CARTMTNANYDNDYW

SEQ ID NO: 14166 - protein, 17 aa, Homo sapiens
CAKGRWGIVATSSFDYW

SEQ ID NO: 14167 - protein, 13 aa, Homo sapiens
CQSVDSYGSSPVF

SEQ ID NO: 14168 - protein, 21 aa, Homo sapiens
CARGYSSSSWFDYYYYYMDVW

SEQ ID NO: 14169 - protein, 20 aa, Homo sapiens
CARARRITMVRGVIRGFDPW

SEQ ID NO: 14170 - protein, 17 aa, Homo sapiens
CAKELADTADFDYFDYW

SEQ ID NO: 14171 - protein, 15 aa, Homo sapiens
CCSYAGSYTFLNWVF

SEQ ID NO: 14172 - protein, 29 aa, Homo sapiens
CAKDSKYYDFWSGYFSEQYYYYYYGMDVW

SEQ ID NO: 14173 - protein, 20 aa, Homo sapiens
CATESGSSGWPYPISTFDIW

SEQ ID NO: 14174 - protein, 15 aa, Homo sapiens
CASHHYDILTGIDYW

SEQ ID NO: 14175 - protein, 18 aa, Homo sapiens
CASLFDSSGYLSSAFDIW

SEQ ID NO: 14176 - protein, 24 aa, Homo sapiens
CATSYSTTWYVRGAGYSYYGMDVW

SEQ ID NO: 14177 - protein, 20 aa, Homo sapiens
CARQPKGWLVRPDYYYMDVW

SEQ ID NO: 14178 - protein, 27 aa, Homo sapiens
CAKGRVRPEPLMITFGGVIVNDAFDIW

SEQ ID NO: 14179 - protein, 19 aa, Homo sapiens
CAKDMSDAAAAAKFRFDPW

SEQ ID NO: 14180 - protein, 17 aa, Homo sapiens
CATTMGRLLLWLAIDYW

SEQ ID NO: 14181 - protein, 15 aa, Homo sapiens
CAREPAAIKEGFDYW

SEQ ID NO: 14182 - protein, 13 aa, Homo sapiens
CANLPDLNAFDIW

SEQ ID NO: 14183 - protein, 15 aa, Homo sapiens
CARDGESPSTAFDIW

SEQ ID NO: 14184 - protein, 20 aa, Homo sapiens
CACLGDGNYYDSSGYLFDYW

SEQ ID NO: 14185 - protein, 11 aa, Homo sapiens
CQHLNSYQFPF

SEQ ID NO: 14186 - protein, 17 aa, Homo sapiens
CATGSPVAGTSSWFDPW

SEQ ID NO: 14187 - protein, 27 aa, Homo sapiens
CAKAFRIQPITMVRGVPLFYYYGMDVW

SEQ ID NO: 14188 - protein, 20 aa, Homo sapiens
CARDPSALSFYGLGSYFDDW

SEQ ID NO: 14189 - protein, 19 aa, Homo sapiens
CARQIAYCGGDCSMRFDPW

SEQ ID NO: 14190 - protein, 17 aa, Homo sapiens
CAKSRLVVIQYNWFDPW

SEQ ID NO: 14191 - protein, 17 aa, Homo sapiens
CAHRRPNWNDGGYFDYW

SEQ ID NO: 14192 - protein, 14 aa, Homo sapiens
CVTWDSTLSADWLF

SEQ ID NO: 14193 - protein, 16 aa, Homo sapiens
CAHSGYSSGVYYFDYW

SEQ ID NO: 14194 - protein, 14 aa, Homo sapiens
CAGAAAGIGALDYW

SEQ ID NO: 14195 - protein, 24 aa, Homo sapiens
CARRRDYLDSSAYYYAEYDAFDIW

SEQ ID NO: 14196 - protein, 14 aa, Homo sapiens
CATLTWTTGYFDPW

SEQ ID NO: 14197 - protein, 12 aa, Homo sapiens
CAHFFLGYFVYW

SEQ ID NO: 14198 - protein, 15 aa, Homo sapiens
CAREGVTTTSWFDPW

SEQ ID NO: 14199 - protein, 26 aa, Homo sapiens
CARGRRTRRRLQGSGLPEAKPTFDIW

SEQ ID NO: 14200 - protein, 16 aa, Homo sapiens
CVKESQWAVMGLFEYW

SEQ ID NO: 14201 - protein, 23 aa, Homo sapiens
CARESIPIYFDPNPAYYYGMDVW

SEQ ID NO: 14202 - protein, 18 aa, Homo sapiens
CAKADIPNSSSWYPLDYW

SEQ ID NO: 14203 - protein, 18 aa, Homo sapiens
CAKDARIQLWYLYYFDYW

SEQ ID NO: 14204 - protein, 11 aa, Homo sapiens
CQQFNNFIFTF

SEQ ID NO: 14205 - protein, 18 aa, Homo sapiens
CVKEGYCRGASCAHFDYW

SEQ ID NO: 14206 - protein, 18 aa, Homo sapiens
CASSPDWGSTAFYYMDVW

SEQ ID NO: 14207 - protein, 15 aa, Homo sapiens
CAKDIRTVTDAFDIW

SEQ ID NO: 14208 - protein, 16 aa, Homo sapiens
CARARGGSYFDAFDIW

SEQ ID NO: 14209 - protein, 24 aa, Homo sapiens
CARDPTPLESESPLPYYYYGMDVW

SEQ ID NO: 14210 - protein, 17 aa, Homo sapiens
CATVGDYVWGSYHHDYW

SEQ ID NO: 14211 - protein, 19 aa, Homo sapiens
CATSFPALWGSYRTPLDYW

SEQ ID NO: 14212 - protein, 16 aa, Homo sapiens
CAKDGYFDWLFTFDYW

SEQ ID NO: 14213 - protein, 19 aa, Homo sapiens
CEFSLVVYAIGPNYYFDYW

SEQ ID NO: 14214 - protein, 22 aa, Homo sapiens
CARVGVDDRYCDNFRCYYMDVW

SEQ ID NO: 14215 - protein, 25 aa, Homo sapiens
CASLGGLDYYGSGRDYYYYYGMDVW

SEQ ID NO: 14216 - protein, 14 aa, Homo sapiens
CAHRLYTKRHFDIW

SEQ ID NO: 14217 - protein, 18 aa, Homo sapiens
CARALVATMIVVQHFDYW

SEQ ID NO: 14218 - protein, 22 aa, Homo sapiens
CARTNYDYVWGSYRSPTSFDYW

SEQ ID NO: 14219 - protein, 19 aa, Homo sapiens
CARRVWGSYRYDPTPFDYW

SEQ ID NO: 14220 - protein, 17 aa, Homo sapiens
CARAPNIAIVAMYFDYW

SEQ ID NO: 14221 - protein, 19 aa, Homo sapiens
CARQQLKYGSGWDDAFDIW

SEQ ID NO: 14222 - protein, 21 aa, Homo sapiens
CARMYQLPPDGYYYYYGMDVW

SEQ ID NO: 14223 - protein, 10 aa, Homo sapiens
CFSTGYLDYW

SEQ ID NO: 14224 - protein, 18 aa, Homo sapiens
CARRRGFGVVKRNWFDPW

SEQ ID NO: 14225 - protein, 15 aa, Homo sapiens
CARGASDFAGFFDYW

SEQ ID NO: 14226 - protein, 17 aa, Homo sapiens
CARDSGGYDSDNYMDVW

SEQ ID NO: 14227 - protein, 16 aa, Homo sapiens
CARAILDDYGDYFDYW

SEQ ID NO: 14228 - protein, 25 aa, Homo sapiens
CATESWGNCSSTSCQPYYYYGMDVW

SEQ ID NO: 14229 - protein, 16 aa, Homo sapiens
CAHLAEWELSDAFDIW

SEQ ID NO: 14230 - protein, 14 aa, Homo sapiens
CARDSFAARYFDLW

SEQ ID NO: 14231 - protein, 18 aa, Homo sapiens
CARHRSGSLKGGDYVDYW

SEQ ID NO: 14232 - protein, 18 aa, Homo sapiens
CATDSRSQWLRTTYFDYW

SEQ ID NO: 14233 - protein, 18 aa, Homo sapiens
CALDSGYSSSWYGVFDYW

SEQ ID NO: 14234 - protein, 18 aa, Homo sapiens
CARRKYYYDSSGYYMDVW

SEQ ID NO: 14235 - protein, 22 aa, Homo sapiens
CARGLVAAAGLGYYYYYGMDVW

SEQ ID NO: 14236 - protein, 17 aa, Homo sapiens
CARGGGLYGAGSYFDYW

SEQ ID NO: 14237 - protein, 25 aa, Homo sapiens
CAKDMGGSGWYSVGGLLYSSALDVW

SEQ ID NO: 14238 - protein, 19 aa, Homo sapiens
CARVQLWLPPYYYYGMDVW

SEQ ID NO: 14239 - protein, 14 aa, Homo sapiens
CADLTGTLNFDGYW

SEQ ID NO: 14240 - protein, 26 aa, Homo sapiens
CARVPFPFFSDDFWSGSYYYYGMDVW

SEQ ID NO: 14241 - protein, 21 aa, Homo sapiens
CVKDRLPGRAVASSGPSFDHW

SEQ ID NO: 14242 - protein, 17 aa, Homo sapiens
CARDYVWGRTNSTGDYW

SEQ ID NO: 14243 - protein, 16 aa, Homo sapiens
CATSGDGYNSPPFDYW

SEQ ID NO: 14244 - protein, 18 aa, Homo sapiens
CARDLRGDGYESLHFDYW

SEQ ID NO: 14245 - protein, 16 aa, Homo sapiens
CASEGSIAALDYFDYW

SEQ ID NO: 14246 - protein, 18 aa, Homo sapiens
CARGSTTLVVTPVAFDIW

SEQ ID NO: 14247 - protein, 16 aa, Homo sapiens
CARADDSDAAYAFDYW

SEQ ID NO: 14248 - protein, 18 aa, Homo sapiens
CARESGSWYVPGGWFDPW

SEQ ID NO: 14249 - protein, 13 aa, Homo sapiens
CYSADSGNNYRVF

SEQ ID NO: 14250 - protein, 16 aa, Homo sapiens
CARRAGAETWNPFSYW

SEQ ID NO: 14251 - protein, 20 aa, Homo sapiens
CAIRHQWGGSCYSCYAFDIW

SEQ ID NO: 14252 - protein, 16 aa, Homo sapiens
CARSQWGSYRSCFDYW

SEQ ID NO: 14253 - protein, 15 aa, Homo sapiens
CAKLPYGDYVAVDYW

SEQ ID NO: 14254 - protein, 20 aa, Homo sapiens
CARHSRFLENLLSIPWFDPW

SEQ ID NO: 14255 - protein, 23 aa, Homo sapiens
CARDIGCTSISCYNYYYYGMDVW

SEQ ID NO: 14256 - protein, 18 aa, Homo sapiens
CAREGWEQWLEYDAFDIW

SEQ ID NO: 14257 - protein, 12 aa, Homo sapiens
CGRLERDAFDFW

SEQ ID NO: 14258 - protein, 21 aa, Homo sapiens
CARDGGSPMVRGVIAPPFDYW

SEQ ID NO: 14259 - protein, 18 aa, Homo sapiens
CTTGWETVTPQQDTFDYW

SEQ ID NO: 14260 - protein, 15 aa, Homo sapiens
CARKLGGTAHAFDIW

SEQ ID NO: 14261 - protein, 21 aa, Homo sapiens
CARDNNYGSGSYWNYYYMDVW

SEQ ID NO: 14262 - protein, 16 aa, Homo sapiens
CAKDIIPVGASYFDYW

SEQ ID NO: 14263 - protein, 18 aa, Homo sapiens
CVRDGIGISEAPDGFDLW

SEQ ID NO: 14264 - protein, 32 aa, Homo sapiens
CARDRRYYDFWSGYYIEPVPPLVHYYYGMDVW

SEQ ID NO: 14265 - protein, 17 aa, Homo sapiens
CARGYSSSWFKEFFQHW

SEQ ID NO: 14266 - protein, 23 aa, Homo sapiens
CARILGPLGFCSGGSCPYHFDYW

SEQ ID NO: 14267 - protein, 20 aa, Homo sapiens
CARNVVVPTPIEPGDWFDPW

SEQ ID NO: 14268 - protein, 18 aa, Homo sapiens
CAKLPPDGYNPDDAFDIW

SEQ ID NO: 14269 - protein, 19 aa, Homo sapiens
CTTAEAPDIVVVPAAADYW

SEQ ID NO: 14270 - protein, 12 aa, Homo sapiens
CAKIGQLGNDYW

SEQ ID NO: 14271 - protein, 15 aa, Homo sapiens
CAKLQTEITGTNDYW

SEQ ID NO: 14272 - protein, 16 aa, Homo sapiens
CATTYAIAAPQIPDYW

SEQ ID NO: 14273 - protein, 25 aa, Homo sapiens
CAKESLDDFWSGYPTTYYYYGMDVW

SEQ ID NO: 14274 - protein, 22 aa, Homo sapiens
CARQCSGGHDNDGFYYWWFDPW

SEQ ID NO: 14275 - protein, 17 aa, Homo sapiens
CARWAEVERLPDAFDIW

SEQ ID NO: 14276 - protein, 17 aa, Homo sapiens
CTSSYSGYYIGPGFDPW

SEQ ID NO: 14277 - protein, 18 aa, Homo sapiens
CARGVQQWLTPGGWFDPW

SEQ ID NO: 14278 - protein, 25 aa, Homo sapiens
CAREGDIVVVPAAIGVYNYYGMDVW

SEQ ID NO: 14279 - protein, 16 aa, Homo sapiens
CASRGGSYGDYTFDYW

SEQ ID NO: 14280 - protein, 17 aa, Homo sapiens
CARARIAARPVGAFDIW

SEQ ID NO: 14281 - protein, 14 aa, Homo sapiens
CAKSGAMGDYFDYW

SEQ ID NO: 14282 - protein, 19 aa, Homo sapiens
CAKDNSPVVVAANNWFDPW

SEQ ID NO: 14283 - protein, 16 aa, Homo sapiens
CARPDTAMGLDAFDIW

SEQ ID NO: 14284 - protein, 18 aa, Homo sapiens
CAKGTTSVVPGVTYHDYW

SEQ ID NO: 14285 - protein, 22 aa, Homo sapiens
CAKPATEYSSGWYPLGYYFDYW

SEQ ID NO: 14286 - protein, 18 aa, Homo sapiens
CAKDPLDYDSSGYTFDYW

SEQ ID NO: 14287 - protein, 17 aa, Homo sapiens
CARLNSGFDYYYGMDVW

SEQ ID NO: 14288 - protein, 20 aa, Homo sapiens
CARGDYYDSGGFFSDAFDIW

SEQ ID NO: 14289 - protein, 23 aa, Homo sapiens
CTRESGVRLGELAIYYYYGMDVW

SEQ ID NO: 14290 - protein, 15 aa, Homo sapiens
CAAWYYDILTGFIYW

SEQ ID NO: 14291 - protein, 21 aa, Homo sapiens
CAKTYYYDSSGVPSLVYFDYW

SEQ ID NO: 14292 - protein, 21 aa, Homo sapiens
CARDVHYYDSSGYLPRLFDYW

SEQ ID NO: 14293 - protein, 19 aa, Homo sapiens
CARINYYDSSGRVSAFDIW

SEQ ID NO: 14294 - protein, 23 aa, Homo sapiens
CARAPLYCSSTSCYTGPRYFDLW

SEQ ID NO: 14295 - protein, 20 aa, Homo sapiens
CAKAYYSNYVSGTATPYDYW

SEQ ID NO: 14296 - protein, 24 aa, Homo sapiens
CASLRRGPGILTGREAGREAFEIW

SEQ ID NO: 14297 - protein, 12 aa, Homo sapiens
CQVWDSYSAPSF

SEQ ID NO: 14298 - protein, 23 aa, Homo sapiens
CAKDRARRFLEWFPLRSDGMDVW

SEQ ID NO: 14299 - protein, 18 aa, Homo sapiens
CATAVLLWFGADNWFDPW

SEQ ID NO: 14300 - protein, 21 aa, Homo sapiens
CARVGGTRSSWYFYYYYMDVW

SEQ ID NO: 14301 - protein, 27 aa, Homo sapiens
CARVRLEYYDFWSGYPPYYYYYYMDVW

SEQ ID NO: 14302 - protein, 22 aa, Homo sapiens
CARDEGYCSGGSCYDYYGMDVW

SEQ ID NO: 14303 - protein, 22 aa, Homo sapiens
CAKDGYAITYYFDSSGYYFDNW

SEQ ID NO: 14304 - protein, 24 aa, Homo sapiens
CARDHPDYDYVWGSYRPRGYFDYW

SEQ ID NO: 14305 - protein, 14 aa, Homo sapiens
CARANPITGHFDYW

SEQ ID NO: 14306 - protein, 17 aa, Homo sapiens
CARAQQLGILIEYFQHW

SEQ ID NO: 14307 - protein, 24 aa, Homo sapiens
CARDGEFYSGYDKRHYYYYYMDVW

SEQ ID NO: 14308 - protein, 13 aa, Homo sapiens
CALCSVHNWFDTW

SEQ ID NO: 14309 - protein, 17 aa, Homo sapiens
CARALPFFDTRPYFDPW

SEQ ID NO: 14310 - protein, 17 aa, Homo sapiens
CALGYSYDSYYWYFDLW

SEQ ID NO: 14311 - protein, 19 aa, Homo sapiens
CTTDPSLYRYYYYYYMDVW

SEQ ID NO: 14312 - protein, 17 aa, Homo sapiens
CQNYNSGPMYNAPMYNF

SEQ ID NO: 14313 - protein, 20 aa, Homo sapiens
CARGAYSGSGTSFHDAFDIW

SEQ ID NO: 14314 - protein, 21 aa, Homo sapiens
CTRVRNAYSHPPYYYYGMDVW

SEQ ID NO: 14315 - protein, 21 aa, Homo sapiens
CARSGRFLDWLWKDHDALDVW

SEQ ID NO: 14316 - protein, 22 aa, Homo sapiens
CARGPDMLFGELSDGVQYFEYW

SEQ ID NO: 14317 - protein, 18 aa, Homo sapiens
CARVEYSSGLKYWYFDLW

SEQ ID NO: 14318 - protein, 17 aa, Homo sapiens
CARHTLYSYGSSLFDYW

SEQ ID NO: 14319 - protein, 15 aa, Homo sapiens
CARESDFGYNLPDYW

SEQ ID NO: 14320 - protein, 20 aa, Homo sapiens
CARLGSSGWYSNYFYYIDVW

SEQ ID NO: 14321 - protein, 17 aa, Homo sapiens
CAKDPTNPAEGVWFDPW

SEQ ID NO: 14322 - protein, 20 aa, Homo sapiens
CAKDYGDGYSRNPHNWFDPW

SEQ ID NO: 14323 - protein, 18 aa, Homo sapiens
CARQGDYYDSNGNWFDPW

SEQ ID NO: 14324 - protein, 18 aa, Homo sapiens
CAKVIYSYGYLESYFDYW

SEQ ID NO: 14325 - protein, 17 aa, Homo sapiens
CATRITIFGVVTYMDVW

SEQ ID NO: 14326 - protein, 22 aa, Homo sapiens
CARASDFYYDGSPYYRDAFDIW

SEQ ID NO: 14327 - protein, 18 aa, Homo sapiens
CAKPPLDPGLTGNAFDIW

SEQ ID NO: 14328 - protein, 22 aa, Homo sapiens
CARGFHQRYYYGSGSYYWFDPW

SEQ ID NO: 14329 - protein, 9 aa, Homo sapiens
CARVYLGYW

SEQ ID NO: 14330 - protein, 24 aa, Homo sapiens
CAKDPILEWLLIPKITHSFDFDYW

SEQ ID NO: 14331 - protein, 15 aa, Homo sapiens
CAGYSSVQLYYFDFW

SEQ ID NO: 14332 - protein, 17 aa, Homo sapiens
CASYCGGDCYEYYFDYW

SEQ ID NO: 14333 - protein, 18 aa, Homo sapiens
CARDMTHDYGDYPLFDYW

SEQ ID NO: 14334 - protein, 18 aa, Homo sapiens
CARERDSSGHYFDYFDSW

SEQ ID NO: 14335 - protein, 17 aa, Homo sapiens
CATLQGGYSYGYLGDYW

SEQ ID NO: 14336 - protein, 19 aa, Homo sapiens
CARLYIVAAWRLGYYFDYW

SEQ ID NO: 14337 - protein, 17 aa, Homo sapiens
CAKVASTSWYQAYFDYW

SEQ ID NO: 14338 - protein, 30 aa, Homo sapiens
CARDDRYYDILTGYFPARGNYYYYYYMDVW

SEQ ID NO: 14339 - protein, 16 aa, Homo sapiens
CAKDSARELLSVFGYW

SEQ ID NO: 14340 - protein, 26 aa, Homo sapiens
CAKGTPGGTVLSSRYTGEQRDAFDIW

SEQ ID NO: 14341 - protein, 14 aa, Homo sapiens
CAKAGVVTAIGDYW

SEQ ID NO: 14342 - protein, 14 aa, Homo sapiens
CARRVVVTGEIDYW

SEQ ID NO: 14343 - protein, 17 aa, Homo sapiens
CAKDYGVDYGDSYFDYW

SEQ ID NO: 14344 - protein, 24 aa, Homo sapiens
CARALPPLDYYDSSGHKGYAFDIW

SEQ ID NO: 14345 - protein, 21 aa, Homo sapiens
CARDHLHYYDSSVSFPGVDYW

SEQ ID NO: 14346 - protein, 15 aa, Homo sapiens
CAGNAPGTPSAFDIW

SEQ ID NO: 14347 - protein, 22 aa, Homo sapiens
CARDKPVRARTVVRGIIEFDYW

SEQ ID NO: 14348 - protein, 22 aa, Homo sapiens
CARDNPGADFWSGYYTGPFDYW

SEQ ID NO: 14349 - protein, 18 aa, Homo sapiens
CARGRYYDTSGSLYFDYW

SEQ ID NO: 14350 - protein, 22 aa, Homo sapiens
CARTYVFEIFGVVSWHNWFDPW

SEQ ID NO: 14351 - protein, 23 aa, Homo sapiens
CARERRRRHHFDGGDYSYAFDIW

SEQ ID NO: 14352 - protein, 14 aa, Homo sapiens
CARSPRGGFSFDIW

SEQ ID NO: 14353 - protein, 20 aa, Homo sapiens
CAKDRVTIFGVGGEYYFDYW

SEQ ID NO: 14354 - protein, 22 aa, Homo sapiens
CATESFKNYDSSGYLGYAFDIW

SEQ ID NO: 14355 - protein, 17 aa, Homo sapiens
CAKDIASNDYGDSRDYW

SEQ ID NO: 14356 - protein, 15 aa, Homo sapiens
CASLYNWNADGMDVW

SEQ ID NO: 14357 - protein, 26 aa, Homo sapiens
CARHVGGLLWFGELFHGVHNWYFDLW

SEQ ID NO: 14358 - protein, 22 aa, Homo sapiens
CARSPLYHYDTRGYFQLFFDYW

SEQ ID NO: 14359 - protein, 21 aa, Homo sapiens
CAKEYHYSGSYYDMDLAFDIW

SEQ ID NO: 14360 - protein, 16 aa, Homo sapiens
CARGSGEQQLVHGDYW

SEQ ID NO: 14361 - protein, 21 aa, Homo sapiens
CARYGVQLWFLVASQYYFDYW

SEQ ID NO: 14362 - protein, 19 aa, Homo sapiens
CARDISSGWYQEGDYFDYW

SEQ ID NO: 14363 - protein, 20 aa, Homo sapiens
CATLPTAYYYDSSGYAVDYW

SEQ ID NO: 14364 - protein, 24 aa, Homo sapiens
CARVPPVPYYDSSGYYYYYYMDVW

SEQ ID NO: 14365 - protein, 21 aa, Homo sapiens
CTTEQQLVLGLYYYYYYMDVW

SEQ ID NO: 14366 - protein, 15 aa, Homo sapiens
CANLYGDYVPTLDYW

SEQ ID NO: 14367 - protein, 15 aa, Homo sapiens
CARERDTADYTLDYW

SEQ ID NO: 14368 - protein, 17 aa, Homo sapiens
CATALWTAHDSLAFDIW

SEQ ID NO: 14369 - protein, 22 aa, Homo sapiens
CARSRGYYYDSSGYPVGAFDIW

SEQ ID NO: 14370 - protein, 21 aa, Homo sapiens
CAKDRQYYDSSGYYHNWFDPW

SEQ ID NO: 14371 - protein, 15 aa, Homo sapiens
CAKDIRGWYNWFDPW

SEQ ID NO: 14372 - protein, 18 aa, Homo sapiens
CARDGHYDSSGYYEVDYW

SEQ ID NO: 14373 - protein, 21 aa, Homo sapiens
CARGPRTLVVPAAINKGDDYW

SEQ ID NO: 14374 - protein, 26 aa, Homo sapiens
CTRHTDGQRWLQSTDTYYYYYGMDVW

SEQ ID NO: 14375 - protein, 20 aa, Homo sapiens
CASSQRYFDFWSGLDAFDLW

SEQ ID NO: 14376 - protein, 21 aa, Homo sapiens
CARDFYEFDNSGYYEDHFDLW

SEQ ID NO: 14377 - protein, 19 aa, Homo sapiens
CAKLYDSSGYYYDHHFDYW

SEQ ID NO: 14378 - protein, 24 aa, Homo sapiens
CAKVDRLLWFGELLKGEENWFDPW

SEQ ID NO: 14379 - protein, 21 aa, Homo sapiens
CAKDLLYYDSSGYYSGFFDYW

SEQ ID NO: 14380 - protein, 23 aa, Homo sapiens
CARHVSHIALAGTFVAADAFDIW

SEQ ID NO: 14381 - protein, 22 aa, Homo sapiens
CARVGYEDGRGYYYYYYGMDVW

SEQ ID NO: 14382 - protein, 15 aa, Homo sapiens
CAIVYNWNYGVEDYW

SEQ ID NO: 14383 - protein, 16 aa, Homo sapiens
CAAVFSYDWSPAFDIW

SEQ ID NO: 14384 - protein, 22 aa, Homo sapiens
CARPVLRFLEWLSPAGVWFDPW

SEQ ID NO: 14385 - protein, 18 aa, Homo sapiens
CAKEGIAVAGTANWFDPW

SEQ ID NO: 14386 - protein, 21 aa, Homo sapiens
CATDKGWLLFSPSPTNWFDPW

SEQ ID NO: 14387 - protein, 22 aa, Homo sapiens
CARERSSTIFGVVIHPGAFDIW

SEQ ID NO: 14388 - protein, 29 aa, Homo sapiens
CTRGFQYYDFWSGYYDILTGSTVDAFDIW

SEQ ID NO: 14389 - protein, 21 aa, Homo sapiens
CASLAYYYDSSGYYSSAFDIW

SEQ ID NO: 14390 - protein, 23 aa, Homo sapiens
CARRGSAYYDILTGYYPYYFDYW

SEQ ID NO: 14391 - protein, 23 aa, Homo sapiens
CAKDPYYYDSSGYQTPGRLFDYW

SEQ ID NO: 14392 - protein, 16 aa, Homo sapiens
CAREGGYGGLLHFDYW

SEQ ID NO: 14393 - protein, 31 aa, Homo sapiens
CARDTTYYDFWSGYLRGPWEHYYYYYGMDVW

SEQ ID NO: 14394 - protein, 20 aa, Homo sapiens
CARQNYDILTGLYYYGMDVW

SEQ ID NO: 14395 - protein, 21 aa, Homo sapiens
CARLAYCGGDCYSTWYYFDYW

SEQ ID NO: 14396 - protein, 15 aa, Homo sapiens
CARAEIEVAAPSDYW

SEQ ID NO: 14397 - protein, 23 aa, Homo sapiens
CARDTTSINMIMVVPGHGWLDPW

SEQ ID NO: 14398 - protein, 16 aa, Homo sapiens
CARDWAGTGTVWFDPW

SEQ ID NO: 14399 - protein, 24 aa, Homo sapiens
CARDPDCGGDCYYDQDYYYYMDVW

SEQ ID NO: 14400 - protein, 18 aa, Homo sapiens
CAKVGYSIHLLTYYFDYW

SEQ ID NO: 14401 - protein, 24 aa, Homo sapiens
CATGSPDYDYVWGSYKRGNWFDPW

SEQ ID NO: 14402 - protein, 21 aa, Homo sapiens
CTREIRPPGYSSDISGYSDYW

SEQ ID NO: 14403 - protein, 17 aa, Homo sapiens
CTTERGYGGANDAFDIW

SEQ ID NO: 14404 - protein, 14 aa, Homo sapiens
CQQRSNWLAPIYTF

SEQ ID NO: 14405 - protein, 22 aa, Homo sapiens
CAREPFYYDSSGLVPGDAFDIW

SEQ ID NO: 14406 - protein, 22 aa, Homo sapiens
CAKADQGYYDSSGYYGYGFDYW

SEQ ID NO: 14407 - protein, 20 aa, Homo sapiens
CARDGDGYCSGGSCYKFDYW

SEQ ID NO: 14408 - protein, 13 aa, Homo sapiens
CATIAAQHALDYW

SEQ ID NO: 14409 - protein, 16 aa, Homo sapiens
CAKDLASAYYTAFDYW

SEQ ID NO: 14410 - protein, 20 aa, Homo sapiens
CARGYTGLSLSFHYYYMDVW

SEQ ID NO: 14411 - protein, 18 aa, Homo sapiens
CARDSYYGDYEVGWFDPW

SEQ ID NO: 14412 - protein, 18 aa, Homo sapiens
CAKDPHRGIAGVDAFDIW

SEQ ID NO: 14413 - protein, 21 aa, Homo sapiens
CARDYPIQSHSNKPVSIFDSW

SEQ ID NO: 14414 - protein, 17 aa, Homo sapiens
CARGEEYSIYFYALDVW

SEQ ID NO: 14415 - protein, 15 aa, Homo sapiens
CAKEQYYYDSYFDYW

SEQ ID NO: 14416 - protein, 23 aa, Homo sapiens
CARDVRYYDILTRYYEPGGLDYW

SEQ ID NO: 14417 - protein, 20 aa, Homo sapiens
CARHHLRHFDWLLHNYFDDW

SEQ ID NO: 14418 - protein, 20 aa, Homo sapiens
CAKDHGPYSSSWYSRDDDYW

SEQ ID NO: 14419 - protein, 21 aa, Homo sapiens
CARATNGRLIMITFVGAFDIW

SEQ ID NO: 14420 - protein, 18 aa, Homo sapiens
CASDRLWFGAGSDVFDFW

SEQ ID NO: 14421 - protein, 25 aa, Homo sapiens
CARDRPPWYCSGGSCYSDYYYMDVW

SEQ ID NO: 14422 - protein, 11 aa, Homo sapiens
CQQYSSYWFRF

SEQ ID NO: 14423 - protein, 21 aa, Homo sapiens
CARGPDYDYVWGSYRHDFDYW

SEQ ID NO: 14424 - protein, 17 aa, Homo sapiens
CARGLGYIMWADAFDIW

SEQ ID NO: 14425 - protein, 19 aa, Homo sapiens
CAKDSRLFLLGVDYYFDYW

SEQ ID NO: 14426 - protein, 16 aa, Homo sapiens
CAHRSIQLWFPSFDYW

SEQ ID NO: 14427 - protein, 21 aa, Homo sapiens
CARQQDYYDSSGRSLDALDIW

SEQ ID NO: 14428 - protein, 22 aa, Homo sapiens
CARDPSRITIFGVVIDDAFDIW

SEQ ID NO: 14429 - protein, 20 aa, Homo sapiens
CARGPYDSSAYYYPFYFDYW

SEQ ID NO: 14430 - protein, 17 aa, Homo sapiens
CASLGPDGYNTNQFDYW

SEQ ID NO: 14431 - protein, 24 aa, Homo sapiens
CARSVSAVPAAAPTYYFYHYMDVW

SEQ ID NO: 14432 - protein, 19 aa, Homo sapiens
CARSGVGSGDYYYRIFDYW

SEQ ID NO: 14433 - protein, 21 aa, Homo sapiens
CARAPTMIVVVIRIHDAFDIW

SEQ ID NO: 14434 - protein, 26 aa, Homo sapiens
CAKGQGTDYTQLLWFGELYLGAFDYW

SEQ ID NO: 14435 - protein, 21 aa, Homo sapiens
CEGRDTAMVPPLYHFYYMDVW

SEQ ID NO: 14436 - protein, 16 aa, Homo sapiens
CARELRYFDWSSFDYW

SEQ ID NO: 14437 - protein, 21 aa, Homo sapiens
CARLTMLQGLIIPAGPYFEYW

SEQ ID NO: 14438 - protein, 17 aa, Homo sapiens
CAKDGESGSYGDWFDPW

SEQ ID NO: 14439 - protein, 15 aa, Homo sapiens
CAMGLAAAGTSFDYW

SEQ ID NO: 14440 - protein, 18 aa, Homo sapiens
CAKDISTRIAAAGTFDYW

SEQ ID NO: 14441 - protein, 20 aa, Homo sapiens
CAREWKYSSGWYDLFWFDSW

SEQ ID NO: 14442 - protein, 25 aa, Homo sapiens
CATKIGAGTMRWSARPDYVDAFDIW

SEQ ID NO: 14443 - protein, 17 aa, Homo sapiens
CARGIVVVITTYRFDPW

SEQ ID NO: 14444 - protein, 19 aa, Homo sapiens
CARGGHSSSWYYYYGMDVW

SEQ ID NO: 14445 - protein, 20 aa, Homo sapiens
CAKAYRWFGEFYYYYGMDVW

SEQ ID NO: 14446 - protein, 16 aa, Homo sapiens
CARPVGRDGYKRLDYW

SEQ ID NO: 14447 - protein, 24 aa, Homo sapiens
CARDPYYEKLTGNYIGNYYYMDVW

SEQ ID NO: 14448 - protein, 21 aa, Homo sapiens
CAREGTYYDFWSGTPDAFDIW

SEQ ID NO: 14449 - protein, 18 aa, Homo sapiens
CATGTPFQQLVGWWFDPW

SEQ ID NO: 14450 - protein, 26 aa, Homo sapiens
CARDRGPHYGDPQRGIPGAHDAFEIW

SEQ ID NO: 14451 - protein, 16 aa, Homo sapiens
CATVTDFWSGYTFDYW

SEQ ID NO: 14452 - protein, 20 aa, Homo sapiens
CAKLPGDYYDSSGYYMVDYW

SEQ ID NO: 14453 - protein, 17 aa, Homo sapiens
CATHRTDGYKEYYFDYW

SEQ ID NO: 14454 - protein, 16 aa, Homo sapiens
CARDSGSSGWSRFDFW

SEQ ID NO: 14455 - protein, 17 aa, Homo sapiens
CARVSGYSGYDGAFDYW

SEQ ID NO: 14456 - protein, 14 aa, Homo sapiens
CAKDYGVSDAFDVW

SEQ ID NO: 14457 - protein, 17 aa, Homo sapiens
CAHTNANGSSGYYYDYW

SEQ ID NO: 14458 - protein, 22 aa, Homo sapiens
CARWGKCQWLAHYYYYYGMDVW

SEQ ID NO: 14459 - protein, 21 aa, Homo sapiens
CARHGVTMVRGVIITGYFDYW

SEQ ID NO: 14460 - protein, 20 aa, Homo sapiens
CARGIAAAGHFNYYYYMDVW

SEQ ID NO: 14461 - protein, 18 aa, Homo sapiens
CAKDIPWNDYSQVTVDYW

SEQ ID NO: 14462 - protein, 15 aa, Homo sapiens
CARIILTEQFGLDYW

SEQ ID NO: 14463 - protein, 19 aa, Homo sapiens
CARGQHPFSLVVVPTFDPW

SEQ ID NO: 14464 - protein, 18 aa, Homo sapiens
CARDVNSGYDETYYFDYW

SEQ ID NO: 14465 - protein, 20 aa, Homo sapiens
CAKDRAITMTRGVIKSFDYW

SEQ ID NO: 14466 - protein, 17 aa, Homo sapiens
CAREMYSSGCCGAFDIW

SEQ ID NO: 14467 - protein, 17 aa, Homo sapiens
CARGSGSYYYDSSFDYW

SEQ ID NO: 14468 - protein, 20 aa, Homo sapiens
CAKDLGDYYDSSGHNWFDPW

SEQ ID NO: 14469 - protein, 17 aa, Homo sapiens
CARLGIASRPQDWFDPW

SEQ ID NO: 14470 - protein, 25 aa, Homo sapiens
CAKEGDNYYDSSGYYYLLSDAFDIW

SEQ ID NO: 14471 - protein, 17 aa, Homo sapiens
CAKDPRNGDYDWYFDLW

SEQ ID NO: 14472 - protein, 16 aa, Homo sapiens
CAITTTVTTSGWFDPW

SEQ ID NO: 14473 - protein, 16 aa, Homo sapiens
CVREGTEYPGYYFDYW

SEQ ID NO: 14474 - protein, 17 aa, Homo sapiens
CARDLDSEIVVDAFDIW

SEQ ID NO: 14475 - protein, 22 aa, Homo sapiens
CARHEVTPTTRPRIYSYYVDVW

SEQ ID NO: 14476 - protein, 20 aa, Homo sapiens
CAKDIQGIAADSTADAFDIW

SEQ ID NO: 14477 - protein, 14 aa, Homo sapiens
CARSFLGRYTPDYW

SEQ ID NO: 14478 - protein, 17 aa, Homo sapiens
CASHRAPYDSSGYFDYW

SEQ ID NO: 14479 - protein, 18 aa, Homo sapiens
CARHVYGSGSYYSAYDYW

SEQ ID NO: 14480 - protein, 17 aa, Homo sapiens
CTTVDWRIVVVITEDYW

SEQ ID NO: 14481 - protein, 21 aa, Homo sapiens
CARDYRRGITMVRTPNRFDPW

SEQ ID NO: 14482 - protein, 20 aa, Homo sapiens
CARVPARRPYYDSSGYSDYW

SEQ ID NO: 14483 - protein, 19 aa, Homo sapiens
CARLDWLVLRQDYWFFDLW

SEQ ID NO: 14484 - protein, 16 aa, Homo sapiens
CARRSYGSSNYYSYYW

SEQ ID NO: 14485 - protein, 17 aa, Homo sapiens
CAKDQSGGSSDDAFDIW

SEQ ID NO: 14486 - protein, 18 aa, Homo sapiens
CASGSFDGGLQSRQQDYW

SEQ ID NO: 14487 - protein, 18 aa, Homo sapiens
CASMHSSSWYIKGYMDVW

SEQ ID NO: 14488 - protein, 18 aa, Homo sapiens
CAGGEENYDFWSGSIDYW

SEQ ID NO: 14489 - protein, 17 aa, Homo sapiens
CARVLWFGESLGYMDVW

SEQ ID NO: 14490 - protein, 20 aa, Homo sapiens
CARDHPSGASSGYSYYFDYW

SEQ ID NO: 14491 - protein, 14 aa, Homo sapiens
CARVYQGDYGVDYW

SEQ ID NO: 14492 - protein, 20 aa, Homo sapiens
CAKSNSADYGDYVDEAFDLW

SEQ ID NO: 14493 - protein, 16 aa, Homo sapiens
CARSRDVFAMSWFDLW

SEQ ID NO: 14494 - protein, 19 aa, Homo sapiens
CASSTGAAAGPGTQEQDYW

SEQ ID NO: 14495 - protein, 24 aa, Homo sapiens
CARFVPIRKWTGPPSWYYYYMDVW

SEQ ID NO: 14496 - protein, 19 aa, Homo sapiens
CARLRFLEWLSPYWYFDLW

SEQ ID NO: 14497 - protein, 24 aa, Homo sapiens
CARDQALLRYFDWLPSPHDAFDIW

SEQ ID NO: 14498 - protein, 15 aa, Homo sapiens
CTTVYGGWYNSVDYW

SEQ ID NO: 14499 - protein, 19 aa, Homo sapiens
CSTGFCTSRSCYGDALDIW

SEQ ID NO: 14500 - protein, 16 aa, Homo sapiens
CARDQIGVDSSGCDYW

SEQ ID NO: 14501 - protein, 19 aa, Homo sapiens
CARVAAYCTNFICSHFDTW

SEQ ID NO: 14502 - protein, 21 aa, Homo sapiens
CAKVGYYYDSSGYFYWYFDLW

SEQ ID NO: 14503 - protein, 18 aa, Homo sapiens
CAISSPEDNGDSFAFDYW

SEQ ID NO: 14504 - protein, 16 aa, Homo sapiens
CARDGVFGSGLPVDYW

SEQ ID NO: 14505 - protein, 26 aa, Homo sapiens
CAKDPGGGVGYCSSTSCYPENWFDPW

SEQ ID NO: 14506 - protein, 17 aa, Homo sapiens
CARGLAGTEGGYYFDYW

SEQ ID NO: 14507 - protein, 15 aa, Homo sapiens
CGADHGSGSNFMGVF

SEQ ID NO: 14508 - protein, 21 aa, Homo sapiens
CARLTYYYDSSGYPNWYFDLW

SEQ ID NO: 14509 - protein, 21 aa, Homo sapiens
CARAKRITIFGVVIISGFDYW

SEQ ID NO: 14510 - protein, 19 aa, Homo sapiens
CARDGYCSGGSCVHYFEYW

SEQ ID NO: 14511 - protein, 14 aa, Homo sapiens
CAHRPYLWLRFDPW

SEQ ID NO: 14512 - protein, 16 aa, Homo sapiens
CARHVAAAGTHAFDIW

SEQ ID NO: 14513 - protein, 16 aa, Homo sapiens
CAKETESNYYRNFDYW

SEQ ID NO: 14514 - protein, 18 aa, Homo sapiens
CALDSGYDGRFVGPFDYW

SEQ ID NO: 14515 - protein, 21 aa, Homo sapiens
CTRARFGFWGGFHSGWYFDLW

SEQ ID NO: 14516 - protein, 15 aa, Homo sapiens
CAKISTDGYNYFDYW

SEQ ID NO: 14517 - protein, 15 aa, Homo sapiens
CARLAAWFGELSDYW

SEQ ID NO: 14518 - protein, 16 aa, Homo sapiens
CATGAARGVPNWFDPW

SEQ ID NO: 14519 - protein, 20 aa, Homo sapiens
CTTDRYYDYVWGSYRYPDYW

SEQ ID NO: 14520 - protein, 13 aa, Homo sapiens
CQQLNVFPPGFTF

SEQ ID NO: 14521 - protein, 19 aa, Homo sapiens
CATAPGYSGYDLSNWFDPW

SEQ ID NO: 14522 - protein, 18 aa, Homo sapiens
CVRDTRDSSGWYAIFDSW

SEQ ID NO: 14523 - protein, 20 aa, Homo sapiens
CAGFEYSSSPGYYYYGMDVW

SEQ ID NO: 14524 - protein, 21 aa, Homo sapiens
CARDIPVSDIDYDGPDAFDIW

SEQ ID NO: 14525 - protein, 35 aa, Homo sapiens
CTAYLQWSSLKASDSAIYYCARPEGGYSTSWVDYW

SEQ ID NO: 14526 - protein, 22 aa, Homo sapiens
CARDKPYDFWSGYYEAYGMDVW

SEQ ID NO: 14527 - protein, 14 aa, Homo sapiens
CAKFGTAAVRSDYW

SEQ ID NO: 14528 - protein, 20 aa, Homo sapiens
CAKDRIPAVPDVVDYYMDVW

SEQ ID NO: 14529 - protein, 20 aa, Homo sapiens
CATALAVADPYYYYYGMDVW

SEQ ID NO: 14530 - protein, 16 aa, Homo sapiens
CAHRRLSIAAAGFDYW

SEQ ID NO: 14531 - protein, 21 aa, Homo sapiens
CAKDRPRKVLVVYAIQFIDYW

SEQ ID NO: 14532 - protein, 14 aa, Homo sapiens
CARREWPNNRFDPW

SEQ ID NO: 14533 - protein, 27 aa, Homo sapiens
CARDLPPQYNDFWSGYSLYYYYGMDVW

SEQ ID NO: 14534 - protein, 30 aa, Homo sapiens
CAKDFEYYDFWSGYSYRARSYYYYYYMDVW

SEQ ID NO: 14535 - protein, 16 aa, Homo sapiens
CASQRSSGWRSYFDLW

SEQ ID NO: 14536 - protein, 16 aa, Homo sapiens
CTTAPGGYSSSWYDYW

SEQ ID NO: 14537 - protein, 20 aa, Homo sapiens
CARDRLAGATRIWRDYFDYW

SEQ ID NO: 14538 - protein, 17 aa, Homo sapiens
CARVTGTPLKENYLGYW

SEQ ID NO: 14539 - protein, 19 aa, Homo sapiens
CARYPYGDYDDSYYYMDVW

SEQ ID NO: 14540 - protein, 19 aa, Homo sapiens
CARDGVDSSGYLPGAFDIW

SEQ ID NO: 14541 - protein, 14 aa, Homo sapiens
CAKDISSGPVADYW

SEQ ID NO: 14542 - protein, 17 aa, Homo sapiens
CATGPVIQGTDNWFDPW

SEQ ID NO: 14543 - protein, 20 aa, Homo sapiens
CARDPVGSGWYQGYYYMDVW

SEQ ID NO: 14544 - protein, 16 aa, Homo sapiens
CARENYYDSSKDFDYW

SEQ ID NO: 14545 - protein, 15 aa, Homo sapiens
CATAGSAYYAPFDDW

SEQ ID NO: 14546 - protein, 18 aa, Homo sapiens
CARSAKNMAGAANWVDYW

SEQ ID NO: 14547 - protein, 17 aa, Homo sapiens
CARIAEYYDSSGYYGYW

SEQ ID NO: 14548 - protein, 25 aa, Homo sapiens
CASDYYDSSGYYYLGSIVSGLFDYW

SEQ ID NO: 14549 - protein, 21 aa, Homo sapiens
CARENQMVAAAYGGLSFFDSW

SEQ ID NO: 14550 - protein, 17 aa, Homo sapiens
CASGSGSYYNENWFDPW

SEQ ID NO: 14551 - protein, 25 aa, Homo sapiens
CARGNGLPRSSGWVQTKWTNWFDPW

SEQ ID NO: 14552 - protein, 16 aa, Homo sapiens
CATGFAVVPAALMDYW

SEQ ID NO: 14553 - protein, 14 aa, Homo sapiens
CAGCTSTNCRIDYW

SEQ ID NO: 14554 - protein, 13 aa, Homo sapiens
CARDGRSWYMDVW

SEQ ID NO: 14555 - protein, 20 aa, Homo sapiens
CAASRGYSYGYALPDAFDIW

SEQ ID NO: 14556 - protein, 18 aa, Homo sapiens
CARTFPYYYGSGSPLDYW

SEQ ID NO: 14557 - protein, 23 aa, Homo sapiens
CARDLRGYDILTGYYTPYYFDYW

SEQ ID NO: 14558 - protein, 21 aa, Homo sapiens
CAKDINCSGGSCYEIYAFDIW

SEQ ID NO: 14559 - protein, 18 aa, Homo sapiens
CTRTNTNYYVDNDYIDYW

SEQ ID NO: 14560 - protein, 16 aa, Homo sapiens
CARDPSDDYVDGMDVW

SEQ ID NO: 14561 - protein, 17 aa, Homo sapiens
CARISRCSFGIHYFDTW

SEQ ID NO: 14562 - protein, 23 aa, Homo sapiens
CARDSTDYYDSSGYPLGGTFDYW

SEQ ID NO: 14563 - protein, 17 aa, Homo sapiens
CAQTPSGGTPVAHLDYW

SEQ ID NO: 14564 - protein, 14 aa, Homo sapiens
CAKGDSSRGYFQHW

SEQ ID NO: 14565 - protein, 25 aa, Homo sapiens
CTTISYDILTGYYGPDYFYYYMDVW

SEQ ID NO: 14566 - protein, 20 aa, Homo sapiens
CAKGTLRAYYYDSSGYFDYW

SEQ ID NO: 14567 - protein, 18 aa, Homo sapiens
CAKSGHNYDSIVLTFDYW

SEQ ID NO: 14568 - protein, 22 aa, Homo sapiens
CAKDRYYDFWSGYYNHDWFDPW

SEQ ID NO: 14569 - protein, 19 aa, Homo sapiens
CAKDGVYDSSGYTRYFDLW

SEQ ID NO: 14570 - protein, 20 aa, Homo sapiens
CARAQSDIFSSYSHYSFDSW

SEQ ID NO: 14571 - protein, 19 aa, Homo sapiens
CARGLSIAARPDDFRFDPW

SEQ ID NO: 14572 - protein, 18 aa, Homo sapiens
CARNTNYYDSQGPEFDIW

SEQ ID NO: 14573 - protein, 22 aa, Homo sapiens
CARDGSFYHDYNGMRQYAFDMW

SEQ ID NO: 14574 - protein, 14 aa, Homo sapiens
CAREGLELRRFDPW

SEQ ID NO: 14575 - protein, 15 aa, Homo sapiens
CAAASPVIIGWFDPW

SEQ ID NO: 14576 - protein, 17 aa, Homo sapiens
CAFTAPSDSTVVIFDVW

SEQ ID NO: 14577 - protein, 17 aa, Homo sapiens
CAKTPSSSGYHYHLDYW

SEQ ID NO: 14578 - protein, 20 aa, Homo sapiens
CARTLHYGSGGAYYYYMDVW

SEQ ID NO: 14579 - protein, 18 aa, Homo sapiens
CARQGWEGDSDIHYFDYW

SEQ ID NO: 14580 - protein, 19 aa, Homo sapiens
CARGHGIQFLKVWSYFDPW

SEQ ID NO: 14581 - protein, 16 aa, Homo sapiens
CAKVDGGVVAATADYW

SEQ ID NO: 14582 - protein, 16 aa, Homo sapiens
CAKDLTRFGEFPIDYW

SEQ ID NO: 14583 - protein, 18 aa, Homo sapiens
CARGPGLNWNAPHHFDYW

SEQ ID NO: 14584 - protein, 25 aa, Homo sapiens
CARDRITPPGGWFGELIWALAFDYW

SEQ ID NO: 14585 - protein, 18 aa, Homo sapiens
CARQADILWSPGGWFDPW

SEQ ID NO: 14586 - protein, 18 aa, Homo sapiens
CARDSLIWSGHHNWFDPW

SEQ ID NO: 14587 - protein, 17 aa, Homo sapiens
CAKLCEPARRSPSVDYW

SEQ ID NO: 14588 - protein, 30 aa, Homo sapiens
CAHRPSPSYDFWSGYYFGTEFNYYYGMDVW

SEQ ID NO: 14589 - protein, 20 aa, Homo sapiens
CVRGSENWTRRYYYYLMDVW

SEQ ID NO: 14590 - protein, 17 aa, Homo sapiens
CGRDQGIASVGTVVDYW

SEQ ID NO: 14591 - protein, 22 aa, Homo sapiens
CARCNREGESNYDFWSAYSDYW

SEQ ID NO: 14592 - protein, 17 aa, Homo sapiens
CASKLAAAGSDDAFDIW

SEQ ID NO: 14593 - protein, 25 aa, Homo sapiens
CAHGHTRSITMIVVVTGRSLYFQHW

SEQ ID NO: 14594 - protein, 28 aa, Homo sapiens
CAKARIGGAEGSWDTIFGVVIFDAFDIW

SEQ ID NO: 14595 - protein, 23 aa, Homo sapiens
CATSFVVVPAAKRYYYYYGMDVW

SEQ ID NO: 14596 - protein, 15 aa, Homo sapiens
CARRPPSRTDGMDVW

SEQ ID NO: 14597 - protein, 19 aa, Homo sapiens
CATVNPLNWGSVGDAFDIW

SEQ ID NO: 14598 - protein, 16 aa, Homo sapiens
CVHRTRGWGADWFDPW

SEQ ID NO: 14599 - protein, 25 aa, Homo sapiens
CATDLKVTAYCGGDCYSKSYAFDIW

SEQ ID NO: 14600 - protein, 23 aa, Homo sapiens
CARSILPEHIVVVTASRDAFDIW

SEQ ID NO: 14601 - protein, 21 aa, Homo sapiens
CARVVVPAGTHYYYYYYMDVW

SEQ ID NO: 14602 - protein, 19 aa, Homo sapiens
CAKEGSGITGTGDNWFDPW

SEQ ID NO: 14603 - protein, 14 aa, Homo sapiens
CQSLDSSSPYPWVF

SEQ ID NO: 14604 - protein, 17 aa, Homo sapiens
CARFNGPTFGRFQFDYW

SEQ ID NO: 14605 - protein, 19 aa, Homo sapiens
CAKDFTFGGGYYPYYFDYW

SEQ ID NO: 14606 - protein, 20 aa, Homo sapiens
CASSGEGISSSWYQGIFDYW

SEQ ID NO: 14607 - protein, 17 aa, Homo sapiens
CARPYYYGSGSDAHDVW

SEQ ID NO: 14608 - protein, 21 aa, Homo sapiens
CARAVSSKKMGGDYGDYGDYW

SEQ ID NO: 14609 - protein, 16 aa, Homo sapiens
CASMELRGYYYYMDVW

SEQ ID NO: 14610 - protein, 19 aa, Homo sapiens
CARDHFYDSSGYYHYFDSW

SEQ ID NO: 14611 - protein, 19 aa, Homo sapiens
CARTYYDFWSGSKGSFDYW

SEQ ID NO: 14612 - protein, 15 aa, Homo sapiens
CARPILTGYFDFGYW

SEQ ID NO: 14613 - protein, 19 aa, Homo sapiens
CAKDMEWELLIRGGKFDYW

SEQ ID NO: 14614 - protein, 23 aa, Homo sapiens
CARPDHQYYDFWTNSGRDAFDIW

SEQ ID NO: 14615 - protein, 17 aa, Homo sapiens
CARDLEGSGWSRPFDYW

SEQ ID NO: 14616 - protein, 18 aa, Homo sapiens
CARRDEGFTVTQTYFDYW

SEQ ID NO: 14617 - protein, 21 aa, Homo sapiens
CARQRCSGGSCYSKGRFFDYW

SEQ ID NO: 14618 - protein, 19 aa, Homo sapiens
CAKVTTPDILTGYHPYDYW

SEQ ID NO: 14619 - protein, 19 aa, Homo sapiens
CAKAHIVVVTAQPPGFDYW

SEQ ID NO: 14620 - protein, 17 aa, Homo sapiens
CARPPHLDSSGYYPDYW

SEQ ID NO: 14621 - protein, 19 aa, Homo sapiens
CARDRYINTWGSLDAFDIW

SEQ ID NO: 14622 - protein, 15 aa, Homo sapiens
CQQYDNLPRKFIATF

SEQ ID NO: 14623 - protein, 18 aa, Homo sapiens
CARGPSQWLVRVVYFDYW

SEQ ID NO: 14624 - protein, 30 aa, Homo sapiens
CALPISAVYYCAKSGTTMIVVVIDDAFDIW

SEQ ID NO: 14625 - protein, 17 aa, Homo sapiens
CVRLSRYSSYWYFFDFW

SEQ ID NO: 14626 - protein, 24 aa, Homo sapiens
CAHSSPPYDFWSGYYDVLGPFDYW

SEQ ID NO: 14627 - protein, 14 aa, Homo sapiens
CSAWHDSLSAQWVF

SEQ ID NO: 14628 - protein, 21 aa, Homo sapiens
CQQYANSPSTFGQGTNSPITF

SEQ ID NO: 14629 - protein, 23 aa, Homo sapiens
CAREAPGDYVWGSYVSQYYFDYW

SEQ ID NO: 14630 - protein, 21 aa, Homo sapiens
CARDQDSSGWLLYYYYGMDVW

SEQ ID NO: 14631 - protein, 21 aa, Homo sapiens
CARGGTVVVPGADPHWYSDLW

SEQ ID NO: 14632 - protein, 19 aa, Homo sapiens
CARELPGSSWFWEEAFDIW

SEQ ID NO: 14633 - protein, 21 aa, Homo sapiens
CAKGPYDSSGYYLADPLFDYW

SEQ ID NO: 14634 - protein, 18 aa, Homo sapiens
CARNRGACRGDSCYCDSW

SEQ ID NO: 14635 - protein, 16 aa, Homo sapiens
CAKAATSGSSSSTDYW

SEQ ID NO: 14636 - protein, 14 aa, Homo sapiens
CARGVHWNSGVDYW

SEQ ID NO: 14637 - protein, 17 aa, Homo sapiens
CASQRGYSYAIDAFDIW

SEQ ID NO: 14638 - protein, 17 aa, Homo sapiens
CANGRWEFDRWYYFDYW

SEQ ID NO: 14639 - protein, 19 aa, Homo sapiens
CARHREYYDSSGYYSFDYW

SEQ ID NO: 14640 - protein, 19 aa, Homo sapiens
CATLCPAAAGYYYYGMDVW

SEQ ID NO: 14641 - protein, 19 aa, Homo sapiens
CARDSHRFYGYGGTYGDNW

SEQ ID NO: 14642 - protein, 19 aa, Homo sapiens
CASSITIFGVVTMGAFDIW

SEQ ID NO: 14643 - protein, 20 aa, Homo sapiens
CAKDIEDIVVVVAVNYFDYW

SEQ ID NO: 14644 - protein, 12 aa, Homo sapiens
CLLYYGSTQHVF

SEQ ID NO: 14645 - protein, 18 aa, Homo sapiens
CVRSGIALAGNLYYFDYW

SEQ ID NO: 14646 - protein, 20 aa, Homo sapiens
CARHLPEVPATAIPYWFDPW

SEQ ID NO: 14647 - protein, 13 aa, Homo sapiens
CARARITKDLDYW

SEQ ID NO: 14648 - protein, 28 aa, Homo sapiens
CARVGYSSGWYPWLETRINYYYYGMDVW

SEQ ID NO: 14649 - protein, 17 aa, Homo sapiens
CARDLVQLWPPDAFDIW

SEQ ID NO: 14650 - protein, 21 aa, Homo sapiens
CARDRNYYDNSGYHIPYFDYW

SEQ ID NO: 14651 - protein, 19 aa, Homo sapiens
CARKEGGVGATATGGLDYW

SEQ ID NO: 14652 - protein, 21 aa, Homo sapiens
CTTDFPHPFEVIEWELPFDYW

SEQ ID NO: 14653 - protein, 16 aa, Homo sapiens
CAKDRGSTIPLYFDLW

SEQ ID NO: 14654 - protein, 16 aa, Homo sapiens
CARGAMSSTSITNDYW

SEQ ID NO: 14655 - protein, 20 aa, Homo sapiens
CAKGHWGTGTPHYYHYMDVW

SEQ ID NO: 14656 - protein, 22 aa, Homo sapiens
CARVFGSDRDGDGWGVGPCDYW

SEQ ID NO: 14657 - protein, 29 aa, Homo sapiens
CSLKASDTAMYYCARGVPAGTGGALFDYW

SEQ ID NO: 14658 - protein, 17 aa, Homo sapiens
CAKVLRSAAGSASGDYW

SEQ ID NO: 14659 - protein, 15 aa, Homo sapiens
CARGRGSPRDHFDYW

SEQ ID NO: 14660 - protein, 17 aa, Homo sapiens
CAKGIRSGWFDWYVDLW

SEQ ID NO: 14661 - protein, 16 aa, Homo sapiens
CAKSPAPYYRPHFDYW

SEQ ID NO: 14662 - protein, 26 aa, Homo sapiens
CARDKSLYCSGGSCYSSQANWYFDLW

SEQ ID NO: 14663 - protein, 22 aa, Homo sapiens
CARAVLVEGSYFFRLTSWFDPW

SEQ ID NO: 14664 - protein, 20 aa, Homo sapiens
CARDLTVVAATEYYYGMDVW

SEQ ID NO: 14665 - protein, 17 aa, Homo sapiens
CATQKEDRKILSAFDIW

SEQ ID NO: 14666 - protein, 15 aa, Homo sapiens
CATAVAWNRRGLDYW

SEQ ID NO: 14667 - protein, 16 aa, Homo sapiens
CAKIPPDGDYGYFDLW

SEQ ID NO: 14668 - protein, 20 aa, Homo sapiens
CARHPQFMYSSSSEYYFDYW

SEQ ID NO: 14669 - protein, 23 aa, Homo sapiens
CTTGYKDVLRFLEWLGGDYFDYW

SEQ ID NO: 14670 - protein, 15 aa, Homo sapiens
CAHRQIYDSSPFDYW

SEQ ID NO: 14671 - protein, 16 aa, Homo sapiens
CARSRMGAYRDAFDIW

SEQ ID NO: 14672 - protein, 22 aa, Homo sapiens
CARDGALVEGIVVVPAAIRDYW

SEQ ID NO: 14673 - protein, 20 aa, Homo sapiens
CAREDDDWNYWEGGRWFDPW

SEQ ID NO: 14674 - protein, 23 aa, Homo sapiens
CARDRDIDYWSDYPPYYYGMDVW

SEQ ID NO: 14675 - protein, 14 aa, Homo sapiens
CARTYDPYHYFDYW

SEQ ID NO: 14676 - protein, 24 aa, Homo sapiens
CARDPPLFYDILTGYYNRYYFDYW

SEQ ID NO: 14677 - protein, 17 aa, Homo sapiens
CAREGDASSGYYQFDYW

SEQ ID NO: 14678 - protein, 21 aa, Homo sapiens
CAKDFQPDLLWFGDGDAFDIW

SEQ ID NO: 14679 - protein, 17 aa, Homo sapiens
CAITDTAMTKPDAFDIW

SEQ ID NO: 14680 - protein, 21 aa, Homo sapiens
CARGGLIDILTGYRYNWFDPW

SEQ ID NO: 14681 - protein, 15 aa, Homo sapiens
CTSQWEIEEFYYDSW

SEQ ID NO: 14682 - protein, 19 aa, Homo sapiens
CASFMNYDSSGYYLVADYW

SEQ ID NO: 14683 - protein, 14 aa, Homo sapiens
CAKISGSSSQFDYW

SEQ ID NO: 14684 - protein, 17 aa, Homo sapiens
CAKDQSAARPAYYFDYW

SEQ ID NO: 14685 - protein, 23 aa, Homo sapiens
CAKDPDPQATIFGVVTYHFFDYW

SEQ ID NO: 14686 - protein, 18 aa, Homo sapiens
CARSAGRCSDGTCYEDYW

SEQ ID NO: 14687 - protein, 21 aa, Homo sapiens
CAREPLVYDILTGYYTHFDYW

SEQ ID NO: 14688 - protein, 19 aa, Homo sapiens
CATFYGDYVGAYYYYMDVW

SEQ ID NO: 14689 - protein, 22 aa, Homo sapiens
CASAPRDCSSTSCYRYYGMDVW

SEQ ID NO: 14690 - protein, 18 aa, Homo sapiens
CARPGYMSGWYFGTLDYW

SEQ ID NO: 14691 - protein, 16 aa, Homo sapiens
CASTTVTYRDDAFDIW

SEQ ID NO: 14692 - protein, 16 aa, Homo sapiens
CARGSGIVIIGRFDYW

SEQ ID NO: 14693 - protein, 24 aa, Homo sapiens
CARDGYDYVWGSYRYTLLNFFDYW

SEQ ID NO: 14694 - protein, 19 aa, Homo sapiens
CARGNGIWGSGYDWGFDYW

SEQ ID NO: 14695 - protein, 27 aa, Homo sapiens
CARLGGYDPLMITFGGVIVAPGYFDYW

SEQ ID NO: 14696 - protein, 19 aa, Homo sapiens
CATVDSSTYNWNIFYFDCW

SEQ ID NO: 14697 - protein, 21 aa, Homo sapiens
CARITMIEAPPPQYYYGMDVW

SEQ ID NO: 14698 - protein, 27 aa, Homo sapiens
CAKDSSVEDLAVITIFGVVIIGYFDYW

SEQ ID NO: 14699 - protein, 13 aa, Homo sapiens
CARDWKQWGFDYW

SEQ ID NO: 14700 - protein, 21 aa, Homo sapiens
CARASTRIVGASRFFNWFDPW

SEQ ID NO: 14701 - protein, 30 aa, Homo sapiens
CAKDPRYYDFWSGYLQASKLEPRPWYFDLW

SEQ ID NO: 14702 - protein, 17 aa, Homo sapiens
CARIRDGDYSPWYFDLW

SEQ ID NO: 14703 - protein, 16 aa, Homo sapiens
CARDSSGYYYGPIDYW

SEQ ID NO: 14704 - protein, 22 aa, Homo sapiens
CARDPYLRGIAVAGRSEYFQHW

SEQ ID NO: 14705 - protein, 17 aa, Homo sapiens
CARVPGAIWAYNWFDPW

SEQ ID NO: 14706 - protein, 23 aa, Homo sapiens
CARGPGRSRAHRGLGYYYYMDVW

SEQ ID NO: 14707 - protein, 15 aa, Homo sapiens
CARDRERRISYIDYW

SEQ ID NO: 14708 - protein, 24 aa, Homo sapiens
CARDIFGFDWFSPHRYYYYGMDVW

SEQ ID NO: 14709 - protein, 16 aa, Homo sapiens
CAVLGNSGYDWGLDYW

SEQ ID NO: 14710 - protein, 22 aa, Homo sapiens
CATLPPLRSGWYDGSYDAFDIW

SEQ ID NO: 14711 - protein, 15 aa, Homo sapiens
CATETYSSSRSLDYW

SEQ ID NO: 14712 - protein, 26 aa, Homo sapiens
CARDAYYYDSSGYYYSPYYYYGMDVW

SEQ ID NO: 14713 - protein, 17 aa, Homo sapiens
CAKDYDSSGYYHWFDPW

SEQ ID NO: 14714 - protein, 15 aa, Homo sapiens
CARIPLTLYNWFDPW

SEQ ID NO: 14715 - protein, 15 aa, Homo sapiens
CTRGVVRGVITFAYW

SEQ ID NO: 14716 - protein, 16 aa, Homo sapiens
CAKFEEQWPGDAFDIW

SEQ ID NO: 14717 - protein, 22 aa, Homo sapiens
CARDTLEDIVVVPAGMGWFDPW

SEQ ID NO: 14718 - protein, 19 aa, Homo sapiens
CARERWTGYSYDVGYFDYW

SEQ ID NO: 14719 - protein, 21 aa, Homo sapiens
CARASHVPPPIEYYYNYMDVW

SEQ ID NO: 14720 - protein, 17 aa, Homo sapiens
CAKDYITGTTGFAFDIW

SEQ ID NO: 14721 - protein, 17 aa, Homo sapiens
CTTSQGHSSGWYSFDYW

SEQ ID NO: 14722 - protein, 30 aa, Homo sapiens
CALPISALYHCASLEQQSFWGEPRYYMDVW

SEQ ID NO: 14723 - protein, 19 aa, Homo sapiens
CARGHWSGYFPPPPNFDCW

SEQ ID NO: 14724 - protein, 15 aa, Homo sapiens
CAKDLAVTRREGDYW

SEQ ID NO: 14725 - protein, 25 aa, Homo sapiens
CARYRLGYFDWLLRSDYYYYGMDVW

SEQ ID NO: 14726 - protein, 20 aa, Homo sapiens
CARAQDIVVVPAAMSWFDPW

SEQ ID NO: 14727 - protein, 27 aa, Homo sapiens
CARHPGQDARWDWAQWLVPVPVYFDFW

SEQ ID NO: 14728 - protein, 23 aa, Homo sapiens
CTAELGGITMIVVVINGDAFDIW

SEQ ID NO: 14729 - protein, 20 aa, Homo sapiens
CARHIRQWLVQAKLGWFDPW

SEQ ID NO: 14730 - protein, 16 aa, Homo sapiens
CARAPGQLWLKYFDYW

SEQ ID NO: 14731 - protein, 22 aa, Homo sapiens
CAKELGYCSAGRCFAQGYFDYW

SEQ ID NO: 14732 - protein, 15 aa, Homo sapiens
CRAIAVAATDYFDYW

SEQ ID NO: 14733 - protein, 20 aa, Homo sapiens
CTSVVLVVAVTKGAFYFDHW

SEQ ID NO: 14734 - protein, 20 aa, Homo sapiens
CAKAAAITMIDVANDVFDIW

SEQ ID NO: 14735 - protein, 16 aa, Homo sapiens
CASNREYQLLSPIDYW

SEQ ID NO: 14736 - protein, 17 aa, Homo sapiens
CARGRLFQGGTYHIDYW

SEQ ID NO: 14737 - protein, 17 aa, Homo sapiens
CVKDMGSSLWHDGFDMW

SEQ ID NO: 14738 - protein, 17 aa, Homo sapiens
CARTRGQWLENRQFDYW

SEQ ID NO: 14739 - protein, 16 aa, Homo sapiens
CARGFLFGGVIAFDYW

SEQ ID NO: 14740 - protein, 17 aa, Homo sapiens
CARDADNYYYYYYMDVW

SEQ ID NO: 14741 - protein, 15 aa, Homo sapiens
CHDYGDYVRSGFDYW

SEQ ID NO: 14742 - protein, 19 aa, Homo sapiens
CARVLDRGYCSSTSCIDYW

SEQ ID NO: 14743 - protein, 17 aa, Homo sapiens
CARDQGTYSYGYGFDPW

SEQ ID NO: 14744 - protein, 22 aa, Homo sapiens
CASEEREAYDSSGRYYYGMDVW

SEQ ID NO: 14745 - protein, 19 aa, Homo sapiens
CARLRYCSDGSCQRNFDYW

SEQ ID NO: 14746 - protein, 18 aa, Homo sapiens
CAKEVHDYAVLYWYFDLW

SEQ ID NO: 14747 - protein, 14 aa, Homo sapiens
CAREVLAPHWFDPW

SEQ ID NO: 14748 - protein, 13 aa, Homo sapiens
CQQFHNWPLMYAF

SEQ ID NO: 14749 - protein, 15 aa, Homo sapiens
CAKGDCSGGSCYDYW

SEQ ID NO: 14750 - protein, 23 aa, Homo sapiens
CARAGWRSGGSQKLMSVNWFDPW

SEQ ID NO: 14751 - protein, 24 aa, Homo sapiens
CAKGIHFDWLLQTDYYYYYGMDVW

SEQ ID NO: 14752 - protein, 29 aa, Homo sapiens
CARGDYSGSGSYFSVGWNRPHDYNAMDVW

SEQ ID NO: 14753 - protein, 21 aa, Homo sapiens
CANRYYDTSGYRVGDDAFHIW

SEQ ID NO: 14754 - protein, 21 aa, Homo sapiens
CARLDIVVVTAIPVDWYFDLW

SEQ ID NO: 14755 - protein, 32 aa, Homo sapiens
CALPICLRAEDTAVYYCAKGDGDNIPWYFDLW

SEQ ID NO: 14756 - protein, 11 aa, Homo sapiens [sequence omitted]

SEQ ID NO: 14757 - protein, 16 aa, Homo sapiens
CVKDIIPLSYHGFDIW

SEQ ID NO: 14758 - protein, 18 aa, Homo sapiens
CAREYCGSRNCFYQVDYW

SEQ ID NO: 14759 - protein, 18 aa, Homo sapiens
CAKDTVWGSSGWSYFDYW

SEQ ID NO: 14760 - protein, 18 aa, Homo sapiens
CASPRLDFDWLLTFSDYW

SEQ ID NO: 14761 - protein, 21 aa, Homo sapiens
CARATLGCSGGSCYSYYFDYW

SEQ ID NO: 14762 - protein, 16 aa, Homo sapiens
CARDLPYYSPDAFDIW

SEQ ID NO: 14763 - protein, 17 aa, Homo sapiens
CAAGWANYYDSSGYFYW

SEQ ID NO: 14764 - protein, 18 aa, Homo sapiens
CARVPPYYYDSSGYSDYW

SEQ ID NO: 14765 - protein, 16 aa, Homo sapiens
CAKPSGATRNWYFDLW

SEQ ID NO: 14766 - protein, 18 aa, Homo sapiens
CARILLVPSSMTNAFDLW

SEQ ID NO: 14767 - protein, 13 aa, Homo sapiens
CWATAQNHPFDYW

SEQ ID NO: 14768 - protein, 18 aa, Homo sapiens
CARGHIDSANYYLPFDLW

SEQ ID NO: 14769 - protein, 20 aa, Homo sapiens
CARAALTYYDFWSGYWFDPW

SEQ ID NO: 14770 - protein, 17 aa, Homo sapiens
CAREEVAAAGTNWFDPW

SEQ ID NO: 14771 - protein, 16 aa, Homo sapiens
CAKVSPGYPTYYFDYW

SEQ ID NO: 14772 - protein, 18 aa, Homo sapiens
CAKLHYYDSSDPSGVDYW

SEQ ID NO: 14773 - protein, 21 aa, Homo sapiens
CARAHSLNYGRQWRPLPFDFW

SEQ ID NO: 14774 - protein, 21 aa, Homo sapiens
CARDSDYYDSSGYYYYGMDVW

SEQ ID NO: 14775 - protein, 19 aa, Homo sapiens
CAKGLIAARDYYYYGMDVW

SEQ ID NO: 14776 - protein, 15 aa, Homo sapiens
CARHVGLTGFRFDPW

SEQ ID NO: 14777 - protein, 15 aa, Homo sapiens
CAKVSGYHEDAFDIW

SEQ ID NO: 14778 - protein, 19 aa, Homo sapiens
CARGAPHRSYIKLYYFDYW

SEQ ID NO: 14779 - protein, 14 aa, Homo sapiens
CTRPLLWFDAFDIW

SEQ ID NO: 14780 - protein, 23 aa, Homo sapiens
CARILVRTDYYDTNSRKNWFDPW

SEQ ID NO: 14781 - protein, 17 aa, Homo sapiens
CAKLTTPNDYGDYFDYW

SEQ ID NO: 14782 - protein, 22 aa, Homo sapiens
CARDDYVWGSYRYNGYNWFDPW

SEQ ID NO: 14783 - protein, 30 aa, Homo sapiens
CASSFSIAVAGTSDRNDYPWPFYYYGMDVW

SEQ ID NO: 14784 - protein, 16 aa, Homo sapiens
CAKDSVRYNWNHFDYW

SEQ ID NO: 14785 - protein, 16 aa, Homo sapiens
CAKVGDDSSSLNFDYW

SEQ ID NO: 14786 - protein, 19 aa, Homo sapiens
CATEIGNDWSPAVRYFPYW

SEQ ID NO: 14787 - protein, 19 aa, Homo sapiens
CARGCYDSSAYPWDAFDIW

SEQ ID NO: 14788 - protein, 20 aa, Homo sapiens
CAKLGGGPYYDSRQDAFDIW

SEQ ID NO: 14789 - protein, 17 aa, Homo sapiens
CASLWELEWTPDYFDYW

SEQ ID NO: 14790 - protein, 17 aa, Homo sapiens
CARDSSSSWSLWWFDPW

SEQ ID NO: 14791 - protein, 24 aa, Homo sapiens
CAKSARGYYDSSGYYHDEYYFDYW

SEQ ID NO: 14792 - protein, 28 aa, Homo sapiens
CARGGTSRADYYDSSGYEERWYNWFDPW

SEQ ID NO: 14793 - protein, 18 aa, Homo sapiens
CARARYHYDSTGYHFDNW

SEQ ID NO: 14794 - protein, 14 aa, Homo sapiens
CARDSGLRRAFDYW

SEQ ID NO: 14795 - protein, 18 aa, Homo sapiens
CARGVERWQQGGARFDPW

SEQ ID NO: 14796 - protein, 16 aa, Homo sapiens
CARGTASDSGWYFDYW

SEQ ID NO: 14797 - protein, 17 aa, Homo sapiens
CATLQRQQLVLGWFDPW

SEQ ID NO: 14798 - protein, 18 aa, Homo sapiens
CVKDTLVRSGWTWYFDLW

SEQ ID NO: 14799 - protein, 20 aa, Homo sapiens
CARIRPAGQWLAENDAFDIW

SEQ ID NO: 14800 - protein, 18 aa, Homo sapiens
CARDQYDSSGYSMGFDPW

SEQ ID NO: 14801 - protein, 17 aa, Homo sapiens
CASIYSGWSQGDAFDIW

SEQ ID NO: 14802 - protein, 19 aa, Homo sapiens
CARAQYNNNWLNGDGMDVW

SEQ ID NO: 14803 - protein, 16 aa, Homo sapiens
CARSFSSSQRDHFDYW

SEQ ID NO: 14804 - protein, 16 aa, Homo sapiens
CALLAWFGELNGIDYW

SEQ ID NO: 14805 - protein, 12 aa, Homo sapiens
CATTDRPNFDYW

SEQ ID NO: 14806 - protein, 16 aa, Homo sapiens
CAKVGYSYGEGAFDIW

SEQ ID NO: 14807 - protein, 14 aa, Homo sapiens
CASPHLGGYAFAIW

SEQ ID NO: 14808 - protein, 13 aa, Homo sapiens
CVAWDDGLSGLLF

SEQ ID NO: 14809 - protein, 22 aa, Homo sapiens
CATETPRCSSTSCFYLGGVDYW

SEQ ID NO: 14810 - protein, 23 aa, Homo sapiens
CARVGDDYGDYPRDSSGYYNDYW

SEQ ID NO: 14811 - protein, 14 aa, Homo sapiens
CARDRDYVGFFDFW

SEQ ID NO: 14812 - protein, 12 aa, Homo sapiens
CARDNSGSFDIW

SEQ ID NO: 14813 - protein, 21 aa, Homo sapiens
CARDLPPSRKTVAGKDAFDIW

SEQ ID NO: 14814 - protein, 19 aa, Homo sapiens
CARVRVITMIVVDNWFDPW

SEQ ID NO: 14815 - protein, 13 aa, Homo sapiens
CQQYYSSPQKNTF

SEQ ID NO: 14816 - protein, 23 aa, Homo sapiens
CTRSIMITFGGVIVYYYYGMDVW

SEQ ID NO: 14817 - protein, 20 aa, Homo sapiens
CGGLPDCSSTSCSDNWFDPW

SEQ ID NO: 14818 - protein, 22 aa, Homo sapiens
CARSSRGTIFGVVIIPYYFDYW

SEQ ID NO: 14819 - protein, 20 aa, Homo sapiens
CTRDAEPSEMSTMTNWFDPW

SEQ ID NO: 14820 - protein, 21 aa, Homo sapiens
CARARSPGIIGTTRKNWFDPW

SEQ ID NO: 14821 - protein, 18 aa, Homo sapiens
CTRCYCTGNKCSREFDYW

SEQ ID NO: 14822 - protein, 17 aa, Homo sapiens
CARCVTMIGLEWYFDLW

SEQ ID NO: 14823 - protein, 13 aa, Homo sapiens
CQQYHSLPPMYTF

SEQ ID NO: 14824 - protein, 15 aa, Homo sapiens
CATPRGYSGYDFDYW

SEQ ID NO: 14825 - protein, 16 aa, Homo sapiens
CAHGDWLFTKYYFDYW

SEQ ID NO: 14826 - protein, 20 aa, Homo sapiens
CARGLYSSSWYGAHYYFDYW

SEQ ID NO: 14827 - protein, 29 aa, Homo sapiens
CARDAPAYCGGDCYKFFVNYYYYYGMDVW

SEQ ID NO: 14828 - protein, 18 aa, Homo sapiens
CAREKEVDFVDFWYFDHW

SEQ ID NO: 14829 - protein, 13 aa, Homo sapiens
CAKDALLQYFDLW

SEQ ID NO: 14830 - protein, 22 aa, Homo sapiens
CARTIMITFGGVIAHIGAFDIW

SEQ ID NO: 14831 - protein, 12 aa, Homo sapiens
CASVVVGYMDVW

SEQ ID NO: 14832 - protein, 21 aa, Homo sapiens
CAKDTITMIVVVITSGVFDYW

SEQ ID NO: 14833 - protein, 21 aa, Homo sapiens
CAKVSNVLLWFGELLLPFDYW

SEQ ID NO: 14834 - protein, 23 aa, Homo sapiens
CAKDTSTGVDVDTAMGHNWFDPW

SEQ ID NO: 14835 - protein, 14 aa, Homo sapiens
CATIGEWELPFDYW

SEQ ID NO: 14836 - protein, 24 aa, Homo sapiens
CARGQDIYSGYDWGDYYYYGMDVW

SEQ ID NO: 14837 - protein, 15 aa, Homo sapiens
CARVRATQLWQFDYW

SEQ ID NO: 14838 - protein, 17 aa, Homo sapiens
CARLADSEYFYYYMDVW

SEQ ID NO: 14839 - protein, 17 aa, Homo sapiens
CASDCTGGVCRIYGDYW

SEQ ID NO: 14840 - protein, 12 aa, Homo sapiens
CSSADSSDNPLF

SEQ ID NO: 14841 - protein, 21 aa, Homo sapiens
CARGSALHYDFWTSYYYFEYW

SEQ ID NO: 14842 - protein, 15 aa, Homo sapiens
CAKGDSAVAALFDYW

SEQ ID NO: 14843 - protein, 20 aa, Homo sapiens
CARDHGTYYYDSSGYQRDYW

SEQ ID NO: 14844 - protein, 17 aa, Homo sapiens
CTTEAGPYSYGPFFDYW

SEQ ID NO: 14845 - protein, 18 aa, Homo sapiens
CARAYCSSTSCYKYFDYW

SEQ ID NO: 14846 - protein, 21 aa, Homo sapiens
CARSYDYVWGSYRYTRGFDYW

SEQ ID NO: 14847 - protein, 21 aa, Homo sapiens
CATDRLTYSSGWSLDEYFQNW

SEQ ID NO: 14848 - protein, 19 aa, Homo sapiens
CARGRPESSSWYEDYFDYW

SEQ ID NO: 14849 - protein, 28 aa, Homo sapiens
CARDPPTYYYDSSGYYRDFDYYYGMDVW

SEQ ID NO: 14850 - protein, 17 aa, Homo sapiens
CAKDLGGSYGEAAFDIW

SEQ ID NO: 14851 - protein, 17 aa, Homo sapiens
CATYFAIFGVVMTFDYW

SEQ ID NO: 14852 - protein, 18 aa, Homo sapiens
CARIQDQGGDTAMVFDYW

SEQ ID NO: 14853 - protein, 16 aa, Homo sapiens
CARDGAQEMATSFDYW

SEQ ID NO: 14854 - protein, 13 aa, Homo sapiens
CAKRTAYHYMDVW

SEQ ID NO: 14855 - protein, 21 aa, Homo sapiens
CTTTTYYYDSSGYSNDAFDIW

SEQ ID NO: 14856 - protein, 17 aa, Homo sapiens
CAKDRVLGINLYYFDYW

SEQ ID NO: 14857 - protein, 22 aa, Homo sapiens
CATAPALYIVGATPRRDWFDPW

SEQ ID NO: 14858 - protein, 16 aa, Homo sapiens
CARAPYNWNYDAFDIW

SEQ ID NO: 14859 - protein, 15 aa, Homo sapiens
CARACKLCDDAFDIW

SEQ ID NO: 14860 - protein, 15 aa, Homo sapiens
CARECRGSLWYFDLW

SEQ ID NO: 14861 - protein, 19 aa, Homo sapiens
CARCYHDTTGHKLYYFDYW

SEQ ID NO: 14862 - protein, 20 aa, Homo sapiens
CARGVNYDFWSGRQDYFDYW

SEQ ID NO: 14863 - protein, 20 aa, Homo sapiens
CAKDPSITGTILARGWFDPW

SEQ ID NO: 14864 - protein, 15 aa, Homo sapiens
CARLPDFWSGYSAYW

SEQ ID NO: 14865 - protein, 17 aa, Homo sapiens
CARARSLVVVILAFDIW

SEQ ID NO: 14866 - protein, 19 aa, Homo sapiens
CATETKSIFGVVTTIFDYW

SEQ ID NO: 14867 - protein, 24 aa, Homo sapiens
CANLHDYGDYGAPLYYYYYGMDVW

SEQ ID NO: 14868 - protein, 23 aa, Homo sapiens
CAREPPGYDILTGYYTPGYFDLW

SEQ ID NO: 14869 - protein, 27 aa, Homo sapiens
CATGLVAVAGTTLLQKSALYYYYMDVW

SEQ ID NO: 14870 - protein, 17 aa, Homo sapiens
CARSPSPSGYPGWFDPW

SEQ ID NO: 14871 - protein, 19 aa, Homo sapiens
CAKLPLDRGDYGSHAFDIW

SEQ ID NO: 14872 - protein, 18 aa, Homo sapiens
CARPGREDPDYESWFDPW

SEQ ID NO: 14873 - protein, 22 aa, Homo sapiens
CARDSPQGMMLDHYFYYGMDVW

SEQ ID NO: 14874 - protein, 16 aa, Homo sapiens
CARDQQWLDTYYFDYW

SEQ ID NO: 14875 - protein, 17 aa, Homo sapiens
CARGVGQWLVDVRFDPW

SEQ ID NO: 14876 - protein, 13 aa, Homo sapiens
CQQYLHWPPGITF

SEQ ID NO: 14877 - protein, 19 aa, Homo sapiens
CARLEGEGTVYYYYGMDVW

SEQ ID NO: 14878 - protein, 20 aa, Homo sapiens
CARGEDYNFVWGRTGAFDVW

SEQ ID NO: 14879 - protein, 26 aa, Homo sapiens
CTTEVGRGFDWLFHAAVVTPGAVDIW

SEQ ID NO: 14880 - protein, 17 aa, Homo sapiens
CATDRGTIAVAGIFDRW

SEQ ID NO: 14881 - protein, 17 aa, Homo sapiens
CATPSSYYYDSSGFGYW

SEQ ID NO: 14882 - protein, 19 aa, Homo sapiens
CARASNVIVFPFTHAMDVW

SEQ ID NO: 14883 - protein, 16 aa, Homo sapiens
CASRRDGDYSGAFDIW

SEQ ID NO: 14884 - protein, 12 aa, Homo sapiens
CARALDFWIDYW

SEQ ID NO: 14885 - protein, 18 aa, Homo sapiens
CARVRDGSGSWDWYFDLW

SEQ ID NO: 14886 - protein, 22 aa, Homo sapiens
CARDGGYSSGWYAFSPGWFDPW

SEQ ID NO: 14887 - protein, 18 aa, Homo sapiens
CAREMKMGYDSSGSFDYW

SEQ ID NO: 14888 - protein, 17 aa, Homo sapiens
CAHSDYGDYEVYFFDYW

SEQ ID NO: 14889 - protein, 15 aa, Homo sapiens
CAKDMYPSLVIIDYW

SEQ ID NO: 14890 - protein, 15 aa, Homo sapiens
CTIRTVMTSEPFDHW

SEQ ID NO: 14891 - protein, 19 aa, Homo sapiens
CARVVPAPAGVSYNWFDPW

SEQ ID NO: 14892 - protein, 15 aa, Homo sapiens
CARGFGRAMVIFDYW

SEQ ID NO: 14893 - protein, 22 aa, Homo sapiens
CARDRSEYYYDSSGLGVWFDPW

SEQ ID NO: 14894 - protein, 16 aa, Homo sapiens
CATAPVVITTGWFDPW

SEQ ID NO: 14895 - protein, 11 aa, Homo sapiens
CVTHYGEIDYW

SEQ ID NO: 14896 - protein, 28 aa, Homo sapiens
CSLKASDSAIYYCARPEGGYSTSWVDYW

SEQ ID NO: 14897 - protein, 16 aa, Homo sapiens
CATQTTVTRRHWFDPW

SEQ ID NO: 14898 - protein, 23 aa, Homo sapiens
CARESRYYDYVWGSYRPEGVDYW

SEQ ID NO: 14899 - protein, 17 aa, Homo sapiens
CTTEEYYYDSSGEFDYW

SEQ ID NO: 14900 - protein, 13 aa, Homo sapiens
CAHWDDEGAFDIW

SEQ ID NO: 14901 - protein, 25 aa, Homo sapiens
CAHSPVDPYDFWSGYYMGPRWFDPW

SEQ ID NO: 14902 - protein, 16 aa, Homo sapiens
CARHQWELRQGWFDPW

SEQ ID NO: 14903 - protein, 11 aa, Homo sapiens
CANIIPPIDYW

SEQ ID NO: 14904 - protein, 22 aa, Homo sapiens
CARVPGDYDILFGTRDYYFDYW

SEQ ID NO: 14905 - protein, 15 aa, Homo sapiens
CARDGYSGSYLLDYW

SEQ ID NO: 14906 - protein, 19 aa, Homo sapiens
CARYSSGWYSDSPYYFDYW

SEQ ID NO: 14907 - protein, 23 aa, Homo sapiens
CARAPIDYGDYVGSYYYYGMDVW

SEQ ID NO: 14908 - protein, 19 aa, Homo sapiens
CAKDSRYLGYQTPRSFDYW

SEQ ID NO: 14909 - protein, 18 aa, Homo sapiens
CAKRRGDFGDDSGAFDVW

SEQ ID NO: 14910 - protein, 20 aa, Homo sapiens
CASSAGYLISGVVTYAMDIW

SEQ ID NO: 14911 - protein, 14 aa, Homo sapiens
CVSYTSTSTLDMVF

SEQ ID NO: 14912 - protein, 27 aa, Homo sapiens
CTRVHNVIFVINVEGAASARNWYVDLW

SEQ ID NO: 14913 - protein, 13 aa, Homo sapiens
CARARLVRTFDPW

SEQ ID NO: 14914 - protein, 16 aa, Homo sapiens
CARILLLHGDHSFDYW

SEQ ID NO: 14915 - protein, 16 aa, Homo sapiens
CAKLPHSSGQSYHQYW

SEQ ID NO: 14916 - protein, 15 aa, Homo sapiens
CAKAIAVADTVFDYW

SEQ ID NO: 14917 - protein, 18 aa, Homo sapiens
CAQLQVLRHVKSYYFDYW

SEQ ID NO: 14918 - protein, 16 aa, Homo sapiens
CARDALESIFGGFDYW

SEQ ID NO: 14919 - protein, 19 aa, Homo sapiens
CAKARSYDYGGPTDWFDPW

SEQ ID NO: 14920 - protein, 17 aa, Homo sapiens
CARLRRGAITMIVFDYW

SEQ ID NO: 14921 - protein, 20 aa, Homo sapiens
CASVASPDDYVWGSYRFDYW

SEQ ID NO: 14922 - protein, 17 aa, Homo sapiens
CARVSGAPLGSHMFDYW

SEQ ID NO: 14923 - protein, 15 aa, Homo sapiens
CARVLGESYRFFDYW

SEQ ID NO: 14924 - protein, 23 aa, Homo sapiens
CAADPFYCTGGVCYTNYYYMDVW

SEQ ID NO: 14925 - protein, 20 aa, Homo sapiens
CASGPYCRGGSCDIYYFNYW

SEQ ID NO: 14926 - protein, 25 aa, Homo sapiens
CAKKPKTGYSSGWYIPLLNYYFDYW

SEQ ID NO: 14927 - protein, 19 aa, Homo sapiens
CTADTVAWIQLWLLAFDIW

SEQ ID NO: 14928 - protein, 21 aa, Homo sapiens
CARHPVRRRFLEWLALAFDIW

SEQ ID NO: 14929 - protein, 26 aa, Homo sapiens
CARHVRRWLQSSSGTFPRSIGDFDYW

SEQ ID NO: 14930 - protein, 21 aa, Homo sapiens
CVKGLDFQGSGTLLGTGFEYW

SEQ ID NO: 14931 - protein, 21 aa, Homo sapiens
CAREAHYYDSSGYPNAYFDYW

SEQ ID NO: 14932 - protein, 19 aa, Homo sapiens
CAKDNRYYDSSGYYYFDYW

SEQ ID NO: 14933 - protein, 15 aa, Homo sapiens
CARVNGYYLAPYDYW

SEQ ID NO: 14934 - protein, 14 aa, Homo sapiens
CARVHSDNDWFDQW

SEQ ID NO: 14935 - protein, 14 aa, Homo sapiens
CAHRIVVVPGFDPW

SEQ ID NO: 14936 - protein, 19 aa, Homo sapiens
CARRYYYDRSDYDKAFDIW

SEQ ID NO: 14937 - protein, 32 aa, Homo sapiens
CALPILRAEDTALYYCAKDYDSSGYYHWFDPW

SEQ ID NO: 14938 - protein, 20 aa, Homo sapiens
CARGSWILTGYYTILPFDYW

SEQ ID NO: 14939 - protein, 22 aa, Homo sapiens
CARVPKRTYYYDSSGLYYFDYW

SEQ ID NO: 14940 - protein, 15 aa, Homo sapiens
CARDHYYDERGFDPW

SEQ ID NO: 14941 - protein, 13 aa, Homo sapiens
CSSPYYRNAFDIW

SEQ ID NO: 14942 - protein, 17 aa, Homo sapiens
CARVAARSSSWYYFDYW

SEQ ID NO: 14943 - protein, 14 aa, Homo sapiens
CARVRLGGYAVDYW

SEQ ID NO: 14944 - protein, 22 aa, Homo sapiens
CAGPDCSGGSCDEIRGYYFDYW

SEQ ID NO: 14945 - protein, 20 aa, Homo sapiens
CARALYSSGWPRYYYYMDVW

SEQ ID NO: 14946 - protein, 22 aa, Homo sapiens
CAKDFVRLTPIFGVVIGAFDYW

SEQ ID NO: 14947 - protein, 21 aa, Homo sapiens
CAKEERDYLDSSGYPEYFGFW

SEQ ID NO: 14948 - protein, 21 aa, Homo sapiens
CAKGLLVFGVVIIGSHTFDYW

SEQ ID NO: 14949 - protein, 17 aa, Homo sapiens
CAKGPGGIAAHSYFDYW

SEQ ID NO: 14950 - protein, 20 aa, Homo sapiens
CARASSGSWYPVRNNWFDPW

SEQ ID NO: 14951 - protein, 13 aa, Homo sapiens
CVRAFTGTHFDIW

SEQ ID NO: 14952 - protein, 15 aa, Homo sapiens
CTSATSVYYFEDDYW

SEQ ID NO: 14953 - protein, 19 aa, Homo sapiens
CARGPTTVTTALTGAFDIW

SEQ ID NO: 14954 - protein, 17 aa, Homo sapiens
CARLVQDSSSWYWFDPW

SEQ ID NO: 14955 - protein, 20 aa, Homo sapiens
CAKYSRGYFDSSGYPPFDYW

SEQ ID NO: 14956 - protein, 19 aa, Homo sapiens
CATAPGTIVGAARGWFDPW

SEQ ID NO: 14957 - protein, 19 aa, Homo sapiens
CAKDRQTYASDYYYGMDVW

SEQ ID NO: 14958 - protein, 23 aa, Homo sapiens
CATAPAAIFGTKKNYYYYGMDVW

SEQ ID NO: 14959 - protein, 21 aa, Homo sapiens
CATLHYYDSSGYYRPDAFDIW

SEQ ID NO: 14960 - protein, 20 aa, Homo sapiens
CARENAAYYYDSSGLYFDYW

SEQ ID NO: 14961 - protein, 17 aa, Homo sapiens
CAKGHLSYYGSGSYDYW

SEQ ID NO: 14962 - protein, 17 aa, Homo sapiens
CANAGSGSYEAGFFDYW

SEQ ID NO: 14963 - protein, 20 aa, Homo sapiens
CAKDLVPDFGGVITPLSDYW

SEQ ID NO: 14964 - protein, 12 aa, Homo sapiens
CLAWDTSPRDVF

SEQ ID NO: 14965 - protein, 19 aa, Homo sapiens
CAKRHYYGSGSHGWFFDLW

SEQ ID NO: 14966 - protein, 14 aa, Homo sapiens
CARGLRGVTDADYW

SEQ ID NO: 14967 - protein, 18 aa, Homo sapiens
CTTESAVYSSTDDAFDIW

SEQ ID NO: 14968 - protein, 20 aa, Homo sapiens
CAISPNYSDGSGYPDAFDIW

SEQ ID NO: 14969 - protein, 15 aa, Homo sapiens
CARDRSSGRDGLDYW

SEQ ID NO: 14970 - protein, 22 aa, Homo sapiens
CASPNRDCSSTSCYFVDAFDIW

SEQ ID NO: 14971 - protein, 20 aa, Homo sapiens
CARGGYHDTSGNWANWFDLW

SEQ ID NO: 14972 - protein, 29 aa, Homo sapiens
CARDGKYYDILTGYYRGLVYYYYYYMDVW

SEQ ID NO: 14973 - protein, 18 aa, Homo sapiens
CAIVRVGAFDWLRVFDYW

SEQ ID NO: 14974 - protein, 16 aa, Homo sapiens
CATTNINWNNYQFDYW

SEQ ID NO: 14975 - protein, 24 aa, Homo sapiens
CARDPYYDFWSGYYTIYYYGMDVW

SEQ ID NO: 14976 - protein, 19 aa, Homo sapiens
CARDSYDILTGHEIWFDPW

SEQ ID NO: 14977 - protein, 18 aa, Homo sapiens
CAKAGDVLSFYSYGFDVW

SEQ ID NO: 14978 - protein, 13 aa, Homo sapiens
CAKATVGMVRDYW

SEQ ID NO: 14979 - protein, 23 aa, Homo sapiens
CARDFTWYSEVSGGSPGDDFDYW

SEQ ID NO: 14980 - protein, 15 aa, Homo sapiens
CARSYYDTGGPFDFW

SEQ ID NO: 14981 - protein, 22 aa, Homo sapiens
CARGMRVYGDYDSYYYYYMDVW

SEQ ID NO: 14982 - protein, 14 aa, Homo sapiens
CARGGRSSWYIDYW

SEQ ID NO: 14983 - protein, 15 aa, Homo sapiens
CARGGQLERSWFDPW

SEQ ID NO: 14984 - protein, 17 aa, Homo sapiens
CARSLEIYSSSILPDYW

SEQ ID NO: 14985 - protein, 18 aa, Homo sapiens
CARSGTGWFGELFYFDYW

SEQ ID NO: 14986 - protein, 20 aa, Homo sapiens
CATGPIAAAGSGTGGWFDPW

SEQ ID NO: 14987 - protein, 22 aa, Homo sapiens
CSTGHYYDSSAYYWYYSGMDVW

SEQ ID NO: 14988 - protein, 25 aa, Homo sapiens
CQQSYSRPQVTFGQGARLEIKQVTF

SEQ ID NO: 14989 - protein, 16 aa, Homo sapiens
CASFTTTYVGDAFDLW

SEQ ID NO: 14990 - protein, 20 aa, Homo sapiens
CTRDRGGSDSHYYFYYMDVW

SEQ ID NO: 14991 - protein, 17 aa, Homo sapiens
CAGILVGATRAEYFQHW

SEQ ID NO: 14992 - protein, 22 aa, Homo sapiens
CAREMGLRYFDWSIYYYYMDVW

SEQ ID NO: 14993 - protein, 15 aa, Homo sapiens
CWLGAVTGNVAFDIW

SEQ ID NO: 14994 - protein, 16 aa, Homo sapiens
CAKDSGYSHSWAVDYW

SEQ ID NO: 14995 - protein, 12 aa, Homo sapiens
CASGLRTGSDYW

SEQ ID NO: 14996 - protein, 15 aa, Homo sapiens
CARLAGDLMDGFHYW

SEQ ID NO: 14997 - protein, 21 aa, Homo sapiens
CASANLEWFGRDWGYNWFDPW

SEQ ID NO: 14998 - protein, 26 aa, Homo sapiens
CARDRTMGNPWSYDILTGYDDYFDYW

SEQ ID NO: 14999 - protein, 19 aa, Homo sapiens
CATFTMIVVVNYRGAFDLW

SEQ ID NO: 15000 - protein, 18 aa, Homo sapiens
CSKDPKRDSGGRGYFDYW

SEQ ID NO: 15001 - protein, 19 aa, Homo sapiens
CTTDLSGNILTGYYPFDYW

SEQ ID NO: 15002 - protein, 21 aa, Homo sapiens
CAGRKMDIVVVVAATNAFDIW

SEQ ID NO: 15003 - protein, 15 aa, Homo sapiens
CARSSGWSLPHFDYW

SEQ ID NO: 15004 - protein, 18 aa, Homo sapiens
CAREGTSWLVPAAYPDYW

SEQ ID NO: 15005 - protein, 16 aa, Homo sapiens
CAKDHYSGYSTSIDYW

SEQ ID NO: 15006 - protein, 22 aa, Homo sapiens
CARLTYYYDSSGLKRGYYFDYW

SEQ ID NO: 15007 - protein, 17 aa, Homo sapiens
CIRFSSYDVWSGYFHTW

SEQ ID NO: 15008 - protein, 24 aa, Homo sapiens
CTTEETLSDSSSWYGELVNWFDPW

SEQ ID NO: 15009 - protein, 18 aa, Homo sapiens
CAKGQGHTVTTWGAFDIW

SEQ ID NO: 15010 - protein, 20 aa, Homo sapiens
CVKGSRGSCSGTICYPFDYW

SEQ ID NO: 15011 - protein, 15 aa, Homo sapiens
CARVRPGIFMGSDYW

SEQ ID NO: 15012 - protein, 19 aa, Homo sapiens
CARGYYDILTGTYGGDDYW

SEQ ID NO: 15013 - protein, 22 aa, Homo sapiens
CARSSNIAPAGIYYEDDGLDVW

SEQ ID NO: 15014 - protein, 17 aa, Homo sapiens
CAKAPDGIAVAGPFDYW

SEQ ID NO: 15015 - protein, 26 aa, Homo sapiens
CAKTLGEGRPWIQLWDGALGDAFDIW

SEQ ID NO: 15016 - protein, 15 aa, Homo sapiens
CAKVSTTVTDRTDYW

SEQ ID NO: 15017 - protein, 21 aa, Homo sapiens
CARGHDIVVVPAAITHWFDPW

SEQ ID NO: 15018 - protein, 17 aa, Homo sapiens
CATSNPMTTVTSWFDPW

SEQ ID NO: 15019 - protein, 27 aa, Homo sapiens
CAHTRITIFGVVIIWGANIRPYYFDYW

SEQ ID NO: 15020 - protein, 14 aa, Homo sapiens
CASLWWLRGYFDYW

SEQ ID NO: 15021 - protein, 27 aa, Homo sapiens
CARQTHQYYDILTGYSDWDYYYGMDVW

SEQ ID NO: 15022 - protein, 19 aa, Homo sapiens
CARHVDFWRVHYFFAMDVW

SEQ ID NO: 15023 - protein, 14 aa, Homo sapiens
CARVMSNGWPGDYW

SEQ ID NO: 15024 - protein, 19 aa, Homo sapiens
CAGSLESRDYMLNHRFDYW

SEQ ID NO: 15025 - protein, 16 aa, Homo sapiens
CAHRRSNWNDVAFDIW

SEQ ID NO: 15026 - protein, 15 aa, Homo sapiens
CAKVPNSYSSSSDYW

SEQ ID NO: 15027 - protein, 21 aa, Homo sapiens
CAKDLRPYYDSNSRLLAFDVW

SEQ ID NO: 15028 - protein, 15 aa, Homo sapiens
CAKDRGPIMTTADYW

SEQ ID NO: 15029 - protein, 16 aa, Homo sapiens
CAKLPSRIAADPFDYW

SEQ ID NO: 15030 - protein, 20 aa, Homo sapiens
CATLGPIYDFWSGYDAFDIW

SEQ ID NO: 15031 - protein, 23 aa, Homo sapiens
CAWGGSLAYCGGDCPRSTAFDIW

SEQ ID NO: 15032 - protein, 19 aa, Homo sapiens
CAREKDLEWLHDPGGFDIW

SEQ ID NO: 15033 - protein, 19 aa, Homo sapiens
CATPRTLDYYDPNWYFDLW

SEQ ID NO: 15034 - protein, 17 aa, Homo sapiens
CATVGVTTFFGWEFDYW

SEQ ID NO: 15035 - protein, 16 aa, Homo sapiens
CASWYSSGWPGGFDPW

SEQ ID NO: 15036 - protein, 20 aa, Homo sapiens
CATAIAYYYDSSGYYEFDYW

SEQ ID NO: 15037 - protein, 19 aa, Homo sapiens
CTTEETYCGGDCYSGFDYW

SEQ ID NO: 15038 - protein, 13 aa, Homo sapiens
CARRGIYLLDDYW

SEQ ID NO: 15039 - protein, 14 aa, Homo sapiens
CVRDGYNEGGFDYW

SEQ ID NO: 15040 - protein, 19 aa, Homo sapiens
CAKDKSAGFGVAIPYMDVW

SEQ ID NO: 15041 - protein, 19 aa, Homo sapiens
CARLNDGIAVAGTDDFDPW

SEQ ID NO: 15042 - protein, 29 aa, Homo sapiens
CAKDPAYYDFWSGYAAHPPSYYYYGMDVW

SEQ ID NO: 15043 - protein, 17 aa, Homo sapiens
CALPIWELPISSLFDYW

SEQ ID NO: 15044 - protein, 13 aa, Homo sapiens
CVAAAATAAFDIW

SEQ ID NO: 15045 - protein, 14 aa, Homo sapiens
CARLAWLRGLFDTW

SEQ ID NO: 15046 - protein, 16 aa, Homo sapiens
CASRGGSGWYRLIDYW

SEQ ID NO: 15047 - protein, 19 aa, Homo sapiens
CARVSISTGYSSSWFFDYW

SEQ ID NO: 15048 - protein, 16 aa, Homo sapiens
CATSLVATTHPLFDYW

SEQ ID NO: 15049 - protein, 21 aa, Homo sapiens
CAKKEVWFGELSSYYYGMDVW

SEQ ID NO: 15050 - protein, 16 aa, Homo sapiens
CATSPGKTTYWYFDLW

SEQ ID NO: 15051 - protein, 27 aa, Homo sapiens
CARIHPDLATFPIAVAGQIGDDAFDIW

SEQ ID NO: 15052 - protein, 23 aa, Homo sapiens
CARVPYDFWSGYYTGRDWYFDLW

SEQ ID NO: 15053 - protein, 15 aa, Homo sapiens
CASPVLFASGAFDIW

SEQ ID NO: 15054 - protein, 27 aa, Homo sapiens
CARTFQGPQDIVVVPAAIGYYYGMDVW

SEQ ID NO: 15055 - protein, 13 aa, Homo sapiens
CAKYNSSSYIDSW

SEQ ID NO: 15056 - protein, 15 aa, Homo sapiens
CAKFASYAQDAFDIW

SEQ ID NO: 15057 - protein, 21 aa, Homo sapiens
CARGDGHLVGGVLFTSNFDTW

SEQ ID NO: 15058 - protein, 20 aa, Homo sapiens
CTREKVSSYGYIGPLDFGYW

SEQ ID NO: 15059 - protein, 24 aa, Homo sapiens
CARGEETYYDILTGYYNVDYFDYW

SEQ ID NO: 15060 - protein, 14 aa, Homo sapiens
CAKITSGSYSIDYW

SEQ ID NO: 15061 - protein, 18 aa, Homo sapiens
CTRTRHDSGDYLNAFDVW

SEQ ID NO: 15062 - protein, 24 aa, Homo sapiens
CARDHGHSSSWDGNYYYYYYMDVW

SEQ ID NO: 15063 - protein, 19 aa, Homo sapiens
CARSYYASGSYYNAYFDYW

SEQ ID NO: 15064 - protein, 18 aa, Homo sapiens
CARGRGWGIAAAGTGDYW

SEQ ID NO: 15065 - protein, 15 aa, Homo sapiens
CARGQQWLVRPADYW

SEQ ID NO: 15066 - protein, 20 aa, Homo sapiens
CTTEPEDSSSWQRPYYFDYW

SEQ ID NO: 15067 - protein, 15 aa, Homo sapiens
CQQYNNWPPRQSRTF

SEQ ID NO: 15068 - protein, 12 aa, Homo sapiens
CTRDGVAGTDYW

SEQ ID NO: 15069 - protein, 17 aa, Homo sapiens
CAKKDPFDYEGSPFDYW

SEQ ID NO: 15070 - protein, 17 aa, Homo sapiens
CASLELRSGPINWFDPW

SEQ ID NO: 15071 - protein, 23 aa, Homo sapiens
CANLRGACSSTSCYRSHDAFDIW

SEQ ID NO: 15072 - protein, 28 aa, Homo sapiens
CAKCFSPLSPGGLLWFGELYCYYGMDVW

SEQ ID NO: 15073 - protein, 15 aa, Homo sapiens
CAKDITPVHKGFDYW

SEQ ID NO: 15074 - protein, 15 aa, Homo sapiens
CATNIVGAPWYMDVW

SEQ ID NO: 15075 - protein, 17 aa, Homo sapiens
CARQASAYSSSLDLDYW

SEQ ID NO: 15076 - protein, 19 aa, Homo sapiens
CAKAARSGWYNIYYGMDVW

SEQ ID NO: 15077 - protein, 16 aa, Homo sapiens
CARVYLVAGIRVFDYW

SEQ ID NO: 15078 - protein, 19 aa, Homo sapiens
CARSVRGDSSGLGDSFDVW

SEQ ID NO: 15079 - protein, 16 aa, Homo sapiens
CARETADYTSSWYDYW

SEQ ID NO: 15080 - protein, 16 aa, Homo sapiens
CAKSSGDYDNWAPDYW

SEQ ID NO: 15081 - protein, 19 aa, Homo sapiens
CARSVGYNSDWAVNALDIW

SEQ ID NO: 15082 - protein, 18 aa, Homo sapiens
CATLWFGESTIDYYMDVW

SEQ ID NO: 15083 - protein, 15 aa, Homo sapiens
CAKVADMTTTPSDYW

SEQ ID NO: 15084 - protein, 16 aa, Homo sapiens
CAKVNSGHKLDAFDIW

SEQ ID NO: 15085 - protein, 14 aa, Homo sapiens
CARDRGGFNHFDYW

SEQ ID NO: 15086 - protein, 15 aa, Homo sapiens
CARGQRWLQISFDPW

SEQ ID NO: 15087 - protein, 17 aa, Homo sapiens
CARSTSSSWSPDAFDIW

SEQ ID NO: 15088 - protein, 16 aa, Homo sapiens
CARDPTYYDIHWFDPW

SEQ ID NO: 15089 - protein, 18 aa, Homo sapiens
CASGPRSSSWHASYFDYW

SEQ ID NO: 15090 - protein, 17 aa, Homo sapiens
CARQRRWLQLGYYFDYW

SEQ ID NO: 15091 - protein, 23 aa, Homo sapiens
CATAMSTVTTSPTLFVHYYFDYW

SEQ ID NO: 15092 - protein, 22 aa, Homo sapiens
CARADPATTMIVVAHSPPPDYW

SEQ ID NO: 15093 - protein, 29 aa, Homo sapiens
CASPGDRYYDFWSGYYPGDYYYYYGMDVW

SEQ ID NO: 15094 - protein, 22 aa, Homo sapiens
CAKDILRGAGWRWYYYYGMDVW

SEQ ID NO: 15095 - protein, 19 aa, Homo sapiens
CAGPPTGYYGSGSFHFDYW

SEQ ID NO: 15096 - protein, 19 aa, Homo sapiens
CTGDGYSSSWYFYYGMDVW

SEQ ID NO: 15097 - protein, 15 aa, Homo sapiens
CARGGYNYEEYIDFW

SEQ ID NO: 15098 - protein, 26 aa, Homo sapiens
CALPISAVYYCATDFAIAVAGTLDYW

SEQ ID NO: 15099 - protein, 17 aa, Homo sapiens
CAKIDGSTSRTHYFDYW

SEQ ID NO: 15100 - protein, 13 aa, Homo sapiens
CAKLQSGEIFDYW

SEQ ID NO: 15101 - protein, 30 aa, Homo sapiens
CLRSEDTAVYYCARVVMPPDFWSGYYMDVW

SEQ ID NO: 15102 - protein, 27 aa, Homo sapiens
CARVGYCSSTSCYPLVSNYYYYGMDVW

SEQ ID NO: 15103 - protein, 19 aa, Homo sapiens
CARERSYGSSWYYYYMDVW

SEQ ID NO: 15104 - protein, 16 aa, Homo sapiens
CAKDQEIAVAGDNDYW

SEQ ID NO: 15105 - protein, 26 aa, Homo sapiens
CANNIPAYCGGDCRRTYYYYYGMDVW

SEQ ID NO: 15106 - protein, 27 aa, Homo sapiens
CARHLVHTPDKYYEIFGVVTVYYFDYW

SEQ ID NO: 15107 - protein, 14 aa, Homo sapiens
CARGNYYGAANDYW

SEQ ID NO: 15108 - protein, 20 aa, Homo sapiens
CAIGGWRLRDGYAYNWFDPW

SEQ ID NO: 15109 - protein, 23 aa, Homo sapiens
CARLTYCSSTSCYNILLNPFDYW

SEQ ID NO: 15110 - protein, 21 aa, Homo sapiens
CARLSVWFGENPQEGDAFDIW

SEQ ID NO: 15111 - protein, 18 aa, Homo sapiens
CARLSHKKYSSSWYFDYW

SEQ ID NO: 15112 - protein, 25 aa, Homo sapiens
CARDQEEDTIFGVVISEWPDAFDIW

SEQ ID NO: 15113 - protein, 16 aa, Homo sapiens
CARPYYGGSRRYFDLW

SEQ ID NO: 15114 - protein, 21 aa, Homo sapiens
CARPHGYSDYGIMGYDAFDLW

SEQ ID NO: 15115 - protein, 15 aa, Homo sapiens
CARTDLSGYYFMDYW

SEQ ID NO: 15116 - protein, 24 aa, Homo sapiens
CARSPGGNDFWSGYYYYYYYMDVW

SEQ ID NO: 15117 - protein, 17 aa, Homo sapiens
CARGIPEYSSFVRLDYW

SEQ ID NO: 15118 - protein, 19 aa, Homo sapiens
CASSRGPYSSGWYSGFDYW

SEQ ID NO: 15119 - protein, 19 aa, Homo sapiens
CARAAYDSTGYHLSSFLYW

SEQ ID NO: 15120 - protein, 19 aa, Homo sapiens
CARGGDDSSGWIAYYFDYW

SEQ ID NO: 15121 - protein, 14 aa, Homo sapiens
CARENPSGSWFDPW

SEQ ID NO: 15122 - protein, 18 aa, Homo sapiens
CAKVDVDTAMPHYYFDYW

SEQ ID NO: 15123 - protein, 22 aa, Homo sapiens
CAKSTTQTYYDFWSGYSFFDSW

SEQ ID NO: 15124 - protein, 18 aa, Homo sapiens
CARVGYDFWSGYYHIDYW

SEQ ID NO: 15125 - protein, 20 aa, Homo sapiens
CARDSRISDYSGNHRNLDYW

SEQ ID NO: 15126 - protein, 22 aa, Homo sapiens
CAMLGYCSGGTCYSFGRWFDPW

SEQ ID NO: 15127 - protein, 19 aa, Homo sapiens
CARGYNSGWSINPYYLDYW

SEQ ID NO: 15128 - protein, 19 aa, Homo sapiens
CASSGVNYYDSSGYSIDYW

SEQ ID NO: 15129 - protein, 18 aa, Homo sapiens
CASLMTTDTRYYYYMDVW

SEQ ID NO: 15130 - protein, 29 aa, Homo sapiens
CAREGPYIPLRYFDWLTPRTRGHDAFDIW

SEQ ID NO: 15131 - protein, 20 aa, Homo sapiens
CARHPITMVRGVTRWDFDYW

SEQ ID NO: 15132 - protein, 18 aa, Homo sapiens
CAKDFAYYDSSAYYPDYW

SEQ ID NO: 15133 - protein, 13 aa, Homo sapiens
CARATRWLHFDYW

SEQ ID NO: 15134 - protein, 25 aa, Homo sapiens
CARDLQGELITIFGVVTWTGWFDPW

SEQ ID NO: 15135 - protein, 16 aa, Homo sapiens
CARDLRSGNSEAFDIW

SEQ ID NO: 15136 - protein, 20 aa, Homo sapiens
CARDRVAGLYYYYYYGMDVW

SEQ ID NO: 15137 - protein, 19 aa, Homo sapiens
CAHRPLITGTGWLVAFDIW

SEQ ID NO: 15138 - protein, 25 aa, Homo sapiens
CARQPVVYAIHLLVPNYYYYYMDVW

SEQ ID NO: 15139 - protein, 18 aa, Homo sapiens
CTTEGYSNYYYYYGMDVW

SEQ ID NO: 15140 - protein, 16 aa, Homo sapiens
CAKLQWDSSVLLRDYW

SEQ ID NO: 15141 - protein, 28 aa, Homo sapiens
CARDRATVTTRTTGGPFRYYYYYGMDVW

SEQ ID NO: 15142 - protein, 20 aa, Homo sapiens
CARGTFCENSNCRSDGFDLW

SEQ ID NO: 15143 - protein, 18 aa, Homo sapiens
CARHRDSSGWYKSEFDYW

SEQ ID NO: 15144 - protein, 16 aa, Homo sapiens
CAVYGGNSDMNYFDYW

SEQ ID NO: 15145 - protein, 20 aa, Homo sapiens
CARCPPDRYFDWLSYYFDYW

SEQ ID NO: 15146 - protein, 15 aa, Homo sapiens
CAALPYLRANPADYW

SEQ ID NO: 15147 - protein, 24 aa, Homo sapiens
CARETALRYFDWSPPGVAYYFDYW

SEQ ID NO: 15148 - protein, 22 aa, Homo sapiens
CARRPIAARRAAWYYYYGMDVW

SEQ ID NO: 15149 - protein, 15 aa, Homo sapiens
CARNRGGTFSFFDSW

SEQ ID NO: 15150 - protein, 21 aa, Homo sapiens
CARDHVDAPEYKITNEWFDPW

SEQ ID NO: 15151 - protein, 22 aa, Homo sapiens
CSGGSCYSLFPYYYYYYGMDVW

SEQ ID NO: 15152 - protein, 23 aa, Homo sapiens
CAKSAAYYDFWSHATWPYYFDYW

SEQ ID NO: 15153 - protein, 22 aa, Homo sapiens
CARDYGEYYDFWSGYGFAFDIW

SEQ ID NO: 15154 - protein, 16 aa, Homo sapiens
CATGPVSGYQNWFDPW

SEQ ID NO: 15155 - protein, 20 aa, Homo sapiens
CAKDLYYDSTGYYEYYFDIW

SEQ ID NO: 15156 - protein, 22 aa, Homo sapiens
CARDPTGRDLPAPPNINWFDPW

SEQ ID NO: 15157 - protein, 18 aa, Homo sapiens
CAHRPPLRFSSSGEFDYW

SEQ ID NO: 15158 - protein, 21 aa, Homo sapiens
CARPLPHYDYVWGTNGGFDYW

SEQ ID NO: 15159 - protein, 14 aa, Homo sapiens
CTTGVYLWLGSDYW

SEQ ID NO: 15160 - protein, 23 aa, Homo sapiens
CARHFIPERVSYCTTISCPTDYW

SEQ ID NO: 15161 - protein, 17 aa, Homo sapiens
CAREGGAHYGDFRLDYW

SEQ ID NO: 15162 - protein, 25 aa, Homo sapiens
CARDLSSFHYDSSGYWGVSGSFDFW

SEQ ID NO: 15163 - protein, 19 aa, Homo sapiens
CARDADSSGWYPRRVADYW

SEQ ID NO: 15164 - protein, 12 aa, Homo sapiens
CATEAWGAFDVW

SEQ ID NO: 15165 - protein, 13 aa, Homo sapiens
CNSRDYSGNRLLF

SEQ ID NO: 15166 - protein, 19 aa, Homo sapiens
CARYLGYCTTGVCYPFDYW

SEQ ID NO: 15167 - protein, 17 aa, Homo sapiens
CARNRDSKGYYNPFDDW

SEQ ID NO: 15168 - protein, 18 aa, Homo sapiens
CARERDYYDTSGYYFDFW

SEQ ID NO: 15169 - protein, 12 aa, Homo sapiens
CAGARGSSLDYW

SEQ ID NO: 15170 - protein, 18 aa, Homo sapiens
CAKDGPYYGDYVGAFDIW

SEQ ID NO: 15171 - protein, 19 aa, Homo sapiens
CARARDHYDSSSYYGFDYW

SEQ ID NO: 15172 - protein, 12 aa, Homo sapiens
CMSVDIEDLDYW

SEQ ID NO: 15173 - protein, 26 aa, Homo sapiens
CAKLGFADLYDYVWGSYRSFDAFDIW

SEQ ID NO: 15174 - protein, 25 aa, Homo sapiens
CARADQDSLLWFGELPRSSGYFDYW

SEQ ID NO: 15175 - protein, 14 aa, Homo sapiens
CAKAFFDWDPLDYW

SEQ ID NO: 15176 - protein, 14 aa, Homo sapiens
CATRGYSDAYFDYW

SEQ ID NO: 15177 - protein, 18 aa, Homo sapiens
CGVGSSTTSYYYYGMDVW

SEQ ID NO: 15178 - protein, 20 aa, Homo sapiens
CARGVPYDSSGYSLDAFDIW

SEQ ID NO: 15179 - protein, 14 aa, Homo sapiens
CARVHGGTGWFDPW

SEQ ID NO: 15180 - protein, 15 aa, Homo sapiens
CARTTVPGQGYFDYW

SEQ ID NO: 15181 - protein, 15 aa, Homo sapiens
CAKDDRPDSSSFDYW

SEQ ID NO: 15182 - protein, 14 aa, Homo sapiens
CARDPGIFGSFDPW

SEQ ID NO: 15183 - protein, 19 aa, Homo sapiens
CARLISRIAATDTGAFDIW

SEQ ID NO: 15184 - protein, 15 aa, Homo sapiens
CARGGTQWPDASDIW

SEQ ID NO: 15185 - protein, 16 aa, Homo sapiens
CARNPYYYSNSAFDLW

SEQ ID NO: 15186 - protein, 14 aa, Homo sapiens
CARNRNSFYSFDIW

SEQ ID NO: 15187 - protein, 19 aa, Homo sapiens
CARVIGYDSSGYADAFDIW

SEQ ID NO: 15188 - protein, 16 aa, Homo sapiens
CAKDRYSSGWAQIDYW

SEQ ID NO: 15189 - protein, 17 aa, Homo sapiens
CAKANLYSSPHYYFDYW

SEQ ID NO: 15190 - protein, 21 aa, Homo sapiens
CARDRGRTSFVGSQYDAFGIW

SEQ ID NO: 15191 - protein, 20 aa, Homo sapiens
CARELRRPYSSGWYEYFQHW

SEQ ID NO: 15192 - protein, 16 aa, Homo sapiens
CAHLRGYSYGDAFDIW

SEQ ID NO: 15193 - protein, 20 aa, Homo sapiens
CARSLNYDFWSGYQGVFDPW

SEQ ID NO: 15194 - protein, 13 aa, Homo sapiens
CARGKQWPLFDPW

SEQ ID NO: 15195 - protein, 20 aa, Homo sapiens
CATVLFPSSTNWYYGTFDLW

SEQ ID NO: 15196 - protein, 16 aa, Homo sapiens
CATSSVLRFLGWFDPW

SEQ ID NO: 15197 - protein, 17 aa, Homo sapiens
CAREPNSSGWFPAFDYW

SEQ ID NO: 15198 - protein, 18 aa, Homo sapiens
CSSYTSSSYTSTTTPVVF

SEQ ID NO: 15199 - protein, 17 aa, Homo sapiens
CARAPAFWSGFTEFDPW

SEQ ID NO: 15200 - protein, 30 aa, Homo sapiens
CALPISAVYYCARDIRGGYSYGYAPWFDPW

SEQ ID NO: 15201 - protein, 18 aa, Homo sapiens
CATAYRLYIAVAAYFDYW

SEQ ID NO: 15202 - protein, 15 aa, Homo sapiens
CVRDSSAGYGYFDIW

SEQ ID NO: 15203 - protein, 17 aa, Homo sapiens
CATGIAMADTSYYFDYW

SEQ ID NO: 15204 - protein, 19 aa, Homo sapiens
CARDGTLATWPPLYYMDVW

SEQ ID NO: 15205 - protein, 17 aa, Homo sapiens
CARVPSNYPDSGAFDIW

SEQ ID NO: 15206 - protein, 20 aa, Homo sapiens
CAKSKSADYGDYHRTPFDHW

SEQ ID NO: 15207 - protein, 19 aa, Homo sapiens
CAKGWIEGSYYDLKAFDIW

SEQ ID NO: 15208 - protein, 21 aa, Homo sapiens
CARDGDYYDSSGYWTILFDYW

SEQ ID NO: 15209 - protein, 18 aa, Homo sapiens
CARAGITIFGVVTSFDYW

SEQ ID NO: 15210 - protein, 21 aa, Homo sapiens
CTRVRYYDFWSGSRPYAFDIW

SEQ ID NO: 15211 - protein, 14 aa, Homo sapiens
CQSYDSRLSRSMIF

SEQ ID NO: 15212 - protein, 25 aa, Homo sapiens
CARGVSSATMTVLVFTSAMEYFDHW

SEQ ID NO: 15213 - protein, 24 aa, Homo sapiens
CAKDMEQHHYDFWSGYYTDYFDYW

SEQ ID NO: 15214 - protein, 15 aa, Homo sapiens
CARNIRRDGYNLDYW

SEQ ID NO: 15215 - protein, 14 aa, Homo sapiens
CARDRGAAAGIDYW

SEQ ID NO: 15216 - protein, 17 aa, Homo sapiens
CARVRGNFYGEYDFDYW

SEQ ID NO: 15217 - protein, 17 aa, Homo sapiens
CATTPRGLEQDYYFDYW

SEQ ID NO: 15218 - protein, 24 aa, Homo sapiens
CARGVSRGVVVPAAIYVSGWFDPW

SEQ ID NO: 15219 - protein, 33 aa, Homo sapiens
CDWSSDVCSSDLKTEDTAVYYCTSTTVTTHDYW

SEQ ID NO: 15220 - protein, 13 aa, Homo sapiens
CARAYTNHRFDFW

SEQ ID NO: 15221 - protein, 20 aa, Homo sapiens
CARALPYYYDSSGWAYFDYW

SEQ ID NO: 15222 - protein, 12 aa, Homo sapiens
CLGGGNPWEDYW

SEQ ID NO: 15223 - protein, 17 aa, Homo sapiens
CAMLGGGNSRAGAFDIW

SEQ ID NO: 15224 - protein, 16 aa, Homo sapiens
CARDLGYTNNWYHDFW

SEQ ID NO: 15225 - protein, 16 aa, Homo sapiens
CASSRERWLPASFDYW

SEQ ID NO: 15226 - protein, 13 aa, Homo sapiens
CAKVGTAMDGDYW

SEQ ID NO: 15227 - protein, 26 aa, Homo sapiens
CARDPVSDYDFWSGYIYYYYYGMDVW

SEQ ID NO: 15228 - protein, 21 aa, Homo sapiens
CARDGGSTTESYNYYYGMDVW

SEQ ID NO: 15229 - protein, 18 aa, Homo sapiens
CARGATIFGVVMNGFDPW

SEQ ID NO: 15230 - protein, 23 aa, Homo sapiens
CARDRTDSGWYLGDYYYYGMDVW

SEQ ID NO: 15231 - protein, 11 aa, Homo sapiens [sequence omitted]

SEQ ID NO: 15232 - protein, 13 aa, Homo sapiens
CYSMPGGLAFDIW

SEQ ID NO: 15233 - protein, 17 aa, Homo sapiens
CARVSWSPSGWKIFDYW

SEQ ID NO: 15234 - protein, 23 aa, Homo sapiens
CARVPQHCRDFTCYPPVDGFDIW

SEQ ID NO: 15235 - protein, 14 aa, Homo sapiens
CARASGNYSPFDHW

SEQ ID NO: 15236 - protein, 20 aa, Homo sapiens
CASGDYVWGSYRYTAAFDIW

SEQ ID NO: 15237 - protein, 18 aa, Homo sapiens
CARGFPLGGGLLGYFDYW

SEQ ID NO: 15238 - protein, 29 aa, Homo sapiens
CTTDLYGVVVAATLYDYVWGSGIRPIDYW

SEQ ID NO: 15239 - protein, 15 aa, Homo sapiens
CARYSGYERVIFDYW

SEQ ID NO: 15240 - protein, 23 aa, Homo sapiens
CARQISGYDILTGPVLNDAFDIW

SEQ ID NO: 15241 - protein, 17 aa, Homo sapiens
CVKDIYSYVKAYYFDYW

SEQ ID NO: 15242 - protein, 16 aa, Homo sapiens
CATLPGDYGDYGPDYW

SEQ ID NO: 15243 - protein, 28 aa, Homo sapiens
CARELYYDFWSGFGRWGSSAQLNAFDTW

SEQ ID NO: 15244 - protein, 22 aa, Homo sapiens
CARVRITMIVVAERGGRYFDYW

SEQ ID NO: 15245 - protein, 20 aa, Homo sapiens
CATGTPFPDSSGYLNWFDPW

SEQ ID NO: 15246 - protein, 21 aa, Homo sapiens
CATDSYDFWSGYPRYYGMDVW

SEQ ID NO: 15247 - protein, 17 aa, Homo sapiens
CAKDISAIPSWVAIDYW

SEQ ID NO: 15248 - protein, 18 aa, Homo sapiens
CARDVGYGGNLVYYFDYW

SEQ ID NO: 15249 - protein, 16 aa, Homo sapiens
CASNHQLGWGFLFDYW

SEQ ID NO: 15250 - protein, 14 aa, Homo sapiens
CARAERYSGSFDYW

SEQ ID NO: 15251 - protein, 14 aa, Homo sapiens
CATVGITGTYPDYW

SEQ ID NO: 15252 - protein, 15 aa, Homo sapiens
CAKSSGYYSEYFQHW

SEQ ID NO: 15253 - protein, 16 aa, Homo sapiens
CVKGYYSSGGNTFDIW

SEQ ID NO: 15254 - protein, 16 aa, Homo sapiens
CAKDLSRGRGWDFDYW

SEQ ID NO: 15255 - protein, 15 aa, Homo sapiens
CATDSRYYYKNFDSW

SEQ ID NO: 15256 - protein, 20 aa, Homo sapiens
CAREGRYYDSSSQGNAFDIW

SEQ ID NO: 15257 - protein, 20 aa, Homo sapiens
CARDSSLGLVVVAMDGFDYW

SEQ ID NO: 15258 - protein, 19 aa, Homo sapiens
CATAPALSSPTAYNWFDPW

SEQ ID NO: 15259 - protein, 20 aa, Homo sapiens
CATVRSQLTLHYYYYYMDVW

SEQ ID NO: 15260 - protein, 19 aa, Homo sapiens
CARNNKYTSTWYEAPFDYW

SEQ ID NO: 15261 - protein, 24 aa, Homo sapiens
CARHFPGIRYFDWSATTVAWFDPW

SEQ ID NO: 15262 - protein, 19 aa, Homo sapiens
CARSYDFWSGYPRYYFDYW

SEQ ID NO: 15263 - protein, 20 aa, Homo sapiens
CAKDTLYDSSGYYLNAFDIW

SEQ ID NO: 15264 - protein, 14 aa, Homo sapiens
CATSHQLELHLDYW

SEQ ID NO: 15265 - protein, 23 aa, Homo sapiens
CARDKGFWSGYYTGYYYYGMDVW

SEQ ID NO: 15266 - protein, 13 aa, Homo sapiens
CASVSGELVADYW

SEQ ID NO: 15267 - protein, 17 aa, Homo sapiens
CARLTYYSYGYRWFDPW

SEQ ID NO: 15268 - protein, 18 aa, Homo sapiens
CARGTFQDYGDSASLDYW

SEQ ID NO: 15269 - protein, 22 aa, Homo sapiens
CTTDLVLPYYDILTGYYPFDYW

SEQ ID NO: 15270 - protein, 16 aa, Homo sapiens
CARDRSGWYLGYMDVW

SEQ ID NO: 15271 - protein, 13 aa, Homo sapiens
CAHNNAIFYFDYW

SEQ ID NO: 15272 - protein, 22 aa, Homo sapiens
CARNPYYYDSSGYYQPALFDYW

SEQ ID NO: 15273 - protein, 20 aa, Homo sapiens
CARAFAYSSSWYGVPNQDYW

SEQ ID NO: 15274 - protein, 20 aa, Homo sapiens
CAKDFNYDFWSGQGNYFDYW

SEQ ID NO: 15275 - protein, 15 aa, Homo sapiens
CARDQNGSWYAVDYW

SEQ ID NO: 15276 - protein, 17 aa, Homo sapiens
CTKGFINSGHVVGFDPW

SEQ ID NO: 15277 - protein, 21 aa, Homo sapiens
CASAVYYDFWSGYYLGWFDPW

SEQ ID NO: 15278 - protein, 20 aa, Homo sapiens
CARRRSLITMIVVVQYFDYW

SEQ ID NO: 15279 - protein, 23 aa, Homo sapiens
CARAERARGYYDSIGYYLPFDYW

SEQ ID NO: 15280 - protein, 20 aa, Homo sapiens
CATGPSRPFGVVTPNWFDPW

SEQ ID NO: 15281 - protein, 19 aa, Homo sapiens
CAKEGYYGDRRSPLPFDPW

SEQ ID NO: 15282 - protein, 21 aa, Homo sapiens
CARQVGGYDYGAYYYYYMDVW

SEQ ID NO: 15283 - protein, 17 aa, Homo sapiens
CARGVGWFGELTWFDPW

SEQ ID NO: 15284 - protein, 18 aa, Homo sapiens
CARPGYSYGPEGEWFDPW

SEQ ID NO: 15285 - protein, 18 aa, Homo sapiens
CARGDIVVVVAATPNDYW

SEQ ID NO: 15286 - protein, 28 aa, Homo sapiens
CARDGPKYYYDSSGYYPPSWDYYYMDVW

SEQ ID NO: 15287 - protein, 17 aa, Homo sapiens
CAKDGGDWNYEVPFDYW

SEQ ID NO: 15288 - protein, 16 aa, Homo sapiens
CARAAGDSTADYMDVW

SEQ ID NO: 15289 - protein, 18 aa, Homo sapiens
CALPISPTQRTATHFDYW

SEQ ID NO: 15290 - protein, 19 aa, Homo sapiens
CARHFATMLRGVLFYFDYW

SEQ ID NO: 15291 - protein, 22 aa, Homo sapiens
CARHRPTTIFGVVITPSYFDYW

SEQ ID NO: 15292 - protein, 14 aa, Homo sapiens
CAKDLVRLNQLDYW

SEQ ID NO: 15293 - protein, 22 aa, Homo sapiens
CTTDGTIDGSYYRYYYYGMDVW

SEQ ID NO: 15294 - protein, 17 aa, Homo sapiens
CARAPSGISYPNAFDFW

SEQ ID NO: 15295 - protein, 16 aa, Homo sapiens
CATDLPYSGYGRFDYW

SEQ ID NO: 15296 - protein, 21 aa, Homo sapiens
CARHLSGFSGLTYYYYYMDVW

SEQ ID NO: 15297 - protein, 13 aa, Homo sapiens
CVRERGGDYLDYW

SEQ ID NO: 15298 - protein, 19 aa, Homo sapiens
CASDLRFLEWLYHDAFDIW

SEQ ID NO: 15299 - protein, 18 aa, Homo sapiens
CAHRRSPAPTDIDWFDPW

SEQ ID NO: 15300 - protein, 15 aa, Homo sapiens
CARPNGNYFAYFDYW

SEQ ID NO: 15301 - protein, 18 aa, Homo sapiens
CARMSFENLGDYDYFDYW

SEQ ID NO: 15302 - protein, 24 aa, Homo sapiens
CATDSAREYQLLFQIHNTDAFDIW

SEQ ID NO: 15303 - protein, 21 aa, Homo sapiens
CARDRNTVFGVDRTGFAFDYW

SEQ ID NO: 15304 - protein, 19 aa, Homo sapiens
CANLRLGELSLSDSYFDYW

SEQ ID NO: 15305 - protein, 16 aa, Homo sapiens
CARERAGFTMIPFDYW

SEQ ID NO: 15306 - protein, 16 aa, Homo sapiens
CARVPPGRAAAGNDYW

SEQ ID NO: 15307 - protein, 18 aa, Homo sapiens
CARDLSIVGPTSDAFDIW

SEQ ID NO: 15308 - protein, 23 aa, Homo sapiens
CVRDLRRDDVSTGFYKWRWFDSW

SEQ ID NO: 15309 - protein, 13 aa, Homo sapiens
CQSADASTTSVLF

SEQ ID NO: 15310 - protein, 26 aa, Homo sapiens
CARDRRDGEGDFWSGYSNYYYYMDVW

SEQ ID NO: 15311 - protein, 27 aa, Homo sapiens
CASHPGNSNYDILTGYFFIPSYGFDYW

SEQ ID NO: 15312 - protein, 13 aa, Homo sapiens
CQQYDTYSLAWTF

SEQ ID NO: 15313 - protein, 21 aa, Homo sapiens
CARDHSETTYSDSSDYLPDYW

SEQ ID NO: 15314 - protein, 18 aa, Homo sapiens
CARGPYYDFWTEGWFDPW

SEQ ID NO: 15315 - protein, 18 aa, Homo sapiens
CARAYYYDTSGYNDFDLW

SEQ ID NO: 15316 - protein, 20 aa, Homo sapiens
CARDGQLVEADYYYYGMDVW

SEQ ID NO: 15317 - protein, 19 aa, Homo sapiens
CARRPGYCTGGVCYAFDIW

SEQ ID NO: 15318 - protein, 17 aa, Homo sapiens
CATHTVTTPNYWYFDLW

SEQ ID NO: 15319 - protein, 21 aa, Homo sapiens
CARVGWGGSSSFHYYYYMDVW

SEQ ID NO: 15320 - protein, 21 aa, Homo sapiens
CAKEPILYYYDSSHERYFDYW

SEQ ID NO: 15321 - protein, 18 aa, Homo sapiens
CAKLVGDDYGDYVVADYW

SEQ ID NO: 15322 - protein, 21 aa, Homo sapiens
CARDLNSYSANYYRAYYFDYW

SEQ ID NO: 15323 - protein, 16 aa, Homo sapiens
CAREGGDLSSSEVDYW

SEQ ID NO: 15324 - protein, 14 aa, Homo sapiens
CAGSSGWPNWFDPW

SEQ ID NO: 15325 - protein, 11 aa, Homo sapiens
CPQHDNFLWTF

SEQ ID NO: 15326 - protein, 21 aa, Homo sapiens
CARDKGSYYDSSGYQGWFDTW

SEQ ID NO: 15327 - protein, 29 aa, Homo sapiens
CDWSSDVCSSDLYCARPEGGYSTSWVDYW

SEQ ID NO: 15328 - protein, 18 aa, Homo sapiens
CVAGGGSCYDHSYCRDYW

SEQ ID NO: 15329 - protein, 16 aa, Homo sapiens
CATGPATAIPDWFDPW

SEQ ID NO: 15330 - protein, 14 aa, Homo sapiens
CAVLRFLEWPLDYW

SEQ ID NO: 15331 - protein, 20 aa, Homo sapiens
CAKDPHYDYVGMINWELDYW

SEQ ID NO: 15332 - protein, 24 aa, Homo sapiens
CAKDFGGGGLSIFGVVIIGTFDYW

SEQ ID NO: 15333 - protein, 20 aa, Homo sapiens
CTITQDTAMVTYYYYGMDVW

SEQ ID NO: 15334 - protein, 32 aa, Homo sapiens
CATASVVRALSYGSGSYYNGENYYYYYGMDVW

SEQ ID NO: 15335 - protein, 27 aa, Homo sapiens
CARGQYSDSSGWYRLYGDYYYYGMDVW

SEQ ID NO: 15336 - protein, 22 aa, Homo sapiens
CTRGVVVTTSPTSYYYYGMDVW

SEQ ID NO: 15337 - protein, 19 aa, Homo sapiens
CASCSGGDCYNNYYYMDVW

SEQ ID NO: 15338 - protein, 18 aa, Homo sapiens
CAKGTYYDSSVPLFSDYW

SEQ ID NO: 15339 - protein, 17 aa, Homo sapiens
CARATLGRNWNGPLDYW

SEQ ID NO: 15340 - protein, 19 aa, Homo sapiens
CARRHQASSSWYEGAFDIW

SEQ ID NO: 15341 - protein, 18 aa, Homo sapiens
CARGRRLQLWLGSFFDSW

SEQ ID NO: 15342 - protein, 20 aa, Homo sapiens
CAKADVVVVTAIHPHAFDLW

SEQ ID NO: 15343 - protein, 19 aa, Homo sapiens
CARDIYNWNDGEGNWFDPW

SEQ ID NO: 15344 - protein, 18 aa, Homo sapiens
CARDPCTGYSCYSYFDDW

SEQ ID NO: 15345 - protein, 16 aa, Homo sapiens
CTRTPTQRTATHFDYW

SEQ ID NO: 15346 - protein, 17 aa, Homo sapiens
CVKDTTPIAPAGGFDFW

SEQ ID NO: 15347 - protein, 19 aa, Homo sapiens
CAGISSGWFGGSPNWFDPW

SEQ ID NO: 15348 - protein, 29 aa, Homo sapiens
CTTDLPSEHYDFWSGYWRDPAYYYGMDVW

SEQ ID NO: 15349 - protein, 17 aa, Homo sapiens
CAKGDRAVPPTSALDYW

SEQ ID NO: 15350 - protein, 13 aa, Homo sapiens
CARDTHYWYFDLW

SEQ ID NO: 15351 - protein, 27 aa, Homo sapiens
CARTPSYYDFWSGYSPRPSTLGAFDIW

SEQ ID NO: 15352 - protein, 16 aa, Homo sapiens
CAREGSDFNAVPFDYW

SEQ ID NO: 15353 - protein, 21 aa, Homo sapiens
CARAPEILGPRGVIPYAFDIW

SEQ ID NO: 15354 - protein, 22 aa, Homo sapiens
CAHRPAIYSSSWYPTAYWFDPW

SEQ ID NO: 15355 - protein, 23 aa, Homo sapiens
CARIEVDYDYVWGSYRLHSFDYW

SEQ ID NO: 15356 - protein, 25 aa, Homo sapiens
CARHPGIEYYDFWSGYSAENWFDPW

SEQ ID NO: 15357 - protein, 18 aa, Homo sapiens
CAKGPPIGEGYYYGMDVW

SEQ ID NO: 15358 - protein, 15 aa, Homo sapiens
CQICDFWSGYYSDYW

SEQ ID NO: 15359 - protein, 26 aa, Homo sapiens
CAKDALVTRLSYYDTLTGQEGWFDPW

SEQ ID NO: 15360 - protein, 18 aa, Homo sapiens
CARDMRVYGHYYYYMDVW

SEQ ID NO: 15361 - protein, 24 aa, Homo sapiens
CAKGLSPASMITFGGVIVYPLDYW

SEQ ID NO: 15362 - protein, 18 aa, Homo sapiens
CARALPDSSGWFDAFDIW

SEQ ID NO: 15363 - protein, 19 aa, Homo sapiens
CARSGGDTAMVIAYYFDYW

SEQ ID NO: 15364 - protein, 16 aa, Homo sapiens
CARDLDPHRAAYVDYW

SEQ ID NO: 15365 - protein, 18 aa, Homo sapiens
CAKDIRYFDWLPNELDYW

SEQ ID NO: 15366 - protein, 20 aa, Homo sapiens
CARVGITMVRGVIHNWFDPW

SEQ ID NO: 15367 - protein, 15 aa, Homo sapiens
CAKDLLGVGGSSDYW

SEQ ID NO: 15368 - protein, 22 aa, Homo sapiens
CARVPPYYYDSSGRFVSAFDIW

SEQ ID NO: 15369 - protein, 18 aa, Homo sapiens
CARDGSGYYDSSGYLDYW

SEQ ID NO: 15370 - protein, 21 aa, Homo sapiens
CARGVNVTWNPETAYFAMDVW

SEQ ID NO: 15371 - protein, 23 aa, Homo sapiens
CAREGRNYDILTGFQYYYGMDVW

SEQ ID NO: 15372 - protein, 23 aa, Homo sapiens
CARDPPAGNYWSGYYPTGYFENW

SEQ ID NO: 15373 - protein, 17 aa, Homo sapiens
CAKAPFPYDYGDAFDIW

SEQ ID NO: 15374 - protein, 18 aa, Homo sapiens
CARDPGIAVAGHHYFDYW

SEQ ID NO: 15375 - protein, 15 aa, Homo sapiens
CATWIQLWSSYFDYW

SEQ ID NO: 15376 - protein, 16 aa, Homo sapiens
CAKDSWRWGKRYFDLW

SEQ ID NO: 15377 - protein, 15 aa, Homo sapiens
CASGSSGYYPASDYW

SEQ ID NO: 15378 - protein, 22 aa, Homo sapiens
CAKDIFWGENSYGPYYYGMDVW

SEQ ID NO: 15379 - protein, 18 aa, Homo sapiens
CATPRHPYDFWSGSFDYW

SEQ ID NO: 15380 - protein, 14 aa, Homo sapiens
CARDPWLKWEPDYW

SEQ ID NO: 15381 - protein, 21 aa, Homo sapiens
CARDSYYGSGSYRRVGAFDIW

SEQ ID NO: 15382 - protein, 22 aa, Homo sapiens
CAREAAYQLISGSYYYYGMDVW

SEQ ID NO: 15383 - protein, 22 aa, Homo sapiens
CAKDHGIYDSSGYYSDDAFDIW

SEQ ID NO: 15384 - protein, 28 aa, Homo sapiens
CARVIPTYCSSTSCYYADHYYYYGMDVW

SEQ ID NO: 15385 - protein, 17 aa, Homo sapiens
CAKDIGRFTYGDYSDYW

SEQ ID NO: 15386 - protein, 16 aa, Homo sapiens
CATLPEVTALVIIDYW

SEQ ID NO: 15387 - protein, 13 aa, Homo sapiens
CAHRVPLRGWDYW

SEQ ID NO: 15388 - protein, 24 aa, Homo sapiens
CARASGKYYYDSSGYYHDDAFDIW

SEQ ID NO: 15389 - protein, 15 aa, Homo sapiens
CAINPTTGGELVDYW

SEQ ID NO: 15390 - protein, 23 aa, Homo sapiens
CAKEEGFYDSSGYYYPWGAFDIW

SEQ ID NO: 15391 - protein, 15 aa, Homo sapiens
CARDGTMVRGELDYW

SEQ ID NO: 15392 - protein, 17 aa, Homo sapiens
CAKDGKVFGYGDHFDYW

SEQ ID NO: 15393 - protein, 20 aa, Homo sapiens
CARGRTPRYSYGYDWYFDLW

SEQ ID NO: 15394 - protein, 22 aa, Homo sapiens
CARGRSYYYDSSGYYPPGFDYW

SEQ ID NO: 15395 - protein, 19 aa, Homo sapiens
CARDFLKWELLGQDYFDYW

SEQ ID NO: 15396 - protein, 19 aa, Homo sapiens
CARQPFFCDTNSCWLFDSW

SEQ ID NO: 15397 - protein, 17 aa, Homo sapiens
CARARGPYSSGFYFDHW

SEQ ID NO: 15398 - protein, 18 aa, Homo sapiens
CARDSSGYGSGWHYFDLW

SEQ ID NO: 15399 - protein, 17 aa, Homo sapiens
CARVGPFYGDYGWFDPW

SEQ ID NO: 15400 - protein, 15 aa, Homo sapiens
CARDSGGVVTSFEYW

SEQ ID NO: 15401 - protein, 17 aa, Homo sapiens
CARESLDTNYYDYFDPW

SEQ ID NO: 15402 - protein, 12 aa, Homo sapiens
CMQSVQSPPFTF

SEQ ID NO: 15403 - protein, 20 aa, Homo sapiens
CARGICSSASCVGVNWFDLW

SEQ ID NO: 15404 - protein, 14 aa, Homo sapiens
CTRVTPGEGQDDYW

SEQ ID NO: 15405 - protein, 19 aa, Homo sapiens
CAKDRVWGGTWPTGQFDSW

SEQ ID NO: 15406 - protein, 16 aa, Homo sapiens
CAKDLAYGGNPFFDNW

SEQ ID NO: 15407 - protein, 15 aa, Homo sapiens
CSGGSCYSIYYFDYW

SEQ ID NO: 15408 - protein, 19 aa, Homo sapiens
CARDALDSSGWYDWYFDLW

SEQ ID NO: 15409 - protein, 22 aa, Homo sapiens
CATTPYSYDNSGHYRESWFDSW

SEQ ID NO: 15410 - protein, 20 aa, Homo sapiens
CTRVRSGYGDYSVGYYFDYW

SEQ ID NO: 15411 - protein, 13 aa, Homo sapiens
CAQQHIARPFEYW

SEQ ID NO: 15412 - protein, 17 aa, Homo sapiens
CAKVQVRDIWSGYYDGW

SEQ ID NO: 15413 - protein, 17 aa, Homo sapiens
CARDIPFSMSEYYMDVW

SEQ ID NO: 15414 - protein, 20 aa, Homo sapiens
CARVRRIWSGPHPKNWFDPW

SEQ ID NO: 15415 - protein, 18 aa, Homo sapiens
CARDVPVAPSTEDAFDIW

SEQ ID NO: 15416 - protein, 14 aa, Homo sapiens
CARDLELSGAFDIW

SEQ ID NO: 15417 - protein, 21 aa, Homo sapiens
CTTDIYYDFWSGQPPSLFDYW

SEQ ID NO: 15418 - protein, 15 aa, Homo sapiens
CANLPSANYGAFDIW

SEQ ID NO: 15419 - protein, 17 aa, Homo sapiens
CARESTLSIAAAHFDPW

SEQ ID NO: 15420 - protein, 16 aa, Homo sapiens
CATGIGTGNFLGFDSW

SEQ ID NO: 15421 - protein, 15 aa, Homo sapiens
CYSTDSSANLGVGVF

SEQ ID NO: 15422 - protein, 16 aa, Homo sapiens
CANLGSGSYGAQIDYW

SEQ ID NO: 15423 - protein, 23 aa, Homo sapiens
CAKVTETYYDFWSGYYTGPFDYW

SEQ ID NO: 15424 - protein, 19 aa, Homo sapiens
CARFQSPAITVTAMLFDSW

SEQ ID NO: 15425 - protein, 30 aa, Homo sapiens
CARDAKYYDFWSGYARGSPQSNYYYYMDVW

SEQ ID NO: 15426 - protein, 19 aa, Homo sapiens
CARADYCGSGSFCNNFVYW

SEQ ID NO: 15427 - protein, 29 aa, Homo sapiens
CARVDGVPYDYYILTVLWFRPGIDYFDYW

SEQ ID NO: 15428 - protein, 23 aa, Homo sapiens
CARDHNTYYDFWSGYYEYYFDYW

SEQ ID NO: 15429 - protein, 14 aa, Homo sapiens
CAKSERGWGAFEYW

SEQ ID NO: 15430 - protein, 15 aa, Homo sapiens
CAKGLLIHYGYFDYW

SEQ ID NO: 15431 - protein, 20 aa, Homo sapiens
CAKDMVYDSSGYYKNGFDYW

SEQ ID NO: 15432 - protein, 29 aa, Homo sapiens
CALPISAVYYCARWGVLVGSTWRDAFDIW

SEQ ID NO: 15433 - protein, 21 aa, Homo sapiens
CARTVKMLLWRTAYYYYIDVW

SEQ ID NO: 15434 - protein, 21 aa, Homo sapiens
CARGRVLRYFDYYYYYYMDVW

SEQ ID NO: 15435 - protein, 20 aa, Homo sapiens
CAKEGDYYDSGPFAPHFDHW

SEQ ID NO: 15436 - protein, 14 aa, Homo sapiens
CTRASGGHSYGDYW

SEQ ID NO: 15437 - protein, 16 aa, Homo sapiens
CAKAPQWLGVWYFDLW

SEQ ID NO: 15438 - protein, 18 aa, Homo sapiens
CARDFALEGPTSDAFDLW

SEQ ID NO: 15439 - protein, 14 aa, Homo sapiens
CACIAVAGMGIDYW

SEQ ID NO: 15440 - protein, 14 aa, Homo sapiens
CARVLPYYDQYDYW

SEQ ID NO: 15441 - protein, 17 aa, Homo sapiens
CARDSAIVQAADGMDVW

SEQ ID NO: 15442 - protein, 22 aa, Homo sapiens
CAKDLDYYESSEYYPIDAFEMW

SEQ ID NO: 15443 - protein, 14 aa, Homo sapiens
CARVMEQLVLFDYW

SEQ ID NO: 15444 - protein, 23 aa, Homo sapiens
CARQYYDFWSAYSHYYYYYMDVW

SEQ ID NO: 15445 - protein, 23 aa, Homo sapiens
CAKDPRTAGFLEWLLSPTNFDYW

SEQ ID NO: 15446 - protein, 17 aa, Homo sapiens
CAKGRVVIIAHYYMDVW

SEQ ID NO: 15447 - protein, 16 aa, Homo sapiens
CATSVEVTGPDAFDVW

SEQ ID NO: 15448 - protein, 15 aa, Homo sapiens
CARHIAARLVWFDPW

SEQ ID NO: 15449 - protein, 23 aa, Homo sapiens
CAKGQVETPIVDRLDYYYGMDVW

SEQ ID NO: 15450 - protein, 18 aa, Homo sapiens
CARDIGSQEVVVINTDYW

SEQ ID NO: 15451 - protein, 16 aa, Homo sapiens
CARKYCSGGSCYFDYW

SEQ ID NO: 15452 - protein, 19 aa, Homo sapiens
CARYCSGASCSGANWFDPW

SEQ ID NO: 15453 - protein, 18 aa, Homo sapiens
CTRGPRYDYVWGRYFDYW

SEQ ID NO: 15454 - protein, 30 aa, Homo sapiens
CALPILRAEDTAVYYCARDSGRPQSDFEYW

SEQ ID NO: 15455 - protein, 21 aa, Homo sapiens
CARLVATGVVVITTPYYFDYW

SEQ ID NO: 15456 - protein, 17 aa, Homo sapiens
CARFVFVSSGSTRFDLW

SEQ ID NO: 15457 - protein, 14 aa, Homo sapiens
CAKDINSNYPKDYW

SEQ ID NO: 15458 - protein, 23 aa, Homo sapiens
CAHRRRPPNLVEGSLRGIWFDPW

SEQ ID NO: 15459 - protein, 17 aa, Homo sapiens
CARVRSSWYMGEGFDPW

SEQ ID NO: 15460 - protein, 17 aa, Homo sapiens
CAKFPEAVAGTAPRDYW

SEQ ID NO: 15461 - protein, 18 aa, Homo sapiens
CARLSVTKISYYYYMDVW

SEQ ID NO: 15462 - protein, 16 aa, Homo sapiens
CAKYPSGDYGDLSDYW

SEQ ID NO: 15463 - protein, 17 aa, Homo sapiens
CARHYTSDFWNDGLDVW

SEQ ID NO: 15464 - protein, 21 aa, Homo sapiens
CARHGLASIWSGRHPRTLDYW

SEQ ID NO: 15465 - protein, 18 aa, Homo sapiens
CAALPPPWELAPTFFDYW

SEQ ID NO: 15466 - protein, 19 aa, Homo sapiens
CARERIQLGFLGPDAFDIW

SEQ ID NO: 15467 - protein, 13 aa, Homo sapiens
CARHENTDWFDPW

SEQ ID NO: 15468 - protein, 21 aa, Homo sapiens
CARDPTVSPYDYGGEGAIDYW

SEQ ID NO: 15469 - protein, 24 aa, Homo sapiens
CAKNQGEGHCPSGTCYPENGFDVW

SEQ ID NO: 15470 - protein, 22 aa, Homo sapiens
CTTGFNVVGDDAPRDRLYKDVW

SEQ ID NO: 15471 - protein, 18 aa, Homo sapiens
CATGVGIAVAGTDYFDYW

SEQ ID NO: 15472 - protein, 24 aa, Homo sapiens
CARSATDGALLYYYGSGSYWFDPW

SEQ ID NO: 15473 - protein, 19 aa, Homo sapiens
CAKISTSDYYDSSGYHDYW

SEQ ID NO: 15474 - protein, 15 aa, Homo sapiens
CAHRGTAALIGFDYW

SEQ ID NO: 15475 - protein, 20 aa, Homo sapiens
CARGSLFPYSSSSGGDLDYW

SEQ ID NO: 15476 - protein, 19 aa, Homo sapiens
CARGTGSQIVVTLDAFDIW

SEQ ID NO: 15477 - protein, 21 aa, Homo sapiens
CARIGGDYYDSSGYEEDFDYW

SEQ ID NO: 15478 - protein, 18 aa, Homo sapiens
CARNGDISWSPLYYFDYW

SEQ ID NO: 15479 - protein, 24 aa, Homo sapiens
CARGPVYYNILAGYYNSPDYFDYW

SEQ ID NO: 15480 - protein, 15 aa, Homo sapiens
CASSGSYYDTEADYW

SEQ ID NO: 15481 - protein, 15 aa, Homo sapiens
CANLPSRDGYNGDYW

SEQ ID NO: 15482 - protein, 17 aa, Homo sapiens
CARGVVCGGDCYFFDYW

SEQ ID NO: 15483 - protein, 17 aa, Homo sapiens
CAKAPTEEVPSPWVDYW

SEQ ID NO: 15484 - protein, 19 aa, Homo sapiens
CAHGFYCGGDCSIVGFDYW

SEQ ID NO: 15485 - protein, 18 aa, Homo sapiens
CASGYYYDSSAYGSGDYW

SEQ ID NO: 15486 - protein, 19 aa, Homo sapiens
CAKSSVVTAILRDVYFDYW

SEQ ID NO: 15487 - protein, 19 aa, Homo sapiens
CARDRRPTPNHYYYGMDVW

SEQ ID NO: 15488 - protein, 24 aa, Homo sapiens
CAKDANSPGFDWLIPRNLYYFDYW

SEQ ID NO: 15489 - protein, 15 aa, Homo sapiens
CARVEEGVATDLDYW

SEQ ID NO: 15490 - protein, 14 aa, Homo sapiens
CATHSYNLGTTDYW

SEQ ID NO: 15491 - protein, 20 aa, Homo sapiens
CARDLRDGYTRTTHHAFDIW

SEQ ID NO: 15492 - protein, 25 aa, Homo sapiens
CAREPLIYDTQYADTSDYLEAFDVW

SEQ ID NO: 15493 - protein, 21 aa, Homo sapiens
CVTETAPYCSSTSCYTAFDYW

SEQ ID NO: 15494 - protein, 20 aa, Homo sapiens
CAKDYFISGSYYSPWYFDYW

SEQ ID NO: 15495 - protein, 22 aa, Homo sapiens
CARLKRITIFGVSVGAWYMDVW

SEQ ID NO: 15496 - protein, 22 aa, Homo sapiens
CAKAYYYDSSGYLVLGDAFDIW

SEQ ID NO: 15497 - protein, 18 aa, Homo sapiens
CTTDYFYDRTTYYAFDYW

SEQ ID NO: 15498 - protein, 22 aa, Homo sapiens
CAKVGGYSYGYEGLGPSSFDPW

SEQ ID NO: 15499 - protein, 25 aa, Homo sapiens
CARDTAYCSGGSCYSGDYYYGMDVW

SEQ ID NO: 15500 - protein, 19 aa, Homo sapiens
CARDADGYCSSNSCYLDYW

SEQ ID NO: 15501 - protein, 16 aa, Homo sapiens
CARCRFWTGYNWFDPW

SEQ ID NO: 15502 - protein, 22 aa, Homo sapiens
CARHHARAYYDFWSGYYRFDPW

SEQ ID NO: 15503 - protein, 18 aa, Homo sapiens
CARLQFGPVAGTEWFDPW

SEQ ID NO: 15504 - protein, 16 aa, Homo sapiens
CARATLGGNYYYMDVW

SEQ ID NO: 15505 - protein, 19 aa, Homo sapiens
CARGARLGLFDSVGHFDYW

SEQ ID NO: 15506 - protein, 21 aa, Homo sapiens
CAKSSSSVWYPTRYYYYMDVW

SEQ ID NO: 15507 - protein, 16 aa, Homo sapiens
CARDLSRDWNQAFDPW

SEQ ID NO: 15508 - protein, 15 aa, Homo sapiens
CAKAPTVMDWYFDLW

SEQ ID NO: 15509 - protein, 25 aa, Homo sapiens
CAREISIVATIFPSYGDYQYYFDYW

SEQ ID NO: 15510 - protein, 18 aa, Homo sapiens
CAKDGNDYGDYKGWFDPW

SEQ ID NO: 15511 - protein, 16 aa, Homo sapiens
CAEQRITIFGVEIDYW

SEQ ID NO: 15512 - protein, 23 aa, Homo sapiens
CAKEKEGSGYYQLYYYYYGMDVW

SEQ ID NO: 15513 - protein, 22 aa, Homo sapiens
CAKDSHFDWLLSLSPSYYFDYW

SEQ ID NO: 15514 - protein, 22 aa, Homo sapiens
CARGVRIAVTSTQYYYYGMDVW

SEQ ID NO: 15515 - protein, 19 aa, Homo sapiens
CARRAITLFGVGPYYFDNW

SEQ ID NO: 15516 - protein, 17 aa, Homo sapiens
CARDRPDDYVWGGFDYW

SEQ ID NO: 15517 - protein, 22 aa, Homo sapiens
CATAPAKEQWLTPYYYYDMDVW

SEQ ID NO: 15518 - protein, 22 aa, Homo sapiens
CARGLYYYDSSGYRRFSPFDYW

SEQ ID NO: 15519 - protein, 18 aa, Homo sapiens
CARRNILTGYSPDVFDYW

SEQ ID NO: 15520 - protein, 14 aa, Homo sapiens
CARDEQWLVQGDYW

SEQ ID NO: 15521 - protein, 16 aa, Homo sapiens
CVKDIVPGISNAMDVW

SEQ ID NO: 15522 - protein, 15 aa, Homo sapiens
CQSYDNSPSGSEFVF

SEQ ID NO: 15523 - protein, 20 aa, Homo sapiens
CARSPTTVLAVAATGWFDPW

SEQ ID NO: 15524 - protein, 15 aa, Homo sapiens
CANGASVAGKGGDYW

SEQ ID NO: 15525 - protein, 19 aa, Homo sapiens
CATFSWIQLWLRGGYFDYW

SEQ ID NO: 15526 - protein, 14 aa, Homo sapiens
CAAWDVSTNGYSVF

SEQ ID NO: 15527 - protein, 17 aa, Homo sapiens
CAREDDSSGRTDAFDIW

SEQ ID NO: 15528 - protein, 19 aa, Homo sapiens
CASWNYDLTGDYYYYMDVW

SEQ ID NO: 15529 - protein, 19 aa, Homo sapiens
CAKVVGGIAVAGWYYFDYW

SEQ ID NO: 15530 - protein, 18 aa, Homo sapiens
CARESIAADPKWPYFDYW

SEQ ID NO: 15531 - protein, 20 aa, Homo sapiens
CARRDDFWSGYSYYYGMDVW

SEQ ID NO: 15532 - protein, 17 aa, Homo sapiens
CAREPFTQWQGETIDYW

SEQ ID NO: 15533 - protein, 14 aa, Homo sapiens
CQQYYTTPQDSGTF

SEQ ID NO: 15534 - protein, 20 aa, Homo sapiens
CAKDMERWLQWREDDAFDIW

SEQ ID NO: 15535 - protein, 23 aa, Homo sapiens
CARDMVDYYDSSGYYGVHAFDIW

SEQ ID NO: 15536 - protein, 24 aa, Homo sapiens
CARGANDFWSGYYTMRYYYYMDVW

SEQ ID NO: 15537 - protein, 19 aa, Homo sapiens
CAMLPYHYSSGWYVQLDYW

SEQ ID NO: 15538 - protein, 22 aa, Homo sapiens
CARDERGSATSGYYSPYYFDPW

SEQ ID NO: 15539 - protein, 16 aa, Homo sapiens
CAILEMATIPDAFDIW

SEQ ID NO: 15540 - protein, 19 aa, Homo sapiens
CARVRAVAGSLLHDAFDIW

SEQ ID NO: 15541 - protein, 18 aa, Homo sapiens
CARDIDTDRWESIGADYW

SEQ ID NO: 15542 - protein, 20 aa, Homo sapiens
CARDGCAQPCGQYYWYFHLW

SEQ ID NO: 15543 - protein, 15 aa, Homo sapiens
CAKFSGYHMPSVDYW

SEQ ID NO: 15544 - protein, 21 aa, Homo sapiens
CARDFSMGSLATVVTLGVDYW

SEQ ID NO: 15545 - protein, 19 aa, Homo sapiens
CATAHFRFGELLYTPFDYW

SEQ ID NO: 15546 - protein, 18 aa, Homo sapiens
CARDGGTTGWPDWYFDLW

SEQ ID NO: 15547 - protein, 18 aa, Homo sapiens
CANPDPYYDDTNEGFDPW

SEQ ID NO: 15548 - protein, 16 aa, Homo sapiens
CARETIVVDDSRFDYW

SEQ ID NO: 15549 - protein, 21 aa, Homo sapiens
CARHDITMIVVVTYPYAFDIW

SEQ ID NO: 15550 - protein, 15 aa, Homo sapiens
CAHMGITMVRGIDYW

SEQ ID NO: 15551 - protein, 15 aa, Homo sapiens
CALTPGYSSVPFDYW

SEQ ID NO: 15552 - protein, 16 aa, Homo sapiens
CARGEGYDVLTGFDYW

SEQ ID NO: 15553 - protein, 18 aa, Homo sapiens
CARQDYFQRRGSAAFDVW

SEQ ID NO: 15554 - protein, 14 aa, Homo sapiens
CAKVWGRYDTGDYW

SEQ ID NO: 15555 - protein, 15 aa, Homo sapiens
CARSSLLRTRKFDHW

SEQ ID NO: 15556 - protein, 22 aa, Homo sapiens
CARGSLTYYDFWSGQRDGMDVW

SEQ ID NO: 15557 - protein, 15 aa, Homo sapiens
CARGNGEAYGSGDYW

SEQ ID NO: 15558 - protein, 22 aa, Homo sapiens
CARSLLGSCSGGRCFGYYFDYW

SEQ ID NO: 15559 - protein, 20 aa, Homo sapiens
CARSRITIFPYTSLDAFDIW

SEQ ID NO: 15560 - protein, 24 aa, Homo sapiens
CASRSTYYDFWSGYLEGGNWFDPW

SEQ ID NO: 15561 - protein, 24 aa, Homo sapiens
CARHLEGIITMIVVVIKEGAFDIW

SEQ ID NO: 15562 - protein, 19 aa, Homo sapiens
CATARYCSGGSCQGSFDYW

SEQ ID NO: 15563 - protein, 16 aa, Homo sapiens
CARGDYVGQYNWFDPW

SEQ ID NO: 15564 - protein, 26 aa, Homo sapiens
CARGGYYDSSGYFIRKLYYYYYMDVW

SEQ ID NO: 15565 - protein, 16 aa, Homo sapiens
CARRVVDTSSDYFDYW

SEQ ID NO: 15566 - protein, 15 aa, Homo sapiens
CARQLERAHDAFDIW

SEQ ID NO: 15567 - protein, 22 aa, Homo sapiens
CAREQYYYDSSGFMGHDAFDIW

SEQ ID NO: 15568 - protein, 25 aa, Homo sapiens
CARLQAYDPFITIFGVVPLSPFDYW

SEQ ID NO: 15569 - protein, 13 aa, Homo sapiens
CAKDQAVVALDYW

SEQ ID NO: 15570 - protein, 23 aa, Homo sapiens
CARDEAALFTIFSVVESEFFDYW

SEQ ID NO: 15571 - protein, 18 aa, Homo sapiens
CARHCSSPRCPKGGFDIW

SEQ ID NO: 15572 - protein, 21 aa, Homo sapiens
CARTPSDGRFLEWNGCYFDYW

SEQ ID NO: 15573 - protein, 16 aa, Homo sapiens
CAKLPEPGGDYAFDYW

SEQ ID NO: 15574 - protein, 16 aa, Homo sapiens
CATTYYYDSSGVLDYW

SEQ ID NO: 15575 - protein, 19 aa, Homo sapiens
CAKVSIAVAGPTQDAFDIW

SEQ ID NO: 15576 - protein, 23 aa, Homo sapiens
CAKDLLPFIAAAGTGGGNWFDPW

SEQ ID NO: 15577 - protein, 24 aa, Homo sapiens
CARDSQLEPLITMIATPYYYMDVW

SEQ ID NO: 15578 - protein, 23 aa, Homo sapiens
CARDVRLGWPKVYYNYYYALDVW

SEQ ID NO: 15579 - protein, 20 aa, Homo sapiens
CAREGRALGGVGAGLVFDYW

SEQ ID NO: 15580 - protein, 24 aa, Homo sapiens
CTTGELRYFDWLFNTDIYDAFDIW

SEQ ID NO: 15581 - protein, 16 aa, Homo sapiens
CAKIGGGTEPRGIDYW

SEQ ID NO: 15582 - protein, 14 aa, Homo sapiens
CTREGSSGSYSPYW

SEQ ID NO: 15583 - protein, 20 aa, Homo sapiens
CAKGLDDHSSGWSGYYMDVW

SEQ ID NO: 15584 - protein, 15 aa, Homo sapiens
CAKSAAMVTGWFDPW

SEQ ID NO: 15585 - protein, 18 aa, Homo sapiens
CAREITGTTVLRGWFDPW

SEQ ID NO: 15586 - protein, 16 aa, Homo sapiens
CAKLGVERATMGFDYW

SEQ ID NO: 15587 - protein, 17 aa, Homo sapiens
CARAGFSSARWEPADYW

SEQ ID NO: 15588 - protein, 18 aa, Homo sapiens
CATDWALTTVTVGGFGYW

SEQ ID NO: 15589 - protein, 18 aa, Homo sapiens
CARDQEGRDYGDDPFDMW

SEQ ID NO: 15590 - protein, 15 aa, Homo sapiens
CAKGSDDYGDYVYYW

SEQ ID NO: 15591 - protein, 20 aa, Homo sapiens
CAKEGIVHTAMVRQYYFDYW

SEQ ID NO: 15592 - protein, 18 aa, Homo sapiens
CAKGGGKGEILSVNFDCW

SEQ ID NO: 15593 - protein, 17 aa, Homo sapiens
CTTLGTVEMATTDFDYW

SEQ ID NO: 15594 - protein, 15 aa, Homo sapiens
CARDPDTTMVNLDYW

SEQ ID NO: 15595 - protein, 15 aa, Homo sapiens
CARYSSGWFDAFDIW

SEQ ID NO: 15596 - protein, 17 aa, Homo sapiens
CVRVRRTSSQVAWFDPW

SEQ ID NO: 15597 - protein, 23 aa, Homo sapiens
CATAPVVVVAANHYYYYYGMDVW

SEQ ID NO: 15598 - protein, 13 aa, Homo sapiens
CAKDPSGWYGSYW

SEQ ID NO: 15599 - protein, 20 aa, Homo sapiens
CARAVTYYYDSSGNDAFDIW

SEQ ID NO: 15600 - protein, 26 aa, Homo sapiens
CARAGWRRCSSTSCLTDYYYYYMDVW

SEQ ID NO: 15601 - protein, 14 aa, Homo sapiens
CSRSTGYYGAVDYW

SEQ ID NO: 15602 - protein, 19 aa, Homo sapiens
CVKDIGGRGYSYGSGFDPW

SEQ ID NO: 15603 - protein, 16 aa, Homo sapiens
CARGPMIDWLFHFDYW

SEQ ID NO: 15604 - protein, 25 aa, Homo sapiens
CATSLIYYDILTGKITYYYYYMDVW

SEQ ID NO: 15605 - protein, 17 aa, Homo sapiens
CARASSGWYETNYFDYW

SEQ ID NO: 15606 - protein, 16 aa, Homo sapiens
CAREIAAADSNWFDPW

SEQ ID NO: 15607 - protein, 18 aa, Homo sapiens
CATTLRGHYYATQAFDIW

SEQ ID NO: 15608 - protein, 20 aa, Homo sapiens
CAKDPLKYDSNWYPNWFGPW

SEQ ID NO: 15609 - protein, 18 aa, Homo sapiens
CAKDGWSSWYLAEEFDYW

SEQ ID NO: 15610 - protein, 23 aa, Homo sapiens
CARDLYYYDSSGYQTTHWYFDLW

SEQ ID NO: 15611 - protein, 17 aa, Homo sapiens
CARDPNRDSSGWAFDIW

SEQ ID NO: 15612 - protein, 24 aa, Homo sapiens
CAREGNLVNWNFLGGYYYYYMDVW

SEQ ID NO: 15613 - protein, 21 aa, Homo sapiens
CAKDGGYCTGGVCYREYFDYW

SEQ ID NO: 15614 - protein, 15 aa, Homo sapiens
CARGDLSSGWKYDYW

SEQ ID NO: 15615 - protein, 18 aa, Homo sapiens
CAKYSSRQQLPNYYFDYW

SEQ ID NO: 15616 - protein, 20 aa, Homo sapiens
CARGPIIAAAGTPYNWFDPW

SEQ ID NO: 15617 - protein, 17 aa, Homo sapiens
CARHIGDETLTEYFDYW

SEQ ID NO: 15618 - protein, 22 aa, Homo sapiens
CARLYDSSGYYYLYYYYYMDVW

SEQ ID NO: 15619 - protein, 22 aa, Homo sapiens
CAKDLNKQWLGNSYYYYGMDVW

SEQ ID NO: 15620 - protein, 36 aa, Homo sapiens
CTAYLQWSSLKASDTAMYYCARLALCGGDCHYFDYW

SEQ ID NO: 15621 - protein, 29 aa, Homo sapiens
CARDQRYYDILTGYFPHPSYYYYYGMDVW

SEQ ID NO: 15622 - protein, 22 aa, Homo sapiens
CASEEGRITIFGVVITDAFDIW

SEQ ID NO: 15623 - protein, 21 aa, Homo sapiens
CAKDPGGHDSSASYGTGFLYW

SEQ ID NO: 15624 - protein, 22 aa, Homo sapiens
CAKVSGSYFSQHYYIPHWFDLW

SEQ ID NO: 15625 - protein, 18 aa, Homo sapiens
CAKDHKRGGSYSYVFDYW

SEQ ID NO: 15626 - protein, 19 aa, Homo sapiens
CAKEGGVDVVQGRISFDHW

SEQ ID NO: 15627 - protein, 22 aa, Homo sapiens
CATDRVGEIVMVEAVHNWFNPW

SEQ ID NO: 15628 - protein, 19 aa, Homo sapiens
CARPGGDYYDSSDGRFDPW

SEQ ID NO: 15629 - protein, 18 aa, Homo sapiens
CARGGMATIFIGNWFDPW

SEQ ID NO: 15630 - protein, 21 aa, Homo sapiens
CARPLGDVYNWNYLGNAFDIW

SEQ ID NO: 15631 - protein, 17 aa, Homo sapiens
CARGVVDPGPSYYFDYW

SEQ ID NO: 15632 - protein, 23 aa, Homo sapiens
CAREAKEQQLFDRLHTNNWFDAW

SEQ ID NO: 15633 - protein, 18 aa, Homo sapiens
CASNLYYYGSGSYHLDYW

SEQ ID NO: 15634 - protein, 20 aa, Homo sapiens
CAREYSSSWLDGAVGAFDYW

SEQ ID NO: 15635 - protein, 21 aa, Homo sapiens
CARDSLTQQLVVAVDNAFDIW

SEQ ID NO: 15636 - protein, 22 aa, Homo sapiens
CAREIRAVAGSGYYYYYGMDVW

SEQ ID NO: 15637 - protein, 22 aa, Homo sapiens
CARGPNLTSWPRLYYYYGMDVW

SEQ ID NO: 15638 - protein, 14 aa, Homo sapiens
CAREDTVSDWFDPW

SEQ ID NO: 15639 - protein, 13 aa, Homo sapiens
CAPAATEGWFDPW

SEQ ID NO: 15640 - protein, 16 aa, Homo sapiens
CAKDIYGGRAAAGDYW

SEQ ID NO: 15641 - protein, 20 aa, Homo sapiens
CAPGRFSAVGGPDRGWFDPW

SEQ ID NO: 15642 - protein, 23 aa, Homo sapiens
CARDPAPYYYDSSGYYGGWFDPW

SEQ ID NO: 15643 - protein, 20 aa, Homo sapiens
CAGRITMIVVVIRGIAFDIW

SEQ ID NO: 15644 - protein, 15 aa, Homo sapiens
CATWTVTASEILDYW

SEQ ID NO: 15645 - protein, 17 aa, Homo sapiens
CAKGDRGYDYGDHGDYW

SEQ ID NO: 15646 - protein, 16 aa, Homo sapiens
CAHRQGGQRAAGFDSW

SEQ ID NO: 15647 - protein, 15 aa, Homo sapiens
CAREYSGYDLRPDYW

SEQ ID NO: 15648 - protein, 16 aa, Homo sapiens
CAKVPYSSSWYGNDYW

SEQ ID NO: 15649 - protein, 15 aa, Homo sapiens
CATPAGGPNANFDYW

SEQ ID NO: 15650 - protein, 20 aa, Homo sapiens
CAKDLPPGDNYYYYYGMDVW

SEQ ID NO: 15651 - protein, 19 aa, Homo sapiens
CARDGEGAVVVVAAYFDYW

SEQ ID NO: 15652 - protein, 15 aa, Homo sapiens
CARRSTETEWYFDLW

SEQ ID NO: 15653 - protein, 13 aa, Homo sapiens
CQSADISAFHVVF

SEQ ID NO: 15654 - protein, 15 aa, Homo sapiens
CAKGLLWFGEYYDYW

SEQ ID NO: 15655 - protein, 22 aa, Homo sapiens
CARVAVYDFWSGYYHGYGMDVW

SEQ ID NO: 15656 - protein, 18 aa, Homo sapiens
CAKAFRIVVVMEYYFDYW

SEQ ID NO: 15657 - protein, 18 aa, Homo sapiens
CARDSPLRYFDWIRFDYW

SEQ ID NO: 15658 - protein, 24 aa, Homo sapiens
CAREFIGPYCSGGSCHPYNWFDPW

SEQ ID NO: 15659 - protein, 24 aa, Homo sapiens
CARDPYPLGIAAADGVYYYGMDVW

SEQ ID NO: 15660 - protein, 21 aa, Homo sapiens
CTRDTHYHDNRGYRNYAFDIW

SEQ ID NO: 15661 - protein, 20 aa, Homo sapiens
CARVWHIVVVTATDDAFDIW

SEQ ID NO: 15662 - protein, 18 aa, Homo sapiens
CARHLDSSGYTPPIFDYW

SEQ ID NO: 15663 - protein, 15 aa, Homo sapiens
CAHQSGYAANWFDPW

SEQ ID NO: 15664 - protein, 25 aa, Homo sapiens
CARDREDPNYDYVWGSYRYGAFDIW

SEQ ID NO: 15665 - protein, 19 aa, Homo sapiens
CARVKRDNYYYYYYYMDVW

SEQ ID NO: 15666 - protein, 22 aa, Homo sapiens
CAKIGEYYDILTGYYRSLNDYW

SEQ ID NO: 15667 - protein, 16 aa, Homo sapiens
CARITEGDYDDWFDPW

SEQ ID NO: 15668 - protein, 17 aa, Homo sapiens
CAREKGRTQRSDFMDVW

SEQ ID NO: 15669 - protein, 25 aa, Homo sapiens
CARGGQYITIFSWSELVTAGWFDPW

SEQ ID NO: 15670 - protein, 17 aa, Homo sapiens
CARHTTVVTPRNAFDIW

SEQ ID NO: 15671 - protein, 20 aa, Homo sapiens
CARGGYITMVRGVSTNFDYW

SEQ ID NO: 15672 - protein, 19 aa, Homo sapiens
CAKDRGIAVAGTGGHFDYW

SEQ ID NO: 15673 - protein, 20 aa, Homo sapiens
CAKDLPPGYSSSWSYSFDYW

SEQ ID NO: 15674 - protein, 14 aa, Homo sapiens
CARGRLYNWNYDYW

SEQ ID NO: 15675 - protein, 21 aa, Homo sapiens
CAKDMNGMDDYGDYVGAFDIW

SEQ ID NO: 15676 - protein, 11 aa, Homo sapiens
CQSYDTSFAVF

SEQ ID NO: 15677 - protein, 19 aa, Homo sapiens
CAKVSDYYGSGSYPYFDYW

SEQ ID NO: 15678 - protein, 22 aa, Homo sapiens
CVKPHYVTHGDFYAGKYFFEYW

SEQ ID NO: 15679 - protein, 25 aa, Homo sapiens
CAHRHRQHGYYDFWSGYYPTLFDYW

SEQ ID NO: 15680 - protein, 18 aa, Homo sapiens
CTRDRPDMIVVVTTSDYW

SEQ ID NO: 15681 - protein, 12 aa, Homo sapiens
CLQDYTPPSLTF

SEQ ID NO: 15682 - protein, 22 aa, Homo sapiens
CARDPTSTVTTSYYYYYGMDVW

SEQ ID NO: 15683 - protein, 20 aa, Homo sapiens
CARSGASRDGYNRGDAFDIW

SEQ ID NO: 15684 - protein, 13 aa, Homo sapiens
CARWCFDWYFDLW

SEQ ID NO: 15685 - protein, 19 aa, Homo sapiens
CATITGDSSGYYWYGMDVW

SEQ ID NO: 15686 - protein, 20 aa, Homo sapiens
CAKVGYQPLLSPEPDAFDIW

SEQ ID NO: 15687 - protein, 16 aa, Homo sapiens
CAKFLGGSYYSSLDYW

SEQ ID NO: 15688 - protein, 18 aa, Homo sapiens
CTQLVDGYYSGTDAFEIW

SEQ ID NO: 15689 - protein, 16 aa, Homo sapiens
CTKETYDSRPGAFDVW

SEQ ID NO: 15690 - protein, 18 aa, Homo sapiens
CATSMYCSGDCYKPNDYW

SEQ ID NO: 15691 - protein, 16 aa, Homo sapiens
CAREGGSYYPDWFDPW

SEQ ID NO: 15692 - protein, 14 aa, Homo sapiens
CAYAGGPHYYMDVW

SEQ ID NO: 15693 - protein, 17 aa, Homo sapiens
CARDLYTYSSSWTIDYW

SEQ ID NO: 15694 - protein, 18 aa, Homo sapiens
CARPPHGYSSGWYVRDYW

SEQ ID NO: 15695 - protein, 17 aa, Homo sapiens
CAKKMNPSSPDLYFDYW

SEQ ID NO: 15696 - protein, 16 aa, Homo sapiens
CARSLAAAGHWYFDLW

SEQ ID NO: 15697 - protein, 15 aa, Homo sapiens
CARDQEDGYKPFDYW

SEQ ID NO: 15698 - protein, 17 aa, Homo sapiens
CARDSPLGYSSSWSDYW

SEQ ID NO: 15699 - protein, 24 aa, Homo sapiens
CARFRGSYYDSSGYYSLRTYFDSW

SEQ ID NO: 15700 - protein, 19 aa, Homo sapiens
CARIYSSGYYYEPYYFDYW

SEQ ID NO: 15701 - protein, 14 aa, Homo sapiens
CARRGVGTDGFDIW

SEQ ID NO: 15702 - protein, 15 aa, Homo sapiens
CARYDGNSDDTFDYW

SEQ ID NO: 15703 - protein, 14 aa, Homo sapiens
CAKAPSYGDYDDNW

SEQ ID NO: 15704 - protein, 18 aa, Homo sapiens
CARDPGTIFGGNWYFDLW

SEQ ID NO: 15705 - protein, 17 aa, Homo sapiens
CAKDQESIFGDFPFDYW

SEQ ID NO: 15706 - protein, 16 aa, Homo sapiens
CAMGPIVEGTYYFDYW

SEQ ID NO: 15707 - protein, 14 aa, Homo sapiens
CQSADSTDTSDWVF

SEQ ID NO: 15708 - protein, 17 aa, Homo sapiens
CARHQPWYSSSSDFDYW

SEQ ID NO: 15709 - protein, 19 aa, Homo sapiens
CARDLSPTVTYDHNAFDIW

SEQ ID NO: 15710 - protein, 16 aa, Homo sapiens
CARGFFGIAARPVDYW

SEQ ID NO: 15711 - protein, 16 aa, Homo sapiens
CTTAMTGTWPADFDHW

SEQ ID NO: 15712 - protein, 20 aa, Homo sapiens
CARDQDWDIWTGFKNWLDPW

SEQ ID NO: 15713 - protein, 15 aa, Homo sapiens
CAAAGRGVASPLDYW

SEQ ID NO: 15714 - protein, 15 aa, Homo sapiens
CARGPGYTTPAMDVW

SEQ ID NO: 15715 - protein, 19 aa, Homo sapiens
CARPSSGGGVVTVEAFDIW

SEQ ID NO: 15716 - protein, 19 aa, Homo sapiens
CTRHIGPLMDAYYYGMDVW

SEQ ID NO: 15717 - protein, 19 aa, Homo sapiens
CARTHYDILTGYSWEYDYW

SEQ ID NO: 15718 - protein, 24 aa, Homo sapiens
CARGPDQYYDILTGYSLGGRFDPW

SEQ ID NO: 15719 - protein, 20 aa, Homo sapiens
CATGRQYCSSTSCPDWFDPW

SEQ ID NO: 15720 - protein, 19 aa, Homo sapiens
CTREIYDYVWGSYRPTDYW

SEQ ID NO: 15721 - protein, 16 aa, Homo sapiens
CAREDHISGYYYVDCW

SEQ ID NO: 15722 - protein, 18 aa, Homo sapiens
CAKLPDPLDTPRRAFDIW

SEQ ID NO: 15723 - protein, 16 aa, Homo sapiens
CAKADINTETTPFDYW

SEQ ID NO: 15724 - protein, 18 aa, Homo sapiens
CAKDIVAWGGDYVALDVW

SEQ ID NO: 15725 - protein, 15 aa, Homo sapiens
CARKVFEYGKYFDHW

SEQ ID NO: 15726 - protein, 17 aa, Homo sapiens
CASALFPKVQMAPFDYW

SEQ ID NO: 15727 - protein, 20 aa, Homo sapiens
CARDNRLGQWPYYYYYMDVW

SEQ ID NO: 15728 - protein, 23 aa, Homo sapiens
CASFADPDYYDSSGYSRDAFDIW

SEQ ID NO: 15729 - protein, 16 aa, Homo sapiens
CARVGGYSGSITFDIW

SEQ ID NO: 15730 - protein, 28 aa, Homo sapiens
CARGDGYSGYDRLVLQLGPYYYYGMDVW

SEQ ID NO: 15731 - protein, 20 aa, Homo sapiens
CASNRGSGVAVAGTSPFDYW

SEQ ID NO: 15732 - protein, 18 aa, Homo sapiens
CARAESPWLAHYWYFDLW

SEQ ID NO: 15733 - protein, 23 aa, Homo sapiens
CAKVGRGYCSSTSCYTPPSFDYW

SEQ ID NO: 15734 - protein, 16 aa, Homo sapiens
CARDPFEQRLTHFDYW

SEQ ID NO: 15735 - protein, 27 aa, Homo sapiens
CTTDGLYCSSTSCYFSGYYYYYGMDVW

SEQ ID NO: 15736 - protein, 28 aa, Homo sapiens
CAKDGLADYDFWSGYFRPPDYYYGMDVW

SEQ ID NO: 15737 - protein, 20 aa, Homo sapiens
CARGNPKYYYDSSGSHYDYW

SEQ ID NO: 15738 - protein, 14 aa, Homo sapiens
CAKISSGGVTTDYW

SEQ ID NO: 15739 - protein, 16 aa, Homo sapiens
CAKDHIAYDSPGFDYW

SEQ ID NO: 15740 - protein, 17 aa, Homo sapiens
CARVRHSNILSFDFDYW

SEQ ID NO: 15741 - protein, 19 aa, Homo sapiens
CATDRLEPLLGPLYYMDVW

SEQ ID NO: 15742 - protein, 18 aa, Homo sapiens
CTRHVGDLGYYYYGMDVW

SEQ ID NO: 15743 - protein, 18 aa, Homo sapiens
CARGVVVPAAIIGWFDPW

SEQ ID NO: 15744 - protein, 24 aa, Homo sapiens
CAREEASYGDLWGVYYYYYYMDVW

SEQ ID NO: 15745 - protein, 17 aa, Homo sapiens
CAKVGDSSGYHWDFDYW

SEQ ID NO: 15746 - protein, 16 aa, Homo sapiens
CAALPGIFGVVGIDYW

SEQ ID NO: 15747 - protein, 14 aa, Homo sapiens
CAHREGWNYYFDYW

SEQ ID NO: 15748 - protein, 24 aa, Homo sapiens
CARVAQTIFGSHANYYYFYQMDVW

SEQ ID NO: 15749 - protein, 21 aa, Homo sapiens
CATVAPIAWELDWGENWFDPW

SEQ ID NO: 15750 - protein, 16 aa, Homo sapiens
CARDEGSYGTRDFDYW

SEQ ID NO: 15751 - protein, 23 aa, Homo sapiens
CAKDRLYYDILTGRFVKFFFDYW

SEQ ID NO: 15752 - protein, 15 aa, Homo sapiens
CARDLMGDGYNFVYW

SEQ ID NO: 15753 - protein, 16 aa, Homo sapiens
CASLNTAMDHEAFDYW

SEQ ID NO: 15754 - protein, 20 aa, Homo sapiens
CAKLAPQKDYGDYFDWGDYW

SEQ ID NO: 15755 - protein, 15 aa, Homo sapiens
CAKDGSSWFGWFDPW

SEQ ID NO: 15756 - protein, 23 aa, Homo sapiens
CAREWINYYDSSGYPTYNWFDPW

SEQ ID NO: 15757 - protein, 16 aa, Homo sapiens
CTTGVRITILEGFDPW

SEQ ID NO: 15758 - protein, 29 aa, Homo sapiens
CARDSRYYDILTGYYTDDKYYYYYYMDVW

SEQ ID NO: 15759 - protein, 17 aa, Homo sapiens
CAKDKTTKSTRWYFDLW

SEQ ID NO: 15760 - protein, 22 aa, Homo sapiens
CARGGSAYCEGDCARPELFDYW

SEQ ID NO: 15761 - protein, 12 aa, Homo sapiens [sequence omitted]

SEQ ID NO: 15762 - protein, 17 aa, Homo sapiens
CARGFSYYNRWYYFDSW

SEQ ID NO: 15763 - protein, 20 aa, Homo sapiens
CAKDTGYCSGGSCYGTFDYW

SEQ ID NO: 15764 - protein, 17 aa, Homo sapiens
CARDGSYGHTGDAFDFW

SEQ ID NO: 15765 - protein, 17 aa, Homo sapiens
CARQRIVATISDAFDIW

SEQ ID NO: 15766 - protein, 14 aa, Homo sapiens
CQSADRSDTSLLLF

SEQ ID NO: 15767 - protein, 25 aa, Homo sapiens
CARARPRSDSSWPRFYYYYYYMDVW

SEQ ID NO: 15768 - protein, 18 aa, Homo sapiens
CVKDRHGSYFERRGFDYW

SEQ ID NO: 15769 - protein, 18 aa, Homo sapiens
CATPKRDYSNYRDPLDYW

SEQ ID NO: 15770 - protein, 14 aa, Homo sapiens
CVRRGQLWLEDDYW

SEQ ID NO: 15771 - protein, 22 aa, Homo sapiens
CARERDRITMIVVATHAAFDIW

SEQ ID NO: 15772 - protein, 21 aa, Homo sapiens
CARDYDFWSGSDYYYYGMDVW

SEQ ID NO: 15773 - protein, 19 aa, Homo sapiens
CAILGGIAAAGTDHYMDVW

SEQ ID NO: 15774 - protein, 23 aa, Homo sapiens
CASLGDSGYDSGSQYYYYGMDVW

SEQ ID NO: 15775 - protein, 25 aa, Homo sapiens
CARVRVGDTAMVIGNYYYYYYMDVW

SEQ ID NO: 15776 - protein, 17 aa, Homo sapiens
CARPPYYGSVYYYVDVW

SEQ ID NO: 15777 - protein, 19 aa, Homo sapiens
CATVRFLEWLSVNNWFDPW

SEQ ID NO: 15778 - protein, 19 aa, Homo sapiens
CARDIPLYYYYDSSGYDYW

SEQ ID NO: 15779 - protein, 17 aa, Homo sapiens
CAKTTRGPGSYGLFDYW

SEQ ID NO: 15780 - protein, 23 aa, Homo sapiens
CARAADYYYYSGGRTRFDAFDIW

SEQ ID NO: 15781 - protein, 19 aa, Homo sapiens
CAKERTRSSSYLNDGFNIW

SEQ ID NO: 15782 - protein, 17 aa, Homo sapiens
CARDWGGMVISEVFDYW

SEQ ID NO: 15783 - protein, 21 aa, Homo sapiens
CAKVQLNIAYCGGDCRFFDYW

SEQ ID NO: 15784 - protein, 21 aa, Homo sapiens
CARVESLYLHDNNLQRALDYW

SEQ ID NO: 15785 - protein, 15 aa, Homo sapiens
CARKYYYDIRPLDYW

SEQ ID NO: 15786 - protein, 21 aa, Homo sapiens
CARGSVVGAIGVWYYYGMDVW

SEQ ID NO: 15787 - protein, 21 aa, Homo sapiens
CARAVADDSSGYQGATNPDYW

SEQ ID NO: 15788 - protein, 23 aa, Homo sapiens
CARDRTYYYDSSGYFGYYGMDVW

SEQ ID NO: 15789 - protein, 18 aa, Homo sapiens
CARGTHLGELPGGFFDYW

SEQ ID NO: 15790 - protein, 15 aa, Homo sapiens
CALQSAPVVILFDYW

SEQ ID NO: 15791 - protein, 20 aa, Homo sapiens
CARDCTNGVCLYYYYGMDVW

SEQ ID NO: 15792 - protein, 20 aa, Homo sapiens
CAKDAIITIFGVVPNWFDPW

SEQ ID NO: 15793 - protein, 22 aa, Homo sapiens
CARGALLDYDFWSGYYDRFDPW

SEQ ID NO: 15794 - protein, 28 aa, Homo sapiens
CAHRRGDDPDIGVITPAVLGIHNWFDSW

SEQ ID NO: 15795 - protein, 18 aa, Homo sapiens
CARGDLPDFRSNFYFDSW

SEQ ID NO: 15796 - protein, 25 aa, Homo sapiens
CTRVGGPRDITISGIVNYYYGMDVW

SEQ ID NO: 15797 - protein, 22 aa, Homo sapiens
CDWSSDVCSSDLARLGALPDYW

SEQ ID NO: 15798 - protein, 14 aa, Homo sapiens
CAHRAWFHDAFDIW

SEQ ID NO: 15799 - protein, 13 aa, Homo sapiens
CTTLYEAYYFDYW

SEQ ID NO: 15800 - protein, 16 aa, Homo sapiens
CARDPVQSVTHYMDVW

SEQ ID NO: 15801 - protein, 17 aa, Homo sapiens
CATSAPWYSSSWSFDYW

SEQ ID NO: 15802 - protein, 23 aa, Homo sapiens
CARTYRYCTNGVCYSYYYGMDVW

SEQ ID NO: 15803 - protein, 17 aa, Homo sapiens
CARGHYDILTGYYMGYW

SEQ ID NO: 15804 - protein, 19 aa, Homo sapiens
CAPFPDPNIAVAGSAFDIW

SEQ ID NO: 15805 - protein, 21 aa, Homo sapiens
CAKLPKVRGVIITGDDAFDIW

SEQ ID NO: 15806 - protein, 21 aa, Homo sapiens
CAKFPGGRGLSDYGDSYFDYW

SEQ ID NO: 15807 - protein, 14 aa, Homo sapiens
CARAFSLPYAFDIW

SEQ ID NO: 15808 - protein, 17 aa, Homo sapiens
CARDFSTYGSGSDVDYW

SEQ ID NO: 15809 - protein, 20 aa, Homo sapiens
CARGATVTTFFRGRNWFDPW

SEQ ID NO: 15810 - protein, 17 aa, Homo sapiens
CATHVDSDYGRRTFDFW

SEQ ID NO: 15811 - protein, 23 aa, Homo sapiens
CALPISAVYYCARDSQWELLDYW

SEQ ID NO: 15812 - protein, 19 aa, Homo sapiens
CATVPSSRGWSAFYHFDNW

SEQ ID NO: 15813 - protein, 19 aa, Homo sapiens
CARDRMEWANYYYYYMDVW

SEQ ID NO: 15814 - protein, 25 aa, Homo sapiens
CARETAAPEYSSSLVAPAGNWFDPW

SEQ ID NO: 15815 - protein, 21 aa, Homo sapiens
CASTNYYDSSGYYDGNRFDYW

SEQ ID NO: 15816 - protein, 12 aa, Homo sapiens
CQQTYNIPSYTF

SEQ ID NO: 15817 - protein, 23 aa, Homo sapiens
CARYRHVLLWFGETGTKIDFDLW

SEQ ID NO: 15818 - protein, 19 aa, Homo sapiens
CAREYVVALIAATYWFDPW

SEQ ID NO: 15819 - protein, 18 aa, Homo sapiens
CARDGADSTIFGVPFDYW

SEQ ID NO: 15820 - protein, 22 aa, Homo sapiens
CARGQTNRDGYNFYPRGAFDIW

SEQ ID NO: 15821 - protein, 21 aa, Homo sapiens
CARHIQRFLVVVVPLNWFDPW

SEQ ID NO: 15822 - protein, 21 aa, Homo sapiens
CATLTMTFGVVIIRGYYFDYW

SEQ ID NO: 15823 - protein, 17 aa, Homo sapiens
CARDTLRGSSSSWFDPW

SEQ ID NO: 15824 - protein, 22 aa, Homo sapiens
CARPPIYYDSSGYLKHDAFDIW

SEQ ID NO: 15825 - protein, 18 aa, Homo sapiens
CARSTILNPYYYYGMDVW

SEQ ID NO: 15826 - protein, 22 aa, Homo sapiens
CTTDPTLLYSSSWITSEAFDIW

SEQ ID NO: 15827 - protein, 23 aa, Homo sapiens
CAKAAYYYESSGYYSWRDAFDIW

SEQ ID NO: 15828 - protein, 15 aa, Homo sapiens
CARDYGGNSDYFDYW

SEQ ID NO: 15829 - protein, 17 aa, Homo sapiens
CAKDMPSSGWSGGIDYW

SEQ ID NO: 15830 - protein, 26 aa, Homo sapiens
CARDITYYDFWSGYYPPYYYYGMDVW

SEQ ID NO: 15831 - protein, 20 aa, Homo sapiens
CAADYGDYGRFYYYYGMDVW

SEQ ID NO: 15832 - protein, 21 aa, Homo sapiens
CTRAVRSCGVNSCSGNWFDPW

SEQ ID NO: 15833 - protein, 14 aa, Homo sapiens
CAKGSGSWHGGDYW

SEQ ID NO: 15834 - protein, 21 aa, Homo sapiens
CAKESAYDFWSGYYGVAFDIW

SEQ ID NO: 15835 - protein, 17 aa, Homo sapiens
CAKHVVPEIRASPFDYW

SEQ ID NO: 15836 - protein, 20 aa, Homo sapiens
CASLHSYYYDSSGYYYSDYW

SEQ ID NO: 15837 - protein, 20 aa, Homo sapiens
CAKAPRGSCRSRLCYHFDHW

SEQ ID NO: 15838 - protein, 21 aa, Homo sapiens
CARDRPPPGDGYNYPDAFDIW

SEQ ID NO: 15839 - protein, 27 aa, Homo sapiens
CTTDRREDAIAARLFFGLNYYYGMDVW

SEQ ID NO: 15840 - protein, 21 aa, Homo sapiens
CARDGDTAMVTWYYYYYMDVW

SEQ ID NO: 15841 - protein, 16 aa, Homo sapiens
CAKAGGYSYYYYMDVW

SEQ ID NO: 15842 - protein, 18 aa, Homo sapiens
CAKSLLQNYYYYYGMDVW

SEQ ID NO: 15843 - protein, 18 aa, Homo sapiens
CATYLGRPGWLPDRFDYW

SEQ ID NO: 15844 - protein, 19 aa, Homo sapiens
CARGTTDSSSWYGWYFDLW

SEQ ID NO: 15845 - protein, 17 aa, Homo sapiens
CARPQAEWDLLLPFDIW

SEQ ID NO: 15846 - protein, 19 aa, Homo sapiens
CTKDVQFLNTVITYGFDFW

SEQ ID NO: 15847 - protein, 20 aa, Homo sapiens
CATASAHMVRGVIISWFDPW

SEQ ID NO: 15848 - protein, 21 aa, Homo sapiens
CAKNAGIVGATTLDLYYFDYW

SEQ ID NO: 15849 - protein, 24 aa, Homo sapiens
CARVLWDSSYYDSSGYYFYGMDVW

SEQ ID NO: 15850 - protein, 29 aa, Homo sapiens
CAKDSMYYDILTGYYKRATTYYYYYMDVW

SEQ ID NO: 15851 - protein, 23 aa, Homo sapiens
CAKDIMGKFSSGWLYYYYGMDVW

SEQ ID NO: 15852 - protein, 17 aa, Homo sapiens
CAKEFEQWLIPRASDVW

SEQ ID NO: 15853 - protein, 21 aa, Homo sapiens
CARQAEWRRVVVQSKRFFDYW

SEQ ID NO: 15854 - protein, 12 aa, Homo sapiens
CASASSNGFDPW

SEQ ID NO: 15855 - protein, 15 aa, Homo sapiens
CAHRGVDTAMEFGYW

SEQ ID NO: 15856 - protein, 18 aa, Homo sapiens
CARGPITMIVVVTPGDYW

SEQ ID NO: 15857 - protein, 16 aa, Homo sapiens
CATAFAAMVKAPFDYW

SEQ ID NO: 15858 - protein, 18 aa, Homo sapiens
CAKAVSPSGTYSLGFDVW

SEQ ID NO: 15859 - protein, 23 aa, Homo sapiens
CAADVWSGYYRPDWDYYYGMDVW

SEQ ID NO: 15860 - protein, 14 aa, Homo sapiens
CARLLWSPGYFDYW

SEQ ID NO: 15861 - protein, 23 aa, Homo sapiens
CARESLITMIVVVITTTSYFDLW

SEQ ID NO: 15862 - protein, 16 aa, Homo sapiens
CARENHIGAPVDFDYW

SEQ ID NO: 15863 - protein, 17 aa, Homo sapiens
CAKLDYWYSSSSNFDYW

SEQ ID NO: 15864 - protein, 14 aa, Homo sapiens
CQAWDSSRDVSYVF

SEQ ID NO: 15865 - protein, 21 aa, Homo sapiens
CTKDEAYCGGDCSDPDWFDAW

SEQ ID NO: 15866 - protein, 20 aa, Homo sapiens
CAKSAALFIDSPGNSLFDYW

SEQ ID NO: 15867 - protein, 15 aa, Homo sapiens
CAVLIVTSYYYMDVW

SEQ ID NO: 15868 - protein, 18 aa, Homo sapiens
CARDEITSYYDGDYFDLW

SEQ ID NO: 15869 - protein, 13 aa, Homo sapiens
CARTSTITPFDQW

SEQ ID NO: 15870 - protein, 19 aa, Homo sapiens
CLASNDPLTDDSYGGEDYW

SEQ ID NO: 15871 - protein, 22 aa, Homo sapiens
CARQSFSGSDEKGARYWYFDLW

SEQ ID NO: 15872 - protein, 22 aa, Homo sapiens
CARHLIVALRYFDWVTGWFDPW

SEQ ID NO: 15873 - protein, 15 aa, Homo sapiens
CARILWFPAPSVDYW

SEQ ID NO: 15874 - protein, 17 aa, Homo sapiens
CAHSGPAVAVIGGFDYW

SEQ ID NO: 15875 - protein, 23 aa, Homo sapiens
CAPLGDVVVPAATGYYYYGMDVW

SEQ ID NO: 15876 - protein, 24 aa, Homo sapiens
CARDSVAAAGTPWKGYYYYYMDVW

SEQ ID NO: 15877 - protein, 16 aa, Homo sapiens
CAHRRNLPDTPYFDYW

SEQ ID NO: 15878 - protein, 16 aa, Homo sapiens
CVRDRGDYVHNWFDPW

SEQ ID NO: 15879 - protein, 11 aa, Homo sapiens [sequence omitted]

SEQ ID NO: 15880 - protein, 19 aa, Homo sapiens
CARDPGYASGWYMGGHDYW

SEQ ID NO: 15881 - protein, 19 aa, Homo sapiens
CSAQWGELASEWCYYMDVW

SEQ ID NO: 15882 - protein, 18 aa, Homo sapiens
CARKNTVYSSSLGAFDIW

SEQ ID NO: 15883 - protein, 18 aa, Homo sapiens
CAKLSGVYYDSSGPFDYW

SEQ ID NO: 15884 - protein, 19 aa, Homo sapiens
CTTGFPGGDYVPDSYYDYW

SEQ ID NO: 15885 - protein, 22 aa, Homo sapiens
CARTGYTSGWYVDYYYYYMDVW

SEQ ID NO: 15886 - protein, 16 aa, Homo sapiens
CAKLGAGMATTRGDYW

SEQ ID NO: 15887 - protein, 23 aa, Homo sapiens
CTTVEFLPYYDFWSGPPFFFDYW

SEQ ID NO: 15888 - protein, 20 aa, Homo sapiens
CAKEISSGYYNSPLDAFDIW

SEQ ID NO: 15889 - protein, 18 aa, Homo sapiens
CASHYSGYDLGGPKFDYW

SEQ ID NO: 15890 - protein, 19 aa, Homo sapiens
CAKDSGPDSGSDYWYFDLW

SEQ ID NO: 15891 - protein, 23 aa, Homo sapiens
CAKDTITIFGVVITRGGDAFDIW

SEQ ID NO: 15892 - protein, 11 aa, Homo sapiens
CQQRSNPLIAF

SEQ ID NO: 15893 - protein, 16 aa, Homo sapiens
CAKAMVAGATTRFDCW

SEQ ID NO: 15894 - protein, 23 aa, Homo sapiens
CARARGDYDFWSGYQLSGFCDYW

SEQ ID NO: 15895 - protein, 21 aa, Homo sapiens
CARAELLWFGDLHKPFYFDYW

SEQ ID NO: 15896 - protein, 19 aa, Homo sapiens
CASNYDYGGNSGSLLFNYW

SEQ ID NO: 15897 - protein, 19 aa, Homo sapiens
CARVGELGSLDPEYRFDYW

SEQ ID NO: 15898 - protein, 23 aa, Homo sapiens
CARVRSPLSSSWPLSEYYYMDVW

SEQ ID NO: 15899 - protein, 12 aa, Homo sapiens
CARGVAGRLDYW

SEQ ID NO: 15900 - protein, 12 aa, Homo sapiens
CARDFYSVGDYW

SEQ ID NO: 15901 - protein, 17 aa, Homo sapiens
CARALPYSGYEDYFDYW

SEQ ID NO: 15902 - protein, 21 aa, Homo sapiens
CAHRGDSSGYYYDRQYYFDYW

SEQ ID NO: 15903 - protein, 20 aa, Homo sapiens
CARDGGDTAMVSPHFAFDIW

SEQ ID NO: 15904 - protein, 17 aa, Homo sapiens
CARDQATEDWGYYMDVW

SEQ ID NO: 15905 - protein, 18 aa, Homo sapiens
CAKFGFSSSSVNPTPDYW

SEQ ID NO: 15906 - protein, 22 aa, Homo sapiens
CASSGYYYDSSGYYYYTVFDYW

SEQ ID NO: 15907 - protein, 18 aa, Homo sapiens
CAVYSSGWYFEENAFDIW

SEQ ID NO: 15908 - protein, 22 aa, Homo sapiens
CARDRMITFGGVIVPNNWFDPW

SEQ ID NO: 15909 - protein, 15 aa, Homo sapiens
CARGGMTTVTFFDLW

SEQ ID NO: 15910 - protein, 27 aa, Homo sapiens
CLRSEDTAVYYCATGPPLRFWDWFDPW

SEQ ID NO: 15911 - protein, 22 aa, Homo sapiens
CARATSPWDYYDSSGYYYPDYW

SEQ ID NO: 15912 - protein, 18 aa, Homo sapiens
CAREVTTRVPLYNWFDPW

SEQ ID NO: 15913 - protein, 19 aa, Homo sapiens
CAKGLDDNLIGYPDGFDIW

SEQ ID NO: 15914 - protein, 16 aa, Homo sapiens
CARDLSTGTTSDLDYW

SEQ ID NO: 15915 - protein, 19 aa, Homo sapiens
CAKDRLLYSSGWKEYFQHW

SEQ ID NO: 15916 - protein, 26 aa, Homo sapiens
CASSYYCSSTSCRILSYYYYYGMDVW

SEQ ID NO: 15917 - protein, 16 aa, Homo sapiens
CTCQSGYSLNNWFDPW

SEQ ID NO: 15918 - protein, 15 aa, Homo sapiens
CTRVGHWNDADFDSW

SEQ ID NO: 15919 - protein, 21 aa, Homo sapiens
CARDSRYCSGGSCYSIWFDPW

SEQ ID NO: 15920 - protein, 17 aa, Homo sapiens
CARPVTIFGFRSWFDPW

SEQ ID NO: 15921 - protein, 17 aa, Homo sapiens
CARTEYSSHDGGAFDIW

SEQ ID NO: 15922 - protein, 28 aa, Homo sapiens
CARAPLLYCSGGSCQMPPYYYYYGMDVW

SEQ ID NO: 15923 - protein, 14 aa, Homo sapiens
CAKDINNGRQFDYW

SEQ ID NO: 15924 - protein, 24 aa, Homo sapiens
CARDPRTYYDFWSGFSYYYGMDVW

SEQ ID NO: 15925 - protein, 20 aa, Homo sapiens
CARDHDDYGDYGPDNWFDPW

SEQ ID NO: 15926 - protein, 17 aa, Homo sapiens
CARGWAGILVPDGMDVW

SEQ ID NO: 15927 - protein, 20 aa, Homo sapiens
CARRVRPTYGDKNEYYFDYW

SEQ ID NO: 15928 - protein, 20 aa, Homo sapiens
CAKDPLPAYCGGDCYAFDIW

SEQ ID NO: 15929 - protein, 19 aa, Homo sapiens
CVKDIHPRMGYSGDDFAYW

SEQ ID NO: 15930 - protein, 18 aa, Homo sapiens
CATWGGYYDSSGYYHDYW

SEQ ID NO: 15931 - protein, 19 aa, Homo sapiens
CAKDPDSSGFSTTHAFDIW

SEQ ID NO: 15932 - protein, 15 aa, Homo sapiens
CARGEWLPEWYFDLW

SEQ ID NO: 15933 - protein, 22 aa, Homo sapiens
CASLPAYNWNDEYINRFPTDYW

SEQ ID NO: 15934 - protein, 15 aa, Homo sapiens
CARVLPHYGDYVDYW

SEQ ID NO: 15935 - protein, 24 aa, Homo sapiens
CAKGDGVVVPAALKDYYYYGMDVW

SEQ ID NO: 15936 - protein, 17 aa, Homo sapiens
CARDLWGDYVVGGLDYW

SEQ ID NO: 15937 - protein, 17 aa, Homo sapiens
CAKDIYREIGDHAFDFW

SEQ ID NO: 15938 - protein, 17 aa, Homo sapiens
CARETVAGSKYNWFDPW

SEQ ID NO: 15939 - protein, 22 aa, Homo sapiens
CAKVALSDSTGYYSSYWYFDLW

SEQ ID NO: 15940 - protein, 17 aa, Homo sapiens
CAKARRYTSSLDASDIW

SEQ ID NO: 15941 - protein, 14 aa, Homo sapiens
CAKDTGIQYAFDIW

SEQ ID NO: 15942 - protein, 16 aa, Homo sapiens
CVHSLSSGWELTFDYW

SEQ ID NO: 15943 - protein, 11 aa, Homo sapiens
CQQSYSISLNF

SEQ ID NO: 15944 - protein, 21 aa, Homo sapiens
CAKESLDYYGSGSYNQPFDYW

SEQ ID NO: 15945 - protein, 12 aa, Homo sapiens
CARGRDFFFDYW

SEQ ID NO: 15946 - protein, 14 aa, Homo sapiens
CAKVHPIFGEADYW

SEQ ID NO: 15947 - protein, 14 aa, Homo sapiens
CAATTVTPRRPDYW

SEQ ID NO: 15948 - protein, 19 aa, Homo sapiens
CTTGYCSDGLCYADALHVW

SEQ ID NO: 15949 - protein, 17 aa, Homo sapiens
CAKGSRVVINWCYFDYW

SEQ ID NO: 15950 - protein, 23 aa, Homo sapiens
CARGAEYYDFWSGYYSGSYFDYW

SEQ ID NO: 15951 - protein, 12 aa, Homo sapiens [sequence omitted]

SEQ ID NO: 15952 - protein, 17 aa, Homo sapiens
CATGPPIAAAGTWFDPW

SEQ ID NO: 15953 - protein, 15 aa, Homo sapiens
CANGGDIAVAGRDYW

SEQ ID NO: 15954 - protein, 20 aa, Homo sapiens
CARGNYDFWSGYHHGAFDIW

SEQ ID NO: 15955 - protein, 20 aa, Homo sapiens
CARAIEGGYSIPPPVWFDPW

SEQ ID NO: 15956 - protein, 18 aa, Homo sapiens
CAKEGVYCSSTSCGFDTW

SEQ ID NO: 15957 - protein, 23 aa, Homo sapiens
CARQTRVDEYSGGYYDRGWFDPW

SEQ ID NO: 15958 - protein, 21 aa, Homo sapiens
CARAIVDFWSGYFGDYYFDYW

SEQ ID NO: 15959 - protein, 19 aa, Homo sapiens
CAKVGTSSTSVVPYYFDYW

SEQ ID NO: 15960 - protein, 20 aa, Homo sapiens
CAKDMGGIAAADTDYYFDYW

SEQ ID NO: 15961 - protein, 22 aa, Homo sapiens
CARTSIELWSGYPTHENWFDPW

SEQ ID NO: 15962 - protein, 21 aa, Homo sapiens
CDWSSDVCSSDLGNFYSFDPW

SEQ ID NO: 15963 - protein, 18 aa, Homo sapiens
CTRSLPSSSWYFYYMDVW

SEQ ID NO: 15964 - protein, 19 aa, Homo sapiens
CAKDISPNYYYDSSGLDYW

SEQ ID NO: 15965 - protein, 17 aa, Homo sapiens
CASAETMVVTWYYFDYW

SEQ ID NO: 15966 - protein, 11 aa, Homo sapiens
CAGGWYSFDYW

SEQ ID NO: 15967 - protein, 23 aa, Homo sapiens
CAKDISSGGNTIFGVAPNWFDPW

SEQ ID NO: 15968 - protein, 20 aa, Homo sapiens
CARHGTPNFWSGYLPQFDYW

SEQ ID NO: 15969 - protein, 15 aa, Homo sapiens
CAKDNSSGFEYFQHW

SEQ ID NO: 15970 - protein, 14 aa, Homo sapiens
CSSYTRSNTLPWVF

SEQ ID NO: 15971 - protein, 24 aa, Homo sapiens
CARDSKWVPDYYGSGSYYNRFDYW

SEQ ID NO: 15972 - protein, 20 aa, Homo sapiens
CARPNGNNQYSNSWCYFDHW

SEQ ID NO: 15973 - protein, 30 aa, Homo sapiens
CAHRPPRSLYSSGWYDSLVGASPGGWFDPW

SEQ ID NO: 15974 - protein, 17 aa, Homo sapiens
CARDSVRGWDQDAFDIW

SEQ ID NO: 15975 - protein, 11 aa, Homo sapiens
CANGEAAADYW

SEQ ID NO: 15976 - protein, 15 aa, Homo sapiens
CARREPDYYTAFDIW

SEQ ID NO: 15977 - protein, 19 aa, Homo sapiens
CARHLYDTSGYVVVAFDVW

SEQ ID NO: 15978 - protein, 21 aa, Homo sapiens
CASGGWQLVKRYYYYYYMDVW

SEQ ID NO: 15979 - protein, 20 aa, Homo sapiens
CARNHPPDYGDYVNWYFDLW

SEQ ID NO: 15980 - protein, 16 aa, Homo sapiens
CASSPSGQFSLWNDYW

SEQ ID NO: 15981 - protein, 22 aa, Homo sapiens
CARDCSGGTCKPGGGYDAFDIW

SEQ ID NO: 15982 - protein, 20 aa, Homo sapiens
CATDQDSRIAIFPYDAFHIW

SEQ ID NO: 15983 - protein, 24 aa, Homo sapiens
CARASKSSITIFGVVIIPPGFDYW

SEQ ID NO: 15984 - protein, 22 aa, Homo sapiens
CAKVPSFVYSYDSGRNPQIDYW

SEQ ID NO: 15985 - protein, 19 aa, Homo sapiens
CAQTLPVMITFGGVTFDPW

SEQ ID NO: 15986 - protein, 24 aa, Homo sapiens
CARGRRSYYDFWSGYAEYYGMDVW

SEQ ID NO: 15987 - protein, 17 aa, Homo sapiens
CARRSPGSGWFDHFDHW

SEQ ID NO: 15988 - protein, 16 aa, Homo sapiens
CAKDGLAFDHDRFDYW

SEQ ID NO: 15989 - protein, 18 aa, Homo sapiens
CASDYGGNPDTSGPFDYW

SEQ ID NO: 15990 - protein, 25 aa, Homo sapiens
CAHTGLKTYYDILTGYSRVAYFDYW

SEQ ID NO: 15991 - protein, 13 aa, Homo sapiens
CARVENSNYVSYW

SEQ ID NO: 15992 - protein, 14 aa, Homo sapiens
CAREYQLLYYFDYW

SEQ ID NO: 15993 - protein, 22 aa, Homo sapiens
CARDLAPTYYDFWSGYPYFDYW

SEQ ID NO: 15994 - protein, 21 aa, Homo sapiens
CASLPLYYYDSSGYHQAFDIW

SEQ ID NO: 15995 - protein, 19 aa, Homo sapiens
CARHKQLLFSRRTYYFDYW

SEQ ID NO: 15996 - protein, 21 aa, Homo sapiens
CAADSIAAGDISHYYYGMDVW

SEQ ID NO: 15997 - protein, 19 aa, Homo sapiens
CARGITFGGVIGDDAFDIW

SEQ ID NO: 15998 - protein, 13 aa, Homo sapiens
CASESPEAEVDYW

SEQ ID NO: 15999 - protein, 17 aa, Homo sapiens
CAKDYYRGDYESNFDYW

SEQ ID NO: 16000 - protein, 17 aa, Homo sapiens
CARDVVADTWPFGFDIW

SEQ ID NO: 16001 - protein, 22 aa, Homo sapiens
CARAGYSSSSGYYYYYYGMDVW

SEQ ID NO: 16002 - protein, 28 aa, Homo sapiens
CARQFGYFDWLLLSGSPSDGDNNWFDPW

SEQ ID NO: 16003 - protein, 16 aa, Homo sapiens
CARGYSYGPYWYFDLW

SEQ ID NO: 16004 - protein, 22 aa, Homo sapiens
CAKFPGLWNYDSSGQYNYFDYW

SEQ ID NO: 16005 - protein, 23 aa, Homo sapiens
CARHPADYDYVWGSYRYMAPDYW

SEQ ID NO: 16006 - protein, 24 aa, Homo sapiens
CAKAPAISYIVLMVYATTYYFDYW

SEQ ID NO: 16007 - protein, 20 aa, Homo sapiens
CARMSKYFDWLLQHNWFDPW

SEQ ID NO: 16008 - protein, 17 aa, Homo sapiens
CARAALIGSGSYWADYW

SEQ ID NO: 16009 - protein, 16 aa, Homo sapiens
CAKDMSPVDTAMVDYW

SEQ ID NO: 16010 - protein, 12 aa, Homo sapiens
CARVRDGDNDYW

SEQ ID NO: 16011 - protein, 22 aa, Homo sapiens
CARGPEYYDFWSGYYGYGMDVW

SEQ ID NO: 16012 - protein, 20 aa, Homo sapiens
CAREHGKRVAATLIDWFDPW

SEQ ID NO: 16013 - protein, 13 aa, Homo sapiens
CQSYDYSLGGVIF

SEQ ID NO: 16014 - protein, 16 aa, Homo sapiens
CAKLSIAAAEDRFDYW

SEQ ID NO: 16015 - protein, 28 aa, Homo sapiens
CTTDEVGTGWSYGDYQIFRRVSDAFDIW

SEQ ID NO: 16016 - protein, 25 aa, Homo sapiens
CTTTEPIGYCSSTSCYTGAAFIDYW

SEQ ID NO: 16017 - protein, 20 aa, Homo sapiens
CASLLGYCTSTNCYNWIDPW

SEQ ID NO: 16018 - protein, 18 aa, Homo sapiens
CAREWGTAVATYNWFDPW

SEQ ID NO: 16019 - protein, 16 aa, Homo sapiens
CARHGLSITPDAFDIW

SEQ ID NO: 16020 - protein, 20 aa, Homo sapiens
CVKDNNYDISGYLINWFGPW

SEQ ID NO: 16021 - protein, 17 aa, Homo sapiens
CAKSRGVTSNLRWFDPW

SEQ ID NO: 16022 - protein, 15 aa, Homo sapiens
CARDLDPPGWLVDYW

SEQ ID NO: 16023 - protein, 16 aa, Homo sapiens
CARERPLDFTYYFDDW

SEQ ID NO: 16024 - protein, 20 aa, Homo sapiens
CARERVPGYTGYDSDYFDYW

SEQ ID NO: 16025 - protein, 24 aa, Homo sapiens
CAKLDWEGSLYSSPRGASRRFDYW

SEQ ID NO: 16026 - protein, 17 aa, Homo sapiens
CAKDFGDFTNPDAFDIW

SEQ ID NO: 16027 - protein, 16 aa, Homo sapiens
CARTFIAAAGTSIDYW

SEQ ID NO: 16028 - protein, 15 aa, Homo sapiens
CARKAEGSGYYPDYW

SEQ ID NO: 16029 - protein, 21 aa, Homo sapiens
CAGSTSEGHLSYYYYYGMDVW

SEQ ID NO: 16030 - protein, 19 aa, Homo sapiens
CASGYCSSTSCSSPSFDPW

SEQ ID NO: 16031 - protein, 22 aa, Homo sapiens
CARVFALTVVVIHETNWYFDLW

SEQ ID NO: 16032 - protein, 16 aa, Homo sapiens
CARNIWGGYYTGFDSW

SEQ ID NO: 16033 - protein, 15 aa, Homo sapiens
CAALGWNDQVLFDYW

SEQ ID NO: 16034 - protein, 20 aa, Homo sapiens
CARESPMVRGVIRRDGMDVW

SEQ ID NO: 16035 - protein, 17 aa, Homo sapiens
CAKAHSRHDYGDNFDYW

SEQ ID NO: 16036 - protein, 23 aa, Homo sapiens
CARLPRGNYDNSGHYGGESFDYW

SEQ ID NO: 16037 - protein, 16 aa, Homo sapiens
CAKLPDAPAAISPDYW

SEQ ID NO: 16038 - protein, 20 aa, Homo sapiens
CARESPQGMVVAGIKGADYW

SEQ ID NO: 16039 - protein, 21 aa, Homo sapiens
CARVVENHNFWSGSGNYFDYW

SEQ ID NO: 16040 - protein, 16 aa, Homo sapiens
CAIGTIGSVPVPFDYW

SEQ ID NO: 16041 - protein, 13 aa, Homo sapiens
CARGSNRQAFDIW

SEQ ID NO: 16042 - protein, 17 aa, Homo sapiens
CARDTGDSSGWNWFDPW

SEQ ID NO: 16043 - protein, 15 aa, Homo sapiens
CSKTASAWYRPFDSW

SEQ ID NO: 16044 - protein, 13 aa, Homo sapiens
CARPATTYALDYW

SEQ ID NO: 16045 - protein, 16 aa, Homo sapiens
CAKGFYGSGNGHIDYW

SEQ ID NO: 16046 - protein, 17 aa, Homo sapiens
CAKDLHSGYYYFYFDYW

SEQ ID NO: 16047 - protein, 20 aa, Homo sapiens
CATLHPENYYDSSGYYPDYW

SEQ ID NO: 16048 - protein, 20 aa, Homo sapiens
CMKRVDSYDSRGYHTAPDYW

SEQ ID NO: 16049 - protein, 13 aa, Homo sapiens
CQKYDDLPPGITF

SEQ ID NO: 16050 - protein, 18 aa, Homo sapiens
CALQTTVSSAASSYLDDW

SEQ ID NO: 16051 - protein, 17 aa, Homo sapiens
CAHNFYSNYLFGWFDPW

SEQ ID NO: 16052 - protein, 14 aa, Homo sapiens
CARNPGWELPPDYW

SEQ ID NO: 16053 - protein, 28 aa, Homo sapiens
CARGDYCSGGSCYSLFPYYYYYYGMDVW

SEQ ID NO: 16054 - protein, 17 aa, Homo sapiens
CARYGVSWGHDSSFDYW

SEQ ID NO: 16055 - protein, 19 aa, Homo sapiens
CARAGWDSRGNKYNWFDPW

SEQ ID NO: 16056 - protein, 22 aa, Homo sapiens
CARDGGDYDSSSRWDDYYFDYW

SEQ ID NO: 16057 - protein, 19 aa, Homo sapiens
CARLWPWGFSSGTRYFDFW

SEQ ID NO: 16058 - protein, 22 aa, Homo sapiens
CAREALRDIVVVVAAPDAFDIW

SEQ ID NO: 16059 - protein, 19 aa, Homo sapiens
CARDDNDSSGYPGWFLDYW

SEQ ID NO: 16060 - protein, 18 aa, Homo sapiens
CARGGTIFGVVITSFDYW

SEQ ID NO: 16061 - protein, 22 aa, Homo sapiens
CARVETLGYYDSWGVTDWFDPW

SEQ ID NO: 16062 - protein, 19 aa, Homo sapiens
CAKDAQVALNLGSSPFDYW

SEQ ID NO: 16063 - protein, 13 aa, Homo sapiens
CARIPGGTHPDYW

SEQ ID NO: 16064 - protein, 10 aa, Homo sapiens
CGKGHWLDSW

SEQ ID NO: 16065 - protein, 19 aa, Homo sapiens
CATGTRITMIVVVTPLDYW

SEQ ID NO: 16066 - protein, 19 aa, Homo sapiens
CASSPLGNYDSSGYGLDYW

SEQ ID NO: 16067 - protein, 22 aa, Homo sapiens
CARANIALCSGGSCYSVTFDYW

SEQ ID NO: 16068 - protein, 14 aa, Homo sapiens
CAKDMQHDYYFDYW

SEQ ID NO: 16069 - protein, 17 aa, Homo sapiens
CLRFESRAAWHSYFDYW

SEQ ID NO: 16070 - protein, 20 aa, Homo sapiens
CARILSAKWVWGLLTYMDVW

SEQ ID NO: 16071 - protein, 25 aa, Homo sapiens
CARDRGPYDFWSGYYNYYYYYMDVW

SEQ ID NO: 16072 - protein, 15 aa, Homo sapiens
CARPAASDRYYFDYW

SEQ ID NO: 16073 - protein, 19 aa, Homo sapiens
CAHSIVSGDRLELRDFDYW

SEQ ID NO: 16074 - protein, 16 aa, Homo sapiens
CARESGAYIYGVFDNW

SEQ ID NO: 16075 - protein, 19 aa, Homo sapiens
CAKDQGYSGYDRVDAFDIW

SEQ ID NO: 16076 - protein, 19 aa, Homo sapiens
CARGFFWQQLVKPDAFDIW

SEQ ID NO: 16077 - protein, 17 aa, Homo sapiens
CASVRQWRYSDWYFDLW

SEQ ID NO: 16078 - protein, 14 aa, Homo sapiens
CAKMDRGSAWFDYW

SEQ ID NO: 16079 - protein, 23 aa, Homo sapiens
CARHGLRDTIFGVARGWNWFDPW

SEQ ID NO: 16080 - protein, 15 aa, Homo sapiens
CARDPHMVYSYFDYW

SEQ ID NO: 16081 - protein, 24 aa, Homo sapiens
CAFRSAFGEVLWHESERSDWFDPW

SEQ ID NO: 16082 - protein, 19 aa, Homo sapiens
CAKDYGMEPLDLGGGSDYW

SEQ ID NO: 16083 - protein, 28 aa, Homo sapiens
CARSLSISDPLAVGIWFGELWTGIFDYW

SEQ ID NO: 16084 - protein, 15 aa, Homo sapiens
CARERLATYYYMDVW

SEQ ID NO: 16085 - protein, 21 aa, Homo sapiens
CARAIDYYDSSGYYPDAFDIW

SEQ ID NO: 16086 - protein, 22 aa, Homo sapiens
CTRGPFRITMIVVVMEDAFDIW

SEQ ID NO: 16087 - protein, 17 aa, Homo sapiens
CTRDGAIVTAMEYFHHW

SEQ ID NO: 16088 - protein, 19 aa, Homo sapiens
CAKEHTDYGGNSPHYFDYW

SEQ ID NO: 16089 - protein, 21 aa, Homo sapiens
CAHSSSGITIFGVVIPSFDYW

SEQ ID NO: 16090 - protein, 23 aa, Homo sapiens
CARGQLESHFPYYYGSGSSFDYW

SEQ ID NO: 16091 - protein, 22 aa, Homo sapiens
CARGLGSMVRGVSRPPYFFDYW

SEQ ID NO: 16092 - protein, 15 aa, Homo sapiens
CANGPSPRLGFFDYW

SEQ ID NO: 16093 - protein, 20 aa, Homo sapiens
CARDGLRCSTSTCYRVFDAW

SEQ ID NO: 16094 - protein, 19 aa, Homo sapiens
CATARDSGYDWAPHYFDSW

SEQ ID NO: 16095 - protein, 21 aa, Homo sapiens
CARGRRITIFGVVIMSWFDPW

SEQ ID NO: 16096 - protein, 14 aa, Homo sapiens
CQSTGSSGTSPVIF

SEQ ID NO: 16097 - protein, 18 aa, Homo sapiens
CARDPAAIRFLEWYLDYW

SEQ ID NO: 16098 - protein, 17 aa, Homo sapiens
CAKDYMFGELSPFFDYW

SEQ ID NO: 16099 - protein, 14 aa, Homo sapiens
CAKAVEMATSGDYW

SEQ ID NO: 16100 - protein, 20 aa, Homo sapiens
CARDIGYIGYDLYGSERDYW

SEQ ID NO: 16101 - protein, 18 aa, Homo sapiens
CAKGMCYSYGCMYYFDYW

SEQ ID NO: 16102 - protein, 21 aa, Homo sapiens
CARDSWYYDFWSGYHDAFDIW

SEQ ID NO: 16103 - protein, 20 aa, Homo sapiens
CAKDWRIAMIVVVPTHFDYW

SEQ ID NO: 16104 - protein, 21 aa, Homo sapiens
CAKDINYDSSGYYVGFDFDYW

SEQ ID NO: 16105 - protein, 22 aa, Homo sapiens
CARDRSTVEMATTRYYYYMDVW

SEQ ID NO: 16106 - protein, 13 aa, Homo sapiens
CQSPDSDGVYWLF

SEQ ID NO: 16107 - protein, 17 aa, Homo sapiens
CAKGGLSGSYDDAFDVW

SEQ ID NO: 16108 - protein, 19 aa, Homo sapiens
CAKNQVLLWFGESIEFDYW

SEQ ID NO: 16109 - protein, 18 aa, Homo sapiens
CARDRSYSGSPPDAFDIW

SEQ ID NO: 16110 - protein, 19 aa, Homo sapiens
CARDLPVAGTQGDDAFDIW

SEQ ID NO: 16111 - protein, 16 aa, Homo sapiens
CATGSAIAVASWFDPW

SEQ ID NO: 16112 - protein, 19 aa, Homo sapiens
CARGCDSRSGYQSGGFDYW

SEQ ID NO: 16113 - protein, 17 aa, Homo sapiens
CAKGQFYATIEVYFDYW

SEQ ID NO: 16114 - protein, 14 aa, Homo sapiens
CATWQWLVRYFDNW

SEQ ID NO: 16115 - protein, 18 aa, Homo sapiens
CASERGIVVPPGNAFDIW

SEQ ID NO: 16116 - protein, 20 aa, Homo sapiens
CTRDCDSGNAIRCGGALDVW

SEQ ID NO: 16117 - protein, 20 aa, Homo sapiens
CVKDSSLYGDYVPGYYMDVW

SEQ ID NO: 16118 - protein, 25 aa, Homo sapiens
CARDVLDPYDFWSGYYSYYYGMDVW

SEQ ID NO: 16119 - protein, 14 aa, Homo sapiens
CQSADTNGPSNWVF

SEQ ID NO: 16120 - protein, 19 aa, Homo sapiens
CTRGLGDGYNWWHDTFDIW

SEQ ID NO: 16121 - protein, 15 aa, Homo sapiens
CARDACSGGNCLDPW

SEQ ID NO: 16122 - protein, 18 aa, Homo sapiens
CARHPGPYKHDSGVPDYW

SEQ ID NO: 16123 - protein, 22 aa, Homo sapiens
CARVHIRSDTAMPKRRGYFDYW

SEQ ID NO: 16124 - protein, 21 aa, Homo sapiens
CATIYYDYVWGSSNGYYFDYW

SEQ ID NO: 16125 - protein, 20 aa, Homo sapiens
CARYQYYYDRSGVTYYFDFW

SEQ ID NO: 16126 - protein, 18 aa, Homo sapiens
CAREFGYSSGWYAYFDYW

SEQ ID NO: 16127 - protein, 24 aa, Homo sapiens
CAREEDIVVVPAALYYYYYGMDVW

SEQ ID NO: 16128 - protein, 21 aa, Homo sapiens
CARDVYLYYYDSSGQIVFDYW

SEQ ID NO: 16129 - protein, 16 aa, Homo sapiens
CARDQMGNYGTTIDYW

SEQ ID NO: 16130 - protein, 14 aa, Homo sapiens
CAYLSPGDWYFDVW

SEQ ID NO: 16131 - protein, 23 aa, Homo sapiens
CARDPSLQQWLVLVGRSYYFDYW

SEQ ID NO: 16132 - protein, 19 aa, Homo sapiens
CARDQLPFNYYDSSGHDYW

SEQ ID NO: 16133 - protein, 24 aa, Homo sapiens
CARAANLFTWELLGDYYYYGMDVW

SEQ ID NO: 16134 - protein, 24 aa, Homo sapiens
CARLNGYSSGWTSYYYYYYGMDVW

SEQ ID NO: 16135 - protein, 19 aa, Homo sapiens
CARDQIVLEWLSQPLFDYW

SEQ ID NO: 16136 - protein, 20 aa, Homo sapiens
CAKNGAYNWNYGYYYYMDVW

SEQ ID NO: 16137 - protein, 14 aa, Homo sapiens
CAKLSSMIGDRDYW

SEQ ID NO: 16138 - protein, 19 aa, Homo sapiens
CARTHYRRDGELLWDFDYW

SEQ ID NO: 16139 - protein, 21 aa, Homo sapiens
CARSQRIITIFGVVTSGIDYW

SEQ ID NO: 16140 - protein, 22 aa, Homo sapiens
CARQHRSITIFGVAPTGWFDPW

SEQ ID NO: 16141 - protein, 17 aa, Homo sapiens
CAGSRSPSPVHDAFDIW

SEQ ID NO: 16142 - protein, 17 aa, Homo sapiens
CARVHSSTMANYYFAYW

SEQ ID NO: 16143 - protein, 26 aa, Homo sapiens
CARSVTDPNYVLRYFDWLSQGWFDPW

SEQ ID NO: 16144 - protein, 17 aa, Homo sapiens
CARDGVNDFWSGHYDYW

SEQ ID NO: 16145 - protein, 17 aa, Homo sapiens
CAVGYYGSGSKNWFDPW

SEQ ID NO: 16146 - protein, 21 aa, Homo sapiens
CARGPLYCSSTSCYRDHLDYW

SEQ ID NO: 16147 - protein, 20 aa, Homo sapiens
CARAVGITMIVVVIGAFDYW

SEQ ID NO: 16148 - protein, 21 aa, Homo sapiens
CARIQREITIFGVVILLFDYW

SEQ ID NO: 16149 - protein, 19 aa, Homo sapiens
CARVTGYSSSWLGDYFDYW

SEQ ID NO: 16150 - protein, 23 aa, Homo sapiens
CAKSRPPDCINMRCAWGYAFDIW

SEQ ID NO: 16151 - protein, 21 aa, Homo sapiens
CAREGLVGARPSYYYYYMDVW

SEQ ID NO: 16152 - protein, 21 aa, Homo sapiens
CARDAVDSSSSFRPYWYFDLW

SEQ ID NO: 16153 - protein, 17 aa, Homo sapiens
CAKDIGFALGQLEFDYW

SEQ ID NO: 16154 - protein, 15 aa, Homo sapiens
CAKFRDGQEDAFDIW

SEQ ID NO: 16155 - protein, 20 aa, Homo sapiens
CANTRDYYDSSGLRHAFDIW

SEQ ID NO: 16156 - protein, 20 aa, Homo sapiens
CARTPQWELSLYYYYYMDVW

SEQ ID NO: 16157 - protein, 14 aa, Homo sapiens
CAPSHRSKGNFDYW

SEQ ID NO: 16158 - protein, 18 aa, Homo sapiens
CARDKMGMATIFGWFDPW

SEQ ID NO: 16159 - protein, 17 aa, Homo sapiens
CTDGGNPNYYYYGMDVW

SEQ ID NO: 16160 - protein, 18 aa, Homo sapiens
CARDMGTFSYASTDQDYW

SEQ ID NO: 16161 - protein, 16 aa, Homo sapiens
CATAPPFGRINWFDPW

SEQ ID NO: 16162 - protein, 19 aa, Homo sapiens
CARDPETSYYDSSGPIDYW

SEQ ID NO: 16163 - protein, 21 aa, Homo sapiens
CARDRRAITFGGGSEGYFDYW

SEQ ID NO: 16164 - protein, 17 aa, Homo sapiens
CARASIVANRHDAFDIW

SEQ ID NO: 16165 - protein, 19 aa, Homo sapiens
CAKDFIPMIVVVIGAFDIW

SEQ ID NO: 16166 - protein, 23 aa, Homo sapiens
CARDRLFRYNRSSGVFYYYMDVW

SEQ ID NO: 16167 - protein, 18 aa, Homo sapiens
CTTERGYSYGYDGVFDYW

SEQ ID NO: 16168 - protein, 22 aa, Homo sapiens
CARETHWRSGSYYRSGDAFDVW

SEQ ID NO: 16169 - protein, 16 aa, Homo sapiens
CARALYENGGSHYDYW

SEQ ID NO: 16170 - protein, 20 aa, Homo sapiens
CAREGDYFDSSGYYNWFDPW

SEQ ID NO: 16171 - protein, 14 aa, Homo sapiens
CIRDEGVASSFNYW

SEQ ID NO: 16172 - protein, 23 aa, Homo sapiens
CARYRRYSSSPIFGYYYYYMDVW

SEQ ID NO: 16173 - protein, 16 aa, Homo sapiens
CAKDQTYKGTEWFDPW

SEQ ID NO: 16174 - protein, 14 aa, Homo sapiens
CGTWHSNSKTQGVF

SEQ ID NO: 16175 - protein, 23 aa, Homo sapiens
CARRHSFENDGFLWGPTDGFDVW

SEQ ID NO: 16176 - protein, 22 aa, Homo sapiens
CAKSLRKTFLEWLSSQHAFDIW

SEQ ID NO: 16177 - protein, 33 aa, Homo sapiens
CDWSSDVCSSDLTAVYYCARDDSSDAGNWFDPW

SEQ ID NO: 16178 - protein, 34 aa, Homo sapiens
CALPISAVYYCARGSITIYGVLILLPARGWFDRW

SEQ ID NO: 16179 - protein, 16 aa, Homo sapiens
CARVDSGSYFSWVDYW

SEQ ID NO: 16180 - protein, 16 aa, Homo sapiens
CARMRKDSSGWYFDYW

SEQ ID NO: 16181 - protein, 24 aa, Homo sapiens
CASKVPDYDILTGYYWVYGAFDIW

SEQ ID NO: 16182 - protein, 13 aa, Homo sapiens
CQSSDTSGNLYVF

SEQ ID NO: 16183 - protein, 21 aa, Homo sapiens
CAKDQAPAVDTAISDDAFDIW

SEQ ID NO: 16184 - protein, 22 aa, Homo sapiens
CARALQRVSESDYYYYYGMDVW

SEQ ID NO: 16185 - protein, 16 aa, Homo sapiens
CAHRRPGFFAGSFDYW

SEQ ID NO: 16186 - protein, 19 aa, Homo sapiens
CASIQPVTTWYYYYGMDVW

SEQ ID NO: 16187 - protein, 19 aa, Homo sapiens
CALGDCSGGSCYSDAFDIW

SEQ ID NO: 16188 - protein, 16 aa, Homo sapiens
CARVSIAVTGTDFDYW

SEQ ID NO: 16189 - protein, 21 aa, Homo sapiens
CARDGFRIMITFGGVTVPDYW

SEQ ID NO: 16190 - protein, 24 aa, Homo sapiens
CTRVETRYDFWSGYYKGEYYFDYW

SEQ ID NO: 16191 - protein, 22 aa, Homo sapiens
CARLGGYDFWSGYYQTYYFDYW

SEQ ID NO: 16192 - protein, 21 aa, Homo sapiens
CARVKIDRMATISYAVNFDYW

SEQ ID NO: 16193 - protein, 11 aa, Homo sapiens
CVSGDGYFQYW

SEQ ID NO: 16194 - protein, 22 aa, Homo sapiens
CTRGVDLGTFWGDSNYYAMDVW

SEQ ID NO: 16195 - protein, 24 aa, Homo sapiens
CARDMQEPLITMIVVVITFAFDIW

SEQ ID NO: 16196 - protein, 20 aa, Homo sapiens
CANHRLDTAKEYYYYYMDVW

SEQ ID NO: 16197 - protein, 22 aa, Homo sapiens
CTTAADTYYYGSGSYWVSVDYW

SEQ ID NO: 16198 - protein, 22 aa, Homo sapiens
CVRDLSPYYDFVSGLTDGMDVW

SEQ ID NO: 16199 - protein, 26 aa, Homo sapiens
CARGGLLYYDILTGYYAVPAAGFDYW

SEQ ID NO: 16200 - protein, 15 aa, Homo sapiens
CARERDMGDSPFFYW

SEQ ID NO: 16201 - protein, 20 aa, Homo sapiens
CSTDDYYDSTAYYYVPFDYW

SEQ ID NO: 16202 - protein, 19 aa, Homo sapiens
CTTEFYVMTTVTAYHFDYW

SEQ ID NO: 16203 - protein, 20 aa, Homo sapiens
CARDFRGRGYDSYYYYMDVW

SEQ ID NO: 16204 - protein, 20 aa, Homo sapiens
CASLEQQSFWGEPRYYMDVW

SEQ ID NO: 16205 - protein, 25 aa, Homo sapiens
CARVGDEYSSPWGGLDYYYYYMDVW

SEQ ID NO: 16206 - protein, 17 aa, Homo sapiens
CANFGDYYDSSGTDDYW

SEQ ID NO: 16207 - protein, 18 aa, Homo sapiens
CAKMGGIAAAGTGPGDYW

SEQ ID NO: 16208 - protein, 18 aa, Homo sapiens
CAKALSGITGTTSDFDYW

SEQ ID NO: 16209 - protein, 20 aa, Homo sapiens
CAKDGYYDSSGHSQIYFDYW

SEQ ID NO: 16210 - protein, 18 aa, Homo sapiens
CARGAPDYGDYGGAFDIW

SEQ ID NO: 16211 - protein, 13 aa, Homo sapiens
CQQYVDWPPKYGF

SEQ ID NO: 16212 - protein, 16 aa, Homo sapiens
CAKDKRDSGYDYLDDW

SEQ ID NO: 16213 - protein, 18 aa, Homo sapiens
CAKVSVVGGLRLFYFDYW

SEQ ID NO: 16214 - protein, 21 aa, Homo sapiens
CASLGLLDTAMEGWALPFDIW

SEQ ID NO: 16215 - protein, 17 aa, Homo sapiens
CAKDMAGTGTHDAFDVW

SEQ ID NO: 16216 - protein, 24 aa, Homo sapiens
CARGGCSGGSCFDYRYYYYGMDVW

SEQ ID NO: 16217 - protein, 19 aa, Homo sapiens
CARDFPLGDILTGYPFDYW

SEQ ID NO: 16218 - protein, 17 aa, Homo sapiens
CARDHGFGESLNCFDPW

SEQ ID NO: 16219 - protein, 24 aa, Homo sapiens
CAHRTENYYDSSGYYFSFVYFDYW

SEQ ID NO: 16220 - protein, 17 aa, Homo sapiens
CARDLETMTPVYAFDIW

SEQ ID NO: 16221 - protein, 19 aa, Homo sapiens
CARDMPNSSGYYDDAFDIW

SEQ ID NO: 16222 - protein, 16 aa, Homo sapiens
CAKDPGSVVGADFDYW

SEQ ID NO: 16223 - protein, 16 aa, Homo sapiens
CAKSSSSSLYNWFDPW

SEQ ID NO: 16224 - protein, 20 aa, Homo sapiens
CARDYGSGSYYNGEYYFDYW

SEQ ID NO: 16225 - protein, 17 aa, Homo sapiens
CARAPSGVSHPFHFDYW

SEQ ID NO: 16226 - protein, 14 aa, Homo sapiens
CARGAYSSSCPDYW

SEQ ID NO: 16227 - protein, 15 aa, Homo sapiens
CATDGDYYGSGTDYW

SEQ ID NO: 16228 - protein, 21 aa, Homo sapiens
CARDLYMRGPRLVYYYGMDVW

SEQ ID NO: 16229 - protein, 17 aa, Homo sapiens
CANVHSDITVGGWFDPW

SEQ ID NO: 16230 - protein, 20 aa, Homo sapiens
CTTARPGPHYYDSSGPFDYW

SEQ ID NO: 16231 - protein, 16 aa, Homo sapiens
CARILYGDHSLKFDYW

SEQ ID NO: 16232 - protein, 18 aa, Homo sapiens
CAKGRHVDTAMVGYFDYW

SEQ ID NO: 16233 - protein, 30 aa, Homo sapiens
CARDHLYYDFWSGYIPTDSHRHYYYYMDVW

SEQ ID NO: 16234 - protein, 22 aa, Homo sapiens
CAKDSRSITIFGVVRGDAFDIW

SEQ ID NO: 16235 - protein, 19 aa, Homo sapiens
CARENYDILTGTETPFDYW

SEQ ID NO: 16236 - protein, 30 aa, Homo sapiens
CARVIAFGCSSTSCYIGPPEAYYYYGMDVW

SEQ ID NO: 16237 - protein, 21 aa, Homo sapiens
CARVGRGYCSSTSCYTAFDPW

SEQ ID NO: 16238 - protein, 16 aa, Homo sapiens
CARARSGSYRAPDDYW

SEQ ID NO: 16239 - protein, 15 aa, Homo sapiens
CAKDLNEDTKAFDIW

SEQ ID NO: 16240 - protein, 15 aa, Homo sapiens
CARDQDDSSGWIDYW

SEQ ID NO: 16241 - protein, 23 aa, Homo sapiens
CARDLGTYSSSWYVPAVGWFDPW

SEQ ID NO: 16242 - protein, 23 aa, Homo sapiens
CAMRKVGYCSDANCYRMISFDFW

SEQ ID NO: 16243 - protein, 16 aa, Homo sapiens
CAHRRSGWTSGWFDPW

SEQ ID NO: 16244 - protein, 17 aa, Homo sapiens
CARAIGWTPRLFYMDVW

SEQ ID NO: 16245 - protein, 19 aa, Homo sapiens
CARDSSGYYYEPHDAFDIW

SEQ ID NO: 16246 - protein, 19 aa, Homo sapiens
CAGAREGYCNIISCYEEYW

SEQ ID NO: 16247 - protein, 14 aa, Homo sapiens
CARLRRHSGYPGYW

SEQ ID NO: 16248 - protein, 22 aa, Homo sapiens
CARDAGDYYESSGYYLGYFQDW

SEQ ID NO: 16249 - protein, 22 aa, Homo sapiens
CARDTWVDILTGYPYYYYMDVW

SEQ ID NO: 16250 - protein, 15 aa, Homo sapiens
CAKTRRNWVHDFDIW

SEQ ID NO: 16251 - protein, 21 aa, Homo sapiens
CARVGDDFWSGPPEGWWFDPW

SEQ ID NO: 16252 - protein, 14 aa, Homo sapiens
CARANEWPELFDYW

SEQ ID NO: 16253 - protein, 27 aa, Homo sapiens
CATESLVVVPAAKLGDYTSYYYGMDVW

SEQ ID NO: 16254 - protein, 21 aa, Homo sapiens
CARAPAAGSSWYYYYYGMDVW

SEQ ID NO: 16255 - protein, 14 aa, Homo sapiens
CATEPAPGTGFDYW

SEQ ID NO: 16256 - protein, 19 aa, Homo sapiens
CARPYCGGDCTYYWYFDLW

SEQ ID NO: 16257 - protein, 16 aa, Homo sapiens
CASLLGSGYEYAFDIW

SEQ ID NO: 16258 - protein, 24 aa, Homo sapiens
CARCKTDHYYDSSGYVPEYYFDYW

SEQ ID NO: 16259 - protein, 17 aa, Homo sapiens
CVREMDGDYDVLTNDYW

SEQ ID NO: 16260 - protein, 22 aa, Homo sapiens
CARDLRTTLGFYDSSTYPDDYW

SEQ ID NO: 16261 - protein, 17 aa, Homo sapiens
CAPLDLYSSSSPMFDPW

SEQ ID NO: 16262 - protein, 18 aa, Homo sapiens
CAKDIGPEVVVAEPFDYW

SEQ ID NO: 16263 - protein, 14 aa, Homo sapiens
CATSADTVTTFDYW

SEQ ID NO: 16264 - protein, 20 aa, Homo sapiens
CARANDEWLELGDYYYLDVW

SEQ ID NO: 16265 - protein, 20 aa, Homo sapiens
CARDGFNHYDSSGYYVFNYW

SEQ ID NO: 16266 - protein, 17 aa, Homo sapiens
CAKGHSSPYYYYHMDVW

SEQ ID NO: 16267 - protein, 20 aa, Homo sapiens
CAREPVCSGGSCRYDAFDIW

SEQ ID NO: 16268 - protein, 20 aa, Homo sapiens
CAKLPNYYDSSGYFTASDYW

SEQ ID NO: 16269 - protein, 18 aa, Homo sapiens
CARGGSPGIRDHNWLDPW

SEQ ID NO: 16270 - protein, 13 aa, Homo sapiens
CARLRPNQKIDYW

SEQ ID NO: 16271 - protein, 16 aa, Homo sapiens
CARDPFETSGYYYYYW

SEQ ID NO: 16272 - protein, 21 aa, Homo sapiens
CAKSRVEPTMGFYYYYGMDVW

SEQ ID NO: 16273 - protein, 23 aa, Homo sapiens
CARDNRVRGVDPTYYYYYYMDVW

SEQ ID NO: 16274 - protein, 19 aa, Homo sapiens
CAREVHSSGWYVGDAFDIW

SEQ ID NO: 16275 - protein, 17 aa, Homo sapiens
CARADYDSSGRQTFDYW

SEQ ID NO: 16276 - protein, 20 aa, Homo sapiens
CARGTYCSGSDCRSDGFDIW

SEQ ID NO: 16277 - protein, 13 aa, Homo sapiens
CARNTILNYMDVW

SEQ ID NO: 16278 - protein, 22 aa, Homo sapiens
CARQPYYYDSSGYYYVEAFDIW

SEQ ID NO: 16279 - protein, 33 aa, Homo sapiens
CDWSSDVCSSDLYYCASGGITMVRVRNNWFDPW

SEQ ID NO: 16280 - protein, 13 aa, Homo sapiens
CQQYNNWHTAWAF

SEQ ID NO: 16281 - protein, 16 aa, Homo sapiens
CARHVSMGMIRAFDYW

SEQ ID NO: 16282 - protein, 21 aa, Homo sapiens
CARVGVYDSSGYLLPYYFDYW

SEQ ID NO: 16283 - protein, 18 aa, Homo sapiens
CARDSSSLEFGAYYFDQW

SEQ ID NO: 16284 - protein, 24 aa, Homo sapiens
CAKDPAPGYDDSSVTGWGYYFDYW

SEQ ID NO: 16285 - protein, 15 aa, Homo sapiens
CAREYYYASYGMDVW

SEQ ID NO: 16286 - protein, 17 aa, Homo sapiens
CARLRFEYISSDLFDYW

SEQ ID NO: 16287 - protein, 20 aa, Homo sapiens
CAKMTTVTTGVDYYYGMDVW

SEQ ID NO: 16288 - protein, 19 aa, Homo sapiens
CASDGLAAAGTWYYYMDVW

SEQ ID NO: 16289 - protein, 17 aa, Homo sapiens
CAHRPGIAARLNGFDIW

SEQ ID NO: 16290 - protein, 18 aa, Homo sapiens
CAKFSFSGFDILTGPDYW

SEQ ID NO: 16291 - protein, 16 aa, Homo sapiens
CARDNRYGPRKTFDFW

SEQ ID NO: 16292 - protein, 16 aa, Homo sapiens
CAKDADMVGATWFDSW

SEQ ID NO: 16293 - protein, 21 aa, Homo sapiens
CAKLAYFETAYCGGDCYFDYW

SEQ ID NO: 16294 - protein, 18 aa, Homo sapiens
CARDLIDYDSSVIAFDMW

SEQ ID NO: 16295 - protein, 20 aa, Homo sapiens
CARVGEEICGYSYGCPFDYW

SEQ ID NO: 16296 - protein, 17 aa, Homo sapiens
CARARQMGLIVVVPDYW

SEQ ID NO: 16297 - protein, 24 aa, Homo sapiens
CARDRDIVVVPAAIRDYYYGMDVW

SEQ ID NO: 16298 - protein, 23 aa, Homo sapiens
CARLVGSIGDNSGYYYLSHFDYW

SEQ ID NO: 16299 - protein, 15 aa, Homo sapiens
CAKGPWGGGNLIDYW

SEQ ID NO: 16300 - protein, 26 aa, Homo sapiens
CARGDYYDGSGTYYPSYYYYYYMDVW

SEQ ID NO: 16301 - protein, 23 aa, Homo sapiens
CARDLALVDDYGDYAQDDAFDIW

SEQ ID NO: 16302 - protein, 11 aa, Homo sapiens
CQKYNSAPHAF

SEQ ID NO: 16303 - protein, 21 aa, Homo sapiens
CAKIINYYDSSGYYSGAGDYW

SEQ ID NO: 16304 - protein, 24 aa, Homo sapiens
CARIPRSYYDSSGYYLQVWHFDYW

SEQ ID NO: 16305 - protein, 17 aa, Homo sapiens
CARDPDYARRSDAFDIW

SEQ ID NO: 16306 - protein, 20 aa, Homo sapiens
CARVRGYCSGGSCPYYFDYW

SEQ ID NO: 16307 - protein, 18 aa, Homo sapiens
CAKDIYPIAAAGTWFDPW

SEQ ID NO: 16308 - protein, 13 aa, Homo sapiens
CARENTGYYMSYW

SEQ ID NO: 16309 - protein, 17 aa, Homo sapiens
CAKTVLDDRQRGYFDLW

SEQ ID NO: 16310 - protein, 17 aa, Homo sapiens
CARGHYYGDSYWYFDLW

SEQ ID NO: 16311 - protein, 20 aa, Homo sapiens
CAHILQLYSSAWARSWFDPW

SEQ ID NO: 16312 - protein, 16 aa, Homo sapiens
CAKGAAPIAVAGIDYW

SEQ ID NO: 16313 - protein, 18 aa, Homo sapiens
CAHRDGNVVRGVIAFDYW

SEQ ID NO: 16314 - protein, 20 aa, Homo sapiens
CARDITVWSGYYTLDAFDIW

SEQ ID NO: 16315 - protein, 14 aa, Homo sapiens
CAREVTMIVVVDYW

SEQ ID NO: 16316 - protein, 21 aa, Homo sapiens
CATFDLYYYDSSGQNDPFDYW

SEQ ID NO: 16317 - protein, 16 aa, Homo sapiens
CAKGQLGILTGCLDYW

SEQ ID NO: 16318 - protein, 17 aa, Homo sapiens
CARIQSDTAMVTWFDYW

SEQ ID NO: 16319 - protein, 18 aa, Homo sapiens
CATDELAVASTAWYFDYW

SEQ ID NO: 16320 - protein, 25 aa, Homo sapiens
CARVVVDCTNGVCFGGDYEYHFDYW

SEQ ID NO: 16321 - protein, 19 aa, Homo sapiens
CASLPSYSSSWSTHAFDIW

SEQ ID NO: 16322 - protein, 22 aa, Homo sapiens
CARYSTYYYDSSGYYSEGLDYW

SEQ ID NO: 16323 - protein, 11 aa, Homo sapiens [sequence omitted]

SEQ ID NO: 16324 - protein, 17 aa, Homo sapiens
CATSPAVWGSYRYCDYW

SEQ ID NO: 16325 - protein, 20 aa, Homo sapiens
CARARSGHWLVPTGDAFDIW

SEQ ID NO: 16326 - protein, 20 aa, Homo sapiens
CARPLPKLWFGEFHDAFDIW

SEQ ID NO: 16327 - protein, 13 aa, Homo sapiens [sequence omitted]

SEQ ID NO: 16328 - protein, 18 aa, Homo sapiens
CARDLAVAVPPASWFDPW

SEQ ID NO: 16329 - protein, 12 aa, Homo sapiens
CVKDLSGKDDYW

SEQ ID NO: 16330 - protein, 16 aa, Homo sapiens
CVRLGEFPFFSPPDYW

SEQ ID NO: 16331 - protein, 18 aa, Homo sapiens
CRVVPAAIPYYYYGMDVW

SEQ ID NO: 16332 - protein, 25 aa, Homo sapiens
CARIRAVWGLRYCSGGSCYGGFDYW

SEQ ID NO: 16333 - protein, 11 aa, Homo sapiens
CGVDYYYMDVW

SEQ ID NO: 16334 - protein, 23 aa, Homo sapiens
CATGPPYYYDSSGYYRDCWFDPW

SEQ ID NO: 16335 - protein, 19 aa, Homo sapiens
CARDWEYSSSSGEYYFDYW

SEQ ID NO: 16336 - protein, 13 aa, Homo sapiens
CSRDNSPEEFDSW

SEQ ID NO: 16337 - protein, 16 aa, Homo sapiens
CAKAVVPAAIYYFDYW

SEQ ID NO: 16338 - protein, 19 aa, Homo sapiens
CAHSNYDILTGYFLVHDYW

SEQ ID NO: 16339 - protein, 17 aa, Homo sapiens
CATSFAVFSSGWYFDYW

SEQ ID NO: 16340 - protein, 21 aa, Homo sapiens
CAKDIDLWLAGDPPRNCFDYW

SEQ ID NO: 16341 - protein, 22 aa, Homo sapiens
CAKIGGSNYYDSSGYYNGPDYW

SEQ ID NO: 16342 - protein, 17 aa, Homo sapiens
CASSARARQQLVPFDYW

SEQ ID NO: 16343 - protein, 16 aa, Homo sapiens
CARIQRGYSYGYRDYW

SEQ ID NO: 16344 - protein, 21 aa, Homo sapiens
CAKSWPIAARPVQASLFFDYW

SEQ ID NO: 16345 - protein, 22 aa, Homo sapiens
CARGAGYDILTGYKYYYGMDVW

SEQ ID NO: 16346 - protein, 19 aa, Homo sapiens
CARVEGGAVAGKGHYFDIW

SEQ ID NO: 16347 - protein, 19 aa, Homo sapiens
CARFNDYGDLIDAVTLDYW

SEQ ID NO: 16348 - protein, 19 aa, Homo sapiens
CAKGDSTGHRTVTPGADYW

SEQ ID NO: 16349 - protein, 23 aa, Homo sapiens
CTRLLYYYDSSGYSHYYYGMDVW

SEQ ID NO: 16350 - protein, 19 aa, Homo sapiens
CAAQYCTSSSCYGDTFDIW

SEQ ID NO: 16351 - protein, 18 aa, Homo sapiens
CARDGGGSYLGADAFDIW

SEQ ID NO: 16352 - protein, 20 aa, Homo sapiens
CTRDAPLESSYRGFVQFDYW

SEQ ID NO: 16353 - protein, 18 aa, Homo sapiens
CARTMGVESGQSDAFDIW

SEQ ID NO: 16354 - protein, 13 aa, Homo sapiens
CQSYDSRDHQMVF

SEQ ID NO: 16355 - protein, 23 aa, Homo sapiens
CARETGDYYDSSGYYYGGDFDYW

SEQ ID NO: 16356 - protein, 20 aa, Homo sapiens
CARDQVPRGYSYGDNWFDPW

SEQ ID NO: 16357 - protein, 23 aa, Homo sapiens
CARAPVYLWFGELRYYYYGMDVW

SEQ ID NO: 16358 - protein, 19 aa, Homo sapiens
CARGLWSSSWLPHFYFDYW

SEQ ID NO: 16359 - protein, 16 aa, Homo sapiens
CAKLPSIADYTYFDYW

SEQ ID NO: 16360 - protein, 18 aa, Homo sapiens
CARSLLGVLRFLECFDYW

SEQ ID NO: 16361 - protein, 17 aa, Homo sapiens
CARDVGFGVLRGYFDYW

SEQ ID NO: 16362 - protein, 19 aa, Homo sapiens
CARVRYYHGSEIPYCFDMW

SEQ ID NO: 16363 - protein, 17 aa, Homo sapiens
CATYGSGSYSSLYMDVW

SEQ ID NO: 16364 - protein, 18 aa, Homo sapiens
CARVGYYDSSGYHWFDPW

SEQ ID NO: 16365 - protein, 15 aa, Homo sapiens
CARGDIVATIPPDYW

SEQ ID NO: 16366 - protein, 23 aa, Homo sapiens
CARGLRFLEWLLDYYYYYGMDVW

SEQ ID NO: 16367 - protein, 19 aa, Homo sapiens
CARIWCRDGYNYDGAFDIW

SEQ ID NO: 16368 - protein, 21 aa, Homo sapiens
CATGPYDFWSGPKMQNWFDPW

SEQ ID NO: 16369 - protein, 19 aa, Homo sapiens
CARTNDVYYYDSSGPLDYW

SEQ ID NO: 16370 - protein, 16 aa, Homo sapiens
CARNQWGVEGDAFDIW

SEQ ID NO: 16371 - protein, 14 aa, Homo sapiens
CQTADTSGTFHAVF

SEQ ID NO: 16372 - protein, 19 aa, Homo sapiens
CASTYYDSSGYHPLPFDYW

SEQ ID NO: 16373 - protein, 21 aa, Homo sapiens
CAKDIPHTLYYYDGCCWFDPW

SEQ ID NO: 16374 - protein, 21 aa, Homo sapiens
CAKGGGDHVPTYYYYYYMDVW

SEQ ID NO: 16375 - protein, 19 aa, Homo sapiens
CAKDSDYDFWSGSNYMDVW

SEQ ID NO: 16376 - protein, 22 aa, Homo sapiens
CAREYYDFWSGYRSPDSWFDPW

SEQ ID NO: 16377 - protein, 17 aa, Homo sapiens
CATGVAFPGLGGWFDPW

SEQ ID NO: 16378 - protein, 24 aa, Homo sapiens
CARGLSIAAAGTLWIYYYYGMDVW

SEQ ID NO: 16379 - protein, 20 aa, Homo sapiens
CARGNYDILTGYYNGWFDPW

SEQ ID NO: 16380 - protein, 26 aa, Homo sapiens
CAKDSNDGYCTGGVCYGGSYNWFDPW

SEQ ID NO: 16381 - protein, 19 aa, Homo sapiens
CARGLVPPWFGAQGAFDIW

SEQ ID NO: 16382 - protein, 29 aa, Homo sapiens
CARGMSIRYCSSTSCLAGFYYYYYYMDVW

SEQ ID NO: 16383 - protein, 17 aa, Homo sapiens
CARDFSPYSGYDNCDYW

SEQ ID NO: 16384 - protein, 20 aa, Homo sapiens
CARDRRYDSSGYYLPNFDYW

SEQ ID NO: 16385 - protein, 16 aa, Homo sapiens
CAREDRLLFRGWFDPW

SEQ ID NO: 16386 - protein, 20 aa, Homo sapiens
CAHRRRFLEGTSFSGAFDSW

SEQ ID NO: 16387 - protein, 25 aa, Homo sapiens
CARVKSDYDYVWGSPGHYYYYMDVW

SEQ ID NO: 16388 - protein, 17 aa, Homo sapiens
CARHYFRAMPRGFFDYW

SEQ ID NO: 16389 - protein, 20 aa, Homo sapiens
CARFGRGDFWSGYSDAFDIW

SEQ ID NO: 16390 - protein, 21 aa, Homo sapiens
CAKDGLVDYYGSGSRHWFDPW

SEQ ID NO: 16391 - protein, 24 aa, Homo sapiens
CATDRLVVVPAAIGTYYYYGMDVW

SEQ ID NO: 16392 - protein, 12 aa, Homo sapiens
CLQYGPSPSWTF

SEQ ID NO: 16393 - protein, 18 aa, Homo sapiens
CARVSEEYYDFSYAFDIW

SEQ ID NO: 16394 - protein, 18 aa, Homo sapiens
CAKLYDFWSGYYSTRDYW

SEQ ID NO: 16395 - protein, 13 aa, Homo sapiens
CARVWGGYRIDYW

SEQ ID NO: 16396 - protein, 18 aa, Homo sapiens
CAKVFTVTTGLGNDVDYW

SEQ ID NO: 16397 - protein, 18 aa, Homo sapiens
CARDLVPLDGSLGAFDIW

SEQ ID NO: 16398 - protein, 19 aa, Homo sapiens
CARGGWDILTGYPYVFDYW

SEQ ID NO: 16399 - protein, 16 aa, Homo sapiens
CARDSHYGDYVHFDYW

SEQ ID NO: 16400 - protein, 24 aa, Homo sapiens
CAKDPMYDYVWGSYRQGPYYFDYW

SEQ ID NO: 16401 - protein, 18 aa, Homo sapiens
CAKDSERGGVVVAATDYW

SEQ ID NO: 16402 - protein, 15 aa, Homo sapiens
CASLNSIGNGDFDYW

SEQ ID NO: 16403 - protein, 19 aa, Homo sapiens
CARASFGDSYGTDYYFDYW

SEQ ID NO: 16404 - protein, 22 aa, Homo sapiens
CAKDPPYYDILTGYYGYYFDYW

SEQ ID NO: 16405 - protein, 17 aa, Homo sapiens
CARGRDNDIVTGSFGYW

SEQ ID NO: 16406 - protein, 20 aa, Homo sapiens
CAKDFTPKLELRFVSWFDPW

SEQ ID NO: 16407 - protein, 16 aa, Homo sapiens
CAKVAHGSSPQEVDYW

SEQ ID NO: 16408 - protein, 16 aa, Homo sapiens
CAKGLSGSYYGSFDYW

SEQ ID NO: 16409 - protein, 14 aa, Homo sapiens
CVAVVTGTTGIDYW

SEQ ID NO: 16410 - protein, 23 aa, Homo sapiens
CASDRGPPGYCSGGSCYGTFDYW

SEQ ID NO: 16411 - protein, 22 aa, Homo sapiens
CAKDDFFGGVVVVAADRGFDYW

SEQ ID NO: 16412 - protein, 29 aa, Homo sapiens
CARESMYDFWSGYYFINQRDYYYYGMDVW

SEQ ID NO: 16413 - protein, 18 aa, Homo sapiens
CARDGVFPYYEGSGEDYW

SEQ ID NO: 16414 - protein, 15 aa, Homo sapiens
CAKDFLEWYTALDYW

SEQ ID NO: 16415 - protein, 21 aa, Homo sapiens
CARDYYDFWSAPGLQGWFDPW

SEQ ID NO: 16416 - protein, 11 aa, Homo sapiens
CHQYNSFSESF

SEQ ID NO: 16417 - protein, 19 aa, Homo sapiens
CAKDRNYADYGLAWWFDPW

SEQ ID NO: 16418 - protein, 18 aa, Homo sapiens
CARDGVRGYSSTWRLDYW

SEQ ID NO: 16419 - protein, 17 aa, Homo sapiens
CAKAFYDSSGLDAFDIW

SEQ ID NO: 16420 - protein, 24 aa, Homo sapiens
CAKEGYYYDSSGYYYGLRYYFDYW

SEQ ID NO: 16421 - protein, 14 aa, Homo sapiens
CARQIPPGPEFDYW

SEQ ID NO: 16422 - protein, 18 aa, Homo sapiens
CAREVMGSGWLNDAFDIW

SEQ ID NO: 16423 - protein, 16 aa, Homo sapiens
CARTYYGDYDKYVDYW

SEQ ID NO: 16424 - protein, 19 aa, Homo sapiens
CARTRDYGDYDPEWHFDYW

SEQ ID NO: 16425 - protein, 20 aa, Homo sapiens
CARDSRPLRSYYQRDAFDIW

SEQ ID NO: 16426 - protein, 16 aa, Homo sapiens
CARSVTTDYHYYMDVW

SEQ ID NO: 16427 - protein, 13 aa, Homo sapiens
CAAHTPSLEWDYW

SEQ ID NO: 16428 - protein, 22 aa, Homo sapiens
CAKDEVLRYFDWDYYYYGMDVW

SEQ ID NO: 16429 - protein, 14 aa, Homo sapiens
CARRKVTPGAFDIW

SEQ ID NO: 16430 - protein, 15 aa, Homo sapiens
CARHGTWIQLWVDYW

SEQ ID NO: 16431 - protein, 16 aa, Homo sapiens
CARENSSGPKPYFDYW

SEQ ID NO: 16432 - protein, 22 aa, Homo sapiens
CARDQDPYYYDSSGYYDAFDIW

SEQ ID NO: 16433 - protein, 16 aa, Homo sapiens
CAKAVGPYFPEQFDPW

SEQ ID NO: 16434 - protein, 16 aa, Homo sapiens
CARHFWLGASSYFDYW

SEQ ID NO: 16435 - protein, 14 aa, Homo sapiens
CARAVRNQLLPDYW

SEQ ID NO: 16436 - protein, 15 aa, Homo sapiens
CARDWGFGELSEDYW

SEQ ID NO: 16437 - protein, 17 aa, Homo sapiens
CARQYSSTSLFDWFDYW

SEQ ID NO: 16438 - protein, 17 aa, Homo sapiens
CARIPNDSSGWYYIDYW

SEQ ID NO: 16439 - protein, 19 aa, Homo sapiens
CAKDHPMHIVMVTAFFDSW

SEQ ID NO: 16440 - protein, 16 aa, Homo sapiens
CAKLANGVATITADYW

SEQ ID NO: 16441 - protein, 15 aa, Homo sapiens
CATGSSVITLEFDIW

SEQ ID NO: 16442 - protein, 19 aa, Homo sapiens
CAKDLRSLWFGENYYMDVW

SEQ ID NO: 16443 - protein, 20 aa, Homo sapiens
CASPRTHYYDSSGYSGFDYW

SEQ ID NO: 16444 - protein, 28 aa, Homo sapiens
CAKDLVHYDFWSGYLTTTYYYYYGMDVW

SEQ ID NO: 16445 - protein, 19 aa, Homo sapiens
CARVSDCSSTSCSYYMDVW

SEQ ID NO: 16446 - protein, 27 aa, Homo sapiens
CARDGAAYDFWSGRPLYYYYYYYMDVW

SEQ ID NO: 16447 - protein, 20 aa, Homo sapiens
CARDGTLSMGPTVVDWFDPW

SEQ ID NO: 16448 - protein, 16 aa, Homo sapiens
CARVGDYGSGSHFDYW

SEQ ID NO: 16449 - protein, 22 aa, Homo sapiens
CARDRVDSSGYYPRYYYGMDVW

SEQ ID NO: 16450 - protein, 16 aa, Homo sapiens
CARIMGSRVVTPIDYW

SEQ ID NO: 16451 - protein, 22 aa, Homo sapiens
CARVLMITFGGVIVIPGGFDPW

SEQ ID NO: 16452 - protein, 18 aa, Homo sapiens
CARDRPSYDSSGYYLDYW

SEQ ID NO: 16453 - protein, 14 aa, Homo sapiens
CTGGVCHDFPFDPW

SEQ ID NO: 16454 - protein, 16 aa, Homo sapiens
CAKDIGIVATTEFDYW

SEQ ID NO: 16455 - protein, 20 aa, Homo sapiens
CAKAITIFGVVINPGGFDYW

SEQ ID NO: 16456 - protein, 18 aa, Homo sapiens
CARSTSEVYSSSSTFDYW

SEQ ID NO: 16457 - protein, 19 aa, Homo sapiens
CAKDTYHDFWSGYLAFDYW

SEQ ID NO: 16458 - protein, 18 aa, Homo sapiens
CAREHYDTSSYLSGLDYW

SEQ ID NO: 16459 - protein, 14 aa, Homo sapiens
CAKLRDDDSYSDYW

SEQ ID NO: 16460 - protein, 15 aa, Homo sapiens
CVRGDMKTLVGFDLW

SEQ ID NO: 16461 - protein, 17 aa, Homo sapiens
CARLSVINGDYFAFDVW

SEQ ID NO: 16462 - protein, 17 aa, Homo sapiens
CARASSGTTNPYNFDYW

SEQ ID NO: 16463 - protein, 35 aa, Homo sapiens
CDWSSDVCSSDLEDTAMYYCARETIVVDDSRFDYW

SEQ ID NO: 16464 - protein, 15 aa, Homo sapiens
CAKDIVPLAQTIDYW

SEQ ID NO: 16465 - protein, 21 aa, Homo sapiens
CARFGGADIVATTGTSYFDYW

SEQ ID NO: 16466 - protein, 22 aa, Homo sapiens
CAGILRHTKTTYGPPKNWFDPW

SEQ ID NO: 16467 - protein, 18 aa, Homo sapiens
CARWDDFWSGYNDAFDIW

SEQ ID NO: 16468 - protein, 18 aa, Homo sapiens
CTYYCARHRGAEEEIDYW

SEQ ID NO: 16469 - protein, 20 aa, Homo sapiens
CAKSSQLRFLEWLPSEFDSW

SEQ ID NO: 16470 - protein, 18 aa, Homo sapiens
CVRYTASSSFGLHWFDYW

SEQ ID NO: 16471 - protein, 20 aa, Homo sapiens
CARDRHSYYDFWSAHKPDYW

SEQ ID NO: 16472 - protein, 15 aa, Homo sapiens
CVSWDYSNYRPPDYW

SEQ ID NO: 16473 - protein, 30 aa, Homo sapiens
CAKDREYYDFWSGYLTPSQNAYYYYGMDVW

SEQ ID NO: 16474 - protein, 16 aa, Homo sapiens
CAKSYSSSWYRYFEHW

SEQ ID NO: 16475 - protein, 24 aa, Homo sapiens
CVRGSITVFGILIMLPARGWFDPW

SEQ ID NO: 16476 - protein, 17 aa, Homo sapiens
CARIRAGIAVAGIFDYW

SEQ ID NO: 16477 - protein, 22 aa, Homo sapiens
CARHGHSSGWDHVLYYYYMDVW

SEQ ID NO: 16478 - protein, 15 aa, Homo sapiens
CASSGGDYGMGVDYW

SEQ ID NO: 16479 - protein, 27 aa, Homo sapiens
CAREAWEDYYGSGSYLSAPYYYGMDVW

SEQ ID NO: 16480 - protein, 18 aa, Homo sapiens
CARDRPLGFFSPDAFDIW

SEQ ID NO: 16481 - protein, 16 aa, Homo sapiens
CAKGYIAIPMSAFDYW

SEQ ID NO: 16482 - protein, 17 aa, Homo sapiens
CAGVPLTSPNYWYFDLW

SEQ ID NO: 16483 - protein, 18 aa, Homo sapiens
CATGPVGSPSYYYYMDVW

SEQ ID NO: 16484 - protein, 17 aa, Homo sapiens
CAKGFLWSGELLYFDSW

SEQ ID NO: 16485 - protein, 17 aa, Homo sapiens
CARDIVNGYDSDYFDHW

SEQ ID NO: 16486 - protein, 33 aa, Homo sapiens
CDWSSDVCSSDLEDTAVYYCARIPSSSWEFDYW

SEQ ID NO: 16487 - protein, 21 aa, Homo sapiens
CAGALYYDFWSGYPIHPFDYW

SEQ ID NO: 16488 - protein, 18 aa, Homo sapiens
CARALYDSRTWYYYMDVW

SEQ ID NO: 16489 - protein, 22 aa, Homo sapiens
CARDGIMITFGGVIENGLVDYW

SEQ ID NO: 16490 - protein, 18 aa, Homo sapiens
CAKLPHPYGYGDYGYDYW

SEQ ID NO: 16491 - protein, 18 aa, Homo sapiens
CAVYIPAPGGAGDAFDIW

SEQ ID NO: 16492 - protein, 22 aa, Homo sapiens
CANLNTPGYCSSTSCWDWFDPW

SEQ ID NO: 16493 - protein, 18 aa, Homo sapiens
CANMGTFLWFGELYTDYW

SEQ ID NO: 16494 - protein, 27 aa, Homo sapiens
CARFRDLDEAAAGIDLGPGRFDYMDVW

SEQ ID NO: 16495 - protein, 19 aa, Homo sapiens
CARLGMEMATRPAYYFDYW

SEQ ID NO: 16496 - protein, 14 aa, Homo sapiens
CASGTVWLSHVDYW

SEQ ID NO: 16497 - protein, 18 aa, Homo sapiens
CARVGGSQWFGTSYFDYW

SEQ ID NO: 16498 - protein, 18 aa, Homo sapiens
CAKEVTIFGVVTPGFDYW

SEQ ID NO: 16499 - protein, 20 aa, Homo sapiens
CARDLFSDSSSWYGQWFDPW

SEQ ID NO: 16500 - protein, 20 aa, Homo sapiens
CARAVYGSGSYSRDWYFDLW

SEQ ID NO: 16501 - protein, 23 aa, Homo sapiens
CARESGFSTVSYPYYYYYFIDVW

SEQ ID NO: 16502 - protein, 18 aa, Homo sapiens
CAKLLSRYGDYDDAFDIW

SEQ ID NO: 16503 - protein, 15 aa, Homo sapiens
CAKPGEVRYNWFDPW

SEQ ID NO: 16504 - protein, 20 aa, Homo sapiens
CARASPYYDILTGYRVGDYW

SEQ ID NO: 16505 - protein, 18 aa, Homo sapiens
CVKDTSLVEVRSRGFDYW

SEQ ID NO: 16506 - protein, 13 aa, Homo sapiens
CAKEPFDNWFDPW

SEQ ID NO: 16507 - protein, 16 aa, Homo sapiens
CAHRQNNDLSFSFDYW

SEQ ID NO: 16508 - protein, 18 aa, Homo sapiens
CAREDTWDSYGSNYFDSW

SEQ ID NO: 16509 - protein, 17 aa, Homo sapiens
CATGGLGPYYYYGMDVW

SEQ ID NO: 16510 - protein, 13 aa, Homo sapiens
CAREGIAVAVDYW

SEQ ID NO: 16511 - protein, 18 aa, Homo sapiens
CARFGGDGCTTDDCYDYW

SEQ ID NO: 16512 - protein, 14 aa, Homo sapiens
CARVSRADFWVDYW

SEQ ID NO: 16513 - protein, 15 aa, Homo sapiens
CARGGDRQWLVDDYW

SEQ ID NO: 16514 - protein, 15 aa, Homo sapiens
CAPNPFSYWDGPDYW

SEQ ID NO: 16515 - protein, 16 aa, Homo sapiens
CAKVLCSGCPTYLDYW

SEQ ID NO: 16516 - protein, 11 aa, Homo sapiens
CQQYDRTPFNF

SEQ ID NO: 16517 - protein, 21 aa, Homo sapiens
CAKLTPYYYDSSNYHDVFHIW

SEQ ID NO: 16518 - protein, 26 aa, Homo sapiens
CAKDRTLKWVTMIVVANIYPDAFDIW

SEQ ID NO: 16519 - protein, 28 aa, Homo sapiens
CARDGDYYDSSGYYYPPRLGYYYGMDVW

SEQ ID NO: 16520 - protein, 21 aa, Homo sapiens
CARVPPLYNYGYATTPNFDYW

SEQ ID NO: 16521 - protein, 19 aa, Homo sapiens
CAGGLNYQLLYGLDAFDFW

SEQ ID NO: 16522 - protein, 18 aa, Homo sapiens
CTRGLDSSTWYHPGFDPW

SEQ ID NO: 16523 - protein, 22 aa, Homo sapiens
CARTEVGITMIVVVSMGAFDTW

SEQ ID NO: 16524 - protein, 15 aa, Homo sapiens
CARAKPATGWLIDYW

SEQ ID NO: 16525 - protein, 14 aa, Homo sapiens
CAHRLYRNTYFDYW

SEQ ID NO: 16526 - protein, 22 aa, Homo sapiens
CARINPGWRISDSFHYSYMDVW

SEQ ID NO: 16527 - protein, 20 aa, Homo sapiens
CARTLWLFPGFEDSYYFDYW

SEQ ID NO: 16528 - protein, 23 aa, Homo sapiens
CATAPLTYCSGGSCYPGGWFDPW

SEQ ID NO: 16529 - protein, 21 aa, Homo sapiens
CARDAALYYYDSSGYHWFDPW

SEQ ID NO: 16530 - protein, 17 aa, Homo sapiens
CARGGAYDGSAYFFDYW

SEQ ID NO: 16531 - protein, 22 aa, Homo sapiens
CSRDSTPIFAVENQGPDVFDIW

SEQ ID NO: 16532 - protein, 16 aa, Homo sapiens
CAHRRVGNWNYWFDPW

SEQ ID NO: 16533 - protein, 16 aa, Homo sapiens
CARDFYGDPLWYFDLW

SEQ ID NO: 16534 - protein, 15 aa, Homo sapiens
CAKVADGYNSHFDYW

SEQ ID NO: 16535 - protein, 26 aa, Homo sapiens
CARDIVVVPAAPGGTNYYYYYGMDVW

SEQ ID NO: 16536 - protein, 26 aa, Homo sapiens
CARGKDIVLAVIEGQPDSYYYYMDVW

SEQ ID NO: 16537 - protein, 18 aa, Homo sapiens
CARDHDSSGSPSDTFGYW

SEQ ID NO: 16538 - protein, 16 aa, Homo sapiens
CAKDRGQLVLGYFDYW

SEQ ID NO: 16539 - protein, 13 aa, Homo sapiens
CAKATYDQCFDYW

SEQ ID NO: 16540 - protein, 20 aa, Homo sapiens
CAKAFRITIFGVVTYYFDYW

SEQ ID NO: 16541 - protein, 22 aa, Homo sapiens
CARDGGGYCSGSSCYYNWFDPW

SEQ ID NO: 16542 - protein, 28 aa, Homo sapiens
CARDFRHDIVVVPAAISPYYYYYGMDVW

SEQ ID NO: 16543 - protein, 18 aa, Homo sapiens
CAKLLDSSGYLNGIQDYW

SEQ ID NO: 16544 - protein, 20 aa, Homo sapiens
CAKDMFAIGVAGTITYFDYW

SEQ ID NO: 16545 - protein, 21 aa, Homo sapiens
CARHDIAAAGVNYYYYYMDVW

SEQ ID NO: 16546 - protein, 18 aa, Homo sapiens
CARNGVRDGYNQWWIDYW

SEQ ID NO: 16547 - protein, 11 aa, Homo sapiens
CQHSYITPYAF

SEQ ID NO: 16548 - protein, 16 aa, Homo sapiens
CARDMTTVTTWRFDYW

SEQ ID NO: 16549 - protein, 19 aa, Homo sapiens
CALMSDSLNRLRYNWFDPW

SEQ ID NO: 16550 - protein, 14 aa, Homo sapiens
CASDFGPHGAFDIW

SEQ ID NO: 16551 - protein, 18 aa, Homo sapiens
CAKVQKQRGYSYEQSDYW

SEQ ID NO: 16552 - protein, 19 aa, Homo sapiens
CANTQALVTTHHAEYFQHW

SEQ ID NO: 16553 - protein, 19 aa, Homo sapiens
CARDELVAATSTLGWFDPW

SEQ ID NO: 16554 - protein, 15 aa, Homo sapiens
CAKLDDRYGDLTDYW

SEQ ID NO: 16555 - protein, 19 aa, Homo sapiens
CAKGTSIHFYDSNAYYDHW

SEQ ID NO: 16556 - protein, 23 aa, Homo sapiens
CARDQLGYYYDSSGYWVSWFDPW

SEQ ID NO: 16557 - protein, 14 aa, Homo sapiens
CARERYDFEAFDIW

SEQ ID NO: 16558 - protein, 8 aa, Homo sapiens
CQQDYNLF

SEQ ID NO: 16559 - protein, 26 aa, Homo sapiens
CARVVRDVLRFLEWPTGYYWYGMDVW

SEQ ID NO: 16560 - protein, 24 aa, Homo sapiens
CARHVLGVTMIVVVITHPSLFDYW

SEQ ID NO: 16561 - protein, 17 aa, Homo sapiens
CARAGVVPAARSAFDIW

SEQ ID NO: 16562 - protein, 23 aa, Homo sapiens
CARSAYYDFWSGYLYYYYYMDVW

SEQ ID NO: 16563 - protein, 20 aa, Homo sapiens
CATGLSVAVTDVLFDAFDVW

SEQ ID NO: 16564 - protein, 23 aa, Homo sapiens
CAKATVSTMVRGLWPYYYGMDVW

SEQ ID NO: 16565 - protein, 19 aa, Homo sapiens
CARAIGDGYNLLDPCFDYW

SEQ ID NO: 16566 - protein, 19 aa, Homo sapiens
CARENDDFWSGYYRWFDPW

SEQ ID NO: 16567 - protein, 20 aa, Homo sapiens
CARGPYSSSWYGLKNWFDPW

SEQ ID NO: 16568 - protein, 12 aa, Homo sapiens
CQEFNSYSPWIF

SEQ ID NO: 16569 - protein, 16 aa, Homo sapiens
CARRPWLSTRESVDYW

SEQ ID NO: 16570 - protein, 18 aa, Homo sapiens
CARDYVWGNSPADFFEIW

SEQ ID NO: 16571 - protein, 14 aa, Homo sapiens
CAKSERALGAFDIW

SEQ ID NO: 16572 - protein, 20 aa, Homo sapiens
CARHEVSCDGDCFLNYFDNW

SEQ ID NO: 16573 - protein, 18 aa, Homo sapiens
CASYPPVRWFGQDAFDIW

SEQ ID NO: 16574 - protein, 16 aa, Homo sapiens
CAKDMGTAQDVSFDYW

SEQ ID NO: 16575 - protein, 20 aa, Homo sapiens
CARVRPHDYGDYVSDAFDIW

SEQ ID NO: 16576 - protein, 26 aa, Homo sapiens
CARGVEYYDFWSGFGPDPKVDAFDIW

SEQ ID NO: 16577 - protein, 18 aa, Homo sapiens
CALSRFTLFGVVTRFDYW

SEQ ID NO: 16578 - protein, 18 aa, Homo sapiens
CAVERNLRGPSYGAFDIW

SEQ ID NO: 16579 - protein, 15 aa, Homo sapiens
CARGADYGGDVFDVW

SEQ ID NO: 16580 - protein, 23 aa, Homo sapiens
CARRGIPGHFWSGYYTGDAFDIW

SEQ ID NO: 16581 - protein, 17 aa, Homo sapiens
CARDNAYDSSGYRTDYW

SEQ ID NO: 16582 - protein, 13 aa, Homo sapiens
CASDSSGSGRDYW

SEQ ID NO: 16583 - protein, 14 aa, Homo sapiens
CVHKYAGTTGFDPW

SEQ ID NO: 16584 - protein, 18 aa, Homo sapiens
CARHWTWTYSYGYYFDYW

SEQ ID NO: 16585 - protein, 16 aa, Homo sapiens
CAKDDIGLGASPFDNW

SEQ ID NO: 16586 - protein, 19 aa, Homo sapiens
CARDVYDILTGYSRIFEYW

SEQ ID NO: 16587 - protein, 25 aa, Homo sapiens
CARAGFLQAGYSGYDPYYYYGMDVW

SEQ ID NO: 16588 - protein, 12 aa, Homo sapiens [sequence omitted]

SEQ ID NO: 16589 - protein, 20 aa, Homo sapiens
CAHVYYDFWSGYYFDYFDYW

SEQ ID NO: 16590 - protein, 24 aa, Homo sapiens
CARSGYSSGWYFHKPEEGSTFDYW

SEQ ID NO: 16591 - protein, 17 aa, Homo sapiens
CAKTFTPSSWYGWFDPW

SEQ ID NO: 16592 - protein, 31 aa, Homo sapiens
CARELGYCSSTSCYNVGPLGAYYYYYGMDVW

SEQ ID NO: 16593 - protein, 18 aa, Homo sapiens
CATDAKVNIVATISVDYW

SEQ ID NO: 16594 - protein, 21 aa, Homo sapiens
CARDTHDYDSSGYYHDAFDIW

SEQ ID NO: 16595 - protein, 19 aa, Homo sapiens
CLHSPWSFFWGGSFYMDVW

SEQ ID NO: 16596 - protein, 19 aa, Homo sapiens
CARQNVLGYLTTWGWFDPW

SEQ ID NO: 16597 - protein, 17 aa, Homo sapiens
CARESLPYPSISYMDVW

SEQ ID NO: 16598 - protein, 18 aa, Homo sapiens
CANLLTMIVVSIDAFDIW

SEQ ID NO: 16599 - protein, 21 aa, Homo sapiens
CAKDNGHGAYGDSHGGFFDYW

SEQ ID NO: 16600 - protein, 19 aa, Homo sapiens
CARQRWHSTAWTAEYFQHW

SEQ ID NO: 16601 - protein, 21 aa, Homo sapiens
CARQDIVVLPGAMTLDSMDVW

SEQ ID NO: 16602 - protein, 18 aa, Homo sapiens
CARSPPGYATTVSYFDYW

SEQ ID NO: 16603 - protein, 24 aa, Homo sapiens
CATATSLGSILSHSSSVGYYFDYW

SEQ ID NO: 16604 - protein, 15 aa, Homo sapiens
CAKVTSSREGGFDYW

SEQ ID NO: 16605 - protein, 16 aa, Homo sapiens
CARDPLRYNWNGPDYW

SEQ ID NO: 16606 - protein, 16 aa, Homo sapiens
CAKDRYSNYRGWFDPW

SEQ ID NO: 16607 - protein, 22 aa, Homo sapiens
CARVNIAYYYDSSGSVEPFDYW

SEQ ID NO: 16608 - protein, 25 aa, Homo sapiens
CARGRYYYDSSGYYYVSQFFWFDPW

SEQ ID NO: 16609 - protein, 14 aa, Homo sapiens
CLLYYDGSQPYWVF

SEQ ID NO: 16610 - protein, 26 aa, Homo sapiens
CARLFGYHCRGGICQHSYFNYYMDVW

SEQ ID NO: 16611 - protein, 23 aa, Homo sapiens
CAKVGGAGDDFWSGYYLWYFDLW

SEQ ID NO: 16612 - protein, 18 aa, Homo sapiens
CARTRGYSGYDFGTLDYW

SEQ ID NO: 16613 - protein, 17 aa, Homo sapiens
CASARTTLWVPYWFDPW

SEQ ID NO: 16614 - protein, 16 aa, Homo sapiens
CARGRYMTTSRYFDLW

SEQ ID NO: 16615 - protein, 17 aa, Homo sapiens
CAKLPENYGGNSNIDYW

SEQ ID NO: 16616 - protein, 20 aa, Homo sapiens
CARDLILGYSSSWGDFFDYW

SEQ ID NO: 16617 - protein, 30 aa, Homo sapiens
CARNHDISVVPGNPWENSWSYDRYNWFDPW

SEQ ID NO: 16618 - protein, 23 aa, Homo sapiens
CATLGSSMNDFWSGTYYYYMDVW

SEQ ID NO: 16619 - protein, 14 aa, Homo sapiens
CAKMATGLAAADYW

SEQ ID NO: 16620 - protein, 13 aa, Homo sapiens
CAFSPSGHYFNIW

SEQ ID NO: 16621 - protein, 28 aa, Homo sapiens
CARDLTVQLTIFGVVSSLGRASGPFDYW

SEQ ID NO: 16622 - protein, 13 aa, Homo sapiens
CSSYVGSNNPWVF

SEQ ID NO: 16623 - protein, 14 aa, Homo sapiens
CARGPVQLQDFDYW

SEQ ID NO: 16624 - protein, 22 aa, Homo sapiens
CAKDTLLLNYYDSSGIDAFDIW

SEQ ID NO: 16625 - protein, 18 aa, Homo sapiens
CARGSTLFGVIYNWFDPW

SEQ ID NO: 16626 - protein, 13 aa, Homo sapiens
CNSYRSSNHNFVF

SEQ ID NO: 16627 - protein, 11 aa, Homo sapiens
CTQRTQIPVTF

SEQ ID NO: 16628 - protein, 14 aa, Homo sapiens
CAKAFDSGSSRDYW

SEQ ID NO: 16629 - protein, 17 aa, Homo sapiens
CARGGDYYDPREGLDYW

SEQ ID NO: 16630 - protein, 13 aa, Homo sapiens
CARPTNYSDFNYW

SEQ ID NO: 16631 - protein, 24 aa, Homo sapiens
CARAEHYDFWSGYHPAGLGYFDYW

SEQ ID NO: 16632 - protein, 32 aa, Homo sapiens
CTTDPATYYDFWSGYYGMITVGGVIVQTSDYW

SEQ ID NO: 16633 - protein, 21 aa, Homo sapiens
CARDNRILRFLEWLVIGFDYW

SEQ ID NO: 16634 - protein, 20 aa, Homo sapiens
CDWSSDVCSSDLSTSWVDYW

SEQ ID NO: 16635 - protein, 20 aa, Homo sapiens
CARAQMGKSYYDSSKEFDYW

SEQ ID NO: 16636 - protein, 16 aa, Homo sapiens
CARTGGAAGNYYFDYW

SEQ ID NO: 16637 - protein, 16 aa, Homo sapiens
CARRVGATVYNWFDPW

SEQ ID NO: 16638 - protein, 18 aa, Homo sapiens
CAKVGGIYSAYDYAFDYW

SEQ ID NO: 16639 - protein, 14 aa, Homo sapiens
CTTDSSGYFAFDIW

SEQ ID NO: 16640 - protein, 8 aa, Homo sapiens [sequence omitted]

SEQ ID NO: 16641 - protein, 17 aa, Homo sapiens
CARHGDYTGSYYDLDYW

SEQ ID NO: 16642 - protein, 16 aa, Homo sapiens
CARQVAVADDDYFDYW

SEQ ID NO: 16643 - protein, 18 aa, Homo sapiens
CVRATIRSGSNYEAADYW

SEQ ID NO: 16644 - protein, 21 aa, Homo sapiens
CARGVLEGIAAAGHPSDFDYW

SEQ ID NO: 16645 - protein, 19 aa, Homo sapiens
CARDRDRSLEWWRGGFDPW

SEQ ID NO: 16646 - protein, 21 aa, Homo sapiens
CARDANSGSYSDSGDWYFDLW

SEQ ID NO: 16647 - protein, 15 aa, Homo sapiens
CAKVSGGVQDQPDYW

SEQ ID NO: 16648 - protein, 21 aa, Homo sapiens
CARETGEGDFWSGLYNWFDPW

SEQ ID NO: 16649 - protein, 17 aa, Homo sapiens
CARHLSPYYDRDAYDIW

SEQ ID NO: 16650 - protein, 14 aa, Homo sapiens
CALWFGETDAFDIW

SEQ ID NO: 16651 - protein, 31 aa, Homo sapiens
CARVRGNPDRDRIFLAYCGGDCYPLNAFDIW

SEQ ID NO: 16652 - protein, 18 aa, Homo sapiens
CARHVEEQQLAINWFDPW

SEQ ID NO: 16653 - protein, 25 aa, Homo sapiens
CARLGYCSSTSCSHPPSYYYGMDVW

SEQ ID NO: 16654 - protein, 23 aa, Homo sapiens
CANSPALGYCSGGSCYSHAFDIW

SEQ ID NO: 16655 - protein, 15 aa, Homo sapiens
CASPHSSGWHLFDYW

SEQ ID NO: 16656 - protein, 26 aa, Homo sapiens
CATDGVRYFDWLVRRPRDYYYYMDVW

SEQ ID NO: 16657 - protein, 25 aa, Homo sapiens
CARDLQPFYDSSGYTYYYYYYMDVW

SEQ ID NO: 16658 - protein, 16 aa, Homo sapiens
CAKRRFNGWDDAFDIW

SEQ ID NO: 16659 - protein, 20 aa, Homo sapiens
CARESYAMVRGLMYNWFDLW

SEQ ID NO: 16660 - protein, 18 aa, Homo sapiens
CATDAYCSGGDCYLFDYW

SEQ ID NO: 16661 - protein, 17 aa, Homo sapiens
CAREAYDDYGSLYFDSW

SEQ ID NO: 16662 - protein, 22 aa, Homo sapiens
CATVLPYCSSTSCHYKTGFDYW

SEQ ID NO: 16663 - protein, 13 aa, Homo sapiens
CARRADNIEFNYW

SEQ ID NO: 16664 - protein, 25 aa, Homo sapiens
CAKDTDPHYYYDSSGYYYPDAFDIW

SEQ ID NO: 16665 - protein, 15 aa, Homo sapiens
CARYSGWHDRPLDYW

SEQ ID NO: 16666 - protein, 14 aa, Homo sapiens
CARAAYSSGLFHYW

SEQ ID NO: 16667 - protein, 19 aa, Homo sapiens
CATVPAWIQLWSYDAFDIW

SEQ ID NO: 16668 - protein, 20 aa, Homo sapiens
CAKSGGVSLLWFGNAAFDIW

SEQ ID NO: 16669 - protein, 17 aa, Homo sapiens
CARSFMNPSPVGRFDPW

SEQ ID NO: 16670 - protein, 13 aa, Homo sapiens
CAKATGWYDFDDW

SEQ ID NO: 16671 - protein, 19 aa, Homo sapiens
CAKATVVTAILLPNAFDIW

SEQ ID NO: 16672 - protein, 18 aa, Homo sapiens
CARMLYGDYDRLYYFDYW

SEQ ID NO: 16673 - protein, 20 aa, Homo sapiens
CARIKRSSWYPYYYYYMDVW

SEQ ID NO: 16674 - protein, 20 aa, Homo sapiens
CAHRLGGFSIAAAGTTFDYW

SEQ ID NO: 16675 - protein, 13 aa, Homo sapiens
CAREERSSPGDYW

SEQ ID NO: 16676 - protein, 22 aa, Homo sapiens
CAKLPRSNYYYDSSGYDAFDIW

SEQ ID NO: 16677 - protein, 17 aa, Homo sapiens
CAKDRVRYQLLEWFDSW

SEQ ID NO: 16678 - protein, 14 aa, Homo sapiens
CVNLSLLGGWFDPW

SEQ ID NO: 16679 - protein, 11 aa, Homo sapiens
CQESVSTSWTF

SEQ ID NO: 16680 - protein, 22 aa, Homo sapiens
CAREAYSSGWYVVDSNNWFDPW

SEQ ID NO: 16681 - protein, 23 aa, Homo sapiens
CARDQDKDDSSGYYWLDGYFDYW

SEQ ID NO: 16682 - protein, 25 aa, Homo sapiens
CARAPPYYYDSSGYVSTADNWFDPW

SEQ ID NO: 16683 - protein, 18 aa, Homo sapiens
CAITSAIPGTRYYYFDYW

SEQ ID NO: 16684 - protein, 18 aa, Homo sapiens
CAAEPANYGFVWGSLDYW

SEQ ID NO: 16685 - protein, 18 aa, Homo sapiens
CAREGVVTSLSAHYFDYW

SEQ ID NO: 16686 - protein, 18 aa, Homo sapiens
CARQRDGDYDDSGYWGYW

SEQ ID NO: 16687 - protein, 11 aa, Homo sapiens
CQHARSFPITF

SEQ ID NO: 16688 - protein, 15 aa, Homo sapiens
CAKDTRPGMQEFDYW

SEQ ID NO: 16689 - protein, 19 aa, Homo sapiens
CAKLPQGGYSYGLGSFDYW

SEQ ID NO: 16690 - protein, 19 aa, Homo sapiens
CASNPEDSYDLPDSAFDIW

SEQ ID NO: 16691 - protein, 18 aa, Homo sapiens
CAKDILWELPHTNAFDIW

SEQ ID NO: 16692 - protein, 13 aa, Homo sapiens
CSSYTTSNTFYDF

SEQ ID NO: 16693 - protein, 14 aa, Homo sapiens
CYGSGSYYTPFDYW

SEQ ID NO: 16694 - protein, 15 aa, Homo sapiens
CAKDTNWNDGGFGYW

SEQ ID NO: 16695 - protein, 17 aa, Homo sapiens
CAKDPYSYINPSVFDIW

SEQ ID NO: 16696 - protein, 24 aa, Homo sapiens
CARGQNYDSSGYYHYYYYYYMDVW

SEQ ID NO: 16697 - protein, 14 aa, Homo sapiens
CARQGDRTRDFDFW

SEQ ID NO: 16698 - protein, 17 aa, Homo sapiens
CARGPGPYSSGWQLDYW

SEQ ID NO: 16699 - protein, 14 aa, Homo sapiens
CANAHSIHDDFGVW

SEQ ID NO: 16700 - protein, 18 aa, Homo sapiens
CAKLPYCSSTSCYGVDYW

SEQ ID NO: 16701 - protein, 14 aa, Homo sapiens
CAKDTDYSNYFDYW

SEQ ID NO: 16702 - protein, 21 aa, Homo sapiens
CARDLDYYDSSGYYYEGFDYW

SEQ ID NO: 16703 - protein, 23 aa, Homo sapiens
CARAVAGITMIVVVIPEIRYDYW

SEQ ID NO: 16704 - protein, 19 aa, Homo sapiens
CARLQNGGYYRPQWYFDYW

SEQ ID NO: 16705 - protein, 18 aa, Homo sapiens
CARHMVGATWGRDYYDYW

SEQ ID NO: 16706 - protein, 15 aa, Homo sapiens
CAKLVVPAASLVDYW

SEQ ID NO: 16707 - protein, 24 aa, Homo sapiens
CARGGDYYDFWSGYYGPSHWFDPW

SEQ ID NO: 16708 - protein, 16 aa, Homo sapiens
CAKDIWSYGDYSFGYW

SEQ ID NO: 16709 - protein, 18 aa, Homo sapiens
CANLAAAGTSYYYYMDVW

SEQ ID NO: 16710 - protein, 13 aa, Homo sapiens
CLQHTSYPPMYAF

SEQ ID NO: 16711 - protein, 23 aa, Homo sapiens
CARRVATGDYYDSSGYWGWFDPW

SEQ ID NO: 16712 - protein, 21 aa, Homo sapiens
CAKPGYDSSGYYYPYWYFDLW

SEQ ID NO: 16713 - protein, 23 aa, Homo sapiens
CARDLRTAMDTPYYYYYYYMDVW

SEQ ID NO: 16714 - protein, 16 aa, Homo sapiens
CGGDCYSDYYYYMDVW

SEQ ID NO: 16715 - protein, 14 aa, Homo sapiens
CAKVQGSDGYNDYW

SEQ ID NO: 16716 - protein, 27 aa, Homo sapiens
CARGLLRLYCSSTSCPRGAPYNWFDPW

SEQ ID NO: 16717 - protein, 16 aa, Homo sapiens
CAKVQYGGYSYGRDYW

SEQ ID NO: 16718 - protein, 21 aa, Homo sapiens
CARGKDTYHSDTNGLDAFDIW

SEQ ID NO: 16719 - protein, 19 aa, Homo sapiens
CARHRSDYGDYEPELFDYW

SEQ ID NO: 16720 - protein, 21 aa, Homo sapiens
CARHGWKNYDSSGVSDAFDIW

SEQ ID NO: 16721 - protein, 17 aa, Homo sapiens
CAKDDSSGPRAYYVDVW

SEQ ID NO: 16722 - protein, 17 aa, Homo sapiens
CAKGTTTVTTRSNFDYW

SEQ ID NO: 16723 - protein, 16 aa, Homo sapiens
CAHRPWGIAVAAFDIW

SEQ ID NO: 16724 - protein, 19 aa, Homo sapiens
CARDLGYYGSGSSYYFDYW

SEQ ID NO: 16725 - protein, 26 aa, Homo sapiens
CARDGFGYYDSSGYHPPYYYYGMDVW

SEQ ID NO: 16726 - protein, 22 aa, Homo sapiens
CSHVRVGYCSGGSCSPDYFDYW

SEQ ID NO: 16727 - protein, 19 aa, Homo sapiens
CATGPSYDSSGYYYLFDYW

SEQ ID NO: 16728 - protein, 23 aa, Homo sapiens
CVKDIVSGVEPLQAYYYYYMDVW

SEQ ID NO: 16729 - protein, 18 aa, Homo sapiens
CARDRFGAAAGMNWFDPW

SEQ ID NO: 16730 - protein, 15 aa, Homo sapiens
CTTESGWYGVYFDYW

SEQ ID NO: 16731 - protein, 13 aa, Homo sapiens
CQQSYSTLGTWTF

SEQ ID NO: 16732 - protein, 19 aa, Homo sapiens
CAKEAAVQLERPTYYFDYW

SEQ ID NO: 16733 - protein, 21 aa, Homo sapiens
CARDPGIAVAGKVFYYYMDVW

SEQ ID NO: 16734 - protein, 21 aa, Homo sapiens
CARVYCGGDCYSGLWGAFDIW

SEQ ID NO: 16735 - protein, 13 aa, Homo sapiens
CARGGNYKGFDNW

SEQ ID NO: 16736 - protein, 12 aa, Homo sapiens [sequence omitted]

SEQ ID NO: 16737 - protein, 16 aa, Homo sapiens
CAADRWVAGHVTDDYW

SEQ ID NO: 16738 - protein, 21 aa, Homo sapiens
CARHFGTIFGVVTLPGAFDPW

SEQ ID NO: 16739 - protein, 30 aa, Homo sapiens
CAKDAPPNYDFWSGYYFAPHYYYYYGMDVW

SEQ ID NO: 16740 - protein, 20 aa, Homo sapiens
CARDLYSYGSGDSYCYMDVW

SEQ ID NO: 16741 - protein, 22 aa, Homo sapiens
CARSRRPITMIVVVSQDPIDYW

SEQ ID NO: 16742 - protein, 18 aa, Homo sapiens
CVRDHDSSGYSSGAFDIW

SEQ ID NO: 16743 - protein, 17 aa, Homo sapiens
CVKDRSWLRFRAFLDVW

SEQ ID NO: 16744 - protein, 18 aa, Homo sapiens
CARESDSSSWSNEYLDYW

SEQ ID NO: 16745 - protein, 24 aa, Homo sapiens
CAREDESIVVVPAATHGLNWFDPW

SEQ ID NO: 16746 - protein, 21 aa, Homo sapiens
CARARHPTTVIIGASDAFDIW

SEQ ID NO: 16747 - protein, 22 aa, Homo sapiens
CARAAVLRYFDWLLDGNWFDPW

SEQ ID NO: 16748 - protein, 15 aa, Homo sapiens
CVWEDSSGYPVGDYW

SEQ ID NO: 16749 - protein, 15 aa, Homo sapiens
CARDSWDLLYRFDHW

SEQ ID NO: 16750 - protein, 16 aa, Homo sapiens
CAKTSKGFGVIIFDMW

SEQ ID NO: 16751 - protein, 16 aa, Homo sapiens
CARSPNYSSAWWFDPW

SEQ ID NO: 16752 - protein, 15 aa, Homo sapiens
CARTLGGGYVALDYW

SEQ ID NO: 16753 - protein, 25 aa, Homo sapiens
CARQIWNSELLWFGELLYSPGLDYW

SEQ ID NO: 16754 - protein, 20 aa, Homo sapiens
CARDYYDSSGYYYVPTFDYW

SEQ ID NO: 16755 - protein, 22 aa, Homo sapiens
CAKDLRTIYTGTTKVGYYFDYW

SEQ ID NO: 16756 - protein, 16 aa, Homo sapiens
CARADYYFAATRFDYW

SEQ ID NO: 16757 - protein, 16 aa, Homo sapiens
CAREGKSAYSNPFDYW

SEQ ID NO: 16758 - protein, 21 aa, Homo sapiens
CAKAPSDGNYYDSSGYAFDIW

SEQ ID NO: 16759 - protein, 18 aa, Homo sapiens
CAKGTLQLWLQPSQFDYW

SEQ ID NO: 16760 - protein, 22 aa, Homo sapiens
CARDANPYYDSSGYYHSGLDYW

SEQ ID NO: 16761 - protein, 17 aa, Homo sapiens
CARGVPAGTGGALFDYW

SEQ ID NO: 16762 - protein, 14 aa, Homo sapiens
CAKVAAPMSRNDYW

SEQ ID NO: 16763 - protein, 14 aa, Homo sapiens
CARDSSSGWFADYW

SEQ ID NO: 16764 - protein, 20 aa, Homo sapiens
CAHSQAVPAAISRKNWFDPW

SEQ ID NO: 16765 - protein, 16 aa, Homo sapiens
CASGRGGPLRYYFDYW

SEQ ID NO: 16766 - protein, 15 aa, Homo sapiens
CAKIGGGEVAGTDYW

SEQ ID NO: 16767 - protein, 23 aa, Homo sapiens
CARALVASEYDYVWGSYPPGDYW

SEQ ID NO: 16768 - protein, 21 aa, Homo sapiens
CARGTPGYDFWSGYWGDFDYW

SEQ ID NO: 16769 - protein, 18 aa, Homo sapiens
CARGRGRFGPDDDGFNIW

SEQ ID NO: 16770 - protein, 21 aa, Homo sapiens
CATAPGYCSGGSCPTNWFDPW

SEQ ID NO: 16771 - protein, 15 aa, Homo sapiens
CVHSRFSGYDFFDSW

SEQ ID NO: 16772 - protein, 21 aa, Homo sapiens
CARPLGHYDSSGYRLDAFDIW

SEQ ID NO: 16773 - protein, 18 aa, Homo sapiens
CAHRKYANYWGNDVFDIW

SEQ ID NO: 16774 - protein, 15 aa, Homo sapiens
CATHGDYGPARFDYW

SEQ ID NO: 16775 - protein, 18 aa, Homo sapiens
CANLLKLDYYGSGETDYW

SEQ ID NO: 16776 - protein, 23 aa, Homo sapiens
CAREAEVVRGFGVVFYYYGMDVW

SEQ ID NO: 16777 - protein, 15 aa, Homo sapiens
CARRGTIGRTVFDPW

SEQ ID NO: 16778 - protein, 16 aa, Homo sapiens
CARLDYYDSTGKFDYW

SEQ ID NO: 16779 - protein, 15 aa, Homo sapiens
CGTWDSSPTAGLAVF

SEQ ID NO: 16780 - protein, 22 aa, Homo sapiens
CARDRPRGFLEWLGYYYGMDVW

SEQ ID NO: 16781 - protein, 23 aa, Homo sapiens
CAKDSYDGYYYDSSGYLGAFDIW

SEQ ID NO: 16782 - protein, 19 aa, Homo sapiens
CAKDKLVHYYDSSGYLDYW

SEQ ID NO: 16783 - protein, 19 aa, Homo sapiens
CARGPLPYNWNYYYGMDVW

SEQ ID NO: 16784 - protein, 19 aa, Homo sapiens
CATGPPVAVAGMGNWFDPW

SEQ ID NO: 16785 - protein, 22 aa, Homo sapiens
CARILSITMIVVVTPWGYFDLW

SEQ ID NO: 16786 - protein, 25 aa, Homo sapiens
CAGSNAVWSENGGLGYYYYYGMDVW

SEQ ID NO: 16787 - protein, 28 aa, Homo sapiens
CAKVPGAYYYDSSGYYQPSYYYYGMDVW

SEQ ID NO: 16788 - protein, 35 aa, Homo sapiens
CARVSSPRSRDFWSGYPPGFHWSPDLYYYYGMDVW

SEQ ID NO: 16789 - protein, 17 aa, Homo sapiens
CATEYALYGGNAPPDYW

SEQ ID NO: 16790 - protein, 15 aa, Homo sapiens
CVRLSTTSWFYFDYW

SEQ ID NO: 16791 - protein, 20 aa, Homo sapiens
CTRGWVTIFGGDTRDAFDIW

SEQ ID NO: 16792 - protein, 16 aa, Homo sapiens
CAVGGSGGFYGLFDYW

SEQ ID NO: 16793 - protein, 22 aa, Homo sapiens
CAKSSQTQDTALPYYYYYMDVW

SEQ ID NO: 16794 - protein, 17 aa, Homo sapiens
CAKMDGSGSYDHLPDYW

SEQ ID NO: 16795 - protein, 19 aa, Homo sapiens
CARHSDLDYYYDSSGFDYW

SEQ ID NO: 16796 - protein, 16 aa, Homo sapiens
CVKHLLVLRGDPFDSW

SEQ ID NO: 16797 - protein, 21 aa, Homo sapiens
CAATDYYGVRSNYEGSWFDPW

SEQ ID NO: 16798 - protein, 17 aa, Homo sapiens
CARVGRTSGYLNWFDPW

SEQ ID NO: 16799 - protein, 18 aa, Homo sapiens
CARVKIQGIPRYYYMDVW

SEQ ID NO: 16800 - protein, 15 aa, Homo sapiens
CYCRFGGVVVITDYW

SEQ ID NO: 16801 - protein, 20 aa, Homo sapiens
CARGRDYSDSSGYYHVIDYW

SEQ ID NO: 16802 - protein, 17 aa, Homo sapiens
CAKDIGGYSYGSTSDYW

SEQ ID NO: 16803 - protein, 25 aa, Homo sapiens
CARDGLGVVVAATHPWGYYYGMDVW

SEQ ID NO: 16804 - protein, 19 aa, Homo sapiens
CARRDPNCSGATCNYFDYW

SEQ ID NO: 16805 - protein, 15 aa, Homo sapiens
CQSADSSGADPGWVF

SEQ ID NO: 16806 - protein, 19 aa, Homo sapiens
CASDRYNAVGYYYYGMDVW

SEQ ID NO: 16807 - protein, 22 aa, Homo sapiens
CARHGTFTIFGVVIMPDYFDYW

SEQ ID NO: 16808 - protein, 19 aa, Homo sapiens
CARDTGIFTENGPGWFDSW

SEQ ID NO: 16809 - protein, 24 aa, Homo sapiens
CARRDPVVVVPAVSAGPTYYIDNW

SEQ ID NO: 16810 - protein, 19 aa, Homo sapiens
CASEEVNSSGWYFDAFDIW

SEQ ID NO: 16811 - protein, 18 aa, Homo sapiens
CALTPGYDFWSGYRLDYW

SEQ ID NO: 16812 - protein, 21 aa, Homo sapiens
CASSNYYDSSGYYKEESFDYW

SEQ ID NO: 16813 - protein, 21 aa, Homo sapiens
CAREGVREQWLAHPLLNFDYW

SEQ ID NO: 16814 - protein, 29 aa, Homo sapiens
CARDSRYYDFWSGYYGGPSYYYYYYMDVW

SEQ ID NO: 16815 - protein, 16 aa, Homo sapiens
CVREISNYVGHWFDPW

SEQ ID NO: 16816 - protein, 19 aa, Homo sapiens
CARDPRQWLGQPYWYFDLW

SEQ ID NO: 16817 - protein, 14 aa, Homo sapiens
CAKLGSKVITADYW

SEQ ID NO: 16818 - protein, 26 aa, Homo sapiens
CAREGRLRYCSGGSCYPYYYYGMDVW

SEQ ID NO: 16819 - protein, 24 aa, Homo sapiens
CSRGKFAPTYYDFWSVYSADIDYW

SEQ ID NO: 16820 - protein, 15 aa, Homo sapiens
CAKDSGPFSGQTDYW

SEQ ID NO: 16821 - protein, 18 aa, Homo sapiens
CATASVLVAGTPNWFDPW

SEQ ID NO: 16822 - protein, 22 aa, Homo sapiens
CAREAHAGGRSHETSPYYFDYW

SEQ ID NO: 16823 - protein, 19 aa, Homo sapiens
CARQPIQIIAAAGQPFDYW

SEQ ID NO: 16824 - protein, 18 aa, Homo sapiens
CTRGRGSCIGATCYSYYW

SEQ ID NO: 16825 - protein, 28 aa, Homo sapiens
CARDGAYYDFWSGYLGRGPYYYYYMDVW

SEQ ID NO: 16826 - protein, 20 aa, Homo sapiens
CARGDSSGWYVRNDYYFDYW

SEQ ID NO: 16827 - protein, 16 aa, Homo sapiens
CARRGSSSTFWYFDFW

SEQ ID NO: 16828 - protein, 29 aa, Homo sapiens
CAKDFRYYDILTGYLSGARYYYYYYMDVW

SEQ ID NO: 16829 - protein, 20 aa, Homo sapiens
CARSSAYFHDGSGYYDFDYW

SEQ ID NO: 16830 - protein, 19 aa, Homo sapiens
CARAVRQWLALYYYYMDVW

SEQ ID NO: 16831 - protein, 23 aa, Homo sapiens
CAHRLWWALGFEDYSNYGWFDPW

SEQ ID NO: 16832 - protein, 19 aa, Homo sapiens
CARDGSSLNGDSEYFFDDW

SEQ ID NO: 16833 - protein, 22 aa, Homo sapiens
CARHFPNTIFGVVTASYYMDVW

SEQ ID NO: 16834 - protein, 20 aa, Homo sapiens
CAKDRSIQLWPPFAGEFDYW

SEQ ID NO: 16835 - protein, 15 aa, Homo sapiens
CAKDMAPGGWYMDYW

SEQ ID NO: 16836 - protein, 18 aa, Homo sapiens
CATLGGYDYRDLYYFHYW

SEQ ID NO: 16837 - protein, 24 aa, Homo sapiens
CATGFSVGYSYGGSYYYYYGMDVW

SEQ ID NO: 16838 - protein, 15 aa, Homo sapiens
CAILQQQLRPLNDYW

SEQ ID NO: 16839 - protein, 19 aa, Homo sapiens
CAGLRITMIVVALDAFDIW

SEQ ID NO: 16840 - protein, 19 aa, Homo sapiens
CARSHHNHDYGDYLPTDYW

SEQ ID NO: 16841 - protein, 24 aa, Homo sapiens
CARDPPPNCVGSSCQYYYYGIDVW

SEQ ID NO: 16842 - protein, 17 aa, Homo sapiens
CARIVESMSLPYFFDYW

SEQ ID NO: 16843 - protein, 17 aa, Homo sapiens
CAKVGSVQLEDDAFDIW

SEQ ID NO: 16844 - protein, 23 aa, Homo sapiens
CAKDTSPLSGYSSGWYLGPFDYW

SEQ ID NO: 16845 - protein, 25 aa, Homo sapiens
CARGSVFRIYDSSGYRETYNWFDPW

SEQ ID NO: 16846 - protein, 15 aa, Homo sapiens
CAHRGDFWSGYFDYW

SEQ ID NO: 16847 - protein, 21 aa, Homo sapiens
CARDVVVTATGVHYYYGMDVW

SEQ ID NO: 16848 - protein, 16 aa, Homo sapiens
CASHSRIAAAGQFDYW

SEQ ID NO: 16849 - protein, 17 aa, Homo sapiens
CARDPSTVTAYWYFDLW

SEQ ID NO: 16850 - protein, 17 aa, Homo sapiens
CARVFPGQYNSGCLDYW

SEQ ID NO: 16851 - protein, 27 aa, Homo sapiens
CAREGPRDYDILTGYWARYYYYGMDVW

SEQ ID NO: 16852 - protein, 17 aa, Homo sapiens
CATSFYMTTVTPPTDYW

SEQ ID NO: 16853 - protein, 21 aa, Homo sapiens
CARGGVSRSRIARGPDVFDMW

SEQ ID NO: 16854 - protein, 20 aa, Homo sapiens
CARDVYCSGGTCFAWYFDLW

SEQ ID NO: 16855 - protein, 15 aa, Homo sapiens
CARQDTGRIRWFDTW

SEQ ID NO: 16856 - protein, 25 aa, Homo sapiens
CARDEAVGWLQLLSRTYYYYGMDVW

SEQ ID NO: 16857 - protein, 14 aa, Homo sapiens
CARAEGALERYDYW

SEQ ID NO: 16858 - protein, 16 aa, Homo sapiens
CARDLGGVSEHWFDPW

SEQ ID NO: 16859 - protein, 14 aa, Homo sapiens
CARSNGVASRNDYW

SEQ ID NO: 16860 - protein, 21 aa, Homo sapiens
CAKAGHYYDYTGHRSYYFDYW

SEQ ID NO: 16861 - protein, 20 aa, Homo sapiens
CARDIRYSGYDYLSLGVDYW

SEQ ID NO: 16862 - protein, 22 aa, Homo sapiens
CAKDRARGDYKDYDYYYGMDLW

SEQ ID NO: 16863 - protein, 19 aa, Homo sapiens
CAGQLVATGRNYYPAMDVW

SEQ ID NO: 16864 - protein, 19 aa, Homo sapiens
CASEYDSSGYYGGAAFDIW

SEQ ID NO: 16865 - protein, 10 aa, Homo sapiens
CCSYAGSYSF

SEQ ID NO: 16866 - protein, 14 aa, Homo sapiens
CARDLGVSEGGDYW

SEQ ID NO: 16867 - protein, 16 aa, Homo sapiens
CARRAARWEYNWFDPW

SEQ ID NO: 16868 - protein, 13 aa, Homo sapiens
CATFIGGSYWKYW

SEQ ID NO: 16869 - protein, 24 aa, Homo sapiens
CARVFILEWLLYAPDYYYYGMDVW

SEQ ID NO: 16870 - protein, 13 aa, Homo sapiens
CARTQNNGALDYW

SEQ ID NO: 16871 - protein, 19 aa, Homo sapiens
CASLMASNYYDSSGYSGYW

SEQ ID NO: 16872 - protein, 23 aa, Homo sapiens
CARDHGGRARYYYDSSGYYCDYW

SEQ ID NO: 16873 - protein, 21 aa, Homo sapiens
CARVRRHPPIMASIYDAFDLW

SEQ ID NO: 16874 - protein, 17 aa, Homo sapiens
CASPWRTSYASGVFDYW

SEQ ID NO: 16875 - protein, 18 aa, Homo sapiens
CKTDYYDSSGYPGYFDYW

SEQ ID NO: 16876 - protein, 18 aa, Homo sapiens
CAKDIQQWLVKGGYFDYW

SEQ ID NO: 16877 - protein, 23 aa, Homo sapiens
CARGLRYDYVWGSYRYGNWFDPW

SEQ ID NO: 16878 - protein, 15 aa, Homo sapiens
CARFPKYSYGQDDYW

SEQ ID NO: 16879 - protein, 21 aa, Homo sapiens
CARHTYYDSSGYPYHYGMDVW

SEQ ID NO: 16880 - protein, 14 aa, Homo sapiens
CARESYNSRSFDLW

SEQ ID NO: 16881 - protein, 29 aa, Homo sapiens
CAKDGSYYDFWSGYLKPSDYYYYYYMDVW

SEQ ID NO: 16882 - protein, 21 aa, Homo sapiens
CARDAAVWGDIVVASNWFDPW

SEQ ID NO: 16883 - protein, 16 aa, Homo sapiens
CAINSNYYYYYGMDVW

SEQ ID NO: 16884 - protein, 26 aa, Homo sapiens
CAKDGNYDFWSGSLGGYYYYYYMDVW

SEQ ID NO: 16885 - protein, 22 aa, Homo sapiens
CARHLPSYYYDSSGYRTGFDYW

SEQ ID NO: 16886 - protein, 14 aa, Homo sapiens
CARPTFGDYYMDVW

SEQ ID NO: 16887 - protein, 20 aa, Homo sapiens
CAKDSEYGSGSDVHNWFDPW

SEQ ID NO: 16888 - protein, 21 aa, Homo sapiens
CARGGTSCYLCSDGTNWFDPW

SEQ ID NO: 16889 - protein, 18 aa, Homo sapiens
CARGEEKYSYGNGYFQHW

SEQ ID NO: 16890 - protein, 23 aa, Homo sapiens
CAKTPSGDYYGSGSYGLAAFDIW

SEQ ID NO: 16891 - protein, 23 aa, Homo sapiens
CARDRAAYDYIWGSNRYEGFDYW

SEQ ID NO: 16892 - protein, 18 aa, Homo sapiens
CARDHPADGYNWGWIDYW

SEQ ID NO: 16893 - protein, 17 aa, Homo sapiens
CAKIEGPAAGTPSGDYW

SEQ ID NO: 16894 - protein, 26 aa, Homo sapiens
CARDWGILSNLYDSSAHYYYYGMDVW

SEQ ID NO: 16895 - protein, 18 aa, Homo sapiens
CARLTTSYSSGWYGFDYW

SEQ ID NO: 16896 - protein, 22 aa, Homo sapiens
CARSHRGITIFGVVHLWYFDLW

SEQ ID NO: 16897 - protein, 15 aa, Homo sapiens
CATLPLVVPAAPDYW

SEQ ID NO: 16898 - protein, 24 aa, Homo sapiens
CATSPPLYGSGSYYRYYYYGMDVW

SEQ ID NO: 16899 - protein, 16 aa, Homo sapiens
CAKGSFSGLGVHFDYW

SEQ ID NO: 16900 - protein, 16 aa, Homo sapiens
CANPNSGSYYSFFDYW

SEQ ID NO: 16901 - protein, 18 aa, Homo sapiens
CAKVGYSSSWYVRAFDIW

SEQ ID NO: 16902 - protein, 24 aa, Homo sapiens
CAREGSGYRSTWSTYYYYYAMDVW

SEQ ID NO: 16903 - protein, 20 aa, Homo sapiens
CATDLKVPLAAAGPNWFDPW

SEQ ID NO: 16904 - protein, 23 aa, Homo sapiens
CARSPPRYDFWSGYFFKNWFDPW

SEQ ID NO: 16905 - protein, 11 aa, Homo sapiens
CQRYNKYPLIF

SEQ ID NO: 16906 - protein, 23 aa, Homo sapiens
CARDCTFYYDSYDTSPGDDLDYW

SEQ ID NO: 16907 - protein, 19 aa, Homo sapiens
CARGLSQLLYYYYYYMDVW

SEQ ID NO: 16908 - protein, 18 aa, Homo sapiens
CTTQYYYDSSGYYYGDYW

SEQ ID NO: 16909 - protein, 21 aa, Homo sapiens
CTREVLVLAASQYYYYGMDVW

SEQ ID NO: 16910 - protein, 18 aa, Homo sapiens
CAKLRYRARPQEYYMDVW

SEQ ID NO: 16911 - protein, 16 aa, Homo sapiens
CATAPPTDIADWFDPW

SEQ ID NO: 16912 - protein, 20 aa, Homo sapiens
CARLPPIWFGELLGIYFDYW

SEQ ID NO: 16913 - protein, 24 aa, Homo sapiens
CARLPSSNYDYVWGSWRAPYFDYW

SEQ ID NO: 16914 - protein, 19 aa, Homo sapiens
CARDQRGCTNGVCQSNDYW

SEQ ID NO: 16915 - protein, 13 aa, Homo sapiens
CARESRNNWFDFW

SEQ ID NO: 16916 - protein, 21 aa, Homo sapiens
CAKLLGPTPHGDSDTDAFDIW

SEQ ID NO: 16917 - protein, 14 aa, Homo sapiens
CTSGEWEGQDFDYW

SEQ ID NO: 16918 - protein, 17 aa, Homo sapiens
CATAYAICGGDCYLGYW

SEQ ID NO: 16919 - protein, 26 aa, Homo sapiens
CARHGDIVVVPESAKDDYYYYGMDVW

SEQ ID NO: 16920 - protein, 17 aa, Homo sapiens [sequence omitted]

SEQ ID NO: 16921 - protein, 17 aa, Homo sapiens
CVRTGGDNTAIDAFEIW

SEQ ID NO: 16922 - protein, 21 aa, Homo sapiens
CARAISSPFGVVLNYYYMDVW

SEQ ID NO: 16923 - protein, 22 aa, Homo sapiens
CARVVKYDDVLEGIHDYYFDYW

SEQ ID NO: 16924 - protein, 21 aa, Homo sapiens
CARTRNDYVGSGSYYTSFDQW

SEQ ID NO: 16925 - protein, 16 aa, Homo sapiens
CAKGEQWLDEKHFDYW

SEQ ID NO: 16926 - protein, 21 aa, Homo sapiens
CAKLCAGSLTGYYPDDAFDIW

SEQ ID NO: 16927 - protein, 22 aa, Homo sapiens
CARGPRSESYDFWSPYYYMDVW

SEQ ID NO: 16928 - protein, 19 aa, Homo sapiens
CATGRIWFGELRRNYFDYW

SEQ ID NO: 16929 - protein, 15 aa, Homo sapiens
CARDSNWPPFYFDSW

SEQ ID NO: 16930 - protein, 21 aa, Homo sapiens
CAREYYYDSSGYYSASFFDYW

SEQ ID NO: 16931 - protein, 23 aa, Homo sapiens
CAKLALVTMIVVVTQGDDAFDIW

SEQ ID NO: 16932 - protein, 28 aa, Homo sapiens
CAKSEIGEYYDFWSGYLDGGQPFYFDYW

SEQ ID NO: 16933 - protein, 15 aa, Homo sapiens
CARCHFGVLMYMDVW

SEQ ID NO: 16934 - protein, 16 aa, Homo sapiens
CAHREYSSSSVPFDYW

SEQ ID NO: 16935 - protein, 20 aa, Homo sapiens
CAKGAFVMVTGIPAEYFLHW

SEQ ID NO: 16936 - protein, 15 aa, Homo sapiens
CARDLYYDSSGFDYW

SEQ ID NO: 16937 - protein, 22 aa, Homo sapiens
CARHSYYYGSGAHPYYYYMDVW

SEQ ID NO: 16938 - protein, 18 aa, Homo sapiens
CAKFIRGYSYGYWGFDPW

SEQ ID NO: 16939 - protein, 16 aa, Homo sapiens
CATARYFDWLTALDYW

SEQ ID NO: 16940 - protein, 17 aa, Homo sapiens
CALPISGSGWFYYFDYW

SEQ ID NO: 16941 - protein, 28 aa, Homo sapiens
CARDFGCSSTSCYRPTIGSYTYYGMDVW

SEQ ID NO: 16942 - protein, 19 aa, Homo sapiens
CATDQKFTNFGVVGFYDYW

SEQ ID NO: 16943 - protein, 19 aa, Homo sapiens
CARSNYDILTGYYTPWDYW

SEQ ID NO: 16944 - protein, 16 aa, Homo sapiens
CATGDHFGDYGEFDYW

SEQ ID NO: 16945 - protein, 17 aa, Homo sapiens
CARGVDDGGSRGYFDYW

SEQ ID NO: 16946 - protein, 15 aa, Homo sapiens
CVRVKMGVAYAFDLW

SEQ ID NO: 16947 - protein, 21 aa, Homo sapiens
CTTGPERYCSNGVCPAYFDYW

SEQ ID NO: 16948 - protein, 23 aa, Homo sapiens
CARDEEVNVRYYDSSGYYAFDYW

SEQ ID NO: 16949 - protein, 21 aa, Homo sapiens
CARTPRFSTMIVVVITSFDYW

SEQ ID NO: 16950 - protein, 13 aa, Homo sapiens
CARALPGIAVDYW

SEQ ID NO: 16951 - protein, 20 aa, Homo sapiens
CASPSTIFGVVNYYYGMDVW

SEQ ID NO: 16952 - protein, 16 aa, Homo sapiens
CAKMDSSGSGRHFDYW

SEQ ID NO: 16953 - protein, 31 aa, Homo sapiens
CARGRYRSEVDTAMVFVEVSSSWPLDAFDIW

SEQ ID NO: 16954 - protein, 19 aa, Homo sapiens
CARPSKFIYGLTSFGFDPW

SEQ ID NO: 16955 - protein, 18 aa, Homo sapiens
CARDRPFTNLEGGWVDPW

SEQ ID NO: 16956 - protein, 17 aa, Homo sapiens
CAREVSGGYSGIGFDPW

SEQ ID NO: 16957 - protein, 18 aa, Homo sapiens
CAKDSASSSWYESGLDYW

SEQ ID NO: 16958 - protein, 18 aa, Homo sapiens
CATAPSLAARSPGWFDPW

SEQ ID NO: 16959 - protein, 19 aa, Homo sapiens
CAKIGIAAAGSSYDAFDIW

SEQ ID NO: 16960 - protein, 18 aa, Homo sapiens
CTTLSWYYYDHSAYFPYW

SEQ ID NO: 16961 - protein, 16 aa, Homo sapiens
CARVKDFWSAYYYDYW

SEQ ID NO: 16962 - protein, 19 aa, Homo sapiens
CARARYYYGLGSPYCFDMW

SEQ ID NO: 16963 - protein, 20 aa, Homo sapiens
CASIAAAGREYYYYYGMDVW

SEQ ID NO: 16964 - protein, 17 aa, Homo sapiens
CARADAYSSAINWFDPW

SEQ ID NO: 16965 - protein, 29 aa, Homo sapiens
CAKDHLYYDFWSGYSSNPSYYYYYGMDVW

SEQ ID NO: 16966 - protein, 17 aa, Homo sapiens
CARGGDYYGLKWWFDPW

SEQ ID NO: 16967 - protein, 25 aa, Homo sapiens
CARVAAVPAAIFSRGLDYYYGMDVW

SEQ ID NO: 16968 - protein, 20 aa, Homo sapiens
CAPTLGYCTNGVCSYYFDYW

SEQ ID NO: 16969 - protein, 24 aa, Homo sapiens
CARTPGTIFGVDINHFYYYYMDVW

SEQ ID NO: 16970 - protein, 19 aa, Homo sapiens
CARPDYGDQHPNDFRFDYW

SEQ ID NO: 16971 - protein, 17 aa, Homo sapiens
CARGWRLVTLSPYFDYW

SEQ ID NO: 16972 - protein, 17 aa, Homo sapiens
CATLSPNGAQNGAFDYW

SEQ ID NO: 16973 - protein, 14 aa, Homo sapiens
CAADNGLQYLFDYW

SEQ ID NO: 16974 - protein, 24 aa, Homo sapiens
CARDPPSYYYDSSGYYEEYYFDYW

SEQ ID NO: 16975 - protein, 17 aa, Homo sapiens
CARARPYGSGSYWLDPW

SEQ ID NO: 16976 - protein, 18 aa, Homo sapiens
CARTPTMMGDYGDHGDYW

SEQ ID NO: 16977 - protein, 16 aa, Homo sapiens
CARDYSTSWSNWFAPW

SEQ ID NO: 16978 - protein, 17 aa, Homo sapiens
CAKDIDGPAGSTSFDYW

SEQ ID NO: 16979 - protein, 20 aa, Homo sapiens
CARQGTYDSSGYGLAHFDYW

SEQ ID NO: 16980 - protein, 17 aa, Homo sapiens
CAHRGVSSYPSNWFDPW

SEQ ID NO: 16981 - protein, 30 aa, Homo sapiens
CAKVLRSSPGYDSSGYYYNPGYYYYGMDVW

SEQ ID NO: 16982 - protein, 16 aa, Homo sapiens
CARDLVALDPWYFDLW

SEQ ID NO: 16983 - protein, 18 aa, Homo sapiens
CARDSQGLAGSYSYFHYW

SEQ ID NO: 16984 - protein, 23 aa, Homo sapiens
CTTDQRGYSSLWTYYYYYGMDVW

SEQ ID NO: 16985 - protein, 17 aa, Homo sapiens
CATSVHIVVVTYAFDIW

SEQ ID NO: 16986 - protein, 19 aa, Homo sapiens
CARQSGRGGVAAVNAFDIW

SEQ ID NO: 16987 - protein, 18 aa, Homo sapiens
CARLGDSSGYYLYYFDYW

SEQ ID NO: 16988 - protein, 15 aa, Homo sapiens
CASLSSITWRWFDPW

SEQ ID NO: 16989 - protein, 20 aa, Homo sapiens
CAKDLIVLMVYAMVDGGDVW

SEQ ID NO: 16990 - protein, 19 aa, Homo sapiens
CAKDRREYYDSSEGYFDYW

SEQ ID NO: 16991 - protein, 19 aa, Homo sapiens
CAKMEFWSGYTLRDAFDIW

SEQ ID NO: 16992 - protein, 18 aa, Homo sapiens
CARAGWHSGSITDPFDIW

SEQ ID NO: 16993 - protein, 19 aa, Homo sapiens
CARHVSSDSGYDVWYFQHW

SEQ ID NO: 16994 - protein, 14 aa, Homo sapiens
CARLVAASHYSDYW

SEQ ID NO: 16995 - protein, 21 aa, Homo sapiens
CAKDLRVMTTVTTGTEPFDLW

SEQ ID NO: 16996 - protein, 20 aa, Homo sapiens
CARDPAVLIAAAGSYYFDYW

SEQ ID NO: 16997 - protein, 20 aa, Homo sapiens
CARHGFFGVVIIQGNWFDPW

SEQ ID NO: 16998 - protein, 17 aa, Homo sapiens
CARAWTTVTTDWYFDLW

SEQ ID NO: 16999 - protein, 17 aa, Homo sapiens
CARHFTRYSHPYYFDYW

SEQ ID NO: 17000 - protein, 19 aa, Homo sapiens
CAKPPVAGTDYYYYYMDVW

SEQ ID NO: 17001 - protein, 23 aa, Homo sapiens
CARGGWRVPAAGLPHYYYYMDVW

SEQ ID NO: 17002 - protein, 17 aa, Homo sapiens
CARGRLAVAGRLAFDIW

SEQ ID NO: 17003 - protein, 20 aa, Homo sapiens
CAKDQGSPKMATIKGPADYW

SEQ ID NO: 17004 - protein, 20 aa, Homo sapiens
CARPSMVRTVFYYYYAMDVW

SEQ ID NO: 17005 - protein, 24 aa, Homo sapiens
CARHRLGDFDWLTGLSYLDAFDIW

SEQ ID NO: 17006 - protein, 22 aa, Homo sapiens
CARDSRWGSSWYDYYYYGMDVW

SEQ ID NO: 17007 - protein, 19 aa, Homo sapiens
CSRIYYDVSGYYEASLDYW

SEQ ID NO: 17008 - protein, 16 aa, Homo sapiens
CARAWDHDYPDAFDIW

SEQ ID NO: 17009 - protein, 17 aa, Homo sapiens
CARAKSITTTPNWFDPW

SEQ ID NO: 17010 - protein, 15 aa, Homo sapiens
CQTYSSAPSAPLFTF

SEQ ID NO: 17011 - protein, 21 aa, Homo sapiens
CARVVPYYDFWSGYYGGFDYW

SEQ ID NO: 17012 - protein, 22 aa, Homo sapiens
CARDRSSVEVIHNYYYYGMDVW

SEQ ID NO: 17013 - protein, 18 aa, Homo sapiens
CARAHLTNYYNGHAFNIW

SEQ ID NO: 17014 - protein, 19 aa, Homo sapiens
CARDPSYGSGASYKSFDYW

SEQ ID NO: 17015 - protein, 17 aa, Homo sapiens
CARIVVVVAGNGDFDYW

SEQ ID NO: 17016 - protein, 19 aa, Homo sapiens
CANLPMDTAMADYYYMDVW

SEQ ID NO: 17017 - protein, 27 aa, Homo sapiens
CARMQYYYDSSGYYYVSGNYYYGMDVW

SEQ ID NO: 17018 - protein, 13 aa, Homo sapiens
CARAFSSGYAFYW

SEQ ID NO: 17019 - protein, 23 aa, Homo sapiens
CAKDDGKTLAPRLSMAGYYFDYW

SEQ ID NO: 17020 - protein, 22 aa, Homo sapiens
CARDNSPEVGYSGYDYGWFDPW

SEQ ID NO: 17021 - protein, 16 aa, Homo sapiens
CARPYSSSWYWYFDLW

SEQ ID NO: 17022 - protein, 20 aa, Homo sapiens
CARIPEAYYYDSSGYWFDYW

SEQ ID NO: 17023 - protein, 16 aa, Homo sapiens
CAREGESSSPPFLDYW

SEQ ID NO: 17024 - protein, 22 aa, Homo sapiens
CARQHVLLWFGELYNRANFDYW

SEQ ID NO: 17025 - protein, 16 aa, Homo sapiens
CAKTSSGYGGNSGDYW

SEQ ID NO: 17026 - protein, 21 aa, Homo sapiens
CARGPYCSGTSCPTDDAFDIW

SEQ ID NO: 17027 - protein, 31 aa, Homo sapiens
CARGPLKNREHIVVVVAATENYYYYYGMDVW

SEQ ID NO: 17028 - protein, 14 aa, Homo sapiens
CTTAPPGWHGFDYW

SEQ ID NO: 17029 - protein, 28 aa, Homo sapiens
CARDYVMSPTYDFWSGYSGYYYYYMDVW

SEQ ID NO: 17030 - protein, 19 aa, Homo sapiens
CAACYSSSSFVGWDAFDIW

SEQ ID NO: 17031 - protein, 17 aa, Homo sapiens
CARDSRWSSLGGAFDIW

SEQ ID NO: 17032 - protein, 21 aa, Homo sapiens
CAKDILQYYYDSSGSGAFDIW

SEQ ID NO: 17033 - protein, 17 aa, Homo sapiens
CARGGDFLTVDCYMDVW

SEQ ID NO: 17034 - protein, 26 aa, Homo sapiens
CARDNAPKGTYYDFWSGYYLNWFDPW

SEQ ID NO: 17035 - protein, 19 aa, Homo sapiens
CATLAGSYGSYYYYGMDVW

SEQ ID NO: 17036 - protein, 23 aa, Homo sapiens
CAKVQGIAAAGSPLDYYYYMDVW

SEQ ID NO: 17037 - protein, 15 aa, Homo sapiens
CASSSYGFHWYFDLW

SEQ ID NO: 17038 - protein, 21 aa, Homo sapiens
CATGAFDFWSGMPRSYWFDPW

SEQ ID NO: 17039 - protein, 16 aa, Homo sapiens
CAKDREIVANFPFDYW

SEQ ID NO: 17040 - protein, 20 aa, Homo sapiens
CASDRGTREYSSYLGVLDYW

SEQ ID NO: 17041 - protein, 19 aa, Homo sapiens
CARHWGRGFLSKVSWFDPW

SEQ ID NO: 17042 - protein, 20 aa, Homo sapiens
CARDIFGSGSYFMVGYMDVW

SEQ ID NO: 17043 - protein, 18 aa, Homo sapiens
CARGGWRTPYYYYYMDVW

SEQ ID NO: 17044 - protein, 20 aa, Homo sapiens
CAKDGDFETPDFYYYGMDVW

SEQ ID NO: 17045 - protein, 16 aa, Homo sapiens
CATSSGWSRVHWFDPW

SEQ ID NO: 17046 - protein, 12 aa, Homo sapiens
CARGHSSTFDHW

SEQ ID NO: 17047 - protein, 17 aa, Homo sapiens
CARGHNYDSSGLPIDYW

SEQ ID NO: 17048 - protein, 17 aa, Homo sapiens
CAKDLGVDYGGNAGDYW

SEQ ID NO: 17049 - protein, 14 aa, Homo sapiens
CARRDIMIGGFDQW

SEQ ID NO: 17050 - protein, 21 aa, Homo sapiens
CARGGWTIGAGYYYYYYMDVW

SEQ ID NO: 17051 - protein, 18 aa, Homo sapiens
CARDWRNSGYPFDGMDVW

SEQ ID NO: 17052 - protein, 20 aa, Homo sapiens
CAQELKYCSTKTCPGWFDPW

SEQ ID NO: 17053 - protein, 14 aa, Homo sapiens
CARQDSYNWDFDYW

SEQ ID NO: 17054 - protein, 16 aa, Homo sapiens
CATNRADIAVNWFDPW

SEQ ID NO: 17055 - protein, 16 aa, Homo sapiens
CVKDTLAEGYNFPDYW

SEQ ID NO: 17056 - protein, 20 aa, Homo sapiens
CAKSPESLRVFQYLSYFAYW

SEQ ID NO: 17057 - protein, 15 aa, Homo sapiens
CAHTGAAMVSAFDIW

SEQ ID NO: 17058 - protein, 19 aa, Homo sapiens
CARFSVVVVAARDYYFDYW

SEQ ID NO: 17059 - protein, 24 aa, Homo sapiens
CASPRVREDYDFWSGYYTRAFDYW

SEQ ID NO: 17060 - protein, 20 aa, Homo sapiens
CARGLYDSSGYFYSDAFDIW

SEQ ID NO: 17061 - protein, 20 aa, Homo sapiens
CAKDRNYDILTGSSYCFDYW

SEQ ID NO: 17062 - protein, 17 aa, Homo sapiens
CARGVATWVRGRSFDSW

SEQ ID NO: 17063 - protein, 21 aa, Homo sapiens
CTTGGTYYYDSSGYYYDLDYW

SEQ ID NO: 17064 - protein, 25 aa, Homo sapiens
CARVSSHYDILTGYLGLYLDAFDIW

SEQ ID NO: 17065 - protein, 13 aa, Homo sapiens
CAAWDDSVNALLF

SEQ ID NO: 17066 - protein, 23 aa, Homo sapiens
CARSEKYYDYVWGSYRLFPFDYW

SEQ ID NO: 17067 - protein, 20 aa, Homo sapiens
CARVRPPYHCGGDCYSTDYW

SEQ ID NO: 17068 - protein, 15 aa, Homo sapiens
CARAWTIPPYAFDIW

SEQ ID NO: 17069 - protein, 21 aa, Homo sapiens
CATVSFPNYYDSSGYYYFDYW

SEQ ID NO: 17070 - protein, 21 aa, Homo sapiens
CAKDSIGYCSSTSCQGGFDYW

SEQ ID NO: 17071 - protein, 21 aa, Homo sapiens
CARGPSQSFSRVEEVGEFGYW

SEQ ID NO: 17072 - protein, 20 aa, Homo sapiens
CATSSPHCTGGVCPNWFDPW

SEQ ID NO: 17073 - protein, 15 aa, Homo sapiens
CAMTSGTMTDWFDPW

SEQ ID NO: 17074 - protein, 19 aa, Homo sapiens
CAKSDIINMIVVVGLFDYW

SEQ ID NO: 17075 - protein, 17 aa, Homo sapiens
CAKDTALYGDYVGIDYW

SEQ ID NO: 17076 - protein, 13 aa, Homo sapiens [sequence omitted]

SEQ ID NO: 17077 - protein, 21 aa, Homo sapiens
CARDSSHVQLWPTNNNWFDPW

SEQ ID NO: 17078 - protein, 13 aa, Homo sapiens
CARGTDAITPDYW

SEQ ID NO: 17079 - protein, 24 aa, Homo sapiens
CATLAYSNNVGTQGGYYYYGMDVW

SEQ ID NO: 17080 - protein, 16 aa, Homo sapiens
CTTEEYQLLSHLFDYW

SEQ ID NO: 17081 - protein, 18 aa, Homo sapiens
CARESSSGWTVLGAFDIW

SEQ ID NO: 17082 - protein, 15 aa, Homo sapiens
CASIMVTATYYFDYW

SEQ ID NO: 17083 - protein, 25 aa, Homo sapiens
CARDAMAVTTVRSYSYYYYYYMDVW

SEQ ID NO: 17084 - protein, 20 aa, Homo sapiens
CTREDADELGYTYGIPFDYW

SEQ ID NO: 17085 - protein, 15 aa, Homo sapiens
CATISMIRKTKVDYW

SEQ ID NO: 17086 - protein, 22 aa, Homo sapiens
CAKDRDSWSGYYAYYYYAMDVW

SEQ ID NO: 17087 - protein, 16 aa, Homo sapiens
CAHRRTTFVRSAFDIW

SEQ ID NO: 17088 - protein, 23 aa, Homo sapiens
CTRDSYSSGWYGRLNYYYGMDVW

SEQ ID NO: 17089 - protein, 19 aa, Homo sapiens
CARGGGYDSSGYYSPFDYW

SEQ ID NO: 17090 - protein, 14 aa, Homo sapiens
CAKASAVTGPFDHW

SEQ ID NO: 17091 - protein, 18 aa, Homo sapiens
CARPFSPLGPELDGFDPW

SEQ ID NO: 17092 - protein, 17 aa, Homo sapiens
CAKITTGIAVDATTDYW

SEQ ID NO: 17093 - protein, 21 aa, Homo sapiens
CARDLFEVRNSGYYVTAVDIW

SEQ ID NO: 17094 - protein, 22 aa, Homo sapiens
CAKLGSGTIFGVVIIPTYFDYW

SEQ ID NO: 17095 - protein, 17 aa, Homo sapiens
CARDEGDSGSLPSFDYW

SEQ ID NO: 17096 - protein, 16 aa, Homo sapiens
CARGPVAAPNDAFDIW

SEQ ID NO: 17097 - protein, 14 aa, Homo sapiens
CASLSSSSTTDDYW

SEQ ID NO: 17098 - protein, 16 aa, Homo sapiens
CARDGWLANPHGFDIW

SEQ ID NO: 17099 - protein, 13 aa, Homo sapiens
CARFMEDSAFDYW

SEQ ID NO: 17100 - protein, 20 aa, Homo sapiens
CTRVLGVLRGTDYYYYMDVW

SEQ ID NO: 17101 - protein, 21 aa, Homo sapiens
CARAGGSLSLPATMGWYFDLW

SEQ ID NO: 17102 - protein, 17 aa, Homo sapiens
CARSGGHNWNYDVFDYW

SEQ ID NO: 17103 - protein, 19 aa, Homo sapiens
CARADYGDYVDYYYGMDVW

SEQ ID NO: 17104 - protein, 22 aa, Homo sapiens
CARDYDILTGAPYYYYYYMDVW

SEQ ID NO: 17105 - protein, 17 aa, Homo sapiens
CARAPYSSSFTHCFDYW

SEQ ID NO: 17106 - protein, 21 aa, Homo sapiens
CARDLFGYSSSTPRPDKDDYW

SEQ ID NO: 17107 - protein, 16 aa, Homo sapiens
CAKARRSDGDYALDYW

SEQ ID NO: 17108 - protein, 15 aa, Homo sapiens
CARGDDYGDTSFDYW

SEQ ID NO: 17109 - protein, 15 aa, Homo sapiens
CARDQYTGSYPFDYW

SEQ ID NO: 17110 - protein, 17 aa, Homo sapiens
CMRHNPRANPGDYTSYW

SEQ ID NO: 17111 - protein, 22 aa, Homo sapiens
CARDPQRYCGSTSCYHTWFDYW

SEQ ID NO: 17112 - protein, 17 aa, Homo sapiens
CAKEHGDWSPGNYIDSW

SEQ ID NO: 17113 - protein, 16 aa, Homo sapiens
CARGLSASSYDAFEIW

SEQ ID NO: 17114 - protein, 17 aa, Homo sapiens
CARDSMWELVNDAFDIW

SEQ ID NO: 17115 - protein, 20 aa, Homo sapiens
CARDPYIVVVPAAKGYFDYW

SEQ ID NO: 17116 - protein, 16 aa, Homo sapiens
CAKDLDDGSGWPLDYW

SEQ ID NO: 17117 - protein, 17 aa, Homo sapiens
CAHRGGSDYSLYYFDFW

SEQ ID NO: 17118 - protein, 19 aa, Homo sapiens
CATDNYYGSGNYSRWFDPW

SEQ ID NO: 17119 - protein, 21 aa, Homo sapiens
CARERVDYGDYVDYYYYMDVW

SEQ ID NO: 17120 - protein, 16 aa, Homo sapiens
CAHRASGYSGYAIDYW

SEQ ID NO: 17121 - protein, 16 aa, Homo sapiens
CVRGNSDNYYGYFGPW

SEQ ID NO: 17122 - protein, 17 aa, Homo sapiens
CARVESSSGYLSNFDYW

SEQ ID NO: 17123 - protein, 16 aa, Homo sapiens
CARIRNDYGGITIDYW

SEQ ID NO: 17124 - protein, 15 aa, Homo sapiens
CARFRPSNSDYFDYW

SEQ ID NO: 17125 - protein, 18 aa, Homo sapiens
CARDRSDYDFWNGYYTYW

SEQ ID NO: 17126 - protein, 16 aa, Homo sapiens
CARRPEGGIYETFDYW

SEQ ID NO: 17127 - protein, 22 aa, Homo sapiens
CARVSRYCSRTSCYALWHFDYW

SEQ ID NO: 17128 - protein, 16 aa, Homo sapiens
CARQTTARGSYYVDYW

SEQ ID NO: 17129 - protein, 15 aa, Homo sapiens
CARDWGWPRGAFDIW

SEQ ID NO: 17130 - protein, 24 aa, Homo sapiens
CARDYSPRYYDILTGYYNNWFDPW

SEQ ID NO: 17131 - protein, 20 aa, Homo sapiens
CARDAPPWACSGGSCYPDYW

SEQ ID NO: 17132 - protein, 15 aa, Homo sapiens
CLVQGLISRNYFDYW

SEQ ID NO: 17133 - protein, 15 aa, Homo sapiens
CARDGVGSTYYLDYW

SEQ ID NO: 17134 - protein, 13 aa, Homo sapiens
CASGLTAYGIDYW

SEQ ID NO: 17135 - protein, 23 aa, Homo sapiens
CARVGSWYYDSSGNYVSGGPDYW

SEQ ID NO: 17136 - protein, 18 aa, Homo sapiens
CARETPYGSGKFFWFDPW

SEQ ID NO: 17137 - protein, 18 aa, Homo sapiens
CARSDYGDNLGHDAFAIW

SEQ ID NO: 17138 - protein, 18 aa, Homo sapiens
CARSEYSSSRVYYYMDVW

SEQ ID NO: 17139 - protein, 16 aa, Homo sapiens
CARSTTHSYYYYMDVW

SEQ ID NO: 17140 - protein, 21 aa, Homo sapiens
CARVGHSLSRNGARRGHYDYW

SEQ ID NO: 17141 - protein, 14 aa, Homo sapiens
CARQSKVHDALDIW

SEQ ID NO: 17142 - protein, 20 aa, Homo sapiens
CARQVAPGIAVAPGKWFDPW

SEQ ID NO: 17143 - protein, 17 aa, Homo sapiens
CARQSPVAPYEDYFDYW

SEQ ID NO: 17144 - protein, 22 aa, Homo sapiens
CARDIGYCSSTSCRPDYYFDYW

SEQ ID NO: 17145 - protein, 22 aa, Homo sapiens
CARVFFGEMATITHYYYGMDVW

SEQ ID NO: 17146 - protein, 16 aa, Homo sapiens
CASSGQHSSTWYQGYW

SEQ ID NO: 17147 - protein, 28 aa, Homo sapiens
CAKDRDEYCSSTSCYAFVPLLDTIFDYW

SEQ ID NO: 17148 - protein, 18 aa, Homo sapiens
CATSFAYCSSTSCYVVYW

SEQ ID NO: 17149 - protein, 14 aa, Homo sapiens
CARRDLATTSFDYW

SEQ ID NO: 17150 - protein, 14 aa, Homo sapiens
CARNTLLEWFIDYW

SEQ ID NO: 17151 - protein, 23 aa, Homo sapiens
CAKVGSRFRNEGVLNPLYYFDYW

SEQ ID NO: 17152 - protein, 16 aa, Homo sapiens
CAKLSVGSSSGSFDYW

SEQ ID NO: 17153 - protein, 13 aa, Homo sapiens
CAREDRYYDFSYW

SEQ ID NO: 17154 - protein, 28 aa, Homo sapiens
CSLTSEDTAVYYCARDHYGSGTYLFDYW

SEQ ID NO: 17155 - protein, 18 aa, Homo sapiens
CARDSCNSIGWCGWFDPW

SEQ ID NO: 17156 - protein, 20 aa, Homo sapiens
CARQGGRLSMVQGINWFDPW

SEQ ID NO: 17157 - protein, 19 aa, Homo sapiens
CARDYYYFWSGLHNWFAPW

SEQ ID NO: 17158 - protein, 17 aa, Homo sapiens
CAGHTPLAVAYNWFDPW

SEQ ID NO: 17159 - protein, 12 aa, Homo sapiens
CATEMADALDIW

SEQ ID NO: 17160 - protein, 15 aa, Homo sapiens
CARGNIAVAAYFDFW

SEQ ID NO: 17161 - protein, 19 aa, Homo sapiens
CASRRGSGSYQIVDAFDMW

SEQ ID NO: 17162 - protein, 20 aa, Homo sapiens
CASDYGDYTNYYYYYGMDVW

SEQ ID NO: 17163 - protein, 22 aa, Homo sapiens
CARDHAAATGWFRELNDYFDYW

SEQ ID NO: 17164 - protein, 17 aa, Homo sapiens
CARDEGVIMITIPFDYW

SEQ ID NO: 17165 - protein, 21 aa, Homo sapiens
CARVAGCSGGSCHKPNWFDPW

SEQ ID NO: 17166 - protein, 16 aa, Homo sapiens
CARHSGYSSSGAFDIW

SEQ ID NO: 17167 - protein, 16 aa, Homo sapiens
CARDVRYCGGDCRDYW

SEQ ID NO: 17168 - protein, 17 aa, Homo sapiens
CAKLGCSSTSCYGPDYW

SEQ ID NO: 17169 - protein, 16 aa, Homo sapiens
CARDEVGSLSTPIDYW

SEQ ID NO: 17170 - protein, 21 aa, Homo sapiens
CATEQATVTPTSPYYYGMDVW

SEQ ID NO: 17171 - protein, 20 aa, Homo sapiens
CASPDPLGYYDSSAHPMDYW

SEQ ID NO: 17172 - protein, 20 aa, Homo sapiens
CTTVRRIPIFGVVDYYFDYW

SEQ ID NO: 17173 - protein, 16 aa, Homo sapiens
CARSMVQGVRWYFQHW

SEQ ID NO: 17174 - protein, 21 aa, Homo sapiens
CAKELIGAGNYIPRYWYFDLW

SEQ ID NO: 17175 - protein, 22 aa, Homo sapiens
CARDLGPTVVKPGYYYYGMDVW

SEQ ID NO: 17176 - protein, 14 aa, Homo sapiens
CARVAVTTWEFDLW

SEQ ID NO: 17177 - protein, 22 aa, Homo sapiens
CATWDSSLTAGSVVFGGGSVVF

SEQ ID NO: 17178 - protein, 24 aa, Homo sapiens
CARNSFYCKGGVCHPMRFSWFDPW

SEQ ID NO: 17179 - protein, 21 aa, Homo sapiens
CARGGGIFGVVIISSNPFDYW

SEQ ID NO: 17180 - protein, 17 aa, Homo sapiens
CARLRDILTGFEAFDIW

SEQ ID NO: 17181 - protein, 18 aa, Homo sapiens
CARAGLTSASSRVFFDSW

SEQ ID NO: 17182 - protein, 13 aa, Homo sapiens
CQQYNNRPPLSSF

SEQ ID NO: 17183 - protein, 14 aa, Homo sapiens
CARQGGSETYDDYW

SEQ ID NO: 17184 - protein, 17 aa, Homo sapiens
CARGRVLQRLSDAFDIW

SEQ ID NO: 17185 - protein, 20 aa, Homo sapiens
CTTDRDYDYIWGSYRYIDYW

SEQ ID NO: 17186 - protein, 20 aa, Homo sapiens
CARPLTSPSNFHYYYGMDVW

SEQ ID NO: 17187 - protein, 22 aa, Homo sapiens
CARGEGYYGTGNYYKKYYFDYW

SEQ ID NO: 17188 - protein, 20 aa, Homo sapiens
CARSPGPHCISTRCLDLDYW

SEQ ID NO: 17189 - protein, 18 aa, Homo sapiens
CATPRAPYSSSWSSFDYW

SEQ ID NO: 17190 - protein, 20 aa, Homo sapiens
CARGDCSSASCYSWRWFDPW

SEQ ID NO: 17191 - protein, 14 aa, Homo sapiens
CASTSHMRVYFDYW

SEQ ID NO: 17192 - protein, 20 aa, Homo sapiens
CATAHDCGGGRCYSPWFDPW

SEQ ID NO: 17193 - protein, 20 aa, Homo sapiens
CARDRGSSSYFSNFYYMDDW

SEQ ID NO: 17194 - protein, 15 aa, Homo sapiens
CARDPPAVGVEFDYW

SEQ ID NO: 17195 - protein, 17 aa, Homo sapiens
CARARYADYSAEYFQHW

SEQ ID NO: 17196 - protein, 17 aa, Homo sapiens
CARELAPNWGSRWFDPW

SEQ ID NO: 17197 - protein, 15 aa, Homo sapiens
CARTLLISSHLVDYW

SEQ ID NO: 17198 - protein, 16 aa, Homo sapiens
CASLYYFDFSGFFDYW

SEQ ID NO: 17199 - protein, 14 aa, Homo sapiens
CARDEVLGHYFESW

SEQ ID NO: 17200 - protein, 18 aa, Homo sapiens
CAAVPFETLPPLYYFDYW

SEQ ID NO: 17201 - protein, 15 aa, Homo sapiens
CANYDSKDGDGFDIW

SEQ ID NO: 17202 - protein, 17 aa, Homo sapiens
CAKNGYYDSSGFNLDYW

SEQ ID NO: 17203 - protein, 18 aa, Homo sapiens
CARDYFYDFWSAYAMDVW

SEQ ID NO: 17204 - protein, 25 aa, Homo sapiens
CARDLRYCTSDSCYVGYYYYGMDVW

SEQ ID NO: 17205 - protein, 18 aa, Homo sapiens
CAKEAYDYIWGSYRFPYW

SEQ ID NO: 17206 - protein, 25 aa, Homo sapiens
CARHVEDCSSTSCSPRPYYYGMDVW

SEQ ID NO: 17207 - protein, 19 aa, Homo sapiens
CASSSYYYDSSGPYYFDFW

SEQ ID NO: 17208 - protein, 19 aa, Homo sapiens
CARDPGYYGSGSLDAFDIW

SEQ ID NO: 17209 - protein, 14 aa, Homo sapiens
CARQDKYSSSDDYW

SEQ ID NO: 17210 - protein, 19 aa, Homo sapiens
CARESISGPGAPKNWFDPW

SEQ ID NO: 17211 - protein, 14 aa, Homo sapiens
CATAAGTPPYFDYW

SEQ ID NO: 17212 - protein, 16 aa, Homo sapiens
CVRSPASWGFNYFDYW

SEQ ID NO: 17213 - protein, 20 aa, Homo sapiens
CARMGSCGGGSCYSGYFDPW

SEQ ID NO: 17214 - protein, 14 aa, Homo sapiens
CQSYDGSLSESGVF

SEQ ID NO: 17215 - protein, 14 aa, Homo sapiens
CARGLYYDRSFNYW

SEQ ID NO: 17216 - protein, 24 aa, Homo sapiens
CARYGYDYIWGSYRPYYYYYMDVW

SEQ ID NO: 17217 - protein, 16 aa, Homo sapiens
CTKSPSSSSYSGADYW

SEQ ID NO: 17218 - protein, 23 aa, Homo sapiens
CDWSSDVCSSDLRYCGGDCRDYW

SEQ ID NO: 17219 - protein, 18 aa, Homo sapiens
CARDRDSSSWSNSYMDVW

SEQ ID NO: 17220 - protein, 17 aa, Homo sapiens
CARHGGPHWVNWYFDLW

SEQ ID NO: 17221 - protein, 22 aa, Homo sapiens
CARGAGCSGGTCYSGYWYFDLW

SEQ ID NO: 17222 - protein, 9 aa, Homo sapiens
CTRKPVDYW

SEQ ID NO: 17223 - protein, 16 aa, Homo sapiens
CARGKSYSTWYYFDYW

SEQ ID NO: 17224 - protein, 12 aa, Homo sapiens
CVRHGGKMFDSW

SEQ ID NO: 17225 - protein, 20 aa, Homo sapiens
CARDLQQQLVIDYYYGMDVW

SEQ ID NO: 17226 - protein, 16 aa, Homo sapiens
CAKDVDDDDYGVFDYW

SEQ ID NO: 17227 - protein, 23 aa, Homo sapiens
CARSRMISDIGYCSSTSCPFDYW

SEQ ID NO: 17228 - protein, 21 aa, Homo sapiens
CARDLFSFYRGPGNYGWFDPW

SEQ ID NO: 17229 - protein, 17 aa, Homo sapiens
CARGKAGVVGATALDYW

SEQ ID NO: 17230 - protein, 21 aa, Homo sapiens
CARAQIVRYFDWLSSVVFDYW

SEQ ID NO: 17231 - protein, 18 aa, Homo sapiens
CARDGSSRYSTSSGLDYW

SEQ ID NO: 17232 - protein, 24 aa, Homo sapiens
CARDARYCTGGVCYDYYYYGMDVW

SEQ ID NO: 17233 - protein, 15 aa, Homo sapiens
CARDHRVGDTECDYW

SEQ ID NO: 17234 - protein, 18 aa, Homo sapiens
CARQYYYDSSRWDEFDPW

SEQ ID NO: 17235 - protein, 17 aa, Homo sapiens
CAKLSGLGDYDDAFDIW

SEQ ID NO: 17236 - protein, 20 aa, Homo sapiens
CAREDMVQASLKYYYYMDVW

SEQ ID NO: 17237 - protein, 21 aa, Homo sapiens
CASQRADNYGSGIYNEYFQHW

SEQ ID NO: 17238 - protein, 18 aa, Homo sapiens
CASGVVGATISEYYFDYW

SEQ ID NO: 17239 - protein, 23 aa, Homo sapiens
CARQPSWCNGDSCYPDYYGMDVW

SEQ ID NO: 17240 - protein, 21 aa, Homo sapiens
CARNRNFDFWSGYYSGHLDYW

SEQ ID NO: 17241 - protein, 15 aa, Homo sapiens
CARLLTTGYWYFDLW

SEQ ID NO: 17242 - protein, 19 aa, Homo sapiens
CVRGEKRLWPRRNYYLDYW

SEQ ID NO: 17243 - protein, 17 aa, Homo sapiens
CARLILSGSGWYGGDYW

SEQ ID NO: 17244 - protein, 15 aa, Homo sapiens
CARAGYTYNYYFDYW

SEQ ID NO: 17245 - protein, 20 aa, Homo sapiens
CARVGTMVQGVTELFLFDYW

SEQ ID NO: 17246 - protein, 17 aa, Homo sapiens
CARDGRPGAYHFWFDCW

SEQ ID NO: 17247 - protein, 17 aa, Homo sapiens
CARYYCPGSACFGFDYW

SEQ ID NO: 17248 - protein, 15 aa, Homo sapiens
CAVLQTIAARHFDYW

SEQ ID NO: 17249 - protein, 26 aa, Homo sapiens
CARDYSHYEVDTVAKFYSYYYYMDVW

SEQ ID NO: 17250 - protein, 20 aa, Homo sapiens
CARDKGDGGSSGWYDAFDIW

SEQ ID NO: 17251 - protein, 22 aa, Homo sapiens
CARTNLGELSPRGYYYYGMDVW

SEQ ID NO: 17252 - protein, 18 aa, Homo sapiens
CARARSPDSGLVGDFDSW

SEQ ID NO: 17253 - protein, 16 aa, Homo sapiens
CAKGHYSGSYYYFDYW

SEQ ID NO: 17254 - protein, 23 aa, Homo sapiens
CARGMGLPYSRTSSIAARPMDYW

SEQ ID NO: 17255 - protein, 13 aa, Homo sapiens
CAKLISVYAFDYW

SEQ ID NO: 17256 - protein, 12 aa, Homo sapiens
CHQYNVWPPWAF

SEQ ID NO: 17257 - protein, 15 aa, Homo sapiens
CATETIFLGGRFDPW

SEQ ID NO: 17258 - protein, 20 aa, Homo sapiens
CARGAYSSSWYGPKYYFDYW

SEQ ID NO: 17259 - protein, 24 aa, Homo sapiens
CADTAVYYCAKAGVAAPDAYFDYW

SEQ ID NO: 17260 - protein, 24 aa, Homo sapiens
CATGSRITIFGVVTTSSVYAFDIW

SEQ ID NO: 17261 - protein, 17 aa, Homo sapiens
CARHGVRSGWDVDFDLW

SEQ ID NO: 17262 - protein, 20 aa, Homo sapiens
CARDRQSIAARPEIDGFDIW

SEQ ID NO: 17263 - protein, 15 aa, Homo sapiens
CANIPLRVAGILDYW

SEQ ID NO: 17264 - protein, 18 aa, Homo sapiens
CARLGHIVATTIYYFDYW

SEQ ID NO: 17265 - protein, 15 aa, Homo sapiens
CAREPMLGTNAFDIW

SEQ ID NO: 17266 - protein, 15 aa, Homo sapiens
CARDCIGGVCPLDYW

SEQ ID NO: 17267 - protein, 18 aa, Homo sapiens
CARVRHDYGDYIDAFDIW

SEQ ID NO: 17268 - protein, 17 aa, Homo sapiens
CARIDSTGWYGDAFDIW

SEQ ID NO: 17269 - protein, 19 aa, Homo sapiens
CATNAHCSGGKCPLYFDHW

SEQ ID NO: 17270 - protein, 17 aa, Homo sapiens
CARGILAFEGNYYMDVW

SEQ ID NO: 17271 - protein, 14 aa, Homo sapiens
CARGVIGWYYFDFW

SEQ ID NO: 17272 - protein, 21 aa, Homo sapiens
CARDRSPRGYDPNYYYGMDVW

SEQ ID NO: 17273 - protein, 15 aa, Homo sapiens
CASPRGYSGYSFDYW

SEQ ID NO: 17274 - protein, 23 aa, Homo sapiens
CARDLYYYDSRRYYDPSHYFDYW

SEQ ID NO: 17275 - protein, 23 aa, Homo sapiens
CAREPGVTHDFWSDYYTEAFDIW

SEQ ID NO: 17276 - protein, 15 aa, Homo sapiens
CARERSTLERYFDYW

SEQ ID NO: 17277 - protein, 15 aa, Homo sapiens
CARGLYGLTSKIDYW

SEQ ID NO: 17278 - protein, 23 aa, Homo sapiens
CAHSGYYDFWSGYYRGHDAFDIW

SEQ ID NO: 17279 - protein, 15 aa, Homo sapiens
CASTSGYDEYYFDYW

SEQ ID NO: 17280 - protein, 24 aa, Homo sapiens
CARASIVGDSPFFGVARRYYFDYW

SEQ ID NO: 17281 - protein, 11 aa, Homo sapiens
CQHYDSAPALF

SEQ ID NO: 17282 - protein, 21 aa, Homo sapiens
CARDSSDVYSGYDSGFYFDHW

SEQ ID NO: 17283 - protein, 18 aa, Homo sapiens
CATPRTYGDYPVGDFDYW

SEQ ID NO: 17284 - protein, 11 aa, Homo sapiens
CQQVSIFPYTF

SEQ ID NO: 17285 - protein, 21 aa, Homo sapiens
CAGLTYYYDSSGHTMGHFDYW

SEQ ID NO: 17286 - protein, 15 aa, Homo sapiens
CARWGDDYGDYVDYW

SEQ ID NO: 17287 - protein, 19 aa, Homo sapiens
CAKDPYYDFWSASYYMDVW

SEQ ID NO: 17288 - protein, 13 aa, Homo sapiens
CSSYGGSHNFLLF

SEQ ID NO: 17289 - protein, 20 aa, Homo sapiens
CARGPYTVRIFGVVIDFDYW

SEQ ID NO: 17290 - protein, 15 aa, Homo sapiens
CTRRDDYGDRDWDYW

SEQ ID NO: 17291 - protein, 18 aa, Homo sapiens
CARVLPGASFTWWYFDLW

SEQ ID NO: 17292 - protein, 20 aa, Homo sapiens
CARFTGKVESRSSSRYFQEW

SEQ ID NO: 17293 - protein, 16 aa, Homo sapiens
CARRYCSATSCAFDYW

SEQ ID NO: 17294 - protein, 17 aa, Homo sapiens
CAKDSSWADGDYVFDYW

SEQ ID NO: 17295 - protein, 16 aa, Homo sapiens
CARDGPVTGPKGFDYW

SEQ ID NO: 17296 - protein, 19 aa, Homo sapiens
CVREGESEHNDYDRIFDYW

SEQ ID NO: 17297 - protein, 20 aa, Homo sapiens
CARDSVIPYGSGSYRWFDAW

SEQ ID NO: 17298 - protein, 13 aa, Homo sapiens
CSRIAAALDFGYW

SEQ ID NO: 17299 - protein, 20 aa, Homo sapiens
CAREGDGSGSYWNYYYMDVW

SEQ ID NO: 17300 - protein, 15 aa, Homo sapiens
CARGLDGSGSPPDYW

SEQ ID NO: 17301 - protein, 25 aa, Homo sapiens
CAHSPFDYDFWSGYYSGRTYYFDYW

SEQ ID NO: 17302 - protein, 18 aa, Homo sapiens
CAKDQLGLVVIPAAPDYW

SEQ ID NO: 17303 - protein, 21 aa, Homo sapiens
CARALFARSVPRPHYFYMDVW

SEQ ID NO: 17304 - protein, 15 aa, Homo sapiens
CARVTTERGGTFDDW

SEQ ID NO: 17305 - protein, 19 aa, Homo sapiens
CAHFGYDLRSGYYHGFDYW

SEQ ID NO: 17306 - protein, 13 aa, Homo sapiens
CAGSMAPRRFDYW

SEQ ID NO: 17307 - protein, 16 aa, Homo sapiens
CARDRNYGGRSYFDYW

SEQ ID NO: 17308 - protein, 22 aa, Homo sapiens
CARGNYDSSGYSGFLDWYFDLW

SEQ ID NO: 17309 - protein, 16 aa, Homo sapiens
CARGGTRGPLWAFGYW

SEQ ID NO: 17310 - protein, 14 aa, Homo sapiens
CAVCPLLEWIFDYW

SEQ ID NO: 17311 - protein, 18 aa, Homo sapiens
CAAPRGYDSSGYDAFDIW

SEQ ID NO: 17312 - protein, 22 aa, Homo sapiens
CARAGYSSSPGLIYYYYYMDVW

SEQ ID NO: 17313 - protein, 16 aa, Homo sapiens
CARSYDFSTHGTFDFW

SEQ ID NO: 17314 - protein, 24 aa, Homo sapiens
CAREPTEFGAVAGTRSGYYYMDVW

SEQ ID NO: 17315 - protein, 13 aa, Homo sapiens
CSRKVAGTAFDIW

SEQ ID NO: 17316 - protein, 21 aa, Homo sapiens
CATRGYCTGGVCPESDASDIW

SEQ ID NO: 17317 - protein, 21 aa, Homo sapiens
CARAPVYYYDSSGYYSHFDYW

SEQ ID NO: 17318 - protein, 16 aa, Homo sapiens
CARENSHDGLHAFDIW

SEQ ID NO: 17319 - protein, 16 aa, Homo sapiens
CARVLQGSSGYYFDYW

SEQ ID NO: 17320 - protein, 27 aa, Homo sapiens
CAKEVYISRITIFGVVTPPYYYGMDVW

SEQ ID NO: 17321 - protein, 17 aa, Homo sapiens
CARGSGWYEYYYGMDVW

SEQ ID NO: 17322 - protein, 19 aa, Homo sapiens
CARDNDYIWGSYRSWFDPW

SEQ ID NO: 17323 - protein, 19 aa, Homo sapiens
CATRLAYCGGDCPYHFDYW

SEQ ID NO: 17324 - protein, 23 aa, Homo sapiens
CARFSWSAVPGTTLTEENWFDPW

SEQ ID NO: 17325 - protein, 13 aa, Homo sapiens
CTTDQRGGDFDYW

SEQ ID NO: 17326 - protein, 16 aa, Homo sapiens
CVRGAFLEWFHGFDIW

SEQ ID NO: 17327 - protein, 13 aa, Homo sapiens
CAHITVGSTHDYW

SEQ ID NO: 17328 - protein, 19 aa, Homo sapiens
CARDCSSTSCYARDAFDIW

SEQ ID NO: 17329 - protein, 17 aa, Homo sapiens
CARTAPCGGDCYYFDYW

SEQ ID NO: 17330 - protein, 20 aa, Homo sapiens
CARASLTHCRYGTCAWFDPW

SEQ ID NO: 17331 - protein, 18 aa, Homo sapiens
CARDVPVDTALADAFDIW

SEQ ID NO: 17332 - protein, 21 aa, Homo sapiens
CARDQHYSNYEYYYYYGMDVW

SEQ ID NO: 17333 - protein, 17 aa, Homo sapiens
CATGPLAAAALNWFDPW

SEQ ID NO: 17334 - protein, 12 aa, Homo sapiens
CQSFDRSNHGVF

SEQ ID NO: 17335 - protein, 23 aa, Homo sapiens
CARQSEGITNFGVVIIAPYFDYW

SEQ ID NO: 17336 - protein, 19 aa, Homo sapiens
CAKVLYSSSWSPARGFDYW

SEQ ID NO: 17337 - protein, 12 aa, Homo sapiens
CARLSGRDPDYW

SEQ ID NO: 17338 - protein, 13 aa, Homo sapiens
CQRRSKWPPECSF

SEQ ID NO: 17339 - protein, 17 aa, Homo sapiens
CAHSDDSSGWYSWFDPW

SEQ ID NO: 17340 - protein, 17 aa, Homo sapiens
CARHAVSGSYTPPWDYW

SEQ ID NO: 17341 - protein, 16 aa, Homo sapiens
CATGPAATKGDWFDPW

SEQ ID NO: 17342 - protein, 24 aa, Homo sapiens
CARDILRPDYYDSSGYSHYYFDYW

SEQ ID NO: 17343 - protein, 25 aa, Homo sapiens
CARAGVFYDYIWGSYRYTDENFDYW

SEQ ID NO: 17344 - protein, 15 aa, Homo sapiens
CAQTWNYIWGSFDYW

SEQ ID NO: 17345 - protein, 18 aa, Homo sapiens
CARRPAKNDFWSAYFDYW

SEQ ID NO: 17346 - protein, 17 aa, Homo sapiens
CARGSRDGYNLGRIDYW

SEQ ID NO: 17347 - protein, 20 aa, Homo sapiens
CARDRETSYSSGWSYYFDYW

SEQ ID NO: 17348 - protein, 16 aa, Homo sapiens
CARVTLQLGEGYFDYW

SEQ ID NO: 17349 - protein, 17 aa, Homo sapiens
CARQTGYSGWYGGFDFW

SEQ ID NO: 17350 - protein, 15 aa, Homo sapiens
CARSDSGSGSQHDYW

SEQ ID NO: 17351 - protein, 20 aa, Homo sapiens
CAKSLYCTGGTCYVGYIDLW

SEQ ID NO: 17352 - protein, 16 aa, Homo sapiens
CARFHDYGHDNYFDYW

SEQ ID NO: 17353 - protein, 18 aa, Homo sapiens
CARDPNDYGDYGEAFDYW

SEQ ID NO: 17354 - protein, 16 aa, Homo sapiens
CARLGDEWELLLVDYW

SEQ ID NO: 17355 - protein, 21 aa, Homo sapiens
CTRGTYYYDSSGYPNDAFDIW

SEQ ID NO: 17356 - protein, 21 aa, Homo sapiens
CARTGMDFSEPYYYYYYMDVW

SEQ ID NO: 17357 - protein, 25 aa, Homo sapiens
CARDPGKEVRWGYYDSSPSNWFDPW

SEQ ID NO: 17358 - protein, 15 aa, Homo sapiens
CARRSGWLINAFDIW

SEQ ID NO: 17359 - protein, 14 aa, Homo sapiens
CASSISSASCYDYW

SEQ ID NO: 17360 - protein, 17 aa, Homo sapiens
CASQGANLAALDTFHVW

SEQ ID NO: 17361 - protein, 22 aa, Homo sapiens
CAREHYDFWSGSFSSVNWFDLW

SEQ ID NO: 17362 - protein, 19 aa, Homo sapiens
CARDVGSSGYRYVGRFDPW

SEQ ID NO: 17363 - protein, 18 aa, Homo sapiens
CATYYYDSSGYYLDFDYW

SEQ ID NO: 17364 - protein, 22 aa, Homo sapiens
CARTSSISILGVTYYYYYMDVW

SEQ ID NO: 17365 - protein, 25 aa, Homo sapiens
CARHAAICGGGSGGSCYPYNWFDPW

SEQ ID NO: 17366 - protein, 16 aa, Homo sapiens
CANYSGYDSYWYFDLW

SEQ ID NO: 17367 - protein, 32 aa, Homo sapiens
CLRSEDTAVYYCAADPETYYGDYKRYNWFDPW

SEQ ID NO: 17368 - protein, 16 aa, Homo sapiens
CARDDYGDYGALGDYW

SEQ ID NO: 17369 - protein, 26 aa, Homo sapiens
CARLVIAARPSSRGTLLDYYYYMDVW

SEQ ID NO: 17370 - protein, 18 aa, Homo sapiens
CARDHGVEIVATPPFDYW

SEQ ID NO: 17371 - protein, 18 aa, Homo sapiens
CARPRSKYSSSSGEFDYW

SEQ ID NO: 17372 - protein, 20 aa, Homo sapiens
CARDTSYDFWSGYSGTFDYW

SEQ ID NO: 17373 - protein, 17 aa, Homo sapiens
CVRPHDFWSGSNWFDSW

SEQ ID NO: 17374 - protein, 16 aa, Homo sapiens
CVRTSRDGALDYYDYW

SEQ ID NO: 17375 - protein, 14 aa, Homo sapiens
CAHRQDSTLHFDYW

SEQ ID NO: 17376 - protein, 18 aa, Homo sapiens
CTTTLSVYGDYAQGFDYW

SEQ ID NO: 17377 - protein, 20 aa, Homo sapiens
CAHATYYYGSGSYPQIFDYW

SEQ ID NO: 17378 - protein, 19 aa, Homo sapiens
CATTAAPDDSGFPIGFDNW

SEQ ID NO: 17379 - protein, 17 aa, Homo sapiens
CAREDPREDAGNTFDYW

SEQ ID NO: 17380 - protein, 16 aa, Homo sapiens
CARVMYGSSWDTLDYW

SEQ ID NO: 17381 - protein, 14 aa, Homo sapiens
CAKVAQGSSYFDYW

SEQ ID NO: 17382 - protein, 16 aa, Homo sapiens
CARERMVQGNLHFDYW

SEQ ID NO: 17383 - protein, 18 aa, Homo sapiens
CARGHDYGDYVFHWFDPW

SEQ ID NO: 17384 - protein, 16 aa, Homo sapiens
CAQRFGVVIGPYFDYW

SEQ ID NO: 17385 - protein, 18 aa, Homo sapiens
CARPGITVAGILDGFDIW

SEQ ID NO: 17386 - protein, 20 aa, Homo sapiens
CAREGCGADCYSSSRAFDIW

SEQ ID NO: 17387 - protein, 17 aa, Homo sapiens
CVTPYCSGGRCYAFDYW

SEQ ID NO: 17388 - protein, 12 aa, Homo sapiens
CAANGITMFDYW

SEQ ID NO: 17389 - protein, 15 aa, Homo sapiens
CARASVGGYSSFDYW

SEQ ID NO: 17390 - protein, 21 aa, Homo sapiens
CAKGGPSGYCSGGSCGYFDYW

SEQ ID NO: 17391 - protein, 15 aa, Homo sapiens
CAHSKSSAWYQIDYW

SEQ ID NO: 17392 - protein, 19 aa, Homo sapiens
CSRDIYYFDGSACYYQDVW

SEQ ID NO: 17393 - protein, 22 aa, Homo sapiens
CARDVEKLDIWGSYRSYAFDIW

SEQ ID NO: 17394 - protein, 15 aa, Homo sapiens
CAGAAARTYNCFDPW

SEQ ID NO: 17395 - protein, 23 aa, Homo sapiens
CARDRGYFDWLLRTDRGTYFDYW

SEQ ID NO: 17396 - protein, 16 aa, Homo sapiens
CTREGSGYDYNWFDPW

SEQ ID NO: 17397 - protein, 19 aa, Homo sapiens
CATDSGSYLGAAYYYMDVW

SEQ ID NO: 17398 - protein, 17 aa, Homo sapiens
CAHRMTSVVARAGFDYW

SEQ ID NO: 17399 - protein, 19 aa, Homo sapiens
CARNRRTIVATIKGYFDYW

SEQ ID NO: 17400 - protein, 21 aa, Homo sapiens
CATDSRSSSWLPFRAAYFDLW

SEQ ID NO: 17401 - protein, 17 aa, Homo sapiens
CARQPLSSSWYCPSDYW

SEQ ID NO: 17402 - protein, 19 aa, Homo sapiens
CARVEGLGYDYYYYYMDVW

SEQ ID NO: 17403 - protein, 20 aa, Homo sapiens
CTRDQHRYCSGGSCYSPDYW

SEQ ID NO: 17404 - protein, 21 aa, Homo sapiens
CARVPVHYSNAWYSYRYMDVW

SEQ ID NO: 17405 - protein, 16 aa, Homo sapiens
CARDMYAGIPDYFDYW

SEQ ID NO: 17406 - protein, 14 aa, Homo sapiens
CARSDGYWSWFDPW

SEQ ID NO: 17407 - protein, 14 aa, Homo sapiens
CARVGSDFWALDYW

SEQ ID NO: 17408 - protein, 19 aa, Homo sapiens
CARGLRAYCGGDCYSSDYW

SEQ ID NO: 17409 - protein, 22 aa, Homo sapiens
CARVGLYYYDSSGYRSDAFDIW

SEQ ID NO: 17410 - protein, 26 aa, Homo sapiens
CARSRSFYDSSGSESGSYYYYGMDVW

SEQ ID NO: 17411 - protein, 23 aa, Homo sapiens
CATAFDPYYYDSSGSKRGAFDIW

SEQ ID NO: 17412 - protein, 14 aa, Homo sapiens
CAKSAVQTSRFDCW

SEQ ID NO: 17413 - protein, 22 aa, Homo sapiens
CARGREKYCSSTSCTEYYFDYW

SEQ ID NO: 17414 - protein, 21 aa, Homo sapiens
CARHSISIVVVPAAYNWFDPW

SEQ ID NO: 17415 - protein, 14 aa, Homo sapiens
CASSLSVVACFDYW

SEQ ID NO: 17416 - protein, 15 aa, Homo sapiens
CARATVTTYNWFDPW

SEQ ID NO: 17417 - protein, 15 aa, Homo sapiens
CARGPHSGTSYIDYW

SEQ ID NO: 17418 - protein, 16 aa, Homo sapiens
CARDVITFGGVIDDYW

SEQ ID NO: 17419 - protein, 20 aa, Homo sapiens
CAKDFRVGIPGIIYNWFDPW

SEQ ID NO: 17420 - protein, 23 aa, Homo sapiens
CARGTTYYDILTGYYSLGSFDYW

SEQ ID NO: 17421 - protein, 18 aa, Homo sapiens
CARGDYYSTPDWPQFDPW

SEQ ID NO: 17422 - protein, 20 aa, Homo sapiens
CVRGGPGYCSGLSCYPGDYW

SEQ ID NO: 17423 - protein, 21 aa, Homo sapiens
CARDVVTTRLLYYYYSYMDVW

SEQ ID NO: 17424 - protein, 15 aa, Homo sapiens
CAAEVPQGVIYFNYW

SEQ ID NO: 17425 - protein, 19 aa, Homo sapiens
CATRPQITIFGVPDAFDIW

SEQ ID NO: 17426 - protein, 13 aa, Homo sapiens
CARPQIWGPIDYW

SEQ ID NO: 17427 - protein, 14 aa, Homo sapiens
CANGETPSGYFQHW

SEQ ID NO: 17428 - protein, 21 aa, Homo sapiens
CARMAGYCSGNTCYSHYFDYW

SEQ ID NO: 17429 - protein, 19 aa, Homo sapiens
CAADPDFSEYYYYYYMDVW

SEQ ID NO: 17430 - protein, 16 aa, Homo sapiens
CTRAPAGPPYYYMDIW

SEQ ID NO: 17431 - protein, 29 aa, Homo sapiens
CAKDRAGYDILTGYLRSPDYYYYYGMDVW

SEQ ID NO: 17432 - protein, 19 aa, Homo sapiens
CARLYNDRSGGNDQWFDPW

SEQ ID NO: 17433 - protein, 17 aa, Homo sapiens
CARSRYSASYYGGADYW

SEQ ID NO: 17434 - protein, 14 aa, Homo sapiens
CARQITILDAFDIW

SEQ ID NO: 17435 - protein, 17 aa, Homo sapiens
CALTGVFGLPYNWFDPW

SEQ ID NO: 17436 - protein, 14 aa, Homo sapiens
CARVNSDYLYFDLW

SEQ ID NO: 17437 - protein, 17 aa, Homo sapiens
CTTENYYDSSGYLRDYW

SEQ ID NO: 17438 - protein, 19 aa, Homo sapiens
CAREGGGMGTMIGNWFDPW

SEQ ID NO: 17439 - protein, 22 aa, Homo sapiens
CARGEGYDILTDSYYYYYMDVW

SEQ ID NO: 17440 - protein, 20 aa, Homo sapiens
CAKDLGLEPIYYYYYGMDVW

SEQ ID NO: 17441 - protein, 23 aa, Homo sapiens
CARDSAPHYYDSSGYYPKSFDYW

SEQ ID NO: 17442 - protein, 21 aa, Homo sapiens
CARAYDFWSGSIYYYYGMDVW

SEQ ID NO: 17443 - protein, 24 aa, Homo sapiens
CARDNDQEGVTSFRFNYYYGMDVW

SEQ ID NO: 17444 - protein, 16 aa, Homo sapiens
CARTPDYINYGWFDPW

SEQ ID NO: 17445 - protein, 16 aa, Homo sapiens
CARNLYGSGSRAFDIW

SEQ ID NO: 17446 - protein, 15 aa, Homo sapiens
CAHRTFGGWSAFDYW

SEQ ID NO: 17447 - protein, 14 aa, Homo sapiens
CASSHASTWSFVYW

SEQ ID NO: 17448 - protein, 23 aa, Homo sapiens
CARDRIFWSGYTNPYYYYGMDVW

SEQ ID NO: 17449 - protein, 16 aa, Homo sapiens
CAKVRVGGTLHAFDMW

SEQ ID NO: 17450 - protein, 17 aa, Homo sapiens
CARDSKLTTYQDAFDIW

SEQ ID NO: 17451 - protein, 14 aa, Homo sapiens
CARDRLVQGVSDYW

SEQ ID NO: 17452 - protein, 18 aa, Homo sapiens
CARDRGEGYSSGWYFDYW

SEQ ID NO: 17453 - protein, 15 aa, Homo sapiens
CARGTRSIAAYFDYW

SEQ ID NO: 17454 - protein, 18 aa, Homo sapiens
CVRDPHYGDYDGDAFDIW

SEQ ID NO: 17455 - protein, 19 aa, Homo sapiens
CARAPYCSSTSCWYYFDYW

SEQ ID NO: 17456 - protein, 22 aa, Homo sapiens
CAREASEQWLILGGSYLYFDYW

SEQ ID NO: 17457 - protein, 16 aa, Homo sapiens
CAREVCGRSSCYFDYW

SEQ ID NO: 17458 - protein, 18 aa, Homo sapiens
CARHGRSVSSSRTYFDYW

SEQ ID NO: 17459 - protein, 17 aa, Homo sapiens
CARDRILEWLPPEFDYW

SEQ ID NO: 17460 - protein, 17 aa, Homo sapiens
CAHGYSGYDFYYYFDYW

SEQ ID NO: 17461 - protein, 17 aa, Homo sapiens
CARSSIAARPSLYFDYW

SEQ ID NO: 17462 - protein, 18 aa, Homo sapiens
CARGDHLGELTKSFFDSW

SEQ ID NO: 17463 - protein, 22 aa, Homo sapiens
CARASWGSGDLAPYYYYGMDVW

SEQ ID NO: 17464 - protein, 24 aa, Homo sapiens
CARGYYDFWSGYLGTGYYYYMDVW

SEQ ID NO: 17465 - protein, 14 aa, Homo sapiens
CARDRFPRGWLDPW

SEQ ID NO: 17466 - protein, 19 aa, Homo sapiens
CARRVRGGLRGWNNWFDPW

SEQ ID NO: 17467 - protein, 12 aa, Homo sapiens
CASRKNGYFDYW

SEQ ID NO: 17468 - protein, 15 aa, Homo sapiens
CARGGVEYDRWFDPW

SEQ ID NO: 17469 - protein, 20 aa, Homo sapiens
CASPRSSMAQGLAIAVFDYW

SEQ ID NO: 17470 - protein, 15 aa, Homo sapiens
CVKGGYSSSSSFDYW

SEQ ID NO: 17471 - protein, 12 aa, Homo sapiens
CQQSWQTPIWTF

SEQ ID NO: 17472 - protein, 17 aa, Homo sapiens
CAHRPLGSSTVFDFDYW

SEQ ID NO: 17473 - protein, 15 aa, Homo sapiens
CARESVGRGLQFDCW

SEQ ID NO: 17474 - protein, 14 aa, Homo sapiens
CAILTKTNYYMDVW

SEQ ID NO: 17475 - protein, 23 aa, Homo sapiens
CARPLDRYCSGGSCYSNWGLDYW

SEQ ID NO: 17476 - protein, 18 aa, Homo sapiens
CARRPSVDYGDTYYFDHW

SEQ ID NO: 17477 - protein, 19 aa, Homo sapiens
CARAQFNDNWLNGDGMDVW

SEQ ID NO: 17478 - protein, 29 aa, Homo sapiens
CTRVRPDILTGYWGGSAEFHYYYYGMDVW

SEQ ID NO: 17479 - protein, 14 aa, Homo sapiens
CELRDYSGYPLDYW

SEQ ID NO: 17480 - protein, 23 aa, Homo sapiens
CARDHMNFGVVIIDFYYYGMDVW

SEQ ID NO: 17481 - protein, 35 aa, Homo sapiens
CLRSEDTAVYYCARGFAVHDYIWGSYRWGHYFDYW

SEQ ID NO: 17482 - protein, 16 aa, Homo sapiens
CARGGYSSSSGWFDPW

SEQ ID NO: 17483 - protein, 20 aa, Homo sapiens
CTRGGRSGSFRLLGYYFDSW

SEQ ID NO: 17484 - protein, 19 aa, Homo sapiens
CARGYCSSTSCYRTRIDYW

SEQ ID NO: 17485 - protein, 15 aa, Homo sapiens
CASTHDYGDYEVDYW

SEQ ID NO: 17486 - protein, 14 aa, Homo sapiens
CAHLRVSDDAFGIW

SEQ ID NO: 17487 - protein, 19 aa, Homo sapiens
CARDHDSSGYEGWGWFDPW

SEQ ID NO: 17488 - protein, 20 aa, Homo sapiens
CARDMEASGSYYAPNAFDIW

SEQ ID NO: 17489 - protein, 23 aa, Homo sapiens
CARTWRYCSSTTCYDASDAFDIW

SEQ ID NO: 17490 - protein, 16 aa, Homo sapiens
CTRELPMTTVPTFDYW

SEQ ID NO: 17491 - protein, 12 aa, Homo sapiens
CAKGGIDAFHLW

SEQ ID NO: 17492 - protein, 13 aa, Homo sapiens
CARQFLTGELDYW

SEQ ID NO: 17493 - protein, 14 aa, Homo sapiens
CVSSSGYSGWFDPW

SEQ ID NO: 17494 - protein, 24 aa, Homo sapiens
CARDSYSGYDYDLGYGDYGDFDYW

SEQ ID NO: 17495 - protein, 12 aa, Homo sapiens
CAKGGSGWFDPW

SEQ ID NO: 17496 - protein, 21 aa, Homo sapiens
CARGPDQGRYSSTSSNWFDPW

SEQ ID NO: 17497 - protein, 19 aa, Homo sapiens
CARTYYYDSSGYSAWSDYW

SEQ ID NO: 17498 - protein, 18 aa, Homo sapiens
CARVGGDGYNLGQNFDYW

SEQ ID NO: 17499 - protein, 19 aa, Homo sapiens
CTRDPDDYDYSNYPFFDYW

SEQ ID NO: 17500 - protein, 16 aa, Homo sapiens
CARRALRFNVGGADYW

SEQ ID NO: 17501 - protein, 19 aa, Homo sapiens
CARDQPIYGDLRYWYFDLW

SEQ ID NO: 17502 - protein, 17 aa, Homo sapiens
CARTGGLWGIYWYFDLW

SEQ ID NO: 17503 - protein, 14 aa, Homo sapiens
CARDGGLELGFNYW

SEQ ID NO: 17504 - protein, 18 aa, Homo sapiens
CARDSYGDLGYYYYMDVW

SEQ ID NO: 17505 - protein, 12 aa, Homo sapiens
CVTGPKYYFDSW

SEQ ID NO: 17506 - protein, 18 aa, Homo sapiens
CARVSFNNYNVDWYFDFW

SEQ ID NO: 17507 - protein, 30 aa, Homo sapiens
CALPISDTAMYYCARHVLTIFGVFTYMDVW

SEQ ID NO: 17508 - protein, 20 aa, Homo sapiens
CARERGPLKRRYYYFGMDVW

SEQ ID NO: 17509 - protein, 14 aa, Homo sapiens
CADSSGYYSHIDYW

SEQ ID NO: 17510 - protein, 17 aa, Homo sapiens
CARIEGSYHRSGYIDYW

SEQ ID NO: 17511 - protein, 14 aa, Homo sapiens
CARGMGWRDAFDIW

SEQ ID NO: 17512 - protein, 19 aa, Homo sapiens
CARHKRPNENHYYYYMDVW

SEQ ID NO: 17513 - protein, 17 aa, Homo sapiens
CARDPYDSDYYGAFDIW

SEQ ID NO: 17514 - protein, 22 aa, Homo sapiens
CATHRPTYIVVVVAATLYVDYW

SEQ ID NO: 17515 - protein, 18 aa, Homo sapiens
CARTDLHRYNYKTYFDSW

SEQ ID NO: 17516 - protein, 17 aa, Homo sapiens
CARHRYSGYARGPFDYW

SEQ ID NO: 17517 - protein, 18 aa, Homo sapiens
CARPLGSDTLLRGDFDCW

SEQ ID NO: 17518 - protein, 21 aa, Homo sapiens
CASNLRYCSSTSCVPEYFQHW

SEQ ID NO: 17519 - protein, 18 aa, Homo sapiens
CAHTHYGGNLLYNWFGPW

SEQ ID NO: 17520 - protein, 16 aa, Homo sapiens
CAKLVPPIEEGYFDYW

SEQ ID NO: 17521 - protein, 24 aa, Homo sapiens
CARLNPYGGYYYDSSGYYAPHDYW

SEQ ID NO: 17522 - protein, 14 aa, Homo sapiens
CATSPYAAGPFEYW

SEQ ID NO: 17523 - protein, 15 aa, Homo sapiens
CAHRRVAGYQGFDYW

SEQ ID NO: 17524 - protein, 15 aa, Homo sapiens
CARSIAAAGTYMDVW

SEQ ID NO: 17525 - protein, 14 aa, Homo sapiens
CARHKLGNWHFDLW

SEQ ID NO: 17526 - protein, 17 aa, Homo sapiens
CARDGFGGVIAKAFDYW

SEQ ID NO: 17527 - protein, 16 aa, Homo sapiens
CARARGDLGLYYFDYW

SEQ ID NO: 17528 - protein, 19 aa, Homo sapiens
CAKDIYDYTFLHKDAFDVW

SEQ ID NO: 17529 - protein, 18 aa, Homo sapiens
CARSGYSSGWPRGDFDYW

SEQ ID NO: 17530 - protein, 16 aa, Homo sapiens
CTTDVRYSNYSPLDYW

SEQ ID NO: 17531 - protein, 17 aa, Homo sapiens
CAHRLRYENYYPYFDSW

SEQ ID NO: 17532 - protein, 14 aa, Homo sapiens
CAGQNDYGDYWGYW

SEQ ID NO: 17533 - protein, 17 aa, Homo sapiens
CARMKRVGGGDRHFDYW

SEQ ID NO: 17534 - protein, 16 aa, Homo sapiens
CVRDIGGSGTRYFQHW

SEQ ID NO: 17535 - protein, 16 aa, Homo sapiens
CVRGWRGDVFDPVDVW

SEQ ID NO: 17536 - protein, 11 aa, Homo sapiens [sequence omitted]

SEQ ID NO: 17537 - protein, 22 aa, Homo sapiens
CARQPPQNDFWSASPTYYFDYW

SEQ ID NO: 17538 - protein, 18 aa, Homo sapiens
CAKDLGAYSSGWYGVDYW

SEQ ID NO: 17539 - protein, 12 aa, Homo sapiens
CMQALHCPPCSF

SEQ ID NO: 17540 - protein, 19 aa, Homo sapiens
CARDSFSSVHLGLYYFDYW

SEQ ID NO: 17541 - protein, 14 aa, Homo sapiens
CTTVVVVGYYFDSW

SEQ ID NO: 17542 - protein, 17 aa, Homo sapiens
CARHFWSMVTSPPFDPW

SEQ ID NO: 17543 - protein, 21 aa, Homo sapiens
CARVGYYGSGRVIAHRYFDYW

SEQ ID NO: 17544 - protein, 15 aa, Homo sapiens
CARTSSAYSPFFDYW

SEQ ID NO: 17545 - protein, 20 aa, Homo sapiens
CARDRSPPSSGYLVSAFDIW

SEQ ID NO: 17546 - protein, 16 aa, Homo sapiens
CATTWAHDYSNYLDYW

SEQ ID NO: 17547 - protein, 18 aa, Homo sapiens
CARHWGAHSSGYSGTDYW

SEQ ID NO: 17548 - protein, 18 aa, Homo sapiens
CARAHFYDSRGTDAFDIW

SEQ ID NO: 17549 - protein, 14 aa, Homo sapiens
CARAIGVATYFDHW

SEQ ID NO: 17550 - protein, 15 aa, Homo sapiens
CVRGDSGNFPGTDYW

SEQ ID NO: 17551 - protein, 21 aa, Homo sapiens
CARGHIVASNREWGSGAFDIW

SEQ ID NO: 17552 - protein, 22 aa, Homo sapiens
CARGPGYYDFWSGYYRGWFDPW

SEQ ID NO: 17553 - protein, 16 aa, Homo sapiens
CARLTGPGYNSGWDYW

SEQ ID NO: 17554 - protein, 20 aa, Homo sapiens
CATAGYCNSPTCPKAFFDYW

SEQ ID NO: 17555 - protein, 15 aa, Homo sapiens
CARSTVTTRSPFDSW

SEQ ID NO: 17556 - protein, 18 aa, Homo sapiens
CTTDDVPNCGGNCYFGHW

SEQ ID NO: 17557 - protein, 28 aa, Homo sapiens
CARDPTPVVVPAAISDGLYYYYYGMDVW

SEQ ID NO: 17558 - protein, 17 aa, Homo sapiens
CARLAYDPLRGDAFEIW

SEQ ID NO: 17559 - protein, 14 aa, Homo sapiens
CARHRLNGNWFDPW

SEQ ID NO: 17560 - protein, 14 aa, Homo sapiens
CARDALSGWLVDYW

SEQ ID NO: 17561 - protein, 17 aa, Homo sapiens
CAKAIPTTSIRSYFDLW

SEQ ID NO: 17562 - protein, 17 aa, Homo sapiens
CAKAGNKHDYGDYMDYW

SEQ ID NO: 17563 - protein, 15 aa, Homo sapiens
CAKASSSSGHHCDYW

SEQ ID NO: 17564 - protein, 17 aa, Homo sapiens
CARYYCTGGVCYHFDYW

SEQ ID NO: 17565 - protein, 14 aa, Homo sapiens
CAILMIQGPLNDYW

SEQ ID NO: 17566 - protein, 16 aa, Homo sapiens
CARFNYDSSGYYFGYW

SEQ ID NO: 17567 - protein, 30 aa, Homo sapiens
CARDQIPDHDFWSGYYTWASAYYYYYMDVW

SEQ ID NO: 17568 - protein, 16 aa, Homo sapiens
CASCFSPYGDYVFDYW

SEQ ID NO: 17569 - protein, 15 aa, Homo sapiens
CARGSVTTDFYFDYW

SEQ ID NO: 17570 - protein, 16 aa, Homo sapiens
CARIDNILPDNEFGPW

SEQ ID NO: 17571 - protein, 14 aa, Homo sapiens
CARRGYYEYYFDSW

SEQ ID NO: 17572 - protein, 27 aa, Homo sapiens
CARASPLTLDYYDILTGYYIGEAFDIW

SEQ ID NO: 17573 - protein, 17 aa, Homo sapiens
CALQYQSSVYYYGMDVW

SEQ ID NO: 17574 - protein, 27 aa, Homo sapiens
CASLFGMVQGVKHIRHKNDYYYGMDVW

SEQ ID NO: 17575 - protein, 17 aa, Homo sapiens
CARDLGGGVLSWWFDPW

SEQ ID NO: 17576 - protein, 19 aa, Homo sapiens
CARESGSGDLEWLSHLDYW

SEQ ID NO: 17577 - protein, 18 aa, Homo sapiens
CARIGADFWSGSIFTDYW

SEQ ID NO: 17578 - protein, 12 aa, Homo sapiens
CGTYGDWAFDIW

SEQ ID NO: 17579 - protein, 18 aa, Homo sapiens
CTRLLKSSSGFYFRFDYW

SEQ ID NO: 17580 - protein, 19 aa, Homo sapiens
CARSFNCGGDCPLGWFDPW

SEQ ID NO: 17581 - protein, 18 aa, Homo sapiens
CARRVRATMIVVDQFDYW

SEQ ID NO: 17582 - protein, 16 aa, Homo sapiens
CARAYSRGWPDAFDIW

SEQ ID NO: 17583 - protein, 24 aa, Homo sapiens
CARDSITMVQGVILVYYYYYMDVW

SEQ ID NO: 17584 - protein, 18 aa, Homo sapiens
CAREDYGDYEFKSAFDIW

SEQ ID NO: 17585 - protein, 18 aa, Homo sapiens
CAKANDDYYDSSGYFDYW

SEQ ID NO: 17586 - protein, 19 aa, Homo sapiens
CARDPGRGYGPFVYYFDYW

SEQ ID NO: 17587 - protein, 16 aa, Homo sapiens
CARYTSGSHDYYFDYW

SEQ ID NO: 17588 - protein, 16 aa, Homo sapiens
CASYPPLKVGNYDDYW

SEQ ID NO: 17589 - protein, 21 aa, Homo sapiens
CARAYLEYYDSSGYYDYFDHW

SEQ ID NO: 17590 - protein, 24 aa, Homo sapiens
CARGHGGSHCSGGSCYPHNWFDPW

SEQ ID NO: 17591 - protein, 16 aa, Homo sapiens
CASFDSSGYYYYHDYW

SEQ ID NO: 17592 - protein, 18 aa, Homo sapiens
CARELAGMTTVVSPFDYW

SEQ ID NO: 17593 - protein, 13 aa, Homo sapiens
CARDPAFGALDYW

SEQ ID NO: 17594 - protein, 20 aa, Homo sapiens
CARAHIRSFDYLQSDWFDPW

SEQ ID NO: 17595 - protein, 17 aa, Homo sapiens
CARLRSCGGDCYYSDNW

SEQ ID NO: 17596 - protein, 17 aa, Homo sapiens
CARVFDVLTGYSILDYW

SEQ ID NO: 17597 - protein, 25 aa, Homo sapiens
CATTPVGRIMITFGGVIAPHFFDYW

SEQ ID NO: 17598 - protein, 18 aa, Homo sapiens
CSRHRTNNFGSGTPFDYW

SEQ ID NO: 17599 - protein, 18 aa, Homo sapiens
CAKCSFSIDQRSGYFHYW

SEQ ID NO: 17600 - protein, 18 aa, Homo sapiens
CARHSWVDYYGSGSPDYW

SEQ ID NO: 17601 - protein, 21 aa, Homo sapiens
CARIPEVPAAMSHYYYGMDVW

SEQ ID NO: 17602 - protein, 23 aa, Homo sapiens
CARHAHFDWLLYPVGGHNWFDPW

SEQ ID NO: 17603 - protein, 16 aa, Homo sapiens
CARAVGGSYYFGSDYW

SEQ ID NO: 17604 - protein, 16 aa, Homo sapiens
CARPRSGTYYNPADYW

SEQ ID NO: 17605 - protein, 14 aa, Homo sapiens
CGRDGGTPRYFQDW

SEQ ID NO: 17606 - protein, 17 aa, Homo sapiens
CVPFFGSRSGYPTLDYW

SEQ ID NO: 17607 - protein, 20 aa, Homo sapiens
CARHETYYGSGSYGVAFDIW

SEQ ID NO: 17608 - protein, 13 aa, Homo sapiens
CARDYGAHGVDYW

SEQ ID NO: 17609 - protein, 15 aa, Homo sapiens
CARGRLRLPTEIDYW

SEQ ID NO: 17610 - protein, 21 aa, Homo sapiens
CARHSASGGYDFWSGHPSDYW

SEQ ID NO: 17611 - protein, 17 aa, Homo sapiens
CARHWRSGTYSQAIDYW

SEQ ID NO: 17612 - protein, 17 aa, Homo sapiens
CAKDPALITGTTGFDSW

SEQ ID NO: 17613 - protein, 28 aa, Homo sapiens
CDWSSDVCSSDLDFWSGYGYYYYYMDVW

SEQ ID NO: 17614 - protein, 16 aa, Homo sapiens
CARRRIATADQTIDYW

SEQ ID NO: 17615 - protein, 15 aa, Homo sapiens
CAKDLDYYGSGKDYW

SEQ ID NO: 17616 - protein, 16 aa, Homo sapiens
CARTYDDSGYYNFKYW

SEQ ID NO: 17617 - protein, 15 aa, Homo sapiens
CARDRPYGEECFDPW

SEQ ID NO: 17618 - protein, 15 aa, Homo sapiens
CARGVSLPPNWFDPW

SEQ ID NO: 17619 - protein, 14 aa, Homo sapiens
CAPEHLQSYCFDYW

SEQ ID NO: 17620 - protein, 17 aa, Homo sapiens
CARFTPYSGYDSVFDYW

SEQ ID NO: 17621 - protein, 14 aa, Homo sapiens
CANYGETAAWFDYW

SEQ ID NO: 17622 - protein, 15 aa, Homo sapiens
CTRPGTAWDDAFDIW

SEQ ID NO: 17623 - protein, 12 aa, Homo sapiens
CTTEYYYYMDVW

SEQ ID NO: 17624 - protein, 22 aa, Homo sapiens
CAREWWYCSSTSCYQPYHFDYW

SEQ ID NO: 17625 - protein, 15 aa, Homo sapiens
CAVNSGYDSNWFDPW

SEQ ID NO: 17626 - protein, 18 aa, Homo sapiens
CARDLPLLAAAGTKIDYW

SEQ ID NO: 17627 - protein, 20 aa, Homo sapiens
CARQLRGSAYDYADDAFDIW

SEQ ID NO: 17628 - protein, 15 aa, Homo sapiens
CVRDENSGWNDFDYW

SEQ ID NO: 17629 - protein, 19 aa, Homo sapiens
CAKNLYGDYPYYYYYMDVW

SEQ ID NO: 17630 - protein, 17 aa, Homo sapiens
CARDDPTELPMGAFDIW

SEQ ID NO: 17631 - protein, 19 aa, Homo sapiens
CARDQHGVKYGDYVPFDYW

SEQ ID NO: 17632 - protein, 26 aa, Homo sapiens
CARAPETHYYGGSGQRHAWDDAFDMW

SEQ ID NO: 17633 - protein, 19 aa, Homo sapiens
CARRQGAGLYIAAAVFDCW

SEQ ID NO: 17634 - protein, 17 aa, Homo sapiens
CARQRIEYPPGYYFDYW

SEQ ID NO: 17635 - protein, 18 aa, Homo sapiens
CARDGCSSTSCYVALDYW

SEQ ID NO: 17636 - protein, 21 aa, Homo sapiens
CARPRYSGYEEGDYYYYMDVW

SEQ ID NO: 17637 - protein, 15 aa, Homo sapiens
CAKEQWPTDWYFDLW

SEQ ID NO: 17638 - protein, 15 aa, Homo sapiens
CVESHTIDGQVGYVF

SEQ ID NO: 17639 - protein, 25 aa, Homo sapiens
CAGGEYYYDSSGYGALDYYYGMDVW

SEQ ID NO: 17640 - protein, 14 aa, Homo sapiens
CGTWDTSLNANWVF

SEQ ID NO: 17641 - protein, 23 aa, Homo sapiens
CARDPLLGYYDILTGYSTEWDYW

SEQ ID NO: 17642 - protein, 19 aa, Homo sapiens
CARGDGHCSGGTCYSLDYW

SEQ ID NO: 17643 - protein, 23 aa, Homo sapiens
CARLWGYCSGGNCYPTYNWFDPW

SEQ ID NO: 17644 - protein, 20 aa, Homo sapiens
CTRGRIPAALSYYYYYMDVW

SEQ ID NO: 17645 - protein, 21 aa, Homo sapiens
CVRDSSQRRCSGGCCYDFDSW

SEQ ID NO: 17646 - protein, 18 aa, Homo sapiens
CARVPGSSRVRYDAFDLW

SEQ ID NO: 17647 - protein, 19 aa, Homo sapiens
CAKGGLYCSGGSCWGFDYW

SEQ ID NO: 17648 - protein, 15 aa, Homo sapiens
CAQMCLLLRRYYDFW

SEQ ID NO: 17649 - protein, 16 aa, Homo sapiens
CARTNYYDSNGYYDYW

SEQ ID NO: 17650 - protein, 16 aa, Homo sapiens
CARDRGGDNEYYFDYW

SEQ ID NO: 17651 - protein, 20 aa, Homo sapiens
CARVPQSVQGPRVYTWFDPW

SEQ ID NO: 17652 - protein, 17 aa, Homo sapiens
CATAPVVYAMWGWFDPW

SEQ ID NO: 17653 - protein, 21 aa, Homo sapiens
CARDHPRIFGVLITSLPFDYW

SEQ ID NO: 17654 - protein, 21 aa, Homo sapiens
CARDLEDYGGNSGLSDAFDIW

SEQ ID NO: 17655 - protein, 21 aa, Homo sapiens
CASTVQLRYFDWLLFGAFDIW

SEQ ID NO: 17656 - protein, 13 aa, Homo sapiens
CARRGGELTIDYW

SEQ ID NO: 17657 - protein, 20 aa, Homo sapiens
CAREIWVDLYGSGSYPFDYW

SEQ ID NO: 17658 - protein, 18 aa, Homo sapiens
CARDSGIAAARRNAFDIW

SEQ ID NO: 17659 - protein, 24 aa, Homo sapiens
CARDGRTTYDFWSGYDYYYGMDVW

SEQ ID NO: 17660 - protein, 17 aa, Homo sapiens
CAKSLTVTTPRNWFDPW

SEQ ID NO: 17661 - protein, 19 aa, Homo sapiens
CARDGGGFRELLYHYFDSW

SEQ ID NO: 17662 - protein, 17 aa, Homo sapiens
CARHFEPRYSGTPFDYW

SEQ ID NO: 17663 - protein, 23 aa, Homo sapiens
CARDFRMGDFWSGYHTGNAMDVW

SEQ ID NO: 17664 - protein, 22 aa, Homo sapiens
CARGCSGGNCYRLRSNWYFDLW

SEQ ID NO: 17665 - protein, 14 aa, Homo sapiens
CAGGDYGNYEFDYW

SEQ ID NO: 17666 - protein, 19 aa, Homo sapiens
CARHGAGTTPVTRGYFDYW

SEQ ID NO: 17667 - protein, 17 aa, Homo sapiens
CASESTSGSYYGTFDYW

SEQ ID NO: 17668 - protein, 18 aa, Homo sapiens
CAREILGYGDYPGPFDYW

SEQ ID NO: 17669 - protein, 20 aa, Homo sapiens
CAHRLGGSRYPWNFGYFDYW

SEQ ID NO: 17670 - protein, 19 aa, Homo sapiens
CAKGGSGSFYIVPWYFDYW

SEQ ID NO: 17671 - protein, 13 aa, Homo sapiens
CARVVTPVYFDYW

SEQ ID NO: 17672 - protein, 23 aa, Homo sapiens
CASYLDIVVVPAAKVYYYGMDVW

SEQ ID NO: 17673 - protein, 24 aa, Homo sapiens
CARDPPGAAPPGGGWYGSFSFDYW

SEQ ID NO: 17674 - protein, 14 aa, Homo sapiens
CAHRQGFAGYFDYW

SEQ ID NO: 17675 - protein, 21 aa, Homo sapiens
CARHGAHGYCSGDTCYPFDYW

SEQ ID NO: 17676 - protein, 20 aa, Homo sapiens
CARSRGASYYGSGNYEFDPW

SEQ ID NO: 17677 - protein, 14 aa, Homo sapiens
CARDYNVEWYINYW

SEQ ID NO: 17678 - protein, 24 aa, Homo sapiens
CARAPFRNYCSNSPCYFYYYMDVW

SEQ ID NO: 17679 - protein, 19 aa, Homo sapiens
CASKGGHCSSTSCYAFDYW

SEQ ID NO: 17680 - protein, 21 aa, Homo sapiens
CAQIRGSRTYCGGDCSHFDFW

SEQ ID NO: 17681 - protein, 16 aa, Homo sapiens
CARAERWLQSHCFDYW

SEQ ID NO: 17682 - protein, 16 aa, Homo sapiens
CAKVVVPNFNWNFDYW

SEQ ID NO: 17683 - protein, 18 aa, Homo sapiens
CARHVLTIFGVFTYMDVW

SEQ ID NO: 17684 - protein, 15 aa, Homo sapiens
CARSLYSDGTPFDYW

SEQ ID NO: 17685 - protein, 16 aa, Homo sapiens
CAKDQRHGYNYGFDFW

SEQ ID NO: 17686 - protein, 17 aa, Homo sapiens
CVRGYYPVSGQSNFDYW

SEQ ID NO: 17687 - protein, 16 aa, Homo sapiens
CAREVAPGSSWPCDYW

SEQ ID NO: 17688 - protein, 15 aa, Homo sapiens
CQVWHRSSDHPTWVF

SEQ ID NO: 17689 - protein, 20 aa, Homo sapiens
CALRPYHDFWSGYLAFFDYW

SEQ ID NO: 17690 - protein, 12 aa, Homo sapiens
CLHHGNFPLWTF

SEQ ID NO: 17691 - protein, 18 aa, Homo sapiens
CAKVLRDSSSWYWHFDLW

SEQ ID NO: 17692 - protein, 20 aa, Homo sapiens
CARVRSIDDASGYWYYFAYW

SEQ ID NO: 17693 - protein, 14 aa, Homo sapiens
CPRSNTGYYRIDYW

SEQ ID NO: 17694 - protein, 15 aa, Homo sapiens
CARGFDSAWELFRYW

SEQ ID NO: 17695 - protein, 14 aa, Homo sapiens
CAKERGTTYYFDNW

SEQ ID NO: 17696 - protein, 13 aa, Homo sapiens
CANYQHGDNFDYW

SEQ ID NO: 17697 - protein, 16 aa, Homo sapiens
CARGPPVGVPGPLDYW

SEQ ID NO: 17698 - protein, 23 aa, Homo sapiens
CARGESYYGSGSYTLEVDWFDPW

SEQ ID NO: 17699 - protein, 23 aa, Homo sapiens
CARPTRPNDGSGQPREYDAFDIW

SEQ ID NO: 17700 - protein, 21 aa, Homo sapiens
CARSGGYCSSTSCYSDAFDIW

SEQ ID NO: 17701 - protein, 21 aa, Homo sapiens
CARDWNNWLELKKSNDAFDIW

SEQ ID NO: 17702 - protein, 19 aa, Homo sapiens
CARDQRYCSGDCYDAFDIW

SEQ ID NO: 17703 - protein, 16 aa, Homo sapiens
CARYSTIAAGDGMDVW

SEQ ID NO: 17704 - protein, 22 aa, Homo sapiens
CASAALYYYDSSGYYNDAFDIW

SEQ ID NO: 17705 - protein, 18 aa, Homo sapiens
CARAGYCAGGVCQTFDSW

SEQ ID NO: 17706 - protein, 21 aa, Homo sapiens
CARGYYSGGTYYAHYYGMDVW

SEQ ID NO: 17707 - protein, 19 aa, Homo sapiens
CARHAVVVVAATSNWFDPW

SEQ ID NO: 17708 - protein, 17 aa, Homo sapiens
CARGEGQQLVYWYFDLW

SEQ ID NO: 17709 - protein, 16 aa, Homo sapiens
CAKDPYGDSYDTFDIW

SEQ ID NO: 17710 - protein, 19 aa, Homo sapiens
CARDRDSGGASSGYYLDLW

SEQ ID NO: 17711 - protein, 15 aa, Homo sapiens
CARWDDYGEEIDDYW

SEQ ID NO: 17712 - protein, 19 aa, Homo sapiens
CAKGSLVQATIQHWYFDLW

SEQ ID NO: 17713 - protein, 15 aa, Homo sapiens
CARELHLGELSFNYW

SEQ ID NO: 17714 - protein, 13 aa, Homo sapiens
CARGGFVRKFDYW

SEQ ID NO: 17715 - protein, 15 aa, Homo sapiens
CVTVVTPSGLAFDYW

SEQ ID NO: 17716 - protein, 14 aa, Homo sapiens
CEINSWSNRDFDYW

SEQ ID NO: 17717 - protein, 18 aa, Homo sapiens
CARDIGYSSGWYDTLDYW

SEQ ID NO: 17718 - protein, 21 aa, Homo sapiens
CARGITGYSASRYGSTFFDYW

SEQ ID NO: 17719 - protein, 16 aa, Homo sapiens
CARISCTGDVCHPDYW

SEQ ID NO: 17720 - protein, 17 aa, Homo sapiens
CAGGPPRCGGICYLDYW

SEQ ID NO: 17721 - protein, 16 aa, Homo sapiens
CARDAGNYYFYYMDVW

SEQ ID NO: 17722 - protein, 18 aa, Homo sapiens
CARDPEYDYMRESGFDYW

SEQ ID NO: 17723 - protein, 13 aa, Homo sapiens
CHEYNNWPPRHTF

SEQ ID NO: 17724 - protein, 27 aa, Homo sapiens
CARESTTYYDYIWGSYRSSPPDAFDIW

SEQ ID NO: 17725 - protein, 12 aa, Homo sapiens
CQHHNNYPRFTF

SEQ ID NO: 17726 - protein, 25 aa, Homo sapiens
CARGKGDYDILAGSIHRKNSAFDIW

SEQ ID NO: 17727 - protein, 26 aa, Homo sapiens
CVKDHESWGIQFQDYGDYVSTTADYW

SEQ ID NO: 17728 - protein, 20 aa, Homo sapiens
CARLSPDCSGGSCSIYFDYW

SEQ ID NO: 17729 - protein, 24 aa, Homo sapiens
CARDSGIYDILTGFYDEPKGGDYW

SEQ ID NO: 17730 - protein, 14 aa, Homo sapiens
CARPDDSGSYFDSW

SEQ ID NO: 17731 - protein, 24 aa, Homo sapiens
CARGVSGVNMILVVLGFYKYMDVW

SEQ ID NO: 17732 - protein, 19 aa, Homo sapiens
CVKRILWSGYYRDDAFDMW

SEQ ID NO: 17733 - protein, 16 aa, Homo sapiens
CARGNSGYYYAYFAYW

SEQ ID NO: 17734 - protein, 33 aa, Homo sapiens
CDWSSDVCSSDLEDTAVYYCARDLYYGGNYDYW

SEQ ID NO: 17735 - protein, 12 aa, Homo sapiens
CAHTYGGYPGYW

SEQ ID NO: 17736 - protein, 18 aa, Homo sapiens
CGRSGDSGYDWAYYFDYW

SEQ ID NO: 17737 - protein, 25 aa, Homo sapiens
CAREKRGGYDAPPIYYYYYYGMDVW

SEQ ID NO: 17738 - protein, 22 aa, Homo sapiens
CARVGPDFWSDYYSPYDAFDIW

SEQ ID NO: 17739 - protein, 25 aa, Homo sapiens
CASLLENEIDYGAQPFYYYYGMDVW

SEQ ID NO: 17740 - protein, 12 aa, Homo sapiens
CASGGWLRFAYW

SEQ ID NO: 17741 - protein, 16 aa, Homo sapiens
CARMSDAGTTLGFAYW

SEQ ID NO: 17742 - protein, 17 aa, Homo sapiens
CSRGVCHTYYYYGLDVW

SEQ ID NO: 17743 - protein, 18 aa, Homo sapiens
CARESVTTWYYYYYMDVW

SEQ ID NO: 17744 - protein, 21 aa, Homo sapiens
CVRDRGDSSRDYYALGYMDVW

SEQ ID NO: 17745 - protein, 15 aa, Homo sapiens
CVRDREMATAHFDYW

SEQ ID NO: 17746 - protein, 17 aa, Homo sapiens
CARDAEISGYTYYFDYW

SEQ ID NO: 17747 - protein, 16 aa, Homo sapiens
CVRNQGNRGYYGYDYW

SEQ ID NO: 17748 - protein, 17 aa, Homo sapiens
CARTNCTDGHCHYFDYW

SEQ ID NO: 17749 - protein, 22 aa, Homo sapiens
CATASPHYDILTGYSQDWFDPW

SEQ ID NO: 17750 - protein, 16 aa, Homo sapiens
CARDSGRVATMYFDLW

SEQ ID NO: 17751 - protein, 15 aa, Homo sapiens
CARQSGYSQCYFDYW

SEQ ID NO: 17752 - protein, 14 aa, Homo sapiens
CARDVGNLASFDYW

SEQ ID NO: 17753 - protein, 22 aa, Homo sapiens
CARKVAGVGRRRNPRDRWFDPW

SEQ ID NO: 17754 - protein, 16 aa, Homo sapiens
CARGPVATIRDPFDYW

SEQ ID NO: 17755 - protein, 16 aa, Homo sapiens
CARVKQEYSGYDFAYW

SEQ ID NO: 17756 - protein, 26 aa, Homo sapiens
CARDSRDYYDSSGYYVPYYYYGMDVW

SEQ ID NO: 17757 - protein, 21 aa, Homo sapiens
CARLPGWVEHQRYYYYGMDVW

SEQ ID NO: 17758 - protein, 17 aa, Homo sapiens
CARHGNLRGGNVYFDYW

SEQ ID NO: 17759 - protein, 18 aa, Homo sapiens
CARDPHDVWSSKNWFDPW

SEQ ID NO: 17760 - protein, 23 aa, Homo sapiens
CAKDALSGYCSGTSCFDNWFDHW

SEQ ID NO: 17761 - protein, 16 aa, Homo sapiens
CARDSDWLLHNGIDYW

SEQ ID NO: 17762 - protein, 16 aa, Homo sapiens
CARRPGPLGKNWFDPW

SEQ ID NO: 17763 - protein, 13 aa, Homo sapiens
CMQSIQLPLMCSF

SEQ ID NO: 17764 - protein, 17 aa, Homo sapiens
CAHNEGTTSPFNAFDIW

SEQ ID NO: 17765 - protein, 20 aa, Homo sapiens
CAKDRDDSSVYYPRDAFDVW

SEQ ID NO: 17766 - protein, 18 aa, Homo sapiens
CARDHLSSSWYEYYFDYW

SEQ ID NO: 17767 - protein, 20 aa, Homo sapiens
CARPRTGGDFWSGSFYFDYW

SEQ ID NO: 17768 - protein, 19 aa, Homo sapiens
CAKDWVVAATVSYPLLDYW

SEQ ID NO: 17769 - protein, 22 aa, Homo sapiens
CARESFLTFRAPGPHSDYMDVW

SEQ ID NO: 17770 - protein, 16 aa, Homo sapiens
CARDEIDGPVTIFDYW

SEQ ID NO: 17771 - protein, 18 aa, Homo sapiens
CVHSYHDSSAYYYVFDYW

SEQ ID NO: 17772 - protein, 26 aa, Homo sapiens
CARDYSNYEVGGVAGYYYYYYYMDVW

SEQ ID NO: 17773 - protein, 16 aa, Homo sapiens
CANTFGGVIVISFDYW

SEQ ID NO: 17774 - protein, 18 aa, Homo sapiens
CARALLYSTGWYGYFDYW

SEQ ID NO: 17775 - protein, 18 aa, Homo sapiens
CARLGRGLAIEAYYLHYW

SEQ ID NO: 17776 - protein, 21 aa, Homo sapiens
CAKGFGVQLWEFGYYYGMDVW

SEQ ID NO: 17777 - protein, 17 aa, Homo sapiens
CAKDQYSSGWYWYFDLW

SEQ ID NO: 17778 - protein, 17 aa, Homo sapiens
CVRLSTLVQGTTSFDYW

SEQ ID NO: 17779 - protein, 22 aa, Homo sapiens
CARNGDTAIRQFYYYYYGMDVW

SEQ ID NO: 17780 - protein, 16 aa, Homo sapiens
CATEPAFGGNFNFDYW

SEQ ID NO: 17781 - protein, 19 aa, Homo sapiens
CVKDTCITMDQGCHWFDPW

SEQ ID NO: 17782 - protein, 19 aa, Homo sapiens
CARVGRYCSGGSCHSFDYW

SEQ ID NO: 17783 - protein, 19 aa, Homo sapiens
CARARGPYGDYGGYYFDYW

SEQ ID NO: 17784 - protein, 21 aa, Homo sapiens
CATGNGLLWFRESEYDAFDIW

SEQ ID NO: 17785 - protein, 17 aa, Homo sapiens
CARHRGFSTGWYYFDYW

SEQ ID NO: 17786 - protein, 18 aa, Homo sapiens
CARERIAATDSQGEFDSW

SEQ ID NO: 17787 - protein, 17 aa, Homo sapiens
CARERWLRDGDDAFDIW

SEQ ID NO: 17788 - protein, 17 aa, Homo sapiens
CVSRGRQYDDGDYIFYW

SEQ ID NO: 17789 - protein, 18 aa, Homo sapiens
CARSWDGDYRGYNWFDPW

SEQ ID NO: 17790 - protein, 19 aa, Homo sapiens
CAREMRRESGSYDPAFNIW

SEQ ID NO: 17791 - protein, 19 aa, Homo sapiens
CTRDVLGAFSSDWGPVDYW

SEQ ID NO: 17792 - protein, 21 aa, Homo sapiens
CVHPKTSIFGVVKADYYLDVW

SEQ ID NO: 17793 - protein, 15 aa, Homo sapiens
CTIEYSGRDWVIDYW

SEQ ID NO: 17794 - protein, 16 aa, Homo sapiens
CARDFSSSWTDAFDVW

SEQ ID NO: 17795 - protein, 22 aa, Homo sapiens
CATAGGIVVVPAAMEGDYFDYW

SEQ ID NO: 17796 - protein, 17 aa, Homo sapiens
CARVGTTVTTPYYFDYW

SEQ ID NO: 17797 - protein, 15 aa, Homo sapiens
CARGEWLPEYYFDYW

SEQ ID NO: 17798 - protein, 17 aa, Homo sapiens
CAREGPKSFGSGSFDYW

SEQ ID NO: 17799 - protein, 12 aa, Homo sapiens
CASSGISDLDYW

SEQ ID NO: 17800 - protein, 17 aa, Homo sapiens
CARDQRIAGMTMPFDSW

SEQ ID NO: 17801 - protein, 13 aa, Homo sapiens
CQSYDSAVSGLLF

SEQ ID NO: 17802 - protein, 18 aa, Homo sapiens
CASSQPPGSGWYPWFDPW

SEQ ID NO: 17803 - protein, 22 aa, Homo sapiens
CARMTTVTTLPPEYYYYGMDVW

SEQ ID NO: 17804 - protein, 13 aa, Homo sapiens
CAKDRISFYLYYW

SEQ ID NO: 17805 - protein, 17 aa, Homo sapiens
CVKVGSSGWYRSNFDYW

SEQ ID NO: 17806 - protein, 16 aa, Homo sapiens
CVGLRFRENYYYMDVW

SEQ ID NO: 17807 - protein, 22 aa, Homo sapiens
CARPASRYCADDGCHSGNFDYW

SEQ ID NO: 17808 - protein, 15 aa, Homo sapiens
CALGGGYDLTYYDLW

SEQ ID NO: 17809 - protein, 14 aa, Homo sapiens
CARDLSSSWHFDYW

SEQ ID NO: 17810 - protein, 18 aa, Homo sapiens
CARLSPPFFAGTTFSDYW

SEQ ID NO: 17811 - protein, 17 aa, Homo sapiens
CARWPSDIPQFKWFDPW

SEQ ID NO: 17812 - protein, 25 aa, Homo sapiens
CARDCSSTSCPPQPRLYYYYGMDVW

SEQ ID NO: 17813 - protein, 13 aa, Homo sapiens
CARVIRELHFDFW

SEQ ID NO: 17814 - protein, 15 aa, Homo sapiens
CAKGPRNTVTHFDYW

SEQ ID NO: 17815 - protein, 21 aa, Homo sapiens
CAHRSLTYYDFWSGYPYFDYW

SEQ ID NO: 17816 - protein, 14 aa, Homo sapiens
CARGSTIFGVNDYW

SEQ ID NO: 17817 - protein, 16 aa, Homo sapiens
CATTGVVLRVDWFDPW

SEQ ID NO: 17818 - protein, 17 aa, Homo sapiens
CARSPITMIVGNWFDPW

SEQ ID NO: 17819 - protein, 16 aa, Homo sapiens
CARILDGYNPGYFDYW

SEQ ID NO: 17820 - protein, 22 aa, Homo sapiens
CARDLCDGGSCYPNYYYGMDVW

SEQ ID NO: 17821 - protein, 15 aa, Homo sapiens
CARRKSGTYYLGDYW

SEQ ID NO: 17822 - protein, 19 aa, Homo sapiens
CARERSPGSSSWYGPLDYW

SEQ ID NO: 17823 - protein, 17 aa, Homo sapiens
CATSTKGSGYDYRFDYW

SEQ ID NO: 17824 - protein, 18 aa, Homo sapiens
CARGNSYGRIAYHHFDYW

SEQ ID NO: 17825 - protein, 17 aa, Homo sapiens
CAREGLFSTSLKWFDPW

SEQ ID NO: 17826 - protein, 23 aa, Homo sapiens
CARTVVHVSSSGYYASVGYFDSW

SEQ ID NO: 17827 - protein, 18 aa, Homo sapiens
CAKDRDASGSYLALFDYW

SEQ ID NO: 17828 - protein, 18 aa, Homo sapiens
CANSVHNWDYDKRGFDPW

SEQ ID NO: 17829 - protein, 17 aa, Homo sapiens
CAKDPFGGRYTYHLDYW

SEQ ID NO: 17830 - protein, 15 aa, Homo sapiens
CARVALSDSSGIDYW

SEQ ID NO: 17831 - protein, 17 aa, Homo sapiens
CVRDPTAPRPGEYFQHW

SEQ ID NO: 17832 - protein, 21 aa, Homo sapiens
CARGRPGSSWTYYYYYGMDVW

SEQ ID NO: 17833 - protein, 17 aa, Homo sapiens
CTRHEPTYYHFYGMDVW

SEQ ID NO: 17834 - protein, 14 aa, Homo sapiens
CAHRPTSGWYFQHW

SEQ ID NO: 17835 - protein, 16 aa, Homo sapiens
CAHSKPSGYDTSFDYW

SEQ ID NO: 17836 - protein, 14 aa, Homo sapiens
CARVPYPSGTFDYW

SEQ ID NO: 17837 - protein, 17 aa, Homo sapiens
CARALRSYSYYYYMDVW

SEQ ID NO: 17838 - protein, 21 aa, Homo sapiens
CARDPRMTMIAVAALGPFDIW

SEQ ID NO: 17839 - protein, 16 aa, Homo sapiens
CARVFNTIFGEGSDYW

SEQ ID NO: 17840 - protein, 17 aa, Homo sapiens
CAKGQISSGSSLRFDPW

SEQ ID NO: 17841 - protein, 16 aa, Homo sapiens
CARPALTEIHDGFDIW

SEQ ID NO: 17842 - protein, 19 aa, Homo sapiens
CARDKDDFWSGYPGGSDYW

SEQ ID NO: 17843 - protein, 20 aa, Homo sapiens
CARARYDFWSSYYPNWFDSW

SEQ ID NO: 17844 - protein, 18 aa, Homo sapiens
CARKIVGCGGDCYPFDYW

SEQ ID NO: 17845 - protein, 11 aa, Homo sapiens [sequence omitted]

SEQ ID NO: 17846 - protein, 16 aa, Homo sapiens
CARGNDYGDYVPFKYW

SEQ ID NO: 17847 - protein, 13 aa, Homo sapiens
CARPMGGARFDPW

SEQ ID NO: 17848 - protein, 21 aa, Homo sapiens
CARLRYYHFWTTNPFGFFDSW

SEQ ID NO: 17849 - protein, 22 aa, Homo sapiens
CARATTHPDSSGYYLGGWFDPW

SEQ ID NO: 17850 - protein, 18 aa, Homo sapiens
CAKEGNDHGDWDWYFDLW

SEQ ID NO: 17851 - protein, 19 aa, Homo sapiens
CAHRLKGSGGWDRGAFDIW

SEQ ID NO: 17852 - protein, 17 aa, Homo sapiens
CARGARGGRVPYDFDSW

SEQ ID NO: 17853 - protein, 23 aa, Homo sapiens
CARQGEGYCSGGNCYGRAQFDYW

SEQ ID NO: 17854 - protein, 19 aa, Homo sapiens
CTTDGKYDSSTGAFWFDPW

SEQ ID NO: 17855 - protein, 19 aa, Homo sapiens
CARLIQSPKWEHIHYLDQW

SEQ ID NO: 17856 - protein, 17 aa, Homo sapiens
CARDRELRFLEWFPDYW

SEQ ID NO: 17857 - protein, 19 aa, Homo sapiens
CARGYCSGGSCYSGGSDYW

SEQ ID NO: 17858 - protein, 14 aa, Homo sapiens
CARESGDYGSPDYW

SEQ ID NO: 17859 - protein, 13 aa, Homo sapiens
CASVLDDDAFDIW

SEQ ID NO: 17860 - protein, 21 aa, Homo sapiens
CVHRDEGYCADGTCSTWFDPW

SEQ ID NO: 17861 - protein, 24 aa, Homo sapiens
CARAGYCSGGSCSSVYYYYGMDVW

SEQ ID NO: 17862 - protein, 12 aa, Homo sapiens
CQQGYITPQITF

SEQ ID NO: 17863 - protein, 19 aa, Homo sapiens
CARDGSTDFWSGHNWFDPW

SEQ ID NO: 17864 - protein, 14 aa, Homo sapiens
CARDGATVTGLDYW

SEQ ID NO: 17865 - protein, 13 aa, Homo sapiens
CARVRGYYYMDVW

SEQ ID NO: 17866 - protein, 16 aa, Homo sapiens
CAHRRQDSRGDYFDYW

SEQ ID NO: 17867 - protein, 19 aa, Homo sapiens
CATGYSYGLGFYYYYMDVW

SEQ ID NO: 17868 - protein, 16 aa, Homo sapiens
CARAGDSSGCCFFDCW

SEQ ID NO: 17869 - protein, 24 aa, Homo sapiens
CASPPTTDYYDFWSGNNSGAFDIW

SEQ ID NO: 17870 - protein, 18 aa, Homo sapiens
CAKDLESYYDSSGTLDYW

SEQ ID NO: 17871 - protein, 18 aa, Homo sapiens
CARDSGYSSGWLASFDYW

SEQ ID NO: 17872 - protein, 14 aa, Homo sapiens
CAHGARVSTYPDYW

SEQ ID NO: 17873 - protein, 20 aa, Homo sapiens
CASFMAAAGTGYYYYGMDVW

SEQ ID NO: 17874 - protein, 19 aa, Homo sapiens
CARDTEGGDFWSGYWFDPW

SEQ ID NO: 17875 - protein, 17 aa, Homo sapiens
CAQLTSDNRKYFWFDPW

SEQ ID NO: 17876 - protein, 14 aa, Homo sapiens
CQVWVSSFDHPAVF

SEQ ID NO: 17877 - protein, 21 aa, Homo sapiens
CAREAPVSTRPGPGYNWFDSW

SEQ ID NO: 17878 - protein, 19 aa, Homo sapiens
CARVSGLDESWYARSVDYW

SEQ ID NO: 17879 - protein, 16 aa, Homo sapiens
CARPPIGVDVNYFDYW

SEQ ID NO: 17880 - protein, 18 aa, Homo sapiens
CARGGYSSGSGGYYFDYW

SEQ ID NO: 17881 - protein, 21 aa, Homo sapiens
CARSLQPRRAMIVVGDAFDIW

SEQ ID NO: 17882 - protein, 22 aa, Homo sapiens
CARVSGGPGSYSFSEVYYFDYW

SEQ ID NO: 17883 - protein, 20 aa, Homo sapiens
CARHPMGGPDYGGRWYFDLW

SEQ ID NO: 17884 - protein, 16 aa, Homo sapiens
CASCESGSYSCFFDYW

SEQ ID NO: 17885 - protein, 17 aa, Homo sapiens
CARDNADDFWSGYLDPW

SEQ ID NO: 17886 - protein, 18 aa, Homo sapiens
CARDRYDSSSYYGILDYW

SEQ ID NO: 17887 - protein, 19 aa, Homo sapiens
CARELYSRSRDLWNAFDIW

SEQ ID NO: 17888 - protein, 17 aa, Homo sapiens
CARVIGPTLARMAFDIW

SEQ ID NO: 17889 - protein, 18 aa, Homo sapiens
CAREPTRIAAPGRGFDYW

SEQ ID NO: 17890 - protein, 24 aa, Homo sapiens
CARVGYCSAGSCDDLYHFYAMDVW

SEQ ID NO: 17891 - protein, 21 aa, Homo sapiens
CARLQGYCSGGSCREWYFDLW

SEQ ID NO: 17892 - protein, 18 aa, Homo sapiens
CARAQVNYYESSGYQDYW

SEQ ID NO: 17893 - protein, 18 aa, Homo sapiens
CVKGLEDYDFWSDPLDYW

SEQ ID NO: 17894 - protein, 16 aa, Homo sapiens
CARDHAVTMVQEDDYW

SEQ ID NO: 17895 - protein, 31 aa, Homo sapiens
CAKDRQYYDFWSGYYLSGTKGEYYYYYMDVW

SEQ ID NO: 17896 - protein, 17 aa, Homo sapiens
CARDDCSDGSCWYFDLW

SEQ ID NO: 17897 - protein, 14 aa, Homo sapiens
CARHSNGDYFFDYW

SEQ ID NO: 17898 - protein, 12 aa, Homo sapiens
CARDSIYRQDYW

SEQ ID NO: 17899 - protein, 21 aa, Homo sapiens
CAKDGAHCSGGSCYHDNFDYW

SEQ ID NO: 17900 - protein, 18 aa, Homo sapiens
CARHVDSSSWYPNWFDPW

SEQ ID NO: 17901 - protein, 19 aa, Homo sapiens
CAKVGSNAKWLKYNWIDIW

SEQ ID NO: 17902 - protein, 16 aa, Homo sapiens
CARVNDFRSALRIDYW

SEQ ID NO: 17903 - protein, 11 aa, Homo sapiens
CAKGAKGADYW

SEQ ID NO: 17904 - protein, 19 aa, Homo sapiens
CARDVSYCSGGSCYELDYW

SEQ ID NO: 17905 - protein, 22 aa, Homo sapiens
CARDEYYYGSGRDYYYYGMDVW

SEQ ID NO: 17906 - protein, 23 aa, Homo sapiens
CVRDRGGLFCSGESCYHNLFDPW

SEQ ID NO: 17907 - protein, 19 aa, Homo sapiens
CARDPKLEQRWDDYYMDVW

SEQ ID NO: 17908 - protein, 17 aa, Homo sapiens
CARDPLYSSGTRAFDVW

SEQ ID NO: 17909 - protein, 28 aa, Homo sapiens
CAKEWGGYDWVQYLATHTYYYYYGMDVW

SEQ ID NO: 17910 - protein, 16 aa, Homo sapiens
CARHTPAARRYWFDPW

SEQ ID NO: 17911 - protein, 14 aa, Homo sapiens
CAHRVDNYGIFDYW

SEQ ID NO: 17912 - protein, 22 aa, Homo sapiens
CARDRILEWLSDPVVDYYMDVW

SEQ ID NO: 17913 - protein, 19 aa, Homo sapiens
CARDGVLEWLLPRYYFDYW

SEQ ID NO: 17914 - protein, 20 aa, Homo sapiens
CARDRDYRDGDAYYDGLDIW

SEQ ID NO: 17915 - protein, 17 aa, Homo sapiens
CARDRWVTTSVSEFDPW

SEQ ID NO: 17916 - protein, 27 aa, Homo sapiens
CARQGVGVRDDFWSGYYTDYYYGMDVW

SEQ ID NO: 17917 - protein, 16 aa, Homo sapiens
CARDVGVVPPASFGYW

SEQ ID NO: 17918 - protein, 19 aa, Homo sapiens
CAREVSSVAAFRAIWFDPW

SEQ ID NO: 17919 - protein, 22 aa, Homo sapiens
CASDPTFTPSPAYYYYYGMDVW

SEQ ID NO: 17920 - protein, 16 aa, Homo sapiens
CAREDSSGYFSWFDPW

SEQ ID NO: 17921 - protein, 14 aa, Homo sapiens
CARDFPRRDAFDIW

SEQ ID NO: 17922 - protein, 15 aa, Homo sapiens
CAKNLGVATFSFDYW

SEQ ID NO: 17923 - protein, 14 aa, Homo sapiens
CARAGAVGREFEYW

SEQ ID NO: 17924 - protein, 35 aa, Homo sapiens
CDWSSDVCSSDLDTAVYYCAQLTSDNKKYFWFDPW

SEQ ID NO: 17925 - protein, 21 aa, Homo sapiens
CARDGLYMIGTTYYYYYMDVW

SEQ ID NO: 17926 - protein, 16 aa, Homo sapiens
CARINYNDFTWRFDRW

SEQ ID NO: 17927 - protein, 17 aa, Homo sapiens
CARDRGASITIFGADYW

SEQ ID NO: 17928 - protein, 18 aa, Homo sapiens
CARDRGYRGYETYYFDYW

SEQ ID NO: 17929 - protein, 17 aa, Homo sapiens
CARGMASGSSFDTFDIW

SEQ ID NO: 17930 - protein, 21 aa, Homo sapiens
CARDPDFETTVTYYYYYMDVW

SEQ ID NO: 17931 - protein, 22 aa, Homo sapiens
CARDFRGCSGGSCYLAWYFDLW

SEQ ID NO: 17932 - protein, 18 aa, Homo sapiens
CAREVGATLRENYYFDYW

SEQ ID NO: 17933 - protein, 20 aa, Homo sapiens
CARRVRSDPVVHETNWFDPW

SEQ ID NO: 17934 - protein, 18 aa, Homo sapiens
CARDLNDILTAYSLFDYW

SEQ ID NO: 17935 - protein, 17 aa, Homo sapiens
CAKTDSGYGYYYYMDVW

SEQ ID NO: 17936 - protein, 19 aa, Homo sapiens
CVRDDHGSGSNWVRCFDYW

SEQ ID NO: 17937 - protein, 21 aa, Homo sapiens
CARQVICTSCYDGDTDAFDIW

SEQ ID NO: 17938 - protein, 19 aa, Homo sapiens
CTTYFYDYIWGSYDYFDYW

SEQ ID NO: 17939 - protein, 20 aa, Homo sapiens
CARVGGYAYSGYDYAFFDNW

SEQ ID NO: 17940 - protein, 13 aa, Homo sapiens
CGTWDSGLSVVLF

SEQ ID NO: 17941 - protein, 16 aa, Homo sapiens
CAISLAPTAATWFDPW

SEQ ID NO: 17942 - protein, 20 aa, Homo sapiens
CARVGYCSGGSCYSGAFDIW

SEQ ID NO: 17943 - protein, 18 aa, Homo sapiens
CAGYDFWSDLGKNSFDPW

SEQ ID NO: 17944 - protein, 14 aa, Homo sapiens
CTRLGPAQFQFDYW

SEQ ID NO: 17945 - protein, 20 aa, Homo sapiens
CARFRFHSDGYSSAWYWDYW

SEQ ID NO: 17946 - protein, 18 aa, Homo sapiens
CARSYDTNGFGRNAFDIW

SEQ ID NO: 17947 - protein, 16 aa, Homo sapiens
CAREVEWFREYAFDIW

SEQ ID NO: 17948 - protein, 19 aa, Homo sapiens
CAKDLSPYLRYYYYGMDVW

SEQ ID NO: 17949 - protein, 14 aa, Homo sapiens
CLRGNAGYGNFDYW

SEQ ID NO: 17950 - protein, 20 aa, Homo sapiens
CARFPFGGVIDYYYYYMDVW

SEQ ID NO: 17951 - protein, 21 aa, Homo sapiens
CAGQSSLVQGIITEPNWFDPW

SEQ ID NO: 17952 - protein, 13 aa, Homo sapiens
CANVGEVQGVDYW

SEQ ID NO: 17953 - protein, 24 aa, Homo sapiens
CARAGEEGYCTGGPCDVYNWFDRW

SEQ ID NO: 17954 - protein, 12 aa, Homo sapiens
CARDRDYYFDHW

SEQ ID NO: 17955 - protein, 24 aa, Homo sapiens
CAREANYDFWSGYYPHYYYGMDVW

SEQ ID NO: 17956 - protein, 13 aa, Homo sapiens
CQVWDSTNDHPLF

SEQ ID NO: 17957 - protein, 16 aa, Homo sapiens
CASRAEDYYYYFMDVW

SEQ ID NO: 17958 - protein, 20 aa, Homo sapiens
CARCSSQGGYYYYYYGMDVW

SEQ ID NO: 17959 - protein, 19 aa, Homo sapiens
CARVLNPGGSHPGVDFDYW

SEQ ID NO: 17960 - protein, 19 aa, Homo sapiens
CARGVRVADTAMVHYFDNW

SEQ ID NO: 17961 - protein, 15 aa, Homo sapiens
CARDGITINYAMDVW

SEQ ID NO: 17962 - protein, 11 aa, Homo sapiens
CAEGGLVGDYW

SEQ ID NO: 17963 - protein, 14 aa, Homo sapiens
CARGSVVAGLFDYW

SEQ ID NO: 17964 - protein, 16 aa, Homo sapiens
CARGAVTSGWYVGDYW

SEQ ID NO: 17965 - protein, 16 aa, Homo sapiens
CATTPSVWGSYRLDYW

SEQ ID NO: 17966 - protein, 19 aa, Homo sapiens
CAREGSRMKLWFYTWFDMW

SEQ ID NO: 17967 - protein, 17 aa, Homo sapiens
CSLSLITIVGVDNLDYW

SEQ ID NO: 17968 - protein, 16 aa, Homo sapiens
CARGAVLAGVVYFDYW

SEQ ID NO: 17969 - protein, 12 aa, Homo sapiens
CARQNVYYIDYW

SEQ ID NO: 17970 - protein, 14 aa, Homo sapiens
CARLERVVASIDYW

SEQ ID NO: 17971 - protein, 19 aa, Homo sapiens
CAKDGYYSGSGGIYFFDYW

SEQ ID NO: 17972 - protein, 20 aa, Homo sapiens
CARDHGSIQNYDSSGYFGYW

SEQ ID NO: 17973 - protein, 18 aa, Homo sapiens
CARVEGYHDALENYFDYW

SEQ ID NO: 17974 - protein, 14 aa, Homo sapiens
CARRPGWTDAFDVW

SEQ ID NO: 17975 - protein, 18 aa, Homo sapiens
CAKDLRFLEWTPPPLDYW

SEQ ID NO: 17976 - protein, 17 aa, Homo sapiens
CAKDRSGWEQLEGADYW

SEQ ID NO: 17977 - protein, 17 aa, Homo sapiens
CARGRTGWDYYYYMDVW

SEQ ID NO: 17978 - protein, 15 aa, Homo sapiens
CAPDILGLGGVSDYW

SEQ ID NO: 17979 - protein, 17 aa, Homo sapiens
CARHRDQWLVKTLFDYW

SEQ ID NO: 17980 - protein, 15 aa, Homo sapiens
CAKDRAYSSPYLDYW

SEQ ID NO: 17981 - protein, 11 aa, Homo sapiens
CARARNYMDVW

SEQ ID NO: 17982 - protein, 13 aa, Homo sapiens
CARTQNMGAFDYW

SEQ ID NO: 17983 - protein, 17 aa, Homo sapiens
CARENMGSGWYYWFDPW

SEQ ID NO: 17984 - protein, 17 aa, Homo sapiens
CTRHFDSSAYYHEFDYW

SEQ ID NO: 17985 - protein, 20 aa, Homo sapiens
CARELMGGGDNFLSAAFDIW

SEQ ID NO: 17986 - protein, 17 aa, Homo sapiens
CARMKGPGSSSYAKDVW

SEQ ID NO: 17987 - protein, 16 aa, Homo sapiens
CARAPAMAAAARFDYW

SEQ ID NO: 17988 - protein, 17 aa, Homo sapiens
CAREADYGDYDGSTDYW

SEQ ID NO: 17989 - protein, 15 aa, Homo sapiens
CARLGSSSSRYFDLW

SEQ ID NO: 17990 - protein, 19 aa, Homo sapiens
CAREVLANDFWSGYFFDYW

SEQ ID NO: 17991 - protein, 21 aa, Homo sapiens
CARQRQAAAGRIRDTLLFDPW

SEQ ID NO: 17992 - protein, 12 aa, Homo sapiens
CAREDDGYNIYW

SEQ ID NO: 17993 - protein, 23 aa, Homo sapiens
CARADLVVVGAHQIYYDYGMDVW

SEQ ID NO: 17994 - protein, 13 aa, Homo sapiens
CAHSLPVTNFDYW

SEQ ID NO: 17995 - protein, 17 aa, Homo sapiens
CTRDYIAARPSEFFDYW

SEQ ID NO: 17996 - protein, 13 aa, Homo sapiens
CARWVESYAMDVW

SEQ ID NO: 17997 - protein, 17 aa, Homo sapiens
CARSDHTGGWHRKFDYW

SEQ ID NO: 17998 - protein, 18 aa, Homo sapiens
CAKDTEIVVVAATSIDYW

SEQ ID NO: 17999 - protein, 10 aa, Homo sapiens
CAATVHFAYW

SEQ ID NO: 18000 - protein, 20 aa, Homo sapiens
CARDSENVDTAMGDWYFDLW

SEQ ID NO: 18001 - protein, 19 aa, Homo sapiens
CARESLPTYGGFSSGFDYW

SEQ ID NO: 18002 - protein, 20 aa, Homo sapiens
CARGPKLERPYYYYYYMDVW

SEQ ID NO: 18003 - protein, 22 aa, Homo sapiens
CTTAPMTVVIIEGHNYFYMDVW

SEQ ID NO: 18004 - protein, 22 aa, Homo sapiens
CARGGMSLGYCSGGSCSWFDPW

SEQ ID NO: 18005 - protein, 20 aa, Homo sapiens
CASGQRKARQTGGVDYFDYW

SEQ ID NO: 18006 - protein, 12 aa, Homo sapiens
CAREIPSYFDSW

SEQ ID NO: 18007 - protein, 16 aa, Homo sapiens
CAHRRLELRKVGFDPW

SEQ ID NO: 18008 - protein, 16 aa, Homo sapiens
CAEGNAAAGNNWFDPW

SEQ ID NO: 18009 - protein, 21 aa, Homo sapiens
CARSGYRASAARNRYNWFDPW

SEQ ID NO: 18010 - protein, 22 aa, Homo sapiens
CARSYYGSGSYLRYYYYGMDVW

SEQ ID NO: 18011 - protein, 15 aa, Homo sapiens
CAHYGSSTSLTFDYW

SEQ ID NO: 18012 - protein, 20 aa, Homo sapiens
CARTQTYYSDASGSLSFDYW

SEQ ID NO: 18013 - protein, 21 aa, Homo sapiens
CVRHGADDILTGHSTPYFDYW

SEQ ID NO: 18014 - protein, 17 aa, Homo sapiens
CAKDYYRIGQHLAFDYW

SEQ ID NO: 18015 - protein, 17 aa, Homo sapiens
CARITGDGYNSGAFDIW

SEQ ID NO: 18016 - protein, 16 aa, Homo sapiens
CARAVGSGWSGLFDYW

SEQ ID NO: 18017 - protein, 18 aa, Homo sapiens
CARLTIFGVVGGDYFDSW

SEQ ID NO: 18018 - protein, 18 aa, Homo sapiens
CARRGDIGMHMYNRFDPW

SEQ ID NO: 18019 - protein, 17 aa, Homo sapiens
CVRASRRAASGLYPDFW

SEQ ID NO: 18020 - protein, 16 aa, Homo sapiens
CARYPNIVSTNYYDYW

SEQ ID NO: 18021 - protein, 22 aa, Homo sapiens
CAKHWYHHYYDMNGYFFNFDYW

SEQ ID NO: 18022 - protein, 10 aa, Homo sapiens
CATSRTFDHW

SEQ ID NO: 18023 - protein, 24 aa, Homo sapiens
CARDTTPAVLVVYAIEAYNWFDPW

SEQ ID NO: 18024 - protein, 16 aa, Homo sapiens
CARRYSNGRREDFDYW

SEQ ID NO: 18025 - protein, 21 aa, Homo sapiens
CARGIQLWLLRSGWYGGFDYW

SEQ ID NO: 18026 - protein, 15 aa, Homo sapiens
CARDHCGGGGCYDYW

SEQ ID NO: 18027 - protein, 13 aa, Homo sapiens
CGTWDSSMTAVVF

SEQ ID NO: 18028 - protein, 17 aa, Homo sapiens
CAREYTDDYSNYPFDYW

SEQ ID NO: 18029 - protein, 19 aa, Homo sapiens
CARVPYPIVGASRHYFDYW

SEQ ID NO: 18030 - protein, 16 aa, Homo sapiens
CARDRVATSEDSFEIW

SEQ ID NO: 18031 - protein, 21 aa, Homo sapiens
CAKDSLTGMTAGYYYYGMDVW

SEQ ID NO: 18032 - protein, 20 aa, Homo sapiens
CARDLMSLSDYGGNSRGDYW

SEQ ID NO: 18033 - protein, 24 aa, Homo sapiens
CVRSVDCDSTSCYTFRPGNWFDSW

SEQ ID NO: 18034 - protein, 19 aa, Homo sapiens
CASSDYYDSSGYYPRDDYW

SEQ ID NO: 18035 - protein, 20 aa, Homo sapiens
CARDPIFGVVITEAGWFDPW

SEQ ID NO: 18036 - protein, 18 aa, Homo sapiens
CAKPGTTMVQGVYYFDYW

SEQ ID NO: 18037 - protein, 25 aa, Homo sapiens
CARGHVGVNMVVVVFIGGEYYFDHW

SEQ ID NO: 18038 - protein, 17 aa, Homo sapiens
CARDRWGSGYDKALDYW

SEQ ID NO: 18039 - protein, 14 aa, Homo sapiens
CARLRSSSLGSDYW

SEQ ID NO: 18040 - protein, 29 aa, Homo sapiens
CARDPPYYDFWSGYAQIRDYYYYYYMDVW

SEQ ID NO: 18041 - protein, 24 aa, Homo sapiens
CLRAEDTAVYYCAREYSSGCFDYW

SEQ ID NO: 18042 - protein, 22 aa, Homo sapiens
CARNLHPYCSGGNCYSDFFDYW

SEQ ID NO: 18043 - protein, 14 aa, Homo sapiens
CARVRWLLDYMDVW

SEQ ID NO: 18044 - protein, 24 aa, Homo sapiens
CARAHITMIVVVIRSYYYYGMDVW

SEQ ID NO: 18045 - protein, 15 aa, Homo sapiens
CASGLYGTYWYFDLW

SEQ ID NO: 18046 - protein, 20 aa, Homo sapiens
CARDPTMVQGVAYYYGMDVW

SEQ ID NO: 18047 - protein, 16 aa, Homo sapiens
CTKEAGSSWKYYFDYW

SEQ ID NO: 18048 - protein, 14 aa, Homo sapiens
CATADWNYGFADYW

SEQ ID NO: 18049 - protein, 22 aa, Homo sapiens
CARGRRRITGDRRAGGRPFDIW

SEQ ID NO: 18050 - protein, 16 aa, Homo sapiens
CARAIRESGVYFFDYW

SEQ ID NO: 18051 - protein, 25 aa, Homo sapiens
CARHPSTIVVVPAAIRRGFSGFDIW

SEQ ID NO: 18052 - protein, 17 aa, Homo sapiens
CARDLRSGGWIVAFDIW

SEQ ID NO: 18053 - protein, 16 aa, Homo sapiens
CATYDYSGSSTAFDYW

SEQ ID NO: 18054 - protein, 17 aa, Homo sapiens
CAKRFAGSTYWAPFAYW

SEQ ID NO: 18055 - protein, 15 aa, Homo sapiens
CAREGRDNSRSADYW

SEQ ID NO: 18056 - protein, 21 aa, Homo sapiens
CARGVYYYDSSAAVGGAFDIW

SEQ ID NO: 18057 - protein, 19 aa, Homo sapiens
CARGGPADSGGYYLYFDYW

SEQ ID NO: 18058 - protein, 15 aa, Homo sapiens
CAKEAAAGHWYFDLW

SEQ ID NO: 18059 - protein, 21 aa, Homo sapiens
CARDVSYYDSSGHYVHASDIW

SEQ ID NO: 18060 - protein, 15 aa, Homo sapiens
CASSTQQLVAEFDYW

SEQ ID NO: 18061 - protein, 15 aa, Homo sapiens
CARPGVVPTDQFDYW

SEQ ID NO: 18062 - protein, 24 aa, Homo sapiens
CARDTRTYYDILTGYYPSGYFDYW

SEQ ID NO: 18063 - protein, 16 aa, Homo sapiens
CARSLGMVAADSFDYW

SEQ ID NO: 18064 - protein, 21 aa, Homo sapiens
CAREGRNYYGSGILLNWFDPW

SEQ ID NO: 18065 - protein, 19 aa, Homo sapiens
CARSTQETFGSGSHYNLYW

SEQ ID NO: 18066 - protein, 19 aa, Homo sapiens
CARLRYYGSGRFNRAFDYW

SEQ ID NO: 18067 - protein, 17 aa, Homo sapiens
CAKDGYEGSGYNWLDPW

SEQ ID NO: 18068 - protein, 17 aa, Homo sapiens
CARGGNSPPYYDPMDVW

SEQ ID NO: 18069 - protein, 15 aa, Homo sapiens
CARAKQYQDDAFDIW

SEQ ID NO: 18070 - protein, 24 aa, Homo sapiens
CARVYCPGGICTHDSSYYYGMDVW

SEQ ID NO: 18071 - protein, 13 aa, Homo sapiens
CAKGTRQNYFDYW

SEQ ID NO: 18072 - protein, 21 aa, Homo sapiens
CARDLSSTNGYYYYYYYMDVW

SEQ ID NO: 18073 - protein, 21 aa, Homo sapiens
CARVGRATETKNYYYYAMDVW

SEQ ID NO: 18074 - protein, 13 aa, Homo sapiens
CTTEDSSGLCDYW

SEQ ID NO: 18075 - protein, 18 aa, Homo sapiens
CASSVPYDFWSGKQFDPW

SEQ ID NO: 18076 - protein, 20 aa, Homo sapiens
CARALGATSKYHYYYGMDVW

SEQ ID NO: 18077 - protein, 17 aa, Homo sapiens
CARDLRVSGYDTNFDYW

SEQ ID NO: 18078 - protein, 20 aa, Homo sapiens
CARPLGRLRYFDSLDAFDIW

SEQ ID NO: 18079 - protein, 20 aa, Homo sapiens
CARSSLGWSSGWYSYYFDYW

SEQ ID NO: 18080 - protein, 17 aa, Homo sapiens
CARGTIFGVDPGWFDPW

SEQ ID NO: 18081 - protein, 20 aa, Homo sapiens
CARDYARDTGFKTPYYFDYW

SEQ ID NO: 18082 - protein, 20 aa, Homo sapiens
CAILVRYFDWLLSSDAFDIW

SEQ ID NO: 18083 - protein, 19 aa, Homo sapiens
CARGDYYDSSGYPFYFDCW

SEQ ID NO: 18084 - protein, 40 aa, Homo sapiens
CDWSSDVCSSDLNSLRAEDTAVYYCARDGYDFWSGYQDYW

SEQ ID NO: 18085 - protein, 17 aa, Homo sapiens
CARHMPRLYDLHAFDIW

SEQ ID NO: 18086 - protein, 16 aa, Homo sapiens
CARDRYGDYGNWFDPW

SEQ ID NO: 18087 - protein, 16 aa, Homo sapiens
CARVGYSTDVYWFDPW

SEQ ID NO: 18088 - protein, 21 aa, Homo sapiens
CAKGPPYSNSFSRYYYGMDVW

SEQ ID NO: 18089 - protein, 18 aa, Homo sapiens
CAKDLTGYSMLQTGFDPW

SEQ ID NO: 18090 - protein, 18 aa, Homo sapiens
CARLVVAGPRVTYYFDFW

SEQ ID NO: 18091 - protein, 12 aa, Homo sapiens [sequence omitted]

SEQ ID NO: 18092 - protein, 22 aa, Homo sapiens
CARTPHYSDILTGYYVYYFDYW

SEQ ID NO: 18093 - protein, 16 aa, Homo sapiens
CARHRIPGYSYGFDYW

SEQ ID NO: 18094 - protein, 17 aa, Homo sapiens
CAHRPSSSWYGDWFDPW

SEQ ID NO: 18095 - protein, 16 aa, Homo sapiens
CARLLPYGDPGYFDLW

SEQ ID NO: 18096 - protein, 14 aa, Homo sapiens
CTRDLYQGYYFDYW

SEQ ID NO: 18097 - protein, 17 aa, Homo sapiens
CTRGQTVSGAKYYFDNW

SEQ ID NO: 18098 - protein, 18 aa, Homo sapiens
CARDSLGSSSSWYYIDSW

SEQ ID NO: 18099 - protein, 19 aa, Homo sapiens
CARDDYGSGSSWLRYFDFW

SEQ ID NO: 18100 - protein, 30 aa, Homo sapiens
CALPICARYVDHLPTHLGELPYDLDAFDIW

SEQ ID NO: 18101 - protein, 18 aa, Homo sapiens
CATRDSITWSPPDAFDIW

SEQ ID NO: 18102 - protein, 20 aa, Homo sapiens
CARDRGIGYCSGGTCFPDYW

SEQ ID NO: 18103 - protein, 20 aa, Homo sapiens
CARIRHDILTGRPLYYFDYW

SEQ ID NO: 18104 - protein, 16 aa, Homo sapiens
CATNPSGYSYGYWYYW

SEQ ID NO: 18105 - protein, 20 aa, Homo sapiens
CARDLILGSDSSSWYHVDYW

SEQ ID NO: 18106 - protein, 16 aa, Homo sapiens
CAHRGLAVAGPHFDYW

SEQ ID NO: 18107 - protein, 26 aa, Homo sapiens
CARDSQIRKSRWSSPYYYYYYGMDVW

SEQ ID NO: 18108 - protein, 16 aa, Homo sapiens
CARRGPAIVTTTPDYW

SEQ ID NO: 18109 - protein, 21 aa, Homo sapiens
CARDPQREYSGYDEGNWFDPW

SEQ ID NO: 18110 - protein, 15 aa, Homo sapiens
CAKGSGSYNRPFDYW

SEQ ID NO: 18111 - protein, 17 aa, Homo sapiens
CARDFRYGDNHPDFDYW

SEQ ID NO: 18112 - protein, 23 aa, Homo sapiens
CARSTHNVLRYFDWLLNDAFDIW

SEQ ID NO: 18113 - protein, 18 aa, Homo sapiens
CTRSYSGSPRVESYFDYW

SEQ ID NO: 18114 - protein, 18 aa, Homo sapiens
CAKDLYDFWSNYPYFDHW

SEQ ID NO: 18115 - protein, 21 aa, Homo sapiens
CARGEYYDFWSGYSVAYMDVW

SEQ ID NO: 18116 - protein, 16 aa, Homo sapiens
CARPRGATGERAFDIW

SEQ ID NO: 18117 - protein, 17 aa, Homo sapiens
CAISYGGSAGVISFDYW

SEQ ID NO: 18118 - protein, 13 aa, Homo sapiens
CQHLNTYPFMYIF

SEQ ID NO: 18119 - protein, 21 aa, Homo sapiens
CARAGYCSGGSCYYLNHFDYW

SEQ ID NO: 18120 - protein, 15 aa, Homo sapiens
CARRAVQGGYYMDVW

SEQ ID NO: 18121 - protein, 30 aa, Homo sapiens
CALPILSRLRSDDTAVYYCARDRDYYFDHW

SEQ ID NO: 18122 - protein, 21 aa, Homo sapiens
CARDISYCSSTSCQEGWFDPW

SEQ ID NO: 18123 - protein, 17 aa, Homo sapiens
CARHGFRSSGNYPDDYW

SEQ ID NO: 18124 - protein, 30 aa, Homo sapiens
CAKDARYYDFWSGYSPKAPQAYYYYGMDVW

SEQ ID NO: 18125 - protein, 25 aa, Homo sapiens
CVKDRRQIRQFCVGASCYIPIFDDW

SEQ ID NO: 18126 - protein, 20 aa, Homo sapiens
CARVVVQGVTQAIPTHFDYW

SEQ ID NO: 18127 - protein, 16 aa, Homo sapiens
CASALTTVTTSSFDYW

SEQ ID NO: 18128 - protein, 24 aa, Homo sapiens
CARHLRQCSGGICQTYYYYAMDVW

SEQ ID NO: 18129 - protein, 20 aa, Homo sapiens
CARGIGDYGDYLSLYYMDVW

SEQ ID NO: 18130 - protein, 16 aa, Homo sapiens
CAHLDYGGAKYAFDIW

SEQ ID NO: 18131 - protein, 17 aa, Homo sapiens
CARCGGGDYYYYCMDVW

SEQ ID NO: 18132 - protein, 17 aa, Homo sapiens
CARDRDITVSGVDFDYW

SEQ ID NO: 18133 - protein, 18 aa, Homo sapiens
CARTLRVAAAGYNWFDPW

SEQ ID NO: 18134 - protein, 20 aa, Homo sapiens
CARPGGWCSTTSCYSAFDFW

SEQ ID NO: 18135 - protein, 17 aa, Homo sapiens
CARAYNWKTSPNWFDPW

SEQ ID NO: 18136 - protein, 16 aa, Homo sapiens
CATEVLAARSDALDIW

SEQ ID NO: 18137 - protein, 17 aa, Homo sapiens
CARDLGQHLSPHAFDIW

SEQ ID NO: 18138 - protein, 15 aa, Homo sapiens
CTPFSLYYYYGMDVW

SEQ ID NO: 18139 - protein, 22 aa, Homo sapiens
CARDWRYYGSGSYSYYYGMDVW

SEQ ID NO: 18140 - protein, 21 aa, Homo sapiens
CARTSEGYCGADCYSGVPDYW

SEQ ID NO: 18141 - protein, 16 aa, Homo sapiens
CARSYGGYNLTPFDYW

SEQ ID NO: 18142 - protein, 24 aa, Homo sapiens
CARDYDILTGYYIGNYYYYGMDVW

SEQ ID NO: 18143 - protein, 24 aa, Homo sapiens
CARDHGTGIMITFGGVIGYYFDYW

SEQ ID NO: 18144 - protein, 15 aa, Homo sapiens
CARLSPYGSLHFDYW

SEQ ID NO: 18145 - protein, 17 aa, Homo sapiens
CARAEASGGFYYLLDYW

SEQ ID NO: 18146 - protein, 16 aa, Homo sapiens
CAHVGVIVVVPYFDYW

SEQ ID NO: 18147 - protein, 18 aa, Homo sapiens
CAREWHCSGGSCYSFGYW

SEQ ID NO: 18148 - protein, 18 aa, Homo sapiens
CARGVVAAAIAMSWFDPW

SEQ ID NO: 18149 - protein, 16 aa, Homo sapiens
CVRLPAGRRFLEVDYW

SEQ ID NO: 18150 - protein, 25 aa, Homo sapiens
CARELVASKITMIVVVIRPRGFDPW

SEQ ID NO: 18151 - protein, 15 aa, Homo sapiens
CVKVEGNTNYNFDYW

SEQ ID NO: 18152 - protein, 30 aa, Homo sapiens
CARDDVVGASSSWPLQLVGPYYYYYGMDVW

SEQ ID NO: 18153 - protein, 21 aa, Homo sapiens
CARDRGVCSGGSCYPSVFDYW

SEQ ID NO: 18154 - protein, 16 aa, Homo sapiens
CARGHWTLAGKYFDDW

SEQ ID NO: 18155 - protein, 18 aa, Homo sapiens
CARGPTVTTSPLYYFDSW

SEQ ID NO: 18156 - protein, 18 aa, Homo sapiens
CARAQYYYDSSGSNLDYW

SEQ ID NO: 18157 - protein, 17 aa, Homo sapiens
CVRDSREYAGYDLFDYW

SEQ ID NO: 18158 - protein, 15 aa, Homo sapiens
CAHRWGFREAYFDYW

SEQ ID NO: 18159 - protein, 17 aa, Homo sapiens
CARMYYYGEKGDWFDPW

SEQ ID NO: 18160 - protein, 20 aa, Homo sapiens
CARLDTDDFWSGYPSRFDPW

SEQ ID NO: 18161 - protein, 16 aa, Homo sapiens
CARDTSGTAVVKFDYW

SEQ ID NO: 18162 - protein, 20 aa, Homo sapiens
CARDPISITIPDMGNWFDPW

SEQ ID NO: 18163 - protein, 23 aa, Homo sapiens
CARHYDGSDYYPKDYYYYGMDVW

SEQ ID NO: 18164 - protein, 17 aa, Homo sapiens
CARQGVGATSFGWFDPW

SEQ ID NO: 18165 - protein, 14 aa, Homo sapiens [sequence omitted]

SEQ ID NO: 18166 - protein, 22 aa, Homo sapiens
CTTEDVTYYYDSSGFHWYFDLW

SEQ ID NO: 18167 - protein, 14 aa, Homo sapiens
CAKALLGKSPFDYW

SEQ ID NO: 18168 - protein, 18 aa, Homo sapiens
CARDTSESGYLSGSFDYW

SEQ ID NO: 18169 - protein, 17 aa, Homo sapiens
CAKGDVLVVVAASLDYW

SEQ ID NO: 18170 - protein, 17 aa, Homo sapiens
CATSRDTSSPREPFDYW

SEQ ID NO: 18171 - protein, 12 aa, Homo sapiens
CVQYNNYPMCSF

SEQ ID NO: 18172 - protein, 19 aa, Homo sapiens
CARFCGVLSGYRKYYFDYW

SEQ ID NO: 18173 - protein, 16 aa, Homo sapiens
CAKDSSGYDYTNFDYW

SEQ ID NO: 18174 - protein, 17 aa, Homo sapiens
CARHVPYRDGGHYFDYW

SEQ ID NO: 18175 - protein, 17 aa, Homo sapiens
CTRGSTSGTSALDFDYW

SEQ ID NO: 18176 - protein, 21 aa, Homo sapiens
CARQQLDYGDYGSYYYYMDVW

SEQ ID NO: 18177 - protein, 19 aa, Homo sapiens
CTRGPTVFGVVILGWFDPW

SEQ ID NO: 18178 - protein, 23 aa, Homo sapiens
CARGITYYDILTGSTYYYYMDVW

SEQ ID NO: 18179 - protein, 18 aa, Homo sapiens
CARGVYTRTWYSNQFDSW

SEQ ID NO: 18180 - protein, 16 aa, Homo sapiens
CARAPGYINSPGIDYW

SEQ ID NO: 18181 - protein, 17 aa, Homo sapiens
CARHGGSGYDPPLFDYW

SEQ ID NO: 18182 - protein, 18 aa, Homo sapiens
CARHMMIEWEPDDAFDIW

SEQ ID NO: 18183 - protein, 15 aa, Homo sapiens
CARGRDGYRRPFDNW

SEQ ID NO: 18184 - protein, 15 aa, Homo sapiens
CARSLVPAASPLDYW

SEQ ID NO: 18185 - protein, 17 aa, Homo sapiens
CARGVTLGELSPYFDYW

SEQ ID NO: 18186 - protein, 18 aa, Homo sapiens
CAKDFYTSGWSPNVFDYW

SEQ ID NO: 18187 - protein, 19 aa, Homo sapiens
CATGPGIAVAGKINWFDPW

SEQ ID NO: 18188 - protein, 19 aa, Homo sapiens
CARQIPSYDFWSGYYFDYW

SEQ ID NO: 18189 - protein, 21 aa, Homo sapiens
CARVRRAEIHFWSGYYYFDSW

SEQ ID NO: 18190 - protein, 19 aa, Homo sapiens
CTRSPSSSWYLGYYYMDVW

SEQ ID NO: 18191 - protein, 19 aa, Homo sapiens
CAHRRVTMRPGANPAFDYW

SEQ ID NO: 18192 - protein, 20 aa, Homo sapiens
CAREMYYYGSGSPQVNFDYW

SEQ ID NO: 18193 - protein, 17 aa, Homo sapiens
CASDRVGVPTVKLFDYW

SEQ ID NO: 18194 - protein, 17 aa, Homo sapiens
CARGVWSDYYHPYFDSW

SEQ ID NO: 18195 - protein, 26 aa, Homo sapiens
CARAPQTHYYNNNGQKHVWDDAFDIW

SEQ ID NO: 18196 - protein, 13 aa, Homo sapiens
CTTGTVTTVTDYW

SEQ ID NO: 18197 - protein, 16 aa, Homo sapiens
CAISSFRSGYYVFDYW

SEQ ID NO: 18198 - protein, 14 aa, Homo sapiens
CATNSSYTLPFDYW

SEQ ID NO: 18199 - protein, 16 aa, Homo sapiens
CARAAEGGYASAFDYW

SEQ ID NO: 18200 - protein, 17 aa, Homo sapiens
CANDQRSGGVCRSLDYW

SEQ ID NO: 18201 - protein, 25 aa, Homo sapiens
CARLYYYDSSGYGRLENYYYYMDVW

SEQ ID NO: 18202 - protein, 25 aa, Homo sapiens
CASSTMPGTVVVAAAIAGELMFDSW

SEQ ID NO: 18203 - protein, 17 aa, Homo sapiens
CARGRSIAVARVAFDIW

SEQ ID NO: 18204 - protein, 19 aa, Homo sapiens
CARGPYYDFWIDYNWFDPW

SEQ ID NO: 18205 - protein, 24 aa, Homo sapiens
CARAPPLTIFGVVIFRRHDAFDIW

SEQ ID NO: 18206 - protein, 18 aa, Homo sapiens
CARSKPCGDGCYNEFDFW

SEQ ID NO: 18207 - protein, 21 aa, Homo sapiens
CARGFRDDYDLGYYYYYMDVW

SEQ ID NO: 18208 - protein, 15 aa, Homo sapiens
CASPYTSTGWYDVYW

SEQ ID NO: 18209 - protein, 24 aa, Homo sapiens
CARAANPSAYYYGSGDETNWFDPW

SEQ ID NO: 18210 - protein, 19 aa, Homo sapiens
CARHFKHSGSYTTSPSDYW

SEQ ID NO: 18211 - protein, 12 aa, Homo sapiens
CQQYNTYSGGGF

SEQ ID NO: 18212 - protein, 16 aa, Homo sapiens
CARNMDHSSNWYESYW

SEQ ID NO: 18213 - protein, 20 aa, Homo sapiens
CAKVDYRKGYTTNWYPFDYW

SEQ ID NO: 18214 - protein, 23 aa, Homo sapiens
CAKDRTHIYDILTGYAYDSLDYW

SEQ ID NO: 18215 - protein, 25 aa, Homo sapiens
CAREFFFKPTDSSGYYSPYNWFDPW

SEQ ID NO: 18216 - protein, 14 aa, Homo sapiens
CTRHWLRDYYFDYW

SEQ ID NO: 18217 - protein, 16 aa, Homo sapiens
CARDNVVAANYWFDPW

SEQ ID NO: 18218 - protein, 15 aa, Homo sapiens
CVKDSGLVINPFDSW

SEQ ID NO: 18219 - protein, 16 aa, Homo sapiens
CARWIILTGHQAFDPW

SEQ ID NO: 18220 - protein, 13 aa, Homo sapiens
CQQASSFPRAVTF

SEQ ID NO: 18221 - protein, 20 aa, Homo sapiens
CTRIGVIPTVVISNDAFDIW

SEQ ID NO: 18222 - protein, 14 aa, Homo sapiens
CARDATTTGSIDYW

SEQ ID NO: 18223 - protein, 17 aa, Homo sapiens
CTSPLHAGAYYYGMDVW

SEQ ID NO: 18224 - protein, 15 aa, Homo sapiens
CTSLGGGSDYGGDYW

SEQ ID NO: 18225 - protein, 26 aa, Homo sapiens
CARGGDIVVVPAAAPENYYYYGMDVW

SEQ ID NO: 18226 - protein, 22 aa, Homo sapiens
CALRGFCSSSRCFGGAYHFDNW

SEQ ID NO: 18227 - protein, 21 aa, Homo sapiens
CAHRPTSDFSNDWNGGRFDSW

SEQ ID NO: 18228 - protein, 22 aa, Homo sapiens
CARRQQWLVPEIFDYYYGMDVW

SEQ ID NO: 18229 - protein, 19 aa, Homo sapiens
CARETPNVYNWNYGAFDYW

SEQ ID NO: 18230 - protein, 16 aa, Homo sapiens
CAHSPMTTVTLHFDYW

SEQ ID NO: 18231 - protein, 13 aa, Homo sapiens
CAGQQWLNAFDIW

SEQ ID NO: 18232 - protein, 28 aa, Homo sapiens
CARDYESRGTDHDYGDRSVYYYYYMDVW

SEQ ID NO: 18233 - protein, 20 aa, Homo sapiens
CTSREPNDYGDYELGAFDIW

SEQ ID NO: 18234 - protein, 21 aa, Homo sapiens
CATAPPSVYKYYYGSGPPDYW

SEQ ID NO: 18235 - protein, 20 aa, Homo sapiens
CARQHNCSGGRCYGYWFDPW

SEQ ID NO: 18236 - protein, 15 aa, Homo sapiens
CARGGGNFAYYFDYW

SEQ ID NO: 18237 - protein, 16 aa, Homo sapiens
CARENDYGDYVTLDYW

SEQ ID NO: 18238 - protein, 19 aa, Homo sapiens
CAKLVTFGGVIVSRAFDIW

SEQ ID NO: 18239 - protein, 12 aa, Homo sapiens
CTKSNPGVFDYW

SEQ ID NO: 18240 - protein, 36 aa, Homo sapiens
CTAYLQWSSLKASDTAMYYCARHFDYGDYYYGMDVW

SEQ ID NO: 18241 - protein, 16 aa, Homo sapiens
CTLSRYSSSWYYFDYW

SEQ ID NO: 18242 - protein, 12 aa, Homo sapiens
CAHSFNSAIDYW

SEQ ID NO: 18243 - protein, 18 aa, Homo sapiens
CARISEYQLLYDWYFDLW

SEQ ID NO: 18244 - protein, 20 aa, Homo sapiens
CARSINCVGGTCYVGYMDVW

SEQ ID NO: 18245 - protein, 19 aa, Homo sapiens
CARYGSGSYYKEDNWFDPW

SEQ ID NO: 18246 - protein, 14 aa, Homo sapiens
CARVRLGRELFDYW

SEQ ID NO: 18247 - protein, 19 aa, Homo sapiens
CASNPAAGKYYYYYGMDVW

SEQ ID NO: 18248 - protein, 18 aa, Homo sapiens
CARLPPSGYLLGNAFDIW

SEQ ID NO: 18249 - protein, 17 aa, Homo sapiens
CAMADTYSSSWYIHDYW

SEQ ID NO: 18250 - protein, 17 aa, Homo sapiens
CARGPTFGGVFNWFDPW

SEQ ID NO: 18251 - protein, 14 aa, Homo sapiens
CARLGSYYLTPDYW

SEQ ID NO: 18252 - protein, 16 aa, Homo sapiens
CARDTLGGWFDALDIW

SEQ ID NO: 18253 - protein, 14 aa, Homo sapiens
CARISTAMYYFDYW

SEQ ID NO: 18254 - protein, 22 aa, Homo sapiens
CARVRRDSGYDPDYYYYYMDVW

SEQ ID NO: 18255 - protein, 16 aa, Homo sapiens
CARIDMTTVIYYVDTW

SEQ ID NO: 18256 - protein, 16 aa, Homo sapiens
CARVGIPAASYYFDQW

SEQ ID NO: 18257 - protein, 16 aa, Homo sapiens
CARDGSSGWFGGFDGW

SEQ ID NO: 18258 - protein, 20 aa, Homo sapiens
CAHRPGIAAAGTSGFYFDYW

SEQ ID NO: 18259 - protein, 22 aa, Homo sapiens
CARDLSEIVYYFDSSDYSFIYW

SEQ ID NO: 18260 - protein, 17 aa, Homo sapiens
CARAVPAAPYYYGMDVW

SEQ ID NO: 18261 - protein, 20 aa, Homo sapiens
CARPTHWYSSSWQQDAFDIW

SEQ ID NO: 18262 - protein, 21 aa, Homo sapiens
CARKPVRGIAAAGLGYYFDYW

SEQ ID NO: 18263 - protein, 22 aa, Homo sapiens
CARTRGHIVVVPAETRGDFDYW

SEQ ID NO: 18264 - protein, 19 aa, Homo sapiens
CARDKDPFDLYYYYGMDVW

SEQ ID NO: 18265 - protein, 17 aa, Homo sapiens
CARSTASFRIYHNLDYW

SEQ ID NO: 18266 - protein, 31 aa, Homo sapiens
CARDNTARLVAGSLAGAHVVSYYYYYGMDVW

SEQ ID NO: 18267 - protein, 22 aa, Homo sapiens
CAYNFTVSADWSGARSDWFGPW

SEQ ID NO: 18268 - protein, 22 aa, Homo sapiens
CARDADRRSSSSGPIDWYFDLW

SEQ ID NO: 18269 - protein, 20 aa, Homo sapiens
CAKDRTFYYDAGGYYFFQYW

SEQ ID NO: 18270 - protein, 18 aa, Homo sapiens
CARDAYSSRSSYWYFDLW

SEQ ID NO: 18271 - protein, 16 aa, Homo sapiens
CARLDAGIGHFDFDYW

SEQ ID NO: 18272 - protein, 19 aa, Homo sapiens
CARDPVVPAATPLYYFDYW

SEQ ID NO: 18273 - protein, 11 aa, Homo sapiens
CQQSFSFPCTF

SEQ ID NO: 18274 - protein, 15 aa, Homo sapiens
CAKRGQLVISHFDYW

SEQ ID NO: 18275 - protein, 16 aa, Homo sapiens
CARGRIAVAGTVLDYW

SEQ ID NO: 18276 - protein, 15 aa, Homo sapiens
CAREVDGHNVYFDYW

SEQ ID NO: 18277 - protein, 19 aa, Homo sapiens
CARDSRGYNYGYSYGFDLW

SEQ ID NO: 18278 - protein, 16 aa, Homo sapiens
CAKPGPGYSYGCFDYW

SEQ ID NO: 18279 - protein, 18 aa, Homo sapiens
CARAPTDYGAHTGAFDIW

SEQ ID NO: 18280 - protein, 18 aa, Homo sapiens
CARHYGDRYETFSWFAPW

SEQ ID NO: 18281 - protein, 26 aa, Homo sapiens
CATAFMAYYDILTGYHPVRGPEFDYW

SEQ ID NO: 18282 - protein, 22 aa, Homo sapiens
CARVLGIAARPLLVQYDAFDIW

SEQ ID NO: 18283 - protein, 15 aa, Homo sapiens
CAHRSPIVVVGFDPW

SEQ ID NO: 18284 - protein, 16 aa, Homo sapiens
CAKARISGPLYYMDVW

SEQ ID NO: 18285 - protein, 17 aa, Homo sapiens
CARDIQSWFPGSALDIW

SEQ ID NO: 18286 - protein, 24 aa, Homo sapiens
CARLGYCSGALCYRADYYYGMDVW

SEQ ID NO: 18287 - protein, 17 aa, Homo sapiens
CAHSDIAAAGTPWFDPW

SEQ ID NO: 18288 - protein, 19 aa, Homo sapiens
CARDRAYGSGASSDAFDIW

SEQ ID NO: 18289 - protein, 19 aa, Homo sapiens
CARLPYLDSSGYYLPFDYW

SEQ ID NO: 18290 - protein, 22 aa, Homo sapiens
CARAPPSVVGFWVADSDAFDIW

SEQ ID NO: 18291 - protein, 24 aa, Homo sapiens
CARYVSDIVVVPAAHYYYYGMDVW

SEQ ID NO: 18292 - protein, 22 aa, Homo sapiens
CARSFNINYYDFWSGSNWFDPW

SEQ ID NO: 18293 - protein, 16 aa, Homo sapiens
CARVSRNLGVVIIDYW

SEQ ID NO: 18294 - protein, 15 aa, Homo sapiens
CAKLATWPGGEFDYW

SEQ ID NO: 18295 - protein, 16 aa, Homo sapiens
CAKDAVATILYYFDYW

SEQ ID NO: 18296 - protein, 26 aa, Homo sapiens
CAGAPQTFYYDGRGQKQVWDDAFDIW

SEQ ID NO: 18297 - protein, 14 aa, Homo sapiens
CVRVHGDLFIFDYW

SEQ ID NO: 18298 - protein, 16 aa, Homo sapiens
CAREEDYYGSGTPDYW

SEQ ID NO: 18299 - protein, 16 aa, Homo sapiens
CARTAGNSWAGTFDYW

SEQ ID NO: 18300 - protein, 17 aa, Homo sapiens
CARGPDGYNSHDAFDIW

SEQ ID NO: 18301 - protein, 17 aa, Homo sapiens
CTRTKILVVAHYYMDVW

SEQ ID NO: 18302 - protein, 21 aa, Homo sapiens
CARDLFRITVVQGEQYYFDYW

SEQ ID NO: 18303 - protein, 19 aa, Homo sapiens
CARGHPSYDFFYYYGMDVW

SEQ ID NO: 18304 - protein, 18 aa, Homo sapiens
CATGPPYGSGSRNWFDPW

SEQ ID NO: 18305 - protein, 19 aa, Homo sapiens
CARRPREYCSSISCYADYW

SEQ ID NO: 18306 - protein, 15 aa, Homo sapiens
CARPLLAAYDAFDIW

SEQ ID NO: 18307 - protein, 18 aa, Homo sapiens
CARPYGSGTYYVPPFAYW

SEQ ID NO: 18308 - protein, 15 aa, Homo sapiens
CARVGVTTAKHLDYW

SEQ ID NO: 18309 - protein, 14 aa, Homo sapiens
CAGFAAVTEVFDYW

SEQ ID NO: 18310 - protein, 19 aa, Homo sapiens
CARVDCTGGVCQDNWFDPW

SEQ ID NO: 18311 - protein, 14 aa, Homo sapiens
CASFMVVAAKFDYW

SEQ ID NO: 18312 - protein, 11 aa, Homo sapiens [sequence omitted]

SEQ ID NO: 18313 - protein, 15 aa, Homo sapiens
CASGGKLQWLSCDYW

SEQ ID NO: 18314 - protein, 19 aa, Homo sapiens
CARGHYYYDTSGYYNFDYW

SEQ ID NO: 18315 - protein, 19 aa, Homo sapiens
CATDHSPGGGDYDNWFDPW

SEQ ID NO: 18316 - protein, 25 aa, Homo sapiens
CARDVGLVPGDYPLLIYYYYGMDVW

SEQ ID NO: 18317 - protein, 12 aa, Homo sapiens
CQSADGNGFWEF

SEQ ID NO: 18318 - protein, 15 aa, Homo sapiens
CAGGRGWSYGYFDLW

SEQ ID NO: 18319 - protein, 16 aa, Homo sapiens
CASGYGDYAIDVLDIW

SEQ ID NO: 18320 - protein, 17 aa, Homo sapiens
CAREGYSAYDFGAFDIW

SEQ ID NO: 18321 - protein, 17 aa, Homo sapiens
CARDRGVVGSYYVFDYW

SEQ ID NO: 18322 - protein, 15 aa, Homo sapiens
CVRGEYDKWRYFHYW

SEQ ID NO: 18323 - protein, 18 aa, Homo sapiens
CARTGAYYYDSSGHPDYW

SEQ ID NO: 18324 - protein, 25 aa, Homo sapiens
CARIPPAPIGHNNIGQLGDWYFDLW

SEQ ID NO: 18325 - protein, 15 aa, Homo sapiens
CASTISGWSGAADYW

SEQ ID NO: 18326 - protein, 18 aa, Homo sapiens
CVRGQGWSQTTHWYFDLW

SEQ ID NO: 18327 - protein, 18 aa, Homo sapiens
CARDRLDADYYYYGMDVW

SEQ ID NO: 18328 - protein, 17 aa, Homo sapiens
CATVLYSSSWYSSFDIW

SEQ ID NO: 18329 - protein, 15 aa, Homo sapiens
CATVYTHTTYYFDYW

SEQ ID NO: 18330 - protein, 20 aa, Homo sapiens
CARDYYGSGSYLLGYYFDYW

SEQ ID NO: 18331 - protein, 18 aa, Homo sapiens
CARHIYGSRSANNWFDPW

SEQ ID NO: 18332 - protein, 16 aa, Homo sapiens
CARIMGDYSTYWFDPW

SEQ ID NO: 18333 - protein, 17 aa, Homo sapiens
CARDGGSGSGTYRFHYW

SEQ ID NO: 18334 - protein, 14 aa, Homo sapiens
CARGQRETGYFDSW

SEQ ID NO: 18335 - protein, 19 aa, Homo sapiens
CARLRQLGIWGSYRPFDYW

SEQ ID NO: 18336 - protein, 18 aa, Homo sapiens
CAREGAAGIRYYYGMDVW

SEQ ID NO: 18337 - protein, 15 aa, Homo sapiens
CARAPGSGYVAFDYW

SEQ ID NO: 18338 - protein, 23 aa, Homo sapiens
CASQYHGDTLEPQSPGEYYFDYW

SEQ ID NO: 18339 - protein, 15 aa, Homo sapiens
CARVASTSWREFDYW

SEQ ID NO: 18340 - protein, 17 aa, Homo sapiens
CARHPRIQLWLNYMDVW

SEQ ID NO: 18341 - protein, 16 aa, Homo sapiens
CAREKSGSYGRGFDYW

SEQ ID NO: 18342 - protein, 20 aa, Homo sapiens
CARDLASDYYSSSGDDFDFW

SEQ ID NO: 18343 - protein, 16 aa, Homo sapiens
CARLVVATTGRRFDYW

SEQ ID NO: 18344 - protein, 21 aa, Homo sapiens
CAKDPSAKYSYGFQGFWFDTW

SEQ ID NO: 18345 - protein, 20 aa, Homo sapiens
CARDQGPPDYYGSGSHFDYW

SEQ ID NO: 18346 - protein, 19 aa, Homo sapiens
CVRARLLPPTISSYAFDIW

SEQ ID NO: 18347 - protein, 17 aa, Homo sapiens
CALPISRSYYSNYFHYW

SEQ ID NO: 18348 - protein, 24 aa, Homo sapiens
CARDALGYCDTIRCQGKGDTFDYW

SEQ ID NO: 18349 - protein, 18 aa, Homo sapiens
CARDSYGNNPQDWYFDLW

SEQ ID NO: 18350 - protein, 14 aa, Homo sapiens
CASQAPGFRTFDYW

SEQ ID NO: 18351 - protein, 15 aa, Homo sapiens
CARYTTGDGLAFDYW

SEQ ID NO: 18352 - protein, 15 aa, Homo sapiens
CARLRTGNSRIFDYW

SEQ ID NO: 18353 - protein, 16 aa, Homo sapiens
CARDLYRSSWYVHDYW

SEQ ID NO: 18354 - protein, 17 aa, Homo sapiens
CARDRTIAVAEYYFDYW

SEQ ID NO: 18355 - protein, 21 aa, Homo sapiens
CARIREWDLLGYSSGWYFDYW

SEQ ID NO: 18356 - protein, 22 aa, Homo sapiens
CAREGAIAAADTPYYYYYMDVW

SEQ ID NO: 18357 - protein, 25 aa, Homo sapiens
CARDLRDYGDYGNANYYYYYYMDVW

SEQ ID NO: 18358 - protein, 14 aa, Homo sapiens
CARDRQRVNYFDYW

SEQ ID NO: 18359 - protein, 14 aa, Homo sapiens
CAREDPMLQALDYW

SEQ ID NO: 18360 - protein, 22 aa, Homo sapiens
CARDFIVGYTRKKIIPNWFDPW

SEQ ID NO: 18361 - protein, 17 aa, Homo sapiens
CTTGGTHDYYYYYMDVW

SEQ ID NO: 18362 - protein, 16 aa, Homo sapiens
CARDQSSGSNPGLDYW

SEQ ID NO: 18363 - protein, 18 aa, Homo sapiens
CARDLGSSGHYYYYMDVW

SEQ ID NO: 18364 - protein, 11 aa, Homo sapiens [sequence omitted]

SEQ ID NO: 18365 - protein, 17 aa, Homo sapiens
CARALDSHDYGDYLDYW

SEQ ID NO: 18366 - protein, 23 aa, Homo sapiens
CARDASREGFWSGYHSLDAFDIW

SEQ ID NO: 18367 - protein, 21 aa, Homo sapiens
CARGHYDFWSGYYSTVSFDPW

SEQ ID NO: 18368 - protein, 14 aa, Homo sapiens
CASLHSSSWQFDYW

SEQ ID NO: 18369 - protein, 14 aa, Homo sapiens
CARDDYGFNAFDMW

SEQ ID NO: 18370 - protein, 17 aa, Homo sapiens
CAKDDGGYDFDGSFDYW

SEQ ID NO: 18371 - protein, 21 aa, Homo sapiens
CDWSSDVCSSDLSTDDAFDIW

SEQ ID NO: 18372 - protein, 17 aa, Homo sapiens
CARGNYDYIWGNYFDYW

SEQ ID NO: 18373 - protein, 19 aa, Homo sapiens
CAKVLCGGDCSLIKYFDYW

SEQ ID NO: 18374 - protein, 16 aa, Homo sapiens
CARDFGYDSSSWNDYW

SEQ ID NO: 18375 - protein, 19 aa, Homo sapiens
CARDAVGFGGYSFYYMDVW

SEQ ID NO: 18376 - protein, 16 aa, Homo sapiens
CAKVSGGYGNSPADYW

SEQ ID NO: 18377 - protein, 12 aa, Homo sapiens
CARRLDKDFDYW

SEQ ID NO: 18378 - protein, 13 aa, Homo sapiens
CARAVGNGWFDDW

SEQ ID NO: 18379 - protein, 16 aa, Homo sapiens
CAKDTATVTPRVFDYW

SEQ ID NO: 18380 - protein, 18 aa, Homo sapiens
CAKDHSTTVTTKGAFDYW

SEQ ID NO: 18381 - protein, 17 aa, Homo sapiens
CAKEPLAGAPRGAFDIW

SEQ ID NO: 18382 - protein, 23 aa, Homo sapiens
CARRNPKYQLLDYVYYYHGMDVW

SEQ ID NO: 18383 - protein, 21 aa, Homo sapiens
CARIPYDYIWGSYRPYYFDYW

SEQ ID NO: 18384 - protein, 14 aa, Homo sapiens
CTKEGTPQWHFDVW

SEQ ID NO: 18385 - protein, 16 aa, Homo sapiens
CARGKAAAGQYYFDYW

SEQ ID NO: 18386 - protein, 16 aa, Homo sapiens
CARGPGSGPYHYFDFW

SEQ ID NO: 18387 - protein, 17 aa, Homo sapiens
CAHRLHGGKVGGWFDPW

SEQ ID NO: 18388 - protein, 16 aa, Homo sapiens
CVRDEISDYDSHLDYW

SEQ ID NO: 18389 - protein, 15 aa, Homo sapiens
CARADGYSGYDLDYW

SEQ ID NO: 18390 - protein, 17 aa, Homo sapiens
CARHPDDYSNFRYFDYW

SEQ ID NO: 18391 - protein, 18 aa, Homo sapiens
CARASYPYQWSSSPFDYW

SEQ ID NO: 18392 - protein, 20 aa, Homo sapiens
CARDSYPGLGYGDRGVFDYW

SEQ ID NO: 18393 - protein, 17 aa, Homo sapiens
CAKVHELGDWSGPNDYW

SEQ ID NO: 18394 - protein, 19 aa, Homo sapiens
CARYYYVSGSSIRPYFNYW

SEQ ID NO: 18395 - protein, 17 aa, Homo sapiens
CATEGGSSGRAPYFDYW

SEQ ID NO: 18396 - protein, 22 aa, Homo sapiens
CARVPKSITIFGVVDEDYFDYW

SEQ ID NO: 18397 - protein, 20 aa, Homo sapiens
CASRFSYYDILTESDAFDIW

SEQ ID NO: 18398 - protein, 19 aa, Homo sapiens
CARDVDLEGSTREDHFDSW

SEQ ID NO: 18399 - protein, 13 aa, Homo sapiens
CQQYNTWPLLLTF

SEQ ID NO: 18400 - protein, 16 aa, Homo sapiens
CARDWTTGTTFAFDIW

SEQ ID NO: 18401 - protein, 18 aa, Homo sapiens
CARDNKLAGYGDWYFDLW

SEQ ID NO: 18402 - protein, 21 aa, Homo sapiens
CAKDESDDTSFAWYLSYFDYW

SEQ ID NO: 18403 - protein, 22 aa, Homo sapiens
CARAGIVADPKTGFYYSAMDVW

SEQ ID NO: 18404 - protein, 14 aa, Homo sapiens
CVHQDTMARQVDYW

SEQ ID NO: 18405 - protein, 20 aa, Homo sapiens
CARGDWAVADAATDLPFDYW

SEQ ID NO: 18406 - protein, 15 aa, Homo sapiens
CARDSPRGSGDFDPW

SEQ ID NO: 18407 - protein, 15 aa, Homo sapiens
CARLIVGTRSGFDYW

SEQ ID NO: 18408 - protein, 14 aa, Homo sapiens
CTTARWDTYYFDHW

SEQ ID NO: 18409 - protein, 15 aa, Homo sapiens
CNSRDSSSNYLGVVF

SEQ ID NO: 18410 - protein, 14 aa, Homo sapiens
CAHRTTVTYAFDYW

SEQ ID NO: 18411 - protein, 19 aa, Homo sapiens
CARPLNYGGNADPYYFDYW

SEQ ID NO: 18412 - protein, 15 aa, Homo sapiens
CARISSSGWGYMDVW

SEQ ID NO: 18413 - protein, 28 aa, Homo sapiens
CTTGIRYFDWSLAFGSNDYYYYYYMDVW

SEQ ID NO: 18414 - protein, 17 aa, Homo sapiens
CARLAVAGTWRWYFDLW

SEQ ID NO: 18415 - protein, 19 aa, Homo sapiens
CAQAGGYDFWSGPNWFDPW

SEQ ID NO: 18416 - protein, 19 aa, Homo sapiens
CAREGSDFSSGWTDWFDPW

SEQ ID NO: 18417 - protein, 16 aa, Homo sapiens
CAHRPYDYMGPYFQHW

SEQ ID NO: 18418 - protein, 21 aa, Homo sapiens
CARIPFYYDSSGYYAGGVDYW

SEQ ID NO: 18419 - protein, 18 aa, Homo sapiens
CVHLYRDGYGRKAFFDYW

SEQ ID NO: 18420 - protein, 11 aa, Homo sapiens [sequence omitted]

SEQ ID NO: 18421 - protein, 18 aa, Homo sapiens
CARHVRLHLGELSSLDYW

SEQ ID NO: 18422 - protein, 14 aa, Homo sapiens
CARATTRGGAFDIW

SEQ ID NO: 18423 - protein, 24 aa, Homo sapiens
CARGGYCISGSCSDLYYYYGVDVW

SEQ ID NO: 18424 - protein, 14 aa, Homo sapiens
CAHYTMTNDAFDIW

SEQ ID NO: 18425 - protein, 12 aa, Homo sapiens
CASGSWHYPDLW

SEQ ID NO: 18426 - protein, 21 aa, Homo sapiens
CAKNPTVPTHLSFYYYYMDVW

SEQ ID NO: 18427 - protein, 17 aa, Homo sapiens
CARDTSNWYHLYYFDYW

SEQ ID NO: 18428 - protein, 22 aa, Homo sapiens
CARGRGGYCSGGSCYPDAFDIW

SEQ ID NO: 18429 - protein, 20 aa, Homo sapiens
CARHSSLAAREDYYYYMDVW

SEQ ID NO: 18430 - protein, 15 aa, Homo sapiens
CARRGPDSSSHFDYW

SEQ ID NO: 18431 - protein, 12 aa, Homo sapiens
CQHLNSYLLCSF

SEQ ID NO: 18432 - protein, 15 aa, Homo sapiens
CARDIRLSGFSFDRW

SEQ ID NO: 18433 - protein, 15 aa, Homo sapiens
CARVEMATIAYFDYW

SEQ ID NO: 18434 - protein, 18 aa, Homo sapiens
CASQIYMVQGVINGPDYW

SEQ ID NO: 18435 - protein, 20 aa, Homo sapiens
CARDPTTVTTGDYYYGMDVW

SEQ ID NO: 18436 - protein, 17 aa, Homo sapiens
CARGGTGYGDYAAFDIW

SEQ ID NO: 18437 - protein, 16 aa, Homo sapiens
CAHRPPAWNYGYFDYW

SEQ ID NO: 18438 - protein, 20 aa, Homo sapiens
CAREDCSGGSCYSVGWFDPW

SEQ ID NO: 18439 - protein, 18 aa, Homo sapiens
CARPPVLMAIVGTRIDYW

SEQ ID NO: 18440 - protein, 19 aa, Homo sapiens
CARDVTIFGGGGGWWFDPW

SEQ ID NO: 18441 - protein, 16 aa, Homo sapiens
CTTDPVSSYGDAFDIW

SEQ ID NO: 18442 - protein, 18 aa, Homo sapiens
CARDRATSGSYSYYFDYW

SEQ ID NO: 18443 - protein, 13 aa, Homo sapiens
CQAWDDTTAHVVF

SEQ ID NO: 18444 - protein, 17 aa, Homo sapiens
CARDQRFYDSTNAFDIW

SEQ ID NO: 18445 - protein, 17 aa, Homo sapiens
CAREGGDGFHPRAFDIW

SEQ ID NO: 18446 - protein, 16 aa, Homo sapiens
CARPAYAWMEDAFDIW

SEQ ID NO: 18447 - protein, 19 aa, Homo sapiens
CASVMDYYDSSGYHSFDYW

SEQ ID NO: 18448 - protein, 13 aa, Homo sapiens
CQQRSKWPPECSF

SEQ ID NO: 18449 - protein, 13 aa, Homo sapiens
CARQGSNWLSDYW

SEQ ID NO: 18450 - protein, 17 aa, Homo sapiens
CARDGRYGSGSFNIDYW

SEQ ID NO: 18451 - protein, 20 aa, Homo sapiens
CAHSSYYSNSGSFKHAFDVW

SEQ ID NO: 18452 - protein, 22 aa, Homo sapiens
CARDLVSLSRYSSSSGYYFDYW

SEQ ID NO: 18453 - protein, 16 aa, Homo sapiens
CARRGSTWENWYFDLW

SEQ ID NO: 18454 - protein, 16 aa, Homo sapiens
CATGGLVRNPYYFDNW

SEQ ID NO: 18455 - protein, 25 aa, Homo sapiens
CARLSFRRDGYNYGTPDYYYGMDVW

SEQ ID NO: 18456 - protein, 23 aa, Homo sapiens
CVKDLELGIRLYQQLVPRPFDYW

SEQ ID NO: 18457 - protein, 12 aa, Homo sapiens
CARAHDFNFDYW

SEQ ID NO: 18458 - protein, 19 aa, Homo sapiens
CAREKAPVLEWLSEELDYW

SEQ ID NO: 18459 - protein, 20 aa, Homo sapiens
CARDREWQRWRLRGGGFDLW

SEQ ID NO: 18460 - protein, 31 aa, Homo sapiens
CARDRVYYDFWSGYLPRQAPTPYYYYGMDVW

SEQ ID NO: 18461 - protein, 18 aa, Homo sapiens
CARGTAARRISMQSGDYW

SEQ ID NO: 18462 - protein, 16 aa, Homo sapiens
CTTVDDYGDYYYMDVW

SEQ ID NO: 18463 - protein, 12 aa, Homo sapiens
CVRADSQDFDSW

SEQ ID NO: 18464 - protein, 18 aa, Homo sapiens
CAKGPDEDSDFWSGFYYW

SEQ ID NO: 18465 - protein, 14 aa, Homo sapiens
CARMSGGDWEFDYW

SEQ ID NO: 18466 - protein, 21 aa, Homo sapiens
CAHMDRLGYCSGGSCLPTDYW

SEQ ID NO: 18467 - protein, 17 aa, Homo sapiens
CAREIAVAGIGNAFDIW

SEQ ID NO: 18468 - protein, 17 aa, Homo sapiens
CAKEIAVTATTTPVDYW

SEQ ID NO: 18469 - protein, 13 aa, Homo sapiens
CAAEGYMRGTDYW

SEQ ID NO: 18470 - protein, 20 aa, Homo sapiens
CARYADPNSNYGFLGWFDPW

SEQ ID NO: 18471 - protein, 32 aa, Homo sapiens
CLRDEDTAVYYCARLADDFWTHPYYYYGMDVW

SEQ ID NO: 18472 - protein, 16 aa, Homo sapiens
CARVRRDSSGQSIDYW

SEQ ID NO: 18473 - protein, 15 aa, Homo sapiens
CAKDYSSGWPSFDYW

SEQ ID NO: 18474 - protein, 15 aa, Homo sapiens
CARESYSSGWQIDYW

SEQ ID NO: 18475 - protein, 17 aa, Homo sapiens
CAHRRGTTFWGDWFDPW

SEQ ID NO: 18476 - protein, 21 aa, Homo sapiens
CARARSLNVKWELLQYFFDYW

SEQ ID NO: 18477 - protein, 13 aa, Homo sapiens
CAKSPLRSPPDYW

SEQ ID NO: 18478 - protein, 15 aa, Homo sapiens
CARDQGGNNRGIDYW

SEQ ID NO: 18479 - protein, 14 aa, Homo sapiens
CAAAPISPYFFDYW

SEQ ID NO: 18480 - protein, 17 aa, Homo sapiens
CARGLRFLEWLNWFDPW

SEQ ID NO: 18481 - protein, 15 aa, Homo sapiens
CARGAMLGGDLFDCW

SEQ ID NO: 18482 - protein, 19 aa, Homo sapiens
CARGDCSGGVCLSDYMDGW

SEQ ID NO: 18483 - protein, 22 aa, Homo sapiens
CATALVSLDWERPLKTNWFDPW

SEQ ID NO: 18484 - protein, 16 aa, Homo sapiens
CARDYGSGNYDSIDYW

SEQ ID NO: 18485 - protein, 15 aa, Homo sapiens
CATWDSSLNADHVLF

SEQ ID NO: 18486 - protein, 15 aa, Homo sapiens
CARKKDDGDYHFDYW

SEQ ID NO: 18487 - protein, 21 aa, Homo sapiens
CATLHYDFWSGPRPRDAFDIW

SEQ ID NO: 18488 - protein, 16 aa, Homo sapiens
CARVSRNYGDYDLDYW

SEQ ID NO: 18489 - protein, 16 aa, Homo sapiens
CATSTTVTTSGWFDPW

SEQ ID NO: 18490 - protein, 25 aa, Homo sapiens
CTSLLHYYDFRSGFRSQQDSYFDYW

SEQ ID NO: 18491 - protein, 20 aa, Homo sapiens
CARDFGSGGYLTKDDAFDIW

SEQ ID NO: 18492 - protein, 17 aa, Homo sapiens
CARPPIFRSSGWYFDYW

SEQ ID NO: 18493 - protein, 20 aa, Homo sapiens
CSRRYYDFWSGYVGDAFDVW

SEQ ID NO: 18494 - protein, 22 aa, Homo sapiens
CARTNTERMPVAGTFFSWFDPW

SEQ ID NO: 18495 - protein, 16 aa, Homo sapiens
CARDLRVGATRPGDYW

SEQ ID NO: 18496 - protein, 17 aa, Homo sapiens
CARGTLSYGGNFLFDYW

SEQ ID NO: 18497 - protein, 23 aa, Homo sapiens
CARPLMDSRRDLWSHFHIGFDPW

SEQ ID NO: 18498 - protein, 18 aa, Homo sapiens
CARDFGTAILEVNQFGPW

SEQ ID NO: 18499 - protein, 26 aa, Homo sapiens
CARDLEYCSGGSCHTLGYYYYYMDVW

SEQ ID NO: 18500 - protein, 14 aa, Homo sapiens
CARRPSTNWCLDYW

SEQ ID NO: 18501 - protein, 19 aa, Homo sapiens
CAKVPFMVQGVGGAYFDYW

SEQ ID NO: 18502 - protein, 11 aa, Homo sapiens [sequence omitted]

SEQ ID NO: 18503 - protein, 20 aa, Homo sapiens
CARGLDGDSDYYYYYYMDVW

SEQ ID NO: 18504 - protein, 19 aa, Homo sapiens
CARDPGYSSSWEEDYFDYW

SEQ ID NO: 18505 - protein, 14 aa, Homo sapiens
CARRQTWDNWLDPW

SEQ ID NO: 18506 - protein, 16 aa, Homo sapiens
CARHERGPRVTNFDYW

SEQ ID NO: 18507 - protein, 14 aa, Homo sapiens
CARQGVGGYGFDIW

SEQ ID NO: 18508 - protein, 15 aa, Homo sapiens
CAREGVGAADNGDYW

SEQ ID NO: 18509 - protein, 14 aa, Homo sapiens
CAASHDYVSAFDSW

SEQ ID NO: 18510 - protein, 21 aa, Homo sapiens
CAREGDYDILTGYLVPLPDYW

SEQ ID NO: 18511 - protein, 13 aa, Homo sapiens
CARAAADQHFDYW

SEQ ID NO: 18512 - protein, 22 aa, Homo sapiens
CARDFVGSSGWDEDYYYGMDVW

SEQ ID NO: 18513 - protein, 19 aa, Homo sapiens
CARIRYDILTGYYFAFDIW

SEQ ID NO: 18514 - protein, 11 aa, Homo sapiens
CQHLYSFPITF

SEQ ID NO: 18515 - protein, 15 aa, Homo sapiens
CATTSRGYYYAMDVW

SEQ ID NO: 18516 - protein, 17 aa, Homo sapiens
CARQGLIAARPFAFDYW

SEQ ID NO: 18517 - protein, 16 aa, Homo sapiens
CARDLRHLGIVWFDPW

SEQ ID NO: 18518 - protein, 24 aa, Homo sapiens
CARHLRQCSRGVCHTYYYYGLDVW

SEQ ID NO: 18519 - protein, 21 aa, Homo sapiens
CARVRDCSGGRCYQNDAFDIW

SEQ ID NO: 18520 - protein, 12 aa, Homo sapiens
CAHTRVFRFDAW

SEQ ID NO: 18521 - protein, 16 aa, Homo sapiens
CAHRPGTTVTMYFDYW

SEQ ID NO: 18522 - protein, 10 aa, Homo sapiens
CATDPLLDYW

SEQ ID NO: 18523 - protein, 16 aa, Homo sapiens
CARDMSGDWNWYFDLW

SEQ ID NO: 18524 - protein, 24 aa, Homo sapiens
CARDSLYYDILTGYYPKPYYFDSW

SEQ ID NO: 18525 - protein, 19 aa, Homo sapiens
CARRYYYASGSAQPHFDYW

SEQ ID NO: 18526 - protein, 19 aa, Homo sapiens
CARGIDFWSGYSLWEFDYW

SEQ ID NO: 18527 - protein, 17 aa, Homo sapiens
CATTYAYNWNDGLIDYW

SEQ ID NO: 18528 - protein, 15 aa, Homo sapiens
CARVPDSDPFYFDYW

SEQ ID NO: 18529 - protein, 15 aa, Homo sapiens
CTKGYSGYDYAFDIW

SEQ ID NO: 18530 - protein, 17 aa, Homo sapiens
CAREDYSGYDLEPLDYW

SEQ ID NO: 18531 - protein, 16 aa, Homo sapiens
CARDYSSSWYLLADYW

SEQ ID NO: 18532 - protein, 20 aa, Homo sapiens
CARGVDDYVDQYTTIFFDSW

SEQ ID NO: 18533 - protein, 16 aa, Homo sapiens
CARLSSSGSGWPFDYW

SEQ ID NO: 18534 - protein, 18 aa, Homo sapiens
CAREGYSGYDYGGYFDYW

SEQ ID NO: 18535 - protein, 12 aa, Homo sapiens
CQAYDSSLVVLF

SEQ ID NO: 18536 - protein, 11 aa, Homo sapiens
CQQSNRFPRSF

SEQ ID NO: 18537 - protein, 18 aa, Homo sapiens
CARDLFGAARPLFYFDYW

SEQ ID NO: 18538 - protein, 17 aa, Homo sapiens
CARRSACGRDCYAADYW

SEQ ID NO: 18539 - protein, 17 aa, Homo sapiens
CARHYYGSGSYTEVDYW

SEQ ID NO: 18540 - protein, 22 aa, Homo sapiens
CARDPGITIFGVVMYHYYMDVW

SEQ ID NO: 18541 - protein, 15 aa, Homo sapiens
CAKDMAPYSGWYDYW

SEQ ID NO: 18542 - protein, 18 aa, Homo sapiens
CARGLIEYSSSSEGFDYW

SEQ ID NO: 18543 - protein, 19 aa, Homo sapiens
CVREYCTSSSSCFDTFDLW

SEQ ID NO: 18544 - protein, 21 aa, Homo sapiens
CARGSFIEESMKIVLNPFDYW

SEQ ID NO: 18545 - protein, 18 aa, Homo sapiens
CARIKFGGVIVNYYFDYW

SEQ ID NO: 18546 - protein, 17 aa, Homo sapiens
CARSTNYNGLWSGPDYW

SEQ ID NO: 18547 - protein, 18 aa, Homo sapiens
CARKGAFWSGPRNAFDIW

SEQ ID NO: 18548 - protein, 19 aa, Homo sapiens
CATRDPVYSSTWPNWFDSW

SEQ ID NO: 18549 - protein, 17 aa, Homo sapiens
CARAIWFREPHWYFDLW

SEQ ID NO: 18550 - protein, 17 aa, Homo sapiens
CAKDRRRKSSCEAFDYW

SEQ ID NO: 18551 - protein, 21 aa, Homo sapiens
CARDSVAATTNYYYYYYMDVW

SEQ ID NO: 18552 - protein, 16 aa, Homo sapiens
CAADRGTTGTKLLDYW

SEQ ID NO: 18553 - protein, 11 aa, Homo sapiens
CQQGNSFTPSF

SEQ ID NO: 18554 - protein, 17 aa, Homo sapiens
CARENLVGSTCCYFDYW

SEQ ID NO: 18555 - protein, 18 aa, Homo sapiens
CARVGGYSSSWYMALDYW

SEQ ID NO: 18556 - protein, 20 aa, Homo sapiens
CARHQGCGGDCPHADYFDYW

SEQ ID NO: 18557 - protein, 18 aa, Homo sapiens
CARGGIAARPLRNWFDPW

SEQ ID NO: 18558 - protein, 17 aa, Homo sapiens
CARDRLMATTNQPPDYW

SEQ ID NO: 18559 - protein, 23 aa, Homo sapiens
CASQYCSSTSWPQWWCMLPFDYW

SEQ ID NO: 18560 - protein, 17 aa, Homo sapiens
CAKDSQWLVNGWYFDYW

SEQ ID NO: 18561 - protein, 16 aa, Homo sapiens
CAVSYGEDVGKAFDFW

SEQ ID NO: 18562 - protein, 11 aa, Homo sapiens
CGLGSYYFDYW

SEQ ID NO: 18563 - protein, 18 aa, Homo sapiens
CARQVSDSSGWHGGFDPW

SEQ ID NO: 18564 - protein, 23 aa, Homo sapiens
CARVPIYYDYIWGSYRLDGMDVW

SEQ ID NO: 18565 - protein, 17 aa, Homo sapiens
CARTSLQGFTTNWFDPW

SEQ ID NO: 18566 - protein, 18 aa, Homo sapiens
CARDNSSEYSSSSAFDYW

SEQ ID NO: 18567 - protein, 12 aa, Homo sapiens
CARIASWAFDVW

SEQ ID NO: 18568 - protein, 14 aa, Homo sapiens
CAREDYGDWIGDYW

SEQ ID NO: 18569 - protein, 14 aa, Homo sapiens
CQQSYSVPPNVFIF

SEQ ID NO: 18570 - protein, 18 aa, Homo sapiens
CAKDINDSSDYEGWFDSW

SEQ ID NO: 18571 - protein, 23 aa, Homo sapiens
CATMVEITMVQGVLPTPYFFDFW

SEQ ID NO: 18572 - protein, 20 aa, Homo sapiens
CAIYTGVVGSTRLSDAFDIW

SEQ ID NO: 18573 - protein, 13 aa, Homo sapiens
CTATVHTPGFDYW

SEQ ID NO: 18574 - protein, 14 aa, Homo sapiens
CASQWLVGKGFDYW

SEQ ID NO: 18575 - protein, 19 aa, Homo sapiens
CASSKGSGSYYNEGWFDPW

SEQ ID NO: 18576 - protein, 14 aa, Homo sapiens
CMHGTHWPPPGYAF

SEQ ID NO: 18577 - protein, 11 aa, Homo sapiens
CQHRSDWPWAF

SEQ ID NO: 18578 - protein, 19 aa, Homo sapiens
CARDINPRNYYDSRAIDYW

SEQ ID NO: 18579 - protein, 12 aa, Homo sapiens
CVAGGNRFFDYW

SEQ ID NO: 18580 - protein, 17 aa, Homo sapiens
CARDPDPSRSIIGFDCW

SEQ ID NO: 18581 - protein, 18 aa, Homo sapiens
CARGAGYSSSRYHLVDYW

SEQ ID NO: 18582 - protein, 20 aa, Homo sapiens
CATVTSAYYYTYPYYAFDIW

SEQ ID NO: 18583 - protein, 18 aa, Homo sapiens
CTTDSTYNWNSISGSDYW

SEQ ID NO: 18584 - protein, 15 aa, Homo sapiens
CARDPGFYSNYFGYW

SEQ ID NO: 18585 - protein, 15 aa, Homo sapiens
CARDALGGKYFTDYW

SEQ ID NO: 18586 - protein, 15 aa, Homo sapiens
CARDAVQGSNYFDPW

SEQ ID NO: 18587 - protein, 18 aa, Homo sapiens
CARDTEYSSSWTPYFDYW

SEQ ID NO: 18588 - protein, 17 aa, Homo sapiens
CARDQKVDDYGDFLDYW

SEQ ID NO: 18589 - protein, 17 aa, Homo sapiens
CAKAAASPKGKYHFDHW

SEQ ID NO: 18590 - protein, 21 aa, Homo sapiens
CARIQGYCTGSSLCQYYFDHW

SEQ ID NO: 18591 - protein, 20 aa, Homo sapiens
CDWSSDVCSSDLGTYLFDYW

SEQ ID NO: 18592 - protein, 27 aa, Homo sapiens
CARDSPAPNTLFGVVIRDYYYYGMDVW

SEQ ID NO: 18593 - protein, 14 aa, Homo sapiens
CARGAGATDAFDIW

SEQ ID NO: 18594 - protein, 16 aa, Homo sapiens
CARSPCSSPSCYDDYW

SEQ ID NO: 18595 - protein, 16 aa, Homo sapiens
CARKDPIAVTAPFDPW

SEQ ID NO: 18596 - protein, 25 aa, Homo sapiens
CARDSPGKVRSIWGSPLPEVGFDYW

SEQ ID NO: 18597 - protein, 24 aa, Homo sapiens
CARVAGDYYDSSGYWAPHNWFDPW

SEQ ID NO: 18598 - protein, 17 aa, Homo sapiens
CAKDFSLTTLTYSFDYW

SEQ ID NO: 18599 - protein, 20 aa, Homo sapiens
CTRGPALRFLEWTLYYFDYW

SEQ ID NO: 18600 - protein, 14 aa, Homo sapiens
CARPDVYNNHFDYW

SEQ ID NO: 18601 - protein, 14 aa, Homo sapiens
CTRGKGPQYYFDYW

SEQ ID NO: 18602 - protein, 25 aa, Homo sapiens
CARAISVHKDHNGYYTMGVDALEIW

SEQ ID NO: 18603 - protein, 14 aa, Homo sapiens
CARRSAQLFNFDYW

SEQ ID NO: 18604 - protein, 19 aa, Homo sapiens
CARDLYDFPYYYYYYMDVW

SEQ ID NO: 18605 - protein, 26 aa, Homo sapiens
CARSSGYDWTHYIWGSYRYPYYFDYW

SEQ ID NO: 18606 - protein, 10 aa, Homo sapiens
CQQDSNLRTF

SEQ ID NO: 18607 - protein, 30 aa, Homo sapiens
CALPISNMDPVDTATYYCARSYYSNYFHYW

SEQ ID NO: 18608 - protein, 16 aa, Homo sapiens
CARHQAEDEPTHIDYW

SEQ ID NO: 18609 - protein, 16 aa, Homo sapiens
CARPTSSGSYYGFNYW

SEQ ID NO: 18610 - protein, 17 aa, Homo sapiens
CARELWGDYGRSPFDYW

SEQ ID NO: 18611 - protein, 14 aa, Homo sapiens
CTRIMITFGGRDYW

SEQ ID NO: 18612 - protein, 14 aa, Homo sapiens
CARDKGLERHFDYW

SEQ ID NO: 18613 - protein, 18 aa, Homo sapiens
CATLPPRWPDYYYYMDVW

SEQ ID NO: 18614 - protein, 19 aa, Homo sapiens
CARARPAWGPDILNWFDPW

SEQ ID NO: 18615 - protein, 15 aa, Homo sapiens
CARGNNAQWLGLDYW

SEQ ID NO: 18616 - protein, 21 aa, Homo sapiens
CARGVSDDYRDYDLSGWFDSW

SEQ ID NO: 18617 - protein, 9 aa, Homo sapiens
CMQDAQDLF

SEQ ID NO: 18618 - protein, 17 aa, Homo sapiens
CARDWSDFDSGRSLDYW

SEQ ID NO: 18619 - protein, 23 aa, Homo sapiens
CAVTLRFLEWLLLREYYYGMDVW

SEQ ID NO: 18620 - protein, 14 aa, Homo sapiens
CARHVDNSYRFDYW

SEQ ID NO: 18621 - protein, 26 aa, Homo sapiens
CASFNNNFPTNSVPYHYYYYYGMDVW

SEQ ID NO: 18622 - protein, 14 aa, Homo sapiens
CARQGVVVAVFDFW

SEQ ID NO: 18623 - protein, 15 aa, Homo sapiens
CSIYGDDLPRYFDYW

SEQ ID NO: 18624 - protein, 22 aa, Homo sapiens
CARDLESGYGPAGYYYYYMDVW

SEQ ID NO: 18625 - protein, 18 aa, Homo sapiens
CARGVTPPGRGLVYFDLW

SEQ ID NO: 18626 - protein, 22 aa, Homo sapiens
CARRSDCSGIKCYLYYYGMDVW

SEQ ID NO: 18627 - protein, 16 aa, Homo sapiens
CARAWSGSYLSAFDIW

SEQ ID NO: 18628 - protein, 17 aa, Homo sapiens
CASAPGIPADYNWFDPW

SEQ ID NO: 18629 - protein, 18 aa, Homo sapiens
CARVQVGDRRRTHSYDYW

SEQ ID NO: 18630 - protein, 15 aa, Homo sapiens
CARERNDYGDDFDYW

SEQ ID NO: 18631 - protein, 17 aa, Homo sapiens
CARASRGGYGGYDWDYW

SEQ ID NO: 18632 - protein, 17 aa, Homo sapiens
CARAGYSSSEDEYFQHW

SEQ ID NO: 18633 - protein, 18 aa, Homo sapiens
CARMVEGTALPGAGFDYW

SEQ ID NO: 18634 - protein, 20 aa, Homo sapiens
CASAASYCGGDCYSDAFDIW

SEQ ID NO: 18635 - protein, 18 aa, Homo sapiens
CARDSARVNFGVVIFDNW

SEQ ID NO: 18636 - protein, 23 aa, Homo sapiens
CATANSAYCGGECYSGTAPFDAW

SEQ ID NO: 18637 - protein, 13 aa, Homo sapiens
CQQFNSDPLSITF

SEQ ID NO: 18638 - protein, 23 aa, Homo sapiens
CARQNPKNGDYDILTGRGWHDPW

SEQ ID NO: 18639 - protein, 17 aa, Homo sapiens
CARDTPDENYYYYMDVW

SEQ ID NO: 18640 - protein, 17 aa, Homo sapiens
CARENTIFGEEACFDYW

SEQ ID NO: 18641 - protein, 16 aa, Homo sapiens
CARESTYSGSWYPDYW

SEQ ID NO: 18642 - protein, 25 aa, Homo sapiens
CARGHIGVNMVAVIFVGGDYYFDHW

SEQ ID NO: 18643 - protein, 20 aa, Homo sapiens
CARAQQYYYDITAIEAFDYW

SEQ ID NO: 18644 - protein, 17 aa, Homo sapiens
CARDCRDGYNPPGVDYW

SEQ ID NO: 18645 - protein, 14 aa, Homo sapiens
CASSSGITYEGDYW

SEQ ID NO: 18646 - protein, 16 aa, Homo sapiens
CAKDYGSTSSNWFDPW

SEQ ID NO: 18647 - protein, 14 aa, Homo sapiens
CARAGHGYNSFDSW

SEQ ID NO: 18648 - protein, 16 aa, Homo sapiens
CAKDRGSIWFYAFDIW

SEQ ID NO: 18649 - protein, 14 aa, Homo sapiens
CARDLRNYLFFDYW

SEQ ID NO: 18650 - protein, 17 aa, Homo sapiens
CARGYSSGWLEKWFDPW

SEQ ID NO: 18651 - protein, 18 aa, Homo sapiens
CARSLSIAAPGLGWFDPW

SEQ ID NO: 18652 - protein, 14 aa, Homo sapiens
CAGEFALDDTIDYW

SEQ ID NO: 18653 - protein, 16 aa, Homo sapiens
CARCRYCDSTSYLDYW

SEQ ID NO: 18654 - protein, 15 aa, Homo sapiens
CARYYGDYKDAFDIW

SEQ ID NO: 18655 - protein, 22 aa, Homo sapiens
CARDRRVDASGYYYYRYGMDVW

SEQ ID NO: 18656 - protein, 19 aa, Homo sapiens
CARDKDKGYFDWLPPFDPW

SEQ ID NO: 18657 - protein, 15 aa, Homo sapiens
CVRGAVTTSYDFDYW

SEQ ID NO: 18658 - protein, 18 aa, Homo sapiens
CTTDRYWIVEPTRGFDYW

SEQ ID NO: 18659 - protein, 15 aa, Homo sapiens
CAPGSEYDDYVADYW

SEQ ID NO: 18660 - protein, 21 aa, Homo sapiens
CAKDLYYYDSSGYPQYYFDYW

SEQ ID NO: 18661 - protein, 24 aa, Homo sapiens
CATGGTPGRYGSGSYDPTNWFDPW

SEQ ID NO: 18662 - protein, 18 aa, Homo sapiens
CARGLVSYDFWSGDFDYW

SEQ ID NO: 18663 - protein, 23 aa, Homo sapiens
CARIQWLRLLGNGIGYYYGMDVW

SEQ ID NO: 18664 - protein, 19 aa, Homo sapiens
CARTRGGYGDYLNNWIDPW

SEQ ID NO: 18665 - protein, 17 aa, Homo sapiens
CARVNSGVGGTYYFDYW

SEQ ID NO: 18666 - protein, 16 aa, Homo sapiens
CARGYCAAGSCYSVYW

SEQ ID NO: 18667 - protein, 16 aa, Homo sapiens
CAKLLEAGWDGNFDYW

SEQ ID NO: 18668 - protein, 16 aa, Homo sapiens
CARGPRGVLLGAFDFW

SEQ ID NO: 18669 - protein, 19 aa, Homo sapiens
CARPMQPGGAYYYYGMDVW

SEQ ID NO: 18670 - protein, 19 aa, Homo sapiens
CARDARYCSSTSCQGFDPW

SEQ ID NO: 18671 - protein, 16 aa, Homo sapiens
CTTTGSTVSTRYMDVW

SEQ ID NO: 18672 - protein, 17 aa, Homo sapiens
CAKSDGTDYYYSGFDYW

SEQ ID NO: 18673 - protein, 20 aa, Homo sapiens
CARSRDYIWGSYHDPLFDSW

SEQ ID NO: 18674 - protein, 17 aa, Homo sapiens
CARDRYRYSSSWYFDYW

SEQ ID NO: 18675 - protein, 21 aa, Homo sapiens
CDWSSDVCSSDLRKYFWFDPW

SEQ ID NO: 18676 - protein, 13 aa, Homo sapiens
CAKTQTGIAPDYW

SEQ ID NO: 18677 - protein, 19 aa, Homo sapiens
CGKDVGATTKYYYYGIDVW

SEQ ID NO: 18678 - protein, 18 aa, Homo sapiens
CARDSGSYYPGDLRFDYW

SEQ ID NO: 18679 - protein, 19 aa, Homo sapiens
CARIAPDRRGYFPSWFDHW

SEQ ID NO: 18680 - protein, 16 aa, Homo sapiens
CARESPPRSGNAFDMW

SEQ ID NO: 18681 - protein, 22 aa, Homo sapiens
CARGMTTVTRPPVRYYYYMDVW

SEQ ID NO: 18682 - protein, 17 aa, Homo sapiens
CTRAQLYGSSSGGFDYW

SEQ ID NO: 18683 - protein, 19 aa, Homo sapiens
CARDSPRSLTGDRIAFDIW

SEQ ID NO: 18684 - protein, 13 aa, Homo sapiens
CVRDRGWQQFDCW

SEQ ID NO: 18685 - protein, 22 aa, Homo sapiens
CARAFYTRNTSGYFYVDAFDIW

SEQ ID NO: 18686 - protein, 16 aa, Homo sapiens
CARDRIAAVRYAMDVW

SEQ ID NO: 18687 - protein, 19 aa, Homo sapiens
CAKGSGAMVQGVGVVLDYW

SEQ ID NO: 18688 - protein, 20 aa, Homo sapiens
CAREGDREFCSGGSCYLAYW

SEQ ID NO: 18689 - protein, 18 aa, Homo sapiens
CARGGGPVTPTTKNFDYW

SEQ ID NO: 18690 - protein, 19 aa, Homo sapiens
CARAGWIFGVVTLTAFDYW

SEQ ID NO: 18691 - protein, 23 aa, Homo sapiens
CARVKSYYDILTGYYRYYGMDVW

SEQ ID NO: 18692 - protein, 16 aa, Homo sapiens
CARADYYDSSTPLDYW

SEQ ID NO: 18693 - protein, 21 aa, Homo sapiens
CARNYYGSGSWGISDYYMDVW

SEQ ID NO: 18694 - protein, 13 aa, Homo sapiens
CLLYYGGTHMGVF

SEQ ID NO: 18695 - protein, 22 aa, Homo sapiens
CARSNYDFWSGYYTRGSYFDYW

SEQ ID NO: 18696 - protein, 22 aa, Homo sapiens
CARDGLTYYDSSGYYTTSIDYW

SEQ ID NO: 18697 - protein, 17 aa, Homo sapiens
CARYGSGYYYDDAFDIW

SEQ ID NO: 18698 - protein, 19 aa, Homo sapiens
CAHRVNSNGDWDTGLFDSW

SEQ ID NO: 18699 - protein, 21 aa, Homo sapiens
CARMMYYYDLSGSYYYYIDVW

SEQ ID NO: 18700 - protein, 21 aa, Homo sapiens
CARDLVHYYGSGSRGGFFDYW

SEQ ID NO: 18701 - protein, 17 aa, Homo sapiens
CALPIYQNGPARSLDYW

SEQ ID NO: 18702 - protein, 17 aa, Homo sapiens
CAKPGALGSTRPGFDYW

SEQ ID NO: 18703 - protein, 13 aa, Homo sapiens
CAKNTALALFHYW

SEQ ID NO: 18704 - protein, 24 aa, Homo sapiens
CARDTKVYSDILTDWPPKYYFDYW

SEQ ID NO: 18705 - protein, 19 aa, Homo sapiens
CTTCSLSDFDIPWYYMDVW

SEQ ID NO: 18706 - protein, 21 aa, Homo sapiens
CARLGGYCSGTYCYTHTFDYW

SEQ ID NO: 18707 - protein, 14 aa, Homo sapiens
CARSITTFAVIDYW

SEQ ID NO: 18708 - protein, 21 aa, Homo sapiens
CARDAEIQLWFGRASYYFDYW

SEQ ID NO: 18709 - protein, 20 aa, Homo sapiens
CARAYYDYSNYVGFNWFDPW

SEQ ID NO: 18710 - protein, 19 aa, Homo sapiens
CARELLVVPAAMEYYFDYW

SEQ ID NO: 18711 - protein, 23 aa, Homo sapiens
CAHRRDHYDYIWGSYRYNWFDPW

SEQ ID NO: 18712 - protein, 27 aa, Homo sapiens
CAIDRRYYYDSSGYPNPPLDNEYFQHW

SEQ ID NO: 18713 - protein, 22 aa, Homo sapiens
CARGRYSGYDRSGLGVYYFDYW

SEQ ID NO: 18714 - protein, 17 aa, Homo sapiens
CARVRYGGRFADAFDIW

SEQ ID NO: 18715 - protein, 19 aa, Homo sapiens
CATVHDYYASRSLDYFDYW

SEQ ID NO: 18716 - protein, 17 aa, Homo sapiens
CARGNIAVAGTRAFDYW

SEQ ID NO: 18717 - protein, 18 aa, Homo sapiens
CARRITIFGVDTDAFDIW

SEQ ID NO: 18718 - protein, 20 aa, Homo sapiens
CARGPRGVIGSSWSYYFDYW

SEQ ID NO: 18719 - protein, 14 aa, Homo sapiens
CARKAVTEFWFDPW

SEQ ID NO: 18720 - protein, 17 aa, Homo sapiens
CARWGIVATNYDAFDIW

SEQ ID NO: 18721 - protein, 19 aa, Homo sapiens
CAREYCSSTSCYVNWFDPW

SEQ ID NO: 18722 - protein, 18 aa, Homo sapiens
CARDYGGDQSRPGWVDYW

SEQ ID NO: 18723 - protein, 16 aa, Homo sapiens
CAKDVLYGDYATFDYW

SEQ ID NO: 18724 - protein, 15 aa, Homo sapiens
CAGDYGGNFRAFDIW

SEQ ID NO: 18725 - protein, 16 aa, Homo sapiens
CAKDRGTSGFVPFDIW

SEQ ID NO: 18726 - protein, 17 aa, Homo sapiens
CARTRQQQLAYNWFDPW

SEQ ID NO: 18727 - protein, 12 aa, Homo sapiens
CTDIGTSPFDCW

SEQ ID NO: 18728 - protein, 17 aa, Homo sapiens
CVRRSLYSDRGNWFDPW

SEQ ID NO: 18729 - protein, 16 aa, Homo sapiens
CARHFWSGYYYGMDVW

SEQ ID NO: 18730 - protein, 22 aa, Homo sapiens
CARTTYYYDSSGYYHFTAFDIW

SEQ ID NO: 18731 - protein, 13 aa, Homo sapiens
CAREGIGAEIDYW

SEQ ID NO: 18732 - protein, 14 aa, Homo sapiens
CASHYGFWSRFDPW

SEQ ID NO: 18733 - protein, 20 aa, Homo sapiens
CARERGYFYDSSGYDVYDYW

SEQ ID NO: 18734 - protein, 18 aa, Homo sapiens
CAKAIDYDYFYYYGMDVW

SEQ ID NO: 18735 - protein, 13 aa, Homo sapiens
CSYAGSYTFVWVF

SEQ ID NO: 18736 - protein, 16 aa, Homo sapiens
CAREGAVADTNYFDYW

SEQ ID NO: 18737 - protein, 13 aa, Homo sapiens
CARDDPLTTLDYW

SEQ ID NO: 18738 - protein, 15 aa, Homo sapiens
CARGFRGNSVSGDYW

SEQ ID NO: 18739 - protein, 19 aa, Homo sapiens
CARVYAGIAAAAVSWFDPW

SEQ ID NO: 18740 - protein, 17 aa, Homo sapiens
CAREPFSSSWFNAFDLW

SEQ ID NO: 18741 - protein, 14 aa, Homo sapiens
CVGRYGSGSYMGYW

SEQ ID NO: 18742 - protein, 16 aa, Homo sapiens
CARAYDSRAYYYFDYW

SEQ ID NO: 18743 - protein, 17 aa, Homo sapiens
CARLDFGVVIRSYFDYW

SEQ ID NO: 18744 - protein, 17 aa, Homo sapiens
CVRDDPAIGTGNWFDPW

SEQ ID NO: 18745 - protein, 18 aa, Homo sapiens
CARAGYGSYGDHNWFDPW

SEQ ID NO: 18746 - protein, 13 aa, Homo sapiens
CCSRDVSGNHYIF

SEQ ID NO: 18747 - protein, 23 aa, Homo sapiens
CATTTTPSTQNYDFWSGYYVDYW

SEQ ID NO: 18748 - protein, 20 aa, Homo sapiens
CARSVGVQGVIMRNNGFDPW

SEQ ID NO: 18749 - protein, 20 aa, Homo sapiens
CARADRCVGPTCYYEGFDVW

SEQ ID NO: 18750 - protein, 18 aa, Homo sapiens
CARDYDAFWSGYRIFDYW

SEQ ID NO: 18751 - protein, 19 aa, Homo sapiens
CAKTYVNIVATGGYYFDYW

SEQ ID NO: 18752 - protein, 17 aa, Homo sapiens
CVRGGPSSGWYYYFDYW

SEQ ID NO: 18753 - protein, 20 aa, Homo sapiens
CARGVEGSGSYYNSNWFDPW

SEQ ID NO: 18754 - protein, 29 aa, Homo sapiens
CAHSSGPSYDYIWGSYRYKEDEGYYFDYW

SEQ ID NO: 18755 - protein, 20 aa, Homo sapiens
CARDRVSLDSGWYNDAFDIW

SEQ ID NO: 18756 - protein, 13 aa, Homo sapiens
CARGSSNYGFDSW

SEQ ID NO: 18757 - protein, 22 aa, Homo sapiens
CARAMGYYGSGSYYNGRYFDYW

SEQ ID NO: 18758 - protein, 24 aa, Homo sapiens
CARILATSYCTGAVCHWWGAFDMW

SEQ ID NO: 18759 - protein, 20 aa, Homo sapiens
CDWSSDVCSSDLGATTNDYW

SEQ ID NO: 18760 - protein, 22 aa, Homo sapiens
CARLDYYGSGNEGNYYYYMDVW

SEQ ID NO: 18761 - protein, 18 aa, Homo sapiens
CARVLMVQGVIIDGFDYW

SEQ ID NO: 18762 - protein, 13 aa, Homo sapiens
CAKHYIPYYMDVW

SEQ ID NO: 18763 - protein, 18 aa, Homo sapiens
CARDSDAYYDILNWFDPW

SEQ ID NO: 18764 - protein, 22 aa, Homo sapiens
CAREPGGLLWFREYEHWYFDLW

SEQ ID NO: 18765 - protein, 20 aa, Homo sapiens
CTRDDREMNYEDYGDRFDHW

SEQ ID NO: 18766 - protein, 17 aa, Homo sapiens
CATSGSIAAADYYFHYW

SEQ ID NO: 18767 - protein, 17 aa, Homo sapiens
CAPNRGYGDYQYMFDYW

SEQ ID NO: 18768 - protein, 18 aa, Homo sapiens
CASLKATEQWLVGWFDPW

SEQ ID NO: 18769 - protein, 16 aa, Homo sapiens
CVRIMGDFNSYYFDPW

SEQ ID NO: 18770 - protein, 21 aa, Homo sapiens
CASGYCGSTICYDSTYYMDVW

SEQ ID NO: 18771 - protein, 15 aa, Homo sapiens
CQVWDSISDPREVVF

SEQ ID NO: 18772 - protein, 18 aa, Homo sapiens
CAKDGVHGSAYNYYTDVW

SEQ ID NO: 18773 - protein, 23 aa, Homo sapiens
CARGWGDADPTAVTMGPHWFDSW

SEQ ID NO: 18774 - protein, 21 aa, Homo sapiens
CAGMTGPAWIRPGGYNWFDPW

SEQ ID NO: 18775 - protein, 16 aa, Homo sapiens
CARGLSSSYYDAFDIW

SEQ ID NO: 18776 - protein, 13 aa, Homo sapiens
CAKGDSSGYFGYW

SEQ ID NO: 18777 - protein, 20 aa, Homo sapiens
CARDNAIFDRYGASVWFDPW

SEQ ID NO: 18778 - protein, 14 aa, Homo sapiens
CARVEAGTFSFDPW

SEQ ID NO: 18779 - protein, 19 aa, Homo sapiens
CASQTSYYDSSGSPSFDYW

SEQ ID NO: 18780 - protein, 17 aa, Homo sapiens
CARDLYADDYSSYPDYW

SEQ ID NO: 18781 - protein, 19 aa, Homo sapiens
CARRGLGSSWYLESAFDIW

SEQ ID NO: 18782 - protein, 16 aa, Homo sapiens
CARVWFRVVTWVFDHW

SEQ ID NO: 18783 - protein, 19 aa, Homo sapiens
CARSSRGVGDTAMVLGDYW

SEQ ID NO: 18784 - protein, 15 aa, Homo sapiens
CAHQQWLVRYYFDFW

SEQ ID NO: 18785 - protein, 23 aa, Homo sapiens
CAAASIDYDYIWGSYRYGAFDIW

SEQ ID NO: 18786 - protein, 24 aa, Homo sapiens
CARGLTVFGVITPDIGPLFYMDVW

SEQ ID NO: 18787 - protein, 16 aa, Homo sapiens
CARGGVGATTGAFDIW

SEQ ID NO: 18788 - protein, 13 aa, Homo sapiens
CARTMHTSSWDYW

SEQ ID NO: 18789 - protein, 21 aa, Homo sapiens
CARDWTPGDCGGDCLSYFDPW

SEQ ID NO: 18790 - protein, 27 aa, Homo sapiens
CARSHWAVVPAANDGRGGYYYYGMDVW

SEQ ID NO: 18791 - protein, 15 aa, Homo sapiens
CAREYDSSFDAFDIW

SEQ ID NO: 18792 - protein, 21 aa, Homo sapiens
CARAVQGFYDFWSGYYNFDYW

SEQ ID NO: 18793 - protein, 18 aa, Homo sapiens
CARINYDSNFLSERFDYW

SEQ ID NO: 18794 - protein, 17 aa, Homo sapiens
CAKAYYYRSGSYWFDYW

SEQ ID NO: 18795 - protein, 14 aa, Homo sapiens
CARRGGYNFGYDYW

SEQ ID NO: 18796 - protein, 23 aa, Homo sapiens
CARDLTSMVQGVMAPYYYYMDVW

SEQ ID NO: 18797 - protein, 20 aa, Homo sapiens
CAKEYYSHTSGYYLAYFDYW

SEQ ID NO: 18798 - protein, 19 aa, Homo sapiens
CARGPFCSTTTCYDFFDYW

SEQ ID NO: 18799 - protein, 14 aa, Homo sapiens
CAREGWELWYFDYW

SEQ ID NO: 18800 - protein, 18 aa, Homo sapiens
CARGFPGELWLAYYFDHW

SEQ ID NO: 18801 - protein, 17 aa, Homo sapiens
CAHSNHYSTTTIAFDIW

SEQ ID NO: 18802 - protein, 17 aa, Homo sapiens
CAREADSGYDSAGFDYW

SEQ ID NO: 18803 - protein, 17 aa, Homo sapiens
CARLGIAAAGTNLPDYW

SEQ ID NO: 18804 - protein, 19 aa, Homo sapiens
CARQMNGDYFLADNWFDPW

SEQ ID NO: 18805 - protein, 25 aa, Homo sapiens
CTTDLPNAYYYDSSGYYRNEAFDIW

SEQ ID NO: 18806 - protein, 16 aa, Homo sapiens
CARDGQQLVEYAFDIW

SEQ ID NO: 18807 - protein, 23 aa, Homo sapiens
CARTGETTLWQQWLLKAEYFQHW

SEQ ID NO: 18808 - protein, 19 aa, Homo sapiens
CAKTGEDDSSGWPYYFDYW

SEQ ID NO: 18809 - protein, 20 aa, Homo sapiens
CARDMGGSSSWPHTNAFDIW

SEQ ID NO: 18810 - protein, 23 aa, Homo sapiens
CARDQDYYDKLRGGYYYYYMDVW

SEQ ID NO: 18811 - protein, 18 aa, Homo sapiens
CAKDRSVTMIATDAFDVW

SEQ ID NO: 18812 - protein, 18 aa, Homo sapiens
CTVAGHPYYYYYYGLDVW

SEQ ID NO: 18813 - protein, 18 aa, Homo sapiens
CARDINDLIAARPGFDYW

SEQ ID NO: 18814 - protein, 24 aa, Homo sapiens
CARDPRGYYDSSGYYHPTYYFDYW

SEQ ID NO: 18815 - protein, 19 aa, Homo sapiens
CARSVAAGYRRSWYYNDYW

SEQ ID NO: 18816 - protein, 18 aa, Homo sapiens
CARGAGSHFYGSASHDYW

SEQ ID NO: 18817 - protein, 15 aa, Homo sapiens
CASLYGGNSYYFDYW

SEQ ID NO: 18818 - protein, 11 aa, Homo sapiens
CAVISGYDSYW

SEQ ID NO: 18819 - protein, 13 aa, Homo sapiens
CARIRAGYYFEYW

SEQ ID NO: 18820 - protein, 24 aa, Homo sapiens
CVRDRLVVIPAVPRNFDYFYLDVW

SEQ ID NO: 18821 - protein, 22 aa, Homo sapiens
CAREGRFLEWLSTYYYYYMDVW

SEQ ID NO: 18822 - protein, 19 aa, Homo sapiens
CARDGETGYSSSNPTFDYW

SEQ ID NO: 18823 - protein, 16 aa, Homo sapiens
CARAQSGAYLTDFDYW

SEQ ID NO: 18824 - protein, 16 aa, Homo sapiens
CANGGSGSYFGYFDYW

SEQ ID NO: 18825 - protein, 16 aa, Homo sapiens
CAKHTVTTVQYHFDNW

SEQ ID NO: 18826 - protein, 11 aa, Homo sapiens
CQQYYTTRWAF

SEQ ID NO: 18827 - protein, 16 aa, Homo sapiens
CARPSVGATRGYFDYW

SEQ ID NO: 18828 - protein, 15 aa, Homo sapiens
CARLAISGSYCFDYW

SEQ ID NO: 18829 - protein, 19 aa, Homo sapiens
CARVGITIFGDERNWFDPW

SEQ ID NO: 18830 - protein, 20 aa, Homo sapiens
CARDDYDSSGYYYPDALDIW

SEQ ID NO: 18831 - protein, 12 aa, Homo sapiens
CLIAAPPLADYW

SEQ ID NO: 18832 - protein, 23 aa, Homo sapiens
CARDQYYDFWSGYSGTKYYFDYW

SEQ ID NO: 18833 - protein, 16 aa, Homo sapiens
CARYIAVDGRKAFDIW

SEQ ID NO: 18834 - protein, 14 aa, Homo sapiens
CARDRGVPNAHDYW

SEQ ID NO: 18835 - protein, 16 aa, Homo sapiens
CARDGSHSGSYHFDYW

SEQ ID NO: 18836 - protein, 30 aa, Homo sapiens
CARGSAHYDFWSGYYSPLKQNYYYYGMDVW

SEQ ID NO: 18837 - protein, 16 aa, Homo sapiens
CARHLGDSITSWFDPW

SEQ ID NO: 18838 - protein, 14 aa, Homo sapiens
CSLDTKRRRAFDYW

SEQ ID NO: 18839 - protein, 17 aa, Homo sapiens
CARDPGFSSGWSRFDYW

SEQ ID NO: 18840 - protein, 17 aa, Homo sapiens
CARWRFPELYYFYMDVW

SEQ ID NO: 18841 - protein, 24 aa, Homo sapiens
CATAGYCSGGSCSEIFYYYAMDVW

SEQ ID NO: 18842 - protein, 19 aa, Homo sapiens
CAREGMTTVTTSGTNFDYW

SEQ ID NO: 18843 - protein, 15 aa, Homo sapiens
CARRSYSTVATYDYW

SEQ ID NO: 18844 - protein, 18 aa, Homo sapiens
CASSPATGYYGNYGMDVW

SEQ ID NO: 18845 - protein, 23 aa, Homo sapiens
CAREPESPSNFWSGSPGYAFDIW

SEQ ID NO: 18846 - protein, 22 aa, Homo sapiens
CATDRLGAYCGGDCYKAPLDYW

SEQ ID NO: 18847 - protein, 12 aa, Homo sapiens
CAHSQGWGPDYW

SEQ ID NO: 18848 - protein, 21 aa, Homo sapiens
CARHVPLRGLIAARLTFFDSW

SEQ ID NO: 18849 - protein, 16 aa, Homo sapiens
CARDRVVPAVDPFDYW

SEQ ID NO: 18850 - protein, 17 aa, Homo sapiens
CAQDPHYDFWSGRLDYW

SEQ ID NO: 18851 - protein, 24 aa, Homo sapiens
CARLAPGGGSLRFGFRYYYYMDVW

SEQ ID NO: 18852 - protein, 16 aa, Homo sapiens
CARDQSQGSGINFDYW

SEQ ID NO: 18853 - protein, 14 aa, Homo sapiens
CARFYNTKQSFDYW

SEQ ID NO: 18854 - protein, 21 aa, Homo sapiens
CARRRPAASWSRPPSNWFDPW

SEQ ID NO: 18855 - protein, 13 aa, Homo sapiens
CHQRSYWPPMYTF

SEQ ID NO: 18856 - protein, 15 aa, Homo sapiens
CAGASGSYWGGLDYW

SEQ ID NO: 18857 - protein, 16 aa, Homo sapiens
CATGLGISGWFNFAYW

SEQ ID NO: 18858 - protein, 21 aa, Homo sapiens
CARGPENYDFWSGYYGAFDIW

SEQ ID NO: 18859 - protein, 17 aa, Homo sapiens
CARGAYLGDLQFPFDFW

SEQ ID NO: 18860 - protein, 21 aa, Homo sapiens
CARGRTYYYGSESYYNGFDYW

SEQ ID NO: 18861 - protein, 14 aa, Homo sapiens
CQVWDSSPNLAVIF

SEQ ID NO: 18862 - protein, 13 aa, Homo sapiens
CVADYGDNQFDYW

SEQ ID NO: 18863 - protein, 22 aa, Homo sapiens
CARSITIFGVVRYYYYYYMDVW

SEQ ID NO: 18864 - protein, 22 aa, Homo sapiens
CAHRPPLDIVVVPAAQNWFDPW

SEQ ID NO: 18865 - protein, 20 aa, Homo sapiens
CARHYFDSGAYYWGYYFDYW

SEQ ID NO: 18866 - protein, 14 aa, Homo sapiens
CARRYSNYGGFDYW

SEQ ID NO: 18867 - protein, 16 aa, Homo sapiens
CARDGGYSGYGPFDYW

SEQ ID NO: 18868 - protein, 18 aa, Homo sapiens
CAAGLIAAHPGLDAFDIW

SEQ ID NO: 18869 - protein, 16 aa, Homo sapiens
CAVSPPYLIRLRGDYW

SEQ ID NO: 18870 - protein, 19 aa, Homo sapiens
CARDLGYCTSTSCYSFDYW

SEQ ID NO: 18871 - protein, 17 aa, Homo sapiens
CARGEIQYNWNDSLDYW

SEQ ID NO: 18872 - protein, 19 aa, Homo sapiens
CASANYDILTGRPFDFDLW

SEQ ID NO: 18873 - protein, 21 aa, Homo sapiens
CARDYDFWSGYLNYYYYMDVW

SEQ ID NO: 18874 - protein, 15 aa, Homo sapiens
CARGSTASGRPLDYW

SEQ ID NO: 18875 - protein, 13 aa, Homo sapiens
CVRGSISYNFDYW

SEQ ID NO: 18876 - protein, 17 aa, Homo sapiens
CARKLQVGATESPFDYW

SEQ ID NO: 18877 - protein, 25 aa, Homo sapiens
CAKDGLGLRYYDILTGYLIPHFDYW

SEQ ID NO: 18878 - protein, 17 aa, Homo sapiens
CATLPRPVATITDWDYW

SEQ ID NO: 18879 - protein, 23 aa, Homo sapiens
CARGRGITIFGVVRPTENWFDPW

SEQ ID NO: 18880 - protein, 26 aa, Homo sapiens
CAAAPQTSYFSSSGQRRVWDDAFHFW

SEQ ID NO: 18881 - protein, 22 aa, Homo sapiens
CARDFRKGITMVQGVIDGMDVW

SEQ ID NO: 18882 - protein, 14 aa, Homo sapiens
CAREGPRNWNPDYW

SEQ ID NO: 18883 - protein, 15 aa, Homo sapiens
CARQRRRDGYNFDFW

SEQ ID NO: 18884 - protein, 18 aa, Homo sapiens
CGRDAAYRSSFDWYFDLW

SEQ ID NO: 18885 - protein, 19 aa, Homo sapiens
CASSSGSYYNEGVSYFDYW

SEQ ID NO: 18886 - protein, 23 aa, Homo sapiens
CAKDGYEGVTAAGTSTLYYMDVW

SEQ ID NO: 18887 - protein, 16 aa, Homo sapiens
CATLEWLSYHDGFDIW

SEQ ID NO: 18888 - protein, 16 aa, Homo sapiens
CAHRLVAVAAYWFDPW

SEQ ID NO: 18889 - protein, 21 aa, Homo sapiens
CATDGPYYYDSSGYSYYMDVW

SEQ ID NO: 18890 - protein, 15 aa, Homo sapiens
CARDGVAAGLYFDYW

SEQ ID NO: 18891 - protein, 19 aa, Homo sapiens
CSSAIYYDRGGYYYPPDYW

SEQ ID NO: 18892 - protein, 17 aa, Homo sapiens
CARLPLVGDDCYYFDFW

SEQ ID NO: 18893 - protein, 17 aa, Homo sapiens
CARRLDKYSSSAQFDYW

SEQ ID NO: 18894 - protein, 21 aa, Homo sapiens
CARDLDTIFGVVKQSNWFDPW

SEQ ID NO: 18895 - protein, 16 aa, Homo sapiens
CARTEDDYNFYYFHYW

SEQ ID NO: 18896 - protein, 19 aa, Homo sapiens
CAKDLSSMGVGTTATFDYW

SEQ ID NO: 18897 - protein, 18 aa, Homo sapiens
CATAASRTGVGGDWFDPW

SEQ ID NO: 18898 - protein, 22 aa, Homo sapiens
CARGVSLGRGGDSWGTFLLDYW

SEQ ID NO: 18899 - protein, 19 aa, Homo sapiens
CARADYDSSGYALDSFDYW

SEQ ID NO: 18900 - protein, 22 aa, Homo sapiens
CARGPLLRVFEWLSLNWYFDLW

SEQ ID NO: 18901 - protein, 14 aa, Homo sapiens
CTRRNYSYWYFDLW

SEQ ID NO: 18902 - protein, 17 aa, Homo sapiens
CARLGYSGSYFGAFDIW

SEQ ID NO: 18903 - protein, 18 aa, Homo sapiens
CSRHNCAGNSCYGAFDIW

SEQ ID NO: 18904 - protein, 11 aa, Homo sapiens
CAPLILDFDFW

SEQ ID NO: 18905 - protein, 16 aa, Homo sapiens
CARLRYNWNYGYFDYW

SEQ ID NO: 18906 - protein, 22 aa, Homo sapiens
CARVNRGYCIGDVCAHPWFDPW

SEQ ID NO: 18907 - protein, 20 aa, Homo sapiens
CAGGRDYGPGSHYRSAFEIW

SEQ ID NO: 18908 - protein, 21 aa, Homo sapiens
CAKVDTAMGSRVPVAGHFDYW

SEQ ID NO: 18909 - protein, 15 aa, Homo sapiens
CARDYYYDSSPHDYW

SEQ ID NO: 18910 - protein, 21 aa, Homo sapiens
CARSTAITIFGVATSGWFDPW

SEQ ID NO: 18911 - protein, 21 aa, Homo sapiens
CARGSGDYDILTGYPIHFDYW

SEQ ID NO: 18912 - protein, 16 aa, Homo sapiens
CANCLIAAGYNWFDPW

SEQ ID NO: 18913 - protein, 26 aa, Homo sapiens
CARSSRGDDYIWGSPTPWDSHSFDYW

SEQ ID NO: 18914 - protein, 18 aa, Homo sapiens
CASIRYCSSTSCYPFDYW

SEQ ID NO: 18915 - protein, 15 aa, Homo sapiens
CARVTSAGTFYFDYW

SEQ ID NO: 18916 - protein, 18 aa, Homo sapiens
CVRNTYDDTNTYNWFDPW

SEQ ID NO: 18917 - protein, 16 aa, Homo sapiens
CARVGDYSTGWTFDYW

SEQ ID NO: 18918 - protein, 21 aa, Homo sapiens
CARLEVLRYFDWLFPKHSDYW

SEQ ID NO: 18919 - protein, 14 aa, Homo sapiens
CARDNAPAVGIDYW

SEQ ID NO: 18920 - protein, 21 aa, Homo sapiens
CATAAHGLFITGTTIAAFDIW

SEQ ID NO: 18921 - protein, 18 aa, Homo sapiens
CARDGGASATVPRLGDYW

SEQ ID NO: 18922 - protein, 15 aa, Homo sapiens
CARDWSAYNSGPDYW

SEQ ID NO: 18923 - protein, 12 aa, Homo sapiens [sequence omitted]

SEQ ID NO: 18924 - protein, 20 aa, Homo sapiens
CAKSRLEYCGADCPDSLDVW

SEQ ID NO: 18925 - protein, 19 aa, Homo sapiens
CARQGSCSSTSCYGLYDYW

SEQ ID NO: 18926 - protein, 15 aa, Homo sapiens [sequence omitted]

SEQ ID NO: 18927 - protein, 18 aa, Homo sapiens
CAGTRQEYSGYDRYFQHW

SEQ ID NO: 18928 - protein, 18 aa, Homo sapiens
CARDSESNPSRNDAFDIW

SEQ ID NO: 18929 - protein, 17 aa, Homo sapiens
CVKDVEFFGKHEGSDYW

SEQ ID NO: 18930 - protein, 29 aa, Homo sapiens
CAKDAKYYDILTGYYPEPSYYYYYGMDVW

SEQ ID NO: 18931 - protein, 14 aa, Homo sapiens
CARYHAGNYYMDIW

SEQ ID NO: 18932 - protein, 21 aa, Homo sapiens
CARDKSEWWYEGRVLDAFDIW

SEQ ID NO: 18933 - protein, 19 aa, Homo sapiens
CAPCSGGVWGQRRDAFDIW

SEQ ID NO: 18934 - protein, 11 aa, Homo sapiens
CQLYNSYVYTF

SEQ ID NO: 18935 - protein, 15 aa, Homo sapiens
CARHGGGIYANIDYW

SEQ ID NO: 18936 - protein, 13 aa, Homo sapiens
CAALGFGDAFELW

SEQ ID NO: 18937 - protein, 13 aa, Homo sapiens
CSSASCYYYFDYW

SEQ ID NO: 18938 - protein, 20 aa, Homo sapiens
CARDDPYYDILTGYGVFDPW

SEQ ID NO: 18939 - protein, 24 aa, Homo sapiens
CARDRGRHCTGGVCSPNTFKFDYW

SEQ ID NO: 18940 - protein, 37 aa, Homo sapiens
CDWSSDVCSSDLRAEDTAVYYCAREGPAVAGSPFDYW

SEQ ID NO: 18941 - protein, 21 aa, Homo sapiens
CARWARRTGTTSYYYYYMDVW

SEQ ID NO: 18942 - protein, 21 aa, Homo sapiens
CARLAFCGGYCYSYGGAFDYW

SEQ ID NO: 18943 - protein, 11 aa, Homo sapiens
CAHQIEYFRHW

SEQ ID NO: 18944 - protein, 17 aa, Homo sapiens
CAHSGEFSGHDYVLDYW

SEQ ID NO: 18945 - protein, 13 aa, Homo sapiens
CQQYYVWPPMITF

SEQ ID NO: 18946 - protein, 19 aa, Homo sapiens
CVKGYCSSINCRQNLFEYW

SEQ ID NO: 18947 - protein, 16 aa, Homo sapiens
CARAGGGDYADWFDPW

SEQ ID NO: 18948 - protein, 23 aa, Homo sapiens
CTTDELTTVHTDHYQYYYYMDVW

SEQ ID NO: 18949 - protein, 17 aa, Homo sapiens
CARVLGRYSASEPFDYW

SEQ ID NO: 18950 - protein, 15 aa, Homo sapiens
CAHSGNYGHDGFDYW

SEQ ID NO: 18951 - protein, 17 aa, Homo sapiens
CARDLGGASGWDAFDIW

SEQ ID NO: 18952 - protein, 23 aa, Homo sapiens
CAKLEYCSTTSCYDGEGLYFDYW

SEQ ID NO: 18953 - protein, 19 aa, Homo sapiens
CASLRRDGSSLSAWYFDYW

SEQ ID NO: 18954 - protein, 18 aa, Homo sapiens
CARYSSSPYYYYYGMDVW

SEQ ID NO: 18955 - protein, 17 aa, Homo sapiens
CARDADNYDSHYHFDYW

SEQ ID NO: 18956 - protein, 15 aa, Homo sapiens
CVRRLTSTSFDFDYW

SEQ ID NO: 18957 - protein, 13 aa, Homo sapiens
CAKEEDSWYFDLW

SEQ ID NO: 18958 - protein, 21 aa, Homo sapiens
CARQRVYDSSGYNYYYGMDVW

SEQ ID NO: 18959 - protein, 27 aa, Homo sapiens
CARDREWNGYYDFWSGYYLPGYYFDYW

SEQ ID NO: 18960 - protein, 19 aa, Homo sapiens
CAGGPYSGYEDYYYYMDVW

SEQ ID NO: 18961 - protein, 19 aa, Homo sapiens
CARDNDFWSGYYKNWFDPW

SEQ ID NO: 18962 - protein, 18 aa, Homo sapiens
CATGDVASGRNNNWFDPW

SEQ ID NO: 18963 - protein, 18 aa, Homo sapiens
CARLERFLEGIGNWFDPW

SEQ ID NO: 18964 - protein, 17 aa, Homo sapiens
CARLKQGFEHVHYFDLW

SEQ ID NO: 18965 - protein, 16 aa, Homo sapiens
CTRDTGYYDSSGFDYW

SEQ ID NO: 18966 - protein, 17 aa, Homo sapiens
CARVSDLDVLSNYFDYW

SEQ ID NO: 18967 - protein, 17 aa, Homo sapiens
CARVVDGGNRGGLFDYW

SEQ ID NO: 18968 - protein, 19 aa, Homo sapiens
CARDSFRNCSGGSCYPDYW

SEQ ID NO: 18969 - protein, 20 aa, Homo sapiens
CTTYWERLQSREELHPFDYW

SEQ ID NO: 18970 - protein, 19 aa, Homo sapiens
CASPRSLYSSGWSSPFDYW

SEQ ID NO: 18971 - protein, 20 aa, Homo sapiens
CARDPGRIQVWVDPFYMDVW

SEQ ID NO: 18972 - protein, 13 aa, Homo sapiens
CVRDKGQWLWDYW

SEQ ID NO: 18973 - protein, 15 aa, Homo sapiens
CARSTTVTSWVSDYW

SEQ ID NO: 18974 - protein, 19 aa, Homo sapiens
CARMDCSSNTCLFYSFDYW

SEQ ID NO: 18975 - protein, 22 aa, Homo sapiens
CARDTITMVQGVIKLPDAFDIW

SEQ ID NO: 18976 - protein, 20 aa, Homo sapiens
CAKAPPVNWNYVYYYYMDVW

SEQ ID NO: 18977 - protein, 18 aa, Homo sapiens
CARSSYVVASSYWYFDFW

SEQ ID NO: 18978 - protein, 21 aa, Homo sapiens
CARGFGLYGSGSSYYYYMDVW

SEQ ID NO: 18979 - protein, 14 aa, Homo sapiens
CATWDDTLSGFYVF

SEQ ID NO: 18980 - protein, 24 aa, Homo sapiens
CAREVSDRRGYFPHYSYFYYMDVW

SEQ ID NO: 18981 - protein, 19 aa, Homo sapiens
CARRLAGEAIPVAYPFDYW

SEQ ID NO: 18982 - protein, 14 aa, Homo sapiens
CKTVPNYDSSPDYW

SEQ ID NO: 18983 - protein, 17 aa, Homo sapiens
CARAPVFGVVISHFDFW

SEQ ID NO: 18984 - protein, 17 aa, Homo sapiens
CAYQNSSGWFGYYFDYW

SEQ ID NO: 18985 - protein, 15 aa, Homo sapiens
CARGSGSYYNAYDYW

SEQ ID NO: 18986 - protein, 21 aa, Homo sapiens
CARDVDTAMVTWYYYYGMDVW

SEQ ID NO: 18987 - protein, 24 aa, Homo sapiens
CARGNYYDSSGYYFGYYYYGMDVW

SEQ ID NO: 18988 - protein, 22 aa, Homo sapiens
CARAGPLYDSNGYYLTDAFDIW

SEQ ID NO: 18989 - protein, 20 aa, Homo sapiens
CAHIIARHYGGQPHYYFDYW

SEQ ID NO: 18990 - protein, 30 aa, Homo sapiens
CALPISAVYYCVRVDHCDRGICYYYGMDVW

SEQ ID NO: 18991 - protein, 14 aa, Homo sapiens
CARVLSRPGWFDPW

SEQ ID NO: 18992 - protein, 17 aa, Homo sapiens
CAREPEYGRSSKCFDSW

SEQ ID NO: 18993 - protein, 20 aa, Homo sapiens
CARHRPRNGFGYYYYGMDVW

SEQ ID NO: 18994 - protein, 16 aa, Homo sapiens
CVHRRYDFWSGYYDYW

SEQ ID NO: 18995 - protein, 18 aa, Homo sapiens
CTRTYFDVWTVNHIFDYW

SEQ ID NO: 18996 - protein, 14 aa, Homo sapiens
CAGRSYRTDAFDFW

SEQ ID NO: 18997 - protein, 19 aa, Homo sapiens
CARAPYFDWLSSSFYFDYW

SEQ ID NO: 18998 - protein, 17 aa, Homo sapiens
CVRSPYSESGAYYFDLW

SEQ ID NO: 18999 - protein, 15 aa, Homo sapiens
CARSNNYFSNAFDFW

SEQ ID NO: 19000 - protein, 16 aa, Homo sapiens
CARQSWGVTRNYFDYW

SEQ ID NO: 19001 - protein, 16 aa, Homo sapiens
CAKPLAYHWNPPFDSW

SEQ ID NO: 19002 - protein, 18 aa, Homo sapiens
CARQRINILVVPAAIDYW

SEQ ID NO: 19003 - protein, 14 aa, Homo sapiens
CAKEYNGYDDFDYW

SEQ ID NO: 19004 - protein, 16 aa, Homo sapiens
CARRAGGSSWSAFDQW

SEQ ID NO: 19005 - protein, 21 aa, Homo sapiens
CARDLSANPYYDFWSGYPDYW

SEQ ID NO: 19006 - protein, 14 aa, Homo sapiens
CARIRPTDYAFDSW

SEQ ID NO: 19007 - protein, 20 aa, Homo sapiens
CARWGASIAARRYYYGMDVW

SEQ ID NO: 19008 - protein, 21 aa, Homo sapiens
CARGRLWGGGRATTGLGIDYW

SEQ ID NO: 19009 - protein, 15 aa, Homo sapiens
CARDVTTRYFAADVW

SEQ ID NO: 19010 - protein, 20 aa, Homo sapiens
CARFRITLGIPDYYYALDVW

SEQ ID NO: 19011 - protein, 24 aa, Homo sapiens
CARHFENTYYDFWSALGSNWFDPW

SEQ ID NO: 19012 - protein, 17 aa, Homo sapiens
CTRDYRAFSPTAKFDYW

SEQ ID NO: 19013 - protein, 19 aa, Homo sapiens
CARARSTVLREGSHAFDIW

SEQ ID NO: 19014 - protein, 16 aa, Homo sapiens
CARARVWSGYYSFDPW

SEQ ID NO: 19015 - protein, 17 aa, Homo sapiens
CARHYDSRAILSAFAIW

SEQ ID NO: 19016 - protein, 17 aa, Homo sapiens
CAKDRSYALFQDAFDIW

SEQ ID NO: 19017 - protein, 18 aa, Homo sapiens
CASFLREYSSSTYYFDYW

SEQ ID NO: 19018 - protein, 23 aa, Homo sapiens
CARARLITFGGVIAPEYDAFDIW

SEQ ID NO: 19019 - protein, 13 aa, Homo sapiens
CARDSNVIPFDYW

SEQ ID NO: 19020 - protein, 16 aa, Homo sapiens
CARLTGYSSGWYFDYW

SEQ ID NO: 19021 - protein, 19 aa, Homo sapiens
CARVLAAYNSGWYGYSDYW

SEQ ID NO: 19022 - protein, 16 aa, Homo sapiens
CAKGVILLGDWYFDLW

SEQ ID NO: 19023 - protein, 19 aa, Homo sapiens
CARGVPYYDFWSGCWLDPW

SEQ ID NO: 19024 - protein, 14 aa, Homo sapiens
CARDQPYLWCPDYW

SEQ ID NO: 19025 - protein, 19 aa, Homo sapiens
CAKDQLAGVVVPDSPFDPW

SEQ ID NO: 19026 - protein, 17 aa, Homo sapiens
CASHRNEYSSSSPFDYW

SEQ ID NO: 19027 - protein, 17 aa, Homo sapiens
CARDWGDGGATSGIDYW

SEQ ID NO: 19028 - protein, 16 aa, Homo sapiens
CVRYGYTYGQYYFDYW

SEQ ID NO: 19029 - protein, 22 aa, Homo sapiens
CARDCSGGKCYPAYYYYGMDVW

SEQ ID NO: 19030 - protein, 16 aa, Homo sapiens
CASSMTMVTTYYFDYW

SEQ ID NO: 19031 - protein, 15 aa, Homo sapiens
CARSPLRFRYNFDYW

SEQ ID NO: 19032 - protein, 17 aa, Homo sapiens
CARDNFSTGWYVGFDYW

SEQ ID NO: 19033 - protein, 23 aa, Homo sapiens
CATGPPPSGTIFGVVTNNWFDPW

SEQ ID NO: 19034 - protein, 29 aa, Homo sapiens
CARDVQPLVDDFWSGFSSKMSAGMMFDYW

SEQ ID NO: 19035 - protein, 25 aa, Homo sapiens
CARQLSRDYYGSGSYYDGYYGMDVW

SEQ ID NO: 19036 - protein, 18 aa, Homo sapiens
CAHLPLTGIVGASHFDYW

SEQ ID NO: 19037 - protein, 13 aa, Homo sapiens
CASCGGDCSLDYW

SEQ ID NO: 19038 - protein, 15 aa, Homo sapiens
CARWAGSTYQYLDYW

SEQ ID NO: 19039 - protein, 18 aa, Homo sapiens
CARGLMTTFGGLIALDYW

SEQ ID NO: 19040 - protein, 19 aa, Homo sapiens
CARHSSSSSGWDAYYFDYW

SEQ ID NO: 19041 - protein, 17 aa, Homo sapiens
CARDPAGYVGGYDFDYW

SEQ ID NO: 19042 - protein, 11 aa, Homo sapiens
CQQYKTYPFNF

SEQ ID NO: 19043 - protein, 16 aa, Homo sapiens
CVRDHQNGPARSLDYW

SEQ ID NO: 19044 - protein, 15 aa, Homo sapiens
CARDWWGTGTSQDYW

SEQ ID NO: 19045 - protein, 21 aa, Homo sapiens
CARVSLRFFEWSHVRGFFDYW

SEQ ID NO: 19046 - protein, 16 aa, Homo sapiens
CAKTRGSGTLAFFDLW

SEQ ID NO: 19047 - protein, 13 aa, Homo sapiens
CASYYGDYSLDYW

SEQ ID NO: 19048 - protein, 15 aa, Homo sapiens
CARAVSGTSSPLDYW

SEQ ID NO: 19049 - protein, 15 aa, Homo sapiens
CARESRATARWFDPW

SEQ ID NO: 19050 - protein, 25 aa, Homo sapiens
CARDKTYCSSGSCYSYDYYYGMDVW

SEQ ID NO: 19051 - protein, 20 aa, Homo sapiens
CARVSSYYYGSGSYGWFDPW

SEQ ID NO: 19052 - protein, 18 aa, Homo sapiens
CARPSGTTSLYYYGMDVW

SEQ ID NO: 19053 - protein, 19 aa, Homo sapiens
CARDHPSDYYGLGSYFDYW

SEQ ID NO: 19054 - protein, 15 aa, Homo sapiens
CAKSRVPGGHNFDFW

SEQ ID NO: 19055 - protein, 15 aa, Homo sapiens
CAKSVIGAFRGSDYW

SEQ ID NO: 19056 - protein, 22 aa, Homo sapiens
CAREGGYSPDDYYYYYYGMDVW

SEQ ID NO: 19057 - protein, 17 aa, Homo sapiens
CASSYDFWSGYPPFDPW

SEQ ID NO: 19058 - protein, 22 aa, Homo sapiens
CARLPYIGYSSGWYSTGWFDPW

SEQ ID NO: 19059 - protein, 23 aa, Homo sapiens
CAADSDDYGDYAAYYYYYGMDVW

SEQ ID NO: 19060 - protein, 17 aa, Homo sapiens
CARDLGGVVNRRAFDIW

SEQ ID NO: 19061 - protein, 14 aa, Homo sapiens
CQSSDSSGAYPYVF

SEQ ID NO: 19062 - protein, 12 aa, Homo sapiens
CARAYWGSVDYW

SEQ ID NO: 19063 - protein, 16 aa, Homo sapiens
CARLQCSGSCNFFDYW

SEQ ID NO: 19064 - protein, 18 aa, Homo sapiens
CARTDILTGSYMGGVDYW

SEQ ID NO: 19065 - protein, 14 aa, Homo sapiens
CARVRQWLHYFDSW

SEQ ID NO: 19066 - protein, 15 aa, Homo sapiens
CARLVDIVSTHFDYW

SEQ ID NO: 19067 - protein, 20 aa, Homo sapiens
CARELDYNDGTGSNPYFETW

SEQ ID NO: 19068 - protein, 17 aa, Homo sapiens
CVKDWEEYHYVYAFHVW

SEQ ID NO: 19069 - protein, 27 aa, Homo sapiens
CARELPRASKLTARLKYYYDYFGMDVW

SEQ ID NO: 19070 - protein, 14 aa, Homo sapiens
CATGLTRATETDYW

SEQ ID NO: 19071 - protein, 19 aa, Homo sapiens
CARTHRSYDAFSYYYMDVW

SEQ ID NO: 19072 - protein, 18 aa, Homo sapiens
CASLDLEDNYYYYGMDVW

SEQ ID NO: 19073 - protein, 20 aa, Homo sapiens
CAREWREYSGYEDYWYFDLW

SEQ ID NO: 19074 - protein, 15 aa, Homo sapiens
CARDPATPKYYFDYW

SEQ ID NO: 19075 - protein, 14 aa, Homo sapiens
CARISVTVGWFDPW

SEQ ID NO: 19076 - protein, 23 aa, Homo sapiens
CARDITVTDQSEDYYYYYYMDVW

SEQ ID NO: 19077 - protein, 19 aa, Homo sapiens
CATGRDYYDSSGYRIFDYW

SEQ ID NO: 19078 - protein, 14 aa, Homo sapiens
CARAAGSTSSFDYW

SEQ ID NO: 19079 - protein, 17 aa, Homo sapiens
CARDLVAVAGTPTFDYW

SEQ ID NO: 19080 - protein, 21 aa, Homo sapiens
CAKSVVATIFGARDDDAFDIW

SEQ ID NO: 19081 - protein, 17 aa, Homo sapiens
CARVGIVAGGYNYFDPW

SEQ ID NO: 19082 - protein, 14 aa, Homo sapiens
CARDIAARGPFDYW

SEQ ID NO: 19083 - protein, 16 aa, Homo sapiens
CASWGDVDTANNFDYW

SEQ ID NO: 19084 - protein, 18 aa, Homo sapiens
CARDQTVSDYGGSVFDYW

SEQ ID NO: 19085 - protein, 12 aa, Homo sapiens
CQQYGISAGYIF

SEQ ID NO: 19086 - protein, 13 aa, Homo sapiens
CQSADITGTYVLF

SEQ ID NO: 19087 - protein, 23 aa, Homo sapiens
CARDSSLDILTGYYTLGDAFDIW

SEQ ID NO: 19088 - protein, 16 aa, Homo sapiens
CARLDTVMVGYAFDIW

SEQ ID NO: 19089 - protein, 19 aa, Homo sapiens
CAKDTLQWLRLQRGGLDYW

SEQ ID NO: 19090 - protein, 20 aa, Homo sapiens
CARYPYYYGSGSYYYYMDVW

SEQ ID NO: 19091 - protein, 15 aa, Homo sapiens
CARDNIVVVPALDYW

SEQ ID NO: 19092 - protein, 13 aa, Homo sapiens
CAREQYQLPFDYW

SEQ ID NO: 19093 - protein, 17 aa, Homo sapiens
CAKNIAVTGTWDAFDVW

SEQ ID NO: 19094 - protein, 16 aa, Homo sapiens
CAREGIVGATTGFDYW

SEQ ID NO: 19095 - protein, 13 aa, Homo sapiens
CTTDLPSAPDDYW

SEQ ID NO: 19096 - protein, 16 aa, Homo sapiens
CARHYTSGWNTNFDYW

SEQ ID NO: 19097 - protein, 29 aa, Homo sapiens
CLKASDTAMYYCARRLTGDSLGSWYFDLW

SEQ ID NO: 19098 - protein, 26 aa, Homo sapiens
CARGMWKHCSSTSCYTRYYYYGMDVW

SEQ ID NO: 19099 - protein, 26 aa, Homo sapiens
CAAPQDLQALLMLRGGDYYYYGMDVW

SEQ ID NO: 19100 - protein, 18 aa, Homo sapiens
CAKVQSRGSGWYWDFDYW

SEQ ID NO: 19101 - protein, 15 aa, Homo sapiens
CAREGASGGQNPDYW

SEQ ID NO: 19102 - protein, 13 aa, Homo sapiens
CARVYGGDYGDYW

SEQ ID NO: 19103 - protein, 22 aa, Homo sapiens
CARRSRAVWGYSSSSKDAFDIW

SEQ ID NO: 19104 - protein, 21 aa, Homo sapiens
CARVEYCSPDICYTRYYFDYW

SEQ ID NO: 19105 - protein, 18 aa, Homo sapiens
CAKGFWGGHGPYGPFDYW

SEQ ID NO: 19106 - protein, 15 aa, Homo sapiens
CARFRERWKAAFDYW

SEQ ID NO: 19107 - protein, 14 aa, Homo sapiens
CVRGTCYVGYMDVW

SEQ ID NO: 19108 - protein, 16 aa, Homo sapiens
CAKGGGPRELGYADYW

SEQ ID NO: 19109 - protein, 17 aa, Homo sapiens
CAAQPFRYASSWSFDYW

SEQ ID NO: 19110 - protein, 24 aa, Homo sapiens
CARILATSYCSGGVCYWWGASDIW

SEQ ID NO: 19111 - protein, 18 aa, Homo sapiens
CARDGRVLDYDISWFDPW

SEQ ID NO: 19112 - protein, 16 aa, Homo sapiens
CAHHRRGYFFDALDFW

SEQ ID NO: 19113 - protein, 24 aa, Homo sapiens
CARGDYDFWTGSRFNHQSNWFDPW

SEQ ID NO: 19114 - protein, 19 aa, Homo sapiens
CARSASDWNYVLLVAFDFW

SEQ ID NO: 19115 - protein, 18 aa, Homo sapiens
CARDQLGVQGVTKGIDYW

SEQ ID NO: 19116 - protein, 16 aa, Homo sapiens
CARVNGTFSLYYFDYW

SEQ ID NO: 19117 - protein, 16 aa, Homo sapiens
CAGVVLVAAQGAFDIW

SEQ ID NO: 19118 - protein, 20 aa, Homo sapiens
CARGPFVVVVAARNWYFDLW

SEQ ID NO: 19119 - protein, 16 aa, Homo sapiens
CARDQPTGRNGDSDYW

SEQ ID NO: 19120 - protein, 14 aa, Homo sapiens
CNSRDSDGNTQGLF

SEQ ID NO: 19121 - protein, 15 aa, Homo sapiens
CARSYSNNYYLLDYW

SEQ ID NO: 19122 - protein, 16 aa, Homo sapiens
CAHSSNGWYGEYFDYW

SEQ ID NO: 19123 - protein, 18 aa, Homo sapiens
CARAVVAALTSYWYFDLW

SEQ ID NO: 19124 - protein, 15 aa, Homo sapiens
CARGYHSSWYWFDRW

SEQ ID NO: 19125 - protein, 20 aa, Homo sapiens
CARGSITMVQGVIIKGFDPW

SEQ ID NO: 19126 - protein, 16 aa, Homo sapiens
CAITSGYSSSWWFDPW

SEQ ID NO: 19127 - protein, 25 aa, Homo sapiens
CASSEIEYSSSSHVRWYYYYGMDVW

SEQ ID NO: 19128 - protein, 23 aa, Homo sapiens
CATLSPFGVVITHEGDPHYSDVW

SEQ ID NO: 19129 - protein, 19 aa, Homo sapiens
CARTLNYGDYYHHYYMDVW

SEQ ID NO: 19130 - protein, 18 aa, Homo sapiens
CARLNMYYDFWSDDFDYW

SEQ ID NO: 19131 - protein, 16 aa, Homo sapiens
CAKDRTVVLRQAFDIW

SEQ ID NO: 19132 - protein, 21 aa, Homo sapiens
CARGSPYYYDSSGLYNWFDPW

SEQ ID NO: 19133 - protein, 26 aa, Homo sapiens
CARENPDYDILTGYYIYVGRRSFDYW

SEQ ID NO: 19134 - protein, 17 aa, Homo sapiens
CARRSDVYSSSWYVDYW

SEQ ID NO: 19135 - protein, 13 aa, Homo sapiens
CAREGASDVFDIW

SEQ ID NO: 19136 - protein, 15 aa, Homo sapiens
CARDLTMEHWYFDYW

SEQ ID NO: 19137 - protein, 16 aa, Homo sapiens
CARMRFGDNANAFDIW

SEQ ID NO: 19138 - protein, 15 aa, Homo sapiens
CARASAVRSLTADYW

SEQ ID NO: 19139 - protein, 17 aa, Homo sapiens
CARDPFARSSSSYFGYW

SEQ ID NO: 19140 - protein, 17 aa, Homo sapiens
CVKDHLMWQHPNGGDYW

SEQ ID NO: 19141 - protein, 19 aa, Homo sapiens
CAREPGIFGVVINNWFDPW

SEQ ID NO: 19142 - protein, 17 aa, Homo sapiens
CAKTDYGDYAVSYMDVW

SEQ ID NO: 19143 - protein, 19 aa, Homo sapiens
CAREDAWLRNYYYYGMDVW

SEQ ID NO: 19144 - protein, 23 aa, Homo sapiens
CASLVPSGGYCSGGSCYSDIDYW

SEQ ID NO: 19145 - protein, 24 aa, Homo sapiens
CATGSMTVTTFTVPPRYYYYMDVW

SEQ ID NO: 19146 - protein, 19 aa, Homo sapiens
CARDWSIAAHHNDPYFDYW

SEQ ID NO: 19147 - protein, 13 aa, Homo sapiens
CVREGHSPFFDYW

SEQ ID NO: 19148 - protein, 17 aa, Homo sapiens
CARDVRSASRYGPFDIW

SEQ ID NO: 19149 - protein, 18 aa, Homo sapiens
CARSVRSKTYYYYGMDVW

SEQ ID NO: 19150 - protein, 11 aa, Homo sapiens [sequence omitted]

SEQ ID NO: 19151 - protein, 19 aa, Homo sapiens
CARSEDYGDYTRSNWFDPW

SEQ ID NO: 19152 - protein, 13 aa, Homo sapiens
CAHRGTSGKLDYW

SEQ ID NO: 19153 - protein, 17 aa, Homo sapiens
CARDGGITSGGTRFDFW

SEQ ID NO: 19154 - protein, 18 aa, Homo sapiens
CARVRESRQWLVVPFDYW

SEQ ID NO: 19155 - protein, 20 aa, Homo sapiens
CAREIEVWGEVIPYNWFDAW

SEQ ID NO: 19156 - protein, 21 aa, Homo sapiens
CVRDLRRVGCTATSCQVFDNW

SEQ ID NO: 19157 - protein, 19 aa, Homo sapiens
CARDRYSGSYYHPAYFDYW

SEQ ID NO: 19158 - protein, 18 aa, Homo sapiens
CATDDPRDWSTRGRFDPW

SEQ ID NO: 19159 - protein, 13 aa, Homo sapiens
CQSYDTTNQGVVF

SEQ ID NO: 19160 - protein, 13 aa, Homo sapiens
CQSYDSSLASSFF

SEQ ID NO: 19161 - protein, 21 aa, Homo sapiens
CARLGSLDYYDSSGYDAFDIW

SEQ ID NO: 19162 - protein, 28 aa, Homo sapiens
CARDLRSRKQQITMIVVDGDTIDAFDIW

SEQ ID NO: 19163 - protein, 19 aa, Homo sapiens
CARRSANVGSGSYYHFDYW

SEQ ID NO: 19164 - protein, 13 aa, Homo sapiens
CHQANSFPPPIPF

SEQ ID NO: 19165 - protein, 22 aa, Homo sapiens
CARAVRPKDDFWGGDHNWLDPW

SEQ ID NO: 19166 - protein, 20 aa, Homo sapiens
CARDWEHYYGSGSYYNFDYW

SEQ ID NO: 19167 - protein, 18 aa, Homo sapiens
CARYVVKNTVTTGGFDYW

SEQ ID NO: 19168 - protein, 17 aa, Homo sapiens
CARSPYSGWFGGWFDPW

SEQ ID NO: 19169 - protein, 18 aa, Homo sapiens
CAKDFIALVLGVISFDPW

SEQ ID NO: 19170 - protein, 20 aa, Homo sapiens
CANDALPGTGTLLYNWFDPW

SEQ ID NO: 19171 - protein, 22 aa, Homo sapiens
CARTNYYGSGTYYNFQYYFDYW

SEQ ID NO: 19172 - protein, 18 aa, Homo sapiens
CARVDYDSSGYFSGFGYW

SEQ ID NO: 19173 - protein, 16 aa, Homo sapiens
CVRDVSGNSGYYWYYW

SEQ ID NO: 19174 - protein, 22 aa, Homo sapiens
CARGHFGTVFGMGYLYYYMDVW

SEQ ID NO: 19175 - protein, 24 aa, Homo sapiens
CARGYCSGGSCYGIYYYYYYMDVW

SEQ ID NO: 19176 - protein, 17 aa, Homo sapiens
CARGSNSMGPATPFDYW

SEQ ID NO: 19177 - protein, 12 aa, Homo sapiens
CAKDLGGYGDNW

SEQ ID NO: 19178 - protein, 20 aa, Homo sapiens
CARMDGYVWSSWRLYNFDYW

SEQ ID NO: 19179 - protein, 20 aa, Homo sapiens
CAKIGYCSGAVCYPNWFDPW

SEQ ID NO: 19180 - protein, 18 aa, Homo sapiens
CASSSYYDSSPNPYFDYW

SEQ ID NO: 19181 - protein, 21 aa, Homo sapiens
CARVRTLQKPPGDGRGYFDYW

SEQ ID NO: 19182 - protein, 20 aa, Homo sapiens
CARRGGRTSLYYYYYGMDVW

SEQ ID NO: 19183 - protein, 17 aa, Homo sapiens
CAHRPPPYGDYVWFDPW

SEQ ID NO: 19184 - protein, 16 aa, Homo sapiens
CAREVAAAESWYFDYW

SEQ ID NO: 19185 - protein, 18 aa, Homo sapiens
CTHSFGSTYYGGKEFDYW

SEQ ID NO: 19186 - protein, 22 aa, Homo sapiens
CARSASGAMIVSEVTGDWFDPW

SEQ ID NO: 19187 - protein, 19 aa, Homo sapiens
CARVIGLRNDYGDHGFDYW

SEQ ID NO: 19188 - protein, 17 aa, Homo sapiens
CARGSPRVVIIYYFDYW

SEQ ID NO: 19189 - protein, 16 aa, Homo sapiens
CARDYLTGTTNYFDYW

SEQ ID NO: 19190 - protein, 15 aa, Homo sapiens
CARPDTTTVTPFDYW

SEQ ID NO: 19191 - protein, 14 aa, Homo sapiens
CARGIGTPYAFDIW

SEQ ID NO: 19192 - protein, 16 aa, Homo sapiens
CARGDYGDYGRYFDLW

SEQ ID NO: 19193 - protein, 18 aa, Homo sapiens
CARAYYYGSGAYSGCDYW

SEQ ID NO: 19194 - protein, 17 aa, Homo sapiens
CARVGDVLRYFYYMDVW

SEQ ID NO: 19195 - protein, 19 aa, Homo sapiens
CATAAAIYTVTTGGWFDPW

SEQ ID NO: 19196 - protein, 21 aa, Homo sapiens
CARDSTYDYIWGSYRGLFDYW

SEQ ID NO: 19197 - protein, 30 aa, Homo sapiens
CLRAEDTAVYYCARERYYYDSSGYYYFDYW

SEQ ID NO: 19198 - protein, 17 aa, Homo sapiens
CAKRGGCYGASCYPDYW

SEQ ID NO: 19199 - protein, 22 aa, Homo sapiens
CATVPPPDYSDSSGDYSSFDYW

SEQ ID NO: 19200 - protein, 18 aa, Homo sapiens
CARRLTGDSLGSWYFDLW

SEQ ID NO: 19201 - protein, 20 aa, Homo sapiens
CASTKVCLGGVCYIGYMDVW

SEQ ID NO: 19202 - protein, 14 aa, Homo sapiens
CASSFGVVSDFDNW

SEQ ID NO: 19203 - protein, 20 aa, Homo sapiens
CASPRSPMRQGVTLTVFDYW

SEQ ID NO: 19204 - protein, 17 aa, Homo sapiens
CASISTMTTVTTYFDYW

SEQ ID NO: 19205 - protein, 19 aa, Homo sapiens
CARDRSGATIGYYYYMDVW

SEQ ID NO: 19206 - protein, 13 aa, Homo sapiens
CARPMALRGFPYW

SEQ ID NO: 19207 - protein, 15 aa, Homo sapiens
CARTPFGKTYYSDHW

SEQ ID NO: 19208 - protein, 18 aa, Homo sapiens
CAREITDSYDSSGYFDYW

SEQ ID NO: 19209 - protein, 16 aa, Homo sapiens
CAKGPTYGSGSYFDYW

SEQ ID NO: 19210 - protein, 16 aa, Homo sapiens
CARALEYSSSPGLDYW

SEQ ID NO: 19211 - protein, 19 aa, Homo sapiens
CTRDFWIDIRGSPPAIDYW

SEQ ID NO: 19212 - protein, 18 aa, Homo sapiens
CARVRFMAVTTSNWFDPW

SEQ ID NO: 19213 - protein, 18 aa, Homo sapiens
CARHRLYGGNSYDAFDIW

SEQ ID NO: 19214 - protein, 16 aa, Homo sapiens
CARTHDYGGNLWFDYW

SEQ ID NO: 19215 - protein, 27 aa, Homo sapiens
CARDGVESASSGTLREGFKYYYYMDVW

SEQ ID NO: 19216 - protein, 18 aa, Homo sapiens
CARAKGYNWNDRSAFDIW

SEQ ID NO: 19217 - protein, 15 aa, Homo sapiens
CARDLSYGDYQLDYW

SEQ ID NO: 19218 - protein, 16 aa, Homo sapiens
CARDFGPGSSWYFDRW

SEQ ID NO: 19219 - protein, 22 aa, Homo sapiens
CARHAGQFGGVIVPWFDWFDPW

SEQ ID NO: 19220 - protein, 20 aa, Homo sapiens
CVRGFCGGATCYPNDAFDIW

SEQ ID NO: 19221 - protein, 23 aa, Homo sapiens
CARDLWAPPPHGDYDYYYGMDVW

SEQ ID NO: 19222 - protein, 25 aa, Homo sapiens
CARARSVYVDSSGYYGPNYYYMDVW

SEQ ID NO: 19223 - protein, 15 aa, Homo sapiens
CAHTTLIAAAPFDYW

SEQ ID NO: 19224 - protein, 18 aa, Homo sapiens
CARDAVDTAMGGYTLDYW

SEQ ID NO: 19225 - protein, 13 aa, Homo sapiens
CAKRMVGTGFDYW

SEQ ID NO: 19226 - protein, 17 aa, Homo sapiens
CARPSGMIRGWRAFDIW

SEQ ID NO: 19227 - protein, 24 aa, Homo sapiens
CARGGGDYYDSSGYYYGKYYFDYW

SEQ ID NO: 19228 - protein, 16 aa, Homo sapiens
CARTAVYSGSYYYDYW

SEQ ID NO: 19229 - protein, 13 aa, Homo sapiens
CAGLQYQNQFDYW

SEQ ID NO: 19230 - protein, 25 aa, Homo sapiens
CARDSLPYDYIWGSYRPELPTSDYW

SEQ ID NO: 19231 - protein, 20 aa, Homo sapiens
CAFTGGLRFLEAKYDAFDIW

SEQ ID NO: 19232 - protein, 20 aa, Homo sapiens
CARGRHSSSWYKSYGWFDPW

SEQ ID NO: 19233 - protein, 16 aa, Homo sapiens
CARGGSTTITTGFDYW

SEQ ID NO: 19234 - protein, 23 aa, Homo sapiens
CATASTVASGGIIEEKYLYFDYW

SEQ ID NO: 19235 - protein, 20 aa, Homo sapiens
CARRYYYDSSGYHPSAYDYW

SEQ ID NO: 19236 - protein, 25 aa, Homo sapiens
CARDWSPGFDWLFQSDQTKYYFDYW

SEQ ID NO: 19237 - protein, 19 aa, Homo sapiens
CARSLTYYDSGGNWYFDLW

SEQ ID NO: 19238 - protein, 19 aa, Homo sapiens
CARVPRDSYGDPKYFFDYW

SEQ ID NO: 19239 - protein, 21 aa, Homo sapiens
CARDLSRYDYIWGSYRPNDYW

SEQ ID NO: 19240 - protein, 16 aa, Homo sapiens
CARTLLDRGSAHFDYW

SEQ ID NO: 19241 - protein, 17 aa, Homo sapiens
CARGTGYDSSYLTFDIW

SEQ ID NO: 19242 - protein, 17 aa, Homo sapiens
CARHPRVAGYSDLFDYW

SEQ ID NO: 19243 - protein, 17 aa, Homo sapiens
CARYYYGSGTSKTLDYW

SEQ ID NO: 19244 - protein, 21 aa, Homo sapiens
CARGGWGYCTGGVCPRWFDPW

SEQ ID NO: 19245 - protein, 14 aa, Homo sapiens
CARDIGVHDYVDYW

SEQ ID NO: 19246 - protein, 19 aa, Homo sapiens
CARATRFRGDYYYYGMDVW

SEQ ID NO: 19247 - protein, 21 aa, Homo sapiens
CARQFSYYYGSGSLFDAFDIW

SEQ ID NO: 19248 - protein, 19 aa, Homo sapiens
CAKEESRYCSSTSCYGDYW

SEQ ID NO: 19249 - protein, 24 aa, Homo sapiens
CARVPIVVVPAAFQARYYYYMDVW

SEQ ID NO: 19250 - protein, 18 aa, Homo sapiens
CARFSIYSNSWTAPFDYW

SEQ ID NO: 19251 - protein, 22 aa, Homo sapiens
CARDGRGYSGYESWRFHAFDIW

SEQ ID NO: 19252 - protein, 24 aa, Homo sapiens
CARGHREDGFAALGIYYYYGMDVW

SEQ ID NO: 19253 - protein, 24 aa, Homo sapiens
CARGVVYCTGGVCLNYYYYYMDVW

SEQ ID NO: 19254 - protein, 12 aa, Homo sapiens
CVKHSSGTFDVW

SEQ ID NO: 19255 - protein, 15 aa, Homo sapiens
CAKKGSSSGYYFDNW

SEQ ID NO: 19256 - protein, 19 aa, Homo sapiens
CARLTSRAGYNTPDFFDYW

SEQ ID NO: 19257 - protein, 17 aa, Homo sapiens
CAHRLLLIATPPSFDPW

SEQ ID NO: 19258 - protein, 21 aa, Homo sapiens
CARVWHYCSGGRCYSGEIDYW

SEQ ID NO: 19259 - protein, 23 aa, Homo sapiens
CARDYDIAAAGTGAYYYYYMDVW

SEQ ID NO: 19260 - protein, 15 aa, Homo sapiens
CAKDRVTTVTTFYYW

SEQ ID NO: 19261 - protein, 20 aa, Homo sapiens
CARDLTYYDGSVYYDRFDYW

SEQ ID NO: 19262 - protein, 14 aa, Homo sapiens
CGELARSLDAFDIW

SEQ ID NO: 19263 - protein, 18 aa, Homo sapiens
CAKDPGSGYQARDAFDIW

SEQ ID NO: 19264 - protein, 29 aa, Homo sapiens
CSLKASDTAMYYCARHREIPAAGTYPDYW

SEQ ID NO: 19265 - protein, 15 aa, Homo sapiens
CAREVANHYNWFDPW

SEQ ID NO: 19266 - protein, 18 aa, Homo sapiens
CARGPPYSGLLTGWFDPW

SEQ ID NO: 19267 - protein, 17 aa, Homo sapiens
CAREDYGGNSGSTIDYW

SEQ ID NO: 19268 - protein, 17 aa, Homo sapiens
CATLYGGNHYYYYMDVW

SEQ ID NO: 19269 - protein, 15 aa, Homo sapiens
CAKCRYSSGWDVDYW

SEQ ID NO: 19270 - protein, 22 aa, Homo sapiens
CARGATGTIFGVVIIPAWFDPW

SEQ ID NO: 19271 - protein, 15 aa, Homo sapiens
CVRHQAVAGDYFDYW

SEQ ID NO: 19272 - protein, 16 aa, Homo sapiens
CARTWSQEWTPDFDYW

SEQ ID NO: 19273 - protein, 20 aa, Homo sapiens
CVRYNSRTPQLRYYYYMDVW

SEQ ID NO: 19274 - protein, 15 aa, Homo sapiens
CTRNDFWSGYWYDYW

SEQ ID NO: 19275 - protein, 15 aa, Homo sapiens
CAKKGGFSSGWNDYW

SEQ ID NO: 19276 - protein, 20 aa, Homo sapiens
CATYPAYCGGDCGHYYFDYW

SEQ ID NO: 19277 - protein, 19 aa, Homo sapiens
CAREELFRIYVTTTYFDYW

SEQ ID NO: 19278 - protein, 15 aa, Homo sapiens
CANVGVQWLVHFPYW

SEQ ID NO: 19279 - protein, 24 aa, Homo sapiens
CARASGYCSSTSCRRRYYYGMDVW

SEQ ID NO: 19280 - protein, 16 aa, Homo sapiens
CARHTKQQLANALDIW

SEQ ID NO: 19281 - protein, 16 aa, Homo sapiens
CARERAYDGGNLFDPW

SEQ ID NO: 19282 - protein, 27 aa, Homo sapiens
CARKTGYCSSTSCYTYCSGGSCYFDNW

SEQ ID NO: 19283 - protein, 15 aa, Homo sapiens
CARDPERSSSCVDYW

SEQ ID NO: 19284 - protein, 13 aa, Homo sapiens
CASAIAPAAFDYW

SEQ ID NO: 19285 - protein, 17 aa, Homo sapiens
CARELTIFGVYNWFDPW

SEQ ID NO: 19286 - protein, 15 aa, Homo sapiens
CVSTSWGDSHPFDFW

SEQ ID NO: 19287 - protein, 19 aa, Homo sapiens
CAREGGFLEWLGDRGLDYW

SEQ ID NO: 19288 - protein, 16 aa, Homo sapiens
CAHSPDFWTGYYFDYW

SEQ ID NO: 19289 - protein, 20 aa, Homo sapiens
CATASPTDYGDYLHREFDYW

SEQ ID NO: 19290 - protein, 21 aa, Homo sapiens
CARAAGHSNGWYSTLYYFDYW

SEQ ID NO: 19291 - protein, 24 aa, Homo sapiens
CAKTITMAQGVVINPSYYYGMDVW

SEQ ID NO: 19292 - protein, 18 aa, Homo sapiens
CARSYSSSWYDPGWFDPW

SEQ ID NO: 19293 - protein, 21 aa, Homo sapiens
CARDVPDGYGYFYYYYGMDVW

SEQ ID NO: 19294 - protein, 22 aa, Homo sapiens
CAHRRGPRYFDWSLSYNWFDPW

SEQ ID NO: 19295 - protein, 26 aa, Homo sapiens
CASWLTRKTTVTSPESYYYYYGMDVW

SEQ ID NO: 19296 - protein, 18 aa, Homo sapiens
CARVFGSGSYNRGGIDYW

SEQ ID NO: 19297 - protein, 19 aa, Homo sapiens
CASGTGGDIVVAPPWFDPW

SEQ ID NO: 19298 - protein, 22 aa, Homo sapiens
CARSLYCRGGSCYSPGIWFDPW

SEQ ID NO: 19299 - protein, 15 aa, Homo sapiens
CARVPKTVSDWFDPW

SEQ ID NO: 19300 - protein, 15 aa, Homo sapiens
CARFASSWWQTFDYW

SEQ ID NO: 19301 - protein, 16 aa, Homo sapiens
CARNSNWNDAWYFDYW

SEQ ID NO: 19302 - protein, 15 aa, Homo sapiens
CARGSMSTIIFFDYW

SEQ ID NO: 19303 - protein, 21 aa, Homo sapiens
CARLPDYYDSSGYYYVNFDYW

SEQ ID NO: 19304 - protein, 15 aa, Homo sapiens
CARKGDRSGQTPDYW

SEQ ID NO: 19305 - protein, 22 aa, Homo sapiens
CARVEEKKNYYDSSAYYYFDCW

SEQ ID NO: 19306 - protein, 18 aa, Homo sapiens
CAKDTYGDYGINWYFDLW

SEQ ID NO: 19307 - protein, 15 aa, Homo sapiens
CARDRHSSSEEFDYW

SEQ ID NO: 19308 - protein, 14 aa, Homo sapiens
CARHAPNMDDVDYW

SEQ ID NO: 19309 - protein, 24 aa, Homo sapiens
CAKDRALVVPAAMRYYYYYGMDVW

SEQ ID NO: 19310 - protein, 17 aa, Homo sapiens
CARVGVLVVSDTYLDYW

SEQ ID NO: 19311 - protein, 21 aa, Homo sapiens
CARGGYCSGGLCYSFNAFDIW

SEQ ID NO: 19312 - protein, 14 aa, Homo sapiens
CQQYNSYWETTWTF

SEQ ID NO: 19313 - protein, 19 aa, Homo sapiens
CARKFGESGYDRDWYFDLW

SEQ ID NO: 19314 - protein, 14 aa, Homo sapiens
CARRQYSGSSHDYW

SEQ ID NO: 19315 - protein, 14 aa, Homo sapiens
CARLAVAGTSVDYW

SEQ ID NO: 19316 - protein, 22 aa, Homo sapiens
CARDRNSGDSWWSGGTLKFDYW

SEQ ID NO: 19317 - protein, 20 aa, Homo sapiens
CAKDSGYYDFWSGYSYFDYW

SEQ ID NO: 19318 - protein, 16 aa, Homo sapiens
CARSEDGSYRSYFDYW

SEQ ID NO: 19319 - protein, 23 aa, Homo sapiens
CARSEKYYDYIWGSYRYGPHDYW

SEQ ID NO: 19320 - protein, 17 aa, Homo sapiens
CARVLASGSSWYPFDYW

SEQ ID NO: 19321 - protein, 17 aa, Homo sapiens
CARGRIMGATTEYLDYW

SEQ ID NO: 19322 - protein, 19 aa, Homo sapiens
CARSLSVATSGTKVAFDYW

SEQ ID NO: 19323 - protein, 19 aa, Homo sapiens
CARLVAYSSSRLSYYFDYW

SEQ ID NO: 19324 - protein, 19 aa, Homo sapiens
CARTHQRYSSSWRDAFDIW

SEQ ID NO: 19325 - protein, 18 aa, Homo sapiens
CATERGSSWPPDWYFDLW

SEQ ID NO: 19326 - protein, 16 aa, Homo sapiens
CAKDSGSGWYKTFDYW

SEQ ID NO: 19327 - protein, 14 aa, Homo sapiens
CAHSRNIDDIFNIW

SEQ ID NO: 19328 - protein, 16 aa, Homo sapiens
CARAEIVSTPDAFDIW

SEQ ID NO: 19329 - protein, 20 aa, Homo sapiens
CARLEGYFDWLLSSYYFDYW

SEQ ID NO: 19330 - protein, 16 aa, Homo sapiens
CARDLYSSRANWFDPW

SEQ ID NO: 19331 - protein, 22 aa, Homo sapiens
CARHWERGASTTATHYRAFDYW

SEQ ID NO: 19332 - protein, 19 aa, Homo sapiens
CARVKGYCSGGSCYYFDPW

SEQ ID NO: 19333 - protein, 15 aa, Homo sapiens
CAKGDYTNFALFDFW

SEQ ID NO: 19334 - protein, 24 aa, Homo sapiens
CAREREGDDFWSGYSLYYYYMDVW

SEQ ID NO: 19335 - protein, 20 aa, Homo sapiens
CARHVISDLGYNWNYGVDYW

SEQ ID NO: 19336 - protein, 17 aa, Homo sapiens
CAKDRGQWLEGDAFDIW

SEQ ID NO: 19337 - protein, 16 aa, Homo sapiens
CAKDRWASGSSGGDYW

SEQ ID NO: 19338 - protein, 19 aa, Homo sapiens
CARHSHSRDSFYYYYMDAW

SEQ ID NO: 19339 - protein, 22 aa, Homo sapiens
CAKVVGTFFVNEYSGYDANDYW

SEQ ID NO: 19340 - protein, 17 aa, Homo sapiens
CVRGMGGSYSLDAFEIW

SEQ ID NO: 19341 - protein, 15 aa, Homo sapiens
CGRWGYSSSPPPDYW

SEQ ID NO: 19342 - protein, 16 aa, Homo sapiens
CALTEGDGYNYGFDYW

SEQ ID NO: 19343 - protein, 15 aa, Homo sapiens
CAKFPSSSPSWADYW

SEQ ID NO: 19344 - protein, 20 aa, Homo sapiens
CARRDYDYIWGSYRHNFDYW

SEQ ID NO: 19345 - protein, 21 aa, Homo sapiens
CARGTELRYFDWSYYYYMDVW

SEQ ID NO: 19346 - protein, 14 aa, Homo sapiens
CARDRLWSGYYDFW

SEQ ID NO: 19347 - protein, 16 aa, Homo sapiens
CARPYSSGYHSAFDIW

SEQ ID NO: 19348 - protein, 22 aa, Homo sapiens
CARGNYNRGASSYYYYYYMDVW

SEQ ID NO: 19349 - protein, 16 aa, Homo sapiens
CARVKAVADVWAFDYW

SEQ ID NO: 19350 - protein, 16 aa, Homo sapiens
CAHLGSSGYYVDFDYW

SEQ ID NO: 19351 - protein, 16 aa, Homo sapiens
CVRSESCNGPNWFDTW

SEQ ID NO: 19352 - protein, 16 aa, Homo sapiens
CARDGYDFWSGYQDYW

SEQ ID NO: 19353 - protein, 15 aa, Homo sapiens
CARDYSDYVSYFDYW

SEQ ID NO: 19354 - protein, 16 aa, Homo sapiens
CAKERPQPSADALDIW

SEQ ID NO: 19355 - protein, 15 aa, Homo sapiens
CADLSGSGSYYVGYW

SEQ ID NO: 19356 - protein, 17 aa, Homo sapiens
CARDIAVTNTKHYYDYW

SEQ ID NO: 19357 - protein, 15 aa, Homo sapiens
CARRITGAYNWFDRW

SEQ ID NO: 19358 - protein, 18 aa, Homo sapiens
CARDAYLNSRSYYHFDYW

SEQ ID NO: 19359 - protein, 25 aa, Homo sapiens
CAAHRIGGCSDRCYMSFYYYGMDVW

SEQ ID NO: 19360 - protein, 22 aa, Homo sapiens
CARDSRTFGGVIAPGRDAFDIW

SEQ ID NO: 19361 - protein, 16 aa, Homo sapiens
CAGHRRTPLFWYFDLW

SEQ ID NO: 19362 - protein, 23 aa, Homo sapiens
CARAILSHDYIWGSYRYKGFDYW

SEQ ID NO: 19363 - protein, 18 aa, Homo sapiens
CARADDGSGSYFLPFDVW

SEQ ID NO: 19364 - protein, 16 aa, Homo sapiens
CVKGTTMLSEYYFDYW

SEQ ID NO: 19365 - protein, 13 aa, Homo sapiens [sequence omitted]

SEQ ID NO: 19366 - protein, 19 aa, Homo sapiens
CARDGVVQGPDSYYYMDVW

SEQ ID NO: 19367 - protein, 19 aa, Homo sapiens
CARGPYYDFLSGPDAFDIW

SEQ ID NO: 19368 - protein, 14 aa, Homo sapiens
CAWQQLVRGQFDYW

SEQ ID NO: 19369 - protein, 17 aa, Homo sapiens
CAKDGSGWKPQYYFDYW

SEQ ID NO: 19370 - protein, 14 aa, Homo sapiens
CATDLIIRGVVDYW

SEQ ID NO: 19371 - protein, 18 aa, Homo sapiens
CARDLVGTTPAHDAFDVW

SEQ ID NO: 19372 - protein, 15 aa, Homo sapiens
CARGGDCYSEPFDYW

SEQ ID NO: 19373 - protein, 22 aa, Homo sapiens
CATWPVPDFVVTLAIGRAFDIW

SEQ ID NO: 19374 - protein, 16 aa, Homo sapiens
CARDLGAAGGYGADYW

SEQ ID NO: 19375 - protein, 19 aa, Homo sapiens
CAREAGYLDLTVNNYFDYW

SEQ ID NO: 19376 - protein, 23 aa, Homo sapiens
CVRESYGETYSGSYYESYSFDFW

SEQ ID NO: 19377 - protein, 14 aa, Homo sapiens
CAKIPHGGDTFDFW

SEQ ID NO: 19378 - protein, 17 aa, Homo sapiens
CARGGPHDSLWRWFDPW

SEQ ID NO: 19379 - protein, 22 aa, Homo sapiens
CARLRDLRYFDYIYYYYGMDVW

SEQ ID NO: 19380 - protein, 14 aa, Homo sapiens
CARIQRHRWYLDYW

SEQ ID NO: 19381 - protein, 23 aa, Homo sapiens
CARDRTAVENCSGGSCYGGIDYW

SEQ ID NO: 19382 - protein, 14 aa, Homo sapiens
CAREADGSPHSDYW

SEQ ID NO: 19383 - protein, 18 aa, Homo sapiens
CAREGINYSNLLNWFDPW

SEQ ID NO: 19384 - protein, 13 aa, Homo sapiens
CARAGPLDHLDYW

SEQ ID NO: 19385 - protein, 19 aa, Homo sapiens
CARGAVFGWWDYYYGMDVW

SEQ ID NO: 19386 - protein, 19 aa, Homo sapiens
CAKGPMVQGVIITNWFDPW

SEQ ID NO: 19387 - protein, 16 aa, Homo sapiens
CTRDGTSGYRVTFDVW

SEQ ID NO: 19388 - protein, 18 aa, Homo sapiens
CAKNFYIGQMGFDGFDIW

SEQ ID NO: 19389 - protein, 17 aa, Homo sapiens
CARVGFSDGSGYPFDYW

SEQ ID NO: 19390 - protein, 19 aa, Homo sapiens
CAHSAIVPTTFASDYFDYW

SEQ ID NO: 19391 - protein, 22 aa, Homo sapiens
CARSDRFVVVPADPSEYYFDYW

SEQ ID NO: 19392 - protein, 13 aa, Homo sapiens
CARATGQQLGDYW

SEQ ID NO: 19393 - protein, 13 aa, Homo sapiens
CKRSWNDAVGDYW

SEQ ID NO: 19394 - protein, 18 aa, Homo sapiens
CASYIGRFLEWLSWFDPW

SEQ ID NO: 19395 - protein, 25 aa, Homo sapiens
CARGGWARGVVVVAASLTYWYFDLW

SEQ ID NO: 19396 - protein, 20 aa, Homo sapiens
CAREFRITMVQGVQSYFDYW

SEQ ID NO: 19397 - protein, 12 aa, Homo sapiens
CAVYSNGWLDYW

SEQ ID NO: 19398 - protein, 18 aa, Homo sapiens
CAVNRAPYNSGWYYFDYW

SEQ ID NO: 19399 - protein, 20 aa, Homo sapiens
CVKDLSPAATVVSYNAFDIW

SEQ ID NO: 19400 - protein, 15 aa, Homo sapiens
CARELSTVTTYFNYW

SEQ ID NO: 19401 - protein, 19 aa, Homo sapiens
CARDQPLRSFWEPFWFDPW

SEQ ID NO: 19402 - protein, 12 aa, Homo sapiens
CARGILRGHDYW

SEQ ID NO: 19403 - protein, 17 aa, Homo sapiens
CAKRDGSGGRFHYMDVW

SEQ ID NO: 19404 - protein, 18 aa, Homo sapiens
CARVSHYYDSSGYFEDYW

SEQ ID NO: 19405 - protein, 17 aa, Homo sapiens
CARAAVTMIVVNHFDYW

SEQ ID NO: 19406 - protein, 23 aa, Homo sapiens
CARLALVEFGYSGYGWSRHFDYW

SEQ ID NO: 19407 - protein, 13 aa, Homo sapiens
CARELGTGHFDYW

SEQ ID NO: 19408 - protein, 16 aa, Homo sapiens
CARGAYDYENRAFDIW

SEQ ID NO: 19409 - protein, 20 aa, Homo sapiens
CARVQRGSSGWFRTEYFQHW

SEQ ID NO: 19410 - protein, 20 aa, Homo sapiens
CARMSSGYDWNRPDFSFDYW

SEQ ID NO: 19411 - protein, 18 aa, Homo sapiens
CASIPPESGWDTNWFDPW

SEQ ID NO: 19412 - protein, 26 aa, Homo sapiens
CARTQGGRYYDILTGPSYYYYYMDVW

SEQ ID NO: 19413 - protein, 18 aa, Homo sapiens
CARGGFYYDSSGIHGDYW

SEQ ID NO: 19414 - protein, 14 aa, Homo sapiens
CATADFSKSFFDYW

SEQ ID NO: 19415 - protein, 21 aa, Homo sapiens
CATTASYCTGGVCYPNWFDPW

SEQ ID NO: 19416 - protein, 17 aa, Homo sapiens
CGIQPYSGANRGDFDYW

SEQ ID NO: 19417 - protein, 16 aa, Homo sapiens
CARSVGAATEAQNDYW

SEQ ID NO: 19418 - protein, 17 aa, Homo sapiens
CASWNYHDSSGYKFDYW

SEQ ID NO: 19419 - protein, 20 aa, Homo sapiens
CAGGLGGSYYLDYYYYMDVW

SEQ ID NO: 19420 - protein, 20 aa, Homo sapiens
CARETSEWQLEGWYTWFDPW

SEQ ID NO: 19421 - protein, 17 aa, Homo sapiens
CARDWGGHITSDAFDIW

SEQ ID NO: 19422 - protein, 25 aa, Homo sapiens
CARDSTEIPQYYYDSSGYSAAFDYW

SEQ ID NO: 19423 - protein, 15 aa, Homo sapiens
CAKGGMGIPSHFDYW

SEQ ID NO: 19424 - protein, 26 aa, Homo sapiens
CARYQGGDYDYIWGSYRLGTNYFDYW

SEQ ID NO: 19425 - protein, 19 aa, Homo sapiens
CAKDKYYDTSDSYSHFDYW

SEQ ID NO: 19426 - protein, 17 aa, Homo sapiens
CASQGTVATEPYYFDYW

SEQ ID NO: 19427 - protein, 15 aa, Homo sapiens
CARALQGVYLGIDYW

SEQ ID NO: 19428 - protein, 19 aa, Homo sapiens
CATDEGEETAMGASLFDSW

SEQ ID NO: 19429 - protein, 17 aa, Homo sapiens
CARGWGRELLFFYFDYW

SEQ ID NO: 19430 - protein, 18 aa, Homo sapiens
CARGRSAGSGSQLNFGYW

SEQ ID NO: 19431 - protein, 16 aa, Homo sapiens
CARDFDILTGYYFDYW

SEQ ID NO: 19432 - protein, 16 aa, Homo sapiens
CARRGNWNDGSSFDYW

SEQ ID NO: 19433 - protein, 25 aa, Homo sapiens
CARHSNDILTGYYGGDYYYYYMDVW

SEQ ID NO: 19434 - protein, 21 aa, Homo sapiens
CARDGPNDYGDYVEIDAFDIW

SEQ ID NO: 19435 - protein, 19 aa, Homo sapiens
CAKWSSGFSRGLYHYMDVW

SEQ ID NO: 19436 - protein, 20 aa, Homo sapiens
CAKDYYDSSGYYAFAAFDIW

SEQ ID NO: 19437 - protein, 14 aa, Homo sapiens
CARYTSSGFFFDFW

SEQ ID NO: 19438 - protein, 16 aa, Homo sapiens
CAKNGAAAGLGEVDYW

SEQ ID NO: 19439 - protein, 16 aa, Homo sapiens
CARLMVILATTHFDYW

SEQ ID NO: 19440 - protein, 18 aa, Homo sapiens
CARDRGHTIFEANAFDIW

SEQ ID NO: 19441 - protein, 17 aa, Homo sapiens
CARQSGIVTTTDMIDYW

SEQ ID NO: 19442 - protein, 16 aa, Homo sapiens
CSRSNGYSIGWFLDYW

SEQ ID NO: 19443 - protein, 13 aa, Homo sapiens
CQQYGSSQGDCSF

SEQ ID NO: 19444 - protein, 21 aa, Homo sapiens
CARHLETGDYYDSSGDNFDYW

SEQ ID NO: 19445 - protein, 21 aa, Homo sapiens
CAHRRSCTSTSCYRDNWFDPW

SEQ ID NO: 19446 - protein, 18 aa, Homo sapiens
CARDQGSTATYLDAFDLW

SEQ ID NO: 19447 - protein, 23 aa, Homo sapiens
CARQSAYCGGYCYFPNHWYFDLW

SEQ ID NO: 19448 - protein, 21 aa, Homo sapiens
CATAPRYYYDSSGYWGPNDYW

SEQ ID NO: 19449 - protein, 21 aa, Homo sapiens
CASTILRFLEWSPTIDAFDIW

SEQ ID NO: 19450 - protein, 15 aa, Homo sapiens
CAQGTILKYYYFDYW

SEQ ID NO: 19451 - protein, 20 aa, Homo sapiens
CARPRVSDCTETRCREFEYW

SEQ ID NO: 19452 - protein, 16 aa, Homo sapiens
CAKKENSNYRSFLDYW

SEQ ID NO: 19453 - protein, 24 aa, Homo sapiens
CARSYDFWSGHFPSDYYYYGMDVW

SEQ ID NO: 19454 - protein, 21 aa, Homo sapiens
CARDEGIYYDSSGYPRWFDPW

SEQ ID NO: 19455 - protein, 24 aa, Homo sapiens
CARDPQRGVVINSPNYYYYGMDVW

SEQ ID NO: 19456 - protein, 18 aa, Homo sapiens
CADRRYCDITRCPGFGYW

SEQ ID NO: 19457 - protein, 19 aa, Homo sapiens
CAHRPQTTYSNYVVWFDPW

SEQ ID NO: 19458 - protein, 22 aa, Homo sapiens
CARSFLYYSGTSGYYSGSFDYW

SEQ ID NO: 19459 - protein, 15 aa, Homo sapiens
CARDPSGNAEYFQHW

SEQ ID NO: 19460 - protein, 17 aa, Homo sapiens
CARDQHSGGYYVWFDPW

SEQ ID NO: 19461 - protein, 15 aa, Homo sapiens
CAYQLPGYYYGMDVW

SEQ ID NO: 19462 - protein, 17 aa, Homo sapiens
CARGTFWSGYRYYFDYW

SEQ ID NO: 19463 - protein, 18 aa, Homo sapiens
CARFHRRGTVTMYWFDPW

SEQ ID NO: 19464 - protein, 20 aa, Homo sapiens
CARATRGPRYYYYYYYMDVW

SEQ ID NO: 19465 - protein, 18 aa, Homo sapiens
CARDFVTTVTYNDAFDIW

SEQ ID NO: 19466 - protein, 18 aa, Homo sapiens
CAKVAGYDFWRGYSFDQW

SEQ ID NO: 19467 - protein, 19 aa, Homo sapiens
CARAAAGKIVGATQGCDYW

SEQ ID NO: 19468 - protein, 14 aa, Homo sapiens
CARARDGYNYLDYW

SEQ ID NO: 19469 - protein, 18 aa, Homo sapiens
CASNYGDYGSYYYGMDVW

SEQ ID NO: 19470 - protein, 19 aa, Homo sapiens
CTRVGWSYSRFYYYYMDVW

SEQ ID NO: 19471 - protein, 18 aa, Homo sapiens
CARAGYVGSWFYYAMDVW

SEQ ID NO: 19472 - protein, 17 aa, Homo sapiens
CATEDYGDYGSPRFDYW

SEQ ID NO: 19473 - protein, 26 aa, Homo sapiens
CARVGPYYDFWSGYPIGDYYYYMDVW

SEQ ID NO: 19474 - protein, 20 aa, Homo sapiens
CARADHSRGPLYYYYGLDVW

SEQ ID NO: 19475 - protein, 19 aa, Homo sapiens
CTRTTPVTTVPYYYYMDVW

SEQ ID NO: 19476 - protein, 21 aa, Homo sapiens
CAKVDAAVVRRVSVAGYFDYW

SEQ ID NO: 19477 - protein, 30 aa, Homo sapiens
CARDGKRRDTLDQRIMITFGGVSFYYFDYW

SEQ ID NO: 19478 - protein, 22 aa, Homo sapiens
CARYCGGVCYGVNYYYYGMDVW

SEQ ID NO: 19479 - protein, 21 aa, Homo sapiens
CARLADDFWTHPYYYYGMDVW

SEQ ID NO: 19480 - protein, 20 aa, Homo sapiens
CAREKYNWNDLDYYYGMDVW

SEQ ID NO: 19481 - protein, 16 aa, Homo sapiens
CAKGPTLYNDDAFDMW

SEQ ID NO: 19482 - protein, 19 aa, Homo sapiens
CAHRPSMYSSGHGSWFDPW

SEQ ID NO: 19483 - protein, 20 aa, Homo sapiens
CARAHPIYSKPRRGYWFDPW

SEQ ID NO: 19484 - protein, 13 aa, Homo sapiens
CARDKHNGAFDIW

SEQ ID NO: 19485 - protein, 15 aa, Homo sapiens
CVRQDDYLDYRFDHW

SEQ ID NO: 19486 - protein, 19 aa, Homo sapiens
CNLGGGSGYEYYYYNMDVW

SEQ ID NO: 19487 - protein, 21 aa, Homo sapiens
CALTSALYGSGSYYNNWFDPW

SEQ ID NO: 19488 - protein, 27 aa, Homo sapiens
CAREIILITFGGVITNLQRSQNWFDPW

SEQ ID NO: 19489 - protein, 17 aa, Homo sapiens
CARDPATMVQGSHFDYW

SEQ ID NO: 19490 - protein, 16 aa, Homo sapiens
CARADTRGDTDAVDIW

SEQ ID NO: 19491 - protein, 26 aa, Homo sapiens
CARSLRYCTGGLCYDDDQVYNWFDPW

SEQ ID NO: 19492 - protein, 25 aa, Homo sapiens
CARDPRYCSGSDCYSLSHYHYMDVW

SEQ ID NO: 19493 - protein, 18 aa, Homo sapiens
CARDSFSSSGWYGYFQHW

SEQ ID NO: 19494 - protein, 14 aa, Homo sapiens
CASRYYTKYYYDYW

SEQ ID NO: 19495 - protein, 21 aa, Homo sapiens
CARDSGSGTYGYGDYRYFDSW

SEQ ID NO: 19496 - protein, 19 aa, Homo sapiens
CARVEGYSKFFHHHAFDVW

SEQ ID NO: 19497 - protein, 18 aa, Homo sapiens
CARDGAYAGTWYRYFDLW

SEQ ID NO: 19498 - protein, 16 aa, Homo sapiens
CAHRGRYSGRYYFDYW

SEQ ID NO: 19499 - protein, 23 aa, Homo sapiens
CTRGGLRFLEWFIDPDNYYFDYW

SEQ ID NO: 19500 - protein, 16 aa, Homo sapiens
CARDPAAAGLTLFDYW

SEQ ID NO: 19501 - protein, 19 aa, Homo sapiens
CTTVKVLRFLETPYYFDYW

SEQ ID NO: 19502 - protein, 18 aa, Homo sapiens
CARGDDYSGAYYYYLDYW

SEQ ID NO: 19503 - protein, 16 aa, Homo sapiens
CARTFMVAATRYFLHW

SEQ ID NO: 19504 - protein, 17 aa, Homo sapiens
CGRLYYYVGSGYYPDYW

SEQ ID NO: 19505 - protein, 17 aa, Homo sapiens
CARAGRSSGSYSGIDYW

SEQ ID NO: 19506 - protein, 18 aa, Homo sapiens
CARDKRNPDLEPDAFDIW

SEQ ID NO: 19507 - protein, 17 aa, Homo sapiens
CAKAPQYSGYEYHIDYW

SEQ ID NO: 19508 - protein, 16 aa, Homo sapiens
CARGGYSGYHFPFDLW

SEQ ID NO: 19509 - protein, 12 aa, Homo sapiens
CSGGSCHSFDYW

SEQ ID NO: 19510 - protein, 18 aa, Homo sapiens
CARDSGTSGYYYEYFQFW

SEQ ID NO: 19511 - protein, 16 aa, Homo sapiens
CARAAGSGWDSPVDYW

SEQ ID NO: 19512 - protein, 15 aa, Homo sapiens
CTKEYYGSGSYSDYW

SEQ ID NO: 19513 - protein, 17 aa, Homo sapiens
CARDLYSSGWYGQPDYW

SEQ ID NO: 19514 - protein, 16 aa, Homo sapiens
CARLVVLGVYTSFDPW

SEQ ID NO: 19515 - protein, 16 aa, Homo sapiens
CASSLKYSSSWDFDYW

SEQ ID NO: 19516 - protein, 22 aa, Homo sapiens
CARVGSGSYSGYDYYYYGMDVW

SEQ ID NO: 19517 - protein, 17 aa, Homo sapiens
CARDPSSSWDSDSFDTW

SEQ ID NO: 19518 - protein, 16 aa, Homo sapiens
CARDHGWGGAPNFDYW

SEQ ID NO: 19519 - protein, 19 aa, Homo sapiens
CARGRCSDAICYGIYFDYW

SEQ ID NO: 19520 - protein, 28 aa, Homo sapiens
CAKDRAGTRPEDTIFGVVTQYYYGMDVW

SEQ ID NO: 19521 - protein, 15 aa, Homo sapiens
CARAELLSQDYFDYW

SEQ ID NO: 19522 - protein, 16 aa, Homo sapiens
CANLAVVDATLGFDLW

SEQ ID NO: 19523 - protein, 14 aa, Homo sapiens
CARDLAGKQAFDIW

SEQ ID NO: 19524 - protein, 16 aa, Homo sapiens
CARDGGSSWSMSFDYW

SEQ ID NO: 19525 - protein, 12 aa, Homo sapiens
CTQQLVRSYDYW

SEQ ID NO: 19526 - protein, 20 aa, Homo sapiens
CARADHCSSGICYYRALDVW

SEQ ID NO: 19527 - protein, 24 aa, Homo sapiens
CAREAERAGPYCTGGVCTTAFDIW

SEQ ID NO: 19528 - protein, 21 aa, Homo sapiens
CARAELNYYDSSGFQYYFDYW

SEQ ID NO: 19529 - protein, 17 aa, Homo sapiens
CARGRGQFLEWFVFDYW

SEQ ID NO: 19530 - protein, 19 aa, Homo sapiens
CARDPPLGSNYYYYGMDVW

SEQ ID NO: 19531 - protein, 19 aa, Homo sapiens
CASSRTSITMVQGVIFDYW

SEQ ID NO: 19532 - protein, 21 aa, Homo sapiens
CARGLGYCSSTNCRRYYFDYW

SEQ ID NO: 19533 - protein, 21 aa, Homo sapiens
CATAPLYYYDSSGYFLWFDPW

SEQ ID NO: 19534 - protein, 20 aa, Homo sapiens
CARVLRITMVQGVHDAFDIW

SEQ ID NO: 19535 - protein, 23 aa, Homo sapiens
CARGPELGIVVVVRPLSGWFDPW

SEQ ID NO: 19536 - protein, 17 aa, Homo sapiens
CARVDYSNYYRPPFDPW

SEQ ID NO: 19537 - protein, 15 aa, Homo sapiens
CASGLLVVYAALDYW

SEQ ID NO: 19538 - protein, 16 aa, Homo sapiens
CARDRISARDDAFDIW

SEQ ID NO: 19539 - protein, 28 aa, Homo sapiens
CARDDSEETVERIAIFGVAPLGYAFHIW

SEQ ID NO: 19540 - protein, 15 aa, Homo sapiens
CARMTRSSWGVFDYW

SEQ ID NO: 19541 - protein, 18 aa, Homo sapiens
CATDTPVGLYVVYALDYW

SEQ ID NO: 19542 - protein, 12 aa, Homo sapiens [sequence omitted]

SEQ ID NO: 19543 - protein, 18 aa, Homo sapiens
CARDWGGTTVTPGSLDYW

SEQ ID NO: 19544 - protein, 16 aa, Homo sapiens
CTRDQEVATPYFFDYW

SEQ ID NO: 19545 - protein, 18 aa, Homo sapiens
CARSRTHYGSGTYYFDYW

SEQ ID NO: 19546 - protein, 11 aa, Homo sapiens
CQQFQSYSWTF

SEQ ID NO: 19547 - protein, 19 aa, Homo sapiens
CARVRTTGTRYNYYYMDVW

SEQ ID NO: 19548 - protein, 19 aa, Homo sapiens
CARVRFPTWAVTEDAFDIW

SEQ ID NO: 19549 - protein, 19 aa, Homo sapiens
CAKDPRPGYSSSYHYFDYW

SEQ ID NO: 19550 - protein, 20 aa, Homo sapiens
CAREIYLARPTRASDAFDIW

SEQ ID NO: 19551 - protein, 22 aa, Homo sapiens
CASLLVPDTAMVKGYYYGMDVW

SEQ ID NO: 19552 - protein, 11 aa, Homo sapiens
CVQALQTQCSF

SEQ ID NO: 19553 - protein, 17 aa, Homo sapiens
CARDLLGIAVAGVFDYW

SEQ ID NO: 19554 - protein, 16 aa, Homo sapiens
CARDPDRDGYSAFDYW

SEQ ID NO: 19555 - protein, 19 aa, Homo sapiens
CSGGSCHTLGYYYYYMDVW

SEQ ID NO: 19556 - protein, 15 aa, Homo sapiens
CATGHVGTFDAFDIW

SEQ ID NO: 19557 - protein, 12 aa, Homo sapiens
CQQANRFLALSF

SEQ ID NO: 19558 - protein, 21 aa, Homo sapiens
CARVRSGGSCYSSLVCAFDIW

SEQ ID NO: 19559 - protein, 17 aa, Homo sapiens
CARDQDSIFGLEGFDFW

SEQ ID NO: 19560 - protein, 18 aa, Homo sapiens
CAREGINDSSGQRGFDYW

SEQ ID NO: 19561 - protein, 13 aa, Homo sapiens
CASWGATVAFDIW

SEQ ID NO: 19562 - protein, 16 aa, Homo sapiens
CARQSDSNYDTYLTYW

SEQ ID NO: 19563 - protein, 16 aa, Homo sapiens
CAHRRIQLWLWDFDYW

SEQ ID NO: 19564 - protein, 18 aa, Homo sapiens
CARLVGSTSYIQWYLDLW

SEQ ID NO: 19565 - protein, 13 aa, Homo sapiens
CARYHWNYHADYW

SEQ ID NO: 19566 - protein, 18 aa, Homo sapiens
CARDLPIVATIEDAFDIW

SEQ ID NO: 19567 - protein, 13 aa, Homo sapiens
CARYNSGWSWDYW

SEQ ID NO: 19568 - protein, 19 aa, Homo sapiens
CAREGTSTVLSGPDAFDIW

SEQ ID NO: 19569 - protein, 22 aa, Homo sapiens
CATPIDDSSGYYSPYAVGFDYW

SEQ ID NO: 19570 - protein, 17 aa, Homo sapiens
CARGIVVVPAAMAFDPW

SEQ ID NO: 19571 - protein, 12 aa, Homo sapiens
CVLFMGSGIWMF

SEQ ID NO: 19572 - protein, 15 aa, Homo sapiens
CTTVNLGGGYYIVYW

SEQ ID NO: 19573 - protein, 18 aa, Homo sapiens
CARHRAYNWNPTSGFDNW

SEQ ID NO: 19574 - protein, 16 aa, Homo sapiens
CARLTDGSGTYAFDIW

SEQ ID NO: 19575 - protein, 24 aa, Homo sapiens
CARRYCSGAHCYDPPYYYYYMDFW

SEQ ID NO: 19576 - protein, 14 aa, Homo sapiens
CAREAPIPSSHDYW

SEQ ID NO: 19577 - protein, 18 aa, Homo sapiens
CARDLTYGDPDTDAFDIW

SEQ ID NO: 19578 - protein, 16 aa, Homo sapiens
CARPYRGVYHSSFDIW

SEQ ID NO: 19579 - protein, 19 aa, Homo sapiens
CATTPPYCGGYCYENFDFW

SEQ ID NO: 19580 - protein, 15 aa, Homo sapiens
CAHRNMVQGAYFDYW

SEQ ID NO: 19581 - protein, 19 aa, Homo sapiens
CARDWESPSPYYYYYMDVW

SEQ ID NO: 19582 - protein, 7 aa, Homo sapiens
CYHFDYW

SEQ ID NO: 19583 - protein, 15 aa, Homo sapiens
CARNDYSNYDYMDVW

SEQ ID NO: 19584 - protein, 20 aa, Homo sapiens
CTRVLSGSGRYGQVNWFDPW

SEQ ID NO: 19585 - protein, 18 aa, Homo sapiens
CARGGLPGAIGIDAFDTW

SEQ ID NO: 19586 - protein, 13 aa, Homo sapiens
CARNPDTAMPDYW

SEQ ID NO: 19587 - protein, 17 aa, Homo sapiens
CAKGDWDSSSSNYFDYW

SEQ ID NO: 19588 - protein, 16 aa, Homo sapiens
CAKGRVYSNYDKFDYW

SEQ ID NO: 19589 - protein, 20 aa, Homo sapiens
CARDPGCSSTSCYETWFDPW

SEQ ID NO: 19590 - protein, 16 aa, Homo sapiens
CARRVGLLHSSRFDPW

SEQ ID NO: 19591 - protein, 20 aa, Homo sapiens
CAKGYCSGGSCPRGYAFDIW

SEQ ID NO: 19592 - protein, 18 aa, Homo sapiens
CASYFGRTVTTTTGFDYW

SEQ ID NO: 19593 - protein, 11 aa, Homo sapiens
CARDGLVGDYW

SEQ ID NO: 19594 - protein, 17 aa, Homo sapiens
CARGQRGNYDLAAFDIW

SEQ ID NO: 19595 - protein, 15 aa, Homo sapiens
CAKSRGGPARSGDYW

SEQ ID NO: 19596 - protein, 23 aa, Homo sapiens
CARDKRQILEYYYGSGSYYFDYW

SEQ ID NO: 19597 - protein, 15 aa, Homo sapiens
CATNLRPTVYYFDYW

SEQ ID NO: 19598 - protein, 15 aa, Homo sapiens
CARDLLLLPKMDDYW

SEQ ID NO: 19599 - protein, 19 aa, Homo sapiens
CARTASNCSGGRCYSSDYW

SEQ ID NO: 19600 - protein, 25 aa, Homo sapiens
CARVPAPDPLITIFGVPQSGPYDYW

SEQ ID NO: 19601 - protein, 18 aa, Homo sapiens
CALPILVVLGFYKYMDVW

SEQ ID NO: 19602 - protein, 16 aa, Homo sapiens
CAKAPTVGGTILADYW

SEQ ID NO: 19603 - protein, 14 aa, Homo sapiens
CARDWRSSRNFDYW

SEQ ID NO: 19604 - protein, 12 aa, Homo sapiens
CQQSFSAPSYTF

SEQ ID NO: 19605 - protein, 19 aa, Homo sapiens
CARRYTPTHDYSNYPADYW

SEQ ID NO: 19606 - protein, 17 aa, Homo sapiens
CVKVSQVVVVVNYFDYW

SEQ ID NO: 19607 - protein, 20 aa, Homo sapiens
CARDVTDYSNYVEYNWFDPW

SEQ ID NO: 19608 - protein, 20 aa, Homo sapiens
CATRITMVQGVITDNWFDPW

SEQ ID NO: 19609 - protein, 24 aa, Homo sapiens
CARDDSLSTYDILTGYYPYYFDYW

SEQ ID NO: 19610 - protein, 18 aa, Homo sapiens
CAKEGDIVATTRYYFDFW

SEQ ID NO: 19611 - protein, 17 aa, Homo sapiens
CARAGFSSGWYAAFDFW

SEQ ID NO: 19612 - protein, 17 aa, Homo sapiens
CARERMVQGVASGFDIW

SEQ ID NO: 19613 - protein, 17 aa, Homo sapiens
CTRHDSLGSYDYAFDIW

SEQ ID NO: 19614 - protein, 16 aa, Homo sapiens
CARVEGTDYSNYVGYW

SEQ ID NO: 19615 - protein, 18 aa, Homo sapiens
CARSPSGYDLGYYYFDSW

SEQ ID NO: 19616 - protein, 15 aa, Homo sapiens
CGVHFNFWSGIFDYW

SEQ ID NO: 19617 - protein, 19 aa, Homo sapiens
CARVKPLFGGFLEWAFDYW

SEQ ID NO: 19618 - protein, 19 aa, Homo sapiens
CARHYHGLGIRQDDAFDIW

SEQ ID NO: 19619 - protein, 14 aa, Homo sapiens
CASRSGRHLYFDLW

SEQ ID NO: 19620 - protein, 16 aa, Homo sapiens
CARGISNHGEFYFDLW

SEQ ID NO: 19621 - protein, 19 aa, Homo sapiens
CAHVEDYDFWSGFPSFHYW

SEQ ID NO: 19622 - protein, 15 aa, Homo sapiens
CARAEGAPEYSLDYW

SEQ ID NO: 19623 - protein, 20 aa, Homo sapiens
CARDYVVPAAHYYYYYMDVW

SEQ ID NO: 19624 - protein, 19 aa, Homo sapiens
CARDTVAIIGWGMTHLDYW

SEQ ID NO: 19625 - protein, 18 aa, Homo sapiens
CARYKWGGTSPSDAFDLW

SEQ ID NO: 19626 - protein, 16 aa, Homo sapiens
CVRDTNRKIYGYFDFW

SEQ ID NO: 19627 - protein, 19 aa, Homo sapiens
CARRGGWDKGGGYWHFDLW

SEQ ID NO: 19628 - protein, 13 aa, Homo sapiens
CQLWDSSSAQVIF

SEQ ID NO: 19629 - protein, 12 aa, Homo sapiens
CQQYGHWPRWTF

SEQ ID NO: 19630 - protein, 19 aa, Homo sapiens
CARDFSIGSYYPQGYFDYW

SEQ ID NO: 19631 - protein, 18 aa, Homo sapiens
CARGDYGDPLFFLEFDYW

SEQ ID NO: 19632 - protein, 16 aa, Homo sapiens
CARVVLTGDHHAFDIW

SEQ ID NO: 19633 - protein, 12 aa, Homo sapiens
CSTLTTVTVDYW

SEQ ID NO: 19634 - protein, 16 aa, Homo sapiens
CAKADSSGWSPDFDFW

SEQ ID NO: 19635 - protein, 20 aa, Homo sapiens
CARDRYCTGGVCHQSWFDRW

SEQ ID NO: 19636 - protein, 19 aa, Homo sapiens
CARVLVTSRSVRTDVFDIW

SEQ ID NO: 19637 - protein, 21 aa, Homo sapiens
CARESVLRYFDWLLFGYFDYW

SEQ ID NO: 19638 - protein, 16 aa, Homo sapiens
CARHRDFGDSNDFDYW

SEQ ID NO: 19639 - protein, 17 aa, Homo sapiens
CARSNIAARGVWYFDYW

SEQ ID NO: 19640 - protein, 20 aa, Homo sapiens
CARPAPIFGVYGSPAYFDYW

SEQ ID NO: 19641 - protein, 19 aa, Homo sapiens
CARVGGNHYGYSRYYFDYW

SEQ ID NO: 19642 - protein, 18 aa, Homo sapiens
CARSLKTMIQGILYMDVW

SEQ ID NO: 19643 - protein, 10 aa, Homo sapiens
CATHAVPDYW

SEQ ID NO: 19644 - protein, 16 aa, Homo sapiens
CARQSDLVVYPYFDYW

SEQ ID NO: 19645 - protein, 19 aa, Homo sapiens
CAREPPSLGIFGVVLFDYW

SEQ ID NO: 19646 - protein, 22 aa, Homo sapiens
CATQNGYCTGGVCYEFNWFDPW

SEQ ID NO: 19647 - protein, 21 aa, Homo sapiens
CARVPGPYYDFWSAQGAFDIW

SEQ ID NO: 19648 - protein, 26 aa, Homo sapiens
CARDPPGKYDFWSGYSGAYYYYMDVW

SEQ ID NO: 19649 - protein, 11 aa, Homo sapiens
CVGRWDYFDLW

SEQ ID NO: 19650 - protein, 16 aa, Homo sapiens
CATGSPYYYGNWFDPW

SEQ ID NO: 19651 - protein, 21 aa, Homo sapiens
CARDFSITMVQGVIPPEIDYW

SEQ ID NO: 19652 - protein, 17 aa, Homo sapiens
CARGSGDGGIYNWFDPW

SEQ ID NO: 19653 - protein, 18 aa, Homo sapiens
CAKSPPTTGPRKYFFDWW

SEQ ID NO: 19654 - protein, 16 aa, Homo sapiens
CARGLSSLGASSDDYW

SEQ ID NO: 19655 - protein, 21 aa, Homo sapiens
CARGGWGAARPQYYYYGMDVW

SEQ ID NO: 19656 - protein, 14 aa, Homo sapiens
CAKVTAVTMWLDYW

SEQ ID NO: 19657 - protein, 16 aa, Homo sapiens
CARVYGDYEVGRFDPW

SEQ ID NO: 19658 - protein, 16 aa, Homo sapiens
CVRDLAYHWGSPFDFW

SEQ ID NO: 19659 - protein, 16 aa, Homo sapiens
CARDWYSLSGGGFDYW

SEQ ID NO: 19660 - protein, 16 aa, Homo sapiens
CARDRVVGTTTGIDYW

SEQ ID NO: 19661 - protein, 15 aa, Homo sapiens
CARAGGVVDDAFDFW

SEQ ID NO: 19662 - protein, 18 aa, Homo sapiens
CARYSGGYSPRYWNFDLW

SEQ ID NO: 19663 - protein, 13 aa, Homo sapiens [sequence omitted]

SEQ ID NO: 19664 - protein, 16 aa, Homo sapiens
CARDPCGSTNCYLDYW

SEQ ID NO: 19665 - protein, 15 aa, Homo sapiens
CAREESINGYGFDYW

SEQ ID NO: 19666 - protein, 23 aa, Homo sapiens
CATSRPYSGTYYGAVRIAGFDSW

SEQ ID NO: 19667 - protein, 19 aa, Homo sapiens
CARLTDEYYYDSSGYLGYW

SEQ ID NO: 19668 - protein, 23 aa, Homo sapiens
CAKRVDLRDHKYSTSAAPPFDYW

SEQ ID NO: 19669 - protein, 26 aa, Homo sapiens
CARDRSESTSDDSSWYAYYYYYMDVW

SEQ ID NO: 19670 - protein, 16 aa, Homo sapiens
CARAQLPSSRYRFDPW

SEQ ID NO: 19671 - protein, 12 aa, Homo sapiens
CARDFSLMFDLW

SEQ ID NO: 19672 - protein, 16 aa, Homo sapiens
CARLEYYGDYSYFDYW

SEQ ID NO: 19673 - protein, 14 aa, Homo sapiens
CARDFRVGGQDDYW

SEQ ID NO: 19674 - protein, 17 aa, Homo sapiens
CARQNAEMATIRGFDYW

SEQ ID NO: 19675 - protein, 15 aa, Homo sapiens
CAIQIWFRELLLDYW

SEQ ID NO: 19676 - protein, 17 aa, Homo sapiens
CARKGDTIFGVVPPDYW

SEQ ID NO: 19677 - protein, 20 aa, Homo sapiens
CARENPVLRYFDWLPRFDPW

SEQ ID NO: 19678 - protein, 19 aa, Homo sapiens
CARSGGVADIGVGRWFDPW

SEQ ID NO: 19679 - protein, 17 aa, Homo sapiens
CTRDDSYRVLSAYFDLW

SEQ ID NO: 19680 - protein, 26 aa, Homo sapiens
CAHSRGRRLGKDYIGGNYRHNWFDPW

SEQ ID NO: 19681 - protein, 17 aa, Homo sapiens
CVHIRRSSGWNNWFDPW

SEQ ID NO: 19682 - protein, 15 aa, Homo sapiens
CARWSYNSGGNIDYW

SEQ ID NO: 19683 - protein, 18 aa, Homo sapiens
CARVISLAGTQVAAFDYW

SEQ ID NO: 19684 - protein, 24 aa, Homo sapiens
CARVPPGGHCGSTKCFKMGVFDYW

SEQ ID NO: 19685 - protein, 19 aa, Homo sapiens
CARHWTTYSGYDLYYFDYW

SEQ ID NO: 19686 - protein, 26 aa, Homo sapiens
CATTFGSGIAARQITPDYYYYGMDVW

SEQ ID NO: 19687 - protein, 17 aa, Homo sapiens
CAKDGQLVGTTTYFDYW

SEQ ID NO: 19688 - protein, 18 aa, Homo sapiens
CARDEYSSSWSDYYFDYW

SEQ ID NO: 19689 - protein, 21 aa, Homo sapiens
CAHRRRGYDFWSGSPRPFDPW

SEQ ID NO: 19690 - protein, 15 aa, Homo sapiens
CARGGTEWLPFFDYW

SEQ ID NO: 19691 - protein, 18 aa, Homo sapiens
CAAIPGIAAAVTNWFDPW

SEQ ID NO: 19692 - protein, 15 aa, Homo sapiens
CARSPTVTTYAFDIW

SEQ ID NO: 19693 - protein, 20 aa, Homo sapiens
CARDPRQRHDFWNGYQFDYW

SEQ ID NO: 19694 - protein, 13 aa, Homo sapiens
CAKERGARYHDYW

SEQ ID NO: 19695 - protein, 14 aa, Homo sapiens
CARGQHLPEAPDYW

SEQ ID NO: 19696 - protein, 16 aa, Homo sapiens
CARTYDSTGYYSFDYW

SEQ ID NO: 19697 - protein, 16 aa, Homo sapiens
CARDRKNYGSGQFDYW

SEQ ID NO: 19698 - protein, 16 aa, Homo sapiens
CASPIFGVETDAFDIW

SEQ ID NO: 19699 - protein, 14 aa, Homo sapiens
CARDRMTKTYFDLW

SEQ ID NO: 19700 - protein, 17 aa, Homo sapiens
CATSFAATLRSSGFDYW

SEQ ID NO: 19701 - protein, 13 aa, Homo sapiens
CAREYSSGCFDYW

SEQ ID NO: 19702 - protein, 13 aa, Homo sapiens [sequence omitted]

SEQ ID NO: 19703 - protein, 21 aa, Homo sapiens
CTTDRIYDYIWGSYRPPFDPW

SEQ ID NO: 19704 - protein, 25 aa, Homo sapiens
CATDISRQRPEVSGEAVAGSKTDYW

SEQ ID NO: 19705 - protein, 12 aa, Homo sapiens
CAHVSNKLFDIW

SEQ ID NO: 19706 - protein, 15 aa, Homo sapiens
CARVDTSGWQSFDYW

SEQ ID NO: 19707 - protein, 18 aa, Homo sapiens
CARDSETGSGWINPFDYW

SEQ ID NO: 19708 - protein, 15 aa, Homo sapiens
CAKSGDPGPIHLDYW

SEQ ID NO: 19709 - protein, 19 aa, Homo sapiens
CARISVHGYGGYDNYFDSW

SEQ ID NO: 19710 - protein, 16 aa, Homo sapiens
CARGPAAAGNWYFDIW

SEQ ID NO: 19711 - protein, 15 aa, Homo sapiens
CARALGSSSWYKDYW

SEQ ID NO: 19712 - protein, 17 aa, Homo sapiens
CARDRNYDSSGSWFDPW

SEQ ID NO: 19713 - protein, 17 aa, Homo sapiens
CARVVATVTTWANFDYW

SEQ ID NO: 19714 - protein, 18 aa, Homo sapiens
CARAYGLPVGYSTYFDYW

SEQ ID NO: 19715 - protein, 17 aa, Homo sapiens
CAREGRQLGSGTWFDPW

SEQ ID NO: 19716 - protein, 14 aa, Homo sapiens
CARESGELPVLDYW

SEQ ID NO: 19717 - protein, 16 aa, Homo sapiens
CARDSYSGYDDYFDYW

SEQ ID NO: 19718 - protein, 12 aa, Homo sapiens
CQQYGSSSSWAF

SEQ ID NO: 19719 - protein, 24 aa, Homo sapiens
CAKDVRRSTGTGHLIYYYFGMDVW

SEQ ID NO: 19720 - protein, 17 aa, Homo sapiens
CARDSYSSSWYGAFDIW

SEQ ID NO: 19721 - protein, 15 aa, Homo sapiens
CAKQNRDSAYYFDYW

SEQ ID NO: 19722 - protein, 20 aa, Homo sapiens
CARDSTMVQGVIIFRSLDYW

SEQ ID NO: 19723 - protein, 17 aa, Homo sapiens
CAREGLSVADISRLDYW

SEQ ID NO: 19724 - protein, 20 aa, Homo sapiens
CARGEEAFGYYAAAIGFGYW

SEQ ID NO: 19725 - protein, 17 aa, Homo sapiens
CARAVDDGHPDYYFDYW

SEQ ID NO: 19726 - protein, 16 aa, Homo sapiens
CAREGPAVAGSPFDYW

SEQ ID NO: 19727 - protein, 14 aa, Homo sapiens
CARDKRGWYELDYW

SEQ ID NO: 19728 - protein, 37 aa, Homo sapiens
CSLNLSSVTAADTAVYYCARSINCVGGTCYVGYMDVW

SEQ ID NO: 19729 - protein, 20 aa, Homo sapiens
CAKDREDSSGSTPPDAFDIW

SEQ ID NO: 19730 - protein, 16 aa, Homo sapiens
CAKTSSGWYADAFDIW

SEQ ID NO: 19731 - protein, 15 aa, Homo sapiens
CAKDRTGYYDTHDYW

SEQ ID NO: 19732 - protein, 16 aa, Homo sapiens
CAKETYHSSGYYFDYW

SEQ ID NO: 19733 - protein, 27 aa, Homo sapiens
CARDDPFRRTPYSSSWYSFYYYGMDVW

SEQ ID NO: 19734 - protein, 22 aa, Homo sapiens
CARAGCGGDCFRPLLSHYFDYW

SEQ ID NO: 19735 - protein, 15 aa, Homo sapiens
CVTGPPDTSGSFDYW

SEQ ID NO: 19736 - protein, 14 aa, Homo sapiens
CARTIRGYDNFDYW

SEQ ID NO: 19737 - protein, 15 aa, Homo sapiens
CARDQVDYGPNFDYW

SEQ ID NO: 19738 - protein, 26 aa, Homo sapiens
CASPSGQYYDYIWGSYRLLPYYFDYW

SEQ ID NO: 19739 - protein, 19 aa, Homo sapiens
CARLITVFGVVTQRSFDYW

SEQ ID NO: 19740 - protein, 19 aa, Homo sapiens
CVRDPYYGDYGLSNYFDFW

SEQ ID NO: 19741 - protein, 12 aa, Homo sapiens
CQESYSTPIFTF

SEQ ID NO: 19742 - protein, 24 aa, Homo sapiens
CARGFAVHDYIWGSYRWGHYFDYW

SEQ ID NO: 19743 - protein, 20 aa, Homo sapiens
CASLFWSGYYNGYYYGMDVW

SEQ ID NO: 19744 - protein, 22 aa, Homo sapiens
CAREREVSVVGFKYYYYGIDVW

SEQ ID NO: 19745 - protein, 14 aa, Homo sapiens
CARGGYGGGLFDYW

SEQ ID NO: 19746 - protein, 27 aa, Homo sapiens
CARSGWYRSLKTYSSSSNYYYYGMDVW

SEQ ID NO: 19747 - protein, 18 aa, Homo sapiens
CARHVVEGRPPHYYFDYW

SEQ ID NO: 19748 - protein, 18 aa, Homo sapiens
CARETNIAVTGGIAFDIW

SEQ ID NO: 19749 - protein, 17 aa, Homo sapiens
CAKRYYHGSSGYAFDIW

SEQ ID NO: 19750 - protein, 15 aa, Homo sapiens
CARDTEAGTGRFDPW

SEQ ID NO: 19751 - protein, 21 aa, Homo sapiens
CAHRREAAYSSNWSWGDFDYW

SEQ ID NO: 19752 - protein, 21 aa, Homo sapiens
CASGSIIAAAGYYYYYGMDVW

SEQ ID NO: 19753 - protein, 17 aa, Homo sapiens
CTRDGPVIRDYENFDYW

SEQ ID NO: 19754 - protein, 16 aa, Homo sapiens
CARDHYGSGTYLFDYW

SEQ ID NO: 19755 - protein, 19 aa, Homo sapiens
CARGILPAAISPINWFDPW

SEQ ID NO: 19756 - protein, 16 aa, Homo sapiens
CARDAYGWNHRYFDYW

SEQ ID NO: 19757 - protein, 21 aa, Homo sapiens
CAKRSCTSTSCYFPLLPVDYW

SEQ ID NO: 19758 - protein, 14 aa, Homo sapiens
CASLSEGGRAFDYW

SEQ ID NO: 19759 - protein, 13 aa, Homo sapiens
CGRDRNSYYIDVW

SEQ ID NO: 19760 - protein, 23 aa, Homo sapiens
CARDETYYYDGSGYYGTGYFEYW

SEQ ID NO: 19761 - protein, 23 aa, Homo sapiens
CARERIITIFGVAYPQRWYYDLW

SEQ ID NO: 19762 - protein, 14 aa, Homo sapiens
CATITAYSGYVLYW

SEQ ID NO: 19763 - protein, 20 aa, Homo sapiens
CATPMGTSYYGSGTWGFDYW

SEQ ID NO: 19764 - protein, 12 aa, Homo sapiens
CARGWQAANDYW

SEQ ID NO: 19765 - protein, 12 aa, Homo sapiens
CPQHDNFSMCSF

SEQ ID NO: 19766 - protein, 14 aa, Homo sapiens
CATGWGGSYGIDYW

SEQ ID NO: 19767 - protein, 14 aa, Homo sapiens
CATRKNHDFSFDHW

SEQ ID NO: 19768 - protein, 17 aa, Homo sapiens
CAREGTRQQPVGYFDCW

SEQ ID NO: 19769 - protein, 15 aa, Homo sapiens
CATLATGEWSHFDQW

SEQ ID NO: 19770 - protein, 22 aa, Homo sapiens
CARDSYNGGYHPSHYYYYMDVW

SEQ ID NO: 19771 - protein, 22 aa, Homo sapiens
CVGDHRFYGSGSYNHVGWFDPW

SEQ ID NO: 19772 - protein, 23 aa, Homo sapiens
CASSRESTVVGYNIARPRLFEYW

SEQ ID NO: 19773 - protein, 22 aa, Homo sapiens
CARVIGYCTGGVCHTNNWFDPW

SEQ ID NO: 19774 - protein, 14 aa, Homo sapiens
CARRTSSAHEWDYW

SEQ ID NO: 19775 - protein, 18 aa, Homo sapiens
CARGDYYGSGSYGHFDYW

SEQ ID NO: 19776 - protein, 16 aa, Homo sapiens
CTTGIEYSGYDYFDYW

SEQ ID NO: 19777 - protein, 22 aa, Homo sapiens
CAHRRLGSFWNNYYLTDGFDVW

SEQ ID NO: 19778 - protein, 17 aa, Homo sapiens
CASWDQEMATGDAFDIW

SEQ ID NO: 19779 - protein, 16 aa, Homo sapiens
CARHTAAAAGTYFDFW

SEQ ID NO: 19780 - protein, 17 aa, Homo sapiens
CARDPIRDSSGYYYDYW

SEQ ID NO: 19781 - protein, 15 aa, Homo sapiens
CAVWDDSLSGRNVVF

SEQ ID NO: 19782 - protein, 16 aa, Homo sapiens
CARGRDPDYVDSFDIW

SEQ ID NO: 19783 - protein, 16 aa, Homo sapiens
CAKHLSSGTYRGIDYW

SEQ ID NO: 19784 - protein, 12 aa, Homo sapiens
CAKDNNWSSDYW

SEQ ID NO: 19785 - protein, 17 aa, Homo sapiens
CVKEKDTYNLLSHFDYW

SEQ ID NO: 19786 - protein, 15 aa, Homo sapiens
CAKVPIDYAGLFDYW

SEQ ID NO: 19787 - protein, 24 aa, Homo sapiens
CARELDPSSIAAAGTGRSDAFDIW

SEQ ID NO: 19788 - protein, 20 aa, Homo sapiens
CASNIAAAGNWYYYYYMDVW

SEQ ID NO: 19789 - protein, 24 aa, Homo sapiens
CARDQTSGYSGYGRDYYYYYMDVW

SEQ ID NO: 19790 - protein, 19 aa, Homo sapiens
CARADYDFWSGYEYYFDYW

SEQ ID NO: 19791 - protein, 22 aa, Homo sapiens
CARHGGCSGVNCYRPINWFDPW

SEQ ID NO: 19792 - protein, 19 aa, Homo sapiens
CARDLRYNWNDDWDAFDIW

SEQ ID NO: 19793 - protein, 13 aa, Homo sapiens
CARDRATHLIDYW

SEQ ID NO: 19794 - protein, 23 aa, Homo sapiens
CAKDLYQLLSYRMTTVTIAHDYW

SEQ ID NO: 19795 - protein, 15 aa, Homo sapiens
CARRSSGWPYPFDYW

SEQ ID NO: 19796 - protein, 15 aa, Homo sapiens
CTRGLPTGTRAFDIW

SEQ ID NO: 19797 - protein, 14 aa, Homo sapiens
CVTTSCYACAFDIW

SEQ ID NO: 19798 - protein, 16 aa, Homo sapiens
CAAYSLTTHYWYFGLW

SEQ ID NO: 19799 - protein, 19 aa, Homo sapiens
CAREYRTYGPKRKNWLDPW

SEQ ID NO: 19800 - protein, 25 aa, Homo sapiens
CAKDRHCSGGGCYVADYYYHGMDVW

SEQ ID NO: 19801 - protein, 18 aa, Homo sapiens
CARDRGYCGSGSFYTDYW

SEQ ID NO: 19802 - protein, 18 aa, Homo sapiens
CAKDTYSSIAAAGSFDYW

SEQ ID NO: 19803 - protein, 17 aa, Homo sapiens
CARDPGDYGDYLWFDPW

SEQ ID NO: 19804 - protein, 15 aa, Homo sapiens
CAKAPDIVATIPDYW

SEQ ID NO: 19805 - protein, 17 aa, Homo sapiens
CAKFSVRWLLPGAFDMW

SEQ ID NO: 19806 - protein, 18 aa, Homo sapiens
CAKDIELQLVRWGYFDYW

SEQ ID NO: 19807 - protein, 18 aa, Homo sapiens
CARPHTSGPEGFHAFDIW

SEQ ID NO: 19808 - protein, 20 aa, Homo sapiens
CTTDPATVTPGGYYYYMDVW

SEQ ID NO: 19809 - protein, 21 aa, Homo sapiens
CARDRRYYYDTGGYYYAFDYW

SEQ ID NO: 19810 - protein, 17 aa, Homo sapiens
CARHREIPAAGTYPDYW

SEQ ID NO: 19811 - protein, 19 aa, Homo sapiens
CARQDDILTGDYYYGMDVW

SEQ ID NO: 19812 - protein, 23 aa, Homo sapiens
CAREFGYGDYVPQEYYYYYMDVW

SEQ ID NO: 19813 - protein, 35 aa, Homo sapiens
CTAYLQWSSLKASDTAMYYCASSMTMVTTYYFDYW

SEQ ID NO: 19814 - protein, 14 aa, Homo sapiens
CARGPMTVLRFDPW

SEQ ID NO: 19815 - protein, 17 aa, Homo sapiens
CARDGYNYYYYYYMDVW

SEQ ID NO: 19816 - protein, 16 aa, Homo sapiens
CARQWELLRSFYFDYW

SEQ ID NO: 19817 - protein, 15 aa, Homo sapiens
CAQRGIVAGNSFDYW

SEQ ID NO: 19818 - protein, 14 aa, Homo sapiens
CQSADNSASSLYVF

SEQ ID NO: 19819 - protein, 17 aa, Homo sapiens
CAREGLEMATITAFDIW

SEQ ID NO: 19820 - protein, 23 aa, Homo sapiens
CARDPRYCSGGSCYLGDNWFDPW

SEQ ID NO: 19821 - protein, 17 aa, Homo sapiens
CAREGIAVTGIDYFDYW

SEQ ID NO: 19822 - protein, 21 aa, Homo sapiens
CAADPETYYGDYKRYNWFDPW

SEQ ID NO: 19823 - protein, 16 aa, Homo sapiens
CARVNRSSRSWYVDYW

SEQ ID NO: 19824 - protein, 13 aa, Homo sapiens
CARATVENFFGPW

SEQ ID NO: 19825 - protein, 14 aa, Homo sapiens
CARYSGSYRNFDYW

SEQ ID NO: 19826 - protein, 22 aa, Homo sapiens
CAREVATVTAWYDYYYKGMDVW

SEQ ID NO: 19827 - protein, 21 aa, Homo sapiens
CAHKGSSRSLISVEKYYFDYW

SEQ ID NO: 19828 - protein, 20 aa, Homo sapiens
CARETAGVTWNIGENWFDPW

SEQ ID NO: 19829 - protein, 18 aa, Homo sapiens
CARSGPKRYYGSVPFDYW

SEQ ID NO: 19830 - protein, 16 aa, Homo sapiens
CARGPVAALPDAFDIW

SEQ ID NO: 19831 - protein, 19 aa, Homo sapiens
CAKDIWWRGSSAAGTFYYW

SEQ ID NO: 19832 - protein, 15 aa, Homo sapiens
CARARGYSGSYWHYW

SEQ ID NO: 19833 - protein, 19 aa, Homo sapiens
CAKDWYYYGSGSLPQIDYW

SEQ ID NO: 19834 - protein, 21 aa, Homo sapiens
CTTDKVQYYDILTGYYWLDYW

SEQ ID NO: 19835 - protein, 26 aa, Homo sapiens
CTTVILRYFDWLLLRRGRLDDWFDPW

SEQ ID NO: 19836 - protein, 14 aa, Homo sapiens
CQVWDNFSDHYVFF

SEQ ID NO: 19837 - protein, 21 aa, Homo sapiens
CARHGNYDSSGYYPIDWFDPW

SEQ ID NO: 19838 - protein, 19 aa, Homo sapiens
CARLKHSIAVAPLGAFDIW

SEQ ID NO: 19839 - protein, 14 aa, Homo sapiens
CIRHGYSGGWLDYW

SEQ ID NO: 19840 - protein, 24 aa, Homo sapiens
CARDWGVGGAVAGERYYYYGMDVW

SEQ ID NO: 19841 - protein, 17 aa, Homo sapiens
CAKGRVGGYNYWYFDVW

SEQ ID NO: 19842 - protein, 19 aa, Homo sapiens
CARSTTSYCSSTSCYFDYW

SEQ ID NO: 19843 - protein, 17 aa, Homo sapiens
CATDGYDYHYYNGMDVW

SEQ ID NO: 19844 - protein, 19 aa, Homo sapiens
CARDGEYYGSGSYRQFDPW

SEQ ID NO: 19845 - protein, 23 aa, Homo sapiens
CARGIYCSSTSCATYYYYGMDVW

SEQ ID NO: 19846 - protein, 17 aa, Homo sapiens
CARDRDGYNVNYAFDIW

SEQ ID NO: 19847 - protein, 16 aa, Homo sapiens
CAHRRYLGLYPRFDPW

SEQ ID NO: 19848 - protein, 17 aa, Homo sapiens
CARRLIVVVVDDAFDIW

SEQ ID NO: 19849 - protein, 23 aa, Homo sapiens
CAKDRMAAAGSRIYYYCYSMDVW

SEQ ID NO: 19850 - protein, 17 aa, Homo sapiens
CARDPEFGSGSWEFDLW

SEQ ID NO: 19851 - protein, 18 aa, Homo sapiens
CARVGYCSGPTCYPLDYW

SEQ ID NO: 19852 - protein, 20 aa, Homo sapiens
CAKDQYVGYGDPYYYGMDVW

SEQ ID NO: 19853 - protein, 20 aa, Homo sapiens
CARGGSVSDIVATISSFDYW

SEQ ID NO: 19854 - protein, 19 aa, Homo sapiens
CASQLLWFGGGTNYQFDYW

SEQ ID NO: 19855 - protein, 20 aa, Homo sapiens
CAREREADSAATGTRYFDFW

SEQ ID NO: 19856 - protein, 20 aa, Homo sapiens
CAKLADYYDSGSYYNAFDYW

SEQ ID NO: 19857 - protein, 22 aa, Homo sapiens
CAREFPYEILTAHKGRGWFDPW

SEQ ID NO: 19858 - protein, 25 aa, Homo sapiens
CARDLADRIAAAGTSNYYYYGMDVW

SEQ ID NO: 19859 - protein, 18 aa, Homo sapiens
CARDTGGSGWYESWFDPW

SEQ ID NO: 19860 - protein, 17 aa, Homo sapiens
CARVRGHAYNYDSFDIW

SEQ ID NO: 19861 - protein, 15 aa, Homo sapiens
CVADVPGGSYPFDYW

SEQ ID NO: 19862 - protein, 18 aa, Homo sapiens
CARHGWVYYDSSHYFDYW

SEQ ID NO: 19863 - protein, 13 aa, Homo sapiens
CTRTSRLWDFDSW

SEQ ID NO: 19864 - protein, 12 aa, Homo sapiens
CAKGGASGFDIW

SEQ ID NO: 19865 - protein, 39 aa, Homo sapiens
CDWSSDVCSSDLDTAVFYCAKGPLGVMVVGASNWYFDLW

SEQ ID NO: 19866 - protein, 20 aa, Homo sapiens
CARGRFSENGGYYPFYFDYW

SEQ ID NO: 19867 - protein, 10 aa, Homo sapiens
CQQYYMYYNF

SEQ ID NO: 19868 - protein, 19 aa, Homo sapiens
CARVSYGSGTPTPGPFDYW

SEQ ID NO: 19869 - protein, 22 aa, Homo sapiens
CARDRVAAAGTDPYYYYGMDVW

SEQ ID NO: 19870 - protein, 18 aa, Homo sapiens
CAHTRGVSGREDYYFDHW

SEQ ID NO: 19871 - protein, 17 aa, Homo sapiens
CARHGKMTTVIPEFDYW

SEQ ID NO: 19872 - protein, 11 aa, Homo sapiens
CHQRSNWRNTF

SEQ ID NO: 19873 - protein, 14 aa, Homo sapiens
CARHSFGEYLFDYW

SEQ ID NO: 19874 - protein, 16 aa, Homo sapiens
CAREPKSHSYPPFDYW

SEQ ID NO: 19875 - protein, 19 aa, Homo sapiens
CAKGSIVGPTTTPSYFDYW

SEQ ID NO: 19876 - protein, 21 aa, Homo sapiens
CAKDFYYYGSGSYMTNWFDPW

SEQ ID NO: 19877 - protein, 17 aa, Homo sapiens
CARQAYCNSDCYSFDFW

SEQ ID NO: 19878 - protein, 20 aa, Homo sapiens
CALQREFDGGYSYYYALDVW

SEQ ID NO: 19879 - protein, 20 aa, Homo sapiens
CARQVGYCSGGSCSYDFDYW

SEQ ID NO: 19880 - protein, 13 aa, Homo sapiens
CARELAWMPVDYW

SEQ ID NO: 19881 - protein, 20 aa, Homo sapiens
CARRGGTFGGAIVETYFDYW

SEQ ID NO: 19882 - protein, 19 aa, Homo sapiens
CAKDWREHFGDYQDAFDMW

SEQ ID NO: 19883 - protein, 18 aa, Homo sapiens
CARVDLRCGGDCYVIDYW

SEQ ID NO: 19884 - protein, 14 aa, Homo sapiens
CARNLEVLDAFDIW

SEQ ID NO: 19885 - protein, 20 aa, Homo sapiens
CARDKYYDSSGYFGHTFDPW

SEQ ID NO: 19886 - protein, 16 aa, Homo sapiens
CTRRWELLYPYYFDYW

SEQ ID NO: 19887 - protein, 17 aa, Homo sapiens
CANTVGYCSGGSCFDYW

SEQ ID NO: 19888 - protein, 24 aa, Homo sapiens
CTTDPGSIITMIGWGYYYYGMDVW

SEQ ID NO: 19889 - protein, 16 aa, Homo sapiens
CTRDDYDSSGYNFDYW

SEQ ID NO: 19890 - protein, 24 aa, Homo sapiens
CAKEALPYYDILTGYLRPYYFDYW

SEQ ID NO: 19891 - protein, 15 aa, Homo sapiens
CARVSDGNSFPFDHW

SEQ ID NO: 19892 - protein, 15 aa, Homo sapiens
CARGTYFGELALDYW

SEQ ID NO: 19893 - protein, 20 aa, Homo sapiens
CARGPGYCNGDKCYAWFDSW

SEQ ID NO: 19894 - protein, 13 aa, Homo sapiens
CMQGSQWPSALTF

SEQ ID NO: 19895 - protein, 15 aa, Homo sapiens
CARVSQQLIKFPDYW

SEQ ID NO: 19896 - protein, 16 aa, Homo sapiens
CAHRRVYTPISAFDIW

SEQ ID NO: 19897 - protein, 19 aa, Homo sapiens
CARESPIGGLFGPDAFDIW

SEQ ID NO: 19898 - protein, 16 aa, Homo sapiens
CARDWARDRFYYFDQW

SEQ ID NO: 19899 - protein, 15 aa, Homo sapiens
CAAWDDVLSGRQVRF

SEQ ID NO: 19900 - protein, 18 aa, Homo sapiens
CAKERSSSTNYYYGMDVW

SEQ ID NO: 19901 - protein, 17 aa, Homo sapiens
CARDYDILTGYDAFDIW

SEQ ID NO: 19902 - protein, 16 aa, Homo sapiens
CAHRRATGPSRYFEYW

SEQ ID NO: 19903 - protein, 18 aa, Homo sapiens
CARDVDGATRVGATFDYW

SEQ ID NO: 19904 - protein, 20 aa, Homo sapiens
CAREGEATVTIYPPRIFDPW

SEQ ID NO: 19905 - protein, 18 aa, Homo sapiens
CARADGWEAAGNNWFDPW

SEQ ID NO: 19906 - protein, 18 aa, Homo sapiens
CARDRAVAGTSSGAFDIW

SEQ ID NO: 19907 - protein, 21 aa, Homo sapiens
CASGIVVVPAATRVTDAFDIW

SEQ ID NO: 19908 - protein, 18 aa, Homo sapiens
CARHGGMDTSGWSYFDFW

SEQ ID NO: 19909 - protein, 24 aa, Homo sapiens
CARDNRLLWFGELSDREVDWFDPW

SEQ ID NO: 19910 - protein, 11 aa, Homo sapiens
CAASENSGDYW

SEQ ID NO: 19911 - protein, 14 aa, Homo sapiens
CAKMLWLLRCFDYW

SEQ ID NO: 19912 - protein, 16 aa, Homo sapiens
CARDGSWAAAAPFDYW

SEQ ID NO: 19913 - protein, 19 aa, Homo sapiens
CARDKYDSSDTKWGVPDYW

SEQ ID NO: 19914 - protein, 14 aa, Homo sapiens
CAKEVVGFAYADYW

SEQ ID NO: 19915 - protein, 22 aa, Homo sapiens
CARVGQQQLVRPYYYYYGMDVW

SEQ ID NO: 19916 - protein, 13 aa, Homo sapiens
CQQYNNLSLSLTF

SEQ ID NO: 19917 - protein, 20 aa, Homo sapiens
CTRDMVRDTYYYYYYGMDVW

SEQ ID NO: 19918 - protein, 21 aa, Homo sapiens
CARALPDQYNSSWYDDYFDSW

SEQ ID NO: 19919 - protein, 18 aa, Homo sapiens
CAHTRYSGYDQADYFDYW

SEQ ID NO: 19920 - protein, 16 aa, Homo sapiens
CATVFAAAGSRPPDYW

SEQ ID NO: 19921 - protein, 21 aa, Homo sapiens
CTRSSLRYFDWLFSNLAFDIW

SEQ ID NO: 19922 - protein, 21 aa, Homo sapiens
CARVLPSLSYDILTGYSFDYW

SEQ ID NO: 19923 - protein, 16 aa, Homo sapiens
CAKDLLLGDYGTFDYW

SEQ ID NO: 19924 - protein, 24 aa, Homo sapiens
CARQNSINYYGSGSPRRYWYFDLW

SEQ ID NO: 19925 - protein, 18 aa, Homo sapiens
CASNLYDILTDPSPFDPW

SEQ ID NO: 19926 - protein, 12 aa, Homo sapiens
CATISGYPVDYW

SEQ ID NO: 19927 - protein, 16 aa, Homo sapiens
CATARYSSANNWFDPW

SEQ ID NO: 19928 - protein, 22 aa, Homo sapiens
CAKVGGLPAAIVDYYYYGMDVW

SEQ ID NO: 19929 - protein, 18 aa, Homo sapiens
CAKDLDSALAAGAAFDIW

SEQ ID NO: 19930 - protein, 15 aa, Homo sapiens
CARDRKYSNANFLYW

SEQ ID NO: 19931 - protein, 16 aa, Homo sapiens
CATHSGYSYGEGFDYW

SEQ ID NO: 19932 - protein, 18 aa, Homo sapiens
CARASPGYGSGSYYMDYW

SEQ ID NO: 19933 - protein, 13 aa, Homo sapiens
CTSWDDSLNGLIF

SEQ ID NO: 19934 - protein, 22 aa, Homo sapiens
CARVGAVAFADYYYYYYGMDVW

SEQ ID NO: 19935 - protein, 18 aa, Homo sapiens
CAKQAIPTTRHSGWYDYW

SEQ ID NO: 19936 - protein, 11 aa, Homo sapiens [sequence omitted]

SEQ ID NO: 19937 - protein, 18 aa, Homo sapiens
CGAPMAGLYYYYYGMDVW

SEQ ID NO: 19938 - protein, 18 aa, Homo sapiens
CARTFSGSYPFVDAFDIW

SEQ ID NO: 19939 - protein, 16 aa, Homo sapiens
CAKSSYYDILRPNDYW

SEQ ID NO: 19940 - protein, 19 aa, Homo sapiens
CAKSPRRDRDIVAAVFDLW

SEQ ID NO: 19941 - protein, 13 aa, Homo sapiens
CQSSDSSNTFSFF

SEQ ID NO: 19942 - protein, 15 aa, Homo sapiens
CARQGDGSSWHFDYW

SEQ ID NO: 19943 - protein, 19 aa, Homo sapiens
CARLYGDGYNWVGAAFDYW

SEQ ID NO: 19944 - protein, 17 aa, Homo sapiens
CTGLWFGELFYSPFDHW

SEQ ID NO: 19945 - protein, 18 aa, Homo sapiens
CARVSTSMWTSGWVFDLW

SEQ ID NO: 19946 - protein, 16 aa, Homo sapiens
CARELYGGNSGWFDPW

SEQ ID NO: 19947 - protein, 17 aa, Homo sapiens
CAKDEGGWYGVTYFDYW

SEQ ID NO: 19948 - protein, 18 aa, Homo sapiens
CARYSPDYGEGGNWFDPW

SEQ ID NO: 19949 - protein, 20 aa, Homo sapiens
CAKDYYGSGNNAYYYGMDVW

SEQ ID NO: 19950 - protein, 14 aa, Homo sapiens
CARELEGAINGDYW

SEQ ID NO: 19951 - protein, 21 aa, Homo sapiens
CAREGYCRFGGCYRTHWFDPW

SEQ ID NO: 19952 - protein, 17 aa, Homo sapiens
CAKRYGSGSYSGVPDYW

SEQ ID NO: 19953 - protein, 19 aa, Homo sapiens
CAKRMEGATFFYYYGMDVW

SEQ ID NO: 19954 - protein, 22 aa, Homo sapiens
CAKAVSYDSSAYYMLPQKFDYW

SEQ ID NO: 19955 - protein, 13 aa, Homo sapiens
CAKANLASPFDIW

SEQ ID NO: 19956 - protein, 13 aa, Homo sapiens
CATRIEVAGFDYW

SEQ ID NO: 19957 - protein, 15 aa, Homo sapiens
CARGTYNSSWYFDYW

SEQ ID NO: 19958 - protein, 19 aa, Homo sapiens
CAKDLRVTKFGGGYYFDYW

SEQ ID NO: 19959 - protein, 15 aa, Homo sapiens
CTTWTLDGYYQFDYW

SEQ ID NO: 19960 - protein, 20 aa, Homo sapiens
CSREFYYDSGGLRYDAFKIW

SEQ ID NO: 19961 - protein, 24 aa, Homo sapiens
CARGPVVVPAATTDYYYYYGMDVW

SEQ ID NO: 19962 - protein, 12 aa, Homo sapiens
CFSVADNNLRIF

SEQ ID NO: 19963 - protein, 19 aa, Homo sapiens
CASTNYYDSSGYSGAFDIW

SEQ ID NO: 19964 - protein, 21 aa, Homo sapiens
CARHGYYFDSSGYYEDAFDIW

SEQ ID NO: 19965 - protein, 19 aa, Homo sapiens
CARDSGYYGSGSYFRFDPW

SEQ ID NO: 19966 - protein, 17 aa, Homo sapiens
CAHRLGGTYSGAIFDYW

SEQ ID NO: 19967 - protein, 24 aa, Homo sapiens
CARTSWAVGATIGVGYSYYGMDVW

SEQ ID NO: 19968 - protein, 21 aa, Homo sapiens
CARDARGVDTATYYYYGMDVW

SEQ ID NO: 19969 - protein, 13 aa, Homo sapiens
CQSYATSNMKRVF

SEQ ID NO: 19970 - protein, 21 aa, Homo sapiens
CAKDYKYGSSTSLYYYGMDVW

SEQ ID NO: 19971 - protein, 24 aa, Homo sapiens
CAHLVYYYDSSGYYYGPYDHFDYW

SEQ ID NO: 19972 - protein, 22 aa, Homo sapiens
CARDTIAVAGVDAYYYYGMDVW

SEQ ID NO: 19973 - protein, 22 aa, Homo sapiens
CARDLSSGTYDPTRRVWHFDLW

SEQ ID NO: 19974 - protein, 26 aa, Homo sapiens
CARDRFSAPTVVPAVISDYYYGMDVW

SEQ ID NO: 19975 - protein, 16 aa, Homo sapiens
CTATLLYGDNRLHDYW

SEQ ID NO: 19976 - protein, 20 aa, Homo sapiens
CARHSLVTMVRGVINWFDPW

SEQ ID NO: 19977 - protein, 16 aa, Homo sapiens
CARQIGLVGPYAFDIW

SEQ ID NO: 19978 - protein, 25 aa, Homo sapiens
CARDIGYCSSTSCQGHYYYYGMDVW

SEQ ID NO: 19979 - protein, 16 aa, Homo sapiens
CAREGGYDYGNAFDIW

SEQ ID NO: 19980 - protein, 17 aa, Homo sapiens
CAKTLSDVFYFDAFDVW

SEQ ID NO: 19981 - protein, 13 aa, Homo sapiens
CVQALQTPPATTF

SEQ ID NO: 19982 - protein, 14 aa, Homo sapiens
CARVSALGTWFDSW

SEQ ID NO: 19983 - protein, 15 aa, Homo sapiens
CVKNGGQWLGYFDFW

SEQ ID NO: 19984 - protein, 16 aa, Homo sapiens
CAREDDFDVSTTIDYW

SEQ ID NO: 19985 - protein, 22 aa, Homo sapiens
CAKDLSSWFGELWGYYYGMDVW

SEQ ID NO: 19986 - protein, 17 aa, Homo sapiens
CAKVGHTWIHLRFLDYW

SEQ ID NO: 19987 - protein, 16 aa, Homo sapiens
CARLLSEVRGAAFDSW

SEQ ID NO: 19988 - protein, 25 aa, Homo sapiens
CARGPLCSSTSCYDGGVYYYGMDVW

SEQ ID NO: 19989 - protein, 22 aa, Homo sapiens
CARGRPYITMVRPYLFNWFDPW

SEQ ID NO: 19990 - protein, 15 aa, Homo sapiens
CAKEDYAYGDYLDYW

SEQ ID NO: 19991 - protein, 15 aa, Homo sapiens
CARHALWFGEPRDYW

SEQ ID NO: 19992 - protein, 12 aa, Homo sapiens
CQQSFSPPPNSF

SEQ ID NO: 19993 - protein, 22 aa, Homo sapiens
CAKDYYDSSGYLVFPPWYFDYW

SEQ ID NO: 19994 - protein, 20 aa, Homo sapiens
CAKDLPDFSGSGGYSGFDYW

SEQ ID NO: 19995 - protein, 14 aa, Homo sapiens
CAMTLIVGATFDYW

SEQ ID NO: 19996 - protein, 19 aa, Homo sapiens
CARSTYDILTGYSAPFDYW

SEQ ID NO: 19997 - protein, 21 aa, Homo sapiens
CAKGNYYDSTGYYYGNALDVW

SEQ ID NO: 19998 - protein, 17 aa, Homo sapiens
CAHRGQNGTYPYYFDHW

SEQ ID NO: 19999 - protein, 15 aa, Homo sapiens
CAKGMTTVTTAFDYW

SEQ ID NO: 20000 - protein, 16 aa, Homo sapiens
CARVAGDYWDWYFDLW

SEQ ID NO: 20001 - protein, 18 aa, Homo sapiens
CAKDLVETQLFEWFFDLW

SEQ ID NO: 20002 - protein, 16 aa, Homo sapiens
CARVRAVIGFYYFDLW

SEQ ID NO: 20003 - protein, 17 aa, Homo sapiens
CQQTYTTPHALGGGTTF

SEQ ID NO: 20004 - protein, 20 aa, Homo sapiens
CARDILDYYDTSGYNYFDCW

SEQ ID NO: 20005 - protein, 18 aa, Homo sapiens
CARVHVAGPDSSPCFDYW

SEQ ID NO: 20006 - protein, 15 aa, Homo sapiens
CAREPATSPDAFDIW

SEQ ID NO: 20007 - protein, 18 aa, Homo sapiens
CATHRGPGHSGGVGFDFW

SEQ ID NO: 20008 - protein, 21 aa, Homo sapiens
CATGLDSSGYYYKNYYGMDVW

SEQ ID NO: 20009 - protein, 13 aa, Homo sapiens
CAREAGVADFDLW

SEQ ID NO: 20010 - protein, 21 aa, Homo sapiens
CAIRLYLTTPYSSGWYWFDPW

SEQ ID NO: 20011 - protein, 17 aa, Homo sapiens
CGRLPKAMEVVLTVDYW

SEQ ID NO: 20012 - protein, 20 aa, Homo sapiens
CAHRRCDCSSTSCYCPFDYW

SEQ ID NO: 20013 - protein, 18 aa, Homo sapiens
CAKADCSSTSCHNQFDPW

SEQ ID NO: 20014 - protein, 17 aa, Homo sapiens
CAKDIAMDPGDDAFDIW

SEQ ID NO: 20015 - protein, 21 aa, Homo sapiens
CARDRIHYYDSSYYYYGMDVW

SEQ ID NO: 20016 - protein, 18 aa, Homo sapiens
CSGGSCYGDYYYYGMDVW

SEQ ID NO: 20017 - protein, 17 aa, Homo sapiens
CARLGGLVISRGYFDYW

SEQ ID NO: 20018 - protein, 19 aa, Homo sapiens
CARDHIPMVRGIVMRLDYW

SEQ ID NO: 20019 - protein, 18 aa, Homo sapiens
CAKDSLSRRGTVTPVDYW

SEQ ID NO: 20020 - protein, 19 aa, Homo sapiens
CARDLGSGWYRDFGAFDIW

SEQ ID NO: 20021 - protein, 20 aa, Homo sapiens
CAREGDLDGDYDKNDAFDLW

SEQ ID NO: 20022 - protein, 20 aa, Homo sapiens
CARGIQEGGTGLYYYGMDVW

SEQ ID NO: 20023 - protein, 18 aa, Homo sapiens
CARGGHKYSSAWSLIDYW

SEQ ID NO: 20024 - protein, 21 aa, Homo sapiens
CARGTNSGSTWRIRDNYFDYW

SEQ ID NO: 20025 - protein, 13 aa, Homo sapiens
CASQRNTGEMDYW

SEQ ID NO: 20026 - protein, 25 aa, Homo sapiens
CARDFYDSSGYTSGPGYYYYGMDVW

SEQ ID NO: 20027 - protein, 16 aa, Homo sapiens
CTTDRAVVGATEFDYW

SEQ ID NO: 20028 - protein, 16 aa, Homo sapiens
CAKESDYDSSGYIDYW

SEQ ID NO: 20029 - protein, 24 aa, Homo sapiens
CARDLTSFGELTGGANYYYGMDVW

SEQ ID NO: 20030 - protein, 25 aa, Homo sapiens
CAKVSLRYCSSTSCFTDWSYYFDYW

SEQ ID NO: 20031 - protein, 17 aa, Homo sapiens
CAHRRDLGWFGDYFDYW

SEQ ID NO: 20032 - protein, 18 aa, Homo sapiens
CARISVDYPSGSYWFDPW

SEQ ID NO: 20033 - protein, 20 aa, Homo sapiens
CARDRGYNIWTGYYRGFDNW

SEQ ID NO: 20034 - protein, 25 aa, Homo sapiens
CARDSFSAGGYDSDDYYYYYGMDVW

SEQ ID NO: 20035 - protein, 16 aa, Homo sapiens [sequence omitted]

SEQ ID NO: 20036 - protein, 17 aa, Homo sapiens
CATSSGSGWPHHAFDIW

SEQ ID NO: 20037 - protein, 22 aa, Homo sapiens
CARVGYDYVWGSPVNPGYFDYW

SEQ ID NO: 20038 - protein, 16 aa, Homo sapiens
CTWTGYRSGWYYFDYW

SEQ ID NO: 20039 - protein, 10 aa, Homo sapiens
CQQSYSSRNF

SEQ ID NO: 20040 - protein, 22 aa, Homo sapiens
CAKDITVSDSSGYYYYYGMDVW

SEQ ID NO: 20041 - protein, 16 aa, Homo sapiens
CARGSALQNDGAFDIW

SEQ ID NO: 20042 - protein, 17 aa, Homo sapiens
CAFIVVPQTYRRGFDSW

SEQ ID NO: 20043 - protein, 13 aa, Homo sapiens
CARSLESFGYDYW

SEQ ID NO: 20044 - protein, 26 aa, Homo sapiens
CAKDSLIAVAGTSEAINYYYYGMDVW

SEQ ID NO: 20045 - protein, 20 aa, Homo sapiens
CARDSGYDLGTYYYYGMDVW

SEQ ID NO: 20046 - protein, 21 aa, Homo sapiens
CAKGLGYCSGGSCYSDEFDYW

SEQ ID NO: 20047 - protein, 20 aa, Homo sapiens
CARPGCFGASWFCLDAFDIW

SEQ ID NO: 20048 - protein, 13 aa, Homo sapiens
CQQYDSSSSMYSF

SEQ ID NO: 20049 - protein, 22 aa, Homo sapiens
CARLVRYCSGGKCSGSGYFDPW

SEQ ID NO: 20050 - protein, 25 aa, Homo sapiens
CARALWRDGTMIPSRGRYYYGMDVW

SEQ ID NO: 20051 - protein, 26 aa, Homo sapiens
CAKASPSLMQRYCSGGSCYSNSFDYW

SEQ ID NO: 20052 - protein, 17 aa, Homo sapiens
CARDKDYGSGKYWFDPW

SEQ ID NO: 20053 - protein, 19 aa, Homo sapiens
CARSWAITFGGVIMPFDSW

SEQ ID NO: 20054 - protein, 20 aa, Homo sapiens
CARLGFYDSGRYVPNVFDTW

SEQ ID NO: 20055 - protein, 18 aa, Homo sapiens
CARHHVLETSSPNWFDPW

SEQ ID NO: 20056 - protein, 19 aa, Homo sapiens
CALPICWPFRERRNSFDIW

SEQ ID NO: 20057 - protein, 17 aa, Homo sapiens
CAREPPSVQQLVYFDYW

SEQ ID NO: 20058 - protein, 18 aa, Homo sapiens
CATGSPHYVVRENWFDPW

SEQ ID NO: 20059 - protein, 15 aa, Homo sapiens
CTPDRGSGWYGGDYW

SEQ ID NO: 20060 - protein, 18 aa, Homo sapiens
CAKVRRELGYHYYYFDYW

SEQ ID NO: 20061 - protein, 16 aa, Homo sapiens
CARTPRYCGGDCLDYW

SEQ ID NO: 20062 - protein, 15 aa, Homo sapiens
CATSPYLLENWFDPW

SEQ ID NO: 20063 - protein, 13 aa, Homo sapiens
CARHLVGAPIDYW

SEQ ID NO: 20064 - protein, 11 aa, Homo sapiens
CARDRLYFDTW

SEQ ID NO: 20065 - protein, 18 aa, Homo sapiens
CATCRGGSSCYADPFEIW

SEQ ID NO: 20066 - protein, 18 aa, Homo sapiens
CAKSAVGSGYLHPYFDSW

SEQ ID NO: 20067 - protein, 21 aa, Homo sapiens
CAKDAFIAAANRYYYYGMDVW

SEQ ID NO: 20068 - protein, 20 aa, Homo sapiens
CAKDYYDSSGSHYYYGMDVW

SEQ ID NO: 20069 - protein, 24 aa, Homo sapiens
CARGYIRITMVRGVIGKEYYFDYW

SEQ ID NO: 20070 - protein, 17 aa, Homo sapiens
CAREGVGGYGERWLDPW

SEQ ID NO: 20071 - protein, 16 aa, Homo sapiens
CAKSNDEYDSTEFDSW

SEQ ID NO: 20072 - protein, 15 aa, Homo sapiens
CARENTSMFYYFDYW

SEQ ID NO: 20073 - protein, 18 aa, Homo sapiens
CATDSPFTTRTTRGFDLW

SEQ ID NO: 20074 - protein, 22 aa, Homo sapiens
CAKDIHGSSSWYGYYYYGMDVW

SEQ ID NO: 20075 - protein, 25 aa, Homo sapiens
CARDRGYYDILTGYYLPSNDAFDIW

SEQ ID NO: 20076 - protein, 23 aa, Homo sapiens
CAKDLTGIVGATMFYYYYGMDVW

SEQ ID NO: 20077 - protein, 24 aa, Homo sapiens
CAKGPQPYYDILTGYYLLYYFDYW

SEQ ID NO: 20078 - protein, 17 aa, Homo sapiens
CARHDTPTLRWAALDYW

SEQ ID NO: 20079 - protein, 22 aa, Homo sapiens
CARTHIVVVTATNYYYYGMDVW

SEQ ID NO: 20080 - protein, 18 aa, Homo sapiens
CARRGSYYESDGFHFDYW

SEQ ID NO: 20081 - protein, 18 aa, Homo sapiens
CARDKWAGGNGGWYLDSW

SEQ ID NO: 20082 - protein, 22 aa, Homo sapiens
CARRGGSQSYYNTYSANYFDFW

SEQ ID NO: 20083 - protein, 19 aa, Homo sapiens
CARVVCSSTSCYRGDFDYW

SEQ ID NO: 20084 - protein, 20 aa, Homo sapiens
CAKDGEGEYGDYVGNWFDPW

SEQ ID NO: 20085 - protein, 23 aa, Homo sapiens
CANQMASYGSGSYYLYYYGMDVW

SEQ ID NO: 20086 - protein, 16 aa, Homo sapiens
CAHRPGLIGWPYFDYW

SEQ ID NO: 20087 - protein, 24 aa, Homo sapiens
CARSHGSDFSSSWYMRSIYAFDIW

SEQ ID NO: 20088 - protein, 18 aa, Homo sapiens
CAAPLGQLWTEGWYFDLW

SEQ ID NO: 20089 - protein, 20 aa, Homo sapiens
CAKLAYSSSWHQASLPDDYW

SEQ ID NO: 20090 - protein, 22 aa, Homo sapiens
CARDQVVVVPAAPGYYYGMDVW

SEQ ID NO: 20091 - protein, 15 aa, Homo sapiens
CSQYSRKTGSAFDIW

SEQ ID NO: 20092 - protein, 18 aa, Homo sapiens
CARFGVVTQTRPPAFDIW

SEQ ID NO: 20093 - protein, 22 aa, Homo sapiens
CAREDYYDSGGHSYYYYGMDVW

SEQ ID NO: 20094 - protein, 26 aa, Homo sapiens
CAREDYYYDSSGYPNYYYYYYGMDVW

SEQ ID NO: 20095 - protein, 16 aa, Homo sapiens
CAREYYYGSGSYRPYW

SEQ ID NO: 20096 - protein, 16 aa, Homo sapiens
CARVVTAIHDEYFDYW

SEQ ID NO: 20097 - protein, 16 aa, Homo sapiens
CARGHYGDSISHFDLW

SEQ ID NO: 20098 - protein, 19 aa, Homo sapiens
CARVFGMIRGVIVPRLDYW

SEQ ID NO: 20099 - protein, 23 aa, Homo sapiens
CARDMSRGYSYGGDYYYYGMDVW

SEQ ID NO: 20100 - protein, 15 aa, Homo sapiens
CARQSAPDWTPPDYW

SEQ ID NO: 20101 - protein, 14 aa, Homo sapiens
CAKGSGDYWYFDLW

SEQ ID NO: 20102 - protein, 19 aa, Homo sapiens
CAKERALINWGLGNAFDIW

SEQ ID NO: 20103 - protein, 19 aa, Homo sapiens
CQQSYGAPSLSFGGGSITF

SEQ ID NO: 20104 - protein, 24 aa, Homo sapiens
CARDSMIVVDHNKRYYYYYGMDVW

SEQ ID NO: 20105 - protein, 21 aa, Homo sapiens
CARDIGLLGGGNYYYYGMDVW

SEQ ID NO: 20106 - protein, 15 aa, Homo sapiens
CARENDYPYRFFDYW

SEQ ID NO: 20107 - protein, 19 aa, Homo sapiens
CARDPGYCSGGSCYRDDYW

SEQ ID NO: 20108 - protein, 12 aa, Homo sapiens
CQYFNDYPPPAF

SEQ ID NO: 20109 - protein, 24 aa, Homo sapiens
CARTQSNQKWLDSRKKSGDWFDPW

SEQ ID NO: 20110 - protein, 16 aa, Homo sapiens
CARVIYDSTGSPFDYW

SEQ ID NO: 20111 - protein, 19 aa, Homo sapiens
CAKDRVPGKAQRLYYFDYW

SEQ ID NO: 20112 - protein, 20 aa, Homo sapiens
CAKDTMVRGEGYYYYGMDVW

SEQ ID NO: 20113 - protein, 18 aa, Homo sapiens
CAREDRTTDNYYYGMDVW

SEQ ID NO: 20114 - protein, 14 aa, Homo sapiens
CQQTNSLPPKGFTF

SEQ ID NO: 20115 - protein, 15 aa, Homo sapiens
CAREYSWGDGGFDSW

SEQ ID NO: 20116 - protein, 19 aa, Homo sapiens
CAKDVCSGGSCYEGAFDYW

SEQ ID NO: 20117 - protein, 20 aa, Homo sapiens
CARVFPTYYDILTGYSTDYW

SEQ ID NO: 20118 - protein, 22 aa, Homo sapiens
CARDQVVPAAIALSYYYGMDVW

SEQ ID NO: 20119 - protein, 22 aa, Homo sapiens
CARVMASSSSGWWYYYYGMDVW

SEQ ID NO: 20120 - protein, 22 aa, Homo sapiens
CARDLGRWPQLETYYYYGMDVW

SEQ ID NO: 20121 - protein, 17 aa, Homo sapiens
CARGTSGYDYRGFFDSW

SEQ ID NO: 20122 - protein, 14 aa, Homo sapiens
CASCHGVTYAFDIW

SEQ ID NO: 20123 - protein, 17 aa, Homo sapiens
CAGSGGDYAPSEDFQHW

SEQ ID NO: 20124 - protein, 15 aa, Homo sapiens
CARGGRGYNFANDYW

SEQ ID NO: 20125 - protein, 18 aa, Homo sapiens
CAKDKSGYYGSGSRFDYW

SEQ ID NO: 20126 - protein, 22 aa, Homo sapiens
CARDSTHNWNDRLYYYYGMDVW

SEQ ID NO: 20127 - protein, 20 aa, Homo sapiens
CARDPGSGYGSNSYGAFDIW

SEQ ID NO: 20128 - protein, 16 aa, Homo sapiens
CAREDSSGWFYWFDPW

SEQ ID NO: 20129 - protein, 18 aa, Homo sapiens
CARQSCSRTTCYASFDYW

SEQ ID NO: 20130 - protein, 17 aa, Homo sapiens
CARARILTGYYDWFDPW

SEQ ID NO: 20131 - protein, 18 aa, Homo sapiens
CARSAAAYGDYGDFDDYW

SEQ ID NO: 20132 - protein, 22 aa, Homo sapiens
CAKGGYCSSTSCSKGGPAFDIW

SEQ ID NO: 20133 - protein, 22 aa, Homo sapiens
CASSTHYYDSSGSTLALAFDIW

SEQ ID NO: 20134 - protein, 19 aa, Homo sapiens
CARDRSPSGRYYPDAFDIW

SEQ ID NO: 20135 - protein, 24 aa, Homo sapiens
CARDQGLNAPITMIVVRSGAFDIW

SEQ ID NO: 20136 - protein, 17 aa, Homo sapiens
CANLPLPGYSSGSDDYW

SEQ ID NO: 20137 - protein, 17 aa, Homo sapiens
CAIDNKNDGEPDAFDVW

SEQ ID NO: 20138 - protein, 20 aa, Homo sapiens
CARGGVAVAGSDSPEYFQHW

SEQ ID NO: 20139 - protein, 19 aa, Homo sapiens
CARESGEVPAAIANAFDIW

SEQ ID NO: 20140 - protein, 21 aa, Homo sapiens
CVTLSLDVAALHRDQNAFDVW

SEQ ID NO: 20141 - protein, 18 aa, Homo sapiens
CARDSRVDNGVYAFFDDW

SEQ ID NO: 20142 - protein, 14 aa, Homo sapiens
CARNGPDLRPLDYW

SEQ ID NO: 20143 - protein, 22 aa, Homo sapiens
CARDIYGVAGTRDYYYYGMDVW

SEQ ID NO: 20144 - protein, 20 aa, Homo sapiens
CARDLVARENTAYYYGMDVW

SEQ ID NO: 20145 - protein, 14 aa, Homo sapiens
CSSRDSSPNHAVVF

SEQ ID NO: 20146 - protein, 16 aa, Homo sapiens
CARGWSDGYSYGFDYW

SEQ ID NO: 20147 - protein, 15 aa, Homo sapiens
CASSSGYYYRWFDPW

SEQ ID NO: 20148 - protein, 27 aa, Homo sapiens
CARALWGTMVRGVTYDGPYYYYGMDVW

SEQ ID NO: 20149 - protein, 19 aa, Homo sapiens
CAKDYEAYTSGWYPAFDVW

SEQ ID NO: 20150 - protein, 22 aa, Homo sapiens
CARDTTSSTSPGVYYYYGMDVW

SEQ ID NO: 20151 - protein, 16 aa, Homo sapiens
CTTEEKWELKNWFDPW

SEQ ID NO: 20152 - protein, 23 aa, Homo sapiens
CTRETDCSGSSCYPYYYLGMDVW

SEQ ID NO: 20153 - protein, 16 aa, Homo sapiens
CAKQPQVWFPSRFDYW

SEQ ID NO: 20154 - protein, 18 aa, Homo sapiens
CATQPRGVAGSRFPFEYW

SEQ ID NO: 20155 - protein, 19 aa, Homo sapiens
CARDLGGYDSGYYYGMDVW

SEQ ID NO: 20156 - protein, 15 aa, Homo sapiens
CARVSGYDSLDFDYW

SEQ ID NO: 20157 - protein, 18 aa, Homo sapiens
CARESWYGDYEVGWFDPW

SEQ ID NO: 20158 - protein, 20 aa, Homo sapiens
CARDRLLDYGDYYYTGMDVW

SEQ ID NO: 20159 - protein, 13 aa, Homo sapiens
CVYRQRGDWFDPW

SEQ ID NO: 20160 - protein, 20 aa, Homo sapiens
CARHQGYSGYDSDYNWFDPW

SEQ ID NO: 20161 - protein, 18 aa, Homo sapiens
CARGADVSYSGYDEFDYW

SEQ ID NO: 20162 - protein, 18 aa, Homo sapiens
CARDPNGDYSFNDAFDIW

SEQ ID NO: 20163 - protein, 18 aa, Homo sapiens
CAREGGAGTTRIDAFDIW

SEQ ID NO: 20164 - protein, 20 aa, Homo sapiens
CAKVSSLTPGRYSSSWSDYW

SEQ ID NO: 20165 - protein, 21 aa, Homo sapiens
CTTLDQIVVVITGYYYGMDVW

SEQ ID NO: 20166 - protein, 19 aa, Homo sapiens
CARIFPVTSLYYYYGMDVW

SEQ ID NO: 20167 - protein, 22 aa, Homo sapiens
CARHHYDSSGYYYIFGYYFDYW

SEQ ID NO: 20168 - protein, 18 aa, Homo sapiens
CARDLHASGTYSTVFDYW

SEQ ID NO: 20169 - protein, 20 aa, Homo sapiens
CAREGVVVVITVYYYGMDVW

SEQ ID NO: 20170 - protein, 18 aa, Homo sapiens
CAREPSYSSSWYVGFDYW

SEQ ID NO: 20171 - protein, 18 aa, Homo sapiens
CAKNEGVFDILTGPFDSW

SEQ ID NO: 20172 - protein, 19 aa, Homo sapiens
CARDNYFGAGNHFGWIDSW

SEQ ID NO: 20173 - protein, 17 aa, Homo sapiens
CATVFAWFGESSRFDYW

SEQ ID NO: 20174 - protein, 12 aa, Homo sapiens
CQYYGASPLFAF

SEQ ID NO: 20175 - protein, 20 aa, Homo sapiens
CARERWEEYSSGWYVYFDYW

SEQ ID NO: 20176 - protein, 22 aa, Homo sapiens
CARVDGDYVSREDRAYNWFDPW

SEQ ID NO: 20177 - protein, 26 aa, Homo sapiens
CARDSRVLYGDQPPQYYYYYYGMDVW

SEQ ID NO: 20178 - protein, 18 aa, Homo sapiens
CARDYSFGYSSGWDIDYW

SEQ ID NO: 20179 - protein, 16 aa, Homo sapiens
CARRVYYEESYALDIW

SEQ ID NO: 20180 - protein, 14 aa, Homo sapiens
CARIDIRGDWLDPW

SEQ ID NO: 20181 - protein, 21 aa, Homo sapiens
CARHDFTHFYASGGPQTFDIW

SEQ ID NO: 20182 - protein, 20 aa, Homo sapiens
CARVGVTMIVVVIGDAFDIW

SEQ ID NO: 20183 - protein, 12 aa, Homo sapiens
CYQYGNSPPYIF

SEQ ID NO: 20184 - protein, 14 aa, Homo sapiens
CARPQSGGDWFDPW

SEQ ID NO: 20185 - protein, 19 aa, Homo sapiens
CAREGEGFGELLSRAFDIW

SEQ ID NO: 20186 - protein, 14 aa, Homo sapiens
CIIGRYSYSYGSYW

SEQ ID NO: 20187 - protein, 18 aa, Homo sapiens
CATDWGSGSSYIVVFDLW

SEQ ID NO: 20188 - protein, 24 aa, Homo sapiens
CAHRSYDILAGTYNVFTGGGFDYW

SEQ ID NO: 20189 - protein, 21 aa, Homo sapiens
CARVLTPGFYYDSSSYPLDYW

SEQ ID NO: 20190 - protein, 12 aa, Homo sapiens
CQQRFNWHEYSF

SEQ ID NO: 20191 - protein, 21 aa, Homo sapiens
CARGGWLRFSGHPQFTYFDYW

SEQ ID NO: 20192 - protein, 10 aa, Homo sapiens
CTCISYWDYW

SEQ ID NO: 20193 - protein, 16 aa, Homo sapiens
CARFPIVVITTGFDYW

SEQ ID NO: 20194 - protein, 24 aa, Homo sapiens
CARLSTYYYDSSGQFWRQYYFDYW

SEQ ID NO: 20195 - protein, 17 aa, Homo sapiens
CARTHYYDSSGQDLDYW

SEQ ID NO: 20196 - protein, 20 aa, Homo sapiens
CARDGEDYGGDYYYYGMDVW

SEQ ID NO: 20197 - protein, 16 aa, Homo sapiens
CAKEARPEVEYYFDYW

SEQ ID NO: 20198 - protein, 18 aa, Homo sapiens
CAKDRQWFGEIYDAFNVW

SEQ ID NO: 20199 - protein, 19 aa, Homo sapiens
CARDKYSGSWLEDYYFDYW

SEQ ID NO: 20200 - protein, 16 aa, Homo sapiens
CARRMSVTAPHPFDYW

SEQ ID NO: 20201 - protein, 20 aa, Homo sapiens
CAKDYDILNALSHYYGFDVW

SEQ ID NO: 20202 - protein, 18 aa, Homo sapiens
CAKDRRSGSNEGIGPDYW

SEQ ID NO: 20203 - protein, 24 aa, Homo sapiens
CARDRVTMVRGVIPDYYYYGMDVW

SEQ ID NO: 20204 - protein, 20 aa, Homo sapiens
CAREFSYYFDGDGSDAFDIW

SEQ ID NO: 20205 - protein, 17 aa, Homo sapiens
CARDIPLGVDGEKFDYW

SEQ ID NO: 20206 - protein, 19 aa, Homo sapiens
CTRSFGGNSLGAGQQFDSW

SEQ ID NO: 20207 - protein, 22 aa, Homo sapiens
CARDMYSSGWYDAYYYYGMDVW

SEQ ID NO: 20208 - protein, 19 aa, Homo sapiens
CARDGYCSGPSCYGMGDYW

SEQ ID NO: 20209 - protein, 19 aa, Homo sapiens
CAKEIRVDDIVATNPFDYW

SEQ ID NO: 20210 - protein, 23 aa, Homo sapiens
CARQPPSPSFDFLTGYYDAFPIW

SEQ ID NO: 20211 - protein, 17 aa, Homo sapiens
CAKLWSRGFGELFSDYW

SEQ ID NO: 20212 - protein, 15 aa, Homo sapiens
CASSLAVKQYYFDYW

SEQ ID NO: 20213 - protein, 19 aa, Homo sapiens
CATHARGVLGTTNGAFDMW

SEQ ID NO: 20214 - protein, 19 aa, Homo sapiens
CARRTASISVTYYYGMDVW

SEQ ID NO: 20215 - protein, 14 aa, Homo sapiens
CSTLAAAGNGIDYW

SEQ ID NO: 20216 - protein, 16 aa, Homo sapiens
CVRDPQVVGGSNFDYW

SEQ ID NO: 20217 - protein, 18 aa, Homo sapiens
CARGGYGDYEMDWYFDLW

SEQ ID NO: 20218 - protein, 19 aa, Homo sapiens
CARDYGDYVKGYYYGMDVW

SEQ ID NO: 20219 - protein, 25 aa, Homo sapiens
CAREPSRTTWTLVSSSWNHWYFDLW

SEQ ID NO: 20220 - protein, 20 aa, Homo sapiens
CARDGDGGNSGYYYNGMDVW

SEQ ID NO: 20221 - protein, 16 aa, Homo sapiens
CARGGYGDYLDAFDIW

SEQ ID NO: 20222 - protein, 26 aa, Homo sapiens
CARDFFAVVDIVATMPYYYYYGMDVW

SEQ ID NO: 20223 - protein, 22 aa, Homo sapiens
CARDQVVGATESHYYYYGMDVW

SEQ ID NO: 20224 - protein, 17 aa, Homo sapiens
CAKDGGTHEYSYGLDYW

SEQ ID NO: 20225 - protein, 18 aa, Homo sapiens
CAKDMARYGDYEGLVDYW

SEQ ID NO: 20226 - protein, 22 aa, Homo sapiens
CARDPTIRYSYGLSGTDYFDYW

SEQ ID NO: 20227 - protein, 15 aa, Homo sapiens
CARETWDGDWYFDLW

SEQ ID NO: 20228 - protein, 19 aa, Homo sapiens
CARHNTDSSSWYAYYFDYW

SEQ ID NO: 20229 - protein, 18 aa, Homo sapiens
CARPRAAGPDQPNYFDYW

SEQ ID NO: 20230 - protein, 25 aa, Homo sapiens
CARDSSRVTNYYDSSGYYYDAFDIW

SEQ ID NO: 20231 - protein, 21 aa, Homo sapiens
CARDARYYYDSSGYLVWFDPW

SEQ ID NO: 20232 - protein, 13 aa, Homo sapiens [sequence omitted]

SEQ ID NO: 20233 - protein, 19 aa, Homo sapiens
CAKDHLSYYDSSGYYFDYW

SEQ ID NO: 20234 - protein, 16 aa, Homo sapiens
CARDIRPDSGYDIDYW

SEQ ID NO: 20235 - protein, 17 aa, Homo sapiens
CARGGYSYGLVTGFDYW

SEQ ID NO: 20236 - protein, 24 aa, Homo sapiens
CARDSMGYCSSTSCHDYYYGMDVW

SEQ ID NO: 20237 - protein, 18 aa, Homo sapiens
CARDVIKYYGSYYGMDVW

SEQ ID NO: 20238 - protein, 19 aa, Homo sapiens
CARDMLILTGYGPDAFDIW

SEQ ID NO: 20239 - protein, 28 aa, Homo sapiens
CARDFKGYYGSGSYYEDGYYYYYGMDVW

SEQ ID NO: 20240 - protein, 13 aa, Homo sapiens
CARDLASYPFDYW

SEQ ID NO: 20241 - protein, 25 aa, Homo sapiens
CARDLIVVVPAAIDSQGYYYGMDVW

SEQ ID NO: 20242 - protein, 19 aa, Homo sapiens
CARSSRLDGVAGTRWFDPW

SEQ ID NO: 20243 - protein, 18 aa, Homo sapiens
CARDINPYCRGDCPTDYW

SEQ ID NO: 20244 - protein, 17 aa, Homo sapiens
CASHRSRIAVAGTFDYW

SEQ ID NO: 20245 - protein, 18 aa, Homo sapiens
CARDGDSSSWQSSLLDYW

SEQ ID NO: 20246 - protein, 11 aa, Homo sapiens
CQQYENFPVAF

SEQ ID NO: 20247 - protein, 22 aa, Homo sapiens
CAKDESSDYYGPGRYDYRFDYW

SEQ ID NO: 20248 - protein, 17 aa, Homo sapiens
CAKDDTPILTGYTFDYW

SEQ ID NO: 20249 - protein, 20 aa, Homo sapiens
CTTDRTGSSWYLAGYYFDYW

SEQ ID NO: 20250 - protein, 15 aa, Homo sapiens
CAKSYGGSYYYFDYW

SEQ ID NO: 20251 - protein, 23 aa, Homo sapiens
CASWSLCERSRTPCLGPTFDDYW

SEQ ID NO: 20252 - protein, 30 aa, Homo sapiens
CALPISDTAMYFCARYRPRSGITGYYFDYW

SEQ ID NO: 20253 - protein, 18 aa, Homo sapiens
CARVKYSSSGGSNYFDSW

SEQ ID NO: 20254 - protein, 21 aa, Homo sapiens
CAREGAWYYYDSSGYYSFDYW

SEQ ID NO: 20255 - protein, 20 aa, Homo sapiens
CAKASGGYSSSWWSWWFDPW

SEQ ID NO: 20256 - protein, 21 aa, Homo sapiens
CARVNFPAWNSGWSRDALHIW

SEQ ID NO: 20257 - protein, 17 aa, Homo sapiens
CASSMGNSGYFDAFDIW

SEQ ID NO: 20258 - protein, 16 aa, Homo sapiens
CAKGTDWYYYYGMDVW

SEQ ID NO: 20259 - protein, 34 aa, Homo sapiens
CDWSSDVCSSDLTAVYYCAREGVGGYGERWLDPW

SEQ ID NO: 20260 - protein, 17 aa, Homo sapiens
CARGPPLAATDPLLDYW

SEQ ID NO: 20261 - protein, 23 aa, Homo sapiens
CAKVGGEGDYVWGSYRSYYFDYW

SEQ ID NO: 20262 - protein, 15 aa, Homo sapiens
CAREVYGSSGPLDYW

SEQ ID NO: 20263 - protein, 15 aa, Homo sapiens
CAREATVTTSWFDPW

SEQ ID NO: 20264 - protein, 21 aa, Homo sapiens
CARDGYYYDSSAHKNWYFDLW

SEQ ID NO: 20265 - protein, 16 aa, Homo sapiens
CARSAGSSGYYHFDQW

SEQ ID NO: 20266 - protein, 22 aa, Homo sapiens
CARQVVRGVIKPGPSQNWFDPW

SEQ ID NO: 20267 - protein, 25 aa, Homo sapiens
CARGDGAVTPALLQRVVRGYYFDHW

SEQ ID NO: 20268 - protein, 21 aa, Homo sapiens
CARDHPDPELLWFGEWYFDYW

SEQ ID NO: 20269 - protein, 19 aa, Homo sapiens
CARDPHSSGWYVVGYFDYW

SEQ ID NO: 20270 - protein, 20 aa, Homo sapiens
CASVPAASTTTYYYYGMDVW

SEQ ID NO: 20271 - protein, 17 aa, Homo sapiens
CSKDPHHYYSSPPVDYW

SEQ ID NO: 20272 - protein, 18 aa, Homo sapiens
CARERTGPEAPGDGMDVW

SEQ ID NO: 20273 - protein, 15 aa, Homo sapiens
CAREWTSGWYLFDYW

SEQ ID NO: 20274 - protein, 17 aa, Homo sapiens
CARDVGSGWYQIYFDYW

SEQ ID NO: 20275 - protein, 16 aa, Homo sapiens
CARGKTAIVLYYFDYW

SEQ ID NO: 20276 - protein, 20 aa, Homo sapiens
CARHSHLWFGESEQYYFDYW

SEQ ID NO: 20277 - protein, 27 aa, Homo sapiens
CARGIMTVGPDGYASRGSRTYQDLDYW

SEQ ID NO: 20278 - protein, 17 aa, Homo sapiens
CARVIKGGYRFGPIDYW

SEQ ID NO: 20279 - protein, 14 aa, Homo sapiens
CAKLVLRGVIRDYW

SEQ ID NO: 20280 - protein, 20 aa, Homo sapiens
CARAGDSYDSSSYYPSFDYW

SEQ ID NO: 20281 - protein, 14 aa, Homo sapiens
CARRSEIHNDFDYW

SEQ ID NO: 20282 - protein, 18 aa, Homo sapiens
CARSYYGSGSYTNWFGPW

SEQ ID NO: 20283 - protein, 17 aa, Homo sapiens
CAHRRIILTGPPGFDYW

SEQ ID NO: 20284 - protein, 24 aa, Homo sapiens
CARHIPLVWGGVPAAMPIDGLDVW

SEQ ID NO: 20285 - protein, 15 aa, Homo sapiens
CARDKMIRAGTTDYW

SEQ ID NO: 20286 - protein, 16 aa, Homo sapiens
CARVGAGRKKDGFDIW

SEQ ID NO: 20287 - protein, 15 aa, Homo sapiens
CVPNYCSSTSCYDYW

SEQ ID NO: 20288 - protein, 22 aa, Homo sapiens
CARDMGNEGSSYVYYYYGMDVW

SEQ ID NO: 20289 - protein, 26 aa, Homo sapiens
CARANPLEGIWGGWPFRERRNSFDIW

SEQ ID NO: 20290 - protein, 24 aa, Homo sapiens
CARGAYIVVVPAATYYYYYGMDVW

SEQ ID NO: 20291 - protein, 22 aa, Homo sapiens
CARDALYCRASRCYSLGAFDIW

SEQ ID NO: 20292 - protein, 24 aa, Homo sapiens
CARRRGYCSGGSCYDYYYYGMDVW

SEQ ID NO: 20293 - protein, 14 aa, Homo sapiens
CATGSQLSGTFDWW

SEQ ID NO: 20294 - protein, 19 aa, Homo sapiens
CAKDPLLNGYFPKYYFDDW

SEQ ID NO: 20295 - protein, 13 aa, Homo sapiens
CLQFNNWPPGTPF

SEQ ID NO: 20296 - protein, 21 aa, Homo sapiens
CARLHCGTTSCFVRDNFFDPW

SEQ ID NO: 20297 - protein, 22 aa, Homo sapiens
CARSTVTTSVPLINYYYGMDVW

SEQ ID NO: 20298 - protein, 24 aa, Homo sapiens
CARRATYYYDSSGYYPTNEWFDPW

SEQ ID NO: 20299 - protein, 26 aa, Homo sapiens
CARGSQEGAVAGSGPPPYYYYGMDVW

SEQ ID NO: 20300 - protein, 16 aa, Homo sapiens
CARDEDPWIKNWFDPW

SEQ ID NO: 20301 - protein, 17 aa, Homo sapiens
CAKDGEAVYSYGYPDYW

SEQ ID NO: 20302 - protein, 21 aa, Homo sapiens
CARDASVAYCGGDCYWFLDYW

SEQ ID NO: 20303 - protein, 21 aa, Homo sapiens
CAKDGLHSTNTYYYYYGMDVW

SEQ ID NO: 20304 - protein, 20 aa, Homo sapiens
CARDDFFDTLTYYYYGMDVW

SEQ ID NO: 20305 - protein, 17 aa, Homo sapiens
CAKATDGYGSGSYYYYW

SEQ ID NO: 20306 - protein, 21 aa, Homo sapiens
CAHGQTKVKLASSWYWFFDLW

SEQ ID NO: 20307 - protein, 23 aa, Homo sapiens
CARDLWYYDSSGYYKSGEYFQHW

SEQ ID NO: 20308 - protein, 19 aa, Homo sapiens
CAKARYGSWSYEGNYFEHW

SEQ ID NO: 20309 - protein, 23 aa, Homo sapiens
CARDLLVGATHPASYYYYGMDVW

SEQ ID NO: 20310 - protein, 19 aa, Homo sapiens
CARRAIEVAGTGLTGFDPW

SEQ ID NO: 20311 - protein, 21 aa, Homo sapiens
CARAPIRYYYDKEARYYFDYW

SEQ ID NO: 20312 - protein, 21 aa, Homo sapiens
CARDSDPIVVVPAAEGYLDYW

SEQ ID NO: 20313 - protein, 20 aa, Homo sapiens
CTKGGTSAYEPEGRYYFDSW

SEQ ID NO: 20314 - protein, 15 aa, Homo sapiens
CAKDSVRGVGWFDPW

SEQ ID NO: 20315 - protein, 14 aa, Homo sapiens
CARVQDSGSYFDYW

SEQ ID NO: 20316 - protein, 18 aa, Homo sapiens
CARPSQTSSFYVGPFDYW

SEQ ID NO: 20317 - protein, 26 aa, Homo sapiens
CATEGPSYSASGSHSSKYLYYGMDVW

SEQ ID NO: 20318 - protein, 16 aa, Homo sapiens
CAREPPNSEGRYFDLW

SEQ ID NO: 20319 - protein, 15 aa, Homo sapiens
CAGHWRGASYVFDIW

SEQ ID NO: 20320 - protein, 14 aa, Homo sapiens
CAKDRYGDYAFDCW

SEQ ID NO: 20321 - protein, 18 aa, Homo sapiens
CAKDGLPDTAMEYYFDYW

SEQ ID NO: 20322 - protein, 19 aa, Homo sapiens
CAKDWSGIVGAPGAAFDIW

SEQ ID NO: 20323 - protein, 16 aa, Homo sapiens
CARTGYFDWHYWFDPW

SEQ ID NO: 20324 - protein, 12 aa, Homo sapiens
CQQTYRTPMYSF

SEQ ID NO: 20325 - protein, 14 aa, Homo sapiens
CATESGATNAFDIW

SEQ ID NO: 20326 - protein, 18 aa, Homo sapiens
CARVVELWLGQDGYFDYW

SEQ ID NO: 20327 - protein, 17 aa, Homo sapiens
CARVQTSGWYRDYFDYW

SEQ ID NO: 20328 - protein, 18 aa, Homo sapiens
CAKEQDNYYDTGFTVDYW

SEQ ID NO: 20329 - protein, 19 aa, Homo sapiens
CARLRVEERYNWDDGYDYW

SEQ ID NO: 20330 - protein, 21 aa, Homo sapiens
CAREIPVGSGWYNYYYGMDVW

SEQ ID NO: 20331 - protein, 11 aa, Homo sapiens
CMDGTYWPKPF

SEQ ID NO: 20332 - protein, 20 aa, Homo sapiens
CTTDETEWFGELLGDYFDYW

SEQ ID NO: 20333 - protein, 23 aa, Homo sapiens
CARDRIAVAGTMTDYYYYGMDVW

SEQ ID NO: 20334 - protein, 15 aa, Homo sapiens
CATFLPTNGDAFDNW

SEQ ID NO: 20335 - protein, 16 aa, Homo sapiens
CARAISNSRGYRFDSW

SEQ ID NO: 20336 - protein, 20 aa, Homo sapiens
CAMPVDYYDSGAYRAPFDYW

SEQ ID NO: 20337 - protein, 22 aa, Homo sapiens
CARDNRGYYDSSGYADDAFDIW

SEQ ID NO: 20338 - protein, 19 aa, Homo sapiens
CASLEGGYCSGGSCYFDYW

SEQ ID NO: 20339 - protein, 23 aa, Homo sapiens
CARDRGVYDRSIYYYRGGGFDYW

SEQ ID NO: 20340 - protein, 21 aa, Homo sapiens
CARDGTTVPNGGYYYYGMDVW

SEQ ID NO: 20341 - protein, 13 aa, Homo sapiens
CQQSYSTLGGITF

SEQ ID NO: 20342 - protein, 27 aa, Homo sapiens
CARPRLDYHDSSSYYYGYYYYYGMDVW

SEQ ID NO: 20343 - protein, 18 aa, Homo sapiens
CARGGLLWFGEHFYFDHW

SEQ ID NO: 20344 - protein, 22 aa, Homo sapiens
CARENGYALTATHRYYYGMDVW

SEQ ID NO: 20345 - protein, 14 aa, Homo sapiens
CQSADSSYPFDYVF

SEQ ID NO: 20346 - protein, 15 aa, Homo sapiens
CARVTTDYGGIFDIW

SEQ ID NO: 20347 - protein, 21 aa, Homo sapiens
CARRKVIPGGFGELSPPFDYW

SEQ ID NO: 20348 - protein, 16 aa, Homo sapiens
CANAPGYFYGYNDDYW

SEQ ID NO: 20349 - protein, 16 aa, Homo sapiens
CARHVEQLVHSGFDSW

SEQ ID NO: 20350 - protein, 21 aa, Homo sapiens
CARDQVVPAAMPSYSDGMDVW

SEQ ID NO: 20351 - protein, 16 aa, Homo sapiens
CARDRDYGGNYHLDYW

SEQ ID NO: 20352 - protein, 14 aa, Homo sapiens
CGRRWLQVSEVDYW

SEQ ID NO: 20353 - protein, 16 aa, Homo sapiens
CAIITTAAGERSIDYW

SEQ ID NO: 20354 - protein, 26 aa, Homo sapiens
CASHRQGRGYCTGTSCYMAPDRFDPW

SEQ ID NO: 20355 - protein, 28 aa, Homo sapiens
CARDIHVPLGDSSGYSTETYYYYGMDVW

SEQ ID NO: 20356 - protein, 16 aa, Homo sapiens
CGKSFFAGGRHYIDYW

SEQ ID NO: 20357 - protein, 22 aa, Homo sapiens
CAKDWWGTPAGDYYYYYGMDVW

SEQ ID NO: 20358 - protein, 17 aa, Homo sapiens
CVRHSYDSSSYFSFDYW

SEQ ID NO: 20359 - protein, 10 aa, Homo sapiens
CMQGINLQTF

SEQ ID NO: 20360 - protein, 18 aa, Homo sapiens
CATELGNGDYGFDAFDIW

SEQ ID NO: 20361 - protein, 18 aa, Homo sapiens
CASRHWGSGGLSFYFRNW

SEQ ID NO: 20362 - protein, 15 aa, Homo sapiens
CARDWTLRGSYYDYW

SEQ ID NO: 20363 - protein, 12 aa, Homo sapiens
CARDQDQWPDYW

SEQ ID NO: 20364 - protein, 19 aa, Homo sapiens
CARTYYDFLWGSYRYFDFW

SEQ ID NO: 20365 - protein, 12 aa, Homo sapiens
CQQSNSTRIYTF

SEQ ID NO: 20366 - protein, 21 aa, Homo sapiens
CAKDLRSAWFGDFVPQAPDYW

SEQ ID NO: 20367 - protein, 16 aa, Homo sapiens
CARSFSNSWFTWFDPW

SEQ ID NO: 20368 - protein, 22 aa, Homo sapiens
CASQYYYDSSGYFRPNWYFDLW

SEQ ID NO: 20369 - protein, 19 aa, Homo sapiens
CAKPGGPYYDSSGYYFGYW

SEQ ID NO: 20370 - protein, 12 aa, Homo sapiens
CVAPRWLQFDYW

SEQ ID NO: 20371 - protein, 20 aa, Homo sapiens
CAKDHLALNGEYYYYGMDVW

SEQ ID NO: 20372 - protein, 12 aa, Homo sapiens
CQSADSNGSSLF

SEQ ID NO: 20373 - protein, 18 aa, Homo sapiens
CARSVLGYGDYSDYFDYW

SEQ ID NO: 20374 - protein, 22 aa, Homo sapiens
CARGSPYNWNDAGGYYYGMDVW

SEQ ID NO: 20375 - protein, 26 aa, Homo sapiens
CARDIVHYDILTGYYFAVYSDAFDIW

SEQ ID NO: 20376 - protein, 22 aa, Homo sapiens
CARDMVATTAGASYYYYGMDVW

SEQ ID NO: 20377 - protein, 21 aa, Homo sapiens
CARERGSSASDIYYYYGMDVW

SEQ ID NO: 20378 - protein, 15 aa, Homo sapiens
CARDRGTKNWYLDYW

SEQ ID NO: 20379 - protein, 15 aa, Homo sapiens
CARESGGSWSVFDIW

SEQ ID NO: 20380 - protein, 23 aa, Homo sapiens
CARDLATPLTSPDYYYYYGMDVW

SEQ ID NO: 20381 - protein, 20 aa, Homo sapiens
CARDPREWLRISSGGYFDYW

SEQ ID NO: 20382 - protein, 15 aa, Homo sapiens
CARDFAYSYGYYGYW

SEQ ID NO: 20383 - protein, 13 aa, Homo sapiens
CARLSGAWSFDLW

SEQ ID NO: 20384 - protein, 26 aa, Homo sapiens
CARGYPRRPRVDGVSPIKTNHWFDPW

SEQ ID NO: 20385 - protein, 13 aa, Homo sapiens
CQSADGSGAFALF

SEQ ID NO: 20386 - protein, 21 aa, Homo sapiens
CARDSTSNIVVVVAADWFDPW

SEQ ID NO: 20387 - protein, 22 aa, Homo sapiens
CARALSDGTASHWDPNYFFDLW

SEQ ID NO: 20388 - protein, 17 aa, Homo sapiens
CAKVGYDDIWVDAFDIW

SEQ ID NO: 20389 - protein, 24 aa, Homo sapiens
CAKDMGPQPYGSVLNYYYYGMDVW

SEQ ID NO: 20390 - protein, 15 aa, Homo sapiens
CASSQLLWFGEFVYW

SEQ ID NO: 20391 - protein, 23 aa, Homo sapiens
CATEEYQLLSQAVYYYYYGMDVW

SEQ ID NO: 20392 - protein, 16 aa, Homo sapiens
CARDYRIAVADPLDYW

SEQ ID NO: 20393 - protein, 17 aa, Homo sapiens
CAGSTPHHYYYYGMDVW

SEQ ID NO: 20394 - protein, 19 aa, Homo sapiens
CARDPETLTSYSSSWFDPW

SEQ ID NO: 20395 - protein, 15 aa, Homo sapiens
CARTDSSGWFFFDNW

SEQ ID NO: 20396 - protein, 29 aa, Homo sapiens
CAKDAYIAPRDVCSSTSCPGSYYYGMDVW

SEQ ID NO: 20397 - protein, 13 aa, Homo sapiens
CQSTDTSGTNVLF

SEQ ID NO: 20398 - protein, 22 aa, Homo sapiens
CAKLPRLSSGGQHCGRDCFDHW

SEQ ID NO: 20399 - protein, 16 aa, Homo sapiens
CAKGTVTLVPLWFDPW

SEQ ID NO: 20400 - protein, 27 aa, Homo sapiens
CARDGYVGSGSFDPTVDSYYYYGMDVW

SEQ ID NO: 20401 - protein, 24 aa, Homo sapiens
CAKHGYFSDSSGYYYDYYYGMDVW

SEQ ID NO: 20402 - protein, 13 aa, Homo sapiens
CAHKGLYWYFDVW

SEQ ID NO: 20403 - protein, 14 aa, Homo sapiens
CQKYNSAPLDCCTF

SEQ ID NO: 20404 - protein, 19 aa, Homo sapiens
CARGRGYSYGYRTDAFDIW

SEQ ID NO: 20405 - protein, 20 aa, Homo sapiens
CARFLRGYSGYDPDDYFDYW

SEQ ID NO: 20406 - protein, 20 aa, Homo sapiens
CARGGYSSGWYGHNNWFDPW

SEQ ID NO: 20407 - protein, 16 aa, Homo sapiens
CARDRGSYYRGARDYW

SEQ ID NO: 20408 - protein, 18 aa, Homo sapiens
CARGPPESSGPTDWFDPW

SEQ ID NO: 20409 - protein, 26 aa, Homo sapiens
CARDTTIVVVPAATQGEGYYYGMDVW

SEQ ID NO: 20410 - protein, 11 aa, Homo sapiens
CQHYNKWPSSF

SEQ ID NO: 20411 - protein, 12 aa, Homo sapiens
CQQLSSYPPIAF

SEQ ID NO: 20412 - protein, 18 aa, Homo sapiens
CAKDLGSGAYGQYYFDYW

SEQ ID NO: 20413 - protein, 22 aa, Homo sapiens
CAKDVRYGDYEKAYYYYGMDVW

SEQ ID NO: 20414 - protein, 22 aa, Homo sapiens
CARDMKYYDTGSYLGVDTFDIW

SEQ ID NO: 20415 - protein, 18 aa, Homo sapiens
CAFDILTGYYGVYYFDYW

SEQ ID NO: 20416 - protein, 24 aa, Homo sapiens
CAREGYCSGGSCSHYYYYYAMDVW

SEQ ID NO: 20417 - protein, 20 aa, Homo sapiens
CARGVEAPVGYYYFFGMDVW

SEQ ID NO: 20418 - protein, 21 aa, Homo sapiens
CAAERMSLVRGIITPPSFDYW

SEQ ID NO: 20419 - protein, 14 aa, Homo sapiens
CTTDRWFGEFTDYW

SEQ ID NO: 20420 - protein, 17 aa, Homo sapiens
CAKDRSANDYGDDFDYW

SEQ ID NO: 20421 - protein, 20 aa, Homo sapiens
CAKSHSSGYYLIPSWSFDYW

SEQ ID NO: 20422 - protein, 19 aa, Homo sapiens
CGSLPDSRGYYYSYDMDVW

SEQ ID NO: 20423 - protein, 24 aa, Homo sapiens
CAKDVLMVRGVITNNYYYYGMDVW

SEQ ID NO: 20424 - protein, 13 aa, Homo sapiens
CYSYTSRSTLRLF

SEQ ID NO: 20425 - protein, 21 aa, Homo sapiens
CARDALNIAEDGTGVEGFDIW

SEQ ID NO: 20426 - protein, 17 aa, Homo sapiens
CAKAQRPTGTTSGFDYW

SEQ ID NO: 20427 - protein, 20 aa, Homo sapiens
CATLGRITMVRGAHSAIDYW

SEQ ID NO: 20428 - protein, 20 aa, Homo sapiens
CAKDWVEIGSSRFSDGMDVW

SEQ ID NO: 20429 - protein, 17 aa, Homo sapiens
CARGPLPQIWNDPFDYW

SEQ ID NO: 20430 - protein, 17 aa, Homo sapiens
CARGYSSRWSWDFFDYW

SEQ ID NO: 20431 - protein, 18 aa, Homo sapiens
CARDVHYYGSGISTHDYW

SEQ ID NO: 20432 - protein, 17 aa, Homo sapiens
CAKLFGPALTTEAFDIW

SEQ ID NO: 20433 - protein, 16 aa, Homo sapiens
CARGGIAAADPEFDIW

SEQ ID NO: 20434 - protein, 15 aa, Homo sapiens
CARDHPLLLSSFDYW

SEQ ID NO: 20435 - protein, 15 aa, Homo sapiens
CASQGGRGHEPLDYW

SEQ ID NO: 20436 - protein, 22 aa, Homo sapiens
CARDRGDLGELLHYYYYDMDVW

SEQ ID NO: 20437 - protein, 11 aa, Homo sapiens
CQQYYDFKSTF

SEQ ID NO: 20438 - protein, 20 aa, Homo sapiens
CARLTGSGWYAGGNNWFDPW

SEQ ID NO: 20439 - protein, 22 aa, Homo sapiens
CAKDRGDYYDSSGQGGYYFDYW

SEQ ID NO: 20440 - protein, 29 aa, Homo sapiens
CARHLRVYYYDSSGYSISKGYYYYGMDVW

SEQ ID NO: 20441 - protein, 23 aa, Homo sapiens
CARDSITMVRGGEYYYYYGMDVW

SEQ ID NO: 20442 - protein, 15 aa, Homo sapiens
CARDRYNYGYYFDYW

SEQ ID NO: 20443 - protein, 25 aa, Homo sapiens
CARDRSISSVTPEGEAYYYYGMDVW

SEQ ID NO: 20444 - protein, 12 aa, Homo sapiens
CMQSIQLPPCSF

SEQ ID NO: 20445 - protein, 12 aa, Homo sapiens
CQQFDSHSPHSF

SEQ ID NO: 20446 - protein, 21 aa, Homo sapiens
CARDGDSSGSQYYYYYGMDVW

SEQ ID NO: 20447 - protein, 19 aa, Homo sapiens
CARGPPSSSWYGRAGFDYW

SEQ ID NO: 20448 - protein, 18 aa, Homo sapiens
CAKLTVLEPANYDAFDMW

SEQ ID NO: 20449 - protein, 16 aa, Homo sapiens
CVRENSIPGGHYFDYW

SEQ ID NO: 20450 - protein, 16 aa, Homo sapiens
CTRDDRWFGELYSDYW

SEQ ID NO: 20451 - protein, 16 aa, Homo sapiens
CARVSGGNVGNYFDPW

SEQ ID NO: 20452 - protein, 18 aa, Homo sapiens
CARVRGSGWNVIFYFDVW

SEQ ID NO: 20453 - protein, 15 aa, Homo sapiens
CASDPDSSALSNDYW

SEQ ID NO: 20454 - protein, 17 aa, Homo sapiens
CVKDAFDYGDYTYFDYW

SEQ ID NO: 20455 - protein, 21 aa, Homo sapiens
CARDIIWFGESNYYYYGMDVW

SEQ ID NO: 20456 - protein, 17 aa, Homo sapiens
CARGDLLRGGNNWFHPW

SEQ ID NO: 20457 - protein, 14 aa, Homo sapiens
CARWFGELLPPDYW

SEQ ID NO: 20458 - protein, 20 aa, Homo sapiens
CAREDWLRWDRGYYYGMDVW

SEQ ID NO: 20459 - protein, 20 aa, Homo sapiens
CARHVYDILTGYSHAYFDYW

SEQ ID NO: 20460 - protein, 30 aa, Homo sapiens
CALPISAVYYCARDRIDSSGYYQYYGMDVW

SEQ ID NO: 20461 - protein, 19 aa, Homo sapiens
CVRGSHYYASSGPYYFDSW

SEQ ID NO: 20462 - protein, 15 aa, Homo sapiens
CARQSELSHWYFDLW

SEQ ID NO: 20463 - protein, 22 aa, Homo sapiens
CARGGWVTMVRGVIINNWFDPW

SEQ ID NO: 20464 - protein, 16 aa, Homo sapiens
CAKPNAIASPGFFDYW

SEQ ID NO: 20465 - protein, 21 aa, Homo sapiens
CARARESPFRGYSYGLHFDYW

SEQ ID NO: 20466 - protein, 17 aa, Homo sapiens
CARTYTLIAAADHFDYW

SEQ ID NO: 20467 - protein, 24 aa, Homo sapiens
CAKDVMITFGGVRSYYYYYGMDVW

SEQ ID NO: 20468 - protein, 21 aa, Homo sapiens
CAKDHPDYGGNSYYYYGMDVW

SEQ ID NO: 20469 - protein, 22 aa, Homo sapiens
CAKRLMVRGAASSIPNWYFDLW

SEQ ID NO: 20470 - protein, 18 aa, Homo sapiens
CAKDVVATILWGYYFDYW

SEQ ID NO: 20471 - protein, 17 aa, Homo sapiens
CATMFAYSRSHLYFDYW

SEQ ID NO: 20472 - protein, 20 aa, Homo sapiens
CARNYDILTGYYRPDAFDIW

SEQ ID NO: 20473 - protein, 17 aa, Homo sapiens
CARFPYDLDNGPRFDCW

SEQ ID NO: 20474 - protein, 23 aa, Homo sapiens
CARDGPLYSGYEAYYYYYGMDVW

SEQ ID NO: 20475 - protein, 19 aa, Homo sapiens
CAKDLRSLAEYYYYGMDVW

SEQ ID NO: 20476 - protein, 20 aa, Homo sapiens
CARGGWKNYDILTYNWFDPW

SEQ ID NO: 20477 - protein, 21 aa, Homo sapiens
CARGFPHYYIGSGHFYYFDYW

SEQ ID NO: 20478 - protein, 24 aa, Homo sapiens
CARDRENCSSTSCSSYYYYGMDVW

SEQ ID NO: 20479 - protein, 11 aa, Homo sapiens
CARVRHWFDPW

SEQ ID NO: 20480 - protein, 24 aa, Homo sapiens
CARDLAAAGTALSPSYYYYGMDVW

SEQ ID NO: 20481 - protein, 27 aa, Homo sapiens
CARDVLYPNYLTSPTKTVYYYYGMDVW

SEQ ID NO: 20482 - protein, 25 aa, Homo sapiens
CARLDPGRLHYGSGSYYNEYYFDYW

SEQ ID NO: 20483 - protein, 20 aa, Homo sapiens
CAKDKTGYSSGWSKDAFDIW

SEQ ID NO: 20484 - protein, 20 aa, Homo sapiens
CARETLVPAANYYYYGMDVW

SEQ ID NO: 20485 - protein, 17 aa, Homo sapiens
CARENDYGDYAGALDIW

SEQ ID NO: 20486 - protein, 14 aa, Homo sapiens
CARHTEIATFFDSW

SEQ ID NO: 20487 - protein, 14 aa, Homo sapiens
CSVRGFTYSHFDYW

SEQ ID NO: 20488 - protein, 21 aa, Homo sapiens
CAKDLMTTKYGWSTLRVFDVW

SEQ ID NO: 20489 - protein, 16 aa, Homo sapiens
CTKTYLSGTVNWFGPW

SEQ ID NO: 20490 - protein, 14 aa, Homo sapiens
CARDTKNRGRFDYW

SEQ ID NO: 20491 - protein, 15 aa, Homo sapiens
CARQRFVDRSGFDPW

SEQ ID NO: 20492 - protein, 28 aa, Homo sapiens
CARDGSPFDVWFGELLSPYYYYYGMDVW

SEQ ID NO: 20493 - protein, 19 aa, Homo sapiens
CARVTMVRGVMQHYWFDPW

SEQ ID NO: 20494 - protein, 21 aa, Homo sapiens
CARGHYSGSSPYYYYYGMDVW

SEQ ID NO: 20495 - protein, 14 aa, Homo sapiens
CARVFETLGLVDYW

SEQ ID NO: 20496 - protein, 14 aa, Homo sapiens
CARQGDTVAPFDYW

SEQ ID NO: 20497 - protein, 15 aa, Homo sapiens
CAREQQLVPNWFDPW

SEQ ID NO: 20498 - protein, 20 aa, Homo sapiens
CAKDRLRYSSGSGYNWFDPW

SEQ ID NO: 20499 - protein, 16 aa, Homo sapiens
CASDLEVGATHCFGYW

SEQ ID NO: 20500 - protein, 19 aa, Homo sapiens
CARGEGEGDSPYYYGMDVW

SEQ ID NO: 20501 - protein, 20 aa, Homo sapiens
CARDTEQVGDYLYYYGMDVW

SEQ ID NO: 20502 - protein, 19 aa, Homo sapiens
CAKDYVVVTHYYYYGMDVW

SEQ ID NO: 20503 - protein, 17 aa, Homo sapiens
CAKDGDSGGNLAHFDSW

SEQ ID NO: 20504 - protein, 16 aa, Homo sapiens
CAKDDSSSWPTLFDPW

SEQ ID NO: 20505 - protein, 14 aa, Homo sapiens
CARISGWSFLFDYW

SEQ ID NO: 20506 - protein, 19 aa, Homo sapiens
CAKGASIAVAGLVWGVDYW

SEQ ID NO: 20507 - protein, 17 aa, Homo sapiens
CTRAAPSSTRYWYFDLW

SEQ ID NO: 20508 - protein, 22 aa, Homo sapiens
CARGERDCSNGRCSGDWHFDLW

SEQ ID NO: 20509 - protein, 14 aa, Homo sapiens
CNSRDNSGHHLAVF

SEQ ID NO: 20510 - protein, 17 aa, Homo sapiens
CAKGIGRAVAGTQFDSW

SEQ ID NO: 20511 - protein, 20 aa, Homo sapiens
CAKDWVTTGQNYYYYGMDVW

SEQ ID NO: 20512 - protein, 12 aa, Homo sapiens
CQQADNFPPIIF

SEQ ID NO: 20513 - protein, 21 aa, Homo sapiens
CAKDIGPYDYVWGSWYYFDYW

SEQ ID NO: 20514 - protein, 15 aa, Homo sapiens
CAREMADTVLDFDYW

SEQ ID NO: 20515 - protein, 16 aa, Homo sapiens
CARDPTPAAGGYFDYW

SEQ ID NO: 20516 - protein, 19 aa, Homo sapiens
CACSYYYDNSGYWDGMDVW

SEQ ID NO: 20517 - protein, 16 aa, Homo sapiens
CAKVRGSFGDLNFDYW

SEQ ID NO: 20518 - protein, 19 aa, Homo sapiens
CARDRLFGSYGYFSDFDYW

SEQ ID NO: 20519 - protein, 17 aa, Homo sapiens
CARDELGELARIPFDSW

SEQ ID NO: 20520 - protein, 17 aa, Homo sapiens
CAKDMGCSGGSCPFDYW

SEQ ID NO: 20521 - protein, 20 aa, Homo sapiens
CARVPHYYDSSGPRGGIDYW

SEQ ID NO: 20522 - protein, 19 aa, Homo sapiens
CARAGLGGNLYYYYGMDVW

SEQ ID NO: 20523 - protein, 15 aa, Homo sapiens
CVKDWDTRSDYFDYW

SEQ ID NO: 20524 - protein, 18 aa, Homo sapiens
CAKDGGGGGSYGDAFDIW

SEQ ID NO: 20525 - protein, 18 aa, Homo sapiens
CARHSLRGGNPHDAFDIW

SEQ ID NO: 20526 - protein, 22 aa, Homo sapiens
CARDILYLASVAHYYYYGMDVW

SEQ ID NO: 20527 - protein, 21 aa, Homo sapiens
CARTVTYYYGSGSYFSYFDYW

SEQ ID NO: 20528 - protein, 16 aa, Homo sapiens
CARHKTIVADDAFDIW

SEQ ID NO: 20529 - protein, 17 aa, Homo sapiens
CAKFQRAHDYGDNFDYW

SEQ ID NO: 20530 - protein, 11 aa, Homo sapiens
CLQTFTTPWTF

SEQ ID NO: 20531 - protein, 14 aa, Homo sapiens
CARDSRIQLGLDYW

SEQ ID NO: 20532 - protein, 22 aa, Homo sapiens
CARDLLAYGVNSSYYYYGMDVW

SEQ ID NO: 20533 - protein, 12 aa, Homo sapiens
CMQGLHLPPDMF

SEQ ID NO: 20534 - protein, 17 aa, Homo sapiens
CVRDDDTNSQYSRFDFW

SEQ ID NO: 20535 - protein, 20 aa, Homo sapiens
CARDGQGVSSYYYYYGMDVW

SEQ ID NO: 20536 - protein, 26 aa, Homo sapiens
CARDLAYYDSSGSQTRAYYYYGMDVW

SEQ ID NO: 20537 - protein, 19 aa, Homo sapiens
CAKGLGYNPFYYYFGMDVW

SEQ ID NO: 20538 - protein, 21 aa, Homo sapiens
CARGVVATISADELWSYFDYW

SEQ ID NO: 20539 - protein, 23 aa, Homo sapiens
CATSLAVAPRNSRWYYYYGMDVW

SEQ ID NO: 20540 - protein, 16 aa, Homo sapiens
CARPSSGSYSSWFDPW

SEQ ID NO: 20541 - protein, 19 aa, Homo sapiens
CARDYDIVVVPAAMGFDPW

SEQ ID NO: 20542 - protein, 23 aa, Homo sapiens
CALATPYYDILTGYYQKYYFDYW

SEQ ID NO: 20543 - protein, 20 aa, Homo sapiens
CAKDHYSYGEIYYYYGMDVW

SEQ ID NO: 20544 - protein, 17 aa, Homo sapiens
CARRPLEYSALYYFDFW

SEQ ID NO: 20545 - protein, 19 aa, Homo sapiens
CARGSAVGYSYGYRAFDIW

SEQ ID NO: 20546 - protein, 16 aa, Homo sapiens
CAHRTGSSWYLAFDIW

SEQ ID NO: 20547 - protein, 30 aa, Homo sapiens
CAREYWTQPPKTMVRGVIPPAYYYYGMDVW

SEQ ID NO: 20548 - protein, 17 aa, Homo sapiens
CARSVWGGSGREWFDPW

SEQ ID NO: 20549 - protein, 16 aa, Homo sapiens
CARTRGTGPYGHGDYW

SEQ ID NO: 20550 - protein, 14 aa, Homo sapiens
CARRSVSWYNFDYW

SEQ ID NO: 20551 - protein, 23 aa, Homo sapiens
CARTPRPKLRIQLWLRVDYFDYW

SEQ ID NO: 20552 - protein, 18 aa, Homo sapiens
CARSYYYGSGSPERFDYW

SEQ ID NO: 20553 - protein, 18 aa, Homo sapiens
CARDGGTMVRGVTWFDPW

SEQ ID NO: 20554 - protein, 21 aa, Homo sapiens
CARELAAAGNPTYYYYGMDVW

SEQ ID NO: 20555 - protein, 15 aa, Homo sapiens
CARVFRDAYTLFDYW

SEQ ID NO: 20556 - protein, 28 aa, Homo sapiens
CARGARDTAMDPGSAAPLHYYYYGMDVW

SEQ ID NO: 20557 - protein, 22 aa, Homo sapiens
CARHRYYYGSGSDYKENWFDTW

SEQ ID NO: 20558 - protein, 26 aa, Homo sapiens
CARDGLRYDILTGYYPLYYYYGMDVW

SEQ ID NO: 20559 - protein, 20 aa, Homo sapiens
CARDAGKGVTPYYYYGMDVW

SEQ ID NO: 20560 - protein, 17 aa, Homo sapiens
CARVRSSGWYGPEFDPW

SEQ ID NO: 20561 - protein, 21 aa, Homo sapiens
CAKRPKGYSYDTSGYYYFDYW

SEQ ID NO: 20562 - protein, 13 aa, Homo sapiens
CAKDPPYSRFDYW

SEQ ID NO: 20563 - protein, 16 aa, Homo sapiens
CAKSYSSNWPGYFDSW

SEQ ID NO: 20564 - protein, 16 aa, Homo sapiens
CAKGPWDPREPKFDNW

SEQ ID NO: 20565 - protein, 14 aa, Homo sapiens
CAKEDYVDNYFDSW

SEQ ID NO: 20566 - protein, 15 aa, Homo sapiens
CARRRSSGYSPFDYW

SEQ ID NO: 20567 - protein, 18 aa, Homo sapiens
CAKPPNGYYGPANAFDSW

SEQ ID NO: 20568 - protein, 15 aa, Homo sapiens
CAKDVISSGWYFDYW

SEQ ID NO: 20569 - protein, 21 aa, Homo sapiens
CARDVTPSAAGSYYYYGMDVW

SEQ ID NO: 20570 - protein, 15 aa, Homo sapiens
CARLGSGSYPQLDYW

SEQ ID NO: 20571 - protein, 26 aa, Homo sapiens
CAKESHPESRLLRRRAAAGRGWLDYW

SEQ ID NO: 20572 - protein, 36 aa, Homo sapiens
CALPISATYYCARANPLEGVWGGWPFRERRNSFDIW

SEQ ID NO: 20573 - protein, 16 aa, Homo sapiens
CARHLREKDSNRFDPW

SEQ ID NO: 20574 - protein, 12 aa, Homo sapiens
CARGWSYTADYW

SEQ ID NO: 20575 - protein, 17 aa, Homo sapiens
CARDGDRVRDGSYFDLW

SEQ ID NO: 20576 - protein, 20 aa, Homo sapiens
CARVMVVASSPYYYFGMDVW

SEQ ID NO: 20577 - protein, 21 aa, Homo sapiens
CARERNADGSESYFTDAFDVW

SEQ ID NO: 20578 - protein, 14 aa, Homo sapiens
CARDLRVAGSFDVW

SEQ ID NO: 20579 - protein, 15 aa, Homo sapiens
CAKGLLEVVTALDYW

SEQ ID NO: 20580 - protein, 15 aa, Homo sapiens
CVRSRTFYGSRADYW

SEQ ID NO: 20581 - protein, 17 aa, Homo sapiens
CARTGGLWFGEFRFDYW

SEQ ID NO: 20582 - protein, 18 aa, Homo sapiens
CAREFLDSSSWFNGFDYW

SEQ ID NO: 20583 - protein, 14 aa, Homo sapiens
CQQDYNLPPRSYSF

SEQ ID NO: 20584 - protein, 24 aa, Homo sapiens
CTRALESGGGWLQPTYYYYGMDVW

SEQ ID NO: 20585 - protein, 26 aa, Homo sapiens
CLRAEDTALYYCASSLAVKQYYFDYW

SEQ ID NO: 20586 - protein, 13 aa, Homo sapiens
CQQYNSYLGTWTF

SEQ ID NO: 20587 - protein, 14 aa, Homo sapiens
CARSKWLRGHFDYW

SEQ ID NO: 20588 - protein, 24 aa, Homo sapiens
CAKDLTTVVTPDGTYYYYYGMDVW

SEQ ID NO: 20589 - protein, 21 aa, Homo sapiens
CAILFRGTTVAGSRRFGFDPW

SEQ ID NO: 20590 - protein, 16 aa, Homo sapiens
CARILGTGYDSDFDYW

SEQ ID NO: 20591 - protein, 22 aa, Homo sapiens
CARDADPNVDIVATITTWFDPW

SEQ ID NO: 20592 - protein, 15 aa, Homo sapiens
CARILAVAFDASDIW

SEQ ID NO: 20593 - protein, 22 aa, Homo sapiens
CARLSTTSVRNVLMVGGYFDYW

SEQ ID NO: 20594 - protein, 19 aa, Homo sapiens
CAREADSGSSWYGGWFDPW

SEQ ID NO: 20595 - protein, 15 aa, Homo sapiens
CVHRQAEFEDAFDIW

SEQ ID NO: 20596 - protein, 20 aa, Homo sapiens
CARGEGALVRGEIANWLDPW

SEQ ID NO: 20597 - protein, 20 aa, Homo sapiens
CARDSVEMATTNYYYGMDVW

SEQ ID NO: 20598 - protein, 17 aa, Homo sapiens
CARALSRWELSDAFDMW

SEQ ID NO: 20599 - protein, 21 aa, Homo sapiens
CARDSIAAAGGENYYYGMDVW

SEQ ID NO: 20600 - protein, 14 aa, Homo sapiens
CARGWVGTHWVDPW

SEQ ID NO: 20601 - protein, 20 aa, Homo sapiens
CARSYCSSTSCYGYWYFDLW

SEQ ID NO: 20602 - protein, 17 aa, Homo sapiens
CATGPVVGATISWFDPW

SEQ ID NO: 20603 - protein, 17 aa, Homo sapiens
CAIVGVDTTTRGGFDYW

SEQ ID NO: 20604 - protein, 14 aa, Homo sapiens
CARKHISSWHPDYW

SEQ ID NO: 20605 - protein, 14 aa, Homo sapiens
CARGGYGDYSIDYW

SEQ ID NO: 20606 - protein, 14 aa, Homo sapiens
CAREAGYSYVGDYW

SEQ ID NO: 20607 - protein, 11 aa, Homo sapiens [sequence omitted]

SEQ ID NO: 20608 - protein, 15 aa, Homo sapiens [sequence omitted]

SEQ ID NO: 20609 - protein, 16 aa, Homo sapiens
CARSWNLFSGSKFDYW

SEQ ID NO: 20610 - protein, 16 aa, Homo sapiens
CAREDSSSWSTPVDYW

SEQ ID NO: 20611 - protein, 21 aa, Homo sapiens
CVRDRRGYSDGSYYYYGMDVW

SEQ ID NO: 20612 - protein, 21 aa, Homo sapiens
CARGDIIEDDYGDDPGAFDIW

SEQ ID NO: 20613 - protein, 15 aa, Homo sapiens
CAKGGSSWSFNFDYW

SEQ ID NO: 20614 - protein, 17 aa, Homo sapiens
CARAYYGDYVGTAFDIW

SEQ ID NO: 20615 - protein, 21 aa, Homo sapiens
CHRPRRADSSGDYRDDAFDIW

SEQ ID NO: 20616 - protein, 15 aa, Homo sapiens
CSRLDYGPPYYFDLW

SEQ ID NO: 20617 - protein, 16 aa, Homo sapiens
CAKRAYLTGGGSFDIW

SEQ ID NO: 20618 - protein, 20 aa, Homo sapiens
CARVLGSSGQLIYTDAFDIW

SEQ ID NO: 20619 - protein, 14 aa, Homo sapiens
CTRLDATLHQFDPW

SEQ ID NO: 20620 - protein, 17 aa, Homo sapiens
CAKGIAQGTRGISFDVW

SEQ ID NO: 20621 - protein, 14 aa, Homo sapiens
CMHALQTSITFVTF

SEQ ID NO: 20622 - protein, 23 aa, Homo sapiens
CAKEKGSYNWNDWYYYYYGMDVW

SEQ ID NO: 20623 - protein, 15 aa, Homo sapiens
CASSLIAVADEFDYW

SEQ ID NO: 20624 - protein, 22 aa, Homo sapiens
CARGYYYDSSGPIGGVYYFDYW

SEQ ID NO: 20625 - protein, 24 aa, Homo sapiens
CATDLNGSGSYLRHYYYYYGMDVW

SEQ ID NO: 20626 - protein, 22 aa, Homo sapiens
CAKTYYYDSSGYRHYYYGMDVW

SEQ ID NO: 20627 - protein, 18 aa, Homo sapiens
CAKDPVGATRGPNWFDPW

SEQ ID NO: 20628 - protein, 19 aa, Homo sapiens
CAKVRVEMSTIWDYYFDYW

SEQ ID NO: 20629 - protein, 24 aa, Homo sapiens
CARVFVWDIVVVAPLPGYDYFDYW

SEQ ID NO: 20630 - protein, 16 aa, Homo sapiens
CAHKLYTSSWLLFDYW

SEQ ID NO: 20631 - protein, 17 aa, Homo sapiens
CARDKLQLPLDDAFDIW

SEQ ID NO: 20632 - protein, 20 aa, Homo sapiens
CATASYDYVLLGWGRDFDYW

SEQ ID NO: 20633 - protein, 20 aa, Homo sapiens
CARGITMVREAYYYYGMDVW

SEQ ID NO: 20634 - protein, 18 aa, Homo sapiens
CARHRDYGGNKNWYFDLW

SEQ ID NO: 20635 - protein, 13 aa, Homo sapiens
CAPLLVGTTEDYW

SEQ ID NO: 20636 - protein, 16 aa, Homo sapiens
CAHIVSSAYYSYFHHW

SEQ ID NO: 20637 - protein, 16 aa, Homo sapiens
CAHRLLLWANNWFDPW

SEQ ID NO: 20638 - protein, 14 aa, Homo sapiens
CVREGRNGYYSDYW

SEQ ID NO: 20639 - protein, 18 aa, Homo sapiens
CAKDSLAMTTVTTYFDYW

SEQ ID NO: 20640 - protein, 22 aa, Homo sapiens
CAREGGYGSGGSCYSRWYFDLW

SEQ ID NO: 20641 - protein, 18 aa, Homo sapiens
CAREWGGYSYADDAFDIW

SEQ ID NO: 20642 - protein, 17 aa, Homo sapiens
CARGVGHASGFQGFDSW

SEQ ID NO: 20643 - protein, 16 aa, Homo sapiens
CARWDTAMGNSGFDYW

SEQ ID NO: 20644 - protein, 16 aa, Homo sapiens
CARLGVWGSHRYLVYW

SEQ ID NO: 20645 - protein, 18 aa, Homo sapiens
CARTLSGYAYYYYGMDVW

SEQ ID NO: 20646 - protein, 18 aa, Homo sapiens
CARWGSGAAAGTEYRDYW

SEQ ID NO: 20647 - protein, 16 aa, Homo sapiens
CAHRSSSWSGGGFDYW

SEQ ID NO: 20648 - protein, 12 aa, Homo sapiens
CARDQNTAFDIW

SEQ ID NO: 20649 - protein, 23 aa, Homo sapiens
CARESPGYYCSGGSCHGNWFDPW

SEQ ID NO: 20650 - protein, 16 aa, Homo sapiens
CARLSGPTTSDAFDIW

SEQ ID NO: 20651 - protein, 23 aa, Homo sapiens
CAKDSRIAVAGTITYYYYGMDVW

SEQ ID NO: 20652 - protein, 17 aa, Homo sapiens
CAREFLTATGKGPFDYW

SEQ ID NO: 20653 - protein, 17 aa, Homo sapiens
CAKALRAAGTGIGYDYW

SEQ ID NO: 20654 - protein, 11 aa, Homo sapiens
CARGLDAFDVW

SEQ ID NO: 20655 - protein, 21 aa, Homo sapiens
CARGPCSGWYFPTYYYGMDVW

SEQ ID NO: 20656 - protein, 14 aa, Homo sapiens
CAGLRVTTLEFDPW

SEQ ID NO: 20657 - protein, 18 aa, Homo sapiens
CAKDFLPDIVTTSGVDYW

SEQ ID NO: 20658 - protein, 20 aa, Homo sapiens
CARWWGDDYVWGSYRYFDYW

SEQ ID NO: 20659 - protein, 17 aa, Homo sapiens
CAKSRDIGYDLNYFDYW

SEQ ID NO: 20660 - protein, 17 aa, Homo sapiens
CAKDIGGSGTYYTFDNW

SEQ ID NO: 20661 - protein, 15 aa, Homo sapiens
CALEGGVDAEYFQYW

SEQ ID NO: 20662 - protein, 20 aa, Homo sapiens
CARQPGPLASRYTSGWLDSW

SEQ ID NO: 20663 - protein, 12 aa, Homo sapiens
CQSYDSSTHVIF

SEQ ID NO: 20664 - protein, 21 aa, Homo sapiens
CARKPSYSSGWYRFDWYFDLW

SEQ ID NO: 20665 - protein, 16 aa, Homo sapiens
CASGIGMIAKLGFDYW

SEQ ID NO: 20666 - protein, 14 aa, Homo sapiens
CARAGQQLVLSDYW

SEQ ID NO: 20667 - protein, 26 aa, Homo sapiens
CAREFGSGSYYNETFSFYYYYGMDVW

SEQ ID NO: 20668 - protein, 16 aa, Homo sapiens
CAKDFSTYYYDSIDYW

SEQ ID NO: 20669 - protein, 19 aa, Homo sapiens
CARDLPLYYYDDSAYFDYW

SEQ ID NO: 20670 - protein, 15 aa, Homo sapiens
CAKGSRAWYGGPDYW

SEQ ID NO: 20671 - protein, 21 aa, Homo sapiens
CARAAPDYYGSGSYSYPPDYW

SEQ ID NO: 20672 - protein, 14 aa, Homo sapiens
CARRGDATGGFDNW

SEQ ID NO: 20673 - protein, 24 aa, Homo sapiens
CARSGFTSNYDILTGYYAYYFDYW

SEQ ID NO: 20674 - protein, 22 aa, Homo sapiens
CARDQISTWNDEVHYYYGMDVW

SEQ ID NO: 20675 - protein, 25 aa, Homo sapiens
CARDIWAVAVAGTRDDYYYYGMDVW

SEQ ID NO: 20676 - protein, 20 aa, Homo sapiens
CARDSRVVLTGRYYYGMDVW

SEQ ID NO: 20677 - protein, 16 aa, Homo sapiens
CARGPLDGYNFNFDYW

SEQ ID NO: 20678 - protein, 25 aa, Homo sapiens
CAKDWQVVVAATTPGSYYYYGMDVW

SEQ ID NO: 20679 - protein, 19 aa, Homo sapiens
CARTYYDILTGLTSLFDYW

SEQ ID NO: 20680 - protein, 20 aa, Homo sapiens
CARTVWEAAAAPTPYYFDYW

SEQ ID NO: 20681 - protein, 17 aa, Homo sapiens
CVREGSLSSYYYAMDVW

SEQ ID NO: 20682 - protein, 19 aa, Homo sapiens
CARPNSSGFPGIYWYFDLW

SEQ ID NO: 20683 - protein, 17 aa, Homo sapiens
CARDLLSGCCGYGFDYW

SEQ ID NO: 20684 - protein, 22 aa, Homo sapiens
CARDLYEQQLVGAYYYYGMDVW

SEQ ID NO: 20685 - protein, 19 aa, Homo sapiens
CARDDSSGYQDPPYYFDYW

SEQ ID NO: 20686 - protein, 17 aa, Homo sapiens
CARDYGSGGYYVGFDYW

SEQ ID NO: 20687 - protein, 19 aa, Homo sapiens
CAKELWSGTDTPNYYFDYW

SEQ ID NO: 20688 - protein, 22 aa, Homo sapiens
CAKDWGGNWNDGGYYYYGMDVW

SEQ ID NO: 20689 - protein, 14 aa, Homo sapiens
CATGPDISLSFDYW

SEQ ID NO: 20690 - protein, 19 aa, Homo sapiens
CARETCFVGYSSSCPADYW

SEQ ID NO: 20691 - protein, 17 aa, Homo sapiens
CAKEGGLAAGGNHFDYW

SEQ ID NO: 20692 - protein, 16 aa, Homo sapiens
CARLDLLIYYYGMDVW

SEQ ID NO: 20693 - protein, 16 aa, Homo sapiens
CAKSGRVAATLYFDYW

SEQ ID NO: 20694 - protein, 21 aa, Homo sapiens
CAKDWYGSGSSQPYYYGMDVW

SEQ ID NO: 20695 - protein, 15 aa, Homo sapiens
CAATTVTTFQYFQHW

SEQ ID NO: 20696 - protein, 17 aa, Homo sapiens
CARQGEYYYGSGAFDYW

SEQ ID NO: 20697 - protein, 16 aa, Homo sapiens
CARETPDTSGSWVDYW

SEQ ID NO: 20698 - protein, 22 aa, Homo sapiens
CATVRYCSRTSCEAGADWFSPW

SEQ ID NO: 20699 - protein, 13 aa, Homo sapiens
CQQSYSGIFWWTF

SEQ ID NO: 20700 - protein, 18 aa, Homo sapiens
CARHAKEMATPLAAFDIW

SEQ ID NO: 20701 - protein, 17 aa, Homo sapiens
CAHRSYGGNGGYYFDYW

SEQ ID NO: 20702 - protein, 22 aa, Homo sapiens
CATGMIAVAGTIVLVPYYFDYW

SEQ ID NO: 20703 - protein, 15 aa, Homo sapiens
CARGPRGGYGHFDYW

SEQ ID NO: 20704 - protein, 22 aa, Homo sapiens
CAKEYSYGPSLIGYYYYGMDVW

SEQ ID NO: 20705 - protein, 20 aa, Homo sapiens
CARGGDIFQAVPATDSFDIW

SEQ ID NO: 20706 - protein, 19 aa, Homo sapiens
CARDNHPWTAYSSSWFDYW

SEQ ID NO: 20707 - protein, 18 aa, Homo sapiens
CARTRDYYGSDIYYFDYW

SEQ ID NO: 20708 - protein, 20 aa, Homo sapiens
CAKADFGYHYDSSGYYFDFW

SEQ ID NO: 20709 - protein, 22 aa, Homo sapiens
CARDSHFSGYDLGYYYYGMDVW

SEQ ID NO: 20710 - protein, 12 aa, Homo sapiens
CTTLSSSSIDYW

SEQ ID NO: 20711 - protein, 13 aa, Homo sapiens
CARDISSGYLDSW

SEQ ID NO: 20712 - protein, 22 aa, Homo sapiens
CARVREISVIRGIIIPSYFDYW

SEQ ID NO: 20713 - protein, 23 aa, Homo sapiens
CARDLHIVVVNTTYYYYYGMDVW

SEQ ID NO: 20714 - protein, 19 aa, Homo sapiens
CARDPVIAAAGSYWYFDLW

SEQ ID NO: 20715 - protein, 13 aa, Homo sapiens
CARVRTGNDYDYW

SEQ ID NO: 20716 - protein, 23 aa, Homo sapiens
CARDDTASAAAGTGYYYYGMDVW

SEQ ID NO: 20717 - protein, 22 aa, Homo sapiens
CARSSMREFPDLFSGEDYFDYW

SEQ ID NO: 20718 - protein, 17 aa, Homo sapiens
CAKSRSAVTTLDPLDYW

SEQ ID NO: 20719 - protein, 15 aa, Homo sapiens
CAKPLIWNEYYFHSW

SEQ ID NO: 20720 - protein, 22 aa, Homo sapiens
CARDYCGGDCYSGTTADAFDIW

SEQ ID NO: 20721 - protein, 21 aa, Homo sapiens
CAKDMYYYDSSGYYPPWFDPW

SEQ ID NO: 20722 - protein, 26 aa, Homo sapiens
CARDQLRYFDWLLQSDYYYYYGMDVW

SEQ ID NO: 20723 - protein, 16 aa, Homo sapiens
CAKDKFITVIGLFEYW

SEQ ID NO: 20724 - protein, 20 aa, Homo sapiens
CARVFGTMVRGVIIGYFDYW

SEQ ID NO: 20725 - protein, 13 aa, Homo sapiens
CSTWDNSLNALAF

SEQ ID NO: 20726 - protein, 19 aa, Homo sapiens
CARDPWGRGDYYYYGMDVW

SEQ ID NO: 20727 - protein, 14 aa, Homo sapiens
CARSAGRPNWFDPW

SEQ ID NO: 20728 - protein, 19 aa, Homo sapiens
CARAYFGGSYYYYYGMDVW

SEQ ID NO: 20729 - protein, 20 aa, Homo sapiens
CARHGPPSIYIGSYSAFDIW

SEQ ID NO: 20730 - protein, 21 aa, Homo sapiens
CARDATVTTSDYYYYYGMDVW

SEQ ID NO: 20731 - protein, 18 aa, Homo sapiens
CARASGVGWLQFEGFAYW

SEQ ID NO: 20732 - protein, 16 aa, Homo sapiens
CTTGDSGYDFKGFDYW

SEQ ID NO: 20733 - protein, 23 aa, Homo sapiens
CARDIFSRADNSAYFHYYGMDVW

SEQ ID NO: 20734 - protein, 13 aa, Homo sapiens
CARLTRQWFLDYW

SEQ ID NO: 20735 - protein, 13 aa, Homo sapiens
CSSNTSGHAFDIW

SEQ ID NO: 20736 - protein, 16 aa, Homo sapiens
CAKDRTQLWSPGFDYW

SEQ ID NO: 20737 - protein, 17 aa, Homo sapiens
CARQGGWYIGIGLFDYW

SEQ ID NO: 20738 - protein, 17 aa, Homo sapiens
CARQYASNWYSDYFDSW

SEQ ID NO: 20739 - protein, 22 aa, Homo sapiens
CARHLGYGSGSYYKRIANFDYW

SEQ ID NO: 20740 - protein, 16 aa, Homo sapiens [sequence omitted]

SEQ ID NO: 20741 - protein, 22 aa, Homo sapiens
CARDIYGDSPNDYYYYYGMDVW

SEQ ID NO: 20742 - protein, 26 aa, Homo sapiens
CARLNPLILGSGYYYGSVPKYYFDYW

SEQ ID NO: 20743 - protein, 13 aa, Homo sapiens
CARLLLLAAFDIW

SEQ ID NO: 20744 - protein, 20 aa, Homo sapiens
CAKDYKVVGANYYYYGMDVW

SEQ ID NO: 20745 - protein, 17 aa, Homo sapiens
CATSTPIRGVIPWFDPW

SEQ ID NO: 20746 - protein, 20 aa, Homo sapiens
CAKEDGDYGPDYYYYGMDVW

SEQ ID NO: 20747 - protein, 18 aa, Homo sapiens
CARAGWGDGYKIHAFDIW

SEQ ID NO: 20748 - protein, 16 aa, Homo sapiens
CARRLVATNVYYFDYW

SEQ ID NO: 20749 - protein, 19 aa, Homo sapiens
CAGLYGDYSSPYYYGMDVW

SEQ ID NO: 20750 - protein, 21 aa, Homo sapiens
CAKDAGYGDYLTPSMRPFDYW

SEQ ID NO: 20751 - protein, 11 aa, Homo sapiens
CAKGGSYLGYW

SEQ ID NO: 20752 - protein, 22 aa, Homo sapiens
CARLAWRSRAVGTAEGCFFDYW

SEQ ID NO: 20753 - protein, 16 aa, Homo sapiens
CSFGSGSYYYYALDVW

SEQ ID NO: 20754 - protein, 20 aa, Homo sapiens
CGRDRGYSGDNYGFDAFDVW

SEQ ID NO: 20755 - protein, 16 aa, Homo sapiens
CAHRDWEVSQDAFDMW

SEQ ID NO: 20756 - protein, 22 aa, Homo sapiens
CAKDFRDYGDTGGYYYYGMDVW

SEQ ID NO: 20757 - protein, 23 aa, Homo sapiens
CAKDWGSYSGSQDYYYYYGMDVW

SEQ ID NO: 20758 - protein, 14 aa, Homo sapiens
CYSASDSNESPWVF

SEQ ID NO: 20759 - protein, 20 aa, Homo sapiens
CAKHRLSDNSGSYYSNFDYW

SEQ ID NO: 20760 - protein, 25 aa, Homo sapiens
CARDPLAAAGSGGGVYYYTSAMDVW

SEQ ID NO: 20761 - protein, 14 aa, Homo sapiens
CATVIYYGAEFDYW

SEQ ID NO: 20762 - protein, 14 aa, Homo sapiens
CTTAATVTFGFDYW

SEQ ID NO: 20763 - protein, 17 aa, Homo sapiens
CATVKRVATINNYFDYW

SEQ ID NO: 20764 - protein, 15 aa, Homo sapiens
CAREGIAVGRPPDYW

SEQ ID NO: 20765 - protein, 17 aa, Homo sapiens
CAREWYGDYGYRYFDLW

SEQ ID NO: 20766 - protein, 23 aa, Homo sapiens
CAKDLGYYYDSSGYYYEDWFDPW

SEQ ID NO: 20767 - protein, 16 aa, Homo sapiens
CARDRESFRWRPLDYW

SEQ ID NO: 20768 - protein, 23 aa, Homo sapiens
CAKESSDYGDYEGSSYYYGMDVW

SEQ ID NO: 20769 - protein, 15 aa, Homo sapiens
CARTRYSSSYYFDYW

SEQ ID NO: 20770 - protein, 16 aa, Homo sapiens
CAKAYNSYFDSPFDYW

SEQ ID NO: 20771 - protein, 19 aa, Homo sapiens
CTRDGHYSSGYSRYYFDYW

SEQ ID NO: 20772 - protein, 17 aa, Homo sapiens
CARDPSSSWQTYYFDYW

SEQ ID NO: 20773 - protein, 28 aa, Homo sapiens
CARASWYYDSSGTSEKTLSYYYYGMDVW

SEQ ID NO: 20774 - protein, 21 aa, Homo sapiens
CAKTPVQRYFDWLFSSGFDYW

SEQ ID NO: 20775 - protein, 17 aa, Homo sapiens
CAKDLSGWLTTGAFDYW

SEQ ID NO: 20776 - protein, 18 aa, Homo sapiens
CARGNFGYSSSWYMLDYW

SEQ ID NO: 20777 - protein, 15 aa, Homo sapiens
CQSADSTNSFPDWVF

SEQ ID NO: 20778 - protein, 21 aa, Homo sapiens
CARTHLYCSGGSCYLPPFDYW

SEQ ID NO: 20779 - protein, 18 aa, Homo sapiens
CATSAPIAVAGYGWFDPW

SEQ ID NO: 20780 - protein, 14 aa, Homo sapiens
CARGYGGNSGVDYW

SEQ ID NO: 20781 - protein, 18 aa, Homo sapiens
CAKDFKSMVRGITVFDYW

SEQ ID NO: 20782 - protein, 16 aa, Homo sapiens
CARADYGAPYYYFDFW

SEQ ID NO: 20783 - protein, 22 aa, Homo sapiens
CAKDSDVLLWFGEPFGDYFDYW

SEQ ID NO: 20784 - protein, 17 aa, Homo sapiens
CAKEGKAYDYGDYFDYW

SEQ ID NO: 20785 - protein, 17 aa, Homo sapiens
CATARFVEGTGSYLGYW

SEQ ID NO: 20786 - protein, 17 aa, Homo sapiens
CAKVQSSGWHLDAFDIW

SEQ ID NO: 20787 - protein, 22 aa, Homo sapiens
CARVLWQSGGWKLYYYYGMDVW

SEQ ID NO: 20788 - protein, 17 aa, Homo sapiens
CAKGLYSSSRGGAFDIW

SEQ ID NO: 20789 - protein, 25 aa, Homo sapiens
CAKDTQHCNGGSCHQNSLNNWFDPW

SEQ ID NO: 20790 - protein, 16 aa, Homo sapiens
CARTPQYMIVAYVDYW

SEQ ID NO: 20791 - protein, 20 aa, Homo sapiens
CARDMVAVADTKYYYGMDVW

SEQ ID NO: 20792 - protein, 17 aa, Homo sapiens
CAREKNSSGWTSAFDIW

SEQ ID NO: 20793 - protein, 15 aa, Homo sapiens
CLSADSSGTYPYVVF

SEQ ID NO: 20794 - protein, 16 aa, Homo sapiens
CARLTGSGWSPTTDYW

SEQ ID NO: 20795 - protein, 22 aa, Homo sapiens
CARVADCSGGSCYHLTNWFDPW

SEQ ID NO: 20796 - protein, 12 aa, Homo sapiens
CTRARNFAFDYW

SEQ ID NO: 20797 - protein, 24 aa, Homo sapiens
CAKDMRVTTVTYAGIYYYYGMDVW

SEQ ID NO: 20798 - protein, 13 aa, Homo sapiens
CARENYGDGMDVW

SEQ ID NO: 20799 - protein, 17 aa, Homo sapiens
CARDDEEDLGTPGFDYW

SEQ ID NO: 20800 - protein, 22 aa, Homo sapiens
CARDARTGDGGTYYYYYGMDVW

SEQ ID NO: 20801 - protein, 15 aa, Homo sapiens
CTRDVYSGYDHFDYW

SEQ ID NO: 20802 - protein, 17 aa, Homo sapiens
CARQYSSGWYGYYFDYW

SEQ ID NO: 20803 - protein, 14 aa, Homo sapiens
CARWDDFTAMHDYW

SEQ ID NO: 20804 - protein, 18 aa, Homo sapiens
CATFPQFCSSTSCYEDYW

SEQ ID NO: 20805 - protein, 14 aa, Homo sapiens
CARTRVLEYYFDYW

SEQ ID NO: 20806 - protein, 14 aa, Homo sapiens
CARETHGWSYFDFW

SEQ ID NO: 20807 - protein, 18 aa, Homo sapiens
CAKDSLAYCGGDCYSDSW

SEQ ID NO: 20808 - protein, 28 aa, Homo sapiens
CARDSLVVPAASGLESMASYYYYGMDVW

SEQ ID NO: 20809 - protein, 17 aa, Homo sapiens
CARGYSGYELRGYFDYW

SEQ ID NO: 20810 - protein, 16 aa, Homo sapiens
CAREVAAAGTVSFDYW

SEQ ID NO: 20811 - protein, 20 aa, Homo sapiens
CAKEVNYDSSGYLEPYFDYW

SEQ ID NO: 20812 - protein, 21 aa, Homo sapiens
CYCSSTSCTTDQYYYYGMDVW

SEQ ID NO: 20813 - protein, 19 aa, Homo sapiens
CAKFGHDYGDYFQGSLDYW

SEQ ID NO: 20814 - protein, 15 aa, Homo sapiens
CARDRQLERRAFDLW

SEQ ID NO: 20815 - protein, 22 aa, Homo sapiens
CTTDLTSDIVATIHYYYGMDVW

SEQ ID NO: 20816 - protein, 20 aa, Homo sapiens
CAREFRGYDGSDYYFVLDYW

SEQ ID NO: 20817 - protein, 15 aa, Homo sapiens
CARGYSYASGYFQHW

SEQ ID NO: 20818 - protein, 19 aa, Homo sapiens
CALTDYYDSSGYRNWFDPW

SEQ ID NO: 20819 - protein, 14 aa, Homo sapiens
CARTRDGDYQLDYW

SEQ ID NO: 20820 - protein, 13 aa, Homo sapiens
CLQYYSTPPMYTF

SEQ ID NO: 20821 - protein, 18 aa, Homo sapiens
CARGYYDSTGYYPYFRDW

SEQ ID NO: 20822 - protein, 19 aa, Homo sapiens
CVRGSFYGSGSYYKPLDYW

SEQ ID NO: 20823 - protein, 21 aa, Homo sapiens
CARASTYLDPMTGYYTVIDYW

SEQ ID NO: 20824 - protein, 23 aa, Homo sapiens
CARDFFAAAGHSESYYYYGMDVW

SEQ ID NO: 20825 - protein, 21 aa, Homo sapiens
CAKDYYISGDRDYYYYGMDVW

SEQ ID NO: 20826 - protein, 20 aa, Homo sapiens
CARDRHDYVWGSYRSAFDYW

SEQ ID NO: 20827 - protein, 17 aa, Homo sapiens
CAKDLSYQPPLNYFDPW

SEQ ID NO: 20828 - protein, 18 aa, Homo sapiens
CAKAPTPYDFLTGYFDYW

SEQ ID NO: 20829 - protein, 22 aa, Homo sapiens
CARDSKTAAGTNTYYYYGMDVW

SEQ ID NO: 20830 - protein, 20 aa, Homo sapiens
CARDHLYALTRNYYYGMDVW

SEQ ID NO: 20831 - protein, 19 aa, Homo sapiens
CAKDYDSSGSPTLDAFDIW

SEQ ID NO: 20832 - protein, 25 aa, Homo sapiens
CARDRYCSGGSCYSGNYYYYGMDVW

SEQ ID NO: 20833 - protein, 18 aa, Homo sapiens
CARDDRLGSGDGIGFDPW

SEQ ID NO: 20834 - protein, 15 aa, Homo sapiens
CVKIKSHYYYGMDVW

SEQ ID NO: 20835 - protein, 24 aa, Homo sapiens
CARQQRVSVVTAAWQGPGWHFDLW

SEQ ID NO: 20836 - protein, 12 aa, Homo sapiens
CARDSYNYHDYW

SEQ ID NO: 20837 - protein, 14 aa, Homo sapiens
CSRMYDYGSYSDYW

SEQ ID NO: 20838 - protein, 19 aa, Homo sapiens
CARLGNIAVAGILNPFDIW

SEQ ID NO: 20839 - protein, 18 aa, Homo sapiens
CARVTDSSGYSDDAFDIW

SEQ ID NO: 20840 - protein, 24 aa, Homo sapiens
CATFEGPSPAAMLLGYSGYDFHYW

SEQ ID NO: 20841 - protein, 15 aa, Homo sapiens
CASSGDYSSSWLDYW

SEQ ID NO: 20842 - protein, 23 aa, Homo sapiens
CAKDALGLPTDRDVYHYYGMDVW

SEQ ID NO: 20843 - protein, 21 aa, Homo sapiens
CARHTYWKFYYERSGYAIDYW

SEQ ID NO: 20844 - protein, 15 aa, Homo sapiens
CASWDDSRSGPGVIF

SEQ ID NO: 20845 - protein, 22 aa, Homo sapiens
CARETSTQWFGELLTEYYFDYW

SEQ ID NO: 20846 - protein, 19 aa, Homo sapiens
CARGSTYSSWYGVYWFDPW

SEQ ID NO: 20847 - protein, 17 aa, Homo sapiens
CARPSSSGWYPDAFDIW

SEQ ID NO: 20848 - protein, 16 aa, Homo sapiens
CARAFIVGATYAFDIW

SEQ ID NO: 20849 - protein, 18 aa, Homo sapiens
CAKDKRHCTDAKCSFDSW

SEQ ID NO: 20850 - protein, 21 aa, Homo sapiens
CARDSGTYYYDSSGPAPPDYW

SEQ ID NO: 20851 - protein, 25 aa, Homo sapiens
CATIKFSRTCSGGRCYYHYFALDVW

SEQ ID NO: 20852 - protein, 22 aa, Homo sapiens
CAHRRMGDYDILTGYPLRFDYW

SEQ ID NO: 20853 - protein, 20 aa, Homo sapiens
CARVSGVEWFGELWWWFDPW

SEQ ID NO: 20854 - protein, 18 aa, Homo sapiens
CAHRRPNWNGPTNAFDVW

SEQ ID NO: 20855 - protein, 16 aa, Homo sapiens
CASCGGDCFHDAFDIW

SEQ ID NO: 20856 - protein, 15 aa, Homo sapiens
CVRGERAGSYVGDYW

SEQ ID NO: 20857 - protein, 22 aa, Homo sapiens
CARHGPYSSGWYELMYNWFDPW

SEQ ID NO: 20858 - protein, 19 aa, Homo sapiens
CAKEDSGASYYRLPPFDLW

SEQ ID NO: 20859 - protein, 20 aa, Homo sapiens
CVRQGTYDILSIGHREFDNW

SEQ ID NO: 20860 - protein, 17 aa, Homo sapiens
CARVAAAGREINWFDPW

SEQ ID NO: 20861 - protein, 19 aa, Homo sapiens
CARERYDILTGYYYGMDVW

SEQ ID NO: 20862 - protein, 17 aa, Homo sapiens
CVRAYSGYDYGDAFEIW

SEQ ID NO: 20863 - protein, 17 aa, Homo sapiens
CAGDGVGASPGDAFDMW

SEQ ID NO: 20864 - protein, 25 aa, Homo sapiens
CARGTVVVVAANGTPYYYYYGMDVW

SEQ ID NO: 20865 - protein, 19 aa, Homo sapiens
CARDILFVDTAYYYGMDVW

SEQ ID NO: 20866 - protein, 14 aa, Homo sapiens
CAKKQWLAKLFDYW

SEQ ID NO: 20867 - protein, 19 aa, Homo sapiens
CAKDYGSYSNGWPYYFDYW

SEQ ID NO: 20868 - protein, 18 aa, Homo sapiens
CAKLGYSGTYTGGYFHSW

SEQ ID NO: 20869 - protein, 20 aa, Homo sapiens
CAKEVYYGSGSPYYYGMDVW

SEQ ID NO: 20870 - protein, 20 aa, Homo sapiens
CARDLYCSGGSCYSSGFDYW

SEQ ID NO: 20871 - protein, 13 aa, Homo sapiens
CQQYDNSPLVYNF

SEQ ID NO: 20872 - protein, 20 aa, Homo sapiens
CARGTVTTPHGDYYYGMDVW

SEQ ID NO: 20873 - protein, 16 aa, Homo sapiens
CAKDNFGGYSYVFDYW

SEQ ID NO: 20874 - protein, 18 aa, Homo sapiens
CAKDLAVAGTRGWYFDLW

SEQ ID NO: 20875 - protein, 18 aa, Homo sapiens
CAKDSGWYAGETYYFDYW

SEQ ID NO: 20876 - protein, 22 aa, Homo sapiens
CARDGTGIWDYGDYEKNYFDYW

SEQ ID NO: 20877 - protein, 36 aa, Homo sapiens
CALPILQMNSLRAEDTAVYYCAKDGLEMATILLDYW

SEQ ID NO: 20878 - protein, 17 aa, Homo sapiens
CARRNSGSGTDAFFDYW

SEQ ID NO: 20879 - protein, 24 aa, Homo sapiens
CARDWGKGIAAAGTAYYYYGMDVW

SEQ ID NO: 20880 - protein, 16 aa, Homo sapiens
CARIIAAAGSGWFDPW

SEQ ID NO: 20881 - protein, 20 aa, Homo sapiens
CARGLGRYDSSGYYSFFDYW

SEQ ID NO: 20882 - protein, 19 aa, Homo sapiens
CARAPSAPRLRKGYYFDYW

SEQ ID NO: 20883 - protein, 14 aa, Homo sapiens
CARESYSSYYIGYW

SEQ ID NO: 20884 - protein, 16 aa, Homo sapiens
CARIKGKDSDGSFDFW

SEQ ID NO: 20885 - protein, 16 aa, Homo sapiens
CAHRQVAVAGSYFQHW

SEQ ID NO: 20886 - protein, 18 aa, Homo sapiens
CAKAPRGSTWFGDHFDYW

SEQ ID NO: 20887 - protein, 17 aa, Homo sapiens
CARGASGLRDFWYFDLW

SEQ ID NO: 20888 - protein, 20 aa, Homo sapiens
CARLLTRDGVVAATEYFQHW

SEQ ID NO: 20889 - protein, 16 aa, Homo sapiens
CAVMTIAAAGTALDYW

SEQ ID NO: 20890 - protein, 25 aa, Homo sapiens
CARDRLTNINYYGSEVYYYYGMDVW

SEQ ID NO: 20891 - protein, 12 aa, Homo sapiens
CVRGFTTREDYW

SEQ ID NO: 20892 - protein, 15 aa, Homo sapiens
CARVMWQQLVTLDYW

SEQ ID NO: 20893 - protein, 14 aa, Homo sapiens
CARSYEWELPGDYW

SEQ ID NO: 20894 - protein, 16 aa, Homo sapiens
CAREGRTNLGDSLDYW

SEQ ID NO: 20895 - protein, 13 aa, Homo sapiens
CAKGSYALFFDYW

SEQ ID NO: 20896 - protein, 21 aa, Homo sapiens
CARDPKYSSGWYNYYYGMDVW

SEQ ID NO: 20897 - protein, 20 aa, Homo sapiens
CVRDQPMYYPGSGSSYFDYW

SEQ ID NO: 20898 - protein, 17 aa, Homo sapiens
CAKGGDIVATIGWFDPW

SEQ ID NO: 20899 - protein, 15 aa, Homo sapiens
CAHSRTSGWAYFDYW

SEQ ID NO: 20900 - protein, 13 aa, Homo sapiens
CQQYYTSPGALAF

SEQ ID NO: 20901 - protein, 12 aa, Homo sapiens
CARDLGWYDDYW

SEQ ID NO: 20902 - protein, 15 aa, Homo sapiens
CAREREARVAGFDSW

SEQ ID NO: 20903 - protein, 17 aa, Homo sapiens
CARMVITMVRGAPPDYW

SEQ ID NO: 20904 - protein, 18 aa, Homo sapiens
CARDIADNFAPLYYFDYW

SEQ ID NO: 20905 - protein, 18 aa, Homo sapiens
CTRIEAHTSDWSRTFDIW

SEQ ID NO: 20906 - protein, 17 aa, Homo sapiens
CAKIVLVPAEIRDFDYW

SEQ ID NO: 20907 - protein, 21 aa, Homo sapiens
CARAPYCTGGNCYTYNWFDPW

SEQ ID NO: 20908 - protein, 16 aa, Homo sapiens
CAITTAVTTVRWFDPW

SEQ ID NO: 20909 - protein, 15 aa, Homo sapiens
CALDRGTTVTTLDYW

SEQ ID NO: 20910 - protein, 17 aa, Homo sapiens
CAREATGYSYGLHFGYW

SEQ ID NO: 20911 - protein, 20 aa, Homo sapiens
CARPRGRSPIAAAGTGFDYW

SEQ ID NO: 20912 - protein, 24 aa, Homo sapiens
CARHMLTDYDVLTRYSRGTAFDLW

SEQ ID NO: 20913 - protein, 20 aa, Homo sapiens
CARDEWSAAGINYYYGMDVW

SEQ ID NO: 20914 - protein, 17 aa, Homo sapiens
CAAGRGSENYYYGMDVW

SEQ ID NO: 20915 - protein, 22 aa, Homo sapiens
CARSGRGYNTAYYYYYYGMDVW

SEQ ID NO: 20916 - protein, 15 aa, Homo sapiens
CAKALLLWDDAFDIW

SEQ ID NO: 20917 - protein, 25 aa, Homo sapiens
CASMPRSTNSKFLVGVYYYYRMDVW

SEQ ID NO: 20918 - protein, 17 aa, Homo sapiens
CVSTFRIADDRMSFGYW

SEQ ID NO: 20919 - protein, 20 aa, Homo sapiens
CARGPRMVRGVITPTYFDYW

SEQ ID NO: 20920 - protein, 25 aa, Homo sapiens
CVREIAAAPGTCSKERSLCNWFDPW

SEQ ID NO: 20921 - protein, 18 aa, Homo sapiens
CAREFYDYYDSSGPFDYW

SEQ ID NO: 20922 - protein, 16 aa, Homo sapiens
CAKEGIAVAGDWFDPW

SEQ ID NO: 20923 - protein, 38 aa, Homo sapiens
CDWSSDVCSSDLTAVYFCAKGNYYDSTGYYYGNALDVW

SEQ ID NO: 20924 - protein, 17 aa, Homo sapiens
CARAQDYGGNESGFDYW

SEQ ID NO: 20925 - protein, 17 aa, Homo sapiens
CAKDILGDDYNYGLDYW

SEQ ID NO: 20926 - protein, 27 aa, Homo sapiens
CARTLWQRHYYDSSGRSNYYYYGMDVW

SEQ ID NO: 20927 - protein, 16 aa, Homo sapiens
CARHGDSSVWYPLDYW

SEQ ID NO: 20928 - protein, 16 aa, Homo sapiens
CARDINEETSGYFDYW

SEQ ID NO: 20929 - protein, 19 aa, Homo sapiens
CARRGRGYSGTVLYYFDYW

SEQ ID NO: 20930 - protein, 19 aa, Homo sapiens
CARRSGGPFDWLAYYFDYW

SEQ ID NO: 20931 - protein, 12 aa, Homo sapiens
CAGDLGDGFVYW

SEQ ID NO: 20932 - protein, 16 aa, Homo sapiens
CARPLDYGDSDAFDIW

SEQ ID NO: 20933 - protein, 16 aa, Homo sapiens
CARYDSSGYYGSGDYW

SEQ ID NO: 20934 - protein, 22 aa, Homo sapiens
CAYIPTLHYDYVWGSYRSFDYW

SEQ ID NO: 20935 - protein, 25 aa, Homo sapiens
CARDREWDSRGSFIPRYYFYGMDVW

SEQ ID NO: 20936 - protein, 20 aa, Homo sapiens
CAKDSQIFDGTPYYYGMDVW

SEQ ID NO: 20937 - protein, 15 aa, Homo sapiens
CAGWSYYDPELFDYW

SEQ ID NO: 20938 - protein, 18 aa, Homo sapiens
CARMSHSGYDRGNFFDHW

SEQ ID NO: 20939 - protein, 15 aa, Homo sapiens
CARSLLWFGDALDYW

SEQ ID NO: 20940 - protein, 35 aa, Homo sapiens
CDWSSDVCSSDLANPLEGIWGGWPFRERRNSFDIW

SEQ ID NO: 20941 - protein, 17 aa, Homo sapiens
CARAGEQQAYHYAMDVW

SEQ ID NO: 20942 - protein, 11 aa, Homo sapiens
CMEVLQTPYSF

SEQ ID NO: 20943 - protein, 19 aa, Homo sapiens
CARDYYGSGTYVGTPDDYW

SEQ ID NO: 20944 - protein, 22 aa, Homo sapiens
CARDSYDSSGYSAKNYWYFDLW

SEQ ID NO: 20945 - protein, 31 aa, Homo sapiens
CALPISAVYYCARGGWKKSADTAMVNWFDPW

SEQ ID NO: 20946 - protein, 16 aa, Homo sapiens
CARRAYRYGSSYFDLW

SEQ ID NO: 20947 - protein, 18 aa, Homo sapiens
CAKAPVLTMIVERYFDLW

SEQ ID NO: 20948 - protein, 24 aa, Homo sapiens
CARDHFVTGIPEGDYYYYYGMDVW

SEQ ID NO: 20949 - protein, 18 aa, Homo sapiens
CARDPSGYSYAAYYFDYW

SEQ ID NO: 20950 - protein, 20 aa, Homo sapiens
CAREHSGSFGLYYYYGMDVW

SEQ ID NO: 20951 - protein, 16 aa, Homo sapiens
CARVIAVAGNRGFDYW

SEQ ID NO: 20952 - protein, 21 aa, Homo sapiens
CAKDSMDSGYEVEYYYGMDVW

SEQ ID NO: 20953 - protein, 18 aa, Homo sapiens
CARGAYSGYDPTMSFDYW

SEQ ID NO: 20954 - protein, 16 aa, Homo sapiens
CAREGAYGSGSGIDYW

SEQ ID NO: 20955 - protein, 21 aa, Homo sapiens
CARENHYYDSSGPYSACFDYW

SEQ ID NO: 20956 - protein, 16 aa, Homo sapiens
CAKGAGDQWLVPFDYW

SEQ ID NO: 20957 - protein, 21 aa, Homo sapiens
CARDTRTAATTSYYYYGMDVW

SEQ ID NO: 20958 - protein, 16 aa, Homo sapiens
CAQLHQQLDAEYFQHW

SEQ ID NO: 20959 - protein, 20 aa, Homo sapiens
CARDRKAAAGIFGPPELDYW

SEQ ID NO: 20960 - protein, 16 aa, Homo sapiens
CLRELSSSDIGQFDYW

SEQ ID NO: 20961 - protein, 13 aa, Homo sapiens
CQQYYTSPPSDSF

SEQ ID NO: 20962 - protein, 24 aa, Homo sapiens
CARDAMAVAGNLEHYYYYYGMDVW

SEQ ID NO: 20963 - protein, 16 aa, Homo sapiens
CARERRGSYSGAFDYW

SEQ ID NO: 20964 - protein, 17 aa, Homo sapiens
CARDRFGYSYGVGLDYW

SEQ ID NO: 20965 - protein, 14 aa, Homo sapiens
CQQYGSSLEGGITF

SEQ ID NO: 20966 - protein, 24 aa, Homo sapiens
CAKEGLGYCSSTSCYAEKSLFDYW

SEQ ID NO: 20967 - protein, 20 aa, Homo sapiens
CAKDRSPYSGYDPAGVFDYW

SEQ ID NO: 20968 - protein, 19 aa, Homo sapiens
CARDHGDLYSSGHHGFDPW

SEQ ID NO: 20969 - protein, 21 aa, Homo sapiens
CAKDHGVAAADFYYYYGMDVW

SEQ ID NO: 20970 - protein, 23 aa, Homo sapiens
CARDSRVVEMATSQAYYYGMDVW

SEQ ID NO: 20971 - protein, 21 aa, Homo sapiens
CARSIVATITGGYYYYGMDVW

SEQ ID NO: 20972 - protein, 20 aa, Homo sapiens
CASSPLSMALGHGYNWFDPW

SEQ ID NO: 20973 - protein, 23 aa, Homo sapiens
CARDRTAVVPPLFTYYYYGMDVW

SEQ ID NO: 20974 - protein, 11 aa, Homo sapiens
CATGNDAFDIW

SEQ ID NO: 20975 - protein, 11 aa, Homo sapiens
CMGYGGYSDAW

SEQ ID NO: 20976 - protein, 18 aa, Homo sapiens
CAKAGVPFGSGSHYFDYW

SEQ ID NO: 20977 - protein, 11 aa, Homo sapiens
CQPSYITPLTF

SEQ ID NO: 20978 - protein, 13 aa, Homo sapiens
CAKDVWGWAFDHW

SEQ ID NO: 20979 - protein, 16 aa, Homo sapiens
CAKDGLEMATILLDYW

SEQ ID NO: 20980 - protein, 15 aa, Homo sapiens
CARDAGYSRLTFAYW

SEQ ID NO: 20981 - protein, 23 aa, Homo sapiens
CARDSPFYDILTGYYQKSYFDYW

SEQ ID NO: 20982 - protein, 22 aa, Homo sapiens
CARGGWSKYVWGSYPTTWFDPW

SEQ ID NO: 20983 - protein, 15 aa, Homo sapiens
CARGFSSWPVYLDYW

SEQ ID NO: 20984 - protein, 21 aa, Homo sapiens
CARQRFGELTIGYYYYGMDVW

SEQ ID NO: 20985 - protein, 21 aa, Homo sapiens
CARRCGGGCTSCEGVDAFDIW

SEQ ID NO: 20986 - protein, 20 aa, Homo sapiens
CARGRYSSSWYGAATKFDYW

SEQ ID NO: 20987 - protein, 16 aa, Homo sapiens
CAHFNKKGAEIPFDYW

SEQ ID NO: 20988 - protein, 16 aa, Homo sapiens
CARSGTGSGWSVFHYW

SEQ ID NO: 20989 - protein, 15 aa, Homo sapiens
CAKGWSGSANFWDYW

SEQ ID NO: 20990 - protein, 16 aa, Homo sapiens
CARGFAGLERLIVDYW

SEQ ID NO: 20991 - protein, 23 aa, Homo sapiens
CARGGSYCSSTSCYEAYYAMDVW

SEQ ID NO: 20992 - protein, 20 aa, Homo sapiens
CAGDQGMATIDYYYYGMDVW

SEQ ID NO: 20993 - protein, 20 aa, Homo sapiens
CARAPHSDLGGYYYYGMDVW

SEQ ID NO: 20994 - protein, 20 aa, Homo sapiens
CAHTQGRVLAQVIVQLFDFW

SEQ ID NO: 20995 - protein, 18 aa, Homo sapiens
CAQGGGSNSDYGVYFDNW

SEQ ID NO: 20996 - protein, 17 aa, Homo sapiens
CATGARRRYDFYYMDVW

SEQ ID NO: 20997 - protein, 14 aa, Homo sapiens
CVIAVAGTTRIDYW

SEQ ID NO: 20998 - protein, 24 aa, Homo sapiens
CAKDYGYYGSGSNLYYYYYGMDVW

SEQ ID NO: 20999 - protein, 20 aa, Homo sapiens
CARDMGIAAAGTDSGFEDYW

SEQ ID NO: 21000 - protein, 17 aa, Homo sapiens
CARDSPIVGATGGGDYW

SEQ ID NO: 21001 - protein, 18 aa, Homo sapiens
CARWGDGSGSNIRAFDIW

SEQ ID NO: 21002 - protein, 24 aa, Homo sapiens
CARSIVVVPAENNPPDYYYGMDVW

SEQ ID NO: 21003 - protein, 23 aa, Homo sapiens
CASTYCSSTSCYDYYYYYGMDVW

SEQ ID NO: 21004 - protein, 17 aa, Homo sapiens
CATGQHHYYYYYGMDVW

SEQ ID NO: 21005 - protein, 20 aa, Homo sapiens
CARDAYSIAAAVYYYGMDVW

SEQ ID NO: 21006 - protein, 15 aa, Homo sapiens
CARDCTGGICYSDYW

SEQ ID NO: 21007 - protein, 20 aa, Homo sapiens
CARPTMIVAHAAPADSLDYW

SEQ ID NO: 21008 - protein, 25 aa, Homo sapiens
CARGHVEKLRYFDWSPRGVDYFDYW

SEQ ID NO: 21009 - protein, 25 aa, Homo sapiens
CARHPYCSADNCHANRYYYYGMDVW

SEQ ID NO: 21010 - protein, 22 aa, Homo sapiens
CARDLGRWLQFGSHYYYGMDVW

SEQ ID NO: 21011 - protein, 21 aa, Homo sapiens
CARHGTPKRITMVRGAQFDYW

SEQ ID NO: 21012 - protein, 21 aa, Homo sapiens
CAKDHPRGDSSGNYPSASDYW

SEQ ID NO: 21013 - protein, 13 aa, Homo sapiens
CQQYNHWPSAYTF

SEQ ID NO: 21014 - protein, 14 aa, Homo sapiens
CARGGVSTSPFDSW

SEQ ID NO: 21015 - protein, 23 aa, Homo sapiens
CARGGYCDGRRCYSGPRDALDMW

SEQ ID NO: 21016 - protein, 16 aa, Homo sapiens
CAREGALGDAGAFDIW

SEQ ID NO: 21017 - protein, 16 aa, Homo sapiens
CVRDPTGIQTGLLDYW

SEQ ID NO: 21018 - protein, 27 aa, Homo sapiens
CARDLSRWMSFAGYSSRWGGANYFDYW

SEQ ID NO: 21019 - protein, 15 aa, Homo sapiens
CARDDYGDNAGYDYW

SEQ ID NO: 21020 - protein, 17 aa, Homo sapiens
CAHRLMAVADHDAFDIW

SEQ ID NO: 21021 - protein, 18 aa, Homo sapiens
CARGQPKDIPTLWFFEYW

SEQ ID NO: 21022 - protein, 14 aa, Homo sapiens
CATGVDTSMVLDYW

SEQ ID NO: 21023 - protein, 22 aa, Homo sapiens
CTVARYCSRTDCHAGFDWFDPW

SEQ ID NO: 21024 - protein, 21 aa, Homo sapiens
CARDPDTYYYDSSGYFEDDYW

SEQ ID NO: 21025 - protein, 18 aa, Homo sapiens
CVKGLYASNWDVPPGDYW

SEQ ID NO: 21026 - protein, 22 aa, Homo sapiens
CAREWWRRFRGGYDYYYGMDVW

SEQ ID NO: 21027 - protein, 25 aa, Homo sapiens
CALPISPRHFDWLFLAAYHNWFDPW

SEQ ID NO: 21028 - protein, 19 aa, Homo sapiens
CALPIYDSTGYYHYYFDYW

SEQ ID NO: 21029 - protein, 16 aa, Homo sapiens
CASDQLAVDIPPFDYW

SEQ ID NO: 21030 - protein, 17 aa, Homo sapiens
CATSDYYYDSYDYSDYW

SEQ ID NO: 21031 - protein, 17 aa, Homo sapiens
CAKDNKWLVPGDAFDIW

SEQ ID NO: 21032 - protein, 13 aa, Homo sapiens
CSGGDWTDSFDMW

SEQ ID NO: 21033 - protein, 14 aa, Homo sapiens
CQVWISSSEHHVVF

SEQ ID NO: 21034 - protein, 20 aa, Homo sapiens
CARGVGGSGSYYTGAWFDPW

SEQ ID NO: 21035 - protein, 14 aa, Homo sapiens
CTRAEFQLRAFDYW

SEQ ID NO: 21036 - protein, 23 aa, Homo sapiens
CAHDQVDYDYVWGSYRPYPFDYW

SEQ ID NO: 21037 - protein, 14 aa, Homo sapiens
CATGRGGSYPNDYW

SEQ ID NO: 21038 - protein, 21 aa, Homo sapiens
CARDSVETNEVNLYYYGMDVW

SEQ ID NO: 21039 - protein, 19 aa, Homo sapiens
CARDVRRYQLLNSDAFDIW

SEQ ID NO: 21040 - protein, 17 aa, Homo sapiens
CAKDPIAVSGTGYFDYW

SEQ ID NO: 21041 - protein, 18 aa, Homo sapiens
CARRLTASYYFTYSFDFW

SEQ ID NO: 21042 - protein, 20 aa, Homo sapiens
CARDSVNYGDVDYYYGMDVW

SEQ ID NO: 21043 - protein, 17 aa, Homo sapiens
CAKVRLVTATLDAFDLW

SEQ ID NO: 21044 - protein, 18 aa, Homo sapiens
CAKEGPSGEYNPDSFDIW

SEQ ID NO: 21045 - protein, 21 aa, Homo sapiens
CVTTCSAGACYDKSKDAFDIW

SEQ ID NO: 21046 - protein, 16 aa, Homo sapiens
CAHRLSGPTGPYFDYW

SEQ ID NO: 21047 - protein, 22 aa, Homo sapiens
CAREGYDSSGYYYSVWNAFDIW

SEQ ID NO: 21048 - protein, 21 aa, Homo sapiens
CAGTHFTIFSQAFFTGALDIW

SEQ ID NO: 21049 - protein, 20 aa, Homo sapiens
CARDQAVYGDYGHYYGMDVW

SEQ ID NO: 21050 - protein, 16 aa, Homo sapiens
CAKGEVTVHTGVCDYW

SEQ ID NO: 21051 - protein, 16 aa, Homo sapiens
CARRRLAASPYYFDYW

SEQ ID NO: 21052 - protein, 14 aa, Homo sapiens
CARHKVATITIDYW

SEQ ID NO: 21053 - protein, 28 aa, Homo sapiens
CARGGWCSGGSCPNDRSKFYYYYGMDVW

SEQ ID NO: 21054 - protein, 24 aa, Homo sapiens
CARVVSMVRGVIIFVRKPNWFDPW

SEQ ID NO: 21055 - protein, 23 aa, Homo sapiens
CASYHYYDSSGYFGPLEYYFDYW

SEQ ID NO: 21056 - protein, 20 aa, Homo sapiens
CATDGGGSSGPLAPSFFDNW

SEQ ID NO: 21057 - protein, 15 aa, Homo sapiens
CQSGDSSASSPRVTF

SEQ ID NO: 21058 - protein, 14 aa, Homo sapiens
CTTGSGSYYKFSYW

SEQ ID NO: 21059 - protein, 21 aa, Homo sapiens
CARDFMITFGGVIVKGPFDYW

SEQ ID NO: 21060 - protein, 18 aa, Homo sapiens
CARHGWGYYYYNYALDVW

SEQ ID NO: 21061 - protein, 23 aa, Homo sapiens
CARDGRYFDWLIIPPTPTTPDYW

SEQ ID NO: 21062 - protein, 19 aa, Homo sapiens
CAKAMVRGVTLLLDYFDYW

SEQ ID NO: 21063 - protein, 24 aa, Homo sapiens
CARIRFFVGHDILTGQIVDAFDIW

SEQ ID NO: 21064 - protein, 22 aa, Homo sapiens
CARDTWSGQFENYYYYYGMDVW

SEQ ID NO: 21065 - protein, 22 aa, Homo sapiens
CARMRGVNYYDSSGYYHYFDYW

SEQ ID NO: 21066 - protein, 15 aa, Homo sapiens
CVKSFDNSGWYPDYW

SEQ ID NO: 21067 - protein, 19 aa, Homo sapiens
CAKGLEVRGIFAYDAFDIW

SEQ ID NO: 21068 - protein, 13 aa, Homo sapiens
CARVGGTRYCDIW

SEQ ID NO: 21069 - protein, 19 aa, Homo sapiens
CARAGYSSSWYVPYYFDYW

SEQ ID NO: 21070 - protein, 16 aa, Homo sapiens
CAKDERGLTYWYLDLW

SEQ ID NO: 21071 - protein, 17 aa, Homo sapiens
CTRDPCQQQWLRYSDYW

SEQ ID NO: 21072 - protein, 21 aa, Homo sapiens
CTTAGRGSGSYYNYYAGMDVW

SEQ ID NO: 21073 - protein, 24 aa, Homo sapiens
CARVSPGYCSGNICYFNTEYFDYW

SEQ ID NO: 21074 - protein, 20 aa, Homo sapiens
CARHRTGYSSGWDLIYFDYW

SEQ ID NO: 21075 - protein, 17 aa, Homo sapiens
CARGGTPTTGDNHFDYW

SEQ ID NO: 21076 - protein, 22 aa, Homo sapiens
CARDLFRSGGSDYYYYYGMDVW

SEQ ID NO: 21077 - protein, 23 aa, Homo sapiens
CARVLPDYYGSGTHYYYYGMDVW

SEQ ID NO: 21078 - protein, 13 aa, Homo sapiens
CATASSGWYWDFW

SEQ ID NO: 21079 - protein, 20 aa, Homo sapiens
CAHIEDRAKHYYYYYGMDVW

SEQ ID NO: 21080 - protein, 22 aa, Homo sapiens
CAAEPRVSGYVKIYNYYGMDVW

SEQ ID NO: 21081 - protein, 18 aa, Homo sapiens
CARDDTCSGGDCYYFDYW

SEQ ID NO: 21082 - protein, 16 aa, Homo sapiens
CAKDALPGENRHFDFW

SEQ ID NO: 21083 - protein, 20 aa, Homo sapiens
CARDSWGMTHELYYYGMDVW

SEQ ID NO: 21084 - protein, 25 aa, Homo sapiens
CARAMTYYYGSGSYYRVHDYAFDIW

SEQ ID NO: 21085 - protein, 14 aa, Homo sapiens
CAKEDGYHDAFDIW

SEQ ID NO: 21086 - protein, 26 aa, Homo sapiens
CAKVLGYCRGGNCPQETYYYHGMDVW

SEQ ID NO: 21087 - protein, 21 aa, Homo sapiens
CARSGWGGSGSYYNPNWFDPW

SEQ ID NO: 21088 - protein, 16 aa, Homo sapiens
CAREYEGSKAYFFDYW

SEQ ID NO: 21089 - protein, 12 aa, Homo sapiens
CQHYSSYSTWAF

SEQ ID NO: 21090 - protein, 24 aa, Homo sapiens
CARDFTSIAAAGTLNYYYYGMDVW

SEQ ID NO: 21091 - protein, 18 aa, Homo sapiens
CASLPLLWFGEWGYFDYW

SEQ ID NO: 21092 - protein, 19 aa, Homo sapiens
CARGSRSGQGYYYYGMDVW

SEQ ID NO: 21093 - protein, 20 aa, Homo sapiens
CTRPTPLQTGVTWGGSFDYW

SEQ ID NO: 21094 - protein, 16 aa, Homo sapiens
CLTSDRKSVRPEADYW

SEQ ID NO: 21095 - protein, 21 aa, Homo sapiens
CAREFSYGLRLADYYYGMDVW

SEQ ID NO: 21096 - protein, 25 aa, Homo sapiens
CARDLIVVVPAANATYYYYYGMDVW

SEQ ID NO: 21097 - protein, 29 aa, Homo sapiens
CARGRGYYDSAGSFFGARESDYNWYFDLW

SEQ ID NO: 21098 - protein, 18 aa, Homo sapiens
CARHGLGRFTGAGGIDYW

SEQ ID NO: 21099 - protein, 20 aa, Homo sapiens
CARVYPGCSGGSCYHPGDYW

SEQ ID NO: 21100 - protein, 17 aa, Homo sapiens
CAKVSSPWLVQNAFDIW

SEQ ID NO: 21101 - protein, 23 aa, Homo sapiens
CARTDYCPGGICRSHIEFYFDHW

SEQ ID NO: 21102 - protein, 28 aa, Homo sapiens
CAKDHGSSYGSGSSAQDHYYYYYGMDVW

SEQ ID NO: 21103 - protein, 14 aa, Homo sapiens
CAEKAAGTRAFDIW

SEQ ID NO: 21104 - protein, 19 aa, Homo sapiens
CASDTAAELWGGDSGIDYW

SEQ ID NO: 21105 - protein, 11 aa, Homo sapiens [sequence omitted]

SEQ ID NO: 21106 - protein, 17 aa, Homo sapiens
CARDPEVYYGSGTPDYW

SEQ ID NO: 21107 - protein, 17 aa, Homo sapiens
CARHRERDLPLTWFDPW

SEQ ID NO: 21108 - protein, 17 aa, Homo sapiens
CAKTGVRGVIISWFDPW

SEQ ID NO: 21109 - protein, 20 aa, Homo sapiens
CARRDRHCSGDDCWRWFDPW

SEQ ID NO: 21110 - protein, 22 aa, Homo sapiens
CARDLYYYDSGGNYQNNWFDPW

SEQ ID NO: 21111 - protein, 18 aa, Homo sapiens
CARDPRSLSMVRGIFGYW

SEQ ID NO: 21112 - protein, 20 aa, Homo sapiens
CARDLQQLADRYYYYGMDVW

SEQ ID NO: 21113 - protein, 14 aa, Homo sapiens
CAHRRTFYGDLDYW

SEQ ID NO: 21114 - protein, 23 aa, Homo sapiens
CAREMGEKWYYYESSGVDPSDYW

SEQ ID NO: 21115 - protein, 20 aa, Homo sapiens
CARLRPCSGGSCYSSPPDYW

SEQ ID NO: 21116 - protein, 20 aa, Homo sapiens
CAKDHGVYGDYYYYYGMDVW

SEQ ID NO: 21117 - protein, 16 aa, Homo sapiens
CATAYAVAGRTNPDYW

SEQ ID NO: 21118 - protein, 20 aa, Homo sapiens
CVKDDGCHTSGCPEGYFDYW

SEQ ID NO: 21119 - protein, 17 aa, Homo sapiens
CAKGRIKFITDLNFDYW

SEQ ID NO: 21120 - protein, 23 aa, Homo sapiens
CARDASIAAAGSVSWYYYGMDVW

SEQ ID NO: 21121 - protein, 19 aa, Homo sapiens
CARAHPRGDGYSDDAFDIW

SEQ ID NO: 21122 - protein, 24 aa, Homo sapiens
CARDTPAYCSSTSCYYYYYGMDVW

SEQ ID NO: 21123 - protein, 15 aa, Homo sapiens
CVRGGSGYQSYLDYW

SEQ ID NO: 21124 - protein, 16 aa, Homo sapiens
CAKNPVLTTLTDFDYW

SEQ ID NO: 21125 - protein, 21 aa, Homo sapiens
CAKDQKFTYHYETSGYYFEYW

SEQ ID NO: 21126 - protein, 17 aa, Homo sapiens
CARWAPAAGPQDAFDIW

SEQ ID NO: 21127 - protein, 27 aa, Homo sapiens
CARDRARSEDLAAAMGVYYYYYGMDVW

SEQ ID NO: 21128 - protein, 17 aa, Homo sapiens
CARDPVRSLWFGEMDYW

SEQ ID NO: 21129 - protein, 17 aa, Homo sapiens
CARHGGKWDVQPFFDTW

SEQ ID NO: 21130 - protein, 11 aa, Homo sapiens
CAKAYNYWDYW

SEQ ID NO: 21131 - protein, 18 aa, Homo sapiens
CARRGDYGGRTHYSFDSW

SEQ ID NO: 21132 - protein, 14 aa, Homo sapiens
CASGPYGGARFDYW

SEQ ID NO: 21133 - protein, 26 aa, Homo sapiens
CARGMRLGVVPAAMGVPMGPNWFDPW

SEQ ID NO: 21134 - protein, 22 aa, Homo sapiens
CATEPTYYYDSSGYYPQYFHHW

SEQ ID NO: 21135 - protein, 17 aa, Homo sapiens
CARDSRGGIAVAGFDYW

SEQ ID NO: 21136 - protein, 16 aa, Homo sapiens
CTTEGSSGWYEYFDYW

SEQ ID NO: 21137 - protein, 20 aa, Homo sapiens
CARDPYCYGDCRQHGYFDHW

SEQ ID NO: 21138 - protein, 29 aa, Homo sapiens
CARVFSPVKNLPGNVPLRGWFGMEYFSSW

SEQ ID NO: 21139 - protein, 17 aa, Homo sapiens
CARDLAWTMVRGAADYW

SEQ ID NO: 21140 - protein, 16 aa, Homo sapiens
CASAPPGGFPYYFDYW

SEQ ID NO: 21141 - protein, 20 aa, Homo sapiens
CARVPGSGTYGYYYFGMDVW

SEQ ID NO: 21142 - protein, 18 aa, Homo sapiens
CAKDHGGRWNWWGWFDPW

SEQ ID NO: 21143 - protein, 20 aa, Homo sapiens
CAHGGIPVLVTKTLFYFDYW

SEQ ID NO: 21144 - protein, 20 aa, Homo sapiens
CARERYSGYDYVGLMAFDIW

SEQ ID NO: 21145 - protein, 23 aa, Homo sapiens
CAKSPPERVDVWGSYRLYYFDYW

SEQ ID NO: 21146 - protein, 17 aa, Homo sapiens
CATLPDASGGCYYFDYW

SEQ ID NO: 21147 - protein, 21 aa, Homo sapiens
CARGGPVSTLYYYYYYGMDVW

SEQ ID NO: 21148 - protein, 18 aa, Homo sapiens
CARVSYNAELLNTHFDYW

SEQ ID NO: 21149 - protein, 20 aa, Homo sapiens
CARHAQNYHFGSGNDCFDPW

SEQ ID NO: 21150 - protein, 21 aa, Homo sapiens
CAREDCGGDCYPYRENYFDYW

SEQ ID NO: 21151 - protein, 22 aa, Homo sapiens
CASLPHYDILTGYSSYNWFDPW

SEQ ID NO: 21152 - protein, 14 aa, Homo sapiens
CARSTVTTSPFDYW

SEQ ID NO: 21153 - protein, 22 aa, Homo sapiens
CARDMWGGNSEEYYYYYGMDVW

SEQ ID NO: 21154 - protein, 21 aa, Homo sapiens
CAHMTYYYGSGSYYTGYFDYW

SEQ ID NO: 21155 - protein, 21 aa, Homo sapiens
CARGHDYGDLRYYYYYGVDVW

SEQ ID NO: 21156 - protein, 18 aa, Homo sapiens
CARVEFWGSYYGGWFDFW

SEQ ID NO: 21157 - protein, 24 aa, Homo sapiens
CASGRWDSTDSRSSSYYFYAMDVW

SEQ ID NO: 21158 - protein, 18 aa, Homo sapiens
CARTYCGGDCYSYWFDPW

SEQ ID NO: 21159 - protein, 19 aa, Homo sapiens
CARHLDILTGYYNYYFDYW

SEQ ID NO: 21160 - protein, 18 aa, Homo sapiens
CARTRGTGYRSVWYFDSW

SEQ ID NO: 21161 - protein, 24 aa, Homo sapiens
CAKDLGEYCSGGSCQYYYYGMDVW

SEQ ID NO: 21162 - protein, 16 aa, Homo sapiens
CARDQKGDSSAGLDYW

SEQ ID NO: 21163 - protein, 20 aa, Homo sapiens
CARDTEIYDSGGFEDFFDSW

SEQ ID NO: 21164 - protein, 20 aa, Homo sapiens
CAKHGYGSTTYYKRGGFDYW

SEQ ID NO: 21165 - protein, 20 aa, Homo sapiens
CAKGDCSSTSCYIPDYFDYW

SEQ ID NO: 21166 - protein, 20 aa, Homo sapiens
CARHLPYGSGSYSPYNFDYW

SEQ ID NO: 21167 - protein, 18 aa, Homo sapiens
CARQGVAGGHGDHYFDSW

SEQ ID NO: 21168 - protein, 17 aa, Homo sapiens
CARGVAMIGRDSRFDYW

SEQ ID NO: 21169 - protein, 21 aa, Homo sapiens
CAKDLSPVGETPYHYYGMDVW

SEQ ID NO: 21170 - protein, 15 aa, Homo sapiens
CARGFKNIAAILDYW

SEQ ID NO: 21171 - protein, 17 aa, Homo sapiens
CARRRWVSGSYQNFDCW

SEQ ID NO: 21172 - protein, 25 aa, Homo sapiens
CARDLGYYDSSGYSQYYYYYGMDVW

SEQ ID NO: 21173 - protein, 21 aa, Homo sapiens
CARDSVAAAENAYYYYGMDVW

SEQ ID NO: 21174 - protein, 20 aa, Homo sapiens
CASSQSSYCGGDCPTPFDYW

SEQ ID NO: 21175 - protein, 23 aa, Homo sapiens
CAKGNPDDSDGPYFSYYYGMDVW

SEQ ID NO: 21176 - protein, 18 aa, Homo sapiens
CAIHRSDDYGDLNWFDPW

SEQ ID NO: 21177 - protein, 14 aa, Homo sapiens
CASAKSGWLYFDNW

SEQ ID NO: 21178 - protein, 12 aa, Homo sapiens
CQSADSDATYIF

SEQ ID NO: 21179 - protein, 21 aa, Homo sapiens
CALQDNYYDSSGYTMGPFDYW

SEQ ID NO: 21180 - protein, 25 aa, Homo sapiens
CARDGKSHVDTAMVHYYYYYGMDVW

SEQ ID NO: 21181 - protein, 24 aa, Homo sapiens
CARDLVGYSSSSQDYYYYYGMDVW

SEQ ID NO: 21182 - protein, 13 aa, Homo sapiens
CARVAIQLWCDYW

SEQ ID NO: 21183 - protein, 19 aa, Homo sapiens
CARDRKHDYGDYGSWFDPW

SEQ ID NO: 21184 - protein, 13 aa, Homo sapiens
CARDREESGFDYW

SEQ ID NO: 21185 - protein, 19 aa, Homo sapiens
CALVYPVWGSYRPEYFQHW

SEQ ID NO: 21186 - protein, 14 aa, Homo sapiens
CARDPSRGAENDYW

SEQ ID NO: 21187 - protein, 19 aa, Homo sapiens
CARDRGGIWFGDANACDIW

SEQ ID NO: 21188 - protein, 18 aa, Homo sapiens
CAHRPPPTDYYYYGMDVW

SEQ ID NO: 21189 - protein, 17 aa, Homo sapiens
CAHRYFSGWYGDWFDPW

SEQ ID NO: 21190 - protein, 18 aa, Homo sapiens
CAKDISALTTVMSPFDHW

SEQ ID NO: 21191 - protein, 19 aa, Homo sapiens
CARDYYDSSGYYHYYFDYW

SEQ ID NO: 21192 - protein, 21 aa, Homo sapiens
CARDRAWVDFENEILTGYDYW

SEQ ID NO: 21193 - protein, 17 aa, Homo sapiens
CARERLPVSLSDALDVW

SEQ ID NO: 21194 - protein, 16 aa, Homo sapiens
CARSLVAVAGIPFDYW

SEQ ID NO: 21195 - protein, 15 aa, Homo sapiens
CATALIVGLWEFDYW

SEQ ID NO: 21196 - protein, 25 aa, Homo sapiens
CARDQKTLAVAGTSGQYYYYGMDVW

SEQ ID NO: 21197 - protein, 16 aa, Homo sapiens
CAKAGIVGATRFFDYW

SEQ ID NO: 21198 - protein, 21 aa, Homo sapiens
CARHPRITMIVVVSLYYFDYW

SEQ ID NO: 21199 - protein, 23 aa, Homo sapiens
CARHGGFVEDYGDYGGQEYFDYW

SEQ ID NO: 21200 - protein, 18 aa, Homo sapiens
CARDGGSGSYPYYYLDLW

SEQ ID NO: 21201 - protein, 28 aa, Homo sapiens
CTTDVLSVVVPAAMVPGERYYYYGMDVW

SEQ ID NO: 21202 - protein, 14 aa, Homo sapiens
CARWTSNLYYFDSW

SEQ ID NO: 21203 - protein, 19 aa, Homo sapiens
CAWGYGGNSVTLGWYFDYW

SEQ ID NO: 21204 - protein, 27 aa, Homo sapiens
CARDMVVVPAATQVANNYYYYYGMDVW

SEQ ID NO: 21205 - protein, 27 aa, Homo sapiens
CARDLHYDSSGWSILHSDYYYYGMDVW

SEQ ID NO: 21206 - protein, 17 aa, Homo sapiens
CARPLDTAMAFDAFDIW

SEQ ID NO: 21207 - protein, 16 aa, Homo sapiens
CATRLDYGGNWYFDLW

SEQ ID NO: 21208 - protein, 21 aa, Homo sapiens
CATGGYYGSDYGSGSGWFDPW

SEQ ID NO: 21209 - protein, 17 aa, Homo sapiens
CAKDRISLVTSGTFDPW

SEQ ID NO: 21210 - protein, 24 aa, Homo sapiens
CAKDALIVGATTEPHYYYYGMDVW

SEQ ID NO: 21211 - protein, 17 aa, Homo sapiens
CTRDIYGSTTLYYFDYW

SEQ ID NO: 21212 - protein, 17 aa, Homo sapiens
CARTLSGYDSDDAFDIW

SEQ ID NO: 21213 - protein, 16 aa, Homo sapiens
CASPRGFGYSSPIDYW

SEQ ID NO: 21214 - protein, 20 aa, Homo sapiens
CAHRRADCNDGDCYRWFDPW

SEQ ID NO: 21215 - protein, 24 aa, Homo sapiens
CAKDFLVRGYDYGEAAYYYGMDVW

SEQ ID NO: 21216 - protein, 20 aa, Homo sapiens
CARIRGYDSSGRYFGAFDNW

SEQ ID NO: 21217 - protein, 20 aa, Homo sapiens
CARDTQRSSGSYYYYGMDVW

SEQ ID NO: 21218 - protein, 17 aa, Homo sapiens
CARGKWELLGQDAFDVW

SEQ ID NO: 21219 - protein, 16 aa, Homo sapiens
CARDLRYRDTDGPDYW

SEQ ID NO: 21220 - protein, 16 aa, Homo sapiens
CARDLTVTTDPSADYW

SEQ ID NO: 21221 - protein, 18 aa, Homo sapiens
CARSTETYYYYYYGMDVW

SEQ ID NO: 21222 - protein, 17 aa, Homo sapiens
CARHAGSSAMGWYFALW

SEQ ID NO: 21223 - protein, 18 aa, Homo sapiens
CARRLRGYASGSYSLDYW

SEQ ID NO: 21224 - protein, 27 aa, Homo sapiens
CAREAQMPLWFGELLHSYYYYYGMDVW

SEQ ID NO: 21225 - protein, 16 aa, Homo sapiens
CARLEVGYSSGWFGYW

SEQ ID NO: 21226 - protein, 13 aa, Homo sapiens
CLQYNYWPPRDGF

SEQ ID NO: 21227 - protein, 17 aa, Homo sapiens
CARGVLPGTVQSWFDPW

SEQ ID NO: 21228 - protein, 14 aa, Homo sapiens
CARMGVGATDFDYW

SEQ ID NO: 21229 - protein, 14 aa, Homo sapiens
CQSYDASLGGSGLF

SEQ ID NO: 21230 - protein, 18 aa, Homo sapiens
CARGYSSGSNYKSAFDIW

SEQ ID NO: 21231 - protein, 15 aa, Homo sapiens
CARGMAVHGNYMDVW

SEQ ID NO: 21232 - protein, 16 aa, Homo sapiens
CTTDLLGWFGELFTYW

SEQ ID NO: 21233 - protein, 21 aa, Homo sapiens
CARAVSCDSISCYEGGWFDPW

SEQ ID NO: 21234 - protein, 19 aa, Homo sapiens
CAKFRRHDGGYLRSYFDYW

SEQ ID NO: 21235 - protein, 18 aa, Homo sapiens
CARDPRRTAMVTWYFDYW

SEQ ID NO: 21236 - protein, 25 aa, Homo sapiens
CARGIVVVPAAIPPQHYYYYGMDVW

SEQ ID NO: 21237 - protein, 12 aa, Homo sapiens
CQEYENWPRGTF

SEQ ID NO: 21238 - protein, 21 aa, Homo sapiens
CAKDISLETDGGYYYYGMDVW

SEQ ID NO: 21239 - protein, 20 aa, Homo sapiens
CARDQVEAAAAYYYYGMDVW

SEQ ID NO: 21240 - protein, 21 aa, Homo sapiens
CARHCIGGNCYAVYYYGMDVW

SEQ ID NO: 21241 - protein, 16 aa, Homo sapiens
CATSAVAGMVNWFDPW

SEQ ID NO: 21242 - protein, 19 aa, Homo sapiens
CARGSSGWSPPVPAHFDYW

SEQ ID NO: 21243 - protein, 17 aa, Homo sapiens
CAQNGDGGNPWGAFDIW

SEQ ID NO: 21244 - protein, 23 aa, Homo sapiens
CARDSTVTTLGETNYYYYGMDVW

SEQ ID NO: 21245 - protein, 17 aa, Homo sapiens
CAHGRVLAAGSYYFDYW

SEQ ID NO: 21246 - protein, 17 aa, Homo sapiens
CARVRGNYADGEPFDIW

SEQ ID NO: 21247 - protein, 20 aa, Homo sapiens
CARDRLVVVAAMYYYGMDVW

SEQ ID NO: 21248 - protein, 20 aa, Homo sapiens
CASLYGSGSQDYYYYGMDVW

SEQ ID NO: 21249 - protein, 22 aa, Homo sapiens
CARDLGSYDNSGFYNYWYFDLW

SEQ ID NO: 21250 - protein, 16 aa, Homo sapiens
CARSYNYGSGSYFDYW

SEQ ID NO: 21251 - protein, 28 aa, Homo sapiens
CAKQTPFLTRDLLWFGEPPNYYYGMDVW

SEQ ID NO: 21252 - protein, 20 aa, Homo sapiens
CVYGSGSYYTPGYYYGMDVW

SEQ ID NO: 21253 - protein, 15 aa, Homo sapiens
CARSSAAGTKLFDPW

SEQ ID NO: 21254 - protein, 21 aa, Homo sapiens
CARQVLIAVAGYYYYYGMDVW

SEQ ID NO: 21255 - protein, 15 aa, Homo sapiens
CVRGGREGVSPFDNW

SEQ ID NO: 21256 - protein, 14 aa, Homo sapiens
CARLPAGVTPLDYW

SEQ ID NO: 21257 - protein, 21 aa, Homo sapiens
CARDEGAYCGGNCYPKAFDIW

SEQ ID NO: 21258 - protein, 23 aa, Homo sapiens
CARSGSFWGVEVTATNYWYFALW

SEQ ID NO: 21259 - protein, 15 aa, Homo sapiens
CQSGDSTGDANYGVF

SEQ ID NO: 21260 - protein, 20 aa, Homo sapiens
CAHRNVQKAATGSGGYFDYW

SEQ ID NO: 21261 - protein, 20 aa, Homo sapiens
CARVSEGYYYDSSGYYFGYW

SEQ ID NO: 21262 - protein, 17 aa, Homo sapiens
CARGRTTVTTSRYFDLW

SEQ ID NO: 21263 - protein, 19 aa, Homo sapiens
CARAPRRWLQSPLIYFDYW

SEQ ID NO: 21264 - protein, 18 aa, Homo sapiens
CAKEGTFGGVIATPFDYW

SEQ ID NO: 21265 - protein, 22 aa, Homo sapiens
CAREFSANGSGSYYTQYYFDYW

SEQ ID NO: 21266 - protein, 21 aa, Homo sapiens
CARGYTFYESTGSTSDIFDIW

SEQ ID NO: 21267 - protein, 19 aa, Homo sapiens
CARRVGSGSYYRSDAFDIW

SEQ ID NO: 21268 - protein, 17 aa, Homo sapiens
CARAPYYGSAGDAFDMW

SEQ ID NO: 21269 - protein, 17 aa, Homo sapiens
CAKDYMTTVTTNWFDPW

SEQ ID NO: 21270 - protein, 27 aa, Homo sapiens
CARHRARMTTVTIYGGRLGYYYGMDVW

SEQ ID NO: 21271 - protein, 19 aa, Homo sapiens
CAKGGTLVVPAARSYFDYW

SEQ ID NO: 21272 - protein, 18 aa, Homo sapiens
CARDGYSYGFLFDGMDVW

SEQ ID NO: 21273 - protein, 16 aa, Homo sapiens
CANTLDYGDSRTFDYW

SEQ ID NO: 21274 - protein, 16 aa, Homo sapiens
CARGFTMAQTDAFDIW

SEQ ID NO: 21275 - protein, 21 aa, Homo sapiens
CARRQRPGYYSGWSPFYFDFW

SEQ ID NO: 21276 - protein, 14 aa, Homo sapiens
CARGGGTYEPFDIW

SEQ ID NO: 21277 - protein, 19 aa, Homo sapiens
CTTRTYYSENSVYRWFDPW

SEQ ID NO: 21278 - protein, 19 aa, Homo sapiens
CASDRGTSYYYGSGSLDYW

SEQ ID NO: 21279 - protein, 15 aa, Homo sapiens
CAGGIAVADAKFDYW

SEQ ID NO: 21280 - protein, 19 aa, Homo sapiens
CAREDYYYTSSNSNWFDPW

SEQ ID NO: 21281 - protein, 24 aa, Homo sapiens
CAREKPREYVYGQGLYYYYGMDVW

SEQ ID NO: 21282 - protein, 20 aa, Homo sapiens
CARGGSGYPDSYYYYGMDVW

SEQ ID NO: 21283 - protein, 18 aa, Homo sapiens
CARVGLGYYASGTPFDYW

SEQ ID NO: 21284 - protein, 22 aa, Homo sapiens
CAKDGPPQLLWFGEPPNWFDPW

SEQ ID NO: 21285 - protein, 37 aa, Homo sapiens
CALPICLRSEDTAVYYCARGGWYSGSGAVSLNWFDPW

SEQ ID NO: 21286 - protein, 17 aa, Homo sapiens
CARMNGYQVVTAYFDYW

SEQ ID NO: 21287 - protein, 15 aa, Homo sapiens
CAHSQYSYGSYVDPW

SEQ ID NO: 21288 - protein, 14 aa, Homo sapiens
CVGTYRDYNYFDYW

SEQ ID NO: 21289 - protein, 24 aa, Homo sapiens
CARDYIVVVVAATPSYYYYGMDVW

SEQ ID NO: 21290 - protein, 21 aa, Homo sapiens
CARLYDSSGYYSWYYYGMDVW

SEQ ID NO: 21291 - protein, 22 aa, Homo sapiens
CARQRGYYDSGGYYYPYYFDYW

SEQ ID NO: 21292 - protein, 13 aa, Homo sapiens
CARHRQWLIFYYW

SEQ ID NO: 21293 - protein, 14 aa, Homo sapiens
CARMIYSYQYEDYW

SEQ ID NO: 21294 - protein, 20 aa, Homo sapiens
CAHRPGIAVAGSLPLYFDYW

SEQ ID NO: 21295 - protein, 26 aa, Homo sapiens
CAHREDINLLRGIEEPGLTRSSFDYW

SEQ ID NO: 21296 - protein, 22 aa, Homo sapiens
CARGRRPRLRLGELSPIPWDYW

SEQ ID NO: 21297 - protein, 20 aa, Homo sapiens
CAKDPRYYGSGSYPAEFDYW

SEQ ID NO: 21298 - protein, 16 aa, Homo sapiens
CARVSGFGYTRGFDFW

SEQ ID NO: 21299 - protein, 16 aa, Homo sapiens
CARLKVVAATNWFDPW

SEQ ID NO: 21300 - protein, 19 aa, Homo sapiens
CATDPKTIVAPSGEWFDPW

SEQ ID NO: 21301 - protein, 22 aa, Homo sapiens
CAGDQRAGRNYYDSRGYIVDYW

SEQ ID NO: 21302 - protein, 20 aa, Homo sapiens
CSRAHVWFGELQEADAFDIW

SEQ ID NO: 21303 - protein, 17 aa, Homo sapiens
CAKDNYDSSGYYLGDYW

SEQ ID NO: 21304 - protein, 21 aa, Homo sapiens
CARFSGVNLVATTHYWYFDLW

SEQ ID NO: 21305 - protein, 15 aa, Homo sapiens
CARQRCGGNCYMDYW

SEQ ID NO: 21306 - protein, 23 aa, Homo sapiens
CARHRYYDSRSSKYYFYYGMDVW

SEQ ID NO: 21307 - protein, 18 aa, Homo sapiens
CARDKGFSDSSGYYFDNW

SEQ ID NO: 21308 - protein, 23 aa, Homo sapiens
CAKDVLEGGSGYDHYYYYGMDVW

SEQ ID NO: 21309 - protein, 23 aa, Homo sapiens
CARDSWGSGSYYDVYYYYGMDVW

SEQ ID NO: 21310 - protein, 18 aa, Homo sapiens
CARHSTGYSSSWGLFDYW

SEQ ID NO: 21311 - protein, 18 aa, Homo sapiens
CAKDQGYYGSGSYNFDCW

SEQ ID NO: 21312 - protein, 13 aa, Homo sapiens
CQLYNSYSESWIF

SEQ ID NO: 21313 - protein, 23 aa, Homo sapiens
CARDSYSSGWNTSYYYYYGMDVW

SEQ ID NO: 21314 - protein, 19 aa, Homo sapiens
CAKDGVGHIVVVTAPFDYW

SEQ ID NO: 21315 - protein, 23 aa, Homo sapiens
CARDFLGYDILTGYYYSPSFAYW

SEQ ID NO: 21316 - protein, 22 aa, Homo sapiens
CSGGSCYSNSSSYYYYYGMDVW

SEQ ID NO: 21317 - protein, 15 aa, Homo sapiens
CGRDPNTAEDGMDVW

SEQ ID NO: 21318 - protein, 17 aa, Homo sapiens
CAREKSSSWAENWFDPW

SEQ ID NO: 21319 - protein, 16 aa, Homo sapiens
CARMIAAAENDAFDIW

SEQ ID NO: 21320 - protein, 19 aa, Homo sapiens
CARAARRVAGSGGYYFDYW

SEQ ID NO: 21321 - protein, 22 aa, Homo sapiens
CATDFGGDALTSYGGWLGFDPW

SEQ ID NO: 21322 - protein, 17 aa, Homo sapiens
CARDLVVVTATDAFDIW

SEQ ID NO: 21323 - protein, 18 aa, Homo sapiens
CTTPAIFCNGSTCYGDYW

SEQ ID NO: 21324 - protein, 24 aa, Homo sapiens
CARDDSGGIAVAGDYYYYYGMDVW

SEQ ID NO: 21325 - protein, 23 aa, Homo sapiens
CAREELYLGETTVRDFYYAMDVW

SEQ ID NO: 21326 - protein, 17 aa, Homo sapiens
CARDLLGYYGDYGPDYW

SEQ ID NO: 21327 - protein, 19 aa, Homo sapiens
CARVGWEALRRRVWYFDVW

SEQ ID NO: 21328 - protein, 21 aa, Homo sapiens
CARDYDYVWGSYRYTPPFDYW

SEQ ID NO: 21329 - protein, 16 aa, Homo sapiens
CAGGYSGYDSRVIDYW

SEQ ID NO: 21330 - protein, 15 aa, Homo sapiens
CVRVHNTNYGWFAPW

SEQ ID NO: 21331 - protein, 20 aa, Homo sapiens
CAHCIMGGTWNRRPAHFDDW

SEQ ID NO: 21332 - protein, 17 aa, Homo sapiens
CTKEPITMIVVFYFEYW

SEQ ID NO: 21333 - protein, 14 aa, Homo sapiens
CARIWGIKGPFDFW

SEQ ID NO: 21334 - protein, 22 aa, Homo sapiens
CARDHIAATGFVHYYYYGMDVW

SEQ ID NO: 21335 - protein, 22 aa, Homo sapiens
CAREGGVIAVAGTRYYYGMDVW

SEQ ID NO: 21336 - protein, 18 aa, Homo sapiens
CARLRAYCSGGSCPIDYW

SEQ ID NO: 21337 - protein, 24 aa, Homo sapiens
CARGPTIVVVPAQVGSHTNWFDPW

SEQ ID NO: 21338 - protein, 18 aa, Homo sapiens
CATWGYDYDRGTPFFDCW

SEQ ID NO: 21339 - protein, 21 aa, Homo sapiens
CARGGWVKSSGRYYYYGMDVW

SEQ ID NO: 21340 - protein, 25 aa, Homo sapiens
CARNGRGSDSSGYYYYYYYNGMDVW

SEQ ID NO: 21341 - protein, 20 aa, Homo sapiens
CAKDPRAESSGNFPAWFDPW

SEQ ID NO: 21342 - protein, 18 aa, Homo sapiens
CATGIAEAREIRGAFGVW

SEQ ID NO: 21343 - protein, 12 aa, Homo sapiens
CASEFGSTNDYW

SEQ ID NO: 21344 - protein, 16 aa, Homo sapiens
CARKRQQLVTASFDYW

SEQ ID NO: 21345 - protein, 23 aa, Homo sapiens
CARGYYYYDSGTYLDKSYYFDYW

SEQ ID NO: 21346 - protein, 16 aa, Homo sapiens
CAKAQGFSSSWFFDYW

SEQ ID NO: 21347 - protein, 18 aa, Homo sapiens
CARGGYCSGNNCGGYDYW

SEQ ID NO: 21348 - protein, 19 aa, Homo sapiens
CAGQSVFVDILPGHQVDYW

SEQ ID NO: 21349 - protein, 18 aa, Homo sapiens
CAHSGTVSMGYDGIPDYW

SEQ ID NO: 21350 - protein, 17 aa, Homo sapiens
CAKCQNAHYPRGAFDIW

SEQ ID NO: 21351 - protein, 17 aa, Homo sapiens
CARASPDWLLSLYFDYW

SEQ ID NO: 21352 - protein, 17 aa, Homo sapiens
CAYNSGGNYYYYGMDVW

SEQ ID NO: 21353 - protein, 20 aa, Homo sapiens
CASTRRLSSSWITYNWFDPW

SEQ ID NO: 21354 - protein, 17 aa, Homo sapiens
CVKDTGTGWSGAHFDYW

SEQ ID NO: 21355 - protein, 18 aa, Homo sapiens
CARGGDTSGWTYNWFDPW

SEQ ID NO: 21356 - protein, 19 aa, Homo sapiens
CARAGHCSGGSCFPVPDYW

SEQ ID NO: 21357 - protein, 16 aa, Homo sapiens
CARQMTWTAPSCFDYW

SEQ ID NO: 21358 - protein, 15 aa, Homo sapiens
CARGHSDGGDYYDYW

SEQ ID NO: 21359 - protein, 27 aa, Homo sapiens
CARVDSPYYYDSSGPLPAPQPGAFDIW

SEQ ID NO: 21360 - protein, 18 aa, Homo sapiens
CAYFDYYGSGSYRSDDYW

SEQ ID NO: 21361 - protein, 23 aa, Homo sapiens
CVKRNDYGDYYSHYYLYYGLDVW

SEQ ID NO: 21362 - protein, 18 aa, Homo sapiens
CARDASTPYDTSGYSDHW

SEQ ID NO: 21363 - protein, 18 aa, Homo sapiens
CAKKQGDYISGCPAPDYW

SEQ ID NO: 21364 - protein, 18 aa, Homo sapiens
CAKGPLGSGRSNNWFDPW

SEQ ID NO: 21365 - protein, 15 aa, Homo sapiens
CARISVVRGVSLDYW

SEQ ID NO: 21366 - protein, 11 aa, Homo sapiens
CASIAETFDYW

SEQ ID NO: 21367 - protein, 18 aa, Homo sapiens
CAKEPAPTGDYEPYFDYW

SEQ ID NO: 21368 - protein, 18 aa, Homo sapiens
CARDQYYYDSIFPAFDIW

SEQ ID NO: 21369 - protein, 22 aa, Homo sapiens
CARDMFAGSSGVNYYYYGMDVW

SEQ ID NO: 21370 - protein, 28 aa, Homo sapiens
CARVSKGYCSGGSCPAHGYYYYYGMDVW

SEQ ID NO: 21371 - protein, 26 aa, Homo sapiens
CAKLRNPQAYYDILTGYYKLGYFDYW

SEQ ID NO: 21372 - protein, 23 aa, Homo sapiens
CAKGLIAYDYVWGSYRLGPFDYW

SEQ ID NO: 21373 - protein, 17 aa, Homo sapiens
CARGATVDHYYYGMDVW

SEQ ID NO: 21374 - protein, 17 aa, Homo sapiens
CARRGPIVGPTGGFDFW

SEQ ID NO: 21375 - protein, 22 aa, Homo sapiens
CAKGEVAAAGTSDYYYYGMDVW

SEQ ID NO: 21376 - protein, 21 aa, Homo sapiens
CARDHRPDSYGQDYYYGMDVW

SEQ ID NO: 21377 - protein, 18 aa, Homo sapiens
CARDVPYYYGSGTVFDYW

SEQ ID NO: 21378 - protein, 19 aa, Homo sapiens
CARGNRRWLQLTSYYFDYW

SEQ ID NO: 21379 - protein, 18 aa, Homo sapiens
CARGHYYDMYISGYFALW

SEQ ID NO: 21380 - protein, 17 aa, Homo sapiens
CAKDIMGTGTTGELDYW

SEQ ID NO: 21381 - protein, 18 aa, Homo sapiens
CARGLERSDYVMDQFDPW

SEQ ID NO: 21382 - protein, 19 aa, Homo sapiens
CEKGGGPTVTTSDDGLDIW

SEQ ID NO: 21383 - protein, 17 aa, Homo sapiens
CASLYLFGFIAARDDYW

SEQ ID NO: 21384 - protein, 13 aa, Homo sapiens
CARQPPRNGIDYW

SEQ ID NO: 21385 - protein, 13 aa, Homo sapiens
CQYRSTWPPTVTF

SEQ ID NO: 21386 - protein, 21 aa, Homo sapiens
CSRVSMRSSWYPDPEYYFDSW

SEQ ID NO: 21387 - protein, 23 aa, Homo sapiens
CARDAVAVAGSSNRYYYYGMDVW

SEQ ID NO: 21388 - protein, 16 aa, Homo sapiens
CARDARYMVTKGLDYW

SEQ ID NO: 21389 - protein, 21 aa, Homo sapiens
CAKDVGLGNDGSWYYYGMDVW

SEQ ID NO: 21390 - protein, 16 aa, Homo sapiens
CARGREYSSTYYFDYW

SEQ ID NO: 21391 - protein, 16 aa, Homo sapiens
CARHGEEAGLDYFDYW

SEQ ID NO: 21392 - protein, 12 aa, Homo sapiens
CATEDSGYYHYW

SEQ ID NO: 21393 - protein, 14 aa, Homo sapiens
CTTDPTVAGTKDYW

SEQ ID NO: 21394 - protein, 22 aa, Homo sapiens
CARDQRARVGCNSTNCFYFDCW

SEQ ID NO: 21395 - protein, 12 aa, Homo sapiens
CQHYHSSPPYDF

SEQ ID NO: 21396 - protein, 19 aa, Homo sapiens
CARDRRRIAAAGRPWFDPW

SEQ ID NO: 21397 - protein, 39 aa, Homo sapiens
CLRAEDTAVYYCARDGSPFDVWFGELLSPYYYYYGMDVW

SEQ ID NO: 21398 - protein, 12 aa, Homo sapiens
CAKEDRGHLDYW

SEQ ID NO: 21399 - protein, 18 aa, Homo sapiens
CARTNFYGGNSRNAFDIW

SEQ ID NO: 21400 - protein, 16 aa, Homo sapiens
CTTWGAESRGYYFDHW

SEQ ID NO: 21401 - protein, 26 aa, Homo sapiens
CARDRTEQTYYDILSGSYHLERFGYW

SEQ ID NO: 21402 - protein, 16 aa, Homo sapiens
CARRGWLQLDGYFDYW

SEQ ID NO: 21403 - protein, 22 aa, Homo sapiens
CARAYTVATFWNYNDCDGMDVW

SEQ ID NO: 21404 - protein, 20 aa, Homo sapiens
CARDGMVVAATLYYYGMDVW

SEQ ID NO: 21405 - protein, 24 aa, Homo sapiens
CARDRPAYYYASDTYYHYYGMDVW

SEQ ID NO: 21406 - protein, 19 aa, Homo sapiens
CAKDTRRFRSGIAATFDYW

SEQ ID NO: 21407 - protein, 18 aa, Homo sapiens
CANAFCSSINCWGGFDYW

SEQ ID NO: 21408 - protein, 19 aa, Homo sapiens
CTPHPFRYSGGYSPNFGYW

SEQ ID NO: 21409 - protein, 21 aa, Homo sapiens
CARDRRYYDSSGYFLHAFDIW

SEQ ID NO: 21410 - protein, 19 aa, Homo sapiens
CARRYRYSGYDYRGAFDFW

SEQ ID NO: 21411 - protein, 17 aa, Homo sapiens
CARVGDSSGNYYVFDYW

SEQ ID NO: 21412 - protein, 13 aa, Homo sapiens
CARFGESPEDDYW

SEQ ID NO: 21413 - protein, 18 aa, Homo sapiens
CARQPPPDGYTQGAFDYW

SEQ ID NO: 21414 - protein, 16 aa, Homo sapiens
CAKGYNSDSKFSFDIW

SEQ ID NO: 21415 - protein, 16 aa, Homo sapiens
CATGFQGFPGDLFDTW

SEQ ID NO: 21416 - protein, 16 aa, Homo sapiens
CAKSSMTTVVTNFDYW

SEQ ID NO: 21417 - protein, 22 aa, Homo sapiens
CARGNLGSSWYLDYYYYGMDVW

SEQ ID NO: 21418 - protein, 19 aa, Homo sapiens
CAKVGYYGSGSPNWYFDLW

SEQ ID NO: 21419 - protein, 16 aa, Homo sapiens
CAREMTTVTIDYFDYW

SEQ ID NO: 21420 - protein, 15 aa, Homo sapiens
CAHYMLYSYGGFDYW

SEQ ID NO: 21421 - protein, 18 aa, Homo sapiens
CAKSRLAAMAGNDAFDMW

SEQ ID NO: 21422 - protein, 20 aa, Homo sapiens
CAKGPHYDSSGYSLHLFDYW

SEQ ID NO: 21423 - protein, 24 aa, Homo sapiens
CASRYCSGGSCYPVNYYYYGMDVW

SEQ ID NO: 21424 - protein, 20 aa, Homo sapiens
CARVDNTMVRRIVLDYFDYW

SEQ ID NO: 21425 - protein, 16 aa, Homo sapiens
CAKDYYGAGSYYFDYW

SEQ ID NO: 21426 - protein, 17 aa, Homo sapiens
CARTNPPIIYYYGMDVW

SEQ ID NO: 21427 - protein, 12 aa, Homo sapiens
CVVIEGTFFDYW

SEQ ID NO: 21428 - protein, 17 aa, Homo sapiens
CARFGEMDYYYYGMDVW

SEQ ID NO: 21429 - protein, 19 aa, Homo sapiens
CAREAVPVEMATINLIDYW

SEQ ID NO: 21430 - protein, 22 aa, Homo sapiens
CASVRASYYYDSSGYRSAFDYW

SEQ ID NO: 21431 - protein, 17 aa, Homo sapiens
CARGRGYGGSEGKIDYW

SEQ ID NO: 21432 - protein, 27 aa, Homo sapiens
CARGTSMKFGDIFRGYTYGNYYGMDVW

SEQ ID NO: 21433 - protein, 21 aa, Homo sapiens
CARVSGNEWVRDYYYYGMDVW

SEQ ID NO: 21434 - protein, 23 aa, Homo sapiens
CARDTTVVPAATRDYYYYGMDVW

SEQ ID NO: 21435 - protein, 21 aa, Homo sapiens
CARGRWDSSGSSYYYYAMDVW

SEQ ID NO: 21436 - protein, 21 aa, Homo sapiens
CAKGKRGDCGRQTCHPHFDFW

SEQ ID NO: 21437 - protein, 19 aa, Homo sapiens
CASNYGDPEAYYYYGMDVW

SEQ ID NO: 21438 - protein, 20 aa, Homo sapiens
CARVLYFHDSSAFSYYFDSW

SEQ ID NO: 21439 - protein, 18 aa, Homo sapiens
CAKAKGHYGDYYYGMDVW

SEQ ID NO: 21440 - protein, 22 aa, Homo sapiens
CARAGIAAAGTSGYYYYGMDVW

SEQ ID NO: 21441 - protein, 19 aa, Homo sapiens
CARDTPHYYGSPRGYFDRW

SEQ ID NO: 21442 - protein, 21 aa, Homo sapiens
CARDGAGNPARYGGNFVFDYW

SEQ ID NO: 21443 - protein, 16 aa, Homo sapiens
CAKDRGTTTGTLFDFW

SEQ ID NO: 21444 - protein, 15 aa, Homo sapiens
CARHGALGTAEFDYW

SEQ ID NO: 21445 - protein, 10 aa, Homo sapiens
CQRFYSFPHF

SEQ ID NO: 21446 - protein, 23 aa, Homo sapiens
CAAGSYYDILTGYYNLNIPFDYW

SEQ ID NO: 21447 - protein, 17 aa, Homo sapiens
CARDLPFSDYGDYGDYW

SEQ ID NO: 21448 - protein, 18 aa, Homo sapiens
CAKDSGYGSGTGGYFDLW

SEQ ID NO: 21449 - protein, 24 aa, Homo sapiens
CARDNSYLWLGELSGDRPSPCDYW

SEQ ID NO: 21450 - protein, 14 aa, Homo sapiens
CARINLWGGWFDPW

SEQ ID NO: 21451 - protein, 25 aa, Homo sapiens
CATVTGVYYGSGSSPYYYYYGMDVW

SEQ ID NO: 21452 - protein, 14 aa, Homo sapiens
CAREKDGSVDFDYW

SEQ ID NO: 21453 - protein, 12 aa, Homo sapiens
CARGGVEGFDFW

SEQ ID NO: 21454 - protein, 18 aa, Homo sapiens
CARVMKVRGYSYGYVDYW

SEQ ID NO: 21455 - protein, 15 aa, Homo sapiens
CARVVTWNYGAFDIW

SEQ ID NO: 21456 - protein, 19 aa, Homo sapiens
CARSRTVTTLFFSEPNDYW

SEQ ID NO: 21457 - protein, 23 aa, Homo sapiens
CARQIPDYDFLTSHYETYYFDYW

SEQ ID NO: 21458 - protein, 16 aa, Homo sapiens
CARDLGWLQWPNFDYW

SEQ ID NO: 21459 - protein, 19 aa, Homo sapiens
CANGNILEIFTFGRNFDSW

SEQ ID NO: 21460 - protein, 19 aa, Homo sapiens
CARLLDFFGSGSYYDFDYW

SEQ ID NO: 21461 - protein, 25 aa, Homo sapiens
CATDAWIAAAGTRLNNYYFYGMDVW

SEQ ID NO: 21462 - protein, 20 aa, Homo sapiens
CARDIGEGEDKYYYYGMDVW

SEQ ID NO: 21463 - protein, 25 aa, Homo sapiens
CARYRPVGYCSGGSCYGPENWFDPW

SEQ ID NO: 21464 - protein, 18 aa, Homo sapiens
CARLSEYVPGSFIPFDMW

SEQ ID NO: 21465 - protein, 17 aa, Homo sapiens
CAKDPSGTYYNYYFDYW

SEQ ID NO: 21466 - protein, 24 aa, Homo sapiens
CAKDRERYCSGGSCYYYYYGMDVW

SEQ ID NO: 21467 - protein, 15 aa, Homo sapiens
CANELAGGDYGFDYW

SEQ ID NO: 21468 - protein, 15 aa, Homo sapiens
CAKGVSSWYEYFQQW

SEQ ID NO: 21469 - protein, 23 aa, Homo sapiens
CAMARIAVAGTQFYYYYHGMDVW

SEQ ID NO: 21470 - protein, 18 aa, Homo sapiens
CASFRSVYSSGLGTFDYW

SEQ ID NO: 21471 - protein, 17 aa, Homo sapiens
CARDGPGSGWLPQFGYW

SEQ ID NO: 21472 - protein, 17 aa, Homo sapiens
CARDSVRHGDPDAFDFW

SEQ ID NO: 21473 - protein, 14 aa, Homo sapiens
CVAIAVAGSWFDPW

SEQ ID NO: 21474 - protein, 17 aa, Homo sapiens
CVHKYYYNSGSYYFDYW

SEQ ID NO: 21475 - protein, 18 aa, Homo sapiens
CARYRPRSGLTGYYFDYW

SEQ ID NO: 21476 - protein, 16 aa, Homo sapiens
CAKDLSIHIAVDGDYW

SEQ ID NO: 21477 - protein, 17 aa, Homo sapiens
CANGLGDTIAVAGSDYW

SEQ ID NO: 21478 - protein, 28 aa, Homo sapiens
CARLKAPYGSGSYYTGDPYYYYYGMDVW

SEQ ID NO: 21479 - protein, 17 aa, Homo sapiens
CARDHQIAVLTGYYSYW

SEQ ID NO: 21480 - protein, 17 aa, Homo sapiens
CARLDNVNGDMGGFGYW

SEQ ID NO: 21481 - protein, 22 aa, Homo sapiens
CARRIPGYDILTGYYNNWFDPW

SEQ ID NO: 21482 - protein, 21 aa, Homo sapiens
CARDSSTSSDDYFYYYEMDVW

SEQ ID NO: 21483 - protein, 19 aa, Homo sapiens
CARASFRDNWALGDYFDYW

SEQ ID NO: 21484 - protein, 18 aa, Homo sapiens
CTRDETGPYSSESVFDYW

SEQ ID NO: 21485 - protein, 24 aa, Homo sapiens
CARLGYCSGGSCHWINYYYGMDVW

SEQ ID NO: 21486 - protein, 21 aa, Homo sapiens
CARETYYYDSSGRTLPYFDYW

SEQ ID NO: 21487 - protein, 17 aa, Homo sapiens
CAHTASVLNYGDHFDYW

SEQ ID NO: 21488 - protein, 23 aa, Homo sapiens
CAKHLIIPDAYGDYDPNNWFDPW

SEQ ID NO: 21489 - protein, 24 aa, Homo sapiens
CARGPVVATRNEGNYYYYYGMDVW

SEQ ID NO: 21490 - protein, 12 aa, Homo sapiens
CASSLYDYGDYW

SEQ ID NO: 21491 - protein, 20 aa, Homo sapiens
CVKDRRGHYDSSGYNAVDVW

SEQ ID NO: 21492 - protein, 17 aa, Homo sapiens
CARVHKDQWLSPAFDVW

SEQ ID NO: 21493 - protein, 16 aa, Homo sapiens
CARGDYSGYDYYFDYW

SEQ ID NO: 21494 - protein, 17 aa, Homo sapiens
CARTTVTTSGAYYFDYW

SEQ ID NO: 21495 - protein, 18 aa, Homo sapiens
CAKAKDPAAVAGQPFDSW

SEQ ID NO: 21496 - protein, 22 aa, Homo sapiens
CARDLASDYGGKDYYYYGMDVW

SEQ ID NO: 21497 - protein, 20 aa, Homo sapiens
CARQAAGSSLAYYYYGMDVW

SEQ ID NO: 21498 - protein, 17 aa, Homo sapiens
CARASYSSSWYAAFDIW

SEQ ID NO: 21499 - protein, 15 aa, Homo sapiens
CTVNMIVVVTDFDYW

SEQ ID NO: 21500 - protein, 21 aa, Homo sapiens
CAKDSYCTGGNCFPYDAFDIW

SEQ ID NO: 21501 - protein, 18 aa, Homo sapiens
CAKDSSGWLKDLGWFDPW

SEQ ID NO: 21502 - protein, 12 aa, Homo sapiens
CLFWHQDVFDIW

SEQ ID NO: 21503 - protein, 18 aa, Homo sapiens
CARLRRGDGYKLYYFDCW

SEQ ID NO: 21504 - protein, 19 aa, Homo sapiens
CARAFHNVWSRDLYYFDYW

SEQ ID NO: 21505 - protein, 15 aa, Homo sapiens
CARDQAASYNWFDPW

SEQ ID NO: 21506 - protein, 21 aa, Homo sapiens
CARQIAFCTGGNCYCDHFDHW

SEQ ID NO: 21507 - protein, 15 aa, Homo sapiens
CARGAPGSGDSFDVW

SEQ ID NO: 21508 - protein, 17 aa, Homo sapiens
CAKDTGYSYGYSWFDPW

SEQ ID NO: 21509 - protein, 20 aa, Homo sapiens
CARDSEAAAYSYYYNGMDVW

SEQ ID NO: 21510 - protein, 22 aa, Homo sapiens
CARGLMSYYDSSGYSPPGFDIW

SEQ ID NO: 21511 - protein, 16 aa, Homo sapiens
CARLARSYQLAPFDYW

SEQ ID NO: 21512 - protein, 18 aa, Homo sapiens
CAHRPSTWTKASTWFDPW

SEQ ID NO: 21513 - protein, 21 aa, Homo sapiens
CAKDGYCSGGSCYYYYGMDVW

SEQ ID NO: 21514 - protein, 19 aa, Homo sapiens
CAKDQSMNTFGGDDAFDFW

SEQ ID NO: 21515 - protein, 17 aa, Homo sapiens
CARESYGGYSEGAFDIW

SEQ ID NO: 21516 - protein, 22 aa, Homo sapiens
CARHGTLLWFGESNQEDAFDIW

SEQ ID NO: 21517 - protein, 22 aa, Homo sapiens
CTRRVEWVAASAPTNYEGFDIW

SEQ ID NO: 21518 - protein, 16 aa, Homo sapiens
CAKDDSGDNNDAFDIW

SEQ ID NO: 21519 - protein, 26 aa, Homo sapiens
CARDFKVVQSGYDLRPSYYYYGMDVW

SEQ ID NO: 21520 - protein, 20 aa, Homo sapiens
CARDGDYYDSSGYYGWFDPW

SEQ ID NO: 21521 - protein, 22 aa, Homo sapiens
CARYLFRDYDILTGYYNWFDTW

SEQ ID NO: 21522 - protein, 18 aa, Homo sapiens
CARDKRGGFYHYYGMDVW

SEQ ID NO: 21523 - protein, 12 aa, Homo sapiens
CQQSNNYPRLTF

SEQ ID NO: 21524 - protein, 11 aa, Homo sapiens
CVGSDDSHDYW

SEQ ID NO: 21525 - protein, 14 aa, Homo sapiens
CARGSNHAYSFDFW

SEQ ID NO: 21526 - protein, 19 aa, Homo sapiens
CARYCRNMACRVPYAFDLW

SEQ ID NO: 21527 - protein, 18 aa, Homo sapiens
CARDQGWRWLQFGAFDIW

SEQ ID NO: 21528 - protein, 20 aa, Homo sapiens
CAREPLYNAPWNEPDAFDLW

SEQ ID NO: 21529 - protein, 19 aa, Homo sapiens
CARETYDSGGYYSPYFDYW

SEQ ID NO: 21530 - protein, 17 aa, Homo sapiens
CAKQALILSYVTVFDHW

SEQ ID NO: 21531 - protein, 24 aa, Homo sapiens
CAKAAQSHCSSTSCGYYYYGMDVW

SEQ ID NO: 21532 - protein, 19 aa, Homo sapiens
CARDGTANCGGDCYYFDYW

SEQ ID NO: 21533 - protein, 12 aa, Homo sapiens [sequence omitted]

SEQ ID NO: 21534 - protein, 21 aa, Homo sapiens
CASLKGYSSGWYSYYYGMDVW

SEQ ID NO: 21535 - protein, 18 aa, Homo sapiens
CARGYCSGGSCYPHFDYW

SEQ ID NO: 21536 - protein, 18 aa, Homo sapiens
CAKDIDVGATNSAVFDVW

SEQ ID NO: 21537 - protein, 14 aa, Homo sapiens
CARHGNDFQDFDYW

SEQ ID NO: 21538 - protein, 14 aa, Homo sapiens
CARDYMVAGYMDHW

SEQ ID NO: 21539 - protein, 23 aa, Homo sapiens
CARDGGRDGMATIIDSLTTFDYW

SEQ ID NO: 21540 - protein, 15 aa, Homo sapiens
CAKEGDWPAMRFDPW

SEQ ID NO: 21541 - protein, 24 aa, Homo sapiens
CARDLAAGTTGTSGYYYYYGMDVW

SEQ ID NO: 21542 - protein, 20 aa, Homo sapiens
CARDSYSSVGTDYYYGMDVW

SEQ ID NO: 21543 - protein, 16 aa, Homo sapiens
CASEVGSGWTAPLDYW

SEQ ID NO: 21544 - protein, 20 aa, Homo sapiens
CARDQSYYDSSGRVNWFDPW

SEQ ID NO: 21545 - protein, 17 aa, Homo sapiens
CVKGRAGYNQGGYFDSW

SEQ ID NO: 21546 - protein, 11 aa, Homo sapiens
CQQNNAYSSTF

SEQ ID NO: 21547 - protein, 22 aa, Homo sapiens
CARVVELADLWFGELSGSFDYW

SEQ ID NO: 21548 - protein, 19 aa, Homo sapiens
CARDRDYGDYVSVGAFDIW

SEQ ID NO: 21549 - protein, 16 aa, Homo sapiens
CAHTVDDSSGYCFDYW

SEQ ID NO: 21550 - protein, 14 aa, Homo sapiens
CARPIFGGNAFDFW

SEQ ID NO: 21551 - protein, 23 aa, Homo sapiens
CAKDSFIAAAGTGYYYYYGMDVW

SEQ ID NO: 21552 - protein, 22 aa, Homo sapiens
CARGLVSSGGLGYYYYYGMDVW

SEQ ID NO: 21553 - protein, 15 aa, Homo sapiens
CAKDFTKQQPDLDYW

SEQ ID NO: 21554 - protein, 22 aa, Homo sapiens
CAMSTLWFGELFPQPNDAFDIW

SEQ ID NO: 21555 - protein, 12 aa, Homo sapiens [sequence omitted]

SEQ ID NO: 21556 - protein, 14 aa, Homo sapiens
CARRGDYWRFFDFW

SEQ ID NO: 21557 - protein, 19 aa, Homo sapiens
CAHNQGDGGGNPEEWFDPW

SEQ ID NO: 21558 - protein, 22 aa, Homo sapiens
CARSLVLLWFGEPEREPYFDYW

SEQ ID NO: 21559 - protein, 25 aa, Homo sapiens
CARDMGTTPGIAAAGSYYYYGMDVW

SEQ ID NO: 21560 - protein, 19 aa, Homo sapiens
CARWVRGSGWPPIWYFDLW

SEQ ID NO: 21561 - protein, 16 aa, Homo sapiens
CAKDGYSGYGYYPDYW

SEQ ID NO: 21562 - protein, 16 aa, Homo sapiens
CAHRPQGIAAAGYDYW

SEQ ID NO: 21563 - protein, 21 aa, Homo sapiens
CARDSFQGGATTYYYYGMDVW

SEQ ID NO: 21564 - protein, 15 aa, Homo sapiens
CATVGGAAAGPFDYW

SEQ ID NO: 21565 - protein, 23 aa, Homo sapiens
CARDRVDSSSWFLDYYYYGMDVW

SEQ ID NO: 21566 - protein, 22 aa, Homo sapiens
CARDRLPWRYIAAAGIGYFDLW

SEQ ID NO: 21567 - protein, 14 aa, Homo sapiens
CAGSLATPYFFDSW

SEQ ID NO: 21568 - protein, 21 aa, Homo sapiens
CAKAAQLERRQVNYYYGMDVW

SEQ ID NO: 21569 - protein, 23 aa, Homo sapiens
CARDPPYYDILTGYYWLGLFDYW

SEQ ID NO: 21570 - protein, 17 aa, Homo sapiens
CASSGPDYGDGDAFDIW

SEQ ID NO: 21571 - protein, 18 aa, Homo sapiens
CARLRVGEDGYNWDFDYW

SEQ ID NO: 21572 - protein, 18 aa, Homo sapiens
CVRELLSFEELKHFFDSW

SEQ ID NO: 21573 - protein, 18 aa, Homo sapiens
CARRTANSGRRYGVSDYW

SEQ ID NO: 21574 - protein, 20 aa, Homo sapiens
CARDRVPLAVGGAVDAMDVW

SEQ ID NO: 21575 - protein, 20 aa, Homo sapiens
CAKDPLVAVATSDEKDFDYW

SEQ ID NO: 21576 - protein, 22 aa, Homo sapiens
CARQPTKRIVVVTASPYYFDYW

SEQ ID NO: 21577 - protein, 19 aa, Homo sapiens
CARDPYPYGSSHDWYFDLW

SEQ ID NO: 21578 - protein, 20 aa, Homo sapiens
CARSSQEIWFVGGNYFFDSW

SEQ ID NO: 21579 - protein, 17 aa, Homo sapiens
CARDRSSEWRDSWSDPW

SEQ ID NO: 21580 - protein, 21 aa, Homo sapiens
CSRLTGYTISWWGRHDAYDIW

SEQ ID NO: 21581 - protein, 17 aa, Homo sapiens
CATRVPGDRFFGVFDYW

SEQ ID NO: 21582 - protein, 18 aa, Homo sapiens
CARYRCSSSSCYIGFDPW

SEQ ID NO: 21583 - protein, 13 aa, Homo sapiens
CARAYDGGAFDVW

SEQ ID NO: 21584 - protein, 24 aa, Homo sapiens
CARDQREDYYDSSGYFSEFWFDPW

SEQ ID NO: 21585 - protein, 17 aa, Homo sapiens
CAKDLQIYDILTGFDYW

SEQ ID NO: 21586 - protein, 15 aa, Homo sapiens
CARALDGYVYLFDLW

SEQ ID NO: 21587 - protein, 20 aa, Homo sapiens
CARDGSYAVTSYYYYGMDVW

SEQ ID NO: 21588 - protein, 23 aa, Homo sapiens
CAKDTKIIAGDPPNYYYYGMDVW

SEQ ID NO: 21589 - protein, 23 aa, Homo sapiens
CARDRYYDILTGGPYYYYGMDVW

SEQ ID NO: 21590 - protein, 21 aa, Homo sapiens
CANQGYYYDAGTSFKSRFDYW

SEQ ID NO: 21591 - protein, 11 aa, Homo sapiens
CMQSKQLRLTF

SEQ ID NO: 21592 - protein, 23 aa, Homo sapiens
CARGVRGYYDILTGYYKRGEDYW

SEQ ID NO: 21593 - protein, 16 aa, Homo sapiens
CARRNVVDRRSAFDIW

SEQ ID NO: 21594 - protein, 15 aa, Homo sapiens
CARQRRGGDYYYDSW

SEQ ID NO: 21595 - protein, 16 aa, Homo sapiens
CARESTRGGSGDFDYW

SEQ ID NO: 21596 - protein, 20 aa, Homo sapiens
CARHSHSYSYGWDLAPFDIW

SEQ ID NO: 21597 - protein, 25 aa, Homo sapiens
CLRSEDTAVYYCARGYSSSWYVYYW

SEQ ID NO: 21598 - protein, 21 aa, Homo sapiens
CATALAVAGPEGYYYYGMDVW

SEQ ID NO: 21599 - protein, 19 aa, Homo sapiens
CARSSKLHDMYATLWFDSW

SEQ ID NO: 21600 - protein, 24 aa, Homo sapiens
CAKDFSVDTAMDGPYYYYYGMDVW

SEQ ID NO: 21601 - protein, 16 aa, Homo sapiens
CAKDYSDGYNYQFDNW

SEQ ID NO: 21602 - protein, 21 aa, Homo sapiens
CAKDGPYNWNDNYYYYGMDVW

SEQ ID NO: 21603 - protein, 15 aa, Homo sapiens
CARLPNFDWLLFDYW

SEQ ID NO: 21604 - protein, 23 aa, Homo sapiens
CAHSEEYASGHYVPNEHYYFDSW

SEQ ID NO: 21605 - protein, 25 aa, Homo sapiens
CARVILEPRGYCTSDNCYEYAFDVW

SEQ ID NO: 21606 - protein, 13 aa, Homo sapiens
CGYGGNSLGGDYW

SEQ ID NO: 21607 - protein, 22 aa, Homo sapiens
CARAIRGWYGRQPRMLNWFDPW

SEQ ID NO: 21608 - protein, 17 aa, Homo sapiens
CARNSAAGGPADAFDIW

SEQ ID NO: 21609 - protein, 14 aa, Homo sapiens
CARSERGGIQLDYW

SEQ ID NO: 21610 - protein, 13 aa, Homo sapiens
CAHRVGDGAFDYW

SEQ ID NO: 21611 - protein, 21 aa, Homo sapiens
CARWGDFCSGGSCYAYYFDYW

SEQ ID NO: 21612 - protein, 22 aa, Homo sapiens
CASASPYYYGSGVDEDNWFDPW

SEQ ID NO: 21613 - protein, 18 aa, Homo sapiens
CAQYYDILTGYYGSFDYW

SEQ ID NO: 21614 - protein, 27 aa, Homo sapiens
CARLVDCSGGSCYSGSYYYYYYGMDVW

SEQ ID NO: 21615 - protein, 24 aa, Homo sapiens
CAKDWAVAGSGQEQYYYYYGMDVW

SEQ ID NO: 21616 - protein, 18 aa, Homo sapiens
CAKDPDSSGYLTTHFDYW

SEQ ID NO: 21617 - protein, 18 aa, Homo sapiens
CVRGSGNAYGFGGPFDHW

SEQ ID NO: 21618 - protein, 18 aa, Homo sapiens
CTTDFLLEGGSYRTFDYW

SEQ ID NO: 21619 - protein, 18 aa, Homo sapiens
CLKDTVDSGMLEGYFDFW

SEQ ID NO: 21620 - protein, 19 aa, Homo sapiens
CAKDSAYYGNDWGGYFDIW

SEQ ID NO: 21621 - protein, 26 aa, Homo sapiens
CDWSSDVCSSDLGWPFRERRNSFDIW

SEQ ID NO: 21622 - protein, 15 aa, Homo sapiens
CTRPVVEGYNWFDPW

SEQ ID NO: 21623 - protein, 42 aa, Homo sapiens
CALPICFPQLQTTPHAMQPDNLPKTSSSSCHSSAITKYIIYW

SEQ ID NO: 21624 - protein, 15 aa, Homo sapiens
CARDGTSNDDFFDYW

SEQ ID NO: 21625 - protein, 16 aa, Homo sapiens
CATASQLWFSGWFDPW

SEQ ID NO: 21626 - protein, 18 aa, Homo sapiens
CARHPVDTAMVTGWFDPW

SEQ ID NO: 21627 - protein, 17 aa, Homo sapiens
CARVGGVRRGGDAFDIW

SEQ ID NO: 21628 - protein, 22 aa, Homo sapiens
CARDRRYYGSGTPYYYYGMDVW

SEQ ID NO: 21629 - protein, 13 aa, Homo sapiens
CAAVKGTTFGDYW

SEQ ID NO: 21630 - protein, 22 aa, Homo sapiens
CAREGLLWFGELLLAGFPVDYW

SEQ ID NO: 21631 - protein, 17 aa, Homo sapiens
CAKDPSSSWHYWYFDLW

SEQ ID NO: 21632 - protein, 22 aa, Homo sapiens
CARDGVAATEHMLYYYYGMDVW

SEQ ID NO: 21633 - protein, 22 aa, Homo sapiens
CAKGKADQQWLVPASYWYFDLW

SEQ ID NO: 21634 - protein, 22 aa, Homo sapiens
CARAADTSGLGRLPNLSCFDPW

SEQ ID NO: 21635 - protein, 18 aa, Homo sapiens
CARDRSPERLYYYGMDVW

SEQ ID NO: 21636 - protein, 18 aa, Homo sapiens
CAREELLHLGELSYLDYW

SEQ ID NO: 21637 - protein, 16 aa, Homo sapiens
CVKAQTRWPDWFFDLW

SEQ ID NO: 21638 - protein, 15 aa, Homo sapiens
CAKDLITMVRGNDYW

SEQ ID NO: 21639 - protein, 20 aa, Homo sapiens
CARDQFNFIGVFGSNPFDPW

SEQ ID NO: 21640 - protein, 21 aa, Homo sapiens
CARGGYSGYEPSYYYRAMDVW

SEQ ID NO: 21641 - protein, 21 aa, Homo sapiens
CTTEGAFCGGACHSNQVFDYW

SEQ ID NO: 21642 - protein, 21 aa, Homo sapiens
CARDKHPTGSTSYYYYGMDVW

SEQ ID NO: 21643 - protein, 19 aa, Homo sapiens
CVKDITPIAVAATEGFDSW

SEQ ID NO: 21644 - protein, 18 aa, Homo sapiens
CARGLPYYETSDSPFDYW

SEQ ID NO: 21645 - protein, 13 aa, Homo sapiens
CQSPDISGDRWVF

SEQ ID NO: 21646 - protein, 17 aa, Homo sapiens
CAKDRYSGYGDDAFDIW

SEQ ID NO: 21647 - protein, 19 aa, Homo sapiens
CTTDSNWNDYYYYYGMDVW

SEQ ID NO: 21648 - protein, 11 aa, Homo sapiens
CAAVDYGSDYW

SEQ ID NO: 21649 - protein, 20 aa, Homo sapiens
CARVGKYCSGGSCYRTFDYW

SEQ ID NO: 21650 - protein, 18 aa, Homo sapiens
CARDGNTQWLVRHYFDYW

SEQ ID NO: 21651 - protein, 15 aa, Homo sapiens
CAIWRRYGSGSLDYW

SEQ ID NO: 21652 - protein, 14 aa, Homo sapiens
CAGGLGIRSGFEYW

SEQ ID NO: 21653 - protein, 14 aa, Homo sapiens
CVKVVGAPGGFDQW

SEQ ID NO: 21654 - protein, 18 aa, Homo sapiens
CAREWPMIRGVINHFDSW

SEQ ID NO: 21655 - protein, 21 aa, Homo sapiens
CARDKESTVTPYYYYYGMDVW

SEQ ID NO: 21656 - protein, 16 aa, Homo sapiens
CAKDIGSWFNGAFDMW

SEQ ID NO: 21657 - protein, 14 aa, Homo sapiens
CASLAGDYEDFDYW

SEQ ID NO: 21658 - protein, 25 aa, Homo sapiens
CARGQGYDILGTDQLYYYYYGMDVW

SEQ ID NO: 21659 - protein, 21 aa, Homo sapiens
CARARYYYYDSSGPEGYFDYW

SEQ ID NO: 21660 - protein, 20 aa, Homo sapiens
CARDEYSYGQMTYYYGMDVW

SEQ ID NO: 21661 - protein, 21 aa, Homo sapiens
CARDMYTAHDSYYYYYGMDVW

SEQ ID NO: 21662 - protein, 19 aa, Homo sapiens
CARPRRYSASDSTDAFDLW

SEQ ID NO: 21663 - protein, 20 aa, Homo sapiens
CAREMGRAPYYDGSGYPDYW

SEQ ID NO: 21664 - protein, 18 aa, Homo sapiens
CAKTHMGSDLYYYGMDVW

SEQ ID NO: 21665 - protein, 26 aa, Homo sapiens
CARETTHIAAAGSDSVGYYYYGMDVW

SEQ ID NO: 21666 - protein, 16 aa, Homo sapiens
CARAKYSSGSRWFDPW

SEQ ID NO: 21667 - protein, 22 aa, Homo sapiens
CARDLYDSSGYYAGPSVAFDIW

SEQ ID NO: 21668 - protein, 18 aa, Homo sapiens
CARTDDILTGYYMGIDYW

SEQ ID NO: 21669 - protein, 19 aa, Homo sapiens
CARAFCRGGAGCYEGFDLW

SEQ ID NO: 21670 - protein, 18 aa, Homo sapiens
CAGAPLPTWGDYPFFDFW

SEQ ID NO: 21671 - protein, 15 aa, Homo sapiens
CAVWDDNLSGPGYVF

SEQ ID NO: 21672 - protein, 18 aa, Homo sapiens
CTSGPRGNFDWLPPLDYW

SEQ ID NO: 21673 - protein, 16 aa, Homo sapiens
CARVPTLTTDLYFDYW

SEQ ID NO: 21674 - protein, 25 aa, Homo sapiens
CARHSDYYDSSGYYSPDYYYGMDVW

SEQ ID NO: 21675 - protein, 14 aa, Homo sapiens
CAHTYDYVGVFDYW

SEQ ID NO: 21676 - protein, 19 aa, Homo sapiens
CARDSLFYESRYYYGMDVW

SEQ ID NO: 21677 - protein, 17 aa, Homo sapiens
CARAPRAIAATGYFQYW

SEQ ID NO: 21678 - protein, 22 aa, Homo sapiens
CAKDQYYYGSGTNGGPNWFDPW

SEQ ID NO: 21679 - protein, 16 aa, Homo sapiens
CAKDMEASADWALDYW

SEQ ID NO: 21680 - protein, 24 aa, Homo sapiens
CARDTSQSIAVAGTPYYYYGMDVW

SEQ ID NO: 21681 - protein, 11 aa, Homo sapiens
CQQSDGMPFAF

SEQ ID NO: 21682 - protein, 17 aa, Homo sapiens
CARGVVGALYPYYFDSW

SEQ ID NO: 21683 - protein, 18 aa, Homo sapiens
CARPLRDGYKVEGAFDLW

SEQ ID NO: 21684 - protein, 19 aa, Homo sapiens
CAKPLYIIYGDSLNPLDYW

SEQ ID NO: 21685 - protein, 16 aa, Homo sapiens
CAKDLRYFDWDGMDVW

SEQ ID NO: 21686 - protein, 18 aa, Homo sapiens
CARGLYIWGSGDRSFDVW

SEQ ID NO: 21687 - protein, 16 aa, Homo sapiens
CARPQDGYSNTYFDYW

SEQ ID NO: 21688 - protein, 14 aa, Homo sapiens
CQLWDSSSDPPYVF

SEQ ID NO: 21689 - protein, 15 aa, Homo sapiens
CARVNVGDPNYFDYW

SEQ ID NO: 21690 - protein, 22 aa, Homo sapiens
CANIQYDILTGYRLKENPFDYW

SEQ ID NO: 21691 - protein, 21 aa, Homo sapiens
CAREGWRGYSGYDYGGPADYW

SEQ ID NO: 21692 - protein, 16 aa, Homo sapiens
CARPQGGSYFGQFDYW

SEQ ID NO: 21693 - protein, 14 aa, Homo sapiens
CAVSRSHYGYFDHW

SEQ ID NO: 21694 - protein, 16 aa, Homo sapiens
CAHINGRGVVDAFDIW

SEQ ID NO: 21695 - protein, 15 aa, Homo sapiens
CAHRGWLLPNAFDYW

SEQ ID NO: 21696 - protein, 18 aa, Homo sapiens
CARTSALRYEPSWYFDLW

SEQ ID NO: 21697 - protein, 22 aa, Homo sapiens
CAKDGPYSGYDEDYYYYGMDVW

SEQ ID NO: 21698 - protein, 25 aa, Homo sapiens
CARGPVVPAAATYRSGYYYYGMDVW

SEQ ID NO: 21699 - protein, 23 aa, Homo sapiens
CARVSFERADSGSYYSPLNFDYW

SEQ ID NO: 21700 - protein, 21 aa, Homo sapiens
CARDGVMGGTTNYYYYGMDVW

SEQ ID NO: 21701 - protein, 24 aa, Homo sapiens
CARRAPEHLYASGTYQVLYYLDSW

SEQ ID NO: 21702 - protein, 17 aa, Homo sapiens
CTREVWGSYGSYFFDYW

SEQ ID NO: 21703 - protein, 24 aa, Homo sapiens
CARDGWYYYDSSGYYYDGVGIDYW

SEQ ID NO: 21704 - protein, 19 aa, Homo sapiens
CASSQPGIVVVTLGYLDYW

SEQ ID NO: 21705 - protein, 15 aa, Homo sapiens
CARVLGSSWYYFDYW

SEQ ID NO: 21706 - protein, 12 aa, Homo sapiens [sequence omitted]

SEQ ID NO: 21707 - protein, 25 aa, Homo sapiens
CARVNVLGAYCGGDCHYYYYGMDVW

SEQ ID NO: 21708 - protein, 15 aa, Homo sapiens
CQSYDSSVSNSRYVF

SEQ ID NO: 21709 - protein, 23 aa, Homo sapiens
CARHWPNRSYYYDSSGYPNFDYW

SEQ ID NO: 21710 - protein, 18 aa, Homo sapiens
CAKDLRSGSYDLGVLDYW

SEQ ID NO: 21711 - protein, 20 aa, Homo sapiens
CARDYIARGTDYYYYGMDVW

SEQ ID NO: 21712 - protein, 20 aa, Homo sapiens
CAKDGDSSGYIGTYNWFDPW

SEQ ID NO: 21713 - protein, 19 aa, Homo sapiens
CARGHHDVVGYYWRFFDLW

SEQ ID NO: 21714 - protein, 20 aa, Homo sapiens
CARDRVRYSDAGDYYSFDYW

SEQ ID NO: 21715 - protein, 21 aa, Homo sapiens
CARGGTISMTVVVTNDAFHIW

SEQ ID NO: 21716 - protein, 20 aa, Homo sapiens
CAHSRGRAVGGVIAQFFDFW

SEQ ID NO: 21717 - protein, 17 aa, Homo sapiens
CAKDAHSWIQLWFFDYW

SEQ ID NO: 21718 - protein, 15 aa, Homo sapiens
CAVAGTVSGWPIDYW

SEQ ID NO: 21719 - protein, 19 aa, Homo sapiens
CVTMRAYMSVLYYYGMDVW

SEQ ID NO: 21720 - protein, 17 aa, Homo sapiens
CARLGSDNRGYKGFDYW

SEQ ID NO: 21721 - protein, 17 aa, Homo sapiens
CARERRGWLQSDAFDIW

SEQ ID NO: 21722 - protein, 22 aa, Homo sapiens
CARHPRYCSGGSCYDHDAFDIW

SEQ ID NO: 21723 - protein, 12 aa, Homo sapiens
CSGAQLGTFDYW

SEQ ID NO: 21724 - protein, 20 aa, Homo sapiens
CAHGGYTGLAAKTLYYFDSW

SEQ ID NO: 21725 - protein, 25 aa, Homo sapiens
CARVASYCSSTSCFMDYYYYGMDVW

SEQ ID NO: 21726 - protein, 24 aa, Homo sapiens
CAREAHYYDSSGYHPYYYYGMDVW

SEQ ID NO: 21727 - protein, 15 aa, Homo sapiens
CQSADRSGTHLHVIF

SEQ ID NO: 21728 - protein, 13 aa, Homo sapiens
CTNLEWGGGLDYW

SEQ ID NO: 21729 - protein, 17 aa, Homo sapiens
CARLIEDDYGDYYLDYW

SEQ ID NO: 21730 - protein, 28 aa, Homo sapiens
CARDPTYYDILTGYYTQYYYYYYGMDVW

SEQ ID NO: 21731 - protein, 28 aa, Homo sapiens
CAKGEYCSGGSCYSNSSSYYYYYGMDVW

SEQ ID NO: 21732 - protein, 17 aa, Homo sapiens
CARGRRAGDYLNKFDSW

SEQ ID NO: 21733 - protein, 34 aa, Homo sapiens
CLRSEDTAVYYCAREELYLGETTVRDFYYAMDVW

SEQ ID NO: 21734 - protein, 18 aa, Homo sapiens
CARMRWGYGGNSQYLDYW

SEQ ID NO: 21735 - protein, 16 aa, Homo sapiens
CARDTTGTTGNWFDPW

SEQ ID NO: 21736 - protein, 19 aa, Homo sapiens
CARGPYYDILTGYYPNDYW

SEQ ID NO: 21737 - protein, 15 aa, Homo sapiens
CARDGGPTYGDLDYW

SEQ ID NO: 21738 - protein, 16 aa, Homo sapiens
CARDRRDGYNPYFGYW

SEQ ID NO: 21739 - protein, 24 aa, Homo sapiens
CARDSPYRVGRENSYSTPNWFDPW

SEQ ID NO: 21740 - protein, 16 aa, Homo sapiens
CARDSSTDNWYEIDYW

SEQ ID NO: 21741 - protein, 24 aa, Homo sapiens
CARDRVPHSTVTIGYYYYYGMDVW

SEQ ID NO: 21742 - protein, 31 aa, Homo sapiens
CLRAEDTAVYYCARDGVAVAGSYYYYGMDVW

SEQ ID NO: 21743 - protein, 24 aa, Homo sapiens
CARESGLNVRASGLGYYYYGMDIW

SEQ ID NO: 21744 - protein, 18 aa, Homo sapiens
CARTVRMQWLAGTEPDYW

SEQ ID NO: 21745 - protein, 16 aa, Homo sapiens
CARDLRTIVGVFFDYW

SEQ ID NO: 21746 - protein, 19 aa, Homo sapiens
CAREHISWGAVAGTTFDIW

SEQ ID NO: 21747 - protein, 15 aa, Homo sapiens
CARMTGDPPNAFDYW

SEQ ID NO: 21748 - protein, 17 aa, Homo sapiens
CARDFNLGSSWYLFDNW

SEQ ID NO: 21749 - protein, 19 aa, Homo sapiens
CARHLSGDIVATIGFFDYW

SEQ ID NO: 21750 - protein, 13 aa, Homo sapiens
CASIVGVTKGDYW

SEQ ID NO: 21751 - protein, 17 aa, Homo sapiens
CAKDQGRGVVGYYFDYW

SEQ ID NO: 21752 - protein, 17 aa, Homo sapiens
CVTSLGPLRYALLFDYW

SEQ ID NO: 21753 - protein, 20 aa, Homo sapiens
CARDPGYCSSTSCYEPFDYW

SEQ ID NO: 21754 - protein, 23 aa, Homo sapiens
CARDLAGWPPERTYYYYYGMDVW

SEQ ID NO: 21755 - protein, 16 aa, Homo sapiens
CARDWRVVGADAFDYW

SEQ ID NO: 21756 - protein, 18 aa, Homo sapiens
CARLLGFNWASGWYFDLW

SEQ ID NO: 21757 - protein, 18 aa, Homo sapiens
CARGGYYGSGSPKYFQHW

SEQ ID NO: 21758 - protein, 16 aa, Homo sapiens
CARESYFQGAAYFDYW

SEQ ID NO: 21759 - protein, 17 aa, Homo sapiens
CAKGTSIAAAGPLFDYW

SEQ ID NO: 21760 - protein, 35 aa, Homo sapiens
CALPILRSEDTAIYYCTKNYPFCTGGDCYYGFDIW

SEQ ID NO: 21761 - protein, 19 aa, Homo sapiens
CARRYSSSWPSMGYWFDPW

SEQ ID NO: 21762 - protein, 17 aa, Homo sapiens
CASSVPDDYGFYYFNYW

SEQ ID NO: 21763 - protein, 15 aa, Homo sapiens
CARSEVSSGSDLDYW

SEQ ID NO: 21764 - protein, 21 aa, Homo sapiens
CARDIGAAVAGNEYYYGMDVW

SEQ ID NO: 21765 - protein, 18 aa, Homo sapiens
CAKTYSYGYLPYYGMDVW

SEQ ID NO: 21766 - protein, 18 aa, Homo sapiens
CARESIHRIVGATTFDYW

SEQ ID NO: 21767 - protein, 16 aa, Homo sapiens
CATRSRISPLVGFDPW

SEQ ID NO: 21768 - protein, 14 aa, Homo sapiens
CASEMVLGDYFDYW

SEQ ID NO: 21769 - protein, 15 aa, Homo sapiens
CARTKELPLVHFDSW

SEQ ID NO: 21770 - protein, 21 aa, Homo sapiens
CATDRNSYGYEGYYYYGMDVW

SEQ ID NO: 21771 - protein, 15 aa, Homo sapiens
CVKEGGGGWNALDSW

SEQ ID NO: 21772 - protein, 27 aa, Homo sapiens
CARDLQPMCSGGSCYSEEYYYYGMDVW

SEQ ID NO: 21773 - protein, 15 aa, Homo sapiens
CARDRHGGSWSPDYW

SEQ ID NO: 21774 - protein, 14 aa, Homo sapiens
CARGGHNSDWFDPW

SEQ ID NO: 21775 - protein, 15 aa, Homo sapiens
CARVPQWPRFTFDYW

SEQ ID NO: 21776 - protein, 15 aa, Homo sapiens
CATSGQWNLHAFDIW

SEQ ID NO: 21777 - protein, 19 aa, Homo sapiens
CARDGLPHSAYYYHGMDVW

SEQ ID NO: 21778 - protein, 21 aa, Homo sapiens
CAKDARVGATDDYYYYGMDVW

SEQ ID NO: 21779 - protein, 15 aa, Homo sapiens
CAKDSDGDTAMVDYW

SEQ ID NO: 21780 - protein, 13 aa, Homo sapiens
CASKGKSELSDYW

SEQ ID NO: 21781 - protein, 22 aa, Homo sapiens
CARDIVDTAPREGLYYYGMDVW

SEQ ID NO: 21782 - protein, 14 aa, Homo sapiens
CARREEQWLAHDYW

SEQ ID NO: 21783 - protein, 15 aa, Homo sapiens
CAKGAVTNSGSFDSW

SEQ ID NO: 21784 - protein, 20 aa, Homo sapiens
CARDPLWIQLWAPRFSFDLW

SEQ ID NO: 21785 - protein, 16 aa, Homo sapiens
CAKPVGSNLKYYFDYW

SEQ ID NO: 21786 - protein, 14 aa, Homo sapiens
CQSYDSSESASGLF

SEQ ID NO: 21787 - protein, 19 aa, Homo sapiens
CARERERDIVATYDAFDIW

SEQ ID NO: 21788 - protein, 19 aa, Homo sapiens
CARECSYYDSSGTDAFDIW

SEQ ID NO: 21789 - protein, 13 aa, Homo sapiens
CARDMGWHSLDYW

SEQ ID NO: 21790 - protein, 16 aa, Homo sapiens
CATWGDTAMDYYFDYW

SEQ ID NO: 21791 - protein, 15 aa, Homo sapiens
CARMWYSYGPVFDLW

SEQ ID NO: 21792 - protein, 16 aa, Homo sapiens
CTRDLCTSTSCVFDHW

SEQ ID NO: 21793 - protein, 15 aa, Homo sapiens
CARARSLGASYFDYW

SEQ ID NO: 21794 - protein, 17 aa, Homo sapiens
CASLTGYSSSWYVGDYW

SEQ ID NO: 21795 - protein, 26 aa, Homo sapiens
CAKAKGPYGSGSLSRTLYYYYGMDVW

SEQ ID NO: 21796 - protein, 19 aa, Homo sapiens
CATPGYYDILTGPYYFDYW

SEQ ID NO: 21797 - protein, 14 aa, Homo sapiens
CGAWDDTLNGQYVF

SEQ ID NO: 21798 - protein, 16 aa, Homo sapiens
CARGFIIAPLSWFDPW

SEQ ID NO: 21799 - protein, 15 aa, Homo sapiens
CAKDLAPGVGATDYW

SEQ ID NO: 21800 - protein, 13 aa, Homo sapiens
CNSRDSSHKHLLF

SEQ ID NO: 21801 - protein, 22 aa, Homo sapiens
CATGTSLYYYDSSGYHNWFDPW

SEQ ID NO: 21802 - protein, 18 aa, Homo sapiens
CARDMYDYVWGSFVWDYW

SEQ ID NO: 21803 - protein, 15 aa, Homo sapiens
CARGPPSIVGGFDYW

SEQ ID NO: 21804 - protein, 18 aa, Homo sapiens
CARDVMVRGDPVFENDYW

SEQ ID NO: 21805 - protein, 21 aa, Homo sapiens
CAKTQAGYSSGLDYYYGMDVW

SEQ ID NO: 21806 - protein, 18 aa, Homo sapiens
CVKDIGSGFYSYYGMDVW

SEQ ID NO: 21807 - protein, 20 aa, Homo sapiens
CARDMAVSGYDHYYYGMDVW

SEQ ID NO: 21808 - protein, 24 aa, Homo sapiens
CAKDHPPAVLLWFGEPNLHPFDYW

SEQ ID NO: 21809 - protein, 19 aa, Homo sapiens
CATERITFGGVIGPPFDYW

SEQ ID NO: 21810 - protein, 19 aa, Homo sapiens
CVSRLDSNFWHTPADFDIW

SEQ ID NO: 21811 - protein, 36 aa, Homo sapiens
CSLYLQMNSLRPEDTAFYYCAKAMVREVLLNYFDYW

SEQ ID NO: 21812 - protein, 17 aa, Homo sapiens
CARDWMSRGVYYYFDYW

SEQ ID NO: 21813 - protein, 24 aa, Homo sapiens
CAKALLDYDSSGYYEGVSDAFDIW

SEQ ID NO: 21814 - protein, 19 aa, Homo sapiens
CAGYGTVEMATIGDAFDIW

SEQ ID NO: 21815 - protein, 19 aa, Homo sapiens
CAKEPIFSGDSCCTLGDYW

SEQ ID NO: 21816 - protein, 17 aa, Homo sapiens
CARHGWELRRTTLFDAW

SEQ ID NO: 21817 - protein, 21 aa, Homo sapiens
CARDSRHYGSGSLYYYGMDVW

SEQ ID NO: 21818 - protein, 19 aa, Homo sapiens
CAKGQPGIQLWLHSYFDYW

SEQ ID NO: 21819 - protein, 16 aa, Homo sapiens
CARERASGERAYFDLW

SEQ ID NO: 21820 - protein, 12 aa, Homo sapiens
CMEGAHWPRGTF

SEQ ID NO: 21821 - protein, 15 aa, Homo sapiens
CAKIPYGSGSSFDYW

SEQ ID NO: 21822 - protein, 16 aa, Homo sapiens
CAKDEARGPQLLFYYW

SEQ ID NO: 21823 - protein, 17 aa, Homo sapiens
CARSSTAMEKRGAFDIW

SEQ ID NO: 21824 - protein, 19 aa, Homo sapiens
CARHGDPYYYDSSGYFDYW

SEQ ID NO: 21825 - protein, 16 aa, Homo sapiens
CTRGWTHLWLNGFDVW

SEQ ID NO: 21826 - protein, 16 aa, Homo sapiens
CARVDSTMVPYCFDLW

SEQ ID NO: 21827 - protein, 23 aa, Homo sapiens
CARAANYGGTAANYGGTSEFDYW

SEQ ID NO: 21828 - protein, 24 aa, Homo sapiens
CASHLFGTSYDILTGYYNGWFDPW

SEQ ID NO: 21829 - protein, 17 aa, Homo sapiens
CARDPGDDYGDYGFDYW

SEQ ID NO: 21830 - protein, 16 aa, Homo sapiens
CAMTTVTRPQYYFDYW

SEQ ID NO: 21831 - protein, 21 aa, Homo sapiens
CARDRYSSSPTNYYYYGMDVW

SEQ ID NO: 21832 - protein, 16 aa, Homo sapiens
CAKDGMYSSSWSFDYW

SEQ ID NO: 21833 - protein, 19 aa, Homo sapiens
CSASYYAITGYVTYGFDMW

SEQ ID NO: 21834 - protein, 17 aa, Homo sapiens
CARRQSLLLVQAAFDSW

SEQ ID NO: 21835 - protein, 18 aa, Homo sapiens
CARSRPRMIEAAGPSDYW

SEQ ID NO: 21836 - protein, 14 aa, Homo sapiens
CQSADISPTYRYVF

SEQ ID NO: 21837 - protein, 21 aa, Homo sapiens
CARGGWTYGSGSYAVNWFDPW

SEQ ID NO: 21838 - protein, 16 aa, Homo sapiens
CARGLYYGACCAFDIW

SEQ ID NO: 21839 - protein, 16 aa, Homo sapiens
CARDLYDSSGSQIDYW

SEQ ID NO: 21840 - protein, 25 aa, Homo sapiens
CAKDAKIAAAGTDGANYYYYGMDVW

SEQ ID NO: 21841 - protein, 18 aa, Homo sapiens
CTRGPPWYNGYKGGFDYW

SEQ ID NO: 21842 - protein, 17 aa, Homo sapiens
CARASPQTGYYYGMDVW

SEQ ID NO: 21843 - protein, 18 aa, Homo sapiens
CAKSDDSSGYYTVIFDYW

SEQ ID NO: 21844 - protein, 20 aa, Homo sapiens
CAHITRRGYNGYDWDCLDYW

SEQ ID NO: 21845 - protein, 13 aa, Homo sapiens
CARSSFITFFDFW

SEQ ID NO: 21846 - protein, 28 aa, Homo sapiens
CARAQAAYFDWQILSGKYYYYYYGMDVW

SEQ ID NO: 21847 - protein, 18 aa, Homo sapiens
CASINSSGWYDGDAFDIW

SEQ ID NO: 21848 - protein, 14 aa, Homo sapiens
CAHRSTAMVTFDYW

SEQ ID NO: 21849 - protein, 17 aa, Homo sapiens
CARDRRARTFYYALDVW

SEQ ID NO: 21850 - protein, 16 aa, Homo sapiens
CATPGPGSGYTPFDIW

SEQ ID NO: 21851 - protein, 20 aa, Homo sapiens
CASDQAAAASTDYYYGMDVW

SEQ ID NO: 21852 - protein, 18 aa, Homo sapiens
CAKEDSSREYGYGAIDYW

SEQ ID NO: 21853 - protein, 25 aa, Homo sapiens
CTGDGPYRSNSNVLHFYYYYGMDIW

SEQ ID NO: 21854 - protein, 19 aa, Homo sapiens
CATPQLLGGIAVAGTFDYW

SEQ ID NO: 21855 - protein, 15 aa, Homo sapiens
CLLSYSGPSGPDVLF

SEQ ID NO: 21856 - protein, 23 aa, Homo sapiens
CVRGTVNYGYDIELGELYYFDYW

SEQ ID NO: 21857 - protein, 17 aa, Homo sapiens
CARGSPVGQRTDVFDIW

SEQ ID NO: 21858 - protein, 17 aa, Homo sapiens
CAQRRSRGYYFGPFDPW

SEQ ID NO: 21859 - protein, 12 aa, Homo sapiens
CSGGSCYRDDYW

SEQ ID NO: 21860 - protein, 19 aa, Homo sapiens
CAKVLGNYYDSSGISFDYW

SEQ ID NO: 21861 - protein, 18 aa, Homo sapiens
CARVLTYYYDGRNAFDIW

SEQ ID NO: 21862 - protein, 15 aa, Homo sapiens
CAKEMDGDIPPFDYW

SEQ ID NO: 21863 - protein, 22 aa, Homo sapiens
CARDARGVSGWYGSYYYGMDVW

SEQ ID NO: 21864 - protein, 21 aa, Homo sapiens
CANLLQLWLLGGIEDSYVDYW

SEQ ID NO: 21865 - protein, 13 aa, Homo sapiens
CQAFDSSLSGWAF

SEQ ID NO: 21866 - protein, 24 aa, Homo sapiens
CARDMVAVAGESPQNYYYYGMDVW

SEQ ID NO: 21867 - protein, 18 aa, Homo sapiens
CARGGWDSSWRNNWFDPW

SEQ ID NO: 21868 - protein, 14 aa, Homo sapiens
CARDLVEELLFDIW

SEQ ID NO: 21869 - protein, 20 aa, Homo sapiens
CAKERQAVAGTYYYYGMDVW

SEQ ID NO: 21870 - protein, 13 aa, Homo sapiens
CAKDVRAGALDYW

SEQ ID NO: 21871 - protein, 21 aa, Homo sapiens
CARDRLPYYESSGSNDAFDIW

SEQ ID NO: 21872 - protein, 18 aa, Homo sapiens
CARQAWSYTDFPYYFDYW

SEQ ID NO: 21873 - protein, 20 aa, Homo sapiens
CAKGSYDSSGYYYEGYFHHW

SEQ ID NO: 21874 - protein, 17 aa, Homo sapiens
CAKDYNVRGWSSMLDYW

SEQ ID NO: 21875 - protein, 22 aa, Homo sapiens
CARGLVSSTSTNSYYYYGMDVW

SEQ ID NO: 21876 - protein, 16 aa, Homo sapiens
CARDQSRVNPRRFDYW

SEQ ID NO: 21877 - protein, 19 aa, Homo sapiens
CARHPIVGAAYPYNWFDPW

SEQ ID NO: 21878 - protein, 16 aa, Homo sapiens
CAKDHVSGSYLGFDHW

SEQ ID NO: 21879 - protein, 16 aa, Homo sapiens
CARQGWGDAYSLFDNW

SEQ ID NO: 21880 - protein, 15 aa, Homo sapiens
CAQGYISGWYGVDYW

SEQ ID NO: 21881 - protein, 15 aa, Homo sapiens
CARDPLIVADAFDIW

SEQ ID NO: 21882 - protein, 12 aa, Homo sapiens
CQWYGDSPGSSF

SEQ ID NO: 21883 - protein, 22 aa, Homo sapiens
CARPTSYYDILTGPNGGAFDIW

SEQ ID NO: 21884 - protein, 17 aa, Homo sapiens
CARDLGDYGSGEGFDPW

SEQ ID NO: 21885 - protein, 20 aa, Homo sapiens
CARGGPLRDGYNQRGAFDIW

SEQ ID NO: 21886 - protein, 11 aa, Homo sapiens
CVAERNWNDYW

SEQ ID NO: 21887 - protein, 15 aa, Homo sapiens
CAREYQLLWTWFDPW

SEQ ID NO: 21888 - protein, 15 aa, Homo sapiens
CAKDRGYTYGSPDYW

SEQ ID NO: 21889 - protein, 15 aa, Homo sapiens
CASRFWGSSSHFDYW

SEQ ID NO: 21890 - protein, 18 aa, Homo sapiens
CARGRASYDRLHYYFDYW

SEQ ID NO: 21891 - protein, 13 aa, Homo sapiens
CARSAVVTPFDPW

SEQ ID NO: 21892 - protein, 18 aa, Homo sapiens
CATIDYGDYQRGHAFDIW

SEQ ID NO: 21893 - protein, 18 aa, Homo sapiens
CARSRDSGSYDSDGADYW

SEQ ID NO: 21894 - protein, 19 aa, Homo sapiens
CAHSHYDILTGYFFGFDYW

SEQ ID NO: 21895 - protein, 23 aa, Homo sapiens
CAREKRHYEVLTGYYEGYYFDYW

SEQ ID NO: 21896 - protein, 16 aa, Homo sapiens
CARDCPLPCYDAFDIW

SEQ ID NO: 21897 - protein, 19 aa, Homo sapiens
CAKDTGYYYGSGTSNFDYW

SEQ ID NO: 21898 - protein, 37 aa, Homo sapiens
CTAYLQISSLKAEDTAVYYCARERSVIDHPYDAFDIW

SEQ ID NO: 21899 - protein, 18 aa, Homo sapiens
CAKDLYYEILTGPFLDYW

SEQ ID NO: 21900 - protein, 23 aa, Homo sapiens
CARDQYGSGSVGTAYYHYGMDVW

SEQ ID NO: 21901 - protein, 20 aa, Homo sapiens
CAKDFLELKSGYYYYGMDVW

SEQ ID NO: 21902 - protein, 18 aa, Homo sapiens
CAREKGYSEYFFDAFDIW

SEQ ID NO: 21903 - protein, 16 aa, Homo sapiens
CARDVRQQLVQGFDPW

SEQ ID NO: 21904 - protein, 25 aa, Homo sapiens
CARAHQYYDYVWGSPIYYYYGMDVW

SEQ ID NO: 21905 - protein, 18 aa, Homo sapiens
CARDNQIAAAGTRGFDYW

SEQ ID NO: 21906 - protein, 22 aa, Homo sapiens
CARDLDGGYGSNYYYYYGMDVW

SEQ ID NO: 21907 - protein, 19 aa, Homo sapiens
CAMHIPAAIDGVLEYFQHW

SEQ ID NO: 21908 - protein, 14 aa, Homo sapiens
CGTWDSSLTPGGLF

SEQ ID NO: 21909 - protein, 16 aa, Homo sapiens
CALLRTHYYYYGMDVW

SEQ ID NO: 21910 - protein, 17 aa, Homo sapiens
CARDHYGYNYLDAFDIW

SEQ ID NO: 21911 - protein, 21 aa, Homo sapiens
CARDEGYCSGGSCLQYYFDYW

SEQ ID NO: 21912 - protein, 22 aa, Homo sapiens
CARDSGTTAAAAPYYYYGMDVW

SEQ ID NO: 21913 - protein, 20 aa, Homo sapiens
CARGGTSCYECPFSSWFDPW

SEQ ID NO: 21914 - protein, 18 aa, Homo sapiens
CARDALGSDFMGPAIDYW

SEQ ID NO: 21915 - protein, 9 aa, Homo sapiens
CQQANSFQF

SEQ ID NO: 21916 - protein, 16 aa, Homo sapiens
CAKSNGIAVSNPFDYW

SEQ ID NO: 21917 - protein, 18 aa, Homo sapiens
CVRVGFGHVYGGYAADYW

SEQ ID NO: 21918 - protein, 15 aa, Homo sapiens
CARWDRELLGGFDYW

SEQ ID NO: 21919 - protein, 13 aa, Homo sapiens
CALSTTPHFFDYW

SEQ ID NO: 21920 - protein, 19 aa, Homo sapiens
CVRGVYSSGWSGYWYFDLW

SEQ ID NO: 21921 - protein, 17 aa, Homo sapiens
CARGRSAGMAASGFDYW

SEQ ID NO: 21922 - protein, 31 aa, Homo sapiens
CALPISALYFCARDRLPYYESSGSNDAFDIW

SEQ ID NO: 21923 - protein, 14 aa, Homo sapiens
CARPLQVGGNYFYW

SEQ ID NO: 21924 - protein, 19 aa, Homo sapiens
CAKDMVATSSTWYGGIDYW

SEQ ID NO: 21925 - protein, 15 aa, Homo sapiens
CARDMDWNDIYFDYW

SEQ ID NO: 21926 - protein, 17 aa, Homo sapiens
CARLGWGSWSYYPFDYW

SEQ ID NO: 21927 - protein, 14 aa, Homo sapiens
CNSRDSSRNLSYVF

SEQ ID NO: 21928 - protein, 24 aa, Homo sapiens
CARDLTTVTTVQGTHYYYYGMDVW

SEQ ID NO: 21929 - protein, 18 aa, Homo sapiens
CARAGYCSSTSCYSMDYW

SEQ ID NO: 21930 - protein, 15 aa, Homo sapiens
CAKDRVGLRFTFDYW

SEQ ID NO: 21931 - protein, 11 aa, Homo sapiens
CARESNPNDYW

SEQ ID NO: 21932 - protein, 16 aa, Homo sapiens
CARSFWGGYNSPFDYW

SEQ ID NO: 21933 - protein, 18 aa, Homo sapiens
CARESPYYDSYYYGMDVW

SEQ ID NO: 21934 - protein, 15 aa, Homo sapiens
CAKDHYYGGTSFDCW

SEQ ID NO: 21935 - protein, 20 aa, Homo sapiens
CARDSTVAGTDSYYYGMDVW

SEQ ID NO: 21936 - protein, 22 aa, Homo sapiens
CARDGLGITGTTHYYYYGMDVW

SEQ ID NO: 21937 - protein, 20 aa, Homo sapiens
CARDSRYESGGHLHWYLDLW

SEQ ID NO: 21938 - protein, 21 aa, Homo sapiens
CARDLPQYYYDSSYHAVFDYW

SEQ ID NO: 21939 - protein, 19 aa, Homo sapiens
CAKDRSPGVGGDESSFDSW

SEQ ID NO: 21940 - protein, 16 aa, Homo sapiens
CARDMAVGVAGDLDYW

SEQ ID NO: 21941 - protein, 18 aa, Homo sapiens
CAKDLQEWLAYAEFFQHW

SEQ ID NO: 21942 - protein, 16 aa, Homo sapiens
CAKERGSGWYEPQDYW

SEQ ID NO: 21943 - protein, 20 aa, Homo sapiens
CARDRGAAGPTYYYYGMDVW

SEQ ID NO: 21944 - protein, 14 aa, Homo sapiens
CTTVARYGDFIDYW

SEQ ID NO: 21945 - protein, 18 aa, Homo sapiens
CARPEVAVLGRRYAFDIW

SEQ ID NO: 21946 - protein, 22 aa, Homo sapiens
CVKDITYYYGSGRSYGVAMDVW

SEQ ID NO: 21947 - protein, 15 aa, Homo sapiens
CQSYDNSLRGRDVLF

SEQ ID NO: 21948 - protein, 22 aa, Homo sapiens
CARDWGGRPSMIVVAPDAFDIW

SEQ ID NO: 21949 - protein, 14 aa, Homo sapiens
CQQSYSTPPALHTF

SEQ ID NO: 21950 - protein, 11 aa, Homo sapiens
CQQFINHPFTF

SEQ ID NO: 21951 - protein, 16 aa, Homo sapiens
CAKGLGSTVAHGFDNW

SEQ ID NO: 21952 - protein, 19 aa, Homo sapiens
CAKDIKMTTQYYYYGMDVW

SEQ ID NO: 21953 - protein, 20 aa, Homo sapiens
CARLGAYCGGDCYSRGIDYW

SEQ ID NO: 21954 - protein, 19 aa, Homo sapiens
CARDCIAAECYYYYGMDVW

SEQ ID NO: 21955 - protein, 15 aa, Homo sapiens
CAKDRGGSYIPFDYW

SEQ ID NO: 21956 - protein, 16 aa, Homo sapiens
CARGHGGDAYHYFDFW

SEQ ID NO: 21957 - protein, 16 aa, Homo sapiens
CAKGAGWLVLEVVDYW

SEQ ID NO: 21958 - protein, 18 aa, Homo sapiens
CAKEAVATWDYYYGMDVW

SEQ ID NO: 21959 - protein, 17 aa, Homo sapiens
CAKEGDYYGSGKPFDYW

SEQ ID NO: 21960 - protein, 12 aa, Homo sapiens
CAAELGIGFDYW

SEQ ID NO: 21961 - protein, 18 aa, Homo sapiens
CAKAGGQGLVGTTHFDYW

SEQ ID NO: 21962 - protein, 18 aa, Homo sapiens
CARTGNYDDSRDDAFDIW

SEQ ID NO: 21963 - protein, 23 aa, Homo sapiens
CAKVHSEYSSSWVIYYYYGMDVW

SEQ ID NO: 21964 - protein, 21 aa, Homo sapiens
CARDIKGAAADDYYYYGMDVW

SEQ ID NO: 21965 - protein, 17 aa, Homo sapiens
CAHRHANYWGNDLYDVW

SEQ ID NO: 21966 - protein, 20 aa, Homo sapiens
CARTLVRGAYFVYYYGMDVW

SEQ ID NO: 21967 - protein, 16 aa, Homo sapiens
CARGRFNGYIHYFDYW

SEQ ID NO: 21968 - protein, 12 aa, Homo sapiens
CARDFRETVDYW

SEQ ID NO: 21969 - protein, 26 aa, Homo sapiens
CARDLGSSDPQWGYLSYHQYYALDVW

SEQ ID NO: 21970 - protein, 14 aa, Homo sapiens
CARRSRRDGCLDYW

SEQ ID NO: 21971 - protein, 18 aa, Homo sapiens
CARDATAVAGNDNAFDIW

SEQ ID NO: 21972 - protein, 17 aa, Homo sapiens
CARDRPDYGDYPNFDSW

SEQ ID NO: 21973 - protein, 17 aa, Homo sapiens
CAGAPDRGYRAFAFRYW

SEQ ID NO: 21974 - protein, 20 aa, Homo sapiens
CVRQMGYFYDSSGYSSFDYW

SEQ ID NO: 21975 - protein, 14 aa, Homo sapiens [sequence omitted]

SEQ ID NO: 21976 - protein, 14 aa, Homo sapiens
CARWDAVVSYFDYW

SEQ ID NO: 21977 - protein, 15 aa, Homo sapiens
CAKHLKVRSSSFDYW

SEQ ID NO: 21978 - protein, 22 aa, Homo sapiens
CAKARITMIVVVDYYYYGMDVW

SEQ ID NO: 21979 - protein, 16 aa, Homo sapiens
CARHFNWGEYWYFDLW

SEQ ID NO: 21980 - protein, 12 aa, Homo sapiens [sequence omitted]

SEQ ID NO: 21981 - protein, 25 aa, Homo sapiens
CARGAHYYDSSGYYYLQVSNAFDIW

SEQ ID NO: 21982 - protein, 21 aa, Homo sapiens
CARGERGTLWFGELNNYFDYW

SEQ ID NO: 21983 - protein, 21 aa, Homo sapiens
CATTPFGVYYGSGSPWYFDYW

SEQ ID NO: 21984 - protein, 23 aa, Homo sapiens
CARDGMVRGVTSENYYYYGMDVW

SEQ ID NO: 21985 - protein, 15 aa, Homo sapiens
CARTYTEHDWPFGYW

SEQ ID NO: 21986 - protein, 27 aa, Homo sapiens
CARYGEPSSWYLSFSWTLPANNWFDPW

SEQ ID NO: 21987 - protein, 19 aa, Homo sapiens
CTTMDAPYSDIVVVPADYW

SEQ ID NO: 21988 - protein, 19 aa, Homo sapiens
CARAPAEYYYGHVDYFGFW

SEQ ID NO: 21989 - protein, 17 aa, Homo sapiens
CASYYASGNYYSLFDHW

SEQ ID NO: 21990 - protein, 18 aa, Homo sapiens
CARVGIIDMYFTKWSDYW

SEQ ID NO: 21991 - protein, 16 aa, Homo sapiens
CAKDIKDTAMAGLDYW

SEQ ID NO: 21992 - protein, 17 aa, Homo sapiens
CARDGGYRQPHWYFDLW

SEQ ID NO: 21993 - protein, 16 aa, Homo sapiens
CARGGFGELLYFFDYW

SEQ ID NO: 21994 - protein, 13 aa, Homo sapiens
CAVGFSSDNPDYW

SEQ ID NO: 21995 - protein, 17 aa, Homo sapiens
CAKAGKTYTLTDWFDPW

SEQ ID NO: 21996 - protein, 18 aa, Homo sapiens
CARDHKGGWSPYWYFDLW

SEQ ID NO: 21997 - protein, 23 aa, Homo sapiens
CAKDALMVRGTPLNYYYYGKDVW

SEQ ID NO: 21998 - protein, 19 aa, Homo sapiens
CAREASIPRYGSGSYLPYW

SEQ ID NO: 21999 - protein, 18 aa, Homo sapiens
CARHELWYGSGNNWFDPW

SEQ ID NO: 22000 - protein, 12 aa, Homo sapiens [sequence omitted]

SEQ ID NO: 22001 - protein, 17 aa, Homo sapiens
CARAEGIYSGSRSIDYW

SEQ ID NO: 22002 - protein, 20 aa, Homo sapiens
CASIAAADTAFYYYYGMDVW

SEQ ID NO: 22003 - protein, 22 aa, Homo sapiens
CARDFWFGEILFRDVGHAFDIW

SEQ ID NO: 22004 - protein, 15 aa, Homo sapiens
CAGVNGDYSSRFDPW

SEQ ID NO: 22005 - protein, 15 aa, Homo sapiens
CARVDSSSWDGMDVW

SEQ ID NO: 22006 - protein, 16 aa, Homo sapiens
CATLEYSSGWYSFDYW

SEQ ID NO: 22007 - protein, 16 aa, Homo sapiens
CATTGSGSYWGYFDYW

SEQ ID NO: 22008 - protein, 24 aa, Homo sapiens
CARSGIAAADPGRVDYYYHGMDVW

SEQ ID NO: 22009 - protein, 15 aa, Homo sapiens
CARATVVSRSVLDYW

SEQ ID NO: 22010 - protein, 13 aa, Homo sapiens
CAQTGLRGWFDPW

SEQ ID NO: 22011 - protein, 20 aa, Homo sapiens
CAHRGGDYDSGWNEDVFDYW

SEQ ID NO: 22012 - protein, 16 aa, Homo sapiens
CARGGGIAMDDAFDIW

SEQ ID NO: 22013 - protein, 18 aa, Homo sapiens
CARGSPVPEYGDYDFDYW

SEQ ID NO: 22014 - protein, 20 aa, Homo sapiens
CARGFWTSRDGYNWGAFDIW

SEQ ID NO: 22015 - protein, 22 aa, Homo sapiens
CARDLPYYAILTGYSISPFDYW

SEQ ID NO: 22016 - protein, 17 aa, Homo sapiens
CAKGPPGSLVRDYFDYW

SEQ ID NO: 22017 - protein, 15 aa, Homo sapiens
CVRGLGWEHGWFGPW

SEQ ID NO: 22018 - protein, 15 aa, Homo sapiens
CAGSRQLVWLWFDPW

SEQ ID NO: 22019 - protein, 18 aa, Homo sapiens
CAREGDGSGSYSWWFDPW

SEQ ID NO: 22020 - protein, 13 aa, Homo sapiens
CARELSGWPFDYW

SEQ ID NO: 22021 - protein, 17 aa, Homo sapiens
CARLGSSGSQHVYFDYW

SEQ ID NO: 22022 - protein, 17 aa, Homo sapiens
CARDNNQWGSGDAFDIW

SEQ ID NO: 22023 - protein, 24 aa, Homo sapiens
CAKDTDNRLLLWFGELFGSYFDYW

SEQ ID NO: 22024 - protein, 19 aa, Homo sapiens
CARDLSRRYTYGFHYFDYW

SEQ ID NO: 22025 - protein, 17 aa, Homo sapiens
CAKARGPSRYFPAFDYW

SEQ ID NO: 22026 - protein, 22 aa, Homo sapiens
CAKDPGYPIQTLYYYYYGMDVW

SEQ ID NO: 22027 - protein, 14 aa, Homo sapiens
CAREWLVRDYFDYW

SEQ ID NO: 22028 - protein, 16 aa, Homo sapiens
CARVVGATKAYYFDYW

SEQ ID NO: 22029 - protein, 21 aa, Homo sapiens
CARGGYSLRRPLYYYYGMDVW

SEQ ID NO: 22030 - protein, 18 aa, Homo sapiens
CARDLQDYYDSSGYYDYW

SEQ ID NO: 22031 - protein, 17 aa, Homo sapiens
CAAAAAGTSYYYGMDVW

SEQ ID NO: 22032 - protein, 23 aa, Homo sapiens
CARDWAYYYDSSGYYSYDAFDIW

SEQ ID NO: 22033 - protein, 14 aa, Homo sapiens
CARSPIGAAAKDYW

SEQ ID NO: 22034 - protein, 15 aa, Homo sapiens
CAREKAPMVPTFDYW

SEQ ID NO: 22035 - protein, 17 aa, Homo sapiens
CAKVFVAEQWLAPFDYW

SEQ ID NO: 22036 - protein, 15 aa, Homo sapiens
CARRGIQLWNIFDYW

SEQ ID NO: 22037 - protein, 17 aa, Homo sapiens
CARWSGWYSSTPSFDLW

SEQ ID NO: 22038 - protein, 12 aa, Homo sapiens
CQQYTSNSVLTF

SEQ ID NO: 22039 - protein, 21 aa, Homo sapiens
CASAHRGDCSTGACHNFFDPW

SEQ ID NO: 22040 - protein, 17 aa, Homo sapiens
CAREAEGPLRTDAFDIW

SEQ ID NO: 22041 - protein, 22 aa, Homo sapiens
CAKDQEPQLLWFGESLYYFDYW

SEQ ID NO: 22042 - protein, 15 aa, Homo sapiens
CAAAQGLSSGWFDSW

SEQ ID NO: 22043 - protein, 26 aa, Homo sapiens
CARDIYGRSVGGEPNDYYYYYGMDVW

SEQ ID NO: 22044 - protein, 20 aa, Homo sapiens
CARDTYSSSSSVYYYGMDVW

SEQ ID NO: 22045 - protein, 15 aa, Homo sapiens
CARLSSGFYYSVDYW

SEQ ID NO: 22046 - protein, 13 aa, Homo sapiens
CARGSRFGEFGYW

SEQ ID NO: 22047 - protein, 19 aa, Homo sapiens
CARGPHYYDSSGFLYFNYW

SEQ ID NO: 22048 - protein, 23 aa, Homo sapiens
CAREVAGGTCSKERSLCNWFDPW

SEQ ID NO: 22049 - protein, 15 aa, Homo sapiens
CASQLLPYYYGMDVW

SEQ ID NO: 22050 - protein, 19 aa, Homo sapiens
CARHGYYYDVSASWYFDYW

SEQ ID NO: 22051 - protein, 22 aa, Homo sapiens
CARVKLVPAPMGLWYYYGMDVW

SEQ ID NO: 22052 - protein, 20 aa, Homo sapiens
CASVLRDYSDTLPYYNFDYW

SEQ ID NO: 22053 - protein, 20 aa, Homo sapiens
CARLTYNYGSGSYGYYFDNW

SEQ ID NO: 22054 - protein, 20 aa, Homo sapiens
CASLQGRYSSGWYDNWFDPW

SEQ ID NO: 22055 - protein, 22 aa, Homo sapiens
CAKEVVATEQGGIYYYYGMDVW

SEQ ID NO: 22056 - protein, 19 aa, Homo sapiens
CTTHPPEWELLFPYYFDYW

SEQ ID NO: 22057 - protein, 16 aa, Homo sapiens
CASFVAAAVAGGFDYW

SEQ ID NO: 22058 - protein, 17 aa, Homo sapiens
CVREGYTSGRCGAFDIW

SEQ ID NO: 22059 - protein, 17 aa, Homo sapiens
CAWSSGYYLYYYGMDVW

SEQ ID NO: 22060 - protein, 20 aa, Homo sapiens
CARHLVDTAMVRDYWYFDLW

SEQ ID NO: 22061 - protein, 19 aa, Homo sapiens
CARVTYDRSGSVSGYFDYW

SEQ ID NO: 22062 - protein, 19 aa, Homo sapiens
CARVGNTAMVIGVYYFENW

SEQ ID NO: 22063 - protein, 27 aa, Homo sapiens
CARDFKVVPAANGEDETNYYYYGMDVW

SEQ ID NO: 22064 - protein, 18 aa, Homo sapiens
CARVGEYHFESSGYYDYW

SEQ ID NO: 22065 - protein, 24 aa, Homo sapiens
CARDRVARGLFITGKYSYYAMDVW

SEQ ID NO: 22066 - protein, 19 aa, Homo sapiens
CATDATVSHPGYYYGMDVW

SEQ ID NO: 22067 - protein, 16 aa, Homo sapiens
CAKECGSTCPNLFDYW

SEQ ID NO: 22068 - protein, 22 aa, Homo sapiens
CARLHDYYDSSGYTVAYAFDIW

SEQ ID NO: 22069 - protein, 27 aa, Homo sapiens
CARDAGVVSLGEVVTQEYYYYYGMDVW

SEQ ID NO: 22070 - protein, 18 aa, Homo sapiens
CARVGAARNYYYYGMDVW

SEQ ID NO: 22071 - protein, 19 aa, Homo sapiens
CAHRGTLYGSSWDDAFDVW

SEQ ID NO: 22072 - protein, 23 aa, Homo sapiens
CAKEITADIVATKTLGAPEFDYW

SEQ ID NO: 22073 - protein, 13 aa, Homo sapiens
CVRGGVSGSHDYW

SEQ ID NO: 22074 - protein, 21 aa, Homo sapiens
CARSVYSSSWAGSRPGWFDPW

SEQ ID NO: 22075 - protein, 21 aa, Homo sapiens
CARASWRSSGWYERSYYFDYW

SEQ ID NO: 22076 - protein, 18 aa, Homo sapiens
CARQGYTGPEMGYHFDFW

SEQ ID NO: 22077 - protein, 22 aa, Homo sapiens
CAKDKASYDYVWGSYRSPLDYW

SEQ ID NO: 22078 - protein, 21 aa, Homo sapiens
CARDREERQQLALYYYGMDVW

SEQ ID NO: 22079 - protein, 15 aa, Homo sapiens
CVSPQQYSSGWYDYW

SEQ ID NO: 22080 - protein, 18 aa, Homo sapiens
CARDLFSGTRGWGLFDYW

SEQ ID NO: 22081 - protein, 16 aa, Homo sapiens
CARDAPLYGDYPFDYW

SEQ ID NO: 22082 - protein, 14 aa, Homo sapiens
CARHVWAESYFDYW

SEQ ID NO: 22083 - protein, 16 aa, Homo sapiens
CAHSSYGSGRYYFDFW

SEQ ID NO: 22084 - protein, 28 aa, Homo sapiens
CAKALRYSSGWYLPRPSRSPNDWYFDLW

SEQ ID NO: 22085 - protein, 14 aa, Homo sapiens
CAKHSSSWSAFDHW

SEQ ID NO: 22086 - protein, 21 aa, Homo sapiens
CAKEYELHIVVVTARWGFDYW

SEQ ID NO: 22087 - protein, 16 aa, Homo sapiens
CVRHRWELLINAFDLW

SEQ ID NO: 22088 - protein, 23 aa, Homo sapiens
CASFLQDIVVVTAIARLDAFDIW

SEQ ID NO: 22089 - protein, 17 aa, Homo sapiens
CATDQGHASDEDYFRYW

SEQ ID NO: 22090 - protein, 21 aa, Homo sapiens
CAREILSYYDTTSFSNWLDPW

SEQ ID NO: 22091 - protein, 18 aa, Homo sapiens
CARAVYGGNRHDDAFDIW

SEQ ID NO: 22092 - protein, 15 aa, Homo sapiens
CARDSLSAAGALDYW

SEQ ID NO: 22093 - protein, 16 aa, Homo sapiens
CARDPGVVGSTYFDYW

SEQ ID NO: 22094 - protein, 21 aa, Homo sapiens
CAREGDCSGGSCPLGDAFDIW

SEQ ID NO: 22095 - protein, 21 aa, Homo sapiens
CARDLYYDSTGYYWGDAFDLW

SEQ ID NO: 22096 - protein, 20 aa, Homo sapiens
CARAPGSENDGGYYYGMDVW

SEQ ID NO: 22097 - protein, 21 aa, Homo sapiens
CAKGEVDIVATYYYYYGMDVW

SEQ ID NO: 22098 - protein, 18 aa, Homo sapiens
CAKDSPWYSSGWGQVDYW

SEQ ID NO: 22099 - protein, 18 aa, Homo sapiens
CVRGQDRYSGRYRDFDYW

SEQ ID NO: 22100 - protein, 19 aa, Homo sapiens
CAKDGSGYYYGVYFYFDYW

SEQ ID NO: 22101 - protein, 17 aa, Homo sapiens
CARDSVIGFGELLSDYW

SEQ ID NO: 22102 - protein, 13 aa, Homo sapiens [sequence omitted]

SEQ ID NO: 22103 - protein, 15 aa, Homo sapiens
CARLITYPTYYFDYW

SEQ ID NO: 22104 - protein, 13 aa, Homo sapiens
CQSYDKSDTDVVF

SEQ ID NO: 22105 - protein, 18 aa, Homo sapiens
CAGPGTAAAMVNDAFDIW

SEQ ID NO: 22106 - protein, 26 aa, Homo sapiens
CARDMHYGSGSYYNGDYYYYYGMDVW

SEQ ID NO: 22107 - protein, 17 aa, Homo sapiens
CARGAVAWFGPNWFDPW

SEQ ID NO: 22108 - protein, 15 aa, Homo sapiens
CARVSWDLVGAFDIW

SEQ ID NO: 22109 - protein, 17 aa, Homo sapiens
CARHWGPSTGWYFIDYW

SEQ ID NO: 22110 - protein, 33 aa, Homo sapiens
CALPICSLKASDTAMYYCASGIGMITKLGFDYW

SEQ ID NO: 22111 - protein, 16 aa, Homo sapiens
CASVGSSYGYWANDYW

SEQ ID NO: 22112 - protein, 19 aa, Homo sapiens
CARAWPPFGDYGGDAFDFW

SEQ ID NO: 22113 - protein, 17 aa, Homo sapiens
CARVGSERYEYESFDIW

SEQ ID NO: 22114 - protein, 19 aa, Homo sapiens
CAHTHRYCSGGSCYSFDYW

SEQ ID NO: 22115 - protein, 23 aa, Homo sapiens
CARGISIAVAGTLGGWYNWFDPW

SEQ ID NO: 22116 - protein, 21 aa, Homo sapiens
CAHRVRYTVYEGGGRYYFDHW

SEQ ID NO: 22117 - protein, 25 aa, Homo sapiens
CARDLGAAAGLNPPTYYYYYGMDVW

SEQ ID NO: 22118 - protein, 15 aa, Homo sapiens
CARRDLKKNDAFDIW

SEQ ID NO: 22119 - protein, 24 aa, Homo sapiens
CARDQVGYYDSSGYSSYYYGMDVW

SEQ ID NO: 22120 - protein, 19 aa, Homo sapiens
CAISPLNKAWYVGYNFDYW

SEQ ID NO: 22121 - protein, 13 aa, Homo sapiens
CAAAVGADPPDYW

SEQ ID NO: 22122 - protein, 21 aa, Homo sapiens
CARDGIAVAGTFFGFRYFDYW

SEQ ID NO: 22123 - protein, 13 aa, Homo sapiens
CARALSYYPIDYW

SEQ ID NO: 22124 - protein, 19 aa, Homo sapiens
CAHTGGYSSSYFPFAFDIW

SEQ ID NO: 22125 - protein, 22 aa, Homo sapiens
CARQPYYDSSGYYRGRYYFDYW

SEQ ID NO: 22126 - protein, 17 aa, Homo sapiens
CAKGQGQLVYEPAFDYW

SEQ ID NO: 22127 - protein, 14 aa, Homo sapiens
CASISSGWSIYDYW

SEQ ID NO: 22128 - protein, 18 aa, Homo sapiens
CARTWIGYGDYGDWFDPW

SEQ ID NO: 22129 - protein, 19 aa, Homo sapiens
CARDLSSNDDMGEGWFDPW

SEQ ID NO: 22130 - protein, 21 aa, Homo sapiens
CARDGVAGTDDGYYYYGMDVW

SEQ ID NO: 22131 - protein, 12 aa, Homo sapiens
CQQHDNFSSKTF

SEQ ID NO: 22132 - protein, 18 aa, Homo sapiens
CVRAEWESSGYYPRLDYW

SEQ ID NO: 22133 - protein, 23 aa, Homo sapiens
CAHRPPYYDILTGPSTYNWFDPW

SEQ ID NO: 22134 - protein, 17 aa, Homo sapiens
CARETVDTAMVAAFDIW

SEQ ID NO: 22135 - protein, 19 aa, Homo sapiens
CARYQMPSVDYYYYGMDVW

SEQ ID NO: 22136 - protein, 16 aa, Homo sapiens
CARDFGLGAPDYFVDW

SEQ ID NO: 22137 - protein, 22 aa, Homo sapiens
CAREGRIDDVWGSYRTNAFDIW

SEQ ID NO: 22138 - protein, 16 aa, Homo sapiens
CARDDYVDLDDGFDIW

SEQ ID NO: 22139 - protein, 23 aa, Homo sapiens
CARLIPGRYSSSWYYYYYGMDVW

SEQ ID NO: 22140 - protein, 21 aa, Homo sapiens
CARQISFFTGGVYYCDHFDYW

SEQ ID NO: 22141 - protein, 18 aa, Homo sapiens
CARRYGWVAAGGDGMDVW

SEQ ID NO: 22142 - protein, 16 aa, Homo sapiens
CVRDKYSSGWYPIDYW

SEQ ID NO: 22143 - protein, 20 aa, Homo sapiens
CARESLSAGTNYYYYGMDVW

SEQ ID NO: 22144 - protein, 15 aa, Homo sapiens
CAKVKEAVTGYFDYW

SEQ ID NO: 22145 - protein, 14 aa, Homo sapiens
CARHSVGFYWFDPW

SEQ ID NO: 22146 - protein, 19 aa, Homo sapiens
CAKDTYYYDSSGYYPYDYW

SEQ ID NO: 22147 - protein, 20 aa, Homo sapiens
CARGYYGSGSYYTPYYFDYW

SEQ ID NO: 22148 - protein, 15 aa, Homo sapiens
CAKDQGTVFDYFDYW

SEQ ID NO: 22149 - protein, 15 aa, Homo sapiens
CARQHYSDTSDFDYW

SEQ ID NO: 22150 - protein, 18 aa, Homo sapiens
CARAAKATKVRPNWFDPW

SEQ ID NO: 22151 - protein, 17 aa, Homo sapiens
CARLSGIGAVAGYFDYW

SEQ ID NO: 22152 - protein, 16 aa, Homo sapiens
CATSSGSYSQIYFDFW

SEQ ID NO: 22153 - protein, 24 aa, Homo sapiens
CARTTGRYDRGGLWVEEDYFFDKW

SEQ ID NO: 22154 - protein, 19 aa, Homo sapiens
CAKDFDGSGYYNGDAFDIW

SEQ ID NO: 22155 - protein, 17 aa, Homo sapiens
CASWGYSYGSGSFVDYW

SEQ ID NO: 22156 - protein, 20 aa, Homo sapiens
CAKSVDTTMAPYYYYGMDVW

SEQ ID NO: 22157 - protein, 21 aa, Homo sapiens
CARSEADYYDSSGYYYAFDIW

SEQ ID NO: 22158 - protein, 20 aa, Homo sapiens
CARDSRLDYGDYVGGGLDYW

SEQ ID NO: 22159 - protein, 21 aa, Homo sapiens
CARQIAWCSGDKCYCDYFDFW

SEQ ID NO: 22160 - protein, 18 aa, Homo sapiens
CARGGSWGDYPLYYFDYW

SEQ ID NO: 22161 - protein, 28 aa, Homo sapiens
CAHSPCFGTGEGYCSGGSCYCGDWFDPW

SEQ ID NO: 22162 - protein, 12 aa, Homo sapiens
CARGGRTRFDQW

SEQ ID NO: 22163 - protein, 22 aa, Homo sapiens
CARDSYSGSPTGPYYYYGMDVW

SEQ ID NO: 22164 - protein, 20 aa, Homo sapiens
CVGSSEAYYDSSGYVRPDYW

SEQ ID NO: 22165 - protein, 15 aa, Homo sapiens
CAAWDAGLSGQGAIF

SEQ ID NO: 22166 - protein, 13 aa, Homo sapiens
CAKEGNSYYFEYW

SEQ ID NO: 22167 - protein, 15 aa, Homo sapiens
CARGLSGYDDAFDLW

SEQ ID NO: 22168 - protein, 15 aa, Homo sapiens
CARVGPAAGFYFDDW

SEQ ID NO: 22169 - protein, 16 aa, Homo sapiens
CVRDGILVSGLAFDVW

SEQ ID NO: 22170 - protein, 18 aa, Homo sapiens
CARLTDYDSRGHDAFDVW

SEQ ID NO: 22171 - protein, 19 aa, Homo sapiens
CARWGSQGSGHYYYGMDVW

SEQ ID NO: 22172 - protein, 17 aa, Homo sapiens
CARENYYDSSGYYYDYW

SEQ ID NO: 22173 - protein, 17 aa, Homo sapiens
CARHFVVPAAINWFDPW

SEQ ID NO: 22174 - protein, 14 aa, Homo sapiens
CGLSTGWYTTFDYW

SEQ ID NO: 22175 - protein, 13 aa, Homo sapiens
CARVPDPYYFDYW

SEQ ID NO: 22176 - protein, 19 aa, Homo sapiens
CARFARDGYNYGKYYFDYW

SEQ ID NO: 22177 - protein, 19 aa, Homo sapiens
CAKPADSSGSWGRGWLDPW

SEQ ID NO: 22178 - protein, 28 aa, Homo sapiens
CAKDFGYYYDSSGYNPQYYYYYYGMDVW

SEQ ID NO: 22179 - protein, 13 aa, Homo sapiens
CVTTPVRGRFDYW

SEQ ID NO: 22180 - protein, 14 aa, Homo sapiens
CVRDSYSGWTFDYW

SEQ ID NO: 22181 - protein, 19 aa, Homo sapiens
CARDQSYYYDSGGYYVDYW

SEQ ID NO: 22182 - protein, 17 aa, Homo sapiens
CARHGLHSYGYDPVDYW

SEQ ID NO: 22183 - protein, 15 aa, Homo sapiens
CATPRGYSSGPFDYW

SEQ ID NO: 22184 - protein, 21 aa, Homo sapiens
CARYVFKVGGIFIPDWYFDLW

SEQ ID NO: 22185 - protein, 22 aa, Homo sapiens
CASLYGSGSYYKEGYYYGMDVW

SEQ ID NO: 22186 - protein, 25 aa, Homo sapiens
CAREFRIVVVPAAMDSDYYYGMDVW

SEQ ID NO: 22187 - protein, 13 aa, Homo sapiens
CVLYMGSGFRWVF

SEQ ID NO: 22188 - protein, 14 aa, Homo sapiens
CARVSGHDVYFDYW

SEQ ID NO: 22189 - protein, 13 aa, Homo sapiens
CARGSHLQQFDYW

SEQ ID NO: 22190 - protein, 14 aa, Homo sapiens
CYSTDGSGDHKGLF

SEQ ID NO: 22191 - protein, 21 aa, Homo sapiens
CARHNGEMVRGVTRHWYFDLW

SEQ ID NO: 22192 - protein, 18 aa, Homo sapiens
CAHYYFESSGYYPGFDYW

SEQ ID NO: 22193 - protein, 25 aa, Homo sapiens
CASPNGLRNLIVVVPAAGDDAFDIW

SEQ ID NO: 22194 - protein, 26 aa, Homo sapiens
CARDRSIAVAGNIGSSDYYYYGMDVW

SEQ ID NO: 22195 - protein, 15 aa, Homo sapiens
CARHSTQQWLPFDYW

SEQ ID NO: 22196 - protein, 15 aa, Homo sapiens
CAKFADSSSSSLDYW

SEQ ID NO: 22197 - protein, 20 aa, Homo sapiens
CARNTWSRRDGYNLDAFDIW

SEQ ID NO: 22198 - protein, 21 aa, Homo sapiens
CARELEPDCSGGSCYSGYDYW

SEQ ID NO: 22199 - protein, 15 aa, Homo sapiens
CQSVDSSETFRVWVF

SEQ ID NO: 22200 - protein, 20 aa, Homo sapiens
CARDRYYYDSSGYYYGFDYW

SEQ ID NO: 22201 - protein, 17 aa, Homo sapiens
CAKGRAAAGPDDAFNFW

SEQ ID NO: 22202 - protein, 28 aa, Homo sapiens
CAKDLSQSYYYDSSGYYRPYYYYGMDVW

SEQ ID NO: 22203 - protein, 15 aa, Homo sapiens
CQSYGSSRSGSNVVF

SEQ ID NO: 22204 - protein, 20 aa, Homo sapiens
CERDTAMVQGDYYYYGMDVW

SEQ ID NO: 22205 - protein, 21 aa, Homo sapiens
CARTAYDSSGYYLLFYYFDYW

SEQ ID NO: 22206 - protein, 20 aa, Homo sapiens
CASSHCRGGTCYYFYAMDVW

SEQ ID NO: 22207 - protein, 15 aa, Homo sapiens
CARVKGYGGFHFDQW

SEQ ID NO: 22208 - protein, 21 aa, Homo sapiens
CDWSSDVCSSDLWNDIYFDYW

SEQ ID NO: 22209 - protein, 25 aa, Homo sapiens
CATDIPRPSPFGELLRFVGYYFDYW

SEQ ID NO: 22210 - protein, 20 aa, Homo sapiens
CASIRRRITVVRGVITLDYW

SEQ ID NO: 22211 - protein, 21 aa, Homo sapiens
CARGLAVEEDSGYDAGYFDYW

SEQ ID NO: 22212 - protein, 16 aa, Homo sapiens
CARDSEQWLSNCPDYW

SEQ ID NO: 22213 - protein, 31 aa, Homo sapiens
CARAIYRGGDYGDYIEAILRGYYYYYGMDVW

SEQ ID NO: 22214 - protein, 20 aa, Homo sapiens
CARLHYDDNRESFPVGFDYW

SEQ ID NO: 22215 - protein, 20 aa, Homo sapiens
CARGKHTETTSVTAWHFDLW

SEQ ID NO: 22216 - protein, 15 aa, Homo sapiens
CANGRLRSPYSFDYW

SEQ ID NO: 22217 - protein, 21 aa, Homo sapiens
CAKDTTVTTATESYYYGMDVW

SEQ ID NO: 22218 - protein, 20 aa, Homo sapiens
CARDGVTHEGNYYYYGMDVW

SEQ ID NO: 22219 - protein, 20 aa, Homo sapiens
CARDNFEGFYGSGNSHFDYW

SEQ ID NO: 22220 - protein, 17 aa, Homo sapiens
CVRTPTSDWHHYYFDYW

SEQ ID NO: 22221 - protein, 20 aa, Homo sapiens
CAKYERLLWFGELLSVFDYW

SEQ ID NO: 22222 - protein, 15 aa, Homo sapiens
CAHRGGQLKGSFDYW

SEQ ID NO: 22223 - protein, 18 aa, Homo sapiens
CAKDKFYGDYTMVIFDYW

SEQ ID NO: 22224 - protein, 15 aa, Homo sapiens
CARYSGTYDRSFDYW

SEQ ID NO: 22225 - protein, 20 aa, Homo sapiens
CAKSPTHIAVAGKGPPFDYW

SEQ ID NO: 22226 - protein, 15 aa, Homo sapiens
CARLGGTYPDAFDIW

SEQ ID NO: 22227 - protein, 39 aa, Homo sapiens
CARDKGGSKWYFDLWGRGTLVSVSSGAGTVSLCDAFEMW

SEQ ID NO: 22228 - protein, 21 aa, Homo sapiens
CARGITRGEWGGPTFYSFDYW

SEQ ID NO: 22229 - protein, 21 aa, Homo sapiens
CARDFKVTTPQNYYYYGMDVW

SEQ ID NO: 22230 - protein, 24 aa, Homo sapiens
CALPISKNYPFCTGGDCYYGFDIW

SEQ ID NO: 22231 - protein, 17 aa, Homo sapiens
CARHRGAAAAPDAFDIW

SEQ ID NO: 22232 - protein, 19 aa, Homo sapiens
CARDSYCGGDCYYYGMDVW

SEQ ID NO: 22233 - protein, 16 aa, Homo sapiens
CARDRGGRGPTTTDYW

SEQ ID NO: 22234 - protein, 19 aa, Homo sapiens
CAKDLETGEVELTAAFDYW

SEQ ID NO: 22235 - protein, 18 aa, Homo sapiens
CARDGTYSSGWITDFDLW

SEQ ID NO: 22236 - protein, 23 aa, Homo sapiens
CARYFSDELAVPPSLKDDAFDIW

SEQ ID NO: 22237 - protein, 17 aa, Homo sapiens
CARDDDYGEGVEYFDYW

SEQ ID NO: 22238 - protein, 16 aa, Homo sapiens
CAKDRNSITGTTVDYW

SEQ ID NO: 22239 - protein, 14 aa, Homo sapiens
CARAQRSAWLVDYW

SEQ ID NO: 22240 - protein, 14 aa, Homo sapiens
CARSTATGWFFDFW

SEQ ID NO: 22241 - protein, 16 aa, Homo sapiens
CARLDYDSEFVLFDHW

SEQ ID NO: 22242 - protein, 22 aa, Homo sapiens
CARVWCPNSSSWYAPCSAFDIW

SEQ ID NO: 22243 - protein, 20 aa, Homo sapiens
CSRKAAGSSRYYYSYGLDVW

SEQ ID NO: 22244 - protein, 22 aa, Homo sapiens
CAHRRAGYAGSGSYYPGSFDYW

SEQ ID NO: 22245 - protein, 11 aa, Homo sapiens
CATLWGTKDYW

SEQ ID NO: 22246 - protein, 20 aa, Homo sapiens
CARDIAVADMRDYYYGMDVW

SEQ ID NO: 22247 - protein, 16 aa, Homo sapiens
CARDPGPEGGGPFDIW

SEQ ID NO: 22248 - protein, 17 aa, Homo sapiens
CAHRQDGGWYGNWFDPW

SEQ ID NO: 22249 - protein, 22 aa, Homo sapiens
CARTYYYDNSGYYGGRSDFDYW

SEQ ID NO: 22250 - protein, 17 aa, Homo sapiens
CAKDLSAQGYGDAFDIW

SEQ ID NO: 22251 - protein, 22 aa, Homo sapiens
CARDQMRAAAGGSFYYYGMDVW

SEQ ID NO: 22252 - protein, 16 aa, Homo sapiens
CGRVLGDSGTEYIDYW

SEQ ID NO: 22253 - protein, 18 aa, Homo sapiens
CARVEMDNWNDGDAFHFW

SEQ ID NO: 22254 - protein, 21 aa, Homo sapiens
CARDLVGGRSRSHYYYGMDVW

SEQ ID NO: 22255 - protein, 24 aa, Homo sapiens
CAKDSRQYGSGSYTSLYYYGMDVW

SEQ ID NO: 22256 - protein, 14 aa, Homo sapiens
CASGYSYGFDTDYW

SEQ ID NO: 22257 - protein, 15 aa, Homo sapiens
CARHESMWRIWFDPW

SEQ ID NO: 22258 - protein, 14 aa, Homo sapiens
CARTNGWYQHFDSW

SEQ ID NO: 22259 - protein, 19 aa, Homo sapiens
CARWGDTAMVGTGYYFDYW

SEQ ID NO: 22260 - protein, 14 aa, Homo sapiens
CTGRDGYNYAFDYW

SEQ ID NO: 22261 - protein, 16 aa, Homo sapiens
CARDCLWCYGGSFDYW

SEQ ID NO: 22262 - protein, 18 aa, Homo sapiens
CARSGYYYDSSGYPFDYW

SEQ ID NO: 22263 - protein, 19 aa, Homo sapiens
CARYGAGWEAAAGYYFDYW

SEQ ID NO: 22264 - protein, 16 aa, Homo sapiens
CVRDLNGYGGYDFDYW

SEQ ID NO: 22265 - protein, 17 aa, Homo sapiens
CARTLGFSSSPYYFDSW

SEQ ID NO: 22266 - protein, 19 aa, Homo sapiens
CARGMTTVTTSPLGAFDIW

SEQ ID NO: 22267 - protein, 16 aa, Homo sapiens
CAREDSSGWTNHFDYW

SEQ ID NO: 22268 - protein, 21 aa, Homo sapiens
CARDYMATIRDYYYYYGMDVW

SEQ ID NO: 22269 - protein, 18 aa, Homo sapiens
CARARPDIVATIPWFDPW

SEQ ID NO: 22270 - protein, 24 aa, Homo sapiens
CARHADPPGYSSSWYGSEIAFDIW

SEQ ID NO: 22271 - protein, 13 aa, Homo sapiens
CHSAESSGIYRVF

SEQ ID NO: 22272 - protein, 21 aa, Homo sapiens
CARDVLVRGVIIYYYYGMDVW

SEQ ID NO: 22273 - protein, 17 aa, Homo sapiens
CARVRITMVRGVVFDYW

SEQ ID NO: 22274 - protein, 18 aa, Homo sapiens
CAKDIESGSYYGTAFDYW

SEQ ID NO: 22275 - protein, 21 aa, Homo sapiens
CARDPQNNMIVVVITGDFDYW

SEQ ID NO: 22276 - protein, 20 aa, Homo sapiens
CARVHIVVVPGATGGWFDPW

SEQ ID NO: 22277 - protein, 24 aa, Homo sapiens
CARDLGVATIHEQGVYYYYGMDVW

SEQ ID NO: 22278 - protein, 22 aa, Homo sapiens
CARVYYDYVWGSYRPGYYFDYW

SEQ ID NO: 22279 - protein, 19 aa, Homo sapiens
CVTHYCSGERCYANWFDPW

SEQ ID NO: 22280 - protein, 19 aa, Homo sapiens
CARSTLYSSGWYEEGIDYW

SEQ ID NO: 22281 - protein, 22 aa, Homo sapiens
CARVIYYYDSGGLFRDWFFDLW

SEQ ID NO: 22282 - protein, 21 aa, Homo sapiens
CARDSMVTATNYYYYYGMDVW

SEQ ID NO: 22283 - protein, 18 aa, Homo sapiens
CARHRTPYYDSEDAFDVW

SEQ ID NO: 22284 - protein, 22 aa, Homo sapiens
CATSYYYDATAYYVDQYFFDYW

SEQ ID NO: 22285 - protein, 23 aa, Homo sapiens
CAKFLRAANWYSSSWYLQPLDYW

SEQ ID NO: 22286 - protein, 18 aa, Homo sapiens
CARDGSQDGYNPFSFDYW

SEQ ID NO: 22287 - protein, 11 aa, Homo sapiens
CMQTTHLPHSF

SEQ ID NO: 22288 - protein, 18 aa, Homo sapiens
CTTKNGFVMIRGVITDYW

SEQ ID NO: 22289 - protein, 14 aa, Homo sapiens
CARSILTGSVFDYW

SEQ ID NO: 22290 - protein, 18 aa, Homo sapiens
CAKHPVASLRGVHFFDYW

SEQ ID NO: 22291 - protein, 16 aa, Homo sapiens
CDWSSDVCSSDLFDIW

SEQ ID NO: 22292 - protein, 20 aa, Homo sapiens
CAKDWRRYCSSTSCYSIDYW

SEQ ID NO: 22293 - protein, 21 aa, Homo sapiens
CARVGAPTRFLNKLDWYFDLW

SEQ ID NO: 22294 - protein, 21 aa, Homo sapiens
CARDRGSSWSRDVHSWYFDLW

SEQ ID NO: 22295 - protein, 29 aa, Homo sapiens
CARGPLLYYDILTGYYPPNPHYYYGMDVW

SEQ ID NO: 22296 - protein, 20 aa, Homo sapiens
CASRDCSSTSCSLGNAFDIW

SEQ ID NO: 22297 - protein, 19 aa, Homo sapiens
CARAVRGVMGFVFYYFDYW

SEQ ID NO: 22298 - protein, 20 aa, Homo sapiens
CAKGISGYGYASYPEGFDMW

SEQ ID NO: 22299 - protein, 16 aa, Homo sapiens
CARQPTSVRGFPFDYW

SEQ ID NO: 22300 - protein, 23 aa, Homo sapiens
CARLLDHYYGSGSPLRENWFDPW

SEQ ID NO: 22301 - protein, 16 aa, Homo sapiens
CTRVPRGTGIDPLDVW

SEQ ID NO: 22302 - protein, 17 aa, Homo sapiens
CARDPYSMSGEYFFDYW

SEQ ID NO: 22303 - protein, 14 aa, Homo sapiens
CAGSGYYWGLIDYW

SEQ ID NO: 22304 - protein, 21 aa, Homo sapiens
CARDHRRGSPYYYYYYGMDVW

SEQ ID NO: 22305 - protein, 17 aa, Homo sapiens
CTTENAPYGDYLRLDYW

SEQ ID NO: 22306 - protein, 19 aa, Homo sapiens
CARDILGIPSYYYYGMDVW

SEQ ID NO: 22307 - protein, 19 aa, Homo sapiens
CATVAGTPPLYYYYGMDVW

SEQ ID NO: 22308 - protein, 21 aa, Homo sapiens
CARVGTAMVSFHHYYYGMDVW

SEQ ID NO: 22309 - protein, 22 aa, Homo sapiens
CAKLTGWGGDCGGDCYPVFDFW

SEQ ID NO: 22310 - protein, 20 aa, Homo sapiens
CARDSKSFTEGYYYYGMDVW

SEQ ID NO: 22311 - protein, 16 aa, Homo sapiens
CARDTRESLLYYFEYW

SEQ ID NO: 22312 - protein, 20 aa, Homo sapiens
CAGGYSSGWYNYYYYGMDVW

SEQ ID NO: 22313 - protein, 20 aa, Homo sapiens
CAKEGGVYFVSGIYSYFDYW

SEQ ID NO: 22314 - protein, 24 aa, Homo sapiens
CATVLCSTAICDRDSYYYYALDVW

SEQ ID NO: 22315 - protein, 18 aa, Homo sapiens
CARGAPGCSGGSCILDYW

SEQ ID NO: 22316 - protein, 21 aa, Homo sapiens
CAKGEHDYGDYRAYYYGMDVW

SEQ ID NO: 22317 - protein, 18 aa, Homo sapiens
CATDVRSSGPYYYGMDVW

SEQ ID NO: 22318 - protein, 15 aa, Homo sapiens
CARVPVGSNWYFINW

SEQ ID NO: 22319 - protein, 14 aa, Homo sapiens
CARGYSSSWYVYYW

SEQ ID NO: 22320 - protein, 16 aa, Homo sapiens
CARSRDGYNLWYFDLW

SEQ ID NO: 22321 - protein, 17 aa, Homo sapiens
CARASQGGGYNPNFDYW

SEQ ID NO: 22322 - protein, 13 aa, Homo sapiens
CAREEMEAAFDHW

SEQ ID NO: 22323 - protein, 22 aa, Homo sapiens
CARVGYCSSTSCYGGYNWFDPW

SEQ ID NO: 22324 - protein, 16 aa, Homo sapiens
CAKDPTYLAAAGIDYW

SEQ ID NO: 22325 - protein, 16 aa, Homo sapiens
CARWRSVLGATTFDIW

SEQ ID NO: 22326 - protein, 12 aa, Homo sapiens
CQQYTSYSPWSF

SEQ ID NO: 22327 - protein, 20 aa, Homo sapiens
CARDLGMATIVPPMYYFDYW

SEQ ID NO: 22328 - protein, 19 aa, Homo sapiens
CARAGDSGIYYDSSGLDYW

SEQ ID NO: 22329 - protein, 20 aa, Homo sapiens
CARGARYYDSSVYYYGMDVW

SEQ ID NO: 22330 - protein, 21 aa, Homo sapiens
CASVVVVPATPGYYYYGMDVW

SEQ ID NO: 22331 - protein, 18 aa, Homo sapiens
CAKDPDYGDYYGILFDYW

SEQ ID NO: 22332 - protein, 14 aa, Homo sapiens
CARMATITVAFDYW

SEQ ID NO: 22333 - protein, 24 aa, Homo sapiens
CAHRRGELYYYDSSGYYEYYFDYW

SEQ ID NO: 22334 - protein, 18 aa, Homo sapiens
CARPAVIRGVVFWFFDLW

SEQ ID NO: 22335 - protein, 19 aa, Homo sapiens
CARSNYYDKKSWGEAFDIW

SEQ ID NO: 22336 - protein, 17 aa, Homo sapiens
CAKNRQESAAGVRFDPW

SEQ ID NO: 22337 - protein, 19 aa, Homo sapiens
CAREVTVTTLGGDWYFDLW

SEQ ID NO: 22338 - protein, 16 aa, Homo sapiens
CAKESRSGSYEEFDYW

SEQ ID NO: 22339 - protein, 26 aa, Homo sapiens
CARSSGYSGYDFSRLFCGSCFTFDYW

SEQ ID NO: 22340 - protein, 20 aa, Homo sapiens
CARDLTGVAAEDYYYGMDVW

SEQ ID NO: 22341 - protein, 13 aa, Homo sapiens
CAMYDTSGSFDYW

SEQ ID NO: 22342 - protein, 22 aa, Homo sapiens
CARDRILGRWFGELLHDAFDIW

SEQ ID NO: 22343 - protein, 29 aa, Homo sapiens
CAKDWGCSGGSCYSSHEGSYYYYYGMDVW

SEQ ID NO: 22344 - protein, 22 aa, Homo sapiens
CARDNRGYCSGGSCYSEGFDYW

SEQ ID NO: 22345 - protein, 17 aa, Homo sapiens
CAKDQEYYYDNSGPDYW

SEQ ID NO: 22346 - protein, 21 aa, Homo sapiens
CAKDLNYGGYIAAAGLCFDYW

SEQ ID NO: 22347 - protein, 18 aa, Homo sapiens
CARGWQQLKDYYYGMDVW

SEQ ID NO: 22348 - protein, 21 aa, Homo sapiens
CARGGWKKSADTAMVNWFDPW

SEQ ID NO: 22349 - protein, 21 aa, Homo sapiens
CARLEDSSSWFNYYYYGMDVW

SEQ ID NO: 22350 - protein, 19 aa, Homo sapiens
CAKEERVLLWFGELFIDYW

SEQ ID NO: 22351 - protein, 21 aa, Homo sapiens
CARGRTVTTFYRPRPPPFDYW

SEQ ID NO: 22352 - protein, 15 aa, Homo sapiens
CARDSVYGDYVYDYW

SEQ ID NO: 22353 - protein, 19 aa, Homo sapiens
CAREIYYGSGSYPRHFDYW

SEQ ID NO: 22354 - protein, 24 aa, Homo sapiens
CVRGFYYGSGSYYITSTTIYFDYW

SEQ ID NO: 22355 - protein, 22 aa, Homo sapiens
CARDGYSGYEGKIYYYYGMDVW

SEQ ID NO: 22356 - protein, 11 aa, Homo sapiens
CATGHLWFVSW

SEQ ID NO: 22357 - protein, 17 aa, Homo sapiens
CAKGLIVVVITTPFDYW

SEQ ID NO: 22358 - protein, 22 aa, Homo sapiens
CARDGTYGGYGVDYYYYGMDVW

SEQ ID NO: 22359 - protein, 22 aa, Homo sapiens
CARDQVRGVTPQYYYYYGMDVW

SEQ ID NO: 22360 - protein, 24 aa, Homo sapiens
CARGTIAVAGKEENYYYYYGMDVW

SEQ ID NO: 22361 - protein, 20 aa, Homo sapiens
CAKSSHGVWGYSYGSCFDYW

SEQ ID NO: 22362 - protein, 23 aa, Homo sapiens
CAHRRPRYDILTGYTTHNWFDPW

SEQ ID NO: 22363 - protein, 19 aa, Homo sapiens
CAKTAGTVTTYYYYGMDVW

SEQ ID NO: 22364 - protein, 24 aa, Homo sapiens
CAKDMGRDSSGWEHYHFYYGMDVW

SEQ ID NO: 22365 - protein, 20 aa, Homo sapiens
CARDQGYYDSSGYYIAFDIW

SEQ ID NO: 22366 - protein, 15 aa, Homo sapiens
CASGTNWGWDYFDYW

SEQ ID NO: 22367 - protein, 17 aa, Homo sapiens
CAKDSVVRGVYDAFDIW

SEQ ID NO: 22368 - protein, 16 aa, Homo sapiens
CARGGSSTWSLGIDYW

SEQ ID NO: 22369 - protein, 22 aa, Homo sapiens
CAKDTRYDDVWGSYRHDAFDIW

SEQ ID NO: 22370 - protein, 15 aa, Homo sapiens
CARRGSFNWNGIDYW

SEQ ID NO: 22371 - protein, 20 aa, Homo sapiens
CVRGVPAAVSWGTYYAMDVW

SEQ ID NO: 22372 - protein, 22 aa, Homo sapiens
CARDLTRTTDPEKYYYYGMDVW

SEQ ID NO: 22373 - protein, 19 aa, Homo sapiens
CARDPPRSSGGFEEYFQHW

SEQ ID NO: 22374 - protein, 20 aa, Homo sapiens
CARISWGYWFGELLGALDIW

SEQ ID NO: 22375 - protein, 16 aa, Homo sapiens
CARHKSMVAIYYFDYW

SEQ ID NO: 22376 - protein, 16 aa, Homo sapiens
CAKDWGSSSPGYFDNW

SEQ ID NO: 22377 - protein, 23 aa, Homo sapiens
CAKGEGKRGGYGDYYFDNYFDYW

SEQ ID NO: 22378 - protein, 20 aa, Homo sapiens
CARDLTGTTGDSYYYGMDVW

SEQ ID NO: 22379 - protein, 23 aa, Homo sapiens
CARDQYEVRGISSYYYYYGMDVW

SEQ ID NO: 22380 - protein, 16 aa, Homo sapiens
CARNHGGYVPYYFEYW

SEQ ID NO: 22381 - protein, 17 aa, Homo sapiens
CARRNVNTTMISAFDIW

SEQ ID NO: 22382 - protein, 15 aa, Homo sapiens
CAREMSGVPLVLDYW

SEQ ID NO: 22383 - protein, 16 aa, Homo sapiens
CAKDLGYEISRTFDYW

SEQ ID NO: 22384 - protein, 19 aa, Homo sapiens
CARAAGFYSSGWYDALDIW

SEQ ID NO: 22385 - protein, 14 aa, Homo sapiens
CARRDWLAYYFDNW

SEQ ID NO: 22386 - protein, 15 aa, Homo sapiens
CTREDSGGDWRVDYW

SEQ ID NO: 22387 - protein, 20 aa, Homo sapiens
CVRDPLSSVWKIGNWYFDLW

SEQ ID NO: 22388 - protein, 21 aa, Homo sapiens
CVRDGAVRGYSGYDYLPFDYW

SEQ ID NO: 22389 - protein, 23 aa, Homo sapiens
CARDHYYDSSGYYYGQHNWFDPW

SEQ ID NO: 22390 - protein, 20 aa, Homo sapiens
CARDSKQWLVSYYYYGMDVW

SEQ ID NO: 22391 - protein, 16 aa, Homo sapiens
CARALGGSYYSGLDYW

SEQ ID NO: 22392 - protein, 24 aa, Homo sapiens
CARDLVVVFGDNENHYYYYGMDVW

SEQ ID NO: 22393 - protein, 17 aa, Homo sapiens
CAKGASFFGSGSPRDYW

SEQ ID NO: 22394 - protein, 19 aa, Homo sapiens
CARDVYQRASYYYYGMDVW

SEQ ID NO: 22395 - protein, 15 aa, Homo sapiens
CTSRIEVDGTGFDHW

SEQ ID NO: 22396 - protein, 14 aa, Homo sapiens
CAKDQSSGYPYDYW

SEQ ID NO: 22397 - protein, 14 aa, Homo sapiens
CAFGELRPGRFDYW

SEQ ID NO: 22398 - protein, 21 aa, Homo sapiens
CAKTGYYYDSSGYYADPIDYW

SEQ ID NO: 22399 - protein, 13 aa, Homo sapiens
CARILGATGFDSW

SEQ ID NO: 22400 - protein, 21 aa, Homo sapiens
CARGGWYSGSGAVSLNWFDPW

SEQ ID NO: 22401 - protein, 20 aa, Homo sapiens
CARDLHCSSTSCYASGFDYW

SEQ ID NO: 22402 - protein, 15 aa, Homo sapiens
CARLRAEIAARIDYW

SEQ ID NO: 22403 - protein, 20 aa, Homo sapiens
CANDYGDYNGSYYYYGMDVW

SEQ ID NO: 22404 - protein, 14 aa, Homo sapiens
CAKGTQLWFPLDYW

SEQ ID NO: 22405 - protein, 17 aa, Homo sapiens
CAKDAAWFGQFHYLDYW

SEQ ID NO: 22406 - protein, 21 aa, Homo sapiens
CARDKAYAGQYYYYYYGMDVW

SEQ ID NO: 22407 - protein, 23 aa, Homo sapiens
CAKDMITFGGVIVNVYGYYFDYW

SEQ ID NO: 22408 - protein, 18 aa, Homo sapiens
CARGNNGDYVEAYYFDSW

SEQ ID NO: 22409 - protein, 18 aa, Homo sapiens
CSKVAKNGHNLGSSFDHW

SEQ ID NO: 22410 - protein, 14 aa, Homo sapiens
CAKDDLLTGYHDYW

SEQ ID NO: 22411 - protein, 16 aa, Homo sapiens
CATGSVYSAYDGFDSW

SEQ ID NO: 22412 - protein, 13 aa, Homo sapiens
CAHRAVAGHIDYW

SEQ ID NO: 22413 - protein, 20 aa, Homo sapiens
CARVGNGYSALLFSEGFDIW

SEQ ID NO: 22414 - protein, 18 aa, Homo sapiens
CARVVRRAAAGTPRFDPW

SEQ ID NO: 22415 - protein, 19 aa, Homo sapiens
CAGETYKKYSYGTHPNDYW

SEQ ID NO: 22416 - protein, 17 aa, Homo sapiens
CARAPAAGILGDWFDPW

SEQ ID NO: 22417 - protein, 18 aa, Homo sapiens
CAKDQGSGSYGYYLSDYW

SEQ ID NO: 22418 - protein, 12 aa, Homo sapiens
CQSYDTNNHSVF

SEQ ID NO: 22419 - protein, 14 aa, Homo sapiens
CATSRDSSSWIDYW

SEQ ID NO: 22420 - protein, 17 aa, Homo sapiens
CAKPYYDILTGFDFDYW

SEQ ID NO: 22421 - protein, 16 aa, Homo sapiens
CARDLFGRVGATLDYW

SEQ ID NO: 22422 - protein, 17 aa, Homo sapiens
CAKQRRVYDYGDCFDYW

SEQ ID NO: 22423 - protein, 14 aa, Homo sapiens
CATLISRVSNLDYW

SEQ ID NO: 22424 - protein, 24 aa, Homo sapiens
CARERRKYYYESSGHFSRYSFDYW

SEQ ID NO: 22425 - protein, 15 aa, Homo sapiens
CAKGIDRSYGFFYYW

SEQ ID NO: 22426 - protein, 29 aa, Homo sapiens
CARDENEVVWFGDLAAAGETYYYFGMDVW

SEQ ID NO: 22427 - protein, 15 aa, Homo sapiens
CALTLPGESGYYSYW

SEQ ID NO: 22428 - protein, 18 aa, Homo sapiens
CAKDRITHGLGSFYFDYW

SEQ ID NO: 22429 - protein, 17 aa, Homo sapiens
CAKESSSSVPPYNFDFW

SEQ ID NO: 22430 - protein, 16 aa, Homo sapiens
CAKDSVWWLPSPGDYW

SEQ ID NO: 22431 - protein, 19 aa, Homo sapiens
CARCGYSYGWYYYYGMDVW

SEQ ID NO: 22432 - protein, 15 aa, Homo sapiens
CARDQIAVAGTSDYW

SEQ ID NO: 22433 - protein, 21 aa, Homo sapiens
CARGGWSTMVRGVLAGWFDPW

SEQ ID NO: 22434 - protein, 24 aa, Homo sapiens
CARVLNYYGSGSYYNVPSNAFDIW

SEQ ID NO: 22435 - protein, 12 aa, Homo sapiens
CARAGNYYYSYW

SEQ ID NO: 22436 - protein, 20 aa, Homo sapiens
CARGIAAAGTKRRSNWFDPW

SEQ ID NO: 22437 - protein, 23 aa, Homo sapiens
CASRRGIDYGDFFHYYYYGMDVW

SEQ ID NO: 22438 - protein, 19 aa, Homo sapiens
CARTRRDYDSSGYYPIDYW

SEQ ID NO: 22439 - protein, 15 aa, Homo sapiens
CARHSGYTYSYVDYW

SEQ ID NO: 22440 - protein, 15 aa, Homo sapiens
CTTENTEQQLAIDYW

SEQ ID NO: 22441 - protein, 19 aa, Homo sapiens
CAHRRSHRGWVGHLGFDYW

SEQ ID NO: 22442 - protein, 24 aa, Homo sapiens
CARDSFSYYGSGSYYQYYYGMDVW

SEQ ID NO: 22443 - protein, 15 aa, Homo sapiens
CAKAGLFSIHHLDYW

SEQ ID NO: 22444 - protein, 24 aa, Homo sapiens
CARESWARDTMVRGVIRMDGMDVW

SEQ ID NO: 22445 - protein, 21 aa, Homo sapiens
CAKEGGPSEYGSGSYFPFGYW

SEQ ID NO: 22446 - protein, 17 aa, Homo sapiens
CARHLSEMATNDYFDYW

SEQ ID NO: 22447 - protein, 22 aa, Homo sapiens
CAKDESWHELYYYDSSGGFDYW

SEQ ID NO: 22448 - protein, 18 aa, Homo sapiens
CAKDGIEAAGTPFYFDSW

SEQ ID NO: 22449 - protein, 24 aa, Homo sapiens
CARDLSSSTSSTEPHYYYYGMDVW

SEQ ID NO: 22450 - protein, 21 aa, Homo sapiens
CARLNPNYYGSESYYKILDYW

SEQ ID NO: 22451 - protein, 19 aa, Homo sapiens
CARLTYYYGSGSYLTFDYW

SEQ ID NO: 22452 - protein, 17 aa, Homo sapiens
CAKFDRRDDYGDHFDYW

SEQ ID NO: 22453 - protein, 15 aa, Homo sapiens
CAKAIDITMIVPDYW

SEQ ID NO: 22454 - protein, 20 aa, Homo sapiens
CARDSADYGDYVLFWGFDYW

SEQ ID NO: 22455 - protein, 24 aa, Homo sapiens
CTRHLDVQGSGWYFGHYYYGMDVW

SEQ ID NO: 22456 - protein, 18 aa, Homo sapiens
CARDPGASGSGSYYLDYW

SEQ ID NO: 22457 - protein, 20 aa, Homo sapiens
CARDRLAVAGTDYYYGMDVW

SEQ ID NO: 22458 - protein, 17 aa, Homo sapiens
CAKDFDLAIRGVSFDQW

SEQ ID NO: 22459 - protein, 21 aa, Homo sapiens
CAREGYDYDILTGYKLRADYW

SEQ ID NO: 22460 - protein, 19 aa, Homo sapiens
CARLDYTSGWYERAIFDYW

SEQ ID NO: 22461 - protein, 15 aa, Homo sapiens
CAREGVTVTTENDYW

SEQ ID NO: 22462 - protein, 17 aa, Homo sapiens
CARDSFPYYGSGGFDYW

SEQ ID NO: 22463 - protein, 20 aa, Homo sapiens
CAKDSHIVATNYYYYGMDVW

SEQ ID NO: 22464 - protein, 13 aa, Homo sapiens
CAKAAAGETFDYW

SEQ ID NO: 22465 - protein, 23 aa, Homo sapiens
CARVFVDYDYVWGSYRPDAFDIW

SEQ ID NO: 22466 - protein, 11 aa, Homo sapiens
CLHYNSYSNNF

SEQ ID NO: 22467 - protein, 16 aa, Homo sapiens
CARGDQGTAMGHFDYW

SEQ ID NO: 22468 - protein, 11 aa, Homo sapiens
CEARDGPHDYW

SEQ ID NO: 22469 - protein, 20 aa, Homo sapiens
CTRGLQRSKYTYGNDAFDIW

SEQ ID NO: 22470 - protein, 19 aa, Homo sapiens
CAKDSEDYGGNSVGAFDIW

SEQ ID NO: 22471 - protein, 18 aa, Homo sapiens
CARVRDYGDYLNDAFDIW

SEQ ID NO: 22472 - protein, 20 aa, Homo sapiens
CTTDAGRTPLTGYPYYFDYW

SEQ ID NO: 22473 - protein, 17 aa, Homo sapiens
CARTVITPFYYYGMDVW

SEQ ID NO: 22474 - protein, 15 aa, Homo sapiens
CAKDSAYYEGAFDIW

SEQ ID NO: 22475 - protein, 19 aa, Homo sapiens
CARELGYCSGGNCPALDYW

SEQ ID NO: 22476 - protein, 19 aa, Homo sapiens
CAKDSISARLRLPGAFDYW

SEQ ID NO: 22477 - protein, 19 aa, Homo sapiens
CASHGRGLLGPTNGAFDIW

SEQ ID NO: 22478 - protein, 20 aa, Homo sapiens
CTTDRVYDYVWGSYRPVDYW

SEQ ID NO: 22479 - protein, 13 aa, Homo sapiens
CANAILWWVLDYW

SEQ ID NO: 22480 - protein, 20 aa, Homo sapiens
CATTSPTYYGSGSLYAFDIW

SEQ ID NO: 22481 - protein, 21 aa, Homo sapiens
CAESKPHCSSTSCYYYGMDVW

SEQ ID NO: 22482 - protein, 15 aa, Homo sapiens
CAHSIQLWVAGFDYW

SEQ ID NO: 22483 - protein, 15 aa, Homo sapiens
CCSYAGSSTFVGYVF

SEQ ID NO: 22484 - protein, 16 aa, Homo sapiens
CARLRTGSGSLAIDYW

SEQ ID NO: 22485 - protein, 16 aa, Homo sapiens
CAKSDVRYPFSDFDYW

SEQ ID NO: 22486 - protein, 20 aa, Homo sapiens
CARIFPFTYDSSGYYLFDYW

SEQ ID NO: 22487 - protein, 16 aa, Homo sapiens
CAKDIHYDRSGGFDYW

SEQ ID NO: 22488 - protein, 25 aa, Homo sapiens
CAKDMGCSSTSCHGWWYYYYGMDVW

SEQ ID NO: 22489 - protein, 20 aa, Homo sapiens
CARGMFTYYYDSSGYHFDHW

SEQ ID NO: 22490 - protein, 14 aa, Homo sapiens
CQSADSTVSYGGVF

SEQ ID NO: 22491 - protein, 16 aa, Homo sapiens
CARDGNTVTTGMGDYW

SEQ ID NO: 22492 - protein, 22 aa, Homo sapiens
CARDQYSHGRDVHGYYYGMDVW

SEQ ID NO: 22493 - protein, 23 aa, Homo sapiens
CARDLQSGDCSGGSCYYYGMDVW

SEQ ID NO: 22494 - protein, 19 aa, Homo sapiens
CARHRVRYFDWLIEAFDIW

SEQ ID NO: 22495 - protein, 14 aa, Homo sapiens
CAKYAASPYHFDYW

SEQ ID NO: 22496 - protein, 14 aa, Homo sapiens
CAKDWGPVPGVDYW

SEQ ID NO: 22497 - protein, 18 aa, Homo sapiens
CAHRRADGDYLRGYFDLW

SEQ ID NO: 22498 - protein, 20 aa, Homo sapiens
CATGLYIGSYLGAYGPFEYW

SEQ ID NO: 22499 - protein, 18 aa, Homo sapiens
CAKEGRDGYNFEGCFDYW

SEQ ID NO: 22500 - protein, 17 aa, Homo sapiens
CAKGDGSGYFGSYIDYW

SEQ ID NO: 22501 - protein, 23 aa, Homo sapiens
CARDGFRGAATASYETVAGFDSW

SEQ ID NO: 22502 - protein, 22 aa, Homo sapiens
CARTRAGSGDIGYYYYFGMDVW

SEQ ID NO: 22503 - protein, 17 aa, Homo sapiens
CARDRPQINYYYGMDVW

SEQ ID NO: 22504 - protein, 16 aa, Homo sapiens
CARPRDGSYLNAFDIW

SEQ ID NO: 22505 - protein, 18 aa, Homo sapiens
CAREYYDSSGSQEGYDYW

SEQ ID NO: 22506 - protein, 14 aa, Homo sapiens [sequence omitted]

SEQ ID NO: 22507 - protein, 14 aa, Homo sapiens
CAKDRDATVHWDYW

SEQ ID NO: 22508 - protein, 21 aa, Homo sapiens
CARSGAYYYDSPFPIDAFDIW

SEQ ID NO: 22509 - protein, 23 aa, Homo sapiens
CTSEGGVGATVGVYYYYYGLDVW

SEQ ID NO: 22510 - protein, 28 aa, Homo sapiens
CDWSSDVCSSDLGATHPASYYYYGMDVW

SEQ ID NO: 22511 - protein, 18 aa, Homo sapiens
CAKDAADVVLWFGGFDYW

SEQ ID NO: 22512 - protein, 22 aa, Homo sapiens
CTRGQAKYYPENSENGDWFDPW

SEQ ID NO: 22513 - protein, 24 aa, Homo sapiens
CARSSWAAGGRGPSRYYYYGMDVW

SEQ ID NO: 22514 - protein, 18 aa, Homo sapiens
CARDVSRGFARRDAFDIW

SEQ ID NO: 22515 - protein, 21 aa, Homo sapiens
CARADYGDSVTRYYYYGMDVW

SEQ ID NO: 22516 - protein, 15 aa, Homo sapiens
CVRLYAYGTYFYDYW

SEQ ID NO: 22517 - protein, 13 aa, Homo sapiens
CAAGSSWDYFDYW

SEQ ID NO: 22518 - protein, 12 aa, Homo sapiens
CTRQDWDYCDHW

SEQ ID NO: 22519 - protein, 17 aa, Homo sapiens
CTRDIDSSGYYYGMDVW

SEQ ID NO: 22520 - protein, 20 aa, Homo sapiens
CAKDGYNFSGDYYYYGMDVW

SEQ ID NO: 22521 - protein, 19 aa, Homo sapiens
CAKVSGSGYNDEGFYFDSW

SEQ ID NO: 22522 - protein, 20 aa, Homo sapiens
CAKDYRTETTGYYYYAMDVW

SEQ ID NO: 22523 - protein, 13 aa, Homo sapiens
CASSTDGECFDYW

SEQ ID NO: 22524 - protein, 18 aa, Homo sapiens
CARHSCSSTSCRGRFDPW

SEQ ID NO: 22525 - protein, 14 aa, Homo sapiens
CARVGHYYDPFDLW

SEQ ID NO: 22526 - protein, 15 aa, Homo sapiens
CAHRRRGYPYSFDHW

SEQ ID NO: 22527 - protein, 17 aa, Homo sapiens
CAREMNDYGVYGWFDPW

SEQ ID NO: 22528 - protein, 18 aa, Homo sapiens
CARGLRLAAAGTAPFGYW

SEQ ID NO: 22529 - protein, 15 aa, Homo sapiens
CAKDHLASGSYPDYW

SEQ ID NO: 22530 - protein, 22 aa, Homo sapiens
CARAGRAVAGDEHYYYYGMDVW

SEQ ID NO: 22531 - protein, 18 aa, Homo sapiens
CAREVSVAVAGLFYFDNW

SEQ ID NO: 22532 - protein, 16 aa, Homo sapiens
CARDMLPTVPWGFDYW

SEQ ID NO: 22533 - protein, 16 aa, Homo sapiens
CARPYNSGWYNAFDIW

SEQ ID NO: 22534 - protein, 16 aa, Homo sapiens
CARAEWVAAAVAFDYW

SEQ ID NO: 22535 - protein, 25 aa, Homo sapiens
CAKDCLISGSNLNNLNYYYYGMDVW

SEQ ID NO: 22536 - protein, 19 aa, Homo sapiens
CAKAAGSGWPSMSWYFDLW

SEQ ID NO: 22537 - protein, 17 aa, Homo sapiens
CARMRKDYYYHYGLDVW

SEQ ID NO: 22538 - protein, 19 aa, Homo sapiens
CARAKFVVVTAIDWYFDLW

SEQ ID NO: 22539 - protein, 19 aa, Homo sapiens
CAKDPWTLEVAGLEWFDPW

SEQ ID NO: 22540 - protein, 16 aa, Homo sapiens
CARVPQDHNNDAFDIW

SEQ ID NO: 22541 - protein, 29 aa, Homo sapiens
CLRAEDTALYYCAKDTYSSIAAAGSFDYW

SEQ ID NO: 22542 - protein, 19 aa, Homo sapiens
CARDLQPATAMSYNWFDPW

SEQ ID NO: 22543 - protein, 21 aa, Homo sapiens
CAHTRIEYYYDSSGPYYFDYW

SEQ ID NO: 22544 - protein, 14 aa, Homo sapiens
CARQIGDTGESDYW

SEQ ID NO: 22545 - protein, 21 aa, Homo sapiens
CARDEIAAAPDGGYYYGMDVW

SEQ ID NO: 22546 - protein, 25 aa, Homo sapiens
CAKQPVGITMMLVVLFRDEWYFDLW

SEQ ID NO: 22547 - protein, 20 aa, Homo sapiens
CARVDKHYYDSIAGFWVDYW

SEQ ID NO: 22548 - protein, 25 aa, Homo sapiens
CARDNVVVVAATPEGDYYYYGMDVW

SEQ ID NO: 22549 - protein, 20 aa, Homo sapiens
CARGGWRKRDGYNFIAFDIW

SEQ ID NO: 22550 - protein, 23 aa, Homo sapiens
CARENYYFQNSDYSLTRNAFDIW

SEQ ID NO: 22551 - protein, 10 aa, Homo sapiens
CASFGLYFYW

SEQ ID NO: 22552 - protein, 19 aa, Homo sapiens
CAKDRSVTNHYYWYGMDVW

SEQ ID NO: 22553 - protein, 16 aa, Homo sapiens
CATPARQWLVQPFDYW

SEQ ID NO: 22554 - protein, 22 aa, Homo sapiens
CARELINYDILTGSPYYYFDYW

SEQ ID NO: 22555 - protein, 26 aa, Homo sapiens
CARDFPGYSSGWYSITQNSYDAFDIW

SEQ ID NO: 22556 - protein, 13 aa, Homo sapiens
CSSYAGNNFPVVF

SEQ ID NO: 22557 - protein, 16 aa, Homo sapiens
CARDPGVLGFVGFDIW

SEQ ID NO: 22558 - protein, 17 aa, Homo sapiens
CTSPKYYDILTGPFDYW

SEQ ID NO: 22559 - protein, 14 aa, Homo sapiens
CARDSTEGYGIDYW

SEQ ID NO: 22560 - protein, 22 aa, Homo sapiens
CARHPYYDSSGYYYKYNWFDPW

SEQ ID NO: 22561 - protein, 20 aa, Homo sapiens
CAGGLGVVRGVLTPNCFDDW

SEQ ID NO: 22562 - protein, 22 aa, Homo sapiens
CARELRFCSGGSCYPDDWFDPW

SEQ ID NO: 22563 - protein, 18 aa, Homo sapiens
CARDLGGGLSRHYYFDYW

SEQ ID NO: 22564 - protein, 21 aa, Homo sapiens
CARVQGELSSLFYYYYGMDVW

SEQ ID NO: 22565 - protein, 19 aa, Homo sapiens
CAISWAGDTDGYPPPGDYW

SEQ ID NO: 22566 - protein, 20 aa, Homo sapiens
CARVQSVDTAMDYYYGMDVW

SEQ ID NO: 22567 - protein, 21 aa, Homo sapiens
CAKDHNIAVAGLFGDYYFDYW

SEQ ID NO: 22568 - protein, 12 aa, Homo sapiens
CTSDPDSYGSYW

SEQ ID NO: 22569 - protein, 22 aa, Homo sapiens
CVKGGTAVADTSTGSDDAFDIW

SEQ ID NO: 22570 - protein, 16 aa, Homo sapiens
CARNVWDFLGNWFDPW

SEQ ID NO: 22571 - protein, 20 aa, Homo sapiens
CAKDALYFHGSGSSLPFDVW

SEQ ID NO: 22572 - protein, 16 aa, Homo sapiens
CASEHTSAYWRAFDGW

SEQ ID NO: 22573 - protein, 13 aa, Homo sapiens
CQTWDTNTARGVF

SEQ ID NO: 22574 - protein, 16 aa, Homo sapiens
CARDRVATPSYYFDYW

SEQ ID NO: 22575 - protein, 15 aa, Homo sapiens
CARERALSAGTLDYW

SEQ ID NO: 22576 - protein, 21 aa, Homo sapiens
CARDTGFELPGYYYYYGMDVW

SEQ ID NO: 22577 - protein, 15 aa, Homo sapiens
CARAWGSLHDAFDIW

SEQ ID NO: 22578 - protein, 23 aa, Homo sapiens
CVKDNFSWDVVVALTATGAFDSW

SEQ ID NO: 22579 - protein, 25 aa, Homo sapiens
CARDGVVVAANGEGQKYYYYGMDVW

SEQ ID NO: 22580 - protein, 13 aa, Homo sapiens
CARVADAANIDYW

SEQ ID NO: 22581 - protein, 18 aa, Homo sapiens
CAKDVRGSSGWYGAFDIW

SEQ ID NO: 22582 - protein, 14 aa, Homo sapiens
CATLSLRPHVFDFW

SEQ ID NO: 22583 - protein, 17 aa, Homo sapiens
CALPICDYYFYYGIDVW

SEQ ID NO: 22584 - protein, 21 aa, Homo sapiens
CARDLTVVNDSYYYYYGMDVW

SEQ ID NO: 22585 - protein, 17 aa, Homo sapiens
CATWESVWLRSTPFDYW

SEQ ID NO: 22586 - protein, 19 aa, Homo sapiens
CARLRSYSDAPGYVYLDYW

SEQ ID NO: 22587 - protein, 20 aa, Homo sapiens
CARQLKRITMVRGVTPFDYW

SEQ ID NO: 22588 - protein, 16 aa, Homo sapiens
CARGAYTYGIPNFDSW

SEQ ID NO: 22589 - protein, 18 aa, Homo sapiens
CARSPDYGDYGYYGMDVW

SEQ ID NO: 22590 - protein, 18 aa, Homo sapiens
CARGEHYGSGKWWWFDPW

SEQ ID NO: 22591 - protein, 21 aa, Homo sapiens
CARVGWTTVVTKYYYYGMDVW

SEQ ID NO: 22592 - protein, 19 aa, Homo sapiens
CAKDSLPMRWLQLPRVDYW

SEQ ID NO: 22593 - protein, 20 aa, Homo sapiens
CAKDSSVGWYSSGWYYFDYW

SEQ ID NO: 22594 - protein, 30 aa, Homo sapiens
CAHSNVLLWFGERPLLPHQPSERDPYFDYW

SEQ ID NO: 22595 - protein, 21 aa, Homo sapiens
CARDKALMAAIFPYYYGMDVW

SEQ ID NO: 22596 - protein, 23 aa, Homo sapiens
CARDTYSDSNYGQVSYYYGMDVW

SEQ ID NO: 22597 - protein, 18 aa, Homo sapiens
CARDHFGFDVVITPCDYW

SEQ ID NO: 22598 - protein, 23 aa, Homo sapiens
CARGQTYYDSSGSPNYYYGMDVW

SEQ ID NO: 22599 - protein, 16 aa, Homo sapiens
CARGGSGYYLEYFQHW

SEQ ID NO: 22600 - protein, 25 aa, Homo sapiens
CAKDAGPLITMVRGVRYYYYGMDVW

SEQ ID NO: 22601 - protein, 22 aa, Homo sapiens
CARELLHYYDSSGYELDAFDIW

SEQ ID NO: 22602 - protein, 18 aa, Homo sapiens
CAKDLGYDWKTHSTFDYW

SEQ ID NO: 22603 - protein, 13 aa, Homo sapiens
CSKVLAWDMVDYW

SEQ ID NO: 22604 - protein, 13 aa, Homo sapiens
CQSTDSSSYYRVF

SEQ ID NO: 22605 - protein, 18 aa, Homo sapiens
CATVMSEAATGVYYFDQW

SEQ ID NO: 22606 - protein, 17 aa, Homo sapiens
CAKDLASTWYNDPFDYW

SEQ ID NO: 22607 - protein, 18 aa, Homo sapiens
CARSGLVRGVNIDEFDHW

SEQ ID NO: 22608 - protein, 17 aa, Homo sapiens
CAKDMGQIYYYYGMDVW

SEQ ID NO: 22609 - protein, 18 aa, Homo sapiens
CAKGNTAMAYHGDAFDIW

SEQ ID NO: 22610 - protein, 19 aa, Homo sapiens
CASLGYDSSGYLGAIFDYW

SEQ ID NO: 22611 - protein, 18 aa, Homo sapiens
CASGTPRYQLRPDGFDIW

SEQ ID NO: 22612 - protein, 14 aa, Homo sapiens
CAKVSTSEWHFDYW

SEQ ID NO: 22613 - protein, 18 aa, Homo sapiens
CARDSSIRFGESWYFDLW

SEQ ID NO: 22614 - protein, 15 aa, Homo sapiens
CARGLVRGSDAFDLW

SEQ ID NO: 22615 - protein, 18 aa, Homo sapiens
CAKDRGYGDVMEGYFDFW

SEQ ID NO: 22616 - protein, 16 aa, Homo sapiens
CARRGTSGYYYSFDFW

SEQ ID NO: 22617 - protein, 16 aa, Homo sapiens
CAKGKQWLVRSYFDYW

SEQ ID NO: 22618 - protein, 15 aa, Homo sapiens
CARHGGGPRDGFDYW

SEQ ID NO: 22619 - protein, 15 aa, Homo sapiens
CVRDNWKNAPVFDLW

SEQ ID NO: 22620 - protein, 20 aa, Homo sapiens
CARSESLFDSAYDSFYFDFW

SEQ ID NO: 22621 - protein, 24 aa, Homo sapiens
CAKDMWAVTNGSGSYYYYYGMDVW

SEQ ID NO: 22622 - protein, 16 aa, Homo sapiens
CATTSPYSTGSWFDPW

SEQ ID NO: 22623 - protein, 15 aa, Homo sapiens
CTTDAVGATWAFDIW

SEQ ID NO: 22624 - protein, 23 aa, Homo sapiens
CARETSEYYYDSSGYHVYYFDYW

SEQ ID NO: 22625 - protein, 18 aa, Homo sapiens
CARNGYTYGTTHDAFVIW

SEQ ID NO: 22626 - protein, 18 aa, Homo sapiens
CARLWYSGYDFPGLFDYW

SEQ ID NO: 22627 - protein, 20 aa, Homo sapiens
CAHRIYGGNSFPTSDAFDIW

SEQ ID NO: 22628 - protein, 22 aa, Homo sapiens
CARDSALYCGGDCSSTYAFDIW

SEQ ID NO: 22629 - protein, 21 aa, Homo sapiens
CARATDSGSYYGYYYYGMDVW

SEQ ID NO: 22630 - protein, 23 aa, Homo sapiens
CARREVDYYDSSGYGLGAYFDYW

SEQ ID NO: 22631 - protein, 18 aa, Homo sapiens
CAKGAELGYSYGYYFDYW

SEQ ID NO: 22632 - protein, 15 aa, Homo sapiens
CARTGYTSAWVLDYW

SEQ ID NO: 22633 - protein, 18 aa, Homo sapiens
CAKVGSSGYETHEYFDYW

SEQ ID NO: 22634 - protein, 20 aa, Homo sapiens
CTKNYPFCTGGDCYYGFDIW

SEQ ID NO: 22635 - protein, 13 aa, Homo sapiens
CQSADRIGAPWVF

SEQ ID NO: 22636 - protein, 17 aa, Homo sapiens
CAKSSWIDSSGYHYDYW

SEQ ID NO: 22637 - protein, 23 aa, Homo sapiens
CAKDWHDYGGNSGTGYYYGMDVW

SEQ ID NO: 22638 - protein, 14 aa, Homo sapiens
CQSADSSTSHPVIF

SEQ ID NO: 22639 - protein, 15 aa, Homo sapiens
CAREIRFLGPRFDSW

SEQ ID NO: 22640 - protein, 16 aa, Homo sapiens
CAKRDSSDFLGYFDYW

SEQ ID NO: 22641 - protein, 15 aa, Homo sapiens
CARGWLTGDDSADYW

SEQ ID NO: 22642 - protein, 15 aa, Homo sapiens
CAKSFSWWFGEFDYW

SEQ ID NO: 22643 - protein, 18 aa, Homo sapiens
CAKTSIPYYYYYYGMDVW

SEQ ID NO: 22644 - protein, 21 aa, Homo sapiens
CARETQTTVPDYYYYYGMDVW

SEQ ID NO: 22645 - protein, 21 aa, Homo sapiens
CAREGDSSNWYNLRVGWFDPW

SEQ ID NO: 22646 - protein, 21 aa, Homo sapiens
CARVGWSTGTGSYYYYGMDVW

SEQ ID NO: 22647 - protein, 17 aa, Homo sapiens
CTTNLGVGTTDFYFDNW

SEQ ID NO: 22648 - protein, 19 aa, Homo sapiens
CARDVSYYGLRSYEGTDYW

SEQ ID NO: 22649 - protein, 17 aa, Homo sapiens
CTTTTPSYNFGAGWDYW

SEQ ID NO: 22650 - protein, 16 aa, Homo sapiens
CAKGPSGSYYDRFDLW

SEQ ID NO: 22651 - protein, 27 aa, Homo sapiens
CAKDYLAVAGTGGLSQAYYYYYGMDVW

SEQ ID NO: 22652 - protein, 19 aa, Homo sapiens
CARIQLWLNYYYYYGMDVW

SEQ ID NO: 22653 - protein, 15 aa, Homo sapiens
CASLSLDTAMPWDYW

SEQ ID NO: 22654 - protein, 14 aa, Homo sapiens
CARGPGGYFPLDYW

SEQ ID NO: 22655 - protein, 21 aa, Homo sapiens
CARDTVTGVAGTTYYYGMDVW

SEQ ID NO: 22656 - protein, 22 aa, Homo sapiens
CARDKRWLPTPESYYYYGMDVW

SEQ ID NO: 22657 - protein, 16 aa, Homo sapiens
CANSHIAAAGDPFDYW

SEQ ID NO: 22658 - protein, 24 aa, Homo sapiens
CARDRRQLWLTGEYYYYYYGMDVW

SEQ ID NO: 22659 - protein, 14 aa, Homo sapiens
CAKAENFGFGIDYW

SEQ ID NO: 22660 - protein, 18 aa, Homo sapiens
CARERSVIDHPYDAFDIW

SEQ ID NO: 22661 - protein, 14 aa, Homo sapiens
CAMDTTTWMRADYW

SEQ ID NO: 22662 - protein, 22 aa, Homo sapiens
CARDSDSIGQSNNYYYYGMDVW

SEQ ID NO: 22663 - protein, 21 aa, Homo sapiens
CAREGGQGYDSSGYYFESDYW

SEQ ID NO: 22664 - protein, 20 aa, Homo sapiens
CARDPLPQYDSSSPYYLDSW

SEQ ID NO: 22665 - protein, 16 aa, Homo sapiens
CAKDQVGYDSAKLDYW

SEQ ID NO: 22666 - protein, 16 aa, Homo sapiens
CAKDSVRYGHKTIDYW

SEQ ID NO: 22667 - protein, 16 aa, Homo sapiens
CIREGYRSLKTWRDYW

SEQ ID NO: 22668 - protein, 16 aa, Homo sapiens
CAKKVYGDYDNWFDPW

SEQ ID NO: 22669 - protein, 18 aa, Homo sapiens
CAKDNRVVRGVIHPFDYW

SEQ ID NO: 22670 - protein, 16 aa, Homo sapiens
CVKRSSGSYWDAFHVW

SEQ ID NO: 22671 - protein, 21 aa, Homo sapiens
CARDMYSGYDGSLYYYGMDVW

SEQ ID NO: 22672 - protein, 19 aa, Homo sapiens
CARVVGSDSSGYYQVFDFW

SEQ ID NO: 22673 - protein, 25 aa, Homo sapiens
CARRTYYYDSSGYFAVGGYWYFDLW

SEQ ID NO: 22674 - protein, 22 aa, Homo sapiens
CARDLEMATIPGVYYYYGMDVW

SEQ ID NO: 22675 - protein, 25 aa, Homo sapiens
CARDGWGTGGGNLRRDYYYYGMDVW

SEQ ID NO: 22676 - protein, 19 aa, Homo sapiens
CARGGTPSTPSIADAFDIW

SEQ ID NO: 22677 - protein, 16 aa, Homo sapiens
CARQSSSSWPIYFDYW

SEQ ID NO: 22678 - protein, 17 aa, Homo sapiens
CARQKRFFGEPQEFDHW

SEQ ID NO: 22679 - protein, 21 aa, Homo sapiens
CARADESGGSLLYYYYGMDVW

SEQ ID NO: 22680 - protein, 19 aa, Homo sapiens
CARGGVSSSSWWAYYFDYW

SEQ ID NO: 22681 - protein, 15 aa, Homo sapiens
CARVYSSSGVAFDIW

SEQ ID NO: 22682 - protein, 16 aa, Homo sapiens
CARPMVRGVMSWFDPW

SEQ ID NO: 22683 - protein, 20 aa, Homo sapiens
CAKDQGGDGSVPGYNGFDYW

SEQ ID NO: 22684 - protein, 18 aa, Homo sapiens
CARTVDTVMAVWYYFDLW

SEQ ID NO: 22685 - protein, 14 aa, Homo sapiens
CARDQEGGWYSDYW

SEQ ID NO: 22686 - protein, 12 aa, Homo sapiens
CARGASNAFDMW

SEQ ID NO: 22687 - protein, 20 aa, Homo sapiens
CARPTYYYDSSGPSGCFDPW

SEQ ID NO: 22688 - protein, 20 aa, Homo sapiens
CARGLYSSSWYGSRHWFDPW

SEQ ID NO: 22689 - protein, 18 aa, Homo sapiens
CARCLLWFGESRNYFDYW

SEQ ID NO: 22690 - protein, 18 aa, Homo sapiens
CARKYGSGRYYFYYFDNW

SEQ ID NO: 22691 - protein, 25 aa, Homo sapiens
CAREIYDSSGYYYGLSRAKGTFDYW

SEQ ID NO: 22692 - protein, 16 aa, Homo sapiens
CARHGEDNYGRVFDYW

SEQ ID NO: 22693 - protein, 19 aa, Homo sapiens
CARDMITFGGVIADRSDYW

SEQ ID NO: 22694 - protein, 15 aa, Homo sapiens
CARQDIYSSTPYDYW

SEQ ID NO: 22695 - protein, 17 aa, Homo sapiens
CARAEDTAMVIGSLDYW

SEQ ID NO: 22696 - protein, 13 aa, Homo sapiens
CQRYNNWPPMYSF

SEQ ID NO: 22697 - protein, 15 aa, Homo sapiens
CAKDRRRNVDTADYW

SEQ ID NO: 22698 - protein, 21 aa, Homo sapiens
CARDLGRTTGTNYYYYGMDVW

SEQ ID NO: 22699 - protein, 18 aa, Homo sapiens
CARDRSPVTTENNWFDPW

SEQ ID NO: 22700 - protein, 20 aa, Homo sapiens
CARARSLYCGDDSCDAYDIW

SEQ ID NO: 22701 - protein, 24 aa, Homo sapiens
CASWKLADYGDYGINYYYYGMDVW

SEQ ID NO: 22702 - protein, 16 aa, Homo sapiens
CARRSLGDYESYFDYW

SEQ ID NO: 22703 - protein, 15 aa, Homo sapiens
CARIDTGDYYRFDYW

SEQ ID NO: 22704 - protein, 22 aa, Homo sapiens
CARDGGSYDSSGFHMAGNFDYW

SEQ ID NO: 22705 - protein, 16 aa, Homo sapiens
CARGKGGIAENWFDPW

SEQ ID NO: 22706 - protein, 14 aa, Homo sapiens
CQSADSDLAYNWVF

SEQ ID NO: 22707 - protein, 17 aa, Homo sapiens
CAKDRIAAAGLGFGDYW

SEQ ID NO: 22708 - protein, 16 aa, Homo sapiens
CARLQYSVYDRGFDSW

SEQ ID NO: 22709 - protein, 22 aa, Homo sapiens
CVRDFRGLGATGTFYYYGMDVW

SEQ ID NO: 22710 - protein, 14 aa, Homo sapiens
CARHGPARSWFDLW

SEQ ID NO: 22711 - protein, 16 aa, Homo sapiens
CSRSYSGSYYYGMDVW

SEQ ID NO: 22712 - protein, 17 aa, Homo sapiens
CARSGTGYPDYYAMDVW

SEQ ID NO: 22713 - protein, 13 aa, Homo sapiens
CQQYDSPSPALTF

SEQ ID NO: 22714 - protein, 24 aa, Homo sapiens
CAKDGYYYDSSGYYSVYYYGMDVW

SEQ ID NO: 22715 - protein, 19 aa, Homo sapiens
CARVRNVALTGTSGYFDYW

SEQ ID NO: 22716 - protein, 17 aa, Homo sapiens
CARDRGSTVVTPSFDYW

SEQ ID NO: 22717 - protein, 24 aa, Homo sapiens
CTTDDPSLYGSGVYYNYYYGMDVW

SEQ ID NO: 22718 - protein, 20 aa, Homo sapiens
CAREGYYDGDGYYYWYFDLW

SEQ ID NO: 22719 - protein, 24 aa, Homo sapiens
CARDSYDYVWGSYRYNLDWYFDLW

SEQ ID NO: 22720 - protein, 18 aa, Homo sapiens
CARDPSSGWVPRFYFDYW

SEQ ID NO: 22721 - protein, 18 aa, Homo sapiens
CARFNRLGGYSYSPFDYW

SEQ ID NO: 22722 - protein, 23 aa, Homo sapiens
CAREGHVHGGYSGYDPSYYFDYW

SEQ ID NO: 22723 - protein, 22 aa, Homo sapiens
CARPVLRYFDWPVGGNNWFDPW

SEQ ID NO: 22724 - protein, 18 aa, Homo sapiens
CAKDLTYYYDSSGQNDYW

SEQ ID NO: 22725 - protein, 22 aa, Homo sapiens
CARDFRGWYASGWNPLGYFDLW

SEQ ID NO: 22726 - protein, 12 aa, Homo sapiens
CTRQGAVAGDYW

SEQ ID NO: 22727 - protein, 19 aa, Homo sapiens
CARRGDGAFRSSPNYFDYW

SEQ ID NO: 22728 - protein, 23 aa, Homo sapiens
CARDMLYIAAAGTYYYYYGMDVW

SEQ ID NO: 22729 - protein, 21 aa, Homo sapiens
CARDQDGFGELLYIYYGMDVW

SEQ ID NO: 22730 - protein, 20 aa, Homo sapiens
CAKSGRRWELLLYEYYFDYW

SEQ ID NO: 22731 - protein, 18 aa, Homo sapiens
CARTRPRGPNHPYFFDYW

SEQ ID NO: 22732 - protein, 20 aa, Homo sapiens
CAKDGDQYSSGWYVSWFDPW

SEQ ID NO: 22733 - protein, 18 aa, Homo sapiens
CAREDYDSSGYSTGFDYW

SEQ ID NO: 22734 - protein, 16 aa, Homo sapiens
CARDRSGSYLFWFDPW

SEQ ID NO: 22735 - protein, 18 aa, Homo sapiens
CAKGDRNIFYFDTGDDYW

SEQ ID NO: 22736 - protein, 18 aa, Homo sapiens
CAKDALYSGYDWGYFDYW

SEQ ID NO: 22737 - protein, 18 aa, Homo sapiens
CARDQYGSGWTPDAFDIW

SEQ ID NO: 22738 - protein, 17 aa, Homo sapiens
CAKEEMTSSGPYSYDYW

SEQ ID NO: 22739 - protein, 26 aa, Homo sapiens
CARGTDYFEISEDSSAPRRAGYFDLW

SEQ ID NO: 22740 - protein, 13 aa, Homo sapiens
CESADSSGENVIF

SEQ ID NO: 22741 - protein, 21 aa, Homo sapiens
CARDHRSDGDYVSYYYGMDVW

SEQ ID NO: 22742 - protein, 18 aa, Homo sapiens
CARDKGYCSGTSCIFDYW

SEQ ID NO: 22743 - protein, 35 aa, Homo sapiens
CTVYIELSGLRSEDTAIYYCARVRAVIGFYYFDLW

SEQ ID NO: 22744 - protein, 12 aa, Homo sapiens
CLQDHNYRSLTF

SEQ ID NO: 22745 - protein, 21 aa, Homo sapiens
CAKDWTYGSGSYYNHDAFDIW

SEQ ID NO: 22746 - protein, 17 aa, Homo sapiens
CAKDDLALFGEFTIDYW

SEQ ID NO: 22747 - protein, 20 aa, Homo sapiens
CARMEGYCSGGSCATPFDYW

SEQ ID NO: 22748 - protein, 18 aa, Homo sapiens
CAKVDKYYYDISGSFDSW

SEQ ID NO: 22749 - protein, 19 aa, Homo sapiens
CARRDCSGGSCYGNAFDIW

SEQ ID NO: 22750 - protein, 20 aa, Homo sapiens
CARWGSGNAGNYYHYGMDVW

SEQ ID NO: 22751 - protein, 19 aa, Homo sapiens
CARDLGSRGYYYRYYFDYW

SEQ ID NO: 22752 - protein, 17 aa, Homo sapiens
CAKGVSSGWYLVYFDYW

SEQ ID NO: 22753 - protein, 16 aa, Homo sapiens
CAKDRHGYIQYYFGYW

SEQ ID NO: 22754 - protein, 18 aa, Homo sapiens
CARDTAMVSDYYYGMDVW

SEQ ID NO: 22755 - protein, 25 aa, Homo sapiens
CARDLAVFGNPAKQALYYYYGMDVW

SEQ ID NO: 22756 - protein, 21 aa, Homo sapiens
CAKAQIPYSSGTYYNFYFDYW

SEQ ID NO: 22757 - protein, 13 aa, Homo sapiens
CQKRDNWPPGFTF

SEQ ID NO: 22758 - protein, 21 aa, Homo sapiens
CARDQNRVRFGEPTEDALDIW

SEQ ID NO: 22759 - protein, 16 aa, Homo sapiens
CAIHSSGWYGGAFEYW

SEQ ID NO: 22760 - protein, 22 aa, Homo sapiens
CARDPTVTSPSGWDYYYGMDVW

SEQ ID NO: 22761 - protein, 12 aa, Homo sapiens
CQQSDSLARFTF

SEQ ID NO: 22762 - protein, 25 aa, Homo sapiens
CAKDQRLEPRSQSGIAVAGWGFDYW

SEQ ID NO: 22763 - protein, 18 aa, Homo sapiens
CARHSDIVATEEYYFDYW

SEQ ID NO: 22764 - protein, 15 aa, Homo sapiens
CARGKIGYSGYFVYW

SEQ ID NO: 22765 - protein, 21 aa, Homo sapiens
CAREGLYYYDSSGYAGVFDYW

SEQ ID NO: 22766 - protein, 17 aa, Homo sapiens
CAKDSGGIVGAGNFDYW

SEQ ID NO: 22767 - protein, 19 aa, Homo sapiens
CATERGLLRYFVHSWFDPW

SEQ ID NO: 22768 - protein, 14 aa, Homo sapiens
CARGYMTTFGFDHW

SEQ ID NO: 22769 - protein, 20 aa, Homo sapiens
CARDTPFHHYYDSSGYFDYW

SEQ ID NO: 22770 - protein, 27 aa, Homo sapiens
CAHSSSPYDYVWGSYRLRDPLYYFDYW

SEQ ID NO: 22771 - protein, 15 aa, Homo sapiens
CAREVTTVMGWFDPW

SEQ ID NO: 22772 - protein, 20 aa, Homo sapiens
CARDDYSSGHAIEGGAFDIW

SEQ ID NO: 22773 - protein, 15 aa, Homo sapiens
CARDKGGSKWYFDLW

SEQ ID NO: 22774 - protein, 19 aa, Homo sapiens
CARGRSYYYSSSSVWLDPW

SEQ ID NO: 22775 - protein, 14 aa, Homo sapiens
CATGVDTAILFDYW

SEQ ID NO: 22776 - protein, 19 aa, Homo sapiens
CARSGWSTLGYYYYGMDVW

SEQ ID NO: 22777 - protein, 18 aa, Homo sapiens
CARDGCSGDCYHGYFEHW

SEQ ID NO: 22778 - protein, 15 aa, Homo sapiens
CARHDLGGVGGIDYW

SEQ ID NO: 22779 - protein, 17 aa, Homo sapiens
CARVAPSVEPTVPFDYW

SEQ ID NO: 22780 - protein, 18 aa, Homo sapiens
CAKGLSASGELLSPFDYW

SEQ ID NO: 22781 - protein, 17 aa, Homo sapiens
CARDLEGGWYSGWFDPW

SEQ ID NO: 22782 - protein, 14 aa, Homo sapiens
CARGGAWFEYFHHW

SEQ ID NO: 22783 - protein, 20 aa, Homo sapiens
CARDCSSPTFCYYYYGMDVW

SEQ ID NO: 22784 - protein, 15 aa, Homo sapiens
CTRDYGNYYWYFDFW

SEQ ID NO: 22785 - protein, 21 aa, Homo sapiens
CARQPLLYYYDSSGYYPFDYW

SEQ ID NO: 22786 - protein, 17 aa, Homo sapiens
CAKDTGMATMGDYFDYW

SEQ ID NO: 22787 - protein, 28 aa, Homo sapiens
CARDFSVRWYSSSPARHQYYYYYGMDVW

SEQ ID NO: 22788 - protein, 18 aa, Homo sapiens
CAKDGRVVSAGHSWIDPW

SEQ ID NO: 22789 - protein, 13 aa, Homo sapiens
CAAWDNNLNGRLF

SEQ ID NO: 22790 - protein, 18 aa, Homo sapiens
CASGFSYGGTADRYFERW

SEQ ID NO: 22791 - protein, 14 aa, Homo sapiens
CANKGKILTAFPYW

SEQ ID NO: 22792 - protein, 15 aa, Homo sapiens
CARRFGNYGFFFDTW

SEQ ID NO: 22793 - protein, 13 aa, Homo sapiens
CAGDNSGWRFGYW

SEQ ID NO: 22794 - protein, 22 aa, Homo sapiens
CARARHYYDSSGYYLGWYFDLW

SEQ ID NO: 22795 - protein, 13 aa, Homo sapiens
CASGYSYGYVDYW

SEQ ID NO: 22796 - protein, 20 aa, Homo sapiens
CARAFWRYGDYYYYYGMDVW

SEQ ID NO: 22797 - protein, 25 aa, Homo sapiens
CAKSGDSNFLHCSSTSCYAGPFDYW

SEQ ID NO: 22798 - protein, 22 aa, Homo sapiens
CDWSSDVCSSDLFGEHFYFDHW

SEQ ID NO: 22799 - protein, 12 aa, Homo sapiens
CAKDRRGYVDFW

SEQ ID NO: 22800 - protein, 17 aa, Homo sapiens
CARGSSKEEWLANFDYW

SEQ ID NO: 22801 - protein, 46 aa, Homo sapiens
CDWSSDVCSSDLRAHSFGRDAHGVVREEGDTHLASQISQINPDDYW

SEQ ID NO: 22802 - protein, 13 aa, Homo sapiens
CSAWDSSLTSWLF

SEQ ID NO: 22803 - protein, 17 aa, Homo sapiens
CARSVGVSGSYRLFDNW

SEQ ID NO: 22804 - protein, 21 aa, Homo sapiens
CAKDPLGYCSGGSCPQPDDYW

SEQ ID NO: 22805 - protein, 25 aa, Homo sapiens
CARVLAAEYYHDGSAYYYPQYFDCW

SEQ ID NO: 22806 - protein, 17 aa, Homo sapiens
CARDSMGPAPPYYFDYW

SEQ ID NO: 22807 - protein, 21 aa, Homo sapiens
CARRLYYNSGSFLTGLVFDYW

SEQ ID NO: 22808 - protein, 20 aa, Homo sapiens
CARVGWFAFRGSVTDALDIW

SEQ ID NO: 22809 - protein, 17 aa, Homo sapiens
CAKDRKAGDGYSEFDTW

SEQ ID NO: 22810 - protein, 22 aa, Homo sapiens
CAHSQYYYDSSGYSSYWYFDLW

SEQ ID NO: 22811 - protein, 14 aa, Homo sapiens
CVRGRDGFNWLDYW

SEQ ID NO: 22812 - protein, 18 aa, Homo sapiens
CARLRYYDSSGWYYFDYW

SEQ ID NO: 22813 - protein, 25 aa, Homo sapiens
CARGIIAAAGMVQAVNYYYYGMDVW

SEQ ID NO: 22814 - protein, 25 aa, Homo sapiens
CARDNVVVTANDGGHYYYYYGMDVW

SEQ ID NO: 22815 - protein, 20 aa, Homo sapiens
CAKLGMSIAAAGLPEYFQHW

SEQ ID NO: 22816 - protein, 14 aa, Homo sapiens
CASQSTMVRADDYW

SEQ ID NO: 22817 - protein, 16 aa, Homo sapiens
CARRPYSSDQFIFDQW

SEQ ID NO: 22818 - protein, 45 aa, Homo sapiens
CDWSSDVCSSDLLLLLLLHLLLSLLFLLSCLMFLRVHLNAWFLPW

SEQ ID NO: 22819 - protein, 14 aa, Homo sapiens
CARISIAVAGVDYW

SEQ ID NO: 22820 - protein, 10 aa, Homo sapiens
CQQLNGSPRF

SEQ ID NO: 22821 - protein, 19 aa, Homo sapiens
CARDPPYYYDSTGDAFDIW

SEQ ID NO: 22822 - protein, 20 aa, Homo sapiens
CAKEALYYDSSGYLWYFDYW

SEQ ID NO: 22823 - protein, 19 aa, Homo sapiens
CARHAETPSGYDLYYFDYW

SEQ ID NO: 22824 - protein, 22 aa, Homo sapiens
CARNPYSSGWRGYYYYSGMDVW

SEQ ID NO: 22825 - protein, 20 aa, Homo sapiens
CAKDPHGGYDSSGYWYFDYW

SEQ ID NO: 22826 - protein, 17 aa, Homo sapiens
CAKGLSAWSTISPFDSW

SEQ ID NO: 22827 - protein, 14 aa, Homo sapiens
CARDPGQPTTFDYW

SEQ ID NO: 22828 - protein, 20 aa, Homo sapiens
CARDMESRGGMAYYYGMDVW

SEQ ID NO: 22829 - protein, 18 aa, Homo sapiens
CARQGSQDTSWSWYFDLW

SEQ ID NO: 22830 - protein, 17 aa, Homo sapiens
CARGNDPPDYGDYFDYW

SEQ ID NO: 22831 - protein, 20 aa, Homo sapiens
CAKDYLVMDNNYYYYGMDVW

SEQ ID NO: 22832 - protein, 17 aa, Homo sapiens
CARGIGAYYSVDGVDVW

SEQ ID NO: 22833 - protein, 19 aa, Homo sapiens
CAKEDSSGGGAYYYGMDVW

SEQ ID NO: 22834 - protein, 14 aa, Homo sapiens
CAKDASGWYRFDSW

SEQ ID NO: 22835 - protein, 19 aa, Homo sapiens
CAKDMVRGVLVRGDAFHMW

SEQ ID NO: 22836 - protein, 23 aa, Homo sapiens
CAKDTFYGGKEGEDYYYYGMDVW

SEQ ID NO: 22837 - protein, 27 aa, Homo sapiens
CAKDSVDSSGYTAFAGDFGTPNYFDYW

SEQ ID NO: 22838 - protein, 17 aa, Homo sapiens
CAKERYTGSFGYFFDYW

SEQ ID NO: 22839 - protein, 19 aa, Homo sapiens
CARPGGQWLVQGSDYFDYW

SEQ ID NO: 22840 - protein, 16 aa, Homo sapiens
CARDGVVFPPNAFDIW

SEQ ID NO: 22841 - protein, 13 aa, Homo sapiens
CQQYGSPQPGYRF

SEQ ID NO: 22842 - protein, 16 aa, Homo sapiens
CVRGMSTNRGDWFDPW

SEQ ID NO: 22843 - protein, 18 aa, Homo sapiens
CARERGIVATPHDAFDIW

SEQ ID NO: 22844 - protein, 15 aa, Homo sapiens
CAKPGGSQRWLYDYW

SEQ ID NO: 22845 - protein, 22 aa, Homo sapiens
CAKRRVRGVTITRYYFYAMDVW

SEQ ID NO: 22846 - protein, 12 aa, Homo sapiens
CTSWLFAHFDYW

SEQ ID NO: 22847 - protein, 21 aa, Homo sapiens
CARIATYCDGEKCFSGWFDSW

SEQ ID NO: 22848 - protein, 15 aa, Homo sapiens
CARGRAYGMAWFNYW

SEQ ID NO: 22849 - protein, 19 aa, Homo sapiens
CAKDKEGYSSSWYWEFDYW

SEQ ID NO: 22850 - protein, 22 aa, Homo sapiens
CARRFYPDSSGYYFFEYYFDYW

SEQ ID NO: 22851 - protein, 16 aa, Homo sapiens
CARTKGWLRPDFFDYW

SEQ ID NO: 22852 - protein, 21 aa, Homo sapiens
CTRDQGMVTDLPNYYYGMDVW

SEQ ID NO: 22853 - protein, 17 aa, Homo sapiens
CAKDRTYANYDPYFDSW

SEQ ID NO: 22854 - protein, 17 aa, Homo sapiens
CTRHEDTIFSDDAFDIW

SEQ ID NO: 22855 - protein, 25 aa, Homo sapiens
CATKLADYDLLTGYSNYYYYGLDVW

SEQ ID NO: 22856 - protein, 24 aa, Homo sapiens
CARDLFPYYYDSSGYSSGDAFHIW

SEQ ID NO: 22857 - protein, 17 aa, Homo sapiens
CAREGGYITGLDAFDLW

SEQ ID NO: 22858 - protein, 19 aa, Homo sapiens
CARSRRVAAAGTPNWFDPW

SEQ ID NO: 22859 - protein, 17 aa, Homo sapiens
CAKVLDYSYSLYYFDFW

SEQ ID NO: 22860 - protein, 19 aa, Homo sapiens
CASGSYYYGSTPEYYFDYW

SEQ ID NO: 22861 - protein, 21 aa, Homo sapiens
CAHAHYDILTGYRWGESFDYW

SEQ ID NO: 22862 - protein, 13 aa, Homo sapiens
CAKQGGLHWLDYW

SEQ ID NO: 22863 - protein, 15 aa, Homo sapiens
CARAGRGTLYYFDYW

SEQ ID NO: 22864 - protein, 23 aa, Homo sapiens
CARGPYFPEEVAGPPPFLGHDYW

SEQ ID NO: 22865 - protein, 26 aa, Homo sapiens
CAKDFVVVPAGTEGSTNYYYYGMDVW

SEQ ID NO: 22866 - protein, 23 aa, Homo sapiens
CARDFPTYCSGDSCYPLDAFDLW

SEQ ID NO: 22867 - protein, 20 aa, Homo sapiens
CAKALYYFDGSSYSYAFDIW

SEQ ID NO: 22868 - protein, 19 aa, Homo sapiens
CVRGWGLVSGSTWGVGDYW

SEQ ID NO: 22869 - protein, 20 aa, Homo sapiens
CAKDHQRIANDYYYYGMDVW

SEQ ID NO: 22870 - protein, 29 aa, Homo sapiens
CARDLRLVDQWIQLWLDVVAYYYYGMDVW

SEQ ID NO: 22871 - protein, 23 aa, Homo sapiens
CARNYYDSSGYYLQDYYYGMDVW

SEQ ID NO: 22872 - protein, 14 aa, Homo sapiens
CARLPGSYYNFDYW

SEQ ID NO: 22873 - protein, 13 aa, Homo sapiens
CGHFHYYSAMDVW

SEQ ID NO: 22874 - protein, 22 aa, Homo sapiens
CARDGWSPQGGSHYYYYGMDVW

SEQ ID NO: 22875 - protein, 17 aa, Homo sapiens
CARTYYHDSTGYYSDHW

SEQ ID NO: 22876 - protein, 21 aa, Homo sapiens
CARDRTLNYYDNPWGDAFDIW

SEQ ID NO: 22877 - protein, 17 aa, Homo sapiens
CARDDYASGSYSVGDYW

SEQ ID NO: 22878 - protein, 20 aa, Homo sapiens
CTRRQQVVQGAYYYYGLDVW

SEQ ID NO: 22879 - protein, 19 aa, Homo sapiens
CATDSSRLYTSAWYYFDYW

SEQ ID NO: 22880 - protein, 17 aa, Homo sapiens
CASPSVTTYYYYGMDVW

SEQ ID NO: 22881 - protein, 19 aa, Homo sapiens
CAKRGDRVSVLGAHYFDSW

SEQ ID NO: 22882 - protein, 18 aa, Homo sapiens
CARVTTDSSGFYHYCDYW

SEQ ID NO: 22883 - protein, 17 aa, Homo sapiens
CARDLAFSYISGSYDYW

SEQ ID NO: 22884 - protein, 15 aa, Homo sapiens
CARYLGIQLWLPDYW

SEQ ID NO: 22885 - protein, 15 aa, Homo sapiens
CASRGVVMMDHFDYW

SEQ ID NO: 22886 - protein, 20 aa, Homo sapiens
CARDQEERFGESYYYGMDVW

SEQ ID NO: 22887 - protein, 17 aa, Homo sapiens
CAHNYYYGSGNSNFEYW

SEQ ID NO: 22888 - protein, 24 aa, Homo sapiens
CAKNSWDYDYVWGSYRYINYFDYW

SEQ ID NO: 22889 - protein, 24 aa, Homo sapiens
CARDQNICSSTSCRYYYYYGMDVW

SEQ ID NO: 22890 - protein, 13 aa, Homo sapiens
CARAPTGTYFDYW

SEQ ID NO: 22891 - protein, 13 aa, Homo sapiens
CGRGAYNYGYDYW

SEQ ID NO: 22892 - protein, 15 aa, Homo sapiens
CAKATSGSFARFDYW

SEQ ID NO: 22893 - protein, 16 aa, Homo sapiens
CARDRRWLQFNWFDPW

SEQ ID NO: 22894 - protein, 18 aa, Homo sapiens
CAKDPGGSSRWEYIFDSW

SEQ ID NO: 22895 - protein, 20 aa, Homo sapiens
CTRGHVDKVATIQDYYFDYW

SEQ ID NO: 22896 - protein, 19 aa, Homo sapiens
CAREPLLRSGGRAGWFDPW

SEQ ID NO: 22897 - protein, 19 aa, Homo sapiens
CAKDGGWPYSSSWYYFDYW

SEQ ID NO: 22898 - protein, 19 aa, Homo sapiens
CAKASQWGSFGYYYGMDVW

SEQ ID NO: 22899 - protein, 16 aa, Homo sapiens
CARRSVGATHDAFDIW

SEQ ID NO: 22900 - protein, 19 aa, Homo sapiens
CVKDHMNGLYNWDEVRDYW

SEQ ID NO: 22901 - protein, 16 aa, Homo sapiens
CARGETSGYDSFVDYW

SEQ ID NO: 22902 - protein, 24 aa, Homo sapiens
CAYVIGDLLTGYQNVFSIGSFDYW

SEQ ID NO: 22903 - protein, 17 aa, Homo sapiens
CAKAMDREALLNYYDYW

SEQ ID NO: 22904 - protein, 19 aa, Homo sapiens
CARGGRGMLASILDAFDIW

SEQ ID NO: 22905 - protein, 15 aa, Homo sapiens
CARDLWFGELIFDYW

SEQ ID NO: 22906 - protein, 15 aa, Homo sapiens
CSRHSEGSGDYFDYW

SEQ ID NO: 22907 - protein, 14 aa, Homo sapiens
CARVNSPWYYFDNW

SEQ ID NO: 22908 - protein, 16 aa, Homo sapiens
CGGIVATAGWDGMDVW

SEQ ID NO: 22909 - protein, 19 aa, Homo sapiens
CAKVRIQLWLLSTGDFDYW

SEQ ID NO: 22910 - protein, 17 aa, Homo sapiens
CARGGEGSWYRFPFDCW

SEQ ID NO: 22911 - protein, 16 aa, Homo sapiens
CAKLKQWELLAPFDYW

SEQ ID NO: 22912 - protein, 13 aa, Homo sapiens
CARDSGSFHFDNW

SEQ ID NO: 22913 - protein, 18 aa, Homo sapiens
CAKDMPGDNGSDATFDSW

SEQ ID NO: 22914 - protein, 22 aa, Homo sapiens
CARLRLGQYYYDSSGKNIFDYW

SEQ ID NO: 22915 - protein, 20 aa, Homo sapiens
CARARRDGYNYYYYYGMDVW

SEQ ID NO: 22916 - protein, 18 aa, Homo sapiens
CAKAAESGNYALTWFDAW

SEQ ID NO: 22917 - protein, 15 aa, Homo sapiens
CARWYGDYELGFDDW

SEQ ID NO: 22918 - protein, 11 aa, Homo sapiens
CLPHNAYPSHF

SEQ ID NO: 22919 - protein, 25 aa, Homo sapiens
CAKDHFVSGPHSSSYYYYYYGMDVW

SEQ ID NO: 22920 - protein, 23 aa, Homo sapiens
CAKEWGYGDYDQPTYYYYGMDVW

SEQ ID NO: 22921 - protein, 16 aa, Homo sapiens
CAREEEQGYSYASDYW

SEQ ID NO: 22922 - protein, 18 aa, Homo sapiens
CARRRGTDYDTSVYFDHW

SEQ ID NO: 22923 - protein, 19 aa, Homo sapiens
CATQLLWFGEFTLDAFDIW

SEQ ID NO: 22924 - protein, 18 aa, Homo sapiens
CARLGVGYYGSGSYLDYW

SEQ ID NO: 22925 - protein, 14 aa, Homo sapiens
CTTEMYYYGPFDYW

SEQ ID NO: 22926 - protein, 14 aa, Homo sapiens
CAREGCSGYGLDYW

SEQ ID NO: 22927 - protein, 16 aa, Homo sapiens
CAKDMGGFSGGIFDYW

SEQ ID NO: 22928 - protein, 18 aa, Homo sapiens
CAKWDAPAYDSSGYLDSW

SEQ ID NO: 22929 - protein, 22 aa, Homo sapiens
CARDWGVGSGSYHYYYYGMDVW

SEQ ID NO: 22930 - protein, 15 aa, Homo sapiens
CARVRTIPAAAFDFW

SEQ ID NO: 22931 - protein, 14 aa, Homo sapiens
CKSADSSSGYSWVF

SEQ ID NO: 22932 - protein, 16 aa, Homo sapiens
CARQYGGYVSPTFDYW

SEQ ID NO: 22933 - protein, 23 aa, Homo sapiens
CARIRPRYCSGGICYSLYYFDYW

SEQ ID NO: 22934 - protein, 16 aa, Homo sapiens
CAKGRTGDVSNWFDPW

SEQ ID NO: 22935 - protein, 21 aa, Homo sapiens
CQQYGRSPPSAYGRSPPSLTF

SEQ ID NO: 22936 - protein, 22 aa, Homo sapiens
CASRRGNYYDSSGYYGDAFDIW

SEQ ID NO: 22937 - protein, 17 aa, Homo sapiens
CVRGGIQVAGIDLFDFW

SEQ ID NO: 22938 - protein, 19 aa, Homo sapiens
CARIPVPFVTMGMTGFDPW

SEQ ID NO: 22939 - protein, 18 aa, Homo sapiens
CAKDIGSGEAVAPGFDYW

SEQ ID NO: 22940 - protein, 18 aa, Homo sapiens
CARDIVFEGEPDDAFDIW

SEQ ID NO: 22941 - protein, 25 aa, Homo sapiens
CARDGFVVVPAAMIESYYYYGMDVW

SEQ ID NO: 22942 - protein, 23 aa, Homo sapiens
CAREWGYYDSSGYPYYYYGMDVW

SEQ ID NO: 22943 - protein, 18 aa, Homo sapiens
CAREMWEKFGEESAFDVW

SEQ ID NO: 22944 - protein, 20 aa, Homo sapiens
CDWSSDVCSSDLANAAFDIW

SEQ ID NO: 22945 - protein, 19 aa, Homo sapiens
CAKGPDLSDYGSGSYFDYW

SEQ ID NO: 22946 - protein, 26 aa, Homo sapiens
CAKDFRHYYDSSGYPRSYYYYGMDVW

SEQ ID NO: 22947 - protein, 11 aa, Homo sapiens
CQQYGSSSIIF

SEQ ID NO: 22948 - protein, 19 aa, Homo sapiens
CARGVRIFGVVEERWFDPW

SEQ ID NO: 22949 - protein, 21 aa, Homo sapiens
CVREGGCSTSNCYESGWFDPW

SEQ ID NO: 22950 - protein, 22 aa, Homo sapiens
CARGFKYDFWSSEYYQDYMDVW

SEQ ID NO: 22951 - protein, 14 aa, Homo sapiens
CARSSCGYGYFDNW

SEQ ID NO: 22952 - protein, 25 aa, Homo sapiens
CARVNLAVTTVTTRRNYHPYYFDYW

SEQ ID NO: 22953 - protein, 19 aa, Homo sapiens
CARGQRLARSQFWFYMDVW

SEQ ID NO: 22954 - protein, 15 aa, Homo sapiens
CANLGDYYDSKIDYW

SEQ ID NO: 22955 - protein, 23 aa, Homo sapiens
CARGFHEFCSGESCYGLGWFDPW

SEQ ID NO: 22956 - protein, 19 aa, Homo sapiens
CAREGRDSYGSTSLCFDYW

SEQ ID NO: 22957 - protein, 22 aa, Homo sapiens
CARDSAVATIGGAYYYYGMDVW

SEQ ID NO: 22958 - protein, 16 aa, Homo sapiens
CARDRSGSYHSYYDYW

SEQ ID NO: 22959 - protein, 16 aa, Homo sapiens
CAHRGPGTYYNWFDPW

SEQ ID NO: 22960 - protein, 24 aa, Homo sapiens
CAKGYYDSSGYYYAGDYYYGMDVW

SEQ ID NO: 22961 - protein, 17 aa, Homo sapiens
CARTTTSTAWSNWFDRW

SEQ ID NO: 22962 - protein, 15 aa, Homo sapiens
CARGIASLSVWFHPW

SEQ ID NO: 22963 - protein, 14 aa, Homo sapiens
CAKLSGPDYYMDVW

SEQ ID NO: 22964 - protein, 20 aa, Homo sapiens
CARDLVGATDYYYYYGMDVW

SEQ ID NO: 22965 - protein, 17 aa, Homo sapiens
CARELDGGSTSCHFDHW

SEQ ID NO: 22966 - protein, 14 aa, Homo sapiens
CFAIPGSLDWFDPW

SEQ ID NO: 22967 - protein, 22 aa, Homo sapiens
CAKDYIVTTTTPIDYYYGMDVW

SEQ ID NO: 22968 - protein, 19 aa, Homo sapiens
CARVAGTAPHLSYYYFDNW

SEQ ID NO: 22969 - protein, 23 aa, Homo sapiens
CAKDKGDGARVYYGGNSGEFDYW

SEQ ID NO: 22970 - protein, 11 aa, Homo sapiens
CARGDGYFEYW

SEQ ID NO: 22971 - protein, 20 aa, Homo sapiens
CARDFCSSINCYGYNYFDSW

SEQ ID NO: 22972 - protein, 13 aa, Homo sapiens
CQQRGSWPPEITF

SEQ ID NO: 22973 - protein, 19 aa, Homo sapiens
CAKDSRVFLLGADYYFDSW

SEQ ID NO: 22974 - protein, 15 aa, Homo sapiens
CQQSYSTPPGALYTF

SEQ ID NO: 22975 - protein, 17 aa, Homo sapiens
CAGEYSSSSWGWYFDLW

SEQ ID NO: 22976 - protein, 17 aa, Homo sapiens
CVRDQRRGYSGYDLDYW

SEQ ID NO: 22977 - protein, 15 aa, Homo sapiens
CARGSADWPRVPDYW

SEQ ID NO: 22978 - protein, 16 aa, Homo sapiens
CARGSNLVMGLDFDYW

SEQ ID NO: 22979 - protein, 13 aa, Homo sapiens
CARQMVVAYFQHW

SEQ ID NO: 22980 - protein, 20 aa, Homo sapiens
CARRSAETYYYDSSGRFDYW

SEQ ID NO: 22981 - protein, 32 aa, Homo sapiens
CSLKASDTAMYYCARTFEGCSSATCQNWFDPW

SEQ ID NO: 22982 - protein, 24 aa, Homo sapiens
CARDIVVVPAARPKPYYYYGMDVW

SEQ ID NO: 22983 - protein, 18 aa, Homo sapiens
CTTLLTISGVVIRAFDVW

SEQ ID NO: 22984 - protein, 12 aa, Homo sapiens
CRAEGELARDYW

SEQ ID NO: 22985 - protein, 20 aa, Homo sapiens
CASGGSSSSSWSGQWVFDSW

SEQ ID NO: 22986 - protein, 14 aa, Homo sapiens
CSSYTSSHSLDVLF

SEQ ID NO: 22987 - protein, 15 aa, Homo sapiens
CASHYIVGPTSLDYW

SEQ ID NO: 22988 - protein, 16 aa, Homo sapiens
CARTGVVLSTSRDDYW

SEQ ID NO: 22989 - protein, 19 aa, Homo sapiens
CARGGGFGEYPYYYGMDVW

SEQ ID NO: 22990 - protein, 16 aa, Homo sapiens
CAKVTVGMYPFTFDIW

SEQ ID NO: 22991 - protein, 16 aa, Homo sapiens
CARINSGYSNWYFDLW

SEQ ID NO: 22992 - protein, 24 aa, Homo sapiens
CARQGYCSGDSCYSWHYYYYMDVW

SEQ ID NO: 22993 - protein, 15 aa, Homo sapiens
CARVASGYYGWFDRW

SEQ ID NO: 22994 - protein, 16 aa, Homo sapiens
CARVPLNNVPYVFDPW

SEQ ID NO: 22995 - protein, 14 aa, Homo sapiens
CASYTSSSSFAVVF

SEQ ID NO: 22996 - protein, 19 aa, Homo sapiens
CARVPLSRDFWSEGYFDYW

SEQ ID NO: 22997 - protein, 16 aa, Homo sapiens
CARDRSGDYYYGMDVW

SEQ ID NO: 22998 - protein, 13 aa, Homo sapiens
CARGRGPSGADYW

SEQ ID NO: 22999 - protein, 12 aa, Homo sapiens
CQLYESYSTWTF

SEQ ID NO: 23000 - protein, 16 aa, Homo sapiens
CARDIIGYTSGCSDYW

SEQ ID NO: 23001 - protein, 15 aa, Homo sapiens
CARVGVYGSGSRDYW

SEQ ID NO: 23002 - protein, 16 aa, Homo sapiens
CARGTTMVRGAPVDYW

SEQ ID NO: 23003 - protein, 23 aa, Homo sapiens
CARIQLYDYVSGSYRYLYYFDSW

SEQ ID NO: 23004 - protein, 13 aa, Homo sapiens
CARLDSINWVDPW

SEQ ID NO: 23005 - protein, 15 aa, Homo sapiens
CARDGTYVSLVFDYW

SEQ ID NO: 23006 - protein, 22 aa, Homo sapiens
CARDGDRIFGVVNEPTDAFDIW

SEQ ID NO: 23007 - protein, 24 aa, Homo sapiens
CARVTINRVRRISEEYYNYAMDIW

SEQ ID NO: 23008 - protein, 20 aa, Homo sapiens
CARDSYIVATTRYYYGMDVW

SEQ ID NO: 23009 - protein, 16 aa, Homo sapiens
CAKADPAMTNGAFDIW

SEQ ID NO: 23010 - protein, 24 aa, Homo sapiens
CTTVAHWHCSGGSCYSGDDAFDIW

SEQ ID NO: 23011 - protein, 15 aa, Homo sapiens
CARDDYGDYGSYDYW

SEQ ID NO: 23012 - protein, 20 aa, Homo sapiens
CARDVIVEGYCSGGTCADYW

SEQ ID NO: 23013 - protein, 22 aa, Homo sapiens
CARDYGQCRPGGLCYSDPFDYW

SEQ ID NO: 23014 - protein, 16 aa, Homo sapiens
CARARTDILHYYLDYW

SEQ ID NO: 23015 - protein, 17 aa, Homo sapiens
CAKDGVRGYSYDHFDYW

SEQ ID NO: 23016 - protein, 18 aa, Homo sapiens
CASLYSNYDYYYYGMDVW

SEQ ID NO: 23017 - protein, 16 aa, Homo sapiens [sequence omitted]

SEQ ID NO: 23018 - protein, 18 aa, Homo sapiens
CAKESWILTGYSGLFDYW

SEQ ID NO: 23019 - protein, 17 aa, Homo sapiens
CARDPPSPLTGDGFDIW

SEQ ID NO: 23020 - protein, 17 aa, Homo sapiens
CAKDASDYGDSPSFGYW

SEQ ID NO: 23021 - protein, 20 aa, Homo sapiens
CAKFNDNYDDDGYNYHFDLW

SEQ ID NO: 23022 - protein, 17 aa, Homo sapiens
CAGDWVVAPPANAMDVW

SEQ ID NO: 23023 - protein, 16 aa, Homo sapiens
CAKSESCNGPNWFDAW

SEQ ID NO: 23024 - protein, 18 aa, Homo sapiens
CARHLFIAVASGWYFDLW

SEQ ID NO: 23025 - protein, 12 aa, Homo sapiens
CQQYSSYANRTF

SEQ ID NO: 23026 - protein, 19 aa, Homo sapiens
CARSHFNWFLSYYNWFDPW

SEQ ID NO: 23027 - protein, 13 aa, Homo sapiens
CQSYDSGLWGVIF

SEQ ID NO: 23028 - protein, 21 aa, Homo sapiens
CAKDVLKGYQLWSADSPFDFW

SEQ ID NO: 23029 - protein, 15 aa, Homo sapiens
CARNGEYQLLFFDYW

SEQ ID NO: 23030 - protein, 23 aa, Homo sapiens
CARGGVVVVPDIFDSSSNWFDPW

SEQ ID NO: 23031 - protein, 15 aa, Homo sapiens
CARVGMTTTRAFDYW

SEQ ID NO: 23032 - protein, 15 aa, Homo sapiens
CAHRHILTGSYFDYW

SEQ ID NO: 23033 - protein, 15 aa, Homo sapiens
CARHGSTTSRWFDPW

SEQ ID NO: 23034 - protein, 21 aa, Homo sapiens
CARGYYYGSGSYYNQYYFDYW

SEQ ID NO: 23035 - protein, 15 aa, Homo sapiens
CARDPGPRGTAYDIW

SEQ ID NO: 23036 - protein, 14 aa, Homo sapiens
CARDERGSWYFGLW

SEQ ID NO: 23037 - protein, 19 aa, Homo sapiens
CTKENYFDSSGYEVGFDYW

SEQ ID NO: 23038 - protein, 14 aa, Homo sapiens
CAIEKWFGYYFADW

SEQ ID NO: 23039 - protein, 13 aa, Homo sapiens [sequence omitted]

SEQ ID NO: 23040 - protein, 16 aa, Homo sapiens
CAAYGDNGAHYAFDIW

SEQ ID NO: 23041 - protein, 16 aa, Homo sapiens
CARYYSPYYYYAMDVW

SEQ ID NO: 23042 - protein, 18 aa, Homo sapiens
CARVGEVDDVVYWDLDLW

SEQ ID NO: 23043 - protein, 18 aa, Homo sapiens
CAKGGDYDYYYYYYMDVW

SEQ ID NO: 23044 - protein, 21 aa, Homo sapiens
CAKDYGHCSAGRCYSDPFDYW

SEQ ID NO: 23045 - protein, 15 aa, Homo sapiens
CAKGPVPRYGAFDIW

SEQ ID NO: 23046 - protein, 21 aa, Homo sapiens
CARGGSGYSYGWHYYYGMDVW

SEQ ID NO: 23047 - protein, 20 aa, Homo sapiens
CARDVYSSSSGAYYYGMDVW

SEQ ID NO: 23048 - protein, 21 aa, Homo sapiens
CTRHVHRSNNSYSYYYYLDVW

SEQ ID NO: 23049 - protein, 16 aa, Homo sapiens
CTRGGHDYADVHFDSW

SEQ ID NO: 23050 - protein, 17 aa, Homo sapiens
CVSSYYDSRTHYYLDYW

SEQ ID NO: 23051 - protein, 13 aa, Homo sapiens
CVRDRGWLQFDNW

SEQ ID NO: 23052 - protein, 20 aa, Homo sapiens
CASGKPAGGPPPDYWHFDLW

SEQ ID NO: 23053 - protein, 17 aa, Homo sapiens
CARGIPTHYNYYGMDVW

SEQ ID NO: 23054 - protein, 25 aa, Homo sapiens
CARDLFVASTLYPTTEYYYYGMDVW

SEQ ID NO: 23055 - protein, 19 aa, Homo sapiens
CARDKNYYGSGSRDAFDIW

SEQ ID NO: 23056 - protein, 19 aa, Homo sapiens
CAKDQPVYYYDSSPPGDYW

SEQ ID NO: 23057 - protein, 15 aa, Homo sapiens
CARETNGDFHWFDPW

SEQ ID NO: 23058 - protein, 11 aa, Homo sapiens
CLLYYGGGWAF

SEQ ID NO: 23059 - protein, 12 aa, Homo sapiens
CATLLTGAFDYW

SEQ ID NO: 23060 - protein, 11 aa, Homo sapiens
CQQRTHWPGPF

SEQ ID NO: 23061 - protein, 25 aa, Homo sapiens
CASEPVDVQLERRAYYYYYYGMDVW

SEQ ID NO: 23062 - protein, 28 aa, Homo sapiens
CARGLSRLKVNIVIVPTAIQSNNWFDPW

SEQ ID NO: 23063 - protein, 10 aa, Homo sapiens
CQRLNSYITF

SEQ ID NO: 23064 - protein, 13 aa, Homo sapiens
CARDVVSAGMDYW

SEQ ID NO: 23065 - protein, 21 aa, Homo sapiens
CARDVLKGYQLWSGYSTFDYW

SEQ ID NO: 23066 - protein, 22 aa, Homo sapiens
CDWSSDVCSSDLVTTTFYFASW

SEQ ID NO: 23067 - protein, 18 aa, Homo sapiens
CVKDTGKMGYYYGGMDVW

SEQ ID NO: 23068 - protein, 17 aa, Homo sapiens
CAKAGFTFQSWYYFDYW

SEQ ID NO: 23069 - protein, 22 aa, Homo sapiens
CAKGITVGGSGWHLRTYYFDYW

SEQ ID NO: 23070 - protein, 20 aa, Homo sapiens
CAHRRSLYRMLSAEDWFDPW

SEQ ID NO: 23071 - protein, 17 aa, Homo sapiens
CVKDLMGAITGAYFDFW

SEQ ID NO: 23072 - protein, 19 aa, Homo sapiens
CAHRPKLDFWSDHYYFDSW

SEQ ID NO: 23073 - protein, 16 aa, Homo sapiens
CATKVATTGTIYFDDW

SEQ ID NO: 23074 - protein, 16 aa, Homo sapiens
CAKVGHYGLSDYFDYW

SEQ ID NO: 23075 - protein, 22 aa, Homo sapiens
CARVGSMVRGVIINFPTHIDYW

SEQ ID NO: 23076 - protein, 15 aa, Homo sapiens
CARASFSSSSRFDPW

SEQ ID NO: 23077 - protein, 19 aa, Homo sapiens
CVAVDPVARTSDYYYMDVW

SEQ ID NO: 23078 - protein, 22 aa, Homo sapiens
CARVGPLLYTNHGVYFFYMDVW

SEQ ID NO: 23079 - protein, 28 aa, Homo sapiens
CARERGRISIFGVVTDPDYFYYYGMDVW

SEQ ID NO: 23080 - protein, 19 aa, Homo sapiens
CARDRGQTGTPGWDAFDIW

SEQ ID NO: 23081 - protein, 20 aa, Homo sapiens
CARVFSSGHYSARTYYFDSW

SEQ ID NO: 23082 - protein, 21 aa, Homo sapiens
CARDRSPELRITGTYEGFDYW

SEQ ID NO: 23083 - protein, 11 aa, Homo sapiens
CQQANNFPFAF

SEQ ID NO: 23084 - protein, 25 aa, Homo sapiens
CARGDSGDCSGESCYSYYGNRFDPW

SEQ ID NO: 23085 - protein, 19 aa, Homo sapiens
CATGGGYTVTTAWGGFDNW

SEQ ID NO: 23086 - protein, 11 aa, Homo sapiens
CQQVDANPFTF

SEQ ID NO: 23087 - protein, 16 aa, Homo sapiens
CVKTSAGGRPYYFDSW

SEQ ID NO: 23088 - protein, 12 aa, Homo sapiens
CQQSYRTLKYSF

SEQ ID NO: 23089 - protein, 14 aa, Homo sapiens
CAKEGDTSIPFDYW

SEQ ID NO: 23090 - protein, 11 aa, Homo sapiens
CHQNSDLPWTF

SEQ ID NO: 23091 - protein, 17 aa, Homo sapiens
CARRTVGWATESPFDIW

SEQ ID NO: 23092 - protein, 16 aa, Homo sapiens
CAREYCRAYNCFFDYW

SEQ ID NO: 23093 - protein, 12 aa, Homo sapiens
CARDRDYSVDYW

SEQ ID NO: 23094 - protein, 16 aa, Homo sapiens
CARPDCSSGTCYFDRW

SEQ ID NO: 23095 - protein, 15 aa, Homo sapiens
CARETVTTLDAFDIW

SEQ ID NO: 23096 - protein, 23 aa, Homo sapiens
CARDAYVAGTEGAYYYYYGMDVW

SEQ ID NO: 23097 - protein, 15 aa, Homo sapiens
CARKYYSDGGGFDNW

SEQ ID NO: 23098 - protein, 27 aa, Homo sapiens
CARGTNPKDPLFSLFGVVVTQAYFDYW

SEQ ID NO: 23099 - protein, 21 aa, Homo sapiens
CARVVCATTSCYGMWKAFDLW

SEQ ID NO: 23100 - protein, 17 aa, Homo sapiens
CAKLVSYYGSGSYVDVW

SEQ ID NO: 23101 - protein, 17 aa, Homo sapiens
CARTEDRGDYSNWFDAW

SEQ ID NO: 23102 - protein, 15 aa, Homo sapiens
CAKPGIVEGRAFDIW

SEQ ID NO: 23103 - protein, 20 aa, Homo sapiens
CVKGAYCSSTGCYTTYFDCW

SEQ ID NO: 23104 - protein, 20 aa, Homo sapiens
CARHGLSLSIYGAPNYLDYW

SEQ ID NO: 23105 - protein, 14 aa, Homo sapiens
CGRERTGPLDFDPW

SEQ ID NO: 23106 - protein, 21 aa, Homo sapiens
CALPICALVSTVTTTFYFASW

SEQ ID NO: 23107 - protein, 20 aa, Homo sapiens
CARDFLDYFDSSGYPYFDFW

SEQ ID NO: 23108 - protein, 19 aa, Homo sapiens
CARGLGYCYGATCSGLDYW

SEQ ID NO: 23109 - protein, 28 aa, Homo sapiens
CARERSSDHYVWGSFSPPGYDYYGMDVW

SEQ ID NO: 23110 - protein, 31 aa, Homo sapiens
CARDPVYYERTNYNNETNPVYYYYFSGMDVW

SEQ ID NO: 23111 - protein, 20 aa, Homo sapiens
CARRPNYDILTGYYPPFDYW

SEQ ID NO: 23112 - protein, 23 aa, Homo sapiens
CARDLYSSSERGDYYYYYGMDVW

SEQ ID NO: 23113 - protein, 18 aa, Homo sapiens
CAKDSVILQRLPYYFDYW

SEQ ID NO: 23114 - protein, 18 aa, Homo sapiens
CARDLKAAAVRRGAFDIW

SEQ ID NO: 23115 - protein, 22 aa, Homo sapiens
CARDHNHMYFDFWSGYRLFDPW

SEQ ID NO: 23116 - protein, 16 aa, Homo sapiens
CARQWRERSLAAFDIW

SEQ ID NO: 23117 - protein, 20 aa, Homo sapiens
CAKDSGDFWSGSLYWYFDLW

SEQ ID NO: 23118 - protein, 18 aa, Homo sapiens
CARDPCTGGNCYGRGDYW

SEQ ID NO: 23119 - protein, 12 aa, Homo sapiens
CMQALETLAITF

SEQ ID NO: 23120 - protein, 22 aa, Homo sapiens
CDWSSDVCSSDLNSYHYYMDIW

SEQ ID NO: 23121 - protein, 14 aa, Homo sapiens
CARDNVYRDYMDVW

SEQ ID NO: 23122 - protein, 15 aa, Homo sapiens
CAHHLSSERTGFDHW

SEQ ID NO: 23123 - protein, 12 aa, Homo sapiens
CARGGNNACDYW

SEQ ID NO: 23124 - protein, 20 aa, Homo sapiens
CARLGPGSAGSDWMFYFDIW

SEQ ID NO: 23125 - protein, 19 aa, Homo sapiens
CARDLIESYSSGWYAPDYW

SEQ ID NO: 23126 - protein, 15 aa, Homo sapiens
CTRVWGSSSWFFGYW

SEQ ID NO: 23127 - protein, 22 aa, Homo sapiens
CARVGPLSCRINGICYSPFDYW

SEQ ID NO: 23128 - protein, 12 aa, Homo sapiens
CQQRSKFPFFTF

SEQ ID NO: 23129 - protein, 13 aa, Homo sapiens
CAKDPYSNYFDYW

SEQ ID NO: 23130 - protein, 20 aa, Homo sapiens
CAKARGIFMLFAAYYGFDVW

SEQ ID NO: 23131 - protein, 19 aa, Homo sapiens
CARVECSGGSCYSIHFDYW

SEQ ID NO: 23132 - protein, 19 aa, Homo sapiens
CARDRFPPGYSFSRIFDIW

SEQ ID NO: 23133 - protein, 20 aa, Homo sapiens
CTRGNSVTPAGYYYYYLDVW

SEQ ID NO: 23134 - protein, 16 aa, Homo sapiens
CARDQEDIVVNGFDYW

SEQ ID NO: 23135 - protein, 12 aa, Homo sapiens
CQQYAKSPPYNF

SEQ ID NO: 23136 - protein, 10 aa, Homo sapiens
CQQWSNWPIF

SEQ ID NO: 23137 - protein, 14 aa, Homo sapiens
CARVSTRGDYFDYW

SEQ ID NO: 23138 - protein, 20 aa, Homo sapiens
CAKDPGRYCTNGVCRYFDYW

SEQ ID NO: 23139 - protein, 7 aa, Homo sapiens
CQQFNNF

SEQ ID NO: 23140 - protein, 12 aa, Homo sapiens
CAKGSADAFDIW

SEQ ID NO: 23141 - protein, 17 aa, Homo sapiens
CARHGCSGGSCYSFDSW

SEQ ID NO: 23142 - protein, 20 aa, Homo sapiens
CAKEKSGTTSSRFYYALDVW

SEQ ID NO: 23143 - protein, 15 aa, Homo sapiens
CARVGCSTASCHDYW

SEQ ID NO: 23144 - protein, 16 aa, Homo sapiens
CARSYSGSYRDFFDYW

SEQ ID NO: 23145 - protein, 17 aa, Homo sapiens
CAGSPTVTTGFWHFDLW

SEQ ID NO: 23146 - protein, 16 aa, Homo sapiens
CTKGKDGQGDTGNDYW

SEQ ID NO: 23147 - protein, 14 aa, Homo sapiens
CAREAAGQWLVDYW

SEQ ID NO: 23148 - protein, 16 aa, Homo sapiens
CARAARGYTNGPIDYW

SEQ ID NO: 23149 - protein, 21 aa, Homo sapiens
CARDEAAAGTGDYYYYGMDVW

SEQ ID NO: 23150 - protein, 18 aa, Homo sapiens
CARTIYCSGTSCYDIDYW

SEQ ID NO: 23151 - protein, 16 aa, Homo sapiens
CASSTVTMGWYYFGFW

SEQ ID NO: 23152 - protein, 18 aa, Homo sapiens
CAREGYETSGPQDAFDIW

SEQ ID NO: 23153 - protein, 22 aa, Homo sapiens
CARDSAYSNYVDYYYYYGMDVW

SEQ ID NO: 23154 - protein, 17 aa, Homo sapiens
CATGSFIGVVIYAFYIW

SEQ ID NO: 23155 - protein, 15 aa, Homo sapiens
CARKDSYGPGCFDHW

SEQ ID NO: 23156 - protein, 15 aa, Homo sapiens
CVKDFYRCGSYFDQW

SEQ ID NO: 23157 - protein, 12 aa, Homo sapiens
CGSHAGSNNFLF

SEQ ID NO: 23158 - protein, 14 aa, Homo sapiens
CARYAGAKGGLDYW

SEQ ID NO: 23159 - protein, 19 aa, Homo sapiens
CARENSGFDSGFYYYMDVW

SEQ ID NO: 23160 - protein, 13 aa, Homo sapiens
CAKAGTRYYFDYW

SEQ ID NO: 23161 - protein, 14 aa, Homo sapiens
CATEGYSGSYFDSW

SEQ ID NO: 23162 - protein, 14 aa, Homo sapiens
CARDGYNHIAFDIW

SEQ ID NO: 23163 - protein, 12 aa, Homo sapiens [sequence omitted]

SEQ ID NO: 23164 - protein, 17 aa, Homo sapiens
CAKDITAVGYRSFFDYW

SEQ ID NO: 23165 - protein, 20 aa, Homo sapiens
CAKSGGFYHYESSGVTFDIW

SEQ ID NO: 23166 - protein, 13 aa, Homo sapiens
CARVHSGGWSDYW

SEQ ID NO: 23167 - protein, 13 aa, Homo sapiens
CQSADITGTYVIF

SEQ ID NO: 23168 - protein, 15 aa, Homo sapiens [sequence omitted]

SEQ ID NO: 23169 - protein, 19 aa, Homo sapiens
CARERFEWDKFDYYYIDVW

SEQ ID NO: 23170 - protein, 24 aa, Homo sapiens
CARDIYLASCSGSCYYYYYGMDVW

SEQ ID NO: 23171 - protein, 15 aa, Homo sapiens
CARRGSGYRDFFDSW

SEQ ID NO: 23172 - protein, 22 aa, Homo sapiens
CARDSFSYSSSSAYYYYGMDVW

SEQ ID NO: 23173 - protein, 21 aa, Homo sapiens
CARRGDFGSGSLYYYYYMDVW

SEQ ID NO: 23174 - protein, 20 aa, Homo sapiens
CARGLGEIAVAKTRHWLDPW

SEQ ID NO: 23175 - protein, 22 aa, Homo sapiens
CARSENTLWGVAATWGTYFDYW

SEQ ID NO: 23176 - protein, 19 aa, Homo sapiens
CAKRGYDCFGYYEDAFDIW

SEQ ID NO: 23177 - protein, 14 aa, Homo sapiens
CQVWDCSSDPPGVF

SEQ ID NO: 23178 - protein, 13 aa, Homo sapiens
CQSYDGSIHPVIF

SEQ ID NO: 23179 - protein, 15 aa, Homo sapiens
CAKELHTSGWYFDYW

SEQ ID NO: 23180 - protein, 11 aa, Homo sapiens
CQHYKNLPLGF

SEQ ID NO: 23181 - protein, 17 aa, Homo sapiens
CVKDRGTGHTYGLFHYW

SEQ ID NO: 23182 - protein, 12 aa, Homo sapiens
CATGDGNWFDPW

SEQ ID NO: 23183 - protein, 24 aa, Homo sapiens
CARTGYSSSSGLEKGYYYYGMDVW

SEQ ID NO: 23184 - protein, 18 aa, Homo sapiens
CARRAADSYGYVGAFDLW

SEQ ID NO: 23185 - protein, 16 aa, Homo sapiens
CARIATLTTSHYFDYW

SEQ ID NO: 23186 - protein, 17 aa, Homo sapiens
CAKDFRSGWYAGWFDPW

SEQ ID NO: 23187 - protein, 15 aa, Homo sapiens
CYSTDSSGNHPQWVF

SEQ ID NO: 23188 - protein, 11 aa, Homo sapiens
CQKYNNWLVTF

SEQ ID NO: 23189 - protein, 12 aa, Homo sapiens
CAKLFYGSVDYW

SEQ ID NO: 23190 - protein, 20 aa, Homo sapiens
CAKGSGIFWIAYQGHSFDYW

SEQ ID NO: 23191 - protein, 15 aa, Homo sapiens
CARAGITIFGVVDYW

SEQ ID NO: 23192 - protein, 17 aa, Homo sapiens
CARDRHSFDNSGYYDYW

SEQ ID NO: 23193 - protein, 36 aa, Homo sapiens
CALPILRAEDTAVYYCAKDLLELLDSDYYYYGMDVW

SEQ ID NO: 23194 - protein, 19 aa, Homo sapiens
CAKDRGGSYYEYYYGMDVW

SEQ ID NO: 23195 - protein, 19 aa, Homo sapiens
CARAQYFDWLLGRGHFDYW

SEQ ID NO: 23196 - protein, 17 aa, Homo sapiens
CARDLYDYDSSGPFDYW

SEQ ID NO: 23197 - protein, 15 aa, Homo sapiens
CATPRGYSYGPFDYW

SEQ ID NO: 23198 - protein, 23 aa, Homo sapiens
CARSPRPNIYDTSSSYPYYFDLW

SEQ ID NO: 23199 - protein, 13 aa, Homo sapiens
CTSYTSSNPPLVF

SEQ ID NO: 23200 - protein, 17 aa, Homo sapiens
CARDSEPLSGDHWFDPW

SEQ ID NO: 23201 - protein, 11 aa, Homo sapiens
CQQSISPPYIF

SEQ ID NO: 23202 - protein, 18 aa, Homo sapiens
CARDLSTTAVKGGAFDIW

SEQ ID NO: 23203 - protein, 13 aa, Homo sapiens
CSSRDSSGNHRLF

SEQ ID NO: 23204 - protein, 19 aa, Homo sapiens
CARGNCSGGSCYSSPFDIW

SEQ ID NO: 23205 - protein, 17 aa, Homo sapiens
CAKDLRAFYDSWGFDYW

SEQ ID NO: 23206 - protein, 17 aa, Homo sapiens
CIKDKIRGLAMGYFDYW

SEQ ID NO: 23207 - protein, 14 aa, Homo sapiens
CQSPDSSATYQVVF

SEQ ID NO: 23208 - protein, 17 aa, Homo sapiens
CAKDLRAYTIIPHFDYW

SEQ ID NO: 23209 - protein, 19 aa, Homo sapiens
CARHGTHTSMALGYAFDIW

SEQ ID NO: 23210 - protein, 17 aa, Homo sapiens
CAHILYVGSARHTFDPW

SEQ ID NO: 23211 - protein, 11 aa, Homo sapiens
CARVSTSFDDW

SEQ ID NO: 23212 - protein, 12 aa, Homo sapiens
CQQSYAAPLDTF

SEQ ID NO: 23213 - protein, 19 aa, Homo sapiens
CAKDSWDGYNYDGGYFDYW

SEQ ID NO: 23214 - protein, 15 aa, Homo sapiens
CAKDIGYSSGLPDYW

SEQ ID NO: 23215 - protein, 20 aa, Homo sapiens
CARTFEGCSSATCQNWFDPW

SEQ ID NO: 23216 - protein, 13 aa, Homo sapiens
CAAYFLTRVFDVW

SEQ ID NO: 23217 - protein, 12 aa, Homo sapiens
CLRYGSSPLFTF

SEQ ID NO: 23218 - protein, 12 aa, Homo sapiens
CARDLYTQPDYW

SEQ ID NO: 23219 - protein, 17 aa, Homo sapiens
CAKGTLAAAILNWFDPW

SEQ ID NO: 23220 - protein, 17 aa, Homo sapiens
CAIRDLVFIAGWFFDLW

SEQ ID NO: 23221 - protein, 15 aa, Homo sapiens
CARLPLEGGGAFDIW

SEQ ID NO: 23222 - protein, 17 aa, Homo sapiens
CAGGTSCYTTVTTFDYW

SEQ ID NO: 23223 - protein, 24 aa, Homo sapiens
CARDLYVLGRISAYYYYYYGMDVW

SEQ ID NO: 23224 - protein, 21 aa, Homo sapiens
CARDRSSDAYTNYLPDAFDIW

SEQ ID NO: 23225 - protein, 19 aa, Homo sapiens
CARIGETYYDFWSGYLDYW

SEQ ID NO: 23226 - protein, 17 aa, Homo sapiens
CARDAWYGSGHYAFDIW

SEQ ID NO: 23227 - protein, 19 aa, Homo sapiens
CAKGGSRQCSGGSCYSDFW

SEQ ID NO: 23228 - protein, 20 aa, Homo sapiens
CARGPRFLETLSRTYYLDSW

SEQ ID NO: 23229 - protein, 19 aa, Homo sapiens
CAHSTYDILTGYYTLFDYW

SEQ ID NO: 23230 - protein, 14 aa, Homo sapiens
CARQPYGDYVFDSW

SEQ ID NO: 23231 - protein, 16 aa, Homo sapiens
CARVEGSYYYYYMDVW

SEQ ID NO: 23232 - protein, 16 aa, Homo sapiens
CARSSAVTTRYDFDYW

SEQ ID NO: 23233 - protein, 17 aa, Homo sapiens
CASERRWNTVGIIFDYW

SEQ ID NO: 23234 - protein, 22 aa, Homo sapiens
CANLGSFALFPYSSDDHVFDYW

SEQ ID NO: 23235 - protein, 15 aa, Homo sapiens
CAKDISPFRGWFDSW

SEQ ID NO: 23236 - protein, 20 aa, Homo sapiens
CARDQRVATILSYYYGMDVW

SEQ ID NO: 23237 - protein, 18 aa, Homo sapiens
CAKDSSEYTQVIGYFDSW

SEQ ID NO: 23238 - protein, 19 aa, Homo sapiens
CTKRLLGFGNGWYWYFDLW

SEQ ID NO: 23239 - protein, 15 aa, Homo sapiens
CARGGNDYSNPYDSW

SEQ ID NO: 23240 - protein, 34 aa, Homo sapiens
CALPISAADTALFYCARHQRQSNYGDYTPPFDYW

SEQ ID NO: 23241 - protein, 13 aa, Homo sapiens
CARLHNVSPFDSW

SEQ ID NO: 23242 - protein, 18 aa, Homo sapiens
CARDWHVIAVAGFYFDYW

SEQ ID NO: 23243 - protein, 22 aa, Homo sapiens
CARDFCGGDCYNDEYYYGMDVW

SEQ ID NO: 23244 - protein, 19 aa, Homo sapiens
CARFGSGYSKTPTYFFDSW

SEQ ID NO: 23245 - protein, 20 aa, Homo sapiens
CARGHYITTVRGGSYYMDVW

SEQ ID NO: 23246 - protein, 19 aa, Homo sapiens
CARMVGCATTLCHPRFDYW

SEQ ID NO: 23247 - protein, 19 aa, Homo sapiens
CAREDCTGGSCFDNWFDPW

SEQ ID NO: 23248 - protein, 20 aa, Homo sapiens
CARLSYDIWSGSSLYYFDHW

SEQ ID NO: 23249 - protein, 17 aa, Homo sapiens
CARVLKGVGAPGEFDYW

SEQ ID NO: 23250 - protein, 25 aa, Homo sapiens
CAKSYCSSTSCYPPVYTYYYGMDVW

SEQ ID NO: 23251 - protein, 19 aa, Homo sapiens
CARIQRGTSYDISAYPDAW

SEQ ID NO: 23252 - protein, 15 aa, Homo sapiens
CARDRILGSGYYDSW

SEQ ID NO: 23253 - protein, 15 aa, Homo sapiens
CARDGVRGGYAFDMW

SEQ ID NO: 23254 - protein, 20 aa, Homo sapiens
CARLRYDTSAYYHGGYFDFW

SEQ ID NO: 23255 - protein, 17 aa, Homo sapiens
CAKHRGSAYAPGSFDSW

SEQ ID NO: 23256 - protein, 21 aa, Homo sapiens
CARGGVAVVGGGQYFSALDVW

SEQ ID NO: 23257 - protein, 17 aa, Homo sapiens
CAREHRVATIESAMDVW

SEQ ID NO: 23258 - protein, 37 aa, Homo sapiens
CDWSSDVCSSDLTAVYYCAKYREFFHLRWGADAFDIW

SEQ ID NO: 23259 - protein, 21 aa, Homo sapiens
CARARRAFCSGGRCSYYFDYW

SEQ ID NO: 23260 - protein, 21 aa, Homo sapiens
CARELRGTVTTHYYYYGMDVW

SEQ ID NO: 23261 - protein, 15 aa, Homo sapiens
CTRETVDGTPYFDYW

SEQ ID NO: 23262 - protein, 13 aa, Homo sapiens
CGTWDSSRSTGVF

SEQ ID NO: 23263 - protein, 24 aa, Homo sapiens
CARGHIVVVTATQNYYYYYGMDVW

SEQ ID NO: 23264 - protein, 12 aa, Homo sapiens
CQQFNNIPMWTF

SEQ ID NO: 23265 - protein, 16 aa, Homo sapiens
CARHRYSSSSYYFDYW

SEQ ID NO: 23266 - protein, 22 aa, Homo sapiens
CARTVPPETSGSTGVDYYFDYW

SEQ ID NO: 23267 - protein, 17 aa, Homo sapiens
CVKGYSSGWLASAFDFW

SEQ ID NO: 23268 - protein, 14 aa, Homo sapiens
CAKADYYDSSGDYW

SEQ ID NO: 23269 - protein, 20 aa, Homo sapiens
CAKHGGLLHLWWGKHPFDLW

SEQ ID NO: 23270 - protein, 23 aa, Homo sapiens
CARERRCGGDCDLYYYYYGMDVW

SEQ ID NO: 23271 - protein, 17 aa, Homo sapiens
CAKPPTLMIAWGAFHIW

SEQ ID NO: 23272 - protein, 20 aa, Homo sapiens
CAKYREIFHLRWGADAFDIW

SEQ ID NO: 23273 - protein, 13 aa, Homo sapiens
CAREVVENFFDSW

SEQ ID NO: 23274 - protein, 20 aa, Homo sapiens
CARGGSFHDGSAYHWDFDYW

SEQ ID NO: 23275 - protein, 22 aa, Homo sapiens
CTTDGIVQLRFLEWLSQGHDYW

SEQ ID NO: 23276 - protein, 18 aa, Homo sapiens
CARESGDNAELVTWFDLW

SEQ ID NO: 23277 - protein, 14 aa, Homo sapiens
CAKDYSTTWYIDYW

SEQ ID NO: 23278 - protein, 17 aa, Homo sapiens
CAHRVGSRGDYNWFDPW

SEQ ID NO: 23279 - protein, 17 aa, Homo sapiens
CAKAMFSSTVTMGNDYW

SEQ ID NO: 23280 - protein, 17 aa, Homo sapiens
CAKGNLGSGYYYGMDVW

SEQ ID NO: 23281 - protein, 15 aa, Homo sapiens
CARHFGSGNYCFDYW

SEQ ID NO: 23282 - protein, 23 aa, Homo sapiens
CARDIMPQFLIRGGSLNSGFDPW

SEQ ID NO: 23283 - protein, 11 aa, Homo sapiens [sequence omitted]

SEQ ID NO: 23284 - protein, 14 aa, Homo sapiens
CQVWDSTTDHHWVF

SEQ ID NO: 23285 - protein, 19 aa, Homo sapiens
CARASEPVGRTTIGWFGPW

SEQ ID NO: 23286 - protein, 25 aa, Homo sapiens
CAKDQVLWLGELLNIYNYYYGMDVW

SEQ ID NO: 23287 - protein, 12 aa, Homo sapiens [sequence omitted]

SEQ ID NO: 23288 - protein, 12 aa, Homo sapiens
CATDGPRGFDQW

SEQ ID NO: 23289 - protein, 22 aa, Homo sapiens
CARDLFRYSNYSYYYYYGMDVW

SEQ ID NO: 23290 - protein, 23 aa, Homo sapiens
CARDSLVVPAASGIYYYYGMDVW

SEQ ID NO: 23291 - protein, 11 aa, Homo sapiens
CQHFHSYPLTF

SEQ ID NO: 23292 - protein, 18 aa, Homo sapiens
CARGRGIAAAADDAFDIW

SEQ ID NO: 23293 - protein, 17 aa, Homo sapiens
CARDLVGGYSYGTFDYW

SEQ ID NO: 23294 - protein, 15 aa, Homo sapiens
CARDQEGIEGSIDYW

SEQ ID NO: 23295 - protein, 18 aa, Homo sapiens
CARDATPNGFYYDGMDVW

SEQ ID NO: 23296 - protein, 14 aa, Homo sapiens
CSALDSSLSAPVPF

SEQ ID NO: 23297 - protein, 21 aa, Homo sapiens
CAKDRLEDIVVVVAAEWFDPW

SEQ ID NO: 23298 - protein, 19 aa, Homo sapiens
CATRYCSGGSCYGYYFDYW

SEQ ID NO: 23299 - protein, 20 aa, Homo sapiens
CARDFRPNYDFLSTYIFDSW

SEQ ID NO: 23300 - protein, 12 aa, Homo sapiens [sequence omitted]

SEQ ID NO: 23301 - protein, 16 aa, Homo sapiens
CARATLLGPLTWFDPW

SEQ ID NO: 23302 - protein, 20 aa, Homo sapiens
CARGPLPTLDSSFSYYKDVW

SEQ ID NO: 23303 - protein, 13 aa, Homo sapiens
CTGSSGWYYFDYW

SEQ ID NO: 23304 - protein, 17 aa, Homo sapiens
CALPISSVEGVDWFDTW

SEQ ID NO: 23305 - protein, 12 aa, Homo sapiens
CMQSIQLRGWTF

SEQ ID NO: 23306 - protein, 17 aa, Homo sapiens
CASLEWDNWNYARFVYW

SEQ ID NO: 23307 - protein, 14 aa, Homo sapiens
CARITGTRYYMDVW

SEQ ID NO: 23308 - protein, 23 aa, Homo sapiens
CARDTLVVVPAADYYYYYGMDVW

SEQ ID NO: 23309 - protein, 15 aa, Homo sapiens
CARDYDILAAYPYYW

SEQ ID NO: 23310 - protein, 14 aa, Homo sapiens
CARGHPPGGDFDYW

SEQ ID NO: 23311 - protein, 19 aa, Homo sapiens
CARGGYSSSLYYYYGMDVW

SEQ ID NO: 23312 - protein, 18 aa, Homo sapiens
CARGCGSNICRTKYNDYW

SEQ ID NO: 23313 - protein, 12 aa, Homo sapiens
CHQRRNWPSSTF

SEQ ID NO: 23314 - protein, 16 aa, Homo sapiens
CARRNGYTYAFYFDYW

SEQ ID NO: 23315 - protein, 22 aa, Homo sapiens
CAKDFYSIRIFGVLPPDAFDMW

SEQ ID NO: 23316 - protein, 14 aa, Homo sapiens
CTTLTGYRGIWDYW

SEQ ID NO: 23317 - protein, 13 aa, Homo sapiens
CARPGVYGDRDYW

SEQ ID NO: 23318 - protein, 18 aa, Homo sapiens
CAKDVGLAAAVPHYLDYW

SEQ ID NO: 23319 - protein, 20 aa, Homo sapiens
CTTDPPAILWFGDGLWFDPW

SEQ ID NO: 23320 - protein, 16 aa, Homo sapiens
CAKDFSFIQLYAFDIW

SEQ ID NO: 23321 - protein, 23 aa, Homo sapiens
CARENRGVDDGYSYGYYYGMDVW

SEQ ID NO: 23322 - protein, 14 aa, Homo sapiens
CTKVLSIKATDDYW

SEQ ID NO: 23323 - protein, 21 aa, Homo sapiens
CARQGRGYSYGFFHFTAFDIW

SEQ ID NO: 23324 - protein, 13 aa, Homo sapiens
CARGSAAAAFDYW

SEQ ID NO: 23325 - protein, 14 aa, Homo sapiens
CQSAGSSGTPPVVF

SEQ ID NO: 23326 - protein, 20 aa, Homo sapiens
CARDGYRRSWYGYYYGMDVW

SEQ ID NO: 23327 - protein, 17 aa, Homo sapiens
CATGARRGYYFYYMDVW

SEQ ID NO: 23328 - protein, 21 aa, Homo sapiens
CARIELWDIVLVPAAPHFDFW

SEQ ID NO: 23329 - protein, 17 aa, Homo sapiens
CTKVSSSSSGRYFFDFW

SEQ ID NO: 23330 - protein, 14 aa, Homo sapiens
CARSSRTFTWFDPW

SEQ ID NO: 23331 - protein, 15 aa, Homo sapiens
CQSTDSSDTYPSWVF

SEQ ID NO: 23332 - protein, 14 aa, Homo sapiens
CAVMRVVHAFYDYW

SEQ ID NO: 23333 - protein, 16 aa, Homo sapiens
CARDLGDFGFYWFDSW

SEQ ID NO: 23334 - protein, 22 aa, Homo sapiens
CARATPRYCSGGSCPDDAFDIW

SEQ ID NO: 23335 - protein, 25 aa, Homo sapiens
CASQDPVSGYCSGGSCYPFDAFDIW

SEQ ID NO: 23336 - protein, 22 aa, Homo sapiens
CARDLRQGSDGQIYYYYGMDVW

SEQ ID NO: 23337 - protein, 17 aa, Homo sapiens
CARVPVATIFGGWFDPW

SEQ ID NO: 23338 - protein, 14 aa, Homo sapiens
CQSTDTSGPHHVIF

SEQ ID NO: 23339 - protein, 17 aa, Homo sapiens
CAKFGHHSSGWYSSDYW

SEQ ID NO: 23340 - protein, 10 aa, Homo sapiens
CMQGIHRYDF

SEQ ID NO: 23341 - protein, 19 aa, Homo sapiens
CAKAAFVYCSSTSCPIDYW

SEQ ID NO: 23342 - protein, 21 aa, Homo sapiens
CARTPDYGDFKYRRYYGMDVW

SEQ ID NO: 23343 - protein, 20 aa, Homo sapiens
CAKDRCSSTSCYYYYGMDVW

SEQ ID NO: 23344 - protein, 15 aa, Homo sapiens
CTRGPKPSHRGFDVW

SEQ ID NO: 23345 - protein, 20 aa, Homo sapiens
CAREEYCSSTSCYYDGMDVW

SEQ ID NO: 23346 - protein, 17 aa, Homo sapiens
CARIPGNSYGYNFFDYW

SEQ ID NO: 23347 - protein, 19 aa, Homo sapiens
CAREHRYLWGSYGGWFDTW

SEQ ID NO: 23348 - protein, 21 aa, Homo sapiens
CATSRPGPCSGGSCYYDFDYW

SEQ ID NO: 23349 - protein, 12 aa, Homo sapiens
CARAWGRSFDSW

SEQ ID NO: 23350 - protein, 14 aa, Homo sapiens
CAKVGGGWHEFDYW

SEQ ID NO: 23351 - protein, 13 aa, Homo sapiens
CNSRDSSGNNWVF

SEQ ID NO: 23352 - protein, 11 aa, Homo sapiens [sequence omitted]

SEQ ID NO: 23353 - protein, 11 aa, Homo sapiens [sequence omitted]

SEQ ID NO: 23354 - protein, 15 aa, Homo sapiens
CAKDESSACYWGDYW

SEQ ID NO: 23355 - protein, 15 aa, Homo sapiens
CARSGYSYGYGFDYW

SEQ ID NO: 23356 - protein, 25 aa, Homo sapiens
CARAGVRVRKIVFVTSILNDVFDIW

SEQ ID NO: 23357 - protein, 24 aa, Homo sapiens
CAREGGGLCSGGSCYLSYYYLDVW

SEQ ID NO: 23358 - protein, 23 aa, Homo sapiens
CARGMRDFWSGYSHSYYYYMDVW

SEQ ID NO: 23359 - protein, 21 aa, Homo sapiens
CARDEGYCSGGRCYKIRFDYW

SEQ ID NO: 23360 - protein, 13 aa, Homo sapiens
CTAGTGKSDTDYW

SEQ ID NO: 23361 - protein, 23 aa, Homo sapiens
CARDPSIGNSGSYYKGSSWFDPW

SEQ ID NO: 23362 - protein, 15 aa, Homo sapiens
CAHLSNDRVLDFDYW

SEQ ID NO: 23363 - protein, 24 aa, Homo sapiens
CARVAISQVRGITENSYHYYMDIW

SEQ ID NO: 23364 - protein, 26 aa, Homo sapiens
CAKDWDASSGWSPGDDNYYYYGMDVW

SEQ ID NO: 23365 - protein, 16 aa, Homo sapiens
CSGGSCFLSYYYLDVW

SEQ ID NO: 23366 - protein, 17 aa, Homo sapiens
CARGNTQWLPIYWFDPW

SEQ ID NO: 23367 - protein, 24 aa, Homo sapiens
CARDMKVVPAASVSYYYYYGMDVW

SEQ ID NO: 23368 - protein, 25 aa, Homo sapiens
CARGRGSVTMILVVMTGAYYYFDSW

SEQ ID NO: 23369 - protein, 21 aa, Homo sapiens
CAKSRSTRFGVGDFYYYMDVW

SEQ ID NO: 23370 - protein, 16 aa, Homo sapiens
CMGWLDHHSYIYMDVW

SEQ ID NO: 23371 - protein, 24 aa, Homo sapiens
CARVGINMVRGVIENFYNYAMDVW

SEQ ID NO: 23372 - protein, 12 aa, Homo sapiens
CAHTTNSRFDYW

SEQ ID NO: 23373 - protein, 20 aa, Homo sapiens
CARKGGDLWSGVTFYHLDYW

SEQ ID NO: 23374 - protein, 12 aa, Homo sapiens
CHQYNDWPAITF

SEQ ID NO: 23375 - protein, 19 aa, Homo sapiens
CASGYSSGWYVRSEYFQHW

SEQ ID NO: 23376 - protein, 20 aa, Homo sapiens
CARQVYYDGSAYYYQHFDYW

SEQ ID NO: 23377 - protein, 19 aa, Homo sapiens
CARAPYASGHSFTRAFDYW

SEQ ID NO: 23378 - protein, 20 aa, Homo sapiens
CARMRRHGYNWASLAADDYW

SEQ ID NO: 23379 - protein, 13 aa, Homo sapiens
CAQIDYYYYMDVW

SEQ ID NO: 23380 - protein, 16 aa, Homo sapiens
CARESSITVFHAFDMW

SEQ ID NO: 23381 - protein, 18 aa, Homo sapiens
CARVWFGYSSSWPYFDYW

SEQ ID NO: 23382 - protein, 22 aa, Homo sapiens
CARGPPLHHFGSGNRHYYFDVW

SEQ ID NO: 23383 - protein, 13 aa, Homo sapiens [sequence omitted]

SEQ ID NO: 23384 - protein, 17 aa, Homo sapiens
CAKLRGRFRWNDGFDVW

SEQ ID NO: 23385 - protein, 13 aa, Homo sapiens
CARWNSRFAFDIW

SEQ ID NO: 23386 - protein, 18 aa, Homo sapiens
CARQPSVGATYTWYFDLW

SEQ ID NO: 23387 - protein, 16 aa, Homo sapiens
CASGIGIVAKLGFDQW

SEQ ID NO: 23388 - protein, 23 aa, Homo sapiens
CAKSLRDFWSGYSLYYYSYMDVW

SEQ ID NO: 23389 - protein, 18 aa, Homo sapiens
CAKDWEVVTPEGEAFDIW

SEQ ID NO: 23390 - protein, 18 aa, Homo sapiens
CSRGQDYCSLGSCHFHYW

SEQ ID NO: 23391 - protein, 10 aa, Homo sapiens
CVRHNAFEIW

SEQ ID NO: 23392 - protein, 15 aa, Homo sapiens
CAKMSSGGSADFDYW

SEQ ID NO: 23393 - protein, 20 aa, Homo sapiens
CARTQKHPILFYFYYYMDVW

SEQ ID NO: 23394 - protein, 16 aa, Homo sapiens
CARGANTYGYNYMDVW

SEQ ID NO: 23395 - protein, 16 aa, Homo sapiens
CARDKASYNWDALDFW

SEQ ID NO: 23396 - protein, 27 aa, Homo sapiens
CARVGYCSGGSCYSLRHYYYYYGMDVW

SEQ ID NO: 23397 - protein, 17 aa, Homo sapiens
CAKELGLYFGEPYFDSW

SEQ ID NO: 23398 - protein, 18 aa, Homo sapiens
CAGSVDTAMVNPRAFDYW

SEQ ID NO: 23399 - protein, 13 aa, Homo sapiens
CQQYNNFSSIFTF

SEQ ID NO: 23400 - protein, 23 aa, Homo sapiens
CATFRYGRWESETLRPDIWFDPW

SEQ ID NO: 23401 - protein, 14 aa, Homo sapiens [sequence omitted]

SEQ ID NO: 23402 - protein, 22 aa, Homo sapiens
CARHGINMIILVFTPDHWFDPW

SEQ ID NO: 23403 - protein, 17 aa, Homo sapiens
CARPVYDSVSRYYIDSW

SEQ ID NO: 23404 - protein, 14 aa, Homo sapiens
CQQSYSILTNMYTF

SEQ ID NO: 23405 - protein, 20 aa, Homo sapiens
CARHQRQSNYGDYTPPFDYW

SEQ ID NO: 23406 - protein, 24 aa, Homo sapiens
CARSSARVALYSSGWNLLCYFDYW

SEQ ID NO: 23407 - protein, 23 aa, Homo sapiens
CAKDQGTCSGDRCYFTSPPFDSW

SEQ ID NO: 23408 - protein, 16 aa, Homo sapiens
CDWSSDVCSSDLFDTW

SEQ ID NO: 23409 - protein, 18 aa, Homo sapiens
CARHGSGTYSSAFYFDYW

SEQ ID NO: 23410 - protein, 25 aa, Homo sapiens
CVRAGVRVRKVFLVPSILNDVFDVW

SEQ ID NO: 23411 - protein, 14 aa, Homo sapiens
CAKGRLWLPVFDSW

SEQ ID NO: 23412 - protein, 13 aa, Homo sapiens
CQSSDSSGSYRIF

SEQ ID NO: 23413 - protein, 24 aa, Homo sapiens
CARSIVVVPAATENYYYYYGMDVW

SEQ ID NO: 23414 - protein, 20 aa, Homo sapiens
CATDLDYHIDDRWYSAFHIW

SEQ ID NO: 23415 - protein, 15 aa, Homo sapiens
CARERYSGYHTFDYW

SEQ ID NO: 23416 - protein, 19 aa, Homo sapiens
CATDPAIFGVVITGFFEYW

SEQ ID NO: 23417 - protein, 21 aa, Homo sapiens
CARDPDIVVVPAARLGAFDIW

SEQ ID NO: 23418 - protein, 13 aa, Homo sapiens
CAALSSSWLLDYW

SEQ ID NO: 23419 - protein, 23 aa, Homo sapiens
CARDHHHLLGYCSGALCHSLDYW

SEQ ID NO: 23420 - protein, 13 aa, Homo sapiens
CQHYGTSPPKYTF

SEQ ID NO: 23421 - protein, 18 aa, Homo sapiens
CARGVAFVPGVMASFDIW

SEQ ID NO: 23422 - protein, 13 aa, Homo sapiens
CMHGTHWPPRYTF

SEQ ID NO: 23423 - protein, 14 aa, Homo sapiens
CTFVPIRVGANDYW

SEQ ID NO: 23424 - protein, 19 aa, Homo sapiens
CARLKPAPMTSLGGWFDPW

SEQ ID NO: 23425 - protein, 27 aa, Homo sapiens
CARGTDPKDPLITLFGVVVIQGYFDYW

SEQ ID NO: 23426 - protein, 12 aa, Homo sapiens
CMQGTRRPPNSF

SEQ ID NO: 23427 - protein, 12 aa, Homo sapiens
CVRQYANWFDPW

SEQ ID NO: 23428 - protein, 30 aa, Homo sapiens
CARSYSHDFWSAFWPSMATPTEHPDEFDIW

SEQ ID NO: 23429 - protein, 17 aa, Homo sapiens
CARDRSRVSGTTGFDYW

SEQ ID NO: 23430 - protein, 15 aa, Homo sapiens
CARDPEWLSLIFDYW

SEQ ID NO: 23431 - protein, 23 aa, Homo sapiens
CAPLGGVLAGLRSGYGDYAVDYW

SEQ ID NO: 23432 - protein, 22 aa, Homo sapiens
CARVWDSCTGGSCFDKDYFDFW

SEQ ID NO: 23433 - protein, 16 aa, Homo sapiens
CVKDGMGELPYGFDFW

SEQ ID NO: 23434 - protein, 16 aa, Homo sapiens
CAKDVRGILGAYFDYW

SEQ ID NO: 23435 - protein, 25 aa, Homo sapiens
CAKVWSSSGELLWFGELLYGPFDYW

SEQ ID NO: 23436 - protein, 12 aa, Homo sapiens
CQQTYSTPPSGF

SEQ ID NO: 23437 - protein, 15 aa, Homo sapiens
CARGKSYTFDYFDYW

SEQ ID NO: 23438 - protein, 18 aa, Homo sapiens
CARPGSAVFWNGVTFDSW

SEQ ID NO: 23439 - protein, 14 aa, Homo sapiens
CARFRSYPYYFDFW

SEQ ID NO: 23440 - protein, 22 aa, Homo sapiens
CAKDKDIVLMVYAPKGNAFDIW

SEQ ID NO: 23441 - protein, 16 aa, Homo sapiens
CARDPRGWGDWYLDLW

SEQ ID NO: 23442 - protein, 18 aa, Homo sapiens
CARGVLGSGSYAYAFDIW

SEQ ID NO: 23443 - protein, 19 aa, Homo sapiens
CARDTSYYYDSSVGYFDYW

SEQ ID NO: 23444 - protein, 20 aa, Homo sapiens
CAHGSNYYDTSSYSGYFQHW

SEQ ID NO: 23445 - protein, 20 aa, Homo sapiens
CAKGQPGDPNSLFNLPHDYW

SEQ ID NO: 23446 - protein, 21 aa, Homo sapiens
CARDRAYWETSGYYNHASDVW

SEQ ID NO: 23447 - protein, 21 aa, Homo sapiens
CARHAEGGITGIYNLAGFDPW

SEQ ID NO: 23448 - protein, 18 aa, Homo sapiens
CARGFFSAYAPDARRDYW

SEQ ID NO: 23449 - protein, 19 aa, Homo sapiens
CARTVGSLEWRSEVPFDCW

SEQ ID NO: 23450 - protein, 14 aa, Homo sapiens
CQSADSTGMPNWVF

SEQ ID NO: 23451 - protein, 15 aa, Homo sapiens
CARGQRRLGSLVDYW

SEQ ID NO: 23452 - protein, 20 aa, Homo sapiens
CARRPFGSCGTSACYFFDNW

SEQ ID NO: 23453 - protein, 17 aa, Homo sapiens
CSRDVGLSTWAKYMDVW

SEQ ID NO: 23454 - protein, 15 aa, Homo sapiens
CARLMGSIAVPEDYW

SEQ ID NO: 23455 - protein, 13 aa, Homo sapiens
CQQFNTLPSVYTF

SEQ ID NO: 23456 - protein, 16 aa, Homo sapiens
CAKDRGYSRADYFDYW

SEQ ID NO: 23457 - protein, 22 aa, Homo sapiens
CARGTESINTMRVVADGFFDYW

SEQ ID NO: 23458 - protein, 16 aa, Homo sapiens
CARDSRVTLGSWFDPW

SEQ ID NO: 23459 - protein, 22 aa, Homo sapiens
CARHQQKTYYDFWSGYVPFDLW

SEQ ID NO: 23460 - protein, 21 aa, Homo sapiens
CARADYYGSGSTGNPYYFDFW

SEQ ID NO: 23461 - protein, 16 aa, Homo sapiens
CAKSGNFYIPTYFDSW

SEQ ID NO: 23462 - protein, 15 aa, Homo sapiens
CARHDFGHAWAFDFW

SEQ ID NO: 23463 - protein, 14 aa, Homo sapiens
CSRLKGLVGWFDPW

SEQ ID NO: 23464 - protein, 17 aa, Homo sapiens
CAKDPDYYDSPNGFDYW

SEQ ID NO: 23465 - protein, 18 aa, Homo sapiens
CARDLGGGRYWAYYFDYW

SEQ ID NO: 23466 - protein, 14 aa, Homo sapiens
CARRKGTNGSFDYW

SEQ ID NO: 23467 - protein, 17 aa, Homo sapiens
CVRSIGWYPLGGYFDYW

SEQ ID NO: 23468 - protein, 27 aa, Homo sapiens
CARVQGGYCSGPSCDSANYYYYYMDVW

SEQ ID NO: 23469 - protein, 15 aa, Homo sapiens
CATAIGAHANVFDYW

SEQ ID NO: 23470 - protein, 19 aa, Homo sapiens
CARVWASIIAVAAGAFDYW

SEQ ID NO: 23471 - protein, 18 aa, Homo sapiens
CATDHHDNYYDRGPSDYW

SEQ ID NO: 23472 - protein, 17 aa, Homo sapiens
CARDVSHSDSLNVFDVW

SEQ ID NO: 23473 - protein, 16 aa, Homo sapiens
CAKENQAWVLGEIDYW

SEQ ID NO: 23474 - protein, 15 aa, Homo sapiens
CAYRIFGLIPYFDSW

SEQ ID NO: 23475 - protein, 12 aa, Homo sapiens
CQQSDRTPMYTF

SEQ ID NO: 23476 - protein, 18 aa, Homo sapiens
CANTVGLRYFDWSSFDCW

SEQ ID NO: 23477 - protein, 20 aa, Homo sapiens
CARPRQRDCSSTNCFDFDDW

SEQ ID NO: 23478 - protein, 15 aa, Homo sapiens
CARDPSIAARPFDYW

SEQ ID NO: 23479 - protein, 16 aa, Homo sapiens
CARDLHYGGNSGFDFW

SEQ ID NO: 23480 - protein, 18 aa, Homo sapiens
CARQYGDFEPRNAIIDYW

SEQ ID NO: 23481 - protein, 17 aa, Homo sapiens
CAKAPQGAVAPDYFDYW

SEQ ID NO: 23482 - protein, 16 aa, Homo sapiens
CARDLVVVAATPFDYW

SEQ ID NO: 23483 - protein, 20 aa, Homo sapiens
CAKDHGDGYTIGRGDYFDYW

SEQ ID NO: 23484 - protein, 20 aa, Homo sapiens
CARGASYGGSYSPIDAFDIW

SEQ ID NO: 23485 - protein, 18 aa, Homo sapiens
CARDRLIFGVIKSPLDYW

SEQ ID NO: 23486 - protein, 18 aa, Homo sapiens
CAKDLDWGGSGWSGIDYW

SEQ ID NO: 23487 - protein, 18 aa, Homo sapiens
CAAFLAVPGTDLFYFEYW

SEQ ID NO: 23488 - protein, 16 aa, Homo sapiens
CATVFRDGYSFPFDNW

SEQ ID NO: 23489 - protein, 20 aa, Homo sapiens
CASDGGYDSSGYYSYFFDNW

SEQ ID NO: 23490 - protein, 20 aa, Homo sapiens
CARLFVSSSSSRPSYYFDYW

SEQ ID NO: 23491 - protein, 17 aa, Homo sapiens
CARTRYNNAHTPHFDHW

SEQ ID NO: 23492 - protein, 20 aa, Homo sapiens
CARDRRDEPSYYYYYYMDVW

SEQ ID NO: 23493 - protein, 18 aa, Homo sapiens
CARSHLVAAGGSYQFDPW

SEQ ID NO: 23494 - protein, 18 aa, Homo sapiens
CARAKGRQWLVQYAFDIW

SEQ ID NO: 23495 - protein, 16 aa, Homo sapiens
CARHSSTTPYSRFDYW

SEQ ID NO: 23496 - protein, 14 aa, Homo sapiens
CARRRISWAQFDYW

SEQ ID NO: 23497 - protein, 20 aa, Homo sapiens
CAHRRLYCSGDSCYSDWDYW

SEQ ID NO: 23498 - protein, 18 aa, Homo sapiens
CGKALLSGGDYDDALDVW

SEQ ID NO: 23499 - protein, 22 aa, Homo sapiens
CAKDGNYYGSGNYYSDNWFDPW

SEQ ID NO: 23500 - protein, 34 aa, Homo sapiens
CDWSSDVCSSDLTGMYYCARDHPDNDYGDYAGYW

SEQ ID NO: 23501 - protein, 17 aa, Homo sapiens
CTRALFYSGSSGYWGYW

SEQ ID NO: 23502 - protein, 37 aa, Homo sapiens
CTAYLQVSSLEADDTAVYFCARTYHYATTGESYFDYW

SEQ ID NO: 23503 - protein, 16 aa, Homo sapiens
CLRGVGATPGSGIDYW

SEQ ID NO: 23504 - protein, 21 aa, Homo sapiens
CALPISRPQAEWDLLLPFDIW

SEQ ID NO: 23505 - protein, 22 aa, Homo sapiens
CARVPIPYCSSTTCYYNWFDPW

SEQ ID NO: 23506 - protein, 17 aa, Homo sapiens
CARGGGSYSVGWYFHYW

SEQ ID NO: 23507 - protein, 16 aa, Homo sapiens
CSPQRGSGSNSRFDFW

SEQ ID NO: 23508 - protein, 18 aa, Homo sapiens
CARDLSYSSSSGGGFDYW

SEQ ID NO: 23509 - protein, 14 aa, Homo sapiens
CARWRSVWSEFDYW

SEQ ID NO: 23510 - protein, 20 aa, Homo sapiens
CARLRETRSSFGVITRFDSW

SEQ ID NO: 23511 - protein, 24 aa, Homo sapiens
CATNRHCSSASCRDDYYYYYMDVW

SEQ ID NO: 23512 - protein, 18 aa, Homo sapiens
CARDSVGGFDPRHWFDPW

SEQ ID NO: 23513 - protein, 19 aa, Homo sapiens
CARDYSNVPLGYYYGMDVW

SEQ ID NO: 23514 - protein, 23 aa, Homo sapiens
CARDTYYDSRGSQYYYYYAMDVW

SEQ ID NO: 23515 - protein, 20 aa, Homo sapiens
CARNIMSADGSVFYHYMDVW

SEQ ID NO: 23516 - protein, 16 aa, Homo sapiens
CAKEKNTATPGPFDYW

SEQ ID NO: 23517 - protein, 34 aa, Homo sapiens
CTAYMELTGLRSEDTAIYYCARKGIKSSWAFDLW

SEQ ID NO: 23518 - protein, 15 aa, Homo sapiens
CASHGENFFDYFDYW

SEQ ID NO: 23519 - protein, 15 aa, Homo sapiens
CARIYGGIYRGLDYW

SEQ ID NO: 23520 - protein, 21 aa, Homo sapiens
CARHPPRGEFLEWLNDAFDIW

SEQ ID NO: 23521 - protein, 18 aa, Homo sapiens
CAKGPTLGYDRGVPFDYW

SEQ ID NO: 23522 - protein, 17 aa, Homo sapiens
CTKQRSGSYSWDYFDFW

SEQ ID NO: 23523 - protein, 17 aa, Homo sapiens
CAKLFDSGYDGSHFDYW

SEQ ID NO: 23524 - protein, 13 aa, Homo sapiens
CTTDYTVGGFDYW

SEQ ID NO: 23525 - protein, 14 aa, Homo sapiens
CAKMTTVSNPGDYW

SEQ ID NO: 23526 - protein, 16 aa, Homo sapiens
CASKYCTGGSCYLGYW

SEQ ID NO: 23527 - protein, 12 aa, Homo sapiens
CQNYNSPSVLTF

SEQ ID NO: 23528 - protein, 15 aa, Homo sapiens
CTRGGDTDGYNHDYW

SEQ ID NO: 23529 - protein, 16 aa, Homo sapiens
CARGHNWNFESWFDPW

SEQ ID NO: 23530 - protein, 22 aa, Homo sapiens
CAISRGYCSGGTCSYYYYMDVW

SEQ ID NO: 23531 - protein, 29 aa, Homo sapiens
CLRAEDTAVYYCARGSAIYYDSSGYFDYW

SEQ ID NO: 23532 - protein, 16 aa, Homo sapiens
CAKDQRGSSLDAFDIW

SEQ ID NO: 23533 - protein, 22 aa, Homo sapiens
CAHKLRENYYGSGSYYPIYDYW

SEQ ID NO: 23534 - protein, 20 aa, Homo sapiens
CARDVMITFEGIIPHAFDTW

SEQ ID NO: 23535 - protein, 16 aa, Homo sapiens
CATSSPWIQLWYIDYW

SEQ ID NO: 23536 - protein, 17 aa, Homo sapiens
CARADTVMGVANYFDYW

SEQ ID NO: 23537 - protein, 20 aa, Homo sapiens
CARDATYYDSSGYYDAFDIW

SEQ ID NO: 23538 - protein, 16 aa, Homo sapiens
CARAEGVGADDAFDIW

SEQ ID NO: 23539 - protein, 19 aa, Homo sapiens
CCRVDDSWSGFYVYRFDYW

SEQ ID NO: 23540 - protein, 14 aa, Homo sapiens
CARPGLYLDDLDYW

SEQ ID NO: 23541 - protein, 16 aa, Homo sapiens
CARMMEWELHKRFDPW

SEQ ID NO: 23542 - protein, 12 aa, Homo sapiens
CTYGGAFYFEYW

SEQ ID NO: 23543 - protein, 17 aa, Homo sapiens
CAKVTYDSSGYYYFDYW

SEQ ID NO: 23544 - protein, 16 aa, Homo sapiens
CARKYSNSHGRCFDPW

SEQ ID NO: 23545 - protein, 16 aa, Homo sapiens
CAREDTSTWYPKKDYW

SEQ ID NO: 23546 - protein, 21 aa, Homo sapiens
CARIPRPREPYSSDMYYFDYW

SEQ ID NO: 23547 - protein, 17 aa, Homo sapiens
CASMYSSGWYEFRFDYW

SEQ ID NO: 23548 - protein, 17 aa, Homo sapiens
CAKERDGVATFGVFEYW

SEQ ID NO: 23549 - protein, 15 aa, Homo sapiens
CARVPFGVATPPDYW

SEQ ID NO: 23550 - protein, 14 aa, Homo sapiens
CASLGERREQPDYW

SEQ ID NO: 23551 - protein, 21 aa, Homo sapiens
CARSLLGYFDFWSGHYIFDYW

SEQ ID NO: 23552 - protein, 21 aa, Homo sapiens
CAKDLDYYDGSNSYYWFFDLW

SEQ ID NO: 23553 - protein, 12 aa, Homo sapiens
CQQANSIHLFTF

SEQ ID NO: 23554 - protein, 14 aa, Homo sapiens
CASASSGYLRADYW

SEQ ID NO: 23555 - protein, 17 aa, Homo sapiens
CARDGYGGPPKYYFDYW

SEQ ID NO: 23556 - protein, 27 aa, Homo sapiens
CARLYWGKGGNSPGVPVYYYYYYMDVW

SEQ ID NO: 23557 - protein, 18 aa, Homo sapiens
CATVGCGGDCYQHYFDYW

SEQ ID NO: 23558 - protein, 17 aa, Homo sapiens
CARPLYPTLEYWYFDLW

SEQ ID NO: 23559 - protein, 13 aa, Homo sapiens
CMQTIQLPPAYTF

SEQ ID NO: 23560 - protein, 14 aa, Homo sapiens
CARGLYYSYAVDVW

SEQ ID NO: 23561 - protein, 28 aa, Homo sapiens
CDWSSDVCSSDLVTVVLRFLEWFPFDYW

SEQ ID NO: 23562 - protein, 25 aa, Homo sapiens
CATRDPQHYGSGSYYHNYYYYMDVW

SEQ ID NO: 23563 - protein, 16 aa, Homo sapiens
CAKLRSGSYLSYFDYW

SEQ ID NO: 23564 - protein, 20 aa, Homo sapiens
CARESSETPPLSSSSGYDYW

SEQ ID NO: 23565 - protein, 23 aa, Homo sapiens
CARHIPPSSYYGTGNYYNTFDSW

SEQ ID NO: 23566 - protein, 17 aa, Homo sapiens
CARVPAWLVSPRYFDLW

SEQ ID NO: 23567 - protein, 16 aa, Homo sapiens
CVRDGGVADHTAFDIW

SEQ ID NO: 23568 - protein, 21 aa, Homo sapiens
CAKAPLSAVDYYDSSGYWAYW

SEQ ID NO: 23569 - protein, 12 aa, Homo sapiens
CARVDTYYMDVW

SEQ ID NO: 23570 - protein, 19 aa, Homo sapiens
CARDNDVYCRGGSCPPDYW

SEQ ID NO: 23571 - protein, 14 aa, Homo sapiens
CAKFSQPGGGHDYW

SEQ ID NO: 23572 - protein, 14 aa, Homo sapiens
CATHLEVTSWFDPW

SEQ ID NO: 23573 - protein, 16 aa, Homo sapiens
CAKESNRGSFTGLDYW

SEQ ID NO: 23574 - protein, 16 aa, Homo sapiens
CAKGASSWYVGYFDSW

SEQ ID NO: 23575 - protein, 18 aa, Homo sapiens
CAKDILGYYGSVTYPDFW

SEQ ID NO: 23576 - protein, 13 aa, Homo sapiens
CARIQRKGIEDYW

SEQ ID NO: 23577 - protein, 18 aa, Homo sapiens
CARSVTAGYSYGDAFDIW

SEQ ID NO: 23578 - protein, 21 aa, Homo sapiens
CARDQGSWFGDRRRGNWFDPW

SEQ ID NO: 23579 - protein, 18 aa, Homo sapiens
CARQLMIRGVINNYFDYW

SEQ ID NO: 23580 - protein, 14 aa, Homo sapiens [sequence omitted]

SEQ ID NO: 23581 - protein, 17 aa, Homo sapiens
CARFYYGSGSNNWFDPW

SEQ ID NO: 23582 - protein, 22 aa, Homo sapiens
CASQMSGYSYGSSHYYYGMDVW

SEQ ID NO: 23583 - protein, 39 aa, Homo sapiens
CDWSSDVCSSDLNNLRAEDTAIYFCAKERGYGAFYFHYW

SEQ ID NO: 23584 - protein, 21 aa, Homo sapiens
CAGGLNYDSSGYYWVNWFDPW

SEQ ID NO: 23585 - protein, 17 aa, Homo sapiens
CARFTRSALYYYYMDVW

SEQ ID NO: 23586 - protein, 17 aa, Homo sapiens
CAHKGPYSSSWFSLDYW

SEQ ID NO: 23587 - protein, 17 aa, Homo sapiens
CAREKGGYSSWGDFEYW

SEQ ID NO: 23588 - protein, 19 aa, Homo sapiens
CARGGYQLPNYYYYGMDVW

SEQ ID NO: 23589 - protein, 14 aa, Homo sapiens
CARDSGMGGTFDWW

SEQ ID NO: 23590 - protein, 16 aa, Homo sapiens
CARCNPNSGYDIFDYW

SEQ ID NO: 23591 - protein, 22 aa, Homo sapiens
CARHKLEYSSSRDYYYYYMDVW

SEQ ID NO: 23592 - protein, 14 aa, Homo sapiens
CAREGTGVNYFDHW

SEQ ID NO: 23593 - protein, 17 aa, Homo sapiens
CAHRTSIAAAGNAFDIW

SEQ ID NO: 23594 - protein, 17 aa, Homo sapiens
CVRGPQSRSSGWYFDYW

SEQ ID NO: 23595 - protein, 20 aa, Homo sapiens
CARQSLGYYDSSGYPPFDYW

SEQ ID NO: 23596 - protein, 19 aa, Homo sapiens
CTTGVYYDSDGYYHAFDIW

SEQ ID NO: 23597 - protein, 20 aa, Homo sapiens
CARMRYSGYNKYYYHYMDVW

SEQ ID NO: 23598 - protein, 18 aa, Homo sapiens
CARAFIPVYGSGSYADYW

SEQ ID NO: 23599 - protein, 15 aa, Homo sapiens
CACLITGWSAPNDYW

SEQ ID NO: 23600 - protein, 19 aa, Homo sapiens
CARRGSVPDTTTWYYFDSW

SEQ ID NO: 23601 - protein, 14 aa, Homo sapiens
CARVYSSGWYDDYW

SEQ ID NO: 23602 - protein, 16 aa, Homo sapiens
CARLGYSHGYYYLDDW

SEQ ID NO: 23603 - protein, 16 aa, Homo sapiens
CAKDKGHTTYWYFDLW

SEQ ID NO: 23604 - protein, 18 aa, Homo sapiens
CAREDSFGLLSGWYFDLW

SEQ ID NO: 23605 - protein, 23 aa, Homo sapiens
CARSPGYCGTTSCYHRPSWFDPW

SEQ ID NO: 23606 - protein, 40 aa, Homo sapiens
CFSLILTSVTAADTAVYYCARGSHTHKIYDILTGHFFDSW

SEQ ID NO: 23607 - protein, 16 aa, Homo sapiens
CAKLDSSAYYDAFDIW

SEQ ID NO: 23608 - protein, 20 aa, Homo sapiens
CVRNPRGYYGSHSPASTDYW

SEQ ID NO: 23609 - protein, 17 aa, Homo sapiens
CARGTFPQLTPPRFDSW

SEQ ID NO: 23610 - protein, 19 aa, Homo sapiens
CARDLGFNSGSYYDPFDMW

SEQ ID NO: 23611 - protein, 21 aa, Homo sapiens
CARVRTSLTIFGVVTPNFDYW

SEQ ID NO: 23612 - protein, 13 aa, Homo sapiens
CAGMRGVAYLDYW

SEQ ID NO: 23613 - protein, 20 aa, Homo sapiens
CAKEYYDILTGYFVPYFDYW

SEQ ID NO: 23614 - protein, 17 aa, Homo sapiens
CARDLRDGHSLNYLDYW

SEQ ID NO: 23615 - protein, 22 aa, Homo sapiens
CARGSHIWYHDSSGRRNHLDYW

SEQ ID NO: 23616 - protein, 21 aa, Homo sapiens
CAKDLGIAARPYLTPNWFDPW

SEQ ID NO: 23617 - protein, 18 aa, Homo sapiens
CARRVFGSTVISGYFDFW

SEQ ID NO: 23618 - protein, 23 aa, Homo sapiens
CAKDRGDGYYYDSSGREYYFDYW

SEQ ID NO: 23619 - protein, 19 aa, Homo sapiens
CARVGVRVRGVINGVFDYW

SEQ ID NO: 23620 - protein, 13 aa, Homo sapiens
CARYVNEDYFDYW

SEQ ID NO: 23621 - protein, 18 aa, Homo sapiens
CARDGGRYYGSGSYLDSW

SEQ ID NO: 23622 - protein, 19 aa, Homo sapiens
CARDSAYHGSGTYYKFDYW

SEQ ID NO: 23623 - protein, 36 aa, Homo sapiens
CLRAEDTAMYYCARDLSRVDYGVLSGYYQGGILDYW

SEQ ID NO: 23624 - protein, 18 aa, Homo sapiens
CAREDYYGSASYYMFNYW

SEQ ID NO: 23625 - protein, 18 aa, Homo sapiens
CARGSRDSYGYLMQFDYW

SEQ ID NO: 23626 - protein, 13 aa, Homo sapiens
CASFGHPRGFDYW

SEQ ID NO: 23627 - protein, 17 aa, Homo sapiens
CAKVRSIAAHVDAFDIW

SEQ ID NO: 23628 - protein, 18 aa, Homo sapiens
CARTHTAMAIFDYYFDYW

SEQ ID NO: 23629 - protein, 18 aa, Homo sapiens
CAKSSSTSFAGGNWFDPW

SEQ ID NO: 23630 - protein, 17 aa, Homo sapiens
CAKDNRDGYNYASFDYW

SEQ ID NO: 23631 - protein, 21 aa, Homo sapiens
CARESGQWLGRSYNYYGMDVW

SEQ ID NO: 23632 - protein, 23 aa, Homo sapiens
CGLISGYDSSGYPHNTGYYFDYW

SEQ ID NO: 23633 - protein, 14 aa, Homo sapiens
CAKVPGPQQPFDYW

SEQ ID NO: 23634 - protein, 19 aa, Homo sapiens
CARGNPVSPTGAYPHIDYW

SEQ ID NO: 23635 - protein, 21 aa, Homo sapiens
CDWSSDVCSSDLGSPPRIDYW

SEQ ID NO: 23636 - protein, 13 aa, Homo sapiens
CTRDIVATIFDYW

SEQ ID NO: 23637 - protein, 16 aa, Homo sapiens
CARITVTGAPWYFDYW

SEQ ID NO: 23638 - protein, 14 aa, Homo sapiens
CARERLQYLPIDYW

SEQ ID NO: 23639 - protein, 17 aa, Homo sapiens
CASQYSRAHWLYAFDIW

SEQ ID NO: 23640 - protein, 25 aa, Homo sapiens
CASYPLGHFASGEYSKRPAKAFDMW

SEQ ID NO: 23641 - protein, 24 aa, Homo sapiens
CARDREGIYDDSSGYYYPDAFDIW

SEQ ID NO: 23642 - protein, 20 aa, Homo sapiens
CAKDGLCDSSGYYCWYFDLW

SEQ ID NO: 23643 - protein, 18 aa, Homo sapiens
CARSGPNTYIGSWYFLYW

SEQ ID NO: 23644 - protein, 13 aa, Homo sapiens
CSSYTSASALGIF

SEQ ID NO: 23645 - protein, 17 aa, Homo sapiens
CARAVVPGTFAEYFHPW

SEQ ID NO: 23646 - protein, 12 aa, Homo sapiens
CATYIGPHFDYW

SEQ ID NO: 23647 - protein, 15 aa, Homo sapiens
CARDRLRSWGAFDIW

SEQ ID NO: 23648 - protein, 21 aa, Homo sapiens
CARDRAIVSSYYYYYYNMDVW

SEQ ID NO: 23649 - protein, 19 aa, Homo sapiens
CVKDSHSSGYSHSNWFDSW

SEQ ID NO: 23650 - protein, 18 aa, Homo sapiens
CAREFTIFGVAGPYFDDW

SEQ ID NO: 23651 - protein, 14 aa, Homo sapiens
CARGLDNSNYMTYW

SEQ ID NO: 23652 - protein, 15 aa, Homo sapiens
CARAWSSSSWVWDYW

SEQ ID NO: 23653 - protein, 19 aa, Homo sapiens
CAKERGNSGYYGWDAFDIW

SEQ ID NO: 23654 - protein, 20 aa, Homo sapiens
CAREVTMIVVVITNHAFDIW

SEQ ID NO: 23655 - protein, 14 aa, Homo sapiens
CATGLHLWFDFDFW

SEQ ID NO: 23656 - protein, 20 aa, Homo sapiens
CARELVRITIFGVAYYFDYW

SEQ ID NO: 23657 - protein, 17 aa, Homo sapiens
CARSLFMGAFPDSFFYW

SEQ ID NO: 23658 - protein, 16 aa, Homo sapiens
CVRAASVVTGWLTDYW

SEQ ID NO: 23659 - protein, 13 aa, Homo sapiens
CARSDGSGYPFYW

SEQ ID NO: 23660 - protein, 27 aa, Homo sapiens
CARDSVSPPATDIAAATYYYYYGMDVW

SEQ ID NO: 23661 - protein, 20 aa, Homo sapiens
CARLLPWGNWNDAERWFDPW

SEQ ID NO: 23662 - protein, 17 aa, Homo sapiens
CARVVGALSTRNWFDPW

SEQ ID NO: 23663 - protein, 19 aa, Homo sapiens
CARLWFGELLPNYNWFDPW

SEQ ID NO: 23664 - protein, 16 aa, Homo sapiens
CARDSYCGGDCLNDYW

SEQ ID NO: 23665 - protein, 15 aa, Homo sapiens
CARPRAILTGSFDPW

SEQ ID NO: 23666 - protein, 22 aa, Homo sapiens
CALTARPDSYYSDGSGYPFDSW

SEQ ID NO: 23667 - protein, 20 aa, Homo sapiens
CARGGWRQQLQLSYYYMDVW

SEQ ID NO: 23668 - protein, 13 aa, Homo sapiens
CVVLEKFDAFSVW

SEQ ID NO: 23669 - protein, 22 aa, Homo sapiens
CARDFIVHCSGLRCYRFGSDYW

SEQ ID NO: 23670 - protein, 17 aa, Homo sapiens
CARGLWSSSKGTYMDVW

SEQ ID NO: 23671 - protein, 13 aa, Homo sapiens
CQQFSLYPEAITF

SEQ ID NO: 23672 - protein, 22 aa, Homo sapiens
CARVQQPLVHGLGSYRGMSDYW

SEQ ID NO: 23673 - protein, 14 aa, Homo sapiens
CAKVAYGEGSADYW

SEQ ID NO: 23674 - protein, 13 aa, Homo sapiens
CVRRAPAAAFDVW

SEQ ID NO: 23675 - protein, 20 aa, Homo sapiens
CASGRTPDYYYDSSGIFDYW

SEQ ID NO: 23676 - protein, 20 aa, Homo sapiens
CARRGIAPGGGWDDFYFDHW

SEQ ID NO: 23677 - protein, 19 aa, Homo sapiens
CARDTEVGSGWSTDYFDSW

SEQ ID NO: 23678 - protein, 22 aa, Homo sapiens
CTTIPATPAKPPAPSKRAFDMW

SEQ ID NO: 23679 - protein, 25 aa, Homo sapiens
CARDQLVVAATDEAAGYYYYGMDVW

SEQ ID NO: 23680 - protein, 17 aa, Homo sapiens
CAKDPSFSTAPGAFDIW

SEQ ID NO: 23681 - protein, 19 aa, Homo sapiens
CAKDQDIVVVPAATAFDYW

SEQ ID NO: 23682 - protein, 16 aa, Homo sapiens
CASRGCSGGYCGIDYW

SEQ ID NO: 23683 - protein, 17 aa, Homo sapiens
CARASVEAVPGRWFDPW

SEQ ID NO: 23684 - protein, 18 aa, Homo sapiens
CARADILMIIGATHFEYW

SEQ ID NO: 23685 - protein, 15 aa, Homo sapiens
CAREFGEWLGLLDYW

SEQ ID NO: 23686 - protein, 20 aa, Homo sapiens
CARVHDYGDYGRFYYAMDVW

SEQ ID NO: 23687 - protein, 13 aa, Homo sapiens
CCSYVSSNTHYVF

SEQ ID NO: 23688 - protein, 25 aa, Homo sapiens
CARHFRRTYCSGGSCRFTHDAFDIW

SEQ ID NO: 23689 - protein, 13 aa, Homo sapiens
CARGEGVINFDLW

SEQ ID NO: 23690 - protein, 16 aa, Homo sapiens
CAAADSTSGWYYFDYW

SEQ ID NO: 23691 - protein, 18 aa, Homo sapiens
CATSRVAAAGEPSHFDYW

SEQ ID NO: 23692 - protein, 23 aa, Homo sapiens
CARDGVCSSTSCYLYYYYGMDVW

SEQ ID NO: 23693 - protein, 16 aa, Homo sapiens
CATPWRGGNYNAFDVW

SEQ ID NO: 23694 - protein, 18 aa, Homo sapiens
CARNRGPVVASYWYFDLW

SEQ ID NO: 23695 - protein, 21 aa, Homo sapiens
CDWSSDVCSSDLDYGDYAGYW

SEQ ID NO: 23696 - protein, 16 aa, Homo sapiens
CARERLGGETGHFDYW

SEQ ID NO: 23697 - protein, 15 aa, Homo sapiens
CARETPHHKGWFDPW

SEQ ID NO: 23698 - protein, 21 aa, Homo sapiens
CAKPGYCTDGVCHYSYYFDYW

SEQ ID NO: 23699 - protein, 13 aa, Homo sapiens
CQQYNTYSGGCTF

SEQ ID NO: 23700 - protein, 18 aa, Homo sapiens
CARANPPGRGEVDGMDVW

SEQ ID NO: 23701 - protein, 21 aa, Homo sapiens
CARGIGYCSDGDCYSRHFDLW

SEQ ID NO: 23702 - protein, 13 aa, Homo sapiens
CARQNYGDGVDVW

SEQ ID NO: 23703 - protein, 18 aa, Homo sapiens
CARAPYINYIFGYYFDYW

SEQ ID NO: 23704 - protein, 23 aa, Homo sapiens
CARAIAYYDILAAYHGAEYFDLW

SEQ ID NO: 23705 - protein, 14 aa, Homo sapiens
CARQGVDGVGVDYW

SEQ ID NO: 23706 - protein, 20 aa, Homo sapiens
CARWGEVVPAAGPSYYFDYW

SEQ ID NO: 23707 - protein, 16 aa, Homo sapiens
CARHGFQLYLRGIDYW

SEQ ID NO: 23708 - protein, 16 aa, Homo sapiens
CARRPWDGYNLAFDFW

SEQ ID NO: 23709 - protein, 18 aa, Homo sapiens
CARILDSSGYTADAFDIW

SEQ ID NO: 23710 - protein, 19 aa, Homo sapiens
CARHFGDSSGWYLPWFDPW

SEQ ID NO: 23711 - protein, 22 aa, Homo sapiens
CARFHYVPGGYYSSGSSYFDYW

SEQ ID NO: 23712 - protein, 17 aa, Homo sapiens
CAKLPATYCGDECPDYW

SEQ ID NO: 23713 - protein, 19 aa, Homo sapiens
CAMQGYCTTTSCRGYHEYW

SEQ ID NO: 23714 - protein, 21 aa, Homo sapiens
CARHRRAYCGGGHCHPINDYW

SEQ ID NO: 23715 - protein, 23 aa, Homo sapiens
CARAVIHDHTNPYLYYFYAMDVW

SEQ ID NO: 23716 - protein, 16 aa, Homo sapiens
CARADFWTGGHAFDVW

SEQ ID NO: 23717 - protein, 17 aa, Homo sapiens
CARVRMASGRPWYMDVW

SEQ ID NO: 23718 - protein, 14 aa, Homo sapiens
CALAITVAGKFDYW

SEQ ID NO: 23719 - protein, 18 aa, Homo sapiens
CAVTPYYDFWDGYLFDDW

SEQ ID NO: 23720 - protein, 17 aa, Homo sapiens
CAKDNGSGVSSPWFDYW

SEQ ID NO: 23721 - protein, 17 aa, Homo sapiens
CARGLSYKAVAVYFDSW

SEQ ID NO: 23722 - protein, 17 aa, Homo sapiens
CARDDIVATIVGYMDVW

SEQ ID NO: 23723 - protein, 15 aa, Homo sapiens
CAREEDQLLEAFDYW

SEQ ID NO: 23724 - protein, 19 aa, Homo sapiens
CAREGYGYGYSESPYFDYW

SEQ ID NO: 23725 - protein, 17 aa, Homo sapiens
CVRDPTSGYYDRGFDYW

SEQ ID NO: 23726 - protein, 17 aa, Homo sapiens
CAGSPWSGYYSAQFDYW

SEQ ID NO: 23727 - protein, 21 aa, Homo sapiens
CARVAYFEWLLNYYYYYMDVW

SEQ ID NO: 23728 - protein, 12 aa, Homo sapiens
CQESYSAPVFSF

SEQ ID NO: 23729 - protein, 22 aa, Homo sapiens
CANRLSWSAVVVITPKHYFDYW

SEQ ID NO: 23730 - protein, 18 aa, Homo sapiens
CAKGDCSSTSCSGGFDYW

SEQ ID NO: 23731 - protein, 20 aa, Homo sapiens
CARDFFDFWSGYYTGILDYW

SEQ ID NO: 23732 - protein, 20 aa, Homo sapiens
CARLVVPSHRSYYHSYMDVW

SEQ ID NO: 23733 - protein, 14 aa, Homo sapiens
CARDENVAAAPDYW

SEQ ID NO: 23734 - protein, 17 aa, Homo sapiens
CARSGYLMGYYYYMDVW

SEQ ID NO: 23735 - protein, 17 aa, Homo sapiens
CARRAPTISSAYYFDYW

SEQ ID NO: 23736 - protein, 23 aa, Homo sapiens
CARLRGYYDSSGYYGVAYYFDYW

SEQ ID NO: 23737 - protein, 17 aa, Homo sapiens
CALPISSGNFASNFDCW

SEQ ID NO: 23738 - protein, 22 aa, Homo sapiens
CARVTYYYDSSGRLRANWFDPW

SEQ ID NO: 23739 - protein, 17 aa, Homo sapiens
CAKDRGIVVVPDYFDFW

SEQ ID NO: 23740 - protein, 15 aa, Homo sapiens
CVGWSNNYYYYMDVW

SEQ ID NO: 23741 - protein, 21 aa, Homo sapiens
CARLYNDFWSGESPYNWFDPW

SEQ ID NO: 23742 - protein, 14 aa, Homo sapiens
CAKWDSTDSTGDYW

SEQ ID NO: 23743 - protein, 18 aa, Homo sapiens
CVRGGYTYNYRPDALDIW

SEQ ID NO: 23744 - protein, 19 aa, Homo sapiens
CTTAYDFWSGHFDHRPDYW

SEQ ID NO: 23745 - protein, 13 aa, Homo sapiens
CLSADNSGASRVF

SEQ ID NO: 23746 - protein, 19 aa, Homo sapiens
CARQDFSNSWGSPGYFDFW

SEQ ID NO: 23747 - protein, 19 aa, Homo sapiens
CARNMSAGVRGSVWWFDPW

SEQ ID NO: 23748 - protein, 24 aa, Homo sapiens
CAKDAFKYYYDSGGHYPGSPSDYW

SEQ ID NO: 23749 - protein, 24 aa, Homo sapiens
CARVDCGGDCYYLHYYYYYGMDVW

SEQ ID NO: 23750 - protein, 18 aa, Homo sapiens
CQSADSSGGYSGGYHVFF

SEQ ID NO: 23751 - protein, 20 aa, Homo sapiens
CATDRVGYDTTGHEYYFDYW

SEQ ID NO: 23752 - protein, 14 aa, Homo sapiens
CARAPQLGWYFDLW

SEQ ID NO: 23753 - protein, 17 aa, Homo sapiens
CGRDGDISGWYTGVDYW

SEQ ID NO: 23754 - protein, 16 aa, Homo sapiens
CAKTPYSSSPGSFDYW

SEQ ID NO: 23755 - protein, 20 aa, Homo sapiens
CARDNYCSSSSCSQYYLDSW

SEQ ID NO: 23756 - protein, 18 aa, Homo sapiens
CARDESGYGSLFRFFDLW

SEQ ID NO: 23757 - protein, 17 aa, Homo sapiens
CTTDPAEVYSGYDMDYW

SEQ ID NO: 23758 - protein, 22 aa, Homo sapiens
CARDPGGYCSGGSCYFGWLDSW

SEQ ID NO: 23759 - protein, 21 aa, Homo sapiens
CARGDLMFRYSGYDTFLFHYW

SEQ ID NO: 23760 - protein, 20 aa, Homo sapiens
CAKDMVTAFGVVITSAFDIW

SEQ ID NO: 23761 - protein, 19 aa, Homo sapiens
CAKEFDSTPFRAIYYFDLW

SEQ ID NO: 23762 - protein, 12 aa, Homo sapiens
CNCRDISGNHPF

SEQ ID NO: 23763 - protein, 16 aa, Homo sapiens
CARVSTERVHYYMDVW

SEQ ID NO: 23764 - protein, 15 aa, Homo sapiens
CVKDASRGYNYFDYW

SEQ ID NO: 23765 - protein, 14 aa, Homo sapiens
CAINRGPGHGFDIW

SEQ ID NO: 23766 - protein, 23 aa, Homo sapiens
CAKDEIFFYYDSSASLGDAFDVW

SEQ ID NO: 23767 - protein, 25 aa, Homo sapiens
CATDPVGHFASGDYSKRPARAFDMW

SEQ ID NO: 23768 - protein, 26 aa, Homo sapiens
CAREVLRYFDWLLLVGYYYYYGMDVW

SEQ ID NO: 23769 - protein, 19 aa, Homo sapiens
CAREYCSGAICYFDAFDIW

SEQ ID NO: 23770 - protein, 18 aa, Homo sapiens
CARDADDNSAYYYYFDHW

SEQ ID NO: 23771 - protein, 20 aa, Homo sapiens
CARDAAAGILSGTHGFVDYW

SEQ ID NO: 23772 - protein, 12 aa, Homo sapiens
CAKLAMIVIDYW

SEQ ID NO: 23773 - protein, 17 aa, Homo sapiens
CARMVRGVIINPAFDIW

SEQ ID NO: 23774 - protein, 19 aa, Homo sapiens
CVRGAMTTVYFYYYYMDVW

SEQ ID NO: 23775 - protein, 22 aa, Homo sapiens
CARGDTIFEGLGYYYSYGMDVW

SEQ ID NO: 23776 - protein, 16 aa, Homo sapiens
CARDRDGALPNYFDSW

SEQ ID NO: 23777 - protein, 21 aa, Homo sapiens
CAREILDYYDSSATSGYFDYW

SEQ ID NO: 23778 - protein, 14 aa, Homo sapiens
CAKGGGIQLLWDYW

SEQ ID NO: 23779 - protein, 17 aa, Homo sapiens
CVRGQDGSGYYAALDYW

SEQ ID NO: 23780 - protein, 27 aa, Homo sapiens
CARVFGYCSGGSCYEAKNTKGFYFDYW

SEQ ID NO: 23781 - protein, 17 aa, Homo sapiens
CARDGGTTVTFGGFEYW

SEQ ID NO: 23782 - protein, 14 aa, Homo sapiens
CVTDSTGKALFDYW

SEQ ID NO: 23783 - protein, 15 aa, Homo sapiens
CATAEDYYDSSADYW

SEQ ID NO: 23784 - protein, 14 aa, Homo sapiens
CAKVPGGGSYFDYW

SEQ ID NO: 23785 - protein, 21 aa, Homo sapiens
CARDESSGWSTIYYYYGMDVW

SEQ ID NO: 23786 - protein, 19 aa, Homo sapiens
CARDPNCSGGSCDWALDVW

SEQ ID NO: 23787 - protein, 14 aa, Homo sapiens
CAKITAISGGGDYW

SEQ ID NO: 23788 - protein, 13 aa, Homo sapiens
CARLNWEGALDIW

SEQ ID NO: 23789 - protein, 21 aa, Homo sapiens
CAKGTHYYVSGNSHNVYFDYW

SEQ ID NO: 23790 - protein, 19 aa, Homo sapiens
CAGRVDSGNYYQWYYFDYW

SEQ ID NO: 23791 - protein, 16 aa, Homo sapiens
CAFLLRFLEWSYFDYW

SEQ ID NO: 23792 - protein, 14 aa, Homo sapiens
CAKDAQVVLLGDYW

SEQ ID NO: 23793 - protein, 17 aa, Homo sapiens
CAIMPEGSGYGSIRDYW

SEQ ID NO: 23794 - protein, 14 aa, Homo sapiens
CAADRSGSSDLDYW

SEQ ID NO: 23795 - protein, 15 aa, Homo sapiens
CAKLPYGDYPNFDYW

SEQ ID NO: 23796 - protein, 21 aa, Homo sapiens
CARRFYYDDNHDNNYYYFDYW

SEQ ID NO: 23797 - protein, 17 aa, Homo sapiens
CARVWPDIAVAGTCDYW

SEQ ID NO: 23798 - protein, 17 aa, Homo sapiens
CAREPEALFTNYVFDYW

SEQ ID NO: 23799 - protein, 17 aa, Homo sapiens
CARIPPGPRTPEYLDYW

SEQ ID NO: 23800 - protein, 20 aa, Homo sapiens
CVRDDTLRGYSKGYGWDDYW

SEQ ID NO: 23801 - protein, 21 aa, Homo sapiens
CARGRVAGTKSAYYYYSMDVW

SEQ ID NO: 23802 - protein, 20 aa, Homo sapiens
CAREGDDFWSGYGRGWFDPW

SEQ ID NO: 23803 - protein, 15 aa, Homo sapiens
CASLTYSRSYYFDYW

SEQ ID NO: 23804 - protein, 13 aa, Homo sapiens
CAKSSAGNAFHVW

SEQ ID NO: 23805 - protein, 20 aa, Homo sapiens
CATISQEIAVRPSAVRFDPW

SEQ ID NO: 23806 - protein, 21 aa, Homo sapiens
CARTLSTRPTDRYYYYNMDVW

SEQ ID NO: 23807 - protein, 14 aa, Homo sapiens
CAGSPFVGVPTDYW

SEQ ID NO: 23808 - protein, 27 aa, Homo sapiens
CARLRGTVRQTIFGMAINDYYYYMDAW

SEQ ID NO: 23809 - protein, 18 aa, Homo sapiens
CATGPPIVGATTGWFDPW

SEQ ID NO: 23810 - protein, 18 aa, Homo sapiens
CARDDSAAGKRQYAFDIW

SEQ ID NO: 23811 - protein, 20 aa, Homo sapiens
CARVNYYYGSGSYSYYMDIW

SEQ ID NO: 23812 - protein, 23 aa, Homo sapiens
CARDGDIVVAAQAKVSRSWFDPW

SEQ ID NO: 23813 - protein, 12 aa, Homo sapiens
CAGGVGATLDYW

SEQ ID NO: 23814 - protein, 17 aa, Homo sapiens
CATDLTPGEVAAPFDYW

SEQ ID NO: 23815 - protein, 19 aa, Homo sapiens
CARDFYDSSGYYYRGGDYW

SEQ ID NO: 23816 - protein, 20 aa, Homo sapiens
CASQRIGYCSPSTCQHFDYW

SEQ ID NO: 23817 - protein, 19 aa, Homo sapiens
CAKDVHPDCSVGSCYLDYW

SEQ ID NO: 23818 - protein, 20 aa, Homo sapiens
CVRLPMSDYWNGPRDPFDYW

SEQ ID NO: 23819 - protein, 16 aa, Homo sapiens
CAKGVVPTMKGSPDYW

SEQ ID NO: 23820 - protein, 17 aa, Homo sapiens
CARHPIVVLITDAFDIW

SEQ ID NO: 23821 - protein, 22 aa, Homo sapiens
CARIVYDFWSGYYVREYYFDYW

SEQ ID NO: 23822 - protein, 17 aa, Homo sapiens
CALPISHTVTTTGVDYW

SEQ ID NO: 23823 - protein, 20 aa, Homo sapiens
CARDLRDIVVVPAAHPFDYW

SEQ ID NO: 23824 - protein, 21 aa, Homo sapiens
CARLCPDNSFWSDYYYYMDVW

SEQ ID NO: 23825 - protein, 14 aa, Homo sapiens
CARDGDSNYGIDYW

SEQ ID NO: 23826 - protein, 19 aa, Homo sapiens
CARDLALTQSQVGYYFDYW

SEQ ID NO: 23827 - protein, 18 aa, Homo sapiens
CARDESGSYYRPSEFDYW

SEQ ID NO: 23828 - protein, 17 aa, Homo sapiens
CARDDAPVAGKSKMDYW

SEQ ID NO: 23829 - protein, 20 aa, Homo sapiens
CAKDILAQGGYSYGWYFDLW

SEQ ID NO: 23830 - protein, 14 aa, Homo sapiens
CARLEPIHSSGDYW

SEQ ID NO: 23831 - protein, 17 aa, Homo sapiens
CAREPPWIWSSGGFDPW

SEQ ID NO: 23832 - protein, 21 aa, Homo sapiens
CAKDRGEDIVIVPASITLDYW

SEQ ID NO: 23833 - protein, 20 aa, Homo sapiens
CAKHLGYYDFWSGSYSFDPW

SEQ ID NO: 23834 - protein, 19 aa, Homo sapiens
CARLTSSGYYYPWGRVDYW

SEQ ID NO: 23835 - protein, 14 aa, Homo sapiens
CATEEVPSRYFDFW

SEQ ID NO: 23836 - protein, 25 aa, Homo sapiens
CARGAGYTRGWYDPSPPYYYYMDVW

SEQ ID NO: 23837 - protein, 25 aa, Homo sapiens
CVRDRYCSRTACFTTPPRDFYMDFW

SEQ ID NO: 23838 - protein, 22 aa, Homo sapiens
CAKDIRLYCSSTSCSTFWFDPW

SEQ ID NO: 23839 - protein, 23 aa, Homo sapiens
CARHLTYNDGSGYYYRLYYFDYW

SEQ ID NO: 23840 - protein, 16 aa, Homo sapiens
CAKGAGDYYDSRDDYW

SEQ ID NO: 23841 - protein, 15 aa, Homo sapiens
CAKVQWEVLGWFDPW

SEQ ID NO: 23842 - protein, 21 aa, Homo sapiens
CARDYWSRYCSSLTCSTFDFW

SEQ ID NO: 23843 - protein, 17 aa, Homo sapiens
CARGYYSTYDSYYFDSW

SEQ ID NO: 23844 - protein, 20 aa, Homo sapiens
CARVVPGYYDTIGYYHFDNW

SEQ ID NO: 23845 - protein, 21 aa, Homo sapiens
CTRESESTDQYYYSYYYMDVW

SEQ ID NO: 23846 - protein, 9 aa, Homo sapiens
CQQSYRTHF

SEQ ID NO: 23847 - protein, 16 aa, Homo sapiens
CARRLMTAVGVPLDYW

SEQ ID NO: 23848 - protein, 20 aa, Homo sapiens
CARHHYSDSRVYVVGYFDYW

SEQ ID NO: 23849 - protein, 16 aa, Homo sapiens
CARGEKYTTGWYSAYW

SEQ ID NO: 23850 - protein, 16 aa, Homo sapiens
CAGKALRVTDAYFDFW

SEQ ID NO: 23851 - protein, 18 aa, Homo sapiens
CTYYYDSSGYYRGGFDYW

SEQ ID NO: 23852 - protein, 18 aa, Homo sapiens
CARHTHPRYSSSPGFDYW

SEQ ID NO: 23853 - protein, 15 aa, Homo sapiens
CARGGGPGRGRFDLW

SEQ ID NO: 23854 - protein, 15 aa, Homo sapiens
CARTAATIAVAFDIW

SEQ ID NO: 23855 - protein, 16 aa, Homo sapiens
CAHTSPFSVVILFDYW

SEQ ID NO: 23856 - protein, 20 aa, Homo sapiens
CATNLRFYYDSSDYYYFEYW

SEQ ID NO: 23857 - protein, 22 aa, Homo sapiens
CARGEPHYDILTGYYPYYFDYW

SEQ ID NO: 23858 - protein, 14 aa, Homo sapiens
CARPFLYHDVFDLW

SEQ ID NO: 23859 - protein, 17 aa, Homo sapiens
CARQEQYDSSGYPLDYW

SEQ ID NO: 23860 - protein, 27 aa, Homo sapiens
CVKMYQVLSSDYDFWSDVKLKGVFDIW

SEQ ID NO: 23861 - protein, 14 aa, Homo sapiens
CAKITMVRGERDYW

SEQ ID NO: 23862 - protein, 14 aa, Homo sapiens
CARMRAGTTTLDYW

SEQ ID NO: 23863 - protein, 14 aa, Homo sapiens
CAKVSDYEAPGDYW

SEQ ID NO: 23864 - protein, 17 aa, Homo sapiens
CAKEAYFDYWNGYYDYW

SEQ ID NO: 23865 - protein, 23 aa, Homo sapiens
CDWSSDVCSSDLAARGHEAFDYW

SEQ ID NO: 23866 - protein, 18 aa, Homo sapiens
CVRVGVPGLRPNYYLDPW

SEQ ID NO: 23867 - protein, 20 aa, Homo sapiens
CASWIVVVPAAISLDAFDIW

SEQ ID NO: 23868 - protein, 20 aa, Homo sapiens
CARVEMLTNFILDDSRFDPW

SEQ ID NO: 23869 - protein, 13 aa, Homo sapiens
CARTYNGWNFGYW

SEQ ID NO: 23870 - protein, 32 aa, Homo sapiens
CAREPENYYDSSGYFCLAGQNPCAIPRTFDYW

SEQ ID NO: 23871 - protein, 18 aa, Homo sapiens
CASLIYDVLTGYQEFDYW

SEQ ID NO: 23872 - protein, 18 aa, Homo sapiens
CARATVDSSGYYHFFDYW

SEQ ID NO: 23873 - protein, 15 aa, Homo sapiens
CKSRDSSGDHPHVVF

SEQ ID NO: 23874 - protein, 20 aa, Homo sapiens
CARDGAGLSSGWYPEYFDYW

SEQ ID NO: 23875 - protein, 16 aa, Homo sapiens
CGAATTLHDYYYMDVW

SEQ ID NO: 23876 - protein, 19 aa, Homo sapiens
CARLMRSCSSTSCFTIDYW

SEQ ID NO: 23877 - protein, 16 aa, Homo sapiens
CAKDSVLGATRPVDYW

SEQ ID NO: 23878 - protein, 16 aa, Homo sapiens
CARHLGTVPAAMFDPW

SEQ ID NO: 23879 - protein, 17 aa, Homo sapiens
CASGTYISSSGFDFDIW

SEQ ID NO: 23880 - protein, 22 aa, Homo sapiens
CARDPPGRRSGELSQGHYFDFW

SEQ ID NO: 23881 - protein, 17 aa, Homo sapiens
CAKGQITMIVVVTFDYW

SEQ ID NO: 23882 - protein, 22 aa, Homo sapiens
CAKDFGSSSPLGDYYYYGMDVW

SEQ ID NO: 23883 - protein, 13 aa, Homo sapiens
CARIGGLGDVDYW

SEQ ID NO: 23884 - protein, 17 aa, Homo sapiens
CARDGAVAGTRISGDYW

SEQ ID NO: 23885 - protein, 18 aa, Homo sapiens
CVKDIVVRGALWDAFGLW

SEQ ID NO: 23886 - protein, 13 aa, Homo sapiens
CAIAGTNSVFDSW

SEQ ID NO: 23887 - protein, 17 aa, Homo sapiens
CATYGGITVSGRYLDLW

SEQ ID NO: 23888 - protein, 16 aa, Homo sapiens
CARQWGTWHEPRFDLW

SEQ ID NO: 23889 - protein, 16 aa, Homo sapiens
CARFLKTGTTWDFDYW

SEQ ID NO: 23890 - protein, 13 aa, Homo sapiens
CQHYNNWPPGVTF

SEQ ID NO: 23891 - protein, 19 aa, Homo sapiens
CARAVGWNYGTDAEYFDFW

SEQ ID NO: 23892 - protein, 18 aa, Homo sapiens
CARGYRYDSTGYVYLEYW

SEQ ID NO: 23893 - protein, 14 aa, Homo sapiens
CARQGGRDGSTDYW

SEQ ID NO: 23894 - protein, 15 aa, Homo sapiens
CTSRSDSSGPFFDYW

SEQ ID NO: 23895 - protein, 19 aa, Homo sapiens
CARIIIGSTGTYYYYMDVW

SEQ ID NO: 23896 - protein, 13 aa, Homo sapiens
CACSNTYYHFHYW

SEQ ID NO: 23897 - protein, 26 aa, Homo sapiens
CARISPEVDYYESSVYHFGSDYFDYW

SEQ ID NO: 23898 - protein, 14 aa, Homo sapiens
CAKERTWVAVFDYW

SEQ ID NO: 23899 - protein, 12 aa, Homo sapiens
CQQYQNYPNVAF

SEQ ID NO: 23900 - protein, 17 aa, Homo sapiens
CASGGDCGGDCYYFDYW

SEQ ID NO: 23901 - protein, 19 aa, Homo sapiens
CARQRNYYYDSSGYYLDYW

SEQ ID NO: 23902 - protein, 17 aa, Homo sapiens
CAREIDYYGSGRPFDSW

SEQ ID NO: 23903 - protein, 16 aa, Homo sapiens
CAALLRPNSEDWFDPW

SEQ ID NO: 23904 - protein, 15 aa, Homo sapiens
CAKLVPPKGDWFDPW

SEQ ID NO: 23905 - protein, 17 aa, Homo sapiens
CTKEVYSGYDFWGFDYW

SEQ ID NO: 23906 - protein, 21 aa, Homo sapiens
CARNKPLWGYNPYGGNYFDSW

SEQ ID NO: 23907 - protein, 19 aa, Homo sapiens
CTRLAVLPPSINQDAFDIW

SEQ ID NO: 23908 - protein, 18 aa, Homo sapiens
CARDFSGSLPVAGVFDQW

SEQ ID NO: 23909 - protein, 19 aa, Homo sapiens
CATVREKYSIDYSGTFDIW

SEQ ID NO: 23910 - protein, 12 aa, Homo sapiens
CQQHNFYSTWTF

SEQ ID NO: 23911 - protein, 20 aa, Homo sapiens
CARDSLHSDYSNYYYGMDVW

SEQ ID NO: 23912 - protein, 15 aa, Homo sapiens
CARGGGRGYLYFDYW

SEQ ID NO: 23913 - protein, 21 aa, Homo sapiens
CDWSSDVCSSDLDYRDHFDSW

SEQ ID NO: 23914 - protein, 17 aa, Homo sapiens
CARVSVVPAVSNWFDPW

SEQ ID NO: 23915 - protein, 22 aa, Homo sapiens
CTRDPAGYCSGGSCHYLHFDYW

SEQ ID NO: 23916 - protein, 20 aa, Homo sapiens
CARCKNTAMAWGPHDAFDIW

SEQ ID NO: 23917 - protein, 18 aa, Homo sapiens
CARDQSILTISPLYMDVW

SEQ ID NO: 23918 - protein, 19 aa, Homo sapiens
CARESSYCGDDCSDAFDIW

SEQ ID NO: 23919 - protein, 22 aa, Homo sapiens
CAHSPPSRTMFGVVADTLLDYW

SEQ ID NO: 23920 - protein, 20 aa, Homo sapiens
CARDWAYCSGPDCYPAFAYW

SEQ ID NO: 23921 - protein, 18 aa, Homo sapiens
CARDSQSVIAADGTFDYW

SEQ ID NO: 23922 - protein, 15 aa, Homo sapiens
CAHKYCGGDCYFPYW

SEQ ID NO: 23923 - protein, 15 aa, Homo sapiens
CQQYNAYSLTFGPTF

SEQ ID NO: 23924 - protein, 19 aa, Homo sapiens
CATLEVKGITMVDINFDYW

SEQ ID NO: 23925 - protein, 18 aa, Homo sapiens
CARFGLWQSSLVDAFDIW

SEQ ID NO: 23926 - protein, 17 aa, Homo sapiens
CVRDRKQQLGISWLDPW

SEQ ID NO: 23927 - protein, 15 aa, Homo sapiens
CATDADYDSNAFDIW

SEQ ID NO: 23928 - protein, 19 aa, Homo sapiens
CAKRYCSGGTCHHHAFDVW

SEQ ID NO: 23929 - protein, 19 aa, Homo sapiens
CAKDSYFFDGDGSYLLDYW

SEQ ID NO: 23930 - protein, 14 aa, Homo sapiens
CAKLVDYGDSSDYW

SEQ ID NO: 23931 - protein, 21 aa, Homo sapiens
CARALYWYDFRSDKINYFDYW

SEQ ID NO: 23932 - protein, 26 aa, Homo sapiens
CARDRAFYYFDSSDLDNFGVDALDIW

SEQ ID NO: 23933 - protein, 14 aa, Homo sapiens
CTTRSYGAISFDYW

SEQ ID NO: 23934 - protein, 17 aa, Homo sapiens
CARDYDAFTGSYYFDYW

SEQ ID NO: 23935 - protein, 20 aa, Homo sapiens
CAREDSYCTGRPCWGFVDYW

SEQ ID NO: 23936 - protein, 18 aa, Homo sapiens
CARERYSTTLGHNWFDPW

SEQ ID NO: 23937 - protein, 16 aa, Homo sapiens
CAREHLVPTASHFDSW

SEQ ID NO: 23938 - protein, 19 aa, Homo sapiens
CARISGSCSRYGPRGVDYW

SEQ ID NO: 23939 - protein, 19 aa, Homo sapiens
CATGFRDYDSSGYSRFDPW

SEQ ID NO: 23940 - protein, 13 aa, Homo sapiens
CTRVAPSGYSEYW

SEQ ID NO: 23941 - protein, 20 aa, Homo sapiens
CVRQYSYGLMGHFPGYFRLW

SEQ ID NO: 23942 - protein, 26 aa, Homo sapiens
CATSRHEEYADYDGVISYYHYAVDVW

SEQ ID NO: 23943 - protein, 18 aa, Homo sapiens
CARDVGYSYGYPYYFDYW

SEQ ID NO: 23944 - protein, 15 aa, Homo sapiens
CATMRPIVMINFDYW

SEQ ID NO: 23945 - protein, 13 aa, Homo sapiens
CAKEGNSAHFDYW

SEQ ID NO: 23946 - protein, 17 aa, Homo sapiens
CATFGGNYFRPNAFDVW

SEQ ID NO: 23947 - protein, 19 aa, Homo sapiens
CARGRGVAVGATVGAFRYW

SEQ ID NO: 23948 - protein, 15 aa, Homo sapiens
CATSAGDYLPFFDFW

SEQ ID NO: 23949 - protein, 22 aa, Homo sapiens
CATRRPKTEVAMTYCYYYMDVW

SEQ ID NO: 23950 - protein, 10 aa, Homo sapiens
CMKALETPLF

SEQ ID NO: 23951 - protein, 16 aa, Homo sapiens
CTRRVGSSVAGPFDYW

SEQ ID NO: 23952 - protein, 26 aa, Homo sapiens
CARLFEGGGAGISSRYLSYYYALDVW

SEQ ID NO: 23953 - protein, 18 aa, Homo sapiens
CARIKSPSSGNYYAFDIW

SEQ ID NO: 23954 - protein, 20 aa, Homo sapiens
CAKASSGWSTPYYYYYMDVW

SEQ ID NO: 23955 - protein, 27 aa, Homo sapiens
CAREIVVVAAASPLTPDSYYYYGLDVW

SEQ ID NO: 23956 - protein, 18 aa, Homo sapiens
CTKAKKTGTADFDGLDVW

SEQ ID NO: 23957 - protein, 21 aa, Homo sapiens
CARDLDIVEEPTTLHYYMDVW

SEQ ID NO: 23958 - protein, 17 aa, Homo sapiens
CARPLGLRRVPDVFNIW

SEQ ID NO: 23959 - protein, 21 aa, Homo sapiens
CARDLVAAGPHYYYYYGMDVW

SEQ ID NO: 23960 - protein, 27 aa, Homo sapiens
CARHLPNYYDSSGYYYSLPPAYYFDYW

SEQ ID NO: 23961 - protein, 16 aa, Homo sapiens
CAKGSWAAAAGYFDYW

SEQ ID NO: 23962 - protein, 22 aa, Homo sapiens
CATLAGIAAAGYYYYYYGMDVW

SEQ ID NO: 23963 - protein, 19 aa, Homo sapiens
CASPAQEGSYRFTQNFDFW

SEQ ID NO: 23964 - protein, 20 aa, Homo sapiens
CAHSFTVVVPAAYAEYFQHW

SEQ ID NO: 23965 - protein, 17 aa, Homo sapiens
CARVPPVNWDHWYFDLW

SEQ ID NO: 23966 - protein, 18 aa, Homo sapiens
CAREGYDLMGDRPYFDYW

SEQ ID NO: 23967 - protein, 20 aa, Homo sapiens
CARLSDMVATMTTHDAFDIW

SEQ ID NO: 23968 - protein, 18 aa, Homo sapiens
CARTLMQYGKSVPVFDYW

SEQ ID NO: 23969 - protein, 15 aa, Homo sapiens
CARLKWFGEVYSDSW

SEQ ID NO: 23970 - protein, 13 aa, Homo sapiens
CYGSGSPDAFDIW

SEQ ID NO: 23971 - protein, 17 aa, Homo sapiens
CAHRPHSGFEPFYFDYW

SEQ ID NO: 23972 - protein, 20 aa, Homo sapiens
CARDDGDYDFWSGYFEPDYW

SEQ ID NO: 23973 - protein, 17 aa, Homo sapiens
CARGGWIQLSIYYMDVW

SEQ ID NO: 23974 - protein, 16 aa, Homo sapiens
CARLLYRSGHYPFDYW

SEQ ID NO: 23975 - protein, 17 aa, Homo sapiens
CARDGQQHRNPYYYDYW

SEQ ID NO: 23976 - protein, 16 aa, Homo sapiens
CATRTSPLRFDAFDIW

SEQ ID NO: 23977 - protein, 18 aa, Homo sapiens
CARDDVRGQWLASTCDYW

SEQ ID NO: 23978 - protein, 19 aa, Homo sapiens
CARGELHGGSGSYNGSDYW

SEQ ID NO: 23979 - protein, 21 aa, Homo sapiens
CASFYPAAGYSSSPGDAFDIW

SEQ ID NO: 23980 - protein, 17 aa, Homo sapiens
CTREAVRGITRTHFDYW

SEQ ID NO: 23981 - protein, 14 aa, Homo sapiens
CASTMVRGTIPDYW

SEQ ID NO: 23982 - protein, 16 aa, Homo sapiens
CATHKIPANNRFFDYW

SEQ ID NO: 23983 - protein, 15 aa, Homo sapiens
CAKSSDWRFGSFDMW

SEQ ID NO: 23984 - protein, 16 aa, Homo sapiens
CAKERIFGVDYYFDYW

SEQ ID NO: 23985 - protein, 21 aa, Homo sapiens
CARQQRWITIFGVDINAFDIW

SEQ ID NO: 23986 - protein, 16 aa, Homo sapiens
CARGSPLLGVNWFDPW

SEQ ID NO: 23987 - protein, 24 aa, Homo sapiens
CAKDLTISSGFCSSTSCLGPFDIW

SEQ ID NO: 23988 - protein, 19 aa, Homo sapiens
CAKDISIVLILGSDAFDIW

SEQ ID NO: 23989 - protein, 15 aa, Homo sapiens
CAREGIYSGTQFEYW

SEQ ID NO: 23990 - protein, 16 aa, Homo sapiens
CAIPYGSSHMNWFDPW

SEQ ID NO: 23991 - protein, 13 aa, Homo sapiens
CATSPGSSRFDPW

SEQ ID NO: 23992 - protein, 22 aa, Homo sapiens
CARGDCSGGSCFDGYYYGMDVW

SEQ ID NO: 23993 - protein, 17 aa, Homo sapiens
CARTPKDGNTAAPFDIW

SEQ ID NO: 23994 - protein, 15 aa, Homo sapiens
CARGITIYGVQFDYW

SEQ ID NO: 23995 - protein, 18 aa, Homo sapiens
CTRDPGGYSSGWSHFDYW

SEQ ID NO: 23996 - protein, 25 aa, Homo sapiens
CARGSPTLGRGYSYDPRGGKAFDIW

SEQ ID NO: 23997 - protein, 17 aa, Homo sapiens
CVQSQSIMPDARAFDIW

SEQ ID NO: 23998 - protein, 15 aa, Homo sapiens
CARDAEAVTMDLDYW

SEQ ID NO: 23999 - protein, 22 aa, Homo sapiens
CARVGYYDNSGSYYWDDAFDIW

SEQ ID NO: 24000 - protein, 15 aa, Homo sapiens
CARWPLNNSDAFDIW

SEQ ID NO: 24001 - protein, 22 aa, Homo sapiens
CARAQYCSSTRCYSLGYYMDVW

SEQ ID NO: 24002 - protein, 15 aa, Homo sapiens
CARDSVTTVAVFDFW

SEQ ID NO: 24003 - protein, 23 aa, Homo sapiens
CARDRGTLELRSHIYYYYGMDVW

SEQ ID NO: 24004 - protein, 24 aa, Homo sapiens
CAREGVSFNYSGSGSAINKYFDSW

SEQ ID NO: 24005 - protein, 17 aa, Homo sapiens
CARETFDSSGYYYSGYW

SEQ ID NO: 24006 - protein, 21 aa, Homo sapiens
CTRAATDSSGYFDYADAFDIW

SEQ ID NO: 24007 - protein, 17 aa, Homo sapiens
CAREVIVGPTRRLVDYW

SEQ ID NO: 24008 - protein, 14 aa, Homo sapiens
CAREIDSDCYFDPW

SEQ ID NO: 24009 - protein, 23 aa, Homo sapiens
CARGPFSLHVAIFGVVPVDIDYW

SEQ ID NO: 24010 - protein, 19 aa, Homo sapiens
CARQGDTTSWSPIDWFDPW

SEQ ID NO: 24011 - protein, 15 aa, Homo sapiens
CQSYDRTLSGSRWVF

SEQ ID NO: 24012 - protein, 19 aa, Homo sapiens
CVRHGIYRLVGALTPFDYW

SEQ ID NO: 24013 - protein, 18 aa, Homo sapiens
CVRDNSLDFWSGCWLDYW

SEQ ID NO: 24014 - protein, 17 aa, Homo sapiens
CARSPTSISNPYYFDHW

SEQ ID NO: 24015 - protein, 17 aa, Homo sapiens
CARLGWDLPPLYAFDIW

SEQ ID NO: 24016 - protein, 13 aa, Homo sapiens
CASTEGGDPFDVW

SEQ ID NO: 24017 - protein, 12 aa, Homo sapiens
CMEALQLPPNTF

SEQ ID NO: 24018 - protein, 18 aa, Homo sapiens
CARVRQLFFGIIKYFDYW

SEQ ID NO: 24019 - protein, 16 aa, Homo sapiens
CARYQLTTRRYYFDYW

SEQ ID NO: 24020 - protein, 16 aa, Homo sapiens
CARVAPNSRAFPFDYW

SEQ ID NO: 24021 - protein, 16 aa, Homo sapiens
CARLWGTTGTTNFYYW

SEQ ID NO: 24022 - protein, 18 aa, Homo sapiens
CARAVVPYGSSWYYFDYW

SEQ ID NO: 24023 - protein, 16 aa, Homo sapiens
CSKGAGGGQIYYMDVW

SEQ ID NO: 24024 - protein, 22 aa, Homo sapiens
CAKDIFFLGQGIAAAGTGFDYW

SEQ ID NO: 24025 - protein, 13 aa, Homo sapiens
CATSPDVVRGDYW

SEQ ID NO: 24026 - protein, 20 aa, Homo sapiens
CARGLLLGYCSSTSCPGDYW

SEQ ID NO: 24027 - protein, 19 aa, Homo sapiens
CARESGGEGDYYYYYMDVW

SEQ ID NO: 24028 - protein, 16 aa, Homo sapiens
CVRHRSELATKPIDYW

SEQ ID NO: 24029 - protein, 14 aa, Homo sapiens
CVSSTWSINRFDTW

SEQ ID NO: 24030 - protein, 23 aa, Homo sapiens
CASGGYCSSTSCYDNYYYGMDVW

SEQ ID NO: 24031 - protein, 20 aa, Homo sapiens
CARHIITIFGVAILNWFDPW

SEQ ID NO: 24032 - protein, 16 aa, Homo sapiens
CARDFLTLYSYGPDYW

SEQ ID NO: 24033 - protein, 17 aa, Homo sapiens
CVREFSSGWNRAHFDHW

SEQ ID NO: 24034 - protein, 15 aa, Homo sapiens
CVRREAESREYFQHW

SEQ ID NO: 24035 - protein, 13 aa, Homo sapiens [sequence omitted]

SEQ ID NO: 24036 - protein, 19 aa, Homo sapiens
CARYWYYHDSSGQYYMDVW

SEQ ID NO: 24037 - protein, 39 aa, Homo sapiens
CALPILKLDSVTAADTAVYYCATVPYYYASSAQGGFDSW

SEQ ID NO: 24038 - protein, 18 aa, Homo sapiens
CATDRTRRRSSSGVFDYW

SEQ ID NO: 24039 - protein, 14 aa, Homo sapiens
CATLYLGLRLFDYW

SEQ ID NO: 24040 - protein, 17 aa, Homo sapiens
CARDRLASDDFHYMDVW

SEQ ID NO: 24041 - protein, 16 aa, Homo sapiens
CAKPLGIVGATVLDYW

SEQ ID NO: 24042 - protein, 16 aa, Homo sapiens
CAKVTGGDWLGYFDLW

SEQ ID NO: 24043 - protein, 24 aa, Homo sapiens
CARGELDYDDYDNVDYYYYYMDVW

SEQ ID NO: 24044 - protein, 20 aa, Homo sapiens
CAKDHSMTFFGVVINPLDSW

SEQ ID NO: 24045 - protein, 19 aa, Homo sapiens
CAKDNSNWYGDYYYGMDVW

SEQ ID NO: 24046 - protein, 15 aa, Homo sapiens
CARDFSVGTSTFDIW

SEQ ID NO: 24047 - protein, 19 aa, Homo sapiens
CARGIRHAITIFGVVIDYW

SEQ ID NO: 24048 - protein, 21 aa, Homo sapiens
CARVRYQGWWDVLIGNYFDSW

SEQ ID NO: 24049 - protein, 18 aa, Homo sapiens
CARDPDLAPTETTYFDYW

SEQ ID NO: 24050 - protein, 20 aa, Homo sapiens
CTRNRIIEMAPIINYYFDYW

SEQ ID NO: 24051 - protein, 13 aa, Homo sapiens
CAKTVVSWYFDLW

SEQ ID NO: 24052 - protein, 25 aa, Homo sapiens
CAKGLYYFETSGYYTRTQTDGFDIW

SEQ ID NO: 24053 - protein, 13 aa, Homo sapiens [sequence omitted]

SEQ ID NO: 24054 - protein, 22 aa, Homo sapiens
CATSSGGSPIGVIVRGHYFNLW

SEQ ID NO: 24055 - protein, 15 aa, Homo sapiens
CAKGQLYGSSYVDYW

SEQ ID NO: 24056 - protein, 17 aa, Homo sapiens
CARTSVAGNPRVAFDIW

SEQ ID NO: 24057 - protein, 23 aa, Homo sapiens
CARDRLYYYDSSGFFLNDGFDIW

SEQ ID NO: 24058 - protein, 16 aa, Homo sapiens
CARHRGQVVIGANDYW

SEQ ID NO: 24059 - protein, 19 aa, Homo sapiens
CATDGGTIFGVVIINFDYW

SEQ ID NO: 24060 - protein, 17 aa, Homo sapiens
CARDLNTIFGVVPFDYW

SEQ ID NO: 24061 - protein, 17 aa, Homo sapiens
CAKDITRSGTISTIDYW

SEQ ID NO: 24062 - protein, 19 aa, Homo sapiens
CARGDYYDTSGYHDAFDIW

SEQ ID NO: 24063 - protein, 19 aa, Homo sapiens
CAHRDYDRSGPTGDYFDYW

SEQ ID NO: 24064 - protein, 14 aa, Homo sapiens
CQQRSKWPLVMYTF

SEQ ID NO: 24065 - protein, 20 aa, Homo sapiens
CASLVAGSAHLSSNTPNDYW

SEQ ID NO: 24066 - protein, 20 aa, Homo sapiens
CARRGSSGYSINAYWYFDLW

SEQ ID NO: 24067 - protein, 18 aa, Homo sapiens
CARSITMVRGVNNWFDPW

SEQ ID NO: 24068 - protein, 16 aa, Homo sapiens
CARDPNGFSGNFYDSW

SEQ ID NO: 24069 - protein, 14 aa, Homo sapiens
CATKGYYSSSTDYW

SEQ ID NO: 24070 - protein, 21 aa, Homo sapiens
CAHIIGYCSDPSCPEHYFDYW

SEQ ID NO: 24071 - protein, 15 aa, Homo sapiens
CARDANWNRQYFQRW

SEQ ID NO: 24072 - protein, 18 aa, Homo sapiens
CAKSDHADYGGNSGGDYW

SEQ ID NO: 24073 - protein, 11 aa, Homo sapiens
CVLYMSGIYVF

SEQ ID NO: 24074 - protein, 22 aa, Homo sapiens
CAKSVYSSGSYGYSYYYYMDVW

SEQ ID NO: 24075 - protein, 12 aa, Homo sapiens
CQQSNNYSPYSF

SEQ ID NO: 24076 - protein, 23 aa, Homo sapiens
CASGQIGLIAEATGGYYYGMDVW

SEQ ID NO: 24077 - protein, 12 aa, Homo sapiens
CQQYGSETSHTF

SEQ ID NO: 24078 - protein, 15 aa, Homo sapiens
CATLGPDYVRYFDYW

SEQ ID NO: 24079 - protein, 16 aa, Homo sapiens
CAHMVWSGPYNWFDPW

SEQ ID NO: 24080 - protein, 18 aa, Homo sapiens
CAREGGWSQADPNYFDPW

SEQ ID NO: 24081 - protein, 16 aa, Homo sapiens
CARALLFSGSSSFDHW

SEQ ID NO: 24082 - protein, 17 aa, Homo sapiens
CARLSPTMIATYYFDYW

SEQ ID NO: 24083 - protein, 17 aa, Homo sapiens
CARLSGVDSGWNRFDYW

SEQ ID NO: 24084 - protein, 13 aa, Homo sapiens
CVRAMVRGEFDSW

SEQ ID NO: 24085 - protein, 17 aa, Homo sapiens
CARCRGWLQEYDAFDVW

SEQ ID NO: 24086 - protein, 17 aa, Homo sapiens
CTVGDKSNYNPRRFDPW

SEQ ID NO: 24087 - protein, 19 aa, Homo sapiens
CARQRYFDWLLSPDYFDSW

SEQ ID NO: 24088 - protein, 30 aa, Homo sapiens
CDWSSDVCSSDLTDRSSWYSRQEDYYFDYW

SEQ ID NO: 24089 - protein, 20 aa, Homo sapiens
CARDKFWSGLRRVTRHFDYW

SEQ ID NO: 24090 - protein, 13 aa, Homo sapiens
CARRAKAGGFDIW

SEQ ID NO: 24091 - protein, 15 aa, Homo sapiens
CARDSHMGYRAFDIW

SEQ ID NO: 24092 - protein, 21 aa, Homo sapiens
CAREILQSGYSGYDKWHFDLW

SEQ ID NO: 24093 - protein, 19 aa, Homo sapiens
CARHSHLTSFGYGTWFDYW

SEQ ID NO: 24094 - protein, 18 aa, Homo sapiens
CARGHRTVNLEMDGMDVW

SEQ ID NO: 24095 - protein, 22 aa, Homo sapiens
CARDPGLTLTVTKGAGGWFDPW

SEQ ID NO: 24096 - protein, 22 aa, Homo sapiens
CARGPIVVVPAARAYYYGMDVW

SEQ ID NO: 24097 - protein, 17 aa, Homo sapiens
CARTDYYESRGADFDYW

SEQ ID NO: 24098 - protein, 11 aa, Homo sapiens
CQQYYGTQYIF

SEQ ID NO: 24099 - protein, 20 aa, Homo sapiens
CARMKYDILTGYAWGPLDYW

SEQ ID NO: 24100 - protein, 24 aa, Homo sapiens
CAIGARDYSAAVATHEGGGNFDYW

SEQ ID NO: 24101 - protein, 21 aa, Homo sapiens
CARADPYSPGLVVVPVAPDYW

SEQ ID NO: 24102 - protein, 14 aa, Homo sapiens
CARDGRGNYYQDYW

SEQ ID NO: 24103 - protein, 20 aa, Homo sapiens
CLRTLYGSGWNRESHWFDPW

SEQ ID NO: 24104 - protein, 26 aa, Homo sapiens
CARDVKTGTAMVTQHLVWYYYGMDVW

SEQ ID NO: 24105 - protein, 16 aa, Homo sapiens
CVVRVYISSTYYFGHW

SEQ ID NO: 24106 - protein, 13 aa, Homo sapiens
CTVTNDLSAFDVW

SEQ ID NO: 24107 - protein, 16 aa, Homo sapiens
CARDYYYDSSGLLDYW

SEQ ID NO: 24108 - protein, 23 aa, Homo sapiens
CARNSFCTSATCYSWYYYYMDVW

SEQ ID NO: 24109 - protein, 20 aa, Homo sapiens
CARAPPKYYYDSSGYSFDIW

SEQ ID NO: 24110 - protein, 16 aa, Homo sapiens
CARVPPTSVNYAFDIW

SEQ ID NO: 24111 - protein, 18 aa, Homo sapiens
CARLPPFWDYSPQGFDYW

SEQ ID NO: 24112 - protein, 23 aa, Homo sapiens
CATDPLWFGEFRPRGLTDAFDIW

SEQ ID NO: 24113 - protein, 18 aa, Homo sapiens
CARHLRGDSSGYGWFDLW

SEQ ID NO: 24114 - protein, 16 aa, Homo sapiens
CARRTAMVSGNYFDYW

SEQ ID NO: 24115 - protein, 13 aa, Homo sapiens
CARLEGTGYERYW

SEQ ID NO: 24116 - protein, 23 aa, Homo sapiens
CATAPKAVFWSGQIYYYYGMDVW

SEQ ID NO: 24117 - protein, 24 aa, Homo sapiens
CARLGRQVLRFLGSLEGEDGLDIW

SEQ ID NO: 24118 - protein, 12 aa, Homo sapiens
CVIESRLVIDYW

SEQ ID NO: 24119 - protein, 23 aa, Homo sapiens
CAKGAYDSSGYYSVTPEPRFDYW

SEQ ID NO: 24120 - protein, 22 aa, Homo sapiens
CTRAGQKKIFGVVVGDDAFDIW

SEQ ID NO: 24121 - protein, 19 aa, Homo sapiens
CARLIRFTIFGVPSFFDSW

SEQ ID NO: 24122 - protein, 19 aa, Homo sapiens
CSGGGCYSNFYYYFYVDLW

SEQ ID NO: 24123 - protein, 26 aa, Homo sapiens
CTRLSPEADFYESRVYHFGADYFDHW

SEQ ID NO: 24124 - protein, 17 aa, Homo sapiens
CARRYYDHIWGSYVDYW

SEQ ID NO: 24125 - protein, 22 aa, Homo sapiens
CARVVGTKMTRGPPLRYYLDSW

SEQ ID NO: 24126 - protein, 15 aa, Homo sapiens
CAHGTYNSGWYGGYW

SEQ ID NO: 24127 - protein, 21 aa, Homo sapiens
CARDEDELLWFGELFGAFDIW

SEQ ID NO: 24128 - protein, 16 aa, Homo sapiens
CGHISNVWVGEFFDYW

SEQ ID NO: 24129 - protein, 22 aa, Homo sapiens
CARSLPHYSAGGDDYYSLFDPW

SEQ ID NO: 24130 - protein, 18 aa, Homo sapiens
CARDRNDYSGWEYYFDYW

SEQ ID NO: 24131 - protein, 17 aa, Homo sapiens
CARMEISAYNSYYFEYW

SEQ ID NO: 24132 - protein, 16 aa, Homo sapiens
CARGTSIAARPEIDYW

SEQ ID NO: 24133 - protein, 18 aa, Homo sapiens
CARIKDWAQSGLDAFDIW

SEQ ID NO: 24134 - protein, 15 aa, Homo sapiens
CARDLLYYDFGVDYW

SEQ ID NO: 24135 - protein, 20 aa, Homo sapiens
CARTGIAAAATYYYYYMDVW

SEQ ID NO: 24136 - protein, 23 aa, Homo sapiens
CARGLVGYDSSGYYSVPDTFDIW

SEQ ID NO: 24137 - protein, 18 aa, Homo sapiens
CARRPSIWVGEPPGFDFW

SEQ ID NO: 24138 - protein, 18 aa, Homo sapiens
CARDYSSPYFHYYYIDVW

SEQ ID NO: 24139 - protein, 14 aa, Homo sapiens
CASENSTSGQADYW

SEQ ID NO: 24140 - protein, 19 aa, Homo sapiens
CAKDINFVTVAGTLAFDIW

SEQ ID NO: 24141 - protein, 18 aa, Homo sapiens
CVRVPPVMYYYNYYMDVW

SEQ ID NO: 24142 - protein, 17 aa, Homo sapiens
CARVKDGPYGDYQFDLW

SEQ ID NO: 24143 - protein, 18 aa, Homo sapiens
CARQGYCGSDRCYASDYW

SEQ ID NO: 24144 - protein, 16 aa, Homo sapiens
CAKDIGIAARRAFDCW

SEQ ID NO: 24145 - protein, 13 aa, Homo sapiens
CQHFSNYPPLFTF

SEQ ID NO: 24146 - protein, 14 aa, Homo sapiens
CARYGYGERGFDSW

SEQ ID NO: 24147 - protein, 15 aa, Homo sapiens
CARDWGGQLSYLDYW

SEQ ID NO: 24148 - protein, 22 aa, Homo sapiens
CVREERVLQVLDWSSKKFFDYW

SEQ ID NO: 24149 - protein, 26 aa, Homo sapiens
CAFGFSATTVSTSGAPTRNSAYFQHW

SEQ ID NO: 24150 - protein, 17 aa, Homo sapiens
CARVMTNYGGNGYFDSW

SEQ ID NO: 24151 - protein, 19 aa, Homo sapiens
CARDEEVAAGSTPGAFDYW

SEQ ID NO: 24152 - protein, 18 aa, Homo sapiens
CAKCDGDYVRENWYFDLW

SEQ ID NO: 24153 - protein, 15 aa, Homo sapiens
CASPEITTLGAFDIW

SEQ ID NO: 24154 - protein, 16 aa, Homo sapiens
CARGSHLHMIHHFDYW

SEQ ID NO: 24155 - protein, 17 aa, Homo sapiens
CAKDPLRWLSRGYFDYW

SEQ ID NO: 24156 - protein, 24 aa, Homo sapiens
CARLRGDSIVTIFGVSPLGHFDYW

SEQ ID NO: 24157 - protein, 16 aa, Homo sapiens
CARCSISFPWSTFDLW

SEQ ID NO: 24158 - protein, 21 aa, Homo sapiens
CSRVAVVDPGVITGRSKFDYW

SEQ ID NO: 24159 - protein, 20 aa, Homo sapiens
CARGRMSADGSYFYYYMDVW

SEQ ID NO: 24160 - protein, 15 aa, Homo sapiens
CAAEQWLVRRTFEYW

SEQ ID NO: 24161 - protein, 22 aa, Homo sapiens
CARMSHSHPSFHDSVIDAFDIW

SEQ ID NO: 24162 - protein, 22 aa, Homo sapiens
CARDPTLTTVTTVYYYYGMDVW

SEQ ID NO: 24163 - protein, 24 aa, Homo sapiens
CARDRRKVYYYDSSSYLAGSFDIW

SEQ ID NO: 24164 - protein, 14 aa, Homo sapiens
CARVDHWGMYSDHW

SEQ ID NO: 24165 - protein, 17 aa, Homo sapiens
CARGGEMATILIWFDPW

SEQ ID NO: 24166 - protein, 16 aa, Homo sapiens
CTRGLYHDYHHIFDYW

SEQ ID NO: 24167 - protein, 20 aa, Homo sapiens
CARDLGITIFGVVIGLFNYW

SEQ ID NO: 24168 - protein, 16 aa, Homo sapiens
CASEGGGRAVADFDYW

SEQ ID NO: 24169 - protein, 14 aa, Homo sapiens
CQQRSNWPDPVYSF

SEQ ID NO: 24170 - protein, 24 aa, Homo sapiens
CARAVVVTTTTPVRSYYYYGMDVW

SEQ ID NO: 24171 - protein, 17 aa, Homo sapiens
CAKDRGGSYYGNGFDVW

SEQ ID NO: 24172 - protein, 13 aa, Homo sapiens
CATGVAVAAKDYW

SEQ ID NO: 24173 - protein, 22 aa, Homo sapiens
CAREITEGFYDSGSYSWGFDFW

SEQ ID NO: 24174 - protein, 17 aa, Homo sapiens
CARDDGMVYATYYFDCW

SEQ ID NO: 24175 - protein, 14 aa, Homo sapiens
CQVWDASADHPVIF

SEQ ID NO: 24176 - protein, 16 aa, Homo sapiens
CARTLGDQLLNWFDPW

SEQ ID NO: 24177 - protein, 17 aa, Homo sapiens
CARARTVTTAPAHFDYW

SEQ ID NO: 24178 - protein, 14 aa, Homo sapiens
CAKEGGYQDAFDIW

SEQ ID NO: 24179 - protein, 21 aa, Homo sapiens
CARYADTAMALTYYYYYMDVW

SEQ ID NO: 24180 - protein, 33 aa, Homo sapiens
CDWSSDVCSSDLSDTAMYYCARRGMTTEYFDYW

SEQ ID NO: 24181 - protein, 15 aa, Homo sapiens
CARVHRTTISHFDYW

SEQ ID NO: 24182 - protein, 13 aa, Homo sapiens
CVKGWLRIGFDVW

SEQ ID NO: 24183 - protein, 20 aa, Homo sapiens
CAKAQRKALKGIVGATYDYW

SEQ ID NO: 24184 - protein, 21 aa, Homo sapiens
CARRVSILEWLSEDYDAFDIW

SEQ ID NO: 24185 - protein, 15 aa, Homo sapiens
CVRDKGGYGGLFEYW

SEQ ID NO: 24186 - protein, 16 aa, Homo sapiens
CAKRNGLDQWAAFDIW

SEQ ID NO: 24187 - protein, 18 aa, Homo sapiens
CAHRLDGGWYYYFYMDVW

SEQ ID NO: 24188 - protein, 16 aa, Homo sapiens
CVRDLSPTAYNTFDPW

SEQ ID NO: 24189 - protein, 16 aa, Homo sapiens
CASRELPHYNDAFDIW

SEQ ID NO: 24190 - protein, 19 aa, Homo sapiens
CARLGRPGYTSRWYYFDYW

SEQ ID NO: 24191 - protein, 18 aa, Homo sapiens
CATGVELSGTTRIAFDVW

SEQ ID NO: 24192 - protein, 15 aa, Homo sapiens
CAKDSTPSIAVADYW

SEQ ID NO: 24193 - protein, 18 aa, Homo sapiens
CAKDYKGQQWLAHAFDIW

SEQ ID NO: 24194 - protein, 25 aa, Homo sapiens
CAREKAYCGGDCSLGYYYYYGMDVW

SEQ ID NO: 24195 - protein, 16 aa, Homo sapiens
CTREEWELMFNAFDMW

SEQ ID NO: 24196 - protein, 18 aa, Homo sapiens
CAKGAYFGDGRSDYFDYW

SEQ ID NO: 24197 - protein, 17 aa, Homo sapiens
CARDPGSVNIARWFDPW

SEQ ID NO: 24198 - protein, 17 aa, Homo sapiens
CASLEVTMFGSSGSDYW

SEQ ID NO: 24199 - protein, 20 aa, Homo sapiens
CAVAVAGTFGVYYYYGMDVW

SEQ ID NO: 24200 - protein, 22 aa, Homo sapiens
CASSQSAFWNSGPHPLLYSDHW

SEQ ID NO: 24201 - protein, 17 aa, Homo sapiens
CQQYYSYSNQHYSYSSF

SEQ ID NO: 24202 - protein, 19 aa, Homo sapiens
CARDPFDSSAYYANYFDPW

SEQ ID NO: 24203 - protein, 24 aa, Homo sapiens
CARLRRGEPAAISVYYYYYYMDVW

SEQ ID NO: 24204 - protein, 12 aa, Homo sapiens
CAVMALFAFDYW

SEQ ID NO: 24205 - protein, 13 aa, Homo sapiens
CAKVEHGLQLDYW

SEQ ID NO: 24206 - protein, 19 aa, Homo sapiens
CARTGTKANFYYYYYMDVW

SEQ ID NO: 24207 - protein, 15 aa, Homo sapiens
CAHRIVTANDAFDIW

SEQ ID NO: 24208 - protein, 16 aa, Homo sapiens
CATASPILLRNWFDPW

SEQ ID NO: 24209 - protein, 18 aa, Homo sapiens
CATARCSGGNCYARFDYW

SEQ ID NO: 24210 - protein, 15 aa, Homo sapiens
CARDRNMAGWGFDYW

SEQ ID NO: 24211 - protein, 15 aa, Homo sapiens
CARFWGSSGRSFDYW

SEQ ID NO: 24212 - protein, 16 aa, Homo sapiens
CARVYSGSYLGWFDPW

SEQ ID NO: 24213 - protein, 11 aa, Homo sapiens
CLQYFTTPYTF

SEQ ID NO: 24214 - protein, 24 aa, Homo sapiens
CAALYCSVTTCPLGAYYFYGMDVW

SEQ ID NO: 24215 - protein, 21 aa, Homo sapiens
CARAPYNLDSQGLARRYFDYW

SEQ ID NO: 24216 - protein, 23 aa, Homo sapiens
CAKDRQILTMIVVAHRSRGFDNW

SEQ ID NO: 24217 - protein, 14 aa, Homo sapiens
CARAPGGSYPIDYW

SEQ ID NO: 24218 - protein, 21 aa, Homo sapiens
CARHGNTEIIWNSILNWFDPW

SEQ ID NO: 24219 - protein, 19 aa, Homo sapiens
CAKGFSGFIPGRDYYFDYW

SEQ ID NO: 24220 - protein, 21 aa, Homo sapiens
CAKEGNRHLASAGIGLYFDDW

SEQ ID NO: 24221 - protein, 19 aa, Homo sapiens
CVVPGDDYAAPNPDAFDIW

SEQ ID NO: 24222 - protein, 17 aa, Homo sapiens
CAKAVHSSSSGWYFDLW

SEQ ID NO: 24223 - protein, 17 aa, Homo sapiens
CTTDLEVVAVTGWFDPW

SEQ ID NO: 24224 - protein, 22 aa, Homo sapiens
CARKYYYDGSSFYYIGPDFDYW

SEQ ID NO: 24225 - protein, 17 aa, Homo sapiens
CARLYQPLVTLRYFDYW

SEQ ID NO: 24226 - protein, 15 aa, Homo sapiens
CARALWGSYRPPDYW

SEQ ID NO: 24227 - protein, 31 aa, Homo sapiens
CARETGYRDFNDRTGYYPRAATYYYFAIDVW

SEQ ID NO: 24228 - protein, 22 aa, Homo sapiens
CARGRKNTYDFWSVYYNWFDPW

SEQ ID NO: 24229 - protein, 13 aa, Homo sapiens
CAAHSGYESFEYW

SEQ ID NO: 24230 - protein, 19 aa, Homo sapiens
CARRSHDFWTGYANYFDFW

SEQ ID NO: 24231 - protein, 18 aa, Homo sapiens
CAKESRGGGTTKGYMDVW

SEQ ID NO: 24232 - protein, 18 aa, Homo sapiens
CARGVGSDLATHDAFDIW

SEQ ID NO: 24233 - protein, 16 aa, Homo sapiens
CARIEVGSASRGFDYW

SEQ ID NO: 24234 - protein, 18 aa, Homo sapiens
CTTAPEYSSSWINYFDYW

SEQ ID NO: 24235 - protein, 15 aa, Homo sapiens
CAKEQGQWLVHFDFW

SEQ ID NO: 24236 - protein, 17 aa, Homo sapiens
CAKDISPIQYSATFDYW

SEQ ID NO: 24237 - protein, 15 aa, Homo sapiens
CAKEDPIFGRGFDYW

SEQ ID NO: 24238 - protein, 12 aa, Homo sapiens [sequence omitted]

SEQ ID NO: 24239 - protein, 17 aa, Homo sapiens
CARHARIAAGGNYFDSW

SEQ ID NO: 24240 - protein, 17 aa, Homo sapiens
CARHVLCIAARCPFDYW

SEQ ID NO: 24241 - protein, 17 aa, Homo sapiens
CARLLGFWSGYSYFDYW

SEQ ID NO: 24242 - protein, 16 aa, Homo sapiens
CASTWNDHYSQTIDYW

SEQ ID NO: 24243 - protein, 21 aa, Homo sapiens
CARDYYDTSGSHYSHWYFDLW

SEQ ID NO: 24244 - protein, 15 aa, Homo sapiens
CARIPVQQQLAHDYW

SEQ ID NO: 24245 - protein, 22 aa, Homo sapiens
CASSGPSLRQGYRALRKPFDCW

SEQ ID NO: 24246 - protein, 17 aa, Homo sapiens
CASNHDYINLDNWFDPW

SEQ ID NO: 24247 - protein, 14 aa, Homo sapiens
CARFRLPSHIFDYW

SEQ ID NO: 24248 - protein, 16 aa, Homo sapiens
CARTDREMATITFDYW

SEQ ID NO: 24249 - protein, 16 aa, Homo sapiens
CAGSGNDSSGYGFVYW

SEQ ID NO: 24250 - protein, 13 aa, Homo sapiens
CATSDTTGYPMYW

SEQ ID NO: 24251 - protein, 23 aa, Homo sapiens
CATLTPPLAVAQRLLDWLPGDYW

SEQ ID NO: 24252 - protein, 21 aa, Homo sapiens
CARSGWRTTVKLVPFANFDYW

SEQ ID NO: 24253 - protein, 14 aa, Homo sapiens
CSRDLLGFDAFDVW

SEQ ID NO: 24254 - protein, 18 aa, Homo sapiens
CARRIKMFREVLGSFDSW

SEQ ID NO: 24255 - protein, 18 aa, Homo sapiens
CARTVRAVAGREYYFDHW

SEQ ID NO: 24256 - protein, 10 aa, Homo sapiens
CMQDAQDVAF

SEQ ID NO: 24257 - protein, 18 aa, Homo sapiens
CARLIGALNNFYFYMDVW

SEQ ID NO: 24258 - protein, 15 aa, Homo sapiens
CTHSRGCYICPFDIW

SEQ ID NO: 24259 - protein, 27 aa, Homo sapiens
CSLRSEDTAVYYCARVSRNWNLPFDYW

SEQ ID NO: 24260 - protein, 17 aa, Homo sapiens
CARHSMAATVNDAFEIW

SEQ ID NO: 24261 - protein, 22 aa, Homo sapiens
CARVGWVRGYSYGYSYGAFDIW

SEQ ID NO: 24262 - protein, 18 aa, Homo sapiens
CVREEGGSDSYYNWFDPW

SEQ ID NO: 24263 - protein, 13 aa, Homo sapiens
CHARGYIYGRDYW

SEQ ID NO: 24264 - protein, 23 aa, Homo sapiens
CARVSSRNHYCSSSNCYRYMDVW

SEQ ID NO: 24265 - protein, 18 aa, Homo sapiens
CARSRTSYYDSSGYFLHW

SEQ ID NO: 24266 - protein, 27 aa, Homo sapiens
CAKDIVIVAVASPLTAESYYCYGMDVW

SEQ ID NO: 24267 - protein, 16 aa, Homo sapiens
CARVMVRGLMIAFDYW

SEQ ID NO: 24268 - protein, 21 aa, Homo sapiens
CAHSGPETTNWGGWGDDFDYW

SEQ ID NO: 24269 - protein, 17 aa, Homo sapiens
CARHVRAVLYYYGMDVW

SEQ ID NO: 24270 - protein, 16 aa, Homo sapiens
CATELVWYPVHSFDYW

SEQ ID NO: 24271 - protein, 15 aa, Homo sapiens
CVRDWSAGGGYFQHW

SEQ ID NO: 24272 - protein, 13 aa, Homo sapiens
CQQYGRLPPGVSF

SEQ ID NO: 24273 - protein, 17 aa, Homo sapiens
CARVFRYSSSSANFDYW

SEQ ID NO: 24274 - protein, 25 aa, Homo sapiens
CQQYDSFPWTFGQGTKLEIKGARTF

SEQ ID NO: 24275 - protein, 20 aa, Homo sapiens
CARGRGIVWFGELLTWFDPW

SEQ ID NO: 24276 - protein, 21 aa, Homo sapiens
CVRRFFDSSGHSNALDAFDIW

SEQ ID NO: 24277 - protein, 20 aa, Homo sapiens
CAHRRIMIRFGGMSKWFDPW

SEQ ID NO: 24278 - protein, 18 aa, Homo sapiens
CARGGYDILTGLKTFDYW

SEQ ID NO: 24279 - protein, 18 aa, Homo sapiens
CARGGEDYYGGTNCFDFW

SEQ ID NO: 24280 - protein, 24 aa, Homo sapiens
CARSSPRPKASLNVMVPSALFDYW

SEQ ID NO: 24281 - protein, 15 aa, Homo sapiens
CARQMRQLVGYFDYW

SEQ ID NO: 24282 - protein, 14 aa, Homo sapiens
CASRSGGNALIDYW

SEQ ID NO: 24283 - protein, 20 aa, Homo sapiens
CARVMSSSWYGAGYNWFDPW

SEQ ID NO: 24284 - protein, 23 aa, Homo sapiens
CARDPFSPVVVMPASMQEGDDYW

SEQ ID NO: 24285 - protein, 19 aa, Homo sapiens
CARTIITLWFEGTDAFDIW

SEQ ID NO: 24286 - protein, 12 aa, Homo sapiens
CASGHTAINDYW

SEQ ID NO: 24287 - protein, 14 aa, Homo sapiens
CQSAFSSGPYHVSF

SEQ ID NO: 24288 - protein, 19 aa, Homo sapiens
CARLWQWDGYGYHFYFDIW

SEQ ID NO: 24289 - protein, 19 aa, Homo sapiens
CARGGPTRVLGDTNWFDPW

SEQ ID NO: 24290 - protein, 11 aa, Homo sapiens
CATDMRGFDSW

SEQ ID NO: 24291 - protein, 23 aa, Homo sapiens
CARAGYCSADCCYPRDAPPFDHW

SEQ ID NO: 24292 - protein, 19 aa, Homo sapiens
CARDNWHHTDNYNYYFDYW

SEQ ID NO: 24293 - protein, 13 aa, Homo sapiens
CQQDYNLPPTWTF

SEQ ID NO: 24294 - protein, 16 aa, Homo sapiens
CAKLLDSSGYGNRDYW

SEQ ID NO: 24295 - protein, 15 aa, Homo sapiens
CATSIAARQTPVDYW

SEQ ID NO: 24296 - protein, 23 aa, Homo sapiens
CARDYIPGGDYWSASPTGWFDPW

SEQ ID NO: 24297 - protein, 17 aa, Homo sapiens
CAKDTYCSSTSCPFDYW

SEQ ID NO: 24298 - protein, 19 aa, Homo sapiens
CARARGQPLLYRAYYFDYW

SEQ ID NO: 24299 - protein, 14 aa, Homo sapiens
CTAGPDWAFYFDSW

SEQ ID NO: 24300 - protein, 18 aa, Homo sapiens
CALPISRRGFYFYYMDVW

SEQ ID NO: 24301 - protein, 19 aa, Homo sapiens
CAREVGYSYGYYYYYMDVW

SEQ ID NO: 24302 - protein, 17 aa, Homo sapiens
CATETSSYYLDDAFDIW

SEQ ID NO: 24303 - protein, 18 aa, Homo sapiens
CASNRGEGSGSDFQFDYW

SEQ ID NO: 24304 - protein, 19 aa, Homo sapiens
CAAKPAYCGGDCYFYFDYW

SEQ ID NO: 24305 - protein, 15 aa, Homo sapiens
CASSGWTTPVYFDYW

SEQ ID NO: 24306 - protein, 17 aa, Homo sapiens
CARNTFQYGDPGYFDHW

SEQ ID NO: 24307 - protein, 16 aa, Homo sapiens
CARQYGGGSRAWFDPW

SEQ ID NO: 24308 - protein, 13 aa, Homo sapiens
CQQLITYPVRPTF

SEQ ID NO: 24309 - protein, 20 aa, Homo sapiens
CARTLQLWSNKHDEETFDYW

SEQ ID NO: 24310 - protein, 17 aa, Homo sapiens
CARDRSIWSGLWSIDYW

SEQ ID NO: 24311 - protein, 17 aa, Homo sapiens
CARDPFDSSGYTPPDYW

SEQ ID NO: 24312 - protein, 15 aa, Homo sapiens
CASDNGDYIGYFQHW

SEQ ID NO: 24313 - protein, 15 aa, Homo sapiens
CVRHEEVGATTFDDW

SEQ ID NO: 24314 - protein, 16 aa, Homo sapiens
CVRSERAVYYFYMDVW

SEQ ID NO: 24315 - protein, 19 aa, Homo sapiens
CAKDKDVDTAIGFNYFDYW

SEQ ID NO: 24316 - protein, 22 aa, Homo sapiens
CARLVLGYGSGSYRPEYYFDYW

SEQ ID NO: 24317 - protein, 20 aa, Homo sapiens
CARVICSSSTRCYMPYFDCW

SEQ ID NO: 24318 - protein, 17 aa, Homo sapiens
CAKDNSPILFGGNFDYW

SEQ ID NO: 24319 - protein, 22 aa, Homo sapiens
CARGSHLHMIYDIKTSQYFDYW

SEQ ID NO: 24320 - protein, 15 aa, Homo sapiens
CAKIAAADLDAFDIW

SEQ ID NO: 24321 - protein, 15 aa, Homo sapiens
CVRSGAVRVAHFDSW

SEQ ID NO: 24322 - protein, 15 aa, Homo sapiens
CARQRQMGVSYFDSW

SEQ ID NO: 24323 - protein, 14 aa, Homo sapiens
CARGPTDYFYFDSW

SEQ ID NO: 24324 - protein, 15 aa, Homo sapiens [sequence omitted]

SEQ ID NO: 24325 - protein, 20 aa, Homo sapiens
CAREIPYYDNTGAPQGQDYW

SEQ ID NO: 24326 - protein, 22 aa, Homo sapiens
CARHDRTAKNTQTTRSFLFDYW

SEQ ID NO: 24327 - protein, 13 aa, Homo sapiens
CCSRDSSGDRLLF

SEQ ID NO: 24328 - protein, 21 aa, Homo sapiens
CAKDPATMVRGVIIPSWFDPW

SEQ ID NO: 24329 - protein, 17 aa, Homo sapiens
CAREVDIPVNSDAFDIW

SEQ ID NO: 24330 - protein, 10 aa, Homo sapiens
CEQYDVLPAF

SEQ ID NO: 24331 - protein, 15 aa, Homo sapiens
CARDSVGGFDILDYW

SEQ ID NO: 24332 - protein, 13 aa, Homo sapiens
CARIAPQLAFDYW

SEQ ID NO: 24333 - protein, 16 aa, Homo sapiens
CAKDHYDILTGQPDYW

SEQ ID NO: 24334 - protein, 17 aa, Homo sapiens
CARPNEFWSAYDGFDVW

SEQ ID NO: 24335 - protein, 22 aa, Homo sapiens
CTRHLDDVLGHEYTYGRRVDYW

SEQ ID NO: 24336 - protein, 24 aa, Homo sapiens
CARVPPLLSYCGGDCYYYYYMDVW

SEQ ID NO: 24337 - protein, 17 aa, Homo sapiens
CVKDVSGAYDASHFDYW

SEQ ID NO: 24338 - protein, 15 aa, Homo sapiens
CAKAQYRGSYFFDYW

SEQ ID NO: 24339 - protein, 16 aa, Homo sapiens
CARLTRDGSGSRFDYW

SEQ ID NO: 24340 - protein, 28 aa, Homo sapiens
CARDPLRAIVATMSISGIYDQGIPFDYW

SEQ ID NO: 24341 - protein, 24 aa, Homo sapiens
CATLQDITIFGVVTDPLSVRFDLW

SEQ ID NO: 24342 - protein, 20 aa, Homo sapiens
CARTYYYHTSGFPYDAFDIW

SEQ ID NO: 24343 - protein, 17 aa, Homo sapiens
CAKDRTTVVTRGYFDYW

SEQ ID NO: 24344 - protein, 18 aa, Homo sapiens
CARRPFYVEYLSSSLDYW

SEQ ID NO: 24345 - protein, 14 aa, Homo sapiens
CASEIPGEYYFDYW

SEQ ID NO: 24346 - protein, 16 aa, Homo sapiens
CAREEEGGANCAFDIW

SEQ ID NO: 24347 - protein, 19 aa, Homo sapiens
CAKGAFYYDSTGYRHFDQW

SEQ ID NO: 24348 - protein, 18 aa, Homo sapiens
CARCGDIASTGHYFFDSW

SEQ ID NO: 24349 - protein, 22 aa, Homo sapiens
CARGGYCDSSTCYAPYYYMDVW

SEQ ID NO: 24350 - protein, 18 aa, Homo sapiens
CARGLYASSLEPHWFDPW

SEQ ID NO: 24351 - protein, 18 aa, Homo sapiens
CASDYDMVTGYYQAFHIW

SEQ ID NO: 24352 - protein, 22 aa, Homo sapiens
CARHVPEYDSSGYYREYYFDYW

SEQ ID NO: 24353 - protein, 22 aa, Homo sapiens
CAKDGEVGTIFGVVSPCYMDVW

SEQ ID NO: 24354 - protein, 24 aa, Homo sapiens
CARHGTYYYDSSGYYEDYNWFDPW

SEQ ID NO: 24355 - protein, 20 aa, Homo sapiens
CARGRFATVKGYYYYGMDVW

SEQ ID NO: 24356 - protein, 18 aa, Homo sapiens
CAKSQRYQLLSSSPFDIW

SEQ ID NO: 24357 - protein, 23 aa, Homo sapiens
CARDLRVHDILTGVSLYWYLDLW

SEQ ID NO: 24358 - protein, 18 aa, Homo sapiens
CAMTLLDYYDTAGSFDHW

SEQ ID NO: 24359 - protein, 19 aa, Homo sapiens
CASLRRCGGIDCSDVYDYW

SEQ ID NO: 24360 - protein, 16 aa, Homo sapiens
CASLYDSGGYNDFDYW

SEQ ID NO: 24361 - protein, 21 aa, Homo sapiens
CAKGPEPSSGYYYQNKAFDIW

SEQ ID NO: 24362 - protein, 14 aa, Homo sapiens
CAREYQLHLVWDYW

SEQ ID NO: 24363 - protein, 20 aa, Homo sapiens
CAHSRPHKVVVITLDAFDMW

SEQ ID NO: 24364 - protein, 23 aa, Homo sapiens
CAKDPRHCSNGLCSTGGYYFDYW

SEQ ID NO: 24365 - protein, 16 aa, Homo sapiens
CAREDCSGGSCYFDYW

SEQ ID NO: 24366 - protein, 14 aa, Homo sapiens
CAKAPSRYAPSDYW

SEQ ID NO: 24367 - protein, 18 aa, Homo sapiens
CAKDLTVFGVVGHALDVW

SEQ ID NO: 24368 - protein, 15 aa, Homo sapiens
CASTATQYQLPADYW

SEQ ID NO: 24369 - protein, 17 aa, Homo sapiens
CVRLGTDIGIRAGFDVW

SEQ ID NO: 24370 - protein, 17 aa, Homo sapiens
CAKTTGTAYRELYIDSW

SEQ ID NO: 24371 - protein, 21 aa, Homo sapiens
CARLLQSDFWSGYFYTWFDPW

SEQ ID NO: 24372 - protein, 14 aa, Homo sapiens
CATTERLTVQFDQW

SEQ ID NO: 24373 - protein, 17 aa, Homo sapiens
CVHTPFYGGGPTYFDYW

SEQ ID NO: 24374 - protein, 15 aa, Homo sapiens
CAKDRGSGGRYPDYW

SEQ ID NO: 24375 - protein, 19 aa, Homo sapiens
CARGIVAIPIPPANPFDIW

SEQ ID NO: 24376 - protein, 21 aa, Homo sapiens
CARHWADIVVVVTANDYLDYW

SEQ ID NO: 24377 - protein, 15 aa, Homo sapiens
CAIRSGSSLLRFDYW

SEQ ID NO: 24378 - protein, 14 aa, Homo sapiens
CARHKEGWYYFDDW

SEQ ID NO: 24379 - protein, 19 aa, Homo sapiens
CARDTPAGGGYQSYYMDVW

SEQ ID NO: 24380 - protein, 17 aa, Homo sapiens
CARNPDFWRGYDAFDIW

SEQ ID NO: 24381 - protein, 20 aa, Homo sapiens
CARDWFISKIMLPGPWFDPW

SEQ ID NO: 24382 - protein, 17 aa, Homo sapiens
CARDQDFGDYVSNFDYW

SEQ ID NO: 24383 - protein, 26 aa, Homo sapiens
CATDWVDTTTAAGFRLQYRPEYFQQW

SEQ ID NO: 24384 - protein, 14 aa, Homo sapiens
CAKDLSHGATGDYW

SEQ ID NO: 24385 - protein, 14 aa, Homo sapiens
CATEKGPYYPRDYW

SEQ ID NO: 24386 - protein, 15 aa, Homo sapiens
CAKDLYSGYDWVDYW

SEQ ID NO: 24387 - protein, 15 aa, Homo sapiens
CTHVTGYQSPDFDFW

SEQ ID NO: 24388 - protein, 35 aa, Homo sapiens
CDWSSDVCSSDLRDLSRVDYGALSGYYQGGILDYW

SEQ ID NO: 24389 - protein, 13 aa, Homo sapiens
CAKAGEERHPDYW

SEQ ID NO: 24390 - protein, 19 aa, Homo sapiens
CAREAPRRLGYLNWYIDLW

SEQ ID NO: 24391 - protein, 35 aa, Homo sapiens
CSLKLNSVTAADTAVYYCARQRYSYGYVLRSFDPW

SEQ ID NO: 24392 - protein, 22 aa, Homo sapiens
CVRPILGYCSDTSCVDWYFDLW

SEQ ID NO: 24393 - protein, 18 aa, Homo sapiens
CAKDIRVAATLLGAFDIW

SEQ ID NO: 24394 - protein, 17 aa, Homo sapiens
CATGYCSITSCPGFDYW

SEQ ID NO: 24395 - protein, 15 aa, Homo sapiens
CVKDEGSINWYFVTW

SEQ ID NO: 24396 - protein, 18 aa, Homo sapiens
CAREGTIFGVVIYAFDIW

SEQ ID NO: 24397 - protein, 14 aa, Homo sapiens
CALGKTLRFSFDYW

SEQ ID NO: 24398 - protein, 21 aa, Homo sapiens
CASDTIFGVEAPPLYYYMDVW

SEQ ID NO: 24399 - protein, 20 aa, Homo sapiens
CARDRVNYYVSSGYADFDYW

SEQ ID NO: 24400 - protein, 22 aa, Homo sapiens
CARFKGDPVGGTEGYYYYLDVW

SEQ ID NO: 24401 - protein, 23 aa, Homo sapiens
CARDRMVAATGETYYYYYGMDVW

SEQ ID NO: 24402 - protein, 15 aa, Homo sapiens
CAKDIGAWPYYLDNW

SEQ ID NO: 24403 - protein, 18 aa, Homo sapiens
CARDKSDFWSGTDAFDIW

SEQ ID NO: 24404 - protein, 18 aa, Homo sapiens
CARNKNDYGDYGWYFDLW

SEQ ID NO: 24405 - protein, 26 aa, Homo sapiens
CVTVVLRYFAWLSDLFYYYYNGMDVW

SEQ ID NO: 24406 - protein, 21 aa, Homo sapiens
CAKDRVAFDYYDSSGYLFDYW

SEQ ID NO: 24407 - protein, 18 aa, Homo sapiens
CARDVEHSDGFSFAFDYW

SEQ ID NO: 24408 - protein, 20 aa, Homo sapiens
CAKDRYDSSGYILLDAFDIW

SEQ ID NO: 24409 - protein, 19 aa, Homo sapiens
CAKDRSWVAVAAISAFDIW

SEQ ID NO: 24410 - protein, 17 aa, Homo sapiens
CARESTHCGGDCYLDYW

SEQ ID NO: 24411 - protein, 16 aa, Homo sapiens
CARVQYSGYDCHFDYW

SEQ ID NO: 24412 - protein, 18 aa, Homo sapiens
CARASGSITSGWANFDYW

SEQ ID NO: 24413 - protein, 16 aa, Homo sapiens
CVHFRVLPTTVWFDPW

SEQ ID NO: 24414 - protein, 16 aa, Homo sapiens
CAKGHGESVITPLDYW

SEQ ID NO: 24415 - protein, 17 aa, Homo sapiens
CATDHIFVYGEGLLDYW

SEQ ID NO: 24416 - protein, 19 aa, Homo sapiens
CARRYDPSGTSSTNWFDPW

SEQ ID NO: 24417 - protein, 15 aa, Homo sapiens
CANDGVTTGVGFDYW

SEQ ID NO: 24418 - protein, 25 aa, Homo sapiens
CTRHVHFDFWTTDSAGRNHYYMDVW

SEQ ID NO: 24419 - protein, 22 aa, Homo sapiens
CAKDREYCSSFGCYSTFYFDSW

SEQ ID NO: 24420 - protein, 16 aa, Homo sapiens
CARRPWIAAPYYFDYW

SEQ ID NO: 24421 - protein, 15 aa, Homo sapiens
CARVGGSSWYTYDYW

SEQ ID NO: 24422 - protein, 16 aa, Homo sapiens
CAKGQEPYYYYTMDVW

SEQ ID NO: 24423 - protein, 17 aa, Homo sapiens
CARRGGGSGWDFWYDYW

SEQ ID NO: 24424 - protein, 17 aa, Homo sapiens
CAKDGREQWLVLRFDYW

SEQ ID NO: 24425 - protein, 16 aa, Homo sapiens
CARERRWLQFQNFDYW

SEQ ID NO: 24426 - protein, 12 aa, Homo sapiens
CAKEVSQTDDYW

SEQ ID NO: 24427 - protein, 32 aa, Homo sapiens
CALPISADTAVYYCARFSIYYESSGDYYRDYW

SEQ ID NO: 24428 - protein, 16 aa, Homo sapiens
CARAISSAYYYDFTYW

SEQ ID NO: 24429 - protein, 20 aa, Homo sapiens
CARGGFCNGVTCLLQYMDVW

SEQ ID NO: 24430 - protein, 19 aa, Homo sapiens
CARLLTILASAGWYYFDLW

SEQ ID NO: 24431 - protein, 14 aa, Homo sapiens
CASIAASSGGVDYW

SEQ ID NO: 24432 - protein, 19 aa, Homo sapiens
CARSYPTSLNWALAAYDYW

SEQ ID NO: 24433 - protein, 20 aa, Homo sapiens
CARASVFGTYKSGHYFFDHW

SEQ ID NO: 24434 - protein, 14 aa, Homo sapiens
CANLASTWLVTDYW

SEQ ID NO: 24435 - protein, 10 aa, Homo sapiens
CARGYSIDYW

SEQ ID NO: 24436 - protein, 16 aa, Homo sapiens
CARDHCSGGFCYIDSW

SEQ ID NO: 24437 - protein, 17 aa, Homo sapiens
CAKGQLGIRHSNVFDYW

SEQ ID NO: 24438 - protein, 26 aa, Homo sapiens
CASKPYYDFWSGYYMDGYYYYYMDVW

SEQ ID NO: 24439 - protein, 17 aa, Homo sapiens
CASSGETVTTWDAFDIW

SEQ ID NO: 24440 - protein, 15 aa, Homo sapiens
CARQRGSVGAHFDYW

SEQ ID NO: 24441 - protein, 17 aa, Homo sapiens
CARDGRVAVPNDDFDIW

SEQ ID NO: 24442 - protein, 21 aa, Homo sapiens
CARVGPGTVGYYYYYYYMDVW

SEQ ID NO: 24443 - protein, 17 aa, Homo sapiens
CASSYYDSSGYLPVDYW

SEQ ID NO: 24444 - protein, 24 aa, Homo sapiens
CSVLDCTSTTCQRSGDPQNWFAPW

SEQ ID NO: 24445 - protein, 16 aa, Homo sapiens
CARNMGYDFWSTFDYW

SEQ ID NO: 24446 - protein, 19 aa, Homo sapiens
CVRVDISIRSNTGDAFDIW

SEQ ID NO: 24447 - protein, 18 aa, Homo sapiens
CARTRDRAITAAGFFDYW

SEQ ID NO: 24448 - protein, 18 aa, Homo sapiens
CAREAVGSTWSAYYFDYW

SEQ ID NO: 24449 - protein, 16 aa, Homo sapiens
CARGRGYSSGEVFDSW

SEQ ID NO: 24450 - protein, 21 aa, Homo sapiens
CARQNVLFEYSAGPPRLFDVW

SEQ ID NO: 24451 - protein, 20 aa, Homo sapiens
CARSPGGIVPAGTQNWFDPW

SEQ ID NO: 24452 - protein, 14 aa, Homo sapiens
CAILKVDSGYHDYW

SEQ ID NO: 24453 - protein, 15 aa, Homo sapiens
CARTTSLTAPGFDIW

SEQ ID NO: 24454 - protein, 19 aa, Homo sapiens
CARINYDILTGYIVGLDYW

SEQ ID NO: 24455 - protein, 14 aa, Homo sapiens
CARDPYDYVFFDIW

SEQ ID NO: 24456 - protein, 21 aa, Homo sapiens
CARDQAHLRYSFWSGSYFDYW

SEQ ID NO: 24457 - protein, 13 aa, Homo sapiens
CARDPELDPFYYW

SEQ ID NO: 24458 - protein, 14 aa, Homo sapiens
CARWRAWEYYFDSW

SEQ ID NO: 24459 - protein, 18 aa, Homo sapiens
CARDYGDYPSPSFYFDFW

SEQ ID NO: 24460 - protein, 20 aa, Homo sapiens
CARLGPGSVGSDWMFYFDFW

SEQ ID NO: 24461 - protein, 16 aa, Homo sapiens
CVRVLGGNYLGYFDYW

SEQ ID NO: 24462 - protein, 21 aa, Homo sapiens
CARHLRHQEWHLLHSTDFDYW

SEQ ID NO: 24463 - protein, 17 aa, Homo sapiens
CARVAYSSKYTYYMDVW

SEQ ID NO: 24464 - protein, 16 aa, Homo sapiens
CARVGLPLWSGYNDYW

SEQ ID NO: 24465 - protein, 14 aa, Homo sapiens
CAKDHVAGRNVDYW

SEQ ID NO: 24466 - protein, 15 aa, Homo sapiens
CAKGAIVGLGWVDYW

SEQ ID NO: 24467 - protein, 14 aa, Homo sapiens
CVSSGWYVSILDYW

SEQ ID NO: 24468 - protein, 21 aa, Homo sapiens
CARDAMVRGLITRPLNVFDIW

SEQ ID NO: 24469 - protein, 16 aa, Homo sapiens
CARQRGDGYNDDFEYW

SEQ ID NO: 24470 - protein, 14 aa, Homo sapiens
CARVLKTNRTFDYW

SEQ ID NO: 24471 - protein, 15 aa, Homo sapiens
CARELEGHADAFDVW

SEQ ID NO: 24472 - protein, 42 aa, Homo sapiens
CDWSSDVCSSDLSLRGGDTAVYYCAKDSRLFLMGADYHFDYW

SEQ ID NO: 24473 - protein, 14 aa, Homo sapiens
CARSEQRGNAFDVW

SEQ ID NO: 24474 - protein, 20 aa, Homo sapiens
CAKDSHWDSSSWYGRYFDYW

SEQ ID NO: 24475 - protein, 20 aa, Homo sapiens
CARDQYSSRPTYYYYGMDVW

SEQ ID NO: 24476 - protein, 16 aa, Homo sapiens
CARHPVVVVAAVVDYW

SEQ ID NO: 24477 - protein, 15 aa, Homo sapiens
CARDFDHSNSHFDFW

SEQ ID NO: 24478 - protein, 17 aa, Homo sapiens
CARDKVTLPKPNWFDPW

SEQ ID NO: 24479 - protein, 13 aa, Homo sapiens
CARERGLNYFDIW

SEQ ID NO: 24480 - protein, 20 aa, Homo sapiens
CARVGYISSWYHLGNWFDPW

SEQ ID NO: 24481 - protein, 24 aa, Homo sapiens
CARHAADYSNYPFSLDYYYYMDVW

SEQ ID NO: 24482 - protein, 19 aa, Homo sapiens
CAKELHQRAVFGVLGFDFW

SEQ ID NO: 24483 - protein, 18 aa, Homo sapiens
CARSPVYSGALDYYMDVW

SEQ ID NO: 24484 - protein, 15 aa, Homo sapiens
CATLAVAGQYFFDYW

SEQ ID NO: 24485 - protein, 29 aa, Homo sapiens
CARQGEAMYYDILTGYYKNEPSSGVVDYW

SEQ ID NO: 24486 - protein, 23 aa, Homo sapiens
CATSRCSSASCYASGRNKLFDYW

SEQ ID NO: 24487 - protein, 13 aa, Homo sapiens
CANSRDGYNFDSW

SEQ ID NO: 24488 - protein, 17 aa, Homo sapiens
CAKGPTLGYGGQLPDYW

SEQ ID NO: 24489 - protein, 14 aa, Homo sapiens [sequence omitted]

SEQ ID NO: 24490 - protein, 16 aa, Homo sapiens
CARAPGGDLTENLDYW

SEQ ID NO: 24491 - protein, 22 aa, Homo sapiens
CARDGAMVAAAGNYYYYGMDVW

SEQ ID NO: 24492 - protein, 19 aa, Homo sapiens
CARTIFDYFGSGSSYFDFW

SEQ ID NO: 24493 - protein, 17 aa, Homo sapiens
CVKDMSYSNLWQTIDYW

SEQ ID NO: 24494 - protein, 17 aa, Homo sapiens
CASPTWELIREGEFDHW

SEQ ID NO: 24495 - protein, 17 aa, Homo sapiens
CALNYYDSSGLTTGDYW

SEQ ID NO: 24496 - protein, 28 aa, Homo sapiens
CARDPSYSSSWSGGADEQDYYYYYMDVW

SEQ ID NO: 24497 - protein, 13 aa, Homo sapiens
CVKGLSNSPFDSW

SEQ ID NO: 24498 - protein, 14 aa, Homo sapiens
CSSYTDSPTLPYVF

SEQ ID NO: 24499 - protein, 19 aa, Homo sapiens
CARMGSVEKDKYNNYFDTW

SEQ ID NO: 24500 - protein, 16 aa, Homo sapiens
CARDNGDYQWERLDYW

SEQ ID NO: 24501 - protein, 17 aa, Homo sapiens
CGRGRYSSGPPGAFDIW

SEQ ID NO: 24502 - protein, 13 aa, Homo sapiens
CAKLDIASPGDYW

SEQ ID NO: 24503 - protein, 16 aa, Homo sapiens
CVRGQQELLVNPFDFW

SEQ ID NO: 24504 - protein, 20 aa, Homo sapiens
CVRAVFNTVWGVSHVGFDSW

SEQ ID NO: 24505 - protein, 17 aa, Homo sapiens
CARGYGMLNPTVYFDPW

SEQ ID NO: 24506 - protein, 23 aa, Homo sapiens
CARGVVVVPAAIRDYYYYYMDVW

SEQ ID NO: 24507 - protein, 23 aa, Homo sapiens
CARRQYYYDSSGSFKGEDWFDPW

SEQ ID NO: 24508 - protein, 17 aa, Homo sapiens
CARDSPALDYYYGMDVW

SEQ ID NO: 24509 - protein, 18 aa, Homo sapiens
CARFPGIPSDGLYYMDVW

SEQ ID NO: 24510 - protein, 23 aa, Homo sapiens
CAKDLPYCSGGSCYSGGHWFDPW

SEQ ID NO: 24511 - protein, 14 aa, Homo sapiens
CARSLGAYDRFDSW

SEQ ID NO: 24512 - protein, 18 aa, Homo sapiens
CARVKRTVVITVPVFDYW

SEQ ID NO: 24513 - protein, 22 aa, Homo sapiens
CARDASSLFADGVCPPYHFDYW

SEQ ID NO: 24514 - protein, 16 aa, Homo sapiens
CAKETAGSGSFPYDYW

SEQ ID NO: 24515 - protein, 19 aa, Homo sapiens
CAKPHYYDSSGYSWYFDLW

SEQ ID NO: 24516 - protein, 17 aa, Homo sapiens
CAKVSPRLAYYDAFDVW

SEQ ID NO: 24517 - protein, 19 aa, Homo sapiens
CASQAPGFGGNPNTPFDSW

SEQ ID NO: 24518 - protein, 24 aa, Homo sapiens
CARGFVRNSQDSSAWSLVRPFDSW

SEQ ID NO: 24519 - protein, 13 aa, Homo sapiens
CAKDTARRAMDVW

SEQ ID NO: 24520 - protein, 18 aa, Homo sapiens
CVRDQAYYDDERGAFDIW

SEQ ID NO: 24521 - protein, 19 aa, Homo sapiens
CARGGDSSGWYRQNFFDYW

SEQ ID NO: 24522 - protein, 19 aa, Homo sapiens
CARATYFSDSSAYYHFDSW

SEQ ID NO: 24523 - protein, 20 aa, Homo sapiens
CATGRVTVAAATDSPFFEYW

SEQ ID NO: 24524 - protein, 14 aa, Homo sapiens
CARDSGSSWYFDLW

SEQ ID NO: 24525 - protein, 17 aa, Homo sapiens
CARQGVRWSWGEEFDSW

SEQ ID NO: 24526 - protein, 19 aa, Homo sapiens
CARSLGYCTATGCYNLDYW

SEQ ID NO: 24527 - protein, 16 aa, Homo sapiens
CVRLLGGPSTRAGDYW

SEQ ID NO: 24528 - protein, 15 aa, Homo sapiens
CARDLYNSKASFDYW

SEQ ID NO: 24529 - protein, 15 aa, Homo sapiens
CANHDYGGSGGFDYW

SEQ ID NO: 24530 - protein, 18 aa, Homo sapiens
CTRDSDFWSGYIRYMDVW

SEQ ID NO: 24531 - protein, 21 aa, Homo sapiens
CARIPYCRSTTCYDYYYMDVW

SEQ ID NO: 24532 - protein, 14 aa, Homo sapiens
CMQTQQTPPPRYSF

SEQ ID NO: 24533 - protein, 13 aa, Homo sapiens
CAKLGLRSTVDYW

SEQ ID NO: 24534 - protein, 13 aa, Homo sapiens
CAKLVATDFVDYW

SEQ ID NO: 24535 - protein, 18 aa, Homo sapiens
CARDPAQYDSSGLPTDYW

SEQ ID NO: 24536 - protein, 15 aa, Homo sapiens
CTSWGLDHYYALDVW

SEQ ID NO: 24537 - protein, 16 aa, Homo sapiens
CASRRYYGSGSYYNYW

SEQ ID NO: 24538 - protein, 16 aa, Homo sapiens
CARSQIHAKRDAFDIW

SEQ ID NO: 24539 - protein, 18 aa, Homo sapiens
CARDSSRYCISDVCFDYW

SEQ ID NO: 24540 - protein, 21 aa, Homo sapiens
CARDRGYYDSSGSHVGWFDPW

SEQ ID NO: 24541 - protein, 16 aa, Homo sapiens
CARTIVGTKSDAFDIW

SEQ ID NO: 24542 - protein, 15 aa, Homo sapiens
CARETDDVRISFDHW

SEQ ID NO: 24543 - protein, 18 aa, Homo sapiens
CTTHTSRDTIGYYLFDHW

SEQ ID NO: 24544 - protein, 16 aa, Homo sapiens
CARDRDASLSGYYDYW

SEQ ID NO: 24545 - protein, 17 aa, Homo sapiens
CAREVASGTYWGYFQFW

SEQ ID NO: 24546 - protein, 16 aa, Homo sapiens
CARYLWFGEFYFFDYW

SEQ ID NO: 24547 - protein, 18 aa, Homo sapiens
CARTFTSGGFGAPFFDYW

SEQ ID NO: 24548 - protein, 16 aa, Homo sapiens
CVRDLHDYSRPLFDIW

SEQ ID NO: 24549 - protein, 19 aa, Homo sapiens
CARYCSGASCHGANWFDPW

SEQ ID NO: 24550 - protein, 13 aa, Homo sapiens
CTNFDYYYYMDVW

SEQ ID NO: 24551 - protein, 18 aa, Homo sapiens
CAKDFLYYFDNNFQFDSW

SEQ ID NO: 24552 - protein, 16 aa, Homo sapiens
CAKPGGLCGGDCFDYW

SEQ ID NO: 24553 - protein, 20 aa, Homo sapiens
CARDRRVTRLGEGVGQNDYW

SEQ ID NO: 24554 - protein, 25 aa, Homo sapiens
CARGTRYNRCSSGVCYAHVDAFDIW

SEQ ID NO: 24555 - protein, 15 aa, Homo sapiens
CARMGVDQDYYFDYW

SEQ ID NO: 24556 - protein, 17 aa, Homo sapiens
CARDLGSWRRPIAFDIW

SEQ ID NO: 24557 - protein, 17 aa, Homo sapiens
CARGGEWNQLSIPPDYW

SEQ ID NO: 24558 - protein, 19 aa, Homo sapiens
CARLTYISGSGLGHWFDPW

SEQ ID NO: 24559 - protein, 13 aa, Homo sapiens
CARVKGLPIFDNW

SEQ ID NO: 24560 - protein, 16 aa, Homo sapiens
CVTDAIRGVTGWFDPW

SEQ ID NO: 24561 - protein, 17 aa, Homo sapiens
CVRMVQGVPSARWFDPW

SEQ ID NO: 24562 - protein, 20 aa, Homo sapiens
CAKGGQQVTVEPGPYYLDYW

SEQ ID NO: 24563 - protein, 18 aa, Homo sapiens
CARGGPYSGYDYYGMDVW

SEQ ID NO: 24564 - protein, 18 aa, Homo sapiens
CASIGGNPPYYYYYMDVW

SEQ ID NO: 24565 - protein, 18 aa, Homo sapiens
CAKTTVTLSPTPYYFDYW

SEQ ID NO: 24566 - protein, 17 aa, Homo sapiens
CARRRLGETNRYTFDHW

SEQ ID NO: 24567 - protein, 15 aa, Homo sapiens
CAKETSGATYYFDYW

SEQ ID NO: 24568 - protein, 20 aa, Homo sapiens
CARGLTLRFLTERLNWLDPW

SEQ ID NO: 24569 - protein, 14 aa, Homo sapiens
CAREGGSYRKFDFW

SEQ ID NO: 24570 - protein, 19 aa, Homo sapiens
CARDGITTRYSSGWYFDYW

SEQ ID NO: 24571 - protein, 15 aa, Homo sapiens
CARDVRPHSGWYDYW

SEQ ID NO: 24572 - protein, 18 aa, Homo sapiens
CARLDGCSAGTCYRFDSW

SEQ ID NO: 24573 - protein, 16 aa, Homo sapiens
CARPVVARGPYAFDIW

SEQ ID NO: 24574 - protein, 19 aa, Homo sapiens
CAKNFGDYNALWLTYIDYW

SEQ ID NO: 24575 - protein, 21 aa, Homo sapiens
CAKELPRWSGLGYYYYYMDVW

SEQ ID NO: 24576 - protein, 17 aa, Homo sapiens
CARSSRGSSGYYYFDNW

SEQ ID NO: 24577 - protein, 20 aa, Homo sapiens
CAKDEYYYESSGPPDGFDIW

SEQ ID NO: 24578 - protein, 15 aa, Homo sapiens
CARDNQKRQGRFDYW

SEQ ID NO: 24579 - protein, 17 aa, Homo sapiens
CAKDSSHYYDSSGTDYW

SEQ ID NO: 24580 - protein, 21 aa, Homo sapiens
CARGYYDSSTYYPYYYGMDVW

SEQ ID NO: 24581 - protein, 14 aa, Homo sapiens
CSSYTSSNSLDVIF

SEQ ID NO: 24582 - protein, 15 aa, Homo sapiens
CTRAWNMDTAAFDSW

SEQ ID NO: 24583 - protein, 18 aa, Homo sapiens
CARDRDGDGYYSHSFDYW

SEQ ID NO: 24584 - protein, 18 aa, Homo sapiens
CARDRSIAARPANWFDPW

SEQ ID NO: 24585 - protein, 21 aa, Homo sapiens
CARDLWGPTWGSAAASLEDYW

SEQ ID NO: 24586 - protein, 19 aa, Homo sapiens
CATDQPPYTDYYYYYMDVW

SEQ ID NO: 24587 - protein, 16 aa, Homo sapiens
CATVPKRFGEWYFDHW

SEQ ID NO: 24588 - protein, 19 aa, Homo sapiens
CARSSGYSGFDLADAFDIW

SEQ ID NO: 24589 - protein, 17 aa, Homo sapiens
CAREDSTGWNRASLDYW

SEQ ID NO: 24590 - protein, 23 aa, Homo sapiens
CARDLPRITMRVVRSRGDVYDVW

SEQ ID NO: 24591 - protein, 14 aa, Homo sapiens
CAKLYYDSESGDYW

SEQ ID NO: 24592 - protein, 18 aa, Homo sapiens
CANSPHRSGWFPWGFDSW

SEQ ID NO: 24593 - protein, 23 aa, Homo sapiens
CARAYSRISLRHFDYLFHAFDVW

SEQ ID NO: 24594 - protein, 13 aa, Homo sapiens
CYSTDISGNQGVF

SEQ ID NO: 24595 - protein, 16 aa, Homo sapiens
CAKTTSGSYWSPCDYW

SEQ ID NO: 24596 - protein, 29 aa, Homo sapiens
CAKDSIYYDFWSGYIGGEVNYYYYGMDVW

SEQ ID NO: 24597 - protein, 13 aa, Homo sapiens
CFWSGSFYSGDYW

SEQ ID NO: 24598 - protein, 18 aa, Homo sapiens
CASSYPGGDSWTGYYRYW

SEQ ID NO: 24599 - protein, 19 aa, Homo sapiens
CVRIGYDGDYEGHYYFDYW

SEQ ID NO: 24600 - protein, 12 aa, Homo sapiens
CARPSPRTFDLW

SEQ ID NO: 24601 - protein, 17 aa, Homo sapiens
CAHKGHWNDLGDAFDMW

SEQ ID NO: 24602 - protein, 15 aa, Homo sapiens
CARGAPSVIADFDSW

SEQ ID NO: 24603 - protein, 27 aa, Homo sapiens
CVCATDLTVTNYYNDSGFYPRGYFDYW

SEQ ID NO: 24604 - protein, 24 aa, Homo sapiens
CVRQGCTSTSCSCCGYDPAPFDYW

SEQ ID NO: 24605 - protein, 18 aa, Homo sapiens
CARDAEFYGSGSSPLDYW

SEQ ID NO: 24606 - protein, 18 aa, Homo sapiens
CARHLKSIAATWGAFDIW

SEQ ID NO: 24607 - protein, 22 aa, Homo sapiens
CARGRPSDDFWSGYWGDWFDPW

SEQ ID NO: 24608 - protein, 15 aa, Homo sapiens
CATGLVGATSLGDYW

SEQ ID NO: 24609 - protein, 16 aa, Homo sapiens
CAHTPYLRGYSRYDYW

SEQ ID NO: 24610 - protein, 18 aa, Homo sapiens
CAKNGLYCGGDCNPFDYW

SEQ ID NO: 24611 - protein, 17 aa, Homo sapiens
CAKYAKVTSDGKYFDLW

SEQ ID NO: 24612 - protein, 13 aa, Homo sapiens
CAHRSSFRHFDYW

SEQ ID NO: 24613 - protein, 33 aa, Homo sapiens
CALPILRAEDTAVYYCARGSAIYYDSSGYFDYW

SEQ ID NO: 24614 - protein, 18 aa, Homo sapiens
CAKALVVVAANYWYFDLW

SEQ ID NO: 24615 - protein, 18 aa, Homo sapiens
CARDPCSGGQCYGTLDYW

SEQ ID NO: 24616 - protein, 20 aa, Homo sapiens
CAKDKIVVVPAALSLHFDYW

SEQ ID NO: 24617 - protein, 14 aa, Homo sapiens
CAREPVGGPTDDYW

SEQ ID NO: 24618 - protein, 12 aa, Homo sapiens
CLQSSNLPPYTF

SEQ ID NO: 24619 - protein, 21 aa, Homo sapiens
CARARDFWSGTYYYYYGMDVW

SEQ ID NO: 24620 - protein, 17 aa, Homo sapiens
CQVWDFSSVHSRGFYFF

SEQ ID NO: 24621 - protein, 15 aa, Homo sapiens
CARVGGRPLGPFDYW

SEQ ID NO: 24622 - protein, 16 aa, Homo sapiens
CARHRGSSSRFPIDYW

SEQ ID NO: 24623 - protein, 22 aa, Homo sapiens
CARIRMGVVIPAAISPFLFDPW

SEQ ID NO: 24624 - protein, 22 aa, Homo sapiens
CARESYSPARDYGGNSRAFDYW

SEQ ID NO: 24625 - protein, 22 aa, Homo sapiens
CAKDEGYCSGDGCYPAYAFDIW

SEQ ID NO: 24626 - protein, 22 aa, Homo sapiens
CARDYHFLVAGHARPPNWFDPW

SEQ ID NO: 24627 - protein, 12 aa, Homo sapiens
CTSSSWARFDYW

SEQ ID NO: 24628 - protein, 11 aa, Homo sapiens
CVRRTTTGDYW

SEQ ID NO: 24629 - protein, 20 aa, Homo sapiens
CARDYCSITDCYFTFYIDAW

SEQ ID NO: 24630 - protein, 20 aa, Homo sapiens
CRLEEDCSSTSCYGWYFDYW

SEQ ID NO: 24631 - protein, 16 aa, Homo sapiens
CAREGILGATRGFDFW

SEQ ID NO: 24632 - protein, 15 aa, Homo sapiens
CAVSSVVVPAACDYW

SEQ ID NO: 24633 - protein, 15 aa, Homo sapiens
CARRSVTGTTFVDYW

SEQ ID NO: 24634 - protein, 17 aa, Homo sapiens
CARGPPLGPYYYYMDVW

SEQ ID NO: 24635 - protein, 17 aa, Homo sapiens
CVRSPGRTILVPIFDLW

SEQ ID NO: 24636 - protein, 18 aa, Homo sapiens
CARDGEPGTNVGRFLDYW

SEQ ID NO: 24637 - protein, 19 aa, Homo sapiens
CARTTPRSSYYSNWYFDLW

SEQ ID NO: 24638 - protein, 13 aa, Homo sapiens
CAKTPQGTAQDYW

SEQ ID NO: 24639 - protein, 13 aa, Homo sapiens
CARHPAVNNFDYW

SEQ ID NO: 24640 - protein, 23 aa, Homo sapiens
CARAISVPAAISSRDYYYYMDVW

SEQ ID NO: 24641 - protein, 24 aa, Homo sapiens
CARASWYYDSSGYRDYYYYGMDVW

SEQ ID NO: 24642 - protein, 24 aa, Homo sapiens
CARDIFAGVAAAGTKFYYYGMDVW

SEQ ID NO: 24643 - protein, 19 aa, Homo sapiens
CARISYYSASSGQGGFDYW

SEQ ID NO: 24644 - protein, 17 aa, Homo sapiens
CAKAGSGRWPLEYFDYW

SEQ ID NO: 24645 - protein, 12 aa, Homo sapiens
CMQTLQSPRYIF

SEQ ID NO: 24646 - protein, 20 aa, Homo sapiens
CTTRDCSGGGCHSDDAFDIW

SEQ ID NO: 24647 - protein, 16 aa, Homo sapiens
CASPGRPLTVEGFDYW

SEQ ID NO: 24648 - protein, 16 aa, Homo sapiens
CASRSSRGYYYGMDVW

SEQ ID NO: 24649 - protein, 18 aa, Homo sapiens
CAKDSGGVAAAVYHFDYW

SEQ ID NO: 24650 - protein, 20 aa, Homo sapiens
CAKEGSHCTPTNCPRPFDYW

SEQ ID NO: 24651 - protein, 14 aa, Homo sapiens
CARLWALGRSLDYW

SEQ ID NO: 24652 - protein, 24 aa, Homo sapiens
CAVVILARSDCPEGACYAYYFDYW

SEQ ID NO: 24653 - protein, 19 aa, Homo sapiens
CARDQYYESSGYWWGLDYW

SEQ ID NO: 24654 - protein, 16 aa, Homo sapiens
CAKVSDPSGNTEADYW

SEQ ID NO: 24655 - protein, 29 aa, Homo sapiens
CAASGFGFNNHGMHWVRQAPGADYYFDSW

SEQ ID NO: 24656 - protein, 18 aa, Homo sapiens
CAREAYTYGQDPYYLDYW

SEQ ID NO: 24657 - protein, 16 aa, Homo sapiens
CARESRSERKGAFDIW

SEQ ID NO: 24658 - protein, 20 aa, Homo sapiens
CARELRVVVVAATQYAFDIW

SEQ ID NO: 24659 - protein, 19 aa, Homo sapiens
CARDLRDFWSAYDRRFDYW

SEQ ID NO: 24660 - protein, 20 aa, Homo sapiens
CARDGGSRHYYDSSGLFDYW

SEQ ID NO: 24661 - protein, 17 aa, Homo sapiens
CARHTPYDFSPYYFDPW

SEQ ID NO: 24662 - protein, 15 aa, Homo sapiens
CAREDYSPKGTFDQW

SEQ ID NO: 24663 - protein, 14 aa, Homo sapiens
CARAVGGWYRFDYW

SEQ ID NO: 24664 - protein, 17 aa, Homo sapiens
CARSRDTALPNDAFDIW

SEQ ID NO: 24665 - protein, 14 aa, Homo sapiens
CARDDFNWGCFDPW

SEQ ID NO: 24666 - protein, 13 aa, Homo sapiens
CARLNYAGFFDYW

SEQ ID NO: 24667 - protein, 16 aa, Homo sapiens
CAKDMLRYSYGCLDYW

SEQ ID NO: 24668 - protein, 16 aa, Homo sapiens
CARVWEVVDPGAFDMW

SEQ ID NO: 24669 - protein, 16 aa, Homo sapiens
CARLGYFSDHWERDYW

SEQ ID NO: 24670 - protein, 17 aa, Homo sapiens
CAREDRRSGWYFRFDYW

SEQ ID NO: 24671 - protein, 23 aa, Homo sapiens
CARVIIVPAAMVSYYSYYYLDVW

SEQ ID NO: 24672 - protein, 14 aa, Homo sapiens
CAREVSRYWYFDLW

SEQ ID NO: 24673 - protein, 15 aa, Homo sapiens
CATDFGGETDWFDPW

SEQ ID NO: 24674 - protein, 16 aa, Homo sapiens
CATRGRQLEPHAFDIW

SEQ ID NO: 24675 - protein, 21 aa, Homo sapiens
CARGDFTIFGRGGSVGILDYW

SEQ ID NO: 24676 - protein, 22 aa, Homo sapiens
CARGRADYYDSRGYYYGAFDIW

SEQ ID NO: 24677 - protein, 17 aa, Homo sapiens
CTSQFLRGVRGVTVDYW

SEQ ID NO: 24678 - protein, 18 aa, Homo sapiens
CARSHRSTPAAMEQVDYW

SEQ ID NO: 24679 - protein, 16 aa, Homo sapiens
CASLIGGNPAGYFDLW

SEQ ID NO: 24680 - protein, 11 aa, Homo sapiens
CALLYDPFDYW

SEQ ID NO: 24681 - protein, 19 aa, Homo sapiens
CAKPLLRACCGGDLILDYW

SEQ ID NO: 24682 - protein, 17 aa, Homo sapiens
CTTAFYYDDTGQVFDIW

SEQ ID NO: 24683 - protein, 16 aa, Homo sapiens
CARGATGDRWWAFDIW

SEQ ID NO: 24684 - protein, 18 aa, Homo sapiens
CAGYCSSFDCPSDAFDIW

SEQ ID NO: 24685 - protein, 17 aa, Homo sapiens
CATALSVRLNGRYNDYW

SEQ ID NO: 24686 - protein, 20 aa, Homo sapiens
CAVPLKQQLVPPDPYYFDYW

SEQ ID NO: 24687 - protein, 22 aa, Homo sapiens
CARGVDTAMVQHYYYYYYMDVW

SEQ ID NO: 24688 - protein, 20 aa, Homo sapiens
CARDQGYDVSTHYSFFFDQW

SEQ ID NO: 24689 - protein, 13 aa, Homo sapiens
CQSADSGATYRLF

SEQ ID NO: 24690 - protein, 14 aa, Homo sapiens
CAREDDITGYIDYW

SEQ ID NO: 24691 - protein, 13 aa, Homo sapiens
CQQRCDWPPRWTF

SEQ ID NO: 24692 - protein, 22 aa, Homo sapiens
CAKHGSMVRGVRGIYYYYMDVW

SEQ ID NO: 24693 - protein, 21 aa, Homo sapiens
CATLHGLEVALATIRGTLDYW

SEQ ID NO: 24694 - protein, 13 aa, Homo sapiens
CAHRPQQAIFDYW

SEQ ID NO: 24695 - protein, 23 aa, Homo sapiens
CASGREVVPAAMNYYYYYYMDVW

SEQ ID NO: 24696 - protein, 16 aa, Homo sapiens
CARTNSGTYAGRFDSW

SEQ ID NO: 24697 - protein, 13 aa, Homo sapiens
CSGIAEENQFDPW

SEQ ID NO: 24698 - protein, 17 aa, Homo sapiens
CARHRRTVTTADPFDVW

SEQ ID NO: 24699 - protein, 23 aa, Homo sapiens
CTTDAYNYRSWRGYYSRDAFDIW

SEQ ID NO: 24700 - protein, 15 aa, Homo sapiens
CAHSSPTYYYAMDVW

SEQ ID NO: 24701 - protein, 17 aa, Homo sapiens
CARVGLDYGDYPPFDYW

SEQ ID NO: 24702 - protein, 15 aa, Homo sapiens
CQHYGNSPRTFSRTF

SEQ ID NO: 24703 - protein, 14 aa, Homo sapiens
CAIFHGQQQAFDYW

SEQ ID NO: 24704 - protein, 20 aa, Homo sapiens
CATDGPTPLGGVVIIPVDYW

SEQ ID NO: 24705 - protein, 19 aa, Homo sapiens
CARDRGGEYGSSSIWFDPW

SEQ ID NO: 24706 - protein, 17 aa, Homo sapiens
CAKGGRPSIAAAEIDYW

SEQ ID NO: 24707 - protein, 25 aa, Homo sapiens
CARILITTDYDSSGYYYDLNAFDIW

SEQ ID NO: 24708 - protein, 18 aa, Homo sapiens
CARDTGRLGVAGRYFDYW

SEQ ID NO: 24709 - protein, 15 aa, Homo sapiens
CARRNPGQYDAYDLW

SEQ ID NO: 24710 - protein, 15 aa, Homo sapiens
CAKYAYYVSEHFDYW

SEQ ID NO: 24711 - protein, 34 aa, Homo sapiens
CLRAEDTAVYYCAKESTNYYDSSSYNYGHYFDYW

SEQ ID NO: 24712 - protein, 22 aa, Homo sapiens
CAKDRVGSGWDNDYYYYHMDVW

SEQ ID NO: 24713 - protein, 18 aa, Homo sapiens
CARAPVTPYYYYYYMDVW

SEQ ID NO: 24714 - protein, 19 aa, Homo sapiens
CARFSIYYESSGDYYRDYW

SEQ ID NO: 24715 - protein, 24 aa, Homo sapiens
CAAVPHFGVVAGTNYYFYYYMDVW

SEQ ID NO: 24716 - protein, 16 aa, Homo sapiens
CATALWSYYYYYMDVW

SEQ ID NO: 24717 - protein, 18 aa, Homo sapiens
CAAVPMSYSDKSPFFDYW

SEQ ID NO: 24718 - protein, 12 aa, Homo sapiens
CTGPRGQPFDYW

SEQ ID NO: 24719 - protein, 15 aa, Homo sapiens
CARRDHWAESYLDFW

SEQ ID NO: 24720 - protein, 18 aa, Homo sapiens
CAKDAGHEYYYYYHMDVW

SEQ ID NO: 24721 - protein, 15 aa, Homo sapiens
CAKVLSGSDMTGDYW

SEQ ID NO: 24722 - protein, 15 aa, Homo sapiens
CARPSYGAKGLVDYW

SEQ ID NO: 24723 - protein, 20 aa, Homo sapiens
CTRSLYGTGWNRETYWFDPW

SEQ ID NO: 24724 - protein, 15 aa, Homo sapiens
CARVGVGAPDWFGPW

SEQ ID NO: 24725 - protein, 14 aa, Homo sapiens
CAGAFNYGFYFDYW

SEQ ID NO: 24726 - protein, 21 aa, Homo sapiens
CARQRQYCSGGSCYSFWFDPW

SEQ ID NO: 24727 - protein, 20 aa, Homo sapiens
CARHHYCSGGTCYSAWFDPW

SEQ ID NO: 24728 - protein, 13 aa, Homo sapiens
CQYYNSYSPPLTF

SEQ ID NO: 24729 - protein, 18 aa, Homo sapiens
CAKDPGFLVGPTCYFDYW

SEQ ID NO: 24730 - protein, 19 aa, Homo sapiens
CARDSSTTTALNHGRFDYW

SEQ ID NO: 24731 - protein, 23 aa, Homo sapiens
CTRGGYCSSTNCPKVFFDSFDVW

SEQ ID NO: 24732 - protein, 14 aa, Homo sapiens
CARVRFPPIRIDYW

SEQ ID NO: 24733 - protein, 19 aa, Homo sapiens
CAKDASPIAVAGTSHFDYW

SEQ ID NO: 24734 - protein, 27 aa, Homo sapiens
CAKTYQLLSSDYDVWSGVNPEGAFEIW

SEQ ID NO: 24735 - protein, 10 aa, Homo sapiens
CQQYGCTPPF

SEQ ID NO: 24736 - protein, 16 aa, Homo sapiens
CARDSMAFSTYYMDVW

SEQ ID NO: 24737 - protein, 19 aa, Homo sapiens
CARDEVTVVRTGMGTFDIW

SEQ ID NO: 24738 - protein, 26 aa, Homo sapiens
CLRSEDTAIYYCARKGIASSWAFDLW

SEQ ID NO: 24739 - protein, 11 aa, Homo sapiens
CPQHDTFPYTF

SEQ ID NO: 24740 - protein, 23 aa, Homo sapiens
CARSGYCSSTRCFRVYYYGMDVW

SEQ ID NO: 24741 - protein, 23 aa, Homo sapiens
CARHHGGYCSSTSCYLWDWFDPW

SEQ ID NO: 24742 - protein, 19 aa, Homo sapiens
CAGGTAYYYGSRGYSFDYW

SEQ ID NO: 24743 - protein, 23 aa, Homo sapiens
CARASRLSYGSVWGMSPDAFDVW

SEQ ID NO: 24744 - protein, 17 aa, Homo sapiens
CARGQGAVVPAAICDYW

SEQ ID NO: 24745 - protein, 13 aa, Homo sapiens
CARILMPFLFDSW

SEQ ID NO: 24746 - protein, 15 aa, Homo sapiens
CATEVVVETGSFDIW

SEQ ID NO: 24747 - protein, 17 aa, Homo sapiens
CAIGASRLIGPNWFDPW

SEQ ID NO: 24748 - protein, 12 aa, Homo sapiens
CTTVLRSEFDYW

SEQ ID NO: 24749 - protein, 14 aa, Homo sapiens
CARLGTRPEYFQQW

SEQ ID NO: 24750 - protein, 16 aa, Homo sapiens
CGRDYYDSSGYYTQYW

SEQ ID NO: 24751 - protein, 19 aa, Homo sapiens
CARGAPSYSGYDYYAFDMW

SEQ ID NO: 24752 - protein, 15 aa, Homo sapiens
CARLPQGGYSYMDVW

SEQ ID NO: 24753 - protein, 21 aa, Homo sapiens
CARNKKDFWFWSASEYFFDYW

SEQ ID NO: 24754 - protein, 15 aa, Homo sapiens
CARLGGWQQLGFDYW

SEQ ID NO: 24755 - protein, 18 aa, Homo sapiens
CARGDYGGNSGVGAFDIW

SEQ ID NO: 24756 - protein, 17 aa, Homo sapiens
CARDASRFGEGPSFDYW

SEQ ID NO: 24757 - protein, 20 aa, Homo sapiens
CARDDFNDILTGRGGGFDYW

SEQ ID NO: 24758 - protein, 23 aa, Homo sapiens
CTTDARGVVIRGVIIGFGGHDYW

SEQ ID NO: 24759 - protein, 19 aa, Homo sapiens
CAKHVHMRAVLPAAPFDIW

SEQ ID NO: 24760 - protein, 18 aa, Homo sapiens
CARRSSVWGSHRYYLDYW

SEQ ID NO: 24761 - protein, 16 aa, Homo sapiens
CARAPWEGTRSPFDNW

SEQ ID NO: 24762 - protein, 24 aa, Homo sapiens
CARDRFWFEERSGQKNYFYAMDVW

SEQ ID NO: 24763 - protein, 20 aa, Homo sapiens
CARTVTTVVTQDYYFYMDVW

SEQ ID NO: 24764 - protein, 25 aa, Homo sapiens
CARQPAFHDIVVVVAATFVPWFDPW

SEQ ID NO: 24765 - protein, 12 aa, Homo sapiens
CARDTTTGFDPW

SEQ ID NO: 24766 - protein, 17 aa, Homo sapiens
CVTDGGKHWPSNWFDPW

SEQ ID NO: 24767 - protein, 16 aa, Homo sapiens
CARAEEYGGRQRNDYW

SEQ ID NO: 24768 - protein, 16 aa, Homo sapiens
CARELAARPPAWFDPW

SEQ ID NO: 24769 - protein, 16 aa, Homo sapiens
CARDQSGYDFYAFDIW

SEQ ID NO: 24770 - protein, 25 aa, Homo sapiens
CALPISAVYYCARGDQKPAFSLDYW

SEQ ID NO: 24771 - protein, 19 aa, Homo sapiens
CARGPDYAFWSGLHAFDIW

SEQ ID NO: 24772 - protein, 25 aa, Homo sapiens
CGRPGYCSSTSCSLGEEKNYYMDVW

SEQ ID NO: 24773 - protein, 22 aa, Homo sapiens
CARFSDFTYGSSIVQSAFFDCW

SEQ ID NO: 24774 - protein, 11 aa, Homo sapiens
CAKDNWGFHYW

SEQ ID NO: 24775 - protein, 25 aa, Homo sapiens
CARGIVVVVAATTLPPAYYYGMDVW

SEQ ID NO: 24776 - protein, 13 aa, Homo sapiens
CATLAAHHDFDIW

SEQ ID NO: 24777 - protein, 17 aa, Homo sapiens
CARHKAQTTSSDYFDYW

SEQ ID NO: 24778 - protein, 15 aa, Homo sapiens
CARVDGSSALDFDYW

SEQ ID NO: 24779 - protein, 26 aa, Homo sapiens
CARETYYYDSSGYYYPPYYYYGMDVW

SEQ ID NO: 24780 - protein, 18 aa, Homo sapiens
CARQSVGNGGMHGGFDIW

SEQ ID NO: 24781 - protein, 11 aa, Homo sapiens
CVKDPDVFDVW

SEQ ID NO: 24782 - protein, 24 aa, Homo sapiens
CAGQGTYYDFWSGYYTGINYFDYW

SEQ ID NO: 24783 - protein, 19 aa, Homo sapiens
CARGGPSEAAAGTDYFDYW

SEQ ID NO: 24784 - protein, 20 aa, Homo sapiens
CARPRFARYDFAESGTYDYW

SEQ ID NO: 24785 - protein, 17 aa, Homo sapiens
CAKVYYGSGTNYHFDHW

SEQ ID NO: 24786 - protein, 14 aa, Homo sapiens
CSSFTSSSTRPYFF

SEQ ID NO: 24787 - protein, 14 aa, Homo sapiens
CARIYYGTNAFDIW

SEQ ID NO: 24788 - protein, 17 aa, Homo sapiens
CASLGDPIAVAGTLDYW

SEQ ID NO: 24789 - protein, 13 aa, Homo sapiens
CARNSEGNWFDPW

SEQ ID NO: 24790 - protein, 16 aa, Homo sapiens
CATHNDFWSGQNFDHW

SEQ ID NO: 24791 - protein, 18 aa, Homo sapiens
CARSVDLHNSAWYYFDYW

SEQ ID NO: 24792 - protein, 18 aa, Homo sapiens
CASGYSSSWYSAEYFQHW

SEQ ID NO: 24793 - protein, 28 aa, Homo sapiens
CAREVEAYCGGDCYSAGGSYYYYYMDVW

SEQ ID NO: 24794 - protein, 17 aa, Homo sapiens
CAKDGDVGGVSEYFHHW

SEQ ID NO: 24795 - protein, 17 aa, Homo sapiens
CAKDGYSGYEGYYFDYW

SEQ ID NO: 24796 - protein, 20 aa, Homo sapiens
CAKDLGIAIFGVVVGIFDYW

SEQ ID NO: 24797 - protein, 21 aa, Homo sapiens
CAKQGPYDSPDYYYDGSDDYW

SEQ ID NO: 24798 - protein, 18 aa, Homo sapiens
CARGLVHSYASSYYFDYW

SEQ ID NO: 24799 - protein, 9 aa, Homo sapiens
CVKNGIDPW

SEQ ID NO: 24800 - protein, 27 aa, Homo sapiens
CARDIVIVSGDSPLTAYSYYFYGMDVW

SEQ ID NO: 24801 - protein, 20 aa, Homo sapiens
CARVSWTNIRTYQYYYMDVW

SEQ ID NO: 24802 - protein, 17 aa, Homo sapiens
CARDKGDYFPNWYFDLW

SEQ ID NO: 24803 - protein, 16 aa, Homo sapiens
CARVPLSYYYYHMDVW

SEQ ID NO: 24804 - protein, 14 aa, Homo sapiens
CATTNVVPAPFIYW

SEQ ID NO: 24805 - protein, 18 aa, Homo sapiens
CARDGGGGSGWSDVFDYW

SEQ ID NO: 24806 - protein, 14 aa, Homo sapiens
CSSYAGNYIFGLFF

SEQ ID NO: 24807 - protein, 15 aa, Homo sapiens
CARHGIAEAGRFDYW

SEQ ID NO: 24808 - protein, 39 aa, Homo sapiens
CKNSLYLQMNSLRAEDTAVYYCARGSAIYYDSSGYFDYW

SEQ ID NO: 24809 - protein, 14 aa, Homo sapiens
CARVKSGTSLIDYW

SEQ ID NO: 24810 - protein, 29 aa, Homo sapiens
CLRAEDTAVYYCVRTLRTHTVTTTGVDYW

SEQ ID NO: 24811 - protein, 16 aa, Homo sapiens
CAKEISDYGDYYFDYW

SEQ ID NO: 24812 - protein, 19 aa, Homo sapiens
CAKDPDTYSSGWSNWFDPW

SEQ ID NO: 24813 - protein, 21 aa, Homo sapiens
CARSYFDSSGYHYPLGGFDPW

SEQ ID NO: 24814 - protein, 16 aa, Homo sapiens
CAKAAIVARPDYFDFW

SEQ ID NO: 24815 - protein, 24 aa, Homo sapiens
CARGPEAAQYYYDSSDPFFRFDPW

SEQ ID NO: 24816 - protein, 14 aa, Homo sapiens
CAKMIGGNSPGDYW

SEQ ID NO: 24817 - protein, 23 aa, Homo sapiens
CAKHGRSRFDNRGYHLRDAFDTW

SEQ ID NO: 24818 - protein, 16 aa, Homo sapiens
CARLSEQLWLPLLDYW

SEQ ID NO: 24819 - protein, 11 aa, Homo sapiens
CQKLKSYPITF

SEQ ID NO: 24820 - protein, 21 aa, Homo sapiens
CARESGQWLVRVGYYYYMDVW

SEQ ID NO: 24821 - protein, 20 aa, Homo sapiens
CASVREWLLRTTHPPTFDYW

SEQ ID NO: 24822 - protein, 14 aa, Homo sapiens
CARARWELLYFDYW

SEQ ID NO: 24823 - protein, 18 aa, Homo sapiens
CAKDIKPYSSGWNAFDVW

SEQ ID NO: 24824 - protein, 19 aa, Homo sapiens
CARERVGATVDSPYYFDQW

SEQ ID NO: 24825 - protein, 15 aa, Homo sapiens
CNSRDSSSSHLQVLF

SEQ ID NO: 24826 - protein, 17 aa, Homo sapiens
CAKNLPAGFWSGYPDYW

SEQ ID NO: 24827 - protein, 16 aa, Homo sapiens
CARDPQFWDGVNFDSW

SEQ ID NO: 24828 - protein, 17 aa, Homo sapiens
CARHARTAVAGKIFDYW

SEQ ID NO: 24829 - protein, 24 aa, Homo sapiens
CARGPLYYDGAGYSSLQVPLFDYW

SEQ ID NO: 24830 - protein, 19 aa, Homo sapiens
CAKDLYVDGYSFGRAFEIW

SEQ ID NO: 24831 - protein, 17 aa, Homo sapiens
CARDPSPRGWSGYFDYW

SEQ ID NO: 24832 - protein, 19 aa, Homo sapiens
CARVRITIFGVANDAFDIW

SEQ ID NO: 24833 - protein, 17 aa, Homo sapiens
CSSTNCPKVFFDSFDVW

SEQ ID NO: 24834 - protein, 23 aa, Homo sapiens
CATNSLGPYSDYWSGYYKNFDYW

SEQ ID NO: 24835 - protein, 18 aa, Homo sapiens
CAKDMTVEYSSSWPLDYW

SEQ ID NO: 24836 - protein, 17 aa, Homo sapiens
CARETQYSFGYGQYDYW

SEQ ID NO: 24837 - protein, 22 aa, Homo sapiens
CARPSISLARYSLPPIDAFHVW

SEQ ID NO: 24838 - protein, 18 aa, Homo sapiens
CARVVDSGGMVIYYFDSW

SEQ ID NO: 24839 - protein, 18 aa, Homo sapiens
CATAPTKSNNHYYYMDVW

SEQ ID NO: 24840 - protein, 19 aa, Homo sapiens
CARDRGTYDSSGYYYLDYW

SEQ ID NO: 24841 - protein, 20 aa, Homo sapiens
CARKRITYYYDSSGAVFDYW

SEQ ID NO: 24842 - protein, 18 aa, Homo sapiens
CARVPTPLLPAQPDFDYW

SEQ ID NO: 24843 - protein, 21 aa, Homo sapiens
CARHRFYYHNSGLNPDYFDYW

SEQ ID NO: 24844 - protein, 19 aa, Homo sapiens
CAREGCGGDCYSHGAFDIW

SEQ ID NO: 24845 - protein, 14 aa, Homo sapiens
CARIRGGGGYFDYW

SEQ ID NO: 24846 - protein, 19 aa, Homo sapiens
CAKDKLRGVEATPDAFDFW

SEQ ID NO: 24847 - protein, 22 aa, Homo sapiens
CARVLVPAPTIAGDYYYGMDVW

SEQ ID NO: 24848 - protein, 16 aa, Homo sapiens
CAKVTYGGYSDIMDVW

SEQ ID NO: 24849 - protein, 15 aa, Homo sapiens
CARHISSSLNWFDPW

SEQ ID NO: 24850 - protein, 22 aa, Homo sapiens
CAREVSGVVIEEIQDYYALDVW

SEQ ID NO: 24851 - protein, 25 aa, Homo sapiens
CARDSQGFLEWLFKAPSVSTGLDYW

SEQ ID NO: 24852 - protein, 19 aa, Homo sapiens
CARHKRYCASANCFYIDVW

SEQ ID NO: 24853 - protein, 16 aa, Homo sapiens
CARDFFLAQFEAFDIW

SEQ ID NO: 24854 - protein, 15 aa, Homo sapiens
CTRDGAGWALPIDYW

SEQ ID NO: 24855 - protein, 16 aa, Homo sapiens
CARVAWHGDFFRFDPW

SEQ ID NO: 24856 - protein, 13 aa, Homo sapiens
CQSADTTGSSAVF

SEQ ID NO: 24857 - protein, 14 aa, Homo sapiens
CSTDITMHTGVDYW

SEQ ID NO: 24858 - protein, 20 aa, Homo sapiens
CASAGVGFVVRATQDAYDIW

SEQ ID NO: 24859 - protein, 16 aa, Homo sapiens
CARRRGYSYGGPFDYW

SEQ ID NO: 24860 - protein, 24 aa, Homo sapiens
CAKGPGSSGSYYNNYYYYYYMDVW

SEQ ID NO: 24861 - protein, 14 aa, Homo sapiens
CAADLEWSYYMDVW

SEQ ID NO: 24862 - protein, 17 aa, Homo sapiens
CARGDTTYGGYDAFDIW

SEQ ID NO: 24863 - protein, 17 aa, Homo sapiens
CAKGVYSSVFLVGFDYW

SEQ ID NO: 24864 - protein, 17 aa, Homo sapiens
CATPRGIQLWSNIFDYW

SEQ ID NO: 24865 - protein, 16 aa, Homo sapiens
CARQFPRGSTDYFDYW

SEQ ID NO: 24866 - protein, 14 aa, Homo sapiens
CAREEAYSSSSDYW

SEQ ID NO: 24867 - protein, 10 aa, Homo sapiens
CQQSFDTPSF

SEQ ID NO: 24868 - protein, 13 aa, Homo sapiens
CAKPSLNSYSDYW

SEQ ID NO: 24869 - protein, 17 aa, Homo sapiens
CVKGLSPQFLVDAFDVW

SEQ ID NO: 24870 - protein, 17 aa, Homo sapiens
CARDAADFSSGSYLDYW

SEQ ID NO: 24871 - protein, 14 aa, Homo sapiens
CAAWDDNLDGSYLF

SEQ ID NO: 24872 - protein, 20 aa, Homo sapiens
CARDSHLIAGVHYYYYMDVW

SEQ ID NO: 24873 - protein, 16 aa, Homo sapiens
CARDLGYSSGWPFDYW

SEQ ID NO: 24874 - protein, 18 aa, Homo sapiens
CARLVRKLELFTGTFDIW

SEQ ID NO: 24875 - protein, 21 aa, Homo sapiens
CARSRPSSCMYSNGICPYDYW

SEQ ID NO: 24876 - protein, 14 aa, Homo sapiens
CARRITMVRAIDYW

SEQ ID NO: 24877 - protein, 14 aa, Homo sapiens
CARGGIVDWYFDLW

SEQ ID NO: 24878 - protein, 16 aa, Homo sapiens
CAKIDCTNGVCSSDYW

SEQ ID NO: 24879 - protein, 19 aa, Homo sapiens
CAREITNQNIVNSNWHDPW

SEQ ID NO: 24880 - protein, 18 aa, Homo sapiens
CAKDPRPLIAAAEAVDYW

SEQ ID NO: 24881 - protein, 20 aa, Homo sapiens
CARRWAVAGTWPPSYYFDYW

SEQ ID NO: 24882 - protein, 18 aa, Homo sapiens
CARHVGGTAMVISWFDPW

SEQ ID NO: 24883 - protein, 17 aa, Homo sapiens
CARHKGRIAASDEIDYW

SEQ ID NO: 24884 - protein, 24 aa, Homo sapiens
CARDQQYCRSASCFLYYYYYMDVW

SEQ ID NO: 24885 - protein, 15 aa, Homo sapiens
CARTAGGPSFGFDIW

SEQ ID NO: 24886 - protein, 19 aa, Homo sapiens
CARGLRYYYGSSGYYYDYW

SEQ ID NO: 24887 - protein, 21 aa, Homo sapiens
CAKGLGYSSSWFPGQSYFDDW

SEQ ID NO: 24888 - protein, 16 aa, Homo sapiens
CARGVLRGVITHFDFW

SEQ ID NO: 24889 - protein, 20 aa, Homo sapiens
CARDRDVVVPAASYYYMDVW

SEQ ID NO: 24890 - protein, 18 aa, Homo sapiens
CARRCSNSHSCFKWFDPW

SEQ ID NO: 24891 - protein, 22 aa, Homo sapiens
CARDSLPGIISGYFYPNHFDPW

SEQ ID NO: 24892 - protein, 19 aa, Homo sapiens
CAKDMGVNWNYDGPSFDYW

SEQ ID NO: 24893 - protein, 14 aa, Homo sapiens
CARADTASDAFDYW

SEQ ID NO: 24894 - protein, 20 aa, Homo sapiens
CARHASLSPSIGSSWYMDSW

SEQ ID NO: 24895 - protein, 18 aa, Homo sapiens
CARRLWYSGSYQGYFDYW

SEQ ID NO: 24896 - protein, 14 aa, Homo sapiens
CARILYDFYYFDNW

SEQ ID NO: 24897 - protein, 26 aa, Homo sapiens
CARLHVFTREQFSVRRYYSYFYMDVW

SEQ ID NO: 24898 - protein, 20 aa, Homo sapiens
CAKIYGYYDFWSGPDTFDYW

SEQ ID NO: 24899 - protein, 21 aa, Homo sapiens
CARLGNGEKQWLLPEYYFDYW

SEQ ID NO: 24900 - protein, 14 aa, Homo sapiens
CARALAVARYFDYW

SEQ ID NO: 24901 - protein, 19 aa, Homo sapiens
CQTYGDSPHSSPRPFGRTF

SEQ ID NO: 24902 - protein, 12 aa, Homo sapiens [sequence omitted]

SEQ ID NO: 24903 - protein, 17 aa, Homo sapiens
CAKDERHQWLRGVVDYW

SEQ ID NO: 24904 - protein, 22 aa, Homo sapiens
CARRLRPRYCSSTSCYLLFDYW

SEQ ID NO: 24905 - protein, 22 aa, Homo sapiens
CATDPQSYDTLTGFYSTGFDQW

SEQ ID NO: 24906 - protein, 22 aa, Homo sapiens
CARVWGFYDSGGYWRNEGFDIW

SEQ ID NO: 24907 - protein, 12 aa, Homo sapiens
CLVEWLPNFDYW

SEQ ID NO: 24908 - protein, 18 aa, Homo sapiens
CARDDYGGNYYYYGMDVW

SEQ ID NO: 24909 - protein, 15 aa, Homo sapiens
CARLGCNYAYYFDHW

SEQ ID NO: 24910 - protein, 19 aa, Homo sapiens
CTRGRLGDSGSSGYYIHYW

SEQ ID NO: 24911 - protein, 15 aa, Homo sapiens
CASVPAAPDYYMDVW

SEQ ID NO: 24912 - protein, 16 aa, Homo sapiens
CGRGYSPIYYYYVDVW

SEQ ID NO: 24913 - protein, 21 aa, Homo sapiens
CARDLRGPVRLGVWIRAFDPW

SEQ ID NO: 24914 - protein, 15 aa, Homo sapiens
CARVSRNWNLPFDYW

SEQ ID NO: 24915 - protein, 21 aa, Homo sapiens
CASALLKDHGDYFTAETFQHW

SEQ ID NO: 24916 - protein, 18 aa, Homo sapiens
CVRSPDYIGYLEYYMDFW

SEQ ID NO: 24917 - protein, 21 aa, Homo sapiens
CARGIRYYDSSGYNSSPPDYW

SEQ ID NO: 24918 - protein, 15 aa, Homo sapiens
CAREDYPGSSWFDPW

SEQ ID NO: 24919 - protein, 16 aa, Homo sapiens
CARGPRGYNSAWLDSW

SEQ ID NO: 24920 - protein, 18 aa, Homo sapiens
CAKGLSDVILGHDAFDLW

SEQ ID NO: 24921 - protein, 15 aa, Homo sapiens
CATRVTGGVDAFDIW

SEQ ID NO: 24922 - protein, 19 aa, Homo sapiens
CAREKWGDDDTFSYTFDIW

SEQ ID NO: 24923 - protein, 25 aa, Homo sapiens
CARGRRLYYYDSSGPREKRDAFDIW

SEQ ID NO: 24924 - protein, 12 aa, Homo sapiens
CQHSYSTLPCSF

SEQ ID NO: 24925 - protein, 13 aa, Homo sapiens
CAREGTTGDFDYW

SEQ ID NO: 24926 - protein, 21 aa, Homo sapiens
CVRVKLVGDGRQPEGRYLDYW

SEQ ID NO: 24927 - protein, 15 aa, Homo sapiens
CASGRTAYSPAFDYW

SEQ ID NO: 24928 - protein, 18 aa, Homo sapiens
CARVYCVAGVCYRVYDYW

SEQ ID NO: 24929 - protein, 18 aa, Homo sapiens
CAKDLWEYTTLSPNFDYW

SEQ ID NO: 24930 - protein, 16 aa, Homo sapiens
CAKSLYSNYRIASDYW

SEQ ID NO: 24931 - protein, 21 aa, Homo sapiens
CARNIIVAPDAIRYYYGMDVW

SEQ ID NO: 24932 - protein, 23 aa, Homo sapiens
CARAKHWGGVVMGLYYYYGMDVW

SEQ ID NO: 24933 - protein, 13 aa, Homo sapiens
CAKEVNWGGVDYW

SEQ ID NO: 24934 - protein, 16 aa, Homo sapiens
CARARRGYSGYRFDYW

SEQ ID NO: 24935 - protein, 18 aa, Homo sapiens
CARTHNYNSGSSSNFDYW

SEQ ID NO: 24936 - protein, 19 aa, Homo sapiens
CVRFALNAYSTSWSHFDSW

SEQ ID NO: 24937 - protein, 18 aa, Homo sapiens
CAKGRLRFLEWSTPIDYW

SEQ ID NO: 24938 - protein, 15 aa, Homo sapiens
CDVLWNDETHAFDVW

SEQ ID NO: 24939 - protein, 17 aa, Homo sapiens
CARQDFRTVRATYLDYW

SEQ ID NO: 24940 - protein, 18 aa, Homo sapiens
CARQRYSYGYVLRSFDPW

SEQ ID NO: 24941 - protein, 40 aa, Homo sapiens
CALPISSAAYMELISLRSEDTAVYYCARGDQKPAFSLDYW

SEQ ID NO: 24942 - protein, 17 aa, Homo sapiens
CAKGKYGSVMIGCFDKW

SEQ ID NO: 24943 - protein, 11 aa, Homo sapiens
CTRPDGYRPYW

SEQ ID NO: 24944 - protein, 17 aa, Homo sapiens
CAKGAGAGTGDDYFDSW

SEQ ID NO: 24945 - protein, 16 aa, Homo sapiens
CARAGGTSERYYFDYW

SEQ ID NO: 24946 - protein, 17 aa, Homo sapiens
CVRPGSGYYGFSSFDYW

SEQ ID NO: 24947 - protein, 23 aa, Homo sapiens
CARHGALSVYHIDHTWAYVFDIW

SEQ ID NO: 24948 - protein, 19 aa, Homo sapiens
CARHVGYTYEVGEEYFDYW

SEQ ID NO: 24949 - protein, 21 aa, Homo sapiens
CARHSCDSWSDSYWGNWFDPW

SEQ ID NO: 24950 - protein, 16 aa, Homo sapiens
CATIRGDYSKQMRDYW

SEQ ID NO: 24951 - protein, 14 aa, Homo sapiens
CVSNGGTRINFQYW

SEQ ID NO: 24952 - protein, 27 aa, Homo sapiens
CASPADEKKAYFDFLTGYEGPYYFDYW

SEQ ID NO: 24953 - protein, 20 aa, Homo sapiens
CAKHDVVVIAAGRPRPFDCW

SEQ ID NO: 24954 - protein, 17 aa, Homo sapiens
CARGGTWIQLWPRFDYW

SEQ ID NO: 24955 - protein, 24 aa, Homo sapiens
CARDHGEPHGKWFGELLVQYFDYW

SEQ ID NO: 24956 - protein, 15 aa, Homo sapiens
CARVTDGGYHALDYW

SEQ ID NO: 24957 - protein, 11 aa, Homo sapiens
CARFFSGFDVW

SEQ ID NO: 24958 - protein, 18 aa, Homo sapiens
CARRSIAARGPDDAFDIW

SEQ ID NO: 24959 - protein, 20 aa, Homo sapiens
CAKERSLMGVYSIYEPIDYW

SEQ ID NO: 24960 - protein, 16 aa, Homo sapiens
CASGYCSSTSCYTRYW

SEQ ID NO: 24961 - protein, 14 aa, Homo sapiens
CARWAPRGTYVAYW

SEQ ID NO: 24962 - protein, 16 aa, Homo sapiens
CAKEMEQWLVFYFDSW

SEQ ID NO: 24963 - protein, 24 aa, Homo sapiens
CAKDRSDTLGYSGYDLPSPYFDYW

SEQ ID NO: 24964 - protein, 20 aa, Homo sapiens
CARGRSRSSSDGKPYYFDYW

SEQ ID NO: 24965 - protein, 16 aa, Homo sapiens
CATDLQVVREYFFDYW

SEQ ID NO: 24966 - protein, 20 aa, Homo sapiens
CARDGGLTDNFRWRYYFDLW

SEQ ID NO: 24967 - protein, 14 aa, Homo sapiens
CAKIVDTITEFDSW

SEQ ID NO: 24968 - protein, 17 aa, Homo sapiens
CASNRRIQLWPWAFDIW

SEQ ID NO: 24969 - protein, 22 aa, Homo sapiens
CASFPLWYYDSSGYNVVYFDYW

SEQ ID NO: 24970 - protein, 15 aa, Homo sapiens [sequence omitted]

SEQ ID NO: 24971 - protein, 22 aa, Homo sapiens
CAREFGGFWSGSHYYFYYMDVW

SEQ ID NO: 24972 - protein, 13 aa, Homo sapiens
CARCHTSGCPDYW

SEQ ID NO: 24973 - protein, 19 aa, Homo sapiens
CAKDPGFKTGTPHNWFDPW

SEQ ID NO: 24974 - protein, 17 aa, Homo sapiens
CAREGTDAALIAWFDPW

SEQ ID NO: 24975 - protein, 11 aa, Homo sapiens
CALNSYGYDYW

SEQ ID NO: 24976 - protein, 18 aa, Homo sapiens
CASLAGTDGAYYYYMDVW

SEQ ID NO: 24977 - protein, 22 aa, Homo sapiens
CARDQGRAGDDDLWNGGSFDYW

SEQ ID NO: 24978 - protein, 16 aa, Homo sapiens
CASGFGGYGGRYFDLW

SEQ ID NO: 24979 - protein, 15 aa, Homo sapiens
CARYNRFSYYAIDVW

SEQ ID NO: 24980 - protein, 18 aa, Homo sapiens
CAHRVTSTLWGVYYFDYW

SEQ ID NO: 24981 - protein, 21 aa, Homo sapiens
CVRVSVPWVQLQRENDAFDIW

SEQ ID NO: 24982 - protein, 15 aa, Homo sapiens
CARRVTGTARQFDLW

SEQ ID NO: 24983 - protein, 16 aa, Homo sapiens
CARPMRGLFLEAMDYW

SEQ ID NO: 24984 - protein, 18 aa, Homo sapiens
CAKSGALMVRGVSYFDYW

SEQ ID NO: 24985 - protein, 17 aa, Homo sapiens
CARDNSSPYYYYGMDVW

SEQ ID NO: 24986 - protein, 20 aa, Homo sapiens
CATDRGRTRYYDSSGPLDYW

SEQ ID NO: 24987 - protein, 15 aa, Homo sapiens
CARGTWSTSYFFDYW

SEQ ID NO: 24988 - protein, 20 aa, Homo sapiens
CARQVGGGNYQKPVFWFDPW

SEQ ID NO: 24989 - protein, 20 aa, Homo sapiens
CARILEDDFWSGYGGYFDYW

SEQ ID NO: 24990 - protein, 14 aa, Homo sapiens
CAAGGDFWSGLDYW

SEQ ID NO: 24991 - protein, 18 aa, Homo sapiens
CARVYDSSGYYSGEGDYW

SEQ ID NO: 24992 - protein, 13 aa, Homo sapiens
CARNILTGYYNYW

SEQ ID NO: 24993 - protein, 16 aa, Homo sapiens
CARCGPKAGFDYMDVW

SEQ ID NO: 24994 - protein, 16 aa, Homo sapiens
CARLNDYGVNNWFDPW

SEQ ID NO: 24995 - protein, 19 aa, Homo sapiens
CARIPSTMIEVVDDAFDIW

SEQ ID NO: 24996 - protein, 13 aa, Homo sapiens
CQSAASNNIYRVF

SEQ ID NO: 24997 - protein, 21 aa, Homo sapiens
CAKASGGHFVVVTAEYYFEYW

SEQ ID NO: 24998 - protein, 20 aa, Homo sapiens
CARSGWLRRDYYYYYYMDVW

SEQ ID NO: 24999 - protein, 21 aa, Homo sapiens
CARDFYLRSDSSGPPDAFDIW

SEQ ID NO: 25000 - protein, 11 aa, Homo sapiens
CLQGIHWPRTF

SEQ ID NO: 25001 - protein, 18 aa, Homo sapiens
CARAGLSIVGATGWFDPW

SEQ ID NO: 25002 - protein, 17 aa, Homo sapiens
CARELGSSNGQGWFDPW

SEQ ID NO: 25003 - protein, 35 aa, Homo sapiens
CTAYLHWSGLRASDTAIYYCARLGAARGHEAFDYW

SEQ ID NO: 25004 - protein, 12 aa, Homo sapiens [sequence omitted]

SEQ ID NO: 25005 - protein, 14 aa, Homo sapiens
CARDDYRFKTVDYW

SEQ ID NO: 25006 - protein, 22 aa, Homo sapiens
CTTVGDIVLMVYAMIPSQFDYW

SEQ ID NO: 25007 - protein, 18 aa, Homo sapiens
CAKRGGPGWLASNWFDPW

SEQ ID NO: 25008 - protein, 12 aa, Homo sapiens
CATALTVFPDYW

SEQ ID NO: 25009 - protein, 22 aa, Homo sapiens
CARTRFIVPAALALYHDAFDIW

SEQ ID NO: 25010 - protein, 23 aa, Homo sapiens
CARIPISTTVPATNYYYYALDVW

SEQ ID NO: 25011 - protein, 15 aa, Homo sapiens
CASLRFLARNAFDWW

SEQ ID NO: 25012 - protein, 23 aa, Homo sapiens
CARDSAGRYFDWSNYYYYYMDVW

SEQ ID NO: 25013 - protein, 16 aa, Homo sapiens
CARMPHGWELPIFDYW

SEQ ID NO: 25014 - protein, 14 aa, Homo sapiens
CARDSHHPWYFDIW

SEQ ID NO: 25015 - protein, 17 aa, Homo sapiens
CACTVYSSGWTGAFDIW

SEQ ID NO: 25016 - protein, 17 aa, Homo sapiens
CARESPPGVAPNWFDPW

SEQ ID NO: 25017 - protein, 15 aa, Homo sapiens
CARLQVPPAMPFDYW

SEQ ID NO: 25018 - protein, 26 aa, Homo sapiens
CAKLWPSCIVPAGCGYDSSAGAFDIW

SEQ ID NO: 25019 - protein, 18 aa, Homo sapiens
CARGGRGPAIRGDYFDFW

SEQ ID NO: 25020 - protein, 12 aa, Homo sapiens
CSSTSCRWLDYW

SEQ ID NO: 25021 - protein, 21 aa, Homo sapiens
CARHVGFGSTWSLRRGWFDPW

SEQ ID NO: 25022 - protein, 17 aa, Homo sapiens
CARLRIAVAGSYYFDYW

SEQ ID NO: 25023 - protein, 15 aa, Homo sapiens
CTMVPLRAGEIFPYW

SEQ ID NO: 25024 - protein, 16 aa, Homo sapiens
CARGAEMATTFLFDFW

SEQ ID NO: 25025 - protein, 17 aa, Homo sapiens
CARRNYDVLTSYAIDYW

SEQ ID NO: 25026 - protein, 24 aa, Homo sapiens
CARDSIVVVTPGGNYYYYYGMDVW

SEQ ID NO: 25027 - protein, 15 aa, Homo sapiens
CAKGGYSFDAFFDYW

SEQ ID NO: 25028 - protein, 21 aa, Homo sapiens
CARVMFLRYQLGEYEGWFDPW

SEQ ID NO: 25029 - protein, 21 aa, Homo sapiens
CARDRTITVFGVITYDAFDIW

SEQ ID NO: 25030 - protein, 13 aa, Homo sapiens
CQQYGATPQPPTF

SEQ ID NO: 25031 - protein, 21 aa, Homo sapiens
CAIQTYSYDSRGYRTLYFDYW

SEQ ID NO: 25032 - protein, 15 aa, Homo sapiens
CARPKFGRGIAFDFW

SEQ ID NO: 25033 - protein, 18 aa, Homo sapiens
CAKDIGDGYNYVFAFDIW

SEQ ID NO: 25034 - protein, 18 aa, Homo sapiens
CARRYVVVVAAYDAFDIW

SEQ ID NO: 25035 - protein, 22 aa, Homo sapiens
CARVEGYGSGNYFYYYYGLDVW

SEQ ID NO: 25036 - protein, 14 aa, Homo sapiens
CARASGQWKALDYW

SEQ ID NO: 25037 - protein, 25 aa, Homo sapiens
CARDKGATVTTLVNAAYYYSGMDVW

SEQ ID NO: 25038 - protein, 24 aa, Homo sapiens
CARSKVDILRFLGDVAGENYFDYW

SEQ ID NO: 25039 - protein, 16 aa, Homo sapiens
CARAVLHSGSSLLDYW

SEQ ID NO: 25040 - protein, 17 aa, Homo sapiens
CARAFTRGYSHGFFDYW

SEQ ID NO: 25041 - protein, 26 aa, Homo sapiens
CAKVGYYYDSSGYYYRNTRAEYFQHW

SEQ ID NO: 25042 - protein, 12 aa, Homo sapiens
CQSTDSSGTFWF

SEQ ID NO: 25043 - protein, 14 aa, Homo sapiens
CATGRHRAGITDYW

SEQ ID NO: 25044 - protein, 31 aa, Homo sapiens
CALPISAADTAVYFCARPQAEWDLLLPFDIW

SEQ ID NO: 25045 - protein, 14 aa, Homo sapiens
CAKDRQFDWIFDFW

SEQ ID NO: 25046 - protein, 16 aa, Homo sapiens
CARAVVPASESGFDPW

SEQ ID NO: 25047 - protein, 15 aa, Homo sapiens
CARWKVGSAWFFDYW

SEQ ID NO: 25048 - protein, 13 aa, Homo sapiens
CARGDLTMAHDYW

SEQ ID NO: 25049 - protein, 27 aa, Homo sapiens
CDWSSDVCSSDLSRVFLLGTDYYFDSW

SEQ ID NO: 25050 - protein, 14 aa, Homo sapiens
CSNQPHRDDWFDPW

SEQ ID NO: 25051 - protein, 13 aa, Homo sapiens
CASWDVSLSGRLF

SEQ ID NO: 25052 - protein, 15 aa, Homo sapiens
CARDQGGLLVGFDTW

SEQ ID NO: 25053 - protein, 21 aa, Homo sapiens
CARISGYSSSSAAIHDAFDIW

SEQ ID NO: 25054 - protein, 16 aa, Homo sapiens
CAKDRRSSSWYYLDHW

SEQ ID NO: 25055 - protein, 15 aa, Homo sapiens
CASLDITSARLFDYW

SEQ ID NO: 25056 - protein, 20 aa, Homo sapiens
CARDPSYSSDWFGKDAFDFW

SEQ ID NO: 25057 - protein, 17 aa, Homo sapiens
CATYRQWLSTVPIFDYW

SEQ ID NO: 25058 - protein, 17 aa, Homo sapiens
CARSFLSGSYQYYFDYW

SEQ ID NO: 25059 - protein, 12 aa, Homo sapiens
CQAWHSTTAGVF

SEQ ID NO: 25060 - protein, 14 aa, Homo sapiens
CASATVGSFHFDYW

SEQ ID NO: 25061 - protein, 12 aa, Homo sapiens [sequence omitted]

SEQ ID NO: 25062 - protein, 17 aa, Homo sapiens
CAKGRTDYSNTPDFDCW

SEQ ID NO: 25063 - protein, 18 aa, Homo sapiens
CARGPIIYDILTSGFDPW

SEQ ID NO: 25064 - protein, 16 aa, Homo sapiens
CARGPHSGNYYLSDYW

SEQ ID NO: 25065 - protein, 17 aa, Homo sapiens
CARVYLAAAGTGVNDYW

SEQ ID NO: 25066 - protein, 15 aa, Homo sapiens
CARDRGSSWSPFDPW

SEQ ID NO: 25067 - protein, 20 aa, Homo sapiens
CARGACSSTSCYEPYWFDPW

SEQ ID NO: 25068 - protein, 20 aa, Homo sapiens
CARGVEYTKLHYYYYYMDVW

SEQ ID NO: 25069 - protein, 29 aa, Homo sapiens
CARDSRHYDFWSGYFPGQSHYYYYGMDVW

SEQ ID NO: 25070 - protein, 14 aa, Homo sapiens
CARADYYLDVFDVW

SEQ ID NO: 25071 - protein, 18 aa, Homo sapiens
CARYCTSTSCYTESFDSW

SEQ ID NO: 25072 - protein, 13 aa, Homo sapiens
CATITQLWLFDYW

SEQ ID NO: 25073 - protein, 17 aa, Homo sapiens
CARSNSSSWYNDAFDIW

SEQ ID NO: 25074 - protein, 16 aa, Homo sapiens
CARAVGPQYPAWFDSW

SEQ ID NO: 25075 - protein, 27 aa, Homo sapiens
CARVLLGGEYSSGLREKGYYYYGMDVW

SEQ ID NO: 25076 - protein, 13 aa, Homo sapiens
CATGGASSEPDYW

SEQ ID NO: 25077 - protein, 18 aa, Homo sapiens
CARGPYYSNYPDNWFDPW

SEQ ID NO: 25078 - protein, 21 aa, Homo sapiens
CATDIPITIFVVVTDDAFDIW

SEQ ID NO: 25079 - protein, 18 aa, Homo sapiens
CARVPYWGIAAAGTFDYW

SEQ ID NO: 25080 - protein, 20 aa, Homo sapiens
CARDTVSWLQRRAHDSFDIW

SEQ ID NO: 25081 - protein, 18 aa, Homo sapiens
CARPLLGVVAALDAFDIW

SEQ ID NO: 25082 - protein, 25 aa, Homo sapiens
CVKDSGYCSSTRCEEYYYYYYMDVW

SEQ ID NO: 25083 - protein, 16 aa, Homo sapiens
CAKLGVGRYFDWSDYW

SEQ ID NO: 25084 - protein, 15 aa, Homo sapiens
CSKGDYGSGRRFDSW

SEQ ID NO: 25085 - protein, 24 aa, Homo sapiens
CAQITSLEVISSVVRSSAEHFHYW

SEQ ID NO: 25086 - protein, 16 aa, Homo sapiens
CATGLGSVAVDYFDYW

SEQ ID NO: 25087 - protein, 21 aa, Homo sapiens
CATTSPYCSSTSCYFHWFDPW

SEQ ID NO: 25088 - protein, 14 aa, Homo sapiens
CARAHRFEWLIDYW

SEQ ID NO: 25089 - protein, 13 aa, Homo sapiens
CTALSSHSFFDYW

SEQ ID NO: 25090 - protein, 15 aa, Homo sapiens
CARRSIAAPSVFDYW

SEQ ID NO: 25091 - protein, 21 aa, Homo sapiens
CARDPSIVGATTLGDWYFDLW

SEQ ID NO: 25092 - protein, 23 aa, Homo sapiens
CARQPSLVVVPADIRTNWYFDLW

SEQ ID NO: 25093 - protein, 11 aa, Homo sapiens
CLQDYNPPYSF

SEQ ID NO: 25094 - protein, 22 aa, Homo sapiens
CARVGKYFYENESHSYDAFDIW

SEQ ID NO: 25095 - protein, 17 aa, Homo sapiens
CARVEFLALGSGFFDSW

SEQ ID NO: 25096 - protein, 21 aa, Homo sapiens
CAKEWGPTATSSQRKTYYDYW

SEQ ID NO: 25097 - protein, 17 aa, Homo sapiens
CATSPGRTTSVPIFDYW

SEQ ID NO: 25098 - protein, 15 aa, Homo sapiens
CARDSRDVALAFDLW

SEQ ID NO: 25099 - protein, 22 aa, Homo sapiens
CARGKLVEANLLLNYYYYMDVW

SEQ ID NO: 25100 - protein, 18 aa, Homo sapiens
CARDSERYTSTWSSFDYW

SEQ ID NO: 25101 - protein, 17 aa, Homo sapiens
CARGAYYYDSSVPGDYW

SEQ ID NO: 25102 - protein, 22 aa, Homo sapiens
CAKDFLKVQLYSSSYFHHFDSW

SEQ ID NO: 25103 - protein, 21 aa, Homo sapiens
CARDRSYYERSTYYNHAFDIW

SEQ ID NO: 25104 - protein, 17 aa, Homo sapiens
CARPSSGSRPIYYMDVW

SEQ ID NO: 25105 - protein, 16 aa, Homo sapiens
CAKDSGEEVRGLSDYW

SEQ ID NO: 25106 - protein, 19 aa, Homo sapiens
CVRVQAPPAGPRPEPNDYW

SEQ ID NO: 25107 - protein, 15 aa, Homo sapiens
CMRHVSATNSWFDPW

SEQ ID NO: 25108 - protein, 20 aa, Homo sapiens
CAKGGLAAWTVSSEYYFDYW

SEQ ID NO: 25109 - protein, 15 aa, Homo sapiens
CAKDLKFLTGFFDYW

SEQ ID NO: 25110 - protein, 20 aa, Homo sapiens
CARLDSSSWYDYYFYYMDVW

SEQ ID NO: 25111 - protein, 17 aa, Homo sapiens
CARSYSNRWPPSGFDPW

SEQ ID NO: 25112 - protein, 22 aa, Homo sapiens
CAKDMANYYDSSGYPTDAFDIW

SEQ ID NO: 25113 - protein, 19 aa, Homo sapiens
CAKESGHYCSGGSCYLDYW

SEQ ID NO: 25114 - protein, 17 aa, Homo sapiens
CAKDPLGGYSSGWYDYW

SEQ ID NO: 25115 - protein, 15 aa, Homo sapiens
CARGRTLHSSGLDYW

SEQ ID NO: 25116 - protein, 24 aa, Homo sapiens
CARRAIDFWSGYYKREPGGEFDPW

SEQ ID NO: 25117 - protein, 17 aa, Homo sapiens
CAKDGSLYSSGWYSDYW

SEQ ID NO: 25118 - protein, 18 aa, Homo sapiens
CAREAGKTFYYYYGMDVW

SEQ ID NO: 25119 - protein, 20 aa, Homo sapiens
CVHSGPTARCDDQCWYFHLW

SEQ ID NO: 25120 - protein, 17 aa, Homo sapiens
CARRLAQLPELYYFDYW

SEQ ID NO: 25121 - protein, 13 aa, Homo sapiens
CASLRGNGAFDFW

SEQ ID NO: 25122 - protein, 20 aa, Homo sapiens
CATDRHLYCPNGVCSPGDYW

SEQ ID NO: 25123 - protein, 16 aa, Homo sapiens
CARRPPRFRGDYFDFW

SEQ ID NO: 25124 - protein, 13 aa, Homo sapiens
CAISRAGGLFDYW

SEQ ID NO: 25125 - protein, 20 aa, Homo sapiens
CARGLVYYYDTSAYYYFDYW

SEQ ID NO: 25126 - protein, 16 aa, Homo sapiens
CARHRGSSSVYASDIW

SEQ ID NO: 25127 - protein, 17 aa, Homo sapiens
CARVNNYDFWSGYYTYW

SEQ ID NO: 25128 - protein, 15 aa, Homo sapiens
CVVVPGGTHDAFDVW

SEQ ID NO: 25129 - protein, 19 aa, Homo sapiens
CAKDSWYQMPTAWYYFDFW

SEQ ID NO: 25130 - protein, 19 aa, Homo sapiens
CAWPGFCSGGTCPYYLDYW

SEQ ID NO: 25131 - protein, 14 aa, Homo sapiens
CAKLPQPTISIDYW

SEQ ID NO: 25132 - protein, 18 aa, Homo sapiens
CATHRRLWGLHTLTYDYW

SEQ ID NO: 25133 - protein, 16 aa, Homo sapiens
CVGSPSNWYVGWFDPW

SEQ ID NO: 25134 - protein, 20 aa, Homo sapiens
CTRNPGAYSDTWSPDRFDFW

SEQ ID NO: 25135 - protein, 13 aa, Homo sapiens [sequence omitted]

SEQ ID NO: 25136 - protein, 16 aa, Homo sapiens
CARGDWELRGVFFDLW

SEQ ID NO: 25137 - protein, 13 aa, Homo sapiens
CAKILAAAGTDYW

SEQ ID NO: 25138 - protein, 15 aa, Homo sapiens
CVRRGQTPIPSFDYW

SEQ ID NO: 25139 - protein, 18 aa, Homo sapiens
CAKGQSLSILLSGAFDIW

SEQ ID NO: 25140 - protein, 19 aa, Homo sapiens
CAKDRAEHFPYYYHYMDVW

SEQ ID NO: 25141 - protein, 12 aa, Homo sapiens
CHQRSTWPRLTF

SEQ ID NO: 25142 - protein, 15 aa, Homo sapiens
CARANDGSYHYFDYW

SEQ ID NO: 25143 - protein, 20 aa, Homo sapiens
CAKREIHYDIFTGPIGFDWW

SEQ ID NO: 25144 - protein, 17 aa, Homo sapiens
CATPGGYTYGPYYFGYW

SEQ ID NO: 25145 - protein, 17 aa, Homo sapiens
CARDNLEAAAGPIFDYW

SEQ ID NO: 25146 - protein, 19 aa, Homo sapiens
CARFSRPNYYDKTGYYDNW

SEQ ID NO: 25147 - protein, 15 aa, Homo sapiens
CGTWDSSLVGVPYVF

SEQ ID NO: 25148 - protein, 14 aa, Homo sapiens
CARSVRLDRPFDYW

SEQ ID NO: 25149 - protein, 17 aa, Homo sapiens
CARNSAYVGSTLGFDYW

SEQ ID NO: 25150 - protein, 17 aa, Homo sapiens
CAKQMSATGYDWYFDNW

SEQ ID NO: 25151 - protein, 12 aa, Homo sapiens
CAAQLLFYFDYW

SEQ ID NO: 25152 - protein, 14 aa, Homo sapiens
CASQLVLPGAFDIW

SEQ ID NO: 25153 - protein, 17 aa, Homo sapiens
CARHNRPLLFGETIDYW

SEQ ID NO: 25154 - protein, 18 aa, Homo sapiens
CALPIFFLLGADYYFDYW

SEQ ID NO: 25155 - protein, 20 aa, Homo sapiens
CARHVPISPSIDSSWYFDNW

SEQ ID NO: 25156 - protein, 20 aa, Homo sapiens
CATVVPAGQPHYYYYGMDVW

SEQ ID NO: 25157 - protein, 16 aa, Homo sapiens
CARSIVLMDKSDTDYW

SEQ ID NO: 25158 - protein, 13 aa, Homo sapiens
CAGGNRNMPFDYW

SEQ ID NO: 25159 - protein, 22 aa, Homo sapiens
CAKVGQVGGSYLVPYLWSFDYW

SEQ ID NO: 25160 - protein, 20 aa, Homo sapiens
CARDESDYSNYNYYYYMDVW

SEQ ID NO: 25161 - protein, 14 aa, Homo sapiens
CARLRRGNDAFDIW

SEQ ID NO: 25162 - protein, 18 aa, Homo sapiens
CAKDSQRSSNWPDAFDIW

SEQ ID NO: 25163 - protein, 23 aa, Homo sapiens
CARDGGFNAPYTSSSGYNWFDPW

SEQ ID NO: 25164 - protein, 22 aa, Homo sapiens
CANNDGVYCSSTSCYPYYFDYW

SEQ ID NO: 25165 - protein, 17 aa, Homo sapiens
CARNLVGATTGDAFDIW

SEQ ID NO: 25166 - protein, 21 aa, Homo sapiens
CARHPLGYCSGTRCFNWFDSW

SEQ ID NO: 25167 - protein, 15 aa, Homo sapiens
CAKDITHSLVALDYW

SEQ ID NO: 25168 - protein, 17 aa, Homo sapiens
CAREVRDDGSGSPSDYW

SEQ ID NO: 25169 - protein, 16 aa, Homo sapiens
CARIRAVGTVHYFDYW

SEQ ID NO: 25170 - protein, 21 aa, Homo sapiens
CARRTDVDSSIAAAGYYFDYW

SEQ ID NO: 25171 - protein, 21 aa, Homo sapiens
CATESFWSGYSPHYYYGMDVW

SEQ ID NO: 25172 - protein, 17 aa, Homo sapiens
CVRGFFDSRGHYTIDYW

SEQ ID NO: 25173 - protein, 17 aa, Homo sapiens
CARHNYYVTGSYVFDYW

SEQ ID NO: 25174 - protein, 15 aa, Homo sapiens
CARGYLYSLGYYDYW

SEQ ID NO: 25175 - protein, 18 aa, Homo sapiens
CARSWELLWGGGGFFDYW

SEQ ID NO: 25176 - protein, 27 aa, Homo sapiens
CARQSLRRAFPLLSGIDQKYSEGFDIW

SEQ ID NO: 25177 - protein, 13 aa, Homo sapiens
CGRLTVDGDLDYW

SEQ ID NO: 25178 - protein, 13 aa, Homo sapiens
CARVGDSDAFDIW

SEQ ID NO: 25179 - protein, 20 aa, Homo sapiens
CARGYSSGWLDYYYYGMDVW

SEQ ID NO: 25180 - protein, 24 aa, Homo sapiens
CARSLRIASHIGYLWTLNNAFDVW

SEQ ID NO: 25181 - protein, 19 aa, Homo sapiens
CVKDGQVYDYLGGYAFDFW

SEQ ID NO: 25182 - protein, 24 aa, Homo sapiens
CARGIVVVPAANSNYYYYYGMDVW

SEQ ID NO: 25183 - protein, 16 aa, Homo sapiens
CAKSGMATIYWYFDLW

SEQ ID NO: 25184 - protein, 13 aa, Homo sapiens
CATGYSSSWYFYW

SEQ ID NO: 25185 - protein, 17 aa, Homo sapiens
CARDNGIAARSDAFDIW

SEQ ID NO: 25186 - protein, 25 aa, Homo sapiens
CARDLPLWEIFGVVIPGRAEYFQHW

SEQ ID NO: 25187 - protein, 20 aa, Homo sapiens
CATAAEMDFWSGYYTGFDYW

SEQ ID NO: 25188 - protein, 24 aa, Homo sapiens
CARCLRVASDIGELWSLNNAFDIW

SEQ ID NO: 25189 - protein, 16 aa, Homo sapiens
CARKADFWSGFSLDYW

SEQ ID NO: 25190 - protein, 16 aa, Homo sapiens
CARDDYDFWRGIFDYW

SEQ ID NO: 25191 - protein, 20 aa, Homo sapiens [sequence omitted]

SEQ ID NO: 25192 - protein, 17 aa, Homo sapiens
CARDNGWLLYPGSFDRW

SEQ ID NO: 25193 - protein, 18 aa, Homo sapiens
CASDYDTLSSYYQAFDMW

SEQ ID NO: 25194 - protein, 21 aa, Homo sapiens
CARLKLYCSGGSCYSNYFDYW

SEQ ID NO: 25195 - protein, 11 aa, Homo sapiens
CQQIYITPVTF

SEQ ID NO: 25196 - protein, 15 aa, Homo sapiens
CARRFYGDNRWFDSW

SEQ ID NO: 25197 - protein, 19 aa, Homo sapiens
CARANTIFGVVIPAYFDYW

SEQ ID NO: 25198 - protein, 21 aa, Homo sapiens
CAKDHFVTYLIGTQDKRFDLW

SEQ ID NO: 25199 - protein, 16 aa, Homo sapiens
CTRDRSGSLPTHFDFW

SEQ ID NO: 25200 - protein, 16 aa, Homo sapiens
CARERISVTTNFFDYW

SEQ ID NO: 25201 - protein, 26 aa, Homo sapiens
CATDTRDLITIFGVVIRGGPGAFDIW

SEQ ID NO: 25202 - protein, 22 aa, Homo sapiens
CTRASYYYENSGYTLYDAFDIW

SEQ ID NO: 25203 - protein, 19 aa, Homo sapiens
CAKDRGPPFYSGTYVFDFW

SEQ ID NO: 25204 - protein, 20 aa, Homo sapiens
CATAPSVVVPAAIRGWFDPW

SEQ ID NO: 25205 - protein, 15 aa, Homo sapiens
CAGYGDYIEYYFDYW

SEQ ID NO: 25206 - protein, 11 aa, Homo sapiens [sequence omitted]

SEQ ID NO: 25207 - protein, 17 aa, Homo sapiens
CAKARGYSGGPYYFDFW

SEQ ID NO: 25208 - protein, 20 aa, Homo sapiens
CAISSVPTPLSWWLSPFDSW

SEQ ID NO: 25209 - protein, 17 aa, Homo sapiens
CAHRRSDYYSLYYFDYW

SEQ ID NO: 25210 - protein, 17 aa, Homo sapiens
CARSTAVVGTRRDFDHW

SEQ ID NO: 25211 - protein, 17 aa, Homo sapiens
CARGIWDSSSFEYFQDW

SEQ ID NO: 25212 - protein, 17 aa, Homo sapiens
CASDSKNGIYGFLLDYW

SEQ ID NO: 25213 - protein, 18 aa, Homo sapiens
CARRMWLQLGDYYALDVW

SEQ ID NO: 25214 - protein, 21 aa, Homo sapiens
CARDRALRFLEGSWGSALDIW

SEQ ID NO: 25215 - protein, 21 aa, Homo sapiens
CAREVGCYGSNCYMVRWFDPW

SEQ ID NO: 25216 - protein, 26 aa, Homo sapiens
CARTSMYCSSTSCYFGVEENNWFDPW

SEQ ID NO: 25217 - protein, 21 aa, Homo sapiens
CARVGEGYNPKDNYYYGMDVW

SEQ ID NO: 25218 - protein, 22 aa, Homo sapiens
CARVPTNYRVAAAGVDDAFHIW

SEQ ID NO: 25219 - protein, 17 aa, Homo sapiens
CAKDNFWSGYHDAFDVW

SEQ ID NO: 25220 - protein, 19 aa, Homo sapiens
CAKVPFCSRTSCQYYLDYW

SEQ ID NO: 25221 - protein, 17 aa, Homo sapiens
CAKGSTWGSYRSLFDYW

SEQ ID NO: 25222 - protein, 12 aa, Homo sapiens
CLQDAQDPPFTF

SEQ ID NO: 25223 - protein, 20 aa, Homo sapiens
CAREDGSRYAMHTLKIFDYW

SEQ ID NO: 25224 - protein, 12 aa, Homo sapiens
CVRQTRSWFDPW

SEQ ID NO: 25225 - protein, 17 aa, Homo sapiens
CARKVGSGWPNWYFDLW

SEQ ID NO: 25226 - protein, 14 aa, Homo sapiens
CARHVDNLPRFDYW

SEQ ID NO: 25227 - protein, 13 aa, Homo sapiens
CAKVSQSSSSDYW

SEQ ID NO: 25228 - protein, 21 aa, Homo sapiens
CARDLGYYDSSEDLYRGFDYW

SEQ ID NO: 25229 - protein, 21 aa, Homo sapiens
CARDLKGSIASLYYYYGMDVW

SEQ ID NO: 25230 - protein, 24 aa, Homo sapiens
CARFSVGSVQRSSGYYYGSGFDYW

SEQ ID NO: 25231 - protein, 16 aa, Homo sapiens
CARRFGGNSRGYIDVW

SEQ ID NO: 25232 - protein, 19 aa, Homo sapiens
CAKNSWGGFAEFYYYMDVW

SEQ ID NO: 25233 - protein, 14 aa, Homo sapiens
CARVGRGFYGFDIW

SEQ ID NO: 25234 - protein, 16 aa, Homo sapiens
CARLWTNTRWSPFDYW

SEQ ID NO: 25235 - protein, 17 aa, Homo sapiens
CAKAEESSIWYSLFDYW

SEQ ID NO: 25236 - protein, 24 aa, Homo sapiens
CARSKIDTLRFLGGVEGEYYFDYW

SEQ ID NO: 25237 - protein, 15 aa, Homo sapiens
CASLDASDYSSVDYW

SEQ ID NO: 25238 - protein, 35 aa, Homo sapiens
CTVYMELSSLRSDDTAIYYCARDKAMAVGYALDIW

SEQ ID NO: 25239 - protein, 17 aa, Homo sapiens
CARDFKVELLDNAFDIW

SEQ ID NO: 25240 - protein, 16 aa, Homo sapiens
CARISETNGWYYFDYW

SEQ ID NO: 25241 - protein, 7 aa, Homo sapiens
CQQGNSF

SEQ ID NO: 25242 - protein, 12 aa, Homo sapiens
CANAIAAVPDYW

SEQ ID NO: 25243 - protein, 18 aa, Homo sapiens
CTTDHSYYDFWSGYSDYW

SEQ ID NO: 25244 - protein, 14 aa, Homo sapiens
CARDKIGVGAPDYW

SEQ ID NO: 25245 - protein, 15 aa, Homo sapiens
CARDSPRLVDALDIW

SEQ ID NO: 25246 - protein, 15 aa, Homo sapiens
CARILDYGDFWDDYW

SEQ ID NO: 25247 - protein, 20 aa, Homo sapiens
CARDRRYYNTGYHARDFDLW

SEQ ID NO: 25248 - protein, 24 aa, Homo sapiens
CAGAEGSPSQLLTTVAPPYWFAPW

SEQ ID NO: 25249 - protein, 17 aa, Homo sapiens
CARDRVEVGRLDTFHIW

SEQ ID NO: 25250 - protein, 17 aa, Homo sapiens
CARDSGFSTSYYNIDYW

SEQ ID NO: 25251 - protein, 23 aa, Homo sapiens
CARSKGYYDILTGYRITYYFDYW

SEQ ID NO: 25252 - protein, 19 aa, Homo sapiens
CAAGEDIVMIPAVLYFDFW

SEQ ID NO: 25253 - protein, 34 aa, Homo sapiens
CDWSSDVCSSDLTAVYYCATGARRGYDFYYMDVW

SEQ ID NO: 25254 - protein, 19 aa, Homo sapiens
CARTSEDCSGGACYYFAFW

SEQ ID NO: 25255 - protein, 20 aa, Homo sapiens
CATLTDYYDGNGYYSPFDYW

SEQ ID NO: 25256 - protein, 17 aa, Homo sapiens
CAREARFWGVGNSLDSW

SEQ ID NO: 25257 - protein, 16 aa, Homo sapiens
CAKGSSSITHYHFDFW

SEQ ID NO: 25258 - protein, 13 aa, Homo sapiens
CQQRTNWPRGYPF

SEQ ID NO: 25259 - protein, 19 aa, Homo sapiens
CARTKITIFGVHSSWFDPW

SEQ ID NO: 25260 - protein, 17 aa, Homo sapiens
CARDRDRSSWKKSFDYW

SEQ ID NO: 25261 - protein, 19 aa, Homo sapiens
CVRDGSSILVEGGNWFDPW

SEQ ID NO: 25262 - protein, 23 aa, Homo sapiens
CVRDSYYDGTDNPPYGAEYFYHW

SEQ ID NO: 25263 - protein, 18 aa, Homo sapiens
CAREEPDTFGGVMWFDPW

SEQ ID NO: 25264 - protein, 20 aa, Homo sapiens
CARHEAPRWLAPAGSPLDYW

SEQ ID NO: 25265 - protein, 16 aa, Homo sapiens
CAIAYYDSSGHYRDYW

SEQ ID NO: 25266 - protein, 20 aa, Homo sapiens
CAKDPYYDFWSGHRGGFDPW

SEQ ID NO: 25267 - protein, 14 aa, Homo sapiens
CVRAVQYRYYFDNW

SEQ ID NO: 25268 - protein, 17 aa, Homo sapiens
CAKDLEQWLERWFFDHW

SEQ ID NO: 25269 - protein, 18 aa, Homo sapiens
CARAFVPDWELEYYFDYW

SEQ ID NO: 25270 - protein, 13 aa, Homo sapiens
CATSWPYNYLDPW

SEQ ID NO: 25271 - protein, 28 aa, Homo sapiens
CARALLRAAATATQGHTDYYYYYGMDVW

SEQ ID NO: 25272 - protein, 18 aa, Homo sapiens
CARGPKGNVYYYYHMDVW

SEQ ID NO: 25273 - protein, 20 aa, Homo sapiens
CARPPAHGYYGDYVRLFDMW

SEQ ID NO: 25274 - protein, 17 aa, Homo sapiens
CAREALGVGATGYFASW

SEQ ID NO: 25275 - protein, 22 aa, Homo sapiens
CARSDLILGYCSGGSCYSCDYW

SEQ ID NO: 25276 - protein, 16 aa, Homo sapiens
CARTYGAGRHHAFDIW

SEQ ID NO: 25277 - protein, 22 aa, Homo sapiens
CAREGFCTSGSCFPSEDAFDMW

SEQ ID NO: 25278 - protein, 19 aa, Homo sapiens
CARGLAAAGTSWGDWLDPW

SEQ ID NO: 25279 - protein, 16 aa, Homo sapiens
CARPGYSSSSVWFDPW

SEQ ID NO: 25280 - protein, 15 aa, Homo sapiens
CAKDTTPSLYYFDYW

SEQ ID NO: 25281 - protein, 17 aa, Homo sapiens
CAKIPGPDITSDAFDIW

SEQ ID NO: 25282 - protein, 14 aa, Homo sapiens
CARDLARMGYFDIW

SEQ ID NO: 25283 - protein, 13 aa, Homo sapiens
CTRGYAGVCYDYW

SEQ ID NO: 25284 - protein, 25 aa, Homo sapiens
CASFLWRYYDSSGKTFYYYYGMDVW

SEQ ID NO: 25285 - protein, 20 aa, Homo sapiens
CAQTADGSGYWRGSRPFDYW

SEQ ID NO: 25286 - protein, 18 aa, Homo sapiens
CARDPWSKVGAIQAFDYW

SEQ ID NO: 25287 - protein, 13 aa, Homo sapiens
CARLTWELDLDYW

SEQ ID NO: 25288 - protein, 13 aa, Homo sapiens
CAKVAAGTTSDYW

SEQ ID NO: 25289 - protein, 19 aa, Homo sapiens
CARHNPVAVYYYYYYMDVW

SEQ ID NO: 25290 - protein, 18 aa, Homo sapiens
CARDQCINGVCFYGSDYW

SEQ ID NO: 25291 - protein, 19 aa, Homo sapiens
CARDNWNYLPTQAASSDYW

SEQ ID NO: 25292 - protein, 16 aa, Homo sapiens
CAKDSHYGNPYYFDFW

SEQ ID NO: 25293 - protein, 17 aa, Homo sapiens
CATPRTYYYGSGSFDYW

SEQ ID NO: 25294 - protein, 19 aa, Homo sapiens
CTRPLFWYGGTSRDAFDMW

SEQ ID NO: 25295 - protein, 11 aa, Homo sapiens
CQNYGLSPSNF

SEQ ID NO: 25296 - protein, 16 aa, Homo sapiens
CARHRQYSSSPSFDYW

SEQ ID NO: 25297 - protein, 17 aa, Homo sapiens
CARALNSGWHSNWFDPW

SEQ ID NO: 25298 - protein, 17 aa, Homo sapiens
CAKDISSAVAGDGMDVW

SEQ ID NO: 25299 - protein, 14 aa, Homo sapiens
CAKLPITGTPVDYW

SEQ ID NO: 25300 - protein, 19 aa, Homo sapiens
CARGLFDVPLYYYYYMDVW

SEQ ID NO: 25301 - protein, 36 aa, Homo sapiens
CTAYLQWSRLWVSDTAIYYCARSPTSISNPYYFDHW

SEQ ID NO: 25302 - protein, 35 aa, Homo sapiens
CDWSSDVCSSDLDTAVYFCARPQAEWDLLLPFDIW

SEQ ID NO: 25303 - protein, 19 aa, Homo sapiens
CARDVREHSYVQDWYFDLW

SEQ ID NO: 25304 - protein, 13 aa, Homo sapiens
CQPYHSSPPLFTF

SEQ ID NO: 25305 - protein, 23 aa, Homo sapiens
CTRLYRPTAAPENYYQSYYVDVW

SEQ ID NO: 25306 - protein, 16 aa, Homo sapiens
CARTKGDLSYSGLDYW

SEQ ID NO: 25307 - protein, 21 aa, Homo sapiens
CARKFGANIGGGVYYYGMDVW

SEQ ID NO: 25308 - protein, 18 aa, Homo sapiens
CAKDPLATGTLPGYFDYW

SEQ ID NO: 25309 - protein, 15 aa, Homo sapiens
CASWWNDFNQYFDNW

SEQ ID NO: 25310 - protein, 20 aa, Homo sapiens
CARGLAPGYCGSSTCHDDYW

SEQ ID NO: 25311 - protein, 22 aa, Homo sapiens
CALQICATGARRGYYFYYMDVW

SEQ ID NO: 25312 - protein, 20 aa, Homo sapiens
CAHKISTTYDNFWSGYFDYW

SEQ ID NO: 25313 - protein, 23 aa, Homo sapiens
CAKGSHPDFYDTSGRYYYGMDVW

SEQ ID NO: 25314 - protein, 16 aa, Homo sapiens
CARDQWSDSSGSHDYW

SEQ ID NO: 25315 - protein, 17 aa, Homo sapiens
CARRNWGADEGGHFDLW

SEQ ID NO: 25316 - protein, 20 aa, Homo sapiens
CARGPLGGSAWHSPDYFDYW

SEQ ID NO: 25317 - protein, 20 aa, Homo sapiens
CARITIFGVVIIRGYYFDYW

SEQ ID NO: 25318 - protein, 21 aa, Homo sapiens
CARGGYCSTTSCYKFRSPDYW

SEQ ID NO: 25319 - protein, 13 aa, Homo sapiens
CQQYHNWPPKISF

SEQ ID NO: 25320 - protein, 15 aa, Homo sapiens
CAKVVTGTFRGSDYW

SEQ ID NO: 25321 - protein, 18 aa, Homo sapiens
CAREGGGWDSDPYYFDYW

SEQ ID NO: 25322 - protein, 17 aa, Homo sapiens
CARGADPQFPIYAMDVW

SEQ ID NO: 25323 - protein, 20 aa, Homo sapiens
CASPSSHDYYDTSGHPVDYW

SEQ ID NO: 25324 - protein, 15 aa, Homo sapiens
CARHQYDIFDYFTYW

SEQ ID NO: 25325 - protein, 12 aa, Homo sapiens
CARQVPHGFDIW

SEQ ID NO: 25326 - protein, 18 aa, Homo sapiens
CAHRPRATEVIGDYFDYW

SEQ ID NO: 25327 - protein, 17 aa, Homo sapiens
CARMTMVGASTIGFDIW

SEQ ID NO: 25328 - protein, 18 aa, Homo sapiens
CARDRMMTNGWNDAFDLW

SEQ ID NO: 25329 - protein, 14 aa, Homo sapiens
CVRQGGLTAAFDYW

SEQ ID NO: 25330 - protein, 18 aa, Homo sapiens
CAKNYYDSSGPASYFDYW

SEQ ID NO: 25331 - protein, 18 aa, Homo sapiens
CARDGGIAARLRGYFDYW

SEQ ID NO: 25332 - protein, 20 aa, Homo sapiens
CAKDMSVWIAAAGNYFFDNW

SEQ ID NO: 25333 - protein, 15 aa, Homo sapiens
CATHRDGYNQIFDYW

SEQ ID NO: 25334 - protein, 22 aa, Homo sapiens
CARESGPRPIVGATMAWYFDLW

SEQ ID NO: 25335 - protein, 14 aa, Homo sapiens
CARTRMWPGTYDYW

SEQ ID NO: 25336 - protein, 18 aa, Homo sapiens
CARDIRPGSRGSGDFDYW

SEQ ID NO: 25337 - protein, 21 aa, Homo sapiens
CARSPYYYDSSGPPIAYFDYW

SEQ ID NO: 25338 - protein, 17 aa, Homo sapiens
CARINNDYEYDWYFDLW

SEQ ID NO: 25339 - protein, 16 aa, Homo sapiens
CANGVGYSYGWFFDYW

SEQ ID NO: 25340 - protein, 23 aa, Homo sapiens
CAKDRPSYSTPELGFPEYYFDYW

SEQ ID NO: 25341 - protein, 18 aa, Homo sapiens
CARDDRYCSRTNCYMDYW

SEQ ID NO: 25342 - protein, 18 aa, Homo sapiens
CAKNYGIEADGWDAFDIW

SEQ ID NO: 25343 - protein, 17 aa, Homo sapiens
CARHYSSSPFYWYFDLW

SEQ ID NO: 25344 - protein, 15 aa, Homo sapiens
CARHDRKKPVYFDYW

SEQ ID NO: 25345 - protein, 20 aa, Homo sapiens
CARLIVGAVGGHYWYYMDVW

SEQ ID NO: 25346 - protein, 19 aa, Homo sapiens
CARSPPQTTAAPPAAYDIW

SEQ ID NO: 25347 - protein, 17 aa, Homo sapiens
CAHRPPPSSSYFYFDFW

SEQ ID NO: 25348 - protein, 14 aa, Homo sapiens
CAKAPTYGANTDYW

SEQ ID NO: 25349 - protein, 16 aa, Homo sapiens
CARLGDYGDTSYFDYW

SEQ ID NO: 25350 - protein, 15 aa, Homo sapiens
CARMILRSGWSFDLW

SEQ ID NO: 25351 - protein, 14 aa, Homo sapiens
CARIEMTTGYFDFW

SEQ ID NO: 25352 - protein, 15 aa, Homo sapiens
CARGLPVAAAGFDSW

SEQ ID NO: 25353 - protein, 24 aa, Homo sapiens
CASAKLGYSGYDRGGDHAYYMDVW

SEQ ID NO: 25354 - protein, 18 aa, Homo sapiens
CAREGIVYDWGSDAFDIW

SEQ ID NO: 25355 - protein, 20 aa, Homo sapiens
CAKRQYGHENYSYYYYIDVW

SEQ ID NO: 25356 - protein, 27 aa, Homo sapiens
CAKTFQTLSSDYDFWSGANIAGFFDIW

SEQ ID NO: 25357 - protein, 22 aa, Homo sapiens
CVREGTDSGRPHTTHLNWFDPW

SEQ ID NO: 25358 - protein, 17 aa, Homo sapiens
CARAPEWLLLGGALDIW

SEQ ID NO: 25359 - protein, 17 aa, Homo sapiens
CAREPKSLVAPDSFDIW

SEQ ID NO: 25360 - protein, 17 aa, Homo sapiens
CAKSKADLGSLGNFDYW

SEQ ID NO: 25361 - protein, 15 aa, Homo sapiens
CATSEAWELTTFDYW

SEQ ID NO: 25362 - protein, 13 aa, Homo sapiens
CNSRDNGGNHQIF

SEQ ID NO: 25363 - protein, 18 aa, Homo sapiens
CARASFTIFGDLNWFDPW

SEQ ID NO: 25364 - protein, 13 aa, Homo sapiens
CAYSGWLDYFQYW

SEQ ID NO: 25365 - protein, 17 aa, Homo sapiens
CAKSWEPAAIPTYFDYW

SEQ ID NO: 25366 - protein, 18 aa, Homo sapiens
CARGPSSIRGYSGYVDYW

SEQ ID NO: 25367 - protein, 11 aa, Homo sapiens
CANLEGAFDLW

SEQ ID NO: 25368 - protein, 15 aa, Homo sapiens
CARDERSSGYYLDYW

SEQ ID NO: 25369 - protein, 16 aa, Homo sapiens
CARDRHDYGDYFFDFW

SEQ ID NO: 25370 - protein, 19 aa, Homo sapiens
CAKGPDPDDCTNGVCSDYW

SEQ ID NO: 25371 - protein, 18 aa, Homo sapiens
CAKDALQARLLYNWFDPW

SEQ ID NO: 25372 - protein, 21 aa, Homo sapiens
CARDHPCSGGSCYSVRRFDPW

SEQ ID NO: 25373 - protein, 15 aa, Homo sapiens
CANWYSTSPKGFDYW

SEQ ID NO: 25374 - protein, 17 aa, Homo sapiens
CARVGIVVDDAEYFQHW

SEQ ID NO: 25375 - protein, 15 aa, Homo sapiens
CARDAADGYPAFAYW

SEQ ID NO: 25376 - protein, 14 aa, Homo sapiens
CAKKRRDSFVFDIW

SEQ ID NO: 25377 - protein, 20 aa, Homo sapiens
CARGPRALQYNLWSGYFVYW

SEQ ID NO: 25378 - protein, 14 aa, Homo sapiens
CARHFASSLYIDFW

SEQ ID NO: 25379 - protein, 17 aa, Homo sapiens
CARQFRMTYTSSSFGYW

SEQ ID NO: 25380 - protein, 15 aa, Homo sapiens
CAKLSSSSAREIDYW

SEQ ID NO: 25381 - protein, 18 aa, Homo sapiens
CARGNGGLFVRLYYFDYW

SEQ ID NO: 25382 - protein, 20 aa, Homo sapiens
CARDLGAPGTKYYYYGLDVW

SEQ ID NO: 25383 - protein, 21 aa, Homo sapiens
CARDGPHNFGTSGYDYYFDYW

SEQ ID NO: 25384 - protein, 20 aa, Homo sapiens
CARDPGTVTTHYYYYYMDVW

SEQ ID NO: 25385 - protein, 18 aa, Homo sapiens
CARDQSYGTSGWHYFDHW

SEQ ID NO: 25386 - protein, 19 aa, Homo sapiens
CAIGVVGEPGAKFGAFNIW

SEQ ID NO: 25387 - protein, 20 aa, Homo sapiens
CAREVLAWIGSPPDDALDIW

SEQ ID NO: 25388 - protein, 18 aa, Homo sapiens
CATFGQQLPTRPYYFDYW

SEQ ID NO: 25389 - protein, 14 aa, Homo sapiens
CAKLAVAGTPADYW

SEQ ID NO: 25390 - protein, 19 aa, Homo sapiens
CAARVAVAGTERGYFLDYW

SEQ ID NO: 25391 - protein, 20 aa, Homo sapiens
CASAGPGFMVRGTQDAFNIW

SEQ ID NO: 25392 - protein, 17 aa, Homo sapiens
CAKGFYYGSGSTPFDYW

SEQ ID NO: 25393 - protein, 20 aa, Homo sapiens
CARDWNSGYDSQYYYGMDVW

SEQ ID NO: 25394 - protein, 21 aa, Homo sapiens
CARDTRYLSSTTYYYYGMDVW

SEQ ID NO: 25395 - protein, 20 aa, Homo sapiens
CAKNEGLGVWSGYTDAFDVW

SEQ ID NO: 25396 - protein, 15 aa, Homo sapiens
CVSQVAFLPGSFDYW

SEQ ID NO: 25397 - protein, 20 aa, Homo sapiens
CATFPVHYYDSSGYYPFDYW

SEQ ID NO: 25398 - protein, 28 aa, Homo sapiens
CARDVMADEYDFWSGYYLPTPYNWFDPW

SEQ ID NO: 25399 - protein, 20 aa, Homo sapiens
CAKLPDYGGNSVGWDAFDIW

SEQ ID NO: 25400 - protein, 17 aa, Homo sapiens
CAHRLDYGSGSPLFDYW

SEQ ID NO: 25401 - protein, 17 aa, Homo sapiens
CAKDLTPIYINGGLDYW

SEQ ID NO: 25402 - protein, 18 aa, Homo sapiens
CAKAYMASLRSIYYMDVW

SEQ ID NO: 25403 - protein, 16 aa, Homo sapiens
CAKGKSGSYWDEIDYW

SEQ ID NO: 25404 - protein, 24 aa, Homo sapiens
CATVKVGDYYDNGGLRFSNAFDLW

SEQ ID NO: 25405 - protein, 14 aa, Homo sapiens
CANLPDSSGYRDNW

SEQ ID NO: 25406 - protein, 20 aa, Homo sapiens
CASIAAAGAPTYYYYGMDVW

SEQ ID NO: 25407 - protein, 22 aa, Homo sapiens
CTRDIAPYGGFWSSYQIRFDPW

SEQ ID NO: 25408 - protein, 17 aa, Homo sapiens
CAHRRTIFGVVDGFDPW

SEQ ID NO: 25409 - protein, 19 aa, Homo sapiens
CVRGPYCTYGVCYKYFDPW

SEQ ID NO: 25410 - protein, 23 aa, Homo sapiens
CARIRREYYDSSGHSPNDAFDIW

SEQ ID NO: 25411 - protein, 18 aa, Homo sapiens
CTTDESLPGAAAQAFDYW

SEQ ID NO: 25412 - protein, 14 aa, Homo sapiens
CVRDQTGSSWFKYW

SEQ ID NO: 25413 - protein, 18 aa, Homo sapiens
CAHRLADSYDFWNLFGYW

SEQ ID NO: 25414 - protein, 22 aa, Homo sapiens
CVIEAGYCGTNSCIFKNGFDPW

SEQ ID NO: 25415 - protein, 18 aa, Homo sapiens
CARDEAGGYSYAYHFDYW

SEQ ID NO: 25416 - protein, 19 aa, Homo sapiens
CALPISLSGYYQGGILDYW

SEQ ID NO: 25417 - protein, 16 aa, Homo sapiens
CAKAGQLYREDGFDIW

SEQ ID NO: 25418 - protein, 20 aa, Homo sapiens
CAKMPARFLEWLYLTHFDHW

SEQ ID NO: 25419 - protein, 19 aa, Homo sapiens
CARATYYDFWSGRTDFDYW

SEQ ID NO: 25420 - protein, 15 aa, Homo sapiens
CAGATFGVVTKFDYW

SEQ ID NO: 25421 - protein, 14 aa, Homo sapiens
CARVDDYTNSFDSW

SEQ ID NO: 25422 - protein, 17 aa, Homo sapiens
CATPGPGPGLRWDFDYW

SEQ ID NO: 25423 - protein, 17 aa, Homo sapiens
CARIGDYAIPEDAFDIW

SEQ ID NO: 25424 - protein, 17 aa, Homo sapiens
CARNPDNISWFIPFDYW

SEQ ID NO: 25425 - protein, 12 aa, Homo sapiens
CQSADSSDMEFF

SEQ ID NO: 25426 - protein, 17 aa, Homo sapiens
CTTECYFDSSGAQIDYW

SEQ ID NO: 25427 - protein, 21 aa, Homo sapiens
CARHSLYCSSTSCWEGWFDPW

SEQ ID NO: 25428 - protein, 19 aa, Homo sapiens
CATYTLRKTISTGRAFDIW

SEQ ID NO: 25429 - protein, 15 aa, Homo sapiens
CAKHSKYGSATEDYW

SEQ ID NO: 25430 - protein, 19 aa, Homo sapiens
CARDPPRIAGASTSPFTYW

SEQ ID NO: 25431 - protein, 16 aa, Homo sapiens
CATGAGDWGRPAFDIW

SEQ ID NO: 25432 - protein, 21 aa, Homo sapiens
CARDPSFWSGYYAYYYGMDVW

SEQ ID NO: 25433 - protein, 21 aa, Homo sapiens
CARMELLLWLGDHYGGPFDYW

SEQ ID NO: 25434 - protein, 18 aa, Homo sapiens
CARVSDMRFLEWLLLDYW

SEQ ID NO: 25435 - protein, 18 aa, Homo sapiens
CARGEWFRSVGLDAFHIW

SEQ ID NO: 25436 - protein, 27 aa, Homo sapiens
CARDPSTHYCSADGCHPSPRQQYFDYW

SEQ ID NO: 25437 - protein, 17 aa, Homo sapiens
CARQSVPIFGDDHSDYW

SEQ ID NO: 25438 - protein, 23 aa, Homo sapiens
CAKGKNVHYYSNSDYDNWYFDLW

SEQ ID NO: 25439 - protein, 13 aa, Homo sapiens
CATGFSASYFDFW

SEQ ID NO: 25440 - protein, 17 aa, Homo sapiens
CARGSDYVTFPHYLDYW

SEQ ID NO: 25441 - protein, 26 aa, Homo sapiens
CLRSEDTAVYYCARGDQKPAFSLDYW

SEQ ID NO: 25442 - protein, 18 aa, Homo sapiens
CAKDQGPIRGRESSFDYW

SEQ ID NO: 25443 - protein, 20 aa, Homo sapiens
CARWITDTDPSYYYYGMDVW

SEQ ID NO: 25444 - protein, 22 aa, Homo sapiens
CARVGHHGTVIVVASPDAFVVW

SEQ ID NO: 25445 - protein, 21 aa, Homo sapiens
CAREEFYDYIWGNYHATIDYW

SEQ ID NO: 25446 - protein, 15 aa, Homo sapiens
CASAIMLREDAFDFW

SEQ ID NO: 25447 - protein, 20 aa, Homo sapiens
CAKDKELGGRIVVVTAFDYW

SEQ ID NO: 25448 - protein, 19 aa, Homo sapiens
CAREYCRGGYCFYEGFDVW

SEQ ID NO: 25449 - protein, 19 aa, Homo sapiens
CAKVSSGDFWSVYDAFDIW

SEQ ID NO: 25450 - protein, 24 aa, Homo sapiens
CASVVIGYCSSTMINCQNNWFDPW

SEQ ID NO: 25451 - protein, 15 aa, Homo sapiens
CAKLGASTNNWFDPW

SEQ ID NO: 25452 - protein, 21 aa, Homo sapiens
CAKDGYPIAAVVHGGSYFDYW

SEQ ID NO: 25453 - protein, 13 aa, Homo sapiens
CLLYYDDAQLGVF

SEQ ID NO: 25454 - protein, 19 aa, Homo sapiens
CARVVPYYDFWSGSPFDYW

SEQ ID NO: 25455 - protein, 11 aa, Homo sapiens
CATSKDSFAYW

SEQ ID NO: 25456 - protein, 19 aa, Homo sapiens
CAKGGYGDYTLLVSYFDLW

SEQ ID NO: 25457 - protein, 15 aa, Homo sapiens
CARLPTAGTGTWDYW

SEQ ID NO: 25458 - protein, 19 aa, Homo sapiens
CAKDHQYQLLLSPGAFDIW

SEQ ID NO: 25459 - protein, 16 aa, Homo sapiens
CARAGGNLGHNWLDPW

SEQ ID NO: 25460 - protein, 17 aa, Homo sapiens
CARAPVWGGTYNWFDFW

SEQ ID NO: 25461 - protein, 19 aa, Homo sapiens
CATDRIVVVPAAQNAFDIW

SEQ ID NO: 25462 - protein, 20 aa, Homo sapiens
CARSYDNTGYRYYYYYMDVW

SEQ ID NO: 25463 - protein, 20 aa, Homo sapiens
CARSGWKKGLVYYYYGMDVW

SEQ ID NO: 25464 - protein, 22 aa, Homo sapiens
CARDAATLSGVVIYSYYYMDVW

SEQ ID NO: 25465 - protein, 14 aa, Homo sapiens
CATVGVGSGYVAYW

SEQ ID NO: 25466 - protein, 16 aa, Homo sapiens
CARLNYGYSLGSFDIW

SEQ ID NO: 25467 - protein, 22 aa, Homo sapiens
CARERYCSSTRCSNYYYYMDVW

SEQ ID NO: 25468 - protein, 19 aa, Homo sapiens
CATLSRYGPYYYYYYMDVW

SEQ ID NO: 25469 - protein, 18 aa, Homo sapiens
CAVFTYYYDSSGYYFDYW

SEQ ID NO: 25470 - protein, 18 aa, Homo sapiens
CASGDAIRIVGANPFDYW

SEQ ID NO: 25471 - protein, 18 aa, Homo sapiens
CAVIEGKYWNNYYYRDVW

SEQ ID NO: 25472 - protein, 13 aa, Homo sapiens
CAKDLSVPWFDPW

SEQ ID NO: 25473 - protein, 19 aa, Homo sapiens
CTTDGLLWFGELLLGIDYW

SEQ ID NO: 25474 - protein, 19 aa, Homo sapiens
CAKSTTIFGVLIMGYFDYW

SEQ ID NO: 25475 - protein, 13 aa, Homo sapiens
CQQHDNWPLSLTF

SEQ ID NO: 25476 - protein, 11 aa, Homo sapiens [sequence omitted]

SEQ ID NO: 25477 - protein, 14 aa, Homo sapiens
CSSSGCNNPWFDPW

SEQ ID NO: 25478 - protein, 15 aa, Homo sapiens
CARAGRSSSAYFDYW

SEQ ID NO: 25479 - protein, 16 aa, Homo sapiens
CVKDDMYGGNGWFDPW

SEQ ID NO: 25480 - protein, 15 aa, Homo sapiens
CVKRAGLIPDRFDFW

SEQ ID NO: 25481 - protein, 19 aa, Homo sapiens
CARDVGYCSSTSCIKFDYW

SEQ ID NO: 25482 - protein, 21 aa, Homo sapiens
CARRGGRIDMDTAMVPDFDYW

SEQ ID NO: 25483 - protein, 22 aa, Homo sapiens
CAKDMAPTQYYDSGGYYYFDYW

SEQ ID NO: 25484 - protein, 15 aa, Homo sapiens
CATLLVGATNWFDPW

SEQ ID NO: 25485 - protein, 23 aa, Homo sapiens
CARDRAVHHIDVRGYYANAFDIW

SEQ ID NO: 25486 - protein, 17 aa, Homo sapiens
CARILGNSGSYYRFDYW

SEQ ID NO: 25487 - protein, 20 aa, Homo sapiens
CARAPQYLNIVLMVYAPDYW

SEQ ID NO: 25488 - protein, 17 aa, Homo sapiens
CARPPPSGGWSYAFDIW

SEQ ID NO: 25489 - protein, 17 aa, Homo sapiens
CAHSKLGISDFDYFDYW

SEQ ID NO: 25490 - protein, 24 aa, Homo sapiens
CARHDQRDYEYMWETYRYSGVDYW

SEQ ID NO: 25491 - protein, 22 aa, Homo sapiens
CTRDPWLPRSLKTLAATSFDYW

SEQ ID NO: 25492 - protein, 19 aa, Homo sapiens
CENDSRVFLLGTDYYFDSW

SEQ ID NO: 25493 - protein, 20 aa, Homo sapiens
CAGAVAASGDYYYYYGMDVW

SEQ ID NO: 25494 - protein, 14 aa, Homo sapiens
CAKWADIKSPIDYW

SEQ ID NO: 25495 - protein, 20 aa, Homo sapiens
CAKDRAWGTYTAPTDAFDLW

SEQ ID NO: 25496 - protein, 18 aa, Homo sapiens
CAKDITKWMVTAPGFDYW

SEQ ID NO: 25497 - protein, 20 aa, Homo sapiens
CARVKTNTMIVVVIQFLDYW

SEQ ID NO: 25498 - protein, 15 aa, Homo sapiens
CAKTPDFWSGFFDYW

SEQ ID NO: 25499 - protein, 14 aa, Homo sapiens
CNSRDNSGIHLALF

SEQ ID NO: 25500 - protein, 21 aa, Homo sapiens
CARVCGDCYSGLGDYDAFDIW

SEQ ID NO: 25501 - protein, 14 aa, Homo sapiens
CARRGMTTEYFDYW

SEQ ID NO: 25502 - protein, 22 aa, Homo sapiens
CARHVWEYYYDSSGYYDAFDIW

SEQ ID NO: 25503 - protein, 18 aa, Homo sapiens
CATTPSSGYNVYWYFDLW

SEQ ID NO: 25504 - protein, 11 aa, Homo sapiens [sequence omitted]

SEQ ID NO: 25505 - protein, 19 aa, Homo sapiens
CARQLRFDFWSGSYAMDVW

SEQ ID NO: 25506 - protein, 22 aa, Homo sapiens
CAREPWAGCSGGRCHRDAFDIW

SEQ ID NO: 25507 - protein, 19 aa, Homo sapiens
CASHRPSDLIWFGEFFDYW

SEQ ID NO: 25508 - protein, 18 aa, Homo sapiens
CAKFSGDSSGHATAFDIW

SEQ ID NO: 25509 - protein, 12 aa, Homo sapiens
CSLATPYYFDYW

SEQ ID NO: 25510 - protein, 16 aa, Homo sapiens
CATTDYGGNLRYFDYW

SEQ ID NO: 25511 - protein, 14 aa, Homo sapiens
CARHNADSRWFDPW

SEQ ID NO: 25512 - protein, 21 aa, Homo sapiens
CARLMEMTPFTRPPVYSFDYW

SEQ ID NO: 25513 - protein, 20 aa, Homo sapiens
CARDLSVCNGTRCYPPADYW

SEQ ID NO: 25514 - protein, 20 aa, Homo sapiens
CARARKSYLSITARGYFDNW

SEQ ID NO: 25515 - protein, 19 aa, Homo sapiens
CAKDRGRLQWELLGPFDYW

SEQ ID NO: 25516 - protein, 17 aa, Homo sapiens
CAKGHSSSWYVCTFDYW

SEQ ID NO: 25517 - protein, 14 aa, Homo sapiens
CARGIAVANVFDIW

SEQ ID NO: 25518 - protein, 21 aa, Homo sapiens
CATIPLYYYDSSGYSRRFDYW

SEQ ID NO: 25519 - protein, 17 aa, Homo sapiens
CARKEKRRIVTYFFDSW

SEQ ID NO: 25520 - protein, 16 aa, Homo sapiens
CAKGGEGYHHLNFDYW

SEQ ID NO: 25521 - protein, 17 aa, Homo sapiens
CARHVWDLITTFNFDSW

SEQ ID NO: 25522 - protein, 17 aa, Homo sapiens
CAKDPVGGYSYGYIDHW

SEQ ID NO: 25523 - protein, 14 aa, Homo sapiens
CARGLRGGGYFDNW

SEQ ID NO: 25524 - protein, 16 aa, Homo sapiens
CARDMTMTTVNTVDYW

SEQ ID NO: 25525 - protein, 15 aa, Homo sapiens
CAKDRIGGNSVFEYW

SEQ ID NO: 25526 - protein, 19 aa, Homo sapiens
CAKFSDCSGGSCYSRLDYW

SEQ ID NO: 25527 - protein, 17 aa, Homo sapiens
CATSFAVWGAARPFDYW

SEQ ID NO: 25528 - protein, 14 aa, Homo sapiens
CGRADRNYWHFDLW

SEQ ID NO: 25529 - protein, 17 aa, Homo sapiens
CARVPGGGYDLASFDSW

SEQ ID NO: 25530 - protein, 18 aa, Homo sapiens
CARDKIDYGDYSDYFDYW

SEQ ID NO: 25531 - protein, 18 aa, Homo sapiens
CARPGCTTTGCHNAFDVW

SEQ ID NO: 25532 - protein, 27 aa, Homo sapiens
CAKTFQLLSSGYDFRSDIKTEGAFDVW

SEQ ID NO: 25533 - protein, 18 aa, Homo sapiens
CARDPSTAWVNGVALDYW

SEQ ID NO: 25534 - protein, 16 aa, Homo sapiens
CARDLSTMTHYYFDYW

SEQ ID NO: 25535 - protein, 18 aa, Homo sapiens
CARERITMVVGAPSPDYW

SEQ ID NO: 25536 - protein, 14 aa, Homo sapiens
CASQSELLEPFHYW

SEQ ID NO: 25537 - protein, 17 aa, Homo sapiens
CARVSSFSSSWYYFDFW

SEQ ID NO: 25538 - protein, 16 aa, Homo sapiens
CAASSGYYPAYQFDYW

SEQ ID NO: 25539 - protein, 17 aa, Homo sapiens
CARAPVVTGIKPDFDYW

SEQ ID NO: 25540 - protein, 13 aa, Homo sapiens
CATRPPEGSFDYW

SEQ ID NO: 25541 - protein, 24 aa, Homo sapiens
CARDFYCSSTRCYRRQYNHYMDVW

SEQ ID NO: 25542 - protein, 17 aa, Homo sapiens
CARGRGSNWGRDYFDYW

SEQ ID NO: 25543 - protein, 16 aa, Homo sapiens
CARDPYGADNWYFDLW

SEQ ID NO: 25544 - protein, 14 aa, Homo sapiens
CATGTGSSYYFDHW

SEQ ID NO: 25545 - protein, 15 aa, Homo sapiens
CARVRSGSDPIFDYW

SEQ ID NO: 25546 - protein, 18 aa, Homo sapiens
CAKDRSRFGELANWFGPW

SEQ ID NO: 25547 - protein, 18 aa, Homo sapiens
CAKDTAIAVAGGGGIDYW

SEQ ID NO: 25548 - protein, 34 aa, Homo sapiens
CDWSSDVCSSDLDTAVYYCAKGRSANYLNDFDYW

SEQ ID NO: 25549 - protein, 12 aa, Homo sapiens
CQQCDDLPQCTF

SEQ ID NO: 25550 - protein, 23 aa, Homo sapiens
CARDRSILGWFGELFGSYHFDYW

SEQ ID NO: 25551 - protein, 11 aa, Homo sapiens
CTNGVCPFDSW

SEQ ID NO: 25552 - protein, 17 aa, Homo sapiens
CARRCSSTTCYRAFDNW

SEQ ID NO: 25553 - protein, 17 aa, Homo sapiens
CAKDKDPVGARYYFDYW

SEQ ID NO: 25554 - protein, 17 aa, Homo sapiens
CVRDDSDYQYYYGMDVW

SEQ ID NO: 25555 - protein, 17 aa, Homo sapiens
CARADMTNPYYYAMDVW

SEQ ID NO: 25556 - protein, 13 aa, Homo sapiens
CASAVVIFDFDSW

SEQ ID NO: 25557 - protein, 12 aa, Homo sapiens
CSSYFYYAVDVW

SEQ ID NO: 25558 - protein, 22 aa, Homo sapiens
CAKSESYYYDDSGKYASHFDSW

SEQ ID NO: 25559 - protein, 22 aa, Homo sapiens
CARIAGSLRGNVFYYYYGMDVW

SEQ ID NO: 25560 - protein, 17 aa, Homo sapiens
CARDRNKYDLFDALDIW

SEQ ID NO: 25561 - protein, 13 aa, Homo sapiens
CQQYGSLPRALTF

SEQ ID NO: 25562 - protein, 16 aa, Homo sapiens
CAHRRSGWLGGYFDYW

SEQ ID NO: 25563 - protein, 25 aa, Homo sapiens
CARGGHCSGTRCNPDNYYFYGMDVW

SEQ ID NO: 25564 - protein, 12 aa, Homo sapiens
CQERANWPQYSF

SEQ ID NO: 25565 - protein, 20 aa, Homo sapiens
CVHRSFFPSSGFNAPYFDYW

SEQ ID NO: 25566 - protein, 21 aa, Homo sapiens
CARGGWGTSCSLYCYYYMDVW

SEQ ID NO: 25567 - protein, 16 aa, Homo sapiens
CTKDISSGYPRLFDFW

SEQ ID NO: 25568 - protein, 17 aa, Homo sapiens
CARQNIEVPGTGYSDYW

SEQ ID NO: 25569 - protein, 21 aa, Homo sapiens
CVRGEGYYDSSGYYWFYFDYW

SEQ ID NO: 25570 - protein, 12 aa, Homo sapiens
CARGSYDPADYW

SEQ ID NO: 25571 - protein, 16 aa, Homo sapiens
CVRALAAAGGGVDDYW

SEQ ID NO: 25572 - protein, 15 aa, Homo sapiens
CAKVGYSYGTDSDYW

SEQ ID NO: 25573 - protein, 12 aa, Homo sapiens
CQQYDYYSKLTF

SEQ ID NO: 25574 - protein, 34 aa, Homo sapiens
CAAYMELISLRSEDTAVYYCARGDQKPAFSLDYW

SEQ ID NO: 25575 - protein, 16 aa, Homo sapiens
CQQSYNVPGWSRTWTF

SEQ ID NO: 25576 - protein, 19 aa, Homo sapiens
CAKAQDVGLVAAPDAFDIW

SEQ ID NO: 25577 - protein, 18 aa, Homo sapiens
CATERFLEWLLTHAFDIW

SEQ ID NO: 25578 - protein, 16 aa, Homo sapiens
CARHMGATPHDPFDLW

SEQ ID NO: 25579 - protein, 12 aa, Homo sapiens
CAAGSFYVIDYW

SEQ ID NO: 25580 - protein, 23 aa, Homo sapiens
CATSPGGYYYDSSGYPIDYFDYW

SEQ ID NO: 25581 - protein, 14 aa, Homo sapiens
CACWSLWELTSDYW

SEQ ID NO: 25582 - protein, 21 aa, Homo sapiens
CARGQLGDEWFFAPFSWFDPW

SEQ ID NO: 25583 - protein, 16 aa, Homo sapiens
CAREGALSGYDVFDYW

SEQ ID NO: 25584 - protein, 14 aa, Homo sapiens
CASLWRWELLPDYW

SEQ ID NO: 25585 - protein, 16 aa, Homo sapiens
CAKDPSTVVTPNFDYW

SEQ ID NO: 25586 - protein, 12 aa, Homo sapiens
CMQALPTFMYTF

SEQ ID NO: 25587 - protein, 17 aa, Homo sapiens
CAKGVAMLRDSGSVDYW

SEQ ID NO: 25588 - protein, 15 aa, Homo sapiens
CAKIESISAPTFDYW

SEQ ID NO: 25589 - protein, 20 aa, Homo sapiens
CVRQAETVTLFGAALFYDYW

SEQ ID NO: 25590 - protein, 13 aa, Homo sapiens
CAKDMPLGGCDYW

SEQ ID NO: 25591 - protein, 14 aa, Homo sapiens
CARAWGPRTQIDYW

SEQ ID NO: 25592 - protein, 13 aa, Homo sapiens
CASGDSSGSFDYW

SEQ ID NO: 25593 - protein, 17 aa, Homo sapiens
CARVRNIDYDYDPLDYW

SEQ ID NO: 25594 - protein, 17 aa, Homo sapiens
CARHHRYVGHPNWFDPW

SEQ ID NO: 25595 - protein, 18 aa, Homo sapiens
CARSKEESGYWEGLFDNW

SEQ ID NO: 25596 - protein, 18 aa, Homo sapiens
CARDTDLYSYVPNPLDYW

SEQ ID NO: 25597 - protein, 16 aa, Homo sapiens
CARPLWFGELEVIDYW

SEQ ID NO: 25598 - protein, 20 aa, Homo sapiens
CARFQLYNTGLPGAIWFDPW

SEQ ID NO: 25599 - protein, 20 aa, Homo sapiens
CARDLALNYYETSGYYDDYW

SEQ ID NO: 25600 - protein, 23 aa, Homo sapiens
CTRLSWRYDLLTDSFIYDVFDIW

SEQ ID NO: 25601 - protein, 17 aa, Homo sapiens
CARTAAETSQLERFDYW

SEQ ID NO: 25602 - protein, 19 aa, Homo sapiens
CARVAPDVGETPQRPFDYW

SEQ ID NO: 25603 - protein, 24 aa, Homo sapiens
CARGHRTLFYSFPTSYYYYYMDVW

SEQ ID NO: 25604 - protein, 14 aa, Homo sapiens
CALISRDGVPFDYW

SEQ ID NO: 25605 - protein, 19 aa, Homo sapiens
CARGGWQQPDRFYYYMDVW

SEQ ID NO: 25606 - protein, 20 aa, Homo sapiens
CAKDSLITIFGVVPTYFDYW

SEQ ID NO: 25607 - protein, 17 aa, Homo sapiens
CSTADPLSPRALRTDYW

SEQ ID NO: 25608 - protein, 13 aa, Homo sapiens
CASHLEASKFDHW

SEQ ID NO: 25609 - protein, 16 aa, Homo sapiens
CARSTSAWFGHAFDIW

SEQ ID NO: 25610 - protein, 16 aa, Homo sapiens
CTKWTITSAGRAFDIW

SEQ ID NO: 25611 - protein, 16 aa, Homo sapiens
CAHRTQWLAPWYFDYW

SEQ ID NO: 25612 - protein, 19 aa, Homo sapiens
CASGTGIAAWDYYYYMDVW

SEQ ID NO: 25613 - protein, 15 aa, Homo sapiens
CACEDFAVFMWFDPW

SEQ ID NO: 25614 - protein, 19 aa, Homo sapiens
CAKESSPGYSSGWYEFDYW

SEQ ID NO: 25615 - protein, 18 aa, Homo sapiens
CARHYCTNGVCHPYFDRW

SEQ ID NO: 25616 - protein, 22 aa, Homo sapiens
CAREGVTEWFSPRYYYYYMDVW

SEQ ID NO: 25617 - protein, 16 aa, Homo sapiens
CARYRETTYYWYFDLW

SEQ ID NO: 25618 - protein, 19 aa, Homo sapiens
CARGHDILTAYHSYYFDYW

SEQ ID NO: 25619 - protein, 25 aa, Homo sapiens
CARDLPYCSSTSCSPDHYYYGMDVW

SEQ ID NO: 25620 - protein, 15 aa, Homo sapiens
CARRRGHGAYYMDVW

SEQ ID NO: 25621 - protein, 17 aa, Homo sapiens
CARLITVFAGQSYFDYW

SEQ ID NO: 25622 - protein, 20 aa, Homo sapiens
CARHFGVVTTVYYYYGVDVW

SEQ ID NO: 25623 - protein, 14 aa, Homo sapiens
CARVWNWNYVLDYW

SEQ ID NO: 25624 - protein, 14 aa, Homo sapiens
CSSYTSYSSTSALF

SEQ ID NO: 25625 - protein, 19 aa, Homo sapiens
CARGPLGSSGWYGNYFDYW

SEQ ID NO: 25626 - protein, 17 aa, Homo sapiens
CARLRGSPKGSYYLDYW

SEQ ID NO: 25627 - protein, 18 aa, Homo sapiens
CATEGIEGSYRRRDFDYW

SEQ ID NO: 25628 - protein, 10 aa, Homo sapiens
CQEFNSYNTF

SEQ ID NO: 25629 - protein, 17 aa, Homo sapiens
CAKGRGNRLRGVTFDQW

SEQ ID NO: 25630 - protein, 14 aa, Homo sapiens
CARTLFATKTVDYW

SEQ ID NO: 25631 - protein, 38 aa, Homo sapiens
CKNSLYLQMSSLRTEDTALYYCAKSSVIAATLSYFDYW

SEQ ID NO: 25632 - protein, 20 aa, Homo sapiens
CARATARFAAGTVWIAFDYW

SEQ ID NO: 25633 - protein, 18 aa, Homo sapiens
CARDGRYGNGYYSAFDIW

SEQ ID NO: 25634 - protein, 15 aa, Homo sapiens
CATSPSSGWLPFDYW

SEQ ID NO: 25635 - protein, 22 aa, Homo sapiens
CGGIAVAGPSPPYYYYYYMDVW

SEQ ID NO: 25636 - protein, 14 aa, Homo sapiens
CARVGIAGRPIDYW

SEQ ID NO: 25637 - protein, 17 aa, Homo sapiens
CVVFGMLTNQGDYMDVW

SEQ ID NO: 25638 - protein, 16 aa, Homo sapiens
CARDYPLISGWYLDSW

SEQ ID NO: 25639 - protein, 20 aa, Homo sapiens
CARNTDIVLMVYALRAFDIW

SEQ ID NO: 25640 - protein, 21 aa, Homo sapiens
CARLQGMSGYFGTLWMYFDLW

SEQ ID NO: 25641 - protein, 16 aa, Homo sapiens
CAKGISRSTWYYFDYW

SEQ ID NO: 25642 - protein, 17 aa, Homo sapiens
CARWSGNWDPYNWFDPW

SEQ ID NO: 25643 - protein, 18 aa, Homo sapiens
CASFLEWSDYYYYGMDVW

SEQ ID NO: 25644 - protein, 15 aa, Homo sapiens
CARVPGWNYLWFDPW

SEQ ID NO: 25645 - protein, 17 aa, Homo sapiens
CAKHYYDSASSYPFDYW

SEQ ID NO: 25646 - protein, 21 aa, Homo sapiens
CARGGDVVVVVAAVRSGFDIW

SEQ ID NO: 25647 - protein, 31 aa, Homo sapiens
CALPICLRSEDTAVYYCARGDQKPAFSLDYW

SEQ ID NO: 25648 - protein, 17 aa, Homo sapiens
CAKCWDIVVVPAPFDPW

SEQ ID NO: 25649 - protein, 13 aa, Homo sapiens
CARIFTRFYFDYW

SEQ ID NO: 25650 - protein, 18 aa, Homo sapiens
CARKHFQYGDTYGLVDYW

SEQ ID NO: 25651 - protein, 16 aa, Homo sapiens
CASGSRSAHINAFDIW

SEQ ID NO: 25652 - protein, 23 aa, Homo sapiens
CATILIAEAGSDPMKVRNYFDYW

SEQ ID NO: 25653 - protein, 18 aa, Homo sapiens
CARTYCGGDCSSNWFDPW

SEQ ID NO: 25654 - protein, 18 aa, Homo sapiens
CAREWSQLAMSGDAFDIW

SEQ ID NO: 25655 - protein, 16 aa, Homo sapiens
CGAVIHNGYNYGFDLW

SEQ ID NO: 25656 - protein, 22 aa, Homo sapiens
CATSCSSTSCYTRGFDYYMDVW

SEQ ID NO: 25657 - protein, 35 aa, Homo sapiens
CQFSLRLTSVTAADAAIYYCVRGAFLEWFHGFDIW

SEQ ID NO: 25658 - protein, 16 aa, Homo sapiens
CVRDGGVGGTDFFDFW

SEQ ID NO: 25659 - protein, 14 aa, Homo sapiens
CANWFPLLDAFDIW

SEQ ID NO: 25660 - protein, 19 aa, Homo sapiens
CAKEKCDDFAPCGYAMDVW

SEQ ID NO: 25661 - protein, 18 aa, Homo sapiens
CARGGPWGGDYHYYMDVW

SEQ ID NO: 25662 - protein, 16 aa, Homo sapiens
CARLGEDFYYYYMDLW

SEQ ID NO: 25663 - protein, 21 aa, Homo sapiens
CARDGRDCNGGICYEGRFDNW

SEQ ID NO: 25664 - protein, 22 aa, Homo sapiens
CARVAPIPAASPPSVYYYMDVW

SEQ ID NO: 25665 - protein, 14 aa, Homo sapiens
CAHIEEWGDYFDYW

SEQ ID NO: 25666 - protein, 12 aa, Homo sapiens
CQSYDDKNNMMF

SEQ ID NO: 25667 - protein, 18 aa, Homo sapiens
CARGGRHYGGSDYYYDYW

SEQ ID NO: 25668 - protein, 11 aa, Homo sapiens
CVKGKYLIDYW

SEQ ID NO: 25669 - protein, 19 aa, Homo sapiens
CARDSTYYTSALYRNFDFW

SEQ ID NO: 25670 - protein, 21 aa, Homo sapiens
CARRIRVPAADYYYYYYMDVW

SEQ ID NO: 25671 - protein, 23 aa, Homo sapiens
CARDRDGYCSSTSCKPRGYLDCW

SEQ ID NO: 25672 - protein, 15 aa, Homo sapiens
CTTSLIRGSYVFDHW

SEQ ID NO: 25673 - protein, 21 aa, Homo sapiens
CATDGGAGTIFRYYYYYMDVW

SEQ ID NO: 25674 - protein, 20 aa, Homo sapiens
CTRVMFGFWSGYNPYYFDYW

SEQ ID NO: 25675 - protein, 22 aa, Homo sapiens
CARATQDYDTLTGYYNGAFDYW

SEQ ID NO: 25676 - protein, 20 aa, Homo sapiens
CAKAPDSSVYYYDYWYFDLW

SEQ ID NO: 25677 - protein, 14 aa, Homo sapiens
CARGGYIYTNFAYW

SEQ ID NO: 25678 - protein, 17 aa, Homo sapiens
CAKGGLPMVYALAPDYW

SEQ ID NO: 25679 - protein, 22 aa, Homo sapiens
CAKDIGYDSSGYYVGGYYFDYW

SEQ ID NO: 25680 - protein, 18 aa, Homo sapiens
CAKDRPYGDEGDGNLDYW

SEQ ID NO: 25681 - protein, 15 aa, Homo sapiens
CARDQSGSSSPADYW

SEQ ID NO: 25682 - protein, 17 aa, Homo sapiens
CATNSPVRGIAAAQDYW

SEQ ID NO: 25683 - protein, 20 aa, Homo sapiens
CARLGDLSGSQSGFNWFDPW

SEQ ID NO: 25684 - protein, 16 aa, Homo sapiens
CAKDRTRRLRVAIDYW

SEQ ID NO: 25685 - protein, 16 aa, Homo sapiens
CAKGSTVTTLGHFDQW

SEQ ID NO: 25686 - protein, 17 aa, Homo sapiens
CARQDFTTIHTTWFDPW

SEQ ID NO: 25687 - protein, 17 aa, Homo sapiens
CARPTTHWAVADAFDIW

SEQ ID NO: 25688 - protein, 13 aa, Homo sapiens
CARQMTSIGFDYW

SEQ ID NO: 25689 - protein, 16 aa, Homo sapiens
CARDRVWLLKSAFDIW

SEQ ID NO: 25690 - protein, 15 aa, Homo sapiens
CAHGGSYSNYYFDYW

SEQ ID NO: 25691 - protein, 14 aa, Homo sapiens
CASDGALSGYYGYW

SEQ ID NO: 25692 - protein, 23 aa, Homo sapiens
CASHFPNYCSSTSCSYYYGMDVW

SEQ ID NO: 25693 - protein, 21 aa, Homo sapiens
CAKDIRGYCSSTSCPGGFDYW

SEQ ID NO: 25694 - protein, 27 aa, Homo sapiens
CAKTYQLLSSGYDVWSDITTEGAFHIW

SEQ ID NO: 25695 - protein, 24 aa, Homo sapiens
CARDPSLSSVMVYAIYTSDAFDVW

SEQ ID NO: 25696 - protein, 16 aa, Homo sapiens
CAKDATSDYGYYIDYW

SEQ ID NO: 25697 - protein, 21 aa, Homo sapiens
CATEPKTYYDFWSGPANFDNW

SEQ ID NO: 25698 - protein, 17 aa, Homo sapiens
CEQWLITDSGSYGFDIW

SEQ ID NO: 25699 - protein, 20 aa, Homo sapiens
CAKDRIVVVTYPYYYGMDVW

SEQ ID NO: 25700 - protein, 18 aa, Homo sapiens
CAKEGGNDYSFQPPFDYW

SEQ ID NO: 25701 - protein, 16 aa, Homo sapiens
CARTLYFGSGTYFDYW

SEQ ID NO: 25702 - protein, 16 aa, Homo sapiens
CAHRRPGIAARPYDYW

SEQ ID NO: 25703 - protein, 20 aa, Homo sapiens
CARFGPHDFWSGYHDAFDIW

SEQ ID NO: 25704 - protein, 23 aa, Homo sapiens
CAKDGWVVPAAIVFSAIGYFDSW

SEQ ID NO: 25705 - protein, 17 aa, Homo sapiens
CARHGIRFLAWSPLDYW

SEQ ID NO: 25706 - protein, 17 aa, Homo sapiens
CAKDNWAVAGAFPLDYW

SEQ ID NO: 25707 - protein, 14 aa, Homo sapiens
CATDCCHPNWFDPW

SEQ ID NO: 25708 - protein, 22 aa, Homo sapiens
CARHDIYSDSSVYSVYESFDPW

SEQ ID NO: 25709 - protein, 17 aa, Homo sapiens
CARDQLWVGELLPLDYW

SEQ ID NO: 25710 - protein, 18 aa, Homo sapiens
CAVPGISVPGSGWYFEIW

SEQ ID NO: 25711 - protein, 16 aa, Homo sapiens
CARDSSGTYPHYFDYW

SEQ ID NO: 25712 - protein, 19 aa, Homo sapiens
CGREVDGYVGYFYYGMDVW

SEQ ID NO: 25713 - protein, 16 aa, Homo sapiens
CATEGRNWGVDAFDIW

SEQ ID NO: 25714 - protein, 21 aa, Homo sapiens
CARESTFFIPDYYYYYYMDVW

SEQ ID NO: 25715 - protein, 15 aa, Homo sapiens
CARDYKATGWGVDYW

SEQ ID NO: 25716 - protein, 20 aa, Homo sapiens
CAAGMYSSSLGYYYYGMDVW

SEQ ID NO: 25717 - protein, 16 aa, Homo sapiens
CARGYSVGSGYFFDYW

SEQ ID NO: 25718 - protein, 20 aa, Homo sapiens
CAHQFYYDYWSGYTAPFDYW

SEQ ID NO: 25719 - protein, 19 aa, Homo sapiens
CARRGSFCSGDCYYWFDPW

SEQ ID NO: 25720 - protein, 22 aa, Homo sapiens
CARDLYAYYYDDSVYFDVFAYW

SEQ ID NO: 25721 - protein, 26 aa, Homo sapiens
CARDLRYCSGGGCYSNFYYYFYVDLW

SEQ ID NO: 25722 - protein, 19 aa, Homo sapiens
CAKGLRGIAAPPVEYFQHW

SEQ ID NO: 25723 - protein, 18 aa, Homo sapiens
CARISSSHDGLQWYFDLW

SEQ ID NO: 25724 - protein, 26 aa, Homo sapiens
CARVSPEVDLYESSVYHFGADYCDYW

SEQ ID NO: 25725 - protein, 16 aa, Homo sapiens
CARDLRGDHGYSIDYW

SEQ ID NO: 25726 - protein, 15 aa, Homo sapiens
CARLDVVGLLNFDQW

SEQ ID NO: 25727 - protein, 23 aa, Homo sapiens
CARNVRYYYDSSGYYYYYYMDVW

SEQ ID NO: 25728 - protein, 14 aa, Homo sapiens
CAKGQFADYEIDYW

SEQ ID NO: 25729 - protein, 16 aa, Homo sapiens
CARVVGQWELLRYDYW

SEQ ID NO: 25730 - protein, 17 aa, Homo sapiens
CARVYSTNAYRAAFDSW

SEQ ID NO: 25731 - protein, 24 aa, Homo sapiens
CARLIVVAPAPRYQGEKKYYFDYW

SEQ ID NO: 25732 - protein, 24 aa, Homo sapiens
CARLARQVLRFVESLKGEDALDMW

SEQ ID NO: 25733 - protein, 24 aa, Homo sapiens
CALNDYSNYFGRVHYYYSYVMDVW

SEQ ID NO: 25734 - protein, 25 aa, Homo sapiens
CAKDLQVLKKTTGGTPPAMITFDVW

SEQ ID NO: 25735 - protein, 15 aa, Homo sapiens
CAKDTYGDSGHFDYW

SEQ ID NO: 25736 - protein, 16 aa, Homo sapiens
CAAGPMDATLVAFDIW

SEQ ID NO: 25737 - protein, 19 aa, Homo sapiens
CARNLAPGVWGSYRPPDYW

SEQ ID NO: 25738 - protein, 19 aa, Homo sapiens
CAKDRKLVAAISIGDLDYW

SEQ ID NO: 25739 - protein, 15 aa, Homo sapiens
CTRMSRTYYTSFDNW

SEQ ID NO: 25740 - protein, 18 aa, Homo sapiens
CARHYISDQMPESWFDPW

SEQ ID NO: 25741 - protein, 22 aa, Homo sapiens
CDWSSDVCSSDLYYQGGILDYW

SEQ ID NO: 25742 - protein, 15 aa, Homo sapiens
CAREIAVAGPCIDYW

SEQ ID NO: 25743 - protein, 14 aa, Homo sapiens
CAPIYVWGTTVDYW

SEQ ID NO: 25744 - protein, 24 aa, Homo sapiens
CARGGCSSTSCYTPAGYYYYMDVW

SEQ ID NO: 25745 - protein, 16 aa, Homo sapiens
CARQTMIRGLIRSDYW

SEQ ID NO: 25746 - protein, 36 aa, Homo sapiens
CTAYMEMSRLRSDDTAVYYCARGIWDSSSFEYFQDW

SEQ ID NO: 25747 - protein, 12 aa, Homo sapiens
CLQFHSYPLIAF

SEQ ID NO: 25748 - protein, 16 aa, Homo sapiens
CAREPPYSSSWYFDLW

SEQ ID NO: 25749 - protein, 19 aa, Homo sapiens
CARGPPSSGYYGFFFKDYW

SEQ ID NO: 25750 - protein, 23 aa, Homo sapiens
CATPMGPYYYDSSGYGADAFDIW

SEQ ID NO: 25751 - protein, 16 aa, Homo sapiens
CAKEDYTSGFSWFGPW

SEQ ID NO: 25752 - protein, 17 aa, Homo sapiens
CASEVGYCTNGVCSDYW

SEQ ID NO: 25753 - protein, 18 aa, Homo sapiens
CVGGDDYDSSGYYYLDYW

SEQ ID NO: 25754 - protein, 13 aa, Homo sapiens
CAASRLPSALDIW

SEQ ID NO: 25755 - protein, 19 aa, Homo sapiens
CQQYGSSPVTFGQGSPVTF

SEQ ID NO: 25756 - protein, 29 aa, Homo sapiens
CLRSEDTAVYYCARTHTAMAIFDYYFDYW

SEQ ID NO: 25757 - protein, 14 aa, Homo sapiens
CARTQGYFYGFDSW

SEQ ID NO: 25758 - protein, 20 aa, Homo sapiens
CAHLMITYGGVTGDDAFDFW

SEQ ID NO: 25759 - protein, 23 aa, Homo sapiens
CAKGLNNYDGSGYYYYHYGMDVW

SEQ ID NO: 25760 - protein, 14 aa, Homo sapiens
CARKGYSGWSIDYW

SEQ ID NO: 25761 - protein, 12 aa, Homo sapiens
CEQSYSPPRFTF

SEQ ID NO: 25762 - protein, 19 aa, Homo sapiens
CAREKDGGFWGSTHWLDPW

SEQ ID NO: 25763 - protein, 35 aa, Homo sapiens
CALPISAMYYCARDLSRVDYGALSGYYQGGILDYW

SEQ ID NO: 25764 - protein, 17 aa, Homo sapiens
CARALWFGDLYYGFDIW

SEQ ID NO: 25765 - protein, 19 aa, Homo sapiens
CAHSQYYDSSGYYVWFDPW

SEQ ID NO: 25766 - protein, 20 aa, Homo sapiens
CARDRLSGSYYDTSGGCDYW

SEQ ID NO: 25767 - protein, 13 aa, Homo sapiens
CQQYDTVPPVFTF

SEQ ID NO: 25768 - protein, 21 aa, Homo sapiens
CARENYGGNPARYTLGYLDYW

SEQ ID NO: 25769 - protein, 22 aa, Homo sapiens
CARHRVAARDYFSPNKYYFDYW

SEQ ID NO: 25770 - protein, 19 aa, Homo sapiens
CARAVIFGEIFRPNWFDPW

SEQ ID NO: 25771 - protein, 19 aa, Homo sapiens
CARLYNWNYADYYYYMDVW

SEQ ID NO: 25772 - protein, 15 aa, Homo sapiens
CARHFVLMGYSHDYW

SEQ ID NO: 25773 - protein, 15 aa, Homo sapiens
CQRYDALPRPSPLTF

SEQ ID NO: 25774 - protein, 13 aa, Homo sapiens
CATYDLLIGFHYW

SEQ ID NO: 25775 - protein, 16 aa, Homo sapiens
CARAQGPLGAYAFDIW

SEQ ID NO: 25776 - protein, 22 aa, Homo sapiens
CVRDIPRNRYFYDSSDSDFDYW

SEQ ID NO: 25777 - protein, 20 aa, Homo sapiens
CVSTVGRHSMKIIGGAFDIW

SEQ ID NO: 25778 - protein, 13 aa, Homo sapiens
CARRDSRSIFDLW

SEQ ID NO: 25779 - protein, 25 aa, Homo sapiens
CAKNRVDDSDNDYYYVPDAEYLQYW

SEQ ID NO: 25780 - protein, 17 aa, Homo sapiens
CASRPLDFSIDWYFDFW

SEQ ID NO: 25781 - protein, 14 aa, Homo sapiens
CAKDNSYDHAFDIW

SEQ ID NO: 25782 - protein, 17 aa, Homo sapiens
CARDWGGYLGFYYFDYW

SEQ ID NO: 25783 - protein, 20 aa, Homo sapiens
CASFPVVPAAPGDYYYMDVW

SEQ ID NO: 25784 - protein, 17 aa, Homo sapiens
CAKVNVVVATINAFDIW

SEQ ID NO: 25785 - protein, 20 aa, Homo sapiens
CDWSSDVCSSDLNPYYFDHW

SEQ ID NO: 25786 - protein, 15 aa, Homo sapiens
CAREGVYSGCDLDYW

SEQ ID NO: 25787 - protein, 20 aa, Homo sapiens
CATGYCSGGSCYHAKTPDYW

SEQ ID NO: 25788 - protein, 20 aa, Homo sapiens
CGREASFVGTHYESNAFDIW

SEQ ID NO: 25789 - protein, 16 aa, Homo sapiens
CARGSSAPTTRWFDPW

SEQ ID NO: 25790 - protein, 17 aa, Homo sapiens
CARDGGPSVGPLHFDYW

SEQ ID NO: 25791 - protein, 19 aa, Homo sapiens
CARAPTGDGTTWSNAFDIW

SEQ ID NO: 25792 - protein, 20 aa, Homo sapiens
CAADPHCTGGNCYSYYFAYW

SEQ ID NO: 25793 - protein, 18 aa, Homo sapiens
CARSRRAVVPAAMAFDYW

SEQ ID NO: 25794 - protein, 22 aa, Homo sapiens
CARAGSYSSSLVAGAEYYFDYW

SEQ ID NO: 25795 - protein, 17 aa, Homo sapiens
CARHTDSLSYPGYFDLW

SEQ ID NO: 25796 - protein, 16 aa, Homo sapiens
CATGENSGWKRTFDYW

SEQ ID NO: 25797 - protein, 20 aa, Homo sapiens
CAKASEYYFKSRVQWAPDYW

SEQ ID NO: 25798 - protein, 14 aa, Homo sapiens
CARPTRTYSYFDLW

SEQ ID NO: 25799 - protein, 20 aa, Homo sapiens
CAKVREVAGPLLLLGYFDYW

SEQ ID NO: 25800 - protein, 17 aa, Homo sapiens
CAKAPYGSGSPAYFDYW

SEQ ID NO: 25801 - protein, 17 aa, Homo sapiens
CARGSDPRIVLHFFDYW

SEQ ID NO: 25802 - protein, 24 aa, Homo sapiens
CTRDVVIAAAGTLIYYYYYYMDVW

SEQ ID NO: 25803 - protein, 15 aa, Homo sapiens
CARGSYDSRDLFDYW

SEQ ID NO: 25804 - protein, 18 aa, Homo sapiens
CARGGLYSSGPYGTLDYW

SEQ ID NO: 25805 - protein, 13 aa, Homo sapiens
CGRGRVVTTVDYW

SEQ ID NO: 25806 - protein, 16 aa, Homo sapiens
CAREEVGFPRGWFDSW

SEQ ID NO: 25807 - protein, 13 aa, Homo sapiens
CATSHNSGYPFDW

SEQ ID NO: 25808 - protein, 15 aa, Homo sapiens
CATKADSGSYSADYW

SEQ ID NO: 25809 - protein, 16 aa, Homo sapiens
CARGVLAVAAHWGDYW

SEQ ID NO: 25810 - protein, 19 aa, Homo sapiens
CARGEIGTTYWEIKYFDFW

SEQ ID NO: 25811 - protein, 15 aa, Homo sapiens
CVTISARYKDATDVW

SEQ ID NO: 25812 - protein, 21 aa, Homo sapiens
CAKNLLVPSNSELYYDVFDMW

SEQ ID NO: 25813 - protein, 18 aa, Homo sapiens
CAHDYYDVLSGYYLLDYW

SEQ ID NO: 25814 - protein, 17 aa, Homo sapiens
CVTESGFSSFWYNFDNW

SEQ ID NO: 25815 - protein, 16 aa, Homo sapiens
CVNPWLFSGKYYFAYW

SEQ ID NO: 25816 - protein, 19 aa, Homo sapiens
CAKDSRLFLMGADYHFDYW

SEQ ID NO: 25817 - protein, 19 aa, Homo sapiens
CASERFWSGHYPPRYFDFW

SEQ ID NO: 25818 - protein, 11 aa, Homo sapiens
CHSYDTSNQVF

SEQ ID NO: 25819 - protein, 21 aa, Homo sapiens
CARAGVIYDVFTGDRDAVDIW

SEQ ID NO: 25820 - protein, 16 aa, Homo sapiens
CARAGGYDLVDAFDIW

SEQ ID NO: 25821 - protein, 14 aa, Homo sapiens
CQSPDSSGFYPMIF

SEQ ID NO: 25822 - protein, 23 aa, Homo sapiens
CARDLQPGITMIVVVITGAYDYW

SEQ ID NO: 25823 - protein, 21 aa, Homo sapiens
CARHESPRRAAAGSLGAFDIW

SEQ ID NO: 25824 - protein, 20 aa, Homo sapiens
CATRSPKEEQQLLGPSFDIW

SEQ ID NO: 25825 - protein, 16 aa, Homo sapiens
CARDPLRDSKPNFDYW

SEQ ID NO: 25826 - protein, 21 aa, Homo sapiens
CAAISYTSTPGAYFYYGMDVW

SEQ ID NO: 25827 - protein, 16 aa, Homo sapiens
CARVGRFFGIHAFDIW

SEQ ID NO: 25828 - protein, 15 aa, Homo sapiens
CAHSPFPYNSGFDPW

SEQ ID NO: 25829 - protein, 18 aa, Homo sapiens
CATGPQNVWSGYYSFDPW

SEQ ID NO: 25830 - protein, 14 aa, Homo sapiens
CATQEMATQRGDYW

SEQ ID NO: 25831 - protein, 18 aa, Homo sapiens
CAKASMIVVVKGWYFDLW

SEQ ID NO: 25832 - protein, 15 aa, Homo sapiens
CAKAPLSGNWHFDIW

SEQ ID NO: 25833 - protein, 19 aa, Homo sapiens
CATDLFYLGVGATELFDYW

SEQ ID NO: 25834 - protein, 15 aa, Homo sapiens
CVKEEYSSSPGGDYW

SEQ ID NO: 25835 - protein, 18 aa, Homo sapiens
CAKGFGVVVAATDAFDIW

SEQ ID NO: 25836 - protein, 16 aa, Homo sapiens
CARVANGVWNYYFDYW

SEQ ID NO: 25837 - protein, 20 aa, Homo sapiens
CQQYGSSLFTFGPGTNLFTF

SEQ ID NO: 25838 - protein, 16 aa, Homo sapiens
CAKVEGEYSSSSGDYW

SEQ ID NO: 25839 - protein, 16 aa, Homo sapiens
CARHGSLSTAFGFDYW

SEQ ID NO: 25840 - protein, 16 aa, Homo sapiens
CAKGANPGIAAGLDYW

SEQ ID NO: 25841 - protein, 13 aa, Homo sapiens
CASDYGGHSFDYW

SEQ ID NO: 25842 - protein, 15 aa, Homo sapiens
CAKDIRPVDDAFDIW

SEQ ID NO: 25843 - protein, 21 aa, Homo sapiens
CARHPGYYDFWSGYQYWFDPW

SEQ ID NO: 25844 - protein, 16 aa, Homo sapiens
CARGLFVINGDVFEIW

SEQ ID NO: 25845 - protein, 20 aa, Homo sapiens
CARLGGYGDRTDYSYYMDVW

SEQ ID NO: 25846 - protein, 11 aa, Homo sapiens
CARLLEVFDIW

SEQ ID NO: 25847 - protein, 17 aa, Homo sapiens
CARGGGGYSYYDWFDPW

SEQ ID NO: 25848 - protein, 14 aa, Homo sapiens
CAHLQFSPYYFDYW

SEQ ID NO: 25849 - protein, 16 aa, Homo sapiens
CAKGSRGYSNFYFDYW

SEQ ID NO: 25850 - protein, 23 aa, Homo sapiens
CARSSYDSSGHYCGGLACPFDYW

SEQ ID NO: 25851 - protein, 16 aa, Homo sapiens
CARSITMVRDDAFDIW

SEQ ID NO: 25852 - protein, 20 aa, Homo sapiens
CASGANYYDSSGYYRLLDYW

SEQ ID NO: 25853 - protein, 22 aa, Homo sapiens
CARDFGKDIVVVPAASDAFDIW

SEQ ID NO: 25854 - protein, 19 aa, Homo sapiens
CARTRADSTGYSRGYSDYW

SEQ ID NO: 25855 - protein, 14 aa, Homo sapiens
CVRYHGAERYFDLW

SEQ ID NO: 25856 - protein, 18 aa, Homo sapiens
CARLVIAAAPRRNYFDYW

SEQ ID NO: 25857 - protein, 21 aa, Homo sapiens
CARDPPDYSGHGDYYYYMDVW

SEQ ID NO: 25858 - protein, 15 aa, Homo sapiens
CAKDLASSGWDFDSW

SEQ ID NO: 25859 - protein, 21 aa, Homo sapiens
CARVEVVVPTLITGRSEFMYW

SEQ ID NO: 25860 - protein, 16 aa, Homo sapiens
CVRGTPFTAKYSFDYW

SEQ ID NO: 25861 - protein, 18 aa, Homo sapiens
CAKGVVIARVHYYYMDVW

SEQ ID NO: 25862 - protein, 15 aa, Homo sapiens
CATKSPGGGYGFDFW

SEQ ID NO: 25863 - protein, 18 aa, Homo sapiens
CARSPTTHHALNYYFDYW

SEQ ID NO: 25864 - protein, 17 aa, Homo sapiens
CASLRGTYSYGSQLDYW

SEQ ID NO: 25865 - protein, 18 aa, Homo sapiens
CARLAYDEANIDMYFDYW

SEQ ID NO: 25866 - protein, 21 aa, Homo sapiens
CARDGSKYYDFWSGYSHFDYW

SEQ ID NO: 25867 - protein, 14 aa, Homo sapiens
CARDPSGLGWFGPW

SEQ ID NO: 25868 - protein, 15 aa, Homo sapiens
CVSRYGGTSDGFDVW

SEQ ID NO: 25869 - protein, 16 aa, Homo sapiens
CARTPHYYDNVYFDYW

SEQ ID NO: 25870 - protein, 21 aa, Homo sapiens
CARDLGIAVAGDRQVSWFDPW

SEQ ID NO: 25871 - protein, 20 aa, Homo sapiens
CARDRCSSTSCYTHNWFDPW

SEQ ID NO: 25872 - protein, 18 aa, Homo sapiens
CARYPSLTAAGVGGFDSW

SEQ ID NO: 25873 - protein, 19 aa, Homo sapiens
CAGGNYYYDSSGERPIDYW

SEQ ID NO: 25874 - protein, 16 aa, Homo sapiens
CARARPDYVGDCFDIW

SEQ ID NO: 25875 - protein, 19 aa, Homo sapiens
CVRRDYSNSNTYSPLFQYW

SEQ ID NO: 25876 - protein, 21 aa, Homo sapiens
CARGGYSSSWPHQEHNWFDPW

SEQ ID NO: 25877 - protein, 19 aa, Homo sapiens
CAKDASYSSSRLPYYFHYW

SEQ ID NO: 25878 - protein, 19 aa, Homo sapiens
CAKDPRGGSGSYYNMFDYW

SEQ ID NO: 25879 - protein, 20 aa, Homo sapiens
CVRVNVWFHGSGYPDAFDIW

SEQ ID NO: 25880 - protein, 14 aa, Homo sapiens
CVSTIVTSYYFDYW

SEQ ID NO: 25881 - protein, 17 aa, Homo sapiens
CARDRWGSGWFRPLDYW

SEQ ID NO: 25882 - protein, 16 aa, Homo sapiens
CAKLGMTTVTGRFDPW

SEQ ID NO: 25883 - protein, 18 aa, Homo sapiens
CASQDWGGSSRAGAFDIW

SEQ ID NO: 25884 - protein, 13 aa, Homo sapiens
CARIRQDGVFDFW

SEQ ID NO: 25885 - protein, 22 aa, Homo sapiens
CASGAARRAYWTAPNYYYMDVW

SEQ ID NO: 25886 - protein, 18 aa, Homo sapiens
CAAATKGWLQWSDAFDIW

SEQ ID NO: 25887 - protein, 11 aa, Homo sapiens
CQQSVTTPFAF

SEQ ID NO: 25888 - protein, 19 aa, Homo sapiens
CATLGYFYDSSGYLALDYW

SEQ ID NO: 25889 - protein, 16 aa, Homo sapiens
CARSQYGSSSLKFDYW

SEQ ID NO: 25890 - protein, 17 aa, Homo sapiens
CASSSRAAILTDVFDVW

SEQ ID NO: 25891 - protein, 20 aa, Homo sapiens
CARGQLYYDILTGWTHFDYW

SEQ ID NO: 25892 - protein, 16 aa, Homo sapiens
CGRSTYYYQDTVFDYW

SEQ ID NO: 25893 - protein, 15 aa, Homo sapiens
CARCKVTGSDAFDLW

SEQ ID NO: 25894 - protein, 19 aa, Homo sapiens
CTTSHPLRIAAAGTALDYW

SEQ ID NO: 25895 - protein, 14 aa, Homo sapiens
CARKATISYYFDYW

SEQ ID NO: 25896 - protein, 18 aa, Homo sapiens
CARLGLVRGVMRGYFDYW

SEQ ID NO: 25897 - protein, 14 aa, Homo sapiens
CAKGHTAMAQVDYW

SEQ ID NO: 25898 - protein, 20 aa, Homo sapiens
CARRGSCASTSCNLGGFDIW

SEQ ID NO: 25899 - protein, 14 aa, Homo sapiens
CAGGGYSYGYSYYW

SEQ ID NO: 25900 - protein, 34 aa, Homo sapiens
CALPILRTEDTAFYYCVKDDYYASGNFASNFDCW

SEQ ID NO: 25901 - protein, 19 aa, Homo sapiens
CARDRGTYYDILTGSVDYW

SEQ ID NO: 25902 - protein, 17 aa, Homo sapiens
CAREPEGGPGPYYYDHW

SEQ ID NO: 25903 - protein, 23 aa, Homo sapiens
CTRHGPDGKAAPNTDYYYYMDVW

SEQ ID NO: 25904 - protein, 23 aa, Homo sapiens
CTIDAKEVLVGSMMFITNYFDYW

SEQ ID NO: 25905 - protein, 17 aa, Homo sapiens
CATRPGAIPSLGQNDYW

SEQ ID NO: 25906 - protein, 12 aa, Homo sapiens
CARSAVTTLDYW

SEQ ID NO: 25907 - protein, 18 aa, Homo sapiens
CAKSMVRGVIITFLFDIW

SEQ ID NO: 25908 - protein, 18 aa, Homo sapiens
CARGKYPYSTPSDWFDPW

SEQ ID NO: 25909 - protein, 21 aa, Homo sapiens
CLRAEDTAVYYCARGYSIDYW

SEQ ID NO: 25910 - protein, 13 aa, Homo sapiens
CVISETRDYFDYW

SEQ ID NO: 25911 - protein, 32 aa, Homo sapiens
CALPISAADTAVYYCATSRVAAAGEPSHFDYW

SEQ ID NO: 25912 - protein, 17 aa, Homo sapiens
CARTPRSSRESSYFDYW

SEQ ID NO: 25913 - protein, 13 aa, Homo sapiens
CARIRQYRGHDYW

SEQ ID NO: 25914 - protein, 17 aa, Homo sapiens
CARRAPDHPEWEGFDPW

SEQ ID NO: 25915 - protein, 19 aa, Homo sapiens
CARNIQGPFFWHNYYMDLW

SEQ ID NO: 25916 - protein, 18 aa, Homo sapiens
CARRVRGDNSRNWYFDLW

SEQ ID NO: 25917 - protein, 18 aa, Homo sapiens
CARDDNNGSSPGRYFDYW

SEQ ID NO: 25918 - protein, 19 aa, Homo sapiens
CAKLPLGRDYYDSSGSDYW

SEQ ID NO: 25919 - protein, 17 aa, Homo sapiens
CARHRKGSGAFFSFDRW

SEQ ID NO: 25920 - protein, 19 aa, Homo sapiens
CASRGNCGGDCNVYYFDYW

SEQ ID NO: 25921 - protein, 18 aa, Homo sapiens
CVTSPIRGDYHVLYFEQW

SEQ ID NO: 25922 - protein, 14 aa, Homo sapiens
CVHRPDWEGWFAPW

SEQ ID NO: 25923 - protein, 20 aa, Homo sapiens
CARGDYYDTRTYSNNAFDVW

SEQ ID NO: 25924 - protein, 18 aa, Homo sapiens
CARHTSPDFWSGFYIDNW

SEQ ID NO: 25925 - protein, 24 aa, Homo sapiens
CAAALGCSSTSCYPYYYYYYMDVW

SEQ ID NO: 25926 - protein, 17 aa, Homo sapiens
CATSRGWITGTPVFDYW

SEQ ID NO: 25927 - protein, 16 aa, Homo sapiens
CARHAHIGYSMHLDYW

SEQ ID NO: 25928 - protein, 16 aa, Homo sapiens
CVSRGYGDSAAAFDVW

SEQ ID NO: 25929 - protein, 16 aa, Homo sapiens
CARAPQGYSFVWLDSW

SEQ ID NO: 25930 - protein, 18 aa, Homo sapiens
CVHRFPAMLRGREAFDYW

SEQ ID NO: 25931 - protein, 20 aa, Homo sapiens
CARDGVYYGSGSPNMYFDYW

SEQ ID NO: 25932 - protein, 16 aa, Homo sapiens
CARQSLFSTSPWEDYW

SEQ ID NO: 25933 - protein, 18 aa, Homo sapiens
CARLGGSSGYYQYYFDYW

SEQ ID NO: 25934 - protein, 21 aa, Homo sapiens
CARLLPFYSNPYYYNYYMDVW

SEQ ID NO: 25935 - protein, 11 aa, Homo sapiens
CQQARSSPYNF

SEQ ID NO: 25936 - protein, 17 aa, Homo sapiens
CARMGIAVPTLGYFDSW

SEQ ID NO: 25937 - protein, 22 aa, Homo sapiens
CAKCKKDYYDGSTYYEYYFDYW

SEQ ID NO: 25938 - protein, 15 aa, Homo sapiens
CARLTLFGEGTFDHW

SEQ ID NO: 25939 - protein, 11 aa, Homo sapiens
CMQARYFPLSF

SEQ ID NO: 25940 - protein, 20 aa, Homo sapiens
CASRYPPTTGYPPKFYFHYW

SEQ ID NO: 25941 - protein, 12 aa, Homo sapiens
CAIVGTSDFDFW

SEQ ID NO: 25942 - protein, 19 aa, Homo sapiens
CAADGYEDYGDFLDAFDIW

SEQ ID NO: 25943 - protein, 20 aa, Homo sapiens
CARRKSRGIVGATSGAFDIW

SEQ ID NO: 25944 - protein, 21 aa, Homo sapiens
CARGPLYCTGAICHLNWFDPW

SEQ ID NO: 25945 - protein, 16 aa, Homo sapiens
CARIDYSTQMGGFDYW

SEQ ID NO: 25946 - protein, 17 aa, Homo sapiens
CARRGVTSGAVPYFDNW

SEQ ID NO: 25947 - protein, 17 aa, Homo sapiens
CATGEITTVTTWPFDYW

SEQ ID NO: 25948 - protein, 15 aa, Homo sapiens
CATDTVAGHRPFEYW

SEQ ID NO: 25949 - protein, 25 aa, Homo sapiens
CARGGWIRTGTTNKPGYYYYYMDVW

SEQ ID NO: 25950 - protein, 18 aa, Homo sapiens
CVRDNDDVWGSYRSFDHW

SEQ ID NO: 25951 - protein, 14 aa, Homo sapiens
CATAPGQEYYFDYW

SEQ ID NO: 25952 - protein, 17 aa, Homo sapiens
CARIRDGYNLYDAFDVW

SEQ ID NO: 25953 - protein, 15 aa, Homo sapiens
CAKDRIAHGGGVDYW

SEQ ID NO: 25954 - protein, 14 aa, Homo sapiens
CAKESSDSSAFDSW

SEQ ID NO: 25955 - protein, 21 aa, Homo sapiens
CTRTGAGSDISYEYFYGMDVW

SEQ ID NO: 25956 - protein, 16 aa, Homo sapiens
CARLCGSDCSWGNDYW

SEQ ID NO: 25957 - protein, 19 aa, Homo sapiens
CTTVNHGWSFRAERLFDYW

SEQ ID NO: 25958 - protein, 27 aa, Homo sapiens
CARVGLKYYYDSTINYKYEGGYYFDQW

SEQ ID NO: 25959 - protein, 21 aa, Homo sapiens
CARGYDTSYHYPPKKSPPDYW

SEQ ID NO: 25960 - protein, 22 aa, Homo sapiens
CTRPTYDYDSSGYSYAEYFQHW

SEQ ID NO: 25961 - protein, 14 aa, Homo sapiens
CAREYYDFTTFSYW

SEQ ID NO: 25962 - protein, 15 aa, Homo sapiens
CARGYSGFESPFDFW

SEQ ID NO: 25963 - protein, 18 aa, Homo sapiens
CARGQVYGSANSYPPDYW

SEQ ID NO: 25964 - protein, 17 aa, Homo sapiens
CATGARRGYDFYYMDVW

SEQ ID NO: 25965 - protein, 21 aa, Homo sapiens
CAKGAPRGRQQLGPYNWFDPW

SEQ ID NO: 25966 - protein, 16 aa, Homo sapiens
CARNTGSYLGDWFDPW

SEQ ID NO: 25967 - protein, 18 aa, Homo sapiens
CARDKLGYDSSGVAFDIW

SEQ ID NO: 25968 - protein, 25 aa, Homo sapiens
CATDPVGHFDPGRYHRRPTRAFDIW

SEQ ID NO: 25969 - protein, 17 aa, Homo sapiens
CVRHVGVLVPAATFAYW

SEQ ID NO: 25970 - protein, 17 aa, Homo sapiens
CARLDDYDSSGYFVDYW

SEQ ID NO: 25971 - protein, 18 aa, Homo sapiens
CTTDEGGDTSGDDAFDIW

SEQ ID NO: 25972 - protein, 26 aa, Homo sapiens
CARHDGRDSSSWSSNPEYYYSGMDVW

SEQ ID NO: 25973 - protein, 18 aa, Homo sapiens
CAKYAIIFGQFVGDLDYW

SEQ ID NO: 25974 - protein, 18 aa, Homo sapiens
CARGSAIYYDSSGYFDYW

SEQ ID NO: 25975 - protein, 16 aa, Homo sapiens
CARDQKVATASALDYW

SEQ ID NO: 25976 - protein, 17 aa, Homo sapiens
CARSVHHDYLYWYLDLW

SEQ ID NO: 25977 - protein, 22 aa, Homo sapiens
CARNAVSYCTGAHCNSGHFPYW

SEQ ID NO: 25978 - protein, 12 aa, Homo sapiens
CNRGQRGAFDIW

SEQ ID NO: 25979 - protein, 14 aa, Homo sapiens
CARQSWGSGHFDYW

SEQ ID NO: 25980 - protein, 22 aa, Homo sapiens
CARRDDPRIAAFNTRNWYFDLW

SEQ ID NO: 25981 - protein, 14 aa, Homo sapiens
CQSFDSSFSGNGVF

SEQ ID NO: 25982 - protein, 24 aa, Homo sapiens
CARGKVAVTIFGVVIARGNWFDPW

SEQ ID NO: 25983 - protein, 15 aa, Homo sapiens
CARMMAAAGMAADYW

SEQ ID NO: 25984 - protein, 17 aa, Homo sapiens
CARWRNDSWGPKGFDPW

SEQ ID NO: 25985 - protein, 21 aa, Homo sapiens
CMYYCARDHPDNDYGDYAGYW

SEQ ID NO: 25986 - protein, 19 aa, Homo sapiens
CARLGGHYYDSTGYYFDSW

SEQ ID NO: 25987 - protein, 14 aa, Homo sapiens
CAKIEAMPRAFDIW

SEQ ID NO: 25988 - protein, 17 aa, Homo sapiens
CAHSVGSRFGSYYFDSW

SEQ ID NO: 25989 - protein, 13 aa, Homo sapiens
CGTRDSSLSPWVF

SEQ ID NO: 25990 - protein, 23 aa, Homo sapiens
CARGNVLRYLEWLSTDPDYFEDW

SEQ ID NO: 25991 - protein, 21 aa, Homo sapiens
CARRKDTDFWSSHPAYYFDFW

SEQ ID NO: 25992 - protein, 22 aa, Homo sapiens
CARDKEDFDFWRGTRKYYMDVW

SEQ ID NO: 25993 - protein, 15 aa, Homo sapiens
CARGSHWDSSSLDYW

SEQ ID NO: 25994 - protein, 20 aa, Homo sapiens
CAKDGKYCSSTSDYCYFDYW

SEQ ID NO: 25995 - protein, 19 aa, Homo sapiens
CASYYYDSSGYYFDGFDIW

SEQ ID NO: 25996 - protein, 21 aa, Homo sapiens
CARVQDYYDSSGYFTNGFDYW

SEQ ID NO: 25997 - protein, 22 aa, Homo sapiens
CAKDLMYDSWSNYYTGDAFDMW

SEQ ID NO: 25998 - protein, 15 aa, Homo sapiens
CMRQRGKGSWSFDHW

SEQ ID NO: 25999 - protein, 23 aa, Homo sapiens
CARDLHQKYCTNGLCSPYYFDYW

SEQ ID NO: 26000 - protein, 17 aa, Homo sapiens
CARDRAMVVVYDAFDLW

SEQ ID NO: 26001 - protein, 20 aa, Homo sapiens
CARRRPDSGYATRDDAFDVW

SEQ ID NO: 26002 - protein, 17 aa, Homo sapiens
CAKSAYVGVYLWAFDVW

SEQ ID NO: 26003 - protein, 21 aa, Homo sapiens
CARHEMFVIAAAGTSNWFDPW

SEQ ID NO: 26004 - protein, 18 aa, Homo sapiens
CARWRFSEWLLPYFFDSW

SEQ ID NO: 26005 - protein, 17 aa, Homo sapiens
CAKARGPVVGLDAFNVW

SEQ ID NO: 26006 - protein, 17 aa, Homo sapiens
CANFGSVGYNYHAFDIW

SEQ ID NO: 26007 - protein, 18 aa, Homo sapiens
CARDLVGAYSAYDPFDYW

SEQ ID NO: 26008 - protein, 20 aa, Homo sapiens
CARPPPFSSGWYLGDAFDIW

SEQ ID NO: 26009 - protein, 25 aa, Homo sapiens
CAREGHIWEACSGGSCYRSQYFDYW

SEQ ID NO: 26010 - protein, 14 aa, Homo sapiens
CQSYDIALSGTVIF

SEQ ID NO: 26011 - protein, 13 aa, Homo sapiens
CVSWGPRDAFDVW

SEQ ID NO: 26012 - protein, 16 aa, Homo sapiens
CARLTGGRPSDAFDIW

SEQ ID NO: 26013 - protein, 18 aa, Homo sapiens
CAKDFNQWDLMPFVFDIW

SEQ ID NO: 26014 - protein, 16 aa, Homo sapiens
CAKGRSENYLNDFDYW

SEQ ID NO: 26015 - protein, 18 aa, Homo sapiens
CAKDGALVIVTTYYFDYW

SEQ ID NO: 26016 - protein, 22 aa, Homo sapiens
CARLVSRYYYDSSGYQYYFDYW

SEQ ID NO: 26017 - protein, 19 aa, Homo sapiens
CAKDSQQLDDRYYYGMDVW

SEQ ID NO: 26018 - protein, 15 aa, Homo sapiens
CARAGDVLGALNDYW

SEQ ID NO: 26019 - protein, 22 aa, Homo sapiens
CARTYYYDSSGYYQTPDYFDYW

SEQ ID NO: 26020 - protein, 18 aa, Homo sapiens
CARDGYYGSGRIQYSDYW

SEQ ID NO: 26021 - protein, 18 aa, Homo sapiens
CAIRGNCSGGNCYTFDHW

SEQ ID NO: 26022 - protein, 18 aa, Homo sapiens
CAKDQFCTDSNCFAFDPW

SEQ ID NO: 26023 - protein, 22 aa, Homo sapiens
CARDERYYYDSSGYSHVPFDIW

SEQ ID NO: 26024 - protein, 20 aa, Homo sapiens
CARIKHDFDSSGYSDTFDIW

SEQ ID NO: 26025 - protein, 15 aa, Homo sapiens
CATSEYNYAYAFDMW

SEQ ID NO: 26026 - protein, 21 aa, Homo sapiens
CARDPLPTTHDGILTSLFDYW

SEQ ID NO: 26027 - protein, 17 aa, Homo sapiens
CARDRPALGYSYACDYW

SEQ ID NO: 26028 - protein, 23 aa, Homo sapiens
CASNLPLGYCSSTSCYGGYFDYW

SEQ ID NO: 26029 - protein, 20 aa, Homo sapiens
CAREAQESTWDFRDDVFDMW

SEQ ID NO: 26030 - protein, 19 aa, Homo sapiens
CARAGADGQWLPSPHMDYW

SEQ ID NO: 26031 - protein, 19 aa, Homo sapiens
CARETPCSGTYLCHYFDYW

SEQ ID NO: 26032 - protein, 28 aa, Homo sapiens
CARRRGYYDSSGYYVSSAFFEDWYFDLW

SEQ ID NO: 26033 - protein, 8 aa, Homo sapiens [sequence omitted]

SEQ ID NO: 26034 - protein, 17 aa, Homo sapiens
CARDCSSTSFYDAFDIW

SEQ ID NO: 26035 - protein, 23 aa, Homo sapiens
CAKTKHYYDSGALLATEQSFDTW

SEQ ID NO: 26036 - protein, 20 aa, Homo sapiens
CATDQGSPRWFGELWAFDIW

SEQ ID NO: 26037 - protein, 16 aa, Homo sapiens
CARASPEMGIHYFDFW

SEQ ID NO: 26038 - protein, 16 aa, Homo sapiens
CAKGLGYSSASGQDYW

SEQ ID NO: 26039 - protein, 16 aa, Homo sapiens
CARDSFYDYGGDVDYW

SEQ ID NO: 26040 - protein, 19 aa, Homo sapiens
CARVFRGDFSAVDHWFDPW

SEQ ID NO: 26041 - protein, 21 aa, Homo sapiens
CAREPYCTTISCYPRWYFDLW

SEQ ID NO: 26042 - protein, 16 aa, Homo sapiens
CAKFADYYDSSGSDYW

SEQ ID NO: 26043 - protein, 15 aa, Homo sapiens
CAKYSSSWLHGFDYW

SEQ ID NO: 26044 - protein, 18 aa, Homo sapiens
CAIYTIFGVVVAEAFDIW

SEQ ID NO: 26045 - protein, 23 aa, Homo sapiens
CARVNYALWRGYFTPTNWYFDLW

SEQ ID NO: 26046 - protein, 15 aa, Homo sapiens
CARDDYYSNYHFDYW

SEQ ID NO: 26047 - protein, 23 aa, Homo sapiens
CARDVALAGTVTYEYISYAMDVW

SEQ ID NO: 26048 - protein, 15 aa, Homo sapiens
CARLDYTTSSLFDYW

SEQ ID NO: 26049 - protein, 17 aa, Homo sapiens
CARHQLAIAPRSAFDIW

SEQ ID NO: 26050 - protein, 15 aa, Homo sapiens
CARDARIMGNPCDSW

SEQ ID NO: 26051 - protein, 19 aa, Homo sapiens
CARGGWTSKSYYYYGMDVW

SEQ ID NO: 26052 - protein, 17 aa, Homo sapiens
CAKSSVIAATLSYFDYW

SEQ ID NO: 26053 - protein, 19 aa, Homo sapiens
CARDPHSILMVSAGYFDYW

SEQ ID NO: 26054 - protein, 23 aa, Homo sapiens
CARTSYYYDSTGGSSYNDAFDMW

SEQ ID NO: 26055 - protein, 33 aa, Homo sapiens
CALPISAVYYCARAKGRISLRYFDWLFHAFDMW

SEQ ID NO: 26056 - protein, 35 aa, Homo sapiens
CDWSSDVCSSDLAFYYCVKDDYYASGNFASNFDCW

SEQ ID NO: 26057 - protein, 15 aa, Homo sapiens
CAHSPPSRSWEFDFW

SEQ ID NO: 26058 - protein, 16 aa, Homo sapiens
CARESETSTSRRLDYW

SEQ ID NO: 26059 - protein, 17 aa, Homo sapiens
CARRAECGSTSCPNDYW

SEQ ID NO: 26060 - protein, 16 aa, Homo sapiens
CARTWYSGSYYKLDYW

SEQ ID NO: 26061 - protein, 24 aa, Homo sapiens
CARSRLGYCSSTSSTCYSPYFQDW

SEQ ID NO: 26062 - protein, 20 aa, Homo sapiens
CATDRSSWYSRQEDYYFDYW

SEQ ID NO: 26063 - protein, 17 aa, Homo sapiens
CAKDILGVALGGYPDYW

SEQ ID NO: 26064 - protein, 17 aa, Homo sapiens
CARGGRYNNGPGVNDYW

SEQ ID NO: 26065 - protein, 16 aa, Homo sapiens
CVRGSLQGGGYYLDYW

SEQ ID NO: 26066 - protein, 22 aa, Homo sapiens
CAKGTGDYDFWGGYPLFYFASW

SEQ ID NO: 26067 - protein, 18 aa, Homo sapiens
CAKDLRILEWLPRAFHIW

SEQ ID NO: 26068 - protein, 12 aa, Homo sapiens
CAKDVWGAFDIW

SEQ ID NO: 26069 - protein, 12 aa, Homo sapiens
CTSLTGMVHDYW

SEQ ID NO: 26070 - protein, 21 aa, Homo sapiens
CATDYYDSSGYYGPTQIFDYW

SEQ ID NO: 26071 - protein, 20 aa, Homo sapiens
CTSAPVGVMVRGRIVTLDYW

SEQ ID NO: 26072 - protein, 17 aa, Homo sapiens
CISGRQQWFGAMQIDYW

SEQ ID NO: 26073 - protein, 18 aa, Homo sapiens
CAKDDLAGTTPRGYLDSW

SEQ ID NO: 26074 - protein, 20 aa, Homo sapiens
CARHSISYYDFWSGSHFDYW

SEQ ID NO: 26075 - protein, 15 aa, Homo sapiens
CTTEEVVVAAANDYW

SEQ ID NO: 26076 - protein, 18 aa, Homo sapiens
CAKDLHSSGWSPNVFDYW

SEQ ID NO: 26077 - protein, 21 aa, Homo sapiens
CARGGDGGYSDSNGYYYFDYW

SEQ ID NO: 26078 - protein, 16 aa, Homo sapiens
CARSRGGSYPDAFDIW

SEQ ID NO: 26079 - protein, 16 aa, Homo sapiens
CAKVKDNSGYKFFDIW

SEQ ID NO: 26080 - protein, 21 aa, Homo sapiens
CARLGPVIPDDILGLRAFDIW

SEQ ID NO: 26081 - protein, 13 aa, Homo sapiens
CTKRYSYDLGDYW

SEQ ID NO: 26082 - protein, 15 aa, Homo sapiens
CARGNSGYYSPFPYW

SEQ ID NO: 26083 - protein, 21 aa, Homo sapiens
CATPLHCSSGNCQLNYYMDVW

SEQ ID NO: 26084 - protein, 16 aa, Homo sapiens
CARSGQYGGYRSFDYW

SEQ ID NO: 26085 - protein, 20 aa, Homo sapiens
CARDPDITISGVFIHAFDYW

SEQ ID NO: 26086 - protein, 18 aa, Homo sapiens
CARSTGLPNFHNYYLDVW

SEQ ID NO: 26087 - protein, 19 aa, Homo sapiens
CARGLSTLSCGYCPYFDYW

SEQ ID NO: 26088 - protein, 22 aa, Homo sapiens
CARDLLNRVLYHPDYYYGMDVW

SEQ ID NO: 26089 - protein, 25 aa, Homo sapiens
CAHRNRRRGRYDFWSGYYTAYFDYW

SEQ ID NO: 26090 - protein, 17 aa, Homo sapiens
CERDPDSGPTKDAFDLW

SEQ ID NO: 26091 - protein, 24 aa, Homo sapiens
CAQSAFFYDSSDYSTATTEYFPHW

SEQ ID NO: 26092 - protein, 17 aa, Homo sapiens
CAKKTRPYGLVDTFDIW

SEQ ID NO: 26093 - protein, 25 aa, Homo sapiens
CARSGGRPHFVVVIAIGVDYYMDVW

SEQ ID NO: 26094 - protein, 15 aa, Homo sapiens
CARGTPTTIKPHDYW

SEQ ID NO: 26095 - protein, 22 aa, Homo sapiens
CAKDRSYYYYDSSGYYHFFDYW

SEQ ID NO: 26096 - protein, 18 aa, Homo sapiens
CAREIPGIAVAGTSHDYW

SEQ ID NO: 26097 - protein, 20 aa, Homo sapiens
CAKIEYGYDSSDSLWYFDLW

SEQ ID NO: 26098 - protein, 13 aa, Homo sapiens
CAHRGILSPFDYW

SEQ ID NO: 26099 - protein, 17 aa, Homo sapiens
CARDMSYTGNPFYFDHW

SEQ ID NO: 26100 - protein, 16 aa, Homo sapiens
CAPLSHSSGYYLTDYW

SEQ ID NO: 26101 - protein, 21 aa, Homo sapiens
CARLITVTTAGYYYYYGMDVW

SEQ ID NO: 26102 - protein, 19 aa, Homo sapiens
CARGGSRSGSYYDYGMDVW

SEQ ID NO: 26103 - protein, 15 aa, Homo sapiens
CAPDGGSLMTNLDYW

SEQ ID NO: 26104 - protein, 19 aa, Homo sapiens
CARRHSTTISGSGDAFDIW

SEQ ID NO: 26105 - protein, 18 aa, Homo sapiens
CARDGKYLPSLAYYFDNW

SEQ ID NO: 26106 - protein, 16 aa, Homo sapiens
CARAGSNWNPKGGDYW

SEQ ID NO: 26107 - protein, 14 aa, Homo sapiens
CARQTNDVLYLDYW

SEQ ID NO: 26108 - protein, 16 aa, Homo sapiens
CARSGSYYYSDSFDMW

SEQ ID NO: 26109 - protein, 17 aa, Homo sapiens
CTKSDGGLGISDHFDPW

SEQ ID NO: 26110 - protein, 16 aa, Homo sapiens
CAKDKVGAPTYVFDYW

SEQ ID NO: 26111 - protein, 18 aa, Homo sapiens
CARAPTWYSGSEGAFDIW

SEQ ID NO: 26112 - protein, 22 aa, Homo sapiens
CARRVDGAKYYDFLSGPLFDHW

SEQ ID NO: 26113 - protein, 19 aa, Homo sapiens
CAVLGGGPPTPRLNWFDPW

SEQ ID NO: 26114 - protein, 19 aa, Homo sapiens
CARGVVTPTTAEKFYFDFW

SEQ ID NO: 26115 - protein, 19 aa, Homo sapiens
CAKAAKVALQLSHNYMDVW

SEQ ID NO: 26116 - protein, 15 aa, Homo sapiens
CNSRDNSANHLGVVF

SEQ ID NO: 26117 - protein, 19 aa, Homo sapiens
CARHRIAATNSRTDAFDIW

SEQ ID NO: 26118 - protein, 16 aa, Homo sapiens
CATHYSYSSSWNPDYW

SEQ ID NO: 26119 - protein, 19 aa, Homo sapiens
CARGGLRFLEWLLHPFDYW

SEQ ID NO: 26120 - protein, 20 aa, Homo sapiens
CARVRFSQWYGGSSRWFDPW

SEQ ID NO: 26121 - protein, 15 aa, Homo sapiens
CAKSRVPGGHNFDIW

SEQ ID NO: 26122 - protein, 14 aa, Homo sapiens
CARYNGRVYRYDYW

SEQ ID NO: 26123 - protein, 18 aa, Homo sapiens
CGRRGLYDNTRDWYFDLW

SEQ ID NO: 26124 - protein, 20 aa, Homo sapiens
CARAYLDTTVILGCAAYDIW

SEQ ID NO: 26125 - protein, 19 aa, Homo sapiens
CARMSYSSSSSGVGWFDPW

SEQ ID NO: 26126 - protein, 20 aa, Homo sapiens
CARDPYPAALGWETNAFDIW

SEQ ID NO: 26127 - protein, 19 aa, Homo sapiens
CARDSSMAAAGSAYYFDYW

SEQ ID NO: 26128 - protein, 21 aa, Homo sapiens
CAREMGRSLGAVAGDDSCDIW

SEQ ID NO: 26129 - protein, 16 aa, Homo sapiens
CVRPRRSSAFYSLDYW

SEQ ID NO: 26130 - protein, 15 aa, Homo sapiens
CARMPRRDGYNFDYW

SEQ ID NO: 26131 - protein, 20 aa, Homo sapiens
CAAFGVLHPLGELLYVGDYW

SEQ ID NO: 26132 - protein, 16 aa, Homo sapiens
CATSTVTLWGDAFDIW

SEQ ID NO: 26133 - protein, 15 aa, Homo sapiens
CARESRNFAEYFQHW

SEQ ID NO: 26134 - protein, 15 aa, Homo sapiens
CAKDMLGEKNAFDIW

SEQ ID NO: 26135 - protein, 22 aa, Homo sapiens
CACTAMAQGGLDYYYYYGMDVW

SEQ ID NO: 26136 - protein, 18 aa, Homo sapiens
CARSPEYVAYLEYYMDVW

SEQ ID NO: 26137 - protein, 12 aa, Homo sapiens
CARHSPKDFDYW

SEQ ID NO: 26138 - protein, 17 aa, Homo sapiens
CARGHSSDGTAYYFDYW

SEQ ID NO: 26139 - protein, 15 aa, Homo sapiens
CARKGIASSWAFDLW

SEQ ID NO: 26140 - protein, 16 aa, Homo sapiens
CVREGDSSRDYAMDVW

SEQ ID NO: 26141 - protein, 16 aa, Homo sapiens
CAKDSGTSVAGAFDIW

SEQ ID NO: 26142 - protein, 17 aa, Homo sapiens
CARRYGSDRPRDAFDVW

SEQ ID NO: 26143 - protein, 17 aa, Homo sapiens
CARREISGNTAGLFDYW

SEQ ID NO: 26144 - protein, 23 aa, Homo sapiens
CVHISKDYDNSGYQYAAEYFNYW

SEQ ID NO: 26145 - protein, 17 aa, Homo sapiens
CVKDMSYGGNCDALDIW

SEQ ID NO: 26146 - protein, 19 aa, Homo sapiens
CATFINYDSSGYGGGFDPW

SEQ ID NO: 26147 - protein, 18 aa, Homo sapiens
CARARIAAAGTTPLFDYW

SEQ ID NO: 26148 - protein, 19 aa, Homo sapiens
CASDCSSTTCLAYDAFDIW

SEQ ID NO: 26149 - protein, 16 aa, Homo sapiens
CARGIDSSGWFVVDYW

SEQ ID NO: 26150 - protein, 18 aa, Homo sapiens
CARRPEGGNSRDWFFDFW

SEQ ID NO: 26151 - protein, 19 aa, Homo sapiens
CARDSEYDHDKIGYDLDYW

SEQ ID NO: 26152 - protein, 22 aa, Homo sapiens
CARDTKPLWATTPFRPYYFDYW

SEQ ID NO: 26153 - protein, 19 aa, Homo sapiens
CAREGTIFGVVTGNWFDPW

SEQ ID NO: 26154 - protein, 17 aa, Homo sapiens
CARVGRSSSWYTPGDYW

SEQ ID NO: 26155 - protein, 20 aa, Homo sapiens
CARGDRYFGSGKGYNWFDPW

SEQ ID NO: 26156 - protein, 25 aa, Homo sapiens
CAAGPGDLYDFWSGYDYYYYGMDVW

SEQ ID NO: 26157 - protein, 13 aa, Homo sapiens
CARLSGSGWIDYW

SEQ ID NO: 26158 - protein, 19 aa, Homo sapiens
CARIPYYDFWSGYYGFDYW

SEQ ID NO: 26159 - protein, 18 aa, Homo sapiens
CARERVGYGGIPYNFDNW

SEQ ID NO: 26160 - protein, 18 aa, Homo sapiens
CARGLILGRNYFDAFDLW

SEQ ID NO: 26161 - protein, 17 aa, Homo sapiens
CARAFGENQLYNWFDPW

SEQ ID NO: 26162 - protein, 20 aa, Homo sapiens
CARDSIAVAGTNYYYGMDVW

SEQ ID NO: 26163 - protein, 21 aa, Homo sapiens
CARDFFLQSDTSGPPDGFDLW

SEQ ID NO: 26164 - protein, 23 aa, Homo sapiens
CARGWFRSGGAGGTYYYYGMDVW

SEQ ID NO: 26165 - protein, 14 aa, Homo sapiens
CARSDYSNYPYDYW

SEQ ID NO: 26166 - protein, 18 aa, Homo sapiens
CARSRYCGNDCYSNFDYW

SEQ ID NO: 26167 - protein, 15 aa, Homo sapiens
CATLSVMTTPIRDYW

SEQ ID NO: 26168 - protein, 18 aa, Homo sapiens
CAREGSDFWSGYNAFDLW

SEQ ID NO: 26169 - protein, 22 aa, Homo sapiens
CARDRLSIAAAGIDYYYGMDVW

SEQ ID NO: 26170 - protein, 24 aa, Homo sapiens
CARGLSEDIVVVPAATPICSFDYW

SEQ ID NO: 26171 - protein, 14 aa, Homo sapiens
CARDPSVPGAMDVW

SEQ ID NO: 26172 - protein, 20 aa, Homo sapiens
CARGGGHILTGYYRDYFDYW

SEQ ID NO: 26173 - protein, 22 aa, Homo sapiens
CARDLLASYGADYYYYYGMDVW

SEQ ID NO: 26174 - protein, 19 aa, Homo sapiens
CARSLYGITMVRGAPIDYW

SEQ ID NO: 26175 - protein, 17 aa, Homo sapiens
CARTIHPGIAAAATDYW

SEQ ID NO: 26176 - protein, 18 aa, Homo sapiens
CARGPHYYDSSATYFDYW

SEQ ID NO: 26177 - protein, 19 aa, Homo sapiens
CASLPYSLTVASPYYFDYW

SEQ ID NO: 26178 - protein, 14 aa, Homo sapiens
CARGRGEVVTIDYW

SEQ ID NO: 26179 - protein, 11 aa, Homo sapiens
CQHYSSYPYIF

SEQ ID NO: 26180 - protein, 17 aa, Homo sapiens
CARDRRIGDTAVVFDYW

SEQ ID NO: 26181 - protein, 14 aa, Homo sapiens
CAREVVGLGGLDYW

SEQ ID NO: 26182 - protein, 39 aa, Homo sapiens
CALPIFSLNLYSVTAADTGMYYCARDHPDNDYGDYAGYW

SEQ ID NO: 26183 - protein, 20 aa, Homo sapiens
CAREGYDSSGYYLTNGGDYW

SEQ ID NO: 26184 - protein, 12 aa, Homo sapiens
CQQYNNWVALSF

SEQ ID NO: 26185 - protein, 26 aa, Homo sapiens
CARHVEALPSAVRLLEDYYNYGMDVW

SEQ ID NO: 26186 - protein, 20 aa, Homo sapiens
CARFRELRHENNALRAFDIW

SEQ ID NO: 26187 - protein, 18 aa, Homo sapiens
CARGIVVVPALIGLFDPW

SEQ ID NO: 26188 - protein, 16 aa, Homo sapiens
CARDAVLAAVTFFDYW

SEQ ID NO: 26189 - protein, 16 aa, Homo sapiens
CASILLWFGNYYFDYW

SEQ ID NO: 26190 - protein, 21 aa, Homo sapiens
CTRTAFVPAAPMGPIYYFDSW

SEQ ID NO: 26191 - protein, 16 aa, Homo sapiens
CARHHNWDHLYYFDSW

SEQ ID NO: 26192 - protein, 20 aa, Homo sapiens
CARTVGGYTYGPSLYYFDSW

SEQ ID NO: 26193 - protein, 21 aa, Homo sapiens
CARGGVIDRNVDLVTTALDYW

SEQ ID NO: 26194 - protein, 16 aa, Homo sapiens
CARDRGFGEFQPFDYW

SEQ ID NO: 26195 - protein, 11 aa, Homo sapiens
CMQRIETSYTF

SEQ ID NO: 26196 - protein, 20 aa, Homo sapiens
CARDRRGIYCSGGPCAFDIW

SEQ ID NO: 26197 - protein, 15 aa, Homo sapiens
CAMARNSWFNRFDPW

SEQ ID NO: 26198 - protein, 18 aa, Homo sapiens
CAGGSWGFWSQAKAFDIW

SEQ ID NO: 26199 - protein, 12 aa, Homo sapiens
CAKVDPNAADYW

SEQ ID NO: 26200 - protein, 15 aa, Homo sapiens
CARWGIVEADAFDVW

SEQ ID NO: 26201 - protein, 17 aa, Homo sapiens
CAKDFWSGYPLPSFDPW

SEQ ID NO: 26202 - protein, 16 aa, Homo sapiens
CAREYKYGGNAAFDAW

SEQ ID NO: 26203 - protein, 19 aa, Homo sapiens
CARCGYCYSSTCYFFFDFW

SEQ ID NO: 26204 - protein, 13 aa, Homo sapiens
CQVWDDSRAHYVF

SEQ ID NO: 26205 - protein, 15 aa, Homo sapiens
CATDCSGGSCYSNYW

SEQ ID NO: 26206 - protein, 18 aa, Homo sapiens
CARGYRYDSSGYDYFDHW

SEQ ID NO: 26207 - protein, 17 aa, Homo sapiens
CARGGSYDILTGPFDYW

SEQ ID NO: 26208 - protein, 18 aa, Homo sapiens
CAKVYYGSGSSFDPFDIW

SEQ ID NO: 26209 - protein, 13 aa, Homo sapiens
CATTNWNSGNDYW

SEQ ID NO: 26210 - protein, 19 aa, Homo sapiens
CVKDRTYNYDSGGYSFDFW

SEQ ID NO: 26211 - protein, 19 aa, Homo sapiens
CARDLYTIFGEKRNWFDPW

SEQ ID NO: 26212 - protein, 16 aa, Homo sapiens
CARHLGGDSPDAFDIW

SEQ ID NO: 26213 - protein, 17 aa, Homo sapiens
CARGRRNSGWSQVFDHW

SEQ ID NO: 26214 - protein, 20 aa, Homo sapiens
CATDYCIGDSCHDVDVFDIW

SEQ ID NO: 26215 - protein, 19 aa, Homo sapiens
CVRDLTGLLEKFPDAFDIW

SEQ ID NO: 26216 - protein, 24 aa, Homo sapiens
CAKDNKDIVVIPATYYYYSYMDVW

SEQ ID NO: 26217 - protein, 22 aa, Homo sapiens
CARDKIKSEMATEDGLYYFDYW

SEQ ID NO: 26218 - protein, 22 aa, Homo sapiens
CARHCSGRANEACYERDFFEYW

SEQ ID NO: 26219 - protein, 18 aa, Homo sapiens
CARDHLDHDLTGYYFDYW

SEQ ID NO: 26220 - protein, 20 aa, Homo sapiens
CARGRGGNYLSYRATGPDYW

SEQ ID NO: 26221 - protein, 24 aa, Homo sapiens
CARGGSVYGDYGGVMAEENVFDIW

SEQ ID NO: 26222 - protein, 17 aa, Homo sapiens
CVKDEAGGYSSWYFDYW

SEQ ID NO: 26223 - protein, 22 aa, Homo sapiens
CAKDGVDTAMVRNYYYYYMDVW

SEQ ID NO: 26224 - protein, 18 aa, Homo sapiens
CARDLFLLTGYLNGFDYW

SEQ ID NO: 26225 - protein, 17 aa, Homo sapiens
CAKDIGAINHGSCPDYW

SEQ ID NO: 26226 - protein, 20 aa, Homo sapiens
CARIRPGWGSTSRRYYFDYW

SEQ ID NO: 26227 - protein, 17 aa, Homo sapiens
CAKGRYYDNSGYCFDYW

SEQ ID NO: 26228 - protein, 13 aa, Homo sapiens
CAATRGSNAFDIW

SEQ ID NO: 26229 - protein, 16 aa, Homo sapiens
CTTEARALRPNAFDIW

SEQ ID NO: 26230 - protein, 23 aa, Homo sapiens
CARHISRKTTLFGAAITDAFDIW

SEQ ID NO: 26231 - protein, 18 aa, Homo sapiens
CAKDPSNGWVNAVAFDYW

SEQ ID NO: 26232 - protein, 17 aa, Homo sapiens
CARARSAIVATKYFDYW

SEQ ID NO: 26233 - protein, 18 aa, Homo sapiens
CARGQPAKYTGLGSFDYW

SEQ ID NO: 26234 - protein, 19 aa, Homo sapiens
CAKDAYVRRNTVFGPFDFW

SEQ ID NO: 26235 - protein, 13 aa, Homo sapiens
CARGYTVGTFDSW

SEQ ID NO: 26236 - protein, 19 aa, Homo sapiens
CAREATVVHLLPEVWFDSW

SEQ ID NO: 26237 - protein, 21 aa, Homo sapiens
CARDPGDSSYYYYARGYFNYW

SEQ ID NO: 26238 - protein, 21 aa, Homo sapiens
CARHGAGGGYYRYYYYAMDVW

SEQ ID NO: 26239 - protein, 17 aa, Homo sapiens
CARDYLPYYFFCAMDVW

SEQ ID NO: 26240 - protein, 24 aa, Homo sapiens
CARIQGTESSDFRTDYRIYYFDYW

SEQ ID NO: 26241 - protein, 12 aa, Homo sapiens
CAQVGAHGSDYW

SEQ ID NO: 26242 - protein, 12 aa, Homo sapiens
CARVRIAAMDVW

SEQ ID NO: 26243 - protein, 21 aa, Homo sapiens
CARVSPPYYEYWRGYYFFDQW

SEQ ID NO: 26244 - protein, 21 aa, Homo sapiens
CAREAYYDSSGYYYFNAFDIW

SEQ ID NO: 26245 - protein, 19 aa, Homo sapiens
CVRARDIKIAVINDGFDVW

SEQ ID NO: 26246 - protein, 17 aa, Homo sapiens
CARDGGRWLTTHRCDYW

SEQ ID NO: 26247 - protein, 17 aa, Homo sapiens
CARGILVEPSANWFDPW

SEQ ID NO: 26248 - protein, 16 aa, Homo sapiens
CALPIYISSLSWSDYW

SEQ ID NO: 26249 - protein, 24 aa, Homo sapiens
CARYQDPENWGFRTPNIIDAFDIW

SEQ ID NO: 26250 - protein, 16 aa, Homo sapiens
CARNFHGSGYYHSDYW

SEQ ID NO: 26251 - protein, 15 aa, Homo sapiens
CARGSDGWYEYFRHW

SEQ ID NO: 26252 - protein, 18 aa, Homo sapiens
CARDYSGHYDKSGYCEYW

SEQ ID NO: 26253 - protein, 17 aa, Homo sapiens
CAKVDSYYDFWSGPDYW

SEQ ID NO: 26254 - protein, 14 aa, Homo sapiens
CARKDYSPGGLDYW

SEQ ID NO: 26255 - protein, 18 aa, Homo sapiens
CARATQTRQQLADPLDYW

SEQ ID NO: 26256 - protein, 21 aa, Homo sapiens
CAREWSDSYDGISYYYGMDVW

SEQ ID NO: 26257 - protein, 21 aa, Homo sapiens
CARPRSSYCGGNCYYYYFDYW

SEQ ID NO: 26258 - protein, 13 aa, Homo sapiens
CVKDQNRLTFDSW

SEQ ID NO: 26259 - protein, 20 aa, Homo sapiens
CAKGNTRFGVVPHYNWFDPW

SEQ ID NO: 26260 - protein, 16 aa, Homo sapiens
CAREVTTVTTLYFDYW

SEQ ID NO: 26261 - protein, 17 aa, Homo sapiens
CARSRIQPPYFYYMDVW

SEQ ID NO: 26262 - protein, 15 aa, Homo sapiens
CAHQIGVGYYGLDYW

SEQ ID NO: 26263 - protein, 20 aa, Homo sapiens
CARVEFDVSTGRINREFDPW

SEQ ID NO: 26264 - protein, 17 aa, Homo sapiens
CARGREGAISFVAFDTW

SEQ ID NO: 26265 - protein, 21 aa, Homo sapiens
CAKDSRLRFLEWPWHDAFDIW

SEQ ID NO: 26266 - protein, 26 aa, Homo sapiens
CAKDVARGCSTNVCSLSDYYYGMDVW

SEQ ID NO: 26267 - protein, 18 aa, Homo sapiens
CARDTQLGSWDFGAFDIW

SEQ ID NO: 26268 - protein, 18 aa, Homo sapiens
CARGGWSSGWATYYMDVW

SEQ ID NO: 26269 - protein, 16 aa, Homo sapiens
CVRHSGDDVGYYYVYW

SEQ ID NO: 26270 - protein, 19 aa, Homo sapiens
CARSYYDILTGYYSSFDYW

SEQ ID NO: 26271 - protein, 19 aa, Homo sapiens
CARDLVIGSSSEYGAFDIW

SEQ ID NO: 26272 - protein, 17 aa, Homo sapiens
CARGQTYYDKRWAFDIW

SEQ ID NO: 26273 - protein, 15 aa, Homo sapiens
CVRERCAESCYPGYW

SEQ ID NO: 26274 - protein, 20 aa, Homo sapiens
CAKGGDTMIVGEYYYYMDVW

SEQ ID NO: 26275 - protein, 19 aa, Homo sapiens
CAKVDCYSTTCFLKTFDYW

SEQ ID NO: 26276 - protein, 21 aa, Homo sapiens
CARHSPSYDSSGYYYVDFDYW

SEQ ID NO: 26277 - protein, 16 aa, Homo sapiens
CARVPLAVMIVVFDYW

SEQ ID NO: 26278 - protein, 14 aa, Homo sapiens
CATFTFWSGYSVYW

SEQ ID NO: 26279 - protein, 17 aa, Homo sapiens
CARVCAGDCYVDAFHFW

SEQ ID NO: 26280 - protein, 17 aa, Homo sapiens
CAKDLGSGNSVRLSDYW

SEQ ID NO: 26281 - protein, 16 aa, Homo sapiens
CTRMADCGGDSRFDPW

SEQ ID NO: 26282 - protein, 22 aa, Homo sapiens
CARDADCGGNCYFPLHYAMDVW

SEQ ID NO: 26283 - protein, 26 aa, Homo sapiens
CARGLPLDWYYDSSGSFILRDAFDMW

SEQ ID NO: 26284 - protein, 22 aa, Homo sapiens
CARFLVWFGELFTSDYAAFDIW

SEQ ID NO: 26285 - protein, 14 aa, Homo sapiens
CARCTVRGVASDYW

SEQ ID NO: 26286 - protein, 20 aa, Homo sapiens
CARDLYSSGWYTSSDAFDIW

SEQ ID NO: 26287 - protein, 13 aa, Homo sapiens
CAKYWAPGALDYW

SEQ ID NO: 26288 - protein, 15 aa, Homo sapiens
CAKGPLALGTFFDIW

SEQ ID NO: 26289 - protein, 14 aa, Homo sapiens
CARVATGTYAFDIW

SEQ ID NO: 26290 - protein, 19 aa, Homo sapiens
CAKDAQQYQLLPHNWFDPW

SEQ ID NO: 26291 - protein, 17 aa, Homo sapiens
CARVSVWVPADDGMDVW

SEQ ID NO: 26292 - protein, 16 aa, Homo sapiens
CARGGSGSFYNGNDYW

SEQ ID NO: 26293 - protein, 18 aa, Homo sapiens
CARQPLSIAARPDYFDYW

SEQ ID NO: 26294 - protein, 16 aa, Homo sapiens
CASRPWFGVPSDFDYW

SEQ ID NO: 26295 - protein, 15 aa, Homo sapiens
CARALPLEEWPLDYW

SEQ ID NO: 26296 - protein, 14 aa, Homo sapiens
CARDIQYSSPNDYW

SEQ ID NO: 26297 - protein, 17 aa, Homo sapiens
CASLYCSSTCLSYMDVW

SEQ ID NO: 26298 - protein, 19 aa, Homo sapiens
CAQGGYYDSSFYYSLFKYW

SEQ ID NO: 26299 - protein, 21 aa, Homo sapiens
CAKEDRTTVVSYYYYYGMDVW

SEQ ID NO: 26300 - protein, 20 aa, Homo sapiens
CAKVGYYYDSSGYSRYFDYW

SEQ ID NO: 26301 - protein, 20 aa, Homo sapiens
CAKGSNFLSGYPVKDAFDFW

SEQ ID NO: 26302 - protein, 16 aa, Homo sapiens
CASCADTAMVTVFDYW

SEQ ID NO: 26303 - protein, 18 aa, Homo sapiens
CAKGGGSGYREDNWFDPW

SEQ ID NO: 26304 - protein, 16 aa, Homo sapiens
CARSKETAGVLWFDPW

SEQ ID NO: 26305 - protein, 13 aa, Homo sapiens
CVSYNIAVATDYW

SEQ ID NO: 26306 - protein, 12 aa, Homo sapiens
CANFGNDTPDYW

SEQ ID NO: 26307 - protein, 23 aa, Homo sapiens
CATTPLKYYDILAGYSPDAFDIW

SEQ ID NO: 26308 - protein, 15 aa, Homo sapiens
CARLTGSYSWYFDVW

SEQ ID NO: 26309 - protein, 15 aa, Homo sapiens
CATLGAYYYYYMDVW

SEQ ID NO: 26310 - protein, 35 aa, Homo sapiens
CARERGDYDFWSGYYFGGGDVVGPPNYYYYGMDVW

SEQ ID NO: 26311 - protein, 15 aa, Homo sapiens
CARQNDILGVAFDYW

SEQ ID NO: 26312 - protein, 19 aa, Homo sapiens
CTRDDWYSDNNGYYYVDHW

SEQ ID NO: 26313 - protein, 19 aa, Homo sapiens
CAHRSLAAAGTENNWFDPW

SEQ ID NO: 26314 - protein, 19 aa, Homo sapiens
CARNDFWSGSPLRNYMDVW

SEQ ID NO: 26315 - protein, 11 aa, Homo sapiens
CANLLQGVDYW

SEQ ID NO: 26316 - protein, 19 aa, Homo sapiens
CARTLCAGDCYSNDAFDVW

SEQ ID NO: 26317 - protein, 22 aa, Homo sapiens
CARKSGLFCSGGSCYWGAFDIW

SEQ ID NO: 26318 - protein, 17 aa, Homo sapiens
CARGLLVLATKSLIDYW

SEQ ID NO: 26319 - protein, 19 aa, Homo sapiens
CARVRPLIAAAGRGFSDYW

SEQ ID NO: 26320 - protein, 16 aa, Homo sapiens
CARVFDGSYKNYFDYW

SEQ ID NO: 26321 - protein, 14 aa, Homo sapiens
CARCLGNSPHFDVW

SEQ ID NO: 26322 - protein, 15 aa, Homo sapiens
CNTFYYHSGGFEDYW

SEQ ID NO: 26323 - protein, 20 aa, Homo sapiens
CARFGPYCASTTCFTGFDYW

SEQ ID NO: 26324 - protein, 24 aa, Homo sapiens
CARDVKPHYCSSTSCSLPYYFDYW

SEQ ID NO: 26325 - protein, 17 aa, Homo sapiens
CANWVYDYGDPGAFDIW

SEQ ID NO: 26326 - protein, 22 aa, Homo sapiens
CAKEAFFRRSGGSYYLPHFDYW

SEQ ID NO: 26327 - protein, 21 aa, Homo sapiens
CARDGLTIFGVEYYYYGMDVW

SEQ ID NO: 26328 - protein, 13 aa, Homo sapiens
CATTRAYSGIDYW

SEQ ID NO: 26329 - protein, 18 aa, Homo sapiens
CARFYCSGNTCYKAFDYW

SEQ ID NO: 26330 - protein, 22 aa, Homo sapiens
CARRSSIRIDYWSGNHTPFDHW

SEQ ID NO: 26331 - protein, 16 aa, Homo sapiens
CARHPLDNKEDYFDYW

SEQ ID NO: 26332 - protein, 15 aa, Homo sapiens
CARTWRYYYFAMDVW

SEQ ID NO: 26333 - protein, 21 aa, Homo sapiens
CTTAAGHWVNSNGVWYLFDYW

SEQ ID NO: 26334 - protein, 18 aa, Homo sapiens
CARDSVTYSSSWYYFDYW

SEQ ID NO: 26335 - protein, 17 aa, Homo sapiens
CAKIGGGESVGWYFDYW

SEQ ID NO: 26336 - protein, 17 aa, Homo sapiens
CARLGLWGSSWYYFDNW

SEQ ID NO: 26337 - protein, 16 aa, Homo sapiens
CARDRQQWLVQGLDYW

SEQ ID NO: 26338 - protein, 11 aa, Homo sapiens
CQLYGSSSYIF

SEQ ID NO: 26339 - protein, 23 aa, Homo sapiens
CDWSSDVCSSDLSGNFASNFDCW

SEQ ID NO: 26340 - protein, 17 aa, Homo sapiens
CARDRGYTYGSIWFDYW

SEQ ID NO: 26341 - protein, 18 aa, Homo sapiens
CAKDIQAAAGMGNYFDYW

SEQ ID NO: 26342 - protein, 21 aa, Homo sapiens
CARGRGGGFLEWFPNYYMDVW

SEQ ID NO: 26343 - protein, 16 aa, Homo sapiens
CAKDHPTVRYSAFDIW

SEQ ID NO: 26344 - protein, 22 aa, Homo sapiens
CARHRRPRVVPAARTLNWFDPW

SEQ ID NO: 26345 - protein, 20 aa, Homo sapiens
CARPLKIWHCGGNCYGFDSW

SEQ ID NO: 26346 - protein, 16 aa, Homo sapiens
CTRRITVITPSHFDSW

SEQ ID NO: 26347 - protein, 13 aa, Homo sapiens [sequence omitted]

SEQ ID NO: 26348 - protein, 18 aa, Homo sapiens
CAMRGNCSGGICNRFDYW

SEQ ID NO: 26349 - protein, 23 aa, Homo sapiens
CAREKEGPSMETALYYYYAMDVW

SEQ ID NO: 26350 - protein, 16 aa, Homo sapiens
CARASIEGSRIEFDYW

SEQ ID NO: 26351 - protein, 12 aa, Homo sapiens
CQQTYGSPLGAF

SEQ ID NO: 26352 - protein, 15 aa, Homo sapiens
CARTMRSASEGFDIW

SEQ ID NO: 26353 - protein, 17 aa, Homo sapiens
CAREEGYTTTTTPLDYW

SEQ ID NO: 26354 - protein, 21 aa, Homo sapiens
CARPAFNYDFWSNNYYYMDVW

SEQ ID NO: 26355 - protein, 16 aa, Homo sapiens
CARHVRSGSGSYPDYW

SEQ ID NO: 26356 - protein, 16 aa, Homo sapiens
CASMTTRFYYYYMDVW

SEQ ID NO: 26357 - protein, 15 aa, Homo sapiens
CARDQSSTAYHFDYW

SEQ ID NO: 26358 - protein, 20 aa, Homo sapiens
CTREIIYSSTRNPKDAFDIW

SEQ ID NO: 26359 - protein, 20 aa, Homo sapiens
CATNLRFSPESSDYYYFDHW

SEQ ID NO: 26360 - protein, 16 aa, Homo sapiens
CVREERNIMEGRFDYW

SEQ ID NO: 26361 - protein, 21 aa, Homo sapiens
CATSHTEGGFRAYYYYGMDVW

SEQ ID NO: 26362 - protein, 17 aa, Homo sapiens
CATPPGYSTTRGAFEIW

SEQ ID NO: 26363 - protein, 16 aa, Homo sapiens
CARDQDSRDEDWFDPW

SEQ ID NO: 26364 - protein, 22 aa, Homo sapiens
CAKDFVRYCTTTSCYPYYFDYW

SEQ ID NO: 26365 - protein, 19 aa, Homo sapiens
CASQEADFWSGYHHPFDHW

SEQ ID NO: 26366 - protein, 15 aa, Homo sapiens
CARDQFPAVAGIDYW

SEQ ID NO: 26367 - protein, 22 aa, Homo sapiens
CATVPREYYYDSSGYYKPFDYW

SEQ ID NO: 26368 - protein, 19 aa, Homo sapiens
CARAQFKAANAGVDAFDIW

SEQ ID NO: 26369 - protein, 16 aa, Homo sapiens
CAHTNDRHYEGSFDPW

SEQ ID NO: 26370 - protein, 40 aa, Homo sapiens
CDWSSDVCSSDLTLHLQMNSLRAEDTAVYYCARGYSIDYW

SEQ ID NO: 26371 - protein, 20 aa, Homo sapiens
CARDRLERRLPYYYYGMDVW

SEQ ID NO: 26372 - protein, 19 aa, Homo sapiens
CARFALDSYSTSWSNFDFW

SEQ ID NO: 26373 - protein, 23 aa, Homo sapiens
CAKDNPDCSSTSCYAPDMIFDYW

SEQ ID NO: 26374 - protein, 22 aa, Homo sapiens
CASLSGTTIIGVVTRGGYFDYW

SEQ ID NO: 26375 - protein, 14 aa, Homo sapiens
CARDKGGDREIDYW

SEQ ID NO: 26376 - protein, 15 aa, Homo sapiens
CARSGGSYYIILDYW

SEQ ID NO: 26377 - protein, 18 aa, Homo sapiens
CARGGRGGDYDWMTFDVW

SEQ ID NO: 26378 - protein, 20 aa, Homo sapiens
CARNGDPGGRRDYSSYMDVW

SEQ ID NO: 26379 - protein, 17 aa, Homo sapiens
CAKLGPAVDYYYGMDVW

SEQ ID NO: 26380 - protein, 15 aa, Homo sapiens
CTKLRSNPRDYLDYW

SEQ ID NO: 26381 - protein, 20 aa, Homo sapiens
CARDPFCPATSSCVLGADYW

SEQ ID NO: 26382 - protein, 15 aa, Homo sapiens
CAYWPYSTRDAFDVW

SEQ ID NO: 26383 - protein, 17 aa, Homo sapiens
CARGPSSWEILNAFDIW

SEQ ID NO: 26384 - protein, 30 aa, Homo sapiens
CALPICLRAEDTAVYYCARSVSYYYGMDVW

SEQ ID NO: 26385 - protein, 21 aa, Homo sapiens
CARGGWKTSGGTTRYYYMDVW

SEQ ID NO: 26386 - protein, 16 aa, Homo sapiens
CVGGSGTYRLSPFDYW

SEQ ID NO: 26387 - protein, 17 aa, Homo sapiens
CATLESLGYSSGWLDYW

SEQ ID NO: 26388 - protein, 19 aa, Homo sapiens
CARASSKYYDSSGYHPDYW

SEQ ID NO: 26389 - protein, 16 aa, Homo sapiens
CAKAEMATTQAPFDYW

SEQ ID NO: 26390 - protein, 16 aa, Homo sapiens
CARDNRYQLNLRLDYW

SEQ ID NO: 26391 - protein, 23 aa, Homo sapiens
CATSWTHYYDPSAYYYYFALDIW

SEQ ID NO: 26392 - protein, 22 aa, Homo sapiens
CARTPTPNVVAMVGAPYYFDPW

SEQ ID NO: 26393 - protein, 23 aa, Homo sapiens
CARDGGSEKKGGIVLLPAAPDYW

SEQ ID NO: 26394 - protein, 17 aa, Homo sapiens
CVRSQGLALTAYPLDYW

SEQ ID NO: 26395 - protein, 13 aa, Homo sapiens
CARLGFINYMDVW

SEQ ID NO: 26396 - protein, 17 aa, Homo sapiens
CARSPKYHMLYDGFDIW

SEQ ID NO: 26397 - protein, 18 aa, Homo sapiens
CARDMGTVAAANLGMDYW

SEQ ID NO: 26398 - protein, 21 aa, Homo sapiens
CATEEVSWTEEGGVTRPLDYW

SEQ ID NO: 26399 - protein, 20 aa, Homo sapiens
CAKGPVRSAGQYYYYGMDVW

SEQ ID NO: 26400 - protein, 19 aa, Homo sapiens
CAKDLGQDGGSYHTSSDYW

SEQ ID NO: 26401 - protein, 16 aa, Homo sapiens
CAREPYMRSSRKFDYW

SEQ ID NO: 26402 - protein, 22 aa, Homo sapiens
CARGKEDYGSGSYYTNNWFDPW

SEQ ID NO: 26403 - protein, 15 aa, Homo sapiens
CATTPFGGVIVKDYW

SEQ ID NO: 26404 - protein, 20 aa, Homo sapiens
CAKVIVVVPAAELGWYFDLW

SEQ ID NO: 26405 - protein, 23 aa, Homo sapiens
CATGSEPIVVVTATRRAWYFDLW

SEQ ID NO: 26406 - protein, 15 aa, Homo sapiens
CARGHSGVTRNFDSW

SEQ ID NO: 26407 - protein, 16 aa, Homo sapiens
CARAHYGDYYYYMDVW

SEQ ID NO: 26408 - protein, 18 aa, Homo sapiens
CARLPSPIVVVVAAFDYW

SEQ ID NO: 26409 - protein, 21 aa, Homo sapiens
CAKDFFRDGYIPRLYGAFNIW

SEQ ID NO: 26410 - protein, 17 aa, Homo sapiens
CASSSDYGDSMQTFDYW

SEQ ID NO: 26411 - protein, 16 aa, Homo sapiens
CAKGGAPSSSWFFDYW

SEQ ID NO: 26412 - protein, 20 aa, Homo sapiens
CARVKDSSWYPPFGWYFDLW

SEQ ID NO: 26413 - protein, 17 aa, Homo sapiens
CARGTRGYQFQYFFDYW

SEQ ID NO: 26414 - protein, 14 aa, Homo sapiens
CARGQKWAYYFDYW

SEQ ID NO: 26415 - protein, 15 aa, Homo sapiens
CARISNLVLPHFDSW

SEQ ID NO: 26416 - protein, 13 aa, Homo sapiens
CASFRFLGGSDYW

SEQ ID NO: 26417 - protein, 17 aa, Homo sapiens
CARDSNGDYLMSAFDIW

SEQ ID NO: 26418 - protein, 27 aa, Homo sapiens
CATESPPADFWSGYPFQNYYYYGMDVW

SEQ ID NO: 26419 - protein, 18 aa, Homo sapiens
CARDKIDGYPSMGWLDPW

SEQ ID NO: 26420 - protein, 23 aa, Homo sapiens
CARALVNYDFWSGYWDLGAFDIW

SEQ ID NO: 26421 - protein, 17 aa, Homo sapiens
CAKPGGDDFWSGYYNYW

SEQ ID NO: 26422 - protein, 19 aa, Homo sapiens
CARGFDFWNNYSPLYLDYW

SEQ ID NO: 26423 - protein, 15 aa, Homo sapiens
CAHRRSGYSGPFDPW

SEQ ID NO: 26424 - protein, 18 aa, Homo sapiens
CARGYCTNGVCYAGWDYW

SEQ ID NO: 26425 - protein, 18 aa, Homo sapiens
CARASTIAVAGRSYFDYW

SEQ ID NO: 26426 - protein, 13 aa, Homo sapiens
CAGDSQGWGFDIW

SEQ ID NO: 26427 - protein, 23 aa, Homo sapiens
CVREASTPRDSWSRYQHYYLDVW

SEQ ID NO: 26428 - protein, 19 aa, Homo sapiens
CATDRSATIGIREDVFDIW

SEQ ID NO: 26429 - protein, 16 aa, Homo sapiens
CARVLTGYYTDGFDIW

SEQ ID NO: 26430 - protein, 20 aa, Homo sapiens
CARFRYCGGGTDCWYDFDYW

SEQ ID NO: 26431 - protein, 17 aa, Homo sapiens
CARDPDTITNPWGGDYW

SEQ ID NO: 26432 - protein, 14 aa, Homo sapiens
CQSADSSDSYYVIF

SEQ ID NO: 26433 - protein, 18 aa, Homo sapiens
CARVHILYYDSSGYFAYW

SEQ ID NO: 26434 - protein, 18 aa, Homo sapiens
CARVTGYYYDSSAYLDYW

SEQ ID NO: 26435 - protein, 20 aa, Homo sapiens
CAHRRMICSNNRCYSDWDYW

SEQ ID NO: 26436 - protein, 25 aa, Homo sapiens
CARGDRQPPSSSWSTFYYYYYMDVW

SEQ ID NO: 26437 - protein, 15 aa, Homo sapiens
CARDAAALGSYFDYW

SEQ ID NO: 26438 - protein, 21 aa, Homo sapiens
CARGLYYDTAGYYYANAFDTW

SEQ ID NO: 26439 - protein, 14 aa, Homo sapiens
CASMQEGFGLPDYW

SEQ ID NO: 26440 - protein, 20 aa, Homo sapiens
CAGSTDMITFGGVIVWGDYW

SEQ ID NO: 26441 - protein, 17 aa, Homo sapiens
CARHVGFGDYFTSFDFW

SEQ ID NO: 26442 - protein, 20 aa, Homo sapiens
CRVDYGVLSGYYQGGILDYW

SEQ ID NO: 26443 - protein, 15 aa, Homo sapiens
CANQHYNFNYYFDLW

SEQ ID NO: 26444 - protein, 19 aa, Homo sapiens
CARHHDSSSWSPPHFFDYW

SEQ ID NO: 26445 - protein, 24 aa, Homo sapiens
CAHRPGVDFYELGGYISEDFFDSW

SEQ ID NO: 26446 - protein, 23 aa, Homo sapiens
CAKDGKSWIQLWSRYLDGYFDYW

SEQ ID NO: 26447 - protein, 14 aa, Homo sapiens
CARGPHPLNWFDPW

SEQ ID NO: 26448 - protein, 16 aa, Homo sapiens
CARHFYSNYPYGIDYW

SEQ ID NO: 26449 - protein, 18 aa, Homo sapiens
CAKVESSWYNYYYAMDVW

SEQ ID NO: 26450 - protein, 20 aa, Homo sapiens
CATDSLNRGYSSSSWGFDYW

SEQ ID NO: 26451 - protein, 13 aa, Homo sapiens
CAKGGYDSYFHYW

SEQ ID NO: 26452 - protein, 20 aa, Homo sapiens
CARDFLAVGEFYYYYGMDVW

SEQ ID NO: 26453 - protein, 17 aa, Homo sapiens
CAKDGSSYNYPRSIDYW

SEQ ID NO: 26454 - protein, 12 aa, Homo sapiens
CASTVADKFDYW

SEQ ID NO: 26455 - protein, 20 aa, Homo sapiens
CMRRRAYHDFWSGYRPLDYW

SEQ ID NO: 26456 - protein, 23 aa, Homo sapiens
CATVFPPSYYYDSSGYYSYFDYW

SEQ ID NO: 26457 - protein, 10 aa, Homo sapiens
CTINDALDIW

SEQ ID NO: 26458 - protein, 10 aa, Homo sapiens
CAIKFYCDYW

SEQ ID NO: 26459 - protein, 18 aa, Homo sapiens
CATGWTYYYDSSGYFQHW

SEQ ID NO: 26460 - protein, 13 aa, Homo sapiens
CAKTGGGYWFDSW

SEQ ID NO: 26461 - protein, 25 aa, Homo sapiens
CLRAEDTAIYYCAKDHVAGRNVDYW

SEQ ID NO: 26462 - protein, 18 aa, Homo sapiens
CAKDPMVAEDYYYGMDVW

SEQ ID NO: 26463 - protein, 14 aa, Homo sapiens
CAKEVLMWELTDYW

SEQ ID NO: 26464 - protein, 22 aa, Homo sapiens
CAKGGRYYDSSGYWGDYYFDYW

SEQ ID NO: 26465 - protein, 20 aa, Homo sapiens
CARDLAKGGNSGYDWTLDYW

SEQ ID NO: 26466 - protein, 26 aa, Homo sapiens
CARSPLTYYYDSSGHWSGRATAFDIW

SEQ ID NO: 26467 - protein, 15 aa, Homo sapiens
CAHSHDFWSGYYVYW

SEQ ID NO: 26468 - protein, 20 aa, Homo sapiens
CARHANCTSTSCYKAYFQRW

SEQ ID NO: 26469 - protein, 32 aa, Homo sapiens
CALPICLRASDTAIYYCARLGAARGHEAFDYW

SEQ ID NO: 26470 - protein, 14 aa, Homo sapiens
CTRMVITPYYFDYW

SEQ ID NO: 26471 - protein, 21 aa, Homo sapiens
CARDTTRNQGPNYYYYGMDVW

SEQ ID NO: 26472 - protein, 14 aa, Homo sapiens
CAREEYALGAFDIW

SEQ ID NO: 26473 - protein, 14 aa, Homo sapiens
CARGDILTDLFDYW

SEQ ID NO: 26474 - protein, 21 aa, Homo sapiens
CARDTAVASKHYFYLNYIDVW

SEQ ID NO: 26475 - protein, 17 aa, Homo sapiens
CAGRVSVTEEIGWIDPW

SEQ ID NO: 26476 - protein, 16 aa, Homo sapiens
CSRPQTGSRPSAFDIW

SEQ ID NO: 26477 - protein, 13 aa, Homo sapiens
CVRALGSTVLDYW

SEQ ID NO: 26478 - protein, 18 aa, Homo sapiens
CARLSSLSGFLQWLFDHW

SEQ ID NO: 26479 - protein, 18 aa, Homo sapiens
CARRGLQNLEWLFPFDPW

SEQ ID NO: 26480 - protein, 15 aa, Homo sapiens
CARGETALVAPFDSW

SEQ ID NO: 26481 - protein, 22 aa, Homo sapiens
CARDTYYYDSSGAAYYYGMDVW

SEQ ID NO: 26482 - protein, 23 aa, Homo sapiens
CALRIAARPLSASYYYYYGMDVW

SEQ ID NO: 26483 - protein, 12 aa, Homo sapiens [sequence omitted]

SEQ ID NO: 26484 - protein, 23 aa, Homo sapiens
CATGSARPAPRGYYYYYYGMDVW

SEQ ID NO: 26485 - protein, 16 aa, Homo sapiens
CARASTGDYRDAFDIW

SEQ ID NO: 26486 - protein, 17 aa, Homo sapiens
CTKDINGDYNYWYFDLW

SEQ ID NO: 26487 - protein, 19 aa, Homo sapiens
CARGGDSSGYSNWRNFDYW

SEQ ID NO: 26488 - protein, 16 aa, Homo sapiens
CAKDWLATVVTAFDYW

SEQ ID NO: 26489 - protein, 14 aa, Homo sapiens
CARENYDDYSFDFW

SEQ ID NO: 26490 - protein, 19 aa, Homo sapiens
CARSQARRIFGVVTYFDYW

SEQ ID NO: 26491 - protein, 17 aa, Homo sapiens
CARVTFGYSYGINFDYW

SEQ ID NO: 26492 - protein, 11 aa, Homo sapiens [sequence omitted]

SEQ ID NO: 26493 - protein, 16 aa, Homo sapiens
CARGTGGWFPHVFDFW

SEQ ID NO: 26494 - protein, 15 aa, Homo sapiens
CAVWQYQPLRSFDYW

SEQ ID NO: 26495 - protein, 16 aa, Homo sapiens
CARGDGWVAPNWFDPW

SEQ ID NO: 26496 - protein, 16 aa, Homo sapiens
CARAPGDFLDPPFDYW

SEQ ID NO: 26497 - protein, 17 aa, Homo sapiens
CASVTRYDSSGYYPDYW

SEQ ID NO: 26498 - protein, 15 aa, Homo sapiens
CAKEPGDFVGYFDKW

SEQ ID NO: 26499 - protein, 23 aa, Homo sapiens
CATSYCGSTRCSLSSPSRPFDYW

SEQ ID NO: 26500 - protein, 15 aa, Homo sapiens
CAKLAGEADYYDDHW

SEQ ID NO: 26501 - protein, 21 aa, Homo sapiens
CARWSGYCSGDNCPPYGFDIW

SEQ ID NO: 26502 - protein, 19 aa, Homo sapiens
CARVASIAALAGADAFDIW

SEQ ID NO: 26503 - protein, 13 aa, Homo sapiens
CASSFQSGTFDYW

SEQ ID NO: 26504 - protein, 18 aa, Homo sapiens
CARGYSGYDDGLNWFDPW

SEQ ID NO: 26505 - protein, 20 aa, Homo sapiens
CARLNYDILTGYSQYYFDYW

SEQ ID NO: 26506 - protein, 20 aa, Homo sapiens
CVREDALNRARYFSDYMDVW

SEQ ID NO: 26507 - protein, 17 aa, Homo sapiens
CARARPYSGSWSPFDYW

SEQ ID NO: 26508 - protein, 18 aa, Homo sapiens
CAKEGEAVTTIRGYFDYW

SEQ ID NO: 26509 - protein, 16 aa, Homo sapiens
CTTDLARLWGFAFDIW

SEQ ID NO: 26510 - protein, 18 aa, Homo sapiens
CARDSGSYSSSVWYFDLW

SEQ ID NO: 26511 - protein, 24 aa, Homo sapiens
CARFSPLGLNDFWSGYYTGAFDIW

SEQ ID NO: 26512 - protein, 21 aa, Homo sapiens
CARSEGGVHYYDSSGYWFDYW

SEQ ID NO: 26513 - protein, 17 aa, Homo sapiens
CAKEGYTYGSLDYFQHW

SEQ ID NO: 26514 - protein, 14 aa, Homo sapiens
CMQTLPTPPDMYTF

SEQ ID NO: 26515 - protein, 17 aa, Homo sapiens
CVREPTYCGGDCSSDYW

SEQ ID NO: 26516 - protein, 23 aa, Homo sapiens
CARDPAYCSSTSCHLGTEPFDVW

SEQ ID NO: 26517 - protein, 26 aa, Homo sapiens
CARQGPTRYCSSTSCSSSFVAPFDYW

SEQ ID NO: 26518 - protein, 13 aa, Homo sapiens
CAKNFLGPDHDYW

SEQ ID NO: 26519 - protein, 17 aa, Homo sapiens
CARDSIVLFVAAHFDSW

SEQ ID NO: 26520 - protein, 15 aa, Homo sapiens
CAKLSLAAAGINDYW

SEQ ID NO: 26521 - protein, 15 aa, Homo sapiens
CASGLISSSSWLDYW

SEQ ID NO: 26522 - protein, 18 aa, Homo sapiens
CARGTYYYDSSALAFDIW

SEQ ID NO: 26523 - protein, 15 aa, Homo sapiens
CQTWGTGIHGGLWVF

SEQ ID NO: 26524 - protein, 22 aa, Homo sapiens
CARTLSSNYPSVRAYYYYMDVW

SEQ ID NO: 26525 - protein, 17 aa, Homo sapiens
CARRKYGDFFQGFFDYW

SEQ ID NO: 26526 - protein, 15 aa, Homo sapiens
CAKNSLVLMVYPDYW

SEQ ID NO: 26527 - protein, 19 aa, Homo sapiens
CSHTGYDSSLLTPIYFDYW

SEQ ID NO: 26528 - protein, 18 aa, Homo sapiens
CARTYHYATTGESYFDYW

SEQ ID NO: 26529 - protein, 13 aa, Homo sapiens
CIRPTLPGGFDYW

SEQ ID NO: 26530 - protein, 11 aa, Homo sapiens
CQEYYSTASQF

SEQ ID NO: 26531 - protein, 20 aa, Homo sapiens
CARGRAEVGLYKRPYYFASW

SEQ ID NO: 26532 - protein, 21 aa, Homo sapiens
CARVEGACRGDSCYVDPFDIW

SEQ ID NO: 26533 - protein, 19 aa, Homo sapiens
CARVKSIFGVIVGSDFDYW

SEQ ID NO: 26534 - protein, 22 aa, Homo sapiens
CARDQLGDSGNGYGYYYGMDVW

SEQ ID NO: 26535 - protein, 15 aa, Homo sapiens
CAAVGQSSGWYTGYW

SEQ ID NO: 26536 - protein, 13 aa, Homo sapiens
CARSFHNSAPDYW

SEQ ID NO: 26537 - protein, 23 aa, Homo sapiens
CAREPPEMATILSYYYYYGMDVW

SEQ ID NO: 26538 - protein, 20 aa, Homo sapiens
CAHRQPSTSRGWDEGVFDYW

SEQ ID NO: 26539 - protein, 19 aa, Homo sapiens
CARFPAAGSLYYYYYMDVW

SEQ ID NO: 26540 - protein, 24 aa, Homo sapiens
CARLDSGGYTFLSSGRKNYPLDYW

SEQ ID NO: 26541 - protein, 14 aa, Homo sapiens
CATTPSQYSSSDYW

SEQ ID NO: 26542 - protein, 19 aa, Homo sapiens
CARDEVTLFSVISGYFDYW

SEQ ID NO: 26543 - protein, 21 aa, Homo sapiens
CARQRGVGFLEWSMPDAFDIW

SEQ ID NO: 26544 - protein, 13 aa, Homo sapiens
CARTQQQLSLDYW

SEQ ID NO: 26545 - protein, 15 aa, Homo sapiens
CARGYGTRQEWFDPW

SEQ ID NO: 26546 - protein, 11 aa, Homo sapiens
CRVVSADFDSW

SEQ ID NO: 26547 - protein, 15 aa, Homo sapiens
CAGNYYGSGSYNDYW

SEQ ID NO: 26548 - protein, 19 aa, Homo sapiens
CAKRGSSSSGRVYDAFDVW

SEQ ID NO: 26549 - protein, 16 aa, Homo sapiens
CTSLTYYDSGRYSDYW

SEQ ID NO: 26550 - protein, 13 aa, Homo sapiens
CARGSIFRSFHYW

SEQ ID NO: 26551 - protein, 17 aa, Homo sapiens
CARGEEWIFGVVYPDSW

SEQ ID NO: 26552 - protein, 21 aa, Homo sapiens
CARVRSTSAPTSYYYYYMDVW

SEQ ID NO: 26553 - protein, 16 aa, Homo sapiens
CASWFEGGGNSPFGYW

SEQ ID NO: 26554 - protein, 16 aa, Homo sapiens
CARDAGAWFKWHFDFW

SEQ ID NO: 26555 - protein, 19 aa, Homo sapiens
CATTTTHYYDPDDFLFDYW

SEQ ID NO: 26556 - protein, 19 aa, Homo sapiens
CARLPGIAAAGTTFYFDYW

SEQ ID NO: 26557 - protein, 13 aa, Homo sapiens
CASREYYDSLDVW

SEQ ID NO: 26558 - protein, 22 aa, Homo sapiens
CARGGYCRGRSCYSFLLDIDYW

SEQ ID NO: 26559 - protein, 17 aa, Homo sapiens
CAREGSGSGSGNYFHIW

SEQ ID NO: 26560 - protein, 14 aa, Homo sapiens
CASGPRPHTAFDIW

SEQ ID NO: 26561 - protein, 21 aa, Homo sapiens
CACGSSHIPVAKPNNNAFDIW

SEQ ID NO: 26562 - protein, 14 aa, Homo sapiens
CATSIATARRGDYW

SEQ ID NO: 26563 - protein, 12 aa, Homo sapiens [sequence omitted]

SEQ ID NO: 26564 - protein, 23 aa, Homo sapiens
CAKAMYQDFKALGIRRTDFFDIW

SEQ ID NO: 26565 - protein, 18 aa, Homo sapiens
CARGVFSTIAARSVFDFW

SEQ ID NO: 26566 - protein, 18 aa, Homo sapiens
CAKVGAAAGKRGYYFDYW

SEQ ID NO: 26567 - protein, 17 aa, Homo sapiens
CARVYRDSSGWFLIDYW

SEQ ID NO: 26568 - protein, 15 aa, Homo sapiens
CATQKSLVTVNFDSW

SEQ ID NO: 26569 - protein, 17 aa, Homo sapiens
CAKVGMIGGTMAAFDIW

SEQ ID NO: 26570 - protein, 20 aa, Homo sapiens
CARGAVAHLGVYYYYGMDVW

SEQ ID NO: 26571 - protein, 17 aa, Homo sapiens
CATGYGSGSFYDAFDMW

SEQ ID NO: 26572 - protein, 19 aa, Homo sapiens
CANHPYGYGYVYYYYMDVW

SEQ ID NO: 26573 - protein, 20 aa, Homo sapiens
CARGYDSSAYYYVAEDFQPW

SEQ ID NO: 26574 - protein, 20 aa, Homo sapiens
CAREVEMATLDYYYYYMDVW

SEQ ID NO: 26575 - protein, 16 aa, Homo sapiens
CARTSCTNGVCPFDPW

SEQ ID NO: 26576 - protein, 23 aa, Homo sapiens
CARDAGIVVVPAAIAGVNAFDIW

SEQ ID NO: 26577 - protein, 18 aa, Homo sapiens
CARGLAMFGTVIDVFDYW

SEQ ID NO: 26578 - protein, 20 aa, Homo sapiens
CARVSMWGCSNGVCHTYDYW

SEQ ID NO: 26579 - protein, 12 aa, Homo sapiens
CQQLTDYPSFTF

SEQ ID NO: 26580 - protein, 21 aa, Homo sapiens
CARAVGYCSSTSCYPDAFDIW

SEQ ID NO: 26581 - protein, 12 aa, Homo sapiens
CQHLNSLPPFTF

SEQ ID NO: 26582 - protein, 15 aa, Homo sapiens
CARDSWDISGRFDYW

SEQ ID NO: 26583 - protein, 19 aa, Homo sapiens
CARESIDIVVVPAATFDYW

SEQ ID NO: 26584 - protein, 15 aa, Homo sapiens
CAREATTGTNFFDYW

SEQ ID NO: 26585 - protein, 15 aa, Homo sapiens
CARANIAVATGLDYW

SEQ ID NO: 26586 - protein, 15 aa, Homo sapiens
CARHRDYDFSLFDYW

SEQ ID NO: 26587 - protein, 19 aa, Homo sapiens
CAKDYGPGYSSGWTSFDYW

SEQ ID NO: 26588 - protein, 14 aa, Homo sapiens
CAISEDFRGAPDYW

SEQ ID NO: 26589 - protein, 17 aa, Homo sapiens
CARHAKEQQVSAWFDPW

SEQ ID NO: 26590 - protein, 20 aa, Homo sapiens
CATISRRGVEAYNEWYFDSW

SEQ ID NO: 26591 - protein, 23 aa, Homo sapiens
CARDFPAPDFGSGYSDGNWFDPW

SEQ ID NO: 26592 - protein, 21 aa, Homo sapiens
CARDKVHSLNWNYGPDAFDIW

SEQ ID NO: 26593 - protein, 15 aa, Homo sapiens
CATDRENSGNYFDFW

SEQ ID NO: 26594 - protein, 21 aa, Homo sapiens
CARHVGGEFKLLDGSYWFDPW

SEQ ID NO: 26595 - protein, 16 aa, Homo sapiens
CAKDVSGYYFYGMDVW

SEQ ID NO: 26596 - protein, 21 aa, Homo sapiens
CAKDPPYCTNGVCYPYFFDSW

SEQ ID NO: 26597 - protein, 24 aa, Homo sapiens
CARNPFYYDSSSYYPIRKNWFDRW

SEQ ID NO: 26598 - protein, 18 aa, Homo sapiens
CARDLAERWLQFLPFDIW

SEQ ID NO: 26599 - protein, 18 aa, Homo sapiens
CATLGGSKRQGDTPFDYW

SEQ ID NO: 26600 - protein, 20 aa, Homo sapiens
CTTGFTWIRKDGYFYGFDVW

SEQ ID NO: 26601 - protein, 21 aa, Homo sapiens
CARGEEDFWSYTPNPAVVDYW

SEQ ID NO: 26602 - protein, 15 aa, Homo sapiens
CAREWDVSQGFLDYW

SEQ ID NO: 26603 - protein, 21 aa, Homo sapiens
CARAGILLWFGEFRHTTFDYW

SEQ ID NO: 26604 - protein, 14 aa, Homo sapiens
CARRVPSDGTFDMW

SEQ ID NO: 26605 - protein, 15 aa, Homo sapiens
CARFRMVGRNCFDSW

SEQ ID NO: 26606 - protein, 20 aa, Homo sapiens
CARYLVVVVDPTEPETVDYW

SEQ ID NO: 26607 - protein, 19 aa, Homo sapiens
CTTDSLPGSSGYYWGFDYW

SEQ ID NO: 26608 - protein, 17 aa, Homo sapiens
CARAYGDYPWGVFRDYW

SEQ ID NO: 26609 - protein, 16 aa, Homo sapiens
CAKGVRPTVSEAIDYW

SEQ ID NO: 26610 - protein, 24 aa, Homo sapiens
CARTSPIPPDYDILTGYLDYFDYW

SEQ ID NO: 26611 - protein, 14 aa, Homo sapiens
CVRDYDILTGFDSW

SEQ ID NO: 26612 - protein, 14 aa, Homo sapiens
CARMRAMVTAFDIW

SEQ ID NO: 26613 - protein, 19 aa, Homo sapiens
CARSGWTSIDYYYYYMDVW

SEQ ID NO: 26614 - protein, 22 aa, Homo sapiens
CATLGGQWLAELDYYYYGMDVW

SEQ ID NO: 26615 - protein, 20 aa, Homo sapiens
CAKEAAVCTNGVCYRHFDYW

SEQ ID NO: 26616 - protein, 14 aa, Homo sapiens
CTTNRIAEGWFDPW

SEQ ID NO: 26617 - protein, 16 aa, Homo sapiens
CARHGRYGGDPFLDYW

SEQ ID NO: 26618 - protein, 18 aa, Homo sapiens
CAKLVVVAATWGHFSDYW

SEQ ID NO: 26619 - protein, 19 aa, Homo sapiens
CARLSKPWLTSYFYYLDVW

SEQ ID NO: 26620 - protein, 20 aa, Homo sapiens
CAIRAKYYYDSSGKHVIDYW

SEQ ID NO: 26621 - protein, 32 aa, Homo sapiens
CALPILRVEDTAIYYCAKIGGGESMGWYFDYW

SEQ ID NO: 26622 - protein, 18 aa, Homo sapiens
CAREAYDDSTGYYYADCW

SEQ ID NO: 26623 - protein, 17 aa, Homo sapiens
CTRDDDSYGDFGAYDYW

SEQ ID NO: 26624 - protein, 12 aa, Homo sapiens
CQSFDSSNSWLF

SEQ ID NO: 26625 - protein, 21 aa, Homo sapiens
CVRDLPLQYDGSGQGPVFNYW

SEQ ID NO: 26626 - protein, 21 aa, Homo sapiens
CARPHYYGSGNYFMDWYFDLW

SEQ ID NO: 26627 - protein, 18 aa, Homo sapiens
CAKDLTGWGTGDDPFDVW

SEQ ID NO: 26628 - protein, 23 aa, Homo sapiens
CARGLPWDYDLLTGFYTPHFDCW

SEQ ID NO: 26629 - protein, 16 aa, Homo sapiens
CARDYSSGWYLAFDIW

SEQ ID NO: 26630 - protein, 22 aa, Homo sapiens
CAKDSSLYYYGSGSLYDACDIW

SEQ ID NO: 26631 - protein, 14 aa, Homo sapiens
CYSRDSSGSLSWVF

SEQ ID NO: 26632 - protein, 21 aa, Homo sapiens
CARDHFFSPPEEFWSGYFAYW

SEQ ID NO: 26633 - protein, 21 aa, Homo sapiens
CARDLQYYDFWNGAGGYFDYW

SEQ ID NO: 26634 - protein, 19 aa, Homo sapiens
CARDWESSSWYGVGYFDYW

SEQ ID NO: 26635 - protein, 16 aa, Homo sapiens
CASQGGGAIFDWFDPW

SEQ ID NO: 26636 - protein, 21 aa, Homo sapiens
CARIDGDSSGNGYYYYGMDVW

SEQ ID NO: 26637 - protein, 13 aa, Homo sapiens
CQQYDHLPPSLSF

SEQ ID NO: 26638 - protein, 32 aa, Homo sapiens
CALPILTAADTGMYYCARDHPDNDYGDYAGYW

SEQ ID NO: 26639 - protein, 15 aa, Homo sapiens
CASSPGDTAMDLDYW

SEQ ID NO: 26640 - protein, 17 aa, Homo sapiens
CARSSAFSSSWSYPDYW

SEQ ID NO: 26641 - protein, 13 aa, Homo sapiens
CQHYNNYSVMYVF

SEQ ID NO: 26642 - protein, 23 aa, Homo sapiens
CAKDTGWGYYDSSGYYHDAFDIW

SEQ ID NO: 26643 - protein, 17 aa, Homo sapiens
CARSRERDGHFGTFDYW

SEQ ID NO: 26644 - protein, 23 aa, Homo sapiens
CARDLLISLIVLMGDYYYGMDVW

SEQ ID NO: 26645 - protein, 15 aa, Homo sapiens
CATSLMVPRGYFDYW

SEQ ID NO: 26646 - protein, 25 aa, Homo sapiens
CARGITTTNQLLWFGELGDSAFDIW

SEQ ID NO: 26647 - protein, 26 aa, Homo sapiens
CATAPLLGLASDEKWSDYYYYGMDVW

SEQ ID NO: 26648 - protein, 16 aa, Homo sapiens
CAKEGQLVPENYFDSW

SEQ ID NO: 26649 - protein, 18 aa, Homo sapiens
CARDRLGSSWVHDAFDIW

SEQ ID NO: 26650 - protein, 19 aa, Homo sapiens
CARDWFGAKIRYYYGMDVW

SEQ ID NO: 26651 - protein, 17 aa, Homo sapiens
CARGAIETAGNNWLDPW

SEQ ID NO: 26652 - protein, 14 aa, Homo sapiens
CAGLITPVATRDYW

SEQ ID NO: 26653 - protein, 22 aa, Homo sapiens
CARDLTTSYFWSGYYDPGLDYW

SEQ ID NO: 26654 - protein, 16 aa, Homo sapiens
CARTVPGAREGYFANW

SEQ ID NO: 26655 - protein, 22 aa, Homo sapiens
CAIDRYSYDSNGYPHISSLDYW

SEQ ID NO: 26656 - protein, 26 aa, Homo sapiens
CAKDDYDSWSGYRTDSGYPSYFFDHW

SEQ ID NO: 26657 - protein, 19 aa, Homo sapiens
CRVSTGYSSGWYLDYMDVW

SEQ ID NO: 26658 - protein, 18 aa, Homo sapiens
CANSRIYSSSSGWTFDYW

SEQ ID NO: 26659 - protein, 17 aa, Homo sapiens
CAKDPYLYSSSWENDYW

SEQ ID NO: 26660 - protein, 20 aa, Homo sapiens
CAREDSGSDPVGYYYYMDVW

SEQ ID NO: 26661 - protein, 17 aa, Homo sapiens
CAASGDFYADKSLFDYW

SEQ ID NO: 26662 - protein, 13 aa, Homo sapiens
CQVWDSFTNYWVF

SEQ ID NO: 26663 - protein, 15 aa, Homo sapiens
CARSTIFGVVYFDYW

SEQ ID NO: 26664 - protein, 17 aa, Homo sapiens
CARDLGYDTSGRPFDMW

SEQ ID NO: 26665 - protein, 18 aa, Homo sapiens
CALPIWTDIGIRAGFDIW

SEQ ID NO: 26666 - protein, 23 aa, Homo sapiens
CTTDPSHHCRSRDSACFTRFDYW

SEQ ID NO: 26667 - protein, 22 aa, Homo sapiens
CARHQSTGSIFGVVIIGLFDYW

SEQ ID NO: 26668 - protein, 24 aa, Homo sapiens
CDWSSDVCSSDLGDQKPAFSLDYW

SEQ ID NO: 26669 - protein, 16 aa, Homo sapiens
CARDYRDAAHDAFDIW

SEQ ID NO: 26670 - protein, 19 aa, Homo sapiens
CAHRFYSSGWYDGDWFDPW

SEQ ID NO: 26671 - protein, 17 aa, Homo sapiens
CARFPQYNDGWQLFDYW

SEQ ID NO: 26672 - protein, 25 aa, Homo sapiens
CAKALLATTFTIFGVDYSDDAFDIW

SEQ ID NO: 26673 - protein, 20 aa, Homo sapiens
CARHIRWFGELSPRYYFDYW

SEQ ID NO: 26674 - protein, 20 aa, Homo sapiens
CARQRAYSDFDFPPDGFDVW

SEQ ID NO: 26675 - protein, 21 aa, Homo sapiens
CARDRFNAFWNGYKNDAFDIW

SEQ ID NO: 26676 - protein, 20 aa, Homo sapiens
CARGCSSTNCYRHYFYMDVW

SEQ ID NO: 26677 - protein, 19 aa, Homo sapiens
CASAIVVVVAATHHAFDIW

SEQ ID NO: 26678 - protein, 14 aa, Homo sapiens
CVRDAGRGLRGDYW

SEQ ID NO: 26679 - protein, 17 aa, Homo sapiens
CAKAVDSGYELVAFDFW

SEQ ID NO: 26680 - protein, 17 aa, Homo sapiens
CVRVFRLLGRPYYFDRW

SEQ ID NO: 26681 - protein, 15 aa, Homo sapiens
CARLSAATTGWLDPW

SEQ ID NO: 26682 - protein, 13 aa, Homo sapiens [sequence omitted]

SEQ ID NO: 26683 - protein, 19 aa, Homo sapiens
CASFNRDYGRFSTTLLDYW

SEQ ID NO: 26684 - protein, 13 aa, Homo sapiens
CARVGELYSHDYW

SEQ ID NO: 26685 - protein, 16 aa, Homo sapiens
CARDSQIYSRGYFDYW

SEQ ID NO: 26686 - protein, 19 aa, Homo sapiens
CARQAPGYYDSSGYYYVYW

SEQ ID NO: 26687 - protein, 15 aa, Homo sapiens
CAKDDNWNYKAFDIW

SEQ ID NO: 26688 - protein, 18 aa, Homo sapiens
CARNPSSAWVTAVGLDYW

SEQ ID NO: 26689 - protein, 23 aa, Homo sapiens
CARGGWRRITIFGVVINNWFDPW

SEQ ID NO: 26690 - protein, 22 aa, Homo sapiens
CARDQDLGYSSGWYSDGAFDIW

SEQ ID NO: 26691 - protein, 21 aa, Homo sapiens
CAHRRALPYFDSRDSLDFDFW

SEQ ID NO: 26692 - protein, 17 aa, Homo sapiens
CARTTNGFWNGGHIDYW

SEQ ID NO: 26693 - protein, 18 aa, Homo sapiens
CAKDTSYHYHSLGCSDYW

SEQ ID NO: 26694 - protein, 14 aa, Homo sapiens
CSTDLPPGWKFDFW

SEQ ID NO: 26695 - protein, 19 aa, Homo sapiens
CAKPLEYYHFWGTYPFDYW

SEQ ID NO: 26696 - protein, 20 aa, Homo sapiens
CAHTGWQAAGTYWRYYFDFW

SEQ ID NO: 26697 - protein, 17 aa, Homo sapiens
CAKEYSTSYITDAFDIW

SEQ ID NO: 26698 - protein, 20 aa, Homo sapiens
CAHHLGYCSSTSCYMNFAYW

SEQ ID NO: 26699 - protein, 18 aa, Homo sapiens
CARHRPGDSSGINWFDPW

SEQ ID NO: 26700 - protein, 14 aa, Homo sapiens
CAKDQTVAGTFDDW

SEQ ID NO: 26701 - protein, 15 aa, Homo sapiens
CAIAEGGHAEYFQHW

SEQ ID NO: 26702 - protein, 21 aa, Homo sapiens
CARGGYYYDSSGYHLNYFDYW

SEQ ID NO: 26703 - protein, 19 aa, Homo sapiens
CARRGRIVVVIAMGAFDIW

SEQ ID NO: 26704 - protein, 16 aa, Homo sapiens
CVRDRAVAGTFWFDPW

SEQ ID NO: 26705 - protein, 15 aa, Homo sapiens
CAKTSGTTWVWLDPW

SEQ ID NO: 26706 - protein, 18 aa, Homo sapiens
CARLPVLISASANAFDIW

SEQ ID NO: 26707 - protein, 20 aa, Homo sapiens
CSSDLPTIPVGANPVPFDYW

SEQ ID NO: 26708 - protein, 16 aa, Homo sapiens
CARIGMATNDYWFDPW

SEQ ID NO: 26709 - protein, 20 aa, Homo sapiens
CARDYDFWSAYRGGHAFDVW

SEQ ID NO: 26710 - protein, 17 aa, Homo sapiens
CARDYHDFWSGYHTDYW

SEQ ID NO: 26711 - protein, 12 aa, Homo sapiens
CQQYESYLGWSF

SEQ ID NO: 26712 - protein, 17 aa, Homo sapiens
CARVQFSGAVPDAFDIW

SEQ ID NO: 26713 - protein, 17 aa, Homo sapiens
CAREVFYGGNSLPFDCW

SEQ ID NO: 26714 - protein, 19 aa, Homo sapiens
CATMGPNWNDDYYYGMDVW

SEQ ID NO: 26715 - protein, 17 aa, Homo sapiens
CARAAFIGSGGDAFDIW

SEQ ID NO: 26716 - protein, 14 aa, Homo sapiens
CARGIVEASRLDYW

SEQ ID NO: 26717 - protein, 15 aa, Homo sapiens
CASSSGHDPYQFDFW

SEQ ID NO: 26718 - protein, 24 aa, Homo sapiens
CARNGYYETSGYYFSPHYHYMDVW

SEQ ID NO: 26719 - protein, 23 aa, Homo sapiens
CVRQETAETHLWLQGGNYYFDLW

SEQ ID NO: 26720 - protein, 20 aa, Homo sapiens
CARIDYLDSSGYYLGPFDWW

SEQ ID NO: 26721 - protein, 18 aa, Homo sapiens
CAKDLDIVLTISGAFDIW

SEQ ID NO: 26722 - protein, 20 aa, Homo sapiens
CAKGDRELWLGDLLPYFDHW

SEQ ID NO: 26723 - protein, 17 aa, Homo sapiens
CAKDSDQGLTGFHFDSW

SEQ ID NO: 26724 - protein, 23 aa, Homo sapiens
CAILDIAVEPPAREPSPDAFDIW

SEQ ID NO: 26725 - protein, 17 aa, Homo sapiens
CARSPLDSSNEIYFDSW

SEQ ID NO: 26726 - protein, 15 aa, Homo sapiens
CAKVPGDSGNYFDYW

SEQ ID NO: 26727 - protein, 21 aa, Homo sapiens
CAKGSTNLWSGHYDDYYFNYW

SEQ ID NO: 26728 - protein, 21 aa, Homo sapiens
CARDSLTGRDYYDKSGYYHYW

SEQ ID NO: 26729 - protein, 13 aa, Homo sapiens
CGRASGTYFGDYW

SEQ ID NO: 26730 - protein, 18 aa, Homo sapiens
CAKDLSPYSGSPYAFDIW

SEQ ID NO: 26731 - protein, 15 aa, Homo sapiens
CAKDSNTAMVNFDYW

SEQ ID NO: 26732 - protein, 17 aa, Homo sapiens
CTRDLDFWSGYALWDYW

SEQ ID NO: 26733 - protein, 19 aa, Homo sapiens
CAAGFRDYYDSSGDAFDIW

SEQ ID NO: 26734 - protein, 22 aa, Homo sapiens
CAQTRKGLRFLEWLPFYWFDPW

SEQ ID NO: 26735 - protein, 18 aa, Homo sapiens
CARHFYGSGSYYSAFDHW

SEQ ID NO: 26736 - protein, 7 aa, Homo sapiens
CVRFDVW

SEQ ID NO: 26737 - protein, 16 aa, Homo sapiens
CAKDDEWALLLPDDYW

SEQ ID NO: 26738 - protein, 21 aa, Homo sapiens
CASLAPVFNYDSSGYYYVDYW

SEQ ID NO: 26739 - protein, 25 aa, Homo sapiens
CAKDRIRHCSSTSSCHYYYYGMDVW

SEQ ID NO: 26740 - protein, 16 aa, Homo sapiens
CARIRGTIFGVVLDYW

SEQ ID NO: 26741 - protein, 17 aa, Homo sapiens
CTKDRYCVGVNCPLDYW

SEQ ID NO: 26742 - protein, 14 aa, Homo sapiens
CAHRPTVITGFDYW

SEQ ID NO: 26743 - protein, 29 aa, Homo sapiens
CASPRRFPNYDFWSGYWPSADYYYGMDVW

SEQ ID NO: 26744 - protein, 16 aa, Homo sapiens
CAKDIGWELGGAFDIW

SEQ ID NO: 26745 - protein, 16 aa, Homo sapiens
CAAAIWGDPSDSFDMW

SEQ ID NO: 26746 - protein, 16 aa, Homo sapiens
CARVEVPAAISYFDYW

SEQ ID NO: 26747 - protein, 18 aa, Homo sapiens
CAKYSAEQWLLTDFLDYW

SEQ ID NO: 26748 - protein, 14 aa, Homo sapiens
CARDRDGFFCFDYW

SEQ ID NO: 26749 - protein, 21 aa, Homo sapiens
CTTDPNYSNYEKDYYYGMDVW

SEQ ID NO: 26750 - protein, 18 aa, Homo sapiens
CARYAPVVHWLRAYFDYW

SEQ ID NO: 26751 - protein, 18 aa, Homo sapiens
CARGQLLWFGELLANDYW

SEQ ID NO: 26752 - protein, 27 aa, Homo sapiens
CARLGITTILGYCSSTSCSPGDAFDIW

SEQ ID NO: 26753 - protein, 19 aa, Homo sapiens
CTTVALLYDFWSGYYFDYW

SEQ ID NO: 26754 - protein, 12 aa, Homo sapiens
CVKRPDWDPDYW

SEQ ID NO: 26755 - protein, 18 aa, Homo sapiens
CAKGPEFSYDSSGSIDYW

SEQ ID NO: 26756 - protein, 15 aa, Homo sapiens
CAKEVERGYSTSDYW

SEQ ID NO: 26757 - protein, 21 aa, Homo sapiens
CVRDLQGVNSGWYGHDAFDIW

SEQ ID NO: 26758 - protein, 15 aa, Homo sapiens
CAKAGVGYTSSFAYW

SEQ ID NO: 26759 - protein, 17 aa, Homo sapiens
CATHRGYSSSWDAFDYW

SEQ ID NO: 26760 - protein, 34 aa, Homo sapiens
CALPICRLRSEDTAVYYCATGARRGYYFYYMDVW

SEQ ID NO: 26761 - protein, 16 aa, Homo sapiens
CARHTGSLGGLYFDHW

SEQ ID NO: 26762 - protein, 14 aa, Homo sapiens
CVRLDYDSSRVDYW

SEQ ID NO: 26763 - protein, 20 aa, Homo sapiens
CAAGEWLQNLDYYYYGMDVW

SEQ ID NO: 26764 - protein, 15 aa, Homo sapiens
CAHPATAYDSGFDYW

SEQ ID NO: 26765 - protein, 19 aa, Homo sapiens
CAKAAVKLWLLRNDAFDIW

SEQ ID NO: 26766 - protein, 20 aa, Homo sapiens
CARGGNLEWSSLQRNWFDSW

SEQ ID NO: 26767 - protein, 14 aa, Homo sapiens
CATGVTLVTCFDSW

SEQ ID NO: 26768 - protein, 18 aa, Homo sapiens
CARAKGVWESYRHYLDYW

SEQ ID NO: 26769 - protein, 17 aa, Homo sapiens
CARDQGYDFWSGSLDYW

SEQ ID NO: 26770 - protein, 24 aa, Homo sapiens
CVKDTVGYCSRTINKCGGDASEIW

SEQ ID NO: 26771 - protein, 17 aa, Homo sapiens
CARADSRLNNRRPFDYW

SEQ ID NO: 26772 - protein, 22 aa, Homo sapiens
CARGGWARGLVPAASGFWFDPW

SEQ ID NO: 26773 - protein, 16 aa, Homo sapiens
CAKDGGEWDLVSFDSW

SEQ ID NO: 26774 - protein, 14 aa, Homo sapiens
CARDSMVRGGFDYW

SEQ ID NO: 26775 - protein, 20 aa, Homo sapiens
CAKDSSPGEDLSAYDAFDIW

SEQ ID NO: 26776 - protein, 21 aa, Homo sapiens
CASLLRFLEWASPSHGAFDIW

SEQ ID NO: 26777 - protein, 18 aa, Homo sapiens
CAKAISQLNYFYYGMDVW

SEQ ID NO: 26778 - protein, 28 aa, Homo sapiens
CALPISAVYYCARTLRTHTVTTTGVDYW

SEQ ID NO: 26779 - protein, 17 aa, Homo sapiens
CTTDEIGLRGGNWFDPW

SEQ ID NO: 26780 - protein, 14 aa, Homo sapiens
CARGRSYGRHFDYW

SEQ ID NO: 26781 - protein, 17 aa, Homo sapiens
CAKSDSEEQWLVPFDYW

SEQ ID NO: 26782 - protein, 20 aa, Homo sapiens
CAKGNWDSSGYYTSYYFDYW

SEQ ID NO: 26783 - protein, 22 aa, Homo sapiens
CARQEYYYDSSGYYREGFFDYW

SEQ ID NO: 26784 - protein, 19 aa, Homo sapiens
CARDLAVRGVIVRRRFDCW

SEQ ID NO: 26785 - protein, 16 aa, Homo sapiens
CAKDVWPVAGTGFDYW

SEQ ID NO: 26786 - protein, 16 aa, Homo sapiens
CARGLYVVAGIGLDYW

SEQ ID NO: 26787 - protein, 24 aa, Homo sapiens
CARQMGLLGGGITGTIYPYAFDIW

SEQ ID NO: 26788 - protein, 16 aa, Homo sapiens
CARHLALAGDEYFQPW

SEQ ID NO: 26789 - protein, 17 aa, Homo sapiens
CAATIEVGARFDAFDIW

SEQ ID NO: 26790 - protein, 17 aa, Homo sapiens
CARAGGYCSSTSCFDYW

SEQ ID NO: 26791 - protein, 20 aa, Homo sapiens
CTGSSRGYNYGFQPYWFDPW

SEQ ID NO: 26792 - protein, 31 aa, Homo sapiens
CARGEGDQLELRWALSTYVGNYYYYYYMDVW

SEQ ID NO: 26793 - protein, 13 aa, Homo sapiens
CQQSYFTKNFGTF

SEQ ID NO: 26794 - protein, 18 aa, Homo sapiens
CATEASVDYYDSRYGDYW

SEQ ID NO: 26795 - protein, 19 aa, Homo sapiens
CARSGSAGYDVWSGHFDLW

SEQ ID NO: 26796 - protein, 18 aa, Homo sapiens
CARDCPDYGSGSCYFDYW

SEQ ID NO: 26797 - protein, 15 aa, Homo sapiens
CARDWGGFWSPYFYW

SEQ ID NO: 26798 - protein, 21 aa, Homo sapiens
CARGGYSSRRRIYYYYGMDVW

SEQ ID NO: 26799 - protein, 18 aa, Homo sapiens
CAKGKSGQWLVGGPFDVW

SEQ ID NO: 26800 - protein, 17 aa, Homo sapiens
CAKNGGGQYSTHGFDYW

SEQ ID NO: 26801 - protein, 15 aa, Homo sapiens
CARIRVSHKGAFDIW

SEQ ID NO: 26802 - protein, 18 aa, Homo sapiens
CVKDLQTFDETSGYLDDW

SEQ ID NO: 26803 - protein, 16 aa, Homo sapiens
CASYDSSGYYLDFDYW

SEQ ID NO: 26804 - protein, 24 aa, Homo sapiens
CAKLNGGPGYYDSSGYYNAGSDYW

SEQ ID NO: 26805 - protein, 18 aa, Homo sapiens
CATLMGPRPFYYYGMDVW

SEQ ID NO: 26806 - protein, 19 aa, Homo sapiens
CARPGGRSGWSAFWYFDLW

SEQ ID NO: 26807 - protein, 19 aa, Homo sapiens
CAKDHSEAVAMMGWHFDLW

SEQ ID NO: 26808 - protein, 23 aa, Homo sapiens
CATDSDSILGSSGYPIRRHFDYW

SEQ ID NO: 26809 - protein, 18 aa, Homo sapiens
CARLPETATNLESLFDDW

SEQ ID NO: 26810 - protein, 19 aa, Homo sapiens
CVRSYFDLRSDFYSAFDIW

SEQ ID NO: 26811 - protein, 22 aa, Homo sapiens
CARGGWVRGVISPYYYYYMDVW

SEQ ID NO: 26812 - protein, 15 aa, Homo sapiens
CARIPTHDLRAFDIW

SEQ ID NO: 26813 - protein, 17 aa, Homo sapiens
CAKHSGFGELLNCFDCW

SEQ ID NO: 26814 - protein, 19 aa, Homo sapiens
CARLVLLWFGEPYDAFDIW

SEQ ID NO: 26815 - protein, 11 aa, Homo sapiens
CKVVIERFDIW

SEQ ID NO: 26816 - protein, 16 aa, Homo sapiens
CASGSASIALDAYDIW

SEQ ID NO: 26817 - protein, 16 aa, Homo sapiens
CAAADVQTWLYAFDFW

SEQ ID NO: 26818 - protein, 16 aa, Homo sapiens
CATTYYDPSGRGGDYW

SEQ ID NO: 26819 - protein, 21 aa, Homo sapiens
CAHTRTYQSDLASYNDAFDIW

SEQ ID NO: 26820 - protein, 16 aa, Homo sapiens
CASSIVGATRYTFRYW

SEQ ID NO: 26821 - protein, 15 aa, Homo sapiens
CVRVSRGRWLGLDYW

SEQ ID NO: 26822 - protein, 21 aa, Homo sapiens
CARGEPSSLDLWNGPTPFDDW

SEQ ID NO: 26823 - protein, 16 aa, Homo sapiens
CAKFASTYSSSSVDYW

SEQ ID NO: 26824 - protein, 21 aa, Homo sapiens
CASSRYYDSGRAPSPRYFDLW

SEQ ID NO: 26825 - protein, 19 aa, Homo sapiens
CARQPGVYDSSGYDAFDIW

SEQ ID NO: 26826 - protein, 18 aa, Homo sapiens
CALPISRVDDYTNSFDSW

SEQ ID NO: 26827 - protein, 20 aa, Homo sapiens
CARDLVPFGDGYNYDAFDIW

SEQ ID NO: 26828 - protein, 21 aa, Homo sapiens
CARESQTNYGDYVLYGWFDPW

SEQ ID NO: 26829 - protein, 14 aa, Homo sapiens
CATRYGDSDPIDYW

SEQ ID NO: 26830 - protein, 17 aa, Homo sapiens
CANHHLGYGVLYYFDYW

SEQ ID NO: 26831 - protein, 18 aa, Homo sapiens
CVRARVRGLIVIDAFDFW

SEQ ID NO: 26832 - protein, 21 aa, Homo sapiens
CAKDITPNYYDSTEAWAFDIW

SEQ ID NO: 26833 - protein, 18 aa, Homo sapiens
CARIMSETVQMAPYFDNW

SEQ ID NO: 26834 - protein, 16 aa, Homo sapiens
CARSYNWNYALDFDHW

SEQ ID NO: 26835 - protein, 17 aa, Homo sapiens
CAREGEATMIGRGFDYW

SEQ ID NO: 26836 - protein, 19 aa, Homo sapiens
CAKEEYDIVTGSPVLFDHW

SEQ ID NO: 26837 - protein, 16 aa, Homo sapiens
CARDGSCGGDAYIDYW

SEQ ID NO: 26838 - protein, 19 aa, Homo sapiens
CARGLTMIVVVQISGFDYW

SEQ ID NO: 26839 - protein, 16 aa, Homo sapiens
CAKGPYGSGSYYMNYW

SEQ ID NO: 26840 - protein, 19 aa, Homo sapiens
CARCPGQWLVQSGGIFDYW

SEQ ID NO: 26841 - protein, 11 aa, Homo sapiens
CAGSGNPGDYW

SEQ ID NO: 26842 - protein, 15 aa, Homo sapiens
CAKVHSSSWGVFDYW

SEQ ID NO: 26843 - protein, 16 aa, Homo sapiens
CVRDASAGAYYYMDVW

SEQ ID NO: 26844 - protein, 22 aa, Homo sapiens
CARDDYDDSESYTYNYYGMDVW

SEQ ID NO: 26845 - protein, 23 aa, Homo sapiens
CARRRTASTMVRGVTPSWYFDLW

SEQ ID NO: 26846 - protein, 17 aa, Homo sapiens
CARGRLERDHHYYIDVW

SEQ ID NO: 26847 - protein, 16 aa, Homo sapiens
CAYYKSNYFFDAFDMW

SEQ ID NO: 26848 - protein, 20 aa, Homo sapiens
CATARSRGGNYYGSSGFDYW

SEQ ID NO: 26849 - protein, 13 aa, Homo sapiens
CARRSRTGYLDYW

SEQ ID NO: 26850 - protein, 18 aa, Homo sapiens
CARVRILTGYYLGWFDPW

SEQ ID NO: 26851 - protein, 23 aa, Homo sapiens
CAKDIEVMKTVTSYAPYQAFDPW

SEQ ID NO: 26852 - protein, 15 aa, Homo sapiens
CAKAGGRLASYFDSW

SEQ ID NO: 26853 - protein, 18 aa, Homo sapiens
CTTDLLVMELWRRGVDYW

SEQ ID NO: 26854 - protein, 15 aa, Homo sapiens
CAKGIAARSGPFDYW

SEQ ID NO: 26855 - protein, 19 aa, Homo sapiens
CARDFMATQGYYNYYMDVW

SEQ ID NO: 26856 - protein, 14 aa, Homo sapiens
CTTQVPGAILSDYW

SEQ ID NO: 26857 - protein, 20 aa, Homo sapiens
CARHSHSGTYMGGLWYFDYW

SEQ ID NO: 26858 - protein, 16 aa, Homo sapiens
CASGGGSGWYFEFGYW

SEQ ID NO: 26859 - protein, 14 aa, Homo sapiens
CARDGGIYEETDYW

SEQ ID NO: 26860 - protein, 12 aa, Homo sapiens
CATARLRRFDPW

SEQ ID NO: 26861 - protein, 16 aa, Homo sapiens
CARGRSPLMAVYMDVW

SEQ ID NO: 26862 - protein, 17 aa, Homo sapiens
CARQVTGVMAADPLDYW

SEQ ID NO: 26863 - protein, 16 aa, Homo sapiens
CARATPSGGWLSFDYW

SEQ ID NO: 26864 - protein, 17 aa, Homo sapiens
CALPIWFGELFGAFDIW

SEQ ID NO: 26865 - protein, 17 aa, Homo sapiens
CARPGGSGTQGGWFDPW

SEQ ID NO: 26866 - protein, 17 aa, Homo sapiens
CARGPDYSTSKTSFDYW

SEQ ID NO: 26867 - protein, 17 aa, Homo sapiens
CAKDWGPLYSSCWLDYW

SEQ ID NO: 26868 - protein, 15 aa, Homo sapiens
CTRPDHLKLNAFDIW

SEQ ID NO: 26869 - protein, 19 aa, Homo sapiens
CARNVGSSWYEIQWYFDLW

SEQ ID NO: 26870 - protein, 9 aa, Homo sapiens
CTTGPNDYW

SEQ ID NO: 26871 - protein, 22 aa, Homo sapiens
CAREGEFTYYYGSGSSYYFDYW

SEQ ID NO: 26872 - protein, 17 aa, Homo sapiens
CARDRRSAVAGTVSDYW

SEQ ID NO: 26873 - protein, 17 aa, Homo sapiens
CMRWFRQYQPASQFDPW

SEQ ID NO: 26874 - protein, 15 aa, Homo sapiens
CTRDVRGGEYYFDYW

SEQ ID NO: 26875 - protein, 12 aa, Homo sapiens
CTTSHLVAADYW

SEQ ID NO: 26876 - protein, 31 aa, Homo sapiens
CAKSRGGSGNGDPFRALISLSSGRPWYFDRW

SEQ ID NO: 26877 - protein, 14 aa, Homo sapiens
CQVFNLYPQGPVTF

SEQ ID NO: 26878 - protein, 17 aa, Homo sapiens
CAKSLHIVVVTAIFDYW

SEQ ID NO: 26879 - protein, 20 aa, Homo sapiens
CARELRNSDTSGPPDAFDIW

SEQ ID NO: 26880 - protein, 14 aa, Homo sapiens
CATHSSSWFEWDYW

SEQ ID NO: 26881 - protein, 30 aa, Homo sapiens
CAYSKPDYDYVWGSYRPSAIYYYYYGMDVW

SEQ ID NO: 26882 - protein, 18 aa, Homo sapiens
CASLKRATPSYYYYMDVW

SEQ ID NO: 26883 - protein, 16 aa, Homo sapiens
CAHRPGAAGGGWFDPW

SEQ ID NO: 26884 - protein, 31 aa, Homo sapiens
CASPLNPQYDYVWGTYRQLGGPIYYYALDVW

SEQ ID NO: 26885 - protein, 16 aa, Homo sapiens
CTRDPFLEWFSSFDLW

SEQ ID NO: 26886 - protein, 22 aa, Homo sapiens
CAAELQTQDYDTSGSYYLDDYW

SEQ ID NO: 26887 - protein, 24 aa, Homo sapiens
CARAYSYYYDSSGYYAQDWYFDLW

SEQ ID NO: 26888 - protein, 18 aa, Homo sapiens
CAKDGAYMGRRTYAFDFW

SEQ ID NO: 26889 - protein, 20 aa, Homo sapiens
CARDPSDGSGWSQADWFDPW

SEQ ID NO: 26890 - protein, 21 aa, Homo sapiens
CARSPRSTYDFWSGLLPVDYW

SEQ ID NO: 26891 - protein, 12 aa, Homo sapiens
CMQRIHLSRFTF

SEQ ID NO: 26892 - protein, 15 aa, Homo sapiens
CARGGGNYLIKNDYW

SEQ ID NO: 26893 - protein, 19 aa, Homo sapiens
CAKDSAYCSGGSCYGFDYW

SEQ ID NO: 26894 - protein, 11 aa, Homo sapiens
CQHSDSFPWTF

SEQ ID NO: 26895 - protein, 20 aa, Homo sapiens
CAKLATCSGGSCYSADNDYW

SEQ ID NO: 26896 - protein, 13 aa, Homo sapiens
CVKDKSPGGADYW

SEQ ID NO: 26897 - protein, 13 aa, Homo sapiens
CARHWDFNPFEYW

SEQ ID NO: 26898 - protein, 22 aa, Homo sapiens
CANAEEMYWYDGGAFPNWFDTW

SEQ ID NO: 26899 - protein, 16 aa, Homo sapiens
CAKDLGGATVGDLDYW

SEQ ID NO: 26900 - protein, 16 aa, Homo sapiens
CARSSSPIAVAGSDYW

SEQ ID NO: 26901 - protein, 33 aa, Homo sapiens
CDWSSDVCSSDLAAIYYCVRGAFLEWFHGFDIW

SEQ ID NO: 26902 - protein, 18 aa, Homo sapiens
CASLAGRSFNNYWYFDLW

SEQ ID NO: 26903 - protein, 26 aa, Homo sapiens
CARAEVRGYRARGHSYGQKPNYFDYW

SEQ ID NO: 26904 - protein, 16 aa, Homo sapiens
CAKVRVGDLRRGFDYW

SEQ ID NO: 26905 - protein, 15 aa, Homo sapiens
CAMFTSGNYFIFDYW

SEQ ID NO: 26906 - protein, 14 aa, Homo sapiens
CRAVADDYWYFDLW

SEQ ID NO: 26907 - protein, 16 aa, Homo sapiens
CAPYDYDSSGYIPDYW

SEQ ID NO: 26908 - protein, 20 aa, Homo sapiens
CARVDMPSKYILDDSWFDLW

SEQ ID NO: 26909 - protein, 21 aa, Homo sapiens
CASIIVVVPAASWGDDAFEIW

SEQ ID NO: 26910 - protein, 22 aa, Homo sapiens
CTTDSSRKYYDILTGYYWIDYW

SEQ ID NO: 26911 - protein, 17 aa, Homo sapiens
CARDVVVVPAAMGVDYW

SEQ ID NO: 26912 - protein, 17 aa, Homo sapiens
CTKLLVGIELATNFHYW

SEQ ID NO: 26913 - protein, 15 aa, Homo sapiens
CARMRGFCTKGFDPW

SEQ ID NO: 26914 - protein, 17 aa, Homo sapiens
CAKSVLGSPIFDAFHIW

SEQ ID NO: 26915 - protein, 16 aa, Homo sapiens
CAKVSDSGYGDTRDYW

SEQ ID NO: 26916 - protein, 23 aa, Homo sapiens
CARDRPPGFTIVAYYYYYGMDVW

SEQ ID NO: 26917 - protein, 18 aa, Homo sapiens
CARHPLRFLEWFFAFDIW

SEQ ID NO: 26918 - protein, 15 aa, Homo sapiens
CAKAPTSMDWYFDLW

SEQ ID NO: 26919 - protein, 14 aa, Homo sapiens
CASLYSSGGRLDYW

SEQ ID NO: 26920 - protein, 21 aa, Homo sapiens
CARDPLAVSSSSDYFYYMDVW

SEQ ID NO: 26921 - protein, 22 aa, Homo sapiens
CARVGWRTGSSRQYYYYGMDVW

SEQ ID NO: 26922 - protein, 25 aa, Homo sapiens
CASHYPGLNDFRNGFYGYGWSFDNW

SEQ ID NO: 26923 - protein, 22 aa, Homo sapiens
CARDWTPVSRPYYYYYYYMDVW

SEQ ID NO: 26924 - protein, 21 aa, Homo sapiens
CARAPTYCGGDCSPYWYFDLW

SEQ ID NO: 26925 - protein, 21 aa, Homo sapiens
CAKDGGGAEGAPPRTYFFDSW

SEQ ID NO: 26926 - protein, 25 aa, Homo sapiens
CVKDQIENYYDNRGYSLQKNYFDWW

SEQ ID NO: 26927 - protein, 17 aa, Homo sapiens
CARRGPGGDYVWHFDSW

SEQ ID NO: 26928 - protein, 23 aa, Homo sapiens
CARHPLTGTHRFPHYYYYYMDVW

SEQ ID NO: 26929 - protein, 21 aa, Homo sapiens
CARVPRIGYCSSTSCYVVDYW

SEQ ID NO: 26930 - protein, 14 aa, Homo sapiens
CQYRSNWPPGVLTF

SEQ ID NO: 26931 - protein, 26 aa, Homo sapiens
CARASYYYDSSGFLRDYYYYYYMDVW

SEQ ID NO: 26932 - protein, 14 aa, Homo sapiens
CLQHDNFPLGGFTF

SEQ ID NO: 26933 - protein, 21 aa, Homo sapiens
CARLKCYSATCHLREHWFDPW

SEQ ID NO: 26934 - protein, 12 aa, Homo sapiens
CMQSIKTPFFTF

SEQ ID NO: 26935 - protein, 11 aa, Homo sapiens
CQQYDDFPWSF

SEQ ID NO: 26936 - protein, 11 aa, Homo sapiens
CHQTFSLPFTF

SEQ ID NO: 26937 - protein, 18 aa, Homo sapiens
CARGTTIFGVVRRWFDPW

SEQ ID NO: 26938 - protein, 15 aa, Homo sapiens
CAGGLSGMEVPFDYW

SEQ ID NO: 26939 - protein, 17 aa, Homo sapiens
CAGSKSAVYDSTYFDYW

SEQ ID NO: 26940 - protein, 13 aa, Homo sapiens
CARHHVVGASDYW

SEQ ID NO: 26941 - protein, 19 aa, Homo sapiens
CATINYYDSSGYYFPFDYW

SEQ ID NO: 26942 - protein, 15 aa, Homo sapiens
CASSLISGVDAFDIW

SEQ ID NO: 26943 - protein, 15 aa, Homo sapiens
CATYYINDPNYFDFW

SEQ ID NO: 26944 - protein, 23 aa, Homo sapiens
CARVNKGDSSGHYNYFYYGMDVW

SEQ ID NO: 26945 - protein, 20 aa, Homo sapiens
CARDLGYDPNGRPYDAFAMW

SEQ ID NO: 26946 - protein, 16 aa, Homo sapiens
CAKGIIAVAANGPDYW

SEQ ID NO: 26947 - protein, 12 aa, Homo sapiens
CANSLMELFDYW

SEQ ID NO: 26948 - protein, 21 aa, Homo sapiens
CTTGNRGYDFVGGTYRHFDYW

SEQ ID NO: 26949 - protein, 22 aa, Homo sapiens
CARAPYYYDSSGFPLPYYFDYW

SEQ ID NO: 26950 - protein, 19 aa, Homo sapiens
CAKDAYYYDSRRDCYFDLW

SEQ ID NO: 26951 - protein, 21 aa, Homo sapiens
CAKGSLDSSGYVTGADAFDIW

SEQ ID NO: 26952 - protein, 17 aa, Homo sapiens
CAKDMSPVAGISPVDYW

SEQ ID NO: 26953 - protein, 15 aa, Homo sapiens
CARDYVAAMGLLDYW

SEQ ID NO: 26954 - protein, 17 aa, Homo sapiens
CARVAITYSSSWYLDYW

SEQ ID NO: 26955 - protein, 14 aa, Homo sapiens
CWCLIFRPFTGDYW

SEQ ID NO: 26956 - protein, 17 aa, Homo sapiens
CARLTQGLEWELSIDYW

SEQ ID NO: 26957 - protein, 18 aa, Homo sapiens
CARQSYHVLTGYFNFDYW

SEQ ID NO: 26958 - protein, 17 aa, Homo sapiens
CAKERITGDFAVLLDYW

SEQ ID NO: 26959 - protein, 23 aa, Homo sapiens
CARDGRYCGGDCYDDYYYGMDVW

SEQ ID NO: 26960 - protein, 17 aa, Homo sapiens
CARPPPHSNYYSVFDLW

SEQ ID NO: 26961 - protein, 17 aa, Homo sapiens
CGRVLKVAGTRWFFDLW

SEQ ID NO: 26962 - protein, 17 aa, Homo sapiens
CARDCSSTSCYTMSDYW

SEQ ID NO: 26963 - protein, 19 aa, Homo sapiens
CARDEEGWFGELRGGFDPW

SEQ ID NO: 26964 - protein, 23 aa, Homo sapiens
CARELPDIAPRSIGRSDDGFDIW

SEQ ID NO: 26965 - protein, 18 aa, Homo sapiens
CARPRHDSSGYYAIFDYW

SEQ ID NO: 26966 - protein, 16 aa, Homo sapiens
CARVYYYGSGYPFDHW

SEQ ID NO: 26967 - protein, 20 aa, Homo sapiens
CASSSITIFGVVIMAAFDIW

SEQ ID NO: 26968 - protein, 16 aa, Homo sapiens
CVKDVGTSGPHGFDRW

SEQ ID NO: 26969 - protein, 14 aa, Homo sapiens
CATQISGYRPRDYW

SEQ ID NO: 26970 - protein, 19 aa, Homo sapiens
CAKGEDSSSWYSTPFLDYW

SEQ ID NO: 26971 - protein, 17 aa, Homo sapiens
CARPFGLLSMDWYFDLW

SEQ ID NO: 26972 - protein, 18 aa, Homo sapiens
CAHRLKWQLLYGPWFDPW

SEQ ID NO: 26973 - protein, 20 aa, Homo sapiens
CSCPPTYYYDSGGFDAFDIW

SEQ ID NO: 26974 - protein, 19 aa, Homo sapiens
CARDQYAGNNYHPNYFDSW

SEQ ID NO: 26975 - protein, 19 aa, Homo sapiens
CARHEALVVETSRGTFDIW

SEQ ID NO: 26976 - protein, 17 aa, Homo sapiens
CAKLVTEIAAAGTADYW

SEQ ID NO: 26977 - protein, 16 aa, Homo sapiens
CVKGDYNNYVGLLDYW

SEQ ID NO: 26978 - protein, 17 aa, Homo sapiens
CAKARSPNFRFDAPQVW

SEQ ID NO: 26979 - protein, 15 aa, Homo sapiens
CAKVARAAAGPFDYW

SEQ ID NO: 26980 - protein, 16 aa, Homo sapiens
CARDGSGIGQGAFDIW

SEQ ID NO: 26981 - protein, 14 aa, Homo sapiens
CVLLRQWLAPFDYW

SEQ ID NO: 26982 - protein, 28 aa, Homo sapiens
CARHIRQFYGDSLVSNPARPPYWYIDVW

SEQ ID NO: 26983 - protein, 19 aa, Homo sapiens
CARFSMNAYSTSWSNFDYW

SEQ ID NO: 26984 - protein, 15 aa, Homo sapiens
CAREWPITTACLDYW

SEQ ID NO: 26985 - protein, 17 aa, Homo sapiens
CASGYGSGSYPSPFGYW

SEQ ID NO: 26986 - protein, 19 aa, Homo sapiens
CASYIYYYGGTDYGYFDNW

SEQ ID NO: 26987 - protein, 18 aa, Homo sapiens
CARNPEVVITEFYYFDSW

SEQ ID NO: 26988 - protein, 16 aa, Homo sapiens
CVRDVACTGVTCLDYW

SEQ ID NO: 26989 - protein, 15 aa, Homo sapiens
CAAYHDFSPYHFDYW

SEQ ID NO: 26990 - protein, 17 aa, Homo sapiens
CARDGGRYPLLYWFDQW

SEQ ID NO: 26991 - protein, 33 aa, Homo sapiens
CDWSSDVCSSDLDTAVYYCARGDQKPAFSLDYW

SEQ ID NO: 26992 - protein, 17 aa, Homo sapiens
CAKNLHVGTDFVPLDYW

SEQ ID NO: 26993 - protein, 19 aa, Homo sapiens
CARVRYSSSWYRSYYFDYW

SEQ ID NO: 26994 - protein, 21 aa, Homo sapiens
CTRHPRDRRVVPRANNRFDPW

SEQ ID NO: 26995 - protein, 14 aa, Homo sapiens
CAAYHYYPYGMDVW

SEQ ID NO: 26996 - protein, 19 aa, Homo sapiens
CARDPITMVRGVTPAFDIW

SEQ ID NO: 26997 - protein, 13 aa, Homo sapiens
CAAWHDRLNGPIF

SEQ ID NO: 26998 - protein, 16 aa, Homo sapiens
CARELLSSGWYGFDYW

SEQ ID NO: 26999 - protein, 19 aa, Homo sapiens
CALPISTPKCYKRFYMDVW

SEQ ID NO: 27000 - protein, 22 aa, Homo sapiens
CASAARYHDDTDGSGLYFFDYW

SEQ ID NO: 27001 - protein, 13 aa, Homo sapiens
CQVWDSDSDTAIF

SEQ ID NO: 27002 - protein, 13 aa, Homo sapiens
CATLLQTRGFDIW

SEQ ID NO: 27003 - protein, 13 aa, Homo sapiens
CQQFHNFPSSITF

SEQ ID NO: 27004 - protein, 21 aa, Homo sapiens
CARAPPMITFGGVIAYYFDYW

SEQ ID NO: 27005 - protein, 17 aa, Homo sapiens
CARDLMTTVTTGWFDPW

SEQ ID NO: 27006 - protein, 11 aa, Homo sapiens
CVRGSHRVDYW

SEQ ID NO: 27007 - protein, 19 aa, Homo sapiens
CARLIRKIAPDLSGAFDIW

SEQ ID NO: 27008 - protein, 19 aa, Homo sapiens
CARHSDYYGSGTHYPIDYW

SEQ ID NO: 27009 - protein, 21 aa, Homo sapiens
CALPICARGPRGYNSAWLDSW

SEQ ID NO: 27010 - protein, 13 aa, Homo sapiens
CARAYHFSGGDYW

SEQ ID NO: 27011 - protein, 20 aa, Homo sapiens
CARGYCSGYRCYFTFYFDLW

SEQ ID NO: 27012 - protein, 16 aa, Homo sapiens
CASGTYGDYPSAFDIW

SEQ ID NO: 27013 - protein, 14 aa, Homo sapiens
CARVLAARTIIDYW

SEQ ID NO: 27014 - protein, 13 aa, Homo sapiens
CAKASVDDYFDYW

SEQ ID NO: 27015 - protein, 15 aa, Homo sapiens
CARGTRAVAGLFDYW

SEQ ID NO: 27016 - protein, 16 aa, Homo sapiens
CTSDTAMAAYYYMDVW

SEQ ID NO: 27017 - protein, 15 aa, Homo sapiens
CARVIWGGATHFDYW

SEQ ID NO: 27018 - protein, 11 aa, Homo sapiens
CVRDFNWFDSW

SEQ ID NO: 27019 - protein, 17 aa, Homo sapiens
CAKVGIMTGTLAPFDIW

SEQ ID NO: 27020 - protein, 12 aa, Homo sapiens
CLQHNSWPPDAF

SEQ ID NO: 27021 - protein, 19 aa, Homo sapiens
CAKITGYSSSWYGSAFDIW

SEQ ID NO: 27022 - protein, 17 aa, Homo sapiens
CAREKGVDLRRVPYDYW

SEQ ID NO: 27023 - protein, 20 aa, Homo sapiens
CARLLPYLGYSSGWTNDDYW

SEQ ID NO: 27024 - protein, 18 aa, Homo sapiens
CARHGPEDGVWSGYIDFW

SEQ ID NO: 27025 - protein, 17 aa, Homo sapiens
CATDFSSSWRNNWFDPW

SEQ ID NO: 27026 - protein, 18 aa, Homo sapiens
CARVDCSSIISCPLFDYW

SEQ ID NO: 27027 - protein, 15 aa, Homo sapiens
CASRLYSSSWYVSYW

SEQ ID NO: 27028 - protein, 17 aa, Homo sapiens
CASQSHYYYDSNWFDPW

SEQ ID NO: 27029 - protein, 16 aa, Homo sapiens
CARDRNLDIEYFFDFW

SEQ ID NO: 27030 - protein, 20 aa, Homo sapiens
CAGGLGYTFGYGSFYAMDVW

SEQ ID NO: 27031 - protein, 25 aa, Homo sapiens
CARGVRYEDEGYWYLDYYYYYMDVW

SEQ ID NO: 27032 - protein, 10 aa, Homo sapiens [sequence omitted]

SEQ ID NO: 27033 - protein, 17 aa, Homo sapiens
CARERRSIAAAGYFDYW

SEQ ID NO: 27034 - protein, 15 aa, Homo sapiens [sequence omitted]

SEQ ID NO: 27035 - protein, 17 aa, Homo sapiens
CAREIRFLEWLKAFDIW

SEQ ID NO: 27036 - protein, 23 aa, Homo sapiens
CVRGGMAGPANNYGFGNDAFDIW

SEQ ID NO: 27037 - protein, 19 aa, Homo sapiens
CVRYPHCSSGRCSSYFDYW

SEQ ID NO: 27038 - protein, 14 aa, Homo sapiens
CAAGGNHQDAFEIW

SEQ ID NO: 27039 - protein, 19 aa, Homo sapiens
CAKDYYDSSGYSDYAFDIW

SEQ ID NO: 27040 - protein, 11 aa, Homo sapiens
CHYYGSSPGAF

SEQ ID NO: 27041 - protein, 23 aa, Homo sapiens
CARDRREQQLKQNFYFYYGMDVW

SEQ ID NO: 27042 - protein, 30 aa, Homo sapiens
CAKDQPERTNPYDILTGYLGAYYYYGMDVW

SEQ ID NO: 27043 - protein, 20 aa, Homo sapiens
CARAPRPRDYYDSSGPFDYW

SEQ ID NO: 27044 - protein, 19 aa, Homo sapiens
CARDRLLLPTTRDFWFDPW

SEQ ID NO: 27045 - protein, 21 aa, Homo sapiens
CARDKLIGRQLPPVGVWFDPW

SEQ ID NO: 27046 - protein, 17 aa, Homo sapiens
CATLISAGGPSDAVDIW

SEQ ID NO: 27047 - protein, 24 aa, Homo sapiens
CARDLTYYDLWQVPSYYYYGMDVW

SEQ ID NO: 27048 - protein, 13 aa, Homo sapiens
CARRIGDYPFDFW

SEQ ID NO: 27049 - protein, 21 aa, Homo sapiens
CARRRNYYDSSGYPLDAFDIW

SEQ ID NO: 27050 - protein, 17 aa, Homo sapiens
CARQTNADLAAKYFDYW

SEQ ID NO: 27051 - protein, 16 aa, Homo sapiens
CARIMMLVLKGWVDPW

SEQ ID NO: 27052 - protein, 24 aa, Homo sapiens
CDWSSDVCSSDLRRGYDFYYMDVW

SEQ ID NO: 27053 - protein, 16 aa, Homo sapiens
CAKEDHRDGPNWFDPW

SEQ ID NO: 27054 - protein, 16 aa, Homo sapiens
CATKGFGPVQGWFDPW

SEQ ID NO: 27055 - protein, 19 aa, Homo sapiens
CARDKDYYGSGSYSLFDYW

SEQ ID NO: 27056 - protein, 17 aa, Homo sapiens
CARDLTYQLTKFYFDSW

SEQ ID NO: 27057 - protein, 22 aa, Homo sapiens
CASWGYSSSWYPGNASYYFDYW

SEQ ID NO: 27058 - protein, 13 aa, Homo sapiens
CANVFSSGGGDYW

SEQ ID NO: 27059 - protein, 20 aa, Homo sapiens
CARILRDDSTGYYYYYFDYW

SEQ ID NO: 27060 - protein, 24 aa, Homo sapiens
CAHRPGVDNYALGSYISEDYFDFW

SEQ ID NO: 27061 - protein, 16 aa, Homo sapiens
CARHGYSTSWYYFDYW

SEQ ID NO: 27062 - protein, 14 aa, Homo sapiens
CAREHSQRSNYDYW

SEQ ID NO: 27063 - protein, 23 aa, Homo sapiens
CARAGYSSSSRKQRYYYYGMDVW

SEQ ID NO: 27064 - protein, 18 aa, Homo sapiens
CARDVRSVDIVAAAFDIW

SEQ ID NO: 27065 - protein, 21 aa, Homo sapiens
CASFVGNYGAEDYYYYGMDVW

SEQ ID NO: 27066 - protein, 20 aa, Homo sapiens
CARALLYNWNYGGGNWFDPW

SEQ ID NO: 27067 - protein, 15 aa, Homo sapiens
CATQEYSGVHKFDPW

SEQ ID NO: 27068 - protein, 21 aa, Homo sapiens
CARDKSGSYNENYYYYYMDVW

SEQ ID NO: 27069 - protein, 15 aa, Homo sapiens
CARVNLDIPYYFDYW

SEQ ID NO: 27070 - protein, 20 aa, Homo sapiens
CARAKYQLLYDDPFNYFDYW

SEQ ID NO: 27071 - protein, 17 aa, Homo sapiens
CASLRSMATILSAFDYW

SEQ ID NO: 27072 - protein, 23 aa, Homo sapiens
CARAKLPYYYDGSGFRADAPDIW

SEQ ID NO: 27073 - protein, 20 aa, Homo sapiens
CATNQDYDSSGYWGDAFDIW

SEQ ID NO: 27074 - protein, 21 aa, Homo sapiens
CARDEKFDDSGYYYSYYLDYW

SEQ ID NO: 27075 - protein, 17 aa, Homo sapiens
CARDYFDSSGNYYVDYW

SEQ ID NO: 27076 - protein, 22 aa, Homo sapiens
CAKSRTFGLGTYHNGPDAFDVW

SEQ ID NO: 27077 - protein, 20 aa, Homo sapiens
CARDRTYCSTTTCYNYFDSW

SEQ ID NO: 27078 - protein, 19 aa, Homo sapiens
CARAKDMIVVVTPSAFDIW

SEQ ID NO: 27079 - protein, 18 aa, Homo sapiens
CARVQNFDWLPTGYFDYW

SEQ ID NO: 27080 - protein, 24 aa, Homo sapiens
CAKDLGGHCTNGVCNYYYYGMDVW

SEQ ID NO: 27081 - protein, 17 aa, Homo sapiens
CVKDMGIAVDTVNLDYW

SEQ ID NO: 27082 - protein, 21 aa, Homo sapiens
CARGGWKGSSSRYYYYYMDVW

SEQ ID NO: 27083 - protein, 25 aa, Homo sapiens
CARRNGHDYGSGSRARGLDDAFDIW

SEQ ID NO: 27084 - protein, 14 aa, Homo sapiens
CAKIPGSGSPNDYW

SEQ ID NO: 27085 - protein, 23 aa, Homo sapiens
CAKLAEVHAYDFWSAYYNYFDSW

SEQ ID NO: 27086 - protein, 18 aa, Homo sapiens
CARDMDQQLAPPMAFDVW

SEQ ID NO: 27087 - protein, 20 aa, Homo sapiens
CARDTSSSSYYYYYYGMDVW

SEQ ID NO: 27088 - protein, 16 aa, Homo sapiens
CVKMRGATYQWYFDLW

SEQ ID NO: 27089 - protein, 23 aa, Homo sapiens
CARDSSSEEFYDISGYLDAFDVW

SEQ ID NO: 27090 - protein, 15 aa, Homo sapiens
CARQHNSGLYFFDYW

SEQ ID NO: 27091 - protein, 17 aa, Homo sapiens
CAKVWRYSSGWHYFENW

SEQ ID NO: 27092 - protein, 22 aa, Homo sapiens
CARSSISSVAWTMGAYDAFDLW

SEQ ID NO: 27093 - protein, 21 aa, Homo sapiens
CARDQQRSYESTAYIDVFDIW

SEQ ID NO: 27094 - protein, 17 aa, Homo sapiens
CAKMELGTYDSRKNDYW

SEQ ID NO: 27095 - protein, 14 aa, Homo sapiens
CTTDLHDYGDSDYW

SEQ ID NO: 27096 - protein, 17 aa, Homo sapiens
CARDGPASYTNGCLDYW

SEQ ID NO: 27097 - protein, 22 aa, Homo sapiens
CARPFGRLITMIVNTPDAFDIW

SEQ ID NO: 27098 - protein, 14 aa, Homo sapiens
CAKLDSSSWPSDYW

SEQ ID NO: 27099 - protein, 17 aa, Homo sapiens
CARTPYCDTTSCFFDYW

SEQ ID NO: 27100 - protein, 13 aa, Homo sapiens
CLSAGSSGAYRIF

SEQ ID NO: 27101 - protein, 25 aa, Homo sapiens
CARMSGWATQHSGELLYDTYYFDYW

SEQ ID NO: 27102 - protein, 15 aa, Homo sapiens
CVPKDSSGYFLFDYW

SEQ ID NO: 27103 - protein, 21 aa, Homo sapiens
CARVVPPLGGITTILYAFDIW

SEQ ID NO: 27104 - protein, 12 aa, Homo sapiens
CVRHLETEFDYW

SEQ ID NO: 27105 - protein, 18 aa, Homo sapiens
CARDLRTYCGVDCLFDYW

SEQ ID NO: 27106 - protein, 14 aa, Homo sapiens
CARFLHGILGFDYW

SEQ ID NO: 27107 - protein, 21 aa, Homo sapiens
CARDSLYVKPPRGSSGYLDYW

SEQ ID NO: 27108 - protein, 15 aa, Homo sapiens
CTKLSAGKGDWFDPW

SEQ ID NO: 27109 - protein, 17 aa, Homo sapiens
CARTERGWLPPTVGDYW

SEQ ID NO: 27110 - protein, 15 aa, Homo sapiens
CASGSSGWYETIDYW

SEQ ID NO: 27111 - protein, 23 aa, Homo sapiens
CAHRPSYNDFWSGYYDRYYFDYW

SEQ ID NO: 27112 - protein, 19 aa, Homo sapiens
CARANGGGGTVYYFYMDVW

SEQ ID NO: 27113 - protein, 20 aa, Homo sapiens
CARPSRYCSGGSCYPAFDYW

SEQ ID NO: 27114 - protein, 17 aa, Homo sapiens
CVRPRPFSAARFYIDFW

SEQ ID NO: 27115 - protein, 20 aa, Homo sapiens
CARGPLYDGRGYYHRPFDIW

SEQ ID NO: 27116 - protein, 23 aa, Homo sapiens
CARVSTERDFVLGVYGMVAFDAW

SEQ ID NO: 27117 - protein, 16 aa, Homo sapiens
CAKGKLGIVSAPFDYW

SEQ ID NO: 27118 - protein, 17 aa, Homo sapiens
CARGPDYYDPEWYFDLW

SEQ ID NO: 27119 - protein, 17 aa, Homo sapiens
CANGGTYYYDSPPFDIW

SEQ ID NO: 27120 - protein, 17 aa, Homo sapiens
CARMMCSTSSERFFDYW

SEQ ID NO: 27121 - protein, 19 aa, Homo sapiens
CAKDTTSGWPYYYYGLDVW

SEQ ID NO: 27122 - protein, 17 aa, Homo sapiens
CASTILSDWNAYAFHIW

SEQ ID NO: 27123 - protein, 21 aa, Homo sapiens
CARGGVAARPEAFDYFYMDVW

SEQ ID NO: 27124 - protein, 17 aa, Homo sapiens
CAKDIGGEYIYQYMDVW

SEQ ID NO: 27125 - protein, 11 aa, Homo sapiens
CAGHDSLFDIW

SEQ ID NO: 27126 - protein, 19 aa, Homo sapiens
CAATYYSESSALWFAFDFW

SEQ ID NO: 27127 - protein, 21 aa, Homo sapiens
CARAGGYCSGGSCSYPWFDPW

SEQ ID NO: 27128 - protein, 15 aa, Homo sapiens
CTSELFPRYYYLGYW

SEQ ID NO: 27129 - protein, 15 aa, Homo sapiens
CAKAPDSSGSQHDYW

SEQ ID NO: 27130 - protein, 18 aa, Homo sapiens
CARHLGYSSGWPNWFDPW

SEQ ID NO: 27131 - protein, 18 aa, Homo sapiens
CARTGFDNSGFYYFCDYW

SEQ ID NO: 27132 - protein, 26 aa, Homo sapiens
CARDLESSPLGVLAAMEGYFYYMDVW

SEQ ID NO: 27133 - protein, 15 aa, Homo sapiens
CASSESSGWDYFNYW

SEQ ID NO: 27134 - protein, 17 aa, Homo sapiens
CAKLSGRDYYDSNNDYW

SEQ ID NO: 27135 - protein, 25 aa, Homo sapiens
CARLIRVTYDFWSGSTPPSYYMDVW

SEQ ID NO: 27136 - protein, 22 aa, Homo sapiens
CARVSGYYDSSGYWRNDAFDIW

SEQ ID NO: 27137 - protein, 17 aa, Homo sapiens
CAKDSSWGYSYGFFDYW

SEQ ID NO: 27138 - protein, 22 aa, Homo sapiens
CTTYTPPPGYCRSTSCSSVDYW

SEQ ID NO: 27139 - protein, 9 aa, Homo sapiens
CAQGYTGYW

SEQ ID NO: 27140 - protein, 17 aa, Homo sapiens
CARGNADFWSAYPIDYW

SEQ ID NO: 27141 - protein, 21 aa, Homo sapiens
CARHSTYYDLSSGSENWFDPW

SEQ ID NO: 27142 - protein, 25 aa, Homo sapiens
CARVRSSKYGAAVESPSYYYYMDVW

SEQ ID NO: 27143 - protein, 25 aa, Homo sapiens
CARGSKSSFRYCTNGICLQEPFDSW

SEQ ID NO: 27144 - protein, 15 aa, Homo sapiens
CARSPSIGASQNDYW

SEQ ID NO: 27145 - protein, 16 aa, Homo sapiens
CARPIGSGNYDAFDIW

SEQ ID NO: 27146 - protein, 21 aa, Homo sapiens
CATGSPLYYDFWSGHNWFDPW

SEQ ID NO: 27147 - protein, 18 aa, Homo sapiens
CAKVWEIVLEPGAFLDYW

SEQ ID NO: 27148 - protein, 19 aa, Homo sapiens
CARLIGYYDSSGYYWFDYW

SEQ ID NO: 27149 - protein, 22 aa, Homo sapiens
CASTVYYDFWSGYPSPPYFDYW

SEQ ID NO: 27150 - protein, 19 aa, Homo sapiens
CATGRVRIPESYHQYMDVW

SEQ ID NO: 27151 - protein, 23 aa, Homo sapiens
CVRDYYDSSGYSGNSYFYYMDVW

SEQ ID NO: 27152 - protein, 21 aa, Homo sapiens
CARDLTTESKDGGAYDYFDHW

SEQ ID NO: 27153 - protein, 14 aa, Homo sapiens
CAAQRRPYDAFDIW

SEQ ID NO: 27154 - protein, 11 aa, Homo sapiens
CARDLNHLDYW

SEQ ID NO: 27155 - protein, 18 aa, Homo sapiens
CARVDRRAVPAAIIFQHW

SEQ ID NO: 27156 - protein, 14 aa, Homo sapiens
CVILENMYAAFEIW

SEQ ID NO: 27157 - protein, 13 aa, Homo sapiens
CARGETYYSFDIW

SEQ ID NO: 27158 - protein, 11 aa, Homo sapiens
CARDPYYSSYW

SEQ ID NO: 27159 - protein, 25 aa, Homo sapiens
CARETFYYASGTTTGGFYYYAMDVW

SEQ ID NO: 27160 - protein, 22 aa, Homo sapiens
CSTYTPLRVGAVFNYHYYLDVW

SEQ ID NO: 27161 - protein, 21 aa, Homo sapiens
CARSRVPFQLWSFVSGDFDIW

SEQ ID NO: 27162 - protein, 16 aa, Homo sapiens
CASGFWSGYTDAFDIW

SEQ ID NO: 27163 - protein, 20 aa, Homo sapiens
CARYRDIVLMVYDSSGIDYW

SEQ ID NO: 27164 - protein, 18 aa, Homo sapiens
CARGPAPGYSYDYGFEYW

SEQ ID NO: 27165 - protein, 24 aa, Homo sapiens
CARCGWRYCSGGSCYRRYEAFDIW

SEQ ID NO: 27166 - protein, 24 aa, Homo sapiens
CAKDGGPYYYDSSGYLLPYYFDYW

SEQ ID NO: 27167 - protein, 15 aa, Homo sapiens
CAKFIRGLGHSFDYW

SEQ ID NO: 27168 - protein, 18 aa, Homo sapiens
CAKLATSNGITGTTGDYW

SEQ ID NO: 27169 - protein, 21 aa, Homo sapiens
CARHQEGHYFDTSNYYYVDSW

SEQ ID NO: 27170 - protein, 17 aa, Homo sapiens
CAKDQTPIWVPPSFDYW

SEQ ID NO: 27171 - protein, 24 aa, Homo sapiens
CARTHVVRSSEWFFADRHDAFDVW

SEQ ID NO: 27172 - protein, 15 aa, Homo sapiens
CAKDIGAVAAYFDYW

SEQ ID NO: 27173 - protein, 21 aa, Homo sapiens
CAKELNYDFWSGYSPYYLDWW

SEQ ID NO: 27174 - protein, 19 aa, Homo sapiens
CAKDPHRHYCSGSDCFDNW

SEQ ID NO: 27175 - protein, 24 aa, Homo sapiens
CARLRCTSTTCYLDYYRNYYMDVW

SEQ ID NO: 27176 - protein, 15 aa, Homo sapiens
CATDRSPTYWYFDLW

SEQ ID NO: 27177 - protein, 15 aa, Homo sapiens
CARPSSAYDYFFDHW

SEQ ID NO: 27178 - protein, 31 aa, Homo sapiens
CARERFSRYTNPFIVLAKKGATSSYFAMDVW

SEQ ID NO: 27179 - protein, 15 aa, Homo sapiens
CAKVLSGYGEITDYW

SEQ ID NO: 27180 - protein, 18 aa, Homo sapiens
CARSLSKYTWTTLYFDYW

SEQ ID NO: 27181 - protein, 21 aa, Homo sapiens
CAREMSEGVLLWFGELGFDYW

SEQ ID NO: 27182 - protein, 18 aa, Homo sapiens
CAKDAGGGIRVVAIYDYW

SEQ ID NO: 27183 - protein, 27 aa, Homo sapiens
CARVEELEYCTSRSCSDYYYYYYMDVW

SEQ ID NO: 27184 - protein, 15 aa, Homo sapiens
CARRNGFSSGPFDHW

SEQ ID NO: 27185 - protein, 15 aa, Homo sapiens
CDARWNDEIQAFDFW

SEQ ID NO: 27186 - protein, 23 aa, Homo sapiens
CAKDAVLLPALRLNNHPYYMDVW

SEQ ID NO: 27187 - protein, 16 aa, Homo sapiens
CATLRAGYGDIPFDYW

SEQ ID NO: 27188 - protein, 17 aa, Homo sapiens
CARVVYNYPYTEAFDMW

SEQ ID NO: 27189 - protein, 21 aa, Homo sapiens
CVKDIEKRDGNNYFYYGMDVW

SEQ ID NO: 27190 - protein, 17 aa, Homo sapiens
CARDDFYYDGQDAFDIW

SEQ ID NO: 27191 - protein, 23 aa, Homo sapiens
CARAKGRISLRYFDWLFHAFDMW

SEQ ID NO: 27192 - protein, 17 aa, Homo sapiens
CAKDTAYHFHTGGIDYW

SEQ ID NO: 27193 - protein, 17 aa, Homo sapiens
CAKRPMVRGVYGEFDYW

SEQ ID NO: 27194 - protein, 20 aa, Homo sapiens
CAKDVRYCNSATCYDGMDVW

SEQ ID NO: 27195 - protein, 18 aa, Homo sapiens
CARLFDLGTAAVRWFDPW

SEQ ID NO: 27196 - protein, 16 aa, Homo sapiens
CARPYSGSYGSYFDYW

SEQ ID NO: 27197 - protein, 17 aa, Homo sapiens
CATGGGQQYDPNIFGYW

SEQ ID NO: 27198 - protein, 20 aa, Homo sapiens
CASGAYDSSSGSSGFAFDIW

SEQ ID NO: 27199 - protein, 15 aa, Homo sapiens
CARDKMSTVDYFQYW

SEQ ID NO: 27200 - protein, 18 aa, Homo sapiens
CAKHLTGTTSSYDAFDSW

SEQ ID NO: 27201 - protein, 14 aa, Homo sapiens
CARAHGWLYSFDPW

SEQ ID NO: 27202 - protein, 17 aa, Homo sapiens
CVKESVAGTMPKTFDVW

SEQ ID NO: 27203 - protein, 16 aa, Homo sapiens
CATYSRSSYHDSFDIW

SEQ ID NO: 27204 - protein, 13 aa, Homo sapiens
CQSADTSLTRGVF

SEQ ID NO: 27205 - protein, 18 aa, Homo sapiens
CARDYRYYGSSGYYHDHW

SEQ ID NO: 27206 - protein, 16 aa, Homo sapiens
CAKGSGYDYRDHFDSW

SEQ ID NO: 27207 - protein, 16 aa, Homo sapiens
CTTVELSFGEFTFDPW

SEQ ID NO: 27208 - protein, 14 aa, Homo sapiens
CAATLVGATEDDYW

SEQ ID NO: 27209 - protein, 10 aa, Homo sapiens
CQQFNTYPSF

SEQ ID NO: 27210 - protein, 24 aa, Homo sapiens
CANWGSRDCSSTSCPLYYYYMDVW

SEQ ID NO: 27211 - protein, 23 aa, Homo sapiens
CAKESTNYYDSSGYNYGHYFDYW

SEQ ID NO: 27212 - protein, 17 aa, Homo sapiens
CARSGSGWSLVTPFDYW

SEQ ID NO: 27213 - protein, 17 aa, Homo sapiens
CARGVPTVAGLNPFDYW

SEQ ID NO: 27214 - protein, 20 aa, Homo sapiens
CARHIFAGSSWSRWYCFDYW

SEQ ID NO: 27215 - protein, 18 aa, Homo sapiens
CAKPYRERVQIPDAFDIW

SEQ ID NO: 27216 - protein, 20 aa, Homo sapiens
CARDVVSVGAANYYYGMDVW

SEQ ID NO: 27217 - protein, 24 aa, Homo sapiens
CTRRLDPCSDFWSGYCLVRPFDYW

SEQ ID NO: 27218 - protein, 19 aa, Homo sapiens
CAKGSGILYSSAFNWFDPW

SEQ ID NO: 27219 - protein, 17 aa, Homo sapiens
CARGVATITGGTKPDYW

SEQ ID NO: 27220 - protein, 16 aa, Homo sapiens
CARRRLLWFGDPFDIW

SEQ ID NO: 27221 - protein, 16 aa, Homo sapiens
CATEGRYFDWLPFDYW

SEQ ID NO: 27222 - protein, 18 aa, Homo sapiens
CARDAFRAVTPELLIDYW

SEQ ID NO: 27223 - protein, 18 aa, Homo sapiens
CAREYCSGTTCYSGFAYW

SEQ ID NO: 27224 - protein, 16 aa, Homo sapiens
CAKDTAPSIYDAFDIW

SEQ ID NO: 27225 - protein, 11 aa, Homo sapiens
CQHYNSYPFAF

SEQ ID NO: 27226 - protein, 16 aa, Homo sapiens
CARQREGMVTDGFDIW

SEQ ID NO: 27227 - protein, 19 aa, Homo sapiens
CARLYGGPAVVGDYYFDFW

SEQ ID NO: 27228 - protein, 14 aa, Homo sapiens
CAGGLVRASSFDYW

SEQ ID NO: 27229 - protein, 24 aa, Homo sapiens
CDWSSDVCSSDLAEWDLLLPFDIW

SEQ ID NO: 27230 - protein, 40 aa, Homo sapiens
CALPIYLQMDSLRAGDTAIYYCAKDSRLFLLGADYYFDYW

SEQ ID NO: 27231 - protein, 15 aa, Homo sapiens
CARGAYTSSSYFDRW

SEQ ID NO: 27232 - protein, 22 aa, Homo sapiens
CARDRTYDFWSGYYTGGYFDSW

SEQ ID NO: 27233 - protein, 15 aa, Homo sapiens
CVKDRVFRADAFDVW

SEQ ID NO: 27234 - protein, 13 aa, Homo sapiens
CARKDPFGVDDYW

SEQ ID NO: 27235 - protein, 15 aa, Homo sapiens
CVSVDIGSALVLDYW

SEQ ID NO: 27236 - protein, 15 aa, Homo sapiens
CVRHGLTGDHYFDLW

SEQ ID NO: 27237 - protein, 12 aa, Homo sapiens
CHHYNNWPLLTF

SEQ ID NO: 27238 - protein, 14 aa, Homo sapiens
CATWTPTVKVVDYW

SEQ ID NO: 27239 - protein, 15 aa, Homo sapiens
CTKDISGDGAAFDIW

SEQ ID NO: 27240 - protein, 15 aa, Homo sapiens
CVRACSSLDCYIDYW

SEQ ID NO: 27241 - protein, 14 aa, Homo sapiens
CAKLSGYSYANDYW

SEQ ID NO: 27242 - protein, 14 aa, Homo sapiens
CTTEGDDARPIDYW

SEQ ID NO: 27243 - protein, 23 aa, Homo sapiens
CARVYTAGASTPMATSWWYFDIW

SEQ ID NO: 27244 - protein, 17 aa, Homo sapiens
CAKANVGSYIGDFFDIW

SEQ ID NO: 27245 - protein, 27 aa, Homo sapiens
CARIRADSSSWYVLGGEKKSHYYFDYW

SEQ ID NO: 27246 - protein, 15 aa, Homo sapiens
CAKDITPTVTTADYW

SEQ ID NO: 27247 - protein, 25 aa, Homo sapiens
CARLLPRGDSSGYYYKTYYWYFDLW

SEQ ID NO: 27248 - protein, 18 aa, Homo sapiens
CARDMAAAWVPGGMSDYW

SEQ ID NO: 27249 - protein, 16 aa, Homo sapiens
CARADLNPQLRWFDPW

SEQ ID NO: 27250 - protein, 16 aa, Homo sapiens
CASSSRPGVAAAIDYW

SEQ ID NO: 27251 - protein, 18 aa, Homo sapiens
CTTEERFLEWLMSSFDYW

SEQ ID NO: 27252 - protein, 17 aa, Homo sapiens
CARVGTYYYDRDAFDLW

SEQ ID NO: 27253 - protein, 21 aa, Homo sapiens
CARDKMGLLQWSTRKREFDYW

SEQ ID NO: 27254 - protein, 23 aa, Homo sapiens
CARDFTGYYDYGSNPAYWFFDLW

SEQ ID NO: 27255 - protein, 18 aa, Homo sapiens
CTRGPPIAVTATDAFDIW

SEQ ID NO: 27256 - protein, 20 aa, Homo sapiens
CARDALILLWFGDGNWFDPW

SEQ ID NO: 27257 - protein, 17 aa, Homo sapiens
CAHSDGGAAATATFDYW

SEQ ID NO: 27258 - protein, 23 aa, Homo sapiens
CMQALQTPPTFGPGTKVDIKRTF

SEQ ID NO: 27259 - protein, 17 aa, Homo sapiens
CAKVRELGSSYWYFDLW

SEQ ID NO: 27260 - protein, 14 aa, Homo sapiens
CARARLRDPYPDYW

SEQ ID NO: 27261 - protein, 30 aa, Homo sapiens
CAKKQLTPYSTSSIVTPRKQIKRVDAFDVW

SEQ ID NO: 27262 - protein, 17 aa, Homo sapiens
CARLRGDDFYSGYFDFW

SEQ ID NO: 27263 - protein, 20 aa, Homo sapiens
CAREIRTTVRGVMINWFDPW

SEQ ID NO: 27264 - protein, 23 aa, Homo sapiens
CAKGDYDFWNVFSIESRRSFDYW

SEQ ID NO: 27265 - protein, 18 aa, Homo sapiens
CARHARLGAVGTRFFDYW

SEQ ID NO: 27266 - protein, 17 aa, Homo sapiens
CIRDRQLASHTYNFDYW

SEQ ID NO: 27267 - protein, 19 aa, Homo sapiens
CGKDGTSFYEGSGYYLDLW

SEQ ID NO: 27268 - protein, 20 aa, Homo sapiens
CARGRQYCSGGSCYDAFDIW

SEQ ID NO: 27269 - protein, 27 aa, Homo sapiens
CARGSSAIGAALGWWGRQFKGNWFDPW

SEQ ID NO: 27270 - protein, 16 aa, Homo sapiens
CAKDISAVAAQRFDYW

SEQ ID NO: 27271 - protein, 25 aa, Homo sapiens
CAKDISPYDSSDFYPQDYYYGMDVW

SEQ ID NO: 27272 - protein, 22 aa, Homo sapiens
CARGSHTHKIYDILTGHFFDSW

SEQ ID NO: 27273 - protein, 13 aa, Homo sapiens
CQQYNFSPRMYTF

SEQ ID NO: 27274 - protein, 18 aa, Homo sapiens
CARAQDWSYGYYFYMDVW

SEQ ID NO: 27275 - protein, 16 aa, Homo sapiens
CARELTSLTVFHFDHW

SEQ ID NO: 27276 - protein, 16 aa, Homo sapiens
CAKYSSSWYGVYFGYW

SEQ ID NO: 27277 - protein, 13 aa, Homo sapiens
CAHTYDSRAVDVW

SEQ ID NO: 27278 - protein, 14 aa, Homo sapiens
CARDGATVLPFDFW

SEQ ID NO: 27279 - protein, 13 aa, Homo sapiens
CARHSDVKQIDYW

SEQ ID NO: 27280 - protein, 18 aa, Homo sapiens
CARVGLEYWGSVYHFDYW

SEQ ID NO: 27281 - protein, 13 aa, Homo sapiens
CQQYNSYFRTWTF

SEQ ID NO: 27282 - protein, 14 aa, Homo sapiens
CARCQWEPLLFDFW

SEQ ID NO: 27283 - protein, 17 aa, Homo sapiens
CARGSVVRGGDYWFDPW

SEQ ID NO: 27284 - protein, 15 aa, Homo sapiens
CAKDSSPINHYMDVW

SEQ ID NO: 27285 - protein, 17 aa, Homo sapiens
CAKLIDSSGYEGPFDIW

SEQ ID NO: 27286 - protein, 19 aa, Homo sapiens
CAKVYRRDIVVVPAAHDYW

SEQ ID NO: 27287 - protein, 35 aa, Homo sapiens
CDWSSDVCSSDLSDTAIYYCARLGAARGHEAFDYW

SEQ ID NO: 27288 - protein, 19 aa, Homo sapiens
CARHDTSRESGWGTWFDPW

SEQ ID NO: 27289 - protein, 12 aa, Homo sapiens
CAKKTSAWYDYW

SEQ ID NO: 27290 - protein, 19 aa, Homo sapiens
CARHPRPSRNYYYYYMDVW

SEQ ID NO: 27291 - protein, 18 aa, Homo sapiens
CAKDKEWELLRGPNFDYW

SEQ ID NO: 27292 - protein, 22 aa, Homo sapiens
CTRAAGITETTRPGYYYGMDVW

SEQ ID NO: 27293 - protein, 22 aa, Homo sapiens
CATCARNTYYFDSSGLDAFDIW

SEQ ID NO: 27294 - protein, 15 aa, Homo sapiens
CVRDRAVSNKGGDYW

SEQ ID NO: 27295 - protein, 17 aa, Homo sapiens
CVRLAPRITIFGEFAYW

SEQ ID NO: 27296 - protein, 24 aa, Homo sapiens
CATDILPLYCSSTSCYGRRYFDYW

SEQ ID NO: 27297 - protein, 20 aa, Homo sapiens
CALPICVYYCARRLIAFDIW

SEQ ID NO: 27298 - protein, 26 aa, Homo sapiens
CARDPQLAGGEYSYGYLDYYYGMDVW

SEQ ID NO: 27299 - protein, 16 aa, Homo sapiens
CVSGETTTLPGVFAYW

SEQ ID NO: 27300 - protein, 22 aa, Homo sapiens
CARDLEVASIRDPFPVYYFDSW

SEQ ID NO: 27301 - protein, 25 aa, Homo sapiens
CARGRGYYDSSDYNPDYYYYGLDVW

SEQ ID NO: 27302 - protein, 18 aa, Homo sapiens
CAKGGVVTAIRLPYFDYW

SEQ ID NO: 27303 - protein, 15 aa, Homo sapiens
CARDSGYNDYRVDYW

SEQ ID NO: 27304 - protein, 16 aa, Homo sapiens
CARGPLAIAPWYFEYW

SEQ ID NO: 27305 - protein, 16 aa, Homo sapiens
CAKDILGAVTNAFDYW

SEQ ID NO: 27306 - protein, 12 aa, Homo sapiens
CQQYYSNALFNF

SEQ ID NO: 27307 - protein, 16 aa, Homo sapiens
CTRVPPQGRGPPFDYW

SEQ ID NO: 27308 - protein, 14 aa, Homo sapiens
CARTINSGWTFDFW

SEQ ID NO: 27309 - protein, 19 aa, Homo sapiens
CASDYGDYVRRYYYGMDVW

SEQ ID NO: 27310 - protein, 20 aa, Homo sapiens
CARINFRYSSSSWKYYFDYW

SEQ ID NO: 27311 - protein, 39 aa, Homo sapiens
CALPILSLKLSSVTAADTAVYFCARPQAEWDLLLPFDIW

SEQ ID NO: 27312 - protein, 18 aa, Homo sapiens
CARWAGQHSDYIPLFDYW

SEQ ID NO: 27313 - protein, 19 aa, Homo sapiens
CASFYSGYDYNYYYYMDVW

SEQ ID NO: 27314 - protein, 14 aa, Homo sapiens
CATWDDSLNSPLAF

SEQ ID NO: 27315 - protein, 18 aa, Homo sapiens
CAKDGARYYGGNGAFDIW

SEQ ID NO: 27316 - protein, 17 aa, Homo sapiens
CAHRQITGTTACTFDYW

SEQ ID NO: 27317 - protein, 20 aa, Homo sapiens
CARHSSQLLWLGGSGGFDIW

SEQ ID NO: 27318 - protein, 19 aa, Homo sapiens
CARLHSSSFLGLRGAFDIW

SEQ ID NO: 27319 - protein, 15 aa, Homo sapiens
CARECLGGGDCFDYW

SEQ ID NO: 27320 - protein, 19 aa, Homo sapiens
CARVSVSGVVAATHYFDYW

SEQ ID NO: 27321 - protein, 14 aa, Homo sapiens
CSDTSCIDWYFDLW

SEQ ID NO: 27322 - protein, 15 aa, Homo sapiens
CARWGSGPISYFDYW

SEQ ID NO: 27323 - protein, 19 aa, Homo sapiens
CAKGLYYDSSGYPTFFDYW

SEQ ID NO: 27324 - protein, 23 aa, Homo sapiens
CAKDTTGYRSSNYRIEVYYFDSW

SEQ ID NO: 27325 - protein, 18 aa, Homo sapiens
CALPISRLRRGNDAFDIW

SEQ ID NO: 27326 - protein, 17 aa, Homo sapiens
CARTFLSTTWYEPFDYW

SEQ ID NO: 27327 - protein, 17 aa, Homo sapiens
CVTHYDFWSGHHYFDYW

SEQ ID NO: 27328 - protein, 18 aa, Homo sapiens
CAKSLMVGRPGDDLFDYW

SEQ ID NO: 27329 - protein, 19 aa, Homo sapiens
CARHHANQYYHSDSPFAYW

SEQ ID NO: 27330 - protein, 16 aa, Homo sapiens
CAKATPRYYYYGMDVW

SEQ ID NO: 27331 - protein, 17 aa, Homo sapiens
CASLCGSDCYGIWFDPW

SEQ ID NO: 27332 - protein, 19 aa, Homo sapiens
CATVSPIYGDYVGWIFDYW

SEQ ID NO: 27333 - protein, 21 aa, Homo sapiens
CARDRRIILYSSSLNDAFDMW

SEQ ID NO: 27334 - protein, 17 aa, Homo sapiens
CAKDEGDCTTTSCYFYW

SEQ ID NO: 27335 - protein, 16 aa, Homo sapiens
CAKDRCSSTTCSSDYW

SEQ ID NO: 27336 - protein, 17 aa, Homo sapiens
CARDGMRQLDLDAFDFW

SEQ ID NO: 27337 - protein, 16 aa, Homo sapiens
CAKDYDSSGYSHFDYW

SEQ ID NO: 27338 - protein, 25 aa, Homo sapiens
CARDKRTTYYYDIDEGPAADYIQHW

SEQ ID NO: 27339 - protein, 17 aa, Homo sapiens
CALSDYLWGSSPRIDYW

SEQ ID NO: 27340 - protein, 27 aa, Homo sapiens
CARGALDYTDYVDYGDVDHYYYYMDVW

SEQ ID NO: 27341 - protein, 21 aa, Homo sapiens
CATSLGLWNDYYLLGTYFDYW

SEQ ID NO: 27342 - protein, 14 aa, Homo sapiens
CAREAGWTMGFDQW

SEQ ID NO: 27343 - protein, 28 aa, Homo sapiens
CARHSHNYDSSTYYGEVDYYYYYRMDVW

SEQ ID NO: 27344 - protein, 20 aa, Homo sapiens
CARDFGPGTYSSGWYWFDPW

SEQ ID NO: 27345 - protein, 20 aa, Homo sapiens
CAKDGTNIFGVTSLGNFDYW

SEQ ID NO: 27346 - protein, 14 aa, Homo sapiens
CARVITASGTIDYW

SEQ ID NO: 27347 - protein, 22 aa, Homo sapiens
CAKDMFPGHIPAAGASHAFDIW

SEQ ID NO: 27348 - protein, 17 aa, Homo sapiens
CAKASYNDIQFRAFDFW

SEQ ID NO: 27349 - protein, 13 aa, Homo sapiens
CARDSSWEGVDYW

SEQ ID NO: 27350 - protein, 16 aa, Homo sapiens
CARDGDIRSSTSCDYW

SEQ ID NO: 27351 - protein, 17 aa, Homo sapiens
CARHGYISQQLNWFDPW

SEQ ID NO: 27352 - protein, 17 aa, Homo sapiens
CAKDVSYSNYGFRFDPW

SEQ ID NO: 27353 - protein, 28 aa, Homo sapiens
CARDHIGEYYDILTGYPLYYYYYGMDVW

SEQ ID NO: 27354 - protein, 14 aa, Homo sapiens
CARDGEDSPFFDLW

SEQ ID NO: 27355 - protein, 18 aa, Homo sapiens
CAHRRLDGYNWADIFDYW

SEQ ID NO: 27356 - protein, 12 aa, Homo sapiens
CSGEESKGVDYW

SEQ ID NO: 27357 - protein, 18 aa, Homo sapiens
CARRRTYSRRWLHAFDMW

SEQ ID NO: 27358 - protein, 17 aa, Homo sapiens
CATGPFCSGIDCYFDYW

SEQ ID NO: 27359 - protein, 26 aa, Homo sapiens
CAKGSYCSGGSCYSYTVKGLYYFDYW

SEQ ID NO: 27360 - protein, 16 aa, Homo sapiens
CAKDVDGYNDVGFDYW

SEQ ID NO: 27361 - protein, 19 aa, Homo sapiens
CARDLGYCSGGNCYSPDYW

SEQ ID NO: 27362 - protein, 18 aa, Homo sapiens
CARGARITMQVVDHFDYW

SEQ ID NO: 27363 - protein, 31 aa, Homo sapiens
CALPISAVYYCAKDQLLAPYPYYYYHGPDVW

SEQ ID NO: 27364 - protein, 18 aa, Homo sapiens
CARNGDFGVIISGSFDYW

SEQ ID NO: 27365 - protein, 12 aa, Homo sapiens
CVRSSDRFFDFW

SEQ ID NO: 27366 - protein, 17 aa, Homo sapiens
CARVVEGSGTGSTFDYW

SEQ ID NO: 27367 - protein, 18 aa, Homo sapiens
CAKHPFTGESLEGYFESW

SEQ ID NO: 27368 - protein, 19 aa, Homo sapiens
CARESGLITAETTIPFDYW

SEQ ID NO: 27369 - protein, 21 aa, Homo sapiens
CARDIRYCSSSGCNNPWFDPW

SEQ ID NO: 27370 - protein, 21 aa, Homo sapiens
CARDTSSTPVAKPNNDAFDIW

SEQ ID NO: 27371 - protein, 19 aa, Homo sapiens
CAKDPHGLFCSGSSCFDDW

SEQ ID NO: 27372 - protein, 11 aa, Homo sapiens
CQQSFSISWTF

SEQ ID NO: 27373 - protein, 19 aa, Homo sapiens
CARHFGDFILTTYYPFDYW

SEQ ID NO: 27374 - protein, 18 aa, Homo sapiens
CARTQHNPLWWPSHFDYW

SEQ ID NO: 27375 - protein, 20 aa, Homo sapiens
CARDGGQSTAWPRHSFFDYW

SEQ ID NO: 27376 - protein, 23 aa, Homo sapiens
CTTGLDYYSDTSDFSGKYCFDHW

SEQ ID NO: 27377 - protein, 14 aa, Homo sapiens
CASSYSGSYPTDYW

SEQ ID NO: 27378 - protein, 15 aa, Homo sapiens
CATVEMATINAFDIW

SEQ ID NO: 27379 - protein, 20 aa, Homo sapiens
CAKSPGYCSSTSCPSEFDPW

SEQ ID NO: 27380 - protein, 19 aa, Homo sapiens
CAREASGLAAYYYYGLDVW

SEQ ID NO: 27381 - protein, 19 aa, Homo sapiens
CARVRGELWFIYYYYMDVW

SEQ ID NO: 27382 - protein, 14 aa, Homo sapiens
CACLHTIPDTFDIW

SEQ ID NO: 27383 - protein, 20 aa, Homo sapiens
CAKGTYFYDTNGYFGYIDFW

SEQ ID NO: 27384 - protein, 24 aa, Homo sapiens
CAREPTSYYDTSGYSLPHTYFDSW

SEQ ID NO: 27385 - protein, 17 aa, Homo sapiens
CARSYYDTVGYYPFDNW

SEQ ID NO: 27386 - protein, 24 aa, Homo sapiens
CASQEGGSSSWTPPWNYYYGMDVW

SEQ ID NO: 27387 - protein, 23 aa, Homo sapiens
CARDYCGGDCYSRHYYNYGMDVW

SEQ ID NO: 27388 - protein, 12 aa, Homo sapiens
CAGELSSSWDYW

SEQ ID NO: 27389 - protein, 16 aa, Homo sapiens
CARGRVDEYYDAFDIW

SEQ ID NO: 27390 - protein, 21 aa, Homo sapiens
CARDLQGSLGSYYEFYGMDVW

SEQ ID NO: 27391 - protein, 18 aa, Homo sapiens
CARDYYDSSGYYNWFDPW

SEQ ID NO: 27392 - protein, 15 aa, Homo sapiens
CAKDMGLDGSSFDYW

SEQ ID NO: 27393 - protein, 22 aa, Homo sapiens
CARLDLGDCSSTSCSIDAFDIW

SEQ ID NO: 27394 - protein, 18 aa, Homo sapiens
CASERGYDFWSGSPFDYW

SEQ ID NO: 27395 - protein, 15 aa, Homo sapiens
CARVKEFSYGLGDYW

SEQ ID NO: 27396 - protein, 17 aa, Homo sapiens
CARDDFRDSNFDAFDIW

SEQ ID NO: 27397 - protein, 23 aa, Homo sapiens
CARSFFRGYCNSASCYVGAFDIW

SEQ ID NO: 27398 - protein, 16 aa, Homo sapiens
CARRYNIGLGRTFDIW

SEQ ID NO: 27399 - protein, 17 aa, Homo sapiens
CARLVTTSSYYYYMDVW

SEQ ID NO: 27400 - protein, 13 aa, Homo sapiens
CHFDRPVDLLDYW

SEQ ID NO: 27401 - protein, 18 aa, Homo sapiens
CAREGSGYPPTNDAFDIW

SEQ ID NO: 27402 - protein, 16 aa, Homo sapiens
CARNRGGSRRGYFDYW

SEQ ID NO: 27403 - protein, 18 aa, Homo sapiens
CAKDPQFIVARPYYFDYW

SEQ ID NO: 27404 - protein, 15 aa, Homo sapiens
CAKAGGYIVVVPDYW

SEQ ID NO: 27405 - protein, 14 aa, Homo sapiens
CAKEDYDSTVFDYW

SEQ ID NO: 27406 - protein, 18 aa, Homo sapiens
CAKAFRRPGSEGDAFDIW

SEQ ID NO: 27407 - protein, 18 aa, Homo sapiens
CAKGGYDYVWGSYAYDYW

SEQ ID NO: 27408 - protein, 24 aa, Homo sapiens
CARDKGPHYYGSGRTNYYYYMDVW

SEQ ID NO: 27409 - protein, 22 aa, Homo sapiens
CARKATGYCGGGSCFDDAFDIW

SEQ ID NO: 27410 - protein, 17 aa, Homo sapiens
CARDPRVSGITLYLDFW

SEQ ID NO: 27411 - protein, 18 aa, Homo sapiens
CARTLMIFRISLPVFDHW

SEQ ID NO: 27412 - protein, 18 aa, Homo sapiens
CAREGGGIAVAPYYFDHW

SEQ ID NO: 27413 - protein, 16 aa, Homo sapiens
CARHMTTVTKEWFDPW

SEQ ID NO: 27414 - protein, 20 aa, Homo sapiens
CASRRDYDFWSGSSGAFDIW

SEQ ID NO: 27415 - protein, 17 aa, Homo sapiens
CAREAYDFSKRYYFDYW

SEQ ID NO: 27416 - protein, 16 aa, Homo sapiens
CAKEDKLGIFHPLDYW

SEQ ID NO: 27417 - protein, 18 aa, Homo sapiens
CSRGEELDSGSYMWFDPW

SEQ ID NO: 27418 - protein, 21 aa, Homo sapiens
CARLSYDSDGSSLGAFYFDSW

SEQ ID NO: 27419 - protein, 18 aa, Homo sapiens
CATDSMGFSSSFYRFDIW

SEQ ID NO: 27420 - protein, 12 aa, Homo sapiens
CASLIGYLPDYW

SEQ ID NO: 27421 - protein, 22 aa, Homo sapiens
CAKPRYPNTYYYANRLDAFDIW

SEQ ID NO: 27422 - protein, 15 aa, Homo sapiens
CAKDIFGDTNGFDIW

SEQ ID NO: 27423 - protein, 15 aa, Homo sapiens
CTRDYRPGLNYFDFW

SEQ ID NO: 27424 - protein, 24 aa, Homo sapiens
CARDRVENDYVWGSYRPYWYFDLW

SEQ ID NO: 27425 - protein, 18 aa, Homo sapiens
CARVQYDGSGYYETPDYW

SEQ ID NO: 27426 - protein, 21 aa, Homo sapiens
CATVPRYCSSTSCYSGAFDIW

SEQ ID NO: 27427 - protein, 15 aa, Homo sapiens
CAKDINPVAGAIDYW

SEQ ID NO: 27428 - protein, 20 aa, Homo sapiens
CARHVDSDSWSGMLYYFDYW

SEQ ID NO: 27429 - protein, 17 aa, Homo sapiens
CARVKGSADGSYYVDYW

SEQ ID NO: 27430 - protein, 16 aa, Homo sapiens
CAREGDSSREYILDYW

SEQ ID NO: 27431 - protein, 14 aa, Homo sapiens
CARTPDSVSWFDYW

SEQ ID NO: 27432 - protein, 19 aa, Homo sapiens
CARSLSGLLELLSICFEYW

SEQ ID NO: 27433 - protein, 20 aa, Homo sapiens
CATVQSWGLHTLVENWFDPW

SEQ ID NO: 27434 - protein, 18 aa, Homo sapiens
CVRDKAQQRSWSDGIDVW

SEQ ID NO: 27435 - protein, 19 aa, Homo sapiens
CAIGIVEVPTAKFGAFDFW

SEQ ID NO: 27436 - protein, 23 aa, Homo sapiens
CAREPPYDFWSGYYPYYYYMDVW

SEQ ID NO: 27437 - protein, 22 aa, Homo sapiens
CARGSAIFGVVSTETFWYFDLW

SEQ ID NO: 27438 - protein, 11 aa, Homo sapiens
CGRRPIAFDIW

SEQ ID NO: 27439 - protein, 14 aa, Homo sapiens
CASSDYSSAWVDYW

SEQ ID NO: 27440 - protein, 18 aa, Homo sapiens
CAREGLGAVTTEIAFDIW

SEQ ID NO: 27441 - protein, 20 aa, Homo sapiens
CARDLWAAAGTPHYYYMDVW

SEQ ID NO: 27442 - protein, 18 aa, Homo sapiens
CAKVFMVRGVITGSTDYW

SEQ ID NO: 27443 - protein, 16 aa, Homo sapiens
CAKDKLAVAEYYFDYW

SEQ ID NO: 27444 - protein, 16 aa, Homo sapiens
CATGKDWGTRWFFDLW

SEQ ID NO: 27445 - protein, 16 aa, Homo sapiens
CATRSPGVMNWFFDLW

SEQ ID NO: 27446 - protein, 34 aa, Homo sapiens
CALPILRAGDTAVYYCAKDSRLFLLGVEYYFDYW

SEQ ID NO: 27447 - protein, 13 aa, Homo sapiens
CATHTLERYFDYW

SEQ ID NO: 27448 - protein, 35 aa, Homo sapiens
CDWSSDVCSSDLTAVYYCARGSAIYYDSSGYFDYW

SEQ ID NO: 27449 - protein, 19 aa, Homo sapiens
CARERGDRVGPPGNWFDPW

SEQ ID NO: 27450 - protein, 16 aa, Homo sapiens
CARDTYMSSWYWFDPW

SEQ ID NO: 27451 - protein, 19 aa, Homo sapiens
CARDLGSGFLEWLSPFDYW

SEQ ID NO: 27452 - protein, 17 aa, Homo sapiens
CARYSVAGYYYYYMDVW

SEQ ID NO: 27453 - protein, 22 aa, Homo sapiens
CARPGKRNLPTPGTGIYYFDYW

SEQ ID NO: 27454 - protein, 16 aa, Homo sapiens
CAKDMGSIGWYYFDYW

SEQ ID NO: 27455 - protein, 22 aa, Homo sapiens
CARDPGKESVFGVYYYYYMDVW

SEQ ID NO: 27456 - protein, 20 aa, Homo sapiens
CARASPVAGTRGLLRIFDHW

SEQ ID NO: 27457 - protein, 17 aa, Homo sapiens
CARAMRYGGNSDAFDIW

SEQ ID NO: 27458 - protein, 17 aa, Homo sapiens
CAAVSTLDYNSAAFDYW

SEQ ID NO: 27459 - protein, 22 aa, Homo sapiens
CARRRAGLRTWYLGSFNWFDPW

SEQ ID NO: 27460 - protein, 18 aa, Homo sapiens
CARDSDPVKDEARAFDYW

SEQ ID NO: 27461 - protein, 22 aa, Homo sapiens
CTRDAASFCGNGVCPPYHFDYW

SEQ ID NO: 27462 - protein, 12 aa, Homo sapiens
CQHYDNLLSINF

SEQ ID NO: 27463 - protein, 16 aa, Homo sapiens
CVVGERSSAAPSLDYW

SEQ ID NO: 27464 - protein, 19 aa, Homo sapiens
CARSLWGPHRTPPGYLDYW

SEQ ID NO: 27465 - protein, 16 aa, Homo sapiens
CAKDIFPIPRSYFDYW

SEQ ID NO: 27466 - protein, 12 aa, Homo sapiens
CAKAFVDSHDYW

SEQ ID NO: 27467 - protein, 12 aa, Homo sapiens
CQAYNMWPRGAF

SEQ ID NO: 27468 - protein, 15 aa, Homo sapiens
CARIHVAAALAFDYW

SEQ ID NO: 27469 - protein, 18 aa, Homo sapiens
CAKVYYYDTGVDWYFDLW

SEQ ID NO: 27470 - protein, 19 aa, Homo sapiens
CAGSYSSGPYYYYYYMDVW

SEQ ID NO: 27471 - protein, 19 aa, Homo sapiens
CARSNHGAIVVDEDAFDIW

SEQ ID NO: 27472 - protein, 19 aa, Homo sapiens
CVRYRDNWKGLVRWYFDLW

SEQ ID NO: 27473 - protein, 13 aa, Homo sapiens
CARVDRDYGFDYW

SEQ ID NO: 27474 - protein, 18 aa, Homo sapiens
CAHRPSPPRGMGTLFDYW

SEQ ID NO: 27475 - protein, 27 aa, Homo sapiens
CTRAWVFFDFWSGFTSGAGTYLYMDVW

SEQ ID NO: 27476 - protein, 19 aa, Homo sapiens
CALLLRRIVVVAAPAFDIW

SEQ ID NO: 27477 - protein, 20 aa, Homo sapiens
CARDFDRSGYKPYYYYMDVW

SEQ ID NO: 27478 - protein, 18 aa, Homo sapiens
CARLPHENYYYYYYMDVW

SEQ ID NO: 27479 - protein, 21 aa, Homo sapiens
CARISLGYCSSTSCYSGFDPW

SEQ ID NO: 27480 - protein, 17 aa, Homo sapiens
CARIRVAEDMSDAFDIW

SEQ ID NO: 27481 - protein, 15 aa, Homo sapiens
CAKMDTSNPDYFEAW

SEQ ID NO: 27482 - protein, 21 aa, Homo sapiens
CAKGFPWELTDLHYYYGMDVW

SEQ ID NO: 27483 - protein, 16 aa, Homo sapiens
CTRDSTIFGVATPDYW

SEQ ID NO: 27484 - protein, 20 aa, Homo sapiens
CARDSLRCSSTSCYWWFDPW

SEQ ID NO: 27485 - protein, 16 aa, Homo sapiens
CATHSSSWDSEYFQHW

SEQ ID NO: 27486 - protein, 15 aa, Homo sapiens
CASVGDYSNGGVDYW

SEQ ID NO: 27487 - protein, 18 aa, Homo sapiens
CARIAETTGYHHDAFDIW

SEQ ID NO: 27488 - protein, 12 aa, Homo sapiens
CQKLHSYPPYPF

SEQ ID NO: 27489 - protein, 18 aa, Homo sapiens
CAHFSIFAVFGDDAFDVW

SEQ ID NO: 27490 - protein, 15 aa, Homo sapiens
CARASWFGELIFDRW

SEQ ID NO: 27491 - protein, 19 aa, Homo sapiens
CARDPLSGVYYYYYGMDVW

SEQ ID NO: 27492 - protein, 16 aa, Homo sapiens
CATDPSSSLLGWFDPW

SEQ ID NO: 27493 - protein, 14 aa, Homo sapiens
CASTYTAMVPFDYW

SEQ ID NO: 27494 - protein, 21 aa, Homo sapiens
CAKARGRYCNSISCYSGLDYW

SEQ ID NO: 27495 - protein, 19 aa, Homo sapiens
CARESMITFGGPSYYFDYW

SEQ ID NO: 27496 - protein, 20 aa, Homo sapiens
CARESAGGTESYYYNGMDVW

SEQ ID NO: 27497 - protein, 21 aa, Homo sapiens
CARDQSIVGAMGGTTYYFDYW

SEQ ID NO: 27498 - protein, 22 aa, Homo sapiens
CARDGTSLTMIVVVITGAIDYW

SEQ ID NO: 27499 - protein, 19 aa, Homo sapiens
CARARLDSSGYPSLYFDYW

SEQ ID NO: 27500 - protein, 23 aa, Homo sapiens
CATVRSLYYDSSVSYPSRVFDFW

SEQ ID NO: 27501 - protein, 21 aa, Homo sapiens
CARVRYCGAECDTLDWYFDLW

SEQ ID NO: 27502 - protein, 15 aa, Homo sapiens
CARVQYSYYYAMDVW

SEQ ID NO: 27503 - protein, 21 aa, Homo sapiens
CARAQSPSYISLGYYYGMDVW

SEQ ID NO: 27504 - protein, 16 aa, Homo sapiens
CARQLFSSSSGTFDLW

SEQ ID NO: 27505 - protein, 16 aa, Homo sapiens
CAKGEMATILSVFDYW

SEQ ID NO: 27506 - protein, 16 aa, Homo sapiens
CASLGVGSERGYFDYW

SEQ ID NO: 27507 - protein, 21 aa, Homo sapiens
CAKHLSALHDYNENLRAFDIW

SEQ ID NO: 27508 - protein, 18 aa, Homo sapiens
CAKNREWLVRWGGYFDYW

SEQ ID NO: 27509 - protein, 23 aa, Homo sapiens
CARVPTYRFDSSGYYWGYYFDFW

SEQ ID NO: 27510 - protein, 20 aa, Homo sapiens
CVKDLHKKFGTEAPDVFDIW

SEQ ID NO: 27511 - protein, 14 aa, Homo sapiens
CSCIAAAGIGFDPW

SEQ ID NO: 27512 - protein, 18 aa, Homo sapiens
CARDPIWGFGYYYYMDVW

SEQ ID NO: 27513 - protein, 23 aa, Homo sapiens
CAHTLIQLRFLQWRSPEYYFDYW

SEQ ID NO: 27514 - protein, 17 aa, Homo sapiens
CARDYTINWNEYYFDYW

SEQ ID NO: 27515 - protein, 19 aa, Homo sapiens
CARDSKAGGFFLGPIFDPW

SEQ ID NO: 27516 - protein, 21 aa, Homo sapiens
CASGRGYCSSTTCLANYFDYW

SEQ ID NO: 27517 - protein, 18 aa, Homo sapiens
CARHEVYDSSGYYFLDYW

SEQ ID NO: 27518 - protein, 17 aa, Homo sapiens
CVRDGVYGINNGYFDYW

SEQ ID NO: 27519 - protein, 20 aa, Homo sapiens
CARQGGYCSDTICYGYFDYW

SEQ ID NO: 27520 - protein, 18 aa, Homo sapiens
CAKDYSPGIAASAIFEYW

SEQ ID NO: 27521 - protein, 18 aa, Homo sapiens
CARDRALSGSYYGLWDYW

SEQ ID NO: 27522 - protein, 18 aa, Homo sapiens
CAKDQIRSSSGYYAFDIW

SEQ ID NO: 27523 - protein, 14 aa, Homo sapiens
CARHNYETSSPDYW

SEQ ID NO: 27524 - protein, 14 aa, Homo sapiens
CARYSSSWDFFEYW

SEQ ID NO: 27525 - protein, 17 aa, Homo sapiens
CARDWNYAGYPDVFDIW

SEQ ID NO: 27526 - protein, 16 aa, Homo sapiens
CARGDFDWLFPPFDYW

SEQ ID NO: 27527 - protein, 19 aa, Homo sapiens
CARGKGMILRAISNAFDIW

SEQ ID NO: 27528 - protein, 15 aa, Homo sapiens
CARQWAGMEPLSDYW

SEQ ID NO: 27529 - protein, 18 aa, Homo sapiens
CAKDSRRDGYTFWQFDYW

SEQ ID NO: 27530 - protein, 15 aa, Homo sapiens
CARTLAAAGSSNDYW

SEQ ID NO: 27531 - protein, 15 aa, Homo sapiens
CAKDRGLAALGPDYW

SEQ ID NO: 27532 - protein, 13 aa, Homo sapiens
CARATPAENPDYW

SEQ ID NO: 27533 - protein, 12 aa, Homo sapiens
CQQLNNYSQVTF

SEQ ID NO: 27534 - protein, 15 aa, Homo sapiens
CGRLHRRKGDYMDVW

SEQ ID NO: 27535 - protein, 24 aa, Homo sapiens
CARAQYYDLLTGYPTEYFYYMDVW

SEQ ID NO: 27536 - protein, 20 aa, Homo sapiens
CARTLIKSGYSSSWYGFDYW

SEQ ID NO: 27537 - protein, 23 aa, Homo sapiens
CARIVRNYYDSSGYYDLDYFDYW

SEQ ID NO: 27538 - protein, 20 aa, Homo sapiens
CAKDRDSGSGSYTWGYFDYW

SEQ ID NO: 27539 - protein, 17 aa, Homo sapiens
CARVPYDYGNYAYPDFW

SEQ ID NO: 27540 - protein, 14 aa, Homo sapiens
CARADYSNTYIDTW

SEQ ID NO: 27541 - protein, 24 aa, Homo sapiens
CARLNHCTHGVCYTEYYYYYMDVW

SEQ ID NO: 27542 - protein, 22 aa, Homo sapiens
CAKDGATVFGVRDYYYSYMDVW

SEQ ID NO: 27543 - protein, 13 aa, Homo sapiens
CARDPGTRVFDYW

SEQ ID NO: 27544 - protein, 18 aa, Homo sapiens
CARVGEERRSRDYYMDVW

SEQ ID NO: 27545 - protein, 18 aa, Homo sapiens
CAKDLQRLRSYYYGMDVW

SEQ ID NO: 27546 - protein, 13 aa, Homo sapiens
CARGIIRAWFDPW

SEQ ID NO: 27547 - protein, 23 aa, Homo sapiens
CARGKRRVIVLMVYEYYYGMDVW

SEQ ID NO: 27548 - protein, 23 aa, Homo sapiens
CTRAMDTAMIAWDLSDGYVFDIW

SEQ ID NO: 27549 - protein, 17 aa, Homo sapiens
CAKDSSSRAARAWFDPW

SEQ ID NO: 27550 - protein, 23 aa, Homo sapiens
CARDPVPHYYDSSGYTLGAFDIW

SEQ ID NO: 27551 - protein, 21 aa, Homo sapiens
CARGSGDYAFWSGLGYFFDPW

SEQ ID NO: 27552 - protein, 14 aa, Homo sapiens
CARLGGWSEYFQHW

SEQ ID NO: 27553 - protein, 16 aa, Homo sapiens
CIRRAQDGSHWYTDLW

SEQ ID NO: 27554 - protein, 18 aa, Homo sapiens
CAREGIPPSGARHFFDYW

SEQ ID NO: 27555 - protein, 13 aa, Homo sapiens
CAHASIAVVVDYW

SEQ ID NO: 27556 - protein, 20 aa, Homo sapiens
CAKDRSRYSGYVGEYYFDYW

SEQ ID NO: 27557 - protein, 13 aa, Homo sapiens
CTRDSVLYYFDYW

SEQ ID NO: 27558 - protein, 12 aa, Homo sapiens
CQHYNSYSSWAF

SEQ ID NO: 27559 - protein, 18 aa, Homo sapiens
CARPRRPDSSGYLPMDYW

SEQ ID NO: 27560 - protein, 15 aa, Homo sapiens
CARDRGKFPDTFDIW

SEQ ID NO: 27561 - protein, 24 aa, Homo sapiens
CARDTYCSGGSCYSLIRHNWFDPW

SEQ ID NO: 27562 - protein, 16 aa, Homo sapiens
CAKDVTSGESMGLDYW

SEQ ID NO: 27563 - protein, 25 aa, Homo sapiens
CAKDRPDPWARITMIVVRSDGMDVW

SEQ ID NO: 27564 - protein, 20 aa, Homo sapiens
CAKDLFTMVRGKPPGLYDYW

SEQ ID NO: 27565 - protein, 15 aa, Homo sapiens
CASSARILPVPFDYW

SEQ ID NO: 27566 - protein, 16 aa, Homo sapiens
CARRSSSGGTWYCDYW

SEQ ID NO: 27567 - protein, 11 aa, Homo sapiens
CTFGRLWLDSW

SEQ ID NO: 27568 - protein, 16 aa, Homo sapiens
CAAGTFPTGRNAFDIW

SEQ ID NO: 27569 - protein, 18 aa, Homo sapiens
CAKDNRYSSGWYHIFDYW

SEQ ID NO: 27570 - protein, 13 aa, Homo sapiens
CESRDSSGTQLVF

SEQ ID NO: 27571 - protein, 22 aa, Homo sapiens
CARETLYFYDTTEHYYYGMDVW

SEQ ID NO: 27572 - protein, 22 aa, Homo sapiens
CARSLRGSFYGVVAGPYYFDYW

SEQ ID NO: 27573 - protein, 15 aa, Homo sapiens
CVRETAGSGYPHDYW

SEQ ID NO: 27574 - protein, 16 aa, Homo sapiens
CARDRQLWFRSQIDYW

SEQ ID NO: 27575 - protein, 17 aa, Homo sapiens
CAREAYCSRNSCPFDPW

SEQ ID NO: 27576 - protein, 15 aa, Homo sapiens
CARVGYSYGYGMDVW

SEQ ID NO: 27577 - protein, 11 aa, Homo sapiens
CQQYGGSSYSF

SEQ ID NO: 27578 - protein, 12 aa, Homo sapiens
CLQFNSFPQITF

SEQ ID NO: 27579 - protein, 17 aa, Homo sapiens
CTKDRYCPSIYCPTDYW

SEQ ID NO: 27580 - protein, 20 aa, Homo sapiens
CARDYREEALTGRLKWFDPW

SEQ ID NO: 27581 - protein, 16 aa, Homo sapiens
CARLPEPLYYYYFDLW

SEQ ID NO: 27582 - protein, 12 aa, Homo sapiens
CASQDSSGYFDW

SEQ ID NO: 27583 - protein, 19 aa, Homo sapiens
CARHGIAALGYYYYGMDVW

SEQ ID NO: 27584 - protein, 16 aa, Homo sapiens
CARGGVAAKKGQFDYW

SEQ ID NO: 27585 - protein, 18 aa, Homo sapiens
CAKDVVVVTAIRSYFDYW

SEQ ID NO: 27586 - protein, 19 aa, Homo sapiens
CARDSEPYYYDSSGYHDYW

SEQ ID NO: 27587 - protein, 14 aa, Homo sapiens
CARGDFGMIVPDYW

SEQ ID NO: 27588 - protein, 11 aa, Homo sapiens
CQYNNWPRYTF

SEQ ID NO: 27589 - protein, 18 aa, Homo sapiens
CARYVLRFLESSAFFDYW

SEQ ID NO: 27590 - protein, 18 aa, Homo sapiens
CARGERVALPNSHYNDFW

SEQ ID NO: 27591 - protein, 17 aa, Homo sapiens
CARDFLGSSGWTPMDYW

SEQ ID NO: 27592 - protein, 18 aa, Homo sapiens
CARVRESWFGADDAFDIW

SEQ ID NO: 27593 - protein, 23 aa, Homo sapiens
CAKVDDQDSYGFRSYYYYGMDVW

SEQ ID NO: 27594 - protein, 22 aa, Homo sapiens
CARQKGSGSPLVDYYYYGMDVW

SEQ ID NO: 27595 - protein, 17 aa, Homo sapiens
CARDQFSSGFPPWVDYW

SEQ ID NO: 27596 - protein, 13 aa, Homo sapiens
CASGIAARRLDYW

SEQ ID NO: 27597 - protein, 16 aa, Homo sapiens
CARDTGIAAAGTFDYW

SEQ ID NO: 27598 - protein, 14 aa, Homo sapiens
CATSLGWWALFDPW

SEQ ID NO: 27599 - protein, 21 aa, Homo sapiens
CARHRINYYDSSGPGGYFDYW

SEQ ID NO: 27600 - protein, 18 aa, Homo sapiens
CATRGSRDFWSGYSFDYW

SEQ ID NO: 27601 - protein, 18 aa, Homo sapiens
CARRGYDTPYYNFWFDPW

SEQ ID NO: 27602 - protein, 16 aa, Homo sapiens
CATSPAVVKDNWFDPW

SEQ ID NO: 27603 - protein, 23 aa, Homo sapiens
CATLGYCSSTSCYMAYYYGMDVW

SEQ ID NO: 27604 - protein, 17 aa, Homo sapiens
CNVFAPYSSSWSPFDYW

SEQ ID NO: 27605 - protein, 14 aa, Homo sapiens
CARRFELERVFDYW

SEQ ID NO: 27606 - protein, 19 aa, Homo sapiens
CTTDPALKQVVVIGAFDIW

SEQ ID NO: 27607 - protein, 21 aa, Homo sapiens
CTRYQQRPRLYYYYYYGMDVW

SEQ ID NO: 27608 - protein, 15 aa, Homo sapiens
CATVVTPTDSYFDNW

SEQ ID NO: 27609 - protein, 13 aa, Homo sapiens
CQAWDISTASYVF

SEQ ID NO: 27610 - protein, 19 aa, Homo sapiens
CARDKGDSGYDFYYGMDVW

SEQ ID NO: 27611 - protein, 18 aa, Homo sapiens
CARDHYGSSWSDEYFQHW

SEQ ID NO: 27612 - protein, 14 aa, Homo sapiens
CARGVSGSRYFDKW

SEQ ID NO: 27613 - protein, 18 aa, Homo sapiens
CVKGMAVAGSIYLAMDVW

SEQ ID NO: 27614 - protein, 19 aa, Homo sapiens
CARDWVVISGDYYYGMDVW

SEQ ID NO: 27615 - protein, 23 aa, Homo sapiens
CARDSLSGDTSMEVYYYYGMDVW

SEQ ID NO: 27616 - protein, 17 aa, Homo sapiens
CAKDLNARVLIDPFDIW

SEQ ID NO: 27617 - protein, 14 aa, Homo sapiens
CASTGDLFDVFDYW

SEQ ID NO: 27618 - protein, 21 aa, Homo sapiens
CAKDGAPSPYYYGKTDYFDYW

SEQ ID NO: 27619 - protein, 15 aa, Homo sapiens
CARGGHSSGYYFDYW

SEQ ID NO: 27620 - protein, 20 aa, Homo sapiens
CARDPHDSSGYYLPWYFDLW

SEQ ID NO: 27621 - protein, 18 aa, Homo sapiens
CAKDFGYSSPAAPWFDPW

SEQ ID NO: 27622 - protein, 20 aa, Homo sapiens
CARQRAYCINDCYPGEADYW

SEQ ID NO: 27623 - protein, 14 aa, Homo sapiens
CQVWDIISDHQGVF

SEQ ID NO: 27624 - protein, 16 aa, Homo sapiens
CARGDRELPLDWIDPW

SEQ ID NO: 27625 - protein, 13 aa, Homo sapiens
CARDAQHRGFDYW

SEQ ID NO: 27626 - protein, 17 aa, Homo sapiens
CARSAFYGSSGYYYDYW

SEQ ID NO: 27627 - protein, 20 aa, Homo sapiens
CAKGQTAIDPYSYYYGMDVW

SEQ ID NO: 27628 - protein, 16 aa, Homo sapiens
CARGPPNSWSSPGDYW

SEQ ID NO: 27629 - protein, 16 aa, Homo sapiens
CARDLESSGWYDFDPW

SEQ ID NO: 27630 - protein, 20 aa, Homo sapiens
CARSLLLAAAGQRDDAFDIW

SEQ ID NO: 27631 - protein, 15 aa, Homo sapiens
CARDRGPFNWYFDLW

SEQ ID NO: 27632 - protein, 15 aa, Homo sapiens
CARGLAGYSSSFDYW

SEQ ID NO: 27633 - protein, 27 aa, Homo sapiens
CAKVPSETLKRITIFGVVISEYYFDYW

SEQ ID NO: 27634 - protein, 19 aa, Homo sapiens
CARDSNYFGSNYYDVFDIW

SEQ ID NO: 27635 - protein, 16 aa, Homo sapiens
CAKLREDSSGYYYYYW

SEQ ID NO: 27636 - protein, 16 aa, Homo sapiens
CGRRQQQSSYWYFDLW

SEQ ID NO: 27637 - protein, 13 aa, Homo sapiens
CARDPSSSAFDIW

SEQ ID NO: 27638 - protein, 11 aa, Homo sapiens
CLQYDNWPQMF

SEQ ID NO: 27639 - protein, 11 aa, Homo sapiens
CLQDDNYPLSF

SEQ ID NO: 27640 - protein, 17 aa, Homo sapiens
CARVGVGATHGYYFDYW

SEQ ID NO: 27641 - protein, 14 aa, Homo sapiens
CAKVIVVPAAADYW

SEQ ID NO: 27642 - protein, 22 aa, Homo sapiens
CARVPTAMFNPPQGYYYGMDVW

SEQ ID NO: 27643 - protein, 10 aa, Homo sapiens
CHQYNNWRTF

SEQ ID NO: 27644 - protein, 12 aa, Homo sapiens [sequence omitted]

SEQ ID NO: 27645 - protein, 20 aa, Homo sapiens
CAHSDSSGYSYYYYYGMDVW

SEQ ID NO: 27646 - protein, 27 aa, Homo sapiens
CARDLRWGDRDDYGDYADYYYYGMDVW

SEQ ID NO: 27647 - protein, 17 aa, Homo sapiens
CATGPAVAGTSNWFDPW

SEQ ID NO: 27648 - protein, 10 aa, Homo sapiens
CYRNPDGDYW

SEQ ID NO: 27649 - protein, 12 aa, Homo sapiens [sequence omitted]

SEQ ID NO: 27650 - protein, 16 aa, Homo sapiens
CARGPSGSNFFVGDYW

SEQ ID NO: 27651 - protein, 12 aa, Homo sapiens
CARGVPAASDYW

SEQ ID NO: 27652 - protein, 17 aa, Homo sapiens
CARGEMYSSSSHCFDYW

SEQ ID NO: 27653 - protein, 15 aa, Homo sapiens
CARTYILTGYFFDYW

SEQ ID NO: 27654 - protein, 11 aa, Homo sapiens
CETWDSDTQLF

SEQ ID NO: 27655 - protein, 20 aa, Homo sapiens
CAKAPYCSGGSCFPRLFDYW

SEQ ID NO: 27656 - protein, 22 aa, Homo sapiens
CVKTGPNMYYLDTARFSSFDFW

SEQ ID NO: 27657 - protein, 16 aa, Homo sapiens
CAKDSIHNYYYGMDVW

SEQ ID NO: 27658 - protein, 19 aa, Homo sapiens
CTRDHYDYVWGSYRYEDYW

SEQ ID NO: 27659 - protein, 21 aa, Homo sapiens
CARDPTVPAAIVRYYYGMDVW

SEQ ID NO: 27660 - protein, 17 aa, Homo sapiens
CARDLYDSTGYRYLDLW

SEQ ID NO: 27661 - protein, 12 aa, Homo sapiens
CQQRANWPSVIF

SEQ ID NO: 27662 - protein, 13 aa, Homo sapiens
CAKGGSSWFVDYW

SEQ ID NO: 27663 - protein, 16 aa, Homo sapiens
CARNGFLEWHVRFNYW

SEQ ID NO: 27664 - protein, 14 aa, Homo sapiens
CAHSSHIAGWFDPW

SEQ ID NO: 27665 - protein, 19 aa, Homo sapiens
CARAMITFGGVIVGFFDYW

SEQ ID NO: 27666 - protein, 17 aa, Homo sapiens
CGRRTYDSNGHYYFDYW

SEQ ID NO: 27667 - protein, 12 aa, Homo sapiens
CATAGSYRFDSW

SEQ ID NO: 27668 - protein, 20 aa, Homo sapiens
CARDPDDYDSSGYYGSLDYW

SEQ ID NO: 27669 - protein, 27 aa, Homo sapiens
CARHRRWAYYGSGSYFMPSYYYGMDVW

SEQ ID NO: 27670 - protein, 13 aa, Homo sapiens
CAKDESSSWYFYW

SEQ ID NO: 27671 - protein, 14 aa, Homo sapiens
CARAGGGGVEFDYW

SEQ ID NO: 27672 - protein, 18 aa, Homo sapiens
CARHLGPFITPLGAFDIW

SEQ ID NO: 27673 - protein, 23 aa, Homo sapiens
CVRVFDTAMVSWDLANGNVFDIW

SEQ ID NO: 27674 - protein, 17 aa, Homo sapiens
CARDYDYVWGSQRFDSW

SEQ ID NO: 27675 - protein, 14 aa, Homo sapiens
CARADYGDDHFDYW

SEQ ID NO: 27676 - protein, 14 aa, Homo sapiens
CARDIWSQSVFDPW

SEQ ID NO: 27677 - protein, 18 aa, Homo sapiens
CARVVWLSSGYRGHFDLW

SEQ ID NO: 27678 - protein, 19 aa, Homo sapiens
CAKVRTLYRGYAGDLMDVW

SEQ ID NO: 27679 - protein, 22 aa, Homo sapiens
CARVTHCSGGSCYSGAGWFDPW

SEQ ID NO: 27680 - protein, 21 aa, Homo sapiens
CARARGTMIVVAYSVNAFDIW

SEQ ID NO: 27681 - protein, 13 aa, Homo sapiens
CASMRIYWYFDLW

SEQ ID NO: 27682 - protein, 16 aa, Homo sapiens
CASLKGGHTPWWFDPW

SEQ ID NO: 27683 - protein, 29 aa, Homo sapiens
CTRGQTPGYSYRIAQAPETYYYYYGMDVW

SEQ ID NO: 27684 - protein, 17 aa, Homo sapiens
CARVSSSWSKAYSFDYW

SEQ ID NO: 27685 - protein, 21 aa, Homo sapiens
CASQRGGCSGGSCYGRPFDYW

SEQ ID NO: 27686 - protein, 20 aa, Homo sapiens
CARVPSHHDGSPTRPYFDFW

SEQ ID NO: 27687 - protein, 15 aa, Homo sapiens
CARDGDDLTGHFDYW

SEQ ID NO: 27688 - protein, 14 aa, Homo sapiens
CAVQLVYGSFFDYW

SEQ ID NO: 27689 - protein, 16 aa, Homo sapiens
CASLVGFSSRYAFDIW

SEQ ID NO: 27690 - protein, 12 aa, Homo sapiens
CARLTLRSLDYW

SEQ ID NO: 27691 - protein, 16 aa, Homo sapiens
CAKGGVATQLTYFDYW

SEQ ID NO: 27692 - protein, 16 aa, Homo sapiens
CARAKGDYRSNWFDPW

SEQ ID NO: 27693 - protein, 11 aa, Homo sapiens
CQHYENWPWTF

SEQ ID NO: 27694 - protein, 16 aa, Homo sapiens
CARGPQTGGFWSGDYW

SEQ ID NO: 27695 - protein, 19 aa, Homo sapiens
CARAIRITIFGVVKEFDYW

SEQ ID NO: 27696 - protein, 16 aa, Homo sapiens
CASNEAVVMDSWFDPW

SEQ ID NO: 27697 - protein, 15 aa, Homo sapiens
CARAPRNSWHTFDYW

SEQ ID NO: 27698 - protein, 14 aa, Homo sapiens
CLRVNDPAWDFDLW

SEQ ID NO: 27699 - protein, 20 aa, Homo sapiens
CAISLWGPYYYDSSGYFDYW

SEQ ID NO: 27700 - protein, 21 aa, Homo sapiens
CVKETRGQSFGDRDLYYFESW

SEQ ID NO: 27701 - protein, 13 aa, Homo sapiens
CARAGRHWYFDLW

SEQ ID NO: 27702 - protein, 17 aa, Homo sapiens
CVKADDEYTGYGGFDFW

SEQ ID NO: 27703 - protein, 15 aa, Homo sapiens
CAHIDSSGYYEFDYW

SEQ ID NO: 27704 - protein, 13 aa, Homo sapiens
CARIVPVGGNDYW

SEQ ID NO: 27705 - protein, 22 aa, Homo sapiens
CARGRLPIDLMAYAIGDGMDVW

SEQ ID NO: 27706 - protein, 14 aa, Homo sapiens
CAREKPDTYYLDFW

SEQ ID NO: 27707 - protein, 16 aa, Homo sapiens
CARVRGSFNSNYFDYW

SEQ ID NO: 27708 - protein, 14 aa, Homo sapiens [sequence omitted]

SEQ ID NO: 27709 - protein, 23 aa, Homo sapiens
CAREVVYSSSRPNNYYYYGMDVW

SEQ ID NO: 27710 - protein, 13 aa, Homo sapiens
CAKDSGDYGLDYW

SEQ ID NO: 27711 - protein, 17 aa, Homo sapiens
CARDGSAYYAPNWFDPW

SEQ ID NO: 27712 - protein, 16 aa, Homo sapiens
CARDSDDSSGYGFDYW

SEQ ID NO: 27713 - protein, 21 aa, Homo sapiens
CARHRSPDRAVISPAHYFDYW

SEQ ID NO: 27714 - protein, 16 aa, Homo sapiens
CAHRLSGFSYGWFDPW

SEQ ID NO: 27715 - protein, 17 aa, Homo sapiens
CAKVPVAATFRYYFDFW

SEQ ID NO: 27716 - protein, 18 aa, Homo sapiens
CAKRMSDCSGGSCYPDNW

SEQ ID NO: 27717 - protein, 17 aa, Homo sapiens
CARDIERITIFGVVDYW

SEQ ID NO: 27718 - protein, 13 aa, Homo sapiens
CQQLNSYSSLYTF

SEQ ID NO: 27719 - protein, 22 aa, Homo sapiens
CARDSSGGRADYYDSSGYFDYW

SEQ ID NO: 27720 - protein, 18 aa, Homo sapiens
CAKRGYSSSWYEGAFDIW

SEQ ID NO: 27721 - protein, 24 aa, Homo sapiens
CARETHGNYDFWSGYYGNPLFDPW

SEQ ID NO: 27722 - protein, 11 aa, Homo sapiens
CLLTYSDARVF

SEQ ID NO: 27723 - protein, 21 aa, Homo sapiens
CARARTRVTIFGVVIQYFDYW

SEQ ID NO: 27724 - protein, 16 aa, Homo sapiens
CARSQSGGGESWFDPW

SEQ ID NO: 27725 - protein, 15 aa, Homo sapiens
CAKGSSDFWSGFDYW

SEQ ID NO: 27726 - protein, 18 aa, Homo sapiens
CARHSERFLQRSTSFEYW

SEQ ID NO: 27727 - protein, 22 aa, Homo sapiens
CATALGAGQWLASPSLNAFDIW

SEQ ID NO: 27728 - protein, 16 aa, Homo sapiens
CARFGYYYYYYGMDVW

SEQ ID NO: 27729 - protein, 19 aa, Homo sapiens
CARGVVRGVINRYNWFDPW

SEQ ID NO: 27730 - protein, 15 aa, Homo sapiens
CATGPFRESYYFDYW

SEQ ID NO: 27731 - protein, 16 aa, Homo sapiens
CARYFRYQLYNWFDPW

SEQ ID NO: 27732 - protein, 16 aa, Homo sapiens
CGRRGNWGGQWYFDLW

SEQ ID NO: 27733 - protein, 18 aa, Homo sapiens
CTTDWVAASGTYYYPDYW

SEQ ID NO: 27734 - protein, 21 aa, Homo sapiens
CAHRRDGHSGPTWDAGTFDPW

SEQ ID NO: 27735 - protein, 11 aa, Homo sapiens
CMQGIHWPPTF

SEQ ID NO: 27736 - protein, 13 aa, Homo sapiens [sequence omitted]

SEQ ID NO: 27737 - protein, 26 aa, Homo sapiens
CARHPTFYYSRGYIVATIGYNWFDPW

SEQ ID NO: 27738 - protein, 18 aa, Homo sapiens
CARGGSKDSSSWYNIDYW

SEQ ID NO: 27739 - protein, 18 aa, Homo sapiens
CAKDLSMIVVVRGYFDYW

SEQ ID NO: 27740 - protein, 11 aa, Homo sapiens
CQQFGSSRYPF

SEQ ID NO: 27741 - protein, 26 aa, Homo sapiens
CARLPITIFGVVIIPQLSEVGWFDPW

SEQ ID NO: 27742 - protein, 25 aa, Homo sapiens
CARDKRRITIFGVVPRGGYNWFDPW

SEQ ID NO: 27743 - protein, 16 aa, Homo sapiens
CARETIVVDDSRFDFW

SEQ ID NO: 27744 - protein, 22 aa, Homo sapiens
CVVPGRYCSRPGCSYYYALDVW

SEQ ID NO: 27745 - protein, 12 aa, Homo sapiens
CQSYDSDKLWVF

SEQ ID NO: 27746 - protein, 17 aa, Homo sapiens
CARDQGSGYYLGNFDYW

SEQ ID NO: 27747 - protein, 21 aa, Homo sapiens
CARQADIVLMVYADQGAFDIW

SEQ ID NO: 27748 - protein, 17 aa, Homo sapiens
CARGGVYTSSWYEFDYW

SEQ ID NO: 27749 - protein, 20 aa, Homo sapiens
CARLHVWGSSHYYYYGMDVW

SEQ ID NO: 27750 - protein, 21 aa, Homo sapiens
CARGPVQGSYEYYYYYGMDVW

SEQ ID NO: 27751 - protein, 17 aa, Homo sapiens
CVKRLGGNYSPCYFDYW

SEQ ID NO: 27752 - protein, 19 aa, Homo sapiens
CAKSGGYSYGLYYYGMDVW

SEQ ID NO: 27753 - protein, 13 aa, Homo sapiens
CAREDQYNTYDYW

SEQ ID NO: 27754 - protein, 14 aa, Homo sapiens
CAKDQGIAAVFDYW

SEQ ID NO: 27755 - protein, 20 aa, Homo sapiens
CARQRRQGIVVAHPRYFDYW

SEQ ID NO: 27756 - protein, 10 aa, Homo sapiens
CQHINSFPRF

SEQ ID NO: 27757 - protein, 21 aa, Homo sapiens
CAKDQAGYCSSASCYTGSDYW

SEQ ID NO: 27758 - protein, 18 aa, Homo sapiens
CARGGVIRGFFHDWFDPW

SEQ ID NO: 27759 - protein, 14 aa, Homo sapiens
CFSTDSSGYPHVVF

SEQ ID NO: 27760 - protein, 19 aa, Homo sapiens
CARAPERGYSGYWYAFDIW

SEQ ID NO: 27761 - protein, 14 aa, Homo sapiens
CASTLLKAGWFDPW

SEQ ID NO: 27762 - protein, 18 aa, Homo sapiens
CAHRHSSSWYPTDAFDIW

SEQ ID NO: 27763 - protein, 14 aa, Homo sapiens
CAKGKGGWYVFDDW

SEQ ID NO: 27764 - protein, 20 aa, Homo sapiens
CTRGQLVSPGPDYYYGMDVW

SEQ ID NO: 27765 - protein, 21 aa, Homo sapiens
CARAQGNIVLMVYVISAFDIW

SEQ ID NO: 27766 - protein, 17 aa, Homo sapiens
CARDRGGASGIGYFDYW

SEQ ID NO: 27767 - protein, 13 aa, Homo sapiens
CARDLAAMVLDYW

SEQ ID NO: 27768 - protein, 14 aa, Homo sapiens
CARDQSGSTVGDYW

SEQ ID NO: 27769 - protein, 17 aa, Homo sapiens
CARGAYGGDRFYWFDPW

SEQ ID NO: 27770 - protein, 11 aa, Homo sapiens
CQQYYGRPLAF

SEQ ID NO: 27771 - protein, 15 aa, Homo sapiens
CAREAKRERGYFDYW

SEQ ID NO: 27772 - protein, 17 aa, Homo sapiens
CARHGPLSGWYWYFDLW

SEQ ID NO: 27773 - protein, 23 aa, Homo sapiens
CAKENPLYCSSTSCYASGAFDIW

SEQ ID NO: 27774 - protein, 22 aa, Homo sapiens
CAKDLALNYYDSSGPADLFDYW

SEQ ID NO: 27775 - protein, 21 aa, Homo sapiens
CAKDVGSARVFPYYFYGMDVW

SEQ ID NO: 27776 - protein, 16 aa, Homo sapiens
CAATVVITSVGGFDYW

SEQ ID NO: 27777 - protein, 31 aa, Homo sapiens
CAKDVYYYDSSGYYKLHGALRTPRSDAFDIW

SEQ ID NO: 27778 - protein, 20 aa, Homo sapiens
CATESHYDSGAYYYGLFDYW

SEQ ID NO: 27779 - protein, 14 aa, Homo sapiens
CARYDDYDNCFDPW

SEQ ID NO: 27780 - protein, 17 aa, Homo sapiens
CAKVVDCSGGSCYSDFW

SEQ ID NO: 27781 - protein, 14 aa, Homo sapiens
CANLAAADPYFDYW

SEQ ID NO: 27782 - protein, 19 aa, Homo sapiens
CATAAPFSGYYPTKYFQHW

SEQ ID NO: 27783 - protein, 20 aa, Homo sapiens
CARDQIAARPNYYYYGMDVW

SEQ ID NO: 27784 - protein, 18 aa, Homo sapiens
CARDRPGSYWSSDAFDIW

SEQ ID NO: 27785 - protein, 17 aa, Homo sapiens
CVRSHYYQSSGYYLDYW

SEQ ID NO: 27786 - protein, 22 aa, Homo sapiens
CARTLTYYDFWSGYYGRGFDPW

SEQ ID NO: 27787 - protein, 15 aa, Homo sapiens
CAKDSWEVLNWFAPW

SEQ ID NO: 27788 - protein, 17 aa, Homo sapiens
CARAHYYDTSSYHFDLW

SEQ ID NO: 27789 - protein, 10 aa, Homo sapiens
CHVWDSSTFF

SEQ ID NO: 27790 - protein, 17 aa, Homo sapiens
CARAAGLVVPAAIFDYW

SEQ ID NO: 27791 - protein, 15 aa, Homo sapiens
CARGRPYSSGCVDYW

SEQ ID NO: 27792 - protein, 18 aa, Homo sapiens
CATLTTANETSGGIFDIW

SEQ ID NO: 27793 - protein, 24 aa, Homo sapiens
CARDKPLPPHYDFWSGYYYGVDYW

SEQ ID NO: 27794 - protein, 17 aa, Homo sapiens
CARQMFDSGSADALDIW

SEQ ID NO: 27795 - protein, 26 aa, Homo sapiens
CARAGLRYFDWSMITFGGDLTYFDYW

SEQ ID NO: 27796 - protein, 14 aa, Homo sapiens
CTRDDFWSGYLPYW

SEQ ID NO: 27797 - protein, 17 aa, Homo sapiens
CARHSGDEDYGDLIDYW

SEQ ID NO: 27798 - protein, 12 aa, Homo sapiens
CARDWHTAMDYW

SEQ ID NO: 27799 - protein, 22 aa, Homo sapiens
CARVGITLIRGVLLSPNWFTPW

SEQ ID NO: 27800 - protein, 12 aa, Homo sapiens
CSSYTDLSTLVF

SEQ ID NO: 27801 - protein, 20 aa, Homo sapiens
CARAGYLWGSYRYLSYFDYW

SEQ ID NO: 27802 - protein, 15 aa, Homo sapiens
CQVWDSRSDHSAWVF

SEQ ID NO: 27803 - protein, 23 aa, Homo sapiens
CARDPRSITIFGVAPTKNAFDIW

SEQ ID NO: 27804 - protein, 18 aa, Homo sapiens
CATDRGHDFGNRRLGDYW

SEQ ID NO: 27805 - protein, 24 aa, Homo sapiens
CARELPLDYYGSGRESSTWGFDPW

SEQ ID NO: 27806 - protein, 23 aa, Homo sapiens
CLRAEDTAVYYCVPGGLRYFDSW

SEQ ID NO: 27807 - protein, 14 aa, Homo sapiens
CASSVGYNTNFDYW

SEQ ID NO: 27808 - protein, 16 aa, Homo sapiens
CASTTGAYYYYGMDVW

SEQ ID NO: 27809 - protein, 15 aa, Homo sapiens
CASNVGDHGDAFDLW

SEQ ID NO: 27810 - protein, 13 aa, Homo sapiens
CQQYNNWHHKLTF

SEQ ID NO: 27811 - protein, 16 aa, Homo sapiens
CARGYSSGLDWYFDLW

SEQ ID NO: 27812 - protein, 21 aa, Homo sapiens
CARHPPIVVDPYYYYYGMDVW

SEQ ID NO: 27813 - protein, 21 aa, Homo sapiens
CTKELFIMIRGIAIRQYFDAW

SEQ ID NO: 27814 - protein, 23 aa, Homo sapiens
CVREAGHCSSTSCYVGGGWFDSW

SEQ ID NO: 27815 - protein, 13 aa, Homo sapiens
CARDEPTDGLDVW

SEQ ID NO: 27816 - protein, 20 aa, Homo sapiens
CAKDFNVWNDFYYYYGMDVW

SEQ ID NO: 27817 - protein, 14 aa, Homo sapiens
CAKDKSDWTYLDWW

SEQ ID NO: 27818 - protein, 26 aa, Homo sapiens
CARGHQTFWSGYTWGDYYYYYGMDVW

SEQ ID NO: 27819 - protein, 14 aa, Homo sapiens
CARVVGSYYALDYW

SEQ ID NO: 27820 - protein, 17 aa, Homo sapiens
CAKSLDYGDYIVPPDYW

SEQ ID NO: 27821 - protein, 18 aa, Homo sapiens
CAHRGYYDSSGHREWDYW

SEQ ID NO: 27822 - protein, 19 aa, Homo sapiens
CASEVPYSNLGYYYGMDVW

SEQ ID NO: 27823 - protein, 23 aa, Homo sapiens
CARAKGRISLRYIDWLFHAFDMW

SEQ ID NO: 27824 - protein, 18 aa, Homo sapiens
CARSSSSSGIAPYYFDYW

SEQ ID NO: 27825 - protein, 20 aa, Homo sapiens
CARTPYGSGSYYNSYAFDLW

SEQ ID NO: 27826 - protein, 11 aa, Homo sapiens
CQQFESYMWTF

SEQ ID NO: 27827 - protein, 19 aa, Homo sapiens
CVREGLVVVTAQDWFFDLW

SEQ ID NO: 27828 - protein, 13 aa, Homo sapiens
CCLSSNNWAYDYW

SEQ ID NO: 27829 - protein, 18 aa, Homo sapiens
CARASKLRYFDWLPFDYW

SEQ ID NO: 27830 - protein, 11 aa, Homo sapiens
CQRYNAYPCIF

SEQ ID NO: 27831 - protein, 20 aa, Homo sapiens
CAREGGVVQIPPYYYGMDVW

SEQ ID NO: 27832 - protein, 19 aa, Homo sapiens
CARSPYYDILTGYYYIDYW

SEQ ID NO: 27833 - protein, 24 aa, Homo sapiens
CAKDSLTYYYDSSGYPQTNYFDYW

SEQ ID NO: 27834 - protein, 22 aa, Homo sapiens
CAKFPFFDGFGEARPHYYFDYW

SEQ ID NO: 27835 - protein, 25 aa, Homo sapiens
CASWLSYCSSTSCDHYYYYYGMDVW

SEQ ID NO: 27836 - protein, 14 aa, Homo sapiens [sequence omitted]

SEQ ID NO: 27837 - protein, 13 aa, Homo sapiens [sequence omitted]

SEQ ID NO: 27838 - protein, 18 aa, Homo sapiens
CARVVRGYSGQYGYFDYW

SEQ ID NO: 27839 - protein, 21 aa, Homo sapiens
CALRYSPTWYGGGNHDAFDIW

SEQ ID NO: 27840 - protein, 38 aa, Homo sapiens
CTLYLEMNSLRPDDTATYYCAKDPRIFLIGKATPPDYW

SEQ ID NO: 27841 - protein, 21 aa, Homo sapiens
CARLGYYYGSGRGDSYWFDPW

SEQ ID NO: 27842 - protein, 16 aa, Homo sapiens
CARGPPFSLWVYFAYW

SEQ ID NO: 27843 - protein, 18 aa, Homo sapiens
CAKATAAGIFYYYGMDVW

SEQ ID NO: 27844 - protein, 14 aa, Homo sapiens
CARLSGDDWYFVLW

SEQ ID NO: 27845 - protein, 14 aa, Homo sapiens
CVRHIPSTVPFDYW

SEQ ID NO: 27846 - protein, 20 aa, Homo sapiens
CARRQGIAAAPTPVLSFDYW

SEQ ID NO: 27847 - protein, 12 aa, Homo sapiens
CATESYYHCDYW

SEQ ID NO: 27848 - protein, 20 aa, Homo sapiens
CALPISKDDIAAAGTLFGYW

SEQ ID NO: 27849 - protein, 21 aa, Homo sapiens
CARDQFPYYGPLIPLLQLDYW

SEQ ID NO: 27850 - protein, 22 aa, Homo sapiens
CARTRLEPTIFGVVFRYPPDYW

SEQ ID NO: 27851 - protein, 16 aa, Homo sapiens
CARHDSGPVGSAQDYW

SEQ ID NO: 27852 - protein, 12 aa, Homo sapiens
CAKLPQGRFDSW

SEQ ID NO: 27853 - protein, 19 aa, Homo sapiens
CARGSFDWLLTRQYYFDYW

SEQ ID NO: 27854 - protein, 20 aa, Homo sapiens
CARDNRFLEWSNSRDTFDIW

SEQ ID NO: 27855 - protein, 12 aa, Homo sapiens
CQSGDSNGARVF

SEQ ID NO: 27856 - protein, 24 aa, Homo sapiens
CAKGRSQSSSWYWTQYYYYGMDVW

SEQ ID NO: 27857 - protein, 16 aa, Homo sapiens
CARVLGYSRAGWFDPW

SEQ ID NO: 27858 - protein, 21 aa, Homo sapiens
CARDRKEVQLVRIYYYGMDVW

SEQ ID NO: 27859 - protein, 20 aa, Homo sapiens
CTSEGGQVEMATRNWYFDLW

SEQ ID NO: 27860 - protein, 22 aa, Homo sapiens
CARDSWDLVLEPADQFDAFDIW

SEQ ID NO: 27861 - protein, 21 aa, Homo sapiens
CARDFVVPAATDYYYYGMDVW

SEQ ID NO: 27862 - protein, 17 aa, Homo sapiens
CARLDYYDIGRSPFDYW

SEQ ID NO: 27863 - protein, 16 aa, Homo sapiens
CAFYCSSTSCPSFDYW

SEQ ID NO: 27864 - protein, 20 aa, Homo sapiens
CATQIGYGPPIYYYYGMDVW

SEQ ID NO: 27865 - protein, 16 aa, Homo sapiens
CARDNLAAAYFAFDIW

SEQ ID NO: 27866 - protein, 22 aa, Homo sapiens
CATNAITFGGVIDYYYYGMDVW

SEQ ID NO: 27867 - protein, 16 aa, Homo sapiens
CGKRANRGSSWYFDLW

SEQ ID NO: 27868 - protein, 15 aa, Homo sapiens
CVREGSIVGDAFDFW

SEQ ID NO: 27869 - protein, 20 aa, Homo sapiens
CAREVAGYYDSSGSYWFDPW

SEQ ID NO: 27870 - protein, 17 aa, Homo sapiens
CARAQDLAFYYYGMDVW

SEQ ID NO: 27871 - protein, 11 aa, Homo sapiens
CQQFNTWPPEF

SEQ ID NO: 27872 - protein, 18 aa, Homo sapiens
CAREYFGITGTTSAFDIW

SEQ ID NO: 27873 - protein, 17 aa, Homo sapiens
CYAVWFGEISSGHFDYW

SEQ ID NO: 27874 - protein, 22 aa, Homo sapiens
CARDGIYYYDSSGYYSDAFDIW

SEQ ID NO: 27875 - protein, 16 aa, Homo sapiens
CARAGSIMIEDYFNYW

SEQ ID NO: 27876 - protein, 19 aa, Homo sapiens
CARDRLEWLSYYYYGMDVW

SEQ ID NO: 27877 - protein, 22 aa, Homo sapiens
CTRGKARYDFWSAYLYWYFDLW

SEQ ID NO: 27878 - protein, 20 aa, Homo sapiens
CASYGSYYSSSVGGDWFDPW

SEQ ID NO: 27879 - protein, 14 aa, Homo sapiens
CSSSSYYYYGMDVW

SEQ ID NO: 27880 - protein, 14 aa, Homo sapiens
CSSYTSANTLDVIF

SEQ ID NO: 27881 - protein, 13 aa, Homo sapiens
CSSGSYLSAFDIW

SEQ ID NO: 27882 - protein, 11 aa, Homo sapiens [sequence omitted]

SEQ ID NO: 27883 - protein, 14 aa, Homo sapiens
CARDSSGWSPFDHW

SEQ ID NO: 27884 - protein, 15 aa, Homo sapiens
CAKVGSGSGWYADYW

SEQ ID NO: 27885 - protein, 19 aa, Homo sapiens
CAKDLTAAAAGYYYGMDVW

SEQ ID NO: 27886 - protein, 17 aa, Homo sapiens
CVREDWAVGGTNNFDHW

SEQ ID NO: 27887 - protein, 16 aa, Homo sapiens
CAKRESSGWYWAFDIW

SEQ ID NO: 27888 - protein, 21 aa, Homo sapiens
CARDPSATMKVVAPAQAFDIW

SEQ ID NO: 27889 - protein, 13 aa, Homo sapiens
CARGSNSNGFDIW

SEQ ID NO: 27890 - protein, 20 aa, Homo sapiens
CARGEVDYYDSSGYPHFDYW

SEQ ID NO: 27891 - protein, 17 aa, Homo sapiens
CARYPPSLAGTSIVDYW

SEQ ID NO: 27892 - protein, 13 aa, Homo sapiens
CATQQRYGDHDYW

SEQ ID NO: 27893 - protein, 18 aa, Homo sapiens
CARDMATGYYYYYGVDVW

SEQ ID NO: 27894 - protein, 17 aa, Homo sapiens
CAREIPELYHYYGMDVW

SEQ ID NO: 27895 - protein, 15 aa, Homo sapiens
CTTDWFAHDYGADYW

SEQ ID NO: 27896 - protein, 22 aa, Homo sapiens
CARARMGAILGGEYYYYGMDVW

SEQ ID NO: 27897 - protein, 17 aa, Homo sapiens
CAKDGVHGGSWHYFPSW

SEQ ID NO: 27898 - protein, 18 aa, Homo sapiens
CAKDISVVVVPIYYFDYW

SEQ ID NO: 27899 - protein, 16 aa, Homo sapiens
CARRGTSGYYYAVDYW

SEQ ID NO: 27900 - protein, 13 aa, Homo sapiens
CQESYSTSSRSTF

SEQ ID NO: 27901 - protein, 18 aa, Homo sapiens
CAKDYRLAVAGRDYFDYW

SEQ ID NO: 27902 - protein, 19 aa, Homo sapiens
CAKDLSWGWFGETRGFDSW

SEQ ID NO: 27903 - protein, 13 aa, Homo sapiens [sequence omitted]

SEQ ID NO: 27904 - protein, 15 aa, Homo sapiens
CTTDYQSGTFHFDYW

SEQ ID NO: 27905 - protein, 19 aa, Homo sapiens
CARGALQSSSWYGWYFDLW

SEQ ID NO: 27906 - protein, 16 aa, Homo sapiens
CARHSGYGGNSDFDYW

SEQ ID NO: 27907 - protein, 13 aa, Homo sapiens
CARATGTYAFDIW

SEQ ID NO: 27908 - protein, 14 aa, Homo sapiens
CARDQGHGDYEDYW

SEQ ID NO: 27909 - protein, 19 aa, Homo sapiens
CARVHLGSSWLWAGWFDPW

SEQ ID NO: 27910 - protein, 16 aa, Homo sapiens
CTTGPRITGTTDRDYW

SEQ ID NO: 27911 - protein, 17 aa, Homo sapiens
CAKDRGFGVVMFLFDDW

SEQ ID NO: 27912 - protein, 20 aa, Homo sapiens
CASGYDFWSGYYIKDGMDVW

SEQ ID NO: 27913 - protein, 16 aa, Homo sapiens
CARESRGSYYRDFDYW

SEQ ID NO: 27914 - protein, 13 aa, Homo sapiens
CARVLASGYFDYW

SEQ ID NO: 27915 - protein, 24 aa, Homo sapiens
CARNVLTVDIVATTPRREGWFDPW

SEQ ID NO: 27916 - protein, 18 aa, Homo sapiens
CAREHILTGYYDFWFDPW

SEQ ID NO: 27917 - protein, 15 aa, Homo sapiens
CATRGSFYDSYFNYW

SEQ ID NO: 27918 - protein, 12 aa, Homo sapiens
CATFILVARDYW

SEQ ID NO: 27919 - protein, 31 aa, Homo sapiens
CAKDGVSRWGSIANVVVPAALMRDLWSIDYW

SEQ ID NO: 27920 - protein, 20 aa, Homo sapiens
CARGDGSSWYRNWFRWFDPW

SEQ ID NO: 27921 - protein, 12 aa, Homo sapiens
CQQYESDSGRTF

SEQ ID NO: 27922 - protein, 17 aa, Homo sapiens
CASLAEGGYYPAAFDIW

SEQ ID NO: 27923 - protein, 20 aa, Homo sapiens
CARFVRANINSGSKYYFDNW

SEQ ID NO: 27924 - protein, 13 aa, Homo sapiens
CTTYGITGTPDYW

SEQ ID NO: 27925 - protein, 13 aa, Homo sapiens
CAKVAGPPYFDYW

SEQ ID NO: 27926 - protein, 21 aa, Homo sapiens
CARLGYYDSSGYYKSDGFDIW

SEQ ID NO: 27927 - protein, 15 aa, Homo sapiens
CARFNNWSYRRFDYW

SEQ ID NO: 27928 - protein, 18 aa, Homo sapiens
CARHVGSGWYVPYYFDYW

SEQ ID NO: 27929 - protein, 18 aa, Homo sapiens
CARIRGDDYGDPDAFDIW

SEQ ID NO: 27930 - protein, 16 aa, Homo sapiens
CARSGVRGVNNWFDPW

SEQ ID NO: 27931 - protein, 20 aa, Homo sapiens
CARERMITFGGVIASNFDYW

SEQ ID NO: 27932 - protein, 17 aa, Homo sapiens
CARTSGWSFGQGSFDYW

SEQ ID NO: 27933 - protein, 14 aa, Homo sapiens
CTTDIAQEYYFDYW

SEQ ID NO: 27934 - protein, 19 aa, Homo sapiens
CARDRSPYYYGSGSYYDHW

SEQ ID NO: 27935 - protein, 15 aa, Homo sapiens
CARVKGTIFGTFDPW

SEQ ID NO: 27936 - protein, 15 aa, Homo sapiens
CARDLGYSYGAFDYW

SEQ ID NO: 27937 - protein, 20 aa, Homo sapiens
CAKEHGYYDSSGYYHGFDYW

SEQ ID NO: 27938 - protein, 17 aa, Homo sapiens
CARHPPRWQWLVNFDYW

SEQ ID NO: 27939 - protein, 25 aa, Homo sapiens
CARDSPMVRGVIITAHYYYYGMDVW

SEQ ID NO: 27940 - protein, 17 aa, Homo sapiens
CTRGPSTSGSYYPSDYW

SEQ ID NO: 27941 - protein, 21 aa, Homo sapiens
CARAAGSITMIVVVINAFDIW

SEQ ID NO: 27942 - protein, 21 aa, Homo sapiens
CTTDLRPEELAPYYYYGMDVW

SEQ ID NO: 27943 - protein, 17 aa, Homo sapiens
CARDGISMFRGVELDYW

SEQ ID NO: 27944 - protein, 12 aa, Homo sapiens
CATGNIYWFDIW

SEQ ID NO: 27945 - protein, 15 aa, Homo sapiens
CAKERNDYGDYFDYW

SEQ ID NO: 27946 - protein, 19 aa, Homo sapiens
CARDIGDLYSGSYSVFDYW

SEQ ID NO: 27947 - protein, 20 aa, Homo sapiens
CARLGTPHSSSSDLGWFDPW

SEQ ID NO: 27948 - protein, 18 aa, Homo sapiens
CARGPPSYYYDSSLADYW

SEQ ID NO: 27949 - protein, 19 aa, Homo sapiens
CAKDTGLVPAAIDGAFDIW

SEQ ID NO: 27950 - protein, 22 aa, Homo sapiens
CARVRGRITIFGVVITGNFDYW

SEQ ID NO: 27951 - protein, 15 aa, Homo sapiens
CAKGDGYLSYYFDYW

SEQ ID NO: 27952 - protein, 15 aa, Homo sapiens
CAKDIWGSNDAFDIW

SEQ ID NO: 27953 - protein, 27 aa, Homo sapiens
CARHSLNMGETVFGVVLQSATNYFDPW

SEQ ID NO: 27954 - protein, 20 aa, Homo sapiens
CAHTLTYYYDSSGYYSFDYW

SEQ ID NO: 27955 - protein, 19 aa, Homo sapiens
CAHSSLGIKGERGIWFDPW

SEQ ID NO: 27956 - protein, 13 aa, Homo sapiens
CAHRMGSGYFHYW

SEQ ID NO: 27957 - protein, 16 aa, Homo sapiens
CATVRIAGVPHAFDIW

SEQ ID NO: 27958 - protein, 18 aa, Homo sapiens
CARDLLSGTMGGDAFDIW

SEQ ID NO: 27959 - protein, 20 aa, Homo sapiens
CARALGATTRDYYYYGMDVW

SEQ ID NO: 27960 - protein, 16 aa, Homo sapiens
CTPDFDGLREGWFDPW

SEQ ID NO: 27961 - protein, 14 aa, Homo sapiens
CARGRGMALLFDPW

SEQ ID NO: 27962 - protein, 19 aa, Homo sapiens
CARDSDILTGYYYYGMDVW

SEQ ID NO: 27963 - protein, 21 aa, Homo sapiens
CASWSQLWLEVGGHEDAFDIW

SEQ ID NO: 27964 - protein, 15 aa, Homo sapiens
CAHRLLVAGPYFDYW

SEQ ID NO: 27965 - protein, 18 aa, Homo sapiens
CARARITMIVVVREFDYW

SEQ ID NO: 27966 - protein, 15 aa, Homo sapiens
CMQALQTPLGGLFTF

SEQ ID NO: 27967 - protein, 24 aa, Homo sapiens
CAKGIFWPNFWSAYRRAAYYFDYW

SEQ ID NO: 27968 - protein, 13 aa, Homo sapiens
CQSYDNILSGPVF

SEQ ID NO: 27969 - protein, 15 aa, Homo sapiens
CARIPDTGMDPIDYW

SEQ ID NO: 27970 - protein, 28 aa, Homo sapiens
CARVWGDDSSGYYYLTGFRPESARFDYW

SEQ ID NO: 27971 - protein, 24 aa, Homo sapiens
CARGPPADYSDISERPRGNWFDPW

SEQ ID NO: 27972 - protein, 12 aa, Homo sapiens
CAKDDYVCFEYW

SEQ ID NO: 27973 - protein, 16 aa, Homo sapiens
CAREGGTSGWYSFDYW

SEQ ID NO: 27974 - protein, 18 aa, Homo sapiens
CARHRSPWLQLMVAFDIW

SEQ ID NO: 27975 - protein, 12 aa, Homo sapiens
CQCDYSTPPYTF

SEQ ID NO: 27976 - protein, 13 aa, Homo sapiens
CAKDQKVLESDYW

SEQ ID NO: 27977 - protein, 16 aa, Homo sapiens
CVRAGYGNSYGLFDYW

SEQ ID NO: 27978 - protein, 19 aa, Homo sapiens
CARDPDDGSGSYYGAFDIW

SEQ ID NO: 27979 - protein, 13 aa, Homo sapiens
CQSTDNSGHRVVF

SEQ ID NO: 27980 - protein, 13 aa, Homo sapiens
CARERQQIWFDPW

SEQ ID NO: 27981 - protein, 18 aa, Homo sapiens
CVKDDLDGGHRYAAFDYW

SEQ ID NO: 27982 - protein, 32 aa, Homo sapiens
CLRAEDTAVYYCARERGTLWFGELFTNWFDPW

SEQ ID NO: 27983 - protein, 16 aa, Homo sapiens
CAHRRSGVVTPYFDYW

SEQ ID NO: 27984 - protein, 13 aa, Homo sapiens
CQQANSVPRKFTF

SEQ ID NO: 27985 - protein, 22 aa, Homo sapiens
CAKDMVPYWDYSSTPFGAFDIW

SEQ ID NO: 27986 - protein, 12 aa, Homo sapiens
CQQSFSTLALTF

SEQ ID NO: 27987 - protein, 25 aa, Homo sapiens
CAKDGGGITIFGVVPDYYYYGMDVW

SEQ ID NO: 27988 - protein, 18 aa, Homo sapiens
CARDLFRNYFHYYGMDVW

SEQ ID NO: 27989 - protein, 14 aa, Homo sapiens
CARHTTGYNWFDPW

SEQ ID NO: 27990 - protein, 17 aa, Homo sapiens
CARDPLLGLGPWYFDLW

SEQ ID NO: 27991 - protein, 19 aa, Homo sapiens
CASLQAPDYGDYVRWFDPW

SEQ ID NO: 27992 - protein, 15 aa, Homo sapiens
CQSFDSSLSGSQVLF

SEQ ID NO: 27993 - protein, 21 aa, Homo sapiens
CAREAWDFWSGYYRPIYFDYW

SEQ ID NO: 27994 - protein, 20 aa, Homo sapiens
CARVHCPAGVCFSFGAFDVW

SEQ ID NO: 27995 - protein, 17 aa, Homo sapiens
CARALSVLNYFFALDVW

SEQ ID NO: 27996 - protein, 24 aa, Homo sapiens
CAKEKATDSSAYYLFYYYYVMDVW

SEQ ID NO: 27997 - protein, 23 aa, Homo sapiens
CARVQVASGFCSGMHCPNWFDPW

SEQ ID NO: 27998 - protein, 27 aa, Homo sapiens
CAKDARPSRYCSGGSCTRKKYNWFDPW

SEQ ID NO: 27999 - protein, 23 aa, Homo sapiens
CVKDLFGAEYYYDSSAPTGGDYW

SEQ ID NO: 28000 - protein, 24 aa, Homo sapiens
CARHGLAGITIFGVVTMKGWFDPW

SEQ ID NO: 28001 - protein, 22 aa, Homo sapiens
CARALHYYDSSGYSRHDAFDIW

SEQ ID NO: 28002 - protein, 21 aa, Homo sapiens
CATGQGYSSGWYAATHSLDYW

SEQ ID NO: 28003 - protein, 17 aa, Homo sapiens
CARSYIIVGVPPYFDYW

SEQ ID NO: 28004 - protein, 14 aa, Homo sapiens
CARLYDSSGYLDYW

SEQ ID NO: 28005 - protein, 14 aa, Homo sapiens
CLRGTGNYGDWDYW

SEQ ID NO: 28006 - protein, 15 aa, Homo sapiens
CARGSPQGEYYFDYW

SEQ ID NO: 28007 - protein, 16 aa, Homo sapiens
CARDPQVAGGGYFDYW

SEQ ID NO: 28008 - protein, 15 aa, Homo sapiens
CARLGSGFQDAFDIW

SEQ ID NO: 28009 - protein, 18 aa, Homo sapiens
CARVSPVEDAYYDAYDIW

SEQ ID NO: 28010 - protein, 24 aa, Homo sapiens
CAGLLTSYYDSSDDHYSYYGMDVW

SEQ ID NO: 28011 - protein, 11 aa, Homo sapiens [sequence omitted]

SEQ ID NO: 28012 - protein, 19 aa, Homo sapiens
CARGPIEMATIRPNYFDYW

SEQ ID NO: 28013 - protein, 16 aa, Homo sapiens
CARGNLGIGTRYFDLW

SEQ ID NO: 28014 - protein, 19 aa, Homo sapiens
CARSSSSWSGYYYYGMDVW

SEQ ID NO: 28015 - protein, 19 aa, Homo sapiens
CARVVRRVDRSGNNWFDPW

SEQ ID NO: 28016 - protein, 26 aa, Homo sapiens
CARDNDGGYSYGFSTAPEPYNWFDPW

SEQ ID NO: 28017 - protein, 21 aa, Homo sapiens
CARDPIIAAAGYYYYYGMDVW

SEQ ID NO: 28018 - protein, 16 aa, Homo sapiens
CAKDRWTYSSSWSDYW

SEQ ID NO: 28019 - protein, 14 aa, Homo sapiens
CGRIMAVAGTIDYW

SEQ ID NO: 28020 - protein, 16 aa, Homo sapiens
CARVSQHSGYDTFDYW

SEQ ID NO: 28021 - protein, 15 aa, Homo sapiens
CAREVRSWTRSYDYW

SEQ ID NO: 28022 - protein, 12 aa, Homo sapiens [sequence omitted]

SEQ ID NO: 28023 - protein, 15 aa, Homo sapiens
CAHREVGGWEWFDYW

SEQ ID NO: 28024 - protein, 20 aa, Homo sapiens
CAKESSYGGYPGRNGAFDIW

SEQ ID NO: 28025 - protein, 18 aa, Homo sapiens
CAREIWDEGYSSGWFDYW

SEQ ID NO: 28026 - protein, 16 aa, Homo sapiens
CAKDGATVTMGGLDYW

SEQ ID NO: 28027 - protein, 12 aa, Homo sapiens
CHQYNAYSTWTF

SEQ ID NO: 28028 - protein, 28 aa, Homo sapiens
CAREGLPHTLFRLVPAARSDYYYGMDVW

SEQ ID NO: 28029 - protein, 19 aa, Homo sapiens
CARDRQLRYFDWPDAFDIW

SEQ ID NO: 28030 - protein, 12 aa, Homo sapiens
CARDHWGSFEYW

SEQ ID NO: 28031 - protein, 23 aa, Homo sapiens
CAHSQLLTYYYDSSGPHDAFDIW

SEQ ID NO: 28032 - protein, 16 aa, Homo sapiens
CAKDGYDFWSGYYNYW

SEQ ID NO: 28033 - protein, 19 aa, Homo sapiens
CARANVLLRFGELSPFDYW

SEQ ID NO: 28034 - protein, 24 aa, Homo sapiens
CARGDYSGYSSDYYNYLRLPFDYW

SEQ ID NO: 28035 - protein, 35 aa, Homo sapiens
CDWSSDVCSSDLCTRAMDTAMIAWDLSDGYVFDIW

SEQ ID NO: 28036 - protein, 17 aa, Homo sapiens
CARGGGHDFGERRVDYW

SEQ ID NO: 28037 - protein, 13 aa, Homo sapiens
CASLPLRERFDPW

SEQ ID NO: 28038 - protein, 20 aa, Homo sapiens
CAKDGIVQQLDGSPYYFDYW

SEQ ID NO: 28039 - protein, 15 aa, Homo sapiens
CARESGNGSPAFDSW

SEQ ID NO: 28040 - protein, 12 aa, Homo sapiens
CTKDTFGQEDYW

SEQ ID NO: 28041 - protein, 18 aa, Homo sapiens
CATAPRGDYVNDDAFDIW

SEQ ID NO: 28042 - protein, 18 aa, Homo sapiens
CARELTRSSWDPAPFDYW

SEQ ID NO: 28043 - protein, 20 aa, Homo sapiens
CATSRPNQFLPHEQNFFDRW

SEQ ID NO: 28044 - protein, 18 aa, Homo sapiens
CVRDHKDGDNYHWFFDLW

SEQ ID NO: 28045 - protein, 19 aa, Homo sapiens
CANSFYYDRSDYNDHFDYW

SEQ ID NO: 28046 - protein, 16 aa, Homo sapiens
CARDRRQWLVMPLDYW

SEQ ID NO: 28047 - protein, 17 aa, Homo sapiens
CAKGLIAVAATGWFDPW

SEQ ID NO: 28048 - protein, 18 aa, Homo sapiens
CARDLYDPQYPIDAFDVW

SEQ ID NO: 28049 - protein, 14 aa, Homo sapiens
CARRWLRDNFFDYW

SEQ ID NO: 28050 - protein, 22 aa, Homo sapiens
CARDPVSSSSWPYYYYYGMDVW

SEQ ID NO: 28051 - protein, 17 aa, Homo sapiens
CARKTLGGYSYGSFDFW

SEQ ID NO: 28052 - protein, 16 aa, Homo sapiens
CARDRLGKADHAFDIW

SEQ ID NO: 28053 - protein, 19 aa, Homo sapiens
CAKTFDSSGYYYTCSFDIW

SEQ ID NO: 28054 - protein, 17 aa, Homo sapiens
CASVDPVIPTQGGFGYW

SEQ ID NO: 28055 - protein, 14 aa, Homo sapiens
CQVWESSSDQSWVF

SEQ ID NO: 28056 - protein, 18 aa, Homo sapiens
CARVYGAYSFGHIEFDSW

SEQ ID NO: 28057 - protein, 18 aa, Homo sapiens
CARDAYAGNSEPDPFDIW

SEQ ID NO: 28058 - protein, 18 aa, Homo sapiens
CARDSSHYYDSSGYLDYW

SEQ ID NO: 28059 - protein, 13 aa, Homo sapiens
CARVVAAKNFDYW

SEQ ID NO: 28060 - protein, 24 aa, Homo sapiens
CARQYRRVDTAMVTDYNNYYMDVW

SEQ ID NO: 28061 - protein, 19 aa, Homo sapiens
CARVSGHIVPSWNDAFDIW

SEQ ID NO: 28062 - protein, 17 aa, Homo sapiens
CARELTVGDYYYGMDVW

SEQ ID NO: 28063 - protein, 25 aa, Homo sapiens
CARASGGITMIVVVTPYYYYYMDVW

SEQ ID NO: 28064 - protein, 27 aa, Homo sapiens
CARDRADLATAFFQYHTDYYYYYMDVW

SEQ ID NO: 28065 - protein, 17 aa, Homo sapiens
CAQDKGLYTSTNRFDPW

SEQ ID NO: 28066 - protein, 13 aa, Homo sapiens
CHQFNSYVEGYSF

SEQ ID NO: 28067 - protein, 17 aa, Homo sapiens
CAKAFMIVVVITDFDYW

SEQ ID NO: 28068 - protein, 16 aa, Homo sapiens
CARDGGNYDNSPFDSW

SEQ ID NO: 28069 - protein, 18 aa, Homo sapiens
CARERDADVDMIYYFDYW

SEQ ID NO: 28070 - protein, 18 aa, Homo sapiens
CASWAYVGSRLRVSWDYW

SEQ ID NO: 28071 - protein, 17 aa, Homo sapiens
CVRGISSDGAWFPFRYW

SEQ ID NO: 28072 - protein, 16 aa, Homo sapiens
CARDGGDDYNTWYDYW

SEQ ID NO: 28073 - protein, 18 aa, Homo sapiens
CAIVRGGYRGNYNWFDPW

SEQ ID NO: 28074 - protein, 18 aa, Homo sapiens
CALPICGGSPKYDAFDIW

SEQ ID NO: 28075 - protein, 21 aa, Homo sapiens
CARDTVVVVAANYYYYGMDVW

SEQ ID NO: 28076 - protein, 25 aa, Homo sapiens
CARRGPWERRGPWEMATIFNWFDPW

SEQ ID NO: 28077 - protein, 18 aa, Homo sapiens
CTRVSFRHSSSSLWFDPW

SEQ ID NO: 28078 - protein, 15 aa, Homo sapiens
CASSDYYDRWAFDYW

SEQ ID NO: 28079 - protein, 20 aa, Homo sapiens
CAREIFGYHSSGYLGYLDFW

SEQ ID NO: 28080 - protein, 20 aa, Homo sapiens
CARAGSSAAGLGQLGYLDLW

SEQ ID NO: 28081 - protein, 19 aa, Homo sapiens
CARAIEFIVGLWSDAFDIW

SEQ ID NO: 28082 - protein, 13 aa, Homo sapiens
CAKGRKSWYFDFW

SEQ ID NO: 28083 - protein, 23 aa, Homo sapiens
CARLNYDSSGYSNYYYYYYMDVW

SEQ ID NO: 28084 - protein, 20 aa, Homo sapiens
CASVVEYCSSTSCEGWFDPW

SEQ ID NO: 28085 - protein, 17 aa, Homo sapiens
CARDRCIGGDCYEIDYW

SEQ ID NO: 28086 - protein, 15 aa, Homo sapiens
CARDRRWAMLAFDFW

SEQ ID NO: 28087 - protein, 17 aa, Homo sapiens
CARVGSSGWYSGGSDYW

SEQ ID NO: 28088 - protein, 16 aa, Homo sapiens
CVKDRTSASSLPHDYW

SEQ ID NO: 28089 - protein, 16 aa, Homo sapiens
CARETNSGFTTYFDYW

SEQ ID NO: 28090 - protein, 11 aa, Homo sapiens
CQQYDNVIISF

SEQ ID NO: 28091 - protein, 17 aa, Homo sapiens
CARGRTMIVHFNWFDPW

SEQ ID NO: 28092 - protein, 22 aa, Homo sapiens
CASGIRYCTNGVCPEGPFFDYW

SEQ ID NO: 28093 - protein, 15 aa, Homo sapiens
CARVWELLSDAFDIW

SEQ ID NO: 28094 - protein, 19 aa, Homo sapiens
CARVARRSDENSGYYFDYW

SEQ ID NO: 28095 - protein, 18 aa, Homo sapiens
CASTRGDYNDIGYAFDIW

SEQ ID NO: 28096 - protein, 18 aa, Homo sapiens
CARGSSEDRWFRILFDSW

SEQ ID NO: 28097 - protein, 26 aa, Homo sapiens
CARSYDFWSGYRGLGYYYYYYGMDVW

SEQ ID NO: 28098 - protein, 16 aa, Homo sapiens
CSRGYNGYPFDAFDIW

SEQ ID NO: 28099 - protein, 17 aa, Homo sapiens
CARERVIYGDSYFVDYW

SEQ ID NO: 28100 - protein, 17 aa, Homo sapiens
CARESQWLIPQYYFDFW

SEQ ID NO: 28101 - protein, 19 aa, Homo sapiens
CARHLGSCSGGSCTPFDYW

SEQ ID NO: 28102 - protein, 18 aa, Homo sapiens
CARDGYEYNWNYGILDYW

SEQ ID NO: 28103 - protein, 15 aa, Homo sapiens
CARINYYSGYGMDVW

SEQ ID NO: 28104 - protein, 22 aa, Homo sapiens
CARIQGDYYDSSGSVHGWFDPW

SEQ ID NO: 28105 - protein, 24 aa, Homo sapiens
CATAGHHDFWSGYRNYYHYGMDVW

SEQ ID NO: 28106 - protein, 26 aa, Homo sapiens
CASASPYSYGSRYDYVWGSYRSIDYW

SEQ ID NO: 28107 - protein, 12 aa, Homo sapiens
CQQYGSSQGYIF

SEQ ID NO: 28108 - protein, 17 aa, Homo sapiens
CVRDVIFSTRFVWFDPW

SEQ ID NO: 28109 - protein, 19 aa, Homo sapiens
CARERLREWELQQDAFDIW

SEQ ID NO: 28110 - protein, 21 aa, Homo sapiens
CSSPGCYEGSGPDYYDGMDVW

SEQ ID NO: 28111 - protein, 19 aa, Homo sapiens
CAKGRGDRLLGIPGYFDLW

SEQ ID NO: 28112 - protein, 11 aa, Homo sapiens
CARIGEVWDYW

SEQ ID NO: 28113 - protein, 22 aa, Homo sapiens
CARQDYSGTYGGYHYKLYMDVW

SEQ ID NO: 28114 - protein, 18 aa, Homo sapiens
CTRDRGSGTIRYNWFDLW

SEQ ID NO: 28115 - protein, 20 aa, Homo sapiens
CAKDIVGLRSIFGVGPFDYW

SEQ ID NO: 28116 - protein, 22 aa, Homo sapiens
CARSGGYYDSSGYYVVDAFDIW

SEQ ID NO: 28117 - protein, 22 aa, Homo sapiens
CARFEYGRGAYYTRPSEPFDIW

SEQ ID NO: 28118 - protein, 18 aa, Homo sapiens
CARLINTGTAGLSWVDSW

SEQ ID NO: 28119 - protein, 21 aa, Homo sapiens
CAHRDKRIQLWLLGVYAFDIW

SEQ ID NO: 28120 - protein, 23 aa, Homo sapiens
CARVEYSSGWYNKNYYYYYMDVW

SEQ ID NO: 28121 - protein, 19 aa, Homo sapiens
CARVGYYYDSSGTNWFDPW

SEQ ID NO: 28122 - protein, 20 aa, Homo sapiens
CARLFVGGHWGYYYYYMDVW

SEQ ID NO: 28123 - protein, 20 aa, Homo sapiens
CAKDGRYCSGGSCYLPFDYW

SEQ ID NO: 28124 - protein, 19 aa, Homo sapiens
CARSKAPGFSYSLYYLDYW

SEQ ID NO: 28125 - protein, 16 aa, Homo sapiens
CARDYSGSSTSPLDYW

SEQ ID NO: 28126 - protein, 19 aa, Homo sapiens
CARDIPDDYGDSPLDGDYW

SEQ ID NO: 28127 - protein, 18 aa, Homo sapiens
CARVRLPGNPVAGYHDYW

SEQ ID NO: 28128 - protein, 17 aa, Homo sapiens
CARDPYDYGDLGWFDPW

SEQ ID NO: 28129 - protein, 27 aa, Homo sapiens
CARDKVYCSGGSCYRYRYYYYYGMDVW

SEQ ID NO: 28130 - protein, 21 aa, Homo sapiens
CARGEIFRGRILEWLSHFDYW

SEQ ID NO: 28131 - protein, 18 aa, Homo sapiens
CARVTTVTNYYYYYMDVW

SEQ ID NO: 28132 - protein, 18 aa, Homo sapiens
CTKIATPGVGTTGSFDDW

SEQ ID NO: 28133 - protein, 17 aa, Homo sapiens
CARPSHGYNSLSAFDIW

SEQ ID NO: 28134 - protein, 19 aa, Homo sapiens
CAPSRYGDRPYYYYGMDVW

SEQ ID NO: 28135 - protein, 18 aa, Homo sapiens
CARHGSSWYIGYYYMDVW

SEQ ID NO: 28136 - protein, 14 aa, Homo sapiens
CARVYQLPPVFDYW

SEQ ID NO: 28137 - protein, 19 aa, Homo sapiens
CARDIDGFSVGATAVFGYW

SEQ ID NO: 28138 - protein, 18 aa, Homo sapiens
CAREDFWSGYYSGYFDYW

SEQ ID NO: 28139 - protein, 19 aa, Homo sapiens
CARDFHDLWSGYYPYFKYW

SEQ ID NO: 28140 - protein, 18 aa, Homo sapiens
CAGDLNLAYGDYPPFDSW

SEQ ID NO: 28141 - protein, 20 aa, Homo sapiens
CARIRGWSPTYSYYYYMDVW

SEQ ID NO: 28142 - protein, 17 aa, Homo sapiens
CARSPPEISGWSHFDYW

SEQ ID NO: 28143 - protein, 16 aa, Homo sapiens
CARVRVQGRHTYFDYW

SEQ ID NO: 28144 - protein, 27 aa, Homo sapiens
CTIDLLPPHIVVVPSAIRHYYYYMDVW

SEQ ID NO: 28145 - protein, 17 aa, Homo sapiens
CARDSRFGDLDDGMDVW

SEQ ID NO: 28146 - protein, 17 aa, Homo sapiens
CARDNDFWSGYPPMDYW

SEQ ID NO: 28147 - protein, 17 aa, Homo sapiens
CATREGYDILTGPFDYW

SEQ ID NO: 28148 - protein, 20 aa, Homo sapiens
CARSTSRYYYDTGYWYFDLW

SEQ ID NO: 28149 - protein, 18 aa, Homo sapiens
CARADTIAVSGSGGLDYW

SEQ ID NO: 28150 - protein, 23 aa, Homo sapiens
CAIDLSIAARPQLDYYYYGMDVW

SEQ ID NO: 28151 - protein, 14 aa, Homo sapiens
CSRTAVSGTTFDYW

SEQ ID NO: 28152 - protein, 14 aa, Homo sapiens
CARGHFGEGWFDPW

SEQ ID NO: 28153 - protein, 23 aa, Homo sapiens
CAKDKGVDIVATTSYYYYGMDVW

SEQ ID NO: 28154 - protein, 20 aa, Homo sapiens
CAKDFKMVGTLDPNDVFDIW

SEQ ID NO: 28155 - protein, 14 aa, Homo sapiens
CARSGSSWQDFDYW

SEQ ID NO: 28156 - protein, 18 aa, Homo sapiens
CARVPAGCSGGSCYSDYW

SEQ ID NO: 28157 - protein, 14 aa, Homo sapiens
CASRAGGKSDFDTW

SEQ ID NO: 28158 - protein, 17 aa, Homo sapiens
CAMIESSGWYQSIFDYW

SEQ ID NO: 28159 - protein, 17 aa, Homo sapiens
CASPFDGYNKGGAFDIW

SEQ ID NO: 28160 - protein, 19 aa, Homo sapiens
CARGIAPRVLARRDPFDIW

SEQ ID NO: 28161 - protein, 18 aa, Homo sapiens
CARLGPRYSYGRDWFDPW

SEQ ID NO: 28162 - protein, 19 aa, Homo sapiens
CARRGGDKYIFLDWYFDLW

SEQ ID NO: 28163 - protein, 16 aa, Homo sapiens
CARHFGGYYDDAFDIW

SEQ ID NO: 28164 - protein, 24 aa, Homo sapiens
CARSPQTYYYDSSGYSPLYYFDYW

SEQ ID NO: 28165 - protein, 24 aa, Homo sapiens
CARDGAAGLKQWLVPAPSHYFDYW

SEQ ID NO: 28166 - protein, 20 aa, Homo sapiens
CASPRYDFWSGYSRGQFDYW

SEQ ID NO: 28167 - protein, 22 aa, Homo sapiens
CARESLYDYVWGSYRYTYLDYW

SEQ ID NO: 28168 - protein, 24 aa, Homo sapiens
CARSFLYYDFWSGPVYYYYYMDVW

SEQ ID NO: 28169 - protein, 18 aa, Homo sapiens
CQQSYIGPRNSYSTPRTF

SEQ ID NO: 28170 - protein, 15 aa, Homo sapiens
CAKWRRAVTPRGDYW

SEQ ID NO: 28171 - protein, 22 aa, Homo sapiens
CARDYTVTTAHIDYYYYGMDVW

SEQ ID NO: 28172 - protein, 19 aa, Homo sapiens
CATIGGGGYDQRTYYFENW

SEQ ID NO: 28173 - protein, 20 aa, Homo sapiens
CARVDCSSTSCSAPDYFDYW

SEQ ID NO: 28174 - protein, 28 aa, Homo sapiens
CARGVDRTQYSSGWYDPPPAHPDYFDYW

SEQ ID NO: 28175 - protein, 21 aa, Homo sapiens
CARKLRGGDTNMDNYNWFDPW

SEQ ID NO: 28176 - protein, 22 aa, Homo sapiens
CARSYCTSTNCYSEGLDWFDPW

SEQ ID NO: 28177 - protein, 17 aa, Homo sapiens
CARGPYDFWTGYYIDYW

SEQ ID NO: 28178 - protein, 24 aa, Homo sapiens
CTTDPPPTRAIVVAISWGDAFDIW

SEQ ID NO: 28179 - protein, 16 aa, Homo sapiens
CAKDSGGSYFYALDYW

SEQ ID NO: 28180 - protein, 15 aa, Homo sapiens
CARDLSSVAGPFDYW

SEQ ID NO: 28181 - protein, 18 aa, Homo sapiens
CASGLFDSGGYYYYFQYW

SEQ ID NO: 28182 - protein, 15 aa, Homo sapiens
CARHYYYGSGSYDYW

SEQ ID NO: 28183 - protein, 18 aa, Homo sapiens
CARDFSRDGYNSYSFEYW

SEQ ID NO: 28184 - protein, 14 aa, Homo sapiens
CAWGYYYYRYMDAW

SEQ ID NO: 28185 - protein, 24 aa, Homo sapiens
CARDRHTDNCTNGVCYPDWYFDLW

SEQ ID NO: 28186 - protein, 24 aa, Homo sapiens
CARKHIVVVTAILWVDYYYYMDVW

SEQ ID NO: 28187 - protein, 17 aa, Homo sapiens
CAKTAYGTYGYYGMDVW

SEQ ID NO: 28188 - protein, 13 aa, Homo sapiens
CSSYTGSSSFAIF

SEQ ID NO: 28189 - protein, 18 aa, Homo sapiens
CAKSIFPSVFGFYAMDVW

SEQ ID NO: 28190 - protein, 16 aa, Homo sapiens
CARPAAGTPYNWFDPW

SEQ ID NO: 28191 - protein, 16 aa, Homo sapiens
CARGSEDNHFWRIDYW

SEQ ID NO: 28192 - protein, 17 aa, Homo sapiens
CARHRTVAGLTHDFDYW

SEQ ID NO: 28193 - protein, 23 aa, Homo sapiens
CARFWGARYSSGWYYYYYYMDVW

SEQ ID NO: 28194 - protein, 11 aa, Homo sapiens
CHQYYSTFYSF

SEQ ID NO: 28195 - protein, 16 aa, Homo sapiens
CAKDLGAYAHFYIDSW

SEQ ID NO: 28196 - protein, 13 aa, Homo sapiens
CTTDRPTRPLDYW

SEQ ID NO: 28197 - protein, 21 aa, Homo sapiens
CARAPSLRWKSNPLYWYFDLW

SEQ ID NO: 28198 - protein, 22 aa, Homo sapiens
CAKDLIGAIPNGYDYYYGMDVW

SEQ ID NO: 28199 - protein, 19 aa, Homo sapiens
CARTGYDSSGYYSYYFDYW

SEQ ID NO: 28200 - protein, 15 aa, Homo sapiens
CQSYDNSLRGPGCIF

SEQ ID NO: 28201 - protein, 18 aa, Homo sapiens
CARSMEVVMTPSDAFDFW

SEQ ID NO: 28202 - protein, 26 aa, Homo sapiens
CARAGAALITGVRYFDWTDSDPIDYW

SEQ ID NO: 28203 - protein, 15 aa, Homo sapiens
CARSQEWLVSTLDYW

SEQ ID NO: 28204 - protein, 17 aa, Homo sapiens
CAKGSDSSGWYSLFDYW

SEQ ID NO: 28205 - protein, 25 aa, Homo sapiens
CVRDGGGGLRITIFGVVIVPYFDFW

SEQ ID NO: 28206 - protein, 16 aa, Homo sapiens
CARGQGIGNYNGLDSW

SEQ ID NO: 28207 - protein, 23 aa, Homo sapiens
CARDAGGSYDSRGYYYPNYFDSW

SEQ ID NO: 28208 - protein, 9 aa, Homo sapiens
CGSSPPWTF

SEQ ID NO: 28209 - protein, 14 aa, Homo sapiens
CARSPRIVGAPDYW

SEQ ID NO: 28210 - protein, 22 aa, Homo sapiens
CAKDLRFHINNVHSGAAEFDSW

SEQ ID NO: 28211 - protein, 17 aa, Homo sapiens
CARARDGWYTVRPFDIW

SEQ ID NO: 28212 - protein, 8 aa, Homo sapiens
CMQGTHRF

SEQ ID NO: 28213 - protein, 18 aa, Homo sapiens
CNRARQVSGTYSDFFDFW

SEQ ID NO: 28214 - protein, 17 aa, Homo sapiens
CASRQGYSSSLYYMDVW

SEQ ID NO: 28215 - protein, 21 aa, Homo sapiens
CVTDALTGDHCGGDCADFDYW

SEQ ID NO: 28216 - protein, 28 aa, Homo sapiens
CATGVPPPDHYIWGSHRYNHFYYYMDVW

SEQ ID NO: 28217 - protein, 22 aa, Homo sapiens
CAGRGTKIQDYYDSSGSLRDYW

SEQ ID NO: 28218 - protein, 15 aa, Homo sapiens
CARGVDSSGWYGGYW

SEQ ID NO: 28219 - protein, 18 aa, Homo sapiens
CARDHGGSNYYYYGMDVW

SEQ ID NO: 28220 - protein, 16 aa, Homo sapiens
CARRGDTAMDDAFDIW

SEQ ID NO: 28221 - protein, 16 aa, Homo sapiens
CARDRLGYSYAVFDNW

SEQ ID NO: 28222 - protein, 22 aa, Homo sapiens
CARLYDSTGYYYHYYNHYMDVW

SEQ ID NO: 28223 - protein, 13 aa, Homo sapiens
CAREAPGHAFDIW

SEQ ID NO: 28224 - protein, 20 aa, Homo sapiens
CARDGRNIYSSGFYYYVDVW

SEQ ID NO: 28225 - protein, 19 aa, Homo sapiens
CARDESGGCSHCPYYFVYW

SEQ ID NO: 28226 - protein, 17 aa, Homo sapiens
CAKVSRSWYDEDAFDIW

SEQ ID NO: 28227 - protein, 18 aa, Homo sapiens
CTTFDSSGYYHEYYFDYW

SEQ ID NO: 28228 - protein, 23 aa, Homo sapiens
CLRPVLRGYYDSSVQKADWFDPW

SEQ ID NO: 28229 - protein, 24 aa, Homo sapiens
CAKDFGYCSGGWCYPIDSYYFDYW

SEQ ID NO: 28230 - protein, 16 aa, Homo sapiens
CTTARHLVSGDRFDPW

SEQ ID NO: 28231 - protein, 19 aa, Homo sapiens
CAKGRPMIVVVTPGPFDYW

SEQ ID NO: 28232 - protein, 17 aa, Homo sapiens
CARDLYSSSAPRIFDYW

SEQ ID NO: 28233 - protein, 29 aa, Homo sapiens
CARILESQYGLYDFWSGPGQYYYYGMDVW

SEQ ID NO: 28234 - protein, 13 aa, Homo sapiens
CAKRDSQYYCDYW

SEQ ID NO: 28235 - protein, 21 aa, Homo sapiens
CAREGTYYYDSSAEPGWFDPW

SEQ ID NO: 28236 - protein, 22 aa, Homo sapiens
CAKDIWDGYNLVGYYYYGMDVW

SEQ ID NO: 28237 - protein, 13 aa, Homo sapiens
CQTYDSNNRRVIF

SEQ ID NO: 28238 - protein, 14 aa, Homo sapiens
CARDVPVEEAFDIW

SEQ ID NO: 28239 - protein, 20 aa, Homo sapiens
CARLPQPAVVLPAPYYFDYW

SEQ ID NO: 28240 - protein, 13 aa, Homo sapiens
CAAWDNGLSGLAF

SEQ ID NO: 28241 - protein, 12 aa, Homo sapiens
CQQFDSVPLHTF

SEQ ID NO: 28242 - protein, 17 aa, Homo sapiens
CARDVSDWGWGHWFDPW

SEQ ID NO: 28243 - protein, 22 aa, Homo sapiens
CARAAMYYYDSSGYYTYSFDPW

SEQ ID NO: 28244 - protein, 23 aa, Homo sapiens
CARDNFSHHFLTAYYFDDAFDFW

SEQ ID NO: 28245 - protein, 15 aa, Homo sapiens
CFSTDSSGHHRRGLF

SEQ ID NO: 28246 - protein, 26 aa, Homo sapiens
CARGYHYYDSSGYYPIYYYYYGMDVW

SEQ ID NO: 28247 - protein, 15 aa, Homo sapiens
CASGSPAIRDGFHIW

SEQ ID NO: 28248 - protein, 25 aa, Homo sapiens
CARDVYRGDYVWGSYRFSGSWFDPW

SEQ ID NO: 28249 - protein, 21 aa, Homo sapiens
CARQDLVLEELSSSLNWFGPW

SEQ ID NO: 28250 - protein, 17 aa, Homo sapiens
CANHDCSGGSCFPLDYW

SEQ ID NO: 28251 - protein, 14 aa, Homo sapiens
CARGNSFGRSFDFW

SEQ ID NO: 28252 - protein, 15 aa, Homo sapiens
CARGRYTYGYYFDYW

SEQ ID NO: 28253 - protein, 21 aa, Homo sapiens
CAGGYCSGGSCYRGANWFDHW

SEQ ID NO: 28254 - protein, 21 aa, Homo sapiens
CAKDLWELPPAVYYYYGMDVW

SEQ ID NO: 28255 - protein, 16 aa, Homo sapiens
CARLSAGVVVAAIDYW

SEQ ID NO: 28256 - protein, 22 aa, Homo sapiens
CAKLPDMYYYDSSGYYNNFDYW

SEQ ID NO: 28257 - protein, 16 aa, Homo sapiens
CARGGHTVVGSYFDYW

SEQ ID NO: 28258 - protein, 14 aa, Homo sapiens
CQNYNSAPPDGYTF

SEQ ID NO: 28259 - protein, 16 aa, Homo sapiens
CATFAPDITGTTFDYW

SEQ ID NO: 28260 - protein, 18 aa, Homo sapiens
CAKAGYSSGWKQYYFDYW

SEQ ID NO: 28261 - protein, 19 aa, Homo sapiens
CAKGQPGRYSGSYYPFDYW

SEQ ID NO: 28262 - protein, 21 aa, Homo sapiens
CARKGYDSSGYYPFYWYFDLW

SEQ ID NO: 28263 - protein, 18 aa, Homo sapiens
CARDQNLEHGDHPPFDYW

SEQ ID NO: 28264 - protein, 18 aa, Homo sapiens
CTTDQFSMTKMTFPFDYW

SEQ ID NO: 28265 - protein, 25 aa, Homo sapiens
CARAQSTYYYDGSGYSYVVDAFDVW

SEQ ID NO: 28266 - protein, 15 aa, Homo sapiens
CVKGITLFPVVTDYW

SEQ ID NO: 28267 - protein, 14 aa, Homo sapiens
CMQATQFPKNQVTF

SEQ ID NO: 28268 - protein, 19 aa, Homo sapiens
CARVDYGDHPNSPGHIDYW

SEQ ID NO: 28269 - protein, 12 aa, Homo sapiens
CSSGSYSPFDYW

SEQ ID NO: 28270 - protein, 16 aa, Homo sapiens
CARARGLITASWFDPW

SEQ ID NO: 28271 - protein, 17 aa, Homo sapiens
CTRRGRGDSHIFAFDPW

SEQ ID NO: 28272 - protein, 14 aa, Homo sapiens
CTRVRGSYLHSDYW

SEQ ID NO: 28273 - protein, 22 aa, Homo sapiens
CARGPLLFTIFGVVIDWYFDYW

SEQ ID NO: 28274 - protein, 16 aa, Homo sapiens
CARLRRTSLLAYFDYW

SEQ ID NO: 28275 - protein, 21 aa, Homo sapiens
CARQGGSAAAGIHYYYYMDVW

SEQ ID NO: 28276 - protein, 28 aa, Homo sapiens
CSLRASDTAMYFCARRGGSPKYDAFDIW

SEQ ID NO: 28277 - protein, 14 aa, Homo sapiens
CARVSGGTGWCDYW

SEQ ID NO: 28278 - protein, 24 aa, Homo sapiens
CAKSRGAIFGVVMDAYYYYGMDVW

SEQ ID NO: 28279 - protein, 14 aa, Homo sapiens
CAKPHLARHAFDVW

SEQ ID NO: 28280 - protein, 17 aa, Homo sapiens
CAGASSFNYNYRGFDFW

SEQ ID NO: 28281 - protein, 20 aa, Homo sapiens
CAKDGDYGGNSRLSGNFDFW

SEQ ID NO: 28282 - protein, 17 aa, Homo sapiens
CAKDMGSGSYYADFEYW

SEQ ID NO: 28283 - protein, 21 aa, Homo sapiens
CARDLRVRFLEWLSGNWFDPW

SEQ ID NO: 28284 - protein, 16 aa, Homo sapiens
CQSYDRSLSGSKDVVF

SEQ ID NO: 28285 - protein, 15 aa, Homo sapiens
CARDSFSSGFAFDYW

SEQ ID NO: 28286 - protein, 18 aa, Homo sapiens
CASIGWLRGSENNWFDPW

SEQ ID NO: 28287 - protein, 22 aa, Homo sapiens
CASLKYYYDSSGYSTNDAFDIW

SEQ ID NO: 28288 - protein, 23 aa, Homo sapiens
CARHQEDSSSWYQSHARTILDYW

SEQ ID NO: 28289 - protein, 12 aa, Homo sapiens
CATVLGYFFDDW

SEQ ID NO: 28290 - protein, 18 aa, Homo sapiens
CARLFCNSTSCYVYFDHW

SEQ ID NO: 28291 - protein, 19 aa, Homo sapiens
CARDTYTMVRDAPLGFDPW

SEQ ID NO: 28292 - protein, 25 aa, Homo sapiens
CARFHSVRGPSVTYSEIHYWYFDLW

SEQ ID NO: 28293 - protein, 15 aa, Homo sapiens
CARHDGRGNDYNEYW

SEQ ID NO: 28294 - protein, 20 aa, Homo sapiens
CRYYRHTSDSPLSGESFDYW

SEQ ID NO: 28295 - protein, 23 aa, Homo sapiens
CTKSALQLKLQPDVYYYYYMDVW

SEQ ID NO: 28296 - protein, 25 aa, Homo sapiens
CARHQPDPVSAAYSYGHYYYYMDVW

SEQ ID NO: 28297 - protein, 17 aa, Homo sapiens
CTTRLRRASSGEIFDYW

SEQ ID NO: 28298 - protein, 11 aa, Homo sapiens
CQAWHTSTALF

SEQ ID NO: 28299 - protein, 16 aa, Homo sapiens
CAREGLWESSSYVDYW

SEQ ID NO: 28300 - protein, 19 aa, Homo sapiens
CASDSSSAKKPPIYYFDYW

SEQ ID NO: 28301 - protein, 17 aa, Homo sapiens
CARQRRDGYSYYYMDVW

SEQ ID NO: 28302 - protein, 20 aa, Homo sapiens
CARDRIVPHGGSYLYYFDYW

SEQ ID NO: 28303 - protein, 21 aa, Homo sapiens
CAKDGRPISGDPYYYYGMDIW

SEQ ID NO: 28304 - protein, 17 aa, Homo sapiens
CVKMEWVLLKKNYFDHW

SEQ ID NO: 28305 - protein, 22 aa, Homo sapiens
CAKEGPTYCGGDCYTSNYLDYW

SEQ ID NO: 28306 - protein, 19 aa, Homo sapiens
CAKPMYSSSWSPAEYFQHW

SEQ ID NO: 28307 - protein, 17 aa, Homo sapiens
CARLGLNYYVRSGYFYW

SEQ ID NO: 28308 - protein, 22 aa, Homo sapiens
CARVDRTYDGFWGGRGNDFDYW

SEQ ID NO: 28309 - protein, 19 aa, Homo sapiens
CARYEGEEMATITYYFDYW

SEQ ID NO: 28310 - protein, 14 aa, Homo sapiens
CAKDWGGGTYSDYW

SEQ ID NO: 28311 - protein, 16 aa, Homo sapiens
CARKGPNSTSWPIDYW

SEQ ID NO: 28312 - protein, 20 aa, Homo sapiens
CVQGALRFLETKDVNWLASW

SEQ ID NO: 28313 - protein, 16 aa, Homo sapiens
CARDRGGDYSNLFDCW

SEQ ID NO: 28314 - protein, 17 aa, Homo sapiens
CARGMGGWYASDGFDIW

SEQ ID NO: 28315 - protein, 13 aa, Homo sapiens
CASFTTGTPRDYW

SEQ ID NO: 28316 - protein, 20 aa, Homo sapiens
CAKDITTWWLPRYYYGMDVW

SEQ ID NO: 28317 - protein, 24 aa, Homo sapiens
CARDQGWSTVEIKESYYYYYMDVW

SEQ ID NO: 28318 - protein, 14 aa, Homo sapiens
CARAYGAPLTFDYW

SEQ ID NO: 28319 - protein, 27 aa, Homo sapiens
CAKDQGGGAAAGTRRMGSYYYYGMDVW

SEQ ID NO: 28320 - protein, 15 aa, Homo sapiens
CARDRQWRVTNYDYW

SEQ ID NO: 28321 - protein, 25 aa, Homo sapiens
CARVEFSYGYVGETNLDYYYGMDVW

SEQ ID NO: 28322 - protein, 21 aa, Homo sapiens
CARFRRPVDAATIAVGWFDPW

SEQ ID NO: 28323 - protein, 14 aa, Homo sapiens
CARENYDSSGTDYW

SEQ ID NO: 28324 - protein, 19 aa, Homo sapiens
CARKTTVTTGPAAKGLDYW

SEQ ID NO: 28325 - protein, 19 aa, Homo sapiens
CARDTPVYSSLPYNWFDPW

SEQ ID NO: 28326 - protein, 22 aa, Homo sapiens
CARELTDGGSNWYPGWGWFDPW

SEQ ID NO: 28327 - protein, 25 aa, Homo sapiens
CAKGNDYSNFFLLLGQQKNHYFDYW

SEQ ID NO: 28328 - protein, 18 aa, Homo sapiens
CARDNMDTHYYDSRFDYW

SEQ ID NO: 28329 - protein, 21 aa, Homo sapiens
CANLGYGDYPEFRYSYYMDVW

SEQ ID NO: 28330 - protein, 17 aa, Homo sapiens
CAKLPISGIEGDVTDYW

SEQ ID NO: 28331 - protein, 22 aa, Homo sapiens
CARTGRGTYDYYDSSAYYGDYW

SEQ ID NO: 28332 - protein, 19 aa, Homo sapiens
CARTAGGYFRIQGKRIDYW

SEQ ID NO: 28333 - protein, 20 aa, Homo sapiens
CALNLGYRFNLRYGTIEDYW

SEQ ID NO: 28334 - protein, 24 aa, Homo sapiens
CARSGVGQGYASGNFYYYYGMDVW

SEQ ID NO: 28335 - protein, 23 aa, Homo sapiens
CAKDPVGLVVVTAKDSAHAFDIW

SEQ ID NO: 28336 - protein, 19 aa, Homo sapiens
CAKLAQGQWLGAGANFDYW

SEQ ID NO: 28337 - protein, 16 aa, Homo sapiens
CARGDQRWLQSLVDYW

SEQ ID NO: 28338 - protein, 20 aa, Homo sapiens
CARTLHPIYDSSGYYYFGYW

SEQ ID NO: 28339 - protein, 19 aa, Homo sapiens
CARGTGDFWSGYPHFFDYW

SEQ ID NO: 28340 - protein, 15 aa, Homo sapiens
CARYPFARGDHFDFW

SEQ ID NO: 28341 - protein, 20 aa, Homo sapiens
CATSPGRTYSWRDIYYFNYW

SEQ ID NO: 28342 - protein, 23 aa, Homo sapiens
CVRYGYCSSPSCYQYYYYGMDVW

SEQ ID NO: 28343 - protein, 17 aa, Homo sapiens
CAKALKQWLAPYYFDYW

SEQ ID NO: 28344 - protein, 19 aa, Homo sapiens
CARHGASSGYFASDAFDIW

SEQ ID NO: 28345 - protein, 21 aa, Homo sapiens
CARRIGKWLRIQGSRYYFDYW

SEQ ID NO: 28346 - protein, 15 aa, Homo sapiens
CVHKADWDPVAFDYW

SEQ ID NO: 28347 - protein, 20 aa, Homo sapiens
CAREWWELMRAYYDYGMDVW

SEQ ID NO: 28348 - protein, 28 aa, Homo sapiens
CARESPLTPHRPHYYGSEYYYYYGMDVW

SEQ ID NO: 28349 - protein, 16 aa, Homo sapiens
CARVAIEYSSPYFDYW

SEQ ID NO: 28350 - protein, 20 aa, Homo sapiens
CAKDTSITMVRGVGGYFDYW

SEQ ID NO: 28351 - protein, 21 aa, Homo sapiens
CAKDGMITIFGVVIMGYFDYW

SEQ ID NO: 28352 - protein, 23 aa, Homo sapiens
CARGSRKGEWFGELLPYYYFDYW

SEQ ID NO: 28353 - protein, 23 aa, Homo sapiens
CARDEVRPNTDFWSGYSSYFDYW

SEQ ID NO: 28354 - protein, 20 aa, Homo sapiens
CARERIYYDVSGYPTQFDFW

SEQ ID NO: 28355 - protein, 21 aa, Homo sapiens
CARGPPGGRFLDWLIRWFDPW

SEQ ID NO: 28356 - protein, 19 aa, Homo sapiens
CASDSGSSAYDSTGLFDYW

SEQ ID NO: 28357 - protein, 26 aa, Homo sapiens
CARHVPPVFLWLGEPGPVRDYYMDVW

SEQ ID NO: 28358 - protein, 17 aa, Homo sapiens
CARGIMFRGVSGLFDYW

SEQ ID NO: 28359 - protein, 14 aa, Homo sapiens
CASLGDSSWNFDYW

SEQ ID NO: 28360 - protein, 16 aa, Homo sapiens
CVSNLVGATQPSPDYW

SEQ ID NO: 28361 - protein, 23 aa, Homo sapiens
CAKDGEDRIQLGALSYYYGMDVW

SEQ ID NO: 28362 - protein, 15 aa, Homo sapiens
CARAGFFGEFILDYW

SEQ ID NO: 28363 - protein, 20 aa, Homo sapiens
CARPLTSGWYFGGGTAFDIW

SEQ ID NO: 28364 - protein, 20 aa, Homo sapiens
CARGRAGKNAQPYYYYMDVW

SEQ ID NO: 28365 - protein, 18 aa, Homo sapiens
CVKGVRGVLSANHYFDYW

SEQ ID NO: 28366 - protein, 25 aa, Homo sapiens
CASPTKRGYYYDSSGYLKDDAFDIW

SEQ ID NO: 28367 - protein, 20 aa, Homo sapiens
CARKPWELLGTHPVRYFDFW

SEQ ID NO: 28368 - protein, 15 aa, Homo sapiens
CAKDSYDFWSGEDYW

SEQ ID NO: 28369 - protein, 17 aa, Homo sapiens
CAKDREAGAMSLELDYW

SEQ ID NO: 28370 - protein, 20 aa, Homo sapiens
CAREMRYSGYDDYYYGMDVW

SEQ ID NO: 28371 - protein, 14 aa, Homo sapiens
CARGDGYSDYGDYW

SEQ ID NO: 28372 - protein, 16 aa, Homo sapiens
CADSHSGGPPYYFDYW

SEQ ID NO: 28373 - protein, 18 aa, Homo sapiens
CARDPRSSSMGLDTFDIW

SEQ ID NO: 28374 - protein, 20 aa, Homo sapiens
CARDRAESSGNWGNYYFDPW

SEQ ID NO: 28375 - protein, 20 aa, Homo sapiens
CAKHGNLGDQIYNYYGMDVW

SEQ ID NO: 28376 - protein, 24 aa, Homo sapiens
CARDRDVYYDSSGYPIFGDAFDIW

SEQ ID NO: 28377 - protein, 23 aa, Homo sapiens
CARGLSYYDYIWGNFRPGDFDHW

SEQ ID NO: 28378 - protein, 15 aa, Homo sapiens
CAKDRGGDKAALDYW

SEQ ID NO: 28379 - protein, 18 aa, Homo sapiens
CSGGSCYSPDYYYGMDVW

SEQ ID NO: 28380 - protein, 18 aa, Homo sapiens
CATRGYSSGWYRAEGDYW

SEQ ID NO: 28381 - protein, 12 aa, Homo sapiens
CGRENIDWIDPW

SEQ ID NO: 28382 - protein, 20 aa, Homo sapiens
CARENYYDSSGYYYDHFDYW

SEQ ID NO: 28383 - protein, 17 aa, Homo sapiens
CVKDQDYDFWTGYYLYW

SEQ ID NO: 28384 - protein, 16 aa, Homo sapiens
CARDGYYDRTALPDYW

SEQ ID NO: 28385 - protein, 19 aa, Homo sapiens
CVKDRDGVWIGGWRHFDHW

SEQ ID NO: 28386 - protein, 26 aa, Homo sapiens
CAKDPSYYGPGSRTNDDYYYSAMDVW

SEQ ID NO: 28387 - protein, 19 aa, Homo sapiens
CARSGPVGATELGDYFDYW

SEQ ID NO: 28388 - protein, 18 aa, Homo sapiens
CAKESQWLVQWYNWFDPW

SEQ ID NO: 28389 - protein, 15 aa, Homo sapiens
CARLMRDASGSSDYW

SEQ ID NO: 28390 - protein, 19 aa, Homo sapiens
CARDSPVRFTVTTGYFDYW

SEQ ID NO: 28391 - protein, 23 aa, Homo sapiens
CAKDRGSTIFGVDNYYYYGMDVW

SEQ ID NO: 28392 - protein, 26 aa, Homo sapiens
CTTDGSLTNIDHIVSPHYYYYGMDVW

SEQ ID NO: 28393 - protein, 11 aa, Homo sapiens
CMQYTHIPYSF

SEQ ID NO: 28394 - protein, 21 aa, Homo sapiens
CARLGPHDFWSGYYISYFDFW

SEQ ID NO: 28395 - protein, 18 aa, Homo sapiens
CARDRGFYYDSSLHFDYW

SEQ ID NO: 28396 - protein, 21 aa, Homo sapiens
CAKELNTFFLTGSTSDAFDIW

SEQ ID NO: 28397 - protein, 15 aa, Homo sapiens
CAKTTVISLNTYDYW

SEQ ID NO: 28398 - protein, 11 aa, Homo sapiens
CQQRNHWPRGF

SEQ ID NO: 28399 - protein, 22 aa, Homo sapiens
CATTTIFGAVNFYLYYYFMDVW

SEQ ID NO: 28400 - protein, 21 aa, Homo sapiens
CAKDLLSHYFDSSGYYSPDYW

SEQ ID NO: 28401 - protein, 13 aa, Homo sapiens
CAKIAAAGTFDYW

SEQ ID NO: 28402 - protein, 24 aa, Homo sapiens
CARTLGYCTNGVCPQPRGWYFDLW

SEQ ID NO: 28403 - protein, 23 aa, Homo sapiens
CARRYCRGGSCHYHPNFDASDIW

SEQ ID NO: 28404 - protein, 22 aa, Homo sapiens
CARDCPWDTAMEYYYYYYMDVW

SEQ ID NO: 28405 - protein, 20 aa, Homo sapiens
CASTRWLQRLGYYYYYMDVW

SEQ ID NO: 28406 - protein, 16 aa, Homo sapiens
CARGLVVVTANPFDYW

SEQ ID NO: 28407 - protein, 24 aa, Homo sapiens
CARAKKWVGSFWSGSAEGDVFDIW

SEQ ID NO: 28408 - protein, 16 aa, Homo sapiens
CARRDSGSYNGWFDTW

SEQ ID NO: 28409 - protein, 18 aa, Homo sapiens
CAKDRVEGGSGWYWFDPW

SEQ ID NO: 28410 - protein, 17 aa, Homo sapiens
CAKDVSSVARTYYMDVW

SEQ ID NO: 28411 - protein, 19 aa, Homo sapiens
CARGGNYDLLIGSPGFDFW

SEQ ID NO: 28412 - protein, 23 aa, Homo sapiens
CARDRLLTKYYDRSDGRNWFDPW

SEQ ID NO: 28413 - protein, 16 aa, Homo sapiens
CATSAAILRGYWFDPW

SEQ ID NO: 28414 - protein, 21 aa, Homo sapiens
CARVRFRDGYNYYYYYDMDVW

SEQ ID NO: 28415 - protein, 14 aa, Homo sapiens [sequence omitted]

SEQ ID NO: 28416 - protein, 22 aa, Homo sapiens
CSRDRSEDDYSNYSPDYYFDYW

SEQ ID NO: 28417 - protein, 20 aa, Homo sapiens
CARSPLPFSSYNYHHYMDVW

SEQ ID NO: 28418 - protein, 16 aa, Homo sapiens
CARYPTFGVGATKDYW

SEQ ID NO: 28419 - protein, 19 aa, Homo sapiens
CARDARIQLWFEGYWFDPW

SEQ ID NO: 28420 - protein, 18 aa, Homo sapiens
CVKGSLASGGRGYYFEKW

SEQ ID NO: 28421 - protein, 23 aa, Homo sapiens
CARDKGSEDESSGHYANDAFDIW

SEQ ID NO: 28422 - protein, 17 aa, Homo sapiens
CASLRSRFLEWFYFDYW

SEQ ID NO: 28423 - protein, 14 aa, Homo sapiens
CAKAHNYGNTFDYW

SEQ ID NO: 28424 - protein, 16 aa, Homo sapiens
CAREVGAIGGDAFDIW

SEQ ID NO: 28425 - protein, 19 aa, Homo sapiens
CARDAAPDHGGNFLPFDYW

SEQ ID NO: 28426 - protein, 20 aa, Homo sapiens
CARDGRLGYDFWSGYYGDSW

SEQ ID NO: 28427 - protein, 17 aa, Homo sapiens
CARHPPRSTAGYAFDIW

SEQ ID NO: 28428 - protein, 15 aa, Homo sapiens
CQSLDSSGSYLRLVF

SEQ ID NO: 28429 - protein, 17 aa, Homo sapiens
CAKAHILGATGGYFDHW

SEQ ID NO: 28430 - protein, 16 aa, Homo sapiens
CAKDIGVAGPYYFDSW

SEQ ID NO: 28431 - protein, 15 aa, Homo sapiens
CAAWDDNLNGLSYVF

SEQ ID NO: 28432 - protein, 16 aa, Homo sapiens
CARRGWGALGYYFDYW

SEQ ID NO: 28433 - protein, 19 aa, Homo sapiens
CASTLLYYYDSSGYPLDYW

SEQ ID NO: 28434 - protein, 14 aa, Homo sapiens
CRIIEGGSGAFDIW

SEQ ID NO: 28435 - protein, 19 aa, Homo sapiens
CARDRHPGIVAPGDALAVW

SEQ ID NO: 28436 - protein, 15 aa, Homo sapiens
CARLNWEPYYYMDVW

SEQ ID NO: 28437 - protein, 24 aa, Homo sapiens
CAKDRGSSWYGGLSGYYYYGMDVW

SEQ ID NO: 28438 - protein, 20 aa, Homo sapiens
CARAHYSGSGSYYSRAFDIW

SEQ ID NO: 28439 - protein, 17 aa, Homo sapiens
CARANSWWVVVAAFDYW

SEQ ID NO: 28440 - protein, 25 aa, Homo sapiens
CARAGGYCSSTSCLLPYYYYGLDVW

SEQ ID NO: 28441 - protein, 17 aa, Homo sapiens
CARDQSGRYYSNYFDYW

SEQ ID NO: 28442 - protein, 12 aa, Homo sapiens
CAITAGDNFDSW

SEQ ID NO: 28443 - protein, 17 aa, Homo sapiens
CARLRIAVAHPNYFDYW

SEQ ID NO: 28444 - protein, 21 aa, Homo sapiens
CARDMTTVTTYSDYYYGMDVW

SEQ ID NO: 28445 - protein, 12 aa, Homo sapiens [sequence omitted]

SEQ ID NO: 28446 - protein, 12 aa, Homo sapiens
CAREFGQGEDYW

SEQ ID NO: 28447 - protein, 17 aa, Homo sapiens
CAKGETSNSLGGYFDFW

SEQ ID NO: 28448 - protein, 17 aa, Homo sapiens
CARDFDYTNSQIVGDYW

SEQ ID NO: 28449 - protein, 15 aa, Homo sapiens
CARAPWGYGDYFDYW

SEQ ID NO: 28450 - protein, 18 aa, Homo sapiens
CASHRWSEPDRSSSLDYW

SEQ ID NO: 28451 - protein, 18 aa, Homo sapiens
CAKDILTGDYYVGFFDSW

SEQ ID NO: 28452 - protein, 15 aa, Homo sapiens
CARHRLYNWNYVHYW

SEQ ID NO: 28453 - protein, 17 aa, Homo sapiens
CARHGPLWEPIFYFDDW

SEQ ID NO: 28454 - protein, 17 aa, Homo sapiens
CTTDSASGSYNDAFDIW

SEQ ID NO: 28455 - protein, 20 aa, Homo sapiens
CVHSVPYYEYIWGSYYFDYW

SEQ ID NO: 28456 - protein, 17 aa, Homo sapiens
CARVTGIEGVTGWLDPW

SEQ ID NO: 28457 - protein, 18 aa, Homo sapiens
CTRRLHYYYDTGDAFDIW

SEQ ID NO: 28458 - protein, 19 aa, Homo sapiens
CARDRLNYDFWSGYLLDYW

SEQ ID NO: 28459 - protein, 20 aa, Homo sapiens
CAKPVGAVLGFYYYYDMDVW

SEQ ID NO: 28460 - protein, 18 aa, Homo sapiens
CASSRFLEWLLFGAIDYW

SEQ ID NO: 28461 - protein, 26 aa, Homo sapiens
CAIFTVHYYDSSGYYKEAYYYGMDVW

SEQ ID NO: 28462 - protein, 14 aa, Homo sapiens
CARVLGTWTQFDFW

SEQ ID NO: 28463 - protein, 18 aa, Homo sapiens
CARGRATMIIVINDFDSW

SEQ ID NO: 28464 - protein, 14 aa, Homo sapiens
CARADYGVHWFASW

SEQ ID NO: 28465 - protein, 24 aa, Homo sapiens
CAREKGGYSSGATCYEDRGSFDTW

SEQ ID NO: 28466 - protein, 26 aa, Homo sapiens
CAKGLQGVPGKAHDFWTGPSGLLDYW

SEQ ID NO: 28467 - protein, 17 aa, Homo sapiens
CARDPTPKWELLLFDYW

SEQ ID NO: 28468 - protein, 20 aa, Homo sapiens
CARGDTMVRGVIPLLYFDYW

SEQ ID NO: 28469 - protein, 16 aa, Homo sapiens
CAKGATVTTPMPFDYW

SEQ ID NO: 28470 - protein, 23 aa, Homo sapiens
CARDSDSSGWTPFGDYYYYMDVW

SEQ ID NO: 28471 - protein, 15 aa, Homo sapiens
CNSRDSSGDYLGVVF

SEQ ID NO: 28472 - protein, 17 aa, Homo sapiens
CARAPIFGVVITNFDYW

SEQ ID NO: 28473 - protein, 14 aa, Homo sapiens
CATSSLWLVPGDYW

SEQ ID NO: 28474 - protein, 21 aa, Homo sapiens
CAHILLAAQHLFYYYYYMDVW

SEQ ID NO: 28475 - protein, 16 aa, Homo sapiens
CARPRFSSTWYPFDYW

SEQ ID NO: 28476 - protein, 17 aa, Homo sapiens
CAKDDSEWELLLYFDYW

SEQ ID NO: 28477 - protein, 20 aa, Homo sapiens
CAKEERSSGWSYYYYGMDVW

SEQ ID NO: 28478 - protein, 16 aa, Homo sapiens
CAREPWGIASNWFDPW

SEQ ID NO: 28479 - protein, 14 aa, Homo sapiens
CVRVQGRRVGFDYW

SEQ ID NO: 28480 - protein, 11 aa, Homo sapiens
CQQYNRYCQGF

SEQ ID NO: 28481 - protein, 20 aa, Homo sapiens
CAQRAYYGFWRGYSDAFDPW

SEQ ID NO: 28482 - protein, 17 aa, Homo sapiens
CVHRRVTVVVYDAFDVW

SEQ ID NO: 28483 - protein, 16 aa, Homo sapiens
CARVGGGDFENWFDPW

SEQ ID NO: 28484 - protein, 23 aa, Homo sapiens
CTRDRRLAYYKSGWYGQDVFDIW

SEQ ID NO: 28485 - protein, 13 aa, Homo sapiens
CTTEGHPPGLDYW

SEQ ID NO: 28486 - protein, 21 aa, Homo sapiens
CARDPTDYDDYERGLKWFDPW

SEQ ID NO: 28487 - protein, 23 aa, Homo sapiens
CARDRPTRAYSYGDSGPYYFDYW

SEQ ID NO: 28488 - protein, 19 aa, Homo sapiens
CAKESTRYFDWLLGTFDYW

SEQ ID NO: 28489 - protein, 17 aa, Homo sapiens
CASTDCKDGSCYRFDYW

SEQ ID NO: 28490 - protein, 27 aa, Homo sapiens
CAKDAPPHCSSTSCPWTSLWSNWFDPW

SEQ ID NO: 28491 - protein, 19 aa, Homo sapiens
CVRDWGLVRTTPDDAFDSW

SEQ ID NO: 28492 - protein, 16 aa, Homo sapiens
CAAASKSSGSYPFDYW

SEQ ID NO: 28493 - protein, 25 aa, Homo sapiens
CARDKEASYYDYVWGSYRYNWFDPW

SEQ ID NO: 28494 - protein, 24 aa, Homo sapiens
CTRDVTTPWELLPGNYFYYYMDVW

SEQ ID NO: 28495 - protein, 17 aa, Homo sapiens
CTTIRYFDWLLFGHDYW

SEQ ID NO: 28496 - protein, 17 aa, Homo sapiens
CARHVLHWDYPLYFDFW

SEQ ID NO: 28497 - protein, 14 aa, Homo sapiens
CARYSYYDFNFDYW

SEQ ID NO: 28498 - protein, 18 aa, Homo sapiens
CARDDLIGGGGRNWFDPW

SEQ ID NO: 28499 - protein, 18 aa, Homo sapiens
CARTPTDGGYFSGAFDYW

SEQ ID NO: 28500 - protein, 14 aa, Homo sapiens
CARLGGESYWFDPW

SEQ ID NO: 28501 - protein, 14 aa, Homo sapiens
CARAWIRGSAFDIW

SEQ ID NO: 28502 - protein, 19 aa, Homo sapiens
CAREGVMSLERLPNWFDPW

SEQ ID NO: 28503 - protein, 12 aa, Homo sapiens
CAREIGTLFDLW

SEQ ID NO: 28504 - protein, 18 aa, Homo sapiens
CARWFTGGLSSYWYFDLW

SEQ ID NO: 28505 - protein, 16 aa, Homo sapiens
CARGWVRWGARYFDLW

SEQ ID NO: 28506 - protein, 25 aa, Homo sapiens
CASLSVGRITMVRGDLYYYYGMDVW

SEQ ID NO: 28507 - protein, 22 aa, Homo sapiens
CAKVGKSGAYSVGYYYYGMDAW

SEQ ID NO: 28508 - protein, 17 aa, Homo sapiens
CARHLDSYVARGHFDPW

SEQ ID NO: 28509 - protein, 16 aa, Homo sapiens
CASNRYLWGPRAFDIW

SEQ ID NO: 28510 - protein, 23 aa, Homo sapiens
CARTRPRWGDLQWTFGDHYFDYW

SEQ ID NO: 28511 - protein, 15 aa, Homo sapiens
CARRGSSWYSPFEYW

SEQ ID NO: 28512 - protein, 23 aa, Homo sapiens
CAKGRLALYCSSTSCYADLFDYW

SEQ ID NO: 28513 - protein, 23 aa, Homo sapiens
CALPIYFCARRGGSPKYDAFDIW

SEQ ID NO: 28514 - protein, 20 aa, Homo sapiens
CAKDGHSSSWYGDNNWFDPW

SEQ ID NO: 28515 - protein, 13 aa, Homo sapiens
CARGQTPMVLDYW

SEQ ID NO: 28516 - protein, 27 aa, Homo sapiens
CAKGQNYYDSSGYYDKFMGIRGNFDYW

SEQ ID NO: 28517 - protein, 20 aa, Homo sapiens
CARGSRKQLWSRYYYGMDVW

SEQ ID NO: 28518 - protein, 20 aa, Homo sapiens
CARPMATIIAVTGTFYFDFW

SEQ ID NO: 28519 - protein, 16 aa, Homo sapiens
CVKDLDSYDTYNFDYW

SEQ ID NO: 28520 - protein, 11 aa, Homo sapiens
CARGGWYIEYW

SEQ ID NO: 28521 - protein, 18 aa, Homo sapiens
CAKDLDYGNMEGTYFDYW

SEQ ID NO: 28522 - protein, 16 aa, Homo sapiens
CAKDFSIYVYRYFDYW

SEQ ID NO: 28523 - protein, 28 aa, Homo sapiens
CARTRDLEQWLILPSRREPIYYYYMDVW

SEQ ID NO: 28524 - protein, 11 aa, Homo sapiens
CLLHCSGARIF

SEQ ID NO: 28525 - protein, 15 aa, Homo sapiens
CAKADNARGFYFHYW

SEQ ID NO: 28526 - protein, 32 aa, Homo sapiens
CAKDGAKGALYYYGSGSYWVPRDYYYYGMDVW

SEQ ID NO: 28527 - protein, 17 aa, Homo sapiens
CATLHIVGATKGPFDYW

SEQ ID NO: 28528 - protein, 21 aa, Homo sapiens
CARDAGYNRSSGDYYYGMDVW

SEQ ID NO: 28529 - protein, 24 aa, Homo sapiens
CARQTLRYFDWLSAARSPDAFDMW

SEQ ID NO: 28530 - protein, 17 aa, Homo sapiens
CTRYCPTTDCYGGFDFW

SEQ ID NO: 28531 - protein, 13 aa, Homo sapiens
CVIEIRRSWFDPW

SEQ ID NO: 28532 - protein, 20 aa, Homo sapiens
CARDGGYSGIYRGSEYFLTW

SEQ ID NO: 28533 - protein, 19 aa, Homo sapiens
CARDEKTSFSSALYYFDYW

SEQ ID NO: 28534 - protein, 14 aa, Homo sapiens
CAKTRGWLADFDYW

SEQ ID NO: 28535 - protein, 17 aa, Homo sapiens
CAKDIWDGYNADAFDIW

SEQ ID NO: 28536 - protein, 15 aa, Homo sapiens
CACPSLYWNYAFDYW

SEQ ID NO: 28537 - protein, 28 aa, Homo sapiens
CARDMKYYDFWSGYLGPNYYYYYYMDVW

SEQ ID NO: 28538 - protein, 15 aa, Homo sapiens
CARTPPGITVDFDFW

SEQ ID NO: 28539 - protein, 16 aa, Homo sapiens
CARSREVVSYYYMDVW

SEQ ID NO: 28540 - protein, 19 aa, Homo sapiens
CAREGGIRWLQNRVYFDYW

SEQ ID NO: 28541 - protein, 23 aa, Homo sapiens
CARGGVDIVVVPAATYYYGMDVW

SEQ ID NO: 28542 - protein, 18 aa, Homo sapiens
CARGVLTENYEINWFGPW

SEQ ID NO: 28543 - protein, 12 aa, Homo sapiens
CLSADNSGPWVF

SEQ ID NO: 28544 - protein, 17 aa, Homo sapiens
CAAPGQLNYYYYYMDVW

SEQ ID NO: 28545 - protein, 16 aa, Homo sapiens
CARGVLWYSGQRFDPW

SEQ ID NO: 28546 - protein, 15 aa, Homo sapiens
CASQDDYSSSSFDYW

SEQ ID NO: 28547 - protein, 14 aa, Homo sapiens
CARCPLSGSYFVNW

SEQ ID NO: 28548 - protein, 18 aa, Homo sapiens
CATAYYYDSSGTASFDYW

SEQ ID NO: 28549 - protein, 20 aa, Homo sapiens
CARRSRSCSGGDCSYFFDHW

SEQ ID NO: 28550 - protein, 16 aa, Homo sapiens
CATEAAATSTWYMDVW

SEQ ID NO: 28551 - protein, 18 aa, Homo sapiens
CAKDRGAGFLTGYYLEYW

SEQ ID NO: 28552 - protein, 15 aa, Homo sapiens
CARFGRGDRVGFDPW

SEQ ID NO: 28553 - protein, 21 aa, Homo sapiens
CARMPLGYCGTTRCYEVFDYW

SEQ ID NO: 28554 - protein, 19 aa, Homo sapiens
CARRPANYNFWSAYYFDYW

SEQ ID NO: 28555 - protein, 20 aa, Homo sapiens
CATVRPPYYSWNDKDAFQIW

SEQ ID NO: 28556 - protein, 24 aa, Homo sapiens
CAKGMSYYDSSGRLSGTYWYFDLW

SEQ ID NO: 28557 - protein, 13 aa, Homo sapiens
CARDPYDGAFDIW

SEQ ID NO: 28558 - protein, 20 aa, Homo sapiens
CTSRVPSYDSSGYYYHFDYW

SEQ ID NO: 28559 - protein, 16 aa, Homo sapiens
CARLRSGWFEHHFDYW

SEQ ID NO: 28560 - protein, 26 aa, Homo sapiens
CARQESCGGYNSSWCNYYYYYYMDVW

SEQ ID NO: 28561 - protein, 25 aa, Homo sapiens
CARGFGGAVAGILVNYYYYYYMDVW

SEQ ID NO: 28562 - protein, 16 aa, Homo sapiens
CAREGNGDYSYYFDSW

SEQ ID NO: 28563 - protein, 25 aa, Homo sapiens
CAHTPRYYYDSSGYYYLDYYYMDVW

SEQ ID NO: 28564 - protein, 18 aa, Homo sapiens
CASDGIYRSSSLNYFDYW

SEQ ID NO: 28565 - protein, 13 aa, Homo sapiens
CVRVDNMNVDDYW

SEQ ID NO: 28566 - protein, 26 aa, Homo sapiens
CARVPAFTYNSSWDWRGKKTRFVDYW

SEQ ID NO: 28567 - protein, 20 aa, Homo sapiens
CARHRANYYDSSGYDAFDIW

SEQ ID NO: 28568 - protein, 15 aa, Homo sapiens
CAREHILTGYDIDYW

SEQ ID NO: 28569 - protein, 25 aa, Homo sapiens
CARRRGVDPRSRIAATGSYYYFDYW

SEQ ID NO: 28570 - protein, 14 aa, Homo sapiens
CAREVTRNDYFDYW

SEQ ID NO: 28571 - protein, 21 aa, Homo sapiens
CAKVRIAVAHPGYYYYGMDVW

SEQ ID NO: 28572 - protein, 17 aa, Homo sapiens
CARDRLLVGVGWYLDLW

SEQ ID NO: 28573 - protein, 18 aa, Homo sapiens
CAKDRVFGIAAPEYFQHW

SEQ ID NO: 28574 - protein, 21 aa, Homo sapiens
CAKDTQSYGDYDYYYYSMDVW

SEQ ID NO: 28575 - protein, 17 aa, Homo sapiens
CARDPGNWSPDYYFDYW

SEQ ID NO: 28576 - protein, 14 aa, Homo sapiens
CARRRGATFHFDSW

SEQ ID NO: 28577 - protein, 19 aa, Homo sapiens
CARDQVGEMDYYGSGFDPW

SEQ ID NO: 28578 - protein, 16 aa, Homo sapiens
CAKGGGAFLDYWFDSW

SEQ ID NO: 28579 - protein, 19 aa, Homo sapiens
CARVVSRLSTSSYYYMDVW

SEQ ID NO: 28580 - protein, 27 aa, Homo sapiens
CARETGPRAPAIAAAGTVGQEYYFDYW

SEQ ID NO: 28581 - protein, 11 aa, Homo sapiens [sequence omitted]

SEQ ID NO: 28582 - protein, 17 aa, Homo sapiens
CAKAPGGSDNWGFFDSW

SEQ ID NO: 28583 - protein, 16 aa, Homo sapiens
CTKDLTTNRIHFFDCW

SEQ ID NO: 28584 - protein, 16 aa, Homo sapiens
CARGGELERPDEADYW

SEQ ID NO: 28585 - protein, 18 aa, Homo sapiens
CARLPGPPNRLYWYFDLW

SEQ ID NO: 28586 - protein, 16 aa, Homo sapiens
CAHRPDYSSSMIFDYW

SEQ ID NO: 28587 - protein, 15 aa, Homo sapiens
CARDQGGPVDAFDFW

SEQ ID NO: 28588 - protein, 22 aa, Homo sapiens
CARDRLGSHVPSVYYFYYIDVW

SEQ ID NO: 28589 - protein, 23 aa, Homo sapiens
CARDRAPTVYGEYVIIGSALDVW

SEQ ID NO: 28590 - protein, 16 aa, Homo sapiens
CAKCKYTYGLSAFDYW

SEQ ID NO: 28591 - protein, 13 aa, Homo sapiens
CASATETYYMDVW

SEQ ID NO: 28592 - protein, 15 aa, Homo sapiens
CASIIASPDGWIDPW

SEQ ID NO: 28593 - protein, 19 aa, Homo sapiens
CARASTYSGSYSAEYFQHW

SEQ ID NO: 28594 - protein, 17 aa, Homo sapiens
CARITWQWLVRHYFDYW

SEQ ID NO: 28595 - protein, 19 aa, Homo sapiens
CARVSKYTMIVVVTPFDIW

SEQ ID NO: 28596 - protein, 20 aa, Homo sapiens
CAKDMRAVAGGGRHDAFDIW

SEQ ID NO: 28597 - protein, 18 aa, Homo sapiens
CARETATTITTKWYFDLW

SEQ ID NO: 28598 - protein, 13 aa, Homo sapiens
CTWERPEGDFDSW

SEQ ID NO: 28599 - protein, 18 aa, Homo sapiens
CARGGGKNVGGYGIFDYW

SEQ ID NO: 28600 - protein, 17 aa, Homo sapiens
CARDGGDREEIGWFDPW

SEQ ID NO: 28601 - protein, 14 aa, Homo sapiens
CARHRGTTILPDYW

SEQ ID NO: 28602 - protein, 19 aa, Homo sapiens
CAKGPYGEEWLGGNYFDYW

SEQ ID NO: 28603 - protein, 10 aa, Homo sapiens
CQQTYPTPVF

SEQ ID NO: 28604 - protein, 21 aa, Homo sapiens
CATPLQKTSAGIRGLDAFGMW

SEQ ID NO: 28605 - protein, 16 aa, Homo sapiens
CAREGDYGTDSPVDYW

SEQ ID NO: 28606 - protein, 28 aa, Homo sapiens
CARAVGEELWGGRQWLRLPPHVGYFDYW

SEQ ID NO: 28607 - protein, 19 aa, Homo sapiens
CATLPHTTGFYTDYYFDYW

SEQ ID NO: 28608 - protein, 11 aa, Homo sapiens
CLHDYYTPWTF

SEQ ID NO: 28609 - protein, 26 aa, Homo sapiens
CARDGAEEWLQALASHRYYYYGMDVW

SEQ ID NO: 28610 - protein, 15 aa, Homo sapiens
CARSPFRAVAHFDYW

SEQ ID NO: 28611 - protein, 20 aa, Homo sapiens
CARSEVIYVLSPHLGYFDLW

SEQ ID NO: 28612 - protein, 15 aa, Homo sapiens
CAKAYTRTSNWFDPW

SEQ ID NO: 28613 - protein, 19 aa, Homo sapiens
CTRGNDRWDTKHLFYMDVW

SEQ ID NO: 28614 - protein, 16 aa, Homo sapiens
CAKASNYYLPSRFDYW

SEQ ID NO: 28615 - protein, 23 aa, Homo sapiens
CARDRTVSHGELPSFYYYGMDVW

SEQ ID NO: 28616 - protein, 34 aa, Homo sapiens
CALPIWHNLRASDTAMYFCARRGGSPKYDAFDIW

SEQ ID NO: 28617 - protein, 21 aa, Homo sapiens
CARNQNMPLSGGALRPAFDPW

SEQ ID NO: 28618 - protein, 20 aa, Homo sapiens
CAHSLLYYYESSGSPYFDYW

SEQ ID NO: 28619 - protein, 15 aa, Homo sapiens
CARQGATVVNPYDYW

SEQ ID NO: 28620 - protein, 16 aa, Homo sapiens
CAREKTTGSYRSLDYW

SEQ ID NO: 28621 - protein, 22 aa, Homo sapiens
CATQDVTSLFWRPGRFWYFDLW

SEQ ID NO: 28622 - protein, 16 aa, Homo sapiens
CARTIFGVVINPPDYW

SEQ ID NO: 28623 - protein, 16 aa, Homo sapiens
CARRPLKFTGSDFDYW

SEQ ID NO: 28624 - protein, 16 aa, Homo sapiens
CARDGPLELRGYFDYW

SEQ ID NO: 28625 - protein, 18 aa, Homo sapiens
CAKGPHTVTQVGSWFDPW

SEQ ID NO: 28626 - protein, 17 aa, Homo sapiens
CARQDDYGANFYFFDYW

SEQ ID NO: 28627 - protein, 21 aa, Homo sapiens
CARAYCGGDCYSPYYYGMDVW

SEQ ID NO: 28628 - protein, 15 aa, Homo sapiens
CATSKWGWEVYFDYW

SEQ ID NO: 28629 - protein, 21 aa, Homo sapiens
CAKDHGAYYYLIVVDGPFDIW

SEQ ID NO: 28630 - protein, 23 aa, Homo sapiens
CASPIRYCTNGGCYSDHYYFDDW

SEQ ID NO: 28631 - protein, 21 aa, Homo sapiens
CARDRIRIAAAGTSVGAFDIW

SEQ ID NO: 28632 - protein, 19 aa, Homo sapiens
CAKGTYWDIVTGYSNFDSW

SEQ ID NO: 28633 - protein, 16 aa, Homo sapiens
CARVALVGALGFSDYW

SEQ ID NO: 28634 - protein, 20 aa, Homo sapiens
CARVPNYYDSSGYPYYFDYW

SEQ ID NO: 28635 - protein, 17 aa, Homo sapiens
CARWGGGYKYKYGMDVW

SEQ ID NO: 28636 - protein, 16 aa, Homo sapiens
CVKLRDLSTWSAFDIW

SEQ ID NO: 28637 - protein, 18 aa, Homo sapiens
CARGYMGMTGSLGYFDYW

SEQ ID NO: 28638 - protein, 15 aa, Homo sapiens
CARDPVSWQQGFDYW

SEQ ID NO: 28639 - protein, 17 aa, Homo sapiens
CARDLGFVMVGDYFDYW

SEQ ID NO: 28640 - protein, 16 aa, Homo sapiens
CAKKIGPYTWNAGDYW

SEQ ID NO: 28641 - protein, 15 aa, Homo sapiens
CARFNAPYSSFIDYW

SEQ ID NO: 28642 - protein, 24 aa, Homo sapiens
CARSTLPSYFYDSGGYTKGGFDYW

SEQ ID NO: 28643 - protein, 18 aa, Homo sapiens
CARRTEYMSGWIPGFDYW

SEQ ID NO: 28644 - protein, 24 aa, Homo sapiens
CAKDSRRIVGATRSFYYYYGMDVW

SEQ ID NO: 28645 - protein, 18 aa, Homo sapiens
CVREFKSIAAGGMRFDLW

SEQ ID NO: 28646 - protein, 15 aa, Homo sapiens
CAKPYRDGYNPFDYW

SEQ ID NO: 28647 - protein, 17 aa, Homo sapiens
CTRGYCRRDNCYRDDYW

SEQ ID NO: 28648 - protein, 21 aa, Homo sapiens
CARLPITSLELSQGPWFFDSW

SEQ ID NO: 28649 - protein, 25 aa, Homo sapiens
CARDIRDRSSISCYFGYHYYGMDVW

SEQ ID NO: 28650 - protein, 27 aa, Homo sapiens
CARYFRDKMKDYNQYSRYYYFYYMDVW

SEQ ID NO: 28651 - protein, 23 aa, Homo sapiens
CAKDKGVQLERRESYYYYGMDVW

SEQ ID NO: 28652 - protein, 14 aa, Homo sapiens
CTNGRIDFGGFDPW

SEQ ID NO: 28653 - protein, 18 aa, Homo sapiens
CATLTGTTFGYYYGMDVW

SEQ ID NO: 28654 - protein, 17 aa, Homo sapiens
CAHSGIAAAGTVSFDYW

SEQ ID NO: 28655 - protein, 22 aa, Homo sapiens
CAKRLLAYCGGDCYVSDAFDIW

SEQ ID NO: 28656 - protein, 14 aa, Homo sapiens
CARDLTPYGALDYW

SEQ ID NO: 28657 - protein, 20 aa, Homo sapiens
CANIHYGSGNNIQYNWFDPW

SEQ ID NO: 28658 - protein, 16 aa, Homo sapiens
CARLGLELYHYYFDYW

SEQ ID NO: 28659 - protein, 15 aa, Homo sapiens
CARVDLEATLTFDSW

SEQ ID NO: 28660 - protein, 17 aa, Homo sapiens
CAKGLQAMWIKDAFDIW

SEQ ID NO: 28661 - protein, 20 aa, Homo sapiens
CARPPTAGKQLWLLEAFNIW

SEQ ID NO: 28662 - protein, 19 aa, Homo sapiens
CARGRGSGWEEGNWYFDLW

SEQ ID NO: 28663 - protein, 14 aa, Homo sapiens
CYSTDSSDNPEGVF

SEQ ID NO: 28664 - protein, 19 aa, Homo sapiens
CARGRPDSGWELLGALDYW

SEQ ID NO: 28665 - protein, 13 aa, Homo sapiens
CQQRRDWPSVFTF

SEQ ID NO: 28666 - protein, 17 aa, Homo sapiens
CARGGPFTGSYGTFDYW

SEQ ID NO: 28667 - protein, 19 aa, Homo sapiens
CVRDLGSSGYLTYNWFDPW

SEQ ID NO: 28668 - protein, 22 aa, Homo sapiens
CASRYCSIDICFSRSYHYFDLW

SEQ ID NO: 28669 - protein, 15 aa, Homo sapiens
CARERDGYDGFFGYW

SEQ ID NO: 28670 - protein, 26 aa, Homo sapiens
CARDDRIVSKYCVSDCLPGGDAFDFW

SEQ ID NO: 28671 - protein, 24 aa, Homo sapiens
CARATKAWSDSHGQYHYYYGMDVW

SEQ ID NO: 28672 - protein, 13 aa, Homo sapiens
CQKYTSDPPGFTF

SEQ ID NO: 28673 - protein, 15 aa, Homo sapiens
CAKPLIRFLDAFDIW

SEQ ID NO: 28674 - protein, 23 aa, Homo sapiens
CAIHAYRIYTPDSHYYYYGMDVW

SEQ ID NO: 28675 - protein, 17 aa, Homo sapiens
CARGNVEPRRSHALDIW

SEQ ID NO: 28676 - protein, 16 aa, Homo sapiens
CARPPHSSSCHGCDYW

SEQ ID NO: 28677 - protein, 16 aa, Homo sapiens
CASGGGSDYSGYFDYW

SEQ ID NO: 28678 - protein, 21 aa, Homo sapiens
CARSQPYHYYHSGSHRGFDYW

SEQ ID NO: 28679 - protein, 15 aa, Homo sapiens
CARDPRSFRGAFDIW

SEQ ID NO: 28680 - protein, 17 aa, Homo sapiens
CARAPPFVSGTYYIDFW

SEQ ID NO: 28681 - protein, 17 aa, Homo sapiens
CVRDLTTVTAWSYFDFW

SEQ ID NO: 28682 - protein, 15 aa, Homo sapiens
CARVVVLTGYDFDDW

SEQ ID NO: 28683 - protein, 18 aa, Homo sapiens
CAKHGTSSPSPFPLFDPW

SEQ ID NO: 28684 - protein, 15 aa, Homo sapiens
CARDRKLGIGGLDYW

SEQ ID NO: 28685 - protein, 18 aa, Homo sapiens
CTPLLLWFGEGSDGMDVW

SEQ ID NO: 28686 - protein, 21 aa, Homo sapiens
CARWGRGIAAAGTGLNWFDPW

SEQ ID NO: 28687 - protein, 15 aa, Homo sapiens
CARVVSGGRRWFDSW

SEQ ID NO: 28688 - protein, 19 aa, Homo sapiens
CVKMGDRLLSFVYNWFDSW

SEQ ID NO: 28689 - protein, 17 aa, Homo sapiens
CARHLIAEDYYYYMDVW

SEQ ID NO: 28690 - protein, 23 aa, Homo sapiens
CATIEMYSGPDFTSYYYYGMDVW

SEQ ID NO: 28691 - protein, 15 aa, Homo sapiens
CALYGSSGNDIFDVW

SEQ ID NO: 28692 - protein, 18 aa, Homo sapiens
CVKIEQMFLSALSSFDLW

SEQ ID NO: 28693 - protein, 24 aa, Homo sapiens
CARGPRYYYDSSGYYYVLYYFDYW

SEQ ID NO: 28694 - protein, 20 aa, Homo sapiens
CARDQYSAVTIPSSSPFDYW

SEQ ID NO: 28695 - protein, 20 aa, Homo sapiens
CAKDPLLFLDSSGPNWFDPW

SEQ ID NO: 28696 - protein, 17 aa, Homo sapiens
CATSGTFGGVIAPMDYW

SEQ ID NO: 28697 - protein, 18 aa, Homo sapiens
CARAYYSGWTPRGYFDYW

SEQ ID NO: 28698 - protein, 15 aa, Homo sapiens
CARALAGVTTYFDYW

SEQ ID NO: 28699 - protein, 15 aa, Homo sapiens
CARRPGTTGFGVDYW

SEQ ID NO: 28700 - protein, 28 aa, Homo sapiens
CARDRPDILLWLGQLSKDTYYFYYMDVW

SEQ ID NO: 28701 - protein, 19 aa, Homo sapiens
CAKGWYKSWPQLGGYFDYW

SEQ ID NO: 28702 - protein, 21 aa, Homo sapiens
CEANYYDTSGYHNGPANFDYW

SEQ ID NO: 28703 - protein, 25 aa, Homo sapiens
CARDPGVIAARLTPGLYYYYGMDVW

SEQ ID NO: 28704 - protein, 16 aa, Homo sapiens
CARLVDTAMRAYFDLW

SEQ ID NO: 28705 - protein, 17 aa, Homo sapiens
CARGGMYSSGWYYFDYW

SEQ ID NO: 28706 - protein, 12 aa, Homo sapiens
CSRSFNDAFDIW

SEQ ID NO: 28707 - protein, 16 aa, Homo sapiens
CARDDKRSAADHFDLW

SEQ ID NO: 28708 - protein, 25 aa, Homo sapiens
CARGSRVWGTRIVVVPAALSGGDYW

SEQ ID NO: 28709 - protein, 20 aa, Homo sapiens
CAREKHYYDSSGVRWYFDLW

SEQ ID NO: 28710 - protein, 14 aa, Homo sapiens
CARHRFYGDPPDYW

SEQ ID NO: 28711 - protein, 17 aa, Homo sapiens
CARGGYSGNWAYYIDYW

SEQ ID NO: 28712 - protein, 16 aa, Homo sapiens
CARDGGYNDGAPLDYW

SEQ ID NO: 28713 - protein, 23 aa, Homo sapiens
CARDRDYGSGSDYYYYYYGMDVW

SEQ ID NO: 28714 - protein, 19 aa, Homo sapiens
CAKAENYDILSGSHALDVW

SEQ ID NO: 28715 - protein, 13 aa, Homo sapiens
CARFFYSNPFDYW

SEQ ID NO: 28716 - protein, 20 aa, Homo sapiens
CARNLYSSGNYFYYYGMDVW

SEQ ID NO: 28717 - protein, 20 aa, Homo sapiens
CARISGDYSYGSYVYWFDSW

SEQ ID NO: 28718 - protein, 14 aa, Homo sapiens
CAKIMGATTLFDYW

SEQ ID NO: 28719 - protein, 18 aa, Homo sapiens
CARDPSLSGTDHEAFDYW

SEQ ID NO: 28720 - protein, 13 aa, Homo sapiens
CAREYVSAAYDYW

SEQ ID NO: 28721 - protein, 14 aa, Homo sapiens
CARSPPGLLRYFDW

SEQ ID NO: 28722 - protein, 20 aa, Homo sapiens
CASRGYYYDSSGSTLPLDYW

SEQ ID NO: 28723 - protein, 18 aa, Homo sapiens
CAKDPRYGLVQPEYFQHW

SEQ ID NO: 28724 - protein, 17 aa, Homo sapiens
CAKDLDGGKPAGAFDIW

SEQ ID NO: 28725 - protein, 16 aa, Homo sapiens
CARAMKQWPKYNFDHW

SEQ ID NO: 28726 - protein, 17 aa, Homo sapiens
CARRAYCGDDCFPFDYW

SEQ ID NO: 28727 - protein, 21 aa, Homo sapiens
CAKASVVVVAATKLGYYFDFW

SEQ ID NO: 28728 - protein, 20 aa, Homo sapiens
CAKDRAYTSSYYIPKAMDVW

SEQ ID NO: 28729 - protein, 17 aa, Homo sapiens
CARVPMGIHLWYWFDPW

SEQ ID NO: 28730 - protein, 16 aa, Homo sapiens
CAKGLNWKTMYDFQYW

SEQ ID NO: 28731 - protein, 22 aa, Homo sapiens
CAKDEGAWYSASAYYYYGMDVW

SEQ ID NO: 28732 - protein, 18 aa, Homo sapiens
CAKDEEEIAGAGYYFDSW

SEQ ID NO: 28733 - protein, 19 aa, Homo sapiens
CARLYSGSYYGPYDAFDIW

SEQ ID NO: 28734 - protein, 20 aa, Homo sapiens
CARGGPITILGVAWYYFDYW

SEQ ID NO: 28735 - protein, 25 aa, Homo sapiens
CARALEFLSVEYMWKTYRAGAMDVW

SEQ ID NO: 28736 - protein, 19 aa, Homo sapiens
CARDRPNEYGGNSGSFDPW

SEQ ID NO: 28737 - protein, 23 aa, Homo sapiens
CARHIVYVDGGWYSGPMSWFDPW

SEQ ID NO: 28738 - protein, 15 aa, Homo sapiens
CARGGSRGLMPFDVW

SEQ ID NO: 28739 - protein, 20 aa, Homo sapiens
CTTSTIYDSSGYYDWSIDYW

SEQ ID NO: 28740 - protein, 18 aa, Homo sapiens
CAKSPTYYFESSGYIDFW

SEQ ID NO: 28741 - protein, 17 aa, Homo sapiens
CARVSRDGILSYYFDYW

SEQ ID NO: 28742 - protein, 13 aa, Homo sapiens
CQAWDGSTAAYVF

SEQ ID NO: 28743 - protein, 24 aa, Homo sapiens
CAREPPFTIFGVVVQYYYYYMDVW

SEQ ID NO: 28744 - protein, 17 aa, Homo sapiens
CARPRTTWFGESAFDIW

SEQ ID NO: 28745 - protein, 18 aa, Homo sapiens
CARVRRVQLRIQGHFDYW

SEQ ID NO: 28746 - protein, 18 aa, Homo sapiens
CARDSVPAPRRGQWFDPW

SEQ ID NO: 28747 - protein, 17 aa, Homo sapiens
CARLRLGDLFFAAFDIW

SEQ ID NO: 28748 - protein, 25 aa, Homo sapiens
CAKQPVEITMILVALFRDEWYFDLW

SEQ ID NO: 28749 - protein, 18 aa, Homo sapiens
CARGSRRGDGYNLALDYW

SEQ ID NO: 28750 - protein, 22 aa, Homo sapiens
CARHPSSMVRGVIYYYNYMDVW

SEQ ID NO: 28751 - protein, 19 aa, Homo sapiens
CARGPVAGYDSSGYSFDYW

SEQ ID NO: 28752 - protein, 24 aa, Homo sapiens
CARGRPDEDYYDSSGPQMGYFDYW

SEQ ID NO: 28753 - protein, 15 aa, Homo sapiens
CARAQRGVMWYMDVW

SEQ ID NO: 28754 - protein, 23 aa, Homo sapiens
CARHSPHGGSSGWYDAPTYFDYW

SEQ ID NO: 28755 - protein, 16 aa, Homo sapiens
CTVYSKYYYYYGMDVW

SEQ ID NO: 28756 - protein, 17 aa, Homo sapiens
CARGVNSATSGYSFDPW

SEQ ID NO: 28757 - protein, 26 aa, Homo sapiens
CARDLYVEQWLRSRGWIYYYYGMDVW

SEQ ID NO: 28758 - protein, 18 aa, Homo sapiens
CAKDRQDDYSQTNWFDPW

SEQ ID NO: 28759 - protein, 14 aa, Homo sapiens
CTRGSSGFSEIDYW

SEQ ID NO: 28760 - protein, 14 aa, Homo sapiens
CAREMYGDYAVDVW

SEQ ID NO: 28761 - protein, 24 aa, Homo sapiens
CALGLYCSGGSCYSPDYYYGMDVW

SEQ ID NO: 28762 - protein, 24 aa, Homo sapiens
CARDLYSSSSPTSNYYYYYGMDVW

SEQ ID NO: 28763 - protein, 23 aa, Homo sapiens
CARIRGAKYTSGWYEYYYYMDVW

SEQ ID NO: 28764 - protein, 17 aa, Homo sapiens
CARAYYDYSGWWGFDSW

SEQ ID NO: 28765 - protein, 18 aa, Homo sapiens
CVKDRVVYGDYGDSFDVW

SEQ ID NO: 28766 - protein, 17 aa, Homo sapiens
CARDLFHPVVLWYFDLW

SEQ ID NO: 28767 - protein, 19 aa, Homo sapiens
CARQQYYGVGSLRGWFDPW

SEQ ID NO: 28768 - protein, 15 aa, Homo sapiens
CARAYGPWSNWFGPW

SEQ ID NO: 28769 - protein, 22 aa, Homo sapiens
CARGGGLYFYDGRGYGNWFDPW

SEQ ID NO: 28770 - protein, 16 aa, Homo sapiens
CAHPSQRYKWAIFDYW

SEQ ID NO: 28771 - protein, 17 aa, Homo sapiens
CARAGWEWIQLWFLDYW

SEQ ID NO: 28772 - protein, 18 aa, Homo sapiens
CARILGDSSSGYEGLDYW

SEQ ID NO: 28773 - protein, 19 aa, Homo sapiens
CATDSVVGTAAPLDAFDVW

SEQ ID NO: 28774 - protein, 16 aa, Homo sapiens
CATLNTLPKDWYLDLW

SEQ ID NO: 28775 - protein, 14 aa, Homo sapiens
CSVLIAVAGDFDYW

SEQ ID NO: 28776 - protein, 21 aa, Homo sapiens
CARAPDGGSYYPYYYYYMDVW

SEQ ID NO: 28777 - protein, 26 aa, Homo sapiens
CASAYCSSLDCRAGLTPTLEYYLDYW

SEQ ID NO: 28778 - protein, 16 aa, Homo sapiens
CARGEMTTPYDAFDIW

SEQ ID NO: 28779 - protein, 17 aa, Homo sapiens
CATEWAYYDSSGYLGYW

SEQ ID NO: 28780 - protein, 14 aa, Homo sapiens
CAGGSYYYYYMDVW

SEQ ID NO: 28781 - protein, 19 aa, Homo sapiens
CTRSSVVTFIPPRGYFDYW

SEQ ID NO: 28782 - protein, 18 aa, Homo sapiens
CARDLDYGDYRHRAFDYW

SEQ ID NO: 28783 - protein, 21 aa, Homo sapiens
CARQYNYDETGYYEPASFDYW

SEQ ID NO: 28784 - protein, 20 aa, Homo sapiens
CTRTYDFWSGYSNHDAFDIW

SEQ ID NO: 28785 - protein, 22 aa, Homo sapiens
CARDWARDLLLWSGDLGWFDPW

SEQ ID NO: 28786 - protein, 19 aa, Homo sapiens
CARDASVETAIIHDVFDIW

SEQ ID NO: 28787 - protein, 17 aa, Homo sapiens
CAKEELYYYGSGYFDYW

SEQ ID NO: 28788 - protein, 17 aa, Homo sapiens
CASPPLYSSGWYYFDYW

SEQ ID NO: 28789 - protein, 21 aa, Homo sapiens
CARDRHSSSSGIYYYYYMDVW

SEQ ID NO: 28790 - protein, 20 aa, Homo sapiens
CARGYCSSSSCPEVFAFDIW

SEQ ID NO: 28791 - protein, 20 aa, Homo sapiens
CAKAFYFDFWSDYYGPSDYW

SEQ ID NO: 28792 - protein, 16 aa, Homo sapiens
CARGRISETTDEFDNW

SEQ ID NO: 28793 - protein, 20 aa, Homo sapiens
CARDFSRSYYDSSGYSADYW

SEQ ID NO: 28794 - protein, 20 aa, Homo sapiens
CTVDPYYDTSDGSFSWFDPW

SEQ ID NO: 28795 - protein, 17 aa, Homo sapiens
CAHRRKSGYDSTPFDYW

SEQ ID NO: 28796 - protein, 17 aa, Homo sapiens
CTREATYRTWPEYFDYW

SEQ ID NO: 28797 - protein, 15 aa, Homo sapiens
CARLCTGNTCYHDQW

SEQ ID NO: 28798 - protein, 16 aa, Homo sapiens
CARRVAVRPLYYFDYW

SEQ ID NO: 28799 - protein, 22 aa, Homo sapiens
CARWDSPTTVTTALTPDAFDIW

SEQ ID NO: 28800 - protein, 17 aa, Homo sapiens
CARDIKLELLHHAFDIW

SEQ ID NO: 28801 - protein, 21 aa, Homo sapiens
CARDNVRGDSPFYYYYGLDVW

SEQ ID NO: 28802 - protein, 21 aa, Homo sapiens
CARAPKTSPEDYYYYYAIDVW

SEQ ID NO: 28803 - protein, 18 aa, Homo sapiens
CARASSSGSYASNWFDPW

SEQ ID NO: 28804 - protein, 24 aa, Homo sapiens
CTKEVYCDGDCYSQDGYYYYMDVW

SEQ ID NO: 28805 - protein, 12 aa, Homo sapiens [sequence omitted]

SEQ ID NO: 28806 - protein, 22 aa, Homo sapiens
CARAIYSSSWHGVVYYYGMDVW

SEQ ID NO: 28807 - protein, 20 aa, Homo sapiens
CARLEYSSSSDVYSYGIDYW

SEQ ID NO: 28808 - protein, 20 aa, Homo sapiens
CVRDSQGFVNTAMPHYFDSW

SEQ ID NO: 28809 - protein, 16 aa, Homo sapiens
CARGYCDSIHCYTDYW

SEQ ID NO: 28810 - protein, 20 aa, Homo sapiens
CTTEEHDYYDSSGYLTFDYW

SEQ ID NO: 28811 - protein, 18 aa, Homo sapiens
CAKAAHFYYDASGYIPYW

SEQ ID NO: 28812 - protein, 22 aa, Homo sapiens
CARDGSPVSPMGAPKSWHFDLW

SEQ ID NO: 28813 - protein, 16 aa, Homo sapiens
CAKEAYDTSGYPFDLW

SEQ ID NO: 28814 - protein, 17 aa, Homo sapiens
CAKGDRAYDYGDSFDYW

SEQ ID NO: 28815 - protein, 20 aa, Homo sapiens
CARDRVAPAPIDYYYYMDVW

SEQ ID NO: 28816 - protein, 25 aa, Homo sapiens
CAKEGGYCSSTSCSRFWGGNWFDPW

SEQ ID NO: 28817 - protein, 15 aa, Homo sapiens
CARGRVGSTTSYDYW

SEQ ID NO: 28818 - protein, 19 aa, Homo sapiens
CARLAHSGIHLWLRRVDYW

SEQ ID NO: 28819 - protein, 15 aa, Homo sapiens
CAKEFTGGRWFFDLW

SEQ ID NO: 28820 - protein, 16 aa, Homo sapiens
CARDRGMPAGNWFDPW

SEQ ID NO: 28821 - protein, 18 aa, Homo sapiens
CARFGVGGSWSAPIGDYW

SEQ ID NO: 28822 - protein, 16 aa, Homo sapiens
CASQPGPYSSSWFDNW

SEQ ID NO: 28823 - protein, 17 aa, Homo sapiens
CARGGSSHYYLNAFDIW

SEQ ID NO: 28824 - protein, 25 aa, Homo sapiens
CARDCRVNYCSSTSCSIPYNWFDPW

SEQ ID NO: 28825 - protein, 19 aa, Homo sapiens
CVRDRTNYESTNSYYFDYW

SEQ ID NO: 28826 - protein, 17 aa, Homo sapiens
CAILDNWNYERFGFDYW

SEQ ID NO: 28827 - protein, 16 aa, Homo sapiens
CAKARPRSFYSYFDPW

SEQ ID NO: 28828 - protein, 17 aa, Homo sapiens
CARSMVRGYYYYGMDVW

SEQ ID NO: 28829 - protein, 19 aa, Homo sapiens
CALPISGYSSTWYEYLDYW

SEQ ID NO: 28830 - protein, 22 aa, Homo sapiens
CARHTRPGSGTYYGTGGWFDLW

SEQ ID NO: 28831 - protein, 19 aa, Homo sapiens
CARHVYYDVSAYGNAFDIW

SEQ ID NO: 28832 - protein, 19 aa, Homo sapiens
CTSSWVVVAATGSGGFDFW

SEQ ID NO: 28833 - protein, 13 aa, Homo sapiens
CVRHVGLSWFDSW

SEQ ID NO: 28834 - protein, 15 aa, Homo sapiens
CARAGIAARRPLDYW

SEQ ID NO: 28835 - protein, 19 aa, Homo sapiens
CARVGRQWELPWGDYFDYW

SEQ ID NO: 28836 - protein, 20 aa, Homo sapiens
CAKGYCSSGSCYGYYGMDVW

SEQ ID NO: 28837 - protein, 25 aa, Homo sapiens
CVRRSQADGRYCSSTSCYPNAFDVW

SEQ ID NO: 28838 - protein, 24 aa, Homo sapiens
CARDGGGLLGATNPWGYYYAMDVW

SEQ ID NO: 28839 - protein, 21 aa, Homo sapiens
CARDLLSHTEGLYYYYGMDVW

SEQ ID NO: 28840 - protein, 20 aa, Homo sapiens
CARGGYCSGGNCYWGEIDYW

SEQ ID NO: 28841 - protein, 15 aa, Homo sapiens
CARRGYNWNTNFDLW

SEQ ID NO: 28842 - protein, 16 aa, Homo sapiens
CARDPNHSSRWGFDYW

SEQ ID NO: 28843 - protein, 23 aa, Homo sapiens
CARALLYCTNGVCYKGGAYFDYW

SEQ ID NO: 28844 - protein, 12 aa, Homo sapiens
CARDKAAHFDLW

SEQ ID NO: 28845 - protein, 22 aa, Homo sapiens
CARLGDYTGGWWKVEFTWFDPW

SEQ ID NO: 28846 - protein, 17 aa, Homo sapiens
CVREGYSSGRAPAFDFW

SEQ ID NO: 28847 - protein, 17 aa, Homo sapiens
CARFIHIISSAVVFDSW

SEQ ID NO: 28848 - protein, 17 aa, Homo sapiens
CVRDSYSYGVIGYFDSW

SEQ ID NO: 28849 - protein, 20 aa, Homo sapiens
CARALSLYYYDSSGYYFDYW

SEQ ID NO: 28850 - protein, 18 aa, Homo sapiens
CAHRLLPSGSQHSYFDYW

SEQ ID NO: 28851 - protein, 15 aa, Homo sapiens
CARDLWFGESLFDYW

SEQ ID NO: 28852 - protein, 16 aa, Homo sapiens
CARQNFEPRARYFDPW

SEQ ID NO: 28853 - protein, 18 aa, Homo sapiens
CTRDNRGYSYGYYAFDIW

SEQ ID NO: 28854 - protein, 13 aa, Homo sapiens
CATWGVVSAFDYW

SEQ ID NO: 28855 - protein, 15 aa, Homo sapiens
CARSLYSGPSWFDYW

SEQ ID NO: 28856 - protein, 15 aa, Homo sapiens
CARGAAAGTGAVDYW

SEQ ID NO: 28857 - protein, 17 aa, Homo sapiens
CARGNSSPLYYYYMDVW

SEQ ID NO: 28858 - protein, 14 aa, Homo sapiens
CVSAHSSGYYGFYW

SEQ ID NO: 28859 - protein, 17 aa, Homo sapiens
CARDSPLGSGWYPFDSW

SEQ ID NO: 28860 - protein, 19 aa, Homo sapiens
CAREGGDMVVAAYNYFDYW

SEQ ID NO: 28861 - protein, 25 aa, Homo sapiens
CAKDKGGDSSGYYPFYYYYYGMDVW

SEQ ID NO: 28862 - protein, 22 aa, Homo sapiens
CARIYTRIYNYGDVRDYFFDYW

SEQ ID NO: 28863 - protein, 18 aa, Homo sapiens
CALPICRGWWTPYYFDYW

SEQ ID NO: 28864 - protein, 16 aa, Homo sapiens
CARLKGSSSFHPFDYW

SEQ ID NO: 28865 - protein, 20 aa, Homo sapiens
CAREREDCTNGVCYTHFDYW

SEQ ID NO: 28866 - protein, 26 aa, Homo sapiens
CARSLLRLGELALLEGAVSPTIFDYW

SEQ ID NO: 28867 - protein, 17 aa, Homo sapiens
CARAKRAARPIDWFDPW

SEQ ID NO: 28868 - protein, 17 aa, Homo sapiens
CVKEGGYTGGWFYFDYW

SEQ ID NO: 28869 - protein, 21 aa, Homo sapiens
CAAEPPNCSGDYCYMSWFDPW

SEQ ID NO: 28870 - protein, 15 aa, Homo sapiens
CARETTRGTGAIDYW

SEQ ID NO: 28871 - protein, 13 aa, Homo sapiens
CATIYIGGAFDIW

SEQ ID NO: 28872 - protein, 23 aa, Homo sapiens
CAKEGGVQAVTWYDERVRYFDYW

SEQ ID NO: 28873 - protein, 21 aa, Homo sapiens
CAKCYDYVWGRYRSDGDFDYW

SEQ ID NO: 28874 - protein, 21 aa, Homo sapiens
CARRIVVVVAATREVVWFDPW

SEQ ID NO: 28875 - protein, 22 aa, Homo sapiens
CTKVVTNVGHQTVTPVYFFDYW

SEQ ID NO: 28876 - protein, 18 aa, Homo sapiens
CATIGWPVDNGRDYFEDW

SEQ ID NO: 28877 - protein, 20 aa, Homo sapiens
CTKAGLPTLAAGVNNWFEPW

SEQ ID NO: 28878 - protein, 19 aa, Homo sapiens
CASVAYSSSSFYIGLFDYW

SEQ ID NO: 28879 - protein, 15 aa, Homo sapiens
CARQSLSSGATFDYW

SEQ ID NO: 28880 - protein, 27 aa, Homo sapiens
CATGGVVPAAMLSGYDGLTGFSNFDHW

SEQ ID NO: 28881 - protein, 18 aa, Homo sapiens
CARGGTGDFDGSWYFDLW

SEQ ID NO: 28882 - protein, 15 aa, Homo sapiens
CAKGNSQLWSLFDIW

SEQ ID NO: 28883 - protein, 18 aa, Homo sapiens
CAKARNNWNHGWGVFDYW

SEQ ID NO: 28884 - protein, 15 aa, Homo sapiens
CASSSYHDSTWFDPW

SEQ ID NO: 28885 - protein, 16 aa, Homo sapiens
CARHGTSDAARGFDTW

SEQ ID NO: 28886 - protein, 23 aa, Homo sapiens
CARDDRFLEWLFNYYYYHGLDVW

SEQ ID NO: 28887 - protein, 19 aa, Homo sapiens
CAREPYYGFWSGYSHFDYW

SEQ ID NO: 28888 - protein, 17 aa, Homo sapiens
CARGGDFWSGYFPFDYW

SEQ ID NO: 28889 - protein, 16 aa, Homo sapiens
CARGRENQSSGWTDYW

SEQ ID NO: 28890 - protein, 21 aa, Homo sapiens
CARGRRGSSGWGTMLSWFDPW

SEQ ID NO: 28891 - protein, 14 aa, Homo sapiens
CARVTLELEAFDYW

SEQ ID NO: 28892 - protein, 19 aa, Homo sapiens
CARGLGIQYGGPLNWFDPW

SEQ ID NO: 28893 - protein, 19 aa, Homo sapiens
CARVIDVRSRYYYYYMDVW

SEQ ID NO: 28894 - protein, 22 aa, Homo sapiens
CARDGSIDYYDSSGYLGAFDIW

SEQ ID NO: 28895 - protein, 20 aa, Homo sapiens
CARDVPYYYDSSAYYFFDYW

SEQ ID NO: 28896 - protein, 21 aa, Homo sapiens
CARDGPSVPAAAGGIGWFDPW

SEQ ID NO: 28897 - protein, 20 aa, Homo sapiens
CARDPPDVPPVGIGSPSDYW

SEQ ID NO: 28898 - protein, 13 aa, Homo sapiens
CARDMVWLYFDYW

SEQ ID NO: 28899 - protein, 14 aa, Homo sapiens
CARVGGNPSWFDVW

SEQ ID NO: 28900 - protein, 13 aa, Homo sapiens
CQSADSTSVYYVF

SEQ ID NO: 28901 - protein, 14 aa, Homo sapiens
CAARDDCLSGGVLF

SEQ ID NO: 28902 - protein, 16 aa, Homo sapiens
CAKEGGSGYPYYFDYW

SEQ ID NO: 28903 - protein, 18 aa, Homo sapiens
CAKAPESYGDYYYYMDVW

SEQ ID NO: 28904 - protein, 16 aa, Homo sapiens
CARSNSVLTGGGFDPW

SEQ ID NO: 28905 - protein, 17 aa, Homo sapiens
CARDPLIGILTGSDDYW

SEQ ID NO: 28906 - protein, 28 aa, Homo sapiens
CARHVSRTYYDFWSGSYEKRGAEYFQPW

SEQ ID NO: 28907 - protein, 16 aa, Homo sapiens
CARYSRPLERNWFDPW

SEQ ID NO: 28908 - protein, 15 aa, Homo sapiens
CARPYEIGNDAFDIW

SEQ ID NO: 28909 - protein, 19 aa, Homo sapiens
CARGQRHSYGYYYYYIDVW

SEQ ID NO: 28910 - protein, 14 aa, Homo sapiens
CTRESSEMTTFVYW

SEQ ID NO: 28911 - protein, 19 aa, Homo sapiens
CCARAGWNYYRPHDPFDIW

SEQ ID NO: 28912 - protein, 15 aa, Homo sapiens
CARDFPETGYDFDYW

SEQ ID NO: 28913 - protein, 20 aa, Homo sapiens
CARERVSCNGGSCTSYLDYW

SEQ ID NO: 28914 - protein, 18 aa, Homo sapiens
CARGGVSGSSGLHWFDSW

SEQ ID NO: 28915 - protein, 23 aa, Homo sapiens
CARGPSINRIAIFGVGLHYFDYW

SEQ ID NO: 28916 - protein, 19 aa, Homo sapiens
CAKDIYDSSGYYGAYFDYW

SEQ ID NO: 28917 - protein, 20 aa, Homo sapiens
CARRSLYVWGSIRQYYFDTW

SEQ ID NO: 28918 - protein, 13 aa, Homo sapiens
CAREDVTGPFGYW

SEQ ID NO: 28919 - protein, 25 aa, Homo sapiens
CARAHDSSGYYYPDLTRLFTGFDYW

SEQ ID NO: 28920 - protein, 18 aa, Homo sapiens
CATTLGDYSNYEGVFDYW

SEQ ID NO: 28921 - protein, 22 aa, Homo sapiens
CARVGIVVKPAVSETEYYMDVW

SEQ ID NO: 28922 - protein, 16 aa, Homo sapiens
CARLVVITSTHYFDYW

SEQ ID NO: 28923 - protein, 19 aa, Homo sapiens
CVRCMPRRGWFGFAAFDIW

SEQ ID NO: 28924 - protein, 19 aa, Homo sapiens
CARHLDDSSGYYWGYFDYW

SEQ ID NO: 28925 - protein, 16 aa, Homo sapiens
CARNYYESSGDAFDIW

SEQ ID NO: 28926 - protein, 17 aa, Homo sapiens
CARHRGAWGDTSGFYYW

SEQ ID NO: 28927 - protein, 15 aa, Homo sapiens
CARARSGTSIDFDYW

SEQ ID NO: 28928 - protein, 24 aa, Homo sapiens
CARKSGSPYHFWSGAAPSWFFDPW

SEQ ID NO: 28929 - protein, 17 aa, Homo sapiens
CAKDVGTTVISNGFHYW

SEQ ID NO: 28930 - protein, 18 aa, Homo sapiens
CAREAGRDTAMVPTIDYW

SEQ ID NO: 28931 - protein, 22 aa, Homo sapiens
CARGVGDGEQYDASGSSHFDYW

SEQ ID NO: 28932 - protein, 19 aa, Homo sapiens
CAKSATLLTSVQGWYFDYW

SEQ ID NO: 28933 - protein, 19 aa, Homo sapiens
CARARRDGYNYLATVFDIW

SEQ ID NO: 28934 - protein, 23 aa, Homo sapiens
CARDGSYDFWSGYTYYYYYMDVW

SEQ ID NO: 28935 - protein, 20 aa, Homo sapiens
CARVGSTISRIHSYSYMDVW

SEQ ID NO: 28936 - protein, 20 aa, Homo sapiens
CARAANNIESPPGPPVLDYW

SEQ ID NO: 28937 - protein, 22 aa, Homo sapiens
CARRSLSITIFGVVIRDAFDIW

SEQ ID NO: 28938 - protein, 20 aa, Homo sapiens
CARSRLLWFGESAEYYFDYW

SEQ ID NO: 28939 - protein, 20 aa, Homo sapiens
CASPRSPMRQGVILTIFDYW

SEQ ID NO: 28940 - protein, 19 aa, Homo sapiens
CAKDSGVAGTVVPGAFDIW

SEQ ID NO: 28941 - protein, 20 aa, Homo sapiens
CASIKRGYDILTGSSSFDYW

SEQ ID NO: 28942 - protein, 16 aa, Homo sapiens
CARAEDLDTRGGFDAW

SEQ ID NO: 28943 - protein, 21 aa, Homo sapiens
CASSVAVGATVDYYYFGMDVW

SEQ ID NO: 28944 - protein, 17 aa, Homo sapiens
CTTDLRITGTEYYFDYW

SEQ ID NO: 28945 - protein, 17 aa, Homo sapiens
CARDGIGYYGDWVPDYW

SEQ ID NO: 28946 - protein, 14 aa, Homo sapiens
CQQYNNWPRSSLTF

SEQ ID NO: 28947 - protein, 20 aa, Homo sapiens
CAKDGRSGSFGFYYYYMDVW

SEQ ID NO: 28948 - protein, 14 aa, Homo sapiens
CARFWTGNWYFDLW

SEQ ID NO: 28949 - protein, 13 aa, Homo sapiens
CQQYDTVPVPITF

SEQ ID NO: 28950 - protein, 16 aa, Homo sapiens
CARENRGYTDDAFDIW

SEQ ID NO: 28951 - protein, 13 aa, Homo sapiens
CANQEMAYPGDYW

SEQ ID NO: 28952 - protein, 18 aa, Homo sapiens
CARIRSWYGGNSGWFDPW

SEQ ID NO: 28953 - protein, 19 aa, Homo sapiens
CTRSPIFSGYYYYYYMDVW

SEQ ID NO: 28954 - protein, 11 aa, Homo sapiens
CQQAHTFPCTF

SEQ ID NO: 28955 - protein, 20 aa, Homo sapiens
CARDPSEYCTTANCYYFDNW

SEQ ID NO: 28956 - protein, 16 aa, Homo sapiens
CAKYGYSGSYYHFDFW

SEQ ID NO: 28957 - protein, 25 aa, Homo sapiens
CARHRRLSNKHIVVVTAHLGYFDYW

SEQ ID NO: 28958 - protein, 18 aa, Homo sapiens
CARVRHILVVPGNWFDTW

SEQ ID NO: 28959 - protein, 22 aa, Homo sapiens
CARGHQWEILLRSVETGWFDPW

SEQ ID NO: 28960 - protein, 19 aa, Homo sapiens
CAKDAVRQILTGPYYFDYW

SEQ ID NO: 28961 - protein, 21 aa, Homo sapiens
CARLSAESFGSRWIYWFFGLW

SEQ ID NO: 28962 - protein, 13 aa, Homo sapiens
CAREPNWEQIDYW

SEQ ID NO: 28963 - protein, 16 aa, Homo sapiens
CAKESSSHYYFAMDVW

SEQ ID NO: 28964 - protein, 20 aa, Homo sapiens
CAKVGGLLWFGEFDDAFDIW

SEQ ID NO: 28965 - protein, 18 aa, Homo sapiens
CARHERKQLRKNFYFDSW

SEQ ID NO: 28966 - protein, 21 aa, Homo sapiens
CARYEVVVVADATLYNWFETW

SEQ ID NO: 28967 - protein, 15 aa, Homo sapiens
CAVTLRPGLPPFDFW

SEQ ID NO: 28968 - protein, 20 aa, Homo sapiens
CARDSARWRQQKASTGFDYW

SEQ ID NO: 28969 - protein, 21 aa, Homo sapiens
CASGLIYCTTADCYTRNFDSW

SEQ ID NO: 28970 - protein, 17 aa, Homo sapiens
CAKGGDKIVVVTAFDYW

SEQ ID NO: 28971 - protein, 20 aa, Homo sapiens
CARIMGVRSGWFTGDAFDIW

SEQ ID NO: 28972 - protein, 24 aa, Homo sapiens
CARDASPSYCRSSTCSEVDWFDPW

SEQ ID NO: 28973 - protein, 16 aa, Homo sapiens
CARELRHSGYEFFDYW

SEQ ID NO: 28974 - protein, 18 aa, Homo sapiens
CAKVGFRAPSESGYFDLW

SEQ ID NO: 28975 - protein, 16 aa, Homo sapiens
CARDYSSGWYITFDIW

SEQ ID NO: 28976 - protein, 14 aa, Homo sapiens
CQSYDGDLSGSKVF

SEQ ID NO: 28977 - protein, 22 aa, Homo sapiens
CAKEDVWNAPGSEYYYYGMDVW

SEQ ID NO: 28978 - protein, 17 aa, Homo sapiens
CARYGQATTIRHWFDSW

SEQ ID NO: 28979 - protein, 19 aa, Homo sapiens
CARIGHMDILYYYYYMDVW

SEQ ID NO: 28980 - protein, 20 aa, Homo sapiens
CAKGYDILTDVSWEDWFDPW

SEQ ID NO: 28981 - protein, 19 aa, Homo sapiens
CARALGYCSSTSCPAPDYW

SEQ ID NO: 28982 - protein, 10 aa, Homo sapiens
CATGKYGDYW

SEQ ID NO: 28983 - protein, 13 aa, Homo sapiens
CASFYWGLGLDYW

SEQ ID NO: 28984 - protein, 17 aa, Homo sapiens
CARHLTVGASRPYFQHW

SEQ ID NO: 28985 - protein, 17 aa, Homo sapiens
CARGLWQWLVLDAFDLW

SEQ ID NO: 28986 - protein, 22 aa, Homo sapiens
CARLAQNTETTLYYYYFYLDVW

SEQ ID NO: 28987 - protein, 19 aa, Homo sapiens
CSRDSKDSDYYANYPFDYW

SEQ ID NO: 28988 - protein, 15 aa, Homo sapiens
CARDEGPDSGWFVYW

SEQ ID NO: 28989 - protein, 21 aa, Homo sapiens
CARDLTVVAATSYYYYGMDVW

SEQ ID NO: 28990 - protein, 21 aa, Homo sapiens
CTRHPIESDITYFTDYFFDRW

SEQ ID NO: 28991 - protein, 14 aa, Homo sapiens
CARGEMDDSRFDIW

SEQ ID NO: 28992 - protein, 15 aa, Homo sapiens
CAKEAVAGTNWFDSW

SEQ ID NO: 28993 - protein, 16 aa, Homo sapiens
CAKGAGMATIYRFDYW

SEQ ID NO: 28994 - protein, 23 aa, Homo sapiens
CARDGTLRFLEWSPYYYYGMDVW

SEQ ID NO: 28995 - protein, 18 aa, Homo sapiens
CARDPSYSSTLYWYLDLW

SEQ ID NO: 28996 - protein, 21 aa, Homo sapiens
CAKDLLIVPAARPPLSDFDHW

SEQ ID NO: 28997 - protein, 17 aa, Homo sapiens
CSRHIEVGYDSSTFDSW

SEQ ID NO: 28998 - protein, 17 aa, Homo sapiens
CARDGISGYYYYYMAVW

SEQ ID NO: 28999 - protein, 23 aa, Homo sapiens
CARSAERYCSGGRCSSDENFQYW

SEQ ID NO: 29000 - protein, 19 aa, Homo sapiens
CVKDMSNAFNLAPDAFDIW

SEQ ID NO: 29001 - protein, 15 aa, Homo sapiens
CAKDMVAVTGAMDVW

SEQ ID NO: 29002 - protein, 15 aa, Homo sapiens
CARVVVGATWWFDPW

SEQ ID NO: 29003 - protein, 18 aa, Homo sapiens
CAREILDDFSLSLNFDLW

SEQ ID NO: 29004 - protein, 22 aa, Homo sapiens
CARGYCSGESCRWTVYWYFDLW

SEQ ID NO: 29005 - protein, 19 aa, Homo sapiens
CAKRIYNYDSSGYWALDYW

SEQ ID NO: 29006 - protein, 18 aa, Homo sapiens
CARGWLDDFWNNFSFDQW

SEQ ID NO: 29007 - protein, 19 aa, Homo sapiens
CATTIFGLVPPRRDAFDIW

SEQ ID NO: 29008 - protein, 13 aa, Homo sapiens
CLLFDGGAQVWVF

SEQ ID NO: 29009 - protein, 16 aa, Homo sapiens
CARDSSRLGGGWFDPW

SEQ ID NO: 29010 - protein, 14 aa, Homo sapiens
CARSLGPWLHFDYW

SEQ ID NO: 29011 - protein, 15 aa, Homo sapiens
CARDQGEQLGAFDYW

SEQ ID NO: 29012 - protein, 17 aa, Homo sapiens
CAKERVSAMVEYKFDSW

SEQ ID NO: 29013 - protein, 16 aa, Homo sapiens
CATTVVTPDSNAFDIW

SEQ ID NO: 29014 - protein, 14 aa, Homo sapiens
CAKDLHFWSANDYW

SEQ ID NO: 29015 - protein, 16 aa, Homo sapiens
CARAGDGTLGNWFDPW

SEQ ID NO: 29016 - protein, 17 aa, Homo sapiens
CARAGGNLEWRGWFDPW

SEQ ID NO: 29017 - protein, 26 aa, Homo sapiens
CARASCFSTRCSAGRPYSYYYAMDVW

SEQ ID NO: 29018 - protein, 18 aa, Homo sapiens
CAKDVDDGYSSSPGLDYW

SEQ ID NO: 29019 - protein, 19 aa, Homo sapiens
CATETTVTTMYYYYAMDVW

SEQ ID NO: 29020 - protein, 21 aa, Homo sapiens
CARGNCGGDCSLFYYYGMDVW

SEQ ID NO: 29021 - protein, 17 aa, Homo sapiens
CARHIFYESTGYAFDYW

SEQ ID NO: 29022 - protein, 17 aa, Homo sapiens
CAKPPYYYDSSGYFDYW

SEQ ID NO: 29023 - protein, 17 aa, Homo sapiens
CTRETYYGSLTAWFDPW

SEQ ID NO: 29024 - protein, 18 aa, Homo sapiens
CARLTYYDIYDYIYMDVW

SEQ ID NO: 29025 - protein, 14 aa, Homo sapiens
CARGGDDWGSLDYW

SEQ ID NO: 29026 - protein, 20 aa, Homo sapiens
CARHSNALDSTGWYYYMDVW

SEQ ID NO: 29027 - protein, 24 aa, Homo sapiens
CARDLYYDFWSGYYGYYYYGMDVW

SEQ ID NO: 29028 - protein, 18 aa, Homo sapiens
CAKDVSRIGYSSGDFNYW

SEQ ID NO: 29029 - protein, 26 aa, Homo sapiens
CARVSYDFWSGYYKHQNYDYYYMDVW

SEQ ID NO: 29030 - protein, 20 aa, Homo sapiens
CARAAYYQSTDYSYWYFDVW

SEQ ID NO: 29031 - protein, 21 aa, Homo sapiens
CARVGASPLPPQLHLYYMDVW

SEQ ID NO: 29032 - protein, 19 aa, Homo sapiens
CAKGDGYSYGSGFVLLDYW

SEQ ID NO: 29033 - protein, 18 aa, Homo sapiens
CARTASNDYGSLFWFDPW

SEQ ID NO: 29034 - protein, 20 aa, Homo sapiens
CARTMGRYNNGHPEIHFDYW

SEQ ID NO: 29035 - protein, 19 aa, Homo sapiens
CARDQWELLQFPRYFFDYW

SEQ ID NO: 29036 - protein, 19 aa, Homo sapiens
CAAHPVGHSSGWYPLFDYW

SEQ ID NO: 29037 - protein, 15 aa, Homo sapiens
CARWLGHNSGYFDGW

SEQ ID NO: 29038 - protein, 16 aa, Homo sapiens
CAHLTYSSSYYYFDYW

SEQ ID NO: 29039 - protein, 19 aa, Homo sapiens
CARYYYYDSSGYLSAFDYW

SEQ ID NO: 29040 - protein, 15 aa, Homo sapiens
CAKDPNSITGPFDYW

SEQ ID NO: 29041 - protein, 15 aa, Homo sapiens
CANARSGSYYYFEFW

SEQ ID NO: 29042 - protein, 23 aa, Homo sapiens
CAVRLYDFWNGPYRTYYYGMDVW

SEQ ID NO: 29043 - protein, 15 aa, Homo sapiens
CARVSLAAGDAFDIW

SEQ ID NO: 29044 - protein, 13 aa, Homo sapiens
CANLLWPDYFDYW

SEQ ID NO: 29045 - protein, 22 aa, Homo sapiens
CAWDSRNWDSPSYFYYYGMDVW

SEQ ID NO: 29046 - protein, 19 aa, Homo sapiens
CARALGCGGDCYSSWFDPW

SEQ ID NO: 29047 - protein, 22 aa, Homo sapiens
CARDQFLYNSGWYHPAYYFDYW

SEQ ID NO: 29048 - protein, 15 aa, Homo sapiens
CARDNRVEPWFFDYW

SEQ ID NO: 29049 - protein, 21 aa, Homo sapiens
CAREISFNMMTGGYDRWFDPW

SEQ ID NO: 29050 - protein, 11 aa, Homo sapiens [sequence omitted]

SEQ ID NO: 29051 - protein, 22 aa, Homo sapiens
CARDCCSGWYGSVYYYYYMDVW

SEQ ID NO: 29052 - protein, 14 aa, Homo sapiens
CARGTGSSFGFAYW

SEQ ID NO: 29053 - protein, 18 aa, Homo sapiens
CVSPPGDCGSASCSFDFW

SEQ ID NO: 29054 - protein, 14 aa, Homo sapiens
CAKSKGYNHYFDNW

SEQ ID NO: 29055 - protein, 19 aa, Homo sapiens
CARGFCSSIGCSPDWFDPW

SEQ ID NO: 29056 - protein, 16 aa, Homo sapiens
CASTLPYSSSSRFDYW

SEQ ID NO: 29057 - protein, 19 aa, Homo sapiens
CAKETRREWEILQGHFDSW

SEQ ID NO: 29058 - protein, 18 aa, Homo sapiens
CARLRVQGKRLNWYFDLW

SEQ ID NO: 29059 - protein, 20 aa, Homo sapiens
CARQQPILQDYFDSSGLDYW

SEQ ID NO: 29060 - protein, 17 aa, Homo sapiens
CVRDRRSYGYPTSFDYW

SEQ ID NO: 29061 - protein, 9 aa, Homo sapiens
CTRAQRDYW

SEQ ID NO: 29062 - protein, 19 aa, Homo sapiens
CARGRWRGRPNSVDYFDYW

SEQ ID NO: 29063 - protein, 15 aa, Homo sapiens
CARPDILTGGGFDYW

SEQ ID NO: 29064 - protein, 16 aa, Homo sapiens
CASDTTGWYFDFFDSW

SEQ ID NO: 29065 - protein, 18 aa, Homo sapiens
CARDLTLGAIAANYFDPW

SEQ ID NO: 29066 - protein, 17 aa, Homo sapiens
CAREPIEEGSGWYFDDW

SEQ ID NO: 29067 - protein, 18 aa, Homo sapiens
CARDREYGDITPDAFDIW

SEQ ID NO: 29068 - protein, 27 aa, Homo sapiens
CARDRSNYYDRSVYYYLRDYYYYMDVW

SEQ ID NO: 29069 - protein, 27 aa, Homo sapiens
CATRPLLWPWLEEDASAGMAMDPFDYW

SEQ ID NO: 29070 - protein, 20 aa, Homo sapiens
CARAHNDYYDTSGFYYLDNW

SEQ ID NO: 29071 - protein, 22 aa, Homo sapiens
CARDPLFYSSSEFYYYYGLDVW

SEQ ID NO: 29072 - protein, 16 aa, Homo sapiens
CAHRRQLAASSYFDSW

SEQ ID NO: 29073 - protein, 15 aa, Homo sapiens
CAADRRAVAGTFDYW

SEQ ID NO: 29074 - protein, 20 aa, Homo sapiens
CASRMPSVTLNRGFPPFDYW

SEQ ID NO: 29075 - protein, 14 aa, Homo sapiens
CVRSRDYRRSFDTW

SEQ ID NO: 29076 - protein, 17 aa, Homo sapiens
CAKGLTTVTTRGAFDIW

SEQ ID NO: 29077 - protein, 19 aa, Homo sapiens
CARVETVPLMDYYYGMDVW

SEQ ID NO: 29078 - protein, 20 aa, Homo sapiens
CAKERPPRRDRYLSYYFDYW

SEQ ID NO: 29079 - protein, 15 aa, Homo sapiens
CARHLVGATRAFDIW

SEQ ID NO: 29080 - protein, 15 aa, Homo sapiens
CARLGITVTVRLDYW

SEQ ID NO: 29081 - protein, 16 aa, Homo sapiens
CARTETVTSLGPFDYW

SEQ ID NO: 29082 - protein, 14 aa, Homo sapiens
CANHYYDVGNFDSW

SEQ ID NO: 29083 - protein, 13 aa, Homo sapiens
CVRAVAGNYFDWW

SEQ ID NO: 29084 - protein, 15 aa, Homo sapiens
CARESGVYEHKIDYW

SEQ ID NO: 29085 - protein, 20 aa, Homo sapiens
CARGWRETWLLRINGHFDYW

SEQ ID NO: 29086 - protein, 17 aa, Homo sapiens
CARHKEYSSFSNPDDPW

SEQ ID NO: 29087 - protein, 15 aa, Homo sapiens
CAFIYSSGWSKFDPW

SEQ ID NO: 29088 - protein, 21 aa, Homo sapiens
CARDRGYCSGGSCYVGWLDYW

SEQ ID NO: 29089 - protein, 14 aa, Homo sapiens
CARLGGPGWYVVYW

SEQ ID NO: 29090 - protein, 20 aa, Homo sapiens
CARRVSGSYFGFYYYYLDVW

SEQ ID NO: 29091 - protein, 16 aa, Homo sapiens
CAKDIAHGYTYEFDPW

SEQ ID NO: 29092 - protein, 19 aa, Homo sapiens
CARDASRGIAVAGTPFDYW

SEQ ID NO: 29093 - protein, 17 aa, Homo sapiens
CTTVGWRQLVGAAFDIW

SEQ ID NO: 29094 - protein, 13 aa, Homo sapiens
CGRRRLASYIDYW

SEQ ID NO: 29095 - protein, 18 aa, Homo sapiens
CARRKVGRPEERNWFDPW

SEQ ID NO: 29096 - protein, 17 aa, Homo sapiens
CARVPRYGSGTFAFDIW

SEQ ID NO: 29097 - protein, 19 aa, Homo sapiens
CAKDTRLGDGSTYGYFDYW

SEQ ID NO: 29098 - protein, 16 aa, Homo sapiens
CARARGPYDSDGLDYW

SEQ ID NO: 29099 - protein, 14 aa, Homo sapiens
CIRMGGNSGGFDYW

SEQ ID NO: 29100 - protein, 16 aa, Homo sapiens
CTKSPYGWELLPLDYW

SEQ ID NO: 29101 - protein, 13 aa, Homo sapiens
CARHTGGTTYDYW

SEQ ID NO: 29102 - protein, 20 aa, Homo sapiens
CARDPLRIQGHHYYYYMDVW

SEQ ID NO: 29103 - protein, 15 aa, Homo sapiens
CAKSRLGEYPPFDSW

SEQ ID NO: 29104 - protein, 22 aa, Homo sapiens
CAKATYYYNSGVYQDTYYFDYW

SEQ ID NO: 29105 - protein, 17 aa, Homo sapiens
CARYLGYPLDYDGVDVW

SEQ ID NO: 29106 - protein, 19 aa, Homo sapiens
CARAYYYGSGIEGGRFDYW

SEQ ID NO: 29107 - protein, 16 aa, Homo sapiens
CAKDPGPVIPDAFDIW

SEQ ID NO: 29108 - protein, 18 aa, Homo sapiens
CARDRVPSSSWTGDFDYW

SEQ ID NO: 29109 - protein, 19 aa, Homo sapiens
CAREVRPVYNWNDGGFDYW

SEQ ID NO: 29110 - protein, 17 aa, Homo sapiens
CAKHPRGLLPPFYFDYW

SEQ ID NO: 29111 - protein, 18 aa, Homo sapiens
CARGPVNRYGYAPPIDYW

SEQ ID NO: 29112 - protein, 15 aa, Homo sapiens
CARARMTTVTYFGYW

SEQ ID NO: 29113 - protein, 19 aa, Homo sapiens
CAHRLRFTDWAPHDVFDVW

SEQ ID NO: 29114 - protein, 17 aa, Homo sapiens
CARPGVTTRPVYWFDPW

SEQ ID NO: 29115 - protein, 16 aa, Homo sapiens
CARRGDYYDSSGPDYW

SEQ ID NO: 29116 - protein, 24 aa, Homo sapiens
CARDKDDCSGGSCFSTLLEPFDYW

SEQ ID NO: 29117 - protein, 24 aa, Homo sapiens
CARRGVVYDILTGYLIGHDAFDIW

SEQ ID NO: 29118 - protein, 18 aa, Homo sapiens
CARFLRDGYNARYYFDYW

SEQ ID NO: 29119 - protein, 20 aa, Homo sapiens
CARVRIQGRRYSGSYWGDYW

SEQ ID NO: 29120 - protein, 20 aa, Homo sapiens
CAKRERVSGFAPRDYYFEHW

SEQ ID NO: 29121 - protein, 19 aa, Homo sapiens
CAKGRGYISGYSSNCFDPW

SEQ ID NO: 29122 - protein, 16 aa, Homo sapiens
CARSGTLWKYWYFDLW

SEQ ID NO: 29123 - protein, 18 aa, Homo sapiens
CAREYYYNSNSYFITDYW

SEQ ID NO: 29124 - protein, 17 aa, Homo sapiens
CARHVGIATALSWIDPW

SEQ ID NO: 29125 - protein, 16 aa, Homo sapiens
CVRSPDSSGWWDFDYW

SEQ ID NO: 29126 - protein, 18 aa, Homo sapiens
CATAGAFGSGNYYNSDYW

SEQ ID NO: 29127 - protein, 13 aa, Homo sapiens
CARDDILRWPDYW

SEQ ID NO: 29128 - protein, 13 aa, Homo sapiens
CSAWDSDLRAWVF

SEQ ID NO: 29129 - protein, 21 aa, Homo sapiens
CAKKGGSTSPEMYYYYGMDVW

SEQ ID NO: 29130 - protein, 16 aa, Homo sapiens
CARHISMNRVDWFDPW

SEQ ID NO: 29131 - protein, 10 aa, Homo sapiens [sequence omitted]

SEQ ID NO: 29132 - protein, 22 aa, Homo sapiens
CAGYYDSSVYDYGGGSLPFDLW

SEQ ID NO: 29133 - protein, 16 aa, Homo sapiens
CAREDGAGNFPTPDYW

SEQ ID NO: 29134 - protein, 18 aa, Homo sapiens
CARTMTTVSFYYYYMDVW

SEQ ID NO: 29135 - protein, 16 aa, Homo sapiens
CAREKVDDNWHYVGYW

SEQ ID NO: 29136 - protein, 17 aa, Homo sapiens
CAKGDTALVPYNWFDPW

SEQ ID NO: 29137 - protein, 16 aa, Homo sapiens
CAKEATWSFLYFFDSW

SEQ ID NO: 29138 - protein, 23 aa, Homo sapiens
CVRDLRVYSNLPRTPRYYYMDVW

SEQ ID NO: 29139 - protein, 20 aa, Homo sapiens
CARFPPYYSDISGQRAFDIW

SEQ ID NO: 29140 - protein, 16 aa, Homo sapiens
CAREGRERAGTVNDYW

SEQ ID NO: 29141 - protein, 19 aa, Homo sapiens
CAKDRGEYYYDSSGYYHYW

SEQ ID NO: 29142 - protein, 15 aa, Homo sapiens
CARSYGYTFGQIDYW

SEQ ID NO: 29143 - protein, 16 aa, Homo sapiens
CAQGGGYSGSYLFDYW

SEQ ID NO: 29144 - protein, 17 aa, Homo sapiens
CTTYFDFWSAYYHFDYW

SEQ ID NO: 29145 - protein, 13 aa, Homo sapiens
CASAYSYGNIDYW

SEQ ID NO: 29146 - protein, 14 aa, Homo sapiens
CARPNYGDYYFHFW

SEQ ID NO: 29147 - protein, 17 aa, Homo sapiens
CAKDLRHWDGHDAFDIW

SEQ ID NO: 29148 - protein, 18 aa, Homo sapiens
CAKDYSGNDISDSAFEYW

SEQ ID NO: 29149 - protein, 18 aa, Homo sapiens
CARGYSYGYGGMDYFDYW

SEQ ID NO: 29150 - protein, 15 aa, Homo sapiens
CARMIVAGYWYFDIW

SEQ ID NO: 29151 - protein, 22 aa, Homo sapiens
CARGVAAGGTGFGYYYYYMDVW

SEQ ID NO: 29152 - protein, 18 aa, Homo sapiens
CSVLAAAGGVGPPEFDYW

SEQ ID NO: 29153 - protein, 12 aa, Homo sapiens
CAKERVDGMDVW

SEQ ID NO: 29154 - protein, 22 aa, Homo sapiens
CAKAEYNWNDRQIYYYYGMDVW

SEQ ID NO: 29155 - protein, 20 aa, Homo sapiens
CAKDSVPRNGDHSATFFDYW

SEQ ID NO: 29156 - protein, 14 aa, Homo sapiens
CARPLYSSSFFVYW

SEQ ID NO: 29157 - protein, 16 aa, Homo sapiens
CARASLGSLERPADYW

SEQ ID NO: 29158 - protein, 18 aa, Homo sapiens
CARDQRTANGWPCASDVW

SEQ ID NO: 29159 - protein, 18 aa, Homo sapiens
CAKDVGNHYYYYYGMDVW

SEQ ID NO: 29160 - protein, 14 aa, Homo sapiens
CARHDISGTHFDYW

SEQ ID NO: 29161 - protein, 26 aa, Homo sapiens
CARSGGYCSGGSCYSTREDLNWFDPW

SEQ ID NO: 29162 - protein, 15 aa, Homo sapiens
CARWSGYRQGAFDIW

SEQ ID NO: 29163 - protein, 17 aa, Homo sapiens
CAHRQGIVGFTDAFDFW

SEQ ID NO: 29164 - protein, 14 aa, Homo sapiens
CAREREGAIRFDYW

SEQ ID NO: 29165 - protein, 19 aa, Homo sapiens
CARGGLPNGDTSTWYFDYW

SEQ ID NO: 29166 - protein, 22 aa, Homo sapiens
CAGAPHGYCRGGDCSVERMDYW

SEQ ID NO: 29167 - protein, 14 aa, Homo sapiens
CARREKDGGEVDYW

SEQ ID NO: 29168 - protein, 20 aa, Homo sapiens
CAKAPPGGWLWRDKYYFDYW

SEQ ID NO: 29169 - protein, 15 aa, Homo sapiens
CARTEAGLIINPDYW

SEQ ID NO: 29170 - protein, 24 aa, Homo sapiens
CASKGGMPYDSSGYYYYYYGMDVW

SEQ ID NO: 29171 - protein, 12 aa, Homo sapiens
CFTSSWSYLDYW

SEQ ID NO: 29172 - protein, 23 aa, Homo sapiens
CARDLTPYDSSGYYYVHDAFDIW

SEQ ID NO: 29173 - protein, 23 aa, Homo sapiens
CVRHTLPPFVWGSGTQLPYFDLW

SEQ ID NO: 29174 - protein, 17 aa, Homo sapiens
CARSDYGSGTDNWFDHW

SEQ ID NO: 29175 - protein, 26 aa, Homo sapiens
CARENGIVVPPSSISKTGLPIGIDYW

SEQ ID NO: 29176 - protein, 12 aa, Homo sapiens
CARLSHSRFDPW

SEQ ID NO: 29177 - protein, 16 aa, Homo sapiens
CASGIAAAGKGLGDYW

SEQ ID NO: 29178 - protein, 23 aa, Homo sapiens
CARGGYCSRTSCYASLKNWLDPW

SEQ ID NO: 29179 - protein, 22 aa, Homo sapiens
CARGSETDNPGDYTETDALDLW

SEQ ID NO: 29180 - protein, 19 aa, Homo sapiens
CARDHQPLLYLYYYGMDVW

SEQ ID NO: 29181 - protein, 15 aa, Homo sapiens
CASDTSMVRDAFDIW

SEQ ID NO: 29182 - protein, 21 aa, Homo sapiens
CARTRISLEGWLREFDPLDVW

SEQ ID NO: 29183 - protein, 21 aa, Homo sapiens
CARGSHNYYDSSGYRYAFDIW

SEQ ID NO: 29184 - protein, 20 aa, Homo sapiens
CAKVGFITVVVAAPNYFDYW

SEQ ID NO: 29185 - protein, 23 aa, Homo sapiens
CARLGVHYDYVWGSYRSNWFDPW

SEQ ID NO: 29186 - protein, 19 aa, Homo sapiens
CARGAVVVSSIGPDHFDYW

SEQ ID NO: 29187 - protein, 21 aa, Homo sapiens
CARDLSRDWDDYGDDDAFDIW

SEQ ID NO: 29188 - protein, 15 aa, Homo sapiens
CAKVPIYGENDIDYW

SEQ ID NO: 29189 - protein, 18 aa, Homo sapiens
CAKDFWRRGIAAACPDYW

SEQ ID NO: 29190 - protein, 16 aa, Homo sapiens
CVKDRYYIYYHGMDVW

SEQ ID NO: 29191 - protein, 15 aa, Homo sapiens
CVSLVETADLAFDVW

SEQ ID NO: 29192 - protein, 22 aa, Homo sapiens
CAKDGDRAVRPSALTYNWFDTW

SEQ ID NO: 29193 - protein, 14 aa, Homo sapiens
CARAEWLRGDFDYW

SEQ ID NO: 29194 - protein, 21 aa, Homo sapiens
CATTTPHCSSTSCYSNWFDPW

SEQ ID NO: 29195 - protein, 16 aa, Homo sapiens
CARLGDWDISGYRDYW

SEQ ID NO: 29196 - protein, 19 aa, Homo sapiens
CARFAVVGIPLLYNWFDPW

SEQ ID NO: 29197 - protein, 18 aa, Homo sapiens
CATARQEYMTTVTVLDYW

SEQ ID NO: 29198 - protein, 16 aa, Homo sapiens
CAAFDIMTGYGAFDVW

SEQ ID NO: 29199 - protein, 18 aa, Homo sapiens
CTRQSAMAIHGGSWFDPW

SEQ ID NO: 29200 - protein, 15 aa, Homo sapiens
CARDWGSSSWYLDYW

SEQ ID NO: 29201 - protein, 17 aa, Homo sapiens
CARDAPFTGGGYYFDYW

SEQ ID NO: 29202 - protein, 31 aa, Homo sapiens
CARHGGPSYYDFWNGHYIGGSQDAYYYMDVW

SEQ ID NO: 29203 - protein, 18 aa, Homo sapiens
CARAGNYGSASYNWFDPW

SEQ ID NO: 29204 - protein, 20 aa, Homo sapiens
CAKGHYYDSNYYSMYYFDYW

SEQ ID NO: 29205 - protein, 17 aa, Homo sapiens
CARDHADFDGGGWFDPW

SEQ ID NO: 29206 - protein, 20 aa, Homo sapiens
CARIPPCSDDCFSPYYFDSW

SEQ ID NO: 29207 - protein, 18 aa, Homo sapiens
CARAKYTFGGHPIVFDYW

SEQ ID NO: 29208 - protein, 15 aa, Homo sapiens
CARHETYGDTSFDYW

SEQ ID NO: 29209 - protein, 16 aa, Homo sapiens
CARHPYSGTYWVFDYW

SEQ ID NO: 29210 - protein, 14 aa, Homo sapiens
CARRSRWGYYFDGW

SEQ ID NO: 29211 - protein, 14 aa, Homo sapiens
CAREGIVVPWFDPW

SEQ ID NO: 29212 - protein, 24 aa, Homo sapiens
CARGRRDMIVVVITTRYYYGMDVW

SEQ ID NO: 29213 - protein, 28 aa, Homo sapiens
CVKANVTAVAGTGPSPKIYYYYYGMDVW

SEQ ID NO: 29214 - protein, 17 aa, Homo sapiens
CAHTEALEMGEYYFDYW

SEQ ID NO: 29215 - protein, 18 aa, Homo sapiens
CMKDPSTSYHGQGWFDPW

SEQ ID NO: 29216 - protein, 13 aa, Homo sapiens
CARDRPRWNFDYW

SEQ ID NO: 29217 - protein, 20 aa, Homo sapiens
CVKEHYYYDSSGYYRYFDLW

SEQ ID NO: 29218 - protein, 18 aa, Homo sapiens
CVREHSGGYAPIAKFDYW

SEQ ID NO: 29219 - protein, 18 aa, Homo sapiens
CARLGSLTSGYYSHFDYW

SEQ ID NO: 29220 - protein, 17 aa, Homo sapiens
CVKTRGSSSTLYAMDVW

SEQ ID NO: 29221 - protein, 13 aa, Homo sapiens
CQHYYNWPPRFTF

SEQ ID NO: 29222 - protein, 14 aa, Homo sapiens
CARRRSGSGAVDYW

SEQ ID NO: 29223 - protein, 21 aa, Homo sapiens
CARHKAPRPGPYSSGWYGDYW

SEQ ID NO: 29224 - protein, 18 aa, Homo sapiens
CARDSYYDGSGKERFDYW

SEQ ID NO: 29225 - protein, 21 aa, Homo sapiens
CARGKPVVTQGFYYYYYMDVW

SEQ ID NO: 29226 - protein, 15 aa, Homo sapiens
CTKDYGDHYNWFDSW

SEQ ID NO: 29227 - protein, 18 aa, Homo sapiens
CVRHIPPRPDYGDYFDYW

SEQ ID NO: 29228 - protein, 19 aa, Homo sapiens
CSRLSYSDILTVSGTFDFW

SEQ ID NO: 29229 - protein, 16 aa, Homo sapiens
CTKDVLRGVGAQFDHW

SEQ ID NO: 29230 - protein, 18 aa, Homo sapiens
CAKGIAARYGYYYGMDVW

SEQ ID NO: 29231 - protein, 14 aa, Homo sapiens [sequence omitted]

SEQ ID NO: 29232 - protein, 16 aa, Homo sapiens
CAGGDWEGLQGYFDYW

SEQ ID NO: 29233 - protein, 19 aa, Homo sapiens
CARYGIAPTGAFTYYIDYW

SEQ ID NO: 29234 - protein, 25 aa, Homo sapiens
CARAHIPRHYQDINGFRNSDSFDVW

SEQ ID NO: 29235 - protein, 17 aa, Homo sapiens
CARDRGGDYMGHWFDPW

SEQ ID NO: 29236 - protein, 27 aa, Homo sapiens
CARETLHDFWRGHYESLDFYYYGMDVW

SEQ ID NO: 29237 - protein, 15 aa, Homo sapiens
CALGATRKDDAFDIW

SEQ ID NO: 29238 - protein, 20 aa, Homo sapiens
CVTGGGGCGGDCYWYYFDYW

SEQ ID NO: 29239 - protein, 22 aa, Homo sapiens
CARRNFNILTGYYNVGGGDDYW

SEQ ID NO: 29240 - protein, 17 aa, Homo sapiens
CARDSGSGWSTDAFHIW

SEQ ID NO: 29241 - protein, 14 aa, Homo sapiens
CARQLPSQWLFDSW

SEQ ID NO: 29242 - protein, 18 aa, Homo sapiens
CARDRGYSGWYSRFLDYW

SEQ ID NO: 29243 - protein, 27 aa, Homo sapiens
CARESPHHCSSTSCYERHYYYYGMDVW

SEQ ID NO: 29244 - protein, 19 aa, Homo sapiens
CAADPLYYYDSSGFRFDYW

SEQ ID NO: 29245 - protein, 18 aa, Homo sapiens
CARAPYFYDSRAFYYSYW

SEQ ID NO: 29246 - protein, 18 aa, Homo sapiens
CAKEKHRSSSGNDAFDIW

SEQ ID NO: 29247 - protein, 17 aa, Homo sapiens
CARQGDYYDSSGYYDYW

SEQ ID NO: 29248 - protein, 17 aa, Homo sapiens
CARQWSLFGKLTYFDSW

SEQ ID NO: 29249 - protein, 16 aa, Homo sapiens
CAKDKSQQPDYYFDYW

SEQ ID NO: 29250 - protein, 14 aa, Homo sapiens
CARLSDIAAHPDYW

SEQ ID NO: 29251 - protein, 23 aa, Homo sapiens
CAKDGPLFCSGACYSAGGYFDPW

SEQ ID NO: 29252 - protein, 26 aa, Homo sapiens
CARDLGMGYDYVWGSYRNYYYGMDVW

SEQ ID NO: 29253 - protein, 20 aa, Homo sapiens
CARETYELVSHSRSYYFDYW

SEQ ID NO: 29254 - protein, 17 aa, Homo sapiens
CARGSHSGSEGDAFDIW

SEQ ID NO: 29255 - protein, 22 aa, Homo sapiens
CAKGITGTTSKYYEYYYGMDVW

SEQ ID NO: 29256 - protein, 21 aa, Homo sapiens
CARDRHESSGFHFYVGAFDIW

SEQ ID NO: 29257 - protein, 17 aa, Homo sapiens
CARERGKQFRIDWFDPW

SEQ ID NO: 29258 - protein, 21 aa, Homo sapiens
CARDSNYDVLTEYYIHYCDYW

SEQ ID NO: 29259 - protein, 22 aa, Homo sapiens
CARDLWITMIVVVTIPGAFDIW

SEQ ID NO: 29260 - protein, 16 aa, Homo sapiens
CAKDERGVTPPHFDYW

SEQ ID NO: 29261 - protein, 14 aa, Homo sapiens
CAKAPRDWKQLDYW

SEQ ID NO: 29262 - protein, 15 aa, Homo sapiens
CARLRWLQFRSFDYW

SEQ ID NO: 29263 - protein, 23 aa, Homo sapiens
CATATVGATTVPRNYYYHYLDVW

SEQ ID NO: 29264 - protein, 19 aa, Homo sapiens
CARGGVVPVDYYFYYMDVW

SEQ ID NO: 29265 - protein, 18 aa, Homo sapiens
CAKLYLSTWSRGNWFDPW

SEQ ID NO: 29266 - protein, 18 aa, Homo sapiens
CATIPTYSSSWYKWIDYW

SEQ ID NO: 29267 - protein, 17 aa, Homo sapiens
CVKDRVAAAGTNWFDPW

SEQ ID NO: 29268 - protein, 21 aa, Homo sapiens
CARVSYSAWARTPTHWYFDLW

SEQ ID NO: 29269 - protein, 20 aa, Homo sapiens
CTTATIRYCSGGSCLYFDIW

SEQ ID NO: 29270 - protein, 13 aa, Homo sapiens
CASAEEVVYFDYW

SEQ ID NO: 29271 - protein, 31 aa, Homo sapiens
CAKDPRYYDFWSGYAGGQPSGGYGYYGMDVW

SEQ ID NO: 29272 - protein, 21 aa, Homo sapiens
CARQSPYQEIWSDHFRWFDPW

SEQ ID NO: 29273 - protein, 17 aa, Homo sapiens
CAGGRRRGSGYPVFDYW

SEQ ID NO: 29274 - protein, 24 aa, Homo sapiens
CAKGSAESGYSSGWYIYYYYMDVW

SEQ ID NO: 29275 - protein, 19 aa, Homo sapiens
CARTYCSSTSCYLDAFDIW

SEQ ID NO: 29276 - protein, 14 aa, Homo sapiens
CARFPNDWNWFDPW

SEQ ID NO: 29277 - protein, 14 aa, Homo sapiens
CARTVREYLSFDYW

SEQ ID NO: 29278 - protein, 24 aa, Homo sapiens
CARGHDWGTIFGVVILGNNWFDPW

SEQ ID NO: 29279 - protein, 24 aa, Homo sapiens
CARRESHSYDSSGYFVDPYYFDFW

SEQ ID NO: 29280 - protein, 18 aa, Homo sapiens
CARGGYGDSYYYYALDVW

SEQ ID NO: 29281 - protein, 18 aa, Homo sapiens
CAHTGTDYDDHEEGFDYW

SEQ ID NO: 29282 - protein, 22 aa, Homo sapiens
CAADRSSSSTSCSSTCFWFDPW

SEQ ID NO: 29283 - protein, 19 aa, Homo sapiens
CARDSGGGYDLYCYYMDVW

SEQ ID NO: 29284 - protein, 24 aa, Homo sapiens
CATSLPYTNWDRGPLNYYYYMDVW

SEQ ID NO: 29285 - protein, 19 aa, Homo sapiens
CARRGSSTANSYNRYFDPW

SEQ ID NO: 29286 - protein, 18 aa, Homo sapiens
CARVNYYDSSGYLPPDYW

SEQ ID NO: 29287 - protein, 20 aa, Homo sapiens
CAKGGGAYDFAYYYYGMDVW

SEQ ID NO: 29288 - protein, 13 aa, Homo sapiens
CAKFSSWLGVDYW

SEQ ID NO: 29289 - protein, 15 aa, Homo sapiens
CARSVLMNNYAMDVW

SEQ ID NO: 29290 - protein, 19 aa, Homo sapiens
CVRHAVVAARPRGDYFDSW

SEQ ID NO: 29291 - protein, 18 aa, Homo sapiens
CARGDHAVGATTGWFDPW

SEQ ID NO: 29292 - protein, 14 aa, Homo sapiens
CARIYNYFYYIDAW

SEQ ID NO: 29293 - protein, 18 aa, Homo sapiens
CARDQGRDGYNSDWFDPW

SEQ ID NO: 29294 - protein, 25 aa, Homo sapiens
CVTNKGLRYCSGGRCYRTGSWFDPW

SEQ ID NO: 29295 - protein, 19 aa, Homo sapiens
CGGPTGTTTITRLKAFDIW

SEQ ID NO: 29296 - protein, 20 aa, Homo sapiens
CAREVGYSYAYHQTNWFDPW

SEQ ID NO: 29297 - protein, 17 aa, Homo sapiens
CARVDSRVVVAAQFDPW

SEQ ID NO: 29298 - protein, 17 aa, Homo sapiens
CARARQVGMTPEYFQNW

SEQ ID NO: 29299 - protein, 20 aa, Homo sapiens
CARDRPGYGDSSSPHAFDIW

SEQ ID NO: 29300 - protein, 20 aa, Homo sapiens
CAADPVAGIGDYYYYGMDVW

SEQ ID NO: 29301 - protein, 13 aa, Homo sapiens
CSWSMPGRSNDYW

SEQ ID NO: 29302 - protein, 17 aa, Homo sapiens
CATDGYNWRREYYFNSW

SEQ ID NO: 29303 - protein, 21 aa, Homo sapiens
CARGLRYCSGGSCHGDWFDPW

SEQ ID NO: 29304 - protein, 14 aa, Homo sapiens
CAKGYPYSGSSDYW

SEQ ID NO: 29305 - protein, 19 aa, Homo sapiens
CATGGGNAIYYYYYYMDVW

SEQ ID NO: 29306 - protein, 22 aa, Homo sapiens
CAKSMVPADFPNDYYYYGMDVW

SEQ ID NO: 29307 - protein, 10 aa, Homo sapiens
CYQYFNWPTF

SEQ ID NO: 29308 - protein, 20 aa, Homo sapiens
CAKEVYGGYSYGYPYYFDYW

SEQ ID NO: 29309 - protein, 28 aa, Homo sapiens
CAKDLLGRRAPIAGAIRRGWQKYNFDYW

SEQ ID NO: 29310 - protein, 15 aa, Homo sapiens
CARLKAPPYWYFDLW

SEQ ID NO: 29311 - protein, 16 aa, Homo sapiens
CAKANSGSRLDAFDIW

SEQ ID NO: 29312 - protein, 19 aa, Homo sapiens
CASLRYSSSWYGDDAFDIW

SEQ ID NO: 29313 - protein, 20 aa, Homo sapiens
CARLPYWNDDGYYYYGLDVW

SEQ ID NO: 29314 - protein, 15 aa, Homo sapiens
CSSRDSSVNHLEVVF

SEQ ID NO: 29315 - protein, 16 aa, Homo sapiens
CARDRIAAAGKAFDIW

SEQ ID NO: 29316 - protein, 12 aa, Homo sapiens
CQQYGGSSAVTF

SEQ ID NO: 29317 - protein, 21 aa, Homo sapiens
CARVIRDYYGSGSYSYYFDYW

SEQ ID NO: 29318 - protein, 21 aa, Homo sapiens
CARAYRGYSYTSTMFNWFDTW

SEQ ID NO: 29319 - protein, 15 aa, Homo sapiens
CARAEWKDHNSFDLW

SEQ ID NO: 29320 - protein, 18 aa, Homo sapiens
CARLTRSGSPPYYYMDVW

SEQ ID NO: 29321 - protein, 16 aa, Homo sapiens
CAATRAIGWELQFDYW

SEQ ID NO: 29322 - protein, 15 aa, Homo sapiens
CARISTGYYKEFDYW

SEQ ID NO: 29323 - protein, 19 aa, Homo sapiens
CARESIVVVPADENWFDPW

SEQ ID NO: 29324 - protein, 19 aa, Homo sapiens
CVKGDTIGYYLSRYYFDYW

SEQ ID NO: 29325 - protein, 21 aa, Homo sapiens
CARDGPAVTPMAYYYYYMDVW

SEQ ID NO: 29326 - protein, 16 aa, Homo sapiens
CARGAGGFNYWYFHLW

SEQ ID NO: 29327 - protein, 16 aa, Homo sapiens
CAIATRRYGDYTFDYW

SEQ ID NO: 29328 - protein, 18 aa, Homo sapiens
CAIHRLTIFGVVTLFDPW

SEQ ID NO: 29329 - protein, 21 aa, Homo sapiens
CARQRRYYHDSGGYYWFFDLW

SEQ ID NO: 29330 - protein, 21 aa, Homo sapiens
CARAYCSGYNCFSGDDAFDMW

SEQ ID NO: 29331 - protein, 11 aa, Homo sapiens
CAAGVDTFDYW

SEQ ID NO: 29332 - protein, 20 aa, Homo sapiens
CARAPYGGDFVVEQYYFDFW

SEQ ID NO: 29333 - protein, 14 aa, Homo sapiens
CAKVAYTPTYFDDW

SEQ ID NO: 29334 - protein, 18 aa, Homo sapiens
CTRDPSYSSTWPEYFDYW

SEQ ID NO: 29335 - protein, 18 aa, Homo sapiens
CAAEPQGEYYYYYGMDVW

SEQ ID NO: 29336 - protein, 13 aa, Homo sapiens
CVHRPSTPYFDYW

SEQ ID NO: 29337 - protein, 14 aa, Homo sapiens
CAREKRADRWFGPW

SEQ ID NO: 29338 - protein, 17 aa, Homo sapiens
CATAMYDFWGSYAADYW

SEQ ID NO: 29339 - protein, 15 aa, Homo sapiens
CARMHSSGYGGWDYW

SEQ ID NO: 29340 - protein, 26 aa, Homo sapiens
CARDRRGLGYCSGGSCYPSYNWFDPW

SEQ ID NO: 29341 - protein, 17 aa, Homo sapiens
CARGHDYGDYENWFDPW

SEQ ID NO: 29342 - protein, 15 aa, Homo sapiens
CARDLGYSSSVEDYW

SEQ ID NO: 29343 - protein, 24 aa, Homo sapiens
CARAPKYITMVRGTYYYYYYMDVW

SEQ ID NO: 29344 - protein, 19 aa, Homo sapiens
CARDRRYDYGDFDWYFDLW

SEQ ID NO: 29345 - protein, 19 aa, Homo sapiens
CVKGSDLEWLLLPQYFDYW

SEQ ID NO: 29346 - protein, 16 aa, Homo sapiens
CARTIIDRERSPFDYW

SEQ ID NO: 29347 - protein, 24 aa, Homo sapiens
CASWENTIFGVVIRKQDPYYFDYW

SEQ ID NO: 29348 - protein, 18 aa, Homo sapiens
CARHDFSTVAASNWFAPW

SEQ ID NO: 29349 - protein, 20 aa, Homo sapiens
CATLDYYDYSGRPSRAFGYW

SEQ ID NO: 29350 - protein, 22 aa, Homo sapiens
CAKATYMYESSGYQDTNYFDDW

SEQ ID NO: 29351 - protein, 22 aa, Homo sapiens
CARGRRTVIVVVNYYYYYMDVW

SEQ ID NO: 29352 - protein, 15 aa, Homo sapiens
CARRAVVGAPHFDSW

SEQ ID NO: 29353 - protein, 13 aa, Homo sapiens
CAKEIRRGAFDYW

SEQ ID NO: 29354 - protein, 25 aa, Homo sapiens
CAREWVEYCSGGSCYYSYYYGMDVW

SEQ ID NO: 29355 - protein, 19 aa, Homo sapiens
CARVWRLGYPAFWYYMDIW

SEQ ID NO: 29356 - protein, 20 aa, Homo sapiens
CARWGLAAAKNYHHAAMDVW

SEQ ID NO: 29357 - protein, 22 aa, Homo sapiens
CAHSGYYYDSSGYYVWYYFDYW

SEQ ID NO: 29358 - protein, 16 aa, Homo sapiens
CARDLRDGYNYAFDIW

SEQ ID NO: 29359 - protein, 25 aa, Homo sapiens
CARDRPRDRYSSGYYYYYYYGMDVW

SEQ ID NO: 29360 - protein, 12 aa, Homo sapiens
CQHYNSYSQFTF

SEQ ID NO: 29361 - protein, 21 aa, Homo sapiens
CARELDKIRVVVAATVGFDAW

SEQ ID NO: 29362 - protein, 21 aa, Homo sapiens
CTRDTEYYDNSGYYYPRFGYW

SEQ ID NO: 29363 - protein, 16 aa, Homo sapiens
CARDPRGYSYGLVDYW

SEQ ID NO: 29364 - protein, 11 aa, Homo sapiens
CAAYHSYIDVW

SEQ ID NO: 29365 - protein, 16 aa, Homo sapiens
CASTQLTRNSDAFDIW

SEQ ID NO: 29366 - protein, 17 aa, Homo sapiens
CAKHADPGVDITNFDNW

SEQ ID NO: 29367 - protein, 22 aa, Homo sapiens
CAKQIGSELRGEAVYYYGMDVW

SEQ ID NO: 29368 - protein, 12 aa, Homo sapiens
CQPYDILPMYSF

SEQ ID NO: 29369 - protein, 13 aa, Homo sapiens
CATSGLSGYLEYW

SEQ ID NO: 29370 - protein, 17 aa, Homo sapiens
CARSGFYASNLGWFDPW

SEQ ID NO: 29371 - protein, 13 aa, Homo sapiens
CVRGGGVHWFDPW

SEQ ID NO: 29372 - protein, 17 aa, Homo sapiens
CASGRSYGEPRSPFDYW

SEQ ID NO: 29373 - protein, 17 aa, Homo sapiens
CVKDPSPITPTYYFDYW

SEQ ID NO: 29374 - protein, 17 aa, Homo sapiens
CAVPRVGVTTPYYFDYW

SEQ ID NO: 29375 - protein, 18 aa, Homo sapiens
CAKLELGRYSGHDYLGYW

SEQ ID NO: 29376 - protein, 21 aa, Homo sapiens
CARGPHIVVVTAIFQNWFDPW

SEQ ID NO: 29377 - protein, 17 aa, Homo sapiens
CARDVWFGELSTSDDYW

SEQ ID NO: 29378 - protein, 21 aa, Homo sapiens
CARDPGKQQLPYYYYYGMDVW

SEQ ID NO: 29379 - protein, 14 aa, Homo sapiens
CQVGDSSSDPYYVF

SEQ ID NO: 29380 - protein, 25 aa, Homo sapiens
CARDRPKQHLGPDHYDHHYYYMDVW

SEQ ID NO: 29381 - protein, 17 aa, Homo sapiens
CVRGVMTGSYYSGFDQW

SEQ ID NO: 29382 - protein, 16 aa, Homo sapiens
CVRDRSIAVADPLDYW

SEQ ID NO: 29383 - protein, 35 aa, Homo sapiens
CAKKSQYLQMSSLRAEDTALYYCAKGRKSWYFDFW

SEQ ID NO: 29384 - protein, 24 aa, Homo sapiens
CARVSHRPRITMIVGGRLGYFDYW

SEQ ID NO: 29385 - protein, 14 aa, Homo sapiens
CARERLHDYGFEYW

SEQ ID NO: 29386 - protein, 11 aa, Homo sapiens
CAKEWQQLDYW

SEQ ID NO: 29387 - protein, 25 aa, Homo sapiens
CARNGQYYYDSSGYSVYYYYGMDVW

SEQ ID NO: 29388 - protein, 24 aa, Homo sapiens
CARGAPPFGESPPFYYYYYGMDVW

SEQ ID NO: 29389 - protein, 17 aa, Homo sapiens
CARHDLRQLRWNGFDSW

SEQ ID NO: 29390 - protein, 16 aa, Homo sapiens
CSIIDELELRHWFDPW

SEQ ID NO: 29391 - protein, 23 aa, Homo sapiens
CARGQGGYPYGTYNSYYYYMDVW

SEQ ID NO: 29392 - protein, 18 aa, Homo sapiens
CARDRGAWSARPQYFDYW

SEQ ID NO: 29393 - protein, 22 aa, Homo sapiens
CARGDILTGYYNYRYSYWFDPW

SEQ ID NO: 29394 - protein, 19 aa, Homo sapiens
CARDGYGSGSYRIYYFDYW

SEQ ID NO: 29395 - protein, 28 aa, Homo sapiens
CARGHIFVLPAPILGLGPFYTSYYMDVW

SEQ ID NO: 29396 - protein, 21 aa, Homo sapiens
CTKDVLVGGGTVTTSSSFDYW

SEQ ID NO: 29397 - protein, 20 aa, Homo sapiens
CAGVSPTMIVVLVGDAFDIW

SEQ ID NO: 29398 - protein, 13 aa, Homo sapiens
CMQALQGPDMYTF

SEQ ID NO: 29399 - protein, 14 aa, Homo sapiens
CARPGPISLGFDPW

SEQ ID NO: 29400 - protein, 14 aa, Homo sapiens
CARDLVGGRPLDYW

SEQ ID NO: 29401 - protein, 17 aa, Homo sapiens
CASQDGYNSNVGYIDYW

SEQ ID NO: 29402 - protein, 16 aa, Homo sapiens
CARDYKNSSGNWFDPW

SEQ ID NO: 29403 - protein, 36 aa, Homo sapiens
CLRAEDTAVYYCAKENHEGYYDSSGYYFFFPDLDYW

SEQ ID NO: 29404 - protein, 22 aa, Homo sapiens
CARGWDFCTSTSCYRFNAFDVW

SEQ ID NO: 29405 - protein, 17 aa, Homo sapiens
CAKGAGYSDFDWYFDLW

SEQ ID NO: 29406 - protein, 23 aa, Homo sapiens
CARHETSGGDYDGYYYYYYMDVW

SEQ ID NO: 29407 - protein, 21 aa, Homo sapiens
CARHARITIFGVVIMGAFDIW

SEQ ID NO: 29408 - protein, 13 aa, Homo sapiens
CARMVSGSYYDYW

SEQ ID NO: 29409 - protein, 17 aa, Homo sapiens
CARHSRHLSRFYYFDYW

SEQ ID NO: 29410 - protein, 18 aa, Homo sapiens
CAKGLWIQLWYPHGFDYW

SEQ ID NO: 29411 - protein, 21 aa, Homo sapiens
CAKEYYSETYAHYGTPLFDYW

SEQ ID NO: 29412 - protein, 15 aa, Homo sapiens
CQSYDSSLSRLRVIF

SEQ ID NO: 29413 - protein, 24 aa, Homo sapiens
CARGIAAAQGPGRLYYYYYGLDVW

SEQ ID NO: 29414 - protein, 29 aa, Homo sapiens
CAHSLFPSCSTTKCYDGGENRGKNWFDSW

SEQ ID NO: 29415 - protein, 23 aa, Homo sapiens
CARELGTAMVSGSYYYYYGMDVW

SEQ ID NO: 29416 - protein, 25 aa, Homo sapiens
CAHRPALIYDYVWGSYRYGYHFDYW

SEQ ID NO: 29417 - protein, 24 aa, Homo sapiens
CAKDISGREMATISGYHYYGMDVW

SEQ ID NO: 29418 - protein, 22 aa, Homo sapiens
CARDRPYTIFGVVVASESVDYW

SEQ ID NO: 29419 - protein, 19 aa, Homo sapiens
CAIASDRGIMTTSTERDYW

SEQ ID NO: 29420 - protein, 15 aa, Homo sapiens
CARQSGYSYGYPDYW

SEQ ID NO: 29421 - protein, 19 aa, Homo sapiens
CATLYTSSLSYDNNYMDVW

SEQ ID NO: 29422 - protein, 17 aa, Homo sapiens
CSRGGWVPGETRSFDIW

SEQ ID NO: 29423 - protein, 18 aa, Homo sapiens
CARGPRYSTLNTFWFDPW

SEQ ID NO: 29424 - protein, 27 aa, Homo sapiens
CARNADGSTLVTTKPIRYAYFYYMDVW

SEQ ID NO: 29425 - protein, 23 aa, Homo sapiens
CARLGGAHSSNYYKESEGYFDYW

SEQ ID NO: 29426 - protein, 18 aa, Homo sapiens
CTTGVGYLYSYYYGMDVW

SEQ ID NO: 29427 - protein, 20 aa, Homo sapiens
CARDFRVGVYDSSGVVFDPW

SEQ ID NO: 29428 - protein, 18 aa, Homo sapiens
CAKGGLVVDLRAEYFQHW

SEQ ID NO: 29429 - protein, 16 aa, Homo sapiens
CAHMGDLVAAHSFDYW

SEQ ID NO: 29430 - protein, 20 aa, Homo sapiens
CAKTSCPDGHCHRFNWFDPW

SEQ ID NO: 29431 - protein, 18 aa, Homo sapiens
CARSDPLNDYTFWHFDLW

SEQ ID NO: 29432 - protein, 22 aa, Homo sapiens
CAHELGYCTTGVCSLGTYFDYW

SEQ ID NO: 29433 - protein, 17 aa, Homo sapiens
CARDRRQLGPYNWFDPW

SEQ ID NO: 29434 - protein, 15 aa, Homo sapiens
CNSRDSSSNHPSYVF

SEQ ID NO: 29435 - protein, 21 aa, Homo sapiens
CAKDVYYDSSGYYVGGAFDIW

SEQ ID NO: 29436 - protein, 16 aa, Homo sapiens
CATGSAYSSSYWFDPW

SEQ ID NO: 29437 - protein, 14 aa, Homo sapiens
CGRGGGGSTPFDYW

SEQ ID NO: 29438 - protein, 17 aa, Homo sapiens
CAKDRFTVTIRGWFDPW

SEQ ID NO: 29439 - protein, 17 aa, Homo sapiens
CARSPMITFGGAIFDSW

SEQ ID NO: 29440 - protein, 20 aa, Homo sapiens
CARDPLIVTSRIGFYSFDYW

SEQ ID NO: 29441 - protein, 16 aa, Homo sapiens
CARPSSGWPYWYFDLW

SEQ ID NO: 29442 - protein, 14 aa, Homo sapiens
CARMYSSLSNFDHW

SEQ ID NO: 29443 - protein, 18 aa, Homo sapiens
CVRRLYGDYGLPGAFDIW

SEQ ID NO: 29444 - protein, 19 aa, Homo sapiens
CARDTPRAATHPHWYFDLW

SEQ ID NO: 29445 - protein, 20 aa, Homo sapiens
CAKGHGIAFWSGNYNWFDPW

SEQ ID NO: 29446 - protein, 21 aa, Homo sapiens
CAKVFTFWSGYMTGQDAFDIW

SEQ ID NO: 29447 - protein, 23 aa, Homo sapiens
CARGKLVGASRTQYDYYYYMDVW

SEQ ID NO: 29448 - protein, 16 aa, Homo sapiens
CVRASPSSGYHFFDFW

SEQ ID NO: 29449 - protein, 19 aa, Homo sapiens
CATDHYDRSDYSGGAFDFW

SEQ ID NO: 29450 - protein, 18 aa, Homo sapiens
CAKDLELGRLPGGWFDPW

SEQ ID NO: 29451 - protein, 18 aa, Homo sapiens
CARDLSRRYSSKPKGDYW

SEQ ID NO: 29452 - protein, 28 aa, Homo sapiens
CTRDRHSRITIFGGAKKGGLYYYGMDVW

SEQ ID NO: 29453 - protein, 27 aa, Homo sapiens
CAKDGPRFLEWLYQWGNYYYYYGMDVW

SEQ ID NO: 29454 - protein, 17 aa, Homo sapiens
CVRHEPTYYNYYGMDVW

SEQ ID NO: 29455 - protein, 20 aa, Homo sapiens
CARLPHYYDSSGYSPSSDYW

SEQ ID NO: 29456 - protein, 22 aa, Homo sapiens
CARDPPDYGDHVPKPMYYFNYW

SEQ ID NO: 29457 - protein, 21 aa, Homo sapiens
CAKDKGDVLRFLEWLDAFDIW

SEQ ID NO: 29458 - protein, 22 aa, Homo sapiens
CARDLGYYYDSSGRSWNWFDPW

SEQ ID NO: 29459 - protein, 22 aa, Homo sapiens
CARNNYDFWSGYYHGQYYFDYW

SEQ ID NO: 29460 - protein, 22 aa, Homo sapiens
CARRVKNSWLAAGSRTVSFDYW

SEQ ID NO: 29461 - protein, 19 aa, Homo sapiens
CARVDSGFSYHYYSYMDVW

SEQ ID NO: 29462 - protein, 12 aa, Homo sapiens
CQQYYSASGLTF

SEQ ID NO: 29463 - protein, 13 aa, Homo sapiens
CARQLQLHSFDYW

SEQ ID NO: 29464 - protein, 27 aa, Homo sapiens
CARDVENYYDSSAYSSKRPHFYYMDVW

SEQ ID NO: 29465 - protein, 17 aa, Homo sapiens
CAREGTIAGLSDAFDIW

SEQ ID NO: 29466 - protein, 25 aa, Homo sapiens
CARGRSKISMIVVVITFQSYYFDYW

SEQ ID NO: 29467 - protein, 17 aa, Homo sapiens
CARDNGIRGQLAHFDYW

SEQ ID NO: 29468 - protein, 18 aa, Homo sapiens
CTTGDSDSWSGHYSFDYW

SEQ ID NO: 29469 - protein, 22 aa, Homo sapiens
CARDGVGKQLVPRYYYYYMDVW

SEQ ID NO: 29470 - protein, 23 aa, Homo sapiens
CAKDTPLIRANCNGDCYSSFDCW

SEQ ID NO: 29471 - protein, 13 aa, Homo sapiens
CARGVVAVYFDHW

SEQ ID NO: 29472 - protein, 21 aa, Homo sapiens
CAREYDSGGSHDPHYYYMDVW

SEQ ID NO: 29473 - protein, 15 aa, Homo sapiens
CARERVRTRGWFDPW

SEQ ID NO: 29474 - protein, 18 aa, Homo sapiens
CTTDIRLVYGDYVGFDFW

SEQ ID NO: 29475 - protein, 21 aa, Homo sapiens
CTTVEIFTYYYGSGSYGFDPW

SEQ ID NO: 29476 - protein, 14 aa, Homo sapiens
CARGVAAAGRFDPW

SEQ ID NO: 29477 - protein, 20 aa, Homo sapiens
CAMSRPNEMLMHEQNWFDPW

SEQ ID NO: 29478 - protein, 14 aa, Homo sapiens
CTRGNGYDDTFDYW

SEQ ID NO: 29479 - protein, 16 aa, Homo sapiens
CARDLMVRGVNLFDPW

SEQ ID NO: 29480 - protein, 15 aa, Homo sapiens
CASGFDGPNWYFDLW

SEQ ID NO: 29481 - protein, 16 aa, Homo sapiens
CAKDSRGLEIALFDYW

SEQ ID NO: 29482 - protein, 17 aa, Homo sapiens
CASSKDYGDYSHYFDYW

SEQ ID NO: 29483 - protein, 21 aa, Homo sapiens
CARGGLIAVAGRTKINWLDPW

SEQ ID NO: 29484 - protein, 17 aa, Homo sapiens
CAKYEDFFEDHYYFDFW

SEQ ID NO: 29485 - protein, 14 aa, Homo sapiens
CASLAVSGTIVDYW

SEQ ID NO: 29486 - protein, 19 aa, Homo sapiens
CARDPSLYYHSGTYYFDYW

SEQ ID NO: 29487 - protein, 17 aa, Homo sapiens
CAKAPKRHDYGDYFDYW

SEQ ID NO: 29488 - protein, 16 aa, Homo sapiens
CARDRGWELLGAIDVW

SEQ ID NO: 29489 - protein, 16 aa, Homo sapiens
CVKEAYSSRWSYFDSW

SEQ ID NO: 29490 - protein, 15 aa, Homo sapiens
CAGRRKTTAAWFDLW

SEQ ID NO: 29491 - protein, 18 aa, Homo sapiens
CAKDLLEWLSLGGYFEYW

SEQ ID NO: 29492 - protein, 16 aa, Homo sapiens
CARLHSRNYSPYFDSW

SEQ ID NO: 29493 - protein, 19 aa, Homo sapiens
CARDPSDSSGYHSTPPDYW

SEQ ID NO: 29494 - protein, 14 aa, Homo sapiens
CARVGSTSGAFDIW

SEQ ID NO: 29495 - protein, 21 aa, Homo sapiens
CARFRGAGSPAYGGYWYFDLW

SEQ ID NO: 29496 - protein, 18 aa, Homo sapiens
CARVLRDYSYYYYYMDVW

SEQ ID NO: 29497 - protein, 18 aa, Homo sapiens
CARYSYCGSDCYSVIDYW

SEQ ID NO: 29498 - protein, 23 aa, Homo sapiens
CARDNSHSTPQRVYYTYYYMDAW

SEQ ID NO: 29499 - protein, 19 aa, Homo sapiens
CAKDWIGRELPHLYYLDYW

SEQ ID NO: 29500 - protein, 18 aa, Homo sapiens
CASLPYYYDSSGSAFDIW

SEQ ID NO: 29501 - protein, 17 aa, Homo sapiens
CARDYCINGDCYYFDNW

SEQ ID NO: 29502 - protein, 22 aa, Homo sapiens
CARLNGDYGFTFYYYYYYMDVW

SEQ ID NO: 29503 - protein, 21 aa, Homo sapiens
CARAPRMDSSVWYGTGYFDYW

SEQ ID NO: 29504 - protein, 19 aa, Homo sapiens
CARDAPNSAGYDVYYFDYW

SEQ ID NO: 29505 - protein, 21 aa, Homo sapiens
CARDPAGYSYGLYYYYYMDVW

SEQ ID NO: 29506 - protein, 18 aa, Homo sapiens
CATNLAADYFDSSYFVHW

SEQ ID NO: 29507 - protein, 22 aa, Homo sapiens
CARDLGGRFLEYLFQPDAFDIW

SEQ ID NO: 29508 - protein, 16 aa, Homo sapiens
CARRDAYCGGDCFGYW

SEQ ID NO: 29509 - protein, 17 aa, Homo sapiens
CARQSCSSTSCYNFDYW

SEQ ID NO: 29510 - protein, 20 aa, Homo sapiens
CASNYYSSGSYYEYYGMDVW

SEQ ID NO: 29511 - protein, 24 aa, Homo sapiens
CAKEEGDRYYYDSSVYHPSPFDYW

SEQ ID NO: 29512 - protein, 19 aa, Homo sapiens
CVGWYYDESGDYSDGFDVW

SEQ ID NO: 29513 - protein, 18 aa, Homo sapiens
CARLPDYANYQGDWLDPW

SEQ ID NO: 29514 - protein, 21 aa, Homo sapiens
CAHSEETTVTSWEKPHFFDSW

SEQ ID NO: 29515 - protein, 24 aa, Homo sapiens
CTRHVDVSEEDYYDSTGYYLFDYW

SEQ ID NO: 29516 - protein, 15 aa, Homo sapiens
CAKEMNSNYGNTDYW

SEQ ID NO: 29517 - protein, 20 aa, Homo sapiens
CARDTGLGYCSGGSCYSGYW

SEQ ID NO: 29518 - protein, 17 aa, Homo sapiens
CARQCDYDNGDWGFDPW

SEQ ID NO: 29519 - protein, 21 aa, Homo sapiens
CARHPRGWLQLNYYYYYMDVW

SEQ ID NO: 29520 - protein, 13 aa, Homo sapiens
CARHQAGVPLDYW

SEQ ID NO: 29521 - protein, 16 aa, Homo sapiens
CAHRPFGIAVAGFDYW

SEQ ID NO: 29522 - protein, 24 aa, Homo sapiens
CARHLAYYDFWSGSDFYYYYMDVW

SEQ ID NO: 29523 - protein, 17 aa, Homo sapiens
CARVTHCSGWYRCLDYW

SEQ ID NO: 29524 - protein, 18 aa, Homo sapiens
CATPLYPGIAAAGIFDYW

SEQ ID NO: 29525 - protein, 20 aa, Homo sapiens
CARFASSPRGGYYREVFDYW

SEQ ID NO: 29526 - protein, 18 aa, Homo sapiens
CARSARPNYYYYYGMDVW

SEQ ID NO: 29527 - protein, 20 aa, Homo sapiens
CALEATGTVIIVSLDAFDIW

SEQ ID NO: 29528 - protein, 20 aa, Homo sapiens
CARYFMGMAVTTTSDYFDSW

SEQ ID NO: 29529 - protein, 18 aa, Homo sapiens
CARVDQMELSALSSFDLW

SEQ ID NO: 29530 - protein, 14 aa, Homo sapiens
CARDGDAGNWLDYW

SEQ ID NO: 29531 - protein, 23 aa, Homo sapiens
CARQKAPAAAGSFYYYYYYMDVW

SEQ ID NO: 29532 - protein, 22 aa, Homo sapiens
CAHRRGPEYSGSVVGNAAFDIW

SEQ ID NO: 29533 - protein, 21 aa, Homo sapiens
CARDYYDSSGYYYYYYGMDVW

SEQ ID NO: 29534 - protein, 13 aa, Homo sapiens
CARGTPDLSFDHW

SEQ ID NO: 29535 - protein, 15 aa, Homo sapiens
CQSADISDPYDDVVF

SEQ ID NO: 29536 - protein, 18 aa, Homo sapiens
CARRASRYGWEEYYFDYW

SEQ ID NO: 29537 - protein, 20 aa, Homo sapiens
CARTAQLRFVKYFFFQNDYW

SEQ ID NO: 29538 - protein, 18 aa, Homo sapiens
CAHSLLSGYSKSEGFDYW

SEQ ID NO: 29539 - protein, 19 aa, Homo sapiens
CAKDIGKSGSTQRLSFDSW

SEQ ID NO: 29540 - protein, 15 aa, Homo sapiens
CAKKVVRINGHFDYW

SEQ ID NO: 29541 - protein, 22 aa, Homo sapiens
CARDGVRDYDSSGYWGFWFDPW

SEQ ID NO: 29542 - protein, 22 aa, Homo sapiens
CARGVASGGYCTNDICYPFHYW

SEQ ID NO: 29543 - protein, 15 aa, Homo sapiens
CARGTWGQLVNFDYW

SEQ ID NO: 29544 - protein, 18 aa, Homo sapiens
CARAKEGSGYSPEWFDPW

SEQ ID NO: 29545 - protein, 15 aa, Homo sapiens
CAKLPPLWQLGFDYW

SEQ ID NO: 29546 - protein, 19 aa, Homo sapiens
CARDPYCGTTTCYSWFDPW

SEQ ID NO: 29547 - protein, 16 aa, Homo sapiens
CATVYAVVAATPPDYW

SEQ ID NO: 29548 - protein, 34 aa, Homo sapiens
CARHGLGDYDFWSGYYSRVASLLEGNYYYYMDVW

SEQ ID NO: 29549 - protein, 16 aa, Homo sapiens
CAKGSGFVLAAGIDYW

SEQ ID NO: 29550 - protein, 24 aa, Homo sapiens
CARAIWGRRQQVVRYNYYCYMDVW

SEQ ID NO: 29551 - protein, 17 aa, Homo sapiens
CAKHITIFDWFPAFDYW

SEQ ID NO: 29552 - protein, 13 aa, Homo sapiens
CTRVSPRWLPDYW

SEQ ID NO: 29553 - protein, 18 aa, Homo sapiens
CARDLGIAAAGTSTFDIW

SEQ ID NO: 29554 - protein, 23 aa, Homo sapiens
CAHMKFEAAILSGNYVYYAMDVW

SEQ ID NO: 29555 - protein, 15 aa, Homo sapiens
CVRTSNYGSSPFDYW

SEQ ID NO: 29556 - protein, 20 aa, Homo sapiens
CAISQGYGYFDWLLHSLDYW

SEQ ID NO: 29557 - protein, 15 aa, Homo sapiens
CARDGVGESFYSDYW

SEQ ID NO: 29558 - protein, 21 aa, Homo sapiens
CAKVGYYDSSGYHLGDYFDYW

SEQ ID NO: 29559 - protein, 11 aa, Homo sapiens
CATRLSIFDYW

SEQ ID NO: 29560 - protein, 26 aa, Homo sapiens
CASIVRRSTGRLRYFDWSQGGYFDYW

SEQ ID NO: 29561 - protein, 21 aa, Homo sapiens
CARDHTTMTFAGYYFYGMDVW

SEQ ID NO: 29562 - protein, 22 aa, Homo sapiens
CARDFSSESTAYYSLVRAFDLW

SEQ ID NO: 29563 - protein, 13 aa, Homo sapiens
CARWEQRVPHDYW

SEQ ID NO: 29564 - protein, 22 aa, Homo sapiens
CAKGQPWQQLDPFDYYYGMDVW

SEQ ID NO: 29565 - protein, 17 aa, Homo sapiens
CAKDFEWELPGYYFDYW

SEQ ID NO: 29566 - protein, 23 aa, Homo sapiens
CARVPNFDWLLSENYFYYGMDVW

SEQ ID NO: 29567 - protein, 12 aa, Homo sapiens
CKQRGNWPPITF

SEQ ID NO: 29568 - protein, 12 aa, Homo sapiens
CQQSYGNPALAF

SEQ ID NO: 29569 - protein, 16 aa, Homo sapiens
CAHIGSLPVGATFDYW

SEQ ID NO: 29570 - protein, 22 aa, Homo sapiens
CARDRGGLYSSGWYRLGRVDYW

SEQ ID NO: 29571 - protein, 20 aa, Homo sapiens
CARHYDSSGYIGGASDFDYW

SEQ ID NO: 29572 - protein, 22 aa, Homo sapiens
CAKDMGMYCSGGSCYSGIGDYW

SEQ ID NO: 29573 - protein, 21 aa, Homo sapiens
CARAPVWGELLWDGEDGMDVW

SEQ ID NO: 29574 - protein, 22 aa, Homo sapiens
CARERATSAPGLAQDSWFFDYW

SEQ ID NO: 29575 - protein, 16 aa, Homo sapiens
CAAVYSLSLNWYFDLW

SEQ ID NO: 29576 - protein, 26 aa, Homo sapiens
CARDEGDSGYSSRWYISPYYYGMDVW

SEQ ID NO: 29577 - protein, 25 aa, Homo sapiens
CARDGRTTYYYDSSGSYTYWYFDLW

SEQ ID NO: 29578 - protein, 14 aa, Homo sapiens
CARETDALECFDNW

SEQ ID NO: 29579 - protein, 22 aa, Homo sapiens
CARFGGYSGGWYKVDFNWFDPW

SEQ ID NO: 29580 - protein, 16 aa, Homo sapiens
CARWNGLEMNDWFDPW

SEQ ID NO: 29581 - protein, 23 aa, Homo sapiens
CARVFQSAPEHNVDVFDYYMDVW

SEQ ID NO: 29582 - protein, 17 aa, Homo sapiens
CATNSRPGLLHESFDVW

SEQ ID NO: 29583 - protein, 19 aa, Homo sapiens
CARTGLLVRGLIDFYFDYW

SEQ ID NO: 29584 - protein, 23 aa, Homo sapiens
CTRTPVLDYGDYKYSYYYGMDVW

SEQ ID NO: 29585 - protein, 17 aa, Homo sapiens
CAKGAGHIVLMVYLDYW

SEQ ID NO: 29586 - protein, 16 aa, Homo sapiens
CARLTQLLRYWYLDLW

SEQ ID NO: 29587 - protein, 22 aa, Homo sapiens
CARDGFRITIFGVVTHDAFDIW

SEQ ID NO: 29588 - protein, 26 aa, Homo sapiens
CAKVLCGFFGSTSCYLGYYYYGMDVW

SEQ ID NO: 29589 - protein, 19 aa, Homo sapiens
CARDSFPGASSGPRAFDIW

SEQ ID NO: 29590 - protein, 19 aa, Homo sapiens
CATLGYCSGDTCLSYFDYW

SEQ ID NO: 29591 - protein, 17 aa, Homo sapiens
CAKTFGGVIVPYYFDYW

SEQ ID NO: 29592 - protein, 21 aa, Homo sapiens
CARVVRGYSGYDLYYYYMDVW

SEQ ID NO: 29593 - protein, 19 aa, Homo sapiens
CALTVANYDFWSGYYPDYW

SEQ ID NO: 29594 - protein, 11 aa, Homo sapiens
CWGSLWESDYW

SEQ ID NO: 29595 - protein, 14 aa, Homo sapiens
CARGLYDYADFDHW

SEQ ID NO: 29596 - protein, 17 aa, Homo sapiens
CARDTAFTEAKGAFDSW

SEQ ID NO: 29597 - protein, 18 aa, Homo sapiens
CAKDRLWFGESSTIFDYW

SEQ ID NO: 29598 - protein, 15 aa, Homo sapiens
CARDSDGSGWSFDSW

SEQ ID NO: 29599 - protein, 22 aa, Homo sapiens
CARVSNYDFWSDLYDHYYMDVW

SEQ ID NO: 29600 - protein, 16 aa, Homo sapiens
CAKGHIYSSSSYFDSW

SEQ ID NO: 29601 - protein, 18 aa, Homo sapiens
CARDLSDIVVVEGAFDIW

SEQ ID NO: 29602 - protein, 14 aa, Homo sapiens
CMQALQTPRGGWTF

SEQ ID NO: 29603 - protein, 16 aa, Homo sapiens
CAKDVDSSSFWYSDLW

SEQ ID NO: 29604 - protein, 22 aa, Homo sapiens
CARDPKNVLLWFGESRGWFDPW

SEQ ID NO: 29605 - protein, 22 aa, Homo sapiens
CAKDLIVIAEYYYDSSGSLDYW

SEQ ID NO: 29606 - protein, 22 aa, Homo sapiens
CAKDIATKYQLLFLYYYGMDVW

SEQ ID NO: 29607 - protein, 18 aa, Homo sapiens
CARRHIRVVSATDGFDIW

SEQ ID NO: 29608 - protein, 16 aa, Homo sapiens
CARGGSERSGWDFDYW

SEQ ID NO: 29609 - protein, 19 aa, Homo sapiens
CAKQNTVTSTYYYYYMDVW

SEQ ID NO: 29610 - protein, 16 aa, Homo sapiens
CARGPDYGDYVQHDYW

SEQ ID NO: 29611 - protein, 25 aa, Homo sapiens
CARVPRIITMIVVVIPKKADAFDIW

SEQ ID NO: 29612 - protein, 19 aa, Homo sapiens
CARGQGPVAAIRRAWFDPW

SEQ ID NO: 29613 - protein, 17 aa, Homo sapiens
CARSTFIAVAGTGFDYW

SEQ ID NO: 29614 - protein, 18 aa, Homo sapiens
CARMGDGYNFGIDAFDIW

SEQ ID NO: 29615 - protein, 15 aa, Homo sapiens
CARDENNPHTDFDYW

SEQ ID NO: 29616 - protein, 13 aa, Homo sapiens
CARMSLGSGNDYW

SEQ ID NO: 29617 - protein, 16 aa, Homo sapiens
CARPTGTTVPRAFDIW

SEQ ID NO: 29618 - protein, 23 aa, Homo sapiens
CARLAHDYDGRRSPSTCFYMDVW

SEQ ID NO: 29619 - protein, 17 aa, Homo sapiens
CARGRYHPGSGSWFESW

SEQ ID NO: 29620 - protein, 20 aa, Homo sapiens
CARERSSGWYFHYYYGMDVW

SEQ ID NO: 29621 - protein, 16 aa, Homo sapiens
CARQTYSDYEIWFDPW

SEQ ID NO: 29622 - protein, 18 aa, Homo sapiens
CARERGGIYGTDWYFDLW

SEQ ID NO: 29623 - protein, 21 aa, Homo sapiens
CASSSDYHNSSNYYITPFEYW

SEQ ID NO: 29624 - protein, 13 aa, Homo sapiens
CASSYGHYYFDYW

SEQ ID NO: 29625 - protein, 22 aa, Homo sapiens
CARAPPTFRAVGNTVSWYFDLW

SEQ ID NO: 29626 - protein, 19 aa, Homo sapiens
CVRGEIGYCSGGSCIQDYW

SEQ ID NO: 29627 - protein, 11 aa, Homo sapiens
CHQSVILPFTF

SEQ ID NO: 29628 - protein, 14 aa, Homo sapiens
CARGPRPGRYFDHW

SEQ ID NO: 29629 - protein, 21 aa, Homo sapiens
CATNIVVEAADTPFGNYFDYW

SEQ ID NO: 29630 - protein, 21 aa, Homo sapiens
CARFRVRDFWSGYPTGWFDSW

SEQ ID NO: 29631 - protein, 20 aa, Homo sapiens
CAKDTHYYDTSVPSLGFDYW

SEQ ID NO: 29632 - protein, 20 aa, Homo sapiens
CARHWGIAAADTSLDYFDSW

SEQ ID NO: 29633 - protein, 22 aa, Homo sapiens
CAKEFFPGYSPGYSHPYLFDYW

SEQ ID NO: 29634 - protein, 15 aa, Homo sapiens
CAKDFSHGGNGVDYW

SEQ ID NO: 29635 - protein, 14 aa, Homo sapiens
CATDLGAQDAFNFW

SEQ ID NO: 29636 - protein, 16 aa, Homo sapiens
CARATYYYDSSPFDYW

SEQ ID NO: 29637 - protein, 22 aa, Homo sapiens
CASPNTYIAAAGPDYYYGMDVW

SEQ ID NO: 29638 - protein, 14 aa, Homo sapiens
CSSYTRSSSLPCVF

SEQ ID NO: 29639 - protein, 16 aa, Homo sapiens
CATSGNWGWPYYLDNW

SEQ ID NO: 29640 - protein, 20 aa, Homo sapiens
CAKERGGLKPVAATGDFDYW

SEQ ID NO: 29641 - protein, 28 aa, Homo sapiens
CAREPFVVVPASLTSGEDYYFYYGMDVW

SEQ ID NO: 29642 - protein, 20 aa, Homo sapiens
CAKEITIFGVVISPVYFDYW

SEQ ID NO: 29643 - protein, 22 aa, Homo sapiens
CALNVPPMSPIEESGRGWLDPW

SEQ ID NO: 29644 - protein, 21 aa, Homo sapiens
CARDRLLRFLDCYYYYGMDVW

SEQ ID NO: 29645 - protein, 14 aa, Homo sapiens
CARDLSGYDPFDPW

SEQ ID NO: 29646 - protein, 16 aa, Homo sapiens
CARDDYGDYYYYMDVW

SEQ ID NO: 29647 - protein, 13 aa, Homo sapiens
CARYNGENSLDYW

SEQ ID NO: 29648 - protein, 19 aa, Homo sapiens
CAKESSSSVYYYYYYMDVW

SEQ ID NO: 29649 - protein, 20 aa, Homo sapiens
CSKDIGDFWSGYPTGYPDYW

SEQ ID NO: 29650 - protein, 22 aa, Homo sapiens
CVKDRVAAAAVVTWGGHYFDYW

SEQ ID NO: 29651 - protein, 24 aa, Homo sapiens
CARLHYSVTRFGALMNSYYYMDVW

SEQ ID NO: 29652 - protein, 25 aa, Homo sapiens
CARKYSILDHVGGIPGHYYFYMDVW

SEQ ID NO: 29653 - protein, 41 aa, Homo sapiens
CTAYMELRSLRSEDTAVYYCAREAYYYETSGYYGSRYFDYW

SEQ ID NO: 29654 - protein, 23 aa, Homo sapiens
CARGLHRIAYCSRTNCPVNFDYW

SEQ ID NO: 29655 - protein, 16 aa, Homo sapiens
CARIVGTTPSEAFDIW

SEQ ID NO: 29656 - protein, 27 aa, Homo sapiens
CARDVENYCDRSACSSQRPSYYCFDVW

SEQ ID NO: 29657 - protein, 26 aa, Homo sapiens
CARAGGHCTNGVCYTFWDYYYYMDVW

SEQ ID NO: 29658 - protein, 17 aa, Homo sapiens
CAKIPLPIAAIYFFDDW

SEQ ID NO: 29659 - protein, 24 aa, Homo sapiens
CTRNAIAVRPQVFYTYYYYYMDVW

SEQ ID NO: 29660 - protein, 13 aa, Homo sapiens
CARGSGNYYFDHW

SEQ ID NO: 29661 - protein, 15 aa, Homo sapiens
CAREEWLANGNFDYW

SEQ ID NO: 29662 - protein, 19 aa, Homo sapiens
CARARLFSAYIAAAGFDYW

SEQ ID NO: 29663 - protein, 15 aa, Homo sapiens
CARHPGYSYAYIDYW

SEQ ID NO: 29664 - protein, 13 aa, Homo sapiens
CVRLTVAYHFDLW

SEQ ID NO: 29665 - protein, 18 aa, Homo sapiens
CATDLNLAHGDKSPFDYW

SEQ ID NO: 29666 - protein, 18 aa, Homo sapiens
CARASQSGTVVSSNFDYW

SEQ ID NO: 29667 - protein, 16 aa, Homo sapiens
CARDVVTNHDTAFDIW

SEQ ID NO: 29668 - protein, 16 aa, Homo sapiens
CARDLARNCGFYFDYW

SEQ ID NO: 29669 - protein, 19 aa, Homo sapiens
CARDPAGGSDVVIPVADYW

SEQ ID NO: 29670 - protein, 18 aa, Homo sapiens
CAKEGLDRWLVPGIFDYW

SEQ ID NO: 29671 - protein, 15 aa, Homo sapiens
CAKRSLSGTFYFDSW

SEQ ID NO: 29672 - protein, 17 aa, Homo sapiens
CARSLGVAATPGYFQHW

SEQ ID NO: 29673 - protein, 19 aa, Homo sapiens
CAAQPITVMALGKYYFNYW

SEQ ID NO: 29674 - protein, 22 aa, Homo sapiens
CAKGYFPDYGGNYRIGHFFDNW

SEQ ID NO: 29675 - protein, 21 aa, Homo sapiens
CTREYNSGWSYFYFYYYMDVW

SEQ ID NO: 29676 - protein, 17 aa, Homo sapiens
CARETAGGYSTSGFDYW

SEQ ID NO: 29677 - protein, 24 aa, Homo sapiens
CARDATTLELLWFGGDYYYGMDVW

SEQ ID NO: 29678 - protein, 21 aa, Homo sapiens
CARAAPLGYCSGGSCYAFDYW

SEQ ID NO: 29679 - protein, 19 aa, Homo sapiens
CARGAAMITFGPYNWFAPW

SEQ ID NO: 29680 - protein, 18 aa, Homo sapiens
CARQQRVAAAGKVYFDYW

SEQ ID NO: 29681 - protein, 14 aa, Homo sapiens [sequence omitted]

SEQ ID NO: 29682 - protein, 12 aa, Homo sapiens
CARDKNMAIDYW

SEQ ID NO: 29683 - protein, 15 aa, Homo sapiens
CASTLGSYGYPFDYW

SEQ ID NO: 29684 - protein, 17 aa, Homo sapiens
CARLGVSTSVKYSIDYW

SEQ ID NO: 29685 - protein, 16 aa, Homo sapiens
CATGSPFTLPNWFDPW

SEQ ID NO: 29686 - protein, 12 aa, Homo sapiens
CLLYYGPAHMFF

SEQ ID NO: 29687 - protein, 19 aa, Homo sapiens
CAKDLEVRGVIIEGEFDSW

SEQ ID NO: 29688 - protein, 18 aa, Homo sapiens
CARSTSSWAQEGYWFDFW

SEQ ID NO: 29689 - protein, 16 aa, Homo sapiens
CARDSLHPNSGTYFYW

SEQ ID NO: 29690 - protein, 21 aa, Homo sapiens
CARLGQDFGVVISASYYFDYW

SEQ ID NO: 29691 - protein, 22 aa, Homo sapiens
CATVPPGTIFGVVIIPYYFDYW

SEQ ID NO: 29692 - protein, 19 aa, Homo sapiens
CARGIAVAGIKLNWYFDLW

SEQ ID NO: 29693 - protein, 17 aa, Homo sapiens
CARDSDTSGHYDQLDYW

SEQ ID NO: 29694 - protein, 26 aa, Homo sapiens
CARTTYYDFWSGYYSADYYYYYMDVW

SEQ ID NO: 29695 - protein, 20 aa, Homo sapiens
CQRLKGNAGDFFGEGYFDSW

SEQ ID NO: 29696 - protein, 14 aa, Homo sapiens
CAPIWDYPPAFDYW

SEQ ID NO: 29697 - protein, 22 aa, Homo sapiens
CASDGGYCSSTSCQTNRGIDYW

SEQ ID NO: 29698 - protein, 21 aa, Homo sapiens
CARDGESDGAGGYYYYGMDVW

SEQ ID NO: 29699 - protein, 27 aa, Homo sapiens
CARGVGATRKHRVPPFRSYYYYYMDVW

SEQ ID NO: 29700 - protein, 19 aa, Homo sapiens
CARARVLLAFGGVQCFDYW

SEQ ID NO: 29701 - protein, 17 aa, Homo sapiens
CARVSGQVIWYNYMDVW

SEQ ID NO: 29702 - protein, 24 aa, Homo sapiens
CARVRPCGGRCYRYYFYYYGMDVW

SEQ ID NO: 29703 - protein, 15 aa, Homo sapiens
CARAGVAFKHYFDYW

SEQ ID NO: 29704 - protein, 16 aa, Homo sapiens
CAKNWNSRRYFYMDVW

SEQ ID NO: 29705 - protein, 15 aa, Homo sapiens
CQSYDSSVSGPHWVF

SEQ ID NO: 29706 - protein, 19 aa, Homo sapiens
CALLPRLQLGASSSLRDYW

SEQ ID NO: 29707 - protein, 17 aa, Homo sapiens
CARHGYDFSFWGHFDNW

SEQ ID NO: 29708 - protein, 20 aa, Homo sapiens
CAKRTESLASRLDLYWFDPW

SEQ ID NO: 29709 - protein, 17 aa, Homo sapiens
CARDPTTVVTVAYFDYW

SEQ ID NO: 29710 - protein, 22 aa, Homo sapiens
CVKKRLDNYDSSGYSNDAFDIW

SEQ ID NO: 29711 - protein, 20 aa, Homo sapiens
CTTGPYYDSSGYWAYYFDYW

SEQ ID NO: 29712 - protein, 22 aa, Homo sapiens
CAREVRRGTTRVYYYYYYMDVW

SEQ ID NO: 29713 - protein, 14 aa, Homo sapiens
CSSYSSVSTLAVVF

SEQ ID NO: 29714 - protein, 19 aa, Homo sapiens
CAREHLWFGELLAPAIDYW

SEQ ID NO: 29715 - protein, 19 aa, Homo sapiens
CARDDGVGGTLGVPFFDLW

SEQ ID NO: 29716 - protein, 23 aa, Homo sapiens
CARPHPSTIYPYHNYYYYGMDVW

SEQ ID NO: 29717 - protein, 17 aa, Homo sapiens
CARHSGAILWTNWFDPW

SEQ ID NO: 29718 - protein, 20 aa, Homo sapiens
CAKGLPYSSGWYDSDAFDIW

SEQ ID NO: 29719 - protein, 16 aa, Homo sapiens
CVRERVYSSTIWFDPW

SEQ ID NO: 29720 - protein, 17 aa, Homo sapiens
CARLSTYYEVLSAPDYW

SEQ ID NO: 29721 - protein, 23 aa, Homo sapiens
CAKTYLGYCTGDSCYSTPNFDVW

SEQ ID NO: 29722 - protein, 17 aa, Homo sapiens
CARDLPITMVRGVLDYW

SEQ ID NO: 29723 - protein, 21 aa, Homo sapiens
CAKANTLRLLLGYYYYGMDVW

SEQ ID NO: 29724 - protein, 12 aa, Homo sapiens
CSSYTRRSTLLF

SEQ ID NO: 29725 - protein, 16 aa, Homo sapiens
CARYSSGWLIVPFDYW

SEQ ID NO: 29726 - protein, 17 aa, Homo sapiens
CARWSQFGGVIEEIDYW

SEQ ID NO: 29727 - protein, 16 aa, Homo sapiens
CAHRLVGAITDPFDYW

SEQ ID NO: 29728 - protein, 21 aa, Homo sapiens
CARDKAYYDILTGAKNWFDPW

SEQ ID NO: 29729 - protein, 25 aa, Homo sapiens
CAKDRIRDSSGYYYVSYYYYGMDVW

SEQ ID NO: 29730 - protein, 24 aa, Homo sapiens
CSTHMYRSNWDRSIFSYYYYFDVW

SEQ ID NO: 29731 - protein, 21 aa, Homo sapiens
CAILSADTAMVDYYFFYMDVW

SEQ ID NO: 29732 - protein, 17 aa, Homo sapiens
CATLEYISSSFAFFDYW

SEQ ID NO: 29733 - protein, 22 aa, Homo sapiens
CARAEMSKVVNVFGRENYFDPW

SEQ ID NO: 29734 - protein, 22 aa, Homo sapiens
CAKPPNFYDRSGYSIPDPFDVW

SEQ ID NO: 29735 - protein, 20 aa, Homo sapiens
CARPSGSYATYYYYYYMDVW

SEQ ID NO: 29736 - protein, 21 aa, Homo sapiens
CARGDITAYVWGSYRYAFDVW

SEQ ID NO: 29737 - protein, 17 aa, Homo sapiens
CTTAAWIVVVIYAFDIW

SEQ ID NO: 29738 - protein, 17 aa, Homo sapiens
CARGPFDSSGSYFFDYW

SEQ ID NO: 29739 - protein, 22 aa, Homo sapiens
CARGISSGGYCTNGECFPFRYW

SEQ ID NO: 29740 - protein, 19 aa, Homo sapiens
CARDFLSDSMAPLSPLDYW

SEQ ID NO: 29741 - protein, 20 aa, Homo sapiens
CAKVLGLVREFISRNPFDYW

SEQ ID NO: 29742 - protein, 20 aa, Homo sapiens
CAKGDDAEEYFYGSGKFDFW

SEQ ID NO: 29743 - protein, 18 aa, Homo sapiens
CARWGVEGNTHTQYFDSW

SEQ ID NO: 29744 - protein, 14 aa, Homo sapiens
CVREVTTGYCFDNW

SEQ ID NO: 29745 - protein, 19 aa, Homo sapiens
CARKAPDSSGWFSLEFDYW

SEQ ID NO: 29746 - protein, 13 aa, Homo sapiens
CQSVDSSETYVLF

SEQ ID NO: 29747 - protein, 15 aa, Homo sapiens
CARGGPSGAYGLDYW

SEQ ID NO: 29748 - protein, 25 aa, Homo sapiens
CAKDGLMGRSSGFYQRLLYYYMDVW

SEQ ID NO: 29749 - protein, 17 aa, Homo sapiens
CAREYSSGWDYNWFDPW

SEQ ID NO: 29750 - protein, 15 aa, Homo sapiens
CSQHVGTEFWYFDLW

SEQ ID NO: 29751 - protein, 19 aa, Homo sapiens
CAKGKTTMRGVRPYYFDYW

SEQ ID NO: 29752 - protein, 22 aa, Homo sapiens
CARDLPDKTSPNFHYYYGMDVW

SEQ ID NO: 29753 - protein, 23 aa, Homo sapiens
CARGQSSIAAAGTEWELPTFDYW

SEQ ID NO: 29754 - protein, 23 aa, Homo sapiens
CARGIGGSCSGGSCYGSVNFDDW

SEQ ID NO: 29755 - protein, 17 aa, Homo sapiens
CGQDHDYSTVLPWFDPW

SEQ ID NO: 29756 - protein, 19 aa, Homo sapiens
CAHLNLASTAVPWRTFDYW

SEQ ID NO: 29757 - protein, 17 aa, Homo sapiens
CARGNVWGPYIAWFDPW

SEQ ID NO: 29758 - protein, 16 aa, Homo sapiens
CARCGYLPYYYGMDVW

SEQ ID NO: 29759 - protein, 15 aa, Homo sapiens
CVKERGATYRMFDSW

SEQ ID NO: 29760 - protein, 16 aa, Homo sapiens
CARDPDSGRNDPFDIW

SEQ ID NO: 29761 - protein, 16 aa, Homo sapiens
CAKDPAPAATNWFDPW

SEQ ID NO: 29762 - protein, 18 aa, Homo sapiens
CAASGWNHYDSSFPFDIW

SEQ ID NO: 29763 - protein, 23 aa, Homo sapiens
CARVVGDSNSRGGYYSYDGMDVW

SEQ ID NO: 29764 - protein, 23 aa, Homo sapiens
CARGTYHDLWSAYDMALDPFDIW

SEQ ID NO: 29765 - protein, 20 aa, Homo sapiens
CAKDVDYSDISDYENWFDPW

SEQ ID NO: 29766 - protein, 15 aa, Homo sapiens
CARNEQWLGRWFDPW

SEQ ID NO: 29767 - protein, 22 aa, Homo sapiens
CAKAPSDTAMVTRYYYYGMDVW

SEQ ID NO: 29768 - protein, 15 aa, Homo sapiens
CARHFRYSSPEIDYW

SEQ ID NO: 29769 - protein, 17 aa, Homo sapiens
CARSVDRTWNLYYFDYW

SEQ ID NO: 29770 - protein, 21 aa, Homo sapiens
CARKDYDRGSNYYYYYDMDVW

SEQ ID NO: 29771 - protein, 18 aa, Homo sapiens
CVKLYPWFGDLLGHYDYW

SEQ ID NO: 29772 - protein, 21 aa, Homo sapiens
CAKYPLLTYYYDSSGFYFDYW

SEQ ID NO: 29773 - protein, 22 aa, Homo sapiens
CARRPPGITMIVVVIENAFDIW

SEQ ID NO: 29774 - protein, 19 aa, Homo sapiens
CARDGGYYGDYVFLYFDLW

SEQ ID NO: 29775 - protein, 18 aa, Homo sapiens
CTRKGRTWGTAPNAFDVW

SEQ ID NO: 29776 - protein, 16 aa, Homo sapiens
CVRTGDSPNYYAFDIW

SEQ ID NO: 29777 - protein, 24 aa, Homo sapiens
CARGQRGVNMILVVIGMSSYFDSW

SEQ ID NO: 29778 - protein, 26 aa, Homo sapiens
CATGNPSRANYDFWSGSTPSNAFDIW

SEQ ID NO: 29779 - protein, 19 aa, Homo sapiens
CARDRWSYNGRTGDVFDIW

SEQ ID NO: 29780 - protein, 18 aa, Homo sapiens
CAKDITIAALFHSHFDYW

SEQ ID NO: 29781 - protein, 17 aa, Homo sapiens
CARGVDTAMVTWYFDLW

SEQ ID NO: 29782 - protein, 17 aa, Homo sapiens
CARAVITMIVVEAFDIW

SEQ ID NO: 29783 - protein, 17 aa, Homo sapiens
CAKPLYYYDSRGAFDIW

SEQ ID NO: 29784 - protein, 20 aa, Homo sapiens
CAKPGDMIVVVITPPHFDYW

SEQ ID NO: 29785 - protein, 17 aa, Homo sapiens
CARDPRLADGWFYLDYW

SEQ ID NO: 29786 - protein, 15 aa, Homo sapiens
CAKLDGASAGSFDSW

SEQ ID NO: 29787 - protein, 17 aa, Homo sapiens
CARYHYGYDSDNSFDYW

SEQ ID NO: 29788 - protein, 26 aa, Homo sapiens
CARALHGIKLGYCSSTSCPDLSFDIW

SEQ ID NO: 29789 - protein, 17 aa, Homo sapiens
CAREPNEYEQLDLFDYW

SEQ ID NO: 29790 - protein, 19 aa, Homo sapiens
CARGEWIQLWSVGNWFDPW

SEQ ID NO: 29791 - protein, 18 aa, Homo sapiens
CAREMDDSSGYFDAFDMW

SEQ ID NO: 29792 - protein, 20 aa, Homo sapiens
CARGHYSHYLAAPLEWLDPW

SEQ ID NO: 29793 - protein, 18 aa, Homo sapiens
CARDLTRDSNDYTPFDYW

SEQ ID NO: 29794 - protein, 19 aa, Homo sapiens
CARDGRHDIVTGYFLLDYW

SEQ ID NO: 29795 - protein, 20 aa, Homo sapiens
CARDSGGYKYGYPYWFLDLW

SEQ ID NO: 29796 - protein, 22 aa, Homo sapiens
CARQQRSHHWNTNAFYYYIDVW

SEQ ID NO: 29797 - protein, 20 aa, Homo sapiens
CARGGRQWLDSPGLSWFDPW

SEQ ID NO: 29798 - protein, 21 aa, Homo sapiens
CANIGLQVRIAAAHPNYFDYW

SEQ ID NO: 29799 - protein, 20 aa, Homo sapiens
CARFSDYDILTGYQQYFDYW

SEQ ID NO: 29800 - protein, 18 aa, Homo sapiens
CARISYSSTFYIGSIDYW

SEQ ID NO: 29801 - protein, 20 aa, Homo sapiens
CAITAGGTIVYYSYYYMDVW

SEQ ID NO: 29802 - protein, 13 aa, Homo sapiens
CARVVPTGDVDYW

SEQ ID NO: 29803 - protein, 12 aa, Homo sapiens
CALLFAKDRDYW

SEQ ID NO: 29804 - protein, 15 aa, Homo sapiens
CAKALTLYSDAFDIW

SEQ ID NO: 29805 - protein, 16 aa, Homo sapiens
CAGPATAVGITAFDIW

SEQ ID NO: 29806 - protein, 12 aa, Homo sapiens
CQSFDSDNQGVF

SEQ ID NO: 29807 - protein, 17 aa, Homo sapiens
CARLVEMATIDDAFDIW

SEQ ID NO: 29808 - protein, 25 aa, Homo sapiens
CARKQSVYTVREGFSAPQNWYFDLW

SEQ ID NO: 29809 - protein, 18 aa, Homo sapiens
CAKAHKVAGTYSYYFDYW

SEQ ID NO: 29810 - protein, 17 aa, Homo sapiens
CAKTPLYSSALNWFDPW

SEQ ID NO: 29811 - protein, 16 aa, Homo sapiens
CARGGSLIGVLNFDFW

SEQ ID NO: 29812 - protein, 16 aa, Homo sapiens
CAHRRSGWYGPIFDYW

SEQ ID NO: 29813 - protein, 16 aa, Homo sapiens
CAIGGAVALAKPFDNW

SEQ ID NO: 29814 - protein, 22 aa, Homo sapiens
CARDLRRRITTPSGSYYYMDVW

SEQ ID NO: 29815 - protein, 17 aa, Homo sapiens
CARGRQFNVDYVPFDYW

SEQ ID NO: 29816 - protein, 21 aa, Homo sapiens
CARLGYCSSTSCYGSPNFDYW

SEQ ID NO: 29817 - protein, 24 aa, Homo sapiens
CASSYCSSTSCYPLYYYYYGMDVW

SEQ ID NO: 29818 - protein, 16 aa, Homo sapiens
CAKDESTMVGSYFDFW

SEQ ID NO: 29819 - protein, 13 aa, Homo sapiens
CARSTYGTSFDFW

SEQ ID NO: 29820 - protein, 25 aa, Homo sapiens
CAKDRGPTIADRATQSYYYYGMDVW

SEQ ID NO: 29821 - protein, 14 aa, Homo sapiens
CAKGRGRGTYFEYW

SEQ ID NO: 29822 - protein, 26 aa, Homo sapiens
CVTEDPPPQLGPCRGGRPFDDVFHIW

SEQ ID NO: 29823 - protein, 17 aa, Homo sapiens
CAREGCPWGNCYYMDVW

SEQ ID NO: 29824 - protein, 17 aa, Homo sapiens
CASSDILTGYPWYFDYW

SEQ ID NO: 29825 - protein, 16 aa, Homo sapiens
CARMELLDWSNWFDPW

SEQ ID NO: 29826 - protein, 18 aa, Homo sapiens
CARLTYYYDRSAYYYDYW

SEQ ID NO: 29827 - protein, 15 aa, Homo sapiens
CARGINWGPSYFDYW

SEQ ID NO: 29828 - protein, 21 aa, Homo sapiens
CVTEGSAEPLNGDYAPGFDNW

SEQ ID NO: 29829 - protein, 21 aa, Homo sapiens
CAKDKEAWNYGLDYSYYMDVW

SEQ ID NO: 29830 - protein, 16 aa, Homo sapiens
CALVIAVAHLGYFQHW

SEQ ID NO: 29831 - protein, 17 aa, Homo sapiens
CARSGAVAGGWYYPDYW

SEQ ID NO: 29832 - protein, 20 aa, Homo sapiens
CARDGSGYNNGYYYYGMDVW

SEQ ID NO: 29833 - protein, 23 aa, Homo sapiens
CARHVVVTASRQLNYYFYYMDVW

SEQ ID NO: 29834 - protein, 18 aa, Homo sapiens
CATVGEWELPEPYFFGYW

SEQ ID NO: 29835 - protein, 18 aa, Homo sapiens
CTRRVPVTSMVTPYFDYW

SEQ ID NO: 29836 - protein, 13 aa, Homo sapiens
CAREGTIHGFDMW

SEQ ID NO: 29837 - protein, 19 aa, Homo sapiens
CASHRAVAKVLDYYYMDVW

SEQ ID NO: 29838 - protein, 19 aa, Homo sapiens
CARARTRPGSWYGGWFDPW

SEQ ID NO: 29839 - protein, 12 aa, Homo sapiens
CAKVVVVLFDPW

SEQ ID NO: 29840 - protein, 18 aa, Homo sapiens
CAISRRNDLGINFPLDYW

SEQ ID NO: 29841 - protein, 17 aa, Homo sapiens
CARVLSSSPGPDAFDFW

SEQ ID NO: 29842 - protein, 17 aa, Homo sapiens
CARSGREYQLLSWFDPW

SEQ ID NO: 29843 - protein, 20 aa, Homo sapiens
CTRDRPHYGSGSYYPYFDYW

SEQ ID NO: 29844 - protein, 25 aa, Homo sapiens
CARAGALEIFGVGLPTYYYYYMDVW

SEQ ID NO: 29845 - protein, 15 aa, Homo sapiens
CARDLTTVTPLVDYW

SEQ ID NO: 29846 - protein, 15 aa, Homo sapiens
CQVWDSSGTHPEVVF

SEQ ID NO: 29847 - protein, 14 aa, Homo sapiens
CAKDTYRYGSFGYW

SEQ ID NO: 29848 - protein, 22 aa, Homo sapiens
CAKDGLTGDFFSWMSIVSFDSW

SEQ ID NO: 29849 - protein, 18 aa, Homo sapiens
CAREWQLVRGGVDAFDIW

SEQ ID NO: 29850 - protein, 19 aa, Homo sapiens
CARGDIVVVPGAGKAFDIW

SEQ ID NO: 29851 - protein, 18 aa, Homo sapiens
CARDRDGELPNHYAFDIW

SEQ ID NO: 29852 - protein, 18 aa, Homo sapiens
CVRWDLRLFYHYYYMDVW

SEQ ID NO: 29853 - protein, 20 aa, Homo sapiens
CAKDVFHGDYGGYYYGMDVW

SEQ ID NO: 29854 - protein, 17 aa, Homo sapiens
CATWYSGSYREGYFDYW

SEQ ID NO: 29855 - protein, 21 aa, Homo sapiens
CARDVRGLGYNLKYYYYMDVW

SEQ ID NO: 29856 - protein, 25 aa, Homo sapiens
CATVSSMRTCRGGTCYTSYWYSDHW

SEQ ID NO: 29857 - protein, 20 aa, Homo sapiens
CARHIELVTNYYYYYYMDVW

SEQ ID NO: 29858 - protein, 15 aa, Homo sapiens
CVKDMGLREWYFDYW

SEQ ID NO: 29859 - protein, 10 aa, Homo sapiens
CGRGDWFNVW

SEQ ID NO: 29860 - protein, 20 aa, Homo sapiens
CTRYRPAISGTFYSDAFDIW

SEQ ID NO: 29861 - protein, 14 aa, Homo sapiens
CAHRRFWSGSIDYW

SEQ ID NO: 29862 - protein, 17 aa, Homo sapiens
CARHSGYSSSLYYFDHW

SEQ ID NO: 29863 - protein, 15 aa, Homo sapiens
CASSPGYNYVHFNYW

SEQ ID NO: 29864 - protein, 16 aa, Homo sapiens
CAREYSNVYGRRFDAW

SEQ ID NO: 29865 - protein, 11 aa, Homo sapiens
CQESYSRPLSF

SEQ ID NO: 29866 - protein, 21 aa, Homo sapiens
CARLDFGSSGIRIARWYFDLW

SEQ ID NO: 29867 - protein, 15 aa, Homo sapiens
CATYNWIAHRGFDYW

SEQ ID NO: 29868 - protein, 18 aa, Homo sapiens
CASTRGYSGYDDQSLDYW

SEQ ID NO: 29869 - protein, 21 aa, Homo sapiens
CARAPRYSSGWYLFEPLFDYW

SEQ ID NO: 29870 - protein, 19 aa, Homo sapiens
CAREVHCTGGNCQLGLDYW

SEQ ID NO: 29871 - protein, 20 aa, Homo sapiens
CARRSYGDYVGWYYYYMDVW

SEQ ID NO: 29872 - protein, 21 aa, Homo sapiens
CARFRYCSSTSCYRNYYMDVW

SEQ ID NO: 29873 - protein, 17 aa, Homo sapiens
CARAGVTVFGVRRFDYW

SEQ ID NO: 29874 - protein, 16 aa, Homo sapiens
CAREPYSSSASFFDYW

SEQ ID NO: 29875 - protein, 9 aa, Homo sapiens [sequence omitted]

SEQ ID NO: 29876 - protein, 15 aa, Homo sapiens
CVKDQRGNYYMADYW

SEQ ID NO: 29877 - protein, 20 aa, Homo sapiens
CARDRARYNWNYGGMGFDYW

SEQ ID NO: 29878 - protein, 17 aa, Homo sapiens
CATTYAFGGVISWFDPW

SEQ ID NO: 29879 - protein, 21 aa, Homo sapiens
CARLAPATTKEAVFQYFFDYW

SEQ ID NO: 29880 - protein, 15 aa, Homo sapiens
CAKASYGDAYGADYW

SEQ ID NO: 29881 - protein, 25 aa, Homo sapiens
CATPSPYFWSGYTKYYYYYYGMDVW

SEQ ID NO: 29882 - protein, 24 aa, Homo sapiens
CAKETNRRITIFGVVLPPRYFDYW

SEQ ID NO: 29883 - protein, 19 aa, Homo sapiens
CAKSYYHLSSGYYTYFDSW

SEQ ID NO: 29884 - protein, 13 aa, Homo sapiens
CQTWDSSTPWLVF

SEQ ID NO: 29885 - protein, 11 aa, Homo sapiens
CEQYNSHSRTF

SEQ ID NO: 29886 - protein, 17 aa, Homo sapiens
CTKGWRISPLNDGFDVW

SEQ ID NO: 29887 - protein, 13 aa, Homo sapiens
CGTTNGWYHFDHW

SEQ ID NO: 29888 - protein, 15 aa, Homo sapiens
CARVSSGHYDAFDIW

SEQ ID NO: 29889 - protein, 21 aa, Homo sapiens
CARDRMPQFGDYYYYYGMDVW

SEQ ID NO: 29890 - protein, 17 aa, Homo sapiens
CAKVTYDETGYFYFDNW

SEQ ID NO: 29891 - protein, 19 aa, Homo sapiens
CARGGIKHVYYYYYYMDVW

SEQ ID NO: 29892 - protein, 22 aa, Homo sapiens
CVRQPGPHMARGVMRNNRFDPW

SEQ ID NO: 29893 - protein, 15 aa, Homo sapiens
CGESHTIDGQVGWTF

SEQ ID NO: 29894 - protein, 15 aa, Homo sapiens
CARVKDRSSVVFDIW

SEQ ID NO: 29895 - protein, 18 aa, Homo sapiens
CARDMEDYGSGTYFADYW

SEQ ID NO: 29896 - protein, 17 aa, Homo sapiens
CARGKHISWNLYPNDYW

SEQ ID NO: 29897 - protein, 23 aa, Homo sapiens
CAKVAGLLWFGDERRREHYFDYW

SEQ ID NO: 29898 - protein, 21 aa, Homo sapiens
CARSVQLWDRGIYYYYYMDVW

SEQ ID NO: 29899 - protein, 16 aa, Homo sapiens
CAKDLIASPDNLFHYW

SEQ ID NO: 29900 - protein, 15 aa, Homo sapiens
CATWGMVAAWYFDFW

SEQ ID NO: 29901 - protein, 19 aa, Homo sapiens
CARDYYGSGSYLPPYFDHW

SEQ ID NO: 29902 - protein, 21 aa, Homo sapiens
CARDLTDQPLGPYYYYGMDVW

SEQ ID NO: 29903 - protein, 25 aa, Homo sapiens
CARESKGPYYYDTSGYSTTDAFDIW

SEQ ID NO: 29904 - protein, 21 aa, Homo sapiens
CVRGPGGADTSASDHPDFDHW

SEQ ID NO: 29905 - protein, 20 aa, Homo sapiens
CAKVNRAFRYGLDYYYMDVW

SEQ ID NO: 29906 - protein, 20 aa, Homo sapiens
CTRVFIRYSSAYVHDAFDVW

SEQ ID NO: 29907 - protein, 19 aa, Homo sapiens
CAIHPGPSDWTPYRWFDTW

SEQ ID NO: 29908 - protein, 12 aa, Homo sapiens [sequence omitted]

SEQ ID NO: 29909 - protein, 22 aa, Homo sapiens
CAKAGLVCGGPRCYEEDYFDNW

SEQ ID NO: 29910 - protein, 21 aa, Homo sapiens
CAKDSSVVVVAATGYNWFDPW

SEQ ID NO: 29911 - protein, 19 aa, Homo sapiens
CARHFDTSGYYYLHSFDPW

SEQ ID NO: 29912 - protein, 21 aa, Homo sapiens
CARGHVFDSSGFYAANWFDPW

SEQ ID NO: 29913 - protein, 21 aa, Homo sapiens
CARDRTYCSSTTCYPHAFDIW

SEQ ID NO: 29914 - protein, 18 aa, Homo sapiens
CAKDRWDSAMVQYVIDYW

SEQ ID NO: 29915 - protein, 14 aa, Homo sapiens
CTTALRQWLVRDYW

SEQ ID NO: 29916 - protein, 17 aa, Homo sapiens
CARGIAADVSISWFDPW

SEQ ID NO: 29917 - protein, 16 aa, Homo sapiens
CARGLGANAIGALDYW

SEQ ID NO: 29918 - protein, 21 aa, Homo sapiens
CARDPLPRLFGLPPSDAFDIW

SEQ ID NO: 29919 - protein, 21 aa, Homo sapiens
CAGFKPLRGPHNMDKVEPDYW

SEQ ID NO: 29920 - protein, 16 aa, Homo sapiens
CARDRYGDYGDAFDIW

SEQ ID NO: 29921 - protein, 21 aa, Homo sapiens
CARDPGAPLRAAAGEYYFDYW

SEQ ID NO: 29922 - protein, 20 aa, Homo sapiens
CARGGGYQIFLYYYYGMDVW

SEQ ID NO: 29923 - protein, 19 aa, Homo sapiens
CARPYCSGGDCYPYFFDYW

SEQ ID NO: 29924 - protein, 18 aa, Homo sapiens
CAREYSYTSGYHYWFDPW

SEQ ID NO: 29925 - protein, 29 aa, Homo sapiens
CTTVQGQRRSNVLRFLEPGYVRGGYYDYW

SEQ ID NO: 29926 - protein, 18 aa, Homo sapiens
CATVPAAISYYYYGMDVW

SEQ ID NO: 29927 - protein, 23 aa, Homo sapiens
CAKTVEVPDRWDPYYLHYYIDVW

SEQ ID NO: 29928 - protein, 23 aa, Homo sapiens
CASVAGNYDLWSASPGEYYMDVW

SEQ ID NO: 29929 - protein, 20 aa, Homo sapiens
CARDPPRDYGGEGVYYFDYW

SEQ ID NO: 29930 - protein, 19 aa, Homo sapiens
CAKDLAMQLWFPTPNFDSW

SEQ ID NO: 29931 - protein, 21 aa, Homo sapiens
CARDIAVAGTSYYYYYYMDVW

SEQ ID NO: 29932 - protein, 27 aa, Homo sapiens
CVRCLYNSAPVSPRFEKYFSYYYMDVW

SEQ ID NO: 29933 - protein, 23 aa, Homo sapiens
CARGPPDSSSWPSYYYSYYMDVW

SEQ ID NO: 29934 - protein, 12 aa, Homo sapiens
CTRQTFPYFDHW

SEQ ID NO: 29935 - protein, 14 aa, Homo sapiens
CARLRVVIHLIDYW

SEQ ID NO: 29936 - protein, 16 aa, Homo sapiens
CCLLPASDYYYGMDVW

SEQ ID NO: 29937 - protein, 17 aa, Homo sapiens
CASGVSEDKWNYNLDYW

SEQ ID NO: 29938 - protein, 17 aa, Homo sapiens
CVKDRNIQLWLSYFDYW

SEQ ID NO: 29939 - protein, 18 aa, Homo sapiens
CAREKAVAGSPLDALDIW

SEQ ID NO: 29940 - protein, 23 aa, Homo sapiens
CARASAQVDTAMVLYYYYYMDVW

SEQ ID NO: 29941 - protein, 25 aa, Homo sapiens
CARDEGTFTIFGVVIIPSNPIFDYW

SEQ ID NO: 29942 - protein, 15 aa, Homo sapiens
CTKESEAAVFDFDYW

SEQ ID NO: 29943 - protein, 14 aa, Homo sapiens
CARKEGLHYYFDYW

SEQ ID NO: 29944 - protein, 13 aa, Homo sapiens
CTRVEIGGSFYYW

SEQ ID NO: 29945 - protein, 22 aa, Homo sapiens
CARDQRGGYFSSWPRGNWFDPW

SEQ ID NO: 29946 - protein, 20 aa, Homo sapiens
CARDGYGRDYTGMVYAFDIW

SEQ ID NO: 29947 - protein, 19 aa, Homo sapiens
CARRFKGGGYYYYYYMDVW

SEQ ID NO: 29948 - protein, 22 aa, Homo sapiens
CARDFFSAVPASMIPGRSFDYW

SEQ ID NO: 29949 - protein, 18 aa, Homo sapiens
CARHPGDYGDYKSAMDVW

SEQ ID NO: 29950 - protein, 13 aa, Homo sapiens
CQQYSSYLSLFTF

SEQ ID NO: 29951 - protein, 14 aa, Homo sapiens
CVRQRLFRGLLDYW

SEQ ID NO: 29952 - protein, 16 aa, Homo sapiens
CARGGQLLYGGDFDYW

SEQ ID NO: 29953 - protein, 16 aa, Homo sapiens
CVRDQYNRVWFESDYW

SEQ ID NO: 29954 - protein, 21 aa, Homo sapiens
CARDPPDYDEGSGYYHAFDIW

SEQ ID NO: 29955 - protein, 18 aa, Homo sapiens
CAKDYTTAPGNVNWFDPW

SEQ ID NO: 29956 - protein, 12 aa, Homo sapiens
CYSATDNSRAFF

SEQ ID NO: 29957 - protein, 26 aa, Homo sapiens
CARHRVQMDGTYTILTGPKLNWLDPW

SEQ ID NO: 29958 - protein, 22 aa, Homo sapiens
CARDSVDTAVVKGYYYYGMDVW

SEQ ID NO: 29959 - protein, 17 aa, Homo sapiens
CTRDHSSWFDFYAFDIW

SEQ ID NO: 29960 - protein, 14 aa, Homo sapiens
CARHFRMVSWFDPW

SEQ ID NO: 29961 - protein, 18 aa, Homo sapiens
CAKAPIFGVVIIPHFDYW

SEQ ID NO: 29962 - protein, 13 aa, Homo sapiens
CSTLNAVALNDYW

SEQ ID NO: 29963 - protein, 23 aa, Homo sapiens
CARDPEIVAVPAAAFYYYGMDVW

SEQ ID NO: 29964 - protein, 14 aa, Homo sapiens
CAVGSTGQFYFDFW

SEQ ID NO: 29965 - protein, 27 aa, Homo sapiens
CARQPAKYYYDEDRPRIDYYYYYIDVW

SEQ ID NO: 29966 - protein, 21 aa, Homo sapiens
CARRKPGITMIVVDRDAFDIW

SEQ ID NO: 29967 - protein, 17 aa, Homo sapiens
CARVLGHEGSSSPFDYW

SEQ ID NO: 29968 - protein, 18 aa, Homo sapiens
CARQTGGSGWYTAAFDIW

SEQ ID NO: 29969 - protein, 15 aa, Homo sapiens
CASTTAAAGSDYDYW

SEQ ID NO: 29970 - protein, 15 aa, Homo sapiens
CATSGYSSHDPFVYW

SEQ ID NO: 29971 - protein, 24 aa, Homo sapiens
CAREVSYYDSSGYPKDYYYYMDVW

SEQ ID NO: 29972 - protein, 16 aa, Homo sapiens
CAKASYTYSSSWLDYW

SEQ ID NO: 29973 - protein, 22 aa, Homo sapiens
CARSVAPGMRVVVLGDYYFDYW

SEQ ID NO: 29974 - protein, 21 aa, Homo sapiens
CARRRGDDYGSSGYLVAFDIW

SEQ ID NO: 29975 - protein, 21 aa, Homo sapiens
CARLGYYYDSSGPWRPPFDYW

SEQ ID NO: 29976 - protein, 15 aa, Homo sapiens
CAHEPHGSLAIFDSW

SEQ ID NO: 29977 - protein, 17 aa, Homo sapiens
CATGLPTSNLDDAFDIW

SEQ ID NO: 29978 - protein, 15 aa, Homo sapiens
CARDMAGSLYYFEFW

SEQ ID NO: 29979 - protein, 16 aa, Homo sapiens
CAKRDYRGNSVAFDIW

SEQ ID NO: 29980 - protein, 24 aa, Homo sapiens
CARSLYSGYSGYDLPMLTYYFDYW

SEQ ID NO: 29981 - protein, 17 aa, Homo sapiens
CAKDFGTSYGWYAFDIW

SEQ ID NO: 29982 - protein, 19 aa, Homo sapiens
CARAYGSSANSYNYYMDVW

SEQ ID NO: 29983 - protein, 19 aa, Homo sapiens
CARAGYSYDSSGYPLDDYW

SEQ ID NO: 29984 - protein, 16 aa, Homo sapiens
CVRAKDILTGYSFDYW

SEQ ID NO: 29985 - protein, 18 aa, Homo sapiens
CARLIVGYLNGRRYFDLW

SEQ ID NO: 29986 - protein, 17 aa, Homo sapiens
CAKDYGDYADEGAFDIW

SEQ ID NO: 29987 - protein, 18 aa, Homo sapiens
CARGTGGSAYYTGWFDPW

SEQ ID NO: 29988 - protein, 19 aa, Homo sapiens
CARAQGGTGYYYYYGTDLW

SEQ ID NO: 29989 - protein, 13 aa, Homo sapiens
CLQHSTYPFMFTF

SEQ ID NO: 29990 - protein, 16 aa, Homo sapiens
CAKPEYRSGWYDFDSW

SEQ ID NO: 29991 - protein, 19 aa, Homo sapiens
CAKDYVRIAAAHPGAFDIW

SEQ ID NO: 29992 - protein, 15 aa, Homo sapiens
CARRRDWADFTSDYW

SEQ ID NO: 29993 - protein, 13 aa, Homo sapiens
CATDCGGDCIDYW

SEQ ID NO: 29994 - protein, 13 aa, Homo sapiens
CARVKDWFYFDFW

SEQ ID NO: 29995 - protein, 21 aa, Homo sapiens
CARDTAPKPDYYDSSGYPDYW

SEQ ID NO: 29996 - protein, 18 aa, Homo sapiens
CARVNPKWDLLSSTFDVW

SEQ ID NO: 29997 - protein, 16 aa, Homo sapiens
CACDSSGWYEYYFDYW

SEQ ID NO: 29998 - protein, 11 aa, Homo sapiens
CARDDRAFDIW

SEQ ID NO: 29999 - protein, 21 aa, Homo sapiens
CAKDVEYYDILTREKGWLDSW

SEQ ID NO: 30000 - protein, 15 aa, Homo sapiens
CTRMIDNGGYFFDYW

SEQ ID NO: 30001 - protein, 15 aa, Homo sapiens
CARSSGYYSPQFDHW

SEQ ID NO: 30002 - protein, 16 aa, Homo sapiens
CAREGLTTDGTVTDYW

SEQ ID NO: 30003 - protein, 17 aa, Homo sapiens
CARHVRVGDPRGHFDFW

SEQ ID NO: 30004 - protein, 21 aa, Homo sapiens
CARGRGIMAGGALQDVHFDYW

SEQ ID NO: 30005 - protein, 20 aa, Homo sapiens
CAKDYGVLEYSSSSEAFDIW

SEQ ID NO: 30006 - protein, 20 aa, Homo sapiens
CAKEYTITVTYFYHYGMDVW

SEQ ID NO: 30007 - protein, 21 aa, Homo sapiens
CTTVRWYYDSSAYPNDAFDIW

SEQ ID NO: 30008 - protein, 17 aa, Homo sapiens
CAKVAGRVRTRFPFDYW

SEQ ID NO: 30009 - protein, 18 aa, Homo sapiens
CAKRAVRDGYNSYYFDYW

SEQ ID NO: 30010 - protein, 21 aa, Homo sapiens
CATDPLSYYDGSAYPRLKDYW

SEQ ID NO: 30011 - protein, 19 aa, Homo sapiens
CARDLSTTGSDYYYYMDVW

SEQ ID NO: 30012 - protein, 17 aa, Homo sapiens
CARGRLAARPVAGFDYW

SEQ ID NO: 30013 - protein, 15 aa, Homo sapiens
CAKDSNDYGGICDYW

SEQ ID NO: 30014 - protein, 16 aa, Homo sapiens
CARERSSYGLTYFDYW

SEQ ID NO: 30015 - protein, 15 aa, Homo sapiens
CAKDMSGYYPDLDYW

SEQ ID NO: 30016 - protein, 15 aa, Homo sapiens
CAKADTATSLSTDYW

SEQ ID NO: 30017 - protein, 22 aa, Homo sapiens
CARLPYYDFWRGSSRGYYFDSW

SEQ ID NO: 30018 - protein, 19 aa, Homo sapiens
CAKDVLIAGSTKSSTFDLW

SEQ ID NO: 30019 - protein, 25 aa, Homo sapiens
CARDGNCGGDCYSPGSIYYYGMDVW

SEQ ID NO: 30020 - protein, 16 aa, Homo sapiens
CVRTSNRSAYRKFDHW

SEQ ID NO: 30021 - protein, 22 aa, Homo sapiens
CAKDKIPFGLIAAATKSKFDYW

SEQ ID NO: 30022 - protein, 19 aa, Homo sapiens
CAREQDELVKEYYYGMDVW

SEQ ID NO: 30023 - protein, 21 aa, Homo sapiens
CAKDHIRISGRWVARHPTDYW

SEQ ID NO: 30024 - protein, 18 aa, Homo sapiens
CTTTPIFISIFGVAPDYW

SEQ ID NO: 30025 - protein, 21 aa, Homo sapiens
CARDRSYDLWSGYSYDAFDIW

SEQ ID NO: 30026 - protein, 26 aa, Homo sapiens
CARGDSQPYAEYMWVNYRPRSYFNYW

SEQ ID NO: 30027 - protein, 21 aa, Homo sapiens
CARPSGNPRSPYLDSTAFDYW

SEQ ID NO: 30028 - protein, 21 aa, Homo sapiens
CARSIMITFGGVIDAACFDLW

SEQ ID NO: 30029 - protein, 15 aa, Homo sapiens
CARGQSDGSWYEDYW

SEQ ID NO: 30030 - protein, 16 aa, Homo sapiens
CARDNDSSGYDAFDIW

SEQ ID NO: 30031 - protein, 18 aa, Homo sapiens
CARRAISTDFHTYYFDYW

SEQ ID NO: 30032 - protein, 19 aa, Homo sapiens
CAKDRYDILTGPTESFDYW

SEQ ID NO: 30033 - protein, 19 aa, Homo sapiens
CAKDQRDWYYKWGPHFDSW

SEQ ID NO: 30034 - protein, 13 aa, Homo sapiens
CQSYDGGLSGEAF

SEQ ID NO: 30035 - protein, 18 aa, Homo sapiens
CASDDGISASRTKIFDSW

SEQ ID NO: 30036 - protein, 18 aa, Homo sapiens
CVKDEGSSTWLHNWFDPW

SEQ ID NO: 30037 - protein, 15 aa, Homo sapiens
CARDRRTSYFIFDFW

SEQ ID NO: 30038 - protein, 14 aa, Homo sapiens
CAREPRSQYYFDYW

SEQ ID NO: 30039 - protein, 20 aa, Homo sapiens
CARDWGHDFWSGSLYYFDYW

SEQ ID NO: 30040 - protein, 15 aa, Homo sapiens
CTTPQQLVGYYFDYW

SEQ ID NO: 30041 - protein, 19 aa, Homo sapiens
CARAVSSLYYDSSGYNDFW

SEQ ID NO: 30042 - protein, 17 aa, Homo sapiens
CAKMIYNYGSGYYFDSW

SEQ ID NO: 30043 - protein, 16 aa, Homo sapiens
CARALSSGWSLAFDYW

SEQ ID NO: 30044 - protein, 17 aa, Homo sapiens
CARDPSVEDYGGNFYYW

SEQ ID NO: 30045 - protein, 12 aa, Homo sapiens
CAREAGISFEYW

SEQ ID NO: 30046 - protein, 17 aa, Homo sapiens
CARDREIAADPFAFDYW

SEQ ID NO: 30047 - protein, 16 aa, Homo sapiens
CATSSVVVVAWWFDPW

SEQ ID NO: 30048 - protein, 19 aa, Homo sapiens
CAKDGVGWFGEFIYAMDVW

SEQ ID NO: 30049 - protein, 14 aa, Homo sapiens
CARHTGGSAAFDYW

SEQ ID NO: 30050 - protein, 23 aa, Homo sapiens
CARVGDYDYVWGSYRETYYFDYW

SEQ ID NO: 30051 - protein, 18 aa, Homo sapiens
CARHPPYGGSWPYYFDVW

SEQ ID NO: 30052 - protein, 17 aa, Homo sapiens
CATVGLHDSGDYYFDSW

SEQ ID NO: 30053 - protein, 20 aa, Homo sapiens
CAKNIRYYYDSNGYDAFDLW

SEQ ID NO: 30054 - protein, 19 aa, Homo sapiens
CARAAPGAVGASTEYFQHW

SEQ ID NO: 30055 - protein, 17 aa, Homo sapiens
CARHFTPSPSSDYMDVW

SEQ ID NO: 30056 - protein, 17 aa, Homo sapiens
CAKDQWGSSGWYEGDYW

SEQ ID NO: 30057 - protein, 15 aa, Homo sapiens
CVKGECSSSWCFDYW

SEQ ID NO: 30058 - protein, 18 aa, Homo sapiens
CANRQEDPRTSAYYSDYW

SEQ ID NO: 30059 - protein, 12 aa, Homo sapiens
CQQSYSNVMYSF

SEQ ID NO: 30060 - protein, 25 aa, Homo sapiens
CARDALVNYGILTGTRGYYYGMDVW

SEQ ID NO: 30061 - protein, 19 aa, Homo sapiens
CARDRGLRVMTTFGGLDYW

SEQ ID NO: 30062 - protein, 17 aa, Homo sapiens
CAREPITMILAVAFDIW

SEQ ID NO: 30063 - protein, 18 aa, Homo sapiens
CARHFDWGVVVLTAFEYW

SEQ ID NO: 30064 - protein, 23 aa, Homo sapiens
CAREMLRDAQSRHNYNYYGMDVW

SEQ ID NO: 30065 - protein, 15 aa, Homo sapiens
CARAVEFSSSNFDYW

SEQ ID NO: 30066 - protein, 15 aa, Homo sapiens
CAKFGSLSDSTRDYW

SEQ ID NO: 30067 - protein, 17 aa, Homo sapiens
CAKDSSGSYPHNWFDPW

SEQ ID NO: 30068 - protein, 20 aa, Homo sapiens
CAKNTIFGVVISSYWYFDLW

SEQ ID NO: 30069 - protein, 17 aa, Homo sapiens
CARDDPNSSSWYAFDIW

SEQ ID NO: 30070 - protein, 26 aa, Homo sapiens
CARLGYGCSGDTCYSEIESRDGMDVW

SEQ ID NO: 30071 - protein, 13 aa, Homo sapiens
CARESHDHWFDFW

SEQ ID NO: 30072 - protein, 20 aa, Homo sapiens
CARTGLEYYYDSTPEGFDIW

SEQ ID NO: 30073 - protein, 19 aa, Homo sapiens
CARGRGGPETYYYYGMDVW

SEQ ID NO: 30074 - protein, 22 aa, Homo sapiens
CARAPISYCIGVGCNSNFFGPW

SEQ ID NO: 30075 - protein, 12 aa, Homo sapiens
CQQTLSTPFFTF

SEQ ID NO: 30076 - protein, 25 aa, Homo sapiens
CAKDGLRYFDWLSPIHYYYYGMDVW

SEQ ID NO: 30077 - protein, 17 aa, Homo sapiens
CARVYSSNYYYYYMDVW

SEQ ID NO: 30078 - protein, 18 aa, Homo sapiens
CAKDKRCNSASCWGGDYW

SEQ ID NO: 30079 - protein, 19 aa, Homo sapiens
CARDSRYNWNDESWYFDLW

SEQ ID NO: 30080 - protein, 17 aa, Homo sapiens
CAKMEAQYSGSYPFDYW

SEQ ID NO: 30081 - protein, 16 aa, Homo sapiens
CVRDSFDEEVVRFDFW

SEQ ID NO: 30082 - protein, 18 aa, Homo sapiens
CARLIPSSSSLPEYFQHW

SEQ ID NO: 30083 - protein, 21 aa, Homo sapiens
CARKEAYQLLGSYYYYGMDVW

SEQ ID NO: 30084 - protein, 13 aa, Homo sapiens
CTRERRATAFDMW

SEQ ID NO: 30085 - protein, 14 aa, Homo sapiens
CARHLYSGSYFDLW

SEQ ID NO: 30086 - protein, 17 aa, Homo sapiens
CARDRILGYGASWPDYW

SEQ ID NO: 30087 - protein, 17 aa, Homo sapiens
CARVRSKWLVNDAFDVW

SEQ ID NO: 30088 - protein, 19 aa, Homo sapiens
CARQFVGRAGPREDWFDPW

SEQ ID NO: 30089 - protein, 16 aa, Homo sapiens
CARGSDKSGPYYFAYW

SEQ ID NO: 30090 - protein, 17 aa, Homo sapiens
CAKAFKWDRNYYYMDVW

SEQ ID NO: 30091 - protein, 22 aa, Homo sapiens
CARLGSISWRKFQNYYYYMDVW

SEQ ID NO: 30092 - protein, 13 aa, Homo sapiens
CVKDGVWNNFDYW

SEQ ID NO: 30093 - protein, 20 aa, Homo sapiens
CARDLLHDFWRGFYSYFDYW

SEQ ID NO: 30094 - protein, 18 aa, Homo sapiens
CAKGSPTIRDNWNYFFRW

SEQ ID NO: 30095 - protein, 22 aa, Homo sapiens
CAKDNDFWRSGGPYYYYGMDVW

SEQ ID NO: 30096 - protein, 20 aa, Homo sapiens
CARVRYYYDRSDPSKEIDYW

SEQ ID NO: 30097 - protein, 18 aa, Homo sapiens
CARAYSSGWLTDIHFDLW

SEQ ID NO: 30098 - protein, 13 aa, Homo sapiens
CAMGLLHPFFDYW

SEQ ID NO: 30099 - protein, 23 aa, Homo sapiens
CAREKGWDDYGDQEYYYYYMDVW

SEQ ID NO: 30100 - protein, 9 aa, Homo sapiens
CQQDYNFWF

SEQ ID NO: 30101 - protein, 23 aa, Homo sapiens
CARGLDVSDFWTTTHVKKWLDPW

SEQ ID NO: 30102 - protein, 17 aa, Homo sapiens
CAHRVSTAYYYGPFDSW

SEQ ID NO: 30103 - protein, 18 aa, Homo sapiens
CADGHYDSSGYWGQLDYW

SEQ ID NO: 30104 - protein, 21 aa, Homo sapiens
CARLRFLEWLFVPVVAWFDPW

SEQ ID NO: 30105 - protein, 15 aa, Homo sapiens
CARDIGITENAFDIW

SEQ ID NO: 30106 - protein, 18 aa, Homo sapiens
CAIGFYSGIYFKGVFDIW

SEQ ID NO: 30107 - protein, 22 aa, Homo sapiens
CAMGGSPSLRVGPYYYYYMDVW

SEQ ID NO: 30108 - protein, 23 aa, Homo sapiens
CARHRYSGYTYGSTYPDWYFDLW

SEQ ID NO: 30109 - protein, 22 aa, Homo sapiens
CARTLRIPPAATPYFRGWFDYW

SEQ ID NO: 30110 - protein, 24 aa, Homo sapiens
CVKDKSLLGYCTAGNCYPGHFDYW

SEQ ID NO: 30111 - protein, 19 aa, Homo sapiens
CVTWFYDESSDDSDAFDIW

SEQ ID NO: 30112 - protein, 19 aa, Homo sapiens
CAREKNRRDYYYYYGMDVW

SEQ ID NO: 30113 - protein, 24 aa, Homo sapiens
CARGVGYYYDSSGYYSELFLFDYW

SEQ ID NO: 30114 - protein, 23 aa, Homo sapiens
CAKVSCPGYYGSGTCYYYGMDVW

SEQ ID NO: 30115 - protein, 13 aa, Homo sapiens
CATSPWDLLPDYW

SEQ ID NO: 30116 - protein, 20 aa, Homo sapiens
CAKDEEQYLVLYFYYGMDVW

SEQ ID NO: 30117 - protein, 14 aa, Homo sapiens
CARHGTMAGWFDPW

SEQ ID NO: 30118 - protein, 17 aa, Homo sapiens
CSGARGIIKPILHFAYW

SEQ ID NO: 30119 - protein, 16 aa, Homo sapiens
CARDVTTVTTTRLDYW

SEQ ID NO: 30120 - protein, 20 aa, Homo sapiens
CAKGGPRSGGRRNFWYFDLW

SEQ ID NO: 30121 - protein, 21 aa, Homo sapiens
CARERMAYYDFWSGHWYFDLW

SEQ ID NO: 30122 - protein, 16 aa, Homo sapiens
CARVGEQLVVGGFDIW

SEQ ID NO: 30123 - protein, 17 aa, Homo sapiens
CARDGLGSSSSCYFDYW

SEQ ID NO: 30124 - protein, 14 aa, Homo sapiens
CASGAIIARNFDSW

SEQ ID NO: 30125 - protein, 18 aa, Homo sapiens
CAKASRWLHYYYYGMDVW

SEQ ID NO: 30126 - protein, 19 aa, Homo sapiens
CGRVAGTSSPYGYFYIDVW

SEQ ID NO: 30127 - protein, 12 aa, Homo sapiens
CARRTQHYLDVW

SEQ ID NO: 30128 - protein, 17 aa, Homo sapiens
CARGGDYFESAYSFDSW

SEQ ID NO: 30129 - protein, 19 aa, Homo sapiens
CARGTPSDRWLQFAPFDNW

SEQ ID NO: 30130 - protein, 16 aa, Homo sapiens
CARATEWLVPNKPDYW

SEQ ID NO: 30131 - protein, 25 aa, Homo sapiens
CARLGYCSASSCPRYYYFYDGMDVW

SEQ ID NO: 30132 - protein, 19 aa, Homo sapiens
CGRMAASSSSRSYYYMDVW

SEQ ID NO: 30133 - protein, 14 aa, Homo sapiens
CARQPVGDSVFDYW

SEQ ID NO: 30134 - protein, 16 aa, Homo sapiens
CARGRDPALASPIDYW

SEQ ID NO: 30135 - protein, 19 aa, Homo sapiens
CARGKSYDFSISINWFDPW

SEQ ID NO: 30136 - protein, 23 aa, Homo sapiens
CARHPLRRITMIVVVITPAFDIW

SEQ ID NO: 30137 - protein, 17 aa, Homo sapiens
CARGPAGVAAPYYFDLW

SEQ ID NO: 30138 - protein, 18 aa, Homo sapiens
CASQIVVVPAAFRWFDPW

SEQ ID NO: 30139 - protein, 16 aa, Homo sapiens
CARQGGSPPSYYFDYW

SEQ ID NO: 30140 - protein, 18 aa, Homo sapiens
CARGSADFWSAGGWFDPW

SEQ ID NO: 30141 - protein, 24 aa, Homo sapiens
CARALAVYHYDEDIPRGPISFDMW

SEQ ID NO: 30142 - protein, 16 aa, Homo sapiens
CARVPTAMAAEYFQHW

SEQ ID NO: 30143 - protein, 19 aa, Homo sapiens
CAKDSQEVRGYSYGYLDYW

SEQ ID NO: 30144 - protein, 16 aa, Homo sapiens
CATYCGGDCYSGFGYW

SEQ ID NO: 30145 - protein, 13 aa, Homo sapiens
CVRDRRDSGSDYW

SEQ ID NO: 30146 - protein, 11 aa, Homo sapiens
CVRGWSAPDYW

SEQ ID NO: 30147 - protein, 20 aa, Homo sapiens
CARDGGVRGVMFYYYGMDVW

SEQ ID NO: 30148 - protein, 17 aa, Homo sapiens
CARDRGSSYFLYYFGYW

SEQ ID NO: 30149 - protein, 24 aa, Homo sapiens
CARDTRLRYCSGGSCYSIYYFDYW

SEQ ID NO: 30150 - protein, 19 aa, Homo sapiens
CARERYPQVWWLPGPFDYW

SEQ ID NO: 30151 - protein, 19 aa, Homo sapiens
CARALWRYCSSTSCFVDYW

SEQ ID NO: 30152 - protein, 22 aa, Homo sapiens
CARVQNSSGWREGAWDDAFDIW

SEQ ID NO: 30153 - protein, 15 aa, Homo sapiens
CARAPGYYHYGMDVW

SEQ ID NO: 30154 - protein, 25 aa, Homo sapiens
CARELSNIAGRENGDPFYYYYMDVW

SEQ ID NO: 30155 - protein, 13 aa, Homo sapiens
CARAVAALWFDPW

SEQ ID NO: 30156 - protein, 17 aa, Homo sapiens
CARGGYDFWSGYEFDSW

SEQ ID NO: 30157 - protein, 13 aa, Homo sapiens
CARQDWATDFDIW

SEQ ID NO: 30158 - protein, 15 aa, Homo sapiens
CAKAVSTSHYYYDSW

SEQ ID NO: 30159 - protein, 17 aa, Homo sapiens
CGRDLVGGHRGRYVGYW

SEQ ID NO: 30160 - protein, 22 aa, Homo sapiens
CARDMNGQGAGRRYYHYGMDVW

SEQ ID NO: 30161 - protein, 17 aa, Homo sapiens
CASSQFTYYDSSGFEYW

SEQ ID NO: 30162 - protein, 24 aa, Homo sapiens
CARGQGNDFWSGLRTNYYYAMDVW

SEQ ID NO: 30163 - protein, 16 aa, Homo sapiens
CARLGARDGYSPLDYW

SEQ ID NO: 30164 - protein, 19 aa, Homo sapiens
CSHATFYYGSGGSTWFDPW

SEQ ID NO: 30165 - protein, 20 aa, Homo sapiens
CARRVAAAGIGVYYYYMDVW

SEQ ID NO: 30166 - protein, 22 aa, Homo sapiens
CASGPVVVTDGRNYYYYGMDVW

SEQ ID NO: 30167 - protein, 14 aa, Homo sapiens
CARVYGDSNYFDYW

SEQ ID NO: 30168 - protein, 18 aa, Homo sapiens
CAREAVALTHYYYYMDVW

SEQ ID NO: 30169 - protein, 24 aa, Homo sapiens
CAKDAEFMVRGIVKISTVGGFDYW

SEQ ID NO: 30170 - protein, 13 aa, Homo sapiens
CAKARHALEIDYW

SEQ ID NO: 30171 - protein, 33 aa, Homo sapiens
CAKDLRGVSPYDYDILTGYNKPARVRYDGLDVW

SEQ ID NO: 30172 - protein, 18 aa, Homo sapiens
CAREPLSGGIMKYFFDNW

SEQ ID NO: 30173 - protein, 17 aa, Homo sapiens
CARHGSFLGVISYFDYW

SEQ ID NO: 30174 - protein, 15 aa, Homo sapiens
CAKDISGYVRIFDFW

SEQ ID NO: 30175 - protein, 11 aa, Homo sapiens
CASGSGYMDVW

SEQ ID NO: 30176 - protein, 17 aa, Homo sapiens
CARGPFPGYKTWEDDYW

SEQ ID NO: 30177 - protein, 21 aa, Homo sapiens
CARHILGYSSGWARLGRFDYW

SEQ ID NO: 30178 - protein, 20 aa, Homo sapiens
CARHVSFFYSGSYHNWFDPW

SEQ ID NO: 30179 - protein, 16 aa, Homo sapiens
CARGRTERFLGWFDPW

SEQ ID NO: 30180 - protein, 15 aa, Homo sapiens
CARAEEERWLQFDYW

SEQ ID NO: 30181 - protein, 16 aa, Homo sapiens
CALWYNLNDRNWFDPW

SEQ ID NO: 30182 - protein, 16 aa, Homo sapiens
CARVGGFQASFSFDHW

SEQ ID NO: 30183 - protein, 19 aa, Homo sapiens
CARTSFGVARYYYYYMDVW

SEQ ID NO: 30184 - protein, 26 aa, Homo sapiens
CARGQFEYCSSTSCPGYYYYYGMDVW

SEQ ID NO: 30185 - protein, 18 aa, Homo sapiens
CARQSFWMAARPNWFHPW

SEQ ID NO: 30186 - protein, 12 aa, Homo sapiens
CYSIDDSGNPIF

SEQ ID NO: 30187 - protein, 19 aa, Homo sapiens
CATATYYYDGSGYSPFDYW

SEQ ID NO: 30188 - protein, 22 aa, Homo sapiens
CARHAEDRKLRFLDYLSNFDSW

SEQ ID NO: 30189 - protein, 24 aa, Homo sapiens
CARHFSEPTDYYDSSGYLSGFDYW

SEQ ID NO: 30190 - protein, 16 aa, Homo sapiens
CARGLFYGMGWYFDLW

SEQ ID NO: 30191 - protein, 19 aa, Homo sapiens
CARGFITMVRGVIGWFDPW

SEQ ID NO: 30192 - protein, 19 aa, Homo sapiens
CAGSEGEADYYYYYGMDVW

SEQ ID NO: 30193 - protein, 24 aa, Homo sapiens
CARDQVHLKDILTGYTPLVYFDYW

SEQ ID NO: 30194 - protein, 16 aa, Homo sapiens
CARRHYDNSEYYFDSW

SEQ ID NO: 30195 - protein, 20 aa, Homo sapiens
CALTVGAAHVDYYYYYMHVW

SEQ ID NO: 30196 - protein, 17 aa, Homo sapiens
CAKEMDILTGYSAFDFW

SEQ ID NO: 30197 - protein, 16 aa, Homo sapiens
CAKDTQWLVHPSFGYW

SEQ ID NO: 30198 - protein, 20 aa, Homo sapiens
CAKDAGNRYSNYQGNWFDPW

SEQ ID NO: 30199 - protein, 17 aa, Homo sapiens
CVRAAARTNSYYYMDVW

SEQ ID NO: 30200 - protein, 15 aa, Homo sapiens
CTVRLVVTPDGFDYW

SEQ ID NO: 30201 - protein, 21 aa, Homo sapiens
CARGGVFGGSWYIPENWFDPW

SEQ ID NO: 30202 - protein, 17 aa, Homo sapiens
CARWVGVGATSGLIDYW

SEQ ID NO: 30203 - protein, 17 aa, Homo sapiens
CAKGKVSADMGHWFDPW

SEQ ID NO: 30204 - protein, 17 aa, Homo sapiens
CATNLRIAGRRDAFDIW

SEQ ID NO: 30205 - protein, 23 aa, Homo sapiens
CARLNRLQWLGESSYYYYAMDVW

SEQ ID NO: 30206 - protein, 16 aa, Homo sapiens
CAIFRQLVISQYFDYW

SEQ ID NO: 30207 - protein, 16 aa, Homo sapiens
CARSITMIEGGAFDIW

SEQ ID NO: 30208 - protein, 15 aa, Homo sapiens
CAHFSIIARNAFDYW

SEQ ID NO: 30209 - protein, 18 aa, Homo sapiens
CARVRASGNYRRYYFDSW

SEQ ID NO: 30210 - protein, 17 aa, Homo sapiens
CARDLEQWLVRRAFDIW

SEQ ID NO: 30211 - protein, 19 aa, Homo sapiens
CARREAARPGDYYYYMDVW

SEQ ID NO: 30212 - protein, 17 aa, Homo sapiens
CARDRGELLLYWYFDLW

SEQ ID NO: 30213 - protein, 22 aa, Homo sapiens
CARDSRLPWNGYSVSHYYMDVW

SEQ ID NO: 30214 - protein, 17 aa, Homo sapiens
CAHRPYFDFLMGAFDVW

SEQ ID NO: 30215 - protein, 13 aa, Homo sapiens
CARGWRQNSFDIW

SEQ ID NO: 30216 - protein, 24 aa, Homo sapiens
CVTEAEDCPPLLYCRNDSPSFDHW

SEQ ID NO: 30217 - protein, 19 aa, Homo sapiens
CARDLRYSSPTPHPYFDYW

SEQ ID NO: 30218 - protein, 19 aa, Homo sapiens
CARAGSGSPSHYYYGMDVW

SEQ ID NO: 30219 - protein, 21 aa, Homo sapiens
CARDRVITFGGVIVPGWFDPW

SEQ ID NO: 30220 - protein, 17 aa, Homo sapiens
CAKDLAVEPYYYGMDVW

SEQ ID NO: 30221 - protein, 27 aa, Homo sapiens
CARDLITWPYNYYYDSSGYQIGWFDPW

SEQ ID NO: 30222 - protein, 18 aa, Homo sapiens
CARAPRGLVVVLDSFDIW

SEQ ID NO: 30223 - protein, 25 aa, Homo sapiens
CARDHGNYDSTGFLLPGEVNYFDYW

SEQ ID NO: 30224 - protein, 20 aa, Homo sapiens
CAKELGYSSSWYMGDAFDIW

SEQ ID NO: 30225 - protein, 21 aa, Homo sapiens
CTTDGGNSFGSSAVRYDLDYW

SEQ ID NO: 30226 - protein, 17 aa, Homo sapiens
CARHAYGDSQSAPVDYW

SEQ ID NO: 30227 - protein, 17 aa, Homo sapiens
CARRGSERSGYYYMDVW

SEQ ID NO: 30228 - protein, 15 aa, Homo sapiens
CARDRVIRGVDFDYW

SEQ ID NO: 30229 - protein, 21 aa, Homo sapiens
CARRRPFYTMVRGVDLSFDYW

SEQ ID NO: 30230 - protein, 24 aa, Homo sapiens
CARDRAHCSGGTCYLYDYYGMDVW

SEQ ID NO: 30231 - protein, 20 aa, Homo sapiens
CARGRIGVQHYFYYYYVDVW

SEQ ID NO: 30232 - protein, 17 aa, Homo sapiens
CVRDQDDDARPNWFDPW

SEQ ID NO: 30233 - protein, 17 aa, Homo sapiens
CARSLERSGYFGWFDPW

SEQ ID NO: 30234 - protein, 14 aa, Homo sapiens
CASSRWTHWYFDLW

SEQ ID NO: 30235 - protein, 18 aa, Homo sapiens
CAREPEYSNNWSSAFDYW

SEQ ID NO: 30236 - protein, 14 aa, Homo sapiens
CAHRLSLYGDFDYW

SEQ ID NO: 30237 - protein, 18 aa, Homo sapiens
CARNLGSSSGHGAYFDLW

SEQ ID NO: 30238 - protein, 25 aa, Homo sapiens
CAKLRIAGAQQWLVEGPMIDAFHIW

SEQ ID NO: 30239 - protein, 16 aa, Homo sapiens
CARLWRRSWDNWFDPW

SEQ ID NO: 30240 - protein, 22 aa, Homo sapiens
CVRGRGDYDSGNYYHSYGMDVW

SEQ ID NO: 30241 - protein, 14 aa, Homo sapiens
CAREGLVGSTFDSW

SEQ ID NO: 30242 - protein, 15 aa, Homo sapiens
CTRGILTTSNWFDLW

SEQ ID NO: 30243 - protein, 13 aa, Homo sapiens
CARDSPGYWFDPW

SEQ ID NO: 30244 - protein, 17 aa, Homo sapiens
CARQSRRGYSYGYMYYW

SEQ ID NO: 30245 - protein, 22 aa, Homo sapiens
CASYRFVRWLVHPLALEYFQHW

SEQ ID NO: 30246 - protein, 22 aa, Homo sapiens
CTTQWGQTFYYDTSGYYPLDYW

SEQ ID NO: 30247 - protein, 20 aa, Homo sapiens
CARRGKITIFGVVKNWFDPW

SEQ ID NO: 30248 - protein, 23 aa, Homo sapiens
CAKDWDIVVEPDAVDYYYGMDVW

SEQ ID NO: 30249 - protein, 18 aa, Homo sapiens
CARAAVVDLYEFFYMDVW

SEQ ID NO: 30250 - protein, 18 aa, Homo sapiens
CAKDHAFGVVIIDYFDYW

SEQ ID NO: 30251 - protein, 17 aa, Homo sapiens
CACSMIVVVKRAEFDYW

SEQ ID NO: 30252 - protein, 21 aa, Homo sapiens
CVRESEYYDNTGYPYWYFDLW

SEQ ID NO: 30253 - protein, 19 aa, Homo sapiens
CARGDFYDVSGYPYYFDYW

SEQ ID NO: 30254 - protein, 15 aa, Homo sapiens
CATSSRSYFDAFDIW

SEQ ID NO: 30255 - protein, 19 aa, Homo sapiens
CARGNKTTMIVVAGLVDYW

SEQ ID NO: 30256 - protein, 25 aa, Homo sapiens
CARVAGDRRRHIVVVTAHPGYFDYW

SEQ ID NO: 30257 - protein, 18 aa, Homo sapiens
CVRGLSHRLTIFGVEDYW

SEQ ID NO: 30258 - protein, 13 aa, Homo sapiens
CVKSNGAGDFDSW

SEQ ID NO: 30259 - protein, 27 aa, Homo sapiens
CASLPAVHKRPHSILTNGQYYYYMDVW

SEQ ID NO: 30260 - protein, 14 aa, Homo sapiens
CAHSLMFQFAFDFW

SEQ ID NO: 30261 - protein, 22 aa, Homo sapiens
CARGGIVPATTVPYHYYGMDVW

SEQ ID NO: 30262 - protein, 29 aa, Homo sapiens
CARDGLPYYDFWSGYYFGGGREYYYMDVW

SEQ ID NO: 30263 - protein, 19 aa, Homo sapiens
CARDSPVVTHLLSPHFDLW

SEQ ID NO: 30264 - protein, 15 aa, Homo sapiens
CAKAPYSSSWYLHYW

SEQ ID NO: 30265 - protein, 18 aa, Homo sapiens
CARLPHDSTGYYVPFDYW

SEQ ID NO: 30266 - protein, 14 aa, Homo sapiens
CTACDDSLNGLWVF

SEQ ID NO: 30267 - protein, 14 aa, Homo sapiens
CATVTKDYWYFDLW

SEQ ID NO: 30268 - protein, 15 aa, Homo sapiens
CVRGWDSSENYAIYW

SEQ ID NO: 30269 - protein, 22 aa, Homo sapiens
CAREKDMEHISAAGNINYFDSW

SEQ ID NO: 30270 - protein, 14 aa, Homo sapiens
CARESVHPNGPDYW

SEQ ID NO: 30271 - protein, 22 aa, Homo sapiens
CARHKFCSGAACDFKGFYFDFW

SEQ ID NO: 30272 - protein, 20 aa, Homo sapiens
CARDWSGSYPHFYYYYMDVW

SEQ ID NO: 30273 - protein, 21 aa, Homo sapiens
CARATYDYGDYGEGGLWFDPW

SEQ ID NO: 30274 - protein, 16 aa, Homo sapiens
CAKDLDYGGHSYFDCW

SEQ ID NO: 30275 - protein, 17 aa, Homo sapiens
CARESETRGYNYGYDYW

SEQ ID NO: 30276 - protein, 20 aa, Homo sapiens
CTREAAFFGELSTSRWFDPW

SEQ ID NO: 30277 - protein, 12 aa, Homo sapiens
CQQAFSLPPWSF

SEQ ID NO: 30278 - protein, 24 aa, Homo sapiens
CARDAHCSSTSCERGDYYYGMDVW

SEQ ID NO: 30279 - protein, 16 aa, Homo sapiens
CARERPSSWASNFDYW

SEQ ID NO: 30280 - protein, 18 aa, Homo sapiens
CVKDLVDRDMVSVAFDYW

SEQ ID NO: 30281 - protein, 19 aa, Homo sapiens
CAREMFSDVLTGYYPSDYW

SEQ ID NO: 30282 - protein, 17 aa, Homo sapiens
CVRDRRTLGLSYDFEYW

SEQ ID NO: 30283 - protein, 13 aa, Homo sapiens
CQSYDKSLRGSAF

SEQ ID NO: 30284 - protein, 13 aa, Homo sapiens
CARFGFSDGMDVW

SEQ ID NO: 30285 - protein, 16 aa, Homo sapiens
CAKGSGYSGYDWLDYW

SEQ ID NO: 30286 - protein, 15 aa, Homo sapiens
CAKSPYNRATGFDYW

SEQ ID NO: 30287 - protein, 16 aa, Homo sapiens
CACGYSYGYGGYFEHW

SEQ ID NO: 30288 - protein, 13 aa, Homo sapiens
CARIRFSGEFDYW

SEQ ID NO: 30289 - protein, 17 aa, Homo sapiens
CTREEGLFISGWPFDYW

SEQ ID NO: 30290 - protein, 18 aa, Homo sapiens
CARRVVEVSGQGNWFGPW

SEQ ID NO: 30291 - protein, 19 aa, Homo sapiens
CARLLKRFGFSNPYYFDCW

SEQ ID NO: 30292 - protein, 20 aa, Homo sapiens
CARDLTAVAGMDYYYGMDVW

SEQ ID NO: 30293 - protein, 15 aa, Homo sapiens
CARLDEARASSCDYW

SEQ ID NO: 30294 - protein, 16 aa, Homo sapiens
CARTSFNVQETGFDSW

SEQ ID NO: 30295 - protein, 19 aa, Homo sapiens
CARLLIYTSGWYGHLFDYW

SEQ ID NO: 30296 - protein, 12 aa, Homo sapiens
CHQYNYYSTWTF

SEQ ID NO: 30297 - protein, 17 aa, Homo sapiens
CARSVSEMATIMYFQHW

SEQ ID NO: 30298 - protein, 24 aa, Homo sapiens
CARAVRDDFWSGYYKNYYYGMDVW

SEQ ID NO: 30299 - protein, 26 aa, Homo sapiens
CARVRARVQEITIFGVVRAIDAFDIW

SEQ ID NO: 30300 - protein, 23 aa, Homo sapiens
CATGTFYDIVTGYRGREDFFDSW

SEQ ID NO: 30301 - protein, 17 aa, Homo sapiens
CAREGYCSGGSCYPDYW

SEQ ID NO: 30302 - protein, 17 aa, Homo sapiens
CARPFRHYYDSSAFDIW

SEQ ID NO: 30303 - protein, 18 aa, Homo sapiens
CATSSWALDTSGWYFDYW

SEQ ID NO: 30304 - protein, 28 aa, Homo sapiens
CAKVVSDDGTHYNLLTGLHVSIDGMDVW

SEQ ID NO: 30305 - protein, 17 aa, Homo sapiens
CARDRGDVAGLYEFDPW

SEQ ID NO: 30306 - protein, 20 aa, Homo sapiens
CARWVVVAATGDYYYGMDVW

SEQ ID NO: 30307 - protein, 18 aa, Homo sapiens
CTRDSQDSSYWFRFWDYW

SEQ ID NO: 30308 - protein, 17 aa, Homo sapiens
CARVGVDSSSWPYFDYW

SEQ ID NO: 30309 - protein, 21 aa, Homo sapiens
CARGIYYYDNSGYQYNWFDPW

SEQ ID NO: 30310 - protein, 19 aa, Homo sapiens
CAKDAHHMVRGVIITFDYW

SEQ ID NO: 30311 - protein, 12 aa, Homo sapiens
CVTWLFHHFDYW

SEQ ID NO: 30312 - protein, 17 aa, Homo sapiens
CARGRAYGEDSQAFDIW

SEQ ID NO: 30313 - protein, 15 aa, Homo sapiens
CARDGWADPGYFQHW

SEQ ID NO: 30314 - protein, 11 aa, Homo sapiens
CMQGTHWVYTF

SEQ ID NO: 30315 - protein, 16 aa, Homo sapiens
CAKGPSSTPWGVFDYW

SEQ ID NO: 30316 - protein, 18 aa, Homo sapiens
CARDSTYYDFWSGYIDYW

SEQ ID NO: 30317 - protein, 21 aa, Homo sapiens
CARDLSYCSSTSCYTALFDYW

SEQ ID NO: 30318 - protein, 13 aa, Homo sapiens
CAKWELQFYFDFW

SEQ ID NO: 30319 - protein, 21 aa, Homo sapiens
CATAYKYDGSGPSVEDALDIW

SEQ ID NO: 30320 - protein, 11 aa, Homo sapiens
CARENFSPDYW

SEQ ID NO: 30321 - protein, 21 aa, Homo sapiens
CARDRGYCTNGVCPTWYPRYW

SEQ ID NO: 30322 - protein, 17 aa, Homo sapiens
CAREGDYDSSGSYFQHW

SEQ ID NO: 30323 - protein, 13 aa, Homo sapiens
CQQYYTTPRAITF

SEQ ID NO: 30324 - protein, 19 aa, Homo sapiens
CARTRGYSYGLIKNWFDPW

SEQ ID NO: 30325 - protein, 25 aa, Homo sapiens
CARDPMITFGGVIVMDYYYYGMDVW

SEQ ID NO: 30326 - protein, 13 aa, Homo sapiens
CQQSYNAPPGQAF

SEQ ID NO: 30327 - protein, 21 aa, Homo sapiens
CARLREDYDSSGYSLYFFDYW

SEQ ID NO: 30328 - protein, 28 aa, Homo sapiens
CASQPQNRSMNRGIKPRYDNFHYYMDVW

SEQ ID NO: 30329 - protein, 18 aa, Homo sapiens
CARSDMVRGVILSWFDPW

SEQ ID NO: 30330 - protein, 19 aa, Homo sapiens
CATVRSPYFDSSGYYFDYW

SEQ ID NO: 30331 - protein, 19 aa, Homo sapiens
CARLSVVVGATPALWLDYW

SEQ ID NO: 30332 - protein, 21 aa, Homo sapiens
CARDSSRYCIYLVCYTDFDHW

SEQ ID NO: 30333 - protein, 17 aa, Homo sapiens
CAIDTSRHGYNFIFDFW

SEQ ID NO: 30334 - protein, 21 aa, Homo sapiens
CAREGPVRGATGTNPYYFDYW

SEQ ID NO: 30335 - protein, 13 aa, Homo sapiens
CQHRSDWPPIFTF

SEQ ID NO: 30336 - protein, 20 aa, Homo sapiens
CARHYFDISGYHSNDAFDVW

SEQ ID NO: 30337 - protein, 15 aa, Homo sapiens
CARATEGSSYYLDYW

SEQ ID NO: 30338 - protein, 19 aa, Homo sapiens
CAHSLAYCGADCYDAFHFW

SEQ ID NO: 30339 - protein, 19 aa, Homo sapiens
CARDWPDAEQWLVTWFDPW

SEQ ID NO: 30340 - protein, 12 aa, Homo sapiens
CLQHDNLFLWTF

SEQ ID NO: 30341 - protein, 14 aa, Homo sapiens
CARHLEYSSSFDYW

SEQ ID NO: 30342 - protein, 20 aa, Homo sapiens
CARQLGQVLSGAIWAPFDIW

SEQ ID NO: 30343 - protein, 17 aa, Homo sapiens
CASDRRSRKERTRFDYW

SEQ ID NO: 30344 - protein, 17 aa, Homo sapiens
CAKAPSYSSSSYYFDYW

SEQ ID NO: 30345 - protein, 18 aa, Homo sapiens
CARPKDNGEWTFDAFDIW

SEQ ID NO: 30346 - protein, 17 aa, Homo sapiens
CARGSSQWLGLWYFDLW

SEQ ID NO: 30347 - protein, 20 aa, Homo sapiens
CARGTSCSGGYCSPIAFDIW

SEQ ID NO: 30348 - protein, 19 aa, Homo sapiens
CVKVPYGGGALKRFYFDYW

SEQ ID NO: 30349 - protein, 19 aa, Homo sapiens
CARDQGAISITGTTKPDYW

SEQ ID NO: 30350 - protein, 20 aa, Homo sapiens
CARQLDFWSGYYREYYFDYW

SEQ ID NO: 30351 - protein, 18 aa, Homo sapiens
CARSSSGRYYRNWYFDLW

SEQ ID NO: 30352 - protein, 25 aa, Homo sapiens
CARVSSMKTCRGGSCKTSFWYFDLW

SEQ ID NO: 30353 - protein, 11 aa, Homo sapiens [sequence omitted]

SEQ ID NO: 30354 - protein, 14 aa, Homo sapiens
CQSHDISLSGLGVF

SEQ ID NO: 30355 - protein, 16 aa, Homo sapiens
CARGSGTWYPLRFDYW

SEQ ID NO: 30356 - protein, 16 aa, Homo sapiens
CTRDRGATQRHYADYW

SEQ ID NO: 30357 - protein, 17 aa, Homo sapiens
CARTIYNFASGYYFDYW

SEQ ID NO: 30358 - protein, 19 aa, Homo sapiens
CAKDLYCSGTSCFSWSDYW

SEQ ID NO: 30359 - protein, 18 aa, Homo sapiens
CAKDYFIWGRGTYSFDYW

SEQ ID NO: 30360 - protein, 16 aa, Homo sapiens
CARETLPAAGDVFDVW

SEQ ID NO: 30361 - protein, 18 aa, Homo sapiens
CARHKTGFLQWDNWFDPW

SEQ ID NO: 30362 - protein, 15 aa, Homo sapiens
CSRGIDWGGLPFDYW

SEQ ID NO: 30363 - protein, 19 aa, Homo sapiens
CAKVGRPYGSGTYYNFDFW

SEQ ID NO: 30364 - protein, 18 aa, Homo sapiens
CARGYSSGWYERWYFDLW

SEQ ID NO: 30365 - protein, 20 aa, Homo sapiens
CAMHYFDVSGSYGPSHFVYW

SEQ ID NO: 30366 - protein, 19 aa, Homo sapiens
CARRGPKTRFHFYYYMDVW

SEQ ID NO: 30367 - protein, 20 aa, Homo sapiens
CARQSAFSSSWYALNWFEFW

SEQ ID NO: 30368 - protein, 27 aa, Homo sapiens
CARIPAVHFTVFGVGPTHYYYYGMDVW

SEQ ID NO: 30369 - protein, 18 aa, Homo sapiens
CAKSEMTTVSFGNHFDFW

SEQ ID NO: 30370 - protein, 20 aa, Homo sapiens
CAKGYCSSTSCYKSDWFDPW

SEQ ID NO: 30371 - protein, 13 aa, Homo sapiens
CNSRDSTGNREIF

SEQ ID NO: 30372 - protein, 16 aa, Homo sapiens
CAKPGMLYWLYYFDYW

SEQ ID NO: 30373 - protein, 15 aa, Homo sapiens
CARHMGAPTGWFDPW

SEQ ID NO: 30374 - protein, 20 aa, Homo sapiens
CARRNTRAFYDRGHLWFDPW

SEQ ID NO: 30375 - protein, 18 aa, Homo sapiens
CARLAKFRGVKSPAFDYW

SEQ ID NO: 30376 - protein, 15 aa, Homo sapiens
CLSADSSGTYQGYVF

SEQ ID NO: 30377 - protein, 18 aa, Homo sapiens
CARVPNWYGKVDYYFDYW

SEQ ID NO: 30378 - protein, 13 aa, Homo sapiens
CTTEWEVPTFDYW

SEQ ID NO: 30379 - protein, 14 aa, Homo sapiens
CARRNILWGWFDPW

SEQ ID NO: 30380 - protein, 14 aa, Homo sapiens
CAAPVIIAASVDYW

SEQ ID NO: 30381 - protein, 26 aa, Homo sapiens
CARAIEMQIQYLLLYSPRGYYYMDVW

SEQ ID NO: 30382 - protein, 24 aa, Homo sapiens
CARQYPSLTMRVVVITLDDAFDSW

SEQ ID NO: 30383 - protein, 20 aa, Homo sapiens
CAREYYDSSGYYPPVAFDIW

SEQ ID NO: 30384 - protein, 18 aa, Homo sapiens
CARWCSGYDPEKSRFDYW

SEQ ID NO: 30385 - protein, 18 aa, Homo sapiens
CVKDKSSSIEVIRDFLYW

SEQ ID NO: 30386 - protein, 16 aa, Homo sapiens
CARRSCGSISCWLDPW

SEQ ID NO: 30387 - protein, 20 aa, Homo sapiens
CARGVTSVAARFRNWYFDLW

SEQ ID NO: 30388 - protein, 21 aa, Homo sapiens
CAKEPYPTAKTYYYYYYMDVW

SEQ ID NO: 30389 - protein, 14 aa, Homo sapiens
CAGGVYPTPPFDYW

SEQ ID NO: 30390 - protein, 16 aa, Homo sapiens
CAGVYCSSGSCYIDSW

SEQ ID NO: 30391 - protein, 15 aa, Homo sapiens
CTTFETVFGVVIDYW

SEQ ID NO: 30392 - protein, 17 aa, Homo sapiens
CASSAAYQLLFHYLDYW

SEQ ID NO: 30393 - protein, 15 aa, Homo sapiens
CATHDFWSGLAIDVW

SEQ ID NO: 30394 - protein, 16 aa, Homo sapiens
CARDGGSGWSGYFDYW

SEQ ID NO: 30395 - protein, 22 aa, Homo sapiens
CVKEGGAGGWNLVKGRGYFDIW

SEQ ID NO: 30396 - protein, 17 aa, Homo sapiens
CTTDTGSSWYGYYFDYW

SEQ ID NO: 30397 - protein, 21 aa, Homo sapiens
CARAVSYYPVYGDYVAYIDYW

SEQ ID NO: 30398 - protein, 16 aa, Homo sapiens
CARDTHPHYDNWFDPW

SEQ ID NO: 30399 - protein, 20 aa, Homo sapiens
CARVFRGDTGMVTPLQFDYW

SEQ ID NO: 30400 - protein, 15 aa, Homo sapiens
CARLTVGGATELDYW

SEQ ID NO: 30401 - protein, 21 aa, Homo sapiens
CARFHEPDISIGGIYWYFDLW

SEQ ID NO: 30402 - protein, 20 aa, Homo sapiens
CARDVSECRGTRCIWWSDPW

SEQ ID NO: 30403 - protein, 15 aa, Homo sapiens
CTTVRAVTTGYFDYW

SEQ ID NO: 30404 - protein, 20 aa, Homo sapiens
CAKDLSPLLWFGESRSFDYW

SEQ ID NO: 30405 - protein, 17 aa, Homo sapiens
CAKDDTPNLTWDPFDYW

SEQ ID NO: 30406 - protein, 19 aa, Homo sapiens
CARVRPGSSYGPLHYFDNW

SEQ ID NO: 30407 - protein, 14 aa, Homo sapiens
CARQRGIAAAVDYW

SEQ ID NO: 30408 - protein, 23 aa, Homo sapiens
CARHVYSSPYNWNQGPYWYFDLW

SEQ ID NO: 30409 - protein, 17 aa, Homo sapiens
CARLKGDYDPFWYFDLW

SEQ ID NO: 30410 - protein, 20 aa, Homo sapiens
CVKDKGGRAWPYQNNWFDPW

SEQ ID NO: 30411 - protein, 15 aa, Homo sapiens
CARTDTSSFGYFDFW

SEQ ID NO: 30412 - protein, 28 aa, Homo sapiens
CTTVTVVVVPDAYAQRPTHYYYYYMDVW

SEQ ID NO: 30413 - protein, 13 aa, Homo sapiens
CQVWDISSDLYFF

SEQ ID NO: 30414 - protein, 19 aa, Homo sapiens
CTTVVQYDPWEPAYYFDHW

SEQ ID NO: 30415 - protein, 15 aa, Homo sapiens
CAREGVDTAMGFDYW

SEQ ID NO: 30416 - protein, 23 aa, Homo sapiens
CARIRAYCSGGNCYPSSFYFDYW

SEQ ID NO: 30417 - protein, 17 aa, Homo sapiens
CASGREYRTGTTGFDYW

SEQ ID NO: 30418 - protein, 18 aa, Homo sapiens
CAKEESAYSSGWQAEDIW

SEQ ID NO: 30419 - protein, 14 aa, Homo sapiens
CARQLIFGVAFDPW

SEQ ID NO: 30420 - protein, 19 aa, Homo sapiens
CARQDEAGGYQLLFYFDYW

SEQ ID NO: 30421 - protein, 16 aa, Homo sapiens
CQQSYTTPTYIPPWTF

SEQ ID NO: 30422 - protein, 16 aa, Homo sapiens
CARGDLVVLTDAFDIW

SEQ ID NO: 30423 - protein, 22 aa, Homo sapiens
CARGGGYLRFLEWLTYWYFDLW

SEQ ID NO: 30424 - protein, 23 aa, Homo sapiens
CARDPDGYYYDSSGYYSDAFDIW

SEQ ID NO: 30425 - protein, 30 aa, Homo sapiens
CARDSGVPAEYDYVWGSYRYTGYYYGMDVW

SEQ ID NO: 30426 - protein, 17 aa, Homo sapiens
CVRGRREMAAISTFDYW

SEQ ID NO: 30427 - protein, 13 aa, Homo sapiens
CACQWEEDAFDIW

SEQ ID NO: 30428 - protein, 19 aa, Homo sapiens
CARHLQGGGHYYQFYMDVW

SEQ ID NO: 30429 - protein, 11 aa, Homo sapiens
CYSAADNIGLF

SEQ ID NO: 30430 - protein, 17 aa, Homo sapiens
CAREPFYGDYADAFDIW

SEQ ID NO: 30431 - protein, 18 aa, Homo sapiens
CARDQRSEQWLTTYFDYW

SEQ ID NO: 30432 - protein, 18 aa, Homo sapiens
CSRVLSSSSSWGYYFDSW

SEQ ID NO: 30433 - protein, 24 aa, Homo sapiens
CVRGPVVSLDYGFWSGSAFYFDLW

SEQ ID NO: 30434 - protein, 17 aa, Homo sapiens
CARHEIAARRYWYFDLW

SEQ ID NO: 30435 - protein, 18 aa, Homo sapiens
CARPGYSYGMGREWFDPW

SEQ ID NO: 30436 - protein, 15 aa, Homo sapiens
CARSIALLDLYFDYW

SEQ ID NO: 30437 - protein, 20 aa, Homo sapiens
CAKAPLPLYGDYGHDAFDIW

SEQ ID NO: 30438 - protein, 16 aa, Homo sapiens
CAKDITGTTHAGFDYW

SEQ ID NO: 30439 - protein, 15 aa, Homo sapiens
CARDGNWNDWWFDPW

SEQ ID NO: 30440 - protein, 12 aa, Homo sapiens
CAGIRLDRLDYW

SEQ ID NO: 30441 - protein, 18 aa, Homo sapiens
CVKDSEGSGSYGDAFDIW

SEQ ID NO: 30442 - protein, 16 aa, Homo sapiens
CTRAIPTHYYYYMDVW

SEQ ID NO: 30443 - protein, 13 aa, Homo sapiens
CQHLTSYPPALTF

SEQ ID NO: 30444 - protein, 17 aa, Homo sapiens
CARARPHYGDYAPFDYW

SEQ ID NO: 30445 - protein, 13 aa, Homo sapiens
CARGNYGEKIDYW

SEQ ID NO: 30446 - protein, 18 aa, Homo sapiens
CATLAPFYDYYYYGMDVW

SEQ ID NO: 30447 - protein, 20 aa, Homo sapiens
CARLLTDLKRDYPRGYFDLW

SEQ ID NO: 30448 - protein, 20 aa, Homo sapiens
CARHVVEYSNFPPSYYFDYW

SEQ ID NO: 30449 - protein, 23 aa, Homo sapiens
CAREVKGSGSYWSAKIGPYFDYW

SEQ ID NO: 30450 - protein, 14 aa, Homo sapiens
CAKADGDFDYFDYW

SEQ ID NO: 30451 - protein, 16 aa, Homo sapiens
CARSEEYSDSPEFDYW

SEQ ID NO: 30452 - protein, 16 aa, Homo sapiens
CSRRDYASFGDWFDPW

SEQ ID NO: 30453 - protein, 14 aa, Homo sapiens
CAKDRGNIDWFDPW

SEQ ID NO: 30454 - protein, 16 aa, Homo sapiens
CAHRGQVLVAASFDPW

SEQ ID NO: 30455 - protein, 20 aa, Homo sapiens
CARDAYFYDGNAYYYIFDVW

SEQ ID NO: 30456 - protein, 18 aa, Homo sapiens
CARDPGKELPSRYYFDYW

SEQ ID NO: 30457 - protein, 17 aa, Homo sapiens
CARALQYQLHTDGFDLW

SEQ ID NO: 30458 - protein, 19 aa, Homo sapiens
CARRYYDPSGFYFYAFDIW

SEQ ID NO: 30459 - protein, 21 aa, Homo sapiens
CARAHERQNYYDSSGYYFDYW

SEQ ID NO: 30460 - protein, 18 aa, Homo sapiens
CAKGVVTISVEPNYMDVW

SEQ ID NO: 30461 - protein, 16 aa, Homo sapiens
CTRHESTLNGTHIDYW

SEQ ID NO: 30462 - protein, 17 aa, Homo sapiens
CARDQGAGIRLQEFDYW

SEQ ID NO: 30463 - protein, 12 aa, Homo sapiens
CARVGSNYADYW

SEQ ID NO: 30464 - protein, 15 aa, Homo sapiens
CQSTDSSNTYHDVVF

SEQ ID NO: 30465 - protein, 19 aa, Homo sapiens
CAVQAYDYGDYDPYYFDSW

SEQ ID NO: 30466 - protein, 19 aa, Homo sapiens
CATSGLVWGTKDYYYMDVW

SEQ ID NO: 30467 - protein, 20 aa, Homo sapiens
CSGGSCETSVYYYYYYMDVW

SEQ ID NO: 30468 - protein, 16 aa, Homo sapiens
CARGKYNWNYVYFHYW

SEQ ID NO: 30469 - protein, 21 aa, Homo sapiens
CARFPTSWVTWYSALHAFDIW

SEQ ID NO: 30470 - protein, 14 aa, Homo sapiens
CAREDRDGYNFDYW

SEQ ID NO: 30471 - protein, 18 aa, Homo sapiens
CTRVYSSSWTAQSYFDYW

SEQ ID NO: 30472 - protein, 18 aa, Homo sapiens
CATPFPTTTITSGYFGQW

SEQ ID NO: 30473 - protein, 17 aa, Homo sapiens
CARDGSDGDYVQYFDYW

SEQ ID NO: 30474 - protein, 17 aa, Homo sapiens
CAKDWATGMAYDYFDYW

SEQ ID NO: 30475 - protein, 16 aa, Homo sapiens
CARGALAARPRWFDPW

SEQ ID NO: 30476 - protein, 14 aa, Homo sapiens
CARGTGPIGNFDYW

SEQ ID NO: 30477 - protein, 15 aa, Homo sapiens
CARDERGYDVMTDYW

SEQ ID NO: 30478 - protein, 18 aa, Homo sapiens
CAREEKDHGGYYYGMDVW

SEQ ID NO: 30479 - protein, 16 aa, Homo sapiens
CANARHSSGWSSFDYW

SEQ ID NO: 30480 - protein, 12 aa, Homo sapiens
CAILRNWGFDSW

SEQ ID NO: 30481 - protein, 11 aa, Homo sapiens
CGRRVTPLDYW

SEQ ID NO: 30482 - protein, 22 aa, Homo sapiens
CARVESRRRQWLVMDYYYMDVW

SEQ ID NO: 30483 - protein, 22 aa, Homo sapiens
CARDLTPSYGDSYYYYYYMDVW

SEQ ID NO: 30484 - protein, 20 aa, Homo sapiens
CARDGSYYDSSGYYPNFDYW

SEQ ID NO: 30485 - protein, 18 aa, Homo sapiens
CAKEPGGYYYSSFYFDSW

SEQ ID NO: 30486 - protein, 18 aa, Homo sapiens
CAKDGGSAMPTLGWIDPW

SEQ ID NO: 30487 - protein, 29 aa, Homo sapiens
CSRGSVRRQKGGLFRSGSYSDYYYGMDVW

SEQ ID NO: 30488 - protein, 17 aa, Homo sapiens
CATPRKLRSGSYSLDYW

SEQ ID NO: 30489 - protein, 14 aa, Homo sapiens
CSSFAGSNNIGLLF

SEQ ID NO: 30490 - protein, 12 aa, Homo sapiens
CTTRMSVTNDYW

SEQ ID NO: 30491 - protein, 15 aa, Homo sapiens
CAKGRHSSSFFCDYW

SEQ ID NO: 30492 - protein, 27 aa, Homo sapiens
CAKDSGDIVVIPAAPPGTYYYNYMDVW

SEQ ID NO: 30493 - protein, 16 aa, Homo sapiens
CASLCGYSNRYYMDVW

SEQ ID NO: 30494 - protein, 16 aa, Homo sapiens
CARDRRDFGMVIIDYW

SEQ ID NO: 30495 - protein, 14 aa, Homo sapiens
CQSSDSSGRYSVIF

SEQ ID NO: 30496 - protein, 17 aa, Homo sapiens
CARESRDWDSSGYYDAW

SEQ ID NO: 30497 - protein, 11 aa, Homo sapiens
CLQHNSVPLTF

SEQ ID NO: 30498 - protein, 20 aa, Homo sapiens
CVRVSGYCSPTTCYGGFDYW

SEQ ID NO: 30499 - protein, 22 aa, Homo sapiens
CARAPFPYYYDSSGYQDAFDIW

SEQ ID NO: 30500 - protein, 19 aa, Homo sapiens
CARMECIGGICSMYFFDHW

SEQ ID NO: 30501 - protein, 17 aa, Homo sapiens
CAKDGAKWGFREAFDIW

SEQ ID NO: 30502 - protein, 16 aa, Homo sapiens
CARPLNQWQAGGYDYW

SEQ ID NO: 30503 - protein, 17 aa, Homo sapiens
CARDERRYDILTGSDYW

SEQ ID NO: 30504 - protein, 13 aa, Homo sapiens
CANLYPNYQFDIW

SEQ ID NO: 30505 - protein, 22 aa, Homo sapiens
CAREQYYYDSSGYYYVGGFDYW

SEQ ID NO: 30506 - protein, 21 aa, Homo sapiens
CAREPGYCSSTSCPIRAFDIW

SEQ ID NO: 30507 - protein, 25 aa, Homo sapiens
CAKDRGGYYDSSGYQGYYYYGMDVW

SEQ ID NO: 30508 - protein, 15 aa, Homo sapiens
CASSGYSPLSAFDIW

SEQ ID NO: 30509 - protein, 21 aa, Homo sapiens
CARAWSYNWNYVGFYYYMDVW

SEQ ID NO: 30510 - protein, 23 aa, Homo sapiens
CARNPLRYSSGWQRQQDDAFDIW

SEQ ID NO: 30511 - protein, 17 aa, Homo sapiens
CAKDLDPISGYDPFDYW

SEQ ID NO: 30512 - protein, 22 aa, Homo sapiens
CARRQDYYDSSGYYYDWYFDLW

SEQ ID NO: 30513 - protein, 22 aa, Homo sapiens
CARVGELLSLDQSHYYYYMDVW

SEQ ID NO: 30514 - protein, 19 aa, Homo sapiens
CTRSGGIGTYGYQRGFDLW

SEQ ID NO: 30515 - protein, 23 aa, Homo sapiens
CAKEMASRFWSGYFHYYYGMDVW

SEQ ID NO: 30516 - protein, 16 aa, Homo sapiens
CARAHYYHTNDAFDIW

SEQ ID NO: 30517 - protein, 20 aa, Homo sapiens
CAKAALGTCRSTRCYAFDYW

SEQ ID NO: 30518 - protein, 22 aa, Homo sapiens
CTRHGPAEIPSPPYTGNWFDPW

SEQ ID NO: 30519 - protein, 17 aa, Homo sapiens
CALPIWGLPQCNYFDFW

SEQ ID NO: 30520 - protein, 19 aa, Homo sapiens
CAKDIGGGYSYGYHWFDPW

SEQ ID NO: 30521 - protein, 24 aa, Homo sapiens
CASLPPNYYDSRHYYYGGIPFDSW

SEQ ID NO: 30522 - protein, 20 aa, Homo sapiens
CARSISSSHSRVAGVHFDYW

SEQ ID NO: 30523 - protein, 22 aa, Homo sapiens
CARDMGLGAVAGKNRERDLDYW

SEQ ID NO: 30524 - protein, 22 aa, Homo sapiens
CARDRGSYGYTGVYYYYGMDVW

SEQ ID NO: 30525 - protein, 17 aa, Homo sapiens
CAKHSRIGYNLDYSDYW

SEQ ID NO: 30526 - protein, 20 aa, Homo sapiens
CAHRQVFYDEDRSGFYFDYW

SEQ ID NO: 30527 - protein, 23 aa, Homo sapiens
CARGRGYCSGGSCEHLNWWFDPW

SEQ ID NO: 30528 - protein, 22 aa, Homo sapiens
CAKGTPSTWIQLWSTGNWFDPW

SEQ ID NO: 30529 - protein, 20 aa, Homo sapiens
CASSYYGDPKYYYYYGMDVW

SEQ ID NO: 30530 - protein, 17 aa, Homo sapiens
CAKDIEDVATISGLDYW

SEQ ID NO: 30531 - protein, 16 aa, Homo sapiens
CARAPVLVTSDAFDIW

SEQ ID NO: 30532 - protein, 15 aa, Homo sapiens
CARQTYSSGWYPDSW

SEQ ID NO: 30533 - protein, 15 aa, Homo sapiens
CARDFGSSADRFDYW

SEQ ID NO: 30534 - protein, 20 aa, Homo sapiens
CARQGRDGYNPSRDDAFDIW

SEQ ID NO: 30535 - protein, 24 aa, Homo sapiens
CARDVRTYYDGSDYRFHYYYMDVW

SEQ ID NO: 30536 - protein, 22 aa, Homo sapiens
CAKGARGYNYGAFDYYYYMDVW

SEQ ID NO: 30537 - protein, 17 aa, Homo sapiens
CARDRPALAVAEYFQHW

SEQ ID NO: 30538 - protein, 19 aa, Homo sapiens
CARHVSDRVVPAAITFDYW

SEQ ID NO: 30539 - protein, 14 aa, Homo sapiens
CATARLAAMEFDYW

SEQ ID NO: 30540 - protein, 21 aa, Homo sapiens
CAKVPTYYDFWSGEDDAFDIW

SEQ ID NO: 30541 - protein, 24 aa, Homo sapiens
CASMAGGYNFVRGQYYYHYYMDFW

SEQ ID NO: 30542 - protein, 16 aa, Homo sapiens
CARGVVTAILSAFDLW

SEQ ID NO: 30543 - protein, 17 aa, Homo sapiens
CARDHIADKNPDGFDIW

SEQ ID NO: 30544 - protein, 25 aa, Homo sapiens
CAKDRGPQYCGGDCYSYYYYGMDVW

SEQ ID NO: 30545 - protein, 15 aa, Homo sapiens
CAKTLPDPFDGFDVW

SEQ ID NO: 30546 - protein, 16 aa, Homo sapiens
CVKDPNWTSNHRFDCW

SEQ ID NO: 30547 - protein, 23 aa, Homo sapiens
CAGTTTSRPFRGKGTILHAFDIW

SEQ ID NO: 30548 - protein, 19 aa, Homo sapiens
CARKRRHGVVVAATLFDYW

SEQ ID NO: 30549 - protein, 13 aa, Homo sapiens
CQQYHYWPPMYTF

SEQ ID NO: 30550 - protein, 25 aa, Homo sapiens
CSTDDQSDGTSRYDWDLRRGIFDYW

SEQ ID NO: 30551 - protein, 15 aa, Homo sapiens
CSKDTSLELYAFDIW

SEQ ID NO: 30552 - protein, 20 aa, Homo sapiens
CATQVRGTTRLYYYYFMDVW

SEQ ID NO: 30553 - protein, 21 aa, Homo sapiens
CASDRRYCSGGSCYGTAFDYW

SEQ ID NO: 30554 - protein, 20 aa, Homo sapiens
CATALAIEWPDDYYYGMDVW

SEQ ID NO: 30555 - protein, 15 aa, Homo sapiens
CARDRVTGTAIFDLW

SEQ ID NO: 30556 - protein, 20 aa, Homo sapiens
CARVGLGGVGTGTTPYFDYW

SEQ ID NO: 30557 - protein, 15 aa, Homo sapiens
CARWGLRVAARFDYW

SEQ ID NO: 30558 - protein, 17 aa, Homo sapiens
CARFIWFGEPHDAFDIW

SEQ ID NO: 30559 - protein, 13 aa, Homo sapiens
CQSAVSSTTPWVF

SEQ ID NO: 30560 - protein, 21 aa, Homo sapiens
CAGHWGTVVRGVIDPGYVDYW

SEQ ID NO: 30561 - protein, 15 aa, Homo sapiens
CARHPQNWNYATDYW

SEQ ID NO: 30562 - protein, 17 aa, Homo sapiens
CASHSEWELPTSIFDYW

SEQ ID NO: 30563 - protein, 21 aa, Homo sapiens
CARDRPLTINTGVYYYAVDVW

SEQ ID NO: 30564 - protein, 18 aa, Homo sapiens
CAKEAADYSSGWYLFDYW

SEQ ID NO: 30565 - protein, 21 aa, Homo sapiens
CAKDGIEGLRLGELSFEADYW

SEQ ID NO: 30566 - protein, 16 aa, Homo sapiens
CVRSESGGYLFYFDFW

SEQ ID NO: 30567 - protein, 17 aa, Homo sapiens
CARRWFGELGGGWFDSW

SEQ ID NO: 30568 - protein, 19 aa, Homo sapiens
CGGERVSTKDYFYYGMDVW

SEQ ID NO: 30569 - protein, 14 aa, Homo sapiens
CALYHTTEGAFDVW

SEQ ID NO: 30570 - protein, 21 aa, Homo sapiens
CARRGPSMKTFGGVVGHFDHW

SEQ ID NO: 30571 - protein, 19 aa, Homo sapiens
CARDPNPGEVLNLIWFDPW

SEQ ID NO: 30572 - protein, 17 aa, Homo sapiens
CARLGVEWDLLSTFDCW

SEQ ID NO: 30573 - protein, 17 aa, Homo sapiens
CARGRPGGGWLVPLDYW

SEQ ID NO: 30574 - protein, 18 aa, Homo sapiens
CARLSHSSSPKKYYFDFW

SEQ ID NO: 30575 - protein, 17 aa, Homo sapiens
CARVGGEMAVPRGLDYW

SEQ ID NO: 30576 - protein, 19 aa, Homo sapiens
CARPRYSYGDYVNNWFDPW

SEQ ID NO: 30577 - protein, 21 aa, Homo sapiens
CARHKGSDRSGWFSDWYFDLW

SEQ ID NO: 30578 - protein, 12 aa, Homo sapiens
CQKYGRSPTWTF

SEQ ID NO: 30579 - protein, 27 aa, Homo sapiens
CARHLRSFTLAARQMGSPIPFWYFDLW

SEQ ID NO: 30580 - protein, 21 aa, Homo sapiens
CTTDDSSSQTSYYYYYYMDVW

SEQ ID NO: 30581 - protein, 14 aa, Homo sapiens
CARHLAGATYPAYW

SEQ ID NO: 30582 - protein, 17 aa, Homo sapiens
CVRGLQWDLTRIRFDPW

SEQ ID NO: 30583 - protein, 16 aa, Homo sapiens
CAHKSGIAAASWFDPW

SEQ ID NO: 30584 - protein, 26 aa, Homo sapiens
CAKDLFCSGGSCHPQVDSSGYYDDYW

SEQ ID NO: 30585 - protein, 18 aa, Homo sapiens
CARARATYSDGPYYFDFW

SEQ ID NO: 30586 - protein, 18 aa, Homo sapiens
CARVLEPVQYRRLAFDIW

SEQ ID NO: 30587 - protein, 18 aa, Homo sapiens
CARGSPYEILSHGGFDPW

SEQ ID NO: 30588 - protein, 19 aa, Homo sapiens
CARDGGDYGSSGNDDFDIW

SEQ ID NO: 30589 - protein, 16 aa, Homo sapiens
CARFEYSSSSDGFDYW

SEQ ID NO: 30590 - protein, 25 aa, Homo sapiens
CARDAPYYHYDSTGYYKRNNWFDPW

SEQ ID NO: 30591 - protein, 19 aa, Homo sapiens
CARVYYYDSVGYWGPFDYW

SEQ ID NO: 30592 - protein, 14 aa, Homo sapiens
CARSRHSKDWFDPW

SEQ ID NO: 30593 - protein, 14 aa, Homo sapiens
CSGGSCYSIWFDPW

SEQ ID NO: 30594 - protein, 16 aa, Homo sapiens
CAKDQYSYGLWYFDYW

SEQ ID NO: 30595 - protein, 14 aa, Homo sapiens
CALPIWELPGLDYW

SEQ ID NO: 30596 - protein, 20 aa, Homo sapiens
CARVLITMVRGVPHHAFDIW

SEQ ID NO: 30597 - protein, 20 aa, Homo sapiens
CARILVEYSSSSVTVGFDYW

SEQ ID NO: 30598 - protein, 17 aa, Homo sapiens
CATSGEEYSSSSVFDYW

SEQ ID NO: 30599 - protein, 13 aa, Homo sapiens
CARDFWNEAMDVW

SEQ ID NO: 30600 - protein, 21 aa, Homo sapiens
CARDPMTTVKTFYYYYGMDVW

SEQ ID NO: 30601 - protein, 20 aa, Homo sapiens
CARDPLGHCSGGRCWKFDYW

SEQ ID NO: 30602 - protein, 18 aa, Homo sapiens
CAHRTYYYDSSGPAFDYW

SEQ ID NO: 30603 - protein, 22 aa, Homo sapiens
CVKSMGYYESRGYGWGGALDIW

SEQ ID NO: 30604 - protein, 19 aa, Homo sapiens
CVAWFHDENSDDSEPFDVW

SEQ ID NO: 30605 - protein, 23 aa, Homo sapiens
CARELVEGLYYYDTSGYYGEDYW

SEQ ID NO: 30606 - protein, 21 aa, Homo sapiens
CARVNPSYYDSSGDSNWFDPW

SEQ ID NO: 30607 - protein, 16 aa, Homo sapiens
CARGAVAIYFYAMDVW

SEQ ID NO: 30608 - protein, 15 aa, Homo sapiens
CAIAAAGTGDWFDPW

SEQ ID NO: 30609 - protein, 14 aa, Homo sapiens
CARHSSSSGWFDPW

SEQ ID NO: 30610 - protein, 19 aa, Homo sapiens
CTTDSIVGPSSPIDVFDVW

SEQ ID NO: 30611 - protein, 21 aa, Homo sapiens
CTTDLGYCSGTICYTPDFDYW

SEQ ID NO: 30612 - protein, 20 aa, Homo sapiens
CARGLGDYGTLYYYYYMDVW

SEQ ID NO: 30613 - protein, 18 aa, Homo sapiens
CARVPTILPGGHTWFDPW

SEQ ID NO: 30614 - protein, 16 aa, Homo sapiens
CARHKDYGGNAGFDYW

SEQ ID NO: 30615 - protein, 24 aa, Homo sapiens
CARVRIVVVTLTWRDYFYYYMDIW

SEQ ID NO: 30616 - protein, 20 aa, Homo sapiens
CARDYLHCSLTSCFNWFDPW

SEQ ID NO: 30617 - protein, 14 aa, Homo sapiens
CARLGTYYSGVDYW

SEQ ID NO: 30618 - protein, 22 aa, Homo sapiens
CAKAGSYYGSGSYPFYYAIDVW

SEQ ID NO: 30619 - protein, 24 aa, Homo sapiens
CAKGPGGGDYDILTGYYYYGMDVW

SEQ ID NO: 30620 - protein, 16 aa, Homo sapiens
CAPPRRLRWPSPIDYW

SEQ ID NO: 30621 - protein, 17 aa, Homo sapiens
CSRGGISGIPLSYFDFW

SEQ ID NO: 30622 - protein, 17 aa, Homo sapiens
CARDVPVKMSLVQGDYW

SEQ ID NO: 30623 - protein, 16 aa, Homo sapiens
CARVCGSYYEYYFDYW

SEQ ID NO: 30624 - protein, 22 aa, Homo sapiens
CARDGPGGGAVTSYYYYGMDVW

SEQ ID NO: 30625 - protein, 12 aa, Homo sapiens
CYSAVSSGIFVF

SEQ ID NO: 30626 - protein, 19 aa, Homo sapiens
CARDQKPIVGATTGWFDPW

SEQ ID NO: 30627 - protein, 14 aa, Homo sapiens
CARAARGEWFLDYW

SEQ ID NO: 30628 - protein, 14 aa, Homo sapiens
CTKDAFVPGTFDLW

SEQ ID NO: 30629 - protein, 16 aa, Homo sapiens
CAHSSEVGHNWWFDFW

SEQ ID NO: 30630 - protein, 18 aa, Homo sapiens
CASGGWNSSGRNWYFDLW

SEQ ID NO: 30631 - protein, 13 aa, Homo sapiens
CLRIVSSGYSVYW

SEQ ID NO: 30632 - protein, 18 aa, Homo sapiens
CTTDPPYSTSSDDAFDIW

SEQ ID NO: 30633 - protein, 22 aa, Homo sapiens
CARGDHKSTFFPSYYYYGLDVW

SEQ ID NO: 30634 - protein, 15 aa, Homo sapiens
CGTWDSSLTTGFVLF

SEQ ID NO: 30635 - protein, 20 aa, Homo sapiens
CARNPHCGRDCYRYWYFDLW

SEQ ID NO: 30636 - protein, 15 aa, Homo sapiens
CAKDRSFYIDAFDLW

SEQ ID NO: 30637 - protein, 16 aa, Homo sapiens
CARGGRDGYKIGIDYW

SEQ ID NO: 30638 - protein, 25 aa, Homo sapiens
CAKDNPPFELAGSSYYYYYYAMDVW

SEQ ID NO: 30639 - protein, 17 aa, Homo sapiens
CARGGIRAGRLGYFDWW

SEQ ID NO: 30640 - protein, 20 aa, Homo sapiens
CARHGTWEQRLVPNDAFDIW

SEQ ID NO: 30641 - protein, 18 aa, Homo sapiens
CAKDQSMEWLSSMWFDPW

SEQ ID NO: 30642 - protein, 25 aa, Homo sapiens
CVRDSIQVGHTQGYSLPSVNFFDFW

SEQ ID NO: 30643 - protein, 16 aa, Homo sapiens
CASSGVSANVHLFQYW

SEQ ID NO: 30644 - protein, 16 aa, Homo sapiens
CSSYTSSSTHVPYVVF

SEQ ID NO: 30645 - protein, 18 aa, Homo sapiens
CARRGIWNGHYRGYFDYW

SEQ ID NO: 30646 - protein, 23 aa, Homo sapiens
CAREGDSMVRGRYMYYYYGMDVW

SEQ ID NO: 30647 - protein, 17 aa, Homo sapiens
CAKRPTAFAAGGDFDYW

SEQ ID NO: 30648 - protein, 18 aa, Homo sapiens
CAKGRGVGAIGFHSFDIW

SEQ ID NO: 30649 - protein, 18 aa, Homo sapiens
CARRTPLENWNEQAFDIW

SEQ ID NO: 30650 - protein, 17 aa, Homo sapiens
CASPASLYGSESYYPYW

SEQ ID NO: 30651 - protein, 23 aa, Homo sapiens
CARPYPRNSGYHHNYYFYGMDVW

SEQ ID NO: 30652 - protein, 17 aa, Homo sapiens
CVKHAAPGTFITNFDFW

SEQ ID NO: 30653 - protein, 15 aa, Homo sapiens
CAKDLVAVAHAFDIW

SEQ ID NO: 30654 - protein, 23 aa, Homo sapiens
CARESSESQVLWGYYYYYGMDVW

SEQ ID NO: 30655 - protein, 13 aa, Homo sapiens
CAIEHEDSYIDFW

SEQ ID NO: 30656 - protein, 18 aa, Homo sapiens
CATIGFCLTSVCSAEDYW

SEQ ID NO: 30657 - protein, 17 aa, Homo sapiens
CAKGMDDSSGFHYIQYW

SEQ ID NO: 30658 - protein, 21 aa, Homo sapiens
CARLDRYSYGHLPNPETFDIW

SEQ ID NO: 30659 - protein, 17 aa, Homo sapiens
CAKDGGFYSWYFYMDVW

SEQ ID NO: 30660 - protein, 20 aa, Homo sapiens
CARDYYGFWSARDIGRFDYW

SEQ ID NO: 30661 - protein, 19 aa, Homo sapiens
CARMKFNDILTGRDPFDIW

SEQ ID NO: 30662 - protein, 16 aa, Homo sapiens
CRAEEDGGEANYFDYW

SEQ ID NO: 30663 - protein, 16 aa, Homo sapiens
CATRYCTSTNCYYAYW

SEQ ID NO: 30664 - protein, 21 aa, Homo sapiens
CVRDGWQYSYGVMGYYYFDYW

SEQ ID NO: 30665 - protein, 23 aa, Homo sapiens
CVTDALTTLGVVISPDSYYFDHW

SEQ ID NO: 30666 - protein, 16 aa, Homo sapiens
CAKDTSIAVAGPKDYW

SEQ ID NO: 30667 - protein, 19 aa, Homo sapiens
CARAVPDIAVLPASGFDLW

SEQ ID NO: 30668 - protein, 16 aa, Homo sapiens
CGAGYSSSWPPRIDYW

SEQ ID NO: 30669 - protein, 20 aa, Homo sapiens
CARDWGYSSGWYWGTGFDPW

SEQ ID NO: 30670 - protein, 20 aa, Homo sapiens
CAKDLAEISSDTWYWGFDYW

SEQ ID NO: 30671 - protein, 20 aa, Homo sapiens
CAKNSESGITIFGVVTHDYW

SEQ ID NO: 30672 - protein, 14 aa, Homo sapiens
CARDTPNWTYFDSW

SEQ ID NO: 30673 - protein, 22 aa, Homo sapiens
CARRSIPLHSSGWYNGPIFDYW

SEQ ID NO: 30674 - protein, 20 aa, Homo sapiens
CARDTRGYRGLRYYYGMDVW

SEQ ID NO: 30675 - protein, 17 aa, Homo sapiens
CARHPSLTRGYQRFDPW

SEQ ID NO: 30676 - protein, 19 aa, Homo sapiens
CAKDRYMFVYTNYGGFDYW

SEQ ID NO: 30677 - protein, 12 aa, Homo sapiens
CARVFGDYVDYW

SEQ ID NO: 30678 - protein, 20 aa, Homo sapiens
CARHGKSSSSVYYYYYMDVW

SEQ ID NO: 30679 - protein, 16 aa, Homo sapiens
CAREGYGSGNYPYDYW

SEQ ID NO: 30680 - protein, 16 aa, Homo sapiens
CARDPTTSSDWYFDLW

SEQ ID NO: 30681 - protein, 22 aa, Homo sapiens
CARLPRRLYGAGNYFYNAMDVW

SEQ ID NO: 30682 - protein, 19 aa, Homo sapiens
CAHRGLPLTTSHKNAFDVW

SEQ ID NO: 30683 - protein, 17 aa, Homo sapiens
CASFRLWFGELFGFDYW

SEQ ID NO: 30684 - protein, 21 aa, Homo sapiens
CARGIVSAPGTSRPGFWFDSW

SEQ ID NO: 30685 - protein, 25 aa, Homo sapiens
CARHRPIYDFWSGRLTYYYYGIDVW

SEQ ID NO: 30686 - protein, 20 aa, Homo sapiens
CARGSATYYDFWRGYFFDWW

SEQ ID NO: 30687 - protein, 17 aa, Homo sapiens
CARNRRKDGNLYYFDYW

SEQ ID NO: 30688 - protein, 17 aa, Homo sapiens
CARLGISGMPGGAFDIW

SEQ ID NO: 30689 - protein, 24 aa, Homo sapiens
CAKLGYCSGGTCYDYYYHYGLDVW

SEQ ID NO: 30690 - protein, 15 aa, Homo sapiens
CAKGHGYLQNHFDYW

SEQ ID NO: 30691 - protein, 15 aa, Homo sapiens
CARDSGLWSRHFDSW

SEQ ID NO: 30692 - protein, 13 aa, Homo sapiens
CARVWGVAYMDVW

SEQ ID NO: 30693 - protein, 20 aa, Homo sapiens
CARQDYDFWSAGSRYWFDPW

SEQ ID NO: 30694 - protein, 15 aa, Homo sapiens
CAKDDSISARQFDYW

SEQ ID NO: 30695 - protein, 21 aa, Homo sapiens
CARSRGSSGWYGFLTYYFDYW

SEQ ID NO: 30696 - protein, 19 aa, Homo sapiens
CARGGVLVPPLIAPTFDCW

SEQ ID NO: 30697 - protein, 19 aa, Homo sapiens
CAREVPLKWEPHHWNFDLW

SEQ ID NO: 30698 - protein, 18 aa, Homo sapiens
CAREDRDGSYAQVYMDVW

SEQ ID NO: 30699 - protein, 16 aa, Homo sapiens
CVRGGWIQLYDKFDPW

SEQ ID NO: 30700 - protein, 26 aa, Homo sapiens
CARDWTTGGGCSDPSCYLGSNWFDPW

SEQ ID NO: 30701 - protein, 18 aa, Homo sapiens
CAKDRDAAGTMGRYFEYW

SEQ ID NO: 30702 - protein, 22 aa, Homo sapiens
CARARTYTIFGVVIATLPFDYW

SEQ ID NO: 30703 - protein, 16 aa, Homo sapiens
CASRMVADNLWYFDLW

SEQ ID NO: 30704 - protein, 16 aa, Homo sapiens
CARRGEMATIEAYDYW

SEQ ID NO: 30705 - protein, 25 aa, Homo sapiens
CAKEGGSVIAPLSLFNYYSYGMDVW

SEQ ID NO: 30706 - protein, 16 aa, Homo sapiens
CARLTHCTGTSCRDYW

SEQ ID NO: 30707 - protein, 14 aa, Homo sapiens
CARWQQWYNWFDRW

SEQ ID NO: 30708 - protein, 22 aa, Homo sapiens
CARLNYYDSSGYSDANDYFDYW

SEQ ID NO: 30709 - protein, 19 aa, Homo sapiens
CANSKWLKAEYQYYGMDVW

SEQ ID NO: 30710 - protein, 21 aa, Homo sapiens
CARHGGITMIVVVIPSWFDPW

SEQ ID NO: 30711 - protein, 17 aa, Homo sapiens
CARDPRYYHDGAPADYW

SEQ ID NO: 30712 - protein, 28 aa, Homo sapiens
CARGGIVVVPAAIGRQTEYYYYNGMDVW

SEQ ID NO: 30713 - protein, 16 aa, Homo sapiens
CARDFYASGWCHFDYW

SEQ ID NO: 30714 - protein, 13 aa, Homo sapiens
CASTGLRNAFDNW

SEQ ID NO: 30715 - protein, 15 aa, Homo sapiens
CQSPDSSATYPVVLF

SEQ ID NO: 30716 - protein, 20 aa, Homo sapiens
CATYPLSAYCTNGVCYIDYW

SEQ ID NO: 30717 - protein, 17 aa, Homo sapiens
CAKPTSLWFGTPYFHSW

SEQ ID NO: 30718 - protein, 18 aa, Homo sapiens
CASSTTIFGVVTTAFDYW

SEQ ID NO: 30719 - protein, 15 aa, Homo sapiens
CARGSGAVAGNFDYW

SEQ ID NO: 30720 - protein, 21 aa, Homo sapiens
CARVSGDGPNIYYYYYYMDVW

SEQ ID NO: 30721 - protein, 18 aa, Homo sapiens
CAKDPFSGSYYLGAFDIW

SEQ ID NO: 30722 - protein, 14 aa, Homo sapiens
CARLSLPEWWFDPW

SEQ ID NO: 30723 - protein, 17 aa, Homo sapiens
CARRAGYDYGGNEFDPW

SEQ ID NO: 30724 - protein, 22 aa, Homo sapiens
CARGSNYFESNSYYFSEYFQFW

SEQ ID NO: 30725 - protein, 18 aa, Homo sapiens
CARDLGYYYGSGSYEDYW

SEQ ID NO: 30726 - protein, 12 aa, Homo sapiens
CTTDTVYPFDYW

SEQ ID NO: 30727 - protein, 20 aa, Homo sapiens
CARDRSGYSSGWYVSGLDYW

SEQ ID NO: 30728 - protein, 17 aa, Homo sapiens
CARDHGVRWWDWYFDLW

SEQ ID NO: 30729 - protein, 16 aa, Homo sapiens
CASPARIAVAGLFDYW

SEQ ID NO: 30730 - protein, 22 aa, Homo sapiens
CGRDVRGMGVTGSRQVRWFDPW

SEQ ID NO: 30731 - protein, 15 aa, Homo sapiens
CTTDTAMTPYYYDYW

SEQ ID NO: 30732 - protein, 23 aa, Homo sapiens
CARAPYYDFWSGYYTGYYGMDVW

SEQ ID NO: 30733 - protein, 18 aa, Homo sapiens
CARHMIGKVDTAMVGDYW

SEQ ID NO: 30734 - protein, 21 aa, Homo sapiens
CARLRWQPQGSYYYYYGMDVW

SEQ ID NO: 30735 - protein, 18 aa, Homo sapiens
CARSYSSTTFYYYYMDVW

SEQ ID NO: 30736 - protein, 16 aa, Homo sapiens
CARSFDVLTVSAFDIW

SEQ ID NO: 30737 - protein, 21 aa, Homo sapiens
CAKGVSHGAHSSGWYWYFDLW

SEQ ID NO: 30738 - protein, 20 aa, Homo sapiens
CASHSLMISYGGLIRYFESW

SEQ ID NO: 30739 - protein, 18 aa, Homo sapiens
CASRRPDNYDSTNHFDYW

SEQ ID NO: 30740 - protein, 14 aa, Homo sapiens
CARDSAHNEYVVYW

SEQ ID NO: 30741 - protein, 20 aa, Homo sapiens
CARDGTSSGWFYYYYYMDVW

SEQ ID NO: 30742 - protein, 17 aa, Homo sapiens
CARDRGAGVALDAFHIW

SEQ ID NO: 30743 - protein, 16 aa, Homo sapiens
CATFGTNWGHTDLDYW

SEQ ID NO: 30744 - protein, 14 aa, Homo sapiens
CAKGPDDHHYFDSW

SEQ ID NO: 30745 - protein, 15 aa, Homo sapiens
CVRQYRSGWCPADYW

SEQ ID NO: 30746 - protein, 17 aa, Homo sapiens
CARQENWGWGPRDFDLW

SEQ ID NO: 30747 - protein, 13 aa, Homo sapiens
CARGGVGYPEDYW

SEQ ID NO: 30748 - protein, 12 aa, Homo sapiens
CQSADTNGIVVF

SEQ ID NO: 30749 - protein, 15 aa, Homo sapiens
CAKWSSSSGVHNDYW

SEQ ID NO: 30750 - protein, 16 aa, Homo sapiens
CAKDKVDTAMVTLDYW

SEQ ID NO: 30751 - protein, 22 aa, Homo sapiens
CARHNPHIITARPPTLKHFDYW

SEQ ID NO: 30752 - protein, 16 aa, Homo sapiens
CATHSGSRNNDAFDVW

SEQ ID NO: 30753 - protein, 35 aa, Homo sapiens
CALPILNSLKTEDTAVYYCTTDRGSSWYGYYFDYW

SEQ ID NO: 30754 - protein, 19 aa, Homo sapiens
CAKDIALPRHDTSGYLDYW

SEQ ID NO: 30755 - protein, 18 aa, Homo sapiens
CARDTEDGYNLEYYFDYW

SEQ ID NO: 30756 - protein, 12 aa, Homo sapiens
CQSYDTSHHGIF

SEQ ID NO: 30757 - protein, 16 aa, Homo sapiens
CAKDRFVAGASAFDYW

SEQ ID NO: 30758 - protein, 20 aa, Homo sapiens
CARDLGEPPRKAREGWFDPW

SEQ ID NO: 30759 - protein, 16 aa, Homo sapiens
CARSMYGSGSQPLDYW

SEQ ID NO: 30760 - protein, 23 aa, Homo sapiens
CARGERILITFGGVYPTNAMDVW

SEQ ID NO: 30761 - protein, 21 aa, Homo sapiens
CTRDTRETGTTYHYYNYMDVW

SEQ ID NO: 30762 - protein, 16 aa, Homo sapiens
CARPDYGGNSHHFDYW

SEQ ID NO: 30763 - protein, 16 aa, Homo sapiens
CARYTIFGVASHFDYW

SEQ ID NO: 30764 - protein, 21 aa, Homo sapiens
CARWGGSGYAYYYYYYGMDVW

SEQ ID NO: 30765 - protein, 20 aa, Homo sapiens
CARLPELYDSSGSNGSFDYW

SEQ ID NO: 30766 - protein, 18 aa, Homo sapiens
CARGGYRHGYEVWYFDLW

SEQ ID NO: 30767 - protein, 13 aa, Homo sapiens
CQSAVTSGPSVVF

SEQ ID NO: 30768 - protein, 23 aa, Homo sapiens
CAKDGGGAMAPRSYYYYYGMDVW

SEQ ID NO: 30769 - protein, 27 aa, Homo sapiens
CTRGGYCSSPGCYEGSGPDYYDGMDVW

SEQ ID NO: 30770 - protein, 16 aa, Homo sapiens
CARAREREMDYYMDVW

SEQ ID NO: 30771 - protein, 16 aa, Homo sapiens
CVRDVRWIQLWAFDYW

SEQ ID NO: 30772 - protein, 16 aa, Homo sapiens
CAKGPMNGDQWYFDYW

SEQ ID NO: 30773 - protein, 21 aa, Homo sapiens
CSRGAWERRGRDYYFYYMDVW

SEQ ID NO: 30774 - protein, 14 aa, Homo sapiens
CARVRSVDTAFDRW

SEQ ID NO: 30775 - protein, 18 aa, Homo sapiens
CAKVFSASSRPFWYFDYW

SEQ ID NO: 30776 - protein, 15 aa, Homo sapiens
CARGLRIQGRRFDPW

SEQ ID NO: 30777 - protein, 19 aa, Homo sapiens
CAKPIHFGVPPCANWFDSW

SEQ ID NO: 30778 - protein, 18 aa, Homo sapiens
CAGVRHVELFSYSYFDPW

SEQ ID NO: 30779 - protein, 13 aa, Homo sapiens
CARSSLVHYFETW

SEQ ID NO: 30780 - protein, 14 aa, Homo sapiens
CAKDKVPGAALDYW

SEQ ID NO: 30781 - protein, 18 aa, Homo sapiens
CVKDKWAHYDSSGYFDHW

SEQ ID NO: 30782 - protein, 14 aa, Homo sapiens
CAAPMTTVVALDYW

SEQ ID NO: 30783 - protein, 14 aa, Homo sapiens
CAREPYGGHDLDYW

SEQ ID NO: 30784 - protein, 19 aa, Homo sapiens
CARGTHMFQPRHLVTFDYW

SEQ ID NO: 30785 - protein, 21 aa, Homo sapiens
CARAPYYDFWSGYSTVYFDYW

SEQ ID NO: 30786 - protein, 20 aa, Homo sapiens
CARGGDLRSFDWLITVFDYW

SEQ ID NO: 30787 - protein, 22 aa, Homo sapiens
CARTHLRGYSYLHVGYYYMDVW

SEQ ID NO: 30788 - protein, 20 aa, Homo sapiens
CARGDGYSSSWKGECAFDIW

SEQ ID NO: 30789 - protein, 21 aa, Homo sapiens
CARDDWDCSSGKCLYKWIDPW

SEQ ID NO: 30790 - protein, 16 aa, Homo sapiens
CARLGPVYYSYYMDVW

SEQ ID NO: 30791 - protein, 19 aa, Homo sapiens
CARLARVARTSSSCYSDLW

SEQ ID NO: 30792 - protein, 18 aa, Homo sapiens
CARRAVTPMTLEYYFDYW

SEQ ID NO: 30793 - protein, 22 aa, Homo sapiens
CARIPRSITIFGVVKGNWFDPW

SEQ ID NO: 30794 - protein, 14 aa, Homo sapiens
CARPGLGKDAFDIW

SEQ ID NO: 30795 - protein, 22 aa, Homo sapiens
CARAERGTIFGVVTMGLAFDIW

SEQ ID NO: 30796 - protein, 13 aa, Homo sapiens
CAAWDSSLNAGQF

SEQ ID NO: 30797 - protein, 24 aa, Homo sapiens
CAKDRGQLVGSGRSGYYYYGMDVW

SEQ ID NO: 30798 - protein, 21 aa, Homo sapiens
CAKDSYSSSWYHYYYYGMDVW

SEQ ID NO: 30799 - protein, 18 aa, Homo sapiens
CTRDMGLELLGYNWFDPW

SEQ ID NO: 30800 - protein, 16 aa, Homo sapiens
CARDGRYSSSAQFDQW

SEQ ID NO: 30801 - protein, 23 aa, Homo sapiens
CARGGEVILGSTIFGRGWYFDLW

SEQ ID NO: 30802 - protein, 25 aa, Homo sapiens
CARGKEYYYGSGSHAIRINGHFDYW

SEQ ID NO: 30803 - protein, 16 aa, Homo sapiens
CARDPDQLWDDPFDYW

SEQ ID NO: 30804 - protein, 15 aa, Homo sapiens
CARDTWPNGGKFDCW

SEQ ID NO: 30805 - protein, 18 aa, Homo sapiens
CASYPITTGYYYYYMDVW

SEQ ID NO: 30806 - protein, 16 aa, Homo sapiens
CARDVVVRPASGFDPW

SEQ ID NO: 30807 - protein, 16 aa, Homo sapiens
CARRPNRDLGGGFDRW

SEQ ID NO: 30808 - protein, 20 aa, Homo sapiens
CASRYYNVLTGYYLNAFDIW

SEQ ID NO: 30809 - protein, 27 aa, Homo sapiens
CAHHGILTRLEHIIAAAGNPLTYFDYW

SEQ ID NO: 30810 - protein, 16 aa, Homo sapiens
CAKVLGVRGVTILDYW

SEQ ID NO: 30811 - protein, 25 aa, Homo sapiens
CAKGHSSSWTEEWLEYYYYYGMDVW

SEQ ID NO: 30812 - protein, 24 aa, Homo sapiens
CARNLGTDYNYVWGNSPPFYFDNW

SEQ ID NO: 30813 - protein, 20 aa, Homo sapiens
CARDARRGCIYGSCRPFDYW

SEQ ID NO: 30814 - protein, 17 aa, Homo sapiens
CAREGRLGNSWTYFDYW

SEQ ID NO: 30815 - protein, 21 aa, Homo sapiens
CARYYWAITIFGVLTQAFDYW

SEQ ID NO: 30816 - protein, 22 aa, Homo sapiens
CTTYNTYYDFWSGYYEGWFDPW

SEQ ID NO: 30817 - protein, 21 aa, Homo sapiens
CANQGSSSSVGRWTYNLLDYW

SEQ ID NO: 30818 - protein, 15 aa, Homo sapiens
CVRNYYDSSGYSDYW

SEQ ID NO: 30819 - protein, 13 aa, Homo sapiens
CARWGNPLAFDSW

SEQ ID NO: 30820 - protein, 16 aa, Homo sapiens
CAKLTIAARLTDFDYW

SEQ ID NO: 30821 - protein, 17 aa, Homo sapiens
CVHRLGYNAGWYVFDYW

SEQ ID NO: 30822 - protein, 14 aa, Homo sapiens
CARHRQLAGYMDVW

SEQ ID NO: 30823 - protein, 17 aa, Homo sapiens
CARLRPGLTSGYYVDHW

SEQ ID NO: 30824 - protein, 16 aa, Homo sapiens
CVKGEGWWPHFYFDSW

SEQ ID NO: 30825 - protein, 28 aa, Homo sapiens
CARDSELGYCSGGSCYSTFYYYYGMDVW

SEQ ID NO: 30826 - protein, 18 aa, Homo sapiens
CARLVEGTPGPNLCFDLW

SEQ ID NO: 30827 - protein, 15 aa, Homo sapiens
CARLSIAARFETDYW

SEQ ID NO: 30828 - protein, 20 aa, Homo sapiens
CARDVACSGGSCYYYGMDVW

SEQ ID NO: 30829 - protein, 18 aa, Homo sapiens
CANWGSGPSNYYYYMDVW

SEQ ID NO: 30830 - protein, 17 aa, Homo sapiens
CARGPPKMVVKSWFDPW

SEQ ID NO: 30831 - protein, 22 aa, Homo sapiens
CAKDIGVGGGRTGYYYYGMDVW

SEQ ID NO: 30832 - protein, 22 aa, Homo sapiens
CARHESTYSSSWYAQLWDFDYW

SEQ ID NO: 30833 - protein, 17 aa, Homo sapiens
CAREGVGWLQLRYFDYW

SEQ ID NO: 30834 - protein, 17 aa, Homo sapiens
CVRNSYCTRTSCYPDYW

SEQ ID NO: 30835 - protein, 19 aa, Homo sapiens
CARVRIQGTRNYYYYMDVW

SEQ ID NO: 30836 - protein, 13 aa, Homo sapiens
CQSYHSNNHGWVF

SEQ ID NO: 30837 - protein, 19 aa, Homo sapiens
CATAAPEWFGGVFYYFDYW

SEQ ID NO: 30838 - protein, 14 aa, Homo sapiens
CARSPKDANYCDYW

SEQ ID NO: 30839 - protein, 17 aa, Homo sapiens
CASQRGYREATGDFDYW

SEQ ID NO: 30840 - protein, 14 aa, Homo sapiens
CANYVGATRIFDYW

SEQ ID NO: 30841 - protein, 20 aa, Homo sapiens
CARQPQRAVAGTGGWVIDYW

SEQ ID NO: 30842 - protein, 20 aa, Homo sapiens
CAKGVPSHGSTNLSPEGDYW

SEQ ID NO: 30843 - protein, 17 aa, Homo sapiens
CARGNFRRADRPWFDPW

SEQ ID NO: 30844 - protein, 15 aa, Homo sapiens
CAKETDSSFWGFDYW

SEQ ID NO: 30845 - protein, 10 aa, Homo sapiens
CATETQFDPW

SEQ ID NO: 30846 - protein, 22 aa, Homo sapiens
CTKDDCSRLNCYFQWNNWFGPW

SEQ ID NO: 30847 - protein, 20 aa, Homo sapiens
CAKDSGTTTVVVRISYFDYW

SEQ ID NO: 30848 - protein, 16 aa, Homo sapiens
CASRYCGRGSCYPDYW

SEQ ID NO: 30849 - protein, 21 aa, Homo sapiens
CARFPGSITIFEVAHDAFNIW

SEQ ID NO: 30850 - protein, 25 aa, Homo sapiens
CARAIRRVYYDSSGYYSKDWYFDLW

SEQ ID NO: 30851 - protein, 25 aa, Homo sapiens
CAKENHEGYYDSSGYYFFFPDLDYW

SEQ ID NO: 30852 - protein, 20 aa, Homo sapiens
CTGSGAARFLGSSRNDFDYW

SEQ ID NO: 30853 - protein, 25 aa, Homo sapiens
CARNRYEAVAGLLVSYYYSYYMDVW

SEQ ID NO: 30854 - protein, 21 aa, Homo sapiens
CARDLPDCRSGLCLPSGFDSW

SEQ ID NO: 30855 - protein, 16 aa, Homo sapiens
CARVGSGWLPDWFDPW

SEQ ID NO: 30856 - protein, 21 aa, Homo sapiens
CARDSYYYDSNGYGYYYFDYW

SEQ ID NO: 30857 - protein, 23 aa, Homo sapiens
CARHPPLEYNWNYSMGPIAFDIW

SEQ ID NO: 30858 - protein, 22 aa, Homo sapiens
CASWGEDRRDGYNYYYYYMDVW

SEQ ID NO: 30859 - protein, 14 aa, Homo sapiens
CQVWDSSPDQRGFF

SEQ ID NO: 30860 - protein, 16 aa, Homo sapiens
CAHRWTDYGDYAFDVW

SEQ ID NO: 30861 - protein, 16 aa, Homo sapiens
CSTGAPTFWSGYFAYW

SEQ ID NO: 30862 - protein, 24 aa, Homo sapiens
CAKDWGYYGSGSSIYYYYYGMDVW

SEQ ID NO: 30863 - protein, 13 aa, Homo sapiens
CQVWASTSDHPDF

SEQ ID NO: 30864 - protein, 18 aa, Homo sapiens
CARLTTAMVTGLWYFDLW

SEQ ID NO: 30865 - protein, 13 aa, Homo sapiens
CGTYRYGLGIDYW

SEQ ID NO: 30866 - protein, 21 aa, Homo sapiens
CARGKDYNSGKFQLNLYFDLW

SEQ ID NO: 30867 - protein, 17 aa, Homo sapiens
CAREGDSSSWATGIDYW

SEQ ID NO: 30868 - protein, 18 aa, Homo sapiens
CARMSLCTNNVCYDLDYW

SEQ ID NO: 30869 - protein, 15 aa, Homo sapiens
CQSVDISGPYPHWVF

SEQ ID NO: 30870 - protein, 15 aa, Homo sapiens
CARSPERGSYVLDYW

SEQ ID NO: 30871 - protein, 25 aa, Homo sapiens
CAKDLQRYYYDSSGYYYLAYYFDYW

SEQ ID NO: 30872 - protein, 21 aa, Homo sapiens
CARFSLMVRGVIRPSGAFDIW

SEQ ID NO: 30873 - protein, 17 aa, Homo sapiens
CAREDYGEGPDDAFDIW

SEQ ID NO: 30874 - protein, 20 aa, Homo sapiens
CARDPPAQMMATSPSYFDCW

SEQ ID NO: 30875 - protein, 16 aa, Homo sapiens
CARDPGYNPYDALDIW

SEQ ID NO: 30876 - protein, 19 aa, Homo sapiens
CARDYCTGSSCYVRGFDFW

SEQ ID NO: 30877 - protein, 20 aa, Homo sapiens
CASSSRTLRYGFYYYYMDVW

SEQ ID NO: 30878 - protein, 21 aa, Homo sapiens
CAKDNGITMVRGVTPLYFDYW

SEQ ID NO: 30879 - protein, 22 aa, Homo sapiens
CARRITIFGVVITAGVDAFDIW

SEQ ID NO: 30880 - protein, 15 aa, Homo sapiens
CAKVLHQQLVPLDYW

SEQ ID NO: 30881 - protein, 18 aa, Homo sapiens
CAKGASTYYDSSGYIDYW

SEQ ID NO: 30882 - protein, 16 aa, Homo sapiens
CAKDIRYFDWDGMDVW

SEQ ID NO: 30883 - protein, 12 aa, Homo sapiens
CVCYGDYGEDYW

SEQ ID NO: 30884 - protein, 16 aa, Homo sapiens
CARLLSGHYQAYFDYW

SEQ ID NO: 30885 - protein, 17 aa, Homo sapiens
CARFSYDFWSGRRIDYW

SEQ ID NO: 30886 - protein, 17 aa, Homo sapiens
CASLPLEPTGGYWFDPW

SEQ ID NO: 30887 - protein, 19 aa, Homo sapiens
CARGQRWLQLIRGSWFDPW

SEQ ID NO: 30888 - protein, 25 aa, Homo sapiens
CARVTRTEWYYYGSGSYPFSYFDYW

SEQ ID NO: 30889 - protein, 15 aa, Homo sapiens
CARPSSRAVRAFEIW

SEQ ID NO: 30890 - protein, 17 aa, Homo sapiens
CAKGYSYDDYYYGMDVW

SEQ ID NO: 30891 - protein, 14 aa, Homo sapiens
CARQGDTDHDFDYW

SEQ ID NO: 30892 - protein, 15 aa, Homo sapiens
CATPRGPVEGGFDYW

SEQ ID NO: 30893 - protein, 18 aa, Homo sapiens
CATSSHCSGGSSCYSYYW

SEQ ID NO: 30894 - protein, 20 aa, Homo sapiens
CAREGVMATILGHYTWFDPW

SEQ ID NO: 30895 - protein, 17 aa, Homo sapiens
CARQTRTKYSSLPLDYW

SEQ ID NO: 30896 - protein, 26 aa, Homo sapiens
CARDRAYYDFWSGYYWVHYYYYMDVW

SEQ ID NO: 30897 - protein, 16 aa, Homo sapiens
CAKLPFTFTVVTPDYW

SEQ ID NO: 30898 - protein, 17 aa, Homo sapiens
CAKDHSSSWYSLDFDYW

SEQ ID NO: 30899 - protein, 21 aa, Homo sapiens
CARDRLNLVRGYYYYYGMDVW

SEQ ID NO: 30900 - protein, 16 aa, Homo sapiens
CASLTFWSESPQFDYW

SEQ ID NO: 30901 - protein, 19 aa, Homo sapiens
CASDAGYSSREPKYYFDYW

SEQ ID NO: 30902 - protein, 27 aa, Homo sapiens
CTRHYVSAGVWSRSYQTTQPHRFPDYW

SEQ ID NO: 30903 - protein, 14 aa, Homo sapiens
CYSPDSSGGHRRVF

SEQ ID NO: 30904 - protein, 20 aa, Homo sapiens
CANCYGSGSYFGIAEDFDYW

SEQ ID NO: 30905 - protein, 19 aa, Homo sapiens
CAKQGGYFALQRSSYMDVW

SEQ ID NO: 30906 - protein, 21 aa, Homo sapiens
CARRGATPGTGPYYYYYMDVW

SEQ ID NO: 30907 - protein, 22 aa, Homo sapiens
CANLMGATLLLVRRTYDAFDIW

SEQ ID NO: 30908 - protein, 20 aa, Homo sapiens
CASPAEPYYYDSSGYSFDIW

SEQ ID NO: 30909 - protein, 15 aa, Homo sapiens
CVREGGAFMRWFDPW

SEQ ID NO: 30910 - protein, 19 aa, Homo sapiens
CAAGRGGYYDTSGHYYDYW

SEQ ID NO: 30911 - protein, 18 aa, Homo sapiens
CARHDQYSSSFYWFFDLW

SEQ ID NO: 30912 - protein, 18 aa, Homo sapiens
CARHKGFLQQWLSYFDYW

SEQ ID NO: 30913 - protein, 18 aa, Homo sapiens
CAKVSRAYSSSWFAFDYW

SEQ ID NO: 30914 - protein, 12 aa, Homo sapiens
CMHSIRLPRGTF

SEQ ID NO: 30915 - protein, 17 aa, Homo sapiens
CAKDRGFLDWIAHPDYW

SEQ ID NO: 30916 - protein, 20 aa, Homo sapiens
CARQDEFWSGSSVGYFFDWW

SEQ ID NO: 30917 - protein, 20 aa, Homo sapiens
CARDRNTVEMATINWYFDLW

SEQ ID NO: 30918 - protein, 19 aa, Homo sapiens
CARAVGEQWLYYYYGMDVW

SEQ ID NO: 30919 - protein, 22 aa, Homo sapiens
CARDKDLGFCSGFTCQGGFDPW

SEQ ID NO: 30920 - protein, 25 aa, Homo sapiens
CARDPRGYCSGGLCYKDYYYGMDVW

SEQ ID NO: 30921 - protein, 17 aa, Homo sapiens
CARQAGFTGSYGYMDVW

SEQ ID NO: 30922 - protein, 18 aa, Homo sapiens
CARLPDTSMVIPYYSDHW

SEQ ID NO: 30923 - protein, 24 aa, Homo sapiens
CARDQGGDFWSGRLNSDFYYMDVW

SEQ ID NO: 30924 - protein, 19 aa, Homo sapiens
CAKDIGDPYGDYFVGLDYW

SEQ ID NO: 30925 - protein, 17 aa, Homo sapiens
CAREALGWLFYDAFDIW

SEQ ID NO: 30926 - protein, 12 aa, Homo sapiens
CARGWVIHFDYW

SEQ ID NO: 30927 - protein, 21 aa, Homo sapiens
CAKGSTCIAARPCSYWYFDLW

SEQ ID NO: 30928 - protein, 12 aa, Homo sapiens
CQQYHDWPLYSF

SEQ ID NO: 30929 - protein, 10 aa, Homo sapiens
CQYLNIYPRF

SEQ ID NO: 30930 - protein, 20 aa, Homo sapiens
CAGQGDDILTHDPDHAFDIW

SEQ ID NO: 30931 - protein, 15 aa, Homo sapiens
CARDLERIRVDVDYW

SEQ ID NO: 30932 - protein, 18 aa, Homo sapiens
CVREIYDSDLLRNWFDAW

SEQ ID NO: 30933 - protein, 20 aa, Homo sapiens
CARADGRGSGPYHYYGMDVW

SEQ ID NO: 30934 - protein, 13 aa, Homo sapiens
CARDLAAAAPDYW

SEQ ID NO: 30935 - protein, 26 aa, Homo sapiens
CAKDLVDGGYYYDSSGYYEGSVVDYW

SEQ ID NO: 30936 - protein, 37 aa, Homo sapiens
CNLKASDTAMYYCARQRREYDTSSSWGFKYYYYMDVW

SEQ ID NO: 30937 - protein, 18 aa, Homo sapiens
CTRGRPRWQDTRHWFDPW

SEQ ID NO: 30938 - protein, 19 aa, Homo sapiens
CAKERNTVVVTAIDPFNYW

SEQ ID NO: 30939 - protein, 17 aa, Homo sapiens
CARVRDYYGRVLAFEYW

SEQ ID NO: 30940 - protein, 20 aa, Homo sapiens
CARVVVVVAATSFSTMFDPW

SEQ ID NO: 30941 - protein, 26 aa, Homo sapiens
CARGLRVGRQRLPTRSTDYYYYMDVW

SEQ ID NO: 30942 - protein, 14 aa, Homo sapiens
CATGGDFVGFFDSW

SEQ ID NO: 30943 - protein, 16 aa, Homo sapiens
CTTEKSSGNYIWFDYW

SEQ ID NO: 30944 - protein, 20 aa, Homo sapiens
CVREARGFSYSYRRDAFDIW

SEQ ID NO: 30945 - protein, 19 aa, Homo sapiens
CARAPSFRVMGPLYYFDYW

SEQ ID NO: 30946 - protein, 19 aa, Homo sapiens
CARDPGYYDNLSFNRLDPW

SEQ ID NO: 30947 - protein, 15 aa, Homo sapiens
CAKLATVMFGAFDIW

SEQ ID NO: 30948 - protein, 19 aa, Homo sapiens
CARAIGLSKWEPRPLYDYW

SEQ ID NO: 30949 - protein, 23 aa, Homo sapiens
CARGSDYGDYNPFYYYYYGMDVW

SEQ ID NO: 30950 - protein, 20 aa, Homo sapiens
CAKGAPGAAADYYYYGMDVW

SEQ ID NO: 30951 - protein, 18 aa, Homo sapiens
CARQLPTAIYGVNYFDPW

SEQ ID NO: 30952 - protein, 14 aa, Homo sapiens
CAKVHSSGYLFDYW

SEQ ID NO: 30953 - protein, 19 aa, Homo sapiens
CASFNRFDSSGYYYVEDYW

SEQ ID NO: 30954 - protein, 20 aa, Homo sapiens
CARDSPWLEVYVYYYGMDVW

SEQ ID NO: 30955 - protein, 16 aa, Homo sapiens
CARDRLNIGGVRADYW

SEQ ID NO: 30956 - protein, 13 aa, Homo sapiens
CQSGDSGGNSVAF

SEQ ID NO: 30957 - protein, 20 aa, Homo sapiens
CARDVFGVRSGWYWSYFDYW

SEQ ID NO: 30958 - protein, 14 aa, Homo sapiens
CAGYGARRGGFDYW

SEQ ID NO: 30959 - protein, 15 aa, Homo sapiens
CARGPPYVAIPFDYW

SEQ ID NO: 30960 - protein, 24 aa, Homo sapiens
CVRTKLGYCSGENCYISIVWFDPW

SEQ ID NO: 30961 - protein, 18 aa, Homo sapiens
CAKDRYTAYPDLGWFDPW

SEQ ID NO: 30962 - protein, 12 aa, Homo sapiens
CQQSHSAPSFTF

SEQ ID NO: 30963 - protein, 20 aa, Homo sapiens
CARREGPYSSSSKYWYFDLW

SEQ ID NO: 30964 - protein, 23 aa, Homo sapiens
CASQPVAGTSTGEYYYYYGMDVW

SEQ ID NO: 30965 - protein, 17 aa, Homo sapiens
CAHTEYNLNFLNLLDYW

SEQ ID NO: 30966 - protein, 16 aa, Homo sapiens
CAGGLNTAVVTYFDYW

SEQ ID NO: 30967 - protein, 13 aa, Homo sapiens
CQQYDNWSLTWTF

SEQ ID NO: 30968 - protein, 19 aa, Homo sapiens
CAKKADPHGDHALYYFDYW

SEQ ID NO: 30969 - protein, 20 aa, Homo sapiens
CARDEGVVVITAGGGLFDVW

SEQ ID NO: 30970 - protein, 22 aa, Homo sapiens
CARRRKKGQQPAFFYYYYMDVW

SEQ ID NO: 30971 - protein, 15 aa, Homo sapiens
CARQKRPIGRWFDPW

SEQ ID NO: 30972 - protein, 22 aa, Homo sapiens
CAKYDVEAPDEDPPTYKWFDPW

SEQ ID NO: 30973 - protein, 20 aa, Homo sapiens
CAKTFADNGYDFVNWWFDPW

SEQ ID NO: 30974 - protein, 14 aa, Homo sapiens
CYSTDRSGNQTWVF

SEQ ID NO: 30975 - protein, 16 aa, Homo sapiens
CAHRCGGDCYNAFDIW

SEQ ID NO: 30976 - protein, 16 aa, Homo sapiens
CARAGGYDSGYYMDVW

SEQ ID NO: 30977 - protein, 20 aa, Homo sapiens
CARGKKGIAAAGTVPAFDIW

SEQ ID NO: 30978 - protein, 20 aa, Homo sapiens
CARVGFYDSSGYYTPDFDYW

SEQ ID NO: 30979 - protein, 13 aa, Homo sapiens
CQQCNGYPPRFTF

SEQ ID NO: 30980 - protein, 17 aa, Homo sapiens
CTRDRDTNSQYSWLDPW

SEQ ID NO: 30981 - protein, 15 aa, Homo sapiens
CARGDTYTSSAFFYW

SEQ ID NO: 30982 - protein, 16 aa, Homo sapiens
CARHSARREANYFDYW

SEQ ID NO: 30983 - protein, 11 aa, Homo sapiens
CAKDPVFGDYW

SEQ ID NO: 30984 - protein, 15 aa, Homo sapiens
CARGTTRVPSYFDSW

SEQ ID NO: 30985 - protein, 16 aa, Homo sapiens
CAKASGWYVGYYFDYW

SEQ ID NO: 30986 - protein, 19 aa, Homo sapiens
CARAVGTRVLWSGSWFDPW

SEQ ID NO: 30987 - protein, 19 aa, Homo sapiens
CARLDYYDGRGHNYRRDYW

SEQ ID NO: 30988 - protein, 17 aa, Homo sapiens
CVRDRQGVGTSTSFDYW

SEQ ID NO: 30989 - protein, 13 aa, Homo sapiens
CQQYHSCSPMCTF

SEQ ID NO: 30990 - protein, 16 aa, Homo sapiens
CAKDRHEIVTGYFDYW

SEQ ID NO: 30991 - protein, 16 aa, Homo sapiens
CAKDRTLTMIDAFDIW

SEQ ID NO: 30992 - protein, 25 aa, Homo sapiens
CAREEVVVVVAAPGTKYYYYGMDVW

SEQ ID NO: 30993 - protein, 23 aa, Homo sapiens
CARDLTQWIQLFGYYYYYGMDVW

SEQ ID NO: 30994 - protein, 21 aa, Homo sapiens
CARAWTVTKPWGYYYYGMDVW

SEQ ID NO: 30995 - protein, 21 aa, Homo sapiens
CAKDGSGYCSGGSCVPHVDYW

SEQ ID NO: 30996 - protein, 15 aa, Homo sapiens
CAKDRTRFPDYFDHW

SEQ ID NO: 30997 - protein, 17 aa, Homo sapiens
CARDPYTSSPDNWFDPW

SEQ ID NO: 30998 - protein, 15 aa, Homo sapiens
CARHAPSIVEVFDYW

SEQ ID NO: 30999 - protein, 18 aa, Homo sapiens
CARGKVTGTTPVYYFYYW

SEQ ID NO: 31000 - protein, 13 aa, Homo sapiens
CGREVGATSGDYW

SEQ ID NO: 31001 - protein, 19 aa, Homo sapiens
CARVFTPPYYDYKGYSDYW

SEQ ID NO: 31002 - protein, 21 aa, Homo sapiens
CARVIPAVAGPYYYYYGMDVW

SEQ ID NO: 31003 - protein, 14 aa, Homo sapiens
CARDWGVGNYFDPW

SEQ ID NO: 31004 - protein, 18 aa, Homo sapiens
CVKDSASAYYSGDYFDSW

SEQ ID NO: 31005 - protein, 21 aa, Homo sapiens
CAATIAARRLESGGWRIFDYW

SEQ ID NO: 31006 - protein, 13 aa, Homo sapiens
CAKQEVESYFEYW

SEQ ID NO: 31007 - protein, 21 aa, Homo sapiens
CARGLDFWSGYYSSRHWSDPW

SEQ ID NO: 31008 - protein, 28 aa, Homo sapiens
CAKDTGPTPLAHRNAYCGGDCPRGFDYW

SEQ ID NO: 31009 - protein, 21 aa, Homo sapiens
CARDLPFHCSTTSCTPLFDPW

SEQ ID NO: 31010 - protein, 25 aa, Homo sapiens
CARDIAPGYCGGDCYSTPLFAFDIW

SEQ ID NO: 31011 - protein, 18 aa, Homo sapiens
CARSPRLDSPMEGALDIW

SEQ ID NO: 31012 - protein, 17 aa, Homo sapiens
CAKSSALAVAGEYFDYW

SEQ ID NO: 31013 - protein, 16 aa, Homo sapiens
CARVQFKVPMDAFDIW

SEQ ID NO: 31014 - protein, 11 aa, Homo sapiens
CLQDYNFPHIF

SEQ ID NO: 31015 - protein, 13 aa, Homo sapiens
CKSRDSSGDQVLF

SEQ ID NO: 31016 - protein, 16 aa, Homo sapiens
CARSLSTSAAPPNDYW

SEQ ID NO: 31017 - protein, 13 aa, Homo sapiens
CTKDDYYYYMDVW

SEQ ID NO: 31018 - protein, 21 aa, Homo sapiens
CASSRTNGVSLHYYYYDMDVW

SEQ ID NO: 31019 - protein, 14 aa, Homo sapiens
CATWGNRAWFFDYW

SEQ ID NO: 31020 - protein, 18 aa, Homo sapiens
CASPQYTTGWYADVFDIW

SEQ ID NO: 31021 - protein, 20 aa, Homo sapiens
CARDRDDYYYGSGTFACDIW

SEQ ID NO: 31022 - protein, 18 aa, Homo sapiens
CARLPSYGDNFKDAFDIW

SEQ ID NO: 31023 - protein, 11 aa, Homo sapiens
CVRQKRWIDPW

SEQ ID NO: 31024 - protein, 17 aa, Homo sapiens
CARAASLGELSFYFDYW

SEQ ID NO: 31025 - protein, 18 aa, Homo sapiens
CARGAITMIVALAAFDVW

SEQ ID NO: 31026 - protein, 23 aa, Homo sapiens
CARGRGCITIFGVVICPYYFDYW

SEQ ID NO: 31027 - protein, 17 aa, Homo sapiens
CARNHPLLVPAGSVDYW

SEQ ID NO: 31028 - protein, 21 aa, Homo sapiens
CARTLWTYGVVLPVGKWFDSW

SEQ ID NO: 31029 - protein, 13 aa, Homo sapiens
CARTGLFTPFDPW

SEQ ID NO: 31030 - protein, 28 aa, Homo sapiens
CARGGIGVPPYCSGGSCLNYYYYGMDVW

SEQ ID NO: 31031 - protein, 21 aa, Homo sapiens
CARVPGYCSGGSCREYYFDYW

SEQ ID NO: 31032 - protein, 18 aa, Homo sapiens
CAKKRGQPVVHGIDFDYW

SEQ ID NO: 31033 - protein, 16 aa, Homo sapiens
CARGEAVAGFQDFDYW

SEQ ID NO: 31034 - protein, 18 aa, Homo sapiens
CAKDTRLDYGGNSGFDPW

SEQ ID NO: 31035 - protein, 17 aa, Homo sapiens
CASPEYYYSTLDAFDIW

SEQ ID NO: 31036 - protein, 12 aa, Homo sapiens
CMQSIQRLRYSF

SEQ ID NO: 31037 - protein, 19 aa, Homo sapiens
CAREGYSSSWYSFFYFDYW

SEQ ID NO: 31038 - protein, 18 aa, Homo sapiens
CARLDDSSDDYYAAFDYW

SEQ ID NO: 31039 - protein, 32 aa, Homo sapiens
CARGPLGYSDSSNYYPAGINSGYFYYYYMDVW

SEQ ID NO: 31040 - protein, 21 aa, Homo sapiens
CARQNSHTTIFGVVIKEIDYW

SEQ ID NO: 31041 - protein, 21 aa, Homo sapiens
CARDSRDSSGYYYGGYYFDYW

SEQ ID NO: 31042 - protein, 28 aa, Homo sapiens
CARDVGGYRSSKYLPQRSPSYYSYMDVW

SEQ ID NO: 31043 - protein, 19 aa, Homo sapiens
CAREGGRYCSGGGCLPDYW

SEQ ID NO: 31044 - protein, 15 aa, Homo sapiens
CARDMGSNGLPFDYW

SEQ ID NO: 31045 - protein, 16 aa, Homo sapiens
CTTDRGITVRPIFDRW

SEQ ID NO: 31046 - protein, 13 aa, Homo sapiens
CARAFRGFTPDYW

SEQ ID NO: 31047 - protein, 15 aa, Homo sapiens
CARAASGVLHGFDYW

SEQ ID NO: 31048 - protein, 11 aa, Homo sapiens
CAREAYAMDVW

SEQ ID NO: 31049 - protein, 16 aa, Homo sapiens
CAKAHDWNYFDYFDYW

SEQ ID NO: 31050 - protein, 26 aa, Homo sapiens
CARDSPYDFWSGYYYANYYYYGMDVW

SEQ ID NO: 31051 - protein, 16 aa, Homo sapiens
CAKDRVGVSHYYLDSW

SEQ ID NO: 31052 - protein, 17 aa, Homo sapiens
CARSSTSLAENDAFDIW

SEQ ID NO: 31053 - protein, 15 aa, Homo sapiens
CATVWGWGSGRFDAW

SEQ ID NO: 31054 - protein, 21 aa, Homo sapiens
CARDRPAYCGGDCYFDAFDIW

SEQ ID NO: 31055 - protein, 13 aa, Homo sapiens
CAKDLGSYYENYW

SEQ ID NO: 31056 - protein, 14 aa, Homo sapiens
CAARDDSLSGGVVF

SEQ ID NO: 31057 - protein, 18 aa, Homo sapiens
CARTFCVNAICESYFDNW

SEQ ID NO: 31058 - protein, 22 aa, Homo sapiens
CARRNYYDSSDYYWPAYYFDYW

SEQ ID NO: 31059 - protein, 21 aa, Homo sapiens
CARFVRAIKIVGATEYYFDYW

SEQ ID NO: 31060 - protein, 20 aa, Homo sapiens
CARGSSAGWGSRRRNYFDHW

SEQ ID NO: 31061 - protein, 24 aa, Homo sapiens
CARHRERGIRNRTHSYHYYYMDVW

SEQ ID NO: 31062 - protein, 19 aa, Homo sapiens
CAKGGLRLLFGIDAAFDIW

SEQ ID NO: 31063 - protein, 18 aa, Homo sapiens
CAREKPDPIAVAGPIDYW

SEQ ID NO: 31064 - protein, 14 aa, Homo sapiens
CAHSSLYQLEFDYW

SEQ ID NO: 31065 - protein, 15 aa, Homo sapiens
CAKEDEYYYYGMDVW

SEQ ID NO: 31066 - protein, 14 aa, Homo sapiens
CARMKVVADVWDYW

SEQ ID NO: 31067 - protein, 15 aa, Homo sapiens
CAGLPGTWYSDFDFW

SEQ ID NO: 31068 - protein, 24 aa, Homo sapiens
CAKGNIVVVPAAVRRYYYYGMDVW

SEQ ID NO: 31069 - protein, 19 aa, Homo sapiens
CARDMGGWYNRGPSAFDLW

SEQ ID NO: 31070 - protein, 19 aa, Homo sapiens
CATDYPDGISVAARLFDYW

SEQ ID NO: 31071 - protein, 18 aa, Homo sapiens
CARVKHYYGSGGYYFDYW

SEQ ID NO: 31072 - protein, 21 aa, Homo sapiens
CAGRPPPYNYGLYYFYAMDVW

SEQ ID NO: 31073 - protein, 17 aa, Homo sapiens
CATLRDSVLTGYSFDYW

SEQ ID NO: 31074 - protein, 19 aa, Homo sapiens
CAKFGRIAAAGEAGYFDYW

SEQ ID NO: 31075 - protein, 17 aa, Homo sapiens
CARGVVGHLPGSYFDYW

SEQ ID NO: 31076 - protein, 14 aa, Homo sapiens
CARTRLSINWFDPW

SEQ ID NO: 31077 - protein, 18 aa, Homo sapiens
CARSPPIAVAGWGDFDIW

SEQ ID NO: 31078 - protein, 17 aa, Homo sapiens
CARDQEYYYGSGNIDYW

SEQ ID NO: 31079 - protein, 16 aa, Homo sapiens
CARDGQWLLLEPFDIW

SEQ ID NO: 31080 - protein, 23 aa, Homo sapiens
CAGKDLGVITYHSYYYSYGMDVW

SEQ ID NO: 31081 - protein, 24 aa, Homo sapiens
CARDPEEQMAAAGIYYYYYYMDVW

SEQ ID NO: 31082 - protein, 18 aa, Homo sapiens
CARLGRPTLYYYDGMDVW

SEQ ID NO: 31083 - protein, 21 aa, Homo sapiens
CARDLRFTYYYGSGRRWFDPW

SEQ ID NO: 31084 - protein, 17 aa, Homo sapiens
CAKDQVDFYYYYGLDVW

SEQ ID NO: 31085 - protein, 14 aa, Homo sapiens
CARHLNRLHPFDTW

SEQ ID NO: 31086 - protein, 27 aa, Homo sapiens
CARDVENYYDSSSYSSQRPYYYGMDVW

SEQ ID NO: 31087 - protein, 13 aa, Homo sapiens
CARAPLMDALDSW

SEQ ID NO: 31088 - protein, 20 aa, Homo sapiens
CARGPPYYDFWSGPNWFDPW

SEQ ID NO: 31089 - protein, 13 aa, Homo sapiens
CARLRLFPYFDYW

SEQ ID NO: 31090 - protein, 24 aa, Homo sapiens
CARSPFRGITIFGVVTTGRYFDLW

SEQ ID NO: 31091 - protein, 16 aa, Homo sapiens
CAKAITASTLGYFQHW

SEQ ID NO: 31092 - protein, 20 aa, Homo sapiens
CARRTYYYDSSGYYTWFDPW

SEQ ID NO: 31093 - protein, 16 aa, Homo sapiens
CVLCRGGWYYYYMDVW

SEQ ID NO: 31094 - protein, 21 aa, Homo sapiens
CAREYCDGATHCRGGWFFDLW

SEQ ID NO: 31095 - protein, 15 aa, Homo sapiens
CVSSASYYLEYMDVW

SEQ ID NO: 31096 - protein, 16 aa, Homo sapiens
CAREAGDSSPWRFDHW

SEQ ID NO: 31097 - protein, 19 aa, Homo sapiens
CVRRPKDGIVGSQGNFDFW

SEQ ID NO: 31098 - protein, 17 aa, Homo sapiens
CARRGGYTYAGDYFDYW

SEQ ID NO: 31099 - protein, 16 aa, Homo sapiens
CARADCTNAACPSDYW

SEQ ID NO: 31100 - protein, 19 aa, Homo sapiens
CARDSSTWNYYYYHGMDVW

SEQ ID NO: 31101 - protein, 16 aa, Homo sapiens
CAREGIWFGESPWDYW

SEQ ID NO: 31102 - protein, 20 aa, Homo sapiens
CARDPFDSSGYYYNWYFDLW

SEQ ID NO: 31103 - protein, 16 aa, Homo sapiens
CARLSGYYYVDAFDFW

SEQ ID NO: 31104 - protein, 16 aa, Homo sapiens
CATQYAIAARQTMDYW

SEQ ID NO: 31105 - protein, 16 aa, Homo sapiens
CARHRDVLRYSLFDPW

SEQ ID NO: 31106 - protein, 32 aa, Homo sapiens
CARDSYDDFWSGYYTVWSLGQKNYYYYAMDVW

SEQ ID NO: 31107 - protein, 16 aa, Homo sapiens
CARAPQTTDIAAFDPW

SEQ ID NO: 31108 - protein, 21 aa, Homo sapiens
CAGDLFYYYDSSGPASPIDYW

SEQ ID NO: 31109 - protein, 19 aa, Homo sapiens
CARLGEEYSGYDKGPFDYW

SEQ ID NO: 31110 - protein, 20 aa, Homo sapiens
CAGDLGVAARNLGLYYMDVW

SEQ ID NO: 31111 - protein, 19 aa, Homo sapiens
CARDFNVYTSSPVDAFDLW

SEQ ID NO: 31112 - protein, 20 aa, Homo sapiens
CARDYRDRYYHSSGKTFEYW

SEQ ID NO: 31113 - protein, 13 aa, Homo sapiens
CASMSRYGPFDFW

SEQ ID NO: 31114 - protein, 15 aa, Homo sapiens
CARELNWNYSPFDYW

SEQ ID NO: 31115 - protein, 21 aa, Homo sapiens
CAKGVLPTSNYYDSSGYPDYW

SEQ ID NO: 31116 - protein, 17 aa, Homo sapiens
CARGSYFVYNDYYFDYW

SEQ ID NO: 31117 - protein, 22 aa, Homo sapiens
CARHTYYYDSSGYYYKHYFDYW

SEQ ID NO: 31118 - protein, 14 aa, Homo sapiens
CARGADYGAAFDFW

SEQ ID NO: 31119 - protein, 14 aa, Homo sapiens
CVDAGSGNYYFEYW

SEQ ID NO: 31120 - protein, 17 aa, Homo sapiens
CARAGVRGTNVYFSDYW

SEQ ID NO: 31121 - protein, 19 aa, Homo sapiens
CARGVRELSYYYYYYMDVW

SEQ ID NO: 31122 - protein, 18 aa, Homo sapiens
CAKVLPPGSGSPTEFDFW

SEQ ID NO: 31123 - protein, 25 aa, Homo sapiens
CAKEEDSDPEWELLRQAHSTFFDYW

SEQ ID NO: 31124 - protein, 21 aa, Homo sapiens
CASPWGWNRGSYYEYDAFDIW

SEQ ID NO: 31125 - protein, 21 aa, Homo sapiens
CAGLWSLYCSGGSCSHYVDCW

SEQ ID NO: 31126 - protein, 19 aa, Homo sapiens
CARGTRGSKAPYYYGMDVW

SEQ ID NO: 31127 - protein, 16 aa, Homo sapiens
CARQNFIAPIDWFDPW

SEQ ID NO: 31128 - protein, 20 aa, Homo sapiens
CARGRTTVTTRFGRDGFDIW

SEQ ID NO: 31129 - protein, 18 aa, Homo sapiens
CARGLRRGYGYGDWFDTW

SEQ ID NO: 31130 - protein, 14 aa, Homo sapiens
CAREGWEGPYFDLW

SEQ ID NO: 31131 - protein, 16 aa, Homo sapiens
CATDGSSSLAYYFDYW

SEQ ID NO: 31132 - protein, 20 aa, Homo sapiens
CARDRYYYGSPGARYYMDVW

SEQ ID NO: 31133 - protein, 18 aa, Homo sapiens
CASLTSDWYSDYYGMDVW

SEQ ID NO: 31134 - protein, 16 aa, Homo sapiens
CTSPQASRDDNSADYW

SEQ ID NO: 31135 - protein, 32 aa, Homo sapiens
CARHVYEAAPRDPIIGMIIGSDSGDGGWFDPW

SEQ ID NO: 31136 - protein, 20 aa, Homo sapiens
CARGGYSSGWYGTHNWFDPW

SEQ ID NO: 31137 - protein, 20 aa, Homo sapiens
CARAGRSIGYSSGWNYFDYW

SEQ ID NO: 31138 - protein, 21 aa, Homo sapiens
CASDLWAKVEDSSSSDWFDPW

SEQ ID NO: 31139 - protein, 15 aa, Homo sapiens
CARHKEMAIQKFDPW

SEQ ID NO: 31140 - protein, 22 aa, Homo sapiens
CARHSLWVPPAGSSSTSFFDSW

SEQ ID NO: 31141 - protein, 18 aa, Homo sapiens
CAKGVIYDYDPPSAFDIW

SEQ ID NO: 31142 - protein, 24 aa, Homo sapiens
CARGGMMLLAAGSGGNYYYGMDVW

SEQ ID NO: 31143 - protein, 19 aa, Homo sapiens
CARVHYDFWSGKEWYFDLW

SEQ ID NO: 31144 - protein, 15 aa, Homo sapiens
CTRVKGYSSSPFDYW

SEQ ID NO: 31145 - protein, 18 aa, Homo sapiens
CARDRGAVTIPNFLFDYW

SEQ ID NO: 31146 - protein, 17 aa, Homo sapiens
CAREMVFGVVIRWFDPW

SEQ ID NO: 31147 - protein, 16 aa, Homo sapiens
CARASDYYDETNFDYW

SEQ ID NO: 31148 - protein, 17 aa, Homo sapiens [sequence omitted]

SEQ ID NO: 31149 - protein, 14 aa, Homo sapiens
CARRTWSDGGFDYW

SEQ ID NO: 31150 - protein, 19 aa, Homo sapiens
CARGGGYYDFWSGRGGDYW

SEQ ID NO: 31151 - protein, 16 aa, Homo sapiens
CAKGNYESYYYYMDVW

SEQ ID NO: 31152 - protein, 21 aa, Homo sapiens
CARVSPATEIIVPHRGWFDPW

SEQ ID NO: 31153 - protein, 16 aa, Homo sapiens
CAHSRNPEIGYWFDPW

SEQ ID NO: 31154 - protein, 30 aa, Homo sapiens
CAKDRLTVVPAAIVIVAPRNYYYYYGMDVW

SEQ ID NO: 31155 - protein, 20 aa, Homo sapiens
CARDLTVTFGVYYYYGMDVW

SEQ ID NO: 31156 - protein, 27 aa, Homo sapiens
CATSPNICSGGSCYPYDKYYYYGMDVW

SEQ ID NO: 31157 - protein, 11 aa, Homo sapiens
CASIGNWFAPW

SEQ ID NO: 31158 - protein, 19 aa, Homo sapiens
CTKIEGSTLYYNYYYMDVW

SEQ ID NO: 31159 - protein, 22 aa, Homo sapiens
CARLRLEWYDAKTYYYYGMDVW

SEQ ID NO: 31160 - protein, 20 aa, Homo sapiens
CARNQWFLYSGSFSYYFDYW

SEQ ID NO: 31161 - protein, 18 aa, Homo sapiens
CAIGFNDFWSGYGYFDYW

SEQ ID NO: 31162 - protein, 14 aa, Homo sapiens
CAKETRIYRAFDIW

SEQ ID NO: 31163 - protein, 21 aa, Homo sapiens
CARAVAGSTFAVVKNWYFDLW

SEQ ID NO: 31164 - protein, 17 aa, Homo sapiens
CATSPESSGSLDAFDIW

SEQ ID NO: 31165 - protein, 23 aa, Homo sapiens
CTRDRPYDDFWSGFYYYYYMDVW

SEQ ID NO: 31166 - protein, 15 aa, Homo sapiens
CARDRDLAGLVCDYW

SEQ ID NO: 31167 - protein, 18 aa, Homo sapiens
CARDDAIVGTSKGGFDHW

SEQ ID NO: 31168 - protein, 19 aa, Homo sapiens
CAHSRSSSSGWYVHHFDYW

SEQ ID NO: 31169 - protein, 17 aa, Homo sapiens
CAKDIGGGSTDDAFDIW

SEQ ID NO: 31170 - protein, 24 aa, Homo sapiens
CAHSVSQLPKLIRIAGSRDYFDYW

SEQ ID NO: 31171 - protein, 13 aa, Homo sapiens
CQSADNIGTYLLF

SEQ ID NO: 31172 - protein, 22 aa, Homo sapiens
CARVHCITIFGVVILGGWFDPW

SEQ ID NO: 31173 - protein, 24 aa, Homo sapiens
CARDLAHIVVVTTHWGYYYGMDVW

SEQ ID NO: 31174 - protein, 15 aa, Homo sapiens
CARHMRIAVAHLDYW

SEQ ID NO: 31175 - protein, 19 aa, Homo sapiens
CARHSGYSSGWYPGNIDYW

SEQ ID NO: 31176 - protein, 19 aa, Homo sapiens
CARDGRGSYYSPMTLFDYW

SEQ ID NO: 31177 - protein, 14 aa, Homo sapiens
CSSYTISSGLGILF

SEQ ID NO: 31178 - protein, 12 aa, Homo sapiens
CAKGSTRLSDYW

SEQ ID NO: 31179 - protein, 19 aa, Homo sapiens
CARDRGITGTSGFSLFDIW

SEQ ID NO: 31180 - protein, 17 aa, Homo sapiens
CATAGHTSYSPYYFDYW

SEQ ID NO: 31181 - protein, 12 aa, Homo sapiens
CAKTQQYYFDYW

SEQ ID NO: 31182 - protein, 14 aa, Homo sapiens
CQSADGSAISPWVF

SEQ ID NO: 31183 - protein, 20 aa, Homo sapiens
CARGVGQLAGYHYYYYMDVW

SEQ ID NO: 31184 - protein, 20 aa, Homo sapiens
CAKDRDIQLWFNYYYGMDVW

SEQ ID NO: 31185 - protein, 25 aa, Homo sapiens
CARENDQEVRAAPGIIYYYYAVDVW

SEQ ID NO: 31186 - protein, 19 aa, Homo sapiens
CARGALNWDVQGSDFFDYW

SEQ ID NO: 31187 - protein, 15 aa, Homo sapiens
CARHELGVTTGFEYW

SEQ ID NO: 31188 - protein, 16 aa, Homo sapiens
CATRIVSSGWYEFDYW

SEQ ID NO: 31189 - protein, 21 aa, Homo sapiens
CAKPRAYDSSGYYRHWYFDLW

SEQ ID NO: 31190 - protein, 20 aa, Homo sapiens
CARDVHVLLWFGERYYFDYW

SEQ ID NO: 31191 - protein, 14 aa, Homo sapiens
CARVSFSAWTFDDW

SEQ ID NO: 31192 - protein, 19 aa, Homo sapiens
CAKEPLFIAVSAAVRFDSW

SEQ ID NO: 31193 - protein, 17 aa, Homo sapiens
CDVVPSAYNRYFYPDVW

SEQ ID NO: 31194 - protein, 13 aa, Homo sapiens
CARGNWKLSNDYW

SEQ ID NO: 31195 - protein, 19 aa, Homo sapiens
CARETYYYDSSGSKPYDYW

SEQ ID NO: 31196 - protein, 19 aa, Homo sapiens
CARGRINFGGVIDTFFDYW

SEQ ID NO: 31197 - protein, 15 aa, Homo sapiens
CARLLAAAGQEIDYW

SEQ ID NO: 31198 - protein, 20 aa, Homo sapiens
CARERVELVATYYWAWFDPW

SEQ ID NO: 31199 - protein, 22 aa, Homo sapiens
CARETGGSSWYRGVVVGAFDIW

SEQ ID NO: 31200 - protein, 19 aa, Homo sapiens
CARGDDYYDSSIYRAFDIW

SEQ ID NO: 31201 - protein, 18 aa, Homo sapiens
CARAFILWWSVGNWFDPW

SEQ ID NO: 31202 - protein, 22 aa, Homo sapiens
CAALSRVLDHAYSGYEYWFDPW

SEQ ID NO: 31203 - protein, 20 aa, Homo sapiens
CARAPRAHEIYYYYYGMDVW

SEQ ID NO: 31204 - protein, 17 aa, Homo sapiens
CARDPYPITMIVVNDYW

SEQ ID NO: 31205 - protein, 18 aa, Homo sapiens
CARDERSGAMVDYYFDYW

SEQ ID NO: 31206 - protein, 17 aa, Homo sapiens
CARGHYDSISGYFFDYW

SEQ ID NO: 31207 - protein, 19 aa, Homo sapiens
CARDVWMPAEWENENFDYW

SEQ ID NO: 31208 - protein, 15 aa, Homo sapiens
CTSHVDSRYNWFDPW

SEQ ID NO: 31209 - protein, 21 aa, Homo sapiens
CARGEIEPRSGYYFYHAMDVW

SEQ ID NO: 31210 - protein, 12 aa, Homo sapiens
CVQALQTLALTF

SEQ ID NO: 31211 - protein, 18 aa, Homo sapiens
CHVDNSRSHQTIYYMDVW

SEQ ID NO: 31212 - protein, 22 aa, Homo sapiens
CATDRCSSTSCNPYYYYGMDVW

SEQ ID NO: 31213 - protein, 19 aa, Homo sapiens
CARGNDSSNVYYWGFFDKW

SEQ ID NO: 31214 - protein, 15 aa, Homo sapiens
CARDRSGTTGVFDYW

SEQ ID NO: 31215 - protein, 17 aa, Homo sapiens
CAKDSVNYYGSGSFDYW

SEQ ID NO: 31216 - protein, 17 aa, Homo sapiens
CTRGTPTRAKDFYIDVW

SEQ ID NO: 31217 - protein, 28 aa, Homo sapiens
CTTETAGVGYYYDSSDLKDLYDNAFDIW

SEQ ID NO: 31218 - protein, 16 aa, Homo sapiens
CARDISKWLTDGMDVW

SEQ ID NO: 31219 - protein, 21 aa, Homo sapiens
CARHRITWGISAANTHWFDPW

SEQ ID NO: 31220 - protein, 20 aa, Homo sapiens
CARDRRPPSGSESNYYFDFW

SEQ ID NO: 31221 - protein, 22 aa, Homo sapiens
CAREVAGGNSLGLDYYYGMDVW

SEQ ID NO: 31222 - protein, 20 aa, Homo sapiens
CAKGSRPRITYYYDNRVDYW

SEQ ID NO: 31223 - protein, 17 aa, Homo sapiens
CAKDSEIAAAGSTFDYW

SEQ ID NO: 31224 - protein, 17 aa, Homo sapiens
CARDAFSSPDGRYFDLW

SEQ ID NO: 31225 - protein, 19 aa, Homo sapiens
CARHGRPLSGSYPTYFDYW

SEQ ID NO: 31226 - protein, 16 aa, Homo sapiens
CAKNSGSSPIYYFDYW

SEQ ID NO: 31227 - protein, 14 aa, Homo sapiens
CARGGYKDWYFDLW

SEQ ID NO: 31228 - protein, 20 aa, Homo sapiens
CATARAVIGYSSSWYWFDPW

SEQ ID NO: 31229 - protein, 15 aa, Homo sapiens
CAKGQPIYGDYYDYW

SEQ ID NO: 31230 - protein, 17 aa, Homo sapiens
CARTGGGTHPYMHFDNW

SEQ ID NO: 31231 - protein, 19 aa, Homo sapiens
CARDNPPSYSSSWYWFDPW

SEQ ID NO: 31232 - protein, 13 aa, Homo sapiens
CLLDIQLLYRGYW

SEQ ID NO: 31233 - protein, 19 aa, Homo sapiens
CARHLNDPALITGGGLDYW

SEQ ID NO: 31234 - protein, 19 aa, Homo sapiens
CAAGYYDFWSGHYYVFDYW

SEQ ID NO: 31235 - protein, 23 aa, Homo sapiens
CTTVFKWELLRDMDYYYYYMDVW

SEQ ID NO: 31236 - protein, 18 aa, Homo sapiens
CAKDKWSGIAAAGPLDYW

SEQ ID NO: 31237 - protein, 23 aa, Homo sapiens
CARLDLFSGPIPAANLHGWFDPW

SEQ ID NO: 31238 - protein, 19 aa, Homo sapiens
CATLQDPWEVQGSYYIDYW

SEQ ID NO: 31239 - protein, 18 aa, Homo sapiens
CARATGSRTYYNQPFDYW

SEQ ID NO: 31240 - protein, 15 aa, Homo sapiens
CVRESTLTWSWFDPW

SEQ ID NO: 31241 - protein, 21 aa, Homo sapiens
CARGPPLQMATMSRAYWLDYW

SEQ ID NO: 31242 - protein, 15 aa, Homo sapiens
CTRANMMFWGPFDYW

SEQ ID NO: 31243 - protein, 25 aa, Homo sapiens
CARDVTYYYGSGSLEDYYYYGMDVW

SEQ ID NO: 31244 - protein, 22 aa, Homo sapiens
CARGEHGNGYHVVYYYYYMDVW

SEQ ID NO: 31245 - protein, 18 aa, Homo sapiens
CARGTLRLPAHPGYFDLW

SEQ ID NO: 31246 - protein, 23 aa, Homo sapiens
CARARGIAVAATIFYYYYGMDVW

SEQ ID NO: 31247 - protein, 14 aa, Homo sapiens
CATGAEWQLPFDYW

SEQ ID NO: 31248 - protein, 25 aa, Homo sapiens
CARHGGFRDEYNWGSNTPPFYFEHW

SEQ ID NO: 31249 - protein, 11 aa, Homo sapiens
CLLYDGGVQIF

SEQ ID NO: 31250 - protein, 19 aa, Homo sapiens
CARGDPRYISGWPDWFDTW

SEQ ID NO: 31251 - protein, 20 aa, Homo sapiens
CARFHYYDSSDSSDDAFDIW

SEQ ID NO: 31252 - protein, 17 aa, Homo sapiens
CARGSVGGWELPAFEIW

SEQ ID NO: 31253 - protein, 26 aa, Homo sapiens
CARDRLVRVQGTRDRYYYYYYGMDVW

SEQ ID NO: 31254 - protein, 26 aa, Homo sapiens
CAKDHRRIKIFGDVIKNQYYYAMDVW

SEQ ID NO: 31255 - protein, 27 aa, Homo sapiens
CAKLHPDIVVAPAPNGGLEAAGAYDYW

SEQ ID NO: 31256 - protein, 17 aa, Homo sapiens
CAREGSLVAAADNFDYW

SEQ ID NO: 31257 - protein, 18 aa, Homo sapiens
CVRQQNDYIWGSPWFDPW

SEQ ID NO: 31258 - protein, 17 aa, Homo sapiens
CARDGGRFLEWTPFDYW

SEQ ID NO: 31259 - protein, 15 aa, Homo sapiens
CVKSEEDFSNYFRFW

SEQ ID NO: 31260 - protein, 29 aa, Homo sapiens
CAKDRWYYDILTGYFPLSHYYGYYGMDVW

SEQ ID NO: 31261 - protein, 18 aa, Homo sapiens
CAHRPSSGYGYWGGFDYW

SEQ ID NO: 31262 - protein, 20 aa, Homo sapiens
CALINEMATIFGVENWFDPW

SEQ ID NO: 31263 - protein, 17 aa, Homo sapiens
CAKDLEAIVGATGLDYW

SEQ ID NO: 31264 - protein, 16 aa, Homo sapiens
CAKDARLRYSNYLDYW

SEQ ID NO: 31265 - protein, 18 aa, Homo sapiens
CAKEKLDSVDYYYGMDVW

SEQ ID NO: 31266 - protein, 20 aa, Homo sapiens
CARGITIFGLDFIYWYFDLW

SEQ ID NO: 31267 - protein, 15 aa, Homo sapiens
CAAWDDRLTGPHVVF

SEQ ID NO: 31268 - protein, 16 aa, Homo sapiens
CAKDSTNWNYGPNDYW

SEQ ID NO: 31269 - protein, 18 aa, Homo sapiens
CAKDNTSGDYGISWFDPW

SEQ ID NO: 31270 - protein, 17 aa, Homo sapiens
CAKDRSITMTFGAFDIW

SEQ ID NO: 31271 - protein, 17 aa, Homo sapiens
CARLSSLVRPARYLDNW

SEQ ID NO: 31272 - protein, 24 aa, Homo sapiens
CAREKTDPPYDSSGYPRIDYFDYW

SEQ ID NO: 31273 - protein, 21 aa, Homo sapiens
CATDPYDNTGYYGVQDTFNIW

SEQ ID NO: 31274 - protein, 15 aa, Homo sapiens
CARHNLRWVYYMDVW

SEQ ID NO: 31275 - protein, 17 aa, Homo sapiens
CAKSQGHYDFWSGYDYW

SEQ ID NO: 31276 - protein, 16 aa, Homo sapiens
CAKVGDGYKPPYFDYW

SEQ ID NO: 31277 - protein, 16 aa, Homo sapiens
CARSGHGDYGGTLDYW

SEQ ID NO: 31278 - protein, 23 aa, Homo sapiens
CSVWPRYELLTASRYYYYYMDVW

SEQ ID NO: 31279 - protein, 14 aa, Homo sapiens
CARDLGYSYGLDYW

SEQ ID NO: 31280 - protein, 24 aa, Homo sapiens
CAKDLSAFYSGSGSSYYYDGMDVW

SEQ ID NO: 31281 - protein, 18 aa, Homo sapiens
CAKAALIALYYHYYMDVW

SEQ ID NO: 31282 - protein, 17 aa, Homo sapiens
CAKDRLQAYYHYGMDVW

SEQ ID NO: 31283 - protein, 18 aa, Homo sapiens
CAASPIYFYDDNGYFSPW

SEQ ID NO: 31284 - protein, 16 aa, Homo sapiens
CARDLEVGANHWFDSW

SEQ ID NO: 31285 - protein, 29 aa, Homo sapiens
CAKGDTKGYCSSTSCLTNKYYYYYGMDVW

SEQ ID NO: 31286 - protein, 22 aa, Homo sapiens
CAREVATYYYGSGTYSYYFDYW

SEQ ID NO: 31287 - protein, 23 aa, Homo sapiens
CARDLFADSGSISVPDYYYMDVW

SEQ ID NO: 31288 - protein, 26 aa, Homo sapiens
CARDGDYYDSSGYYLLATYGAAFDIW

SEQ ID NO: 31289 - protein, 17 aa, Homo sapiens
CAKVGIFLNSVGHCDYW

SEQ ID NO: 31290 - protein, 18 aa, Homo sapiens
CARARGEYSSSPKTLDYW

SEQ ID NO: 31291 - protein, 15 aa, Homo sapiens
CAHRGRWNYAYFDLW

SEQ ID NO: 31292 - protein, 19 aa, Homo sapiens
CARVSLRFLEWSHYYFDYW

SEQ ID NO: 31293 - protein, 21 aa, Homo sapiens
CAHQPPCSGANCYYHDTFDIW

SEQ ID NO: 31294 - protein, 19 aa, Homo sapiens
CMKDRNRNIWGPRQWFDPW

SEQ ID NO: 31295 - protein, 24 aa, Homo sapiens
CARDLANSEYSSGWYYYYYYMDVW

SEQ ID NO: 31296 - protein, 16 aa, Homo sapiens
CARHDVGLRWGNFDYW

SEQ ID NO: 31297 - protein, 23 aa, Homo sapiens
CARRSQYSGAARGYYYYYYMDVW

SEQ ID NO: 31298 - protein, 16 aa, Homo sapiens
CARDIVVGSETALDYW

SEQ ID NO: 31299 - protein, 21 aa, Homo sapiens
CAREIGVAVTGTWWTGYFDYW

SEQ ID NO: 31300 - protein, 18 aa, Homo sapiens
CATGPPLIVGATNWFDPW

SEQ ID NO: 31301 - protein, 18 aa, Homo sapiens
CARFDYSNSKYAPFFDYW

SEQ ID NO: 31302 - protein, 14 aa, Homo sapiens
CATFPTSVTNPDYW

SEQ ID NO: 31303 - protein, 15 aa, Homo sapiens
CASGPSYNWNYVDHW

SEQ ID NO: 31304 - protein, 26 aa, Homo sapiens
CARSKGANCYSYGGYVGSCRYHFDFW

SEQ ID NO: 31305 - protein, 19 aa, Homo sapiens
CAGLPTRWTTVIKGYFDYW

SEQ ID NO: 31306 - protein, 21 aa, Homo sapiens
CAKDPRPALLWFGESPSFDPW

SEQ ID NO: 31307 - protein, 13 aa, Homo sapiens
CVGSFGLERIDYW

SEQ ID NO: 31308 - protein, 24 aa, Homo sapiens
CAREARYYDFWSGFHYYYYVMDVW

SEQ ID NO: 31309 - protein, 11 aa, Homo sapiens [sequence omitted]

SEQ ID NO: 31310 - protein, 15 aa, Homo sapiens
CAKSGDNEGVVGDYW

SEQ ID NO: 31311 - protein, 19 aa, Homo sapiens
CARGEGEGDQAYYYGMDVW

SEQ ID NO: 31312 - protein, 24 aa, Homo sapiens
CASSPPNYYDSQNYYFGGIPFDFW

SEQ ID NO: 31313 - protein, 16 aa, Homo sapiens
CTRAVRGYPPYYFDYW

SEQ ID NO: 31314 - protein, 17 aa, Homo sapiens
CARGSSYHDSSSAFDIW

SEQ ID NO: 31315 - protein, 15 aa, Homo sapiens
CARLDIAVTGSFDYW

SEQ ID NO: 31316 - protein, 18 aa, Homo sapiens
CARRFGELFGTEYYFDYW

SEQ ID NO: 31317 - protein, 17 aa, Homo sapiens
CARHGGKYSSSSIFDYW

SEQ ID NO: 31318 - protein, 14 aa, Homo sapiens
CTSGLRWEDSFDFW

SEQ ID NO: 31319 - protein, 18 aa, Homo sapiens
CARFVDTAMVKENWFDPW

SEQ ID NO: 31320 - protein, 16 aa, Homo sapiens
CAKDINLAGTYVFDYW

SEQ ID NO: 31321 - protein, 24 aa, Homo sapiens
CARDVSIAVAGTLLPDYYYYMDVW

SEQ ID NO: 31322 - protein, 22 aa, Homo sapiens
CARDLGPQNWNYARVINYFDYW

SEQ ID NO: 31323 - protein, 21 aa, Homo sapiens
CAKDTGSYYYDSSGHTALDYW

SEQ ID NO: 31324 - protein, 14 aa, Homo sapiens
CASSGLGELSFDYW

SEQ ID NO: 31325 - protein, 18 aa, Homo sapiens
CARRSMASGGAINWFDFW

SEQ ID NO: 31326 - protein, 21 aa, Homo sapiens
CARSRSSSWYLIGSWYAFDIW

SEQ ID NO: 31327 - protein, 20 aa, Homo sapiens
CARDSSRPDLAVDYHLFDSW

SEQ ID NO: 31328 - protein, 25 aa, Homo sapiens
CARDGDCSGGSCYSSVNYYYGMDVW

SEQ ID NO: 31329 - protein, 11 aa, Homo sapiens
CAMGGDYVDYW

SEQ ID NO: 31330 - protein, 14 aa, Homo sapiens
CARAVNLWDYLDTW

SEQ ID NO: 31331 - protein, 16 aa, Homo sapiens
CAKGVVPAAIPWFDPW

SEQ ID NO: 31332 - protein, 23 aa, Homo sapiens
CASYPADTRPEKKNYYYYGMDVW

SEQ ID NO: 31333 - protein, 14 aa, Homo sapiens
CAKVFPSDDSRDYW

SEQ ID NO: 31334 - protein, 13 aa, Homo sapiens
CARDGAAHGFDMW

SEQ ID NO: 31335 - protein, 16 aa, Homo sapiens
CATAPGQSGYNWFDPW

SEQ ID NO: 31336 - protein, 19 aa, Homo sapiens
CAKDGSGSYYGALDPFDYW

SEQ ID NO: 31337 - protein, 16 aa, Homo sapiens
CAKLPYQLPSNAFDIW

SEQ ID NO: 31338 - protein, 31 aa, Homo sapiens
CALPISAVYYCARDVGSNYNDYYYYYGMDVW

SEQ ID NO: 31339 - protein, 21 aa, Homo sapiens
CARRNYNIFIGYYGNGYFDNW

SEQ ID NO: 31340 - protein, 16 aa, Homo sapiens
CAKLSGWDGTYWFDPW

SEQ ID NO: 31341 - protein, 16 aa, Homo sapiens
CAKFTVTRGEDYFDYW

SEQ ID NO: 31342 - protein, 19 aa, Homo sapiens
CARHGVPLLPEGPGCFDPW

SEQ ID NO: 31343 - protein, 20 aa, Homo sapiens
CAKSLAPMIVVVIPHAFDIW

SEQ ID NO: 31344 - protein, 18 aa, Homo sapiens
CAREVVPGAIYYYGMDVW

SEQ ID NO: 31345 - protein, 16 aa, Homo sapiens
CTKGYCSSSSCGGDYW

SEQ ID NO: 31346 - protein, 21 aa, Homo sapiens
CARGRLLWFGELLLYNWFDPW

SEQ ID NO: 31347 - protein, 18 aa, Homo sapiens
CAKDYYGSGSYSDAFDIW

SEQ ID NO: 31348 - protein, 27 aa, Homo sapiens
CAKDHKSVQSLLWFGELSIEPWDFDYW

SEQ ID NO: 31349 - protein, 9 aa, Homo sapiens
CMQGIHLRF

SEQ ID NO: 31350 - protein, 16 aa, Homo sapiens
CAKDIVPAAMGYFQHW

SEQ ID NO: 31351 - protein, 29 aa, Homo sapiens
CAKDRRYYDFWSGYLSDSTNYYYYGMDVW

SEQ ID NO: 31352 - protein, 23 aa, Homo sapiens
CARDHYYYESSGYYVIHSYSDYW

SEQ ID NO: 31353 - protein, 20 aa, Homo sapiens
CAKGTPRQNYYDSSGYSDYW

SEQ ID NO: 31354 - protein, 20 aa, Homo sapiens
CARGHFGKYDTSGYSELDYW

SEQ ID NO: 31355 - protein, 19 aa, Homo sapiens
CARDQWPGGGYYYYGMDVW

SEQ ID NO: 31356 - protein, 16 aa, Homo sapiens
CAKETPDYGEGYFDYW

SEQ ID NO: 31357 - protein, 15 aa, Homo sapiens
CAREVVGNYYGLDYW

SEQ ID NO: 31358 - protein, 18 aa, Homo sapiens
CAGEDTATYYYYYGMDVW

SEQ ID NO: 31359 - protein, 18 aa, Homo sapiens
CTTNFNYYGSGSYYFGRW

SEQ ID NO: 31360 - protein, 20 aa, Homo sapiens
CAKTRLSTDYYDSSGSFDYW

SEQ ID NO: 31361 - protein, 15 aa, Homo sapiens
CAKDADTEITVIDYW

SEQ ID NO: 31362 - protein, 18 aa, Homo sapiens
CARDPEGSGSYLYYFDYW

SEQ ID NO: 31363 - protein, 13 aa, Homo sapiens
CQSWDSALSGYVF

SEQ ID NO: 31364 - protein, 22 aa, Homo sapiens
CARAISGYDNRGYSRPWFFDLW

SEQ ID NO: 31365 - protein, 16 aa, Homo sapiens
CVRGLYRSSWYYFDYW

SEQ ID NO: 31366 - protein, 21 aa, Homo sapiens
CATFGLKYYDSSGYLGAFDIW

SEQ ID NO: 31367 - protein, 21 aa, Homo sapiens
CAKDHCSGGSCDFIPPAFDPW

SEQ ID NO: 31368 - protein, 16 aa, Homo sapiens
CAKDIMTTVTYYFDYW

SEQ ID NO: 31369 - protein, 20 aa, Homo sapiens
CARYSPCSGDNCYSRDFDYW

SEQ ID NO: 31370 - protein, 19 aa, Homo sapiens
CAREYQLLLYGYYYGMDVW

SEQ ID NO: 31371 - protein, 8 aa, Homo sapiens
CMDAFSYW

SEQ ID NO: 31372 - protein, 16 aa, Homo sapiens
CARGESSGWYESPDYW

SEQ ID NO: 31373 - protein, 15 aa, Homo sapiens
CARMITFGGMGFDPW

SEQ ID NO: 31374 - protein, 16 aa, Homo sapiens
CAKDVWAAGGRSFDHW

SEQ ID NO: 31375 - protein, 19 aa, Homo sapiens
CARSWDVVVPAAMAYFDYW

SEQ ID NO: 31376 - protein, 16 aa, Homo sapiens
CAKDMSVAGNNWFDPW

SEQ ID NO: 31377 - protein, 21 aa, Homo sapiens
CARDRQGYYDSSGYYGWLDYW

SEQ ID NO: 31378 - protein, 21 aa, Homo sapiens
CAREKVEDQLPYYYYYGMDVW

SEQ ID NO: 31379 - protein, 13 aa, Homo sapiens
CVRHRSNRAADYW

SEQ ID NO: 31380 - protein, 23 aa, Homo sapiens
CARAALTSFTFGGVIVRGYFDYW

SEQ ID NO: 31381 - protein, 20 aa, Homo sapiens
CAKDYYDSSGYYFVPVPDYW

SEQ ID NO: 31382 - protein, 14 aa, Homo sapiens
CQQYYNWPPGGYTF

SEQ ID NO: 31383 - protein, 24 aa, Homo sapiens
CATAFARSGSYSWGYYYYYGMDVW

SEQ ID NO: 31384 - protein, 17 aa, Homo sapiens
CAKDMMGWNSHGYYGYW

SEQ ID NO: 31385 - protein, 21 aa, Homo sapiens
CARDRGGYGDYAVYYYGMDVW

SEQ ID NO: 31386 - protein, 20 aa, Homo sapiens
CARDRAYRGSLSDFDGMDVW

SEQ ID NO: 31387 - protein, 20 aa, Homo sapiens
CARDSLPESGLSSGYYFDYW

SEQ ID NO: 31388 - protein, 15 aa, Homo sapiens
CARDVGIAAAGRDYW

SEQ ID NO: 31389 - protein, 20 aa, Homo sapiens
CAKDNLLLWFGESGYYFDYW

SEQ ID NO: 31390 - protein, 19 aa, Homo sapiens
CATSPIYDSSGYYYGPDYW

SEQ ID NO: 31391 - protein, 17 aa, Homo sapiens
CAKGDVVVPEPWWFDPW

SEQ ID NO: 31392 - protein, 19 aa, Homo sapiens
CASVSPTGRTWYYYGMDVW

SEQ ID NO: 31393 - protein, 14 aa, Homo sapiens [sequence omitted]

SEQ ID NO: 31394 - protein, 14 aa, Homo sapiens
CARMYSLVGAFDYW

SEQ ID NO: 31395 - protein, 24 aa, Homo sapiens
CARMRIYCSGGSCYEPYYYGMDVW

SEQ ID NO: 31396 - protein, 16 aa, Homo sapiens
CARYIGYRQNQYFDSW

SEQ ID NO: 31397 - protein, 20 aa, Homo sapiens
CAHSLGEQWLAARGVYFDYW

SEQ ID NO: 31398 - protein, 19 aa, Homo sapiens
CAKGSSGAGDYYYYGMDVW

SEQ ID NO: 31399 - protein, 22 aa, Homo sapiens
CTMGEWFGGRDFTYYYYAMDVW

SEQ ID NO: 31400 - protein, 17 aa, Homo sapiens
CATTLKLLITYWYFDLW

SEQ ID NO: 31401 - protein, 18 aa, Homo sapiens
CAKDIEVGAAAGVVFEYW

SEQ ID NO: 31402 - protein, 22 aa, Homo sapiens
CARDSINWEGMLPGTPNHIDSW

SEQ ID NO: 31403 - protein, 17 aa, Homo sapiens
CAKAPRLGFIGGHFDYW

SEQ ID NO: 31404 - protein, 14 aa, Homo sapiens
CARYVGLYHAMDVW

SEQ ID NO: 31405 - protein, 21 aa, Homo sapiens
CAKDLSYGDYGASYYYGMDVW

SEQ ID NO: 31406 - protein, 14 aa, Homo sapiens
CARNYGSSAFFDYW

SEQ ID NO: 31407 - protein, 15 aa, Homo sapiens
CARYGAYTKYYFDYW

SEQ ID NO: 31408 - protein, 21 aa, Homo sapiens
CARDRYYCNDNNCTRGWFDPW

SEQ ID NO: 31409 - protein, 24 aa, Homo sapiens
CAKDLEKYIVATGGRYYYYGMDVW

SEQ ID NO: 31410 - protein, 17 aa, Homo sapiens
CCRADWEFYDSKPFDFW

SEQ ID NO: 31411 - protein, 19 aa, Homo sapiens
CARPSTYYYESSGGAFDIW

SEQ ID NO: 31412 - protein, 16 aa, Homo sapiens
CARSDGRGYPEYFQYW

SEQ ID NO: 31413 - protein, 19 aa, Homo sapiens
CAREGGYRTAHYYYGMDVW

SEQ ID NO: 31414 - protein, 23 aa, Homo sapiens
CAREGITMVRGVPWGYYYGMDVW

SEQ ID NO: 31415 - protein, 24 aa, Homo sapiens
CAKAPTYYYDSSGYSDYYYGMDVW

SEQ ID NO: 31416 - protein, 19 aa, Homo sapiens
CAKGAHYYDSSGYPEFGYW

SEQ ID NO: 31417 - protein, 22 aa, Homo sapiens
CAKERWFGELLNGYYYYGMDVW

SEQ ID NO: 31418 - protein, 17 aa, Homo sapiens
CASDRSQQLVGRTFDYW

SEQ ID NO: 31419 - protein, 17 aa, Homo sapiens
CAKDPYSSGWTDYFDLW

SEQ ID NO: 31420 - protein, 29 aa, Homo sapiens
CAKGWTHYDILTGYLHQWELLKADWFDPW

SEQ ID NO: 31421 - protein, 24 aa, Homo sapiens
CAKDEGIYLYYYDSSGYLDAFDIW

SEQ ID NO: 31422 - protein, 12 aa, Homo sapiens
CASHYSGYYLYW

SEQ ID NO: 31423 - protein, 20 aa, Homo sapiens
CAHGSCSGGSCYWGYYFDSW

SEQ ID NO: 31424 - protein, 20 aa, Homo sapiens
CAKDRYYDILTGPMDAFDIW

SEQ ID NO: 31425 - protein, 20 aa, Homo sapiens
CARALGGGFCSGGSCHFDYW

SEQ ID NO: 31426 - protein, 14 aa, Homo sapiens
CARDYAQPGYFQQW

SEQ ID NO: 31427 - protein, 24 aa, Homo sapiens
CARYSCSGGNCYSRLFYYYGMDVW

SEQ ID NO: 31428 - protein, 20 aa, Homo sapiens
CARKGYVWGSYRQGNWFDPW

SEQ ID NO: 31429 - protein, 22 aa, Homo sapiens
CAKDGISTRVRGIIDYYAMDVW

SEQ ID NO: 31430 - protein, 26 aa, Homo sapiens
CAKEDRLRYFDWSLAFNYYYYGMDVW

SEQ ID NO: 31431 - protein, 17 aa, Homo sapiens
CARQAICGGDCYPLDYW

SEQ ID NO: 31432 - protein, 20 aa, Homo sapiens
CAKDQGYYYGSGSYGVGDYW

SEQ ID NO: 31433 - protein, 16 aa, Homo sapiens
CAARKVAAVTGYFDYW

SEQ ID NO: 31434 - protein, 14 aa, Homo sapiens
CATGVVAGKTVDYW

SEQ ID NO: 31435 - protein, 15 aa, Homo sapiens
CARVYSGYALAFDIW

SEQ ID NO: 31436 - protein, 16 aa, Homo sapiens
CAREVGNTWANWFDPW

SEQ ID NO: 31437 - protein, 19 aa, Homo sapiens
CAKAGVVVITLGDAYFDYW

SEQ ID NO: 31438 - protein, 28 aa, Homo sapiens
CVKHMAPWSTGPGRGAIISPYYYGMDVW

SEQ ID NO: 31439 - protein, 17 aa, Homo sapiens
CARLNRLLDYYYGMDVW

SEQ ID NO: 31440 - protein, 14 aa, Homo sapiens
CVAWDDSLNGFLLF

SEQ ID NO: 31441 - protein, 18 aa, Homo sapiens
CAHSVDTAMFASDAFNIW

SEQ ID NO: 31442 - protein, 15 aa, Homo sapiens
CQVWDSSSSHRAVIF

SEQ ID NO: 31443 - protein, 16 aa, Homo sapiens
CAIVPLLVPDRYFDYW

SEQ ID NO: 31444 - protein, 14 aa, Homo sapiens
CAKPGGYDDGMDVW

SEQ ID NO: 31445 - protein, 20 aa, Homo sapiens
CAKRGEIFWLGVGRYAMDVW

SEQ ID NO: 31446 - protein, 17 aa, Homo sapiens
CARAPITMIVVTHFDYW

SEQ ID NO: 31447 - protein, 22 aa, Homo sapiens
CARVMTQYSSSWYPPANWFDPW

SEQ ID NO: 31448 - protein, 16 aa, Homo sapiens
CARDYYYDNSAYYDYW

SEQ ID NO: 31449 - protein, 24 aa, Homo sapiens
CAKDKGWTYYYDSSVVPPDAFDIW

SEQ ID NO: 31450 - protein, 14 aa, Homo sapiens
CAKLPEGYNWVDYW

SEQ ID NO: 31451 - protein, 11 aa, Homo sapiens
CQQFNNYALPF

SEQ ID NO: 31452 - protein, 15 aa, Homo sapiens
CARDGGGNQDYFDYW

SEQ ID NO: 31453 - protein, 17 aa, Homo sapiens
CARDRIGGRWLQPFDYW

SEQ ID NO: 31454 - protein, 20 aa, Homo sapiens
CAKDLWVVDSSSSGDGMDVW

SEQ ID NO: 31455 - protein, 23 aa, Homo sapiens
CAREIVLRYFDWLLYPPAYPDVW

SEQ ID NO: 31456 - protein, 17 aa, Homo sapiens
CARAYYLDTTRYYFDYW

SEQ ID NO: 31457 - protein, 13 aa, Homo sapiens
CAKVSEPDYFDCW

SEQ ID NO: 31458 - protein, 17 aa, Homo sapiens
CAKEREGQLVLGAFDIW

SEQ ID NO: 31459 - protein, 19 aa, Homo sapiens
CAKDQSRFEQWGLDYFDYW

SEQ ID NO: 31460 - protein, 16 aa, Homo sapiens
CVKGEVDGVAHYLDYW

SEQ ID NO: 31461 - protein, 14 aa, Homo sapiens
CQVWDISSDPYVLF

SEQ ID NO: 31462 - protein, 15 aa, Homo sapiens
CARHLRYGLEYFDYW

SEQ ID NO: 31463 - protein, 17 aa, Homo sapiens
CAKDPRPMATTPGLDYW

SEQ ID NO: 31464 - protein, 21 aa, Homo sapiens
CARAQAMITFGGVIVRYFDYW

SEQ ID NO: 31465 - protein, 13 aa, Homo sapiens
CQSTDSSGSYAIF

SEQ ID NO: 31466 - protein, 17 aa, Homo sapiens
CACLYSSSPYYYGMDVW

SEQ ID NO: 31467 - protein, 19 aa, Homo sapiens
CAKGPYLDVLTGTTFFDYW

SEQ ID NO: 31468 - protein, 27 aa, Homo sapiens
CSLKASDSAIYYCAILPQGQHVTLDYW

SEQ ID NO: 31469 - protein, 15 aa, Homo sapiens
CANTLPGARYYFDFW

SEQ ID NO: 31470 - protein, 21 aa, Homo sapiens
CASGEYVAGYDSYYYYGMDVW

SEQ ID NO: 31471 - protein, 14 aa, Homo sapiens
CAAWDDTLTGSMAF

SEQ ID NO: 31472 - protein, 22 aa, Homo sapiens
CVKVISDCPIAACLAKGYFDYW

SEQ ID NO: 31473 - protein, 20 aa, Homo sapiens
CATQHQVYYYDRTGYYPEYW

SEQ ID NO: 31474 - protein, 24 aa, Homo sapiens
CARETGVIDLVVSPSGTFDWFDPW

SEQ ID NO: 31475 - protein, 18 aa, Homo sapiens
CATGPVIAAAVINWFDPW

SEQ ID NO: 31476 - protein, 17 aa, Homo sapiens
CARGDSFRTSFYAMDVW

SEQ ID NO: 31477 - protein, 19 aa, Homo sapiens
CARDKEEEAYGSGNYFDSW

SEQ ID NO: 31478 - protein, 17 aa, Homo sapiens
CAKLSSGREPKSYFDYW

SEQ ID NO: 31479 - protein, 16 aa, Homo sapiens
CAKLQGDDYGDTKDYW

SEQ ID NO: 31480 - protein, 24 aa, Homo sapiens
CARDTRYYCSSTSCSYYYYGMDVW

SEQ ID NO: 31481 - protein, 16 aa, Homo sapiens
CARDYYASGEAAMDVW

SEQ ID NO: 31482 - protein, 21 aa, Homo sapiens
CAKEPRVAAADPYYYYGMDVW

SEQ ID NO: 31483 - protein, 21 aa, Homo sapiens
CARVQTLRLFTMIVVGTFDYW

SEQ ID NO: 31484 - protein, 15 aa, Homo sapiens
CARHCGSGTDGLDYW

SEQ ID NO: 31485 - protein, 15 aa, Homo sapiens
CAHSPLRVFTRFDPW

SEQ ID NO: 31486 - protein, 15 aa, Homo sapiens
CAKEGGPGDYFFDYW

SEQ ID NO: 31487 - protein, 17 aa, Homo sapiens
CVRGLGSRSFSDWLDPW

SEQ ID NO: 31488 - protein, 19 aa, Homo sapiens
CARGRRQWLVQGGNWFDPW

SEQ ID NO: 31489 - protein, 23 aa, Homo sapiens
CARVFDGGFCSSGTCFQNWFDPW

SEQ ID NO: 31490 - protein, 17 aa, Homo sapiens
CARDPGRYDSSGYSDYW

SEQ ID NO: 31491 - protein, 16 aa, Homo sapiens
CTRGGDHFGLFYFDVW

SEQ ID NO: 31492 - protein, 24 aa, Homo sapiens
CARDRGYCDYSAYCSYYFYGMDVW

SEQ ID NO: 31493 - protein, 20 aa, Homo sapiens
CAKGGNCSGGNCYVTQLDYW

SEQ ID NO: 31494 - protein, 19 aa, Homo sapiens
CVRQHDGRRSYQYNYFGPW

SEQ ID NO: 31495 - protein, 18 aa, Homo sapiens
CAKEMTAAHYYFYGMDVW

SEQ ID NO: 31496 - protein, 23 aa, Homo sapiens
CARDSFVTFGGVIDPIPYYFDYW

SEQ ID NO: 31497 - protein, 16 aa, Homo sapiens
CARPSYGSGSKWFDPW

SEQ ID NO: 31498 - protein, 23 aa, Homo sapiens
CAKDQRYMTTGPIGYYYYGMDVW

SEQ ID NO: 31499 - protein, 19 aa, Homo sapiens
CAKDIHPIVGATLGWFDPW

SEQ ID NO: 31500 - protein, 17 aa, Homo sapiens
CAKDEGVWFGELFPDYW

SEQ ID NO: 31501 - protein, 18 aa, Homo sapiens
CARAGIHCGGDCYHFDYW

SEQ ID NO: 31502 - protein, 28 aa, Homo sapiens
CARDEKPDYYYDSSGYSRSYYYYGMDVW

SEQ ID NO: 31503 - protein, 14 aa, Homo sapiens
CARDTTMGYYFDYW

SEQ ID NO: 31504 - protein, 22 aa, Homo sapiens
CARDGGYFDWFDYYYYYGMDVW

SEQ ID NO: 31505 - protein, 20 aa, Homo sapiens
CAKDRFVYGSGTSTYYFDYW

SEQ ID NO: 31506 - protein, 18 aa, Homo sapiens
CARDWDKTWSSGWALDVW

SEQ ID NO: 31507 - protein, 15 aa, Homo sapiens
CARDRLWGEEHDDYW

SEQ ID NO: 31508 - protein, 21 aa, Homo sapiens
CAREFVEMATIVNYYYGMDVW

SEQ ID NO: 31509 - protein, 17 aa, Homo sapiens
CAREADPLSGVNWFDPW

SEQ ID NO: 31510 - protein, 23 aa, Homo sapiens
CARGFWSGPPGHDYYYYYGMDVW

SEQ ID NO: 31511 - protein, 20 aa, Homo sapiens
CAKQLGLYYYGSGTGYFDYW

SEQ ID NO: 31512 - protein, 18 aa, Homo sapiens
CTTSAHILTGRGWYFDYW

SEQ ID NO: 31513 - protein, 18 aa, Homo sapiens
CTREYYYDSSGYYYGDYW

SEQ ID NO: 31514 - protein, 15 aa, Homo sapiens
CARDSPLVRGVHDYW

SEQ ID NO: 31515 - protein, 16 aa, Homo sapiens
CARDPDNGDPTDFDYW

SEQ ID NO: 31516 - protein, 11 aa, Homo sapiens
CSRSSCYFDFW

SEQ ID NO: 31517 - protein, 21 aa, Homo sapiens
CARVGVTTVTLFYYYYGMDVW

SEQ ID NO: 31518 - protein, 20 aa, Homo sapiens
CARGDGFTMIVVVTPTFDYW

SEQ ID NO: 31519 - protein, 14 aa, Homo sapiens
CARGRPDFDAFDIW

SEQ ID NO: 31520 - protein, 15 aa, Homo sapiens
CAKFGSLDSSPVDYW

SEQ ID NO: 31521 - protein, 29 aa, Homo sapiens
CAKDTDRSSPDILTGYYNPYYYYYGMDVW

SEQ ID NO: 31522 - protein, 19 aa, Homo sapiens
CARDGYYFGSGSLGALDVW

SEQ ID NO: 31523 - protein, 16 aa, Homo sapiens
CAKMRSEWLLLPFDYW

SEQ ID NO: 31524 - protein, 24 aa, Homo sapiens
CARERSITIFGVVIEDYYYGMDVW

SEQ ID NO: 31525 - protein, 21 aa, Homo sapiens
CAKIPNPRYCSSPSCYAADYW

SEQ ID NO: 31526 - protein, 20 aa, Homo sapiens
CASNIMVPLGGYYYYGMDVW

SEQ ID NO: 31527 - protein, 19 aa, Homo sapiens
CARAHCSGGSCADWYFDLW

SEQ ID NO: 31528 - protein, 10 aa, Homo sapiens
CQHYNRYSAF

SEQ ID NO: 31529 - protein, 19 aa, Homo sapiens
CAKDRIMILTGYPYYFDYW

SEQ ID NO: 31530 - protein, 12 aa, Homo sapiens
CSFGGPSSFDYW

SEQ ID NO: 31531 - protein, 14 aa, Homo sapiens
CARRQLWPSLFDYW

SEQ ID NO: 31532 - protein, 19 aa, Homo sapiens
CARDLRNNWNPYYYGMDVW

SEQ ID NO: 31533 - protein, 17 aa, Homo sapiens
CARGDSSGYYTHYFDKW

SEQ ID NO: 31534 - protein, 21 aa, Homo sapiens
CAHRLTGLLSFGETNDAFDIW

SEQ ID NO: 31535 - protein, 16 aa, Homo sapiens
CAKFPDMFGGAAFDIW

SEQ ID NO: 31536 - protein, 12 aa, Homo sapiens
CMQSRQVPLFSF

SEQ ID NO: 31537 - protein, 17 aa, Homo sapiens
CATSPGNWLDTDYFDHW

SEQ ID NO: 31538 - protein, 21 aa, Homo sapiens
CARASYPDWLSYLWTYYFDYW

SEQ ID NO: 31539 - protein, 18 aa, Homo sapiens
CARHSDTSGFHDDAFDFW

SEQ ID NO: 31540 - protein, 15 aa, Homo sapiens
CASWLGQQLGWFDPW

SEQ ID NO: 31541 - protein, 21 aa, Homo sapiens
CARDRRSLPPRSSSWYLYDYW

SEQ ID NO: 31542 - protein, 26 aa, Homo sapiens
CARGGTYYYDSSITNVGYYYYGMDVW

SEQ ID NO: 31543 - protein, 20 aa, Homo sapiens
CARVSNWNYPGDYYYGMDVW

SEQ ID NO: 31544 - protein, 25 aa, Homo sapiens
CARVNASRGYGWSGTYYTYYGMDVW

SEQ ID NO: 31545 - protein, 20 aa, Homo sapiens
CTNSRYYYDSSGRGGYFDYW

SEQ ID NO: 31546 - protein, 21 aa, Homo sapiens
CAKDLGFCSGGTCYSAYFDSW

SEQ ID NO: 31547 - protein, 19 aa, Homo sapiens
CARDYGGELWFGEFPFDYW

SEQ ID NO: 31548 - protein, 16 aa, Homo sapiens
CATVFAVRGVHPPDYW

SEQ ID NO: 31549 - protein, 17 aa, Homo sapiens
CARVIRRERQLNWFDHW

SEQ ID NO: 31550 - protein, 16 aa, Homo sapiens
CACLGSAVIIDWFDPW

SEQ ID NO: 31551 - protein, 18 aa, Homo sapiens
CAKDLCSGGSCPPGLDYW

SEQ ID NO: 31552 - protein, 18 aa, Homo sapiens
CARDLWFGELSGWAFDYW

SEQ ID NO: 31553 - protein, 25 aa, Homo sapiens
CARVAGPPSAILTGYTYYYYGMDVW

SEQ ID NO: 31554 - protein, 19 aa, Homo sapiens
CAKGEECGGDCYLSAFDIW

SEQ ID NO: 31555 - protein, 25 aa, Homo sapiens
CAKDVPPYSELLWFGEGRYSLFDYW

SEQ ID NO: 31556 - protein, 18 aa, Homo sapiens
CARGSTYQLLGERGLDYW

SEQ ID NO: 31557 - protein, 14 aa, Homo sapiens
CASARYFDWLGDYW

SEQ ID NO: 31558 - protein, 14 aa, Homo sapiens
CATGGWELRGIDYW

SEQ ID NO: 31559 - protein, 18 aa, Homo sapiens
CAKVRSGGSSWYVDFDYW

SEQ ID NO: 31560 - protein, 14 aa, Homo sapiens
CARAKPETNCFDYW

SEQ ID NO: 31561 - protein, 17 aa, Homo sapiens
CAKDMSYDSSGYYLDYW

SEQ ID NO: 31562 - protein, 22 aa, Homo sapiens
CAKSFLSYSGTSAYYSGSFDSW

SEQ ID NO: 31563 - protein, 16 aa, Homo sapiens
CARGQEQWLDRPFDYW

SEQ ID NO: 31564 - protein, 25 aa, Homo sapiens
CARGTAGFQWAMIVVADYYYGMDVW

SEQ ID NO: 31565 - protein, 20 aa, Homo sapiens
CAKDIGAATIFDYYYGMDVW

SEQ ID NO: 31566 - protein, 21 aa, Homo sapiens
CATTKSECIGGRCYRIAFDIW

SEQ ID NO: 31567 - protein, 20 aa, Homo sapiens
CARAGHAVIAAAGTGWFDPW

SEQ ID NO: 31568 - protein, 18 aa, Homo sapiens
CARDPFDNVYEPPYFDQW

SEQ ID NO: 31569 - protein, 12 aa, Homo sapiens
CVRGGWAHFDFW

SEQ ID NO: 31570 - protein, 17 aa, Homo sapiens
CTTWLPNPYYYYGVDVW

SEQ ID NO: 31571 - protein, 11 aa, Homo sapiens
CQQRINWSLSF

SEQ ID NO: 31572 - protein, 16 aa, Homo sapiens
CARTSMVVTAIPFDYW

SEQ ID NO: 31573 - protein, 19 aa, Homo sapiens
CAKGESGTGLYYAIFFDHW

SEQ ID NO: 31574 - protein, 18 aa, Homo sapiens
CANLAGGSGWSNWYFDLW

SEQ ID NO: 31575 - protein, 23 aa, Homo sapiens
CAKDSGVRGVIITPYYYYGMDVW

SEQ ID NO: 31576 - protein, 20 aa, Homo sapiens
CARERQWLQYYYHYYGMDVW

SEQ ID NO: 31577 - protein, 29 aa, Homo sapiens
CARDLEYYYILTGYYNPPGSYYYYGMDVW

SEQ ID NO: 31578 - protein, 18 aa, Homo sapiens
CAKDFYHADSDGGAFDIW

SEQ ID NO: 31579 - protein, 14 aa, Homo sapiens
CATPELEWLVFDYW

SEQ ID NO: 31580 - protein, 18 aa, Homo sapiens
CTTPGPDIVVVVAGFDPW

SEQ ID NO: 31581 - protein, 17 aa, Homo sapiens
CARTFGVYTSSPYFDSW

SEQ ID NO: 31582 - protein, 18 aa, Homo sapiens
CAKVLWDTAMVTDAFDIW

SEQ ID NO: 31583 - protein, 14 aa, Homo sapiens
CAKVPASTDLGDYW

SEQ ID NO: 31584 - protein, 22 aa, Homo sapiens
CARSPANAWWQLVRWRSYFDYW

SEQ ID NO: 31585 - protein, 17 aa, Homo sapiens
CVRDRDLYGDPYYFDYW

SEQ ID NO: 31586 - protein, 23 aa, Homo sapiens
CARDNYRRDGYSTMGRHNWFDPW

SEQ ID NO: 31587 - protein, 15 aa, Homo sapiens
CAVESGFGELPTDYW

SEQ ID NO: 31588 - protein, 13 aa, Homo sapiens
CQQYDNLPPGAAF

SEQ ID NO: 31589 - protein, 22 aa, Homo sapiens
CAREDYYDSSGSGYYYYGMDVW

SEQ ID NO: 31590 - protein, 19 aa, Homo sapiens
CAKDLSPYLGELSLYGDYW

SEQ ID NO: 31591 - protein, 20 aa, Homo sapiens
CAARSPPAGVVITGWYFDLW

SEQ ID NO: 31592 - protein, 14 aa, Homo sapiens
CARYATPTDALDIW

SEQ ID NO: 31593 - protein, 17 aa, Homo sapiens
CTKQVAESSPYWYFGLW

SEQ ID NO: 31594 - protein, 16 aa, Homo sapiens
CATHRGRFPRGYFEDW

SEQ ID NO: 31595 - protein, 21 aa, Homo sapiens
CATDVEYQDSTGFYKYYFDNW

SEQ ID NO: 31596 - protein, 20 aa, Homo sapiens
CATDRPSCVGSKCELGFDYW

SEQ ID NO: 31597 - protein, 15 aa, Homo sapiens
CASHIKFYAFVFDYW

SEQ ID NO: 31598 - protein, 14 aa, Homo sapiens
CTTLLTTWYFFDHW

SEQ ID NO: 31599 - protein, 27 aa, Homo sapiens
CAKKEALPHYDLLTGYYDYFYYGMDVW

SEQ ID NO: 31600 - protein, 17 aa, Homo sapiens
CARNVAGDFGDHWFDPW

SEQ ID NO: 31601 - protein, 30 aa, Homo sapiens
CAKDLAGRANQRPFIAAALGGYYYYGMDVW

SEQ ID NO: 31602 - protein, 15 aa, Homo sapiens
CTRNIFWSDGYFDYW

SEQ ID NO: 31603 - protein, 18 aa, Homo sapiens
CARESSSAAADLSWFDPW

SEQ ID NO: 31604 - protein, 22 aa, Homo sapiens
CATDRIHGDYVGYYYYYGMDVW

SEQ ID NO: 31605 - protein, 20 aa, Homo sapiens
CATKLTYYDILTGYHPFDYW

SEQ ID NO: 31606 - protein, 18 aa, Homo sapiens
CASSRHHYGIGSSSMDYW

SEQ ID NO: 31607 - protein, 21 aa, Homo sapiens
CAKDNPLGDDFWSGYFWFDPW

SEQ ID NO: 31608 - protein, 17 aa, Homo sapiens
CAATPRSVAGPRWFDSW

SEQ ID NO: 31609 - protein, 25 aa, Homo sapiens
CATGPAYPYYYDSSGNTGGNWFDPW

SEQ ID NO: 31610 - protein, 15 aa, Homo sapiens
CAREGGDYGDWFDPW

SEQ ID NO: 31611 - protein, 18 aa, Homo sapiens
CGRHDDSGSYLSDVFDMW

SEQ ID NO: 31612 - protein, 21 aa, Homo sapiens
CAKFDGDGYNSPVRGNAFDIW

SEQ ID NO: 31613 - protein, 18 aa, Homo sapiens
CARARSGNIGAPPLFDYW

SEQ ID NO: 31614 - protein, 18 aa, Homo sapiens
CATGGYYYDRVGYYFDYW

SEQ ID NO: 31615 - protein, 12 aa, Homo sapiens
CKREGIDYVDHW

SEQ ID NO: 31616 - protein, 24 aa, Homo sapiens
CARHLGKEGYARVALFGVVMFDSW

SEQ ID NO: 31617 - protein, 17 aa, Homo sapiens
CAKDIYSSSWSAYFDFW

SEQ ID NO: 31618 - protein, 14 aa, Homo sapiens
CARTYYGGNSFDYW

SEQ ID NO: 31619 - protein, 21 aa, Homo sapiens
CAALGGITMIPNYYYYGMDVW

SEQ ID NO: 31620 - protein, 16 aa, Homo sapiens
CARGICTGGTCPNDYW

SEQ ID NO: 31621 - protein, 13 aa, Homo sapiens
CARMVVPAAIDYW

SEQ ID NO: 31622 - protein, 15 aa, Homo sapiens
CAKDRRGNWYYIDSW

SEQ ID NO: 31623 - protein, 16 aa, Homo sapiens
CAKDRFYDSSGYLGYW

SEQ ID NO: 31624 - protein, 22 aa, Homo sapiens
CATLFYPYSSSTYYYYYGMDVW

SEQ ID NO: 31625 - protein, 23 aa, Homo sapiens
CAREGYCSSTSCPEDYYYGMDVW

SEQ ID NO: 31626 - protein, 16 aa, Homo sapiens
CARIEYYDSRGWFDPW

SEQ ID NO: 31627 - protein, 12 aa, Homo sapiens
CVRVFTTVTDYW

SEQ ID NO: 31628 - protein, 13 aa, Homo sapiens
CATELERWAFDIW

SEQ ID NO: 31629 - protein, 24 aa, Homo sapiens
CARDPRGNDILTGWTYYYYGMDVW

SEQ ID NO: 31630 - protein, 21 aa, Homo sapiens
CARDRGRDGYSSFHPGFFDLW

SEQ ID NO: 31631 - protein, 19 aa, Homo sapiens
CVRAEEMYYYDSSAYFKHW

SEQ ID NO: 31632 - protein, 15 aa, Homo sapiens
CARETKVAATHFDYW

SEQ ID NO: 31633 - protein, 15 aa, Homo sapiens
CAREGGAEDGNLDYW

SEQ ID NO: 31634 - protein, 30 aa, Homo sapiens
CARTPRRAFYLPPPSYTSGSPAGYNWVDSW

SEQ ID NO: 31635 - protein, 26 aa, Homo sapiens
CARVVHGLGHVLLWFGELPPDAFDIW

SEQ ID NO: 31636 - protein, 23 aa, Homo sapiens
CARDGSGSYAHSYYDYYYGMDVW

SEQ ID NO: 31637 - protein, 17 aa, Homo sapiens
CARAEAISRIVTFFDSW

SEQ ID NO: 31638 - protein, 18 aa, Homo sapiens
CANGDRDIVATSRNIDYW

SEQ ID NO: 31639 - protein, 32 aa, Homo sapiens
CAREALPPYYDFWSGYSGELLGGYYYYGMDVW

SEQ ID NO: 31640 - protein, 16 aa, Homo sapiens
CAKLPSYYGDYWFDYW

SEQ ID NO: 31641 - protein, 21 aa, Homo sapiens
CTTGGTYYYDSSGYYSDFDYW

SEQ ID NO: 31642 - protein, 23 aa, Homo sapiens
CARSVAHTIFGVVKAYYYGMDVW

SEQ ID NO: 31643 - protein, 22 aa, Homo sapiens
CARHPYYYDSSGYYTTGESDYW

SEQ ID NO: 31644 - protein, 20 aa, Homo sapiens
CARDYTSIYYYDSSGHFDYW

SEQ ID NO: 31645 - protein, 21 aa, Homo sapiens
CARVWASGIGSEKYYRKIDYW

SEQ ID NO: 31646 - protein, 14 aa, Homo sapiens
CARQEHNGHVFDIW

SEQ ID NO: 31647 - protein, 24 aa, Homo sapiens
CAKDSFSSSLLWFGELYSYGPDYW

SEQ ID NO: 31648 - protein, 16 aa, Homo sapiens
CAKTYSRDYFAHFDSW

SEQ ID NO: 31649 - protein, 22 aa, Homo sapiens
CAKVLHYYDSSGYPGVAAFDIW

SEQ ID NO: 31650 - protein, 17 aa, Homo sapiens
CARDWRLGGRGNYFDYW

SEQ ID NO: 31651 - protein, 24 aa, Homo sapiens
CAKDLSLFRIVVVPAGYYYGMDVW

SEQ ID NO: 31652 - protein, 19 aa, Homo sapiens
CTTLMWCSGDCYRSYFDFW

SEQ ID NO: 31653 - protein, 22 aa, Homo sapiens
CAKDPVAATHADYYYYYGMDVW

SEQ ID NO: 31654 - protein, 23 aa, Homo sapiens
CAIDPMVRGVIKYYYYYYGMDVW

SEQ ID NO: 31655 - protein, 19 aa, Homo sapiens
CAKGGSHYYDRTGRKYDYW

SEQ ID NO: 31656 - protein, 19 aa, Homo sapiens
CAQVAYDILTGHSVWFDPW

SEQ ID NO: 31657 - protein, 16 aa, Homo sapiens
CAKLPMVVAEDAFDIW

SEQ ID NO: 31658 - protein, 23 aa, Homo sapiens
CATSFIVATRPFPYYYYYGMDVW

SEQ ID NO: 31659 - protein, 14 aa, Homo sapiens
CARTLSIAVALDYW

SEQ ID NO: 31660 - protein, 20 aa, Homo sapiens
CARATRGGIIVAHYGHFDYW

SEQ ID NO: 31661 - protein, 22 aa, Homo sapiens
CATLGGYYYDSSGYYLDYFDYW

SEQ ID NO: 31662 - protein, 25 aa, Homo sapiens
CARARDYYDSSGHIGHYYYYGMDVW

SEQ ID NO: 31663 - protein, 21 aa, Homo sapiens
CASLFRSSSWSEYYYYGMDVW

SEQ ID NO: 31664 - protein, 18 aa, Homo sapiens
CTRLEGTVRDYYYGMDVW

SEQ ID NO: 31665 - protein, 26 aa, Homo sapiens
CAHRGDYDILTGYYPGPPTNNWFDPW

SEQ ID NO: 31666 - protein, 20 aa, Homo sapiens
CAKSGYCGGGTCYSDYSDYW

SEQ ID NO: 31667 - protein, 22 aa, Homo sapiens
CARGRLDYDILTGYYQIWFDPW

SEQ ID NO: 31668 - protein, 20 aa, Homo sapiens
CARDLTSTSHIYYYYGMDVW

SEQ ID NO: 31669 - protein, 20 aa, Homo sapiens
CARDFHCSSTSCYANYFDYW

SEQ ID NO: 31670 - protein, 22 aa, Homo sapiens
CARDYGYYYDSSGYYDYGMDVW

SEQ ID NO: 31671 - protein, 21 aa, Homo sapiens
CARDRLDSSRMPPTHYAMDVW

SEQ ID NO: 31672 - protein, 17 aa, Homo sapiens
CARINRLDGYNSRFDPW

SEQ ID NO: 31673 - protein, 18 aa, Homo sapiens
CAKDLWGIAVAGTSFDYW

SEQ ID NO: 31674 - protein, 16 aa, Homo sapiens
CARVVHYGSGSYYDYW

SEQ ID NO: 31675 - protein, 14 aa, Homo sapiens
CAHKIVTGAIFDIW

SEQ ID NO: 31676 - protein, 14 aa, Homo sapiens
CQSADSSVTYRRLF

SEQ ID NO: 31677 - protein, 15 aa, Homo sapiens
CARRIESRDYSFDNW

SEQ ID NO: 31678 - protein, 16 aa, Homo sapiens
CATSPVLDIKDWFDPW

SEQ ID NO: 31679 - protein, 16 aa, Homo sapiens
CAKETPDDYGAAFDYW

SEQ ID NO: 31680 - protein, 27 aa, Homo sapiens
CARVLFPYYDILTGWARDYYYYGMDVW

SEQ ID NO: 31681 - protein, 14 aa, Homo sapiens
CAREIGSSWYIDYW

SEQ ID NO: 31682 - protein, 15 aa, Homo sapiens
CAHQAYTSGWFSDYW

SEQ ID NO: 31683 - protein, 16 aa, Homo sapiens
CAKAGFIGFGASYFDW

SEQ ID NO: 31684 - protein, 16 aa, Homo sapiens
CANAYSFDPGSYYDYW

SEQ ID NO: 31685 - protein, 20 aa, Homo sapiens
CARYYYGPENYHNGAIFDSW

SEQ ID NO: 31686 - protein, 23 aa, Homo sapiens
CANTRRYSGYDLKGYYYNGMDVW

SEQ ID NO: 31687 - protein, 16 aa, Homo sapiens
CAKENLDYGGYYFDNW

SEQ ID NO: 31688 - protein, 19 aa, Homo sapiens
CAKLPTAPSDYYYYGMDVW

SEQ ID NO: 31689 - protein, 15 aa, Homo sapiens
CARTELAAAVAFDIW

SEQ ID NO: 31690 - protein, 22 aa, Homo sapiens
CATGLAVAGTVHHYYYYGMDVW

SEQ ID NO: 31691 - protein, 17 aa, Homo sapiens
CAKGFFVSVAASTLDYW

SEQ ID NO: 31692 - protein, 16 aa, Homo sapiens
CARGPDGYSSGWLDYW

SEQ ID NO: 31693 - protein, 20 aa, Homo sapiens
CARGNDIVVQPTDTDPFNVW

SEQ ID NO: 31694 - protein, 22 aa, Homo sapiens
CAKDPNDSSSMAADYYYAMDVW

SEQ ID NO: 31695 - protein, 16 aa, Homo sapiens
CAKDIADTAMVNLDYW

SEQ ID NO: 31696 - protein, 24 aa, Homo sapiens
CVHRVRDRPAGQTSGWFGGYFDFW

SEQ ID NO: 31697 - protein, 23 aa, Homo sapiens
CARDLSHYDILTGYYWMYGMDVW

SEQ ID NO: 31698 - protein, 19 aa, Homo sapiens
CARHNWSGGPDYYYGMDVW

SEQ ID NO: 31699 - protein, 15 aa, Homo sapiens
CVFSGSYSWSYFDYW

SEQ ID NO: 31700 - protein, 19 aa, Homo sapiens
CARGVPGYYDSSGSPFDYW

SEQ ID NO: 31701 - protein, 20 aa, Homo sapiens
CAKLAGGSGWYSGSGYFDLW

SEQ ID NO: 31702 - protein, 21 aa, Homo sapiens
CAKDVRYYYDSSGYAEYFQHW

SEQ ID NO: 31703 - protein, 19 aa, Homo sapiens
CASTGGEVGVAGTSPFDYW

SEQ ID NO: 31704 - protein, 20 aa, Homo sapiens
CARGFSFDHGDYYYYAMDVW

SEQ ID NO: 31705 - protein, 16 aa, Homo sapiens
CARDLDYYDSSGFDYW

SEQ ID NO: 31706 - protein, 29 aa, Homo sapiens
CARDPRYYDILTGYYIPSNYYYYYGMDVW

SEQ ID NO: 31707 - protein, 18 aa, Homo sapiens
CAKDRVGLGITGTTYDYW

SEQ ID NO: 31708 - protein, 21 aa, Homo sapiens
CVRGVVVPASTDYHYYGMDVW

SEQ ID NO: 31709 - protein, 17 aa, Homo sapiens
CARTSSFFGAVATFDYW

SEQ ID NO: 31710 - protein, 18 aa, Homo sapiens
CAKDRGDGYSDTGAFDYW

SEQ ID NO: 31711 - protein, 23 aa, Homo sapiens
CARDHYHYETSGYHVIYSYVDHW

SEQ ID NO: 31712 - protein, 19 aa, Homo sapiens
CAIDGNGSGSYYSPIFDDW

SEQ ID NO: 31713 - protein, 20 aa, Homo sapiens
CARMQAILTGYYRDTWLDPW

SEQ ID NO: 31714 - protein, 26 aa, Homo sapiens
CARATPYYDILTGWNAPVSGGWFDPW

SEQ ID NO: 31715 - protein, 27 aa, Homo sapiens
CARSQYYYDSSGYYYAFYYYYYGMDVW

SEQ ID NO: 31716 - protein, 23 aa, Homo sapiens
CAKEVGYDILTARRRYYYGMDVW

SEQ ID NO: 31717 - protein, 16 aa, Homo sapiens
CARGIFRSGELRFDPW

SEQ ID NO: 31718 - protein, 18 aa, Homo sapiens
CAKGAEISSTLGYSFDYW

SEQ ID NO: 31719 - protein, 27 aa, Homo sapiens
CARDLQIVYSSGWYVPNYYYYYGMDVW

SEQ ID NO: 31720 - protein, 17 aa, Homo sapiens
CARSRGFWSGQGWFDPW

SEQ ID NO: 31721 - protein, 20 aa, Homo sapiens
CARDLSSGFTYGHHWFFDLW

SEQ ID NO: 31722 - protein, 19 aa, Homo sapiens
CARDPTYRAILTANTFDIW

SEQ ID NO: 31723 - protein, 14 aa, Homo sapiens
CARDFDWPTYFDYW

SEQ ID NO: 31724 - protein, 20 aa, Homo sapiens
CTTDRYYDYVWGSYRYVDYW

SEQ ID NO: 31725 - protein, 14 aa, Homo sapiens
CARVIGDEYTFDYW

SEQ ID NO: 31726 - protein, 18 aa, Homo sapiens
CARGANDYGDYGDWFDPW

SEQ ID NO: 31727 - protein, 19 aa, Homo sapiens
CAKDRWVDDSSRWFYFDYW

SEQ ID NO: 31728 - protein, 20 aa, Homo sapiens
CAGGERVATIVYYYYGMDVW

SEQ ID NO: 31729 - protein, 12 aa, Homo sapiens
CVKTPGGPFDYW

SEQ ID NO: 31730 - protein, 23 aa, Homo sapiens
CAKGERTYYDILTGYYYYGMDVW

SEQ ID NO: 31731 - protein, 20 aa, Homo sapiens
CAKDSQPNYDILTGYPFDYW

SEQ ID NO: 31732 - protein, 27 aa, Homo sapiens
CARQRFSGYDHLINLRVKYYYYGMDVW

SEQ ID NO: 31733 - protein, 18 aa, Homo sapiens
CARDGGDLWFGESHLDYW

SEQ ID NO: 31734 - protein, 17 aa, Homo sapiens
CARVRRSGWIVEYFDYW

SEQ ID NO: 31735 - protein, 28 aa, Homo sapiens
CARGSHYYDSSGYYYVPPNYYYYGMDVW

SEQ ID NO: 31736 - protein, 12 aa, Homo sapiens
CQTAGSSGTWVF

SEQ ID NO: 31737 - protein, 17 aa, Homo sapiens
CTRVAETTVTRGWFDPW

SEQ ID NO: 31738 - protein, 15 aa, Homo sapiens
CAKEKWNSRNAMDVW

SEQ ID NO: 31739 - protein, 17 aa, Homo sapiens
CTRASRVVVATRAFDIW

SEQ ID NO: 31740 - protein, 24 aa, Homo sapiens
CAKDLGVSEDYDILTGYYTRSDYW

SEQ ID NO: 31741 - protein, 18 aa, Homo sapiens
CARSVDTAMVGDNWFDPW

SEQ ID NO: 31742 - protein, 21 aa, Homo sapiens
CAKDVHDFGEYNIKGDALDIW

SEQ ID NO: 31743 - protein, 23 aa, Homo sapiens
CARDLGSITMIVVVHYYYGMDVW

SEQ ID NO: 31744 - protein, 20 aa, Homo sapiens
CARDRAYLFGVVISDVFDFW

SEQ ID NO: 31745 - protein, 23 aa, Homo sapiens
CARSHNDFLTGYNLRGLCAFDIW

SEQ ID NO: 31746 - protein, 16 aa, Homo sapiens
CTTLGHCIAGRCNDYW

SEQ ID NO: 31747 - protein, 15 aa, Homo sapiens
CARQRFPHYNWLAPW

SEQ ID NO: 31748 - protein, 26 aa, Homo sapiens
CARHLPRADGHGLVRMFYYYYALDVW

SEQ ID NO: 31749 - protein, 17 aa, Homo sapiens
CAKDRVPYSSWFIFDLW

SEQ ID NO: 31750 - protein, 14 aa, Homo sapiens
CVRGLTRFGEFDPW

SEQ ID NO: 31751 - protein, 19 aa, Homo sapiens
CARGAKWEGQLELDAFDIW

SEQ ID NO: 31752 - protein, 12 aa, Homo sapiens
CARSMPDYFDNW

SEQ ID NO: 31753 - protein, 25 aa, Homo sapiens
CALPICAKRGEIFWLGVGRYAMDVW

SEQ ID NO: 31754 - protein, 12 aa, Homo sapiens
CARELGAWVDPW

SEQ ID NO: 31755 - protein, 15 aa, Homo sapiens
CARAGSWWVGWFDPW

SEQ ID NO: 31756 - protein, 17 aa, Homo sapiens
CARPQYGGKTYWYFDVW

SEQ ID NO: 31757 - protein, 24 aa, Homo sapiens
CASGICSSTSCYPVLYYYYGMDVW

SEQ ID NO: 31758 - protein, 16 aa, Homo sapiens
CARSSGPMALYWFDPW

SEQ ID NO: 31759 - protein, 15 aa, Homo sapiens
CASWGDDYGDYLDYW

SEQ ID NO: 31760 - protein, 14 aa, Homo sapiens
CMQSIQLPPPMYTF

SEQ ID NO: 31761 - protein, 12 aa, Homo sapiens
CARSFDRVFDPW

SEQ ID NO: 31762 - protein, 20 aa, Homo sapiens
CTTFGKAAAGRGYWYYFDYW

SEQ ID NO: 31763 - protein, 19 aa, Homo sapiens
CAKGPSPLYSSGLGWFDPW

SEQ ID NO: 31764 - protein, 19 aa, Homo sapiens
CAHSAGGGGTTRYNWFDPW

SEQ ID NO: 31765 - protein, 21 aa, Homo sapiens
CAKETYGYDSSALFNDGFDMW

SEQ ID NO: 31766 - protein, 17 aa, Homo sapiens
CARMVCDDYRCPPFDSW

SEQ ID NO: 31767 - protein, 13 aa, Homo sapiens
CARKDWHWYFDVW

SEQ ID NO: 31768 - protein, 14 aa, Homo sapiens
CAKIPTNGDYPIYW

SEQ ID NO: 31769 - protein, 24 aa, Homo sapiens
CAKDGIEILLWFGESNGEDYFDYW

SEQ ID NO: 31770 - protein, 21 aa, Homo sapiens
CAREGLGYCSSTSCQRAFDYW

SEQ ID NO: 31771 - protein, 20 aa, Homo sapiens
CARGVDSSGYYRLDDWFDPW

SEQ ID NO: 31772 - protein, 17 aa, Homo sapiens
CARGGEYHLLVRHFDFW

SEQ ID NO: 31773 - protein, 18 aa, Homo sapiens
CAKVGWGYYDTNDAFDIW

SEQ ID NO: 31774 - protein, 12 aa, Homo sapiens
CQQTFSTPPHTF

SEQ ID NO: 31775 - protein, 22 aa, Homo sapiens
CAKVGVGYCSSTSCPYNWFDPW

SEQ ID NO: 31776 - protein, 15 aa, Homo sapiens
CASHSSSWSGPFDYW

SEQ ID NO: 31777 - protein, 34 aa, Homo sapiens
CTAYLQISSLKAEDTAVYYCASFYYDSRYYFDYW

SEQ ID NO: 31778 - protein, 19 aa, Homo sapiens
CARHLYSYGFWRSNPFDLW

SEQ ID NO: 31779 - protein, 19 aa, Homo sapiens
CAKDQFVGSPLGRDAFDIW

SEQ ID NO: 31780 - protein, 23 aa, Homo sapiens
CARVGSPMVRGVIIAYYYGMDVW

SEQ ID NO: 31781 - protein, 20 aa, Homo sapiens
CATSPAIAARRGGGNWFDPW

SEQ ID NO: 31782 - protein, 30 aa, Homo sapiens
CARHGAPKKDDHYILTGFSLFYYYYGMDVW

SEQ ID NO: 31783 - protein, 20 aa, Homo sapiens
CASFTVTTQYYYYYYGMDVW

SEQ ID NO: 31784 - protein, 23 aa, Homo sapiens
CARLGFDSSGYYPTYYYYGMDVW

SEQ ID NO: 31785 - protein, 17 aa, Homo sapiens
CAKDVIRNDILTGYFDW

SEQ ID NO: 31786 - protein, 11 aa, Homo sapiens
CVREGNGFDPW

SEQ ID NO: 31787 - protein, 17 aa, Homo sapiens
CATVDSGFDSSGGFDIW

SEQ ID NO: 31788 - protein, 15 aa, Homo sapiens
CYSRDTSGNQIVGVF

SEQ ID NO: 31789 - protein, 21 aa, Homo sapiens
CATGTAYCSSTSCQTNWFDPW

SEQ ID NO: 31790 - protein, 23 aa, Homo sapiens
CARDSYYDYVWGSYPSPGPLDYW

SEQ ID NO: 31791 - protein, 26 aa, Homo sapiens
CAGPPDLQALLMHRGVGIYYYGMDVW

SEQ ID NO: 31792 - protein, 16 aa, Homo sapiens
CAKLLVYSGSYYGDYW

SEQ ID NO: 31793 - protein, 28 aa, Homo sapiens
CAKDRAYYDILTGYLQNTDYYYYGMDVW

SEQ ID NO: 31794 - protein, 19 aa, Homo sapiens
CARVLSSGYYYPSYYFDYW

SEQ ID NO: 31795 - protein, 14 aa, Homo sapiens
CQSADSSGSSPWIF

SEQ ID NO: 31796 - protein, 16 aa, Homo sapiens
CARVRGGLISNWFDSW

SEQ ID NO: 31797 - protein, 19 aa, Homo sapiens
CARDNWSSPGYYYYGMDVW

SEQ ID NO: 31798 - protein, 21 aa, Homo sapiens
CAREIYCSGGSCYKAGAFDIW

SEQ ID NO: 31799 - protein, 15 aa, Homo sapiens
CARDRDYDDYPPDYW

SEQ ID NO: 31800 - protein, 12 aa, Homo sapiens
CARDSSRAFGYW

SEQ ID NO: 31801 - protein, 18 aa, Homo sapiens
CARDFGVSNPENNWFDPW

SEQ ID NO: 31802 - protein, 23 aa, Homo sapiens
CARDGGVNYDILTGYYPYYFDYW

SEQ ID NO: 31803 - protein, 23 aa, Homo sapiens
CARGPVGSNSGGTRFIRYYFDYW

SEQ ID NO: 31804 - protein, 14 aa, Homo sapiens
CVHRWLTPIYFDYW

SEQ ID NO: 31805 - protein, 14 aa, Homo sapiens
CARGRSASDYSDLW

SEQ ID NO: 31806 - protein, 16 aa, Homo sapiens
CARAPTIFGVAPFDYW

SEQ ID NO: 31807 - protein, 13 aa, Homo sapiens
CAKGLGDQNQDYW

SEQ ID NO: 31808 - protein, 18 aa, Homo sapiens
CARGDYDILTGSRWFDPW

SEQ ID NO: 31809 - protein, 15 aa, Homo sapiens
CAKDSGYDSLPTDYW

SEQ ID NO: 31810 - protein, 16 aa, Homo sapiens
CARVNGGGYNSYFDYW

SEQ ID NO: 31811 - protein, 14 aa, Homo sapiens
CTREARYGRAFDYW

SEQ ID NO: 31812 - protein, 13 aa, Homo sapiens
CARASASGQIDYW

SEQ ID NO: 31813 - protein, 19 aa, Homo sapiens
CAKATGYSSSWYDWYFDYW

SEQ ID NO: 31814 - protein, 14 aa, Homo sapiens
CAKSVRAGGGQDYW

SEQ ID NO: 31815 - protein, 24 aa, Homo sapiens
CAKDGVGSYYDFWNGYHHTWIDPW

SEQ ID NO: 31816 - protein, 25 aa, Homo sapiens
CTAQKPETYYDILTGYYYYYGMDVW

SEQ ID NO: 31817 - protein, 20 aa, Homo sapiens
CAKDNDDGYMVGGIYYFDYW

SEQ ID NO: 31818 - protein, 22 aa, Homo sapiens
CAKDLRPSDFSGYLLEYYFDTW

SEQ ID NO: 31819 - protein, 16 aa, Homo sapiens
CATGPPAADLNWFDPW

SEQ ID NO: 31820 - protein, 18 aa, Homo sapiens
CARNYYDRSGYYPSFDHW

SEQ ID NO: 31821 - protein, 20 aa, Homo sapiens
CARGMDDGFGELFQYYFDYW

SEQ ID NO: 31822 - protein, 18 aa, Homo sapiens
CTTEDTAMVTGTGQIDYW

SEQ ID NO: 31823 - protein, 19 aa, Homo sapiens
CARDPGYSSSWGDWYFDLW

SEQ ID NO: 31824 - protein, 23 aa, Homo sapiens
CARDYPYFADSNKYDLLNWFDPW

SEQ ID NO: 31825 - protein, 23 aa, Homo sapiens
CARVGLHVATIKGVYYYYGMDVW

SEQ ID NO: 31826 - protein, 12 aa, Homo sapiens
CARLNDAHVDYW

SEQ ID NO: 31827 - protein, 20 aa, Homo sapiens
CARDWRYCSGGSCYFWFDPW

SEQ ID NO: 31828 - protein, 17 aa, Homo sapiens
CAYSTPAYGDSLTFDYW

SEQ ID NO: 31829 - protein, 23 aa, Homo sapiens
CARHGDYSDRSGHYYWGYYFDYW

SEQ ID NO: 31830 - protein, 20 aa, Homo sapiens
CRRAFVPSATYLDLIPFDYW

SEQ ID NO: 31831 - protein, 23 aa, Homo sapiens
CARDGFYYDFEAGDYLSYNFDFW

SEQ ID NO: 31832 - protein, 18 aa, Homo sapiens
CARDSSNDYYYYYGMDVW

SEQ ID NO: 31833 - protein, 19 aa, Homo sapiens
CAKDADIAVAGTSRHFDYW

SEQ ID NO: 31834 - protein, 20 aa, Homo sapiens
CAKEARIAVAGTHLEEFDYW

SEQ ID NO: 31835 - protein, 19 aa, Homo sapiens
CAKWRLRGDYYYLYGLDVW

SEQ ID NO: 31836 - protein, 20 aa, Homo sapiens
CATAQATPGYFGSKSGFDFW

SEQ ID NO: 31837 - protein, 19 aa, Homo sapiens
CAHSPSVTHEEYGFYYDYW

SEQ ID NO: 31838 - protein, 18 aa, Homo sapiens
CVRDQSLGSDLKSYVDYW

SEQ ID NO: 31839 - protein, 18 aa, Homo sapiens
CARAQRRFPEHTWYFDLW

SEQ ID NO: 31840 - protein, 14 aa, Homo sapiens
CAKSENVLGSFDYW

SEQ ID NO: 31841 - protein, 16 aa, Homo sapiens
CEGNYYDSSGYYLSYW

SEQ ID NO: 31842 - protein, 12 aa, Homo sapiens
CAAYLIGTLDYW

SEQ ID NO: 31843 - protein, 20 aa, Homo sapiens
CARDHLEPPRGRESDAFDLW

SEQ ID NO: 31844 - protein, 18 aa, Homo sapiens
CARDRGVLRFLEWTFDYW

SEQ ID NO: 31845 - protein, 13 aa, Homo sapiens
CARLTAQGYFDYW

SEQ ID NO: 31846 - protein, 15 aa, Homo sapiens
CARDFDFWSGYPDYW

SEQ ID NO: 31847 - protein, 14 aa, Homo sapiens
CAKDVYGDYYFDSW

SEQ ID NO: 31848 - protein, 15 aa, Homo sapiens
CARGCSETKCPSDYW

SEQ ID NO: 31849 - protein, 18 aa, Homo sapiens
CAKTYSGWSYYYDGMDVW

SEQ ID NO: 31850 - protein, 14 aa, Homo sapiens
CSRTFGHRYAFDVW

SEQ ID NO: 31851 - protein, 18 aa, Homo sapiens
CAKDGMITVTRGDYFDYW

SEQ ID NO: 31852 - protein, 15 aa, Homo sapiens
CARGDSSSSRGLDYW

SEQ ID NO: 31853 - protein, 21 aa, Homo sapiens
CAKEVRSVIVVVPAARGFDYW

SEQ ID NO: 31854 - protein, 16 aa, Homo sapiens
CNGDTCFSESFYFDHW

SEQ ID NO: 31855 - protein, 19 aa, Homo sapiens
CTTVWGAWYSSSGSDFDYW

SEQ ID NO: 31856 - protein, 16 aa, Homo sapiens
CAKVDSSSWYRSVDYW

SEQ ID NO: 31857 - protein, 19 aa, Homo sapiens
CARDSLLYYYDSSGCFDYW

SEQ ID NO: 31858 - protein, 19 aa, Homo sapiens
CAKLPPLYCSGGSCYLDYW

SEQ ID NO: 31859 - protein, 16 aa, Homo sapiens
CASGGSYYGYYGMDVW

SEQ ID NO: 31860 - protein, 21 aa, Homo sapiens
CAKDENLIGGSMIREMAMDVW

SEQ ID NO: 31861 - protein, 18 aa, Homo sapiens
CASGLFDTSSWPTLFDFW

SEQ ID NO: 31862 - protein, 17 aa, Homo sapiens
CASAVHEHSYGLPVDYW

SEQ ID NO: 31863 - protein, 17 aa, Homo sapiens
CAKDILAVLLYSYFDHW

SEQ ID NO: 31864 - protein, 20 aa, Homo sapiens
CARVRWPRGGPIYYYAMDVW

SEQ ID NO: 31865 - protein, 20 aa, Homo sapiens
CASYEGAINLTYYYYGMDVW

SEQ ID NO: 31866 - protein, 23 aa, Homo sapiens
CARPNSVVLLWFGESGDDGMDVW

SEQ ID NO: 31867 - protein, 22 aa, Homo sapiens
CARGRFCSTSSCYHHGDWFDYW

SEQ ID NO: 31868 - protein, 24 aa, Homo sapiens
CARDCRYYDILTGYLEGSGYFDYW

SEQ ID NO: 31869 - protein, 31 aa, Homo sapiens
CARLYHREEDIVVVPAAMWAGVVAVAPFDPW

SEQ ID NO: 31870 - protein, 26 aa, Homo sapiens
CAKRHHCPNGICYSPPEDHYYALDVW

SEQ ID NO: 31871 - protein, 13 aa, Homo sapiens
CATIVGAQGVDYW

SEQ ID NO: 31872 - protein, 13 aa, Homo sapiens
CHQRSNWPSGGTF

SEQ ID NO: 31873 - protein, 12 aa, Homo sapiens
CQSTDSSDTWLF

SEQ ID NO: 31874 - protein, 17 aa, Homo sapiens
CARDRYSGYELRDFDFW

SEQ ID NO: 31875 - protein, 19 aa, Homo sapiens
CARDSEPNLYYGWSWFDPW

SEQ ID NO: 31876 - protein, 19 aa, Homo sapiens
CASSGAADSLYYYYGMDVW

SEQ ID NO: 31877 - protein, 13 aa, Homo sapiens
CAKFPDGDYVSYW

SEQ ID NO: 31878 - protein, 17 aa, Homo sapiens
CATNRWLGYQLLALDVW

SEQ ID NO: 31879 - protein, 19 aa, Homo sapiens
CARDWIIYGDYQDAYFDLW

SEQ ID NO: 31880 - protein, 14 aa, Homo sapiens
CAPASDGNSFVDYW

SEQ ID NO: 31881 - protein, 12 aa, Homo sapiens
CAKLDAGPQDYW

SEQ ID NO: 31882 - protein, 26 aa, Homo sapiens
CARVVSSGNYYNRYADYRYYYSMDVW

SEQ ID NO: 31883 - protein, 30 aa, Homo sapiens
CALPILNSLTVEDTAVYFCAAGYGWLVDYW

SEQ ID NO: 31884 - protein, 17 aa, Homo sapiens
CARVAFDWLLYSWFDPW

SEQ ID NO: 31885 - protein, 23 aa, Homo sapiens
CARQVRNGSGYEYLYYYYGMDVW

SEQ ID NO: 31886 - protein, 19 aa, Homo sapiens
CARDPANCSGGSCYPGDYW

SEQ ID NO: 31887 - protein, 26 aa, Homo sapiens
CAKDLLLRYFDWLLLGENYYYGMDVW

SEQ ID NO: 31888 - protein, 17 aa, Homo sapiens
CARERAAAGTGGWFDPW

SEQ ID NO: 31889 - protein, 16 aa, Homo sapiens
CARGARYGDSRLLDYW

SEQ ID NO: 31890 - protein, 16 aa, Homo sapiens
CARVPTEARPYDFDYW

SEQ ID NO: 31891 - protein, 20 aa, Homo sapiens
CASGIKYDYGDYNEYYFDYW

SEQ ID NO: 31892 - protein, 25 aa, Homo sapiens
CAREYQGYCSGGSCYPSYYYGMDVW

SEQ ID NO: 31893 - protein, 14 aa, Homo sapiens
CASRPYDFDGMDVW

SEQ ID NO: 31894 - protein, 22 aa, Homo sapiens
CARSGQDCSGGSCYSSDWFDPW

SEQ ID NO: 31895 - protein, 15 aa, Homo sapiens
CAKIMDYGDHLADYW

SEQ ID NO: 31896 - protein, 19 aa, Homo sapiens
CAKGAGPYTYGRYWYSDLW

SEQ ID NO: 31897 - protein, 16 aa, Homo sapiens
CARSSGWYDPDTFDIW

SEQ ID NO: 31898 - protein, 19 aa, Homo sapiens
CASAWGWDNYGGNDWFHPW

SEQ ID NO: 31899 - protein, 18 aa, Homo sapiens
CVRHGYCTSSSCVSFDQW

SEQ ID NO: 31900 - protein, 16 aa, Homo sapiens
CARSRGGSYRDAFDIW

SEQ ID NO: 31901 - protein, 24 aa, Homo sapiens
CARRRLWFGELFSILYYYYGMDVW

SEQ ID NO: 31902 - protein, 23 aa, Homo sapiens
CAKDKTYYDFWSGPLYYYGMDVW

SEQ ID NO: 31903 - protein, 19 aa, Homo sapiens
CARDGSSSWYAYYYGMDVW

SEQ ID NO: 31904 - protein, 21 aa, Homo sapiens
CARESSYDSSGYYLGYYFDYW

SEQ ID NO: 31905 - protein, 14 aa, Homo sapiens
CARGDYYDRYFDLW

SEQ ID NO: 31906 - protein, 19 aa, Homo sapiens
CARLPDILTLEYYYGMDVW

SEQ ID NO: 31907 - protein, 23 aa, Homo sapiens
CARDQGGEQLWGGGYYYYGMDVW

SEQ ID NO: 31908 - protein, 18 aa, Homo sapiens
CARLTHKIPVVVNWFDPW

SEQ ID NO: 31909 - protein, 19 aa, Homo sapiens
CARALYGGNPYYYYGMDVW

SEQ ID NO: 31910 - protein, 21 aa, Homo sapiens
CAKDNGPAAMRGYYYYGMDVW

SEQ ID NO: 31911 - protein, 20 aa, Homo sapiens
CARESAYCGGDCWTYYFDYW

SEQ ID NO: 31912 - protein, 19 aa, Homo sapiens
CARASARRITMIVGSFDYW

SEQ ID NO: 31913 - protein, 13 aa, Homo sapiens
CVRTISGTTFDYW

SEQ ID NO: 31914 - protein, 18 aa, Homo sapiens
CAKLIFSGGASLRFFDYW

SEQ ID NO: 31915 - protein, 15 aa, Homo sapiens
CASVVVPAAAWFDYW

SEQ ID NO: 31916 - protein, 20 aa, Homo sapiens
CAKFLPAAIRDYYYYGMDVW

SEQ ID NO: 31917 - protein, 15 aa, Homo sapiens
CASFYYDSRYYFDYW

SEQ ID NO: 31918 - protein, 22 aa, Homo sapiens
CARVPHYNDSGSLQMGGWFDPW

SEQ ID NO: 31919 - protein, 16 aa, Homo sapiens
CAKDQEFIVVAGIDYW

SEQ ID NO: 31920 - protein, 19 aa, Homo sapiens
CVRDVCSTSTCPPSWFEPW

SEQ ID NO: 31921 - protein, 18 aa, Homo sapiens
CARDRLYYDSSGYHPDYW

SEQ ID NO: 31922 - protein, 18 aa, Homo sapiens
CARDTFDWLLPGDYFDYW

SEQ ID NO: 31923 - protein, 17 aa, Homo sapiens
CAHRPFGYNWNALFDYW

SEQ ID NO: 31924 - protein, 23 aa, Homo sapiens
CARAFLGSLDWLLLNYYYGMDVW

SEQ ID NO: 31925 - protein, 19 aa, Homo sapiens
CAKDSVIGRITVTVYFDYW

SEQ ID NO: 31926 - protein, 18 aa, Homo sapiens
CARMKNGGTYYGWVFDYW

SEQ ID NO: 31927 - protein, 17 aa, Homo sapiens
CAKGTVAGTRGSAFDIW

SEQ ID NO: 31928 - protein, 22 aa, Homo sapiens
CARYSEISSSWPYYYYYGMDVW

SEQ ID NO: 31929 - protein, 15 aa, Homo sapiens
CARSTWNLGGAFDTW

SEQ ID NO: 31930 - protein, 18 aa, Homo sapiens
CARDPDDSSWSNYYFDYW

SEQ ID NO: 31931 - protein, 13 aa, Homo sapiens
CAKDSSSAWFDYW

SEQ ID NO: 31932 - protein, 20 aa, Homo sapiens
CAKDSWDIVVVPAATGFDYW

SEQ ID NO: 31933 - protein, 23 aa, Homo sapiens
CARPRLRYFDWLLSTYYYGMDVW

SEQ ID NO: 31934 - protein, 15 aa, Homo sapiens
CARTLPGVPSLFEYW

SEQ ID NO: 31935 - protein, 20 aa, Homo sapiens
CVKRPAPLSGGLDGDALDVW

SEQ ID NO: 31936 - protein, 20 aa, Homo sapiens
CATFSGSYWRDYYYYGMDVW

SEQ ID NO: 31937 - protein, 17 aa, Homo sapiens
CARAPNSYGFNDAFDVW

SEQ ID NO: 31938 - protein, 16 aa, Homo sapiens
CAKHDRDYGDSRCDYW

SEQ ID NO: 31939 - protein, 25 aa, Homo sapiens
CARGDEYSGYDDPAGHYYYYGMDVW

SEQ ID NO: 31940 - protein, 20 aa, Homo sapiens
CARFELEMATMDYYYGMDVW

SEQ ID NO: 31941 - protein, 17 aa, Homo sapiens
CAKLLGATPEDYYFDYW

SEQ ID NO: 31942 - protein, 17 aa, Homo sapiens
CARQDFTMIHVGAFDIW

SEQ ID NO: 31943 - protein, 22 aa, Homo sapiens
CARGFSTNYYDSSGYPGDFDYW

SEQ ID NO: 31944 - protein, 22 aa, Homo sapiens
CARVVVAATRGYYYYYYGMDVW

SEQ ID NO: 31945 - protein, 19 aa, Homo sapiens
CARSPHYCGGDCSNWFDPW

SEQ ID NO: 31946 - protein, 20 aa, Homo sapiens
CASNYDILTGYHPQGAFDIW

SEQ ID NO: 31947 - protein, 21 aa, Homo sapiens
CARISSITMIVVVIPGYFDYW

SEQ ID NO: 31948 - protein, 16 aa, Homo sapiens
CARGVGGSYYTPFDYW

SEQ ID NO: 31949 - protein, 19 aa, Homo sapiens
CARFGLADYDSSGYYPDYW

SEQ ID NO: 31950 - protein, 15 aa, Homo sapiens
CAKDGGAVGAPFEYW

SEQ ID NO: 31951 - protein, 15 aa, Homo sapiens
CARSSYYEGDAFDIW

SEQ ID NO: 31952 - protein, 17 aa, Homo sapiens
CARHRPDEYSNIRFDFW

SEQ ID NO: 31953 - protein, 16 aa, Homo sapiens
CTTELGYSGYDYFDYW

SEQ ID NO: 31954 - protein, 17 aa, Homo sapiens
CVRDAVPGPARDYFHYW

SEQ ID NO: 31955 - protein, 27 aa, Homo sapiens
CARDLKRITIFGVVMGPNYYYYGMDVW

SEQ ID NO: 31956 - protein, 18 aa, Homo sapiens
CARKRAERWLHDWYFDLW

SEQ ID NO: 31957 - protein, 14 aa, Homo sapiens
CARDRRVLGAFDLW

SEQ ID NO: 31958 - protein, 13 aa, Homo sapiens
CARLGSGRSDDYW

SEQ ID NO: 31959 - protein, 17 aa, Homo sapiens
CATYGDFWSGVYWFDPW

SEQ ID NO: 31960 - protein, 16 aa, Homo sapiens
CATASLQLWSYAFDIW

SEQ ID NO: 31961 - protein, 19 aa, Homo sapiens
CAKDPNTKTYYYYFGMDVW

SEQ ID NO: 31962 - protein, 16 aa, Homo sapiens
CARQERTRERQYFDYW

SEQ ID NO: 31963 - protein, 21 aa, Homo sapiens
CAKVSTFDADYGGNGGDFDYW

SEQ ID NO: 31964 - protein, 20 aa, Homo sapiens
CARIGNCYYDSRGPRAFDYW

SEQ ID NO: 31965 - protein, 19 aa, Homo sapiens
CVSVRGPRGAYYYYGMDVW

SEQ ID NO: 31966 - protein, 19 aa, Homo sapiens
CVKPASRGHCRSGICRDYW

SEQ ID NO: 31967 - protein, 20 aa, Homo sapiens
CAKDPVYYETSGYYGVPDYW

SEQ ID NO: 31968 - protein, 14 aa, Homo sapiens
CARALTPRDGMDVW

SEQ ID NO: 31969 - protein, 18 aa, Homo sapiens
CTTDPYYDFWSGYYTEYW

SEQ ID NO: 31970 - protein, 19 aa, Homo sapiens
CARQPAPIFGVIFSSFDSW

SEQ ID NO: 31971 - protein, 24 aa, Homo sapiens
CARSSSPYYYDSSGYLHYYGMDVW

SEQ ID NO: 31972 - protein, 18 aa, Homo sapiens
CARQTRDDTSGYYYFDYW

SEQ ID NO: 31973 - protein, 17 aa, Homo sapiens
CARRVGVGAGGRYFDFW

SEQ ID NO: 31974 - protein, 23 aa, Homo sapiens
CATLQGIFGVVIRAGYYYGMDVW

SEQ ID NO: 31975 - protein, 13 aa, Homo sapiens
CQSAHSSSPYVMF

SEQ ID NO: 31976 - protein, 16 aa, Homo sapiens
CAKLPTYDSSGYQDYW

SEQ ID NO: 31977 - protein, 24 aa, Homo sapiens
CAIEYGDYAPGVVRPATSGAFDIW

SEQ ID NO: 31978 - protein, 14 aa, Homo sapiens
CARGNHLPPWFDPW

SEQ ID NO: 31979 - protein, 13 aa, Homo sapiens
CARNGPYQPFDCW

SEQ ID NO: 31980 - protein, 18 aa, Homo sapiens
CGRGPISLKGSWYYVDYW

SEQ ID NO: 31981 - protein, 16 aa, Homo sapiens
CARTITGDWGGYFDYW

SEQ ID NO: 31982 - protein, 11 aa, Homo sapiens [sequence omitted]

SEQ ID NO: 31983 - protein, 24 aa, Homo sapiens
CARQGAGPINYGSGTYSTVYFDPW

SEQ ID NO: 31984 - protein, 20 aa, Homo sapiens
CARRAGPYYYDSSGYYYNYW

SEQ ID NO: 31985 - protein, 23 aa, Homo sapiens
CAKDISPLGIVVVPADHNWFDPW

SEQ ID NO: 31986 - protein, 24 aa, Homo sapiens
CARGRVSWSHYDILTPYYEGFDYW

SEQ ID NO: 31987 - protein, 19 aa, Homo sapiens
CAHVYYDILTGYYLAFDIW

SEQ ID NO: 31988 - protein, 20 aa, Homo sapiens
CAKDVDYGSGTYYHDAFDIW

SEQ ID NO: 31989 - protein, 23 aa, Homo sapiens
CVKAKIDPNYYSSNEFFDAFDVW

SEQ ID NO: 31990 - protein, 20 aa, Homo sapiens
CAKDHLGITMVRGSGYFDYW

SEQ ID NO: 31991 - protein, 17 aa, Homo sapiens
CARDYDIVTGDGAFDVW

SEQ ID NO: 31992 - protein, 20 aa, Homo sapiens
CARLYYFDSSAYKDWYFDLW

SEQ ID NO: 31993 - protein, 16 aa, Homo sapiens
CAKDMAHSSGYSFDYW

SEQ ID NO: 31994 - protein, 18 aa, Homo sapiens
CATPRGVYSSSWYDFDYW

SEQ ID NO: 31995 - protein, 19 aa, Homo sapiens
CASAFLTPVTTPHDALDIW

SEQ ID NO: 31996 - protein, 27 aa, Homo sapiens
CARACFTMVRGEHRGGNYYYYYGMDVW

SEQ ID NO: 31997 - protein, 11 aa, Homo sapiens
CFQTTQFPLTF

SEQ ID NO: 31998 - protein, 21 aa, Homo sapiens
CAHTYLGQSGSYLGFSAFDIW

SEQ ID NO: 31999 - protein, 19 aa, Homo sapiens
CAREFYYDSSGWDNWFDPW

SEQ ID NO: 32000 - protein, 16 aa, Homo sapiens
CAKGASGSYRSAFDYW

SEQ ID NO: 32001 - protein, 19 aa, Homo sapiens
CARDPIGDSVVVTAISDYW

SEQ ID NO: 32002 - protein, 22 aa, Homo sapiens
CTTDRPDYDILTGYSPGAFDIW

SEQ ID NO: 32003 - protein, 18 aa, Homo sapiens
CARDGHSSSWKEDYFDYW

SEQ ID NO: 32004 - protein, 17 aa, Homo sapiens
CAKDPRLVADVGYFDYW

SEQ ID NO: 32005 - protein, 20 aa, Homo sapiens
CARNFHKETVTGYEDYLDIW

SEQ ID NO: 32006 - protein, 13 aa, Homo sapiens
CVKPVGGTDFDYW

SEQ ID NO: 32007 - protein, 19 aa, Homo sapiens
CARHNRRWLQLRPSLFDYW

SEQ ID NO: 32008 - protein, 14 aa, Homo sapiens
CVSSGWFRTSFDYW

SEQ ID NO: 32009 - protein, 22 aa, Homo sapiens
CARMVVATLRIGQYYYYGMDVW

SEQ ID NO: 32010 - protein, 16 aa, Homo sapiens
CARARAGGYYGPFDYW

SEQ ID NO: 32011 - protein, 18 aa, Homo sapiens
CAKDAAIWFGERPDFDYW

SEQ ID NO: 32012 - protein, 11 aa, Homo sapiens
CQQYVNNWGTF

SEQ ID NO: 32013 - protein, 16 aa, Homo sapiens
CTRIGEVVALNWFDPW

SEQ ID NO: 32014 - protein, 22 aa, Homo sapiens
CAALGPTVPVEYLGYYYGMDVW

SEQ ID NO: 32015 - protein, 23 aa, Homo sapiens
CAKLPWGYYYDSSGPTTDAFDIW

SEQ ID NO: 32016 - protein, 16 aa, Homo sapiens
CAREHVSGSPGAMDVW

SEQ ID NO: 32017 - protein, 17 aa, Homo sapiens
CAKLLWLSARGDAFDIW

SEQ ID NO: 32018 - protein, 21 aa, Homo sapiens
CARRRSAYDYDTSGYFPFDYW

SEQ ID NO: 32019 - protein, 21 aa, Homo sapiens
CAKDPLYDSSGYHRAEYFQHW

SEQ ID NO: 32020 - protein, 17 aa, Homo sapiens
CARDASIAVAATYFDSW

SEQ ID NO: 32021 - protein, 19 aa, Homo sapiens
CAKDLSRYSSSWYGAFDIW

SEQ ID NO: 32022 - protein, 20 aa, Homo sapiens
CARLSQNSNYTNGWYYFDYW

SEQ ID NO: 32023 - protein, 22 aa, Homo sapiens
CAHTGMVRYFDWPSSWTYFDYW

SEQ ID NO: 32024 - protein, 17 aa, Homo sapiens
CAKDSIIVEPYYYFDNW

SEQ ID NO: 32025 - protein, 18 aa, Homo sapiens
CARVLSWGNSVPHYFEYW

SEQ ID NO: 32026 - protein, 15 aa, Homo sapiens
CARDGYNWNDGIDYW

SEQ ID NO: 32027 - protein, 15 aa, Homo sapiens
CARVLYDYGDFFDYW

SEQ ID NO: 32028 - protein, 18 aa, Homo sapiens
CAKDSDRSGSFYRLFNYW

SEQ ID NO: 32029 - protein, 17 aa, Homo sapiens
CVSGKWQPGYYYGMDVW

SEQ ID NO: 32030 - protein, 18 aa, Homo sapiens
CAKVGDDGSGYYVHFDYW

SEQ ID NO: 32031 - protein, 21 aa, Homo sapiens
CARVTFPDYFDSRGHNWFDPW

SEQ ID NO: 32032 - protein, 19 aa, Homo sapiens
CAKLDYDSVWGSLNYFDNW

SEQ ID NO: 32033 - protein, 19 aa, Homo sapiens
CAKDDDVVVVIAATVIDYW

SEQ ID NO: 32034 - protein, 15 aa, Homo sapiens
CAAILGSPRNWFDPW

SEQ ID NO: 32035 - protein, 19 aa, Homo sapiens
CVKHEWWTSDFYSGYSDAW

SEQ ID NO: 32036 - protein, 25 aa, Homo sapiens
CARDTRWQYYDILTGYHEGYYFDYW

SEQ ID NO: 32037 - protein, 17 aa, Homo sapiens
CASEMITFGGVIVSDYW

SEQ ID NO: 32038 - protein, 16 aa, Homo sapiens
CALYTRGSSWPYFDYW

SEQ ID NO: 32039 - protein, 17 aa, Homo sapiens
CARLSGESIYMGFFDYW

SEQ ID NO: 32040 - protein, 22 aa, Homo sapiens
CVIFTIFGVANPQPLGLHFDCW

SEQ ID NO: 32041 - protein, 17 aa, Homo sapiens
CARGIHSSSWYVWLDPW

SEQ ID NO: 32042 - protein, 11 aa, Homo sapiens
CETWDSNTHEF

SEQ ID NO: 32043 - protein, 24 aa, Homo sapiens
CATALAVVVAANLRGDYYYGMDVW

SEQ ID NO: 32044 - protein, 14 aa, Homo sapiens
CSSYAGSNHLEMIF

SEQ ID NO: 32045 - protein, 16 aa, Homo sapiens
CARLTFFAWSGYFDYW

SEQ ID NO: 32046 - protein, 25 aa, Homo sapiens
CQQYGASPVTFGGGTKVEIKLWITF

SEQ ID NO: 32047 - protein, 16 aa, Homo sapiens
CAKSAIAAALFYFDYW

SEQ ID NO: 32048 - protein, 23 aa, Homo sapiens
CATGIAVAGTEMNYYYYYGMDVW

SEQ ID NO: 32049 - protein, 34 aa, Homo sapiens
CTVYMELSSLRSEDTAIYYCAREIRAPRGSFDPW

SEQ ID NO: 32050 - protein, 20 aa, Homo sapiens
CARRGLWLLSDYYYYDMDVW

SEQ ID NO: 32051 - protein, 16 aa, Homo sapiens
CARDVGYSYGYNFDPW

SEQ ID NO: 32052 - protein, 16 aa, Homo sapiens
CAKDIAPVVAAYFDYW

SEQ ID NO: 32053 - protein, 16 aa, Homo sapiens
CARDLLGGLEDGMDVW

SEQ ID NO: 32054 - protein, 17 aa, Homo sapiens
CAREDYGDDESYYFDYW

SEQ ID NO: 32055 - protein, 21 aa, Homo sapiens
CARDGAADYDFWSGTYYFDYW

SEQ ID NO: 32056 - protein, 25 aa, Homo sapiens
CAKDIASCSGGSCYFYYYYYGMDVW

SEQ ID NO: 32057 - protein, 15 aa, Homo sapiens
CAREDIVVVPANDYW

SEQ ID NO: 32058 - protein, 20 aa, Homo sapiens
CARVVLRDTRAYYSHYFDYW

SEQ ID NO: 32059 - protein, 25 aa, Homo sapiens
CAKDRGPNFGGDSVGGWYYYALDVW

SEQ ID NO: 32060 - protein, 15 aa, Homo sapiens
CAKDYAGVPGYFDYW

SEQ ID NO: 32061 - protein, 12 aa, Homo sapiens
CAIELKTGFDYW

SEQ ID NO: 32062 - protein, 16 aa, Homo sapiens
CVKARGPTSSSAGDYW

SEQ ID NO: 32063 - protein, 16 aa, Homo sapiens
CAREDLWYGDESLDYW

SEQ ID NO: 32064 - protein, 22 aa, Homo sapiens
CARDIHDSSGYPYYYYYGMDVW

SEQ ID NO: 32065 - protein, 17 aa, Homo sapiens
CARVWYYDSSGPRFDPW

SEQ ID NO: 32066 - protein, 28 aa, Homo sapiens
CARDNVAYDFWSGHSQYYKTHWNWFDPW

SEQ ID NO: 32067 - protein, 15 aa, Homo sapiens
CAKGKEGLASSFEYW

SEQ ID NO: 32068 - protein, 18 aa, Homo sapiens
CARTYGSGSYSGWYFDLW

SEQ ID NO: 32069 - protein, 11 aa, Homo sapiens
CQQSYLAPYNF

SEQ ID NO: 32070 - protein, 17 aa, Homo sapiens
CAKDMGDGYNPDYIDYW

SEQ ID NO: 32071 - protein, 22 aa, Homo sapiens
CARDPGYYDILTGYYNGAFDIW

SEQ ID NO: 32072 - protein, 11 aa, Homo sapiens
CTTSSSPVDYW

SEQ ID NO: 32073 - protein, 18 aa, Homo sapiens
CASGTFEWLLLSGYFDYW

SEQ ID NO: 32074 - protein, 14 aa, Homo sapiens
CAHTRFYSNAFDYW

SEQ ID NO: 32075 - protein, 20 aa, Homo sapiens
CLKVGYSGYDSNYYYGMDVW

SEQ ID NO: 32076 - protein, 18 aa, Homo sapiens
CAHRLRYSGSYYYAFDIW

SEQ ID NO: 32077 - protein, 21 aa, Homo sapiens
CARDSGENDFWSGHTPNFDYW

SEQ ID NO: 32078 - protein, 29 aa, Homo sapiens
CAAGKDTVEVATGTPTPSSSWYGDAFEIW

SEQ ID NO: 32079 - protein, 19 aa, Homo sapiens
CAKVEGGIAVAGTNNFDYW

SEQ ID NO: 32080 - protein, 17 aa, Homo sapiens
CATGGSSSWYTWWFDPW

SEQ ID NO: 32081 - protein, 24 aa, Homo sapiens
CARPKITFSCDCSGLFFRRDFDLW

SEQ ID NO: 32082 - protein, 19 aa, Homo sapiens
CAKDNDFWSGYYRGAFDIW

SEQ ID NO: 32083 - protein, 20 aa, Homo sapiens
CMRDRSHKDDSSFYFEGDYW

SEQ ID NO: 32084 - protein, 26 aa, Homo sapiens
CARAYHSNRFLEWLSPHYYYYGMDVW

SEQ ID NO: 32085 - protein, 25 aa, Homo sapiens
CAREDYMITFGGVIEYYYYYGMDVW

SEQ ID NO: 32086 - protein, 17 aa, Homo sapiens
CATRWAVAGKVYYFDYW

SEQ ID NO: 32087 - protein, 13 aa, Homo sapiens
CARVNAYTGLDYW

SEQ ID NO: 32088 - protein, 26 aa, Homo sapiens
CAKEATHVYSSGYYYPPYYYYGMDVW

SEQ ID NO: 32089 - protein, 17 aa, Homo sapiens
CARDGQNYYDSSQFDYW

SEQ ID NO: 32090 - protein, 10 aa, Homo sapiens
CQQANTFLTF

SEQ ID NO: 32091 - protein, 23 aa, Homo sapiens
CARDFFWSGTTCGYYYYYGMDVW

SEQ ID NO: 32092 - protein, 20 aa, Homo sapiens
CARPYARGGVVTAIYAFDIW

SEQ ID NO: 32093 - protein, 16 aa, Homo sapiens
CAKVASYQLDLGVDYW

SEQ ID NO: 32094 - protein, 19 aa, Homo sapiens
CATVNFYDTPGDNDYFDYW

SEQ ID NO: 32095 - protein, 17 aa, Homo sapiens
CARDFFDSGGYFSYDYW

SEQ ID NO: 32096 - protein, 24 aa, Homo sapiens
CAKDMTDGYSYGYGGVRGVMFDYW

SEQ ID NO: 32097 - protein, 19 aa, Homo sapiens
CARRITMVRDPIGWGFDYW

SEQ ID NO: 32098 - protein, 24 aa, Homo sapiens
CATPHVVPAAQGDYHYYYYGMDVW

SEQ ID NO: 32099 - protein, 20 aa, Homo sapiens
CATAYDILTGYYEVYGMDVW

SEQ ID NO: 32100 - protein, 17 aa, Homo sapiens
CARDLQWLADEPINDYW

SEQ ID NO: 32101 - protein, 18 aa, Homo sapiens
CATIPDGEEGYYYGMDVW

SEQ ID NO: 32102 - protein, 18 aa, Homo sapiens
CARLYDYSNRYYYGMDVW

SEQ ID NO: 32103 - protein, 12 aa, Homo sapiens
CMQSIRLPQITF

SEQ ID NO: 32104 - protein, 19 aa, Homo sapiens
CARDMGVDMPIANWDVDYW

SEQ ID NO: 32105 - protein, 14 aa, Homo sapiens
CARGLRGNVAFDIW

SEQ ID NO: 32106 - protein, 15 aa, Homo sapiens
CQSYDNSRSTPFVIF

SEQ ID NO: 32107 - protein, 19 aa, Homo sapiens
CAKSPPYCSGGSCYYFDYW

SEQ ID NO: 32108 - protein, 33 aa, Homo sapiens
CARSTVDYSSSWHDLWPHSIRPERILSPIFDYW

SEQ ID NO: 32109 - protein, 18 aa, Homo sapiens
CAKTAAILTGYPRHFDYW

SEQ ID NO: 32110 - protein, 20 aa, Homo sapiens
CARDSLLLWFGDLYAPFDYW

SEQ ID NO: 32111 - protein, 21 aa, Homo sapiens
CARATYDIVVVPAAPVDFDYW

SEQ ID NO: 32112 - protein, 21 aa, Homo sapiens
CAQVTKERYSSIDNGDYFDYW

SEQ ID NO: 32113 - protein, 17 aa, Homo sapiens
CAKDTQRYDILTGFDYW

SEQ ID NO: 32114 - protein, 23 aa, Homo sapiens
CARGCQRGIQLWLRIDRYYFDYW

SEQ ID NO: 32115 - protein, 25 aa, Homo sapiens
CARDPTLRLGELSLFGYYYYGMDVW

SEQ ID NO: 32116 - protein, 14 aa, Homo sapiens
CARDPWGENWFDPW

SEQ ID NO: 32117 - protein, 13 aa, Homo sapiens
CARHLGKNWFDTW

SEQ ID NO: 32118 - protein, 24 aa, Homo sapiens
CARAGDYDILTGYYPYYYYGMDVW

SEQ ID NO: 32119 - protein, 19 aa, Homo sapiens
CARLNYYGSDLGLYAMDVW

SEQ ID NO: 32120 - protein, 20 aa, Homo sapiens
CARDPLTDIGGYEPYYFDYW

SEQ ID NO: 32121 - protein, 20 aa, Homo sapiens
CATCSVFATRPPYYYGMDVW

SEQ ID NO: 32122 - protein, 23 aa, Homo sapiens
CAREGASSGGYWEVDAFSGFDPW

SEQ ID NO: 32123 - protein, 17 aa, Homo sapiens
CARVDGYSGYDWPFDYW

SEQ ID NO: 32124 - protein, 18 aa, Homo sapiens
CARDNGGIAVADNWFDPW

SEQ ID NO: 32125 - protein, 13 aa, Homo sapiens
CQSADSTNTQGVF

SEQ ID NO: 32126 - protein, 25 aa, Homo sapiens
CAKDGKLPSLLWFGELPIPDGMDVW

SEQ ID NO: 32127 - protein, 13 aa, Homo sapiens
CVRDPVWGMFDYW

SEQ ID NO: 32128 - protein, 15 aa, Homo sapiens
CARHFVVIRGLFDYW

SEQ ID NO: 32129 - protein, 23 aa, Homo sapiens
CARPYCTGTGCSGYYFYYGMDVW

SEQ ID NO: 32130 - protein, 20 aa, Homo sapiens
CARENKYEKSGYYRNAFDIW

SEQ ID NO: 32131 - protein, 16 aa, Homo sapiens
CARAGARSGGYPFDIW

SEQ ID NO: 32132 - protein, 21 aa, Homo sapiens
CASPDSSCGADCSPHAPFDIW

SEQ ID NO: 32133 - protein, 21 aa, Homo sapiens
CAKDGIPLSPWGDTEDYFDYW

SEQ ID NO: 32134 - protein, 18 aa, Homo sapiens
CAKTRGDSYSMNYALDVW

SEQ ID NO: 32135 - protein, 20 aa, Homo sapiens
CARGPWFGDPHIYYYGMDVW

SEQ ID NO: 32136 - protein, 20 aa, Homo sapiens
CAKGRAITIFGAVSDAYDIW

SEQ ID NO: 32137 - protein, 16 aa, Homo sapiens
CARVGVLLDEYYFDYW

SEQ ID NO: 32138 - protein, 18 aa, Homo sapiens
CARDVQGYYGSGSEFDPW

SEQ ID NO: 32139 - protein, 21 aa, Homo sapiens
CARLRGVVTAISTSPNWFDPW

SEQ ID NO: 32140 - protein, 25 aa, Homo sapiens
CATAAPIVVVPAAWREDYYYGMDVW

SEQ ID NO: 32141 - protein, 15 aa, Homo sapiens
CAEGRGGYNYALDYW

SEQ ID NO: 32142 - protein, 19 aa, Homo sapiens
CAREGDDISLGYYYGMDVW

SEQ ID NO: 32143 - protein, 20 aa, Homo sapiens
CEAYYDILTGYLFMLLFDYW

SEQ ID NO: 32144 - protein, 22 aa, Homo sapiens
CARDPPSHDYGGNSRVPWFDPW

SEQ ID NO: 32145 - protein, 16 aa, Homo sapiens
CAREGITIFFNAFDIW

SEQ ID NO: 32146 - protein, 19 aa, Homo sapiens
CAGQQWLVQGYYYYGMDVW

SEQ ID NO: 32147 - protein, 13 aa, Homo sapiens
CAHRRRDGYSDYW

SEQ ID NO: 32148 - protein, 19 aa, Homo sapiens
CARLRTMIVVVTPYYFDYW

SEQ ID NO: 32149 - protein, 23 aa, Homo sapiens
CAKDRFPERAYCGGDCYPFFDYW

SEQ ID NO: 32150 - protein, 17 aa, Homo sapiens
CAREAPDSTWSNWFDPW

SEQ ID NO: 32151 - protein, 13 aa, Homo sapiens
CAKDSSGWYLDPW

SEQ ID NO: 32152 - protein, 22 aa, Homo sapiens
CAKGAGQVTKQWLDYYYGMDVW

SEQ ID NO: 32153 - protein, 19 aa, Homo sapiens
CAKTANILTGYYAQNFDYW

SEQ ID NO: 32154 - protein, 19 aa, Homo sapiens
CTRDTSYAVGTRTNWFDPW

SEQ ID NO: 32155 - protein, 22 aa, Homo sapiens
CAKGMSRITMIVVVITDGMDVW

SEQ ID NO: 32156 - protein, 14 aa, Homo sapiens
CARDRGSGWFPDSW

SEQ ID NO: 32157 - protein, 15 aa, Homo sapiens
CASSNCDGDCFLDYW

SEQ ID NO: 32158 - protein, 18 aa, Homo sapiens
CAPLPSGEDGYNPYFDYW

SEQ ID NO: 32159 - protein, 24 aa, Homo sapiens
CARSPQARYCSSTSCLNYWYFDLW

SEQ ID NO: 32160 - protein, 17 aa, Homo sapiens
CATAPGAPQFSNWFDPW

SEQ ID NO: 32161 - protein, 21 aa, Homo sapiens
CAKVDRYYFKSAGYYSLFDYW

SEQ ID NO: 32162 - protein, 16 aa, Homo sapiens
CAKQSSSWPYYYFDYW

SEQ ID NO: 32163 - protein, 22 aa, Homo sapiens
CVKDRNVEICSGGNCLGFFDLW

SEQ ID NO: 32164 - protein, 19 aa, Homo sapiens
CARQTYYYDSSDDAGFDYW

SEQ ID NO: 32165 - protein, 17 aa, Homo sapiens
CARGGDYDSSEDLFDYW

SEQ ID NO: 32166 - protein, 20 aa, Homo sapiens
CAISAGIDCGGDCYSAPDIW

SEQ ID NO: 32167 - protein, 21 aa, Homo sapiens
CARDLALYCSSTSCFDGMDVW

SEQ ID NO: 32168 - protein, 17 aa, Homo sapiens
CARKLGGRYHLGYFDFW

SEQ ID NO: 32169 - protein, 23 aa, Homo sapiens
CATFHFYDYVWGSYRPTYAFDMW

SEQ ID NO: 32170 - protein, 16 aa, Homo sapiens
CARTRADYAHDAFDLW

SEQ ID NO: 32171 - protein, 13 aa, Homo sapiens
CAAFRYRDAFDIW

SEQ ID NO: 32172 - protein, 17 aa, Homo sapiens
CARHVSSSWYLDAFDIW

SEQ ID NO: 32173 - protein, 14 aa, Homo sapiens
CAKSRNYVDYFDYW

SEQ ID NO: 32174 - protein, 15 aa, Homo sapiens
CAHRPAGWELRFDYW

SEQ ID NO: 32175 - protein, 14 aa, Homo sapiens
CARTSKGIVGGDYW

SEQ ID NO: 32176 - protein, 20 aa, Homo sapiens
CARLSTYYDFWSGYTGFDYW

SEQ ID NO: 32177 - protein, 27 aa, Homo sapiens
CAKDLVLQQYAMITFGGVILSGGFDPW

SEQ ID NO: 32178 - protein, 26 aa, Homo sapiens
CARDRAYCSGGSCYSGYYYYYGMDVW

SEQ ID NO: 32179 - protein, 23 aa, Homo sapiens
CARTVFGSGYFLGDYYYYGMDVW

SEQ ID NO: 32180 - protein, 19 aa, Homo sapiens
CCSLAVTGHYYYYYGMDVW

SEQ ID NO: 32181 - protein, 19 aa, Homo sapiens
CARTKYGDRIAAAGHFDYW

SEQ ID NO: 32182 - protein, 19 aa, Homo sapiens
CARDRDCVSCSKGDGFDIW

SEQ ID NO: 32183 - protein, 20 aa, Homo sapiens
CAKDPFPTPCQGCIPYFQNW

SEQ ID NO: 32184 - protein, 20 aa, Homo sapiens
CARGFRPDYDFWSGYYWDYW

SEQ ID NO: 32185 - protein, 17 aa, Homo sapiens
CAKDFTMIVPRGAFDIW

SEQ ID NO: 32186 - protein, 17 aa, Homo sapiens
CARGGGSASYYYHFDDW

SEQ ID NO: 32187 - protein, 26 aa, Homo sapiens
CAKIAHYYGSGRLGAEYYYYYGMDVW

SEQ ID NO: 32188 - protein, 16 aa, Homo sapiens
CATGGAAADYNYFDPW

SEQ ID NO: 32189 - protein, 11 aa, Homo sapiens
CQTYGDSPRSF

SEQ ID NO: 32190 - protein, 21 aa, Homo sapiens
CARQKRSGTYYGAGYNACDPW

SEQ ID NO: 32191 - protein, 23 aa, Homo sapiens
CARYYDILTAYPPFYYYYGMDVW

SEQ ID NO: 32192 - protein, 23 aa, Homo sapiens
CARALSPPLWFGEPPAPYWFDPW

SEQ ID NO: 32193 - protein, 24 aa, Homo sapiens
CARAGLLRLGELSLYRSWDYFDYW

SEQ ID NO: 32194 - protein, 16 aa, Homo sapiens
CAHRREYTTSTTFDYW

SEQ ID NO: 32195 - protein, 19 aa, Homo sapiens
CARVTGMFYGDYEDYFDYW

SEQ ID NO: 32196 - protein, 20 aa, Homo sapiens
CATAAAGTTLGDYYYGMDVW

SEQ ID NO: 32197 - protein, 17 aa, Homo sapiens
CARDSLRLGELEAFDIW

SEQ ID NO: 32198 - protein, 18 aa, Homo sapiens
CARAGFTSSRFDTWLDPW

SEQ ID NO: 32199 - protein, 17 aa, Homo sapiens
CAGARYGSGFLGWTDPW

SEQ ID NO: 32200 - protein, 14 aa, Homo sapiens
CARENRSRPGFDHW

SEQ ID NO: 32201 - protein, 15 aa, Homo sapiens
CARALSSRYSSPDYW

SEQ ID NO: 32202 - protein, 15 aa, Homo sapiens
CARDAVGATGAIDYW

SEQ ID NO: 32203 - protein, 18 aa, Homo sapiens
CARERGYSGYEPVPFDYW

SEQ ID NO: 32204 - protein, 22 aa, Homo sapiens
CTTDPSDFGDYVWGSYRAVDYW

SEQ ID NO: 32205 - protein, 17 aa, Homo sapiens
CARHSGIIGYYYGMDVW

SEQ ID NO: 32206 - protein, 13 aa, Homo sapiens
CASGDGYNAHDYW

SEQ ID NO: 32207 - protein, 19 aa, Homo sapiens
CAREVPPSYDFWSGYLDYW

SEQ ID NO: 32208 - protein, 18 aa, Homo sapiens
CARIYDSSGYYYQESDYW

SEQ ID NO: 32209 - protein, 16 aa, Homo sapiens
CAKLTDMGDSSLLDYW

SEQ ID NO: 32210 - protein, 20 aa, Homo sapiens
CARDDYSNYDEYYYYGMDVW

SEQ ID NO: 32211 - protein, 16 aa, Homo sapiens
CARADPITMMDKGDYW

SEQ ID NO: 32212 - protein, 13 aa, Homo sapiens
CAKVGFMATMDYW

SEQ ID NO: 32213 - protein, 20 aa, Homo sapiens
CARPLYYYDSSGYYSAFDIW

SEQ ID NO: 32214 - protein, 25 aa, Homo sapiens
CARGMRYCSSTSCYPPYYYYGMDVW

SEQ ID NO: 32215 - protein, 19 aa, Homo sapiens
CAMIKGHCSGGTCYDLDYW

SEQ ID NO: 32216 - protein, 10 aa, Homo sapiens
CVRLYYMDYW

SEQ ID NO: 32217 - protein, 20 aa, Homo sapiens
CARDGEMLRWNSPMDSFDYW

SEQ ID NO: 32218 - protein, 16 aa, Homo sapiens
CARDIQTAPDHAFDIW

SEQ ID NO: 32219 - protein, 18 aa, Homo sapiens
CARNPNYYASPEGWFDSW

SEQ ID NO: 32220 - protein, 20 aa, Homo sapiens
CASLFSDHYGDMGVYYFDYW

SEQ ID NO: 32221 - protein, 17 aa, Homo sapiens
CARESRVDYYGSGHDYW

SEQ ID NO: 32222 - protein, 22 aa, Homo sapiens
CARATRYDILTGYPMYYGMDVW

SEQ ID NO: 32223 - protein, 17 aa, Homo sapiens
CARVGDSSGYWNWFDPW

SEQ ID NO: 32224 - protein, 18 aa, Homo sapiens
CARDKGQLESYYYGMDVW

SEQ ID NO: 32225 - protein, 19 aa, Homo sapiens
CAKDPTIVVVVAARELDYW

SEQ ID NO: 32226 - protein, 19 aa, Homo sapiens
CAKEGGLVPTTDSYCFDYW

SEQ ID NO: 32227 - protein, 17 aa, Homo sapiens
CAKSGTVAGVLGEIDYW

SEQ ID NO: 32228 - protein, 12 aa, Homo sapiens
CLRYNSAPLFSF

SEQ ID NO: 32229 - protein, 19 aa, Homo sapiens
CARDSGEDTMVPYNWFDHW

SEQ ID NO: 32230 - protein, 21 aa, Homo sapiens
CATSSVITFGGVIVSWWFDPW

SEQ ID NO: 32231 - protein, 19 aa, Homo sapiens
CARGDFDWLLAYQYYFDYW

SEQ ID NO: 32232 - protein, 18 aa, Homo sapiens
CAKLPTERGSGSYYTDYW

SEQ ID NO: 32233 - protein, 27 aa, Homo sapiens
CARGGITMVRGVIIETPIYYYYGMDVW

SEQ ID NO: 32234 - protein, 13 aa, Homo sapiens
CAKDLGYGYFDYW

SEQ ID NO: 32235 - protein, 22 aa, Homo sapiens
CAKDQATMVRGVIITFDAFDIW

SEQ ID NO: 32236 - protein, 16 aa, Homo sapiens
CVREVGTGGTWYFDSW

SEQ ID NO: 32237 - protein, 18 aa, Homo sapiens
CAKAGDYLWGTSRHFDSW

SEQ ID NO: 32238 - protein, 18 aa, Homo sapiens
CARRLWYGDPRYWSFDLW

SEQ ID NO: 32239 - protein, 19 aa, Homo sapiens
CAKVDPGGRDSSGSAVDYW

SEQ ID NO: 32240 - protein, 22 aa, Homo sapiens
CARGKGYCSSTSCQSGYYFDYW

SEQ ID NO: 32241 - protein, 18 aa, Homo sapiens
CARPYGSVLTGGNWFDPW

SEQ ID NO: 32242 - protein, 19 aa, Homo sapiens
CARLSPESPGKLLSQFDPW

SEQ ID NO: 32243 - protein, 18 aa, Homo sapiens
CARRPLASGPYYYGMDVW

SEQ ID NO: 32244 - protein, 15 aa, Homo sapiens
CARPSRYGGSTFDYW

SEQ ID NO: 32245 - protein, 11 aa, Homo sapiens
CRDSYNWVDPW

SEQ ID NO: 32246 - protein, 20 aa, Homo sapiens
CARSLIWFGGSDEADAFDIW

SEQ ID NO: 32247 - protein, 17 aa, Homo sapiens
CARFHCSGGRCLGFDPW

SEQ ID NO: 32248 - protein, 16 aa, Homo sapiens
CAREGDTAMVTYVDPW

SEQ ID NO: 32249 - protein, 13 aa, Homo sapiens
CARLRRLKWFDPW

SEQ ID NO: 32250 - protein, 16 aa, Homo sapiens
CARCQSSYALYYFDSW

SEQ ID NO: 32251 - protein, 19 aa, Homo sapiens
CAKVTGDGYSSGLGYFQHW

SEQ ID NO: 32252 - protein, 27 aa, Homo sapiens
CAKDIPPKYCSGGSCYPEYYYYGMDVW

SEQ ID NO: 32253 - protein, 15 aa, Homo sapiens
CAKGEDVGVAGPDYW

SEQ ID NO: 32254 - protein, 20 aa, Homo sapiens
CTTDLLGNAYSSGWPYFDYW

SEQ ID NO: 32255 - protein, 23 aa, Homo sapiens
CARDLNSYYDLLTGLNHRAFDIW

SEQ ID NO: 32256 - protein, 19 aa, Homo sapiens
CAHRGGSGWSGASEYFQHW

SEQ ID NO: 32257 - protein, 17 aa, Homo sapiens
CAKDRERITMARILDYW

SEQ ID NO: 32258 - protein, 15 aa, Homo sapiens
CAKDTPLDSSGLDYW

SEQ ID NO: 32259 - protein, 25 aa, Homo sapiens
CALTPGCTNGVCYTTYYYYYGMDVW

SEQ ID NO: 32260 - protein, 15 aa, Homo sapiens
CAKVDGGYDYVFDYW

SEQ ID NO: 32261 - protein, 14 aa, Homo sapiens
CARIEQWPVGFDYW

SEQ ID NO: 32262 - protein, 17 aa, Homo sapiens
CAKVLPTRRSFYAMDVW

SEQ ID NO: 32263 - protein, 17 aa, Homo sapiens
CAKVAGSSWSNDAFDIW

SEQ ID NO: 32264 - protein, 17 aa, Homo sapiens
CAASPGGDLWSGYFNYW

SEQ ID NO: 32265 - protein, 25 aa, Homo sapiens
CARLSRSSYDDILAGYPELNWFDPW

SEQ ID NO: 32266 - protein, 18 aa, Homo sapiens
CARGGGGELLDAMAFDYW

SEQ ID NO: 32267 - protein, 15 aa, Homo sapiens
CAKDPTSFSWYFDYW

SEQ ID NO: 32268 - protein, 19 aa, Homo sapiens
CAKDEAGIVVVPAGAFDIW

SEQ ID NO: 32269 - protein, 15 aa, Homo sapiens
CTRGDILTGYRFDPW

SEQ ID NO: 32270 - protein, 20 aa, Homo sapiens
CARFQWLVNPLSPLAAFDIW

SEQ ID NO: 32271 - protein, 16 aa, Homo sapiens
CTRDFGSGLSHFFDHW

SEQ ID NO: 32272 - protein, 14 aa, Homo sapiens
CARRNGGQKAFDLW

SEQ ID NO: 32273 - protein, 20 aa, Homo sapiens
CTRVSYFSQIHITAAGNDYW

SEQ ID NO: 32274 - protein, 24 aa, Homo sapiens
CAKSSDYESLFLGVYQYQFNFAYW

SEQ ID NO: 32275 - protein, 17 aa, Homo sapiens
CAKRGPIYTSGWFFDSW

SEQ ID NO: 32276 - protein, 15 aa, Homo sapiens
CSKESGPVPTYFDNW

SEQ ID NO: 32277 - protein, 25 aa, Homo sapiens
CANYSPYYDYVWGSYRPAYDAFDIW

SEQ ID NO: 32278 - protein, 16 aa, Homo sapiens
CASINSGSYRGAFDIW

SEQ ID NO: 32279 - protein, 12 aa, Homo sapiens
CATPLDGNFLYW

SEQ ID NO: 32280 - protein, 19 aa, Homo sapiens
CAKDKLPLTGSPEDYFDYW

SEQ ID NO: 32281 - protein, 14 aa, Homo sapiens
CARVGVISSPFDFW

SEQ ID NO: 32282 - protein, 29 aa, Homo sapiens
CAKDYFYYDILTGYFPAHKYYYYYGMDVW

SEQ ID NO: 32283 - protein, 25 aa, Homo sapiens
CAKDRLPLDDSYRSGPAPEDGMDVW

SEQ ID NO: 32284 - protein, 15 aa, Homo sapiens
CAKEYSSGRWFFDLW

SEQ ID NO: 32285 - protein, 19 aa, Homo sapiens
CARGTYYYDSSGLGLFDYW

SEQ ID NO: 32286 - protein, 20 aa, Homo sapiens
CAREGDPGSGWYYYYGMDVW

SEQ ID NO: 32287 - protein, 18 aa, Homo sapiens
CTKKKAFRGLSPSEFDYW

SEQ ID NO: 32288 - protein, 26 aa, Homo sapiens
CARDPGLRYFDWLFQASYYYYGMDVW

SEQ ID NO: 32289 - protein, 14 aa, Homo sapiens
CTLLGIVGALGDYW

SEQ ID NO: 32290 - protein, 17 aa, Homo sapiens
CASISWGYSSSSGFDYW

SEQ ID NO: 32291 - protein, 15 aa, Homo sapiens
CARLDEDGDQPFDYW

SEQ ID NO: 32292 - protein, 18 aa, Homo sapiens
CAKDRAHFRYLRGVPDYW

SEQ ID NO: 32293 - protein, 12 aa, Homo sapiens
CASGWPYLFDYW

SEQ ID NO: 32294 - protein, 23 aa, Homo sapiens
CAKPVGGYCSGGSCYSEDYFDYW

SEQ ID NO: 32295 - protein, 17 aa, Homo sapiens
CANLESGGNFYMAFDYW

SEQ ID NO: 32296 - protein, 15 aa, Homo sapiens
CASWQGGGDYYFDYW

SEQ ID NO: 32297 - protein, 23 aa, Homo sapiens
CARSYGGFCVGGSCLSLDDFDYW

SEQ ID NO: 32298 - protein, 18 aa, Homo sapiens
CVFRIAARPDYYYGMDVW

SEQ ID NO: 32299 - protein, 20 aa, Homo sapiens
CAKDFQYSGNYQWGYYFDYW

SEQ ID NO: 32300 - protein, 18 aa, Homo sapiens
CARRSRMMGLGYNALDVW

SEQ ID NO: 32301 - protein, 12 aa, Homo sapiens
CANLAGRGGDYW

SEQ ID NO: 32302 - protein, 18 aa, Homo sapiens
CVRGNYDSSGYYYWFDPW

SEQ ID NO: 32303 - protein, 16 aa, Homo sapiens
CAREGGDTARKYFDYW

SEQ ID NO: 32304 - protein, 20 aa, Homo sapiens
CATLELERTFYYYYYGMDVW

SEQ ID NO: 32305 - protein, 21 aa, Homo sapiens
CARRPEMGTSTEVGGDVFDSW

SEQ ID NO: 32306 - protein, 18 aa, Homo sapiens
CARDRNWGDYYYYGMDVW

SEQ ID NO: 32307 - protein, 21 aa, Homo sapiens
CASPRNPYYYDSSGYWGFDYW

SEQ ID NO: 32308 - protein, 22 aa, Homo sapiens
CAKLYLSESNYYYDSSGYSDYW

SEQ ID NO: 32309 - protein, 17 aa, Homo sapiens
CATRSPLVVVADNFDYW

SEQ ID NO: 32310 - protein, 15 aa, Homo sapiens
CAKRSSLGPHYFEDW

SEQ ID NO: 32311 - protein, 18 aa, Homo sapiens
CALLYEYVWGSYPNFDYW

SEQ ID NO: 32312 - protein, 14 aa, Homo sapiens
CATVGWFGEYFDNW

SEQ ID NO: 32313 - protein, 20 aa, Homo sapiens
CARVAENYDFWSGQNWFDPW

SEQ ID NO: 32314 - protein, 11 aa, Homo sapiens
CASPWIAFDIW

SEQ ID NO: 32315 - protein, 16 aa, Homo sapiens
CAREGTGTTGEWFDPW

SEQ ID NO: 32316 - protein, 15 aa, Homo sapiens
CARLPTSQTNTLDYW

SEQ ID NO: 32317 - protein, 20 aa, Homo sapiens
CARVVRLFVNHDSTVHFDFW

SEQ ID NO: 32318 - protein, 23 aa, Homo sapiens
CARGHICSGGSCYSEYYYGMDVW

SEQ ID NO: 32319 - protein, 23 aa, Homo sapiens
CARHKDIYDLVSGYSGNYAMDVW

SEQ ID NO: 32320 - protein, 23 aa, Homo sapiens
CARTYYYDSSPLGWDYYYGMDVW

SEQ ID NO: 32321 - protein, 15 aa, Homo sapiens
CAKDMGILEWVFDYW

SEQ ID NO: 32322 - protein, 18 aa, Homo sapiens
CAREEKAARNPPPAFDFW

SEQ ID NO: 32323 - protein, 17 aa, Homo sapiens
CARGGLRGAVIAHFDYW

SEQ ID NO: 32324 - protein, 18 aa, Homo sapiens
CAKDKFRDYESPSRLDYW

SEQ ID NO: 32325 - protein, 21 aa, Homo sapiens
CAKDNYDILTGYYTFNWFDPW

SEQ ID NO: 32326 - protein, 16 aa, Homo sapiens
CARGWYDTTSVWFDSW

SEQ ID NO: 32327 - protein, 18 aa, Homo sapiens
CARSLWFGELFPYYFDYW

SEQ ID NO: 32328 - protein, 25 aa, Homo sapiens
CAAENPGGCSGGSCYSNYYYGMDVW

SEQ ID NO: 32329 - protein, 17 aa, Homo sapiens
CATGFLEGYYKYYFDYW

SEQ ID NO: 32330 - protein, 18 aa, Homo sapiens
CATMLSFWGGSYGAFDIW

SEQ ID NO: 32331 - protein, 20 aa, Homo sapiens
CARVRGFFDGLFTGDWLDPW

SEQ ID NO: 32332 - protein, 18 aa, Homo sapiens
CAREPLDSGSSMYYFDYW

SEQ ID NO: 32333 - protein, 14 aa, Homo sapiens
CAKDGSNYDWFDPW

SEQ ID NO: 32334 - protein, 20 aa, Homo sapiens
CAREIYGSGSYYNLYYFDYW

SEQ ID NO: 32335 - protein, 29 aa, Homo sapiens
CARDPWGGADTAMVLGFRYKYYYYGMDVW

SEQ ID NO: 32336 - protein, 21 aa, Homo sapiens
CAKDPQFGELLLTADWYFDLW

SEQ ID NO: 32337 - protein, 18 aa, Homo sapiens
CAKARSTLLLLRSALDVW

SEQ ID NO: 32338 - protein, 15 aa, Homo sapiens
CARAQDRHYFAMDVW

SEQ ID NO: 32339 - protein, 16 aa, Homo sapiens
CAKSWGGSYFAFFDYW

SEQ ID NO: 32340 - protein, 13 aa, Homo sapiens
CQAWDRDTALYVF

SEQ ID NO: 32341 - protein, 16 aa, Homo sapiens
CARPHSGSYRTASDYW

SEQ ID NO: 32342 - protein, 30 aa, Homo sapiens
CVRRFYYGLGRSPDPVGGTSLIPSNAFDIW

SEQ ID NO: 32343 - protein, 13 aa, Homo sapiens
CQHLNSFPPMYAF

SEQ ID NO: 32344 - protein, 25 aa, Homo sapiens
CALPICLRGMYQYESAGYRGWLDPW

SEQ ID NO: 32345 - protein, 14 aa, Homo sapiens
CARAAYDSSYFDYW

SEQ ID NO: 32346 - protein, 16 aa, Homo sapiens
CAHRRPGFRSPAFDIW

SEQ ID NO: 32347 - protein, 16 aa, Homo sapiens
CAKGFDGYGVPSFDSW

SEQ ID NO: 32348 - protein, 20 aa, Homo sapiens
CARDARGGQQLVRNWYFDLW

SEQ ID NO: 32349 - protein, 19 aa, Homo sapiens
CARDLNPDIVVVLAAADVW

SEQ ID NO: 32350 - protein, 12 aa, Homo sapiens
CASMGATRFDPW

SEQ ID NO: 32351 - protein, 19 aa, Homo sapiens
CAREFWGGFYRGGYHLDYW

SEQ ID NO: 32352 - protein, 18 aa, Homo sapiens
CAKAQEQWLVPKAGFDYW

SEQ ID NO: 32353 - protein, 17 aa, Homo sapiens
CVRDYDSAGHYVYFQHW

SEQ ID NO: 32354 - protein, 24 aa, Homo sapiens
CARSYYGSGSSYNYKYYYYGMDVW

SEQ ID NO: 32355 - protein, 24 aa, Homo sapiens
CARDLGASYDILTGYYRVGAFDIW

SEQ ID NO: 32356 - protein, 17 aa, Homo sapiens
CARDLSDNWNDYWFDYW

SEQ ID NO: 32357 - protein, 16 aa, Homo sapiens
CAKDLVPAPMGGLDYW

SEQ ID NO: 32358 - protein, 17 aa, Homo sapiens
CASHRTHIAAAGAFDYW

SEQ ID NO: 32359 - protein, 13 aa, Homo sapiens
CACRQLSGAFDIW

SEQ ID NO: 32360 - protein, 27 aa, Homo sapiens
CARGFPYCSDVTGCHSELFYYNAMDVW

SEQ ID NO: 32361 - protein, 17 aa, Homo sapiens
CAKDKIGGDGYWVFDYW

SEQ ID NO: 32362 - protein, 20 aa, Homo sapiens
CAKDYMITFGGVIEGWFDPW

SEQ ID NO: 32363 - protein, 16 aa, Homo sapiens
CAHVDYGDNGELFDFW

SEQ ID NO: 32364 - protein, 20 aa, Homo sapiens
CAREVLMVYANYYYYGMDVW

SEQ ID NO: 32365 - protein, 17 aa, Homo sapiens
CAKADEYSSFRGTFDYW

SEQ ID NO: 32366 - protein, 23 aa, Homo sapiens
CAKGGHITMIVVAILQGYYFDYW

SEQ ID NO: 32367 - protein, 14 aa, Homo sapiens
CTKIAAAGTNSDYW

SEQ ID NO: 32368 - protein, 14 aa, Homo sapiens
CTRDTIFDGIPDYW

SEQ ID NO: 32369 - protein, 21 aa, Homo sapiens
CAHNTLYCSGGSCYPDAFDIW

SEQ ID NO: 32370 - protein, 19 aa, Homo sapiens
CAALYDSSAIGDSDGMDVW

SEQ ID NO: 32371 - protein, 21 aa, Homo sapiens
CARTQYYYDSSGYYPLDFDYW

SEQ ID NO: 32372 - protein, 18 aa, Homo sapiens
CARALGSSDGWDPRFDYW

SEQ ID NO: 32373 - protein, 20 aa, Homo sapiens
CARDRGYNWNYTYYYGMDVW

SEQ ID NO: 32374 - protein, 18 aa, Homo sapiens
CASHMGKDFIVAGGCDYW

SEQ ID NO: 32375 - protein, 21 aa, Homo sapiens
CARDLAPIVGAPHYYYGMDVW

SEQ ID NO: 32376 - protein, 13 aa, Homo sapiens
CQSYDSRNEKWVF

SEQ ID NO: 32377 - protein, 26 aa, Homo sapiens
CVRPRDIPTDRGVRVTPGLWWWFESW

SEQ ID NO: 32378 - protein, 18 aa, Homo sapiens
CAKDMDSGYDGYRWFDPW

SEQ ID NO: 32379 - protein, 16 aa, Homo sapiens
CARTSIAAAGTALDYW

SEQ ID NO: 32380 - protein, 14 aa, Homo sapiens
CVRESGYVNLFDFW

SEQ ID NO: 32381 - protein, 16 aa, Homo sapiens
CAKAKITMIVVAPDYW

SEQ ID NO: 32382 - protein, 15 aa, Homo sapiens
CAKGRSSIFDAFNFW

SEQ ID NO: 32383 - protein, 16 aa, Homo sapiens
CARRRGPSVDDAFDIW

SEQ ID NO: 32384 - protein, 19 aa, Homo sapiens
CAKIGTYYYDSSGSRGDYW

SEQ ID NO: 32385 - protein, 17 aa, Homo sapiens
CATSRYLYGTPDWFDPW

SEQ ID NO: 32386 - protein, 14 aa, Homo sapiens
CAIWFGESSEDDYW

SEQ ID NO: 32387 - protein, 15 aa, Homo sapiens
CAKDLELMVYAFDYW

SEQ ID NO: 32388 - protein, 21 aa, Homo sapiens
CARDQGPPGLFVAYYYGMDVW

SEQ ID NO: 32389 - protein, 19 aa, Homo sapiens
CARLAKSGTTIRGGWFDPW

SEQ ID NO: 32390 - protein, 14 aa, Homo sapiens
CATDPLWIRVFDPW

SEQ ID NO: 32391 - protein, 17 aa, Homo sapiens
CCVRASGVGADDAFDIW

SEQ ID NO: 32392 - protein, 20 aa, Homo sapiens
CAKDIIAITMVRGVTYFDYW

SEQ ID NO: 32393 - protein, 20 aa, Homo sapiens
CARDPDDSSFGTGYDALDFW

SEQ ID NO: 32394 - protein, 23 aa, Homo sapiens
CASSGSPLGGWLQNRRGYYFDYW

SEQ ID NO: 32395 - protein, 15 aa, Homo sapiens
CAKEGGWPNNGLDYW

SEQ ID NO: 32396 - protein, 17 aa, Homo sapiens
CARDSRIQLWQDAFDIW

SEQ ID NO: 32397 - protein, 21 aa, Homo sapiens
CATRPSGRVDWSTSSTAFDIW

SEQ ID NO: 32398 - protein, 13 aa, Homo sapiens
CASLLQWDLPDYW

SEQ ID NO: 32399 - protein, 19 aa, Homo sapiens
CATECTTSCPGPNRGFDYW

SEQ ID NO: 32400 - protein, 14 aa, Homo sapiens
CGAWDDTLNGLYVF

SEQ ID NO: 32401 - protein, 18 aa, Homo sapiens
CVTYYDVFTGYYYHFDYW

SEQ ID NO: 32402 - protein, 16 aa, Homo sapiens
CAKDMRATTPGPFDYW

SEQ ID NO: 32403 - protein, 15 aa, Homo sapiens
CARMWAIYAGAFDIW

SEQ ID NO: 32404 - protein, 17 aa, Homo sapiens
CARANRRHFSDGYFDYW

SEQ ID NO: 32405 - protein, 16 aa, Homo sapiens [sequence omitted]

SEQ ID NO: 32406 - protein, 13 aa, Homo sapiens
CARDDRGSHLDYW

SEQ ID NO: 32407 - protein, 14 aa, Homo sapiens
CAREPPEKYYFDYW

SEQ ID NO: 32408 - protein, 17 aa, Homo sapiens
CAKDGYSSSSEGWFDPW

SEQ ID NO: 32409 - protein, 16 aa, Homo sapiens
CARGNLPAAGGAFDIW

SEQ ID NO: 32410 - protein, 14 aa, Homo sapiens
CAREGEIILFLDYW

SEQ ID NO: 32411 - protein, 17 aa, Homo sapiens
CARALGAKDYYYGMDVW

SEQ ID NO: 32412 - protein, 16 aa, Homo sapiens
CANGGVASYYYGMDVW

SEQ ID NO: 32413 - protein, 27 aa, Homo sapiens
CAKVTVDSSGYYYGQRPSVENYYFDYW

SEQ ID NO: 32414 - protein, 22 aa, Homo sapiens
CANLAVHYYDSSGYYDDAFDIW

SEQ ID NO: 32415 - protein, 21 aa, Homo sapiens
CARISGDLRGGYYRYYGMDVW

SEQ ID NO: 32416 - protein, 19 aa, Homo sapiens
CARDWGPQWLQSYDAMDVW

SEQ ID NO: 32417 - protein, 13 aa, Homo sapiens
CLSADSSRTAVIF

SEQ ID NO: 32418 - protein, 18 aa, Homo sapiens
CARIGQYCSGGSCYFDHW

SEQ ID NO: 32419 - protein, 21 aa, Homo sapiens
CARDRSDSWSLDYYYDGMDVW

SEQ ID NO: 32420 - protein, 12 aa, Homo sapiens [sequence omitted]

SEQ ID NO: 32421 - protein, 15 aa, Homo sapiens
CARDDFGVHDTFDLW

SEQ ID NO: 32422 - protein, 31 aa, Homo sapiens
CARDGRYFDWANYMTETTNSYYYYYYGMDVW

SEQ ID NO: 32423 - protein, 15 aa, Homo sapiens
CMRQMGMGRWYFDYW

SEQ ID NO: 32424 - protein, 21 aa, Homo sapiens
CARSSPIILDPASVVNVFDIW

SEQ ID NO: 32425 - protein, 18 aa, Homo sapiens
CATWSKSWYYYYYGLDVW

SEQ ID NO: 32426 - protein, 23 aa, Homo sapiens
CARLREFCDGATCYAAVNYFDFW

SEQ ID NO: 32427 - protein, 21 aa, Homo sapiens
CATLWFGEHMPVDYYYGMDVW

SEQ ID NO: 32428 - protein, 17 aa, Homo sapiens
CARGPFGDLLGYYFDLW

SEQ ID NO: 32429 - protein, 17 aa, Homo sapiens
CAKQGVEQLVEFYFDYW

SEQ ID NO: 32430 - protein, 17 aa, Homo sapiens
CAKAGYSDYDYEWFDPW

SEQ ID NO: 32431 - protein, 15 aa, Homo sapiens
CARGCSGGNCNADYW

SEQ ID NO: 32432 - protein, 22 aa, Homo sapiens
CTTAVGPDNNIVTGYYKTFDNW

SEQ ID NO: 32433 - protein, 19 aa, Homo sapiens
CTRDRGGSYSGGYNWFDPW

SEQ ID NO: 32434 - protein, 18 aa, Homo sapiens
CARGCSSTSCYYNWFDPW

SEQ ID NO: 32435 - protein, 19 aa, Homo sapiens
CAKAHEVAVYYYYYGMDVW

SEQ ID NO: 32436 - protein, 17 aa, Homo sapiens
CARLPGIAVAGYVFDYW

SEQ ID NO: 32437 - protein, 17 aa, Homo sapiens
CVKGSNSGWYYVALDYW

SEQ ID NO: 32438 - protein, 19 aa, Homo sapiens
CARAPIWFGETETGSFDIW

SEQ ID NO: 32439 - protein, 16 aa, Homo sapiens
CARAGYGSEEGWFDPW

SEQ ID NO: 32440 - protein, 14 aa, Homo sapiens
CMQALQTPPVICTF

SEQ ID NO: 32441 - protein, 17 aa, Homo sapiens
CARALNGGSYYEGFDYW

SEQ ID NO: 32442 - protein, 19 aa, Homo sapiens
CARGWITLVRGVVNWFDPW

SEQ ID NO: 32443 - protein, 18 aa, Homo sapiens
CAKDEATRVYGDYYFDYW

SEQ ID NO: 32444 - protein, 18 aa, Homo sapiens
CAHRLWGSGYSRYGFDYW

SEQ ID NO: 32445 - protein, 14 aa, Homo sapiens
CARGFRGVYATDYW

SEQ ID NO: 32446 - protein, 22 aa, Homo sapiens
CAKDYEDIVVVPAAPGYYFDYW

SEQ ID NO: 32447 - protein, 10 aa, Homo sapiens
CVGGYFDDYW

SEQ ID NO: 32448 - protein, 15 aa, Homo sapiens
CAGYGSGSGLGFDPW

SEQ ID NO: 32449 - protein, 19 aa, Homo sapiens
CAKTNYDSSGYRVGYFDYW

SEQ ID NO: 32450 - protein, 23 aa, Homo sapiens
CARSRLPSLYGDSASASFYFQYW

SEQ ID NO: 32451 - protein, 22 aa, Homo sapiens
CARVHPKYEWLALYYYYGMDVW

SEQ ID NO: 32452 - protein, 18 aa, Homo sapiens
CARGLDYRHYYYYGMDVW

SEQ ID NO: 32453 - protein, 17 aa, Homo sapiens
CAKDFGYDSSGYYFDYW

SEQ ID NO: 32454 - protein, 27 aa, Homo sapiens
CARESNGLGTYYDILTGYFLHKAFDYW

SEQ ID NO: 32455 - protein, 15 aa, Homo sapiens [sequence omitted]

SEQ ID NO: 32456 - protein, 25 aa, Homo sapiens
CVRDAYCTNVNCFPSRSLENVFDLW

SEQ ID NO: 32457 - protein, 24 aa, Homo sapiens
CAKEGYYGSGSYYKIYYYYGMDVW

SEQ ID NO: 32458 - protein, 20 aa, Homo sapiens
CAHRRRYCTSVTCFFGFDIW

SEQ ID NO: 32459 - protein, 13 aa, Homo sapiens
CAHRRAATGIDYW

SEQ ID NO: 32460 - protein, 18 aa, Homo sapiens
CATVGYSSSWYDDAFDIW

SEQ ID NO: 32461 - protein, 19 aa, Homo sapiens
CATLLGYCSSTSCSPFDYW

SEQ ID NO: 32462 - protein, 18 aa, Homo sapiens
CVKYDGAAVAGTSHFDSW

SEQ ID NO: 32463 - protein, 22 aa, Homo sapiens
CARTPPTPDSRFYYYYYGMDVW

SEQ ID NO: 32464 - protein, 12 aa, Homo sapiens
CTRSNYYALDVW

SEQ ID NO: 32465 - protein, 16 aa, Homo sapiens
CAKGYTSQVLSTADYW

SEQ ID NO: 32466 - protein, 19 aa, Homo sapiens
CAALDYGDSHTGYNWFDPW

SEQ ID NO: 32467 - protein, 20 aa, Homo sapiens
CASVAAADPETYYYYGMDVW

SEQ ID NO: 32468 - protein, 20 aa, Homo sapiens
CARPESTGSRDGYRHSFDYW

SEQ ID NO: 32469 - protein, 15 aa, Homo sapiens
CAVAVAGSGVSFDIW

SEQ ID NO: 32470 - protein, 17 aa, Homo sapiens
CVRGSLWFGELQGFDPW

SEQ ID NO: 32471 - protein, 27 aa, Homo sapiens
CARDKIRDCSGGSCHTIDYYYYGMDVW

SEQ ID NO: 32472 - protein, 17 aa, Homo sapiens
CAKESNDNSPFRHFDSW

SEQ ID NO: 32473 - protein, 16 aa, Homo sapiens
CARDGPVLTGSCPDYW

SEQ ID NO: 32474 - protein, 25 aa, Homo sapiens
CASPWGCSSTSCYDPFYYYYGMDVW

SEQ ID NO: 32475 - protein, 13 aa, Homo sapiens [sequence omitted]

SEQ ID NO: 32476 - protein, 27 aa, Homo sapiens
CARTYSYGPHFYYDSSGYYYNDAFDIW

SEQ ID NO: 32477 - protein, 13 aa, Homo sapiens
CLVHQYYYGMDVW

SEQ ID NO: 32478 - protein, 23 aa, Homo sapiens
CARADYDILTGSKVEYYYGMDVW

SEQ ID NO: 32479 - protein, 22 aa, Homo sapiens
CARATDRFNFDSSGYSLPFDVW

SEQ ID NO: 32480 - protein, 18 aa, Homo sapiens
CVRDDVGRCSGGTCFDPW

SEQ ID NO: 32481 - protein, 15 aa, Homo sapiens
CAKDIYPSLYYFDYW

SEQ ID NO: 32482 - protein, 28 aa, Homo sapiens
CARDHPFYYDSSGYYYAPNYYYYGMDVW

SEQ ID NO: 32483 - protein, 15 aa, Homo sapiens
CAREGYYDSRAFDIW

SEQ ID NO: 32484 - protein, 20 aa, Homo sapiens
CATGPPYCSSTSCPNWFDPW

SEQ ID NO: 32485 - protein, 16 aa, Homo sapiens
CAKDAGRNGAELFDFW

SEQ ID NO: 32486 - protein, 16 aa, Homo sapiens
CATAPVVTTSYWFDPW

SEQ ID NO: 32487 - protein, 24 aa, Homo sapiens
CARDPLGYCSSTSCPWYYYGMDVW

SEQ ID NO: 32488 - protein, 14 aa, Homo sapiens
CAKLPRWDSNYDYW

SEQ ID NO: 32489 - protein, 22 aa, Homo sapiens
CARDGFTGTTQSGYRYYGMDVW

SEQ ID NO: 32490 - protein, 21 aa, Homo sapiens
CARGGCSSTSCYVVGDWFDPW

SEQ ID NO: 32491 - protein, 19 aa, Homo sapiens
CAREGGCSGGSCYGKFDPW

SEQ ID NO: 32492 - protein, 17 aa, Homo sapiens
CATSSSWPHYYYGMDVW

SEQ ID NO: 32493 - protein, 19 aa, Homo sapiens
CAITLSPGGYSHYYGFDVW

SEQ ID NO: 32494 - protein, 26 aa, Homo sapiens
CARGSIAVAGTGDTEYYYYYYGMDVW

SEQ ID NO: 32495 - protein, 23 aa, Homo sapiens
CAKHPYYGAVLRFLEWRNWFDPW

SEQ ID NO: 32496 - protein, 25 aa, Homo sapiens
CATAPVLRDILTGYSQSYYYGMDVW

SEQ ID NO: 32497 - protein, 19 aa, Homo sapiens
CARDLDDSETLYYGFYDYW

SEQ ID NO: 32498 - protein, 30 aa, Homo sapiens
CSLKASDSAIYYCAKYARPTYYYNYAVDVW

SEQ ID NO: 32499 - protein, 18 aa, Homo sapiens
CARHPVYCSSDSCYFDYW

SEQ ID NO: 32500 - protein, 18 aa, Homo sapiens
CAKEGVGSGSYSDAFDIW

SEQ ID NO: 32501 - protein, 18 aa, Homo sapiens
CARPGVSAATQYWYFDLW

SEQ ID NO: 32502 - protein, 14 aa, Homo sapiens
CATYFDWLTFFDSW

SEQ ID NO: 32503 - protein, 18 aa, Homo sapiens
CATSWAYCGGDCYPFDYW

SEQ ID NO: 32504 - protein, 18 aa, Homo sapiens
CATEYPYDFWSGPLFDYW

SEQ ID NO: 32505 - protein, 14 aa, Homo sapiens
CQSYDSDLRGDVLF

SEQ ID NO: 32506 - protein, 20 aa, Homo sapiens
CARIRYCSSTSCLVGYFDYW

SEQ ID NO: 32507 - protein, 16 aa, Homo sapiens
CARYFGSGVSDWFDPW

SEQ ID NO: 32508 - protein, 19 aa, Homo sapiens
CAKDHWYQDIVVGAAFDIW

SEQ ID NO: 32509 - protein, 20 aa, Homo sapiens
CAKDHYDYVWGSYRIPFDYW

SEQ ID NO: 32510 - protein, 21 aa, Homo sapiens
CARVLRQEYFWSGPTGWFDPW

SEQ ID NO: 32511 - protein, 16 aa, Homo sapiens
CATANPMVRANWFDPW

SEQ ID NO: 32512 - protein, 14 aa, Homo sapiens
CAKISYDGYNSDYW

SEQ ID NO: 32513 - protein, 23 aa, Homo sapiens
CARDRNSVVVVPADYYYYALDVW

SEQ ID NO: 32514 - protein, 27 aa, Homo sapiens
CATASVKDHHYYDTGSPSYYYYGMDVW

SEQ ID NO: 32515 - protein, 21 aa, Homo sapiens
CARAPIDDILTGTGWNWFDPW

SEQ ID NO: 32516 - protein, 19 aa, Homo sapiens
CARGFYDILTGYYYGMDVW

SEQ ID NO: 32517 - protein, 15 aa, Homo sapiens
CARDSGFWTGYYDYW

SEQ ID NO: 32518 - protein, 22 aa, Homo sapiens
CAGGYDSSGYYYANYYYGMDVW

SEQ ID NO: 32519 - protein, 16 aa, Homo sapiens
CAKATVTLENRYFDYW

SEQ ID NO: 32520 - protein, 14 aa, Homo sapiens
CARYSSGWPALDYW

SEQ ID NO: 32521 - protein, 21 aa, Homo sapiens
CASRTWIQLWYSYYYYGMDVW

SEQ ID NO: 32522 - protein, 13 aa, Homo sapiens
CQVWESSSEHYVF

SEQ ID NO: 32523 - protein, 24 aa, Homo sapiens
CARDFTIVVVPAAIEDYYYGMDVW

SEQ ID NO: 32524 - protein, 17 aa, Homo sapiens
CTRFIYCSGGSCYFDYW

SEQ ID NO: 32525 - protein, 12 aa, Homo sapiens
CVKGTWTWFDPW

SEQ ID NO: 32526 - protein, 19 aa, Homo sapiens
CAKGAQGYSGYANDAFDIW

SEQ ID NO: 32527 - protein, 22 aa, Homo sapiens
CAKDPGGYYDSSGYYGWYFDLW

SEQ ID NO: 32528 - protein, 21 aa, Homo sapiens
CARDPSLGYCSGGSCPPLDYW

SEQ ID NO: 32529 - protein, 16 aa, Homo sapiens
CARLPPWGGRWYFDLW

SEQ ID NO: 32530 - protein, 20 aa, Homo sapiens
CAKENRDGYSSSWPGWFDPW

SEQ ID NO: 32531 - protein, 25 aa, Homo sapiens
CARGGRYYYDSSGYYFDYYYGMDVW

SEQ ID NO: 32532 - protein, 21 aa, Homo sapiens
CAKQRHFMIVGPTTIDWFDPW

SEQ ID NO: 32533 - protein, 17 aa, Homo sapiens
CAREEVGAGPNNDFDFW

SEQ ID NO: 32534 - protein, 17 aa, Homo sapiens
CVKDLYDSSGFHYFDSW

SEQ ID NO: 32535 - protein, 19 aa, Homo sapiens
CARDPTTVTTGPLCAFDIW

SEQ ID NO: 32536 - protein, 19 aa, Homo sapiens
CAKDTYRQWLVLSWYFDLW

SEQ ID NO: 32537 - protein, 22 aa, Homo sapiens
CARASVLDWLFRSEIGGWFDPW

SEQ ID NO: 32538 - protein, 20 aa, Homo sapiens
CAKASGILWFGEGRGAFEIW

SEQ ID NO: 32539 - protein, 22 aa, Homo sapiens
CARHPPATEGYGFYYYNGMDVW

SEQ ID NO: 32540 - protein, 18 aa, Homo sapiens
CAREGIVGATTGPDFDYW

SEQ ID NO: 32541 - protein, 17 aa, Homo sapiens
CARDFVRGYGGNAFDIW

SEQ ID NO: 32542 - protein, 15 aa, Homo sapiens
CAKEDVDKGFYFDSW

SEQ ID NO: 32543 - protein, 16 aa, Homo sapiens
CASRQYSSGWHAFDIW

SEQ ID NO: 32544 - protein, 14 aa, Homo sapiens
CASELWFGELWDYW

SEQ ID NO: 32545 - protein, 15 aa, Homo sapiens
CARVTRWWSDAFDIW

SEQ ID NO: 32546 - protein, 23 aa, Homo sapiens
CATAPVLLWSSSKYYYYYGMDVW

SEQ ID NO: 32547 - protein, 16 aa, Homo sapiens
CAKDNWAAFGKYFDYW

SEQ ID NO: 32548 - protein, 19 aa, Homo sapiens
CARPSPTYSDSSSYFFDSW

SEQ ID NO: 32549 - protein, 15 aa, Homo sapiens
CAKDRRSYSNACDYW

SEQ ID NO: 32550 - protein, 19 aa, Homo sapiens
CARDLDGDPFYYYYGMDVW

SEQ ID NO: 32551 - protein, 17 aa, Homo sapiens
CAKDWGARMVGDWFDPW

SEQ ID NO: 32552 - protein, 27 aa, Homo sapiens
CARDKGPSSIASNPRLLTYYYYGMDVW

SEQ ID NO: 32553 - protein, 15 aa, Homo sapiens
CAKLSGSYYEMSDYW

SEQ ID NO: 32554 - protein, 20 aa, Homo sapiens
CAKDRGTGDIVIQGSYFDYW

SEQ ID NO: 32555 - protein, 17 aa, Homo sapiens
CAKGTAATGLTPRLDYW

SEQ ID NO: 32556 - protein, 26 aa, Homo sapiens
CAKGLDYYDSSGYYSIGYYYYGMDVW

SEQ ID NO: 32557 - protein, 18 aa, Homo sapiens
CAKDPIRDGYNYGAPDYW

SEQ ID NO: 32558 - protein, 16 aa, Homo sapiens
CAKDGEATTLDFFDHW

SEQ ID NO: 32559 - protein, 24 aa, Homo sapiens
CTTDPELYYDILTGLRLRNWFDPW

SEQ ID NO: 32560 - protein, 13 aa, Homo sapiens
CATDSAGVYFDSW

SEQ ID NO: 32561 - protein, 15 aa, Homo sapiens
CASGSNFDWLSADYW

SEQ ID NO: 32562 - protein, 16 aa, Homo sapiens
CAATSGYSSSWYCDFW

SEQ ID NO: 32563 - protein, 15 aa, Homo sapiens
CARSLAAAVLWFDPW

SEQ ID NO: 32564 - protein, 15 aa, Homo sapiens
CAKPAHLVYNYFDPW

SEQ ID NO: 32565 - protein, 14 aa, Homo sapiens
CAKAGGYSSPSDYW

SEQ ID NO: 32566 - protein, 17 aa, Homo sapiens
CVKDVGQTTVTRYFDLW

SEQ ID NO: 32567 - protein, 22 aa, Homo sapiens
CAKLPYYYDSSGWGYYYGMDVW

SEQ ID NO: 32568 - protein, 18 aa, Homo sapiens
CARLTYCSGGSCGWFDPW

SEQ ID NO: 32569 - protein, 18 aa, Homo sapiens
CVKGGGRGLEWLLNFDSW

SEQ ID NO: 32570 - protein, 14 aa, Homo sapiens
CASALVWVGMIDYW

SEQ ID NO: 32571 - protein, 16 aa, Homo sapiens
CARLMVYAPSYYFDYW

SEQ ID NO: 32572 - protein, 22 aa, Homo sapiens
CARGAPGIRTIFGVVIRYFDYW

SEQ ID NO: 32573 - protein, 15 aa, Homo sapiens
CARVLTDTDRYLKYW

SEQ ID NO: 32574 - protein, 16 aa, Homo sapiens
CAKDIGDSSGSNFDYW

SEQ ID NO: 32575 - protein, 19 aa, Homo sapiens
CARSTSERYFGSYGWFDPW

SEQ ID NO: 32576 - protein, 22 aa, Homo sapiens
CAKARVDVIVTPPGYYYGMDVW

SEQ ID NO: 32577 - protein, 18 aa, Homo sapiens
CAKDLWGVVVMGVGFDYW

SEQ ID NO: 32578 - protein, 15 aa, Homo sapiens
CAREPVGGYVVFDYW

SEQ ID NO: 32579 - protein, 10 aa, Homo sapiens
CVTWELSDYW

SEQ ID NO: 32580 - protein, 13 aa, Homo sapiens
CQSSDRSGIDVLF

SEQ ID NO: 32581 - protein, 19 aa, Homo sapiens
CAHTHMVRGVGYYYGMDVW

SEQ ID NO: 32582 - protein, 17 aa, Homo sapiens
CVRGRHSSSPYRYFLYW

SEQ ID NO: 32583 - protein, 14 aa, Homo sapiens
CAAWDDSSDGLCAF

SEQ ID NO: 32584 - protein, 17 aa, Homo sapiens
CAKDIFDYGDYGLADYW

SEQ ID NO: 32585 - protein, 13 aa, Homo sapiens
CARTYTTVSFDYW

SEQ ID NO: 32586 - protein, 19 aa, Homo sapiens
CAREDCSGDGCRRGAFDIW

SEQ ID NO: 32587 - protein, 12 aa, Homo sapiens [sequence omitted]

SEQ ID NO: 32588 - protein, 20 aa, Homo sapiens
CARDCSSTSCYPNSDAFDIW

SEQ ID NO: 32589 - protein, 18 aa, Homo sapiens
CASGGFDSGYDRNWFDPW

SEQ ID NO: 32590 - protein, 16 aa, Homo sapiens
CATVGISGWYSGDDYW

SEQ ID NO: 32591 - protein, 15 aa, Homo sapiens
CAKLIDWNDVYFDYW

SEQ ID NO: 32592 - protein, 16 aa, Homo sapiens
CATSSAAAGTGWFDPW

SEQ ID NO: 32593 - protein, 18 aa, Homo sapiens
CARDGDGEQWFQYYFDYW

SEQ ID NO: 32594 - protein, 22 aa, Homo sapiens
CVRLDDYVWGSVDKGQNWFDPW

SEQ ID NO: 32595 - protein, 19 aa, Homo sapiens
CARGARVGYFDWGNWFDPW

SEQ ID NO: 32596 - protein, 19 aa, Homo sapiens
CARMNSYFEDSSGFYYDHW

SEQ ID NO: 32597 - protein, 16 aa, Homo sapiens
CVKDVGWAVANGFDHW

SEQ ID NO: 32598 - protein, 24 aa, Homo sapiens
CAKDASPFSLAIMTVTESEYFLSW

SEQ ID NO: 32599 - protein, 20 aa, Homo sapiens
CAKDYYDSSDSPYYYGMDVW

SEQ ID NO: 32600 - protein, 13 aa, Homo sapiens
CQQYNSYSSFGTF

SEQ ID NO: 32601 - protein, 21 aa, Homo sapiens
CAKDLNVLLWFGDPPRGFDYW

SEQ ID NO: 32602 - protein, 23 aa, Homo sapiens
CARHCTYYYDSSGYYYVRFFDYW

SEQ ID NO: 32603 - protein, 17 aa, Homo sapiens
CAKDRRTAYSTYAFDIW

SEQ ID NO: 32604 - protein, 26 aa, Homo sapiens
CARHIRTEYSSSWYTPYYYYYGMDVW

SEQ ID NO: 32605 - protein, 18 aa, Homo sapiens
CVKGGGGYDAPGNWLDSW

SEQ ID NO: 32606 - protein, 34 aa, Homo sapiens
CARLSWGDSSSPQNGPLIPRLGSDVYYYYGMDVW

SEQ ID NO: 32607 - protein, 21 aa, Homo sapiens
CARVLVVRGVIVYYYYGMDVW

SEQ ID NO: 32608 - protein, 22 aa, Homo sapiens
CAREKGTSYGDYGPYYYGMDVW

SEQ ID NO: 32609 - protein, 13 aa, Homo sapiens
CATVATPYPFDIW

SEQ ID NO: 32610 - protein, 23 aa, Homo sapiens
CARDRAPYYYGSGSLYYYGMDVW

SEQ ID NO: 32611 - protein, 19 aa, Homo sapiens
CAKDRHLYSGSLAGAMDVW

SEQ ID NO: 32612 - protein, 23 aa, Homo sapiens
CAKDKDCSSTSCYGVGGDAFDIW

SEQ ID NO: 32613 - protein, 22 aa, Homo sapiens
CARYYYDSSGYWGPVENYFDYW

SEQ ID NO: 32614 - protein, 16 aa, Homo sapiens
CARDNWNYNPFVFDYW

SEQ ID NO: 32615 - protein, 16 aa, Homo sapiens
CARDTLYGDLGRFDFW

SEQ ID NO: 32616 - protein, 19 aa, Homo sapiens
CARDTLHAVLTGYYTSDYW

SEQ ID NO: 32617 - protein, 16 aa, Homo sapiens
CARDRVGGDGDALDVW

SEQ ID NO: 32618 - protein, 16 aa, Homo sapiens
CAWENYYDSGGVFHYW

SEQ ID NO: 32619 - protein, 22 aa, Homo sapiens
CAKDAAQWFGELYGYYYGMDVW

SEQ ID NO: 32620 - protein, 22 aa, Homo sapiens
CAKLAAATRRDSYYYYYGMDVW

SEQ ID NO: 32621 - protein, 15 aa, Homo sapiens
CAKDTHLYSSELDYW

SEQ ID NO: 32622 - protein, 21 aa, Homo sapiens
CAKAKSITMIVVVIQGPFDYW

SEQ ID NO: 32623 - protein, 14 aa, Homo sapiens
CAKLCHGDYCFDYW

SEQ ID NO: 32624 - protein, 21 aa, Homo sapiens
CARVSAGMTRDSYYYYAMDVW

SEQ ID NO: 32625 - protein, 21 aa, Homo sapiens
CASTQAVGATNLHYYYGMDVW

SEQ ID NO: 32626 - protein, 13 aa, Homo sapiens
CSSTSCPNWFDPW

SEQ ID NO: 32627 - protein, 17 aa, Homo sapiens
CATSTPFGVVTHWFDPW

SEQ ID NO: 32628 - protein, 24 aa, Homo sapiens
CARTWGIAAAGTEYPNYYYGMDVW

SEQ ID NO: 32629 - protein, 18 aa, Homo sapiens
CATTQATSSYYYYGMDVW

SEQ ID NO: 32630 - protein, 14 aa, Homo sapiens
CQSYDSRLSAHVLF

SEQ ID NO: 32631 - protein, 19 aa, Homo sapiens
CARVTYSGYALMWDWFDPW

SEQ ID NO: 32632 - protein, 19 aa, Homo sapiens
CARDPSAGLYGSGSWFDYW

SEQ ID NO: 32633 - protein, 20 aa, Homo sapiens
CARDGHGYSDYDPPGPFDYW

SEQ ID NO: 32634 - protein, 15 aa, Homo sapiens
CAHSDWNDVGSFDYW

SEQ ID NO: 32635 - protein, 15 aa, Homo sapiens
CAKHETGAPYYLDSW

SEQ ID NO: 32636 - protein, 25 aa, Homo sapiens
CAREAVLIENLSASPWSHNNWFDPW

SEQ ID NO: 32637 - protein, 30 aa, Homo sapiens
CARTPSSIYWTDYDILTGGQISYYYGMDVW

SEQ ID NO: 32638 - protein, 17 aa, Homo sapiens
CARVNWWVGARGYFDNW

SEQ ID NO: 32639 - protein, 16 aa, Homo sapiens
CATDPAVLTGSYLWYW

SEQ ID NO: 32640 - protein, 14 aa, Homo sapiens
CAKDGIVGAMFDYW

SEQ ID NO: 32641 - protein, 19 aa, Homo sapiens
CARMSSWDFLTGPPYFDYW

SEQ ID NO: 32642 - protein, 12 aa, Homo sapiens
CTRHEDHRFDPW

SEQ ID NO: 32643 - protein, 18 aa, Homo sapiens
CARHTTTSGSYYYGMDVW

SEQ ID NO: 32644 - protein, 16 aa, Homo sapiens
CARYGLGPYAPPYDYW

SEQ ID NO: 32645 - protein, 17 aa, Homo sapiens
CARDAYSTAWPYYLDYW

SEQ ID NO: 32646 - protein, 18 aa, Homo sapiens
CTRALSKRGYYYYGMDVW

SEQ ID NO: 32647 - protein, 16 aa, Homo sapiens
CARDLRYFDWDGMDVW

SEQ ID NO: 32648 - protein, 16 aa, Homo sapiens
CARETTGSYSDWFAPW

SEQ ID NO: 32649 - protein, 17 aa, Homo sapiens
CAKDSSSWYLKYAFDIW

SEQ ID NO: 32650 - protein, 19 aa, Homo sapiens
CASYPPHSTYSSAWYVDYW

SEQ ID NO: 32651 - protein, 20 aa, Homo sapiens
CATQFGPYYYDSSGYILDYW

SEQ ID NO: 32652 - protein, 14 aa, Homo sapiens
CAKMPEDPNPFDYW

SEQ ID NO: 32653 - protein, 21 aa, Homo sapiens
CAREHRRITMIVVVIYAFDIW

SEQ ID NO: 32654 - protein, 18 aa, Homo sapiens
CAKEIFPHWRKRGWFDPW

SEQ ID NO: 32655 - protein, 17 aa, Homo sapiens
CAKDRGDGYNFDAFDIW

SEQ ID NO: 32656 - protein, 14 aa, Homo sapiens
CAHRRRGIYYFDYW

SEQ ID NO: 32657 - protein, 32 aa, Homo sapiens
CARGTSVSGYDFGVLRYYDSSGYFGPHGFDYW

SEQ ID NO: 32658 - protein, 20 aa, Homo sapiens
CARDWGSYGDSYYYYGMDVW

SEQ ID NO: 32659 - protein, 21 aa, Homo sapiens
CTTGLEAVAGTPNYYYAMDVW

SEQ ID NO: 32660 - protein, 20 aa, Homo sapiens
CARPLAVAGGPYYYYGMDVW

SEQ ID NO: 32661 - protein, 21 aa, Homo sapiens
CTTDGLVTTQDYYYYYGMDVW

SEQ ID NO: 32662 - protein, 21 aa, Homo sapiens
CASGIVVVPAANPYYYGMDVW

SEQ ID NO: 32663 - protein, 13 aa, Homo sapiens
CETRRDAFPSDYW

SEQ ID NO: 32664 - protein, 20 aa, Homo sapiens
CAKARENYYDSSGYYPADYW

SEQ ID NO: 32665 - protein, 22 aa, Homo sapiens
CARPFSSSWTTSIVYYYYMDVW

SEQ ID NO: 32666 - protein, 19 aa, Homo sapiens
CATTRIYLVEPVFYYFDNW

SEQ ID NO: 32667 - protein, 21 aa, Homo sapiens
CTTLITYYDILTGYYPGFDYW

SEQ ID NO: 32668 - protein, 23 aa, Homo sapiens
CARVGVLPDVLLWFGELFYFDYW

SEQ ID NO: 32669 - protein, 19 aa, Homo sapiens
CAAAAVTNPPYYYYGMDVW

SEQ ID NO: 32670 - protein, 19 aa, Homo sapiens
CAKDRLGLVLVPSGDFDYW

SEQ ID NO: 32671 - protein, 15 aa, Homo sapiens
CARIRLDITYYFDYW

SEQ ID NO: 32672 - protein, 17 aa, Homo sapiens
CAREFYSDNTGWYFDLW

SEQ ID NO: 32673 - protein, 15 aa, Homo sapiens
CVTHYDSSEYYFDYW

SEQ ID NO: 32674 - protein, 15 aa, Homo sapiens
CARSIAVAGLGVDYW

SEQ ID NO: 32675 - protein, 19 aa, Homo sapiens
CARGRYLEISFGGYYFDYW

SEQ ID NO: 32676 - protein, 25 aa, Homo sapiens
CATLPTPPISSGYYSGYYYYGMDVW

SEQ ID NO: 32677 - protein, 13 aa, Homo sapiens
CAREGSWYHFDYW

SEQ ID NO: 32678 - protein, 16 aa, Homo sapiens
CARDLANGGERGFDYW

SEQ ID NO: 32679 - protein, 28 aa, Homo sapiens
CARDDKYYDILTGYLGAIYYYYYGMDVW

SEQ ID NO: 32680 - protein, 15 aa, Homo sapiens
CARDRGGSYRDVDYW

SEQ ID NO: 32681 - protein, 21 aa, Homo sapiens
CARHTRLGGLLWFGELFPDYW

SEQ ID NO: 32682 - protein, 20 aa, Homo sapiens
CARIKYYYDSSGFWFYFDYW

SEQ ID NO: 32683 - protein, 17 aa, Homo sapiens
CAKDRRGSVGWWYFDSW

SEQ ID NO: 32684 - protein, 19 aa, Homo sapiens
CTTDPLYGSGRAGEPWDYW

SEQ ID NO: 32685 - protein, 19 aa, Homo sapiens
CARPPRGRRDGYNYYFDQW

SEQ ID NO: 32686 - protein, 12 aa, Homo sapiens
CAKDPGDAFDIW

SEQ ID NO: 32687 - protein, 17 aa, Homo sapiens
CAREADIAVAGTGLDYW

SEQ ID NO: 32688 - protein, 17 aa, Homo sapiens
CARDFRFGESARGFDPW

SEQ ID NO: 32689 - protein, 13 aa, Homo sapiens
CAGNPGGSYGDYW

SEQ ID NO: 32690 - protein, 18 aa, Homo sapiens
CARDRVSSSWWTYYFDYW

SEQ ID NO: 32691 - protein, 20 aa, Homo sapiens
CARLGLLYDNRSGATQFDSW

SEQ ID NO: 32692 - protein, 15 aa, Homo sapiens
CARRQFRSWGYFDYW

SEQ ID NO: 32693 - protein, 15 aa, Homo sapiens
CAREGVAVITIIDYW

SEQ ID NO: 32694 - protein, 16 aa, Homo sapiens
CAREGYGVGATYFDYW

SEQ ID NO: 32695 - protein, 20 aa, Homo sapiens
CATLPRYYILTGYLDGMDVW

SEQ ID NO: 32696 - protein, 15 aa, Homo sapiens
CARAFDSRGLGTDYW

SEQ ID NO: 32697 - protein, 19 aa, Homo sapiens
CAKDTRGSSWYQYNWFDPW

SEQ ID NO: 32698 - protein, 25 aa, Homo sapiens
CARERMWDDILTRLGDYYYYGMDVW

SEQ ID NO: 32699 - protein, 19 aa, Homo sapiens
CARAHRITIFGVVRYFDYW

SEQ ID NO: 32700 - protein, 16 aa, Homo sapiens
CARDFCTGGRCYVDYW

SEQ ID NO: 32701 - protein, 16 aa, Homo sapiens
CARMGIVGAKEAFDIW

SEQ ID NO: 32702 - protein, 19 aa, Homo sapiens
CASVPHYYGSGRGWYFDLW

SEQ ID NO: 32703 - protein, 14 aa, Homo sapiens
CANVGSSWYPLDYW

SEQ ID NO: 32704 - protein, 24 aa, Homo sapiens
CAKDNSGYCSSTSCYARGKYFEDW

SEQ ID NO: 32705 - protein, 21 aa, Homo sapiens
CARRFSVVTIFGITGGWFDPW

SEQ ID NO: 32706 - protein, 22 aa, Homo sapiens
CARDGADYGDEGGYYYYGMDVW

SEQ ID NO: 32707 - protein, 16 aa, Homo sapiens
CTTFPLRINMKVVDYW

SEQ ID NO: 32708 - protein, 20 aa, Homo sapiens
CARVTVTPILFYFYDGLDVW

SEQ ID NO: 32709 - protein, 22 aa, Homo sapiens
CARDDGSFYDVVTGPYNWLDPW

SEQ ID NO: 32710 - protein, 19 aa, Homo sapiens
CARELDHYDSSGYPPFGYW

SEQ ID NO: 32711 - protein, 16 aa, Homo sapiens
CARSYSMIVDDAFDIW

SEQ ID NO: 32712 - protein, 17 aa, Homo sapiens
CVGENSSSWYQSWFDPW

SEQ ID NO: 32713 - protein, 11 aa, Homo sapiens
CQQYDTVPRIF

SEQ ID NO: 32714 - protein, 13 aa, Homo sapiens
CARVIQIWVFDHW

SEQ ID NO: 32715 - protein, 16 aa, Homo sapiens
CARDLIMITFGGFDYW

SEQ ID NO: 32716 - protein, 20 aa, Homo sapiens
CARQEFFSLVREVTTSFDYW

SEQ ID NO: 32717 - protein, 17 aa, Homo sapiens
CGRAGLGKFQLQPPDYW

SEQ ID NO: 32718 - protein, 18 aa, Homo sapiens
CAKEWYYDSSGYGGFDYW

SEQ ID NO: 32719 - protein, 16 aa, Homo sapiens
CARVAQWLAEGVFDMW

SEQ ID NO: 32720 - protein, 22 aa, Homo sapiens
CATLANKGLFTGSLYYYAMDIW

SEQ ID NO: 32721 - protein, 16 aa, Homo sapiens
CARTPSSWRGYYFDYW

SEQ ID NO: 32722 - protein, 22 aa, Homo sapiens
CARRKNVFCGGDCYSTLSFGYW

SEQ ID NO: 32723 - protein, 17 aa, Homo sapiens
CAHRQKTITVTSSFDYW

SEQ ID NO: 32724 - protein, 16 aa, Homo sapiens
CAKGGSGYFGEYFQHW

SEQ ID NO: 32725 - protein, 12 aa, Homo sapiens
CANLCECGFDIW

SEQ ID NO: 32726 - protein, 13 aa, Homo sapiens
CAGYSSQSLFDYW

SEQ ID NO: 32727 - protein, 16 aa, Homo sapiens
CAARRVVKATTCFDYW

SEQ ID NO: 32728 - protein, 15 aa, Homo sapiens
CARILMTDFHWFDPW

SEQ ID NO: 32729 - protein, 14 aa, Homo sapiens
CARDHVLRYSFDYW

SEQ ID NO: 32730 - protein, 22 aa, Homo sapiens
CAKDRMGYYDFWSGYPYYFDYW

SEQ ID NO: 32731 - protein, 19 aa, Homo sapiens
CARYRGSLESGYAYYFDYW

SEQ ID NO: 32732 - protein, 28 aa, Homo sapiens
CARHSSPDLDNSDDSGFSSPWVDGMDVW

SEQ ID NO: 32733 - protein, 16 aa, Homo sapiens
CARALDGYSYWYFDLW

SEQ ID NO: 32734 - protein, 18 aa, Homo sapiens
CAAVYCSSTSCYDAFDIW

SEQ ID NO: 32735 - protein, 15 aa, Homo sapiens
CATYLLFGELYADFW

SEQ ID NO: 32736 - protein, 14 aa, Homo sapiens
CAGHNSGWYYFDYW

SEQ ID NO: 32737 - protein, 16 aa, Homo sapiens
CAREGGWGAAAGLDYW

SEQ ID NO: 32738 - protein, 20 aa, Homo sapiens
CASRNYYNSRGYFWYYFDYW

SEQ ID NO: 32739 - protein, 20 aa, Homo sapiens
CARGGLWFAAAYYYYGMDVW

SEQ ID NO: 32740 - protein, 20 aa, Homo sapiens
CTRDRGATSTARDGYDRDYW

SEQ ID NO: 32741 - protein, 22 aa, Homo sapiens
CAKLGLLGYCSGDPCYDWFDPW

SEQ ID NO: 32742 - protein, 24 aa, Homo sapiens
CAKDLGIAAAGLLSYYYYYGMDVW

SEQ ID NO: 32743 - protein, 22 aa, Homo sapiens
CARVTALRFLDSYYYYYGMDVW

SEQ ID NO: 32744 - protein, 23 aa, Homo sapiens
CAKVPYPYYSGSTAFYIPFFEYW

SEQ ID NO: 32745 - protein, 22 aa, Homo sapiens
CARRRSGVGFPGYYYYYGMDVW

SEQ ID NO: 32746 - protein, 30 aa, Homo sapiens
CVKIPGSHLGYCTGNTCSDRGVWGLHFDYW

SEQ ID NO: 32747 - protein, 21 aa, Homo sapiens
CAKDRAVGERTYYYYYGMDVW

SEQ ID NO: 32748 - protein, 21 aa, Homo sapiens
CAKSNVLFWFGQFKRDAFDIW

SEQ ID NO: 32749 - protein, 16 aa, Homo sapiens
CARAFGVVVIAYFDYW

SEQ ID NO: 32750 - protein, 23 aa, Homo sapiens
CARDLGPYDYVWGSYRTDAFDIW

SEQ ID NO: 32751 - protein, 19 aa, Homo sapiens
CARGEYEQLVSYYYGMDVW

SEQ ID NO: 32752 - protein, 17 aa, Homo sapiens
CARDDDSSGPYDAFDIW

SEQ ID NO: 32753 - protein, 21 aa, Homo sapiens
CARVSIAVVPAANYYYGMDVW

SEQ ID NO: 32754 - protein, 16 aa, Homo sapiens
CARGFYYYGSDGMDVW

SEQ ID NO: 32755 - protein, 17 aa, Homo sapiens
CARTPRGWMDQYRFDYW

SEQ ID NO: 32756 - protein, 16 aa, Homo sapiens
CARPWAYSGSSYFDHW

SEQ ID NO: 32757 - protein, 15 aa, Homo sapiens
CAKDRGVGWHGIDYW

SEQ ID NO: 32758 - protein, 15 aa, Homo sapiens
CAIKQLVRRNWFDPW

SEQ ID NO: 32759 - protein, 15 aa, Homo sapiens
CARDKYYNQNWFDPW

SEQ ID NO: 32760 - protein, 20 aa, Homo sapiens
CATSPGYYYGSGSPNWFDPW

SEQ ID NO: 32761 - protein, 18 aa, Homo sapiens
CAKAGSMSMIIVVDFDNW

SEQ ID NO: 32762 - protein, 18 aa, Homo sapiens
CGKDMYGSGASRGLIDYW

SEQ ID NO: 32763 - protein, 20 aa, Homo sapiens
CAIRQTTTSEFYYYYGMDVW

SEQ ID NO: 32764 - protein, 20 aa, Homo sapiens
CARDPTLVGANDYYYGMDVW

SEQ ID NO: 32765 - protein, 16 aa, Homo sapiens
CAKIVSRPGHWYFDLW

SEQ ID NO: 32766 - protein, 29 aa, Homo sapiens
CAKDIWYYDILTGYWPGRVNYYYYGMDVW

SEQ ID NO: 32767 - protein, 24 aa, Homo sapiens
CARDLKTPYCTNGVCYYYYGMDVW

SEQ ID NO: 32768 - protein, 15 aa, Homo sapiens
CAILPQGQHVTLDYW

SEQ ID NO: 32769 - protein, 20 aa, Homo sapiens
CAKDINTSGSGYYYYGMDVW

SEQ ID NO: 32770 - protein, 20 aa, Homo sapiens
CARVSSHDFWSGYPTCFDYW

SEQ ID NO: 32771 - protein, 14 aa, Homo sapiens
CAAWDDSQSALYVF

SEQ ID NO: 32772 - protein, 16 aa, Homo sapiens
CARSSFPSGSIYFQHW

SEQ ID NO: 32773 - protein, 20 aa, Homo sapiens
CARRRYYNNRGYYFYYFDDW

SEQ ID NO: 32774 - protein, 15 aa, Homo sapiens
CAREHSSGWRHCDYW

SEQ ID NO: 32775 - protein, 17 aa, Homo sapiens
CAKDQSYDYGENWFDPW

SEQ ID NO: 32776 - protein, 17 aa, Homo sapiens
CAKDPFSIVATSYFDYW

SEQ ID NO: 32777 - protein, 19 aa, Homo sapiens
CAKTAIFGVVPKYYAMDVW

SEQ ID NO: 32778 - protein, 13 aa, Homo sapiens
CQSYDSSTPHVIF

SEQ ID NO: 32779 - protein, 26 aa, Homo sapiens
CAKGPWGGSPYHHDTSGYSIDAFDIW

SEQ ID NO: 32780 - protein, 17 aa, Homo sapiens
CATPVHSSGYSTTSDYW

SEQ ID NO: 32781 - protein, 18 aa, Homo sapiens
CARDHGVGAAADYFFDDW

SEQ ID NO: 32782 - protein, 24 aa, Homo sapiens
CASESPTYYYDSSGYYTDYYFDYW

SEQ ID NO: 32783 - protein, 16 aa, Homo sapiens
CARDPPEWEIRVFDHW

SEQ ID NO: 32784 - protein, 18 aa, Homo sapiens
CAKVGATVVSPVIDFDYW

SEQ ID NO: 32785 - protein, 19 aa, Homo sapiens
CARDGPAAGTSFGLMFDPW

SEQ ID NO: 32786 - protein, 23 aa, Homo sapiens
CAKDNPGYDSSGYYSVGGYFDYW

SEQ ID NO: 32787 - protein, 19 aa, Homo sapiens
CARVFPSMVVYANNWFDPW

SEQ ID NO: 32788 - protein, 18 aa, Homo sapiens
CATPQEYCSGGRCSFDYW

SEQ ID NO: 32789 - protein, 16 aa, Homo sapiens
CATLDYGDAWEAFDIW

SEQ ID NO: 32790 - protein, 19 aa, Homo sapiens
CASGPHYYYGSGRGAFDIW

SEQ ID NO: 32791 - protein, 15 aa, Homo sapiens
CAKNNGVATTHFDFW

SEQ ID NO: 32792 - protein, 19 aa, Homo sapiens
CARHPPQYGTSEGDGMDVW

SEQ ID NO: 32793 - protein, 20 aa, Homo sapiens
CARLFIGSGSWYVYNWFDPW

SEQ ID NO: 32794 - protein, 22 aa, Homo sapiens
CAIRPVNYDILTGYRYYGMDVW

SEQ ID NO: 32795 - protein, 20 aa, Homo sapiens
CARDFRACSGGSCTYYFDYW

SEQ ID NO: 32796 - protein, 22 aa, Homo sapiens
CTRESGEGWEQEYYYYYGIDVW

SEQ ID NO: 32797 - protein, 14 aa, Homo sapiens
CAKWPIAVASFDYW

SEQ ID NO: 32798 - protein, 16 aa, Homo sapiens
CAKLVGATTGDAFDIW

SEQ ID NO: 32799 - protein, 13 aa, Homo sapiens
CQSPDSSATIRIF

SEQ ID NO: 32800 - protein, 16 aa, Homo sapiens
CARTYLSEAGGYVAYW

SEQ ID NO: 32801 - protein, 21 aa, Homo sapiens
CASSNYYGSGSYYYYYGMDVW

SEQ ID NO: 32802 - protein, 23 aa, Homo sapiens
CARDSFTNFDRLFFDNSGYFDYW

SEQ ID NO: 32803 - protein, 17 aa, Homo sapiens
CAKADCSGGSCSQFDSW

SEQ ID NO: 32804 - protein, 20 aa, Homo sapiens
CARDQITMVRGLLKPSFDYW

SEQ ID NO: 32805 - protein, 21 aa, Homo sapiens
CATLPYYYGSGSYAYYGMDVW

SEQ ID NO: 32806 - protein, 12 aa, Homo sapiens
CTGGVVATFDYW

SEQ ID NO: 32807 - protein, 16 aa, Homo sapiens [sequence omitted]

SEQ ID NO: 32808 - protein, 15 aa, Homo sapiens
CARPRPTVKGLFDSW

SEQ ID NO: 32809 - protein, 18 aa, Homo sapiens
CAKGLGFYGSGSYWFDPW

SEQ ID NO: 32810 - protein, 20 aa, Homo sapiens
CAKEGNGDYPVPQPLEFDYW

SEQ ID NO: 32811 - protein, 15 aa, Homo sapiens
CTPTGRTIPNAFDFW

SEQ ID NO: 32812 - protein, 13 aa, Homo sapiens
CARGYSSGQIDYW

SEQ ID NO: 32813 - protein, 20 aa, Homo sapiens
CAREGTMVRGVIIKASFDYW

SEQ ID NO: 32814 - protein, 15 aa, Homo sapiens
CARDGLDYGRGFDIW

SEQ ID NO: 32815 - protein, 19 aa, Homo sapiens
CTRLVGYYDGRSGYIFDYW

SEQ ID NO: 32816 - protein, 15 aa, Homo sapiens
CARDSVYGGYPDDYW

SEQ ID NO: 32817 - protein, 16 aa, Homo sapiens
CASPLRYFDWYAFDIW

SEQ ID NO: 32818 - protein, 20 aa, Homo sapiens
CAKVGILTGYPVRLDAFDIW

SEQ ID NO: 32819 - protein, 26 aa, Homo sapiens
CARINNLYYYDSSGYYYDDYYGMDVW

SEQ ID NO: 32820 - protein, 22 aa, Homo sapiens
CARPLKGYYDSSGYYYDAFDIW

SEQ ID NO: 32821 - protein, 18 aa, Homo sapiens
CARDMSLGSTLYRWVDPW

SEQ ID NO: 32822 - protein, 18 aa, Homo sapiens
CARDSDTAMGWGQWFDPW

SEQ ID NO: 32823 - protein, 15 aa, Homo sapiens
CARVRYDYYYAMDVW

SEQ ID NO: 32824 - protein, 20 aa, Homo sapiens
CSTDNVYCSGSSCPGNFDHW

SEQ ID NO: 32825 - protein, 16 aa, Homo sapiens
CAKDQNQYGSGIEDYW

SEQ ID NO: 32826 - protein, 21 aa, Homo sapiens
CARHGWENVGRGYSYGTFDYW

SEQ ID NO: 32827 - protein, 23 aa, Homo sapiens
CLRSEDTALYYCARDSSRAFGYW

SEQ ID NO: 32828 - protein, 18 aa, Homo sapiens
CAIAPERYSGYQHLGDYW

SEQ ID NO: 32829 - protein, 24 aa, Homo sapiens
CATSLPRLPAAMGGGYYYYGMDVW

SEQ ID NO: 32830 - protein, 20 aa, Homo sapiens
CARGGTYYYDNNGPHYFDYW

SEQ ID NO: 32831 - protein, 12 aa, Homo sapiens
CSRGNAVSGDYW

SEQ ID NO: 32832 - protein, 17 aa, Homo sapiens
CAKDNSGSYPESWFDPW

SEQ ID NO: 32833 - protein, 18 aa, Homo sapiens
CAKANCSSTSCFNWFDPW

SEQ ID NO: 32834 - protein, 16 aa, Homo sapiens
CARVYSSNWLWWFDPW

SEQ ID NO: 32835 - protein, 18 aa, Homo sapiens
CAAQVNYYDSSGYYRDYW

SEQ ID NO: 32836 - protein, 21 aa, Homo sapiens
CARGKGDYVWGSYRYTWFDPW

SEQ ID NO: 32837 - protein, 23 aa, Homo sapiens
CARIFPGDFDYFQGYKYYGMDVW

SEQ ID NO: 32838 - protein, 22 aa, Homo sapiens
CARDARYCSSTSCYIPNWFDPW

SEQ ID NO: 32839 - protein, 18 aa, Homo sapiens
CAKLSSGYYYGSGSSDYW

SEQ ID NO: 32840 - protein, 21 aa, Homo sapiens
CARVMWVPEVIVVVPAALDYW

SEQ ID NO: 32841 - protein, 18 aa, Homo sapiens
CATGGVVTGYYYYGMDVW

SEQ ID NO: 32842 - protein, 15 aa, Homo sapiens
CASHTSGWPNLFDLW

SEQ ID NO: 32843 - protein, 22 aa, Homo sapiens
CARGPNTYFDWFPNGGYYFDYW

SEQ ID NO: 32844 - protein, 23 aa, Homo sapiens
CARDGETPDGSYSDYYYYGMDVW

SEQ ID NO: 32845 - protein, 21 aa, Homo sapiens
CARAGYRVARPLYYYYGMDVW

SEQ ID NO: 32846 - protein, 26 aa, Homo sapiens
CAKDQGLRYFDWLLIRYYYYYGMDVW

SEQ ID NO: 32847 - protein, 13 aa, Homo sapiens
CAVWDDSMSGPLF

SEQ ID NO: 32848 - protein, 19 aa, Homo sapiens
CAKVKSGAVVVVAAPFDYW

SEQ ID NO: 32849 - protein, 12 aa, Homo sapiens
CQQYGALPGITF

SEQ ID NO: 32850 - protein, 17 aa, Homo sapiens
CAREGTRVVITDAFDIW

SEQ ID NO: 32851 - protein, 16 aa, Homo sapiens
CAKDYGGSLPDAFDVW

SEQ ID NO: 32852 - protein, 19 aa, Homo sapiens
CARVTVAGTPKELNWFDPW

SEQ ID NO: 32853 - protein, 19 aa, Homo sapiens
CAREGRDGYNWRVLEFDPW

SEQ ID NO: 32854 - protein, 15 aa, Homo sapiens
CARLSGSYYSPLDYW

SEQ ID NO: 32855 - protein, 19 aa, Homo sapiens
CARITLLYIRGDTGWFDPW

SEQ ID NO: 32856 - protein, 17 aa, Homo sapiens
CARDAPVGVTSTYFDSW

SEQ ID NO: 32857 - protein, 17 aa, Homo sapiens
CAREDEDYGHSQGFDVW

SEQ ID NO: 32858 - protein, 21 aa, Homo sapiens
CAKDPHFDWPSVYYYYGMDVW

SEQ ID NO: 32859 - protein, 16 aa, Homo sapiens
CAKDKESWGYNWFDPW

SEQ ID NO: 32860 - protein, 23 aa, Homo sapiens
CSRITNYYENFGDFPPTGYFDYW

SEQ ID NO: 32861 - protein, 15 aa, Homo sapiens
CARGGGSRSGGVDYW

SEQ ID NO: 32862 - protein, 20 aa, Homo sapiens
CATAPAVAGPIYYYYGMDVW

SEQ ID NO: 32863 - protein, 21 aa, Homo sapiens
CAKDIVGYCSSTSCLGAFDIW

SEQ ID NO: 32864 - protein, 21 aa, Homo sapiens
CARAPRGDYDSWLYYYGMDVW

SEQ ID NO: 32865 - protein, 15 aa, Homo sapiens
CQVWDSSSDSGSWVF

SEQ ID NO: 32866 - protein, 23 aa, Homo sapiens
CTTEEQWAGYYYDSSGYYFFDYW

SEQ ID NO: 32867 - protein, 19 aa, Homo sapiens
CATNVGTSSLVLVWYFDLW

SEQ ID NO: 32868 - protein, 24 aa, Homo sapiens
CARDQALGTADHWAVVVTAILDYW

SEQ ID NO: 32869 - protein, 19 aa, Homo sapiens
CARPSLAYCDGDCSGFDLW

SEQ ID NO: 32870 - protein, 22 aa, Homo sapiens
CATFPEYSYGRSYYYYYGMDVW

SEQ ID NO: 32871 - protein, 18 aa, Homo sapiens
CAHTAFHYYGSGRTFDPW

SEQ ID NO: 32872 - protein, 22 aa, Homo sapiens
CAKDWGPFLYCSGGSCYPFDYW

SEQ ID NO: 32873 - protein, 24 aa, Homo sapiens
CARDDFERALAGTFYDYYYAVDVW

SEQ ID NO: 32874 - protein, 20 aa, Homo sapiens
CARGPIITMVRGVIPWFDPW

SEQ ID NO: 32875 - protein, 17 aa, Homo sapiens
CAKCGSGSYYNVGVDYW

SEQ ID NO: 32876 - protein, 17 aa, Homo sapiens
CAKDRNSHPPGNYFDYW

SEQ ID NO: 32877 - protein, 19 aa, Homo sapiens
CAKEGKWELGPYYYGMDVW

SEQ ID NO: 32878 - protein, 17 aa, Homo sapiens
CARHNSGKFRANWFDPW

SEQ ID NO: 32879 - protein, 11 aa, Homo sapiens
CYSADSSVKVF

SEQ ID NO: 32880 - protein, 22 aa, Homo sapiens
CARVGNDYVWGSYRLTDAFDIW

SEQ ID NO: 32881 - protein, 14 aa, Homo sapiens
CQNYNSAPQSTFTF

SEQ ID NO: 32882 - protein, 20 aa, Homo sapiens
CVKEMGLGFAEFPPNYFDSW

SEQ ID NO: 32883 - protein, 25 aa, Homo sapiens
CAREYDILTGYYTGDYYYYYGMDVW

SEQ ID NO: 32884 - protein, 22 aa, Homo sapiens
CARDRSGFGGVIVNYYYGMDVW

SEQ ID NO: 32885 - protein, 13 aa, Homo sapiens
CAHRHSNSYYTYW

SEQ ID NO: 32886 - protein, 19 aa, Homo sapiens
CACLQLGYSSSWYAYFDLW

SEQ ID NO: 32887 - protein, 19 aa, Homo sapiens
CARSNYDILTGYLSSFDYW

SEQ ID NO: 32888 - protein, 20 aa, Homo sapiens
CAKDAGGDCSSTSCSPSDYW

SEQ ID NO: 32889 - protein, 14 aa, Homo sapiens
CAHSLYFPNPFDYW

SEQ ID NO: 32890 - protein, 14 aa, Homo sapiens
CAHTYDFWSGLDYW

SEQ ID NO: 32891 - protein, 21 aa, Homo sapiens
CARDADQLLEVVPVTAPFDPW

SEQ ID NO: 32892 - protein, 17 aa, Homo sapiens
CAKDPSISAAGYYFDSW

SEQ ID NO: 32893 - protein, 21 aa, Homo sapiens
CARTYIVATTNYYYYYGMDVW

SEQ ID NO: 32894 - protein, 22 aa, Homo sapiens
CARVRYFDWLLQTGYYYGMDVW

SEQ ID NO: 32895 - protein, 16 aa, Homo sapiens
CARERGKQHLPALDYW

SEQ ID NO: 32896 - protein, 17 aa, Homo sapiens
CARTRTVASARHFFDYW

SEQ ID NO: 32897 - protein, 16 aa, Homo sapiens
CAKFAQLWPGTAFDIW

SEQ ID NO: 32898 - protein, 18 aa, Homo sapiens
CAKAPDFYDGGSSVFDDW

SEQ ID NO: 32899 - protein, 13 aa, Homo sapiens
CARVFVNSAFDLW

SEQ ID NO: 32900 - protein, 16 aa, Homo sapiens
CAKDRPLHDYGDFDYW

SEQ ID NO: 32901 - protein, 17 aa, Homo sapiens
CASGYSGYDFLDYFDYW

SEQ ID NO: 32902 - protein, 14 aa, Homo sapiens
CAKPWQWLEPGDYW

SEQ ID NO: 32903 - protein, 20 aa, Homo sapiens
CARAAGPIAVAGTGDWFDPW

SEQ ID NO: 32904 - protein, 16 aa, Homo sapiens
CARGKGYDILNGLDYW

SEQ ID NO: 32905 - protein, 17 aa, Homo sapiens
CAKGSSDGSGSWAFDIW

SEQ ID NO: 32906 - protein, 21 aa, Homo sapiens
CTRDLRFCAVGSCWPSWYDPW

SEQ ID NO: 32907 - protein, 16 aa, Homo sapiens
CAKAVREETAEWLDPW

SEQ ID NO: 32908 - protein, 17 aa, Homo sapiens
CARGPVVGAIPYYFDYW

SEQ ID NO: 32909 - protein, 19 aa, Homo sapiens
CARRHTRYDSSGYDTFDIW

SEQ ID NO: 32910 - protein, 21 aa, Homo sapiens
CASMIYGGYCSGGSCHSADYW

SEQ ID NO: 32911 - protein, 16 aa, Homo sapiens
CAREDVVGTSLTFDPW

SEQ ID NO: 32912 - protein, 20 aa, Homo sapiens
CAREGHDSSGYYDLYAFDIW

SEQ ID NO: 32913 - protein, 19 aa, Homo sapiens
CARGLDCSGGSCYMGFDPW

SEQ ID NO: 32914 - protein, 16 aa, Homo sapiens
CTRVSSSWYLDYFDYW

SEQ ID NO: 32915 - protein, 16 aa, Homo sapiens
CARSYIARGEMDSDYW

SEQ ID NO: 32916 - protein, 18 aa, Homo sapiens
CARARGPYCHGDCPFDYW

SEQ ID NO: 32917 - protein, 14 aa, Homo sapiens
CARAGYADTHFDYW

SEQ ID NO: 32918 - protein, 23 aa, Homo sapiens
CARAPHCVGDSCYYYYYYGMDVW

SEQ ID NO: 32919 - protein, 15 aa, Homo sapiens
CARRLYDSSAWFDPW

SEQ ID NO: 32920 - protein, 11 aa, Homo sapiens
CTKHPAWDDPW

SEQ ID NO: 32921 - protein, 21 aa, Homo sapiens
CAHSSDYIWGKFRYYDAFDIW

SEQ ID NO: 32922 - protein, 14 aa, Homo sapiens
CAKVPSGDSPFGYW

SEQ ID NO: 32923 - protein, 16 aa, Homo sapiens
CAKGQYSSSWSHFDYW

SEQ ID NO: 32924 - protein, 22 aa, Homo sapiens
CVRGNYYDSSGYYSGRYYFDSW

SEQ ID NO: 32925 - protein, 15 aa, Homo sapiens
CATAPIDYVRWFDPW

SEQ ID NO: 32926 - protein, 14 aa, Homo sapiens
CAKDFDSSGHWDYW

SEQ ID NO: 32927 - protein, 21 aa, Homo sapiens
CARLDWFGGIWDPNFWYFDPW

SEQ ID NO: 32928 - protein, 17 aa, Homo sapiens
CARIYGTPWGSYSIDYW

SEQ ID NO: 32929 - protein, 17 aa, Homo sapiens
CAKEGRPSGGNSGRDYW

SEQ ID NO: 32930 - protein, 15 aa, Homo sapiens
CAKALYSYGYLFDYW

SEQ ID NO: 32931 - protein, 16 aa, Homo sapiens
CAADPTAAAGTGFDYW

SEQ ID NO: 32932 - protein, 12 aa, Homo sapiens
CQSNDSNNHKIF

SEQ ID NO: 32933 - protein, 16 aa, Homo sapiens
CARARGLGAARWFDPW

SEQ ID NO: 32934 - protein, 17 aa, Homo sapiens
CVREGFSSKWNGYFHHW

SEQ ID NO: 32935 - protein, 20 aa, Homo sapiens
CASIYDILTGSYYYYGMDVW

SEQ ID NO: 32936 - protein, 13 aa, Homo sapiens
CASPYPTRDFDIW

SEQ ID NO: 32937 - protein, 18 aa, Homo sapiens
CAKNPGLLIRGTDAFDIW

SEQ ID NO: 32938 - protein, 17 aa, Homo sapiens
CARHNTRGQIGFAIDYW

SEQ ID NO: 32939 - protein, 15 aa, Homo sapiens
CASGAGSYYDYFDYW

SEQ ID NO: 32940 - protein, 19 aa, Homo sapiens
CARSSLRGSGSRYNWFDPW

SEQ ID NO: 32941 - protein, 23 aa, Homo sapiens
CARQGGSGNYYRPRWQFNWFGPW

SEQ ID NO: 32942 - protein, 22 aa, Homo sapiens
CAKPSGDASGYYSSYYYAMDVW

SEQ ID NO: 32943 - protein, 14 aa, Homo sapiens
CARDMMFGELSDYW

SEQ ID NO: 32944 - protein, 18 aa, Homo sapiens
CARRAAVVAGGTYSFDIW

SEQ ID NO: 32945 - protein, 24 aa, Homo sapiens
CASNYDILTGYYLPRDYYYGMDVW

SEQ ID NO: 32946 - protein, 22 aa, Homo sapiens
CARSYSGLRFPGVYYYYGMDVW

SEQ ID NO: 32947 - protein, 11 aa, Homo sapiens
CKSEWLPVDYW

SEQ ID NO: 32948 - protein, 16 aa, Homo sapiens
CARHLPFNTAPRFDPW

SEQ ID NO: 32949 - protein, 14 aa, Homo sapiens
CVRDRPAVKFFDYW

SEQ ID NO: 32950 - protein, 14 aa, Homo sapiens
CARHVGYSYGIDYW

SEQ ID NO: 32951 - protein, 15 aa, Homo sapiens
CAGAVADPTAHFDYW

SEQ ID NO: 32952 - protein, 18 aa, Homo sapiens
CAHSPRQGPTSGTTFDYW

SEQ ID NO: 32953 - protein, 18 aa, Homo sapiens
CARGNTDYYDSSGYLDYW

SEQ ID NO: 32954 - protein, 16 aa, Homo sapiens
CGRAMTGYYKDAFDIW

SEQ ID NO: 32955 - protein, 19 aa, Homo sapiens
CARDRGEEFGEFLWNFDLW

SEQ ID NO: 32956 - protein, 15 aa, Homo sapiens
CAPFHYYYYYGMDVW

SEQ ID NO: 32957 - protein, 19 aa, Homo sapiens
CARDNLGHCLSTSCYDVYW

SEQ ID NO: 32958 - protein, 14 aa, Homo sapiens
CAKESSTQQQDDYW

SEQ ID NO: 32959 - protein, 16 aa, Homo sapiens
CARVLGGGETHELDYW

SEQ ID NO: 32960 - protein, 19 aa, Homo sapiens
CARGNSYFDSYYNYAMDVW

SEQ ID NO: 32961 - protein, 22 aa, Homo sapiens
CTRFPRSPTYFFGSGENPLDYW

SEQ ID NO: 32962 - protein, 23 aa, Homo sapiens
CARVPLRDYDILTGYYRGPFDPW

SEQ ID NO: 32963 - protein, 17 aa, Homo sapiens
CAKSPVPMVVTLAFDIW

SEQ ID NO: 32964 - protein, 14 aa, Homo sapiens
CAKVHIAAVYFDYW

SEQ ID NO: 32965 - protein, 19 aa, Homo sapiens
CARGVLDTAMVKSYRFDPW

SEQ ID NO: 32966 - protein, 18 aa, Homo sapiens
CARMSYSSSFRRGWFDPW

SEQ ID NO: 32967 - protein, 18 aa, Homo sapiens
CARRGYCNRITCPVVDYW

SEQ ID NO: 32968 - protein, 15 aa, Homo sapiens
CGRLDVLGGYYEDYW

SEQ ID NO: 32969 - protein, 16 aa, Homo sapiens
CAKSGYSSTPDACDIW

SEQ ID NO: 32970 - protein, 20 aa, Homo sapiens
CARGLYYYGSGSVRGWFDSW

SEQ ID NO: 32971 - protein, 12 aa, Homo sapiens [sequence omitted]

SEQ ID NO: 32972 - protein, 16 aa, Homo sapiens
CAKDMWPAAGTIFDYW

SEQ ID NO: 32973 - protein, 20 aa, Homo sapiens
CAKDRSGEYCSGGSCYSLYW

SEQ ID NO: 32974 - protein, 18 aa, Homo sapiens
CAKDLRDYGGQWGYLDSW

SEQ ID NO: 32975 - protein, 21 aa, Homo sapiens
CLTDDLQVSTSWYGLDAFNLW

SEQ ID NO: 32976 - protein, 24 aa, Homo sapiens
CARHKGNGITIFGVVTLNNWFDPW

SEQ ID NO: 32977 - protein, 15 aa, Homo sapiens
CVRSPPAGDHTFDFW

SEQ ID NO: 32978 - protein, 26 aa, Homo sapiens
CARDGDYYDSSGYYYRGPPYWYFDLW

SEQ ID NO: 32979 - protein, 17 aa, Homo sapiens
CAKDVRPQTVSDAFEIW

SEQ ID NO: 32980 - protein, 16 aa, Homo sapiens
CAKDSSGWANNWFDPW

SEQ ID NO: 32981 - protein, 19 aa, Homo sapiens
CTTNLGGQVAGQGYWFDPW

SEQ ID NO: 32982 - protein, 15 aa, Homo sapiens
CAKLVGATRGGFDYW

SEQ ID NO: 32983 - protein, 27 aa, Homo sapiens
CAIMPPHGIAVAGIMGGDYYYYGMDVW

SEQ ID NO: 32984 - protein, 15 aa, Homo sapiens
CAHSGQKELWPFDFW

SEQ ID NO: 32985 - protein, 13 aa, Homo sapiens
CARGIFEGEFDYW

SEQ ID NO: 32986 - protein, 16 aa, Homo sapiens
CAGAHSGSYLFGFDYW

SEQ ID NO: 32987 - protein, 25 aa, Homo sapiens
CARAPGLYDFWSGYPHDYYYGMDVW

SEQ ID NO: 32988 - protein, 15 aa, Homo sapiens
CQSADNDGTTFPVVF

SEQ ID NO: 32989 - protein, 19 aa, Homo sapiens
CARETVTTVIYYYYGMYVW

SEQ ID NO: 32990 - protein, 19 aa, Homo sapiens
CARGGYDFWSGYNNWFDPW

SEQ ID NO: 32991 - protein, 11 aa, Homo sapiens
CQHYPSSPLAF

SEQ ID NO: 32992 - protein, 22 aa, Homo sapiens
CAKPTVSDLQLWFSYYYGMDVW

SEQ ID NO: 32993 - protein, 16 aa, Homo sapiens
CAKDIRGWEGEAFDIW

SEQ ID NO: 32994 - protein, 22 aa, Homo sapiens
CARDRVGSYYNPLYYYYGMDVW

SEQ ID NO: 32995 - protein, 22 aa, Homo sapiens
CASTHLRLGELSLYYYYGMDVW

SEQ ID NO: 32996 - protein, 17 aa, Homo sapiens
CAREQTTVTTYWHFDLW

SEQ ID NO: 32997 - protein, 18 aa, Homo sapiens
CAKSPPLSYDRDDAFDIW

SEQ ID NO: 32998 - protein, 17 aa, Homo sapiens
CARGYFDWLGPGWFDPW

SEQ ID NO: 32999 - protein, 22 aa, Homo sapiens
CAKDVGLAYVVYAYYYYGMDVW

SEQ ID NO: 33000 - protein, 27 aa, Homo sapiens
CARELRNSYGELLWFGEVYYYYGMDVW

SEQ ID NO: 33001 - protein, 23 aa, Homo sapiens
CASNVIVLRYFDWLLEATKDDYW

SEQ ID NO: 33002 - protein, 18 aa, Homo sapiens
CASERSTYYYDSSGLDYW

SEQ ID NO: 33003 - protein, 16 aa, Homo sapiens
CAKETDSRQSHDTDYW

SEQ ID NO: 33004 - protein, 19 aa, Homo sapiens
CAKTVLVRGVISADYFDYW

SEQ ID NO: 33005 - protein, 24 aa, Homo sapiens
CARDRKELGYCSGGSCDYWYFDLW

SEQ ID NO: 33006 - protein, 17 aa, Homo sapiens
CARSAGWSRDYWYFDLW

SEQ ID NO: 33007 - protein, 26 aa, Homo sapiens
CARELGGDGYCSSTSCPAYYYGMDVW

SEQ ID NO: 33008 - protein, 13 aa, Homo sapiens
CQVWDNSIDHWEF

SEQ ID NO: 33009 - protein, 11 aa, Homo sapiens
CHQSSALPYTF

SEQ ID NO: 33010 - protein, 19 aa, Homo sapiens
CAKFASGWYSDYYYGMDVW

SEQ ID NO: 33011 - protein, 28 aa, Homo sapiens
CARDPLRYFDWFEVLVSTQDYYYGMDVW

SEQ ID NO: 33012 - protein, 21 aa, Homo sapiens
CARSPICSGAGCYLGRVFDIW

SEQ ID NO: 33013 - protein, 25 aa, Homo sapiens
CVRDWYCSGGRCYWTGYYYYGMDVW

SEQ ID NO: 33014 - protein, 18 aa, Homo sapiens
CAKDSHGYGSGVYLFHYW

SEQ ID NO: 33015 - protein, 12 aa, Homo sapiens
CAAWLVVAFDIW

SEQ ID NO: 33016 - protein, 19 aa, Homo sapiens
CAKDKRVTSSWSHDAFDIW

SEQ ID NO: 33017 - protein, 23 aa, Homo sapiens
CARDRGRYDFWSGYGDYYGMDVW

SEQ ID NO: 33018 - protein, 20 aa, Homo sapiens
CARDGGGDCYSWDLCWFDPW

SEQ ID NO: 33019 - protein, 20 aa, Homo sapiens
CAREMYYDILTGYRGPLDYW

SEQ ID NO: 33020 - protein, 17 aa, Homo sapiens
CAKDWHILTGYYFFDYW

SEQ ID NO: 33021 - protein, 13 aa, Homo sapiens
CTKLVGVSVLDYW

SEQ ID NO: 33022 - protein, 20 aa, Homo sapiens
CARDEAYCSGGSCYSYFDYW

SEQ ID NO: 33023 - protein, 19 aa, Homo sapiens
CARARALGMLVVIDAFDIW

SEQ ID NO: 33024 - protein, 16 aa, Homo sapiens
CAGEPPGIVGAGWDYW

SEQ ID NO: 33025 - protein, 14 aa, Homo sapiens
CMHAAQFPPFIYTF

SEQ ID NO: 33026 - protein, 19 aa, Homo sapiens
CARTFLNTLYDNSNYFDFW

SEQ ID NO: 33027 - protein, 14 aa, Homo sapiens
CAKGEAVAGTFTYW

SEQ ID NO: 33028 - protein, 16 aa, Homo sapiens
CATSYGGNSRGWFDPW

SEQ ID NO: 33029 - protein, 25 aa, Homo sapiens
CAKDSVKHIVVVTAIRYYYYGMDVW

SEQ ID NO: 33030 - protein, 20 aa, Homo sapiens
CAIGAPSYCGGDCYYYFDYW

SEQ ID NO: 33031 - protein, 22 aa, Homo sapiens
CAGDQKDIAVAGIHYYYGMDVW

SEQ ID NO: 33032 - protein, 20 aa, Homo sapiens
CAKDPISYGSGSYPNWFDPW

SEQ ID NO: 33033 - protein, 20 aa, Homo sapiens
CARYCSGGNCYPKDDSFDIW

SEQ ID NO: 33034 - protein, 14 aa, Homo sapiens
CTTDLHDFGDYDYW

SEQ ID NO: 33035 - protein, 20 aa, Homo sapiens
CARALPLGVMITFGGPFDYW

SEQ ID NO: 33036 - protein, 16 aa, Homo sapiens
CAKDIVGATAYYFDYW

SEQ ID NO: 33037 - protein, 21 aa, Homo sapiens
CAREYDLLTAYYNPPGWFDPW

SEQ ID NO: 33038 - protein, 16 aa, Homo sapiens
CATAFAVVVTPRFDYW

SEQ ID NO: 33039 - protein, 18 aa, Homo sapiens
CATFYGSGTTYYYGMDVW

SEQ ID NO: 33040 - protein, 21 aa, Homo sapiens
CAKRAMAYCGGDCYSYYFDYW

SEQ ID NO: 33041 - protein, 26 aa, Homo sapiens
CAREGDSITMVRGVIPDYYYYGMDVW

SEQ ID NO: 33042 - protein, 25 aa, Homo sapiens
CAREPLYYDILTGYYNSYYYGMDVW

SEQ ID NO: 33043 - protein, 12 aa, Homo sapiens [sequence omitted]

SEQ ID NO: 33044 - protein, 23 aa, Homo sapiens
CATGPAVKLTGYYSSYYYGMDVW

SEQ ID NO: 33045 - protein, 19 aa, Homo sapiens
CAKEFYCDSTKCYRAFDYW

SEQ ID NO: 33046 - protein, 13 aa, Homo sapiens
CARTINWAWLDPW

SEQ ID NO: 33047 - protein, 15 aa, Homo sapiens
CATYCSSMSCYNDYW

SEQ ID NO: 33048 - protein, 19 aa, Homo sapiens
CARLRVLLWFGDLFAFDIW

SEQ ID NO: 33049 - protein, 21 aa, Homo sapiens
CARVGTKYLLGVVVSKHFDYW

SEQ ID NO: 33050 - protein, 14 aa, Homo sapiens
CATNHYGDNGFDPW

SEQ ID NO: 33051 - protein, 16 aa, Homo sapiens
CAKVRKYEFYTGFDSW

SEQ ID NO: 33052 - protein, 16 aa, Homo sapiens
CARGDLAGDQGGVDYW

SEQ ID NO: 33053 - protein, 21 aa, Homo sapiens
CARYQRDFWSGRHRGWYFDLW

SEQ ID NO: 33054 - protein, 17 aa, Homo sapiens
CAKLGYSGYDLNNFDYW

SEQ ID NO: 33055 - protein, 24 aa, Homo sapiens
CAREDYDYIWGNYRHDYYYGMDVW

SEQ ID NO: 33056 - protein, 21 aa, Homo sapiens
CAQDLGYTYGVVEDGNWFDPW

SEQ ID NO: 33057 - protein, 14 aa, Homo sapiens
CISYCGGDCPRDYW

SEQ ID NO: 33058 - protein, 23 aa, Homo sapiens
CARGAGYCSSTSCLLPHWYFDLW

SEQ ID NO: 33059 - protein, 14 aa, Homo sapiens
CARVNIVSYAMDVW

SEQ ID NO: 33060 - protein, 23 aa, Homo sapiens
CARDHYYYENSGYHVILSYLDNW

SEQ ID NO: 33061 - protein, 21 aa, Homo sapiens
CANLEPDYYDSSGYYSAFDIW

SEQ ID NO: 33062 - protein, 16 aa, Homo sapiens
CAREQQASFSGSYDYW

SEQ ID NO: 33063 - protein, 18 aa, Homo sapiens
CAKLPSDGDGYYYGMDVW

SEQ ID NO: 33064 - protein, 16 aa, Homo sapiens
CAKGSTSWERGLFDYW

SEQ ID NO: 33065 - protein, 19 aa, Homo sapiens
CAHCYYDILTGYSQDFDYW

SEQ ID NO: 33066 - protein, 14 aa, Homo sapiens
CARPTVSGNWFDPW

SEQ ID NO: 33067 - protein, 12 aa, Homo sapiens
CSSFTSSDTFAF

SEQ ID NO: 33068 - protein, 16 aa, Homo sapiens
CARDPYSYAESPFDYW

SEQ ID NO: 33069 - protein, 24 aa, Homo sapiens
CAKDKGVGRFLEWLSNYYYGMDVW

SEQ ID NO: 33070 - protein, 16 aa, Homo sapiens
CVRGGSSGWYAPFDYW

SEQ ID NO: 33071 - protein, 19 aa, Homo sapiens
CAKAIRVYSSPRGDAFDIW

SEQ ID NO: 33072 - protein, 22 aa, Homo sapiens
CARGDYGDYPRDYYYYYGMDVW

SEQ ID NO: 33073 - protein, 15 aa, Homo sapiens
CARASVEGWYYFDYW

SEQ ID NO: 33074 - protein, 25 aa, Homo sapiens
CTTDQGLHTTTYYYDSSGFDAFDIW

SEQ ID NO: 33075 - protein, 19 aa, Homo sapiens
CARDYSSGSYYAVLWFDYW

SEQ ID NO: 33076 - protein, 20 aa, Homo sapiens
CARDGITMVRGVIRWIFDYW

SEQ ID NO: 33077 - protein, 16 aa, Homo sapiens
CARDGVDTAMADFDYW

SEQ ID NO: 33078 - protein, 26 aa, Homo sapiens
CAKDQRYCSGGSCSVFEYYYYGMDVW

SEQ ID NO: 33079 - protein, 12 aa, Homo sapiens
CGAGILLLVDYW

SEQ ID NO: 33080 - protein, 25 aa, Homo sapiens
CARVFLARDVLLWFGELTVGYFDYW

SEQ ID NO: 33081 - protein, 21 aa, Homo sapiens
CASDRRYGDYPPDYYYGMDVW

SEQ ID NO: 33082 - protein, 25 aa, Homo sapiens
CARDKDVYDILTGYYTYYYYGMDVW

SEQ ID NO: 33083 - protein, 17 aa, Homo sapiens
CAAPGHSYDSSGYYHYW

SEQ ID NO: 33084 - protein, 20 aa, Homo sapiens
CARTYYDFWSGYYNFPFDYW

SEQ ID NO: 33085 - protein, 17 aa, Homo sapiens
CARRPPLWFGEADFDYW

SEQ ID NO: 33086 - protein, 15 aa, Homo sapiens
CAREHGHNDWYFDLW

SEQ ID NO: 33087 - protein, 19 aa, Homo sapiens
CATRVTYCSSTNCRYFDFW

SEQ ID NO: 33088 - protein, 23 aa, Homo sapiens
CARDLMDGYCSGGSCYGDAFDIW

SEQ ID NO: 33089 - protein, 17 aa, Homo sapiens
CARFVGDYGGVNGFDPW

SEQ ID NO: 33090 - protein, 16 aa, Homo sapiens
CSIDDPYNYNGAGDYW

SEQ ID NO: 33091 - protein, 18 aa, Homo sapiens
CAKGDNPSTYSSSWYDYW

SEQ ID NO: 33092 - protein, 17 aa, Homo sapiens
CVRHCASSSCYGYFDIW

SEQ ID NO: 33093 - protein, 16 aa, Homo sapiens
CVKEVGVSLDGGFDIW

SEQ ID NO: 33094 - protein, 15 aa, Homo sapiens
CARLDFWSGYYQDYW

SEQ ID NO: 33095 - protein, 13 aa, Homo sapiens
CANEMGTSVFDYW

SEQ ID NO: 33096 - protein, 20 aa, Homo sapiens
CARDSQGPVVLIYGGWFDPW

SEQ ID NO: 33097 - protein, 16 aa, Homo sapiens
CARGGFEELLYPFDYW

SEQ ID NO: 33098 - protein, 17 aa, Homo sapiens
CARWGTDSGGYYLFDYW

SEQ ID NO: 33099 - protein, 20 aa, Homo sapiens
CARDLILLNTFMYYYGMDVW

SEQ ID NO: 33100 - protein, 18 aa, Homo sapiens
CAKLIEMATITDDYFDYW

SEQ ID NO: 33101 - protein, 16 aa, Homo sapiens
CAKDLSAIFTSWFDPW

SEQ ID NO: 33102 - protein, 17 aa, Homo sapiens
CARDQPAHDYGDYPDYW

SEQ ID NO: 33103 - protein, 13 aa, Homo sapiens
CTREISSSWLDPW

SEQ ID NO: 33104 - protein, 17 aa, Homo sapiens
CARPHSGSYDPHYFDYW

SEQ ID NO: 33105 - protein, 21 aa, Homo sapiens
CARTYYDDHWVSYRQNWFDSW

SEQ ID NO: 33106 - protein, 16 aa, Homo sapiens
CAKVESGSYWGYLDYW

SEQ ID NO: 33107 - protein, 16 aa, Homo sapiens
CTRKEYFNTIYYFDYW

SEQ ID NO: 33108 - protein, 25 aa, Homo sapiens
CARDSDAYSSSWYTFNYYYYGMDVW

SEQ ID NO: 33109 - protein, 23 aa, Homo sapiens
CTRHVDDILTGYYSYYYYGMDVW

SEQ ID NO: 33110 - protein, 12 aa, Homo sapiens
CAAGLLEPIDYW

SEQ ID NO: 33111 - protein, 18 aa, Homo sapiens
CAKHASLRWVPRDAFDVW

SEQ ID NO: 33112 - protein, 12 aa, Homo sapiens
CASYKPPLFDCW

SEQ ID NO: 33113 - protein, 22 aa, Homo sapiens
CARDPLTYCDGDCYPPSYFDYW

SEQ ID NO: 33114 - protein, 17 aa, Homo sapiens
CAKDADSGSYSGGIDYW

SEQ ID NO: 33115 - protein, 18 aa, Homo sapiens
CARILRQQPYYYYGMDVW

SEQ ID NO: 33116 - protein, 25 aa, Homo sapiens
CARENEGYDILTGYLDYYYYGMDVW

SEQ ID NO: 33117 - protein, 16 aa, Homo sapiens
CARAPDPFYRGWFDPW

SEQ ID NO: 33118 - protein, 16 aa, Homo sapiens
CGRSGYFGSGSYPDYW

SEQ ID NO: 33119 - protein, 19 aa, Homo sapiens
CTRDAYLASESNPWYFDYW

SEQ ID NO: 33120 - protein, 18 aa, Homo sapiens
CTVKWYNYETSGYHLDYW

SEQ ID NO: 33121 - protein, 16 aa, Homo sapiens
CAHVPAAMWDDAFDIW

SEQ ID NO: 33122 - protein, 28 aa, Homo sapiens
CAKDITYYDILTGYLMPMNYYYYGMDVW

SEQ ID NO: 33123 - protein, 22 aa, Homo sapiens
CTTESRFFASATGTYSYYFDYW

SEQ ID NO: 33124 - protein, 20 aa, Homo sapiens
CARDLEGESDYGSGSYLDYW

SEQ ID NO: 33125 - protein, 24 aa, Homo sapiens
CAKDIYSGFADSGYGHYYYGMDVW

SEQ ID NO: 33126 - protein, 23 aa, Homo sapiens
CAKDGSRGYSGYARYYYYGMDVW

SEQ ID NO: 33127 - protein, 16 aa, Homo sapiens
CARLNLGSGYPNFDLW

SEQ ID NO: 33128 - protein, 17 aa, Homo sapiens
CVRGCSSVTCTGYFDPW

SEQ ID NO: 33129 - protein, 22 aa, Homo sapiens
CTTDMGGRIVVVTAINGGFDYW

SEQ ID NO: 33130 - protein, 25 aa, Homo sapiens
CEKVGTLYYYDSSGYYQGWYFFDYW

SEQ ID NO: 33131 - protein, 18 aa, Homo sapiens
CARDVSPSGSYPTAFDYW

SEQ ID NO: 33132 - protein, 33 aa, Homo sapiens
CARDLLYYDFWSGYYFGSVPPGGASYYYGMDVW

SEQ ID NO: 33133 - protein, 17 aa, Homo sapiens
CAKHSSDSSPYNNFDHW

SEQ ID NO: 33134 - protein, 17 aa, Homo sapiens
CARRVGANWGDNWFDPW

SEQ ID NO: 33135 - protein, 22 aa, Homo sapiens
CARGGCSSTSCYDYYYYGMDVW

SEQ ID NO: 33136 - protein, 18 aa, Homo sapiens
CARHHLWGGNPYDAFDIW

SEQ ID NO: 33137 - protein, 19 aa, Homo sapiens
CARDYCSSPSCYDWAMDVW

SEQ ID NO: 33138 - protein, 21 aa, Homo sapiens
CAKDRGHIVVVVAATPEFDYW

SEQ ID NO: 33139 - protein, 24 aa, Homo sapiens
CAKDITDSGYNSFFSLPSNYFDYW

SEQ ID NO: 33140 - protein, 19 aa, Homo sapiens
CAKVPEAFYSGFLNWFDPW

SEQ ID NO: 33141 - protein, 19 aa, Homo sapiens
CAKVLGAWFGGAWSPFDNW

SEQ ID NO: 33142 - protein, 23 aa, Homo sapiens
CARVGVMTTVTGSPSYYYGMDVW

SEQ ID NO: 33143 - protein, 22 aa, Homo sapiens
CARHEPSSTTGYSSNWGWFDPW

SEQ ID NO: 33144 - protein, 11 aa, Homo sapiens
CLLYYSGAVIF

SEQ ID NO: 33145 - protein, 18 aa, Homo sapiens
CATGHDTAMVIKDGMDVW

SEQ ID NO: 33146 - protein, 20 aa, Homo sapiens
CAKSYQLLTIVQLEYYFDYW

SEQ ID NO: 33147 - protein, 29 aa, Homo sapiens
CARVVLDPQDIVVVPAAPSYYYYYGMDVW

SEQ ID NO: 33148 - protein, 19 aa, Homo sapiens
CAKLVVSSLNYYYYGMDVW

SEQ ID NO: 33149 - protein, 15 aa, Homo sapiens
CAGTTAMVENWFDPW

SEQ ID NO: 33150 - protein, 23 aa, Homo sapiens
CARDGDDILTGYSADYYYGMDVW

SEQ ID NO: 33151 - protein, 19 aa, Homo sapiens
CARVPTVTSSYYYYGMDVW

SEQ ID NO: 33152 - protein, 11 aa, Homo sapiens
CTSRDYDLDYW

SEQ ID NO: 33153 - protein, 17 aa, Homo sapiens
CAHGDVSYTQEGYFDYW

SEQ ID NO: 33154 - protein, 25 aa, Homo sapiens
CARDYVRLDYDILTGYYYPGHFDYW

SEQ ID NO: 33155 - protein, 13 aa, Homo sapiens
CQSVDISGTSLIF

SEQ ID NO: 33156 - protein, 15 aa, Homo sapiens
CTTAALWFGESLDYW

SEQ ID NO: 33157 - protein, 21 aa, Homo sapiens
CARGQYYYDSSGYQNAWFDPW

SEQ ID NO: 33158 - protein, 28 aa, Homo sapiens
CARGPWRETYYYDSSGYSYYYYYGMDVW

SEQ ID NO: 33159 - protein, 24 aa, Homo sapiens
CARDQRPHDYDILTGYFPYYFDYW

SEQ ID NO: 33160 - protein, 21 aa, Homo sapiens
CARDGDYYDSSGYAAHAFDIW

SEQ ID NO: 33161 - protein, 19 aa, Homo sapiens
CARGSGWPPYYYYYGMDVW

SEQ ID NO: 33162 - protein, 23 aa, Homo sapiens
CATSFAITGTPRHYYYYYGMDVW

SEQ ID NO: 33163 - protein, 19 aa, Homo sapiens
CAHTLVGSYYDSSGYSDYW

SEQ ID NO: 33164 - protein, 18 aa, Homo sapiens
CAKAQSSLWYSENWFDPW

SEQ ID NO: 33165 - protein, 17 aa, Homo sapiens
CAKDIDSSGWYHWFDPW

SEQ ID NO: 33166 - protein, 29 aa, Homo sapiens
CAKDQGVSRGSGSYYYPPRWDYYYGMDVW

SEQ ID NO: 33167 - protein, 21 aa, Homo sapiens
CTTDPLEGTIFGVVIIYPGYW

SEQ ID NO: 33168 - protein, 14 aa, Homo sapiens
CASQTSIRDAFDIW

SEQ ID NO: 33169 - protein, 17 aa, Homo sapiens
CARGGVVAGISGWIDPW

SEQ ID NO: 33170 - protein, 16 aa, Homo sapiens
CALYHDFLSGRRFDPW

SEQ ID NO: 33171 - protein, 17 aa, Homo sapiens
CARQDVWFGELLYFDYW

SEQ ID NO: 33172 - protein, 13 aa, Homo sapiens
CATTEGWEGFDKW

SEQ ID NO: 33173 - protein, 22 aa, Homo sapiens
CATEWAPEGATSDYYYYGMDVW

SEQ ID NO: 33174 - protein, 23 aa, Homo sapiens
CVKPRETDYDYIWGSSRRGFDHW

SEQ ID NO: 33175 - protein, 18 aa, Homo sapiens
CARANIVVVVDEVWFDRW

SEQ ID NO: 33176 - protein, 19 aa, Homo sapiens
CARVQGHDSSAHPWCFDYW

SEQ ID NO: 33177 - protein, 14 aa, Homo sapiens
CAREESDGEYFRHW

SEQ ID NO: 33178 - protein, 27 aa, Homo sapiens
CAGEGELGVDTAMVNTNYYYYYGMDVW

SEQ ID NO: 33179 - protein, 21 aa, Homo sapiens
CARDVLFCSASRCWASYFDYW

SEQ ID NO: 33180 - protein, 26 aa, Homo sapiens
CAHIWGQGDSWGQLYGDYPGWAFDIW

SEQ ID NO: 33181 - protein, 25 aa, Homo sapiens
CARDVPGYSSSWYGRGHYYYGMDVW

SEQ ID NO: 33182 - protein, 16 aa, Homo sapiens
CAREGTAPVPGAFDYW

SEQ ID NO: 33183 - protein, 17 aa, Homo sapiens
CASLVQLEELRSWFDPW

SEQ ID NO: 33184 - protein, 24 aa, Homo sapiens
CARHSMGSTMIVGVITTPAWVDPW

SEQ ID NO: 33185 - protein, 16 aa, Homo sapiens
CAREYLSSWYGWFDPW

SEQ ID NO: 33186 - protein, 17 aa, Homo sapiens
CAREDPTCSGGTCFDHW

SEQ ID NO: 33187 - protein, 15 aa, Homo sapiens
CAKDSGDYGDYGVYW

SEQ ID NO: 33188 - protein, 26 aa, Homo sapiens
CARDMGYYYDSSGYQYYYYYYGMDVW

SEQ ID NO: 33189 - protein, 17 aa, Homo sapiens
CARVFYYDSTAEPFEHW

SEQ ID NO: 33190 - protein, 18 aa, Homo sapiens
CARSLDEQYLAAYYFDYW

SEQ ID NO: 33191 - protein, 21 aa, Homo sapiens
CARASRNYSILTAYNVFFDYW

SEQ ID NO: 33192 - protein, 12 aa, Homo sapiens
CALVTMVRGDYW

SEQ ID NO: 33193 - protein, 30 aa, Homo sapiens
CTTDSPPRFLEWLLRRGHQYYYYYYGMDVW

SEQ ID NO: 33194 - protein, 14 aa, Homo sapiens
CTREPDNKDKFDFW

SEQ ID NO: 33195 - protein, 19 aa, Homo sapiens
CARDKYPGLAVAGNWFDPW

SEQ ID NO: 33196 - protein, 15 aa, Homo sapiens
CARGYYDTDNWFDPW

SEQ ID NO: 33197 - protein, 31 aa, Homo sapiens
CARDGDFTYYYDSSGYQPPRLHYYYYGMDVW

SEQ ID NO: 33198 - protein, 20 aa, Homo sapiens
CAKWGGEAKKDFWSGPFDFW

SEQ ID NO: 33199 - protein, 17 aa, Homo sapiens
CAKDLSSVTSRRHFDYW

SEQ ID NO: 33200 - protein, 25 aa, Homo sapiens
CARVHQYYDILTGLGYDYYYGMDVW

SEQ ID NO: 33201 - protein, 19 aa, Homo sapiens
CARDGEGLRLYEAYYFDYW

SEQ ID NO: 33202 - protein, 14 aa, Homo sapiens
CAKLAGTGESVDYW

SEQ ID NO: 33203 - protein, 14 aa, Homo sapiens
CQSAESGGTYVWVF

SEQ ID NO: 33204 - protein, 16 aa, Homo sapiens
CARIPVGATGGGVDYW

SEQ ID NO: 33205 - protein, 20 aa, Homo sapiens
CAGDPIYCNSTRCPQWFDPW

SEQ ID NO: 33206 - protein, 22 aa, Homo sapiens
CATGLGYCPSTRCYDDGLTDYW

SEQ ID NO: 33207 - protein, 19 aa, Homo sapiens
CARDVDSSHVFVGDALDIW

SEQ ID NO: 33208 - protein, 18 aa, Homo sapiens
CARPHCSFTRCFDAMGVW

SEQ ID NO: 33209 - protein, 22 aa, Homo sapiens
CARDQSPDDYVWGTIAAWFDPW

SEQ ID NO: 33210 - protein, 16 aa, Homo sapiens
CAGSDNWSPKGRFDPW

SEQ ID NO: 33211 - protein, 16 aa, Homo sapiens
CSSYTSSSTLPSHVVF

SEQ ID NO: 33212 - protein, 20 aa, Homo sapiens
CARHAYGYTRGSYYYGMDVW

SEQ ID NO: 33213 - protein, 23 aa, Homo sapiens
CARVLGAYSTFYITYYNYGMDVW

SEQ ID NO: 33214 - protein, 18 aa, Homo sapiens
CVAGTHLGFYYHYGMDVW

SEQ ID NO: 33215 - protein, 21 aa, Homo sapiens
CARTRGNGDIVVVPARWFDPW

SEQ ID NO: 33216 - protein, 18 aa, Homo sapiens
CARRYCDDLTCYLFFDSW

SEQ ID NO: 33217 - protein, 21 aa, Homo sapiens
CARGKYEFLIPLYYYYAMDVW

SEQ ID NO: 33218 - protein, 20 aa, Homo sapiens
CAKATGYYDSSGYPNWFDPW

SEQ ID NO: 33219 - protein, 24 aa, Homo sapiens
CARFVPDYGDYPQGDYYYYGMDVW

SEQ ID NO: 33220 - protein, 14 aa, Homo sapiens
CSSYTTSSTTSVSF

SEQ ID NO: 33221 - protein, 17 aa, Homo sapiens
CARGRGYSYGLPSFDIW

SEQ ID NO: 33222 - protein, 26 aa, Homo sapiens
CNRDRHYPIAGALGLGIYNYYGMDVW

SEQ ID NO: 33223 - protein, 31 aa, Homo sapiens
CAKDAGFGDSSGYAPITRVWGVYYYYGMDVW

SEQ ID NO: 33224 - protein, 25 aa, Homo sapiens
CARGGRPTIFGVVISGYYYYGMDVW

SEQ ID NO: 33225 - protein, 17 aa, Homo sapiens
CARRSPYSSYQYYFDSW

SEQ ID NO: 33226 - protein, 23 aa, Homo sapiens
CAKEDLNGYSSGWTYYYYGMDVW

SEQ ID NO: 33227 - protein, 22 aa, Homo sapiens
CAKGGAFNEYSGGWPRGLFDSW

SEQ ID NO: 33228 - protein, 21 aa, Homo sapiens
CARDGGYYAPFPGYYYGMDVW

SEQ ID NO: 33229 - protein, 10 aa, Homo sapiens
CKVHTGLRTF

SEQ ID NO: 33230 - protein, 18 aa, Homo sapiens
CTRGGEMTGYRVTAFDCW

SEQ ID NO: 33231 - protein, 17 aa, Homo sapiens
CARGHPSGSYQLEFDYW

SEQ ID NO: 33232 - protein, 15 aa, Homo sapiens
CARGVLTSSRWFDPW

SEQ ID NO: 33233 - protein, 18 aa, Homo sapiens
CARDSLTTVVYYYGMDVW

SEQ ID NO: 33234 - protein, 16 aa, Homo sapiens
CAKVENPNHSFQTDYW

SEQ ID NO: 33235 - protein, 25 aa, Homo sapiens
CATDGRGYSGYDDEWGYYYYGMDVW

SEQ ID NO: 33236 - protein, 16 aa, Homo sapiens
CAKEDCSGGSCYSDYW

SEQ ID NO: 33237 - protein, 17 aa, Homo sapiens
CAKIPTGSYESRAFDIW

SEQ ID NO: 33238 - protein, 22 aa, Homo sapiens
CAHLGAYYYGSGSWGYNWFDPW

SEQ ID NO: 33239 - protein, 18 aa, Homo sapiens
CAKDFTRYSGYETNFDYW

SEQ ID NO: 33240 - protein, 24 aa, Homo sapiens
CAKAEEETTSTQGNYYYYYGMDVW

SEQ ID NO: 33241 - protein, 17 aa, Homo sapiens
CASPRDYGDYGGAFDYW

SEQ ID NO: 33242 - protein, 26 aa, Homo sapiens
CARDVRSISMIVVVVTTFPSYAMDVW

SEQ ID NO: 33243 - protein, 21 aa, Homo sapiens
CARTKRYCTNGICFQEWFDSW

SEQ ID NO: 33244 - protein, 19 aa, Homo sapiens
CARGEFFARGYPEHWFDPW

SEQ ID NO: 33245 - protein, 15 aa, Homo sapiens
CARGRGWYGNYFDYW

SEQ ID NO: 33246 - protein, 18 aa, Homo sapiens
CAKLRSTVTTLWDAMDVW

SEQ ID NO: 33247 - protein, 16 aa, Homo sapiens
CAKDRAIAAAGQVDYW

SEQ ID NO: 33248 - protein, 17 aa, Homo sapiens
CAIDIVVVTAIPLLDYW

SEQ ID NO: 33249 - protein, 16 aa, Homo sapiens
CARDVNQRGYSYGYYW

SEQ ID NO: 33250 - protein, 13 aa, Homo sapiens
CQQYYSYSPTYTF

SEQ ID NO: 33251 - protein, 16 aa, Homo sapiens
CAKIDYGDYQGSPDYW

SEQ ID NO: 33252 - protein, 14 aa, Homo sapiens
CARIVATINSFDYW

SEQ ID NO: 33253 - protein, 14 aa, Homo sapiens
CAGGDDILTGYFYW

SEQ ID NO: 33254 - protein, 17 aa, Homo sapiens
CAKDRWSPDSSGYIDYW

SEQ ID NO: 33255 - protein, 21 aa, Homo sapiens
CAREEQYYDSGTYYNYKMDYW

SEQ ID NO: 33256 - protein, 13 aa, Homo sapiens
CQQHKNWPLMYTF

SEQ ID NO: 33257 - protein, 16 aa, Homo sapiens
CANWVLFGSTKVFDVW

SEQ ID NO: 33258 - protein, 20 aa, Homo sapiens
CARDSRGHRRYYYYYGMDVW

SEQ ID NO: 33259 - protein, 16 aa, Homo sapiens
CARDSHYDTTGYVAYW

SEQ ID NO: 33260 - protein, 17 aa, Homo sapiens
CARTFQQWRNFGYFDYW

SEQ ID NO: 33261 - protein, 20 aa, Homo sapiens
CARMWTDYSRRPYYYGMDVW

SEQ ID NO: 33262 - protein, 25 aa, Homo sapiens
CAKDIGSPYGSGSGRDYYYYGMDVW

SEQ ID NO: 33263 - protein, 14 aa, Homo sapiens
CARLIAPYNWFDPW

SEQ ID NO: 33264 - protein, 15 aa, Homo sapiens
CATPRYYGSGGFDYW

SEQ ID NO: 33265 - protein, 20 aa, Homo sapiens
CARVNRLDTNPTTPLFFDFW

SEQ ID NO: 33266 - protein, 16 aa, Homo sapiens
CARTDYDSKGCRFDSW

SEQ ID NO: 33267 - protein, 17 aa, Homo sapiens
CAHRRTSYDSGGNFDSW

SEQ ID NO: 33268 - protein, 16 aa, Homo sapiens
CARYINLEVIFFSDYW

SEQ ID NO: 33269 - protein, 22 aa, Homo sapiens
CASLFINWGLPDLYYYYGMDVW

SEQ ID NO: 33270 - protein, 12 aa, Homo sapiens
CARGHGSWFDPW

SEQ ID NO: 33271 - protein, 18 aa, Homo sapiens
CAKGWAGLLWFGEFYDYW

SEQ ID NO: 33272 - protein, 19 aa, Homo sapiens
CTHRLHRRDSSGPGYFHHW

SEQ ID NO: 33273 - protein, 20 aa, Homo sapiens
CARAAGITMIVVVIAAFDIW

SEQ ID NO: 33274 - protein, 16 aa, Homo sapiens
CASLPYGSGVIRFDPW

SEQ ID NO: 33275 - protein, 16 aa, Homo sapiens
CASSYSGSYYSWFDPW

SEQ ID NO: 33276 - protein, 20 aa, Homo sapiens
CATAPGIAVAGGGGNWFDPW

SEQ ID NO: 33277 - protein, 20 aa, Homo sapiens
CAREIRLVGADYYYYGMDVW

SEQ ID NO: 33278 - protein, 17 aa, Homo sapiens
CAKDLAPSIAAAGGDYW

SEQ ID NO: 33279 - protein, 16 aa, Homo sapiens
CARVPDDIDTTVVDYW

SEQ ID NO: 33280 - protein, 19 aa, Homo sapiens
CARFGFDIVATPHGAFDIW

SEQ ID NO: 33281 - protein, 14 aa, Homo sapiens
CAREHRIGRTIDYW

SEQ ID NO: 33282 - protein, 15 aa, Homo sapiens
CAREDYSGDPPFDHW

SEQ ID NO: 33283 - protein, 15 aa, Homo sapiens
CNSRDSSSNVLGVIF

SEQ ID NO: 33284 - protein, 17 aa, Homo sapiens
CARGQGSITMVRGFDPW

SEQ ID NO: 33285 - protein, 24 aa, Homo sapiens
CAKDIRAERGYSYGLYYYYGMDVW

SEQ ID NO: 33286 - protein, 17 aa, Homo sapiens
CARHTGVTVTTEVLDYW

SEQ ID NO: 33287 - protein, 17 aa, Homo sapiens
CAKDSRLGIDEVIFDYW

SEQ ID NO: 33288 - protein, 25 aa, Homo sapiens
CARAPSGGTIFGVVIIAYYYGMDVW

SEQ ID NO: 33289 - protein, 17 aa, Homo sapiens
CATDRGPYSSSLGFDPW

SEQ ID NO: 33290 - protein, 18 aa, Homo sapiens
CARADDILTGYSVYFDYW

SEQ ID NO: 33291 - protein, 20 aa, Homo sapiens
CARDPIVLMVYPPVGWFDPW

SEQ ID NO: 33292 - protein, 19 aa, Homo sapiens
CARMYYDILTGYSNWFDPW

SEQ ID NO: 33293 - protein, 23 aa, Homo sapiens
CATGGYEMATILRGGVLRGFDPW

SEQ ID NO: 33294 - protein, 20 aa, Homo sapiens
CARDITPGYNIGWHFGFDYW

SEQ ID NO: 33295 - protein, 20 aa, Homo sapiens
CAKDQDYGDYDDKPRGFDYW

SEQ ID NO: 33296 - protein, 17 aa, Homo sapiens
CARDWILGELSGPLDYW

SEQ ID NO: 33297 - protein, 17 aa, Homo sapiens
CASYVVVTAITNWFDPW

SEQ ID NO: 33298 - protein, 19 aa, Homo sapiens
CATHYGDYASYYYYGMDVW

SEQ ID NO: 33299 - protein, 20 aa, Homo sapiens
CTTEAVYCSGSSCPGYFDFW

SEQ ID NO: 33300 - protein, 19 aa, Homo sapiens
CARDLNPLVEMATFLFDYW

SEQ ID NO: 33301 - protein, 22 aa, Homo sapiens
CARVPVGRGSPPGYYYYGMDVW

SEQ ID NO: 33302 - protein, 14 aa, Homo sapiens
CARPGHGYNDFHYW

SEQ ID NO: 33303 - protein, 30 aa, Homo sapiens
CARVDPPRSNYDILTGLLGANYYYYGMDVW

SEQ ID NO: 33304 - protein, 17 aa, Homo sapiens
CARSNSYSGVPRDFDYW

SEQ ID NO: 33305 - protein, 22 aa, Homo sapiens
CAKDLWDLALWFGELFPIPDYW

SEQ ID NO: 33306 - protein, 20 aa, Homo sapiens
CARDYYDSLTDFYDYYFDQW

SEQ ID NO: 33307 - protein, 25 aa, Homo sapiens
CARDVSTMVRGVIITFDYYYGMDVW

SEQ ID NO: 33308 - protein, 18 aa, Homo sapiens
CARLSDCDEDVCYRGDYW

SEQ ID NO: 33309 - protein, 18 aa, Homo sapiens
CARDHYYSSWAYYKFDYW

SEQ ID NO: 33310 - protein, 22 aa, Homo sapiens
CAKDLLQTSGGYYYYYYGMDVW

SEQ ID NO: 33311 - protein, 15 aa, Homo sapiens
CQSYDNSLSGRLWLF

SEQ ID NO: 33312 - protein, 20 aa, Homo sapiens
CGRRQKYFESGFYQYAFDMW

SEQ ID NO: 33313 - protein, 17 aa, Homo sapiens
CAKDVYRSGYDPQIDYW

SEQ ID NO: 33314 - protein, 15 aa, Homo sapiens
CAKDLQLSDWTPDYW

SEQ ID NO: 33315 - protein, 19 aa, Homo sapiens
CARDSFDSSGYLGWYFDYW

SEQ ID NO: 33316 - protein, 26 aa, Homo sapiens
CARDTTVVAATPEVEGGYYYYGMDVW

SEQ ID NO: 33317 - protein, 13 aa, Homo sapiens
CQQYHSWPRGYTF

SEQ ID NO: 33318 - protein, 16 aa, Homo sapiens
CAKIATNWPGPSFDYW

SEQ ID NO: 33319 - protein, 15 aa, Homo sapiens
CGRIAAAGTGPIDYW

SEQ ID NO: 33320 - protein, 17 aa, Homo sapiens
CAKDNDFWSGGDWFDPW

SEQ ID NO: 33321 - protein, 24 aa, Homo sapiens
CARDIVVVPAAQGDYYYYYGMDVW

SEQ ID NO: 33322 - protein, 20 aa, Homo sapiens
CARIRRTTGTTSVGVPFDYW

SEQ ID NO: 33323 - protein, 17 aa, Homo sapiens
CASHRITMIVVVILDYW

SEQ ID NO: 33324 - protein, 24 aa, Homo sapiens
CASGEYDILTGYYSEGYYYGMDVW

SEQ ID NO: 33325 - protein, 19 aa, Homo sapiens
CATGLYYDRSGYYVGIDYW

SEQ ID NO: 33326 - protein, 16 aa, Homo sapiens
CATGSGTVTTGWFDPW

SEQ ID NO: 33327 - protein, 11 aa, Homo sapiens
CQHLNSHPLPF

SEQ ID NO: 33328 - protein, 26 aa, Homo sapiens
CARDGGITGTTPALPNNNYYYGMDVW

SEQ ID NO: 33329 - protein, 17 aa, Homo sapiens
CATTFYVVVVAAPFDYW

SEQ ID NO: 33330 - protein, 23 aa, Homo sapiens
CARGSEDITMIVVVTNNDAFDIW

SEQ ID NO: 33331 - protein, 16 aa, Homo sapiens
CTHRRGYGSTARFDSW

SEQ ID NO: 33332 - protein, 25 aa, Homo sapiens
CAKDKVVVVPAAMGGYYYYYGMDVW

SEQ ID NO: 33333 - protein, 21 aa, Homo sapiens
CARVSKASQWSSIPFAYFDSW

SEQ ID NO: 33334 - protein, 14 aa, Homo sapiens
CAKIERLWAGIDYW

SEQ ID NO: 33335 - protein, 13 aa, Homo sapiens
CAKDLGEWPPDYW

SEQ ID NO: 33336 - protein, 18 aa, Homo sapiens
CAKDKGLWFGEQYYFDYW

SEQ ID NO: 33337 - protein, 20 aa, Homo sapiens
CARNSEQPRYNWARGWFDPW

SEQ ID NO: 33338 - protein, 11 aa, Homo sapiens
CTTLGGATDYW

SEQ ID NO: 33339 - protein, 25 aa, Homo sapiens
CARHLITMVRGVIIAGYYYYGMDVW

SEQ ID NO: 33340 - protein, 26 aa, Homo sapiens
CARAGVGLSYYGSGSYLPRWDWFDPW

SEQ ID NO: 33341 - protein, 17 aa, Homo sapiens
CVREGRHLGVAAYGDCW

SEQ ID NO: 33342 - protein, 24 aa, Homo sapiens
CSRGSANSGDVVVLLGAEIHFDYW

SEQ ID NO: 33343 - protein, 20 aa, Homo sapiens
CAKPPHVVRGDDYYSGFDVW

SEQ ID NO: 33344 - protein, 23 aa, Homo sapiens
CARRVEDYYGSGSPLSEYYFDYW

SEQ ID NO: 33345 - protein, 22 aa, Homo sapiens
CARAVEYYYDSSGYYLEYFQHW

SEQ ID NO: 33346 - protein, 23 aa, Homo sapiens
CARDPTQTVSSSSFYYYYGMDVW

SEQ ID NO: 33347 - protein, 24 aa, Homo sapiens
CARGSWKYFDISTGYYNPGSFDYW

SEQ ID NO: 33348 - protein, 26 aa, Homo sapiens
CAGPHDLHALLMLREVDVYYYGMDVW

SEQ ID NO: 33349 - protein, 20 aa, Homo sapiens
CARARHSSSWYEGGNWFDPW

SEQ ID NO: 33350 - protein, 20 aa, Homo sapiens
CAREPGYCSRGSCYTSFDPW

SEQ ID NO: 33351 - protein, 11 aa, Homo sapiens
CQHRNNWPLSF

SEQ ID NO: 33352 - protein, 15 aa, Homo sapiens
CANLGGFGESAFDIW

SEQ ID NO: 33353 - protein, 30 aa, Homo sapiens
CATAIVVVPAATNAVQPQNAQNYYYGMDVW

SEQ ID NO: 33354 - protein, 24 aa, Homo sapiens
CARGASSPNSSGWYGYYYYGMDVW

SEQ ID NO: 33355 - protein, 24 aa, Homo sapiens
CSGGSCYSRAPPETRYYYYGMDVW

SEQ ID NO: 33356 - protein, 18 aa, Homo sapiens
CARMAFKWLPGEDAFDIW

SEQ ID NO: 33357 - protein, 17 aa, Homo sapiens
CAKLLEWELQGDAFDIW

SEQ ID NO: 33358 - protein, 20 aa, Homo sapiens
CARGGLWEAHSNGYQESDYW

SEQ ID NO: 33359 - protein, 22 aa, Homo sapiens
CAKEGPTVTTKYYYYYYGMDVW

SEQ ID NO: 33360 - protein, 20 aa, Homo sapiens
CARGPDCSGGSCFVAPFDPW

SEQ ID NO: 33361 - protein, 13 aa, Homo sapiens
CQQSGYSPVSFTF

SEQ ID NO: 33362 - protein, 13 aa, Homo sapiens
CHSATDNNVPYVF

SEQ ID NO: 33363 - protein, 17 aa, Homo sapiens
CAKAPSSGYYADAFDIW

SEQ ID NO: 33364 - protein, 19 aa, Homo sapiens
CARHLGCSGGSCYWGYDYW

SEQ ID NO: 33365 - protein, 18 aa, Homo sapiens
CAKAHDNNGYYGSDFDSW

SEQ ID NO: 33366 - protein, 15 aa, Homo sapiens
CAKIAAADTDAFDIW

SEQ ID NO: 33367 - protein, 15 aa, Homo sapiens
CAKVAEYYYGSGDYW

SEQ ID NO: 33368 - protein, 27 aa, Homo sapiens
CARDGAARYDSSGYYYPPYYYYGMDVW

SEQ ID NO: 33369 - protein, 15 aa, Homo sapiens
CARALSGYSYGLDYW

SEQ ID NO: 33370 - protein, 17 aa, Homo sapiens
CAKDLIVVVPKGYFDSW

SEQ ID NO: 33371 - protein, 15 aa, Homo sapiens
CAKLTDGYNHYFDYW

SEQ ID NO: 33372 - protein, 24 aa, Homo sapiens
CATAFIITSQNTQAYYYYYGMDVW

SEQ ID NO: 33373 - protein, 22 aa, Homo sapiens
CAKDGGGITMIVVVISPTFDYW

SEQ ID NO: 33374 - protein, 23 aa, Homo sapiens
CARGLRYFDWLVRSNYYYGMDVW

SEQ ID NO: 33375 - protein, 19 aa, Homo sapiens
CARTYTDDGDYGGGALDIW

SEQ ID NO: 33376 - protein, 16 aa, Homo sapiens
CAKGYNSAWYGGVDYW

SEQ ID NO: 33377 - protein, 21 aa, Homo sapiens
CAKDVFLDDYDIFEPQAFDPW

SEQ ID NO: 33378 - protein, 28 aa, Homo sapiens
CARDQDYDILTGYYQWGYGGPVNWFDPW

SEQ ID NO: 33379 - protein, 19 aa, Homo sapiens
CARGRITIFGVVIGWFDPW

SEQ ID NO: 33380 - protein, 14 aa, Homo sapiens
CAKIEAGTGTTDYW

SEQ ID NO: 33381 - protein, 12 aa, Homo sapiens
CATYFLDGMDVW

SEQ ID NO: 33382 - protein, 22 aa, Homo sapiens
CTTGSSTTIFGVVIILGAFDIW

SEQ ID NO: 33383 - protein, 19 aa, Homo sapiens
CARGITCSGGSCYSELDYW

SEQ ID NO: 33384 - protein, 14 aa, Homo sapiens
CVKDGDDHPAFDIW

SEQ ID NO: 33385 - protein, 16 aa, Homo sapiens
CTIRVDTAMAPIFDYW

SEQ ID NO: 33386 - protein, 17 aa, Homo sapiens
CTRDRGYGYPELVFDIW

SEQ ID NO: 33387 - protein, 20 aa, Homo sapiens
CAKVAYYDSSGYLGYYFDYW

SEQ ID NO: 33388 - protein, 16 aa, Homo sapiens
CARVDGDRTYNWFDPW

SEQ ID NO: 33389 - protein, 29 aa, Homo sapiens
CAKDLKYYDILTGYFAPPNYYYYYGMDVW

SEQ ID NO: 33390 - protein, 21 aa, Homo sapiens
CAADVRYYDWFFSGSDAYEVW

SEQ ID NO: 33391 - protein, 16 aa, Homo sapiens
CIAEDPPYYYYGMDVW

SEQ ID NO: 33392 - protein, 11 aa, Homo sapiens
CYCSADNNRVF

SEQ ID NO: 33393 - protein, 24 aa, Homo sapiens
CGRMTGDFWRGSPQPNSMYAMDVW

SEQ ID NO: 33394 - protein, 16 aa, Homo sapiens
CARHVWGHGDSGLDYW

SEQ ID NO: 33395 - protein, 21 aa, Homo sapiens
CARVPRHYDETSGGLGYFDLW

SEQ ID NO: 33396 - protein, 22 aa, Homo sapiens
CARERWYPIAAAVYYYYGMDVW

SEQ ID NO: 33397 - protein, 18 aa, Homo sapiens
CARNPVGIAAPLGWFDPW

SEQ ID NO: 33398 - protein, 20 aa, Homo sapiens
CASIAAAEGATYYYYGMDVW

SEQ ID NO: 33399 - protein, 15 aa, Homo sapiens
CAKGTSLGDDAFDIW

SEQ ID NO: 33400 - protein, 20 aa, Homo sapiens
CATTQTHSSSWYRGDPFDVW

SEQ ID NO: 33401 - protein, 14 aa, Homo sapiens
CQSSDYSGDNRWVF

SEQ ID NO: 33402 - protein, 31 aa, Homo sapiens
CAKDLAYYDILTGYFPAGSSSTYYYYGMDVW

SEQ ID NO: 33403 - protein, 15 aa, Homo sapiens
CAKSFPSGWYHFDYW

SEQ ID NO: 33404 - protein, 16 aa, Homo sapiens
CAKGGIGSYFTYFDYW

SEQ ID NO: 33405 - protein, 17 aa, Homo sapiens
CAKAPDSSGWYGAFSYW

SEQ ID NO: 33406 - protein, 16 aa, Homo sapiens
CAREFCSSTSCYFDYW

SEQ ID NO: 33407 - protein, 19 aa, Homo sapiens
CARRPYCSSTTCFLHFDFW

SEQ ID NO: 33408 - protein, 21 aa, Homo sapiens
CAKVGYYDSSGYLYPGWFDPW

SEQ ID NO: 33409 - protein, 26 aa, Homo sapiens
CAKRRVRPDPWIQLWLPSYYYGMDVW

SEQ ID NO: 33410 - protein, 13 aa, Homo sapiens
CARRGRYGGPDYW

SEQ ID NO: 33411 - protein, 15 aa, Homo sapiens
CAREAVAVWLSTDYW

SEQ ID NO: 33412 - protein, 17 aa, Homo sapiens
CASLIDVEDYYYGMDVW

SEQ ID NO: 33413 - protein, 14 aa, Homo sapiens
CATGPQRWLQLDYW

SEQ ID NO: 33414 - protein, 21 aa, Homo sapiens
CAKVGGIAAAGSFYYYGMDVW

SEQ ID NO: 33415 - protein, 16 aa, Homo sapiens
CASEGVINRDAIIDYW

SEQ ID NO: 33416 - protein, 20 aa, Homo sapiens
CASHYVWGSYRQYGGGFDYW

SEQ ID NO: 33417 - protein, 12 aa, Homo sapiens
CQTWDTVIPGLF

SEQ ID NO: 33418 - protein, 25 aa, Homo sapiens
CATAPSVRYDILTGSYYYYYGMDVW

SEQ ID NO: 33419 - protein, 29 aa, Homo sapiens
CARAEIQVDDFWSGYFHMGAQYYYGMDVW

SEQ ID NO: 33420 - protein, 15 aa, Homo sapiens
CATRRKFDWLLLDYW

SEQ ID NO: 33421 - protein, 22 aa, Homo sapiens
CAKAYLSGSQTTNYYYYGMDVW

SEQ ID NO: 33422 - protein, 22 aa, Homo sapiens
CARARRGITMIVVVITTTFDYW

SEQ ID NO: 33423 - protein, 19 aa, Homo sapiens
CARDISSGWYVDYYGMDVW

SEQ ID NO: 33424 - protein, 13 aa, Homo sapiens
CATSNLNRAMDVW

SEQ ID NO: 33425 - protein, 16 aa, Homo sapiens
CTPTYDFWSGNYFDYW

SEQ ID NO: 33426 - protein, 20 aa, Homo sapiens
CAHMFYDILTGYYINWFDPW

SEQ ID NO: 33427 - protein, 22 aa, Homo sapiens
CARASHGVLAAGTNYYYGMDVW

SEQ ID NO: 33428 - protein, 21 aa, Homo sapiens
CARDQIPVTGDRYYYYGMDVW

SEQ ID NO: 33429 - protein, 25 aa, Homo sapiens
CASGHATYYDILTGYYIGQDYFDYW

SEQ ID NO: 33430 - protein, 14 aa, Homo sapiens
CARGHAVAGTYDYW

SEQ ID NO: 33431 - protein, 21 aa, Homo sapiens
CVKNTEYDFWSGYAPFYFDSW

SEQ ID NO: 33432 - protein, 21 aa, Homo sapiens
CARPSYGDPSYYYYYYGMDVW

SEQ ID NO: 33433 - protein, 19 aa, Homo sapiens
CAKDIERFWYHYYYGMDVW

SEQ ID NO: 33434 - protein, 16 aa, Homo sapiens
CAKPHGGYYYGYFDYW

SEQ ID NO: 33435 - protein, 16 aa, Homo sapiens
CAKPNFDWLWDAFDVW

SEQ ID NO: 33436 - protein, 15 aa, Homo sapiens
CAAWDDNLSGPIWVF

SEQ ID NO: 33437 - protein, 13 aa, Homo sapiens
CSSTDSSGTYRMF

SEQ ID NO: 33438 - protein, 16 aa, Homo sapiens
CARPDSSASYWFFDFW

SEQ ID NO: 33439 - protein, 17 aa, Homo sapiens
CAKDSVWFGEFFVFDYW

SEQ ID NO: 33440 - protein, 18 aa, Homo sapiens
CAKLPYCSSTSCYVGDYW

SEQ ID NO: 33441 - protein, 22 aa, Homo sapiens
CARFGYGDYVSLTYYHYGMDVW

SEQ ID NO: 33442 - protein, 14 aa, Homo sapiens
CAKDSTAAGLWDYW

SEQ ID NO: 33443 - protein, 12 aa, Homo sapiens
CASYAGSNNVIF

SEQ ID NO: 33444 - protein, 19 aa, Homo sapiens
CAKDKGEGSGWSPPYFDYW

SEQ ID NO: 33445 - protein, 17 aa, Homo sapiens
CTTVLLWFGEPLGDDYW

SEQ ID NO: 33446 - protein, 15 aa, Homo sapiens
CGESHTIGGQVGWVF

SEQ ID NO: 33447 - protein, 19 aa, Homo sapiens
CARDSVNGHDFWSGHVDYW

SEQ ID NO: 33448 - protein, 23 aa, Homo sapiens
CARTPYSEQWLVRWGYYYGMDVW

SEQ ID NO: 33449 - protein, 25 aa, Homo sapiens
CARAEEGGFDWLFNSDYYYYGMDVW

SEQ ID NO: 33450 - protein, 18 aa, Homo sapiens
CARDGGVLTGSRNYFDYW

SEQ ID NO: 33451 - protein, 27 aa, Homo sapiens
CARGIRLNYDILTGYWWEYYYYGMDVW

SEQ ID NO: 33452 - protein, 20 aa, Homo sapiens
CAKAPGCSGGSCPRIWFDPW

SEQ ID NO: 33453 - protein, 18 aa, Homo sapiens
CARAPNPTYSSGHYFDYW

SEQ ID NO: 33454 - protein, 22 aa, Homo sapiens
CARLRIAVAGSGVYYYYGMDVW

SEQ ID NO: 33455 - protein, 16 aa, Homo sapiens
CARDPVKVGATGFDPW

SEQ ID NO: 33456 - protein, 14 aa, Homo sapiens
CATQRVGADHFDYW

SEQ ID NO: 33457 - protein, 19 aa, Homo sapiens
CAHRGGIAADGLRGVFDYW

SEQ ID NO: 33458 - protein, 19 aa, Homo sapiens
CTPSWLHELFPNTGSFSYW

SEQ ID NO: 33459 - protein, 16 aa, Homo sapiens
CGRSVFDSTLYYFEYW

SEQ ID NO: 33460 - protein, 21 aa, Homo sapiens
CARVDWFGDISNPFFWYFDPW

SEQ ID NO: 33461 - protein, 15 aa, Homo sapiens
CARISAAAGSAIDYW

SEQ ID NO: 33462 - protein, 21 aa, Homo sapiens
CARAGTGYSSSWYLYWYFDLW

SEQ ID NO: 33463 - protein, 13 aa, Homo sapiens
CARDGPGTPFGYW

SEQ ID NO: 33464 - protein, 18 aa, Homo sapiens
CARSDCSSSVCPWGWDYW

SEQ ID NO: 33465 - protein, 23 aa, Homo sapiens
CAKDAGDGYYYDSSGYPRYFDLW

SEQ ID NO: 33466 - protein, 17 aa, Homo sapiens
CVKQYQAIAAAGFFDYW

SEQ ID NO: 33467 - protein, 23 aa, Homo sapiens
CAKMYYSDNSGYFYGPPHAFDTW

SEQ ID NO: 33468 - protein, 27 aa, Homo sapiens
CARGRRGPTTLLGPFGGVIVDKEFDYW

SEQ ID NO: 33469 - protein, 16 aa, Homo sapiens
CAFPLSIVRGGASDYW

SEQ ID NO: 33470 - protein, 15 aa, Homo sapiens
CARVYCTNGVCVDYW

SEQ ID NO: 33471 - protein, 20 aa, Homo sapiens
CARDPTKVWGSYPTYYFDYW

SEQ ID NO: 33472 - protein, 23 aa, Homo sapiens
CARSGDTVVVPAGEARSNWLDPW

SEQ ID NO: 33473 - protein, 21 aa, Homo sapiens
CARHVGYSSGYPTPPYYFDYW

SEQ ID NO: 33474 - protein, 13 aa, Homo sapiens
CQSADTGGPYVVF

SEQ ID NO: 33475 - protein, 21 aa, Homo sapiens
CAREGSYGDLLTVKGYAFDIW

SEQ ID NO: 33476 - protein, 14 aa, Homo sapiens
CQQYSSYSPSMYIF

SEQ ID NO: 33477 - protein, 16 aa, Homo sapiens
CARTYIAAGSLGFDPW

SEQ ID NO: 33478 - protein, 22 aa, Homo sapiens
CARVRDARYCSAGRCSGWFDPW

SEQ ID NO: 33479 - protein, 21 aa, Homo sapiens
CARVWNYYHSSGDYLYYIDYW

SEQ ID NO: 33480 - protein, 19 aa, Homo sapiens
CARLVDTAMGYYYYGMDVW

SEQ ID NO: 33481 - protein, 19 aa, Homo sapiens
CARHGGTMMVVVITVFDYW

SEQ ID NO: 33482 - protein, 16 aa, Homo sapiens
CAKHDYGDYSGTFDIW

SEQ ID NO: 33483 - protein, 29 aa, Homo sapiens
CATSRGIVNEYDFWSGPIRGESASAVDVW

SEQ ID NO: 33484 - protein, 24 aa, Homo sapiens
CARGVTFGGPRGLYPRGNYALDVW

SEQ ID NO: 33485 - protein, 19 aa, Homo sapiens
CARDLGYFGTAKWAWLDPW

SEQ ID NO: 33486 - protein, 19 aa, Homo sapiens
CARVGLGIFGVVTLGFDPW

SEQ ID NO: 33487 - protein, 23 aa, Homo sapiens
CATATVLVWRTTGYYYYYGMDVW

SEQ ID NO: 33488 - protein, 16 aa, Homo sapiens
CAGKLRGRESRWFDPW

SEQ ID NO: 33489 - protein, 19 aa, Homo sapiens
CANLLGYYYGSGSNTFDYW

SEQ ID NO: 33490 - protein, 18 aa, Homo sapiens
CARGKAVVGIMGMWFDPW

SEQ ID NO: 33491 - protein, 20 aa, Homo sapiens
CAGGLINDYSNYYYYTFDVW

SEQ ID NO: 33492 - protein, 14 aa, Homo sapiens
CAKVSSSFDPSDYW

SEQ ID NO: 33493 - protein, 18 aa, Homo sapiens
CASPRNDYDILTGSFDYW

SEQ ID NO: 33494 - protein, 15 aa, Homo sapiens
CATFPRYWFGEFWYW

SEQ ID NO: 33495 - protein, 25 aa, Homo sapiens
CAKDQWYGSGSYYNPNYYYYGMDVW

SEQ ID NO: 33496 - protein, 14 aa, Homo sapiens
CQSYDTSLTDNYVF

SEQ ID NO: 33497 - protein, 19 aa, Homo sapiens
CARGYAGSAHYYKSPFDYW

SEQ ID NO: 33498 - protein, 19 aa, Homo sapiens
CTKGDLSAMTSLWGYFQHW

SEQ ID NO: 33499 - protein, 10 aa, Homo sapiens [sequence omitted]

SEQ ID NO: 33500 - protein, 18 aa, Homo sapiens
CAKNVIWGKWSPLYFDSW

SEQ ID NO: 33501 - protein, 14 aa, Homo sapiens
CARDGVWNEAFDIW

SEQ ID NO: 33502 - protein, 18 aa, Homo sapiens
CARDRVDGSGWSYYFDYW

SEQ ID NO: 33503 - protein, 15 aa, Homo sapiens
CARGGYDYTPLFDYW

SEQ ID NO: 33504 - protein, 18 aa, Homo sapiens
CAKIPGGQWLVSDAFDIW

SEQ ID NO: 33505 - protein, 15 aa, Homo sapiens
CARVGIEVVPNFDYW

SEQ ID NO: 33506 - protein, 14 aa, Homo sapiens
CARSNAGPAVLDYW

SEQ ID NO: 33507 - protein, 15 aa, Homo sapiens
CAHLVYGDSLGFDYW

SEQ ID NO: 33508 - protein, 14 aa, Homo sapiens
CAKLNNRYSYGDYW

SEQ ID NO: 33509 - protein, 17 aa, Homo sapiens
CASHPRGYDILTGYDYW

SEQ ID NO: 33510 - protein, 26 aa, Homo sapiens
CARNDDSRTYYDILTGYYRNYGMDVW

SEQ ID NO: 33511 - protein, 18 aa, Homo sapiens
CARAPREAYDSTGYPDYW

SEQ ID NO: 33512 - protein, 16 aa, Homo sapiens
CTRGVEYATSGYSVYW

SEQ ID NO: 33513 - protein, 22 aa, Homo sapiens
CARGVVSPGYYILDQFSWFDPW

SEQ ID NO: 33514 - protein, 18 aa, Homo sapiens
CAKAAGDYYDSSGYSDYW

SEQ ID NO: 33515 - protein, 19 aa, Homo sapiens
CARVGYCSDGRCHNWFDPW

SEQ ID NO: 33516 - protein, 16 aa, Homo sapiens
CAHRRFISRADYFDYW

SEQ ID NO: 33517 - protein, 22 aa, Homo sapiens
CVKDLDYYDGSAYYFDHPFDSW

SEQ ID NO: 33518 - protein, 18 aa, Homo sapiens
CARADNGELLRNNWFDSW

SEQ ID NO: 33519 - protein, 25 aa, Homo sapiens
CAKAEIKITFGGLIVPSYYYGMDVW

SEQ ID NO: 33520 - protein, 22 aa, Homo sapiens
CARVKAGIGSWTLYYYYGMDVW

SEQ ID NO: 33521 - protein, 14 aa, Homo sapiens
CTAWSRGEEWFDPW

SEQ ID NO: 33522 - protein, 12 aa, Homo sapiens
CAREDDGVIDYW

SEQ ID NO: 33523 - protein, 15 aa, Homo sapiens
CQSADDSGGYDYVLF

SEQ ID NO: 33524 - protein, 16 aa, Homo sapiens
CVRGQFYGLGGTFDKW

SEQ ID NO: 33525 - protein, 21 aa, Homo sapiens
CARDFVVVPPAMYYYYGMDVW

SEQ ID NO: 33526 - protein, 16 aa, Homo sapiens
CAREISYGDSTYFDYW

SEQ ID NO: 33527 - protein, 19 aa, Homo sapiens
CARHATMIVVVITPWFDPW

SEQ ID NO: 33528 - protein, 11 aa, Homo sapiens
CAPLSDLLDYW

SEQ ID NO: 33529 - protein, 22 aa, Homo sapiens
CARDVRVPAGGKSYYYDGMDVW

SEQ ID NO: 33530 - protein, 20 aa, Homo sapiens
CAKDISPIIAAAGTGYFDYW

SEQ ID NO: 33531 - protein, 19 aa, Homo sapiens
CARAERVAVAGSYWYFDLW

SEQ ID NO: 33532 - protein, 18 aa, Homo sapiens
CARANWVSMTVENWFDPW

SEQ ID NO: 33533 - protein, 16 aa, Homo sapiens
CARNGRTIGEGPLDYW

SEQ ID NO: 33534 - protein, 14 aa, Homo sapiens
CAANILVVESFDLW

SEQ ID NO: 33535 - protein, 22 aa, Homo sapiens
CATAPTVVTPEDYYYYYGMDVW

SEQ ID NO: 33536 - protein, 18 aa, Homo sapiens
CARDLEPPPAAVDAFDLW

SEQ ID NO: 33537 - protein, 14 aa, Homo sapiens
CARGGTLAWYFDLW

SEQ ID NO: 33538 - protein, 18 aa, Homo sapiens
CATGVLLWFGGDNWFDPW

SEQ ID NO: 33539 - protein, 18 aa, Homo sapiens
CAKGIEYGRTDENYFDYW

SEQ ID NO: 33540 - protein, 17 aa, Homo sapiens
CARLEKGQWHGYYFDYW

SEQ ID NO: 33541 - protein, 17 aa, Homo sapiens
CAHRLPSSWYGEWFDPW

SEQ ID NO: 33542 - protein, 24 aa, Homo sapiens
CARVGPFYETLTGFWTQMNWFDPW

SEQ ID NO: 33543 - protein, 17 aa, Homo sapiens
CARGPLGGSPDWCFDLW

SEQ ID NO: 33544 - protein, 29 aa, Homo sapiens
CAKDLRYYDILTGYYPSHQYYYYYGMDVW

SEQ ID NO: 33545 - protein, 21 aa, Homo sapiens
CTTDLPKDSSVYYQDDAFDIW

SEQ ID NO: 33546 - protein, 17 aa, Homo sapiens
CAKLSSGWYEGFDFDYW

SEQ ID NO: 33547 - protein, 16 aa, Homo sapiens
CAKGSFGIAAASVDYW

SEQ ID NO: 33548 - protein, 19 aa, Homo sapiens
CAKKPGIAAAGTSGWFDPW

SEQ ID NO: 33549 - protein, 12 aa, Homo sapiens
CARDVGDCPDYW

SEQ ID NO: 33550 - protein, 15 aa, Homo sapiens
CLLSYSGLGGGYVVF

SEQ ID NO: 33551 - protein, 20 aa, Homo sapiens
CARVGRTLLWFGEFSYFDYW

SEQ ID NO: 33552 - protein, 21 aa, Homo sapiens
CARAGYCSGGSCYYYYGMDVW

SEQ ID NO: 33553 - protein, 21 aa, Homo sapiens
CAALMITFGGIMPVEDGLDVW

SEQ ID NO: 33554 - protein, 21 aa, Homo sapiens
CAKDGRDYYGSGSYGASFDYW

SEQ ID NO: 33555 - protein, 24 aa, Homo sapiens
CARMYYDILTGYLGGYYYYGMDVW

SEQ ID NO: 33556 - protein, 17 aa, Homo sapiens
CARARRWQQMVEAFDYW

SEQ ID NO: 33557 - protein, 15 aa, Homo sapiens
CATGALLRGSWFDPW

SEQ ID NO: 33558 - protein, 19 aa, Homo sapiens
CAHRIYDSGGYYDYYFNYW

SEQ ID NO: 33559 - protein, 21 aa, Homo sapiens
CAKFNRLLWFGELSDDAFDIW

SEQ ID NO: 33560 - protein, 12 aa, Homo sapiens
CARGLEDPLDVW

SEQ ID NO: 33561 - protein, 19 aa, Homo sapiens
CTTTLRYFPGYYYYGMDVW

SEQ ID NO: 33562 - protein, 16 aa, Homo sapiens
CARVIPGIAAEYFDYW

SEQ ID NO: 33563 - protein, 18 aa, Homo sapiens
CARDLGSYDSSGWAFDIW

SEQ ID NO: 33564 - protein, 17 aa, Homo sapiens
CARGPYSGTYYGHFDYW

SEQ ID NO: 33565 - protein, 20 aa, Homo sapiens
CAKMDHHETYYYGSGTYDYW

SEQ ID NO: 33566 - protein, 19 aa, Homo sapiens
CATIHYYDFWSGFYYGDYW

SEQ ID NO: 33567 - protein, 17 aa, Homo sapiens
CARTFRGVIRDDAFDIW

SEQ ID NO: 33568 - protein, 18 aa, Homo sapiens
CASITYYYDSTPGYFDYW

SEQ ID NO: 33569 - protein, 29 aa, Homo sapiens
CARDLLSSPEWFGELLSPFSYYYYGMDVW

SEQ ID NO: 33570 - protein, 16 aa, Homo sapiens
CARGEVVLTSDLCDYW

SEQ ID NO: 33571 - protein, 20 aa, Homo sapiens
CARDGDDYYGSGYSNWFDPW

SEQ ID NO: 33572 - protein, 18 aa, Homo sapiens
CAKALGETYYGSGSRDYW

SEQ ID NO: 33573 - protein, 17 aa, Homo sapiens
CARAPSGTLNPFNFDYW

SEQ ID NO: 33574 - protein, 18 aa, Homo sapiens
CAREEVGATWVNWYFDLW

SEQ ID NO: 33575 - protein, 21 aa, Homo sapiens
CAKEGGLNIAAAGYGVYFDYW

SEQ ID NO: 33576 - protein, 18 aa, Homo sapiens
CAKDHICNSGCTAWFDSW

SEQ ID NO: 33577 - protein, 14 aa, Homo sapiens
CARQNGGPGPFDIW

SEQ ID NO: 33578 - protein, 17 aa, Homo sapiens
CARGSPVEMATITMDYW

SEQ ID NO: 33579 - protein, 23 aa, Homo sapiens
CARWKAVPAMADYGDYPGYFDYW

SEQ ID NO: 33580 - protein, 19 aa, Homo sapiens
CARHILGPYGSGSYHFDYW

SEQ ID NO: 33581 - protein, 16 aa, Homo sapiens
CARGITMIVDDGMDVW

SEQ ID NO: 33582 - protein, 23 aa, Homo sapiens
CAGEGVSKGYYTGLPGNDALDAW

SEQ ID NO: 33583 - protein, 14 aa, Homo sapiens
CARDNGEWFPHDYW

SEQ ID NO: 33584 - protein, 14 aa, Homo sapiens
CAKVGEAGTPFDYW

SEQ ID NO: 33585 - protein, 19 aa, Homo sapiens
CAKAPDIVVVVAASHFDYW

SEQ ID NO: 33586 - protein, 26 aa, Homo sapiens
CARSPITMVRGFYWTGLIVSDYFDYW

SEQ ID NO: 33587 - protein, 19 aa, Homo sapiens
CAHDDDGRHYYYVSWFDNW

SEQ ID NO: 33588 - protein, 20 aa, Homo sapiens
CARNRRIEVGGTTVDAFDSW

SEQ ID NO: 33589 - protein, 15 aa, Homo sapiens
CASPRGYSYGPFDYW

SEQ ID NO: 33590 - protein, 22 aa, Homo sapiens
CARVGAPITMVRGVIRYWFDPW

SEQ ID NO: 33591 - protein, 22 aa, Homo sapiens
CAKFEGGLNPGPYYYDSTGDYW

SEQ ID NO: 33592 - protein, 18 aa, Homo sapiens
CARDYSSGWYGGNYFDYW

SEQ ID NO: 33593 - protein, 23 aa, Homo sapiens
CAKAKIDPDYYDSSDFFDALDVW

SEQ ID NO: 33594 - protein, 22 aa, Homo sapiens
CARELVTQAAAGVYYYYGMDVW

SEQ ID NO: 33595 - protein, 24 aa, Homo sapiens
CAKDRGYGDYDWLGNYYYYGMDVW

SEQ ID NO: 33596 - protein, 15 aa, Homo sapiens
CARELLMGSSFFDSW

SEQ ID NO: 33597 - protein, 18 aa, Homo sapiens
CARFGYSYSGDADAFDIW

SEQ ID NO: 33598 - protein, 17 aa, Homo sapiens
CAGGPSFYIYYYGMDVW

SEQ ID NO: 33599 - protein, 14 aa, Homo sapiens
CAREGALTPGFDLW

SEQ ID NO: 33600 - protein, 24 aa, Homo sapiens
CARDRDYYGSGSYSLYYYYGMDVW

SEQ ID NO: 33601 - protein, 20 aa, Homo sapiens
CAKDSLLGYYDSSMGWFDPW

SEQ ID NO: 33602 - protein, 20 aa, Homo sapiens
CAREDDDFWSGYYTRYFDYW

SEQ ID NO: 33603 - protein, 14 aa, Homo sapiens
CAAHLSVRAVFDYW

SEQ ID NO: 33604 - protein, 19 aa, Homo sapiens
CAKDKGDGYNPRYYYFDYW

SEQ ID NO: 33605 - protein, 17 aa, Homo sapiens
CARVLRGTASIMRFDAW

SEQ ID NO: 33606 - protein, 11 aa, Homo sapiens
CQQYHNWPLAF

SEQ ID NO: 33607 - protein, 22 aa, Homo sapiens
CATFMVAATRGQQTYYYGMDVW

SEQ ID NO: 33608 - protein, 18 aa, Homo sapiens
CTRVWALGAAGTAWFDPW

SEQ ID NO: 33609 - protein, 20 aa, Homo sapiens
CARGARRVRATITPPAADYW

SEQ ID NO: 33610 - protein, 17 aa, Homo sapiens
CARRVSDILVRRPFDYW

SEQ ID NO: 33611 - protein, 16 aa, Homo sapiens
CAKHDCSSTSCPPDYW

SEQ ID NO: 33612 - protein, 16 aa, Homo sapiens
CQSADSSGTYRGNWVF

SEQ ID NO: 33613 - protein, 27 aa, Homo sapiens
CARGVARHCSSTSCYVDYYYYYGMDVW

SEQ ID NO: 33614 - protein, 23 aa, Homo sapiens
CATTENSDFDWLRGRYYYGMDVW

SEQ ID NO: 33615 - protein, 21 aa, Homo sapiens
CARATIGYCSGGSCLPGFDYW

SEQ ID NO: 33616 - protein, 25 aa, Homo sapiens
CARIVGGVVGGWPSVVATDDALEIW

SEQ ID NO: 33617 - protein, 18 aa, Homo sapiens
CATELPRVRSSGWYLGYW

SEQ ID NO: 33618 - protein, 23 aa, Homo sapiens
CARMTPTDYDILTGYFADAFDIW

SEQ ID NO: 33619 - protein, 16 aa, Homo sapiens
CAKDRTYSYGNYFDYW

SEQ ID NO: 33620 - protein, 12 aa, Homo sapiens
CAGQLVESLDYW

SEQ ID NO: 33621 - protein, 19 aa, Homo sapiens
CASNRRSGYYYYYYDMDVW

SEQ ID NO: 33622 - protein, 22 aa, Homo sapiens
CAKVSLDLQVPADGFKYYFDYW

SEQ ID NO: 33623 - protein, 16 aa, Homo sapiens
CVKDHVEGGAGWFDSW

SEQ ID NO: 33624 - protein, 15 aa, Homo sapiens
CVKGFWSGYHPFDYW

SEQ ID NO: 33625 - protein, 15 aa, Homo sapiens
CVKGRSYSYYNFDYW

SEQ ID NO: 33626 - protein, 17 aa, Homo sapiens
CARFSTFSLVRAWFDPW

SEQ ID NO: 33627 - protein, 18 aa, Homo sapiens
CANLPTVTPGSDGAFDIW

SEQ ID NO: 33628 - protein, 20 aa, Homo sapiens
CAKDITEFYEVVGDDGFDIW

SEQ ID NO: 33629 - protein, 22 aa, Homo sapiens
CARSHMAAPGPNAERGPWLDPW

SEQ ID NO: 33630 - protein, 11 aa, Homo sapiens
CQQLHSYKITF

SEQ ID NO: 33631 - protein, 23 aa, Homo sapiens
CAKGSGSGYYSSTSCEGDYFDYW

SEQ ID NO: 33632 - protein, 25 aa, Homo sapiens
CAKDMWDGYSYGYGGLKYYYGMDVW

SEQ ID NO: 33633 - protein, 23 aa, Homo sapiens
CARAAVLRYFDWLLPAVNWFDPW

SEQ ID NO: 33634 - protein, 17 aa, Homo sapiens
CAKDNHLSDWNYGIDYW

SEQ ID NO: 33635 - protein, 18 aa, Homo sapiens
CARDQMATIMGYNWFDPW

SEQ ID NO: 33636 - protein, 18 aa, Homo sapiens
CARDAGYPGSISYKFDQW

SEQ ID NO: 33637 - protein, 18 aa, Homo sapiens
CAREEPGIAAAENYFDSW

SEQ ID NO: 33638 - protein, 18 aa, Homo sapiens
CAKIPTPYCSSTSCRDYW

SEQ ID NO: 33639 - protein, 19 aa, Homo sapiens
CARQPIPLLLKAPGWFDPW

SEQ ID NO: 33640 - protein, 14 aa, Homo sapiens
CTRSQWQQLEFDSW

SEQ ID NO: 33641 - protein, 15 aa, Homo sapiens
CVGEEDGGTHAFDIW

SEQ ID NO: 33642 - protein, 17 aa, Homo sapiens
CARLSGQWLASGWFDPW

SEQ ID NO: 33643 - protein, 18 aa, Homo sapiens
CARDEPGYYGDWGPFDYW

SEQ ID NO: 33644 - protein, 12 aa, Homo sapiens [sequence omitted]

SEQ ID NO: 33645 - protein, 15 aa, Homo sapiens
CARDWAGATYAFDIW

SEQ ID NO: 33646 - protein, 14 aa, Homo sapiens
CAKIAIVGAPGDYW

SEQ ID NO: 33647 - protein, 17 aa, Homo sapiens
CATPRQQLVPIWYFDYW

SEQ ID NO: 33648 - protein, 21 aa, Homo sapiens
CARAASAVVVMVYAGDAFDLW

SEQ ID NO: 33649 - protein, 17 aa, Homo sapiens
CAKDGGLPMPFYYFDYW

SEQ ID NO: 33650 - protein, 13 aa, Homo sapiens
CAGGYSYGYVDYW

SEQ ID NO: 33651 - protein, 19 aa, Homo sapiens
CARESGFDDTGYLHYLDLW

SEQ ID NO: 33652 - protein, 16 aa, Homo sapiens
CAKEGYDSSGYYYHYW

SEQ ID NO: 33653 - protein, 20 aa, Homo sapiens
CAKQLYDILTGYYIPPFDYW

SEQ ID NO: 33654 - protein, 15 aa, Homo sapiens
CVKGVPGALDGVDIW

SEQ ID NO: 33655 - protein, 14 aa, Homo sapiens
CTNLDILTGHHDYW

SEQ ID NO: 33656 - protein, 15 aa, Homo sapiens
CAKDRGPIPASMDYW

SEQ ID NO: 33657 - protein, 17 aa, Homo sapiens
CAASNYYDSSGYAFDIW

SEQ ID NO: 33658 - protein, 14 aa, Homo sapiens
CARDQFAFWYFDLW

SEQ ID NO: 33659 - protein, 16 aa, Homo sapiens
CARDMVEQWLGYFDYW

SEQ ID NO: 33660 - protein, 21 aa, Homo sapiens
CARSYDYGEYIGGPEPCFDYW

SEQ ID NO: 33661 - protein, 14 aa, Homo sapiens
CARDKGGRWPFDYW

SEQ ID NO: 33662 - protein, 17 aa, Homo sapiens
CARDGDIAMVTDALDVW

SEQ ID NO: 33663 - protein, 18 aa, Homo sapiens
CARGQRDRSNTWYGFDYW

SEQ ID NO: 33664 - protein, 15 aa, Homo sapiens
CAKDGVMAPGAFDIW

SEQ ID NO: 33665 - protein, 17 aa, Homo sapiens
CARGGSGWDSLGFFDYW

SEQ ID NO: 33666 - protein, 22 aa, Homo sapiens
CAKDGDSSSWYDYYYYYGMDVW

SEQ ID NO: 33667 - protein, 13 aa, Homo sapiens
CARSGPLGGVDYW

SEQ ID NO: 33668 - protein, 23 aa, Homo sapiens
CARDGENYYDSSSGYYYYGMDVW

SEQ ID NO: 33669 - protein, 13 aa, Homo sapiens
CHSVDSSGAFRVF

SEQ ID NO: 33670 - protein, 19 aa, Homo sapiens
CARSPQTRVQRDLYFFDYW

SEQ ID NO: 33671 - protein, 22 aa, Homo sapiens
CAKDIGTYYYDSSGYADAFDIW

SEQ ID NO: 33672 - protein, 16 aa, Homo sapiens
CTPIDSSDWWEWFDPW

SEQ ID NO: 33673 - protein, 15 aa, Homo sapiens
CAHRLPGTGGWFDPW

SEQ ID NO: 33674 - protein, 21 aa, Homo sapiens
CAILGWDTVVVPVDEDYFDSW

SEQ ID NO: 33675 - protein, 14 aa, Homo sapiens
CGRAQSGYTYIDHW

SEQ ID NO: 33676 - protein, 23 aa, Homo sapiens
CARGGFDALAGFGEIYYFAMDVW

SEQ ID NO: 33677 - protein, 25 aa, Homo sapiens
CATAHVDCWNTNCYSYYHFYAMDVW

SEQ ID NO: 33678 - protein, 15 aa, Homo sapiens
CAKGGLPVAGFVDYW

SEQ ID NO: 33679 - protein, 13 aa, Homo sapiens
CARSTTSADFDNW

SEQ ID NO: 33680 - protein, 16 aa, Homo sapiens
CARDRSSDLVGWFDPW

SEQ ID NO: 33681 - protein, 18 aa, Homo sapiens
CASLEFFGVVMTKYFVYW

SEQ ID NO: 33682 - protein, 14 aa, Homo sapiens
CARLPFGDPYFDYW

SEQ ID NO: 33683 - protein, 22 aa, Homo sapiens
CAREGVVGRVWGSYRYYGMDVW

SEQ ID NO: 33684 - protein, 14 aa, Homo sapiens
CVHSLADYDAFDLW

SEQ ID NO: 33685 - protein, 17 aa, Homo sapiens
CASHHTPWAVAGSFDYW

SEQ ID NO: 33686 - protein, 12 aa, Homo sapiens
CTREVLGGFYYW

SEQ ID NO: 33687 - protein, 25 aa, Homo sapiens
CARGGAYYDFWSGYSPYYYYGMDVW

SEQ ID NO: 33688 - protein, 28 aa, Homo sapiens
CARDPAYYDILTGYLSPAYYYYYGMDVW

SEQ ID NO: 33689 - protein, 20 aa, Homo sapiens
CARYSYSNYEFGYYYGMDVW

SEQ ID NO: 33690 - protein, 17 aa, Homo sapiens
CAREEIAAAGTNWFDPW

SEQ ID NO: 33691 - protein, 17 aa, Homo sapiens
CARDPLSGELANALDIW

SEQ ID NO: 33692 - protein, 19 aa, Homo sapiens
CARTNYDYVWGRSGYFDYW

SEQ ID NO: 33693 - protein, 18 aa, Homo sapiens
CARDNTQRSGYTYWFDPW

SEQ ID NO: 33694 - protein, 26 aa, Homo sapiens
CTRHDPLAYYDSSGRLDDYYYGMDVW

SEQ ID NO: 33695 - protein, 16 aa, Homo sapiens
CARDSGGYASRLLDYW

SEQ ID NO: 33696 - protein, 18 aa, Homo sapiens
CAKAKPRGYSGYEGFDYW

SEQ ID NO: 33697 - protein, 22 aa, Homo sapiens
CARDPRVRYSGYVVEPGYFDYW

SEQ ID NO: 33698 - protein, 19 aa, Homo sapiens
CAKCGLSGGNCYSSAMDVW

SEQ ID NO: 33699 - protein, 17 aa, Homo sapiens
CARVSSSYYRYWHFDLW

SEQ ID NO: 33700 - protein, 24 aa, Homo sapiens
CAKPLRRQEPALTLVNDWGLTDYW

SEQ ID NO: 33701 - protein, 14 aa, Homo sapiens
CAREEGVIGGYDYW

SEQ ID NO: 33702 - protein, 22 aa, Homo sapiens
CARDFPLYAFWSGFYPNSFDPW

SEQ ID NO: 33703 - protein, 21 aa, Homo sapiens
CARDLKWLRSGGDYYYAMDVW

SEQ ID NO: 33704 - protein, 15 aa, Homo sapiens
CAKDMRPTVTGFDYW

SEQ ID NO: 33705 - protein, 21 aa, Homo sapiens
CAKDHLYLYYGSGSYYGIDYW

SEQ ID NO: 33706 - protein, 25 aa, Homo sapiens
CTTGLGRTYYYDSWGWRHFRAFDYW

SEQ ID NO: 33707 - protein, 15 aa, Homo sapiens
CAKVRIAAAGPFDYW

SEQ ID NO: 33708 - protein, 17 aa, Homo sapiens
CAREGDIVVVTDCMDVW

SEQ ID NO: 33709 - protein, 17 aa, Homo sapiens
CARDSPPLSGWSDRDYW

SEQ ID NO: 33710 - protein, 28 aa, Homo sapiens
CAKDGGGYYYDSSGYYSPRYYYYGMDVW

SEQ ID NO: 33711 - protein, 16 aa, Homo sapiens
CSRYWELFSHDAFDIW

SEQ ID NO: 33712 - protein, 19 aa, Homo sapiens
CAHRPAPYNSNWYSWVDPW

SEQ ID NO: 33713 - protein, 20 aa, Homo sapiens
CAKDKYPSGGTDYYYGMDVW

SEQ ID NO: 33714 - protein, 16 aa, Homo sapiens
CARSGLAVAAMPLDYW

SEQ ID NO: 33715 - protein, 13 aa, Homo sapiens
CLSAHSSGSYWVF

SEQ ID NO: 33716 - protein, 20 aa, Homo sapiens
CARHPYYYDSSGRNGHFDYW

SEQ ID NO: 33717 - protein, 15 aa, Homo sapiens
CAKDMGPYLGWFDPW

SEQ ID NO: 33718 - protein, 15 aa, Homo sapiens
CTKGYYYDQSRFDSW

SEQ ID NO: 33719 - protein, 25 aa, Homo sapiens
CARDVRYYDSSGYYSPYYYYGMDVW

SEQ ID NO: 33720 - protein, 21 aa, Homo sapiens
CAKGGGSGSYSLYYYYGMDVW

SEQ ID NO: 33721 - protein, 19 aa, Homo sapiens
CASRPAYSFETGHYSFDSW

SEQ ID NO: 33722 - protein, 18 aa, Homo sapiens
CAKQGSIGLYFYYGMDVW

SEQ ID NO: 33723 - protein, 11 aa, Homo sapiens
CAKSGGYDYYW

SEQ ID NO: 33724 - protein, 21 aa, Homo sapiens
CVKVSSYYNILIGYYSSFDHW

SEQ ID NO: 33725 - protein, 19 aa, Homo sapiens
CAKDMGDGYSSGQGHFDYW

SEQ ID NO: 33726 - protein, 16 aa, Homo sapiens
CARVRLIQDKYYFDYW

SEQ ID NO: 33727 - protein, 16 aa, Homo sapiens
CARARVGATTFLSDYW

SEQ ID NO: 33728 - protein, 23 aa, Homo sapiens
CARQTGAIFGVVIMYYYYGMDVW

SEQ ID NO: 33729 - protein, 23 aa, Homo sapiens
CAHSLSAYYDILTGYPTDAFDIW

SEQ ID NO: 33730 - protein, 18 aa, Homo sapiens
CAHAYYYDSSGYYYYGYW

SEQ ID NO: 33731 - protein, 11 aa, Homo sapiens
CQSIDDSGMVF

SEQ ID NO: 33732 - protein, 23 aa, Homo sapiens
CAREEWLRLGYSYGYGAPGLDYW

SEQ ID NO: 33733 - protein, 18 aa, Homo sapiens
CARRMSRYSSSWCYFDYW

SEQ ID NO: 33734 - protein, 14 aa, Homo sapiens
CQSYDSGPHPLFVF

SEQ ID NO: 33735 - protein, 24 aa, Homo sapiens
CARLGPYDILTGWDSDYYYGMDVW

SEQ ID NO: 33736 - protein, 32 aa, Homo sapiens
CARDSAIFLGLGLFPLDHSSGYYKNHDAFDIW

SEQ ID NO: 33737 - protein, 21 aa, Homo sapiens
CARLLRNMMTGDPRYWYFDLW

SEQ ID NO: 33738 - protein, 21 aa, Homo sapiens
CAKERDYDYVWGSYPGPFDYW

SEQ ID NO: 33739 - protein, 23 aa, Homo sapiens
CARDPQGYCSSTSCYYYYNMDVW

SEQ ID NO: 33740 - protein, 20 aa, Homo sapiens
CARSRGLLWFGELRTEFDYW

SEQ ID NO: 33741 - protein, 17 aa, Homo sapiens
CARAAARSALYNWFAPW

SEQ ID NO: 33742 - protein, 16 aa, Homo sapiens
CSTAPVRGVRGTIDYW

SEQ ID NO: 33743 - protein, 22 aa, Homo sapiens
CAKDRRDGYNWGGDYYYGMDVW

SEQ ID NO: 33744 - protein, 15 aa, Homo sapiens
CARDLGASYTPLDYW

SEQ ID NO: 33745 - protein, 24 aa, Homo sapiens
CARDSIVVVVAATAKYYYYGMDVW

SEQ ID NO: 33746 - protein, 21 aa, Homo sapiens
CASDYDILTGYYKGLGLFDYW

SEQ ID NO: 33747 - protein, 25 aa, Homo sapiens
CAREAYYYDSSGYPPLYYYYGMDVW

SEQ ID NO: 33748 - protein, 13 aa, Homo sapiens
CARETVWFVFAYW

SEQ ID NO: 33749 - protein, 14 aa, Homo sapiens
CARDAPGIEDFDSW

SEQ ID NO: 33750 - protein, 14 aa, Homo sapiens
CAGRRNGDSPFEYW

SEQ ID NO: 33751 - protein, 19 aa, Homo sapiens
CARVVSYDSNGFHGFPDYW

SEQ ID NO: 33752 - protein, 13 aa, Homo sapiens
CAKPGGLWYFQDW

SEQ ID NO: 33753 - protein, 16 aa, Homo sapiens
CARATSGRNVGHIDYW

SEQ ID NO: 33754 - protein, 15 aa, Homo sapiens
CAKDIGYGANSPDYW

SEQ ID NO: 33755 - protein, 17 aa, Homo sapiens
CTTVVTPSHYYYGMDVW

SEQ ID NO: 33756 - protein, 18 aa, Homo sapiens
CAKLSKLVWFGEKLGDYW

SEQ ID NO: 33757 - protein, 22 aa, Homo sapiens
CARLIGSLLRSFDWSGGQFDPW

SEQ ID NO: 33758 - protein, 21 aa, Homo sapiens
CAKMNLGYYYDSSGYYPDDYW

SEQ ID NO: 33759 - protein, 19 aa, Homo sapiens
CAKSAYSYGQGYYYGMDVW

SEQ ID NO: 33760 - protein, 20 aa, Homo sapiens
CAYRDSYCNDDNCYSGFDSW

SEQ ID NO: 33761 - protein, 18 aa, Homo sapiens
CSRDSRRCSGRKICLDYW

SEQ ID NO: 33762 - protein, 31 aa, Homo sapiens
CAKDRQYYDFWSGYLTPHPQYYYYYYGMDVW

SEQ ID NO: 33763 - protein, 18 aa, Homo sapiens
CARDGLGYSNNWYSWDYW

SEQ ID NO: 33764 - protein, 20 aa, Homo sapiens
CARVYSSGWRDDYYYGMDVW

SEQ ID NO: 33765 - protein, 25 aa, Homo sapiens
CARSPAYFDWLFQSDNLYYYGMDVW

SEQ ID NO: 33766 - protein, 13 aa, Homo sapiens
CARRPLGWAFDIW

SEQ ID NO: 33767 - protein, 15 aa, Homo sapiens
CARVNYMIRGPFDPW

SEQ ID NO: 33768 - protein, 22 aa, Homo sapiens
CARIRVDSSSWYHYYYYGMDVW

SEQ ID NO: 33769 - protein, 19 aa, Homo sapiens
CAKLSYDILTGYLDAFDIW

SEQ ID NO: 33770 - protein, 14 aa, Homo sapiens
CARANWGSYYFDYW

SEQ ID NO: 33771 - protein, 24 aa, Homo sapiens
CARGIGTGLVFGELSPYYYGMDVW

SEQ ID NO: 33772 - protein, 16 aa, Homo sapiens
CARFRLEDTSGYLDRW

SEQ ID NO: 33773 - protein, 24 aa, Homo sapiens
CARLSPRITMVRGVIITEYYFDYW

SEQ ID NO: 33774 - protein, 13 aa, Homo sapiens
CAKMGGTTEGDYW

SEQ ID NO: 33775 - protein, 17 aa, Homo sapiens
CAKDNWYDSSGSTFDPW

SEQ ID NO: 33776 - protein, 17 aa, Homo sapiens
CARKMPYASNLGWFDPW

SEQ ID NO: 33777 - protein, 23 aa, Homo sapiens
CAKLPSHYDILTGHESSYYFDYW

SEQ ID NO: 33778 - protein, 23 aa, Homo sapiens
CARASDHGYFESSGYYYNPLDYW

SEQ ID NO: 33779 - protein, 18 aa, Homo sapiens
CARVYFDWLLWVYYFDYW

SEQ ID NO: 33780 - protein, 24 aa, Homo sapiens
CARVTTSWAYYVSSDYWLRPFKYW

SEQ ID NO: 33781 - protein, 18 aa, Homo sapiens
CARHGVYDSGYPRYFDHW

SEQ ID NO: 33782 - protein, 20 aa, Homo sapiens
CAKNMAVAGLSQYYYAMDVW

SEQ ID NO: 33783 - protein, 22 aa, Homo sapiens
CASGYSSSWPPAPHYYYGMDVW

SEQ ID NO: 33784 - protein, 21 aa, Homo sapiens
CAKAGMYCSGGSCYSNDFDYW

SEQ ID NO: 33785 - protein, 15 aa, Homo sapiens
CARDGPAVTNYFDYW

SEQ ID NO: 33786 - protein, 19 aa, Homo sapiens
CARAFRRPRLLLLYYFDYW

SEQ ID NO: 33787 - protein, 13 aa, Homo sapiens
CAKDTVAGTRDYW

SEQ ID NO: 33788 - protein, 19 aa, Homo sapiens
CAKDQTLVTAIPTYYFDYW

SEQ ID NO: 33789 - protein, 17 aa, Homo sapiens
CARQYFDNSGYFHFDYW

SEQ ID NO: 33790 - protein, 20 aa, Homo sapiens
CARADLYDTSAPGWNALDIW

SEQ ID NO: 33791 - protein, 19 aa, Homo sapiens
CARDASNSPEYNYYGMDVW

SEQ ID NO: 33792 - protein, 20 aa, Homo sapiens
CARDSCGGNSCYRVGWFDPW

SEQ ID NO: 33793 - protein, 27 aa, Homo sapiens
CATIGGAVADMDRNPTRYYYYYGMDVW

SEQ ID NO: 33794 - protein, 17 aa, Homo sapiens
CAKSLEYSRTWNPLDYW

SEQ ID NO: 33795 - protein, 10 aa, Homo sapiens
CQQSYSTGAF

SEQ ID NO: 33796 - protein, 36 aa, Homo sapiens
CLYLQMYSLRPEDTALYYCVKADSDSYFPPSYFDSW

SEQ ID NO: 33797 - protein, 15 aa, Homo sapiens
CATAGAMIVVALDYW

SEQ ID NO: 33798 - protein, 19 aa, Homo sapiens
CARAYCDGDCYYSDPLDIW

SEQ ID NO: 33799 - protein, 17 aa, Homo sapiens
CARSGEVVTAIHYFDYW

SEQ ID NO: 33800 - protein, 19 aa, Homo sapiens
CAKDEYFDWIPSSDGMDVW

SEQ ID NO: 33801 - protein, 24 aa, Homo sapiens
CASPLDCSSTSCPSVGYYYGMDVW

SEQ ID NO: 33802 - protein, 21 aa, Homo sapiens
CTTDSEEGAYDYVWGSYRYYW

SEQ ID NO: 33803 - protein, 18 aa, Homo sapiens
CAKEGGTGSPSYYGFDVW

SEQ ID NO: 33804 - protein, 22 aa, Homo sapiens
CATDRVTMVRALDYYYYGMDVW

SEQ ID NO: 33805 - protein, 21 aa, Homo sapiens
CAKMGSIVVVVAATENWFDPW

SEQ ID NO: 33806 - protein, 14 aa, Homo sapiens
CARTGESGYWFDFW

SEQ ID NO: 33807 - protein, 11 aa, Homo sapiens
CMESLQTPYAF

SEQ ID NO: 33808 - protein, 21 aa, Homo sapiens
CAKSQISSSSWYTGDGYFQHW

SEQ ID NO: 33809 - protein, 24 aa, Homo sapiens
CARPSADPYDVTSYDYDYYGMDVW

SEQ ID NO: 33810 - protein, 22 aa, Homo sapiens
CAKAPITIFGVVIHRLYYFDYW

SEQ ID NO: 33811 - protein, 17 aa, Homo sapiens
CAKGKACSGGGCPFDYW

SEQ ID NO: 33812 - protein, 16 aa, Homo sapiens
CATTKGSWHPIDFDYW

SEQ ID NO: 33813 - protein, 14 aa, Homo sapiens
CAKIDSYGQEIDYW

SEQ ID NO: 33814 - protein, 22 aa, Homo sapiens
CASTSYYYDSSGYLLPYYFDYW

SEQ ID NO: 33815 - protein, 16 aa, Homo sapiens
CARTYVVVTAAAFDIW

SEQ ID NO: 33816 - protein, 18 aa, Homo sapiens
CARDPSGSYGQGCWFDPW

SEQ ID NO: 33817 - protein, 18 aa, Homo sapiens
CARAGGWEYSSSADFDYW

SEQ ID NO: 33818 - protein, 17 aa, Homo sapiens
CAKYGLTYYYHYGMDVW

SEQ ID NO: 33819 - protein, 16 aa, Homo sapiens
CARAYGGNYFAAFDIW

SEQ ID NO: 33820 - protein, 14 aa, Homo sapiens
CASMSTILSSLDYW

SEQ ID NO: 33821 - protein, 18 aa, Homo sapiens
CAKTHPSGAADFCWFDPW

SEQ ID NO: 33822 - protein, 14 aa, Homo sapiens
CARVHVWLQLPDYW

SEQ ID NO: 33823 - protein, 22 aa, Homo sapiens
CATDDLGTGTLGHYYYYGMDVW

SEQ ID NO: 33824 - protein, 19 aa, Homo sapiens
CARDQGRYNWNDVMAFDIW

SEQ ID NO: 33825 - protein, 15 aa, Homo sapiens
CARDQEFPLTSFDYW

SEQ ID NO: 33826 - protein, 14 aa, Homo sapiens
CAKDLGSSWGGDYW

SEQ ID NO: 33827 - protein, 16 aa, Homo sapiens
CAKLPLGSGLDAFDIW

SEQ ID NO: 33828 - protein, 18 aa, Homo sapiens
CAHLERQSGGWLKSFDYW

SEQ ID NO: 33829 - protein, 19 aa, Homo sapiens
CARAGITIFGVVNPIFDYW

SEQ ID NO: 33830 - protein, 18 aa, Homo sapiens
CARGQHFSDGSGYYFDFW

SEQ ID NO: 33831 - protein, 15 aa, Homo sapiens
CAKDKGTQGRYFDYW

SEQ ID NO: 33832 - protein, 18 aa, Homo sapiens
CAKGISPLYYSEGYFDNW

SEQ ID NO: 33833 - protein, 15 aa, Homo sapiens
CQSADSNVSGSFGVF

SEQ ID NO: 33834 - protein, 19 aa, Homo sapiens
CAGETYYYDSSALNWFDPW

SEQ ID NO: 33835 - protein, 17 aa, Homo sapiens
CARLTYDNSGYYYIDYW

SEQ ID NO: 33836 - protein, 20 aa, Homo sapiens
CARDSRVSWSGEVSYYFDFW

SEQ ID NO: 33837 - protein, 15 aa, Homo sapiens
CAKDPTPGYIYLDYW

SEQ ID NO: 33838 - protein, 15 aa, Homo sapiens
CSRDLVYGSGSLDYW

SEQ ID NO: 33839 - protein, 15 aa, Homo sapiens
CAKSDILTGSPPDYW

SEQ ID NO: 33840 - protein, 19 aa, Homo sapiens
CASEFSSWANYYYYGMDVW

SEQ ID NO: 33841 - protein, 22 aa, Homo sapiens
CARGLSQRITIFGVVRYYFDYW

SEQ ID NO: 33842 - protein, 19 aa, Homo sapiens
CITAAYYDILTGYSPLDYW

SEQ ID NO: 33843 - protein, 22 aa, Homo sapiens
CARESANDYDFWSGRPNWFDPW

SEQ ID NO: 33844 - protein, 18 aa, Homo sapiens
CARSDYDILTGYYEIDYW

SEQ ID NO: 33845 - protein, 13 aa, Homo sapiens
CSSYAGSNIPYDF

SEQ ID NO: 33846 - protein, 14 aa, Homo sapiens
CAHRLGILSGFDIW

SEQ ID NO: 33847 - protein, 24 aa, Homo sapiens
CARTYYDILTGYYQSREGSWFDPW

SEQ ID NO: 33848 - protein, 12 aa, Homo sapiens
CQVWDRSTASLF

SEQ ID NO: 33849 - protein, 16 aa, Homo sapiens
CAKEGDGKLGARFDYW

SEQ ID NO: 33850 - protein, 28 aa, Homo sapiens
CARLGSDTYYDILTGLPLNYYYYGMDVW

SEQ ID NO: 33851 - protein, 24 aa, Homo sapiens
CAREGSTYYDILTGYHRSYYFDYW

SEQ ID NO: 33852 - protein, 21 aa, Homo sapiens
CARDTYYYDSSGFPHDAFDIW

SEQ ID NO: 33853 - protein, 18 aa, Homo sapiens
CARHFEEYYDSSGFFDYW

SEQ ID NO: 33854 - protein, 16 aa, Homo sapiens
CARDKNPAAVANIDYW

SEQ ID NO: 33855 - protein, 27 aa, Homo sapiens
CARDRVATIGIVFALGNTYYYYGMDVW

SEQ ID NO: 33856 - protein, 22 aa, Homo sapiens
CTTFVCSSTSCYAAWGPGFDYW

SEQ ID NO: 33857 - protein, 13 aa, Homo sapiens
CQVWDSTNDHMIF

SEQ ID NO: 33858 - protein, 20 aa, Homo sapiens
CARVSYFSETTGYYSLFDNW

SEQ ID NO: 33859 - protein, 22 aa, Homo sapiens
CARDVVSGGTYYYDSSGYPAYW

SEQ ID NO: 33860 - protein, 21 aa, Homo sapiens
CARDIFAAAAGHYYYYGMDVW

SEQ ID NO: 33861 - protein, 19 aa, Homo sapiens
CATLGTRPDYYYYYGMDVW

SEQ ID NO: 33862 - protein, 19 aa, Homo sapiens
CAKDMGDGYNPKISAFDIW

SEQ ID NO: 33863 - protein, 21 aa, Homo sapiens
CARGYAIFAPLSGYYYGMDVW

SEQ ID NO: 33864 - protein, 11 aa, Homo sapiens
CLQTTHWPYSF

SEQ ID NO: 33865 - protein, 24 aa, Homo sapiens
CAKGAGADSSSWYGHSLWYYFDYW

SEQ ID NO: 33866 - protein, 27 aa, Homo sapiens
CAKDDRPGCTNGVCYTPSGYSYAPDYW

SEQ ID NO: 33867 - protein, 14 aa, Homo sapiens
CARGDGYKSPCDYW

SEQ ID NO: 33868 - protein, 25 aa, Homo sapiens
CAREAANFDWLFRTDYYYYYGMDVW

SEQ ID NO: 33869 - protein, 21 aa, Homo sapiens
CARHHLYDSSGSYLRSSFAYW

SEQ ID NO: 33870 - protein, 21 aa, Homo sapiens
CASPGAQQGASWYTETWFDYW

SEQ ID NO: 33871 - protein, 19 aa, Homo sapiens
CARQWVRDVIVLRTHFDYW

SEQ ID NO: 33872 - protein, 19 aa, Homo sapiens
CARPYSDSGGHHLATFDYW

SEQ ID NO: 33873 - protein, 17 aa, Homo sapiens
CAKHKKGIAVAGQFDYW

SEQ ID NO: 33874 - protein, 15 aa, Homo sapiens
CAKFPQWLDDAFDIW

SEQ ID NO: 33875 - protein, 16 aa, Homo sapiens
CAKDHGADVVAYFDHW

SEQ ID NO: 33876 - protein, 21 aa, Homo sapiens
CATFSTMGRVPGYYYYGMDVW

SEQ ID NO: 33877 - protein, 24 aa, Homo sapiens
CARDGIIYDYVWGSPDEWYYFDYW

SEQ ID NO: 33878 - protein, 18 aa, Homo sapiens
CAKQEVTMIVVVTYFDYW

SEQ ID NO: 33879 - protein, 17 aa, Homo sapiens
CARHTDFRSGYGYVDYW

SEQ ID NO: 33880 - protein, 20 aa, Homo sapiens
CATDRTYYDFWSGSSALDYW

SEQ ID NO: 33881 - protein, 29 aa, Homo sapiens
CAKEELDSASPLPAVGSEAPALNWYFDLW

SEQ ID NO: 33882 - protein, 18 aa, Homo sapiens
CAKDAPDDILTGGPFDYW

SEQ ID NO: 33883 - protein, 15 aa, Homo sapiens
CGRHMNVAVRPFDYW

SEQ ID NO: 33884 - protein, 25 aa, Homo sapiens
CARTPYYDFWSGYYLGYYYYGMDVW

SEQ ID NO: 33885 - protein, 16 aa, Homo sapiens
CQVWESSRDHRGNVVF

SEQ ID NO: 33886 - protein, 12 aa, Homo sapiens
CAKSGVRNFDLW

SEQ ID NO: 33887 - protein, 17 aa, Homo sapiens
CAKAQADYGDYGAFDIW

SEQ ID NO: 33888 - protein, 21 aa, Homo sapiens
CARDIPHYDVRGYQDFHFDLW

SEQ ID NO: 33889 - protein, 14 aa, Homo sapiens
CTTESVYYYGMDVW

SEQ ID NO: 33890 - protein, 23 aa, Homo sapiens
CARDMYYFDSSGYFSDYYAMDVW

SEQ ID NO: 33891 - protein, 20 aa, Homo sapiens
CAANYYDSSGYYDYYGMDVW

SEQ ID NO: 33892 - protein, 18 aa, Homo sapiens
CAVQLHRSDYYYYGMDVW

SEQ ID NO: 33893 - protein, 16 aa, Homo sapiens
CAHSRSSPRHYYFDYW

SEQ ID NO: 33894 - protein, 18 aa, Homo sapiens
CAKDIGYSDGSGTPPDYW

SEQ ID NO: 33895 - protein, 26 aa, Homo sapiens
CARRVPDYYDSSGYYYRGQNWYFDLW

SEQ ID NO: 33896 - protein, 19 aa, Homo sapiens
CARTYYDILGAVQYYFDYW

SEQ ID NO: 33897 - protein, 17 aa, Homo sapiens
CARAGGYGDYDEYFDYW

SEQ ID NO: 33898 - protein, 20 aa, Homo sapiens
CARMYYDILTGYYAAVFDYW

SEQ ID NO: 33899 - protein, 15 aa, Homo sapiens
CTTVWGFGELSLDYW

SEQ ID NO: 33900 - protein, 20 aa, Homo sapiens
CARLEGVYYDILTGYYLDYW

SEQ ID NO: 33901 - protein, 16 aa, Homo sapiens
CARGKFGGFEGWFEPW

SEQ ID NO: 33902 - protein, 17 aa, Homo sapiens
CARIPYGSGSPMGFDPW

SEQ ID NO: 33903 - protein, 26 aa, Homo sapiens
CARDLAGYYDFWSGHGADYYYGMDVW

SEQ ID NO: 33904 - protein, 12 aa, Homo sapiens
CQESYNTPQVTF

SEQ ID NO: 33905 - protein, 17 aa, Homo sapiens
CARDSDDYGDYDFMDVW

SEQ ID NO: 33906 - protein, 20 aa, Homo sapiens
CARVIRAAGPIYYYYGMDVW

SEQ ID NO: 33907 - protein, 15 aa, Homo sapiens
CAIGTTKITSVFVYW

SEQ ID NO: 33908 - protein, 17 aa, Homo sapiens
CATLQASGIITGYFHFW

SEQ ID NO: 33909 - protein, 17 aa, Homo sapiens
CAKASFGDYDYYGMDVW

SEQ ID NO: 33910 - protein, 16 aa, Homo sapiens
CARELRGYGSGFSDYW

SEQ ID NO: 33911 - protein, 20 aa, Homo sapiens
CAREFLCTGGVCYSGYFDYW

SEQ ID NO: 33912 - protein, 18 aa, Homo sapiens
CARGGIYYYDTGYYFDHW

SEQ ID NO: 33913 - protein, 20 aa, Homo sapiens
CAKDQEAHDYGDYEGYFDYW

SEQ ID NO: 33914 - protein, 15 aa, Homo sapiens
CQGTGTKDGDYFDYW

SEQ ID NO: 33915 - protein, 16 aa, Homo sapiens
CAKESHPGGMATTDYW

SEQ ID NO: 33916 - protein, 21 aa, Homo sapiens
CARSQYFNSPGDYYYYGMDVW

SEQ ID NO: 33917 - protein, 14 aa, Homo sapiens
CARSLGTYDRFDYW

SEQ ID NO: 33918 - protein, 22 aa, Homo sapiens
CTTEDYYDSSGYNLGSTHFDYW

SEQ ID NO: 33919 - protein, 20 aa, Homo sapiens
CATSFPIVPPDYYYYGMDVW

SEQ ID NO: 33920 - protein, 22 aa, Homo sapiens
CTTDERLLRYFDWLFRDAFDIW

SEQ ID NO: 33921 - protein, 18 aa, Homo sapiens
CAKLPTGENDYGDSGDYW

SEQ ID NO: 33922 - protein, 15 aa, Homo sapiens
CVRDGGFGELGFDYW

SEQ ID NO: 33923 - protein, 14 aa, Homo sapiens
CLSYDISLSGFWVF

SEQ ID NO: 33924 - protein, 17 aa, Homo sapiens
CAKGEISYYRTDAFDIW

SEQ ID NO: 33925 - protein, 17 aa, Homo sapiens
CARFIMVRGVTPAADYW

SEQ ID NO: 33926 - protein, 19 aa, Homo sapiens
CAKGGVLLWFGESSPLDYW

SEQ ID NO: 33927 - protein, 22 aa, Homo sapiens
CARAAYECSGSDCYAGPWFDRW

SEQ ID NO: 33928 - protein, 18 aa, Homo sapiens
CARYPGYCSGGSCWFDSW

SEQ ID NO: 33929 - protein, 24 aa, Homo sapiens
CARPMYYYDSSGYYSFATYAFDIW

SEQ ID NO: 33930 - protein, 19 aa, Homo sapiens
CAKDTFGGSYSTYWYFDLW

SEQ ID NO: 33931 - protein, 21 aa, Homo sapiens
CARDSSYYYDSSGYSNWFDPW

SEQ ID NO: 33932 - protein, 21 aa, Homo sapiens
CARRADYYDLFSGSPKPFDYW

SEQ ID NO: 33933 - protein, 19 aa, Homo sapiens
CATDQPSYSSDYYYGMDVW

SEQ ID NO: 33934 - protein, 21 aa, Homo sapiens
CAKDRLQVLRYFDWSPTFDYW

SEQ ID NO: 33935 - protein, 21 aa, Homo sapiens
CARDLWVSFEPGASWNRGDYW

SEQ ID NO: 33936 - protein, 23 aa, Homo sapiens
CARDLWPVTTVTTSYYYYGMDVW

SEQ ID NO: 33937 - protein, 19 aa, Homo sapiens
CTRNYYGSGSFYYYGMDVW

SEQ ID NO: 33938 - protein, 13 aa, Homo sapiens
CQQRTTWPFALTF

SEQ ID NO: 33939 - protein, 21 aa, Homo sapiens
CARTRWNLTGYLHLSAWFDPW

SEQ ID NO: 33940 - protein, 22 aa, Homo sapiens
CATLGGSWYDIDYYYYYGLDIW

SEQ ID NO: 33941 - protein, 17 aa, Homo sapiens
CARGNYGSNSGDSFDIW

SEQ ID NO: 33942 - protein, 14 aa, Homo sapiens
CARDLEMSGGYDYW

SEQ ID NO: 33943 - protein, 18 aa, Homo sapiens
CAARYCSGHTCFFSFDYW

SEQ ID NO: 33944 - protein, 20 aa, Homo sapiens
CARAPGSIIVGAENFWFDPW

SEQ ID NO: 33945 - protein, 18 aa, Homo sapiens
CAKDDGSGWPRGWYFDLW

SEQ ID NO: 33946 - protein, 15 aa, Homo sapiens
CAKDEGAWELLIDYW

SEQ ID NO: 33947 - protein, 24 aa, Homo sapiens
CARGRADSTTWYAREHFGNWLDPW

SEQ ID NO: 33948 - protein, 20 aa, Homo sapiens
CARDSGGSGSYSHYYGMDVW

SEQ ID NO: 33949 - protein, 15 aa, Homo sapiens
CPTTKNLATPGSDYW

SEQ ID NO: 33950 - protein, 21 aa, Homo sapiens
CAGLKDYGDYEPWYYYGMDVW

SEQ ID NO: 33951 - protein, 20 aa, Homo sapiens
CARDRGLITMIVWPNWFDPW

SEQ ID NO: 33952 - protein, 23 aa, Homo sapiens
CAKGDDRRIMITFGGVIAPFDYW

SEQ ID NO: 33953 - protein, 17 aa, Homo sapiens
CAKEDGDSSGYKGLDYW

SEQ ID NO: 33954 - protein, 17 aa, Homo sapiens
CARGDYSGYDSLCFDYW

SEQ ID NO: 33955 - protein, 18 aa, Homo sapiens
CVKDVSGPGKYYYGMDVW

SEQ ID NO: 33956 - protein, 25 aa, Homo sapiens
CAKGTYYDILTGYFQNRYYYGMDVW

SEQ ID NO: 33957 - protein, 15 aa, Homo sapiens
CARDHSGNDEDFDYW

SEQ ID NO: 33958 - protein, 14 aa, Homo sapiens
CARLKGSYDYIDSW

SEQ ID NO: 33959 - protein, 21 aa, Homo sapiens
CARIKAMVTLGGYYYYGMDVW

SEQ ID NO: 33960 - protein, 18 aa, Homo sapiens
CAKSTRPNTVTTLYFDYW

SEQ ID NO: 33961 - protein, 16 aa, Homo sapiens
CTKGFYGFGYNYFDYW

SEQ ID NO: 33962 - protein, 19 aa, Homo sapiens
CARDPDFAEDNGDYSFDYW

SEQ ID NO: 33963 - protein, 18 aa, Homo sapiens
CATPRHENIAAAGSFDYW

SEQ ID NO: 33964 - protein, 11 aa, Homo sapiens
CAGISGHLDYW

SEQ ID NO: 33965 - protein, 18 aa, Homo sapiens
CARGEGSSGPQQGWFDPW

SEQ ID NO: 33966 - protein, 23 aa, Homo sapiens
CARAPLKYDILTGYYTYYGMDVW

SEQ ID NO: 33967 - protein, 15 aa, Homo sapiens
CARPSRGQLWWFDPW

SEQ ID NO: 33968 - protein, 15 aa, Homo sapiens
CARRQSDYSGHFDYW

SEQ ID NO: 33969 - protein, 19 aa, Homo sapiens
CARHFRQWLDLGPYYFDYW

SEQ ID NO: 33970 - protein, 23 aa, Homo sapiens
CARQSLRPYCSGGSCYEGWFDPW

SEQ ID NO: 33971 - protein, 18 aa, Homo sapiens
CVKDLRDYSYGYYGFDVW

SEQ ID NO: 33972 - protein, 18 aa, Homo sapiens
CARVKETYYDSKGAMDVW

SEQ ID NO: 33973 - protein, 13 aa, Homo sapiens
CARVEGAKRLDYW

SEQ ID NO: 33974 - protein, 20 aa, Homo sapiens
CATLGGGNSGAYYYYGMDVW

SEQ ID NO: 33975 - protein, 18 aa, Homo sapiens
CAKDQVTGNRGLGVFDVW

SEQ ID NO: 33976 - protein, 21 aa, Homo sapiens
CARGPYESSGAAAARGWFDPW

SEQ ID NO: 33977 - protein, 29 aa, Homo sapiens
CAKDRLYYDILTGYYRQINYYYYYGMDVW

SEQ ID NO: 33978 - protein, 18 aa, Homo sapiens
CAREIPDQTSSGGYFDYW

SEQ ID NO: 33979 - protein, 18 aa, Homo sapiens
CARVGQDESTGSDALDIW

SEQ ID NO: 33980 - protein, 31 aa, Homo sapiens
CARTHAPTYYDFWSGYPSLFGQNYYYGMDVW

SEQ ID NO: 33981 - protein, 16 aa, Homo sapiens
CAREGGSGWTGEVDYW

SEQ ID NO: 33982 - protein, 20 aa, Homo sapiens
CARTLTMTRGYGVFNAFDTW

SEQ ID NO: 33983 - protein, 19 aa, Homo sapiens
CVHKLGSWTIVGTGSFDYW

SEQ ID NO: 33984 - protein, 17 aa, Homo sapiens
CARDSGVFDYGDNFDYW

SEQ ID NO: 33985 - protein, 21 aa, Homo sapiens
CSRDRGFCSAGTCYSGWFDPW

SEQ ID NO: 33986 - protein, 19 aa, Homo sapiens
CARDMYYDILTGYYPLDYW

SEQ ID NO: 33987 - protein, 26 aa, Homo sapiens
CTRRGDCSGGSCYSGGYYYYNGMDVW

SEQ ID NO: 33988 - protein, 11 aa, Homo sapiens
CMHALQSPFSF

SEQ ID NO: 33989 - protein, 17 aa, Homo sapiens
CARDHRIGVSDNWFDPW

SEQ ID NO: 33990 - protein, 20 aa, Homo sapiens
CAREEVWFGELFGPGGDDYW

SEQ ID NO: 33991 - protein, 20 aa, Homo sapiens
CAKEGHSSGYSIARDAFDIW

SEQ ID NO: 33992 - protein, 14 aa, Homo sapiens
CVAGGVYYYGMDVW

SEQ ID NO: 33993 - protein, 15 aa, Homo sapiens
CVPIVDTAMAFFDYW

SEQ ID NO: 33994 - protein, 14 aa, Homo sapiens
CARNRITASQFDYW

SEQ ID NO: 33995 - protein, 15 aa, Homo sapiens
CAKDGIWQADYFDYW

SEQ ID NO: 33996 - protein, 23 aa, Homo sapiens
CTLLHCSSNVCPPYFHFHAMDVW

SEQ ID NO: 33997 - protein, 21 aa, Homo sapiens
CATLPSLAAGYDTYYYGMDVW

SEQ ID NO: 33998 - protein, 27 aa, Homo sapiens
CATGSVVPSRYFDWERESVARYWFDPW

SEQ ID NO: 33999 - protein, 13 aa, Homo sapiens
CARVSRAMVFDFW

SEQ ID NO: 34000 - protein, 18 aa, Homo sapiens
CARVGPNDSSGYTAFDIW

SEQ ID NO: 34001 - protein, 21 aa, Homo sapiens
CATATVVMGATNYYYYGMDVW

SEQ ID NO: 34002 - protein, 19 aa, Homo sapiens
CARVDLAADGTYPEWFDPW

SEQ ID NO: 34003 - protein, 22 aa, Homo sapiens
CATPAAYDYVWGSYRYDYFDYW

SEQ ID NO: 34004 - protein, 22 aa, Homo sapiens
CTTGGGITIFGVVITFDAFDIW

SEQ ID NO: 34005 - protein, 22 aa, Homo sapiens
CARHVAGYFDGSDYYEVYFDYW

SEQ ID NO: 34006 - protein, 20 aa, Homo sapiens
CAKDPPPSMIVVVITYFDYW

SEQ ID NO: 34007 - protein, 15 aa, Homo sapiens
CARSRWATMTGPDYW

SEQ ID NO: 34008 - protein, 15 aa, Homo sapiens
CARGFHYGDSHFDTW

SEQ ID NO: 34009 - protein, 16 aa, Homo sapiens
CAKTFHDYGDYAGDYW

SEQ ID NO: 34010 - protein, 24 aa, Homo sapiens
CARGPILRFLEWLSPHYYYGMDVW

SEQ ID NO: 34011 - protein, 16 aa, Homo sapiens
CAKILSIAVAGTGDYW

SEQ ID NO: 34012 - protein, 15 aa, Homo sapiens
CAADSSGYRGRFDPW

SEQ ID NO: 34013 - protein, 11 aa, Homo sapiens
CFSPDSSGPAF

SEQ ID NO: 34014 - protein, 15 aa, Homo sapiens
CASMPAAMWMPFDYW

SEQ ID NO: 34015 - protein, 15 aa, Homo sapiens
CTTGPSGFWRGYDYW

SEQ ID NO: 34016 - protein, 18 aa, Homo sapiens
CARHFSSGWYERGWFDPW

SEQ ID NO: 34017 - protein, 18 aa, Homo sapiens
CARDPLSLYGDVYYFDYW

SEQ ID NO: 34018 - protein, 17 aa, Homo sapiens
CATERVALAGPYYFDYW

SEQ ID NO: 34019 - protein, 15 aa, Homo sapiens
CARSGGWYRNWFDPW

SEQ ID NO: 34020 - protein, 20 aa, Homo sapiens
CAHSTLWFGEERPPNWFDPW

SEQ ID NO: 34021 - protein, 25 aa, Homo sapiens
CARPDHPLGYCSGGSCYAWYYFDYW

SEQ ID NO: 34022 - protein, 23 aa, Homo sapiens
CVKAGSKNYDSSAYFPYNWFDSW

SEQ ID NO: 34023 - protein, 22 aa, Homo sapiens
CASHAPAYGSAYYYNDSPFDPW

SEQ ID NO: 34024 - protein, 18 aa, Homo sapiens
CARQQLVMNYYQYAMDVW

SEQ ID NO: 34025 - protein, 18 aa, Homo sapiens
CARDKGCGTKCRNWFDPW

SEQ ID NO: 34026 - protein, 17 aa, Homo sapiens
CAKDIYPIYGDYLLDYW

SEQ ID NO: 34027 - protein, 15 aa, Homo sapiens
CTKCPTARSAWFDSW

SEQ ID NO: 34028 - protein, 14 aa, Homo sapiens
CAKLPLVRAPFDYW

SEQ ID NO: 34029 - protein, 22 aa, Homo sapiens
CAKDSQSLWFGKVYYYYGMDVW

SEQ ID NO: 34030 - protein, 15 aa, Homo sapiens
CAKDHGVISYYFDYW

SEQ ID NO: 34031 - protein, 22 aa, Homo sapiens
CARDFPYCSSTSCPDAEYFQHW

SEQ ID NO: 34032 - protein, 28 aa, Homo sapiens
CAKAYYDFWSGYSLTFGGVIVTAAFDIW

SEQ ID NO: 34033 - protein, 16 aa, Homo sapiens
CAKDPAPYYGEGGDYW

SEQ ID NO: 34034 - protein, 25 aa, Homo sapiens
CATGPASYYDSSGELYYYYYGMDVW

SEQ ID NO: 34035 - protein, 14 aa, Homo sapiens
CAHPARYSSRIDYW

SEQ ID NO: 34036 - protein, 17 aa, Homo sapiens
CAKDISPIGVWPAFDYW

SEQ ID NO: 34037 - protein, 13 aa, Homo sapiens
CQQYDSSSRVVTF

SEQ ID NO: 34038 - protein, 18 aa, Homo sapiens
CVRDIEQQLIYSGGFDFW

SEQ ID NO: 34039 - protein, 12 aa, Homo sapiens
CAKVSSDYTDYW

SEQ ID NO: 34040 - protein, 23 aa, Homo sapiens
CARAAGLLWFGELLYPPGWFDPW

SEQ ID NO: 34041 - protein, 17 aa, Homo sapiens
CARGLSGRGFSSGNDYW

SEQ ID NO: 34042 - protein, 24 aa, Homo sapiens
CARASNDLGVVVPGGRTRDRFDPW

SEQ ID NO: 34043 - protein, 21 aa, Homo sapiens
CARQGYDTTGSYPSVNWFDPW

SEQ ID NO: 34044 - protein, 20 aa, Homo sapiens
CTGELAYCTNGVCSYPFDNW

SEQ ID NO: 34045 - protein, 13 aa, Homo sapiens
CARHYISGWNDYW

SEQ ID NO: 34046 - protein, 16 aa, Homo sapiens
CARHVRVIGLLNFDYW

SEQ ID NO: 34047 - protein, 13 aa, Homo sapiens
CARGRGSFSLDYW

SEQ ID NO: 34048 - protein, 23 aa, Homo sapiens
CAKDLYDYVWGSYRYTGSSFDYW

SEQ ID NO: 34049 - protein, 22 aa, Homo sapiens
CVRDEGYYYGSGNWGSAWFAPW

SEQ ID NO: 34050 - protein, 23 aa, Homo sapiens
CARMNLMYYDILTGYYTGPFDMW

SEQ ID NO: 34051 - protein, 17 aa, Homo sapiens
CARAASGYYYLGAFDIW

SEQ ID NO: 34052 - protein, 16 aa, Homo sapiens
CAKDMWAAAAYYFDSW

SEQ ID NO: 34053 - protein, 21 aa, Homo sapiens
CAKLPAPFYGDYAFFDAFDIW

SEQ ID NO: 34054 - protein, 15 aa, Homo sapiens
CAKLFYDRSDAFDIW

SEQ ID NO: 34055 - protein, 20 aa, Homo sapiens
CAKDVWYYDSSALVGAFDIW

SEQ ID NO: 34056 - protein, 20 aa, Homo sapiens
CAVVPAAPLGYYYYYGMDVW

SEQ ID NO: 34057 - protein, 11 aa, Homo sapiens [sequence omitted]

SEQ ID NO: 34058 - protein, 22 aa, Homo sapiens
CARRPLGYCSGGSCSQSWFDPW

SEQ ID NO: 34059 - protein, 20 aa, Homo sapiens
CAKPNYYGRGASNFWAFDHW

SEQ ID NO: 34060 - protein, 21 aa, Homo sapiens
CARTPNYYDSSGYYAALFDYW

SEQ ID NO: 34061 - protein, 14 aa, Homo sapiens
CQSLDSSLSQTVVF

SEQ ID NO: 34062 - protein, 22 aa, Homo sapiens
CARDQEGLLLWFGELSVFLDYW

SEQ ID NO: 34063 - protein, 16 aa, Homo sapiens
CARIRDWGSYGWFDPW

SEQ ID NO: 34064 - protein, 19 aa, Homo sapiens
CAKLKGDMVRGVSDGMDVW

SEQ ID NO: 34065 - protein, 17 aa, Homo sapiens
CARVWRTGSDYPYFDLW

SEQ ID NO: 34066 - protein, 16 aa, Homo sapiens
CARGHTPMSNNWLDPW

SEQ ID NO: 34067 - protein, 19 aa, Homo sapiens
CARHSPPSSSWPRGWFDPW

SEQ ID NO: 34068 - protein, 20 aa, Homo sapiens
CARVRGDIVAKPNQNWFDPW

SEQ ID NO: 34069 - protein, 20 aa, Homo sapiens
CTNNWRDSTGGYVPAAFEVW

SEQ ID NO: 34070 - protein, 18 aa, Homo sapiens
CALPIYKTGHYSWGFDFW

SEQ ID NO: 34071 - protein, 19 aa, Homo sapiens
CARVFLGNTGPRGDYMDVW

SEQ ID NO: 34072 - protein, 20 aa, Homo sapiens
CARYYYDSYGYFPERSFDLW

SEQ ID NO: 34073 - protein, 17 aa, Homo sapiens
CTREPNNGYDVGEIDYW

SEQ ID NO: 34074 - protein, 20 aa, Homo sapiens
CARRSRRYGGQGFYWYFDLW

SEQ ID NO: 34075 - protein, 20 aa, Homo sapiens
CARGMYGGAASYYGYYFDYW

SEQ ID NO: 34076 - protein, 18 aa, Homo sapiens
CARVIIAFGGYYYYMDVW

SEQ ID NO: 34077 - protein, 17 aa, Homo sapiens
CARELGTTFRNYYFDLW

SEQ ID NO: 34078 - protein, 16 aa, Homo sapiens
CARTVLWFGSGYFDSW

SEQ ID NO: 34079 - protein, 23 aa, Homo sapiens
CGRQGRDFDGNGYSRQRFYIDVW

SEQ ID NO: 34080 - protein, 18 aa, Homo sapiens
CARGRTRYSSGDDAFDIW

SEQ ID NO: 34081 - protein, 17 aa, Homo sapiens
CARLRIFGVVRDAFDIW

SEQ ID NO: 34082 - protein, 21 aa, Homo sapiens
CAREVEYSSTWYSGYHYLDVW

SEQ ID NO: 34083 - protein, 20 aa, Homo sapiens
CTRGSHFDDRRTYTNWLDPW

SEQ ID NO: 34084 - protein, 17 aa, Homo sapiens
CARHKYYYGYVADIDYW

SEQ ID NO: 34085 - protein, 18 aa, Homo sapiens
CATAPRAIPSAHWWGDYW

SEQ ID NO: 34086 - protein, 19 aa, Homo sapiens
CARGEGDFWSGYPLSFEYW

SEQ ID NO: 34087 - protein, 15 aa, Homo sapiens
CARSQIPITMIYDYW

SEQ ID NO: 34088 - protein, 22 aa, Homo sapiens
CARASGYSYGLTHYYYYYMDVW

SEQ ID NO: 34089 - protein, 15 aa, Homo sapiens
CAKGPSGYSYGVDYW

SEQ ID NO: 34090 - protein, 17 aa, Homo sapiens
CARDYGSFRMRSFFDNW

SEQ ID NO: 34091 - protein, 15 aa, Homo sapiens
CQQRAKWPPTTPITF

SEQ ID NO: 34092 - protein, 17 aa, Homo sapiens
CARAPSTAMVAQCLDYW

SEQ ID NO: 34093 - protein, 17 aa, Homo sapiens
CARKGSNGWWDYYMDVW

SEQ ID NO: 34094 - protein, 22 aa, Homo sapiens
CARQFCGSSDCSWDYYYYMDVW

SEQ ID NO: 34095 - protein, 21 aa, Homo sapiens
CARGRGTRRDSSNYLYYFDYW

SEQ ID NO: 34096 - protein, 15 aa, Homo sapiens
CARGAGESLEWFDPW

SEQ ID NO: 34097 - protein, 20 aa, Homo sapiens
CAKDTGRYYYDSNSYPFDIW

SEQ ID NO: 34098 - protein, 15 aa, Homo sapiens
CARDLGGHGEAFEIW

SEQ ID NO: 34099 - protein, 18 aa, Homo sapiens
CASRRPGPDGSGTYLDLW

SEQ ID NO: 34100 - protein, 25 aa, Homo sapiens
CAREGLNQWVHYYDSSTYSNYFDSW

SEQ ID NO: 34101 - protein, 11 aa, Homo sapiens
CVRGYSSFDHW

SEQ ID NO: 34102 - protein, 19 aa, Homo sapiens
CARILMYDSGDYVYAFNIW

SEQ ID NO: 34103 - protein, 18 aa, Homo sapiens
CARGRRISITMGNWFDPW

SEQ ID NO: 34104 - protein, 23 aa, Homo sapiens
CARGNYYDSSGYYTRRGPTLDYW

SEQ ID NO: 34105 - protein, 13 aa, Homo sapiens
CTTRGGKHGVDYW

SEQ ID NO: 34106 - protein, 15 aa, Homo sapiens
CAKEKGYLSGCPDYW

SEQ ID NO: 34107 - protein, 17 aa, Homo sapiens
CARGGESQSSVGAFDIW

SEQ ID NO: 34108 - protein, 17 aa, Homo sapiens
CARAPIYGDHPKTFDYW

SEQ ID NO: 34109 - protein, 22 aa, Homo sapiens
CARDLGYCSGGSCYSGDTADYW

SEQ ID NO: 34110 - protein, 22 aa, Homo sapiens
CATNPRQGSTWYDSFYYYMDFW

SEQ ID NO: 34111 - protein, 14 aa, Homo sapiens
CARGIGGSYYSDYW

SEQ ID NO: 34112 - protein, 16 aa, Homo sapiens
CAKDRHTSAPYYFDFW

SEQ ID NO: 34113 - protein, 17 aa, Homo sapiens
CGKDRFGSSPLDAFDIW

SEQ ID NO: 34114 - protein, 16 aa, Homo sapiens
CAKDLGVASPFSFDLW

SEQ ID NO: 34115 - protein, 23 aa, Homo sapiens
CVKIRGFSDHDSIQTVSYYFDYW

SEQ ID NO: 34116 - protein, 14 aa, Homo sapiens
CAAHWASNGYFTYW

SEQ ID NO: 34117 - protein, 19 aa, Homo sapiens
CARDYYYGSDKYPPHFDNW

SEQ ID NO: 34118 - protein, 17 aa, Homo sapiens
CARHPAYESSGYPFDNW

SEQ ID NO: 34119 - protein, 20 aa, Homo sapiens
CARSEFPEDRGRYRLDFDSW

SEQ ID NO: 34120 - protein, 24 aa, Homo sapiens
CARETLETYDFWSGYYYYYYMDVW

SEQ ID NO: 34121 - protein, 19 aa, Homo sapiens
CARRGYVAARPDGWYFDLW

SEQ ID NO: 34122 - protein, 14 aa, Homo sapiens
CARHVAGGGEFDYW

SEQ ID NO: 34123 - protein, 16 aa, Homo sapiens
CARHAGRLMVVEFDFW

SEQ ID NO: 34124 - protein, 23 aa, Homo sapiens
CARGIAYCSSTSCYGGYYYMDVW

SEQ ID NO: 34125 - protein, 22 aa, Homo sapiens
CARDGRFLEWLLSHYYYYMDVW

SEQ ID NO: 34126 - protein, 19 aa, Homo sapiens
CAKRVEYGSSSGVFSFDSW

SEQ ID NO: 34127 - protein, 14 aa, Homo sapiens
CARDYDQQWLIDYW

SEQ ID NO: 34128 - protein, 18 aa, Homo sapiens
CARRVVPAAKSYWYFDLW

SEQ ID NO: 34129 - protein, 18 aa, Homo sapiens
CARLGYCTNGVCYYIDYW

SEQ ID NO: 34130 - protein, 15 aa, Homo sapiens
CATFPLNYLYYFESW

SEQ ID NO: 34131 - protein, 21 aa, Homo sapiens
CARYKRDWYDASGNSFYFDSW

SEQ ID NO: 34132 - protein, 20 aa, Homo sapiens
CARQHVLDWLWGGRSWFDPW

SEQ ID NO: 34133 - protein, 22 aa, Homo sapiens
CARGPDYDFMTGQAFFAAFDIW

SEQ ID NO: 34134 - protein, 17 aa, Homo sapiens
CARGSGRTVTNDDFDYW

SEQ ID NO: 34135 - protein, 25 aa, Homo sapiens
CAREWFEDSSGYYWKRSDGQHFDYW

SEQ ID NO: 34136 - protein, 17 aa, Homo sapiens
CARGSSVTTTYWYYDIW

SEQ ID NO: 34137 - protein, 24 aa, Homo sapiens
CARPTGDAVPISGGYHYYYYMDVW

SEQ ID NO: 34138 - protein, 17 aa, Homo sapiens
CAKGDGSGNYYITFDSW

SEQ ID NO: 34139 - protein, 17 aa, Homo sapiens
CARHLRRGSYYHGFDVW

SEQ ID NO: 34140 - protein, 22 aa, Homo sapiens
CARLIRALSGGGSPPLYYFDYW

SEQ ID NO: 34141 - protein, 21 aa, Homo sapiens
CARDINQYDNSGYYHGWFDTW

SEQ ID NO: 34142 - protein, 15 aa, Homo sapiens
CARDGVGATIYFDYW

SEQ ID NO: 34143 - protein, 21 aa, Homo sapiens
CARPDNLGYCSGGSCYSVDYW

SEQ ID NO: 34144 - protein, 12 aa, Homo sapiens
CARDNGDYEDNW

SEQ ID NO: 34145 - protein, 14 aa, Homo sapiens
CASLLDPDFAFDMW

SEQ ID NO: 34146 - protein, 13 aa, Homo sapiens
CVHRPVAGFFDYW

SEQ ID NO: 34147 - protein, 19 aa, Homo sapiens
CARIPSLVVQPWGDGFDFW

SEQ ID NO: 34148 - protein, 11 aa, Homo sapiens [sequence omitted]

SEQ ID NO: 34149 - protein, 16 aa, Homo sapiens
CAKDRASHRLYYFHSW

SEQ ID NO: 34150 - protein, 19 aa, Homo sapiens
CASGPYYYESIGYRTFDIW

SEQ ID NO: 34151 - protein, 17 aa, Homo sapiens
CARHPYASSPSNYLDLW

SEQ ID NO: 34152 - protein, 17 aa, Homo sapiens
CALSHYGDYEGNWFDPW

SEQ ID NO: 34153 - protein, 13 aa, Homo sapiens
CVRDDPGIGLDYW

SEQ ID NO: 34154 - protein, 13 aa, Homo sapiens
CSAWDGRLSAWVF

SEQ ID NO: 34155 - protein, 17 aa, Homo sapiens
CARGGPGNSRYRYMDVW

SEQ ID NO: 34156 - protein, 23 aa, Homo sapiens
CATPGLGYTSSWQDYYYYYKDVW

SEQ ID NO: 34157 - protein, 18 aa, Homo sapiens
CARLNSFMVEYAHYFQYW

SEQ ID NO: 34158 - protein, 18 aa, Homo sapiens
CQVWDRSTDQRNSVHWVF

SEQ ID NO: 34159 - protein, 17 aa, Homo sapiens
CARSPGAARRYYYMDVW

SEQ ID NO: 34160 - protein, 19 aa, Homo sapiens
CARNPALWFGESRGVFDIW

SEQ ID NO: 34161 - protein, 18 aa, Homo sapiens
CARARAGSNGWYSPLDYW

SEQ ID NO: 34162 - protein, 16 aa, Homo sapiens
CAGQDSTSWPRRFDFW

SEQ ID NO: 34163 - protein, 19 aa, Homo sapiens
CARDQLNRESILTLALDYW

SEQ ID NO: 34164 - protein, 15 aa, Homo sapiens
CARVVIASYYYMDVW

SEQ ID NO: 34165 - protein, 15 aa, Homo sapiens
CAHSDISAAGAFDYW

SEQ ID NO: 34166 - protein, 20 aa, Homo sapiens
CARRNYFDSSGSLWKYFDNW

SEQ ID NO: 34167 - protein, 11 aa, Homo sapiens [sequence omitted]

SEQ ID NO: 34168 - protein, 16 aa, Homo sapiens
CAREGQGDLRHSFDYW

SEQ ID NO: 34169 - protein, 17 aa, Homo sapiens
CAKGGASSGGHPPLDYW

SEQ ID NO: 34170 - protein, 13 aa, Homo sapiens
CARRIGSSWFDPW

SEQ ID NO: 34171 - protein, 13 aa, Homo sapiens
CASQGGEDYFDFW

SEQ ID NO: 34172 - protein, 20 aa, Homo sapiens
CARGIYKFTSGSPQDWFDTW

SEQ ID NO: 34173 - protein, 22 aa, Homo sapiens
CAKDLEYYDSSPYYPVDAFDVW

SEQ ID NO: 34174 - protein, 23 aa, Homo sapiens
CARHDYVWGSYPPGSRYYYMDVW

SEQ ID NO: 34175 - protein, 15 aa, Homo sapiens
CAKANAVTTYFFDYW

SEQ ID NO: 34176 - protein, 18 aa, Homo sapiens
CAKDLYRLPQGGYYFDYW

SEQ ID NO: 34177 - protein, 13 aa, Homo sapiens
CARMVLGGNSDYW

SEQ ID NO: 34178 - protein, 16 aa, Homo sapiens
CARGPSTGAARPFDYW

SEQ ID NO: 34179 - protein, 22 aa, Homo sapiens
CAKTPYVWGSYRHVTVSCFDYW

SEQ ID NO: 34180 - protein, 21 aa, Homo sapiens
CAKLSGDTSDWYGSPDVFDVW

SEQ ID NO: 34181 - protein, 30 aa, Homo sapiens
CARDSPRVPLKGEIKTHQRSGSEIGLFDYW

SEQ ID NO: 34182 - protein, 17 aa, Homo sapiens
CARDRKWLDYYYYMDVW

SEQ ID NO: 34183 - protein, 13 aa, Homo sapiens
CSNLVDEGPKDYW

SEQ ID NO: 34184 - protein, 15 aa, Homo sapiens
CARDLWSGYSPFDYW

SEQ ID NO: 34185 - protein, 15 aa, Homo sapiens
CASYDSRGYQYFQHW

SEQ ID NO: 34186 - protein, 22 aa, Homo sapiens
CARSPHLDSRGYYERPYYFDYW

SEQ ID NO: 34187 - protein, 16 aa, Homo sapiens
CARPHREGSSTYFDYW

SEQ ID NO: 34188 - protein, 22 aa, Homo sapiens
CAREGVAARRGRYDYYYYMDVW

SEQ ID NO: 34189 - protein, 19 aa, Homo sapiens
CVRGVGSFPPPYYYYMDVW

SEQ ID NO: 34190 - protein, 23 aa, Homo sapiens
CARAPPLRYYDILTGSAYYFVYW

SEQ ID NO: 34191 - protein, 20 aa, Homo sapiens
CASPHETPYSSSPHGLFDYW

SEQ ID NO: 34192 - protein, 36 aa, Homo sapiens
CTLYLQMNSLGVEDTAVYYCARDFRAGRRYDVFEIW

SEQ ID NO: 34193 - protein, 14 aa, Homo sapiens
CATLPQLRKPLDYW

SEQ ID NO: 34194 - protein, 23 aa, Homo sapiens
CARAKGRISLRHFDWLFHAFDLW

SEQ ID NO: 34195 - protein, 21 aa, Homo sapiens
CATQKPNCNSTMCYYDGFDMW

SEQ ID NO: 34196 - protein, 13 aa, Homo sapiens
CAENWNFNWFDPW

SEQ ID NO: 34197 - protein, 14 aa, Homo sapiens
CARGRGQWLLVDYW

SEQ ID NO: 34198 - protein, 16 aa, Homo sapiens
CARDHLEYNISPADYW

SEQ ID NO: 34199 - protein, 16 aa, Homo sapiens
CAREGGLAASNWFDPW

SEQ ID NO: 34200 - protein, 20 aa, Homo sapiens
CARHGRGGYSGSYYSAFDIW

SEQ ID NO: 34201 - protein, 21 aa, Homo sapiens
CARGQGSWHLRRGYYYYMDVW

SEQ ID NO: 34202 - protein, 15 aa, Homo sapiens
CAREHQLLYRCLDYW

SEQ ID NO: 34203 - protein, 22 aa, Homo sapiens
CAREHYYDYIWQTSRSYYFDFW

SEQ ID NO: 34204 - protein, 21 aa, Homo sapiens
CARGRRPHHFWTYSYYYMDVW

SEQ ID NO: 34205 - protein, 20 aa, Homo sapiens
CAHRPGCSGGNCYSGAFNIW

SEQ ID NO: 34206 - protein, 20 aa, Homo sapiens
CAITKYDYSNYSPLDAFDIW

SEQ ID NO: 34207 - protein, 18 aa, Homo sapiens
CARVSPLADYVKPFFDYW

SEQ ID NO: 34208 - protein, 20 aa, Homo sapiens
CARVSLGTGYSYSVGWFDPW

SEQ ID NO: 34209 - protein, 19 aa, Homo sapiens
CARDPLEYSSSLDWYFDLW

SEQ ID NO: 34210 - protein, 17 aa, Homo sapiens
CARTMMTKLYPDAFDLW

SEQ ID NO: 34211 - protein, 11 aa, Homo sapiens
CKVGALDNDYW

SEQ ID NO: 34212 - protein, 22 aa, Homo sapiens
CARLKYSDVWSRYPQFYYMDVW

SEQ ID NO: 34213 - protein, 12 aa, Homo sapiens
CQSTDGSGNPVF

SEQ ID NO: 34214 - protein, 12 aa, Homo sapiens
CARVETGAPDYW

SEQ ID NO: 34215 - protein, 16 aa, Homo sapiens
CVKALGSGTGHLFDIW

SEQ ID NO: 34216 - protein, 20 aa, Homo sapiens
CAKIGIVGGTTYYYYYMDVW

SEQ ID NO: 34217 - protein, 16 aa, Homo sapiens
CARKYSSSREGPFDYW

SEQ ID NO: 34218 - protein, 16 aa, Homo sapiens
CARRYTRAYSSYWYYW

SEQ ID NO: 34219 - protein, 22 aa, Homo sapiens
CARHVRITIFGVVISPGYFDYW

SEQ ID NO: 34220 - protein, 18 aa, Homo sapiens
CAKPYVWGSYRQESFDFW

SEQ ID NO: 34221 - protein, 20 aa, Homo sapiens
CAKLTSDTIFGATAGYFDHW

SEQ ID NO: 34222 - protein, 17 aa, Homo sapiens
CAKAYSSSWYFWYFDLW

SEQ ID NO: 34223 - protein, 21 aa, Homo sapiens
CAKAQYSYGSGSYYDRPLDYW

SEQ ID NO: 34224 - protein, 23 aa, Homo sapiens
CARDWFLYGGYGVVFAENAFDIW

SEQ ID NO: 34225 - protein, 17 aa, Homo sapiens
CAKDGSSGYVYYYMDVW

SEQ ID NO: 34226 - protein, 16 aa, Homo sapiens
CATLPSGDEENWFDPW

SEQ ID NO: 34227 - protein, 17 aa, Homo sapiens
CARYYYETTGYHLIDYW

SEQ ID NO: 34228 - protein, 19 aa, Homo sapiens
CARAERFLDKIYYYYMDVW

SEQ ID NO: 34229 - protein, 16 aa, Homo sapiens
CARGRCTSATCAFEYW

SEQ ID NO: 34230 - protein, 17 aa, Homo sapiens
CATDRAVRTNGDAFDIW

SEQ ID NO: 34231 - protein, 15 aa, Homo sapiens
CARGNSGWPSYSDNW

SEQ ID NO: 34232 - protein, 16 aa, Homo sapiens
CAKGQGYIYGDSFDYW

SEQ ID NO: 34233 - protein, 16 aa, Homo sapiens
CARLKTTIAAQNFDYW

SEQ ID NO: 34234 - protein, 16 aa, Homo sapiens
CARRHIVGGTRNFDLW

SEQ ID NO: 34235 - protein, 17 aa, Homo sapiens
CARDLSSSWYEYYFDYW

SEQ ID NO: 34236 - protein, 17 aa, Homo sapiens
CARGPGLEISKRYLDFW

SEQ ID NO: 34237 - protein, 20 aa, Homo sapiens
CARHAYFYDSIGYYDAFDIW

SEQ ID NO: 34238 - protein, 13 aa, Homo sapiens
CARSWSAADFDYW

SEQ ID NO: 34239 - protein, 12 aa, Homo sapiens
CARVVTARADYW

SEQ ID NO: 34240 - protein, 17 aa, Homo sapiens
CARYENQLVRKAWFDFW

SEQ ID NO: 34241 - protein, 18 aa, Homo sapiens
CARDGGDFWGGYYAFDCW

SEQ ID NO: 34242 - protein, 15 aa, Homo sapiens
CARASAHLRFAFDIW

SEQ ID NO: 34243 - protein, 23 aa, Homo sapiens
CARDFSTYYFESYGYFNGFFDCW

SEQ ID NO: 34244 - protein, 21 aa, Homo sapiens
CARDSNSITMIVVVPTEIDYW

SEQ ID NO: 34245 - protein, 17 aa, Homo sapiens
CVRGTSRGSYDLDFDFW

SEQ ID NO: 34246 - protein, 20 aa, Homo sapiens
CARDFLKSSRDGYNYYFDYW

SEQ ID NO: 34247 - protein, 20 aa, Homo sapiens
CARHAALSPSIDSSWYIDHW

SEQ ID NO: 34248 - protein, 17 aa, Homo sapiens
CARGSSSSYRDNWFDPW

SEQ ID NO: 34249 - protein, 15 aa, Homo sapiens
CARHHDFWSSPSDYW

SEQ ID NO: 34250 - protein, 16 aa, Homo sapiens
CVKEALERSSSWDDSW

SEQ ID NO: 34251 - protein, 19 aa, Homo sapiens
CARHFRTSEYQLLLWFDPW

SEQ ID NO: 34252 - protein, 17 aa, Homo sapiens
CARDSGRPGAYWYFGLW

SEQ ID NO: 34253 - protein, 16 aa, Homo sapiens
CARDRSASYNDYFDYW

SEQ ID NO: 34254 - protein, 20 aa, Homo sapiens
CAKHRHVGILTGYYSPFDYW

SEQ ID NO: 34255 - protein, 14 aa, Homo sapiens
CVKDEVLRTYMDVW

SEQ ID NO: 34256 - protein, 18 aa, Homo sapiens
CAKAPSRWLYYYYYMDAW

SEQ ID NO: 34257 - protein, 17 aa, Homo sapiens
CTGGSCSSDYSYYMDVW

SEQ ID NO: 34258 - protein, 17 aa, Homo sapiens
CTRRLDYYDSSGYHDYW

SEQ ID NO: 34259 - protein, 12 aa, Homo sapiens
CASGRDVVFDYW

SEQ ID NO: 34260 - protein, 13 aa, Homo sapiens
CQTADTSGNDWVF

SEQ ID NO: 34261 - protein, 14 aa, Homo sapiens
CVRTEAWATGNDYW

SEQ ID NO: 34262 - protein, 14 aa, Homo sapiens
CTRAGPVGYYMDVW

SEQ ID NO: 34263 - protein, 18 aa, Homo sapiens
CARGLRGWRRYFYYLDLW

SEQ ID NO: 34264 - protein, 14 aa, Homo sapiens
CAKAQYSSDTLDYW

SEQ ID NO: 34265 - protein, 14 aa, Homo sapiens
CSSFTTSSTLDVVF

SEQ ID NO: 34266 - protein, 15 aa, Homo sapiens
CARYGLGDSAAFDLW

SEQ ID NO: 34267 - protein, 12 aa, Homo sapiens
CLSYDGDNVRVF

SEQ ID NO: 34268 - protein, 18 aa, Homo sapiens
CVRAHSMTGPMRMAFDVW

SEQ ID NO: 34269 - protein, 20 aa, Homo sapiens
CARGYSGSDGKLGNFYFDYW

SEQ ID NO: 34270 - protein, 16 aa, Homo sapiens
CARNMIVMVGGAFDLW

SEQ ID NO: 34271 - protein, 14 aa, Homo sapiens
CASGRPGSVYLDVW

SEQ ID NO: 34272 - protein, 19 aa, Homo sapiens
CATYFERASESFFDAVDIW

SEQ ID NO: 34273 - protein, 19 aa, Homo sapiens
CASRMKRTVTGSTRPFDYW

SEQ ID NO: 34274 - protein, 18 aa, Homo sapiens
CARPNSSNWGISYYMDVW

SEQ ID NO: 34275 - protein, 14 aa, Homo sapiens
CANALGQFSPFDYW

SEQ ID NO: 34276 - protein, 25 aa, Homo sapiens
CAKAHNPSIAAAAAEGHYYYYMDVW

SEQ ID NO: 34277 - protein, 14 aa, Homo sapiens
CYSTDSSANRRGVF

SEQ ID NO: 34278 - protein, 17 aa, Homo sapiens
CVKEIGSGSYRLLIDYW

SEQ ID NO: 34279 - protein, 18 aa, Homo sapiens
CAKDALRARFVYNWFDPW

SEQ ID NO: 34280 - protein, 17 aa, Homo sapiens
CARQDRGTYLRGPLDYW

SEQ ID NO: 34281 - protein, 18 aa, Homo sapiens
CARTENYYGSGRPDFDYW

SEQ ID NO: 34282 - protein, 21 aa, Homo sapiens
CARFSLSDTSLVTDYYYMDVW

SEQ ID NO: 34283 - protein, 13 aa, Homo sapiens
CAKDILVGAFDLW

SEQ ID NO: 34284 - protein, 20 aa, Homo sapiens
CVRLPHVVGVPVGSYYFDYW

SEQ ID NO: 34285 - protein, 20 aa, Homo sapiens
CVKDTHYQGSGTYFYYFDSW

SEQ ID NO: 34286 - protein, 21 aa, Homo sapiens
CARDLGGADYVATGEYYFDYW

SEQ ID NO: 34287 - protein, 14 aa, Homo sapiens [sequence omitted]

SEQ ID NO: 34288 - protein, 17 aa, Homo sapiens
CARHWATVISGGWFDPW

SEQ ID NO: 34289 - protein, 15 aa, Homo sapiens
CAKFSGSYYYPLDYW

SEQ ID NO: 34290 - protein, 13 aa, Homo sapiens
CRSITWYGAVDYW

SEQ ID NO: 34291 - protein, 19 aa, Homo sapiens
CARDRLDDNGYYGGSFDLW

SEQ ID NO: 34292 - protein, 20 aa, Homo sapiens
CAKDSEYSGYDLALGYFDYW

SEQ ID NO: 34293 - protein, 22 aa, Homo sapiens
CARGGRCYDFWSGYYTCAFDIW

SEQ ID NO: 34294 - protein, 16 aa, Homo sapiens
CARVPYSGWGHFFDYW

SEQ ID NO: 34295 - protein, 15 aa, Homo sapiens
CAREIPYGTYALDIW

SEQ ID NO: 34296 - protein, 18 aa, Homo sapiens
CAREYRDMTGTQRAVDIW

SEQ ID NO: 34297 - protein, 17 aa, Homo sapiens
CATAPGIAVAGNWFDPW

SEQ ID NO: 34298 - protein, 20 aa, Homo sapiens
CARVSSDFWNGYYRRYFDCW

SEQ ID NO: 34299 - protein, 17 aa, Homo sapiens
CARINRSPYDYDAFDIW

SEQ ID NO: 34300 - protein, 13 aa, Homo sapiens
CAAIYETSTFDLW

SEQ ID NO: 34301 - protein, 19 aa, Homo sapiens
CASGTYYDLVTHQLAFHYW

SEQ ID NO: 34302 - protein, 18 aa, Homo sapiens
CARGRGSIAAGGTGFDYW

SEQ ID NO: 34303 - protein, 16 aa, Homo sapiens
CARDPFSGDRNNFDYW

SEQ ID NO: 34304 - protein, 20 aa, Homo sapiens
CARLGYCSSRDCSPFYFDYW

SEQ ID NO: 34305 - protein, 14 aa, Homo sapiens
CARGVVALTYFDNW

SEQ ID NO: 34306 - protein, 16 aa, Homo sapiens [sequence omitted]

SEQ ID NO: 34307 - protein, 24 aa, Homo sapiens
CAMPLGRGKNYGSRVYDYYYMDVW

SEQ ID NO: 34308 - protein, 17 aa, Homo sapiens
CAKHPYTTSSAYYVDYW

SEQ ID NO: 34309 - protein, 17 aa, Homo sapiens
CARVVFLAISAYYMDIW

SEQ ID NO: 34310 - protein, 21 aa, Homo sapiens
CARRIDPGYSYGYAGHWFDPW

SEQ ID NO: 34311 - protein, 16 aa, Homo sapiens
CARGWGDATTNWFDPW

SEQ ID NO: 34312 - protein, 16 aa, Homo sapiens
CAKDRQGLGYSAFDFW

SEQ ID NO: 34313 - protein, 17 aa, Homo sapiens
CTKDLLGAAGPWYFGFW

SEQ ID NO: 34314 - protein, 19 aa, Homo sapiens
CATLTNLYGSGSYDGFDVW

SEQ ID NO: 34315 - protein, 18 aa, Homo sapiens
CASCNFDSAGYRYDVDYW

SEQ ID NO: 34316 - protein, 17 aa, Homo sapiens
CVCMLSFPLSYYYMDVW

SEQ ID NO: 34317 - protein, 14 aa, Homo sapiens
CANWVGELVDFDQW

SEQ ID NO: 34318 - protein, 19 aa, Homo sapiens
CARGGRIRDWSGHFIFDYW

SEQ ID NO: 34319 - protein, 22 aa, Homo sapiens
CARLSGYCSGYSCYPHWYFDLW

SEQ ID NO: 34320 - protein, 19 aa, Homo sapiens
CARRAYCSSTSCFYYLDHW

SEQ ID NO: 34321 - protein, 20 aa, Homo sapiens
CARQTGLHVHYYYYYYMDVW

SEQ ID NO: 34322 - protein, 17 aa, Homo sapiens
CAHSQTGGGYDPYFDYW

SEQ ID NO: 34323 - protein, 21 aa, Homo sapiens
CVRHREGDFWSGYSPYYVDFW

SEQ ID NO: 34324 - protein, 19 aa, Homo sapiens
CARGSTVTFPVYYYYMDVW

SEQ ID NO: 34325 - protein, 20 aa, Homo sapiens
CARVAYSYGPVSTYYYMDVW

SEQ ID NO: 34326 - protein, 21 aa, Homo sapiens
CAHSALFPIAVAPPSCAFDIW

SEQ ID NO: 34327 - protein, 17 aa, Homo sapiens
CAKDIASAVPSNGFHYW

SEQ ID NO: 34328 - protein, 18 aa, Homo sapiens
CATTKVRGYSYNYPFDYW

SEQ ID NO: 34329 - protein, 18 aa, Homo sapiens
CAKGLQNYRSRPEYFDYW

SEQ ID NO: 34330 - protein, 22 aa, Homo sapiens
CVRAPTAVRDISGYYYASFDSW

SEQ ID NO: 34331 - protein, 18 aa, Homo sapiens
CAMDLTPEDHQLVHPDYW

SEQ ID NO: 34332 - protein, 22 aa, Homo sapiens
CTTASRVTMIVVVITTGGFDYW

SEQ ID NO: 34333 - protein, 13 aa, Homo sapiens
CARHGHDWYPDYW

SEQ ID NO: 34334 - protein, 15 aa, Homo sapiens
CARVGETNWNYEDHW

SEQ ID NO: 34335 - protein, 16 aa, Homo sapiens
CARGGDYYGLGPLDYW

SEQ ID NO: 34336 - protein, 17 aa, Homo sapiens
CARVFGIAAARQYFDYW

SEQ ID NO: 34337 - protein, 18 aa, Homo sapiens
CARASGAARGWHHSFDFW

SEQ ID NO: 34338 - protein, 15 aa, Homo sapiens
CATAHGSETFYFDHW

SEQ ID NO: 34339 - protein, 16 aa, Homo sapiens
CVREDVAKGWNTFDIW

SEQ ID NO: 34340 - protein, 15 aa, Homo sapiens
CARGQYSSSFRFDPW

SEQ ID NO: 34341 - protein, 20 aa, Homo sapiens
CARGGYYDSSGYYYMDVDYW

SEQ ID NO: 34342 - protein, 18 aa, Homo sapiens
CARVHSDSSGWYNDFDYW

SEQ ID NO: 34343 - protein, 19 aa, Homo sapiens
CARIPSPFWSGYYSLFDYW

SEQ ID NO: 34344 - protein, 16 aa, Homo sapiens
CATHLTGYGNDAFDIW

SEQ ID NO: 34345 - protein, 17 aa, Homo sapiens
CAREGLAKKRIWIFDSW

SEQ ID NO: 34346 - protein, 22 aa, Homo sapiens
CARVGGDSSGIHYYYYYYMDVW

SEQ ID NO: 34347 - protein, 13 aa, Homo sapiens
CQQYRGSPAMYAF

SEQ ID NO: 34348 - protein, 14 aa, Homo sapiens
CALQGAYVGYLDVW

SEQ ID NO: 34349 - protein, 17 aa, Homo sapiens
CARVIRVATILYYFDYW

SEQ ID NO: 34350 - protein, 14 aa, Homo sapiens
CARGGNYPVYMDVW

SEQ ID NO: 34351 - protein, 20 aa, Homo sapiens
CAKAGGKYQLLYGGDRFDSW

SEQ ID NO: 34352 - protein, 14 aa, Homo sapiens
CARSYTNRDGLDVW

SEQ ID NO: 34353 - protein, 17 aa, Homo sapiens
CARDLGYAGKYERVDYW

SEQ ID NO: 34354 - protein, 12 aa, Homo sapiens
CTGGHSYAFFYW

SEQ ID NO: 34355 - protein, 14 aa, Homo sapiens
CARILAGTTGADYW

SEQ ID NO: 34356 - protein, 17 aa, Homo sapiens
CARGPVEYTSASSFDYW

SEQ ID NO: 34357 - protein, 16 aa, Homo sapiens
CARHPIRGHSYGFDFW

SEQ ID NO: 34358 - protein, 17 aa, Homo sapiens
CARDPKWGTAADGTDYW

SEQ ID NO: 34359 - protein, 18 aa, Homo sapiens
CVYHYLWGPAWPNAFDFW

SEQ ID NO: 34360 - protein, 22 aa, Homo sapiens
CARRWSDSSGYPKNRYYYMDVW

SEQ ID NO: 34361 - protein, 23 aa, Homo sapiens
CARGRRVLLWFGELFDSYYMDVW

SEQ ID NO: 34362 - protein, 18 aa, Homo sapiens
CARSGGDITGTTRSFDYW

SEQ ID NO: 34363 - protein, 13 aa, Homo sapiens
CAAGAPNLSFDSW

SEQ ID NO: 34364 - protein, 17 aa, Homo sapiens
CARGRYCTEGSCFFDYW

SEQ ID NO: 34365 - protein, 16 aa, Homo sapiens
CARAPKGSSYHYIDSW

SEQ ID NO: 34366 - protein, 11 aa, Homo sapiens
CQQFNVAPYSF

SEQ ID NO: 34367 - protein, 17 aa, Homo sapiens
CARDRAEFWSGRAFDVW

SEQ ID NO: 34368 - protein, 18 aa, Homo sapiens
CARQSVDVFRDGNWFDPW

SEQ ID NO: 34369 - protein, 14 aa, Homo sapiens
CAHTRTLTGSFDYW

SEQ ID NO: 34370 - protein, 15 aa, Homo sapiens
CAKDRGATMSVLDYW

SEQ ID NO: 34371 - protein, 20 aa, Homo sapiens
CATVRSNYDRDGYFIHFDNW

SEQ ID NO: 34372 - protein, 20 aa, Homo sapiens
CARGGATGGGDCTRCAFDYW

SEQ ID NO: 34373 - protein, 20 aa, Homo sapiens
CARDIYSSGWYGPKYYFDYW

SEQ ID NO: 34374 - protein, 16 aa, Homo sapiens
CARATTGYANSPTDYW

SEQ ID NO: 34375 - protein, 17 aa, Homo sapiens
CARDGLTITTRGWFDSW

SEQ ID NO: 34376 - protein, 19 aa, Homo sapiens
CAKVDSFDWSYSYYYMDVW

SEQ ID NO: 34377 - protein, 16 aa, Homo sapiens
CARRVPRWGYYYMDVW

SEQ ID NO: 34378 - protein, 19 aa, Homo sapiens
CARPFPPGYFSGWSGFDYW

SEQ ID NO: 34379 - protein, 10 aa, Homo sapiens
CTRGAYFDLW

SEQ ID NO: 34380 - protein, 14 aa, Homo sapiens
CNSWDSSGNRNVLF

SEQ ID NO: 34381 - protein, 15 aa, Homo sapiens
CVKEEVGAAYYLDFW

SEQ ID NO: 34382 - protein, 17 aa, Homo sapiens
CAKRSWEYGTGYYMDVW

SEQ ID NO: 34383 - protein, 16 aa, Homo sapiens
CARVADSSSTAAFDYW

SEQ ID NO: 34384 - protein, 18 aa, Homo sapiens
CARGGLEQWAERNYFNYW

SEQ ID NO: 34385 - protein, 16 aa, Homo sapiens
CVHTRYFYDAGAFDIW

SEQ ID NO: 34386 - protein, 19 aa, Homo sapiens
CARGTVTTSVINNYYYDSW

SEQ ID NO: 34387 - protein, 17 aa, Homo sapiens
CARSFMTGGPNDVFDIW

SEQ ID NO: 34388 - protein, 22 aa, Homo sapiens
CARGAYWYGSGMDENPNAFDIW

SEQ ID NO: 34389 - protein, 24 aa, Homo sapiens
CARRNALKYEFWSGYSKKGPYDYW

SEQ ID NO: 34390 - protein, 11 aa, Homo sapiens
CSSLETTFDVW

SEQ ID NO: 34391 - protein, 16 aa, Homo sapiens
CATRLDYGAPGPFDPW

SEQ ID NO: 34392 - protein, 20 aa, Homo sapiens
CVAADDYIWGNYPYTGVDYW

SEQ ID NO: 34393 - protein, 19 aa, Homo sapiens
CARENCAGTCYWGDYMDVW

SEQ ID NO: 34394 - protein, 20 aa, Homo sapiens
CARVRRRLHASGWYNYFDLW

SEQ ID NO: 34395 - protein, 18 aa, Homo sapiens
CARHLAARRLDYYYMDVW

SEQ ID NO: 34396 - protein, 14 aa, Homo sapiens
CARMNYYDSPFDPW

SEQ ID NO: 34397 - protein, 15 aa, Homo sapiens
CQTYDSSLSGHTYVF

SEQ ID NO: 34398 - protein, 17 aa, Homo sapiens
CAKDFSDIWTAYPLDYW

SEQ ID NO: 34399 - protein, 14 aa, Homo sapiens
CASLDRAPYYMDVW

SEQ ID NO: 34400 - protein, 22 aa, Homo sapiens
CQSYDSSLSDSDVVFGDSDVVF

SEQ ID NO: 34401 - protein, 17 aa, Homo sapiens
CAKDFRAGRRYDVFDIW

SEQ ID NO: 34402 - protein, 18 aa, Homo sapiens
CARTGPGGSDQLGLFDPW

SEQ ID NO: 34403 - protein, 23 aa, Homo sapiens
CAKDLDRRGYCSGGSCFPKFDSW

SEQ ID NO: 34404 - protein, 15 aa, Homo sapiens
CARAWDSIDNWFDFW

SEQ ID NO: 34405 - protein, 16 aa, Homo sapiens
CARHRGSGWFYYYDSW

SEQ ID NO: 34406 - protein, 15 aa, Homo sapiens
CARIAHRFGRAFDIW

SEQ ID NO: 34407 - protein, 16 aa, Homo sapiens
CARHWGWLQLSYFDYW

SEQ ID NO: 34408 - protein, 21 aa, Homo sapiens
CARDIDDLTTSGAVVNWFDPW

SEQ ID NO: 34409 - protein, 13 aa, Homo sapiens
CAAWDGSLSVAMF

SEQ ID NO: 34410 - protein, 21 aa, Homo sapiens
CATLYYDFWSGDFTGTWFDPW

SEQ ID NO: 34411 - protein, 16 aa, Homo sapiens
CARVKDVVADWYFDLW

SEQ ID NO: 34412 - protein, 16 aa, Homo sapiens
CAKVLTMIVVDPFDYW

SEQ ID NO: 34413 - protein, 18 aa, Homo sapiens
CAKDREASSYDSSGSDYW

SEQ ID NO: 34414 - protein, 13 aa, Homo sapiens
CALRRYRDAFDIW

SEQ ID NO: 34415 - protein, 19 aa, Homo sapiens
CASFLDLGYCSGGSCFDYW

SEQ ID NO: 34416 - protein, 15 aa, Homo sapiens
CASHEGWTDDWFDPW

SEQ ID NO: 34417 - protein, 18 aa, Homo sapiens
CARFLGFADYRNNWYDPW

SEQ ID NO: 34418 - protein, 14 aa, Homo sapiens
CARDGISQHAFDIW

SEQ ID NO: 34419 - protein, 20 aa, Homo sapiens
CAKDKRYFRYSDYENWFDPW

SEQ ID NO: 34420 - protein, 20 aa, Homo sapiens
CARGPHIVVVIAAYWYFDLW

SEQ ID NO: 34421 - protein, 18 aa, Homo sapiens
CVNLIKVQQRPYDAFDIW

SEQ ID NO: 34422 - protein, 20 aa, Homo sapiens
CARHRRAGYSSGWHEAFDIW

SEQ ID NO: 34423 - protein, 18 aa, Homo sapiens
CVRAPFSYYRRLNYFDPW

SEQ ID NO: 34424 - protein, 16 aa, Homo sapiens
CTRSRGPIYAYFFDYW

SEQ ID NO: 34425 - protein, 19 aa, Homo sapiens
CARSIAVFGVVPGDAFDMW

SEQ ID NO: 34426 - protein, 17 aa, Homo sapiens
CARGRKAGTMAGTFDYW

SEQ ID NO: 34427 - protein, 13 aa, Homo sapiens
CARHLHIPKFDIW

SEQ ID NO: 34428 - protein, 19 aa, Homo sapiens
CATDGQYSDNSDQDALNIW

SEQ ID NO: 34429 - protein, 16 aa, Homo sapiens
CAGSMVRGVISAFHIW

SEQ ID NO: 34430 - protein, 18 aa, Homo sapiens
CAKIFPRGWTTLGAFDFW

SEQ ID NO: 34431 - protein, 20 aa, Homo sapiens
CARVFVPPSTFYYYYYMDVW

SEQ ID NO: 34432 - protein, 18 aa, Homo sapiens
CARAFRSSGRPWDYFNYW

SEQ ID NO: 34433 - protein, 16 aa, Homo sapiens
CARSSSSWDFDAFDFW

SEQ ID NO: 34434 - protein, 15 aa, Homo sapiens
CAHRRSGAGVRFDFW

SEQ ID NO: 34435 - protein, 15 aa, Homo sapiens
CARSYNSGFNWFDPW

SEQ ID NO: 34436 - protein, 20 aa, Homo sapiens
CAAIESMVRGVIRKGWFDSW

SEQ ID NO: 34437 - protein, 20 aa, Homo sapiens
CTRDLFESSGYYVPWYFESW

SEQ ID NO: 34438 - protein, 13 aa, Homo sapiens
CANQYSNGWFESW

SEQ ID NO: 34439 - protein, 18 aa, Homo sapiens
CVKEPHYDLWRSYYMDVW

SEQ ID NO: 34440 - protein, 17 aa, Homo sapiens
CARHRLDYGALYFFDYW

SEQ ID NO: 34441 - protein, 21 aa, Homo sapiens
CARSPTYTTSGSDYHYYMDVW

SEQ ID NO: 34442 - protein, 16 aa, Homo sapiens
CASMVWGFDITGFDYW

SEQ ID NO: 34443 - protein, 11 aa, Homo sapiens [sequence omitted]

SEQ ID NO: 34444 - protein, 16 aa, Homo sapiens
CARGGEVTGTGAFDIW

SEQ ID NO: 34445 - protein, 19 aa, Homo sapiens
CARDPGPESGSLPSHLDYW

SEQ ID NO: 34446 - protein, 15 aa, Homo sapiens
CTRGGYGLYTDFDYW

SEQ ID NO: 34447 - protein, 24 aa, Homo sapiens
CAREHDGEHDGLGSGHWFYYMDVW

SEQ ID NO: 34448 - protein, 15 aa, Homo sapiens
CAAHGSGSHRNFDHW

SEQ ID NO: 34449 - protein, 11 aa, Homo sapiens
CLQHDDFLWTF

SEQ ID NO: 34450 - protein, 21 aa, Homo sapiens
CARVPMVRGVTDYYFYYMDVW

SEQ ID NO: 34451 - protein, 13 aa, Homo sapiens
CAARPGYSYRDMW

SEQ ID NO: 34452 - protein, 15 aa, Homo sapiens
CARLYNNSPYYFDSW

SEQ ID NO: 34453 - protein, 18 aa, Homo sapiens
CVKGDPQAVNAPDAFDLW

SEQ ID NO: 34454 - protein, 21 aa, Homo sapiens
CAAAFHSSGYYSIYYYYMDVW

SEQ ID NO: 34455 - protein, 16 aa, Homo sapiens
CARDGQWMALPYFDDW

SEQ ID NO: 34456 - protein, 17 aa, Homo sapiens
CATESYLWGSYRNFAYW

SEQ ID NO: 34457 - protein, 15 aa, Homo sapiens
CAREDIIAARLWDYW

SEQ ID NO: 34458 - protein, 17 aa, Homo sapiens
CARKRGGHGDNGLFDVW

SEQ ID NO: 34459 - protein, 16 aa, Homo sapiens
CVKDDKAGYWDGFDIW

SEQ ID NO: 34460 - protein, 21 aa, Homo sapiens
CARREYYSDSSGKISDAFDIW

SEQ ID NO: 34461 - protein, 16 aa, Homo sapiens
CARDDSAVAGVEIDYW

SEQ ID NO: 34462 - protein, 19 aa, Homo sapiens
CAKGLAAAGKIYYYYKDVW

SEQ ID NO: 34463 - protein, 14 aa, Homo sapiens
CARDDLGATTVDYW

SEQ ID NO: 34464 - protein, 21 aa, Homo sapiens
CTTEGSGTQLSYGHSYYMDVW

SEQ ID NO: 34465 - protein, 17 aa, Homo sapiens
CAKDYEMVIAIGVFDYW

SEQ ID NO: 34466 - protein, 13 aa, Homo sapiens
CARRVVADWFDPW

SEQ ID NO: 34467 - protein, 22 aa, Homo sapiens
CAREKDIVVVVSTSRGSAFNIW

SEQ ID NO: 34468 - protein, 17 aa, Homo sapiens
CVHRRLSSTSADYFLHW

SEQ ID NO: 34469 - protein, 17 aa, Homo sapiens
CASVGFCSGGTCYDDYW

SEQ ID NO: 34470 - protein, 20 aa, Homo sapiens
CVRDMGCGGDCYESGSPDYW

SEQ ID NO: 34471 - protein, 18 aa, Homo sapiens
CARHVGERRRQLDFFDYW

SEQ ID NO: 34472 - protein, 19 aa, Homo sapiens
CARGAFYGSGTFYNDFDYW

SEQ ID NO: 34473 - protein, 15 aa, Homo sapiens
CARDQRGNTYGSDYW

SEQ ID NO: 34474 - protein, 16 aa, Homo sapiens
CARVTTTSRIGAFDIW

SEQ ID NO: 34475 - protein, 19 aa, Homo sapiens
CARTPPLYSSSSQGAFDIW

SEQ ID NO: 34476 - protein, 15 aa, Homo sapiens
CARQGRYASSSFDYW

SEQ ID NO: 34477 - protein, 26 aa, Homo sapiens
CARASSWKYFHDSSDHHVSYYYIDVW

SEQ ID NO: 34478 - protein, 14 aa, Homo sapiens
CSRLPIVDEPVDYW

SEQ ID NO: 34479 - protein, 14 aa, Homo sapiens
CARREDTSMNFDYW

SEQ ID NO: 34480 - protein, 19 aa, Homo sapiens
CASTYTYYFDGSGYGIDYW

SEQ ID NO: 34481 - protein, 18 aa, Homo sapiens
CAHSDMDLLVVWHAFDFW

SEQ ID NO: 34482 - protein, 18 aa, Homo sapiens
CTTLSLWQLRMDGGFDTW

SEQ ID NO: 34483 - protein, 18 aa, Homo sapiens
CATDRGGPNSSGFPTDYW

SEQ ID NO: 34484 - protein, 17 aa, Homo sapiens
CAKDHGSLEWLLYLDVW

SEQ ID NO: 34485 - protein, 16 aa, Homo sapiens
CARGKEVAWFGDLDYW

SEQ ID NO: 34486 - protein, 16 aa, Homo sapiens
CARGALRDKHMPFDPW

SEQ ID NO: 34487 - protein, 18 aa, Homo sapiens
CAKDGGWELLGKDYFDYW

SEQ ID NO: 34488 - protein, 18 aa, Homo sapiens
CARAVPVSAANYFYMDVW

SEQ ID NO: 34489 - protein, 18 aa, Homo sapiens
CAKDITKWMVTPPGFDYW

SEQ ID NO: 34490 - protein, 20 aa, Homo sapiens
CARDQFCYGDCYSQGYFDFW

SEQ ID NO: 34491 - protein, 20 aa, Homo sapiens
CAGHTLVFAINGISSVFEYW

SEQ ID NO: 34492 - protein, 16 aa, Homo sapiens
CARDWSSYYQYFFDFW

SEQ ID NO: 34493 - protein, 22 aa, Homo sapiens
CARHGPNFDLWSGYAPRWFDPW

SEQ ID NO: 34494 - protein, 14 aa, Homo sapiens
CALRMMAGSNFDYW

SEQ ID NO: 34495 - protein, 19 aa, Homo sapiens
CAKVPRPYSYGTDDAFDIW

SEQ ID NO: 34496 - protein, 14 aa, Homo sapiens
CARDRGYSSYFDLW

SEQ ID NO: 34497 - protein, 13 aa, Homo sapiens
CAAGDDSMNGPMF

SEQ ID NO: 34498 - protein, 18 aa, Homo sapiens
CARDFPNYGSGVDAFDIW

SEQ ID NO: 34499 - protein, 17 aa, Homo sapiens
CARFRYSSSWTPPFDYW

SEQ ID NO: 34500 - protein, 21 aa, Homo sapiens
CTKDVYHGSGSYYRGLYFDYW

SEQ ID NO: 34501 - protein, 12 aa, Homo sapiens
CAHRDQDDFDNW

SEQ ID NO: 34502 - protein, 22 aa, Homo sapiens
CASPPPKADSLGYYVRAYFEYW

SEQ ID NO: 34503 - protein, 21 aa, Homo sapiens
CARGSLSYYYESSGYPPHDYW

SEQ ID NO: 34504 - protein, 15 aa, Homo sapiens
CARSGRLQRIYWDYW

SEQ ID NO: 34505 - protein, 17 aa, Homo sapiens
CARESIAATYYYYFDSW

SEQ ID NO: 34506 - protein, 18 aa, Homo sapiens
CARSRSYGSGSQTLIDYW

SEQ ID NO: 34507 - protein, 13 aa, Homo sapiens
CVRQKFGDHLDYW

SEQ ID NO: 34508 - protein, 18 aa, Homo sapiens
CARDWLDDYGDYWGLDLW

SEQ ID NO: 34509 - protein, 19 aa, Homo sapiens
CAKGGAQERRIISNMADSW

SEQ ID NO: 34510 - protein, 14 aa, Homo sapiens
CAGLYSTLSHFDYW

SEQ ID NO: 34511 - protein, 19 aa, Homo sapiens
CAKDPKYRGSGSHYNPDYW

SEQ ID NO: 34512 - protein, 14 aa, Homo sapiens
CARLGYNLNDVDYW

SEQ ID NO: 34513 - protein, 22 aa, Homo sapiens
CARDFRASSYCTNGVCGAFDIW

SEQ ID NO: 34514 - protein, 14 aa, Homo sapiens
CARYDTIRHASDYW

SEQ ID NO: 34515 - protein, 20 aa, Homo sapiens
CARETYWYENGDYYYTFDYW

SEQ ID NO: 34516 - protein, 15 aa, Homo sapiens
CTTDLLRFSHYMDVW

SEQ ID NO: 34517 - protein, 19 aa, Homo sapiens
CAKDFRFLEWSHSGYFDSW

SEQ ID NO: 34518 - protein, 15 aa, Homo sapiens
CAPPGSQEDTYFGYW

SEQ ID NO: 34519 - protein, 14 aa, Homo sapiens
CAREDMSEPSFDLW

SEQ ID NO: 34520 - protein, 19 aa, Homo sapiens
CAKIQCVRNFCSLYYFDHW

SEQ ID NO: 34521 - protein, 18 aa, Homo sapiens
CASTPHHSSDYYFHFDHW

SEQ ID NO: 34522 - protein, 20 aa, Homo sapiens
CARARRQTYLDFWSGYFESW

SEQ ID NO: 34523 - protein, 16 aa, Homo sapiens
CTTIRVTIFGNYFDYW

SEQ ID NO: 34524 - protein, 14 aa, Homo sapiens
CTRTYGGHADFDYW

SEQ ID NO: 34525 - protein, 12 aa, Homo sapiens
CLQYNIWPPWTF

SEQ ID NO: 34526 - protein, 13 aa, Homo sapiens
CVRGGRAYSFDFW

SEQ ID NO: 34527 - protein, 21 aa, Homo sapiens
CARELGYCSSQSCYGSGFDYW

SEQ ID NO: 34528 - protein, 14 aa, Homo sapiens
CVRDVGHWSSFDVW

SEQ ID NO: 34529 - protein, 17 aa, Homo sapiens
CAKCPFDWPTLCPFDYW

SEQ ID NO: 34530 - protein, 12 aa, Homo sapiens
CQQYATWPPGPF

SEQ ID NO: 34531 - protein, 14 aa, Homo sapiens
CARRVWGKYRLDYW

SEQ ID NO: 34532 - protein, 17 aa, Homo sapiens
CARSLRGYSGYGYFDYW

SEQ ID NO: 34533 - protein, 17 aa, Homo sapiens
CVRGDYDENKYRWFDPW

SEQ ID NO: 34534 - protein, 15 aa, Homo sapiens
CARVTSYYYDSDDYW

SEQ ID NO: 34535 - protein, 17 aa, Homo sapiens
CARPILRWPREFAFEIW

SEQ ID NO: 34536 - protein, 14 aa, Homo sapiens
CARLSALRSAFDYW

SEQ ID NO: 34537 - protein, 17 aa, Homo sapiens
CAKDPGRDPHESYFDYW

SEQ ID NO: 34538 - protein, 16 aa, Homo sapiens
CARGGFDTNGFTFAYW

SEQ ID NO: 34539 - protein, 18 aa, Homo sapiens
CARHLTLTLDAALPFDMW

SEQ ID NO: 34540 - protein, 17 aa, Homo sapiens
CASDLSSSWGWGQFDYW

SEQ ID NO: 34541 - protein, 16 aa, Homo sapiens
CAAHVVIVPAATFDYW

SEQ ID NO: 34542 - protein, 19 aa, Homo sapiens
CVKWGLSAVARPSDWFDPW

SEQ ID NO: 34543 - protein, 17 aa, Homo sapiens
CAKPKYSSSWSDAFDIW

SEQ ID NO: 34544 - protein, 21 aa, Homo sapiens
CASHVWQWLVPAQARGWFDPW

SEQ ID NO: 34545 - protein, 16 aa, Homo sapiens
CVRGAPSWGSNYFDYW

SEQ ID NO: 34546 - protein, 15 aa, Homo sapiens
CARESAGKLDAFDIW

SEQ ID NO: 34547 - protein, 19 aa, Homo sapiens
CAREGWDSYTSSWYYFDYW

SEQ ID NO: 34548 - protein, 18 aa, Homo sapiens
CARGYTSSLKTLYYMDVW

SEQ ID NO: 34549 - protein, 24 aa, Homo sapiens
CAKDLSSRSDYWRGYWGADYFDYW

SEQ ID NO: 34550 - protein, 13 aa, Homo sapiens
CASGITVTTFDYW

SEQ ID NO: 34551 - protein, 16 aa, Homo sapiens
CVRNAYITTWYHFDHW

SEQ ID NO: 34552 - protein, 16 aa, Homo sapiens
CGRVSGDSSVWTIDYW

SEQ ID NO: 34553 - protein, 17 aa, Homo sapiens
CARVRRMAFLIGAFDIW

SEQ ID NO: 34554 - protein, 17 aa, Homo sapiens
CTTVGCSSVGCYYFDFW

SEQ ID NO: 34555 - protein, 14 aa, Homo sapiens
CARHGWDLTHFDFW

SEQ ID NO: 34556 - protein, 22 aa, Homo sapiens
CARDHVLGDYYDSSGSHWFDPW

SEQ ID NO: 34557 - protein, 20 aa, Homo sapiens
CVHSPYYFDSSGYKEYFHHW

SEQ ID NO: 34558 - protein, 19 aa, Homo sapiens
CVRDYYDSSGLTYNAFDIW

SEQ ID NO: 34559 - protein, 18 aa, Homo sapiens
CARQSLYSDSTSYPPDYW

SEQ ID NO: 34560 - protein, 19 aa, Homo sapiens
CATYNWRDGSRRPDALDIW

SEQ ID NO: 34561 - protein, 20 aa, Homo sapiens
CATDHSMNSGSYFPPWFDPW

SEQ ID NO: 34562 - protein, 18 aa, Homo sapiens
CAKAPPGSSWYLGWFDPW

SEQ ID NO: 34563 - protein, 21 aa, Homo sapiens
CARARSAADDLWSSKTYFDYW

SEQ ID NO: 34564 - protein, 25 aa, Homo sapiens
CAHSRKSNSGNLAKYLGYHYYMDVW

SEQ ID NO: 34565 - protein, 17 aa, Homo sapiens
CARDQSYRVNWNDEDYW

SEQ ID NO: 34566 - protein, 16 aa, Homo sapiens
CARVWGAMEWQLWDYW

SEQ ID NO: 34567 - protein, 24 aa, Homo sapiens
CARDREPKDYDSSGYYYALGFDYW

SEQ ID NO: 34568 - protein, 14 aa, Homo sapiens
CVGGSSGWYKFDYW

SEQ ID NO: 34569 - protein, 17 aa, Homo sapiens
CATRPSGSTWYPYFDYW

SEQ ID NO: 34570 - protein, 15 aa, Homo sapiens
CARGDSSGYFHGDYW

SEQ ID NO: 34571 - protein, 16 aa, Homo sapiens
CARHPHDYSTYADDYW

SEQ ID NO: 34572 - protein, 19 aa, Homo sapiens
CARDRFMLFTPAAGNFDEW

SEQ ID NO: 34573 - protein, 13 aa, Homo sapiens
CARSPIAAGIDYW

SEQ ID NO: 34574 - protein, 17 aa, Homo sapiens
CARVGARNYADYPLDYW

SEQ ID NO: 34575 - protein, 15 aa, Homo sapiens
CGHRPIVGAAHFDHW

SEQ ID NO: 34576 - protein, 16 aa, Homo sapiens
CARSATWRVKNACDIW

SEQ ID NO: 34577 - protein, 17 aa, Homo sapiens
CVRDGTDGIVPWAVDYW

SEQ ID NO: 34578 - protein, 18 aa, Homo sapiens
CARLRVVYSHYFYYMDDW

SEQ ID NO: 34579 - protein, 16 aa, Homo sapiens
CAKDVAPTPFGRFDPW

SEQ ID NO: 34580 - protein, 12 aa, Homo sapiens
CATYQPPYFDDW

SEQ ID NO: 34581 - protein, 21 aa, Homo sapiens
CARGPLRCNKVTCHPGSFDPW

SEQ ID NO: 34582 - protein, 18 aa, Homo sapiens
CARQVDFSNPYYYYLDVW

SEQ ID NO: 34583 - protein, 13 aa, Homo sapiens
CQQFNSYPPAITF

SEQ ID NO: 34584 - protein, 14 aa, Homo sapiens
CAKLEEQELYFDNW

SEQ ID NO: 34585 - protein, 14 aa, Homo sapiens
CAADRGQPNSFDPW

SEQ ID NO: 34586 - protein, 15 aa, Homo sapiens
CARPRTYGALFVDYW

SEQ ID NO: 34587 - protein, 21 aa, Homo sapiens
CARLLISYDSSGSVGGYFDYW

SEQ ID NO: 34588 - protein, 14 aa, Homo sapiens
CASLDPFRGGFDYW

SEQ ID NO: 34589 - protein, 16 aa, Homo sapiens
CAREYYSSTFRSFDLW

SEQ ID NO: 34590 - protein, 16 aa, Homo sapiens
CASGPTTVRLSYMDIW

SEQ ID NO: 34591 - protein, 19 aa, Homo sapiens
CARGSPRGNWNYVDYFDYW

SEQ ID NO: 34592 - protein, 19 aa, Homo sapiens
CARHWDDSSGYSWDSIDYW

SEQ ID NO: 34593 - protein, 16 aa, Homo sapiens
CARDLGSASHRYFDSW

SEQ ID NO: 34594 - protein, 17 aa, Homo sapiens
CATRPPDTSMVYFFDYW

SEQ ID NO: 34595 - protein, 14 aa, Homo sapiens
CQSADTSRTYHVIF

SEQ ID NO: 34596 - protein, 19 aa, Homo sapiens
CTTRFASGSYYYSDYTDVW

SEQ ID NO: 34597 - protein, 16 aa, Homo sapiens
CQTWGTGFWDTGFWVF

SEQ ID NO: 34598 - protein, 21 aa, Homo sapiens
CARQATYYYDTDNYYYYMDVW

SEQ ID NO: 34599 - protein, 16 aa, Homo sapiens
CARRGSGFRLYHFDYW

SEQ ID NO: 34600 - protein, 20 aa, Homo sapiens
CARDSVTIIRGIIMYYFDYW

SEQ ID NO: 34601 - protein, 17 aa, Homo sapiens
CARDLEFVVVTAGFDYW

SEQ ID NO: 34602 - protein, 13 aa, Homo sapiens
CARPHQYSSFDYW

SEQ ID NO: 34603 - protein, 15 aa, Homo sapiens
CAREGVGASNALDIW

SEQ ID NO: 34604 - protein, 17 aa, Homo sapiens
CARGKTTVPHYYYMDVW

SEQ ID NO: 34605 - protein, 21 aa, Homo sapiens
CAKETGKYYFGSGSPTPMDYW

SEQ ID NO: 34606 - protein, 20 aa, Homo sapiens
CAKDHASHTSGLLDWYFDLW

SEQ ID NO: 34607 - protein, 16 aa, Homo sapiens
CATEPQGFRLDYMDVW

SEQ ID NO: 34608 - protein, 13 aa, Homo sapiens
CETWDSRLSVVAF

SEQ ID NO: 34609 - protein, 28 aa, Homo sapiens
CLRVEDTALYFCARGGVSGDSYWFFDYW

SEQ ID NO: 34610 - protein, 18 aa, Homo sapiens
CTREYYGGADSNRGFDYW

SEQ ID NO: 34611 - protein, 16 aa, Homo sapiens
CARGVVVAATRLFDPW

SEQ ID NO: 34612 - protein, 15 aa, Homo sapiens
CARETYAAAHAFDDW

SEQ ID NO: 34613 - protein, 15 aa, Homo sapiens
CARHKSGFSSGLDYW

SEQ ID NO: 34614 - protein, 14 aa, Homo sapiens
CVTTSNDILTWDYW

SEQ ID NO: 34615 - protein, 21 aa, Homo sapiens
CARGIFGVVILPYYKYYMDVW

SEQ ID NO: 34616 - protein, 18 aa, Homo sapiens
CARGRGYSPYEGYYFDYW

SEQ ID NO: 34617 - protein, 20 aa, Homo sapiens
CAKDVVWGYSSETEDYFDFW

SEQ ID NO: 34618 - protein, 18 aa, Homo sapiens
CARRTLGGFGDLPPFDFW

SEQ ID NO: 34619 - protein, 15 aa, Homo sapiens
CASLGSYGDYARDYW

SEQ ID NO: 34620 - protein, 21 aa, Homo sapiens
CAITYYYASGTYYDEEESDYW

SEQ ID NO: 34621 - protein, 22 aa, Homo sapiens
CARRTAVAGTWEDYYYYYMDVW

SEQ ID NO: 34622 - protein, 19 aa, Homo sapiens
CARFPTVDTTMGTANHDYW

SEQ ID NO: 34623 - protein, 16 aa, Homo sapiens
CARAYGSGTYFHFDYW

SEQ ID NO: 34624 - protein, 14 aa, Homo sapiens
CSSYAGTDNFHYVF

SEQ ID NO: 34625 - protein, 21 aa, Homo sapiens
CARRVQYYYGSGSYSHYFDFW

SEQ ID NO: 34626 - protein, 11 aa, Homo sapiens
CAPDRQGFDPW

SEQ ID NO: 34627 - protein, 19 aa, Homo sapiens
CARMECLGGICSMYYFDNW

SEQ ID NO: 34628 - protein, 21 aa, Homo sapiens
CAMRPIYNDFWSGQRSWFDPW

SEQ ID NO: 34629 - protein, 19 aa, Homo sapiens
CARKSHDDIGAFYNWFDPW

SEQ ID NO: 34630 - protein, 16 aa, Homo sapiens
CVRDRSNYDPNYFDYW

SEQ ID NO: 34631 - protein, 20 aa, Homo sapiens
CTSDGPRTGYGFWSGYFDHW

SEQ ID NO: 34632 - protein, 18 aa, Homo sapiens
CTKDINSRFYNFYYFDVW

SEQ ID NO: 34633 - protein, 22 aa, Homo sapiens
CARESGESNNWPRRSYWYFDFW

SEQ ID NO: 34634 - protein, 13 aa, Homo sapiens
CARGNKVKRADYW

SEQ ID NO: 34635 - protein, 19 aa, Homo sapiens
CARGDYHDSGGYPLSFDYW

SEQ ID NO: 34636 - protein, 17 aa, Homo sapiens
CAKETVERIQLTQFDYW

SEQ ID NO: 34637 - protein, 22 aa, Homo sapiens
CARDPFRAYGSGWFTPFSFDYW

SEQ ID NO: 34638 - protein, 17 aa, Homo sapiens
CAGGWGPRASSGAFDIW

SEQ ID NO: 34639 - protein, 16 aa, Homo sapiens
CASPPYAGDWYYFDYW

SEQ ID NO: 34640 - protein, 16 aa, Homo sapiens
CARGRGDRFLRAFDFW

SEQ ID NO: 34641 - protein, 16 aa, Homo sapiens
CTRDLVYDYVWRYDYW

SEQ ID NO: 34642 - protein, 19 aa, Homo sapiens
CAKERGPMVRGGLAPIDYW

SEQ ID NO: 34643 - protein, 16 aa, Homo sapiens
CARWGHYGSGTYYDDW

SEQ ID NO: 34644 - protein, 16 aa, Homo sapiens
CARVELGIPRATFDSW

SEQ ID NO: 34645 - protein, 22 aa, Homo sapiens
CARQVNYDRSGYTQSTSAFDCW

SEQ ID NO: 34646 - protein, 21 aa, Homo sapiens
CAKPLAVRDYGGIRSAAFNIW

SEQ ID NO: 34647 - protein, 16 aa, Homo sapiens
CARRSLEPGMGGFDYW

SEQ ID NO: 34648 - protein, 21 aa, Homo sapiens
CAKDTGYSSGWHLVPGAVDYW

SEQ ID NO: 34649 - protein, 17 aa, Homo sapiens
CARERFAQIEKGYMDVW

SEQ ID NO: 34650 - protein, 24 aa, Homo sapiens
CARDLGSTCSSTSCYWRDWYVDYW

SEQ ID NO: 34651 - protein, 14 aa, Homo sapiens
CARADITDDVFDIW

SEQ ID NO: 34652 - protein, 16 aa, Homo sapiens
CAHRSPIGTSWYQDVW

SEQ ID NO: 34653 - protein, 18 aa, Homo sapiens
CARESPGDITEVVTFDVW

SEQ ID NO: 34654 - protein, 11 aa, Homo sapiens
CQQSFSTQCTF

SEQ ID NO: 34655 - protein, 15 aa, Homo sapiens
CVRGRGYSYGHGDYW

SEQ ID NO: 34656 - protein, 19 aa, Homo sapiens
CARGPYSSGYYAPLTFDYW

SEQ ID NO: 34657 - protein, 25 aa, Homo sapiens
CARTEYYDFRSGYATKFDYYYMDVW

SEQ ID NO: 34658 - protein, 12 aa, Homo sapiens
CQQTYSNPLVIF

SEQ ID NO: 34659 - protein, 15 aa, Homo sapiens
CTNTIQWRRFPFDFW

SEQ ID NO: 34660 - protein, 18 aa, Homo sapiens
CAKSMGWQWLTQGYFDSW

SEQ ID NO: 34661 - protein, 18 aa, Homo sapiens
CARHLDYGSGTYWGFDSW

SEQ ID NO: 34662 - protein, 17 aa, Homo sapiens
CARDGGSYDPDHYFDYW

SEQ ID NO: 34663 - protein, 16 aa, Homo sapiens
CARGRVGYKYWYFDLW

SEQ ID NO: 34664 - protein, 15 aa, Homo sapiens
CARGFWNGEKYYDYW

SEQ ID NO: 34665 - protein, 18 aa, Homo sapiens
CAKDIFVTGSGKHIHDYW

SEQ ID NO: 34666 - protein, 14 aa, Homo sapiens
CARENWESYYFDLW

SEQ ID NO: 34667 - protein, 13 aa, Homo sapiens
CASIFGLWAFDLW

SEQ ID NO: 34668 - protein, 16 aa, Homo sapiens
CTRDFLMVIPNYFDPW

SEQ ID NO: 34669 - protein, 16 aa, Homo sapiens
CARHSYGDSRGGFDYW

SEQ ID NO: 34670 - protein, 18 aa, Homo sapiens
CAHTYYDFWSGYSWFDPW

SEQ ID NO: 34671 - protein, 16 aa, Homo sapiens
CAKAPEDYGDLYFDYW

SEQ ID NO: 34672 - protein, 23 aa, Homo sapiens
CASNDLYDSSDYYVESVNWFKFW

SEQ ID NO: 34673 - protein, 18 aa, Homo sapiens
CARDLVTELSGYYPFDYW

SEQ ID NO: 34674 - protein, 25 aa, Homo sapiens
CARGFWMTTVTTGWSGGYYYYMDVW

SEQ ID NO: 34675 - protein, 16 aa, Homo sapiens
CAKHIEGLEKYYFEYW

SEQ ID NO: 34676 - protein, 20 aa, Homo sapiens
CAKDLHDYVWQSYRPPLDYW

SEQ ID NO: 34677 - protein, 16 aa, Homo sapiens
CAKSSSSSSDDPFDVW

SEQ ID NO: 34678 - protein, 21 aa, Homo sapiens
CAHRLGGESGSGWDQGAFDFW

SEQ ID NO: 34679 - protein, 18 aa, Homo sapiens
CVRSHFWSAYHLGWFDPW

SEQ ID NO: 34680 - protein, 16 aa, Homo sapiens
CARGKSGSFPYFFDSW

SEQ ID NO: 34681 - protein, 19 aa, Homo sapiens
CAKDKTSWYGESTPYFDHW

SEQ ID NO: 34682 - protein, 15 aa, Homo sapiens
CARDPQEWELLLDYW

SEQ ID NO: 34683 - protein, 25 aa, Homo sapiens
CARVSSYDDLDYLGHNYGDDAFDIW

SEQ ID NO: 34684 - protein, 11 aa, Homo sapiens [sequence omitted]

SEQ ID NO: 34685 - protein, 14 aa, Homo sapiens
CARSSGGNGFFDNW

SEQ ID NO: 34686 - protein, 18 aa, Homo sapiens
CAKARIQFGVLIYDFDFW

SEQ ID NO: 34687 - protein, 16 aa, Homo sapiens
CAKEGGGPVPWYFEQW

SEQ ID NO: 34688 - protein, 17 aa, Homo sapiens
CARDLWNYGGEPNFDYW

SEQ ID NO: 34689 - protein, 23 aa, Homo sapiens
CARDPRNYYDSSGYYYASWFDPW

SEQ ID NO: 34690 - protein, 20 aa, Homo sapiens
CAREVLYYDFWSGPQYFQHW

SEQ ID NO: 34691 - protein, 12 aa, Homo sapiens
CVRDWDSSLDYW

SEQ ID NO: 34692 - protein, 15 aa, Homo sapiens
CSSYAGSYTDTTYVF

SEQ ID NO: 34693 - protein, 21 aa, Homo sapiens
CARDQFPADWSVADPGGFDYW

SEQ ID NO: 34694 - protein, 24 aa, Homo sapiens
CARQVGNYNWNSAVRGMLYFFDYW

SEQ ID NO: 34695 - protein, 18 aa, Homo sapiens
CARVLTRTDLGVYHFDHW

SEQ ID NO: 34696 - protein, 18 aa, Homo sapiens
CAKAFTSGYYPEDVFDVW

SEQ ID NO: 34697 - protein, 16 aa, Homo sapiens
CARGCGGDCSDVFDIW

SEQ ID NO: 34698 - protein, 17 aa, Homo sapiens
CARHWGSVAADRILDYW

SEQ ID NO: 34699 - protein, 18 aa, Homo sapiens
CAKLGYSSGWYGYYFDSW

SEQ ID NO: 34700 - protein, 18 aa, Homo sapiens
CAHAGGPYSSSWYSFDYW

SEQ ID NO: 34701 - protein, 18 aa, Homo sapiens
CARDEGVWDTAMDYMDVW

SEQ ID NO: 34702 - protein, 16 aa, Homo sapiens
CARGPATFTDDSFDIW

SEQ ID NO: 34703 - protein, 18 aa, Homo sapiens
CAKYEGSGTYPQKTFDYW

SEQ ID NO: 34704 - protein, 24 aa, Homo sapiens
CARDTRPQVLFGESFSSFDAFDIW

SEQ ID NO: 34705 - protein, 21 aa, Homo sapiens
CTRDREYCSHTSCYRGWFDPW

SEQ ID NO: 34706 - protein, 13 aa, Homo sapiens
CASGGFFDGFDSW

SEQ ID NO: 34707 - protein, 18 aa, Homo sapiens
CARHGGAQLQRRPYFEYW

SEQ ID NO: 34708 - protein, 23 aa, Homo sapiens
CAREHRPRPATWGQSASDAFDVW

SEQ ID NO: 34709 - protein, 21 aa, Homo sapiens
CAADIIRFGGVIVPNGWFDPW

SEQ ID NO: 34710 - protein, 16 aa, Homo sapiens
CAREYYLDSSGRLDYW

SEQ ID NO: 34711 - protein, 22 aa, Homo sapiens
CARIGYYYDSSGYYHVDWFDPW

SEQ ID NO: 34712 - protein, 16 aa, Homo sapiens
CARRRGSSWGYNFDYW

SEQ ID NO: 34713 - protein, 20 aa, Homo sapiens
CARAPSYTDDPYGGDAFDIW

SEQ ID NO: 34714 - protein, 17 aa, Homo sapiens
CARVGIVMVAAAEFDYW

SEQ ID NO: 34715 - protein, 17 aa, Homo sapiens
CARDKGRFLEWQPFDMW

SEQ ID NO: 34716 - protein, 17 aa, Homo sapiens
CARRYYDNRGYYFFDYW

SEQ ID NO: 34717 - protein, 12 aa, Homo sapiens
CAHRHWGTFDYW

SEQ ID NO: 34718 - protein, 15 aa, Homo sapiens
CARDYSFEQLGRDYW

SEQ ID NO: 34719 - protein, 20 aa, Homo sapiens
CARRHGVAATLPPNDAFDIW

SEQ ID NO: 34720 - protein, 15 aa, Homo sapiens
CAPEVITPHDVFDIW

SEQ ID NO: 34721 - protein, 16 aa, Homo sapiens
CARRRVYGGSYFFDYW

SEQ ID NO: 34722 - protein, 17 aa, Homo sapiens
CARVGKDYIYRLYFDYW

SEQ ID NO: 34723 - protein, 20 aa, Homo sapiens
CARWDFDYGRNDDGGAFDVW

SEQ ID NO: 34724 - protein, 20 aa, Homo sapiens
CARGLRSLERFNPGDNFYYW

SEQ ID NO: 34725 - protein, 15 aa, Homo sapiens
CATEYGEDLAYFATW

SEQ ID NO: 34726 - protein, 14 aa, Homo sapiens
CAHKPSASTHFDYW

SEQ ID NO: 34727 - protein, 22 aa, Homo sapiens
CARLPGDFWNSYYPGRHWFDPW

SEQ ID NO: 34728 - protein, 14 aa, Homo sapiens
CARHRSYREPLDYW

SEQ ID NO: 34729 - protein, 17 aa, Homo sapiens
CARVKGSTEIDDAFDIW

SEQ ID NO: 34730 - protein, 18 aa, Homo sapiens
CARGMYSGSFPTVKLDYW

SEQ ID NO: 34731 - protein, 8 aa, Homo sapiens
CVRPKDYW

SEQ ID NO: 34732 - protein, 13 aa, Homo sapiens
CQSADRSGKMVIF

SEQ ID NO: 34733 - protein, 20 aa, Homo sapiens
CAHSLLYGSGRQRPLPFDYW

SEQ ID NO: 34734 - protein, 22 aa, Homo sapiens
CARDEALSVAGTSYYYYYMDVW

SEQ ID NO: 34735 - protein, 15 aa, Homo sapiens
CAKVEGNGWFNFEYW

SEQ ID NO: 34736 - protein, 18 aa, Homo sapiens
CAKESQIAGTYKPYLDYW

SEQ ID NO: 34737 - protein, 14 aa, Homo sapiens
CVRNPVRTGTFDPW

SEQ ID NO: 34738 - protein, 18 aa, Homo sapiens
CAKESGWYGDLLYYFDYW

SEQ ID NO: 34739 - protein, 17 aa, Homo sapiens
CARLRLSSWEYYYVDVW

SEQ ID NO: 34740 - protein, 20 aa, Homo sapiens
CAKFPGLQRLGYYYYYMEVW

SEQ ID NO: 34741 - protein, 20 aa, Homo sapiens
CVRPKAEGTGFFHYYYMDVW

SEQ ID NO: 34742 - protein, 19 aa, Homo sapiens
CARSAVRSIFGVVSAFDIW

SEQ ID NO: 34743 - protein, 21 aa, Homo sapiens
CARAHGSGNYYNYYYHYMDVW

SEQ ID NO: 34744 - protein, 18 aa, Homo sapiens
CARSVLMVDVVTGWFDSW

SEQ ID NO: 34745 - protein, 19 aa, Homo sapiens
CARDPPGNYGSVRIHFDSW

SEQ ID NO: 34746 - protein, 18 aa, Homo sapiens
CASGQDTSIWYGYPFHYW

SEQ ID NO: 34747 - protein, 16 aa, Homo sapiens
CARVHSGSYQGAFDYW

SEQ ID NO: 34748 - protein, 17 aa, Homo sapiens
CVRFLESEEELGGFDIW

SEQ ID NO: 34749 - protein, 18 aa, Homo sapiens
CAKHYDFWSGYPNAFDYW

SEQ ID NO: 34750 - protein, 19 aa, Homo sapiens
CARGTTLLVVTEPDGFDIW

SEQ ID NO: 34751 - protein, 18 aa, Homo sapiens
CAINFFDSRGSGLTFDHW

SEQ ID NO: 34752 - protein, 18 aa, Homo sapiens
CARSQGTWLQDIKYFDFW

SEQ ID NO: 34753 - protein, 15 aa, Homo sapiens
CAPQYSSGWGGFDPW

SEQ ID NO: 34754 - protein, 21 aa, Homo sapiens
CATHLSYYDSSGYPNYYFDSW

SEQ ID NO: 34755 - protein, 16 aa, Homo sapiens
CVRDCVDGVCYLFDPW

SEQ ID NO: 34756 - protein, 17 aa, Homo sapiens
CAKGGDYGGPRGPFDSW

SEQ ID NO: 34757 - protein, 17 aa, Homo sapiens
CAKVGNTYGYLSWFDLW

SEQ ID NO: 34758 - protein, 21 aa, Homo sapiens
CARVPPDSGVLTAYSYYFDYW

SEQ ID NO: 34759 - protein, 13 aa, Homo sapiens
CLLYYGVTQIWVF

SEQ ID NO: 34760 - protein, 17 aa, Homo sapiens
CAKYLAMIVDKGYFDYW

SEQ ID NO: 34761 - protein, 13 aa, Homo sapiens
CQSAASSETYMLF

SEQ ID NO: 34762 - protein, 14 aa, Homo sapiens
CVRHLRYGDSSDYW

SEQ ID NO: 34763 - protein, 18 aa, Homo sapiens
CVREAWEQWLTNWYFDLW

SEQ ID NO: 34764 - protein, 14 aa, Homo sapiens
CARHAPPGISFDPW

SEQ ID NO: 34765 - protein, 15 aa, Homo sapiens
CARQYSGYDPYFDCW

SEQ ID NO: 34766 - protein, 16 aa, Homo sapiens
CARDKKGSNYYYFDYW

SEQ ID NO: 34767 - protein, 16 aa, Homo sapiens
CARGSGTAYDYYLDVW

SEQ ID NO: 34768 - protein, 18 aa, Homo sapiens
CARGWTKQWLVTWYIDHW

SEQ ID NO: 34769 - protein, 16 aa, Homo sapiens
CARARTGWELNALDIW

SEQ ID NO: 34770 - protein, 18 aa, Homo sapiens
CATLSAGYTYGEYYFDYW

SEQ ID NO: 34771 - protein, 19 aa, Homo sapiens
CVLDPLWFGELVVVGRDYW

SEQ ID NO: 34772 - protein, 18 aa, Homo sapiens
CATGTGSGDGYNPPFEYW

SEQ ID NO: 34773 - protein, 16 aa, Homo sapiens
CARDVVVSAPKYFQHW

SEQ ID NO: 34774 - protein, 14 aa, Homo sapiens
CQRYRSYSPYMYTF

SEQ ID NO: 34775 - protein, 20 aa, Homo sapiens
CAKAATGYHYDSSGYRFDYW

SEQ ID NO: 34776 - protein, 19 aa, Homo sapiens
CARNRYYYDSGGYIGPDYW

SEQ ID NO: 34777 - protein, 18 aa, Homo sapiens
CARGANYDFWSGSYFDHW

SEQ ID NO: 34778 - protein, 18 aa, Homo sapiens
CARLKRYGAEPKGIFDHW

SEQ ID NO: 34779 - protein, 14 aa, Homo sapiens
CAHRRCSSCQFDYW

SEQ ID NO: 34780 - protein, 16 aa, Homo sapiens
CARDSGYYSPYYFDYW

SEQ ID NO: 34781 - protein, 16 aa, Homo sapiens
CARAAGGSYYAHFDYW

SEQ ID NO: 34782 - protein, 23 aa, Homo sapiens
CARDSPITPLGLVRTPDYYMDVW

SEQ ID NO: 34783 - protein, 24 aa, Homo sapiens
CARHWALGFRVVVPAAIVGAFDIW

SEQ ID NO: 34784 - protein, 19 aa, Homo sapiens
CAGRSRGIAATSQNWFDPW

SEQ ID NO: 34785 - protein, 18 aa, Homo sapiens
CARDEPFITGSHYYFRYW

SEQ ID NO: 34786 - protein, 16 aa, Homo sapiens
CARDFHNWNYARFYYW

SEQ ID NO: 34787 - protein, 17 aa, Homo sapiens
CTKDAPGDGSGDHIDYW

SEQ ID NO: 34788 - protein, 17 aa, Homo sapiens
CARYGPKLRVTNGFEYW

SEQ ID NO: 34789 - protein, 16 aa, Homo sapiens
CVRGGTDTLTKMGDYW

SEQ ID NO: 34790 - protein, 19 aa, Homo sapiens
CAREDCSGGSCYWNYFDYW

SEQ ID NO: 34791 - protein, 18 aa, Homo sapiens
CAKAHEELGKWDVYFDYW

SEQ ID NO: 34792 - protein, 18 aa, Homo sapiens
CARDPSIGWVTAVACDYW

SEQ ID NO: 34793 - protein, 18 aa, Homo sapiens
CARDRYESGNYPNWFDSW

SEQ ID NO: 34794 - protein, 16 aa, Homo sapiens
CVKGDAIGYYYYMDVW

SEQ ID NO: 34795 - protein, 19 aa, Homo sapiens
CARTECSDINCYAGDIDYW

SEQ ID NO: 34796 - protein, 15 aa, Homo sapiens
CQQYNNIPPGGGITF

SEQ ID NO: 34797 - protein, 20 aa, Homo sapiens
CARERGDRFLDSLPNYYDHW

SEQ ID NO: 34798 - protein, 21 aa, Homo sapiens
CAKDFRKMNYYDRSGYPLDYW

SEQ ID NO: 34799 - protein, 13 aa, Homo sapiens
CATDGHGYGLDYW

SEQ ID NO: 34800 - protein, 18 aa, Homo sapiens
CARERRRGSSGLDASDIW

SEQ ID NO: 34801 - protein, 17 aa, Homo sapiens
CARARGDVYNPSHLDYW

SEQ ID NO: 34802 - protein, 18 aa, Homo sapiens
CARGWDWNNIRGSWFDPW

SEQ ID NO: 34803 - protein, 14 aa, Homo sapiens
CARAFSGTAPADYW

SEQ ID NO: 34804 - protein, 15 aa, Homo sapiens
CAHSDLHIWSHLDYW

SEQ ID NO: 34805 - protein, 15 aa, Homo sapiens
CARDRAHYSSSFDHW

SEQ ID NO: 34806 - protein, 15 aa, Homo sapiens
CAKDDAHSTSYSDYW

SEQ ID NO: 34807 - protein, 20 aa, Homo sapiens
CAKAYYYESDGYYYFAFDLW

SEQ ID NO: 34808 - protein, 17 aa, Homo sapiens
CARDRLGYTYTYYFDYW

SEQ ID NO: 34809 - protein, 18 aa, Homo sapiens
CANSRSSGYYIRGTFDYW

SEQ ID NO: 34810 - protein, 16 aa, Homo sapiens
CARDHKQWLVDALDTW

SEQ ID NO: 34811 - protein, 22 aa, Homo sapiens
CARAPWDGYKEIHYYYYYMDVW

SEQ ID NO: 34812 - protein, 16 aa, Homo sapiens
CARRRIRDREPYFDSW

SEQ ID NO: 34813 - protein, 16 aa, Homo sapiens
CASAFDYGDNNWFDSW

SEQ ID NO: 34814 - protein, 21 aa, Homo sapiens
CARGRGTMVRGAMGYSYMDVW

SEQ ID NO: 34815 - protein, 15 aa, Homo sapiens
CARGSRTAAYASDIW

SEQ ID NO: 34816 - protein, 18 aa, Homo sapiens
CAKDRHGVAAAGWGFDDW

SEQ ID NO: 34817 - protein, 20 aa, Homo sapiens
CATNRGTTFGIVLTDAADVW

SEQ ID NO: 34818 - protein, 17 aa, Homo sapiens
CARDHPTFTMIYAFDIW

SEQ ID NO: 34819 - protein, 16 aa, Homo sapiens
CAMSPSSLRQYYFQIW

SEQ ID NO: 34820 - protein, 18 aa, Homo sapiens
CARRGTYDSIGWAEFDPW

SEQ ID NO: 34821 - protein, 17 aa, Homo sapiens
CAKEGRGYTSDEYLDSW

SEQ ID NO: 34822 - protein, 17 aa, Homo sapiens
CAKGAIAAAAYNWFDPW

SEQ ID NO: 34823 - protein, 15 aa, Homo sapiens
CGTWDNSLSTDHWVF

SEQ ID NO: 34824 - protein, 17 aa, Homo sapiens
CARTDIVVVVAATYDYW

SEQ ID NO: 34825 - protein, 11 aa, Homo sapiens
CQQAYNLPFNF

SEQ ID NO: 34826 - protein, 16 aa, Homo sapiens
CARHINGGNFVPFGYW

SEQ ID NO: 34827 - protein, 20 aa, Homo sapiens
CAKDWDGITFGGPTPRFDPW

SEQ ID NO: 34828 - protein, 16 aa, Homo sapiens
CATSPGHGGNAKFDHW

SEQ ID NO: 34829 - protein, 16 aa, Homo sapiens
CARGLSGSNNRYFQHW

SEQ ID NO: 34830 - protein, 17 aa, Homo sapiens
CANSAQDLLWFGHFDYW

SEQ ID NO: 34831 - protein, 16 aa, Homo sapiens
CSGDRTVVTAILDDYW

SEQ ID NO: 34832 - protein, 21 aa, Homo sapiens
CARQGRKWNYGSYDLDAFDVW

SEQ ID NO: 34833 - protein, 17 aa, Homo sapiens
CVKDVDAHGDYEAFHYW

SEQ ID NO: 34834 - protein, 18 aa, Homo sapiens
CARDVGYYSGLSKWLDPW

SEQ ID NO: 34835 - protein, 15 aa, Homo sapiens
CAKGRGYSGGSFDHW

SEQ ID NO: 34836 - protein, 15 aa, Homo sapiens
CARAIIAITFYFDYW

SEQ ID NO: 34837 - protein, 14 aa, Homo sapiens
CVRDLMTSENFDYW

SEQ ID NO: 34838 - protein, 14 aa, Homo sapiens
CARSRDAYSHFDYW

SEQ ID NO: 34839 - protein, 17 aa, Homo sapiens
CARGDTSSGWETFFDYW

SEQ ID NO: 34840 - protein, 17 aa, Homo sapiens
CATHARIEAAGTPFDYW

SEQ ID NO: 34841 - protein, 14 aa, Homo sapiens
CARDRSDFSAFDLW

SEQ ID NO: 34842 - protein, 21 aa, Homo sapiens
CARGLSDEWHSGYRAPRLDYW

SEQ ID NO: 34843 - protein, 14 aa, Homo sapiens
CTRGSSSWYPLDYW

SEQ ID NO: 34844 - protein, 19 aa, Homo sapiens
CARDRFGGFGESLPLGDYW

SEQ ID NO: 34845 - protein, 18 aa, Homo sapiens
CAKHRKSFVLRGAHFDDW

SEQ ID NO: 34846 - protein, 19 aa, Homo sapiens
CAKEQVSKNRYYFFYYDYW

SEQ ID NO: 34847 - protein, 18 aa, Homo sapiens
CAKDLAAHNDYRYYMDVW

SEQ ID NO: 34848 - protein, 17 aa, Homo sapiens
CARRLSPAAFSYYFDFW

SEQ ID NO: 34849 - protein, 16 aa, Homo sapiens
CARIELVTTRKGFDYW

SEQ ID NO: 34850 - protein, 18 aa, Homo sapiens
CGRSSSSSYFHLYYFDYW

SEQ ID NO: 34851 - protein, 16 aa, Homo sapiens
CARDRGSSSGRGVDYW

SEQ ID NO: 34852 - protein, 12 aa, Homo sapiens
CQQYNNLLALTF

SEQ ID NO: 34853 - protein, 17 aa, Homo sapiens
CARDPDSSGWPYFFDLW

SEQ ID NO: 34854 - protein, 21 aa, Homo sapiens
CARDLGGYDRSGHRSGFFDDW

SEQ ID NO: 34855 - protein, 14 aa, Homo sapiens
CIASGYDPDNFDYW

SEQ ID NO: 34856 - protein, 19 aa, Homo sapiens
CGNSPYYYDSSASNAFDIW

SEQ ID NO: 34857 - protein, 11 aa, Homo sapiens
CHQYNNWPYVF

SEQ ID NO: 34858 - protein, 14 aa, Homo sapiens
CARVKRFNRGFDQW

SEQ ID NO: 34859 - protein, 18 aa, Homo sapiens
CARDQIRAGYGSGSSDYW

SEQ ID NO: 34860 - protein, 19 aa, Homo sapiens
CAKDRGMSIAALSEAFDIW

SEQ ID NO: 34861 - protein, 17 aa, Homo sapiens
CVSGFYDFWSGYPFAYW

SEQ ID NO: 34862 - protein, 19 aa, Homo sapiens
CIREVRNRRGGSGLWIDPW

SEQ ID NO: 34863 - protein, 16 aa, Homo sapiens
CARVAHNDYLWFFDLW

SEQ ID NO: 34864 - protein, 16 aa, Homo sapiens
CARTTFWSGYRYFDFW

SEQ ID NO: 34865 - protein, 14 aa, Homo sapiens
CARVRVPNTAIDYW

SEQ ID NO: 34866 - protein, 18 aa, Homo sapiens
CAKAGITIFGVVPWFDPW

SEQ ID NO: 34867 - protein, 17 aa, Homo sapiens
CVRDRGEVARQYYFDHW

SEQ ID NO: 34868 - protein, 20 aa, Homo sapiens
CAREMAGPFGVVRQYNFDSW

SEQ ID NO: 34869 - protein, 14 aa, Homo sapiens
CASSIIEAGTIDYW

SEQ ID NO: 34870 - protein, 22 aa, Homo sapiens
CARLHGSGSYYTRNLHYYMDVW

SEQ ID NO: 34871 - protein, 17 aa, Homo sapiens
CAYSSVGGTLLGAFEIW

SEQ ID NO: 34872 - protein, 19 aa, Homo sapiens
CARDGTQFTTWGLYYLDVW

SEQ ID NO: 34873 - protein, 18 aa, Homo sapiens
CARHLPAAALSYGPFDYW

SEQ ID NO: 34874 - protein, 11 aa, Homo sapiens
CEQFDSYPPSF

SEQ ID NO: 34875 - protein, 15 aa, Homo sapiens
CVRGLYSGNPIFDYW

SEQ ID NO: 34876 - protein, 20 aa, Homo sapiens
CARGTHFDFWRGSYAYIDLW

SEQ ID NO: 34877 - protein, 16 aa, Homo sapiens
CARSRYDWNDRYFDFW

SEQ ID NO: 34878 - protein, 17 aa, Homo sapiens
CARDLMAGIIAGCFDPW

SEQ ID NO: 34879 - protein, 20 aa, Homo sapiens
CARHSPYYYGSGSPSYFDYW

SEQ ID NO: 34880 - protein, 16 aa, Homo sapiens
CVRGLAGRMNDAFEIW

SEQ ID NO: 34881 - protein, 13 aa, Homo sapiens
CARAKPDFWIDSW

SEQ ID NO: 34882 - protein, 19 aa, Homo sapiens
CARDGTVPAATTSEYFQHW

SEQ ID NO: 34883 - protein, 23 aa, Homo sapiens
CARHGTYHDFLSVYQDPHWIDSW

SEQ ID NO: 34884 - protein, 16 aa, Homo sapiens
CVKHEINVVAHFFDSW

SEQ ID NO: 34885 - protein, 21 aa, Homo sapiens
CVRDKSELRDVDYYYYYMDVW

SEQ ID NO: 34886 - protein, 18 aa, Homo sapiens
CARHESSAWYRVAAFDVW

SEQ ID NO: 34887 - protein, 19 aa, Homo sapiens
CARDTWNFEKFYYYYMDVW

SEQ ID NO: 34888 - protein, 19 aa, Homo sapiens
CARIWRSSIAARPWYFDLW

SEQ ID NO: 34889 - protein, 22 aa, Homo sapiens
CARDPRMSGFCASINPDYFADW

SEQ ID NO: 34890 - protein, 12 aa, Homo sapiens
CAKSMHGPFDYW

SEQ ID NO: 34891 - protein, 20 aa, Homo sapiens
CVRRGISSWSSTGSWYFDRW

SEQ ID NO: 34892 - protein, 26 aa, Homo sapiens
CARHETPKDRNAYYDFWSGFYYMDVW

SEQ ID NO: 34893 - protein, 14 aa, Homo sapiens
CTKEYDFWSGPDYW

SEQ ID NO: 34894 - protein, 21 aa, Homo sapiens
CARATSITIFGVVSGAWFDPW

SEQ ID NO: 34895 - protein, 36 aa, Homo sapiens
CALPICTVYMELSSLSSEDTGIYYCARDTSRGFGYW

SEQ ID NO: 34896 - protein, 15 aa, Homo sapiens
CARGLGSSGWHIDYW

SEQ ID NO: 34897 - protein, 13 aa, Homo sapiens
CARPRRWSYFENW

SEQ ID NO: 34898 - protein, 16 aa, Homo sapiens
CATVPLRYLVSGFDPW

SEQ ID NO: 34899 - protein, 16 aa, Homo sapiens
CTRQRSATGEHYFDSW

SEQ ID NO: 34900 - protein, 12 aa, Homo sapiens
CSTDDIWGRDYW

SEQ ID NO: 34901 - protein, 19 aa, Homo sapiens
CARGAPRAYYEMAEYFQHW

SEQ ID NO: 34902 - protein, 18 aa, Homo sapiens
CARAGEQFRSSLTLFDSW

SEQ ID NO: 34903 - protein, 15 aa, Homo sapiens
CATWDDTLSGPKFVF

SEQ ID NO: 34904 - protein, 16 aa, Homo sapiens
CAKDRAVVVFPILDYW

SEQ ID NO: 34905 - protein, 17 aa, Homo sapiens
CAREGHSSGYAGTFDVW

SEQ ID NO: 34906 - protein, 17 aa, Homo sapiens
CVRADGPYSSSFAFDHW

SEQ ID NO: 34907 - protein, 27 aa, Homo sapiens
CARAPQMLDCSGGSCHISYYYYSMDVW

SEQ ID NO: 34908 - protein, 27 aa, Homo sapiens
CARDTYYDSSGYYRGAGSYYYYYMDVW

SEQ ID NO: 34909 - protein, 24 aa, Homo sapiens
CARVVARAAAGTFNYYYYYYMDVW

SEQ ID NO: 34910 - protein, 22 aa, Homo sapiens
CAKKTDNYYYRSGYSSDAFDIW

SEQ ID NO: 34911 - protein, 17 aa, Homo sapiens
CAMVDGGYYYYYYMDVW

SEQ ID NO: 34912 - protein, 23 aa, Homo sapiens
CATGPDYYEGSGYYYGKYYFDYW

SEQ ID NO: 34913 - protein, 18 aa, Homo sapiens
CARDWPPDGATSGNFAYW

SEQ ID NO: 34914 - protein, 18 aa, Homo sapiens
CALPISESSDSSAYFLFW

SEQ ID NO: 34915 - protein, 15 aa, Homo sapiens
CQVWDYSGDHRNYVF

SEQ ID NO: 34916 - protein, 23 aa, Homo sapiens
CARHLGYCSSTSCFLLNNWFDPW

SEQ ID NO: 34917 - protein, 13 aa, Homo sapiens
CAREGPTRDFDSW

SEQ ID NO: 34918 - protein, 14 aa, Homo sapiens
CARADGVGAQFDYW

SEQ ID NO: 34919 - protein, 16 aa, Homo sapiens
CARAHYTVMVQHFDSW

SEQ ID NO: 34920 - protein, 14 aa, Homo sapiens
CARGQPLLYPLDYW

SEQ ID NO: 34921 - protein, 22 aa, Homo sapiens
CARCNYDYVWGSYRPSGYFDYW

SEQ ID NO: 34922 - protein, 17 aa, Homo sapiens
CARRGRGTHALWYFDHW

SEQ ID NO: 34923 - protein, 18 aa, Homo sapiens
CARKRGHSYGSWAYFDNW

SEQ ID NO: 34924 - protein, 13 aa, Homo sapiens
CQQTYTTPRALSF

SEQ ID NO: 34925 - protein, 12 aa, Homo sapiens
CTTDARGYPDYW

SEQ ID NO: 34926 - protein, 19 aa, Homo sapiens
CARDNLVYDSWSGRSFDYW

SEQ ID NO: 34927 - protein, 16 aa, Homo sapiens
CAREALAAAGYYFDYW

SEQ ID NO: 34928 - protein, 16 aa, Homo sapiens
CAREGTLEAAGLFDSW

SEQ ID NO: 34929 - protein, 19 aa, Homo sapiens
CARRLFLPAAHPYDAFDIW

SEQ ID NO: 34930 - protein, 18 aa, Homo sapiens
CAREGSGSNYLNDGFDIW

SEQ ID NO: 34931 - protein, 14 aa, Homo sapiens
CARTPLQWLVLDYW

SEQ ID NO: 34932 - protein, 16 aa, Homo sapiens
CVRSPGGEPLHPFDYW

SEQ ID NO: 34933 - protein, 22 aa, Homo sapiens
CARDGHTVGWYKADYYNYMDVW

SEQ ID NO: 34934 - protein, 17 aa, Homo sapiens
CARDREYSSSLHYFDYW

SEQ ID NO: 34935 - protein, 16 aa, Homo sapiens
CAREYVAVASYYMDVW

SEQ ID NO: 34936 - protein, 16 aa, Homo sapiens
CARGSADDGDYDLDYW

SEQ ID NO: 34937 - protein, 17 aa, Homo sapiens
CASQRRDYGGNWYFDLW

SEQ ID NO: 34938 - protein, 15 aa, Homo sapiens
CARPIGGYVGGFDVW

SEQ ID NO: 34939 - protein, 5 aa, Homo sapiens
CLLYF

SEQ ID NO: 34940 - protein, 17 aa, Homo sapiens
CACRLAVAGTKGAFDLW

SEQ ID NO: 34941 - protein, 15 aa, Homo sapiens
CARASHSILRTLDYW

SEQ ID NO: 34942 - protein, 14 aa, Homo sapiens
CARRGWNYDAFDFW

SEQ ID NO: 34943 - protein, 23 aa, Homo sapiens
CSKTPFHFYDSSAYPAGDAFDIW

SEQ ID NO: 34944 - protein, 22 aa, Homo sapiens
CAKHTLTRRFLEWTIEGHFDYW

SEQ ID NO: 34945 - protein, 17 aa, Homo sapiens
CARGSARWLFSSVFDYW

SEQ ID NO: 34946 - protein, 16 aa, Homo sapiens
CARHLSSGAGRPFDYW

SEQ ID NO: 34947 - protein, 14 aa, Homo sapiens
CAGAPGGVRGFDVW

SEQ ID NO: 34948 - protein, 21 aa, Homo sapiens
CARAWYYYDSSGYSLGWFDPW

SEQ ID NO: 34949 - protein, 18 aa, Homo sapiens
CTPTYDISGYYPYYFDYW

SEQ ID NO: 34950 - protein, 17 aa, Homo sapiens
CARDSPVTTPLAAFDLW

SEQ ID NO: 34951 - protein, 17 aa, Homo sapiens
CARIPDSYSAGGVFDYW

SEQ ID NO: 34952 - protein, 15 aa, Homo sapiens
CARHWFGAIAGPDYW

SEQ ID NO: 34953 - protein, 14 aa, Homo sapiens
CARDWGTQERFDYW

SEQ ID NO: 34954 - protein, 12 aa, Homo sapiens
CQHRSNYPLITF

SEQ ID NO: 34955 - protein, 11 aa, Homo sapiens
CASFYFNADYW

SEQ ID NO: 34956 - protein, 13 aa, Homo sapiens
CSHRVHGEEFNYW

SEQ ID NO: 34957 - protein, 21 aa, Homo sapiens
CARIRSDYGVVISRGGWFDPW

SEQ ID NO: 34958 - protein, 15 aa, Homo sapiens
CARFYGSGSHFFDYW

SEQ ID NO: 34959 - protein, 18 aa, Homo sapiens
CARRPDIAAAGTYAFDIW

SEQ ID NO: 34960 - protein, 15 aa, Homo sapiens
CARHPLGRGGAVDYW

SEQ ID NO: 34961 - protein, 16 aa, Homo sapiens
CVVCAFWSLDYNFDYW

SEQ ID NO: 34962 - protein, 22 aa, Homo sapiens
CTKEAPLGGTTARPGGFAFDGW

SEQ ID NO: 34963 - protein, 15 aa, Homo sapiens
CASMITSFFYYMDVW

SEQ ID NO: 34964 - protein, 16 aa, Homo sapiens
CVREACSGGSCFFDPW

SEQ ID NO: 34965 - protein, 14 aa, Homo sapiens
CARDAKNLALLDYW

SEQ ID NO: 34966 - protein, 16 aa, Homo sapiens
CARADSGYGPIYYDSW

SEQ ID NO: 34967 - protein, 20 aa, Homo sapiens
CVRDRRGCSTTSCYSYFDQW

SEQ ID NO: 34968 - protein, 12 aa, Homo sapiens
CARATFDYLDVW

SEQ ID NO: 34969 - protein, 17 aa, Homo sapiens
CASYRITIFGPNWFDPW

SEQ ID NO: 34970 - protein, 17 aa, Homo sapiens
CARDEAGSYYMNWFDPW

SEQ ID NO: 34971 - protein, 16 aa, Homo sapiens
CARARIPARWYWFDPW

SEQ ID NO: 34972 - protein, 22 aa, Homo sapiens
CARDRRGYCSGGSCYSGFFDYW

SEQ ID NO: 34973 - protein, 17 aa, Homo sapiens
CARVASYFGSGSKDDYW

SEQ ID NO: 34974 - protein, 17 aa, Homo sapiens
CAKDASWYSSSWYFDYW

SEQ ID NO: 34975 - protein, 19 aa, Homo sapiens
CARLLYPVYSSSSNWLDPW

SEQ ID NO: 34976 - protein, 19 aa, Homo sapiens
CAKAYYGSGSYYKEFFDYW

SEQ ID NO: 34977 - protein, 18 aa, Homo sapiens
CARDRGTYYYENYYMDVW

SEQ ID NO: 34978 - protein, 20 aa, Homo sapiens
CASRAGDDYNSFYYYYMDVW

SEQ ID NO: 34979 - protein, 15 aa, Homo sapiens
CAHRRHRGGNPFDFW

SEQ ID NO: 34980 - protein, 18 aa, Homo sapiens
CASPRSVLGVTTSWFDPW

SEQ ID NO: 34981 - protein, 17 aa, Homo sapiens
CSSYTGSSTGSSSPVLF

SEQ ID NO: 34982 - protein, 19 aa, Homo sapiens
CASTGDNWNYYYYYYMDVW

SEQ ID NO: 34983 - protein, 20 aa, Homo sapiens
CAKKGGNYYYDSSGSYFDHW

SEQ ID NO: 34984 - protein, 16 aa, Homo sapiens
CARDQNSHSRSPFDYW

SEQ ID NO: 34985 - protein, 16 aa, Homo sapiens
CARTILGGSGSGADYW

SEQ ID NO: 34986 - protein, 18 aa, Homo sapiens
CARVGFIAGFFYYYMDVW

SEQ ID NO: 34987 - protein, 12 aa, Homo sapiens
CASYTSSRTFKF

SEQ ID NO: 34988 - protein, 19 aa, Homo sapiens
CAREDYDYVWGTYRTFDYW

SEQ ID NO: 34989 - protein, 17 aa, Homo sapiens
CARVTEETASITQFDYW

SEQ ID NO: 34990 - protein, 16 aa, Homo sapiens
CARRARGAEWQPFDNW

SEQ ID NO: 34991 - protein, 18 aa, Homo sapiens
CARGEIERFTGWENFDFW

SEQ ID NO: 34992 - protein, 16 aa, Homo sapiens
CAKDIKTAKGWYFDLW

SEQ ID NO: 34993 - protein, 19 aa, Homo sapiens
CAKDPKFWSGSYYYYMDVW

SEQ ID NO: 34994 - protein, 22 aa, Homo sapiens
CARHFEGAGFCYGGGCYYLDSW

SEQ ID NO: 34995 - protein, 21 aa, Homo sapiens
CARDLLASCGGDCPKWYFDLW

SEQ ID NO: 34996 - protein, 18 aa, Homo sapiens
CARIHLGYGDNFNALDVW

SEQ ID NO: 34997 - protein, 20 aa, Homo sapiens
CARSPWAILDRYYYYYMDVW

SEQ ID NO: 34998 - protein, 13 aa, Homo sapiens
CVRGRPLYYMDVW

SEQ ID NO: 34999 - protein, 20 aa, Homo sapiens
CAREKPYDTRTYFYYYMDVW

SEQ ID NO: 35000 - protein, 20 aa, Homo sapiens
CARLDFGSGSYIYYYFMDVW

SEQ ID NO: 35001 - protein, 12 aa, Homo sapiens
CARHTYGYKDYW

SEQ ID NO: 35002 - protein, 21 aa, Homo sapiens
CARTLMITFEGVIAHDSFDIW

SEQ ID NO: 35003 - protein, 12 aa, Homo sapiens
CTRDRSGDFDYW

SEQ ID NO: 35004 - protein, 22 aa, Homo sapiens
CATGQWDCTNNVCSSAEYFHDW

SEQ ID NO: 35005 - protein, 20 aa, Homo sapiens
CARSRGYYDGSGYYYFFDYW

SEQ ID NO: 35006 - protein, 15 aa, Homo sapiens
CARDHGGELPPTDYW

SEQ ID NO: 35007 - protein, 21 aa, Homo sapiens
CARCPVGAAGSCYYYYYMDVW

SEQ ID NO: 35008 - protein, 19 aa, Homo sapiens
CARLGRSSTSWRVYYMDVW

SEQ ID NO: 35009 - protein, 18 aa, Homo sapiens
CARAGSYSSSWYDWFDPW

SEQ ID NO: 35010 - protein, 20 aa, Homo sapiens
CARADYYDTDGNYLRVFDLW

SEQ ID NO: 35011 - protein, 14 aa, Homo sapiens
CAAWDDNYSGKWLF

SEQ ID NO: 35012 - protein, 16 aa, Homo sapiens
CTRDPSGNNPLPFDAW

SEQ ID NO: 35013 - protein, 22 aa, Homo sapiens
CARVEEITIFGVVIIPGYMDVW

SEQ ID NO: 35014 - protein, 16 aa, Homo sapiens
CAREVPSGLGGYFDPW

SEQ ID NO: 35015 - protein, 13 aa, Homo sapiens
CVGGDSYGYSHYW

SEQ ID NO: 35016 - protein, 22 aa, Homo sapiens
CARRLEDCSSTSCYASYWFDPW

SEQ ID NO: 35017 - protein, 17 aa, Homo sapiens
CARGGSWSGDSNAFDIW

SEQ ID NO: 35018 - protein, 17 aa, Homo sapiens
CAKGTDYGDYYYYMDVW

SEQ ID NO: 35019 - protein, 23 aa, Homo sapiens
CARQAGVYKWNDPLYYYYYMDVW

SEQ ID NO: 35020 - protein, 21 aa, Homo sapiens
CARVLGYYDSSGYYLGWFDSW

SEQ ID NO: 35021 - protein, 16 aa, Homo sapiens
CAKAPVHSSSWSLDYW

SEQ ID NO: 35022 - protein, 22 aa, Homo sapiens
CARGRDFYCSGGSCYSSDFDYW

SEQ ID NO: 35023 - protein, 18 aa, Homo sapiens
CAIPPRGAGTMEYYMDVW

SEQ ID NO: 35024 - protein, 12 aa, Homo sapiens
CQSAASIGIWLF

SEQ ID NO: 35025 - protein, 24 aa, Homo sapiens
CARENEEYCGADCQWAYYYYMDVW

SEQ ID NO: 35026 - protein, 20 aa, Homo sapiens
CARVQTYCSGGSCSSWFDPW

SEQ ID NO: 35027 - protein, 16 aa, Homo sapiens
CAREGGDYEGWYFDFW

SEQ ID NO: 35028 - protein, 19 aa, Homo sapiens
CARGSLSGWVFGEKWFDPW

SEQ ID NO: 35029 - protein, 16 aa, Homo sapiens
CASQLTIAVTGHFDSW

SEQ ID NO: 35030 - protein, 17 aa, Homo sapiens
CARDAVAGIGYWYFEHW

SEQ ID NO: 35031 - protein, 19 aa, Homo sapiens
CARETTEMAAVGRGWFDPW

SEQ ID NO: 35032 - protein, 22 aa, Homo sapiens
CARHVITIFGVVIISGGWFDPW

SEQ ID NO: 35033 - protein, 15 aa, Homo sapiens
CARDLYRPGDASDIW

SEQ ID NO: 35034 - protein, 22 aa, Homo sapiens
CARGHDIIAVPGGPLYNWVDPW

SEQ ID NO: 35035 - protein, 16 aa, Homo sapiens
CARGYDTTGYHSFDYW

SEQ ID NO: 35036 - protein, 14 aa, Homo sapiens
CARTQYSTSWYDYW

SEQ ID NO: 35037 - protein, 12 aa, Homo sapiens [sequence omitted]

SEQ ID NO: 35038 - protein, 15 aa, Homo sapiens
CARVGWELLGHFDYW

SEQ ID NO: 35039 - protein, 17 aa, Homo sapiens
CARRSNGLGGGNAFDLW

SEQ ID NO: 35040 - protein, 13 aa, Homo sapiens
CAAVGSWGEFRYW

SEQ ID NO: 35041 - protein, 18 aa, Homo sapiens
CANSHARRWYSYDAFDIW

SEQ ID NO: 35042 - protein, 17 aa, Homo sapiens
CARDGGDYPPAWYFDLW

SEQ ID NO: 35043 - protein, 17 aa, Homo sapiens
CARSIDGGDTLYYFDYW

SEQ ID NO: 35044 - protein, 14 aa, Homo sapiens
CSSYSSSNPVKRVF

SEQ ID NO: 35045 - protein, 21 aa, Homo sapiens
CARSDIAVAGSYYYYYYMDVW

SEQ ID NO: 35046 - protein, 21 aa, Homo sapiens
CASGLKQLVLGSANYYYMDVW

SEQ ID NO: 35047 - protein, 15 aa, Homo sapiens
CAREAFGLSKPFDIW

SEQ ID NO: 35048 - protein, 21 aa, Homo sapiens
CAREVLFCTNGICSFYYFDHW

SEQ ID NO: 35049 - protein, 17 aa, Homo sapiens
CARDWNGGRSYWYFDLW

SEQ ID NO: 35050 - protein, 19 aa, Homo sapiens
CARERSNSNYVWLRPFDYW

SEQ ID NO: 35051 - protein, 19 aa, Homo sapiens
CTKDSANGLYRDGHIFDFW

SEQ ID NO: 35052 - protein, 15 aa, Homo sapiens
CVRAPLGLQQQLDYW

SEQ ID NO: 35053 - protein, 16 aa, Homo sapiens
CAKGRTNSPLWYFDSW

SEQ ID NO: 35054 - protein, 23 aa, Homo sapiens
CARHSGGLRYFDWLLQIGFFDYW

SEQ ID NO: 35055 - protein, 15 aa, Homo sapiens
CQVWDGSRDHLFWVF

SEQ ID NO: 35056 - protein, 18 aa, Homo sapiens
CARHDTRSGVWTGPFDCW

SEQ ID NO: 35057 - protein, 11 aa, Homo sapiens
CNQYKSYPYSF

SEQ ID NO: 35058 - protein, 17 aa, Homo sapiens
CARATKDKGDRRWFDPW

SEQ ID NO: 35059 - protein, 19 aa, Homo sapiens
CGRQYLSTERDLGDVFDSW

SEQ ID NO: 35060 - protein, 20 aa, Homo sapiens
CVRSSPGYFNNWAYYYMDVW

SEQ ID NO: 35061 - protein, 17 aa, Homo sapiens
CVRDAGYTTVGGYFDYW

SEQ ID NO: 35062 - protein, 15 aa, Homo sapiens
CARHAAMVNSPFDYW

SEQ ID NO: 35063 - protein, 16 aa, Homo sapiens
CARGRISGSSWYLDYW

SEQ ID NO: 35064 - protein, 15 aa, Homo sapiens
CARTHGSGLMLFEYW

SEQ ID NO: 35065 - protein, 19 aa, Homo sapiens
CARGTGYYDTVGGWYFDYW

SEQ ID NO: 35066 - protein, 22 aa, Homo sapiens
CARDNAVLLWFGESFTGAFDIW

SEQ ID NO: 35067 - protein, 22 aa, Homo sapiens
CARDPGGFCIGGTCSYWYFSLW

SEQ ID NO: 35068 - protein, 18 aa, Homo sapiens
CARLLRRGAVAGNYFDYW

SEQ ID NO: 35069 - protein, 20 aa, Homo sapiens
CARVVNLSSGWYYYYYMDVW

SEQ ID NO: 35070 - protein, 17 aa, Homo sapiens
CARGGGTYSRHNWFDPW

SEQ ID NO: 35071 - protein, 24 aa, Homo sapiens
CARSQTSVHGSATRSVATDYFDLW

SEQ ID NO: 35072 - protein, 17 aa, Homo sapiens
CATFSGFIAARPGFDYW

SEQ ID NO: 35073 - protein, 14 aa, Homo sapiens
CARGPWGYWYFDLW

SEQ ID NO: 35074 - protein, 21 aa, Homo sapiens
CARLNFDFWSSYYNGRNFDHW

SEQ ID NO: 35075 - protein, 17 aa, Homo sapiens
CAKDGGFRFLERLFDPW

SEQ ID NO: 35076 - protein, 19 aa, Homo sapiens
CVKDITHTWGLLNDGFDVW

SEQ ID NO: 35077 - protein, 17 aa, Homo sapiens
CARGPMVVADQNWFDPW

SEQ ID NO: 35078 - protein, 22 aa, Homo sapiens
CARDPGRGVGAKIGSSWYFDLW

SEQ ID NO: 35079 - protein, 19 aa, Homo sapiens
CVRDGGGSYHGHYYYMDVW

SEQ ID NO: 35080 - protein, 20 aa, Homo sapiens
CARRMAVVGAFGANGASDIW

SEQ ID NO: 35081 - protein, 18 aa, Homo sapiens
CAKGVGAARSRLGFLDYW

SEQ ID NO: 35082 - protein, 19 aa, Homo sapiens
CTKERTYQGLNLVYYFDPW

SEQ ID NO: 35083 - protein, 19 aa, Homo sapiens
CARMYYYDSSGSRPDFDYW

SEQ ID NO: 35084 - protein, 15 aa, Homo sapiens
CAKSIQGDDYAFDYW

SEQ ID NO: 35085 - protein, 16 aa, Homo sapiens
CARETGDYSSSYFDYW

SEQ ID NO: 35086 - protein, 23 aa, Homo sapiens
CARDGEQYQLLSLSYYYYYMDVW

SEQ ID NO: 35087 - protein, 16 aa, Homo sapiens
CARDTEFRSAPKFDYW

SEQ ID NO: 35088 - protein, 25 aa, Homo sapiens
CATHRRDCSGVSCFPIFYAYYMDVW

SEQ ID NO: 35089 - protein, 18 aa, Homo sapiens
CVKDKSTGFALMVGFDYW

SEQ ID NO: 35090 - protein, 20 aa, Homo sapiens
CLKTAHFFDGSGFHYPFDYW

SEQ ID NO: 35091 - protein, 16 aa, Homo sapiens
CAALYGDHYSYYLDVW

SEQ ID NO: 35092 - protein, 18 aa, Homo sapiens
CARRDYSSGWLHDAFDIW

SEQ ID NO: 35093 - protein, 14 aa, Homo sapiens
CGKRSSGWPLDDYW

SEQ ID NO: 35094 - protein, 16 aa, Homo sapiens
CAREPIPLLGIHFDYW

SEQ ID NO: 35095 - protein, 18 aa, Homo sapiens
CAKLLQFIVAHTDYFDYW

SEQ ID NO: 35096 - protein, 18 aa, Homo sapiens
CAKNANFPPEAPPYFDSW

SEQ ID NO: 35097 - protein, 21 aa, Homo sapiens
CVRAPGVVIPGVEYSYYMDVW

SEQ ID NO: 35098 - protein, 14 aa, Homo sapiens
CLKDGLPSRPFDSW

SEQ ID NO: 35099 - protein, 19 aa, Homo sapiens
CAKTGSRSPTGWNYYLDLW

SEQ ID NO: 35100 - protein, 17 aa, Homo sapiens
CARDPGYSSGWVTFDPW

SEQ ID NO: 35101 - protein, 19 aa, Homo sapiens
CARGDSSSSSVHGHALDIW

SEQ ID NO: 35102 - protein, 19 aa, Homo sapiens
CARFNMDYYASGAGPRDYW

SEQ ID NO: 35103 - protein, 19 aa, Homo sapiens
CARTEGAYGDQSYYHFDYW

SEQ ID NO: 35104 - protein, 14 aa, Homo sapiens
CARLTGSWFNFDYW

SEQ ID NO: 35105 - protein, 22 aa, Homo sapiens
CARGAPERSFEWLIAYYYMDVW

SEQ ID NO: 35106 - protein, 17 aa, Homo sapiens
CARHDFWSGYYHHFDYW

SEQ ID NO: 35107 - protein, 18 aa, Homo sapiens
CARGEGHNWNVPIFFDLW

SEQ ID NO: 35108 - protein, 13 aa, Homo sapiens
CARIRGRGYMDVW

SEQ ID NO: 35109 - protein, 21 aa, Homo sapiens
CAREFLGGYNYAGPQGWFDPW

SEQ ID NO: 35110 - protein, 22 aa, Homo sapiens
CARVDRYYDSRGHYEETYLDFW

SEQ ID NO: 35111 - protein, 14 aa, Homo sapiens
CASRPFSFGPFDHW

SEQ ID NO: 35112 - protein, 19 aa, Homo sapiens
CARDRIAARPKGPYYFDNW

SEQ ID NO: 35113 - protein, 20 aa, Homo sapiens
CAKDSLDFNILTGYSYMDVW

SEQ ID NO: 35114 - protein, 13 aa, Homo sapiens
CARTPNTNPADYW

SEQ ID NO: 35115 - protein, 18 aa, Homo sapiens
CAKDFWSHNGIYDAFDVW

SEQ ID NO: 35116 - protein, 21 aa, Homo sapiens
CARGYYYGSGSYARYYYMDVW

SEQ ID NO: 35117 - protein, 20 aa, Homo sapiens
CARAHRWIGYDAVTNWFDPW

SEQ ID NO: 35118 - protein, 16 aa, Homo sapiens
CARVLGRGSYWYGDYW

SEQ ID NO: 35119 - protein, 16 aa, Homo sapiens
CARLTMTMDVQPIDYW

SEQ ID NO: 35120 - protein, 18 aa, Homo sapiens
CATATQYYTSYEYYFEYW

SEQ ID NO: 35121 - protein, 21 aa, Homo sapiens
CARHAEERDDYNFYYYYMDVW

SEQ ID NO: 35122 - protein, 24 aa, Homo sapiens
CAKNYCSGGSCFRKYYFYYYMDVW

SEQ ID NO: 35123 - protein, 13 aa, Homo sapiens
CVKGGRFTAPDYW

SEQ ID NO: 35124 - protein, 17 aa, Homo sapiens
CAKGRWSGDYVPNFDFW

SEQ ID NO: 35125 - protein, 14 aa, Homo sapiens
CARRDFWGSYCDYW

SEQ ID NO: 35126 - protein, 19 aa, Homo sapiens
CARQGHILTGYYYYYMDVW

SEQ ID NO: 35127 - protein, 17 aa, Homo sapiens
CATARYSSSSEFYFHYW

SEQ ID NO: 35128 - protein, 15 aa, Homo sapiens
CATKPPGGGTYYDYW

SEQ ID NO: 35129 - protein, 14 aa, Homo sapiens
CARKEDDSSASDYW

SEQ ID NO: 35130 - protein, 20 aa, Homo sapiens
CATVRGVVVAGIRGGWFDPW

SEQ ID NO: 35131 - protein, 16 aa, Homo sapiens
CAREGNTMVDGAMDVW

SEQ ID NO: 35132 - protein, 12 aa, Homo sapiens
CARGGDSYGAYW

SEQ ID NO: 35133 - protein, 17 aa, Homo sapiens
CARGATYSRGWYIRDYW

SEQ ID NO: 35134 - protein, 13 aa, Homo sapiens
CVRYGSGTYTDSW

SEQ ID NO: 35135 - protein, 12 aa, Homo sapiens
CQRYDNVPSFTF

SEQ ID NO: 35136 - protein, 22 aa, Homo sapiens
CASYWDYYDSRGYYHHDDFDIW

SEQ ID NO: 35137 - protein, 19 aa, Homo sapiens
CARDRNWRSGYNYNWFEPW

SEQ ID NO: 35138 - protein, 14 aa, Homo sapiens
CARPATFISVFDYW

SEQ ID NO: 35139 - protein, 22 aa, Homo sapiens
CAKDPHLYCSSTSCFNYYFDFW

SEQ ID NO: 35140 - protein, 14 aa, Homo sapiens
CARLDAARRTFDYW

SEQ ID NO: 35141 - protein, 22 aa, Homo sapiens
CCAKDRPYGDYGAPPFDAFDMW

SEQ ID NO: 35142 - protein, 18 aa, Homo sapiens
CAKHYYYDSSGYSSFDYW

SEQ ID NO: 35143 - protein, 23 aa, Homo sapiens
CARGPPKRELRGGLNYYYYMDVW

SEQ ID NO: 35144 - protein, 15 aa, Homo sapiens
CARESNGYTYYFDFW

SEQ ID NO: 35145 - protein, 17 aa, Homo sapiens
CAHRLWIGQWNYPFDHW

SEQ ID NO: 35146 - protein, 22 aa, Homo sapiens
CARRGGNHYDSSGFYVKWFDPW

SEQ ID NO: 35147 - protein, 17 aa, Homo sapiens
CARSPGPWLVNHYFDYW

SEQ ID NO: 35148 - protein, 15 aa, Homo sapiens
CARRRARGEYAFDFW

SEQ ID NO: 35149 - protein, 21 aa, Homo sapiens
CARHIKRWLQLGGGLWYFDYW

SEQ ID NO: 35150 - protein, 16 aa, Homo sapiens
CVRLWGLGLAWYFDVW

SEQ ID NO: 35151 - protein, 15 aa, Homo sapiens
CARPGGSYEGYFEYW

SEQ ID NO: 35152 - protein, 20 aa, Homo sapiens
CARDSWAGQDLFGFHFFDYW

SEQ ID NO: 35153 - protein, 28 aa, Homo sapiens
CAKDTTYYYDSSGYYYGGRDVDYYLDSW

SEQ ID NO: 35154 - protein, 20 aa, Homo sapiens
CARNRGTSSGVVISDASDVW

SEQ ID NO: 35155 - protein, 21 aa, Homo sapiens
CARENRGFCSGGICHSYLDYW

SEQ ID NO: 35156 - protein, 15 aa, Homo sapiens
CAREGTSYRWYFDLW

SEQ ID NO: 35157 - protein, 18 aa, Homo sapiens
CAKGHWDYGGNSDIADYW

SEQ ID NO: 35158 - protein, 17 aa, Homo sapiens
CARHKGYLSSSTASDYW

SEQ ID NO: 35159 - protein, 14 aa, Homo sapiens
CGRSGGTYWYVDLW

SEQ ID NO: 35160 - protein, 21 aa, Homo sapiens
CAREGTFYYGSGSLNWYFDLW

SEQ ID NO: 35161 - protein, 15 aa, Homo sapiens
CARSRGGWYRHFDLW

SEQ ID NO: 35162 - protein, 18 aa, Homo sapiens
CAKAGGHISIFPKWFDPW

SEQ ID NO: 35163 - protein, 21 aa, Homo sapiens
CTTARGVLRFLEWLRSSFDYW

SEQ ID NO: 35164 - protein, 16 aa, Homo sapiens
CVKGHISMNGSPFDYW

SEQ ID NO: 35165 - protein, 19 aa, Homo sapiens
CARAKRVVTTPDFWYFDLW

SEQ ID NO: 35166 - protein, 16 aa, Homo sapiens
CARQLGGRVVAALDYW

SEQ ID NO: 35167 - protein, 21 aa, Homo sapiens
CARGTTYDTLTGGLWTWFDSW

SEQ ID NO: 35168 - protein, 16 aa, Homo sapiens
CARDQGDSGGWNFDIW

SEQ ID NO: 35169 - protein, 18 aa, Homo sapiens
CAKDMGGHGDMLGYFDYW

SEQ ID NO: 35170 - protein, 15 aa, Homo sapiens
CARHSAILTGDFDLW

SEQ ID NO: 35171 - protein, 19 aa, Homo sapiens
CARGQNYYGSGSYYWFDPW

SEQ ID NO: 35172 - protein, 20 aa, Homo sapiens
CARHAPVWQWSYGGFYFDYW

SEQ ID NO: 35173 - protein, 13 aa, Homo sapiens
CARMYSIYYMDVW

SEQ ID NO: 35174 - protein, 19 aa, Homo sapiens
CARHVGSVGALILDAFDVW

SEQ ID NO: 35175 - protein, 25 aa, Homo sapiens
CARLRREGETTIFGVVNPKYYFDYW

SEQ ID NO: 35176 - protein, 18 aa, Homo sapiens
CARGNYYDNTGYYAFDIW

SEQ ID NO: 35177 - protein, 15 aa, Homo sapiens
CAKDLFRFPYACDIW

SEQ ID NO: 35178 - protein, 16 aa, Homo sapiens
CARVMTTVTKYYFDYW

SEQ ID NO: 35179 - protein, 22 aa, Homo sapiens
CARLNSGYDWGPGYYYYYMDVW

SEQ ID NO: 35180 - protein, 16 aa, Homo sapiens
CARVAGWQWNDVFDIW

SEQ ID NO: 35181 - protein, 16 aa, Homo sapiens
CARLTGSSRWYAFEYW

SEQ ID NO: 35182 - protein, 20 aa, Homo sapiens
CARGLPSLRFLEWLLIGDYW

SEQ ID NO: 35183 - protein, 15 aa, Homo sapiens
CARGPRGYTSGIDYW

SEQ ID NO: 35184 - protein, 20 aa, Homo sapiens
CARPNTRGYSDYDHWYFDLW

SEQ ID NO: 35185 - protein, 11 aa, Homo sapiens
CQQLNTYVYPF

SEQ ID NO: 35186 - protein, 22 aa, Homo sapiens
CAREYAEVTIFGVVRGNWFDPW

SEQ ID NO: 35187 - protein, 16 aa, Homo sapiens
CAKEAWFGPRNYMDVW

SEQ ID NO: 35188 - protein, 15 aa, Homo sapiens
CARGAGGSYSNFDSW

SEQ ID NO: 35189 - protein, 19 aa, Homo sapiens
CAKGPRSGYYGQDTWFDPW

SEQ ID NO: 35190 - protein, 17 aa, Homo sapiens
CAREPGIAESNRYFDLW

SEQ ID NO: 35191 - protein, 14 aa, Homo sapiens
CAKYGSSWYLFDYW

SEQ ID NO: 35192 - protein, 18 aa, Homo sapiens
CARDGRIWFGELLYLFYW

SEQ ID NO: 35193 - protein, 20 aa, Homo sapiens
CAHTRRSHFNWLSGNWFDPW

SEQ ID NO: 35194 - protein, 14 aa, Homo sapiens
CARHDYGWGYFDPW

SEQ ID NO: 35195 - protein, 17 aa, Homo sapiens
CATGGTYGSRWSYFDYW

SEQ ID NO: 35196 - protein, 13 aa, Homo sapiens
CAKYIIGSMIDYW

SEQ ID NO: 35197 - protein, 14 aa, Homo sapiens
CARGTQRTDAFDIW

SEQ ID NO: 35198 - protein, 15 aa, Homo sapiens
CAKDRNIVPTSNDYW

SEQ ID NO: 35199 - protein, 16 aa, Homo sapiens
CAKEDMILIPAAVDYW

SEQ ID NO: 35200 - protein, 14 aa, Homo sapiens
CARSGSYHQIPDYW

SEQ ID NO: 35201 - protein, 15 aa, Homo sapiens
CARGEYSDTNAFDMW

SEQ ID NO: 35202 - protein, 12 aa, Homo sapiens
CQETYSTPLLTF

SEQ ID NO: 35203 - protein, 18 aa, Homo sapiens
CARVWGKWLNRHNWFDPW

SEQ ID NO: 35204 - protein, 17 aa, Homo sapiens
CAKDRFYYDSTGPFDSW

SEQ ID NO: 35205 - protein, 21 aa, Homo sapiens
CARHTPSYGFWSGYRNWFDPW

SEQ ID NO: 35206 - protein, 22 aa, Homo sapiens
CARLRSGYNYESYYFYYYMDVW

SEQ ID NO: 35207 - protein, 15 aa, Homo sapiens
CARPSNSWYGALDYW

SEQ ID NO: 35208 - protein, 13 aa, Homo sapiens
CQVLDSSSDQYVF

SEQ ID NO: 35209 - protein, 21 aa, Homo sapiens
CAKDLRPTTSRVVAPDAFDLW

SEQ ID NO: 35210 - protein, 17 aa, Homo sapiens
CVKGGYSIFGVAIRDYW

SEQ ID NO: 35211 - protein, 18 aa, Homo sapiens
CARSPDGYGGQDYFFDYW

SEQ ID NO: 35212 - protein, 24 aa, Homo sapiens
CARSVVLLFLDWSGSKFHYYMDVW

SEQ ID NO: 35213 - protein, 16 aa, Homo sapiens
CAKDRRFRVPSVFDYW

SEQ ID NO: 35214 - protein, 23 aa, Homo sapiens
CARSPRTLRFTMVRGVRDAFDVW

SEQ ID NO: 35215 - protein, 22 aa, Homo sapiens
CARDPGSYYDSSGYPQGAFDFW

SEQ ID NO: 35216 - protein, 18 aa, Homo sapiens
CARDRMDGGNTGWYFDLW

SEQ ID NO: 35217 - protein, 21 aa, Homo sapiens
CAKFLPYCEGDCYPSNYFDLW

SEQ ID NO: 35218 - protein, 18 aa, Homo sapiens
CARPADYSSGTFDAFDIW

SEQ ID NO: 35219 - protein, 17 aa, Homo sapiens
CARLKRGSSWYKTFDIW

SEQ ID NO: 35220 - protein, 20 aa, Homo sapiens
CTKNSGASHGTALALAHDYW

SEQ ID NO: 35221 - protein, 15 aa, Homo sapiens
CARYSSNWFEAFDIW

SEQ ID NO: 35222 - protein, 12 aa, Homo sapiens
CARDSLQAFDVW

SEQ ID NO: 35223 - protein, 13 aa, Homo sapiens
CARSTVMTGFDYW

SEQ ID NO: 35224 - protein, 19 aa, Homo sapiens
CAKWEKTTVPMTYWHLDLW

SEQ ID NO: 35225 - protein, 14 aa, Homo sapiens
CARGFQTYYSADYW

SEQ ID NO: 35226 - protein, 15 aa, Homo sapiens
CAGWDDSLTGPNWLF

SEQ ID NO: 35227 - protein, 20 aa, Homo sapiens
CARTPSHWGTHSYYYYMDVW

SEQ ID NO: 35228 - protein, 17 aa, Homo sapiens
CARGKSVAGLTRDFDFW

SEQ ID NO: 35229 - protein, 17 aa, Homo sapiens
CQSYDISLSVDLVDVIF

SEQ ID NO: 35230 - protein, 16 aa, Homo sapiens
CVRHPGTTIVDGFQIW

SEQ ID NO: 35231 - protein, 16 aa, Homo sapiens
CARGLGAATGEALDIW

SEQ ID NO: 35232 - protein, 22 aa, Homo sapiens
CARRLGRLTSSTAFFGATYDYW

SEQ ID NO: 35233 - protein, 20 aa, Homo sapiens
CARHIWIFGVISYPYYFDYW

SEQ ID NO: 35234 - protein, 26 aa, Homo sapiens
CASRNCQSTTCYEKIGHFYFYYMDVW

SEQ ID NO: 35235 - protein, 15 aa, Homo sapiens
CVREIITRSLSFDYW

SEQ ID NO: 35236 - protein, 16 aa, Homo sapiens
CARPIRMRVFDAFDIW

SEQ ID NO: 35237 - protein, 19 aa, Homo sapiens
CTRDCSGGSCYLNDAFDIW

SEQ ID NO: 35238 - protein, 16 aa, Homo sapiens
CAKGRSARAVDWFDPW

SEQ ID NO: 35239 - protein, 20 aa, Homo sapiens
CARPGSGGYTYGWGDAFDIW

SEQ ID NO: 35240 - protein, 22 aa, Homo sapiens
CAVGDCTTTSCYYYYHYYMDVW

SEQ ID NO: 35241 - protein, 15 aa, Homo sapiens
CARVPPVTTVTLDYW

SEQ ID NO: 35242 - protein, 19 aa, Homo sapiens
CAKVMYSGWSLGATDFDYW

SEQ ID NO: 35243 - protein, 13 aa, Homo sapiens
CAKLYDYFYMDAW

SEQ ID NO: 35244 - protein, 15 aa, Homo sapiens
CARESKSRSLSFDLW

SEQ ID NO: 35245 - protein, 19 aa, Homo sapiens
CAHRLTGTRIWNYGTFDIW

SEQ ID NO: 35246 - protein, 17 aa, Homo sapiens
CARLPYSGSDMDVFDLW

SEQ ID NO: 35247 - protein, 16 aa, Homo sapiens
CARETESALGWYFDLW

SEQ ID NO: 35248 - protein, 18 aa, Homo sapiens
CARDQAFGDVMIHSFDYW

SEQ ID NO: 35249 - protein, 18 aa, Homo sapiens
CARDEYGSGNYSGLPDYW

SEQ ID NO: 35250 - protein, 17 aa, Homo sapiens
CARRWAIFGPGAPFDPW

SEQ ID NO: 35251 - protein, 10 aa, Homo sapiens [sequence omitted]

SEQ ID NO: 35252 - protein, 18 aa, Homo sapiens
CVRVTEEMTTIGGSFDTW

SEQ ID NO: 35253 - protein, 14 aa, Homo sapiens
CARERDTSGYWDHW

SEQ ID NO: 35254 - protein, 18 aa, Homo sapiens
CARLYLTEYYQSNCFDSW

SEQ ID NO: 35255 - protein, 24 aa, Homo sapiens
CAKGTNVDTPLAAPSDYYYYLDVW

SEQ ID NO: 35256 - protein, 20 aa, Homo sapiens
CARDRYYDSSGYYTAGIDYW

SEQ ID NO: 35257 - protein, 14 aa, Homo sapiens
CASWYYYDSWIDYW

SEQ ID NO: 35258 - protein, 16 aa, Homo sapiens
CARGKYDFQYRVFDYW

SEQ ID NO: 35259 - protein, 16 aa, Homo sapiens
CARAVVTTTGGRFDIW

SEQ ID NO: 35260 - protein, 18 aa, Homo sapiens
CAKDPDNECRPPGGFDPW

SEQ ID NO: 35261 - protein, 22 aa, Homo sapiens
CARGRWGYYGSDNDSFYYMDVW

SEQ ID NO: 35262 - protein, 22 aa, Homo sapiens
CARGKAAYYDSSGYLYNWFDPW

SEQ ID NO: 35263 - protein, 15 aa, Homo sapiens
CARWKGDTAMAPDYW

SEQ ID NO: 35264 - protein, 17 aa, Homo sapiens
CVKEVGYTSSSEPFDIW

SEQ ID NO: 35265 - protein, 14 aa, Homo sapiens
CATKDGLYYYLDVW

SEQ ID NO: 35266 - protein, 19 aa, Homo sapiens
CARVRLDSHTTWRDAFDIW

SEQ ID NO: 35267 - protein, 22 aa, Homo sapiens
CARRRGACSGGSCYSDDGFDIW

SEQ ID NO: 35268 - protein, 18 aa, Homo sapiens
CTRAPKFSDFKDNAFDIW

SEQ ID NO: 35269 - protein, 16 aa, Homo sapiens
CAREMFSGSSPSFDYW

SEQ ID NO: 35270 - protein, 18 aa, Homo sapiens
CARLKQGWLQSTGYFDLW

SEQ ID NO: 35271 - protein, 18 aa, Homo sapiens
CARGGADSPYYYYYMDVW

SEQ ID NO: 35272 - protein, 19 aa, Homo sapiens
CARPPYSSSAWYYYYMDVW

SEQ ID NO: 35273 - protein, 22 aa, Homo sapiens
CAKGPIYYSDNSGYLRDYFDYW

SEQ ID NO: 35274 - protein, 20 aa, Homo sapiens
CARDGGSCTGGSCYTNLDYW

SEQ ID NO: 35275 - protein, 15 aa, Homo sapiens
CARALPGGDAYFDFW

SEQ ID NO: 35276 - protein, 22 aa, Homo sapiens
CARPKPLDYSNYGRFLYYFDQW

SEQ ID NO: 35277 - protein, 17 aa, Homo sapiens
CARGFKVRGVRYYFDYW

SEQ ID NO: 35278 - protein, 20 aa, Homo sapiens
CARRHRFFGDDDFYYYMDVW

SEQ ID NO: 35279 - protein, 24 aa, Homo sapiens
CAREGGTLIYAGNDWLSEYYFDSW

SEQ ID NO: 35280 - protein, 12 aa, Homo sapiens
CIRDHTGPVDYW

SEQ ID NO: 35281 - protein, 16 aa, Homo sapiens
CAKEPRTDYQLFFDSW

SEQ ID NO: 35282 - protein, 19 aa, Homo sapiens
CARAPGDYTPYTTDAFDIW

SEQ ID NO: 35283 - protein, 17 aa, Homo sapiens
CARGGRWLRRDDAFDIW

SEQ ID NO: 35284 - protein, 17 aa, Homo sapiens
CARGAHGSSWYTNVDYW

SEQ ID NO: 35285 - protein, 17 aa, Homo sapiens
CARDLFCGSDCSNLDYW

SEQ ID NO: 35286 - protein, 20 aa, Homo sapiens
CAKESPYDSSGYYPDAFDIW

SEQ ID NO: 35287 - protein, 17 aa, Homo sapiens
CARAPILTGYNAEVDYW

SEQ ID NO: 35288 - protein, 17 aa, Homo sapiens
CARGRGSSLYRGAFDIW

SEQ ID NO: 35289 - protein, 17 aa, Homo sapiens
CARRLAASGTFWYFDLW

SEQ ID NO: 35290 - protein, 18 aa, Homo sapiens
CVRLVAPPNWNFGYFDPW

SEQ ID NO: 35291 - protein, 19 aa, Homo sapiens
CARGRRVFSSTPGYYCDSW

SEQ ID NO: 35292 - protein, 19 aa, Homo sapiens
CVYRSLKYYDRGDRWFHPW

SEQ ID NO: 35293 - protein, 18 aa, Homo sapiens
CARLTSWVTTSTNWFDPW

SEQ ID NO: 35294 - protein, 23 aa, Homo sapiens
CARSSFFLTYHERNYYYYYMDVW

SEQ ID NO: 35295 - protein, 16 aa, Homo sapiens
CARDGQWFGEFPLDYW

SEQ ID NO: 35296 - protein, 16 aa, Homo sapiens
CAHRRGLSAYGRFDPW

SEQ ID NO: 35297 - protein, 20 aa, Homo sapiens
CTRGRTDFGDYVAFYYFDYW

SEQ ID NO: 35298 - protein, 12 aa, Homo sapiens
CQSADDSDTHFF

SEQ ID NO: 35299 - protein, 11 aa, Homo sapiens
CDNAYYYFDSW

SEQ ID NO: 35300 - protein, 16 aa, Homo sapiens
CARDEGLTGTNWFDPW

SEQ ID NO: 35301 - protein, 18 aa, Homo sapiens
CGGSDGPFYGFYAYMDVW

SEQ ID NO: 35302 - protein, 20 aa, Homo sapiens
CARDGEGYGESWVAYHFDAW

SEQ ID NO: 35303 - protein, 19 aa, Homo sapiens
CAKLALPLQISTNYYMDVW

SEQ ID NO: 35304 - protein, 21 aa, Homo sapiens
CTTACLSGFCSGTGLSYFDYW

SEQ ID NO: 35305 - protein, 26 aa, Homo sapiens
CAKGGGCHPYSSASCSLRGLDASDIW

SEQ ID NO: 35306 - protein, 14 aa, Homo sapiens
CAKAETTVTTVDYW

SEQ ID NO: 35307 - protein, 19 aa, Homo sapiens
CARESGYRATSYRHYEDVW

SEQ ID NO: 35308 - protein, 24 aa, Homo sapiens
CARVVPHMGSLQWEQLGAGAFDIW

SEQ ID NO: 35309 - protein, 18 aa, Homo sapiens
CARPRGSDVYDFWEFDYW

SEQ ID NO: 35310 - protein, 21 aa, Homo sapiens
CAREIYHHRSDFLHTQYFQHW

SEQ ID NO: 35311 - protein, 19 aa, Homo sapiens
CARGGYCGGECYYWYFDLW

SEQ ID NO: 35312 - protein, 13 aa, Homo sapiens
CQAWKSSTAPYVF

SEQ ID NO: 35313 - protein, 16 aa, Homo sapiens
CARDLSDSSNDALDTW

SEQ ID NO: 35314 - protein, 18 aa, Homo sapiens
CTRNPVGPPYFYYYMDVW

SEQ ID NO: 35315 - protein, 18 aa, Homo sapiens
CARDTFPWWELLSYFDYW

SEQ ID NO: 35316 - protein, 12 aa, Homo sapiens
CQQYNGHSGLTF

SEQ ID NO: 35317 - protein, 18 aa, Homo sapiens
CARVSTYYNFWSGAPDYW

SEQ ID NO: 35318 - protein, 20 aa, Homo sapiens
CARSYCRGGNCYSNEAWDYW

SEQ ID NO: 35319 - protein, 15 aa, Homo sapiens
CAVGVDLWSWVLDYW

SEQ ID NO: 35320 - protein, 19 aa, Homo sapiens
CAKFMSASYITISGVFDIW

SEQ ID NO: 35321 - protein, 15 aa, Homo sapiens
CTRDRGTTQHFLDYW

SEQ ID NO: 35322 - protein, 26 aa, Homo sapiens
CARAPPEGGWNTIFGVVSYSDYMDVW

SEQ ID NO: 35323 - protein, 21 aa, Homo sapiens
CARETQTPYDSHGYCPYFDFW

SEQ ID NO: 35324 - protein, 16 aa, Homo sapiens
CAKDSGMGVHDAFDIW

SEQ ID NO: 35325 - protein, 14 aa, Homo sapiens
CARSSSGDYGFDIW

SEQ ID NO: 35326 - protein, 20 aa, Homo sapiens
CARVEYYYGSGSTQYYMDVW

SEQ ID NO: 35327 - protein, 19 aa, Homo sapiens
CARDISSGYYSQFSYFDYW

SEQ ID NO: 35328 - protein, 20 aa, Homo sapiens
CARGRTTIFGVDTYNWFDPW

SEQ ID NO: 35329 - protein, 21 aa, Homo sapiens
CAREKTFYDFWSGSAYYFDYW

SEQ ID NO: 35330 - protein, 13 aa, Homo sapiens
CTRDQGGAWQDYW

SEQ ID NO: 35331 - protein, 13 aa, Homo sapiens
CTKAIFVANFDHW

SEQ ID NO: 35332 - protein, 14 aa, Homo sapiens
CAKEDVDEYYFQYW

SEQ ID NO: 35333 - protein, 18 aa, Homo sapiens
CARQYCSITTCYKFFDYW

SEQ ID NO: 35334 - protein, 19 aa, Homo sapiens
CSRGGDFDSSGYPYYFDYW

SEQ ID NO: 35335 - protein, 14 aa, Homo sapiens
CARDPEGGPSVDYW

SEQ ID NO: 35336 - protein, 16 aa, Homo sapiens
CARETDQQGYYYMDVW

SEQ ID NO: 35337 - protein, 17 aa, Homo sapiens
CAREVTMVRGVRKPDYW

SEQ ID NO: 35338 - protein, 20 aa, Homo sapiens
CARLRCSSISCSGDLWFDPW

SEQ ID NO: 35339 - protein, 15 aa, Homo sapiens
CARWVYYDSRYFDYW

SEQ ID NO: 35340 - protein, 17 aa, Homo sapiens
CARSRTYGDWGPFFDYW

SEQ ID NO: 35341 - protein, 13 aa, Homo sapiens
CARAGSWHYFDYW

SEQ ID NO: 35342 - protein, 23 aa, Homo sapiens
CARGARDSSSWYTGYYFYYMDVW

SEQ ID NO: 35343 - protein, 18 aa, Homo sapiens
CARQALILKQQLLNFDYW

SEQ ID NO: 35344 - protein, 20 aa, Homo sapiens
CARDLGYCSSTSCPGGVDYW

SEQ ID NO: 35345 - protein, 19 aa, Homo sapiens
CARDPFLDYYESSGYYDYW

SEQ ID NO: 35346 - protein, 21 aa, Homo sapiens
CARVFAASLRRIYDDYYMDVW

SEQ ID NO: 35347 - protein, 22 aa, Homo sapiens
CARSEGIRYFDWSPFFHWFDPW

SEQ ID NO: 35348 - protein, 16 aa, Homo sapiens
CVKDGAALWFNGFDVW

SEQ ID NO: 35349 - protein, 16 aa, Homo sapiens
CAAAVGGTSHNWFDPW

SEQ ID NO: 35350 - protein, 19 aa, Homo sapiens
CARHGENYDLLTAYYPDYW

SEQ ID NO: 35351 - protein, 14 aa, Homo sapiens
CARSSDWHEPFDYW

SEQ ID NO: 35352 - protein, 16 aa, Homo sapiens
CARDQNTVFRGDLDYW

SEQ ID NO: 35353 - protein, 15 aa, Homo sapiens
CAKDGGTSSWYFDSW

SEQ ID NO: 35354 - protein, 13 aa, Homo sapiens
CYSVADDNPQWLF

SEQ ID NO: 35355 - protein, 15 aa, Homo sapiens
CTRADWGTLKYFDFW

SEQ ID NO: 35356 - protein, 15 aa, Homo sapiens
CAKGALWPETLFDYW

SEQ ID NO: 35357 - protein, 17 aa, Homo sapiens
CAREVWFGEGEDYLDVW

SEQ ID NO: 35358 - protein, 16 aa, Homo sapiens
CTSGLYYDTSAFFDFW

SEQ ID NO: 35359 - protein, 17 aa, Homo sapiens
CAKGDNWNPPYGLFDFW

SEQ ID NO: 35360 - protein, 19 aa, Homo sapiens
CASSQGNDFWRHYRYMDVW

SEQ ID NO: 35361 - protein, 19 aa, Homo sapiens
CASEVFDYGDYEGYYMDVW

SEQ ID NO: 35362 - protein, 24 aa, Homo sapiens
CARGITELAVAGQGYYYYYYMDVW

SEQ ID NO: 35363 - protein, 17 aa, Homo sapiens
CARALESFMIFGDFDFW

SEQ ID NO: 35364 - protein, 22 aa, Homo sapiens
CARMTVDSTMVHYPYYYYMDVW

SEQ ID NO: 35365 - protein, 19 aa, Homo sapiens
CAKEKDRKYYPLNDASDIW

SEQ ID NO: 35366 - protein, 18 aa, Homo sapiens
CARSGPYSGTYWQAFDIW

SEQ ID NO: 35367 - protein, 18 aa, Homo sapiens
CARGTHFGSGTYYCFDYW

SEQ ID NO: 35368 - protein, 14 aa, Homo sapiens
CARVANRPYYFDFW

SEQ ID NO: 35369 - protein, 15 aa, Homo sapiens
CVRDDYGTSSHFDYW

SEQ ID NO: 35370 - protein, 12 aa, Homo sapiens
CAKEFKRPIDYW

SEQ ID NO: 35371 - protein, 18 aa, Homo sapiens
CATDGHSNSWFGNWFDPW

SEQ ID NO: 35372 - protein, 21 aa, Homo sapiens
CAREVLYCSGGSCYGGYFDLW

SEQ ID NO: 35373 - protein, 15 aa, Homo sapiens
CARSNSRTSRAFDIW

SEQ ID NO: 35374 - protein, 19 aa, Homo sapiens
CARVDFHDFWLGRNWFDTW

SEQ ID NO: 35375 - protein, 26 aa, Homo sapiens
CARVVKPNFGIGVSQIYYQYYYMDIW

SEQ ID NO: 35376 - protein, 24 aa, Homo sapiens
CARGGSSAYDHVWGNYPVRPFDMW

SEQ ID NO: 35377 - protein, 16 aa, Homo sapiens
CVKGGGGLLHYYMDVW

SEQ ID NO: 35378 - protein, 17 aa, Homo sapiens
CVKGSPNWERRWVFDYW

SEQ ID NO: 35379 - protein, 18 aa, Homo sapiens
CARVVGSWPRHPGAFDIW

SEQ ID NO: 35380 - protein, 15 aa, Homo sapiens
CAKDYSLTGLTIDYW

SEQ ID NO: 35381 - protein, 18 aa, Homo sapiens
CARDLDTAMIHRGPFDTW

SEQ ID NO: 35382 - protein, 13 aa, Homo sapiens
CQSSDSSGSSLIF

SEQ ID NO: 35383 - protein, 20 aa, Homo sapiens
CARLRGGVIMGTIRGYIDTW

SEQ ID NO: 35384 - protein, 15 aa, Homo sapiens
CAKEIRGSWHAFDFW

SEQ ID NO: 35385 - protein, 19 aa, Homo sapiens
CAHRRDLGSTWSYGDFDYW

SEQ ID NO: 35386 - protein, 15 aa, Homo sapiens
CARQELVGARGFDIW

SEQ ID NO: 35387 - protein, 21 aa, Homo sapiens
CARSPSGDFWSGSSSHYFDYW

SEQ ID NO: 35388 - protein, 29 aa, Homo sapiens
CARHLLDHYDFWSGYYSDQSLPPNWFDPW

SEQ ID NO: 35389 - protein, 16 aa, Homo sapiens
CARVLFDSNGYFVDYW

SEQ ID NO: 35390 - protein, 17 aa, Homo sapiens
CAKTRSAAMGGDAFDIW

SEQ ID NO: 35391 - protein, 18 aa, Homo sapiens
CARARAGHNIGWYYFDHW

SEQ ID NO: 35392 - protein, 17 aa, Homo sapiens
CARSAILTGLFLWFDAW

SEQ ID NO: 35393 - protein, 18 aa, Homo sapiens
CARGYCRGAGCLRFFDYW

SEQ ID NO: 35394 - protein, 14 aa, Homo sapiens
CVRRDGSTWVHDYW

SEQ ID NO: 35395 - protein, 17 aa, Homo sapiens
CARNQGEFYFNHYMDVW

SEQ ID NO: 35396 - protein, 13 aa, Homo sapiens
CAAGSSFSQFDYW

SEQ ID NO: 35397 - protein, 18 aa, Homo sapiens
CARDSLTPTGRKWYFDLW

SEQ ID NO: 35398 - protein, 20 aa, Homo sapiens
CVSDARPVGMPTIGYYFDYW

SEQ ID NO: 35399 - protein, 22 aa, Homo sapiens
CAKDPTYYYDSSGYYPGWFDPW

SEQ ID NO: 35400 - protein, 16 aa, Homo sapiens
CTTAGWNYYFDAFDIW

SEQ ID NO: 35401 - protein, 18 aa, Homo sapiens
CAREKYFDSSAHHGIDYW

SEQ ID NO: 35402 - protein, 22 aa, Homo sapiens
CAKGPRDTVVVVAVNGRWFDPW

SEQ ID NO: 35403 - protein, 17 aa, Homo sapiens
CARERGEGYQQGYFDCW

SEQ ID NO: 35404 - protein, 16 aa, Homo sapiens
CARKAAVTANTLFDYW

SEQ ID NO: 35405 - protein, 14 aa, Homo sapiens
CATLPPAEFFFNYW

SEQ ID NO: 35406 - protein, 16 aa, Homo sapiens
CAKGGRSNAYSYVDVW

SEQ ID NO: 35407 - protein, 18 aa, Homo sapiens
CARPSYSSSWLPGYMDVW

SEQ ID NO: 35408 - protein, 17 aa, Homo sapiens
CARVAFAAAAALYFDLW

SEQ ID NO: 35409 - protein, 16 aa, Homo sapiens
CARSNCARSSCYEDYW

SEQ ID NO: 35410 - protein, 21 aa, Homo sapiens
CARVFRYCSSANCLNYYMDVW

SEQ ID NO: 35411 - protein, 14 aa, Homo sapiens
CARVLFPRRSFDIW

SEQ ID NO: 35412 - protein, 15 aa, Homo sapiens
CAKGASGSYSPTDYW

SEQ ID NO: 35413 - protein, 20 aa, Homo sapiens
CAKDKGLRYLELPSGYFDLW

SEQ ID NO: 35414 - protein, 13 aa, Homo sapiens
CASGEANNFFDTW

SEQ ID NO: 35415 - protein, 18 aa, Homo sapiens
CARVRDRYYDSSGYLDYW

SEQ ID NO: 35416 - protein, 13 aa, Homo sapiens
CARHSSSWPFDYW

SEQ ID NO: 35417 - protein, 17 aa, Homo sapiens
CARDLGHTNNWWAFDYW

SEQ ID NO: 35418 - protein, 17 aa, Homo sapiens
CTKRYCSTDSCSYFDLW

SEQ ID NO: 35419 - protein, 19 aa, Homo sapiens
CARVPRRLATIGGDAFHIW

SEQ ID NO: 35420 - protein, 10 aa, Homo sapiens
CQQYNEWQDF

SEQ ID NO: 35421 - protein, 18 aa, Homo sapiens
CARRGYTASGQPWYFDLW

SEQ ID NO: 35422 - protein, 20 aa, Homo sapiens
CVKVAAPLRLGEERNYLEYW

SEQ ID NO: 35423 - protein, 20 aa, Homo sapiens
CAHRPGIAAAGQPTPYFDYW

SEQ ID NO: 35424 - protein, 21 aa, Homo sapiens
CARGGYCSGTTCYLLNAFDIW

SEQ ID NO: 35425 - protein, 16 aa, Homo sapiens
CVRRGSTWYGHYFDSW

SEQ ID NO: 35426 - protein, 17 aa, Homo sapiens
CIYSSWYSYYFYYMDVW

SEQ ID NO: 35427 - protein, 16 aa, Homo sapiens
CARKVYAIVHDAFDIW

SEQ ID NO: 35428 - protein, 18 aa, Homo sapiens
CARDYGRVGLEPDAFDVW

SEQ ID NO: 35429 - protein, 12 aa, Homo sapiens
CQSYSGSNHWMF

SEQ ID NO: 35430 - protein, 14 aa, Homo sapiens
CARHGSVSRLFDSW

SEQ ID NO: 35431 - protein, 18 aa, Homo sapiens
CAREIPIFGVAPGAFDIW

SEQ ID NO: 35432 - protein, 18 aa, Homo sapiens
CARGRLVLRVVRAYFDSW

SEQ ID NO: 35433 - protein, 20 aa, Homo sapiens
CARGETYYWDSSGYFYFDYW

SEQ ID NO: 35434 - protein, 17 aa, Homo sapiens
CAKYYYSSGGYYFFDLW

SEQ ID NO: 35435 - protein, 18 aa, Homo sapiens
CVRGVRWIQRAEWYFEVW

SEQ ID NO: 35436 - protein, 21 aa, Homo sapiens
CTTDHRETIAARPATGWFDPW

SEQ ID NO: 35437 - protein, 17 aa, Homo sapiens
CAREVAIAGHGDWFDPW

SEQ ID NO: 35438 - protein, 20 aa, Homo sapiens
CVRGKRITVASIDYYYMDVW

SEQ ID NO: 35439 - protein, 16 aa, Homo sapiens
CVRAPVGAPSGWFDPW

SEQ ID NO: 35440 - protein, 17 aa, Homo sapiens
CAKTRRWLPRDAGFDIW

SEQ ID NO: 35441 - protein, 17 aa, Homo sapiens
CARGFSYSSSPPSFDYW

SEQ ID NO: 35442 - protein, 22 aa, Homo sapiens
CARSLNYYDTSGDIFGYYFDKW

SEQ ID NO: 35443 - protein, 23 aa, Homo sapiens
CAKRARFSEWSSSLASLDHLDVW

SEQ ID NO: 35444 - protein, 15 aa, Homo sapiens
CARWWVSGISAIDYW

SEQ ID NO: 35445 - protein, 27 aa, Homo sapiens
CAREATYSYDSRGYLVARYFYYYMDVW

SEQ ID NO: 35446 - protein, 11 aa, Homo sapiens
CARGYWYFNLW

SEQ ID NO: 35447 - protein, 12 aa, Homo sapiens
CQQFDHYPRLIF

SEQ ID NO: 35448 - protein, 20 aa, Homo sapiens
CAKGHRIFGVVITTAPLDYW

SEQ ID NO: 35449 - protein, 19 aa, Homo sapiens
CARRHSSWFSESSYYFDYW

SEQ ID NO: 35450 - protein, 19 aa, Homo sapiens
CARERVPGGGRYFDAFDIW

SEQ ID NO: 35451 - protein, 18 aa, Homo sapiens
CVRDGSRGQYPDYYFDNW

SEQ ID NO: 35452 - protein, 14 aa, Homo sapiens
CLLSYSGAARSWVF

SEQ ID NO: 35453 - protein, 24 aa, Homo sapiens
CAKAGAVDPIWTAHYSVPYYFDNW

SEQ ID NO: 35454 - protein, 21 aa, Homo sapiens
CARRGYISSSSNYYHYYMDVW

SEQ ID NO: 35455 - protein, 16 aa, Homo sapiens
CARQSGSNTRGYFDYW

SEQ ID NO: 35456 - protein, 18 aa, Homo sapiens
CVRDGEFASGTTWVFDYW

SEQ ID NO: 35457 - protein, 22 aa, Homo sapiens
CAGAAMPVPARVYYYYYYMDVW

SEQ ID NO: 35458 - protein, 15 aa, Homo sapiens
CAIRSGAHSYYMDVW

SEQ ID NO: 35459 - protein, 21 aa, Homo sapiens
CARHIVALAPHITNYNYLDVW

SEQ ID NO: 35460 - protein, 15 aa, Homo sapiens
CMQGTHWPPRDLLTF

SEQ ID NO: 35461 - protein, 18 aa, Homo sapiens
CARERALHDYSTYYFDYW

SEQ ID NO: 35462 - protein, 18 aa, Homo sapiens
CAKGTTYDFWSGYSYDYW

SEQ ID NO: 35463 - protein, 19 aa, Homo sapiens
CAKDWSRVRGIIMGDFDYW

SEQ ID NO: 35464 - protein, 15 aa, Homo sapiens
CARATARLNYAFDIW

SEQ ID NO: 35465 - protein, 18 aa, Homo sapiens
CAKRGIAAAGVYSYFDYW

SEQ ID NO: 35466 - protein, 17 aa, Homo sapiens
CARQAHDSHSTGFVDYW

SEQ ID NO: 35467 - protein, 16 aa, Homo sapiens
CARGNASFFFGLFDYW

SEQ ID NO: 35468 - protein, 25 aa, Homo sapiens
CARVGFNCVGGGSCYSPPQFGLDYW

SEQ ID NO: 35469 - protein, 24 aa, Homo sapiens
CARMDSFYDRLTGYYSNSNAFDIW

SEQ ID NO: 35470 - protein, 14 aa, Homo sapiens
CARSSIWLFPFDQW

SEQ ID NO: 35471 - protein, 23 aa, Homo sapiens
CAKDPLLDFWSTNYRELNYMDVW

SEQ ID NO: 35472 - protein, 17 aa, Homo sapiens
CARVTQSGMSPRVFDYW

SEQ ID NO: 35473 - protein, 19 aa, Homo sapiens
CATDSGYSVLHYYYYMDVW

SEQ ID NO: 35474 - protein, 18 aa, Homo sapiens
CAGGIRQLLYGSAPFDYW

SEQ ID NO: 35475 - protein, 17 aa, Homo sapiens
CAREMYNNGWHPAFDYW

SEQ ID NO: 35476 - protein, 20 aa, Homo sapiens
CAKGGDSSRVPYYYYYMDVW

SEQ ID NO: 35477 - protein, 20 aa, Homo sapiens
CAKFQFWEGYNGYDVAFDVW

SEQ ID NO: 35478 - protein, 15 aa, Homo sapiens
CARVALSSAWYFDSW

SEQ ID NO: 35479 - protein, 18 aa, Homo sapiens
CAKGDDNSGYYLEGFDYW

SEQ ID NO: 35480 - protein, 13 aa, Homo sapiens [sequence omitted]

SEQ ID NO: 35481 - protein, 19 aa, Homo sapiens
CARDGSSWFGGLSQPFDNW

SEQ ID NO: 35482 - protein, 16 aa, Homo sapiens
CARQRDVFNRAYFEYW

SEQ ID NO: 35483 - protein, 17 aa, Homo sapiens
CARGHLYYYDSSGLDYW

SEQ ID NO: 35484 - protein, 20 aa, Homo sapiens
CATLRGWSSSSTSYNWFDPW

SEQ ID NO: 35485 - protein, 18 aa, Homo sapiens
CARVQYRGFDYSEAFDIW

SEQ ID NO: 35486 - protein, 16 aa, Homo sapiens
CAKDLFYETSGALDVW

SEQ ID NO: 35487 - protein, 13 aa, Homo sapiens
CQSYDGSLRGPLF

SEQ ID NO: 35488 - protein, 23 aa, Homo sapiens
CARVYCGGDCSRPSDFYYYMDVW

SEQ ID NO: 35489 - protein, 22 aa, Homo sapiens
CARDFDPSECSTAICSNLVDYW

SEQ ID NO: 35490 - protein, 21 aa, Homo sapiens
CARIIRYYDSGGYYYYYMDVW

SEQ ID NO: 35491 - protein, 18 aa, Homo sapiens
CARVGQSCNSGWCYFDYW

SEQ ID NO: 35492 - protein, 17 aa, Homo sapiens
CARHATTYTSNWYFDYW

SEQ ID NO: 35493 - protein, 15 aa, Homo sapiens
CARGTEIQPPYFDYW

SEQ ID NO: 35494 - protein, 16 aa, Homo sapiens
CASHRGWPPHLGFDYW

SEQ ID NO: 35495 - protein, 17 aa, Homo sapiens
CVRHPSGVVTPRWIDSW

SEQ ID NO: 35496 - protein, 17 aa, Homo sapiens
CARGGMSYYSYYYMDVW

SEQ ID NO: 35497 - protein, 13 aa, Homo sapiens
CQAWDSTTAWGLF

SEQ ID NO: 35498 - protein, 19 aa, Homo sapiens
CARDMASGWYGGHDAFEIW

SEQ ID NO: 35499 - protein, 12 aa, Homo sapiens
CQQYGNVPMTFF

SEQ ID NO: 35500 - protein, 22 aa, Homo sapiens
CTIRGTNRRITMLRGVPLFGYW

SEQ ID NO: 35501 - protein, 21 aa, Homo sapiens
CTRDSSSSWYRVVDDYYMDVW

SEQ ID NO: 35502 - protein, 20 aa, Homo sapiens
CARAGLGGTGTYYPPFFEYW

SEQ ID NO: 35503 - protein, 17 aa, Homo sapiens
CVRDGHETQWYYYMDVW

SEQ ID NO: 35504 - protein, 18 aa, Homo sapiens
CAKGLQWYGSGSYWSDSW

SEQ ID NO: 35505 - protein, 14 aa, Homo sapiens
CVRDTEGAYYFDNW

SEQ ID NO: 35506 - protein, 16 aa, Homo sapiens
CARMVWLSGTRSFDSW

SEQ ID NO: 35507 - protein, 16 aa, Homo sapiens
CARRRAISSWEALDYW

SEQ ID NO: 35508 - protein, 21 aa, Homo sapiens
CARRMTGQFAPVGYYYYMDVW

SEQ ID NO: 35509 - protein, 21 aa, Homo sapiens
CARHPGHTMIVVVTPYYFDYW

SEQ ID NO: 35510 - protein, 19 aa, Homo sapiens
CASRVREATPVYYHYMDVW

SEQ ID NO: 35511 - protein, 16 aa, Homo sapiens
CATYSNYLSDYYMDVW

SEQ ID NO: 35512 - protein, 13 aa, Homo sapiens
CAHRRTIRGFDPW

SEQ ID NO: 35513 - protein, 18 aa, Homo sapiens
CARLNTRHGGNLDAFDMW

SEQ ID NO: 35514 - protein, 18 aa, Homo sapiens
CAKEGAYRSGWFDHIDVW

SEQ ID NO: 35515 - protein, 13 aa, Homo sapiens
CVRVSVVAGTDYW

SEQ ID NO: 35516 - protein, 21 aa, Homo sapiens
CAGAIVATTRGHYYYYYMDVW

SEQ ID NO: 35517 - protein, 18 aa, Homo sapiens
CARGETLGATTVGAFHIW

SEQ ID NO: 35518 - protein, 18 aa, Homo sapiens
CSNPRDYYDSSRDAFDIW

SEQ ID NO: 35519 - protein, 21 aa, Homo sapiens
CAKDSRITSFRVVRPDAFDIW

SEQ ID NO: 35520 - protein, 25 aa, Homo sapiens
CARGNCVVDCFSPRRPYHSFYMDVW

SEQ ID NO: 35521 - protein, 21 aa, Homo sapiens
CVRRTLWMTTSPKPMFYFDSW

SEQ ID NO: 35522 - protein, 15 aa, Homo sapiens
CTRDRGGLKSAFDIW

SEQ ID NO: 35523 - protein, 17 aa, Homo sapiens
CVKSGARRGAAEYFDNW

SEQ ID NO: 35524 - protein, 17 aa, Homo sapiens
CARESSNTVLHPRIDYW

SEQ ID NO: 35525 - protein, 14 aa, Homo sapiens
CVRDPPELDAFDLW

SEQ ID NO: 35526 - protein, 21 aa, Homo sapiens
CAREGEGYCYSTSCKKYFDSW

SEQ ID NO: 35527 - protein, 15 aa, Homo sapiens
CARSFAAAGTGFDYW

SEQ ID NO: 35528 - protein, 14 aa, Homo sapiens
CARHWMVSYYIDSW

SEQ ID NO: 35529 - protein, 23 aa, Homo sapiens
CARGLSLYYGSESYYKARWFDPW

SEQ ID NO: 35530 - protein, 19 aa, Homo sapiens
CARAVAVWFGELSGWFDPW

SEQ ID NO: 35531 - protein, 15 aa, Homo sapiens
CARDGILATSYFDSW

SEQ ID NO: 35532 - protein, 22 aa, Homo sapiens
CAKESLGFLLWFGEPWVYFDYW

SEQ ID NO: 35533 - protein, 17 aa, Homo sapiens
CARPDSFNYGGDGFDLW

SEQ ID NO: 35534 - protein, 17 aa, Homo sapiens
CARGGRDDDESWYFDLW

SEQ ID NO: 35535 - protein, 15 aa, Homo sapiens
CAKENANWGRQFDSW

SEQ ID NO: 35536 - protein, 18 aa, Homo sapiens
CARGTVVTPDFYYYMDVW

SEQ ID NO: 35537 - protein, 21 aa, Homo sapiens
CARYPLSDWTYGRRAGHFDHW

SEQ ID NO: 35538 - protein, 18 aa, Homo sapiens
CAKLGGATCSASCYHDYW

SEQ ID NO: 35539 - protein, 20 aa, Homo sapiens
CARLGPVWGTYRSHSPFDYW

SEQ ID NO: 35540 - protein, 20 aa, Homo sapiens
CARRGYDYDSGRDLHGFDLW

SEQ ID NO: 35541 - protein, 17 aa, Homo sapiens
CARQTWETLKYHYMDVW

SEQ ID NO: 35542 - protein, 15 aa, Homo sapiens
CARDVFGSSTYLDHW

SEQ ID NO: 35543 - protein, 18 aa, Homo sapiens
CARHARLSATIKGPFDLW

SEQ ID NO: 35544 - protein, 19 aa, Homo sapiens
CARDGGYCSTPRCLQFDNW

SEQ ID NO: 35545 - protein, 21 aa, Homo sapiens
CAREETYCSGGGCYNGAFDFW

SEQ ID NO: 35546 - protein, 19 aa, Homo sapiens
CARQRSQYSSSSFDWFDPW

SEQ ID NO: 35547 - protein, 18 aa, Homo sapiens
CARLSYGYSTGWYYFDYW

SEQ ID NO: 35548 - protein, 17 aa, Homo sapiens
CTRALRDIVATRGFDSW

SEQ ID NO: 35549 - protein, 15 aa, Homo sapiens
CTKANSSSPPEFDPW

SEQ ID NO: 35550 - protein, 20 aa, Homo sapiens
CGRRRRNCVGPTCTNLFDYW

SEQ ID NO: 35551 - protein, 19 aa, Homo sapiens
CVKGLRYYGSGSFDYFDYW

SEQ ID NO: 35552 - protein, 17 aa, Homo sapiens
CARTYDYGATPYYFDYW

SEQ ID NO: 35553 - protein, 18 aa, Homo sapiens
CARGAEDSTYRLNWFDPW

SEQ ID NO: 35554 - protein, 18 aa, Homo sapiens
CARAPTYQWPFAGPFEYW

SEQ ID NO: 35555 - protein, 19 aa, Homo sapiens
CAETYCGPDCYFVDAFDIW

SEQ ID NO: 35556 - protein, 18 aa, Homo sapiens
CAKEGLRLVYSGDAFDMW

SEQ ID NO: 35557 - protein, 19 aa, Homo sapiens
CARLVRGAQYGDFWYFDPW

SEQ ID NO: 35558 - protein, 14 aa, Homo sapiens
CGRDGYQVDAIDVW

SEQ ID NO: 35559 - protein, 14 aa, Homo sapiens
CTRIIYPGDWFDLW

SEQ ID NO: 35560 - protein, 17 aa, Homo sapiens
CAKEGGYYGSGSYLDSW

SEQ ID NO: 35561 - protein, 15 aa, Homo sapiens
CATAFGFKSGWFDTW

SEQ ID NO: 35562 - protein, 16 aa, Homo sapiens
CTRLMGDFWSGYSDYW

SEQ ID NO: 35563 - protein, 21 aa, Homo sapiens
CARKGPYYTGSEKKKGAFDVW

SEQ ID NO: 35564 - protein, 17 aa, Homo sapiens
CARAKMGSNWNPDFDYW

SEQ ID NO: 35565 - protein, 14 aa, Homo sapiens
CSAWDDTLNGHVVF

SEQ ID NO: 35566 - protein, 16 aa, Homo sapiens
CATTYFYDSSGHFDNW

SEQ ID NO: 35567 - protein, 13 aa, Homo sapiens
CARTEYFQAFDFW

SEQ ID NO: 35568 - protein, 13 aa, Homo sapiens
CSSYGGSSTFELF

SEQ ID NO: 35569 - protein, 17 aa, Homo sapiens
CARGWFGKLLSDTFDMW

SEQ ID NO: 35570 - protein, 17 aa, Homo sapiens
CARLWGGTYYGSGFDIW

SEQ ID NO: 35571 - protein, 19 aa, Homo sapiens
CARPYYYDDIGQPGGFDSW

SEQ ID NO: 35572 - protein, 14 aa, Homo sapiens
CARRGSHYEGLDYW

SEQ ID NO: 35573 - protein, 17 aa, Homo sapiens
CAKGRRITMIRAPFDYW

SEQ ID NO: 35574 - protein, 18 aa, Homo sapiens
CARDGTEFGTSIYYFDHW

SEQ ID NO: 35575 - protein, 18 aa, Homo sapiens
CARGAIRDAYSPDAFEIW

SEQ ID NO: 35576 - protein, 16 aa, Homo sapiens
CARDSLTNSGDNFDYW

SEQ ID NO: 35577 - protein, 18 aa, Homo sapiens
CARGYYYGSARLNWFNPW

SEQ ID NO: 35578 - protein, 19 aa, Homo sapiens
CARDAYGSGSYWGYYFDYW

SEQ ID NO: 35579 - protein, 17 aa, Homo sapiens
CVRSGPPAAIANWFDSW

SEQ ID NO: 35580 - protein, 21 aa, Homo sapiens
CARGANLCSSTSCRRYYFDYW

SEQ ID NO: 35581 - protein, 20 aa, Homo sapiens
CAKSSRSCSTTSCYTHFDYW

SEQ ID NO: 35582 - protein, 13 aa, Homo sapiens
CTSDYGDYYFDYW

SEQ ID NO: 35583 - protein, 24 aa, Homo sapiens
CDDAAVYYCARGNASFFFGLFDYW

SEQ ID NO: 35584 - protein, 15 aa, Homo sapiens
CTGDLNSGWGWLDPW

SEQ ID NO: 35585 - protein, 21 aa, Homo sapiens
CAKQGDYDFWSGSIYNWFDPW

SEQ ID NO: 35586 - protein, 19 aa, Homo sapiens
CAGYCSSTSCYAAKAFDIW

SEQ ID NO: 35587 - protein, 17 aa, Homo sapiens
CARDDYGDYFIPYFDYW

SEQ ID NO: 35588 - protein, 16 aa, Homo sapiens
CQSVDSSGAYGSYVLF

SEQ ID NO: 35589 - protein, 21 aa, Homo sapiens
CARAAWVFCTSTRCYRHFDYW

SEQ ID NO: 35590 - protein, 24 aa, Homo sapiens
CARERDELIVPSAVPYYYYYVDVW

SEQ ID NO: 35591 - protein, 16 aa, Homo sapiens
CAGPSHKGQLWYFDYW

SEQ ID NO: 35592 - protein, 17 aa, Homo sapiens
CVRENSGHPYYYYMDVW

SEQ ID NO: 35593 - protein, 20 aa, Homo sapiens
CAREGADSISWDRNDAFDIW

SEQ ID NO: 35594 - protein, 14 aa, Homo sapiens
CQVWDISNDHSGVF

SEQ ID NO: 35595 - protein, 17 aa, Homo sapiens
CARHGGKRSGSSVFDYW

SEQ ID NO: 35596 - protein, 20 aa, Homo sapiens
CARVCGQHYGSGSYYNADYW

SEQ ID NO: 35597 - protein, 24 aa, Homo sapiens
CAREEYDTFLGGGGYFYYYYLDVW

SEQ ID NO: 35598 - protein, 13 aa, Homo sapiens
CLQYNDWPPSRPF

SEQ ID NO: 35599 - protein, 17 aa, Homo sapiens
CARIPDYGGNSMAFDIW

SEQ ID NO: 35600 - protein, 14 aa, Homo sapiens
CARRRAGSTGFDVW

SEQ ID NO: 35601 - protein, 16 aa, Homo sapiens
CARYSSSWFRRFFDYW

SEQ ID NO: 35602 - protein, 16 aa, Homo sapiens
CAKPLTGTSSNYLDYW

SEQ ID NO: 35603 - protein, 22 aa, Homo sapiens
CAKDSGYDNSGYYAWQNAFDVW

SEQ ID NO: 35604 - protein, 13 aa, Homo sapiens
CARFSYNSQFDSW

SEQ ID NO: 35605 - protein, 20 aa, Homo sapiens
CARAYLDYGDNYGLEYMDVW

SEQ ID NO: 35606 - protein, 15 aa, Homo sapiens
CARDNPYDDVPFDYW

SEQ ID NO: 35607 - protein, 20 aa, Homo sapiens
CARGEWERLSYYHRYYMDVW

SEQ ID NO: 35608 - protein, 12 aa, Homo sapiens
CARHVTWNFDLW

SEQ ID NO: 35609 - protein, 22 aa, Homo sapiens
CAKAAYTYDSSGPTHYYYMDVW

SEQ ID NO: 35610 - protein, 15 aa, Homo sapiens
CARARDYLGYYLDYW

SEQ ID NO: 35611 - protein, 22 aa, Homo sapiens
CASLPFGYSDRWYSYYYYMDVW

SEQ ID NO: 35612 - protein, 19 aa, Homo sapiens
CAREVSILSALHYYYMDVW

SEQ ID NO: 35613 - protein, 23 aa, Homo sapiens
CARDWIYYDGSSYSVHFYYMDVW

SEQ ID NO: 35614 - protein, 19 aa, Homo sapiens
CARMGAYCSGGDCFGFDFW

SEQ ID NO: 35615 - protein, 16 aa, Homo sapiens
CATDREWEQGGPFDYW

SEQ ID NO: 35616 - protein, 25 aa, Homo sapiens
CARVGKEFWRGYQREMAYYYYMDVW

SEQ ID NO: 35617 - protein, 16 aa, Homo sapiens
CARVVITLGHDASDMW

SEQ ID NO: 35618 - protein, 24 aa, Homo sapiens
CARDSPNVKRWFGELAVHAWFDPW

SEQ ID NO: 35619 - protein, 22 aa, Homo sapiens
CARRAYYSGYDPSYSYYYMDVW

SEQ ID NO: 35620 - protein, 17 aa, Homo sapiens
CARDRNNYYDIGYFEFW

SEQ ID NO: 35621 - protein, 18 aa, Homo sapiens
CARQEGVVFMVYAPYDYW

SEQ ID NO: 35622 - protein, 21 aa, Homo sapiens
CARRGAEYQLLFSHYYYTDVW

SEQ ID NO: 35623 - protein, 14 aa, Homo sapiens
CAKSGGSYGWFDPW

SEQ ID NO: 35624 - protein, 20 aa, Homo sapiens
CARGAYCSGYSCYSDYFDYW

SEQ ID NO: 35625 - protein, 20 aa, Homo sapiens
CARKNPGWIQIWTRHWFDPW

SEQ ID NO: 35626 - protein, 19 aa, Homo sapiens
CAHSSLYSSNWYGGGFDPW

SEQ ID NO: 35627 - protein, 20 aa, Homo sapiens
CATAQKHYYDSIGALGFDTW

SEQ ID NO: 35628 - protein, 15 aa, Homo sapiens
CARDGIASWAIFDSW

SEQ ID NO: 35629 - protein, 17 aa, Homo sapiens
CARKGNWNYLGDGFDIW

SEQ ID NO: 35630 - protein, 19 aa, Homo sapiens
CVKDNLRFSEWLPAAFDMW

SEQ ID NO: 35631 - protein, 21 aa, Homo sapiens
CARPRGWRCYSSSCSYYMDVW

SEQ ID NO: 35632 - protein, 16 aa, Homo sapiens
CARDFVGATHRAFDPW

SEQ ID NO: 35633 - protein, 20 aa, Homo sapiens
CARSSLAYSYAPYYFYLDVW

SEQ ID NO: 35634 - protein, 18 aa, Homo sapiens
CARGGLWWELDRYFFDSW

SEQ ID NO: 35635 - protein, 18 aa, Homo sapiens
CVRPYCSGGSCFYYMDVW

SEQ ID NO: 35636 - protein, 21 aa, Homo sapiens
CARVRTYYYDSSGDRDAFDIW

SEQ ID NO: 35637 - protein, 22 aa, Homo sapiens
CARGSDCTVGVCDTWGNAFDVW

SEQ ID NO: 35638 - protein, 22 aa, Homo sapiens
CARLGILVVTGIPLQDFYMDVW

SEQ ID NO: 35639 - protein, 23 aa, Homo sapiens
CARDGPIMYCSGSSCFEYLFDSW

SEQ ID NO: 35640 - protein, 16 aa, Homo sapiens
CARAPSYFGAFYFDNW

SEQ ID NO: 35641 - protein, 16 aa, Homo sapiens
CAREVGSPRYNWFDPW

SEQ ID NO: 35642 - protein, 22 aa, Homo sapiens
CATAGDYDFWNGYKNNHYMDVW

SEQ ID NO: 35643 - protein, 14 aa, Homo sapiens
CVRGFSGAAREDYW

SEQ ID NO: 35644 - protein, 18 aa, Homo sapiens
CALPICSYAPFHYYTDVW

SEQ ID NO: 35645 - protein, 19 aa, Homo sapiens
CARGDYDILTHYHRFFDYW

SEQ ID NO: 35646 - protein, 19 aa, Homo sapiens
CARERAVASETSRPAFDIW

SEQ ID NO: 35647 - protein, 18 aa, Homo sapiens
CARAAYCGGDCYYYMDVW

SEQ ID NO: 35648 - protein, 13 aa, Homo sapiens
CESSDSSGSLEVF

SEQ ID NO: 35649 - protein, 21 aa, Homo sapiens
CARGHLGGYSYGHTLLWFDPW

SEQ ID NO: 35650 - protein, 12 aa, Homo sapiens
CARGTWVYFDNW

SEQ ID NO: 35651 - protein, 16 aa, Homo sapiens
CAPGWNIAVRRWFDPW

SEQ ID NO: 35652 - protein, 17 aa, Homo sapiens
CAREVYGNSVSRYMDVW

SEQ ID NO: 35653 - protein, 16 aa, Homo sapiens
CARGDGYNSDWHVDYW

SEQ ID NO: 35654 - protein, 18 aa, Homo sapiens
CARQWAVVPTATNYFDYW

SEQ ID NO: 35655 - protein, 15 aa, Homo sapiens
CARDGSSTDNWIDPW

SEQ ID NO: 35656 - protein, 15 aa, Homo sapiens
CASGGNSALDAFDIW

SEQ ID NO: 35657 - protein, 14 aa, Homo sapiens
CAIYSYGDSLFDFW

SEQ ID NO: 35658 - protein, 19 aa, Homo sapiens
CARDPPLRSSYYSYYMDVW

SEQ ID NO: 35659 - protein, 23 aa, Homo sapiens
CARAIQTVAGTHANLYYYYMDVW

SEQ ID NO: 35660 - protein, 17 aa, Homo sapiens
CARDYWGSWREHRFDSW

SEQ ID NO: 35661 - protein, 19 aa, Homo sapiens
CARVGEDSRGYYFGAFDFW

SEQ ID NO: 35662 - protein, 14 aa, Homo sapiens
CAKQGDRSSRFDPW

SEQ ID NO: 35663 - protein, 19 aa, Homo sapiens
CARSPNVEYGISGDYFDYW

SEQ ID NO: 35664 - protein, 19 aa, Homo sapiens
CVTERDPFGAYWRAYFPYW

SEQ ID NO: 35665 - protein, 12 aa, Homo sapiens
CQQLNGYPRLSF

SEQ ID NO: 35666 - protein, 17 aa, Homo sapiens
CARTDYYRSGTPYMDVW

SEQ ID NO: 35667 - protein, 18 aa, Homo sapiens
CTTDWEETTVVRAAFDIW

SEQ ID NO: 35668 - protein, 12 aa, Homo sapiens [sequence omitted]

SEQ ID NO: 35669 - protein, 18 aa, Homo sapiens
CAHLRSVYANNWYFFDYW

SEQ ID NO: 35670 - protein, 18 aa, Homo sapiens
CAKDFRVKWDPDGYFNYW

SEQ ID NO: 35671 - protein, 12 aa, Homo sapiens
CAREIDNWIDPW

SEQ ID NO: 35672 - protein, 15 aa, Homo sapiens
CTGRAATRPVFFDYW

SEQ ID NO: 35673 - protein, 19 aa, Homo sapiens
CARGEGRYQLFSSWYFDLW

SEQ ID NO: 35674 - protein, 16 aa, Homo sapiens
CARHWTSATGSNFDFW

SEQ ID NO: 35675 - protein, 17 aa, Homo sapiens
CAKRLVPLRATYAIDYW

SEQ ID NO: 35676 - protein, 11 aa, Homo sapiens
CAKDYYNFGYW

SEQ ID NO: 35677 - protein, 20 aa, Homo sapiens
CGSRNYDFLTGTTDYYMDVW

SEQ ID NO: 35678 - protein, 21 aa, Homo sapiens
CAHHPPHCTNGVCYHNWFDPW

SEQ ID NO: 35679 - protein, 22 aa, Homo sapiens
CARRRSLYDENTAYTFLHFDFW

SEQ ID NO: 35680 - protein, 19 aa, Homo sapiens
CARISTNNNYDSSGYYSYW

SEQ ID NO: 35681 - protein, 22 aa, Homo sapiens
CAKGLLLYYYDSSANIRLTDYW

SEQ ID NO: 35682 - protein, 18 aa, Homo sapiens
CARTGDGYSGMILDFDNW

SEQ ID NO: 35683 - protein, 12 aa, Homo sapiens
CTTVRYGDHDYW

SEQ ID NO: 35684 - protein, 21 aa, Homo sapiens
CVKDAYCGGNCYWDYYYMDVW

SEQ ID NO: 35685 - protein, 16 aa, Homo sapiens
CARGGLRFSEYYFDLW

SEQ ID NO: 35686 - protein, 13 aa, Homo sapiens
CAAGNDSPLFDNW

SEQ ID NO: 35687 - protein, 17 aa, Homo sapiens
CATGASGTYYSSSFVYW

SEQ ID NO: 35688 - protein, 21 aa, Homo sapiens
CARGYLYCQQTQCPRYYMDVW

SEQ ID NO: 35689 - protein, 22 aa, Homo sapiens
CARGRALMFTFGGVIGKFFDYW

SEQ ID NO: 35690 - protein, 17 aa, Homo sapiens
CARGPGSGTHLSAFDIW

SEQ ID NO: 35691 - protein, 18 aa, Homo sapiens
CASYKKINDDFYATFPYW

SEQ ID NO: 35692 - protein, 14 aa, Homo sapiens
CARDHSIGESWDYW

SEQ ID NO: 35693 - protein, 13 aa, Homo sapiens
CARASGDRWLDPW

SEQ ID NO: 35694 - protein, 18 aa, Homo sapiens
CAKPPREIQFWIDSFDVW

SEQ ID NO: 35695 - protein, 22 aa, Homo sapiens
CARTAGKNCAVGFCYMGGLDYW

SEQ ID NO: 35696 - protein, 16 aa, Homo sapiens
CARDQYSSSWGCFDYW

SEQ ID NO: 35697 - protein, 13 aa, Homo sapiens
CQSFDASLSGVIF

SEQ ID NO: 35698 - protein, 16 aa, Homo sapiens
CARVLHGSETYAPDYW

SEQ ID NO: 35699 - protein, 15 aa, Homo sapiens
CTTLAATASESFDYW

SEQ ID NO: 35700 - protein, 19 aa, Homo sapiens
CARDLFYNPGYSSGGIDYW

SEQ ID NO: 35701 - protein, 17 aa, Homo sapiens
CARDQDGVPRPYFFDYW

SEQ ID NO: 35702 - protein, 18 aa, Homo sapiens
CARVKIPAAGTPDVFDIW

SEQ ID NO: 35703 - protein, 14 aa, Homo sapiens
CARHASLYSTFDYW

SEQ ID NO: 35704 - protein, 19 aa, Homo sapiens
CARSPIGDGYTFQYYMDVW

SEQ ID NO: 35705 - protein, 21 aa, Homo sapiens
CAHNPSTAYDYVWGSYQLDYW

SEQ ID NO: 35706 - protein, 24 aa, Homo sapiens
CARVGPAYYDSSGYPYYCYYMDVW

SEQ ID NO: 35707 - protein, 10 aa, Homo sapiens
CQQRNSWHTF

SEQ ID NO: 35708 - protein, 17 aa, Homo sapiens
CTAPQPSIALPGIFDYW

SEQ ID NO: 35709 - protein, 18 aa, Homo sapiens
CAKDYFDNSDNYNWSDPW

SEQ ID NO: 35710 - protein, 14 aa, Homo sapiens
CVRDHLSFEWFDPW

SEQ ID NO: 35711 - protein, 18 aa, Homo sapiens
CARFPGENWNPTPWFDPW

SEQ ID NO: 35712 - protein, 13 aa, Homo sapiens
CNSRDTTGNHLLF

SEQ ID NO: 35713 - protein, 18 aa, Homo sapiens
CARTPHHSTVITPAFDFW

SEQ ID NO: 35714 - protein, 15 aa, Homo sapiens
CNSRDNSGHHVQVIF

SEQ ID NO: 35715 - protein, 16 aa, Homo sapiens
CVRDRDVVVQDYMDVW

SEQ ID NO: 35716 - protein, 22 aa, Homo sapiens
CARVEYSSSWSYFYYFYYMDVW

SEQ ID NO: 35717 - protein, 15 aa, Homo sapiens
CAREGGSGSSHYDYW

SEQ ID NO: 35718 - protein, 16 aa, Homo sapiens
CAKGFHDDTNTYDNYW

SEQ ID NO: 35719 - protein, 18 aa, Homo sapiens
CARLQGLGATGFSWFDPW

SEQ ID NO: 35720 - protein, 20 aa, Homo sapiens
CAREIPDYGDQSGSYYMDVW

SEQ ID NO: 35721 - protein, 18 aa, Homo sapiens
CARPAYTNLYFYYYMDVW

SEQ ID NO: 35722 - protein, 16 aa, Homo sapiens
CTRDAIFGGYDAFDIW

SEQ ID NO: 35723 - protein, 20 aa, Homo sapiens
CGKGYRVCSSDSCYGGTDYW

SEQ ID NO: 35724 - protein, 20 aa, Homo sapiens
CARDLGVRRWLQSEYYFDYW

SEQ ID NO: 35725 - protein, 19 aa, Homo sapiens
CARDLSPSGNYRPDYFDYW

SEQ ID NO: 35726 - protein, 17 aa, Homo sapiens
CARQRRDGGGIDAFDFW

SEQ ID NO: 35727 - protein, 19 aa, Homo sapiens
CARGPYYDFWSGYYTTDYW

SEQ ID NO: 35728 - protein, 18 aa, Homo sapiens
CAREGLFGDYGVGAFHIW

SEQ ID NO: 35729 - protein, 22 aa, Homo sapiens
CAKDFGIAENYYDFWSGYIDYW

SEQ ID NO: 35730 - protein, 15 aa, Homo sapiens
CASVAGNQYWYFDRW

SEQ ID NO: 35731 - protein, 15 aa, Homo sapiens
CTTAFGGRDDAFDFW

SEQ ID NO: 35732 - protein, 13 aa, Homo sapiens
CLLYYGGGQGWLF

SEQ ID NO: 35733 - protein, 20 aa, Homo sapiens
CASPYYYDSSGHYYHYMDVW

SEQ ID NO: 35734 - protein, 20 aa, Homo sapiens
CARDCLTLSARLCGETFDSW

SEQ ID NO: 35735 - protein, 17 aa, Homo sapiens
CARRPLGSTSYNAFDIW

SEQ ID NO: 35736 - protein, 19 aa, Homo sapiens
CARLDCGSTSCFGRYLEYW

SEQ ID NO: 35737 - protein, 16 aa, Homo sapiens
CASAPIATAWRYFDFW

SEQ ID NO: 35738 - protein, 18 aa, Homo sapiens
CARDGKALVVPAASFDYW

SEQ ID NO: 35739 - protein, 22 aa, Homo sapiens
CAKDMGRWGYYDSSGYYYKDYW

SEQ ID NO: 35740 - protein, 24 aa, Homo sapiens
CARSELQKTVIIPVVGVSYYMDVW

SEQ ID NO: 35741 - protein, 18 aa, Homo sapiens
CARDPHWGIFGEGGFDYW

SEQ ID NO: 35742 - protein, 21 aa, Homo sapiens
CARYKYGGHPNIDYYYYMDVW

SEQ ID NO: 35743 - protein, 18 aa, Homo sapiens
CVRGFGSGNGFTWYLDVW

SEQ ID NO: 35744 - protein, 18 aa, Homo sapiens
CAKDFGNTWGFYYYMDVW

SEQ ID NO: 35745 - protein, 19 aa, Homo sapiens
CARLYLSSSGYYKGGFDPW

SEQ ID NO: 35746 - protein, 21 aa, Homo sapiens
CASANYHFWSDYFSSYYIDVW

SEQ ID NO: 35747 - protein, 15 aa, Homo sapiens
CARLRPGTLSFFDFW

SEQ ID NO: 35748 - protein, 15 aa, Homo sapiens
CAGDPALSRNVFDLW

SEQ ID NO: 35749 - protein, 18 aa, Homo sapiens
CTRDYPLSMAARPGFDPW

SEQ ID NO: 35750 - protein, 19 aa, Homo sapiens
CATDPRHRGSEFLDAFDFW

SEQ ID NO: 35751 - protein, 16 aa, Homo sapiens
CATTPDSSGQDVFDIW

SEQ ID NO: 35752 - protein, 15 aa, Homo sapiens
CASGLRGVTKGFDYW

SEQ ID NO: 35753 - protein, 17 aa, Homo sapiens
CARMPEYSTSSVGFDFW

SEQ ID NO: 35754 - protein, 16 aa, Homo sapiens
CARVATYTSGFPFDSW

SEQ ID NO: 35755 - protein, 19 aa, Homo sapiens
CARLKGDFWSGYYNYFDYW

SEQ ID NO: 35756 - protein, 18 aa, Homo sapiens
CARSGTPKYSGHDEFKYW

SEQ ID NO: 35757 - protein, 19 aa, Homo sapiens
CAREPHLGVAGPYYYMDVW

SEQ ID NO: 35758 - protein, 20 aa, Homo sapiens
CARTTGYSNGWAEDCWFDPW

SEQ ID NO: 35759 - protein, 16 aa, Homo sapiens
CARDPQILPNNWFDPW

SEQ ID NO: 35760 - protein, 16 aa, Homo sapiens
CTTDKLHYGPSSFDYW

SEQ ID NO: 35761 - protein, 23 aa, Homo sapiens
CARDRTAEAHTYLGSYSYYMDVW

SEQ ID NO: 35762 - protein, 19 aa, Homo sapiens
CAKDGIGFYDNSGYYYDYW

SEQ ID NO: 35763 - protein, 18 aa, Homo sapiens
CAKDISIGSGWPRGFDKW

SEQ ID NO: 35764 - protein, 20 aa, Homo sapiens
CTRHSSQLLWLGGSGGFDVW

SEQ ID NO: 35765 - protein, 22 aa, Homo sapiens
CARSLGDLWSGYYKVPGFFDSW

SEQ ID NO: 35766 - protein, 18 aa, Homo sapiens
CVRDTAMVTGSSDGFDIW

SEQ ID NO: 35767 - protein, 19 aa, Homo sapiens
CARHLSGTYGRRDWYFDLW

SEQ ID NO: 35768 - protein, 19 aa, Homo sapiens
CARAAGYYDSSGPSPFDYW

SEQ ID NO: 35769 - protein, 18 aa, Homo sapiens
CAREQGSGSYYWAPFDMW

SEQ ID NO: 35770 - protein, 16 aa, Homo sapiens
CVRQTIYFGSGFFDLW

SEQ ID NO: 35771 - protein, 18 aa, Homo sapiens
CAKDRGGYSGYGPRFDYW

SEQ ID NO: 35772 - protein, 20 aa, Homo sapiens
CAKDPALYEQWLTRGGFDFW

SEQ ID NO: 35773 - protein, 21 aa, Homo sapiens
CARVFCWGGTCYDDRGSFDIW

SEQ ID NO: 35774 - protein, 21 aa, Homo sapiens
CARLGYCNSNGCPGYYYMDVW

SEQ ID NO: 35775 - protein, 19 aa, Homo sapiens
CAKNYDNSGYYSQFYFDYW

SEQ ID NO: 35776 - protein, 19 aa, Homo sapiens
CARGESSGWYRAPTYFDFW

SEQ ID NO: 35777 - protein, 18 aa, Homo sapiens
CAREIAVAAFDSYYFDYW

SEQ ID NO: 35778 - protein, 22 aa, Homo sapiens
CARAPLGYCSSTSCPGNWFDPW

SEQ ID NO: 35779 - protein, 14 aa, Homo sapiens
CAREPYSSSSVDYW

SEQ ID NO: 35780 - protein, 22 aa, Homo sapiens
CANLGGYRSYYYDSSGYFVDYW

SEQ ID NO: 35781 - protein, 19 aa, Homo sapiens
CARVGPLAGYYPNAYFTYW

SEQ ID NO: 35782 - protein, 17 aa, Homo sapiens
CAKHLTNRPYYYYMDVW

SEQ ID NO: 35783 - protein, 18 aa, Homo sapiens
CTKGGLVTPARSLGFDPW

SEQ ID NO: 35784 - protein, 24 aa, Homo sapiens
CAKDYHPLLRYFDWLSPWGPFDIW

SEQ ID NO: 35785 - protein, 15 aa, Homo sapiens
CARAWLEAELLIDYW

SEQ ID NO: 35786 - protein, 13 aa, Homo sapiens
CHQYGSAPPVFAF

SEQ ID NO: 35787 - protein, 15 aa, Homo sapiens
CAKGTGTTQGYFDYW

SEQ ID NO: 35788 - protein, 17 aa, Homo sapiens
CARAGPDSGWYPAFDIW

SEQ ID NO: 35789 - protein, 18 aa, Homo sapiens
CARHPWISFYDNSYIDVW

SEQ ID NO: 35790 - protein, 18 aa, Homo sapiens
CAKDFQVLGSHYYYMDVW

SEQ ID NO: 35791 - protein, 14 aa, Homo sapiens
CARAEVTVVKFDYW

SEQ ID NO: 35792 - protein, 18 aa, Homo sapiens
CVKIYYIYWSNYSSFDYW

SEQ ID NO: 35793 - protein, 16 aa, Homo sapiens
CARPIYRYGSGSFDLW

SEQ ID NO: 35794 - protein, 13 aa, Homo sapiens
CQVWDDRSDHVIF

SEQ ID NO: 35795 - protein, 15 aa, Homo sapiens
CATSSVVYRYYFDFW

SEQ ID NO: 35796 - protein, 20 aa, Homo sapiens
CVKGYCGIISCSRSIPFDSW

SEQ ID NO: 35797 - protein, 17 aa, Homo sapiens
CARENPRWEPYRAFDIW

SEQ ID NO: 35798 - protein, 11 aa, Homo sapiens
CSLYSGSFDYW

SEQ ID NO: 35799 - protein, 16 aa, Homo sapiens
CARSYYYERSAPEDYW

SEQ ID NO: 35800 - protein, 14 aa, Homo sapiens
CAREAGLYDFFDFW

SEQ ID NO: 35801 - protein, 19 aa, Homo sapiens
CARGRGYNWNYHYYYMDVW

SEQ ID NO: 35802 - protein, 18 aa, Homo sapiens
CARDANIVVVVGHAFDIW

SEQ ID NO: 35803 - protein, 15 aa, Homo sapiens
CARAVTPSHYYMDVW

SEQ ID NO: 35804 - protein, 20 aa, Homo sapiens
CARDYYDSSGYYYPGAFDIW

SEQ ID NO: 35805 - protein, 18 aa, Homo sapiens
CARGSRQPIIFYYYMDVW

SEQ ID NO: 35806 - protein, 14 aa, Homo sapiens
CQSADNSGTSRWMF

SEQ ID NO: 35807 - protein, 20 aa, Homo sapiens
CAKTRIAYCGGDSCSGLDYW

SEQ ID NO: 35808 - protein, 19 aa, Homo sapiens
CATLRRGSELGRGYYFDYW

SEQ ID NO: 35809 - protein, 17 aa, Homo sapiens
CARGIVGATRVIYFDFW

SEQ ID NO: 35810 - protein, 19 aa, Homo sapiens
CARGRYSSSSGNVNTHDYW

SEQ ID NO: 35811 - protein, 22 aa, Homo sapiens
CARDWARRDYYDHSNFDAVDIW

SEQ ID NO: 35812 - protein, 15 aa, Homo sapiens
CASPSTVTMLSFDTW

SEQ ID NO: 35813 - protein, 22 aa, Homo sapiens
CARLFDSTSFYYVQDYYYMDVW

SEQ ID NO: 35814 - protein, 16 aa, Homo sapiens
CARSYNFWREGYFDYW

SEQ ID NO: 35815 - protein, 22 aa, Homo sapiens
CARDTITMTVVDRGLVGYFDLW

SEQ ID NO: 35816 - protein, 21 aa, Homo sapiens
CARGRSTYYDSKNYYNYFDFW

SEQ ID NO: 35817 - protein, 15 aa, Homo sapiens
CARDSSGWGGRPDYW

SEQ ID NO: 35818 - protein, 21 aa, Homo sapiens
CARMRRTIFGVATTFDAFDIW

SEQ ID NO: 35819 - protein, 15 aa, Homo sapiens
CARGDGYNRRVFDYW

SEQ ID NO: 35820 - protein, 14 aa, Homo sapiens
CARRGDPVVDHDYW

SEQ ID NO: 35821 - protein, 19 aa, Homo sapiens
CARGPVPTYYGSGSYADYW

SEQ ID NO: 35822 - protein, 20 aa, Homo sapiens
CARDQHPNIVVVPTYYMDVW

SEQ ID NO: 35823 - protein, 23 aa, Homo sapiens
CARGLTASAYCPNGLCYRYFDYW

SEQ ID NO: 35824 - protein, 18 aa, Homo sapiens
CARMPGGRGYTYGFFDSW

SEQ ID NO: 35825 - protein, 18 aa, Homo sapiens
CAKDFYCSRSGCYGFDYW

SEQ ID NO: 35826 - protein, 17 aa, Homo sapiens
CARLLGDGYIARAFDFW

SEQ ID NO: 35827 - protein, 17 aa, Homo sapiens
CARHKWPAAIDYYMDVW

SEQ ID NO: 35828 - protein, 17 aa, Homo sapiens
CARSDYDSSGYGPFEYW

SEQ ID NO: 35829 - protein, 16 aa, Homo sapiens
CARLAWEVEDDAFDIW

SEQ ID NO: 35830 - protein, 14 aa, Homo sapiens
CAGGYSGYGPSDYW

SEQ ID NO: 35831 - protein, 14 aa, Homo sapiens
CATTGIAVSGGDYW

SEQ ID NO: 35832 - protein, 22 aa, Homo sapiens
CARGPTYCTNGVCYNPNYFDYW

SEQ ID NO: 35833 - protein, 18 aa, Homo sapiens
CAHRLGGYNWNDCYFDYW

SEQ ID NO: 35834 - protein, 16 aa, Homo sapiens
CARDPGKYGGYYMDVW

SEQ ID NO: 35835 - protein, 15 aa, Homo sapiens
CATSHGVAAAGPDYW

SEQ ID NO: 35836 - protein, 20 aa, Homo sapiens
CARDWLGKRYYVSGSYQDYW

SEQ ID NO: 35837 - protein, 17 aa, Homo sapiens
CARVTAGSDTGWCLDYW

SEQ ID NO: 35838 - protein, 17 aa, Homo sapiens
CAKDIGLINPLYYFDYW

SEQ ID NO: 35839 - protein, 13 aa, Homo sapiens
CARGDPAPEFVYW

SEQ ID NO: 35840 - protein, 19 aa, Homo sapiens
CARRGSGYSSGWPYYFDYW

SEQ ID NO: 35841 - protein, 16 aa, Homo sapiens
CARTLVKDYFYYMDVW

SEQ ID NO: 35842 - protein, 16 aa, Homo sapiens
CTRAREDSGYPFYDYW

SEQ ID NO: 35843 - protein, 16 aa, Homo sapiens
CARVRERLAQDAFDIW

SEQ ID NO: 35844 - protein, 17 aa, Homo sapiens
CGRPGRPHYYYFYMDVW

SEQ ID NO: 35845 - protein, 18 aa, Homo sapiens
CARAKPFASTGLYYFDYW

SEQ ID NO: 35846 - protein, 19 aa, Homo sapiens
CARGKAYSFGTPPRPYDYW

SEQ ID NO: 35847 - protein, 17 aa, Homo sapiens
CAKSRGAIRVLYYFDHW

SEQ ID NO: 35848 - protein, 20 aa, Homo sapiens
CARRSYDSRGYGGGYYFDSW

SEQ ID NO: 35849 - protein, 16 aa, Homo sapiens
CAHRQGPNSSGYFDYW

SEQ ID NO: 35850 - protein, 12 aa, Homo sapiens
CASTVVAYFDYW

SEQ ID NO: 35851 - protein, 20 aa, Homo sapiens
CARDMSLFWFGEGRRGFDPW

SEQ ID NO: 35852 - protein, 25 aa, Homo sapiens
CVKPASYGTAAANQDYYYYYYMDVW

SEQ ID NO: 35853 - protein, 26 aa, Homo sapiens
CARSRDAHYAILTSYSLAPPSLFDSW

SEQ ID NO: 35854 - protein, 33 aa, Homo sapiens
CARVGGSRSTTYNPPGGGRRPVQYSFRYYIDVW

SEQ ID NO: 35855 - protein, 17 aa, Homo sapiens
CARDVDGQQLDWHFDLW

SEQ ID NO: 35856 - protein, 16 aa, Homo sapiens
CANSVGPIATRPFDYW

SEQ ID NO: 35857 - protein, 15 aa, Homo sapiens
CARVHHWGQGWFGPW

SEQ ID NO: 35858 - protein, 16 aa, Homo sapiens
CARLSVAGTSWEFDYW

SEQ ID NO: 35859 - protein, 19 aa, Homo sapiens
CARHTAFWYSSSYGWFDPW

SEQ ID NO: 35860 - protein, 15 aa, Homo sapiens
CATGYYHDSTSFDYW

SEQ ID NO: 35861 - protein, 16 aa, Homo sapiens
CARHSGIGWYGGEDYW

SEQ ID NO: 35862 - protein, 14 aa, Homo sapiens
CARARQLRQYFDCW

SEQ ID NO: 35863 - protein, 15 aa, Homo sapiens
CARGAPGLVVPFDYW

SEQ ID NO: 35864 - protein, 13 aa, Homo sapiens
CARHRWELPFDSW

SEQ ID NO: 35865 - protein, 15 aa, Homo sapiens
CAYSKSYPPYYFDYW

SEQ ID NO: 35866 - protein, 13 aa, Homo sapiens
CARNFGVQNFDSW

SEQ ID NO: 35867 - protein, 19 aa, Homo sapiens
CARRRMAIPGRNFFYMDVW

SEQ ID NO: 35868 - protein, 18 aa, Homo sapiens
CASHSYDFWSGYYGFEYW

SEQ ID NO: 35869 - protein, 17 aa, Homo sapiens
CAGFRDGLQGTNYFDYW

SEQ ID NO: 35870 - protein, 23 aa, Homo sapiens
CARDSLSRSSGWSYPFSGWFDPW

SEQ ID NO: 35871 - protein, 15 aa, Homo sapiens
CARDHNWNDAGVDYW

SEQ ID NO: 35872 - protein, 18 aa, Homo sapiens
CARVDFTTWSSRDYFDSW

SEQ ID NO: 35873 - protein, 16 aa, Homo sapiens
CTSRPIVKRVGYFDYW

SEQ ID NO: 35874 - protein, 27 aa, Homo sapiens
CAKDVVANYYDSSSYYYVPPRYNFDYW

SEQ ID NO: 35875 - protein, 17 aa, Homo sapiens
CAKQTSSSWYGGAFDIW

SEQ ID NO: 35876 - protein, 17 aa, Homo sapiens
CARHCGRDCVFDTLDYW

SEQ ID NO: 35877 - protein, 17 aa, Homo sapiens
CARGLVYFDSTAYYGYW

SEQ ID NO: 35878 - protein, 15 aa, Homo sapiens
CASSRHSSSPPFDSW

SEQ ID NO: 35879 - protein, 18 aa, Homo sapiens
CATKWLGIVARLGYMDVW

SEQ ID NO: 35880 - protein, 21 aa, Homo sapiens
CATRTWGPVTGSLTLYYMDVW

SEQ ID NO: 35881 - protein, 13 aa, Homo sapiens
CAQGMAVGPLDYW

SEQ ID NO: 35882 - protein, 16 aa, Homo sapiens
CAKGSRWDNWNYFDFW

SEQ ID NO: 35883 - protein, 16 aa, Homo sapiens
CARFSVAASSWAFDIW

SEQ ID NO: 35884 - protein, 18 aa, Homo sapiens
CARDHNSGWSKEEYFQHW

SEQ ID NO: 35885 - protein, 16 aa, Homo sapiens
CARTEGATTGDAFDVW

SEQ ID NO: 35886 - protein, 25 aa, Homo sapiens
CARGRVDVTMTIVVVTAGSYYLDFW

SEQ ID NO: 35887 - protein, 16 aa, Homo sapiens
CAKDPGYDSSGYIDYW

SEQ ID NO: 35888 - protein, 20 aa, Homo sapiens
CARDREPLVGAAGQSAFDIW

SEQ ID NO: 35889 - protein, 13 aa, Homo sapiens
CVKDNNEFAFDYW

SEQ ID NO: 35890 - protein, 20 aa, Homo sapiens
CAHSPYYSDTITYSPHFDYW

SEQ ID NO: 35891 - protein, 16 aa, Homo sapiens
CVRDPSGERDYHFDLW

SEQ ID NO: 35892 - protein, 18 aa, Homo sapiens
CARGPRKQQLAPYYFDYW

SEQ ID NO: 35893 - protein, 20 aa, Homo sapiens
CARGRAEVGLYKRPYYFDSW

SEQ ID NO: 35894 - protein, 11 aa, Homo sapiens
CQHYNGYSGTF

SEQ ID NO: 35895 - protein, 15 aa, Homo sapiens
CAKEMGENDSSFDSW

SEQ ID NO: 35896 - protein, 18 aa, Homo sapiens
CAHSDESIAVVWHAFHIW

SEQ ID NO: 35897 - protein, 18 aa, Homo sapiens
CARDGRSSRWSVDWFDPW

SEQ ID NO: 35898 - protein, 18 aa, Homo sapiens
CAKESVLVVIPPAWFDQW

SEQ ID NO: 35899 - protein, 15 aa, Homo sapiens
CARVVSGWGDYFDSW

SEQ ID NO: 35900 - protein, 20 aa, Homo sapiens
CARMYSYYFGAGSSRPFDYW

SEQ ID NO: 35901 - protein, 21 aa, Homo sapiens
CARDRGRYFDWPRGDDAFDIW

SEQ ID NO: 35902 - protein, 19 aa, Homo sapiens
CARVDGWYSTAWNWYFDLW

SEQ ID NO: 35903 - protein, 16 aa, Homo sapiens
CARDPPSVNDYYFDYW

SEQ ID NO: 35904 - protein, 20 aa, Homo sapiens
CARDHDDFGDYGGSNRFDPW

SEQ ID NO: 35905 - protein, 14 aa, Homo sapiens
CAGQRGNTKYFQHW

SEQ ID NO: 35906 - protein, 14 aa, Homo sapiens
CAREDMNHYYMDVW

SEQ ID NO: 35907 - protein, 11 aa, Homo sapiens
CKQALQPPLVF

SEQ ID NO: 35908 - protein, 18 aa, Homo sapiens
CAKALGVATTRLSWFDPW

SEQ ID NO: 35909 - protein, 20 aa, Homo sapiens
CASNIAGRLRAPYYYYMDVW

SEQ ID NO: 35910 - protein, 15 aa, Homo sapiens
CARDRIAAAELYDYW

SEQ ID NO: 35911 - protein, 20 aa, Homo sapiens
CARAEHPEYNSSPRDPCDVW

SEQ ID NO: 35912 - protein, 19 aa, Homo sapiens
CARQANSGDYGNHDAFDIW

SEQ ID NO: 35913 - protein, 19 aa, Homo sapiens
CARGRLGSGSYFDYYMDVW

SEQ ID NO: 35914 - protein, 16 aa, Homo sapiens
CAKRVIPAANIYFDYW

SEQ ID NO: 35915 - protein, 16 aa, Homo sapiens
CANSYSRGPLYYFDYW

SEQ ID NO: 35916 - protein, 17 aa, Homo sapiens
CARADYGANSITAFHIW

SEQ ID NO: 35917 - protein, 16 aa, Homo sapiens
CAKGTVGATRGQSDYW

SEQ ID NO: 35918 - protein, 14 aa, Homo sapiens
CASQMFQPHAFDLW

SEQ ID NO: 35919 - protein, 19 aa, Homo sapiens
CATAHYDYVWGTYRPPDYW

SEQ ID NO: 35920 - protein, 19 aa, Homo sapiens
CARMTCWGGDCYGYYFDSW

SEQ ID NO: 35921 - protein, 14 aa, Homo sapiens
CARVAGRWLHIDYW

SEQ ID NO: 35922 - protein, 21 aa, Homo sapiens
CARATYYYDTSGPIGGYFDFW

SEQ ID NO: 35923 - protein, 12 aa, Homo sapiens
CGATGTHFFDYW

SEQ ID NO: 35924 - protein, 22 aa, Homo sapiens
CAKAVRGLSSGYYYRQGGFDPW

SEQ ID NO: 35925 - protein, 18 aa, Homo sapiens
CVKTSQWLAANVYSFDHW

SEQ ID NO: 35926 - protein, 19 aa, Homo sapiens
CAREVRQWLVLSYYYMDVW

SEQ ID NO: 35927 - protein, 16 aa, Homo sapiens
CAHRHIGQAAAFFDSW

SEQ ID NO: 35928 - protein, 13 aa, Homo sapiens
CTRLGPEDAFDIW

SEQ ID NO: 35929 - protein, 16 aa, Homo sapiens
CTRDPTGGSWPYFDLW

SEQ ID NO: 35930 - protein, 19 aa, Homo sapiens
CARTENIVLDAAAGAFDLW

SEQ ID NO: 35931 - protein, 15 aa, Homo sapiens
CARGNPHYSGLGDYW

SEQ ID NO: 35932 - protein, 19 aa, Homo sapiens
CARRPGGLWSGSYNWFDPW

SEQ ID NO: 35933 - protein, 20 aa, Homo sapiens
CAKGEKLGFGAGSHSDFGYW

SEQ ID NO: 35934 - protein, 24 aa, Homo sapiens
CARVALLGYFATSGHYAPDYFDPW

SEQ ID NO: 35935 - protein, 12 aa, Homo sapiens
CLSADSTGAWVF

SEQ ID NO: 35936 - protein, 20 aa, Homo sapiens
CARAHLVDEKEWDLDAFDIW

SEQ ID NO: 35937 - protein, 17 aa, Homo sapiens
CARGGIVLITNDPFDIW

SEQ ID NO: 35938 - protein, 17 aa, Homo sapiens
CAIFRTKWDNEDWFDPW

SEQ ID NO: 35939 - protein, 24 aa, Homo sapiens
CARGGPWGRGWSAEPFYYYYMDVW

SEQ ID NO: 35940 - protein, 17 aa, Homo sapiens
CARHFYYSGWPYYFDLW

SEQ ID NO: 35941 - protein, 20 aa, Homo sapiens
CARDPPPYYYDSSGYRFDYW

SEQ ID NO: 35942 - protein, 20 aa, Homo sapiens
CVRTQITMVRDWRPDPFDIW

SEQ ID NO: 35943 - protein, 19 aa, Homo sapiens
CARLPMQTLDYYHFYMDVW

SEQ ID NO: 35944 - protein, 18 aa, Homo sapiens
CAKAGTSQYYHYYYTDVW

SEQ ID NO: 35945 - protein, 21 aa, Homo sapiens
CARGGAYSSSSSPLPFHFDYW

SEQ ID NO: 35946 - protein, 18 aa, Homo sapiens
CATTSGIAVAGNTYFEYW

SEQ ID NO: 35947 - protein, 16 aa, Homo sapiens
CARAAFGRNPNWLDSW

SEQ ID NO: 35948 - protein, 16 aa, Homo sapiens
CAIDLLSRVSAAPDYW

SEQ ID NO: 35949 - protein, 24 aa, Homo sapiens
CAKSRPSNWGVFGPFYYYYYMDVW

SEQ ID NO: 35950 - protein, 19 aa, Homo sapiens
CARRPLTFGAYIADGFDSW

SEQ ID NO: 35951 - protein, 17 aa, Homo sapiens
CARDSYRGNPNDAFDIW

SEQ ID NO: 35952 - protein, 20 aa, Homo sapiens
CARRGWTGGSSTSSNWFDPW

SEQ ID NO: 35953 - protein, 27 aa, Homo sapiens
CARGIYTTDYGDYVPTNDQSYYYIDVW

SEQ ID NO: 35954 - protein, 16 aa, Homo sapiens
CARDADTAMPTPFDYW

SEQ ID NO: 35955 - protein, 14 aa, Homo sapiens
CARGEGEWLLFDHW

SEQ ID NO: 35956 - protein, 18 aa, Homo sapiens
CARDRGIAAGGDDPFDIW

SEQ ID NO: 35957 - protein, 18 aa, Homo sapiens
CARDHYDSSGYSHSFDVW

SEQ ID NO: 35958 - protein, 19 aa, Homo sapiens
CARAQRIGAALSSQSFDSW

SEQ ID NO: 35959 - protein, 20 aa, Homo sapiens
CARIIRGIGIDYYYYYMDVW

SEQ ID NO: 35960 - protein, 17 aa, Homo sapiens
CARDQRWYGEPRGFDVW

SEQ ID NO: 35961 - protein, 25 aa, Homo sapiens
CARLPNRVVYRPNTVTTFYDGFDIW

SEQ ID NO: 35962 - protein, 20 aa, Homo sapiens
CARGSWGGSTGFYPYSFDYW

SEQ ID NO: 35963 - protein, 19 aa, Homo sapiens
CARLGVPASMPISRYMDVW

SEQ ID NO: 35964 - protein, 16 aa, Homo sapiens
CARRQNVGADIAFDIW

SEQ ID NO: 35965 - protein, 26 aa, Homo sapiens
CARARDVVVAPGGSSRNNHAEYFQHW

SEQ ID NO: 35966 - protein, 17 aa, Homo sapiens
CARLGRKGYYGSGADYW

SEQ ID NO: 35967 - protein, 19 aa, Homo sapiens
CARDFKVRAAAGEVYFDYW

SEQ ID NO: 35968 - protein, 18 aa, Homo sapiens
CARTYSIGYTEKDAFDVW

SEQ ID NO: 35969 - protein, 12 aa, Homo sapiens
CARVGPQAFDYW

SEQ ID NO: 35970 - protein, 17 aa, Homo sapiens
CARSLAAAGHTAWFDPW

SEQ ID NO: 35971 - protein, 18 aa, Homo sapiens
CAREKHDVLTGYRYFDYW

SEQ ID NO: 35972 - protein, 15 aa, Homo sapiens
CARAFSSDWYYFDYW

SEQ ID NO: 35973 - protein, 16 aa, Homo sapiens
CARGPQFWSGGLFDYW

SEQ ID NO: 35974 - protein, 19 aa, Homo sapiens
CAKDRLLVVTPRGGYMDVW

SEQ ID NO: 35975 - protein, 19 aa, Homo sapiens
CAKSAQVFLKSNYWYFDFW

SEQ ID NO: 35976 - protein, 16 aa, Homo sapiens
CARDLHASSAGYFQHW

SEQ ID NO: 35977 - protein, 21 aa, Homo sapiens
CARDRLGGRKTGYSGDPFDMW

SEQ ID NO: 35978 - protein, 16 aa, Homo sapiens
CAREAKAMVVIPGDYW

SEQ ID NO: 35979 - protein, 14 aa, Homo sapiens
CVRGGTYDGYFQNW

SEQ ID NO: 35980 - protein, 19 aa, Homo sapiens
CARGVVGATGGPYWYFDLW

SEQ ID NO: 35981 - protein, 17 aa, Homo sapiens
CAKGGESSSWYQVGDYW

SEQ ID NO: 35982 - protein, 14 aa, Homo sapiens
CAISTAVAGIVDYW

SEQ ID NO: 35983 - protein, 23 aa, Homo sapiens
CARVVGNYYDSSGYYYVYYFDYW

SEQ ID NO: 35984 - protein, 21 aa, Homo sapiens
CARTPSRIAARGNYYYYMDVW

SEQ ID NO: 35985 - protein, 19 aa, Homo sapiens
CARPNYSSSPGSQLWFDPW

SEQ ID NO: 35986 - protein, 18 aa, Homo sapiens
CAKDQVENNANWDAFDIW

SEQ ID NO: 35987 - protein, 15 aa, Homo sapiens
CVKDSIEALGYFDSW

SEQ ID NO: 35988 - protein, 18 aa, Homo sapiens
CAKDTGATVITLNAFDIW

SEQ ID NO: 35989 - protein, 16 aa, Homo sapiens
CAGYRLPLSGGWFDPW

SEQ ID NO: 35990 - protein, 20 aa, Homo sapiens
CAKSSDSSIYPHLWGCFDLW

SEQ ID NO: 35991 - protein, 15 aa, Homo sapiens
CARVVEYSSTSPDYW

SEQ ID NO: 35992 - protein, 23 aa, Homo sapiens
CARDPRGRQLVPLPYYYYYMDVW

SEQ ID NO: 35993 - protein, 23 aa, Homo sapiens
CARGPRDTSGYYYRQTTYYIDSW

SEQ ID NO: 35994 - protein, 22 aa, Homo sapiens
CARGKRFFGLGPFEDYFYMDVW

SEQ ID NO: 35995 - protein, 18 aa, Homo sapiens
CARGNKGWNYWNNWFDPW

SEQ ID NO: 35996 - protein, 16 aa, Homo sapiens
CARGHRGGDYYYMDVW

SEQ ID NO: 35997 - protein, 20 aa, Homo sapiens
CARGRITIFGVVIPTWFDPW

SEQ ID NO: 35998 - protein, 15 aa, Homo sapiens
CARASSAVYPTFDYW

SEQ ID NO: 35999 - protein, 19 aa, Homo sapiens
CARLLYTGSGSYYSPIDYW

SEQ ID NO: 36000 - protein, 12 aa, Homo sapiens
CATYGNYSIDYW

SEQ ID NO: 36001 - protein, 18 aa, Homo sapiens
CAKSARDPGYSSSPVDYW

SEQ ID NO: 36002 - protein, 19 aa, Homo sapiens
CARVHDDVGIAANTWFDPW

SEQ ID NO: 36003 - protein, 15 aa, Homo sapiens
CARGDGGYYYLFDYW

SEQ ID NO: 36004 - protein, 15 aa, Homo sapiens
CARVLNGNYLHFDYW

SEQ ID NO: 36005 - protein, 15 aa, Homo sapiens
CAKLSSSGTFYDDYW

SEQ ID NO: 36006 - protein, 18 aa, Homo sapiens
CARDSISSRYSTNPHDYW

SEQ ID NO: 36007 - protein, 17 aa, Homo sapiens
CARGIHYGAGTYHFDYW

SEQ ID NO: 36008 - protein, 15 aa, Homo sapiens
CAKVRSWNDGGVDYW

SEQ ID NO: 36009 - protein, 13 aa, Homo sapiens
CTTYNPNDGRDYW

SEQ ID NO: 36010 - protein, 19 aa, Homo sapiens
CARGFLGGYNYGLYYMDVW

SEQ ID NO: 36011 - protein, 10 aa, Homo sapiens
CQTWDSDTVF

SEQ ID NO: 36012 - protein, 19 aa, Homo sapiens
CARQGGTYYDFWSYYFDYW

SEQ ID NO: 36013 - protein, 16 aa, Homo sapiens
CTRAASFGVVSTFDPW

SEQ ID NO: 36014 - protein, 18 aa, Homo sapiens
CARHGVYDSSGHDAFDIW

SEQ ID NO: 36015 - protein, 18 aa, Homo sapiens
CARRPRRFGQLSNYFDTW

SEQ ID NO: 36016 - protein, 15 aa, Homo sapiens
CARDRGDTGGYFDYW

SEQ ID NO: 36017 - protein, 17 aa, Homo sapiens
CARPHDYGDYESAFHIW

SEQ ID NO: 36018 - protein, 18 aa, Homo sapiens
CARGLVVITKNPNSFDYW

SEQ ID NO: 36019 - protein, 17 aa, Homo sapiens
CARDESNYYTGHYFKYW

SEQ ID NO: 36020 - protein, 15 aa, Homo sapiens
CARTPPWNNGAFDIW

SEQ ID NO: 36021 - protein, 20 aa, Homo sapiens
CTRDPYCGGDCTSQGYFNFW

SEQ ID NO: 36022 - protein, 21 aa, Homo sapiens
CARAQRLPDYHTSSRSAFDIW

SEQ ID NO: 36023 - protein, 15 aa, Homo sapiens
CARDVTIPNTPFDHW

SEQ ID NO: 36024 - protein, 19 aa, Homo sapiens
CARELGVLGDYTLDAFDIW

SEQ ID NO: 36025 - protein, 18 aa, Homo sapiens
CARRTYGWIGELGAFDYW

SEQ ID NO: 36026 - protein, 16 aa, Homo sapiens
CAKAHHDYVWGSFDSW

SEQ ID NO: 36027 - protein, 21 aa, Homo sapiens
CARERDPRDAYILRANYFDSW

SEQ ID NO: 36028 - protein, 14 aa, Homo sapiens
CARDSEGLYYFDSW

SEQ ID NO: 36029 - protein, 16 aa, Homo sapiens
CAKDLYSFRSSTFDYW

SEQ ID NO: 36030 - protein, 13 aa, Homo sapiens
CTRGPYSHYIDVW

SEQ ID NO: 36031 - protein, 20 aa, Homo sapiens
CARDALYSFWSGYSLNFDSW

SEQ ID NO: 36032 - protein, 18 aa, Homo sapiens
CTRDRDPGTNDPDVFDIW

SEQ ID NO: 36033 - protein, 17 aa, Homo sapiens
CARAQTAYYYHFYMDVW

SEQ ID NO: 36034 - protein, 17 aa, Homo sapiens
CAKDSIPIAAAAYFDSW

SEQ ID NO: 36035 - protein, 20 aa, Homo sapiens
CATDSGSGWYRFYHYYMDVW

SEQ ID NO: 36036 - protein, 16 aa, Homo sapiens
CAKNVWQTRNDGSDVW

SEQ ID NO: 36037 - protein, 15 aa, Homo sapiens
CARDLVDTAMAFDIW

SEQ ID NO: 36038 - protein, 11 aa, Homo sapiens [sequence omitted]

SEQ ID NO: 36039 - protein, 19 aa, Homo sapiens
CARVPVPRGVSRWHWFDPW

SEQ ID NO: 36040 - protein, 18 aa, Homo sapiens
CAHIPEGILWFGYSFDHW

SEQ ID NO: 36041 - protein, 23 aa, Homo sapiens
CARHKEERTALGSVRFPSALDVW

SEQ ID NO: 36042 - protein, 14 aa, Homo sapiens
CARDVGRSGYRDYW

SEQ ID NO: 36043 - protein, 22 aa, Homo sapiens
CARAGEYYDFWSGYYKGLFDYW

SEQ ID NO: 36044 - protein, 18 aa, Homo sapiens
CTRGPPGEWQIVTQFDYW

SEQ ID NO: 36045 - protein, 21 aa, Homo sapiens
CARDRGRIFGVSIIVDAFDIW

SEQ ID NO: 36046 - protein, 18 aa, Homo sapiens
CARLGGHTGAYNGAFDIW

SEQ ID NO: 36047 - protein, 16 aa, Homo sapiens
CARLKRGVVRGVFDYW

SEQ ID NO: 36048 - protein, 19 aa, Homo sapiens
CARDRFNQRPAAGTGWDYW

SEQ ID NO: 36049 - protein, 14 aa, Homo sapiens
CQSADSSSPYNFVF

SEQ ID NO: 36050 - protein, 14 aa, Homo sapiens
CARRMSNMLALDYW

SEQ ID NO: 36051 - protein, 16 aa, Homo sapiens
CARDALSHGDYTFDYW

SEQ ID NO: 36052 - protein, 22 aa, Homo sapiens
CARSAINGPCSGGSCPGWFDPW

SEQ ID NO: 36053 - protein, 16 aa, Homo sapiens
CTTEGTKVGAAVFDYW

SEQ ID NO: 36054 - protein, 12 aa, Homo sapiens
CARDQFAANDYW

SEQ ID NO: 36055 - protein, 20 aa, Homo sapiens
CARGLKRLSWYDSSDAFEIW

SEQ ID NO: 36056 - protein, 15 aa, Homo sapiens
CAKSIGSGLHGFDFW

SEQ ID NO: 36057 - protein, 17 aa, Homo sapiens
CARVSVSSGGLYAFDIW

SEQ ID NO: 36058 - protein, 24 aa, Homo sapiens
CARVAEGSYDFSTGYQGSYYFDKW

SEQ ID NO: 36059 - protein, 17 aa, Homo sapiens
CARVSEMIVVVNDFDYW

SEQ ID NO: 36060 - protein, 12 aa, Homo sapiens
CAYRYRDALAIW

SEQ ID NO: 36061 - protein, 17 aa, Homo sapiens
CVRDGIVGGARRWFDPW

SEQ ID NO: 36062 - protein, 14 aa, Homo sapiens
CARTIPFIAAFDSW

SEQ ID NO: 36063 - protein, 19 aa, Homo sapiens
CARAYGSGSYSSDDWFDPW

SEQ ID NO: 36064 - protein, 14 aa, Homo sapiens
CARDQGGDSGLDYW

SEQ ID NO: 36065 - protein, 30 aa, Homo sapiens
CAKGEDIVIVPDVIPAEMLTAATHHWFDPW

SEQ ID NO: 36066 - protein, 19 aa, Homo sapiens
CARVGSCGSTICSGWLDPW

SEQ ID NO: 36067 - protein, 17 aa, Homo sapiens
CAKATSGWYGFWYFDVW

SEQ ID NO: 36068 - protein, 24 aa, Homo sapiens
CASVARYYDILTGYYSRPMGFDYW

SEQ ID NO: 36069 - protein, 24 aa, Homo sapiens
CARVLGFPGIAATGASWEDVFDIW

SEQ ID NO: 36070 - protein, 14 aa, Homo sapiens
CARDQYDWGTFDIW

SEQ ID NO: 36071 - protein, 18 aa, Homo sapiens
CARDSSSYDTPGDNMDVW

SEQ ID NO: 36072 - protein, 16 aa, Homo sapiens
CAKDFYGSSPGRFDFW

SEQ ID NO: 36073 - protein, 19 aa, Homo sapiens
CGLSGPYVGGDYYYYIDVW

SEQ ID NO: 36074 - protein, 19 aa, Homo sapiens
CARDFLGQYDILTFSSDYW

SEQ ID NO: 36075 - protein, 15 aa, Homo sapiens
CARYLSSSPNWFDPW

SEQ ID NO: 36076 - protein, 14 aa, Homo sapiens
CARGRYMRGDFDYW

SEQ ID NO: 36077 - protein, 26 aa, Homo sapiens
CARGRKGADTAIQGSRLYFYYYLDVW

SEQ ID NO: 36078 - protein, 18 aa, Homo sapiens
CAAPHHDYWRGFPPFDDW

SEQ ID NO: 36079 - protein, 17 aa, Homo sapiens
CAKGWSGSYSQDAFDIW

SEQ ID NO: 36080 - protein, 18 aa, Homo sapiens
CARQLGYCSDGSCYFDNW

SEQ ID NO: 36081 - protein, 17 aa, Homo sapiens
CASWVRGTIIQGPIDYW

SEQ ID NO: 36082 - protein, 16 aa, Homo sapiens
CARETILSGYSSFDYW

SEQ ID NO: 36083 - protein, 18 aa, Homo sapiens
CARSPCVARRCLSYMDVW

SEQ ID NO: 36084 - protein, 16 aa, Homo sapiens
CARGVTALDPDAFDFW

SEQ ID NO: 36085 - protein, 15 aa, Homo sapiens
CAGDYGDYAVNFNYW

SEQ ID NO: 36086 - protein, 21 aa, Homo sapiens
CARLNYYDSSGYYYVAGFDPW

SEQ ID NO: 36087 - protein, 18 aa, Homo sapiens
CAKLLRGYNPRVDAFDVW

SEQ ID NO: 36088 - protein, 19 aa, Homo sapiens
CARVEGPYSSGWYNAFDIW

SEQ ID NO: 36089 - protein, 17 aa, Homo sapiens
CVRPLRPQRFPDAFHIW

SEQ ID NO: 36090 - protein, 16 aa, Homo sapiens
CARTGNSGLIDAFDMW

SEQ ID NO: 36091 - protein, 16 aa, Homo sapiens
CARDYCSGGTCFPDYW

SEQ ID NO: 36092 - protein, 16 aa, Homo sapiens
CAGVSRPYRYGQFDYW

SEQ ID NO: 36093 - protein, 25 aa, Homo sapiens
CTTGVMACTSSTCITDYYYYYMDVW

SEQ ID NO: 36094 - protein, 20 aa, Homo sapiens
CGRDPRGVDAYESWNYMDVW

SEQ ID NO: 36095 - protein, 14 aa, Homo sapiens
CARRNKWGCYIDFW

SEQ ID NO: 36096 - protein, 16 aa, Homo sapiens
CARALGVVVITTFDFW

SEQ ID NO: 36097 - protein, 19 aa, Homo sapiens
CARDSDISTGYSGNWFDPW

SEQ ID NO: 36098 - protein, 17 aa, Homo sapiens
CARSASQGYSMYHFDQW

SEQ ID NO: 36099 - protein, 18 aa, Homo sapiens
CARSTLWFGEWPYYFDQW

SEQ ID NO: 36100 - protein, 17 aa, Homo sapiens
CARDLNYYDSSGNFDYW

SEQ ID NO: 36101 - protein, 16 aa, Homo sapiens
CARWMGGSDHLYFDYW

SEQ ID NO: 36102 - protein, 15 aa, Homo sapiens
CASVRKGDWTLGDYW

SEQ ID NO: 36103 - protein, 15 aa, Homo sapiens
CARDNRDYSNWFDSW

SEQ ID NO: 36104 - protein, 21 aa, Homo sapiens
CARDLTNCSSTSCYRGWFDPW

SEQ ID NO: 36105 - protein, 21 aa, Homo sapiens
CAQFYCLGTGCYLPYNWFDPW

SEQ ID NO: 36106 - protein, 18 aa, Homo sapiens
CAKDQVYGFGHPDAFDFW

SEQ ID NO: 36107 - protein, 20 aa, Homo sapiens
CARRGIPSGWYRIPDAFDIW

SEQ ID NO: 36108 - protein, 12 aa, Homo sapiens
CAREVAATPDYW

SEQ ID NO: 36109 - protein, 18 aa, Homo sapiens
CAKDRRLRSQPQEGFDIW

SEQ ID NO: 36110 - protein, 16 aa, Homo sapiens
CARYDYGDYIAAFDIW

SEQ ID NO: 36111 - protein, 13 aa, Homo sapiens
CVRTVGSGWWDPW

SEQ ID NO: 36112 - protein, 14 aa, Homo sapiens
CVTSSSGYTTFDYW

SEQ ID NO: 36113 - protein, 21 aa, Homo sapiens
CATTTITVFGGVILPNWFDPW

SEQ ID NO: 36114 - protein, 17 aa, Homo sapiens
CARRRRAPGPLWYFDLW

SEQ ID NO: 36115 - protein, 21 aa, Homo sapiens
CVKEAARRWGTVVTLDAFDVW

SEQ ID NO: 36116 - protein, 18 aa, Homo sapiens
CAKVAAAGFFYYYYMDLW

SEQ ID NO: 36117 - protein, 15 aa, Homo sapiens
CATFFYYDNSGPDYW

SEQ ID NO: 36118 - protein, 13 aa, Homo sapiens
CARMGVSHARDYW

SEQ ID NO: 36119 - protein, 17 aa, Homo sapiens
CARRLSLWSGDIHFDYW

SEQ ID NO: 36120 - protein, 19 aa, Homo sapiens
CARDTGATVVTQVGAFDIW

SEQ ID NO: 36121 - protein, 15 aa, Homo sapiens
CAKQVATGYWYFDLW

SEQ ID NO: 36122 - protein, 18 aa, Homo sapiens
CARALPQGSGDKIGFDYW

SEQ ID NO: 36123 - protein, 16 aa, Homo sapiens
CARGRIWFGELEGDYW

SEQ ID NO: 36124 - protein, 18 aa, Homo sapiens
CARKAWGTSSPHSWFDPW

SEQ ID NO: 36125 - protein, 20 aa, Homo sapiens
CARPTYYYDSSGSPFTFDIW

SEQ ID NO: 36126 - protein, 23 aa, Homo sapiens
CAKSSRAGLVADPVAIFRWFDPW

SEQ ID NO: 36127 - protein, 22 aa, Homo sapiens
CARDYRRWAAAGNYYYYYMDVW

SEQ ID NO: 36128 - protein, 17 aa, Homo sapiens
CATGRKWEALRGYLDHW

SEQ ID NO: 36129 - protein, 17 aa, Homo sapiens
CARRPDYYGSGSPFDYW

SEQ ID NO: 36130 - protein, 19 aa, Homo sapiens
CVRHSRGYYYDSSAYLDSW

SEQ ID NO: 36131 - protein, 15 aa, Homo sapiens
CATVRGISMGAFDMW

SEQ ID NO: 36132 - protein, 18 aa, Homo sapiens
CARDYCSTTSCRHYAVYW

SEQ ID NO: 36133 - protein, 19 aa, Homo sapiens
CARTLTPQWEPSGIWFDPW

SEQ ID NO: 36134 - protein, 17 aa, Homo sapiens
CARLGLIGVAGTGVDYW

SEQ ID NO: 36135 - protein, 15 aa, Homo sapiens
CALGGLHPNYFFDFW

SEQ ID NO: 36136 - protein, 18 aa, Homo sapiens
CTRDGGATMADSWGFDYW

SEQ ID NO: 36137 - protein, 13 aa, Homo sapiens
CARADITSLPDYW

SEQ ID NO: 36138 - protein, 17 aa, Homo sapiens
CARDIVATTDSTTVDYW

SEQ ID NO: 36139 - protein, 17 aa, Homo sapiens
CTCDLIMSYPIYAFDMW

SEQ ID NO: 36140 - protein, 17 aa, Homo sapiens
CARSGYSYGPIGYFDSW

SEQ ID NO: 36141 - protein, 15 aa, Homo sapiens
CARVRAGSGYRFDSW

SEQ ID NO: 36142 - protein, 19 aa, Homo sapiens
CAHNALNDPDYGGNSFDYW

SEQ ID NO: 36143 - protein, 12 aa, Homo sapiens
CAAWAASLNGLF

SEQ ID NO: 36144 - protein, 21 aa, Homo sapiens
CAKVGPRSMVITRWAAFFDYW

SEQ ID NO: 36145 - protein, 21 aa, Homo sapiens
CARAAEGSTSWYYYYFYMDVW

SEQ ID NO: 36146 - protein, 16 aa, Homo sapiens
CARTYGDYMGGIFDYW

SEQ ID NO: 36147 - protein, 15 aa, Homo sapiens
CGGGNEFYYYYMDVW

SEQ ID NO: 36148 - protein, 22 aa, Homo sapiens
CVRGSSDDYSTSGSYKGAFDYW

SEQ ID NO: 36149 - protein, 18 aa, Homo sapiens
CAHRRWVMTREAITFDFW

SEQ ID NO: 36150 - protein, 14 aa, Homo sapiens
CTTATWNYGFFDYW

SEQ ID NO: 36151 - protein, 16 aa, Homo sapiens
CAISRTVTIRNWFDPW

SEQ ID NO: 36152 - protein, 16 aa, Homo sapiens
CARHRRSSGYDAFDYW

SEQ ID NO: 36153 - protein, 18 aa, Homo sapiens
CVRDSNMLVYSDEYFQDW

SEQ ID NO: 36154 - protein, 16 aa, Homo sapiens
CARVGYSYALYYFDNW

SEQ ID NO: 36155 - protein, 17 aa, Homo sapiens
CARHSKSLVKIRYFDYW

SEQ ID NO: 36156 - protein, 22 aa, Homo sapiens
CARVPYVSYYDILTGHSPPDYW

SEQ ID NO: 36157 - protein, 17 aa, Homo sapiens
CARVGHSSGSFAGFDYW

SEQ ID NO: 36158 - protein, 16 aa, Homo sapiens
CARESGYDDTWYFDLW

SEQ ID NO: 36159 - protein, 20 aa, Homo sapiens
CARGGDISTGYKSRGWFDTW

SEQ ID NO: 36160 - protein, 17 aa, Homo sapiens
CARGWKQYVLGNWFDPW

SEQ ID NO: 36161 - protein, 18 aa, Homo sapiens
CAKGVFQNHLLPDAFDVW

SEQ ID NO: 36162 - protein, 18 aa, Homo sapiens
CARDRGDYVWGSHPLDYW

SEQ ID NO: 36163 - protein, 23 aa, Homo sapiens
CAKEGQTYYYDSSGYYGWYFDLW

SEQ ID NO: 36164 - protein, 23 aa, Homo sapiens
CARDGNYGTMVRGVPIADYHQHW

SEQ ID NO: 36165 - protein, 17 aa, Homo sapiens
CVRLVTSSRFRDGFDVW

SEQ ID NO: 36166 - protein, 22 aa, Homo sapiens
CAKALHPTKGWSNHQYYYMDVW

SEQ ID NO: 36167 - protein, 18 aa, Homo sapiens
CARDGDWGVAPGYWFDPW

SEQ ID NO: 36168 - protein, 15 aa, Homo sapiens
CARGGPEKATTFDYW

SEQ ID NO: 36169 - protein, 11 aa, Homo sapiens
CAAGLRGLDYW

SEQ ID NO: 36170 - protein, 15 aa, Homo sapiens
CARDRSVTQNFFDYW

SEQ ID NO: 36171 - protein, 20 aa, Homo sapiens
CARDRKYSSSWYGDDIFDIW

SEQ ID NO: 36172 - protein, 16 aa, Homo sapiens
CARVIAVAGQGDFDSW

SEQ ID NO: 36173 - protein, 20 aa, Homo sapiens
CAKTHWGGYYLYNHYYMDVW

SEQ ID NO: 36174 - protein, 17 aa, Homo sapiens
CAKAATGVAAAGILDYW

SEQ ID NO: 36175 - protein, 15 aa, Homo sapiens
CTRSHSSGLDAFDIW

SEQ ID NO: 36176 - protein, 17 aa, Homo sapiens
CARAGEQWFQSFYFDYW

SEQ ID NO: 36177 - protein, 18 aa, Homo sapiens
CAKGRYYDFWSGYLFDNW

SEQ ID NO: 36178 - protein, 17 aa, Homo sapiens
CTFYDIWSGSYPPVDYW

SEQ ID NO: 36179 - protein, 19 aa, Homo sapiens
CARRNFGITTPGTNYFDYW

SEQ ID NO: 36180 - protein, 18 aa, Homo sapiens
CVKDGETAEGVAPSDDYW

SEQ ID NO: 36181 - protein, 27 aa, Homo sapiens
CATSPRRPPYYYDSSGSPFDYYYMDVW

SEQ ID NO: 36182 - protein, 16 aa, Homo sapiens
CASHGVSVWYYYMDVW

SEQ ID NO: 36183 - protein, 14 aa, Homo sapiens
CARCFSPEALFDPW

SEQ ID NO: 36184 - protein, 16 aa, Homo sapiens
CARRIEVMTTASFDYW

SEQ ID NO: 36185 - protein, 14 aa, Homo sapiens
CAGESGYGHAFDIW

SEQ ID NO: 36186 - protein, 14 aa, Homo sapiens
CAHKMMLIRAFDVW

SEQ ID NO: 36187 - protein, 23 aa, Homo sapiens
CARGSWNDVASPYYYYYYYMDVW

SEQ ID NO: 36188 - protein, 16 aa, Homo sapiens
CARRDDYFRPDAFDLW

SEQ ID NO: 36189 - protein, 18 aa, Homo sapiens
CAKDFRYSSSRGDALDIW

SEQ ID NO: 36190 - protein, 23 aa, Homo sapiens
CARGARYCSGGSCYWRGYYPDHW

SEQ ID NO: 36191 - protein, 19 aa, Homo sapiens
CARTTVVRSWYSYYYMDVW

SEQ ID NO: 36192 - protein, 16 aa, Homo sapiens
CARGRVGRLYFYMDVW

SEQ ID NO: 36193 - protein, 15 aa, Homo sapiens
CARRPADATHAFDVW

SEQ ID NO: 36194 - protein, 17 aa, Homo sapiens
CARGLYFYDGSAYWGYW

SEQ ID NO: 36195 - protein, 14 aa, Homo sapiens
CVRDGAKGEGFDYW

SEQ ID NO: 36196 - protein, 20 aa, Homo sapiens
CARSPNGYYPTQDNWYFDLW

SEQ ID NO: 36197 - protein, 19 aa, Homo sapiens
CVRDRVDTSLDGGDIFDYW

SEQ ID NO: 36198 - protein, 20 aa, Homo sapiens
CARLHPHFIDSGTYNWFDPW

SEQ ID NO: 36199 - protein, 17 aa, Homo sapiens
CARGRGYSYGLDYMDVW

SEQ ID NO: 36200 - protein, 13 aa, Homo sapiens
CARREFGGSFDNW

SEQ ID NO: 36201 - protein, 15 aa, Homo sapiens
CAHRPSLQVWYFDFW

SEQ ID NO: 36202 - protein, 20 aa, Homo sapiens
CARDITMVRGVNGLGAFDVW

SEQ ID NO: 36203 - protein, 12 aa, Homo sapiens
CMQSVQPPPFTF

SEQ ID NO: 36204 - protein, 13 aa, Homo sapiens
CAKTHSGWHFDFW

SEQ ID NO: 36205 - protein, 16 aa, Homo sapiens
CARGRITGTLGYFDSW

SEQ ID NO: 36206 - protein, 18 aa, Homo sapiens
CARDRNSGYDWAYYMDVW

SEQ ID NO: 36207 - protein, 19 aa, Homo sapiens
CAREMSRLQSLDRDSFDIW

SEQ ID NO: 36208 - protein, 17 aa, Homo sapiens
CAKVKVVYATEGWFDPW

SEQ ID NO: 36209 - protein, 15 aa, Homo sapiens
CASRVGTGNTAFDVW

SEQ ID NO: 36210 - protein, 22 aa, Homo sapiens
CAREGVSSSSSGYYYVDYLDFW

SEQ ID NO: 36211 - protein, 17 aa, Homo sapiens
CARDLYVWGNYNAFDVW

SEQ ID NO: 36212 - protein, 16 aa, Homo sapiens
CAADLPNYGSGEFDFW

SEQ ID NO: 36213 - protein, 16 aa, Homo sapiens
CARSDYGDYKTTSDYW

SEQ ID NO: 36214 - protein, 20 aa, Homo sapiens
CARSQYNWVWDTTPTLFDYW

SEQ ID NO: 36215 - protein, 23 aa, Homo sapiens
CVHAQIYVFWSGSRRSPTMFDPW

SEQ ID NO: 36216 - protein, 22 aa, Homo sapiens
CARLPTYYYGSGNKNLGWFDPW

SEQ ID NO: 36217 - protein, 22 aa, Homo sapiens
CVRDPRTREYCGSTSPYYFDYW

SEQ ID NO: 36218 - protein, 23 aa, Homo sapiens
CARGTDRFCDSTSCASAPDLDYW

SEQ ID NO: 36219 - protein, 20 aa, Homo sapiens
CARVPRAPSGNNTWAYFDRW

SEQ ID NO: 36220 - protein, 15 aa, Homo sapiens
CARQSDGYNGSADYW

SEQ ID NO: 36221 - protein, 13 aa, Homo sapiens
CQHYNNWPPPYAF

SEQ ID NO: 36222 - protein, 19 aa, Homo sapiens
CARVVAADDYGDYSGIDYW

SEQ ID NO: 36223 - protein, 20 aa, Homo sapiens
CAKDPRIYSNVWYINWFDPW

SEQ ID NO: 36224 - protein, 14 aa, Homo sapiens
CLQHKSYPRGALTF

SEQ ID NO: 36225 - protein, 20 aa, Homo sapiens
CARDGEGTYYPTGQGWFDPW

SEQ ID NO: 36226 - protein, 18 aa, Homo sapiens
CARTSLSSGWFQVYFDFW

SEQ ID NO: 36227 - protein, 18 aa, Homo sapiens
CAKNLYSRGYSYGIFDYW

SEQ ID NO: 36228 - protein, 25 aa, Homo sapiens
CAREGVTMVRGVIGQVDYYYYMDVW

SEQ ID NO: 36229 - protein, 17 aa, Homo sapiens
CAKDTPHDYVWGYFDYW

SEQ ID NO: 36230 - protein, 19 aa, Homo sapiens
CARDSKYYYNRSGPHFDYW

SEQ ID NO: 36231 - protein, 14 aa, Homo sapiens
CVRDIDGPQAFDYW

SEQ ID NO: 36232 - protein, 18 aa, Homo sapiens
CARALDYGDYDPVPFDHW

SEQ ID NO: 36233 - protein, 17 aa, Homo sapiens
CVREPSQQLVHETFDYW

SEQ ID NO: 36234 - protein, 19 aa, Homo sapiens
CARAREYYPSGSGGTFDIW

SEQ ID NO: 36235 - protein, 20 aa, Homo sapiens
CARFFGWGSVTYYNDGFDIW

SEQ ID NO: 36236 - protein, 14 aa, Homo sapiens
CARDQGSAEYEGYW

SEQ ID NO: 36237 - protein, 21 aa, Homo sapiens
CARYAYYGDHDPYYYYYMDVW

SEQ ID NO: 36238 - protein, 20 aa, Homo sapiens
CARGQPGALVSGYRYWFDPW

SEQ ID NO: 36239 - protein, 16 aa, Homo sapiens
CVRREGSGWNVYFEFW

SEQ ID NO: 36240 - protein, 14 aa, Homo sapiens
CASYTSSSGVFDIW

SEQ ID NO: 36241 - protein, 24 aa, Homo sapiens
CARGTVLQHLDWHQSYFQCYMDVW

SEQ ID NO: 36242 - protein, 16 aa, Homo sapiens
CATGTVTTFTAYFALW

SEQ ID NO: 36243 - protein, 17 aa, Homo sapiens
CARGDSRYYNFYYMDVW

SEQ ID NO: 36244 - protein, 17 aa, Homo sapiens
CARDPYITPERRAFDIW

SEQ ID NO: 36245 - protein, 19 aa, Homo sapiens
CARDRREWLRSQEVYFDYW

SEQ ID NO: 36246 - protein, 16 aa, Homo sapiens
CARDLSAYGSPHFDYW

SEQ ID NO: 36247 - protein, 18 aa, Homo sapiens
CARGSHRAMVTLGAFDIW

SEQ ID NO: 36248 - protein, 16 aa, Homo sapiens
CAKGYYGSIVDAFDIW

SEQ ID NO: 36249 - protein, 18 aa, Homo sapiens
CARGGGYSSRATWGFDFW

SEQ ID NO: 36250 - protein, 18 aa, Homo sapiens
CAKDTFGVGATTSYFDYW

SEQ ID NO: 36251 - protein, 17 aa, Homo sapiens
CARQPYRNYLGKTFDVW

SEQ ID NO: 36252 - protein, 19 aa, Homo sapiens
CARDWDFAMYTQNDAFDFW

SEQ ID NO: 36253 - protein, 13 aa, Homo sapiens
CARGGGTEKFDFW

SEQ ID NO: 36254 - protein, 13 aa, Homo sapiens
CARRRPPVWFDPW

SEQ ID NO: 36255 - protein, 16 aa, Homo sapiens
CARLRAVAGARYFDYW

SEQ ID NO: 36256 - protein, 24 aa, Homo sapiens
CVRSQTSVYGSGSSSVTTDYFDYW

SEQ ID NO: 36257 - protein, 13 aa, Homo sapiens [sequence omitted]

SEQ ID NO: 36258 - protein, 24 aa, Homo sapiens
CARAPEYYYDTSGYYYALDAFDIW

SEQ ID NO: 36259 - protein, 20 aa, Homo sapiens
CARGLSYGGNLGLPYYMDVW

SEQ ID NO: 36260 - protein, 20 aa, Homo sapiens
CATLQSNYDRNGYFLYFDYW

SEQ ID NO: 36261 - protein, 17 aa, Homo sapiens
CARGGYDSRGNNAFDLW

SEQ ID NO: 36262 - protein, 19 aa, Homo sapiens
CVKDQGPNWDSNNSYMDVW

SEQ ID NO: 36263 - protein, 13 aa, Homo sapiens
CEAWDTSLSALLF

SEQ ID NO: 36264 - protein, 12 aa, Homo sapiens
CARGVADYFHYW

SEQ ID NO: 36265 - protein, 21 aa, Homo sapiens
CARDFGTMVLQYVDREELDYW

SEQ ID NO: 36266 - protein, 16 aa, Homo sapiens
CAKSPTGYSGTHFDYW

SEQ ID NO: 36267 - protein, 20 aa, Homo sapiens
CARGRNTYYSGWDYYYMDVW

SEQ ID NO: 36268 - protein, 19 aa, Homo sapiens
CAKDRYSSSWYDKYYFDYW

SEQ ID NO: 36269 - protein, 17 aa, Homo sapiens
CANDLYYYDSSGYYSYW

SEQ ID NO: 36270 - protein, 15 aa, Homo sapiens
CFADVPSVIYPFDFW

SEQ ID NO: 36271 - protein, 21 aa, Homo sapiens
CARHTYYDFLNAYSKGWFDLW

SEQ ID NO: 36272 - protein, 14 aa, Homo sapiens
CGTWDSSLNPGEIF

SEQ ID NO: 36273 - protein, 14 aa, Homo sapiens
CVRHFSGYTWPDSW

SEQ ID NO: 36274 - protein, 14 aa, Homo sapiens
CAKGELLVDEFDHW

SEQ ID NO: 36275 - protein, 16 aa, Homo sapiens
CASFSGDFVGGGFDYW

SEQ ID NO: 36276 - protein, 16 aa, Homo sapiens
CVRSYYDSSGIPPDYW

SEQ ID NO: 36277 - protein, 26 aa, Homo sapiens
CARASSPWDDYGDYGNDAVDWHFDLW

SEQ ID NO: 36278 - protein, 15 aa, Homo sapiens
CARGGTGTTGYFDSW

SEQ ID NO: 36279 - protein, 19 aa, Homo sapiens
CATFNPGYSSAWDNLFDHW

SEQ ID NO: 36280 - protein, 12 aa, Homo sapiens
CQQYESSQGYIF

SEQ ID NO: 36281 - protein, 17 aa, Homo sapiens
CAREGGPMGIPDAFDIW

SEQ ID NO: 36282 - protein, 17 aa, Homo sapiens
CARGPYTSSFPAYFDYW

SEQ ID NO: 36283 - protein, 23 aa, Homo sapiens
CARGTWPPARIRIVGATDAFGLW

SEQ ID NO: 36284 - protein, 18 aa, Homo sapiens
CARARADSSGGWYFFDNW

SEQ ID NO: 36285 - protein, 19 aa, Homo sapiens
CARHVRAVAAQGYNWLDPW

SEQ ID NO: 36286 - protein, 20 aa, Homo sapiens
CARGRKILGVVFKFGWFDPW

SEQ ID NO: 36287 - protein, 15 aa, Homo sapiens
CARAYSNMPNYFDYW

SEQ ID NO: 36288 - protein, 20 aa, Homo sapiens
CARLGGSGTYYSMEYTFDVW

SEQ ID NO: 36289 - protein, 18 aa, Homo sapiens
CARAPQFDLWSGYIFDYW

SEQ ID NO: 36290 - protein, 23 aa, Homo sapiens
CATVSPPDYYDSSGYYYSWFDPW

SEQ ID NO: 36291 - protein, 14 aa, Homo sapiens
CVRDGPPLYPFDYW

SEQ ID NO: 36292 - protein, 18 aa, Homo sapiens
CARAQDYTTVMRGGQDYW

SEQ ID NO: 36293 - protein, 17 aa, Homo sapiens
CAVFSGGDYETDAFDIW

SEQ ID NO: 36294 - protein, 15 aa, Homo sapiens
CARGPSGWFLNFDYW

SEQ ID NO: 36295 - protein, 13 aa, Homo sapiens
CAREEWMHWVDPW

SEQ ID NO: 36296 - protein, 14 aa, Homo sapiens
CARFIISLDIFDIW

SEQ ID NO: 36297 - protein, 21 aa, Homo sapiens
CARAVAARHNDFYYYYYMDVW

SEQ ID NO: 36298 - protein, 16 aa, Homo sapiens
CARRLHDYDVADFDLW

SEQ ID NO: 36299 - protein, 15 aa, Homo sapiens
CAREGSTVTPYFDYW

SEQ ID NO: 36300 - protein, 14 aa, Homo sapiens
CAREGSNNWSFDYW

SEQ ID NO: 36301 - protein, 17 aa, Homo sapiens
CARTKTRRGYSYGLDYW

SEQ ID NO: 36302 - protein, 18 aa, Homo sapiens
CARLHPLYNWNPGSFDVW

SEQ ID NO: 36303 - protein, 19 aa, Homo sapiens
CARSLFPYSGSFWHAFDYW

SEQ ID NO: 36304 - protein, 21 aa, Homo sapiens
CVRPTEHCSGGRCPMYYFDLW

SEQ ID NO: 36305 - protein, 18 aa, Homo sapiens
CATAMKEQPWLHRPFEYW

SEQ ID NO: 36306 - protein, 22 aa, Homo sapiens
CARRGRDYEVGAYYYYYYMDVW

SEQ ID NO: 36307 - protein, 17 aa, Homo sapiens
CARGGFSGWLKDYFDYW

SEQ ID NO: 36308 - protein, 20 aa, Homo sapiens
CASPQDLGYNYGNDDSFDFW

SEQ ID NO: 36309 - protein, 16 aa, Homo sapiens
CVRDRSDVGARWFDPW

SEQ ID NO: 36310 - protein, 23 aa, Homo sapiens
CARDRSVVVTATSAVYYYYMDVW

SEQ ID NO: 36311 - protein, 22 aa, Homo sapiens
CARDIRREIIYCGSSSCYLEYW

SEQ ID NO: 36312 - protein, 14 aa, Homo sapiens [sequence omitted]

SEQ ID NO: 36313 - protein, 13 aa, Homo sapiens
CATYSSTNAFDVW

SEQ ID NO: 36314 - protein, 14 aa, Homo sapiens
CARLVDIVSWCDYW

SEQ ID NO: 36315 - protein, 17 aa, Homo sapiens
CARSLGGYDLGYYFDYW

SEQ ID NO: 36316 - protein, 21 aa, Homo sapiens
CAREGDVYNYGFFQGFSFDMW

SEQ ID NO: 36317 - protein, 15 aa, Homo sapiens
CVRGRDYWNYHFDSW

SEQ ID NO: 36318 - protein, 15 aa, Homo sapiens
CGRATDFFFDVFEYW

SEQ ID NO: 36319 - protein, 11 aa, Homo sapiens
CSRKADVLDYW

SEQ ID NO: 36320 - protein, 21 aa, Homo sapiens
CARDSPVYGDYFLGGDAFDIW

SEQ ID NO: 36321 - protein, 15 aa, Homo sapiens
CARMYDFWSGYLDHW

SEQ ID NO: 36322 - protein, 17 aa, Homo sapiens
CVRGRWGSLRSYYFDYW

SEQ ID NO: 36323 - protein, 16 aa, Homo sapiens
CARGEYYYDPNWFDPW

SEQ ID NO: 36324 - protein, 16 aa, Homo sapiens
CARRVGGYNYGYEDYW

SEQ ID NO: 36325 - protein, 13 aa, Homo sapiens
CQVWESSPALWVF

SEQ ID NO: 36326 - protein, 13 aa, Homo sapiens
CARVERYRWFDPW

SEQ ID NO: 36327 - protein, 15 aa, Homo sapiens
CARPQIGSADAYDVW

SEQ ID NO: 36328 - protein, 15 aa, Homo sapiens
CAKGRGYSYDPIDYW

SEQ ID NO: 36329 - protein, 18 aa, Homo sapiens
CARGVITFGGTIAIGDYW

SEQ ID NO: 36330 - protein, 21 aa, Homo sapiens
CARDAYIAAASSRRGDAFDIW

SEQ ID NO: 36331 - protein, 18 aa, Homo sapiens
CAREYMTGTVGTDTFDIW

SEQ ID NO: 36332 - protein, 13 aa, Homo sapiens
CARDSFNDYFDLW

SEQ ID NO: 36333 - protein, 16 aa, Homo sapiens
CVKGGGWGRPGYFEYW

SEQ ID NO: 36334 - protein, 17 aa, Homo sapiens
CAKEPSTVARRNWFDPW

SEQ ID NO: 36335 - protein, 18 aa, Homo sapiens
CAKDPSNGWVNGVAFDHW

SEQ ID NO: 36336 - protein, 20 aa, Homo sapiens
CARDTFAYYDFSYYYGMDVW

SEQ ID NO: 36337 - protein, 21 aa, Homo sapiens
CARHAAYCGGDCYSGGYFDYW

SEQ ID NO: 36338 - protein, 18 aa, Homo sapiens
CARGAYYGDNPPRFLDYW

SEQ ID NO: 36339 - protein, 18 aa, Homo sapiens
CARRGHSGPYFAYFFDYW

SEQ ID NO: 36340 - protein, 14 aa, Homo sapiens
CATGGGTTYYMDVW

(The sequence listing continues in the following parts.)
